United States Patent Application Publication US 2008/0034453 A1 - sequence listing, part 30

SEQ ID NO: 242401 - DNA, 365 bp, Glycine max
ggggtgagttgttgtctatctcttcttctctttgtgttttggctgtggacgtaaaataatggctctgtcttttggttttgggctcttgtcttcttcttcttcttcttcttctttatgtgttctccctccatcagaaacccacactttcatgatgaggccttctgcttcttctggtttgcgcatgatgcgtaccagtcgcattacctgttgcaccctttctcagtcttctaagccagcccgcaaaatccgtggtatcatgaaaccccgcaaagtctcccccgagatggaagacctcgtcggcgctcccgagatggctcgaacccaagtcctcaaacggatttgggcttacattaaagacaacaatc

SEQ ID NO: 242402 - DNA, 357 bp, Glycine max
gagaggaaaaatgttgattcgacgattgccttggacggcgatttcttttgccgcaccacttcccttctgtttcggcgctaccaatggacttcccattcgcaagcaacttaactcttctctcttctccttcttctgctccagctccggcgtcaatctccctctacaacctggtcacgaaacggatactcgtcactcgcagtctctgaaacccggtctttacctcgttggaacgccaatcggaaatctcgaagatatcacactgagggctattcgcgtgctgaactcggctgacgtcatactctcagaggacactaggcactctgggaagttgcttcatcactacaacatcaaaacacc

SEQ ID NO: 242403 - DNA, 360 bp, Glycine max
ggaggaagacaccaatcttctctccacgcccttcttgggtaaccgtctgaagtgcagcaatggcagatggattgcattcgcagcatccatcggtagttcagaagttatctggacagtcttatcttgtgtccaggcttgctcctaatcactccagaaactgttctaccactggtagttacttcaatggaggtttgcagtcttcaggtttggttccagtcacgggacacgcgccggctgacaaaggggtgtcgggatttttgttggatttcctgatgggcggagtgtcggcggctgtgtccaagacagctgcgggtccaatcgaacgagttaagttggtcatccaaaaccaggatgaaatga

SEQ ID NO: 242404 - DNA, 326 bp, Glycine max
ggccgccaccagcaggatcgcgtattcgtgattgtttccgaaaacccttgtctctgaaatcaacaccaaaatcgtgaagtgtactaagcgaagccattgcaggcgtgagaatggggaagaaagcaaaagggtcaaggaagggtaagaaggcatggagggctaacatcagcaccgaagagatcgaagatttcttcgaaaaatcaacaaaggaggctctttctggtggctctctccaggccgtttcgagcgattccctcttttatgaagacaagtccaaagatcgtgcggtgaagaagaagattgagaagcatagggagagagtgctc

SEQ ID NO: 242405 - DNA, 339 bp, Glycine max
  unsure (1)..(339): unsure at all n locations
gagggtttacaccgaggagacacaccttcagcagcagcagccatggttctcaaaaccgaactatgccgattcagcggtgccaagatctacccagggaaaggcatcagatttgttcgtggtgattctcaggttttcctgtttgctaactcgaaatgtaagaggtatttccacaacaggttgaagccatcaaagctcacctggactgcaatgtacagaaagcaacacaagaaggacattgctcaagaagctgtgaagaaaagaagacgtgctgccaaaaagccttactccaggtccattgtcggtgccactttgganggttatccaganaagagagctgag

SEQ ID NO: 242406 - DNA, 366 bp, Glycine max
tgatggacagggtctatcatttgatttgctggataagctcaattttgatactgatgacactggttccattgtcgtgtatgggggtggtgccttggtggctctgtggctaacatcagcggttattggcgcaattgattctatcccattgtttcccaagctgttggaagttgtggggcttgcatatacagtgtggttcacttcccgttacctgcttttcaagcaaaatagagatgaattgggtgctaaaatagaagagctcaagggacaaatttttggttcagaggataattgattgctctgaacggatgaattgtttgtgctgccacttaaaacaatgtacagttacagttaccgttgttttaattt

SEQ ID NO: 242407 - DNA, 316 bp, Glycine max
gagtaaagaagtaactaatcaaccacaaacctaaacaaccccttttgcctaaagctccttccttttctccaatggcaacctgggttttatcagaatgtggcttaaggcctcttccaccagtgtttccacggtcaacaagacccatttcgtgccaaaaaccttcaaagtctagatttttaagcacaaacaagggtgtgccagatctgaatctccaagcaagagggttaacatgctgtagttttagggatagaaagtgggaattgggagtgagtgctccactgaaagttgccaccaatgaaggagaggaagaagagag

SEQ ID NO: 242408 - DNA, 354 bp, Glycine max
gcacaagtttgttgagatagctagaagcaataagatgaaaatgaaagtgcttgttttgtttgttgctacagttttggtagcatatgaatgccatggctcagactaccagaagttccctctccaaatgaaaactgggtttggtgggcaatacagcaatgaggtggcatgtgccagtcggaggcttggcgtggaagcaaacaacgtagtcaagtggcaaactgttcctgcagcttgcggagagtacatagctgactacgttctaggagaccaatatagatcagattccaaaacagttaaccaacaagcttatttctatggcaaatccctcaaactcagcaacaaagatgtctttgt

SEQ ID NO: 242409 - DNA, 353 bp, Glycine max
gggttccgggggggggtaccgagtaggccgctgcaaatgccattttattttgctctacctcctcacttctagggttcgcagcttgtctctcaaacaatggcgctgttccttctctacgaatccgcttcgggctacaccctgttcgaggttcacggcctcgacgaaatcggccagaacaccgaagcggttcggaactccgtttcggacctcaacaggttcggcaaagtcgttaagcttcgctccttcaaccctttcacttccgctctcgatgctctcaaacagtgcaacgccgtctctgaaggcatattaactgatgagctgaggactgttttggagactaacctgcctaaagt

SEQ ID NO: 242410 - DNA, 363 bp, Glycine max
  unsure (1)..(363): unsure at all n locations
gaccgcgaaacgcacatttcactattcattctcgtttccctttcggtaatttccaattactagttactaatttctccatgctttcttcatcttacgcttaatccttatggtttcgtttaattgttgttctaattgctgcttgttgcagactgtgattgtttgttaactgaacttttcgagcaaaatgtctggacgtggaaaggggggcaagggtttgggaaagggaggagcgaaacgacaccgtaaggtgttgcgcgataacattcagggaatcaccaagcctgcgattcggcgtttggctcgcangggtggtgtgaagcgtatcagtgggctcatctacgaggagacacgtggcgtgctcaa

SEQ ID NO: 242411 - DNA, 316 bp, Glycine max
ggaacctttgcattctattcattcaagattcagcaagtgcgttttggaagcagagaccgaaatacttcgagatggcccgtacaaagcaaactgctcgtaagtcaactggaggaaaagctcccaggaagcagcttgcaaccaaggctgcacgtaagtctgcaccaacaactggtggtgtgaagaagcctcatcgttatcgccctggaactgttgctcttcgtgagattaggaaataccagaagagcactgagctcctaatcaggaagcttcctttccagaggttggttcgtgaaattgcccaagatttcaagactga

SEQ ID NO: 242412 - DNA, 313 bp, Glycine max
ggattacaacttcaattgaatcacttggcatcgcttctcctctctcccaagaaagaatcatcaatggcgattgaacacgaagacgatctcaaagacgagaagaaccctcgacctctcgacgaggatgacatcgccctcctcaagacctacggtttgggaccttactccacaagcataaaaaaggcggagaaggaaatcaaagatatggccaagaaagtgaatgacttatgtggtataaaggagtctggatacgggtttagctgcaccaagccagtgggatcttgtttctgataagcaaatgatgcaggaggag

SEQ ID NO: 242413 - DNA, 369 bp, Glycine max
ggcaagtgtgagtgatatttgagcttaaaccctagccgctcttctcttcattcttcactttggaaacaatcatatggcgttctgtaataaggttggaaatgtcttgaggcagggtgctgctcgcagcacacacgcccctgttgcgtccatgcttaattacatccgctgcatgtcttcaagcaagcttttcattggaggcctttcatatggagttgatgaccagtctcttaaggatgcattttctggctttggagatgtggttgatgcaaaagttataactgatagagacagtggaagatcaaggggatttggatttgtcaacttctccaatgatgagtctgcaagttcgggactctctgcaatggacgg

SEQ ID NO: 242414 - DNA, 355 bp, Glycine max
ggcacaagtttgttgagatagctagaagcaataagatgaaaatgaaagtgcttgttttgtttgttgctacagttttggtagcatatgaatgccatggctcagactagcagaagttccctctccaaatgaaaactgggtttggtgggcaatacagcaatgaggtggcatgtgccagttggaggcttggcgtggaagcaaacaacgtagtcaagtggcaaactgttcctgcagcttgcggagagtacatagctgactacgttctaggagaccaagatagatcagattccaaaacagttaaccaacaagcttagttctatgctaaatccctcaaactgcacaacaaagatgtccttgt

SEQ ID NO: 242415 - DNA, 407 bp, Glycine max
ccggctcgacccaagcgtcaggggaggaaaggaaagggttttgtagagggagagaattccaaaccaaaaatccgaaataaataattttttttttttaaaaaaaaagaaccgggtgtgggtgttgttggtgttggcggaggcagatcggagatctgtgatagatatagatggagggagttggggcccggcttgggcggtcctcgacccgctacggaccggccacggtgtgcactggaccggtccggaagtggaagaagaaatggatccacgtgtccccttcttctgcttcctcgaagtccaacgccaataatcatcacaaccacgcttcccatgcctctcatcttctcctctacaagtgcgaccctctcacgcacagccagaacaccgccactactaacaacgccaac

SEQ ID NO: 242416 - DNA, 379 bp, Glycine max
  unsure (1)..(379): unsure at all n locations
ggtgtcaaactctatttttgtttcattcatacaaatacaaattaataaaaacaacaggttctttgctccttgtggctctcatcaggctctgatcacacttcgatggcaaagtttggattatctccactcttggtgctttccatattgttgctgatcatgagtggtggtgcagtgagaggccaaagagaaatggtgcctgccttgttcatatttggtgactctctcattgacaatggcaacaacaacaaccttccttcctttgctaaggccaactattacccttatggcatcgacttcaatgganggcctaactgtccccttcccaatggtacactatggttgatgaaatagctgaactgcttggacttcccttgattcc

SEQ ID NO: 242417 - DNA, 342 bp, Glycine max
gatccaactctctaaacaacacattaacctttctcattccccatctcctcaccttattcagccactgcgaatttctagggttccgaaatggacgctggcggaaagatcaagaagggcgccggaggaagaaagggcggcggccctaagaagaagccggtttcaaggtccgtcaaggccggtctccaattccccgtcggaagaattggccgttatttgaagaaaggaaggtacgcccagcgtgtcggtaccggtgctcccgtttacttggccgcagttctcgagtacctagctgctgaggtgcttgagttggctgggaatgctgcacgtgaccacaagaagaac

SEQ ID NO: 242418 - DNA, 404 bp, Glycine max
gactactaccaagtgaaaaagcaactaagcatagtgtgtaagaaagggagaaaaacaagtgctgtgtagagagaaaaatggctaggtggtgcatgatcttggtggttcttgctcttgccgtggttgcaagtgccagaaacatgcccaatgacgctggtttggaggaccagaagaacttccttgggtatgggttttcgggagttggcaacaatggccttccctttggtggagtgggttctgggtttgatggtaatatgggtgggccttctgggctcggaggacttggaggattcggtgggcctggcgggcttggcggactcggaggtcctggtaaccgttaagggaccaatctcttctctcccttgagagttgagaccacacaccttcgtgtttctttcggtcgc

SEQ ID NO: 242419 - DNA, 330 bp, Glycine max
gacatcacatttcgttgcgcctctgttctctgtcactgctgcgtctctcgtaaccatgcctaagcaaatccacgagattaaggatttccttctcactgctagaaggaaggacgcaaggtcggtgaagatcaagaggagcagagatgtggttaagttcaaggtcagatgctcgaagtacctctagacactttgtgtgtttgacccagagaaagctgataaattgaagcaatctcttcctccaggtttgagtgttcaagacctgtaaaggtacacggggagagaccaagaagaagcaattcattggttcttctgaacgtcgtttctctgtag

SEQ ID NO: 242420 - DNA, 301 bp, Glycine max
ggaacctttgcattctattcattcaagattcagcaagtgcgttttggaagcagagaccgaaatacttcgagatggcccgtacaaagcaaactgctcgtaagtcaactggaggaaaagctcccaggaagcagcttgcaaccaaggctgcacgtaagtctgcaccaacaactggtggtgtgaagaagcctcatcgttatcgccctggaactgttgctcttcgtgagattaggaaataccagaagagcactgagctcctaatcaggaagcttcctttccagaggttggttcgtgaaattgccca

SEQ ID NO: 242421 - DNA, 315 bp, Glycine max
gaggccagttcccaaaggtattgtttatgggaagcccacaaaccagggtgttacccaactgaaatttcagcgtagcaagaggtcagttgctgaggagcgagctggacggaagctgggtggacttagggtcctcaattcttactgggtgaatgaggactctacttataaatactttgaggtgattctggtggatgtggctcatgctgctattagaaatgatcccagaatcaattggctcgccaatccagtgcacaagcacagagagctgcgtgggctcaactctgctgggaaaagcaacaggggtttacgtggcag

SEQ ID NO: 242422 - DNA, 313 bp, Glycine max
ggaaagaatggaatgaagaaaaagaagtgcttaggagtgattgctgcagcaagttggaggagtaaggtaacaaagaaactccaaattgaatccaaggtaaccatctcagcatgtggctctctcaacactcctcctctaatgatttctagtggaacaaaaaatccaaacattggaaggaatctccatctccagcctgtccaatttgcatggggttacttcccagaagacatgacaacaaacttcagcggcaacaactacgatgggggtatcataacttcgatccacatgaatatgcaaaagattccaacccaaa

SEQ ID NO: 242423 - DNA, 317 bp, Glycine max
tggggtaaatgccttcctaagatgtcatggatctggctgtattattatgcgtctcaacacggtcactgcggggttcggttgcgggacaatggaattataatcgactagttatgaacttccacagggcatcatgcactcatgttgaggatatcatcataaaagtagtcatacttcactagattcgccatatgaccactgctttctcctgcctcacgaacatcttccatgactgtgctgttcatacttgtgatgcttcactgttgctggactccacaataaggagcttgtctgacaagcgaacaaattcaaacctttgg

SEQ ID NO: 242424 - DNA, 309 bp, Glycine max
gaaccaggaccaaccaggacttggaaccaggttaattaaggagagggtatagtatggcccagtctagtggcaaaactttggtgcagtggttggtagcagcattgctcattgccttgttgggtggtgcacaagctgttgcaatatgtaacatagactcaagtcaattaaacttgtgtcgtgctgcagttactggtcaaaaccctccaccaccggatgagaaatgttgtgcagttattcgccaagccaatttgcgttgcctctgcagttacaagtctatcctaccttcattcggaataaaccccaaaaatg

SEQ ID NO: 242425 - DNA, 402 bp, Glycine max
ggaagagtgaagagaatggctcccaagggtttaacctttctggctgtgttaatatgcgtttcagcactgtcactgagtccttctgttgcgggggaagggcaaaataatggccttgttatgaacttctacaaggaatcatgccctcaggctgaagacatcatcacagaacaagtcaagcttctctacaagcgccacaagaacactgctttctcctggctcaggaacatcttccatgactgtgctgttcagagttgtgatgcttcactgttgctggactccacaagaaggagcttgtctgagaaggaaacagattgaaaccttgggttgaagaaatttcaggtacattgagaccatcaaagaagctttggaaagagaatgccctgcagttgtttcatgtgctga

SEQ ID NO: 242426 - DNA, 285 bp, Glycine max
ggaatagtgaagacactggctctcaagggtttaacctttctggctgtgttaatatgcgtttcatcattgtcactgagtgcgttctgttgcggcggaagggcaagatcatggtcttgttatgaacttctacaaggaatcatgctctcaggctgaagacatcatcatagaacaagtcaagcttctctataagcgccacatgaacactgctttctcctggctcacgaacatcttccatgactgtgctgttcagagttgtgatgcttcactgttgctggactccacaag

SEQ ID NO: 242427 - DNA, 313 bp, Glycine max
agccgtcagtacagcaccgaaaggggaacagagcggacaatggctccctcgggttcaaactttctgtctgccttactatgcgtttcaccactgtcactaggtggatctgttcccgcggaatggcataatcatggccttgttatgcacttctacagggaatctttccctctggccgaagacatcatcatcttaccagtcactcttcgctacacgctccacatgaccactgcttgtctcgtggctcacgaacatcttccatcactgtgctgttcacacttgtgacgcttcactgttgccccactccacaatacgg

SEQ ID NO: 242428 - DNA, 352 bp, Glycine max
ggagcaagagtgaagagcgaagagaatggctcccaagggtttaatctttttggctgtgttatgcttctcagcactgtcactgagtcgttgtcttgcggaggataatggacttgttatgaacttctacaaggaatcatgccctcaggctgaagacatcatcaaagaacaagtcaagcttctctacaagcgccacgagaacactgctttctcctggctcagaaacatcttccatgactgtgctgttcagagttgtgatgcttcactgttgctggactccacaagaaggagcttgtctgagaatgaaacagatagaagctttgggttgagaaatttcaagtacattgagaacaat

SEQ ID NO: 242429 - DNA, 266 bp, Glycine max
ggaggtgcagttgctgcagagtgaggcgttcgattaacgtttggcgatcacagaagagaagggaatggagttttctcaagatgattttgatcggttactgttattcgaacacacgcgaaagactgctgaagcaaactacgcagagaatcctcaagatgctgataatctgaccaggtgggggggagctttgatcgagttgtcgtcattccacgctcctagggatgccatggcgattactgatgatgccctttcgaccctggaggagt

SEQ ID NO: 242430 - DNA, 403 bp, Glycine max
ggtagttccaccgagtagcaacaatgtcgaagcgaggtcgcggaggatcggcgggaaacaagttccgcatgtcgctgggtctgccggtggcggcgacggtgaactgcgccgacaacaccggcgcgaagaacctctacatcatatcagtgaaggggatcaagggtaggctgaaccggttgccgtcagcttgcgtcggagacatggttatggccaccgtcaagaagggaaagcccgatctccgtaagaaggtgctgcccgccgtcatcgtccgccagcgcaagccttggcgccgaaaggacggtgtttacatgttactctcaagataatgctggtgtaaccgtgaatcccaagggtgaaatgaaaggttctgctatcactggtccaattgggaaggagtgtgctg

SEQ ID NO: 242431 - DNA, 359 bp, Glycine max
gattgtatatcatttacaatttcaatctctctctctctctgtctctctctctctagacttagattttgtgaatggctgaggtggaagagggacaggtcatcggcgtccacaccgttgatgagtggaagctgcaactccagaatgcaaaagactccaaaaaactgattgtggtggattttactgcttcctggtgtggtccatgccgttttatggccccagttcttgcagagattgcaaagaaaactcctgaattgatcttcctcaaagtggatgtggatgaagtgaggcctgttgctgaggaatattccattgaggccatgccaaccttcctcctcctgaaagatggcgagatcgtggac

SEQ ID NO: 242432 - DNA, 341 bp, Glycine max
ggagctggcctgggctgtgatattggggcagcgcagcaatacgtaacaagttctatcattgaggaggtttccggtctccgaaaatgaacgacgcagatgtctcgaagcaaatccagcagatggtgcggttcatccgccaggaagctgaggaaaaggccaacgagatctctgtctccgccgaagaggaattcaatatcgagaagctgcagttggtcgaagccgacaagaagaagatcaggcaagaatacgaacgcaaagagcgccaagtcgaaattcgcaagaagattgggtactcgatgcagctgaatgcttctcggattaaagttcctcaagctcaagat

SEQ ID NO: 242433 - DNA, 382 bp, Glycine max
ggcggcataaaggaccaaccatgtcgcctagtttcgtcttcgacccgcctagcgacgaagaaatcgaacactctgaacacgaagaagaagaagaatccgaagaagaaccagagtcaggatcaggaacaggatcagaatcagagtcagaaggagaaggagaagaagaagaagggcacgaagaagcgcgggttccgaagaagaagaagaagaaaacgcagtctccatgggactttgctaaatacacggaatcagtggcggaggaacacgctcgcaggagcacaacctcggtcgacgagaaaatctccaaagcactcaaacaaggttcaaggcggctcgttgctgagcctgaccacagctccgagtccgaacctgatgaacagga

SEQ ID NO: 242434 - DNA, 308 bp, Glycine max
ggttcaaagcacgccgtgtttcgctatctctcccattctctcgcatctcaatacccttttgatttgtgaaacgaaagcacacatgcttgatcaggtccaacaccctacagtcatggacaaggttgctggccagctccatctccgttctggtgtttctggtattacgagttatgaaggagcctactgccaccccacaatgtaccatagaccctcttttgggaattactcgaatgctgcattgcactaccctgtgatgccctcatgcaaagctacgatggatttgtctgctgctgcaacaactgcctccc

SEQ ID NO: 242435 - DNA, 308 bp, Glycine max
gaaaataggaaagacacccacaagtcatcaaacttcgattgagtttcaaagagatgggtggtagtgtggtacattgtgttgatcaaggatggaacaaaagaagtttgtggcactattaatggtggtggtggtgatggcttcttctatgtggaaaggatccaaaggtcttagtctctgtaacatggatgaagatggattggaggcttgcaagccctcagtgactcagccaaacccagttgatccatcccctgattgctgcaaggctctggatggtgctgacttgaagtgcctttgctcctacgagaact

SEQ ID NO: 242436 - DNA, 320 bp, Glycine max
gaatctagtggaagagtgaataagagatatcaatatattatgataatggagggatacaataagaaggttatgattgtggggatggtgttgggcatggccatgattgggatggcctatggccaatactcgttttgtcgcatgcccagcgatgggttggcggcgtgcaagccgagtgtgagtggggaccatcctgctgatccctccactgcttgttgctcagccattgccatggctgatcttaaatgcttctgccgcttcaaggattcgggccttctctctatgtatggtgttgatcccaacaagtgcatggaacgccctgt

SEQ ID NO: 242437 - DNA, 285 bp, Glycine max
gaacaacatcactctaagtaaaagaatctcggtgttgtcatcacacctcgctagatccagcccgatcatggtctcagacaagcaagcggctcttgccgtcactccctctgatgctgatgctcctaccatatttgacaagatcatccatacagatgattccttctacagtggtttatgacgatgacaaggtgcttgccttcaaggacataactcctcaagctcctacacatacagcgtatccctcctaaaatcacagacgggttaagtggtctatccaacgctgat

SEQ ID NO: 242438 - DNA, 300 bp, Glycine max
gatccacaacgatgagcgtaccgaaggcagtggcagcgacgatccggctcacggtgccggccggaggagctcggccggcgccaccggttggaccggcgctgggtcagtaccggctgaacctgatggcgttctgcaaggacttcaacgcccgcacccagaagtacaaggcggagacacccatggccgttacgataacggcgtacaaggacaacaccttcgagttcaccgttaagtcgccgccggtgtcgtggtacctgaagaaagccgccggcgtggaatccggtagcagccggcccggtc

SEQ ID NO: 242439 - DNA, 310 bp, Glycine max
cacaaaagggggtcctagtgtgtgattgtttgttgttgtaactcgttcttcttcttttgttgttctgtgtttgtgtgtgttttttctctcacctgaaaatgtcttgctgccgtggtaactgtggttgcggaagctcctgcaagtgcggcaacggctgcggaggctgcaagatgtacccagacttgagctacactgagtcaaccaccaccgagaccttggtcatgggagtggcacctgttaaggctcaatttgagggtgctgaaatgggtgtgcccgctgagaacgatggctgcaaatgttgaccaaactg

SEQ ID NO: 242440 - DNA, 427 bp, Glycine max
accaagcgttaataccggtgccaaaaaaacaaaaaaaggaatttaacccacaattttttggaaaaaggaaacctcaaggaaaggattcaattaatcacaagccaaccggaaatattttccaatttagccaacataaatttgcaacaaatgttgttgaaaaatgtttggagtatggtgatgctactgatcggcagttgttaattgcggagattgttggacatgacaaacaaaatgataatttattgacaatgatgaaagaccaatttgcaaattatgtgatccagaaggtttttgagatctgttctgaaaatcagcgagcaacattactttctcgcataagacttcatgctcacgctttgaaaaaattcaacttatggaaaacacattgtggctcggtttgaacagctacttggagaagagaacaaac

SEQ ID NO: 242441 - DNA, 402 bp, Glycine max
aaacaaagcgagagcattccattgttgttatattgtattgtagccggagaagaagagaagagatagcggcgaagaaagaaagatgacggaggcatatataaggaagaagcccgggatggcgagcgtgaaggacatgccggttctccaggacggtccaccaccaggcgggttcgctccggtccggttcgcccggcgcatccccaacaagggccccagcgccgttgccatcttcctcactgctttcggcgctttctcttggggcatgtaccaggtcggccagggcaacaagatccgaagggcactgaaggaagaaaagtatgctgcccggcgattcatacggcctgtgctacaggctgaagaggatgagagatttgttaaagagtggcataaatatctcgagta

SEQ ID NO: 242442 - DNA, 375 bp, Glycine max
aaacaaagcgagagcattccattgttgttatattgtattgtagccggagaagaagagaagagatagcggcgaagaaggagagatgacggaggcatatataaggaagaagcccgggatggcgagcgtgaaggacatgccggttctccaggacggtccaccaccaggcgggttcgctccggtccggttcgcccggcgcatccccaacaagggccccagcgccgttgccatcttcctcactgctttcggcgctttctcttggggcatgtaccaggtcggccagggcaacaagatccgaagggcactgaacgaagaaaagtttgctgcccggcgattcaatacggcctgtgctacaggctgaagaggatgagagatttg

SEQ ID NO: 242443 - DNA, 364 bp, Glycine max
gtcaatgatgcaacaaaccaagttgcggatgatccaaaaagattatctcttatggaggagcagctcaacaacatcttacgtggatgtgatggtgagaaagtagccaggaccagtttctccatgggttccacccatatggatcggcggcttcaccaaatgttgttcgctgatcgggattatgaaagttatgcggtagcaagagaagttgatagtcctccctctttaaggccaagaatcacaatagaacgttgtgaggaaaaagggtactcagtggtcagtgtcaagtgcaaagatagggcaaaactcatgtttgacattgtttgcactcttactgatatgcaatatgttgttttccatgccacag

SEQ ID NO: 242444 - DNA, 288 bp, Glycine max
gaagagagcatgcatatgaacatgatgatgaaaacagtgtgtgggtttgcaatattgatagtggcagtgcatcttcaggtggaagtgagtccctacgcacacgctgtgacgtgtatccctgtggagctgagtccatgtttgggggcaataacctcattccaactatcatcaacaatttgttgccacaaggtgaaggaacaaatgcaatgccactgttgttacctcaaaagcccaagtccaatgccatatgccaattctcctgtctccagaaaggttgctagcccttgt

SEQ ID NO: 242445 - DNA, 272 bp, Glycine max
ggcagtttcaaattttcttttccttcactttcccgagaaaaaaataacacttgtcactttcttcactacgttctcacttcgatatggctcgtacgaagcaaaccgctcgcaagtccaccggtggcaaggcgccacgtaagcagctcgccaccaaggccgctcggaagtccgctccggcgaccggaggagtgaagaagccccaccgcttcaggccgggaaccgtggcgctgagggaaatcagaaagtaccagaagagcaccgagcttctcatc

SEQ ID NO: 242446 - DNA, 358 bp, Glycine max
ggtaacgactcagtcaaacactctgtaactctttattttattttctttctttctttctccgatcgcatagctcgctcgcaaccaccatgccttcccgaagaagaactctcttgaaggtcatcattctcggtgacagtggggtggggaagacatctttgatgaaccagtatccttcggtttctgtctacaaactccgtgttctttacttttttttttaatttgcgtttcaatttgttttctattgtttagtactgcatgaaaactatgtattttcccctaacatacgcaatttagatatgtgaataagaagtttagttatcagttcaaaggaaacaatggaaccgaatttttaacccaa

SEQ ID NO: 242447 - DNA, 372 bp, Glycine max
gagtcacaggtgtttgcaatactagcgatagctgataagagagataccaacaagaaaagaaaaaaagaagagttgagattccctttgaagaaaagatggcatcccataggcaaagctatgaagctggtcaaactaagggccgaactgaggaaaagacgaaccagacgatgggcaatattggagagaaggctcaagctgcaaaggagaagacccaggaaatggcccaagctgcaaaggagaagacccaacaaacagcccaagctgccaaggacaagacttgcgacacttcccaagcggcaaaggagaagacccaacaaaatacaagagctgctcaacaaaagacctcagagatgggccagtccacgaaggaat

SEQ ID NO: 242448 - DNA, 390 bp, Glycine max
gatcgcatttcatagcactcaccctcattaccaacacgaaagcatagccaaaaccttttttcgaagtctctgattttcctaatggctccggcaaaggcagagaagaagccggcggagaagaagccagcggcggagaaggcaccggcggagaagaagccgaaggcggagaagaagatctcgaaggaaggagggagcgagaagaagaagaagcgcacgaagaagagcgtggagacctacaagatctacatcttcaaggtcctcaagcaggttcaccccgacattggtatttccagcaaggccatgggcatcaataacaagcttcatcaacgacatcttcgagaagctcgcccaggaagcgtcgcgtttggctcgctacaacaagaagcccac

SEQ ID NO: 242449 - DNA, 374 bp, Glycine max
gggagtggaagtagtagcaagtacgtcgtatatgtggttgatcttttgctggttgtgtgctttgttccttccaattgtcagatctgaatcaccggactcactctccacactcactcacactgaatggcttctgaaggcgaccatcaccaccaccaccaccaccatcaagatcacgatcatcatcatcatgatcatgatcaccatcatcatcacgatggagagggagagaccaactcatgggtaggtaaggatgggaaggtgtaccatagccacgatggtctggcgccgcattctcacgaaaccaattaatcccccggctacttcaccagaagagctccactgcttctcaacagaaacttcaacgaaagagcctt

SEQ ID NO: 242450 - DNA, 332 bp, Glycine max
gtcattgaagatgccccatcttatcctggagtggagcatgtaggtggagatatgtttgcgagtgttccgaaagctgatgctatttttatgaagtggatttgccacgattggagtgatgagcactgcttgaagtttttgaagaactgctacgaggcactaccagacaatggggaggtgattgtggcagaatgcattcttccaatggctccagactctagcttggccacaaaaggtgtggttcacatcgatgtgatcatgttggcacataatccaggtgggaaagagagaacagagaaagagtttgaggctctggccaaagggtctggattcca

SEQ ID NO: 242451 - DNA, 355 bp, Glycine max
gacacacactctgtcactcagccaccattctactacactcctctctctcactctcactctctgctccgtgatagctgtgggacgtttttctctccatctcgaaacaccatctctgcctcattcccaacccatcaccattctcatggctgcactagctctagcacttcttcttctggctttcaccggcacttcaagtgctacatggtgcgtttgcaaggatggaagcgacgcgatcctgcagaagacgttagactatgcttgtggagctggtgctgactgtaaccctcttcacctaaacgggccttgttttcagcccaacaccgtcaggggccattgtaactaccccgttaacagc

SEQ ID NO: 242452 - DNA, 368 bp, Glycine max
gagtggaagagtgaataagagatatcaatatattatgataatggagggatacaataagaaggttatgattgtggggatggtgttgggcatggccatgattgggatggccaatggccaatactcgttttgtcgcatgcccagcgatgggttggcggcatgcaagccgagtgtgagtggggactatcctgctgatccctccactgcttgttgctcagccattgccaaggctgatcttaaatgcttctgccgcttcaaggattcgggccttctctctatgtatggtgttgatcccaacaagtgcatggaactccctgttaagtgcaaggttgtcgactctttccactgctagattcattagagggggcact

SEQ ID NO: 242453 - DNA, 309 bp, Glycine max
ggctgcataagaggagaggcttaaggcttttctttacactgtccaaattgtgaattatttcaagaattccttccacaccttcaaagttagaagccatggaaacttctcatcctctttctattgaaagcttctcttatagttggttagtgaacctgaagccatcactagaaagcctagatggctccctcagaacttcccttgatgcttctgatgaaacttcttccttcattgaaatggatccaagaatgacaccttctaaaagattcttcagaaactcccaagatttcaaatttgacttcccaatctcgc

SEQ ID NO: 242454 - DNA, 399 bp, Glycine max
ggaacctttgcattctattcattcaagattcagcaagtgcgttttggaagcagagaccgaaatacttcgagatggcccgtacaaagcaaactgctcgtaagtcaactggaggaaaagctcccaggaagcagcttgcaaccaaggctgcacgtaagtctgcaccaacaactggtggtgtgaagaagcctcatcgttatcgccctggaactgttgctcttcgtgagattaggaaataccagaagagcactgagctcctaatcaggaagcttcctttccagaggttggttcgtgaaattgcccaggatttcaagactgatctgcgtttccagagccatgctgtgccttcattgcaagaggctgctgaggcataccttgttgggctctttgaggacactaact

SEQ ID NO: 242455 - DNA, 335 bp, Glycine max
tataaaaaattccttggttccgtatagtctttttatactatatttaaagagttacttgtaacgtaatacaaataaactcgagtatggatattgtcaggaagactatttgactttgttttttcaaccccccaataaattcgaatattatggttatgacactgtttttttcagatttcatttttctataatagagagttctattatagaaatttcgattgtaaaatacaataaaattggattcgatactaaacataaaatagatatctatatagatagataatttgaaacaaaatcaattaaaatatggaaaaggtactctaagggggaatttttgt

SEQ ID NO: 242456 - DNA, 345 bp, Glycine max
accacgcgtccagccaggcgttcgtaaaggcgccaaagggacaccgaaaggggaatttaaaagatttttacaagggccctttccgagaatccgttagtttcaaaaattaaaacgattctttccaccgagaccatggacatcccggaaggcgttagcctcaaagttcatgcctaggtcatcgaagttgaaggcccccgccgaaaattggtgcgagacttcaagcatttgaatctcgattttcagctcattactgacgaaaactgtaaaagaaagctgaaaatcgacgcgtggtttggttctcggaaaatatcagccgccattcgcatcgccatgagccacgtggag

SEQ ID NO: 242457 - DNA, 275 bp, Glycine max
ggagcaagagtgaagagcgaagagaatggctcccaagggtttaatctttttggctgtgttatgcttctcagcactgtcactgagtcgttgtcttgcggaggataatggacttgttatgaacttctacaaggaatcatgccctcaggctgaagacatcatccaagaacaagtcaagcttctctacaagcgccacaagaacattgctttctcctggcccagagacatcttccatgactgtgctgttcagagttgtgatgcttcactgtttctggact

SEQ ID NO: 242458 - DNA, 359 bp, Glycine max
gatgatgagaggttctttgctgaccccaatgacagtttgatagacaggagatcagagtgcacatctctttcatcggaaggttatctttctgataatccatggccttttggaaggaaatatgtggaggttctcaatagttctaaagctgattctgctattagcccaggatgtacaaagtctgaaattcctcagaaggtgttggaatctttgtttaatattcccaaaagcactgaacatgacaaagataccatgaattggagaaatgtagtaaagaaaatccagtctttgggacctgggttcaatgtttctccgcatgttgcagaatcccagcaacatacgtgtgccaaaggagatgaata

SEQ ID NO: 242459 - DNA, 321 bp, Glycine max
ggttctagtgtgtgattgtttgttgttgtaactcgttcttcttcttttgttgttctgtgtttgtgtttgttttggggctcacctgaaaatgtcttgctgcggtggtaactgtggttgcggaagctcctgcaagtgcggcaacggctgcggaggctgcaagatgtacccagacttgagctacactgagtcaaccaccaccgagaccttggtcatgggagtggcacctgttaaggctcaatttgagggtgctgaaatgggtgtgcccgctgagaacgatggctgcaaatgtggaccaaactgctcctgcaacccctgcacttg

SEQ ID NO: 242460 - DNA, 365 bp, Glycine max
gagcatatatatcaataatctattttatactatacctacattttgataattttctttgtagttgatagccatggctaggcgtggaaagcttgaggttgacattgatctcaagtccaacgcagacaagtactggcaaacccttaggaattctactgaaatattccctaaggccttcccacatgattacaaaagcattgaggttcttgagggtgatggcaagtctcctggttctatccgccacataagttatggtgaaggttcaccacttgtgaaatcatcctttgagaagattgaggctgttgatgaggaaaagaaggtagtgtcgtacactatcattgatggggaactccccaacaactacaaac

SEQ ID NO: 242461 - DNA, 399 bp, Glycine max
ggaacctttgcattctattcattcaagattcagcaagtgcgttttggaagcagagaccgaaatacttcgagatggcccgtacaaagcaaactgctcgtaagtcaactggaggaaaagctcccaggaagcagcttgcaaccaaggctgcacgtaagtctgcaccaacaactggtggtgtgaagaagcctcatcgttatcgccctggaactgttgctcttcgtgagattaggaaataccagaagagcactgagctcctaatcaggaagcttcctttccagaggttggttcgtgaaattgcccaggatttcaagactgatctgcgtttccagagccatgcctgtgcctgcattgcaagaggctgctgaggcataccttgttgggctctttgaggacactaac

SEQ ID NO: 242462 - DNA, 376 bp, Glycine max
ttcccgggtcgaaccacgcgtcagaccaagcgttcgtaacggtgccaaaaaacgacagaaaggggaattagcaagaatgaagagcgaagagaatggctcccaaaggtttaatctttttggctgtgttatgcttctcagcactgtcactgagtcgttgtcttgccgaggataatggacttgttatgaacttctacaaggaatcatgccctcaggctgaagacatcatcaaagaacaagtcaagcttctctacaagcgccacaagaacactgctttctcctggctcagaaacatcttccatgactgtgctgttcagagttgtgatgcttcactgttgctggactccacaagaaggagcttgtctgaaaaagaaacaga

SEQ ID NO: 242463 - DNA, 308 bp, Glycine max
ggaacgtgatcgatctcgttaccagttgccacactacagcgacattccccctacacccgtttgcgtggttgtctgcgaagagttggcgactaagaggagcgttggaacgtttaatgagggtgatttgaaagggaagagggtgttcgtgagggtcgatgtgatgttaccgttggatgactgccgcaacatcgttcaggactctgtagtgcgtgctgctgttgtcaccatcgagtacttaaccggtcatggagccagagtgatcctattcgagcccatgggacctcctatcggtgtaattgctagtgaca

SEQ ID NO: 242464 - DNA, 347 bp, Glycine max
tgatcaattttataagattgaatcgactaaaaaatgaaatgaatcatttcatattgatagtattgctatgcttagtcccgaaagaaccagatttcgtaaacaacatagaggaagaatgaaaggaatatcctatcgagggaatcatatttgcttcggaagatatgctcttcaagcacttgagccagcttggataacatctagacaaatagaagcgggacggcgggcaatgtcacgaaatgttcgccgaggtggacaaatatgggtacgcatatttccagacaaaccggttacagtaagacctactgaaacacgtatgggttcaggaaaaggttctcccgaatattggg

SEQ ID NO: 242465 - DNA, 340 bp, Glycine max
gaccttgttaaggagagaatatagtatggcacactctagtggcaaaaaattggttgagtggctggttgcagcattattgttcattgccttgttgagtggtagtgcacatgctgttgcaatatgtaacattgactcaagtcaactgaacttgtgtcgtgctgcagttactggtcaaaaccctccaccacctgatgagaaatgctgtgcagttattcgccaggccaatttgcgttgcctctgcagttacaagtctatcctaccttcatttggaattaaccccaaaaatgctttggccttgcctgctaaatgtggtctacaattgcctcctaattgttgagtg

SEQ ID NO: 242466 - DNA, 443 bp, Glycine max
aaccaagccttagaacaagccttcgttacggctgcaaaaagacaacaaaagggggtccagtatccgagagcatggcaattgctcgctatgttaacccacctgaaaggtgataacactttgtatggatcttctttgattgaacatgcccacattgaacaatggattgatttttcatcattggagattgatgctaatattatcaagtggtatgccccaagagttggacgaggaccatatcttcctccagctgaggaggctgcaatttctgcactaaagagagctttggctgctttgaacactcaccttgcttccaatacttacctggttgggcattctgtgaccctggctgacatcataatgacatgcaatttaaaatttgggttttgcaaacaccctggttaagtgctttacctctgagtttcctcatgttgagagatactttt

SEQ ID NO: 242467 - DNA, 310 bp, Glycine max
ggatcctttgtattctattcttcaagattcaggtactgcgtttcggaagcagacacacatggctcgtatgaatcaaaccgctcgtaagtccacacgaggaaaggctcctatgaagcagcttgcaaccatggctgcacgtaagtctgcaccaactactggtggtgttaagaagccccaccgttatcgtcctggtaccgttgctcttcgtgagattaggaaataccagaagagtaccgagcctttaatcctgaagctcccctccacatgctggttcgtgaaattgctcacgacttcaagactgatctgcgtt

SEQ ID NO: 242468 - DNA, 403 bp, Glycine max
gagagacgcagatatctgtaatttgtgtctgctcactcgctcttctccgccacttctgaatctattgaatcaacaatcatgtcggacgaagagcaccatttcgagtccaaggccgacgccggagcctccaaaacctaccctcagcaagccggtaccatccgcaagaacggctacatcgtcatcaaaggccgcccctgcaaggttgtggaagtttcgacttccaaaactggaaagcacggtcacgctaagtgtcactttgttggaattgatattttcactgccaagaaacttgaggatattgtgccctcttctcacaactgtgatgttcctcatgtgaatcgtactgattaccagctcattgatattgctgaggatggatttttgagtctgcttactgaaaatg

SEQ ID NO: 242469 - DNA, 326 bp, Glycine max
atattccgagaatgtaccactccagtgccgttttgcttcgtgacggtcgcgttctggttgctgggagcaaccctcacatttattacaaatttacgaatgttttgttcccaacggagttacggttggaagcgttttctccttggtatcttgagcctggattctctagcgtgcgtcccacaatagtgtttcctgcgtcccaaacaaaactcaagtacggtcagacgttgaggcttcggtttgaggtgatgagcgcgactttggttggggattcggtgtcggttacgatgctgtcgccgccatttaacacgcactcgttctccatgaat

SEQ ID NO: 242470 - DNA, 396 bp, Glycine max
ggttctagtgtgtgattgtttgttgttgtaactcgttcttcttcttttgttgttctgtgtttgtgtttgttttttcgctcacctgaaaatgtcttgctgcggtggtaactgtggttgcggaagctcctgcaagtgcggcaacggctgcggaggctgcaagatgtacccagacttgagctacactgagtcaaccaccaccgagaccttggtcatgggagtggcacctgttaaggctcaatttgagggtgctgaaatgggtgtgcccgctgagaacgatggctgcaaatgtggaccaaactgctcctgcaacccctgcacttgcaagttaagtgtttggagagcaaccttcaagcagagatagcccttaattaggaataatgataaactattaatgtg

SEQ ID NO: 242471 - DNA, 390 bp, Glycine max
gacttcttcgttttcgacgatccccttctccttctctctctctttttcgcctcattccattttcagctatcaatggctccagtagcagcagcatcttcagattcaatcaagccaagagatgtttgcatcgttggtgttgcacgtacaccaatgggtggatttcttggtactctgtcatctctatctgccaccaagctaggctctatagctattgaagctgctcttaaaagggccaatgttgatccatcccttgtggaagaagtattttttgggaatgttcttagtgctaatttggggcaagctcctgcaagacaggcggccctgggggcaagaatatccaattcagttatctgcactaccgttaacaaagtttgtgcatcaggaatgaaa

SEQ ID NO: 242472 - DNA, 363 bp, Glycine max
gggcgaggtagccagagagtgatacaatacagagtgcgttgttgctccttcgccacaactccctgccaacatgggtatctccagagattctatgcacaagaggcgtgccactggtggcaagaagaaggcatggaggaagaagagaaagtatgagcttggtcgccagcctgctaacactaagctgtcaagcaacaagacagtcaggaggatccgggttagaggtggaaatgtgaagtggagggcactgagattggatactggaaattactcctggggaagtgaagctgtaactcgcaagactcgtatactagatgtggtttacaatgcctcaaacaacgagcttgtgcgtactcagactcttgt

SEQ ID NO: 242473 - DNA, 323 bp, Glycine max
ggacatcaaagagctctactacaagagaaacagtgttcaccttgaggatgaagtgtccaaggaaacttctggggactacaagaagttcctcctcactctcttggggaaataagactaagttaagaacttgctctaagggcatcttagtaatgggtttttgttaattatgtcattggtttctggtttgtgcgatttcattatgttagttttccagtaagagtttgttatatctggttaagtttttgagacaacaagaactcgtgtcttgtttgagggcatgcgtgccatttcttagggttgtgttggtacttggcatgctctta

SEQ ID NO: 242474 - DNA, 390 bp, Glycine max
ggccgcaagcagagatgacaacccgatttaagaagaaccgcaagaagcgcggccacgtcagcgccggccacggccgtattggaaagcaccgcaagcaccccggcggccggggaaatgccggcggcatgcaccaccacaggatcctcttcgacaagtaccacccggggttcttcgggaaggtagggatgaggtactttcataagctccgcaacaaattctactcccccatcgtcaacatcgacaagctatggtctctgataccccaagacgcgaacgacaaagccctaaaatcgaaagacactgcccccctaatcgacgtcactcagcacgggttcttcaaagtttctcggaaaaagtgtgctgccccaaaaccagccccattgttgtgaa

SEQ ID NO: 242475 - DNA, 324 bp, Glycine max
ggccaaacaaaaactcagaaaacacagggaaagaaagagttgagtgatggcggcttgtctgcaactgtggcaatggaaactagcgagaccctttgactcattaccggtgcgaaggtcaattcctttgagtctgaggtgttcggccgcgccctcttcttccaagccgacgcgctcctacagcatcactctcatccccggcgacggcatcggccccgaaatcatctcggcggccaaagacgttcttgtcctcgccggttatctcgaagggattaaatacgacttccgcgagatgcttatgggtggagctgcattggatgccacggg

SEQ ID NO: 242476 - DNA, 341 bp, Glycine max
ggaacctttgcattctattcattcaagattcagcaagtgcgttttggaagcagagaccgaaatacttcgagatggcccgtacaaagcaaactgctcgtaagtcaactggaggaaaagctcccaggaagcagcttgcaaccaaggctgcacgtaagtctgcaccaacaactggtggtgtgaagaagcctcatcgttatcgccctggaactgttgctcttcgtgagattaggaaataccagaagagcactgagctcctaatcaggaagcttcctttccagaggttggttcgtgaaattgcccaggatttcaagactgatctgcgtttccagagccatgctgtg

SEQ ID NO: 242477 - DNA, 372 bp, Glycine max
ggagtgagtagtgagaatggagtttcaagggttaccggaaggttgcattgctagtatactctctcgcactacgccggcggacgtgtgtaggttttccgtcgtatcaaagattttccgttcggccgctgaatcggacgctgtgtggaaacgttttctcccttccgattaccattccatcatttcccagtctccttcgcctctcaactatccttccaagaaggagctctatctcgctctctcggatcgccctatcatcatcgatcagggtaaaaagagctttcaattggagaaaaagagtgggaagaagtgttacatgcttgctgctagagctctcagcaatatttggggtgacactgagcaatactggaactg

SEQ ID NO: 242478 - DNA, 368 bp, Glycine max
ttttttttggtttttttttgttttgtttgttttttttttttttttttgttttttgtggtgtttttttttgtgtttggttttttgttttttttttttttttgtttttgttttttttttttttttttgttgttttttttttttttttttttttttttttttttttttttttttttgtgtttgttttttgttttttgtttttttttttttttttttttttttttttttgttttgtttttttttttttttttttttttttttttgttttgttttgttttttttttttttttttttttttttttgtttttttttttttttttttgtgtttttttttttttttgtgtttttttttttttttttttttttttttt

SEQ ID NO: 242479 - DNA, 376 bp, Glycine max
ggataacaaagggtttaagttgggcacgctagacatcgtcttcaatcacggtctaaagtgacactgtagactctggctcacgccttagacgacgaagctcgctctgtactctcactcacctgaacggatccttcttcttccttatcgcgaaatccgttacttcaaaacctaattgcgtgagtgtggtttctgatttgtgttgaagcgaagatgaggattatgattaagggcggtgtttggaaaaacaccgaagatgaaatcctgaaagcggctgttatgaaatatggtaagaaccagtgggctcgaatctcttcgctccttgttcccaaatccgccaggcattgcaaagctcgctggtatgagtggctcgatccct

SEQ ID NO: 242480 - DNA, 366 bp, Glycine max
gaggggaaaggttccatgtgaacggcacttgcacatgggttagtcgatcctaagggacgggggaagcgcgtctgatagcgctctgtgcgcgtactccgaaagggaatcgggttaaaattcctgaaccgggacgtggcggctgacggcaacgttagggagtccggagacgtcggcgggggccccggaaagagttatcttttctgtttaacagcctgcccaccctggaaacggctcagccggaggtagggtccagcggctggaagagcaccgcacgtcgcgtggtgtccggtgcgcccccggcggcccttgaaaatcccggagaccgagttgctccaagccccggtcgtactcataaccgcatcaggt

SEQ ID NO: 242481 - DNA, 307 bp, Glycine max
ccagttgatccatcccctgattgctgcaaggctttggctggtgctgacttgaaatgcctttgctcttacaagaactcatcagagttgccttttcttggaattgatcgaactcttgctacttcacttcctgcaaagtgcaatctcactcccccagataattgctcataattaagcttctctgaactattatttgtgctctctttgtgtgttgtaatcttttttctgcagatagatgacctattgagaaaaaaggaaataatcgtactctaatttctatatctcttttttttgtgtgctaatatgtttt

SEQ ID NO: 242482 - DNA, 283 bp, Glycine max
gcaacaatctgtgtatttagtgcttcaaacctcagattacgttgtcggatcaatccatctgggtatgctcctgcaagtgtcagttccaacatacaaccacttgtaatcgctgcacacccacaagaaccaaatcagtttgctttatgactgtcggactgtggagttcatgtttttgaaccccttgaatctgaatgcaagtggggtgtgcctcctccgatttagaatgggtctgcacgcaatgtggcagcgacttcagttggaccttcagatcaagctcaaagat

SEQ ID NO: 242483 - DNA, 361 bp, Glycine max
gacacgcaactatttctgactacgttttgctctacgcctctccctctctctcaaaaatcgtgctctgcgattttagggtttcgttttgctgctgcctccgttccccccttctcataaacaacgcgttttctcttctgcttcgtatctattctttgcttttggttttggttgattcaaggccttcacagcattcgttgcggcattttaatcgatttatccaagcaggactgaatgaactaatggagtctaaaggtgggaaaaagaagtctagtagtagtagtagtaaatcattgttctacgaagctcccctcggatacagcaattaagaacttaaaaccaaacggtggaatcaggaaattca

SEQ ID NO: 242484 - DNA, 379 bp, Glycine max
  unsure (1)..(379): unsure at all n locations
ggtaagtaaaagatctcgaacgtagtatgtaacttctccacagcgcagagcagagcaacgtttttttatttattggtaggattagaagaaatgggagttggaggcacactggagtacttgtctgatctaatgggcagtggccaccaccaccacaagaagaagaagaagcagttccaaaccgtggagctaaaggtgagaatggattgtgatggttgtgagcttaaggtcaagaacgctctctcctcactaagtggggtgaaatctgtggagataaaccgaaaacagcagaaagtgacagtaactgggtatgttgaaccaaacaaggtgctgaaganggcgaaatcaacagggaagaaggctgagatttggccctatgtgc

SEQ ID NO: 242485 - DNA, 325 bp, Glycine max
aggggttctagtgtatgtgattgttgtgactcgttcttcttcgtcgttatcttcatcatttgttgtatgtgtgtttgtttgggctctcacctgaaaatgtcttgctgcggtggtaactgtggttgcggaagcgcctgcaagtgcggcaacggctgctgaggctgcaagatgtacctagacttgagctacaccgagtcaactaccaacgagaccttggtcatgggagtggcaccagttaaggctcaattcgagagtgctgaaatgggtgttcccgctgagaacgatggttgcaaatgtggagctaactgcacctgcaatccctgca

SEQ ID NO: 242486 - DNA, 319 bp, Glycine max
gacctcgagagcagtgctattgttggctatgtgtgtgcttccggccatggttgtggccactcgcccagcaaagaaccctgtttgcgtgaagggtcgcgtctactgtgacccttgccgtgctggttttgagacctcagcaaccacctacattgccggtgctgagattatgttgcaatgcaagagcagggttagcaacgaggttgtgtacaccaagaaggggtacactgactcaactggagcatacacaatgtacgtggacgaggatcacgcagatcaaatatgcagtgccaagcttgtaagcagccctcaccctcaatgc

SEQ ID NO: 242487 - DNA, 310 bp, Glycine max
gggcaccagagctcctactctgctgtgacaactatgggacatctattgatgtttggtcagttggatgtatctttgcagagcttggtggccgaaaaccgattttccctggttcagagtgtctcaaccagctgaagttgattatcaatatccttggtagtcaaagggaggaggatattgaattcattgataacccaaaggcaaagaagtatatcaaatcacttccttattctcctggaacccccctttcgcaactttatcctaatgcgcatccattggcaattgatcttctggcaaagatgcttgttttcca

SEQ ID NO: 242488 - DNA, 314 bp, Glycine max
gtggagaaaactcatcagaaaccccaacacctactctagcctaattggcctcacgtggtctcttgtttcattcaagtggaatgtggagatgcctgccataatagcaaagtctatctccatattgtcagatgcagggcttggcatggccatgttcagtcttggtctcttcatggctttgcaaccgagggtcatagcatgtggaaattccaccgcagcttttgccatggctgtgagattccttacaggtccagctgtcatggcagctgcttccgttgctgttggactcaaaggtgttctcctacatgttgccaatg

SEQ ID NO: 242489 - DNA, 333 bp, Glycine max
agctactcagattgtttcgatgagactgagtcgtgctgagccacccttgagaaaggagatagtggaatatatgctggatgtgggttcccacatgtggagtatgagaagaagcaaggccaactttttcaggattatgggggttttgggtggattaattgctgtaggaaaatggtttgaccagatttgcaactggaaaaatccaatcacgacggtgctgatccatatcctgttcataatattggtcatgtaccctgagcttatcttacccacaatcttcctttacctctttttgattggagtttggtactacagatggagaccaagggaccccct

SEQ ID NO: 242490 - DNA, 337 bp, Glycine max
ctgccataagacgagataagggcaacttccctcagtgcagaccttgaggaaatacctgccatcaataattgactttaatgagcctggatcaggtgctccaactggattgtacatcggtggcaccaaatccatggtcatccagggtgagcctggtgctgtcattcgagggaagaagggtcctggtggtgttactgtgaagaagaccggtgcggccttgatcattggcatttatgatgaaccaatgactccaggtcaatgcatcatggtaattgaaatgcttggcgattatctcattgatcacggtctcaaatcattgctctatgtcatgtgatcgtgc

SEQ ID NO: 242491 - DNA, 357 bp, Glycine max
  unsure (1)..(357): unsure at all n locations
ggggttttgcgctgttgttgctgctcatcctccgtaacctccgagctctgcaccgaagaacgaagccatggggaagacacatggaatgggatctgctcgcaagctcaagtcccaccgcaggaggcaaaggtgggctgacaagtcatacaagaaatcacatcttggaaatgaatggaagaaaccttttgctggttcatcccatgccaagggaattgtccttgaaaagataggtattgaggctaagcagcccaactctgccattcgtaagtgtgccagggttcaacttatcaagaatgggaagaagattgcgcttttgtccctaatgacggttgcttgaactacattgaanagaatgac

SEQ ID NO: 242492 - DNA, 355 bp, Glycine max
ggagtccgagtgtgagagaaaccagtgactgacttttcgagaaagaaaaacaaaaatgagtttccgtgattccatcatgaacgctcttcccattctcctcttcttcctcctcgtttctgcattagtttctgcgaagaaaactggtgatgtgacggagctgcaaattggcgtgaagcataaatcagtatcatgtgaagttcaggcacacaaaggtgacagagtcaaagtacactatatgggaaaactcactgatggaactgttttcgattctagctttgaaagaaataatccaattgaatttgagcttggtactggtcaagtgatcaaacgttgggaaacaggattattgggaatg

SEQ ID NO: 242493 - DNA, 380 bp, Glycine max
  unsure (1)..(380): unsure at all n locations
ggaactcaactgaaagtgagtgtgtgaaggtanggttttagaaactgatcctacggcatgttcatgtttttggttagcagagtgactaaggattcaatttcacgcaaccgcaatgcctttgcttcttttgctttctctagcaggtgtgctcattcattatcatttgccacagtagaagcagaagagatatcaggttctaggcctgctgaagttttgaacctggtgcaaggtaaatgggtaggatcttcaaattggaacacaattgcagatcctttaaatggtgactcatttattaaagttgctgaagttgatgaaacaggcattcagcctttttataaaaagcttgtcaagctgtcccaaacatggtgtacacaatcctt

SEQ ID NO: 242494 - DNA, 384 bp, Glycine max
gaacttcgaagatgaccagctcgccaatatgaccaccgacgacgtcgtcagagcttctcgtcttctcgacaacgagattcgcagcctcaaagaagagttgcagaggaccaatttggagttggaatcgtacaaggacaagatcaaggagaatcaggagaagattaagctcaataagcagttgccctacctcgttgggaacatcgttgagatattggaaatgaacccagaagacgaagctgaagaagatggtgccaatattgatcttgactcacaaaggaagggaaagtgtgttgtgctaaagacttctactcgacagaacatccttccaactgttggttgggcttgtggaccctgacaagttaaaacctggtgatctggttggtg

SEQ ID NO: 242495 - DNA, 375 bp, Glycine max
ggaacctttgcattctattcattcaagattcagcaagtgcgttttggaagcagagaccgaaatacttcgagatggcccgtacaaagcaaactgctcgtaagtcaactggaggaaaagctcccaggaagcagcttgcaaccaaggctgcacgtaagtctgcaccaacaactggtggtgtgaagaagcctcatcgttatcgccctggaactgttgctcttcgtgagattaggagataccagaagagcactgagctcctaatcaggaagcttcctttccagaggttggttcgtgaaattgcccaggatttcaagactgatctgcgtttccagagccatgctgtgcttgcattggcagaggctgctgaggcataccttg

SEQ ID NO: 242496 - DNA, 304 bp, Glycine max
ggttctagtgtgtgattgtttgttgttgtaactcgttcttcttcttttgttgttctgtgtttgtgtttgttttttctctcacctgaaaatgtcttgctgcggtggtaactgtggttgcggaagctcctgcaagtgcggcaacggctgcggaggctgcaagatgtacccagacttgagctacactgagtcaaccaccaccgagaccttggtcatgggagtggcacctgttaaggctcaatttgagggtgctgaaatgggtgtgcccgctgagaacgatggctgcaaatgtggaccaaactgctcc

SEQ ID NO: 242497 - DNA, 332 bp, Glycine max
ggagtacaagaacatcagcttcactgtgtgggatgttggtggtcaggacaagatccgtccactgtggaggcattatttccagaacactcagggtctcatttttgtggttgatagcaatgatagagatcgagtggttgaggcaagggatgagctgcacagaatgttggatgaggatgaacttagagatgctgttttgcttgtttttgccaacaagcaagatcttcctaatgcaatgaatgctgcagaaataactgacaagcttggacttcattcactccgtcaacgccactggtatatccagagcacttgtgcaacttctggagagggtctct

SEQ ID NO: 242498 - DNA, 333 bp, Glycine max
caagacacgacaggggtgaattgtatagtgtctctgacctatcatggtataaagatgatgtttggatccactaagaaagttatccatgtggggagtgccgttagacatggacatgattcggatggccaatcgccaatactccttttgtctcaggaccatccataggttggcgccatgcaagccgactgtgaatggggactatcctgctgatccctccactgcttgttactcagccattgccaccgctgatcatacatgcatctgccgcttcacggattcaggccttctctctatgtatgatgttgatcccaacaagtgcatgaaactccctgt

SEQ ID NO: 242499 - DNA, 350 bp, Glycine max
ggtgggaagataaagaaaaaggataagcaagaggttgttattgagaaggtcgtacgtaacaagcgaaagtgcatcaccactgtgaagggactggaactttttggtgtcaagctcagtgatgcttccaagaaactcgggaaaaagtttgctactggagcctctgttgtcaagggacctactgagaaagaacaaattgatgttcaaggggatatagcttatgatgttgtggagttcattacagatacatggcctgatgttcctgaaacagcaattttctttatagaagatgggagaaaggtcccagctgcttgattttgatatcctggcattaaaactaaggactgattgca

SEQ ID NO: 242500 - DNA, 352 bp, Glycine max
acgcgtcagcggaagcgtgggcggacgcgtgggtggagatgatgtacaaggacattattcaggcactcagagctaagggaatcgatgaagatcctcgaaactatttgacattcggctgcggtggcaaccgggaagtgaagaaaccaggagaatatgagccttctgagcaaccagatcctgattcagattatcagagagcccaagaggcccgacgattcatgatttatgttcataccaagatgatgatagttgatgacgaatacataatcgttggatctgccaatatcaaccaaaggtcaatggatggtgctagggactctgagattgccatgggtgcttatcagccctatca

SEQ ID NO: 242501 - DNA, 383 bp, Glycine max
caagacaaggacggagactggatgctcgtcggtgacgtgccctgggaaatgttcgttgaatcatgccagcgccttcgcgggatggaaggttctgaggctatcggccttgcaccaagagccgtggaaaagtgcaagaacagaagctgaagtgattttagggttcggccacaacaatcggcttggttgttcatctgtgtcacaaggaagcaaatgtactcgagcaagatcgagtctcttttaggaataagagtttaattataattattattattatgtgtctctgtaattttcttatatgtgtattatacgaatgagaaaatagttggaaattccttaaggaacaagaaataatattgaagatgtttatatgatcccgtttttgt

SEQ ID NO: 242502 - DNA, 310 bp, Glycine max
gaaataagaagaagcattttgtgactgaaaaaaggttttagatcgtaaaaactaatcactacgaaaacaagagatatcgaagatggctctgcccaaagctaaggagatcgtgtcgtccaattccgtcgtcgttttcagcaaaacctattgccctttctgcgtcgatgtgaagaagctcttcggtgacctcggtgccaattacaaggccatcgaactcgacactgaatccgatggaaaagagctccaagcagcattagttgagtggacggaccagcgaaccgtgcctaatgtgtttattggtggaaaccac

SEQ ID NO: 242503 - DNA, 379 bp, Glycine max
ggttccactccctaatagctgctacagttacagcataacttctattctatatttctttctactcgcaagcaaatcagaagaagagaatggcagcagcagaggggctaaacagagagcagtacgtgtacttggcgaagctgtcggagcaggcggagcggtacgaggagatggtggagttcatgcagaaggtggtggtggggtcgacgccggcgtcggagctcacggtggaggagcgcaacctcctctcggtggcctacaagaacgtcatcggctcgctgcgtgccgcgtggcgcatcgtctcctccatcgagcagaaggaggaaggccgcaagaacgaagaacaaggtctccctcgtcaagcactacagatccaaggtcg

SEQ ID NO: 242504 - DNA, 370 bp, Glycine max
gactcagccgctgcgaggcgaacagagagacccgaagccagatttcaagatgaagttcaacattgcgaatcccacgactggttgtcagaagaagctggagatcgatgatgacctgaagctacgagcattttgggacaagaggatctcacaagaggttgttggtgatgctctgggtgaggaattcaaaggctatgtcttcaaaattactggaggttgcgacaagcaaggatttccaatgaagcaaggagtgttgacccctggtcgtgttcgcctcttgctgcatagaggaactccttgtttccgtggttatggaaagcccaatggacagcgtaggaaggaggtcggtccctgggtgcattgtcagccctga

SEQ ID NO: 242505 - DNA, 244 bp, Glycine max
ggagttacagccgcagcttgaaacagagcagagcgaccttgaagagctatggctgtcggaaaggggaagaggatttccaagggaaagaaaggtggcaagaagaaagccgctgatctctttgccatgatagactggtacgatctcaaggccccttctctcttccatgtcaagaatattggcacgatcctcgtctctcgtacccagggaaccaagattgcatccgaacgactcaaatctccggttt

SEQ ID NO: 242506 - DNA, 350 bp, Glycine max
gacaagaaaaaaccgacaaagattgcggagtatcctccgccagctagttcttccatataatataaccactttattacagggaaataataacattaattctctttggattagacttagatcaaatcaaagtgttcttcttgcttggtcacagactcatagtcacttccatggagaacactggtttgtgtgtactatgctttatactactcctgttggggtgtgtcatttcctcagaatgtaagtatataagatacaacacaacatctaccattgttcctgggaaactcaacgttcacttggtccctcagactcacgatgatgttggatggttgaagaccattgaccagtac

SEQ ID NO: 242507 - DNA, 380 bp, Glycine max
  unsure (1)..(380): unsure at all n locations
gacaagtccaaagtttgattccaaaatgcgatcctcaagcattcgcagcttcaccatcttcaccctctttctcattgcgatcctcccccacggacacgcaacaactccaacctccaaacttcgcctcaaacctctctcttctcccttttcaaccgccctcgaaaccctccagaaacaactcgggtacaccttcaagagcatcgatcttcttcgtcgcgccatgacacacgcttccttctccgaagaaaacaacaaagctttcgccattctcggcgccagcgtcatcgaaacctccgtctctttccatctgctctccagagacgttgatccttccttcanaagaactgaaccgtcgattgtcccaaatcaccaacgtcgat

SEQ ID NO: 242508 - DNA, 378 bp, Glycine max
gaaacagagagtgagagagagggcaaaaccctagctttggagtcttccctcccatctcccacttcttgcaatctctgcagccatggcgagtaccaaagttcagagggttatgacccaacctattaacttgattttcaggtttcttcagagcaaagcgcgcattcagatttggctttttgagcagaaggatttgaggattgaaggccgaatcatcggttttgatgaatacatgaatttggttcttgatgatgctgaagaagtgaacgtcaagaagaaaagcagaaagacattagggaggatccttcttaaaggagacaacataaccttgatgaataacacggggaaatgattaacactctggcacagttgtaaactccg

SEQ ID NO: 242509 - DNA, 396 bp, Glycine max
cggacgcgtgggccatacaccttgcaagcagtcaggcaagggtttcaggatatcggtgcctcctctctacagtctgctcatgaccttctaagatccagggagttaagactggaggtccggagtggagcagcacaggttgaaggtggagttcatgggctggtttcgtatgaaaagaaatacttttgaagtatgaaaccatccaaaatcataagcggtgctataatcccttgctgcagttcagcataaaagaagggaacacactgttattggttagtggcaacttgttgctactctgtcaagcgaattgaagtttataccaatagaacatcgtgggaattttcttccctgaggttcctgaagaggaacactgatttcttggttttttttcgttttttt

SEQ ID NO: 242510 - DNA, 382 bp, Glycine max
ggactgtcagcagcgcattatagcacaccacacaaaaaagcaaaacagagagaacaactgttactcacacacgccatgggtaaatgaatggtttttgagcaacagcagttaaaagagaaaagggattcagcgaagatgacatcggttggtgtggcaccaacttcgggtttgagagaagccagtgggcatggagcagcagctgcggatagattgccagaggagatgaacgatatgaaaattagggatgatagagaaatggaagccacagttgttgatggcaacggaacggagacaggacatatcattgtgactaccattgggggtagaaattgtccagcccaagcagactataagctacatggcagagcgtgttgtagggcat

SEQ ID NO: 242511 - DNA, 374 bp, Glycine max
  unsure (1)..(374): unsure at all n locations
ggttctagtgtgtgattgtttgttgttgtaactcgttcttcttcttttgttgttctgtgtttgtgtttgttttttctctcacctgaaaatgtcttgctgcggtggtaactgtggttgcggaagctcctgcaagtgcggcaacggctgcggaggctgcaagatgtacccagacttgagctacactgagtcaaccaccaccgagaccttggtcatgggagtggcacctgttaaggctcaatttgagggtgctgaaatgggtgtgcccgctgagaacgatggctgcaaatgtggaccaaactgctcctgcaacccctgcacttgcaagtgaagtgtttggagagcaggcttcangcagagatagcccttaattagga

SEQ ID NO: 242512 - DNA, 376 bp, Glycine max
ggcagccaagaaaagaaaatcctcacccattttcttcgtagccaaacactctgaaattctcagttatgtcgtggcaagcgtatgtggatgatcacctaccgtgtgaaatcgaaggtaaccacctcactcacgccgctatcatcggccaagacggaagcgtttgggctcagagcaccaacttccctcagttcaaacctgaggaaataactgccatcaataatgactttaatgagcctggatcacttgctccaactggattgtatatcggtggcaccaaatacatggtcatccaaggtgagcctggtgctgtcattcgagggaagaagggtcctggtggtgttactgttaagaaaaacggttgcggccttaataattg

SEQ ID NO: 242513 - DNA, 356 bp, Glycine max
gatgcttggaaagaaagaaaattgagacatcatatttagtaatatagagatagaggctctttaggagtgataaaacatgttggaaggtaaagctgtgatagaggatactgacatgccagataagatgcagatccaagccatggcatccgcttatgaagctctggatctctatgatgtttttgattgcacatccattgctgcccacataaaaaaggagtttgatacaaagtatggttctggatggcagtgtgtggtgggatcaagttttgggtgttttttcacccattccaagggaacattcgtctactttactctggagactctcaatttcctcatcttcaaaggggcttcttatc

SEQ ID NO: 242514 - DNA, 351 bp, Glycine max
ggtgtgagttcattaacatatacaaattctctgtgttgtgttgtgtacttgtgttaattgtgttgttgttgtaggaaagttaagtgaagagagaatgatgatgaagtctgctatgtgtgcattggtgcttgtggcactggttgtggttgaagtggggcccatggctgaggctgcggtgacttgcaacccaacacagttgactccttgtcttccggcaattaattcacgttctgcaccttcgagtgcttgttgccagaagctgaaggagcataagccatgcttctgtggctacctcaaaaaccctagcttgaagcagtatgttaactctcctaatgccaaaataaccgttag

SEQ ID NO: 242515 - DNA, 374 bp, Glycine max
ggagagagagagaaatggagaagacaggagtgttatcggcgaaggaggcattcgagaagcttgaaaaggtgggagaagggacatatgggaaggtgtacagagcaagagagaaggcaactgggaagatcgtggctctgaagaagactcgtctccacgaggacgaagaaggtgtccctcccaccactctccgtgaggtttccattctgcgaatgctctctcgcgatccccatgtcgttaggttaatggatgtcaaacaaggtcagaacaaggaagggaagacagtgctctacttggtatttgagtacattgacaacgatttcaagaaatcatacgctctttccgtcaatctggggaaaccattcctccccatatca

SEQ ID NO: 242516 - DNA, 384 bp, Glycine max
  unsure (1)..(384): unsure at all n locations
gtggtaacactgttgctatggttggtttggatcagttcataacaaagaatgctactttgactaatgaaaaggaagttgatgcccatcccattcgagctatgaagttttctgtctcacctgttgttcgtgttgctgttcaatgtaaggttgcatcagatcttcccaagcttgttgaaggtcttaagcggttggccaagtcagatcctatggttgtttgtaccattgaggagtctggtgaacacattgttgctggtgcaggagagcttcatcttgagatctgtttgaaggacttgcaggatgatttcatgggtggagctgagatcantaaatctgaccctggtgtgtcattcagggagactgtcctggagagatcatgccgcactg

SEQ ID NO: 242517 - DNA, 296 bp, Glycine max
gaagaagagaaaggagttttctcacatctggctcatggagtatctcaagctgctcatggttaccctccaggggcataccctccacctcctggggcataccctccttaccaagggtacccacctgctcatggctaccctccacaaggtggctatcctccggctggttatccccctgctggctatcctcctgctgctggtggttacccccctgctggttaccctccacatggttatcctggatcatctgctccacatggatctcatgcgcctgggcacggcggtatcggggcattgcc

SEQ ID NO: 242518 - DNA, 380 bp, Glycine max
ggagcgagacggcagcacgcgcaaaaatggtgaagtttctgaaaccaaacaaagccgtcatcgtccttcagggacgctacgccggcaaaaaagccgtgatagtgcgaaccttcgatgaaggcacgcgcgagcgcccctacgggcactgcttggtggcagggataaagaagtaccctgcgaaggtgatcaagaaggattcggccaagaagacggccaagaagtcgcgtgtgaaggcgttcgtgaagctcgtgaactaccagcacctcatgcccacgcgctacacgctcgatgtcgatttgaaagacgcggtaacccccgacgtgctccaagccaaggataagaaggttactgctctcaaggagaccaagaagcgcctcgag

SEQ ID NO: 242519 - DNA, 375 bp, Glycine max
gagagtggtggggtgtgcagaagagcgtcgcagttgtaaccctaatcagaagaagcgcagcttcaagcgagtgacagccaccagccatgggtcgtatgcacagccgcggtaagggtatatcctcttctgctttgccctacaaaaggacacctcctagctggctcaagatctcttcgcaagatgtcgaagaaaatatctgcaagtttgcgaagaaaggtttgaccccgtctcagattggtgtcattctcagagattctcacggtattgctcaggtcaatagcgtcactggcagcaaaatccttcgcaccctcaaagctcacggacttgcgcctgaaattcagaggatctgtaccatttgattaagaaggcagtttc

SEQ ID NO: 242520 - DNA, 302 bp, Glycine max
aagggttctcatttcgcaaccatcggccgcacttactcttgttctcaagggattcgattttctctgcactcacttctagggtttcctccgcgctatcagcaatcatggccgacgaaacaccaaatgagatgaaggaggaggttccagaaattgttccttttgatcctaccaagaagaagaagaagaagaagattacaattgtagatcctgctgatgaccctgtggagaaattggctgagaagacagaaaacctctcagtttctgagggggttgagactgcatttgctggtttgaaaaagaag

SEQ ID NO: 242521 - DNA, 343 bp, Glycine max
ggaacttctcacgttcatttctacacatccctagctctgtcgttccgtcgttgacgatggcgtttcgggtgcgaagccctgacctccgctctctctttcttctctctctcttgtccatcgcttccgccaatgtcttcttcgaagagcgtttcgatgacgggtgggaaaatcgatgggttaaatcagattggaaaaaagatgagaacgtggctggggagtggaaccacacctctggtcaatggaatggagacgctaatgacaaaggtattcaaaccagtgaggattacagattctatgctatttcagctgagtaccctgaattcagcaacaagggtaagacact

SEQ ID NO: 242522 - DNA, 393 bp, Glycine max
ggataaaatgatgagtaaattattttgacctaaaccttaaccttaacctatgtttaaaaaataaattattttgaaaccctaggttggagatggtggtgggaggaacagcagatttcttctacaaagaagctcaacggttagggtatgtggctcgctccgccttcaagctccttcagatacagaaccagcacaagattatcagccctggctcctccattctcgacctcggctgcgcccccggcgggtggctccaggtggcttgccagagcttgggtcccttccgcggccgcggctccgtcctcggcgtccacacaaagaaagtcaaggtaacccctcttcactgcgattctagggttcaaaccatctccgctgacgtcaccacgctcccccacc

SEQ ID NO: 242523 - DNA, 399 bp, Glycine max
gactctctcacctttctcctaaaacatctcaatgggttcttcttctattacaacatcgcccgcaaccatgaccatggctgcgatcgtgctcctgttcacggtctttgccgtttcctccgccctagacatgtcgataatctcgtacgacagcgcccacgcggacaaggccgccacgttgcgcaccgaggaggagctgatgtccatgtacgagcagtggctcgtgaagcacgggaaggtgtacaacgcgctcggcgagaaggagaggcgcttccagatcttcaaggacaacctgcgattcatcgacgaccacaactccgcggaggacccaacctacaagctcggactgaaccggttccctgatctcaccaacaaggaatacagggccaagtacttgggaac

SEQ ID NO: 242524 - DNA, 392 bp, Glycine max
  unsure (1)..(392): unsure at all n locations
ggatcttacatcaataaaagtcttctaactcttggaactgttatttcaaagttgactgaaggcagagctagtcacataccttatagggactccaaattgactagattacttcagtcttcgctcagtggtcatggacgtatatctctcatttgcacagtaacaccttcatctagtaatgctgaagagacacataatacattgaagtttgcccaccggacaaagcacattgaaatacaagcagcccagaacacaataattgatgaaaagtcacttatcaagaaataccaacatgagattcagtgcttanaggaagaattggaacaaatgaagcggggtattgtctcagttcagcaaaaggnactggtgaagttgactttgtgcctctaaaacaa

SEQ ID NO: 242525 - DNA, 385 bp, Glycine max
gaatctagtggaagagtgaataagagatatcaatatattatgataatggagggatacaataagaaggttatgattgtggggatggtgttgggcatggccatgattgggatggccaatggccaatactcgttttgtcgcatgcccagcgatgggttggcggcatgcaagccgagtgtgagtggggactatcctgctgatccctccactgcttgttgctcagccattgccaaggctgatcttaaatgcttctgccgcttcaaggattcgggccttctctctatgtatggtgttgatcccaacaagtgcatggaactccctgttaagtgcaaggttgtcgactctttccactgctagattcattagagggggcactaatcaatataaa

SEQ ID NO: 242526 - DNA, 411 bp, Glycine max
ggaaccagagagtgatttcagtgagtgatcggtgttcacttgatctcatcataatcgtcagcgtcaattgaagaagatgccgatcagaaacatcgccgtcggaaggcctgaagaggcgactcaacccgacacgttgaatgcggctttggctgagttcatctcaaccttcatcttcgtgttcgccggctcaggctccggcatcgcctataacaagctcagcgacaacggcgctgccatccctgccgggctcatctccgcctccatcgcccatgcattcgccctcttcgtcgccgtctccgtcggagccaacatctccggcggccacgttaacccggccgtcaccttaggcgccttcgtcggcggaaacatcaccttcctccgcggcatcgtctacgtcatcgcacagctcct

SEQ ID NO: 242527 - DNA, 331 bp, Glycine max
gacacattcaggctacaattgtgatcttcacaaatcaacaacgtctctcactgttactctgaaaattgacttcaagttagtataactggctgtcaagttgtaatggcattggtctctggaagaagttctgcactgaacctaaatgcacctctattcatacctgctgctcttcggcacgtggaggatttttcaactcaatggtgggatcgtgtgaaatcttcaacatggtttcgtgattataggttgagccaacataaggaggaagaattttaagttgccagttactctagtaacgattacattgagaacatgctcccagaaacttttgatc

SEQ ID NO: 242528 - DNA, 337 bp, Glycine max
gaaacacagagcaaccaccgatcaaagaagaaacaaccgcaacagatctccgtttctcgccaaacaaacacaaaatggctgccttcagcggcgacgaaaccgcacctttctttggcttcctcggagccgccgctgccctcgtttttttcctgtatgggagcggcgtacggaaccgcgaagagcggcgtcggggttgcgtcgatgggcgtgatgaggccggagctggtgatgaaatcgatcgtgccggttgtgatggctggtgtgttgggtatctacggtttgatcattgcggttatcataagtacgggcattaaccctaagggcaaatcgtactatc

SEQ ID NO: 242529 - DNA, 385 bp, Glycine max
ggcttttgctagtggtactgtcttagctttgattctctgttctctgttttgttctgtttcgcgtattgtcttcatacaggaacttgaacaatgaagaatgcaaagggcaagggagcagcaagggcctcaaaagaatcactgaagcccgttgatgaccgaaaggttggaaagcggaaggcttccggtaagcctgggagaagtagtgcaccaaagaaggagaagaaggccaagaaagaccccaacaagcctaaaagaccacccagtgctttctttgtgttccttgaggagttcaggaagacctttaaggctgagaatcctaatgtgaaagctgtatcagttgttgggaaagctggaagagagaaatggaaatccttgtccagtgctg

SEQ ID NO: 242530 - DNA, 387 bp, Glycine max
gaaatgagctggattcaatcagtgatgttcatagctggatatgacatagaggaccctctagaactcttgctcaacagaactaccatgtttaaaagatctttcaaggccaagtctgactttgtaaaggagccaataccaaaatctggtctagaaggagcttggaaactgcttctagaagaagaaatagcattcctgatattggaaccttatggtggtagaatgaatgacatttcagaatctgaaaatccttttccccacagaaagggctacttgtacaacatacaatacctgatcaactgggaagtcaatagtgacgaagcatccaagaggcatctacaatgggctaaaatggtttataaatacatgactccttatgtctcaaaatcc

SEQ ID NO: 242531 - DNA, 263 bp, Glycine max
ggggacacatcaaccctgcagtgacattctggttgttcctgggacgcacggtgtctttggtgaaggcgtcgttgtacatgataccacagtgcgcaggtgcaatctgcggtgctgggttggtcaaatggttccataaatcgtagtacaacaagtaccgacgtggacttaacactgttagcgaaagctacaacaaatgtaccgctttgggagctcacataatcggtacgccttgttcttgtccacaccgttttctccgccactga

SEQ ID NO: 242532 - DNA, 408 bp, Glycine max
ggggacacatcaaccctgcggtgacattcgggttgttcctgggacgcaaggtgtctttggtgagggcgttgttgtacatgatagcacagtgcgccggtgcaatctgcggtgctgggttggccaaagggttccagaaatcgtactacaacaggtacggaggtggagttaacactgttagcgatggctacaacaaaggtaccgctttgggagctgagataattggtacctttgttcttgtctacaccgttttctccgccactgatcctaagaggagcgctagggactctcatgttcctgtgttagcaccacttcccattgggtttgccgtcttcatggttcacttggctacaatccctgtcactggaaccggcattaaccctgcaaggagtttcggaccagctgtgatct

SEQ ID NO: 242533 - DNA, 371 bp, Glycine max
gcaacacatgggttgatgccatgcaagccccactcaaccaccacacctcacctcgttcacgctacgcctttctgctcttcttcgaactttcaagtttgaaaagtataaagatggcagagacattcctagttacatcagagtcagtgaacgagggacactctgacaagctctgcgagcaaatctccgatgctgtcctcgacgcttgcctcgagcatgacccatacagcaaagttgcctgccaaacatgcaccaaaaccaacttggtccttgtcatcggagaaatcacgaccaaggccaacgttgactagcagaagatagtgcgttacaactgcccgaacatttgctatctctcaaattatgtgggactggat

SEQ ID NO: 242534 - DNA, 396 bp, Glycine max
  unsure (1)..(396): unsure at all n locations
gagcgtgagtcgagggtgttcaccacagtttacactcacgagagtacccattttctcttctcaatttctcaagtgtgccgagaaaatcatggtggacgcagcagaacgtagatacttggaggatgatgattcatctctcatgaaaactatcaagggcgcaacaactggtttagtggctggaactatctggggtactgtagttgccacctggtatgatgtcccccgtgtcgagagaaatgttgctcttccagggctgattaggactatcaggatgatgggcaactatggtttgacctttgctgccatangacgagtctacataggtgtanagcanttggtgcaaaactataggatgaagagggatttagtcaatggagctgttggcggatttgttgc

SEQ ID NO: 242535 - DNA, 390 bp, Glycine max
ggaattgcgagattaaacgacaccactgaagcgaaggaaggggcgtacggttctgttgtggttggagatccgaattttgattatcgaatcgcaaaattctgaatcaatcaatcaatcaatcagtaatcagagccatcaacgactgcaatggtctgcgagaagtgtgagaagaaattatcgaaggtgatagtaccagacaagtggaaagaaggggccagcaatactaccgagggtggtggccgcaagatcaacgagaacaagcttctctccaagaaaaacagatggaccccttacggaaacactaagtgcaacatttgcaaagcaacaggtgcaccagaatgctaagtactgccacacctgtgcttactctaaaggagtttgtgcaatgtg

SEQ ID NO: 242536 - DNA, 382 bp, Glycine max
  unsure (1)..(382): unsure at all n locations
ggttctagtgtgtgattgtttgttgttgtaactcgttcttcttcttttgttgttctgtgtttgtgtttgttttttctctcacctgaaaatgtcttgctgcggtggtaactgtggttgcggaagctcctgcaagtgcggcaacggctgcggaggctgcaagatgtacccagacttgagctacactgagtcaaccaccaccgagaccttggtcatgggagtggcacctgttaaggctcaatttgagggtgctgaaatgggtgtgcccgctgagaacgatggctgcaaatgtggaccaaactgctcctgcaacccctgcacttgcaagtgaggtgttgggagagcaagcttcaagcagagatagcccttaattangaataatgat

SEQ ID NO: 242537 - DNA, 381 bp, Glycine max
  unsure (1)..(381): unsure at all n locations
ggaggacaaaagaagaagtatcactcatataatactctgtatcatttcatttcgataatcatccatagctactgaagaaaatggcaaccatctctgctgctatcacaaccccatcgatctcccgcgcaactcttgtgcaaaagcgggtctcatctcccgttcttggtttgccagcaatgggtaaggtgggaagagtgatttgctccatggaggaaaaaccttattctgtgaaggaaagcagctctagcatgtttgggatgggggcatctctgatggcagctgccagcgctgcagccatgtcaggcncagccatggccttggtagatgagagactgagcactgaaggaaccggacttccctttggcctcagcaacaatcttc

SEQ ID NO: 242538 - DNA, 366 bp, Glycine max
ggaaaatggtggtgttagtctatgaagagtcaccctgacctgagtaaaatttccatttccagagcctcaaatcagactcttctattcctttctctcatgaatcaattcagttctctcacactcagctgtcagctcaagtaaccctccctcagaagtcagaaccgggtcttctgtatgtcgtccaagttctctaaagataggaatgggaatatatctcagcagtcgacaaactgagaagttttctgaagatggggaaaatgactgtcttagatatggtttatcgtacatgcaatggtggcgtgcaacactggaagatgctcatgctgcatatactgatctggatgaggtcacgtcattttttggtgt

SEQ ID NO: 242539 - DNA, 406 bp, Glycine max
  unsure (1)..(406): unsure at all n locations
gggagagagaaagtttgattacacagctgagaaaagaactgagattgtcaaatgacgagcacagagaacttctaggtcgagttaatgctgatgatgtgatacggaagataacggaatggacacaggcacgtggccatcagcctggtgtacttagcactggtcaatgacttcatgattcaattcccagtcccacagtctctgcttctcgcacaaagcataagattacaccatctgtaccaccatcacgatcttttggcggaccttctcctccatttcacccccaaacactgactgcacctcaacaaccatcttctgcagcaaaaccttggacctgctccggggtcaaagggaaagaancacatacctggtcaaatattacctggtgtatcttcaatgaagcagtatc

SEQ ID NO: 242540 - DNA, 398 bp, Glycine max
gacatcgcacagcattactctttcgcaccttgcagaatcaattttctctctcaatcgtctttcatggctcgtaccaagcaaaccgctcgcaaatccaccggtgggaaggctcctaagaagcaactcgccaccaatgctgcaagaaaatctgcacctagcaccggtggagtcaagaagtctcatcgctatcgtcctggaactgttgctcttcgtgagatccgaatataccaatagagcacagagcttctgatccgcaagctcccctttcagcgtcttgttcgtgaaatcgcgcaagacttcaagactgatttgaggttccagagtcaagccgtttcttgcgcttaaggaagctgctgaggcttacttggtgggtttgtttgaagacaccaacctttgtg

SEQ ID NO: 242541 - DNA, 393 bp, Glycine max
ggcagccaaagaaaagaaaatcctcaattttctgagcagccaaacactctctctctgtctctcgaaaattctcagtttgcagagaaaatctgaatcatgtcgtggcaagcgtatgtcgacgatcaccttctgtgtgacatcgaaggtaaccacctcactcacgctgctatcatcggccaagacggcagcgtttgggctcagagtaccgacttccctcagttcaaacctgaggagataactgccatcatgaatgactttaatgagcctggattcacttgctcaactggattgtatctcagtggcaccaaatatatggtcatccagggtgaacccggtgctgtcattcgagggaagaagggtcctggtggtgttactgtgaagaagaccggtgcg

SEQ ID NO: 242542 - DNA, 316 bp, Glycine max
ggcataggcagggatagatagagacaagcttgaagcatgtcagacgaagatcatcacttcgattctcacgcggatgcgggagcgtccaacacgtatccgcagcaggctggtaccattcgcaataatggctacatcttcatcacatccaggccttgcactgttgtataggtctctacgttaaacacaggcaaccatggacatgcaaagtgtcacttcgttgcaattgacattttcaatgggaaaagtcttcatgatatttttccatcatctcacagctgtgatgttccacatgtgactcgcactgactatcatctta

SEQ ID NO: 242543 - DNA, 317 bp, Glycine max
gacagccgcagcgttatttagtgaaaagcgacctttacgacctatggctgtctgacagactaagaggatttccagaggagagcacggtcgctacaatagagccgctgatgcctttgccaacatagactggtaccataccaatgccacttctctcttccaggtcaagaatattcgcaaaatcctcgtctctcgtacacatggaaccatcattgcagtccaatgactcacacatcaggtttttgaagtctcattggctgatctccaacgggattaatagcactccttcaacaacattcgtttgagatctgacgactttc

SEQ ID NO: 242544 - DNA, 339 bp, Glycine max
acgcgtcagtagaggagcgaaagggctagagaagggggtgcttcggaagaacgctcgcctgcaccgtccagctcgttctcaagagaagaggaccgagtgatgtttttccttgcagttcatgcgatggcgcctctgatcctgcatggtggaaaatacaatagcagttcgtacaagagactcagtgcggcggagtatgccggcgtccaagttgactttgcaccaacttttgacatgggtgtctctactagaactcgtgaatttcgcaagatcagtcctagtggcagggttcctgtgttggtaacatctgagggtccagtagtctagagcattgccattgct

SEQ ID NO: 242545 - DNA, 412 bp, Glycine max
  unsure (1)..(412): unsure at all n locations
agtgaagacgacagaaggggacttcatggtataaaaataaatgtagacagattctgcctggctgtgatgcacttaacactaagaaaaagatggcactcagaagggcaacccctaacaccgttcatatgtataggaatttttcttaccaccacctaaagtagtagaagcctttgaaaatttgacacagtgcaacaaaatcccttcaccttatctctttttcttcatgcacagtcatcacctttgtcttttccatggctaaaatctggattgaggtgtgcttgatatctgctcgtggtgtgaggggttctccctcactttggaagcgtcaatggtatgctgtanggtgggttgatcctaagagcaagtactgcacaanagttgacgcttctgggaacgccaaccctgtctggag

SEQ ID NO: 242546 - DNA, 402 bp, Glycine max
gggttttgaagcccaaaattagtttagtggatatggggactgcatcatctattctaactcaatacgacatcgaggaagttcaggaacactgcaataatttattttcccagcaggaaattgtgtccttatatcaaaggttttgtcaacttgaccgcaacgccaagggatttatttccgcagatgagttcttgtccgttcccgaatttgccatgaatctactttctcagaggctgctcaagatggtcgacggtttgaattttaaagactttgtggccttcttatctgcattcagtgccaaagcgagcgcacaacagttcatagagcttactttcaaagtacatgatcaagaccgcaatggaaaggtgtctttcaaagatatgctggaagtgctaaaagatttgt

SEQ ID NO: 242547 - DNA, 387 bp, Glycine max
gggccagaaccaatggacatctctacaacatcaacatctcagctatgtggaattcctagttcagatgtgacaattttggaaggtcatacttcagaagtgtgtgcttgtgcatggagccctacaggatctcttcctgtatccggatctggagattcgacagctcgtatctggacaatagcagaagggagatgtaagcctggttcagagaatggccctttgaatgtgttggtgttgaagcatgttacgggtaagacatatgagaagagtaaacatgttactacacttgactggaatggggaatggacacttctcgcaactggatcatataatgggcaagcatgaatttggacgaacaatggttaactgaagagtacattaagcaagcac

SEQ ID NO: 242548 - DNA, 402 bp, Glycine max
caagaagacttttaagttttatgaagctggaggtgatggaattgcatactcggttggtgccaatttcacacctcacatccttacagtaaatgatggcgaggacgttactatggagattatgtccttctctcaacaaggatatcgagcaatttgcattctgtctgcaaatggcacaatttcaaatgttacactacgccaaccaacttcttctggtggtactttaacatatgaggggcggtttgaaattctttccttgtctggttcatatataacaactgagaatggattaacaaagagcagatctggtggtatgagcatctctttggccggtccagaatgtccaagtaatggggggtggattggctggtttgctggtagctgcaggtcctgtgcaggttgttg

SEQ ID NO: 242549 - DNA, 381 bp, Glycine max
  unsure (1)..(381): unsure at all n locations
agacactaatataattagatctgttcttcatacacaaacttgggatttccgatctcaggtaagatcggttcaggatcatgggatccttttctatcagataggaagggctgtttcacaaaatgtacttctaagtaattgctccatagatcctatatctatctatatgaagaagaaatcatgtgacgggggggattcttatttgtacaaatggtacttcgaacttggaacgagtatgaagaaattaacgatacttctttaccttttgagttgttctgccggatcggtcgctcaagacctttggtctctacccggacctgatgaanaaaatgggatcacatcttatggactcgttgagaataattctgatctagttcatggcct

SEQ ID NO: 242550 - DNA, 380 bp, Glycine max
  unsure (1)..(380): unsure at all n locations
ggtctaaggggtgccctgagatcacattgaacaatggtgaaggctgtggccgttcttggcagcagtgagggtgtcactggaactattcacttcgttcaggagggaagtggtccaaccaccgtaactggatctcttgctggtcttaagcctggtctccatggtttccatgtccatgccttgggggacactaccaatggttgcctctcaactggatcacatttcaatcctaataacaaggagcatggtgcccctgaggatgagaatcgtcatgctggtgatcttgggaatgttaatgtcggtgatgatggtactgtcagcttcactattactgacagccagattcctctcactggaccaaacaacatcatangaggggcggt

SEQ ID NO: 242551 - DNA, 387 bp, Glycine max
  unsure (1)..(387): unsure at all n locations
gagggcttgtcaagtgtgaacttggaattccatggacgacatggctgcctactactcacagccccaaccgtcgggccttctcccttaccagtactaccaacagccgcctccgccacctcctccgccgatgatggcggtagtgccaccgccccccggcgcggttgtcccgccggcgcaccacctgcatccgccttacgtggctcagcatcagcagcaagcggtgttcggttcctacggtgctcctcaatcctccacccacgaggttcgcactctcttcgtcgctggcctcnccgaagacgtaaaaccccgcgaaatctacaacctcttccgcgaatttcccggttacgagtcctcgcatcttcggagtccctctaattcgtcgcagcc

SEQ ID NO: 242552 - DNA, 411 bp, Glycine max
gacacgggacgtgattatgggatctgtagtcctgtgactccgaacaccctcctccctctatatatctatatccaaatctcccttcaattctcaatctctgaaaccacaattcacaaccgaaacagtttccatctctctcacaaaatgacaacaatatcaaattgctcccttctcttcctcttcctcttcctctccaccctccacatagcttccaccctctcaacccccaccaacttcatcaagtcctcctgcagcaccacccagtacccagccctctgcatccagtccctctccgtctacgcctccaccatccagcaagacccccaacagctcctccagacagccctctccctctccctcaaccataccgaggccaccaaaaccttcgtcgcaaaatgcaacaaattcaga

SEQ ID NO: 242553 - DNA, 392 bp, Glycine max
  unsure (1)..(392): unsure at all n locations
gcttgctagccagccagatcatctgcaaggacttgttctccttccttcccaacagccatgtcttcttttcttcccgcctcagccgagtcacttgatctggcagtggaggccaaagacccgtctgagtccatctccattctttatcaggtacttgatgatccttcttcttctccagatgctctgcgcatgaaagagcaggccatcacaaacctcactgagcatctcatggaacagaatatggcagaggatttgcacagccttcttacacagttgaggcccttcttttccttgattcctaaggcaaaaactgcaaagatagtgaagggcataattgaaacggttgcanaaataccagggacttctgatctacaaattacactatgcaaagaaat

SEQ ID NO: 242554 - DNA, 402 bp, Glycine max
  unsure (1)..(402): unsure at all n locations
ggtgctaatcttatcttatccctctaatcactctagctgttgcaaatttctactatttttcaatggcttctgcagatgttgagttccgttgctttgttggtgggcttgcttgggtcaccggcaacgatgccctcgagaaagccttttcaatctacggcgacatcgttgaatcgaaggttatcaacgaccgtgagactggaaggtccanaggattcggatttgtgaccttcgcctcagagcagtcaatgaaagatgcgatcgcaggaatgaacggccaggaccttgacggtcgtaacatcactgtcaacgaagctcaagaccgcgccagccgtggtggttgttgaggcggtggtttcggaattggtggtggatacaaccgcggtagcggtggatatggtggtg

SEQ ID NO: 242555 - DNA, 385 bp, Glycine max
  unsure (1)..(385): unsure at all n locations
ggagtctcaacctaattccccattcatccatctttacgtgtttgttggattccatggccaaaagctccttcaagcttgaacatcccttggaaagaagacaggctgagtctgctcgcattagagacaagtatcctgatagaatacctgtgattgttgagaaagcggaaagaagtgacatcccagacatcgataagaagaagtaccttgtcccagcggatttgactgttggtcagtttgtttatgttgtccgtaaaaggattaaggtcagtgcggagaaggctatttttgtttttatctacaacactctacctccaactgccgctttgatgtcntctatttatgaggaanataaggacgatgatgggtttctttacatgacatacag

SEQ ID NO: 242556 - DNA, 389 bp, Glycine max
tgggggagaggacggtatgatggaaacatggcacctgagatcgacatgagtgactggcgaaaaggctctcagtggtttgaaattaaccgagaactagctcttaggatagttgaagacaatacttactatcctaagctcaaagaattctgcaaaccacacaaatgttatgttgatgagcactattttcagacaatgttaacaattaatactcctcatcttttggcaaatagaagcctcacttatgtggactggtcaaggggtggtgctcacccagctacctttgggaaggatgacatcaaagaggaattcttcaagaaaattttgcaagatcagacatgtctttataataaccagccatcttccctttgcttcttatttgcaagaaaatt

SEQ ID NO: 242557 - DNA, 403 bp, Glycine max
ggtagttccaccgagtagcaacaatgtcgaagcgaggtcgcggaggatcggcgggaaacaagttccgcatgtcgctgggtctgccggtggcggcgacggtgaactgcgccgacaacaccggcgcgaagaacctctacatcatatcagtgaaggggatcaagggtaggctgaaccggttgccgtcagcttgcgtcggagacatggttatggccaccgtcaagaagggaaagcccgatctccgtaagaaggtgctgcccgccgtcatcgtccgccagcgcaagccttggcgccgaaaggacggtgtttacatgtacttcgaagataatgctggtggtatcgtgaatcccaagggtgaaatgaaaggttctgctatcactggtccaattgggaaggagtgtgctga

SEQ ID NO: 242558 - DNA, 400 bp, Glycine max
ggaggtactgtaatcagagaagaggttggccttactttggacaaagctgggaaagaggttctcggatatgcctccaaggtggttctcaccaaggatacaaccacaattgttggtgatggaagtacccaggaagcagtgaacaagagagttgcacagattaggaacctaattgaggctgctgagcaagagtatgagaaagaaaagctgaatgagagaattgctaaattatctggtggtgtggctgtcatacaggttggtgcacaaactgagactgagctcaaggaaaagaaattgagagttgaagatgctcttaatgctacaaaggcagctgtagacgagggtattgtagttggtggtggttgcactcttctgagacttgcatcaaaggtggacacaatca

SEQ ID NO: 242559 - DNA, 386 bp, Glycine max
gaccccagaagatcgaacaaggatctccacgaagacaaacctctgttctcaactgtgtttctttacctctcacctactttcagaccatacccaggctgagaagatgcagcagacaccgcctatgattcctatgatgccttcgttcccacctacgaacataaccaccgagcagattcaaaaataccttgatgagaacaagaagctgattctggcaatattggacaatcaaaatcttggaaaacttgcggaatgtgcccagtaccaagctcagcttcaaaagaatttgatgtatttagctgcaattgctgatgcccagcctcaaaacacagccatgcctccacagatggcaacacaccctgccatgcaaccaggattctatatgcaac

SEQ ID NO: 242560 - DNA, 382 bp, Glycine max
gggcgcgggtgaggtagaacccttccacggtggtgactgcgcgatgggtgcctacaagtatgtttcagagctatggcgcaagaagcagtctgatgtcatgcgcttcttgcagcgggtgaggtgctgggagtataggcagcaaccttccattgttcgcttgacaaggtcgacccgccctgacaaggctcgtcgcttgggcttcaaggctaagcagggctatgtgatataccgtgttcgtgttaggaggggtggccgaaagaggccagttcccaaaggtattgtttatgggaagcccacaaaccagggtgttacccaactgaaatttcagcgtagcaagaggtcagttgctgaggagcgagctggacggaagctgggtggactt

SEQ ID NO: 242561 - DNA, 411 bp, Glycine max
gtacacagcctcaacaaccctaacgcgtgcacagcagagagagacgcagccatggggcgaagacccgcgaggtgttataggcaaattaagaacaaaccataccccaagtcacgtttctgccgtggtgttcctgatcccaagatcaggatttatgatgttggtatgaagaagaacggtgttgatgagtttcctttctgtgtccatctggttagttgggataaggaaaatgtttcaagtgaggccctggaagctgctcgcattgcttgcaacaagtacatggccaaatttgctggaaaggatgctttccacttgatagtcaaggtgcacccaatccaaggttcctaggatcaacagcatgcattcgtgtgctggtgctgatacgctccaaactggaatgagatgtgcttttgg

SEQ ID NO: 242562 - DNA, 376 bp, Glycine max
gagggttttgtgttgttgtcgctgctcatcctccataacctccgagctctacaccgaagaacgaagccatggggaagacacatggaatgggagctgctcgcaagctcaagtctcaccgcaggaggcaaaggtgggctgataagtcatacaagaaatcccatcttgggaatgaatggaagaaaccttttgccggttcatcccatgccaagggaattgtccttgaaaaggtaggtattgaagctaagcagcccaactctgctattcgtaagtgtgccagagttcaacttatcaagaaatgggaagaaaattgcagcttttgtccctaatgatggttgcttgaactacattgaagagaatgacgaagtcttgattgctg

SEQ ID NO: 242563 - DNA, 293 bp, Glycine max
gagcgaaacagagagtgatttcagtgagtgatcggtgttcacttgatctcatcataatcgtcagcgtcaattgaagaagatgccgatcagaaacatcgccgtcggaaggcctgaagaggcgactcaccccgacacgttgaaggcggctttggctgagttcatctcaaccttcatcttcgtgttcgccggctcaggctccggcatcgcctacaacaagctcaccgacaacggcgctgccacccctgccggcctcatctccgcctccatcgcccatgcattcgccctcttcgtcg

SEQ ID NO: 242564 - DNA, 321 bp, Glycine max
ggcacacaaccgctctttcttcttcttctcttaaaagagcctttgctttttctttaggcctttccgaattaagtacttgtttcattttctctcgaagcaagaaaaatgttcatcgagagtttcaaggttgagagtcctaacgtgaagtacacagagactgagattcagtccgtgtacaactatgaaaccactgaacttgttcacgagaacaagaatggcacttatcagtgggttgtcaagcccaaaactgtcaaatatgaatttaaaaccaacacccatgtccctaaactaagggtaatgcttgtggggtggggtggaaac

SEQ ID NO: 242565 - DNA, 400 bp, Glycine max
gagcccaaaatattttcatagcattttcagaggaaaatggcgggtacggtttcgacttgtttcttcttcgtgtttcttctttctctccttcttccttttcagatctccgctgaggaatcctcggagaaggagttcgtactcacattggatcactctaactttcacgacactgtcggcaagcacgatttcatcgtcgtcgagttctacgccccatggtgtggtcactgtaagaagcttgctccggagtatgagaaagctgcttctatcttgagtagtcatgatcctcctattgttttggctaaagtagatgccaatgacgagaagaacaaagacctttgcacacaatatgatgttaagggattcccaacaattaatattctgagaaatgggggaaagaatg

SEQ ID NO: 242566 - DNA, 389 bp, Glycine max
  unsure (1)..(389): unsure at all n locations
ggtacctgtggagcaatagcagcagaacagagagagcaaaaccctagagcatccatcacaagcagaggaagaagatggtgaagttcctgaagcctaacaaggcagtgatcgtcctgcagggccgctacgccgggcgcaaggcggtgatcgtgaggaccttcgacgagggaaccagggagcgcccctacggccactgcctcgtcgccggaataaagaagtacccaagcaaggtcatcaagaaggactccgcgaagaagaccgcgaagaaatctaaggttaaggccttcgtgaagctcgtgaactaccagcacctcatgcncacgcgctacacgctcgacgtggatctaaaggacgctgttacccccgatgttctagccaccaaggacaag

SEQ ID NO: 242567 - DNA, 387 bp, Glycine max
cggggaaggatcgtaaaatcaagtctgggacgattttgattggaatgaagaagactttggtgttctacactggtcgagcacccaaggggaataggaccaattgggttatgcatgagtatcgccccactttgaaggagcttgatggtaccaatcctggacagaatccatatgtcctttgtcgcttgtttaagaaacatgatgagagccttgaagtttcacactgtgatgaagcagagccgactgcttccactcctgtggctgcctattactccacagaggaaatacaatctgatctggctgttgttgcaggatcgccgtcacaagttacagaagatgataagcatcagtcaatgatccctgcacactctgaggaagcaatatccaatg

SEQ ID NO: 242568 - DNA, 380 bp, Glycine max
  unsure (1)..(380): unsure at all n locations
ggagggcgaggaagccacatagagacacaatacagagtgagttgttgctccttcgccacaactctctgccaacatgggtatctccagagattctatgcacaagaggcgtgccactggtggcaagaagaaggcctggaggaaaaagagaaagtatgagcttggtcgccagcctgctaacactaagctgtcaagcaacaagacagtcaggaggatccgtgttagaggtggaaatgtgaaatggagggcattgagattggatactggaaattactcctgnggaagtgaagctgtaactcgcaagactcgtgtactagatgtggtttacaatgcctcanacaatgagcttgtgcgtactcagactcttgtcaaaagtgctatcg

SEQ ID NO: 242569 - DNA, 277 bp, Glycine max
gatccaactctctaaacaacacattaacctttctcattccccatctcctcaccttattcagccactgctaatttctagggttccgaaatggacgctggcggaaagatcaagaagggcgccggaggaagaaagggcggcggccctaagaagaagccggtttcaaggtccgtcaaggccggtctccaattccccgtcggaagaattggccgttatttgaagaaaggaaggtacgcccagcgtgtcggtaccggtgctcccgtttacttggccgcagttc

SEQ ID NO: 242570 - DNA, 251 bp, Glycine max
gagctaaagaatcgtcatgcacagggtgagataaatgctggaataaatgtaaggaaggggcacattaccaacatcttggaggagaatgtggtgcagcccctgcttgtgagcaccagtgcgatcaccttggcgacagagtgtgtgcggatgattttgaagattgatgatattgtaactgtgatgtacagttgattgaacaatgacgaacttggagagaaactgaatcatccattatcctctttttttttttt

SEQ ID NO: 242571 - DNA, 277 bp, Glycine max
ggagcaagagtgaagagcgaagagaatggctcccaagggtttaatctttttggctgtgttatgcttctcagcactgtcactgagtcgttgtcttgcggaggataatggacttgttatgaacttctacaaggaatcatgccctcaggctgaagacatcatcaaagaacaagtcaagcttctctacaagcgccacaagaacactgctttctcctggctcagaaacatcttccatgactgtgctgttcagagttgtgatgcttcactgttgctggactcc

SEQ ID NO: 242572 - DNA, 264 bp, Glycine max
ggaacctttgcattctattcattcaagattcagcaagtgcgttttggaagcagagaccgaaatacttcgagatggcccgtacaaagcaaactgctcgtaagtcaactggaggaaaagctcccaggaagcagcttgcaaccaaggctgcacgtaagtctgcaccaacaactggtggtgtgaagaagcctcatcgttatcgccctggaactgttgctcttcgtgagattaggaaataccagaagagcactgagctcctaatcagga

SEQ ID NO: 242573 - DNA, 274 bp, Glycine max
gacacttgattagctgaggaggaagagagaaaaaccatggcaataacactcaacaatggcttcaagatgcctatcattggattgggcgtgtggcgcatggaaggaaacgaaatcagggacctaattctcaattccatcaaaattggttatcgccattttgattgtgctgctgactacaaaaacgaagcataagttggagatgcgcttaaggaggcttttgatagtggccttgtgaagagagaggatctcttcattaccaccaagctttggaatt

SEQ ID NO: 242574 - DNA, 277 bp, Glycine max
ggccgaatgtgtctctccgcagcagccacacttcttcgccgtttcagctgaagagccatccgcaggtaagcaatggttaagcataataatgttatccccaatgggcacttccggaaacactggcaaaactatgtgaagacttggtttaatcaaccagcccgaaagaccagaagacggttggctcggcagaagaaggctgtcaagattttccccaggcctactgctggatctctcaggcctattgttcatggccagactctgaaatacaacatgaaag

SEQ ID NO: 242575 - DNA, 237 bp, Glycine max
aaggaaaggttaactaagaagcaatacttcaatggccacccttgttgttcataaccaaacttcttctgctcaagatgctgaggctctccaacaggctttcaaaggatggggggctgatgacaaggccattatagcaatactgggtcacagaaatgttcatcagaggcaagaaatcagaaaagcttatgaggagatttaccaagaggatctcatcaaacgccttgagtccgagatctc

SEQ ID NO: 242576 - DNA, 238 bp, Glycine max
gcggtcacttggccagaacccaactgaggcagagctgcaggacatgataaatgaggttgatgctgatgggaatggtaccattgatttcccagaattcctgaatctcatggctcgcaagatgaaagacactgattcagaggaggagctgaaggaggctttccgcgtgtttgacaaggatcagaatggcttcatctctgcagcggagctccgccatgtgatgaccaatctcggtgagaag

SEQ ID NO: 242577 - DNA, 279 bp, Glycine max
gatatggatgaaagtaaaagggctgtacctacctccaaagggcaagcacttgctgatgagtatggtatcaagttctttgaaactagtgcaaaaaccaacatgaacgtggaagaggtcttcttttcaatagcaagagatattaagcaaaggcttgcagacacagattcaagagctgagcctcagactatcaagattaaccaacctgaccaggcaaccagtggtggtcaacctgcgcaaaagtcggcttgctgtggttcatgaaaagaatcagtatctgta

SEQ ID NO: 242578 - DNA, 266 bp, Glycine max
ggagagtgtaaggttttgcatttcatttgacgaagagtgagagagtcttatctgtcgtctctgatctctgatcgcatcttcattccgaaaatggctgtttcggctatcactggagcgaggctaactctagggatgtctctttcctcttccacgcgatcacgaaccgtcgcaatggccgtatctatcgaccccaagaccgataacaaactcactcttaccaagtccgaggaagctttcgctgcggccaaggagctgatgcctggagg

SEQ ID NO: 242579 - DNA, 265 bp, Glycine max
ggagagagagagagagagagagagagagagagagatagatggtgtctctgaaacttcagaagcggcttgccgctagcgttctcaagtgtggtagaggcaaagtttggcttgaccctaatgaggtcaatgaaatctccatggctaattctcgacaaaacataaggaaattggttaaggatggtttcattatcaggaagccaactaagattcattcccgttcccgtgctcgcagaatgaaggaggccaagaggaagggacgtcactc

SEQ ID NO: 242580 - DNA, 258 bp, Glycine max
gacgttcacattcaggaatcgttttcttcagaaaatttgccatcgttgagggaagcgcgagagccttcgttgttcaagatgagagctaagtggaagaagaagcgcatgaggaggttgaagaggaagcgccgaaagatgagacaaagatctaagtaggtgcttgaacaaggagtggagatgatgtgcttttccatctgctaccagcttcatgacattttatgctgtcatggctcttatgatgatcttgaggtctagtgg

SEQ ID NO: 242581 - DNA, 278 bp, Glycine max
ggcagtttcaggttttcttttccttcagtttcccgatcaacaaataacacgtttcactttctgcactacgttctcacttcgatatggctcgtacgaaccaaatcgctcgcaagtccaacggtggcgaggcgccaggtaagcagctcgccaccaaggccgctcggaagtctgctccggcgacgggaggagtgaataagccccaccgcttcaggccgggaaccgtggcgctgagggaaatcagaaagtaccagaagagcatgcaagcttctcatcaagaa

SEQ ID NO: 242582 - DNA, 273 bp, Glycine max
gactcgcagttgtattgttgaacaagggtttctctgtctgcttcttcactttctctcgtttcaatcgaaaccaaaacaaaaacatgggcagaaaattcttcgtcggtggcaactggaaatgcaatgggaccactggggaggtaaagaagattgttactactttgaatgaggctaaagtccctggagaagatgtcgtacaagttgttgtgagccctccttttgtgttccttcctgttgtaaaaagtttgctgcgccctgatttccatgtttcgg

SEQ ID NO: 242583 - DNA, 251 bp, Glycine max
catattaataagctttttatcaaccatccagacaggttcaggcagtatggattgtgggataggtattcagaattgtatcctgatgcatatttggtttacacaattggtgttagtgactatacgaaggattggttttatgcacaggctccgatgaaaaaagtggataacactcttcaaggaacaacttggcaaatcaagttcgaaatctgtaatgttgttaaaggaagtacatacaaactgagagttgcaat

SEQ ID NO: 242584 - DNA, 282 bp, Glycine max
gccttcgtccaagcgttcgttacggtgccaaaagaacacaaaaagggggttcaattgtgtgattgtttgttgttgtaactcgttcttcttcttttgttgtttgtgtgtttgttttttctctcacctgaaaatgtcttgctgcggtggtaactgtggttgcggaagctcctgcaagtgcggcaacggctgcggaggctgcaagatgtacccagacttgagctacactgagtcaaccaccaccgagaccttggtcatgggagtggcacctgttaaggctcaatt

SEQ ID NO: 242585 - DNA, 254 bp, Glycine max
ggcactcagtagagaattaaataaaatcaagaaagcatgcatatgatgaagaaggtgtgtgggtttgcaatagtggtgatggcagcactttttctggtggggatgagtcccatggcagaggctgtgacttgtagccctgtggagttgagtccctgtttgggggcaatcacgtcctcttcaccaccatcgacaacttgttgccagaaggtgagggaacaaaggccatgcctctgtggttacctcaaaaaccctat

SEQ ID NO: 242586 - DNA, 278 bp, Glycine max
ggcgagagaagttattagggtttttgagtgcggcggtccaaacactcttctctgcagcttttgcctacaactcccttcaccatggctgaacaaaccgagaaagcttttctgaagcaaccaaaagtgtttctcagcacaaagaagactgggaagggaaagagacctggaaaaggtgggaaccgcttttggaagtccattgggcttggatttaagactcccagggaagccatcgaaggaacctatattgacaagaagtaccccttcactggcaatgtttc

SEQ ID NO: 242587 - DNA, 264 bp, Glycine max
gttctagtgtgtgattgtttgttgttgtaactcgttcttcttcttttgttgttctgtgtttgtgtttgttttttctctcacctgaaaatgtcttgctgcggtggtaactgtggttgcggaagctcctgcaagtgcggcaacggctgcggaggctgcaaggtgtacccagacttgagctacactgagtcaaccaccaccgagaccttggtcatgggagtggcacctgttaaggctcaatttgagggtgctgaaatgggtgtgccc

SEQ ID NO: 242588 - DNA, 275 bp, Glycine max
gatacaaagcctaacgcaaaaccctagttttgtcttgcaggcgaagagatggccaccgttccagggcagctcgtgtgggagatcgtcaagaaaaacaattccttcttggtcaagcagtttggaaggggcacccagagcgtcgaattcagcagagagagcaacaatctctacaacctcaattcgttcaagtactctggtttggcaaacaagaaaactgttactgttcagcctgagggcaaagatcaggctgtgttgttggctacaaccaagacaaa

SEQ ID NO: 242589 - DNA, 248 bp, Glycine max
ggccctttcgcctacgcagagagaaattgagtttctgagataaccacttttctctttgattcatcaatggcaaccgcgaggaccgtgaaggatgtttcgcctcacgatttcgtgaaagcttacacctcccatctcaagcgtttcgagaagatggagacttccgaatggggcagcattttgaagacatagaagatatactgtatagataccatattcctacagatagattgtggtctagcctctgtaaa

SEQ ID NO: 242590 - DNA, 252 bp, Glycine max
ggccctttcgcctacgcagagagaaattgagtttctgagataaccacttttctctttgattcatcaatggcaaccgcgaggaccgtgaaggatgtttcgcctcacgatttcgtgaaggcttacgcctcccatctcaagcgttccggcaagatggagcttcctgagtggactgatattgtaaaaacagcaaaatttaaggaattggctccatatgatcctgactggtattatgttagggctgcctcaatggca

SEQ ID NO: 242591 - DNA, 243 bp, Glycine max
gagggttttgtgctgttgtcgctgctcatcctccataacctccgagctctacaccgaagaacgaagccatggggaagacacatggaatgggagctgctcgcaagctcaagtctcaccgcaggaggcaaaggtgggctgataagtcatacaagaaatcccatcttgggaatgaatggaagaaaccttttgccggttcatcccatgccaagggaattgtccttgaaaagataggtattgaagcta

SEQ ID NO: 242592 - DNA, 269 bp, Glycine max
ggagctattcccattttctggaactacaactatggtgctgttggagaagctttgaagatcgacctactcagccatccagaatacatagagcagaatgccacccttgctttccaggctgctatttggagatggatgacaccaatgaaaaagtcacagccctctgcgcatgatgcctttgtcggcaactggaagcctagcaagaatgatactatggagaatcgtcttcctggatttggcactacaatgaacattctctatggggatggtgt

SEQ ID NO: 242593 - DNA, 276 bp, Glycine max
ggcacgccttgttcggtgaagtgagtagtgagtgctgaatcgaatcgaatcgattctccgaacatggcggcgagcgatcgcacagtgttgcaattctcttcatcatcttcttcttcttcgcagatcttgtccgcgaaggtccaccctctggtcatcttcaacatctgcgattgctatgttcgacgccctgaccaagccgaccgcgtcatcggaaccctactcggctccgtccttcccgacggaaccgtcgatatccgaaattcctatgctgttccc

SEQ ID NO: 242594 - DNA, 267 bp, Glycine max
ggaacctttgcattctattcattcaagattcagcaagtgcgttttggaagcagagaccgaaatacttcgagatggcccgtacaaagcaaactgctcgtaagtcaactggaggaaaagctcccaggaagcagcttgcaaccaaggctgcacgtaagtctgcaccaacaactggtggtgtgaagaagcctcatcgttatcgccctggaactgttgctcttcgtgagattaggaaataccagaagagcactgagctcctaatcaggaagc

SEQ ID NO: 242595 - DNA, 235 bp, Glycine max
ggcacaagtttgttgagatagctagaagcaataagatgaaaatgaaagtgcttgttttgtttgttgctacagttttggtagcatatgaatgccatggctcagactaccagaagttccctctccaaatgaaaactgggtttggtgggcaatacagcaatgaggtggcatgtgccagttggaggcttggcgtggaagcaaacaacgtagtcaagtggcaaactgttcctgcagcttg

SEQ ID NO: 242596 - DNA, 247 bp, Glycine max
gcttcgttcctttgcctctttcgcttttgcttcctaagtttttttttttgtgtcgatggcgggaaaaggagggaaggggcttgtggccggaaaaaccacggcagcgaacaaggacaaagacgaggataagaagaggcccgtctctcgttcatcccgtgctgggatccagtttcctgtgggacgtatccacaggcagttgaagcaaagggtgcaagcaaatggacgtgtgggggctactgctgctgtg

SEQ ID NO: 242597 - DNA, 298 bp, Glycine max
ggaaaataagtggaataaagtttccagattgatttagtcggcaattgaatacatggcccttgggtcaaagtttacacctgtagaccaccagaggcattcaattggccttaccaaggtgaacttgcaaatgagcacaacacaccatgtggttgaaagcctgctgggatgattgtggatttgtgtgtacatatattggtgttgtgcttgttatactgaggtggaggaggatgaaaagatgcctgatgcacattgagacgacatcgattgagtccatgtgcaaattggtttttgtatgtgt

SEQ ID NO: 242598 - DNA, 277 bp, Glycine max
gattgcaaacttgatagctagagtgcctatggagaacatactctatcttggtggtccaaatattgcctcagaaatctacaacaaggagtatgccaatgcaagaatctgtggagctgagaaatggcggaaacctctggcgaagtttttacgacaaccacactttattgtctgggataacagtgacctcgtcacgcatgaggtcatgggtggcttgaaaaatgtctatgcaataggagctggaatggtagctgcccttaccaatgagagtgctacaagc

SEQ ID NO: 242599 - DNA, 250 bp, Glycine max
ggagaagaagaagaagaagaagatggagaagtatcagatctggagcaggagaatagcgttggcagcgtttgcgtttgctctgctgttccaatcggcctcagcagacgacgtcgttgtgctctctgaagataacttcgagaaggaagttggtcaggacagaggagctctcgttgagttctatgctccttggtgtggacactgcaaaaagcttgctccagaatatgaaaagcttggtatcagcttcaagaaa

SEQ ID NO: 242600 - DNA, 245 bp, Glycine max
gatcgcacatcaattattctttcgcaccttcggaaatcaattttctgtcttctctgcgtcttcttcctctatcaatcgttttccatggctcgtaccaagcaaaccgctcgcaaatccaccggtggaaaggctcctaagaagcaactcgccaccaaggctgcaaggaaatctgcaccgacaaccggtggagtcaagaagcctcatcgctatcgccctggaactgttgctcttcgtgagatccgaaa

SEQ ID NO: 242601 - DNA, 248 bp, Glycine max
ggaccttcccttgatttcatttcgtttgcaattgaatttcaatttccctaggggcttaatatctccccgcatttgtgcctagcctcattattatcatactagatattcattccccttatctttctctcttctctctcgccgcccaaaccctaactccctaccctattccgctttctctcatccatcatgaaaggaggaaagtccaagaccgaatctaagagagccgatgccaaacttgctgtgaataa

SEQ ID NO: 242602 - DNA, 243 bp, Glycine max
  unsure (1)..(243): unsure at all n locations
gaatgaagccagcgagtgagcgagcgagcgatgtanggttttcgttgttcccccgtctttgaattcagttcgcgacgatggggtccatccccgatccaggcgagttgagcgagttgactcagccgagcttcgacgagttccagcgccaaacttccctcatgaccagctgcaccctcctctggaaggagctctccggccacttctcctccctcgagcaagacctcaaccacaaatccgaagccc

SEQ ID NO: 242603 - DNA, 276 bp, Glycine max
ggccgactgtgctgtccttattattgactccaccactggtggttttgaagctggtatttctaaggatggacagacccgtgagcatgctcttcttgctttcaccctaggtgtgaagcagatgatctgttgctgtaacaagatggatgccactacccccaagtactctaaggctaggtatgatgaaatcgtgaaggaagtctcttcttacttgaagaaggttggttacaacccagacaagattccctttgttcccatctctggttttgagggtgacaa

SEQ ID NO: 242604 - DNA, 276 bp, Glycine max
ggagttcgcaaatgtgctacttctgtgccttgtccttagctcttctttcttggaaatctcaatggctggttctcctttctgtgactcaaagtgcgcgcagaggtgtgccaaagctggggttcaggacagatgcttgaggttttgcgggatctgctgcgagaagtgcaactgtgtcccatctgggacttacggaaacaaggacgagtgcccttgctacagggacatgaagaactccaagggcaaggacaaatgcccttgaagaatatctaatttcat

SEQ ID NO: 242605 - DNA, 278 bp, Glycine max
gaatcctccaaattttgggttttgggaatttggaaaggacaacccttgggggttgggttctcaagatagatagacccttgggatttcgtcaccatgggtctcgtcggtcttggcaacagatcccaacagacatttcgtccaaaacagagtgctccatctggaagtaagggtgctcaacttcagaaacacatcgatgccacgttgggtagtgggaacttgagggaggctgttaaactgcctcacggtgaagatattaatgaatggctagctgtaaacac

SEQ ID NO: 242606 - DNA, 275 bp, Glycine max
gatcgcacagcattattctttcgcaccttgcagaatcagttttctctctcaatcgtctttcatggctcgtaacaggcagaccgctcgcaaatccaccggtgggaaggctccgaagaagcaactcgccaccaaggctgcaagaagatctgcatctatcagcggtggagtcaggaagcctcatcgctatcgtcctgtaactgttgctcttcgtgacatccgaagataccaagagagcacagagcttctgatacgcaagctccactttcagcgtcttg

SEQ ID NO: 242607 - DNA, 237 bp, Glycine max
gatggcaaaatcgtttctccaatttaatcaccattgtacaacccaattcccttcgtcgttttcgattaagagagcactggcacgtaccaagcaaaccgctcgcaagtccaccggaggaaaggctccgaggaagcaattggcaaccaaagccgctcgcaagtcagccccggcgaccggcggagtgaagaagccccaccgcttcaagccaggaacggtggctctgagggagattcgaaa

SEQ ID NO: 242608 - DNA, 241 bp, Glycine max
tggggcaactaagtagagaataaaatcatatcaggagagcatgcatatgaacatgatgatgaagaaggtgtgtgggtttgcaatagtgatggtggcagtgcagcttctggtggaggtgagccccaaggcataggctgtgacttgtacccctgtggagctgagtccttgtttgggggcaataacttcctctcaaccaccatcaacaatttgttgccagaaggtgagggaacaaaggcaatgc

SEQ ID NO: 242609 - DNA, 245 bp, Glycine max
gatagcgaagtttcatttctttggattagaaatttttcccaaagctgatcgagaagccagccaggccagaaggagttgaagaatgggaagggggaagatcgaaatcaaaagaatcgagaacacaacaaatcggcaagtgaccttctgcaagagaagaaatgggcttctgaagaaagcttatgagctgtcagtgctgtgtgatgctgaagtttccctcatcgtcttctccagccgtggccgtctcc

SEQ ID NO: 242610 - DNA, 268 bp, Glycine max
ggagcaagagtgaagagcgaagagaatggctcccaagggtttaatctttttggctgtgttatgcttctcagcactgtcactgagtcgttgtcttgcggaggataatggacttgttatgaacttctacaaggaatcatgccctcaggctgaagacatcatcaaagaacaagtcaagcttctctacaagcgccacaagaacactgctttctcctggctcagaaacatcttccatgactgtgctgttcagagttgtgatgcttcactgttg

SEQ ID NO: 242611 - DNA, 278 bp, Glycine max
gagtattcagattacattgcaaaaatggcatcattcaccatgacagcttccatccttggcagcccagccgtcaccaaccggtcggcagtagcaacgcagaggagatcactcgtagtgaatgctgccaaagctgttgaagcagaaaaggtcagttatgacaatgacatggatggtagcaatggaaggaggaacttgatgttcgccgcggcggcggctgctgtttgctctgttgctgggatggcagtggcagatgagcctaaaccaggaaccccagaagc

SEQ ID NO: 242612 - DNA, 276 bp, Glycine max
attcccaattctgaggaaatatggcttgctgctttcaagctagaatttgaaaaccatgaacctgagagagctaggatgctgttggctaaagccagagagagaggaggtacagaaagagtctggatgaaatcagcaattgtggagagagaactggggaacattgaagaggagaggagattgttagatgaaggtctgaagcaattcccttcattctttaaattgtggttgatgcttggccagcttgaggaacagcttgctgagaatgcaaagaggctt

SEQ ID NO: 242613 - DNA, 251 bp, Glycine max
ggttctagtgtgtgattgtttgttgttgtaactcgttcttcttcttttgttgttctgtgtttgtgtttgttttttctctcacctgaaaatgtcttgctgcggtggtaactgtggttgcggaagctcctgcaagtgcggcaacggctgcggaggctgcaagatgtacccagacttgagctacactgagtcaaccaccaccgagaccttggtcatgggagtggcacctgttaaggctcaatttgagggtgctg

SEQ ID NO: 242614 - DNA, 252 bp, Glycine max
gattgctctgaattttctgcatcatattgcacacagagatcatgatcgaaaatggcgacgttgaaggttcctgcacaacttccttctccattggaagacagtgagcaattgcgaaaagcttttcaagggtggggaacgaatgaaggattgataatatcaatcctgggtcacagaaacgcggctcagcgtaagttgattcgtgaagcttatagtacaacccatggagaagatcttcttaaagatttagacaaa

SEQ ID NO: 242615 - DNA, 256 bp, Glycine max
gaaaaaaaaaaaatactaatagaatagaaatagaactgtcttttcatatagatatcccttcaacacaacataggtcatcgaaaggatctcgaagacccaccaacgcacgaaagccgggatctttcagaaaatggattcctattcgaagggtgcataaccgcatggataagctcacactaacccgtcaatttgggatccaattcggttccttaggaggtatcgggaaggaattttggaatgtaataatatcgattca

SEQ ID NO: 242616 - DNA, 250 bp, Glycine max
gaaataaggggaaaaaatggtgtcgctgaaactgcagaagcggctggccgcaagcgtgctcaagtgtggcagaggaaaggtgtggcttgaccccaatgaagtcaacgaaatctccatggccaattctcggcaaaacatcaggaagttggttaaggatgggtttatcatcaggaagccaaccaagattcactcacgctcgcgtgctcgtaggatgaaggaggcaaagaagaagggccggcactctggttat

SEQ ID NO: 242617 - DNA, 256 bp, Glycine max
gagtgaagtgatgagccaagacctcaagcgagactacgtcgtttcggaggagatcggccggggaagattcggcaccgttttccgctgctcctccgcagactccggtcactcctacgccgtcaaatccatcgacaaggtggcaataaccgccgccggagactccctcgacgcgcaatgcctattgacggagcccaagatcgttcagcttctctcccctcaccctcacatcgtaaacctccacgatctctacgaagac

SEQ ID NO: 242618 - DNA, 392 bp, Glycine max
ggtgctaatcttatcttatccctctaatcactctagctgttgcaaatttctactatttttcaatggcttctgcagatgttgagttccgttgctttgttggtgggcttgcttgggtcaccggcaacgatgccctcgagaaagccttttcaatctacggcgacatcgttgaatcgaaggttatcaacgaccgtgagactggaaggtccagaggattcggatttgtgaccttcgcctcagagcagtcaatgaaagatgcgatcgcaggaatgaacggccaggaccttgaccgtcgtaacatcaatgtccaacaaacctcaaacccgcgccagccgtggtggtggtggaggcggtggtttcggaagtggtggtggatacaaccgcggtagcggtgg

SEQ ID NO: 242619 - DNA, 279 bp, Glycine max
ggagcaagagtgaagagcgaagagaatggctcccaagggtttaatccttttggctgtgttatgcttctcagcactgtcactgagtcgttgtcttgcagaggataatggacttggtatgaacttctacaaggaatcatgccctcacgctgaagacatcatcacagaacaagtcaagcttctctacaagcgccacaagaacactgctttctcctggctcagaaacatcttccatgactgtgctgttcagagttgtgatgcttcactgttgctggactccac

SEQ ID NO: 242620 - DNA, 393 bp, Glycine max
  unsure (1)..(393): unsure at all n locations
gaatctagtggaagagtgaataagagatatcaatatattatgataatggagggatacaataagaaggttatgattgtggggatggtgttgggcatggccatgattgggatggccaatggccaatactcgttttgtcgcatgcccagcgatgggttggcggcatgcaagccgagtgtgagtggggactatcctgctgatccctccactgcttgttgctcagccattgccaaggctgatcttaaatgcttctgccgcttcaaggattcgggccttctctctatgtatggtgttgatcccaacaagttccatggaaccccctgttaagttcaaggttgtcgactctttccactgctagattcattanagggggcactaatcaatataaactacaca

SEQ ID NO: 242621 - DNA, 373 bp, Glycine max
acagaaaagaaaaaggaaaccctagctggataggtcaaacatcatcatgtcggacgaagagcaccatttcgagtccaaggcagacgccggtgcctccaaaacctaccctcagcaagccggtaccattcgcaagaacggctacatcgtcatcaaaggacgcccctgcaaggttgtggaagtttcgacttccaaaactggaaagcacggtcacgccaagtgccactttgttggaattgatattttcactgccaagaaacttgaggatattgtgccctcttctcacaactgtgaagtccctcaagttgaaccttactgattaccagctcattgatattgctgaggatggatttttgagtctgcttactgaaaatgg

SEQ ID NO: 242622 - DNA, 387 bp, Glycine max
ggtggaagtatttgcagaactttgtttcccaacctccattgcctccgcttctacctcgctaccatgatcattcctgagaagaaccgcaaggagatctgcaaatacctcttccaagagggagtttgctttgcgaagaatgacttcaatttggcgaagcaccctgagattgacgtgccgaatctgcaagtgattaagctgatgcagagtttcaagtctcgcgagtatgtgagggagacttttgcttggatgcactattactggttcctcaccaacgatggaatcgagtttctcataacttaccttaaccttccttccgaaattggtcctggcaactttgaacaatcaggccatgcaacctggcaggccctttggcggcccatccggtga

SEQ ID NO: 242623 - DNA, 394 bp, Glycine max
  unsure (1)..(394): unsure at all n locations
ggaactgtgaagtgtatttggtcactgacctatcttggtagagatttgaagtttaaaccttcaaattaatcaaaccattttaatttgcctatagattctgagtcactgctgctatggcgctacgcgtacttcttgtgttggggatgttgctgatgttgtgccttgttagggtttcatctgatccaaagatagaagaagaaatactggaagcagaagaagaactgcagtttcccgataacgagccacttatcgtgagagacgcgaacagaaggctaatgcaagatatggattgtggtgggttgtgcaagacgaggtgcaatgcacattcnaggcccaacttgtgcactagggcgtgtggcacgtgctgtgtgaggtgcaagtgtgtcccacctgg

SEQ ID NO: 242624 - DNA, 314 bp, Glycine max
gggagctgagctgagaaaacccccaaccccaacctcaaccttaacctctcctcactttcttttcaaccagaactatgattaagcttttttaaagtaaaggaaaaacagagagaactggcagaaaatgcgagtagcggaccacccgttaagaagcaaagtgccggcgagttgcgtcttcacaaagatataagcgagctgaatctaccaaaatcatgtaccatgcaattccccaatggcaaagatgacctgatgaactttgaagtttcaattcgacctgatgatggatattacttaggtggcacatttttgttttc

SEQ ID NO: 242625 - DNA, 312 bp, Glycine max
gggagctgagctgagaaaaccgccaagcgcaacctcaaccgtaacctctccacactttcttttcaaccagaaggatgattaagcttttttaaagtaaaggaaagacagagagaactggcagaaaatgcgaatagcggaccacccgttaagaagcagagtgccggcgagttgcgtcttcacaaagatataagcgagctgaatcgaccaaaatcatgtaccatgcaattccccaatggcaaagatgacctgatgaactttgaagtttcaattcgacctgatgatggatattacttaggtggcacatttttgttt

SEQ ID NO: 242626 - DNA, 299 bp, Glycine max
ggtgttggtggtgctgtttttcgcccccgttgacgcgcattttccggcaaccggagagcttccaacgttccgcgaggcgccggcattccgcaacggaagagaatgccgcaaccgcgcgcggagcgactccgtgatccacatcgcgatgacgctggacgcgacctacctccgcggctccgtcgccggtgtgttctccgtcctgcggcacgcatcatgtccggagaacatcgtgttccactttatcggcaccacgcgccgaagcacggagctccgccgcatcattaccgcgacgttcccgt

SEQ ID NO: 242627 - DNA, 397 bp, Glycine max
  unsure (1)..(397): unsure at all n locations
ggttctagtgtgtgattgtttgttgttgtaactcgttcttcttcttttgttgttctgtgtttgtgtttgttttttctctcacctgaaaatgtcttgctgcggtggtaactgtggttgcggaagctcctgcaagtgcggcaacggctgcggaggctgcaagatgtacccagacttgagctacactgagtcaaccaccaccgagaccttggtcatgggagtggcacctgttaaggctcaatttgagggtgctgaaatgggtgtgcccgctgagaacgatggctgcaaatgtggaccaaactgctcctgcaacccctgcacttgcaaattganggtgttggaaaagcaagcttcaagcagagatagcccttaattaggaataatgataaactattaatgt

SEQ ID NO: 242628 - DNA, 386 bp, Glycine max
ggtttcagtttgttgaggttataccaccttcctccaatcaatatactctacctatctatctcttcttctttgcaaatcaataatgggtttggatttgttcttttggtttgtgctttgtttgcctctcaactttgcttttttagcctcaacgttctaccaggttttgatgttgtctgacttggaagctgactttatcaacccctatgacgctgcatctcggattaactactttatcgttcctgagtttattgggcacggattgttgtgcgctttctgccttttaactggtcattggatcatgtttttgaataacgttccggtaaaatgctaccatgtgatgctgtacatgaaacggaaacatctcattgatgttactgaggtgttta

SEQ ID NO: 242629 - DNA, 261 bp, Glycine max
tgggacggacaagggtttcgtctcgggtttgacgttgttcacaatcactttctgcgcttcactcattcccttcgtgcggttttcgttctttgtcgaactcgtgcgaacatgcctgagattcttcacatacagggagggcaatgcggaaaccagatcggagcgaagttctgggacgtggtgtgcgccgatcacgggatcgattccacggggatgtatcagggggacaacgagttgcaactccagcgagtcaacgtcgattac

SEQ ID NO: 242630 - DNA, 387 bp, Glycine max
gatggaaacattgttgcctctttgttagcacataaattaggagtaactcagtgtaccattgctcatgctctagaaaagaccaagtaccctgagtctgacatttactggaaaaaatttgaagagaaatatcacttctcatgccaatttactgctgatctttttgcaatgaaccacacagactttatcatcaccagcaccttccaagagattgctggaagcaaggacactgttggacagtatgagagtcacactgccttcacccttccaggactctaccgtgttgttcacggtattgatccctttgatccaaagttcaacatcgtctcttccggttgccgacatgagcataaacttcgcatacactgaaactgagcgtaggttaacaga

SEQ ID NO: 242631 - DNA, 381 bp, Glycine max
ggcactcagtagagaattaaataaaatcaagaaagcatgcatatgatgaagaaggtgtgtgggtttgcaatagtggtgatggcagcactttttctggtggagatgagtcccatggcagaggctgtgacttgtagccctgtggagttgagtccctgtttgggggcaatcacgtcctcttcaccaccatcgacaacttgttgccagaaggtgagggaacaaaggccatgcctctgtggttacctcaaaaaccctagtctgagaccatatgtcaactctcctggttccagaatggttgctagctcttgttggggttccctctccaactttgtagtcactttttacttcatatatatgtaataaactccccctactgttggctgg

SEQ ID NO: 242632 - DNA, 381 bp, Glycine max
gacaacacaacacaacgcgcactctctctttttctctctgttttttgttctctcttcgctcaaaccctatcgttcttctcgttttcgccgattctcgccatgccgaaagctaaatccgacgccaaagccgccgatagcaggttgaagcggaagggcgctggtgctgggaggaagcaatcgaggaaagctgctaaggaccctaacaagccgaagagacctccaagcgctttcttcgttttcatgtccgagttcagagagcagttcaagaaggagcatcctaacaacaaatccgtcgctgttgtccgcaaagctggtggtgaaaaatggaaatccctatctgatgctgaaaaggcccctttcgttgctactgctgagaagaag

SEQ ID NO: 242633 - DNA, 376 bp, Glycine max
  unsure (1)..(376): unsure at all n locations
gaggcgaagagatggccaccgttccagggcagctcgtgtgggagatcgtcaagaaaaacaattccttcttggtcaagcagtttggaaggggcacccagagcgtcgaattcagcagagagagcaacaatctctacaacctcaattcgttcaagtactctggtttggcaaacaagaaaactgttactgttcagcctgagggcaaagatcaggctgtgttgttggctacaaccaagacaaagaagcaaaacaagcccgctgcattgctccacaaatctgtgatgaagaaggagttcaagangatggcaaaagctgttgaaaaacaagttggcaaaaaataactaaaggcctgaatctcagaaggctgcccttgcaaggt

SEQ ID NO: 242634 - DNA, 381 bp, Glycine max
ggtactgaggttccatatgggttgctggtatggtctactggagttggtccatcagctattattcgctctttggatcttcctaaagctcctggtggaaggattggcattgatgagtggcttcgtgttcctacagtagaggatatattctcaataggtgactgcagtggatttgttgaaagtactggaaaaacaccactaccggctttagcccaagtggcagaaaggcaaggtaaatatttaggaatcttactaaacaaaatacgtaaagccaatggaagccgtgcagacagtgcaaaagatgtagactttggggattagtttgtttacaagcacaggggaagcatggcatctatagggagttacaaggctctattggacctc

SEQ ID NO: 242635 - DNA, 301 bp, Glycine max
ggtactgaggttccatatgggttgctggtatggtctactggagttggtccatcagctattattcgctctttggatcttcctaaagctcctggtggaaggattggcattgatgagtggcttcgtgttcctacagtagaggatatattctcaataggtgactgcagtggatttgttgaaagtactggaaaaacaccactaccggctttagcccaagtggcagaaaggcaaggtaaatatttaggaatcttactaaacaaaataggtaaagccaatggaggccgtgcaaacagtgcaaaagatg

SEQ ID NO: 242636 - DNA, 270 bp, Glycine max
tggggcgaaagaaagatcgttctcgatgacagaggggagcggtgacaaaactctgcgaaagatcgcagacgcattcaatgatcttgcaaacgtcttcaccgattctcagagcgtataagcagaggtcaaggttgctcccttctctcatgcatgctctctcgtctcccctctcgacggttgcctgggcgtctccttcaagttcggcgaaatggattacgtcgcgaaggttcatgatctggcacaggcgtccagctctagtcagaatctgca

SEQ ID NO: 242637 - DNA, 441 bp, Glycine max
cgtccggccacgcgtgggcgtacggtgcggtctccacctcgcacgcacgtgcgaccttgtttcacggccgtggcctacgcatccatttcctcacgtgctaactcccagtctcaggttctcctcggcttgtccgagaaggagctgcaacaactcgcccttgacctcaatcaggaaacctataggggcaaacaacttcatcattttttataccagaggaagctcagagaaattcaggatttcactcaattgcctcagggatttaggaatactcttgaggaaactggatggaaggtgggccggtctcctattttccaaactgtaactgcagctgatggaactgttaagttggtggttaaatttggaggacaatagattggttgaaactgttggcattccggttatggttgataaaggcctgactcgcctcacagcatgtgtttc

SEQ ID NO: 242638 - DNA, 387 bp, Glycine max
gaaatcaggagagcatgcatatgaacatgatgatgaagaaggtgtgtgggtttgcaatagtgatggtggcagtgcagcttctggtggaggtgagtcccaaggcataggctgtgacttgtacccctgtggagctgagtccttgtttgggggcaataacttcctctcaaccaccatcaacaatttgttgccacaaggtgagggaacaaaggcaatgcctctgtggttacctcaaaaacccaagtctaatgccatatgccaattctcctggctccagacaggttgctagctcttgtggggttccctttccaacttggtaaatatccttaaaaccatatcaaaatatagtatgtaataaaccctgttggctggaaattacatatatatata

SEQ ID NO: 242639 - DNA, 384 bp, Glycine max
ggcagcgcttgatttgaggccaggcaagccccactcaaccaccacacctctcctcgttcacgctacccctttctgctcttcttctacctttcaagttttaaaagtataaagatggcagagacattcctatttacctcagagtcggtgaacgagggacaccctgacaagctctgcgaccaaatctccgatgctgtcctcgacgcttgcctcgagcaggacccagacagcaaagttgcctgcgaaacatgcaccaaaaccaacttggtcatggtcttcggagaaatcacgaccaaggccaacgttgactacgagaagatagtgcgttgacactgcaagaacatcggcttcgtctcaaatgatgtgggactggatgccgacaactgc

SEQ ID NO: 242640 - DNA, 371 bp, Glycine max
ggtgcctctcgtctccctttgcacaaaccctaacacctaaaagccagaagaagcgaaatcgtaatcgcaatctagcggatatgaaggtcgtcgctgcatacttgctcgcagtgttgggagggaatccatctccttctgccgatgatatcaaaaacatcctcggcgcagttggagctgaggctgagcatgagttgattgagttgctcttgaccgaagtcaagggcaaagacttcaatgagctacttgctagtggaagtgaaaagatttctgcagtggctggtggtggtgcaaccgtttgccgtggcggttgaaccagctggaggtgctggtggcggtgctgcacctgctgccgaagcaaaggaagaaaagaa

SEQ ID NO: 242641 - DNA, 373 bp, Glycine max
gattcactcactcacttcagtgtcattttttcttattctcttcctctctctctactctgagacacaaaggaaaattataagaaattatggctggttattcaaaagcttcagctctttggatcctttttcttctctttggcttctctgtagctaaggaaattttggttggaggtaagactgatgcatggaaggtttcagcctctgaatcagattcactcaaccaatgggcagaaaagtctcgtttccaagttggagactatcttgtttggaaatatgatggtggaaaagactcagtgttgcaagtgagcaaagagaactatgtgaattgcagcatctcaaaccccataaaggagtacaatgatgataccacaaa

SEQ ID NO: 242642 - DNA, 379 bp, Glycine max
ggcacaagtttgttgagatagctagaagcaataagatgaaaatgaaagtgcttgttttgtttgttgctacagttttggtagcatatgaatgccatggctcagactaccagaagttccctctccaaatgaaaactgggtttggtgggcaatacagcaatgaggtggcatgtgccagttggaggcttggcgtggaagcaaacaacgtagtcaagtggcaaactgttcctgcagcttgcggagagtacatagctgactacgttctaggagaccaatatagatcagattccaaaacagttaaacaacaagctttattccatgctaaatccctcaaactcaccaacaaagatgtctttgtcttggacgttgacgacactactct

SEQ ID NO: 242643 - DNA, 292 bp, Glycine max
ggcacaagtttgttgagatagctagaagcaataagatgaaaatgaaagtgcttgttttgtttgttgctacagttttggtagcatatgaatgccatggctcagactaccagaagttccctctccaaatgaaaactgggtttggtgggcaatacagcaatgaggtggcatgtgccagttggaggcttggcgtggaagcaaacaacgtagtcaagtggcaaactgttcctgcagcttgcggagagtacatagctgactacgttctaggagaccaatatagatcagatttcaaaac

SEQ ID NO: 242644 - DNA, 390 bp, Glycine max
gggttgcgtcgatgggcgtgatgaggccggagctggtgatgaaatcgatcgtgccggttgtgatggctggtgtgttgggtatctacggtttgatcattgcggttatcataagtacgggcattaaccctaaggccaaatcgtactatctttttgacggctacgcccacctcccttcaggtctcgcttgtggcctcgctggcctctccgctggcatggccatcggcatcgttggcgatgccggtgttagagcaaatgctcagcagccaaagctttttgttggaatgatactcatcctcacttttgctgaggcctttggaattatacggtcccattgttggcatcatcctctcttctcgtgctggccaatccaaggctgactaataaattttc

SEQ ID NO: 242645 - DNA, 392 bp, Glycine max
agggggttgcgtcgatgggcgtgatgaggccggagctggtgatgaaatcgatcgtgccggttgtgatggctggtgtgttgggtatctacggtttgatcattgcggttatcataagtacgggcattaaccctaaggccaaatcgtactatctttttgacggctacgcccacctcccttcaggtctcgcttgtggcctcgctggcctctccgctggcatggccatcggcatcgttggcgatgccggtgttagagcaaatgctcagcacccaaagctttctgttggaatgatacccatcctcatttttgctgaagcctttggattaacacggccccattgttgggatcaccctcccttcccgtgctggccaatccagggctgactaataaatttt

SEQ ID NO: 242646 - DNA, 376 bp, Glycine max
ggttctagtgtgtgattgtttgttgttgtaactcgttcttcttcttttgttgttctgtgtttgtgtttgttttttctctcacctgaaaatgtcttgctgcggtggtaactgtggttgcggaagctcctgcaagtgcggcaacggctgcggaggctgcaagatgtacccagacttgagctacactgagtcaaccaccaccgagaccttggtcatgggagtggcacctgttaaggctcaatttgagggtgctgaaatgggtgtgcccgctgagaacgatggctgcaaatgtggaccaaactgctcctgcaccccctgcactttcaagtgaggtgttgggagagcaagcttcaggcagagatagcccttaattaggaat

SEQ ID NO: 242647 - DNA, 298 bp, Glycine max
gagtggaagagtgaataagagatatcaatatattatgataatggagggatacaataagaaggttatgattgtggggatggtgttgggcatggccatgattgggatggccaatggccaatactcgttttgtcgcatgcccagcgatgggttggcggcatgcaagccgagtgtgagtggggactatcctgctgatccctccactgcttgttgctcagccattgccaaggctgatcttaaatgcttctgccgcttcaaggattcgggccttctctctatgtatggtgttgatcccaacaag

SEQ ID NO: 242648 - DNA, 262 bp, Glycine max
gaagaacaagaagcgaaaatataacaaataatttgtactttcatcaaaacaaaatcccgttgtatttttctcagatggctcgaacgaagcaaacggcccgcaagtccaccggcggcaaaggcccgcggaagcagctggcgactaaggcggctcgcaagtccgctccggcgaccggcggcgtgaagaagccgcacagattcaggccgggaaccgtggcgctgcgcgagatccggaagtatcagaagagcacggagctactcat

SEQ ID NO: 242649 - DNA, 402 bp, Glycine max
gatgaaaaagggagtgcctgataacccataaccgaccgcaccaccgttttcctttgctttgcgttctacaatgtcgaaaacctcagagattattacatgcaaagctgctatttgctggggaataggaaaacctgtgactgtggaagagatacaagtagaccctcccaaagccaccgaagttcgagttaagatgctttgtgccagtatatgctccacagacatctctagcacaaaaggattcccacataccaattttcctatagcacttggacacgaaggagttggtattatagagagtgtccgtgattaagttaacaaatctgaaaaaaggggatgtggtaattccaacatacataggcgagtgccaagaatgtgagaattgtgtttcagaaaaaaccaatt

SEQ ID NO: 242650 - DNA, 406 bp, Glycine max
  unsure (1)..(406): unsure at all n locations
ggcagcgcttgatttgaggccaggcaagccccactcaaccaccacacctctcctcgttcacgctacccctttctgctcttcttctacctttcaagttttaaaagtataaagatggcagagacattcctatttacctcagagtcggtgaacgagggacaccctgacaagctctgcgaccaaatctccgatgctgtcctcgacgcttgcctcgagcaggacccagacagcaaagttgcctgcgaaacatgcaccaaaaccaacttggtcatggtcttcggagaaatcacgaccaaggccaacgttgactaccanaaggatattgcttgacacctgcaggaacatcggcttcgtctcaaatgatgtgggactggatgccgacaactgcaaggtcctcngtcacattgag

SEQ ID NO: 242651 - DNA, 391 bp, Glycine max
gattgttcccttacttcatgttggttgcttttgaagctggtggggtactacgatctctcatcttgtttctttcataccccttggtgtggttggtgggtgaaaaccaacttggtttgaagatcatggttttcttgagcttcattggcctcagaaaggacacattcagaacaggatcagctgttctggcaaagttcttcttagaagatgttggattggaaggctttgaggccgtaatatgttgtgagagaaaagtggcatctagtaagttgccaagggtcatggttgaaaatttcctcaaggaccatttatgggtttaatccggttatagccttcagaattgaagtccttcagtggcttccttttgggagtttttgacagtaagaaccaatta

SEQ ID NO: 242652 - DNA, 311 bp, Glycine max
ggcagccaaagaaaagaaaatcctcaattttctgagcagccaaacactctctctctgtctctcgaaaattctcagtttgcagagaaaatctgaatcatgtcgtggcaagcgtatgtcgacgatcaccttctgtgtgacatcgaaggtaaccacctcactcacgctgctatcatcggccaagacggcagcgtttgggctcagagtaccgacttccctcagttcaaacctgaggagataactgccatcatgaatgactttaatgagcctggatcacttgctccaactggattgtatctcggtggcaccaaata

SEQ ID NO: 242653 - DNA, 306 bp, Glycine max
ggttctagtgtatgtgattgttgtgactcgttcttcttcgtcgttatcttcttcttttgttgtttgtgtgtttgttttttctctcacctgaaaatgtcttgctgcggtggtaactgtggttgcggaagcgcctgcaagtgcggcaacggctgcggaggctgcaagatgtacccagacttgagctacaccgagtcaaccaccaccgagaccttggtcatgggagtggcaccagttaaggctcaattcgagagtgctgaaatgggtgttcccgctgagaacgatggctgcaaatgtggagctaactgc

SEQ ID NO: 242654 - DNA, 353 bp, Glycine max
  unsure (1)..(353): unsure at all n locations
gacctcacccagttgcagaaagaaaagaccatcaaagtttcacttcagccttatccggtttagggtttcggtttttgacccaacctttgacgtatcgaaaccttaagtttcggatcaggtctgagcaatctggttggtagaacctttggtcttagagagtcaagttttatgtctgaattagacgatcaaattcctactgccttcgatccttttgctgatgcaaatgctgatgactcgggtgctgggtcaaaggagtatgtgcatattcgcgtacagcagcgaaatggaaggaaaagcctgacaaccgttcaaggattgaaaaangaatcagctataacaagatacttaaagat

SEQ ID NO: 242655 - DNA, 311 bp, Glycine max
gtcagtacagcagcgagaggagtacaaaaggggatctcacccaggttgcacgaacgacaacaccatcaaactttcacttcagccgtatccgggttagggtttccgcttatgacccaacctttgacgtatcgaaaccttaagtttcggatcaggtctgagcaatctggttggtagaacctttggtcttagagagtcaagttttatgtctgaattagacgatcaaattcctaatgccttcgatcctattgctgatacaaatgccgaagactcagattctgggtcaaaggagtatgtgcataatcgcgtacagc

SEQ ID NO: 242656 - DNA, 389 bp, Glycine max
ggttctagtgtgtgattgtttgttgttgtaactcgttcttcttcttttgttgttctgtgtttgtgtttgttttttctctcacctgaaaatgtcttgctgcggtggtaactgtggttgcggaagctcctgcaagtgcggcaacggctgcggaggctgcaagatgtacccagacttgagctacactgagtcaaccaccaccgagaccttggtcatgggagtggcacctgttaaggctcaatttgagggtgctgaaatgggtgtgcccgctgagaacgatggctgcaaatgtggaccaaactgctcctgtcaacccctgaacttgcaattaaggtgttgggagagcaagcttcaagcagagatagcccttaattaggaataatgataaacta

SEQ ID NO: 242657 - DNA, 395 bp, Glycine max
ggccgactgtgctgtccttattattgactccaccactggtggttttgaagctggtatttctaaggatggacagacccgtgagcatgctcttcttgctttcaccctaggtgtgaagcagatgatctgttgctgtaacaagatggatgccactacccccaagtactctaaggctaggtatgatgaaatcgtgaaggaagtctcttcttacttgaagaaggttggttacaacccagacaagattccctttgttcccatctctggttttgagggtgacaacatgattgagaggtccaccaaccttgactggtacaagggaccaactcccccttgaggcccttaaccaaatcaatgagcccaagacgccctccgacaagcctctaaggcttccattgcag

SEQ ID NO: 242658 - DNA, 323 bp, Glycine max
ggctgtgaagtgtgaattaaaatatattcaattttgcgtttctctgcctaaaaggattgaaagatgggtcaagcattcggttgctaccaagtcgatcagtcaaatgtggctatcaaggagcattttggaaaatttgatgatgtcctagagcctggatgtcactgcctgctttggtgtcttgggtaccagattgctggtagtctgtcgctgcgagtgcagcaacttgatgttcgatgtgagacgaaaaccaaggacaatgtctttgtcaatgtggttgcatctgtgcaataccgagctgtgtctgagaaagcatctgatgcatt

SEQ ID NO: 242659 - DNA, 308 bp, Glycine max
ggaggggttgggcggcgggatagacttcatggtggtggattccacgcgcggaaacttctccagagtgctgaggctggcgaagctgagtaacaaaggcgcggttcttatatgcaagaacgtgaactccgccaccaatattgcttcttcttcgggtttcagatggcggagcgtgctcgaagaagggtcagggtcgcgtcgtgtggttcgttcggtgtttcttcctgtggggaaggggcttgacatagcacacgtgtcggccattggggggggctccgctgctaagagatggttcaagcatgttgaccaac

SEQ ID NO: 242660 - DNA, 224 bp, Glycine max
gagggttttatctcattaacgtttcttctcttcactctgcccgctgcatcaatggcttcagagaagaaactttcgaacccaatgagggagataaaagtgcagaagctcgtcctcaatatctctgttggccagagtggagatcgtctcaccagagcctccaaggtgttggaacaacttagtgtgcaaaccccagtgttttccaaagcaaggtacactgttcgttc

SEQ ID NO: 242661 - DNA, 367 bp, Glycine max
  unsure (1)..(367): unsure at all n locations
gctgtttgtgtggttggcggtgaaaggtcccttgttgccaacttatcagctgcaaattgctataagtctgagcatttgacgagaccggaaaattgggcattagttgaaaaggccaagtatttctacatttctggctttttcctcactgtatctcctgattccatacaattagttgctgaacatgcagctgcaaataacaagttcttcatgatgaacctttctgccccatttatctgtgagttcttcaaggatgcactgaataaagttctgccatatatggactacgtttttggtaatgagactgaagcangaacattttccaaagctcaaggctgggagactgataatgttgaggaaatagctttga

SEQ ID NO: 242662 - DNA, 390 bp, Glycine max
ggatctgcattccttgttgtcgtctggcatgtcttcatccaaacagtgaaactgacttgacgataaagaagcatttccatcaattgaagtgatgattgagagtgggtatggcactcagactcagaggaaaatgggttttgattccattcttttggttttgcctgattccgttttgcttctcacaacagaagctgcgcttgcgctttggaaaaaatggagagttcaagatcttgcaaattgctgacttgcactttgccaatgggaagactacccactgcttggatgtgcttccttctcagtatgcttcttgctctgacctcaaacacaacggccttaatccaaaggatcatcctttctgagaaacctaaccttattgtcttcactggagat

SEQ ID NO: 242663 - DNA, 388 bp, Glycine max
  unsure (1)..(388): unsure at all n locations
gtatgaggcaatctacagcttctactttggggactatggtcacatttcagtgcanggttcatacctgacctatgaagacacttatcttgctgtgactggtggatctggcatctttgaaggggcttatggtcaagtcaagctgcatcaaattgtgttcccctttaaattattctacacattttatcttaagggcatcaaggacttgcctcaggagcttctttccaagcctgttgagcccagcccatctgttgagcctagcccatctgccaaggcctgtgagccacatgctgttatttctggcctcaacgactaaaccaccattgacccaatgaggattcacattttttttgtttcttttttaaggaaaaaattcggttacagtttctta

SEQ ID NO: 242664 - DNA, 394 bp, Glycine max
  unsure (1)..(394): unsure at all n locations
gacttgcggctgcagtagagaagcactcttcgttcttcgactgtctacgatctgctttctctgaattgtgaaaatgtcgctcggagaaactgcttgttcatacgcagctctcatccttcatgaagatggaattagtgtaactgctgacaagatcagcaccttgttgaaaactgcaaaggttccagtagactcttattggccaaccttgtttgctaaacttgctgagaagaaaaatcttggcgatttgatagcaaatgcggcaggcggtggtgcaccagttgctgttgcagctgccccagttgctgctgctgctggtggtgctgctgccgcaactccagctgctgaggaganaaagaaggaagaaccggaagaagagagtgatgatgatatggga

SEQ ID NO: 242665 - DNA, 294 bp, Glycine max
aggatgggcagcgcttgatttgggggatgggaagccccagtcaaccaccagaggtttcctcgtgcacgctggccctttctgcacgtcttcgagctttcaggttttatgagtttgaggatgggagtgagattcggacttagctcagagtcagtgtaggatggaaatcctgacatgcggtgctgccagatctcgtatggtgtcctcgacgcttggctggagcaggacccaggcagcaaagttgactgcgagatatggaccaatgccgacttggacatggtcttcgggaagatcacg

SEQ ID NO: 242666 - DNA, 260 bp, Glycine max
ggaagagcaagcaaataaaacccaaacaaacgcttctcattctctctctactcgttttgaagatgtttctcacaaggactgagtatgaccgaggagtcaacaccttttcccccgaaagacgtttgtttcaagttgagtatgcaatcgaagccatcaagctgggatcaactgcgaatgggttgaagaccaaagagggtgttgtcctcgcagttgggaagcgcatcacttcgccgctcctggagcccaataatgttgagaaa

SEQ ID NO: 242667 - DNA, 364 bp, Glycine max
gaattcacggctcgacccacgcgtacggacagaaggggggtgagaggaaacagaagagagaagagcaatcggtgagtgaatggaatggattcaggtcctccggcgaacgatttgtgttcagtgtgccatggcaactttcatattccatgccaagccaattgttctcactggttttgcggtctcttttgtctctctgactttgatttcaatattgaatgaatgaatgaatgaatgaagttacataattggtgtttcaggaaattgcataatgcttgtgtggcagcacggattagtgggttgttcatgcaagtgcccactgtgtcgtcgagccatcagtctcttagtccccacagaagagtctctg

SEQ ID NO: 242668 - DNA, 398 bp, Glycine max
gacaacacagaacaaaaacaaagaaaaaaaaaaacccttagccaacacaaccatcatggccacctctgctattcagcaatcagcattcactggtcaaactgctctgaagcagctcaatgagttcgtccgcaagaccggtggcgccggcaaaggtcgcactaacatgcgccgcaccgtcaagagtgctcctcagagcatttggtatggccctgaccgtcccaagtacttgggtccattctcggagcagattccatcatacctgaccggagaattccctggtgactacggatgggacactgctggattatcagctgacccgggaaactttcgccaggaaccgggagctggaggtgattcacagcagatgggcaatgcttggtgcccttggctgcaccttc

SEQ ID NO: 242669 - DNA, 385 bp, Glycine max
gacacacacacagagttgcaagagaaagagagcgagattccgatggcgactctggattccgacgtgcctatggttcccgccggcgagccctcgagcagcgccggtccttcttccaagaagcccaagcgcttcgagatcaagaagtggaacgccgtcgctctctgggcttgggacatcgttgtcgataactgtgctatctgccggaaccacatcatggatctctgcatcgagtgccaagccaaccaggctagcgccactagcgaggaatgcactgtggcatggggagtctgtaaccatggctttcaacttccattgcattagtcgatggctcaagacccgtcaagtttgtcctctagataacagtgagtgggagtttcagaaatat

SEQ ID NO: 242670 - DNA, 253 bp, Glycine max
gactctcgcaactgctgccttactctctcactctctcaggagtatataatctgagcgatgtcagatctcgaggctcccttgcgccctaagaggaagaaggtttgggtggactattttgttcagtttcgatggatccttgttatttttgtggtccttcccatctccttcaccatttatttccttacataccttggggatgtaagatccgagtggaagtcctataagacgcgtcagaacgaacatgatgagaatg

SEQ ID NO: 242671 - DNA, 306 bp, Glycine max
tctctcatagcaatcaaatcacactcccatcttctcatctcgtaaaccctaaaccccgttttcagtgacatcgagatcgatcgaacatggatgaggagtacgatgtgatcgtgttgggcacgggtctcaaggagtgcattctcagcggtcttctctccgtcgatggcctcaaggttctgcacatggacaggaatgactattacggaggagaatccacttcgctcaatcttattcagctttggaagagattcaggggagatgacaagcctcctccacatttgggagctagcagggactattacatcg

SEQ ID NO: 242672 - DNA, 378 bp, Glycine max
gacacttactagtagtaagcatggagtcctcaaagatctatgcttacctcttcctctgcatgatctttctctcttccgccactcccattctcggttgtggctactgtggcaaaccccccaaaaagcacaagcctggtaaaacaccaaagacacccaaaacacccgttgttaagccaccagtcatcatccctcccattaatgttcctcccgttgttcttccaccaatagtgaagcccccaggtattctccctccaattccaattattaacccaccaaccacaccagggaacggagggaacactccatgcccaccaccaaagtctcctgcgcatgctacgttgcccattgacacgctcaaacttggtgcctgtgtggatc

SEQ ID NO: 242673 - DNA, 318 bp, Glycine max
gacggcactcgttttcgttctcgttctggtttatagatctttgcgaaggaggtttacagcgctcaaccaaagatgcagaacgaggaaggacagatcactgagctttacattcctaggaagtgctccgccacaaacagattgattaccgctaaggaccatgcttcggttcagatcaacattgggcatgtggatgagaatggcgtctacaatggccatttctccacttttgccctctgcggattcatccgtgctcagggtgatgctgacagtgctctagaccgcttgtggcagaagaagaaagttgaagttaagcaacag

SEQ ID NO: 242674 - DNA, 395 bp, Glycine max
  unsure (1)..(395): unsure at all n locations
gaccgcacagaattagggttttccaattcacagagcaacacaacgaaccaacaatggcgcagcctcagccgcagtcgcagccgcagcacgggcaagcagcgctggagcaggtgcagtgcttcggtcgcaagaagaccgccgtggccgtgacctactgcaagcgcgggcgcggtctcatcaagatcaacggctgccccattgagctcgtggagccggagatcctccgcttcaaggccttcgagcctatcctcctgttgggtaagagccgcttcgccggcgtcgacatgcgcatccgcgtcaagggtggcgggcacacnctccaagatcaacgccatccgccagagcatcgccaaggcgctcgtcgcgttctaccagaagtatgtcgacgaacagag

SEQ ID NO: 242675 - DNA, 339 bp, Glycine max
ggttctagtgtgtgattgtttgttgttgtaactcgttcttcttcatttgttgttctgtgtttgtgtttgttttttctctcacctgaaaatgtcttgctgcggtggtaactgtggttgcggaagctcctgcaagtgcggcaacggctgcggaggctgcaagatgtacccagacttgagctatactgagtcaaccaccaccgagaccttggtcatgggagtggcacctgttaaggctcaatttgagggtgctgaaatgggtgtgcccgctgagaacgatggctgcaaatgtggaccaaactgctcctgcaaaccctgcacttgcaagtgaggtgttgggaa

SEQ ID NO: 242676 - DNA, 311 bp, Glycine max
ggcagcgcttgatttgaggtcaggcaagccccactcaagcagcacagctctcctcgttcacgctacccctttctgctcttcgtctacctttcaagttttaaaagtacacagatggcagacacattcctatttatctcagagtcggtgaatgacggacaccctgacaagctctgcgacgaaatctccgatgctgtcctcgacgcttgcctcgagcaggactcagacagcaaagttgcctgcgaaacatgcaccacaaccaacttgggcatggtcttcggagaagtcacgaccaacgccaacgttgactacga

SEQ ID NO: 242677 - DNA, 385 bp, Glycine max
  unsure (1)..(385): unsure at all n locations
ggttctagtgtgtgattgtttgttgttgtaactcgttcttcttcttttgttgttctgtgtttgtgtttgttttttctctcacctgaaaatgtcttgctgcggtggtaactgtggttgcggaagcccctgcaagtgcggcaacggctgcggaggctgcaagatgtacccagacttgagctacactgagtcaaccatcaccgagaccttggtcatgggagtggcacctgttaaggctcaatttgagggtgctgaaatgggtgtgcccgctgagaacgatggctgcaaatgtggaccaaactgctcctgcaacccctgcacttgcaagtgaggttgtgggaaaagcaagcttcaggcagagatagcccttaattangaataatgataa

SEQ ID NO: 242678 - DNA, 357 bp, Glycine max
  unsure (1)..(357): unsure at all n locations
gacttcaattgcaatcaaattagttcattctctttgcgcagttccctacctctcctttcaagatgcagatcttcgtcaagaccctcaccggaaagaccatcacccttgaggtggaaagctctgacaccatcgacaacgtcaaggccaagatccaggacaaggaaggaattcccccggatcagcaacgtctcatcttcgccggaaagcagctcgaggacggccgtaccctcgccgactacaacatccagaaggagtcaacccttcaccttgtccttcgtctccgtggtggcatgcagatcttcgtcaagactctcactggcaaaaccataaccctagaggtcgaaagctcntgacaca

SEQ ID NO: 242679 - DNA, 364 bp, Glycine max
  unsure (1)..(364): unsure at all n locations
ggtgttggatgaggcgaaactcgagagtgtaaggttttgcatttcatttgacgaagagtgagagagtcttatctgtcgtctctgatctctgatcgcatcttcattccgaaaatggctgtttcggctatcactggagcgaggctaactctagggatgtctctttcctcttccacgcgatcacgaaccgtcgcaatggccgtatctatcgaccccaagaccgataacanactcactcttaccaagtccgaggaagcttccgctgcggccaaagagctgatgcctggaggcgtgaactccccagttcgtgccttcanatccgtgggtggtcanacaattgtgattgattcagtcaaagggtctcgta

SEQ ID NO: 242680 - DNA, 379 bp, Glycine max
  unsure (1)..(379): unsure at all n locations
ggttctagtgtgtgattgtttgttgttgtaactcgttcttcttcttttgttgttctgtgtttgtgtttgttttttctctcacctgaaaatgtcttgctgcggtggtaactgtggttgcggaagctcctgcaagtgcggcaacggctgcggaggctgcaagatgtacccagacttgagctacactgagtcaaccaccaccgagaccttggtcatgggagtggcacctgttaaggctcaatttgagggtgctgaaatgggtgtgcccgctgagaacgatggctgcaaatgtggaccaaactgctcctgcanaccctgcaacttcaatttgnggtgtttggagagcaagcttcaagcagagatagcccttaattangaataa

SEQ ID NO: 242681 - DNA, 240 bp, Glycine max
aggggctgcggtagttggctcactctctttctctcagaaaaacactccgagtacaaagaccctctctcctcgcctctttgcattcgagttaaagaagcgaagaaaaagaaacatgtcagacgcgttctgcatcgactgcaagaaggaaactgaagtggtgttcgaacacgccgccggcgacaccgtgttctccgaattgcggcttgtccccgaatcccaatccaatcgacgaagaactcg

SEQ ID NO: 242682 - DNA, 356 bp, Glycine max
  unsure (1)..(356): unsure at all n locations
ggagaggatcgtgagagggacggtagcagagattccgtgagttgcaaaaatgaaaacaattctttctgccgagaccatgaacatcccggacggcgtgagcgtcaaggttaatgccaatgtcatcgaagttgagggcccccgcggaaaattggtgcgagacttcaagcacttgaatctcgattttcagctcatcactgacgaaaacggtaaaaggaagctgaaggtggaggcctggttcggttctcggaaaacatccgccgccattcgcatcgccctgagccacgtggagaatccgatcaccggcgtcaccaagggctaccgctacaaaatgaggttcgtttatgcncattttccca

SEQ ID NO: 242683 - DNA, 385 bp, Glycine max
gacagcatatatatcaataatctattttatactacacctacattttgataattttctttgtagttgatagccatggctacccgtggaaagcttgaggttgacattgatctcaagtccaacgcagacaagtactggcaaacccttaggaattctactgaaatattccctaaggccttcccacatgattacaaaagcattgaggttcttgagggtgatggcaagtctcctggttctatccgccacataagttatggtgaaggttcaccacttgtgaaatcatccgttgagaagattgaagctgttgatgaggaaaagaatgtagtgtcgtacactatcactgatggggaactcctccagcactacacaacattcaacggagacattt

SEQ ID NO: 242684 - DNA, 373 bp, Glycine max
  unsure (1)..(373): unsure at all n locations
gacaacaacaatttcttgttcccaaaccctctccctccccaattctccaccaaaacctccgccaccgcccgccgcctaacacaccctctctccgcccggctatggacgcgcgaccgccggaatccgccgcgccggcagcctcgaccgaggacttcgtccacgtcgcggatctgaagatggagagcctctctgagagcatcgttcgaatcgacgagccttccgaagccgacgccgccgcttcctccgctccggcggaatccgatcgccgtccggccacgctcccgccggaactctcaagaaacgtgagagtcctgtcgtgcgagtcctccgccgaaggcggcgtctgcgacgtttacttggtcggcancgctca

SEQ ID NO: 242685 - DNA, 387 bp, Glycine max
gatttattcggcgagtgtcatttccttcccttccctcacgatctgaggaagacaccaatcttctctccacgcccttcttgggtaaccgtctgaagtgcagcaatggcagatggattgcattcgcagcatccatcggtagttcagaagttatctggacagtcttatcttgtgtccaggcttgctcctaatcactccagaaactgttctaccactggtagttacttcaatggaggtttgcagtcttcaggtttggttccagtcacggcacacgcgccggctgagaaaggggtgtctggatttttgttggatttcctgatgggcggagtgtccgcggcggtgtccaagacagctgcggctccaatcgaacgagttaagttgctcatccaa

SEQ ID NO: 242686 - DNA, 308 bp, Glycine max
ggaagtcgagaagaggaagaagacgaagatggagaagtatcaaatgtggtgcaggagaagagtcttagtaacgtttgcgtatgcgctgctgttctaatcagtctgagcagacgacgtcgttgtgctctcttaagataacttctagaatcgaactttgtcaggacataggagctctcgttgagttctatgccccttggtgtggtcactgctcaaagcttgctccagaatatgtgaagcttggtagcagcgtcactatggccaaagctgtgttaattggacaagttgactgtgatgagcataatagtttg

SEQ ID NO: 242687 - DNA, 335 bp, Glycine max
gagattagggtagtagcagaaagaaagagtaaccaggtggtagggtttctaattcttttcatcctcttcgcagagcctcagtagcttcgcattagcaatggcgagaatcaaggtgtacgagctgaggaacaagacaaaagcagagcttctgaaccaactgaaggatctcaaagcagaactcgctctcctccgcgtcgccaaggtcaccggcggagccccgaacaagctttccaaaatcaaagtggttaggctttcgatagcgcaggtgctgacggtgatttcccagaagcaaaaagcagcgctgagagaggcttacaagaagaagaaataccttc

SEQ ID NO: 242688 - DNA, 368 bp, Glycine max
ggatttgagatagtccagactctcattgttgatatagagcctgatgttaatgtcaagagagcaatgaacgagattaacgcagctgctagattgaggttggctgcaaatgagaaggctgaagcagaaaaaatactgcagatcaaaaaagctgagggagaagcagaatccaaatatctgtcaggactcggtatcgctcgccaacgtcaagccattgtggatggactgagggacagtgtgcttgctttctctgagaacgtgcctgggacaacagctaaagatgtcatggacatggtgctggtgactcaatactttgacaccatgaaagagattggagcatcttcaaagtcctcatctgttttcataccaca

SEQ ID NO: 242689 - DNA, 386 bp, Glycine max
ggccgcaagcagagatgacaacccgatttaagaagaaccgcaagaagcgcggccacgtcagcgccggccacggccgtattggaaagcaccgcaagcaccccggcggccggggaaatgccggcggcatgcaccaccacaggatcctcttcgacaagtaccacccggggttcttcgggaaggtagggatgaggtactttcataagctccgcaacaaattctactcccccatcgtcaacatcgacaagctatggtctctgataccccaagacgcgaaggacaaagccctaaaatcgaaggacactgcccctctaatcgacgtcactcagcaccggtaactcacggttctcggaaaaggtgtgctgccccaaaaccagcccattgttgtg

SEQ ID NO: 242690 - DNA, 373 bp, Glycine max
ggcagcgcttgatttgaggccaggcaagccccactcaaccaccacacctctcctcgttcacgctacccctttctgctcttcttctacctttcaagttttaaaagtataaagatggcagagacattcctatttacctcagagtcggtgaacgagggacaccctgacgagctctgcgaccaaatctccgatgctgtcctcgacgcttgcctcgagcaggacccagacagcaaagttgcctgcgaaacatgcaccaaaaccaacttggtcatggtcttcggagaaatcacgaccaaggccaacgttgactacgagaagatagtgcgtgacacctgcaggaacatcggcttcgtctcaaatgatgtgggactggatg

SEQ ID NO: 242691 - DNA, 339 bp, Glycine max
  unsure (1)..(339): unsure at all n locations
gatcgcacaacattattctttcgcaccttgcagaatcaattttctctctcaatcgtctttcatggctcgtaccaagcaaaccgctcgcaaatccaccggtgggaaggctcctangaagcaactcgccaccaaggctgcaagaaaatctgcacctaccaccggtggagtcaagaagcctcatcgctatcgtcctggaactgttgctcttcgtgagatccgaaaataccaaaagagcacagagcttctgatccgcaagctcccctttcagcgtcntgttcgtgaaatcgcgcaagacttcaagactgatttgaggttccagagtcacgcggttcttgcgct

SEQ ID NO: 242692 - DNA, 385 bp, Glycine max
ggttctagtgtatgtgattgttgtgactcgttcttcttcgtcgttatcttcttcttttgttgtttgtgtgtttgttttttctctcacctgaaaatgtcttgctgcggtggtaactgtggttgcggaagcgcctgcaagtgcggcaacggctgcggaggctgcaagatgtacccagacttgagctacaccgagtcaaccaccaccgagaccttggtcatgggagtggcaccagttaaggctcaattcgagagtgctgaaatgggtgttcccgctgagaacgatggctgcaaatgtggagctaactgcacctgcaacccctgcacttgcaagtgaggtgttggagagctaaagcttcaagcagaaatggcccttagaaataatgata

SEQ ID NO: 242693 - DNA, 280 bp, Glycine max
ggagatcaactgtcgaaacacttccgatacagcaacttgcagacactgctgcagatggatctgcagcatcaacatggaggcgtgttgaaacctcatcgatatcgccctgctactgttgctcttcatcatattacgaaacgtgagttgatcatagatctcctattcaggaagcttcctttccacaggttggttcgtgaaagtgcccaacatttccagtctgagtagcatttccatagcaatgctgtgcttgcattgcaatgacgatgcctacgcatacctt

SEQ ID NO: 242694 - DNA, 337 bp, Glycine max
gggtggtgtggtttagtgtcaaaatggcggagagtggaagcactttaccactgaggaagtacttgagagtgcgcgtggacgctcttccccgcaacactcccttgaccctcgcttccaacttgttgattcgccgcttctccgaagaggttaggggttgttttctcgacaagtccgaggtcacagatggcgtcacttcctgcgtcaaaaacttccagaaagtcgatgcatctaaggttaaccctaatgctcacttccagaatgaccttggattggatagtttagattcagtagagatcgtgatggctcttgaagaagagtttgggttcgagattcctga

SEQ ID NO: 242695 - DNA, 298 bp, Glycine max
gaccgcgaaacgcacatttcactattcattctcgtttccctttcggtaatttccaattactagttactaatttctccatgctttcttcatcttacgcttaatccttatggtttcgtttaattgttgttctaattgccgcttgttgcagactgtgattgtttgttaactgaacttttcgagcaaaatgtctggacgtggaaaggggggcaagggtttgggaaagggaggagcgaaacgacaccgtaaggtgttgcgcgataacattcagggaatcaccaagcctgcgattcggcgtttg

SEQ ID NO: 242696 - DNA, 261 bp, Glycine max
gataaaaaagtgatttagggtttttgcacagtctcttacatataaagggaagtccttatcttatagtatcggtcagctcttccatttcgcaatccgttccaaaccacataagcttcaacaaagatggatgtagaaaagttgaagaagatggccagttctgttcgaactggtgggaagggtactatgagaaggaagaagaaagctgtccacaagactactactacagatgacaaaaggcttcaaagcaccctgaagaggata

SEQ ID NO: 242697 - DNA, 381 bp, Glycine max
aaaaagaagagggaggagggaggaaggaggaaggagagagactttatatacgaggtaacagggcactgtggaattgcgcgtgtgggtgtgttgtttgaggttgttgtcgctggttgtgttgtgttgtgttgtgtgggttttatgagagtgagtttcacatggggagggtttttgttcttgaattggatggcagatcttacggatgcaaattctgcaacacccctcttgccctcgctgatcacattctctctcggaatttcaactgcagtcaagggagagcctaccttttcagcaaagtggtgaacgtaatacttgggcctcaggtggagagaatgatgatatctggactgcacactgttgaagacatattttgttgcaact

SEQ ID NO: 242698 - DNA, 360 bp, Glycine max
ggcagcaacagcagcattcactgaaagcactcagtagggtttgcggtttcagagtttgtgacgcacgcatccatggccaccaccaccaacgccgccgcagccccgccgcgccagctctcccagaaggaagccgacatccagatgatgttagccgccgacgtccacctcggcaccaaaaactgcgacttccaaatggaacgttacatcttcaagcgccgcaacgacgggatttacattactaaccttgggaagacatgggagaagcttcagttagcagctagggttattgttgcaattgagaaacctcaggatatcattgttcaatccgcaaggccttatggtcaaagagcggttctgaag

SEQ ID NO: 242699 - DNA, 285 bp, Glycine max
ggagaaatgaaagtgaagagaggaagcagagtgtgtgactgttccccaatttcctgtgcttagagtgaagaagcatttagaaaaagcaagacacgatgccttcggctcaagatccattctacgttgtcaagcaagaaattcaagaatctattgataagctaaaatccacttttcaccaatgggaaaacactgctgatgttggcgagcgatccagtctatcaaaggaagttcttgctagttgtgaaagcattgcatggcaggtggatgaattggacaaagcaattt

SEQ ID NO: 242700 - DNA, 303 bp, Glycine max
ggacaccgacacagatctgtcttccgaagcaggaactaaatatggctgacttgttggaatggtcaaagcaagataagaaacgaatgcttcatgtcgtctaccgtgttggtgaccttgatcgcaccatcaaattttacacagaatgtttaggaatgaagcttttgaggcaaagagatatcccagaggagaaatatgctaatgcttttcttggatttggccctgaagaatcccattttgttgttgaattaacatataattatggggttacctcgtatgacattggcgatggctttggacattttg

SEQ ID NO: 242701 - DNA, 269 bp, Glycine max
ggcagttcaattccaatatattccattctctctgtgtagttccctacctctcccttcaagatgcagatcttcgtcaagaccctcaccggcaagaccatcacccttgaggtggaaagctctgacaccatcgacaacgtcaaggccaagatccatgacaaggaaggaatccccccggaccagcaacgtctcattttcgccggaaagcaacttgaggacggccgtagccttgctgacgacaacattcagaatgagagtactctttacctcgt

SEQ ID NO: 242702 - DNA, 382 bp, Glycine max
  unsure (1)..(382): unsure at all n locations
gacacaagattgagacacgaaacagaaaatgccaggactcacagcaccttccgattactcccaagaacccccccgccactcttctcttctcatcaacgccaaggaacctttcaatgcggagccaccgcgtgctgcgttggttgcttcctacgtcaccccttccgatttcctctataagaagaacacggtccaatcccatcgttgagaacatcaacagatattccgtgaacgtgtccggcttggtggagcgtcncaaacagctcttcatgatagatatatggatgcttccaaagtataatgtcactgccacgttgcagtgtgcaggtaatcgaaggactgctatgagcaagaccaaaacagtgaagggagttggctgggatgt

SEQ ID NO: 242703 - DNA, 390 bp, Glycine max
  unsure (1)..(390): unsure at all n locations
gctgatcttgtggaagagttttctcttggggatgggaagattgtgaagattactggtattaaggagatggggaagaccaccactgtgcttgtacgtgggtctaatcagcttgtgctcgatgaggctgagcggagtttgcacgatgctttgtgtgttgttaggtgtttggttgccaagaggtttctcattgccggcggtggtgcccctgagattgagctctccaggcagctgggtgcctgggctaaggtgttgcatgggatggagggttactgtgtgagggcattcgctgangcgcttgaagttattccctatactctggctgaaaatgcctggtttgaacccgattgccattgttactgagctaaggaatcgtcatgcacagggtgagat

SEQ ID NO: 242704 - DNA, 375 bp, Glycine max
ggagtgagcaagagtgaagagcgaagagaatggctcccaagggtttaatctttttggctgtgttatgcttctcagcactgtcactgagtcgttgtcttgcggaggataatggacttgttatgaacttctacaaggaatcatgccctcaggctgaagacatcatcaaagaacaagtcaagcttctctacaagcgccacaagaacactgctttctcctggctcagaaacatcttccatgactgtgctgttcagagttgtgatgcttcactgttgctggactccacaagaatgagcctgtctgaaaaggaagccgattggaagctttgggttgagaaatttcaggtccattgagaccatcaaagaagctttggatagg

SEQ ID NO: 242705 - DNA, 390 bp, Glycine max
caccatctagggtttttctttttctcatggctagtttgtcaactaggattttcttcatcatgtcccttgtgtgcctggctctcggtccaatggcacaatgggaaatgacatgtggccaggttgtgagcaacctgaccccatgcatctcctatgtggtgtatggtggaaccaatgttcctgaacagtgctgcaatgggataagaaatctctatggcatggctcagatcaaaccagaccgccaagctgtttgcaactgcatcaagaacggtgttaggaacagtggcttcaactactctgacttcaacctcaaccttgggcggcaaaccttcccacgaaaatgtggggtcaacattccctaccagatcagccccaacacacactgcactaggg

SEQ ID NO: 242706 - DNA, 384 bp, Glycine max
gagagaataaaatcaaatcaggagagcatgcatatgaacatgatgatgaagaaggtgtgtgggtttgcaatagtgatggtggcagtgcagcttctggtggaggtgagtcccaaggcagaggctgtgacttgtacccctgtggagctgagtccttgtttgggggcaataacttcctctcaaccaccatcaacaatttgttgccagaaggtgagggaacaaaggcaatgcctctgtggttacctcaaaaacccaagtctaaggccatatgccaattctcctggctccagaagggttgctagctcttgttgggttccctttccaaccttgtaaataaccttcatatcatatcatatatagtatgtaataaaccctgttggctggaaa

SEQ ID NO: 242707 - DNA, 383 bp, Glycine max
  unsure (1)..(383): unsure at all n locations
ggttctagtgtgtgattgtttgttgttgtaactcgttcttcttcttttgttgttctgtgtttgtgtttgttttttctctcacctgaaaatgtcttgctgcggtggtaactgtggttgcggaagctcctgcaagtgcggcaacggctgcggaggctgcaagatgtacccagacttgagctacactgagtcaaccaccaccgagaccttggtcatgggagtggcacctgttaaggctcaatttgagggtgctgaaatgggtgtgcccgctgagaacgatggctgcaaatgtggaccaaactgctcctgcaacccctgcacttgcaagtgaggtgttgggagagcaagcttcaagcagagatagcccttaattangaataatgata

SEQ ID NO: 242708 - DNA, 362 bp, Glycine max
  unsure (1)..(362): unsure at all n locations
ggttcaacgagatggagcaaataaagcacagaatagttgaagtgaatggcataaaaatgcatgttgcagagaaaggagagggtccagtggtgttgttcctccacggcttccctgagctctggtactcatggcgccaccagattctctctctcagctccctcggctaccgcgccgtcgctcccgatctccgtggctacggtgacaccgaggcaccaccttcaatcagcagctacaactgcttccacatagtgggtgatctcgttgcgcttattgactctctgggtgtncaacaagtgttccttgtggctcatgactggggagccatcataggttggtatctctgcatgtttcgccctgacaaa

SEQ ID NO: 242709 - DNA, 252 bp, Glycine max
ggttcaacgacgatggggcatataaagcagagcatagttggagtgaatggcataagaatgcatgttgcagagaaacgacagggtccagtggtgttgttcctccacggcttccctgaggctctggtacgcatggcgcgaccagtatctctctcctcagctccctcggatatcgcgcagtcgctccagatctccatggctactgtgacaccgaagcaccaacttcaatcatcagctacaactgcttccacataa

SEQ ID NO: 242710 - DNA, 381 bp, Glycine max
ggtagttccaccgagtagcaacaatgtcgaagcgaggtcgcggaggatcggcgggaaacaagttccgcatgtcgctgggtctgccggtggcggcgacggtgaactgcgccgacaacaccggcgcgaagaacctctacatcatatcagtgaaggggatcaagggtaggctgaaccggttgccgtcagcttgcgtcggagacatggttatggccaccgtcaagaagggaaagcccgatctccgtaagaaggtgctgcccgccgtcatcgtccgccagcgcaagccttggcgccgaaaggacggtgtttaacatgtacttcgaagataatgctggtgttatcgtgaatcccaagggtgaaatgaaaggttctgctatcactggt

SEQ ID NO: 242711 - DNA, 391 bp, Glycine max
ggcttctctcgccatacatcacaacagaaccaaactcagaaccacactcacaaccaagctcgccaaaactaaggttttgcattgatggcactgtgcgaccgcgtcagatcgggaatctctctcttcaccaaatccacgttccttacttcccagcgatccagtctccaatgatccctcgttgcccctttcagttccctcgcctccagaaattacgccaacgtgccggggcaaaaggaaaccaaagttaaggtccctctggctttgtttggacgttcaggaaactatgcctcagccttgtatactgcaaccgttaaagccaattgcattggaaaaggttaagactgagctttcgcaatttgttgaggcagtatagaatagtcccatattttca

SEQ ID NO: 242712 - DNA, 299 bp, Glycine max
gactcatctcttacaacgaaaccctcttcatcttgttctatctgtgacgagcatcatggcctcaagagcagtgttattgttggctatgtgtgtgcttccggcgatggttgtggccattcgcccagcaaagaaccctttttgcgtgaacggtcgtgtctaccgtgacccttgccgtgctggttttgagacctcagctaccatctacattgctggtgctgagattatgttgcaatgcaagagcagggttagcaccgacgttgtgtatacgaagaatgggtacaccgactcaaccggaacat

SEQ ID NO: 242713 - DNA, 372 bp, Glycine max
ggacaccaaattcaatcaaagattgattcaattcaatgggttcagtaatgctcagtggaactgaaaagctcactctcagaaccctaaccgggaacggcttaggtttcactggttcggatttgcacggtaagaacttcccaagagtgagtttcgctgctaccactagtgctaaagttcccaactttagaagcatagtagtacccaagtgtagtgtctcggcttccaggccaagctcgcagccaaggttcattcagcacaaaaaagaggccttttggttctataggtttctctcaattgtgtatgaccatgttaattaaccctggccattggaccaaggacatgagggatgatgcccttgaacccgctgatctc

SEQ ID NO: 242714 - DNA, 385 bp, Glycine max
  unsure (1)..(385): unsure at all n locations
ggagtgagcaagagtgaagagcgaagagaatggctcccaagggtttaatctttttggctgtgttatgcttctcagcactgtcactgagtcgttgtcttgcggaggataatggacttgttatgaacttctacaaggaatcatgccctcaggctgaagacatcatcaaagaacaagtcaagcttctctacaagcgccacaagaacactgctttctcctggctcagaaacatcttccatgactgtgctgttcagagttgtgatgcttcactgttgctggactccacangaaagagcttgtctgagaaagaaacagatagaagctttgggttgagaaatttcanggtacattgagacatcanagaagctttggaaagggaatgcccagg

SEQ ID NO: 242715 - DNA, 377 bp, Glycine max
gattgaaactaaactccaagttcctaccatagtgctaggaaagtgagtgagagaaagagatcacatagcagaatggcttctactcaatgtttcttgcaccaccatgctcttaccacccctgccagatccccatcacaacgcatcatggttagcaccaagcctaaccagcttgtttgcaaggcacagaagcaagaggatattgatgtcagcccaatctctcgccggttagctctaaccgtgctcattggtgctgctgctgttggctccaaagtccaacctgctgatgcagcttatggggaagctgccaatgtgtttgggaaagccaaagacagacacagatttcctgccatacaatggagatggattcaaactatcga

SEQ ID NO: 242716 - DNA, 390 bp, Glycine max
ggttctagtgtatgtgattgttgtgactcgttcttcttcgtcgttatcttcttcttttgttgtttgtgtgtttgttttttctctcacctgaaaatgtcttgctgcggtggtaactgtggttgcggaagcgcctgcaagtgcggcaacggctgcggaggctgcaagatgtacccagacttgagctacaccgagtcaaccaccaccgagaccttggtcatgggagtggcaccagttaaggctcaattcgagagtgctgaaatgggtgttcccgctgagaacgatggctgcaaatgtggagctaactgcaactggaaaccctgcacctgcaatttaggtgttggagagctaaagcttcaagcagaaatggcccttagaaataatgataaaaac

SEQ ID NO: 242717 - DNA, 231 bp, Glycine max
gacagaaaggggctgccgctccccgaaaaaaacagatactgtgggaaaaaaaagagcgggacagaaaatgacgaccaagttcaagaagaacaaggagaagagaaggcacctcaacgccggacacggccgtatcggaaagcaccgcaagcatcccggaaggtccccgtaacgcccgtggcatgcaacaacaccgtaacctcatccacaagtaccaacctgggttcctccgga

SEQ ID NO: 242718 - DNA, 385 bp, Glycine max
ggttctagtgtgtgattgtttgttgttgtaactcgttcttcttcttttgttgttctgtgtttgtgtttgttttttctctcacctgaaaatgtcttgctgcggtggtaactgtggttgcggaagctcctgcaagtgcggcaacggctgcggaggctgcaagatgtacccagacttgagctacactgagtcaaccaccaccgagaccttggtcatgggagtggcacctgttaaggctcaatttgagggtgctgaaatgggtgtgcccgctgagaacgatggctgcaaatgtggaccaaactgctcctgcaacccctgcacttgcaagtgaggtgttgggagaacaaccttcatgccaagatagcccttaattaggaataatgataaa

SEQ ID NO: 242719 - DNA, 281 bp, Glycine max
ggtagcattcagtgaaacactagctagggtattgggagctctcgttgtttcggagttagggaccttacgcagccatggccactgctacgaatgccgccgccgccccaccacgccagctctcccagaaggaagctgacatccagatgatgttggccgccgacgtccacctcggcaccaagaactgcgacttccaaatggaacgttacatcttcaagcgccgcaacgacgggatttacattattaaccttgggaagacgtgggagaagcttcagctagcagct

SEQ ID NO: 242720 - DNA, 283 bp, Glycine max
gatcattatcactaccactagacagatgtcaaccctagtctactcgcttttcacttgttcactttcttccaaactctcaagcccaacgtagtcccttttcttctcccaccaacttcaccgtcttcttcctcgatcatgtcgcacttctagggcaactagcatgatgagcttattgccaatgctgcttacattggcacacctggaaagggtattcgtgctgctgatgagtcaacagggacaattggcaagcgtttggccagcatcagtgtatagaatgttgaat

SEQ ID NO: 242721 - DNA, 373 bp, Glycine max
ggagcaaaaccctaatccctatttttcttcctcagtagtgtcatttacgcttctcttctctgcagcaactatgcctaaccttaaggtcttcttcgacatgaccatcggcggtcaatctgctggccgcatcgtgatggagctctacgccgacgtcactccccgcaccgccgagaacttccgcgcgctttgcaccggcgagaagggcgtagggcggagcggcaagcccctccactacaagggctcgtccttccaccgcgtgatcccgagtttcatgtgtcagggtggcgacttcaccgccggaaacggaaccggcggcgagtccatttatggcgccaagttcgccgaccagaacttcgtgaagaagcacaccggt

SEQ ID NO: 242722 - DNA, 388 bp, Glycine max
gggttctgtcctcttttctcttctccctttttctctctgtctctctctctcggtctcgctcttcttctcatcaagcacagagttacagactcaccgatcttccgattctctttcgtcttggtttatgagctcgaaggagagacccactcttggtggcacgcggattaagacccgcaaacgaaatattgctgcgccgctggaccctgcagcattctcggatgcagtggtccagatttatttggataatgctggtgatctggaacttattgctaagagtattgaatcttcagaccttaacttttcaagatacggtgacaccttttttgaggttgctttcactgggggtcgtacacaacctggaactaccaagcctgatgagggggaccgc

SEQ ID NO: 242723 - DNA, 377 bp, Glycine max
ggtgctcactcatctatctattataaccaaacactcttcttcatattcttcttcttcttcttcttgttcttgttctatctgtgacgagcatcatggcctcgagagcagtgctattgttggctatgtgtgtgcttccggccatggttgtggccattcgcccagcaaagaaccctttttgcgtgaagggtcgcgtctactgtgacccttgccgtgctggttttgagacctcagcaaccacctacattgccggtgctgagattatgtttgcatgcaagagcagggttagcaacgaggtttgtgtacacaagaaggggtacactgactcaactggagcatacacaatgtacgtggacgaggatcacgcagatcaaatatgc

SEQ ID NO: 242724 - DNA, 259 bp, Glycine max
cagggggggatttccatggatctcctgaaccgtgtgcactctctttctgtgccgtctcatcttcgaactccgatggcgaacctgtggcgcgcggcaaccggcatgaccgacaatgccaccgattacgacagcgtctagttctggtctgaacccgagcggatcggctggctcaccaagcacggcgagtacatcaagacctggcgccgccgctggttcgtcctcaagcaacgcaagctcttctggttcaaggactccgccg

SEQ ID NO: 242725 - DNA, 359 bp, Glycine max
gggacatggttagataaatccgttgctggtttctagaacgctcttcttcaaagcgtgccgcaaacttttgcatccgaatccccgtttgttttggcagaagccatggccgatgacttcgacttcgcagataaagttcctccttcgttcgatcgcctgggaaatgtgatcaaggattccggatctaaagcgttaaatccgggtttaattgtcctcctggttgttggtgggttgcatttgacattcctcagtggaaattatgtgctctacacatatgcacagaacatcctccctcctagaaaaaagaaacccgtgtcaaagaataagattaaaaacgagatactaaagcaaggtgtctctgc

SEQ ID NO: 242726 - DNA, 380 bp, Glycine max
ggaggctgagttctgtaattgtgttttggctgtggacaatggctctgtcttctgggcttttcttgtgttcttcttcccgtgttctcccaccaccagaaacccacactttcatgaggaccaggccttcttctgctgccttgcgcaccatttccgttagctgttgcaccgtctctcagtcgtctaagccagcccgcaaaatccgtggtatcatgaaaccccgcaaagtctcccccgagatggaagacctcgtcggcgctcccgagatggctcgaacccaagtcctcaaacggatttgggcttacattaaggacaacaatccttcagaccctacagacaagaggactataaattgcgatgaaaaactgaagaaggtgtttgca

SEQ ID NO: 242727 - DNA, 267 bp, Glycine max
ggagagaaaatatggccatatcaatcagattcgttgagttgaacacaggggccaagactccttctcttgggttagggacttggcaagctgaacctggtgttgtacctgaagctctcaatacagccattcacgttggatacaggcatattgactgtgctagtgcgtataataatcaagcagacattggttctgctcataagaagctttttgatgatagtgtggtgaatcgtgaggacttatggatcacttctagactctggtgttcag

SEQ ID NO: 242728 - DNA, 404 bp, Glycine max
cagctgccagaaaacacacaagggggtggaagtatttgcagaactttgtttcccaacctccattgcctccgcttctacctcgctaccatgatcattcctcagaagaaccgcaaggagatctgcaaatacctcttctaagagggagtttgctttgcgaagaaggacttcactttggcgaagcaccctgagattgacgtgcccaatctgcaggtgattaagctgatgcagagtttcaagtctcgcgagtatctcagggagacctttgcctggatgcactattactggttcctcaccaacgatggaacccagtttctcagaacttaccttaaccttccttccgagagtgtccctgctaccttgaagaaacaggccaagccacctgtcacgccctttggcgggccatc

SEQ ID NO: 242729 - DNA, 400 bp, Glycine max
ggagtgtgagagaaaccagtgactgacttttcgagaaagaaaaacaaaaatgagtttccgtcattccatcatgaacgctcttcccaatcgcctcttcttcctcttcgtttctgcattagtttctgcgaagaaaactggtgatgtgacggagctgcaaattggcgtgaagcataaaccagtatcatgtgaagttcaggcacacaaaggtgacagagtcaaagtacactataggggaaaactcactgatggaactgttttcgattctagctttgaaagaaataatccaattgaatttgagcttggtactggtcaagtgatcaaaggttgggaccacggattattgggaatgtgtcttggtgagaagcgtaagctgaaaataccatcaaaacttgggtatgga

SEQ ID NO: 242730 - DNA, 327 bp, Glycine max
aggcgtcagaacacgagtcagtggggctgctaaaagactacagaatgggaacccaattaatctttgttttcaattccttatctcaataattctctttctccttcttctataactctcctctgtttactctgtttttttcacaaaacaacatggctgcatacagagaaaccatgaacatgaacatgatcgatagatccccggtttctccgcagcaaccacactcgccgtggcattctccggttccgtaccttttcggtggtttagcaactatgttgggtctcataaccttcgctctgttgatacttgcatgttcctattggaagctct

SEQ ID NO: 242731 - DNA, 367 bp, Glycine max
gatgctcccttgcttcactctcatcaaacaccacctttactcaactcctcccaattaaagttctttgggacacattcaacaagtttagttcaccaatcaaccttgttcctatattcacattcatatcatattataaattacattgacaagccttctccacttttttttttcacttctaaacattcagaaatgggagttggaggcacactggagtacttgtctgatctaatgggcagtggccaccaccaccacaagaagaagaagaagcagttccaaaccgtggagctaaaggtgagaatggattgtgatggttgtgagcttaaggtcaagaacgctctctcctcactaagtggggtgaaatctgtgg

SEQ ID NO: 242732 - DNA, 497 bp, Glycine max
ggcaactttagcggcacaacttctctagccacgtagccgttaggaattcccggctcgacccacgcgtacgtacggctgcgagaagacgacagaagggagaacatgaaaccgtaagctcccaagcagtgggaggaggctcgggactttgaccgcgtgcctgttgaagaatgagccggcgactcataggcagtggcttggttaagggaaaccaccggagccgtagcgaaagcgagtcttcacagggcaattgtcactgcttatggacccgaacctgggtgatctatccatgaccaggatgaagcttgggtgaaactaagtggaggtccgaaccgactgatgttgaagaatcagcggatgagttgtggttaggggtgaaatgccactcgaacccagagctagctggttctccccgaaatgcgttgaggcgcagcagttgactagacatctaggggtaaagcactgtttcggtgcgggccgcgagagcggtaccaaatcga

SEQ ID NO: 242733 - DNA, 309 bp, Glycine max
gattctaagatcgatcatcttcaatttccctatattacttgcaatattgattgaacactactagatcatgtgtataccgttgtatagctagctagctagctttctattgtctaatatacctttgtctgtgttgtaaattaaggtgcaagaagcaagtaatccctcataatacacacacacacatatatatatatataatggcggattggggtccagtggtgatagcagtggtgctgtatgtgttgctaagccctggtcttgtgtttcaattgccagggaagagcagagtggtggagtttgggaacatgc

SEQ ID NO: 242734 - DNA, 313 bp, Glycine max
gggcactcagtagagaattaaataaaatcaagaaagcatgcatatgatgaagaaggtgtgtgggtttgcaatagtggtgatggcagcactttttctggtggagatgagtcccatggcagaggctgtgacttgtagccctgtggagttgagtccctgtttgggggcaatcacgtcctcttcaccaccatcgacaacttgttgccaatgtgagggaacaaaggccatgcctctgtggttacctcaaaaaccctagtctgaggccatatgtcaactctcctggttccagaatggttgctagctcttgtggggttcc

SEQ ID NO: 242735 - DNA, 262 bp, Glycine max
ggcagcaacagcagcattcactgaaagcactcagtagggtttgcggtttcagagtttgtgacgcacgcatccatggccaccaccaccaacgccgccgcagccccgccgcgccagccctcccagaaggaagccgacatccagatgatgttagccgccgacgtccacctcggcaccaaaaactgcgacttccaaatggaacgttacatcttcaagcgccgcaacgacgggatttacattattaaccttgggaagacatgggaga

SEQ ID NO: 242736 - DNA, 397 bp, Glycine max
gaagaagagagagagagagaaagagagaagagaggagggtgtgtttctggtttttggaaatttcagcccccatcgaaaaacaagaagccccaacgatagtaatcatcgaaggaatttgaaaggtcgaaacttgagcatctgggatcgcgaaattggggattttggttaaaagggtataatcttcggaactgattgatggcaaaactgtacgtgaaggcggtgccaccggcggatctgaacaggaacacggattggttcacgtaccctggcgtttggaccagttacatcctcatccttttcttttcttggatcctcgtactctctgtcttcggttgttctcctggcatcgcttggaccatcgttaatctcgcacactttgctgtaacatatgactttt

SEQ ID NO: 242737 - DNA, 394 bp, Glycine max
ggttctagtgtatgtgattgttgtgactcgttcttcttcgtcgttatcttcttcttttgttgtttgtgtgtttgttttttctctcacctgaaaatgtcttgctgcggtggtaactgtggttgcggaagcgcctgcaagtgcggtaacagctgcggaggctgcaagatgtacccagacttgagctacactgagtcaaccaccaccgagaccttggtcattggagtggcaccagttaatgctcaattcgagagtgctgaaatgggtgttcgcgctgagaacgatggctgcaaatgtggagctaactgcacctgcaacccctgcacttgcaagtgatgtgttggagagctaaaacttcaagcagaaatggcccttagaaataatgatacaaactata

SEQ ID NO: 242738 - DNA, 377 bp, Glycine max
gatcgcacaacattattctttcgcaccttgcagaatcaattttctctctcaatcgtctttcatggctcgtaccaagcaaaccgctcgcaaatccaccggtgggaaggctcctaggaagcaacccgccaccaaggctgcaagaaaatctgcacctaccaccggtggagtcaagaagcctcatcgctatcgtcctggaactgttgctcttcgtgagatccgaaaataccaaaagagcacagagcttctgatccgcaagctcccctttcagcgtcttgttcgtgaaatcgcgcaagacttcaagactgatttgaggttccagagtcacgcggttcttgcgcttcaggaagctgcggaggcttacttggtgggtttgtttg

SEQ ID NO: 242739 - DNA, 253 bp, Glycine max
atatgagggccgatttcaaatattatgcttgtctggttcttacttgggtgctgaagaacgtggacctcacaatagaacgggtggcatgagtgtttccctttctagtcctgatggtcatatcattggtggtggtgttaataggcttgttgctgcaaacccagtgcatgtggtagcatgcagtttcgtatatgggggctccaagccaaagactaaagaagtgaccactaccactactactacaaaagatagcagt

SEQ ID NO: 242740 - DNA, 161 bp, Glycine max
aacaaaccgagaaagcttttctgaagcaaccaaaagtgtttctcagcacaaagaacactgggaagggaaagagacctggaaaaggtgggaaccgcttttggaagtccattgggcttggatttaagactcccagggaagccatcgaagggaactataatgac

SEQ ID NO: 242741 - DNA, 399 bp, Glycine max
gagtggaagagtgaataagagatatcaatatattatgataatggagggatacaataagaaggttatgattgtggggatggtgttgggcatggccatgattgggatggccaatggccaatactcgttttgtcgcatgcccagcgatgggttggcggcatgcaagccgagtgtgagtggggactatcctgctgatccctccactgcttgttgctcagccattgccaatgctgatcttaaatgcttctgccgcttcaatgattcgggccttctctctatgtatggtgttgatcccaacaagtgcatggaactcactgttaagtgcaaggttgtcgactctttccactgctagattcattagagggggcactaatcaatataaactacacaagggcacttaat

SEQ ID NO: 242742 - DNA, 375 bp, Glycine max
ggactagagaagaagagtgatatggcttgtaattctatctcccaagcagcttcaatgggcacacaaatatgcacccaaatagcttccatattctcaaagcccacccatccatacccggccccactagaccttttagtcaccgaactcacctccgttgcctctcaaaaaggcaacgtttttctatactgcgtgggccgcgaaggcctcatgctcaaggccctctgcatgcgcctcttccacctgggcctctcggcccactttgtcttcgacatgaccacaccccccatagccgccggcgacctcctcatcgcctctgccggccccggcggattctccaccgtcgatgccctctgcgccgtggcgcgctcaaacggc

SEQ ID NO: 242743 - DNA, 399 bp, Glycine max
ggagtgaggagactgagaaaacagaagaaaacaaaatggaagacacagtttctgcgttgaggtctttgatggtttctcactctccgccgctggatgccttagtggtgccctctgaagattatcacctgagcgaatatgtgtctgcacgagacaagcgccgcgaattcgtttccggcttcactggaagtgccggcttggcactttatacaaagaaagaagcactgctgtggacggatggacggtattttttgcaggctgagagagaacttagtgctgggtggaagctaatgcgaattggtgaagatcctgctgtagatatctggatggccgataatttgccaaaagaagcatccgttggggttgattcctggtgcatttcaattgatactgctcaaagat

SEQ ID NO: 242744 - DNA, 281 bp, Glycine max
gaactaagtagagaataaaatcaaatcaggagagcatgcatatgaacatgatgatgaagaatgtgtgtgggtttgcgatactgatggtggcagtgcagcttctggtggaggtgagtcccaaggcataggctgtgacttgtacccctgtggagctgagtccttgtttgggggcaataacttcctctcaaccaccatcaacaatttgttgccaaaaggtgagggaacataggcaatgcctctgtggttacctcaaaaacccaagtctaaggccatgtgccaat

SEQ ID NO: 242745 - DNA, 296 bp, Glycine max
gggaaggagccgtaccagcagcggaagctctagcttgggcagcgaatcacaatggcgagaggattgaagaagcatttgaagaggcttaatgccccaaagcattggatgcttgacaaactgggtggtgcatttgctcctaagccctcatctggaccacacaaatccagggaatgcctgccactcatactcattttgcgaaaccggctgaagtatgctctgacataccgtgaagtcattgctattctgatgcagcgacatgtccttgttgatggcaaagtcaggacagacaagacata

SEQ ID NO: 242746 - DNA, 342 bp, Glycine max
gactgcaactttgctctctgtgaggcttcaatttctaactaaggtttcgcttagagtaagcactaaccatgggggtcttcacctttgtcgtccgcaaatctggcagcgaatggagcgccaagcaacattccggcgacatcgaggcctctgccgattccaccttcgatctccaacggaagctcgtgcaagccgctctctccgttgattccaccggtggagttcagtcctccatctctcccgtgtcatctacctccgctgtgttccaggtgatagtaggttgtgcattattcgttggacgtggtggtggtgctgtatcaactgcacctgcacgtggtgctgccg

SEQ ID NO: 242747 - DNA, 384 bp, Glycine max
  unsure (1)..(384): unsure at all n locations
gaccgcaatacaaccttagattctcggagcgagagcgagaaacagaaacctatttttattttctctcttcatatcacttagactgagactggatgcttctgtatccatcatattatatgatgattattgaattgattatgcgttcagatttcacttcaggatcactttgacagtttgacttgtccggcaccaacttctggtattactattgtctgagttctcaggagttctttcacagaaggtagatgggttctagaatcccatctcataagcttagcaatggcctctacgtatcaggacggccgggagcagccanagaaagactccaacaatgacatcaacagccgtgccatataccggtggagacataaaaaagtctggaga

SEQ ID NO: 242748 - DNA, 301 bp, Glycine max
gagggtttttgtcgttgcgactaagagttgctgcttcttccgccactcagcacttcgctccctctgtgcttcaccaaccatggccgaaatcgaagctaccgttccagatccctctcaaatcgacgtcaaacttttcaaccgctggagcttcgacgacgttgaggttactgatatgtctctggctgattacattggagtgtccccgtcaaagcatgctacatatgttcctcacactgctggtaggtactcagtgaagaggttcaggaaggcgcagtgccccattgttgagagactcaccaac

SEQ ID NO: 242749 - DNA, 395 bp, Glycine max
gtctcaaagaaacttctgaagatggctggcatagcattcggaagcttcaatgattctgtcagttttgcctccatcaaggcctacattgctgagttcatctcaagccttctctttgtttttgccggtgttggttcagccatagcctatgctaagttgacatcagatgcagctcttgatccaactgggttggtagccgttgctatttgccatggttttgctctcttcgttgctgtttctgttggagccaacatttctggtggccatgtgaaccctgctgtgacctttgggttggctcttgggggccacatcaccatcctcactggtctcttctactggattgcacagcttctcggctccatagtggcatccttactcctcaagtttgtcactggcta

SEQ ID NO: 242750 - DNA, 405 bp, Glycine max
ggagagagagagagaaatggagaagacaggagtgttatcggcgaaggaggcattcgagaagcttgaaaaggtgggagaagggacatatgggaaggtgtacagagcaagagagaaggcaactgggaagatcgtggctctgaagaagactcgtctccacgaggacgaagaaggtgtccctcccaccactctccgtgaggtttccattctgcgaatgctctctcgcgatccccatgtcgttaggttaatggatgtcaaacaaggtcagaacaaggaagggaagacagtgctctacttggtatttgagtacatggacaccgatctcaagaaattcatacgctctttccgtcaatctggggaaaccattcctcgccatatcatcaaaagcttgatgtaccagctttgcaa

SEQ ID NO: 242751 - DNA, 395 bp, Glycine max
  unsure (1)..(395): unsure at all n locations
ggcagtagaatagtaatagtggtaacaaaaggcaacagagaacagaagagaaaggaaaagagagggtttggtgagttacccaagagaaaggatgaagagagagcgccagcagcttggttccaacgcaggaacctcaagctgcggttattcaagcggaaaatcgaatctttgggaggaagaaggaggcatggacgagcttcttgcagtggtgggttacaaggtgaggtcatcggacatggcggaagtggcgcagaagctggagcgtcttgaggaagccatgggaaatgtccaagatgacctcacggacctttcaaacgacgccgttcattacaacccttccgacatctccaactggctccaaaccatgctttccaattttgaccctctcncctccg

SEQ ID NO: 242752 - DNA, 370 bp, Glycine max
gtgttgtgttgaagtagcaagctagcaaagatgtttggcatcttaggaggcaataaggggcacaagatcaagggtactgtggtgttgatgagcaagaatgtgttggacttcaacgaaatagtgtccactactcagggtggtttggttggtgctgccaccggcatcttcggtgctgccaccggtattgttggtggagttgtcgatggtgctactgccatcttcagtcgcaacattgccatccagttgatcagtgccaccaagactgatggacttggaaatgggaaagttggaaagcaaacctatttggagaaacatcttccttcgttaccaaccttgggagacaggcaagatgcattcagcgtttattttg

SEQ ID NO: 242753 - DNA, 303 bp, Glycine max
caagcagtggttgaatgagattgatagatatgcaaatgacactgtatgcaagcttcttgtggggaataaatccgatctagttgataacaaggctgttgactcgctaacagccaaggcatttgcagatgagcttggtatccctttccttgagacaagtgctaaagactcaatcaatgtggagcaggctttcttgaccatggcagcagagattaagaagaagatgggaagccaaacaactactggtaagtcggcagaaagtgttcaaatgaatgggcaaccaatcccacagaagagcaactgctg

SEQ ID NO: 242754 - DNA, 367 bp, Glycine max
  unsure (1)..(367): unsure at all n locations
ggagtggaagtagtagcaagtacgtcgtatatgtggttgatcttttgctggttgtttgttttgttccttccaattgtcagatctgaatcaccggactcactcttcacactcactcacactgaatggcttctgaaggcgaccctcaccaccgccaccaccaccatcaagatcacgatcatcatcatcatgatcatgatcaccatcatcatcacgatggagagggagagaccaactcatgggtangtaaggatgggaaggtgtaccatagccacgatggtctggcgccgcattctcaagaacccatttactcccccggctacttcaccagaagagctccaccgcttctcaacagaaacttcaacgaaag

SEQ ID NO: 242755 - DNA, 398 bp, Glycine max
ggcagcgcttgagaccaagccccactcaaccaccacaccactctctctgctcttcttctacctttcaagtttttaaagtattaagatggcagagacattcctatttacctcagagtcggtgaacgagggacaccctgacaagctctgcgaccaaatctccgatgctgtcctcgacgcttgccttgaacaggacccagacagcaaggttgcctgcgaaacatgcaccaagaccaacttggtcatggtcttcggagagataccaccaaggccaacgttgactacgaggagatcgtgcgtgacacctgcaggaacatcggcttcgtctcaaacgatgtgggacttgatgctgacaactgcaaggtccttgtaaacattgagcagcagagccctgatattgc

SEQ ID NO: 242756 - DNA, 425 bp, Glycine max
ccaggcgtcagacagaaagggcaggcacattgagaatggggcgtgttcgcacgaagacggtgaagaaatcctcgcggcaagtgatagagaggtactactcccgcatgacgctggacttccacacgaacaagaaggttctggaagaggtggccatcattccctccaagaggctccgcaacaagatcgcggggttctccacccatctcatgaagcggatccagaagggtcccgtgcgtggaatctccctgaagctgcaggaggaggaacgcgagcgtcgcatggacttcgtccccgatgtctccgccatcagggacgaccagatcgacgtcgatcaggagacgctcgacatgctcgccgccctcgggatgtccgaggttcctggcatcgttcaggtggatcctgttgccgtccaggcgcccctcggc

SEQ ID NO: 242757 - DNA, 398 bp, Glycine max
  unsure (1)..(398): unsure at all n locations
gacaacactcatagtagagtaaccaaaaggagagtgcaataactcgttgtacattcctagtgtgtgggagagacatggctaagatgtgtgttttggtgttggttcttgctctggctgtggccacaagtgccagaaacgttcccaaccccaaggatgctggtcttaaggaccagaagaacttcatcagctatggtggagttggtggttattccgggattgggaacaatggactgccttttggaggagctggtgccagaataggtggtggttttggcggaggtggtggacttggtggtgggctcagcggtcctaccggtgggatcgganggtttggcggtaccggtagcggtgtcggtggcggtattggtggtggcgttggaactggcgttggtggtggc

SEQ ID NO: 242758 - DNA, 305 bp, Glycine max
gacacacacgtaacttcatctgggttgcagggaaaaagaaaaataaaatgggttccgataataccaacttggagttcttgaaggagatcggtttgggctcctccaacattggttcttacattaatggccaatggaaagccactggttcttctgtcacttctgttaatccttctaacaatcagagcatagctcaagtgactgaagcgactttgcaagattatgaggagggattgcaagcttgcagtgaagcagccaagacatggatgactattccggcaccgaagagaggtgagattgtgagacag

SEQ ID NO: 242759 - DNA, 334 bp, Glycine max
gggtgctcgaagaagtcccattcattgcactgatagcatcgatagggatcgatcttaacgctgggggtaagagcaattcgaccaaacgaacagcatcaaagtccaatgacatctacctcaaattacatgtcaagctttatcgattccttgttcgaatgacagacatcaatttcaatgccgtgatactcaagcgcttgttcatgagcaaggttaacaagcctccaatttcattgtcaaagttaattaagtatacaaaagggaaggacgataaaattgctgtactactggggactgtaactgatgatatcagagtatatgacattccaccattgaa

SEQ ID NO: 242760 - DNA, 292 bp, Glycine max
ggggcgaggtggccatacagtgagacgatacagagtgcgttgttgctccttcgccacaactcgctgccaacatgggtatctccagagattctatgcacaagaggcgtgccactggtggtaagaacaacgcatggaggaagaacagaaagtatgagcttggtcgccagcctgctaacactaagctgtcaagcaacaagacagtcaggatgatccgggttagaggtggaaatgtgaagtggacggcactgatattggatactggaaattactcctggggaaatgaatctgtaac

SEQ ID NO: 242761 - DNA, 331 bp, Glycine max
ctgccatacgacgagatacgggggagcgagcgagcagtttcaaatagaggatttgggattgggaaggcgagggattgcgctgcgtctcttcctcttctctttcgattcatccctcattcataatcttcgaatccaataacctcagcctcacactcacacatacacacatctgaacgcgtatcgtccctcccatggcttcaaagcgcatcctcaatgagctcaaggacttgcataaagacccactaacttcttgcagcgctggtccagtagctgaggacatgttccattggcaagcaacgattatgggtcctgccgacagtccttatgctgg

SEQ ID NO: 242762 - DNA, 395 bp, Glycine max
  unsure (1)..(395): unsure at all n locations
tggctcgcaaggtgtctttgatccgagccatcatgtacatggtggctcagtgcttgggtgctatctgtggagttggtttagttaaggctttccaaaagtcttacttcaacaagtatggtggtggggctaattccctcgctgatgggtacagcacaggtactggattgggtgctgagatcattggcacctttgttttggtgtacactgtcttctctgccactgaccctaagaggaatgctagagattcccatgttccggttttggctccacttcccattggatttgctgtgttcatggttcacttggccaccatcccagtcactggcactggtatcaaccctgctangagtcttggagctgctgttatctacaaccaagataagccatgggatgac

SEQ ID NO: 242763 - DNA, 412 bp, Glycine max
ggttctagtgtgtgattgtttgttgttgtaactcgttcttcttcttttgttgttctgtgtttgtgtttgttttttctctcacctgaaaatgtcttgctgcggtggtaactgtggttgcggaagctcctgcaagtgcggcaacggctgcggaggctgcaagatgtacccagacttgagctacactgagtcaaccaccaccgagaccttggtcatgggagtggcacctgttaaggctcaatttgagggtgctgaaatgggtgtgcccgctgagaacgatggctgcaaatgtggaccaaactgctcctgcaacccctgcacttgcaagtgaagtgttgggagagcaagcttcacgcagagatagccctttaataggaataatgataaactattaatgtgtaactaagaacttatg

SEQ ID NO: 242764 - DNA, 392 bp, Glycine max
  unsure (1)..(392): unsure at all n locations
ggagtgagtagtgagaatggagtttcaagggttaccggaaggttgcattgctagtatactctctcgcactacgccggcggacgtgtgtaggttttccgtcgtatcaaagattttccgttcggccgctgaatcggacgctgtgtggaaacgttttctcccttccgattaccattccatcatttcccagtctccttcgcctctcaactatccttccaagaaggagctctatctcgctctctcggatcgccctatcatcatcgatcagggtaaaaaggtaggtancgtgttgtgtgtttcgcatcccttaanaacttttctgttgatttaatttgatggttaattctctgatgtctggaacgcagagctttcaattggagaaaaagagtgggaag

SEQ ID NO: 242765 - DNA, 383 bp, Glycine max
ggatcacatatggggatgagtggattgaggagaactgagcccgtcgagtgttttcctctgatttcatctggatctgcgacagatgacggtctttcatttcttcaattgcgcgattctcaccttcggcccccacgccgtctactattctgccacgcccttatctgagtatgatacactcggcacctctatcaaagccgctgttgtttatcttgcaacggcattagtgaagcttatttgtctagctacttttctcaaggtatcagagagcgatagctttgatccgtatcaggagtttttgaaggcgttaataggttttatagatgttgctgggccttattttgccttgacccagttgactcacaggaacatctctcagaatcata

SEQ ID NO: 242766 - DNA, 312 bp, Glycine max
ggagcaagagtgaagggcgaagagaatggctcccaagggtttaatctttttggctgtgttatgcttctcagcactgtcactgagtcgttgtcttgcggatgataatggacttgttatgaacttctacaaggaatcatgccctcaggctgaagacatcatcaaataacaagtcaagcttctctacaagcgccacaagaacactgctttctcctggctcagaagcatcttccataactgtgctgttcagagttgtgatgcttcactgttgctggactccacaagaaggatcttgtctgagaacggaacagatag

SEQ ID NO: 242767 - DNA, 306 bp, Glycine max
ggcacaagtttgttgagatagctagaagcaataagatgaaaatgaaagtgcttgttttgtttgttgctacagttttggtagcatatgaatgccatggctcagactaccagaagttccctctccaaatgaaaactgggtttggtgggcaatacagcaatgaggtggcatgtgccagttggaggcttggcgtggaagcaaacaacgtagtcaagtggcaaactgttcctgcagcttgcggagagtacatagctgactacgttctacgagaccaatatagatcagattccaaaacagttaaccaacaag

SEQ ID NO: 242768 - DNA, 322 bp, Glycine max
gaatctagtggaagagtgaataagagatatcaatatattatgataatggagggatacaataagaaggttatgattgtggggatggtgttgggcatggccatgattgggatggccaatggccaatactcgttttgtcgcatgcccagcgatgggttggcggcatgcaagccgagtgtgagtggggactatcctgctgatccctccactgcttgttgctcagccattgccaaggctgatcttaaatgcttctgccgcctcaaggattcgggccttctctctatgtatggtgttgattccaacaagtgcatggaactccctgtta

SEQ ID NO: 242769 - DNA, 283 bp, Glycine max
  unsure (1)..(283): unsure at all n locations
gactcgcagttgtattgttgaacaagggtttctctgtctgcttcttcactttctctcgtttcaatcgaaaccaaaacaaaaacatgggcagaaaattcttcgtcggtggcaactggaaatgcaatgggaccactgangaggtaaagaagattgttactactttgaatgaggctaaagtccctggagaagatgtcgtagaagttgttgtgagccctccttttgtgttccttcctgtcgtaaaaagtttgctgcgccctgatttccatgtttcggcacaaaactg

SEQ ID NO: 242770 - DNA, 209 bp, Glycine max
gaaaggtgggcgaggtagccagagagtgatacaatacagagtgcgttgttgctccctcgccacaactccctgccaacatgggtatctccagagattctatgcacaagaggcgtgccactggtggcaagaagaacgcatggaggaagaagagaaagtatgagcttggtcgccagcctgctaacactaagctgtcaagcaacaagacagtc

SEQ ID NO: 242771 - DNA, 353 bp, Glycine max
  unsure (1)..(353): unsure at all n locations
ggaaacacccattcaacattttctctgtctatctctcgttgtagcgtagcgcagcagttgaatttggaaaacaagatgtctcaccgcaagttcgagcacccgagacacggttcccttggctttctcccaaggaagcgagcttctcgtcatcgcggaaaggtgaaggctttcccaaaagacaatcctagtcaaccatgcaggttgactgcctttgtgggctacaaaagctggaatgacccacattgttagagaggttgagaaacctggatcaaagcttcacaagaaagagacatgtgaagctgttactatcattgaaactcctccattggntgttgttggagttgtgggatatg

SEQ ID NO: 242772 - DNA, 348 bp, Glycine max
gcagtctcaccctgccacaacactacactagcaagcacacacctttagcacaatcaccaatggcttcttccgacagcaagcttcccctgaaacccatccctggaagctacgggcttcctttctttggacccatgagtgacagacatgactatttctacaagcaaagacgcgacaagttctttgccgaacgaattaagcagtacaactctacggttatacgaaccaacatgccaccgggtcctttcatttcctctaatcctagagtcatcgctctcctcgacggtgtctccttccccattcgattcgacaactcaaaggtcgataagcgcgatgttctcgactgcacct

SEQ ID NO: 242773 - DNA, 312 bp, Glycine max
gattgtaacagagaaagaaacatttgagcaaaaatggttcaagcacagcctctacaacatgttggtaatggtgcagggaaaggagatcaagcttattttgatccaagtgctccaccacccttcaagattgcaaatatcagagcagcaattccaaaacattgctgggagaagaacacattgagatctctgagttatgttctgagggaagtgttgggagtgactgcattggtagctgcagcaatcggcttcaatagctggttcttctgggcactctattggcctgcacaaggcacaatgttttgggcacttttt

SEQ ID NO: 242774 - DNA, 394 bp, Glycine max
ggttctagtgtatgtgattgttgtgactcgttcttcttcgtcgttatcttcttcttttgttgtttgtgtgtttgttttttctctcacctgaaaatgtcttgctgcggtggtaactgtggttgcggaagcgcctgcaagtgcggcaacggctgcggaggctgcaagatgtacccagacttgagctacaccgagtcaaccaccaccgagaccttggtcatgggagtggcaccagttaaggctcaattcgagagtgctgaaatgggtgttcccgctgagaacgatggctgcaaatgtggagctaactgcacctgcaacccctgcacttgcaagtgaggtgttggagagctaaagcttcaagcagaaatggcccttagaaataatgataaaaactata

SEQ ID NO: 242775 - DNA, 386 bp, Glycine max
gacagctcttggctttagcaaattccaattcccaattcccaattcgaaacccttattcctttcaaagaaccaagttgagtgatcgtgatggcaccaaaggcagagaagaagccagcggagaagaagcccgcggaggagaagaagtcgacggtgggagacaaggctccggcggagaagaagccaaaggccggaaagaagcttccgaaggaaggaggcgccggcggagaagggaagaagaagaagagaaacaagaagagcgtggagacatacaagatctacatcttcaaggttctgaagcaggtccaccctgacattggtatctcaagcaaggccatgggaatcatgaacagcttcatcaacgacatcttcgagaagcttgcccagga

SEQ ID NO: 242776 - DNA, 318 bp, Glycine max
ggaacttctcacgttcatttctacacatccctagctctgtcgttccgtcgttgacgatggcgtttcgggtgcgaagccctgacctccgctctctctttcttctctctctcttgtccatcgcttccgccaatgtcgtcttcgaagagcgtttcgatgacgggtgggaaaatcgatgggttaaatcagattggaaaaaagatgagaacgtggctggggagtggaaccacacctctggtcaatggaatggagacgctaatgacacaggtattcataccagtgaggattacagattctatgctatttcagctgagtaccctg

SEQ ID NO: 242777 - DNA, 371 bp, Glycine max
  unsure (1)..(371): unsure at all n locations
gctgatccgaaacgaacctcaacaacgctgaacgcagaaaggggaaaaaggggattagggtttaggaagcagcgacaacaatggatttcacagcggagaagaaggaatcagagagcaacaccgaaaatgctcatccaacaactttagattcttcttctcaattggcatcggcacttgattccagcaacaaagaaatcgaagaacgacgagctcgtgaactcaaagccggtcttcancccctcaagcacaagtttgtcttctggtacacgcgccgaacacctggagttcgaaatcaaacatcatacgaaggacacatanagaanattgttgaatttagtacggttgaaggattttgggtctgctactgccat

SEQ ID NO: 242778 - DNA, 361 bp, Glycine max
  unsure (1)..(361): unsure at all n locations
gacacagagttgcaagagaaagataaaagaagatggcgactcttgattccgacgtgcctatggttcccgccggcgagccctcgagcagcgccggtccttcttccaagaagcccaagcgcttcgagatcaagaagtggaacgccgtcgctctctgggcttgggacatcgttgtcgataactgtgctatctgccggaaccacatcatggatctctgcatcgagtgccaagccaaccaggctagcgccactagcgaggaatgcactgtggcttggggagttttgtancatgcttttcacttccattgcatcagtcgatggctcaagactcgtcaagtttgtcctctagataacagtgagtggga

SEQ ID NO: 242779 - DNA, 257 bp, Glycine max
ggcacaagtttgttgagatagctagaagcaataagatgaaaatgaaagtgcttgttttgtttgttgctacagttttggtagcatatgaatgccatggctcagactaccagaagttccctctccaaatgaaaactgggtttggtgggcaatacagcaatgaggtggcatgtgccagttggaggcttggcgtggaagcaaacaacgtagtcaagtggcaaactgttcctgcagcttgcggagagtacatagctgactac

SEQ ID NO: 242780 - DNA, 367 bp, Glycine max
  unsure (1)..(367): unsure at all n locations
ggcacttcaattgcaatcaaattagttcattctctttgcgcagttccctacctctcctttcaagatgcagatcttcgtcaagaccctcaccggaaagaccatcacccttgaggtggaaagctctgacaccatcgacaacgtcaaggccaagatccaggacaaggaaggaattcccccggatcagcaacgtctcatcttcgccggaaagcagctcgaggacggccgtaccctcgccgactacaacatccagaaggggtcaacccttcaccttgtccttcgtctccgtggtggcatgcagatcttcgtcaagactctcactggcanaaacataaccctagaggtcgaaagctctggacacattgacaac

SEQ ID NO: 242781 - DNA, 386 bp, Glycine max
atagcgaagtttcatttctttggattagaaatttttcccaaagctgatcgagaagccagccaggccaggagttgaagaatgggaagggggaagatcgaaatcaaaagaatcgagaacacaacaaatcggcaagtgaccttctgcaagagaagaaatgggcttctgaagaaagcttatgagctgtcagtgctgtgtgatgctgaagtttccctcatcgtcttctccagccgtggccgtctctatgagtattccaacaacaacataagatcaaccatagagaggtacaaaaaagcctgttcggatcattcaagtgcgagcactaccacagaaatcaatgctcagtaatatcaacaagaatctgctaagctgcgacagcaaatacagat

SEQ ID NO: 242782 - DNA, 388 bp, Glycine max
gacacatgcccatcatcaaagtttcttcctttctctgctctttgtcttctctgacacatttggggccttgttgagtgtgtttttgcaagagggtatggcgaaggacgttgaggttgctgagcgtggctccttctctgggaaggactaccaggaccctccatcagcaccactcattgatgctgaggagctcacaaagtggtccttttacagggctcttattgctgagttcattgccactttgctcttcctctacattactgtgcccacagttatagggtacaagcaccagacggatcatgctgatgcgtgtggtggggttggcattcttggcattgcatgggcctttggtggcatgatcttcatccttgtctactgcactgctgggatt

SEQ ID NO: 242783 - DNA, 369 bp, Glycine max
gggattgaggagaagtgagcctgtggagtgttttcttctgatttcatctggatctgcgagagatgacggtctttcatttcttcaattgcgcgattctcaccttcggcccccacgccgtctactattctgccacgcccttatctgagtatgatacactcggcacctctatcaaagccgctgttgtttatcttgcaacggcattagtgaagcttatttgtctagctacttttctcaaggtatcagagagcgatagctttgatccgtatcaggagtttttgaacgcgttaatacgttttatagatgttgctgggctttactttgccttgacccagttgactcacaggaacatctctcagaatcataaatttc

SEQ ID NO: 242784 - DNA, 379 bp, Glycine max
gaactccaaagatccaatttcactatataaattgtgacgaaagcaaaatgaattcacatagctgagagagaaaggaaaggttaactaagaagcaatacttcaatggccacccttgttgttcataaccaaacttcttctgctcaagatgctgaggctctccaacaggctttcaaatgatggggggctgatgacaaggccattatagcaatactgggtcacagaaatgttcatcagaggcaagaaatcagaaaagcttatgaggagatttaccaagaggatctcatcaaacgccttgagtccgagatctctggtgactttgagatagctatgtaccggtggatgttgcagcctgcggatcgtgatgctgttttggtgaatg

SEQ ID NO: 242785 - DNA, 313 bp, Glycine max
ggttctagtgtgtgattgtttgttgttgtaactcgttcttcttcttttgttgttctgtgtttgtgtttgttttttctctcacctgaaaatgtcttgctgcggtggtaactgtggttgcggaagctcctgcaagtgcggcaacggctgcggaggctgcaagatgtacccagacttgagctacactgagtcaaccaccaccgagaccttggtcatgggagtggcacctgttaaggctcaatttgagggtgctgaaatgggtgtgcccgctgagaacgatggctgcaaatgtggaccaaactgctcctgcacccct

SEQ ID NO: 242786 - DNA, 382 bp, Glycine max
gctcaaagacaacaatggcaccaacagccaagactctgacttacctggcccaggagaaaaccctagaatcgagcttcgttcgggacgaggaggagcgtcccaaggttgcctacaacgaattcagcgacgagatcccagtgatttctcttgccggaatcgacgaggtggatggacgcagaagagagatttgtgagaagatcgtggaggcttgcgagaattggggtatattccaggttgttgatcacggtgtggatcaacaactcgtggccgagatgacccgtctcgccaaagagttctttgctttgccaccggacgagaagcttcgttttgatatgtccggcgccaaaaaggggtggatcattgtctccagccatctccaagg

SEQ ID NO: 242787 - DNA, 318 bp, Glycine max
gggagcaatacatatcattcattcagaggcaacaaaggagttgtaaattaagagcatggctgcacaagctcttgtatcatcatcatctcttaccttctcagccgaggctacaagacaaagtcttggaccaagatcactccaatctccatttggcttctcaagaaaagcctcctttcttgttaaggcagctgctactccccctgtcaagcaaggatcagacagacctttgtggtttgcatcaaagcaaagtctttcctacttggatggcagccttccgggtgactatggatttgaccctctgggactttcggaccctga

SEQ ID NO: 242788 - DNA, 393 bp, Glycine max
  unsure (1)..(393): unsure at all n locations
gaactcaagtcattagcattcttctttgactttttggtctaaaaccggtttctcttgtcacaccaaatggaccgacccgccgccatattttccgacaccgtcaacctcaacggcacggtgacgcagctgtctctgctcgccgacgggaggctgtggtggccggagggcggtcaacgcaatttgagcatcgagaaagaggttctcgggttcaccggcgacggtcccgatataaggctcaaaacaatcgtggaaaccgaagatggatgctgtggcggtgcaagcagagcaaaactagtccgaaacgacgtcgtttttcggccatcgtccgaggaaacgcatangctctggtgccagaagcttggcgaattcatcgattctctcggacgacccaag

SEQ ID NO: 242789 - DNA, 399 bp, Glycine max
ggaaatcgagaagaagaagaagaagaagatggagaagtatcagatctggagcaggagaatagcgttggcagcgtttgcgtttgctctgctgttccaatcggcctcagcagacgacgtcgttgtgctctctgaagataacttcgagaaggaagttggtcaggacagaggagctctcgttgagttctatgctccttggtgtggacactgcaaaaagcttgctccagaatatgaaaagcttggtagcagcttcaagaaagccaaatctgttttaattggcaaggttgactgtgatgagcataagagtttgtgcagcaagtatggagtctctgggtacccaacaattcagtggtttccaaaaggatctcttgaagccaaaaagtatgaagggccacgcactgc

SEQ ID NO: 242790 - DNA, 366 bp, Glycine max
  unsure (1)..(366): unsure at all n locations
ggtatactaaagattaaagaatagtataatatagaagattggggttagggtttgatcgcaacgcaatggctggcaccggcatccatccataccaccagcaatgggctccggcggcagccgctcctcctcctcctcctccggcagccgccggcggtcctcctcctcacccaggggaggaggttcgaactatattcataactggtcttccggaagacgtgaaagagagagagctgcagaatctgctgagatggttgcccggtttcgaagcatctcaattgaatttcaaagctgagaagcccntggggtttgctctcntctccgcaccacaccaagcactcaccgccaaagacattcttcaagacatgc

SEQ ID NO: 242791 - DNA, 355 bp, Glycine max
  unsure (1)..(355): unsure at all n locations
gaaattcgaaattccaatccaatttccctatctctctctgtctctatatctgtatttctgaattttgggaatagaaaaaccctaagcaaagcaaagcggtaaggatggggaacacggagaagctgatgaaccagatcatggaattgaaattcacttcgaaatcgctgcagcgtcaatcgcgtaagtgcgagaaggaggagaaatcggagaagctgaaggtgaagaaggcgatcgagaaaggcaacatggacggcgctcgaatctacgcggagaacgcgattcgtaagcgcacggagcagatgaactacctccgcctggcctcgcgcctcgacgccgtggtcgnccgcctcgacac

SEQ ID NO: 242792 - DNA, 371 bp, Glycine max
gaaactaaagataaacaaaatttagaaacaaaaacatgttggtgaaggtgtacggtccaacctatggagcccccaagagggtgctggtgtgtctgattgagaaggaaattgagtttgaaacagtacatattgatctcttcaagggagagaataaggaacctgagttcctaaagctgcagccatttggatcacttcctgttattcaagatggtgattatactctctatgaatctcgtgcaataatcagatactttgcagagaagtataaagaccaagggacagacttgttgggaaagacaatagaagaaaaaggtctagtggaacaatggcttgaagtagaagctcataacttttcaccaccactctacaat

SEQ ID NO: 242793 - DNA, 206 bp, Glycine max
ggcagtttcaaattttcttttccttcactttcccgagaaaaaaataacacttttcactttcttcactacgttctcacttcgatatggctcgtacgaagcaaaacgctcgcaagtccaccggtggcaaagcgccacgtaagcagctcgccaccaaaggcgctcggaaatccgctccggcgaccggaggagtgtagaagccccaccgc

SEQ ID NO: 242794 - DNA, 308 bp, Glycine max
  unsure (1)..(308): unsure at all n locations
ggatcatgcattcaagaagattaggttgagagctgaagatgtgcaagggaagaatgtcctgacaaatttctggggaatggatttcacaactgacaagctgaggtcattggtgcgaaaatggcaaactctaattgaagcccatgtggatgtgaagacaactgataactacacattgaggatgttttgcattggatttaccaagagaagagctaaccaagtgaagagaacctgctatgcacaatcaagccagattagacagattcgtaggaagatganggagatcatgaccaaccaagcaacatcctgtg

SEQ ID NO: 242795 - DNA, 403 bp, Glycine max
gacaacacaggcgcagagcgtgatccattgacgaagatggtgcagcgtctcacctaccgcaagaggcacagctatgccaccaaatccaaccaacacagggtcgtcaaaacccctggtgggaagctcgtttatcagaccaccaagaagagggccagcgggcccaagtgccccgtcactggcaagaggattcaggggattccacacttgaggcctgcagagtacaagagatcaaggttacccagaaaccgtaggactgtcaaccgtgcatatggcagagttttgtctggaagtgctgtcacggagacgattatccgagctttcttagttgaagagcaaaacattgtgaagaaggtcttgaagattcagaaggcaaatgaaaagcaagcctcacaggcttgaattt

SEQ ID NO: 242796 - DNA, 341 bp, Glycine max
ggaacctttgcattctattcattcaagattcagcaagtgcgttttggaagcagagaccgaaatacttcgagatggcccgtacaaagcaaactgctcgtaagtcaactggaggaaaagctcccaggaagcagcttgcaaccaaggctgcacgtaagtctgcaccaacaactggtggtgtgaagaagcctcatcgttatcgccctggaactgttgctcttcgtgagattaggaaataccagaagagcactgagctcctaatcaggaagcttcctttccagaggttggttcgtgaaaatgcccaggatttcaagactgatctgcgtttccagagccatgctgtg

SEQ ID NO: 242797 - DNA, 349 bp, Glycine max
gtaagtcaactggaggaaaagctcccaggaagcagcttgcaaccaaggctgcacgtaagtctgcaccaacaactggtggtgtgaagaagcctcatcgttatcgccctggaactgttgctcttcgtgagattaggaaataccagaagagcactgagctcctaatcaggaagcttcctttccagaggttggttcgtgaaattgcccaggatttcaagactgatctgcgtttccagagccatgctgtgcttgcattgcaagaggctgctgaagcataccttgttgggctctttgaggacactaacttgtgtgccattcacgccaagcgtgtgactattatgcccaaggatat

SEQ ID NO: 242798 - DNA, 356 bp, Glycine max
  unsure (1)..(356): unsure at all n locations
ggtgcacttgaatgagagagagatatcctgaagtgagggttttcacttggtggtgaccacctatagtgatggaactgatatttacatagactccaattacattcaagatatatggccattcaccactaaacttgggctttcgttttcggtcttctaggcaacgtgatctcctttatggtgttccttgcgctattaccatctttttaccaaatctacaagtaaaaatcatccgaagggtttcaatcactaccttaagttgttgcactgttcagttcaatgctctggatcnactatgcattttgcaaactggatgctatcctccttctcattactattaactcctttggatgtgtgat

SEQ ID NO: 242799 - DNA, 382 bp, Glycine max
ggccgctcactctctagggtttttatttctctcttctctctgcatcgcttcaggttcttctgaaaagatgtctcgcgtgtatgttggtaacttggattcacgagtcaccgagagagatctcgaagacgaattccgtgttttcggagttattcggagtgtttgggttgcacgtagaccacctggttatgcttttattgactttgatgaccgcagagatgcacaggatgctatccgtgaattggatggcaagaatggttggagggttgagctttctcacaactctagaggtggaggtggtggtcgtggtggtcgctctggtggttctgatttgaaatgttacgagtgtggtgaacctggtcattttgctcgtgaatgtcgcatg

SEQ ID NO: 242800 - DNA, 400 bp, Glycine max
ggaacaacattgtatgaacagagaacagttgagttgaggctaatcaatgctatatagagcgcaatcatagtccctctttcttctcttccgccatcgttttctttgaaacgcacagcttcaatcaccgaccacaccacccatcaacgacatgcttcctctttcccttctcaagactgcccaaggccaccctatgttggtggaactgaaaaatggggagacatataacgggcatttggttaattgcgacacatggatgaacatccatctgcgagaagtcatttgtacatctaaagacggagatagattttggaggatgcctgaatgctacatacgaggcaatacaatcaagtaccttcgagtacctgatgaggttattgataaagttcaagaagaaaccaag

SEQ ID NO: 242801 - DNA, 379 bp, Glycine max
  unsure (1)..(379): unsure at all n locations
gacacaccgtttgttctattcttaactcaacttctgctacccactctcttcttccaagtccaaccacgcttttctctacagtcatgggcaaggtcaagatcggaatcaacggatttggaagaattggccgtttggttgccagagtcgctctgcaaagagacgatgtggagctcgttgccgttaacgaccctttcattaccaccgattacatgacatacatgtttaaatacgacagtgttcacggacactggaagcatcacgatgtcaccgttaaggacgnagaagaccttctcttcggtgacaagccagtcactgtttttggacacaggaaccctgaagagatcccatgggggtcaactggagctgatatcattgttga

SEQ ID NO: 242802 - DNA, 386 bp, Glycine max
  unsure (1)..(386): unsure at all n locations
agaaggggacggcaacagaagaataatcaaatttctcagatctatccgacgtcgtcgcagatccaccaaccgttatggctgccttcagcggtgatgaaacggctccgtttttcggcttccttggagccgcagctgccctcgtcttctcctgtatgggagctgcctatggcacagcaaagagtggtgtgggcgtggcttccatgggtgtgatgagacctgagctggtgatgaagtctattgtccctgttgtcatggctggagttttgggtatttatggccttattattgctgttattatcagtaccggtattaatccanaggccanatcttattacctctttgatggttatgcacatctctcctctggtcttgcctgtggcttggct

SEQ ID NO: 242803 - DNA, 376 bp, Glycine max
  unsure (1)..(376): unsure at all n locations
gagggtttcagtggtgttagatctgtacccgcctagccattgatttggaaaagtccaagcttcaaagatgagtaagcttcagagtgatgctcttagagaagctatctcaggaatcatgactgattccaaggaaaagaacaggaaatttgtggagaccattgaactccaaattgggctgaaaaactatgatccccagaaggacaagcgttttagtggctctgttaagttgcctcacattcctcgccccaagatgaagatttgtatgcttggagatgcccaacacgttgaagaggctgagaagataggattggactacatggatgttgagggcttgaagaagcttancannaacaagaaattggtgaaaaaactagcc

SEQ ID NO: 242804 - DNA, 363 bp, Glycine max
  unsure (1)..(363): unsure at all n locations
gatagtatcggctataagtggacagtgggataagtggtttggtggtggcaacttgccggcgtttgtgttgggtgccgtggcggctgccgtgagtgccgtgttagcggttgttctgctgccaacaccaaagccagcagatgtggccaaggttacttccgtcactgctgggagtttccattagtatatattatagagttttacatgcatgggacaatattagatggagacttttaatttaaatttggtgagtgtgtattatttaggtattagacccatcanataactctttaaggtgggcttaagttttatccttgttttctctaatanatatatgtacaacaacattaaaaaattataaatcca

SEQ ID NO: 242805 - DNA, 374 bp, Glycine max
  unsure (1)..(374): unsure at all n locations
ggagttggatacttgcatgagggcttgaacagtcttgatcgtgacattgtgactcagctatttgaagctggctggattcaagtctgtgttttaaacagttccatgtgttggggagtgacattgtcggctcatttggtagttgtgatgggcacgcaatactatgatgggcgagagaatgcacagacagattaccccgttactgatcttctgcagatgatgggttcatgcagcccgtcttttggtagacaatttctggaaaatgtgtcatcttgtgccatgctcctcgtaaggagtactacangaagttcctatatgaagcattcccggttgaaagcccatctcatcacttcttgcatgataacttgaacgctgaa

SEQ ID NO: 242806 - DNA, 375 bp, Glycine max
ggaatgaatgattttaattgagcggcggggcagaggaaggggcagagttttggagtttgaaagagaaaatattgattgcagttgagttctaatgagtaacgaatacgattacctgttcaagcttctcctaatcggagactcttccgttggaaaatcctgcttgcttctcagattcgctgatgactcctatgtcgacagctacataagtaccattggagttgatttcaaaatcagaacggtggagctggaagggaaaaccgtcaagctgcagatttgggatacagctggacaggagcgattcaggactataacaagcagttattatagaggagcacatggaattattattgtctatgatgttactgagatggaaag

SEQ ID NO: 242807 - DNA, 396 bp, Glycine max
  unsure (1)..(396): unsure at all n locations
ggtttcggacaagaatatccctcaagacattggaataagacaaaccctatccttggtctgttccttcattcttattgtctccccgcatcgtacgccgccgacacagcttcgaatcgctgccaagtgctaacaaacgcctctgagtctctgacaccaacgcaactctctctgctcacatttttgaaggagatggtgaacgtgatggagtggcagaagcagcgttggcaaccgaatgggaacgcggaaatgatgtacgtgaaagtgatgaccgacgaacagctcgagactctgcgcaaacagattgcagtttacgcaaccatctgtgaacaactcatcgaaatgcacaaaaacatctcctcgcaccaagatcttgcanggattaggctggggaatatg

SEQ ID NO: 242808 - DNA, 391 bp, Glycine max
ggtttcggacaagaatatccctcaagacattggaataagacaaaccctatccttggtctgttccttcattcttattgtctccccgcatcgtacgccgccgacacagcgttcgaatcgctgccaagtgctaacaaacgcctctgagtctctgacaccaacgcaactctctctgctcacatttttgaaggagatggtgaacgtgatggagtggcagaagcagcgttggcaaccgaatgggaacgcggaaatgatgtacgtgaaagtgatgaccgacgaacagctcgagactctgcgcacacagattgcagtttacgcaaccatctgtgaacaactcatcgacatgcacataaacatctcctcgcaccaagatcttgcagggattatgctgggg

SEQ ID NO: 242809 - DNA, 278 bp, Glycine max
gaactagcaatatgaaatttgcaatgaatggctgcatattgattggaactttagatggggccaatgttgaaataagggaagaggttggtgcagacaacttcttcctctttggtgccaaggctcatgaaattgctgggctgaggaaagaaagagcagagggaaagtttgtgcctgatccacgatttgaagaagttaaagaatttgtcagaagtggcgtttttggatcttacaactatgacgaattgatgggattcttagaaggaaatgaacgttttggt

SEQ ID NO: 242810 - DNA, 345 bp, Glycine max
ggttggattgttgctagcagctatgggatttgacaatagcactcgtttatatcttgcctctcacaaggtctatggtggagaggcaaggatttcaactttgagggaattatttcctctgatggaaggcaagaagagccttgcttcatctgaagagcgttctcagataaagggaaaagcttctctattagctgcacttgactactatgttggcttgcatagtgacatcttcatctctgcttctccaggaaatatgcacaatgcattggttggacaccggacatacttgaacttaaagactataagggcaaatatggcattgatgggtcagcttttcctgaataaaac

SEQ ID NO: 242811 - DNA, 299 bp, Glycine max
  unsure (1)..(299): unsure at all n locations
ggccgctctctgagaaaaacagatagtgtgggagagagaagagcggaagagaaaatgacgaccaggttcaagaagaacaggaagaagagaggtcacgtcagcgccggacacggccgtatcggaaggcaccgcaagcatcccggaggtcgcggtaacgccggtggcatgcatcaccaccgtatcctcttcgacaagtaccatcctggtttcttcgggaaggtangcatgcgctacttccacaaacttcgcaacaaattctacaatccgatcatcaacatcgacaagctgtggtccctcct

SEQ ID NO: 242812 - DNA, 304 bp, Glycine max
ctatgacaacaaggatggaacagtttttgttgcatctggttctaatggccagattgggctctactggggtgttgcagctgatggttccatagttatttctgaaaacctggagcttataaaagcaagctgtgctaaatcatttgcaccatttccgaatgggtgtatgtttcatagtgagcatggtctcatgagcattgaacatccaacaaagaagatgaaagcaatgcctaagattgacagcgagggatttatgtgtggggctaacttcaatgttgactctcagacaaagattcaagtgatgcct

SEQ ID NO: 242813 - DNA, 373 bp, Glycine max
ggtcactcataatcaccaaatagaagccataaacaaatgaatgccatagcagcagaacaagtgctggagccatggcacaagctagacgacaaagtcgttttggtgacgggtgcttcctcggggctcgggcgagatttctgcatcgacctcgccaaagctggctgctgtgtcgtcgcggcagctcgtcgcctcgatcgcctcacttccctctgccacgagatcagccaccgatggccctcgaacgtcggtatccaccgcgcggtggcggtggtgcttgatgtcgccgccgatggccccgccatcgacagggctgtgcagaaggcctgagacgcctttggccgcgttgattccttgattaacaacgctggtgtca

SEQ ID NO: 242814 - DNA, 307 bp, Glycine max
aggggaacatataggtgtcgtatcgatgattaacgagtcattgttgcaactagagcaggaagcattgcacatttaattaagcaatcgtgtgcacgaaattgctattccagagttatgagcgttaatggctatcagcataatacaatatttgcgatgagggacattaaatagtgggaagagcttacctatgatgacaggattttctcaattgatgaacgacgtccttgttactgtggcttcccaaagtgcctaagtatactaaatgatactgacgcagaagaacgagctgctaccctatatgcaccac

SEQ ID NO: 242815 - DNA, 389 bp, Glycine max
gagtgttccatccatcccttcttcatcttctacttctatctccctacatactcattcaaacagacatgaaaattatggaatcattagctcttatcttctacagtactcttgttttagctacgatttcagttccagcaactaactccagaatcatccatcaaaaaaacaatgccaatctgattgaagaaacttgcaagcagacaccccatcacgacctttgcatccaatacctctcctccgaccctcgcagcaccgaagcagatgtgacagggctggcacttattatggtcaacgtaatcaaaatcaaagcaaacaatgcattggacaaaatccaccaactgcttcagaaaaaccctgaacctagtcaaaagggaacactgagttcgtgt

SEQ ID NO: 242816 - DNA, 399 bp, Glycine max
gaccagacaggctcccaccacctcccccttgtactgaaatctccattctccaaaactgcttcaactcttctcattttctttctctctctctctgcctcgcactggagtaccctctccaatttccttcaaatcccatcaaataagtttctcttataccctctgaatattcttcatcatcatcatcattaatcatggctcttttgatgtattttgtgctttttcttgccctcgctggccattcaagtgctctttactgtgtatgcaaagatggtgtgggtgatcaagctcttcagaaagcaatagactatgcatgtggtgctggagctgactgtacccctattcttcaaaatggagcctgttttcaacccaacactgtgaaggatcactgcaactatgctg

SEQ ID NO: 242817 - DNA, 362 bp, Glycine max
ggagtgtgtgagagagcgagcgagcgagcagtttcaaagagaggatttgggattgggaaggcgagggattgcgctgcgtctcttcctcttctctttcgattcatccctcattcataatcttccaatccaacaacctcagcctcacactcacacatacacacatctgaacgcgtatcgtccctcccatggcttcaaagcgcatcctcaaggagctcaaggacttgcagaaagacccaccaacttcttgcagcgctggtccagtagctgaggacatgttccattggcaagcaacgattatgggtcctgctgatagtccttatgctggaggtgtattcctagtcactattcactttcctcggatt

SEQ ID NO: 242818 - DNA, 314 bp, Glycine max
  unsure (1)..(314): unsure at all n locations
gaccttgttaaggagagaatatagtatggcacaatctagtggcaaaaaattggttgagtggctggttgcagcattattgttcattgccttgttgagtggtagtgcacatgctgttgcaatatgtaacattgactcaagtcaactgaacttgtgtcgtgctgcagttactggtcaaaaccctccaccacctgatgagaaatgctgtgcagttattcgccaggccaatttgcgttgcctctgcagttacaagtctatcctaccttcatttgggattaaccccannnatgctttggccttgcctgctaaatgtggtc

SEQ ID NO: 242819 - DNA, 354 bp, Glycine max
  unsure (1)..(354): unsure at all n locations
gaggtgtagcagcagagagtgcggtaggctcttccgagacccgaagcagccatggggatcgatctcaaggccggaggtaagagcaaaaagaccaaaagaacagcacccaagtccaatgatatctatctcaagctcttggtcaagctttatcgcttccttgttcggagaactggcagcaacttcaatgctgttatacttaagagattgttcatgagcaaggttaacaaacccccattgtctttgtcaaggttgattaagtatacgaaagggaaagaagataagattgcagtgggtggtgggtctataaccggtgatantcgtgtttatgaagttccacattgaaagttacagcac

SEQ ID NO: 242820 - DNA, 266 bp, Glycine max
gaaaggagttaaagagtaaaagcaccgtctccgtctccactctcggcttcttcttcgttgcgctttttcccaaaaccaattgcatcactctcgtccgttaccgccgctgccctagaccaccgcaagcgacgtcgcacaccgccttcatccgttagggcaaaaatgagtcgaggaagtggaggtggatacgatcgtcacatcactattttctcccctgaaggacgtctctttcaagtggagtatgctttcaaggctgtgaaggctgc

SEQ ID NO: 242821 - DNA, 368 bp, Glycine max
  unsure (1)..(368): unsure at all n locations
gagagctgcaagggatcaactgaggagagtgagagaaaagagaagagaagatgacaacacgctccaagaagaacaggaagaagaggggccacgtcagcgctggccacggtcgaatcggaaagcacaggaagcaccctggaggacgcggtaacgccggaggcatgcaccaccacaggatcctcttcgacaaataccaccctgggttcttcggcaaggtangaatgcgctattttcacaagcttcgcaacaaattctactctccgatcctcaacatcgacaagctgtggtcnctggtcccgcaagaagtgaaggacaaggcctccaaggagaacaaggcgccgctcatcgacgtcacgcagttcgggtac

SEQ ID NO: 242822 - DNA, 377 bp, Glycine max
ggccataagaaagagcaagtcgaaaagttcatctctccctctctctcacacatcgcagccatgagcctcttcggtataggcagaaaccagagaacattccgcccgaaaaaaagtactccttctggaagtaagggagctcaacttagaaaacatattgatgccacgttgggtagtggaaatctgagggaagcagtaaagctacctcctggggaggatttaaatgagtggctagctgtcaacactgttgatttcttcaaccaggtgaatctgctttatgggtaccttacagagttctgtactcctgagaattgtcggacgatgtctgcaggacccaagtatgaatatagatgggcagatggtgtacaaattaagaaacc

SEQ ID NO: 242823 - DNA, 391 bp, Glycine max
ggtcctcactcgtgtgcgcgtctatcccaaagagagtgagcgagtcagtactgagtagggtttcaaatttccaatcggaatcggaaaaaatgggcggcggcggcggcgatcacggccatggacacggacacggcgatttcaggaacaaggtctggagtatgagcggtggcccttactgccgtcccaagcactggaagcgcaacaccgccattgccatggtcggcgtcgttctcatctgcatccccatcgctatgaaatccgctgaactcgagcaacggccacatcaccctgttcgccccatcccttctcaactctggtgcaagaactttggcactaaagactataatgattcatgattcatcaattgcataacttgagtggatgttcacat

SEQ ID NO: 242824 - DNA, 342 bp, Glycine max
gagagaaacctcttagctgacacatcgaagatcgttgacaagaacagcaaggtttataagcgaaaaggcgatttgagaaagatcgtcaccgaaagcctttcctctctcggttacgattcttccatttgcacatcgaaatgggacaaaaccccaacctaccctgccggtgaatatgaatacatcgatgtggttgtggaaggtgagaggttgataattgatatcgattttcgatcggagttcgagatagctcgatcgacgggaacctacaaggcgattcttcagtctctgccgttcactttcgttggaaaatcggatcgactctgccagatcgtcgccgccgtg

SEQ ID NO: 242825 - DNA, 377 bp, Glycine max
cggcaaggggaaggcagcgaaagaccctaacaagccaaagaggcctccaagtgctttcttcgttttcatggaggagttcaggaaggtattcaacaaagaacatcctgaaaacaaagcagtgtctgctgtgggcaaagctgctggagcaaaatggaagaccatgtctgatgctgaaaaagcaccttatgtggcaaagtctgagaaaaggaaagtggagtacgagaagaacatgagagcctataacaagaaacaagcggaaggtcctactggtggggatgaagaagaatctgagaagtctgtatctgaggtgaatgatgaagatgatgatgaggaaggcagtggcgaagaagaggatgacgattagagaatggactgat

SEQ ID NO: 242826 - DNA, 242 bp, Glycine max
ggggctttggtttcgtcgtttttgcggatcctaacattctagatagggttttggaagacaaacatgtcatagacggcaaaacggttgatgccaaaaaagccttctcaagagaggatcaacaaatttctgtcacttccagaggtggaaattccaattctggcatgaattctgaaaatggaggaaacatcaagactaaaaagatatttgttggaaggttgccctccaacctgactgaagaaaaa

SEQ ID NO: 242827 - DNA, 271 bp, Glycine max
ggagcaaaaccctaatccctatttttcttcctcagtagtgtcatttacgcttctcttctctgcagcaactatgcctaaccctaaggtcttcttcgacatgaccatcggcggtcaatctgctggtcgcatcgtgatggagctctacgccgacgtcactccccgcaccgccgagaacttccgcgcgctttgcaccggcgagaacggcgttcggcggagcggcaagcccctccagtaaaaaggctcgtccttccagcgcgtggatccgagtttc

SEQ ID NO: 242828 - DNA, 389 bp, Glycine max
ggattcagccacagtttcggaggagaagaaaatagtcgttcgagatggcccgtacgaagcaaactgctcgtaagtccacaggaggaaaggctcctaggaagcagcttgcaaccaaggctgcacgtaagtctgcaccaactactggtggtgtgaagaagccacatcgttaccgtcctggtaccgttgctcttcgtgagattaggaaataccagaagagtaccgagcttttgatcaggaagctccccttccagaggctggttcgtgaaattgctcaggacttcaagactgatctgcgtttccagagccacgccgtgcttgcattgcaagaagctgctgaggcataccttgttgggctctttgaggacactaacctgtgtgccattcacgct

SEQ ID NO: 242829 - DNA, 337 bp, Glycine max
ggtagttccaccgagtagcaacaatgtcgaagcgaggtcgcggaggatcggcgggaaacaagttccgcatgtcgctgggtctgccggtggcggcgacggtgaactgcgccgacaacaccggcgcgaagaacctctacatcatatcagtgaagaggatcaagggtaggctgaaccggttgccgtcagcttgcgtcggagacatggttatggccaccgtcaagaagggaaagcccgatctccgtaagaaggtgctgcccgccgtcatcgtccgccagcgcaagccttggcgccgaaaggacggtgtttacatgtacttcgaagataatgctggtgttat

SEQ ID NO: 242830 - DNA, 364 bp, Glycine max
ggaggataatgtgagcaaacacaatatacaaatcttcaacaggttgtttttcttggaagaggacctgcgtgctggcaaaatattcaacatgaagttcgtcaacaacacaaaagccacagtcccgttgctaccgcgccaaatttcgaaacaaataccgttctcagaagataaaaagaagcaagtgttggcgatgcttggcgtggaagcgaactcaagcaacgccaagatcgtagcggagaccattggtctttgccaagagcctgcagcggagggagaaaggaaacactgcgcgacttcgttggagtccatggttgatttcgtcgtttccgcgctcgggaaaaacgttggtgctttctcaacagag

SEQ ID NO: 242831 - DNA, 389 bp, Glycine max
ggcagcatggtgtcttcctcccaacacattctggtcaccggtggtgccggtttcattggcacccacaccgtcgttcagcttctcaaagctggcttcagcgtttcaataatcgacaatttcgataactccgtcatggaagcagtggaccgcgtccgccaagtggttggccctctgctttctcagaacctccaattcacccagggcgatctccggaatagggatgacttggagaaactcttctccaaaacaacatttgatgccgtgatccactttgctggcttgaaagcggttgctgaaagcgttgcgaagccccgtcgctattttgattttaatttggttggcaccatcaacctctacgaatttatggcaaagtataattgcaaaaagat

SEQ ID NO: 242832 - DNA, 378 bp, Glycine max
  unsure (1)..(378): unsure at all n locations
ccaagccttcattacggttgcaaaagaacaacaaaaggggttttaattgaaaaaccaaaggaattaccggaattaaaaatgcaaatctcgtgaaaatctgaaggaaactaaccctcagtcagagagcgacacatcgacaatgtcaaagccaagattcaagacaaggaaagcattcctccggattagcagcgtttgattttcgccggaaagcagcttgaagatggaaggaccctggccgattacaacatccagaaggaatcaacccttcatctcgtcctcaagcttcgtggtggcatcattgagccttccctcatggctttggctcgcanatacaaccaggacaagatgatttgccgcaagtgctatgcncgtctgcat

SEQ ID NO: 242833 - DNA, 342 bp, Glycine max
ggagcaagaggaagaaacaacctcataatcgctttcttgtgttcgattagatattgccttcagaccagagtctgagtcctctgagacgttccttcagtccttcacctcctttctctctaggcgcaaaacctcgtactgtttgtggcggctaaggatgtcagggaaaggggcgaacgggttgatcacatgcaaaacctccgacgctaacaacatagacaatgacaagaggaaacccatctcacgttcttcacatgccggccttcagttcccagttggccgtatccatcggcttttgaagtcaaggacaaccgccaacggtagagttggggccacagctgctgt

SEQ ID NO: 242834 - DNA, 395 bp, Glycine max
gatgtggtagtggggtaacgatacgtaataagttctatcattgaggaagtttcctgtgcatcgtctccgaaaatgaacgacgcagatgtctcaaagcaaatccagcagatggtgcagttcatccgccaggaagctgaggaaaaggccaacgagatctctgtctccgccgaagaggaattcaatatcgagaagctgcagttggtcgaagccgacaagaagaagatcaggcaagaatacgaacgcaaagagcgccaagttgaaattcgcaagaagattgagtactcgatgcggctaaatgcttctcggattaaagttcttcaagctcaagatgacgtgatcagttccatgaaagaagctgcatccaaggaactgttgaatgttagtcatcatcatca

SEQ ID NO: 242835 - DNA, 306 bp, Glycine max
atcaacgacaggagaggcatgcaacaggcgtctcagcatctcacatacgattccatcctcggaaccttcaatgctgatgtcaagcctgttggcagcaatgtcatctccgtggatggaacagaaagcacagttgtttctgatcgcagccctgcgaaccttccatgggacgacttggggatagacttggtgattgaaggaacaggggtgtttgtatacagagaaggtgcagggaaacacattcaagcaggatctaataatgtgctcatcaatgctcctgttaccggagatatcctcacctacatcgtt

SEQ ID NO: 242836 - DNA, 331 bp, Glycine max
gagaacctgcatggcccaacgatcttttatatatttttccagtagtaattctaggtactattgcctgtaacgtaggcttagcggttctagaaccatccatgattggggaacccgcggatccatttgcaactcctttggaaatattacccgaatggtatttctttcccgtatttcaaatacttcgtacagtgcccaataagttattgggcgttcttttaatggtttcggtacctacaggattattaacagtaccctttttggagaatgttaataaattccaaaacccatttcgccgtccagtagcaaccaccatctttttgattggtactgt

SEQ ID NO: 242837 - DNA, 363 bp, Glycine max; identical to SEQ ID NO: 236029

SEQ ID NO: 242838 - DNA, 212 bp, Glycine max
gtcatccaagaacctgagttagaccaacggaatttgtatctaggtaattggggttacaacacccggaaagaaagagagggtgctgcagctatccccagaattcatgttcttgggctctccgacttcagcaagaagttaaaataggggtcttcatttcattggattgtcaactgtcagtcattgaaccacatatttttcttccagctcatttt

SEQ ID NO: 242839 - DNA, 290 bp, Glycine max
gacaatccaacgggaaaacgcgtcatcataaatgccgcccatcaacttctcatacccttttattcattccattcgtttctacggtattcttttctttgccgagaaattcagatactgcatttcgatccacattgaccacgtcggtatccaggttggaaatgcctgctgggaactctattgccttaaacacggcaatcaccccgatggacatatgccgagtgacaacatcgttagcggatgatatgacgccttcatcaaatttgtcagcgagaccggcgccggaaagcacg

SEQ ID NO: 242840 - DNA, 291 bp, Glycine max
ggttctaatgtgtgattgtctgttgttgtaaatcgttcatcatcatatgtgtcagtgttgtgtatgtttgatctctcaccggaaaatgtcttgctgctgtggtaactgttgtttctgaagctcttgcaagtgctgcaacggctgctgaggctgcaagatgtacccagacttgagctacaatgagtcaactagcatcgagatcttggtcataggagtggcacctgttaatgctcaatttgatggtgctgaaatgggtgtgcccgctgacaatgattgctgcaaatgtggacc

SEQ ID NO: 242841 - DNA, 368 bp, Glycine max
gaactaagtagagaataaaatcaaatcatgagagcatgcatatgaacatgatgatgaagaacgtgtgtgggtttgcaatagtgatggtggcagtgcagcttctggtggaggtgagtcccaaagcagaggctgtgacttgtacccctgtggagctgagtccttgtttgggggcaataacttcctctcaaccaccatcaacaatttgttgccagaaggtgagggaacaaaggcaatgcctctgtggttacctcaaaaacccaagtctaaggccatatgccaattctcctggctccagaacggttgctaactcttgtggggttccctttccaacttgtcaattaacttcatatcatatcatatatagtatg

SEQ ID NO: 242842 - DNA, 353 bp, Glycine max
gatcgctttcagcaggcacgcagattctctccatccttctctctatccagattttgattctttcgattaaacccgcaatatccatctcaccaaaaccctacgcaactcatccatgacgcttggcttaggacgatgcagtgtcctggttcctaggaacttcagattgctggacgagcttgaacgtggagaaaaacgaattggagatggcacagttagctatggaatggatgatggtgatgacagttacatgccctcttggactggcaccactaatggcccccataatactgtacatcaacgaagaatttatcaattgaaactgctttgtgagtaacacttcccagaaaaacccc

SEQ ID NO: 242843 - DNA, 367 bp, Glycine max
ggcagcaacagcagcattcactgaaagcactcagtagggtttgcggtttcagagtttgtgacgcacgcatccatggccaccaccaccaacgccgccgcagccccgccgcgccagctctcccagaaggaagccgacatccagatgatgttagccgccgacgtccacctcggcaccaaaaactgcgacttccaaatggaacgttacatcttcaagcgccgcaacgacgggatttacattattaaccttgggaagacatgggagaagcttcagttagcagctagggttattgttgcaattgagaaccctcaggatatcattgttcaatccgcaatgccttatggtcaaagagcggttctgaagtttgctc

SEQ ID NO: 242844 - DNA, 391 bp, Glycine max
ggcgagagagaatcgtaacaaaagcggtaaccggagtaagttgtctctacgatttgagccatggcaacaacaacaccctcaaaccgatcatcagaggcgtttgctctcatggcaatcctcagcactctgctttgcacggcggtggcggcgaaggagagcgtgtacgagatactccccaagtacggcctcccgagcggtctgttaccggacaccgtcaccgactacacgctcgacgaggacgggcaattcgtcgtcgttttggcgaagccctgctacatacagttcgattacttagtttactacgagaccaagatctccggcaagctcagctatggctccatcaccaacctcaagggcattcaggtccagcgcctcttcatctggttcaacg

SEQ ID NO: 242845 - DNA, 337 bp, Glycine max
gatagcaaaatcgtttctccaatttaatcaccattgtacaacccaattcccttcgtcgttttcgattaagagagcaatggcacgtaccaagcaaaccgctcgcaagtccaccggaggaaaggctccgaggaagcaattggcaaccaaagccgctcgcaagtcagccccggcgaccggcggagtgaagaagccccaccgcttcaggccaggaacggtggctctgagggagattcgaaagtaccagaagagcaccgaacttctgatccgaaaactcccattccagaggctcgtcagagaaatcgctcaagatttcaaaaccgatctccgctttcagagc

SEQ ID NO: 242846 - DNA, 332 bp, Glycine max
  unsure (1)..(332): unsure at all n locations
gatcacatttaaaatcaaaacaacaaattttcagactcaacaagcttcgaaccaaatcttattgagaaaatgtctggtcgtggaaagggtggaaagggtttgggaaagggaagtgccaagaggcacaagaaggttcttcgtgacaacatccagggcatcacgaaacctgcgattcgtatgttagcgagaagaggtggcgtgaagaggatcagtggtttgatctacgaggaaaccagangagttctgaagatattcttggagaacgtgattcgcgatgctgtgacctacactgagcacgctangaagaagacggttactgctatggatgttgt

SEQ ID NO: 242847 - DNA, 361 bp, Glycine max
cgggattgtgattcattagcacatttgcaaagtgttatttttctttttttctcatttgcactgcaaattgcaatggcttccaacaaggttattgccaccatcatggtgctttctctccttgcctactcaagatcattcaccaatgcatgtggcacatgccacccataacctaccccttctcctcctcctccatcaggaaagtgccctaaggacacatttaaactaggggtgtatgcaaatattctaggtcttgttactgttgttgttggctcacctgtctccagcaagtgttgtgcattgcttgaaggtttggatgatttggaagctgcactttgcctttgcactgctattaaggccaatg

SEQ ID NO: 242848 - DNA, 328 bp, Glycine max
gatagcgcagttgcaattcattggattacaaatttttcccaaagctgatcgagaagccagccaggccagaaagagttgaagaagaatgggaagggggaagatcgagatcaaaaggattgagaacacaacaaatcggcaagtgaccttctgcaagagaagaaatgggcttctgaagaaagcttatgagctgtcagtgctgtgtgatgcagaagttgccctcatcgtcttctccaaccgtggccgtctctatgagtactccaacagcaacataagatcaacaatacagaggtacaaaaaggcatgttctgatcactcaagcgcgagcact

SEQ ID NO: 242849 - DNA, 371 bp, Glycine max
gacagctcttggctttagcagattccaattcccaattcccaattcgaaacccttattcctttcaaagaatcaaattgagtgatcgtgatggcaccaaaggcagagaagaagccagcggagaagaagctcgcggaggagaagaagtcgacggtgggagacaaggctccggcggagaagaagccaaaggccggaaagaagcttccgaaggagggaggcgccggcggagaagggaagaagaagaagagaaacaagaagagcgtggagacatacacgatctacatcttcaaggttctgaagcaagtccaccctgacattggtagctcaagcaaggccatgggaatcatgaacagcttcatcaacgacatcttcga

SEQ ID NO: 242850 - DNA, 343 bp, Glycine max
gctcgacgagtacctcagtgtgagcgttctgccatactcctgcgttcaatcgacttcaccatcttcttcatcttctgctgtctcccccatagatggattggcaagggcaaaagctagcggagcaactgatgcagataatgctgcttgcatttgctgtgattgcatttgttggtggatatgtcatggcttctttccaaatgatgattctcatatatgctgggggtgtggttttcaacaccttgctcactgtccccaattggccccttttcaatcgccgtcaacttacgtggttggatcaactgaggtggagaaacatcccaagccacaaccatctgtcaatgta

SEQ ID NO: 242851 - DNA, 365 bp, Glycine max
cattgcttggagcacacagtgttggtcgaacccactgtgtcaacttggtgcaccgtttgtacccacagattgatccagctccgaaccctgaccacgtccctcacattctgaagaagtgccctgatgccattccagaccctaaggccgtgcaatacgtgagaaacgactgtggcacccccatgattcgagacaacaattactacagaaatagattggacaacaagggcttgttgatagtggatgaccaactagccaatgacacgaggaccaagccttatgtgaagaaaatggccaagagccaggactatttcttcaaggagtttcctagagccattactttgctctctgagaacaaccctctcact

SEQ ID NO: 242852 - DNA, 345 bp, Glycine max
aggatggaaaacgctaaatgctgatgctggctcttatgggtttattcattctggctgtgctgttagtcgtttcagcaatgtcacagactcattctgttgcgggggatgggcagtgtcatggccttgttatgaacttctattaggaatcatgctctcgtgctgtagatatcatctcagttacgtctagcttctctacatgtgccacatgaatactgctttctcctgactcacgaacatcatccatgactgtgctgttcagagttgtgatgcgtcactgttgctggactccacaagaaggagcttgtctgacaaagaagcagatataaacgttgggttgataaattt

SEQ ID NO: 242853 - DNA, 196 bp, Glycine max
tgcgatgcgacaacacaacggggaggggttgaagtcgagacagctcagaattcagcaagtgcggtatggacagcagagagcgaaatacttcgagatggcccgtacacaacaaactgctcgtaagtcaactggaggaaaagctcccatgaagcagcttgcatacaaggctgcacgtaagtctgcaccaacaactggt

SEQ ID NO: 242854 - DNA, 305 bp, Glycine max
caacggggaggcgcgcacgttcagagagcgagagaacaagaacataagggaaccacagcggcggtaacagaagaacaagcagagaatgggtcgagtgagaacgaagacggtgaagaaatcctctcggcaggtgatagagcgtcactactcgcgcatgaccctggacttccacacgaacaagaagcttctggaggaagtggcgataatcccgtcgaagatgctaaggaacaagatcgcggggttctcgacgcacctgatgaagcgcatccagaaggggcctgtgcgcggcatctccctcaagctcc

SEQ ID NO: 242855 - DNA, 384 bp, Glycine max
aatggccactctctttaacttcaactccacccttcgcccctcttgttatcatccctcctcaccctcctcatcttatccccacttcttcaagacactctccacaactttcttgggccacaccgtaaccctcaaatatgctgccacttccgcaagcatccctccccgttcactctccgctcacatgtcatgggacggtcctctctcttccgtcaaattgatcattcagggtaaaaatctcgagctcactgatgcagtgaagcagcatgtggaagacaaagtggggaaagcggttcagaagcacagtcacctagtgagagaggttgatgtgaggctttctattcgaggaggaggtgaatttgggcgaagacccagaactcgtagatg

SEQ ID NO: 242856 - DNA, 226 bp, Glycine max
ggggttttgtgctgttgatcactgcttcatcgcttcaataatactcccgattctctatcctgatctacgattccattgtgaagactcatggaatgggagctgcattcatacttaagtctcagtgcatgaagcaaaggtaggctgataagtcatacaagaaatcccatcttgcgaattactggacgaaaccttttgccggttcatcacatgccattggaattgtcct

SEQ ID NO: 242857 - DNA, 327 bp, Glycine max
ggtctcatggtattgttagcaggcattagcctatcggcgcctgctttctgtggtcgtgtgttgcagcatgatggagtcccaagtgaagcatgcacttgttgtcaaagttatgggtcttactggatccacacgacatgtgacccacgttacagtggagtttttggatgatcagacatgtcatatcatgaggaatgtgaaacgacatgttagacaaggagacattctcatcctactcgacatctaaagggaaccaagatgattgcgctagatggtcacgattgtttggcatgtctccaaattcgaacatgagcaatatgtatcttgata

SEQ ID NO: 242858 - DNA, 206 bp, Glycine max
gatagcgcagtttcatttctttggactagaaattgttcccaaagctgatcgagaagccagccaggccagaaagagttgaacaacaatgggaacggggaagatcgacatcaataggattgagaacacaacaaatcggcaagtgaccttctgcaagagaagaaatgggcctctgaagaaagcttatgagctgtcagtgctgtgtgatg

SEQ ID NO: 242859 - DNA, 390 bp, Glycine max
ggaggcagggcagaggagaaggccttgtgattcatcatgacgaatgaacccaacaacaagtacgatgtttttctgtgtttagttggcccagatacccgctacaccttcgctggtaatctctataatgctttgcgccgcaacagaatcaatacctttttcacagaagataatcatcatgatgagctactactcatgaatggcgaccaaatttcaccctttgctctaagagcaattaaagaatcaaacttgttaattgttgttctctctccaaactacgcatcatccccaaggaatcttgatgaatttgtggccatcgttcggtgtataaagaggaagaagcagctgctgcttcccgtcttttacaaagtggaacgaggggaaataatggat

SEQ ID NO: 242860 - DNA, 375 bp, Glycine max
ggcagtttcaaattttcttttccttcactttcccgagaaaaaaataacacttttcactttcttcactacgttctcacttcgatatggctcgtacgaagcaaaccgctcgcaagtccaccggtggcaaggcgccacgtaagcagctcgccaccaaggccgctcggaagtccgctccggcgaccggaggagtgaagaagccccaccgcttcaggccgggaaccgtggcgctgagggaaatcagaaagtaccagaagagcaccgagcttctcatcaggaagcttccatttcagaggctcgtgagagaaatcgcgcaggatttcaagaccgatttgcgtttccagagcagcgctgtttccgcgcttcaagaggctgctg

SEQ ID NO: 242861 - DNA, 274 bp, Glycine max
ggcgagtaagacaaatgcagcatttcgtggatttgcaagagaattcggagttgggtgagtcgaattcatggctttcagcgaaagagcagtccggtgcggcacccaacaccaatttggatcgcgtcctcttcaacgacctcgtcgagattgtccctctcgttcagtcactcatcgatcgtaaagcaagccgttcattcacgcggcgtggttccatgatctacaccgaagacacccacaagagaatcattgtccaaaagaacaacagattcaaaaa

SEQ ID NO: 242862 - DNA, 316 bp, Glycine max
  unsure (1)..(316): unsure at all n locations
gatttcaattaaaccaaagcataagccatataatttttttttatttgaaataatgtccgggatcatccacaagattgaggagaccctccatgtgggagggcacaagaaagaggagcacaaaggagaacaccatggtgagcacaaaggtgaacacaaaggagaacaccatggtgagcacaaaggtgaacacaaaggagaacaacaccatggggagcacaatgagggacttgtggataagatcaaggacaagatccatggtgatggccatgacaagggcaaaaaaataacacnatcaattacacaaaaagcggccgct

SEQ ID NO: 242863 - DNA, 344 bp, Glycine max
  unsure (1)..(344): unsure at all n locations
tggggtgctaatcttatcttatccctctaatcactctagctgttgcaaatttctactatttttcaatggcttctgcagatgttgagttccgttgctttgttggtgggcttgcttgggtcaccggcaacgatgccctcgagaaagccttttcaatctacggcgacatcgttgaatcgaaggttatcaacgaccgtgagactggaaggtccagaggattcggatttgtgaccttcgcctcagagcagtcaatgaaagatgcgatcgcaggaatgaacggccaggaccttgacggtcgtaacatcactgtcaatgaagctcagacncgcgccagccgtggtggtagt

SEQ ID NO: 242864 - DNA, 369 bp, Glycine max
acccccaaactctgcatcggaagaaaccctagccactctcccggcgtcacgatgcagatcttcgtgaaaaccctaacgggtaaaacgatcacgttggaggtggagtcttcggacaccatcgacaacgtgaaggccaagatccaggacaaggaaggcatccctccggaccagcagcgcctcatcttcgccgggaagcagctggaggacggccgcaccctcgccgactacaacatccagaaggagtccacgcttcacctcgtcctccgcctccgtggcggcgccaagaagcgcaagaagaagacctacaccaagcccaagaagatcaagcacaagcacaagaaggtcaagctcggcattcgtcagttctac

SEQ ID NO: 242865 - DNA, 378 bp, Glycine max
catacgacaggctggtcgaagacgacatgaagggggtgatactcacatctatactctctaatgccacacgttttagaatgtgccttccaatctgattgaacagcatatttcttggagcacttttcacacttccacttcttctcaccatgtttgcgagagtagtgtttcttaatgccagtgaggtctccaagagcccttgaagggtcgtggtgaacacatgtgggctcgggacacagataaacctttctctttggctctttgttggtcttttgctttagcttccaaggcaagttgtgtcctcttctgtgtagctgtaggttttgctctctttggaaccctttattgcacacttcaaatataaacctgtttgttgccatt

SEQ ID NO: 242866 - DNA, 339 bp, Glycine max
tgggatgaacggtgaaccggaatccccttcgaactgcattatattgcagcgagtcacacacactctgaacaacgcccatcatgcaggccagtgataggtttagcatcaattcccagcttgagcatctccaagccaaatatgttggaactggccatgccgatttgcacagatttgagtgggcagtgaacattcaacgagatagctatgcatcatatattggccactaccctttactgggattccttgcaactgctgaaaatgaatctattggtagagaacactacagctttatgcagtaaatgctcctgccttgtggattgcctccgaaacagaagaaga

SEQ ID NO: 242867 - DNA, 296 bp, Glycine max
gaggtaagtgagagccatgaagggttatgagccccgttcaagctcttcatgtgcagcttgcaagctattgaagagaagatgcataccaaattgtatttttgcaccttactttaggtctgatgagtgcaagaagtttgcaaaggtgcacaaggtgtttggagccagcaatgtgagcaagattctgattgaagtgccagaagagcagagagaggacacggtgaattctctggcttatgaggctgaggcaaggctgagagacccggtttatggatgcattggtgccatagctctgttgc

SEQ ID NO: 242868 - DNA, 350 bp, Glycine max
ggtgccattggtgctgtcatcatccgcagctgctgttactcgcaccgcaaacaaacagtgagccatggacgtcggaaagaacaagcgcatctccaaagggaaaaagggtggcaagaagaacgcagctgatccctttgccaagaaggattggtatgacattaaagccccttctctttttcaagtgaagaatgttggcaaaaccctcgtctctcgtacgcagggtaccaagattgcttctgaaggacttaaacatagagtgtttgaggtctccttggctgatcttcaaagggatgaggatcatgcattcaagaagattaggttgagagctgaagatgtgcaagggaagaatg

SEQ ID NO: 242869 - DNA, 329 bp, Glycine max
ggtaaatgcaagtttacagtacggtaaattctactggcaaagaattggatgtgtggctggctgcagcattatcgtacattgccatggcgcgtggtagtgcacatgctgttgcatcaagtagcattgacgcaagtcatctgaagttgtgtcgagctgcacttactggtcaaaaccctccaccatgtgatgagaaatgctgtacagttacacgccaggccactttgcgttgcctctgcagttacagttctatcctaccttcatttggcatataacgccagttctactttgaacgtgcctgctaaatgtcgtctacgattgcctcatagatg

SEQ ID NO: 242870 - DNA, 377 bp, Glycine max
ggcagtttcaaattttcttttccttcactttcccgagaaaaaaataacacttttcactttcttcactacgttctcacttcgatatggctcgtacgaagcaaaccgctcgcaagtccaccggtggcaaggcgccacgtaagcagctcgccaccaaggccgctcggaagtccgctccggcgaccggaggagtgaagaagccccaccgcttcaggccgggaaccgtggcgctgagggaaatcagaaagtaccagaagagcaccgagcttctcatcaggaagcttccatttcagaggctcgtgagagaaatcgcgcaagatttcaagaccgatttgcgtttccagagcagcgctgtttccgcgcttcaggaggctgctgaa

SEQ ID NO: 242871 - DNA, 338 bp, Glycine max
ggttaaggagagaatatagtatggcacaatctagtggcaaaaaattggttgagtggctggttgcagcattattgttcattgccttgttgagtggtagtgcacatgctgttgcaatatgtaacattgactcaagtcaactgaacttgtgtcgtgctgcagttactggtcaaaaccctccaccacctgatgagaaatgctgtgcagttattcgccaggccaatttgcgttgcctctgcagttacaagtctatcctaccttcatttggaattaaccccaaaaatgctttggccttgcctgctaaatgtggtctacaattgcctcctaattgttgagtgctg

SEQ ID NO: 242872 - DNA, 281 bp, Glycine max
ggttaaggagagaatatactatggcacaatctagtggcaaaaaattggttgagtggctggttgcagcattattgttcattgccttgttgagtggtactgcacatgctgttgcaatatgtaacattgactcaagtcaactgaacttgtgtcctgctgcagttactggtcaaaaccctccagcacctgatgagaaatgctgtgcagttattccccaggccaacttgcgttgcgtctgcagttacaagtccgatcctaccttcatttggaattaaccccaagaa

SEQ ID NO: 242873 - DNA, 352 bp, Glycine max
  unsure (1)..(352): unsure at all n locations
gaggaacaagaagcgaaaatataacaaataatttgtactttcatcaaaacaaaatcccgttgtatttttctcagatggctcgaacgaagcaaacggcccgcaagtccaccggcggcaaggcgccgcggaagcagctggcgactaaggcggctcgcaagtcggctccggcgaccggcggcgtgaagaagccgcacagattcaggccgggaaccgtggcgctgcgcgagatccggaagtatcagaagagcacggagctactcatccggaagcttccgttccagcgcttggtccgcgagatcgcgcangacttcaagaccgacctccggttccagagcttcgccgtctccgcgct

SEQ ID NO: 242874 - DNA, 325 bp, Glycine max
gaagatattagggtttttgagtgcggtgcggcgatcctagcactctcttctgcagctttcgccgacagcttcattcaccatggctgagcaaaccgagaaggcttttttgaaacaaccaaaagtgtttctcagctcgaagaaaactgggaagggaaagagacccggaaagggtgggaaccgcttttggaaatccattgggcttggatttaagactcccagggaagccatcgaaggaacctacattgacaagaagtgccccttcactggcaatgtttccatccgtggccgtatcttggctggaacatgtcacagtgctaagatgaac

SEQ ID NO: 242875 - DNA, 316 bp, Glycine max
ggtggttcttgtttgcgagattgaagcgtaagcatcggctaacctaacctcgtcgtcctctctactagtttcagctatggccgatgaagctgtggttgttgcagatctcacccagatcgatgtcaagctcattaaccgctggagcttcgaggatattgaggttactgacatttcactggctgattacattggagttgcggcatccattcacgccacatatgttcctcacaccggcggaaggtactccgtgaatcggttcacgaaggcgcagtgccccattgttgacatgctcagcaactctctcatgatgcacggt

SEQ ID NO: 242876 - DNA, 228 bp, Glycine max
ggagcaagagtgaagagcgaagagaatggctcccaagggtttaatctttttggctgtgttatgcttctcagcactgtcactgagtcgttgtcttgcggaggataatggacttgttatgaacttctacaaggaatcatgccctcaggctgaagacatcatcaaagaacaagtcaagcttctctaccatgcgccacacgaacactgctttctcctggctcagacacatct

SEQ ID NO: 242877 - DNA, 314 bp, Glycine max
cagcagggggtgttggtggtgctgtttttcgcccccgttgacgcgcattttccggcaaccggagagcttccaacgttccgcgaggcgccggcattccgcaacggaagagaatgccgcaaccgcgcgcggagcgactccgtgatccacatcgcgatgacgctggacgcgacctagctccgcggctccgtcgccggtgtgttctccgtcctgcggcacgcatcatgtccggagaacatcgtgttccactttatcgggaccacgcgccgaagcacggagctccgccgcatcattaccgcgacgttcccgtagctcgc

SEQ ID NO: 242878 - DNA, 250 bp, Glycine max
acataacggggaccagttaaaccactataccccaagccctatacaatcaaaccttaacacacacccatttgattcagtttccatggctagcctcaaggttgcatttttggctgcagtgctctgcatggttgtggtgagtacacccatggcacatgcagctatcacgtgcgggcaagtgacgaatagcctgattaactgtatcccgtaactccacatccgacgaatgtcgccgtctggatgcttccaagga

SEQ ID NO: 242879 - DNA, 144 bp, Glycine max
ggagtgagcaagagtgaagagcgaagacaatggctcccaagggtttaatctttctggctgtgttatgcttctcagcactgtcactgagtcgttgtcctgccgatgataatggacttgtttacaacttctacatggaatcatgcc

SEQ ID NO: 242880 - DNA, 370 bp, Glycine max
gcatcagcctggattcgtcctttctctgctctttgtcctctctgacacatttggggccttggttactgtgtttttgcaccagggtattgggagggacgtttagagttgctgagtctggctccttctctgggaaagacgatcagtaccctccaccacgaccactcactgaggctgacgagggtcacaaagtgggcccttttacaggcgcctattgctgagttcattgcacttttgtcttcctcgacattactgtgcccacagttatagggtacaagcaccagccgggtcatgctgatgcctgtggtggggttggcattcttggcattgcatgggcctttggtggcatgatcttcatccttgtctactgcac

SEQ ID NO: 242881 - DNA, 160 bp, Glycine max
gttgtggccatgaatcagaaggaaagctcaacgaaccaatttatgaagattcattcagcttacgcaactttatctgacccagagaagcgagctcaatatgacagagaaatctatagatacagaagatttgccaatatggaagcaagaaatcagacctttt

SEQ ID NO: 242882 - DNA, 307 bp, Glycine max
tccaaaaaaacaacaaaaggggatttcaattcattttgaattgaaaccgcggagattttgcagctgcatcatcgatcatcgtcacctcatggacggacacgattcacaagacccgaagcagagccctgctgacatgactgcctttgtgcaaaatcttctccagcagatgcaaaatacgttccagacaatgtccgactccattgttacaaagattgatgatatgggaagtcgcataaatgagttggaacacagcatcactgacctaagagcagagatgggagtggagtcctccccatcacctgcgacc

SEQ ID NO: 242883 - DNA, 198 bp, Glycine max
ggtggagcaatagcagcagaacagagagagcaaaaccctagagcatccatcacaagcagaggaagaagatggtgaagttcctgaagcctaacaaggcagtgatcgtcctgcagggccgctacgccgggcgcaaggcggtgatcgtgaggaccttcgacgagggaatcagggagcgcccctacggccactgcctcgtcg

SEQ ID NO: 242884 - DNA, 245 bp, Glycine max
gaagacgacaaaaggggaaatagaacaagagaggataagagaaataacttgtgcatacaacagtacagcgtcccgttgtctttttctcagatggctcgaacgaagcatgcggcacgcaagtctaccggcggcaaggcgccgcagcagcagctggagactaacgcggctcgcaagtccgctccggagacccgcggcgttaagaagccgcacaaattcaggccgggaatcgtggcgccacgctagat

SEQ ID NO: 242885 - DNA, 407 bp, Glycine max
tgccgaagaaagaacgaacaagaaagggggaactcacaaactccaataacacaagggagaaagcaagctcaacccagagttttaaaaatggcagcagcctcctccatggctctctcttcccatccttggctggcaaggccgtgaagctgggcccatcagcccccgaagtcgggagggtcagcatgaggaagaccgtaccaagcaggcctcctccggaagcccatggtacggcccagaccgcgtcaagtacttgggcccattctctggcgagcccccgtcctacctcactggcgagttcccaggtgactacggctgggatactgctggggcttcggccgacccagaaaccttcgccagaaaccgtgagctcgaagtgatccactccaggtgggccatgctcgggggcc

SEQ ID NO: 242886 - DNA, 206 bp, Glycine max
ggaacctttgcattctattcattcaagattcagcaagtgcgttttggaagcagagaccgaaatacttcgagatggcccgtacaaagcaaactgctcgtaagtcagctggaggaaaagctcccaggaagcagcttgcaaccaaggctgcacgtaagtctgcaccaacaactggtggtgtgaacaagcgtcatcctcatcgcccctgg

SEQ ID NO: 242887 - DNA, 308 bp, Glycine max
ggaacctttgcattctattcattcaagattcagcaagtgcgttttgggagcacagaccgaaatacttccagatggcgcgtacaaagcaaactgctcgtaagtcaactggaggaaaagctcccaggaagcagcttgcaactaagggtgcacgtaagtctgcaccaacaactggtggtgtgaagaagcgcgacgttatcgccctggaactgttgctcgtcgtgagattaggaaataccagaagagcactgagctcctaatcaggaagcttcctttccagacgttggttcgtgaaattgcccagaatttca

SEQ ID NO: 242888 - DNA, 238 bp, Glycine max
gtatatatgggatgcatgagcccgcttctgtggctttctcagctctaaatctcgcaatgcattttcatggttgggtctcccttttcactcttatatactagaaattgcctctaacagatggatagaacgcgtattatgagtatgctagtttgttgcatacgtattggcttgttataatgaactcctggttctggaatgttgttttccaaagtccgagatattcatataacagggattt

SEQ ID NO: 242889 - DNA, 264 bp, Glycine max
gacgcccttgatcaagcttcgcttcacgggcttggatgtgactttgccctacgagaacaccctcatacacaccgcctacggcggcatggcgtgcttggcgatggcggcggcgccgaataacgtgaactcggtgctcaatgtcattgccaactatcagcaacagaaccttagagttttgtttgataccgttagtaatacggttggcatagcgcgtgagctttgtaaccagctagttgacggtgtgcaacttctgtccgtcctcct

SEQ ID NO: 242890 - DNA, 277 bp, Glycine max
gactgcagaggtgtattttctcacttctcagcactcagcagcgatatcagttgaagaaacagaaacaaacaaaagaggcagaagatgttgtgggtggacaaatatcgtcccaaaaccctcgaccaggttatggtccacaccgacatcgctcgcaatctcaagaaattggtaacggaacaggattgcccccatttactcttctatggcccatctggctccggcaagaaaacccctaatcagtggctctcctccgccagatgttcggacctggtgccga

SEQ ID NO: 242891 - DNA, 267 bp, Glycine max
agggagactgatcgtgggagtgagagtgtgatgttgtaaatcgttcgtcttcttttgttgttctgtgtttgtgtttgtttttgtctcgcacctgagaatgtcgtgctgcggtgggaagcgttgttgctgtagctcctgtaagtgctggaagggctgcggacgctgcatgatgtatccagatttgagctatagtgtgtcaagctatcagctgataccttggtcatgggagtgggatctgttaatgttcaatttgagggtgctgaaatg

SEQ ID NO: 242892 - DNA, 280 bp, Glycine max
gaaacttcagagccctctattgcctctctttcttcgcttattgttgcactttcttcgtcctagatatttcctggtcggtactctttttagtctctttatctttattcttcttctattctcatgcgcccatcttatacctctcttcattcatcatctttctttctttgcattcttccttcactttcttcccttcttcgatcccaactcattcatgtccctctctatcttctcgcattgatcttatcgatcactctcatctagcactgcattttcattacca

SEQ ID NO: 242893 - DNA, 339 bp, Glycine max
ttttttttttttttttgtttttttgtttttttttttttgtgtttttgtgtttttttttttttttgtgttttgttgttgtttttgtttttttttttttttttttttgttttttgtttttttttttttttttttttttgttgtttttttttttgtttttgtttttttttttgttgttgttttttttttttgtttttgttgtttttttttttttgtttttttttgtttttttttgttttttttttttttttttttttttttgttttttttttttttttttttttgttttttttttgttttttttgttgtgtttttttgtgttttttcttttttttgtttttt

SEQ ID NO: 242894 - DNA, 334 bp, Glycine max
tacggcagcgaaagggacaaagaaaggggttctaatgtgtgattgtttgttgttgtaactcgttcttcatcttttgttgttctgtgtttgtgtttgtcttttcactcacctgaaaatgtcttgctgcggtggtaactgtagttgctgaagctcatggaagtgcggcaacggctgcagaagttgcaaaatgtagccagagatgagctacactgagtcagacatcatcgagactttggtcatgggagtggcacctgttaaagcacaatttgagggtgctgaaatgggtgtgctcgctgacaatgatcggtgcaaatgttgatcacactgctcctgc

SEQ ID NO: 242895 - DNA, 310 bp, Glycine max
gtgttgttggttttttttttttttttttttttggttgtgttgttctttttttttgtttttttgtggtttttttttttttttgttttgttttttttgttttttttttttcttttgtttttttttttttttgtttttttttttttttttttttttttttttgttgttttttgttgtttgtgtttgttctttttgtggttcttttttttttgtttttttttttgtttttttttgttttttgtttgtttgtgtttgttgttcttttgtgtttttttgtttttttgttttttttttgtttttttggttttgtttt

SEQ ID NO: 242896 - DNA, 363 bp, Glycine max
ttttgttttttttttgtttttttttttttttttttttttttttgttttttttgttttttttttttttgttttgttttttttttttttttttgtttttttttgtttgtttttttgtttgttttgtttttttttttttttttttttttgtttttttttttttttttttttttttttttgtttgttgtttgtttttgttttgtgtttttttttttttgttttttttttttgttgtttttttttgttttgtttttttttttttttttttttttttttttttttttggtgttttttttttttttttgttttgtttttttgtgttttgttgtttttgttgttgtttttttttttttttttttttttttt

SEQ ID NO: 242897 - DNA, 324 bp, Glycine max
ggcactttcaaattttcatttcctacaccttcacgagaaaaggatagcacttttcactttcttcactacgttctcacttcgatatggctcgtacgaagcaaaccgctcgcaagtccaacggtggcactgcgctacgtatgcagctcgccaccaatgccgctcggaagtccgctccggcgaccggatgagtgaagaaaccccaccgcttcatgccgggaaccgtggcgctgacggaaatcagaaagtaccacaagatcaccgagcttctcatcaggaagcttccatttcacaggctcgtgagacaaatctcgcatgatttcaaga

SEQ ID NO: 242898 - DNA, 301 bp, Glycine max
ggtagtttcaggttttcttttccttcagtttcacaagaaatggatagcacttttcactttcttcagtacgttctcactgcgatatggctcgtgagaggcatagggatcgcaattccagcggtggcaaagggctacgtatccagctcgccaccaaggacgctcggaattccgctccggcgaccggatgagtgtagaaaccctaccgcttcatgcccggatgcgtgtcgctgagggaaatcagaaggtactagaagatgactgagcttctcaacaggaaccttccatttcagaggtcttgtga

SEQ ID NO: 242899 - DNA, 234 bp, Glycine max
ggcagtttcaaattttcttttccttcactttcccgagaaaaaaataacacttttcactttcttcactacgttctcacttcgatatggctcgtacgaagcaaaccgctcgcaagtccaccggtggcaaggcgccacgtaagcagctcgccaccaaggccgctcggaagtccgctccggcgaccggaggagtcaagaagccccaccgcttcaggccgggaaccgtggcgctgaggg

SEQ ID NO: 242900 - DNA, 322 bp, Glycine max
acgcgtcagcttaagcgtccgtagagcagcgagaggacaagagaagggcgaaatgaatatatgtacagaagaagaacaaaggcttcagcaagaattcagacacagtggagaagatcccaagctctttctgattacaaacagcataagaacgcaactgttacacttcagtgtctatggtgagcgaaagtggcaaggaaagagctcataaagcttcagatggctgcaagggaaactggggcacttatggaagcacacgacaacttggacaaacttgttgaggagcttacatggacaatagatatccagaacagatgaggacgga

SEQ ID NO: 242901 - DNA, 384 bp, Glycine max
ggttttcattgggtgctgatcggaacaaacagggaatagaagagaggagaagatgggtttcataatggaatttgcggagaacttggtattaaagttgatggaagatccgaaggaaagggatcggaggttcagggagcacgtttatagagtgaaggacaggtgcgagaagacgaaggagatgtggagctaccctatgcgaccctatgggttttggacattcgaacgccacaattctcagcttgcttgggatgcacagattagccaagtggccgggaggagggacccttatgatgatctcctccaacatttctcttacccacctaagtgagtgttgctgaacttgccacaagcattatcggtgaaaaggatgaatttgtcgtaatt

SEQ ID NO: 242902 - DNA, 389 bp, Glycine max
ggagagagaagtgttcacgtctttgagaaatgggtgcttcggcatcggtcacagaaaaatccatccatgaattcatggtcaaggatgctaagggcagagacgtgaacctcagcacctacaaagggaaggttcttcttgtagttaacgtcgcttcaaaatgtggatttacaaattccaattacacccagttaactgagctttacagcaaatataaagacagaggtcttgagatactggcatttccatgcaaccagtttctgaaacaagagcccgggagtagccaggaggcagaggaatttgcctgtacaaggtacaaggctgagtatcccatttttggaaaggtacgtgtcaatggacctgatacagcacctgtctacaaattccttaaa

SEQ ID NO: 242903 - DNA, 357 bp, Glycine max
aggagagaaaggggcaagaaaagtgattacggttgttgagtgcggcggtcaaaacactcttctctgcagcttttgcctacaactcccttcaccatggctgaacaaaccgagaaagcttttctgaagcaacgaaaagtgtttctcagcacaaagaacactgggaagggaaagagacctggaaaacgtgggaaccgcttttggaagtccattgggcttggatttaagactcccagggaagctatcgaaggaacctatattgactagaagtgccccttcactggcaatgtttccatccgtggccgtatcgtggctggaacatgtcacagtgcctagatgaacacgactattattgttaga

SEQ ID NO: 242904 - DNA, 387 bp, Glycine max
ggtctcaaaagatatccctccctttgattgcatatatctgagaatcacccttttattgattcaaactttggaaatctcaatcttcacccttatgattgaaattaacatgaagcatcaaggcaagcttagagtgtttcttccaaatatgataatacttgtaaccatccttctccattcaacaacatggattagtgcacaggaagttgaggatgaaagtgagtttgattacataaaacggagtgagaagggtccctcacactggggggaactgaagaaggaatgggaaacatgtaagagtggcaaaatggcatctccaattgatttgtcaagccacagagtgagagtggtgccaaagttaggggagcttaagaagtactatacgcctca

SEQ ID NO: 242905 - DNA, 282 bp, Glycine max
gacaagctaggcacaacaaaaccacaatctaagttagtgttgagagaagagtgcgtttgtttgtttgaaattaagtagtaaagatgtttggaatcatcggaggaaacaagggtcacaagataaaggggaacttggtgattatgcgaaagaatgtgttggatatcaacagcatcaccagtgttaagggtgtcattggaaccggcattaacatcattggaggtgtcgtcgacaccgttactgctttggcgtcccacatctccatccagctcatcagtgccacca

SEQ ID NO: 242906 - DNA, 321 bp, Glycine max
ggtcgtcgtggaggtttcagcaatggtgaaactggtgaaggtgaagacggacgacctcgaagagcatttgatcgtcgcagtgggactggacgaggaaatgaattcaaacgtgaaggttcaggacgaggtaactggggaacccaaactgatgaacttgctcaggtaactgatgaggttgtgaatgaaacggaatagaatttgggtgatgagaagcctgcagttgaagaagatgtagctgatggaaacaaggacagccctactaatgaaaccgacgaaaaagagcctgaagataaggaaatgactctggacgaatatgaaaaa

SEQ ID NO: 242907 - DNA, 341 bp, Glycine max
gagcgaaacagagagtgatttcagtgagtgatcggtgttcacttgatctcatcataatcgtcagcgtcaattgaagaagatgccgatcagaaacatcgccgtcggaaggcctgaagaggcgactcaccccgacacgttgaaggcggctttggctgagttcatctcaaccttcatcttcgtgttcgccggctcatgctccggcatcgcctacaacaagctcatcgacaacggcgctgccacccctgccggcctcatctccgcctccatcgcccatgcattcgccctcttcgtcgccgtctgcgtcggcgccaacatctccggcggccacgtcaaccccgccg

SEQ ID NO: 242908 - DNA, 301 bp, Glycine max
gatgatggtaatagcagcagcaacaacgaggatggggagttgacgggggctaagcctgctcgtccgtcttacaacgcttttgagataatctcgtccttgtcgcatgggttcgatctgaggaatttgtttgaggcgaggaagcggtcgccgtcaatgttcatttccaagttttcggcttcggcggtgatggcgaagctggagggggtggccaagaagctgaactttagggtgacggggaagaaggagttcatggtgaggatgcaaggggcgacggaagggacgaaggggaagctggccatga

SEQ ID NO: 242909 - DNA, 391 bp, Glycine max
  unsure (1)..(391): unsure at all n locations
ctcaaatcaaatgcttagcagctgtagaagaagagattgttacatctggatttgataataagataaggcgagtttctttacatagggatcagtgtggagatactgaagccattgatataggaagtcaaccaaaggacttgagtgttgcacttctttctcctgaacttgctctagtttcaattgattcaggagttgtcatgttgcgtggtaccaaaattgtgtcaaccataaatcttgggtttattgtgacagcatctgctgtctcacctgatggaagtgaagccattatcggtggacaggatggtaaattgcacatatattctgtttctggtgatactcttgtagaagaggtagtccttgagaaacatangggtgctattagtgtcatacg

SEQ ID NO: 242910 - DNA, 328 bp, Glycine max
  unsure (1)..(328): unsure at all n locations
agagttggtggggtggtgaccaactgggccttggtttcattgaaccatgacactcaatcctgcatggaccccaatgtgatggacgctaatgtggtggtgagttcttgtggccatgatggaccctttggagccactggggtgaagaggctcaagagcattgggttaattgatagtgtgcctgcgatgaaggcacttgacatgaacaaggctgangatgccattgtgaggctcactanggaggttgtgcctggcatgattgttactgggatggaagttgctgagattgatggtgctccaaggatgggttcaacatttggagcaatgatga

SEQ ID NO: 242911 - DNA, 393 bp, Glycine max
  unsure (1)..(393): unsure at all n locations
gatccacaacgatgagcgtaccgaaggcagtggcagcgacgatccggctcacggtgccggccggaggagctcggccggcgccaccggttggaccggcgctgggtcagtaccggctgaacctgatggcgttctgcaaggacttcaacgcccgcacccagaagtacaaggcggagacacccatggccgttacgataacggcgtacaaggacaacaccttcgagttcaccgttaagtcgccgccggtgtcgtggtacctgaagaaagccgccggcgtggaatccggtagcagccggcccggtcacgtgaccgcgtcctcgttgtccgtgcggcacgtgcacgagatcgcgaaggcganacagtccgattcgtacctccagaacatgcctctcgagt

SEQ ID NO: 242912 - DNA, 387 bp, Glycine max
gacggcactcgttttcgttctcgttctggtttacagatctttgcgaacgacgtttacagcgctcaaccaaagatgcagaacgaggaaggacagatcactgagctttacattcctaggaagtgctccgccacaaacagattgattaccgctaagggccatgcttcggttcagatcaacattgggcatgtggatgagaatggcgtctacaatggccatttctccacttttgccctctgcggattcatccgtgctcagggtgatgctgacagtgctctagaccgcttgtggcagaagaagaaagttgaagttaagcaacagtacacacccatgatagtttgttacttcgttatgtattaatttctactcttgctagagatatttgagtac

SEQ ID NO: 242913 - DNA, 265 bp, Glycine max
gagtcactgagggatccactcaagattgccacaagaaattcatccttacatatcccatcacagggtgccatattaagctggaatccaatgacgacctgaagcttcgagcagttcgggacaagaggttcccccacaaggttcctggtgatgctctgagtgaagagttgaacggagatgtgatctggatcacctctgggtgtgacagatacagattccctatgtcccaaggaatcctgatcactagtcgtttttgatcttagctcca

SEQ ID NO: 242914 - DNA, 221 bp, Glycine max
aagatacaggggtcactgacacagagagacactcgtcacagatcccatttcaatctcatgactatgcgcgaccttcgtgaacattcatatccgtcacgcagggatccacgtcggaaattcctgctgggaacactattgactgcatgccggcatccacctagaaggcatcattccctccgacgccaccttcggtgtagcccactacacgttcaaaatcttct

SEQ ID NO: 242915 - DNA, 384 bp, Glycine max
ggaagtaagggatcgagcctcggaggagggaatcgcagcgaagtccactatgccgaagcaaattcacgagattaaggacttcctcctcgctgctaggaggaaggatgcacgctctgtgaaaatcaagcggagcaaggatgtggtgaagttcaaggtccgttgctccaagtacctttacaccctctgtgtgtttgattctgagaaggctgataagttgaagcaatcacttcctccaggtttaagcgtgcaggatgtgtgattcttactgctgtatgaagatcaggtttttctctggattttggggattcatagttagtaaaatggttcagagaattttcgtatttgttgttacattcgggatcatgttagtattttgtttaagac

SEQ ID NO: 242916 - DNA, 359 bp, Glycine max
  unsure (1)..(359): unsure at all n locations
ggtagttccaccgagtagcaacaatgtcgaagcgaggtcgcggaggatcggcgggaaacaagttccgcatgtcgctgggtctgccggtggcggcgacggtgaactgcgccgacaacaccggcgcgaagaacctctacatcatatcagtgaaggggatcaagggtangctgaaccggttgccgtcagcttgcgtcggagacatggttatggccaccgtcaagaacggaaagcccgatctccgtaagaaggtgctgcccgccgtcatcgtccgccagcgcaagccttggcgccgaaagggcagtgtttacatgtacttcgaagataatgctggtgttatcgtgaatcccaagggtgaaatg

SEQ ID NO: 242917 - DNA, 391 bp, Glycine max
ggagggagatgcagtagaatagtaatagtggtaacaaaaggcaacagagaacagaagagaaaggaaaagagagggtttggtgagttacccaagagaaaggatgaagagagagcgccagcagcttggttccaacgcaggaacctcaagctgcggttattcaagcggaaaatcgaatctttgggaggaagaaggaggcatggacgagcttcttgcagtggtgggttacaaggtgaggtcatcggacatggcggaagtggcgcagaagctggagcgtcttgaggaagccatgggaaatgtccaagatgacctcacggacctttcaaacgacgccgttcattacaacccttccgacatctccaactggctccaaaccatgctttccaattttgac

SEQ ID NO: 242918 - DNA, 390 bp, Glycine max
gagcgaaaaatggctgcaccaacaccgattcagaaaactgaagaggagtggaaggtcattctctcccccgagcagtttcggatccttcgccagaaaggaactgaattgaagggtacaggagaatataacaagttttatgaagaaggaatttacaactgtgctggctgtgggactcctctttacaagtcttcaaccaagtttgattctggttgtggttggcctgctttctttgagggttttcccggtgccatcgatcgatcccctgacccagatgggaggaggactgagataacttgtgcagcatgtggtgggcacttgggtcatgttttcaaaggagagggattcaagaccccaactgatgaacgccattgtgtcaatagtatttctgtc

SEQ ID NO: 242919 - DNA, 393 bp, Glycine max
ggatcacaaatctttcgctaacactcattaattgcaagaatggcacttcgttgcttggtgatgtccctttctgttctcttcactcttggtcttgcgagagaaagccatgccagagacgaagatttttggcatgctgtttggccaaacactcccattccaagttcattgcgagatcttctaaagcctggccctgcaagtgttgaaatcgatgatcaccctatgcaaattgaagaaacacagtacccgaaaaccttcttctataaagaagaccttcatccaggcaaaacaatgaaagtacaattcagcaagcctccctttcaacaaccatggggtgttggtacatggttaaaggaaattaaagacactactaaagaacgatatagttttgaagag

SEQ ID NO: 242920 - DNA, 383 bp, Glycine max
gaggcgcggcgggatcagcacaagattgcaaaatgaagttcaacattgcaaatcccaccactgggtgccagaagaagctggaaatcgatgacgacctgaagcttcgagcattttgggacaagaggatctcccaggaggttcttggtgatgctctgggtgaggagtttaaaggatatgttttcaaaatcaccggtgggtgtgacaaacaaggattccctatgaagcagggagtgctgacccctggtcgtgttcgacttttgctccatagaggaactccttgtttccgtggatatggaaggcgcaatggagagcgtagaacgaagtctgttcgtggttgcattgtcagtccagatctctctgttttgaacctggtaattgtgaag

SEQ ID NO: 242921 - DNA, 349 bp, Glycine max
tgggaggcccagcgggatcagcacaggagtgcatgatgaagttcaacattgcaaatcccaccactgggtgccagaagaagctggaaatcgatgacgacctgaagcttcgagcagtttgggacaagatgatctcccacgaggttcatggtgatgcactgggtgaggagtttaaacgatatggtatcacactcaccggtgggtgtgacagacaaggactccctacgaaccacggagtgctgatccctgctcgtgttcgacttcagctccatagaggaatcccctgtttccgtggatatagatcgcgcaatggagagcgtacaacgaagtctgttcatggttgcattgtcag

SEQ ID NO: 242922 - DNA, 358 bp, Glycine max
ggtgagtgagatagagagagacgcttcgcaaatctcaatcgaatctcagaaagatgagagaaatcatcagcattcacataggtcaggccgggatccaggtcggaaactcctgctgggaactctactgcctcgaagatggcatccagcccgacggcatgatgccttctgactccatcttcggtgtagcccacgacgccttcaacagcttcttcagcgaaaccggatctggcaagcacgtcccccgtgctgtcttcgtcgacctcgaacccaccgtcatcgacgaggtccgctgcagcacctaccgtcaactcttccaccccgaataactcatctccggtaatgaagacccgccaacaac

SEQ ID NO: 242923 - DNA, 346 bp, Glycine max
  unsure (1)..(346): unsure at all n locations
ggcggcacaaagcattcactgtgtcggaaaaagaagaagagaaaaaagatgagcgacggaggaaaacgacaaggtggaagagcgttgccgccgccgccaagaggccctccgcctcctcccccctctcgccctcgcctcgaacccgtcgatcgcgaaaagacatgtccgttactgctgcgagtgttcactaagattgggagtcaccattccatggaagactttgccgtcagaggcaaagagcccaaagacgaggttcagatttacacctggaaggacgctactctccgagaactcaccgatcntgtcaaagaagttgctccggctgcaacgagaagaaacgccaaac

SEQ ID NO: 242924 - DNA, 348 bp, Glycine max
  unsure (1)..(348): unsure at all n locations
gaaggaaagtgagtggaagccaggggcaatccgatagaaaagggttttatttccttttctcttcaattattttcttttcctgtctttgttgttcagttccgttgttgtgttgtgtgctgcaacacaatcggtggtctgagaaatcctgtttgtgttgggtttgttatggctcggagagcagaggaagagtacgattacctgttcaaggttgtactgatcggtgattccggtgttggaaaatccaatcttctgtcccgattcactcgcaacgagttntgcctcgaatncaagtccatcattgggagtcgaattcgccactcgcactcttcaggtggagggaagaaactg

SEQ ID NO: 242925 - DNA, 343 bp, Glycine max
gaaaggcagaggagagagtaacgaaggttgcttctaactgttcagaatcatgtcttggtgcaccattgagtccgatcccggtgtgtttacagaacttattcagcaaatgcaagtgaaaggagtacaggttgaggaactttattcattggatcttgactctctcaacagccttaggcctgtttatgggttgatttttcttttcaaatggcgtccaggagaaaaggatgaccgagtggttatcaaagatcccaaccctaacttgttttttgctagtcaggtaattaataatgcttgtgcaacccaagcaatcttgtccattcttatgaattcaccagacattgac

SEQ ID NO: 242926 - DNA, 386 bp, Glycine max
gatcatcatatcatgtcttatacaactgatgaagtgatcaacttgtaatgtaacacttttgagttgcattgttgcatcaccgcaagtccacaacatggctgccactgccgctgcaggcatagcttccttgttttcttcttctattaacagtgtcaaatgtcttcgttcctccaagaactgctccattatagacccccttataaccacagtgccctcaaaccgtggcatgtttgtgtcacacttggtggaacctttgtccattgggggtgccattaattcgcacaagttgtgggggcctagaatttctgctgctgttgcacaagaagaggctgttgttgtggctgatgatgaggtagatgatggtgctggtttagttgaagaagaga

SEQ ID NO: 242927 - DNA, 325 bp, Glycine max
gactgcaacatgctttctcatactagcacctctggttgtgctatggtgttggaagctacaagtgtgggtgtggctgaagccaacgagattggagagagcattataggcacaaggccctcaggggaatccctacagcctcttgattggggatactatcgacatgtacacagtgctcatgcaagctgccagatctcagcaatctacaatttctcttctcactaaggataatgatgcagcacgacatatcacaacctttaaccatcaaattgtcaacaaattcagcaagaattcatttttttgggaatgtagcaaaccacaagtggta

SEQ ID NO: 242928 - DNA, 372 bp, Glycine max
  unsure (1)..(372): unsure at all n locations
gagagagaggggtttgggattggagggattgacgctgcgtctcttcctcttctctttcgatccatccctcattcctaatcctccaatccaaccacctcagcctcacactcacatatacacatatctgaacgcgtatcgtccctcctatggcttcaaagcgcatcctcaaggagctcaaggacttgcagaaagacccaccaacttcttgcagcgctggtccagtagctgatgacatgttccattggcaagcaacaataatgggtcctgctgatagtccttatgctggaggtgtactcctaattacaattcacttccctccggattatcccttcaagcctcctaaggttgcctttangactaaggtgtttcacc

SEQ ID NO: 242929 - DNA, 384 bp, Glycine max
ggcagctcagggagaatgtcgagggatgtgagccagcagaggaaggactacgtacaccctccgccagcccccctcatcgacttggccgagattaagctctggtccttctagagagccctcatcgccgagtttatcgccacactcctcatcctctacgtcaccgtcgccatcgtcattggccacgaacaacagaccggaccatgtgacggcgttggccttctcggcatcgcatgggccttcggtggcatgatctttgtcctcgtctactgcaacgccggcatttctggtggacagacttacgctgcggtgacttttggcctgttcctgtcccgcattgtgtctcgcatttgtgccctgttctacatagtagcgcagtgtttgggt

SEQ ID NO: 242930 - DNA, 257 bp, Glycine max
ggtggtagtttggcagcgacacgtatcttcatcaataatcgcagaagcagtttccggtgcatctcatcgtcttccaaaatgaacgacgcagatgtctcgaagcaaatccagcagatggtgcgtttcatccgccaggaagctgaggagaaagccaacgagatctctgtatctgccgaagaggaattcaatatcgagaagctgcagttggttgaagccgaaaagaagaagatcaggcaagaatacgaacgcaaagagcg

SEQ ID NO: 242931 - DNA, 323 bp, Glycine max
gctctttttgctgtgggaagaggaaccctagctacggtttggaagaagctgatccgagaagatggtgcagcgtctcacccagcgcatacgccacagctatgctaccaaatccaaccagcacagagtcgtcaagactcccggtggcaagcttgtttatcagaccacgaataagatggccagcggacccaagtgccctgtcactggaaagaggattcaagggattccatatttaatgccagcagagtataatagatcaaggttacacagacatcgaaggactgtgatacgtgcatatggtggtgtgttgtcaggcactgctgtta

SEQ ID NO: 242932 - DNA, 319 bp, Glycine max
ggttctagtgtgtgattgtttgttgttgtaactcgttcttcttcttttgttgttctgtgtttgtgtttgttttttctctcacttgaaaatgtcttgctgcggttgtaactgtggttgcggaagctcctgcaagtgcggcaacggctgcggaggctgcaagatgtacccagacttgagctacactgagtcaaccaccaccgagaccttggtcatgggagtggcacctgttaaggctcaatttgagggtgctgaaatgggtgtgcccgctgagaacgatggctgcaaatgtggaccaaactgctcctgcaacccctgcact

SEQ ID NO: 242933 - DNA, 391 bp, Glycine max
gagtgagtgagtagtgagaatggagtttcaagggttaccggaaggttgcattgctagtatactctctcgcactacgccagcggacgtgtgtaggttttccgtcgtatcaaagattttccgttcggccgctgaatcggacgctgtgtggaaacgttttctcccttccgattaccattccatcatttcccagtctccttcgcctctcaactatccttccaagaaggagctctatctcgctctctcggatcgccctatcatcatcgatcagggtaaaaagagctttcaattggagaaaaagagtgggaagaagtgttacatgcttgctgctagagctctcagcattatttggggtgacactgagcaatactggaactggacaaccgataccaat

SEQ ID NO: 242934 - DNA, 388 bp, Glycine max
  unsure (1)..(388): unsure at all n locations
ggtaaactcatagtggattgcacaggtgaaggtgccttgtttgtggaggctgaggcaaactgttccatggaagagattggtgacatcacaaagcctgaccctgggactcttggtatgcttgtttatgacattcctgaagcaaaacacattcttcagatgcctcctttggttgctcaggtgaccaagttcaaatgtggaggctttgcgcttgggctgtgcatgaaccactgcatgtttgatggaattggtgcaatggaatttgtgaactcttggggagaagcagccagggacttgccactctcaatccctccagtgctagacagaagcatgctcaaggcaagannacctccanagatagagcaccctgcacaagaatttgctgacattg

SEQ ID NO: 242935 - DNA, 364 bp, Glycine max
ggcagttcaattccaatatattccattctctctgtgtaattccctacctctcccgtcaagatgcagatcgtcgtcaagaccctcaccggcaagaacatcagccttgacgtggaaagctctgacaccatcgacaacgtcaaagccaagatccacgacaaagaacgaatccccccggatcagcaacgtctcattttcgcctgaaagcaacttgaggacggccgtacccttgcaggctacaacattcagaaggagagtactcttcacctcgtcctccgtcaccgtggtagcatgcagattctcgattagacactcatcgggaagacccataacctagaaggtgaaagctccgacaccatcgataacg

SEQ ID NO: 242936 - DNA, 317 bp, Glycine max
gggtgtcggtggcattgttgttggagtgagcgaagaacatgtattctagagattcatggggtggaccgttggagataaacgcgacggactcggcgactgaggaccagcggagccggaacctgcatgacgttgacagggcagcgctgtcgcatcccttggatgagacgcagcatagctggctccttggccccggcgatcagaagaggaagaagtacgtcgatctcggctgcatcatcgtcagccgcaagatcttcaagtggaccctcggcacaatcatcttcgccgccttcctcgccggcctcatcgccatcatcgtc

SEQ ID NO: 242937 - DNA, 342 bp, Glycine max
gggtgtcggtggcattgttgttggagtgagcgaagaagatgtattctagagattcatggggtggaccgttggagatacacgcgacggactcggcgacggaagacgagcggagccggaacctgcatgacgttgacacggcagcgctgtcgcatcacttggatgagacgcagcatagctggctccttggccccggcgagcagaagatgacgaagtacgtcgatctcggctgcatcatcgtcagccgcaagatcttcagctggacgctcggcacaatcctcttcgccgccttcctcacgggactcatcggcctcatcgtcaacaccgtacctcgccaccgccaca

SEQ ID NO: 242938 - DNA, 373 bp, Glycine max
gacggacgagggtttcgtttcgggtttgacgttgttcacaatcactttctgcgcttcactcactcccttcgtgcggttttctttctttgtcgaactcgtgcgaaaatgcgtgagattcttcacatacagggagggcaatgcggaaaccagatcggagcgaagttctgggaggtggtgtgcgcggagcacgggatcgattccacggggaggtgccagggggacaacgagttgcaactcgagcgagtcaacgtctattacaatgaagcgagttgcggaaggttcgtgccgagggcggtgctcatggatctagagccagggaccatggacagcgtcagatctggtccctacggtcagattttccgacctgaaaact

SEQ ID NO: 242939 - DNA, 333 bp, Glycine max
ggagcgaagaagatattagggtttttgagtgcggtgcggcgatcctagcactctcttctgcagctttcgccgacagcttcattcaccatggctgagcaaaccgagaaggcttttttgaaacaaccaaaagtgtttctcagctcgaagaaaactgggaagggaaagagacccggaaagggtgggaaccgcttttggaaatccattgggcttggatttaagactcccagggaagccatcgaaggaacctacattgacaagaagtgccccttcactggcaatgtttccatccgtggccgtatcctggctggaacatgtcacagtgctaagatgaac

SEQ ID NO: 242940 - DNA, 380 bp, Glycine max
ggaggagaagaaaatgaagcagggaaaaatatttgactttgatgatggcagctcgcagtctttgcaggctactctctcgctctctctcttcttccagttcttctggagctgcttctctgcttcactcactaggaagaaaccctggagggtggagaaacattaacagatttagcacggctgcagcagttgaggaactaatcactccacaagtttcaatacgttacacacagaacctgataaatgggcaatttgtggatgctgcatcatggaaaacatttccaacatatgatccgcgctcaggagaagtgattgctaatgttgctgaacgggatgttgaagatatcaaccgtgcagtatcagcagctcgcaaggcctttgat

SEQ ID NO: 242941 - DNA, 386 bp, Glycine max
catgaagctcttagaagagtacgaaagtggcggggttgtgagtgaagcttgccaatgcatccgtgatctgggaatgcctttctttaaccatggggtagtgaagaaagctttgattatggcgatggagaaaaagaatgatcatatgctagatctactgcaggagtgcttcagtgagggcctgatcaccattaatcagatgacaaaaggtttcacccgaataaaggatggtcttgatgatctggctctggacattccaaacgccaaggagaaatttggcttctatgtggagcatgctcagtcgaagggctggcttctacccttatttgattcgcctgccacagatgcctaattaccgccggcggcagctttttgaggacgtttgtgtc

SEQ ID NO: 242942 - DNA, 383 bp, Glycine max
cgggatctggcagcagaaaaacaagtagttgagaactaagaagaaggaaatggcttcctcaatgatctcctccccagctgttaccaccgtcaaccgtgccggtgccggcatggatgctccattcaccggcctcaaatccatggctggcttccccacgaggaagaccaggactgatattacctccattgctagcaacggtggaagagtacaatgcatgcaggtgtggccatcaattggcaagaagaagttcgagactcgttcctacttgccagacctcgatgatgcccaattggcaaaggaagtcgaataccttcaaatgaaacgatggattccttgcttggaattcgacttggagcacggtttcgtgtaccgtgagcacaaca

SEQ ID NO: 242943 - DNA, 369 bp, Glycine max
gatcacaagaagcacaatttctctctttctttttgtgtccaaaatggctcctagttctactcacaatactgggttctatgtgcttatgctagttgggatagtgattagcactatggttgctacctgtgctggtagcttctaccaagactttgatcgaacatggggtggtgaccgtgctaagatattcaatggtggccagcttctatctctttcccttgacaaagtctctggctctggcttcaaatcaaagaaagaatacctatttgggaggattgatatgcagctcaagctcgttgctggcaactctgctggcactgtcactgcgtactacttgtcatcccaagggccaacacatgatgagattgattt

SEQ ID NO: 242944 - DNA, 282 bp, Glycine max
ggagcaagagtgaagagcgaagagaatggctcccaagggtttaatctttttggctgtgttatgcttctcagcactgtcactgagtcgttgtcttgcggaggataatggacttgttatgaacttctacaaggaatcatgccctcaggctgaagacatcatcaaagaacaagtcaagcttctctacaagcgccacaagaacactgctttctcctggctcagaaacatcttccatgactgtgctgttcagagttgtgatgcttcactgttgctggactccacaag

SEQ ID NO: 242945 - DNA, 320 bp, Glycine max
  unsure (1)..(320): unsure at all n locations
ggagtgtttgggttgcacgtagaccacctggttatgcttttattgactttgatgaccgcagagacgcacaggatgctatccgtgaattggatggcaagaatggttggagggttgagctttctcacaactctagaggtggaggtggtggtcgtggtggtcgctctggtggttctgatttgaaatgttacgagtgtggtgaacctggtcattttgctcgtgaatgccgcatgcgtggtggttcaggaagacgccgtagccgtagtccgcccagattccgtangagcccaagttatgggcgaagtcctcgtgggcggtcccct

SEQ ID NO: 242946 - DNA, 372 bp, Glycine max
gggggaaacatatacaaaacatttcgtccgaaactaatataacgtgttcctccttggaagaagccatagccataacatagccaccagaagacaaaacccaccttagttattagaagaaaagaaaactacataaaattaagctttgttcggtggtgaccatggggagcaccgactcatcaagcggttcacaacaaccgaacctgccacctgggtttcggttccaccccaccgatgaagagcttgtggttcactacctcaagaaaaaaacagcttctgctcctcttccggtagccataatcgccgaggttgatctctacaagttcgatccatgggagctacccgctaaggccgcgtttggggagcaggagtggt

SEQ ID NO: 242947 - DNA, 390 bp, Glycine max
  unsure (1)..(390): unsure at all n locations
ggcacaagtttgttgagatagctagaagcaataagatgaaaatgaaagtgcttgttttgtttgttgctacagttttggtagcatatgaatgccatggctcagactaccagaagttccctctccaaatgaaaactgggtttggtgggcaatacagcaatgaggtggcatgtgccagttggaggcttggcgtggaagcaaacaacgtagtcgagtggcaaactgttcctgcagcttgcggagagtacatagctgactacgttctangagaacaatatagatcagattccanaacagttaaccaacangcttatttctatgctagatcgctcgaaactcacaacagagatgtctttgtcttggacgttgacgacactactctctctaatctca

SEQ ID NO: 242948 - DNA, 287 bp, Glycine max
ggcacacgtttgttgaggtaactagaaccactaacatgaaactgaaagtgcctgttttgtgcgttgccacactgctggtagcatatgaatgccatggctcagattaccagatgttccctctccaaatgaatactgcagtttgctgggcacgacggcaatgatgtggcatgtgccaattagacgcttgagcgtggaaccagacaccttagtcgagtaggacactgttcctgcagcttgcggagactacatagctgactacgttctatgagaccactatagatcagatt

SEQ ID NO: 242949 - DNA, 392 bp, Glycine max
  unsure (1)..(392): unsure at all n locations
ggtgattcctcagttcaacaactctcagcaacatgcacaatcctcccccgccaggcggtccaggccctcaccaccaccccggcccaccggctccgccaccacatgctcatccatctcctccgcctcctgggcctccacaccaccaccacggcccacccggcccaccgcatgcttatccaactcctccgcctcctgggcctccacaccaccatcccggcccacccgaaccaggctttcatcaacaccatggcccacccgggccaccgtatgctcatccaactcctccgcctcctgggccancgggacctcccccctccaaggcctccacactaccaacaccaccggttgctgatgtaatgcatatggagcttatgaataacgattctacatat

SEQ ID NO: 242950 - DNA, 278 bp, Glycine max
ggagctttgtgagggcggggagctcttcgaccgcatcgtggcgcgaggccactacaccgaacgcgccgccgccgccgtcaccaagaccatcgtcgaagtcgttcagatgtgccacaagcaaggtgtgatgcatcgggatctcaagccagaaaactttttgtttgcaaataaaaaggaaactgcggctttgaaggctatagattttgggttgtcggtgttctttaaaccaggggaaaaatttaatgagattgttggaagtccatattacatggctcctg

SEQ ID NO: 242951 - DNA, 332 bp, Glycine max
ggggtcggcccgatatggcttactttttcttcacaaaggatatattgaaagggaagcagatatctgttttcgagggtcccaatggacgatcagttgcgagggactttacttacattgatgatattgtgaagggatgtttgggggcgttggatactgccaacaggagcactgggagtgggccggcccagttgcggctctacaatctgggcaacacttctcccgtggcggtgagtaagctggtgaggatattggagaagttgctcaaggttaacgccaacaagaaactcttgccaatgccgcccaatggggatgtttttttcacccatgctgat

SEQ ID NO: 242952 - DNA, 227 bp, Glycine max
gaaagagtgaaattggaaattgcatttgaataatgatgtccatattccggcaatacaccttggacgactcattctcgcaagtgttggtgtccccgaaattcctgaaggagtaccaaatagccctgaccttcgcaagcgactacgacgacgacggcgtccccaccaacggggttttccggccaacctgggacctaaccaaagtgaccccggaatcaatcacgcgattc

SEQ ID NO: 242953 - DNA, 298 bp, Glycine max
ggagcagtgtttaagttgtgtttggcagcgcggaggggcaagctagggagtaagagatggatttggaccaatggatctccaaggtgaaggatggccagcaccttctcgaagaggagcttcaacttctttgcgaatatgttaaagagatccttagtgaggagtcaaatgtgcagcctgtcaacagtccagtgacggtttgtggtgatattcatggtcagtttcatgatctaatgaaacttttccagactgggggtcatgtgccggagacaaattacatttttatgggagactttgttga

SEQ ID NO: 242954 - DNA, 403 bp, Glycine max
ggtctcgctctgcacaaaccctaacaccaaaaccagaagcgaaatcgcaatcgcaatccagcgaatatgaaggtcgtcgctgcatacttgctcgcagtgttgggagggaatccttccccttctgccgatgacatcaaacacatcctcggcgcagttggagctgaggctgagaatgagttgattgagttgctcttgactgaagtcaagggaaaagacttcaatgagctaattgctagtggaagtgaaaagatgtctgcagtgtctggtggcggtgcagcggttgccgttgctgctgcaccagctggaggtgctgctgcacctgctgccgaagcaaaggaagaaaagaaagtagaagagaacgacgagtctgatgatgatatgggtttcagtttgttcgactaaa

SEQ ID NO: 242955 - DNA, 363 bp, Glycine max
ggtcgaggccgcgtcagggggcatagggaaggaaaagtggtgttggtggttgtcctcctcattggtatggcaaccctttcctccatcctctcctcctctcttcctcttttccatcgctagcctaaccctaacccttcgctctttcgcccctccctttctctctctttctctcgcactaaaccccgttcccccttcctcgttctcgctgcctcttctcatgatttcgcctccaactccaagaaatcagtgctcagcgagttgatacgagagatagaacctctggatgttagccagattcagaaggatgttccaccaattacagcagatgccatgaagaggactatatctggtatgccgggcgtg

SEQ ID NO: 242956 - DNA, 416 bp, Glycine max
gatccaatccaattgaattctccagagagaagaagaaacttaatcgatcatcacttcacttcactaatacatcatggcagacgagacccagaacaagtatgagagctctgaggttgaggtccaggatcgtggtgtttttgactttctcggtaagaaaaaggatgaagaagacaagcctcatcctcaggaggaggtcatcgccaccgagtttcaaaaagtcactgtctcagaccaaggagagaacaagcacagcctcttagaaaagcttcaccgatctgacagcagctctagctcttcaagtgaggaggaaggagaagatggagagaaaagggagaagaagaagaaggaaaagaaagggctgaaagagaagatcgaggagaaaatagagggtgatcatcatcatcacaaggatgagg

SEQ ID NO: 242957 - DNA, 409 bp, Glycine max
ggaacctttgcattctattcattcaagattcagcaagtgcgttttggaagcagagaccgaaatacttcgagatggcccgtacaaagcaaactgctcgtaagtcaactggaggaaaagctcccaggaagcagcttgcaaccaaggctgcacgtaagtctgcaccaacaactggtggtgtgaagaagcctcatcgttatcgccctggaactgttgctcttcgtgagattaggaaataccagaagagcactgagctcctaatcaggaagcttcctttccagaggttggttcgtgaaattgcccaggatttcaagactgatctgcgtttccagagccatgctgtgcttgcattgcaagaggctgctgaggcatgccttgttgggctctttgaggacactaacttgtgtgccat

SEQ ID NO: 242958 - DNA, 390 bp, Glycine max
  unsure (1)..(390): unsure at all n locations
gccaacatttttgcccaggtctgaagatgaaagggagatgtgctcaagaacaatctattgcacaaatatcgacaagaagcttactcaagcagatgtcaaacacttcttcgaatctatttgcggagaggttcatcgcttgaggcttcttggggattaccatcattcaactcgaattgcatttgttgagttcgcactggcggagggtgcaattgcagctctgagctgtagcggtgtgatcttgggttcactgcctataagggttagtccatcaaagacaccagtgcgccctcgtgctcctcgtcnccccatgcactgaatcatcctttctcgtgtttctgctgctgctgcaactcggagatatatttacatatatacatacatagaaacaga

SEQ ID NO: 242959 - DNA, 373 bp, Glycine max
gacacctggattgaaggttccttggcttcttcacactcacagcgtgccaccatcacgctacactaagagtgcaggaacatcctgtatgggttggaaagcagctgagaaactcattaggcactggaaaattctcagaggagataatgttatgataacaaggggcaaagataagggtgagaccgggattctaaagcgtgtcattcgctctcaaaatcgtgtcattgtagagagtaaaaacccggtaaagaagcatataaagcaagggcaaggtcatgaagggggcatctttacagtggaagccccactgcatgcctccaatgtgcaagttcttgacccagtgacagggtatgtcattgttcagatattgaactgg

SEQ ID NO: 242960 - DNA, 377 bp, Glycine max
gcgggtttgaaggtgtaccacgtccccaaagttggggagcttgacctaacgggtctggaaggcgagatcaagcagtacgttggcctctggaacggtaagcgaatctccgccaatcttccttacaaggttcagtttctcaccgacatccccggtcgtggtcctgtcaagttctttgcccacctcaaggaagatgaattcgactatctttagtcactgtactgcactgcactgccctgcacgtcactgttgtttaggtgtccctgtacttgttggtaaaagcaatggtatccttcggcaaatctgtcttttgaacctactatgattttactgacctcgaaaactcaactcaacaatgatgttttgtgcactttcatgtt

SEQ ID NO: 242961 - DNA, 350 bp, Glycine max
gctcacccagttgcagaaagaaaagaccatcaaagtttcacttcagccttatccggtttagggtttcggtttttgacccaacctttgacgtatcgaaaccttaagtttcggatcaggtctgagcaatctggttggtagaacctttggtcttagagagtcaagttttatgtctgaattagacgatcaaattcctactgccttcgatccttttgctgatgcaaatgctgatgactcgggtgctgggtcaaaggagtatgtgcatattcgcgtacagcagcgaaatggaaggaaaagcctgacaaccgttcagggattggaaaaagaattcagctataacaagatacttaaga

SEQ ID NO: 242962 - DNA, 323 bp, Glycine max
gacagacaactattccgcttaaacctgctactgagtttccacactggataccttacgtcttccgaattcgaacttcatttgcgatatggctactgaaaaagctcacatcaacattgtggtggttggtcatgtggaccctgacgaagcaaccaccattaacgagctgaataatcctgttgtggagaaagaagctccagggcatgccatatcatggcatgcacgtacggccaccgaagggaaccagaccattatgttaacaaaataatctggaagcctaatgtatcagtgtcatcatcactgtgtagtttaagctatcattgcta

SEQ ID NO: 242963 - DNA, 391 bp, Glycine max
gaaacaggagagcaaccaaagctatacgttggagtggaggtgaggggagtgtttgtgtccgagggaacaataaagggcaaacaaacaacaaaacaaaggaaagaaaagatgttacagttcccggcgtatatgacgcagtacccattgtccacgatgaccattccgacgtcgtttctgctacccgctcagtggccccagccccaaaacgaagaactccttctcgccatggaagagtccgatttcgaaaaaaaatgcaacgagatcaggaagatgaacagcaacctaattgtgataggacaaaccactaacgacaatgataacgaagactttgacaatgaggcagatgaccattatgctgacaatgcacaggaaatctagggcgaagaatttg

SEQ ID NO: 242964 - DNA, 383 bp, Glycine max
  unsure (1)..(383): unsure at all n locations
gatgccatgtgggtttttggagagaaccaaagagaaaggcatggtttttccttcatgggcaccccaaattcaaatccttagccacagttcagttggagggttcttgactcactgtggttggaattcgatccttgagagtgtgctaaagggtgtgccattcatcacatggccactgtttgcggagcagaaaatgaatgcgattttgctatgtgagtgtctcaaagtgggagtgaggccaagagttggtgaaaatggtttggtggaaagggctgaaattgtgaccgtgataaagtgtccaatggaagaggaagaaggtaaganaatgcgtgaaagaatgaatgagttaaaagaagctgctactaatggtctcaaacaagatgggg

SEQ ID NO: 242965 - DNA, 329 bp, Glycine max
ggcagcaacagcagcattcactgaaagcactcagtagggtttgcggtttcagagtttgtgacgcacgcatccatggccaccaccaccaacgccgccgcagccccgccgcgccagctctcccagaaggaagccgacatccagatgatgttagccgccgacgtccacctcggcaccaaaaactgcgacttccaaatggaacgttacatcttcaagcgccgcaacgacgggatttacattattaaccttgggaagacatgggagaagcttcagttagcagctagggttattgttgcaattgagaaccctcaggatatcattgttcaatccgc

SEQ ID NO: 242966 - DNA, 363 bp, Glycine max; identical to SEQ ID NO: 236029

SEQ ID NO: 242967 - DNA, 394 bp, Glycine max
  unsure (1)..(394): unsure at all n locations
ggttctagtgtgtgattgtttgttgttgtaactcgttcttcttcttttgttgttctgtgtttgtgtttgttttttctctcacctgaaaatgtcttgctgcggtggtaactgtggttgcggaagctcctgcaagtgcggcaacggctgcggaggctgcaagatgtacccagacttgagctacactgagtcaaccaccaccgagaccttggtcatgggagtggcacctgttaaggctcaatttgagggtgctgaaatgggtgtgcccgctgagaacgatggctgcaaatgtggaccaaactgctcctgcaacccctgcacttgcaagtgaggtgttgggagagcaagcttcaagcagagatagcccttaattaagaataatgatanactattaatg

SEQ ID NO: 242968 - DNA, 386 bp, Glycine max
ggcacaagtttgttgagatagctagaagcaataagatgaaaatgaaagtgcttgttttgcttgttgctacagttttggtagcatatgaatgccatggctcagactaccagaagttccctctccaaatgaaaactgggtttggtgggcaatacagcaatgaggtggcatgtgccagttggaggcttggcgtggaagcaaacaacgtagtcaagtggcaaactgttcctgcagcttgcggagagtacatagctgactacgttctaggagaccaatatagatcagattccaaaacagttaaccaacaagcttatttctatgctaaatccctcaaactcaccaacaaagatgtctttgtcttggacgttgacgacactactctctccaat

SEQ ID NO: 242969 - DNA, 319 bp, Glycine max
gaggcgaggtagccatagagtgatactgtacagagtgcgttgttgctccttcgccataactccctgccaatatgggtatctctagagattctatgcacaagaggcgtacgactggtggcaataacaaggcatgggcgaagaagagaaagtatgagcttggtcgccatcctgctaatactaagctgtcaatcaccagcacagtcaggatgatcagggttagaggtggaaatgtaaatttgaagtcactgacattggaaactggaaattactcctggggaagtgaaactgtaactctcaagactcgtatactaaatgtggt

SEQ ID NO: 242970 - DNA, 410 bp, Glycine max
  unsure (1)..(410): unsure at all n locations
ggccgtgaaaccctagaaagaaacgacgacgtaaatggaggtggagcccgtggagccgcagtcgctgaagaagctaagcttcaagtctctgaagcgcgctctcgatctcttctctcccatccacggacacctcgctactcccgatgccgaaagcaagaaaatacgcactagccacaaggtgagcgtggagtatggtggaatcaaaagcactgccaatcaacctcctcctcgtcaagttagttctgccacccaggatccagggtcctctaacactctggctcttccaggtcccggagattccaaggattctcagaaaggaggaccccaaaatgccttggttgttggtccaactatcncatccacaacaccgaatgatactggttttcagaacaaaagtacagcggttgttt

SEQ ID NO: 242971 - DNA, 407 bp, Glycine max
gaaaacaagtagggaataacgtgtaggaaactacattggttttacgacacgacttgaatcacaaactaattttatctgaaatatctctttcatagaacggagaaagacacgatgcaggaagcgacgaaggtgataataatcggtgccggaacttctggtatcgccaccgccggttgcttaacgaagcaatcaataccttacataatgctcgagagagaagactgtttcgcttcgctgtggcagaaatacacctacgatcgtctccaccttcatttgaggaagcaagtttgcgagttaccgcacttaccgtttcccaagtcttaccctcactacgtgcctcggaagcagttcatagactacttgggaaactacgttaaccactttgagattaagcctctgtaccagcg

SEQ ID NO: 242972 - DNA, 372 bp, Glycine max
ggcggcacaaagcattcactgtgtcggaaaaagaagaagagaaaaaagatgagcgacggaggaaaacgacaaggtggaagagcgttgccgccgccgccaagaggccctccgcctcctcccccctctcgccctcgcctcgaacccgtcgatcgcgaaaagacatgtccgttactgctgcgagtgttcactaagattgggagtcaccattccatggaagactttgccgtcagaggcaaagagcccaaagacgaggttcagatttacacctggaaggacgctactctccgagaactcaccgatcttgtcaaagaagttgctccggctgcaaagagaagaaacgccaaactctccttcgcctttgtattccccgac

SEQ ID NO: 242973 - DNA, 377 bp, Glycine max
caggggaagaactggtagaaaaccaacaacaaaagactctaagagtgagtcaccatccagcagcacctacatcccaagagatgagaactttggtcacttgaagtcatcagatttccttacatatggaataaaatccatagctcaaaccgttttacctacatttcaatctgcatttggtttaaatgccgagtttgataggtttgacgacgtgcgtggactctttgaaggtggaattcatctccctacagatgcactcagtaaaattagccccctaccagtgctcaaggaaatcttccgcactgatggtgaacaagtcctcaagtttccaccacctcatgtcatcaaagttagtaagtctgcatggatgactgatgaag

SEQ ID NO: 242974 - DNA, 402 bp, Glycine max
  unsure (1)..(402): unsure at all n locations
ggcaccgtcacttcctctaccgctttcttcctcctcattaaggcgcaactctctctctctctttctttttctttgttaggtttggtgacacttagttagaaagagcgtgcgaagagggtggggagaagatttagtgttgtggccatggcggagtctgagaagagtactgtgcttgttacgggagccggtggtcgcacaggacaaatagtttacaaaaaattaaaagagaggccaaaccaatatgtggctagaggtctggttagaacagatgaaagcaaacagaacattggtgctgcagatgacctctttgttggggatataagacatgctgaaagtattgttcctgcaattcaaagtatanatgctctcataatcctcacaagtgctgttccacagataaaa

SEQ ID NO: 242975 - DNA, 353 bp, Glycine max
ggaacttcaagggcaaaaaaagttgtgctgtgccgcctcttccgtaggcagcagcaatggcctcaaatcccaaaactttgacctttgaggaggtagctaagcacaacaacaaaaaggattgctggattattatcaatggaaaggtgtatgatatcacaccatttttggatgagcatccaggaggtgatgaagttttgctgacgtcaacagggaaggatgccaccattgattttgaagatgtgggccacagtgattctgctatagaaatgatggaaaaatacttcattgggaaggttgacacttccactctttcacccaaagttagccatagtctgccacaacctacacaaaca

SEQ ID NO: 242976 - DNA, 402 bp, Glycine max
accagggtaaagaacaaactagattagctcagaaagcagacactaaggccagccatgacatatttattgctagaaacaaaggtatagaaaatatgataactattgacttacatgggcagcacgtgaaacaagcaatgagaatgctgaaactacaccttctgtttggatcatatgttccctctgtccagactctaagggttattacaggatgtggatcacatggtgttggaaagtctaagctgaaacaatcagttataaaccttttagatagagaagcaattgaatggagggaagagaaccagggaactgtattgattaaactcagcggatggagagagtatagctttctagacaccagcagtgacagtgacagtaatgattaagcatgtctaagtgcatcag

SEQ ID NO: 242977 - DNA, 379 bp, Glycine max
gacagctattcctcttaagcttgctactgagtttccacactgcataccttaggtcttccgaattcgaagttaatttgcaagatggctaaggaaaaggctcagatcaacattgtggtggttggtcatgtggaccctgaggaggcaaccaccattaacgagctgaagaagcctgttgtggagaaagaagctccagggcatgccatatgagggcatgcacgtacggcctcggaggggaaccagaaaattatgttaacaaaataatctggaaccctaatgtatcagtgtcatcatcagtgtgtagtttaagctagctttgctatggttacgttctttgagatgagagtcttgatgaacagtaccattctgatgtattgctttc

SEQ ID NO: 242978 - DNA, 359 bp, Glycine max
caataagagccttttggctttgaaggaatgcattcgtgctttggacaatgatcagatccatattccttttcgtggaagcaagcttacagaagtgctccgtgactcctttgttggaaattcgaaaactgttatgatctcttgtatatccccaaatgctgggtcatgtgaacacacacttaataccttgagatatgcagaccgagttaaaagcctatccaagagtggaaatcctagaaaggaccaggccacaaatccagtaccaccagcaattaaagaggtttcatccacatcttcacttccagctagtgttggtgcagatgattttaatggtcaatgtcaagaggtaaaaacaatggaca

SEQ ID NO: 242979 - DNA, 406 bp, Glycine max
gacacagctattcctcttaagcttgctactgagtttccacactgcataccttaggtcttccgaattcgaagttaatttgcaagatggctaaggaaaaggctcagatcaacattgtggtggttggtcatgtggaccctgaggaggcaaccaccattaacgagctgaagaagcctgttgtggagaaagaagctccagggcatgccatatgagggcatgcacgtacggcctcggaggggaaccagaaaattatgttaacaaaataatctggaaccctaatgtatcagtgtcatcatcagtgtgtagtttaagctagctttgctatggttacgttctttgagatgagagtcttgatgaacagtaccattctgatgtattgctttccttgaaagttaatgcatgcttctta

SEQ ID NO: 242980 - DNA, 404 bp, Glycine max
  unsure (1)..(404): unsure at all n locations
ggtctccccagcattcatattaatatcatgccctccttctgcatccaaaccttcattttgtagtgggtgggggtttctcatttctctgccgttccatggatcgggaaggaggatccaacggcggatcttgctactactccgttctcgggattcgtanggacgcctccttctctgatattcgcactgcctaccgcaaactcgctatgaggtggcacccggacaagtgggctcagaatcctgcaaccgctggcgaagccaagcggcggtttcagcaaatccaagaagcctactcagttctctccgatcagtctaaaaggtcaatgtacgatgcggggctctacgatcctttggaggaagaggaccangacttttgtgacctcatgcaagagatgatctcaatgatg

SEQ ID NO: 242981 - DNA, 399 bp, Glycine max
  unsure (1)..(399): unsure at all n locations
gggcaagaagtcaccataactactgattatgacattaagggggatccggagatgatatccatgagttacaagaagctgcctgtccacttgaagcctggaaataccatactgtgctctgacgggacgattactctcactgtcttgtcttgtgaccctgatgctggtactgttagatgtcgttgtgaaaacactgcaacgttgggtgagagaaaaaatgttaaccttcctggtgttgtggtggatctacccacacttactgagaaggataatgaagacattcttggatggggtgtacccaacaagattgacatgattgctctttcatttgttcgtaaaggctcggatcntgttaatgtccgcaaggttctggggccacatgcaaagaatattcagttgatg

SEQ ID NO: 242982 - DNA, 323 bp, Glycine max
  unsure (1)..(323): unsure at all n locations
ggtgtgtttgtggcctctctctctctctcagccgtcgcagtctctgccaaacactcgctcatccaaaattatgatcatttctgtgccgtaaattcgccggtaacacgagatctcaacttctcgcgccgttttcttttccccctttaaaaaaagtacaagttcaggttaagttagggttccatggcttcggagacgaaggtcgtgaatctggctgaggaagccaagctcgccagagaaggtgtaacgactccctcatatgcttttaccaccatctgcaagtcnctcgtcgctggtggagtcgccggangagtatcacgaacagc

SEQ ID NO: 242983 - DNA, 404 bp, Glycine max
gagcgaaacagagagtgatttcagtgagtgatcggtgttcacttgatctcatcataatcgtcagcgtcaattgaagaagatgccgatcagaaacatcgccgtcggaaggcctgaagaggcgactcaccccgacacgttgaaggcggctttggctgagttcatctcaaccttcatcttcgtgttcgccggctcaggctccggcatcgcctacaacaagctcaccgacaacggcgctgccacccctgccggcctcatctccgcctccatcgcccatgcattcgccctcttcgtcgccgtctccgtcggcgccaacatctccggcggccacgtcaaccccgccgtcaccttcggcgccttcgtcggcggcaacatcaccttcctccgcggcatcgtctacgtcatcg

SEQ ID NO: 242984 - DNA, 355 bp, Glycine max
gacaccttcgaattttcttttccttcactttcccgagaaaaaaaaaacactctttcactttcttgactacggtctcacttcgacatggctcgtactaagcaaactgctcgcaagtccaccggcggcaaggcgccacgtaagcagttggcgaccaaggccgcccggaagtccgctcccgcgaccggaggagtgaagaagccccaccgcttcaggccgggaaccgtggcgctgagggaaatcagaaagtatcagaagagcaccgagcttctcatcaggaagcttccgtttcagagactcgtgagggaaatcgcgcaggacttcaagaccgatttgcgttttcagagtagcgccgttt

SEQ ID NO: 242985 - DNA, 363 bp, Glycine max
ggctgcagcaagggctcaacgcacgcaggaggaggagattgatcgagagaagagaagatgactacacgcttcaagaagaacaggaagaagagaggccacgtgagtgccggccatggccgcatcgggaagcaccggaagcaccctggaggacgcggtaatgccggaggcatgcaccaccaccggatcctctttgacaagtaccaccctgggttcttcggcaaggtcggaatgtgctattttcacaagctccgcaacaaattctactctccgatcctcaacatcgacaagctctggtccctggttccgcaagaagtgaaggacaaggcctccaaggagaacaaggcgccgctgatcgacgtcacg

SEQ ID NO: 242986 - DNA, 408 bp, Glycine max
gacagaaaagaaaaaggaaaccctagctggataggtcaaacatcatcatgtcggacgaagagcaccatttcgagtccaaggcagacgccggtgcctccaaaacctaccctcagcaagccggtaccattcgcaagaacggctacatcgtcatcaaaggacgcccctgcaaggttgtggaagtttcgacttccaaaactggaaagcacggtcacgccaagtgccactttgttggaattgatattttcactgccaagaaacttgaggatattgtgccctcttctcacaactgtgatgttcctcatgtgaatcgtactgattaccagctcattgatattgctgaggatggatttttgagtctgcttactgaaaatgggaacaccaaggatgacctcaagcttcccactgatg

SEQ ID NO: 242987 - DNA, 406 bp, Glycine max
  unsure (1)..(406): unsure at all n locations
gaggtttgtgatagtgattgcctccctctgctgccgtccctaatctgaaggctcccgccatctgcgatcggatttcatggctccaaagaaggacaaggctcccccaccttcatccaagcctgccaagtctggcggtggcaagcagaagaagaagaagtggagcaagggtaagcaaaaggaaaaggtgaataacatggtgctcttcgatcagggtacctatgacaagctcctctctgaggcacccaaatacaagctcattactccttccattctctctgaccgtttgaggattaatggatcacttgcaaggaaggctattanggaattgatggctagaggttcaatcangatggtgtctgcccatgcaagtcagcagatttacactagagctacaaacacctagatg

SEQ ID NO: 242988 - DNA, 404 bp, Glycine max
  unsure (1)..(404): unsure at all n locations
gacttgcggctgcagtagagaagcactcttcgttcttcgactgtctacgatctgctttctctgaattgtgaaaatgtcgctcggagaaactgcttgttcatacgcagctctcatccttcatgaagatggaattagtgtaactgctgacaagatcagcaccttgttgaaaactgcaaaggttccagtagactcttattggccaaccttgtttgctaaacttgctgagaagaaaaatcttggcgatttgatagcaaatgcggcaggcggtggtgcaccagttgctgttgcagctgccccagttgctgctgctgctggtggtgctgctgccgcagctccagctgctgaggagaanaagaaggaagaaccggaagaagagagtgatgatgatatgggattcggcttgt

SEQ ID NO: 242989 - DNA, 397 bp, Glycine max
ggtgtggaccgggttcgtcctcggaccggacccggacctccgtggtcaacgggctcaagaagaagctgaaggatgctatggagagttttaacgagattcgccagcttgtgtcctcggagtaccgcgagaccgtgcagcggcggtacttcaccgtcaccggcgagaatcccgatgacaagactctcgatctcttgatctccactggtgagagtgagactttccttcagaaggccattcaagagcaaggaaggggtagaattctggacaccatcacggagattcaagagaggcatgatgctgtcaaagagatagaaaagaatctcaaggagttgcaccaagtgttccttgacatgacagtgttggtgcaacatcaaggtgagcaattggatgatattga

SEQ ID NO: 242990 - DNA, 371 bp, Glycine max
  unsure (1)..(371): unsure at all n locations
aacccatgagaaagaaccggagcaagagtccaaagaggaagttgctgctgctgctgctgctccgccaccgccaccgccaccgccaccgcccgagattgtgctcaaagtgttcatgcattgcgagggttgcgcccgcaaggttcgtcgctccctcaaaggattcccaggtgtcgacgatgttgtcaccgattgcaaatctcacaaggtggtcgttaagggagagaaagcggatccgctcaaggttttggagagaatacagaggaagagtcacagacaggtcgagcttctttctccgatcccgaaacctcaagaggagaagaaggtccaagacgaagagaagcccaagcccanacccgaagagaagaaagaag

SEQ ID NO: 242991 - DNA, 391 bp, Glycine max
  unsure (1)..(391): unsure at all n locations
gcttcgtcccttgattgaagtataaattaggggtgttgaaattcaaagccatatccgtcattaaccaaatttgtgtttctccgattgcaagcaatggactccttcaattccttcttcgattcaacaaaccgatggaattacgatactctcaaaaacttccgtcaaatttctccggtcgttcagaatcacctcaagcaggtttattttactctgtgtttcgccgtggttgctgcggctgttggggcttaccttcatgtcctcttgaacattgggggttttcttactacagtggcatgcgtgggaagcagtgtntggttactctcgacacctccttttgaagagaggaaaagagtgactttgttgatggccgcatcactgtttcagggtgcct

SEQ ID NO: 242992 - DNA, 268 bp, Glycine max
ggagagagagagagagagagaggcacttggaatccaaaaatgagagaaatcatcagcattcacataggtcaggccgggatccaggttggcaattcctgctgggaactctactgcctggaacatggcatccagcccgatggcatgatgccaagtgactcctccttcggtgtagcccacgacgccttcaacaccttcttcagcgaaaccggatccggcaagcacgtccctcgcgccgtcttcgtcgatctcgagcccaccgtcaccgacg

SEQ ID NO: 242993 - DNA, 384 bp, Glycine max
  unsure (1)..(384): unsure at all n locations
aggggaagaagaaaaagaagtgaaatatagagagtgaagaagaagaaatagaaggttttggtgtttggtgtttgaatcgtgaaaatgttcagaaaccagtatgacacggacgtgacgacatggagcccggccgggaggctgttccangtggagtacgcgatggaggcggtgaagcaaggctcggctgcgatagggctccgatccaagacccacgtggtcctcgcatgcgtcaaacaaggctaactccgaactttcatcgcaccagaagaagatcttcaaggtcgacaaccacatcggcgtcgccatcgccgggctcaccgccgacggccgcgtcctctcncgctacatgcgatccgagtgcatcaactataactacacctacga

SEQ ID NO: 242994 - DNA, 376 bp, Glycine max
ggagtgaggagactgagaaaacagaagaaaacaaaatggaagacacagtttctgcgttgaggtctttgatggtttctcactctccgccgctggatgccttagtggtgccctctgaagattatcacctgagcgaatatgtgtctgcacgagacaagcgccgcgaattcgtttccggcttcactggaagtgccggcttggcacttattacacagaaagaagcactgctgtggacggatggactgtattttttgcaggctgagaaagaacttagtgctgggtggaagctaatgcgaattggtgaagatcctgctgtagatatctggatggccgataatttgccataagaagcatccgttgggggttgatccctggtgca

SEQ ID NO: 242995 - DNA, 308 bp, Glycine max
  unsure (1)..(308): unsure at all n locations
gatcgcacaacattattctttcgcaccttgcagaatcaattttctctctcaatcgtctttcatggctcgtaccaagcaaaccgctcgcaaatccaccggtgggaaagctcctangaagcaactcgccaccaaggctgcaagaaaatctgcacctaccaccggtggagtcaagaagcctcatcgctatcgtcctggaactgttgctcttcgtgagatccgaaaataccaaaagagcacagagcttctgatccgcaagctcccctttcagcgtcttgttcgtgaaatcgcgcaagacttcaagactgatt

SEQ ID NO: 242996 - DNA, 325 bp, Glycine max
gagagaagagaagagaggagagggggggagaaggggttgcagagagagagagagagagatgtcatcatcttcagacctggacaggcaaatagagcagttgaagaggtgtgagcctcttaaggagtctgaagtgaaggcgctttgcctcaaagccatggaaatccttgtcgaagagagcaacgttcaaagggtcgacgcccctgtcaccatatgtggtgatattcacggtcagttttatgacatgaaggagcttttcaaagtacgaggggattgccccaaaactaactatttgtttctgggggattttgttgataaaaggttttac

SEQ ID NO: 242997 - DNA, 401 bp, Glycine max
ggaaggcgtgctgattctgtgcttttcccccaaaagaagcaaaaccactgtcactcgaacaagaacaagaagatgaagattaacgtcaagactctcaaggggactcactttgtccttcaagtgaaccctcaagacacggttgctgttgtgaagaagaatatagagacagcgcaaggtgctgatgtttaccctgctgcgcaacaaatgcttattcatcaggggaaggtgcttaacgatgccacaacccttgaggaaaataaagttgttgagaataattttgtggtgatcatgttaagcaagaataaggtatcaagtggagcctcatctgcgccctcaaacctgggaaaccaacctcaaagttctttgcctcctacttcatcaacatctcaacctcctgcatc

SEQ ID NO: 242998 - DNA, 404 bp, Glycine max
  unsure (1)..(404): unsure at all n locations
ggatacaatacagagtgcgttgttgctccttcgccacaactctctgccaacatgggtatctccagagattctatgcacaagaggcgtgccactggtggcaagaagaaggcctggaggaaaaagagaaagtatgagcttggtcgccagcctgctaacactaagctgtcaagcaacaagacagtcaggaggatccgtgttagaggtggaaatgtgaaatggagggcattgagattggatactggaaattactcctggggaagtgaagctgtaactcgcaagactcgtgtactagatgtggtttacaatgcctcaaacaatgagcttgtgcgtactcagactctttgtcaaagtgctatcgttcaggttgatgctgctccattcanacagtggtatcttcagcacta

SEQ ID NO: 242999 - DNA, 377 bp, Glycine max
gaaggactaaaaaccaccaatcaaaaaccatgaatgctaagagagaaaagggagagtgctttgaaaatgggaaagtttagttcaagttacagtacttctgattttgttcactttggagttctacttccctttcttctgttatcacagttgttctttcaacttgcatggtgtggctccatagtaaagttccttcctggattagagggaccccttccttttgttcttgaaaccgggtatgtgggagtgggtgaatcagaggatgtgcaggcattctactacttcattgagtcagagaacaatccaaaggaggatcctctcatgctttggctcactggtggccctggttgctcagctttctctggccttgtcattgaaat

SEQ ID NO: 243000 - DNA, 318 bp, Glycine max
gggagtgagcaagagtgaagagcgaagagaatggctcccaagggtttaatctttttggctgtgttatgcttctcagcactgtcactgagtcgttgtcttgcggaggataatggacttgttatgaacttctacaaggaatcatgccctcaggctgaagacatcatcaaagaacaagtcaagcttctctacaagcgccacaagaacactgctttctcctggctcagaaacatcttccatgactgtgctgttcagagttgtgatgcttcactgttgctggactccacaagaaggagcttgtctgagaaggaaacagataga

SEQ ID NO: 243001 - DNA, 376 bp, Glycine max
  unsure (1)..(376): unsure at all n locations
ggcgcattgaacgaaaattagggtttgtagtgtagcaggaacaagcagcaatggcgccgaaggtaacacgcaaggttagcagaaaccccgaattgataaggggaattggaaagtactcgaggtcgcagatgtaccacaagaggggcatttgggctatcaaggccaaaaatggtggcgttttacctcgccacgaccctaaacccaaacctgaaacacccgctgaaaaaccacccaaattttaccctgctgatgatatcaagaagccccttgtcaacaagcacaaacccaaacccgctaagctcagggctagcattactccgggaacagtgttgattcttcttgctggtagatttacnggaaaganggtactcctttt

SEQ ID NO: 243002 - DNA, 328 bp, Glycine max
gaggcgcggcgggatcagcacaagattgcaaaatgaagttcaacattgcaaatcccaccactgggtgccagaagaagctggaaatcgatgacgacctgaagcttcgagcattttgggacaagaggatctcccaggaggttcttggtgatgctctgggtgaggagtttaaaggatatgttttcaaaatcaccggtgggtgtgacaaacaaggattccctatgaagcagggagtgctgacccctggtcgtgttcgacttttgctccatagaggaactccttgtttccgtggatatggaatgcgcaatggagagcgtagaacgaagtctgt

SEQ ID NO: 243003 - DNA, 359 bp, Glycine max; identical to SEQ ID NO: 238985

SEQ ID NO: 243004 - DNA, 405 bp, Glycine max
gcactcagtaaaattagccccctaccagtgctcaaggaaatcttccgcactgatggtgaacaagtcctcaagtttccaccacctcatgtcatcaaagttagtaagtctgcatggatgactgatgaagaatttggaagagagatgcttgctggtgttaatccatgcctaattgagtgccttcaagtgttccctccaaagagcaagctagatcccacagtgtatggtgatcaaactagtacaataaccaaagaacacttagagatcaaccttggtggactctctgtggaacaggcactgagtggtaacagattgttcatattagatcaccatgatgcattcatcgcatatctgaggaagatcaatgaccttgccactgcaaagtcctatgccacaagggacatcctt

SEQ ID NO: 243005 - DNA, 423 bp, Glycine max
cacgcgtcaagccaagcgtccgtgatcacttttggtttcaccggccccgtgttgtcctctttttgattcactttatccttttccaaaatgcttttgagatagcattttttttctggatatgggttacatatggatttgactcctgtataatgggacaagttcgatacattgttccaaggcttgttattggggtatttattcaggtactatgtagctacagcaccctgccactgtatgcaattgttacgcagatgggaactcactataagcgggcaatatttaatgatcatttgcgacaaaacattgttggttgggcacagaacgcgaagaagaggaaaggactaaaagctgatggcaatcctggccaacgaagttctcatgagagtgctaatacacgaatccagcttgggtcaattttcaaga

SEQ ID NO: 243006 - DNA, 385 bp, Glycine max
  unsure (1)..(385): unsure at all n locations
gctctgaaaactgaaaagtaaaggcgaaagactttaggtttggaattgggaattagggttgttcgcgtcacgaagatgatcgaggtggtgttgaacgatcgattggggaagaaggtgcgcgtgaagtgcaacgacgatgacaccatcggcgacctgaagaagctggtggcggctcagacgggcacaagagccgacaagatccgcatccagaagtggtacaccatatacaaggatcacatcactctcaaggattacgagatccacgacggcatgggtctcgaactctactacaactaaacacaaggtctatacccatctcaattcctctttttatagatactagctangggtttgttttttaaggttcccacattttgatttgttt

SEQ ID NO: 243007 - DNA, 402 bp, Glycine max
  unsure (1)..(402): unsure at all n locations
gatagtattatcattcattctcatctttctctcttctctctccacccaaaccctaactcccgaccctgttcccctctcgtatccgtcatgaaaggaggaaagtccaagaccgaatctaagagagccgataccaaacttgctgtgaataagaagggagccgccaccaaggctaggaaacccgccggcaaggggaaagcagcgaaagaccctaacaagccaaagaggcctccaagtgctttcatcgttttcatggatgagttcaggaacgtattcaacaaagaacatcctgaaaacaaagcagtgtctgctgtgggcaaagctgctggagcaaaatggaagaccatgtctgatgctgaaaaagcaccttatgtggcanagtctgagataaggatagtggagtac

SEQ ID NO: 243008 - DNA, 240 bp, Glycine max
gacagctcttggctttagcaaattccaattcccaattcccaattcgaaacccttattcctttcaaagaaccaaattgagtgatcgtgatggcaccaaaggcagagaagaagccagcggagaagaagcccgcggaggagaagaagtcgacggtgggagacaaggctccggcggagaagaagccaaaggccggaaagaagcttccgaaggagggaggcgccggcggagaagggaagaagaac

SEQ ID NO: 243009 - DNA, 388 bp, Glycine max
  unsure (1)..(388): unsure at all n locations
gataatcgtcagcgtcaattgaagaagatgccgatcagaaacatcgccgtctccgtcggcgccaacatctccggcggccacgtcaaccccgccgtcaccttcggcgccttcgtcggcggcaacatcaccttcctccgcggcatcgtctacgtcatcgcccagctcctcggctccatcgtcgcctccctcctcctggccttcgtcaccgcctccactgttccagcattcggactctccgctggagttggagttggcaacgccttggtgttggagatcgtgatgaccttcggtctggtgtacacggtctacgcaactgccattgaccccaagaagggtaatttgggaattattgctcccatcgccattggtttcattgtcngcgctaaca

SEQ ID NO: 243010 - DNA, 388 bp, Glycine max
ggaccataataacctcaacgccagcaccggcggctggcagttacccgaaactctccaggagtcaacgcagttgaccaatttctcttgtatgggctgcaacctcaccggcccaatacctcaatttctcggctccatgaactcactgtcgtttttgaagctctctaacaactacttaacgggtgacattccccggagtttaaacgactctgcgttgcaggttctgtggctgaacaaccagcagggagagcgtctcagtgggggaattgatgttgtggcttctatggtttctctcacgagtttgtggcttcacggaaacgctttcactgggacgatccccgagaacattggggctttgagctctttgaaggagctcaaccttaatgggaac

SEQ ID NO: 243011 - DNA, 437 bp, Glycine max
  unsure (1)..(437): unsure at all n locations
cgcgtcagggcccggtctcggtctcggcatggcggccgtggccccagaaaaacaatatgaacaccaccgattacgccttcggggactccaagaaatacgaggggtcctcggagttcgtgaagctgaggtaccacatgggaccggtcctcacgaccaacatcactgtccacaccatctggtacggcaagtgggagcggaaccagaagaagatcatccgcgagttcataaactcaatatccgcggcgaactcggcgcacccctccgtggccgggtggtggcgcaccgtacagctctacacgaaccaaaccggggccaacatttcaaaatcggttcgactcggcgaggagaagaacgaccggttctattcccacgggaaatccctgacncgcttatccatacagactgtgatanagagcgccatcacagccaaaacgagg

SEQ ID NO: 243012 - DNA, 353 bp, Glycine max
ggtgccacattgtcatattttattattacctaagcttttgtcacttagaacaaatttttggtcagttttgaaaaatgggttctggaaaccaggaggtatcaatgttggtggagaatggtggtggtgggaacaacaacgtgaagggattgctgagcaaggaaatgagacatggcagaacggcacataacatgtcatcttcttcgttgcgcaagaaatctgacctaactcttctgtctaaggttcattctgacaccctcaagaatttgttggtgaatttgcaagatgttattctgggaaccaagctctctagtattttccctgccattccccttgccattgttgctcaaagctat

SEQ ID NO: 243013 - DNA, 346 bp, Glycine max
ttcgtcaaggttgatcaggccacactctttgatctcattctggctgcaaattacttgaatatcaatagccttttggaccttacttgccagacagtagcagacatgatcaagggaaagactcctgaggaaattcgcaagacattcaacatcaagaatgacttcacccctgaggaagaggaggaagttcgtacggaaaaccaatgggcctttgaatgagtttataattctgctactttttaaatttcaatgaaaagatatgccctatagttgctagtttacttgtgttttatgtttcgcgtttctgacttgtcattttttattttaacttgtgggggcaatcttgaaa

SEQ ID NO: 243014 - DNA, 360 bp, Glycine max
  unsure (1)..(360): unsure at all n locations
ggaagttttgtggtgtggtttagtgtcaaatggcggcgagtagaagcacttttcctctgatgaaatacttgagagtgcgcgtcgacgctcttccccgcaacactcccttaagcctcgctcccaactttttgattcgccgcttctgtgaagaggttaggggttgttttctcgacaagtctgaggtcacagatcgcgtcatttcctgcgtcaaaaacttccagaaagttgatccttcaaaggttaaccctaatgctcacttccagaatgaccttggattggatagtttagattcggtagagattgtgatggctcttgaggaggagtttgggttcgagattccctgatatganggcagacaga

SEQ ID NO: 243015 - DNA, 248 bp, Glycine max
gggtgcgaaaccctgacctccgctttctcattcttctctctctcttgtccatcacttccgccaaggtcttcttcgaggagcgtttcgatgacggatggggaaatcgttgggttaaatcagattggaaaaaagatgagaacctggctggggagtggaaccacacctctggccaatggaatggagacgctaatgacaaaggtattcaaaccagtgaggattacagattctacgctatttcagctcagtaa

SEQ ID NO: 243016 - DNA, 251 bp, Glycine max
gaagcaaaaccctaatccctctttcttcctcttcctcagtagtgcgattttcgattctcttctctgcaactatgcctaaccctaaggtcttcttcgacatgaccatcggcggtcaacctgccggccgcatcgtgatggagctctacgccgacgtgactccgagcaccgccgagaacttccgcgcgctctgcaccggcgaggagggcgccgggcggagcggcaagcccctccactacaaaggctcgtccttc

SEQ ID NO: 243017 - DNA, 358 bp, Glycine max
gaccccttttattgaaatcctgagcttccattgtgctcactcatctcttacaacgaaaccctcttcatcttgttcaatctgtgacgagcatcatggcctctagagcagtgttattgttggctatgtgtgtgcttccggcgatggttgtggccattcgcccagcacagaaccctttttgcgataagggtcgtgtctactgtgacccttgccgtgctggttttgagacctcagctaccacctacattgctggtgctgagattatgttgcaatgcaagagcagggttagcaacgaggttgtgtacacgaagaacgggtacaccgactcaaccggagcatacacaatgtacgtggatgagga

SEQ ID NO: 243018 - DNA, 402 bp, Glycine max
gacagagggagtgaacaacatcaacatctccgattcttacaagaagaatcgcattcaggtctccaacaccaaaaagcccctcttcttctacgtcaatctcgccaagaggtatatgcaacagcataatgaagttgagctctcagcactaggagtggctattgctacggtggttactgttgctgaaatcttgaaaaacaatgagcttgctgttgaaaagaaaatcacaacatcaacagttgacatcaaagatgattctagaggcagacctgtccaaaaggccaagattgaaatattactggggaagactgaaaaatttgatgagttgatggctgctgctgctgctgctgctgcagaagatggtgaaaacggagatgttgaagagcacgccgcataagttcatcg

SEQ ID NO: 243019 - DNA, 382 bp, Glycine max
ggttctagtgtatgtgattgttgtgactcgttcttcttcgtcgttatcttcttcttttgttgtttgtgtgttgttttttctctcacctgaaaatgtcttgctgcggtggtaactgtggttgcggaagcgcctgcaagtgcggcaacggctgcggaggctgcaagatgtacccagacttgagctacaccgagtcaaccaccatcgagaccttggtcatgggagtggcatcagttaaggctcaattcgagagtgctgaaatgggtgttctcgctgagaacgatggctgcaaatgtggagctaactgcacctgcaatccctgcacttgcaagtgaggtgttggagagctaaagcttcatgcagaaatggccttataaataatgat

SEQ ID NO: 243020 - DNA, 389 bp, Glycine max
ggtatgtgattgttgtgacgcgttcatcttcgtcgctatcttcttcttttgttgtttgtgtgtttgttttttctctcacctgaaaatgtcttgctgcggtggtaactgtggttgcggaagcgcctgcaagtgcggcaacggctgcggaggctgcaagatgtacccagacttgagctacaccgagtcaaccaccaccgagaccttggtcatgggagtggcaccagttaaggctcaattcgagagtgctgaaatgggtgttcccgctgagaacgatggctgcaaatgtggagctaactgcacctgcaacccctgcacttgcaagtgacgtgttggagagctaaagcttcaagcagaaatgagccttagaaataatgataaatactatatgt

SEQ ID NO: 243021 - DNA, 249 bp, Glycine max
gtgagacaattagcttcttctcgctggactgctgctactcagtttgctatagttgctagcctttctgcattaagccatcaccttcaaaagccaagtagtgaagacaatagagatatccttgataaaagaaaggatgcaattagaacacttcaagaagttctagtggggaagcatgatgaagacatagaagagacactgtataaataccatattcctacagatagatggtggtctaacctctgtaaagtc

SEQ ID NO: 243022 - DNA, 276 bp, Glycine max
gggtatctccagagattctatgcacaagaggcgtgccactggtggcaagaagaaggcctggaggaaaaagagaaagtatgagcttggtcgccagcctgctaacactaagctgtcaagcaacgagacagtcaggaggatccgtgttagaggtggaaatgtgaaatggagggcattgagattggatactggaaattactcctggggaagtgaagctgtaactcgcaagactcgtgtactagatgtggtttacaatgcctcaaacaatgagcttgtgcg

SEQ ID NO: 243023 - DNA, 386 bp, Glycine max
gctcctttgtttgattaaggttttttcgcttcttctattcactctgttacggtgcaacctagcagcctccaaatccaatggcttcagagaagaaactttcgaacccaatgagggagataaaagtgcagaagctcgtcctcaatatctctgttggcgagagtggagatcgtctcaccagagccgccaaggtgttggaacaacttagtggccaaaccccagtgttttccaaagcaaggtacactgttcgttcctttgggattagaagaaatgagaagattgcatgctatgtcactgtcagaggtgacaaggcaatgcaacttttggagagtggtttgaacgtgaaggaatatgaacttctcagaaggaacttcagtgatactggttgc

SEQ ID NO: 243024 - DNA, 371 bp, Glycine max
ggttctagtgtatgtgattgttgtgactcgttcttcttcgtcgttatcttcttcttttgctgtttgtgtgtttgttttttctctcacctgaaaatgtcttgctgcggtggtaactgtggttgcggaagcgcctgcaagtgcggcaacggctgcggaggctgcaagatgtacccagacttgagctacaccgagtcaaccaccaccgagaccttggtcatgggagtggcaccagttaaggctcaattcgagagtgctgaaatgggtgttcccgctgagaacgatggctgcaaatgtggagctaactgcacctgcaacccctgcacttgcaagtgaggtgttggagagctaaagcttcaagcagaaatggccct

SEQ ID NO: 243025 - DNA, 347 bp, Glycine max
ggcacacaaccactctttcttcttcttctcttaaaagagcctttgctttttctttaggcctttccgaattaagtacttgtttcattttctctcgaagcaagaaaaatgttcatcgagagtttcaaggttgagagtcctaacgtgaagtacacagagactgagattcagtccgtgtacaactatgaaaccgctgaacttgttcacgagaacaagaatggcacttatcagtgggttgtcaagcccaaaactgtcaaatatgaatttaaaaccaacacccatgtccctaaactaggggtaatgcttgtggggtggggtggaaacaatggctcaaccctcaccggtggtgt

SEQ ID NO: 243026 - DNA, 387 bp, Glycine max
  unsure (1)..(387): unsure at all n locations
gatagcgcagtttcatttctttggattagaaatttttcccaaagctgatcgagaagccagccaggccagagttgaagaagaatgggaagggggaagatcgaaatcaaaaggattgagaacacaacaaatcggcaagtgaccttctgcaagagaagaaatgggcttctgaagaaagcttatgagctgtcagtgctgtgtgatgcagaagttgccctcatcgtcttctccagccgtggccgtctctatgagtattccaacaacaacataagatcaacaatagagaggtacaaaaaggcatgttctgatcactcaagcgcgagcactaccacagaaatcaatgctcagtattatcaacaagaatctgcaaagctgcgacagcanatacag

SEQ ID NO: 243027 - DNA, 389 bp, Glycine max
gggccttggtgtgaaccatagccatggctacttcatcaaccacattattgctatcatcactcatacctgcaagcatcccatcattcaactctggaaaccattcagtttttttgcttcaaaaccgttctttgaatcgacccaagaagagagtttccttcgttgttcaagcagccaagccccctattggtgtggaaattccaaaggtgcagcctcaatttaagcctccgtttcttgggttcactaagactgcagaagtatggaactctagagcttgcatgattggaatcattggagtttttattgtagagtttataataaacaagggcatacttcaagtgattggggttgatgttggcaaaggccttaatattcctctctgaacattattt

SEQ ID NO: 243028 - DNA, 250 bp, Glycine max
gacccagagaggaggaagctttgagagagagagagggaggagggagagtgttgacgctccatcaagatgggtatttctagggattccatgcacaagaggcgtgccactggtggtaagaagaaggcatggataaagaagagaaagtatgagcttgggcgtcaggctgcaaacaccaggttatcaagcaacagaactatccggaggattcgtgttcgaggtggcactgttaaatggagggcattgaggttgg

SEQ ID NO: 243029 - DNA, 247 bp, Glycine max
gacccttagcctctctgttcgcgtcagtcattgcttctcctccacacacgcacagagacacacactttggcagtcacattgagaatggggcgtgttcgcacgaagacggtgaagatctcctcgcggcaagtgagatacaggtactactcccgcatgacgctggagttccagacgaataagaaggttctggaagaggtggccagcattccctcctagaggctccgcaacaatatagcggggttctcca

SEQ ID NO: 243030 - DNA, 335 bp, Glycine max
gggatgaaggtgtgcttggcatgcaaattggtgaatttgctcgtctccggtgctctccggattatgcttatggtgctggtggctttcctgcttggggaatacggcccaactctgtcttggaatttgaaatcgaagtcttaagtgcgcaatggaaaccttggtagtctgtctctgtcctaaagaataaaattcttccattttcatggacttgtacaatggtatccccacattgtgacttgtgggtgatatctacagtggttgagttgtccaagtgaaatactaaataactttctgaatgatctcaaactcgctaatattatattgggtagcctaaa

SEQ ID NO: 243031 - DNA, 388 bp, Glycine max
gacattcaatcactcacacatgcccctatcttccttagctacctagattattcacttcaattcctcacaagcaacaccgtttcttgctccaatggcagctttgtatctcccaataagcatgttggcactcattgttgttgtttctcttggtttgtggagtggtgttcaaggtgcaccacaagtgccatgctacttcatttttggtgattctttggttgataatgggaacaacaaccagctccagtctttggctagggctgattacttgccttatgggattgacttccctggtggaccttctggaaggttttccaatgggaaaaccactgttgatgcaattgctgaacttttgggattcgatgattacatacctccatatgctgatgct

SEQ ID NO: 243032 - DNA, 400 bp, Glycine max
gaattaaccagcgcttcaaacatttctcattcacaactttacccactcttcattctagcaattcgaattcccaatccaaaaccctaataccttcaaagaacctagtagtgaatcagtgatggcacctaaggcagagaagaagccagcggagaagaagccggtggaggagaagaagtcgacggtgggagacaatgctccggcggagaagaagccgaaggccggaaagaagcttccgaaggagggaggagccggcggagaaggggggaagaagaaaaagaggaacaagaagagcgtggagacatacaagatatacatattcaaggttctgaagcaggtccaccctgacattggtatctcaagcaaggccatgggaatcatgaacagcttcatcaacgacatc

SEQ ID NO: 243033 - DNA, 401 bp, Glycine max
gaattaaccatcgcttcaaacatttctcattcacaactttacccactcttcattctagcaattcgaattcccaatccaaaaccctaataccttcaaagaacctagtagtgaatcagtgatggcacctaaggcagagaagaagccagcggagaagaagccggtggaggagaagaagtcgacggtgggagacaaggctccggcggagaagaagccgaaggccggaaagaagcttccgaaggagggaagagccggcggagaaagggggaagaagaaaaagaggaacaagaagagcgtggagacatacaagatatacatattcaaggttctgaagcacggtcaccctgacattggtatctcaagcaagggcatgggaatcatgaacagcttcatcaacgacatct

SEQ ID NO: 243034 - DNA, 386 bp, Glycine max
ggagtcgagaaacggcgcactccgtctgttcctcaccgtcaccggcgcgcgcaccctctgttccagcgactcctaattaagttgggaaataaaaaagacttcaaatttcccagatggctgcagcctttgcttccagatgctctcgtgtgggccgttctctgtctggtggattaagcaacagttcccctggtttatttacctcatcacatggcatgacatgcaacaatttgttttctcagcaacaacgtaccttcatacagatgaggactgttctcaaggttgtcgataactcaggtgctaaaaaggtgatgtgcatacaggcattgaaagggaagaaaggcgcaagattacgtgacacactaatagcatctgtgaaggaagcacat

SEQ ID NO: 243035 - DNA, 251 bp, Glycine max
ggttctagtgtgtgattgtttgttgttgtaactcgttcttcttcttttgttgttctgtgtttgtgtttgttttttctctcacctgaaaatgtcttgctgcggtggtaactgtggttgcggaagctcctgcaagtgcggcaacggctgcggaggctgcaagatgtacccagacttgagctacactgagtcaaccaccaccgagaccttggtcatgggagtggcacctgttaaggctcaatttgagggtgctc

SEQ ID NO: 243036 - DNA, 386 bp, Glycine max
ggtgtgtggattgacgtgtcgcacggtgggtgtagcagtagattccgcctccaagaaaagaaagagcaatgcaagctgcatcttcaggcatcggatacggtctaaaatatcaggctagatgcatatccgatgtgaaggcagacacagatcacactagcttcctcgctggcactctcagcctcaaagaagaaaatgaggtacatctgattcggctttcgtcgagtggaaccgaactcttctgcgagggattgttctctcatcccaacgagatctgggaccttgtttcttgcccctttgatcaacggatcttttcaaccgtctactctaacggtgaaacgtatggggcagcaatatggcagatccccgagctatatggccagttaaat

SEQ ID NO: 243037 - DNA, 354 bp, Glycine max
ggaaacagagagtgatttcagtgagtgatcggtgttcacttgatctcatcataatcgtcagcgtcaattgaagaagatgccgatcagaaacatcgccgtcggaaggcctgaagaggcgactcaccccgacacgttgaaggcggctttggctgagttcatctcaaccttcatcttcgtgttcgccggcccaggctccggcatcgcctacaacaagctcaccgacaacggcgctgccacccctgccggcctcatctccgcctccatcgcccatgcattcgccctcttcgtcgccgtctccgtcggcgccaacatctccggcggccacgtcaaccccgccgtcaccttcggcgcctt

SEQ ID NO: 243038 - DNA, 344 bp, Glycine max
gattgtatatcatttacaatttcaatctctctctctctctgtctctctctctctagacttacattttgtgaatggctgaagtggaagagggacacgtcatcggcgtccacatcgttgatgactggaagttgcaactccagaatgcaaaagactctcaaaaaactgattgtggtggattttactgcttcctggtgtggtccatgccgttttatggcccggttcttgcagagattgcaaagaaaactcctgaattgatcctcctcaaagtggatgtggatgaagtgaggcctgttgctgacgaatattccattgaagctatgccaaacttcctcttcgtgaaagat

SEQ ID NO: 243039 - DNA, 401 bp, Glycine max
ggttgaacggcgaggtagaacgacgacccccttctgcgttttgaccttcaatctcaatcatggccaaagctgaaggtggcaaggaaccaataaatgaacaagcagtagcaaatatgtatgctgcaatgaggtctgagctcaaccaaatttactccaaaataactgaactggagatggaagttagtgagcacacattggttaccaatgccattcaaccacttgaccaatctagacgatgctatcgtatgattggaggggtgcttgtggagagaaccatcaaagaggtcttgcctgctgtgcagcgaaataaagaaggactcgaagaggttgtggcaaggcttaacgaggcgttggaaaagaagaaaaaggaaatttctgagtttgaggctaaatataaaatc

SEQ ID NO: 243040 - DNA, 339 bp, Glycine max
ggacatatttggatgtaatttctcagattcgtcttcagtttcagcctttctctcccactcactcactcacaggtaagcaatggcgggaaaaggagggaaggggcttcttgcagcgaaaaccaccgcggcgaataaggacaaagacaaggacaagaagagacctatttctcgctcttcccgtgctggaatccagtttcctgtgggacgtatccataggcagctgaaacaaagggtccaagccaatggacgtgttggggcaacagctgcagtgtacttagcctcaattctagagtatctgactgctgaagttcttgaactagctgggaatgcaagcaagga

SEQ ID NO: 243041 - DNA, 400 bp, Glycine max
ggagcaccaactacctacccctttctttgattttgtgtcccaccctgcatcttagcagagccactctgatcactaaaatgccattgttaacttcctctttgttcaacatggttcctctcttctctcttcttttgttctcactcatgattcgttatagtacttctcaggatccaccttcacctggttactaccctagttccaaaattagtcccgttagctttggtgagggatttagaaacctttggggacctcagcatcagaaactagaccaagactcattaacaatctggcttgactcttactcagggagtggattcaagtcacttcactcttatcggtctggatactttggtgctgcgattaagcttcaaccaagttacactgcaggagtcataacatc

SEQ ID NO: 243042 - DNA, 396 bp, Glycine max
  unsure (1)..(396): unsure at all n locations
gacaacactcatagtagagtaaccaaaaggagagtgcaataactcgttgtacattcctagtgtgtgggagagacatggctaagatgtgtgttttggtgctggttcttgctctggctgtggccacaagtgccagaaacgttcccaaccccaaggatgctggtcttaaggaccagaagaacttcatcagctatggtggagttggtggttattccgggattgggaacaatggactgccttttggaggagctggtgccggaataggtggtggttttggcggaggtggtggacttggtggtggcctcggcggtcctaccggtgggatcgganggtttggcggtaccggtagcggtgtcngtggcggtattggtggtggcgttgggactggcgttggtggtg

SEQ ID NO: 243043 - DNA, 236 bp, Glycine max
gggaggagtgaataagagatatcaatatattatgataatggagggatacaataagaaggttatgattgtggggatggtgttgggcatggccatgattgggatggccaatggccaatactcgttttgtcgcatgcccagcgatgggttggcggcatgcaagccgagtgtgagtggggactatcctgctgatccctccactgcttgttgctcagccattgccaaggctgatcttaaat

SEQ ID NO: 243044 - DNA, 272 bp, Glycine max
gaatctagtggaagagtgaataagagatatcaatatactatgataatggagggatacaataagaaggttatgattgtggggatggtgttgggcatggccatgattgggatggccaatggccaatactcgttttgtcgcatgcccagcgatgggttggcggcatgcaagccgactgtgagtggggactatcctgctgacccctccactgcttgttgctcagccattgccaaggctgatcttaaatgcttctgccgcttcaaggattcgggccc

SEQ ID NO: 243045 - DNA, 274 bp, Glycine max
agggttctagtgtatgtgattgttgtgactcgttcttcttcgtcgttatcttcttcttttgttgtttgtgtgtttgttttttctctcacctgaaaatgtcttgctgcggtggtaactgtggttgcggaagcgcctgcaagtgcggcaacggctgcggaggctgcaagatgtacccagacttgagctacaccgagtcaaccaccaccgagaccttggtcatgggagtggcaccagttaaggctcaattcgagagtgctgaaatgggtgttcccgc

SEQ ID NO: 243046 - DNA, 265 bp, Glycine max
ggaagccagcgagtgagcgagcgagcgaggtagggttttcgttgttcccccgtctttgaattcagttcgcgacgatggggtccatccccgatccatgcgagttgagcgagttgactcagccgagcttcgacgagttccagcgccaaacttccctcatgaccagctgcaccctcctctggaaggagctctccgaccacttctcctccctcgagcaagacctcaaccacaaatccgaagccctcaaacgcaagattcgcaccctcga

SEQ ID NO: 243047 - DNA, 358 bp, Glycine max
ggtgaaaataaagttgctattgttggagttttcccgaaattttctggagaggagtttgacaacttttctgccttagcagagaagttgcgttctgattatgactttggtcacactctgaatgccaaactccttccaagaggagagtcatcagtttctgggcccgtagttaggctgttcaagccattcgatgaactttttgttgacttccaggatttcaatgtggaagctctagagaagtttgttgaggagtctagtacccctgttgttactgtctttaacaatgaaccgagcaatcaccctttcgttgtcaaattcttcaacagtcccaacgcaaaggcaatgttgttcatcaacttca

SEQ ID NO: 243048 - DNA, 363 bp, Glycine max
gaatctagtggaagagtgaataagagatatcaatatactatgataatggagggatacaataagaaggttatgattgtggggatggtgttgggcatggccatgattgggatggccaatggccaatactcgttttgtcgcatgcccagcgatgggttggcggcatgcaagccgagtgtgactggggactatcctgctgatccctccactgcttgttgctcagctattgctaacgctgatcttaaatgcttctgccgcttcaatgattctggccttctctctatgtatggtgttgatcccaacaagtgcatggatctccctgttaagtgcaacgttgtcgactctttccactgctaaattcattag

SEQ ID NO: 243049 - DNA, 364 bp, Glycine max
  unsure (1)..(364): unsure at all n locations
ggttctagtgtgtgattgtttgttgttgtaactcgttcttcttcttttgttgttctgtgtttgtgtttgttttttctctcacctgaaaatgtcttgctgcggtggtaactgtggttgcggaagctcctgcaagtgcggcaacggctgcggaggctgcaagatgtacccagacttgagctacactgagtcaaccaccaccgagaccttggtcatgggagtggcacctgttaaggctcaatttgagggtgctgaaatgggtgtgcccgctgagaacgatggctgcaaatgtggaccaaactgctcctgcaacccctgcacttgcaagtgangtgttgggagagcaagcttcaagcagagatagccc

SEQ ID NO: 243050 - DNA, 260 bp, Glycine max
ggcagcatcgtagagaaataagggaaaaatggtgtcgctgaaactgcagaagcgcctctccgcaagcgtgctcaagtgcggcagacgaaaggtttggcttgaccccaatgaagtcaacgaaatctccatggccaattctcggcaaaacatcaggaagttggttaaggatgggtttatcatcaggaagccaaccaagattcactcccgctcacgtgctcgtaggatgaacgaggcaaagaggaatggccgccactccggtt

SEQ ID NO: 243051 - DNA, 261 bp, Glycine max
ggttctagtgtgtgattgtttgttgttgtaactcgttcttcttcttttgttgttctgtgtttgtgtttgttttttctctcacctgaaaatgtcttgctgcggtggtaactgtggttgcggaagctcctgcaagtgcggcaacggctgcggaggctgcaagatgtacccagacttgagctacactgagtcaaccaccaccgagaccttggtcatgggagtggcacctgttaaggctcaatttgagggtgctgaaatgggtgt

SEQ ID NO: 243052 - DNA, 273 bp, Glycine max
ggtgctaatcttatcttatccctctaatcactctagctgttgcaaatttctactatttttcaatggcttctgcagatgttgagttccgttgctttgttggtgggcttgcttgggtcaccggcaacgatgccctcgagaaagccttttcaatctacggcgacatcgttgaatcgaaggttatcaacgaccgtgagactggaaggtccagaggattcggatttgtgaccttcgcctcagagcagtcaatgaaagatgcgatcgcaggaatgaacg

SEQ ID NO: 243053 - DNA, 351 bp, Glycine max
ctgaaggaggtcagtgaggaggttgccaagtacaaggttggagctcctgctcgtgttggtttggttgccccaattgatgttgttgttcctcctggcaacacagggctcgattcctcccagacctctttcttccaggtgctcaacattcctaccaagattaacaagggtactgttgaaatcattacccctgtggagctcattaagaatggagacaaggttggatcttctgaagctgcattgcttgccaagctagggataatgcccttctcgtatgggcttgtggttcattctgtttatgataatggttcagtgttcagtcctgaggttcttgatcttactgaggatgacctt

SEQ ID NO: 243054 - DNA, 326 bp, Glycine max
caacgggaacgagagactatactacggcacaatctagtggcaaaaaattggttgagtggctggttgcaacattattgttcattgccttgttgagtggtactgcacatgctgttgcaatatgtcacattgactcaagtcaactgaacttgtgtcgtgctgcacttactggtcaaaaccctccaccacctgatgagaaatgctgtgcacttattcgccaggccaatttgcgttacctctgcagtttacagtctatcctaccttcacttggaaataaccccaaaaatgctttggccttgcctgttaaatgtggtctacaattgcctcct

SEQ ID NO: 243055 - DNA, 268 bp, Glycine max
gaagaaacaaccactactgatgatagttcgttcactgtgactggcttgttggagcagataaatgcaaccagagatttatctgattacttgtggtactccacagatgttgtgatcaattccaatgaaggatttttgaggaatggaaagaatcctgttcttacagttttgtctgctgggcatgctttgcatgtttttatcaacaatcagctgtcaggaactgcatatggaagcttagaggcccccaaactaacctttagcgaaagtgtga

SEQ ID NO: 243056 - DNA, 277 bp, Glycine max
ggcagtttcaaattttctgttccttcactttcccgagaaaaagataagacgtttcactttcttcactacgttctcacttcgatatggctcgtacgaagcaagccgctcgcaagtccaccggtggcaaggcgccacgtgagcagctcgccaccaagggcgctcggaagtccgctccggcgaccggatgagtgaagaagccccaccgcttcaggccgggaaccgtggcgctgacggaaatcagaaagtaccagaagagcaccgagcttctcatcaggaa

SEQ ID NO: 243057 - DNA, 277 bp, Glycine max
gacaatataacgctttataatgcgtaatctctcctttctcccttaacaccgttacactatcgttcttcgctgcttcgctgaatctcgctacgccgaaagcacacatctgacaccataaccgcctgagaaccggttgaatcgcaagggcgctggtgctggcacgaagcaatcgacgaaagctgctaaagatactaacaagccacagagacctccaagcgctattcgtcgttttcatggtacgacttcagatagcagtttaagaacgagcatcctaaca

SEQ ID NO: 243058 - DNA, 264 bp, Glycine max
cggggttctagtgtgtgattgtctgttgttgtaactcgttcttcttcttttgttgttctgtgtttgtgtttgttttgtctctcacctgaaaatgtcttgctgcggtggtaactgtggttgctgaagctcctggaagtgcggcaacggctgcagaagctgcaagatgtagccagagttgagctacactgagtcaaccatcaccgagaccttggtcatgggagtggcacctgttaaggctcaatttgagggtgctgaaatgggtgt

SEQ ID NO: 243059 - DNA, 274 bp, Glycine max
ggagtgagcaaaagtgaagagcgaagagaatggctcccaagggtttaatctttttggctgtgttatgcttctcagcactgtcactgagtcgttgtcttgcggaggataatggacttgttatgaacttctacaaggaatcatgccctcaggctgaagacatcatcaaagaacaagtcaagcttctctacaagcgccacaagaacactgctttctcctggctcagaaacatcttccatgactgtgctgttcagagttgtgatgcttcactgttgct

SEQ ID NO: 243060 - DNA, 269 bp, Glycine max
ggagatggaacaaataaagcacagaacagttgacgtgaatggcataaaactgcatgttgcagagaaacgacagggtccagtcgtgttgttcctccacggcttccctgagctctggtactcatggcgccatcagattctctctctcagctcgctcagcaactgcgccgtcactcccgatctccgtggctacggtgacaccgaagcaccaccttcaatcagcagctacaactgcttccacatagtgcgtgatctcgttgcgcttattcact

SEQ ID NO: 243061 - DNA, 326 bp, Glycine max
ggagaaaaacgagccaattcatcattttctctcttctctgcttcttcttgttcaaatcttaggagctgaggagaatcaatcgagagaaatatgtctggtatcgctcgtggacgccttgctgaggaacgaaagtcatggcgcaaaaaccatccacacggtttcgttgccaagcccgagactctacctgatggcaccgtaaatttgatggtctggcattgcactattcctggcaagaccgggactgattgggagggtggatatttcccactgacaatgcacttcagtgaagattaccctagcatgcctcccaagtgcaaatttcctca

SEQ ID NO: 243062 - DNA, 258 bp, Glycine max
gattgcagcatggtgtcttcctcccaacacattctggtcaccggtggtgccggtttcattggcacccacaccgtcgttcagcttctcaaagctggcttcagcgtttcaataatcgacaatttcgataactccgtcatggaagcagtggaccgcgtccgccaagtggttggccctctgctttctcagaacctccaattcacccagggcgatctccggaatagggatgacttggagaaactcttctccaaaacaacattt

SEQ ID NO: 243063 - DNA, 262 bp, Glycine max
gattgcagcatggtgtcttcctcccaacacattctggtcaccggtggtgccggtttcattggcacccacaccgtcgttcagcttctcaaagctggcttcagcgtttcaataatcgacaatttcgataactccgtcatggaagcagtggaccgcgtccgccaagtggttggccctctgctttctcagaacctccaattcacccagggcgatctccggaatagggatgacttggagaaactcttctccaaaacaacatttgatg

SEQ ID NO: 243064 - DNA, 270 bp, Glycine max
gaagagtgaagagcgaagagaatggctcccaagggtttaatctttttggctgtgttatgcttctcagcactgtcactgagtcgttgtcttgcggaggataatggacttgttatgaacttctacaaggagtcatgccctcaggctgaagacatcatcaaagaacaagtcaagcttctctacaagcgccacaagaacactgctttctcctggctcagaaacatcttccatgactgtgctgttcagagttgtgatgcttcactgttgctggac

SEQ ID NO: 243065 - DNA, 263 bp, Glycine max
ggcagttcaattccaatatattccattctctctgtgtatttccctacctcacccttcaagatgcagatcttcgtcaagaccctcaccggcaagaccatcacccttgaggtggaaagctctgacaccatcgacaacgtcaaggccaagatccaggacaaggaatgaatccccccggactagcaacgtctcattttcgccggaaagcaacttgaggacggccgtacccttgctgactacaacattcagaaggagagtactcttca

SEQ ID NO: 243066 - DNA, 270 bp, Glycine max
gaagagtgaagagggaatagaatggctcccaagggtttaatctttttggctgtgttaagcttctcagcactgtcactgattcgttgtcttgctgacgataatggacttgttatgaacttcgtacaaggaatcatgccctcaggctgaatacatcatcaaataataagtcaagcttctctacaaacgccacaagaacactgcattctcctggctcagaaacatcttccatgactgtgctgttcagagttgtgatgcttcactgttgctgga

SEQ ID NO: 243067 - DNA, 355 bp, Glycine max
ggagtgcagtgatagagataagaaaatgtggcttgtgcagctctcaaccccatttctgaacggacatggtcattccaccacccttctctccaagcacagttcggcggtgactcagacccactgggccccaccgagtttcctgcctcaaatcgatgcgatgaagacaatgcaggggagagtggtgtgcttcaccaacgacaagacggtggcagtggaggtggtgcggctggcccctcacccaaagtacaagaggcgcgtgaggaagaagaagaagtaccaggcccacgaccccgataaccaattcaaagtcagcgacatcgtccagctccagaagaacagcccatcagcaagacaa

SEQ ID NO: 243068 - DNA, 259 bp, Glycine max
gacaaaacaagtgtttcgaatagattatcctaagtctttgggaatagtgctgcaatggcttcaagtcaggaggaggtgacccttttgggagctactggaagcccatttgtgtgcagggttcatattgccctcaagttgaagggagttcaatacaaatatgtcgaagaaaatttgaggaacaagagtgaactgcttcccaaatccaacccagttcacaagaaggttccagtgtttattcacgatgagaagcccatagcag

SEQ ID NO: 243069 - DNA, 271 bp, Glycine max
ggaaagcatattcttcaatttaaacacagaaacaaaatcaccaccttcaaagtcttctctctcgagaatcagcgaataaaactagggtttccgatcgtcgtcgaggagaatgccgaagaacaagggaaagggaggaacgaaccggaagcgcgggaagaacgaggcggacgacgagaagcgggagcttgtgttcaaggaggacggccaggagtacgcgcaggtgcgccggatgctggggaacggccgctgcgacgcgatgtgcatcgacggc

SEQ ID NO: 243070 - DNA, 359 bp, Glycine max
gaccgtcacaccccaatcgtagccgtcgcactttgcgttttctgcgtcatctccgattccccgacaatggccacccaaatgagcaagaagagaaagttcgtagctgatggagtgttcttcgctgaactgaacgaggttctgacaagggagttagccgaggacggatactccggcgtggaagttagggttacgccgatgcgcaccgaaatcatcagcagagccaccagaacccaagccgttctcggtgagaagggaaggagaatcagggaacttacctcggtggttcagaagaggttcaagtttcccgagaacagtgttgaactttaagctgaaaaggtcaacaatacgggtctttgcgc

SEQ ID NO: 243071 - DNA, 356 bp, Glycine max
gaggtgaaggtggggtggaagaataaggataagttattgaaagaaaggtgaaagaatccattggtatgtgcgatcgatcatctcctctgcgaaatacaatggagctgacagcccagcagctgagccaatacaacggcactgacccatcgaagccgatctacgtggcggtgaaaggccgagtctacgacgttacctccggaaaatccttctacggccccggcggcccctacgccatgttcgccggcaaagacgccggcagggccctcgccaagatgagcaagaacgacgatgacatctccccctccctcgacggcctctccgacaaggacatcggcgttctcaacgactgggagaac

SEQ ID NO: 243072 - DNA, 320 bp, Glycine max
ggagtggaagagtgaataagagatatcaatatattatgataatggagggatacaataagaaggttatgattgtggggatggtgttgggcatggccatgattgggatggccaatggccaatactcgttttgtcgcatgcccagcgatgggttggcggcatgcaagccgagtgtgagtggggactatcctgctgatccctccactgcttgttgctcagccattgccaaggctgatcttaaatgcttctgccgcttcaaggattcgggccttctctctatgtatggtgttgatcccaacaagtgcatggaactccctgttaag

SEQ ID NO: 243073 - DNA, 257 bp, Glycine max
gaatgacaaaatgtcaaagattggaaaagatgtcacggtccgcttctcggtgataggtacaaagtggatggaagcagaaagggaatttcaggcattggtcagtttggaaggggattatctgggaccaatttcaactccggatatttagctacattttctttgttgccttgtcttctgaaatggatgaaatattttccatatgaagtcagttcttgtaattaatgataactctgtctgccttccttttagaactgtga

SEQ ID NO: 243074 - DNA, 273 bp, Glycine max
ggcactttcagattttcttttccttcactttcccgagaaaaggataacacttttcactttcttcactacgttctcacttcgatatggctcgtacgaagcaaaccgctcgcaagtccaccggtggcaaagcgctacgtatgcagctcgccaccaaggccgctcggaagtccgctccggcgaccggatgagtgaagaagccccaccgcttcatgccgggaaccgtggcgctgagggaaatcagaaagtaccagaagagcaccgagcttctcatca

SEQ ID NO: 243075 - DNA, 269 bp, Glycine max
cggtctggatactttggtgctgcgattaagcttcaaccaggttacactgcaggagtcataacatctttatacctttcaaacaaccaagactacccaggacaccatgatgaaatagacattgagttccttggtaccacgccggataagccatatgtcttgcagacaaacgtatacgtcagaggaagtggagatgggaatattatagggagagagatgaggattcacctttggttcgacccaacacaagattttcacaactatgctattct

SEQ ID NO: 243076 - DNA, 271 bp, Glycine max
gctctcgtctcgtggaagtgtaagcaagcaaaaccctagcggcgcctgctttctttgttcgtgttttgcatcaggatggagtctcaggtgaagcacgcacttgttgtcaaagttatgggtcgtactggatccagaggacaagtgacccaggctagagtgaagtttttggatgatcagaaccgtcacatcatgaggaatgtgaaaggacctgtgagagaaggagacattctcaccctactcgagtctgaaagggaagcaagaagattgcgct

SEQ ID NO: 243077 - DNA, 361 bp, Glycine max
gaaaaccagggaagattctatttcatttccttgccaacttagagagagagagagagagagatggcaattgggttcatggaggtgcagcttgtgaaagcaaagggtcttcaggaaacagatatctttgctcatatggacccgtatgtacggttacaatacaaaggtcaagagcgcaagagcagtgtaattcatgagggcggcagaaatcccatatggaatgagaaatttgtattcagagtggaataccctggatcaggtgatcaatacaagctcaaccttagaatcatggacaaggatgtattttctgcagatgactttgtcggccaggctacaatctatgtgaaggatttattggcggaag

SEQ ID NO: 243078 - DNA, 361 bp, Glycine max
gagggttttgcgctgttgttgctgctcatcctccgtaacctccgagctctgcaccgaagaacgaagccatggggaagacacatggaatgggatctgctcgcaagctcaagtcccaccgcaggaggcaaaggtgggctgacaagtcatacaagaaatcacatcttggaaatgaatggaagaaaccttttgctggttcatcccatgccaagggaattgtccttgaaaagataggtattgaggctaagcagcccaactctgccattcgtaagtgtgccagggttcaacttatcaagaatgggaagaagattgccgcttttgtccctaatgacggttgcttgaactacattgaagagaatgacga

SEQ ID NO: 243079 - DNA, 247 bp, Glycine max
ggatcctttgtattctattcttcaagattcaggtactgcgtttcggaagcagacacagatggctcgtacgaagcaaaccgctcgtaagtccacaggaggaaaggctcctaagaagcagcttgcaaccaaggctgcacgtaagtctgcaccaactactggtggtgtgaagaagccccaccgttatcgtcctggtaccgttgctcttcgtgagattaggaaataccagaagagtaccgagcttttgatc

SEQ ID NO: 243080 - DNA, 261 bp, Glycine max
agcgaaacagagagtgatttcagtgagtgatcggtgttcacttgatctcatcataatcgtcagcgtcaattgaagaagatgccgatcagaaacatcgccgtcggaaggcctgaagaggcgactcaccccgacacgttgaaggcggctttggctgagttcatctcaaccttcatcttcgtgttcgccggctcaggctccggcatcgcctacaacaagctcaccgacaacggcgctgccacccctgccggcctcatctccgcc

SEQ ID NO: 243081 - DNA, 269 bp, Glycine max
gacggacgagggtttcgtttcgggtttgacgttgttcacaatcactttctgcgcttcactcagtcccttcgtgcggttttctttctttgtcgaacacgtgcgaaaatgcgtgagattcttcacatacatggagggcaatgcggaaaccagatcggagcgaagttctgggaagtggtgtgcgcagagcacgggatcgattccacggggaggtatcagggggacaacgagttgcaactcgagcgagtcaacgtctattacaatgaagcgag

SEQ ID NO: 243082 - DNA, 234 bp, Glycine max
ggagcaagagtgaagagcgaagagaatggctcccaagggtttaatctttttggctgtgttatgcttctcagcactgtcactgagtcgttgtcttgcagaggataatggacttgttatgaacttctacaacgaatcatgccctcaggctgaagacatcatcaaagaacaagtcaagcttctctacaagcgccacaagaacactgctttctcctggctcagatacatcttccatga

SEQ ID NO: 243083 - DNA, 357 bp, Glycine max
gagaatgatattgatgttggggaggaggttgtgcttatgactaccaagggtgaggctattgctcttgggattgctgagatgactactgctgttatggccacttgtgatcatggggttgtggccaagatcaagagggtggtcatggatagggatacttatcccaggaagtggggcttgggcccgagggcgtccatgaagaagaggcttattagtgaagggaagctcgataagcatgggaggcccaatgagaagaccccccaggagtggcttaggaatttggttttgccaactggtggggatagtgtgattgctggcttggctgctgcgccggaaactgaggatgacaagattcagaag

SEQ ID NO: 243084 - DNA, 302 bp, Glycine max
agggatacctgagagagaaaggaaaggttaactaataagcaatacttcaatggccacccttgttgttcataatcaaacttcttctgctcaagatgctgaggctctccaacaggctttcaaaggatggggggctgatgacaaggccattatagcaatactgggtcacagacatgttcatcagaggcaagaaatcagaaaagcttatgaggagatttaccaagatgatctcatcaaacgccttgagtccgagatctccggtgactttgagagagctatgtaccggtggatgttgcagcctgcgg

SEQ ID NO: 243085 - DNA, 324 bp, Glycine max
gacaacacaatctcacagcgcaggaattgaaggaaagatagagaaatgtggaagagagccttggtcggcgccgtgggtgctctccggcggccatattcgtcgggaggtggcggcatctcctccgccgtgaactcaatgctcctccgctctctaaaggatcactatcaagaagtcgccaaaatgaacatgccccctaaagtgagtcctccttcgccgttcacgatcgtgaagggagctctggactcgcacggtccggttctgaagcgcagctacggcgacgaagaggtgagcatctatgtcatgcggttgttgaccccgaggacg

SEQ ID NO: 243086 - DNA, 336 bp, Glycine max
  unsure (1)..(336): unsure at all n locations
gacgtttgttacaaaatcctttcacataccataccatactataaatacaattcaactccccgtccgcttttccaattttcccctctcccctctgctctccttcctatttctcaatcgagcaacacagcacaatccttaaactctctctctctctctcgctctcttcaatttcgttgatggcgtcacaagcaagcctcctccttcagaagcagctcaaagatctttgcaagaaccccgtcgatggcttttccgccggtttggtcgacgaaaccaacatttttgaatggagtgtgactataattggacctctcgatactctttaagangggggaattt

SEQ ID NO: 243087 - DNA, 270 bp, Glycine max
ggttctagtgtgttattgtttgttgttgtaactcgttcttcttcttttgttgttctgtgtttgtgtttgttttttctctcacctgaaaatgtcttgctgcggtggtaactgtggttgcggaagctcctgcaagtgcggcaacggctgcggaggctgcaagatgtacccagacttgagctacactgagtcaaccaccaccgagaccttggtcatgggagtggcacctgttaaggctcaatttgagggtgctgaaatgggtgtgcccgctga

SEQ ID NO: 243088 - DNA, 264 bp, Glycine max
cgaaatgaatataggtacagaagaagaacagaggcttcaacaaaaattcagacacaatggagaagagcccaagctctttctgattacaaacagcagaagaaagcaactgttacacttcaatgtctatggagagctaaagtggcaaggaaagagctcagaaagcttcggatggctgcaagggaaactggggcacttaaggaagcaaaggacaagttggacaaacttgttgaggagcttacatggagaatagatatcgaaaagcac

SEQ ID NO: 243089 - DNA, 248 bp, Glycine max
  unsure (1)..(248): unsure at all n locations
gatccatttttttgttttcttcaaacatcacaacaatgtctccattttctctcttcctcttcaccacattgctatcttttctcggcgccgccgacgcgcgactcaccttggacttctacaaggacacgtgtccgcagttcagccagatcataagggacaccgtcacaagcaagcagatcgccagccccaccaccgccgccgccacgctccgcctcttcctccacgactgcctcctcnccaacggctgt

SEQ ID NO: 243090 - DNA, 268 bp, Glycine max
ggcacaagtttgttgagatagctagaagcaataagatgaaaatgaaagtgcttgttttgtttgttgctacagttttggtagcatatgaatgccatggctcagactaccagaagttccctctccaaatgaaaactgggtttggtgggcaatacagcaatgaggtggcatgtgccagttggacgcttggcatggaatcaaacaacgtagtcaagtggcaaactgttcctgcagcttgcggagactacatagctgactacgttctaggaga

SEQ ID NO: 243091 - DNA, 273 bp, Glycine max
ggaagaggaagccgcagcgcttcgcgagatgcaagccaaggtcgagaaggagattggcagcgttcaagatcctgcgaatgcagctgcttctcaagcacacaaggaggaggcagatgctcggtctgtttttgttggcaatgttgattatgcatgcacaccagaagaagtgcagcaacactttcagtcctgtggtactgtaaacagggtcactatcctgacagacaactttggccagcctaaaggttttgcttacgtggaatttgttgaagctga

SEQ ID NO: 243092 - DNA, 250 bp, Glycine max
gattgttgggatctccatacgccggatctgctaaaatacgcttgatccatatgggcctcctcgaccacttgtgggacgacaccgtcgccggcccaaggccggaaaacggtctcggcaagctccggaaacaccacaccttcactttccgacctagctccggcaaggaagcggagggcgggagcgtgagatcgtacggtgacgaatcgtcggaggaagcgactagagtgacgcgtagtatcatgatcgtgaa

SEQ ID NO: 243093 - DNA, 360 bp, Glycine max
gagtgcagaaatggtatcatgatgaaggctatgcctgcgctcaggtcgttaatttcgggaacctcaacaccaaggaggttgtttgtgaggttgttgaaggggatatcacacaattggatattcagttccaggataagcttggtaatgttgttgaagggaacacccaagtccctgtcattcaaagagagcttccccggcagctgcgctcaggttacactttcaatattgaagcagggaagcaagctttaagaaatgtgaactcccttgctttgttttcaaatattgaggtcaatccgcgccctgatgagactaatgaaggaggtaaaattgttgaaattaagctaaaggagttagaacaga

SEQ ID NO: 243094 - DNA, 343 bp, Glycine max
ggcagccaaagaaaagaaaatcctcaattttctgagcagccaaacactctctctctgtctctcgaaaattctcagtttgcagagaaaatctgaatcatgtcgtggcaagcgtatgtcgacgatcaccttctgtgtgacatcgaaggtaaccacctcactcacgctgctatcatcggccaagacggcagcgtttgggctcagagtaccgacttccctcagttcaaacctgaggagataactgccatcatgaatgactttaatgagcctggatcacttgctccaactggattgtatctcggtggcaccaaatatatggtcatccaaggtggaaccggtgctgtca

SEQ ID NO: 243095 - DNA, 354 bp, Glycine max
ggcagccaaagaaaagaaaatcctcaattttctgagcagccaaagactctctctctgtctctcgaaaattctcagtttgcagagaaaatcggaatcatgtcgtggcaagcgtatgtcgacgatcaccttctgtgtgacatcgaaggtaaccacctcactcacgctgctatcatcggccaagacggcagcgtttgggctcagagtagcgacttccctcagttcaaacctgaggagataactgccatcatgaatgactttaatgagcctggatcacttgctccaactggattgtatctcggtggcagcaaatatatggtcaacaagggtgaacccggtggtgtcattcgagggaag

SEQ ID NO: 243096 - DNA, 298 bp, Glycine max
ggtacttggttatgaacatcagatattggctggttatgaacgtttgtaaattttgtcatcatggcagggatcatgctggtggaaatgaaaagataaagcaattggtgcctggaatcaagccacaccaaaggtcacataagctattatgttactggcaaagaggaggagcagcctgctgtttttactggagacacactgtttattgctgattgtgggaaatttttcaaaggaactgcagagcagatgtatcagtcactatgtgtaacattaggttcattaccaaagccaacacgagttt

SEQ ID NO: 243097 - DNA, 397 bp, Glycine max
  unsure (1)..(397): unsure at all n locations
gacactcattccatttttacctttctctctcgctcgcaaacgcaaataataaaaaacaaagctttaaccaaggcatccaagccgatcttgaaagaactcaaagatttccaaaaagatcctcctacctcatgcagcgcccgtcctgttgctgaagacatgtttcactggcaagcaacaattatgggtcctccagacagtccttatgctggaggtgttttcctagtcactattcatttccctccagattatccctttaagccacccaaggttgcattcaagacgaangtatttcacccanatataaatagcaatggaagcacttgccttgacatattgaangagcagtggagccctgcgctaactatttcaaangtgttgctctcaatttgttccctgt

SEQ ID NO: 243098 - DNA, 325 bp, Glycine max
ggggcgatctaatggaagagtgaattagagatatcaatatattatgataatggagggatacaataagaaggttatgaatgtggggattgtgtttggcattggcatgattgggattggcaatgggcaatactcgttttgtcgcatgcccaaccattggtttgccggattcaaacccaattttaattgggaataacctggtgattccttcactggcttgttcctcagccattgccaaggctgatcttaaatgcttctgccgcttcaaggattcgggccttctctctatgtatggtgttgatcccaacaagtgcatggaactccctgt

SEQ ID NO: 243099 - DNA, 387 bp, Glycine max
ggctctgaggggggggttttcggtgttcccctctttgtgttcgttcgcgacgatggggtccatccccgatccaggcgagttgagcgagttgactcagccgagcttcgacgagttccagcgccaaacctctctcatgaccagctgcaccctcctctggaaggagctctccgaccacttctcctccctcgagcaagacctcaaccacaaatccgaagccctcaagcgcaagattcacaccctcgacaactccacctcggactccctccgcctcctcgaccaccgcgaaacctctctcgacgccactctccagatcgccctccggacgctcgacacgcgccggcacgctgctctctccgccctcctccacgacgctgacgacacctcccc

SEQ ID NO: 243100 - DNA, 368 bp, Glycine max
gaatttgaaaacattttccccagttctcgcaatcccgcaccccccaacccccgcgtatggcttcctcggcaacagacgataacccaagatctgtaaaaagagtagctgttgttggtgctggggtaagtgggcttgctgcggcttacaaattgaaatcacatggtctggatgtcactgtatttgaagctgagggaagagctggagggaggttgagaagtgtttctcaagatggtctaatttgggatgagggagctaatacaatgactgaaagtgaaattgaggttaaaggtttgattgatgctcttggacttcaagaaaagcagcagtttccaatatcacagcataagcgctatattgtgaaaaatggg

SEQ ID NO: 243101 - DNA, 418 bp, Glycine max
aagccttcattaaggcggcaaaaggcaaacggaagggaaatttaaaagaaaaggttccaacttaaaaggtttgaaacttgtaacggtggaccgtccttttgctgagaagcactatgctgatttgtctgccaagcctttctttagtggtttggtggattacattatctctggccctgttgttgccatgatctgggagggcaagaatgttgttacaactggccgaaagattatcggagccacaaacccagctcaatctgagcctggaactatccgtggtgactttgccattgacattggaaggaatgttatccatggaagtgatgcagttgaaagtgctaacaaggaaattgcattgtggttccctgagggccctgctaactggcaaagctcccaacactcttggattcatgagtaaatc

SEQ ID NO: 243102 - DNA, 394 bp, Glycine max
  unsure (1)..(394): unsure at all n locations
ggacccatcatgggctgaggcatgggtcacacttggcagagcacaacttaattttggtgagcctgataatgctattgaaagctttgaccgtgctctagctctcaagcctgattatgaggaagctcaagatgataggaaaactgcatcacgtcttgttaagaagagaaagcaacttcactcatctggcctgagtgccactcaaaatcgttatatggttggtgaaaaggatgaaaaccagtaaatgtacacaacaagtgtgaaagttatgtttaatgtccaatgtantgcatgntttggaactcgtcaaaaattaaaaatctcgtcaattttgcccaaaaacgtgaaagctataactattagcttctggttaaagatggaaagtcacatcgacaac

SEQ ID NO: 243103 - DNA, 404 bp, Glycine max
  unsure (1)..(404): unsure at all n locations
gacaatgcaggatggcatcctatttgacaatattctgatagctaacgatgataaagttgcagaatcctatcgggagaccacatggaagcccaagtttaccattgagaaagaaaaacagaaggctgaagatgaggctgcaactggttcagatggtattgcaggcttccagaagaaggtatttgacctcttgtacaagattgcagacattcccttcctgagcgaccacaaatctaagatatacgatctcattgagaaagctgagaaacagccaaatctcactattggaattcttgtagcggttgtggttgtcttcgtgtcaattttcttcaggctcatatttggtggcaagaaacccgcanaggtggagaagaaaccagaacgcacagaagcttccaataaccaag

SEQ ID NO: 243104 - DNA, 279 bp, Glycine max
  unsure (1)..(279): unsure at all n locations
gatcgcatttcatagcactcaccctcattaccaacacgaaagcatagccaaaaccttttttcgaagtctctgattttcctaatggctccggcaaaggcagagaagaagccggcggagaagaagcctgcggcggagaaggcaccggcggagaagaagccgaaggcggagaagaagatctcgaaggaagganggagcgagaagaagaagaagcgcacgaagaagagcgtggagacctacaagatctacatcttcaaggtcctcaagcaggttcaacccgac

SEQ ID NO: 243105 - DNA, 285 bp, Glycine max
  unsure (1)..(285): unsure at all n locations
gaagaaaggaagaaacataccgaatgagagcatcaaactcttcttcttcgatttccattgcgaagcgttactttttcttcttctttctcttcattttcttcgctcttcgatcttcgtccggggactgctccgaataccaccaccaccactcgccgatggccacgatcggaggcttacacgactcccaaggctctcaaaacagcgtcgaaaccgaagccctcgctcgattcgccgtagacgaacacaacaagaagcagaattcgcttctggagtttgctanggtgg

SEQ ID NO: 243106 - DNA, 385 bp, Glycine max
  unsure (1)..(385): unsure at all n locations
caaccgataattctctttcccatactctctctgtgttcttctgttctctctgtttcttcagattttctccctcctcagcgcctgtgaagtttgattgcttcattctttgaagtgaatttgacaattaagtaaattggttgagaagggttcattcctcttcattggaagaataaaacaaatattgcaggtggattttttctgatggcaactaatgaaaatcttccaccaaatgtaataaagcaactagccaaggaattaaaaaatattgatgaatcacctcctgaggggattaaagttgtggtaaatgatgatgatttttcaataatatatgctgacattgaagggccaanctggaactccttatgataatggagttttccgcatg

SEQ ID NO: 243107 - DNA, 274 bp, Glycine max
ggagtgatttcagtgagtgatcggtgttcacttgatctcatcataatcgtcagcgtcaattgaagaagatgccgatcagaaacatcgccgtcggaaggcctgaagaggcgactcaccccgacacgttgaaggcggctttggctgagttcatctcaaccttcatcttcgtgttcgccggctcaagctccggcatcgcctacaacaagctcaccgacaacggcgctgccaaccctgccggcctcatctccgcctccatcgcccatgcattcgccct

SEQ ID NO: 243108 - DNA, 376 bp, Glycine max
ataccgaaacagaaagtggtttcagtgagtgatcggtgttcacttgatccttcataagtcgtcatcatcatcatcatcatcaccgttgattgaagaagatgccgatcagaaacatcgccatcggaaggcctgaagaggctactcaccccgacacgttgaaggcggggttggctgagttcatctccaccttgatcttcgtgttcgccggttcaggttccggcatcgcctacaacaagctcaccgacaacggcgccgccactcccgccggcctcatctccgcttccatcgcccatgctttcgccctcttcgtcgccgtctccgtcggcgccaacatctccggcggccacgtcaaccccgccgtcaccttcggcgcctt

SEQ ID NO: 243109 - DNA, 246 bp, Glycine max
gggcgacacaaaaatcttgttaggctgcttggatactgtgttgagggagcctacaggatgcttgtgtatgagtatgtagacaatggcaatctagagcaatggctgcatggggacgttggagctgtaagccctttgacatggaacatacggatgaacattatattgggaactgcaagaggattggcctatcttcatgagggtcttgaaccgaaagttgtccaccgagatgtgaaatcaagttacata

SEQ ID NO: 243110 - DNA, 389 bp, Glycine max
ggtgctctgctcgtgcctctagggttatcatttctccatttccattttctctctcacttttcaagaatcgtaagctatgggaaagtcttacccaactgtgagtgctgattaacagaaggccgttgagaacgcgaagaagaagctcagaggcttcatcgctgagaagagatgcgctcctctaatgctccgtttggcatggcactctgctggaacctttgacaagggcacgaagaccggtggacccttcggaaccatcaagcaccctgccgaactggctcacagcgctaacaacggtcttgacatcgctgttaggcttttggagccactcaaggcggagtttcctaatttgagctacgccgatttctaacagttggctggcgttgttgccg

SEQ ID NO: 243111 - DNA, 369 bp, Glycine max
gatacagtagtattttaattgcaacacgttacggccaacttaattaattaaacaaaaacaaggtaattaattaattaacaagaattaaaaccaaaaaaaaggctcccaaaggtttaatctttttggccgtgttatgcctctcagcactgtcactgagtcgttgtcttgcggaggataatggacttgttatgaacttctacaaggaatcatgccctcaggctgaagacatcatcaaagaacaagtcaagcttctctacaagcgccacaagaacactgctttctcctggctcagaaacatcttccatgactgtgctgttcagagttgtgatgcttcactgttgctggactccacaagaaggagcttgtctg

SEQ ID NO: 243112 - DNA, 307 bp, Glycine max
ggatccaacaaagaaaaatggaaatgtaagaatacaatgcaataggaaccctcaaagtgatgcaccaatcataaaacctctagatcctgaagaattcaagaggcaaggctatatgatggttgatttccttgctgattatattatgaatgttagccattatcccgttttaagtaaagtagaacctggttatcttaaacaaagattaccaacttctgctccatgtggtccagaacccattgaatccatacttaaagatgtgcaagatcacatcatccctggcctcacacattggcaaagtcctaatttt

SEQ ID NO: 243113 - DNA, 388 bp, Glycine max
  unsure (1)..(388): unsure at all n locations
ggttctagtgtgtgattgtttgttgttgtaactcgttcttcttcttttgttgttctgtgtttgtgtttgttttttctctcacctgaaaatgtcttgctgcggtggtaactgtggttgcggaagctcctgcaagtgcggcaacggctgcggaggctgcaagatgtacccagacttgagctacactgagtcaaccaccaccgagaccttggtcatgggagtggcacctgttaaggctcaatttgaaggtgctgaaatgggtgtgcccgctgagaacgatggctgcaaatgtggaccaagctgctcctgcaacccctgcacttgcaagtgaagtgttgggagagcaagcttcaaacanagatagcccttaaataggaataatgataaacta

SEQ ID NO: 243114 - DNA, 402 bp, Glycine max
  unsure (1)..(402): unsure at all n locations
ggcaggtagagagagcgagagaacaagaacataagggaaccacagcggcggtaacagaagaacaagcagagaatgggtcgagtgagaacgaagacggtgaagaaatcctctcggcaggtgatagagcgtcactactcgcgcatgaccctggacttccacacgaacaagaagcttctggaggaagtggcgataatcccgtcgaagaggctaaggaacaagatcgcggggttctcgacgcacctgatgaagcgcatccagaagggccctgtgcgcggcatctccctcaagctccaggaggaggagcgcgagcgccgcatggactttcgccncgaagtctccgccatcaaaaccgaccacatcgaggtcgacaaggaaaccctcgacatgctccactccctcggt

SEQ ID NO: 243115 - DNA, 436 bp, Glycine max
gccggcccaacgcgtcagccacgccttcggcggtggcaaaaagacaacaaaagggggaaactaaacccaaacaggttcctaccatagtctgaggaaagtgagtgagagaaagagatcgcagacacagagcagaatggcttctacccaatgtttcttgcaccaccatgctcttaccacccctgccagtgccagatccccatcactacgcatcttggttagcaccaagcctaaccagcttgtttgcaaggcacagaaacaacaaacaccacaagaggatattgatgtcagcccaatctctcgccgtttagctctaactgtgctcattggtgctgctgctgttggctccaaagtccaacctgctgatgcagcctatggtgaagctgccaatggtgttgggaaagccaaagacagacgcagatttcctgccatacaatgg

SEQ ID NO: 243116 - DNA, 389 bp, Glycine max
aaggtacatgagagggaagatactggggaggttgatgttctcactaaaggagacaacaattatggtgatgacaggctactgtatgctcacggtcaactttggctgcaaaggcaccacattatgggtagagccgtcgggttcttaccttacgtaggctgggtgaccatcattatgactgaaaagcctattatcaagtatattctcattggtgctttggggttgctcgtgataacttcgaaagattaaatgatgaatctgaagtcaaactgcggtctaacctccgatggtagtgtgagcagaatataatgttaagattaaatgatgaatctgaagtcattttgtaccatgcaaagtatgggggacactataatgttaagaattaatgcaaa

SEQ ID NO: 243117 - DNA, 403 bp, Glycine max
gaaagagagagagagaaaagcgtgaatcatgtcggacgaagagcatcacttcgattctcaggcggatgcgggagcgtccaagacgtatcctcagcaggctggtaccattcgcaagaatggctacatcgtcatcaaatccaggccttgcaaggttgtagaggtctctacgtcaaagacaggcaagcatggacatgcaaagtgtcactttgttgcaattgatatttttaatgggaaaaagcttgaagatattgttccatcatcccacaactgtgatgttccacatgtgaatcgcactgactatcagcttattgatatctctgaagacggctttgtgaatccgttgactgataatggaaataccaaggatgatctgaagcttcctactgatgaggcattgcttgct

SEQ ID NO: 243118 - DNA, 153 bp, Glycine max
aaagaaatcaaaagatgatgaagatggaaagaagaaaaaacagaagaagaaaaaaggacccaaattgcaccaaaagggcaaatgtccggtttcatgttcttttctaaatttggaagagagaatctaaagaaaactaatcctggaatttcattt

SEQ ID NO: 243119 - DNA, 295 bp, Glycine max
atgagttcgctacggtatttgggcagcggcggcgcgccgctcaggaaggaggtcgccgaggactttagagcccaattccccaacgtggaaattgggcagggctatggtttgactgaaagtggacgaggggcagctagagtgttggggcctgatgagtctaagcgccatggttctgtgggtcgactatcagaaaatatggaggccaagatagtggaccctgttactggagaagcattatctcctggccaaaaaggggagctctggttgcgaagtccaacaatcatgaaaggttatg

SEQ ID NO: 243120 - DNA, 382 bp, Glycine max
gatgtcatagtattatcattcattctcatctttctctcttctctctccacccaaaccctaactctcgaccctgttcccctctcgtatccgtcatgaaaggaggaaagtccaagaccgaatctaagagagccgatcccaaacttgctgtgaataagaagggagccgccaccaaggctaagaaacccgccggcaaagggaaaggaacgaaagaacctaacaagccaaagaaggcttcaaattgcttcctccgtttcaaggaaggatttcaggaaggaattcatcaaaaaaaatcctgaaaacaaagcagtgtctgctgtgggcaaagctgctggagcaaaatggaagaccatgtctgatgctgaaaaagcaccttatgtggcaa

SEQ ID NO: 243121 - DNA, 376 bp, Glycine max
gaggactagatatttttttctctctcctcttcgccgctaattaacccttttctccccagcattcaatttctattagtatccaaaccttgattgcgttcttggattttcttgtgggtagggggtttctcctctctttctctgatattcgcactgcctaccgcaaactcgctatgaggtggcacccggacaagtgggctctgaatcccgcaaccgccggcgaagccaagcgccggtttcagcaaatccaagaagcctactcagttctctccgatcagtctaaaaggtcaatgtacgatgcggggctctacgattctttggaggaagaaagacaacagggattttgtgacttcatgcaagagatgatctcgatgatgaa

SEQ ID NO: 243122 - DNA, 416 bp, Glycine max
ccaagcgttcggtagggtggcaaaaggacaccataagggggattcggccaacccctaaaaggcacttcttagttctccctctcccactaaaaaccatagtaatctagataataattaacatcagccctcactccttcgcacaccaaacccttccttcctatctctcactaatctaatggaatccgcagcactgtcgcgcataggcctggcgggcctggcggtgatgggccaaaacctagccctaaacatcgcagaaaaggggttcccgatctccgtgtacaaccgcacggcctccaaagtggaccagaccgtagatcgtgcccgcaacgagggctccctccctctcacgggccaatacacacctcgcgacttccatctctcccgtcagcgccccagatccgtcatcatcctcgtca

SEQ ID NO: 243123 - DNA, 406 bp, Glycine max
ttcattaaggcggcaataaaacaacaaaagggggtgtaaggacttgtttgtttgattactcaaaagataaaggttgctgcaaaaggctgcaacttgctgttgttcattacctcttaccttttactgatcccaaggcttggtgtccattctttgtctcattataattctgctaccacaacatgtttggcaaaacctcggacagcaaagtatggaggacgcattctcgtaaatccaggatttgatcccaacatacacggttggacagcatttggtaatggatcaatcaatgaggtactgtcaaatggacgcaatagattcattgttgctcacaacagactacacccatcacatagtttctctcagaaggtccaacttacgacacgaatgctgtacacctttaccgctt

SEQ ID NO: 243124 - DNA, 345 bp, Glycine max
  unsure (1)..(345): unsure at all n locations
catcatccctattgctcttcagcttctcattgactgtggcaagaccccacctgatggattcaagtgtgcagatagttagttaatatatatttaatcactaaggtccccaaggaccaaggaattgcataactcatgcatgaataaaaacaggttgagaagatcgatgtagtgaaggaattctctttcgtttctctttcatcaagttgttgctgtataccaaaggccaaggacaacataattgtactaaganggacaatgttggtttacttgttcagactggataattttctgacatgccttgtatacaaagtcatgcaatattgccatggcatttatttaattatt

SEQ ID NO: 243125 - DNA, 297 bp, Glycine max
  unsure (1)..(297): unsure at all n locations
agggggttcaatgtgttaatggttggtggtggtaatccttcctctcctttgtggtccgggttggggttgtttttcccccacttaaaatgtcttgncgcggtggtaactgtggttgcggaagctcctgcaagtgcggcaacggctgcggaggctgcaagatgtacccagacttgagctacactgagtcaaccaccaccgagaccttggtcatgggagtggcacctgttaaggctcaatttganggtgctgaaatgggtgtgcccgctgagaacgatggctgcaaatgtggaccaaact

SEQ ID NO: 243126 - DNA, 399 bp, Glycine max
  unsure (1)..(399): unsure at all n locations
gaaaccaaaaaccaatagcaatacatttccgatttccagacagaggaactactcagcttagcttgagtattttcaagaggggatcaaagggaagaagaagggaaggactcaaacttgcacacgcaacctttggttcctttcccaacactcaccatggtggcagattctaagtccaattccgacctctccttcggaaaaatctttgccagcagtgctttctctgcatgtttcgctgaggtgtgtactattcctttggatactgccaaagtgaggcttcagcttcaaaagcaagctgtagctggtgatgttgtctccttacctaaatataagggtatgctgngaacagttggnancattgccagngaagaaggtctttcagcactctggaagggcattgtg

SEQ ID NO: 243127 - DNA, 401 bp, Glycine max
gacaccaaacgagccatttgggagttaggttctgcacgctctgcttccagcgagtgttctttcttcgtttcaacaccttaatttgcacacgctgcttcttcagcttgagaaatggcacaagaaacctttctattcacatctgaatctgtaaacgagggtcaccccgacaagctgtgcgaccagatctctgatgcagtgctcgatgcgtgccttgaacaggaccctgacagcaaggttgcctgtgagacatgcaccaagaccaacatggtcatggtctttggagagatcacaaccaaggccaacgtagactatgagaagattgtccgtgacacatgccgcgaaattggattcatctctgatgatgttggtcttgatgctgacaaatgcaaggtgttggtcaa

SEQ ID NO: 243128 - DNA, 345 bp, Glycine max
ggaagcggatggagtcgaaccgcgagtccgcacggcgatcgcggatgaagaagcagaagctgctcgaagacctatccgacgtagcgagtcgccttcaaggcgagaacgtgcgcttagcgcagagcataaaggcgaaggaggaagcgtacgttgagatcgaagccgcgaacgacatcctcagagcatagaccatggaactcgccgaccggttaaggtttctgaactccattctcgagatcgccgatgaggtcggcggcggtggtgaatccttcgagattccgcagattccagaccctctcttcatgccctggcagattccccaccctatgatggcgtcacctgaca

SEQ ID NO: 243129 - DNA, 344 bp, Glycine max
  unsure (1)..(344): unsure at all n locations
gtgattggcttttacgtgactgcaaaactggtgaaatcttgacaagagcttccagtgtttgggtcatgatgaataagctaacacggaggctgtctaaaattccagaagaagtcagacaggagataggatcttattttgtggattctgatccaattctggaagaggataacagaaaactgactaaacttgacgacaacacagcggattatattcgtaccggtttaagtcctaagtggagtgatctagatatcaatcagcatgtcaacaatgtgaagtacattggctggattctggagagtgctccacagccaatcttggagagtcatgagctttcnttcatgact

SEQ ID NO: 243130 - DNA, 373 bp, Glycine max
  unsure (1)..(373): unsure at all n locations
ggtgaagtgtattggtcactgacctatcttggaagagttttgaagtttaaaccttcaaacccttttgcctttagattctgattctgagtctctgctgctatatatggcgccacgcgtatttcttgtgttggggatgttgctgatggtgtgccttgttaaggtttcgtctgatccaaagagagaagaagaaatactggaagaagaactacattttcccgataacgagccacttattgtgagagacgggaacagaaggctaatgcaagacatagattgtggtgggttgtgcaagacgaggtgcagtgcacattcgagacccaacttgtgcactanggcgtgtggcacgtgctgtgtgaggtgtaagtgtgtccca

SEQ ID NO: 243131 - DNA, 403 bp, Glycine max
  unsure (1)..(403): unsure at all n locations
aaaaaaaaacaaaagggggttgccttgttggtaaaaaaaaaaaagaaaagagtggaatcgaagacgaagacgaagatggaggacgcatcagcatcaaagttcatcccacaccaaatcggaggggtccaaaacgacgtgcttcgatttggtctccatggagtcaagagcgacatcgttggttcccaccctcctcaatcctcactccaatctacaaggagaatggatgaagcgatgaagaagcaatgcaaagttaacctgtacggaactgcttttcccctgaaggaggagcttgacaggcaaatcctgtctaggttccagcggcctcctggaccaattccatcttcaatgctgggtttggagactgttacangaagtgttgatcactttggttttgaggattgtc

SEQ ID NO: 243132 - DNA, 245 bp, Glycine max
  unsure (1)..(245): unsure at all n locations
cccgaaggaatacgtgaggcctcaagaagagctcaagagcatanggaacgtgtttgaggaggaaaagaaggaagggctacaggttccgacaattgacttgagagagatagattcggaggacgaggttgttcgagggaaatgtcgtgagaagctgaagaaagcggcggaggagtggggtgtgatgcacttggtgaaccatgggatccccgatgagctgatagagcgggtgaagaaagcaagggaaa

SEQ ID NO: 243133 - DNA, 358 bp, Glycine max
gatactcgcttccctctctctgcgttcggcaccagcgaaacgctcttcgttatctttttctcgactccgcggcgtagatccgaggagttcgggaaaccctaactcatcttccttcacaacagaacaacgcttcttttccctatccatcatctcaactgaagtcatggctggactagcacctgaggggtcacagttcgatgctcgtcaatatgattccaaaatgagtgacttactttcatctgatggacaggacttcttcacatcctatgacgaggtttatgatagttttgacgctatgggtttgcaggagaatcttctcaggggaatttacgcatacggttttgagaagcccatcagc

SEQ ID NO: 243134 - DNA, 394 bp, Glycine max
  unsure (1)..(394): unsure at all n locations
gaatctaatggaagagtgaataagagatatcaatatattatgataatggagggatacaataagaaggttatgattgtggggatggtgttgggcatggccatgattgggatggccaatggccaatactcgttttgtcgcatgcccagcgatgggttggcggcatgcaagccgagtgtgagtggggactatcctgctgatccctccactgcttgttgctcagccattgccaaggctgatcttaaatgcttctgccgcttcaaggattcgggccttctctctatgtatggtgttgatcccaacaagtgcatggaactccctgttaagtgcaaggttgtcgactcttttcactgctagattcactananggggcactaatcaatataaactacacaag

SEQ ID NO: 243135 - DNA, 334 bp, Glycine max
  unsure (1)..(334): unsure at all n locations
gaagtacaatatgtgggcttccacattaacaacagaaggcccaacggagaactcgaaaccccaagttgaatctttgtgtctgctatagcactggaaagttgtagccgtangtagcagttgcacacggcgcaaaggggaacaagaagaagaagatggtgtccttgaagcttcagaagcggctcgccgctagcgtcctaaagtgtggcagaggcaaggtctggctcgttcaaatgaagtcaatgaaatctccatggccaattctcgacaaaacataagaaagttggttaaggatgggtttattatcangaagccaactaagattcactctcgctct

SEQ ID NO: 243136 - DNA, 395 bp, Glycine max
  unsure (1)..(395): unsure at all n locations
ggttctagtgtatgtgattgttgtgactcgttcttcttcgtcgttatcttcttcttttgttgtttgtgtgtttgttttttctctcacctgaaaatgtcttgctgcggtggtaactgtggttgcggaagcgcctgcaagtgcggcaacggctgcggaggctgcaagatgtacccagacttgagctacaccgagtcaaccaccaccgagaccttggtcatgggagtggcaccagttaaggctcaattcgagagtgctgaaatgggtgttcccgctgagaacgatggctgcaaatgtggagctaactgcnactgcaacccctgcacttgcaagtgaggtgttggagacctaaagctcaagcagaaatggcccttagaaataatgataaaaactatatg

SEQ ID NO: 243137 - DNA, 309 bp, Glycine max
gatttcactttgatctgatcccaattccattcattcattcattcgttcttcttctttcaccaacaacaaagaaagcagagaaactttcatttcatatattttcagcatcgcagcaaaggagatcaatcaatcaaaaaccatggcaggcttcagtggcgacgaaaccgctcctttcttcggcttcctcggtgccgctgcggccctcgtcttctcctgtatgggagcggcgtatggaacggcaaagagtggggtggacgtggcgtcgatgggcgtgatgagggcggagctggtgatgaagtcgatggtgcc

SEQ ID NO: 243138 - DNA, 402 bp, Glycine max
ggcagcgcttgatttgaggccaggcaagccccactcaaccaccacacctctcctcgttcacgctacccctttctgctcttcttctacctttcaagttttaaaagtataaagatggcagagacattcctatttacctcagagtcggtgaacgagggacaccctgacaagctctgcgaccaaatctccgatgctgtcctcgacgcttgcctcgagcaggacccagacagcaaagttgcctgcgaaacatgcaccaaaaccaacttggtcatggtcttcggagaaatcacgaccaaggccaacgttgactacgagaagatagtgcgtgacacctgcaggaacatccgcttcgtcccaaatgatgtgggactggatgccgacaactgcaaggtcctcgtcaacatt

SEQ ID NO: 243139 - DNA, 406 bp, Glycine max
ggagagaagagggtcagagtgagaaagagagagagagagagagaaactgagagaaattcgcaaaccctaatttcggaaagatcggcgatggctgcctccaaggatcgcgagaacttcgtctacatcgccaagctcgccgaacaggccgagcgatacgaagagatggtggaatcaatgaagaacgttgcgaatctcgacgttgaactgactgtggaggagcggaatttactttctgttgggtacaagaatgtgattggtgctcggagagcatcgtggaggatcctgtcttccattgagcaaaaggaagaaacaaaagggaacgagttgaatgcgaagcggattaaggagtacaggcagaaggttgaattggagctttcaaacatctgtaatgatgttatgacagtga

SEQ ID NO: 243140 - DNA, 291 bp, Glycine max
agggggaagagaaaaaggcacaaagcccaagttgtggggcccaatcccaactccccggttaacaaaaaccaaaatatcaattaaattctcggaaaaacaaagtttcatttcaattcagtcttattattagggtttgccgattgagagagaaagagaaatgggagaacgaaaaggaatcccaatggctttggggctcttggcgatgaccctcttcttcattgcttcctcttcctctcacctcgttcgcgcttccgatgacgccgacgacgcgatcttctacgagtcgttcga

SEQ ID NO: 243141 - DNA, 342 bp, Glycine max
ggcacaagtttgttgagatagctagaagcaataagatgaaaatgaaagtgcttgttttgtttgttgctacagttttggtagcatatgaatgccatggctcagactaccagaagttccctctccaaatgaaaactgggtttggtgggcaatacagcaatgaggtggcatgtgccagttggaggcttggcgtggaagcaaacaacgtagtcaagtggcaaactgttcctgcagcttgcggagagtacatagctgactacgttctatgagaccaatatagatcagattccaaaacagtttaccaacaagcttatatctatgctaaatccctcaaactcaccaaca

SEQ ID NO: 243142 - DNA, 433 bp, Glycine max
  unsure (1)..(433): unsure at all n locations
tcccggcccgaccaagccttcattaaggtggcaaaagaccaccgaaagggggaaaatttcaacaaaaacttccctaataaaacccctccttcaaattccttctttcattcattccaagcctgaaatggcagcggcaccagcagctaccttcactattggaaccaccggttccctaggccaaagaggaaactcgcttcctcaattaaagtcttctgggttgaaattcaactcccagaatcatttgaagagcttctgcggcctcaaggccatgtcatccgtgagatgtgagtcagaatcgtctttcttggttaacaaaactggtgctgctctgcgggcgtcttttgcatccaaggctcaaaaggaaaacgaccaaaacttcaactacaactcgcagcctcaggcttcgtacanagttgcagttcttggtgctgct

SEQ ID NO: 243143 - DNA, 364 bp, Glycine max
caagccttcagttaggtggcaaaaagacgccagaaggggaactaagtggtgaataattccggatcagggaaccatgcttataggaatgatgatgactcaaggtgtgtgggtttgcaatagtgatggtggcagtgcaacttctggtggacgtgagtctcaaagtacaggctgtgaaatgtacccctgtggatctgaatccttgtttgggggcaataacttcctctcaaccaccatcagaaatttgttgccacaaggtgagggaatcttggcaatgcctctgtggttagttaaaaaccccaattctaaggccatatgctaattctccggtttcaaaaagggttgcaaccccttttggggtcccctt

SEQ ID NO: 243144 - DNA, 424 bp, Glycine max
cggtctagaatccggccgaccacgctcagcagcgtccgtacgctgcaaaacaaaagggataaaacaaaagagagaaaaatctgcgtagagtatacaacgaggggcaagagtacctggaagcctcactccttttgtgacggtaacatgtatagttgcagccatgggtgggttaatcttcggttacgatatcggaatttcaggtggggtgacatccatggatccgtttctgctcaagtttttcccgtcggtgttccggaagaagaattccgacaaaacggtgaaccagtactgtcaatacgacagccaggcactgacgatgttcacgtcgtcgctgtatctcgccgcgttgctgtcgtcgttggttgcctccacgtcacacgtaggttcggccgaaaactctccatgcttttcggaggcttgcttt

SEQ ID NO: 243145 - DNA, 368 bp, Glycine max
  unsure (1)..(368): unsure at all n locations
gggagctgagctgagaaaacccccaaccccaacctcaaccttaacctctcctcactttcttttcaaccagaactatgattaagctttttaaagtaaaggaaaaacagagagaactggcagaaaatgcgagtggcggaccacccgttaagaagcaaagtgccggcgagttgcgtcttcacaaagatataagcgagctgaatctaccaaaatcatgtaccatgcaattccccaatggcaaagatgacctgatgaactttgaagtttcaattcgacctgatgatggatattacttaagtggcacatttttgttttcctttcaagtgtnctccatctatcccacatgaagcacanaggttaaatgcaagaca

SEQ ID NO: 243146 - DNA, 386 bp, Glycine max
  unsure (1)..(386): unsure at all n locations
gaatctattggaaaattgaataagagatatcaatatattatgataatggagggatacaataagaaggttatgattgtggggatggtgttgggcatggccatgattgggatggccaatggccaatactcgttttgtcgcatgcccagcgatgggttggcggcatgcaagccgagtgtgagtggggactatcctgctgatccctccactgcttgttgctcagccattgccaaggctgatcttaaatgcttctgccgcttcaaggattcgggccttctctctatgtatggtgttgatcccaacaagtgcatggaactccctgttaagtgcaaggttgtcgactctttccactgctagattcattaganggggcactaatcaatataaac

SEQ ID NO: 243147 - DNA, 367 bp, Glycine max
gaagggcaaggaagccacatagagacacaatacagagtgagttgttgctccttcgccacaactctctgccaacatgggtatctccagagattctatgcacaagaggcgtgccactggtggcaagaagaaggcctggaggaaaaagagaaagtatgagcttggtcgccagcctgctaacactaagctgtcaagcaacaagacagtcaggaggatccgtgttagaggtggaaatgtgaaatggagggcattgagattggatactggaaattactcctggggaagtgaagctgtaactcgcaagactcgtgtactagatgtggtctacaatgcctcaaacaatgagcttgtgcgtactcagactcttgtc

SEQ ID NO: 243148 - DNA, 342 bp, Glycine max
gacgcagcgagcgagccacgaaaatattcatcacacagggttttggtttattattccaatttttggttttcccttttgttggatattagagtgtgtaagaaagagaagagagagaaatgggaaggggaagagtggagttgaagagaattgagaacaagatcaacaggcaagtgacctttgcaaaacgaaggaacgggcttttgaagaaagcttacgagctttccgttctttgtgatgccgaggttgctctcatcatcttctccaatagaggaaaactgtacgagttctgcaggagttcaagcatgctcaaaacgctagagaggtaccagaaatgtaactatg

SEQ ID NO: 243149 - DNA, 328 bp, Glycine max
aagagagataagtgtagagagagagagaaaaaagtggcttgacacgtattgtcggcttcaagagctgcctcttacctgaagatctctgtgtttcagataagcgtttctaatgttactaaagaggtcaagtctctagagtctcatgcgtgggtaaaacttgatggaaattatacagtcatcgtcataactgatcatgcccaatatcatttgggtgatcttgtatatgttgatttgccagaagtgggatcaactgtgacacacggacgtagttttggtggagttgacagtgtgaaggctactagtgatattaactctcctatttcaggaa

SEQ ID NO: 243150 - DNA, 326 bp, Glycine max
gacactcgaagattaagcaagcaatggctattactacaccttccaattcttcaactctcctctccctttctctattgctcatctccctctccctcgctgagtcgcaatctttcatcggagtaaactacggccaggtcgccgacaaccttccggcgccggacgacacggccaacctcctcaaatccacaaccatcggaaaagtccgtctctacggtgccgatcccgccatcatcaaggccctcgccaattccggcatcggaatcgtcatcggcgccgccaacggcgacattccgagtctcgccggcgatcccaacgcgggcactcag

SEQ ID NO: 243151 - DNA, 395 bp, Glycine max
gaatctagtggaagagtgaataagagatatcaatatattatgataatggagggatacaataagaaggttatgattgtggggatggtgttgggcatggccatgattgggatggccaatggccaatactcgttttgtcgcatgcccagcgatgggttggcggcatgcaagccgagtgtgagtggggactatcctgctgatccctccactgcttgttgctcagccattgccaatgctgatcttaaatgcttctgccgcttcaaggattcgggccttctctctatgtatggtgttgatcccaacaagtgcatggaactccctgttaagtgcaaggttgtcgactctttccactgctagattcattagacggggcactaatcaatataaactacacaagg

SEQ ID NO: 243152 - DNA, 324 bp, Glycine max
gggttacccgcgtgagcaatatcaggaatttcagtattttgtggtgatagactttggggctacctgtgacaaggataaaaatccccaccctcaagaaataattgagtttccatctgttatagtgagtagcatcactggccagctggaagcgtgttttcaaacatatgtgaggcccacctgcaatcagcttctgagtgatttctgcaaggatctgaccggcatccagcaaattcaggtggacagacgtgttacattgagtgaggctctactaaggcatgacaaatggcttgagaagaagggaataaagaattccaactttgctgt

SEQ ID NO: 243153 - DNA, 333 bp, Glycine max
gaaatcaggagagcatgcatatgaacatgatgatgaagaaggtgtgtgggtttgcaatagtgatggtggcagtgcagcttctggtggaggtgagtcccaaggcagaggctgtgacttgtacccctgtggagctgagtccttgtttgggggcaataacttcctctcaaccaccatcaacaatttgttgccagaaggtgagggaacaaaggcaatgcctctgtggttacctcaaaaacccaagtctaaggccatatgccaattcgcctggctccagaagggttgctagctcttgtggggttccctttccaacttgttaattaccttcatatcata

SEQ ID NO: 243154 - DNA, 321 bp, Glycine max
gactcaccacttcaaaacactcataacacaaagcacaaagcaaagctcatccttgagttaaaaaatggcagcagcttcttccatggctctctcatccccatccttggctggcaaggccgtgaagctgggcccatcagccccagaagtgggaagggtgagcatgaggaagaccgtcaccaagcaggtctcctcaggaagcccatggtacggcccagaccgagtcaagtacttgggcccattctctggcgagcccgcgtcctacctaaccggtgagttcccaggcgactacggctgggacactgctgggctttccgcagaccc

SEQ ID NO: 243155 - DNA, 262 bp, Glycine max
gggagttgagttgagaaggaaaggctgaagaacacatagagagagagagagaagtgcagaaaaaatgagactgttcgatccatggcctgttttcttcaagagagaatggaagcggaattggcccttcttggttggattcgccagcaccggaactctcatcaccaaactttcccttggtctctctgaggaggaagccaacaagtcgaaatgcgtccaggcacacaagaggtgacctgagaggggaagagcggcagtggctttg

SEQ ID NO: 243156 - DNA, 351 bp, Glycine max
gacaacactcatagtagagtaaccaaaaggagagtgcaataactcgttgtacattcctagtgtgtgggagagacatggctaagatgtgtgttttggtgttggttcttgctctggctgtggccacaagtgccagaaacgttcccaaccccaaggatgctggtcttaaggaccagaagaacttcatcagctatggtggagttggtggttattccgggattgggaacaatggactgccttttggaggagctggtgccggaataggtggtggttttggcggaggtggtggacttggtggtggcctcggcggtcctaccggtgggatcggagggtttggcggtaccggtagcggtg

SEQ ID NO: 243157 - DNA, 297 bp, Glycine max
  unsure (1)..(297): unsure at all n locations
ggaccctgaggaggcaaccaccattaacgagctgaagaagcctgttgtggagaaagaagctccagggcatgccatatgagggcatgcacgtacggcctcggaggggaaccagaaaattatgttaacaaaataatctggaaccctaatgtatcagtgtcatcatcagtgtgtagtttaagctagctttgctatggttacgttctttgagatgagagtcttgatgaacagtaccattctgatgtattgctttccttgaaagttaatgcatgcttcttatcttctgtctagccaaaanaa

SEQ ID NO: 243158 - DNA, 363 bp, Glycine max
gatgcatatagcttatctagctccttcacctccttagtttcgaaagcatggcctccctggcggcttccaccgcggctatgtcagaaatccttggaaacaccgttaacctcagatgcgcaaccaggtctgctccatcaccaactacacctgccaccttcaataccgtcgcacttttcgccaagaagaagccagctccaactctaaataaaaagcctgccgctgtatcgcacgccaatgaggatctcgccaagtggtatggtcctgacagaacgatcttcttgcctgagggtctcttggaccgatctgagatccccgagtacgtgaccggagaactgactggagattatggttatgatccgtttg

SEQ ID NO: 243159 - DNA, 357 bp, Glycine max
ggcaagagtgaagagcgaagaaaatggctcccaagggtttaatctttttggctgtgttatgcttctcagcactgtcactgagtcgttgtcttgcggaggataatggacttgttatgaacttctacaaggaatcatgccctcaggctgaagacatcatcaaagaacaagtcaagcttctctacaagcgccacaagaacactgctttctcctggctcagaaacatcttccatgactgtgctgttcagagttgtgatgcttcactgttgctggactccacaagaaggagcttgtctgagaaggaaacagatagaagctttgggttgagaaatttcaggtacattgagaccatcaaagaag

SEQ ID NO: 243160 - DNA, 341 bp, Glycine max
gatgaagacgacgacgacgacgacgaagatgacaaggaagacgatgctcaaggtggtgctgagggttcaaagcagagcagaagtgagaagaagagccgaaaagcaatgttgaagctgggactgaaacctgttactggtgttagtagggtcacaatcaagagaacagagaaatattcttttcttcatctcaaaacccgatgtcttcaagagtccaaattctgagacctatgtcatatttggggaggcgaaaatagaggacttgagctctcagttgcagacacaggctgctcaacagttcaggatgccagatatgggatctgtaacggcaaaacaagaagatg

SEQ ID NO: 243161 - DNA, 345 bp, Glycine max
cacagacagttacatgagatcagctattgattactttgaggtgacaagagcaaggccttctcttgcttgcacccttctcatcacaacttggtctaggctttcctttcacaccactgattttggatggggtgaccctgttctgtcagggccagtgtcactgccagagaaggaagtgattctgttcctctctcatggacaagagaggaggaacatcaatgtgcttcttggtttgcctgctcctgtcatgaagattttccaagatttgatgcagatgtaattagggtcatacatatattatatcttatgtgattatttttctaagcttattattattagtagtagtag

SEQ ID NO: 243162 - DNA, 281 bp, Glycine max
ggtagtagtagggggagcgggatttgaaattcaaaaaaacaaggaagccgttggagatggagatggagaagacgggcgcaggagtagcactgttgtcggcgaaggaggcattcgagaagcttgagaaggtcggagaagggacatacgggaaggtgtacagggcacgagagaaggccaccggaaagatcgttgctctcaagaagactcgcctccacgaggaccaagaaggcgtccctcgcaccactctcccgcgaggtttccatcttgcgaatgctctctcg

SEQ ID NO: 243163 - DNA, 364 bp, Glycine max
gcagctcatcgaggatgtcgaaggaagtgagccagcagaggaaggactacgtagaccctccgccagcccccctcatcgacttggccgagattaagctctggtccttctacagagccctcatcgccgagtttatcgccacactcctcttcctctacgtcaccgtcgccaccgtcattggccacaaaaaacagaccggaccatgtgacggcgttggccttctcggcatcgcatgggccttcggtggcatgatctttgtcctcgtctactgcaccgccggcatttctggtggacacatcaaccctgcggtgacttttggcctgttcctggcccgctaggtgtctctcattcgtgccctgttctacat

SEQ ID NO: 243164 - DNA, 384 bp, Glycine max
ggcgtcgctccgcaccagtttcaccgcacgaatatcttgttgtttggagcgatccgagaaaaactctgtaaacatgttggtttaccaggacctccttacaggtgatgagcttctctctgactccttccgttacaaggaaattgagaatggaatgctgtgggaagttgaggggaagtgggttgttaaaggagcagttgatgtagacattggtgcaaacccttctgctgagggtggaggagaagatgagggagttgatgatgcagctgttaaggttgttgacattgttgacacattcagacttcaggagcaacccgcattcgataagaagcagtttgttaccttcatgaagaggtttatcaagaatttgactcccaagctcgatgc

SEQ ID NO: 243165 - DNA, 349 bp, Glycine max
ggaacctttgcattctattcattcaagattcagcaagtgcgttttggaagcagagaccgaaatacttcgagatggcccgtacaaagcaaactgctcgtaagtcaactggaggaaaagctcccaggaagcagcttgcaaccaaggctgcacgtaagtctgcaccaacaactggtggtgtgaagaagcctcatcgttatcgccctggaactgttgctcttcgtgagattaggaaataccagaagagcactgagctcctaatcagggaacctccgttccagaggttgggtcgtgaaattgcccaggatttcaagactgatctgcgtttccagagccatgctgtgcttgcagt

SEQ ID NO: 243166 - DNA, 335 bp, Glycine max
cactactcaggcacctcctgccccgattaccggaaggggaactgcaagaggggcgacacgtgtcagttcgtgcacggcgtcttcgaatgctggctccacccttctcgctaccggacccagctctgcaaagacggaacaaattgccgccgcagagtgtgcttcttcgcccacaccagcgaccaactccgcgtcgtgacggactcatcgtcgtcgtcgtttgtttcctctcccacttcggtgctcattaactcttcgttctccgattcttcgccgtacagcttcgtccgcggaatagttaaactggatgaggaagggtcgtattcgggtctgacccg

SEQ ID NO: 243167 - DNA, 335 bp, Glycine max
gcacaagtttgttgagatagctagaagcaataagatgaaaatgaaagtgcttgttttgtttgttgctacagttttggtagcatatgaatgccatggctcagactaccagaagttccctctccaaatgaaaactgggtttggtgggcaatacagcaatgaggtggcaggtgccagttggaggcttggcgtggaagcaaacaacgtactcaagtggcaaactgttcctgcagcttgcggagagtacatagctgactacgttctaggagaccagtgtagatcagattccagaacagttaaccaacaagcttagttcgatgctaaatccctcaaactca

SEQ ID NO: 243168 - DNA, 348 bp, Glycine max
gaccgcacagaattagggttttccaattcacagagcaacacaacgaaccaacaatggcgcagcctcagccgcagtcgcagccgcagcacgggcaagcagcgctggagcaggtgcagtgcttcggtcgcaagaagaccgccgtggccgtgacctactgcaagcgcgggcgcggtctcatcaagatcaacggctgccccattgagctcgtggagccggagatcctccgcttcaaggccttcgagcctagcctcctgttgggtaagagccgcttcaccggcgtcgacatgcgcatccgcgtcaagggtggcggccacacctcccagatctacgccatccgccagagcatcg

SEQ ID NO: 243169 - DNA, 304 bp, Glycine max
ctgggccagctaaaatgccttacactctgctctatccttctagtgaggagggattgactttcagaggaattcccaacagtatctctatctaagggctctctcattgaggttgctgtactactctgcctgtttttcaataatgtgaaataggaggaatatgattccttcatctacctacgtatggtcaagttacatttggggtggttgaatgttctcgtgtttgctgtattctgtttttataacagatcgaagagaaggcaataaaggcaatcacgcatgtttcaacaatgatagctggcatgac

SEQ ID NO: 243170 - DNA, 353 bp, Glycine max
gaaggacatcatcatggttgaccacatgaagaaaatgaagaacaatgccattgtttgcaacattggtcactttgacaatgagatcgacatgctggggctggagaactaccccggcgtgaagcgcatcaccatcaagccccaaaccgacagatgggtcttccccgagaccaatgtcggcatcattgtcttggccgagggtcgtttgatgaacttgggatgcgccacaggacaccctagttttgtgatgtcctgctccttcaccaaccaggtcattgctcagcttgagttgtggaaggagaagagtaccggcaagtacgagaagaaagtttacgttttgcccaagcaccttgatg

SEQ ID NO: 243171 - DNA, 381 bp, Glycine max
ggagaaggaaaggctgaagaacacatagagagagagagagaagtgcagaaaaaatgagactgttcgatccatggcctgttttcttcaagagagaatggaagcggaattggcccttcttggttggattcgccatcaccggaactctcatcaccaaactttcccttggtctctctgaggaggaagccaaaaagtcgaaattcgtccaggcacacaagaggtgacgatatactcaccaaaccctagcttttttctcacgcattctcgctatttttttatatatatatttccttgatgtgaatgtgcatcaatgtgcttctcgtttgtccgactatttaaatttgaaatttcaactcatttgagttcaatgcgtgtatttggtac

SEQ ID NO: 243172 - DNA, 378 bp, Glycine max
gagagagcattattcgatttcgtattgcactctctcatctcatctcccattctcattctagccaacatccccttttcttcttctcacttctctccaagttttttcttcacatttctctgcctttgatctgcacacacaacaacatccctctaaaaaacatagagggataaaataaaaacatgaagaaatttgtactcaagttagatttgccagatgacaaggcaaagcagaaggccctgaaaacagtttcaacactttcagggattgatgccatctctatggacatgaaggagaagaaattaacagtgataggaacagttgatccagtgaatgttgtgagcaaactccgcaagtaatggcagacagacgtactctcag

SEQ ID NO: 243173 - DNA, 340 bp, Glycine max
gaatggaatggataatatgaattgaagaggccgaactgtgcagaagcagaatgtgcattcactcggggaactgaaaaatgtgggtatatattcatgatcttgatgagctcttcaattgttttatgcgacaacttaatcctctttaatcagaagctgcttttgaagtctttcgtctcgcgtggttcatccaactttgtgattcagttaagcagcaaaacgaggcgtcttaacgggttcatttcaaaagcggaaaagcatagtggccattcaaggaaaagcagttggtggcagaaattctttttcgaagatgatgggaattggcttggtttgagagacgatg

SEQ ID NO: 243174 - DNA, 335 bp, Glycine max
ggttctagtgtgtgattgtttgttgttgtaactcgttcttcttcttttgttgttctgtgtttgtgtttgttttttctctcacctgaaaatgtcttgctgcggtggtaactgtggttgcggaagctcctgcaagtgcggcaacggctgcggaggctgcaagatgtagccagacttgagctacactgagtcaaccaccaccgagaccttggtcatgggagtggcacctgttaaggctcaatttgagggtgctgaaatgggtgtgcccgctcagaacgatggctgcaaatgtggaccaaactgctcctgcaacgcctgcacttgcaagtgaggtgttg

SEQ ID NO: 243175 - DNA, 343 bp, Glycine max
gatggtgggggaaggcaatattgattcgtaatcaaccccttctttgggtgttatccattggttttgagttggtggagtacacttttcgtcacatgttgccaaatttcaacgagtgctggtgggacagtattattcttgacatcttgatctgcaattggtttggaatatgggcaggaatgcatactgttagatattttgacgggaaaacatacaaatgggttggtctaagccagcagcctaacataataggaaaagtgaaacgaacattaggccaattcacaccagcacagtgggacaaagacgagtggcatccactgcttggtccttggcgtttcattcaagt

SEQ ID NO: 243176 - DNA, 340 bp, Glycine max
gaatcgcaatggcaccggaatcagaggctccccctaacttctggggccacaccccggaagaagaatactacacctcccaaggcgttcgcaacaccaagtcccacttcgaaacccccaacggcaaaatcttcacccagtccttcctccctctcaacctccaaccccaccaagtcaaagccaccgtctttatgacccacggctacggctccgacaccggctggctcttccagaaaatctgcatcaacttcgccacctggggctacgccgtcttcgccgccgacctcctcggccacggccgctccgacggtctccagtgctacctcggcgacatggacaaaat

SEQ ID NO: 243177 - DNA, 391 bp, Glycine max
ggcctccaatctattcactgtctaggaaaactccaatgaaaacattcttcattctctgttccatatactcactcttcaatccttgtgttttgaacacttcatacttacttccattgctatgatttggtgcatagaaagcctctaaatatggcagccacaagcacggataagttggaggcaggaacagtttcaagttatgacaggaaaagtgaaatcaaggcatttgatgattcaaagactggtgtccaaggactggtagaaaatggtgtaacaaaagttccacttatgttctatagtgaaaactctaatctcaatgatggcgtaaccggtgcatcatattcaaagatcagcatccccataattgacctcacaggcatccatgatgatccta

SEQ ID NO: 243178 - DNA, 336 bp, Glycine max
gagcgccaatgtttttttcagaggagtttcatcttgtaatcaaaagagtttatcttatagtaagaaatcgatgtcttactccattttaaggaacaaaacaagagaacaatagcctgacaaagggtttagccataaaatcgaatccatcattgatttgagatattgataaggtgaatactcatttctcgtcaatgctaggcataatgcgggtatagggacctaaaaaagattatcttttcgtcctatcttatgaactttaaggtgtatgaagtgtcatttcctatcttagattttaattttagtaggtagataaagagtccatttaacttaagttga

SEQ ID NO: 243179 - DNA, 349 bp, Glycine max
gagtgagagagagagaaggcaagatgtcgaagagaggacgcggtggttcggcggggaacaagttccggatgtcgctgggtctgccggtggcggcgacggtgaactgcgccgacaatacgggggcgaagaacctctacatcatatcggtgaaagggatcaaagggcgtttgaaccgtctcccctcggcttgcgttggcgacatggtgatggccaccgtgaagaaggggaaacccgatctgaggaagaaggttttgccagctgtcattgttcgccagcgcaagccatggcgccgaaaggacggcgtctacatgtatttcgaagataatgctggtgttaatgtcaatcccaa

SEQ ID NO: 243180 - DNA, 333 bp, Glycine max
gagcttctcagtcatttcaattgttccgagatcaaccttggatcaggtttagggaatggctgcaatcttagctcgaaaatcactccttgctcttcgtgcgcgccaattggctgtaagcggtcaagggctgcacagctcccaatactatggccttcggttaagtgcacactccttctctaccaaaagagaggatgaggaaagggagcaactcgcaaaggacatttcaaaggattggagttctgtctttgaacgtagcattaacactctctttctcactgaaatggttcgaggactaatgctgactctgaaatacttccttgaaacaaaagttac

SEQ ID NO: 243181 - DNA, 333 bp, Glycine max
ggatttcaaatcttggattcgattccatcacttatagttctctcttctctttcttttcctttctttctccgccgaagatggcgccgcccacgccagcagttgaaggcgcccaggcgccgcaagggcggcagcaacagccgcaaggagggtttggcctcaccggaatcatacgcatggtcgttttctggtacttcgcttccaaattcttttcccccaaaaaacctaccgaagcttccgctctcatctccaatctcgttcagaaagcacagcctctggatatgtggctttatctctccgagcacgagaagttcaatgactttggcagtgaaagtt

SEQ ID NO: 243182 - DNA, 304 bp, Glycine max
gccaagcaaaaccctaatccctctttcttcctcttcctcagtagtgcgattttcgattctcttctctgcaactatgcctaaccctaaggtcttcttcgacatgaccatcggcggtcaacctgccggccgcatcgtgatggagctctacgccgacgtgactcggagcaccgccgagaacttccgcgcgctctgcaccggcgagaagggcgccgggcggagcggcaagcccctccactacaaaggctcgtccttccagcgcgtgatggcgagcttcatgtgccagggcgggaacttcaccgccgga

SEQ ID NO: 243183 - DNA, 341 bp, Glycine max
gactctgcagcagcacctttaaacgccgaaggttcatccaatctccgaaggccttcaccggattgcaaccatgtcgaggagaaaggttagggagccaaaggaggaaaacgtgactctgggcccagctgttagagatggtgaacatgtttttggagtcgctcgcatctttgcctccttcaatgacaccttcattcatgtcactgatctgtctgggagggaaacacttgtccgcatcactggcgggatgaaggttaaagctgacagagatgaatcatctccatatgctgctatgcttgctgcgcaggatgttgctgctagatgcaaggaactgggcataactg

SEQ ID NO: 243184 - DNA, 344 bp, Glycine max
attcatctattgctttacatgctcgtgagatgaacagagagtcaatcctactgaagaagttgcagaaagcttgctctgtcctggaaatatctggccctcccatggttcattttgaaaatgagtccttccagaatcacctcaactttctacaaaatatacatctccatgatcattttgtgcatgatgagatagagctagaacaagagttagttgctgtgtgtgaaaccgtattggacatatagctaaattgtgctggttccagttccacttttcacaagtctgataccatgccagcgccacatcgaaaactccctctgagctctgcaaagaaggaagagatagct

SEQ ID NO: 243185 - DNA, 341 bp, Glycine max
gacgctatgttaatgtagttgtgtgtgttgtgttgcacactctccacactccacagagagagagaaaagggtcaaatagttacaacctttgcttctttccctccatagtcccattttttttatttttttttccattcaacaacacaacacaacaccgcaacctcagacagacaaacatcatggacgcaggttacaatcctcgtaccgtcgaagaggtctttagggatttcaagggtcgcagagctgctttgattaaagccctcaccactgatgttgaagagttctaccagcagtgcgattccgagaaggaaaatctttgcctttatggatttccaagtgag

SEQ ID NO: 243186 - DNA, 195 bp, Glycine max
ggcacttcaattgcaatcaaattagttcattctctttgcgcagttccctagctcgcctttcaagatgcagatctgcggcgagaccctcaccggaaagaggatcacccttgaggtggaaagctctgacaccatcgacaacgtcaaggccaagatcgaggagacggagggaattcccccggatcagcaacgtctcag

SEQ ID NO: 243187 - DNA, 344 bp, Glycine max
gaattcagagagagcgagacggcagcacgcgcaaaaatggtgaagtttctgaaaccaaacaaagccgtcatcgtccttcagggacgctacgccggcaaaaaagccgtgatagtgcgaaccttcgatgaaggcacgcgcgagcgcccctacgggcactgcttggtggcagggataaagaagtaccctgcgaaggtgatcaagaaggattcggccaagaagacggccaagaagtcgcgtgtgaaggcgttcgtgaagctcgtgaactaccagcacctcatgcccacgcgctacacgctcgatgtcgatttgaaggacgcggttacccccgacgtgctccaagccaa

SEQ ID NO: 243188 - DNA, 322 bp, Glycine max
gaagagggacagtgcagataagttttgatgagaattctatttccattaggtccatcttgatttggggttattagcttttgttagttgagtgtctgtttttcttgtttgctttaactggtactacttctgctccctagttatcctacttgtttgctttgttccttgtttttagtagcttcggttagctgtgtctcaccatgctttgttactctccattttcatatttattttttggttattgttatgaacctagaacaattggatgcatttgtgttttttacatgtggttggctaatgctgttaatattttatatcttttgac

SEQ ID NO: 243189 - DNA, 309 bp, Glycine max
gatagcatatcatgaggcgttcgcaacttgcacactcaattttctcactcaagcgtcgttcaaggctcgtacaaatgaagcggttcgcaagtctacgggtgggaacgatcctaggaagcacatcaccaccatggctggagtaaactctgtatctacgaccgattgagtcaagacgactcatcactatcttcttgcaactgttgctcttcgagagatcatgggctaccaaaatagcacagagcttcggatgcgcaagctcgactttcagcgtcctgttcgtgagatcgcgcaagaagtcaggactgattt

SEQ ID NO: 243190 - DNA, 319 bp, Glycine max
  unsure (1)..(319): unsure at all n locations
ggaatcagaagaagcgagcgaagatgtcgggtcgtggaaagggaggcaagggtttgggaaagggaggagccaagaggcacaggaaggtgcttcgtgacaacatccagggtatcaccaaacccgcaattcggcgtttggctcgcagaggtggtgttaagagaatcagtggtctcatctacgaggagacacgtggcgtcctcaagatcttcctcgagaacgttattcgcgacgctgttacctacaccgagcacgctagaagaaagaccgttaccgctatggatgttgtttatgctctcaagaagcanggcangactctcta

SEQ ID NO: 243191 - DNA, 374 bp, Glycine max
gaaagaaaggagagctggaatcacatggacttgtctttctctttctgggtctccattaaatttttcttctctcccttctttctctctctctctctctgaccattctcttcttcttctttttcttctcctctctctctctcccctccgccatggctgaggataaggagatgtctacctctgtcatcaatgggaatgattccctaactggtcacatcatatctacaactattggaggcaaaaatggggaacccaaacagactattagctacatggcagaacgggttgtaggaactggatcatttggagtcgttttccaggcaaaatgcttggaaactggggaggcagtggcaattaaaaaggttttacaagacaga

SEQ ID NO: 243192 - DNA, 387 bp, Glycine max
ggcagcaacagcagcattcactgaaagcactcagtagggcttgcggtttcagagtttgtgacgcacgcatccatggccaccaccaccaacgccgccgcagccccgccgcgccagctctcccagaaggaagccgacatccagatgatgttagccgccgacgtccacctcggcaccaaaaactgcgacttccaaatggaacgttacatcttcaagcgccgcaacgacgggatttacattattaaccttgggaagacatgggagaagcttcagttagcagctagggttattgttgcaattgagaaccctcaggatatcattgttcaatccgcaaggccttatggtcaaagagcggttctgaagtttgctcagtacactggtgctcatgct

SEQ ID NO: 243193 - DNA, 325 bp, Glycine max
tccacagtttatactgatggttgctgcaagttcagttggagaggaactcttttacagggctgctgttcagggggcattggctgatatatttttacgaggcagtaatcttataacagatgttcagggaatggcatcattgaccggtgtgctgcctccatttgttccatttgctcaggcatttgcagctgtacttactgctgtccttactggttctctctattacatggctgcctctcctaaagatcctacttatgttgttgcacctgttttacaatctcgctctggtcgccaagatttgaaaaagctatttcaagcctggtatgag

SEQ ID NO: 243194 - DNA, 327 bp, Glycine max
ggcaatagagactagagaagagagaggtgttggtgccctaatcgtgagaagaaaggaaagggaaaagaggaaaatggtgtgcataaggaaggcgacggtgaaggaccttctggcgatgcaggcgtgcaacctgttctgcctccctgagaactaccagatgaagtactacctctatcacatcctctcctggccccagctcctctacgtcgccgaagactacaacggccgcatcgtcggcgacgtcctcgccaagatggaggaagaaaccaccgactgccacggccacatcacctcgctcgccgtcctccggagccagcgggagctcgg

SEQ ID NO: 243195 - DNA, 333 bp, Glycine max
gagtgagagagagagaaggcaagatgtcgaagagaggacgcggtggttcggcggggaacaagttccggatgtcgctgggtctgccggtggcggcgacggtgaactgcgccgacaatacgggggcgaagaacctctacatcatatcggtgaaagggatcaaagggcgtttgaaccgtctcccctcggcttgcgttggcgacatggtgatggccaccgtgaagaaggggaaacccgatctgaggaagaaggttttgccagctgtcattgttcgccagcgcaagccatggcgccgaaaggacggcgtctacatgtatttcgaagataatgctggtg

SEQ ID NO: 243196 - DNA, 353 bp, Glycine max
atccggtggtaaaaaaacacataaggggggacgggttgaaagcgatgccttgaagactgaactggtgattacttgtgccagatatggacagacatccaaatttaactcagtgtgcatgcagcacgtagctcacatagaggaacttctcggatgataacgttggattccatgtgatgaatgttgctcggaacgatatcaggcgttgtgatgttgcctcaacctcataggactataatggtagcgatgctgcaaactacgatgtacaagttaacaacagaagctcatactgatgatactgccaatggatatgttcgtgcgcgtgactgccaaacatctcaaaatggatgcacgtt

SEQ ID NO: 243197 - DNA, 397 bp, Glycine max
gatatctgtgattcatcaaatttgtgtttccccgaccccgattgcaagcaatggacgccttcaattccttcttcgattcaagaaaccgatggaattacgatactctcaaaaacttccgtcagatttctccggtcgtgcagaatcacctgaagcaggtttattttactctgtgttttgccgtggttgctgcggctgtcggggcttaccttcatgtcctcttgaacattgggggttttcttactacagtggcatgcatgggaagcagcttttggttactctccacacctccttttgaagagaggaagagggtgactttgttgatggccgcatcactgtttcagggttcctctattggacccttgattgatttggctattcatatcgattcaagccttat

SEQ ID NO: 243198 - DNA, 328 bp, Glycine max
gatatcagaagcgcagacctaagatttcggccgtttgctccccaatgaaacaagcacactgtttcttttgaaatcagctagaaaagatgtcaggtgaagatgtatctgttgcagctgaggcacctgctgcttcaattccaggtgagccaatggacatcatgactgctctacagcttgtgctgagaaaatctctggcctatggtggtcttgcacgaagtcttcatgaacgtgctaacgtgatcgagaagcatgctgcacagctctgcgttctagcagaagattgtgaccaacctgattatgtgaaactggtgaaggctctttgtgcaga

SEQ ID NO: 243199 - DNA, 300 bp, Glycine max
gagagaagagagatggatccagacgcgttggcacacgcactcctggcgcactactacagcaccttcgacaccaacatgaacagcttaacgaatctctaccacgatggttccatgctcactttcgaacggcacaagatccatggcgcttccaacatccttgccaagctcacctccctcacttttcagcagtgccaccactcaatctccatcgtcgactgccagccctccgtgcttcaactccggcatgctcgtcttcgtcagcagaaaccttcagctcgccggcgaacagcacactctcaa

SEQ ID NO: 243200 - DNA, 389 bp, Glycine max
ggcacaagtttgttgagatagctagaagcaataagatgaaaatgaaagtgcttgttttgtttgttgctacagttttggtagcatatgaatgccatggctcagactaccagaagttccctctccaaatgaaaactgggtttggtgggcaatacagcaatgaggtggcatgtgccagttggaggcttggcgtggaagcaaacaacgtagtcaagtggcaaactgttcctgcagcttgcggagagtacatagctgactacgttctaggagaccaatatagatcagattccaaaacagttaaccaacaagcttatttctatgctaaatccctcaaactcatcaacaaagatgtctttgtcttggacgttgacgacactactctctctaatctc

SEQ ID NO: 243201 - DNA, 345 bp, Glycine max
ggcgagcgagggtttgtgaacatgacgacgattcgcaggttttgctgcaacgatcttcttcgctttgccgccgtcaatctcgaccatctcaccgaaacattcaacatgtccttctacatgacctatcttgcaagatggcctgactatttccacgttgccgaatgccctggaaatcgaatcatgggttacattatgggtaaagttgaggggcaacgagaatcttggcatgggcatgtaactgcggtgacggttgctccagagtatccgaagcagcagttagccaaaaaacttatgaatctgctggaagacatcattgacaatattgataaggctttttttgttgat

SEQ ID NO: 243202 - DNA, 366 bp, Glycine max
caggttgatctctttggacaagatttaatcggtgacctcatggatgctccaacatctgttcctgtagaaaagccagcaactagtaatgtaccagaggttgatctttttgcagatgcagcatttgtatcagcagaacctcatgtggacaaaggagccatttctcaaccacaggctgaggtggatctattttcttcacaaccagccattcctacagttacaccaacagttgatttgttttccattcctgaaccggcagtgcagccagacaccaagtcagagaagtctgttcctatgaataacagcactattgatccctttgctgctgttcctcttaataattttgatggatctgatatttttggtgac

SEQ ID NO: 243203 - DNA, 321 bp, Glycine max
tggagagatggattgatgaaaattcacatgccaggctacttcagctcgatcagcaagggtgtggcaaccattatggcctcttactccagttggaatggagtaaaaatgcatgctcagcatgatcttattactggcttcctcaagaatactctccatttcaagggctttgtcaattcagattttgagggtcttgataggatcacctctccacctcgtgcaaatatcacttactcaattgaagcaggagtttctgctggcattgacatgttcatggttccaaagcattacacagaattcatagatgttctaaccatgttggtg

SEQ ID NO: 243204 - DNA, 302 bp, Glycine max
tggacagatggattgatgagcactcacatgccatgctacttcagctcgatcagcaaaggtgtggcaaccattatggcctcgtactcgacttggaatggactaagaaatccatgctcagcaggatcgtattactggcttcctgaataagactctccatttctcgggctttgtcaattcagaatttgagggtcttgagaagatcacctctccaactcgtgcatgtaacactgagtcacttgagcccggagtttctgcaggcattgacatgttcatggtttcaaagcattacacacaactcatag

SEQ ID NO: 243205 - DNA, 367 bp, Glycine max
gtctctgtaaaaactcttgtctttctctctctcccgaagataaggcagagaagagaaggagagaggcttgtacctggagagaaaagaggagacaataatacatggggaagcagggtctaaacacggtggagcaacaatctgtggcaccgacagcatccaagtttccattgagcttttgggaagccacggtggcttcaacggtggcgctggtttttgcggtgggtcttctcggcgtgtacctcaccatgcccgattccgattacagcttccttaaactcgctcgtaccctcgaagaccttcaactcctacgagatgaccttgagagctatacaagtgactacactgcacaagtcttggtggggtactg

SEQ ID NO: 243206 - DNA, 361 bp, Glycine max
tcccggctatgctgacaacatatgtgaaagtgtattctacttcagttgcaatgcttcttacggcagttgtttctgtgttcctttttggcttccatctctcccttgccttcttcctgggcacagttgttgtctctgttgcaatttatctgcactctgctgggaagatacaaagataactatggcttctgtcttctgtttttcctatactggatttttttattcattgttgtttagccttgagcaaacgaatacatattagttcactgtaatagtgtgtgtatctcaacattcaacaaggatagaaccaggcttaggttcgattgccaaaaaaaaaaaaataaaaaaaaaaaaaaaaccggcg

SEQ ID NO: 243207 - DNA, 385 bp, Glycine max
gatccacatcaaaacacaagcaaatcctagaaattaagctcattgagaaacataaactatcttgacaaaatgaaacaagttttcgtagcattcttagctctgcaagttgtgttagtccttacaattatggctgcagatccagcagggaagggctatgattgtgaaaaggcaaaaaggtcactaaagtcttgcatggaatacctcactggtaatgttgatagcccttcagctgcatgttgcaatggtgtcaaggaattgaaagcatcagcaccaacaatagatgaaaaaattgctgaatgtcagtgcattgaagaagcactaactcccattcctaacttcaggcaggacagagccattgcacatcctaaggaatgtggtgttgatg

SEQ ID NO: 243208 - DNA, 385 bp, Glycine max
  unsure (1)..(385): unsure at all n locations
ggttctagtgtgtgattgtttgttgttgtaactcgttcttcttcttttgttgttctgtgtttgtgtttgttttttctctcacctgaaaatgtcttgctgcggtggtaactgtggttgcggaagctcctgcaagtgcggcaacggctgcggaggctgcaagatgtacccagacttgagctacactgagtcaaccaccaccgagaccttggtcatgggggtggcacctgttaaggctcaatttgagggtgctgaaatgggtgtgcccgctgagaacgatggctgcaaatgtggaccaaactgctcctgcaacccctgcacttgcaagtgangtgttgggagagcaagcttcaaacatagataccccttaattaggaataatgataaa

SEQ ID NO: 243209 - DNA, 381 bp, Glycine max
cccaagaggaatgctagagattctcatgtgccggttttggctccacttccaattggctttgctgtgttcatggttcacttggcaaccatcccagtaacaggcactggcattaaccctgctaggagtctaggagctgctgtcatgtacaaccaacagaaggcctgggatgaccattggatcttttgggttggaccatttattggagcatccattgcagccttctaccaccaattcatcttgagagcaggtgctgctaaggctcttggatcattcaggagcaaccccgctatttgagtcaatttaatttcttcttcatgatgagttcaaaatgaagatgaaattataagaacaatatcaatattgtcaataatggcaattgct

SEQ ID NO: 243210 - DNA, 362 bp, Glycine max
  unsure (1)..(362): unsure at all n locations
gacacgagtaaactggcacatatcttcccttttccttccttcctctcccaaaatcaaaacccctctcctgtgttgttgtgagagaaaaacacagagacagagacagagggtagtagttgagttgagcgagtggggggaagtagcgaagaatgagtatgttgaaaggaggtgaaatgggtggagaagganggagagaaggggattgggagtgcagcagttgcaacaacaggaactacgccttcagatcattctgcaacagatgcaagcaaccccgcctcctcgtcgattccaaaacccccgctgattccaagtggctcncccgtatcggcgattggatcntgcacggttgcactaacaacaat

SEQ ID NO: 243211 - DNA, 341 bp, Glycine max
  unsure (1)..(341): unsure at all n locations
tcagaaaggaacttccactgagaggttttgatgatgaaatgagagctgcagtggcaagaaatcttgaaagcangggaattaatttgcatccaaggaccaaattgacacagttgatcaaaacagaggatggcattaaagttactacagatcatggtgaagagctgattgcggatgctgtactgtttgccactggtacggctcctaagtctaagacgctgaatttagaaactgtaggtgttgagcttgacaacactggagcaataaacgtggatgagtattcccgcacaagcatacctagcacatgggctgtgggtgatgtcacaaaccgaatgaatctaact

SEQ ID NO: 243212 - DNA, 377 bp, Glycine max
  unsure (1)..(377): unsure at all n locations
agcccacgcgtccgttacgctgccaaaaaacacaaaaagggaaacctccggtggttcccaaccgcctccggcaagggtccggaaacaaaaaagggtccggtttcctttccccaatagggcaagtggaagaagaagcgtatgangaagctgaagangaagcgcccaaagatgagacagagatccaagtagtgcgttaaacctagtttgtttccgttgcttttacaattgcttatgttgtcaaatangacacccagttgttagtggcactggtctctcctttttgatgttttgatacattttgttggattttatttcgtcttatgttcttagctgaaaacaatgctgttactgcgtttgcgaatcaacangatatcttg

SEQ ID NO: 243213 - DNA, 472 bp, Glycine max
taacatcgcgcgtcgaggtataggttacgaattcccggctcgacccacacgtacgtacggctgcgagaagacgacagaagggcaacaagaagaacctagctgctagtgataatcagggaaatgacaactcagcatctttgtctggcaagaaggttattgttcctggtcctgcacaggaaattcccaagaggagcatgtgttgtcagtaatcccaactttatttatgatttataatttgtttaaatttactagattttcatggttatgtgttcctatcaccaatttttaatgatttggtgcatttcctttcgaaaaaaaaaaaataaaatcaaaaaaaaaaagcggccgctctagaggatccaagcttacgtacgcgtgcatgcgacgtcatagctcttctatagtgtcacctaaattcaattcactgggcgttcttttaacaacttcttgactgggaaaaccctgccgttac

SEQ ID NO: 243214 - DNA, 377 bp, Glycine max
  unsure (1)..(377): unsure at all n locations
agggaaacatatgtcaaggtttattttgagaattttgccaattgaaatcgcatgttatgcttcaaaggaggaaatttcaagagcaatcaagcctcttgtggaacagtactttcctgtggaaactcaaaatccacacaagtttgctgtactgtatgaggcacgggcaaatactggtgttgacaggatggaaatcatcgatgctgtggcaaagtcagttcctggaccccataaagttgatctaaaaaatcctgataaaactatagtagttgaaattgccaggactgtgtgcttgatcggggtcatcgagaaatacaaggaactttccaagtataatctgaggcagttaacatctcgtanagactgagccttcaggcaac

SEQ ID NO: 243215 - DNA, 341 bp, Glycine max
cccaggcgtcaggctgcgagaaaacgagagacggggagatgaaatggtatagtacagataaaattcaaggcgaggaacactacactattgccgacaccatgctgaagtctacccatgagaatggcatttctgtgagaggtcataacattttctgggatgatccaaaatatcagcctgattgggtgaggactctatcagcctgcggatttaacgaaggcagcagcaaagagaatgaaatctgtgctttcaagatacattggagaactgattgcatgggatctgatgaatgagaacctccatttccacttttacgatgacaaattcggtgaaaatgtctctgc

SEQ ID NO: 243216 - DNA, 380 bp, Glycine max
gacaccatgaacatcaatggactcgcaagacaatcactcatcaatgcaggtggcattattgagcaatcatttctgcctgggccatttgctgtggagatgtcttcggcagtttacaaggggtgggttttcactgatcaagcccttcctgcggatcttatcaagagaggaatggcagtggaggatccatcccctccctatggccttcgccttgtgatagatgactacccttatgctgttgatggactagagatatggagtgctatccagacatgggttaaggactacgtctccttgtactatgccacggatgatgcagttaagaaagactcagaactccaagctttggtggacggaaactgttgagaagggtcacggtgact

SEQ ID NO: 243217 - DNA, 299 bp, Glycine max
gaaaaaggaacggtggagatggaggctagcatcatggatggtccaaaacgacgatgcggcgccgtttcgggtcttaccaccgttaagaacccgatctcgcttgctcgtttggttatggacaaatccccgcattcctacctcgccttctccggcgccgaagaatttgctaggcaacagggtgtggaggttgtggacaacgagtactttatcacacctgacaacgttggcatgctcaagctggcaaaggaagcaaacacaatcctgtttgattaccgaatcccaacatcggggtacgagac

SEQ ID NO: 243218 - DNA, 385 bp, Glycine max
  unsure (1)..(385): unsure at all n locations
gaaatgagaatgtagatggcttgaatgaactgaacagatgccctaaggccaaaggtggcaaaaaccacaaaggttttgcaccaactattttggcagtcaaatggcagaacttgcctgcaagtttacgcaccgatgaagataaagacaagactagtaccgttccggaccgtgatcagtataacaaagctgattttccataataatatactgatgctaaattttttgtcatcaagtcttacagtgaggatgatatccataagactattaagtataacgtgtgggccagtacccataatggcaacaagaatcttgatgctgcatatcatgacgcacagcagaaacctgntggctgccctgtttttctctttttctcagttaataccag

SEQ ID NO: 243219 - DNA, 389 bp, Glycine max
gacacattgtgagtatcaacaagaatactcataatataggtagcatatagagctatagttatattgatattgctatttgttaagctcttatttcctcggccatggctaataatgaacgtgatctcttctcggcggagattgtgaatcgtggaattgaaccgtcgggacccaacgctggctcgttgacattctctgtgagggtgaggaggcgcctaccggattttctgcaatcggtgaaccttaagtacgtgaaattgggttaccattatctcataaaccatggcatatacttgttcaccatacccgttcttctcgtggtgtttagtgctgaagttgggagcctcagcaaagaggacctatggaagaagctttgggaagacgcgcgttac

SEQ ID NO: 243220 - DNA, 388 bp, Glycine max
ggaacctttgcattctattcattcaagattcagcaagtgcgttttggaagcagagaccgaaatacttcgagatggcccgtacaaagcaaactgctcgtaagtcaactggaggaaaagctcccaggaagcagcttgcaaccaaggctgcacgtaagtctgcaccaacaactggtggtgtgaagaagcctcatcgttatcgccctggaactgttgctcttcgtgagattaggaaataccagaagagcactgagctcctaatcaggaagcttcctttccagaggttggttcgtgaaattgcccaggatttcaagactgatttgcctttccaagagcaatgcggtgcttgcattgcaagaggctgctgaggcataccttgttgggctctttg

SEQ ID NO: 243221 - DNA, 349 bp, Glycine max
gactgatctgcgtttccacagccactccgtgcttgcattgcaagaagctgctgatgcataccttgttgggctctttgaggacactaacctgtgtgccattcacgccacgcgtgtaaccattatgcccaaggatattcagctggcaagaaggattcgtggtgagcgtgcttgacttggtggttggaaacatgaagatgattggtggctgcagttggtgtatttgtttttcagattccattttttattcaatatatggcgttgttagggatggtaagttttcagctggtagtatcactaactggtatacatgcacatactgctaagtgtccgtgactgtgttttcttcctt

SEQ ID NO: 243222 - DNA, 338 bp, Glycine max
gagacatagcgtcaccgtcagttgaatgaaaactgggctcgctgacactgcagaagcggctcgccgcgagcatgctcaagtgtggcaaaggaaaggtttggcttcacaccaatgaagtcaacaacatctccatgaccaattctcatgattacatagtgaagctggttaatgataagtttaacatcaggaaccacaccacgattcagactctctcacgtacacgtcgaatgaatgagtccaacacgaaaggacgtcactctggatacagtactcgtaacggtacaacggaagcaaggcttcccactaaacttccatggatgatgaaaacgcgtgtgctc

SEQ ID NO: 243223 - DNA, 349 bp, Glycine max
gactcaccacttcaaaacactcataacacaaagcacaaagcaaagctcatccttgagttaaaaaatggcagcagcttcttccatggctctctcatccccatccttggctggcaaggccgtgaagctgggcccatcagccccagaagtgggaagggtgagcatgaggaagaccgtcaccaagcaggtctcctcaggaagcccatggtatggcccagaccgagtcaagtacttgggcccattctctggcgagcccccgtcctacctaaccggtgagttcccaggcgactacggctgggacactgctgggctttccgcagacccagaaaccttcgccaagaaccgtgaactc

SEQ ID NO: 243224 - DNA, 392 bp, Glycine max
ggccattgttgttgctattatcatccgcagctgcttttattcgcaccgcaaacagtgagccatggccgtcggaaagaacaagcgcatctccaaggggaagaagggtggcaagaagaaggcagctgatccctttgccaagaaggattggtatgacattaaggctccttctgtttttcaagtgaaaaatgttggcaaaaccctcgtctctcgtactcagggtaccaagattgcttctgaaggactcaagcatagagtgtttgaggtctccttggctgatcttcaaggggatgaggatcatgcattcaagaagattaggttgagagctgaaaatgtgaaaggaaaaaatgtcctgacaaattcctggggaatggatttcacaacagacaagctga

SEQ ID NO: 243225 - DNA, 392 bp, Glycine max
gccccattcccaaaatttctcattctccctttcctctccgaaccctcgatcactctcacgcgctcctatattcgctcctccaccgtcgctctctcgaacaaccacaacaccatcttcatcacatggcaaacgcagcatctggtatggcagtccatgatgaccgcaagttgaggtttttggagctgaaggcaaaaaggacacaccgtttcatagtttttaagattgaggagcagcagaagcaggtcattgtggagaagcttggtgagcctgcccagggctgtgaagatttcactgccagccttcctgctgacgagtgccgttatgctgtttatgattttgagtatctgactgaagggaatgtccctaaaagcagaatttttttcattgcgtgg

SEQ ID NO: 243226 - DNA, 292 bp, Glycine max
taatcccagtggatgtctatttgccgggctgtccacctaaaccggatgctattatagatgctataacacaacctcgtaagaaaatatctcgagaaatatatgaaaatcaattgagttctcaacgagagaatagatgttttacaaccaaccacaagtttcagattgggtacagtactcatactggcaattatggtcaagaattattctagcaactggcatctacttcagagataccatctgacacattttttttaaagtacaataggaaatagcaattcacttttttttaatt

SEQ ID NO: 243227 - DNA, 374 bp, Glycine max
taatcccagtggatgtctatttgccgggctgtccacctaaaccggaggctattatagatgctataacaaaacttcgtaagaaaatatctcgagaaatatatgaaaatcaaatgagttctcaacgagagaatagatgttttacaaccaaccacaagtttcatattggatacagtactcatactggcaattatggtcaagaattattctatcaactgccatctacttcagagataccatctgacacattttttttaaagtacaataagaaatagcaattcctttttttttaatttcatcataatgtaaataggaaagactaataccaaattcattaaaaaattcaggagaagcaaaaaaatgcaaggtcgtttgtc

SEQ ID NO: 243228 - DNA, 390 bp, Glycine max
ggggcgaggtagccagagagtgatacaatacagagtgcgttgttgctccttcgccacaactccctgccaacatgggtatctccagagattctatgcacaagaggcgtgccactggtggcaagaagaaggcatggaggaagaagagaaagtatgagcttggtcgccagcctgctaacactaagctgtcaagcaacaagacagtcaggaggatccgggttagaggtggaaatgtgaagtggagggcactgagattggatactggaaattactcctggggaagtgaagctgtaactcgcaagactcgtatactagatgtgggttacaatgccctcaaacaacaagcttgtgcgtactcagactcttgtaaaaagtgctattgttcaggttgat

SEQ ID NO: 243229 - DNA, 377 bp, Glycine max
gggaggagtttcttcgtggatcttaccctcttgtttgcatatattcacattcttctgtctccgcgtcatctccttctgaactaagaaatggggttgtctttcaccaagctttttatccggctctttgctaacaacgacatatgtattcacatggtaggtcatgatgcggctggtaagattatgatcttgtacaagctcaacctgggatacattgtcacaagtattctcacaattggattcatgtgtgtacactgtgcattatgagaatattatctttacagtatgggatgttggtggccacgataagatgcgtcctttatggatacactacttccacaacactcacggtgctatccctggtggtggatatcatttat

SEQ ID NO: 243230 - DNA, 378 bp, Glycine max
ggttctagtgtgtgattgtttgttgttgtaactcgttcttcttcttttgttgttctgtgtttgtgtttgttttttctctcacctgaaaatgtcttgctgcggtggtaactgtggttgcggaagctcctgcaagtgcggcaacggctgcggaggctgcaagatgtacccagacttgagctacactgagtcaaccaccaccgagaccttggtcatgggagtggcacctgttaaggctcaatttgagggtgctgaaatgggtgtgcccgctgagaacgatggctgcaaatgtggaccaaactgctcctgcaacccctgcacttgcaagtgaagtgttgggagagcaagcttcaagcagagatagcccttaattaagaataa

SEQ ID NO: 243231 - DNA, 384 bp, Glycine max
  unsure (1)..(384): unsure at all n locations
ggtacgcagcttcatccctaacgcgtgcatagcagagtcagagacagagacgcagccatggggcggagacctgcgaggtgttataggcaaattaagaacaagccataccccaagtcacgtttctgccgtggtgttcctgatcccaagatcaggatttatgatgttggtatgaagaagaagggtgttgatgagtttcctttctgtgtcgatctggttagttgggagaaggaaaatgtttcaagtgaggccctggaagctgctcgcattgcttgcaacaagtacatggccaaatttgctggaaaggatgctttccacttgagagtcagggtgcacccattccatgttcttatgattaacangatgctttcgtgtgctggtgctgat

SEQ ID NO: 243232 - DNA, 344 bp, Glycine max
gactaatgaaatgtacaatggttgttctgatgattctgcttatgggagtgatgagaacagcactgacactgattcttatcctgctccaaaggctcacagcaacaggaacaacctcagtgtccagaaggggaagaagaagaagaaattgaagtcaaagaaaagcaaggcacatgagtgtccaatttgcaacaagattttcaggtcaggccaagccttggggggtcacaaaaggtcccattttgttgggggttctgaggaaaacacacttgtgataatgccaagtgctcctcctgctgctgttccttgcctcattgatctcaatctaccagcaccggttgatgaat

SEQ ID NO: 243233 - DNA, 380 bp, Glycine max
gacacagagttgcaagagaaagataaaagaagatggcgactcttgattccgacgtgcctatggttcccgccggcgagccctcgagcagcgccggtccttcttccaagaagcccaagcgcttcgagatcaagaagtggaacgccgtcgctctctgggcttgggacatcgttgtcgataactgtgctatctgccggaaccacatcatggatctctgcatcgagtgccaagccaaccaggctagcgccactagcgaggaatgcactgtggctcggggagtttgtaaccatgcttttcacttccattgcatcagtcgatggctcaagactcgtcaagtttgtcctctagataacagtgagtgggagtttcagaaatatggccac

SEQ ID NO: 243234 - DNA, 317 bp, Glycine max
aggggagagagcagcgagtgttgtgttggcaattaggacagagacgatggatgccgctcaagttggagggaggagccactgtcggttcccttctccgatgtgttgcaatttctcactgttcacatcgctggagccgaagatcactagaggttcttcagctggaatgtgacgtatggtgacatttaaccacttggtgttcaccaaacgggaatattgataaacgggcaaatcttatatccagatattcattctgttaccaacgacatcctcatcatcaatgtcttcaacagcttggctgagccctttcttctctcttg

SEQ ID NO: 243235 - DNA, 380 bp, Glycine max
gattcctttttggtgaaatataagttttcctctttagttgttgacttcttgtttatttttctgattaatgagaaaaatccactttggttgttcacttgtatatgtatctcagtctcaggtggtggtgcatcgctgagttgtgtgagagtgagaaagagagagtgtgtgtgtgtgcagaagatgtggccattcagcagaaaaggggcttctggtttttcatcatcatccacggcagagcaagtcactgaaggaattgatggaactggtctcactgccattgtcacaggagcatccagtggtattggcactgaaactacacgttgtccttcaattgcgtggtgtccatgtgattatgggtgtgagaaatatgcttgctgcta

SEQ ID NO: 243236 - DNA, 342 bp, Glycine max
  unsure (1)..(342): unsure at all n locations
gggtcctttgtattctattcttcaagattcaggtactgcgtttcggaagcagacacagatggctcgtacgaagcaaaccgctcgtaagtccacaggaggaaaggctcctaagaagcagcttgcaaccaaggctgcacgtaagtctgcaccaactactggtggtgtgaagaagccccaccgttatcgtcctgataccgttgctcttcgtgagattaggaaataccataagagtaccgagcttttgatccggaagctccccttccaaaagctggttcgttaaaatgctcaagacttcangactgatctgcgtttccagagccacgccgtgcttgcattgcaaga

SEQ ID NO: 243237 - DNA, 372 bp, Glycine max
ggaatcgtggaatcttcatgcaatgcttcttcccattttcacactttgttaacacttaattttctgatcccaatctcgttaagcttcttagcaacaacacaaaatgagcgccatctctttcagttccatccattttcacacttggaaaaaccccaaggggtttggaaaggtgagaaaacaaccacatgggaagctacttgtaaagtgttccagccagagtgggaacccatcttcttcgcaaaatgcggttcgtgttggtgttgttggagctagtggctacactggttctgaagttctgcgactcttggcaaatcatccacagtttgggattgcactgatgactgcggataggaaagctgggcagccaatctc

SEQ ID NO: 243238 - DNA, 385 bp, Glycine max
gacaccacctattgtgtatccacctgtagtccctgtgccaccattaccacccattgtgactccaccaaaccctccaagtgaaacaccatgtccaccaccaccaccaccaccagtggtgccatatccaccaccagcacaaccaacatgccccattgacagcctaaaactgggggcatgtgtggatgtgctcggtggcctcatacacattggcataggcagcagtgccaagcagacatgttgtccagtgcttgcagggcttgtggacttggatgctgcagtgtgtctctgcacaaccattacggctaagattctcaacatcaacatcatcatccctattgctccttcaccttccattgactgtggcaagaccccacctgatggattc

SEQ ID NO: 243239 - DNA, 375 bp, Glycine max
gagatcgggagggttgctcaaatcaactacggcaaggaatatggcaggctcgtcgtcatcgtcgacgtcattgaccagaacagagcacttgtcgatgcccctgatatggtgaggtcccaagtcaatttcaaaaggctttcccttaccgacatcaagattgacatcaagagggtccctaagaagaaagatcttgtcaaagccatggaggatgctgatgttaagaacaagtgggagaagagttcatggggtagaaaactcattgttagaaagagaagggcatccctcaatgattttgataggttcaagataatgttagccaagatcaagagggcagcggttgtaaggcaagagcttgctaagctgaagaagagcgct

SEQ ID NO: 243240 - DNA, 393 bp, Glycine max
gaccgttccatttctcaacaacttctgctacttcctactccaaccgcacttctgctccgcaattatcatgggcaaggtcaagatcggaatcaacggatttggaagaattggccgtttggtagccagagtggctctgcagagagacgatgttgaactcgttgccgttaacgaccctttcatcaccaccgattacatgacatacatgtttaaatacgacagtgttcatggacactggaagcatcacgatgtcaccgttaaggacgagaagacccttctcttcggtgacaagccagtcactatttttggacacagaaaccctgaagagatccatgggggtcaactggagctgacatcattgttgagtccaccggagttttcaccgataaggacaag

SEQ ID NO: 243241 - DNA, 379 bp, Glycine max
gacgattcaaaccctaatcccgcagttacaagtttctatcactgtcactgttctcaagtttctttaccatctttcaaattccattttcttcgaagtcatacacttttcactaaaataaaaatcaattaatcggagcagcatgttagggtttcgaaaagccaatttcagagcaggcttgaaaccctagattccacaaatccatgccagcttgatctcgcggtgcttccgtcaatggcgatcatcggcggtgcgcttcgccaggcgttcatgccgaagcgcgagtacgagagcctcagagaagaagacaaggcgtggggtaagcttcagagaaccgtaacggtggcttccgtggccgtcatcgtgctcgcaatcgtcgtgt

SEQ ID NO: 243242 - DNA, 395 bp, Glycine max
gatcgtcgtcgtggtcgtgtcgcagcaaaaccaagccacccactaacttgtttggtccaagacatggctctgatcctgcatgctaccaaaacaaacaagaatgccttcaagactctgattgcggcagagtacagtggcgtccaagtggaattggcccctaatttcgagatgggtgtctctaacaaaactcctgaatttctcaagatgaatcctattggaaaggttcctgttttggaaacgcccgatggtccagtctttgagagcaatgcaatcgctcgttacgttgctcgactaaagggtgacaacgctttgttctcatcctctgccatttgataaggccacaattgaccagtggattgatttttcatccttggagatcgatgctaatctcatga

SEQ ID NO: 243243 - DNA, 372 bp, Glycine max
ataggaatggattattggggtacaccagcttcatccaacattcctgcacttggcagaaaggttccatctactgcagttgctggagggatggttaccgttggatctcgggatagtgctcagtcacaactttggctacaggatgaaagagagcctaaaaggcaaaggcggaagcagtctaacagggaatctgctcgtatgtccaggttgcgaaagcaggctgagtgtgatgagttagctcagcgtgctgaggctttgaaggaagaaaatgcttctctccggtctgaagtaaatcgaatcaagagtgattatgagcagctagtctccgagaattcaactctcaaggatagactgggggaactacctgcgaatgat

SEQ ID NO: 243244 - DNA, 336 bp, Glycine max
tggggcacaagtttgttgagatagcgaaaagcaataagatgatcatgagagtgcgtgttttgtttgttgctacagttttggtaacatatgaatgtcatggctcagactaccagaagttccctctccaaatgacaactgggtttggtgggcaatacagcaatgaggtggcatgtgccatttggacgcttggcgtggaagcaaacaacgtagtcaagtggcaaactgttcctgcagcttgcggagagtatataactgactacgttctaggagaccaatatagatcagattccaaagcacttaatcaacaagcctagttctatgctaaatccctcagac

SEQ ID NO: 243245 - DNA, 376 bp, Glycine max
cggtgagggcaagcaggaagaatgctatgaagagctgttgcaagttggtgaaggtggcggtggatggagctccttatctaagaaaagtggatcttgacatgtacgatagttatgagcatttgatgagggaattagagacaatgttttgtggcttagccattcgtaatcatttgatgaatgagaggaaactgatggatcctggaaatgggattgaatacatgcccacctatgaggacaaagatggtgactggatgttggtcggggatgtaccctggaaaatgtttgttgaatcatgcaagaggataagacttatgattagctcagaggccgttggtttaggtccgatgtctacttcttcaaaatgtacgggttccac

SEQ ID NO: 243246 - DNA, 256 bp, Glycine max
gaagaatttttgattcttttcccctagattcagccacagtttcggaggagaagaaaatagtcgttcgagatggcccgtacgaagcaaactgctcgtaagtccacaggaggaaaggctcctaggaagcagcttgcaaccaaggctgcacgtaagtctgcaccaactactggtggtgtgaagaagccacatcgttaccgtcctggtaccgttgctcttcgtgagattaggaaataccagaagagtaccgagcttttga

SEQ ID NO: 243247 - DNA, 392 bp, Glycine max
gacaccacacaccacacacatagtagctattatactctctagagtaattgcggaatctgctagaattttctaataatggcgaaagacgttgagcaggtcacagagcaaggtgaatactccgcgaaggactaccatgaccctcctccggcaccgttgatcgacccagatgagctcacaaagtggtccttgtacagagccgccatagctgagttcatagcaacactcctttttctttacatcaccgtgttgaccattattggctacaagagacagagtgacaccaaaatccccggtaacaccgaatgtgacggcgttggcattttgggcatcgcttgggccttcggtggcatgatctccatccttgtttactgcactgccggaatctctggggg

SEQ ID NO: 243248 - DNA, 421 bp, Glycine max
  unsure (1)..(421): unsure at all n locations
gcagaaaaacaacaaaaggggaaaaaaaaaaaaaaaaaaaaggactttggaaccaaaaattaaaaaaatcaacaagcaatcaacaaaaggtcaanggcccggaattcaagggtttgggaaactccctggctgtgggaaactcctaactggccctgggaaaaattggaatccaagcccgaattgcaataatgccaaagtgactcctccctccgtgttacccacgacgccttcaacaccttcttcagcgaaaccggatccggcaagcacgtccctcgcgccgtcttcgtcgatctcgagcccaccgtcatcgacgaagtccgttgtggcacttaccgtcaactcttccaccccgaacaactcatctccggcaaagaagatgccgccaacaactttgccagaggccactacaccgttggcaaag

SEQ ID NO: 243249 - DNA, 393 bp, Glycine max
aggaagttcaaagtgtaggacgagaaagtagacacagccatgtccactactggtactgttctggcttccactccaacacaaaggctattaggcaaagtggcattggttactggtggagcgtctggaattggagaaagcattgtgcgcctcttccatatccatggtgctaaaatatgtatagctgatgtgcaagacaaccttggaaagcaggtctgtcagtctcttggtgatgaagcaaatgttgtttttgtccattgtgatgttacagtagaggatgatgtttcccatgcagtggacttcactgtgggtaaatttggcaaccttcacatcatagtcaacaatgccggaatttctggatccacttgttccgatatccgcaatgcagacttatca

SEQ ID NO: 243250 - DNA, 374 bp, Glycine max
gaccgttccatttctcaacaacttctgctacttcctactccaaccgcacttctgctccgcaattatcatgggcaaggtcaagatcggaatcaacggatttggaagaattggccgtttggtagccagagtggctctgcagagagacgatgttgaactcgttgccgttaacgaccctttcatcaccaccgattacatgacatacatgtttaaatacgacagtgttcatggacactggaagcatcacgatgtcaccgttaaggacgagaagacccttctcttcggtgacaagccagtcactatttttggacacagaaaccctgaagagatcccatgggggtcaactggagctgacatcattgttgagtccaccggag

SEQ ID NO: 243251 - DNA, 359 bp, Glycine max
gggctcatggattgtacgccagagtgttggtagtactccttgtttactgggaaaggcggttgattgcaactatattcggggtcccaagtatttagaaattgatgttgatattggttcttctactgttgctaatggagttttgggtctggttattggtgtgattacaacattggtggttgatatggcttttcttgtacaggcaaatacacctgatgaattgcccgagaggcttattggagctgttcgtatttctcatttagagctcaaatctgccatcgtcccaaaactggaaccagatccgtcatgactgaccgagtcgtttctgttcttctatacaaaatcatttgtttgcaatatgc

SEQ ID NO: 243252 - DNA, 383 bp, Glycine max
ggagccacacaaaaaccaatccacaccctataaaaaaacactctttgtgtgtctgcattttgattgattccctcattcttcatccatagacatggccaccgtcacttctgcagccgttgctattccctcattcactggcctcaaggcaagcgcaggcaaagtgagtgccgcagttaaagtctcagctccccaagccacaaggttgggcatcaaggcttcgctgaaagacgttggagtcgctgttgtggccactgccgcgagtgcagtgctggctagcaacgccatggccattgaagtgttgctgggtggtgatgacgggtctctggctttcgttcccaacaatttctccgtggcctctggggagaagatcgtgttcaagaaca

SEQ ID NO: 243253 - DNA, 386 bp, Glycine max
gttgctaaaaaactgaggctgaactctgcaagtcctgttgcagatgctgagagcattgtatcaaaggctattcgtgatggtgcaattgatgctacattggatcatgccaatggttggatggtgtccaaagaaactggagatatttactccacaaatgagcctcagttagcctttaattctcggattgctttctgtcttaacatgcacaatgaggcggttcgagcacttcgatttccaccaaacacacacaaagagaaggaaagtgctgaaaagagaagagagagacaacagcaagagcaagagctggctaagcatattgtagaggaagatgacgatgatttctgataattgttttttttcaacctatgaaatgctatctggatacc

SEQ ID NO: 243254 - DNA, 391 bp, Glycine max
  unsure (1)..(391): unsure at all n locations
ggggcgaggaagccacatagagacacaatacagagtgagttgttgctccttcgccacaactctctgccaacatgggtatctccagagattctatgcacaagaggcgtgccactggtggcaagaagaaggcctggaggaaaaagagaaagtatgagcttggtcgccagcctgctaacactaagctgtcaagcaacaagacagtcaggaggatccgtgttagaggtggaaatgtgaaatggagggcattgagattggatactggaaattactcctgnggaagtgaagctgtaactcgcaagactcgtgtactagatgtggtttacaatgcctcanacaatgagcttgtgcgtactcagactcttgtcaaaagtgctatcgttcaagttgatgc

SEQ ID NO: 243255 - DNA, 275 bp, Glycine max
gagagagagagagagagagatgggaaggggaagagtggagttgaagaggattgagaacaagatcaacaggcaagtgacctttgcaaaacgaaggaacgggcttttgaagaaagcttatgagctttccgttctttgtgatgccgaggttgctctcatcatcttctccaatagaggaaagcagtacgagttttgcagcggttcaagcatgctcaaaacgctggagaggtaccagaaatgcaactatggagcgcctgaggacaatgtggcaacaaatg

SEQ ID NO: 243256 - DNA, 344 bp, Glycine max
gatattgacaaatacaatgatatttatttttatagttacatttttttgaagggcagaaattgtagtgaaagcgataattctagtactagtataataactagtacgaatgatacaaatgatagtgattccactataggagaaagttctaataatctcgatgaaagtcaaaaatataagcatttgtggcttgaatgcgaaaattgttatggattaaattataaaaaattttttaaatcaaaaatgaatatttgtgaatactgtggatatcatttgaaaatgggcagttcagatagaatcgaacttttgattgattcgggtacttggaatcctatggatgaagacat

SEQ ID NO: 243257 - DNA, 377 bp, Glycine max
ggcagtcaccacagagagagaggttttgatgcaacgctgtcactgagaaaggatctctatctacgaaggagcggaataaaacccttctctctgtgattaagagaatggcttcagatcggaaacttcacacttttgaggaggtggcaaagcacaaccagaccaaggactgctggctcatcatttctggcaaggtgtatgatgtcacccctttcatggaggatcatcccggaggtgatgaggttttgttatctgcaacagggaaagatgcaaccaatgactttgaagatgtggggcacagtgattctgctagagatatgatggaaaaatactacattggtgagattgatgcatcaaccgttccactaaaacggacctac

SEQ ID NO: 243258 - DNA, 267 bp, Glycine max
gatatagcgaagtttcatttctttggattagaaatttttcccaaagctgatcgagaagccagccaggccaggagttgaagaatgggaagggggaagatcgaaatcaaaagaatcgagaacacaacaaatcggcaagtgaccttctgcaagagaagaaatgggcttctgaagaaagcttatgagctgtcagtgctgtgtgatgctgaagtttccctcatcgtcttctccagccgtggccgtctctatgagtattcaacaacaacataa

SEQ ID NO: 243259 - DNA, 332 bp, Glycine max
ggagtgagtgagatagagagagacgcttcgcaaatctcaatcgaatctcagaaaaatgagagaaatcatcagcattcacataggtcaggccgggatccaggtcggaaactcctgctgggaactctactgcctcgaacatggcatccagcccgacggcatgatgccttctgactccaccttcggtgtagcccacgacgccttcaacaccttcttcagcgaaaccggatctggcaagcacgtcccccgtgctgtcttcgtcgacctcgaacccaccgtcatcgacgaggtccgctgcggcacctaccgtcaactcttccaaacccgaacaactc

SEQ ID NO: 243260 - DNA, 353 bp, Glycine max
  unsure (1)..(353): unsure at all n locations
gacagcanaacaattttcaaactcaattaccattccataacctaaatctcctctttgtttccgagtcagagagcaatggcacgtaccaagcaaaccgctcgcaagtccaccggcggaaaggcgccgaggaagcaattggcgactaaagccgctcgcaagtcagctccggccaccggcggagtgaagaagccccaccgcttcaggcccggaacggtggctctgaaggagatcagaaagtaccagaagagcactgaacttctgatccgaaaactcccattccagaggctcgtcagagaaatcgctcaggatttcaaaacagatcttcgtttccagagcagcgctgttttctgcgc

SEQ ID NO: 243261 - DNA, 200 bp, Glycine max
ggtgctaatcttatcttatccctctaatcactctagctgttgcaaatttctactatttttcaatggcttctgcagatgttgagttccgttgctttgttggtgggcttgcttgggtcaccggcaacgatgccctcgagaaagccttttcaatctacggcgacatcgttgaatcgaaggttatcaacgactgtgagactgga

SEQ ID NO: 243262 - DNA, 373 bp, Glycine max
  unsure (1)..(373): unsure at all n locations
tcctgacatgaccataattaataggcagcttggctggaatcctaaaacctcactttgggacctgcttgaatcaactctcacctatcagcacaggacttatgctgaagccgttaagaaagtcattgcaaagcccgtggcaagttaaacttgtatggtattgaattgcattgagaagagtgtttctgcctataggggcacttatatatagttcaatggttgattttatttatatacatggtaatttcccccttggttttggtagccaatgtagccaacgtagcccatgccttatttattgcatttttatgaagaagtangaatttattattaattatcaaggacaatatgtgctactgcaatgtgattttctcgc

SEQ ID NO: 243263 - DNA, 312 bp, Glycine max
  unsure (1)..(312): unsure at all n locations
gaactcaaacaacanaaataagacattgtttggtttggttacttgctcgaatttcctcgaatcgcttaatttgtatttgattagttaaaccgcaacgcggaatctcttttctcgaactggctaactctcaggcaagtggttcggacgctgattccagcaacaagcggctggtgctcgcactgtatgacgccctaaactccggcgactccgacgccgtcgtcaagatcgtcgccgccgacctcgagtggtggttccatggtccgccctcacaccagtttttgatgcgcatgctcaccggcgactccgctgccg

SEQ ID NO: 243264 - DNA, 355 bp, Glycine max
gaagagtgaagagcgaagagaatggctcccaagggtttaatctttttggctgtgttatgcttctcagcactgtcactgagtcgttgtcttgcggaggataatggacttgttatgaacttctacaaggaatcatgccctcaggctgaagacatcatcaaagaacaagtcaagcttctctacaagcgccacaagaacactgctttctcctggctcagaaacatcttccatgactgtgctgttcagagttgtgatgcttcactgttgctggactccacaagaaggagcttgtctgagaaggaaacagatagaagctttgggtggagaaatttcaggtacattgagaccatcaaagaag

SEQ ID NO: 243265 - DNA, 358 bp, Glycine max
gatagcgaaacagagagtggtttcagtgagtgatcggtgttcacttgatccttcataagtcgtcatcatcatcatcatcatcaccgttgattgaagaagatgccgatcagaaacatcgccatcggaaggcctgaagaggctactcaccccgacacgttgaaggcggggttggctgagttcatctccaccttgatcttcgtgttcgccggttcaggttccggcatcgcctacaacaagctcaccgacaacggcgccgccactcccgccggcctcatctccgcttccatcgcccatgctttcgccctcttcgtcgccgtctccgtcggcgccaacatctccgggggccacgttcaacccg

SEQ ID NO: 243266 - DNA, 347 bp, Glycine max
gacagaagaatagtagcaatcagagactgaagacgagcttccccttgcgccgaagggccaccgatggttgaaaccgagatggatgcagaaactgttgcaaatgtggttccaccaaaggagactccaaatagtgtttccatttctcatcattcctcacaccctccccttaatgagaggattatttcatccatgaccaggagatctgttgctgcacacccatggcatgaccttgagaataggactggtgctcaaattatcttcaattgtgtgattgaaattgggaaagggaccaaggtgaaatatgaactggacaaaaagtcggggcttatcaagatcgaccgcgtgct

SEQ ID NO: 243267 - DNA, 381 bp, Glycine max
gatccacacccacactgtcacctttccgttcatttcctctgttttttcttcaaatccattgtttcgtggaaatcccgaaatttaaccatgcttctccgaaccgccgcctccgccgcttctgcttcgtccctctccctcttcagccctacctccgaacctctccgttcggttcccgctcgtggattggtggttcgcgccgcgaaaggatccacgaaccaccgcgccctaaccggcgtgatctttgaaccgttcgaagaggtgaagaaggagctcgatctcgttcccaccgttccataagcttctctcgcccgccaaaaatacgttgacgaatctgaagccgccgtcaacgagtaaatcaatgtggagtataacgtttcctac

SEQ ID NO: 243268 - DNA, 365 bp, Glycine max
  unsure (1)..(365): unsure at all n locations
ggcacagaattagggttttccaattcagagagcatcacaacgaaccaccactggcgcagcctcagccgcagtcgcagccgcatcacgggcaagcagcgctggagcaggtgcagtgcttcggtcgcaagaagaccgctgtggccgtgacctattgcaagcgcgggctcggtctcatcaagatcaacggctgccccattgagctcgtggagccagagatcctccgcttcaaagccttcgagccgatcctcctgttgggtaagagccgcttcgccggcgtcgacatgcgcatccgcgtcaagggtggcggccacagctcncagatctacgcgatctgcgagagcatcgccaacgcgctcgtcacgttc

SEQ ID NO: 243269 - DNA, 317 bp, Glycine max
tgtcgagatgacgacaggacggaggtaagggcgcgcagcgtcgttacatgcttggagtaggatcagtgatattgctggtgtggtggcttcctgtgctgacacgccagctcagggtggctggtgtggtgctggtgctcacacacattagagcactacgtcgatgagacatgatagtggccataaggtaatcaatttcgacagtgaaaacttcgggaacagacacggtgagcacattgctacttagagagaaggcaacgagcatcatttgagaaggcgccaggaagacgctgacatcaacaccttcttaaggggagttg

SEQ ID NO: 243270 - DNA, 330 bp, Glycine max
  unsure (1)..(330): unsure at all n locations
gatcgcatttcatagcactcaccctcattaccaacacgaaagcatagccaaaaccttttttcgaagtctctgattttcctaatggctccggcaaaggcagagaagaagccggcggagaagaagccagcggcggagaaggcaccggcggagaagaagccgaaggcggagaagaagatctcgaaggaagganggagcgagaagaagaagaagcgcacgaagaagagcgtggagacctacaagatctacatcttcaaggtcctcaagcaggttcaccccgacattggtatttcccagcaaggcatgggcatcatgaacagcttcatcaacgac

SEQ ID NO: 243271 - DNA, 373 bp, Glycine max
  unsure (1)..(373): unsure at all n locations
gttgcaaaaggttcaggtttacttcaaatcaatggctgtttcatatgttcacatgcttcaatgcaacaggggtttccacaagggtaacctctcctatcctaattgcagttacaaggcgaggaggagccaccgtttagtttttgcttctatgcacacaccagaacctaaggtagactcattactggacagtgtaaaatgggataccaaaggtttggttgtggcaatagctcagaatgttgacacangggccatattaatgcaaggttttgccaacagagaagcaatagctacaactatatcttctcgaaanggcacattctatagccgatcacgatctacattgtggaccannagagaaacctctaataatttt

SEQ ID NO: 243272 - DNA, 176 bp, Glycine max
gggcagctcgttacatcttggagaggatcactgagattgctggtgtggtggtttccattgattccaagccaattcaaggtgattggaatggtgctggtgctcacacaaactacagcactaagtccatgagaaattattgttgctatgaaatgattaaaaaccgcaattaaaaattt

SEQ ID NO: 243273 - DNA, 261 bp, Glycine max
tggggtgtggaagtatttgcagaactttgtttcccaacctccattgcctccgcttctacctcgctaccatgattattcctgagaagaaccgcaaggagatctgcagatacctcttccaagacggagtttgctttgcgaagaaggacttcaatttggcgaagcaccctgagattgacgtgccgaatctgcaggtgattaagctgatgcagagtttcaagtctcgcgagtatgtgagggagacctttgcttggatgcactaat

SEQ ID NO: 243274 - DNA, 345 bp, Glycine max
cggggttctaatgtgtaattgtttgttattgtaactcgttcttcttcttttgttgctcagtgtttgagtttgttttttctcacaactgaaaatgtcttgctgcagtggtaactgtggttgcagaaactcctgcaagtgctgcaacggctgcagaagctacatgatgtagccagacttaagctacactgagtcaaccaccatcgacaccatggtcataggagtaggacctgctaaggctcaatttgaaggtgctaaaatgggtgtgctcactgataacgatcgctacaaatgtggaccaaaatgctcatgcaactcctgcacatgcaagtgaggtgttaggatagc

SEQ ID NO: 243275 - DNA, 337 bp, Glycine max
gactactaccaagtgaaaaagcaactaagcatagtgtgtaagaaagggagaaaaacaagtgctgtgtacagagaaaaatggctaggtggtgcatgatcttggtggttcttgctcttgccgtggttgcaagtgccagaaacatgcccaatgacgctggtttggaggaccagaagaacttccttgggtatgggttttcgggagttggcaacaatggccttccctttggtggagtgggttctgggtttgatggtaatatgggtgggccttctgggctcggaggacttggaggattcggtgggcctggtgggcttggcggactcggaggtcctggtaacgg

SEQ ID NO: 243276 - DNA, 348 bp, Glycine max
gggagcagagcagagaagagaaacaaaaggtggggtcagtggaaattatcatcatacaatttcacttaacccttcaagctcaagacagcacagcaatcacatcgcatgtcccttatatatatacttattcattgcctctgaaccttatcaaaacacttctcaatctctctctctccaatggccaaagacctcgaaacggagattcaaagtgggttgcctcgcaaggactaccacgacccaccccccgccccattctacgaccccgccgagctccgaaagtggtccttcctccgagccctcatcgccgagttcgtcgccacctccctcttctccacgtcaccatcctca

SEQ ID NO: 243277 - DNA, 192 bp, Glycine max
ggtgagtgaagaagcagagggggtagcggcattaaaaatgcagatcttcgtgaaaactctgacagggaagactataaccctcgaggtcgagagcagcgacaccatcgacaatgtcaaggccaagattcaagacaaggaaggcattcctccggattagcagcgtttgattttcgccggaaagcagcttgaaga

SEQ ID NO: 243278 - DNA, 368 bp, Glycine max
ggagagaagttattagggtttttgagtgcggcggtccaaacactcttctctgcagcttttgcctacaactcccttcaccatggctgaacaaaccgagaaagcttttctgaagcaaccaaaagtgtttctcagcacaaagaagactgggaagggaaagagacctggaaaaggtgggaaccgcttttggaagtccattgggcttggatttaagactcccagggaagccatcgaaggaacctatattgacaagaagtgccccttcactggcaatgtttccatccgtggccgtatcttggctggaacatgtcacagtgctaagatgaacaggactattattgttagaagggaatatctccattttatcaaga

SEQ ID NO: 243279 - DNA, 346 bp, Glycine max
  unsure (1)..(346): unsure at all n locations
gaatccactgtgttttactataagatgaaaggagattattatcgttatcttgctgaatttaagtcaggcaatgagaagaaggaagctgctgatcagtctatgaaagcatatgagtctgctaccgctgcagcagaggctgatttacctcccacacatcccatccgattgggtctagctttaaatttctctgttttctattatgagatcttgaactcncctgaaagagcctgtcatcttgcgaagcaagcttttgatgaagctatttctgagcttgacaccttgaatgaggagtcatacaaagatagcaacttaatcatgcaacttctcaagggacaactaactttgt

SEQ ID NO: 243280 - DNA, 317 bp, Glycine max
ggaagcccaaagtgcaacgtactttgcaaaaaccctaaaccctctctttctctctccgcgactctgtactcatcaatggcgacgcaatcgttagacgaagaaacaactaagaaagtcatacgacaggtcgagttttatttcggcgacagcaaccttctcaccgatggtttcatgaggaagagtatcactgaaagcgaagatggcatgattagtttggcgctgatttgctcgtttaatcgaatgcgaaaacaccttaatttgggtgatgttaagcccgatgaagttggcccaagaaacgtgaatactgttgctcaaac

SEQ ID NO: 243281 - DNA, 367 bp, Glycine max
  unsure (1)..(367): unsure at all n locations
ggtctagaaaaatttacacaatattttaagacgcacataaacttcctctgtcactacccactcctctctctgtctccgcctttcgcattgcaagcgctctctttctttgcttttccttccccctttcagtttcttcaacgctgcaactatccatggcaaaccgctggctcagacccgaggtgtatccactgttcgctgcggttggtgccgctgttgggatctgtggattccaattggttcgtaatatctgcatcaaccctgaagtcagggtgaacaaggagggaagaaaggcaagagtgttggagaactttgctganggagagaagtatgctgagcatttcctgangaagtatgtgcgcaacagaac

SEQ ID NO: 243282 - DNA, 302 bp, Glycine max
cattgggattcgagctgatgggaacaagtttgtccctgtaattccgagggatactacaatgccagcacggaaggagctagttttcacaactactcatgacaatcaaactgaggcgttgatccttgtctatgaaggagagggtgaaaaggcagaagaaaaccacctattgggatatttcaagataatgggaatacctgctgctcctaaaggagttccagaaatcaatgtgtgcatggacatagacgctgcaaacgtgctaagagttttagctggtgttgtgatgcctggtttctcccaacctg

SEQ ID NO: 243283 - DNA, 386 bp, Glycine max
gggacgacgaagaagaagaatccaaaagcaatcccatctgtgtgtttgcacatcggaagggagggctatcaaactctaaggattgctctgaatcggtttcgtcttcttcgtttttcttcaaaatcctcgtgacagatctaatctaatcagccttttgggggtgtttcagacattgcatgcatatgggtggttgtgttggatgctataaaaggccttcactgagtcccacagtggatgtgccatcaaaagggttggcaacacaaagtaacgtagtgaggaaaccgagttcatcagaggatttttggaccaccagcacgcatgatatggacaacagcgctgttcagtcacaagggagcatctcttcagccagtctaacaaaacaagct

SEQ ID NO: 243284 - DNA, 371 bp, Glycine max
  unsure (1)..(371): unsure at all n locations
gaggaaggtaaaggaagcaaacgcaagagcaagagcaagagcgaaagcggcagagaagatggaaggagaagagggttctcagcagccacagttggtgctcgcggacaagctattccttctccggcaacccgatgtgcaagacattgacaaggttcgctacaaagaggatgtcttcactcatgtcaaggaaaacgatatggtccctctgtacgaaaccctagtcgctgattccgtgttggacttggatcgtgcccttttggactctatgcgcgctaaaattgacgacgagctcaccaagctcgacgaaaagattgctgatgccgaggaaaacttangagagagtgaagttcgtgaggctcatttggcaaaat

SEQ ID NO: 243285 - DNA, 390 bp, Glycine max
gcagttcaaggagttgtttatgttaagtcctgcaagtatgctggggttgacaccctcttgggagccacaccactacttggtgccgttgtgaagctccaatgcaacaacaccaagtacaagctggttcaaacaagtaaatctgacaagaacggctacttctacattgaagcaccaaagagcataaccacgtacggggcccacaagtgtaacgtggttttggttagtgcaccctatgggcttaaggcctcaaatctccatggtggtgtcactggtgctcttctcaagcccgagaagcctttcttgtctaagaggcttccttttgtgctctacactgttgggcctcttgcatttgagcccaattgccattaaatgcaagaaattatggatata

SEQ ID NO: 243286 - DNA, 376 bp, Glycine max
gactcaaaattaaccacaagcataagcacaagcgcaagcacaagcacttctctaattccctttcacactctattacagatttcacaagtgcttacacttcaaatggctttggaagctcttcaatcacccaccacagccactccatcgtttagtccctttgaagaaaccagtctcagttacttagtgacaccgtggacgaaaggaaagcgttctaagcgtagccgcacggagcaacaactgcaacacccttcatgcaccgaggaagagtacctcgctctttgtctcatcatgctcgctcgcggcggcgccggcagtgtctccaccgccaaacccgctgtctccgacaacaattctgcgccgctatccgccgccaaac

SEQ ID NO: 243287 - DNA, 409 bp, Glycine max
atgattaccagctcattgatattgctgaggatggatttttgagtctgcttactgaaaatggtaacactaaggatgacctcaagcttcccactgatgagagtctgctcactcagataaaggatggatttgctgagggcaaggatcttgttgtgtctgtcatgtctgctatgggtgaggaacagatttgtgccctcaaggatattgggccaaagaactagcttttggtgcttgttgcttgttatttctattttctatttaagcaaagatatttttgtaagccttttatattggtttgttcaagacctggcgtatagattctagtcagactagtcttaacaatggtttttatggatgtggtgacagaaactattatcacatttttctggttttctttgttgtcctgtgattt

SEQ ID NO: 243288 - DNA, 385 bp, Glycine max
gacacaccacacacatagtagctattatactctctagagtaattgcggaatctgctagaattttctaataatggcgaaagacgttgagcaggtcacagagcaaggtgaatactccgcggaggactaccatgaccctcctccggcaccgttgatcgacccagatgagctcacaaagtggtccttgtacagagccgccatagctgagttcatagcaacactcctttttctttacatcaccgtgttgaccattattggctacaagagacagagtgacaccaaaatccccggtaacaccgaatgtgacggcgttggcattttgggcatcgcttgggccttcggtggcatgatcttcatccttgtttactgcactgccggaatctctggg

SEQ ID NO: 243289 - DNA, 364 bp, Glycine max
  unsure (1)..(364): unsure at all n locations
ggccctcatggcgatgctggtctcaccggccgcaagatcatcatcgatacttatggaggatggggtgctcatggtggtggtgctttctccgggaaggaccctaccaaggttgataggagtggtgcttacattgtgagacaggctgctaagagcattgtggcaagtggacttgccagaaggtgcattgtgcaagtgtcttatgccattggtgtgcctgagcctttgtctgtgtttgttgacacctatggcactgggaagatccatgataaggagattctcaacattgtgaaggaaaactttgatttcaggcctggtatgatctccatcaaccttgatctcaagangggtggaaataacaggtttt

SEQ ID NO: 243290 - DNA, 385 bp, Glycine max
ggagtgagtagtgagaatggagtttcaagggttaccggaaggttgcattgctagtatactctctcgcactacgccggcggacgtgtgtaggttttccgtcgtatcaaagattttccgttcggccgctgaatcggacgctgtgtggaaacgttttctcccttccgattaccattccatcatttcccagtctccttcgcctctcaactatccttccaagaaggagctctatctcgctctctcggatcgccctatcatcatcgatcagggtaaaaagagctttcaattggagaaaaagagtgggaagaagtgttacatgcttgctgctagagctctcagcattatttggggtgacactgagcaatactggaactggacaaccgataca

SEQ ID NO: 243291 - DNA, 362 bp, Glycine max
gctctgactgctgatgagaatgctcagcctgtacgagtttgtgaccggtgcatggcggaagtgtctcagcggctgactagtgcaaaagagtcatcaagtaaacctgcattgcagagtcatgaggatcttgcaaggaaacttcaggaggagctggagagaaatcgaaagacatcaggttccaagtctgatggatctgcaagacggatgaaggaagttgcatgtcccatttgcactgtccatctgcaggttcaggtgcctagctcgggttcagagacaattgagtgtggagtttgccagcacccatttcttgtgagcgctcattgagttcagataaacatgaatacggaagcggtgtctacgtg

SEQ ID NO: 243292 - DNA, 334 bp, Glycine max
tgccctaagcttcactcattgctctatttctgccaccagatgacaaatgctgcactcataacggtggctaagaactgcccgaattttatccgattcaggctgtgtatccttgatgcaacaaaacccgaccctgatacaatgcagccactggatgaaggttttggcgcaattgttcagtcttgcaggcgactcaggcgcctatccctctcggggcaattgaccgaccaggttttcctttacataggaatgtacgctgagaagcttgaaatgctgtccattgcatttgctggggagagcgacaagggaatgctctatgtgttgaatggatgcaaga

SEQ ID NO: 243293 - DNA, 340 bp, Glycine max
gggcagatggggtcctctgctagagcaagccactttcaggaaccgtcaccgtctctatctttccgaacagactgatggcagtgttcccaatactcttgttaaacccagggttgctgcagagtttaatgaagaagctcgctctccctttttcaagaagtacaaaactgtattacatcctggcgaggtgaatagaatcagggagtttcagcaaaacagtaagatagtagctactcacacggattgtcctgaggtacttatatgggatgttgaaactcaacctaatcgtcatgctgttctgggggctaacacttctcgtccagacttggtattaactgggcat

SEQ ID NO: 243294 - DNA, 361 bp, Glycine max
  unsure (1)..(361): unsure at all n locations
ggcacaagtttgttgagatagctagaagcaataagatgaaaatgaaagtgcttgttttgtttgttgctacagttttggtagcatatgaatgccatggctcagactaccagaagttccctctccaaatgaaaactgggtttggtgggcaatacagcaatgaggtggcatgtgccagttggaggcttggcgtggaagcaaacaacgtagtcaagtggcaaactgttcctgcagcttgcggagagtacatagctgactacgttctangagaccaatatagatcagattccaaaacagttaaccaacaagcttaattctatgctaaatccctcaaactcaccaacaaggatgtcccttgtctgga

SEQ ID NO: 243295 - DNA, 373 bp, Glycine max
gagtgcagcatcgtagagaaataagggaaaaatggtgtcgctgaaactgcagaagcgcctctccgcaagcgtgctcaagtgcggcagaggaaaggtttggcttgaccccaatgaagtcaacgaaatctccatggccaattctcggcaaaacatcaggaagttggttaaggatgggtttatcatcaggaagccaaccaagattcactcccgctcacgtgctcgtaggatgaaggaggcaaagaggaagggccgccactccggttatggtaaacgtaagggtacaagggaggcaaggcttcccaccaagatactctggatgagaaggatgcctgtgctcagacggttgcttcgtaagtacagggaatcaaagaaa

SEQ ID NO: 243296 - DNA, 385 bp, Glycine max
gccacatcacgacatcacatcgcagagaagaacagagagagatccatccatcaattccaatggccgatcagctcaccgacgaacagatctccgagttcaaggaagccttcagcctcttcgacaaggacggggatggttgtattaccaccaaggaacttgggaccgtgatgcggtcacttggccagaacccaactgaggcagagctgcaggacatgataaatgaggttgatgctgatgggaatggtaccattgatttcccagaattcctgaatctcatggctcgcaagatgaaagacactgattcagacgaggagctgaaggaggctttccgcgtgtttgacaaggatcagaatggcttcatctctgcagcggagctcccgcatgt

SEQ ID NO: 243297 - DNA, 366 bp, Glycine max
ggaggagactgagaagacagaagaaaacaaaatggaagacacagtttctgcgttgaggtctttgatggtttctcactctccgccgctggatgccttagtggtgccctctgaagattatcacctgagcgaatatgtgtctgcacgagacaagcgccgcgaattcgtttccggcttcactggaagtgccggcttggcacttataacaaagaaagaagcactgctgtggacggatggacggtatttttttgcaggctgagaaagaacttagtgctgggtggaagctaatgcgaattggtgaagatcctgctgtagatatctggatggccgataatttgccaaaagaagcatccgttgggggttattcct

SEQ ID NO: 243298 - DNA, 343 bp, Glycine max
gagcgaaacagagagtgatttcagtgagtgatcggtgttcacttgatctcatcataatcgtcagcgtcaattgaagaagatgccgatcagaaacatcgccgtcggaaggcctgaagaggcgactcaccccgacacgttgaaggcggctttggctgagttcatctcaaccttcatcttcgtgttcgccggctcaggctccggcatcgcctacaacaagctcaccgacaacggcgctgccacccctgccggcctcatctccgcctccatcgcccatgcattcgccctcttcgtcgccgtctccgtcggcgccaacatctccggcggccacgttcaacccgccgtc

SEQ ID NO: 243299 - DNA, 372 bp, Glycine max
  unsure (1)..(372): unsure at all n locations
gaaagacagacagatctgaagtgtgtgtagagttaacaagaccagagagagagacgaagccgaacgaaacataaataaaaccttgctcttttttcacgccctagctcattttcttctccgttctcttctctctgttcctcactcactcgcatttattcaccatgactaagcaacaagctaattggtctccatacgataacaacggaggatcatgtgttgcaattgctggagcagattactgcgtcatcgccgcggatacgaggatgtccaccggttacaatatcctcactcgcgattactccaaaatctcncaactggcggagaagtgtgttatggcttcttctggttttcaagctgatgtcaaagctttgc

SEQ ID NO: 243300 - DNA, 362 bp, Glycine max
gaacggaaactggtgacacagtttagagagagagagaaacaaagcaaaagccatttggatcctctcttctcttctttgatctccgttacccttttcgttttctcaacacagagagagagagagagtctttcggagttcgtttgcgtgtgttgtgtgatcagtcaccgatggcagcaccacctgcgagggcacgtgccgattacgattacctcatcaagcttcttcttattggcgatagcggtgtcggaaagagttgtctgcttttgcgattttctgatggttccttcacaaccagttttatcaccaccattggcattgattttaagataagaaccattgaacttgatggcaaacgcattaag

SEQ ID NO: 243301 - DNA, 348 bp, Glycine max
  unsure (1)..(348): unsure at all n locations
ggaacagtacccggtttcgacactcgcgtctcagcctcagtttcggatctctcncttctctcaccaatttccaggatttgaaaaatggcagattccaaaccaggattgaggaagccagtgttcaccaaggtcgatcagcttcgtccagggaccagcgggcacactttaactgtgaaggtggtcgatgctaagatggtgatgcagaaaggtcgttctgatggtcctcaatcncgccaaatgcgaattgctgaatgtttggttggtgatgagactggaatgatcatattcactgccagaaatgatcaagtggatatgatgaaagagggtgctactgtgaccctgcgcaat

SEQ ID NO: 243302 - DNA, 357 bp, Glycine max
gacacaccgtttgttctattcttaactcaacttctgctacccactctcttcttccaagtccaaccacgcttttctctacagtcatgggcaaggtcaagatcggaatcaacggatttggaagaattggccgtttggttgccagagtcgctctgcaaagagacgatgtggagctcgttgccgttaacgaccctttcattaccaccgattacatgacatacatgtttaaatacgacagtgttcacggacactggaagcatcacgatgtcaccgttaaggacgagaagacccttctcttcggtgacaagccagtcactgtttttggacacaggaaccctgaggagatccatgggggtcaac

SEQ ID NO: 243303 - DNA, 365 bp, Glycine max
ggcagaaatggggaataacagacaaaggagattcagaactcatcgcgcacaatcaagtcgacaccaccaccaacaactcttactagaggacgattctcaaagctctcttccagaaaatggtgagggcgaggaagaggatgaggaactcacggaacctaaaataaagcttgctatgtgggattttgggcaatgcgatgccaaaaagtgcactggacgcaagctttcaagattgggcatgctaaaagagttacgtgtgagtaatggttttggcggcattgttttaagtccggctggaaatcaatgtgtctcaatagaagattactctttaatccagaagaaaggattggctgttgtggattgttcat

SEQ ID NO: 243304 - DNA, 373 bp, Glycine max
gcttcacggcaacagaagaataatcaaatttctcagatctatccgacgtcgtcgcagatccaccaaccgttatggctgccttcagcggtgatgaaacggctccgtttttcggcttccttggagccgcagctgccctcgtcttctcctgtatgggagctgcctatggcacagcaaagagtggtgtgggcgtggcttccatgggtgtgatgagacctgagctggtgatgaagtctattgtccctgttgtcatggctggagttttgggtatttatggccttattattgctgttattatcagtaccggtattaatccaaaggccaaatcttattacctctttgatggttatgcacatctctcctctggtcatgcctg

SEQ ID NO: 243305 - DNA, 261 bp, Glycine max
gacggcaacagaagaataatcaaatttctcagatctatccgacgtcgtcgcagatccaccaaccgttatggctgccttcagcggtgatgaaacggctccgtttttcggcttccttggagccgcagctgccctcgtcttctcctgtatgggagctgcctatggcacagcaaagagtggtgtgggcgtggcttccatgggtgtgatgagacctgagctggtgatgaagtctattgtccctgttgtcatggctggagttttggg

SEQ ID NO: 243306 - DNA, 357 bp, Glycine max
gagagaaagagagagaaagatgtcgaagcgtggtcgtggtggttcggcggggaacaagttccgcatgtcgctgggtcttccagtggcggcgacggtgaactgcgccgacaacacgggggcgaagaacctctacatcatttcggtgaaagggatcaaaggccgtttgaaccgtcttccctcggcctgcgttggcgacatggtgatggccaccgtgaagaagggaaaacccgatctgaggaagaaggtcttgccagctgtcatcgttcgccagcgcaagccatggcgccgaaaggacggcgtctacatgtacttcgaagataatgctggtgttattgtcaatcccaagggagaaatgaa

SEQ ID NO: 243307 - DNA, 396 bp, Glycine max
gattcagattacattgcaaaaatggcatcattcaccatgacagcttccatccttggcagcccagccgtcaccaaccggtcggcagtagcaacgcagaggagatcactcgtagtgaatgctgccaaagctgttgaagcagaaaaggtcagttatgacaatgacatggatggtagcaatggaaggaggaacttgatgttcgccgcggcggcggctgctgtttgctctgttgctgggatggcagtggcagatgagcctaaaccaggaaccccagaagccaagaaaaagtatgctccgatttgtgtcaccatgccaactgctaggatttgtcgcaattgagggactttggtttttattttacttctgatgattggaaatgtacaatggggttgttgtaat

SEQ ID NO: 243308 - DNA, 361 bp, Glycine max
acgacagaaggggattcagattacattgcaaaaatggcatcattcaccatgacagcttccatccttggcagcccagccgtcaccaaccggtcggcagtagcaacgcagaggagatcactcgtagtgactgctgccaaagctgttgaagcagaagaggtcagttatgacgatgacatggatggtagcaatggaaggaggaacttgatgttcgccgcggcggcggctggcgtttgctctgttgctgggatggcagtggcagatgagcctaaaccagtaaccccagaagccaagaaaaagtatgccccgatttgtgtcaccatgccaactgctacgatttgtcgcaattgagggactttgggct

SEQ ID NO: 243309 - DNA, 411 bp, Glycine max
gagactaattttacattggaatcttccttaaggtatgttgctgactgttctcaagctgtagttgtacacatgtaactctgtcaacattttcagaccaaatccaacgttgtttctggcaaaaatggatgcattccgtttatcacattcatttatgctcagcaccaacatccacagcccctcctctctctgcacccttcgttccctctccaccaatccccgcaacaggtggttcaaggtggaagccaccgccggcggcagccagaagaagaacaataacaaggccttcgacgcggcggcgttcgaggcggagcgacttgccctcgacgcagaggcccggcgaaccatggcggacgccgccgacccgaaggcctggaaatggataatccggaagagaatatgggatatgatgga

SEQ ID NO: 243310 - DNA, 400 bp, Glycine max
  unsure (1)..(400): unsure at all n locations
gacatcgcacatcaattaatccttcgcaacctccaaaatcaaatttccggcctctctgcgtcctcctcctccaacaatcggtttccaagggccgtaacaagcaaaaccgtccgcaaatccaccggtggaaaggctcctagggaacaactcgccacccaaggctgcaaggaaatctgcaccgacaaccggtggagtcaagaagcctcatcgctatcgccctggaactgttgctcttcctgagattcgaaaatacgaaaagagcacagagcttctgatccgcaagctccccttccagcgtcttgttcgtgaaaatgcgcangacttcaagaccgatttgaggttccaaagtcacgctgttcttgcgcttcaggaagctgcggaggcttacttggtgggtttg

SEQ ID NO: 243311 - DNA, 377 bp, Glycine max
cactctctccgttcatctcttcttcttccaatgctgacaagtgctcattattattctcctccgaccatttccgaatgttccagttcaaggtccggatctgtccacgtggcaggtcccacgattggacggagtgtccctacgcccaccctgccgagaaggctcgccgccgtgacccccgcaagtaccactactccggcaccgcctgccccgattaccagaaggggaactgcaagaggggcgacacttgtcagttctcgcacggcgtcttcgaatgctggctccatccttctcgctaccggacccacctctgcaaagacggaaccacttgccgccgcagagtctgcttcttcgctcacaccaccgaacaactccgcctc

SEQ ID NO: 243312 - DNA, 365 bp, Glycine max
ggcctgcaagtgtgagtgatatttgagcttaaaccctagccgctcttctcttcattcttcactttggaaacaatcataatggcgttctgtaataaggttggaaatgtcttgaggcagggtgctgctcgcagcacacatgcccctgttgcgtccatgcttaattacatccgctgcatgtcttcaagcaagcttttcattggaggcctttcatatggagttgatgaccagtctcttaaggatgcattttctggctttggagatgtggttgatgcaaaagttataactgatagagacagtggaagattaaggggatttggatttgtcaacttctccaatgatgagtctgcaagttcggcactctctgc

SEQ ID NO: 243313 - DNA, 370 bp, Glycine max
gcttcctccgaaaaccctaacaacacaggcgcagacgcaaacgcaaacgcaaacgcaaacgcaaacgcagagcgtgatccattgacgaagatggtgcagcgtctcacctaccgcaagcggcacagctatgccaccaagtccaaccaacacagggtcgtcaaaaaccctggtgggaagctcgtttatcagactaccaagaagagggccagcggacccaagtgccccgtcactggcaagaggattcacgggatttcacacttgaggcctgcagagtacaagaggtcaaggttacccagaaaccgtaggactgtcaaccgtgcatatggtggagttttatctggaagtgccgtcagggagaggattatccgag

SEQ ID NO: 243314 - DNA, 339 bp, Glycine max
gctccacagaagcagtagaaaacagaacttcgttgcaaaatatgggtgcttctgacaacaacaacaactttctccaagttgtcttcaataactttgatgttcttgctctgcccttggttacgcttgtttaccctttatatgcttcaattaaggccatcgagaccaagtctactactgatgatcaacaatggctcacgtattggattctgtattccattctcacaatctttgagctcacattcgccaaagttcttgaactgcttcccatttggccttttgccaagttgatattcagttgctggttggttctgcctcacttcaatggggctgcagttgttt

SEQ ID NO: 243315 - DNA, 195 bp, Glycine max
gattgttggcttgtgctctgctcgtgcctctagggttatcatatctccatttccatttcctctctctcagtttccaagaatcttaagccatgggaaagtcctaaccaaacgttaacgccgaataacaaaaaggcctttaaaaagggaagaagaagctcaaaaggctcaacgctgaaaagaaaatcgctcctccaa

SEQ ID NO: 243316 - DNA, 357 bp, Glycine max
  unsure (1)..(357): unsure at all n locations
ggttctagtgtgtgattgtttgttgttgtaactcgttcttcttcttttgttgttctgtgtttgtgtttgttttttctctcacctgaaaatgtcttgctgcggtggtaactgtggttgcggaagctcctgcaagtgcggcaacggctgcggaggctgcaagatgtacccagacttgagctacactgagtcaaccaccactgagaccttggtcatgggagtggcgcctgttaaggctcaatttgagggtgctgaaatgggtgtgcccgctgagaacgatggctgcaaatgtggaccaaactgctcctgcaacccctgcacttgcaagtgangtgttgggagagcaagcttcaagcagag

SEQ ID NO: 243317 - DNA, 353 bp, Glycine max
cgcgtcaggggttctactgtatgtgattgttgtgactcgtcctccttcgccgtaacctcctcctttggtggttgggtggttggtttttcccccaacctgaaatgtccttccgccgggggaactggtggttccggaacccctggaagttccggaaccggtgccgaaggtggaagatgttcccaaacctgaactacaacgaattaaccaacaacgaaaacttgggcaagggaattggaccaatttaagcgcaattctagaatgctgaaatgggtgttcccgctgagaaaaatagctgcaaatgtgtagctaactgtacctgtgaaccctgcacatgcacatgaggtgtttgagag

SEQ ID NO: 243318 - DNA, 368 bp, Glycine max
  unsure (1)..(368): unsure at all n locations
caaaggggggttcaaaaaattcacccccccttcaagggtttcttccgctcccaaaacaatctcgcctccaacctctctctctctctctctctctctctcttcaattttcgttgcattcgcagggcacttctccgctcgcaatgccgtttccggcgaaaccaacgcgggatttcgacgagtcggcgagtccgtcgaacaacctgtgggtggggaatctggcggcggacgtcaccgacgctgatctgatggagctcttcgccaaatacggcgcactcgacagcgtgacttcctattccgctcgcagttacgctttcgtgttcttcanacgcgtcgaagacgccataaccgccaagaacgctctccaagga

SEQ ID NO: 243319 - DNA, 397 bp, Glycine max
gagaggaaagcattttcatttttcaacttgagagaagaagagaaggggaaaaggaaaaaaaggcaaaatgggtaaggatctgagcgatgagcaagtgtcttcaatgaaggaagctttctctttattcgacacagacggtgacggtcggatcgcgccgtcggagctggggatcctgatgaggtctctgggagggaacccgactcaggcccaactcaaagccatcgtggccgaagagaacctcacggctcccttcgacttcccccgattcctcgatcttatggccaaacacatgaaacccgaacccttcgatcgccaactccgcgacgccttcaaggtcctcgacaaggactccaccggcttcgtcgccgtctccgagctccgccacatcctcaacaac

SEQ ID NO: 243320 - DNA, 387 bp, Glycine max
gagaggaaagcattttcatttttcaacttgagagaacaagagaaggggaaaaggaaacaaaggcaaaatgggtaaggatctgagcgatgagcaagtgtcatcaatgaaggaagctttctctttaatcgacacagacggtgacggtcggatcgcgccgtcggagctggggatcctgatgaggtcgctgggaaggaacccgactcaggcccaactcaaagccatcgtggccgaaaaaaacctcacggctcccttcgacttcccgcgattcctcgatcttatggccaaacacatgagacccgaacccttcgatcgccaactccgcgacgccttcaacgtcctcgacaaggagtccagaggcttcgtcacggtctccgaactccgccacat

SEQ ID NO: 243321 - DNA, 289 bp, Glycine max
ggagcaagagtgaagagcgaagagaatggctcccaagggtttaatctttttggctgtgttatgcttctcagcactgtcactgagtcgttgtcttgcggaggataatggacttgttatgaacttctacaaggaatcatgccctcaggctgaagacatcatcaaagaacaagtcaagcttctctacaagcgccacaagaacactgctttctcctggctcagaaacatcttccatgactgtgctgttcagagttgtgatgcttcactgttgctggactccacaagaaggagc

SEQ ID NO: 243322 - DNA, 361 bp, Glycine max
atctctcgagtcattaaaaactgccatagttgtgggcggaactaacattgaaaagcagaggttcgaactaagagcgggagttgaaatagctgtggccacccctggaagattcattgatcacttacaacaaggcaacacttccctctctagaatttcttttgttgttctggacgaggcagatagaatgcttgatatgggttttgaaccacagataagggaggtaatgagaaatcttccagagaagcatcaaacactgctgtttagtgcgactatgcctgtggagattgaagaattatcaaaggagtacttggctaacccagtgcaagtgaaggtggggaaagtgagtagccaacaactaatg

SEQ ID NO: 243323 - DNA, 331 bp, Glycine max
gagggttttaggaaacagacacagtcttgcgagtgaacacaagttacaacaatggctttctttggtagaattgggaatttgttacgacagacagcgagcaggcaggttagttcaaaattgcgttcgcccccttcattttttcaggctatacgctgtatgtcatctgccccaagcacaaaactgtttattggaggtgtttcatattctactgacgagcaaagcttgagggaagctttttcaaaatatggtgaagttgttgatgctcggataattatggatcgtgaaactggtagatccagaggatttggctttattacatacacttcggttg

SEQ ID NO: 243324 - DNA, 310 bp, Glycine max
ggagcaagagtgaagagcgaagagaatggctcccaagggtttaatctttttggctgtgttatgcttctcagcactgtcactgagtcgttgtcttgcggaggataatggacttgttatgaacttctacaaggaatcatgccctcaggctgaagacatcatcaaagaacaagtcaagcttctctacaagcgccacaagaacactgctttctcctggctcagaaacatcttccatgactgtgctgttcagagttgtgatgcttcactgttgctggactccacaagaaggagcttgtctgagaaggaaacagat

SEQ ID NO: 243325 - DNA, 244 bp, Glycine max
tgggatagctgagagagaaaggaaaggttaactaagaagcaatacttcaatggccacccttgttgttcataaccaaacttcttctgctcaagatgctgaggctctccaacaggctttcaaaggatggggggctgatgacaaggccattatagcaatactgggtcacagaaatgttcatcagacgcaagaaatcagaaaagcctatgaggagatttaccaagaggatctcatcaaacgccttgag

SEQ ID NO: 243326 - DNA, 369 bp, Glycine max
ggaggagaggaggaagaaggagaagctgaagaagaagaacaagacgaatgagaaggaggagagagggaagggagcggtgacgaattcttgggggaactatggtgttattacagagactgatatgtggaccaaacgaccagacttcactgcatggttggcagaacgtaacgcaggtgaatctggagaatatgtccaattgggaagaaccacagatgttcacagaattcatggaggatcacaacacagctacctttccttccacatagtactacaatcgtgatgcttactacacgcgtgaaatggatacggagatgaaataacgttttaagaacgtccaggcaacagagcgcactactttcaatgatgaag

SEQ ID NO: 243327 - DNA, 334 bp, Glycine max
gaacgaaaatgagtagtagggtttggtgtgtggtgatggcatcagcgctggcgttgatgttgcaatggcacgaagcattcagctcctacgctggctccgcaagtgcgatcatcgacccttccaaggccaaacaagtttcgtggaaaccgagagctttcgtttacgagggtttcctgacggaattggaatgcgatcacctgatttccatcgccaaatcggagctgaagagatccgcggtggccgataatttgtccggcgagagcaagctgagcgaagtcagaacgagctccggcatgttcattcccaagaacaaggattcaattgttgctggtgt

SEQ ID NO: 243328 - DNA, 296 bp, Glycine max
gagcgaaacagagagtgatttcagtgagtgatcggtgttcacttgatctcatcataatcgtcagcgtcaattgaagaagatgccgatcagaaacatcgccgtcggaaggcctgaagaggcgactcaccccgacacgttgaaggcggctttggctgagttcatctcaaccttcatcttcgtgttcgccggctcaggctccggcatcgcctacaacaagctcaccgacaacggcgctgccacccctgccggcctcatctccgcctccatcgcccatgcattcgccctcttcgtcgccg

SEQ ID NO: 243329 - DNA, 339 bp, Glycine max
gatttcaatggcaactcaaggtcaagtcattacctgcaaagctgcggtggcctgggaacccaacaagcccttaactgtccaagacgttcaggtggctccgcctcaggccggcgaggtccgtgtccaaatcctcttcaccgctctctgccacaccgatgcttacacttggggcggcaaggattccgaaggtctcttcccctgtattcttggccatgaagctgcagggattgtggagagtgttggagaaagtgttactaatgttcagcctggggatcatgtcattccctgttatcacgctgagtgtggggagtgcaagacgtgcaaatcagggaagacaaa

SEQ ID NO: 243330 - DNA, 236 bp, Glycine max
tgggatttcaatggcaactcaaggtcgggtcattacctgcagagctgcggtggcctgttaagcgatcaagtccttacatgtccaacacgttcatgtggttccgcctcacgctgtcgaagtccgtgtcgacctcctcttgagcgcgctccgccacaccgatgcttacacttggggcggcgaggatcccaagggtcccttcacctgtattctcggccatgaagctgcagggattgtgg

SEQ ID NO: 243331 - DNA, 382 bp, Glycine max
ggctcctcaaacaagggaaaacagagcacaacccaattctccgccctcaactgcaacgatttcccaaacccgacatcaacaaacgtcaactactcaaagaggatgtttggattccggttttttctacgttgtcaatcatggaataagccaggaattcatggacgaggtttttgcgcagagcaagaagttcttctctcttcctcacaacgagaagatgaagactctcaggaatgaacaacacaggggatacacccctgttcttgatgagttgcttgatcctgaaaaccaagtacatggagattacaaagaggggtattatattggagttgaaaaacgtgaagatgattcacaatcgaagaaacctttttatggaccgaataac

SEQ ID NO: 243332 - DNA, 399 bp, Glycine max
aaggatcagcagggagaattaggtttttagggtttacaccgagcagccacacctcccgcagcagccatggttctcaaaactgaactatgccgattcagtggtgccaagatctacccaggaaagggcatcagatttgttcgtggtgattttcaggttttcctgtttgcaaactcaaaatgtaagaggtatttccacaatcgcctgaagccttcaaagctcacctggactgcaatgtacagaaagcaacacaaaaaggacattgctcaagaagctgtgaggaagaggagacgtgctgccaaaaagccttactctaggtccattgttggtgcgaccttggaagtaatccagaaaaagagagctgagaagccagaagttcgagatgcagctaggggaagctgc

SEQ ID NO: 243333 - DNA, 400 bp, Glycine max
gctctcacgatctcaacggagccctctcttcaggtcaccatctagactgcaatcatggctgatggaccacagcatccatcagttgttcagaagctagctggacagtcttacctggtgtccaggcttagccccaactttaactctaggaattattctgcaactggttcttacgtcaatggcggaatgcactcgcctgggttggctgttgtgtcacctgtatctccagttactgtgcatgctccagcagagaaaggagcgagtggatttctagtggattttctgatgggtggagtatccgctggctgtatcgaagacagctgctgctccaattgaacgagtcaaattgcttatccaaaatcaggatgaaatgataaaaagtggtcggctatctgagccatac

SEQ ID NO: 243334 - DNA, 393 bp, Glycine max
gagagtagcatctgagtcttgtgtttagcgtacgggattgaaaatgagtatgtacggtagggatccgtggggagggccgttggagatccacgccacagactccgccaccgacgacgagcgcagccggaatctccaggagctggaccgaggcgctttacacgagacacaacagagctggctcttgggcgccggagaacagaagaagaagaagaaaacgtacgtacatcttggctgcatcatcgtcagccgcaagctcttcatctggacactcggcactctcgccgtctgcgccttcctcgccggcttcatcaacctcatcgtcaaaaccgtcccccgccatcaccacaagccaccccctcccgacaactacaccatcgccctccacaaagccct

SEQ ID NO: 243335 - DNA, 339 bp, Glycine max
gagtctcagtttcagtttcggatctctctcttctttcacaccaatttccagcatttgaaacatggcagattcaaaatcaggattgaggaaaccagtgttcaccaaggttgatcagctttgcccggggaccagtgggcacactttaactgtgaaggtggtcaatgctaagatggtgatgcagagaggtcgctctgatggtcctcaatctcgtcaaatgcgaattgctgagtgcttggttggtgatgagactggaatgatcatattcaccgccagaaatgatcaagtggatacgatgacagagggagctactgtgatcctgcgtaacgccaaaattgacat

SEQ ID NO: 243336 - DNA, 355 bp, Glycine max
caccattgaaattgattctctatacgagggaattgatttctactccactgttactcgtgccagatttgaggagctcaacatggatctcttcaggaaatgtatggagccggtggagaaatgtttgagggatgctaagatggacaaaagaagtgttgatgatgttgtccttgttggtggttctaccagaattcccaaggttcaacaactgctgcaggacttctttaatggaaaagagctttgcaagagcattaatcccgatgaggctgttgcatatggtgcggctgttcaggctgcaatcttaagtggtgagggcaatgagaaggttcaggatcttctcctcctggatgtcactcct

SEQ ID NO: 243337 - DNA, 353 bp, Glycine max
gatatcagaagctcagacctagggatttcggccgtttgctccccaaaaaggaaagaagcagattctgtcctttgaaatcaacaagaaaagatgtcaggtgaagaggtagctgttgcagttgaggtacctgctacttcaattccaggtgagccaatggacatcatgactgctctacagcttgtgctgagaaaatctctggcctatggtggtcttgcacgaggtcttcatgaaggtgccaaggtgatcgagaagcatgctgcacagctctgtgttctagcagaagattgtgaccaacctgattatgtgaaactggtgaaggctctttgtgcagagcacaaagttagtcttttgac

SEQ ID NO: 243338 - DNA, 402 bp, Glycine max
ggagaacaaaacaagtgtttcgaatagattatcctaagtctttgggaatagtgctgcaatggcttcaagtcaggaggaggtgacccttttgggagctactggaagcccatttgtgtgcagggttcatattgccctcaagttgaacggagttcaatacaaatatgtcgaagaaaatttgaggaacaagagtgaactgcttctcaaatccaacccagttcacaagaaggttccagtgtttattcacaatgagaagcccatagcagagtctcttgtgattgttgaatacattgatgagacatggaagaacaaccccatcttgccttctgatccttaccaaagagccttggctcgtttctggtccaaattcattgatgataaggtttttggtgctgcatggaaatc

SEQ ID NO: 243339 - DNA, 283 bp, Glycine max; identical to SEQ ID NO: 241186

SEQ ID NO: 243340 - DNA, 392 bp, Glycine max
gggggttattggacacattcttcagcgactgcgtttttggatcggaacctcttctgcggcgtagcaatgggacactccaacgtttggaactctcacccaaaaaactacggtcctggttctcgcacatgccgtgtgtgtgggaaaccacatggactgatcaggaagtatggccttatgtgctgcaggcagtgcttccgtagcaatgccaaggaaattggcatcatcaagtatcgctaaaagagcacttgtcaactacggaccaatattgtgttctggcactaggatgttttgaggatgttatgtctgaagaaacttgagactttcttttttcatctaattaactatcagacgtaatttgtggtactaagaatacttttatataaattgttttg

SEQ ID NO: 243341 - DNA, 378 bp, Glycine max
ggttctagtgtatgcgattgttgtgactcgttcttcttcgtcgttatcttcttcttttgttgtttgtgtgtttgttttttctctcacctgaaaatgtcttgctgcggtggtaactgtggttgcggaagcgcctgcaagtgcggcaacggctgcggaggctgcaagatgtacccagacttgagctacaccgagtcaaccaccaccgagaccttggtcatgggagtggcaccagttaaggctcaattcgagagtgctgaaatgggtgttcccgctgagaacgatggctgcaaatgtggagctaactgcacctgcaactcctgcacttgcaagtgaggtgttggagagctaaagcttcaagcagaaatggcccttagaaat

SEQ ID NO: 243342 - DNA, 326 bp, Glycine max
ggtgctaatcttatcttatccctctaatcactctagctgttgcaaatttctactatttttcaatggcttctgcagatgttgagttccgttgctttgttggtgggcttgcttgggtcaccggcaacgatgccctcgagaaagccttttcaatctacggcgacatcgttgaatcgaaggttatcaacgaccgtgagactggaaggtccagaggattcggatttgtgaccttcgcctcagagcagtcaatgaaagatgcgatcgcaggaatgaacggccaggaccttgacggtcgtaacatcactgtcaacgaagctcagacccgcgcc

SEQ ID NO: 243343 - DNA, 370 bp, Glycine max
aggggagtggtgcacagtggttggtttcagcagcagcttgtgctgaaacactcaagtgtggggtgctatgtatgccatggtggctttagttcagtgattgaagctatggtcaatgagtgtcaactggtgctgttgcctttcaagggtgaccagtttttcaattctaaactcattgccaatgatttaaaggcaggggtagaggtgaataggagtgatgaagatgggttctttcacaaagaggatatactggaggcattgaaaactgtcatgttggaggataacaaagagcaagggaagcaaataagagaaaaccacatgcaacggagcaagtttttatcaaataaggaaattcagaacaaattcatcacag

SEQ ID NO: 243344 - DNA, 385 bp, Glycine max
aggggcacaaatttgttgagacagctagaaaccataagatgaaaatgaaaattcctgttttgtttgtttccacagttttggtatcatatgaaatccattgctcaaactaccacgaatttccctctcaaatgaaaactgggtttggtaggcaatacaccaatgaggtggcatgtgccagttggaagctttgcgtggaagcaaacaccctactcaagtggcaaactgttcctgcagcttgcggagagtatatagctgactacgttctaggagaccaatatagattcagattcaaaacagttaaccaacaagcttatttctatgctaaatccctcaaactcatcaacaaagatgtcgttgtcttggacgttgacgacactactctctc

SEQ ID NO: 243345 - DNA, 381 bp, Glycine max
  unsure (1)..(381): unsure at all n locations
agggggatgattccaaacgttcaaatccccaactgggaagccggacggagaagagcaatccccccgtcgatttctttcaatgctgacacgtgctcattaatctcctccgancatttccgaatgttccagttcaaggtgcggaactgtccacgtggcaggtcncacgactggaccgagtgtccctacgcccaccccgccgagaaggctcgccgccgtgacccccgcaagtaccactactcaagcacctcctgccccgattaccggaaggggaactgcaagaggggcgacacgtgtcagttcgcgcacggcgtcttcgaatgctggctccacccttctcgctaccggacccagctctgcaaagacggaacaaattgccgccgc

SEQ ID NO: 243346 - DNA, 387 bp, Glycine max
gattctgagtaatcacaaacacaactaagaagccaatccaaacgaatctgcggtgatccaaagaacctccactccccaccatcacatgtcacgtcgcccccacgcagcgccgccgccgccgccgcggtcactccacaagcaacagtcgtggtcgccggacatgctccgcgacgaggcgtggcagcggcggaaggacaacaaccaccccgtgaaccgccgccagcaccggctgagcaagagcctctcggaggacgacttggacgaactgaaggcgtgcttcgagctcgggttcgggttcgattcgcccgaaatcgacccgaaactgtcgaacacaatccccgctttggagttgtaccatgccgttaacaaacagttacaacaccacag

SEQ ID NO: 243347 - DNA, 406 bp, Glycine max
ggttctagtgtgtgattgtttgttgttgtaactcgttcttcttcttttgttgttctgtgtttgtgtttgttttttctctcacctgaaaatgtcttgctgcggtggtaactgtggttgcggaagctcctgcaagtgcggcaacggctgcggaggctgcaagatgtacccagacttgagctacactgagtcaaccaccaccgagaccttggtcatgggagtggcacctgttaaggctcaatttgagggtgctgaaatgggtgtgcccgctgagaacgatggctgcaaatgtggaccaaactgctcctgcaacccctgcacttgcaagtgaggtgttgggagagcaagcttcaagcagagatagcccttaattaggaataatgataaactattaatgtgtagctaaaaa

SEQ ID NO: 243348 - DNA, 361 bp, Glycine max
ctccctcattttttctcttctctctttctcccatgcttctgtcctagatttctgtgttgcagattatgcaggtcctattggacctgcaggatattcctgcaagaagccttcaaaggtcacagcagatgattttgcttacagtggccttggcattgctggtaacacctcaaacattatcaaagctgcagtgacccctgcatttgatgctcagtttgctggtctcaacggtcttggcatttccgcagcacgtttggacttagcagcaggtggagttataccacttcacactcatcctggagcttcagaattacttgttgtaattgaagggagcatcctagctggattcatttcttctgccaac

SEQ ID NO: 243349 - DNA, 409 bp, Glycine max
  unsure (1)..(409): unsure at all n locations
catgagtgaggggttactggaagactgtgctcagcttgtcaaagcaaattcaattcaaggaaataaagtgaacaatgtcgatgttgtttacacaccctggtctaatttaaagaaaactgcttcaatggatgttggccaagttggttttcacaactcaaaaatggttcgaactgtaagagttgagaagaggataaatgagattgttaacaggctaaacaagacaaaagtggaaaggaaacctgatttgaaagctgagcgagaagcagttaatgcagctgagagagctgagagaaaacaacaactgagagaaaaaaaacgtcgggaggaattgggaaggcttgaaaaggagaaacaaacagagcttaagagctacaaaggtttgatggttgcagaanatatgacatccaac

SEQ ID NO: 243350 - DNA, 399 bp, Glycine max
ggaacggaaaagcactggcgcagctaccctgaggcttctcttctcttctcttctctgtcgtgagtcaccatggtgagggttagtgtgctgaacgatgctctgaagagcatgtacaatgctgagaaaaggggaaagcgccaagtcatgattaggccatcctccaaagtcattatcaaattccttttggtgatgcaaaagcacggatacatcggagagtttgagtatgttgatgaccacagggctggtaaaatcgtggttgaattgaacggtagactgaacaagtgtggggttattagtccccgttttgatgtgggcgtcaaagagattgaaggttggactgctaggcttctcccctcaagacagtttgggtatattgtattgactacctctgctggcatc

SEQ ID NO: 243351 - DNA, 406 bp, Glycine max
ggaacaagcaaaattaagcacaaaagcccaaccctctctctcgctgctggtctcccccatttggcattcgcagatcgaatacgagtaatttcactgaatcttattgaagatgtttctcacaagaactgagtatgaccgaggagtcaacaccttttctcctgaaggccgtttatttcaggttgaatatgcaatcgaagccatcaagctgggatcaactgcgattggattgaagacgaaagagggtgttgtccttgcagttgaaaagcgcatcacttcaccactgctggagccaagtagtgttgagaaaattatggaaattgatgagcacatacgatgtgcaatgagtggattgattgctgatgctcgaacacttgttgagcatgcacgggttgaaactcagaatcat

SEQ ID NO: 243352 - DNA, 432 bp, Glycine max
acccaagcgctcaatacaggcgtcagcaacgaacgagtcagcggagaagtccggcgagaagacgaaagaacggagccctctctctcgccgctggtctcccccacttggcattcacagatcgaagacgagtactttcactgaatcctactgaagatgtctctcacatgaactgagtataatcgatagagtcaacaccttttctcctgaaggccgtttatttcaggttgaatatgcaatcaaagccatcaagctgggatcaactgcgattggattgaagacgaaagagggtgttgtccttgcagttgaaaagcgcatcacttcaccactgctggagccaagtagtgttgagaaaattatggaaattgatgagcacatacgatgtgcaatgagtggaatgattgctgatgctccaacacttgttgagcatgcacg

SEQ ID NO: 243353 - DNA, 346 bp, Glycine max
ggttctagtgtgtgattgtttgttgttgtaactcgttcttcttcttttgttgttctgtgtttgtgtttgttttttctctcacctgaaaatgtcttgctgcggtggtaactgtggttgcggaagctcctgcaagtgcggcaacggctgcggaggctgcaagatgtacccagacttgagctacactgagtcaaccaccaccgagaccttggtcatgggagtggcacctgttaaggctcaatttgagggtgctgaaatgggtgtgcccgctgagaacgatggctgcaaatgtggaccaaactgctcctgcaacccctgcacttgcaagtgaggtgttgggaaagcaagc

SEQ ID NO: 243354 - DNA, 390 bp, Glycine max
cgatcatgatgctgggagcatgatcaagtaccacaagaacttaacttccaaaggttatcgtgcacttatattcagcggcgatcatgacatgtgtgttccatacacggggagtcaagtgtggacgagatcagttggatacaagattgttgatgaatggaagccttggtcatccaatggtcaagttgctgggtatacacaaggatacgacaaaaatcttacttttctgaccgtaaagggatctgggcatactgttccggaatataaaccacgagaggcattggacttttacaaacgctttctcgctggattgccaatatgatatagaggaaaagagaagatggagtaacgctgcttcctaatttgtttgtactttgttaataataatgattt

SEQ ID NO: 243355 - DNA, 375 bp, Glycine max
  unsure (1)..(375): unsure at all n locations
gagagcgagaaagtgagaggagagagaaagtagcagatcctccatggcctccagcaaggaacgtgaaaacttcgtctacgtcgccaagctcgccgaacaagccgaacgctatgaagaaatggtggaagcaatgaagaatgtggcgaagctaaacgtggaattgacggtagaggagcggaaccttctgtcggttgggtacaagaacgtggtgggtgctcgtanggcttcgtggaggattctttcctcgattgaacagaaagaagaagctaaagggaacgatgtgagcgtgaagaggataaaggagtatacgctgaacgtggagtctgagttgtccaatatctgcagtgatatcatgactgttattgatgaatacct

SEQ ID NO: 243356 - DNA, 403 bp, Glycine max
ggaagtaagggatcgagcctcggaggagggaatcgcagcgaagtccactatgccgaagcaaattcacgagattaaggacttcctcctcactgctaggaggaaggatgcacgctctgtgaaaatcaagcggagcaaggatgtggtgaagttcaaggtccgttgctccaagtacctttacaccctctgtgtgtttgattctgagaaggctgataagttgaagcaatcacttcctccaggtttaagcgtgcaggatgtgtgattcttactgctgtatgaagatcaggtttttctctggattttggggattcatagttagtaaaatggttcagagaattttcgtatttgttgttacattcgggatcatgttagtattttgtttaagacggattcaacttgcttgggg

SEQ ID NO: 243357 - DNA, 371 bp, Glycine max
  unsure (1)..(371): unsure at all n locations
gactcacaactcagtgaaagagaatccgaggcgaagagaagagaaaaattaagatggaggggaaggagcaggatgtgtcgctgggagcgaacaagttcccggagagacagccgattgggacggcggcgcagagccaagacgacggcaaggactaccaggagccggcgccggcgccactggttgacccgacggagtttacgtcatggtccttttacagagcaaggatagcagagtttgtggccacttttctgtntctatacatcactgtcttaaccgtcatgggagtcgccggggctaagtctaagtgcagttacgttgggattcaaggaatcgcttgggccttcggtggcatgatcttcgccctcgtttac

SEQ ID NO: 243358 - DNA, 362 bp, Glycine max
gacagcgcaacagagagtgatttcagtgagtgatcggtgtgcagttgatctcatcataatcgtcagcgtcaattgatgaagatgccgatcagaaacatcgccgtcggaaggcctgaacaggcgactcaccccgacacgttgaaggcggctttggctgagttcatcacaagcttcatcctcgtgttcgccggctcaggctccggcatcgcctacaacaagctcaccgacaactgcgctgccagttctgacgggctcatcaccgccaccatcgcccatgcattcgccctcttcgtcgccgtctccgtcggcgccatcatctccggcggccacgtcaaccccgccgttaccatcggcgccctcgt

SEQ ID NO: 243359 - DNA, 332 bp, Glycine max
ggcgcattgaacgaaaattagggtttgtagtgtagcaggaagaagcagcaatggcgccgaagataacacgtaaggttagcagaaaccctgaattgataaggggaatcggaaagtactcgaggtcgcagatgtaccacaagaggggcatttgggctatcaaggccaaaaacggtggcgttttacctcgccacgaccctaaacccaagcctgaagctcctgctgaaaaaccacccaaattttaccctgctgatgatatcaagaagccccttgtcaacaagcacaaaccgaaaccagctaagctcaaggctagcattactcccgggacagtgttg

SEQ ID NO: 243360 - DNA, 397 bp, Glycine max
  unsure (1)..(397): unsure at all n locations
ggcatttctcaaaggaacaaagaaacaaagaagtaaacacactgtttcatactttcgtttcgttcattcggcgtagaagcaaaagagagagatagagagagggaaaaaggttgctaccaacaacaaacaaaaacagtgttgcttgattccgcggtggcgagaaccgacgtgagcggcggaggagaggcgcggaacggtggtcttcaaggttttctgacgtctctgttctcgaccctcggcggtgttttcgggtcaacgtttcaagaaccgcatcaaagtgttatcatggcttccagattggnacaacagcaacaccccaacaatgttggtggtgagaataagcagaanaacatgggcggtgaaggaagaaacagaagggtgctgcangatattggga

SEQ ID NO: 243361 - DNA, 416 bp, Glycine max
gggcactcagtagagaattaaataaaatcaagaaagcatgcatatgatgaagaaggtgtgtgggtttgcaatagtggtgatggcagcactttttctggtggagatgagtcccatggcagaggctgtgacttgtagccctgtggagttgagtccctgtttgggggcaatcacgtcctcttcaccaccatcgacaacttgttgccagaaggtgagggaacaaaggccatgcctctgtggttacctcaaaaaccctagtctgaggccatatgtcaactctcctggctccagaagggttgctagctcttgtggggttcccttcccaacttgttagtcactttttacttcatatatatgtaataaactccccctactgttggctggaaattatatatatatatatatatatgttgaagaaa

SEQ ID NO: 243362 - DNA, 368 bp, Glycine max
ggaaaaaggaagaaaggtaatagagagagagagaaagagaagaggagagagaaacaaagaagagtgttcccacattacatggcctccttgcccttggggcaccaccaccatcaccaaccggcggcggcgactatacacccgtcgcaaccgccgcagtgtcagccgcaacccgaagttcctcgccggagctccgatatggagaccgataaggatatgtcagctactgtcattgaggggaatgatgccgttactggccacataatctccaccacaattggaggcaaaaatggggaacctaaacagaccatcagttacatggcagaacgtgttgttggcactggatcatttggagttgttttccaggcaaa

SEQ ID NO: 243363 - DNA, 407 bp, Glycine max
  unsure (1)..(407): unsure at all n locations
ggagcaagagtgaagagcgaagagaatggctcccaagggtttaatctttttggctgtgttatgcttctcagcactgtcactgagtcgttgtcttgcggaggataatggacttgttatgaacttctacaaggaatcatgccctcaggctgaagacatcatcaaagaacaagtcaagcttctctacaagcgccacaagaacactgctttctcctggctcagaaacatcttccatgactgtgctgttcagagttgtgatgcttcactgttgctggactccacaagaaggagcttgtctgagaaggaaacagatagaagctttgggttgagaaatttcaggtacattgagaccatcaaagaagctttggaaagggaatgcccangagttgtttcctgtgctgataacctcg

SEQ ID NO: 243364 - DNA, 358 bp, Glycine max
gggtagcgcagagaaagaactagaactagaactagggtttcatctttgccatcagaaacaacaatgatttacgacgttaactctccccttttccgatccttcctcagccagaaaggaggctcctccgataagaggaaaacggatgaacagaagccaaaagagcagaaacccaaagccagcgagaacaaacctataatgacagagtgacaacaaatttgctgcattcagttgtagaatgataataggtggtagatattgcatttggttctacaaaattaagatcattttggctgtgttctgaggtatatgtggtgttttagactttgttattgtaatggtttgattttggatatgggta

SEQ ID NO: 243365 - DNA, 392 bp, Glycine max
  unsure (1)..(392): unsure at all n locations
ggagtttatgtggttgcgcctctgcctgtaagagtgaaaaaaccttctcttttccttctctcaagtctcaagagatttcatcatggctccaaagaaggacaaggctccaccaccttcctccaagcccgccaaatctggcggtggcaagcagaagaagaagaagtggagcaagggaaagcaaaaggagaaggtgaataacatggtgctgtttgatcagggcacctatgataagctcctttctgaagctcccaaattcaagctcatcactccttccattctttctgattgtttgaagattaatggatcactttgcaggaaggctataagagaattgatggctaggggttcaatcangatggtgtctgcccatgcaagccagcanattttacaca

SEQ ID NO: 243366 - DNA, 293 bp, Glycine max
  unsure (1)..(293): unsure at all n locations
gggagttgggtanggtgaattgcaatttcaattaattagaattcaacgtttgcaaattgcatattgttcttctcttcctctcttcctctgactccatgtcgtcgataacgggcatccaggggcaacctcttgaggttacggtggtttcgtgctccaagttgaaggacacagaatggatttcaagacaagatccgtacgtttgtgttgagtatggcagcacaaagttccgaaccagaacctgcacagacggcggaaaaaacccggtattccaagagaagttcatctttcccctc

SEQ ID NO: 243367 - DNA, 382 bp, Glycine max
gcctgtcacaaacacagattcacttcgaaactgaacgctgcagcagaagatgttcaaaaaattttctggcgaagatgtgtctgcacagaaccaagtgaaggcatctgttcaacgaaaaatacgacaaagtattgctgaagagtatccgggccttgaacctgttttggatgatatacttcccaagaagtcccctcttatagttgctaaatgtcagaaccatctcaatctggttcttgtgaacaacgtgcctttgtttttcagtgtccgtgatggaccatacatgcccaccttgcgacttctccatcaatatccaaatataatgaaaaagttacaagttgaccgtggtgcaattagatttgtcttggcgggtgcgaacataatg

SEQ ID NO: 243368 - DNA, 396 bp, Glycine max
  unsure (1)..(396): unsure at all n locations
gatagcactagcaagcataattgttggagctccaaaccagacgggactactctctagctccgtccacgtgccgtcgtacgctctgaaatcttccgtcgtctctggcatctccgctgccagccttctgatctgtcataccaaatggccaacagggttcaaattcctaccaacaattcagcactcattgctatgattgcagatgaggatactgtagttggatttttgttggctggagtgggaaatgttgacatacgtatgaagacaaattacctcattgtggattcaaaaacaaccgtcaaacaaattgaggatgcattcacagaatttacaacaagggaggatgttgccattgtgctgattagccaatatgttgcanatatgataaggtttttgggt

SEQ ID NO: 243369 - DNA, 371 bp, Glycine max
gagaattagggtgagaacaaaattgcgaagaaccctaattgattgattgattgattgattcccatggcgtcccgaagaggtggagtctcactcccagaaagaccaagcaacaactcaggctccgtcctggcgaagatctcgcgctcctccatcgtcacccgcggcaaggaagccgccgtcgacgccgcattcgtcgccaagaagctcctccgcagcaccggcaaggccgcgtggatcgccggcaccaccttcctcgtcctcgtcgtccctctgatcgtcgagatggaccgcgagcagcagctcaacgacctcgagctccagcaggccagcctcctcggcacccccgcccccaaatgaaaatttgaggtttt

SEQ ID NO: 243370 - DNA, 363 bp, Glycine max
  unsure (1)..(363): unsure at all n locations
ggaacctttgcattctattcattcaagattcagcaagtgcgttttggaagcagagaccgaaatacttcgagatggcccgtacaaagcaaactgctcgtaagtcaactggaggaaaagctcccaggaagcagcttgcaaccaaggctgcacgtaagtctgcaccaacaactggtggtgttaagaagcctcatcgttatcgccctggaactgttgctcttcgtgagattaggaaataccagaagagcactgagctcctaatcaggaagcttcctttccagaggttggttcgtgaaattgcccaggatttcaagactgatctgcgtttccacgagcatgctgtgcntgcattgcaagaggctgctg

SEQ ID NO: 243371 - DNA, 395 bp, Glycine max
ggaatgataaacttgtaaatcattagctatttcacacaataatttctaaatgaacagaaatcttaaataaatcactacaaatacgttccatttccatacaagttaaaccagttcttttgattcaaacacgggaagggtgaaaagttattaattagctattgtttcttgcttatcttgtctaaattcgacctattcctatgtgcagtgtgatccagaagaaccaggatcttgcgactccggatgcaatggtggattgatgaatagtgcttttgagtacagcctgaaatctggtggggtcatgcgcgaggaagactacgcttattcaggtgcagacagcggaagctgcacattcgaccaccggagcattgcatcatcagtggcaaagctgagtgtcg

SEQ ID NO: 243372 - DNA, 392 bp, Glycine max
gacacacaacaaagttctcattttttctcattcctttccgaccatggcatcaccggcatccaacccccaaagcgccgagactaagaaaagccgtggccgccaaagggttgacattaagaaaatgagcaacgaggccaacctccaagtcacgttctctaagcgccgcagcgggcttttcaagaaagccagtgagctttgcactctctgcggcgctgaagtggctctggtggtgttctcgccggggcagaaggtgttctccttcggccaccccagcgtggatggcgtgattgagcgctatctcactggggtcgcaccgccggaggcggacaacatgaattacatcgatgtgcaccgcatggccaaagtggttgaccttaacgcccagctgactc

SEQ ID NO: 243373 - DNA, 394 bp, Glycine max
agattgcgtcgttgtttgttgtttcccttcatctattttttcttcgcccccttttgtgtttctttttttggttgtttgttctttcttctcgttcgtcgctttgtgatctctctctgcaaccatgtccgccgagaaagagagagagacccaggtttacttggccaagcttgccgagcaggccgggagatacgaagaaatggttgagtgtatgaagaaagtagcaaaacttgatcttgatctaactgtggaagaaaggaacctcctctcagtgggatacaaaaatgtgattggtgcacgaagggcctcttggcgcatcatgtcctcaattgagcagaaggaagagtctaagggaaatgagcacaatgttaaactgatcaagagttactgccaaaaa

SEQ ID NO: 243374 - DNA, 265 bp, Glycine max
gggggggcagagtttcaggttgaattgggcaacttttagtgctggtgagaggtcgcgccacgacgattctccagattacagcatatttgttggtgacttggctgcagatgttactgattatcttcttcaggagacatttagggctcgttataactcggtgaagggtgcacaagttgtcattgatacgctaactggccggaccaagggatatggctttgtcaggttttcagatgagagtgagcatgtgagggccatgactgacatg

SEQ ID NO: 243375 - DNA, 188 bp, Glycine max
gatggccacctctgctattcagcaatcagcattcactggtcaaactgctctgaagcagctcaatgagttcgtccgcaagaccggtggcgccggcaaaagtcgcaacaacatgggccgcaccgtcaagagtgctcctcagagcacttgggatggccctgagcgttccaagtacttgggtccaatctcgg

SEQ ID NO: 243376 - DNA, 374 bp, Glycine max
  unsure (1)..(374): unsure at all n locations
ggaagttttgtggtgtggtttagtgtcaaatggcggcgagtagaagcacttttcctctgatgaaatacttgagagtgcgcgtcgacgctcttccccgcaacactcccttaaccctcgctcccaactttttgattcgccgcttctgtgaagaggttaggggttgttttctcgacaagtctgaggtcacagatcgcgtcatttcctgcgtcaaaaacttccagaaagttgatccttcaaaggttaaccctaatgctcacttccagaatgaccttggattggatagtttagattcggtagagattgtgatggctcttgaggangagtttgggttcgagattcctgataatgaggcagacaagatcaactccattaaa

SEQ ID NO: 243377 - DNA, 276 bp, Glycine max
gatgcacaagtttgttgagatagctagaagcaatatgatgaaaatgaaagtgcttgttttgtttgttgctacagttttggtagcatatgaatgccatggctcagactaccagaagttccctctccaaatgaaaactgggtttggtgggcaatacagcaatgacgtggcatgtgccagttggatgcttggcgtggaagcacacaacgtaatccagtggcaaactgttcctgcaacttgcggagagtacatagctgactacgttctaagagaccaaga

SEQ ID NO: 243378 - DNA, 374 bp, Glycine max
gagggttttgcgctgttgttgctgctcatcctccgtaacctccgagctctgcaccgaagaacgaagccatggggaagacacatggaatgggatctgctcgcaagctcaagtcccaccgcaggaggcaaaggtgggctgacaagtcatacaagaaatcacatcttggaaatgaatggaagaaaccttttgctggttcatcccatgccaagggaattgtccttgaaaagataggtattgaggctaagcagcccaactctgccattcgtaagtgtgccagggttcaacttatcaagaatgggaagaagattgccgcttttgtccctaatgacggttgcttgaactacattgaagagaatgacgaagtcctgattgct

SEQ ID NO: 243379 - DNA, 388 bp, Glycine max
  unsure (1)..(388): unsure at all n locations
ggattctttgtattccaatcctcaagattcaagtactgcgtttccgaagcagacacagatggctcgtacgaagcaaaccgctcgtaagtccacaagaagaaaggctcctaagaagcagcttgcaaccaaggctgcacgtaagtctgcaccaactactggtggtgtgaagaagccccaacgttatcgtcctggtaccgttgctcttcgtgggattaggaaataccagaagagtaccgagcttttgattcggaagctccccttccagaagctggttcgtgaaattgctcaagacttcaagactgatctgcgtttcccagagcacgccgtgcttgcattgcaagaagctgccgaggcataccttgttgggctctttgangacactaacctg

SEQ ID NO: 243380 - DNA, 396 bp, Glycine max
gcgattagaaatatttataaagacggaggtgttggcgctttttatgctggtatctcaccaactctggttggcatgcttccatacagtacatgtttttatttcatgtatgatacaataaaggaatcttactgccggaccaaaagtaagaaatctctaagccgtccagagatgcttttgattggagctcttgcaggttttactgccagtacaattagcttccccttggaggtagcaaggaagcgcctgatggtgggtgctttgcaaggtaagtgcccgccaaacatggcagcggcactttcagaagttattagagaagaaagtctgaagggtctctacagaggatggggtgcaagctgtttgaaggtcactgcatcctctggtatcacctggatgttt

SEQ ID NO: 243381 - DNA, 259 bp, Glycine max
gaaggaaaaataaggttttaagggttacaaccaacaacgaaaactccctcccgcaataccatgggtcccaaaactgaactatgccgattcagtggtggcaagatctaacccggaaaagggatcagatttgttcgtggtgattctcaagttttcctgtttgccaactcaaaatgtaagccggtaatttccacaaccgcctgaagccctcaaagctcacctggactgctatgtacagaaagcaacacataaaggacattgc

SEQ ID NO: 243382 - DNA, 369 bp, Glycine max
  unsure (1)..(369): unsure at all n locations
ggagcaagggaaagcaaaaggagaaggtgaataacatggtgctgtttgatcagggcacctatgataagctcctttctgaagctcccaaattcaagctcatcactccttccattctttctgatcgtttgaggattaatggatcacttgcaaggaaggctataagagaattgatggctangggttcaatcaggatggtgtctgcccatgcaagccagcaaatttacaccagggcaacaaacacctaggtgtggaactgatcttagcttacggagtattggtaggaatagtaatgaagtattgttcttttgcactttgggaagcatctcatatggttctatcagttctagattgtcgctgaatccgatgctc

SEQ ID NO: 243383 - DNA, 401 bp, Glycine max
ggatcaaacacagagagcgcagtccaaccctcaaaatgcattcattcggctacagagccaacgcgttgctaacctttgccgtaaccattctggcgcttatgtgcgctatggcttctgtatccgacaacttcagcacccccactccctctgcacaagtccaggttctgaacatcaactggtttcagaaacaacccaatggcaacgatgacgtcagcatgacgatgaatatttccgcagacttgcattcccttttcacatggaacacacaacacgtctttgtttttctagctgctgagtatgaaactcctaagaattccttgaatcagatatccctatgggatggtatcattccctctaaagagcatgcacagttttggattcctacatcaaataaataccgc

SEQ ID NO: 243384 - DNA, 346 bp, Glycine max
ggcagcaacgcagtgttgtgagtgagttgggttttttccttggttttcctgagctgtgttttattctctttatctctctctctgccctctcatcttcgagctccgatggcgagcctgtggcgcgcggcgaccggcatgacggaaaacgccaccgattatgacggcgtctagttctggtccaaccccgagcgcaccggctggctcaccaagcatggcgagtacatcaagacctggcgccgccgctggttcgtcctcaagcaaggcaagctcttctggttcaaggaatcctccgtcacgcgcgcgtctcgtccacgctgcgtcgttcccgtcgccacgtgtctcacag

SEQ ID NO: 243385 - DNA, 382 bp, Glycine max
  unsure (1)..(382): unsure at all n locations
ggagccaagagtatgaagaacctcgggatttgaggtcaaatcctttccaaggtggagggaatgatgcaatcctatcccgcaagggcattgggtagaagactccgagtatattgggctagagatccaagggaaggccctagggttctcatgagccttagggtagatttcgagcccatgggctaagtatgagctcgcatatctttgtaaatattagaataggtttttccttcgtttgggccttgtattttggccattctagtagtatagggttttagccttgtatttcgggcattttgggtagtctttgtagtaaggactttttttttttgtattttcatgtnttttgtcatggatgtgagctcagctattatanggggtgtgt

SEQ ID NO: 243386 - DNA, 213 bp, Glycine max
ggccattgttgttgctattatcatccgcagctgcttttattcgcaccgcaaacagtgagccatggccgtcggaaagaacaagcgcatctccaaggggaagaagggtggcaagaagaaggcagctgatccctttgccaagaaggattggtatgacattaaggctccttctgtttttcaagtgaaaaatgttggcaaaaccctcctctctcgtac

SEQ ID NO: 243387 - DNA, 404 bp, Glycine max
  unsure (1)..(404): unsure at all n locations
tatgatgacccaccagtgatttacactcgctcacattctctggttggcccttcaacttgtgttagtcaatcacttaagcttggcaaactcaccatacatgagactgaggattcattggaactagtggagcatgtcaatggagaggccattaaagacatcaaagaatcttcctttgttgaggaatcattgaaagatgaagatgggaatctcatgaagatccacagagttagcattgacgatttcgagattttgaaggttgttgggcanggtgcatttgcaaaagtttatcaggtgaggaaaaagggtacttctgaaatatatgctatgaaggttatgcggaanggacagatttatggagaagaancatgctgaatacatgaaagctgagagggatatttggacaa

SEQ ID NO: 243388 - DNA, 392 bp, Glycine max
aggggggaaaacaaatcgttctcaatttatcacaatgtaaaaccaaattcccttcgtcgttttcgattaagagagcaatggcacgtaccaagcagaccgctcgcaagtccaccggaggaaacgctccgaagaagcaattggcaaccaaagccgctcgcaagtcagccccggcgaccggcggagtgaagaagccccaccgcttcatgccaggaacggtggctctgaaggagattcgacagtacgataagagcaccgaacttctgatccgaaaactaccattccagaggctcgtcagagacatcgctcaggatttcaaaaccgatctccgctttcagagcagcgccgtatcggctcttcaggaagccgcggaggcttatctcgttggactcttt

SEQ ID NO: 243389 - DNA, 429 bp, Glycine max
  unsure (1)..(429): unsure at all n locations
aattcncgggccgacccacgcgtcagagaagggggcagtttcaaattttcttttccttcactttcccgagaaaaaaataacacttttcactttcttcactacgttctcacttcgatatggctcgtacgaagcaaaccgctcgcaagtccaccggtggcaaggcgccacgtaagcagctcgccaccaaggccgctcggaagtccgctccggcgaccggaggagtgaagaagcccaccgcttcaggccgggaaccgtggcgctgagggaaatcagaaagtaccagaagagcaccgagcttctcatcaggaagcttccatttcagaggctcgtgagagaaatcgcgcaggatttcaagaccgatttgcgtttccagagcagcgctgtttccgcgcttcaggaggctgctgaggcttacctcgttgggttgtt

SEQ ID NO: 243390 - DNA, 386 bp, Glycine max
ggtgatgaagaatgtttgtggaccatttacagctgcaaaaactgtttatgaggacgaacaaggtttcttgatcattatcagtctgccattcgtggatcttcctagtgtgaaagtttcatggaggaacactgttactcatggtatcataaaggtttcttgtgtgagcatatcttgcaagccatttattaaaagaaacgataggacattcaagctttcagagccatcgtcagagcactgccctcctggtgagtttgttcgtgaaatcccactttcaactcgaattcctgaagatgccaatatagaagcgtactacgatgggccaggatctgtgcttgagataatggtgccaaaacttcttccaggagcagaagagcatgaagtttgtg

SEQ ID NO: 243391 - DNA, 357 bp, Glycine max
ggtggaagtatttgcagaactttgtttcccaacctccattgcctccgcttctacctcgctaccatgatcattcctgagaagaaccgcaaggagatctgcaaacacctcttccaagagggagtttgctttgcgaagaaggacttcaatttggcgaagcaccctgagattgacgtgccgaatctgcaggtgattaagctgatgcagagtttcaagtctcgcgagtatgtgagggagacttttgcttggatgcactattactggttcctcaccaacgatggaatcgaatttcccagaactttaccttaacttccttccgaaattgtccctgctactttgaagaaacaggccaagccacct

SEQ ID NO: 243392 - DNA, 386 bp, Glycine max
caggccaatttgcgttgcctctgcagttacaagtctatcctaccttcatttggaattaaccccaaaaatgctttggccttgcctgctaaatgtggtctacaattgcctcctaattgttgagtgctgtgaagcagttaacgaaggtcaagttcattacaagcaccttaattagtagtcttcaattgctttcaggtgttttactaacactgaagaataaattttaagacaggatttgatgcccctcaaataacggtgcagttggttttaatcagcgtcctgtgtccaaaagtttgtgagtagatgtgtacaataataatggttgatgtacacgaatactttgtatctgtactttttttccctccatgtctatgtctacatttatatat

SEQ ID NO: 243393 - DNA, 388 bp, Glycine max
ggtgtctgctcactcgctcttctccgccacttctgaatctattgaatcaacaatcatgtcggacgaagagcaccatttcgagtccaaggccgacgccggagcctccaaaacctaccctcagcaagccggtaccatccgcaagaacggctacatcgtcatcaaaggccgcccctgcaaggttgtggaagtttccgacttcaaaactggaaagcacggtcacgctaagtgtcactttgttggaattgatattttcactgccaagaaacttgaggatattgtgccctcttctcacaactgtgatgttcctcatgtgaatcgtactgattaccagctcattgatattgctgaggatggatttttgagtctgcttactgaaaatggtaacact

SEQ ID NO: 243394 - DNA, 242 bp, Glycine max
agggggctcaggtgaagtaaaatccttccactgtggtgactctgcgatgggtgcctagaagtatgtttcagagctatagcgcaagaagcagtctgatgtcatgcgcttcttgcagcgggtgaagtgctgggagtataagcagcagccttccattgtgcatttgacaacgtctagtcgacctgatcaagatcgtcgcttgggcttcaaggctaaacaaggctatgtgacttaccgtgttcgtg

SEQ ID NO: 243395 - DNA, 342 bp, Glycine max
gaggcgcggcgggatcatcacgagattgcaaaatgaagttcaacattgcaaatcccaccactgggtgccagaagaagctggaaatcgatgacgacctgaagcttcgggcattttgggacaagaggatctcccaggaggtccttggtgacgccctgggtgaggagtttaaaggatatgttttcaaaatcactggtgggtgtgacaaacaaggattcccaatgaagcaaggagtgttgacccctggtcgtgttcgactcttgctccatagaggaactccttgtttccgtggatatggaaggcgcaatggagagcgtagaaggaaatctgttcgtgggtgcattg

SEQ ID NO: 243396 - DNA, 404 bp, Glycine max
  unsure (1)..(404): unsure at all n locations
ggtgaacagtgaccgacattgcttcttccctgcgtcgtcgtttttttcttctctcctctttgttagggtttgctcggttccatttttcccaaaccattcggcacaacatcgaaatttccccattgtccgcttccgcaacgaaataactctaccgtgccctacgataaggggtttctcagagcaggagcaatgtcttccccttatctacctgccacaactgactcacttgctctcgcaactgaggccaaagacccatctgaggccatctccattctttatcgggtgcttgatgatccttcttcttcaccagatgctctgcgtatgaaagagcaagcaatcacaaacctcactaagcttctcactgatgagaatangggagaggatctgcgcagccttcttactca

SEQ ID NO: 243397 - DNA, 382 bp, Glycine max
gatttgtgagtgtgtgagagagagagcgagcagtttcagacacagagagaggggtttgggattggagggattgacgctgcgtctcttcctcttctctttcgatccatccctcattcctaatcctccaatccaaccacctcagcctcacactcacatatacacatatctgaacgcgtatcgtccctcctatggcttcaaagcgcatcctcaaggagctcaaggacttgcagaaagacccaccaacttcttgcagcgctggtccagtagctgaggacatgttccattggcaagcaacaataatgggtcctgctgatagtccttatgctggaggtgtattcctagtcactattcacttccctccggattatcctttcaagcctcc

SEQ ID NO: 243398 - DNA, 442 bp, Glycine max
cacgcgtcaggagggctcttgggtatcaagccttgtgttggctgttataaaataagcttcaatttgaaacgccaaaactccatcaccggaacaagacccaggcaggtgtcgcagtacgcggagaaaggacgctatataaatatatttgtccccgatgctctctatttcagccactcgtatattcttcctccgctcaacaactataagattatcttcttcttcttcttctcttcaattcttctccaatcccaaccgcaccctcttccgtccctttcttcacacttccttcaaaccacttccttcgtctttctctttccgaacagatcacactatggccacctcaaacgccaaatcagtccatgatttcaccgttaaagatgccaagggaaatgatattaaccttggtgactacaaaggaaaggtccttatcattgtcaatgtt

SEQ ID NO: 243399 - DNA, 360 bp, Glycine max
gaggcacatcctggtgacaatgtgggattcaatgttaagaatgttgctgttaaggatttgaagcgtggttatgttgcctcaaactcaaaggatgaccctgcaaaggaggctgctaacttcacagcccgagtcatcatcatgaaccaccctggtcagattggaaatggctatgcccctgtcctcgactgccacacttctcacattgctgtcaagtttgctgaactcatgaccaagattgacacgcgatccggcaaagagcttgagaaggagcccaagtttttgaagaactgtgatgctggttttgttaagatgattccaatcaaacccatggttgtttaaactttctccgagtatcctcca

SEQ ID NO: 243400 - DNA, 304 bp, Glycine max
cctagagcatctatcacaagcagatgaagaagatggtgaaattcctgaagcctaacaacgcagtgatcgtcctgcaaggccgctatgccgggcgcaaggcggtgatcgtgacgaccttcgacgagggaaccagggagcgcccctaccgccactgactcgtcgccgggataaagaaatacccaagcaaggtcatcaagaacgactccgcgaataagaccgcgaagaaatctacggttaacgccttcgtgaagctcgtgaactagcagcacctcatgcccacgcgctacacgctcgacgtggatct

SEQ ID NO: 243401 - DNA, 387 bp, Glycine max
  unsure (1)..(387): unsure at all n locations
ggaaaaagggagtgcctgataacccaaaaccgaccgcaccaccgttttcctttgctttgcgttccaaaatggtcaaaacctcagagattattacatgcaaagctgctatttgctggggaatangaaaacctgtgactgtggaagagatacaagtagaccctcccaaagccaccgaagttcgagttaagatgctttgtgccagtatatgctccacagacatctctagcacaaaaggattcccacataccaattttcctatagcacttggacacgaaggagttggtattatagagagtgtcggtgatcaagtaacgaatctgaaagaaggggatgtggtaattccaacatacataggcgagtgccaagaatgtgagaattgtgtttcac

SEQ ID NO: 243402 - DNA, 448 bp, Glycine max
ttcccggtacgactcacgggtcgatacacgcgtcagacacacgcgtccgggacaacacagaacaaaaacaaagaaaaaaaaaacccttagccaacacaaccatcatggccacctctgctattcagcaatcagcattcactggtcaaactgctctgaagcagctcaatgagttcgtccgcaagaccggtggcgccggcaaaggtcgcactaacatgcgccgcaccgtcaagagtgctcctcagagcatttggtatggccctgaccgtcccaagtacttgggtccattctcggagcagattccatcatacctgaccggagaattccctggtgactacggatgggacactgctggattatcagctgacccggaaaccttcgccaggaaccgggagctggaagtgattcacagcagatgggcaatgcttggtgcccttggctgcacctcccc

SEQ ID NO: 243403 - DNA, 372 bp, Glycine max
  unsure (1)..(372): unsure at all n locations
ggtgcaaagctgcatcaactactggatacaaatcctagagctaatgctgtagcagctggttgaaaccagtaactgcactggctaattatgtaattttggcatattacaagcccaaaattacagcttggtgctaacagttttcagagggatggatcagctgaattttacaatctaattccgtctatatagaccagaactaattctttgcttgtgagtttcttagggcataaactctgtattttactagatttcacagaattgaatgacaactttaaaagtttgtaaattgaagagtattaaggatttagtttagactttaagagaggcttgtcggccgctgtataattggttgtgtantaactatattggtgt

SEQ ID NO: 243404 - DNA, 347 bp, Glycine max
ggaactttgcaagagtattaacccagatgaagctgttgcttatggtgctgcagtgcaggctgcgattctcagtggcgagggtaatgagaaagtgcaggatcttcttttgttggatgttactcctctatccactggtttggagactgcaggaggagtcatgactgtgttgattcccagaaacacaaccattcccaccaagaaggagcaggtgttctcaacctactctgacagccagcccggtgtgttgattcaggtctatgaaggtgaacgaacgaggactcgtgacaacaatttgcttggcaaatttgagttatctggaattcctcctgctcccagaggtgttcctc

SEQ ID NO: 243405 - DNA, 342 bp, Glycine max
  unsure (1)..(342): unsure at all n locations
ggaagaaggcaaatcgcgaagactagatctgatctgagagaatggctcctcggtctagcagcaaggacgcccaagaccttttccgcgctctttggtctgcttatgctgcaacccccactaatctcaagatcattgatctctatgtcatctatgccgtattcaccgctttcatccaggttgtttacatggctttggttggatcatttccatttaactccttcctatcaggagtactttcttgtgtangaactgctgttcttgctgtttgtctcaggattcaagtgaataaagagaataaggaattcaaggatcttgcacctgagcgcgcttttgcggattttg

SEQ ID NO: 243406 - DNA, 373 bp, Glycine max
gagagaaagagagagaaagatgtcgaagcgtggtcgtggtggttcggcggggaacaagttccgcatgtcgctgggtcttccagtggcggcgacggtgaactgcgccgacaacacgggggcgaagaacctctacatcatttcggtgaaagggatcaaaggccgtttgaaccgtcttccctcggcctgcgttggcgacatggtgatggccaccgtgaagaagggaaaacccgatctgaggaagagggtcttgccagctgtcatcgttcgccagcgcaagccatggcgccgaaaggacggcgtctacatgtacttcgaagataatgctggtgttattgtcaatcccaagggagaaatgaaaggttctgctatcact

SEQ ID NO: 243407 - DNA, 326 bp, Glycine max
gggtgcatttgcaaagtgaacctcaaaatcagcctctaatatttttctcactgtctctccaaagaacttgatagagagatggcagctgcaacatctggtgctgtgttaaatgggttgggatcttccttcttgagtggaggaaacaggagccaaacccttctggcctctgctattggaggcaaagttggtgctgctgttactgttaatcccagaagactcattgtggtagctgctgctgcaccaaagaagtcatggctccctggtgttagaggtggtggcaatctcgtcgacccagaatggcttgatggattcgctacaggtgacta

SEQ ID NO: 243408 - DNA, 383 bp, Glycine max
gattatatatgaaatttatattcgtatttctttttgtatttaaaaatattcgttgaacctagttaattgaaattagtctaacgtttgtatttgttacaaaaaaagctttttgaattccccgtaaaaatagattgcgctaatgaaaaagctttcaatgttgtaaaatatcccttctttttccataaagtgttccgaatccttttttttgatatagaagtgcgcttttttggaactgccatataattagtatagcttttgattgttatagaattcgatgtgaaagacatttttatgaaaatatatttatctttaattagccatatattttatctatcttaattcccattttttactatttcaagtaaaacattgaatattataat

SEQ ID NO: 243409 - DNA, 344 bp, Glycine max
ggtccctactcagttcacagagaaagatggctgcggaaaacgttgtagagttcacagacttacccgtcaagagacctagagaagaagaagaagaagaacaaaccaatggagtctccaacgacgccgtttcaacgctacccaatgaccctcaataccctggtatctctgctgttattcccggttggttctcagaaatcagcccaatgtggcctggggaggcgcactccttgaaggtggaaaagattttgtttcaagggaagtctgacgaccagaatgtcatggtcgtccagtcatcaacatatggcaaggtgcctgtttcggatcgagtcaaccagcccacacac

SEQ ID NO: 243410 - DNA, 369 bp, Glycine max
  unsure (1)..(369): unsure at all n locations
ggtgacagtgaagagatggaaggcatagtacacgggacagttgaagtgaatggcataaaaatgcatgttgctgagaaaggtgaaggtcccgtggtcttgttcctccacggcttcccggagctctggtactcctggcgccaccagattctggctctcagcaacctcggctaccgcgccgtggctccagatctccgcggctacggagacaccgaggcaccagcttcaatcagcagctacaccatcctccacttagtttctgacatcgtcgcgctcattcactcacttgctgtggattaagtcttcctcgtagcccatgattggggggctgtcataggttggtacctctgcntgttttcgcccgacagaatc

SEQ ID NO: 243411 - DNA, 291 bp, Glycine max
ggtgacagtgaacagatggaaggcatagtacacgggacagttgaagtgaatggcataaaaatgcatgttgccgagaaacgtgaacgtcccgtggtcctgttcctccacggcttcccggagctctggtactcctggcgccaccagattctggctctcatcaacctcggctaacgcgccctggctccagatctccgcggctacggagacaccgatgcaccagcttcaatcagcagctacaccatcctccacgtactttctgacatcgtcgccctcattcactcacctgctgtg

SEQ ID NO: 243412 - DNA, 362 bp, Glycine max
gacccccttctagacatagttcttctccctctgttctctattctctacactgtgaaaccaagatgaaggtagcatttgcagctgttctacttatatgccttgtcctcagctcctccttgttcgaggtgtcaatggctggttctgctttctgttcctccaagtgctcgaagaggtgttctagagctgggatgaaggacaggtgcatgaagttctgcgggatttgctgcagcaagtgcaactgtgtgccatctgggacttatgggaacaagcatgagtgcccttgctacagagacatgaagaactccaagggcaaggccaaatgcccttgattattttttttttttcaccatccacacatcaac

SEQ ID NO: 243413 - DNA, 314 bp, Glycine max
gcctaaaaggacaatctaagacttcggtgggatctaggttagcaaccagcgatctgggacttttctttctcccccacaccacacccagattcaaaaactcgctctgctctgctctgcaattccccttccgtttcgtttcgatctcaaaacatgttcttcttcgattggttctatggcattctagcttccctcggtctctggcagaaagaagccaaaattctcttccttggtctcgataatgcagggaagaccacacttcttcacatgctcaaagacgagagattagttcagcaccagccgacccaacaccccac

SEQ ID NO: 243414 - DNA, 395 bp, Glycine max
ggactcagccatgcaaggacggcacgagctgccggcggcgcgtgtgcttcttcgcgcacacgccggagcagctgcgcgtcctgccgatgcagagtccgcgtagcgtggcaaactcatcggagtcctacgacgggtctccgatgaggcaggtttcgttgtcgtcggcggcggcggcggcgttcatgtcttctccggcggcttctctctctccgccagagtcgccgccatcggtgaacgagatggtggcttctctgcgtaatttgcagcttgggaaaatgaaatcgatgcctcataatagaaacgtgtcggtcgggtcgccgaggggatcggtactccgaccgggttttttaagccttccaacaacgccaactcagcaaccggttcggtctggggtg

SEQ ID NO: 243415 - DNA, 389 bp, Glycine max
gagtctttaccaatcaacaaagcctctcttatctttttcaccaaaaatggcaacattcatgctgaagttggtgcttcctctacttttcctgttcatgattcctccgaaaacagcgtatgcggagtttgagcaatggtgtgtagctgatgagcagaccacggagtctgagttgcaggcagccttggattgggcttgtgggaaagggggtgcagattgtagcaaaattcaagtaaaccaaccttgctatttaccaaacacattgaaagaccatgcttcttatgccttcaacagctactatcagaagttcaagcacagtggaggttcttgctactccagaggagctgccataacaacagaagtggatcctagtcatggttcttgtcactatg

SEQ ID NO: 243416 - DNA, 377 bp, Glycine max
ggaatctcgttcttcctttgccttctccttcttcttcaaccctttttctttctctttctttcgcactttcattctctaaaaaaatctaagtccctttggtcttcatcttctgttctgatccaggtatggcttctaaacgcatcttgaaggagctcaaggatttgcagaaggatcctcctacctcatgcagtgcaggccctgtggctgaggacatgtttcactggcaagccacaatcatgggacctgctgatagcccatatgcaggtggtgttttcctagtttcaattcattttcctcctgactatcccttcaagccaccaaaggttgcttttcggactaaggtgttccacccaaacatcaacagcaatggcagtata

SEQ ID NO: 243417 - DNA, 366 bp, Glycine max
  unsure (1)..(366): unsure at all n locations
aatggaccggcgcagatgccctaaacggtgctcctcccaacaattggggaaggccttactttcaaaggaattcccaacagcatctctatctaatgagagtgtgtggtgtgtggtgtgtggttttctttccttccaacgtacctctcattgacaaataaacgtgcaaacttatgtgtgcataattttcttatgtatgcttaagttttgtaattggatgctatctagtttttcatatctaatanggtgttgtgtcagtttttatgtatagtattgtgctcctatcatgttcacccgtatcatgttcacccgtatgtaagtctgatattctgatctatgaatgtcaaatcaaatttctctatgtcaccg

SEQ ID NO: 243418 - DNA, 306 bp, Glycine max
ggtctcgtgcaagtgtaacccaaaaccctagcggcgcctgctttcttcgttcgtcttttgcatcagccatcaggatggagtctcaggtgaagcatgctcttgttgtcaaagttatgggtcgtactggatccagaggacaggtgactcaggttagagtgaagtttttggatgatcagaaccgtcatatcatgaggaatgttaaaggagcagtgagagaaggagacattctcaccctactcgagtctgaaagggaagcatgaaggtttcgctagagggtaattttttcttgatctttacggtagttag

SEQ ID NO: 243419 - DNA, 342 bp, Glycine max
ggaacttcaattctctttccaacaatttctctctctctctctgtttttttttttttttgccctaactcaaaaggtttcctccttctctccctctcctccaagcatttttgctcccaagaattcttcttcctccttgccctcttcttccctgtcttttaagccttcttttgtgttgaacagagcaaatttcacctcccggggttttttgaactgtgcccatgtctaaagtcttcagctttaccggaaatgatgatttttatcatgggggtcctatttatcctaacccgaaggaaccgtgtctcttcttgtctcttggccgtcaagttgatgtttaccttcctc

SEQ ID NO: 243420 - DNA, 347 bp, Glycine max
ggttgtgtgagtgaagaagcagagggagtagcggcattaaaaatgcagatcttcgtgaaaactctgacagggaagactataaccctcgaggtcgagagcagcgacaccatcgacaatgtcaaggccaagattcaagacaaggaaggcattcctccggatcagcagcgtttgattttcgccggaaagcagcttgaagatggaaggaccctggccgattacaacatccagaaggaatcaacccttcatctcgtcctcaggcttcgtggtggcatcattgagccttcgctcatggctttggctcgcaaacaccatcaggacaacatgatttgccgcaagtcccatgcccg

SEQ ID NO: 243421 - DNA, 345 bp, Glycine max
gggttgtccacatgtgcagaacttgaagcttcgtacgagtgcttttctgtcatacaagggattactatcaggtttcatggctgccccatgagtttagatcctgtttttgccagagtgacttcgtcttcttcatagtgcgctccttggtgtcctttttaactgtcgtttgtgtttaacgttccatatttgatctccctgcgtttttataactgtgcccatgtcgattttcttcagctttactcggtcatgatcatttttagcatgggggtcctatttatcctatcccttctgaaccgtgtcccttcttgtcccttggccgtcatgttcctgttttaccttcctctt

SEQ ID NO: 243422 - DNA, 327 bp, Glycine max
gatccacaacgatgagcgtaccgaaggcagtggcagcgacgatccggctcacggtgccggccggaggagctcggccggcgccaccggttggaccggcgctgggccagtaccggctgaacctgatggcgttctgcaaggacttcaacgcccgcacccagaagtacaaggcggagacacccatggccgttacgataacggcgtacaatgacaacaccttcgagttcaccgttaagtcgccgccggtgtcgtggtacctgaagaaagccgccggcgtggaatccggtaccagccggcccggtcacgtgaccgcctcctcgttgtccgtgt

SEQ ID NO: 243423 - DNA, 278 bp, Glycine max
ggcagtttcaaattttcttttccttcactttcccgagaaaaaaataacacttttcactttcttcactacgttctcacttcgatatggctcgtacgaagcaaaccgctcgcaagtccaccggtggcaaggcgccacgtaagcagctcgccaccaaggccgctcggaagtccgctccggcgaccggaggagtgaagaagccccaccgcttcaggccgggaaccgtggcgctgagggaaatcagaaagtaccagaagggcaccgagcttctcatcaggaag

SEQ ID NO: 243424 - DNA, 394 bp, Glycine max
gcccgcgtccacccacacgtccgcccacgcgtccggtaacctccttgcattgcaccggattgctaccctgcgccatgatgagctgggtcaggaaacccttctgaatctgttacttcataactacctacactacaacctatatgatcaggcagagaagttgaggtctaaggctccacgttttgaggcacattcaaaccagcagttctgccgttatctcttctaccttgggaaaattcgcacaattcagctggagtacaccaatgcaaaagacttgctcttgcaggctgctcgtaaagctcccagtgcagcacagggttttcagattcaatgtaacaagtgggctgtgatagtgcgtttgttattgggagaaatacctgagaggataatctttatg

SEQ ID NO: 243425 - DNA, 388 bp, Glycine max
aaccccgaaataagacttccgtttgccggaattcttccaaggctccgtaatcccgaaagcaaaacaatccgaaacctgccccaccttcagtgcatagtaaaagaaaccctccgtgtgcacccaccaggcccgctactctcgtgggctcgccttgctgtgcacgacgttacggttggcggcaagcacgtgattcccaagggcaccaccgcgatggtgaacatgtgggccataacccacgacgagagggtgtgggccgagcccgagaagtttaggcccgatcggtttgtggaagacgatgtgagcataatggggtctgatttgaggttggcacctttccggttcggaagaagagtgtttcctgggaatgcccttggtttggcctccgttc

SEQ ID NO: 243426 - DNA, 371 bp, Glycine max
  unsure (1)..(371): unsure at all n locations
ggccgcaagcagagatgacaacccgatttaagaagaaccgcaagaagcgcgggcacgtcagcgccgaacaagggcgtaatggaaagcaacgcaagcaccccggcggccggggaaatgccggcggcatgcaccaccacaggatcctcttcgaaaagtaccaccccggggttctttcnggaaggtanggatgaggtactttcataagctccgcaacaaattctactcccccatcgtcaacatcgacaagctatggtctctgataccccaagacgcgaaggacaaagccctaaaatcgaaggacactgcccctctaatcgacgtcactcagcacgggtacttcaaggttctcggaaaaggtgtgctgccccaaa

SEQ ID NO: 243427 - DNA, 354 bp, Glycine max
ggcaacgcctttaacagacttaacaacaacacaaaaccggttaacgtccgttcaagccaacaactccccccccccttcctaatgcctcctttccaaaagttaaaatggcccaagaaactttcctattcacatctgaatcagtgaacgaggggcaccccgacaagctctgtgaccagatctccgatgctgtgctcgatgcatgcttggagcaggaccctgacagcaaggttgcctgtgaaacctgcaccaagaccaacatggtgatggttttcggagagatcacaaccaaggccaacgtggactatgagaagattgtgcgtgacacatgcaggaacattggttttgtctctgatg

SEQ ID NO: 243428 - DNA, 387 bp, Glycine max
gacagctcttggctttagcaaattccaattcccaattcccaattcgaaacccttattcctttcaaagaaccaaattgagtgatcgtgatggcaccaaaggcagagaagaagccagcggagaagaagcccgcggaggagaagaagtcgacggtgggagacaaggctccggcggagaagaagccaaaggccggaaagaagcttccgaaggagggaggcgccggcggagaagggaagaagaagaagagaaacaagaagagcgtggagacatacaagatctacatcttcaaggttctgaagcaggtccaccctgacattggtatctcaagcaaggccatgggaatcatgaacagcttcatcaacgacatcttcgagaagcttgccaggaat

SEQ ID NO: 243429 - DNA, 292 bp, Glycine max
gatagaagaagcagaaagagaagcattagcaaaagcaagaagaactagtctaagcagaaatggcctcttcagtgatggcatctgtggccctcaaacctgcccctttcactgttgagaagtcctcagttagaggccttccctccctctcaaggaactcctcctcattcagagttgtggccagtggtggccagaagatcaggactgacttgccttatggaatttatggtggcatggccttgagggacggagttgatacatctcgaaggaacggacccggaaatggcgtgtaact

SEQ ID NO: 243430 - DNA, 383 bp, Glycine max
  unsure (1)..(383): unsure at all n locations
ggagccccgagaggagcttaccagaatgctttatcgggtaagtttgttccagcgttggaaacgtgcgctcggattaaaataaccgacccgaacccgaaatgggatatggaaacaatgcccggtgctagagtcatgagtgacatggttttactcccgaacggcgacgttttgattgttaatggagcagccgtanggactgcgggctgggaattgggccgtaacccgctactgagtccgtttctttataaaccaaataatcgggtcgggtcgagatttgaggttcaaacatcgtctgatattccgagaatgtacccctccagtgccgttttgcttcgtgacggtcgcgttctggttgctgggagcaaccctcacatttattacaa

SEQ ID NO: 243431 - DNA, 363 bp, Glycine max; identical to SEQ ID NO: 236029

SEQ ID NO: 243432 - DNA, 378 bp, Glycine max
ggcagcgcttgagaacaagccccactcaaccaccacaacactctctctgctcctcttccacctttcaagtttttaaagtattaagatggcagagaaattcccatttacctcaaagtcagtgaacgagggaacacctgacaagctctgcgaccaaatctccgatgctgtcctcgacgcttgccttgaacaggacccagacagcaaggttgcctgcgaaacatgcaccaagaccaacttggtcatggtcttcggagagatcacaccaaggccaacgttgactacgagaagatcgtgcgtgacacctgcaggaacatcggcttcgtctcaaacgatgtgggacttgatgctgacaactgcaaggtccttgtaaacattgag

SEQ ID NO: 243433 - DNA, 366 bp, Glycine max
  unsure (1)..(366): unsure at all n locations
gatccaaggcacggcaagtacatggcttgctgcttgatgtaccgtggtgatgttgtccctaaggatgtcaatgctgctgttgccaccatcaagactaagaggactgttcagtttgttgattggtgtccaactggattcaagtgtggtatcaactaccagccaccttctgttgttcctggtggtgaccttgctaaggttcagcgtgctgtatgcatgatcagcaacaacaccgcagttgctgaggtgttctctcgcattgaccacaagtttgatctgatgtatgccaagagggcttttgttcactggtatgttggtgagggtatggaagaaggggagttttctgaggctcgtgangaccttgctgct

SEQ ID NO: 243434 - DNA, 299 bp, Glycine max
gggtccattttgcgcaggcaatgggaaagagcaaggttctttgttgtggggggaactgggtatgttgggaagagaataattaaaacaagtttaaaacaaaggcatgaaacctatgttcctcaacgttcaaaaaaaagtccaaaccttgaaattaagcaaatgctgccttcaatccagaaaccaggttctcaacttgtggaagcctctgtctctgattaccaaaacttggtggaagctgttaagcctgtggaagttgtgaattgcaccatgtctggggttcaatttttgctctcacaact

SEQ ID NO: 243435 - DNA, 371 bp, Glycine max
gaacacagaacaaaaacaaagaaaaaaaaaaacccttagccaacacaaccatcatggccacctctgctattcagcaatcagcattcactggtcaaactgctctgaagcagctcaatgagttcgtccgcaagaccggtggcgccggcaaaggtcgcactaacatgcgccgcaccgtcaagagtgctcctcagagcatttggtatggccctgaccgtcccaagtacttgggtccattctcggagcagattccatcatacctgaccggagaattccctggtgactacggatgggacactgctggattatcagctgacccggaaaccttcgccaggaaccgggagctggaggtgattcacagcagatgggcaatg

SEQ ID NO: 243436 - DNA, 383 bp, Glycine max
gcttcctcccagtgcagcatcgtagagaaataagggaaaaatggtgtcgctgaaactgcagaagcgcctctccgcaagcgtgctcaagtgcggcagaggaaaggtttggcttgaccccaatgaagtcaacgaaatctccatggccaattctcggcaaaacatcaggaagttggttaaggatgggtttatcatcaggaagccaaccaagattcactcccgctcacgtgctcgtaggatgaaggaggcaaagaggaagggccgccactccggttatggtaaacgtaagggtacaagggaggcaaggcttcccaccaagatactctggatgagaaggatgcgtgtgctcagacggttgcttcgtaagttacaggaatcaaagaaaa

SEQ ID NO: 243437 - DNA, 279 bp, Glycine max
agaaccagaacgtcaacgtgttattcaatgcttaaaagctgctgtagagagaagagcatctgagggtgttcgattagagttatgcacagaagacaggcatgggcttctagcagaagtggtgagaacattccgagagaatgggctcaatgtgaccagggctgagatatctaccatagggaatatggctaaaaatatattctatgtaacggatgcgattggaaatccagctgattctaaaattatcgaatctgttatgcagaaaattgggttaagcaattt

SEQ ID NO: 243438 - DNA, 423 bp, Glycine max
  unsure (1)..(423): unsure at all n locations
acgcgtccacctttatgggttctattgctgggattgggaattccttaacgctcccctcccttttaattcctccccctaaacctccttcctcaaaaattttaattccctccctaataaaacttataaattaaaattaaacaaaagggttttccttccttcctttcttggggaataataganataagaaaagattagtgaagttgaaatgtcgcaacgatcggtgccggcgccgttcttgacgaagacgtatcagttggtggaggatcaggggacggaccaagtgatatcgtggggtgaaagtgggaacacttttgtggtgtggaagcatgcggattttgcaaaggatttgcttccaaaatatttcaagcacaacaacttctccagctttgttcgacagctcaatacctatggattccgaaaaat

SEQ ID NO: 243439 - DNA, 315 bp, Glycine max
aggggcctcctaataatgaactggaacaacctcaaaccgaaaacaacaatcccaaccaatattaataaacaatacaaaataaaggaaaattcgagccacaacctccgcggaatggggtgcagcgcggggatcattggtgtggacttggccaaggatattctccaggcgaaccctaataactacgcggtggtggtgagcacggagatggtggggtacaactggtaccaggggaaggacaggtctatgcttatcccgaatagcttcttccgcatggggtgttctgctgttctgctttccaaccgtcgaagggactat

SEQ ID NO: 243440 - DNA, 370 bp, Glycine max
gcatcggaagcagaagagttctctgaagtgttctcaaagcctctcagatctcttccttatgattcgcctgggcaaacatttgtgggttttgagaagcctgagggattgtcaattgctggaaaattttctaacgttctgaaatttattgttaaagaggttgacccaaccactggtgagacagaagatgatggcgttgaagatgaataccaactagaggatttagaggttgtcaccgcagactacatgttgaaagtgggagtgtctaatttcaggagtgcatgggaaagcattggccctgactgtgagcgagtggatgaatatggtcttggccccagggagagtttggctgaagctgtaaataccgtcatta

SEQ ID NO: 243441 - DNA, 348 bp, Glycine max
gatccgagaacgtggttgtgacaggatcattgagctcggcaagaatggaagaacacaggttgagcttgagaatgagcacgcttgtcttcactctttccattatcatcatcgtactctcttacccagcacaaccacttgcgttgaaccattctccgaaattcctaggaaaattcgcagcaacagcacgaacccattcaaattccgagccaccgccgcaattccactacgaaaaaagatacttccaacagcgcctcgaccacttcagcttctcggagctacccacgtttcctcaacgctaccttatcggcaccgaacactggggtggcccacatcgcctgggcccaattt

SEQ ID NO: 243442 - DNA, 384 bp, Glycine max
gacggaaatgcagaaagtggagtttgttactgtggggttccagcgttgagaaaaacctaattaacgaaccaaaaccctaaaatctggaaaaatggaatcgagcgttctggaatggctgggcgtggagataattggcgtgatgagccccgtctcgatctgcatgttccttgtggtcctactggtgtactccctctcctcgccgtccaccaccgccaccaccatcgccaccgccgccaacctcgtctacgctgagaacccctccgacaccgccgcgcagaagctcgagggcgcggtcctcaacgccgtcgtcttcatcgtcttcatcgcgctcgcaaccttcctcctcgtcctcctctactactacaactgcaccgccttcctcct

SEQ ID NO: 243443 - DNA, 397 bp, Glycine max
ggatttcagtgagtgatcggtgttcacttgatctcatcataatcgtcagcgtcaattgaagaagatgccgatcagaaacatcgccgtcggaaggcctgaagaggcgactcaccccgacacgttgaaggcggctttggctgagttcatctcaaccttcatcttcgtgttcgccggctcaggctccggcatcgcctacaacaagctcaccgacaacggcgctgccacccctgccggcctcatctccgcctccatcgcccatgcattcgccctcttcgtcgccgtctccgtcggcgccaacatctccggcggccacgtcaaccccgccgtcaccttcggcgccttcgtcggcggcaacatcaccttcctccgcggcatcgtctacgtcatcgcccagctc

SEQ ID NO: 243444 - DNA, 383 bp, Glycine max
gatgcacaagtttgttgagatagctagaagcaataagatgaaaatgaaagtgcttgttttgtttgttgctacagttttggtagcatatgaatgccatggctcagactaccagaagttccctctccaaatgaaaactgggtttggtgggcaatacagcaatgaggtggcatgtgccagttggaggcttggcgtggaagcaaacaacgtagtcaagtggcaaactgttcctgcagcttgcggagagtacatagctgactacgttctaggagaccaatatagatcagattccaaaacagttaaccgacaagcttatttctatgctaaatccctcaaactcaccaacaaagatgtctttgtcctggacgttgacgacactactctct

SEQ ID NO: 243445 - DNA, 362 bp, Glycine max
gaagaagaaaccaatagataacaaactagagatagagtgagagtgagagtgagagtgagagacatgtataggttcagcaacacagtgatcgggttcttgaacttgttcacacttttagcatccataccaataattggagcaggtctatggatggcaaggagcagcacaacctgtgaaaattttctccaaacccctcttttggttataggatttgttgtgcttgtggtgtcactagcaggcttcattggtgcatgctttcatgtggcatgtgcactatggttgtacttggtggtcatgttgttcctcatagcagcactgatgggtttgactatacttggttttggggtgactagcaagggtgg

SEQ ID NO: 243446 - DNA, 357 bp, Glycine max
cgaagtccattcactattttctacaatccaagagcatgcccctcagaatttgttattcctctggccaaatacagaaaatctgtatttgggactcaggtctcagttggcatgagatttggcatgatgtttgagacagaagaatcgggtaagcgcagatatatgggtacaatagttggtatcagtgatgtggatcctttaaggtggcctggttctaaatggcgaaatattcaggtggagtgggatgagccagggtgtggtgataagcagaacagagttagtgtgtgggagattgagactcctgaaagcctttttatctttccttctttgacttcaggtctaaaacggccattaccatct

SEQ ID NO: 243447 - DNA, 385 bp, Glycine max
  unsure (1)..(385): unsure at all n locations
agggaatttaatggtaatggtccttcaaccccgttacgttcccggctccccggcaatcaaaagccaaaaaggcctttcaaaaggtactttaaaatcgggagggttgccaaaatcaactacggcaaggaatatggcaggctcgtcgtcatcgtcgacgtcattgaccagaacagagcacttgtcgatgcccctgatatggtgaggtcccaagtcaatttcaaaaggctttcccttaccgacatcaagattgacatcaagaaggtcnctaagaagaaagatcntgtcaaagccatggaggatgctgatgttaagaacaagtgggagaagagttcatggggtagaaaactcattgttagaaagagaaggcatccctcaatgattttga

SEQ ID NO: 243448 - DNA, 335 bp, Glycine max
gagggttttatctcattaacgtttcttctcttcactctgcccgctgcatcaatggcttcagagaagaaactttcgaacccaatgagggagataaaagtgcagaagctcgtcctcaatatctctgttggcgagagtggagatcgtctcaccagagcctccaaggtgttggaacaacttagtggccaaaccccagtgttttccaaagcaaggtacactgttcgttcctttgggattagaagaaatgagaagattgcatgctatgtcactgtcagaggtgacaaggcaatgcaacttttggagagtggtttgaaggtgaaggaatatgaacttctcag

SEQ ID NO: 243449 - DNA, 373 bp, Glycine max
  unsure (1)..(373): unsure at all n locations
ggtctcaaaacaaatagtggaagagtaggaaacgagattgacgaaccctaagctgaaagaagaaaaaatgtctggcgttaagagaacactgaagcagttcaccttccgaaccggcaagaccgccggtcgcaactcggccgggcgcataaagttctttcaccgcggccgcggagccaagcgcttgcaacgaaccgtcgatcacaaacggaataccgcttcttctctcggcgtcgtcgaaaggatcgagtacgaccctaaccgctcctccaaaatcgccctcgttcgctggatcgaanngcgtcatcaccgtcgccgccgcgctgcctccgccaacgccgcttcgcccaagctcctccatctcgattccgccact

SEQ ID NO: 243450 - DNA, 299 bp, Glycine max
gatccaactcaggaagggaaggcgagacagctcaatcctacacatgacatctcaatctcaatctctttcgtagtgttttttgtttttaaatacataaaaaaccattcattctgtttcgttccactccctaatagctgctacagttacagcataacttctattctatatttctttctactcgcaagcaaatcagaagaagagaatggcagcagcagaggggctaaacagagagcagtacgtgtacttggcgaagctgtcggagcaagcggagcggtacgaagagatggtggagttcatgc

SEQ ID NO: 243451 - DNA, 335 bp, Glycine max
ggatttcatttcgtttgcaattgaatttcaatttccctaggggcttaatatctcccctcacttgtgcctagccttatgtcatagtattatcattcattctcatctttctctcttctctctccacccaaaccctaactcccgaccctgttcccctctcgtatccgtcatgaaaggaggaaagtccaagaccgaatctaagagagccgatcccaaacttgctgtgaataagaagggagccgccaccaaggctaggaaacccgccggcaaggggaaggcagcgaaagaccctaacaagccaaagaggcctccaagtgctttcttcgttttcatggaag

SEQ ID NO: 243452 - DNA, 376 bp, Glycine max
ggtcacagagctggtgaggctgccattgtctatgaacatggagctgatgttgaggcactaatgccaaaactacggcgatctgattactacacactgcctcgtatacatgaactggcggccaaggaaagagctgaaccaggattctgcagtcatgttaaggacttcgtggttggaaggcaaggttatggcagcatcagattcttgggtgagacggacgtgcgacggctcgatcttgagtccctcattcagtttaacaaccgggaggtgattgtatacatggatgatttaaagaaacctcctgttggacaagggctgaataagcctgctgaggtgacactactcaacataaaatgtttcgacaaaaaaactggccatc

SEQ ID NO: 243453 - DNA, 388 bp, Glycine max
ggagataaagaaggcattgataatcatagctatggcaacggcgagtgcaagttgtgcggtatcatttagaaacagcttcggtgtgagtaaaccctcggatcttgggttcttgagctctcgtctgaacggcctcagaatctgcttccccaaattgccacccacacccctcactgcttctcccttccccacacccctccctatcgttgccaagagagtgtgtcccttcactggaaagaaatcaaacagggccaacaaagtatcattttcaaaccacaagacaaagaaactgcagtttgtgaaccttcagtacaagagaatttggtgggaagcaaggaagcgctacgtaaagcttcgtttgtcaactaaggcattgaagacgatagagaag

SEQ ID NO: 243454 - DNA, 360 bp, Glycine max
ggcggagatcaatatttgtcgctgaggtcgatcgtcgataaaaggcaatgtttttgtgggattggttttatgggattctagcgtcgcttggcctgtggcagaaggaggccaagatcttattcttgggcctcgataacgctggcaaagccaccttgcttcacatgctcaaagatgagagattagtccagcatcagcctacccaatatcctacatcagaggagttgagtattgggaagatcaagtttaaagcttttgatctcgggggtcatcagattgctcgaagagtttggaaagattactatgcccaggtggatgcagtggtgtacttggttgatgccttatgacaggaaagatttgctg

SEQ ID NO: 243455 - DNA, 356 bp, Glycine max
  unsure (1)..(356): unsure at all n locations
ggaacttcaagggcaaaaaaagttgtgctgtgccgcctcttccgtangcagcagcaatggcctcaaatcccaaaactttgacctttgaggaagtagctaagcacaacaacaaaaaggattgctggattattatcaatggaaaggtgtatgatatcacaccatttttggatgagcatccaggaagtgatgaagttttgctgacgtcaacagggaaggatgccaccattgattttgaagatgtgggccacagtgattctgctatagaaatgatggaaaaatacttcattgggaaagttgacactcncactcttccacccaaagttagccatagtctgccacaaactacacaaacacat

SEQ ID NO: 243456 - DNA, 278 bp, Glycine max
  unsure (1)..(278): unsure at all n locations
gtatacaaagtcaacagatctaaatgaataaaaaatagtatttatggctacgcaaaccgttgaggataattctagatctggtccaagacgaactgttgtangggatttattgaaaccattaaattcagaatatggtaaagtagctccggggtggggaactactcctttgatgggtgttgcaatggctctatttgcgatatttctatctattattttggagatttataattcgtccattttactcgacggaatttctatgaattagattcacaagaatc

SEQ ID NO: 243457 - DNA, 360 bp, Glycine max
gatcatcctaattaaacaaacaacttttcacacatgaccatgctacctcattcattaactatgattgcaacactaataatcatttttcttgcacaaacacttgtgggggtgagttcacttcctgaagctgataaaataaccaatttgccggggcagccacgggtcgaatttcagcaatattctggttatgtcaccgtggatgatcaaaatcaaagagctttgttttactactttgttgaggctgaagaaaacccttcttccaagccattagtcctatggttgaatggagggcccggttgttcatcgattggagttggagcttttgctgagcatggtcctttcagaccaagtgacaacaat

SEQ ID NO: 243458 - DNA, 324 bp, Glycine max
gagttgagagttgaaagacatgggtacggtggctccaagagttgaaagcttggcgagcagcgggataaagtgtatcccgaaggaatacgtgaggcctcaagaagagctcaagagcatacggaacgtgtttgaggaggaaaagaatgaagggctacaggttccgacaattgacttgagagagatagattcggaggacgaggttgttcgagggaaatgtcgtgagaagctgaagaaagcggcggaggagtggggtgtgatgcacttggtgaaccatgggatccccgatgagctgataaagcgggtgaagaaagcacgggaaacgtt

SEQ ID NO: 243459 - DNA, 306 bp, Glycine max
ggagcctgtggagtgttttcttctgatttcatctggatctgcgagagatgacggtctttcatttcttcaatcgcgcgattctcaccttcggcccccacgccgtctactattctgccacgcccttatctgagtatgatacactcggcacctctatcaaagccgctgttgtttatcttgcaacggcattagtgaagcttatttgtctagctacttttctcaaggtatcagagagcgatagctttgatccgtatcaggagtttttgaaggcgttaataggttctatagatgttgctgggctttaatttg

SEQ ID NO: 243460 - DNA, 323 bp, Glycine max
tgacaagcgtgtgattgagaggttcgagaaggaagctgccgagatgagcaagatgtcattcaagtatgcctgggtgctcgacaagctcaaagctgagcgtgaaacaggaattaccattgatattgctttgtggaagtttgaaaccaccaagtactactgcacggtcattgatgctcctggacatcgtgaccttatcaagaacatgattactggtacctcccatgccgactgtgctgtccttactattgactccaacactggtggttttgaaactggtatttctaacgatggacacacccgtgagcatgctcgtcttgctttca

SEQ ID NO: 243461 - DNA, 342 bp, Glycine max
gattccagtgtttttcatttcatcgtgcattcaatggccaccacagcagctctatccggaaccatggtgagcacctccttcatgaggaggcaacctatgaccaccacaagcctaaagacattccccaacgttggtgaagctctttttggtctgaaaagtggacgaggtggtcgtgtcacttgcatggcctcgtacaaggtgaagctcataaccccagaaggagaagtggagtttgaatgcccagatgatgttttcattgttggcaaggcagaggacgaaggcattgaacttccctactcgtgcagggccggttcttgcgtttcctgtgttggcaaaattgtg

SEQ ID NO: 243462 - DNA, 356 bp, Glycine max
ctgccagaagagacagagagggaggaataagatgcgaatatataacaaataatttgtactttcatcaatacaaaatcccgttgtatttttctcagatggcgcgaacgaatcagctggcgactaacgcggctcgcaagtcggctccggcgaccggcggcgtgaagaagccgcacagattcaggccgggaaccgtggtgctgcgcgggatccggaagtatcagaagagcacggagctactcatccggaagcttccgttccagcgcttggtccgcgagatcgcgcaggacttcaagaccgacctccggttccagagctccgccgtctccgcgctccaggaggccgccgaagcttacttg

SEQ ID NO: 243463 - DNA, 390 bp, Glycine max
gaggaacaagaagcgaaaatataacaaataatttgtactttcatcaaaacaaaatcccgttgtatttttctcagatggctcgaacgaagcagctggcgactaaggcggctcgcaagtcggctccggcgaccggcggcgtgaagaagccgcacagattcaggccgggaaccgtggcgctgcgcgggatccggaagtatcagaagagcacggagctactcatccggaagcttccgttccagcgcttggtccgcgagatcgcgcaggacttcaagaccgacctccggttccagagctccgccgtctccgcgctccaggaggccgccgaggcttacttggtcggtctcttcgaagacacgaacctctgcgccattcatgccaagcgtgttacta

SEQ ID NO: 243464 - DNA, 341 bp, Glycine max
  unsure (1)..(341): unsure at all n locations
gatccaactctctaaacaacacattaacctttctcattccccatctcctcaccttattcagccactgctaatttctagggttccgaaatggacgctggcggaaagatcaagaagggcgccggaggaagaaagggcggcggccctaagaagaagccggtttcaaggtccgtcaaggccggtctccaattcnccgtcggaagaattggccgttatttgaagaaaggaaggtacgcccagcgtgtcggtaccggtgctcccgtttacttggccgcagttctcgnagtactagctgctgaggtgcttgagttggctgggaatgctgcacgtgacaacangaagaa

SEQ ID NO: 243465 - DNA, 345 bp, Glycine max
ggtggatgcaatttggaaatgactatgtattggggtattggccttctttcctgttctcatatttggctgacagtgcttccatgattgagtggggaggtgaagttgtaaattctgagcctgatggtcagcacacatcaactcaaatgggaagtggtcatttccctgaagagggttttggcaaagcaagctacttcagaaacattcaagtggttgatagctccaataatctcaaggctcccaaaggcattggcaccttcactgagcaatcgaactgttatgatgtccaaacaggcagtaatggggattggggccattacttttactatggaggccccggtaaaaatc

SEQ ID NO: 243466 - DNA, 351 bp, Glycine max
agacagaccggttggaagccacaaattggttttcttcaggagaagttatagaagagattcaaaggagacccaggaaaagtgaaactcctaacgtttccgaagtgattgaggaacaacagatgcccaaagtcgttgctcctagacctgagcaaatgattgctattatggctgccattgtgaattctcagactcttgaagaggttgctagacttgataaggcattgaagtcaggccagcgtcctgcagatttattgttggacaatgttgatgaaagagatgaggacatgattcatgacgatagaggtcaagctgatggagaatctaatgatacacaagagcagagaaatactg

SEQ ID NO: 243467 - DNA, 350 bp, Glycine max
ggaaacagagagtgatttcagtgagtgatcggtgttcacttgatctcatcataatcgtcagcgtcaattgaagaagatgccgatcagaaacatcgccgtcggaaggcctgaagaggcgactcagcccgacacgttgaaggcggctttggctgagttcatctcaaccttcatcttcgtgttcgccggctcaggctccggcatcgcctacaataagctcatcgacaacggcgctgccacccctgccggcctcatctccgcctccatcgcccatgcattcgccctcttcgtcgccgtctccgtcggcgccaagatctccggcggccacgttaacgccgccgtcaacttcggcg

SEQ ID NO: 243468 - DNA, 346 bp, Glycine max
  unsure (1)..(346): unsure at all n locations
agttcaagaaatatttgcatcttaacagcaaatggagccatatctaatgtgacacttcgacaacctgcctcatctggtggaactgtgacttatgaggggcgatttgagatcctatcacttggaggttctttttttcttgctggaactgaaagagctggggggctgagtgtgtccttgtcagggccagatggccgtgtgttgggcggcggagttgcaggtcttctgatagctgcttnccctgttcagattgttttggcgagctttgtttctgatgttcgcaagcacttgaagcgtgcaaagaagacggagaatgaaaaggtttcgacagcaggaggccaaagcagct

SEQ ID NO: 243469 - DNA, 338 bp, Glycine max
  unsure (1)..(338): unsure at all n locations
gaaccaggctctggctcggaaccttcgacacggcggaggaagctgctttggcttacgacaaagccgcgtataggctccgagacgacttcgcgaggctgaacttcccgagcctgaaaggctcgtgccccggggaggagtacaagcctgtgcattccgcggtggacgctaagctcgacgcgatttgcgccaacttggcggaaatgcagaagcaagggaagacggagaaaggtgccaggtcagcgaagaaatccaaagcaaggtccgaaccangaggccaagcccgaacctcaagcttccgccgaaagtgagggttctgcggattcttctccgctgtctga

SEQ ID NO: 243470 - DNA, 224 bp, Glycine max
ggagggcgaggaagccacatagagacacaatacagagtgagttgttgctccttcgccacaactctctgccaacatgggtatctccagagattctatgcacaagaggcgtgccactggtggcaagaagaaggcctggaggaaaaagagaaagtatgagcttggtcgccagcctgctaacactaagctgtcaagctacaagacagtcaggaggatccgtgttagag

SEQ ID NO: 243471 - DNA, 298 bp, Glycine max
  unsure (1)..(298): unsure at all n locations
gaacacagaacanaaacaaagaaaaaaaaaacccttagccaacacaaccatcatggccacctctgctattcagcaatcagcattcactggtcaaactgctctgaagcagctcaatgagttcgtccgcaagaccggtggcgccggcaaaggtcgcactaacatgcgccgcaccgtcaagagtgctcctcagagcatttggtatggccctgaccgtcccaagtacttgggtccattctcggagcagattccatcatacctgaccggagaattccctggtgactacggatgggacactgct

SEQ ID NO: 243472 - DNA, 331 bp, Glycine max
accacgcgtcaagcccacgccgttcggttacggcttgccaaaaaaacaacaaaaggggaaaaaagaaattgaaaaaaaaaaaaaatggcgtcaaccggaccggtgcctttttggagggcaagcgggaataacatacatcaaatactcaaacatatgcgccaatctggtcaggaatttccctcaaggaaccctaaaggctgaagccatctctcgtgagaaggtccattttgctctctccaaatgggtcgacgccaagcctgaaaaacctactattcgttcagacaccccagagcagtgatccggaatagttggaagctataaatgcataaat

SEQ ID NO: 243473 - DNA, 347 bp, Glycine max
aaactaggcatggtttctctctctagcttggacgagtgaattagattcatcatcaagatgtcgtctctgatagcagaagatgtgaagagcagatcagaggtgttacacggggacgaaatgtgccaagtgaagtccaaggagcttctcaaggaaatcgccctccccaacggccttcttcccctcaaggacatggaggagtgcggctacgacagacaaaccggcttcgtctggctcaaacaaaagaagagttacacccacaagttcgacaagatcggaaagcttgtctcctacgcgcccgaggtaactgctcatgtccaacaaggtaaaattaccaaactcaacggggt

SEQ ID NO: 243474 - DNA, 283 bp, Glycine max
ggcggcaagaggacaacggaaggggaacctggtttcctccgccttaacccttcccttcacagaagcgtaaaaccaaaaggcttgactagagaaggagagagagagagcttcgaatcgaaactcagaagtagaaggaagcacaaatcacaatcgctatggctaggtacgaccgagcaatcaccgtgttctcccctgacggccatctcttccaggtcaagtacgccctcaaagccgtccgcaagggcaacgccgccgtcggcgtccgcggcaccgacaatgttgt

SEQ ID NO: 243475 - DNA, 377 bp, Glycine max
gattccttgagaagattctggtgaatgcgtagaaaaggaaaataaagaaattagcgtgaaaaatgttgggtgtgttcagcagctccatagtgtcgccgccggaggagctcgttgccgccggcagccgtacaccgtcgccgaagatgacggcggcggcgctgcggaagtggttcgaggagaagaacccctccgcagtgtcggtggaggtcggagagcatgtccagctcgcttatacccaccagaacgagtcgccgtttcagcccagatcctttgctgtgaaggatgaggtattctgcttgtttgagggagcccttgacaatttgggcaacttgagacaacaatatggattggccaagtcaaccaatgaagtaatgttg

SEQ ID NO: 243476 - DNA, 320 bp, Glycine max
gaaactaggcattggtttctctctctagcttggacgagtgaattagattcatcatcaagatgtcgtctctgatagcagaagatgtgaagagcagatcagaggtgtaccacggggacgaaatgtgccaagtgaagtccaaggagcttctcaaggaaatcgccctccccaacggccttcttcccctcaaggacatggaggagtgcggctacgacagacaaaccggcttcgtctggctcaaacaaaagaagagttacacccataagttcgacaagatcggaaagcttgtcccctacgcgcccgaggtaactgctcatgtccaa

SEQ ID NO: 243477 - DNA, 290 bp, Glycine max
  unsure (1)..(290): unsure at all n locations
gattctcagtcgtcgcgtgtactttcttgcgaaacagaagggcgaaggggcaaacacaacttttttgtttttttgtagagcgagagagaaaaaaatgttggggatcttcagcagttccgtggtgtcgccgccggaggagctggtggctgccggcagcagaacgccgtcgccgaagacgacggcggggaagctgctgaancggttcgtggagaacaaggcgtccgcggtgtcgctgcaagtgggagaacacgtgcagttggcttacacgcaccacaacgagtcaccgtggc

SEQ ID NO: 243478 - DNA, 374 bp, Glycine max
aggtgcaatctgttgtaaggcccattaagaaggatttgaaaagggccattctcaagaagaaccctcttaagaatctcaactcgatgctgaagctgaatccttatgccaagactgctaaaaggatggcccttctcgctgaggcacagcgggttaaggtcaagaaggaaaagctcgacaagaaaaggaagactgtctctaaggaggaaccttctgccatcaaggctgctgggaaagcatggtatcacactatggtgtcagattctgattatacagaattcgacaacttttcaaattggttgggtgtttcacattaaacttcatgatttattttttcgtattagaattttgttttttatgctcatcagaactaaata

SEQ ID NO: 243479 - DNA, 330 bp, Glycine max
ggtctcgtggaattgtaagcaagcaaaaccctagcggcgcctgctttctttgttcgtgttttgcatcaggatggagtctcaggtgaagcacgcacttgttgtcaaagttatgggtcgtactggatccagaggacaagtgacccaggttagagtgaagtttttggatgatcagaaccgtcacatcatgaggaatgtgaaaggacctgtgagagaaggagacattctcaccctactcgagtctgaaagggaagcaagaagattgcgctagatggtctctttttttctggcttgccctcaaattcgaacaaaagcaatatttttcttgatatt

SEQ ID NO: 243480 - DNA, 396 bp, Glycine max
  unsure (1)..(396): unsure at all n locations
cggtcaggaatccgggcgaccacgcgtcaaccacgccttcgttacggtggcaaaagaacaacaaaagggggtggcctccaaaccccaaccaaccatcccaaaaccctaacctcgcgtttctggctttcgtcctttaacatcaggatggagtctcaggtgaagcacgcacttgttgtcaaagttatgggtcgtactggatccagaggacaagtaacccaggttagagtgaaatttttggatgatcagaaccgtcacatcatgangaatgtgaaaggacctgtgcgagaaggagacattctcaccctactcgagtctgaaagggaagcaggaagattgcgctagatggtttcttttggcttgcctccaaattcgaacanaacagtgtgattttgttga

SEQ ID NO: 243481 - DNA, 309 bp, Glycine max
atcgacgaagcggtaaaatgagtcagtatgcttcatcatgatgaactttgggaataattattcggacgatgccttcacgcacctgatttggtgggcatattattggagcagacagttggaactcacgatccgctttccattttccctttagttcctaatgggtgtgacttctctctgctccgggattggctggttgaatttgtcagcgactacaagactgaaacatcggtcagacatggatgccatgctatcattcaggcagactgtgtcagtcgattgtgtcactattacaatgaggtattgcatggg

SEQ ID NO: 243482 - DNA, 352 bp, Glycine max
gcctaattgctattctctctctttcacagcacactcctcccagggtttctccaccaagagggaaatggctcccaaaccgcctagtacgggtctgtttgttggactgaacaagggacatgtcgtcaccaagaaggaattgcccccacgcccctcggatcgtaaggggaaaacaagcaagagggtgcactttgtgaggaacctcataagagaggttgctggttttgcaccctatgaaaagcgtataactgagttgctgaaggttgggaaggataagagggcacttaaggttgcaaagagaaagcttggaacccacaaacgtgcaaagaagaagcgtgaggaaatgtccaatgtt

SEQ ID NO: 243483 - DNA, 333 bp, Glycine max
ggagaatatagtatggcacaatctagtggcaaaaaattggttgagtggctggttgcagcattattgttcattgccttgttgagtggtactgcacatgctgttgcaatatgtaacattgactcaagtcaactgaacttgtgtcgtgctgcagttactggtcaaaaccctccaccacctgatgagaaatgctgtgcagttattcgccaggccaatttgcgttgcctctgcagttacaagtctatcctaccttcatttggaattaaccccaataatgctttggccttgcctgctaaatgtggtctacaattgcctcctaattgttgagtgctgtga

SEQ ID NO: 243484 - DNA, 391 bp, Glycine max
  unsure (1)..(391): unsure at all n locations
ggttctagtgtgtgattgtttgttgttgtaactcgttcttcttcttttgttgttctgtgtttgtgtttgttttttctcccacctgaaaatgtcttgctgcggtggtaactgtggttgcggaagctcctgcaagtgcggcaacggctgcggaggctgcaagatgtacccagacttgagctacactgagtcaaccaccaccgagaccttggtcatgggagtggcacctgttaaggctcaatttgagggtgctgaaatgggtgtgcccgctgagaacgatggctgcaaatgtggaccaaactgctcctgcaacccctgcacttgcaagtgangtgttgggagagcaagcttcaagcagagatagcccttaattaggaataatgataaactaata

SEQ ID NO: 243485 - DNA, 341 bp, Glycine max
accacgcgtcaaacgagtgccaaaaaaagaacaaaaggggcaacaaccgtttaaccttgtcaaaaatggcaaaattgatgaaggtcgatggaaaattgaagtcaagacatgagtttcccccggaggagtttgttgaaaacttgaagttaatggagcatagatatggtgcgaaggaatttgtgacaagcaaggacagtagccttttatctccgggcacattctatctcactgaagttgactccatgtatcggagattctattcaaagaaaactaaagaaagcagtttgactcacgctgagaacggtgtgattgctaatggcgttgctaatggccactgatgt

SEQ ID NO: 243486 - DNA, 224 bp, Glycine max
aaacctaacctaaccctccaaacaatccaaccggtgccaaattccaacaattttccaagggcttcggcaaaggttaattcccgtgccttggttggtgggcttgcttgggtcaccggaaacaatgcccccaaaaaagccttttcaaccaacgggaaaatctttaaaccaaaggttaccaacaaccttaaaactggaaggtcaaaaggatccggatttgtaacctt

SEQ ID NO: 243487 - DNA, 277 bp, Glycine max
ggaaaactgttgtgagtttcgggtatgtttcaaatggcttcaggaaaggttaagttccggtgccttgttattcggcttgcttgggtcagcggcaactatgccctcgagaaacccttttcagtctacagcgacatcgttgaatccaaggttatcaaccaccgtgagactggaaggtccagacgattcggatttgtgaccttcgccgcagaacactcaatgaaagatgcgatctcaggaatgaacggccacgaccttgacggtcgtaacatcactggtc

SEQ ID NO: 243488 - DNA, 383 bp, Glycine max
ccatccgaccgtatacgtctcagtactgtagctgttgcacgtttctacgaggtctacaatggcttctgcatatgtagtcttcagttgcgttgcttggcgggcttgcttgggtcaccggcaacgatgtcctcgagaaagccttttcaagctacggcgacatcgttgagtcgaatgttatcaaccatcgtgagactggaaggtccagaggattcggatttgtgaccttcgcctcagagcagtcaatgaaagatgcgatcgtaggaatgaacggccaggaacttgactgtcgtaacatcactgtcaacgaagctcatacccgcgccacccgtggtagtcgtggaggcagtggtttcggaaattgtggtggatacaatccctgtatc

SEQ ID NO: 243489 - DNA, 333 bp, Glycine max
  unsure (1)..(333): unsure at all n locations
gaagaaggtgtgacactactgtcatactgcactgcttataacttttttctctttctctcaattcaattgccttctcccctgcgaatctcttctccacgtatcggagaacatggggaacaagatgaatgcgatcgcgttgtgcttgttagtgtcgaccctgttggtttctgcggtgtantgtgcaccgaatgctgggctccgtaggattgggctgaagaagattaaattggaccctaaaaacaggcttgctgctcgagttgggtccaaggatgttgattctttccgggcttctattagaaagtttcatctccaaaacaactttggtggcactga

SEQ ID NO: 243490 - DNA, 353 bp, Glycine max
  unsure (1)..(353): unsure at all n locations
gggccgctcactctctagggtttttatttctctcttctctctgcatcgcttcaggttcttctgaaaagatgtctcgcgtgtatgttggtaacttggattcacgagtcaccgagagagatctcgaaggcgaattccgtgttttcggagttattcggagtgtttgggttgcacgtagacccacctggttaagcttttattgactttgatgaccgcagagatgcacaggatgctatccgtgaattggatggcaagaatggttggagggttgagctttctcacaactctagaggtggangtggtggtcgtggtggtcgctctggtggttctgatttgaaatgttacgagtgtggtga

SEQ ID NO: 243491 - DNA, 339 bp, Glycine max
  unsure (1)..(339): unsure at all n locations
ggcggcacaaagcaattcacggtgtcggaaaaagaaaaaaaaaaaaaaaatgagcgacggaggaaaacgacaaggtggaagagcgttgccgccgccgccaagaggccctccgcctcctcccccctctcgccctcgcctcgaacccgtcgatcgcgaaaagacatgtccgttactgctgcgagtgttcactaagattgggagtcaccattccatggaagactttgccgtcagaggcaaagagcccaaagacgaagttcagatttacacctggaaggacgctactctccgagaactcaccgatcttgtcaaagaagttgctccggctgcaangagaagaaa

SEQ ID NO: 243492 - DNA, 335 bp, Glycine max
caaaagggggtgctaacctaacctaacccctctaaccatcctacctgttgcaaatttcaactaatttttcaatggcttctgcagatgttgagttccgttgctttgttggtgggcttgcttgggtcaccggcaacgatgccctcgagaaagccttttcaatctacggcgacatcgttgaatcgaaggttatcaacgaccgtgagactggaaggtccagaggattcggatttgtgaccttcgcctcagagcagtcaatgaaagatgcgatcgcaggaatgaacggccaggaccttgacggtcgtaacatcactgtcaacgaagctcagacccgcgcc

SEQ ID NO: 243493 - DNA, 367 bp, Glycine max
gatggaaatcgcctcttcaccaaagtgctgaacaagggtgatgtgtttgtgttcccaattggtctcattcatttccaactcaatgtgggatatggcaatgctgctgccattgctgctcttagcagtcaaaatcctggagccatcaccattgcaaatgctttgtttaaagctaatccacctatttcttctgaagttctcgccaaagctttccaggtggacaagagcataattgattatcttcaatagcaatcttggtacgacaacaataactaatttgggagtatggatgagcatttcacactagctagttactgtataattgatcactttagtgtttcaatcaccccatacaacagatctaataaat

SEQ ID NO: 243494 - DNA, 350 bp, Glycine max
gagctagggtttcagtggtgttagatctgtacccgcctagccattgatttggaaaagtccaagcttcaaagatgagtaagcttcagagtgatgctcttagagaagctatctcaggaatcatgactgattccaaggaaaagaacaggaaatttgtggagaccattgaactccaaattgggctgaaaaactatgatccccagaaggacaagcgttttagtggctctgttaagttgcctcacattcctcgccccaagatgaagatttgtatgcttggagatgcccaacacgttgaagaggctgagaagataggattggactacatggatgttgaggccttgaagaagcttaac

SEQ ID NO: 243495 - DNA, 418 bp, Glycine max
aagcccggcccaacccacacgtcagcccacgcgtccgcccacgcgtccgttacggcgccaaaaaaaccaacaaaagggggcacctgaaaaacatttaatttccgaattaaaaaatctaaaccaggtcttggcaaccttacttgaatatatcacggcgtgtgtaatccaaaggtacccatcacacacacgccgataatatgggacaacagcgcagtttgtgcgcacagagcgcaaatttctcacaggtcgcttctagatactccgatatctgagagtgttgattatatactgtgcaaccatgtttgagattggtgtagttcacagctgatgaaataactgctatcatgaataactttaacgagcctggatcacttgctccaactggattgtttctcgctgccaacaaatacatggtcat

SEQ ID NO: 243496 - DNA, 330 bp, Glycine max
  unsure (1)..(330): unsure at all n locations
gaatcacagctcttggctttagcaaattccaattcccaattcccaattcgaaaaccttaatcctttcaaagaaccaaattgagtgatcgtgatggcaccaaaggcagagaagaagccagcggagaagaagcccgcggaggagaagaaatcgacggtgggagacaaggctccggcggagaagaagccaaaggccggaaagaagcttccgaaggaaggaagcgccggcggagaagggaagaagaagaagagaaacaagaagagcgtggagacatacaagatctacatcttcaaggttctgaagcangtcnaccctgacattggtatctcaag

SEQ ID NO: 243497 - DNA, 378 bp, Glycine max
ggcacaagtttgttgagatagctagaagcaataagatgaaaatgaaagtgcttgttttgtttgttgctacagttttggtagcatatgaatgccatggctcagactaccagaagttccctctccaaatgaaaactgggtttggtgggcaatacagcaatgaggtggcatgtgccagttggaggcttggcgtggaagcaaacaacgtagtcaagtggcaaactgttcctgcagcttgcggagagtacatagctgactacgttctaggagaccaatatagatcagattccaaaacagttaaccaacaagcttatttctatgctaaatccctcaaactcaccaacaaagatgtctttgtcttggacgtttacgacactaatc

SEQ ID NO: 243498 - DNA, 355 bp, Glycine max
  unsure (1)..(355): unsure at all n locations
aatgacaaatccgtgaaggaccttgttctgttgctgtttgagactgctcttctcacttctggtttcagccttgacgagcccaacacttttggaaacaggatccacagaatgttgaagcttggactgagcattgacgaggatgcaggtgaagctgatgctgaaatgcccccactggaggaggccgaggctgatgctgagggcagcaagatggaggaggttgattaaaattaaatatgatgcgtttcttgtaaatagcgtctctaatgccttttttggcaatgtttttttcccctttttatattttggattgatcacagtgttcaatggatatttacccaattagctaaaanaaaaa

SEQ ID NO: 243499 - DNA, 322 bp, Glycine max
aagaacaagatcttctacgccagcgagtccctcgtgaagcgcgccaccaacgtcgcccgccccaacctggtctccctcggcacctgcatcgggaaatacacccacggcggcagcttccacctcaccgtccaggccctcaacttgctcgccgccaacgccaagcacaaggtctggctcaagccccagtccgagatgtccttcttgtacggcaaccatgtcttgaagggcgctctcgggaaactctccgaaaacatcgctgccggtgacggggttgtcgtcttctccatggccgacgtgccgttgggtttcggtgtcgccgcca

SEQ ID NO: 243500 - DNA, 385 bp, Glycine max
ggaggaagaagcaataatggcgccgaagataacacgtaaggttagcagaaaccccgaattgataaggggaatcggaaagtactcgaggtctcaaatgtaccacaagaggggcatttgggctatcaaggccaaaaacggtggcgttttacctcgccacggccctaaacccaaacctgaaactcccgctgaaaaaccacccaaattttaccctgctgacgatgtcaagaaaccccttgtcaacaagcacaaacccaaacccgcgaagctcaaggctagcattactcccgggacagtgttgattcttcttgccggtagatttaagggaaagagggtcgtctttttgaagcagcttccttctgggttgcttcctgtaactggtcctttc

SEQ ID NO: 243501 - DNA, 386 bp, Glycine max
gacctcaaaaaacaaaaatcaataccttagagaaaacaaaagcacagaatcgaaggaagagttcttttttgagagagattgggatggcttcgacgaagaagatcacactgaagagttcggacggcgaggccttcgaggtggaggaggcggtggcggtggagtcccagacgatcaagcacatgatcgaggacaactgcgccgacagcggaattcctctccccaatgttaccagcaagattctggccaaggttatcgagtattgcaagaagcacgttgaggccaattgcgctgatgagaagcccagtgaggatgaactcaaggcttgggacgctgatttcgtcaaggttgatcaggccacactctttgatctcattctggctgcaaat

SEQ ID NO: 243502 - DNA, 342 bp, Glycine max
ggagggcgaggaagccacatagagacacaatacagagtgagttgttgctccttcgccacaactctctgccaacatgggtatctccagagattctatgcacaagaggcgtgccactggtggcaagaagaaggcctggaggaaaaagagaaagtatgagcttggtcgccagcctgctaacactaagctgtcaagcaacaagacagtcaggaggatccgtgttagaggtggaaatgtgaaatggaaggcattgagattggatactggaaaattactcctggggaaatgaagctgtaactcgcaagactcgtgtactagatgtggtttacaatgcctcatacaatg

SEQ ID NO: 243503 - DNA, 288 bp, Glycine max
ggttggcttgtgctctgctcgtgcctctagggttatcatatctccatttccatttcctctctctcagtttccaagaatcttaagctatgggaaagtcttacccaaccgtgagcgctgattaccagaaggccgttgagaaggcgaagaagaagctcagaggcttcaacgctgagaagagatgcgctcctctaatgctccgtttggcatggcactctgctggaacttacgacgtgagctcgaagaccggtggtcccttcggaaccataaagcacccctccgaactcgctc

SEQ ID NO: 243504 - DNA, 372 bp, Glycine max
gaaagcggtgactgtgagaatggaaagaaggaggcgtggaggttatagtggtcgacgcatagttgcaagcagaagagggagcggcaaaagcaatgccaacaacaacaacaacaacaacaacaaaaacaacaacaacatcaatgtcatcaagaagcttcagagccgcgaaatttggtcgaagcctcatcgagcttttgcttctgtcactgcttctcacagattccgctctatgtgcttgacgcaccaatacgacactcatgatccctccaagactccctcttccctttggcccttcttgatgaagagaactaaggttgtcgaaattgtggctgcaaaaaacgtggtctttgctctttaccattctggtttgtg

SEQ ID NO: 243505 - DNA, 319 bp, Glycine max
gaatctagtggaagagtgaataagagatatcaatatattatgataatggagggatacaataagaaagttatgattgtggggattgtgttgggcaatgccattattgggatggccaatgggcaatactcgttttgtcgcatgcccagcgatgggttggcggcatgcaagccgagtgtgagtggggactatcctgctgatccctccactgcttgttgctcagccattgccaaagcttatcttaaatgcttctgccgcttcaatgattcgggccttctctctatgtatggtgttgatcccaacaagtgcatgggactccctg

SEQ ID NO: 243506 - DNA, 371 bp, Glycine max
  unsure (1)..(371): unsure at all n locations
gacaccacaacttgcatctcatttctcatttctcacattattattcacatctccatctagatctctctctctctcgctccgaagaaattcatcaacagacttgtgattaatttgcaattgttcaagtgatctatcaagaaattgataattcaatgggaaagtacgaaaaagagcttaatctcgaagctacagagttgagattggggttgcctgnaagcgatgagcctgggaaacgttctattgttagaagcaataagagatcttcaacagaagcaagcgatgaagagtgcataagcaagggcaacatgaattctaatggttctgatatcacaagtgatgaacaanacaatcttgtgccacctgcaaaagca

SEQ ID NO: 243507 - DNA, 272 bp, Glycine max
ggcagttcaaagcgaagaaagattcgaaacgaagaaagaaagcgttgtgaagaatggcggaagagggacaagtgatcggtgtccacagcgtagaggagtggaaggaacatctcaagaagggagaagagtccaagaaattgattgtggtggattttactgcgtcttggtgcggtccatgccgtttcattgccccaattcttgcagagtttgctaaaaagttgccgaatgtcaccttcctcaaggtggatgtggatgaattggagactgtttcc

SEQ ID NO: 243508 - DNA, 273 bp, Glycine max
gcgtggccagggtgtcgcagagcgatggccctcacagctttgcggtcacgcgtgccgtgccggggccatcctgtggagatgttcttcgagtgatgcagcaccagcccgagctcatgttcgagacactcaagcaccgcgcgcaggagtatgtcagccacgagaacgcagcagcgcttctggctgctggccttgctcgcacctttgacagaatgccttatctgctgtctctgtcttcctttgtggctgacgatgttgccgctgctgttcctgctg

SEQ ID NO: 243509 - DNA, 283 bp, Glycine max
gatgtcatagtattatcattcattctcatctttctctcttctctctccacccaaaccctaactcccgaccctgttcccctctcgtatccgtcatgaaaggaggaaagtcccagaccgaatctaagagagccgatcccaaacttgctgtgaataagaagggagccgccaccaaggctaggaaacccgccggcaaggggaaggcagcgaaagaccctaacaagccaaagaggcctccaagtgctttcttcgttttcatggaggagttcaggaaggtattcaacaa

SEQ ID NO: 243510 - DNA, 266 bp, Glycine max
gtacacagcctcaacaaccctaaggcaatgcagacgcagagcagagatctcacgcacatcgggtgccagatatcacgccacagtgttattcgcttattatcaacatgccataccccaagtcacggttttgccgtggtattcctgataccaagatcacgatttacgatgttggtatgatgtacaatggtcttgatgagtttcctttctgtgtccaactggttacttggaataaggcaaacgtttctacttacgtcctggaagctact

SEQ ID NO: 243511 - DNA, 276 bp, Glycine max
gtggttgagaaattagatagcctaatggtgctggcatttttgcatcttgaatcctgtcaaaacagtggccgtttggctgaggtattcaataccctactggcttcatttcagagaactgtattaaatgcgtacaagtcaaaatttacccagtttgtgatgttctatgcatgtgcactggaccctgaaggatgtggtgtgaaatttgcgatggttcttgcagatatgtttggaggtgatgctaatccccctattactaggatgagtgctgttgcttat

SEQ ID NO: 243512 - DNA, 386 bp, Glycine max
gaagcagaagcaggcgagtgaggaagagcgaagagtgaagagaatggctcccaagggtttaacctttctggctgtgttaatatgcgtttcagcactgtcactgagtccttctgttgcgggggaagggcaaaataatggccttgttatgaacttctacaaggaatcatgccctcaggctgaagacatcatcacagaacaagtcaagcttctctacaagcgccacaagaacactgctttctcctggctcaggaacatcttccatgactgtgctgttcagagttgtgatgcttcactgttgctggactccacaagaaggagcttgtctgagaaggaaacagatagaagctttgggttgagaaatttcaagtacattgagaccatcaaag

SEQ ID NO: 243513 - DNA, 366 bp, Glycine max
  unsure (1)..(366): unsure at all n locations
atcgcgaggctgcaagaaaaagtcggttgagaaagaaagcttatgttcaacagctcgaaagtagtcgcttaaagttgacccaactggagcaagagcttcagagagctaggcagcagggaatctttatatcaaactcaggtgatcaagcacattcaatgagtggaaatggggctatggcatttgatgtagaatatgcaaggtggctggaagagcagaatcgacaaattaatgagctaagagcaggtgtaaattctcatgcaggtgatacagaacttcgcatgattatcgatggtataatggcacattatgatgagataattacgctgaaggccaatgcagctaacgctgatgtcntccatttgctgt

SEQ ID NO: 243514 - DNA, 361 bp, Glycine max
ggcagcgcttgatttgaggccaggcaagccccactcaaccaccacacctctcctcgttcacgctacccctttctgctcttcttctacctttcaagttttaaaagtataaagatggcagagacattcctatttacctcagagtcggtgaacgagggacaccctgacaagctctgcgaccaaatctccgatgctgtcctcgacgcttgcctcgagcaggacccagacagcaaagttgcctgcgaaacatgcaccaaaaccaacttggtcatggtcttcggagaaatcacgaccaaggccaacgttgactacgagaagatagtgcgtgacacctgcaggaacatcggcttcgtctcaaatgatg

SEQ ID NO: 243515 - DNA, 369 bp, Glycine max
gggaaaccagtgaagtgatgagccaagacctcaagcgagactacgtcgtttcggaggagatcggccggggaagattcggcaccgttttccgctgctcctccgcagactccggtcactcctacgccgtcaaatccatcgacaaggtggcaataaccgccgccggagactccctcgacgcgcaatgcctattgacggagcccaagatcgttcagcttctctcccctcaccctcacatcgtaaacctccacgatctctacgaagacgaaaccaaccttcacatggttctcgacctctgttacgaatcgcagtttcaccaccgcgtcatgtccgaaccagaaccgcttcggtgatgtggcaactcatgcaaag

SEQ ID NO: 243516 - DNA, 271 bp, Glycine max
ggagagtgagtgagtggttctcttgcagcaacaaggtttagtgacaccaaacagacgggaaatgggtcgtggggtcagtgctggtggtggacagagttccttggattatctctttggcagtggggtacctgccagcagtgcaaatggtgctcgcactcaaaatgcaagtgctccttcaccaccggttgataagcaaagtccagcaccagcaccagcaccagcacctgcacctgcagcagcagcagcaccagcacctgcaccagcaccagca

SEQ ID NO: 243517 - DNA, 276 bp, Glycine max
gacgtttttagggtttacaccgatcagccagacctcccgcagcatccatggttctcacggctgaaggatgcctaatcagtggcgccaagatctacgcatgaaagggcaatcgctttgttcgtggtgattctcaagttttcctgtttgcaagctcaaagtgttcgaggtatttcgacaatcgtctgaagccttcaaatctcacctggactgcaatgtatatgcagcatgtcaacttcgacattgctcaagaagctgtgatgaagacgatatctgctg

SEQ ID NO: 243518 - DNA, 275 bp, Glycine max
ggcacacaaccactctttcttcttcttctcttaaaagagcctttgctttttctttaggcctttccgaattaagtacttgtttcattttctctcgaagcaagaaaaatgttcatcgagagtttcaaggttgagagtcctaacgtgaagtacacagagactgagagtcagtccgtgtacaactatgaaaccactgaacttgttcacgagaacaagaatggcacttatcagtgggttgtcaagcccaaaactgtcaaatatgaatttaaaaccaacac

SEQ ID NO: 243519 - DNA, 281 bp, Glycine max
gggattagaaatttttcccaaagctgatcgagaagccagccaggccaggagttgaagaatgggaagggggaagatcgaaatcaaaagaatcgagaacacaacaaatcggcaggtgaccttctgcaagagaagaaatgggcttctgaagaaagcttatgagctgtcagtgctgtgtgatgctgaagtttccctcatcgtcttctccagccgtggccgtctctatgagtattccaacaacaacataagatcaaccatagagaggtacaaaaaagcctgttcgg

SEQ ID NO: 243520 - DNA, 340 bp, Glycine max
ggaactggaggggcttcaggtgccataatctcaaccttagataacagattattgcacagcaaaaaccttgtaaaaggagaattagaatcacctctctctaaggatgttggaaggaaaggctatggtgaaagaaacagacatgtcaaccaagatgcagatccatgccatggcctctgcttctcaggcccttgatctctacgatgtttatgattgcatctctattgctgcccatatcaagaaggaatttgatagtgtgtacgggaatgggtggcaatgtgtggtaggatccaattttgggtgctatttcacccattcatcaaggactttcatctattttgct

SEQ ID NO: 243521 - DNA, 383 bp, Glycine max
agggatcgaagcaaaaaatgaaaacccaaagtgcttctctcctctgtctttttctctctcttgctatccttttggctagtggcactgctgcaagtgcaactccaagaagcgcagtgccaagccaccatgtttcaacattcaacagaagcctttttccttccacttttctctttggaattggttcttctgcttaccaggcagaaggagcagcaagtgtagatgggagaggaccaagcatatgggacacctacactagacagcatactgaaaagatttgggatcatagcaccggtgacatgggggctgatttttatcatcgatacaagggtgacataaaaatagcgaaagaaattgggctggactctttcagattctctatctca

SEQ ID NO: 243522 - DNA, 356 bp, Glycine max
gaaatcttgtgtctattgtattttatctctttccatatgcttccaaccatggaggatccaaatcaagctccagaagcgtcttctcagaagaaaatgggaagagggaagattgaaatcaaacggatcgagaacaccaccaataggcaagtcaccttctgcaagcgccgcaacggtttgctgaaaaaagcttatgaattatcagttctgtgtgatgctgaagttgcccttgttgtcttctcaacccgtggccgtttgtatgagtatgccaacaacagtgttagggccactattgagaggtacaagaaggcaaatgctgctgcttcaaacgcagaatccgtatctgaagctaacacaca

SEQ ID NO: 243523 - DNA, 264 bp, Glycine max
ggagtgagtagtgagaatggagtttcaagggttaccggaaggttgcattgctagtatactctctcgcactacgccggcggacgtgtgtaggttttccgtcgtatcaaagattttccgttcggccgctgaatcggacgctgtgtggaaacgttttctcgcttccgattaccgttccatcatttcccagtctccttcgcctctcaactatccttccaagaaggagctctatctcgctctctcggatctccctatcatcatcgatca

SEQ ID NO: 243524 - DNA, 273 bp, Glycine max
gacttgcggctgcagtagagaagcactcttcgttcttcgactgtctacgatctgctttctctgaattgtgaaaatgtcgctcggagaaactgcttgttcatacgcagctctcatccttcatgaagatggaattagtgtaactgctgacaagatcagcaccttgttgaaaactgcaaaggttccagtagactcttattggccaaccttgtttgctaaacttgctgagaagaaaaatcttggcgatttgatagcaaatgcggcaggcggtggtgc

SEQ ID NO: 243525 - DNA, 203 bp, Glycine max
cggggagtgagtagtgagaatggagtttcaagggttaccggaaggttgcagtgctagtatactctctcgcactacgccggcggacgtgtgtaggttttccgtcgtatcaaagattttccgttcggccgctgaatgggacgctgtgtggaaacgtgttctcccttccgattaccgttccgtcatttccgagtcgccttcgcctc

SEQ ID NO: 243526 - DNA, 279 bp, Glycine max
gacagacaccgacacagatctgtcttccgaagcaggaactaaatatggctgacttgttggaatggtcaaagcaagataagaaacgaatgcttcatgtcgtctaccgtgttggtgaccttgatcgcaccatcaaattttacacagaatgtttaggaatgaagcttttgaggcaaagagatatcccagaggagaaatatgctaatgcttttcttggatttggccctgaagaatcccattttgttgttgaattaacatataattatggggttacctcgtatg

SEQ ID NO: 243527 - DNA, 410 bp, Glycine max
gagtgagagagagagaaggcaagatgtcgaagagaggacgcggtggttcggcggggaacaagttccggatgtcgctgggtctgccggtggcggcgacggtgaactgcgccgacaatacgggggcgaagaacctctacatcatatcggtgaaagggatcaaagggcgtttgaaccgtctcccctcggcttgcgttggcgacatggtgatggccaccgtgaagaaggggaaacccgatctgaggaagaaggttttgccagctgtcattgttcgccagcgcaagccatggcgccgaaaggacggcgtctacatgtatttcgaagataatgctggtgttattgtcaatcccaaaggagaaatgaaaggttctgctatcactggtcccattggaaaagagtgtgccgatctgtgg

SEQ ID NO: 243528 - DNA, 378 bp, Glycine max
  unsure (1)..(378): unsure at all n locations
gaatagagagatagagcgtgtgtgtgtgtgtgtttgaaagaagataaggatgacagggcaagtggtggtgaccaacggtggcggatgcgctgctgtcgggaagggccggagagccgccgccggcgaagaggagcagaacccggcgtcaccggtggcgcttctgctggcggcgctgaggaagtcaatggtggcctgcagcgtggacagtcccgacgatgtaatctccgccgtccatcatcccatggagatcggatggcccacaaacgttaagcatgttagtcatgtcacgttcgatcgcttcaatggctttctgggtcttcctcttgagttagaggttcatgtccccgctcctgctcccagtgctanntgtagtgtgtt

SEQ ID NO: 243529 - DNA, 282 bp, Glycine max
ggtggaagtatttgcagaactttgtttcccaacctccattgcctccgcttctacctcgctaccatgatcattcctgagaagaaccgcaaggagatctgcaaatacctcttccaagagggagtttgctttgcgaagaaggacttcaatttggcgaagcaccctgagattgaggtgccgaatctgcaggtgattaagctgatgcagagtttcaagtctcgcgagtatgtgagggagacttttgcttggatgcactattactggttcctcaccaacgatggaatc

SEQ ID NO: 243530 - DNA, 284 bp, Glycine max
ggagagagagagagagagagaggcacttggaatccaaaaatgagagaaatcatcagcattcacataggtcaggccgggatccaggttggcaactcctgctgggaactctactgcctggaacatggcatccagcccgatggcatgatgccaagtgactcctccttcggtgtagcgcacgacgccttcaacaccttcttcagcgaaaccggatccggcaagcacgtccctcgcgccgtcttcgtcgatctcgagcccaccgtcatcgacgaagtccgttgtggcac

SEQ ID NO: 243531 - DNA, 274 bp, Glycine max
ggcaaccaaaatgactcaagcccagattcaaccagttaaacttggaacccaaggctttgaggtttcaaaattgggattcggatgtatgggccttactggagcgtacaatgaccctctccaagaacaggatggcatatctgttatcaagtatgcgttcagtaagggaatcacattttttgatactgcggatgtttatggagccaatgctaatgaacttttggttggaaaggctttgaagcagctgcccagagaaaagattcagatagccacaaaa

SEQ ID NO: 243532 - DNA, 267 bp, Glycine max
gcagaactgtctacgttgggaatctacccggtgatatccgtgaaagagaagttgaagatttgtttctgaagtacggacacataacacacatcgacctaaaggttcccccaagaccacctggttatgcatttgtagagtttgaagatgctcaagatgctgaggatgcaattcgtggtcgtgatggctatgattttgatggccaccggttacgggtggagcctgcccatggtgggcgcggtcattcatcctcaaaagatcggcacaata

SEQ ID NO: 243533 - DNA, 276 bp, Glycine max
ggatttcatttcgtttgcaattgaatttcaatttccctaggggcttaatatctccccgcatttgtgcctagcctcattattatcatagtaggtattcattccccttatctttctctcttctctctccccgcccaaaccctaactccctaccctattccgctttctctcatccatcatgaaaggaggaaagtccaagaccgaatctaagagagccgatgccaaacttgctgtgaataagaagggcgccgccaccaagactaggaaacccgccggaaa

SEQ ID NO: 243534 - DNA, 391 bp, Glycine max
  unsure (1)..(391): unsure at all n locations
ggttctagtgtgtgattgtttgttgttgtaactcgttcttcttcttttgttgttctgtgtttgtgtttgttttttctctcacctgaaaatgtcttgctgcggtggtaactgtggttgcggaagctcctgcaagtgcggcaacggctgcggaggctgcaagatgtacccagacttgagctacactgagtcaaccaccaccgagaccttggtcatgggagtggcacctgttaaggctcaatttgagggtgctgaaatgggtgtgcccgctgagaacgatggctgcaaatgtggaccaaactgctcctgcaacccctgcacttgcaagtgaggtgttgggagagcaagcttcaagcagagatagcccttaattangaataatgataaactatta

SEQ ID NO: 243535 - DNA, 383 bp, Glycine max
gctgtaacaaaatggatgctactacacccaagtattccaaggccaggtatgatgaaattgtgaaggaagtctcttcctacttgaagaaagtaggatacaaccctgacaagattccttttgttcctatctctggttttgagggagacaacatgattgagaggtccacaaaccttgactggtacaagggtccaactctgcttgatgcacttgaccagattagtgagcccaagaggccctctgacaagcccctcaggcttccccttcaggatgtgtacaagattggaggtattggaactgtgccagtgggacgtgttgagaccggtgtcttgaagcctgaaatggtgggtgacttttgcacaactggactgacaactgaaatcaaa

SEQ ID NO: 243536 - DNA, 281 bp, Glycine max
gaatcccaagagagttggaaaacaaagtatagagtgaaagaatgggtgagaaaagcaagattttgatcataggaggcaccggctacatcggcaaacatatagtggaagcaagcgcaaaggctggaaatcccacttttgctttggtgagggaatccacactctctgacccctccaaggcacaactcatccacaattttgaggctttgggcgttaatttggtccgcggggatctgtacgatcatgagaagttggtgaaagctatcaagcaagtagatgtcgtc

SEQ ID NO: 243537 - DNA, 284 bp, Glycine max
ggagcaagagtgaagagcgaagagaatggctcccaagggtttaatctttttggctgtgttatgcttctcagcactgtcactgagtcgttgtcttgcggaggataatggacttgttatgaacttctacaaggaatcatgccctcaggctgaagacatcatcaaagaacaagtcaagcttctctacaagcgccacaagaacactgctttctcctggctcagaaacatcttccatgactgtgctgttcagagttgtgatgcttcactgttgctggactccacaagaa

SEQ ID NO: 243538 - DNA, 284 bp, Glycine max
  unsure (1)..(284): unsure at all n locations
ggatttcatttcgtttgcaattgaatttcaatttccctaggggcttaatatctcccctcacttgtgcctagccttatgtcatagtattatcattcattctcatctttctctcttctctctccacccaaaccctaactcccgaccctgttcccctctcgtatccgtcatgaaaggaggaaagtccaagaccgaatctaagagagccgatcccaaacttgctgtgaataagaagggagccgccaccaaggctangaaacccgccggcaaggggaatgcagcgaaag

SEQ ID NO: 243539 - DNA, 275 bp, Glycine max
catgtcttcctccggctatagttgttgcagatctcggatgttgtaaaattagtgtatgatgtgaagctatgggctggaaaatgtggatgtaggagatttcgggacgaaaggcctcaaaacgcttcgtcgtttgtggttactgagtcctgagtgatcttgtcatccgacctttgccatgacaggtgcgcttgcttggcaggtcaaaatatgttaataaaaaaagttttattggtttagggagagatcgcacgggagttgcccggggtctctctctc

SEQ ID NO: 243540 - DNA, 277 bp, Glycine max
gagtgcccccgtctcttcctcctctctccgcatcgctgcgttttccgaatcgaaaggtacgtaagtaacaatggtggaggccaagggtaggaaagaggaggtcgtcactcgagagttcaccatcaacctctacaaacgcttgcatggctgcacattcaagaagaaggctcctaaagcaattaaggagataaggaagtttgctcagaaggcgatggggacgaatgatgtgagggtggatgtgaagctgaacaacgctgtgtggagccaggggattcgg

SEQ ID NO: 243541 - DNA, 387 bp, Glycine max
ggttctagtgtatgtgattgttgtgactcgttcttcttcgtcgttatcttcttcttttgttgtttgtgtgtttgttttttctctcacctgaaaatgtcttgctgcggtggtaactgtggttgcggaagcgcctgcaagtgcggcaacggctgcggaggctgcaagatgtacccagacttgagctacaccgagtcaaccaccaccgagaccttggtcatgggagtggcaccagttaaggctcaattcgagagtgctgaaatgggtgttcccgctgagaacgatggctgcaaatgtggagctaactgcacctgcaacccctgcacttgcaagtgaggtgttggagagctaaagcttcaagcagaaatggcccttagaaataatgataaa

SEQ ID NO: 243542 - DNA, 498 bp, Glycine max
  unsure (1)..(498): unsure at all n locations
ttacgtcgccctgcaggtacaggtctagaatgcccgggtcgacccacgagtccatacggctgcgagaagacgacagaagggcgcgctacactgatgtattcaacgagtctatagccttggccgacaggtccgggtaatctttgaaatttcatcgtgatggggatagatcattgcaattgttggtcttcaacgaggaattcctagtaagcgcgagtcatcagctcgcgttgactacgtccctgccctttgtacacaccgcccgtcgctcctaccgattgaatggtccggtgaagtgttcggattgcggcgacgtgagcggttcgctgcccgcgacgttgtgagaagtccactgaaccttatcatttanaggaaagagaattcgtaacaaggtttccgtaggtgaacctgcggaaggatcattgtcgatgcgaaaaataaaaaanaaatagaccaaaaaaaaacggccgctctaaaggatcaaagctttaattccccttg

SEQ ID NO: 243543 - DNA, 257 bp, Glycine max
ggaccccaacttcttttatatcaccaaggtttctgagtccaatagggacgccaatgaagagagtgcttgtaaacatgaagggttacttggaggaagtgggacaccttaccaaactcaaccctcaagatgcttggcttcccatcaccgagtctcgcaatggaaatgctcactatgctgcatttcacaacctcaatgctggtgttggctttcaggccctcgttttgcccgttgcttttgcttatcttggctggagttgg

SEQ ID NO: 243544 - DNA, 266 bp, Glycine max
ggaacctttgcattctattcattcaagattcagcaagtgcgttttggaagcagagaccgaaatacttcgagatggcccgtacaaagcaaactgctcgtaagtcaactggaggaaaagctcccaggaagcagcttgcaaccaaggctgcacgtaggtctgcaccaacaactggtggtgtgaagaagcctcatcgttatcgccctggaactgttgctcttcgtgagattaggaaataccagaagagcactgagctcctaatcaggaag

SEQ ID NO: 243545 - DNA, 276 bp, Glycine max
gggcgcggcacacacagacacacacatttcgtcggaatgggaagggtgattcgcgcacagcgtaagggtgcggggtcggtgttcaagtcccacacccaccaccgcaagggtccggcgaggttccgcagcctcgacttcggcgagcgcaacggctacctcaaaggggtcgtcaccgatatcatccacgaccctggtcgcggtgctcctctagccaaggtggcgttccgccaccccttccgctacaagaagcagatggagctcttcgtcgccgccgag

SEQ ID NO: 243546 - DNA, 248 bp, Glycine max
ggaggagactgagaaaacagaagaaaacaaaatggaagacacagtttctgcgttgaggtctttgatggtttctcactctccgccgctggatgccttagtggtgccctctgaagattatcacctgagcgaatatgtgtctgcacgagaaaagcgccgcgaattcgtttccggcttcactggaagtgccggcttggcacttataacaaagaaagaagcactgctgtggacggatggacggtattttttgc

SEQ ID NO: 243547 - DNA, 395 bp, Glycine max
ctgtgattgaaccatttgtcatagcaacaaacaggcatcttagtgtgctccaccctatttataaacttttgttgcctcactatcgtgacaccatgaacatcaatggactcgcaagacaatcactcatcaatgcaggtggcattattgagcaatcatttctgcctgggccatttgctgtggagatgtcttcggcagtttacaaggggtgggttttcactgatcaagcccttcctgcggatcttatcaagagaggaatggcagtggaggatccatcctctccctatggccttcgccttgtgatagatgactacccttatgctgttgatggactagagatatggagtgctatccagacatgggttaaggactacgtctccttgtactatgccacggat

SEQ ID NO: 243548 - DNA, 374 bp, Glycine max
gaagatgaacgatgtccaaggcctatgtgctacaaggcttatggaagtggaaaggaagatagtcctatgtgtgacgtgccagggtttgaaaacagcaagatgaaattgctaaggcatgtttcatttgtggattgtccgggacatgatattcttatggctacaatgcttaatggagcagcaatcatggatggagcgttgctactcatagctgctaatgaaagctgcccacaaccacaaacatctgagcatttagctgctgtagaaatcatgcgtctacagcacataataatccttcagaacaaggtagacttgattcaagaaaatgtcgcaatcaatcagcatgaggcaatttcaaagtttatacaaggaactgt

SEQ ID NO: 243549 - DNA, 367 bp, Glycine max
gaaacaaacaatagaaaagcgaaaacaaatgtcattttcgaggttattgagagtccagaatcctggtctctgtctactcttcaattattcccaacctctcacctcttcatcttcttcttccttacctttgaccagagacagagcagcactcacattcacaacgaaggtttcctattcatcagacatggtgaaggcaatcagagttcacgaactcggtggccctcaagttctgaagtgggaggatgtggaaattggagatccaaaagaaggcgaggtccgtgtgaggaacaaagccattggggttaatttcattgatgtctactttcgcataggagtttacaaagccccttcttttcccttcactcca

SEQ ID NO: 243550 - DNA, 271 bp, Glycine max
gaagctcaagaagggtcttctcagaagaaaatgggaagagggaagattgaaatcaaacggatcgagaacaccaccaataggcaagtcaccttctgcaagcgccgcaacggtttgctgaagaaagcttatgaattatcagttctgtgtgatgcggaagttgcccttgttgtcttctcaacccgtggccgtttgtatgagtatgccaacaacagtgttagggccaccattgaaaggtacaagaaggcaaatgctgctgcttcaaacgcagaat

SEQ ID NO: 243551 - DNA, 275 bp, Glycine max
aatgattaaatgaaccaagattttaccatgactgcaattttagagagacgcgagagcgaaggcctatggggtcgcttctgtaactggataaccagcaccgataatcgtctttacattggatggtttggtgttttgatgattcctactttattgaccgcaacttctgtatttattagcgcttttattgctgcccctccagtagatattgatggtattcgtgagcctgtttctggatctctactttatggaaacaatatcatttctggtgccattat

SEQ ID NO: 243552 - DNA, 268 bp, Glycine max
gagttagggtgagttgcatgcgctgtcatcgctccgttgacgactcgatgtgcatcgcaattcgccatcagtagttattcagagatggtgactggcaagtccccgtcgtcacgaaactgattctcatcatcaacccttcgacccaacacatcatcggggagatcccagcagctactaaggaagacgttgatctcactgtcgctgccgccaaagctgccctctctcgcaacaacggcgccgattgggcctccgcttccggctccattcg

SEQ ID NO: 243553 - DNA, 275 bp, Glycine max
ggaagtaagggatcgagcctcggaggagggaatcgcagcgaagtccactatgccgaagcaaattcacgagattaaggacttcctcctcactgctaggaggaaggatgcacgctctgtgaaaatcaagcggagcaaggatgtggtgaagttcaaggtccgttgctccaagtacctttacaccctctgtgtgtttgattctgagaaggctgataagttgaagcaatcacttcctccaggtttaagcgtgcaggatgtgtgattcttactgctgtatg

SEQ ID NO: 243554 - DNA, 366 bp, Glycine max
gaaccacagcttaattctctctactactgctagctgtgacttgttttgagttcaatcaaatcgcattggtatctgaaatcaggaaagatggttagcgtagctgagatcaggcaggcacaaagggcagaaggcccagcaaccatccttgccattggaactgcaaacccaccaaaccgtgttgatcagagcacctatcctgattactacttcagaatcaccaacagtgaccacatgaccgagctcaaagagaaatttcagcgcatgtgtgacaagtctatgatcaagacgagatatatgtacctaaacgaagagatcttgaaagagaatccaaacatgtgtgcttacatggcaccttctttggatgct

SEQ ID NO: 243555 - DNA, 367 bp, Glycine max
gattgcgtgttggtgtgaatcaagaaccgctctgctatggctgctctgcaatacttggaatcgctgcgtaattcgcaccctgagctctccgattggtacaattcgctggcggatctgtaccagaagaagctctggcaccagctcactctcaagctcgagcagtttgtggctctcgccgtcttccaggctggtgatgctttaatacaattatatcacaatttcatcacagactttgagacgaaaatcaaccttctcaagcttgcacattttgctgttatagtttctcggcagtattctgaaaaagaagctgctgttggttatcttggaggggtcattcagaaacttcaagacactatggagcatcgca

SEQ ID NO: 243556 - DNA, 288 bp, Glycine max
agggactgatcgagcgagcagcgtttgtttgttccttcctcagtcgttgtgacagtgtgtgtgagtgagtgagtgagagcgacgatgggcgcgagcagcgaccccacccaagacggttccgacgagcagcagaagcgttcggagatctacacctacgaggccccctggcacatctacgccatgaactggagcgtccgccgcgacaagaagtatcgcctcgccatcgcctccctcttagagcagtaccctaaccgcgtggagattgtccagctcgacgactccaacggc

SEQ ID NO: 243557 - DNA, 231 bp, Glycine max
aagaaataaaggggtttcaatcaaaggttcacaaactggatgtctaccaatgtctatacactggggtcagaactggcagagcaatagctacctcgatggtcaaagcctctcctttaaagtcaccacaagtgatggcagaactattgtgtccaacaatgtggcggcatctggatggtcctttgggacacctacactggtgctcaattcggctagatggtgttgtccagagtt

SEQ ID NO: 243558 - DNA, 375 bp, Glycine max
gcttcgagcatatctgggcacctgcagaccggtccgggcctaccgggtcgaaccacgcgtcggtacggctgcgagaagaggacagaagggggaatcagcggggaaagaagaccctgttgagcttgactctagtccgactttgtgaaatgacgtgagaggtgtaggataagtgggagctggaaacagcgaaagtgaaatacgactacttttaacgttattttacttagtccgtgatgcggcggcggggcactgcccctcttgttggacccaaggtcggcttcggccggtcgatccgggcggaagacattgtcaggtggggagttgtgctggggcggcacagctgggaacagatgacgcaggtgtggtggtgggggg

SEQ ID NO: 243559 - DNA, 271 bp, Glycine max
ggtttcaatcaagggttcaagaactggttggatgccaatgtcaagaaactggggtcagaactggcagagcaataactacctcgatggtcaaagcctctcctttaaggtcaccacaagtgatggcagaactattgtgtccaacaatgttgccccatctggctggtcctttgggcaaacctacactggtgctcaattccgctagatcttgttgtccaaagttctaagtcacacattcaaatactactactatatagcataatagatatatggt

SEQ ID NO: 243560 - DNA, 377 bp, Glycine max
ggtcccgagctttctgatgcacctgcaggatcggtccggacttcccgggtcgacccacgcgtccgtacggctgcgagaagacgacagaagggggaatcagcggggaaagaagaccctgttgagcttgactctagtccgactttgtgaaatgacttgagaggtgtaggataagtgggagctggaaacagcgaaagtgaaataccactacttttaacgttattttacttattccgtgaatcggaagcggggcactgcccctcttgttggacccaaggtcggcttcggccggtcgatccgggcggaagacattgtcaggtggggagtttggctggggcggcacatctgttaaaagataacgcaggtggggtggtgtgagg

SEQ ID NO: 243561 - DNA, 356 bp, Glycine max
ggttcagttcttgaaggaaagcagagcagagaagagaagagagtttcaagaatggggagcgaagaggagaagggtgaattctacttgcgatactacgtgggccacaagggcaagttcgggcacgagtttctggagttcgagttcagacccgatggcaagctccgctacgcgaacaactccaactacaaaaacgacaccatcatccgcaaggaggtttacctcaaccctgccgttttgcgtgagtgccgccgtatcatcgccgaaagcgaaatcatgaaaggaagacgacaacaactggcccgaaccggaccgagttggacggcaagagctggagattgtgatggggaacgagcaca

SEQ ID NO: 243562 - DNA, 356 bp, Glycine max
ggagcaagagtgaagagcgaagagaatggctcccaagggtttaatctttttggctgtgttatgcttctcagcactgtcactgagtcgttgtcttgcggaggataatggacttgttatgaacttctacaaggaatcatgccctcaggctgaagacatcatcaaagaacaagtcaagcttctctacaagcgccacaagaacactgctttctcctggctcagaaacatcttccatgactgtgctgttcagagttgtgatgcttcactgttgctggactccacaagaaggagcttgtctgagaaggaaacagatagaagctttgggttgagaaatttcaggtacattgagaccatcaaag

SEQ ID NO: 243563 - DNA, 362 bp, Glycine max
gataacataatacaacactatccttgcttcttgttagacatggcaactactacactcatgaagcttgctttcatgcttctcatgaaccttgttatctgcagcgcagaatcttccatcggcagaaagtccaatcctaacccagaagagttcgtgaagtcctcgtgcagggcaacacggtaccctgttctatgcgtcaagtctctgttggcctacgcaagcgtgattcgccgaagcgaccgacaactagccacgaccgctctgtcggtaagcatatcgaggagccgatcctccgcatggttggtgaagaagatgttgaaagcgagaggcatgaagcctagagaatacagagcggtgcaagactg

SEQ ID NO: 243564 - DNA, 398 bp, Glycine max
cattcggaagaggaaggtttctaatgacttcaacatgatggatctgaaaatttacacatgtgaacaccctcagtgcccttacagtcaagttcgccttggtttccctgaccgaatttcaagggacaaccatcagttgatttgtgcttatagaggtacttcagattttgggggtccaagttttcctgttaatgagataaagccagtcgtacaccccccgtcctttgttcaacccaaatctactgctcagcctggtagtatggttccacctgttattgatctaactggacttgaagtttcagataatggccagaaaatgattactgaccttatgactaactatgacacaaatgttcgaggcaacaagaagacaagttcctgtaatcacttagctgcacaaa

SEQ ID NO: 243565 - DNA, 371 bp, Glycine max
  unsure (1)..(371): unsure at all n locations
tggcctgngctgtgtcngaactcgctgccaattaccctaagtgtcaggaccttttcgcccagcacaacatcataaggttactcgtcggtcaccttgctttcgaaaccgtcgaggaacacagtaagtacactattgtcagcaccaaacccacttccatccacgccgtcgtcatcgccaacaacaacgtcaagaaggaagatcattttcacgacaatgaaaagaaagcacgaatgcctcatcccttgggtgataatagaccacganatctacatagagtaatcacaagtacaatcgcaatgcacgctgccaacaagcagggaaacgaaccanatcataatcatcagaccaatgggcaatggagtgataatgat

SEQ ID NO: 243566 - DNA, 348 bp, Glycine max
ggcaggtagagagagcgagagaacaagaacataagggaaccacagcggcggtaacagaagaacaagcagagagtgggtcgagtgagaacgaagacggtgaagaaatcctctcggcaggtgatagagcgtcactactcgcgcatgaccctggacttccacacgaacaagaagcttctggaggaagtggcgataatcccgtcgaagaggctaaggaacaagatcgcggggttctcgacgcacctgatgaagcgcatccagaagggccctgtgcgcggcatctccctcaagctccaggaggaggagcgcgagcgccgcatggacttcgtccccgacgtctccgccatcaac

SEQ ID NO: 243567 - DNA, 349 bp, Glycine max
gaaagcagtgaccacggagagagagagagaggttttgacgcaacacactttcactgagaaaggatctctatctaccaaggagcagaataaaacccttctctctggtaagtgaataagagaatggcttcagatcggaaacttcacactttcgaggaggtggcaaagcacgaccagaccaaggattgctggctcatcatttctggcaaggtgtatgatgtcacccctttcatggaggatcatcccggaggtgatgaggttttgttatctgcaacagggaaagatgcaaccaatgattttgaagatgttggacacagtgattctgctagagatatgatggaaaaatactaca

SEQ ID NO: 243568 - DNA, 356 bp, Glycine max
gaaaaacaagagattttgaatttgaaatactcccgctcccgtctccatatatttgcgaaccctttttctttgtgagagacccgttatcagagaatccagaaggcgaagaagaagaaacgacagagcaagaaggaaatggcgaccaacattgggatcatggatgcggcttacttcgtcggcagatctgagattctttcttggatcaactcaactctgcaactcaatctctccaaagtcgaagaggcatgttccggcgcggttcactgccagcttctcgatgccgctcatccagggatcgtgcctatgcacaaggtcaatttcgacgccaagagcgagtatgagatgattcagaacta

SEQ ID NO: 243569 - DNA, 333 bp, Glycine max
gttcctctaccccctcgcgactattcatccagctcatggacaatatgaatgaaaagcctgagttgtttgctgtttctattgatccaaatttctctttttatctgcacagtgattttctgtctgtctttcctaacaaaaaggagccccatggcatcatactgcatagaaacaaacgccaatatggaaacttagatgagctttctgcaatatgctctgccatggaaggtgttaaagtagttaacggattggaatgtaagatagcttgcagctcatccaagatttcatatgttcttgacacacaagattttttcttccgaccaagaaagaaacgac

SEQ ID NO: 243570 - DNA, 321 bp, Glycine max
ggttctagtgtatgtgattgttgtgactcgttcttcttcgtcgttatcttcttcttttgttgtttgtgtgtttgttttttctctcacctgaaaatgtcttgctgcggtggtaactgtggttgcggaagcgcctgcaagtgcggcaacggctgcggaagctgcaagatgtacccagacttgagctacatcgagtcaaccaccaccgagaccttggtcatgggagtggcaccagttaaggctcaattcgagagtgctgaaatgggtgttcccgctgagaacgatggctgcaaatgtggagctaactgcacctgcaacccctgc

SEQ ID NO: 243571 - DNA, 344 bp, Glycine max
gacaacaattccacaacgcgatctctctctattctttgaaaccaaggttcaaactctgtcttccctgggttctatttcgaaatcaacgacgatgagttccacagaggcagcagccacagagaagaaaggtggaagagggaaaccgaagacttcaaagtccgtttcccgttcctccaaagctggccttcagtttcccgtcggccgtgtcgctcgctacctcaaggccggtcgctacgcccagcgcgttggctccggttcccctgtttatctctccgcggttctcgaatacctcgctgccgaggttttggagcttgcggggaacgctgcgaaggacaacaagaaga

SEQ ID NO: 243572 - DNA, 370 bp, Glycine max
ggtaccaaagctgaatagccattcgtattgtcgcagagaaagaaaaccctagctcaccgtttcaagatgcaaatcttcgttaagaccctcactggtaagaccatcactctcgaagtcgagagttcagataccatagacaatgtaaaggccaaaattcaagacaaggaagggatcccaccagatcagcaacggctcatttttgctggcaagcagcttgaggatggacgtacccttgctgattataacatccaaaaggagtccactctccacttggttcttcgtctccgtggtgggatgcaaatctttgttaagaccttgacgggaaagacaatcacccttgaggtctagagctccgacaccattgacaacg

SEQ ID NO: 243573 - DNA, 354 bp, Glycine max
ggcacaagtttgttgacatagctataagcaatatgatgaaaataaatgtgcttgttttgtttgttgctacagttttggtagcatatgaatgccatggctcagactaccataagttccctctccaaatgaaaactgggtttggtgggcaatacagcactgaagtggcatgtgccaattggtggcatggtgtggaaccaaacaacgtagtcaagtggcaaactgttcctgcagcttgccgatagtacataactgactacgttctatgataccaatatacatcagattctaaaacagttaaccatgaagcttatttctatgctaaattcctcaaactcactaacacagatgtctttg

SEQ ID NO: 243574 - DNA, 379 bp, Glycine max
ggtgctaatcttatcttatccctctaatcactctagctgttgcaaatttctactatttttcaatggcttctgcagatgttgagttccgttgctttgttggtgggcttgcttgggtcaccggcaacgatgccctcgagaaagccttttcaatctacggcgacatcgttgaatcgaaggttatcaacgaccgtgagactggaaggtccagaggattcggatttgtgaccttcgcctcagagcagtcaatgaaagatgcgatcgcaggaatgaacggccaggaccttgacggtcgtaacatcactgtcaacgaagctcagacccgcgccagccgtggtggtggtggaagcggtggtttcggaagtggtggtggatacaaccg

SEQ ID NO: 243575 - DNA, 204 bp, Glycine max
ggtgctaatcttatcttatccctctaatcactctagctgttgcatatttctactatttttcaatggcttctgcagatgttgagttccgttgctttgttggtgggcttgcttgggtcaccggcaactatgccctcgagaaagccttttcaatctatggttacatcgtctaatctaaggttatcaacgaccgttagactggaatgt

SEQ ID NO: 243576 - DNA, 358 bp, Glycine max
ggagagagagagagagagagagagagagagatagatggtgtctctgaaacttcagaagcggcttgccgctagcgttctcaagtgtggtagaggcaaagtttggcttgaccctaatgaggtcaatgaaatctccatggctaattctcgacaaaacataaggaaattggttaaggatggtttcattatcaggaagccaactaagattcattcccgttcccgtgctcgcagaatgaaggaggccaagaggaagggacgtcactctggttatggtaagcgtaagggtacaagagaggctaggctccccaccaaaatcctttggatgaggaggatgcgtgtcctcagacgattgctccgcaag

SEQ ID NO: 243577 - DNA, 393 bp, Glycine max
gatataacactgtcactcttacaatctcagctcatagcattcttcttcttccaacgagaatcagtctttgtgttccaaatggctcgtacgaagcaaacagcaagaaagtccaccggaggaaaagctccaaggaagcagctcgccaccaaggcagcacgtaagtccgctccggcgacgggcggcgtgaagaagccccaccgtttcaggccggggacagtggctctgagggagattcggaagtaccagaagagcacggagcttctcataaggaagcttcctttccagaggctcgtaagggaaatcgctcaggacttcaagaccgatctacgcttccagagcagtgctgtctccgctcttcaggaagccgctgaggcctacctcgttgggctcttt

SEQ ID NO: 243578 - DNA, 357 bp, Glycine max
gtgttaatcaggctatatatcttctaacaacaggtgctcgggaagctgctttcagaaacatcaagacaattgctgaatgcttggccgatgaacttattaatgcagccaaaggttcatccaatagttatgctatcaagaaaaaggatgaaattgagagagttgccaaggctaatcgttaagccaacccaacaaccagtattgtggccagaaagatttcgacctttgtacttcatttatttaaattttgaatattgtgtattacttttgatgaatttagttaatttttagttcgcgtaaggattttacatgaacgatttatttagttaatttagtttgcgtaaggattttacatgaacg

SEQ ID NO: 243579 - DNA, 308 bp, Glycine max
ggacgtacacttgctgattacaacatccaaaaggagtccactcttcacttggtgctccggctccgtggtggaatgcaaatctttgttaagacattgaccggaaagacaatcacccttgaggtcgagagctctgacaccattgacaatgttaaggctaagattcaggacaaagagggtatcccaccagaccaacaaaggcttatctttgcaggaaagcagctagaagatggcagaaccttggctgattacaatatccagaaggaatctaccctccacttggtgctccgtcttcgtggtgggatgcaaat

SEQ ID NO: 243580 - DNA, 376 bp, Glycine max
gggacgctgctgctataaaaaagctcgaatactcggataaggagaaacatcttttaatggcgtcccaaatccgtgagtggtctggaatcaatacattcgcacctgctacccagactaagttgcttgaactcttgggaaatcttaaacaagagaatgtgaactccttgactatacttgtgatgggaaaaggaggtgttggaaaatcttcaactgtgaactccatcattggggaaagagtggtttcgattagtcctttccagtcggaagggccaagacctgtgatggtgtcacgatcaatggctggttttacattgaacattattgacactcctggtctcattgaaggggggtacatcaatgatatggcacttgatat

SEQ ID NO: 243581 - DNA, 293 bp, Glycine max
gggacgctgctgctataaaaaagctcgaatactcggataaggagaaacatcttttaatggcgtcccaaatccgtgagtggtctggaatcaatacattcgcacctgctacccagactaagttgcttgaactcgtgggaaatcttaaacaagagaatgtgaagtccttgactatacttgtgatgggaaaacgaggtgttggaaaatcttcaactgtgaactccatcattggggagagagtggtttcgattagtcctttcaagtctgaagggccaatacctgtgacggtgtcacga

SEQ ID NO: 243582 - DNA, 380 bp, Glycine max
gacacacactctgtcacgcacccaccattctactacactcctctctctcactctcactctctgctccgtgatagctgtaccacgtttttctctccatctcgaaacaccatctctgcctcagtcccaacccatcaccattctcatggctgctctagctctagcacttcttcttctggctttcaccggcacttcaagtgctacatggtgcgtttgcaaggatggaagcgacgcgatcctgcagaagacgttagactatgcttgtggagctggtgctgactgtaaccctcttcacctaaacgggccttgttttcagcccaacaccgtcagggcccactgtaactacgccgtgaacagctacttccaaaagaagggtcaagctc

SEQ ID NO: 243583 - DNA, 384 bp, Glycine max
gtatccataggcagctgaaacaaagggtccaagctaatggacgtgttggtgccactgctgccgtatacttagcctcaattcttgagtatcttactgctgaagttcttgaacttgctgggaatgcaagcaaggatctgaaggtgaaaaggataacaccaaggcatttgcagcttgctatcagaggagatgaggagttggacacccttattaaagggaccattgctggtggtggtgtcattcctcacatccacaagtccttgatcaacaaaacagccaaggattgagctcgctctttggccttctgatttcatgttgctgtttactgagaactaagtttgtgtttaatgtgaattgatcacagtagtaggtttgtatgaatgattt

SEQ ID NO: 243584 - DNA, 318 bp, Glycine max
  unsure (1)..(318): unsure at all n locations
gaattgaatcagttattagtagtggtggtagttttatttgattggttttagatccaggttaaaaggattaaactcccatctggttcaaaaaagattgttcctagtgactgtanggccatgattgggcaagttgcaggtggagggagaactgagaagcctcttctcaaggctggaaatgcttaccacaagtttagagtgaagaggaactgctggcccaaggttcgtggtgttgctatgaaccctgttgagcatccccacggaggaggtaaccaccagcatatcggtcatgctagtactgtcaggcgtgatgctcctcct

SEQ ID NO: 243585 - DNA, 388 bp, Glycine max
ggattttcgcatgacagattctacatccattgtgatggggctttgtttggtctcatgatgcctttcgtgaaacgagctccaaaagttacttttaagaagcctgttggcagtgttagtgtttctggccacaaatttgtagggtgtcccatgccttgtggtgtgcagataacaagattggaatatgtaaatgctcttgccagggatgtggaataccttgcttctagggatgccacaatcatgggtagtcggaatggccatgctcccatattcctctggtataccttgaatcggaaaggatatagaggttttcagaaagaagtacagaaatgcttgcgaaatgcacactacttcaaaggccgccttgttgaggctgggattggtgcaatgc

SEQ ID NO: 243586 - DNA, 376 bp, Glycine max
gagagaaagagagagaaagatgtcgaagcgtggtcgtggtggttcggcggggaacaagttccgcatgtcgctgggtcttccagtggcggcgacggtgaactgcgccgacaacacgggggcgaagaacctctacatcatttcggtgaaagggatcaaaggccgtttgaaccgtcttccctcggcctgcgttggcgacatggtgatggccaccgtgaagaagggaaaacccgatctgaggaagaaggtcttgccagctgtcatcgttcgccagcgcaagccatggcgccgaaaggacggcgtctacatgtacttcgaagataatgctggtgttattgtcaatcccaagggagaaatgaaaggttctgctatcactggt

SEQ ID NO: 243587 - DNA, 376 bp, Glycine max
gacatcgcacatcaattattctttcgcaccttcgaaaatcaattttctgtcttctctgcgtcttcttcctctatcaatcgttttccatggctcgtaccaagcaaaccgctcgcaaatccaccggtggaaaggctcctaggaagcaactcgccaccaaggctgcaaggaaatctgcaccgacaaccggtggagtcaagaagcctcatcgctatcgccctggaactgttgctcttcgtgagatccgaaaataccaaaagagcacagagcttctgatccgcaagctccccttccagcgtcttgttcgtgaaattgcgcaagacttcaagaccgatttgaggttccagagtcacgctgttcttgcgcttcaagaagctgc

SEQ ID NO: 243588 - DNA, 324 bp, Glycine max
ggttctagtgtatgtgattgttgtgactcgttcttcttcgtcgttatcttcttcttttgttgtttgtgtgtttgttttttctctcacctgaaaatgtcttgctgcggtggtaactgtggttgcggaagcgcctgcaagtgtggcaacaggtgccgaagctgcaagatgtatccacacatgtgctataccgagtctcacaccacacgagaccttggcacatgagtgtgaccacttttagcgcacatctcgagtgtgcagaaatgtgtgttcccgctgagaacgatggctgcaaatgtggagctaactgcacctgcaacccctgca

SEQ ID NO: 243589 - DNA, 353 bp, Glycine max
gaacctttgcattctattcattcaagattcagcaagtgcgttttggaagcagagaccgaaatacttcgagatggcccgtacaaagcaaactgctcgtaagtcaactggaggaaaagctcccaggaagcagcttgcaaccaaggctgcacgtaagtctgcaccaacaactggtggtgtgaagaagcctcatcgttatcgccctggaactgttgctcttcgtgagattaggaaataccagaagagcactgagctcctaatcaggaagcttcctttccagaggttggttcgtgaaattgcccaggatttcaagactgatctgcgtttccagagccatgctgtgcttgcattgcaag

SEQ ID NO: 243590 - DNA, 415 bp, Glycine max
acgcgtccaggaggtagaataattattaaaatcgtttttctttatttctcttattacgccaacgccatgctcattactcgtaaccctgttttgttgaattccacttttgtccccactctcatttcagattcagagcatcgttgcgcatctccacgctctctttgcttctcttctcgcacggacatggatactgctgctggtcaaagtctttacccattacaccgttgcaaaactcttcacctggtaagacatgcccaaggatttcacaatgtagaaggtgagaagaactttgaagcatacaagtcttatgatctttttgatgcaaacctgacccctctcggctggaaacaggttgataatctgagacaacatgttaaggccagtggtctttccaaaagaattgaactagttattg

SEQ ID NO: 243591 - DNA, 303 bp, Glycine max
gaagagagaatgatgatgaagtctgctatgtgtgcattggtgcttgtggcactggttgtggttgaagtggggcccatggctgacgctgcggtgacttgcaacccaccacagttgactccctgtcatccggcacttcactcacgtcctgcaccttcgagtgcttgttgccaaaacctcaacgagtcaccccacgcctctgtcgctacctcacattaccaagtatcgaacaatcacttaactccccgaccggaagcctcctttccagaccttgcttcatcaacattgcccaccatttcaagcacc

SEQ ID NO: 243592 - DNA, 332 bp, Glycine max
ggagaagacaagtgacaagagtgtgaactgcaaagggcttctccagcctagtttgttctcagatcttcttcttccatggaccagtacgagaaggtggagaagataggcgagggaacatacggcgtcgtttacaaggctcgcgaccgcgccaccaatgagacaatcgctctgaagaagattcgcctcgagcaggaggacgaaggcgttcccagcaccgccattcgcgagatttctcttctcaaagagatgcagcataggaacattgttaggttgcaggatgtagtgcacagtgagaagcgattgtaactggttcttgagtaccgggacttgga

SEQ ID NO: 243593 - DNA, 340 bp, Glycine max
ggagcgaagaagatattagggtttttgagtgcggtgcggcgatcctagcactctcttctgcagctttcgccgacagcttcattcaccatggctgagcaaaccgagaaggcttttttgaaacaaccaaaagtgtttctcagctcgaagaaaactgggaagggaaagagacccggaaagggtgggaaccgcttttggaaatccattgggcttggatttaagactcccagggaagccatcgaaggaacctacattgacaagaagtgccccttcactggcaatgtttccatccgtggccgtatcttggctggaacatgtcacagtgctaagatgaacaggacta

SEQ ID NO: 243594 - DNA, 303 bp, Glycine max
ggtctctacaagagaagcatttgtttgtagaagacaagctccttcggatgttgaataagcaggttaatcattttactggaactggaaacactccaatgagctaccctttgcagcctgctattgaagaaattgaaaggtatgcagaggagcagtgcgatgtgagaacagtaagaatgtgtcaaggtatcttaaaagccatagcaagtcgtccggatgacaaatatgtagcttatagaaaggggcttggtgttgtttgcaacaaggaagaaggctttggtgaagatgattttgttgttgagtttt

SEQ ID NO: 243595 - DNA, 280 bp, Glycine max
gattgcgtgttggtgtgaatcaagaaccgctctgctatggctgctctgcaatacttggaatcgctgcgtaactcgcagcttgaactctccgattggtacaattcgctggcggatccgtaccagatgaagctctggcaccatttcactctcaatctctaacaatttgtggctcgcgacgtcttcgacgctggtgatgctttactacatgtataacataatttcatcacaaactttgatactaacatcaacgttctcaagcttgcacattctgctgttatat

SEQ ID NO: 243596 - DNA, 374 bp, Glycine max
gacccacaagtcatcaaacttcaattgagtttcaaagagatcagtggtagctagtgtggtgcaattgtgttgatcaaggatggaacaaaagaagtttgtggcactattaatggtggttgtggtaatggcttcttctatgtggaaagggtccaaaggtcttagtctctgtaacatggacgaaggtggattggaggcttgcaagccctcagtgactcagccaaacccagttgatccatcccctgattgctgcaaggctttggctggtgctgacttgaaatgcctttgctcttacaagaactcatcagagttgccttttcttggaattgatcgaactcctgctacttcacttcctgcaaagtgcaatctcactcccc

SEQ ID NO: 243597 - DNA, 374 bp, Glycine max
gactgcactcttattaataaatatcagtgcttggaaagcaaaagagaagatccatagctaagatagatctcgagatgggtcgtggcaagattgagataaagttgattgagaaccccaccaacaggcaagtcacctactccaagcgaaggaatggtatcttcaagaaagctcatgaactcagtgttctctgtgatgccaaggtttcactcatcatgttctctaaaaacaacaagatgcatgaatacattagccctggcctcacgacaaaaaagatcattgatcagtatcagaagactttgggggatattgatctgtggcattctcactatgagaaaatgcttgaaaacttgaagaagctgaaagatattaacaat

SEQ ID NO: 243598 - DNA, 372 bp, Glycine max
ggagttgtgtgtatgtgagataagctgccatgtcgatcttgtccgttccgtcaccaacacagcgttgttccatttcgatttctcggctgccattgccattgccattgccgtttcaattgcaagtaagaagaagagcaaaagggggaaaagtggtaatgagcatggaggcaggtattggagtgatgggcaccaagttgggtatgatgagctatttcgaatccgacggagaggttgttcctgtcactgtcgtgggtttcaaagaaggcaacatcgtcacccagatcaaaactgaggccaccgatggatacgacgccgtccaggttggttaccgaagggtcagagaccgcaaattgaccaaacccgaaatgggtc

SEQ ID NO: 243599 - DNA, 320 bp, Glycine max
gacatcactgcattttcaagtgcagcctatacttgagtttctatctagccataacttgtagtttacttcaaacttctaagcaacatggtggacctcactttcacagatgagttcactagcagtgtccagccaagaagattgttcaaggctttgatccttgatgctcctaacctcatccccaagctgatgcctgaggccattaagaatgttcaactggctgaagggaatggaagccctggaagcattcaggagataactattgctgaaagtggtaacatcaaacagttgcagcatagaattgatgcaatagaccttgagaa

SEQ ID NO: 243600 - DNA, 345 bp, Glycine max
ggccgcagttctcgagtacctaactgctgaggtgcttgagttggctgggaatgctgcacgtgacaacaagaagaacaggattattccgagacatgtgctattggctgtgaggaacgatgaggagttggggaaattgcttgctggtgtcaccattgcacatggtggtgtgcttccaaacattaaccctgttttgttgcctaagaagacggagagggctgccaaggagcctaagtctccatccaaggctactaaatctcctaagaaggcctagattatcctttttttttttttttttaaatctagtgttgtatatcggtgcttaaatgcctttggtgtaacaagaaa

SEQ ID NO: 243601 - DNA, 321 bp, Glycine max
ataaacccggcggtgacgttcgggttgtttttggcgaggaaagtgtcgcttacaagagctgttgggtacatggtggctcacgtgttgggggccataaatggggtggggcttgtgaaagctttgcagaagagctactatcacaggtacaaaagtggcgtgaacatgctcgctgatggttacagcaaaggaaccggtttgggcgctgagattactggcacctttattcttgtctacaccgtcttctctgctaccgattccaagagagtagcaagagactcccatgttcccgtgttggcaccacgtccaattgggtttgcagtg

SEQ ID NO: 243602 - DNA, 388 bp, Glycine max
  unsure (1)..(388): unsure at all n locations
ggatcctttgtattctattcttcaagattcaggtactgcgtttcggaagcagacacagatggctcgtacgaagcaaaccgctcgtaagtccacaggaggaaaggctcctangaagcagcttgcaaccaaggctgcacgtaagtctgcaccaactactggtggtgtgaagaagccccaccgttatcgtcctggtaccgttgcccttcgtgagattaggaattaccagaggattaccaaccttttgttccggaacctccccttcaagaggctggttcgtgaaattgcacaggacttcaagactgatctgcgtttccagagccacgccgtgcttgcattgcaagaatctgctgaggcataccttgttgggctctttggggacactaacctg

SEQ ID NO: 243603 - DNA, 368 bp, Glycine max
ggcagagtagaagtcgagatggacaaccttccaaattcaaagctttatgggaaagagaagatgaaaggagagcaagaattagaagatgaagaaagcttctcgcgtgctatgctgctttgcagctccgttgtggtttccatggcgctgcaatcggcaacggagctgggcgtatttgacgtgttgcaagaagcgggggctaagctctctgcgaaagagatagcatccaagctttcctgcgacaacaaccctgaagcagactcaatgctggatcgccttctagcccttctagcctctcactccattcttaactgttctctcattctcgaccaccaaaacctggggacctttcagaggctctacacgatcac

SEQ ID NO: 243604 - DNA, 326 bp, Glycine max
ggttcaaagcacgccgtgtttcgctatctctcccattctctcgcatctcaatacccttttgatttgtgaaaggaaagcaaacatgcttgatcaggtccaacaccctacaatcatggacaaggttgctggccagctccatctccgttctggtgtttctggtattaggagttatgaaggagcctactgccaccccacaatgtaccaaagaccctcttttggcaagtactcgaatgctgcattgcagtatcctgtgatgccctcatgcaaagctactatggatttgtctgctgctgcaacaactgcctcccccgtctttgttgctgctc

SEQ ID NO: 243605 - DNA, 393 bp, Glycine max
tgggggaaattacgcttttgattcaggatgatgtggggggtcttcaggttctcaagggtggtaacaagtgggtcactgttcagcctctgtcagatgctatccttgttctattggctgaccaaactgagattataaccaatggaaagtacaggagctgtgagcatagggcaatcactaatcctgatagagcaaggctctctgtggcaacatttcatgaccctgctaagacagtcaagatttcccctgcttctgagctgatgaacgactcatcactagctaaataccgtgatgttgtttatggagactatgtatcatcatggtataccaaaggccctggacgaaaacgacatattgatgcacttttgctggatccttaagctaatgctttttttc

SEQ ID NO: 243606 - DNA, 319 bp, Glycine max
ggtatttgtgagtgtgtgagagagagagcgagcagtttcagacacagagagaggggtttgggattggagggattgacgctgcgtctcttcctcttctctttcgatccatccctcattcctaatcctccaatccaaccacctcagcctcacactcacatatacacatatctgaacgcgtatcgtccctcctatggcttcaaagcgcatcctcaagcggctgcagcggacttgcagaggacccagcaacttcttgcagcgctggtccagtacctgacgacatgttccattggcaagcaacaataatgggtcctgctgatag

SEQ ID NO: 243607 - DNA, 480 bp, Glycine max
  unsure (1)..(480): unsure at all n locations
aacgtctacctgctanggctcgnctagnncacnnggtcnnnggctcgactggagagttaaccgattcagtgccagatttcgcagtatctacaaggtccggctacctctgccgccacattaacaaaaaacctcgggcttccagcctgcgcgacagcaaacataagaaggggtgtttttatgtcatccgatattaagatcaaagtgcaaagctttggtcgtttcctcagcaacatggtgatgccaaatatcggcgcgtttatcgcgtggggtatcatcaccgcgttatttattccaacagggtggttaccgaacgagacgctggcgaagctggtcgggccgatgatcacttatctcctgccgctgctgatcggttataacggtggtaagctggtaggcggcgaacgtggcggcgtagtcggtgccatcaccaacatggggcgttatcgtcngcccagacatgccgatgttcctcggtccaaa

SEQ ID NO: 243608 - DNA, 358 bp, Glycine max
ggtggagcaatagcagcagaacagagagagcaaaaccctagagcatccatcacaagcagaggaagaagatggtgaagttcctgaagcctaacaaggcagtgatcgtcctgcagggccgctacgccgggcgcaaggcggtgatcgtgaggaccttcgacgagggaaccagggagcgcccctacggccactgcctcgtcgccggaataaagaagtacccaaggaaggtgatcaagaaggactccgcgaagaagaccgcgaagaaatctagggttaaggccttcgtgaagctcgtgaactaccagcacctcatgcccacgcgctacacgctcgacgtggatctaaaggacgctgttacccc

SEQ ID NO: 243609 - DNA, 325 bp, Glycine max
ggagtgtgtgagagagcgagcgagcgagcagtttcaaagagaggatttgggattgggaaggcgagggattgcgctgcgtctcttcctcttctctttcgattcatccctcattcataatcttccaatccaacaacctcagcctcacactcacacatacacacatctgaacgcgtatcgtccctcccatggcttcaaagcgcatcctcaaggagctcaacgacttgcagaaagacccaccaacttcttgcagcgctggtccagtagctgaggacatgttccattggcaagcaacgattatgggtcctgctgatagtccttatgctgg

SEQ ID NO: 243610 - DNA, 357 bp, Glycine max
  unsure (1)..(357): unsure at all n locations
ggcgcctctgcttgcaagagtgaaaaccttctcttacccttctctcaagtttcaagagatttcatcatggctccaaagaaggacaaggctccaccaccttcctccaagcccgccaaatctggcggtggcaagcagaagaagaagaagtggagcaagggaaagcaaaaggagaaggtgaacaatatggtgctgtttgatcagggcacctatgacaagctcctttctgaagctcccaaatacaagctcatcactccttccattctctctgatcgtttgaggattaatggatcacttgcaaggaaggctataagagaattgatggcaagaggttctatcangatggtgtctgcccatgca

SEQ ID NO: 243611 - DNA, 371 bp, Glycine max
ggtcatttgccaggctgtagttgcagctgctataggagcaaagtttggaattgatggaaaccctggtgatttgccaaaatggtatgcagttgttgtggttctcttcatttgcatttacgtatcagcatttgcctggtcatggggtcccctaggttggttggtgcctagtgagatctttcccttggagatccgttctgctgctcaaagtataaatgtgtcggtgaacatgtttttcactttcttgattgcacaagtcttcttgacaatgctttgccacatgaagttcggcttgttcatcttctttgcctttttcgtgttgatcatgacattcttcatctacttcttcttgcctgaaaccaagggcattccca

SEQ ID NO: 243612 - DNA, 333 bp, Glycine max
ggtcccaattctttccactcgcgaaatccagagatatcgatcaacagattcgtgcgacacgttaaattgttttcaaggttgcgcatatccaggatgcaggcatcgcgggcaaggttgttcaaagagtacaaagaggtgcagcgggaaaaggccgttgatcctgatattcaactagtttgtgatgattcaaacatttttaaatggaccgctcttatcaagggaccctctgagactccttttgagggtggtgtgttccagcttgccttttctgttccggagcagtatcctctacagccacctcaagtccgggttttgactaaaatatttcaccct

SEQ ID NO: 243613 - DNA, 338 bp, Glycine max
cctccgggatcgtgttgaacgactccgtgcgctgggttaccttccacagcggctacgatttcggctacctcctgaagctgttgacatgccggagcttgccggacacgcaggccgggttcttcgatctgatcaagatgtattttccgatggtatatgatatcaagcacctgatgaagttctgcaacagcctccatggagggttgaacaagctcgcggggttgtgggaggtggagagggttggcctctgccatcaggctgggtctgatagtttactcacttcttgtacatttagaaagttgagggatacgttcttcagtggctccacggagaaatatgct

SEQ ID NO: 243614 - DNA, 351 bp, Glycine max
ggagccgcgactttcaaattccttgttcttcttcatgtgtgtctccctctcgtataaatacactaccatcttccatttcctcttcaaatccaattcaccaaacatggttgatctagattggcaaacaaagatggttcactccaacatgcctccaaagtcccccaaactctctctcccggataataacattccaatcccccttcgccagaacgagatgagggcagcgtcgtctccaatctgcgctgcctacgacaactacctccgcctccctgagctcagagccctctgggcctccaacgacttccctaattgggccaacgagcccatcttaaagcccaccttacacgccct

SEQ ID NO: 243615 - DNA, 314 bp, Glycine max
gagcctcagcagaagcagaacgaggagaagcagaaggagcaaaagcaatggcgccgaagaagccgagaaccacgacaaggaaccctgatttggttagggggattggcaagtattcgaggtcgcagatgtaccacaagaggggcatctgggccatcaaggccaaaaacggtggcgttttgccccgccacgatcccaagcccaagcccgaggccccggcccagaagccgcccaagttctaccccgcggacgatgttaagaagcccctcgtcaacaagcacaagcccaaacccgcgaaactcagggctagcattact

SEQ ID NO: 243616 - DNA, 391 bp, Glycine max
ggcagtgagaagaagagggggtcagagtgagaaagagaaagagagaattcgtaaaccctaatttcggaaagatcggcgatgactgcctccaaggatcgcgagaacttcgtctacatcgccaaactcgccgagcaggccgagcgttacgaagagatggtggaatcaatgaagaacgttgcgaatctcgacgttgaactgacggtggaggagcggaatttgctttctgttgggtacaagaatgtgattggtgctcgcagagcgtcctggaggatcctgtcttccattgagcagaaggaagatacacaagggaacgagttgaatgctaagcggattaaggagtacagacagaacgttgaattggagctatcgaacatctgtaatgatgttatga

SEQ ID NO: 243617 - DNA, 365 bp, Glycine max
ggaagaagaagagtgtttctcacatcacatggcctccttgcccttggggcaccaccaccaccaccacaaaccggcggcggcggctatacatccgtcgcaaccgccgcagtctcagccgcaacccgaagttcctcgccggagctccgatgtggagaccgataaggatatgtcagctactgtcattgaggggaatgatgctgtcactggccacataatctccaccacaattggaggcaaaaatggggaacctaaagagaccatcagttacatggcagaacgtgttgttggcactggatcatttggagttgtttttcaggcaaagtgcttggagactggagaagcagtggctattaaaaaggtcttgc

SEQ ID NO: 243618 - DNA, 375 bp, Glycine max
  unsure (1)..(375): unsure at all n locations
gaaaacaaacctgtatcatcttcttcgtctttcctttgtctctcttctttcccctctctttcgagggtttttctttttcttttttccctttttttatttttcctttattttgtttttttctttctcttgtttttcagttttgcttccatttcctttgaatccccatttattcttcttcttctgcaaccctaaccctagaattgaagatgcagcctcagaggttaaggcagcaagccatgatgcaaccatctctctaccaccaccctgctctacttactcctcctcagatagagcctatcttgagtggaaatctgccacctggctttgattcgagttcatgccgcagtgtttatgtangcaacattcatccccaag

SEQ ID NO: 243619 - DNA, 395 bp, Glycine max
ggacatcactgtcactgtatttgcgcgtccttaccttacttacctctttgtctgtctttccttctctttttcattttgaaggcaaattcgcggcctcgagtcttttctttttctgtatcgtttttactttccatcacttccattttccgtcatcatggaggatgctgctgcttctgctaatgctgcagaggatagagaaaacaagttcctaactatggcagttgaagaagcatataaggcggttgaaagtggccatggtcgcccatttggtgcagttattgttcgaaacgatgaaatactttcaagctgtcataacatggttgtaagaaatgctgatcccactggccatgctgagattactgctaatagagaagcttgtcgagagctgaatcaag

SEQ ID NO: 243620 - DNA, 333 bp, Glycine max
gatgagaaaaaggagaacatgaatttgaaggctacagagttgaggcttggtcttcccggattccaatcgcctgaaagggaaccggatcttttctctttaagctcaccaaagcttgatgagaagccactcttccctttgcttcctactaaagacgggatttgctcgtccgggcagaaagctgttgtttctggcaacaaaagaggttttgctgataccctcgatgggttttctcagggggacgtttgctggtaatacacggatgaaacccgtgctatcacctagaccttctggagctcaaccttctgctatgaaagaaacaccaagcaaattgtc

SEQ ID NO: 243621 - DNA, 367 bp, Glycine max
gattgtatttttaattagaaaaggcgcagaaacagaaacagaaagaatggctggtcccggcaaatgcttcctcgtgacgggtcctccgggtgtgggaaaaaccactcttattatgaaagtattcgagtccctcaaagtcaatccatccctcaagcttcagggcttctacactcgggaaattaggcgcgccggccagagggttggttttgacgtgcgcagactcgacggtcgcactgccccacttgcttccatcgacatttcaacccccgagtctctcagatggcctaatgttggcaagtataaagttgatgttgcttccttcgagtcactagcacttcccgagttacaagttagagaagacactgga

SEQ ID NO: 243622 - DNA, 245 bp, Glycine max
gcacacaaaaggagcatcgagtaggtttcctactcccttctcatcgttggcaagatgagtgccatgaaattttgccgtgaatgcaataacattctgtaccctaaggaagacagagaccagaaagttcttctcttcgcttgccgcaactgcgaccatcaggaggttgctgataacttctgtgtgtataggaatgagatacaggatggggttggagagctcaggcaggtgttgcacgatgtcgctgc

SEQ ID NO: 243623 - DNA, 338 bp, Glycine max
ggtttcttgtagcattcagtgaaacactagctagggtattgggagctctcgttgtttcggagttagggaccttacgcagccatggccactgctacgaatgccgccgccgccccaccacgccagctctcccagaaggaagctgacatccacatgatgttggccgccgacgtccacctcggcaccaagaactgcgacttccaaatggaacgttagatcggcaagcgccgcaaggacgggatctacattattaaccttgggaagacgtgggagaagcttcagctagcagctagggttatagttgcaattgagaacccccaggatatcattgttcaatctgc

SEQ ID NO: 243624 - DNA, 365 bp, Glycine max
ggctgttccaagtcccatagcagcgatgggaatcgatcttaaggctgggggtaagagcaaaaagaccaaaagaacagcaccaaaatccaatgacatctacctcaaattacttgtcaagctttatcggttccttgttcgaaggactggcagcaatttcaatgctgttatactcaagcgcttgttcatgagcaaggttaacaagcctccaatttctttgtcaaggttaattaagtatacaaaggggaaggaggataaaattgctgtaatagtggggactgtaactgatgatatcagagtatatgaagttccagcattgaaaattacagcactcaagtttactgagagagcacgtgcaagaatagaaa

SEQ ID NO: 243625 - DNA, 351 bp, Glycine max
ggcagtttcaaattttcttttccttcactttcccgagaaaaaaataacacttttcactttcttcactacgttctcacttcgatatggctcgtacgaagcaaaccgctcgcaagtccaccggtggcaaggcgccacgtaagcagctcgccaccaaggccgctcggaagtccgctccggcgaccggaggagtgaagaagccccaccgcttcaggccgggaaccgtggcgctgagggaaatcagaaagtaccagaagagcaccgagcttctcatcaggaagcttccatttcagaggctcgtgagagaaatcgcgcaggatttcaagaccgatttgcgtttccagagcagcgctg

SEQ ID NO: 243626 - DNA, 394 bp, Glycine max
ggggcttgaaactcaaaactataataatgggttcttcttctcctccggacactagcaagagcataaagctagagcgatacaacagctacatcaggagactcaacagcaccaaactcctcaacgcctcctccaaactcctcttccgtgccactatcttagtcgcactcatcctcgtcttcctcttcaccttcaactaccctcccctcgccccagacttcacctcccaccgccacctccactcccactcccacttcctctcctcctcctcctccttcgcctcctgggagaagcaggtccgccactcctccacccctcgccgccccaacggcctcaccgtcctcgtcaccggcgccgctggcttcgtcggcagccaatgctcccttgccctcaaaaa

SEQ ID NO: 243627 - DNA, 311 bp, Glycine max
ggagcaagagtgaagagcgaagagaatggctcccaagggtttaatctttttggctgtgttatgcttctcagcactgtcactgagtcgttgtcttgcggaggataatggacttgttatgaacttctacaaggaatcatgccctcaggctgaagacatcatcaaagaacaagtcaagcttctctacaagcgccacaagaacactgctttctcctggctcagaagaatcttccatgactgtgctgttcagagttgtgatgcttcactgttgctggactccacaagaaggagcctgtctgagaaggaaacagata

SEQ ID NO: 243628 - DNA, 139 bp, Glycine max
ggctacctgaagggtgtcgtcactgacgtcatccacgatcctggccgtggcgcgcctctcgctaaggtcgccttccgccacgcgttccgctgcaggaagcagaacgagctcttcatcgccgccgagggtctctacaccg

SEQ ID NO: 243629 - DNA, 331 bp, Glycine max
ggacaccgattagattaggggcttcgaacaaggagccccgaaacccaaaccctaatctgattcgctttcgattatggcgtctgagagcgcttctcgatcgagttccgcggccgattcgtacattgggagcttgataagcttgacctctaagagtgagatcagatacgaaggtattctctacaacatcaacaccgaagagtcgagtattggcctcagaaacgtgcggtcttttggaacagaaggaaggaaaaaggatggcccacaaatccctcccagtgacaaggtttatgagtatatacttttccgtgggactgacatcaaggatttacag

SEQ ID NO: 243630 - DNA, 367 bp, Glycine max
  unsure (1)..(367): unsure at all n locations
aggggacacaatattttaagacgcacataaacttcctctgtcactacccactcctctctctgtctccgcctttcgcattgcaagcgctctctttctttgcttttccttccccctttcagtttcttcaacgctgcaactatccatggcaaaccgctggctcagacccgaggtgtatccactgttcgctgcggttggtgccgctgttgggatctgtgggattggagttggttcgtaatagctgcatcaaccctgaagtcagggtgaacaagganggaagaaaggcaggagtgttggagaactttgctgagggagagaagtatgctgagcatttcctgaggaagttatgtcgcaacagaactcctgagat

SEQ ID NO: 243631 - DNA, 371 bp, Glycine max
  unsure (1)..(371): unsure at all n locations
ggtgcgtcggagctgtctgtgcaaatttgcgttgttcttcgcggcacacctcactcactgaacggtaagtatggcggacaaggctgttacaatccgaacccgaaagttcatgaccaacaggcttctttccaggaagcagtttgtcgttgatgtccttcatccagggagggcaaatgtttccaaggctgaacttaaggagaagctggctaggatgtatgaagtgaaagaccctaatactgtatttgtcttcaaattccgaacacattttggaggtggcaaatccactggatttggtttgatttatgatacagtggagaatgccaagaagtatgagcccaaatacaggcttatcangaacggccttgacacca

SEQ ID NO: 243632 - DNA, 364 bp, Glycine max
gggcactcagtagagaattaaatagaatcaagaaagcatgcatatgatgaagaaggtgtgtgggtttgcaatagtggtgatggcagcactttttctggtggagatgagtcccatggcagaggctgtgacttgtagccctgtggagttgagtccctgtttgggggcaatcacgtcctcttcaccaccatcgacaacttgttgccagaaggtgagggaacacaggccatgcctctgtggttacctcaaaaaccctagtctgaggccatatgtcaactctcctggttccagaagggttgctagctcttgtggggttcccttcccaacttgttagtcactttttacttcatatatatgtaataaactc

SEQ ID NO: 243633 - DNA, 299 bp, Glycine max
gaacaagcaaaaaaaaagagtcttctgttatcctttcaacgctaccagatgccggaaaacaggcaggttctgaggaatgctgattctagtgacaacattgaagcaattcggcgtttgaaaatcaatgataattgggatagagatgctgcagctcaatctacccaatatccagatcgacccggtgaacctgagtgcttgtattatttgaggactgggagcgtgtggttatgggagtaactgtcgctaccatcaccctgctcatatttcaattggtactcattatggtgaagaactccctc

SEQ ID NO: 243634 - DNA, 358 bp, Glycine max
ggagagagagagagagagagagagagagagatagatggtgtctctgaaacttcagaagcggcttgccgctagcgttctcaagtgtggtagaggcaaagtttggcttgaccctaatgaggtcaatgaaatctccatggctaattctcgacaaaacataaggaaattggttaaggatggtttcattatcaggaagccaactaagattcattcccgttcccgtgctcgcagaatgaaggaggccaagaggaagggacgtcactctggttatggtaagcgtaagggtacaagagaggctaggctccccaccaaaatcctttggatgaagaagatgcgtgtcctcagacgattgctccgcaag

SEQ ID NO: 243635 - DNA, 362 bp, Glycine max
  unsure (1)..(362): unsure at all n locations
ggtagcattcagtgaaacactagctagggtattgggagctctcgttgtttcggagttagggaccttacgcagccatggccactgctacgaatgccgccgccgccccaccacgccagctctcccagaaggaagctgacatccagatgatgttggccgccgacgtccacctcggcaccaagaactgcgacttccaaatggaacgttacatcttcaagcgccgcaacgacgggatttacattattaaccttgggaagacgtgggagaagcttcagctagcagctanggttatagttgcaattgagaacccccaggatatcattgttcaatctgcaaggccttatgggcaaagagcggttctgaag

SEQ ID NO: 243636 - DNA, 338 bp, Glycine max
ggcagcagaaagaaatgaaaggccaacaacagctcaaaaaatctaaagtggtgaaaattgactcaagaaaatcatgggaacaccacataactaatgcaaccaataaaggctatcctgttatggttcatttctctgcttattggtgcatgccttctataactatgaatcctttttttgaagaactggcctccacctatcaaagtgttctctttctgaatgttgatgttgatgaggtcaaggaagtagcttccaagttggaaatcaaagccattcctacctttttgttgatgaatcgaggagctctagtggataaaactgtgggtgcaaaccctgatgag

SEQ ID NO: 243637 - DNA, 335 bp, Glycine max
ggcacagaattagggttttccaattcacagagcaacacaacgaaccaacaatggcgcagcctcagccgcagtcgcagccgcagcacgggcaagcagcgctggagcaggtgcagtgcttcggtcgcaagaagaccgccgtggccgtgacctactgcaagcgcgggcgcggtctcatcaagatcaacggctgccccattgagctcgtggagccggagatcctccgcttcaaggccttcgagcctatcctcctgttgggtaagagccgcctcgccggcgtcgacatgcgcatccgcgtcaggggtggcggccaacacctcccagatctacgccatccg

SEQ ID NO: 243638 - DNA, 334 bp, Glycine max
gacagacgcttctttagaacaagcaaacacaactctgctaccctcttctctctctctcggttgtgagtgcagatttcttgcgcggtttatcatgggggatagtcagtattcgttttctctcaccacatttagcccttctggaaagcttgttcagattgagcatgctttgacggctgtcgggtctggacaaacgtctttgggaattaaagctgcagatggagttgtcattgctaccgagaagaaattgccatctatattggttgatgaagcatcagtccagagaattcagttattaacaccagatataggtgtcgtatatagtggcatgggtcct

SEQ ID NO: 243639 - DNA, 290 bp, Glycine max
  unsure (1)..(290): unsure at all n locations
ggcagtttcaaattttcttttccttcactttcccgagaaaaaaataacacttttcactttcttcactacgttctcacttcgatatggctcgtacgaagcaaaccgctcgcaagtccaccggtggcaaggcgccacgtaagcagctcgccaccaaggccgctcggaagtccgctccggcgaccggaggagtgaagaagccccaccgcttcaggccgggagacgtggcgctganggaaatcagaaattaccagaagagcaccgagcttctcatcangaagcttccatttcag

SEQ ID NO: 243640 - DNA, 362 bp, Glycine max
gaagattgtaagataccgatccacttcgaaagggttaggtttacgaagaaacaccaatcctctccgagaaatcaacgatgcctcgctatgatgataaatatggtaatacccgcctctatgttggacgcttgtcttcgaggacacgttcccgtgacctggagcgtgtcttcagcagatatggaagaattcgaggtgtagatatgaagaatgaggttgcggttgttgaatttagcgatcctcgggatgctgatgatgctagatatagcttggatggtcgtgatgttgaaggaagtcgtatcattgtggaatttgccaaagggggtcctcgtggttcccgggaaaacttgggtcggggtctacct

SEQ ID NO: 243641 - DNA, 337 bp, Glycine max
ggcagtgatagagataagaaaatgtggcttgtgcagctctcaaccccatttctgaacggacatggtcattccaccacccttctctccaagcacagttcggcggtgactcagacccactgggccccaccgagtttcctgcctcaaatcaatgcgatgaagacaatgcaggggagagtggtgtgctccaccagcgacaagacggggagagtggaggtggtacagctggcccctcacccaaagtacaagaagcgcgtgaggaagaagaagaagtaccaggcccacgaccccgataaccaattcaaagtcggcgacatcgtccagctccagaagaacaggc

SEQ ID NO: 243642 - DNA, 363 bp, Glycine max
ggcgcattgaacgaaaattagggtttgtagtgtagcaggaagaagcagcaatggcgccgaagataacacgtaaggttagcagaaaccctgaattgataaggggaatcggaaagtactcgaggtcgcagatgtaccacaagaggggcatttgggctatcaaggccaaaaacggtggcgttttacctcgccacgaccctaaacccaagcctgaagctcctgctgaaaaaccacccaaattttaccctgctgatgatatcaagaagccccttgtcaacaagcacaaaccgaaaccagctaagctcagggctagcattactcccgggacagtgttgattcttcctgccggtagatttaagggaaaga

SEQ ID NO: 243643 - DNA, 385 bp, Glycine max
cactcccttaactttagaatccaaaaccacaaaatgaagctggtagaagtggaaggaacgcacacccttcagacaacgtactcctctcttgatgttcatgtaggccaatcttattcagtgctggtaactgcggatcaacctgctcaggattattatattgtgttttcctcacgattctcctacaaggtcctcaccaccactggagtgcttcgctatagcaactccgcaggcccggtatcaggcccaccccctggtggacctacaatccaaattgactggtctttgaaccaggcccgctccattaggacaaaccttacagcaagttggacgaggccaaacccgcaaggattcgtacattacggtatgataaacacgacaaagacga

SEQ ID NO: 243644 - DNA, 361 bp, Glycine max
gagggtttggttattagggttttcgctgaccggtgcgcagtcgagcctccagaagacgaatcgaaaatgccgtcgcacaagacattcagaatcaagaagaagttggcgaagaagatgaggcagaacaggcccattccctactggatccgcatgaggaccgataacaccatcaggtacaacgcgaagcgccgtcactggcgtcgcaccaagcttggattctgaggtgtatgctctgcctaggttcaatttatccaattaattagtgttttattttcttgaggcaaaaacaatgttttgagtttttaatattttccatttgttcgaagactatattgtgtaagggaactattgtagttcatac

SEQ ID NO: 243645 - DNA, 359 bp, Glycine max
ggatttttgagtctgcttactgagaatggtaacactaaggatgacctcaagcttcccactgatgagagtctgctcactcagataaaggatggatttgctgagggcaaggatcttgttgtgtctgtcatgtctgctatgggtgaggaacagatttgtgccctcaaggatattgggccaaagaactagcttttggtgcttgttgcttgttatttctattttctatttaagcaaagatatttttgtaagccttttatattggtttgttcaagacctggcgtatagattctagtcagactagtcttaacaatggtttttatggatgtggtgacagaaactattatcacatttttctggtttcc

SEQ ID NO: 243646 - DNA, 371 bp, Glycine max
gaccgtaatccttacgctctctcactcacaaacgcacactgaattcaaaaacatcgaaagagagaggcatggccgagcaaaccttcatcatgatcaagccagatggcgttcaaagaggccttattggcgagattattagcagatttgagaggaagggtttttacttgaaagggttgaaactcgttactgtggaccgtccttttgctgagaagcactatgctgatttgtctgcaaagcctttctttagtggtttggtggattacattgtctctggccctgttgttgccatgatctgggagggtaagaatgttgttacaactggccgaaagattatcggagccacaaacccagctcaatctgagcctggaact

SEQ ID NO: 243647 - DNA, 335 bp, Glycine max
ttggtggatgaagtttggataaatcgcccaccggcagagataaatgctgttattgtacatcctgtgaaatttgcaggtcgctctgttgcagataagttgaaagatttgagaaaaaagcttgtacatgagcaaacccgtgggattattttcacagcacttgatgaagttgcatggttgtataatattcgtggaagtgatgtggcctactgtcctgttgttcatgcatttgccattgtgacatccaattctgctttcatttatgtggacacacaaaaggtttctgttgaggtacaaactcatttagtggagactggaattgaaattcaagagtatac

SEQ ID NO: 243648 - DNA, 339 bp, Glycine max
cacgcgtcagtcgtacgctcctgaaatcttccgtcgtctccggcatcctccgctggcagccttctgatctgtcataccaaatggccaacagggttcaaatccctaccaacaattcagcactcattgctatgattgcagatgaggatactgtagttggatttttgttggctggagtgggaaatgttgacatacgtaggaagacaaattacctcattgtggattcaaaaacaaccgtcaaacaaattgaggatgcattcagagaatttacaacaagggaagatgttgcaattgtgctgattagccaatatgttgcaaatatgataacgtttttggttgata

SEQ ID NO: 243649 - DNA, 312 bp, Glycine max
aggggatcgtgtcagaaatataaaagtttatttcctctgatcgtgtggtttctgagttctaagcactcacctctttcatacacgtttgttcgcttgttgagaagccatgggcgaggatttcgagttcccaagtgctggcaacatggaaatgcctgaggaggaagagtttgagagtccgatcctgaaggttggggaggagaaggagattgggagaatggggctgaagaagaaattgctcaaggaacgtgaacgttgggacacccctgacagtggagaccaggttgaagtgcattatactggaaccttgcttga

SEQ ID NO: 243650 - DNA, 342 bp, Glycine max
ggcacaagtttgttgagatagctagaagcaataagatgaaaatgaaagtgcttgttttgtttgttgctacagttttggtagcatatgaatgccatggctcagactaccagaagttccctctccaaatgaaaactgggtttggtgggcaatacagcaatgaggtggcatgtgccagttggaggcttggcgtggaagcaaacaacgtagtcaagcggcagagtgttcctgcagcttgcggggagtacatagctgactacgttctaggagaccaatatagatcagattccaaaacagctatacaacaagcttatttctatgcgaaatccctcaaactcaccaaca

SEQ ID NO: 243651 - DNA, 331 bp, Glycine max
ggggccgtgcagcacataatagcgtgtggtggtcggagagaagaacgggatggagtgcgcggcgaaggggagcggaggaaggtgcggcggcagcggcagcggcggtgccacaagactctgcgctcgctgcgaagccgttgcatattgctctctctctcaccagattgcacactggagtcgtcacaaacacgagtgcgataggttgcaacagcaggtgaagagtgtcgaagtcctcaataattttcccttcactttctctcgcgaatccacgtttcaggtttgtgtgaagcaggaaactaggtgttcattttttagcaagagaggccttcat

SEQ ID NO: 243652 - DNA, 373 bp, Glycine max
gattgtagaactgaacaagggtttctctttctctttctctgtctgcttcttcactttctctcgtttcaatcgaaaaaaatcatgggcagaaaattcttcgtcggtggcaactggaaatgcaatgggaccactgaggaggtgaagaagattgttactactttaaatgaagctaaagtccctggagaagatgttgtagaagttgttgtgagccctccttttgtgttccttccttttgtaaaaagtttgctgcgccctgatttccatgcctcggcccaaaattgttgggttcgcaaaggtggtgcttatactggagaggttagtgctgaaatgcttgttaatttgggaattccttgggttattattggtcactctg

SEQ ID NO: 243653 - DNA, 373 bp, Glycine max
aggggaaacactaaaacaagattccaaaacttcaaatccccaactgggaacccgaacggagaagaacactccccccgttcaatttcctccaaatgccgaaacgttcccaatattcccctccgaacatttccgaatgttccagttcaaggtgccgaactgtccacgtggcaggtcccacgactggaccgagtgtccctacgcccaccccgccgagaaagctcgccgccgtgacccccgcaagttccactactcaggcacctcctgccccgattaccggaaggggaactgcaagaagggcgacacgtgtcagttcgcgcacggcgtcttcgaatgctggctccacccttctcgctaccggaaccagctctgcaaa

SEQ ID NO: 243654 - DNA, 372 bp, Glycine max
  unsure (1)..(372): unsure at all n locations
agggaagcaaaatccccctcaacaaaggcctcccaaaacgaaaaaaaaaagaagagcaattttccctcaacaaagaagaagaagccaacaatgggcgattaacttaacgaagaacaaatttccgaattcaaaggaaccctcaacctggtcgaaaaaggacgggaagggtggaacaaaaccaaaggacctggaaatggtaagccttcaatgggggaaaaaccaaatgaaggcaaaactcaagaacatgataaagaaatggatgccgatgggaatggtacnattgacntccctgagttcctaaatctcatggccaggaagatgaaggacactgattctgaggaggagctgaaagaggcattccgggttttcgac

SEQ ID NO: 243655 - DNA, 331 bp, Glycine max
ggaacctttgcattccactcactcaagattcagcaagtgcgttttggaagcagagaccgaaacacttcgagatggcccgtacaaagcaaactgctcgtaagtcaactggaggacaagctcccaggaagcagcttgcaaccagcgctgcacgtaagtctgcaccaacaactggtggtgtgaagaatcctcatcgtcatcgccctggagctgttgctcttcgtgagattatgacataccagaagagcatctgagcacctaatcaggacgcatcctttccagacgttggttcgtgaaagtgctcaggatgtcacgactgatatgcgtttccaga

SEQ ID NO: 243656 - DNA, 369 bp, Glycine max
cgcgtcatccctgcagctgtgagtagaggagagagtgagttattgggcttcatgcattcatgccaactggtttgggagtgctgaaaattgctcagtcagtatggtctgtattacactcggctgggttctggggatgagtcagtactcgtgctcgatgttatgagatggtcatggctttgtcactgtacactcctgttgcttttctggcttggtttccaattgttgcacaatttcaaacgcgtatgctgtacattcaagtattcagcgctggtttgcaaatgttccgtattcttggttgccagatgaatgaacttccttcgcgtagcattgaagatgtagtcaccacataagggttacttacgacgagtc

SEQ ID NO: 243657 - DNA, 379 bp, Glycine max
gtgattgtgattacctctgatgatgaatcaaacgagtagcaagctgtgaagggaaacatggcaagggaaacatctgccattaacactgccatggccttcagttctgttctctctgcaacaatcattgctgattgcggacttccacgggattttgtgatgaacattgatgcaactgacatggagtatgaactggcagcagccgagtatatcgatgatatcgacatattgtacaatgagactgagaaatatggttgtgtgcatgactacatgagttcgcagccagatatgcatgccaagatgacgtgaatccttgtggactggttgacatatatgcataggaagtttgagctcaagccagaaacgctttattcgaacatga

SEQ ID NO: 243658 - DNA, 390 bp, Glycine max
gagggtttttgtcgtcgctactaagagttgctgcttcttcagccactccgcacctcgcagcctctgtgccctcaacaaccatggctgaaatcgaaactaccgttccagatcccacccaaatcgacgtcaaactcttcaatcgctggagcttcgaggatgttgaggttaatgatatgtctctggctgattacattggagtgtccccatcaaagcatgctacatatgttcctcacactgctggtaggtactcagtgaagaggttcaggaaagcgcagtgccccattgttgagaggctcaccaactctctgatgatgcacgggaggaacaatggaaagaagctcatggctgtcaggattatcaagcatgccatggagatcatccacttgctca

SEQ ID NO: 243659 - DNA, 365 bp, Glycine max
ccaccaaccacaccagggaagggagggaacactccatgcccaccaccaaagtctcctgcgcaagctacgtgccccattgacacgctcaaacttggtgcctgtgtggatcttcttggagggttggttcacattggtttgggtgaccctgttgcgaaccagtgctgccccgtgcttcaagggcttgttgaggttgaagctgcggtgtgtctttgcaccactcttaaactgaagcttctcaacctcaacatttatgtcccacttgcccttcagctccttgtgacttgtggcaagtctcctcctcctggttacacgtgctccctctaaaccagtggaaaggattgaggaatatatggtcaaaatcgaca

SEQ ID NO: 243660 - DNA, 343 bp, Glycine max
ggccaccagccagaggagggaagggagggaacactccatgcccaccaccaaagtctcctgcgcaggctacgtgccccattgacacgctcaaacttggtgcctgtgtggatcttcgtggagggttggttcacattggtttgggtgaccctgttgcgaacgaatgctgccccgtgcttcaagggcttgttgaggttgaagctgcagtgtgtctttgcaccactcttaaactgaagcttctcaacctcaacatttatgtcccacttgcccttcagctccttgtgacttgtggcaagtctcctcctcctggttacacgtgctccctctaaaccagtggaaaggattg

SEQ ID NO: 243661 - DNA, 376 bp, Glycine max
  unsure (1)..(376): unsure at all n locations
catggatgaaagtgaatggtggattttcccagctggattggttttgtgtaaattattccagtctcaactcattaattggcatgttgccaatctggaaattcaagaccgttccttgtatagcaacgattttgagctgttctggcaatcatganggtatgttcacagcttatattcaacattaactttttaccctttttccctcttctctcgaaccatcacatgttctgagtacggtcatctaatataggtcaaagatgacatagagatggtagtaggataaacttgaggtggggagaaatagaactatagaaatcaaaataagatgttgtagaggcaatcatttactgtacacctaatgctcaatagttcttttttt

SEQ ID NO: 243662 - DNA, 386 bp, Glycine max
gataacagtcacgtgttcaaatttactgctgcgtcacctggggcctcatttgccctattcagattcagttccccttcgcgtctctcttcaaacaaaacagaactgaactcgctgactgaaactcgcaaaaattagggttttgcagtgatggcactgtccaaccgcgtccgatcgggaatctctctcttcaccaaatccacgttcctcacttccgagcgatccactctccaacgattcctcgttgccccttccatttccttcgcctccagaaattacgccaacgtgccggggcaaaaggaaaacaaagttaaggtccctctggctttgtttggaggttcaggaaactatgcctctgctttgtatattgcatctgtgaaagctaatgc

SEQ ID NO: 243663 - DNA, 388 bp, Glycine max
gggaatccatcgatccaaaaccctaattgaagttgtcttgtctgcgttctcaaacgttgttgcttgctgctgctgcatagttgatcgaaagcatgacaacatcattgtcgagcatccttttcaagggaattgcagctcgttctttcaccgcccctctaactaggtcctgttatcatggaatgagatactttgctactgtatcaaatgatcctgacacacatgatgacttcaagccagctaataaacttgagaattccaacatttctttggctgatgttattgagcatgatgtcaaggataatcctgttatgatttacatgaaaggtgtgcctgattttccacagtgtggatttagttctcttgcagttagagtgttacaacaatatga

SEQ ID NO: 243664 - DNA, 355 bp, Glycine max
gcgagaggtacggggcaagagttagaagctgaaacaattgagtccttaaaagctatatttccctttccagtctatcctattggccctgctataccttatttagaactaggacaaaaccctttgaacaatgatcatagtcatgactatataaaatggctagattctcagccacctgaatcagtattgtacatttctttcggtagtttcctttcagtgtctactacccaaatggatcaaattgttgaagcactaaacagtagtgaagttcgttatctttgggtggctcgagccaatgcttcttttttgaaagaaaagtgtggagataagggcatggtggtgccatggtgtgaacaat

SEQ ID NO: 243665 - DNA, 275 bp, Glycine max
aaaaggtcaagaaaaaacggaacaacaatggcggtaaatccaaccaagttaacgaatggggcttcaccgtttcgctgatgaaaagaagtgttgcattgcaaaaagggctacccattcttggtgtattcaggacttttgcagcagttggtgttgatcctgccatcataggtgttggccctgctgctgcaattcctgttgccgttaaggctgcacgtctaaatcttgatgatactgatcgttttgaaataaatgacgcatttgcctcccaattcgtg

SEQ ID NO: 243666 - DNA, 308 bp, Glycine max
ggttctagtgtgtgagtgtatgttgtggtaacccgtccatcttctcttgtggttctgtgtttgtgtgtgtattttctctcatctgacaatgtcttgcggcggtggaaactgtggttgctgaagctcctgcaagtactgcgactgcatcggaggctgcaagatgtaggcagagttgagctacattgagtctaccatcacgagaccgtggtcatgggagtggacactgataaagctcaaattgatggtgctgatatgggtgtgtccgcgtagtaccatagctgcacatgtggagctcaatgctccatcaa

SEQ ID NO: 243667 - DNA, 369 bp, Glycine max
agggaataagaattttaataataatggaatggaataataaccaaggggaacttccatccacaagttaatggtaaattccaaaaaggggttgcaatttaatattccaatcaaagggttggaaaaaattggcctttgggattaacaagtcaagtcccttgaaaggggaaaagacattgaaagtcatgatatgctaagacaaggtttcactcatgctttcttgatgacattcaatgggaaagaggagttcaacgcatttcagactcacccaaatcatcttgagttctcgggagtgttttcacctgctattgagaagattgtggtgctggatttcccatctaacctcgtcaaagcaccagcatgaatctcaac

SEQ ID NO: 243668 - DNA, 386 bp, Glycine max
  unsure (1)..(386): unsure at all n locations
agggacagcganacagagagtgattcagtgagtgatcggtgttcacttgatctcatcataatcgtcagcgtcaattgaagaagatgccgatcagaaacatcgccgtcggaaggcctgaagaggcgactcaccccgacacgttgaaggcggctttggctgagttcatctcaaccttcatcttcgtgttcgccggctcaggctccggcatcgcctacaacaagctcaccgacaacggcgctgccacccctgccggcctcatctccgcctccatcgcccatgcattcgccctcttcgtcgccgtctccgtcggcgccaacatctccggcggccacgtcaaccccgccgtcaccttcggcgccttcgtcggcggcaacatcaccttcctc

SEQ ID NO: 243669 - DNA, 364 bp, Glycine max
ggggagaggcagaaagaagagaaaaaaggggaatggcatggttgcagttgcagagaatcgtgaccaagggaggtgctaatttgatctcaccactcccactttcacgattcttctcgaaatcttcttccccctatgttgtgaaagttggaattccagagtttctaaacgggattgggaagggggttgagtcccacgttcctaagcttgaatccgaaatcggtgatttccagaagcttcccctcactcccaccctcaaactcaagaagcttggcattccttgcaaacacaagaagttaatattgaaattcacacacaagttcaggctgggattatggaggccacgtgttgagtccatcaatgcctg

SEQ ID NO: 243670 - DNA, 254 bp, Glycine max
ggtcaaggaaatttttcgaactgatggcgaacagttcctcaagtatccaccacctaaagtgatgcaggtggataattctgcatgaataacggataaaaaatttccaaaagaaccaattcctgttgtaaaccaaatatccattaaaactcttaaagattccaccacgtatcacactctattctcaaacccacagtgatctcacccctctataataacaacacaacatttagacccaaattggtgtgcgcacactt

SEQ ID NO: 243671 - DNA, 339 bp, Glycine max
gtgctcttcaaacatgggaaaacagagcacaccccaattctctgccctcaactgcatcgatctctccaaccccgacatcaaccaatccgtcaacttactcaaagaggcatgtttggattccggttttttctacgttgtcaatcatggaataagccaggaattcatggacgaggtttttgcgcagagcaagaagttcttctctcttcctcacaacgagaagatgaagactctcaggaatgaacaacacaggggatacacccctgttcttgatgagttgcttgatcctgaaaaccaagtacatggagattacaaagacgggtattatattggaattgaaaa

SEQ ID NO: 243672 - DNA, 362 bp, Glycine max
gactcagcagtagcaaacaaaattcttcgtatttgcttcttgcttttttctttttgaaccacaaaatggccgacgacagcacagctacctgcatcgacatcctccttgccatcatcctccctcctctcggtgtcttcctcaagtatggatgcaaggtagagttctggatctgtttggtgcttactctttttggttacattcctggaattatctatgctgtctatgctatcaccaagtgatcatattcatcacctcttgtagacaatgaataatttgtcaaagtacaacggttatgcatgtttctcaactccagcattgatataatcgtttgatctcagaacaatgtgattcctttttgtttt

SEQ ID NO: 243673 - DNA, 394 bp, Glycine max
  unsure (1)..(394): unsure at all n locations
gtccacccacaagtccggacagaatgggacagccgcaactttaaacagagcaaaaccaaccttaaaaacctctggtttccggtacaaatataaggatttccaaggaaaaaaaggttgcaataaaaaaacccctgattccctttccaaaaaagaatggtaccatatcaaaggcccttccctcctccaagtcaagaatattggcaaaaccctcgtctctcgtacccaaggaaacaatattgcatcccaatgactcaaacatcgggtttttgacgtctcattggctgatctccaaggggatgaagaccactccttcaagaagattcgtttgagagcttaggacgttcaanggaagaatgttctgacaaacttctggggaatggatttcacaactgac

SEQ ID NO: 243674 - DNA, 382 bp, Glycine max
gaaacaaaaacaaaagaaaagaaaactggttcttcttttcgcgttgcgttttcttggtgtctctgtcgattcttcttctgaattttaatacttaggaagtttagttttctctcttggcttctccggttggagtttccggcgaccttgtcggagattttgttgtttatttttcacaccacttgtgaaacttctcaagaaaaagaaaaaggatgtttcttgttgattggttctatggaattttggcgacccttggcctgtggcaaaaggaggcgaagattttgttcctagggttagataattctgggaagaccactttgcttcacatgctcaaagacgagagacttgttcagcatcaacctactcaatatcccacttcggagga

SEQ ID NO: 243675 - DNA, 346 bp, Glycine max
  unsure (1)..(346): unsure at all n locations
ggtttccaaaacactaacccctttactggttaatgacaaagagaaacaatccgaggattcggtccggtccaaaagaagggcggacttttaagaaaaaagaaccttccacccaaaggcaaaaatctggtaattgccgggggtttgacagcttttgtcattggtgcatacttctacaccatganggctgttggaggcactgatgaactgcaggtagcaattgataagtttgaagctgacaagagcaagaatgagggtgatgccaacatgccatcaaaggtctaaagcttgtacaataaagcaatactttgggtgtattcactgttttggtttgggatcaagcttttta

SEQ ID NO: 243676 - DNA, 395 bp, Glycine max
ggccgctctctgagaaaaacagatagtgtgggagagagaagagcggaagagaaaatgacgaccaggttcaagaagaacaggaagaagagaggtcacgtcagcgccggacacggccgtatcggaaagcaccgcaagcatcccggaggtcgcggtaacgccggtggcatgcatcaccaccgtatcctcttcgacaagtaccatcctggtttcttcgggaaggtaggcatgcgctacttccacaaacttcgcaacaaattctacaatccgatcatcaacatcgacaagctgtggtccctcctcccccaggaggccaaagacaaggccaccgccgacaaggcacccttgctcgatgtcacccagttcggttactttaaggttttgggtaaaggggtttt

SEQ ID NO: 243677 - DNA, 371 bp, Glycine max
gagtggcacgccgagtacaaaagaagccgtcaaaagcctgaccacgcagataaaggatatggcactgaagttttcaggtgcatacaagcaatgcaaaccatgcacagggtccagtagctacaaaaaaggacataggccatatccagattttgataccatctcagaaggggttccatacccttatattggaggtgcaagctcaagttcaacccctgcatgggacttcacaacctctcactaccctggtggaagatctgaccctagatttgctggggcatatggcggtgaccgcaccccgagaggacgtgactcatcatcagtttgtgatgtagtcttagaggatgaggatgagcctaaggagtggatggcac

SEQ ID NO: 243678 - DNA, 386 bp, Glycine max
gagtggaagagtgaataagagatatcaatatattatgataatggagggatacaataagaaggttatgattgtggggatggtgttgggcatggccatgattgggatggccaatggccaatactcgttttgtcgcatgcccagcgatgggttggcggcatgcaagccgagtgtgagtggggactatcctgctgatccctccactgcttgttgctcagccattgccaaggctgatcttaaatgcttctgccgcttcaaggattcgggccttctctctatgtatggtgttgatcccaacaagtgcatggaactccctgttaagtgcaaggttgtcgactctttccactgctagattcattagagggggcactaatcaatataaactacac

SEQ ID NO: 243679 - DNA, 334 bp, Glycine max
  unsure (1)..(334): unsure at all n locations
gggccactcactgggaagagcaggaactgtgggagagacagcagcggaagagaaaatgacgaccaggttcacgaagaacaggaagaagagaggtcacgtcagcgccggacacggccgtatcggaaagcaccgcaagcatcccggaggtcgcggtaacgccggtggcatgcatcaccaccgtatcctcatcgacaagtaccatcctggtttcttcgggaaggtangcatgcgctacttccacaaacttcgcaacaaattctacaatccgatcatcaacatcgacaagctgtggtccctcctcccccaggaggccaaagacaaggccaccgccgac

SEQ ID NO: 243680 - DNA, 378 bp, Glycine max
  unsure (1)..(378): unsure at all n locations
gagaagaagagagagacagacagaacaatgggggaagcaaagggaaaggaagaagaagtgttagccccagttcactcaaccgtgttcaaagaatcagaaagccttgatggaaagtgtgttaagattgagggctatgatttcaaccgcggcgtcaattatccgttgctactcagctccatggtcacaactgggtttcaagcttccaacctcggtgatgccatccaagtcgttaatcaaatgattggaggctagttgatgaacccgtagctgaggattgcagtgaccaagagagggatttggagtaccgaaaatctgtgacgtgtanagtgtttctgggtttcacttctaatcttatttcctctggtgttaaagatactg

SEQ ID NO: 243681 - DNA, 247 bp, Glycine max
ggatgatcccaaacgttcacgtgcctacctgggacgcggacggaggaggagcactctccccgtcgatctcttccaatgctgacacgtgctcattattctcctccgaccatttccgaatgttccagttcaaggtgcggaactgtccacgtggcaggtcccacgagtggaccgagtgtcgctacgcccaccccgccgacaaggctcgccgccgtgacccccgcaagtaccactactcaggcagctcctg

SEQ ID NO: 243682 - DNA, 345 bp, Glycine max
gaaagaaactagggtataaaaaaaaatagaagaggggacgcagtgctatcgagtttttttttcttaatgccatggctgctctgcaatacttggaatcgctgcgcaacgcgcatcctgagctctccgattggtacaattcgctggcggatctataccagaacaagctctggcaccagcttaccctcaagcttgagcagttcgtggctctcgccgtcttccaggccggtgatgcattaatacaattatatcacaatttcatcacagactttgagaccaaaatcaaccttctcaagcttgcgcatttcgctgttatagtttctcggcagtatgctgagaaagaagctg

SEQ ID NO: 243683 - DNA, 329 bp, Glycine max
gacatggagctctacgaatggactaagggtgacatctctgacgaacctcaaaaggaacgtgtcaatcagatgattgaagaatgtgaaacttttgaaggccaagctcctttggatgccaagtgcctcaagtgaaaatttaatccctgaaaaggtccacttttaaaaagtggcctccgttttgggaaggtaccggtttctcaaattgaaactttatggttaaattacttttaactttaattttaatgatagctagactaatatacaagtgctatatttttatgttggatgtaagcatttactaattacattgataggttttctttttcccg

SEQ ID NO: 243684 - DNA, 355 bp, Glycine max
agggattcaactctccaaacaacacattaacctttctcaatccccaactcctcaacttaatcaaccactgccaatttccaaggttcccaaatggaccccggcggaaaaattaagaaaggcccccgaagaaaaaaaggccgccggcctaaaaagaagccggtttcaaggtccgtcaaagccggtctccaattccccgtcggaagaatttggcgttatttgaagaaaagaaggtacgcccagcgtgtcggtaccggtgctcccgtttacttggccgcagttctcgagtacctagctgctgaagtgcttgagttggctgggaatgctgcacgtgacaacaagaagaacaagattattc

SEQ ID NO: 243685 - DNA, 389 bp, Glycine max
cagtggatgtggatccaaactctccaacttattccaaagtcatccataggcttcctgttccttatttaggtgacgaattgcatcacacaggctggaattcatgcagctcttgccatggagacccctcagcagaccgacgatttctcatcgtacctgcactcgtatcaggtcgagtatatgtggttgatgtgaaaacaaatccaagggctccatctttgcacaaagttgtcgagcctgccgatatcatacagaagactggattagcttatccacacacatctcactgccttgcttctggtgatataatgatctcgtgtcttggagataaagatggaaatgctgcaggaaatggatttcttcttcttgattccgaatttaatgtgaaggga

SEQ ID NO: 243686 - DNA, 397 bp, Glycine max
aggggcaatgtaaccgaataataacaacggcccgctccctccccaacccatcacagagaaaacaaagaatcgcattagtagcagatcggactcaaccgatgaagttgaagccgcagtgaaacagaccagaataattgacgcatcatcaattagatcgagctgctagaaatgaaagatgaagacaggcttccgacgaccgccgccacgaagaatgaaagcatggattcgagtctgtttgggaaatggaggtacaaattctgggcgttagcggccatcatgcttctggcgttctggtccatgttcaccggcaccgtctcgctccgctggtccggcactctcaattcccattccagcgacatcgacactcccatccacgacgacctcgatgttctcgaaa

SEQ ID NO: 243687 - DNA, 353 bp, Glycine max
gactcagccataaccaacctactccaaggaagtcccctaatcagaaccagagatggacaccaaacccaccgagatcggcagcggcaagatgttcggaggttacaacaagagattcaagcatttcagccttaccctgggatgctccatgaacttccacatctacttccctccatctccttctccctctcacaaattccctgtgctgtactttccctctggcctcacttgcaccgacgagaacttcatattcaagtcgggtgctcagcgtgccgcttccgccgagggtgttgccttggttgcccccgacacttctccgagaggcttgaatgtggaaggagaagcagacagctggg

SEQ ID NO: 243688 - DNA, 340 bp, Glycine max
ggcgaaacagagagtgatttcagtgagtgatcggtgttcacttgatctcatcataatcgtcagcgtcaattgaagaagatgccgatcagaaacatcgccgtcggaaggcctgaagaggcgactcaccccgacacgttgaaggcggctttggctgagttcatctcaaccttcatcttcgtgttcgccggctcaggctccggcatcgcctacaacaagctcaccgacaacggcgctgccacccctgccggcctcatctccgcctccatcgcccatgcattcgccctcttcgtcgccgtctccgtcggcgccaacatctccggcggccacgtcaaccccgccg

SEQ ID NO: 243689 - DNA, 358 bp, Glycine max
gagagagatcgtggaagccctgcttatcttagattgagccagaaaactgtcaattcccttggtgacctagtccccttcagcaacaagttgtactctggatgtttgcaaaagagggtagggataacagctggaatttgtgtgttgatccaaaacaaatcagagaagaagggagatatgtatgaggcaatctacagcttctactttggggactatggtcacatttcagtgcagggttcatacctgacctatgaagacacttatcttgctgtgactggtggatctggcatctttgaaggggcttatggtcaagtcaagctgcatcaaattgtgttcccctttaaattattccacacatttt

SEQ ID NO: 243690 - DNA, 324 bp, Glycine max
ggcgtaaacatcgaatccaagtaaaagcgaggacatccatcaacaccatgatgttgggggagacccaccgcgcaaatccaaccgtacacgtgccaccgtggacgccggagatcttctcaccgtacaccggcaatgccgattactctccgtactcattgcatgaagcactgagtgcgcatcagcactacgaatccaccgatgctgaatcagactcggagtttccgtctcgggaaccggaagtcacggtggacgcttactcctgcgaccatttccgcatgtccgagttcaaagttcggagatgcgcacgtagcaagtcacatgact

SEQ ID NO: 243691 - DNA, 341 bp, Glycine max
gaacaggagtggattgaggagaagtgagcctgtggagtgttttcttctgatttcatctggatctgcgagagatgacggtctttcatttcttcaattgcgcgattctcaccttcggcccccacgccgtctactattctgccacgcccttatctgagtatgatacactcggcacctctatcaaagccgctgttgtttatcttgcaacggcattagtgaagcttatttgtctagctacttttctcaaggtatcagagagcgatagctttgatccgtatcaggattttttgaaggcgttaataggttttataaatgttgctgggctttattttgccttgacccat

SEQ ID NO: 243692 - DNA, 405 bp, Glycine max
aggcgtcagtacagcagcgaaagggcgcacaatgggccatcacaaacctaccagtgacggtttttggtgagctgtggaaattggaaccactatctgaagaaaggaagagaaaatggcaaagagaaatggactggttattgtctcctaccaactatatggtcgagctagttcctgctaagcaaagcagttccaatggtggcatttttgagataatgaccccaaaagctcgtgcagacatccatatgaatcttcccgcacttcagaaattggactctatgcttattgaaacactagatttgatgatgaatacggagttttggtatgcagatggaggaagccaggcggaacggaggagggacacaggttcacagcatagcaaaagatggtggcttccatcatcccaag

SEQ ID NO: 243693 - DNA, 302 bp, Glycine max
gctctccgtcaggttcatcgtcccactttcttctccttttaaggtttcctttttgtttcacctttccagatctgcatcttccattttttaggattaagcggtgagattcatgaatctgagaaatgtcagattcttctcgggatgagaatgtttacaatgcgaaattggcggatcacgtcgaccgttacgatgagatggttgagttcatggacaatgtaccagacactgtggaagttgaggagttgacggtagatgagacaaatcttctctctgtggcttacaacaacgtgattggtgctatg

SEQ ID NO: 243694 - DNA, 362 bp, Glycine max
  unsure (1)..(362): unsure at all n locations
ggaacctttgcaatccattcaatcaagaatcaacaagttccttttgggaagcaaaaaccgaaatacttcgagatggcccgtacaaagcaaactgctcgtaagtcaactggaagaaaagctccaggaagcagcttgcaaacaaggctgcacgtaagtctgcaccaacaactggtggtgtgaagaagcctcatcgttatcgccctggaactgttgctcttcgtgagattangaaataccagaagagcactgagctcctaatcaggaagcttcctttccagaagttggttcgtgaaattgcccaggatttcaagactgatctgcgtttccagagccatgctgtgcttgcattgcaagaagctgct

SEQ ID NO: 243695 - DNA, 327 bp, Glycine max
aggggaaagcaaccggggacaagaaaatcctcaaccattttccctcgtagccaaacactctgaaattctcagttatgtcgtggcaagcgtatgtggatgatcacctactgtgtgaaatcgaaggtaaccacctcactcacgccgctatcatcggccaagacggaagcgtttgggctcagagcaccaacttccctcagttcaaacctgaggaaataactgccatcaataatgactttaatgagcctggattacttgctccaactggattgtatatcggtggcaccaaatacatggtcatccagggtgagcctggtgctgtcattcgag

SEQ ID NO: 243696 - DNA, 409 bp, Glycine max
acaacaaaaggggaaggaaaccgattcaattcaccatttcccctcggcccggcttgttcaaatttaggagcgggaatcagacagagagagatgtcggtatcacccgtggacgtcttgcctaggagcgaaagtcatggcgcataagacaccctcatggtttcgttgccaagcccgagactctccctgatgccaccgttaatttgatggtctggcattgcactattcctggcaaggctgggactgactgggatggtggatatttcccactgacaatgcacttcagtgaagattaccctagcaagcctcccaagtgcaaattccctcaacgtttctttcaccccaatgtgtagccatctggaactgtttgcatgtcgatacctaatgaagatagtagatggagaccagctat

SEQ ID NO: 243697 - DNA, 372 bp, Glycine max
gatgtgagcagacacaatatacaaatcttcaacaggttgtttttcttggaagaggacctgcgtgctggaaaaatactcaacatgaagttcgtcaacaacacaaaagccacagtcccgttgctaccgcgccaaatttcgaaacaaataccgttctcagaagataaaaagaagccagtgttggcgatgcttggcgtggaagcgaactcaagcaacgccaagatcatagcggagaacattggtctttgccaagagcctgcaacggatggagaaaggaaacactgcgcgacttcgttggagtccatggttgatttcgtcgtttccgcgctcgggaagaacgttggtgctttctcaacagagaaagaaaggaaactg

SEQ ID NO: 243698 - DNA, 413 bp, Glycine max
gacattcatattttccttgcgtttccctttcattttccctcactttcacgctcgccaaacgcccctctctctcctccaatggccgaccagctcaccgacgaccagatcgccgagttcaaggaggccttcagcctcttcgacaaggacggcgatggttgtattactactaaggaacttgggactgtgatgcggtcactggggcaaaactcaactgaggcagaactgcaggatatgattaatgaggttgatgctgatggcaatggaaccatcgacttcccagagttcctcaacctgatggctcgcacgatgaaagacaccgactccgacgaagagcttaaggaggctttccgtgtgttcgacaaggattagaatggtttcatctctgcaactgagctccgccatgtcatgacaaa

SEQ ID NO: 243699 - DNA, 360 bp, Glycine max
gggtcgtcaaagcgcgagcaagcatggaaaaaccctagctcgcgttcagctttcgtcttttacatcaggatggagtctcaggttaagcacgcacttgttgtcgaagttatgggtcgtactggatccagaggacaagtaacccaggttagagtgaaaattttggatgatcagatccgtcacatcatgatgaatgtgaaaggaactgtgcgagaaggagacattctcaccctactcgagtctgaaagggaagcaagaagattgcgctagatggtttcttttggcttgcctccaaattctaacaaaacagtgtgaatttgttgatttaaacggtagtcggtggatgtcaaacgttttagcacc

SEQ ID NO: 243700 - DNA, 361 bp, Glycine max
gactcccactgcatcttcttcaaattcctgtcctgaagatgacagcaaagtggtatctcattgtgtgtgttgtagcgatctgggccgttgatctgggttcatcatcacaccatgcccgtgccccagcaccagcaccgtcagtggagtgttcaaacctggtattgaccttatcggattgcctcaccttcgttagcaacggcagcaccgtcaccaagccacagggaacatgctgctcttccttgaaaactgtgctcaacacagcccctaagtgcctttgcgaggctttcaacagcagcgctcagttaggtttagccatcaatgtcaccaaggctgtcacgcttcccgctgcttgcaaactctc

SEQ ID NO: 243701 - DNA, 317 bp, Glycine max
ggaaacagagagtgatttcagtgagtgatcggtgttcacttgatctcatcataatcgtcagcgtcaattgaagaagatgccgatcagaaacatcgccgtcggaaggcctgaagaggcgactcaccccgacacgttgaaggcggctttggctgagttcatctcaaccttcatcttcgtgttcgccggctcaggctccggcatcgcctacaacaagctcaccgacaacggcgctgccacccctgccggcctcatctccgcctccatcgcccatgcattcgccctcttcgtcgccgtctccgtcggcgccaacatctccg

SEQ ID NO: 243702 - DNA, 243 bp, Glycine max
gacgttcacattcaggaatcgttttcttcagaaaatttgccatcgttgagggaagcgcgagagccttcgttgttcaagatgagagctaagtggaagaagaagcgcatgaggaggttgaagaggaagcgccgaaagatgagacaaagatctaagtaggtgcttgaacaaggagtggagatgatgtgcttttccatctgctaccagcttcatgacattttatgctgtcatggctcttatgatgat

SEQ ID NO: 243703 - DNA, 413 bp, Glycine max
  unsure (1)..(413): unsure at all n locations
gggtgtctggttctgaattagttcagaactacattggagaaggttctagaatggtcagggaactttttgttatggccagggaacatgctccatcaattatcttcatggacgaaattgacagtattggatctgctcggatggaatctggaagtggcaatggtgatagtgaggtacagcgtactatgctggaacttctcaatcagttggatggatttgaagcttcaaacacgatcaaggttttgatggccataaatcggattgatatcctggatcaagcnctccttagacctggacggattgaccggaagattgaatttccaaaccctaatgaacagtctcggctggatattttgatcatccattcatgaagaatgaatttaatgcgtggcattgatctgaagaagattgccgag

SEQ ID NO: 243704 - DNA, 368 bp, Glycine max
gggcccatgacgacgtcgtccggttccgtgaagaacgcgatgcccccaggcctccaagaacccaacatcaatgccgaaccctcttcctccgccgacgattgctccaactccaacacgaagcccatcgtgttggtcaccaacagtggcggcattgagtctccgggcctcgttcacctcgtcgaagccctcgtgctccagggcctctgcgacgtccatgtctgcgttcctcaatcggacaaatcggcttcggcccactctgtcactcgcggagtaaccgttgaagctttttcggcagaaattaatggcgccaccgcctttgaagtttcaggaactcctgtggattgtgtatcactagcgttatctggggc

SEQ ID NO: 243705 - DNA, 279 bp, Glycine max
tggcagtttcaaattttctgttccttcactttcccgagaaaaaaataacacttttcactttcttcactacgttcgcacttcgatatggcacgtacgaagcatagcgctcgcaagtccaccggtggcaacgcgccatgtaagcaactcgccaccaaggccgctcggaagtccgctccggcgaccggaggagtgaagaagccccaccgcttcacgccgggaagcgtggcgctgatggaaatcagaaagtaccagaagagcaccgagcttctcatcaggaag

SEQ ID NO: 243706 - DNA, 378 bp, Glycine max
aacaggcgtcagtacagcagcgagaggagcacagaagggggactatagatcggttctttgcttggagtgaatacgaatcaatttatggtcacttgcgttagtcctggaagaaacatatacaccactcacacaatcagattctcgatttcttggtgggtttgagcgatctcgttagtgtgacaaaataagtgaaatgtctcagacgatgaaattgacgccgaatctggatcagcacagcacgaatgtactgaacctcatggtgctccagccaatcgatccgttcatccaacagattctcttaacagccgcgcatgtctccttctactacttcgacatctatagcaaccactacagtcgcaacgatgttgaaggatctct

SEQ ID NO: 243707 - DNA, 445 bp, Glycine max
aacaggcgtcagtagagcagcgaaaggggtacagaagggatcgcatttcatggtactcaacctcaatatgatcacaaatgcatatccactaccttttttcgaagtctctgattgtcctaaaggcaccggtaatggaagagaagaagccggcggagaataaaccagcgtcggagaatgtaactgtggagaagaatccgaacgctgataataagatctcgactgaaggaaggagctagaagtatacgatgcgcacgatgaagagcgtggagacatacaagatgtacatcttgaaggtcctcaaacaggttcagccagacattggtatttccatcagcgccatgggcagcatgaacagcttcatcaatgatcttctctataacctcgccctagaagcgttgcgtttggcccgcttcgacatgaatcccaagatcacctcgagggagat

SEQ ID NO: 243708 - DNA, 404 bp, Glycine max
aaaaaaacaacaaaaggggaaaatccagaaaagaaaaaggaaaccctagcctggaaaaggtcaaacatcatcatgtccgacaaaaagcacaatttcaagtcaaaggcagacgccggtgcctccaaaacctaccctcagcaagccggtaccattcgcaagaacggctacatcgtcatcaaaggacgcccctgcaaggttgtggaaatttcgacttccaaaactggaaagcacggtcacgccaagtgccactttgttggaattgatattttcactgccaagaaacttgaggatattgtgccctcttctcacaactgtgatgttcctcatgtgaatcctactgaataccagctcattgatattgctgaggatggatttttgagtctgcctactgaaaatgggaacac

SEQ ID NO: 243709 - DNA, 383 bp, Glycine max
tgggacacaaatagtatctattagactcactagagtaattgcggaatcagctacaattttctaataatggcgaaagacgttgagcatgtcacagaccatggtgaatactccgcgaaggactacgatgaccctcctccggcaaagttgatcgacacacatgagcacataaagtggtccttggatagagccgccatagctgagttcatagcaacactcctttttctttacatcaccgtgttgaccactattatctacaatagacagagtgacatcataatccccggtcacaacgaatgtgactgcgttggcattttgggcatcgcttgggccttccgtggcatgatcttcatccttgtttacagcactgccggaatctctggtgc

SEQ ID NO: 243710 - DNA, 326 bp, Glycine max
cgggctctcgtctcgtggaagtgtaagcaagcaaaaccctatcggctcatgctttcgttgttcgtgttttgcatcaggatggagtctcatgtgaagcacgcacttgttgtcaaagttatgggtcatactggatcagacgacaagtgaccaagttagagtgaagtttttggatgatcagaaccgtcacatcatgaggaatgtgaaacgatctgtgagagaatgagacattctcaccctacttcagtctgaaatggaatcaagaatattgcgctagatggtcacttttttttggcgtgcctccaaattcgaacaaaagcaatagtttt

SEQ ID NO: 243711 - DNA, 327 bp, Glycine max
cggaaaacgagaaggtcctgctaactgaatcgatctcggaaccacctactcttgcgtctgtgtgtggcaacatgaccgcgttgaaatcatcgccaacgaccaatggaacagaaccacgccgtcttacgtcggattcactgacaccgaacgtctcatcggtgatgcggccaagaatcatgtcgccatgaaccccatcaacaccgtcttcgatgccaagaggttgattggtcgtagattcagtgaatcctctgttcagagtgatatcaaattgtagcctttcaaggtcattcctggtgctgctgacaagccaatgatcgtggttaacta

SEQ ID NO: 243712 - DNA, 317 bp, Glycine max
  unsure (1)..(317): unsure at all n locations
ggtgctaatcttatcttatccctctaatcactctagctgttgcaaatttctactatttttcaatggcttctgcagatgttgagttccgttgctttgttggtgggcttgcttgggtcaccggcaacgatgccctcgagaaagccttttcaatctacggcgacatcgttgaatcgaaggttatcaacgaccgtgagactggaaggtccagangattcggatttgtgaccttcgcctcagagcagtcaatggaagatgcgatcgcangaatgaacggccaggaccttgacggtcgtaacatcactgtcaacgaagctcag

SEQ ID NO: 243713 - DNA, 423 bp, Glycine max
  unsure (1)..(423): unsure at all n locations
gaagagtgtgaactgcaaagggcttctccagcctagtttgttctaagatcttcttcttccatggaccagtacgagaaggtggagaacataggcgatggaacatacggcgtcgtttacaaggctcgcgaccgcgccaccaatgagacaatcgctctgaagaagattcgcctcgagcaggangacgaaggcgttcccagcaccgccattcgcgagatttctcttctcaaagagatgcagcatangaacattgttaggttgcatgatgtagtgcacagtgagaagcgattgtatctggtttttgagtatctggacttggatctaaaaaaacacatggattcatctccagagtttgtgaaagatccgcggcaagtaaagatgttcctttatcaaattctctgtggcattgcttactgtcattcacat

SEQ ID NO: 243714 - DNA, 388 bp, Glycine max
ggagctgggtttgttttcggcctttgatcttcgattctctctctttttctctcgcgaaaaccgtatcagcaatgtctggagaatcagccagcgctattcacaagggtcaagtcgatctcttagacttcattgactggtctggggttgaatgcctcaatcaaagctccacgcactctctcctcaatgctgtcaaacagggttatagagaagacgatggtttgcatctggagagtgatgcagacgatcatcttttgctctagattcctttcactcaagtcgttaaactttattcctttgttatcaaacgtcctgaagaagaatgcccaagacagtgaagctcttttctaagaaggagcacatgggatttagtaatggtaatgattttccc

SEQ ID NO: 243715 - DNA, 405 bp, Glycine max
  unsure (1)..(405): unsure at all n locations
ggaacaaaacaagtgtttcgaatagattatcctaagtctttgggaatagtgctgcaatggcttcaagtcaggangaggtgacccttttgggagctactggaagcccatttgtgtgcanggttcatattgccctcaagttgaagggagttcaatacaaatatgtcgaagaaaatttgaggaacaagagtgaactgcttctcaaatccgacccagttcacaagaaggttccagtgtttattcacaatgagaagcccatagcagagtctcttgtgattgttgaatacattgatgagacatggaagaacaaccccatcttgccttctgatccttaccaaagagccttggctcgtttctggtccaaattcattgatgataaggtttttggtgctgcatggaaatccgttt

SEQ ID NO: 243716 - DNA, 410 bp, Glycine max
  unsure (1)..(410): unsure at all n locations
aacccttaacctcccggtccccttcggtcattgcttctcccccacacacgcacagagacacacacttttgcagtcacattgagaatggggcgtgttcgcacgaagacggtgaagaaatcctcgcggcaagtgatagagaggtactactcccgcatgacgctggacttccacacgaacaagaaggttctggaagaagtggccatcattccctccaagaggctccgcaacaagatcgcggggttctccacccatctcatgaagcggatccagaanggtcccgtgcgtggaatctccctgaagctgcangaagaggaacgcgagcgtcgcatggacttcgtccccgatgtctccgccatcagggccgatcagatcgangtcgacaaggagacgctcgacatgctcgccgccct

SEQ ID NO: 243717 - DNA, 369 bp, Glycine max
gacggcaacggaagaataatcaaatttctcagatttatccgacttcgtcgcaaatccaccaaccgttatggctgccttcagcggtgatgaaacggctccgtttttcggcttccttggagccgcagctgccctcgtcttctcctgtatgggagctgcctatggcacagcaaagagtggtgtgggcgtggcttccatgggtgtgatgagacctgagctggtgatgaagtctattgtccctgttgtcatggctggagttttgggtatttatggccttattattgctgttattatcagtaccggtattaatccaaaggccaaatcttattacctctttgatggttatgcacatctctcccctggtcttgcctg

SEQ ID NO: 243718 - DNA, 505 bp, Glycine max
tcacgtcgcgctgcaggtactagtcaaaaatgcccgggtcgacccacgcatccgaacgggtacaagccagagcttgatattatttccaacgctagctgcacaaccaactgccttgctccactcgccaaggttatcaatgacaggtttggcattgttgagggtttgatgaccactgttcattccatcgctgctacccagaagactgttgatgggccatcagccaaggactggagaggtggaagagctgcttcatttaacatcattcctagcagcactggagctgccaaggctgttgggaaagtccttcctgctttgaatggacaattgactggtatggcattccgtgttcccaccgtggatgtctctgttgttgacctcacggtgaggctggagaaggaagcctcatatgatgaaattaaaaatgctatcaaggacgaatcagatggcaagttgaatggaattcttggttacactgaatatgatgtggtctcaccgactttgttgg

SEQ ID NO: 243719 - DNA, 387 bp, Glycine max
ggtgattgtttgttgttgtaactcgtccttcttctttggtgttccgtgtttgtgtttggtttttctctcaactgaaaatgtcttgctgcagtggtaactgtggtcgcggaagctcctgcaagtgcggcaactgctgcggaggctgcaagatgtacccagacttgagctacactgagtcaaccaccaccgagaccttggtcatgggagtggcacctgttaaggctcaatttgagggtgctgaaatgggtgtgcccgctgagaacgatggctgcaaatgtggaccagactgctcctgcaacccctgcacttgcaagtgaggtgttgggagagcaagcttcaagcagagatagcccttaattacgaataatgataaactaataatgtgta

SEQ ID NO: 243720 - DNA, 377 bp, Glycine max
gaacgtgacctagccagcacaaacggcgtaagtcaagaaggtttcgtcccgtttcaatggggagcgaacagcagaacggcgaattctacctgcgttactacgtctgtcacaatgggcaagtttggtcacgacttcctggagttcgagttccgcccagactgcaagctccgctatgctaacaactccaactacaaacacgacaccatcatccgcaaagaggtttacctaacccccgccgttctccgcgaagtgcgatcgcatcatcgccgacagcgagattattaaggaagaatattacaactggccccaaccggatcgggtggggcggcaggagctccagattgttaaggggaacgagcacatttcgttcaccacgt

SEQ ID NO: 243721 - DNA, 376 bp, Glycine max
ggttccatttctcaacaacttctgctacttcctactccaaccgcacttctgctccgcaattatcatgggcaaggtcaagatcggaatcaacggatttggaagaattggccgtttggtagccagagtggctctgcagagagacgatgttgaactcgttgccgttaacgaccctttcatcaccaccgattacatgacatacatgtttaaatacgacagtgttcatggacactggaagcatcacgatgtcaccgttaaggacgagaagacccttctcttcggtgacaagccagtcactatttttggacacagaaaccctgaagagatcccatgggggtcaactggagctgacatcattgttgagtccaccggagttttc

SEQ ID NO: 243722 - DNA, 375 bp, Glycine max
gatgtcaagatgattcctctgtcgcataatccagtctctgttcaactgcgtggaacaccctgtgactctcttcatccaattacgttccatccaattctgaataagcctcgttcttctgcctctctgttttggaactgcaaaaggagaaggaagaggaaaagctccattactatggcttctaatctcagaaccaacaatttcctgcgccatgtggaatcaatgaagcttcttccatcatgtgcaggtcacatttcacacttgaatgctgtgatacttggtgaatctctcgccactgaagaggatgatttcgttcttccaagtgatgactttgctatccaagccaatgttcagtctccagaacagtatctgaagatg

SEQ ID NO: 243723 - DNA, 410 bp, Glycine max
  unsure (1)..(410): unsure at all n locations
gaaccaaaatgactcaagcccagattcaaccagttaaacttggaacccaaggctttgaggtttcaaaattgggattcggatgtatgggccttactggagcgtacaatgaccctctccaagaacaggatggcatatctgttatcaagtatgcgttcagtaagggaatcacattttttgatactgcggatgtttatggagccaatgctaatgaacttttggttggaaaggctttgaagcagctgcccagagaaaagattcagatagccacaaaatttggtattgcttcacgaggttttcctgatatgaagatcaanggttcgcctgaatatgtgcgatcatgctgtgaagctagcttgaagcgtcntgatgttgaatacattgatctctantatcagcacagagtggacaca

SEQ ID NO: 243724 - DNA, 413 bp, Glycine max
aactttagagaaaatatttgatgatcatggacgaaaaattctcttttcagagtttccacagattatacaacagggttttgcatgtcttcaaggtggtatttgtctttcaagcatggggcgacctgtctcgtacgaaagagttgttgcttggaaggtgctgaatgaagaagagaatgctcattgtatttgctttatgtttgtgaactggtcttttgtttgacatcttgttctgagtacacttgggcttattgtatcttagtgtaagataaggatttactccaagacactcgtgctttgttggttgatgttttactgtatttgcactaaatacttggattgcacattaaatgactatttatttcttagtctatgtaacttgtttccttattcaacatccagctaatatttatgca

SEQ ID NO: 243725 - DNA, 420 bp, Glycine max
gagctttagattcttttcccctagattcagccacagttggaaaaaaaaaaaaagttgttcgagatggcacgtacgaagcaaactgctcgtaagtccacaggaggaaaggcacctaggaagcagctcgcaaccaaggctgcacgtaagtctgcaccaactactggtggtgtgaagaagccacatcgttatcgtcctggtaccgttgctcttcgtgagattaggaaataccagaagagtaccgagcttttgatcaggaagctccccttccagaggctggttcgtgaaattgctcaggacttcaagactgatctgcgtttccagagccatgctgtgcttgcattgcaagaagctgctgaggcataccttgttggactctttgaggatactaatctgtgtgccattcacgctaagcgtgtaact

SEQ ID NO: 243726 - DNA, 407 bp, Glycine max
  unsure (1)..(407): unsure at all n locations
gatatccgtcattaaccaaatttgtgtttctccgattgcaagcaatggactccttcaattccttcttcgattcaacaaaccgatggaattacgatactctcaaaaacttccgtcaaatttctccggtcgttcagaatcacctcaagcaggtttattttactctgtgtttcgccgtggttgctgcggctgttggggcttaccttcatgtcctcttgaacattgggggttttcttactacagtggcatgcgtgggaagcagtgtttggttactctcgacaactccttttgaagagaggaaaagagtgactttgttgattgccgcatcactgtttcaagggtgctccattggacccttgataaatttggctattcanatcgattcaagccttatctttagtgcatttgtg

SEQ ID NO: 243727 - DNA, 391 bp, Glycine max
  unsure (1)..(391): unsure at all n locations
gtggcaaagtctgagaaaaggaaagtggagtacgagaagaacatgagagcctataacaagaaacaggcggaaggtcctactggtggggatgaagaagaatctgagaagtctgtatctgaggtgaatgatgaagatgatgatgaggaaggcagtggcgaggaagaggatgacgattagagaatggactgataattgcatttatgtaggttctgatgattttgatcatctgttgtaggtggtctggtcatttcctgataaacatatttcttgcttccaaaaaatatttccctgctccctccgtaaattggttgtctttccaaaacgtgaatagtttaaagaagggagttctttatttgtacttctaaatccaactgtttagttaangggtgtt

SEQ ID NO: 243728 - DNA, 372 bp, Glycine max
cgtccaagctgcaaaaagacgaccgaaggggaactcaaaaaccacactaccatagcataacccttcgaaatcctcctttaacgctcctcgttcgcaacctcaacctttccctgtctctgaaaaagattaaagttgtccctgccttactgctcgccgttctcggtgggaacaagaacccctccaacgattacatccacggaatcctccgctccgttggaatagaagccgattaagatatgaatgaaaccttcctgtccgaagtttatggttatgagataattgaaccaattgctgccggttaagaaaaactgggctcggttccctccggtggccgttgttccgttgcccttgccgctgctcctggttgaagtt

SEQ ID NO: 243729 - DNA, 372 bp, Glycine max
gcaccccacctgctaagttcgaaacacaatatatgccagctggaggtgattttaagaaccttcagtctggagttgccagggaacaattaatcatgatgcagcggccccaaactgtaaatgcaaagcaagttccagccacaagcatgagttcatcacctcctggaatagctgctagttggtatccaactaacagttctgatgctgtcagatctaataatggctttatatctcatgctcctagcactagaagcctcagtccaaactatctcaattctaatcaaatgtaccaccaacttcagtatcaacctcaacaatatcagtttgttggtggcagcagcagcaattcagtagatcaccaagggaatagcatat

SEQ ID NO: 243730 - DNA, 365 bp, Glycine max
  unsure (1)..(365): unsure at all n locations
ggtagaatagagagctcctccaattagggtttttgtgatctgcagctacgatgggtaagggaacggggagtttcggtaagaggaggaacaagacccacaccctctgtgtgaggtgtggccgccgcagcttccacctccagaagagtcgttgctctgcgtgcgcttaccccgctgcgcgcaccaggaaatataactggagcgtgaaggccattangagaaagaccaccggaactggaaggatgaggtacttgcgtaacgtgcctcgcagattcaagagcggcttcagagagggtaccgaagctgcacccaggaagagaggagctgctgcctctgcctaagctttgaatgaatgacagcaatttttg

SEQ ID NO: 243731 - DNA, 321 bp, Glycine max
agagaatgcggtctctcaccgcacgcactagcactgtctcactctctcacgcacgcatcatctcaaacttgttcgcactttttcacggatctgatctaactaagttctcgccatgaatcgccaccacgatcccaatcctttcgaggaagaagaagtcaatcctttttcgaatggtggtgctgctcctgcatccaaatcacgtattccaccattagcatctcagccactgggctttggtcaaaggcatgatgctacagttgatattcctttggatactacaaatgactccaagaaaagaagtcaagagctagctgcttggga

SEQ ID NO: 243732 - DNA, 434 bp, Glycine max
  unsure (1)..(434): unsure at all n locations
cacgcgtccatacgacggcaaaaaaaaacaaaaggggaatgcaattaaaaaacaaggatatgagaagccgacaactatacaatgtcaggctttgccagttgtgctttctggcagggatatcattggtatagcaaaaactggttctggtaaaactgcttcttttgtacttcctatgatcgtgcatatcatggatcagcctgagcttcagaaggaggaggggcccataggggtgatatgtgcacctacccgagaattggcacatcagatttttctggaggccaagaaatttgcaaaagcgtatggggtacgtgtctctgctgtctatggtggaatgtcaaaacttgaacagttcanagagcttaaggcgggatgtgagatagttgttgctacccctggcagattgatagacatgctgaagatgaaggcattgacga

SEQ ID NO: 243733 - DNA, 281 bp, Glycine max
ggaagagtgaagagaatggctcccaagggtttaacctttctggctgtgttaatatgcgtttcagcactgtcactgagtccttctgttgccggggaaaggcaaaataatggccttgttatgaacttctacaaggaatcatgccctcaggctgaagacatcatcacagaacaagtcaagcttctctacaagcgccacaagaacactgctttctcctggctcaggaacatcttccatgactgtgctgttcagagttgtgatgcttcactgttgctggactccac

SEQ ID NO: 243734 - DNA, 327 bp, Glycine max
ggaatgtagaacgctgctgccgaaacccttcccgatccccaaggtaagtgagtaatcggtggttgagaatggtggagaacgccaatggtaggaaagaggaggtggttaccacatagtacaccattaacctccacaagcgcctccatggctgcacatttaagaagaaagctcctaaagctatctaaggagataacgaaatttgcccaaaatgccatggggaccagtgatgtgacggtggatgtgaagttgaacaagtttgtctggagccattgaatcacgactgttccaaggacgattatggtaagaattgctcgcaagacgaatgac

SEQ ID NO: 243735 - DNA, 388 bp, Glycine max
gctcctacagattcttcagcaactgcgattttggatcggaacctcttctgcggcgtagcaatgggacactccaacgtttggaattctcacccaaaaaactacggtcctggttctcgcacttgccgagtgtgtgggaatccacatggattgatcaggaagtatggccttatgtgctgcaggcagtgcttccgtagcaatgccaaggaaattggcttcatcaagtatcgctaaaagagctgttgtcacctacggaccaatattatgttctggcactatgatgttttgaagatgttatgtttgaagaaacttgagacttgtttttttcatctattttattatcagacataatgtgtggaacgaataatacttttatataaattgttttgca

SEQ ID NO: 243736 - DNA, 296 bp, Glycine max
  unsure (1)..(296): unsure at all n locations
gcaattttccgggcatgtnactcgaaatcgagggtttttgaccgggctctttccggtaaaacttaaaccgggaagtgactatgcggccaatggggtgccctccttctgcctctttcaaggttgaagccaagaagggagagtggttacctggcttggcctccccaacttacctcaatggcactcttcctggtgacaatggatttggccctctggggctagctgaggacccagagaacttgaggtggtacgttcaagccgagcttgtgaatggacgttgggccatgttgggtgttgca

SEQ ID NO: 243737 - DNA, 396 bp, Glycine max
  unsure (1)..(396): unsure at all n locations
caaaaagccaccagaaggggacaacttcagacaatccataccccaaagaccaagccaagcttaacccttaatttaaaaaatggaacaaccttcttcaatggttccctcatcccaatccttggctggaaaggccttaaacctgggcccatcaccccaaaaattggaaagggtgagcattaggaagaccgtcacaaagcaagtctcctcaggaagcccatggtacggcccagaccgagtcaagtacttgggcncattctctggcgacccccgtcctacctaatcggtgagttccaggcgactacggctgggacactgctgggctttccgcagacccagaaaccttcgccaagaaccgtgaactcgaagtgatccactccacgtgggccatgctcggag

SEQ ID NO: 243738 - DNA, 358 bp, Glycine max
gatcatcactgtcttgtccgttttctaaatctcattcttcacctgcaactatttggattgctgatttttgttaataccatatttactgatattggcgcatttctttgagaaagttactaattcctagatagaggcaaaaatgttgggaattttcaaggagaagttggttaaagcacccaaagagctgaacagtccagcttcgttgaattcatgcactaagcctaagctaagtcacgaaatccttcaggatttcatgtcctgcaattcctccaatgctttctcaatgtgctttgggaatgaagctttgctagcctattccccttcaaacaagccctccattcaacagaggttgtttagt

SEQ ID NO: 243739 - DNA, 358 bp, Glycine max
gaggtcaccgacgaagaactcaaggcctacgacggctccgatcccgagaagcctctcctcatggccatcaagggccagatctatgatgtttcccagagcagaatgttttatggacctggtggaccctatgctctatttgctggcaaggatgctagcacagctttagcaaagatgtcttttgaagagaaagatctaactggagatatctctggtcttggcccatttgaggttgaggccttgcaatactgggaatacaagtttatgggcaagtatgtaaaagttggaactgtcaacaagaccgttccagtaactgaatcagaatccactggcgaagcatcagaatctaatgtccatgatg

SEQ ID NO: 243740 - DNA, 344 bp, Glycine max
  unsure (1)..(344): unsure at all n locations
ggaactagggttacttaccacccctacgcgatggggaggttggaggagatatggggttgtgattgtttggagtttcggccacaaaggtggctgaaggatggggtgtttcaacccatgaatccgttcgagtacccggtttttcaagcggggttgagggtgtgtgtagggaaggaagtggctctgatggagatgaagagtgtggcagtttcgttgctgaggaagttccacatcgagttgctggcacccttgtcttttgggaaccctcgcttctctccggggctcactgccacttttagttttggccttcccgtgatggttcgtgaaagangaactacaacaaccac

SEQ ID NO: 243741 - DNA, 359 bp, Glycine max
aaagaccacaaaaaggggaagaacaacgggttttcaatttcaagaaccaaaactaagggtcctccaaaactagattcgtttccaatgagctcaccagcatgtttgagcgcagcactaagcttggctctgtttgggttactcttaaacgatcatctttgaaatctaaggtgcagaggaataaattggccgctgccggtgaagcaattgagtttagatgccttatacgtgcaactgatgggaaaaagacaatttctacttcggttggaccgaaggatcaccagcgctttcaagcttcttatgcaactatcttaaaggcacatatgactgctctaaagaagagagaaaggaaagacaagaag

SEQ ID NO: 243742 - DNA, 391 bp, Glycine max
ggtgtgagagagtgaaaacatggccactatcaagccaactggaaagaaggcatgtgtgattggagggagtggatttatggcctctttgttgatcaagcagttgcttgaaaagggttatgctgtcaataccacagttagagacccagataatactaaaaaaatacctcaccttttggcactgcaaagtttgggcgaattgaacatatttggagcagatttaactggtgaaaaagattttgatgctcctatagcaggctgtgaacttgtcttccagcttgctgcacctgtgaactttgcttctgaagatcctgagaatgacatgatcaagcctgcaatcacaggcgtcttgaatgtgttaaaagcatgtgtgcgagcaaaaggagtcaaacga

SEQ ID NO: 243743 - DNA, 394 bp, Glycine max
ggtgtgagagagtgaaaacatggccactatcaagccaactggaaagaaggcatgtgtgattggagggagtggatttatggcctctttgttgatcaagcagttgcttgaaaagggttatgctgtcaataccacagttagagacccagataatactaaaaaaatacctcaccttttggcactgcaaagtttgggcgaattgaacatatttggagcagatttaactggtgaaaaagattttgatgctcctatagcaggctgtgaacttgtcttccagcttgctgcacctgtgaactttgcttctgaagatcctgagaatggacatgatcaagcctgcaatcacaggcgtcttgaatgtgtaaaagcatgtgtgcgagcaataagagtcaaacgagtc

SEQ ID NO: 243744 - DNA, 318 bp, Glycine max
gacatttcatttctcatcctttgtccagttaaattgtcgatcaagacccagtaatctctaaaaatgctgtctccaaattccgaacgcataacacaaatcagaaagaaccgttactttgaccagagaattaatggcgattaatgttattccactgttggccatgattattgtacaattgggctatgcagggatgaatattacctcaaagcttgcaatacaatctggcatgcaccctcttgttctcgttgcttatcgccaaatttttgcaactatgtcccatgctccattcgctttttggttagaaccgaatacggctcc

SEQ ID NO: 243745 - DNA, 370 bp, Glycine max
gctagaatccccattccagagccaaggtaggttaaacactcttcttcatcgtcgtcgcaatgggacgtgtgatccgtgcgcagcgtaagggagcaggctcggtcttcaagtcccacacgcaccaccgcaagggccctgcccgcttccggagcctggatttcggagagcgcaacggctacctgaagggtgtcgtcactgacgtcatccacgatcctggccgtggcgcgcctctcgctaaggtcgccttccgccacccgttccgctacaagaagcagaacgagctcttcatcgccgccgagggtctctacaccggccagttcatctactgcggcaagaaggccaccctcgttgtcggcaatgtgttgcctct

SEQ ID NO: 243746 - DNA, 393 bp, Glycine max
ggcggcacaaagcattcactgtgtcggaaaaagaagaagagaaaaaagatgagcgacggaggaaaacgacaaggcggaagagcgttgccgccgccgccaagaggccctccgcctcctcccccctctcgccctcgcctcgaacccgtcgatcgcgagaagacatgtccgttactgctgcgagtgttcactaagattgggagtcaccattccatggaagattttgccgtcagaggcaaagagcccaaagacgaggttcagatttacacctggaaggacgctactctccgagaactcaccgatcttgtcaaagaagttgctccggctgcaaggagaagaaacgccaaactctccttcgcctttgtattcccccgacaaaaacggcgtttcaaagtt

SEQ ID NO: 243747 - DNA, 376 bp, Glycine max
ggcggcacaaagcattcactgtgtcggaaaaagaagaagagaaaaaagatgagcgacggaggaaaacgacaaggcggaagagcgttgccgccgccgccaagaggccctccgcctcctcacccctctcgccctcgcctcgaacccgtcgatcgcgataagacatgtccgttactgctgcgagtgttcactaagattgggagtcaccattccatggaagattttgccgtcagaggcaaagagcccaaagacgaggttcagatttacacctggaaggacgctactctccgagaactcaccgatcttgtcaaagaagttgctccggctgcaaggagaagaaacgccaaactctccttcgcctttgtattccccgacaaaa

SEQ ID NO: 243748 - DNA, 219 bp, Glycine max
aaaagaccaccgaaagggaaattccagaaaggaaaaaggaaccctaactggataagtcaaacatcaacatgtccgacgaagagcaccaattccaatccaaaggaaacgcccgttcctccaaaacctaacctcaacaagccggtaacaatcccaagaacggctacatcgtcatcaaaggacgcccctgcaaagttgttgaagtttccactttcaaaactg

SEQ ID NO: 243749 - DNA, 404 bp, Glycine max
  unsure (1)..(404): unsure at all n locations
aaagaagacaaaaagggggtccaatgtgttaatggttggtggtggtaatccgtcctcctcctttggtggtccgtggttgtgtttgtttttttcctcacctgaaaatgtcttgctgcggtggtaactgtggttgcggaagctcctgcaagtgcggcaacggctgcggaggctgcaagatgtacccagacttgagctacactgagtcaaccaccaccgagaccttggtcatgggagtggcacctgttaaggctcaatttgagggtgctgaaatgggtgtgcccgctgagaacgatggctgcaaatgtggaccaaactgctcctgcaacccctgcacttgcaagtgacgtgttgggagagcaagcttcaatcagagatagcccttaattaggaataatgatanacta

SEQ ID NO: 243750 - DNA, 372 bp, Glycine max
gaatctctgaaaccacaattcacaaccgaaacagtttccatctctctcacaaaatgacaacaatatcaaattgctcccttctcttcctcttcctcttcctctccaccctccacatagcttccaccctctcaacccccaccaacttcatcaagtcctcctgcagcaccacccagtacccagccctctgcatccagtccctctccgtctacgcctccaccatccggcaagacccccacgagctcgtccagacagccctctccccctccctcaaccacaccgaggccaccaaaaccttcgtcgcaaaatgcaacaaattcagaggcctcaaaccgagagaatacgctgccttgaaagactgcgctgaagaaatca

SEQ ID NO: 243751 - DNA, 409 bp, Glycine max
ccaagccttaattcgggtgccaaaagaccaccaaaagggggttggaaaaaggggaatgaatccaaacccacataatccgggggaagcttcaaattacctcaaaattgtccccaaccctaacggttctcttcccttctcatcattttaattttttccaatcaaaccatacataacataagcaccgctcttttctctccgaaatctccatctcccttcacttctgagctctggacgagatcccagatctcaccatctttcacgcactcttccatcagattcaccctttcgtttaacgcaaactcataacttgaaggttaatggctgctccatcggcaagggctcgtgccgattacgattatctcatagagcttctcttgatcggtgacagcggtgttgggaaaagttgcct

SEQ ID NO: 243752 - DNA, 253 bp, Glycine max
acgcgtccacagagcgagaagacgacagacaggggacacagtgaaccaaacaagctaacagaacacaaaccctaatcaataaaaaattgtgttgcacaaaaaaaccatggcgggggaagagaccaccgggaagaagaaggtggtgacagaatccctatgatggctaacgggatcgtcgataatgccaaagaagcaccgagccataactggcgttggcgcatcctcaatcctcgaattgaaagctgaactatac

SEQ ID NO: 243753 - DNA, 364 bp, Glycine max
ggtttaaggacttgtttgtttgattagtacaaagatgaaggttgctgcagaaggctgcaacttactgttattgttcattacctcttacctttcactgatctcagggcttggcgtccattctttgtcttatgatcattctgctaccacaaagtgtttggcagaacctcggagagcacagtatggaggaggcattatagtaaatccaggatttgatcacaacatagagggttggacagtatttggaaaaggagcaatcaaggagcgaatatcgaatggaggcaatagattcattgttgctcacaacagaacacatccattggatagtttctctcagaaggtccaacttaagaaaggaatgctatac

SEQ ID NO: 243754 - DNA, 402 bp, Glycine max
  unsure (1)..(402): unsure at all n locations
aaagttacagaagtaattgtaaacatggagtttggttattgtgctgtgtttctgatactgcttcttccaatctcatgtgcagattctacctcagttgataagcaattcagggaatgcttgttaacccaacttgatggaaattctgaatacattgaaaaaataaccttcacctcatcctcctcgctatatccccaagtctgggattcattggcacaaaatcctagatgggttagttccacaaggaagcctcttatcattctaacacctttccatgaatcagaaattcaagaagccattctatgcagcaaacaacttgaactgcagctcagagttagaagcggtggccatgattatgaagggctatctntacttggtaagggtccatttgtgatggttgacctc

SEQ ID NO: 243755 - DNA, 309 bp, Glycine max
  unsure (1)..(309): unsure at all n locations
aggaatgaaaggaaagggtaatagaaacaactcaatcaatccaaaaattaaggaaaccaaaattaagggtcctgtgttgtgattctgctctgagccagttcctgtggagagaaggcgaataaacgaaaccactatatgtttgaaggaagagtgccaatccagaaactccatgacacttgttcacaaccgatgcaggtttgctgataagcanattgtgagggtccaggagacacctgatgagattccggaaggaggaacacctcacacagttagcttgctgatgcatgacaagttggtggatactgcaaa

SEQ ID NO: 243756 - DNA, 352 bp, Glycine max
ctacgaatggatctgactgccctgcatgaggtgatggagaaaattgggtataaagatgacgagggtgcagcaactgagctttcattccaaatgtggacgaaccagatgcaggaaacattgaactcaaggaagaaaggggacgctgcttttcggcacaaggattttaaaactgcaattgatagctatacgatgttcattgatgttggaaccatggtttctccaacgatttatgcacgtcgtagtctatgttatctgatgagcaatatgcccgatgaagcacttaatgatgcgatgcaagcacaagtaatatcccccgtttggtacattgcgttttatttacaagctgttgctc

SEQ ID NO: 243757 - DNA, 350 bp, Glycine max
ggcacaagtttgttgagatagctagaagcaataagatgaaaatgaaagtgcttgttttgtttgttgctacagttttggtagcatatgaatgccatggctcagactaccagaagttccctctccaaatgaaaactgggtttggtgggcaatacagcaatgaggtggcatgtgccagttggaggcttggcgtggaagcaaacaacgtagtcaagtggcaaactgttcctgcagcttgcggagagtacatagctgactacgttctaggagaccaatatagatcagattccaaaacagttaaccaacaagcttatttctatgctaaatccctcaaactcaccaacaaagatgtc

SEQ ID NO: 243758 - DNA, 241 bp, Glycine max
ggagtgagcaagagtgaagagcgaagagaatggctcccacaggtttaatccttttggctgtgttatgcttctcagcactgtcactgagtcgttgtcttgcggaggataatggacttgttatgaacttctacaaggaatcatgccctcacgctgaagacatcatcaaagaacaagtcaagcttctctataagcgccacaagaacactgctttctcctggctcacaaacatcttccatgactg

SEQ ID NO: 243759 - DNA, 382 bp, Glycine max
gagaacagaagggagaattaggtttttagggtttacaccgagcagcgacacctccctcccgcagtagccatggttctcaaaactgaactatgccgattcagtggtgccaagatctaccccggaaagggcatcagatttgttcgtggtgattctcaggttttcctgtttgccaactcaaaatgtaagcggtatttccacaaccgcctgaagccctcaaagctcacctggactgctatgtacagaaagcaacacaaaaaggacattgctcaagaagctgtgaagaagaggagacgcgctgccaaaaagccttactctaggtccattgttggtgccactctggaagttatccagaaaaagagagctgagaagccagaagttcgag

SEQ ID NO: 243760 - DNA, 386 bp, Glycine max
ggatagagaaatagagataagtacggtgcgaaaagagtgaggcggagaaaaatgaagtgcccgtactgttcggcggcgcaggggcgttgcgccaccacgagcagcgggcgttcgatcacggaatgcacgtcttgcgggcgcgtggtggaagagcgacagtcgcatccccaccacgtgttccacgtgcgcgcccaggacaaccctctgtgtctggtcacatcggatctcgctctccccgcgctcaatcaaaacaacgaggaggaggaccctttcgagcccacgggcttcatcaccgccttctccacctgggccctcgagcccagcccactctacctccagtcatccctctccttctctggctacctcgccgagctcgaacgcactct

SEQ ID NO: 243761 - DNA, 329 bp, Glycine max
aggggtggaaataattgcaaaactttggttcccaaactccaatggctccgcctctaactcgccaacaagaataatccttaaaagaaacgcaagggagatttgcaaatacctcctccaaaaaggagtttgctttgcgaataaagacctcaatttggcgaagcaccctgagattgacctgccgaatctgcaggtgattaagctgatgcacagtttcaagtctcgcgagtatgtgagggagacttttgcttggatgcactattactggttcctcaccaacgatggaatcgagtttctcagaacttaccttaaccttccttccgaaattgtcc

SEQ ID NO: 243762 - DNA, 398 bp, Glycine max
  unsure (1)..(398): unsure at all n locations
gattccagcanagcgcaaagcattctccactacgattcgctcttccagaagcttccagaaaactccagatggcgcgtacaaagcaaacagcccgtaagtcgaccggcggcaaagctccccagaagcagctggcgactaaggccgcccgcaagtctgctccggcgaccggcggagtgaagaagccacacaggttcaggccaggaaccgtggccctgagggagatcaggaagtaccagaagagcacggagcttctgatccgaaagcttccgtttcagcgtttggttcgtgaaatcgctcatgacttcaaaacggatctgaggttccagagcagcgccgtttcggcgctccaggaagccgctgacgcgtacttggttggtctctttgaagacactaaccct

SEQ ID NO: 243763 - DNA, 307 bp, Glycine max
ggcagcgcttgagaccaagccccactcaaccaccacaccactctctctgctcctcttctacatttcaagtttttaaagtattaagatggcacaaacattcctatttacctcatagtcagtgaacgagggacacgctgacgtgctctgcgactacatctcagattctgtcctcgacgcttgccttgatgatgacgcacagagcatcgttgcttgctagatatactccaagaccaacttggacatggtcttcggagagatcaccatgatggccaacgttgactaacagaagatcgtgcatgagacctgc

SEQ ID NO: 243764 - DNA, 369 bp, Glycine max
  unsure (1)..(369): unsure at all n locations
gaatgacgagccgtaagaaatttggaattccttggcctgaatgcaacgacggtctgtcctacgacgacgtcgttcgagcctctgatgccggggcgacactcatagagttttactccaccaagtacaagagttctgctcccttacaaggttggttgcagcgaatagaaagtgggcagataacagttgatggaggagttgttactgattctaacacagtcctcagagttggatcaaagctaatctatcatagacttccatggaaggagccagatgcaccgcacatgatcgacgtcttatatgaagatgatgacatgattgctctaaataaagcgtctggcctgcaagttttgcctgnaggtctctaccagc

SEQ ID NO: 243765 - DNA, 339 bp, Glycine max
aaagcatcgaattacacgatgcacgagtgctaactgatgttggtgatgttcctatccaggaaattcgagattgtggggtagatgatcacagattaatgaatgttattggtgaatctgtaaagttagtgatggaggaggatccattatgtcccttaattttaggcggtgatcactcaatatcatttccagttatcagagctgtctctgagaagcttggaggaccagttgatgttcttcatcttgatgcgcatcctgataactatgatgcctttgaacgaaacatttattcacatgcttcatcttttgctcgagtcatggaaggtgactatgttcgacgtc

SEQ ID NO: 243766 - DNA, 383 bp, Glycine max
gacaacacagaacaaaaacacagaaaaagaaaaacccttagccaacacaaccatcatggccacctctgctattcagcaatcagcattcactggtcaaactgctctgaagcagctcaatgagttcgtccgcaagaccggtggcgccggcaaaggtcgcactaacatgcgccgcaccgtcaagagtgctcctcagagcatttggtatggccctgaccgtcccaagtacttgggtccattctcggagcagattccatcatacctgaccggagaattccctggtgactacggatgggacactgctggattatcagctgacccggaaaccttcgccaggaaccgggagctggaggtgattcacagcagatgggcaatgcttggtgccc

SEQ ID NO: 243767 - DNA, 338 bp, Glycine max
  unsure (1)..(338): unsure at all n locations
gcaaaaagacaacagaagggaattcaggaaatgttcaaaagggtgattgagcaattcactgcaatgtacaggcgcaaggccttcttgcactggtacactggtgaaggaatggacgaaatggagttcactgangcagagagcaacatgaacgatttggtggcagagtaccagcaatatcaggatgctactgctgatgaggatgagtacgatgaggacgaggttgaggagggggaacaagcttactaagaccagtaaatggttcatcactaccttgttttaattactaaatttcctgctagtagtcatgtatctatatatgtctgtctctacttttttcc

SEQ ID NO: 243768 - DNA, 353 bp, Glycine max
gagagattgaactccgacgatgcctcccgtcgctcctcgatccggcgatgccatattcgccaacgtcgaacgcgtcaatgcggagctgtttactttgacgtatggcgcaattgtgcgtcaattgctcacggatctggaagaggttgaggaggttaacgagcagcttgatcaaatgggttacaatattggaatccgattgattgatgagtttttagctaagtctaatgtctcaagatgcaacgatttcagagagactactgatgtaattgcaaaagttggttttaaaatgttccttggtgttactgcatctgtgaccaattgggatgctgatggaacatgttgtactattgttt

SEQ ID NO: 243769 - DNA, 381 bp, Glycine max
gacttaatccaaccccaaaaaccctaggtagagagctcttcctccctttcccacagcaatggccgccgcagcacgccctctcgtcaccgtgcaggccctcgacggtgacatggcaaccgatgcctccgccaccgttcccatccctgacgtcatgaaggcctctatccgccccgacatcgtcaatttcgtacactcgaacatctccaagaacagccgccagccatacgccgtcagtcgtcgcgctggtcaccagacctccgccgaatcctggggtaccggccgagccgtctcccgtatcccccgtgttcccggcggcggaacccaccgcgccggccaatgagcctttggaaacatgtgccgcgggggacgcatgttcgcccc

SEQ ID NO: 243770 - DNA, 282 bp, Glycine max
tattccgagacatgtgctaatggctgttaagaacgatgaagaatttgggaaattgcctgctggtgtcaccaatgcacatggtggtgtgcttccaaacattaaccctgttttgttgcctaagaagaccgagaaggctgccaaagagcctaagtctccatccaaggctactaaatctcctaagaaaggctatattaaccctttttttttttttttttttaaatctaatgttgtatatccgtgcttaaatgcctttggtgttacaagaaatttgatgtgtttctt

SEQ ID NO: 243771 - DNA, 382 bp, Glycine max
ggaaacagagagtgatttcagtgagtgatcggtgttcacttgatctcagcataagcgtcagcgtcaattgaagaagatgccgatcagaaacatcgccgtcggaaggcctgaagaggcgactcaccccgacacgttgaaggcggctttggctgagttcatctcagccttcatcttcgtgttcgccggctcaagctccggcatcgcctacaacaagctcaccgacaacggcgctgccacccctgccggcctcatctccgcctccatcgcccatgcattcgccctcttcgtcgccgtctccgtcggcgccaacatctccggcggccacgtcaaccccgccgtcaccttcggcgccttcgtcggcggcaacatcaccttcctccgc

SEQ ID NO: 243772 - DNA, 379 bp, Glycine max
ccaaaccgtcgttacggttgcaaaaggacaacagaagggaattgattgtaaaaaattgctgaattggccatatgcatatgggttttatttgccggagcatgagcatgcaaaaaaacagttctttgagtacttacaacgtgaagcagaatctggtctggagagacttcatcaatgtgcggaaaaggaactacagccgttcctaagtgctgatgatccatctagagaattcaatgactttcgtacaaagctagctggattgactagtgtgactagaaactactttgagaatttagtaagggcattagagaatggtctatctgatgtgggaagtaatggagctgccttcagcaaagcaacgagctcaaaaaatgctgctggt

SEQ ID NO: 243773 - DNA, 368 bp, Glycine max
gaatgaatagtttaatattagacacgagttgtagtctcagacgctgttattgagtcaagatgggttctttggcaaagaagggactcaacaattacgtcaaacagctccagcaacaccctttgagaaccaaggtaatcactgcaggggtactatcagcgatcagcgatgttgtgtctcagaaacttaccgggatacagaaaattcaactcaaacgacttcttttcaaagtgatttttggagccgcttatcttggaccctttggacacttttttcatttaatactggataaaattttcaaaggaaagagagattcaaaaactgtggctaagaaggttctgattgaacagttaacatccaatccttggaac

SEQ ID NO: 243774 - DNA, 404 bp, Glycine max
  unsure (1)..(404): unsure at all n locations
cgtgcgtcaagatgacaaaagaaggggggtgctgtaattgaaattacccataaataaagagcgcggcataacctaaacttacccttcttctctctgtgtgtgtgcgcatcaaacgcaaccagaagcagccatggccactgcaagaactgtgaaggacgtttctcctcatgagttcgtcaaagcttactcttctcacctcaagcgatctggcaagatggagctgccagagtggactgatattgtgaaaactgcaagatttaaggagttggctccttatgatcctgactggtactatgtcagagctgcttccatggcaagaaagatctacttgagaagangacttggtgttggtgcctttcagaggatttatggtgggagcaagaggaatggtagccgccctcctc

SEQ ID NO: 243775 - DNA, 400 bp, Glycine max
gacaccttcgaattttcttttccttcactttcccgagaaaaaaaaacacactctttcactttcttgactacggtctcacttcgacatggctcgtactaagcaaactgctcgcaagtccaccggcggcaaggcgccacgtaagcagttggcgaccaaggccgcccggaagtccgctcccgcgaccggaggagtgaagaagccccaccgcttcaggccgggaaccgtggcgctgagggaaatcagaaagtatcagaagagcaccgagcttctcatcaggaagcttccgtttccgagactcgtgagggaaatcgcgcaagacttcaagaccgatttgcgttttcagagtagcgccgtttctgcgcttcaggaagctgctgaggcctacctcgttgggttgttc

SEQ ID NO: 243776 - DNA, 388 bp, Glycine max
agcacaagtttgttgagatagctagaagcaataagatgaaaatgaaagtgcttgttttgtttgttgctacagttttggtagcatatgaatgccatggctcagactaccagaagttccctctccaaatgaaaactgggtttggtgggcaatacagcaatgaggtggcatgtgccagttggaggcttggcgtggaagcaaacaacgtagtcaagtggcaaactgttcctgcagcttgcggagagtacatagctgactacgttctaggagaccaatatagatcagattccaaaacagttaaccaacaagcttatttctatgctaaatccctcaaactcaccaacaaagatgtctttgtcttggacgttgacgacactactctctctaatct

SEQ ID NO: 243777 - DNA, 372 bp, Glycine max
ggttgtgaatcaacataaatattccgttttgcgtttctctgcctaaaaggattgaaagatgggtcaagcactaggttgctatcaagttgatcagtcaaatgtggctatcaaggagcattttggaaaatttgatgatgtcctagaacctggatgtcattgcctgccttggtgtcttgggtaccagattgctggtagtttgtcactgcgtgtgcagcaacttgatgttcgatgtgagacgaaaaccaaggacaatgtctttgtcactgtggttgcatctgtgcaataccgagctgtgtctgggaaagcatctgatgcattctataggcttaccaacacaagggagcagatccaatcatatgtttttgatgtcat

SEQ ID NO: 243778 - DNA, 382 bp, Glycine max
ggagagagagaggcacttggaatccaaaaatgagagaaatcatcagcattcacataggtcaggccgggatccaggttggcaactcctgctgggaactctactgcctggaacatggcatccagcccgatggcatgatgccaagtgactcctccttcggtgtagcccacgacgccttcaacaccttcttcagcgaaaccggatccggcaagcacgtccctcgcgccgtcttcgtcgatctcgagcccaccgtcatcgacgaagtccgttgtggcacttaccgtcaactcttccaccccgaacaactcatctccggcaaggaagatgccgccaacaactttgccagaggccactacaccgttggcaaggagatcgtagatctgtg

SEQ ID NO: 243779 - DNA, 379 bp, Glycine max
gaactagatgaagagttcgacacattcccaaccaccagggcttcggacattgtgaggatgcgatatgaccgacttagaagcattgctgggaggatacagactgtggttggtgatttggccactcaaggggagaggctgcagtctttgctcagctggagagatccaagagccactgccctctttgtgattttctgtctggttgctgcaattgtactgtatgtcaccccattccaaattgtggcccttttcactggaatttatgtgttgagacacccgaggttccgccacaagcttccttcagtgcctctgaatttcttccggaggctgcctgcaagaactgattgcatgctctgaatcatggatagtgcacaaactactg

SEQ ID NO: 243780 - DNA, 403 bp, Glycine max
gaactagatgaagagttcgacacattcccaaccaccagggcttcggacattgtgaggatgcgatatgaccgacttagaagcattgctgggaggatacagactgtggttggtgatttggccactcaaggggagaggctgcagtctttgctcagctggagagatccaagagccactgccctctttgtgattttctgtctggttgctgcaattgtactgtatgtcaccccattccaaattgtggcccttttcactggaatttatgtgttgagacacccgaggttccgccacaagcttccttcagtgcctctgaatttcttccggaggctgcctgcaagaactgattgcatgctctgagtcatggatagtgcacaaactactgagggagcagcttgctttgctttca

SEQ ID NO: 243781 - DNA, 439 bp, Glycine max
attcccgggtcgaccaacccttcggacaagccttcgttacggcggcaaaagaacaataaatgggggtaccaggtccccaaaccatggctaaacccaccaggaaatttattggttgtgtttgaagacctaggtggaaacccaattggaacctttttggttaaaagggatatagatagtgaatgtgctgatatttataagtggcagccaaatcctataagctatcagatgcaaacgtcctggaaagcacctgttagaccataagttcatttatcatgtagctcgggacagaaaatctcatcaatcacatttgctagctttggtactccagcaggttcatgtggaaacttccatgaatgaagctgtcatgctcacaagtcgtatgatgcctttgaaacgaattgtgttggacagaactggtgcacagtaacagtgtcacctg

SEQ ID NO: 243782 - DNA, 391 bp, Glycine max
acacgcctccgtacggtgccaaaagaccacaaaaaggggaagacttaaccccaaaccaagaaaaaagaccgaaaacaatttgcacaacacaaatttgaaagatgtccatcttcgagtacaaccgaagcgccgtggtggctatggtcggcaagaactgcttcgccattgccatcgaccgaaggctctgcgttcagctccaaaccatacccacggatttccaacgcatttccaagattcacgacaagctcttcatcgctctctctggcctcgccaccgatgctcaaacattgtatcaacgtcatgttttccggcacaaactgtatcagcttcgtgaagagagggatatgaaaccagagacctttgccagcttagcctctgctctgctttatga

SEQ ID NO: 243783 - DNA, 394 bp, Glycine max
  unsure (1)..(394): unsure at all n locations
ggcaattaatctgcatttgcacgaacctaaactactatcgaaagtcgaaacatcccctgtcactttgactcaactcacacaccaatctccaaatccctaccaattttccctattcactcatcaattttctcgtatcaggtttgatctgaaatccaggattgctacttaggtttgcatcaatataatctgacaagagaataattttgtggtagtgtagtccaactgtccaacttagagcaagcagcatggaggatattctgttggataccaggtgggaagatgtaatctgccccatatgcttgggagttcctcataatagtgtgctccttcagtgttcatcntatgataaggggtgtcgttcttttgtatgtgacacaagtcagttgcactcaaa

SEQ ID NO: 243784 - DNA, 316 bp, Glycine max
gacacaacaattccacaacgcgatctctctctattctttgaaaccaaagttcaaactctgtcttccctgggttctatttcgaaatcaacgacgatgagttccacagaggcagcagccacagagaagaaaggtggaagagggaaaccgaagacttcaaagtccgtttcccgttcctccaaagctggccttcagtttcccgtcggccgtgtcgctcgctacctcaaggccggtcgctacgcccagcgcgttggctccggttcccctgtttatctctccgcggttctcgaatacctcgctgtcgacgttttggcgcttg

SEQ ID NO: 243785 - DNA, 395 bp, Glycine max
gttctagtgtgtgattgtttgttgttgtaactcgttcttcttcttttgttgttctgtgtttgtgtttgttttttctctcacctgaaaatgtcttgctgcggtggtaactgtggttgcggaagctcctgcaagtgcggcaacggctgcggaggctgcaagatgtacccagacttgagctacactgagtcaaccaccaccgagaccttggtcatgggagtggcacctgttaaggctcaatttgagggtgctgaaatgggtgtgcccgctgagaacgatggctgcaaatgtggaccaaactgctcctgcaacccctgcacttgcaagtgaggtgttgggagagcaagcttcaagcagagatagcccttaattaggaataatgataaactaataatgtg

SEQ ID NO: 243786 - DNA, 369 bp, Glycine max
gttctagtgtgtgattgcttgttgttgtaactcgttcttcttcttttgttgttctgtgtttgtgtttgttttttctctcagatgaaaatgtcgtgctgcggtggtaactgtggttgcggaaacgcctgcaagtgccgcaacggctgcagaagctgcaagatgtacccagacttgagctacactgaatcaaccatgaccgataccttggtcatgggagtggcacctgttaaggctcaatttgagggtgctgaaatgggtgtgcccgctgagaacgatggctgcaaatgtggaccaaactgctcgtgcaagccctgcacttgcaagtgaagtgttgggatatcaagcttcaagcagagatagcccttaatt

SEQ ID NO: 243787 - DNA, 328 bp, Glycine max
ggtggagcattagcagcagaacagagagagcaaaaccctagagcatccatcacaagcataggaagaagatggtgaagttcctgaagcctaacaacgcagtgatcgtcctgcatggccgctacgccgggcgcaatgcggtgatcgtgatgaccttcgacgatggaaccatggagcgcccctacggccactgcctcgtcgccggaataaagaagtatccaagcaaggtcatcaagaatgactccgcgaagaagaccgcgaagaaatctatggttaacgccttcgtgaagctcgtgaactaccagcacctcatgcccacgcgctacacgct

SEQ ID NO: 243788 - DNA, 388 bp, Glycine max
  unsure (1)..(388): unsure at all n locations
agggaaaatcgtcctcaatttcaacctttccctcccaatcaatcaatcaaaagttaacaattgccggaaaaagaaggaaagggcttcttgcaacgaaaaccaccgccgcgaataaggacaaagacaaggacaagaagagacctatttctcgctcttcncgtgctggaatccagtttcctgtgggacgtatccatangcagctgaaacaaagggtccaagccaatggacgtgttggggcaacagctgcagtgtacttagcctcaattctagagtatctgactgctgaagttcttgaacttgctgggaatgcaagcaaggatctgaaggtgaagaggatcacaccaaggcatttgcagctggctatcaggggagatgangagctggacac

SEQ ID NO: 243789 - DNA, 395 bp, Glycine max
aaaaaaacaacagaagggaaggttaagaaaacggaacaacttggcggtcggccttaaccaaccaaagtttcgccttggccctcaattttcccctaaagtatcctcagtcacaacagacaccgtcgtcgtcgtcgtcgtcatcaatggcaccgaagcagaccaaggctgagaagaagatcgcttacgatgcgaagctgtgcgacctaatggaggagtacggccagatcctcgttgtgaactccgataacgtgggatcgaaccagctccagaacattcgcaagggtctccgtggcgactccgtcgtcctcatggggaagaacaccatgatgaagcgctcagtcaggatgcacgctgagaaaaccggaaacaacgcctatctcaaccttatcccgctc

SEQ ID NO: 243790 - DNA, 357 bp, Glycine max
acctcaagggaaggttaagccaacgtaataatttggcggtccgccttgactgagcaacacttcgtcatggtcctcaaattgaccgaaagggactctcactcacaacagaaaccgtcatcatcatgatcgtcatcaagggcaccgaagcagactcatcgctgacaccacgatcgcttaccatgcaacgctgtgcaacctacaggaggagtcaggtcagatgctcgttgtgaactcggataatgtgggatcaaagcaactcgacaacatctccaattggtcaccgtcgcgacgcagtcgtcctcatggggaacaagaccttgatgaagcgctcaatcaggatgcacgctgacacaaggc

SEQ ID NO: 243791 - DNA, 381 bp, Glycine max
  unsure (1)..(381): unsure at all n locations
ggtattctattcttcaagattcaggtactgcgtttcggaagcagacacagatggctcgtacgaagcaaaccgctcgtaagtccacaggaggaaaggctcctangaagcagcttgcaaccaaggctgcacgtaagtctgcaccaactactggtggtgtgaagaagccccaccgttatcgtcctggtaccgttgctcttcgtgagattaggaaataccagaagagtaccgagcttttgatccggaagctccccttccagaggctggttcgtgaaattgctcaagacttcaagactgatctgcgtttccagagccacgccgtgcttgcattgcaagaagctgctgaggcataccttgttgggctctttgaagacactaacctgt

SEQ ID NO: 243792 - DNA, 391 bp, Glycine max
gactgacagagtcaaagtctctggttgtgttcacttgttatgtttaacgcttactggcgtcgtggcacgctctaagcgttacaatcgtgggtctcttcgacgaagggtgccatgcaacatgttgccacgatggtgcaggtttgtctgcaacaacttctggtggtgtgcattatgccgaccgttattgtcgtgtttgcgttgctcctctttacattaggatgatgccacaacagttccgtccttttgatcaggtagctccccttctagaagctggttcgtgaaagtgctcatgacttcaacactgatctgcgtttccagagccacgccgtgcttgcattgctagaacctgctgaggcataccttgttgggctctttgagggacactaactgt

SEQ ID NO: 243793 - DNA, 316 bp, Glycine max
gtagtgattatatatgtacttggcttatcttctgctcggtacatgctcaaggttcttctgtttttttttgtaattcgactagtacttgcatctcaattgttttgaatgtacctaagtataatgattgatgaatgttgcatgttcgacttcacaaattatatgattgtgagtagaagcgtgggcataatcatcctgttactgtgtcgcttcttgacattaggatataccacatgagtaccttccttttgatccggaagctcccttccacatgctggttcgtgtcattgcccatgactttaagactgatttgcgtttc

SEQ ID NO: 243794 - DNA, 391 bp, Glycine max
gatatttagcttcataaactccatgtcccttaaatgtgtggttgacatacgcatatcagataccatacacaactatggcaattcgagggtattctcattactgatttctcaacttgcaatccaatcagtttcaacatgcattcctaagcgattcattccatgctcaatgaatgccatattcacctttctggcctctatgaagcggttctcacaaacatctacgcctgcaatcaactttccactatcactcgaacttccctcggtcccaatgggatgaataagatggttataaatcacttggccaagctttttgtcacgaacgatgctgggacgattgtgaatgaacttgaaattcaccatcctgctgccaacgtttttggctttggcttgg

SEQ ID NO: 243795 - DNA, 376 bp, Glycine max
ggggtgctgcggctgaagatctcgattagccgaaaattgcaagaacggcttcaggctcttgcgatcaacaaacgcagcgttttgatctcagatttgagggggagaggtaccgtcgttgcataatggcaacaacagtgagaagtctgaagataaagacaagtacgtgcaaacgtatagtgaatgagctgcattcttatgagaaggaagttgagagagaagctgccaaaacagctgatatgaaggaaaaaggagccgatccccatgatctcaagcaacaggaaaatgtcttggctgagtctaggatgatgattcctgactgccgcaagcgccttgaggccgctttggcagacttgacaggattattggctgagttgga

SEQ ID NO: 243796 - DNA, 325 bp, Glycine max
ggtgctaatcttatcgtatcactcctaatgcactcctagcctgtctgcataatttctactactttttcaatggcgtctgcatttgttgagttccgttgcattgttggcgggcttgcatgggtcagcggtcatcatgccctcgagaaagcctttgcaatctacggcgacatcgttgaatcgaacgttagcaacgaccgtgagactgcaacgtctacaggattcggatttgtgaccttcgcctcatagcagtcaatgaaagatgcgatcgcaagaatgcatggccaagaccttgaccgtcgtaacatcactgtcaacgaagctcaga

SEQ ID NO: 243797 - DNA, 395 bp, Glycine max
ggttaattaaaatattgccggggaattgacattacattgtgggcataaaattttcaaagtcgaagcgagaacttgccatttcgacggttttagggttacggttttctcaaattgcaagaacatgggtttcaacattcaaccctatgggattcagtccatgctcaaggaatgccataagcacctttctggcctcaatgaaacggttctcaagaacatcgacgcctgcaaacaactttccactatcactcgaacttccctcggtcccaatgggatgaataagatggttatacatcacttggacaagctttttgtcacgaacgatgctaggacgattgtgaatgaacttgaagttcaccatcctgctgccaaagttttggttttggctgggaacgctc

SEQ ID NO: 243798 - DNA, 361 bp, Glycine max
gaaactttcgattttcctttccttcaactttcccgagaaaaaaaaacaatcctttaacttccttgacaacggtctcacttcgacatggctcgtactaagcaaactgctcgcaagtcgaccggcggcaaggcgccacgtaagcagttggcgaccaaggccgcccggaagtccgctcccgcgaccggaggagtgaacaagccccaccgcttcaggccgggaatcgtggcgctgagggaaatcagaaagtatcagaagagcaccgagcttctcatcaggaagcttccgtttcagagactcgtgagggaaatcttgcaggacttcaggaccgatttgcgttttcagaggtcgcgccgttttgggc

SEQ ID NO: 243799 - DNA, 352 bp, Glycine max
ggaacctttgcattctattcattcaagattcagcaagtgcgttttggaagcagagaccgaaatacttcgagatggcccgtacaaggcaaactgctcgtaagtcaactggaggaaaagctcccaggaagcagcttgcaaccaaggctgcacgtaagtctgcaccaacaactggtggtgtgaagaagcctcatcgttatcgccctggaactgttgctcttcgtgagattaggaaataccagaagagcactgagctcctaatcaggaagcttcctttccagaggttggttcgtgaaattgcccaggatttcacgactgatctgcgtttccagagccatgctgtgcttgcactgca

SEQ ID NO: 243800 - DNA, 336 bp, Glycine max
cagcttgagcaagaagcatacagttcagttctaagagcttttaaagctcaagccgatgccattacttgggagaaagaaagtttgattacagagctgagaaaagaacttagattgtcaaatgaggagcacagagaacttctaggtcgggttaatgcagatgatgtgatacggaggataagggaatggagacaggcaggtggccatcagcctggtgtacttagtactggtcaaggtcttcatgattcaattcccagtcccacagtctctgcttctcgcaaaaagcagaagattacaccatctgtaccaccatcacgatcttttggtgggccttctcct

SEQ ID NO: 243801 - DNA, 391 bp, Glycine max
gattgcaattcaaaacaatcaacctcaataacaacacgaaagcaaaagcaaaaacttttttccaagtctctgattttcctaatggctccggcaaaggcagagaagaagccggcggagaagaagccagcggcggagaacgcaccggcggagaagaagccgaaggcggagaagaagatctcgaatgaacgatggagcgagaagaagaagaagcgcacgaagaagagcgtggagacctacaagatctacatcttcaaggtcctcaagcaggttcaccccgacattggtatttccagcaaggccatgggcatcatgaacagcttcatcatcgacatcttcgagaagctcgcccatgaagcgtcacgtttggctcgctacaacaagaaagccgcca

SEQ ID NO: 243802 - DNA, 388 bp, Glycine max
gacaaagaaagagggtttgatgcaacgctggcaacgagaaaaggttcccaaccaccaaaggaccggactaaaaccctccccccgtgaataaagaaaatggcctcaaatcggaaacttcacacttttgaggaggtggcaaagcacagccagagcaaggattgctggctcatcatttctggcaaagtgtatgatgtcacccctttcatggaggatcatcccggacgtgatgaggttttgttatctgcaacagggaaagatgcaaccaatgactttgacgatgtgaggcacagtgattctgctagagatatgatggaaaaatactacattggtgagattgatgcatcaaccgttccactaaaacggacctacattccagctcagcaagctc

SEQ ID NO: 243803 - DNA, 368 bp, Glycine max
agggggaattcaaatccaattaaatccaatccccccggggaattccctaactccccccttaaggatgaaattcttcgccaaaaccctaacgggaaaaacaagcacccttgaggtggaaagctctgatacgatcgagaacgtcaacgccaagatccaagagattgaaggaatctcaccggaccagcagcgtctcattttcgccggaaagcaacttgaggacggccgtacccttgctgactagaacattcagaaggagagtactcttcaactcgtcctccgtcaccttggtgagatgcagatcgtcgataagacactcaccggcaagaccattgccctaaatgttgaaagctccgacaccatcgataagg

SEQ ID NO: 243804 - DNA, 408 bp, Glycine max
gatccacacctctctctctctctcagaatttctatctatctcttgtttcaatttcaacaacggttactcctttttcgttttgagtttcaatcaagccatcatcatgtctaccgcatcgcaacccaaggccaagaaaacggcgtcgtccaagaagcccctctcccaccctcccttcgccgtgatgatagcagaggcggttgcgagtctgaaagagagaaccggttcgagccaatacgcgataaccaaatacatcgaagggaagcacaaggagttgcctgcaacctacaagaagcttgtcctcgttcatctcaagaaatctgttgctgctggcaagcttgttaaggtgaaaaactcctttaagctcgcaccgactaagcctgctccgggttaaggccgctggctccaaaa

SEQ ID NO: 243805 - DNA, 384 bp, Glycine max
  unsure (1)..(384): unsure at all n locations
tgggactaacaccaagtganaaagcaacaaagcatagtgtgtaaganagggagaaaaacaagtgctgtgtagagagaaaaatggctacgtggtgcatgatcttggtggttcttgctcttgccgtggttgcaagtgccagaaacatgcccaatgacgctggtttggaggaccagaagaacttccttgggtatgggttttcgggagttggcaacaatggccttccctttggtggagtgggttctgggtttgatggtaatatgggtgggccttctgggctcggaagacttggaggattcggtgggcctggtgggcttggcggactcggaagtcctggtaaccgtgaaggacccagtcttcctctcccttgagagtttagaacacaca

SEQ ID NO: 243806 - DNA, 317 bp, Glycine max
ggtcgtgtttttgatttgagaattgcgatcgagtcttttgacacatggcatcctcgttggcaccatctaccagcgccgccactgggttgcggctcacacactctctccgcttctctcctaagcccaacagcctacgctttgccacctcgcctggtgttactctgttatgcacgagggttactgcccacttagatgatgttgatcttgattgatcgcctactgcgacttctcctcctatggatcccatctctacggagcttcactcttaatttccttagcattaccatcctcttccctgttggaatcttattgcctgt

SEQ ID NO: 243807 - DNA, 356 bp, Glycine max
  unsure (1)..(356): unsure at all n locations
ggagtgagcaagagtgaagagcgaagagaatggctcccaagggtttaatctttttggctgtgttatgcttctcagcactgtcactgagtcgttgtcttgcggaggataatggacttgttatgaacttctacaaggaatcatgccctcaggctgaagacatcatcaaagaacaagtcaagcttctctacaagcgccacaagaacactgctttctcctggctcagaaacagcttccatgactgtgctgttcagagttgtgatgcttcactgttgctggactccacaagaaggagcttgtctgagaaggagacagatagaagctttgggttgagaaatttcaggttcattgnagacatc

SEQ ID NO: 243808 - DNA, 389 bp, Glycine max
gacagcaaaacaattttcaaactcaattaccattccataacctaaatctcctctttgtttccgagtcagagagcaatggcacgtaccaagcaaaccgctcgcaagtccaccggcggaaaggcgccgaggaagcaattggcgactaaagccgctcgcaagtcagctccggccaccggcggagtgaagaagccccaccgcttcaggcccggaacggtggctctgagggagatcagaaagtaccagaagagcactgaacttctgatccgaaaactcccattccagaggctcgtcagagaaatcgctcaggatttcaaaacagatcttcgtttccagagcagcgctgtttctgcgcttcaggaagccgcagaggcttatctcgttggactctt

SEQ ID NO: 243809 - DNA, 415 bp, Glycine max
  unsure (1)..(415): unsure at all n locations
aggccaaaaaaacaacaaaaggggttgcaaaaaacctgaggctgaatccggcaattccggttgcaaatgctgaaaccattgtaccaaaggcaattcgtgatggtgcaattgatgcaacattggatcatgccaatggttggatggtgtccaaagaaactggagatatttactccacanatgagcctcagttagcctttaattctcggattgctttctgtcttaacatgcacaatgaggcggttcgagcacttcgatttccaccaaacacacacaaagagaaggaaagtgctgaaaagagaagagagagacaacagcaagagcaagagctggctaagcatattgtagaggaggatgacgatgatttctgataattgttttttttcaccctatgaattgctatctggataccttcatt

SEQ ID NO: 243810 - DNA, 370 bp, Glycine max
aacacacgtccgccggtgggaaaagacgacaaaaagggggtccagtgggttaatggttggtggtggtaatccgtcctcctcctttggtggtccggtgttggggttggtttttcccctaaccgaaaaatgtcttgctgcggtggtaactgtggttgcggaagctcctgcaagtgccgcaacagctgccgaagctgcaagatgtacccagacttgagctacactgagtcaaccaccaccgagaccttggtcatgggagtggcacctgttaaggctcaatttgagggtgctgaaatgggtgtgcccgctgagaacgatggctgcaaatgtggaccaaactgctcctgcaacccctgcacttgcaagtgaagtg

SEQ ID NO: 243811 - DNA, 394 bp, Glycine max
ggttgaggctgagtgttattcttccctaaccttcgtctgaaaccctaaaacattgaatcttaagaatggaactgtcatggttgagtgccattctggtgggggctggttatctcgctttgggctacttcattggttctcagtatccccctcgtttcctcttctcacataaattatcgactaaacaaaaagatgcttcacttctcaatgacagcgacaataagaagaggaatactaagtccaaactcgaagacccccttgagattgaacaactcgctgaaattctcgatgattttaagatgatacttgttgtcaagaatgatcttaaaatgggtaaagggaagattgctgctcaatgcagtcatgcaacgttaagtctctataaaaagattcttcg

SEQ ID NO: 243812 - DNA, 405 bp, Glycine max
  unsure (1)..(405): unsure at all n locations
ggacaagtttgttgagaatanctaaaaacaataggatgaaaatganagtgcttgttttgttttgttgctacagttttggtancatatgaatgccatggctcagactaccagaagttccctctccaaatgaaaactgggtttggtgggcaatacagcaatgaggtggcatgtgccagttggaggcttggcgtggaagcaaacaacgtagtcaagtggcaaactgttcctgcagcttgcggagagtacatagctgactacgttctaggagaccaatatagatcagattccaaaacagttaaccaacaagcttatttctatgctaaatccctcaaactcaccaacaaagatgtctttgtcttggacgttgacgacactactctctctaatctccagtattttgctaac

SEQ ID NO: 243813 - DNA, 209 bp, Glycine max
ggatacgattcctttggtttgcagtaatgggtgctctggatcacatatcggaactctgtgactgctccagtggtagttccaagcaggagaagcgcaagcaattgcagacggtggaggtgaaagtgaatatggactgccatggatgcgagaggaaagtgaggaatgcggtggatgggatgaaaggcgtgttccacatggatgtggagcgt

SEQ ID NO: 243814 - DNA, 405 bp, Glycine max
  unsure (1)..(405): unsure at all n locations
gattgtgattcatttgcacatttggaaagtgttgtttttctttttttcatttgcattgcaaagcaaaaaccttgcaaattgcaatggcttccaacaaggttattgccaccatcttggttctttctctccttgcctactcaacatcattcaccaatgcatgtggcacatgccacccaaaacctactccttctccccctcctccatcagggaagtgccccaaggacacattgaagctaggggtgtgtgctgatgttctaggacttgttaatgttgttgttggttcccctgtctctagcaagtgttgtgcattgcttgaaggtttggctgattcggaagctgcactttgcctttgcactgctattaaggccaatgttcttggnatcaacttgaatgtgcctatcacac

SEQ ID NO: 243815 - DNA, 383 bp, Glycine max
  unsure (1)..(383): unsure at all n locations
ggtacgcagcttcatccctaacccgtgcatagcagagtcagagacagagacgcagccatggggcggagacctgcgacgtgttatangcaaattaagaacaagccataccccaagtcacgtttctgccgtggtgttcctgatcccaagatcaggatttatgatgttggtatgaagaagaacggtgttgatgagtttcctttctgtgtccatctggttagttgggagaaggaacatgtttcaagtgaggccctggaagctgcacgcattgcttgcaacaagtacatggccaaatttgctggaaatgatgctttccacttgagagtcagggtgcaaccattccatgttcttacgatcaacaagatgctttcgtgtgctggtgctga

SEQ ID NO: 243816 - DNA, 408 bp, Glycine max
gaaattaataagggtttttaattcaggcggccaaaaaactcctccccggcaacctttggcctacaacaccccttcaacatggctgaacaaaccgagatagcttttctgaagcaaccaaaagtgtttctcagcacaaagaagactgggaagggaaagagacctgtaaaaggtgggaaccgcttttggaagtccattgggcttggatttaagactcccagggaagccatcgaaagaacctatattgacaagaagtgccccttcactggcaatgtttccatccgtggccgtatcatggctggaacatgtcacagtgctaagatgaacaggactattattgttagaatgaattatctccattttatcaagaagtaccagatgtacgagaagacgcactcaaatattcctgct

SEQ ID NO: 243817 - DNA, 340 bp, Glycine max
aaaaggggccttcaaaagcgtaacaaacccaaaccgttcaaaaccacaaaaaaacccaccaatggggcaaaaacccgcgaggtgttataggcaaattaagaacaaaccataccccaagtcacggttttgccgtggtgttcctgatcccaagatcaggatttacgatgttggtatgtaagaagaacggtgttgatgagtttcctttctgtgtccatctggttagttgggagaaggaaaacgtttctagtgaggccctgtaagctgctcgtattgcttgcaacaagtacatggccaaatttgctggaaaagatgctttccacttgagagtcagggtgcaccc

SEQ ID NO: 243818 - DNA, 390 bp, Glycine max
gaccggcggcgaaggtaaggtggtgcaaacaaacaaaaaaccctaattctcgaatatcagatcggcgatcggaggaagaatctgaagttgggcgaagatggttctcgcggagttaggagggagcatttcgcgtgctcttcagcagatgagcaatgcgacgatcatcgacgagaaagtcctcaacgattgcctcaacgacatcacgcgcgcgcttctccaatccgatgttcagttcaagctcgtccgcgacatgcagaccaacatcaagaacattgtcaacctcgaagacctcgccgcaggtcacaacaagcgcaggattatccagcaggccgtcttcaacgagctctgcaagattctcgattccggaaaaacctcctttacccctaaaaa

SEQ ID NO: 243819 - DNA, 344 bp, Glycine max
ggaacttccaaattgcatttctacacatccctagcctctgtccgtaccgtcgcttgacaatggtttttcatgtgcgaaaccctgacctctgcgctcactttcgtctctctcgcttgtcgatcgattacgtcaatgtcttcttcgaagatcgtttctatgacggttgggaaaatcgatgggttaatcagagtggaaagaagatcagaacgtcgctggggaatggaatgataactctggtcaacggaatggcaacgctaatgacatcggtaatcatgtcagtgacgattacatcttcgaaggtaattcaactgactagattgacttccacgacatcggtaagaaac

SEQ ID NO: 243820 - DNA, 354 bp, Glycine max
ggatgttactttttatattatcagatactatttgtgaactacgtgtccaaaaccgaacaacacagtgttaattcagcaatgcttagctattagcacactacctgcaagaaacatcccaagagctgataagaaaatgcagttatatcatcatcccttggatttggaaagccagagggtgagacttgcattggaggaggagggtgtagattatacatctcaccatgtcaatcccattactgccaagaacttggattccactttcttcaagatgaatcgccatggaagagtcccggttttccaaaatggctctcacatcatttacaatactaatgataaaatccagttcatagaaag

SEQ ID NO: 243821 - DNA, 366 bp, Glycine max
gacgcacccaccattctactacactcctctctctcactctcactctctgctccgtgatagctgtaccacgtttttctctccatctcgaaacaccatctctgcctcagtcccaacccatcaccattctcatggctgctctagctctagcacttcttcttctggctttcaccggcacttcaagtgctacatggtgcgtttgcaatgatggaagcgacgcgatcctgcagaagacgttagactatgcttgtggagctggtgctgactgtaaccctcttcacctaaacgggccttgttttcagcccaacaccgtcagggcccactgtaactacgccgtgaacagctacttccaaaagaatggtcaagctc

SEQ ID NO: 243822 - DNA, 424 bp, Glycine max
ccggccaagccttcgtgggggtggcaaaacttaatcaaaagggggtggttctggctggcaaaatcaatgggtatcaactgggaatcctaacctcgtcttcatcgctacgaagttcagctaaggccgacgaagctgtggttgtgccatatcccacccatatcgatgtcaagctcattaatcgctggagcttcgaggatattgaggttactgatatttcactggttgattacattggagtcacggcatctacgcacgccacatatgttcctcacaccgccggaaggtactccgtgaagcggttcaagaaagcgcagtgccccattgttgacaggctcactagctctctcatgatgcacggtagagacagtggcaagagactcgtggctgtgaggatcatcatgcatgctatggagattactcattt

SEQ ID NO: 243823 - DNA, 372 bp, Glycine max
agggaaaggaaggaaggaaaattaaccttaaaaaatcccttggttaaggctttcaaattcccaaaggtccaactttgcaattgacatgggtaacccatttctcaatcccactgttgatggtttccttaaaatcggagctgtcgcagccacccaataagctgctgaaaatacttatcatattatccaaaaggggaatatctcaagtcgtgatttcgagaaaactttgaagaagatgtgtaacagaagtgtatattggggaactatagctggcgtttatgttggaatggaatatggggtagagaggatccgtggcaccagagactggaacaatgccatgattgggggtgcagtaactggggccctggtatctgc

SEQ ID NO: 243824 - DNA, 362 bp, Glycine max
agaaggggacagcagaattggcaattggccatttcatcccccagttccatgcttcaaggttccaatcaggcacagatcccaatcctctctcaagccctaatttctcctcatttccatggccagagaccagcccattgtcgcggtggaacccgctcccgaacctgcctccgccgatcctcacccggaggagaaggaggagaccacacctgaagccatcgctaagaaaatcaaggagcccatacctaaaaaggtttccagacctcgcaaccctcgcactcatccttcctacgaagagatggttaaagatgcatttatctcgctgaaggagaaaaccggttcgagccaatacgcgaatgcgaagt

SEQ ID NO: 243825 - DNA, 366 bp, Glycine max
  unsure (1)..(366): unsure at all n locations
cggggcgtctctgtatctatcttctctcggagccgctattatcnccagacgccaccgccgcagcaccagaagaagaagaagagtgatggctgagtacgacctaactccgcggatggcgccgaatctcgacaggcaccttgtgttccctctcctggagttcctgcaggagcggcagctctacgacgacgaccacatcctgaaggcgaagatcgaccttctcaacaacaccaacatggttgactacgctatggacatccacaagagcctctaccacaccgaggacgtcccgaacgatatggtcgaccgccgcgccgaggtcgttgcccgccttaagtcgctcganngaggccgccgcccccctcgtcg

SEQ ID NO: 243826 - DNA, 316 bp, Glycine max
gaaaaggaggaagatgaaaaagaggattggagggtcgccacgtttagcaaggactaaatcctctctactctttcttcctctcttcgagagggttttatcttcttcctcttcacgtcgttcttctggcctctacaatgagcaacgagaaggacactttcaacgtcgctgatctcacttcagctctcaactaagacaatagaacagaccttgtcaatgctctcactagcaggatacagcatttggcttgacagcattctgatattctagagtctctgtcacacaatgtcaggaaccgtgtggaggttcttacagagat

SEQ ID NO: 243827 - DNA, 346 bp, Glycine max
aaaaagacgacagaagggggatggaatttgctgccaaaggaggacatactgagtcattatggaaaatagaaaagttgaaatctgaaccaatgaagcagcacactttgataactgggttttcttgtgtcaagggtctactgttggaacgtaaacccagtgatgcagttgctgtcattcaagttctaaatcagaccttgtctgatacaaagaaatcacgcatcaagggtgaacttcagaagcttgtatccgagtggcctttggtagttagtaagcaccactaagaacctgacagcaaggcattatcaggctctttgaaatctgagagtcctggcatggttacagggtt

SEQ ID NO: 243828 - DNA, 378 bp, Glycine max
gattcgcaacgagaacgagaggaggggttcgggtgtgagagcgagaatcagaagatgaagaaggaagacacagtgaagctgatcagtgccgaaggttttgaatttgtggtcgacaaagaagctgcaatggtttcacagaccatacataacatgcttacttctccagggagtttcgctgagaggcagcacggcgaagttacctttcctgagatcagcaccaccattctcgagaagatttgccagtacttttattggcatctccaattcgccagtgggaaggagacggaatttcccattgaacctgaattaactctggagctaatgatggctgccaattacctccatacataacattttgacttccccaagggtgatagt

SEQ ID NO: 243829 - DNA, 402 bp, Glycine max
gaaaaggaggaagaggaaaaagaggattggagggtcgccacgtttagcaacaactaaaccctctctactctttcttcctctcttcgctagggttttagcttcttcctcttcacttcgttcttctggcctctacaatgagcaacgacaaggacaccttcaacgtcgctgatctcacttccgctctcaacgaggacaatagagcagaccttgtcaatgctctcaagagcaagatacagagtttggctggacagcattctgatattctagagtctctgtcgcccaatgtcaggaagcgtgtggaggttcttagagagatccagggtcaacatgatgaattagaggcaaaattttttgaggagagagcagctcttgaggccaaattacaaaaattgtatcaaccac

SEQ ID NO: 243830 - DNA, 390 bp, Glycine max
  unsure (1)..(390): unsure at all n locations
gacttgcggctgcagcagagaagcactcatcattcttcgtttgtctaagatccgccttctctgaattgtaaaaatgtcgctcggagaaactgcttgttcatacgcagctctcatccttcatgaagatggaatcagtgtaactgccgacaagatcagcaccttgttggaaactgcaaaggttcaagtagatacctattggccaaccttatttgctaaacttgctgagaagaaaaatcttggcgatttgatagccaatgcagcaggcggtggtgcaccagttgctgttgcagctgcccctgttgctgcctcaagtggtggtggtgctgctgctgccgncccagctgctgaggagaaaaagaaggaggaacctgaagaagagagtgatgatga

SEQ ID NO: 243831 - DNA, 343 bp, Glycine max
gatattgacaaatacaatgatatttatttttatagttacatttttttgaagggcagaaattgtagtgaaagcgataattctagtactagtataataactagtacgaatgatacaaatgatagtgattccactataggagaaagttctaataatctcgatgaaagtcaaaaatataagcatttgtggcttgaatgcgaaaattgttatggattaaattataaaaaattttttaaatcaaaaatgaatatttgtgaatactgtggatatcatttgaaaatgggcagttcagatagaatcgaacttttgattgattcgggtacttggaatcctatggatgaagaca

SEQ ID NO: 243832 - DNA, 393 bp, Glycine max
  unsure (1)..(393): unsure at all n locations
aaaagaccaccaaaaggggaaaaggatggtccggccttccttggccccaaaaacccccggtaaaaaatggaattgtacaaccttggccacacctgatgaatagtaaatctgcccaaccatgcacggacaataaggttgcaaattcatggttaaacaatgaagcagtcaggacagcaattcatactgcacagaaaagtgtggtcagtagttgggatttatgcactgacagaatttacttcgatcatgatgctgggagcatgatcaagtaccacaagaacttaacttccaaaggttatcgtgcacttatattcagcggcgatcatgacatgtgtgttccatacacggngagtcaagtgtggacgagatcagttggatacaagattgttgatgaat

SEQ ID NO: 243833 - DNA, 451 bp, Glycine max
gggtcgacgctacgaatcggaagcaagaagacgacagaaggggatctcagaagcaatctatcaaacacatattccgataaacagaaacaccaccgttgaatttgagaatcccggcgaggcatgttcttgctccgagtccactcggtggaagaggaccaccctctggatccccaaaccatcttccaatcccaatcccaatcccaatcccaatcccaatccaacaaccctaaattcagcgaacgcagaggcgcactccacttgttccgaacctcttcccattcctcgctcccaacccagacctctctttcttctctcctcttcatcctcgccgtccccaactacctctccttccacgacttcattcccttctgtggaccccacctcgaccgtttccaccaccttctcttcatcagaaacgacggcaccgaagatcgctatagcgtcctcatcg

SEQ ID NO: 243834 - DNA, 405 bp, Glycine max
agctgaaccacattatcaagtctacaaatatgaagtgcctgactccaccatcggcattggaaggggattgtggattccttgctgcaaacctttatgctaagagtgtttttggggaagatgctttggtgaatgtgagcattgaaaagcaatcagatggtaagttgagtggatacatcagaataagaagtaaaactcagggaattgccctcagtcttggggataagataactttgaaacagaagggagccgcttaataggagtaaatgcccgttttctctgatgtttcttcgcttatatcaactttgtgtagcttcttgtggcggctaacttcaagcttggttattgcttcaaattctgcggcttttggtggcagcccgcttgttagtattaatttttttttcccct

SEQ ID NO: 243835 - DNA, 361 bp, Glycine max
cggacgcgtgggcggacgcgtggggcgcgttaagccaaccgcagaagctatcggcgtacgatgttctgatggagtacgggttcccggtgggtcttcttcccaagggagccatagggtattcgctcaacagagacagcggcgagttcgcagtgtattttcaaggagcgtgcagcttcgacataaagtcctacacgctcaagtacaaatccaccatcacaggtgttatctccaacggcaggctctataatctcaaaagtgtcaccgtcaaaatcttgctcctttggctcaacatcgtcgaagtctctcgtcaggggaacgatatttacttctccgtcggaatcgcttccgccgattttggcgt

SEQ ID NO: 243836 - DNA, 266 bp, Glycine max
ttgtgacaagtcactgaaccttatcagtacgaagaaggacaatcccgcaatgggaacagtggagagcttgaagttcgtggtgtggtcagagtacatcagagatcgtgccactttagtggttgcctatggaatcagcattaatcttgttgaggttacctgaaagtctaagctcaaagctcagtttccgagtcccatcgagtacgcggggtttaccggtgacttcgcacctgcacctggcattgcgacattcagagggatgcgctgtc

SEQ ID NO: 243837 - DNA, 369 bp, Glycine max
agctcacctttcccttggcgacgccgtgagaaacgaaaagcgaacaaaaaaaaaacagagtggggtgggaggcacacgcacaaacgcagagtcagaatctccaatcttcaatcggagacaaagctagctcgaacgaacgaagtagagtagtgtgctacgaaaaatgtggcggtgcatcgcacgtggtctccgtggacctgcttccaccagatccacctccaatcactcacttggatctcaactttctagattcttctctagtggggcgaactcctcgtacaccgtggtggatcatacttatgatgctgttgtcgtaggagctggtggcgcgggattgagagctgctattggactttcagaacacgggtt

SEQ ID NO: 243838 - DNA, 404 bp, Glycine max
taaccattcaaaatcctaatgcacttgacagcaaggttcttctggattttgatcatgttaaaaatagtttgaaagttgatgatgaagaactacagaaaatgagttcagatccaacctataacataaacatgtcgggtgatataaagcaaatgcttaaggagcttggaactgagaaaggaaaggaaactgcattgcatgggggaggcggtggcaaggcacaaaaagaaagagctgctgcacttgctgccatcttagctgcaaggtcacgtgttgaagaagattccaaatcaaatccaaataaagaggtcaaagtttctcaggcatttagtattgtagatgctgcgtctgcctcagtacatggaagaagtgcagctgctgctaaagcctcagcagatgataaaact

SEQ ID NO: 243839 - DNA, 427 bp, Glycine max
gacgcacgcgtcagcaagaagctaagattaacacaccaacccactagaaacatgaaaacccctaacaaagcctcattactcttattccctctcttgtccctttccttatttatcaaccattcccatgcagcaggaatcgctgtgtactggggccaaaacggtggagaaggcaccttagcagaagcttgcaacacaggaaactaccaatatgtgaacatagccttcttgtccacttttggaaatggccaaaccccacaactcaaccttgctggtcattgtgaccctaacaacaatggttgcacagggttgagcagtgatatcaatacttgccaagaccttggcatcaaagtgttgctctctcttggaggtggtgctggaagctactccctcagctcatctgatgatgccacacaacttgcaaactacc

SEQ ID NO: 243840 - DNA, 379 bp, Glycine max
acctaaacataaactgaatttcccaaatccccttcccaattttcatcaacacctaatactcccaaaccaatcctcgatcatggacgccgaatcataaactcagctaatcgatgagagaagagaggagcaggaacttaagtacctggaatttgtgcaattcgcgacgatccaagccctgatgcgctgcgccatcctcgactcctatgccaaagagcgcgcgggtcctctgaagccctgcgtcgacatcgtcaacgaagccgtgaagatcgtcatggctccggtctacgacaagttccatgtcgtcaccgtggatgtcctcaaatacgctcgattgaaggtcgcccaattggatcgccacgtttcctccaacgtgaagaaa

SEQ ID NO: 243841 - DNA, 399 bp, Glycine max
tgagtcctgttagctgcccgcaacgttgtgagaagtcactgaaccttatcattaagaagaacgagaagcccaaaatgggaacaatggagagcttgaagttcttggagtcttcaaagtacatcagagatcttgccactttagtggttgcttatggaatcagcatcaatcttgttgaggttacctggaagtctaagctcaaagctcagtttcctagtcccaacgagtactcttcttttatgggtgacttctcaactgcaactggaattgccacattcacaatgatgcttgtcagccaatttatatgtgacaagtatggatggggagttgctgccacgatcacccctacagtcctgcttctgacaggagttggtttcttttctcttatattgtttgggggcc

SEQ ID NO: 243842 - DNA, 423 bp, Glycine max
cacgcgtcagcccacgcgtccggaagagccttccatatatagcctcccaaaaaaatgaagagtactacctctttggctctctttctactttgtgccctaacttcatcatatcagccttcagccaccgctgatattgtattcgacaccgaaggcaatcctattcgaaacggcggcacatactatgtgttgccagttataagaggaaagggcggcggaatagaatttgccaaaaccgaaacagaaacatgccctctcactgttgtgcaatctccctttgaggtctcaaagggtctaccactgataatttcatccccatttaaaatccttgacatcaccgaaggacttattttgagcctcagtttcacttatgtacccccctgtgcctcaactccttctcggtggaccgttattctcaagggtctg

SEQ ID NO: 243843 - DNA, 397 bp, Glycine max
cgacccaagcgtcaggccctagactacacaacacactttgcaatggcggttgttgcgcaaacccctgacatcgccggcgagcgacagtccggccaagacgttcgcacccaaaacgttgtggcatgccaagccgttgccaacatcgtcaaaagctctttaggccccgttggcctcgacaagatgctcgtcgacgacattggcgacgtcactatcaccaacgacggtgccacgattctcaagatgcttgaagtggagcatcctgctgccaaggttttggtggaactcgccgagcttcaggaccgaaaagtcggagacggcactacttcggtcgtcaatgtcgctgctgagcttctcaaaatgggaaatgaccttgtcaggaacaagattcatcctacct

SEQ ID NO: 243844 - DNA, 411 bp, Glycine max
agaagaaaacctaagcttagaattagaaacaaagaaaagaagaaaggaaagaattgatcgttgaaaatgcagggaggaaagaaagcgggagagtccattaaggaaacagctacaaacattggtgcttctgccaaggctggcatggagaagaccaaggccactgtccaagagaaggcagaaagaatgacagcacgtgatccggtgcaaaaggagttggcaacccaaaagaaagaggcaaagatgaaccaggcggagctggacaagcaggcggcgcgtcagcataacacggcggccaaacagtccgccaccacggctgggcacatgggacatggccaccacaccaccggaaccgggactggaaccgccacgtattccaccaccggggaatatggtcagcccatgggggcccac

SEQ ID NO: 243845 - DNA, 358 bp, Glycine max
gaattagtcatagtagtttcttcctatttgaacaacgtaggatacaaccctgacaagattccttttgctcctatatctgggtttgacggagacaacatgactgacatgtccagaaaccttgactgggataagggtccaactctgccacatgcacttgaccagatctctgaacccaagaggccttcagacaagcacctcacgctataccatcaggaggtgtactatattgaaggcattggctctgtacctgtccgatgggttgagactagtctcttgaagcctcccattgaagtgacttttgcatcaaatgaactgagattccaagtaaagtcagttggaatgcaccacacacctctca

SEQ ID NO: 243846 - DNA, 312 bp, Glycine max
ttcttcgggctcggcttcttctccttgtagttgaattaaaatatggggttgtctttcacaaacctttttagccggctctttgccaagaaagatatgcgtattcacatggtaggtcttgatgctgctggtaaaactaccatcttgtacaagctcaacctgggagaaattgtcacaaccattcccacaattggttttaatgtggaaactgtggaatataagaatattagctttactgtatggaatgtgggtggccaatataatattcgcccttaatggagatactacttctaaaacactcaggggcttatcttt

SEQ ID NO: 243847 - DNA, 466 bp, Glycine max
  unsure (1)..(466): unsure at all n locations
taccatcatacgtcagactcactactaggactcacgggccgatgcaagtctctatagtgactcgtactaccctgatcttctgtaaagggttcaattgaaaacatacctgtcgggacccgaaagatggtgaactatgcctgagcggagcgaagccagaggaaactctggtggaggcccgcagcgatactgacgtgcaaatcgttcgtctgacttgggtataggggcgaaagactaatcgaaccgtctagtaactggttccctccgaagtttccctcaggatagctggagcccgcgggcgagttctatcgggtaaagccaatgattagaggcatcgggggcgcaacgccctcgacctattctcaaactttaaataggtangacggtgcggctgctctgttgagccgcgccatggaatcgagagctccaagtgggccatttttggtaagcagaactggcgatgcgggan

SEQ ID NO: 243848 - DNA, 359 bp, Glycine max
acgcgtcagcttatgtgcttcactcttgggctggagggttaactgagttcacagatggaaggaatcaagagagcacaagtgaggctgtgagtgcatattattctgctgctttgatgggattagcatatggtgatgtacctcttgttgcacttggatcaacactcacagcattggaaattgaagggactaaaatgtggtggcatgtgaaagagggaggtactttgtatgagaaagagtttacacaagagaatagggtgatgggtgttctatggtctaacaagagggacactggactttggtttgctcctgctgactggaaaaagtgtatgcttggcattcagctcttaccattggctcct

SEQ ID NO: 243849 - DNA, 415 bp, Glycine max
ggtcagggattcccgtctcgacccaagcgtcagatacctactttcagctcctaagagcacgcatcactgttgcacttcttactcgttctccctcttttttttcttcttcttcttcttcgctaaaccccccctttatttttcctatctcactaacatcgatgggagacgagaataagaccaagtcccctgcttccggcgtgtggtccaccatcaagcctttcgtcaatggcggagcctccggcatgctcgccacctgcgtcattcaacccatcgatatgatcaaggtgaggattcaacttgggcaaggatcagctgcgcaggtcacttccaccatgcttaagaatgagggtgttgctgccttctataagggtctatctgctggattactcaggcaggctacatacaccactgcccg

SEQ ID NO: 243850 - DNA, 404 bp, Glycine max
gttcgatcatccatcatgcctaatgatatccagaggagatgatacatacacgaatatctaccattgatgtcatgaattctaatgctattggtcaaaagatccctctattctcagctgctggtctcccccataatgaaattgctgcacagatatgccgtcaggctggcttagtcaagcgactagaaaagtctgataatcttctcgacggtggaggagaagaggacaattttgccattgtgtttgcagctatgggagttaacatggagactgcacagtttttcaaacgtgactttgatgaaaatggctcgatggagagagtgacccttttccttaatctggcaaatgatcctacgattgagcgtatcatcactcctcgtattgctcttactaatgctgaatatttg

SEQ ID NO: 243851 - DNA, 392 bp, Glycine max
acgcgtcaagcaaactctggtggcatataccactcagttgaatatacaaatcacattgggcagttagccaataaccatggactgaagcttcacactgatggggcccgtaattttaacgcatcagttgcacctggtgttccagtggataagcttgtccaggcgggtgattcagtttccgtttgcctaactaaaggtataagtgctccagttggatctgttattgttggatcaagaattttattgccaaggctacacgactccggaaaaccttatgaagtggaatgagacatattggcctcctttgtgccgctgcacttgttgccttgcaagaaaatgttgggaaactggaaaagtgataacaataaagctagacttttggctgatggattaaa

SEQ ID NO: 243852 - DNA, 410 bp, Glycine max
agacatccccttattgttaaaccctttgtttgcacaagaaaagagttacttcatcatcatcatcaacatgagtcgcttcaacaatcagcaagaatcccctgtatcatatcctccagcactgtatgttagtgccccaccacctatgggttatccttccaaaggtgatcctacagctgtagggtacccccaacaaagagttccagaagaaaccacaagcaggggtgatggattttggaagggatgttgtgctgctttatgctgctgctgggtcctggattgttgcttctgattgaatcatagcacagatttgtgtttgtcaccatgttttctttttcacattgccagtttcctatttgtattctttgtagtttagaagaataaggatctttgtcctcttggacagcttgtat

SEQ ID NO: 243853 - DNA, 380 bp, Glycine max
agcccacgcgtccgctgaaaatgagttccaaggttttgcttgttctacttatgttcttggccactatacttctgatctcctctgaggttgcacccgatgatgcatacgagaattttgacaaaatagatgggaagcctagtgcagatggggtagatgaaagcaagtattggcgtggcggctatggtggcggctatggtggtggttatggaggtgggcgtggatgctatggaggtgggcgtggatgctatggagggggacgtggtggatatggcggcggacgacgtggctatggtggcgggcgtggtggctattgcggcgggcgtggtggcgggcgtggtggctatggtcctaatgaacataacgatgctggggttgatgct

SEQ ID NO: 243854 - DNA, 336 bp, Glycine max
agtgaaaatgtgccttcaaggattaacagatgtttggaggaaggagccgaagaatttttcttgaagcctgtgaggttgtcagatttgaacaagcttaaaccccacatgaagaaaaccaagttcaaagatcaaaagcaagaaacagtagaaaggtttgaagactcagaagttcaacagcaacagtcacaacaacaaatcatcatccaaaatgagcatcaccaagcaccaaaattacaagttcttcagccagagtcagaatcagagtcacatccacaaccaactattgaacaacagcaacaaattctacaacaagccaacaacaataacaagaggaag

SEQ ID NO: 243855 - DNA, 415 bp, Glycine max
agctcaagagagggtctgcctgtctttgcaattggtgttgggcttagcacatttgacaaagcatctgttcattagtatgtgcagtcacacattcaaattaatgaatatcgtgagcgtataatcttgccttctgcatcaaagaagcaggggcgacctattaccacttgtataaaggttttagacatgactggtctgaagttatcagccctgaatcagattaagttgctaactattatatcatccattgatgatctgaactaccctgagaagacaaatacttattacattgtaaatgctccatacatattttctgcttgttggaaggttgtgaagccacttttacaagagaggacaagaagaaaaatacaggtgttaccaggttgtggacgagatgagctattgactatcatggatt

SEQ ID NO: 243856 - DNA, 411 bp, Glycine max
agcccacgcgtccggaaacattggatgacgccagaaaaggttaaaacgtcaatcagaacttttccttcttcagctgaaatagtacctgaaccgctgggtgtcgtgttagtcatctctgcatggaactatccaatcttgttgtcccttgatccagtagttggagctatagcagctggtaatgctgtggttctaaagccatcagaaattgctccggccacttcatcagtactagcaaagttgatagagaagtatatggataactcatttgtaagagttgttgagggggcagttgatgaaacaactgcactattgcagcaaaagtggaacaagattttctacacaggtaatggaagagtgggaaaaatagtgatgactgcggctgcaaaacaccttacaccagttgtactggag

SEQ ID NO: 243857 - DNA, 408 bp, Glycine max
agcccacgcgtccgcccacacgtccgcccacgcgtccgcgcacacgtccgaccacgcgtctgcacataaacaccacaaatacttccttacaagcagaaccatcatgtaatatggcacattatcaaaagcactaagatgatcatggtcacaacgttgactagtatggcaacgttgagaaacaaaccgacgaatacggaaaatcagttcatgctgctactagttcctatgtacccaccagaacggctgctggtggttacagtgaagacattaataggcaacatgagagcaccaatgcctactgagtagacactgggagacaacattctagtggtggctacgatggaggcactaataaacatcaagggactactggtggctatgctgctgacaccaatagacatcatggaa

SEQ ID NO: 243858 - DNA, 331 bp, Glycine max
acatcagtaatacaggtacttccttagaagcatggccaacatcaacgatggcacgttatcacaagcacgaagataatgatggtcgcaacgttgaccagtccggcaacatttagacacgatccgacgaatacggcaacccatgtacatgctgctggtgtaacctatgtgaccaccatgactgctgctggtggttacaatgattagcttcctaggcaacaggagactaccaatgcctacggctatagacactgggagacagcattcaaggcgtggctacaatggagacacgaatccgcatcatcaggtgactgatggctatgctgatgaccac

SEQ ID NO: 243859 - DNA, 412 bp, Glycine max
ggtcaggaattaccgggtcgagccacgcgtcagcccacgcgtccgcccacgcgtccgatttcctctcagaaccctcgatcactcccacgcgctcctatatcctctccttcaccgtcgctctctccaacgatcacaacaacatcgtcatcccatggcaaacgccgcatctggtatggcagtccatgatgactgcaagttaaggtttttggagctgaagacaaagaggacacaccgtttcatagtttttaagattgaggagcagcagaagcaggtcattgtggagaagcttggtgagccagcccaaggctatgaagatttcactgccagccttcctgctgatgaatgccgttatgctgtttatgaatttgagtaactgactgaagggaatgtccccaaaagcagaatttttttc

SEQ ID NO: 243860 - DNA, 416 bp, Glycine max
acgcgtcagggacattaaagttaaaggatataccatatcaaaacatagaagaagaccgctacaataagagtcttcaacttcttgaatacaacccagtatacaagaaaactccagtgcttgtccataatggaaaacccttatgtgagtccatgcttattgttgaatacattgatgagatttggtcacataattcattacttcctgctgatccctacgagagagctctggcaaggttttgggttaaatatgctgatgatgacatgttttctgcagttattgcattcttccttagcaataatgatgaagagcgagaaaagagcatagagaagatatgggagcatctcaaggttgttgagaatcagtgttttggtgatcagaagaaattttttgggggagacatttataacattatgggc

SEQ ID NO: 243861 - DNA, 382 bp, Glycine max
aggccctttttttttttttttcccttcatctttcccatcatcttctttccccttgactttctctgcatcaattttgtcatactttttcttcttttccttcttctcttcatcatccttcccatcatcttctttcttcttgatcttctctgcatcagttttgccatccttgtctttcttctcctttttcttcttttccttcttctcttcatcatctcggcacaagtcccagcaccaccatctccttctacaattccatccccaatgtctcctttggcaccttctacaccaccaccgtcccgttctcttcctgctcctccaacgtctcttacgccaccacttccatctacagatttcgctcccattcttccaccaccctattgga

SEQ ID NO: 243862 - DNA, 369 bp, Glycine max
agaaagaagcaagcatgtgtggcggagcaatcatcgcagatttcatacctcggcagcgtccccgcaccctcacagcctccgaactctggcccaagcgcagcgaacctcaacctcaacctcctcctcctccagttaagaggcagaggaaaaacctctacagagggatcaggcagcggccctggggcaaatgggccgcggagattcgcgatccacgtaaaggagttcgtgtctggcttggcaccttcaacaccgccgaagaagccgccagagcctacgacaaagaagcccgaaaaatccgcggcaagaaagccaaagtcaatttccccaacgaggacgaccctctgccgcaataaggattttgcaagagcc

SEQ ID NO: 243863 - DNA, 371 bp, Glycine max
agctctctctctctctcacccttcccagtgatcaattcaacgatgttagagcagttgctgatattcacgcgcggagggctcatcctctggacctgcaaccacctcagcaacgccctgaggggatctccgatcgacacgttgatccgatcctgcctcctggaggagcgatccggtgcggcctccttcaactacgacgcacctggagccgcatactctctcaaatggaccttccacaacgacctaggcctcgtctttgtcgccgtctatcaacgcgtcctccacctcttgtacgtcgacgatttgctcgccgccgtcaagcgcgagttctcgcgcctctaccaaccccaaaaaaccgcctaccgagattttga

SEQ ID NO: 243864 - DNA, 371 bp, Glycine max
agccaaaccacggacccaaaacattgaggtataacaactgaagaaccaacaagaggggtattgagattgagattcaagtaatggggaagagcaaggttcttgtggtggggggaactgggtacatacggaggaggatagtgagggcaatcctggcactgggccatgagacctatgtggttcagaggccagagttgagcctccagatagagaagctgcagaggctcctctccttcaagaagcaaagtgctcatctcattgaggcctctttcaatgatcacaagagccttgttgatgctgtgaagcacgttgatgttgtcatcagtgccatctctggtgttcacatcacgagccacagcatcactctgcaactc

SEQ ID NO: 243865 - DNA, 397 bp, Glycine max
gggtcgagccacgcgtcaggttgctactattgaggatatatatcttgcatatgaacagttgaaagtggatgagaattctctatattcatgcattggaattgctggtgctcagactgcacaagatatagcagctcctttagaagaggaagtagcagatgatgtttatccaggtgttattccggtgggacgaggtttatctacaatgacacggccaacaacctgatatttttggactaagttttggcctgcttgctttaagatcgggaggagccatgtctggaagtttgattacaagttgtcgttcaaaggattaacggcatgtgtgtcacaacacaagaagttgctgcattcatttaacattcaaaccactcggtatacaagctgtttgatcaaacct

SEQ ID NO: 243866 - DNA, 413 bp, Glycine max
aattcccgggtcgacccaagcgtcagaaaagctcgtggaattgctagcaatggcgaggatcaaggtttacgagctgaggcagaagacgaaggctgatctgctgaatcaactgaaggacctgaaggcggagcttgccttgcttcgtgttgctaaggtcaccggtggtgcccctaacaagctttccaagataaaggtggtgaggttgaacattgcccaggttttgacggtgatttctcagaagcagaaggctgcgttgagggatgcctacaagaataagaagtacttgcctctcgatctccgccctaagaaagaccagggctattcgcaggaggcttactaagcaccaggcatcattgaagacagagagggagaagaagaaagagttatatttcccactaacgaaatatgctatc

SEQ ID NO: 243867 - DNA, 419 bp, Glycine max
agtcttcttcatctacattagtagttcttgttattcattattcttcatactcacacagcttcttctgggggcaaaaggggtcatttttcagatccgaggttgagctcctctacccatcatgatggagctcggatacctgaatcagggtcagccttctagaggaacaacaccacttgtcactcttccattgttgctttcaacacttgtgttcttctccactttcacacatgccttctcttcttctgtgtttccggaattgaatcctattaaacctaggcactcacgtcttctcaggagtgctgtgcaacgagaaactcctacatctcagttgtctgaactatggtcacctctggaaagccaaggatggaaaccttatgttgaatcaaataagccaacattaccagagaagtcagagggat

SEQ ID NO: 243868 - DNA, 411 bp, Glycine max
agcccacgcgtccgcccacgcgtccgcacacacacagctagcagatattacatacacgtgaatcactaattaagccatggagaagaaatcaatagctgggttgtgcttcctcttccttgttctctttgttgctcaagaagttgtggtgcaaactgaggcaaagacttgcgagaacctggctgatacatacaggggtccatgcttcaccactggcagctgcgatgatcactgcaagaacaaagagcacttgctcagaggcagatgcagggacgattttcgctgttggtgcaccaaaaactgttaaatggatccattcactccaacgtgaagaagatgcatgcagcgctattttataaaaaataaaactactatatactatatataataagactggcgctgcatcaatgacct

SEQ ID NO: 243869 - DNA, 399 bp, Glycine max
cccacgcgtcagggaaaagcagaggagaattgccttctagaagcgttatctcgcagagatgggcactgtttctctgcttaggaagtttctgtgctggaatgctcttcactacaaggatatggactatacctgaaaacaacaaaggactagcacggccaacagcctcagaagctgaaaaattgagtttagtttcagaaggctgcaattccagaattttgcaagagatggaaatgaagcacgataaagacacttatggtgaagttttcaagagtcataattccatacaaacattggacaaggctatttcaaacttagagatggaattggctgctgcaagggcaactcaggagtctctacgaagtggtgctcctatttcagatgatataaggttgagtgaat

SEQ ID NO: 243870 - DNA, 382 bp, Glycine max
  unsure (1)..(382): unsure at all n locations
acccacgcgtcagcccatctgatcatataacacaacacactgcaggcttgttgtgttgtgctgtgttcattctgaaactttgatctatgtgagacaagttgtggctaccctgcaaagccagaaaaaatggtgccagagaacttgaagaaacaacttgctttggctgtgagaagcatccattggagctatgcaatcttctggactgattcaactacccaacccggggtgttgagctggggggaagggtattacaatggagacattaagactaggaaaacaagtcaaggagtagaactcaattctgaccaaatagggttgcagangagtgaacagctgagagaactattcanatccctcaaaactgtagaagtcacccctcaaa

SEQ ID NO: 243871 - DNA, 411 bp, Glycine max
ggtgtcctcgaagagcacaacgaggtaggcctctgcgacttcttggagagtggagacggcgctgctgtggaagtagagattggtcttgaagtccagagcgatttcccttacaagtctttggaaaggaagcttccttatgagaagctcggtgttcttctggtactttcggatctcccttagcgccaccgtacttggcctgaaacggtgcggcttcttcacaccgccggtcgccggagcggacttgtgtgctgctttcgtggcaagttgctttctcgaagcttttcctctggtggacttccttgcggtttgcgtcgtacgagccatttcgaacacagagattgcttgactttggaagaagactaatgagtacagcacggtgtaagctgggattcaagaacagaacatcatgag

SEQ ID NO: 243872 - DNA, 410 bp, Glycine max
cacgcgtcagcccacgcgtccgcccacgcgtcagcccacgcgtccgcccacgcgtccgcccacgcgtccgaagaaaccttagtttgatattttgattggttctgtggagagtttttttttctttggtgtggtttttggtttgtgctgtttttggttgggaataacaatggccgatgaaggaaacaaaagcaataacttctattcgatcttggggttgaagaatgagtgcactgaattggagctaaagaatgcttataggaaacttgcagagaaatggtacccaaatctttgtttaaccaacgggaattcagaattagtggaagaagctaagaaaaaatttcaggaaattccggaaacctattcagttttaactgacgccaacaaaaggttaatgtacgacgtgggagtct

SEQ ID NO: 243873 - DNA, 396 bp, Glycine max
ccgggtcgacccaagcgtcagccaatactgagcggggcagcattgagaccagaggtggctttgtctcaaacatgccaggagatgttgcaagagtgaatgggcagctagcagtttctcgagctttcggagacaaaaacctcaaaacgcacttgcgatctgatcctgacattcagtatactgacattaccccagatgttgagcttttgatacttgctagtgatggtctatggaaggtaatggcaaaccaagaagctgttgatgttgcaagaaggataaaggatccacaaaaggcagcgaaacaactagccactgaggcattgaacagagacagtaaggatgatatttcctgcattgtagttcgtttcaagggttgaaaaaggggaacatacatactct

SEQ ID NO: 243874 - DNA, 464 bp, Glycine max
  unsure (1)..(464): unsure at all n locations
ttcaccggccaagtacggtcaggaattcacggctcgacccacgcgtcagctctggtcgatggaacaatgtaggcaagggaagtcggcaaaatggatccgtaacctcgggaaaaggattggctctgagggctgggcacgggggtcccagtcccgaacccgtcggctgtcggtggactgctcgagctgcttccgcggcgagagcgggtcgtcgcgtgccggtcgggggacggattgggaacgggcccttcggggcctcttccccgggcgtcgaacagtcaactcagaactggtacggacaatgggaatccgactgtttaattaaaacaaagcattgcgatggtccctgcggatgttgacgcaatgtgatttctgcccagtgctctgaatgtcaaagtgaagaaattcaaccaagcgcgggtaaacggcgggagtaactatgactctcttaaggtagccaaatgccn

SEQ ID NO: 243875 - DNA, 405 bp, Glycine max
aattcacggctcgacgcacgcgtcaacccggatggttcggttctccgtgctcagttacctggcaggccaactcgtgattctctatttgtggatccagccagagataggactagcttgctcaaaatatggaacctgaacaaatgctctggagttgttggtgtatttaactgccaaggtgctggatggtgcaagatagagaagaaaacccgcatccatgatacatctcctggtacactcaccgcctctgtctgcgcctctgatgttgacctcatcacacaagtagcaggtgctgaatggcttggagatacaattgtttatgcttacagattaggtgaggtgattcggctaccaaaaggggtttcaattccagtgacactaaaagttctggagtttgagcttttccac

SEQ ID NO: 243876 - DNA, 398 bp, Glycine max
tcaaatgagggacgcttttaaaagttatgtccgtactcgggattattgcactacatcaaagcacattgttcatatgtgtatgagtgcaattctggtcagcattgaaatgggtcaatttcctcatgttacaagctatgttagcaaggcagaacagtcaccagatgcccttgaagcagtaacagttgcaaagctacgatgtgctgcaggattggctaatctagaagccaaaaagtacaagcttgctgcccgaaagtttctagaaacaggacctgaactgggaagtcactataatgacgtaattgcacctcaagatgttgcaacatatggaggactttgtgcacttgcaacatttgatcgggcagagttaaaggcaagctctccattatattgttgtgatg

SEQ ID NO: 243877 - DNA, 241 bp, Glycine max
gcaatgtttgcaacaagcaccatgatcaggacccttgaattttcctccccttgtctatgatcgaggaagaaaatctgtaatatattatgcaaaaaataattaaggtcttttcctttaaatgggctggttcaatgaaccgagaccactgcaggttcatggggatgggaggattaagaggctatgttttttaatcttccgatgttactgttgtttttttttaatttcaataaggatattatat

SEQ ID NO: 243878 - DNA, 414 bp, Glycine max
cagaggtgaagcttcatggattttggtatagtccctacactttgagggtggtatggaccttaaagttaaaggatataccatatcaaaacatagaagaagaccgctacaataagagtcttcaacttcttgaatacaacccagtatacaagaaaactccagtgcttgtccataatggaaaacccttatgtgagtccatgcttattgttgaatacattgatgagatttggtcacataattcattacttcctgctgatccctacgagagagctctggcaaggttttgggttaaatatgctgatgatgacatgttttctgcagttattgcattcttccttagcaataatgatgaagagcgagaaaagagcatagagaagatatgggagcatctcagggttgttgagaatcagtgttttg

SEQ ID NO: 243879 - DNA, 233 bp, Glycine max
ggtcgaggcccgcgtcagcacagacgtcccttcatggattttggtataatccctacactttgagggtggtatggacctgaaagttgaacgataggccatagcattacatagaagaacatcgcaagaataggagtcttcaacttcttgcatacaacccattcatagaacagtcctccagtgcctgtccatatgggaaaaccctgatgtgagtccatgcttactgttggctacat

SEQ ID NO: 243880 - DNA, 385 bp, Glycine max
acggtccacctcattgtatacttgcaagtaacacttccacaattgacttgaatctgattggagagaagacaaagtctcaagatcgaattgttggagcccatttcttcagtcctgcacatgttatgccgcttctggaaattgtacgtaccaagcagacctctccccaagtgatagttgacgtgttagatatttcaaagaagataaagaaaactccagtggtggttggaaactgcacaggatttgctgttaataggatgttcttcccatacacgcaagcaggtctcttgcttgttgaacgtggtgcagatgtttatcaaattgatagaataataaccaaatttggaatgcccatggggcctttcagattggctgaccttgttgggtt

SEQ ID NO: 243881 - DNA, 413 bp, Glycine max
aggcttcttgttgttggaaagaaaccctagcaagcggaacaatggcagacgttgaggtcgatgtggcggctgcagcagcagcagggcagccgaagaagagaacgttcaagaagttcagtttcaggggcgtggatctcgatgcgcttctggacatgtccaccgatgaactcgtgaagatgttcagtgctcgcgcacgtagaaggttccagagaggcctcaccagaaagcccatggccttgatcaagaagcttcgcaaagcgaaaagagaagctccaccaggtgagaagccagaacctgtccgcacccacctccgcaacatgattattgtgcctgagatgattggtagcattattggagtgtacaatggcaagacctttaatcaggttgaaatcaaacctgagatgattgggcat

SEQ ID NO: 243882 - DNA, 390 bp, Glycine max
atctgagggagaggagagcattttcatttttcaacttgagagaagaagagaaggggaaaaggaaaaaaaggcaaaatgggtaaggatctgagcgatgagcaagtgtcttcaatgaaggaagctttctctttattcgacacagacggtgacggtcggatcgcgccgtcggagctggggatcctgatgaggtctctgggagggaacccgactcaggcccaactcaaagccatcgtggccgaagagaacctcacggctcccttcgacttcccccgattcctcgatcttatggccaaacacatgaaacccgaacccttcgatcgccaactccgcgacgccttcaaggtcctcgacaaggactccaccggcttcgtcgccgtctccgagctccgc

SEQ ID NO: 243883 - DNA, 393 bp, Glycine max
agggcgaataatacgttaggtgggagtattcctaaggagttaggggacctgcctgtgcttaattatcttgatctttcagggaatcagttctctggtgagattccaattgagctgcagaagttgaagcctgatttgttgaatttgtcgaacaatcagctttctggggtgattcctcctctttatgctaatgagaattatagaaagagttttcttgggaatcctggtttatgcaaggctctctctggattgtgtccaagcttgggtggtgagagtgagggtaagagcagaaagtatgcgtggattttccggttcatatttgtgcttgctgggattgtgttaattgttggggtggcttggttttacttcaaattcccggacttcaagaagatgaaa

SEQ ID NO: 243884 - DNA, 412 bp, Glycine max
  unsure (1)..(412): unsure at all n locations
agcggagctgtctgtgcaaatttgcgttgttcttcgcggcacacctcactcactgaacggtaagtatggcggacaaggctgttacaatccgaacccgaaagttcatgaccaacaggcttctttccaggaagcagtttgtcgttgatgtccttcatccagggagggcaaatgtttccaaggctgaacttaaggagaagctggctaggatgtatgaagtgaaagaccctaatactgtatttgtcttcaaattccgaacacattttggaggtggcaaatccactggatttggtttgatttatgatacagtggagaatgccaagaagtatgagcccaaatacaggcttatcaagaacggccttgacaccaacgtagaaaagtcaaggaagcanatgaaggagagaaagaatagagc

SEQ ID NO: 243885 - DNA, 406 bp, Glycine max
  unsure (1)..(406): unsure at all n locations
aggctgatgacccttggttgcctccatgagaagcatcttgaggagcttcttgaatattttcgctttgggctgtggtgggttccccttggggttgcttcttcaattggtcttggatctggtttgcacacatttgtcctatatttgggaccccacatagcactgtttacattaaaagccgtgcaatgtggccgagttgatttgaaaagtgctccatatgatacgacacaattaagtagaagtgcttcttggcttgataaaaactgttctgagtttgggccaccattattccagtcagtatatgattcacaggttccgcttagcagcattttgcctcaagttcagctggaggctattctatggggtattnggacagctatangggagcttcctccttactttatctcca

SEQ ID NO: 243886 - DNA, 434 bp, Glycine max
ctcacgggtcgacacacgcgtcaactcaggttatggttaccttggggtacatgcacagtcaaggtgttcataccctttttatataacattctcaagaaagcaaacttatggtacttttttttttggtctacttacatgatataattattgtaggtgataatgggttaatgaccttaaaaaacaaattataagggagaagttagctacttagtttgagaagaatgatcttcggaagctgaagtacattcttgggatataagttgcctactctaagtaaggtatctttaattctcaaaggaaatatgtgcttgatctccttaaatagactggtaagttgggttgtaagatgtgcttgaccatgtgtacagggcccttaaccagctaaaatactcctaaagaaagacacatcagataaatctggattctaccatatt

SEQ ID NO: 243887 - DNA, 423 bp, Glycine max
ggtatcggtcaggaattcacgggtcgaccacgcgtcaggacaattcgggcttctcgggcccgcgccgcagccccagtttcaacaacacgtggggccgtggcgggagccgtggtggcggtggtgccggtgccggtgccggtagaggggtggtggtgaaggcggagaaagtctgtaattattggattcaggggaattgtagttatggagagaggtgcaagttccttcacacttggagtgtgggggatgggttttctttgctgacccagcttgaagggcatcagaaggctgtgagtgcaattgcctttccctctggttcagataagctgtataccggaagcactgatgagactgcaaggatttgggactgccaatctggaaagtgtgtaggtgtgatcaatcttggtggtgaagtaggttgtatga

SEQ ID NO: 243888 - DNA, 316 bp, Glycine max
gaccttagtggggatggacatagtcttgtgacttacacccaacttgccaactggggtcaatgctcctcatggcagaacttcactgcttctccattcactgctggtgctaaaactatcacgtttgataacccctgtgattacttttcaactggtaaagtgaaagctatgacactgtcactttctgtgttggtagccattgaaatgttcaactctctcaatgccctatctgaagatggaagccttttgacaatgcccccttgggtcaacccttggcttcttttggcaatgtcagtatcatttggtctgcactttttga

SEQ ID NO: 243889 - DNA, 399 bp, Glycine max
ggggagtgaactgaaaaagcataaagtatggcttcgacggcagcgtaccttgctcggtgcgcggcgcagaaggagagggttcggatcctctaccgccgcgccctcaaagacactctcaactgggccgtacatcgccacctcttctacgacgacgcttcaaacctccgcgaaaggttcgaggagaacagacacgtggaagaccctgataccattgacaggctcataacggatgctgaagcttcctacaacaagtggcgccatcccgatccctatattgttccttgggctccctgttggtccaagtttaaccccaaaccaaactccacctcaaaggaattgagaatagttaaaaataagggccgtaaagataatgactgaaaatctaatttaatttttttg

SEQ ID NO: 243890 - DNA, 385 bp, Glycine max
  unsure (1)..(385): unsure at all n locations
gaggaaaagaaagaaatagaacaagaagaaaaaaacacagcgtcctagatttcctcttctctgcttcggaagaaagagaaaacaaacaaaacaatggcgtttgcttctttcctcggcagagtcctcttcgcttctgtcttcatactctctgcttaccaacaatttaatgaatatggagttgatgggggacctgctacaaaagcactcagacctaagtttgatgcctttacacatcgggtgcattctcaagtgggctttcaaattccagagattaatctgaaatttttaattgctggggctattgctctgaagggtcttggangggttcttttcatatttggcagctcttttggagctttgcttctgctcctgcaacagctgattg

SEQ ID NO: 243891 - DNA, 404 bp, Glycine max
  unsure (1)..(404): unsure at all n locations
caaaaaacgacagaagggcaatctgcaatggtttatttgttggcanctgcgaacgagacatggggtgacaaggtttaccgtgagaatcactactacttgcatggttattgggggattttggcggatcgttctgacgagatgactgacacttatcacccggggcttggggatcatacgtggcctctggtgacccattttgtagggtgcaaaccttgtgggaagtttggggattaccctgtggacaagtgcttgatgcatatggatacggcctataactttggtgataaccacattttgcagatgtatgggttcactcataagtcccttgctagccgcaacgtgaacagggtgaggaatgatactatcaaccctcttgaggttaaggatgaccttggattgcttca

SEQ ID NO: 243892 - DNA, 328 bp, Glycine max
gacagacaaacaaacaatttaccagctatacttgttccttttgaaggttagaagtgctacaatacaaacaatggcagctactcaggaagatgtgaagcttttgggtattgtgggaagcccatttgtgtgcatggtccagattgcccttaagttgaagggagttgaatacaaatttttggaagaaaatttgggcaacaagagtgatttgcttctcaaatacaaccctgttcacaagaaggttccagtgtttgttcacaatgagcagcccatagcagagtctcttgtgattgttgaatacattgatgagacatggaagaacaaccccatc

SEQ ID NO: 243893 - DNA, 323 bp, Glycine max
ggttgttgagcgtgcatcagtgtatggttccaggaatatgcttgatcagcaccgagacatgaggatggatgtagataacatgagttatgaggaactacttgcacttggtgagaggattggctatgtgaacacaggagtctctgaggatttgctttccaaatgtttgacggaaacaatatattgttcatctgagcaaagtgaagacgaaggaaactgcgtaatatgtctggaagagtacaagaatatggacgatgttggaacacttcaaacttgtggacatgactaccatgtgagctgcattaaaaagtggctatccatgaaga

SEQ ID NO: 243894 - DNA, 327 bp, Glycine max
  unsure (1)..(327): unsure at all n locations
cgctcaccgcgacataaagcccgcgaacatcctagtaaactccgaaggggatgttaagattgcagacttcggagtcagcaaactcatgtgccgctcgctcgaagcgtgtaactcttatgtcggcacgtgcgcgtacatgagtcccgactggttcgacccggaagcgtatggcgggaactataacggttttgctgcggatatttggagtttgggtttgaccctatttgaactctatgtgggtcacttcccatttcttcaagcgggtcagagacncgactgggctacccttatgtgtgcaatttgcttcggcgaaccgccgaaccttcc

SEQ ID NO: 243895 - DNA, 391 bp, Glycine max
  unsure (1)..(391): unsure at all n locations
gtaattgcaactgtcaaagatgcttgtanagcacctgtggttaagaataaaccacggctggtggaagcaatgtatttttgtgaattgaatacacctactgaatatttgggtcccatgtatgctgtactttcccgaagacgggcccgagtattgaaggaagagatgcaagaaggttcccctttcttcactgtgcatgcgtatcttcctgtttctgagagctttggttttgcggatgagttaagaaggtggacttctggcgccgcaagtgcacttcttgtccttagccactgggaagcacttcctgaggattctttctttgtacctaaaacggaagaggaaattgaagagtttggagatggttctagtgttcttccaaatacggcaagaaaat

SEQ ID NO: 243896 - DNA, 409 bp, Glycine max
gacagacaaacaaacaatttaccagctatacttgttccttttgaacgttagaagtgctacaatacaaacaatggcagctactcaggaagatgtgaagcttttgggtattgtgggaagcccatttgtgtgcagggtccagattgcccttaagttgaagggagttgaatacaaatttttggaagaaaatttgggcaacaagagtgatttgcttctcaaatacaaccctgttcacaagaaggttccagtgtttgttcacaatgagcagcccatagcagagtctcttgtgattgttgaatacattgatgagacatggaagaacaaccccatcttaccttctgatccttaccaaagagccttggctcgtttctggtccaaattcattgatgataagattgtgggtgctgtatcg

SEQ ID NO: 243897 - DNA, 413 bp, Glycine max
gctgctacaattacagttaatcccttgactgcacttctcatgcttgaacactgcgttactttgaactcaggagatgctattgtgcaaaatggggctaccagcatggttggccagtgtgtcattcagattgcaaaatcacgtggcattcacaatatcaatattataagggacaggcctggggtcgacgaagtaaaagaaaggcttaagaatttgggtgctgatgaagtttccactgagagcgaattggaagtgaagaatgtcaagagtctcctgagtggtatacctgaacctgttttgggatttaactgtgttggtggcaatgctgcttctctggtactcaaatttttgagacagggaggaactatggtgacttatggtggaatgtctaaaaaacctgtctctgtgtcaacatc

SEQ ID NO: 243898 - DNA, 418 bp, Glycine max
ggaaccaaacaacaaatattcatggctttctttattctctccttcctcttccttcttcttgtttcatctgccactgcttgtgatcgctgcttgtatcaatccaaggcttcctatttctccaaagcttctgctctttcatctggggcatgtgggtatggctctttggcactagacataagtggtggacaccttgcagctggtgtggattctctcttcaaaaatggagcacgttgtggtgcctgctttcagataagatgcaagaacccaactctatgtagcaaagaaggtaccaaagtggtattgactgatcttaatcacaacaatcaaactgattttgtgctaagcagcagagcctttgcgggcatggctcaaaagggtatgggccaacaaatactgaagcttggcattgctgaaattt

SEQ ID NO: 243899 - DNA, 404 bp, Glycine max
cataacgcagggtttctcttcgagtaactttctcggagaaggaggtttcggacccgtgcataagggcttcattgatgacaagcttaggcctggtctcgaggctcaaccggttgccgtcaagcttttggacttggacggttctcagggccataaagagtggttgactgaagttgtgtttctgggtcaactaaggcatccacatctcgtgaagctgattggatattgctgtgaagaagaacacaggcttctggtatatgagtatttaccacgaggcagcttagagaatcaactatttagaagatatacggcatcgttaccatggtcaacaagaatgaaaattgcagctggagctgcaaagggtctagcctttctacatgaagcaaagaaaccagtcatctatagag

SEQ ID NO: 243900 - DNA, 292 bp, Glycine max
gagagaaagagagagaaagatgtcgaagcgtggtcgtggtggttcggcggggaacaagttccgcatgtcgctgggtcttccagtggcggcgacggtgaactgcgccgacaacacgggggcgaagaacctctacatcatttcggtgaaagggatcaaaggccgtttgaaccgtcttccctcggcctgcgttggcgacatggtgatggccaccgtgaagaagggaaaacccgatctgaggaagaaggtcttgccagctgtcatcgttcgccagcgcaagccatggcgccgaaag

SEQ ID NO: 243901 - DNA, 504 bp, Glycine max
taacgttaccctgcagtagccgtccataattcacgggtccacccacgcgtccgtactgctgcgagaagacgacagaagggtacggctgccagaagactacagaagggtacggctgcgagaagacgacagacaggtacggctgccagaagacgacagacgggtacggctgcgagaagacgacagaaaggtacggctgcgagaagacgacagaacggtacggctgcgagaagactacagaatggtacggctgccagaatacgacagaacggtacggctgcgagaagacgacagacgggtacggctgccagaagacgacagaatggtacggctgccagaaaactacagacaggtacggctgccagcagacgacagactggtacggctgccagaaaaccacagaagggtacggctgctacaagacgacagaagggtaccgctgccagaagacgacagaacggtacggctgccagacaaccaccataaggtacagctgcgagaatacag

SEQ ID NO: 243902 - DNA, 315 bp, Glycine max
  unsure (1)..(315): unsure at all n locations
gaacacaacctggggtgttaaatagaaaagaggagtttgagaatggcaacgatcagcgcggttcaggtggagttcctggagtttccagcggtggttacttcaccagcctccggcaagacctatttcctcggcggcgcaggggagagaggattgacgattgaggggaagttcataaagttcacaggcatangagtatacttggaggataaggcggtgccatcactcgccgctaagtggaagggtaaaacttcagangagttagttcacaccctccacttctacanggatatcatttcagggccgtttgaaaagcta

SEQ ID NO: 243903 - DNA, 369 bp, Glycine max
gacccagttgcagaaagaaaagaccatcaaagtttcacttcagccttatccggtttagggtttcggtttttgacccaacctttgacgtatcgaaaccttaagtttcggatcaggtctgagcaatctggttggtagaacctttggtcttagagagtcaagttttatgtctgaattagacgatcaaattcctactgccttcgatccttttgctgatgcaaatgctgatgactcgggtgctgggtcaaaggagtatgtgcatattcgcgtacagcagcgaaatggaaggaaaagcctgacaaccgttcagggattgaaaaaagaattcagctataacaagatacttaaagatgttaagaaagagttctgttg

SEQ ID NO: 243904 - DNA, 203 bp, Glycine max
gatggtcctgcattttctagtttgccatacctgcaagagctttacctaaggagaatgaggctcagtgaagtcccatcagatatagtggggctgcatcagctacggatccttgacttgagtcagaattcccttcaatcaattccagtggggctaaaagctctcacttctctccaggaacttgacctatccaataacaacattgc

SEQ ID NO: 243905 - DNA, 503 bp, Glycine max
aacgttacctgccaggccggtccagaattaccgggtcgacccacgcgtccgaacggtgcgaaagacgacagaagggtacggctgcgagaagacgacagaagggtacggctgcgagaagacgacagaagggtacggctgcgagaagacgacagaagggtacggctgcgagaagacgacagaagggtacggctgcgagaagacgacagaagggtacggctgcgagaagacgacagaagggtacggctgcgagaagacgacagaagggtacggctgcgagaagacgacagaagggtacggctgcgagaagacgacagaagggtacggctgcgagaagacgacagaagggtacggctgcgagaagacgacagaaggggtaaaaagggaaagaaaataaccttaacaaaaaaaacatcacctaaaaaaaaaaaaaaagcggccgctctagaggatccaagcttacgtacgcgtgcatgcgacgtcataactcttccacattgtcacct

SEQ ID NO: 243906 - DNA, 417 bp, Glycine max
gagacaaacaaacaatttaccagctatacttgttccttttgaaggttagaagtgctacaatacaaacaatggcagctactcaggaagatgtgaagcttttgggtattgtgggaagcccatttgtgtgcagggtccagattgcccttaagttgaagggagttgaatacaaatttttggaagaaaatttgggcaacaagagtgatttgcttctcaaatacaaccctgttcacaagaaggttccagtgtttgttcacaatgagcagcccatagcagagtctcttgtgattgttgaatacattgatgagacatggaagaacaaccccatcttaccttctgatccttaccaaagagccttggctcgtttctggtccaaattcattgatgataagattgtgggtgctgtatcgaaatctgttt

SEQ ID NO: 243907 - DNA, 349 bp, Glycine max
ggcatttgtagcaatttttgtgtaactcaaagccaggagacaaaattcagatcacaggcccgtcggggaagataatgcttttgcccgaggatgacccaaatgctacccatataatgattgccacaggcactggtgttgctccattcagaggctatctacgccgaatgttcatggaatcagtccctgcatacaagtttggtggattagcatggcttttccttggagttgccaacactgacagtcttctctatgatgatgaattcagcaaatacctcaaggattatccggacaatttccgctacaatcgagccctcagcagagaacaaaagaacaagaattggggcaaaat

SEQ ID NO: 243908 - DNA, 417 bp, Glycine max
  unsure (1)..(417): unsure at all n locations
taacatacaattatggggtgacctcatatgatattggaactggatttggacattttgctatcgcaactccagatgtttacaaattggttgaagacatccgggctaagggtggaaatgtcaccagggagcctggtccagttaagggtgggaaatctgttattgccttcgtgaaggatcctgatggttatgcttttgagctcattcaaagaccttcaacccctgaaccattgtgccaagtaatgcttcgcgttggtgatttagagcgctcaattaagttttatgaaaaggctttgggtttgagggtggtaaagaagactgatagacctgaatacaagtatactatagctatgcttgggtatgcagangaacatgagacaactgtgttggagctgacatataactatggtgtcactgaat

SEQ ID NO: 243909 - DNA, 382 bp, Glycine max
gggagtcacacacacactctctctctctctcttgaccaaaaaaatcaacaacataccaagctagctaacatgcaggaggacaagaagatgaaggtgaagaaaggattcctcgctgttcaagtgggtttagaagacgacgacgaaggtggctcttcccctcaaagattcgtgattcctatctcatacctttatcaccctctcttcgagcgccttctggacaaggctcgtgaggtttacggctaccacaccgatggcccactcaagctcccgtgctccgtcgacgatttcctccatctccggtggcgaatccagaaagagtccactcctaaccaaaaccaccataaccagagccaccatcggccttcaacacgctctgcaactc

SEQ ID NO: 243910 - DNA, 417 bp, Glycine max
gatcatggtcttagcagctgttcctttccatttatagttgcagagcaagaagtttgttcggagatctgcaagctggaaaatgtgattgaggaagctgaaaccactgatgatatccagataaaaaaccaacatatggaagaaaagactcaagctttggatttcttgcaagaaatgggttggcttcttcatagaagtcatgtgaaatttaagctaggttccatggctcctttccatgatctcttccaattcaatcggttcgcttggcttgttgacttctccatggaccatggttggtgtgctgtgatgaagaaactcttggacattatatttgagggtggtgttgatgcaggagagcatgcctccattgagcttgcattgttgaacatgggtcttctacacagagctgtaaagagaaac

SEQ ID NO: 243911 - DNA, 414 bp, Glycine max
ggaaagagaaagagaatggaaaagagggtagcaatattacaggaatggtttgaccgcgttgactcggagaaaagtggaagcataacagcggtgcagctaaagacagctcttgctgtgggcaacctggaatttccgctctcagtggttcagcaaatgatcaggatgtacgatttcgaccggaatggtactatgagctttcaagaatttgtttcactcaacaacttccttcttaaggttcaacatgcattttctgatctagagaggggtcgtggttttcttgtacctgatgatgtatttgaggctttggtaaaaattggtttcatgctggattctcctgctttttactctgtctgtgagagcttcgatcaaagtgaaaatgggaggtttcagctggacaacttaatatcaatctgt

SEQ ID NO: 243912 - DNA, 93 bp, Glycine max
gaatggtccggtgaagtgttcggattgcggcgacgtgagcggttcgctgcccgcgacgttgtgagaagtccactgaaccttatcatttagagg

SEQ ID NO: 243913 - DNA, 320 bp, Glycine max
gaagatgctcatctttgatccaaacaggcgtattacagttgacgaggcgttgagccacccatacatgtcacctctccatgacatcaatgaggaacctgtttgcaccagacctttcagttttgactttgagcaaccatcattcactgaagaagacatcaaggaactcatctggagagaatctgtgaagttcaatcctacaaccatatatgtttagtgaaatatctgatgactaatatatacattttatgaccactacttggcaagttgcagcgcacagaagatatgaaaacgtattggagatactgagattcactgaattt

SEQ ID NO: 243914 - DNA, 396 bp, Glycine max
gacaaaacaagtgtttcgaatagattatcctaagtctttgggaatagtgctgcaatggcttcaagtcaggaggaggtgacccttttgggagctactggaagcccatttgtgtgcagggttcatattgccctcaagttgaagggagttcaatacaaatatgtcgaagaaaatttgaggaacaagagtgaactgcttctcaaatccaacccagttcacaagaaggttccagtgtttattcacaatgagaagcccatagcagagtctcttgtgattgttgaatacattgatgagacatggaagaacaaccccatcttgccttctgatccttaccaaagagccttggctcgtttctggtccaaattcattgatgataaggtttttggtgctgcatggaaa

SEQ ID NO: 243915 - DNA, 406 bp, Glycine max
ctcttcctacttgaagaaagtaggatacaaccctgacaagattccttttgttcctatctctggttttgagggagacaacatgattgagaggtccacaaaccttgactggtacaagggtccaactctgcttgatgcacttgaccagattagtgagcccaagaggccctctgacaagcccctcaggcttccccttcaggatgtgtacaagattggaggtattggaactgtgccagtgggacgtgttgagaccggtgtcttgaagcctggaatggtggtgacttttgcaccaactggactgacaactgaagtcaagtctgtggagatgcaccatgaatctcttacagaggcacatcctggtgacaatgtgggattcaatgttaagaatgttgctgttaaggatttgaag

SEQ ID NO: 243916 - DNA, 241 bp, Glycine max
  unsure (1)..(241): unsure at all n locations
agggaagggatattttgaggacagaaggccagcttctaacatggacccatatgtggttacttccatgattgcagacacaaccattctgtggaagccatgagcaaaacttgcatgttgtctccctttggatggaacaaggaacaaggaacaaggaacaaggaacagttatgcttttctaagtanggtttggtcctttttattttttaccttttgatttttctaggatttcgatttgtggcta

SEQ ID NO: 243917 - DNA, 393 bp, Glycine max
ggttccaagtcgcaaacaaagtaacactagaactcacaaaggacagaagaaacgcgaatgccaggagaactccaattaccacccgggttcagattccaccccactgacgatgagcttgtgaatcactacttgtgtagaaagtgtgctgcgcaaaccattgctgttcccatcatcaaagaaatcgatttgtacaagtttgatccatggcagcttccagagatggctctttacggtgagaaagagtggtactttttctctcctcgagaccgaaaatacccaaacggttcgagaccgaaccgggctgccggaagcgggtactggaaggctaccggagctgacaaaccgatcggaaaaccgaaagcccttggaatcaagaaagccctcgtgttctac

SEQ ID NO: 243918 - DNA, 359 bp, Glycine max
gaaataatgatgatgattttgagccccctttaattccttaccatagcgaaattcccaggattcgtctctttggtgttcttggtgtaacatacttcatacttgctccactgatactgccatttctcttgatctacttttgtttgggatacatcattttccgcaatcagctgctgaaagtttacgttccaaagtatgagactggaggagagttttggcctacagtgcacagctccacaattttttcattgatactgatgcatataatagccattggtctttttggtttgaagaagcttcctctagcatccatattgattcttcctctttcaattctcacacttctattcaatgagtattgc

SEQ ID NO: 243919 - DNA, 356 bp, Glycine max
ggagctttagattcttttcccctagattcagccacagttggaaaaaaaaaaaaagttgttcgagatggcacgtacgaagcaaactgctcgtaagtccacaggaggaaaggcacctaggaagcagctcgcaaccaaggctgcacgtaggtctgcaccaactactggtggtgtgaagaagccacatcgttatcgtcctggtaccgttgctcttcgtgagattaggaaataccagaagagtaccgagcttttgattaggaagctccccttccagaggctggttcgtgaaattgctcaggacttcaagactgatctgcgtttccagagccatgctgtgcttgcattgcaagaagctgctg

SEQ ID NO: 243920 - DNA, 411 bp, Glycine max
gactgaatcaagacattaatggcattatatatagtttgcatatctttgaagatatgggtttccattgtgaggaaaaggatagcatacatctgcaaccttgcgcagcttgcaggatgttacgccgcagatgtgacagtaagtgcgtacttgcttcatatttcccaaccaatgaggttgataaatttgctggagtgcatagagtgttcggtgctagcaacgttatcaaaatgattcagatggtcgaggaaacaaagagaggggatgctgttaaagcgatggtgcacgaggcgacggcaaggctcagagacccagtttatggcagtgctggagctatttatcagttacaaaagatgattgaggaactgaaagcacagctggagtccataaaaactcctgtgtcagaacaaaaag

SEQ ID NO: 243921 - DNA, 376 bp, Glycine max
  unsure (1)..(376): unsure at all n locations
aaggttaagggtgaggacttcacgcggcacattagcaacgtggagacatgggtcagttctgctttgaccgatgagagcacttgcggcgatggattctccgggaaggcgctgaatgggaagatcaaggactctattanggctaggatgctcaatgttgctcaggttactagcaatgctctctcgcttattaaccactatgctgcacaacactagttgggaacaatgatcttggttgcttaatgctttacttttcttcttttatgtgctctatgtaattattatatatgtgagtctttatagatatatggatcttctcatgcttcttaaatgtgaaatatgacgttgtgtttttctatgattaaaaaanannnnnnna

SEQ ID NO: 243922 - DNA, 377 bp, Glycine max
gagatccatgagagccaagaagatcatgaactaacatatgctctaacccctgcatcaaagcttcttgtcaatagtagtgatcattgtctatctccaatggttctagcgtttaccgatccacttcggaacgttaaataccatcacttgggggaatggattcgtggggaggacccctcagtatttgagacagcccacggaacaagcgcttggggacttcttgagaaaaatcctgaatattttagtctcttcaatgacgctatggcaagtgattcccgaatagtagacttggcactcaaaaattgcacttcagtttttgaggggctagattccatggtggatgttggtggtggaactggaaccacggccagaattatctg

SEQ ID NO: 243923 - DNA, 403 bp, Glycine max
gaaggaaaaaagagtgacactcattttaaacggaaattgctttagcataaaagagttcaagaggaggaagaacaacaagtagtaataactatatctacatagttatctttctcttgagctttgtaatttgaaacctatagatggaatggaggaagtgctacttggatgttatattggtgcccttggtgtttctaacaagcattgggtaccatttctggctatggcataaggttcgaactcagccacacacaaccatcattggcatcaatgctagtggccgtagaaattgggttaatgccatgatgaaggacaatgacaagaaaaacattctggctgttcaatcactaaggaacacaatcatgggtgctaccctaatggccacaacctccatccttctatgctc

SEQ ID NO: 243924 - DNA, 393 bp, Glycine max
  unsure (1)..(393): unsure at all n locations
accacgcgtccgcccacgcgtccggggaagtgggtggcggagatcagagaacccaacaaaaggtcgaggatatggttgggttcttacacgacacccgtggccgccgcacgtgcctacgacaccgctgtcttttacctccggggtcccaccgcgcgccttaacttccccgaactcttgttccaggacgacgaccaggagggcagtgattcggtgcagcacggcgcagcagggaacatgtccgctgattccattcgccgaaaagccacgcaagtcggcgccagagtcgacgctctccaaaccgcgcttcaccaccacgcgccaagtaccaactctctcaatctcaagcccgacttgaacgagtttccanaactcgaagagcttcangattgatat

SEQ ID NO: 243925 - DNA, 338 bp, Glycine max
agtatatcggtggcaccaaatacatggtcatccagggtgagcctggtgctgtcattcgagggaagaagggtcctggtggtgttactgtgaagaagaccggtgcggccttgatcattggcatttatgatgaaccaatgactccaggtcaatgcaacatggtagttgaaaggcttggcgattatctcattgatcagggtctctaatctttgctttatgtcctgttatcgtgcatatttcattggcttctgtacaagtttttgcatcgacctggactggaatgctttgattgcagtgtaataatcttgttgtgagtatgaaaagtcacgggatctgcgtgt

SEQ ID NO: 243926 - DNA, 288 bp, Glycine max
agagtatatcggtggcaccaaatacatggtcatccagggtgagcctggtgctgtcattccagggaagaacggtcctggtggtgttactgtgactaagaccggtacggccttgatcattggcatttatgatgaaccaatgactccacgtcaatgcaacatggtagttgaaatgcttggcgattatctcattgatcagggtcgctaatctttgcattatgtcgtgttatcctacatatttcattggcttcctgtacaagttattgcatccacctgtactcgaatcctttg

SEQ ID NO: 243927 - DNA, 501 bp, Glycine max
taactgtcacgcctgcaggtaccggtccagaattcccgggtcgacccacgcgtccgcccacgcgtccgagacgacagaagggaagacagaggaggaaaaggaaaaggaaaaggagagtggtgctcattgatatttaagattgagacaaggcttttttgttggttggagatgcatgattgtggtgtgctttgttttcatttcatcatatgacagccttgtgggtttctttggtgtttcttgatgcatacttaatttactttattattgtgtatttatctcttccatttacaaaaaaaaaagtttgtgtaggtttccttctttgaagtaagaagaaattaaatatgtactgaaaatggaataatagtgtgttttatttgtgtgtaaaaaaaacgagaagaacaacgaaaaaaagcggccgctctaaaggatccaagcttacgtacgcgtgcatgcgacgtcatagctcttcaatagtgtcacctaaatttaattcactggccg

SEQ ID NO: 243928 - DNA, 412 bp, Glycine max
cacaacgagacagtcaagcactggacttataccatagatggtaaggttacaacatgtctggagagtattgagtccattgatgcacagagcaaaacaatcacctacaagctcttcagtggtgacattgatcataattataagaactttaagttcatctttcaagccattgatgataatgatcatggcggtactattatcaaatggaccgttgaatacgagaggcttcgtgaggaggttgatcctccatatggccacattgaatacctgcacaaatgcactaaagatattgatggtcatcttctcaaagcatagctagctctaaaagttatgcactaaaaaataatgggcttgacctttggataagtgcttatatgtataataaaatcggtgtgaagtttgacgagaagaatgc

SEQ ID NO: 243929 - DNA, 411 bp, Glycine max
  unsure (1)..(411): unsure at all n locations
gaggtttgtgattgtctttgcctcactttgctgccgtacctaatcggagagctcccgctgactgcgatcggatttcatggctcctaagaaagacagggctcccccaccttcatccaagcccgccaagtctggtggtgggaagcagaagaagaagaagtggagcaagggaaagcaaaaggagaaggtgaataaccaggtgctgttcgatcaggctacctatgacaagctcctctccgaggcacccaaatacaaactcattactccttcgattctctctgaccgtttgaggattaatggatcacttgcaacgaaggctattanggaattgatggccagaagttcaataaggatggtgtctgcccatgctagtcagcagatttacactacagcgacaaacacctagatgtactg

SEQ ID NO: 243930 - DNA, 402 bp, Glycine max
ggaacgaagacagcgaaggagctacgctgcgagatttagaaattgaatccctaatttcgaggttccgactcctgtggagtgatcatatagcgaattttgtgttagcgaatcaatttgcagagtaaggaataaggatgggaaaaaaccaagcctacaaagctatgcagagagccaggctcggcggcgcctccgccggccccgacgaggttgaagacggcatggtggatggttcatttcattcaccagaatggcatgcagctcgtttggctagccttaacacctctcacaccattatctgggaggagtacaaaatgaagcaaaaggaagaagaattgagaaaaggggaattggaagcagatgcagataggatgatgagagagtacagagctcaactagatgctg

SEQ ID NO: 243931 - DNA, 385 bp, Glycine max
gatagcgaaacagagagtggtttcagtgagtgatcggtgttcacttgatccttcataagtcgtcatcatcatcgtcatcatcaccgttgattgaagaagatgccgatcagaaacatcgccatcggaaggcctgaagaggctactcaccccgacacgttgaaggcggggttggctgagttcacctccaccttgatcttcgtgttcgccggttcaggttccggcatcgcctacaacaagctcaccgacaacggcgccgccactcccgccggcctcatctccgcttccatcgcccatgctttcgccctcttcgtcgccgtctccgtcggcgccaacatctccggcggccacgtcaacccggcgttaaccttcggggccttcgtgggcg

SEQ ID NO: 243932 - DNA, 405 bp, Glycine max
gagagaaagagagagaaagatgtcgaagcgtggtcgtggtggttcggcggggaacaagttccgcatgtcgctgggtcttccagtggcggcgacggtgaactgcgccgacaacacgggggcgaagaacctctacatcatttcggtgaaagggatcaaaggccgtttgaaccgtcttccctcggcctgcgttggcgacatggtgatggccaccgtgaagaagggaaaacccgatctgaggaagaaggtcttgccagctgtcatcgttcgccagcgcaagccatggcgccgaaaggacggcgtctacatgtacttcgaagataatgctggtgttattgtcaatcccaagggagaaatgaaaggttctgctatcactggtcccattgggaaaagagtgtgctgatttgt

SEQ ID NO: 243933 - DNA, 387 bp, Glycine max
tgaggatgattcaccaatatttaggaacaaagagaagctattggtcacttgctctaggcgcatcaattacaggtaccggcatttgatgttgaatttggtcacacttttgcctcattgtaagaaggataacaaagttgaatcaaaggaaactaaaggagccaccctcaacgagcttgttgagctaaaaaattgttcctcttgtttattttttgagtgcaggaagcataaagatctttatctctggatggcaaaatgccccaatggcccatctgtaaagtttctagttagtgccgttcacacaatggaggaattgaagctaacgggaaatcacctacaaggttcgcgtccaattttgacattttcaacaaatttttgaaaaagatgcac

SEQ ID NO: 243934 - DNA, 304 bp, Glycine max
  unsure (1)..(304): unsure at all n locations
cgagcagcgtgatttcgagattggaagatttggcgaaggcgttgaattcgacgtgaagaagagcgagactaaggtgaggttgcanggtcaagaaaaagggcgaaaaggtaaactcgctattgctgcggacttgtacgccgtgacgccgtcgtttttggtggtggaggttaagaaggacaacggtgacaccttggagtataaccagttctgtagcaaggagcttcgtccagctcttaaagatatcgtgtggaggacttctcctgtagagaatcctacactcgcttgaagaacaaccaagactccc

SEQ ID NO: 243935 - DNA, 414 bp, Glycine max
gaaaaacaagtgtttcgaatagattatcctaagtctttgggaatagtgctgcaatggcttcaagtcaggaggaggtgacccttttgggagctactggaagcccatttgtgtgcagggttcatattgccctcaagttgaagggagttcaatacaaatatgtcgaagaaaatttgaggaacaagagtgaactgcttctcaaatccaacccagttcacaagaaggttccagtgtttattcacaatgagaagcccatagcagagtctcttgtgattgttgaatacattgatgagacatggaagaacaaccccatcttgccttctgatccttaccaaagagccttggctcgtttctggtccaaattcattgatgataaggtttttggtgctgcatggaaatccgttttcacagctgatg

SEQ ID NO: 243936 - DNA, 414 bp, Glycine max
ggcagggtaaaagtaacggagtttttgttgcttggttactctgatattctgcattttctcgtttagttttcttcagcattcaacaaacttcttcaccctctctatcttccaatcctttttttccattccctactattccctatcatctttctttgtgttctcatctttttccttttcccaaggttcgttgtttcttcttcttcttcttcttcttcttcttcttcttgctgttttttccttctaattctcacttctctttcttcaatttttccccttttgggtgatcggggatttttgtgcctggatatgggtttagggttttttctttaatgatcattggtgtgcatgtttcaagtttgatgtattggcagtggaaatcaagggttctttttgtgttattggatgcaaaagttt

SEQ ID NO: 243937 - DNA, 411 bp, Glycine max
gggagaacataaacaagtacttcaagaggataaaggagaagagcaagaggaagcctcaggattccaagacgtgtccttattatcatcaccttgaggctttgtacagtaagaagcctaagaaggtggatcttgggaacgagttgaagcctgaggagctgttgatgcatatcatggtgagtcaaagtcaagaacagcaacagcaacaagagatgcagactcagactcagtcaccatctgaagatgctgagagagatcagaatcagggagataatgaagatcaaagtgagtatcagaatcagatggttgataataatagtccttccattgcaattatgagttaaaaagcttggtttcaagagattctttctttagtatgctaaaattgaacatcttctctgatgacaaccaacg

SEQ ID NO: 243938 - DNA, 397 bp, Glycine max
  unsure (1)..(397): unsure at all n locations
gataaaactttgacggtggaaaccttgggttttccggatccctaacctaaattaatttaatcaacaagggctcgttctatcgctaacgccaagactttctccgctctcgtgctagacggattctccaacactctcaccagacgtggctactctcaaagcgcaacaaggggaggagttgcctccatagcacccaaatcaggggaagacaaaggtgtctcatcatacaaggtttcctgngtgccagattccgtcaccggttactacanaccggaaaacatcaaggaggttgatgttgccgatttgcgtgctacccttctccgcaaaaaattcaacaactaatttcaacaatttaaattttttacaaaaccttggttaatggatccgtaagggaattaat

SEQ ID NO: 243939 - DNA, 297 bp, Glycine max
gtctggatcattcatgcctactgataaccaaggaacaagaagcaggactggtggaatgtcggtctcgttggctagccctgatggccgtgttgtaggtggcggagttgctggtcttcttgtagctgccagccctgtgcaggtggtggtgggaagctttttaccaagcagccagcaagaacagaaaataaagaagtcaaagtctagcgattatggagtagcaactgttactccaaccattgcagtgtctcctacaccaccacctccaaccaatgccgaaaaagaggatgtgaatgttat

SEQ ID NO: 243940 - DNA, 403 bp, Glycine max
gggttgcactttggtaaggtgagagaataggaaaaagggaaatatggcatttgcaggaacaactcagaagtgcatggcttgtgacaaaacagtttatctggttgataagttgacagcagataaccgagtgtaccataaggcttgcttcagatgccaccactgcaaaggaacactcaagcttagcaactataactcttttgagggggttctttactgcaggccacacttcgaccaactgttcaaaagaactggtagtcttgacaaaagcttcgaagggacaccaaaaattgctaaaccagaaaaaaccggggaagagaaacctgcagcaaccaaagtctcaagtatgtttggtggaactagagataaatgtgccggttgtcaaaaaacagtgtatcccactgaa

SEQ ID NO: 243941 - DNA, 384 bp, Glycine max
  unsure (1)..(384): unsure at all n locations
gggacatgttctacacattcccttttgatgactgagaataaagtagataatgtggagaatgtagacttgccaggaccatcagaactaaaggagataaagtcacccaatgtgatccagcagcagaagaaaagggtaaggtttttggtaccagagagtccaaagattgacacaagtgtaatggaagagttggaggaggtgatggaagcctgngaggctggggtagcttacattgtaggacagacacacatgagagcaaaatcagggtctagcatgttgaagaaaataggcattaatttagtgtatgaattccttagaagaaatagcaaggcaccctcctttgttactggtgtgcctcatgcatcatctctggaagttgggatgatg

SEQ ID NO: 243942 - DNA, 401 bp, Glycine max
  unsure (1)..(401): unsure at all n locations
gtctcatganggcttacgatgttatgattgctggaaaggtggctgttgtggctggatatggtgatgttggcaagggttgtgctgctgcaatgaagcaggctggtgctcgtgtcatcgtgaccgagattgatcccatctgtgcccttcaggctctcatggaaggccttcaggttctgaccttggaggatgttgtttctgaggctgatatctttgtcaccaccaccggtaacaaggacatcatcatggttgaccacatgaggaaaatgaagaacaatgcattgtttgcaacattggtcactttgacaatgagatcgacatgcttgggctggagaactaccccggcgtgaagcgcatcaccatcaagccccaaactgacagatgggtcttccctgagaacaaca

SEQ ID NO: 243943 - DNA, 370 bp, Glycine max
gaagcgaagggaaagggttaggcatcattcatacactgaacgaacgcccagctcagtcaggtgccggcgttcctctttcacgttctcatggaaaacgacgacgtcgacatgcacgctgccgacaccagcgaagaattggatgacatgaagaagcgcttgaaggagatggaagatgaagctgctgctttgcgagagatgcaggccaaggtcgagaaggaaatgggatctgcgcaagatcctgcaaatgcttctgcaagtcaggccaataaagaggaaatagattctcgatcagtctttgtaggcaatgtggactattcatgcactcctgaagaagtgcaacagcaatttcaatcctgtggaacaagtaaca

SEQ ID NO: 243944 - DNA, 506 bp, Glycine max
  unsure (1)..(506): unsure at all n locations
taactgtgacgccgtcangtaccagtcaagaattcccgggtcgacccacgcgtccgaccacgcgtccgtacggctgcgagaagacgacagaagggtacggctgcgagaagacgacagaagggtacggctgcgagaagacgacagaagggtacggctgcgagaagacgacagaagggtacggctgcgagaagacgacagaagggtacggctgcgagaagacgacagaagggtacggctgcgagaagacgacagaagggtacggctgcgagaagacgacagaagggtacggctgcgagaagacgacagaagggtacggctgcgagaagacgacagaagggtacggctgcgagaagacgacagaagggtacggctgcgagaagacgacagaatggtacggctgcgagaagacgacagaatggtacggctgcgagaagacgacagaagggtacggctgcgagaagacgacagaatggtacggctgcgagaagacgacagaagggtaccgg

SEQ ID NO: 243945 - DNA, 342 bp, Glycine max
  unsure (1)..(342): unsure at all n locations
ggttctagtgtgtgattgtttgttgttgtaactcgttcttcttcttttgttgttctgtgtttgtgtttgttttttctctcacctgaaaatgtcttgctgcggtggtaactgtggttgcggaagctcctgcaagtgcggcaacggctgcggaggctgcaagatgtacccagacttgagctacactgagtcaaccaccaccgagaccttggtcatgggagtggcacctgttaaggctcaatttgangggtgctgaaatgggtgtgcccgctgagaacgaaggcttgaaattttgaacaaaatggttctggaaacctggaatttccaattaagtttttggaaaac

SEQ ID NO: 243946 - DNA, 339 bp, Glycine max
ggaatctagtgagagagagcagaggaaaaggggaagaaaaatgttgagtgcgacggcgatcggcgcgttattgggtttgggaacccagatgtactccaatgctctccgcaaactcccctacatgcgccatccgtgggagcacgtggtcggaatggggttgggcgcggtgtttgtgaaccagcttctgaaatgggaggcccaagtggagcaagacttcgacaagatgctcgaaaaggccaaagccgccaacgaaagacgttatatagatggagatgatgattaatgcatgtcttcatggattgtggcagttggtgaaaataaccatgaaatatgttgaac

SEQ ID NO: 243947 - DNA, 353 bp, Glycine max
gacagcaacaaacatcttcacaaactagtaatattattcttcgaatccactttattattcataatgggtattttcacatttgaggatgaaaccacctcccctgtggctcctgctaccctttacaaagctctagttacagatgccgacaacgtcatcccaaaggctgtcgaagccttcaggagtgttgaaaaccttgaggggaacggtggccctggaaccatcaagaagatcactttcgttgaggatggagaaagcaagtttgtgttgcacaaaatagaatcagttgatgaggcaaacttgggatacggctatagcgtagttggtggagttgggttgccagacacagtggagaa

SEQ ID NO: 243948 - DNA, 375 bp, Glycine max
  unsure (1)..(375): unsure at all n locations
gggtgctgcatggaatgctgttttcacggttgatgagaaagagcgtgagaagaatgttgtagaaacatatgaggctctgcagtttcttgagaatgagatcaaggacaagaaattctttggaggagaagaggttgggttggtagatatagctggtgtctacatagcattttgggtccctttgattcaagaaattgcagggttggagctattaagcagtgagaaatttcctaagctttacaagtggagccaagaatttgtgaaccatccaattgtcaaagaaggtcttccccctagagacccagtttttgcctttttcaaaggacgctgtgaaagcctttctgcttcaagatanatttgatgtantgtgagactctc

SEQ ID NO: 243949 - DNA, 374 bp, Glycine max
catgaaggtgcaaaagtgattgagaagcatgctgcacaactctgtgttcttgcagaagactgtgaccagcctgactatgttaaactggttaaggccctttgtgcagagcacaatgttagcctgctgacagttccgagtgcaaagacccttggagaatgggctggtttgtgcaagattgattccgaaggaaaagcaaggaaggttactggttgctcctgtgtggttgtgaaggatttcggtgaggagcatgaagcctataacgtcgttctgcagcatgtgaaatctcaatgagttgcaagattcatagattttatgcacttcacattttcattttgggttattccttgagaatgaattttgccttgtggctggat

SEQ ID NO: 243950 - DNA, 326 bp, Glycine max
gaatgttgagataaaaatgatgacgttcggcccagaacatcaaaataaggcagtgtttttagtggtgaatgcttgctccagcaaggattttacaaataatgtagttggagtgtgctttgttggtcaggatgttactggtcaaaaaattgtaatggacaaattcatcaacatacaaggtgactacaaggctattgtacatagcccaaatcctttgatccctcccatttttgcatcggacgataacacatgttgcttagagtggaacactgcaatggaaaagcttactggttggggccgtgtggatgttcattggaaaatgttggtgg

SEQ ID NO: 243951 - DNA, 367 bp, Glycine max
gaaggaggtggtgaaccacccaagggttcactgggatgggctattgacacacattttggttcttttgaagcattaatacaaaaagttaacgcagaaggtgctgcactacaggggtctggatgggtgtggcttggtctggacaaagagttgaagaggcttgtagttgaaaccactgccaaccaggacccactggttactaagggaccaaatttggttccattgattggtattgatgtttgggagcatgcgtactacttacagtacaagaatgttagaccagactatcttaagaacatttggaaagttattaattggaaatatgccagtgaagtgtatgagaaagagagctcttagtctgaaggagcta

SEQ ID NO: 243952 - DNA, 361 bp, Glycine max
  unsure (1)..(361): unsure at all n locations
gagagtggtggagtgtgcaaaagagcgtcgtagtcgcaaccctaatcagaagaagcgcagcttcaagcgagtgacagccaccagccatgggtcgtatgcacagccgcggtaagggtagatcctcttctgctttgccctacaaaaggacacctcctagctggctcaagatctcttcgcaagatgtcgaagaaaatatctgcaagtttgcgaagaaaggtttgaccccgtctcagattggtgtcattctcagagattctcacggtattgctcaggtcaatagcgtcactggcagcanaatccttcgcatcctcaaagctcacggacttgcgcctgatattccagaggacctgtaccatttgat

SEQ ID NO: 243953 - DNA, 379 bp, Glycine max
  unsure (1)..(379): unsure at all n locations
gaagatcattcgctacaaaaggcggacgtgtacaagacactcagtggtcacagagctggtgaggctgccattgtctatgaacatggagctgatgttgggacactaatgccaaaactacggcgatctgattactacacactgcctcgtatacatgaactggcggccaaggaaagagctgaatcaggattctgcagtcatgttaaggacttcgtggttggaaggcaaggttatggcagcatcagattcttgggtgagacggacgtgcgacggctcgatcttgagtcgctcattcagtttaacaaccgggaggtgattgtatacatggatgatttanagaaacctcctgttggacaagggctgaataagcctgctgaggtga

SEQ ID NO: 243954 - DNA, 347 bp, Glycine max
ggttctagtgtgtgattgtttgttgttgtaactcgttcttcttcttttgttgttctgtgtttgtgtttgttttttctctcacctgaaaatgtcttgctgcggtggtaactgtggttgcggaagctcctgcaagtgcggcaacggctgcggaggctgcaagatgtacccagacttgagctacactgagtcaaccaccaccgagaccttggtcatgggagtggcacctgttaaggctcaatttgagggtgctgaaatgggtgtgcccgctgagaacgatggctgcaaatgtggaccaaactgttcctgcaacccctgcacttgcaagtgaggtgttgggagagcaagct

SEQ ID NO: 243955 - DNA, 337 bp, Glycine max
  unsure (1)..(337): unsure at all n locations
tgctttgtggaagtttgaaacaacaaagtattattgcacagttattgatgcgcctggacatagggatttcattaagaatatgattactgggacatcncaagctgactgtgctgttcttatcattgattcgaccactggtggttctgaagctggtatttccaaggatggacagactcgtgaacatgctctgctttcattcacccttggtgtgaaacagatgatttgctgctgtaacaaaatggatgctactacacccaagtattccaaggccaggtatgatgaaattgtgaaggaagtctcttcctacttgaagaaagtaggatacaaccctgacaag

SEQ ID NO: 243956 - DNA, 351 bp, Glycine max
ggagaaagagaaagcatagaaaggaaacgaaaaaacagagtacccgacagaatttgaaaacaaaggctgaaatttgaagaaactgagatcattgggtgtgaaatatatggcagaggttgtcctgctaatcgatgatttgaaattactttctgcgagtcctcgttgtagaatttgtcatgaagaagagtttgaaagcgtagaaaccttggaagcaccttgtgcttgttctgggaccgttaagtttgctcatagagattgcatacagagatggtgcaacgaaaaaggaaatacaacctgtgaaatatgtctccagcaatatgaacccggataaacagctcctccgcccaaaga

SEQ ID NO: 243957 - DNA, 371 bp, Glycine max
gacacaaacggaacaaggtagatatatagaagagccttccatatatagcctcccaaaaaaatgaagagtactacctctttggctctctttctactttgtgccctaacttcatcatatcagccttcagccaccgctgatattgtattcgacaccgaaggcaatcctattcgaaacggcggcacatactatgtgttgccagttataagaggaaagggcggcggaatagaatttgccaaaaccgaaacagaaacatgccctctcactgttgtgcaatctccctttgaggtctcaaagggtctaccactgataatttcatccccatttaaaatccttgacatcaccgaaggacttattttgagcctcagtttcac

SEQ ID NO: 243958 - DNA, 360 bp, Glycine max
gcatccaaagagaacaatgagactgagaatgtggaaatgaatgattgcaatacaagtatatgcaagtctacctctgatactagtagtagtagcagtaacaagagtgtgccaaaagatggaaggaagaagcgacacgttgcttcagcatccacagcattactttttggcacaatccttggtctccttcaagcaacaacccttatatttgctgcaaaacctctattagctgcaatgggtctaaaacctgattctcctatgctaaaccctgctattaaatacttgagattgagatcattaggtgctccagcagtgcttttgtccttggccatgcaaggaatctttcgaggattcaaggacact

SEQ ID NO: 243959 - DNA, 336 bp, Glycine max
gggcatgaacctcaacaacatggccaagatgcttaagtgtgctggtaatgacgacatcatcaccatcaaggccgacgacggcagcgacactgtcactttcatgttcgaaagccctacacaagacaagatttctgattttgaaatgaagctgatggacattgatagtgaacaccttgggattccggaggcagagtatcatgctattgttaagatgccatcctctgagtttgctacgatctgcaaggatctcagtagtattggtgacactgttgtcatttcggttactaaggacggtgtgaagttttccaccaaaggagatattggaactgccaatat

SEQ ID NO: 243960 - DNA, 380 bp, Glycine max
gaaccgcaaaattaaaaattgaaaattaaaatttaaaacagatgttgaaagtaaagtcggtggtatgattcatcattctctttcagtttttggcattgaagaatctgagatcggaaaattcacctctccaacccccaatcccatcgttgcaaatgatccgattcattctgttgcagaacaggcagggcaagacccgtcttgccaaatactacgttcctctcgaggattccgagaagcacaaggtggaatacgaggttcaccgcctcgtcgtaaacagagaccctaaatacacaaatttcgtcgagtttcgtacgcacaagataatatacaggcgatatgctgggttgtttttctcaatctgtgttgatatcactgataat

SEQ ID NO: 243961 - DNA, 364 bp, Glycine max
gggtgtaccgcacataaagaactacaactagggtttcatctttgccatcagtacacgacaatgatttacgacgttaactctcctcttttccgatccttcctcagccagaatggaggctcctctgataagaggaaatcggacgaacagaagccaacagagcagatacccagagccagcgagaacaagcctataatgactgagtgataacagctgagctgcattcagttgtagaatgaacataagtggtaagtattgtacttggtgctaaactaagatctttttggctgtgttctgaagtatatgccggcgatgttggtctttgtgagtgtaatggtttgattttggagatcgttataacgaaaac

SEQ ID NO: 243962 - DNA, 341 bp, Glycine max
gacccaacacagccacatggtctaaagctcatattggaagactacccttatgcagctgatggaatactaatctggtctgcaatagaagactgggttcgaacctatgtggaccattactaccctcactcaagccttatatgcaatgacaaagagttacaatcttggtactctgagtcaatcaatgtaggccatgctgatctcaggcatgaaagttggtggccaacattgaacaatagtgaggatcttgtgtccattctttccacattgatttggaatgcatctgcacaacatgctgctctcaactttggccagttaccttatggtggctatgtgcctaatcg

SEQ ID NO: 243963 - DNA, 372 bp, Glycine max
ggaaaccacaattcacaaccgaaacagtttccatctctctcacaaaatgacaacaatatcaaattgctcccttctcttcctcttcctcttcctctccaccctccacatagcttccaccctctcaacccccaccaacttcatcaagtcctcctgcagcaccacccagtacccagccctctgcatccagtccctctccgtctacgcctccaccatccagcaagacccccacgagctcgtccagacagccctctccctctccctcaaccacaccgaggccaccaaaaccttcgtcgcaaaatgcaacaaattcagaggcctcaaaccgagagaatacgctgccttgaaagactgcgctgaagaaataattacagc

SEQ ID NO: 243964 - DNA, 354 bp, Glycine max
gaaagaaaaaaacttaaatcaaaatacttaatagcatggcgatacatttatacaaaacttctaccccaagcacacgcaatggagccgtagagagtcaagtaaaatccaatccacgacatcatttgatctatggacagcatcgttgtggtaaaggccgtaatgccagaggaatcattaccgcagggcatagagggggaggtcataagcgtctataccgtaaaattgattttcgacggaatgaaaaacacatatatggtataatcgtaaccatagaatatgaccctaatcgaaatgcatacatgtgtcacatacactatggggatggtgagaaatactatattttacaacccaaaa

SEQ ID NO: 243965 - DNA, 349 bp, Glycine max
ggcagctactcaggaaaatgtgaaccttttgggtattgtgggaagcccatttgtgtgcagggtccagattgcccttaatttgaagggagttgaatacaaatttttggaagaaaatttgggcaacaagagtgatttgcttctcaaatacaaccctgttcacaagaatgttccagtgtttgttcacaatgagcagcccatagcagagtctcttgtgattgttgaatacattgatgagacatggaagaacaaccccatcttaccttctgatccttaccaaagagccttggctcgtttctggtccaaattcattgatgataagattgtgggtgctgtatcgaaatctgttttc

SEQ ID NO: 243966 - DNA, 366 bp, Glycine max
  unsure (1)..(366): unsure at all n locations
ggtgtgagtgaangagcagatggagtagcggcattaagaatgcagatcttcgtgaaaactctgacagggaagactataaccctcgaggtcgagagcagcgacaccatcgacaatgtcaaggccaagattcaagacaaggaaggcattcctccggatcagcagcgtttgattttcgccggaaagcagcttgaagatggaaggaccctggccgattacaacatccagaaggaatcaacccttcatctcgtcctcaggcttcgtggtggcatcattgggccttccctcatggctttggctcgcaaatacaaccaggacaagatgatttgccgcaagtgctatgcccgtctgcatcctanggctgtgaac

SEQ ID NO: 243967 - DNA, 362 bp, Glycine max
  unsure (1)..(362): unsure at all n locations
gaaaaattaaaatttaaaacagatgttgaaagtaaagtcggtggtatgattcatcattctctttcagtttttggcattgaagaatctgagatcggaaaattcacctctccaacccccaatcccatcgttgcaaatgatccgattcattctgttgcagaacaggcagggcaagacccgtcttgccaaatactacgttcctctcgaggattccgagaagcacaaggtggaatacgaggttcaccgcctcgtcgtaaacagagaccctaaatacacaaatttcgtcgagtttcgtacgcacaagataatatacaggcgatatgctgggttgtntttctcaatctggtgttgatacactgataatg

SEQ ID NO: 243968 - DNA, 403 bp, Glycine max
  unsure (1)..(403): unsure at all n locations
cccacgcgtccgcccacgcgtccgcccacgcgtccgaagacgacagaagggggcagcaaattctgtgaagatgaagttcacggtgtcaaatctatcaagctctatgttcctcctcgtgttattcatagctcttgtctctcatacacacggaagcaagatcgaccaccatagaagcaacaaacatgttgccctcttcatttttggcgattctttcttagacgctggcaataacaactacatcaacgcaacaacccttggccaagcaaatttctggccctatggggaaacatacttcaagttcccaacggggagattctctgatggacggttgatatcagatttcatagctgaatacgcanaccttccaattggttcaccatatttacaacctggcaattacaat

SEQ ID NO: 243969 - DNA, 367 bp, Glycine max
gatctacactcataaatcattacatggtcatagtctacacctaattagccaaacgcaccacagcaccaaactagttggctcaattctctttgaatggctttggaggctttgaattcaccaacagcagccaccactcccttccgtggttaccaagaagaggaggaggaggttgaccttcacctacgcgagccttgggccaagagaaaacgctccaaacgacctcgttttgagtcggaggaagagtacttggctctttgcctcatcatgcttgcacaaagcggtaacaacaacaacacccaattaccgtcttcgtcacagtcacacaaagaagcgtcaccgccgctgaaactatcacacaggtgcaccg

SEQ ID NO: 243970 - DNA, 361 bp, Glycine max
gaagatgaagaggacgatgacgatgatgatgatgacgatgatgatgaggaagagagcaagaccaaaaagaagtcatcagcacctaagaagagtggaagagcacaacttggtgatggccagcagggtgagcgacctccagagtgcaagcagcagtagaagtatttatgcagaatgtcatttatgtagttgagttttgttggtgttcgagaatgtcctaatgtgaaagtgggtttcatgttgttttttaatgtttcttaaattgattttcctccctatatcttggcagtccgaatttgttgcgagtcccttctcttattttgcgcctggtagagagaatgtggttataggtagagatgctgtg

SEQ ID NO: 243971 - DNA, 345 bp, Glycine max
gagtaaaagttcgtcaattggaaactgcagctggtgcagcagtaaggttctttgacaaagctattggcattaatgtgcctcgatctcgcttccttcgcgtgaaggcaacttcagacttgcatcttgtccagtcggacctttacactttacaagatggattggttattaggaaccaatctagggcaaatcctgaaaatccttccattgaattggggccagaatttaagaatgttagcaatttcttgagccggttcatgtcaatccccagtaatgttgagcttgacagtctaaaagtggcaggcgatgtatggtttggagctggtgtaatccttagaggaaaagcaa

SEQ ID NO: 243972 - DNA, 317 bp, Glycine max
ggggtcgaccaagccttcattaaggtggcaaaaagacaacagaagggggaagccaaagaaaagaaaatcctcaattttctgagcagccaaacactctctctctgtctctcgaaaattctcagtttgcagagaaaatctgaatcatgtcgtggcaagcgtatgtcgacgatcaccttctgtgtgacatcgaaggtaaccacctcactcacgctgctatcatcggccaagacggcagcgtttgggctcagagtaccgacttccctcagttcaaacctgaggagataactgccatcatgaatgactttaatgagcctaga

SEQ ID NO: 243973 - DNA, 314 bp, Glycine max
gagaagagagagagagagagagagagtcctgaaacttgggtgcgattccttcactcacaacaacagcacatcactagagctcttctgattcgagcctcttcaggcttccctcagctggtttcccctcaaacggtagtttcactccacacaacgctcccatctctgaacgcatccccatccacagccacgcctacatcatatgcgccgccaccgcctccgtccgcttccctctctcgccggcgtatcgaacgcggccgagttcatgatctccaaggtggacgatctgatgaactgggcccgacgcggctccatct

SEQ ID NO: 243974 - DNA, 388 bp, Glycine max
  unsure (1)..(388): unsure at all n locations
ggggagagaatanagaagagagatggatccagacgcgttggcaaacgcattcgtggagcactactacagcaccttcgacaccaacaggaacggcttatcgaatctctaccaggagggttccatgctcactttcgaagggcagaagatccaaagcgcttccaacatcgttgccaagctcacctccctcccttttcagcagtgccaccactcaatctccaccgtcgactgccagccctccggcgtcaacgccggcatgctcgtcttcgtcagcggaaaccttcagctcgccggcgaacagcacactctcaagttcagccagatgttccatttgataccaacacctcagggaagctattatgtgttgaatgacatattccgtttaaactat

SEQ ID NO: 243975 - DNA, 364 bp, Glycine max
  unsure (1)..(364): unsure at all n locations
gggggacacaatttaccgctgtatgtattctgcagacaagttctcacctgatcaccttcttgactgtctcaaaataagttctgaacatgaagcacttgagctggcagataaggttgagtcttcaatgttcacttggaggcgaaaagcttgtctgagccactcaaaaacatcttggaacaaagttaaggatctcatggctgacactgaccgaagtgacaaaaactacatcttagctgagagagctgagactttgttgttttgcttgaagcaaagatatcccgaactttcacaaacatcattggacacatgcaaaattcaatacaaccaggatgtangaaaagcgatattagaaagctactcaaga

SEQ ID NO: 243976 - DNA, 383 bp, Glycine max
  unsure (1)..(383): unsure at all n locations
ggctgtgaagtgtgaattaaaatatattcaattttgcgtttctctgcctaaaaggattgaaagatgggtcaagcattcggttgctaccaagtcgatcagtcaaatgtggctatcaaggagcattttggaaaatttgatgatgtcctagagcctggatgtcactgcctgccttggtgtcttgggtaccagattgctggtagtctgtcgctgcgagtgcagcaacttgatgttcgatgtgagacgaaaaccaaggacaatgtctttgtcaatgtggttgcatctgtgcaataccgagctgtgtctgagaaagcatctgatgcattctataggctttacaacacaagggaacanattaaatcaaaagttttttgatgtcatcaagg

SEQ ID NO: 243977 - DNA, 365 bp, Glycine max
ggtgaagaaacacattgcgccaccaaccaccaatccaatcttctccaacgcatcatttcacactccaatcatctaagttgttgatcccataacagaacaaaagaaaaacaccagttaataaatcccaaaacccaaaaccatttattttgccttgttccatttcgtctggtccaaaaaaatcaggaacaacaatgggtttgttggatctggagaagcacttcgcgttctacggcgcgtaccacagcaaccccatgaacgtggcgatccacacgctcttcgtgtggcctatcctcttcacgggccaaatgatcctatacttcaccccacccctcttgaccaccgtagggttccttcccacggtgttg

SEQ ID NO: 243978 - DNA, 366 bp, Glycine max
  unsure (1)..(366): unsure at all n locations
cacgtanaggggacgcacttcttttcttcagtcttcacacaaatgctaccccagacactagcagtctccatgctggatgccctgttatcgaaggtgagaaatggtccgcaacaaagtggattcatgtagactcgtttgataagactgtgggagctggaggtgattgttctgataatcatgtaagctgtgagagatgggcttcacttggagaatgcactaaaaatcctgagtatatgattggatcttcagacattcccggctattgtaggaaaagctgcaaggcgtgttagaaattttactgaatgctttcctagatactacaagccatctctgcctcgggtttcaaatttcaactagttcttgatt

SEQ ID NO: 243979 - DNA, 385 bp, Glycine max
ggttccagtgtatgtgattgttgtgactcgttcttcttcgtcgttatcttcttcttttgttgtttgtgtgtttgttttttctctcacctgaaaatgtcttgctgcggtggtaactgtggttgcggaagcgcctgcaagtgcggcaacggctgcggaggctgcaagatgtacccagacttgagctacaccgagtcaaccaccaccgagaccttggtcatgggagtggcaccagttaaggctcaattcgagagtgctgaaatgggtgttcccgctgagaacgatggctgcaaatgtggagctaactgcacctgcaacccctgcacttgcaagtgaggtgttggagagctaaagcttcaagcagaaatggcccttaaaattatgataa

SEQ ID NO: 243980 - DNA, 317 bp, Glycine max
gccactaggaagacgagatggcctgagcttcagcacatcaggaacaagtgatctccccaaacccttcaacaccaccggcgtgacccttgacgctttcgccgccaaaaactttgatgtcaccgacgttgtcgccttatccggcgcacacacctttggtcgtgcccattgcggcacattcttcaacaggctctcccctctcgaccccaacatggacaaaaccctagccaagcaactacaatccacttgccccgacgcaaactccggcaacaccgccaacttggacatcagaaccccgactgtgttcgacaacaaatact

SEQ ID NO: 243981 - DNA, 386 bp, Glycine max
gattgcggatatgctgtctttgactatgatttcgtcacttctgagaactgtcaaaagagcaaaatcttcttcattgcatggtccccttcaacatctcggatccgtgccaagatgctctacgccaccactaaagacaggtttagacgtgagctagatggtgttcattatgacatccaggctactgaccccacagaaatggatcttgaagtgctgagagaccgtgcacattgaaatgtgtaagcactgatattcattttcatatcagaatctactacgttttacctttagtgacttacctcttcatgcattgtcatctgcagagcccatcttgccacagatatataactcgtatccaagaatacgaatctgaaggctgatgggtttaa

SEQ ID NO: 243982 - DNA, 366 bp, Glycine max
gaaagaagggttttttcatttcgttcgcaaccaccggccatactcactgttgttctcaagggattcgattctctctgcactcacttctagggttttctctgcgctataagcaatcatggcggatgaaacaccaaatgagatgaaggaggaggttccagaaattgttccttttgatcctaccaagaagaagaagaagaagaaaattacaattgtagatcctgctgatgaacctgtggagaaattggctgagaagacagaaaacctctcagtttccgagggggttgagactgcatttactggtttgaaaaagaagaagaagaagcctgttgaaatgggtgacttgaatgatgagagtggagatgcaat

SEQ ID NO: 243983 - DNA, 385 bp, Glycine max
cactgtgatagattcatatggaaaccttgtgtatcgggtggacaattacatcatgcaccctaacgaactcattcttatggacgcttcaggaaactctcttctcaccatgcgccgctccaggaagctagggttagtagatagatggtttgtgtatgaaggggaaatggggaagcagagtacgaggagtaagtcggttaagtcaaaagagagaccagtttgttgtgtacggaagcgtgtgaatattttagacggcaaagccaacaaggtccaggcctacgtgtaccgcgctgcctcggattcagataaacgacatccggcgtttacagttgaaggttcctatgcacatagaacatgtaaagtgttggatgagtacaagaatgccgtc

SEQ ID NO: 243984 - DNA, 416 bp, Glycine max
ccaacccttcattacggttccaaaaaaacaacaaaagggaaggttgaagaaaaaaataaggaatttaataatccacctgtaaaggttgttaacattgttaacacaatcagacttcaagagcaacccgcattcgataagaagcagtttgttaccttcatgaagaggtttatcaagaatttgactcccaagctcgatgcagagcaacaggagttgtttaagaagcacatcgagggagcaactaaatacctgctctctaagattaaagatttccaattttttgttggtgagagcatgggtgatgatgcttgcttggtctttgcctactacaaggacggcgctgctgatccaacattcctgtactttgcatatgccttaaaggaagtcaagtgctaagtgacttaatgtaccgagctatc

SEQ ID NO: 243985 - DNA, 387 bp, Glycine max
acagaaggggaatttggattataaattgtaaaaaggaaaggggaaaggaagcaatgcaaggaaggagagtggattgattcctcagcagcaccagacatttataaaagctctttcccttccctcaaatcgctcatactcttccaatcttttttttttttttttttttacctttctccctcgctcaataatacaaaacaaataagaagaagaagaaggttttcgcgatggcatcgaaacggatcttgaaggaactcaaggatctccagaaggatcctcctacctcttgcagcgccggtcctgttgctgaagacatgtttcactggcaagcaacaattatgggtcctccagacagtccttatgctggaggtgttttcctagtcactattc

SEQ ID NO: 243986 - DNA, 361 bp, Glycine max
  unsure (1)..(361): unsure at all n locations
ccagaggtaaaggatcagcactcagaggggaaaaagaacgaggtcaacgacaccagtaacgccgtcgttacgagttactgggaatcacaaggcccaaggttcgtanggaggacgggacagagtggccgtggaactgcttcatgccatgggatagttaccactctgatgtgtcaatagacgtgaccaagcatcatacaccaaagtcattaacggacaaggttgctttagggctgtcaagtttctaagggttctctctgatatctacttcaaggaacggtatgggtgccatgctatgatgctggaaacaatagcagcagttccaggaatggtgggagggatgctgctgcacttaaagtctctg

SEQ ID NO: 243987 - DNA, 378 bp, Glycine max
  unsure (1)..(378): unsure at all n locations
gccgctgagctccctttctcctcggtccacagagacaaaatgtaagacaggtgccaacagttcatcacgaaagaaaggactagctgagccgagatcactaactaaaacgaatttaatactaatcgaaaatactaatagaatagaaatagaactgtcttttcatatagatatcccttcaacacaacataggtcatcgaaaggatcttgaagacccaccaacgcacgaaagccgggatctttcagaaaatggattcctattcgaagggtgcataaccgcatggataagctcacactaacccgtcaatttgggatccaattcggttccttangaggtatcgggaacgaattttggaatgtaataatatcgattcatacaga

SEQ ID NO: 243988 - DNA, 375 bp, Glycine max
ggcaacgaaaatgaaaaactcctatataaggcaaagctgcctctggctgtaaccctaatagcacaggtagcaccgattggctcttcaagacttgcttctttaccatttcattcctaaagaccctattcttcttcgctcattcatcagcactgccatcagccccaacctccccacaaggtcacagggactaaagatgtgtgccaccatgtcagacgatgaaatggatgagaaggagttggatctctcttctgcagaagttgtaaccatatacaaaaccgcggctgagatcgttaacaacgccttgaagctagttatttcagaatgtagaccataggcgaagattgtggatatttgtgagaaaggtgattcatacat

SEQ ID NO: 243989 - DNA, 471 bp, Glycine max
ttaacgtggccgcgtccaggtaccggtcaggaattcccgggtcgacccacgcgtccgtacggctgcggaagacgacagaaggggaatgcattggatggatgcccgggcattgagaaggaacgacgctttcagaggcgaaaggccatggggagataccgtctgtgatccatggatctccgatcgggaaaccgtatccaagctccgcggctagtctgcgctctttggacttttaaaacttagcgaactgaaacatcttagtagctaaaggaacggaaatcaaccgagaccccgttagtaacggcgagcgagagcggattggggtttgaaaaatcagaaaaaattgtaacaaaataaaagcggccgctctagatgatccaagcttacgtacgcgtgcatgcgacgtcatagctcctctatagtgtcacctaaattcaatcactggccgtcgatttacaacgtcctgactggaaa

SEQ ID NO: 243990 - DNA, 360 bp, Glycine max
cggaaaaggtttgacttttgatagtggtggctacaacatcaagacaggacctggctgtttgattgaacttatgaaatttgatatgggcggttctgctgcagtttttggagcagcaaaagctctaggtcagatcaaacctcttggagtggaggttcattttatagttgcagcttgtgagaatatgataagtggaacaggtatgaggcctggagatattgtcacagcttcaaatggaaagactatagaggttaataacacagatgcagagggtaggcttaccctggcagatgctctggtgtatgcttgtaaccagggtgctgaaaagatagttgacctggcaacattaactggggcctgcat

SEQ ID NO: 243991 - DNA, 370 bp, Glycine max
  unsure (1)..(370): unsure at all n locations
gactcacaaccacaacaaggcagcagtgcgaagagaaagaaagagaagaagcgcttatcgaactcggacggaagcactgagttaactcagagcgagtgaaagtgttgctgcgtgatgtctggtggtatcgcccgtggacgcctcaccgaggagcgcaagtcgtggcggaagaaccatccccatggttttgttgcgaagccggagacgctgcccgatggaaccgtgaacttgatggtgtggcattgcactattcccgggaagactgggactgattgggagggtggctacttcncgcttacgctgcactttagtgaagactaaccaagcaagcctccaaagtgtaaattcccacaaggtttcttccacccta

SEQ ID NO: 243992 - DNA, 327 bp, Glycine max
tcagtgacacagtcacacaagatcgctcattggactcttcatatgctgaaacgttgaaaacacagtgtcccccaccaccacccagctcagacccaacagtgtctcttgaaccatccacgccaattcgtttggacagtaaatactatgagggattgatcaaccaccgcggcttgttgacttcggatcagacattgtacacgagccaatccacaaggggaatggttcaaagcaatgctaacaatggtgccagttgggctgacaagtttgccctagcaatgcttcgcatgggttctatagaagtgcttactggctccgatggtgagatca

SEQ ID NO: 243993 - DNA, 334 bp, Glycine max
ggagctgggtttgttttcggcctttgatcttcgattctctctctttttctctcgcgaaaaccgtatcagcaatgtctggagaatcagccagcgctattcacaagggtcaagtcgatctcttagacttcattgactggtctggggttgaatgcctcaatcaaagctccacccactctctccccaatgctatcaaacagggttatagagaagacgatggtttgcatctggagagtgatgcagacgagcagcttttgctctatattcctttcactcaagtcgttaaactttattcctttgttatcaaaggtcctgaagaagaggccccaagacagtg

SEQ ID NO: 243994 - DNA, 338 bp, Glycine max
gacacaattcaataccatttatcaactcactcatcaatctcgtttgttctcactaactattacttcatcatgtcgtcgagcacagttggtcaagtcatcaaatgcaaagctgcggtttcatgggaggcagggaagccacttgtgattgaagaagtagaggttggcacaccacaagctggtgaagtgcgtttgaagattctctacacctctctttgccacactgatgtttacttctgggaagccaagggccaaactcaattgtttcctcgtatatttggtcatgaacctggagggattgtggagagcgtaggttagggtgtgactcatctcaaaccagg

SEQ ID NO: 243995 - DNA, 370 bp, Glycine max
  unsure (1)..(370): unsure at all n locations
gggcagccgcgatatcatcttcttatagccactcgaaaatgaccaagagaaccaagaaggccggtattgttggaaaatacggcacccgatatggtgctggtttaaggaaacaaatcaagaagatggaagttagtcagcacagtaaattcttctgcgagttctgtggaaagtatgctgttaagaggaaggctgtgggtatttggggctgcaaagattgtggaaaagtgaaggctggaggtgcttacacattgaacactgccagtgctgtcactgtccggagcaacattcggaggctgagagagcagactgagagttganagcagtttacacttgtcatttgttttcaaatcataaattttgctgctggtta

SEQ ID NO: 243996 - DNA, 400 bp, Glycine max
ggcagcgcttgatttgaggcgaggcaagccccactcaaccaccacacctctcctcgttcacgctacccctttctgctcttcatcgagctttcaagttttagaagtataaagatggcagagatattcttatttaactcagagtcggtgaacgagggacaccctgacaagctctgcgaccaaatctccgatgctgtcctcgacgcttgcctcgagcaggagccagacagcaaaattgcctgcgaaacatgcaccaaaaccaacttggtcatggtcatcggagaaatcacgaccaaggccaacgttgactacgagaagatagtgcgtgacacctgcaggaacatcggcttcgtctcaaatgatgtgggaccggatgccgacaactgcaaggtcctcgtcaaca

SEQ ID NO: 243997 - DNA, 322 bp, Glycine max
  unsure (1)..(322): unsure at all n locations
ggcagacgccgtgactagacactcatctcactcgcgccatcttagggtttctccttttgtttcgcaacatggttgccgctaagaaaactaagaagacccatgagagcatcaacaacaggctcgctcttgtcatgaagagtggcaaattcaccctcggttacaagaccgttctcaaatctcttaggaactccaaaggaaaattgattatcactgctaacaactgcccccctttgagaaagtcagagattgaatactatgctatgttggcaaaggttggagttcatcattacantgggaaacaatgtggattgggcactgcatg

SEQ ID NO: 243998 - DNA, 400 bp, Glycine max
gactacaaatcagttttctacttgaatcttcgttatccttcttttggtctccttgaactcgactattcactatggcagatgaggtggttctgctagatttctggccaagtccatttgggatgagggtcaggattgcacttgctgaatcgggtatcatatatgagtcgttcgaagaggacttgcagaatacgagccctttgctcctcacaatgaacccggttcacaagattatcccggttctcatccagaatggcaaacccatttgtgaatcgctcgttgctgttcagtacattgaagaggtctggaatgacagacatcacttgttgccttctgacgcttatcagagagctcaagcaagattctgggctgaccttgttgacactaagatatgtgatcctgg

SEQ ID NO: 243999 - DNA, 266 bp, Glycine max
gaacctttgcattctattcattcaagattcagcaagtgcgttttggaagcagagaccgaaatacttcgagatggcccgtacaaagcaaactgctcgtaagtcaactggaggaaaagctcccaggaagcagcttgcaaccaaggctgcacgtaagtctgcaccaacaactggtggtgtgaagaagcctcatcgttatcgccctggaactgttgctcttcgtgagattaggaaataccagaagagcactgagctcctaatcaggaagc

SEQ ID NO: 244000 - DNA, 356 bp, Glycine max
gggtgtcgcgtccgctatatattctacccgaatttctgcattttccttcttccatcggcgcggcacacacagacacacacatttcgtcggaatgggaagggtgattcgcgcacagcgtgagggtgcggggtcggtgttcaagtcccacacccaccaccgcaagggtccggcgaggttccgcagcctcgacttcggcgagcgcaacggctacctcaaaggggtcgtcaccgatatcatccacgaccctggtcgcggtgctcctctagccaaagtggcgttccgccaccccttccgctacaagaagcagatggagctcttcgtcgccgctgagggcctctacaacggccagttcatct

SEQ ID NO: 244001 - DNA, 369 bp, Glycine max
ggatcagaagacaggttcaaaccggagcaaaaaaacttgttacgatggtttcttccgacaaggatccacgagaggaagtccttcaagcatggtacatggatgatagtgatgaagatcaaagactcccccaccacaaagaacccaaggagtttgtctcgttggaccaacttgctgaacttggagtccttagctggaaattagatgctgataaccatgaaaatgatccagagctgaaaaagattcgtgaagagcgtggctacacctacatggatgtttgtgaggtctgcccagaaaagttgccaaattatgagcaagaaatcaaaagcttctttgaagaacatcttcacactgatgaggagattcgctttt

SEQ ID NO: 244002 - DNA, 404 bp, Glycine max
gggatatgtgaagacacctcgtggccttcgcacactgaatactgtttgggctcagcatctaagtgaagaagtcaagagacgattttataagaactggtgtaaatctaaaaagaaggcttttaccaaatattcaaaaaaatatgaaactgaggaaggaaagaaagatattgaatctcagcttgagaaattgaagaagtatgcaactgtcattcgtgttctggctcatactcagataaggaagttgaagggtctaaaacagaagaaagcacatttgatggagatccaagttaatggtgggacagttgaccagaaggtggactatgcatatagcttcttcgagaagcaaatcccagtggatgctgttttccaaaaagatgagatgatagatatcgttggagtgacta

SEQ ID NO: 244003 - DNA, 252 bp, Glycine max
ggagtgagggtcgtgcaatttttgctagcggaagtccatttgatcctgtagaatacaagggcaaagtgtactattctggccaagccaacaatgcttacattttcccgggctttggtctggggttggtaatctcaggagcaatcagagtgcatgatgatatgcttctagcagcttcggaagccttggctaaactagtgtccaacgagaactacgaaaagggcttgatttatccaacattctctaacatcagag

SEQ ID NO: 244004 - DNA, 404 bp, Glycine max
gacccttaatttttttcttcaacaaacgccacaatggccgtcacgaaaagcctctccatcttcctcttcatcgccataagctgcgtggccgtagctcaggcagcgaacttcaacatcacaaacaattgcacctacacggtgttgggcgccgccgttcccggcggcggctcaaggcttaaccctggcgaatcgtggaacatcagtgtgacgaacggcacgacaggaggacgcatctggggtcgaacaaactgcaccttcgacaacgcacgacgcgggaagtgcctcaccggcgactgcgacggtgttcttgagtgcaacatcacaggtacacctccgaacacgttggtggaattcgcgttgaaccagtacaacaacctcgacttctacgacatctccctcgtcga

SEQ ID NO: 244005 - DNA, 409 bp, Glycine max
gagagaaagagagagaaagatgtcgaagcgtggtcgtggtggttcggcggggaacaagttccgcatgtcgctgggtcttccagtggcggcgacggtgaactgcgccgacaacacgggggcgaagaacctctacatcatttcggtgaaagggatcaaaggccgtttgaaccgtcttccctcggcctgcgttggcgacatggtgatggccaccgtgaagaagggaaaacccgatctgaggaagaaggtcttgccagctgtcatcgttcgccagcgcaagccatggcgccgaaaggacggcgtctacatgtacttcgaagataatgctggtgttattgtcaatcccaagggagaaatgaaaggttctgctatcactggtcccattggaaaagagtgtgctgatttgtggcct

SEQ ID NO: 244006 - DNA, 412 bp, Glycine max
gatcctagtggagaaattctagttttgactaaattttgtccttggaagcttcacttatttgagcttgagggagagttgaaaaatgaccctgctgtcaaatatgttctatatcaggatgaaagaagcaagcattggcgagtgcaggcagttgcagtatctcctgacagttttcagagccgaaaggctctaccctcacagtggcgggggttaagggatgaagaattgtcaaagaagtcaagcattcctggatgtgtttttgtgcatatcagcggatttattggtggaaaccaaaactttgatggtgccttggccatggcaaaggctgctttgaagatgtagacgaagatcatatgaaccaagggctatcactgattttgcgcactcattcacagtacactttactgattgcgtt

SEQ ID NO: 244007 - DNA, 360 bp, Glycine max
gatctacactcataaatcattacatggtcatagtctacacctaattagccaaacacaccacagcaccaaactagttggctcaattctcgttgaatggctttggaggctttgaattcaccaacagcagccaccactcccttccgtggttaccaagaagaggaggaggaggttgaccttcacctacgcgagccttgggccaagagaaaacgctccaaacgacctcgttttgagtcggaggaagagtacttggctctttgcctcatcatgcttgcacaaagcggtaacaacaacacccaattaccgtcttcgtcacagtcacacaaagaagcgtcaccgccgctgaaactatcacacaggtgc

SEQ ID NO: 244008 - DNA, 325 bp, Glycine max
agggaaggggaagaaggttggttgattggtcccattgattccgaagagaagagaaaagatgtttgagccacaacagctatacactcgcgcgaagaccgaggaattcgacctcgaatcaggagaaaccctctacccagggctgagcgtctgcgagaaccagctccgatggggtttcatccgcaaggtctacggcaacctctccgcgcagatcgtcctcagcaccctcgtctccgtcaccaccgttttctatactccaatcaatgacctcctcaatgggcaattcaccctcctcctcatcctcctcttccttcccttcatctttttg

SEQ ID NO: 244009 - DNA, 392 bp, Glycine max
gttcttgaggagaagaattggccgccttttttcccaataatccatcatgacattgctaatgaaattccaattcatcttcaaaaattgcaatatgttgcatttactacattgttaggattagtgttgtgccttttttggaatgttatagctgttactgctgcttggattaagggtgaaggtgtaaaaatatggtttcttgccattatctatttcatagcaggggttcctggagcatatgttctgtggtatcgcccattatattgtgcttttaggaatgaaagtgctttgaaatttggatggtttttcctgttttatctgcttcacataggattctgcatcttagctgcagttgctcctcctatagttttcaaaggcaaatccctgacgggcat

SEQ ID NO: 244010 - DNA, 367 bp, Glycine max
gagagcacagagatttggtttttattctacctaacaccacatggatacgttgccggaggattgtgtttccaaaattctgtcttacacatctccaccagacgcatgtagattctctatggtctcttcaaccctacgctcttccgctgactctgaccttctctggcgaactttctttccttctgattactctgacattgtctcaagggctctcaaccccctctcccttaattcctcttcttcatacaaacaccttttctatgctctttgtcatccactcctcctacatggatgcaacatgagcttcagattagacaagtcttcgggtaagaaatcttatatcctatctgcaaggcagctttctataatc

SEQ ID NO: 244011 - DNA, 380 bp, Glycine max
ggcattgtgaaatcaacagagaaacatttcactaatagagagacataagcataatattgagaaataatggagggttgtacttattgtgtgaagttgctatgccttgttgggtttgtggtgcttgtgagtactattgcaggggtggagagtgctggtgaatgtgggaaatctaccaccccagataatgaggcttataagcttgcaccatgtgcctcagcagcacaagatgagaatgctagtgtttctcagagttgctgtgctcaggtgaagaaaattgggcagaacccaagctgcctctgtgcagttctgctctccaacacagccaaaatggctggtgtcaaccctcaagttgctgtcaccatccccaagcgttgcaacct

SEQ ID NO: 244012 - DNA, 403 bp, Glycine max
gacacacaaactttattacagttgttgtaactaagcaagaatattattaggcaatgaagtcttctggaccttcaacaactcttgctctttttttaaccatcaatttgcttgtctttgtcatggcaagtggctgctacacttgcacacagcctaagccaaaccctagccctaacccattcccttaccctaaccccagccctaccgcaaagagctgccccagggacgcacttaagctgggtgtgtgcgcaaacgtgcttaatggaccaattggtgcgattgtggggtcaccaccggaccacccatgttgctcagtgctagaagggcttcttgaccttgaagttgccgtttgcctctgcactgccatcaaagctaacattcttggcattagccttaacatccccat

SEQ ID NO: 244013 - DNA, 291 bp, Glycine max
gaaggaaggaaggaagagtgagcgtgaaagatgccttgggcgaggctttcagggtctccaaggctcgacgttgctattgacatgggcaatccatttctcaatctcactgttgatggtttccttaagatcggagctgtcgcagccacgcgatcagctgctgaagatacttatcatattatccaaaaggggaatatctcaagtcatgatttcgagaaaacgttgaagaagatgtgcaaagaaggtgtatattggggaactatagctggcgtttatgttggaatggaatatggg

SEQ ID NO: 244014 - DNA, 494 bp, Glycine max
  unsure (1)..(494): unsure at all n locations
aactgttacgcttgcaggtgacggtcaagaattcacgggtcgacgcacgcgtccatacggctgcgagaagacgacagaagggggcattgagtatggtgacatgcagctgattgcagaggcctatgatgtgctgaaatcagttggaaagttgtcaaatgaggaactacaaagtgtcttctcagaatggaacaagggagaacttctgagtttcctgattgaaatcactgcagatatatttggaattaaggatgataagggagatggatatcttgttgacaaggtcctagacaagactggcatgaagggcactggtaagtggactgttcagcaagctgctgaattatcaattgctgctcccactattgaagcatcattggatgcaaggttcctgagtgggttgaaggangaaagagttggagctgcaaaggtctttaaatcaggtggcattggtgatattgtgactgatcaacctgtanacaagcagaagttgattg

SEQ ID NO: 244015 - DNA, 372 bp, Glycine max
aggacacagaaaggaatgaagaggaggaagatgaaacagcaatagatgcaacagcaggcagagaagaagaagatcatcaagaccaagacaagactaagaaacagctcaagccaaaaaagaagaaccaaaaaaagcaaagagagccgagatttgcgttcatgacaaagagtgaagtggatcacctcgacgatggctatagatggcgcaagtacggtcaaaaagccgtcaaaaacagccctcatccaaggagctattatcgttgcaccaccgcgacatgcggcgtgaagaagcgcgtggagcgttcctcggaggattctacggtggtggtgacaacctacgaagggcaacacactcacccgtgtcctgccacgt

SEQ ID NO: 244016 - DNA, 415 bp, Glycine max
gagggttttgtgctgttgtcgctgctcatcctccataacctccgagctctacaccgaagaacgaagccatggggaagacacatggaatgggagctgctcgcaagctcaagtctcaccgcacgaggcaaaggtgggctgataagtcatacaagaaatcccatcttgggaatgaatggaagaaaccttttgccggttcatcccatgccaaaggaattgtccttgaaaagatatgtattgaagctaagcagcccaactctgctattcgtaagtgtgccagagttcaacttatcaagaatgggaagaaaattgcagcttttgtccctaatgatggttgcttgaactacattgaacagaatgacgaagtcttgattgctggatttggacgacatggtcatgctgtgggagatattcctgg

SEQ ID NO: 244017 - DNA, 367 bp, Glycine max
aagacgacagaaagggaaaatcaaggtggttgcacctcctgagagaaagtacagtgtctggattggtggttctatcttggcatcacttagcaccttccaacagatgtggatctccaagggtgaatatgatgaatctgggcaagccatcgttcatcggaattgcttcaaaatttggttcaattcaacctggatggtattcaattcctcaaggaaccaattctgttccaaaattccattaaatttggtttacctaattggtaattgaagccttgggtttttaatagatatatccagtttaatgaatggatttgtaagttgagtatgttataagtttccccgttaggtcaccttggaagccagacttttt

SEQ ID NO: 244018 - DNA, 408 bp, Glycine max
gggtgtagcgcatagagagaactagaactagggtttcatctttgccatcagtagacgacaatgatttacgacgttaactctcctcttttccgatccttcctcagccagaagggaggctcctctgatcagaggaaatcggacgatcagaagccaaaagagcataaacccagtgccagcgagaacagacctatgatgactgattgataacagctgagctgcattcagttgtagagtgactataggtggtaggtattgtacttggtgctaaacgaagatctttttggctgtgttctgaagtatatgcctgcgatgttggtcattgttattgtaatggtttgattttggatatggttataacgaaaacttattatggacagtagttgaacatgatgcacgcatgacacatgc

SEQ ID NO: 244019 - DNA, 280 bp, Glycine max
gtcagtggggctgcgataagagcacaaaacggggtggcggggtgcgtcagagtgaggcgagaatcaagaagcgacacggatccagacgcgttcgcatcggcattcttggagcactgcaacgccagcttcgacaccactcgcaacactctcgcgaatctccaagaagatcgttcgattcactcttgcgacggtcagaacatccacggctcctaccacatcgtcgtcaaactcaactcacatcccttccaccagtgccagcactccatcatcaccgtcgatt

SEQ ID NO: 244020 - DNA, 406 bp, Glycine max
ggcaaaaatccgatcagaagacaggttcaaaccggagcaaaaaaacttgttacgatggtttcttccgacaaggatccacgagaggaagtccttcaagcatggtacatggatgatagtgatgaagatcaaagactcccccaccacaaagaacccaaggagtttgtctcgttggaccaacttgctgaacttggagtccttagctggaaattagatgctgataaccatgaaaatgatccagagctgaaaaagattcgtgaagggcgtggctacacctacatggatgtttgtgaggtctgcccagaaaagttgccaaattatgagcagaaaatcaaaagcttctttgaagaacatcttcacactgatgaggaggtccgcttttgtgctgctggaagtgggtattttgatg

SEQ ID NO: 244021 - DNA, 381 bp, Glycine max
gaaggaagggagggaagaatagaatgggatctggaagtggaaaacacactggagagttcttcaggagaagggatgcatggaggaagcatccgatgctcaccaatcagctccgccacgccacccctggccttggcatcgccgtcgtcgccttcggtatctacctcgtcggcgaacaagtctacaataggctctatgctcccgatcctcattcgatttctcacgtgaaagccggggatcaccactaaacgtttggacgtacgcactccattccatcatcacttaataagcttgctagcatgttctccgcagcctttaatgtttaaatttcagaccgtgttcgcttctttggcactcactatgttgtcctgtatgcctacattt

SEQ ID NO: 244022 - DNA, 392 bp, Glycine max
gattcatgcattagcactatttctcaatctctcgtcttacccatttcctccggccctctttctcttttcttgttctgtttttattttcactgttctctgataacaacgttgttaattgtcaccatggttgttctgtctcaactagcattaaaccagtttttccttctgaaaacatgcaagtctacgcccttgttctcggggattcctgtagtcgacctcacggacccctatgccaagacgcacatagtcaatgcctgcacggacttctgcctcttcaagctcgtgaaccacagtgttccgttacagttcacggtcattttggaaaacgaatccctcaggttcttcaaactgcctcaatccgagaaacacagggctggtccccctgacccttt

SEQ ID NO: 244023 - DNA, 412 bp, Glycine max
gatacaaatgttgtcatgatacactcggtcctgttatgtgctgtcatttactcactcgggttgaactccatcataaagtgtgtcctaagatgttcaatcatagtcatcaataacaatgacccttcttcttcaagtgtgagcaacaacaagccttcaccgagattggccaacacaggaatcaagaagaaagtcctcaagacttttcctactgtgagctactcaacagagatgaaacttcccggtttggacatatagtgtgtgatttgcctctcggagtttgccaatggtgataaagtgcgcattatgccaaagtgcaactatggtttccatgtgctctgcattgacaagtggctaagttcacactcatcatgccccaagtgcagacagtgcatcattgagacatgtaagataa

SEQ ID NO: 244024 - DNA, 417 bp, Glycine max
taaaaaaagaacagaggggaaacgcaatcttgcaatcatcttcggctcaaggctcttcgatccttcgaatcattccagttcctccaaaatggccaaatactcacttcgcgttctcgtcactggagccacagggcaaattggatctgctcctgtcgctatgattgctaggggagtgacgctgggtcctgaccaacgcgtgatgctcaacatgcttgagattcatccaacagtagactcgttgaatggggttaaaattgaatttgtggatgcatgacattccctcttcctaaacgtgattttgctacagatgatgtagttgaagtatgcaccggtgtcactattgcagtgatagttggtggattcactagaagagaaggtctggatatgaatgatgtgattactaagaatgtctccatt

SEQ ID NO: 244025 - DNA, 409 bp, Glycine max
ggaacaaaacaagtgtttcgaatagattatcctaagtctttgggaatagtgctgcaatggcttcaagtcaggaggaggtgacccttttgggagctactggaagcccatttgtgtgcagggttcatattgccctcaagttgaagggagttcaatacaaatatgtcgaagaaaatttgaggaacaagagtgaactgcttctcaaatccaacccagttcacaagaaggttccagtgtttattcacaatgagaagcccatagcagagtctcttgtgattgttgaatacattgatgagacatggaagaacaaccccatcttgccttctgatccttaccaaagagccttggctcgtttctggtccaaattcattgatgataaggtttttggtgctgcatggaaatccgttttcac

SEQ ID NO: 244026 - DNA, 309 bp, Glycine max
gggaagaacgaagcctcctcgttcttcttcttctgcgctttctctctccctctctagaaccgtaaccgtcgtttctttctttctctctcctcaaccagagataaagagtcaccttcttatttttctgaatctcgcggcgttgttctttctgctgctgcggctgtggttccggcggcgatgggacagcaatcgttgatctacagcttcgtcgctcgaggcaccgttatcctcgcggagtacaccgagttcaccggaaacttcaccggcgtggcggcgcagtgcctccagaaactccctttctccaacaac

SEQ ID NO: 244027 - DNA, 349 bp, Glycine max
ggttcaagaggctgagaagtacaaatctgaggatgaagagcacaaaaagaaggttgaggccaagaatgctttggaaaactatgcatacaacatgaggaacgttgtgaaggatgacaaaattggtgagaaacttgatcctactgacaagaagaagattgaggacgcaattgagcaagctatccagtggctagacagcaaccagctcgcagaagcagatgaatttgaggacaaaatgaaggaattggaaagcatctgcaatcctatcattgccaagatgtaacaaggtggtgctggtcctgacatgggtggtgctggcgctggggcagccgaggatgattatgctgctcct

SEQ ID NO: 244028 - DNA, 403 bp, Glycine max
gatataagatcgattatactcacaagttttgttctttcctagcaattcggcgcaatcgtcttctgcttcaaggaaggagagctcgttattctctatcaacaatgaaaatgtcaggtgaagaggttgttgttgcagctgagccagctgctgccatcccaggcgagcctatggatatcatgactgccttgcaacttgtgctcagaaaatctctggcttatggtggtcttgcacgaggccttcacgaaggggcaaaagtgattgagaagcatgctgcacaactctgtgttctagcagaagactgtgaccagcctgactatgttaaactggttaaggccctttgtgcagagcacaatgttagcctgctgacagttccgagtgcaaagaaccttggagaatgggctgg

SEQ ID NO: 244029 - DNA, 238 bp, Glycine max
gaccaacaaactaacaatttaacaactatccttgccccatttgaacgtccaaaatgccatcctccaaacactggaagacattccggaacacatgaaacttatggctactgcgggaaacccatttgggtgcagggtccagattgcacttaagttcaaaggagttgaacatcaaattctggaatcacaattgggcaacaatagtgacatgcatcacaacaatcatcctgttcacaacaac

SEQ ID NO: 244030 - DNA, 358 bp, Glycine max
gacagacaaacaaacaatttaccagctatacttgttccttttgaaggttagaagtgctacaatacaaacaatggcagctactcaggaagatgtgaagcttttgggtattgtgggaagcccatttgtgtgcagggtccagattgcccttaagttgaagggagttgaatacaaatttttggaagaaaatttgggcaacaagagtgatttgcttctcaaatacaaccctgttcacaagaaggttccagtgtttgttcacaatgagaagcccatagcagagtctcttgtgattgttgaatacattgatgagacatggaagaacaatcccatcttaccttccgatccttaccagagagccttg

SEQ ID NO: 244031 - DNA, 356 bp, Glycine max
ggcaaatttgagttatctggaattccgcctgcgccgagaggtgttcctcagatgaccgtttgctttgacattgacgccaacggtatattgaacgtgtctgcggaggacaaaaccactggacataagaacaagattacaattaccgacgacaaaggaaggctttctaaggaggagattgagaagatggtgcacgaagctgagaagtacaaggctgaggatgaggagcataagaagaaagtggaggccaaaaatacattggagaattacgcctataacatgatgaacacaattaaagatgataagattgcttccaagctgtctgctgatgataagaagaatattgaggatgcaattga

SEQ ID NO: 244032 - DNA, 375 bp, Glycine max
agaaggggtctagctgtgggtgtggaagcagctgcaactgtggcagcaactgcggttgcaacaagtactcttttgacttgagttacgttgagaagacaaccacagagactctagttttgggtgttgggtctgtgaaggcccaattggagggtgctgaaatgggtgttgcatctgagaacggtggctgcaactgtggatcaagctgcacctgtgacccatgcaactgcaagtaaggtcaagatgtataaccttgaagcagagatagctgtaatatatgtatcaacaaataataagaagtagaagttgcgtttggagctttagaataaagtgtttgctatgtgttttgttggtcttttataaatatgtaatttgaat

SEQ ID NO: 244033 - DNA, 386 bp, Glycine max
gacagaaattaacaaccatatctattcttacaagttacatccattgagaaacatgaaggtctcccccttagcattttcaatcctttttttgtccttcaccatagaactcttcattggcattgcttcagcagcacaagaaccagtgcttgacacctcaggccagaagctgagaacaggtgtcaagtactacattctaccagtcttcagaggcagaggtggaggcctaacagtttcaagcagtggcaacaacacatgccccctctttgtggtgcaagagaagcttgaagtctcaaaggggcaccctagttacttcacaccctacaatgcggaaagtggtgtcattctaacctcaaccgatctcaacatcaagtcctatgtgaaaagca

SEQ ID NO: 244034 - DNA, 409 bp, Glycine max
  unsure (1)..(409): unsure at all n locations
gggaaatctgagtggtgatccttacatagttcatactaatgtgtacacacaaggcaagggtaatagggagcaacaattttatctttggtttgacccaactgcagattttcacacctattcctttctctggaatcctacacatgttgtattctatgttgatggaagaccaattagggagttcaagaacttggagggagtgggtgttgaatacccaaagaagcagcctatgaggttatatgccagtctatggaacgctgatgactgggcaacgagaggaaggctagtgaagacagattggagtcaagcaacattcactgcttctttcaggaacttcanagccaatggttgcgtttggtccaatggggtttcttcatgcaactccacctcctcttctgaaaaagcttggcta

SEQ ID NO: 244035 - DNA, 331 bp, Glycine max
  unsure (1)..(331): unsure at all n locations
gaacaagcaaggctttaattaaccagtgcatgatgctgaattaaatgcagaataagtgatttatcctgatagtgatgatgaattggatggcgtcatgaggaatagtggattatttttatctagaaagtgtacgatggcacatcttttgtactttaaataggtgttgtggtatcaggctaaatcacttcagcctgcagattatgttctataattagacatcttagttatggttctctttgtgtgactgtgtgaacaataaaattgcttatgcatgaacattcagcaaaataatactatgttgtagaaccttttcacgataaanaaaacnnan

SEQ ID NO: 244036 - DNA, 415 bp, Glycine max
  unsure (1)..(415): unsure at all n locations
cacttaccctaccaagatcactactaccaagcccctatctttgcttggccatggaatcaccgacatggagattcacttcatccatgtgaaattctattcaatcggggtttatttggagccagaagtagtaggccacttggaccagttcaaaggaaaatctgcaaaggagctggaagataatgaagagttcttcaatgctctcatttctgctccggtggagaagtttattagacttgtggtgattaaagagatcaagggtgtacagtatggggttcagattgagactgcggtgagggatangttggcagctgaggacatatatgacgaggaagaagaagaagctttggaaaaagttattgaatttttccagtccaagtacttcaagaaactttcagtgatcacataccattttcca

SEQ ID NO: 244037 - DNA, 402 bp, Glycine max
ggcactacaaatcagttttctacttgaatcttcgttatccttctttttttctccttgaactcgaatattcactatggcagatgaggtggttctgctagatttctggccaagtccatttgggatgagggtcaggattgcacttgctgaaaagggtatcaaatatgagtccaaagaagaggacttgtagaacaagagccctttgctcctcaaaatgaacccggttcacaagaaaatcccggttctcatccacaatggcaaacccatttgtgaatctctcgttgctgttcagtacattgaggaggtctggaatgacagaaatcccttgttgccttctgacccttaccagagagctcaagctagattctgggctgactttgttgacaataagatatttgatcttgg

SEQ ID NO: 244038 - DNA, 366 bp, Glycine max
gatatcagcgaggtcttgatcaagaacagacgcaagaaggagaaggcggtggaggagttgtttgagacgttgaagctgagagcggagatgaatgagaagagtggtgttttgaggggaaaaaatgtggttgaagaggaggaagaagaggaagagcaagagaagagggctttggacagtgagagtcctaagcaggagtcagagattgaggacaattgcaaggaggaggaggaagaaaagaagatcaagtgatatatagtgatgtgataataatgttgtttgttcccccgtccaatggagagaatggatcctatccaagtgtagtactcgatcatcatcaacaattttttttacgggggatatcagata

SEQ ID NO: 244039 - DNA, 432 bp, Glycine max
gaaagacacagaaggggaagcaatgatgttggtaaatcccaaaatcctcaagaaaactggtgtcacaagccagggcaaagcttcttcttgcaacggttggtattggcctcacaaagatcattttcttggtcatggctttgtttttgcttgacaaagttggtacaaggcgtcttttacaaatcagcactgggggaatggtttgtgggctcacacttttggggtttagtttgaccatggtggatcgttctagtgaaaagctcttgtgggctttgagccttagtattgtggccatttatgcttatgttgctttctttaatgttgggcttgggcctgttacttgggtttatgcgtcggagatttttcctttgaagttgagggcgcaaggggctagtataggagttgcggtgaatagaaccatgaatgctgtggttt

SEQ ID NO: 244040 - DNA, 385 bp, Glycine max
gggcaagaactggttgtaactacgaaggaacatcgaactgaacctgtctacaaaataaatccaagcttggttgctgatctatacagtgattggatcatgccattgacaaaggaagttcaagttgcctatctgttgagaaggttggattgaacataacaaaaagtaccttttcaattacagtgtttatagggttatttatcttttctaggaaatgatacttgcaatgggtaatttctcttgaatcatgattcatgactataaacttgagcttttgtaactaacatatgaggaagctgatattgggttcttatataataattaatggcatcttttatgttgttccaaaaaaaagacatggactaatccaaaaaaaagcggccgctct

SEQ ID NO: 244041 - DNA, 397 bp, Glycine max
ggtggtagtttggcagcgacacgtatcttcatcaataatcgcagaagcagtttccggtgcatctcatcgtcttccaaaatgaacgacgcagatgtctcgaagcaaatccagcagatggtgcgtttcatccgccaggaagctgaggagaaagccaacgagatctctgtatctgccgaagaggaattcaatatcgagaagctgcagttggttgaagccgaaaagaagaagatcaggcaagaatacgaacgcaaagagcgccaagtcgaaattcgcaagaagattgagtactcaatgcagctgaatgcttctcggattaaagttcttcaagctcaagatgacgtgatcagttccatgaaagaagctgcatccaaggaacttttgaatgtcagtcatcacc

SEQ ID NO: 244042 - DNA, 415 bp, Glycine max
cagaagacgacagaagggggattctcgccatgccgaaagctaaatccgacgccaaagccgccgatagcaggttgaagcggaagggcgctggtgctgggaggaagcaatcgaggaaagctgctaaggaccctaacaagccgaagagacctccaagcgctttcttcgttttcatgtccgagttcagagagcagttcaagaaggagcatcctaacaacaaatccgtcgctgttgtcggcaaagctggtggtgaaaaatggaaatcgctatctgatgctgaaaaggcccctttcgttgctactgctgagaagaagaaacaggagtatgagaaaactatttcggcttacaataagcaattggagggaaagaattcagaggaagacgagtctgacaagtcaaagtctgaagtcaatgatga

SEQ ID NO: 244043 - DNA, 387 bp, Glycine max
accacaccgagtcgcagaaaaagaaaaaagcgatcatagtttcacttcggccttatccagtttagggtttcggttctctaccctatctttcacgtatcgaaaccttaaatttacgatcaggtctgagcaatctggttggtagaacctttggtcttagtgagtcaagttttatgtctgaattagacgatcaaattcctactgccttcgatccttttgctgatgcaaatgctgatgactcgggtgctgggtcaaaggagtatgtgcatattcgtgtacagcagcgaaatggtaggaaaagcctgacaaccgttcagggattgaaaaaggaattcagctataacaagatacttaaagacgtcaagaaagagttctgttacaatggaacag

SEQ ID NO: 244044 - DNA, 399 bp, Glycine max
tgtgaagagtatgattctggagtggatagtttttcggggcctacaaagtacatcatttggagcaatcgcatgaacactcatgttttgcctgcgtatgttgtaagcttcagagtttcttccttcaaagggatggagaagagtgaagaagaacctttgagacctacttcgccttggatgccattcccaactctgatttctgcgctttccaaggttttgcctccatgtgatattgccctcatctccaagttctacaaagataaacaagacaagaagattttacgacatgaattgatacaaagagtgagagaaatagctggagataagttgctagttgcggccatcagatcttatagagacaacaagaagaaaccaagctttctacaatcaaggtcaaagaat

SEQ ID NO: 244045 - DNA, 392 bp, Glycine max
ggcattgtgaaattaatagagagacataaaaaataaacatatattgagaatggagggttgtgtgaagaagttgctatgccttgttgggtttgtggtgcttgtgagtactattggtggggtggagagtgctggtgaatgtgggaaatctacaacccctgataatgaggcttataagcttgcaccatgtgcctcagcagcacaagatgagaatgctagtgtttctcagagttgctgtgctcaggtgaagaaaattgggcagaaccctagttgcctctgtgcagttcttctctctaacacagccaaaatggctggcgtcaaccctcaagttgctgtcaccatccccaagcgttgtaacctggctaatcgccctgttggttacaagttgtggcctt

SEQ ID NO: 244046 - DNA, 404 bp, Glycine max
aggaactctgataagaaaacataataatgggttcacaaaattgtatggataggaagcactatgttctggtgcatggggcatgccatggagcttggtgttggtataagctcaagccacgcttggaatctgcaggccataaggttacagtacttgaccttgcagcttctggaaccaacatgaagaaaattgaagatgttgatactttctcagagtattctgcgcctttgttgcagctaatggccacaattccctcaaatgagaagttagttctagttggtcacagccttggagggctgaacatagcacttgcaatggagaaattcccagaaaaggtagcagttggtgttttcttaacagcttttgctccagacactgaacaccacccatcttatgtcttggaaaag

SEQ ID NO: 244047 - DNA, 412 bp, Glycine max
  unsure (1)..(412): unsure at all n locations
ggtgagagagcgagcgagcgagcagtttcaaagagaggatttgggattgggaaggcgagggattgcgctgcgtctcttcctcttctctttcgattcatccctcattcataatcttccaatccaacaacctcagccccacactcacacatacacacatctgaacgcgtatcgtccctcccatggcttcaaagcgcatcctcaaggagctcaaggacttgcagaaagacccaccaacttcttgcagcgctggtccagtagctgaggacatgttccattggcaagcaacgattatgggtcctgctgatagtccttatgctggatgtgtattcctagtcactattcactttcctccggattatcctttcaaaacctccaaagttgcctttangactaaggtgtttcatccgaacat

SEQ ID NO: 244048 - DNA, 364 bp, Glycine max
ggaacctttcatctccaaagggatccacaggccgaaggagaaatggggctgacattcacaaagcttttcagtcggcttttcgcgaagaaggaaatgcgaattctgatggttggtcttgatgctgctggtaagaccactatcctgtacaagctcaagctcggagagatcgttaccacaattcctaccatcgggttcaatgttgagactgtggaatacaagaacattagcttcactgtttgggatgttggtggccaggacaagattcgtcccttgtggaggcactacttccagaacacccagggtcttatttttgttgtagacagcaatgatagggacagagttgttgaagccagagatgagttgc

SEQ ID NO: 244049 - DNA, 362 bp, Glycine max
gtacgaggactcgtgataacaatttgcttggcaaatttgagttatctggaattccccctgctccgagaggtgttcctcagatcaccgtttgctttgacattgacgccaacggtatattgaacgtgtctgcggaggacaaaaccactggacagaagaacaagattacaattaccaacgacaaaggaaggctttctaaggaggagattgagaagatggtgcaggaagctgagaagtacaaggctgaggatgatgagcataagaagaaagtggaggccaaaaatacattggagaattacgcctataacatgaggaacacaattaaagatgataagattgcttccaagctgtctgctgatgataag

SEQ ID NO: 244050 - DNA, 318 bp, Glycine max
tggcaagcacttgctgatgagtatggtatcagatgctttgaaactattgcaagaaccaacatgaacgttgaagaggtcttcttttcaatagcaagagatattaagcaaaggcttgcatacacagattcaagggctgagcctcagactatcaatattaaccaacctgaccaggcaaccagtggtggtcaacctgcgcaaaagtctgcttgctgtggttcatgaaaagaatcattatctgtagaaaaaagtgcacatgtttctgcaataacactcatctgggtgcttaatgtattctgatgacattataaattagagcat

SEQ ID NO: 244051 - DNA, 368 bp, Glycine max
ggggagcacaaggagggacttgtggataagggcgggacaagatccatggtgagggccatgacaagggtgagaaaaagaagaagaaggacaagaagaagaaggagcatggacatgaccatcatggtcatagcagcagcagtgacagtgattagatcttatatgttaagcaggtgtacggtacgatggtagtgaggagccagaatccctcttcctgctttatgatataatacaaataaaatagcgattccggaaatcatgtctgtaactgctctttttatttatgtgataaatgtaaaacgctttggtttggcttggccgttgtgcattaagttgaaaaaataaatgttataattactcagaatcttaaa

SEQ ID NO: 244052 - DNA, 243 bp, Glycine max
  unsure (1)..(243): unsure at all n locations
tggtgttctagtgtgtgattgtttgttgttntagctctttcttcttcttttggtggtccgtgtttgtgtttgttttttctctcacctgaaaatgtcttgctacggtggtaactgtggttgctgaagctcctgcaattactgcaacggctgcggaagctgcaatatgtacccatacttgagctacactgattctaccaccaactatacctttatcattgtaatatcacctttttaagctcaatt

SEQ ID NO: 244053 - DNA, 261 bp, Glycine max
gggaaaagacggagttgaaatcatgggaattgcggggggtgaccggtttggagtgtatggaactgattttggttggggaaagcctgctaaggtggaaatagcatcggtggatagagccttaaccattgggtttgcagagagcaaggatgggaatgatggtgttcaagttgggctcgtgctgaagaaacatgtcatggatctcttttgtactttgtttcgtcaaggaatgttagatgattgatcctaaattctgaacatgca

SEQ ID NO: 244054 - DNA, 404 bp, Glycine max
gtatctacaatttctcttctagcaatcaggcagctttggatcaaccctcgcgatgtgtttacaatatggaacagaccctctcctttgaatttgagcatgaatttgttcaaaacacggcaagagtgaaatctgttgatatgcatccaactgagccatggattctactgggtttgtattcaggaactatttctatttggaactatcagacaaagactgaagagaagtctttaaaaatcagcgaatctccagtgagatcagcaaagttcattgctcgggaaaactggattgttgcagctacggatgacaaatacattcacgtctacaattatgacaaaattggaaatatagttaaatttgcggaacataaagaatatatcatgaatttaactgttcatcctgtcctt

SEQ ID NO: 244055 - DNA, 169 bp, Glycine max
tgttggctggggtgctcatggtggagatgccggttcatttaaagaccctggcggtgttgacagaattggttcctatattgtaaggcaagctgcaaagagtgtcatggcaaatggccttactagaaagtgccttgtgcaagtttcctatgccattagtgtccctaaaccc

SEQ ID NO: 244056 - DNA, 402 bp, Glycine max
  unsure (1)..(402): unsure at all n locations
tcgttcacgaagctgttcatcaggttgtttgcgaagagggaagtgangattctgatggtgggtgtcgatgctgctggtaagacaaccatcttgtacaagctcaagcttggagaaatcgtcaccactatccccaccatcggatttaatgttgagactgtggagtacaagaacatcagcttcactgtgtgggatgttggtgatcaggacaagatccgtccactgtggaggcattatttccagaacactcaaggtctcatttttgtggttgatagcaatgatagagatcgagtggttgatgcaaaggattagctgcacaaaatgttgaatgatgatgaactttgagaagctgttttgctttgtttttgccaacaagcaagatcttccttatgcaatgaatgctgc

SEQ ID NO: 244057 - DNA, 286 bp, Glycine max
cactgagagagatctcgaagacgaattccgcgtgttcggagttattcggagtgtgtgggttgcacgtagaccacctggttatgcttttattgactttgatgaccgcagagacgcacaggatgatatccgtgaattggatggcaagaatggttggagggttgagctttctcacaactctagaggtggaggtggtggtcgtggtggtcgctctggtggttctgatttgaaatgttacgagtgtggtgaacctggtcattttgctcgtgaatgcctcatgcgtggtggt

SEQ ID NO: 244058 - DNA, 213 bp, Glycine max
aggtagataaagagagagaaagatgtcgaatcgtggtcgtggtaattcagcgggtgacaagttccgcatgtcactgggtcttccagtggcggcgacagtgaactgctccgacaacacatgggcgaagaacctctacatcatttctgtgaaagggatcaaaggccgtttgaaccgtcttccctctgcctacattagctacattgtgattgccac

SEQ ID NO: 244059 - DNA, 297 bp, Glycine max
taggggaaaaaaaaaaacattttcatcatcttcttctgctttggcatcaatcatcaccagtggtgtttttccttctgagaagatcgaattgtgttttgcaaaaatgggagttccagacaaagaccctctttcccaattgagtttgcctcctggttttcggttttaccccaccgacgaggagcttctctttcattatctgtgccgcaaggtcgctggccaccatttctctcttccaatcattgccgaaattgacttgtacaaattctacccatgggttcttccaagtaaagctatttt

SEQ ID NO: 244060 - DNA, 267 bp, Glycine max
gaacttcatctatattgaaaatcagtatttccgtggagtctcttttgcctggagtgctgatgatattaagcctgaagacattggtgctttgcatctaatcccaaaggaactttcactcaagattgttagtaagattgaagctggggaaaggtttgctgtgtatgttgtagtcccaatgtggccataaggtgttccagaaagtgcgtcagttcaagcaatattggactggcatattagaacaatggagattatgtacaaggacattat

SEQ ID NO: 244061 - DNA, 250 bp, Glycine max
tgcctggtgatgggcccgggccaggaattggctgcgttttaacaaatccgcgaggggcattacctgaacgctgcgattcacgacagcatgaagctgttcccaccgattcaattctattcgaaattcgccactgatgatgacttgttgccatatggcactttctttataaaaggcactatggtaacttaccacccttactctattggccgaatggaaaatattttggggccctattgtcttgacttcatgc

SEQ ID NO: 244062 - DNA, 182 bp, Glycine max
ttcttctgcgataagactacagaatgtgatgcacgattttcaaaggaagttgagtaccttcttaagaaaggatggattccttgcttggaattctattttgatcacggtttcatgtaccgtgtacacaacaagtcacctatatactactattgactctactggaccatgtgtaatctgcctat

SEQ ID NO: 244063 - DNA, 295 bp, Glycine max
tagggacatttcttttgacaagcgaatcttatctcgaagatggctaaaactggtgccacggtgaaacatactcccacccgctaatttatcgtcacattagccgctcacttcaaaaaatctggaaagatcgagcttccatcatggcatgatcttgtaaagacaggtgttgcaaaagaactctgcccacaatatcctgattggtactatgttcctgctgcctccattgcccgtaaaatctacctccgtggtggtacaagggttggctgtctcatcatagtctatgattcatgctatc

SEQ ID NO: 244064 - DNA, 331 bp, Glycine max
gttattaattgaagtttttgaagggactatgaggttagagaatgttcaagttttgccagatgatatatatgtgaacgacattgttgatactgcaaaattagtcagcaagtcctcgttgcagtggtttatacataaagttcaagatataattatactaagcacacttaggcatcttgtagtaaatgatgctaataaatcaagatattctcttgaatacttggacaaagataagactattgttgctcatatggctggaagaattgatgcttacataaagatgtcacatgattggcctatattttgttcttcatataatctgttattttctaaa

SEQ ID NO: 244065 - DNA, 403 bp, Glycine max
  unsure (1)..(403): unsure at all n locations
tccgagggggccaacaaatactgaagcttggcattgctgaaatggaatgcaagagagtaccttgggatggcaaaaatcagaatttggccgttcgagttgaagaatcaagcaagaagcctgattacttggcaattaaatttttgtaccaagggggacaaacagagatagtagccgttgatgtggctcangttgggtcttcaaactggagcttcatgagcagaaaccacggggcagtatgggacacaagcagggtaccccaaggcgcattgcaatttaagttagtggtaacggcatggtatgatggcaagtggatttgggcaaagaaggtcctacctgctgattggaaaaatggacttatatatgattctggccttcagattactgacattgcacaagaagcttg

SEQ ID NO: 244066 - DNA, 337 bp, Glycine max
acgcatccgcccactcgtccgtactgcttctaaaacaccacatagagactacacaaactctcttatctgtggccacataaacatgtatccttccttcccctttttctcattaaaatcacatcttactgaatattacatgtcttcaccattattttatcaacaggattgtatactatctttacaaaaccatgctcctatgttgcataaacatcttcaatctttctgcctaaactttcatatactggtcacaattgcctcacttaaaaactttcatctaatcgcttcttcataaaactgaccttctataccataacaccattacatcatcctccaattt

SEQ ID NO: 244067 - DNA, 270 bp, Glycine max
ttaataatatgaccaccagtgcagggaagttggtgtgtgtcaccgatgctggcgggtatattgcttcatggattgtcaaattcctacttgaacgtggttacactgtcagggccactgttctaaacccaaatgatcacacaaaggtataacatttgctaaaacttgaatgtgcaaaggatagactgcacctttttaatgcatgtctttttggtgaaaattcttttgactccattgtttatggctgttatggcgtctttcatacttcttctt

SEQ ID NO: 244068 - DNA, 324 bp, Glycine max
aagcataaatgagctaacaatcaacatactctactcaatattctcaagcctatccatacaaagaaaatttatcaatatataacactactctataacctttaatggcctccaaatattctctaacatcttcatataatcacatatcatcactctaaaactcctatcttaatatattaatctgacaacattacacatcttacattaatatatataacacttactaattataacatacactattacatatatcaacttcttaaatccttatattactatcattctcactccataattcatatatatctcaatctctataattttatt

SEQ ID NO: 244069 - DNA, 292 bp, Glycine max
  unsure (1)..(292): unsure at all n locations
tgtgtaaaacaatagctcttagtgtaaggggggnaggcagatttggagtttaggcgtcccagagaccactgaagtgtgtggtatgtggcgctgaaaccgacttcaactatgactcagagaccgggttgacaaccttctccattccagtttctccagaggagatgtacagatggtcaatatagatccaagtttgagtcctttttaagacttggtgtttgatgcattgttgtatcatgagaaaggtttagttgtaattaagcattaaaggaattgatggattcatgcatatata

SEQ ID NO: 244070 - DNA, 211 bp, Glycine max
cgggaatgaagccaatagggaagtacgtcactctggatacggtgagcgtaagggtacaagggaggcaaggcttcccactaaaattctatggatgaggagaatgcgtgtgctcaaacacttgcttcacaagtacaaggaatctaataagattgacaagcacatgtatcatgacatgtacatcaatgttaaaggtaatgttttcaataacaat

SEQ ID NO: 244071 - DNA, 226 bp, Glycine max
tataggctcgatgcaaatttggagagagtaaggttttggacctgtgctgtgtgtgaaaacattcagtaccgaaaaagaatctattgaactatcaaatgacacacactacggcttatggtctgctgtaatgtcaaaagatctagaaagatgctatcgcatatcaaatgctattcaagctggaattgtatggataaattgtgctcaaccaatcttcattcaagctcca

SEQ ID NO: 244072 - DNA, 295 bp, Glycine max
gggagaaaggaatggatcccaggggctctgggatgggatcagcagatagagattgaacatttgcagcgaaaagggaaagaaagagaaaatcatgtcaacagcagaagctcctccttctttccaagaagcatcgcgatgcgttgtctgcaattgcagtttcaacactttcagaagaaggcaccactgtcgatcctgtgggagaacattgtgtaatgaacattcatcaaatcaaatggctttaccacaatttggcctttactcaaatgtccgagtatgtgctgattgtttcaacaac

SEQ ID NO: 244073 - DNA, 257 bp, Glycine max
taggctctctatttaaacaacttgttttttatattctgttctgtttcacttttgcgaggggcatatcctggaattcatgacctgcgcttcttccaattaatacataaagcttctgctaacattgcaactttagtttcagattattttccttatcttgaaaagggacaaatccctcccaacgtatcctatcttaatgtgaaaaccatataattctactatgcatttaaaccttattgtctaattattctaatttatta

SEQ ID NO: 244074 - DNA, 214 bp, Glycine max
tatgggctgtcgtgagctggacctggaccagccactggatctactgggcctgccctctcatctgaggtggaattgctgggcttatctactatgttgtcttcatcaaccacacccacgagcagctttccatcactgactactagaggggaaaaatgaaataataaaaaataaaaaaatgtgtattattgaattactccggaatcatctactgtgt

SEQ ID NO: 244075 - DNA, 212 bp, Glycine max
  unsure (1)..(212): unsure at all n locations
taatgggatacctatggtggctggggtgcgcatggtggaagtgccttttcggggaangaccctaccaaagttgacagaagtggtgcctatattgtaaggcaagctgcaaatagtgtcgtggcaaatgtccttgctaaaatgtgcattgtgcaagtttcctatgccattggtgtaccttaacccttgtcaatgtttcttgactcttatagaac

SEQ ID NO: 244076 - DNA, 298 bp, Glycine max
cacctccccacctctacgctcaaaacacagaagggttactgaaaatatggcggatctatcaaactgtgggcgttctcatgcttctcattggaaaaccttcttggtttgctccttgtccggaaaattccctacaatccgccaaccgtaataatgctttcattcggtacaaggaaaagaagaaaacaccgattttttacaaaaaagttaagtattcctctctcaaagcaaaggctcatgtcacaaagcctgttaaaaggccgtttttcaaaacccgtgacctctattattatgacccttt

SEQ ID NO: 244077 - DNA, 272 bp, Glycine max
tgtgtatcaacccatcaaacaagatcacgatgttgttaaacatgtctggtggagaggaataaaactccctacatctcaaaattgcacacaagttttttaacgcaaactgcttaatgaactgtgaatttgcattgattctttatcacaactatcatcaactttaacatacatccgattatcccatgaatcaaatttctcatgtattttaaaagtcactacattatgttaatctcttcatccactttataaatccctattcttttatacaattt

SEQ ID NO: 244078 - DNA, 164 bp, Glycine max
tgatgatggaatgccaaactaccacaggcacttcctgaagggaaagctttacattcatttctcagtggaatttcctgataccctgagtcttgatcaggtgaaagctttggaagctactcttccactaaagcctacatcgcagttaacatacatggagcttgatt

SEQ ID NO: 244079 - DNA, 242 bp, Glycine max
ccctctccgattacaatattcagaaagaatcgacgcggcatgttgtacttcgactccggggagggatacagatcttcctgaaaacactcaccgggaaaactattactctggaagtggagagttctgatacgatcgataacgtgaatgcgaagattcatgataatgaatggattccaccggatcaacaacgtcttatcttcactaggaatcaactctaaaactgacacactctatcctattac

SEQ ID NO: 244080 - DNA, 367 bp, Glycine max
gagaatccaaaaatctctcgtcgtccaagaaagaagcaccgggaattaattctcgtttcccattcccatccccatgccaactattttgcataggattttccttctttacaacctcgtacactcattcctcctctgtctggtccccaagaaggtgcgtcccttcctccccccttcttggttccaaaccaaaaccatcactgcaccttcttcttcttcttcttcttcttccagtgcccgcatcatcaagagaacaacaatggaccccaacgagctgaagcgcgtgttccaaatgttcgaccgcaacggcgacggaagaataacgaaaaaagagctgaacgactcgctggagaatcttggcatcttcatt

SEQ ID NO: 244081 - DNA, 191 bp, Glycine max
ttgggggaaccagaatgaagccaatgcgaagatagtaattggtactggtgagtttatggcccctgaatatgcaatggaaggtctgttttcagtcaagtctgatgtatacagttttggtgtattactactatagatttttagtggcctcataatcactatctttcgtcactcagatgactcaaccctcatat

SEQ ID NO: 244082 - DNA, 232 bp, Glycine max
aataccacacaacgggaactaaacatatgaagaatatggcgtccttaagctcctcattagtgctgctccgtgctgctccaagtgcaacccgccaagttccggctgactatgagatgcccataatttacaagccacctgcatacacacggccggtttataagcgcccagttgaagaactaccagtgtggctacctccagtgtagaagcctcgagttgacaaaccacctgttta

SEQ ID NO: 244083 - DNA, 410 bp, Glycine max
gattgtgattgtgaacaaaaaagtgtagtgggaaatggcaggtgcgggtgcaggaggagggtatggggacgcgaaccagaggatagactacgtgttcaaggtggtgctgataggggactcggcggtggggaagtcgcagatactagctcggtttgcgaggaacgagttcagcttggactccaagtccaccatcggtgttgaatttcagacgaggactttggttatcgatcacaagaccgttaaggctcagatctgggacactgccggccaagaacgatacagagcagttacgagtgcatattacaggggtgctgtgggggcaatgttggtttatgacatcactaaacgccaaacctttgattcacatacacgttggttagaagaactgcgcaaccatgctgacaagaaca

SEQ ID NO: 244084 - DNA, 397 bp, Glycine max
gaagaggaagcagctttcgtgaaggtgagcatggatggtgcaccgtatctacgaaaggtggacataaagttgtacaagagctaccaggagctgtcagatgcgctggctaagatgttcagttccttcacgattgaaaaatgtgggtcccaagggatgaaggactttatgaatgagaccaaattgatagaccttttgaacggctctgattatgtacccacttatcaagacaaggacggagactggatgctcgtcggtgacgtgccctgggaaatgttcgttgaatcatgccagcgccttcgcataatgaaaggttctgaggctatcggccttgcaccaagagccgtggaaaagtgcaagaacagaagctgaagtgattttagggttcgggcacaacaat

SEQ ID NO: 244085 - DNA, 403 bp, Glycine max
ggtgagttcattaacatatacaaattctctgtgttgtgttgtgtacttgtgttggttgtgttgttgttgtaggaaatttaagtgaagagagaatgatgatgaagtctgctatgtgtgcattggtgcttgtggcactggttgtggttgaagtggggcccatggctgaggctgcggtgacttgcaagccaacacagttgactccttgtcttccggcaattaattcaggttctgcaccttcgagtgcttgttgccagaagctgaaggagcaaaagccatgcttctgtggctacctcaaaaaccctagcttgaagcagtatgttaactctcctaatgccaaaaaaaccgttagttcttgtggtattgcctatccaacttgttaagcacctcttatatatatatatat

SEQ ID NO: 244086 - DNA, 385 bp, Glycine max
cgcctcgccaatgttgaccgatctgcctccaagaaaaacaacaacaacttgaggcttgatgattgggtgttgtgtcgaatctacaacaagaaagggaagattgagaaatacaacacgaccgcaccgaagatgaatcttgaaatgattcatagttttgagcacgagaacgagacgaagcctgagattcataagcttggaaatgagcaattgttgtacacggagacttcagattcggtgccaaggttgcacacggactcgagcagctcggagcacgtggtttcgcccgatgtgaggtgcgagagggaagtgcagagcgaccccaagtggaataacgatgattatgatctgggcctacagctagaaaacgcgtttgattttcagttta

SEQ ID NO: 244087 - DNA, 406 bp, Glycine max
  unsure (1)..(406): unsure at all n locations
gacggtggtggtggacaacacgttcgcgcccatggtgctttcgccagcgcgtcttggtgctgatgttgtcgttcacagtatctccaagttcatcagcggtggggccgatatcattgcaggagcggtgtgcggacccgcaagactggtgaacgcaatgatggatctgcaacaagggtcactaatgctgctgggtccaacaatgaatgcgaaagtggcattcgaactctcggagagaataccgcacctagggctaagaatgaaggagcatagcaaccgcgcactagagttcgcaacgaggctcaaaaggctangaatgagggtaatatacccgggcctggaggagcacccacagcaccagcttctgaaatcaatgcacaacaaggactatggctacggcgggctcatg

SEQ ID NO: 244088 - DNA, 495 bp, Glycine max
  unsure (1)..(495): unsure at all n locations
ttaactgtgcacgccgccaggtaacggtcaggaattcccgggtcgacccacgcgtccgtacggctgcgagaagacgacagaagggtaatgaaagcagtgagaatgcattggagttgactttgagtcgccggattatagaggatcttcattattcatctcctcctagtacactggatggtggaatggatgatactatctacgaacaacttgagcaggctagagctgaggctgagaatgctacgctaaatgcataccaagaaactgtaaggcgtaggaaagctgaaaaagatgcctttgaagctatacgcaaggttaaagcttctgaaagtttatatacagaggagttgaacctgagaaaaatgacacanaanaaaaaataaaaaagataaaaaaaaagcggccgctctaaaggatccaagcttacgtacgcttgcatgcgacgtcatagctcttctatagtgtcacctaaattcaattcactggccgtcgttttaa

SEQ ID NO: 244089 - DNA, 402 bp, Glycine max
gactcaaaattaaccacaagcataagcacaagcacaagcacaagcacttctctaattccctttcacactctattacagacttcacaagtgcttacacttcaaatggctttggaagctcttcaatcacccaccacagccactccatcgtttagtccctttgaagaaaccagtctcagttacttagagacaccgtggacgaaaggaaagcgttctaagcgtagccgcacggagcaacaactgcaacacccttcatgcaccgaggaagagtacctcgctctttgtctcatcatgctcgctcgcggcggcgccggcagtgtctccaccgccaagcccgctgtctccgaaaacaattctgcgccgctatccgccgccaaactgagctacaaatgttcggtttgcaac

SEQ ID NO: 244090 - DNA, 391 bp, Glycine max
gggcacaagaaggaggaggagcataagggtgagcaccatgctggagaatacaaaggggagcaccatggtgaacacagtagtgagtacaaaggagagcatcatggtgaacacaaagctggagagtaccatggtgagcacaagccagagcacaaagaggggttcctagacaaagtcaaggacaagatccatggtgagggcggcgccgccgagggcgagaagaagaagaaggagaagaagaagaaggagcatggccatgagcatggccatgacagcagcagcagcagtgacagtgattaagctgctgcatcacctatatatttaaaaggtttatgggaccatagtagcgaaggctgtgccttaatttctctccctctctctctctctctctctc

SEQ ID NO: 244091 - DNA, 387 bp, Glycine max
  unsure (1)..(387): unsure at all n locations
ggttctagtgtgtgattgtttgttgttgtaactcgttcttcttcttttgttgttctgtgtttgtgtttgttttttctctcacctgaaaatgtcttgctgcggtggtaactgtggttgcggaagctcctgcaagtgcggcaacggctgcggaggctgcaagatgtacccagacttgggctacactgactcaaccaccaccgagaccttggtcatgggagtggcacctgttaaggctcaatttgagggtgctgaaatgggtgtgcccgctgagaacgatggctgcaaatgtggaccaaactggtcctgcaacccctgcacttgcaagtgacgtgttgggagagcaagcttcaagcagagatagcccttaattangaataatgataaact

SEQ ID NO: 244092 - DNA, 393 bp, Glycine max
  unsure (1)..(393): unsure at all n locations
gaaaatgaagaaaaggagcctgaggacaaggagatgacactggaagagtatgagaaggtgctggaagagaaaagaaaggccctgcaggcacaaaaaactgaagtaagaaaggtggacatcaaggagtttgcatccatgcagccactgtctaacaagaaagaaaatgatgagatctttattaaattgggatctgacaaggataaacgcaaagatgctctagagaaggaggagaagtctaagaagtctgtcaacatcactgagtttctgaagccagctgaacgggaaaggtactactctggtgggcgcggtcggngacgtggccgtggttctagaggaggtacagtggaaatgcatacagcaatgttccagctccatcaattgaggatcccgggc

SEQ ID NO: 244093 - DNA, 392 bp, Glycine max
cttgtagccaatcaccgcttgaattttcagatacgccaacaaagttcacatttcgtgaggggatttcagcaacttattcagaaggattggattgacatgtttaatgaacatgaacttcagcttggatattgatgatctgcggctgcataccaactatgcaggaggctatcatggtgagcattatgttatggagatgttttgggaagttctcaaaggcttttcactggaaaacaggaagaaatttctgaagtttgtgacaggttgctctcgtgggccattgcttggtttccgatatcttgaacctatgttttgcatacaaagggcttccggtaatgccgctgaggaatcacttgaccgatttacaacatcggctacctgtatgaatctactaa

SEQ ID NO: 244094 - DNA, 397 bp, Glycine max
gaaccacatgcatatttatctggggagtgtgttgaatgcatggcaacttcggacagtgttgtgcgagctggcctaactcccaaacacagagatgtccagaccctttgctccatgctcacatacaaacagggttctcctgaaatcttgcgtggagtatctgttaatccagatgtaaataaatatactccaccatttgaggaatttgagattgatcgttgcattcttcctcaaggggaaacagtggtgttcccagcagttccaggtccttcgatctttttggtcacagttggtgaaggaacaatgaatacaggattacccaaaggacatgtggtcaccgaaggtgatgttctttttgccgcagctaacactgagattagtgttactagtgcatccgagt

SEQ ID NO: 244095 - DNA, 397 bp, Glycine max
gaacactgaaaagaaaggaaagtgaagttgagagtttaagaagaacaagaaatgggggttggttcccaggatgccatcaagcagttccaggcattcattgaccaagctgagcagcctttgcgaacaacgtttcagaatgttcatcaaggatttgtcactgcaactttaatgcggtttctaaaagcaagggactgggatccttacaaggcacagaaaatgttggttgattgtttaaattggagggtgcaaaatgagattgacaatatattatctaaaccaattgttcctgctgatttatacagagcggtgcgtgattcacaactcataggattatcaggttactcaagatagggtctgcctgtctttgcaattggtgttgggcttagcacatttgaca

SEQ ID NO: 244096 - DNA, 376 bp, Glycine max
gagggttttacactgcggcagctacttcggctccatcttcttcgatctctcaaactctatcggcgcagaaccaatcctatatcactatggggaagacacatggaatgggggctgcccgcaagctgaagtctcaccgtatgagacaaaggtgggctgacaagtcatacaaaaagtctcatcttggaaatgaatggaataagccttttgctggttcatcccatgcaaagggtattgttcttgaaaagataggtattgaggctaagcagcccaactctgccattcgaaaatgtgccagggttcaactcatcaaatatgggaagaagattgctgcattcgtgccaaatgattgttgcttaaattacattgaagagaatga

SEQ ID NO: 244097 - DNA, 419 bp, Glycine max
agaagggggaagaaaagacattcaacaaacaacgcaatgggtattccgtcggaactgatggacatgttgttgcccaacaaaaagggcgtcctcgttgcctctcccgcataggacaggaagactttgaggtccaagcaatgcactagggaaggtgtgcgagctggattcaaggctgcttccattgctggtgttgccagtgctgtgcctacattggctgcagttcgtatgattccatgggcaaaggcaaacctcaattatactgctcaggcacttatcatatctgctgcatccatcgcctcatacttcatcactgctgataaaactatcttggagtgtgcaaggaaaaatgccaagcttgaagatgctttgagacacaatcaacaatagttgtcttagaaactgaaataagtacccatcat

SEQ ID NO: 244098 - DNA, 314 bp, Glycine max
gaacacagcagaaaccctgactactttgctgttgtggttctctatgttgatggaacatacgatgtcactgctgttgagttgtttcagcaagattgccaagaatggaagccaatgcgcagggcatttggggcaatgtttgactatagcaacccaccaaacggtgagatctacttgaggttccaagtgagtggcagtgcagggctttattgggtacagtccaagaatgctatctctggtgattggaaggccggagcaacatatgacaccaatgttcagcttaattaggaaggaaagaagcactttgagattccttg

SEQ ID NO: 244099 - DNA, 381 bp, Glycine max
ggagggaggggacagctgtgaaaattgtagatccgccattaaacaacaattcacgaaatgaaatgttgagatgtatccatatcggtttgctttgtgttcaagaaaatttagctgatagaccaaccatgacgaccattatgctcatgcttaatagctactctctcagtcttccaattccttctaaacctgcattttatgtgagcagtagaactggaagcatttcagccacgcagtcatgggggtatagttcaggggaatcaagatcaagagaattaacaattaaatcagctcaagaagcagaaaatgagtttactgatccataccttcgctagattttgctcatggaattgatattcattcaccatcgatgtcctggagttc

SEQ ID NO: 244100 - DNA, 295 bp, Glycine max
ggctgtgagtgagattacccatagatagagagcgcggcataacctaaacttacccttcgtctctctgtgtgtgtgcgcatcaaacgcaaccagaagcagccatggccactgcaagaactgtgaaggacgtttctcctcatgagttcgtcaaagcttactcttctcacctcaagcgatctggcaagatggagctgccagagtggactgatattgtgaaaactgcaagatttaaggagttggctccctaagattccggactggtactatgttaaaagctgccttcaatgggcaagaa

SEQ ID NO: 244101 - DNA, 373 bp, Glycine max
ggggcacaacacaacacaaaagtcacaatcacaaatctgagtatagtggagtagggtttttttgcgtttgagagaagcatgagcaggagtttgggaattccggtgaagctgctccacgaggcttcggggcacgtggtgacggtggagctcaagagcggagaactctacagaggcagcatgatcgagtgcgaggacaactggaactgccaactcgagagcatcacctacactgccaaggatggcaaaacatcgcaacttgagcatgtttttattcgaggaagcaaagtcaggtttatggtcatcccagacatggctgaagaatgcgtctatgtttaagcgtttggatgcaagaatcaagggcaacggtgcatca

SEQ ID NO: 244102 - DNA, 379 bp, Glycine max
ggagaaaaacgagccaattcatcattttctctcttctctgcttcttcttgttcaaatcttaggagctgaggagaatcaatcgagagaaatatgtctggtatcgctcgtggacgccttgctgaggaacgaaagtcatggcgcaaaaaccatccacacggtttcgttgccaagcccgagactctacctgatggcaccgtaaatttgatggtctggcattgcactattcctggcaagaccgggactgattgggaggggtgatatttcccactgacaatgcacttcagtgaagattaccctagcaagcctcacaagtgcaaattccctcaaggtttctttcaccctaatgtgcatccatctggaactgtttgcttgtctatac

SEQ ID NO: 244103 - DNA, 411 bp, Glycine max
ggttctagtgtatgtgattgttgtgactcgttcttcttcgtcgttatcttcttcttttgttgtttgtgtgtttgttttttctctcacctgaaaatgtcttgctgcggtggtaactgtggttgcggaagcgcctgcaagtgcggcaacggctgcggaggctgcaagatgtacccagacttgagctacaccgagtcaaccaccaccgagaccttggtcatgggagtggcaccagttaaggctcaattcgagagtgctgaaatgggtgttcccgctgagaacgatggctgcaaatgtggagctaactgcacctgcaacccctgcacttgcaagtgaggtgttggagagctaaagcttcaagcagaaatggcccttagaaattatgataaaaactatatgtagtttcaaaacttc

SEQ ID NO: 244104 - DNA, 315 bp, Glycine max
gaaatggatctccaccaatgttcaatcgactgtccgttctctccctccaactggtttgactgtggaaacacccttcattgataactctgaatctggtcagcaaaggttcaggacggttagtgaccatttcatacctgtgttccacaaaaaggcctacttgcattggcatactggataacgatacgattaaattgagtttactgaagctgatagcatcatcaatgaccgtgtgtgcgactatcatcactaccaacatgtaactgctgatcatgagggctatgactaccaccatgacgaagaacatcatgaacatca

SEQ ID NO: 244105 - DNA, 367 bp, Glycine max
gcctttaaggattacttcaagagacttttcaactttaaaaaggacaaagatggctactggaagtggtttgctgggaatttggcatctggtggggctgctggggcttcttccctcttatttgtctattctttggattatgcccggactcgtttagcaaacgatgcaaaggctgcaaagaagggtggtgagaggcagtttaatggcttggttgatgtttacaggaaaaccatcaagtctgatggtgttgctggcctttatcgtgggttcaacatatcatgtgttggaattatagtgtatcgcggtctttactttggaatgtatgattccctgaagccagtagttttggttggtgggttgcaggatagtt

SEQ ID NO: 244106 - DNA, 373 bp, Glycine max
gagcactaatttatatagcaagctagctaggttgaaaatagtttggttttgtagtaagtgaggtgaggtgccaaaatggtgaagataactcttggtactttcgatgactcttttggtgttgcctctcttaaggcttatttggcagagttccatgcaactctgattttcgtgttcgctggtgttggttcagccatcgcttacaacgagcttacaaaagatgcagccttggatccaacggggctggtggcagtagctgtggcccatgcatttgcactgtttgtaggtgtctccgtcgcagccaacatctcgggtggccatttgaacccagctgttacttttggattggccattggaggcaacatcaccctcatta

SEQ ID NO: 244107 - DNA, 311 bp, Glycine max
ggggacgtattttgggctggtcagcatcggaagtctggtattggttatgctgctcgctacaacactgataagtcggttgctacagggcaagttgctagcactggaatggttcttctaagctatgttcacaaggtatctgagaaggtttctctagcatctgagtttatgtgcaactacttgtcaagagatgtcacagctagctttggtttatactacatccttagacagtgccgccttaggggaaagattgattccaatggctgtgtcgctgcttttttggaggagcggttaaatatgggtctgaatttaat

SEQ ID NO: 244108 - DNA, 377 bp, Glycine max
ggatggaagacagtgacatacacaatttgcaaacagaagctttacatcaacaatacgaattggtcaaacaaaggactatgaatggaaattcaatttatggttcccacgtgatgcagtatggtgacatagggcttagcgagaacaatctcgtcttatatttgggtacaaatcctgctaatgataattttacttttgtgcttaaaactcattggtgccaccttcaaaagcagtcaaccaacgtgatgcagatgtcatccatttttgggataagttccgcaaagctcctgtgggttcttctaggaaagctgcagctgagaaacaaattcttgaagcaatgtctcacagaatgcatatagatgacagcatgaaacgtattg

SEQ ID NO: 244109 - DNA, 346 bp, Glycine max
ggggaagacaccggcacaagttgcccttcgatggggcttgcaagcaggtcatagtgtgcttcctaagagcactaatgagtccagaatcaagggaaattttgatatctttggactggtctattcctcaagatttgatgaccaggatcgctgaaattaagcacgaaaggctagttaaggccagtttttttgttcacgagacctatggtgcctataggagcattgaagacgtctgggatggtgaactctgagcaatatgcatctttgagacgttgaaaaatacattgctcctagagcaaatttattctgccttatacccactagttgtagtgattcaagtgagattttg

SEQ ID NO: 244110 - DNA, 405 bp, Glycine max
ggcagcagttgggaggaggcactgtggcagaagtcttaggagtgtaaaacagagacgcaaaatgaagacgattctatcgtccgagaccatgaatattcccgacgacgtgagcatcaaggttcacgctagggttatcgaggttgtgggccctcgtggaaaactcgtgcgagacttccaccatctgagcttggacttccaacttattaccgacgatggcggtaaaaggaagctcaagattgattcttgggttggttctcgtaaaacctccgccgccatccgcaccgccctcagccacgttgagaatttgatcaccggcgtcaaccaaggataccgatacagaatgagattcgtgtacgctcaatttccgatcaacgctagcattggcaacaacagcaagtccatcga

SEQ ID NO: 244111 - DNA, 408 bp, Glycine max
ggtacagaaattaacaaccatatctattcttacaagttacatccattgagaaacatgaaggtctcccccttagcattttcaatcctttttttgtccttcaccatagaactcttcattggcattgcttcagcagcacaagaaccagtgcttgacgcctcaggccagaagctgagaacaggtgtcaagtactacattctaccagtcttcagaggcagaggtggaggcctaacagtttcaagcagtggcaacaacacatgccccctctttgtggtgcaagagaagcttgaagtctcaaagggcaccccagttaccttcacaccctacaatgccgaaagtggtgtcattctaacctcaaccgatctcaacatcaagtcctatgtgaaaagcaccacttgtgataaacctcca

SEQ ID NO: 244112 - DNA, 352 bp, Glycine max
ggcggcagcttcatctgtttttctgcatcggcgtgaacaatggcgacgtacgctgcgatgaagcccaataagcctggcttggaggagtcccaagaacagatccacaagataaggatcaccctttcctccaagcacgtcaaaaatctcgagaaggtttgtggggacttggttcgtggtgcaaaggataagaggctcagggttaagggacctgtcaggatgcccactaaggttcttcacatcactaccaggaagtccccctgtggtgaaggtaccaacacatgggacagatttgaacttcgtgtgcacaagagggtgattgacctctacagtttcccagatgtggttaagcaga

SEQ ID NO: 244113 - DNA, 299 bp, Glycine max
gagcgccaatgtttttttcagaggagtttcatcttgtaatcaaaagagtttatcttatagtaagaaatcgatgtcttactccattttaaggaacaaaacaagagaacaatagcctgacaaagggtttagccataaaatcgaatccatcattgatttgggatattgataaggtgaatactcatttctcgtcaatgctaggcataatgcgggtatagggacctaaaaaagattatcttttcttcctatcttatgaactttaaggtgtatgaagtgtcatttcctatcttagattttaaatt

SEQ ID NO: 244114 - DNA, 370 bp, Glycine max
gggagaccctgttgcaattcccaatgatgttgagatttataagcatcctgagagaagaaagaagagcccgaacttggggaaccactgcccctggcctaccctatgttgaacaaactataaccaatgctggaaattggttgattgggggtgacctagaggtcattgagcgaatccagtacaatgagcgacttgatcattttcggctgtctccagcagaactccgtgcagagttcacaaggcgcaatgcagatgctgtgtttgccttccagctccggaatcctgttcacaatggccacgctttgctaatgacggacacccgtacgcggcttcttgagatgggttataagaatcctgtcctcgtgcttcatcc

SEQ ID NO: 244115 - DNA, 366 bp, Glycine max
ggcggcagcttcatctgtttttctgcatcggcgtgaagaatggcgacgtaggctgcgatgaagcccaataagcctggcttggaggagtcccaagaacagatccacaagataaggatcaccctttcctccaagcacgtcaaaaatctcgagaaggtttgtggggacttggttcgtggtgcaaaggataagaggctcagggttaagggacctgtcaggatgcccactaaggttcttcacagcactaccaggaagtccccctgtggtgaaggtaccaacacatgggacagatttgaacttcgtgtgcacaagagggtgattgacctctacagttccccagatgtggttaagcagattacctctatcacg

SEQ ID NO: 244116 - DNA, 401 bp, Glycine max
gcattccactgagtgtagtaatcaatcagcttttgtttgttcttcagtactttagtgtgtgatttacttccaggattttgagaatgtctagctgtgggtgtggaagtagctgcaactgtggcagcaactgcggttgcaacaagtactcttttgacttgagctatgttgagaagacaaccacatagactcttgttttgggtgttgggtctgtgaaggcccaattggagggtgctgaaatgggtgttgcaactgagaacggtggctgcaactgtggatcaagctgcacctgcgacccatgcaactgcaagtgaggtcaacatttataaccttgaagcagagataactgtcatatatgtatcaacaaataataagaattacgtgttgtgtttaataaagtgatc

SEQ ID NO: 244117 - DNA, 374 bp, Glycine max
ggaagtttgaaagacaaatacaccatggcagatatcctgagtgaagaacagattgttgattttaaagaggcctttggcttgtttgacaaagatggagatggttgcattactgtggaagaacttgccactgtcattcggtcattggatcagaaccccactgaagaagagctccaagatatgataagcgaagtcgatgcagatggcaatggaaccattgaatttgacgagttcttgagcttgatggccaagaaagtcaaagacactgatgcagaggaggagctcaaagaagctttcaacgtttttgacaaagatcacaatggctacatatcagctagtgagttgagacacgtaatgatcaatccaggggaaaaact

SEQ ID NO: 244118 - DNA, 407 bp, Glycine max
ggctttagattcttttcccctagattcagccacagttggaaaaaaaaaaaaagttgttcgagatggcacgtacgaagcaaactgctcgtaagtccacaggaggaaaggcacctaggaagcagctcgcaaccaaggctgcacgtaagtctgcaccaactactggtggtgtgaagaagccacatcgttatcgtcctggtaccgttgctcttcgtgagattaggaaataccagaagagtaccgagcttttgatcaggaagctccccttccagaggctggttcgtgaaattgctcaggacttcaagactgatctgcgtttccagagccatgctgtgcttgcattgcaagaagctgctgaggcataccttgttggactctttgaggatactaatctgtgtggcattcacgct

SEQ ID NO: 244119 - DNA, 400 bp, Glycine max
agaccaaacaatactcagaacctgattaaggagagtatggcacagtttagtggcaaaactttggtgcactggttggtagcaacactgctgattgccttgttgggtggtgcacaagctgttgtgttatgtaacatcgactcaagtcacctaaacttgtgtcgtgctgcacttactggtcaaaaccctccaccaccagatgagaaatgttgtgcagttattcgccaagccaatttaccttgcctctgcagatacaagtctattcatcctttaattggaataaaacccgaaaggctttggccttgcctggtaaatgtggtctccaatcccctcctaattgttgagtgtagtgaagcaattcatgaaggtcctgttcattacaagcacttagtgttcacgtgtt

SEQ ID NO: 244120 - DNA, 354 bp, Glycine max
gagggaacattcatgtgtagtggtggctttactacgaagttgggaatggaagctgtagctgaaggccatgctgacttggtatcctatggtcgacttttcatctccaatccagacttggttttaaggcttaagcttaatgcacctcttaccaagtataacacgaagacattttacacccaggatcctgttataggatacacagattatcctttcctaagcaaagaaagtgagacaaaggagccaagggcacgcctttaactgtaatgttctttgactttttgaatactcatattgtcgtcatatgtataattaattggagtatcccaatctcaagtgaatgtcctcattatgaaa

SEQ ID NO: 244121 - DNA, 390 bp, Glycine max
gagagaatgtaggaaaggaaagggttttgtagagggagagaattccaaaccaaaaatccgaaataaataattttttttttaaaaaaaaaaagaaccgggtgtgggtgttgttggtgttggcggaggcagatcggagatctgtgatagatatagatggagggagttggggcccggcttgggcggtcctcgacccgctacggaccggccacggtgttcactggaccggtccggaagtggaagaagaaatggatccacgtgtccccttcttctgcttcctctaattccaacgccaataatcatcacaaccacgcttcgcatgcctctcatcttctcctctacaagtggacgcctctcaaccacaagcagaacaccgcaactactaacaacgct

SEQ ID NO: 244122 - DNA, 388 bp, Glycine max
aatcaaatgtttaaggaagaatttctatgacgattcgcaaccccatgcgacgaatccgtctcctccactccttctccgtcgtcttcctctactggttctacgttttctcatgaactaactccctctcattcccctaccctaattcctccaatttccccattttttttctaattaatcagatttgcaaaatcctaatttctctatcctaacataaaccccaaattcaaacaaatccaatggcttcgattccgcgtccggcgagttcgggatcttcggagggaggaggagatccggctgcgatggacgagagacagaggaagcggatggagtcgaacgcgagtccgcacgcgatcgcggttgagaaacagaagctgctcgaagacctatc

SEQ ID NO: 244123 - DNA, 407 bp, Glycine max
ggggcagagagatggtggtgactactggacttctgatgccggtccattagaggcatttaagaggtttggaaagaagcttgaagagattgaaaagaagcttatagagaagaacaaagatgagacattgagaaaccgctatgggccagctaaaatgccttacactctgcgctatccttctagtgaggagggattgactttcagaggaattcccaacagtatctctatctaaggaccctatggttgcttaagtactggtcctggttttaaataaatgtgaaattgaaggaaccagattccttaatcagttgtgtatgcttaagtcatgtatttggagtggctgaatgtatttgtatttgtcattaataaagagagttgtgttagtataatggaaaccaaaataataaatg

SEQ ID NO: 244124 - DNA, 367 bp, Glycine max
ggcagttcaattccaatatattccactctctctgtgtatgtccctacctctcccttcaagatgcagatcttcgtcaagaccctcaccggcaagagcatcacccttgaggtggaaagctctgacatcatcgacaacgtcaaggccaacatcgaggacggcgaaggaatccgccctgaccagcaacgtctcattttcgccggaaagcaacttgaggacggccgtacccttgctgactacacgattcacaatgagagtactcttcaccgtgtcctccgtcaccgtggtggcatgcagatcttcgttaagacactcaccggcaagaccataaccctagaagttgaaagctccgacaccatcgataacgtca

SEQ ID NO: 244125 - DNA, 382 bp, Glycine max
gacccaaaattgaacaagaagtcctgagaaggcatctagaacaaagctctgaatctgattttgaaaactggaacgcgtaaaatgaacggtacccctccctcataaataaaatctactactaaacgctcttctcttctgcaatcaatttgcaaaccagacacaacacaaggacaagaaccagatctctctttctcaaatcaccaagaatagttgaaaatggggctgtctttcacgaagctgttcagccggctctttgcgaagaacgagatgcgtattcttatggtgggtctcgacgccgccggtaagaccaccattctctacaaactcaagctaggagagatcgtcacaaccattcccaccattgggtttaatgttgaaactg

SEQ ID NO: 244126 - DNA, 346 bp, Glycine max
gacactccctttttaaaaccgttgtcttctcacttcgtcaaaaccaacgaggggcgtccccaagtctcaagccaaccatgtcttccttcaagagcaagtaccaggatgaactcattgccaatgctgcttacattggcaccccagggaagggtatccttgcggctgatgagtcaactggtacaagtcgcaagcgattggccagcattaatgtcgagaatgttgaagcaactaggcgtgctcttcgtgaactcggattcagcacacctggtgcttttgagtgcctcagtggtgtgatcttgtctgacgaaaccctatgccaggagacagcttcaggaaaacccttcgt

SEQ ID NO: 244127 - DNA, 404 bp, Glycine max
ggaactatgaactgtgaatatcatcatcacaattaagatgagtagtgcaacaagcaaggcttggatattgtgacagccagtgttggagccgtggaggctttgaaggaccaattgggtgtgagcagatgaaattatatatgctttgaggtgtgctcagaagcacatgaaaaaccatgttagatccttgtctcaagcgttaaagaatgtttcttcttctggtctgttagcaaattaaagggtgagaaggccaaacaggctaaagagtccttgagggctgtcatgtacttaagctgttgcggtcctaactgatcttaaaggagacaactgatttgaaatgaatattgctttatgtgtaaatagagatgatagattgtatgaaaattgtaattccaaacggcaatatt

SEQ ID NO: 244128 - DNA, 398 bp, Glycine max
gagtgagagagagagaaggcaagatgtcgaagagaggacacggtgggtcggcggggaacaagttccggatgtcgctgggtctgccggtggcggcgacggtgaactgcgccgacaatacgggggcgaagaacctctagatcatatcggtgaaagggatcaaagggcgtttgtaccgtctcccctcggcttgcgttggcgacatggtgatggccaccgtgaataaggggaaacccgatctgagaaagaaggttttgccagctgtcattgttcgccagcgcactccatggcgccgaaaggacggcgtctacatgtatttcgaagataatgctggtgttattgtcaatcccaaaggagaaatgaaaggttctgctatcactggtcccattggaaaagagtgt

SEQ ID NO: 244129 - DNA, 400 bp, Glycine max
  unsure (1)..(400): unsure at all n locations
gactcacaaataaacataattacttgccttgaggaacgttccagaccacatacagaggtttctctagtgatcttcgttcttctgtggagatcttgttttttcatctcacttttcttctaattaaggaacaagctttccgcagttgaaaaccctagctagctagcttccaccaatttgaatcaccaatggctcgctctttctctaacgtcaaggttctctctgctcttgtggccgacggattctccaacactctcaccaggcgtgggtacgcagcagcgacacaaagcgcaacaagaggaggagctgcctccatcagcagcaagatagctcccaagtcaggggaagacaaggtangaggaggtgctgaaaaggtttcgtgggccccagaccctgtcactgg

SEQ ID NO: 244130 - DNA, 345 bp, Glycine max
gcagttcaattccaatatattccattctctctgtgtatttccctacctctcccttcaacatgcagatcttcgtcaagaccctcaccggcaagaccatcacccttgaggtggaaagctctgacaccatcgacaacgtcaaggccaagatccaggacaaggaaggaatccccccggaccagcaacgtctcattttcgccggaaagcagctcgaggacggccgcaccctcgccgactacaacatccagaaggaatcaagccttcacctcgtcctccgtctccgtggtggcatgcagatcttcgttaagaccctcaccgggaagagcattaccctagaagtcgaaagct

SEQ ID NO: 244131 - DNA, 364 bp, Glycine max
ggcatccatcgtaatcaaaacttaattcacatttttgtttgggttttttcatcacagtgcttttctttccttccttctgagattgctgaagagagaaaagcaaaatcgaaagaactgaattggatttcattggcggagtgaaagtgaagtgttgcgcaaatctgattggcaagaatggcgccagtgtcagctctcgcaaagtacaagctggtgttcttgggcgatcaatccgttgggaaaaccagcatcatcactcgcttcatgtacgacaaattcgacagcacttatcaggctacaatcggtatcgattttctgtcaaaaactatgtatcttgaagatcgaactgttcgactgcaattgtggg

SEQ ID NO: 244132 - DNA, 367 bp, Glycine max
gcatctcagagattagtcagcctttttgatatgctttcacgcaagtataacaaattagctgaacgcagagataataagctccatattgcaaaaggaaactcagttgaaggaaacaaccttgtagaagatatgtcaactgaattgcacatttatactgacttcttgaggcttgtactagaaataataaatgtaatcctgacttatgcactacctcggaatcctgaggtagtgtatgcaataatgcacaggcaggaagtctttcagccattcaagaatcatccacgtttcaatgaactgattgataacatttataccggaataaattttttcaaaagtcgaatggatgctcaaagagaggatggtgact

SEQ ID NO: 244133 - DNA, 389 bp, Glycine max
ggcattgtgaaatcaacagagaaacatttcactaatagagagacataagcataatattgagaaataatggacggttgtacttattgtgtgaagttgctatgccttgttgggtttgtggtgcttgtgagtactattgcaggggtggagagtgctggtgaatgtgggaaatctaccaccccagataatgaggcttataagcttgcaccatgtgcctcagcagcacaagatgagaatgctagtgtttctcagagttgctgtgctcaggtgaagaaaattgggcagaacccaagctgcctctgtgcagttctgctctccaacacagccaaaatggctggtgtcaaccctcaagttgctgtcaccatccccaagcgttgcaacctggctaatcc

SEQ ID NO: 244134 - DNA, 342 bp, Glycine max
ggaagggagaattaggtttttagggtttacaccgagcagcgacacctccctcccgcagtagccatggttctcaaaactgaactatgccgattcagtggtgccaagatctaccccggaaagggcatcagatttgttcgtggtgattctcaggttttcctgtttgccaactcaaaatgtaagcggtatttccacaaccgcctgaagccctcaaagctcacctggactgctatgtacagaaagcaacacaaaaaggacattgctcaagaagctgtgaagaagaggagacgcgctgccaaaaagccttactctaggtccagtgttggtgccactctgggagttatc

SEQ ID NO: 244135 - DNA, 414 bp, Glycine max
gtacgaggaaaatgtgtccgttgataagaagaagacttatttgatgatggtcggggacggtataaacaagacaattatcacaggcaatcgtagtgtcgtcgatggctggacaaccttcagctccgcaacacttgctgtggttgggcaaggattcgtgggtgtgaatatgaccatccgcaacaccgccggggccgtgaagcaccaagcagttgcacttcgaagtggagcagatttgtccacgttctacagctgcagcttcgaggggtaccaagacacattatacgtacattccctgagacaattctacagcgaatgcgacatctatggcacggtcgatttcatcttcggaaacgccaaggttgtcttccaaaactgcaaaatgtacccacgtctccccatgagtggtcaattcaa

SEQ ID NO: 244136 - DNA, 341 bp, Glycine max
ggaacatattgtttcagcttataagaggaccaagcaccgagcaattcttttggattatgatggcactatggtgcagcctgggtcgatgagtttaacacctaatgctgaagccgttagcatcttgaacatcttgtgcagggacaccaagaattgtgttttcattgtaagtggaagggagagaaagactcttactgaatggttttcttcttgtgaaaggatgggaatcgctgcagagcatggttattttgtgaggacaaatcgaaatgcagaatgggatacttgtattccagtacctgattttgagtggaaacagattgctgagccggttatgcatttatata

SEQ ID NO: 244137 - DNA, 345 bp, Glycine max
gcagacctcgcagagcagagcaactaggacgttcatggattatgaatccataactcaggccatggatggcatatgtgcactgtatgaaaggaaactgaaggagttgaacccgaccataagaaatctctcgtatgacattactgatctctacaacttcatagatggtcttgcagacatgagtgccctagtgtatgatagttcaattcacgcttacatgccgcacgatcgacagtggattaagcaacgaactttccaacatctgaagaaattagcacactgattaatcccttaacttttggcaatttaatgtaaagaaaatcgacaatggccgagagcctgtctgtt

SEQ ID NO: 244138 - DNA, 388 bp, Glycine max
gaaagcaccagtaattaataacaagctagctaataattccaatttgtagtaagttaagtgccaatatggtgaaaataactcctgggaacttggatgaatcttttaaccccgcctcccttaaagcttaattcccaaagttccacgcaactctgattttcgtgttcgctggtgtttgattcaccatcgctttacacgagcttacaaaagatgcagccttggatccaacggggctggtggcagtagctgtggcacatgcatttgcactgtttgtatgtgtctccgtcgccgccaacatctcaagtggccatttgaacccagctgtcacttttggattggccattggaggcaacatcactctcatcactggtttcttatactggattgccca

SEQ ID NO: 244139 - DNA, 360 bp, Glycine max
cttggggcagaaagatggtggtgactactggacttctgatgccggtccattataggcatttaagaggtttggaaagaagcttgacgagattgagaagaagcttatagagaagaacaacgatgagacattgagaaaccgctatgggccagctaaaatgccttacactctgctctatccttctagtgaggggggattgactttcagatgaattctcaacagtatctctatctaacgaccctgtggttgcttaagtactgttcctgcgtttaaataaatgtgaaattgaaggaaccagattccttaatcagttgtgtatgcttaagtcatgtacttggagtggctgaatgtagttgtacttgt

SEQ ID NO: 244140 - DNA, 415 bp, Glycine max
aggggttcacattcaggaatccttttcttcagaaaatttgccatcgttgagggaagcgcgagagccttcgttgttcaagatgagagctaagtggaagaagaggcgcatgaggaggttgaagaggaagcgccgaaagatgagacaaagatctaagtaggtgcttgaacaaggagtggagatgatgtgcttttccatctgctaccagcttcatgacattttatgctgtcatagctcttatgatgatcttgaggtctagtggcgaggggagcttccatcttgactttagtttagctttactggtctaaagattgctgttttagtgtgggttaagttatgatattgagagttttgtgttatctaattatgtactggtacgtcttgtatactttttggtctatcttaatagcttaaatat

SEQ ID NO: 244141 - DNA, 395 bp, Glycine max
gagaccaaacaatactcagaacctgattaatgagattatggcacagtttactggcaaaactttggagcagtggttggtagcaacactgctgattgccttgatgggtggtgcacacgctgttgtgttatgtatcatcgactcaagtcaactatacttgtgtcgtgctgcagttactggtcacaatcctccagtaccagatgagaaatgttgtgcagttactcgtcacgccaatttaccttgcctcagcaaatacaagtctatacgtccttgaattgggatataacccgaatatgctttggccttgcctgttaaatgtggtctccacacccctcctaattgttgactgtactgaagcaattaatgaaagtcttgttcattacaagcacctagtgttc

SEQ ID NO: 244142 - DNA, 399 bp, Glycine max
  unsure (1)..(399): unsure at all n locations
agggaaagatgcaaccaatgattttgaggatattggtcacagcaccagcgccgtagccatgatggatgagttctatgttggagacattgatacatcaaccatccccagcaaggttaagtacactcctccaaaacaacctcactataaccaggacaagatgccggagttcatcatcaggatcctccagtttctaattcccttgtttatcttgggtttggcagttggtattcgtttctacaccaaatcaacataatcatttaactgcaagagcacatgaatataggcatttgcgatattgtgttggtgttgaaagaccccccagtttgttttaacttttttgtgctgcgatgacgacgggttgctangatatgccatatgaattgtgcctgtttccccttt

SEQ ID NO: 244143 - DNA, 328 bp, Glycine max
agggaaagatgcaaccaatgattttgaggatattggtcacagcaccagcgccgtggccatgatggatgagttctaggttggagaccttgctacatcaaccatccccagcaaggttacgtacactcctccaaaacaacctcactataatcagaataatgatgccggagttcatcatcaggatcctccagtttctacttcccttgtttatcttgggtttggcagttggtattcgtttctacaccatatcagcatactcatttaactgcttcttcacatgaatatatgcatttgccatattgtgttggtgttgatagagtcccattttgtt

SEQ ID NO: 244144 - DNA, 384 bp, Glycine max
gaaggcaccagtaattaataacaagctagctattagttcgattttgtagtaagtgaggtgccaatatggtgaagatagctcttggtactttggatgactcttttagcgctgcctctcttagggcttatttcgcagagttccacgcaactctgattttcgtgttcgctggtgttggatcagccatcgcttacaacgagcttacaaaagatgcagccttggatccaacggggctggtggcagtagctgtggcacatgcatttgcactgtttgtaggtgtctccgtcgccgccaacatctcaggtggccatttgaacccagctgtcacttttggattggccattggaggcaacatcactctcatcactggtttcttatactggattg

SEQ ID NO: 244145 - DNA, 405 bp, Glycine max
gtcatcaactatgatatgcctgggaatattgaaatgtacactcaccggattgggcgtactggtcgtgcaggaaagacgggtgtggctaccacattcttgactcttcacgactctgatgtcttctatgacctcaagcagatgcttattcaaagtaacagtcctgttccacctgaactggcaaggcacgaagcttcaaaattcaagccaggaactattccagacagaccacctagacgaaatgacactgtttttgcgcattagacagatttttttttgagctagccacttctttagaaggcatcaactattcaactttgcaggtcatatcaagttttctggtgtaatgaacattttgccagtgaggccctagcagcctaatctgctttttgtggttatatggtcctg

SEQ ID NO: 244146 - DNA, 405 bp, Glycine max
ggaagaaccaaaacctaattagacataaactggccaactgttgggaacatccaaatacattagaatttcctgattcgagcaataataaattgtcaggcaagattccacagtccatgggtacacttgttaatttggaagctttggtcttaagacacaacaattttattggagacctaccattcaccctgaagaactgcactcgtttagatatactagacttgagtgaaaatttgttgtctggtccaataccgtcatggattggacaaagtttacaacaattacaaatcttgagcttgagtgtaaaccactttaatggaagtgttcctgttcatctctgttatttgaggcaaattcatatcttggatctttcaagaaataacttgtcaaaaggaattccaacttgtc

SEQ ID NO: 244147 - DNA, 354 bp, Glycine max
ggaatcagcatgactacacctaatggacggttcatgacacataaaaagatctgtttgtcaacgagtgactttcatctagaaggttggaatcccatgtggtctgtatcatgcatattaacagggcttctttcattcatgatggataacagtccaaccactgacagtgtcaacaccaccactgttgagaagcatcgtctagcataatcttcgctttctttcaactgtaagaatgctacattcaggaagatcttccctgagtatgtggagaagtacagtcagcaatagctttctgaatatgctgctccacagagggtctcattggatacgtctcccgacaacagttcaaggccagtt

SEQ ID NO: 244148 - DNA, 333 bp, Glycine max
ggatccttctacactaactaaagccgagcagcgagagagagaaaccctagcaaaaatgccggctggtcacggtttgagatcccgcaccagagattccttctctcgtcccttcaggaagaagggtaccatcgccctcaccacatacctcagaacctaccacgtcggcgattatgtcgacgtcaaggttaacggcgccgtccacaagggaatgcctcacaagttctaccatggccgcaccggtcgcgtctggaatgtcaccaaacgtgctgttggggtcgaagtcaacaagcatgtcggcaacagaatcataaggaagacgattcacgtgcgtgt

SEQ ID NO: 244149 - DNA, 372 bp, Glycine max
ggaaaattgaaggtgaaaatgagggtatgtctgcccctggaagtagaacagtaagagaacctagagttgtagttcagacaaccagtgacattgatatcctagatgatgggtatagatggagaaaatacgggcagaaagtagtgaagggcaatccaaatccaaggagttactacaagtgtacacacccaggatgtccagtgaggaagcatgtggaaagagcttcacatgacctaagggctgtgatcacaacctatgaggggaagcacaaccatgatgttcctgcagctcgtggcagtggcagccattctgttaacagaccaatgccaaacaatgcttcaaaccctaccaacactgcagccactgccataagtc

SEQ ID NO: 244150 - DNA, 333 bp, Glycine max
ctttgaggtttcaacattgggattcggatgtatgggccttactggagcgtacaatgaccctttccaagaacaggatggcatatctgttatcaagtatgcgttcagtaagggaatcacattttttgatactgcggatgtttatggagccaatgctaatgaacttttggttggaaaggctttgaagcagctgcccagagaaaagattcagatagccacaaaatttgggactgcttcacgacgttttcctgatatgaagatcaagggttcgcctgaatatgtgcgatcatgctgtgaacctagcttgaagcgtcctgatgttgaatacattgatct

SEQ ID NO: 244151 - DNA, 348 bp, Glycine max
gttggtatcatggaagaaaatcatgagaaccagaacgagttatgacgaatttgagagcagtatgctgattatagctgaattggctaaactgggcatctcatatatccatccatttgcaatcacgggtgttgttggcttcatagggactggacttcctccttctgttgcattaagagctgacatggatgctcttcctatgcatgaaattgtggactgggatcacaatagtacagtacctgaaaagatgcatgcatgcagtcattatgctcatgttgccatgcttcatgatgctgcaaagatcctcaaagagcatgataatgagatccgacgaactgttgtacctgtttt

SEQ ID NO: 244152 - DNA, 385 bp, Glycine max
ggcggcacaaagcattcactgtgtcgggtaaggaagaagagaataaagatgagcgacggaggaaaacgataaggtggatgagcgttgccgccgccgccaagaggtcctccgcctcctcacccctctcgccctcgcctcgaacccgtcgatcgcgataagacatgtccgttactgctgcgagtgttcactaatattgggagtcatcattccatggtagattttgccgtcagatgcaaagagcccaaagacgaggttcagatttacacctggaaggacgctactctccgacaactcaccgatcttgtcaaacacattgctccggctgcaaggagaagaaacgccaaactctccttcgcctttgtattcccccacataaatggccgtt

SEQ ID NO: 244153 - DNA, 498 bp, Glycine max
  unsure (1)..(498): unsure at all n locations
tatcaccctgctagcgtacgggctactggcgaaccgttcccgggctgacccacgcgtcaacccacgcgtccgtacggctgcgagaagacgacagaagggtacggctgcgagaagacgacagaagggtacggctgcgagaagacgacagaagggtacggctgcgagaagacgacagaagggtacggctgcgagaagacgacagaagggtacggctgcgagaagacgacagaagggtacggctgcgagaagacgacagaagggtacggctgcgagaagacgacagaagggtacggctgcgagaagacgacagaagggtacggctgcgagaagacgacagaagggtacggctgcgagaagacgacagaagggtacggctgcgagaagacgacagaagggtacggctgcgagaagacgacagaagggatatgagtaatgtttgtgcctaagaaaaaccccacccaccatgccaaagaaaaaaccgcccctccagaggattcn

SEQ ID NO: 244154 - DNA, 411 bp, Glycine max
gatagcagcatcatacaaagcattgaattcaaaaacttaagttcattccttgtgttttgctttcttcctcaaaaccaaacatgtcgaacacatgcggcaactgcgactgcgctgacaagactagctgcaccaagggaaacagctatggtgttattgtagagaccgagaagagttacatcgagactgttgtcatggatgttccagcagctgagcatgatgggaagtgcaagtgtggcactaactgcacttgcacggactgcacctgtggccattaaggaatatgtatgaaaatgtaattgccatgtgtttggcaatacaaatatccaaataatgtaatcttcgtatgaataaatgtgtgtgctgttatcctacttcaggtctgtgtagtcatgcagtctgaatcatttcaag

SEQ ID NO: 244155 - DNA, 363 bp, Glycine max
gagaaggatgatgacacaaactaccatatggatgtgattgctgggcttgccaacatgatggcccgcacttacagcattcctgaggttgacaagcttaaagccaactttagtgctggacggatcattcctgcaattgcaacctcgactgccatggcgactggtcttgtctgcctgtagctgtacaaagttttggatggagggcacaaagttgaacactacagaaacacatttgctaacatggcactgcctctcttttcaatgactgaaccagttccaccgaaaagtatcaagcatcaagatatgagttggacggtttgggataaatggattctcggagacaatcctaccctcaaggaacttcta

SEQ ID NO: 244156 - DNA, 342 bp, Glycine max
ggcagtactttgttgttcataaatcgctgctgtgtttgtcttagtgtgtttgttattcactatcgtcattcctgttcctcaagctttgtagtgagcagatataatggctgttgaaaggtctggaattgccaaagatgttacggaatcgattggtaaaacccccgtagtatatctaaataaacttgcggatggttgtgttgcccgagttgctgctaaactggagttgatggagccatgctctagtgtgaaggacaggtaactagtttccattgtcatgactattgaatccttgagtttaagttaatgctttcattagcattatgctttgcatggcattttttt

SEQ ID NO: 244157 - DNA, 360 bp, Glycine max
gtgttaacttgtctttctctatctctatcggtcatgggtgcttttgcttttgatgaggaaaactcctccaccgtggctccggcaacactctacaaagctctgacaaaagatgctgacactatcatcccaaagattattggggccatccaaactattgaaatcgttgaaggaaatggaggacccggaaccgtcaagaagataacagctagtgaaggtgaccaaaccagtttcgtgctgcaaaaagtggatgcaattgaccaggctaacttggtatacgactacagcataattggaaggaccgggttgcatgaaagtttggagaacgttacattccaaacaaaggtgggtcctggcactgat

SEQ ID NO: 244158 - DNA, 440 bp, Glycine max
gcgtccataccgagcgagaagaacaacaaaagggggctccgaaattttgtaacaatggccaaaaacggtggcttccttgtcggaattcttgtcttggccttggacattgctgctggcatacatggaattcaagcagaaattgctcaaaacaaggttaacgacttgaaggtgtgggcacttgagtgtacggatccaagctatgaatctttcaagctacgagttgctgcttccattttcttggtctttgctcatgcaattgctcacttgcttggtcggtgcatttgcatgcaatccaaagaagaatgccaaggagccacagccaatacggttttagcagtgacttttctcattttatcttggatattattagggattgctttttccttgctgatattacgctcctcagccaactcaagatcaagagaatcgtgtgggatatc

SEQ ID NO: 244159 - DNA, 364 bp, Glycine max
ggtgacgggtggagcgaaccgtacaaagaagataacgctaacgcgttgtttctggattcaaagacacggagtcaatggttgacccctttttggtcgacgctctccagaaccctcgtcactgcctcaccattttgaggatggagctggacatccagaagtttttgaataatgctgatcagcagcattttgagtttcaacatttcccttcttcctaactccgactggctgcacaccgtgttgctcaacactacaacatgcaaacaatggttcaagataatggcttagatggccatcgaagtaaaattctggtgaggaagttaccacaaagcaagtatcctgtggttcgattatgtgagatacctgc

SEQ ID NO: 244160 - DNA, 397 bp, Glycine max
ggaagtaatgacccggatctgaacgaggagatggagaagcagtttgtggaccttctcagtgaggagttgaggttgcaagagtctgttactgaagcatacacccggcacatgaacataactttggctgaagcaaaaagagtggcttctcagtaccagagagaggcagataaatgcattgctgcaactgaaacatgcgagcaggcaagagaacgtgctcaggccatacttaccaaggagaaaaagatgattttggtgtgggagaaacgagctcgtcaaatgggttgggaaggagaatacctgcataagttgtgttacttatattccttatggctataatcatgatcgtggttttatacaagtatacaagcaaaatgcttgagttgtcaaacttacgtta

SEQ ID NO: 244161 - DNA, 378 bp, Glycine max
ggagccagccccgacaatgcggcgtcgtataacggaaacttggttaagcgcgtcttgagtgggagtgggacacccttgaagcccaatgagtcactcgacgttttcctcttcgcgcttttcaatgagaaccagaaaacgggtcccacatcggagaggaactacggcttgttttatccaagtcagaagaaggtttatgatattcagctcacggcggaggcgccaccgtccggagttgggaagagccgggttccggtgagcggtgacgtgacgacgtcgtctaagggccagacgtggtgcgtggcgaatggcggttcttcggagaagaaactgcagaacgctcttaactacgcttgcggagagggtggggctgattgcact

SEQ ID NO: 244162 - DNA, 426 bp, Glycine max
aaaagacgaacaaaagggtcatccactatgaaatgcctgggaataattaaatgttcactcaacgggattggcctactggtccttcaaggaaaaacggtttggcaacacattcttgactcttcacgactctgatgtcttctatgacctcaagcagatgcttattcaaagtaacagtcctgttccacctgaactggcaaggcacgaagcttcaaaattcaagccaggaactattccagacagaccacctagacgaaatgacactgtttttgcgcattagacagatttttttttgagctagccacttctttagaaggcatcaactattcaactttgcaggtcatatcaagttttctggtgtaatgaacattttgccagtgaggccctagcagcctaatctgctttttgtggttatatggtcctgtataa

SEQ ID NO: 244163 - DNA, 413 bp, Glycine max
aggggatattaccatagacataactttaagaaatcaaagagacaggaagttgagagggaagtgttcacgtctttgagaaatgggtgcttcggcatccgtcacagaaaaatccatccatgaattcatggtcaacgatgctaacggcagagacgtgaacctcagcacctacaaagggaaggttcttcttgtacttaacgtcgcttcaaaatgtggatttacaaattccacttacacccacttaactgagctttacagcatatataaagacacaggtcttgagatactggcatttccatgcaaccagtttctgaaacaagagcccgggagtagccatcatgcagacgaatttgcctgtacaatgtacaacgctgagtatcccacttttggcaacgtacttgtcaatggacctgata

SEQ ID NO: 244164 - DNA, 397 bp, Glycine max
agacgaacaaaagggggaagtcgccttttgttttcttttcgttcgcatcttctctctctcagaaagatgaatgtggtcgccgcgtatttgctcgccgtcctcggtggcaacaacagcccctccgccgatgtcatcaaggaaatccttggctccgttggagtagaagcagatgaagataggattgaatcgtttttgtctgaagttaagggtaaggatatagttgagcttattgctgccggtagggaaaagttggccacggttccttctggtggtggtggtgctgttgccgtcgccgcagctcctgcgggatgtgctgctgctgctgctcctgctgctgaggcaaagaaggacgaaaaggtggaggagaaagaggaatctgatgatgatatgggtttca

SEQ ID NO: 244165 - DNA, 401 bp, Glycine max
gggaatctggaaggcattactattgtgtgaccaagggagtaaattgtccttcaatgcctagaaaagataaatctagacgcgttgatgtgtactactctagttggtgcattagagcagtggaatcaaatagaggtaatggccagttaactgcctgtgaagtcttgctcttccatcatgaagaaatgggcattccatgggagattgcaaagcttggagtaaggaaaggaatgtggggaactgttcagaagattgaacccggtttgcgagcttatcaagaagcaagagcttctagtgctgcactctctcattcagcctttatggcccaagtcaacacaaaaataggccctgagtacttgcaatcgatcgggggcgatgacaattcagcggaagaatgaaagtgt

SEQ ID NO: 244166 - DNA, 406 bp, Glycine max
gactacaccgagtcgcagaaaaagaaaaaagcgatcatagtttcacttcggccttatccagtttagggtttcggttctctaccctatctttcacgtatcgaaaccttaaatttacgatcaggtctgagcaatctggttggtagaacctttggtcttagtgagtcaagttttatgtctgaattagacgatcaaattcctactgccttcgatccttttgctgatgcaaatgctgatgactcgggtgctgggccaaaggagtatgtgcatattcgtgtacagcagcgaaatggtaggaaaagcctgacaaccgttcagggattgaaaaaggaattcagctataacaagatacttaaagacgtcaagaaagagttctgttgcaatggaacagttgttcacgacccagaac

SEQ ID NO: 244167 - DNA, 371 bp, Glycine max
ggctgcaattgttgctatatttacagagacagatgcgggagcttggaaaataggactagatacagcattggcttcaatagtttgctctggaatttttggttcatttgtgaacaacgcagttcacacatgggtactacgtatgaagggtcctgtctatgtggcaatgttcaagccactctcaattgccatagctgttgccttgggagtcatgttcctgggtgatacactccaccttggaagtctagtgggagccacagtaatatcgatcggattttatacagtaatgtggggaaaagcaaccgaagagaatgtggacgaagatgtccctggtcagcaatcaccaccaaccacagagaatgttcctctcttgc

SEQ ID NO: 244168 - DNA, 377 bp, Glycine max
gacgatgtggaagaagagttcaatgaccttgttgcagctagtgaatcctccagaaaagtggagcacccgtggaggaacttgttgcaaagaaagtacagaccccacctcaccatggctgtgctgattccattcttccagcaactcactggaatcaatgtcatcatgttttacgcgccggtgttgttcagctccatcgggtttaaggatgattctgctctaatgtcagctgtgatcactggcgttgttaatgttgtggcaacttgcgtctcaatttatggtgttgacaagtgggataggagagcccttttccttgaaggtggagttcaaatggtcatttgccaggctgtaattgcagctgctatacgagcaaagtttgg

SEQ ID NO: 244169 - DNA, 380 bp, Glycine max
gaaggcaccagtaattaataacaagctagctattagttcgattttgtagtaagtgaggtgccaatatggtgaagatagctcttggtactttggatgactcttttagcgctgcctctcttaaggcttatttcgcagagttccacgcaactctgattttcgtgttcgctggtgttggatcagccatcgcttacaacgagcttacaaaagatgcagccttggatccaacggggctggtggcggtagctgtggcacatgcatttgcactgtttgtaggtgtctccgtcgccgccaacatctcaggtggccatttgaacccagctgtcacttttggattggccattggaggcaacatcactctcatcactggtttcttatactgg

SEQ ID NO: 244170 - DNA, 296 bp, Glycine max
tgggtaatctcaggagattctatgcacaagaggcgtgccactggtggcaagaagaatgcctggaggagaaatagaaagtatgagcttggtcagccaacctgctaacactaagactgtcaagcaacaagacagtcatgacgattcgtgctacacgtggaaatgtgacatggacggcattgacatttgatactggaaattactcctggggaagtgaagctgtaactcgcaagactcgtgtactagatgtggtttacaatgcctcatacactgatcttgtgcgtactcagactcttgtc

SEQ ID NO: 244171 - DNA, 361 bp, Glycine max
acgaaagggaacaagggcacacaaaaaattccaattaccttccaaaactcaacctttcattatatattctccctatatagtattttcttaattaattaatggatagagttaaggacttggcatcaaagaacgctgctgttatatttaccaagagttcatgttgcatgtgtcacagcataaagcaacttttctatgagcttggagcaagcccagcagttcatgagcttgacaatgattcctatgggaaggaaatggagtgggctttgaggggtatgggttgtaacccttcagtcccagcagtgttcatacgtggaaaatttgtgggctcatccaaagatgttatatccctccatgttgatgg

SEQ ID NO: 244172 - DNA, 401 bp, Glycine max
ggcatcacaaactatatactaatctccatctaatagtgttaatttgtctttctctatctctatcggtcatgggtgcttttgcttttgatgaggaagactcctccaccgtgactccggcaacactctacaaagctctgacaaaagatgctgacactatcatcccaaagattattggggccatccaaactattgaaatcgttgaaggaaatggaggacccggaaccgtcaagaagataacagctagtgaaggtgaccaaaccagtttcgtgctgcaaaaagtggatgcaattgacgaggctaacttggtatacgactacagcatagtgggagggacggggttgcatgaaagtttggagaaggttacattccaaacaaaggtggttcctggcactgatggtaat

SEQ ID NO: 244173 - DNA, 348 bp, Glycine max
gagaagaagaaagaaacaaggtgctactgaaggtgagtcctccagtgttggaggtcagggtgaaatatctgcagaagaagctgctgagcaagcagctgtcatgagatcacaaattcacctcttctggggtaatatgcttttcgaaagatcccaagttgaatgcaaattaggaatgactggatggaaggaaaacctggatgctgcaactgaacgctttaagcttgcaggagcttctgaggcagatgtttcgatggttctaaagaatcattgctcaaatggagatgcaaaagatggagatgataaaaaggttgagaacccacagcacaataagactgttaaaccagagat

SEQ ID NO: 244174 - DNA, 410 bp, Glycine max
ggaagcagtgtagtggtaactcttgtcaatctttccactttgacattgccgacgcctccagataaacaaccttaactttcccacaacaccacccatcattctttttctctctctagatttcatttagttgttgctgtcttcttctgtttgtgtgtgccaacacagagcgaaaaacatggctctgaaccaatcaaaagccgtgttgttgagggtgagtttggtggtggtggcgctcttcatagcagggtacatagtgggtccccctctctactggcatttcgttgaaggtttggctgcggtcaaccactcttcttctacttgtgccccctgcatctgcgattgctcttcacaacccattctttctattccacaaggactgagcaacacttccttcggagattgtgcaaagc

SEQ ID NO: 244175 - DNA, 365 bp, Glycine max
gagaaacaccgaaaccgaaacccaagcctaaacctaaacatagactgaatttcccaaatcaccttcccaattttcgccatcacctaatactcccaaaccaatcttcgatcatggccgccgaatcacaacctcaactaatcgacgacagaatatatgagcaagaacttaagtacctggaatttgtgcaattcgcgaccatccatgccctgatgcgctgcgccatcctctactcctacgccacagagcacgcgggtcctctgatgcccggcgtcaacaccgtcgaggaggccgtgaagaccgtcgtggctccggtctacgacaggttccacctcgtcaccggcgatgtcctcaaatacgccgatcgc

SEQ ID NO: 244176 - DNA, 419 bp, Glycine max
ggcgagatcgagtcgtaagcagcgggtaccctaatcctctcctcttcctctctactaatttcagctatggccgacgaagctgtggttgttccagatcccacccagatcgatgtcaagctctttaaccgctggagcttcgacgatattgagattactgacatttctctggctgattatatcggagtggcgacatccaagcacgccacgtatgtgcctcacaccgccggcaggtactcggtgaagcggttcaggaaggcgcaatgccccattgttgagaggctgaccaactctctcatgatgcacggtagaaacaatggcaagaaactcttggctgttaggatcatcaaacatgctatggagattattcatttgttgactgaccagaatcccattcaggttattgttgaagctgttgtcaa

SEQ ID NO: 244177 - DNA, 401 bp, Glycine max
gtccaaggatatacccgacatcgaaggagatacaaaatttggcatacgttcttttgcaacacgtttaggtaaaaaaaaggtattttggatttgtgtttccctattcgaagtggcttttggagttgtcctcctcgcaggagcatcatcttcttctcccctctggattaaaattattacgggtctaggaagtattattcctgctacaattctctggtacctgaccaaatatgtagatttgtcaagtccagattcgaccagatccttctatatgctgaactggaagttgttgaacgtagcattcttgttcctgcctttaattagataacgatgacactgaagaccaagacaatgttcgtaaagcgtacaacaaaatagtatagatcgtttgcacctaaatttat

SEQ ID NO: 244178 - DNA, 410 bp, Glycine max
ggaaatcaacagagaaacatttcactaatagagagacataagcataatattgagaaataatggagggttgtacttattgtgtgaagttgctatgccttgttgggtttgtggtgcttgtgagtactattgcaggggtggagagtgctggtgaatgtgggaaatctaccaccccagataatgaggcttataagcttgcaccatatgcctcagcagcacaagatgagaatgctagtgtttctcagagttgctgtgctcaggtgaagaaaattgggcagaacccaagctgcctctgtgcagttctgctctccaacacagccaaaatggctggtgtcaacccccaagttgctgtcaccatccccaagcgttgcaacctggctaatcgccctgttggttacaagtgtggaccttac

SEQ ID NO: 244179 - DNA, 380 bp, Glycine max
ggagagaaaggctgcttgtctatgaatttgttcctaataagagccttgattacttcatatttgatccagtgaagaaaacacgattggattggcaaatgcgctacaaaatcattagaggtattgctcgaggaattctctacctccatgaggattctcgactgcgaattatacatagagaccttaaagcaagcaacattctcttggatgaagagatgcatcctaagatatcagattttgggatggcaagattggttcacttggattaaacacaagcatatacaaatagagttgttggaacctacggatatatggcacctgagtatgcactacatggtcaattttcagcagaatcagatgtgtttagtttcggtgtattggtt

SEQ ID NO: 244180 - DNA, 445 bp, Glycine max
gcgtccacgagaagacgacagaaagggaatctctgaagacacaattcacaaccgatacagtttcatctctcctcaaaaatgacaacaatatcaaattgctcccttctcttcctcttcctcttcgcctccaccctccacatagcttccaccctctcaacccccaccaacttcatcaagtcctcctgcagcaccacccagtacccagccctctgcatccagtccctctccgtctacgcctccaccatccagcaagacccccacgagctcgtccagacagccctctccctctccctcaaccacaccgaggccaccaaaaccttcgtcgcaaaatgcaacaaattcagaggcctcaaaccgagagaatacgctgccttgaaggactgcgctgaagaaatcagtgacagcgtcgaccggctcagccggtcgctgaaggaactcaaattgt

SEQ ID NO: 244181 - DNA, 412 bp, Glycine max
  unsure (1)..(412): unsure at all n locations
gacagataaacataattacttgccttgaggaacgttccagaccacatacagaggtttctctagtgatcttcgttcttctgtggagatcttgttttttcatctcacttttcttctaattaaggaacaagctttccgcagttgaaaaccctagctagctagcttccaccaatttgaatcaccaatggctcgctctttctctaacgtcaaggttctctctgctcttgtggccgacggattctccaacactctcaccaggcgtgggtacgcagcagcgacacaaagcgcaacaagaggaggagctgcctccatcagcagcaagatagctcccaagtcaggggaagacaaggtacgaggaggtgctgaaaaggtttcgtgggtcccagancctgtcactggttactacaaaccggag

SEQ ID NO: 244182 - DNA, 343 bp, Glycine max
  unsure (1)..(343): unsure at all n locations
gagaagaagaaagaaacaaggtgctactgaaagtgagtcctccagtgttggaggtcacggtgaaatatctgcagaagaactgctgagcaagcagctgtcatgagatcacaaattcacctcttctggggtaatatgcctttcgaaagatcccaagttgaatgcacattacgaatgactggatggaacgaaaacctggatgctgcaactgaacgctttaagcttgcangagcttctgaggcagatgtttcgatggttctaaagaatcattgctcaaatggagaatcaaaagatggagatgataaaaaggttagaacccacagcacaataagactgttaaaccaga

SEQ ID NO: 244183 - DNA, 416 bp, Glycine max
gggctctacgatcatgagcatttccatgggtttaggaccggatggtgagctacgttatccatctcacccccagctgccgagtaatggaaaaactcaaggtgctggggaattccagtgttatgaccaaaacatgctcagctttctcaagcaacatgctgaagcatctggaaatcctctgtgggggcttggtggtcctcatgatgcacctacctatgaccagcccccatacaatggcttcttcaatgatggggcttcttgggagtccacatatggggacttcttcctctcttggtattccaatcagctcatagctcatggagattgcctcctttcattggcatcttcaacttttggtgactctggggtgacaatctatggaaaactcccacttatgcactcttggtatgggactcgat

SEQ ID NO: 244184 - DNA, 407 bp, Glycine max
ggttctagtgtgtgattgtttgttgttgtaactcgttcttcttcttttgttgttctgtgtttgtgtttgttttttctctcacctgaaaatgtcttgctgcggtggtaactgtggttgcggaagctcctgcaagtgcggcaacggctgcggaggctgcaagatgtacccagacttgagctacactgagtcaaccaccaccgagaccttggtcatgggagtggcacctgttaaggctcaatttgagggtgctgaaatgggtgtgcccgctgagaacgatggctgaaaatgtggaccaaactgctcctgcaacccctgcacttgcaactgaggtgttgggagagcaagcttcaagcagagatagcccttaattacgaataatgataaactattaatgtgtagctaaaaac

SEQ ID NO: 244185 - DNA, 408 bp, Glycine max
gactacaaattagttttctacttgaatcttcgttatccttctttttttctccttgaactcgaatattcactatggcagatgaggtggttctgctagatttctggccaagtccatttgggatgagggtcaggattgcacttgctgaaaagggtatcaaatatgagtccaaagaagaggacttgcagaacaagagccctttgctcctcaaaatgaacccggttcacaagaaaatcccggttctcatccacaatggcaaacccatttgtgaatctctcgttgctgttcagtacattgaggaggtctggaatgacagaaatcccttgttgccttctgacccttaccagagagctcaggctagattctgggctgactttgttgacaataagatatttgatcttggaagaaaga

SEQ ID NO: 244186 - DNA, 489 bp, Glycine max
ttcacctcagccgcgacgctaggttaccggtcccgtctgacccacacgtctacccacgcgtccgtacggctgcgagaagacgacagaaggggggtcaagtgactaagtgcatgtggtggatgccttggcgattacaggcgacgaaggacgtgatagcctgcgataagcttcggggagctggcaaattagctttgatccggagatttccgaatggggaaacccgaccgtaaggtcatcgcatactgaatacataggtatgcgaagcgaaccgggtgaactgaaacatctcagtagctcgaggaaaagacatcaaccgagattccgaaagtagtggcgagcgaaatcggagtagccctcgcgttttagcagtttgcatatcagaacggaatggaaagtccggccacagcgggtgatagccccgtatgagaaatgcagattgtggaactacgcgcgactagagtacggcgggacacgtgaaatccggtcgag

SEQ ID NO: 244187 - DNA, 416 bp, Glycine max; identical to SEQ ID NO: 244183

SEQ ID NO: 244188 - DNA, 332 bp, Glycine max
ggagaaggagaaggagaatgagaagataccagaacctgtaaaaaagaacgcctcaggtggatcccttgatagagacattgctcttgcagaaatagagaaagagaaacgattgtctaatgtgaaggcttgggaagaaagtgaaaaatccaaggcagagaataaagcccaaaagcagctctctgctgttgctgcttgggaaaacagcaagaaagcagctcttgaagctccgctgagaaaaattgaggaacaactagagaaaaagaaagcagaatatggtgaaaaaatgaaaaacaaaatagccttagttcacaagcaagcaagaggagaagaga

SEQ ID NO: 244189 - DNA, 371 bp, Glycine max
tacgctggaggtagagtcctctgacacaatcgataacgtgaaagcgaagatccaggataaggaaggtattccaccggatcagcaacgtcttatcttcgccggaaagcagttggaagacggcagaaccctcgccgattacaatattcaaaaggaatcgacgcttcatctggtgcttcgtctccgcggagggatgcagatcttcgtgaagacgctcaccggaaaaacgattactctggaggtggagagttctgatacgatcgataacgtgaaggcaaagattcaggataaggaggggattccaccggatcagcagcgtcttatcttcgcagggaagcagcttgaggatggacgcacgcttgcagattataata

SEQ ID NO: 244190 - DNA, 401 bp, Glycine max
ggtctcgtggaagtgtaagcaagcaaaaccctagcggcgcctgctttctttgttcgtgttttgcatcaggatggagtctcaggtgaagcacgcacttgttgtcaaagttatgggtcgtactggatccggaggacaagtgacccaggttagagtgaagtttttggatgatcagaaccgtcacatcatgaggaatgtgaaaggacctgtgagagaaggagacattctcaccctactcgagtctgaaagggaagcaagaagattgcgctagatggtctcttttttttggcttgcctccaaattcgaacaaaagcaatatttttcttgatatttatggtagttagtcggtgctaaaggggttatagcaccctatcttattgttttggatctattttcattcgaat

SEQ ID NO: 244191 - DNA, 385 bp, Glycine max
ggccacgccttgttgaatccctgaagggaattccttgcaaacaagttgcagcggggcttaatttcacagtcttcctcaccagacaaggtcatgtttagacatgtggaaccaacacacatggccagcttggtcatggtgatactcaggacaggccaacccccaaaatgattgaagtccttagctctgttgttcagattgctgcgggaccaagctatatcttatccgtaacagaaaatgggacagtatactcctttggatcaggtgctaatttctgtcttggccatggtgagcagcatgatgagttgcagccacgtcctatacataaattcagagggaaaggtactcatattgttcgtgtatctgcaggggatgaacatgcaatggc

SEQ ID NO: 244192 - DNA, 388 bp, Glycine max
gacgcaactcaacaacaaaagcctttttttttaaaaaaaaaattcctttaaaaaatgaagaatactatcttcttcgctctctttcttgtttgtgccttcacctcatacctaccttcagccaccgctgatactatcttcgacataaatggtgattttgtccgaaacggtggcacatactacatcttgccagttataagaggagacggaggtggaatagaattcgccgcaacaggaaacgaaacatgccctctcactgtagtgcaatctccccttgaggtctctaagggtctaccactaatcatttcatcaccattcgaaatccttagcatccaagaaggccttattttgaacattgggttcacttttgtgcccccctgtgccctaattc

SEQ ID NO: 244193 - DNA, 381 bp, Glycine max
gggtttgtggacttggatgagttcatgattgtcatgaatggcatggaagaagaaaaagaagagaaatttggaagtggcgtggagcatgatggtggttacctcatggatgcttttcttatctttgacactgacaagaatggcctgatttcagccaaggaactgcagagagttctgatcaatctagggtgtgataattgtagtcttagagagtgcaagcgtatgataaaaggggttgataagaatggagatgggtttgtggattttgaagaatttcgattcatgatgtaaagtggatttgctaattagagcttgaaatgggtttttgctgtatttcaatattattaatttcttttgttttttctttcttttttctgtacacaa

SEQ ID NO: 244194 - DNA, 263 bp, Glycine max
gggcctcaggttgacaagagacaacttgcaacgattctttcctaaatccagcaagtatagaaagaaagtgcagcccttttgacaaagggcagaataatgggcaacaacggttactacattgagcccacaattttcaccaatgtcaaagagtgacagcctatcctataagaagacacatttggaccttgtgatgcttctgatgaatttaagactagttaaaattcaatcaagattgccaaaaatagacagtaaggcctagcatc

SEQ ID NO: 244195 - DNA, 405 bp, Glycine max
  unsure (1)..(405): unsure at all n locations
gtcttgtcctagaaaaaacgcattattcttttcatctgtctttctttttctttctctctgcctccatcaggaccattcaatttacctcaaaataaacaattttctcttgttatggctcttttggtgtatcttgtgcttttcctagccttcacttatcattcaagtgctctttactgtatatgcaaagatggtgtgagtgatcaaacccttcagaaagcaatagattatgcttgtggaactggagctgactgtacccctattctccaaaatggagcttgttaccaacccaacactgtgaaggatcactgtaactatgcagttaatagctattaccaaagaaagggtaatgctcctggaacctgtgattttgcanngtgctgcacaactaatgcaaatccacctact

SEQ ID NO: 244196 - DNA, 410 bp, Glycine max
gacccagagaggaggaagctttgagagagagagggaggagggagagtgttgacgctccatcaagatgggtatttctagggattccatgcacaagaggcgtgccactggtggcaagaagaaggcatggagaaagaagagaaagtatgagcttgggcgtcaggccgcaaacaccaagttatcaagcgacaaaactatccggaggattcgtgttcgaggtggcaatgttaaatggagggcattgaggttggataccggcaattactcatggggtagtgaagcagttactcgcaagactcgtattctagatgttgtttacaatgcctcaaacaatgagcttgtgcgaactcagaccctggtcaagaatgctattgttcaagttgatgctgctcctttcaagcagtggtaccttc

SEQ ID NO: 244197 - DNA, 402 bp, Glycine max
gagagaagaaccaatttaaaagaagagcagcggagctaaagaggggagaggagagaggagaagagaagctaaagaaagaaaggagatgggagtggagaagcagttgttgaggtctggcaccggtccgaagccaattcccggtcagaacgtaaccgttcactgcactggtttcgggaagaacggtgacctttctcagaaattctggagcacaaaggatcctggccagaacccattcactttcaaaatcggccaaggttctgttatcaaaggatgggatgaacgtgtgcttggcatgcaaattggtgaagttgctcgtctccggtgctctccggattatgcttatggtgctggtggctttcctgcttggggaatacggcccaactctgtcttggaatttgaaat

SEQ ID NO: 244198 - DNA, 379 bp, Glycine max
gagagaaagagagagaaagatgtcgaagcgtggtcgtggtggttcggcggggaacaagttccgcatgtcgctgggtcttccagtggcggcgacggtgaactgcgccgacaacacgggggcgaagaacctctacatcatttcggtgaaagggatcaaaggccgtttgaaccgtcttccctcggcctgcgttggcgacatggtgatggccaccgtgaagaagggaaaacccgatctgaggaagaaggtcttgccagctgtcatcgttcgccagcgcaagccatggcgccgaaaggacggcgtctacatgtacttcgaagataatgctggtgttattgtcaatcccaagggagaaatgaaaggttctgctatcactggtcca

SEQ ID NO: 244199 - DNA, 369 bp, Glycine max
ggacattgagtgttccatccatcccttcttcatcttctacttctatctccctacatactcattcaaacagacatgaaaattatggaatcattagctcttatcttctacagtactcttgttttagctacgatttcagttccagcaactaactccagaatcatccatcaaaaaaacaatgccaatctgattgaagaaacttgcaagcagacaccccatcacgacctttgcatccaatacctctcctccgaccctcgcagcaccgaagcagatgtgacagggctggcacttattatggtcaacgtaatcaaaatcaaagcaaacaatgcattggacaaaatccaccaactgcttcagaaaaaccctgaacct

SEQ ID NO: 244200 - DNA, 189 bp, Glycine max
gaaaacggaaacggatacggcgacggcgacggtgtttttgtctccgacggtccggtgcttcctccgccgacggagatggagccggaggaaggttacgctcttcgcgagtggcgccgtcaaaatgccattcagctagaggagaaggagaaaagggaaaaagaaatgagattgaagatattgaagaagctg

SEQ ID NO: 244201 - DNA, 394 bp, Glycine max
gatgaacgagaagttagatttggagagaatcctccagaaggaaaagcacagaatggtaaattcacataatgcaaatacaaagttgctgcatgactgtgcaatccttcagaagaggcttcgggagtgtactgtaaatttccttgttgaagaggaagataaactaaatatcgacactttgccagctgatgctctggatttaatagcaacatcagataatcggattggtctcttgcttgcagacgcacagctcttggcacaagatgtacaagatactgttgttgctgttgaagagacccgggatataaccacagacaatactgggaaaactcatgatgaattgagaaagatgctggcacatatgtttgttgacaatgccagtttaaagaaacaaatc

SEQ ID NO: 244202 - DNA, 399 bp, Glycine max
gattgcattgtgaaatcaacagagaaacatttcactaatagagagacataagcataatattgagaaataatggagggttgtacttattgtgtgaagttgctatgccttgttgggtttgtggtgcttgtgagtactattgcaggggtggagagtgctggtgaatgtgggaaatctaccaccccagataatgaggcttataagcttgcaccatgtgcctcagcagcacaagatgagaatgctagtgtttctcagagttgctgtgctcaggtgaagaaaattgggcagaacccaagctgcctctgtgcagttctgctctccaacacagccaaaatggctggtgtcaaccctcaagttgctgtcaccatccccaagcgttgcaacctggctaatcgccctgtt

SEQ ID NO: 244203 - DNA, 368 bp, Glycine max
gatcatcacaaactatatactaatctccatcgaatagtgttaatttgtctttctctatctctatcggtcatgggtgcttttgcttttgattaggaaagctcctccagcgtggctccggcaacactctacaaagctctgagtaaatatgctgacactatcatcccagagattattggggctatccagactaatgaaatcgttgaaggaaatggaggacccggaaccgtcaagaatagaacacctagtgaaggtgaccacaccagtttcgtgctgcagaatgtggatgcaattgactaggctaactttgtacacgactacagcatagttttacggactgggttgcatgatattttggacaacgtcacatt

SEQ ID NO: 244204 - DNA, 408 bp, Glycine max
actcactcaaaattaaccacaagcataagcacaagcacaagcacaagcacttctctaattccctttcacactctattacagatttcacaagtgcttacacttcaaatggctttggaagctcttcaatcacccaccacagccactccatcgtttagtccctttgaagaaaccagtctcagttacttagagacaccgtggacgaaaggaaagcgttctaagcgtagccgcacggagcaacaactgcaacacccttcatgcaccgaggaagagtacctcgctctttgtctcatcatgctcgctcgcggcggcgccggcagtgtctccaccgccaaacccgctgtctccgacaacaattctgcgccgctatccgccgccaaactgagctacaaatgttcggtttgcaacaaa

SEQ ID NO: 244205 - DNA, 401 bp, Glycine max
gaattcattttcattccacgaaatatggcttcaactcatctgcttcccctagcaaccttcttcttacttctctccgcttcttatctccagattgctggggcggaagcacaaccgttgactagtctcaagcttaactctcatattcttcaggagtctactgctaaagagattaatgaaaatcccgaggcaggatgggaggctgctataaatcctcgtttctccaattatacagttgaacaatttaagcgccttcttggagtcaaaccaatgcctaagaaggaacttagaagtacacctgctatatctcacccaaagacgttgaaattgccaaagaattttgatgcgaggacagcttggtcgcagtgtagcactattggaagaattctagatcagggtcactg

SEQ ID NO: 244206 - DNA, 353 bp, Glycine max
ggagctttagattcttttcccctagattcagccacagttggaaaaaaaaaagttgttcgagatggcacgtacgaagcaaactgctcgtaagtccacaggaggaaaggcacctaggaagcagctcgcaaccaaggctgcacgtaagtctgcaccaactactggtggtgtgaagaagccacatcgttatcgtcctggtaccgttgctcttcgtgaaattaggaaataacaaaagaattacgaacttttgattaagaagctccccttccaaaagctggttccttaaattgctcaagacttcaagactgatttgcgtttccagaaccatgctgtgcctgcattgcaagaagctactg

SEQ ID NO: 244207 - DNA, 337 bp, Glycine max
gatcatcacaaactatatactaatctccatctaatagtgttaatttgtctttctctatctctatcggtcatgggtgcttttgcttttgatgaggaaaactcctccaccgtggctccggcaacactctacaaagctctgacaaaagatgctgacactatcatcccaaagattattggggccatccaaactattgaaatcgttgaaggaaatggacgacccggaaccgtcaagaagataacagctagtgaaggtgacaaaacagtttcgtgctgcaaaaattgaatgcaatgaacaaggcaactttgtataacaacacagcataattggaaggaacggg

SEQ ID NO: 244208 - DNA, 380 bp, Glycine max
ggaataagacaaaggaatatgatgatattgctatgaagtatttgttctatgttttatttctccttgttgctggcttttctgtttactcactgatgtatgagcgtcacaagagctggtattcttggattttgtcttcgctcacaagttgtgtatacatgtttggttttattatgatgtgccctcaattgttcatcaactacaagctcaaatctgttgctcatctaccttggaggcaaatgacttacaagtttctcaacaccataattgatgacctttttgcctttgtcattaaaatgccaacactccatcggctttctgtcttccgtgatgatcttatctttgtcatatacttataccagaggtggatttataaagtggac

SEQ ID NO: 244209 - DNA, 404 bp, Glycine max
tggggacatggaacttagttttaagcagcaacttggccttgcatgtgttgtacttcttttacctgcattgtgtagctcacaggactcttttactgactccagagcaacatattatggtagccctgattgctatgggaatccaaggggagcttgtggctttggcgaatatggaaggactgtgaatgatggaagtgtggcacgagtgtctaggctatggaggaatggaagtggttgtggtgcatgctatcatgcaaggtgcaaaataccacagtactgtgatgaacatggagcatatgtggtggtaacagactatggtgaatgagacagaacagacttcataatgagtccacgcgcctactcgagattgggacgcatcgcggatgcatctgcagagttgttcaaat

SEQ ID NO: 244210 - DNA, 405 bp, Glycine max
ggcaccgcttgagcagacttaacaacagcacaaagcgggttactgtctgttcaagctaccatctctctctctctttcttagtgcctccttgccagaagttaaaatggcccaagaaactttcctattcacatctgaatcagtgaacgaggggcaccctgacaagctctgtgaccagatctccgatgctgtgctcggtgcatgcttggagcaggaccctgacagcaaggttgcctgtgaaacctgcaccaagaccaacatggtgatggttttcggagagatacaaccaaggccaacgtggactatgagaagattgtgcgtgacacatgcaggaacattggttttgtctctgatgatgttggtcttgatgctgacaactgcaaggtcctcgtcaacattgagcaacag

SEQ ID NO: 244211 - DNA, 393 bp, Glycine max
gaagaaaggaaagggaaaagaggaaaatggtgtgcataaggaaggcgacggtgaaggaccttctggcgatgcaggcgtgcaacctgttctgcctccctgagaactaccagatgaagtactacctctatcacatcctctcctggccccagctcctctacgtcgccgaagactacaacggccgcatcgtcggctacgtcctcgccaagatggaggaagaaaccaccgactgccacggccacatcacctccctcgccgtcctccgcacccaccgcaagctcggcctcgccaccaagctcatgaccgcagcccagaacgccatggaacacgtgtttggtgccgagtacgtgtccctccacgtgcgcaagagcaaccgcgcggccttcaatttgtaca

SEQ ID NO: 244212 - DNA, 369 bp, Glycine max
gatgcgacaatggttgtcccccttaggcagtttcgtgttttctcactcaccctcacatccatcagcttccagcagacatggaacgttcactgaacaatcaatactcaagttagccacagagcaaccaatggtatagaaactgacccacttgcattttttctaccacgacatcttataaggcaagaacatcacggtggtgaaaatcatcgagccatcatcgagcaaggtacgtgaagcaactgggtatggaaccacttacatgatggacaatgttttgacacgggtctagagctgagctcgaagcacgtagggagggctcaagggcagtatggcttggcctctttggaggactctggaatgatgatgctc

SEQ ID NO: 244213 - DNA, 407 bp, Glycine max
ggagttggcggacgttgaagtggggaaggaatacgaactggtgatcacaacctatgcgggactctatcggtaccgtgtgggcgacattctccgagtcaccggtttccacaactcggcaccacaattccacttcgtgcgcaggaagaacgtgttgctgagcattgactcagacaaaacagacgagtcagagttgcaaaaggggattgagaatgcctcaaagcttttatcagagttcaatacaagcgttgtggagtacacgagttatgcagacacaacaacgattccgggtcactacgtgatttattgggaattgttgaccaaggactcgacgaactcacccagtcacgaagtgttgaatcggtgttgtttggagatggaggagtgcttgaactcggtgtatagacaat

SEQ ID NO: 244214 - DNA, 320 bp, Glycine max
gatataactgttgagaaaggaataccaagattaccaccacaaagcaatgggcggtatactttctgcgcttcttggcggcgacgcggcggcggcggcgtcttcgccggagagttctacttctagagtctcctccttccactcgtcgccgcgctggcagctctacttcaacgagatcaaagataccgataagctcgttgtgatagatttctcggcgtcgtggtgcggtccttgcaaattcatagagccagcgattcacgccatggccgacaagttcaacgacgttgaactcgtcaagatcgaagttgacgaattacctgatg

SEQ ID NO: 244215 - DNA, 387 bp, Glycine max
gactacaaatcagttttctacttgaatcttcgttatccttctttttttctccttgaactcgaatattcactatggcagatgaggtggttctactagatttctggccaagtccatttgggatgagggtcaggattgcacttgctgaaaagggtatcaaatatgagtccaaagaagaggacttgcagaacaagagccctttgctcctcaaaatgaacccgggttaaaagaaaatcccgggtctcaaccacaatgggaaaaccaattgtgaatcccccgttgctgttcaatacattgaggaggtctggaatgacagaaatcccttgttggcttctgaccctttacagagagctcaggctagattctgggctgactttgtttgacataaga

SEQ ID NO: 244216 - DNA, 226 bp, Glycine max
tgggatgtctcagagagtgacccgtatgcatcatgtccgatgacgagcatgacttcaattctcacgcggatgcgggggcgtccaacacgtatcctcagcaagctggtaccattcgcacgaatggctacatcctcatctaatccagtccttgcaaggttgtagaggtctctacctcaacgacaggctagcatggacgtgcacagtgtcactctgtttcacttgatat

SEQ ID NO: 244217 - DNA, 159 bp, Glycine max
gaacaaaacaagtgtttcgaatagattatcctaagtctttgggaatagtgctgcaatggcttcaagtcaggaagaggtgacccttttgggagctactggaagcccatttgtgtgcagggttcatattgccctcaagttgaagggattcaatacaaatat

SEQ ID NO: 244218 - DNA, 324 bp, Glycine max
tacggctgcgaaaaaccaccaaaaggttccgcctccaaaaaaccaccaaaaggttccgcctccaaaaaaccaacaaaaggttccgcctccaaaaaaccaacaaaaggttccgcctccaaaaaaccaccaaaaggttccgcctccaaaaaaccaacaaaaggttccgcctccaaaaaaccaacaaaaggttacgcctccaaaaaaccaacaaaaggttccgcttccaaaaaaccaactaaaggttacgcctgaaaaaaccacccaaagggaaatttctccaaccaaaaaaaaaacaccacaaaaaaaaaaaaaaaccgccgctct

SEQ ID NO: 244219 - DNA, 407 bp, Glycine max
gatgtccccacttatctaacccagtaaacgtggaacacacctgacacctgatccgcgagcgagggtttgtgaagatgacgacgattcgcaggttttgctgcaacgattttcttcgctttgccgccgtcaatctcgaccatctcaccgaaacattcaacatgtccttctacatgacttatcttgcaagatggcctgactatttccacgttgccgaaggccctggaaatcgaatcatgggttacattatgggtaaagttgaggggcaaggagaatcttggcatggccatgtaactgcggtgaccgttgctccagagtatcgaaggcagcagttagccaaaaaacttatgaatctgctggaagacatcagtgacaatattgataaggctttttttgttgatctctttgtg

SEQ ID NO: 244220 - DNA, 397 bp, Glycine max
ggacgggacatggagagttacgggtcgggtcatggttcgggtcaccgtccgcacggaggtggccgtaagatggaggttgtgagcggcaaaagccacggttggagttctactaaatcaccggattcaactcaggcgagtgaaatgccgtggagattcggcgatcctgaagcgaagaggaagaaaaggatagcgaagtacaaggtttacggcgtagaaggaagggttaaggctacgctcaagaaaggtcttcgatggatcaagaaaaagtgttctcagatccatggctactagtagaaatactcagaagccagccacgtcaaatgctgacgtgtcagtatctaaatgttgggatgctactcctcatatcatatcacatgcaaagggtcaattctttgtt

SEQ ID NO: 244221 - DNA, 325 bp, Glycine max
  unsure (1)..(325): unsure at all n locations
agaacaagaggaacagagaatgtaaagaaggaggagggaaggagaaaatatagaggggtgaggcagaggccgtggggaaaatgggcagcggagataagagacccattcaaagcagcaagagtatggttaggaacatttgagacggtagaggcagcagctagagcctacgatgaagctgcccttcgttttaggggcagcaaggccaaactcaacttccccgagaatgtcactctccgacaacctcaattcactgtttccacatcaacagacccatttcaactctcgggtaccaacctttatgatcatangatgtttctgacttcta

SEQ ID NO: 244222 - DNA, 384 bp, Glycine max
gaacgcagccaagaaaagaaaatcctcacccattttcttcgtagccaaacactctgaaattctcagttatgtcgtggcaagcgtatgtggatgatcacctactgtgtgaaatcgaaggtaaccacctcactcacgccgctatcatcggccaagacggaagcgtttgggctcagagcaccaacttccctcagttcaaacctgaggaaataactgccatcaataatgactttaatgagcctggatcacttgctccaactggattgtatatcggtggcaccaaatacatggtcatccagggtgagcctggtgctgtcattcgagggaagaagggtcctggtggtgttactgtgaagaagaccggtgcggccttgatcattggcattt

SEQ ID NO: 244223 - DNA, 378 bp, Glycine max
agggttagccccttgcatcttgactcatattcctcacgggatggtaccaatcctcctctatgttgtttacgacatctggttctttgggggttataattgatggttgtttctcaattccatctttattacagaactgtacatgagattttcacctcatacggctcctcactaatgaagcaattcatatagatatctatctatatatatagataatctatttaatctactcgataaaataatatgcactaatattcatatgtttaatgaagaattgaataccgggattttttgagatttcataaaatctattccaaatttttacactttgttttgacttaaaattgaataagtaatcctgataattaaccagtttttttt

SEQ ID NO: 244224 - DNA, 151 bp, Glycine max
acccacccgtccagcccatcaaccattcttgtgtcacttgccttcaatgaccctgggtcaggtattgttcctgctgctatctccctgctaccactttcgagcgagtacgtgatcccacacctgggactggatctggaacatcggttctcaa

SEQ ID NO: 244225 - DNA, 390 bp, Glycine max
  unsure (1)..(390): unsure at all n locations
gataaaaagaagaactacttttctgttgctgttgcggatgagggatcccagccgttgttgcttcatgctattgaagagttttcttgcaagtctacttcaaatgctttgaaggaggttgccctggttctaaaggcactctacgatgctgatgtgttagaggaagaacacatagtgcagtggtatcaaaagggactgaagggtgataacaagaactctaggatttggaagaatgctcaacctttcattgattggcttcagaatgcagaatcagaaaccgaggaagaataatttgtcctacattctccgttacttatgtntgcttgcttgtgttatgtcctttatttccaattaagggtcttgttggccccatgtgttgttcaactactatac

SEQ ID NO: 244226 - DNA, 361 bp, Glycine max
gattacagtgaaggagatgcactggatgcattgggactggttcggtattgttgtatgcgcatgcttatgagccacgttgatctcattgagaagttgctcaattacaatactttggacaagtctgatctcaattaagaagaaggcttgaggaataacagatgaccaagatgcttctgttgtattccatgccctatggcaatgcatcaatttttcttttcttttatgaattgctttggtacaagcaggtcatgtttgtgtgctggatcaggtcaagtgtgtttgttatcagttctgacgagctatgacaagacacagcttatgttaatatctcatatgatgatattacatgacagaccaaact

SEQ ID NO: 244227 - DNA, 403 bp, Glycine max
agagaaaacagagacaaaagacattttaacatctccattgaaatatagacatgagtgggagctcatgttggggaaaattagcaaaggcaacgtttgtgttgttggagatgcatttcaccccatggcccctgacctagggcaaggtgggtgctgtgccttggaggatgggattattttagccaggcatctagccgaggcattcaccaaaaaaactggcaaacatgttgctaaagagatgggtgaagaggggtgatttgaaattggtctcacattttagggacaaacttttccctgctttcctagctgagctgctgttgaagaaatcagattttgattgtggaaaacttaattaacacgcctaattgatgtggaataacgtaattaaccatgcatgcatgccctc

SEQ ID NO: 244228 - DNA, 402 bp, Glycine max
ggaacaaaacaagtgtttcgaatagattatcctaagtctttgggaatagtgctgcaatggcttcaagtcaggaggaggtgacccttttgggagctactggaagcccatttgtgtgcagggttcatattgccctcaagttgaagggagttcaatacaaatatgtcgaagaaaatttgaggaacaagagtgaactgcttctcaaatccaacccagttcacaagaaggttccagtgtttattcacaatgagaagcccatagcagagtctcttgtgattgttgaatacattgatgagacatggaagaacaaccccatcttgccttctgatccttaccaaagagccttggctcgtttctggtccaaattcattgatgataaggtttttggtgctgcatggaaatccg

SEQ ID NO: 244229 - DNA, 393 bp, Glycine max
ggccacactcatcatattccataagcatcttcttccatcaccgcattattcatcttttctcttctcattcaccaattcacaattcattttatttcttaagatgccaactgacacgtcatcagtttccggcgaaatcgtgtgtgtgaccggtgccggcggtttcatagcctcttggcttgtcaaacttctcttagagaaaggctacactgtgagaggaaccgtgagaaatccagatgatccgaagaatggtcatttgaaagagttggaaggaggcaaggagaggctaactctgcataaagttgatctcttcgatattgcctccattaaagcagctcttcacggttgccacggtgtcttccacaccgcttctccggtcaccgacaaccctgaaga

SEQ ID NO: 244230 - DNA, 261 bp, Glycine max
ggcctagcccgccgagaaaaccctaattcgctcgcagtcacccaagaggcgaatccttaccattgctcgagatgggtgaagaagtgaaggccgtggttccagagtctgttttgaagaagcagaagagagaggaggaatgggcgttggccaagacgcaagacctcgaggctgcgaagaagaagagagccgagagccgcaaactcatctacaacagagctaagcagtacgctaaggagtacgatcaccaggagaaggaattga

SEQ ID NO: 244231 - DNA, 369 bp, Glycine max
gacggttgggccatcttgtccatctatcccacaactaatttttgattttccttgtttatttatcttcttcctcccttgtttgtttgtttctttgtttctttggcttgacaagaagaagatgatgatgatggacaagggggtgttggatgatgtgataagaaggcttctggaagggaaaggagggaaacaggtgcagctctctgagtccgagatccgtcaactctgcgtcaacgccagacaaatcttcctctctcagccaattcttctcgaccttcgtgctcccatccgcgtctgcggtgatatacatggtcagtaccaggacttgctgaggctttttgaatatggtggctaccctcctgcggcaaacta

SEQ ID NO: 244232 - DNA, 377 bp, Glycine max
  unsure (1)..(377): unsure at all n locations
ggcactacggtttcaactacaccgattgggccttcaagaatgcaccattttacctcaatgatactctagttttcaaatatgatgctccaaatgccaccagtttcccacacagtgtgtacatgatcaaaagttttgggagcttcatgaagtgtgacattgaaaaggctaaaatgttagcaaatcccacgcaaggtacaggagagagcttcaagtttgtgttgaagaggtggcagcctcactactttgcctgtggtgagcgaaacggcttccattgcaacaacggcaccatgaagttcgctgtgatgccaatgcttcgtcncttctggcggtggccatgataaaaaaaatgcacaacgcaattagttattaggtttttt

SEQ ID NO: 244233 - DNA, 345 bp, Glycine max
ggaagaaaaagacttactcaagaagcttcgagaaaatgtctggaaaagcgaagaggtgagatgacgacggtgcttccgacgccgactctgaaggccacgcgccgcccaagaagtcccccaagaaggattccgatgacgatcccgactctattaccgtttgcgagatttcgaagaacaggagggttgccgtgaggaactggaaaggcagcattatggttgacattcgcgagttttacgtcaaagatggcaagcaattgcctggcagaaaaggtatctctttgaccatggatcagtggaatgtgcttcgtaatcatgtttaagaaattgacaaggcaattaatgaga

SEQ ID NO: 244234 - DNA, 351 bp, Glycine max
gaaccatataatttaatttaatttgtgtccacatgagaacgtcgtgacctgcattttctatctcgcaacaccgcgataatggtataaaatagtttcagatacgttgcgttgattgattggtatgaagtgattgactttttttcttcttctattctcacacatacccatctactccttccctcatggctgaacaatcttccaactccatttacgatttcactgtcaaggacatcagtggaaatgatgtgagtctgaatgattacagcgggaaggttctactgattgtgaatgtcgcctctcaatgtggtttgacacagacaaattacaaagaattgaatgtattgtacgaga

SEQ ID NO: 244235 - DNA, 449 bp, Glycine max
  unsure (1)..(449): unsure at all n locations
ggtcatggattccgggtcgatcagtcgtgcttccagatgacaacagaagggggatagaagaaaggcatagcatanggcggttgactcaagtaaacagcgttccaacgctgtttcctttctgtttcttttttcttcttccttcttccttccttcgttgttgttgttgctgcgattctctagatcttgaacagtgttttcgtgttcggtgagatggaagaaaggaagcaatcgcgttatgtgaagttgactaaagatcagacacctctcgaagatattacccctggcgaactcaatcagccaattcaggttcctcagttggatgttcgtaagtgccctgaatgtagacagccgctacctgaaagctatgctcctcctgctgatgaaccttggatgactgggatctttggatgtgctgaagacagagaaagctgctttgacggactgttttg

SEQ ID NO: 244236 - DNA, 400 bp, Glycine max
  unsure (1)..(400): unsure at all n locations
cacaagagccttgttgatgctgtgaagcaggttgatgttgtcatcagtgccatctctggtgttcacatcgggagccacagcatcactctgcaactcaaacttgttgaggccatcaaagaagctgggaacgttaagcgtttcttgccttctgaatttggcccagacccagcaaggatggggcatgcattagaaccaggaagggtaacatttgaagacaaaatggctgtaaggaaagcaatagaggaagctaatatccctttcacttacatctccgcaaacctctttgctggatactttgctggcagcctctctcagatggggtcttttgtgccaccaaggggcaaggtacatccctttggagatggcacactcanagctatttttctggatgaagatgatg

SEQ ID NO: 244237 - DNA, 386 bp, Glycine max
gagagaagatggggttgtcgttcacgaagctgttcagcaggttgtttgcgaagaaggaaatgaggattctgatggtaggtctcgatgctgctggtaagacaaccatcttgtacaagctcaagcttggagaaatcgtcaccactatccccaccatcggatttaatgttgagactgtggagtacaagaacatcagcttcactgtgtgggatgttggtggtcaggacaagatccgtccactgtggaggcattatttccagaacactcagggtctcatttttgtggttgatagcaatgatagagatcgagtggttgaggcaagggatgagctgcacagaatgttgaatgaggatgaacttagagatgctgttctgcttgtttttgccaac

SEQ ID NO: 244238 - DNA, 397 bp, Glycine max
  unsure (1)..(397): unsure at all n locations
agggaggggttgaaatatgactctaacaaccaggagttgcttgaaggcatcagaacatgcatacaacaaattaacaaggctagccgtggagacttaagtcctgacgaattggaggagcgacaggccaaggcaatgcaggatccagaaattcagaacatccttcaagaccctgttatgagacaggtattgattgatttccaggaaaatcccaaggctgcacaggaacacacgaagaatccaatggtgatgaataagatcanaagctggtcagtgctggaaattgccagaagaagtaagtttgttgcaaggtgcaattcctgtgaaaaagcaatcaagcaatcgataatgatgtctcagtgtgactattttgacatttaaatagatgtgactgggaaaa

SEQ ID NO: 244239 - DNA, 375 bp, Glycine max
  unsure (1)..(375): unsure at all n locations
ggcagttcaaagcgaagaaagattcgaaacgaagaaagaaagcgttgtgaagaatggcggaagagggacaagtgatcggtgtccacagcgtagaggagtggaaggaacatctcaagaagggagaagagtccaagaaattgattgtggtggattttactgcttcttggtgcggtccatgccgtttcattgccccaattcttgcagagtttgctaaaaagttgccgaatgtcaccttcctcaaggtggatgtggatgaattggagactgtttccaaggagtggggaattgaggctatgccaaccttcctgttcttganagaaggcaagccggttggacaaaggtggtgggtgccaagaaagaggagctgcaattgac

SEQ ID NO: 244240 - DNA, 414 bp, Glycine max
gaagacgaaagaaggggaccctttttcgtttttctccttattacagacccccctaattgatggtgctctgtatcccctttttcttctgcaagaactacaccaactaaaacctccttcttcttttttttttggaggctggtgtgtgtttttctttttcttcttcatcttcttccaatccttaaggaaaaaactaaagaaaaaaaaagtgagccatgtcaggcttgtataatcccaacttctctcctgctagagcagcttctcctcaaattaggagcaatccaaaagtggaaaatcagtacctaacaaagttgctggcaaaacatcagaagcttggaaccttcatgcaagtgcttcccatatgcagccgcctcctaaatcaagaaatattaagggtttctggaatgttgttcaatc

SEQ ID NO: 244241 - DNA, 494 bp, Glycine max
  unsure (1)..(494): unsure at all n locations
ctcgaacgttanncgtcancaaccggtctacaactcccgggtcgacccacgcgtccatactgcgagaagacgacagaaggatacggctgcgagaagacgacagaaggatacggctgcgagaagacgacagaacggtacggctgcgagaagacgacagaagggtacggctgcgagaagacgacagaagggtacggctgcgagaagacgacagaagggtacggctgcgagaagacgacagaagggtacggctgcgagaagacgacagaaggatacggctgcgagaagacgacagaagggtacggctgccagaagaccacagaaaggtaccgctgccagaagacgacagaaggatacggctgcgagaagacgacagaatggtacggctgcgagaagacgacagaagggtacagctgcgagaagacgacagaatgggcttacgaaatggaaaagcaaggatgacaaagaatggtccagttacaatctctancaacgag

SEQ ID NO: 244242 - DNA, 381 bp, Glycine max
caggggggataccacgagtcatagccaaaacagtttccatctctcgcacagcatgatgtcaatatcaaattgctcccttctcttgaacttcctcttcctctccagccgccacataacttcaactctctcaacccgcaccaacttcatcaattcctcctgcagcaccaatcaatatccagccctctgcatctagtcgatcaccgtctacgcctccaccatccagcaagaccccgactagctcgtccagacagccctctcactctccctcaaccacaccgaggccaccaaaaccgtcgtcgcaaaatgcaacaaatgtcagatgcctcaaaccgagagaatacgctgccttgaatgactgcgctgaagaaatcagtgacagcg

SEQ ID NO: 244243 - DNA, 390 bp, Glycine max
ggcaaaaacgtaagagaaaaatggggtgtttccatctcacagtgactagtctgtgctttgtagtggttgtggttggagtgcttccactctccttagatgcacaactagatccctcgttttacagagacacgtgtcccaaggttcactccattgttcgcgaagtggtgaggaacgtttccaagaaagatccccgcatgcttgccagtctcattagacttcactttcatgactgttttgttcaaggatgtgacgcatcagttttgttgaacagcactgccaccatagagagtgagcaacaagctctgccaaacaacaactctctaagaggtttggatgttgtgaacgacatcaagacagcagttgaacaggcttgccccggcgtggtttctt

SEQ ID NO: 244244 - DNA, 374 bp, Glycine max
gtgactcgacatccaaatgaaatttcatttagctagcccagactgtcaattcgatgatccgcaatagtagtggtgtaaatgattctattctccataaatgcaaaaatagatgtctgcatgaaccaataatcgagacgaaaggtacactcgattgggttatatatagttacgaggattcccaaggtttatccccacaagcttactagactcatgatacttcacatacatgactgttatgttagtcgatgtaactcacgcagttttgttcaatatcactgctaccataggacagtaatcaccatcctctgcccgtcaacaacgctctaagaggtttggatattgtcaactacatcatcagatcagttgaacacgct

SEQ ID NO: 244245 - DNA, 295 bp, Glycine max
ggcaaaaacgtatgataaaaatggggtgtttccatctcatagtggacagtccgtgctttgtagtggttgtggttggagtgcttcgagtctcgttacgatgcacaactagatcgctcgttttacagagacacgtgtcctaacgttcattccattgtgcgtgaagtggtgaggaacgttttcaagatagatcccggcaatcgtgcgattcgcaggagacgtcagctttaggagtgctttgttcagcgatctgacgcatcagttctgtggaacagcactgctatcatagatagtgagg

SEQ ID NO: 244246 - DNA, 307 bp, Glycine max
ggagaaaataaagagtggtgaatgggaggtcggttacaatgctatggtagacaggtatgagaatttagtggaggctggagttatcgaccctgccaaggtaacaaggtgtgcattgcagaatgctgcttcagttgctggaatggtgttgaccacacaggccattgtggtggaaaaacctaagcccaaggcacctgtagctggtgccccacaaggccttaccgtttaatttttaagttattaaggctacggcaaagaacagttttgtgcacaaaattgaaagagcctaagtgttagaaatctgttcaat

SEQ ID NO: 244247 - DNA, 378 bp, Glycine max
  unsure (1)..(378): unsure at all n locations
gccaatatggaaacttagatgagctttctgcaatatgctctgccatggaaggtgttaaagtagttaacggattggaatgtaagatagcttgcagctcatccaagatttcatatgttcttgacacacaagattttttcttccgaccaagaaagaaacgacggacgccatcagggaccacaacctcccagtctcgtagggacagagaggaaagattccgcaaattgttggcacactcgcaatttgtatcttcatgaatagctgttctctaacatcttctaaaacagctgagactcaaatacataatgtgagtcttggtgtagcaacctaggaaccctttgggtttacaattttacttgttgtcaaagtacntgaattttc

SEQ ID NO: 244248 - DNA, 395 bp, Glycine max
gaacgaatcaaggaggattttaccaagaaatatgctggaggaaaagcagcaacagcggctgctcagagcctcaacagagagtttggacctaagttgaaggagcagatgcagtactgtgttgatcacccagaggaaattagcaagcttgcaaaagtgaaggctcaggtttcagaagtcaaaggagttatgatggaaaatattgagaaggttcttgaccgtggggagaaaattgagcttttggtggataaaacagagaaccttcgctctcaggctcaagatttcaggcagcagggaaccaagattaggagaaagatgtggttccaaaacatgaagataaagctaatcgttctgggtatcataattgccttgattcgtaatattgttccttccgtttg

SEQ ID NO: 244249 - DNA, 377 bp, Glycine max
gggctgaaaaggagacaaatggacttgttaaagaccttcttcctcctggatcagttgacagttcaaccagactcatctttgcaaatgcactgtacttcaaaggagcatggaatgaaaagtttgattcttcgataacaaaagactatgattttcaccttcttgatggccgttcaatcagggttcccttcatgacgagcaggaagaatcagtttattagggcttttgatggtttcaaagtccttggtcttccctacaagcaaggtgaagataagcgccaattcaccatgtactttttccttccagaaacaaaagatgggctgttagctttggctgagaagttggcttctgaatctgggttctttggacgcaagcttcct

SEQ ID NO: 244250 - DNA, 386 bp, Glycine max
ggagtgagtagtgagaatggagtttcaagggttaccggaaggttgcattgctagtatactctctcgcactacgccggcggacgtgtgtaggttttccgtcgtatcaaagattttccgttcggccgctgaatcggacgctgtgtggaaacgttttctcccttccgattaccattccatcatttcccagtctccttcgcctctcaactatccttccaagaaggagctctatctcgctctctcggatcgccctatcatcatcgatcagggtaaaaaggtatgtagcgtgttgtgtgtttcgcatcccttaaaaccttttctgttgatttaatttgatggttaattctctgatgtctggaacgcagagctttcaattggagaaaaagagt

SEQ ID NO: 244251 - DNA, 406 bp, Glycine max
gtcagggcaggggagagaggacaataggggggcggaaaaggatagaaatggacgtgtgaaagaccatcttcctcctggatcagttgagagttcaaggagaggcagcggtgcaattgcactgtacttcagaggagcatggaatgaaaagtttgactcttcgataggtaaagactatgattttcaccttcatgacggccgttcattcagggttcccttcatgaccagcaggaagagtcagtttattagggcttatgatggtttcaatgtccttggtcctccctataagcaaggtgaagataagcgccaattgagtatggtacgttttccttccacaaacatgagatgggctgttagctttggcggacaagttggcttctgaatctgggttcttggaacgcaagcttcg

SEQ ID NO: 244252 - DNA, 497 bp, Glycine max
aacctcacccgtcagtagccgtccagaattcatgggtcgacccacgcgtccgtacggctgcgagaagacgacagaagggggtgaagagtcatacaaggatagtacgttgatcatgcaacttctccgtgacaatctgactttgtggacatcagacatcacggacgatgctggagatgagatcaaggaaacatctaagcaacaaccaggtgaataggcgatggcagtagttgatgggatatgtattaccgataatatacatccaatgtggcttgccatagtggaactgtgtattaatgagtttcgtgatttcaattgcgggttgcgcttgagatttacaatgtttcagtcgtgtatgtgttttattgacgagaacaatgtggcttggtggtttagtgatttataaatttttttattgttgcaaaaaacacctaagcccccaaaaaaaaaaagcggccgctctagaggatccaagcttacgtacgcgtgcatgcgacgtc

SEQ ID NO: 244253 - DNA, 400 bp, Glycine max
ggactttgaaactgcgattcagaaagagtcatcgaagaaaccggtccctggcggtggtgttcaccctctcacgcgctacgtgatgaactacctcacgttcctcgccgattacagcggcgtgttggtcgatataattgccgatttgccgcaatctccgttgccggagtcgtactaccgcagcccgatgcgcgaggaaaacccgccggcttcggagctatcggagcgaatcgcgtggatcatactcgtcgtgctctgcaagctcgacggcaaagcggaactctacaaagacgtggcgcactcgtacctgtgtctcgcgaataacatgcaatacgtcgtcgtacaggtgcgcaaatcgaacctagggtttcttctcggcgaatagtggttggcgaagcatgaa

SEQ ID NO: 244254 - DNA, 399 bp, Glycine max
ggagagaaaaaatggccaaatcaatcaaattctttgagttgaacacaggggccaagattccttctcttgggttagggacttggcaagctgaacctggtgttgtagctgaagctctcaccacagccattcaggttggatacaggcatattgactgtgctagtgcgtataagaatcaagcatagattggttctgctcttaagaagctttttgatgatggtgtggtgaagcgtgaggacttatggatcacttccaaactctggtgttcagatcatgcaccagaagatgtgccaaaagcattggataaaacattacacgaattgcaacttgactatcttgacctctatctgatccactggccagtccgcatgaaaagtggaacatttggactcatataagaat

SEQ ID NO: 244255 - DNA, 328 bp, Glycine max
ggcatcaatcaggagatcttcattccttgttccatcagtagatggctatgccaaagcaggtgtcaaatggataagctatgagcctcgttgcacatcatattggccgcatactcttcattgggctgtggcatgctcattgcccgagtttgtatgttgatgcttggctcctgtggttttgcttgggtattccagcgaggggacagcgcatagagtccatgaagaatgaatcatatgatgctatggttctgatgtgtacgccaatagacgctatccagctgaatatatatatcagaattgtagctgattaaagaattcgaagtacctgctg

SEQ ID NO: 244256 - DNA, 377 bp, Glycine max
ggagttggttggtgtttgtttttgttgttggctgtgcgatcactcatctcatctcttctcatcaacactgcgatagacactggagctgacaccccatcatctgagccaatacaacggcacggacccatcaaaaccgatctacgtgtcggtaaatggccgcgtccacgacgtcactaccggaaaatccttttacggccccagaggcccctacgtcatgttcgcaggcaaagacgccagcagagtcctggcgaagatgatcaggaacgacgacgacatcacactctccctcgatcgcctctccgacaacgatatcggcgttctcaatcactgggagaacacattctaagcttagttacctgtcgttgctagtgttctca

SEQ ID NO: 244257 - DNA, 387 bp, Glycine max
ggcagccaaagaaaagaaaatcctcaattttctgagcagccaaacactctctctcggtcccccgaaaattccaattttgccaaaaaaaccgaaaccaggcccggcaaacctatgtccaacattaacctctgtgtgacaaccaaagggaacaactcaatcacgctgggaacaacgggcaaaacaggaacgtttgggctcacagtatcgacatctcccagtttaaacctgaggagataactgccaccacgaaagacatttatgagcccggatcacatgctccaactggagagtatctcggtggcaccaaatatatggggatccacagtgaacccggtgctgtcattctacggaagaagggtcctcctggtgttactgtgaagaagaccg

SEQ ID NO: 244258 - DNA, 407 bp, Glycine max
ggactaggtggcagagcagcagaggaagttatttttggtgagtctgaggttacaactggagcagtcggtgatttgcagcaaataaccagtttggccaagcagatggtaaccacatttggaatgtctgatattggtccttggtcactcgtggactcatcagctcaaagtgatgttatcatgagaatgatggcaagaaactcaatgtcagaaaagcttgctgaagacattgatgctgctgtcaagagactctcagatgaagcatatgaaattgcgttgagccaaataaggagcaaccgcgaggcgattgacaagattgtggaagttctattggagactgagacaatgtctggagatgaattccgacctctcctgtccgagtttgttgaaattcctgctgaaaatcgggt

SEQ ID NO: 244259 - DNA, 391 bp, Glycine max
gaacacaacctggggtgttaaatagaaaagaggagtttgagaatggcaacgatcagcgcggttcaggtggagttcctggagtttccagcggtggttacttcaccagcctccggcaagacctatttcctcggcggcgcaggggagagaggattgacgattgaagggaagttcataaagttcacaggcataggagtatacttggaggataaggcggtgccatcactcgccgctaagtggaagggtaaaacttcagaggagttagttcacaccctccacttctacagggatatcatttcagggccgtttgaaaagctaattagagggtcgaagattctgccattggctggcgctgaatactcaaagaaggtgatggaaaactgcgtggcacaca

SEQ ID NO: 244260 - DNA, 375 bp, Glycine max
ggcattgtcaaatcagcagagaaccatttcactattagagagacataggcataatattgagagataatggagggttgtacttactgtgtgaagttgctatgccttgttgggtttgtggtgcttgtgagtacaattgcaggggtggagagtgctggtgaatgtgggaaatctaccaccccagataatgaggcttataagcttgcaccatgtgcctcagcagcacaacatgagaatgctactgtgtctcagagttgctgtgctcatgtgatgacaattgggcagaatccaagctgcctctgtgcagttctgcactcgaacacagctaagttggctggcgtctaccctcaggttgctgtcaccatcccgaaccgttgc

SEQ ID NO: 244261 - DNA, 376 bp, Glycine max
ggtgcaaatagcgacgtcaaaatttgttctttgccccgcggcgacggccagttctaagaagaatgccatcatcaatttcagttccaatttcaaaggaactctcaccaaaatccatgccatttccccaaatggctctgcctctagctgcacttcgcgtgtgtctgtgtcaagtttaaagacagacaagaacaaaggcagaagtaatcttgaatccctgttttgttatgataaggctattccagaagaaataattgagaaacctgttgggttatctttggaagagaaagctattggtaacaattcgcgatgcactgattgccaggccaaaggtgccgtgctttgtgccacttgtgctggttctggtctatatgttgac

SEQ ID NO: 244262 - DNA, 390 bp, Glycine max
gaacttttggttggaaaggctttgaagcagctgcccagagaaaagattcagatagccacaaaatttggtattgcttcacgaggttttcctgatacgaagatcaagggttcgcctgaatatgtgcgatcatgctgtgaagctagcttgaagcgtcttgatgttgaatacattgatctctattatcagcacagagtggacacatctgtacctatagaggaaacagtgggtgaacttaagaaattggtcgaagagggtacagtcaaatatattggattacctgaagccaggccagatacaataaggagagcacacgcaattcatcccatcacagctgtgcacatagagtgggtcttgtggacccgtgacattgaagatgagatagtccctctc

SEQ ID NO: 244263 - DNA, 350 bp, Glycine max
ggtaggcaaagagagagagagaaaagcgtgaatcatgtcggacgaagagcatcacttcgattctcaggcggatgcgggagcgtccaagacgtatcctcagcaggctggtaccattcgcaagaatggctacatcgtcatcaaatccaggccttgcaaggttgtagaggtctctacgtcaaagacaggcaagcatggacatgcaaagtgtcactttgttgcaattgatatttttaatgggaaaaagcttgaagatattgttccatcatcccacaactgtgatgttccacatgtgaatcgcactgactatcagcttactgatatccctgaagacggctttgtgagtctgttga

SEQ ID NO: 244264 - DNA, 353 bp, Glycine max
ggtaggcaaagagagagagagaaaagcgtgaatcatgtcggacgaagagcatcacttcgattctcaggcggatgcgggagcgtcgaagacgtatcctcagcaggctggtaacattcgcaagaatggttacatcgtcatcaaatccaggccttgcaaggttgtagaggtctctacgtcaaatacaggcaagcatggacattcaaagtgtcactttgttgcaattgacatttctagtcgggaaaaagcttgaagatattgtttcattgtcccagagctgtgatgttccagatgtgaaccgcactgactatcagcttagtgactatccccgagtaccgctttgtgagtctgttgac

SEQ ID NO: 244265 - DNA, 168 bp, Glycine max
ctgggagagaaagagagacagcgacgtcggagcctggtcatggtggttcggcggtcaacaagttccgcatgtctctgggtcttccagtggcggccacggttaactgctccgaggtccacgcggcgatgaatctctacataatgtcggtgacagggatcactggccgtt

SEQ ID NO: 244266 - DNA, 260 bp, Glycine max
ggagcgatgaaatggccacagcaatcgaattcattgagttgatcacaggggcgacgattccatctcttgggttacggacctggcaagctgaacctggtgttgtagctcaagctctcaccacagccattcacgttggatacaggcactatctgacatgtgctaatgcgtaaaagaatcaagcagagatagagatcatgcacataagatacattctgatgattgtgtggtcaaacgtgaggacttgaggatcacctccaaac

SEQ ID NO: 244267 - DNA, 392 bp, Glycine max
gaggcaaatggcagcatcgtcaccatcgccgccgctgaaggcggtgcaggaccgcgtccaagcagccgccgaacgctctggccgtaatgtgcaagagattcgtgtagtggctgcgagcaagacgaagccagtttctgctctccgtgaggtatacggcgccggccttagatgcttcggcgagaactacgttcaagaactccttcacaaggcaccacagcttcccgacgatatccagtggcatctcatcggaaatttgcagagcaacaaagtcaagcctcttatcgctgctgtgcccaaccttgcttgtgtggaaactgtggatgataagaagatagcaaattttcttgatcgtgctgtagcatatgttggcaggaaaccgttaaaggtttttg

SEQ ID NO: 244268 - DNA, 358 bp, Glycine max
gcttttgtttcgcaacatggttgccgctaagaaaactaagaagacccatgagagcatcaacaacaggctcgctcttgtcatgaagagtggcaaattcaccctcggttacaagaccgttctcaaatctcttaggaactccaaaggaaaattgattatcattgctaacaactgcccccctttgagaaagtcagagattgaatactatgctatgttggcaaaggttggagttcatcattacaatgggaacaatgtggatttgggcactgcatgtggaaaataataacagattgtgctgccttagcattattgatcctggtgattctgatatcatcaagacactgcctggcgaacagtaaag

SEQ ID NO: 244269 - DNA, 391 bp, Glycine max
gagcactaatttatatagcaagctagctaggttgaaaatagtttggttttgtagtaagtgaggtgaggtgccaaaatggtgaagataactcttggtactttcgatgactcttttggtgttgcctctcttaaggcttatttggcagagttccatgcaactctgattttcgtgttcgctggtgttggttcagccatcgcttacaacgagcttacaaaagatgcagccttggatccaacggggctggtggcagtagctgtggcccatgcatttgcactgtttgtacgtgtctccgtcgcagccaacatctcgggtggccatttgaacccagctgttacttctggattggccattggaagcaacatcaccctcattactggttttctatactgga

SEQ ID NO: 244270 - DNA, 397 bp, Glycine max
ggcacatccgtcatgcagcaatgccgtcatttcgggtggacagtgtcgtccagagatgcagagtctagcccagaaggcttccgaatggagcggtgtatccatacacgacgctttcggcatcgacgacaccaatcacttccagaaactcagcgaccacaccttcattaacctctccatcaatttctatggcatggtttacgataacgatgaagaatggtttcgtgcaatagacgcgaattctgataaggagaatgccattcacaaccaacatgagttcttcgtgcagcaaatgggtagtcatccacgcattacgcatagaagaggacaccgtgctcgaattgctcgacatcgaccatttcctgtcacgcatcaagctgtatagaggtggttacatcac

SEQ ID NO: 244271 - DNA, 187 bp, Glycine max
cacaaaaggggacaaacaacaacaatttaccagctatacctgttccttttgaacgttagaagtgctacaatacaaacaatggcagctactcaggaagatgtgaagcttttgggtactgtgggaagcccacttgtgtgcaaggtccagattgcccttaagttgaacggagttgaatacaaatttttgg

SEQ ID NO: 244272 - DNA, 374 bp, Glycine max
ggcattgtggaattaatagagagacataaaaaataaacatatatcgagaatggagggttgtgtgaagaagttgctatgccttgttgggtttgtggtgcttgtgagtactattggtggggtggagagtgctggtgaatgtgggaaatctacaacccctgataatgaggcttataagcttgcaccatgtgcctcagcagcacaagatgagaatgctagtgtttctcagagttgctgtgctcatgtgaagaaaattgggcagaaccctagttgcctctgtgcagttcttctctctaacacagccaaaatggctggcgtcaaccctcaagttgctgtcaccatccccaagcgttgtaacctggctaatcgccctgttg

SEQ ID NO: 244273 - DNA, 389 bp, Glycine max
gatgaagaaaaagaagggaaggatcgtcaatattgcatcagttgttggtttggttggcaatgttggacaagccaattatagtgctgcaaaagcaggagtaattggcctgacaaaaactgttgcgaaggaatatgctagtagaaacatcactgttaatgcagttgctccagggtttattgcatctgacatgactgccaagctaggacaagacattgagaaaaagattttggagacaatcccattaggaagatatggccagccagaggaagttgctggactggttgaattcttggctctaatccaactgccagttacaccactgggcaggttttcactattgatggaagtatggtgatgtaaattagcaatccttttaccttgcaacatga

SEQ ID NO: 244274 - DNA, 354 bp, Glycine max
agaaggggcgtttcaggtgaaggaaggggagatgctgttcgggtaccaaccattcgcgacgaaggatcctaggatcttcgagagggccgaggagtttgtcggggacaggttcgtcggggaggaaggggagaagctcctcaagcacgtgctgtggtccaatgggcctgagactgagtctccaacacttgggaacaagcaatgcgccggaaaagacttcgtcaccttggtttcgaggcttttcgttgtggagttctttcttcgctatgattccctcgagattcaagtgggaacttctcccttgggttcttccgttactattacttccctaaagagagcaagcttttagttagttag

SEQ ID NO: 244275 - DNA, 393 bp, Glycine max
gaaggaagtcttacctttctgtcagcaaagttcgatggaatactgggacttggatttcaggagatctcagttgaaaatgctgtgcccgtatggttcaaaatggtggagcaaaaacttatcagtgagaaggtgttctctttttggcttaatggggatccgaatgcgaaaaaaggtggtgaattagtttttggtggtgttgacccaaagcacttcaaaggaaaccacacttatgttccaattactgaaaaaggttactggcagattgaaatgggagattttttcgttggaggtgtttcaacaggtgtttgtgagggtggctgtgctgctattgtggattcaggaacatctttgcttgctggtccaactcctgttgtggctgaaatcaaacatgcc

SEQ ID NO: 244276 - DNA, 308 bp, Glycine max
gattcttacagagctggtgctgattttgtccgtggatacccttttagtcttcgtgaaggtgccccaactgctgtttctcatggcctgtggcttaacatacctgattatgatgctccaacacagcttgtcaaacccctcgagaggaacaccaggtatgttgatgctgttcttaccattcccaagggaacattgttccccatgtgtggtatgaatctggcattcgatcgtcagctgattggacctgcaatgtattttggactcaagggttgatggtcaacctatacgacgatacgatgatatgttgggct

SEQ ID NO: 244277 - DNA, 370 bp, Glycine max
gggggaaatgggcagcagagataagggacccattcaaagcggcaagagtatggttaggaacatttgacacagcagaggcagcagctagagcatacgatgaagctgctcttcgtttcagaggcaacacagccaaactcaattttcctgagaatgtcactctccgacaacctcaattcactgtttccaatcctccatcttctcttgtatctattacaacatcaatagacccagttgttcacagtactcgacctctccttcttccttctcaggcttcaactgcgaccaatgtttacgagtattttcaactctcgggcttccccaccaacaccaacctttatgatggtaataggatgtttgtgacgtctaatgc

SEQ ID NO: 244278 - DNA, 229 bp, Glycine max
ggttctagtgtgtgattgtttgttgttgtaactcgttcatcttcttttgttgttctgtgtttgtgtttgttttttctcacacctgaaaatatcatgctgcggtagtaactgtggttgcagaagctcctgcaagtgcggcaacagctgtagatgctgcaagatgtacccagacttgagctacactgagtcaaccagcaccgagaccttggtcaagggagtggcaactgtt

SEQ ID NO: 244279 - DNA, 272 bp, Glycine max
cagtgcatcagggacaccttatcatgatggcttgtttttctttgatatatgcttccctccagagtatcccagtgaaccccctatggtgcattataattctggcgggctacaattaaatccaaatttgtacgagtcagggaaagtctgtccgagtctcctaaacacgtggactggtacagacaccgaagtgtggaaccctggagcttccacagttcttcacgttcttctttctctgcacgcccttgtccttaatcacaagccttatttcaatc

SEQ ID NO: 244280 - DNA, 371 bp, Glycine max
ggacgttccaatttgcgtgagaacgaaaaaagaaaagaaaaaccctaacgcactcgagaccctgagatttttcatcttcgtttctcattctctttttgatcatggacgtcgaggtgcggcagatcttcaacaagttcgacaagaacggcgacggaaaaatctcggtaacggagctgaaggacatgctcgcggccctcggatccaaaacgacggacgaggagttgaagcgcatgatggaggagctcgaccagaacggcgacggtttcatcgacctcaaggagttcgcggattttcactgcaatggcggtgccggaaaggacgactcgaaggagctccgcgacgcgttcgatctctacgacgtcgaacagaac

SEQ ID NO: 244281 - DNA, 381 bp, Glycine max
gctctctaagtaaaatcttaaatttctgaacattgaacaactcttcacacaacaaaacttttttctggcattgtagcatcatgactggcagagaaatcctccatatgatgaaggtgaaagcagggtttggaacaccagacacagggaatggaaaaggcaaaatatcaaaacacattacacatggctttcacttgatgaagggcaaatcagcgcatcctatggaagattatttagtttcagaatttaagcaagaaaaggacagagaattaggcttgtttgcaatatttgatggccacttaagccatgatgtagcaagctatttgcagaaccaccttttccaaaacatcttgcaacagcatgacttttggactgagacagaaa

SEQ ID NO: 244282 - DNA, 291 bp, Glycine max
caagttcttgcaggaactgccagaatcgcagagagaagatgctgtgagcagcatggtttatgaggcaaatgcgaggatcagagacccagtttatgggtgtgctggtgcaatatgccaacttcagaagcaagttagtgagctacaagcacagctggccgaagcacaagctgaggtagtgaacatgcagtgccaacaagccaatttagtggcgcttacttgcatggaaatgagtcaatcacaggagcagcacgtgcttcagcctcaaactcacgttgatatgagctgcttcat

SEQ ID NO: 244283 - DNA, 376 bp, Glycine max
cacaaaggtgctttcttccagaatgaatctgatgaccgagctgccactgttggatctgatggtatttttgctcgtgatttctctgctccaactggggaggataaaatggacaagacaatattacctaaggttatgcaagtcaagcactttggtcgtagtggaagaaccaagtggacccatcttgtcaacgaggatactactgattggaataacccgtggacttacaatgatccacttcgtgcaaagtataatgacaaaatggcagcaatgaacgcacctatagtgaaacctaaaggaagcaggaaattaaaggattgggaatctcgatgaacttgaagttacaaagtatgcatgaagatatcatcctttcagttat

SEQ ID NO: 244284 - DNA, 380 bp, Glycine max
gggggaaaacagagtactatacggaatttgaaaaccaaggctcaagttttaataagagacgtggagctctctgtggttgcaagaaacatggaagaagttgtgttgctggttgatgatttgagatcactttctgggatttctcgctgtagaatatgtcatgaagacgactttgagagctctaaaaccttggaagctccttgtgcttgttctgggagagttaagtctgctcatagagattgcattcagacttggtgcattgagaaaggaaatacaacttgtgaaatatgtctctagcaacatgaatccggatatacagcagccttagagagatcgcaagtagctgatgcagcactgatcattagggacagcatgcaaatttc

SEQ ID NO: 244285 - DNA, 363 bp, Glycine max
gggttcagaacatccaaggtttcatgtgggatgaggagaaagtgaacaatgagctaaagacctacatgaccaaaggtttcatagatgtgaaggaaatgtgcaaaacccatgaatgtgatcttcgtatgggagccttcaccctggcagttaaccgtgtcgcacgtgctactgtccttaggggctgggaagcttgacatccattgcttctgctttcaataaattaattaaagagctcccactctcagcaacacttcacaaagtttttgttgctttcaactaatgtgttgggtgaatcgtattttcacgccaaattttctttcaataaattagtatagtatataaatctttttgtaactacatgtg

SEQ ID NO: 244286 - DNA, 272 bp, Glycine max
gggtgcagaacatccaaggtttcatgtgggatgaggagaaagtgaacactgagctaaagacctacatgaccaacggtttcagacatgtgaaggaaatgtgcaaaacccatgaatgtgatcttcgtacgggatccttcaccctggcacttaaccgtgtcgcacgtgctactgtccttaggggctgggaagcttgatatccattgcctctgctttcaatatattccttaacgagctcccactctcagcaacacttcacaaagtttttgttgctt

SEQ ID NO: 244287 - DNA, 395 bp, Glycine max
gggcatcacaaactatatactaatctccatctaatagtgttaatttgtctttctctatctctatcggtcatgggtgcttttgcttttgatgaggaaaactcctccgccgtggctccggcaacactctacaaagctctgacaaaagatgctgacactatcatcccaaagattattggggccatccaaactattgaaatcgttgaaggaaatggaggacccggaaccgtcaagaagataacagctagtgaaggtgaccaaaccagtttcgtgctgcaaaaagtggatgcaattgacgaggctaacttggtatacgactacagcatagtgggagggacggggttgcatgaaagtctggagaacgttacattccaaacaaacgtggttccctggcactg

SEQ ID NO: 244288 - DNA, 377 bp, Glycine max
gttggcactttcattcttgtctacaccgttttctctgccaccgatgccaagcgtagcgctagagactcacacgtccctattttggcacccttgccaattgggttcgctgtgttcttggtgcacttggccacagtcccaatcactggaactggtatcaaccctgcacgaagtctcggtgctgccatcatcttcaacaaagaccttggctgggatgaccactggatcttctgggttggacctttcgttggtgcagctcttgcggctctttaccaccaagttgtaatcagagccattcccttcaaatccagttaattaattggattacaacgattcgtggtcaatcaagttgggtaaattaaaagaccaaaccaagcaag

SEQ ID NO: 244289 - DNA, 269 bp, Glycine max
agactcgctcaacccgggcaaagtatcgcggtgtgtgtcaacttgctctgcacatttgtcattgcgcaggcctttctctcaatgctgtgtttcttcaagtttggcatcgtcttgttcttctctggatgtgtcctgctcatgtccacctttgtgcttttccttctccccgagacaaagaatgtcccattgaagagatgactcagagtgtgtggaagcaacattggctgtggaagacgtttatttaagatgattgtgttaaagaagagaaa

SEQ ID NO: 244290 - DNA, 241 bp, Glycine max
ggggggacctcccgcaacatcataaccataatgcctacgtgtaccggcacagacgacatcatcaccagcagggccgactacagcagcgacactgtcactttcaagtccgaaagccctacagaagcacgccgatttctgacgttcgacatgaagctgatggacattcataatgaacacattgcgattccggaggcacagtatcaagctactgttaacatgagatcctctgagtttgcaacga

SEQ ID NO: 244291 - DNA, 219 bp, Glycine max
cggggaggaagccacatagagacacattacagagtgagttgttgctccttcgccaaaactctctgggaggatgggtaccttacgagattcgatgcacaagaggcgtgccactggtggcaagaagaaggcctggaggaaaaagagaaagtatcgagcttggtcgccagcctgctaagcactaaactgtcaagcaacaagacagttatgaggatgcgtgtt

SEQ ID NO: 244292 - DNA, 369 bp, Glycine max
gcgtgaaagatgaatgggcgaagctttcagggtctccaaggctcgacgttgctattgacatgggcaatccatttctcaatctcactgttggtggtttccttaagatcggagctgtcgcagccacgcgatcagctgctgaagatacttatcatattatccaaaaggggaatatctcaagtcatgatttcgagaaaacgttgaagaagatgtgcaaagaaggtgtatattggggaactatagctggcgtttatgttggaatggaatatggggtagagacgattcgttggcacagagaatggaagaatggcatgattgggggtgcagtaactggggccctggtatctgcagccagcaacaacaagaaagaca

SEQ ID NO: 244293 - DNA, 370 bp, Glycine max
  unsure (1)..(370): unsure at all n locations
aggggacagtagtaaagtgagttaaaagaaccgataatagttgttccttcactctccgctctctctgccactgagccaagaagatggcctcacaggtttgcaaatctgcttccagagccgcgaggtcccttctatcctctcgttttcactctcaaggacgtgcgcttggggctgctgcggctgtttcattgagcagcaaagtgccttttttttacggaaagaacggttctggaaatggatccgcttcttcatcatcatcatcatcatggatttcaggagctcttgctcttcctgccgcagcttacatgttccaagatcangangtgcangcagctgagctggagcgcactttcattgccattaagcctga

SEQ ID NO: 244294 - DNA, 384 bp, Glycine max
  unsure (1)..(384): unsure at all n locations
gttgatggtaaggctgagagtgaaggtgaagctgaggggatttgtgatgcacaggtcggaggagatggcacatctttgccattgtcagagaggttcctttcatccgtgaaacccctcacaaagcatgtatcagcagtttcatttgttgaagaaatgaaggattcaagggtgttctatggaaatgatgacttctatgtgctttttagacttcatcaagctctttatgagaggatcttatcagcaaaaacacattcaatgagtgcagaaatgaaatggacagcaaaagatgctagttcaccagattcttattcaagatttatgaatgcattgtacaacttgcttgatggatctgccgaanatgccaagtttgaagatgaatgccga

SEQ ID NO: 244295 - DNA, 261 bp, Glycine max
ggcagacaacaccaagtctcaccttctcacactcatcatcatacaccccaacccttttccacataggcgtatgcacatggggtgtcatattgaccaagatggtgggtgacccctgtggcacatgctactctttagcgagcactagttacagatgcagaacatgtcatcgaaaaggcaccagacctccatacgcatgtcgacaacattgaggcaaattgtggcttatgcattacagatatcattatgatcctgtatgatgga

SEQ ID NO: 244296 - DNA, 363 bp, Glycine max
gagggtttagggtagatccgtggctggtttctggaacttttgcatccgaatcgccgtatgttttggcagaagcacatgttctccgcgtcagccatggccgatgacatcgacatcgcggatagagttcctccttcactcgatagcgtgggaaatgtgatcaaagattctggatccaaagggtacaatccaggattaattgtcctcctggttgttggtgggttgttgttgacagatctcagtggaaattatgtgctctacaattacgcacagaataccctctctcctagaaaacagaaccctgtttcatagaacacgatgatcctggagagaacgacacaaggtgtctctgcacctggacagtag

SEQ ID NO: 244297 - DNA, 350 bp, Glycine max
gaaggaaaagtagctgtattcacgaaattgacacatgcatagtatttcaggatcttcttcaacagacagcctgatgagacgattatccacaatgtcaaaatcagctccatcatctgtaatgtccatgcaatgcttcagtaccattgcaagcattcctcccgatcagcagcatatgattttcgccctgaaacaacttgcccatggaatgaccctggacgactacaacatccagaaggaatcaacccttcatcacgtcctcatgctgcgaggtggcatcattgagccttccctcacagctttggctcccacatacaatcacgacagtatgattatgccgcaagtgctatccc

SEQ ID NO: 244298 - DNA, 329 bp, Glycine max
gaccgtggagatagaaggagcttgagggattcacatcactgtccacagagaaatcgtagattgcgagaaagattctgaatcatgtcgaggacagcctatgtctgagattaacttctgtgtgacaatctatagtaagcatctcagtcatgcggatagcatcagctacaacagggacgtttaggctcatagtaacggattccctcagttgcaacctgacgagatagctgccatcatgaattactttaatgagcctagatcacttgctccaactggattgtatctcggtggcaccaaatatatggtcatccacggtgaaacccgtgctgtca

SEQ ID NO: 244299 - DNA, 320 bp, Glycine max
gggaactgaaattggtgagcttgatttggcaaatattcgagaactctgtgaccaggttttgtctctctcggaatacagggcgcaactctatgattatctgaagagtagaatgaacaccattgcaaccaatttgactgcaatggttggggagcttgttggtgctcgcctcattgcccatggtggtagcttattaaatcttgcaaagcagcctggtagtactgtgcaaattcatggtgctgagaaggctctctttagggcactgaagactaagcatgctactcccaagtatggtcttatataccatgcttccttggttggtc

SEQ ID NO: 244300 - DNA, 326 bp, Glycine max
gatcaaagcagctgcggatcatgctggacattcagcacaactggggctttagaagcatcctatgcataagcatttgggaacagtatcgctctttctgagcagcagctagtggactgtgctggccctttcaacaactttggctgccatggtgggttgccatcacatgcctttgaattcattaaatattagtgtatactatagacagaggaagcatatccctacacatgatcagatggtgtctgcatattctcagctgaaactgttgctgttcaagtccttgactctgtgaatatcaacttgggtgcagaacattaacttcaacatgc

SEQ ID NO: 244301 - DNA, 386 bp, Glycine max
gagtaaaagttcttcaattggaaactgcagctggtgcagcagtaaggttctttgacaaagctattggcattaatgtgcctcgatctcgcttccttcgcgtgaaggcaacttcagacttgcatcttgtcgagtcggacctttacactttacaagatggattggttattaggaaccaatctagggcaaatcctgaaaatccttccattgaattggggccagaatttaagaatgttagcaatttcttgagccggttcaagtcaatccccagtattgttgagcttgacagtctaaaagtggcaggcgatgtatggtttgaacctggtgtaatccttacaggacaagcaagtattcttgcataaccgggtgtgaagctggaaatacctgac

SEQ ID NO: 244302 - DNA, 473 bp, Glycine max
ttaccctgcgacgcggcgaggtacaggtcaggaattcccggctcgacccacgcgtcagtacggctgcgagaagacgacagaaggggttgccagctaatttggtgcaagctcaacgagactactttggtgctcatacatatgaaagggttgacatagaggggtcttaccatactgagtggttcaagcttgccaaacagtctagaatttagattactgtatttgaaccaatcaggattttcctaataaatgtaatgttttctgctcagactgtatgctgagttgagtttacatagccacaacgtggtgaagttttatgtatattatttccaactgaattgcatgatagtttgttttccaactatgttgtatctttgctgattatgctttgtgcttgatacaaaattgtcccaaacattaaaggaacagcagttattcataacggccgctctagaggatcaagcttaagtacgctg

SEQ ID NO: 244303 - DNA, 340 bp, Glycine max
ggaagtttgaaagacaaatacaccatggcagatatcctgagtgaagaacagattgttgattttaaagaggcctttggcttgtttgacaaacatggggatggttgcattactgtggaataacttgccactgttattcagtcgttggatcagaaccccaccgaaggaagagctccaagatatgataagcgaagtggatgcacatggcaacggaaccattgaattcgatgagttcttgagcttgatggccactaaagtgaaagacaccgatgcagaggatgagctcaaacaggctttcacggtttttgacaacgatcaacatggctacataggagctagtgag

SEQ ID NO: 244304 - DNA, 315 bp, Glycine max
ggtatttgtgagtgtgtgagagagagagcgagcagtttcagacacagagagaggggtttgggattggagggattgacgctgcgtctcttcctcttctccttcgatccatccctcattcctaatcctccaatccaaccacctcagcctcacactcacatatacacatatctgaacgcgtatcgtccctcctatggcttcaaagcgcatcctcaaagagctcaaggacctgcacaaagaccaccaacttcttgcagcgctggtccagtagctgatgacatgtttcattgccaagcaacactcatgggtcctgctgat

SEQ ID NO: 244305 - DNA, 381 bp, Glycine max
gaacatcatcatcgtcatctacaactagtaacaaagatccaacaagcagatcaatctctctctctgtctcccaatcaaaacagacatgggtttgaaggaggattttgagcagtatgctgagaaagcaaagactttgccaccgactcaatcaaacgaagacttgcttatcctttatggattgtacaagcaggccaccgttggacctgtcaacaccagccgtccgggaatgttcaacatgagggacagagctaaatgggatgcatggaaggctgttgaacggaaatccaaggacgaagcaatgagtgattacatcactaacgtgaaacagctgctggaagcagccggcatgcctgcttgataacattgtcatgccttgctttc

SEQ ID NO: 244306 - DNA, 285 bp, Glycine max
gtatgccaagagggcctttgttcactggtatgttggtgagggtatggaagaaggagagttctctgaagctcgtgaggatcttgctgctcttgagaaggactatgaggaggttggggctgaaggagcggaagatgatgaggaaggagaggactattcacaaatgaaggttttattaccaatgtaattgtttcgagtaaaaagggtatatgcttcgttacattaccctgaaccagtattgtccgttcctttttgtctttactcctgtgtgatacagttctccattat

SEQ ID NO: 244307 - DNA, 363 bp, Glycine max
gagccatggttacaaaaggcctcattgaaccaatttcaaacaccactgtgaaccttgtgaatgcggatttcatagccaagcagaaagggcttcgcataagtgaggaaagagtggttgttgattcatctcctgagctgcctgttgattcaatccaggtacagatatctagcgtggactccaaatttgcgagtgctgtatcagagagtggtcagataagcattgacggaagagtcaagtttggagaaccccacctgacatgtgttggatctttcgatgtggatgtgagcttagaagggaatctaatcctgtgccgacaggtggatcagcccggcatgattggtcgtgttggaaacatactgggtg

SEQ ID NO: 244308 - DNA, 376 bp, Glycine max
ggcgcattgaacgaaaattagggtttgtagtgtagcaggaacaagcagcaatggcgccgaaggtaacacgcaaggttagcagaaaccccgaattgataaggggaattggaaagtactcgaggtcgcagatgtaccacaagaggggcatttgggctatcgaggccaaaaatggtggcgttttacctcgccacgaccctaaacccaaacctgaaacacccgctgaaaaaccacccaaattttaccctgctgatgatatcaagaaccgccttgtcaacaaccacaaacccaaacccgctaagctcacggctagcattactccgggaacagtgttgattcgtcctgctggtagatttacagggaaagacggtactctttt

SEQ ID NO: 244309 - DNA, 360 bp, Glycine max
gacttattaattgtgttaagaaatttaagtgaggagctagagaatgatgatgaagtctgctatgtgtgcagtggtggttgtagcacttcttcttctggcggaggtggggcccatggctgatgctgtgacatgcaccccaacagagttgagtccgtgtcttccagcaatcacttccggtgctaaaccttccaatgcttgttgcacgaagctgaagcagcaaaaaccatgcttatgtggctgcctcaaaaacgctagcttgaagcagtatgttaactctcctaatgcccgaaaaaccgatgcttcttgtgggattcactttccaacttgtcaattaattaagccttcttagaattaaagtgt

SEQ ID NO: 244310 - DNA, 276 bp, Glycine max
ggaaccaaacaacaaatattcatggctttctttattctctccttcctcttccttcttcttgtttcatctgccactgcttgtgatcgctgcttgtatcaatccaaggcttcctatttctccaaagcttctgctctttcatctggggcatgtgggtatggctctttggcactagacataagtggtggacaccttgcagctggtgtggattctctcttcaaaaatggagcaggttgtggtgcctgctttcagataagatgcaagataccaactctatgt

SEQ ID NO: 244311 - DNA, 336 bp, Glycine max
gatgtctcaaaagatatccctccctttgattgcatatatctgagaatcacccttttattgattcaaactttggaaatctcaatcttcacccttatgattgaaattaacatgaagcatcaaggcaagcttagagtgtttcttccaaatatgataatacttgtaaccatccttctccattcaacaacatggattagtgcacaggaagttgaggatgaaagtgagtttgattacataaaagggagtgagaagggtccctcacactggggggaactgaagaaggaatgggaaacatgtaagagtggcaaaatgcaatctccaattgatttgtcaagccac

SEQ ID NO: 244312 - DNA, 389 bp, Glycine max
gactcaaaattaaccacaagcataagcacaagcacaagcacaagcacttctctaattccctttcacactctattacagatttcacaagtgcttacacttcaaatggctttggaagctcttcaatcacccaccacagccactccatcgtttagtccctttgaagaaaccagtctcagttacttagagacaccgtggacgaaaggaaagcgttctaagcgtagccgcacggagcaacaactgcaacacccttcatgcaccgaggaagagtacctcgctctttgtctcatcatgctcgctcgcggcggcgccggcagtgtctccaccgccaaacccgctgtctccgacaacaattctgcgccgctatccgccgccaaactgagctacaaatg

SEQ ID NO: 244313 - DNA, 368 bp, Glycine max
gaaaagtaagaggagagaaagatggagaagcaacaacaacaagcaccatctaaggaaacaaaggcacagagtgatgaatcagttaaagaaagcagcactgaagggcttccaatggaggatagtccctatgtgaaatacaaggatttggaggattataagcgtcagggttatggtacacaaggtcatcaagaaccaaagacaggtcgtggagctggagccactgaagcacccactctctctggtgctgcagtttcatctgatgcacaagtcgctgccactgatgccattaacagtaaaggagtcccttaattattcacacttcctagaatagatcgttcctttgccaataagaaatcgttttcctaatt

SEQ ID NO: 244314 - DNA, 390 bp, Glycine max
gggaattattgctcccatcgccattggtttcattgttggcgctaacattttgttgggtggggccttctccggagcagccatgaaccctgctgtgacatttgggcctgctgtcgtgagctggacctggaccaaccactggatctactgggccggccctctcatcggaggtggaattgctgggcttatctacgaggttgtcttcatcagccacacccacgagcagcttcccagcactgactactagaggggaaaaatgaaataataaaaaaaaaaatgtgtattattgaatttctccggaatcttcttctgtgtatggttttccttcctttgtgttttctttcctgttgaatcggtggccgttgatctttggtttgatggttgatgatcctg

SEQ ID NO: 244315 - DNA, 345 bp, Glycine max
ggctgtgagtgagacaccgatagatagagagcgcggcataacctaaagctatctttcttctctctctgtgtgtgcgcttcaacggcaaccagaagcagccatggccactgcaaggactgtgaatgatgtttcacctcatgagttcgttaaggcgtactcctctcacctcaagcgattcggcaagatggagctgccagagtggactgatattgtgaaaactgcaagatttaaggagttggctccttatgatcctgactggtatcatgtcagagctgcttccatggcaagaaagatctacttgagacgaggacttggtgttggtgcctttcagaggatttatggtgg

SEQ ID NO: 244316 - DNA, 394 bp, Glycine max
catggcaagtggctgctacacttgcacacagcctaagccaaaccctagccctaacccattcccttaccctaaccccagccctaccgcaaagagctgccccagggacgcacttaagctgggtgtgtgcgcaaacgtgcttaatggaccaattggtgcgattgtggggtcaccaccggaccacccatgttgctcagtgctagaagggcttcttgaccttgaagttgcggtttgcctctgcactgccatcaaagctaacattcttggcattaaccttaacatccccatttcacttagcttgatccttaacgcctgcgagaagtctccaccctctgacttccctatgcactagacattattaagcatgccattctcaaatatccatgcactaccttat

SEQ ID NO: 244317 - DNA, 373 bp, Glycine max
gataagaaagaagatcaaaaaaaaaagagaaacaaatggcagcactgggtggctttaccgacatcaccggagcacagaacagcatcgatatcgaaaatctcgctcgctttgctgttgatgaacacaacaaaaaagagaatgcagttctggagtttgtgagggtgattagtgcaaagaaacaagtggtttctggcaccttgtactatatcactttggaggcaaatgatggtgtgacgaaaaaggtttatgaaactaaggtgttggagaaaccatggttgaacatcaaggaggttcaggaattcaagcccatcactgttgctgttaatcctctttcggtgacggtctagcacatagctaagttatggaagtgact

SEQ ID NO: 244318 - DNA, 379 bp, Glycine max
  unsure (1)..(379): unsure at all n locations
ggcgtacacagcctcaacaaccctaacgcgtgcagagcagagagagacgcagccatggggcgaagacccgcgaggtgttatacgcaaattaagaacagaccataccccaagtcacggttttgccgtggtgttcctgatcccaagatcaggatttacgatgttggtatgaagaagaacggtgttgatgagtttcctttctgtgtccatctggttagttgggagaaggaaaacgtttttagtgaggccctggaagctgctcgtattgctagcaacaagtacatggccaaatttgctggacaggatgctttccacttgagagtcacgctgcanccattccatgttcttacgattaacaacatgccttcctgtgctggagctg

SEQ ID NO: 244319 - DNA, 353 bp, Glycine max
ggagtttagtgggcctgaattgaagaaaattatggccaatgaaaagcttgcggagattgccttgaccgatccaaagcgtgcgaaaaggattttggccaaccggcaatcggctgcgcgatccatagagcgaaagatgcggtacatttcggagctagaacacaaggttcagactctacagacagaagccaccacactatctgcacagcttactctgttacagagagattctgctggactcactaaccagaatagcgagttgaagtttcgccttcaatctatggaacagcatgcaaagctccgagatgctctaaatgaggctcttactgctgaagttcagagattacagattgcta

SEQ ID NO: 244320 - DNA, 358 bp, Glycine max
gggttggagtggctatttaaaaggatgattgagttgggaaaaacggggcttgttttcaatccttatggagggaaaatggctgagattccttctgatgcgacgccgtttccgcaccgtaaagggaacttgtataagatccagtactctgtgaactgggatgatccttcacccggtgctgctctgaatttcactaaccaggctaagacgttgttcagttacatgaccccttttgtgtccaagaatcccagaagtgcgtttttgaattatacggatcttgatattggggttaacagctttggtgagaatagctttcaggaagggttggtttatgggaccaaatacttcaatgataattttc

SEQ ID NO: 244321 - DNA, 379 bp, Glycine max
  unsure (1)..(379): unsure at all n locations
gatattaagcatagtacaaaacaatgaagaccaaactgctagcatttctcctcttctttgccttgactacaaaaccactactacttggagcagctggagctgctccagagccagtgattgatacatcaggcaagaagctgagagctgatgcaaattaccatatcatccctgcagtgcccttcaccatatgtggctttgttggctgtttcactggtggaggcctttcactagacagcatagatgaatcttgccctcttgatataataatcgagaaagccaatgaaggcctaccactgagaatctcancagttaacaccannnaaagtgttattcgtgtctccacgatttgaacatttttttctctgattctgaatgaaag

SEQ ID NO: 244322 - DNA, 371 bp, Glycine max
ggagcagaacactctcattatcaaaggtgaaggtgctaaagaaggcgatgaagaagagagcgctcgtcgctacactagcaggattgacttgccggacaagctctacaagattgaccagatcagagctgagatgaagaacggtgtgctcaaggtcgttgtgccgaaaatgaaggaggaagagaggaaagacgtgatcagtgttaaggttgagtagaacaacccaagctgatttggccattttgcatcgacactactctttagttttcttttattaggtggtgatgaatctagttagtagatataacagcttaatagtattgttgctgtgtttggttttgaaacttcaaacgtatccgttaaaattgttatat

SEQ ID NO: 244323 - DNA, 389 bp, Glycine max
gctctctaagtaaaatcttaaatttctgaacattgaacaactcttcacacaacaaaacttttttctggcattgtagcatcatgactggcagagaaatcctccatatgatgaaggtgaaagcagggtttggaacaccagacacagggaatggaaaaggcaaaatatcaaaacacattacacatggctttcacttgatgaagggcaaatcagcgcatcctatggaagattatttagtttcagaatttaagcaagaaaaggacagagaattaggcttgtttgcaatatttgatggccacttaggccatgatgtagcaagctatttgcagaaccaccttttccaaaacatcttgcaacagcatgacttttggactgagacagaaagcgcagtg

SEQ ID NO: 244324 - DNA, 336 bp, Glycine max
  unsure (1)..(336): unsure at all n locations
gaacacaaaggagaacaccatggtgagcacaaaggtgaacacaaaggagaacaacaccatggggagtacaaggagggacttgtggataagatcaaggacaagatccatggtgatggccatgacaagggtgagaaaaagaagaagaaggacaagaagaagaaggagcatggacatgaccatcatggtcatagcagcagcagtgacagtgattagatcntatatgttaagcacgtgtacggtacgatgggagtgaggagccagaatccctcttcctgctttatgatataataccaataaaataacgattccggaaatcatgtctgtaactgctccttt

SEQ ID NO: 244325 - DNA, 260 bp, Glycine max
ggggcaaaacccaactgaggcagagctccaggacatgatcaatgaagtggatgctgatgggaatggtaccattgaggtccctgagttcctaaatctcatggccaggaagatgaaggacactgattctgaggaggagctgaaagaggcattccgggttttcgacaaggaccagaatgggttcatctctgctgctgagctccgccatgtgatgaccaacctcggggagaatctcaccgatgacgaggttgactagatgattc

SEQ ID NO: 244326 - DNA, 343 bp, Glycine max
ggtggtgcgcctccccacaaatacacacagaaagttgagaggtggtggtagctgctgcgaagcgttctgcagccaataatagctttcgcagcaaaaccaacgattcaaattcaacctcctcagatggcacattctttctcgccagccaaacgcgcccttgcctttgcccttcaacgacgagggtacgcagcggcgtctgatgcttctccttcgatgagagggggattggatagcattagtgtaatggagaagggtgtgacaaaaaacagttcgggcccatcggggacctcatcagcttgggccccggacccaatcacgggttactacaggcccatcaatcaca

SEQ ID NO: 244327 - DNA, 324 bp, Glycine max
ggaggtcgttggcgagaatgggaagaaagaaggggtatgctgagttcgaggagtcgccgccggacgattttgatccggcgaatccgtacaaggacccggtggcgatgctggagatgagggagcacatcgtgagagagaagtggatccaaatcgagaaggccaagatcattatggagaagctccgctggtgctaccgcatcgaaggcgtcaaccacctccagaagtgccgccacctcgtcaaccagtatctcgagtccacccgcagcatcggttggggcaaagaccgtcgccaaccatctcgccacgctcccaaagttgaccctg

SEQ ID NO: 244328 - DNA, 395 bp, Glycine max
gggcattgtgaaatcaacagagaaacatttcactaatagagagacataagcataatattgagaaataatggagggttgtacttattgtgtgaagttgctatgccttgttgggtttgtggtgcttgtgagtactattgcaggggtggagagtgctggtgaatgtgggaaatctaccaccccagataatgaggcttataagcttgcaccatgtgcctcagcagcacaagatgagaatgctggtgtttctcagagttgctgtgctcaggtgaagaaaattgggcagaacccaagctgcctctgtgcagttccgctctccaacacagccaaaatggctggtgtcaaccctcaagttgctgtcaccatccccaagcgttgcaacctggctaatcgccctg

SEQ ID NO: 244329 - DNA, 371 bp, Glycine max
ggatgaagataaggagaaggaggagaagaaaaagaagaccattaaggaggtatctcatgagtggtcattggtgaacaagcagaagcctatttggatgaggaaacctgaagagatcacaaaagaagaatatgctgctttctacaagagtcttaccaatgattgggaagagcatttggctgttaagcacttttctgttgagggtcagctggagtttaaggctgtcctctttatccccaagagggcaccttttgatctttttgacactaagaagaagcctaacaacatcaaactgtatgtccgccgtgttttcatcatggacaactgtgaggagttgatgccagaatatcttagctttgttaagggtattgtgg

SEQ ID NO: 244330 - DNA, 368 bp, Glycine max
gactgcatttcccacctcaatattaatatatttctttccccacaagagagatcatggaaaaggatatcattcatctttctccaacatgggatggtgacaatggcaattccactgagaaaaggctcaggctatttggttttgagctaaacccttctaaagatggttatgccaaagaatctggtgaaggagatgaaagtgtgaactcctctaactcagtttcttctggaggagacaaaactgtgcaagagaaaccctctgccaaagactctgatgagagaaagtttgagtgccaatattgttacaaggaatttgcaaactcacaagccctaagaggccaccaaaatgctcacaagaaagagagaatgaag

SEQ ID NO: 244331 - DNA, 346 bp, Glycine max
cggggtgtctcactcacatcacacactctcatagctgtagcggcgacactaagatcggagaaagaatggcgaaaacgacgtcgttgctgctctttacactgctcctcttcggaaccctagctctcatccaggcgaagaaatcgaaggaggatttgaaggaggtgacccacaaggtttactttgatgttgagattaatggaaaagaagcaggtcgtattgtaatgggtctttatgggaaggctgttccaaaaactgcagaaaacttccgagcactttgcacaggggaaaagggaactggtaaaagtggaaagcctctccattacaaaggtagctcattccatagaat

SEQ ID NO: 244332 - DNA, 465 bp, Glycine max
ttaacttgtcgcgtccaggtaacggtcagcgcggtctcgacccacgcgtcagtacagctgcgagaagacgacagaagggggctccgaaacaaacgaaaaggtgcatgccgcactcacgagggactgccagaatacactggaggaaggtggggatgacgtcaagtccgcatggcccttatgggctgggccacacacgtgctacaatggcaattacaatgggaagcaaggctgtaaggcggagcgaatccggaaagattgcctcagttcggattgttctctgcaactcgggaacatgaagttggaatcgctagtaatcgcggatcagcatgccgcggtgaatatgtacccgggccctgaaaaaaaacaaaaaaaaaacataaaaaaaagcggccgctctagaggatccaagcttacgtacgcgtgcatgcgacgtcatagctcttccatactgtcacctaaattcaa

SEQ ID NO: 244333 - DNA, 373 bp, Glycine max
gaacgcaacgaatgaaaagaagatcctcaagttgctgagcagccaaacactctctctctgtctctcgaaaattctcagtttgcagagaaaatctgaatcatgtcgtggcaagcgtatgtcgactatcaccgtctgtgtgacatcgaaggtaaccacctcagtcacgctgctatcatcggccaagacggcagcgtttgggctcagagtaacgacttccctcagttcagacctgacgagataactgccagcatgaatgactttaatgagcctggatcacttgctccaactggattgtatctctgtggcaccaaatatatggtcatccagggttgaaccggtgctgtcattcgagggaagaacggtcctggtggtg

SEQ ID NO: 244334 - DNA, 392 bp, Glycine max
ggcagcagcaactttaaacgccgaagaaagttcatccaatctccgaagcccttcaccgcattgcaaccatgtcgagaagaaaggttagagagccaaaggaagaaaacgtgactctgggcccagctgttagagatggcgaacatgtctttggcgtcgctcgcatctttgcctccttcaatgataccttcattcatgtcactgatctgtccgggagggaaacacttgtccgcatcacaggtggaatgaaggttaaggctgacagagatgaatcgtctccctatgctgctatgcttgctgcacaggacgttgctgccagatgcaaggaactgggcataactgctcttcacatcaagctccgtgcgacgggtggaaacaagacaaaaacaactggt

SEQ ID NO: 244335 - DNA, 375 bp, Glycine max
ggcgtacgcagcttcatccctaacgcgtgcatagcagagtcagagacagagacgcagccatggggcggagacctgcgaggtgttataggcaaattaagaacaagccataccccaagtcacgtttctgccgtggtgttcctgatcccaagatcaggatttatgatgttggtatgaagaagaagggtgttgatgagtttcctttctgtgtccatctggttagttgggagaaggaaaatgtttcaagtgaggccctggaagctgctcgcattgcttgcaacaagtacatggccaaatttgctggaaaggatgctttccacttgagagtcagggtgcacccattccatgttcttaggatcaacaagatgctttcgtgtg

SEQ ID NO: 244336 - DNA, 427 bp, Glycine max
ccggctcgacccacccgtcaggcgaagaaaacgacagaagggcactcaaacaagctcaagttaattgctagagctcatcagctggttatggatggatttaactgggctcatgaacaaaaggtggttaccatttttagtgcacctaactactgttatcgatgtgggaacatggcttccattttggaggttgatgattccaagggccatacgtttatacagtttgatcctgctcccaggagaggagaacctgatgtcacccgtagaacgcctgattacttcctatgatgttgctgccgcatatcatactcctggcacagttacatctcattctgcacaaatttctagtactttgtgcatcctcatcctcgttggtgagattgctgtaagcacttaaaatctttgggtatgcactccaaacttttttggt

SEQ ID NO: 244337 - DNA, 355 bp, Glycine max
aggcgagaagacgacagacggggataggagcatcatacattgcattgaattcataaactaagttcatttcttgtgctttgccttattcctcatgagcacacatgtcgaacatatgcggcaactgtgattgcgctgacatcactaactgcaccacgggaaacagctatggtgttatagtagagactgagaagagctacatcgagactgttgacatggatgttcgagcagctgagcatgatgggaagtgcaaatgtggcactaactgtacttgcacggactgcgcttgtggccattaaggaatatgtatgacaatctcattgccatctgtatggcactacgattctccagataatgt

SEQ ID NO: 244338 - DNA, 357 bp, Glycine max
gaaagggaaaaaaaaaaatagcaacaaaaacaagaaaaaaggttacctctttcaattttatcccttgttgtgagcttaattcaatttctgctcacacataatggcttgcacgctcgctgattcattactcctattcaagggttcttatcagaaaccagttctgaggagagacattgctgcccggtactccccgggtatatttagtctaaacagtaatgggcttatccagaaaaggttcaggcgtcaaaggaattttgttactaggaataaggttactgtcatacatgccgtggcaattccagtacaaccagctccggtggaaagtgcggagtatagaaaacagctagctgaagacta

SEQ ID NO: 244339 - DNA, 364 bp, Glycine max
ggaggaactaagcaaactagaattgtcaaagaaaactgggaagaccaagaaaaatcgtctcttcaggaaagaactttatctcgcattaattttgttgactgcctcagttagaagcttattatctgcccaaggaattcacttctacttcctattatttcaagggataagttttctggttgttggtcttgatttgattggagagcaggttagttgatgtccagattttggatttttagtgcatacaaaacctctaagatcctcattgataaaggtcagaatggccaaaccataaacccatccctgaacacattgatttgagcctaagctgttcagtgtggtttttggctcccaattaaagcaaatc

SEQ ID NO: 244340 - DNA, 392 bp, Glycine max
gggcgtgagaaagcagtggaggaagccttggaagcattgaaaatcctacaggaaacactgaaagacaagaaattctttggaggagagagcataggattggtagatattgctgccaatttcattgggtattgggttgccatattgcaagagattgcagggttggagttgctcaccattgagaaatttcccaagttatataattggagtcaagactttatcaaccaccctgtgatcaaggagggtctgcctcctagagatgaattgtttgctttcttcaaagcttctgctaaaaagtagaaccattttagaggtaggattcataataagttagtatgattttgttgggaaacaattatcttgttgtgagcaaaggattgttctgttttaaattt

SEQ ID NO: 244341 - DNA, 377 bp, Glycine max
gacagacaaacaaacaatttaccagctatacgtgttccatttgaaggttaaaagtgctacaatacaaacaacggcagctacacatgaagatgtgaagcttttgggtattgtgggaagcccatttgtgtgcagggtccagattgcccttaagttgaagggagttgaatacaaatttttggaagaaaatttgggcaacaagatctgatttgcttctcaaatacaaccctgtacacaataaggttccagtgtttgttcacaatgacaagcccagagcagagtcgcttgtgattgttgaatacattaatgagacatggaagaacatccccagcttaccttctgatccttaccaaagagccgtggctcctttctggtccaaa

SEQ ID NO: 244342 - DNA, 393 bp, Glycine max
gagggaggggagaagagaaagaaggaaggagacatttataaaaagctctttcccttcccctaaatccctcacactcattccatttttacctttctctctcgctcgcaaacgcaaataataaaaaacaaggttttagccatggcatcgaagcggatcttgaaggaactcaaggatctccaaaaggatcctcctacctcatgcagcgccggtcctgttgctgaagacatgtttcactggcaagcaacaattatgggtcctccagacagtccttacgctggaggtgttttcctagtcactattcatttccctccagattatccctttaagccacccaaggttgcattcaggacgaaggtatttcacccaaatataaatagcaatggaagcatttgc

SEQ ID NO: 244343 - DNA, 376 bp, Glycine max
ggcattgtgaaatcaacagagaaacatttcactaatagagagacataagcataatattgagaaataatggagggttgtacttattgtgtgaagttgctatgccttgttgggtttgtggtgcttgtgagtactattgcaggggtggagagtgctggtgaatgtgggaaatctaccaccccagataatgaggcttataagcttgcaccatgtgcctcagtagcacaagatgagaatgctagtgtttctcagagttgctgtgctcaggtgaagaaaattgggcagaacccaagctgcctctgtgcagttctgctctccaacacagccaaaatggctggtgtcaaccctcaagttgctggtcacatccccaaagcgttgc

SEQ ID NO: 244344 - DNA, 397 bp, Glycine max
agaagggggttctagtgtgtgattgtttgttgttgtaactcgttcttcttcttttgttgttctgtgtttgtgtttgttttttctctcacctgaaaatgtcttgctgcggtggtaactgtggttgcggaagctcctgcaagtgcggcaacggctgcggaggctgcaagatgtacccagacttgagctacactgagtcaaccaccaccgagaccttggtcatgggagtggcacctgttaaggctcaatttgagggtgctgaaatgggtgtgcccgctgagaacgatggctgcaaatgtggaccaaactgctcctgcaacccctgcacttgcaagtgaggtgttgggagagcaagcttcaagcagagatagcccttaattaggaataatgattaactaat

SEQ ID NO: 244345 - DNA, 330 bp, Glycine max
agaatggggttctagtgtgtgattgtttgttgttgtaactcgttcttcttcttttgttgttctgtgtttgtgtttgttttttctctcacctgaaaatgtcttgctgcggtggtaactgtggttgcggaagctcctgcaagtgcggcaacggctgcggaggctgcaagatgtacccagacttgagctacactgagtcaaccaccaccgagaccttggtcatgggagtggcacctgttaaggctcaatttgagggtgctgaaatgggtgtgcccgctgagaacgatggctgcaaatgtggaccaaactgctcctgcaacccctgcacttgca

SEQ ID NO: 244346 - DNA, 386 bp, Glycine max
ggaatttctgtagttgaaattaccagttactatactctctctttctgaaacaatttgcccaattgtttgagatgttcaatatgagatttgtatctcaagattgggtggtttcatgtgcactaatacttctggtgtcatgcacaacatactcatcagcttctttggggaaacctgagaacaacataaaaacatctgtttttaaatcacccaagattgagctaggtccagggttagtttcaaacaaattttattttgatgttgactttccaagaggccatattgcactcaagagtttcaatgctgaattggttgatgagtcagagaaatcagtgcctctccaagaaacctatctccatcaatgggcttataataaaataacaccagcc

SEQ ID NO: 244347 - DNA, 398 bp, Glycine max
ggatcaggtagccaattcaccgttaacctaagaaagagaagtagctgtagtaataggaagaggatgatcggcgtcggaaagatcaagcagtacagtaacgtcctcgacaagcccctcaccaagggcaagcaagaggttagtttgagtgcattcgcgttcttgttctcggagcttgttcagtacaaccaaacgcaggtcgacaacattggcgagctcgaacgaagactggaggatgctggatatgcggttggggctcgagttcttgagctgctttgccacagagataagggaaacagaagagagacacggctgttgaatattctttcttttgtacacagtacagtgtggaaagtattatttggaaaggtagctgattcactggagaaaggaactgaaca

SEQ ID NO: 244348 - DNA, 338 bp, Glycine max
ggtacaaaacataaatttgtttgctattatggcttcttcattaaacaatggccgtaaagcaagtgagatttttcaaggtcaagctctcttgtacaaacatttgcttggcttcatagattctaagtgtctaaaatggatggttgagcttgacatacccgacataatccacagccatagccatggccaacccattactttttcagagttggtgtcaattctacaagtcccaccaactaaaactcgtcaggtgcagagcctcatgcgttatctagcacacaatggattctttgagatagtaagaatccatgacaacatagaagcatatgctctcactgctg

SEQ ID NO: 244349 - DNA, 342 bp, Glycine max
ggcagccaaagaaaagaaaatcctcaattttctgagcagccaaacactctctctctgtctctcgaaaattctcagtttgtagagaaaatctgaatcatgtcgtggcaagcgtatgtcgacgatcaccttctgtgtgacatcgaaggtaaccacctcactcacgctgctatcatcggccaagacggcagcgtttgggctcagagtaccgacttccctcagttcaaacctgaggagataactgccatcatgaatgactttaatgagcctggatcacttgctccaactggattgtatctcggtggcaccaaatatatggtcatccaaggtgaacccggtgctgtc

SEQ ID NO: 244350 - DNA, 340 bp, Glycine max
gacaatgtcaaagctaagattcaagacagagatagtatcccaccacaccaacagacgctcatttttgctggaaaacatcttgacgatggccgaaccttggcagattacaacatccataaagaatctaccctccacttggtgctccgtcttcgcggtggtatgcaaatctttgtgaagacccttactgggaagaccattactttggaggtagagagctctgacacaattgacaatgtgaagacaaagatccaagacaaggagggtattcctccagaccagcaaatgttgatttttgcgggaaagcagcttgaacatggacgtaccctggcacgctacaaca

SEQ ID NO: 244351 - DNA, 381 bp, Glycine max
cccgggcctgaccacgcgttcagttacggctgcaaaaaaacaacaaaaggggacagacaaacagacaatttaccagctatacttgttccttttgaacgttagaagtgctacaatacaaacaatggcagctactcaggaggatgtgaagcttttgggtattgtgggaagcccatttgtgtgcagggtccagattgcccttaagttgaagggagttgaatacaaatttttggaagaaaatttgggcaacaagagtgatttgcttctcaaatacaaccctgttcacaagaaagttccagtgtttgttcacaatgaacagcccataacagagtctcttgtgattgttgaatacattgatgaaacatggaagaacaaccccatctt

SEQ ID NO: 244352 - DNA, 144 bp, Glycine max
gtcgcgataagatcatatactgggacagacctacagacgatttaccagctatacgtgtgcctttttaacgttagaattgccaccatacctacaatagcagctacgcaggatgatgtgaatcttttgggtattgtgggaagccca

SEQ ID NO: 244353 - DNA, 350 bp, Glycine max
gacagacaaacaaacaatttaccagctatacttgttccttttgaaggttagaagtgctacaatacaaacaatggcagctactcaggaagatgtgaagcttttgggtattgtgggaagcctatttgtgtgcagggtccagattgcccttaagttgaagggagttgaatacaaatttttggaagaaaatttgggcaacaagagtgatttgcttctcaaatacaaccctgttcacaagaaggttccagtgtttgttcacaatgagaagcccatagcagagtctcttgtgattgttgaatacattgatgagacatggaagaacaaccccatcttaccttctgatccttaccaaa

SEQ ID NO: 244354 - DNA, 358 bp, Glycine max
gggttggagtggctatttaaaaggatgattgagttgggaaaaacggggcttgttttcaatccttatggagggaaaatggctgagattccttctgatgcgacgccgtttccgcaccgtaaagggaacttgtataagatccagtactctgtgaactgggatgatccttcacccggtgctgctctgaatttcacgaaccaggctaagaggttgttcagttacatgaccccttttgtgtccaagaatcccagaagtgcgtttttgaattatagggatcttgatattggggttaacagctttggtgagaatagctttcaggaagggttggtttatgggaccaaatacttcaatgataattttc

SEQ ID NO: 244355 - DNA, 383 bp, Glycine max
  unsure (1)..(383): unsure at all n locations
gaggagcagaatggcgaaggagatagtgaaagagcttcttcctctaattcgagtgtacaaggatggcagcgtggagcgtcttctaagctctgaagacgtggcagcctcccctgaagatccccaaactggagtctcatccaaagacatagtcatcgcagacaacccctacgtctccgctcgcattttccttcccaaatcccaccacactaacaacaaactccccatcttcctctacttccacggtggcgccttttgcgtcgaatccgccttctcctttttcgtccaccgctatctcaacatcatggcctcagaagccaacataatagccatctccgtcgacttcagactcctcncacaccaccctatccctgctgcctacgaag

SEQ ID NO: 244356 - DNA, 356 bp, Glycine max
gaaatgcaggtgtctatgttggaaatatacaatgaaaccattcgtgatctgttagctacaaataagtcatcagcagatggaacaccaacacgtgtggaaaatggtactcctgggaagcaatacatgatcaaacatgatgtcaatggaaatacacacgtttctgatctcacagtagtggatgttcagagtgtaaaagaggttgcatttcttttaaatcaagctgcaagtagcagatctgtgggaaaaactcagatgaatgaacaatcttctagaagtcattttgtattcactcttcgaatatatggtgtaaatgagagcactgaccaacaagtacaaggtattctaaatctcattga

SEQ ID NO: 244357 - DNA, 364 bp, Glycine max
gaatgcacaccacatagcaaaacctcaagtaccttctccttcacattccctcagcactttctgtattcaaaacttttggcattgtttccaatatcctaacttgagactatatatatagcagcatatatatatatataatggatagggtgacacagatggcatcagagaggccagtggtgatattcagcagaagttcatgctgcatgtgccacaccatcaaaaccctcttcagtgactttggagtgcatccaaatgttcatgaacttgatgagataccaagagggaaggacattgagcaagctctttcaaggctagggtgcagcccctctgtgcctgctgtgttcattggtggtgagcttgttgg

SEQ ID NO: 244358 - DNA, 294 bp, Glycine max
  unsure (1)..(294): unsure at all n locations
caagccttcattaaggcgccaaaagaacaacaaaagggaaaaaccaacaaaacatttaacaagccaaaactgttcccttttaaaggtaaaaattcctgcaatacaaacaatggcagctactcaggaagatgtgaagcttttgggtattgtgggaagcccatttgtgtgcanggtccagattgcccttaagttgaagggagttgaatacaaatttttggaagaaaatttgggcaacaagagtgatttgcttctcaaatacaaccctgttcacaaaaacgttccagtgtttgttca

SEQ ID NO: 244359 - DNA, 344 bp, Glycine max
ggtggagtataattgctgcgtgtgcatggtgcggcataaaggcgcggcgtttattccgtgcgggcacacgttctgcagaacgtgttcgagggagatttgggtgagcagagggaactgccctctctgcaacaatttaattttggaaattcttgatattttctgaacctggtaataattttcattaatctttcaatataacctttttaatctctatctatgaatttttctttttctttgggtttggggaagaaactatttccactattagattaggatcatgtggttatgatgaatttgtccgtgacctgtgataacgatttgttattaaccaaatggacttacta

SEQ ID NO: 244360 - DNA, 364 bp, Glycine max
ggcgcaggtagagagagcgagagaacaagaacataagggaaccacagcggcggtaacagaagaacaagcagagaatgggtcgagtgagaacgaagacggtgaagaaatcctctcggcaggtgatagagcgtcactactcgcgcatgaccctggacttccacacgaacaagaagcttctggaggaagtggcgataatcccgtcgaagaggctaaggaacaagatcgccggggtccccaacccacctgatgaagcgcatccagaagggccctgtgcgcggcatctccctcaagctccaggaggaagagcgcgagcgccgcatggacttcgtccccgacgtctccgccatcaacaccgaccacatcg

SEQ ID NO: 244361 - DNA, 332 bp, Glycine max
  unsure (1)..(332): unsure at all n locations
cggctcgaccaccctcagccagcttcgccaagcttccttacggctgcaaaaaaacaacaaaagggaacggcacaaagggaaaaaagaaaatggtgtccttgaagcttcaaaaccgcctcgccgctaacgtcctaaagtgcggcaagggcaaggtctggcttgatccaaatgaattcaatgaaatctccatggccaattctcgacaaaacataaggaagttggttaaggatgggtttattatcaggaagccgactaagattcactctcgctcncgtgctcgtcgaatgaaggatgccaagagaaatgggcgtcactctggttatggtaagcgt

SEQ ID NO: 244362 - DNA, 395 bp, Glycine max
ggatgccaattttctgaacacgcttttgaagagggtaagttcgagcaccggtactgtgctgtgctgcattacttgcatttcctctataatgggttgtttccactctaagtcggcgaggcagtttcctgcacaggagaatactgttaatcttgcggcagagacagcttttactgtcagtgaggttgaagcactgtttgagctttttaggagcatcagcagttctgttgtcgatgacggactgataagcaaggaagaattccaattggcaatcttcaaaaacaagaaaaaggataacctttttgcaaaccggatctttgatttatttgatgtcaagaagaagggagtcattgacttcgaagactttgttagatctctgaatgttttccacccaaatg

SEQ ID NO: 244363 - DNA, 366 bp, Glycine max
ggatatgatgagaaatggttgatcaacgtgcatgccattgacacaaggggcgtggaagataggttggggtgcattgagtgtacgtgtgacctttataatatcacaaaggatgcagatggtaaccctttgagtccagattataagggaggtttggattgttgccctgataataccacgtgcaggctaaacaaaggcttcaagggtccaaagagaaccttataccttaaatacacagtgaagtggttcagttgggacaactacgtggtgccccttaagatttatatacttgatgtgactgatgttttgaacgtgtccaaaggagggactccaaagcataattgcgacgttgagtatcaggttgaacct

SEQ ID NO: 244364 - DNA, 395 bp, Glycine max
ggagattgccggtggcttgacagagatttcagcagtttttgaatctgtcgatgagccggaggaggcgctgaagctgttgaacagggcaatgaagttgttggaggataagccagggcagcagagcactattgcggggattgaggcacgaatgggagtgatgtattacatgattgggaggtatgaggactcaaggaactcgtttgagagtgctgtggcgaaactcagggctagtggggagagaaagagtgccttctttggagttgttttgaaccagatggggttggcatgtgttcaactgttcaagattgatgaggctgctgagttgtttgaagaagctaggggaattcttgaacaggagtgtggcccatgtcatcaggatactcttggggtgtaca

SEQ ID NO: 244365 - DNA, 396 bp, Glycine max
ggaaactcagagagcagttctactgatgaagaatcttgcaagaaaccaagggaagaaatcatcaaagcaaaaatttcaagagtttatgtcaggactgaagcacctgatactagccttattgttaaagatgaataccaatggaggaaatatgggcaaaaggtgaccagagataacccttgtcctagagcatatttcaagtgctcttttgctcctagctgccctgtcaaaaagaaggtgcaaagaagtgtggatgatcaatctgttctggttgctacttatgaaggggagcacaatcatcctcagttttcttcccaggtggaagcaacatcaggttctggccgtagtgtgacccttggttcagtgccctgtaccgcatctctcagcacttcaacacca

SEQ ID NO: 244366 - DNA, 379 bp, Glycine max
cgggtacccagacttgagctacaccgagtcaaccaccaccgacaccttggtcatcggagtggcaccagttaaggctcaattcgacagtgctgaaatgggtgttccacgctgagaacgatggctgcaaatgtggaccaaactgctcctgcaacccctgcacttgcaactgaggtgttgggagatcaagcttcaagcacacatagcccttaattaggaataatgatatactactaatgtgtatctaaaaacttatgtattatgtctgtgattgttttcgtgcactctggtgttttgtgttaaacaaacatccttacaatacaatggtcatgtcttacctttcagccagttcaactatattggacttgatattggtgtctta

SEQ ID NO: 244367 - DNA, 306 bp, Glycine max
cgggacactcattccatttttacctttctctctcgctcgcaaacgcaaataataaaaaacaaggttttagccatggcatcgaagcggatcttgaaggaactcaaggatctccaaaaggatcctcctacctcatgcagcgccggtcctgttgctgaagacatgtttcactggcaagcaacaattatgggtcctcaacacagtctttaagctggacgtgttttcctagtcactattcatctccctccagattatccctttaagcaaccaaagtttcaatcaaggacaaaggtattcacccaaaatata

SEQ ID NO: 244368 - DNA, 417 bp, Glycine max
  unsure (1)..(417): unsure at all n locations
gcccgaccaagccttcattccggttgcaaaaaaacaacaaaagggaatcaaaacaaacctaaaaacaaacacacttatcctttctttcttgtcttaaaggtcaacaacatagttatagcacaaacttaattcaccatggtttttccaaaaccctcttctgagtctgacctctttctttgttccaactttgcttctcgctatgccagggactctcttcncaggttcagcatgccagangactccatgcctaangaagctgcgtaccaaaacattcacgatgagttgcagcttgatgcaattccaaagctgaacttggcttcttttgtgaccacttccatggaagaagagtgcaacaaactcatcatggaatccatcaacaaggactatgttgacatggacgagtatcctgccaacact

SEQ ID NO: 244369 - DNA, 376 bp, Glycine max
ggaagcatccgtttccgtctaagtgactttgtctacttgtgtcccccagaagccttaaagctcttctctgctttgaaaatggctgattggggcccggtggtgatcgcagtggtgctgttcgtgctgttaagcccggggcttctgtttcagatgccggccaggggaagggtagcagagtttgggaacatgcaaaccagcggggcctccattttggttcacgccatcatctactttggcctcatcactatcttcctcattgccattggcgttcacatctacactggctaactcctggatctggttcagtttcacccatctatgtttatctctgccttttaattagtctttttagctttacaataatttccttgtttga

SEQ ID NO: 244370 - DNA, 384 bp, Glycine max
  unsure (1)..(384): unsure at all n locations
gacagcagagaaagaagcttcacaattcacattcccaccaacggaaccatggcctccgtgtacagctgtacggagtgcggatccaacctgaatcttaactccgctcatgcctaccctccagacttctacttcgaagccggcaacaagggctccgtctccttctccgccgtggaccccaccaagttcaagttcgagaaggaggacaagcttcgccctttcttcgaaaccgtcaactactggggaatccagaggaagaggaccaagatcaagtgcaacacctgtgactgtctccttggctacgtctatgacgatggtccanctcttaccaatagtcccggtcaatttcacatgggtcctagccaagttatccccagagcgccaaga

SEQ ID NO: 244371 - DNA, 383 bp, Glycine max
gacggaatatcttcccaagggagatcatcgtgatttcttgaaaagaataggagctttgaaaccatcgacagctgtgagatttgcacttgatattgctaggggagtgggttatttgcatgaaaataagccatcacccattattcaccgtgatcttgagccttcgaatatattgcgggatgattctgggcacctaaaagttgcagactttggggttagcaagttgctggcagttaaagaagacaagcctctaacttgccacgatacttcctgccgctatgtggctcctgaagttttcagacaataatatgacactaaagtggatgtattttcatttgcactaattctgcaagagatgattgaccgctgctctcctttttctgcaa

SEQ ID NO: 244372 - DNA, 382 bp, Glycine max
  unsure (1)..(382): unsure at all n locations
ggttctagtgtgtgattgtttgttgttgtaactcgttcttcttcttttgttgttctgtgtttgtgtttgttttttctctcacctgaaaatgtcttgctgcggtggtaactgtggttgcggaagctcctgcaagtgcggcaacggctgcggaggctgcaagatgtacccagacttgggctacactgagtcaaccaccaccgagaccttggtcatgggagtggcacctgttaaggctcaatttgagggtgctgaaatgggtgtgcccgctgagaacgatggctgcaaatgtggaccaaactgctcctgcagcccctgcacttgcaagtgaagtgttgggagagcaagcttcaagcagagatagtccttaattangaataatgat

SEQ ID NO: 244373 - DNA, 311 bp, Glycine max
tcaacaccttaatttgcacacgctgcttcttcagcttgagaaatggcacaagaaacctttctattcacatctgaatctgtaaacgagggtcaccccgacaagctgtgcgaccagatctctgatgcagtgctcgatgcgtgccttgaacaggaccctgacagcaaggttgcctgtgagacatgcaccaagaccaacatggtcatggtctttggagagatcacaaccaaggccaacgtagactatgagaagattgtccgtgacacatgccgcgaaattgggatcatctctgatgatgttggtcttgatgctga

SEQ ID NO: 244374 - DNA, 398 bp, Glycine max
ggcgtaggcaaagagagagagagaaaagcgtgaatcatgtcggacgaagagcatcacttcgattctcaggcggatgcgggagcgtccaagacgtatcctcagcaggctggtaccattcgcaagaatggctacatcgtcatcaaatccaggccttgcaaggttgtagaggtctctacgtcaaagacaggcaagcatggacatgcaaagtgtcactttgttgcaattgatatttttaatgggaaaaagcttgaagatattgttccatcatcccacaactgtgatgttccacatgtgaatcgcactgactatcagcttattgatatctctgaagacggctttgtgagtctgttgactgataatggaaataccaaggatgatctgaagcttcctactgatga

SEQ ID NO: 244375 - DNA, 322 bp, Glycine max
  unsure (1)..(322): unsure at all n locations
ggcatcacaaactatatactaatctccatctaatagtgttaatttgtcgttctctatctctatcggtcatgggtgcttttgcttttgatgaggaaaactcctccaccgtggctccggcaacactctacaaagctctgacaaaagatgctgacactatcatcccaaagattattggggccatccaaactattgaaatcgttgaatgaaatggaggatccggatacgtcaataagataacagctagtgaatgtgatcaaaccagtttcgtgcntgcaaaagtggatgcaattgacgaagctaacttggtatacgactacagcat

SEQ ID NO: 244376 - DNA, 337 bp, Glycine max
gaaaaaaaaaatggtatgttgctgccatttttgaaaagattgaagattcccgaagtaatgcctaaacctaatgattcaaagaaaagctaaaagatcatggaacaagtaaataccattttcaaattgtctcatcaattctattatcaaaaattataaaaaataaattataaagaaacgaaacacgggcaagaaaggggagtagagaccactcaataaatgaaatagctactaaaggctttgttctctttttagttatttgataattatccaatttgagttatggagttataaatatgaggagtttttttttcaaaaagaaaatacgaaagaaaaatac

SEQ ID NO: 244377 - DNA, 314 bp, Glycine max
  unsure (1)..(314): unsure at all n locations
ggaagaccattttccatttgaacccttctggcaggtttgtcattggagggccgcatggcgatgctggtctcaccggccgcaagatcatcatcgacacctatggaggatggggtgcacatggtggtggtgccttctctgggaaggatcctaccaaggttgatangagtggtgcctacattgtgaggcaagctgcaaagagcattgttgcaaatggacttgctangagggcaattgtgcaagtttcctatgccattggtgtgcctgagcccttgtctgtgtttgttgacacttatggcactgggaagatccctgac

SEQ ID NO: 244378 - DNA, 339 bp, Glycine max
cattgatttgattgtacagcatatccgcacaaagcttggtcagcatgacctgtgtaaaatatatcctaatttgtatgtcattcagtcaacttttcagatacggggtatgcataccctgatacgtgatgccaagacaacatagcatgattttatattttactctgatcgtttgattcgattggttgtggaacatggtttggggcatctgccatttacagaaaagcaagtaatcactcccactggttctgtatacactggtgttgatttttgtaaaaggttgtgtggtgtctctgttatcagaagtggggagagtatggagaatgctttgagagcatgctg

SEQ ID NO: 244379 - DNA, 289 bp, Glycine max
cattgatttgattgtacagcatatccgcacaaagcttggtcagcatgacctgtgtaaaatatatcctaatttgtagtgtcattcagtcaacttttcagatacggggtatgcataccctgatacgtgatgctaagacagcattgcatgatttcacattttacccagatcgtttgattcgattggttgtggaacatggtttggggcatctgccatttacgggagtacagataatcactcacactggttctgtatacactggtgttgctctttgtaaaaagttgtgtggtgt

SEQ ID NO: 244380 - DNA, 353 bp, Glycine max
ggtcattgaagacattgattgcagtgtggatctgccagagcgtcggcatggggatcatggacgtaaacaagctgacgtgcagttgaccttgtctggattactgaacttcatagatgggctatggtctagttgtggagacgagagaatcatcatattcaccaccaaccacaaggagaggctagacccagcactgttgaggccaggaagaatggacatgcacattcacatgtcctattgctcctaccaaggcttcaagattttggcctcaaactacttagaaacttcctctgaccaccccctctttggagaggtagaggggctaatagaggacatacagataacccctgcgcaag

SEQ ID NO: 244381 - DNA, 366 bp, Glycine max
gggggaggagagcttaaaaaaacaagataacaaataaagtataagtgcggggggtcaaactgggtgtatataatcggatcactataagacaactctttcttttgaggtttcaaagaatgattttcgaattcgattgaatctaaaacacaaaagaattggtttacaggatagaagaaacccacgtatatgtgataggatattctatatgaactagttatatatgaactaaccatatccatatatattatataaaataactaatattttatatctaaaattgccccgctactactgtaaatttcgatagggattaaaaaacaaagcctttccgtttcatctcgaattgtgaattgataatcaatgaac

SEQ ID NO: 244382 - DNA, 310 bp, Glycine max
gggacaagatttggaaggcctaagtatcagagagctttagaatttggagcatcagcttgaaagtgctctcatacacattatatgactgaagaagcaactgatcgtggaatcgatttcagagcttcataaaaaggataaagccctacaggaacagcacaacactctcgctaagaagatatatgatatatagaaagcactagtccaacaagcacaactggagcgactctggtgatgaactggatctgacttcctctgcccttgttccccaaacactggtgacatcacacattacaacctcctcacatgtcat

SEQ ID NO: 244383 - DNA, 193 bp, Glycine max
ggcagttcaattccaatatattccattctctctgtgtatttccctacctctcccttcaagatgcagatcttcgtcaagaccctcaccggcaagaccatcacccttgaggtggaaagctctgacaccatcgacaaagtcaaggccaagatccatgacaaggaacgaatccccccggaccagcaaagtcccattt

SEQ ID NO: 244384 - DNA, 369 bp, Glycine max
ctccaactactggcagggttcctttgatgctcttcctcctgaatggatagatcagtttgagtcaggcattcagacaatcgctgtgattcaagctgggcatggccttctgcaacttggttcttgcaagattatccctgaagacctccattttgtgctaagaatgaggcacacttttgaatctctaggctatcaatcagggttctacctctcccaactcttctcttcaacaaggagcacatcctcttccacttccattccttcaaaaccatccaccattccaattaggccaccccctccactcctcaactggggtcagaggccacttgaatcttccgcttctatgctatcctctcctagctttcaacatgc

SEQ ID NO: 244385 - DNA, 362 bp, Glycine max
ggagcatacgtggtggtgacagattatggcgagggagacagaacagacttcataatgagtccacgtgcctactcaagattgggaagtaacgcagatgcatctgcagaactattcaaatacggtgtagtggatgtagaatacagaagggtcccctgtagatacggtggctataacctcttggttaaggttcatgaacagagcagaaaccctcactacttagccattgtcattctctatcttggtggaacctacgacgtaactgctgttgagttgtggcaggaagattgccaagagtggaggcgaatgcgcagggcatttgggacggtgtttgatgctgagaaccgccacggggcgacataaag

SEQ ID NO: 244386 - DNA, 207 bp, Glycine max
gaagcgcggcgggatcagcacaagattgcaaaatgaagttcaacattgcaaatcccaccactgggtgccagaagaagctggaaatcgatgacgacctgaagcttcgagcattttgggacaagaggatctcccaggaggttcttggtgatgctctgggtgaggagtttaaaggatatgttttcaaaatcaccggtgggtgtgacaaac

SEQ ID NO: 244387 - DNA, 380 bp, Glycine max
gttcctcaacgggcatatacatgtttgggaaccctaagggatcaaattatatatcccctttcctgtgaggaagcagaggttaaagtactgaagatgtatggaaaagatgaaaagcatgctgacagtagaaatttgtgagacacacggttaaaagctatcctaaatagtgttcggttgaattatcttctacaaagggatggaagcaactgggatgcgaatttaaaatgggaagacattctttctcttggagaacagcaaagattggggatggcacgcttgttctttcataagcccaaatttggtattcttgacgagtgcagcaatgcaactagtgttgatgttgaagaacacctatatgggcttgcaaaagatatgggaat

SEQ ID NO: 244388 - DNA, 375 bp, Glycine max
gtccaatcagtgacaatgctggaggtattgctgaaatggctggtatgagtcacagaattagagagagaactgatgcccttgatgctgccggaaacacgactgccgctattgggaagggatttgccattggttctgctgcccttgtatcactggccctctttggtgcctttgtgggccgagctgctattacaactgttgatgtgttgactccaaaggttttcattggtttgattgtgggtgcaatgcttccttactggttttctgctatgactatgaagagtgtgggaagtgctgctctgaagatggttgaagaagtacgcaggcaattcaacaccattccaaggttgatggagggaactgctaagcctgactatg

SEQ ID NO: 244389 - DNA, 308 bp, Glycine max
gttcaaataaaattcaagtatcgaagaagaagatggctttaggtgttcctgctcttccgttgacatacgtggctcacgttctggcagttgttgccagcgtcttggtcgtggtctgggtcgtcaatttcaggggtggcttggcttgggattctgataacaagtccctcatcttcaacattcatccagttcttattgttattggcttactagttcatgggggtgaagctattataagttacaaagcttttcccctaaagaaggaagtgaagaaattgatacaccttgttttccatgccatcgcattaata

SEQ ID NO: 244390 - DNA, 286 bp, Glycine max
agttcaagaaatatttgcatcataacagcaggtggagccatatctaatgtgagacttcgacaacctgcctcatctggtggaactgtgacttatgaggggcgatttgagatcctatcacttggaggttctttttttcttgctggaactgaaagagctggggggctgactgtgtccttgtcagggccagatggccgtgtgttgggcggcggagttgcacgtcttctgatagctgcttcccctgttcagaatgttttggcgagctgtgtttctgatgttcgcaagcact

SEQ ID NO: 244391 - DNA, 390 bp, Glycine max
  unsure (1)..(390): unsure at all n locations
gactacaaatcagttttctacttgaatcttcgttatccttctttttttctccttgaactcgaatattcactatggcagatgaggtggttctgctagatttctggccaagtccatttgggatgagggtcaggattgcacttgctgaaaagggtatcaaatatgagtccaaagaagaggacttgcagaacaagagccctttgctcctcaaaatgaacccggttcacaagaaaatcccggttctcatccacaatggcaaacccatttgtgaatctctcgttgctgttcagtacattgaggaggtctggaatgacagaaatcccttgttgccttctgaccctttacagagagctcaggctanattctgggctgactttgttgacaataagatat

SEQ ID NO: 244392 - DNA, 340 bp, Glycine max
gagcaaatccgcgaaatgcattacctgaacgcggcgattcacgacagcatgaggctgttcccaccgattcagttcgattcgaagttcgccacggaggatgacgtgttgccagatggcactttcgtgagaaagggcagtagggtaacttaccacccttacgcgatgggccgaatggaaaatatttgggggcccgattgtcttgacttcaggcccgaaagggggctgcgtgatggggtgttcgtgccagagtgtccctttaagtaccctgtttttcaggctggtgtaagggtgtgtttggggaaggacttggctttgatggagatgaagtccgttgtggttg

SEQ ID NO: 244393 - DNA, 325 bp, Glycine max
cagttgatgaggcaaacttgggatacagctatagcgtagttggtggagttgggttgccagacacagtggagaagatcacattcgaatgcaaattggctgctggcgccaacggagggtctgctgggaagctaactgtcaaataccaaaccaaaggagatgctcagcccaacccagacgacctcaaaattggcaaagtcaagtctgatgctcttttcaaggccgttgaggcctaccttttggccaatcctcattacaactgatccaattcgatcttcagtattcagtgatctgcaaagaccttgttttatattatatacaagagttt

SEQ ID NO: 244394 - DNA, 328 bp, Glycine max
gacagacaaacaaacaatttaccagctatacttgttccttttgaaggttagaagtgctacaatacaaacaatggcagctactcaggaagatgtgaagcttttgggtattgtgggaagcccatttgtgtgcagggtccagattgcccttaagttgaagggagttgaatacaaatttttggaagaaaatttgggcaacaagagtgatttgcttctcaaatacaaccctgttcacaagaaggttccagtgtttgttcacaatgagaagcccatagcagagtctcttgtgattgttgaatacattgatgagacatggaagaacaaccccatc

SEQ ID NO: 244395 - DNA, 383 bp, Glycine max
  unsure (1)..(383): unsure at all n locations
gagactcaacaagcattccactcacacctcatcgtttctctctctagatctctgtttcttctttttctccaaccttcgttttaccaccacacttacattactttgtcgaaatggctccaccaattgagaccccaaacaaggtttccagctatcaacagtccccaaaccctcgtcttaacgagaggattctttcatccatttccgggagacacgttgctgcacacccgtggcacgatcttgagatanngaccgaagctccaaagatcttcaactgtgtggtcganatanggaaaggaagcaaggtgaaatatgaacttgacaaaagaactggacttattatggttgatcgtatactttactcatcagttgtttatcctcacaac

SEQ ID NO: 244396 - DNA, 391 bp, Glycine max
ggtggtagtgtggcagcgacacgtatcaacttcaataatcgcatcgcagaagcagtttccggtgcatctcatcgtctccgaaaatgaacgacgcagatgtctcgaagcaaatccagcagatggtgcggttcatccgccaggaagctgaggaaaaggccaacgagatctctgtctccgccgaagaggaattcaatatcgagaagctgcagttggtcgaagccgacaagaagaagatcaggcaagaatacgaacgcaaagagcgccaagttgaaattcgcaagaagattgagtactcaatgcagctgaatgcttctcggattaaagttcttcaagctcaagatgacgtgatcagttccatgaaagaagctgcatccaaaggaacttttgactg

SEQ ID NO: 244397 - DNA, 393 bp, Glycine max
  unsure (1)..(393): unsure at all n locations
nagggacagacaaacaaacaatttaccagctatacttgttccttttgaaagttagaagtgctacaatacaaacaatggcagctactcaggaagatgtgaagcttttgggtattgtgggaagcccatttgtgtgcaaggtccagattgcccttaagttgaagggagttgaatacaaatttttggaagaaaatttgggcaacaagagtgatttgcttctcaaatacaaccctgttcacaagaaggttccagtgtttgttcacaatgagcagcccatagcagagtctcttgtgattgttgaatacattgatgagacatggaagaacaaccccatcttaccttctgatccttaccaaagagccttggctcgtttctggtccaaattcattgatgata

SEQ ID NO: 244398 - DNA, 321 bp, Glycine max
ggttgtagggcctcttttgcaagcagagcttaacactagtgctgctagtattttcaacctaataaatggttcagaaactttttcagatgatacatatggatggatcaatgtcaaagatgttgcaaactcccatatgtcaggcagatgagattgcttcagctagtggaagatatcgtttagttgacagagtggcacactacgctgaactcgccaggattttacgtggacagtacacgacatatcagattccacacaagtctgcacaccatatgccttatgtcccagcattgcaagtttccatagaaatggcattgaccttgg

SEQ ID NO: 244399 - DNA, 360 bp, Glycine max
gagtgaagatgagaagaagaagcaagaagagttgaaggagaagtttgacaacctctgcaaggtgatcaaggatgttttgggtgacaaggttgagaaggttgtggtctctgaccgcgttgtagattcaccatgctgtcttgcgactggcgaatacggttggaccgcaaacatggaaaggataatgaaggcccaagctctaagggacaacagcatggcagggtacatgtcaagcaagaagaccatggagatcaaccctgagaacccaatcatggaggagctcaggaagcgtgctgatgcagacaagaatgacaaatccgtgaaggaccttgttctgttgctgtttgagactgctcttctcac

SEQ ID NO: 244400 - DNA, 336 bp, Glycine max
gatatcagaagcgcagacctaggatttcggccgtttgctccccaaggaaagaagcagagtgtttcttttgaaatcagctagaaaagatgtcaggtgaagaggtagctgttgcagctgaggcacctgctgcttcaattccaggtgagccaatggacatcatgactgctctacagcttgtgctgagaaaatctctggcctatggtggtcttgcacgaggtcttcatgaaggtgctaaggtgatcgagaagcatgctgcacagctctgcgttctagcagaagattgtgaccaacctgattatgtgaaactggtgaaggctctttgtgcagagcacaatg

SEQ ID NO: 244401 - DNA, 333 bp, Glycine max
cactggtgaggctttggccacccttgttgtgaataagctacgtggtatccttaacgttgctgccatcaaagctcctggctttggtgagcggcgaaaggccctgcttcaagacattgctatattgactggtgctgagttccaagctagtgatctgggtctgcttgttgaaaacacctcagtggagcagcttggcttggctcggaaaattaccatctccaaggattctaccactatcattgctgatgctgcaacaaaggatgagctgcaagccaaggttgctcagtttaagaaggagctgtcacagacagactcagtatatgatactgagaaaac

SEQ ID NO: 244402 - DNA, 347 bp, Glycine max
gagtcaaaactttcatcgttgtcatccacttaacccaggtgtaaaaatgtcagcagtgaccatgtccactatgagacttccaagagcttccttgtctggaacaacaccagctaggagatcatgtgctcttacaaagagtccatcatctttgaggtctgtgaagaatgtgtccaaagtgtttggattgaaatcatcttcctttagagtgtcagcaatggcggtatataaagtgaagctgattggaccggacggtgaagagaatgaatttgaagcacctgatgacacttacattctggattcggctgaacatgctggagtggagctaccttactcatgcagagctggtg

SEQ ID NO: 244403 - DNA, 381 bp, Glycine max
gatgaataagatcttcagattttgttacagtttttcaaattattctgtggcaaggagagaagaaaagatcatagaaagtggtgattcttcgaatattgaagagagaaatatggggttgagattgaaggagacattctacttgtcccatggagcaccaactcttgccgtagatgattcaatccctgcgtggaacttcttcaattcgtggaaggagcagtttccgacgagaccctcttccattcttattatctccgcccactgggacacccatgttcccaccgtcaacgtcgttcaccagaatgataccatctacgacttctatggcttccccaaatccatgtacaagctgaagtatccagcaacaaggggctcacacttagc

SEQ ID NO: 244404 - DNA, 316 bp, Glycine max
gaagttgatgggtatcagcctcatcttatagctccagaacaaggatatcgtcgtctaattgaatcttctctaataactattacgggccctgctgatgcagctgttgatgcggttcactcgctgttaaaggacttggttcacaaagctatcagtgagactttggacttgaagcagtatcctggtctccgggttgaggttggggctgctgctgttgaatcactataaagaatgatggatgaaagcaaaagatcaacactgcagctagttgatatggagtgtggctatctgactgttgatttctttcggaagcttcctc

SEQ ID NO: 244405 - DNA, 322 bp, Glycine max
aggaggaaacggcaggatatggttgggtcgggcatggagaccttactctcgtgttgtttttgccttctcaataatgtcagatatcattgcccctgaaggttggaatgatttcaacgacccttcaagagatcagactatcttctacggagaatacaattgcttggggcctggggctaatacgaacttcagggcaccttatgtacagaaattaaatgaaacacaagctttggcattcctcaacacaagttttattgatggcgaccaatggttggaaacttccaaataagcttagcttcgcatacctgaatccatttcctatttg

SEQ ID NO: 244406 - DNA, 351 bp, Glycine max
gggatgacgtatgaagaaatcaagaagaacatgccagaggagtatgaatcccgcaataaggacaaacttaggtatcgttatcctcgtggagagtcttacttagatgttattcaaaggttagaacctgtaattattgaacttgagcgacaacgagcacctgttgttgtgatatctcaccaggcagttttgagggcattatatgcttattttactgacaggcctttgaaagaaattgcagatattgagatgcccctccatacgataatagaaatacaattgggagttacaggtgtcgaagagaaaagatacaaactaatggactgaaatgaataactgaaggagagaagaaac

SEQ ID NO: 244407 - DNA, 355 bp, Glycine max
gggcaacaacgctggtgaagactacggaggtggaacagacttggatgactttgtggcttttatcaatgataaatctggagcaggtccatatggaaaaggacaacttactttccatgctggtatcgtagaaagcttggatgtcttggtaaacgaatttgtacctgccagcgatgaagagaagaaatccgtgtttacacgattggaagatgaacttgtgaagcttaagggttccgcctcaatgtactggaagatttacttgaaagctgccaagaattacatggaacaaagttctgattatgctaacaacgagactcagcgcctacagcgcattcttgataagtcgattatccctgcg

SEQ ID NO: 244408 - DNA, 391 bp, Glycine max
gacagcaacaaacatcttcacaaactagtaatattattcttcgaatccattttattattcataatgggtattttcacatttgaggatgaaaccacctcccctgtggctcctgctaccctttacaaagctctagttacagatgccgacaacgtcatcccaaaggctgtcgaagccttcaggagtgttgaaaaccttgaggggaacggtggccctggaaccatcaagaagatcgctttcgttgaggatggagaaagcaagtttgtgttgcacaaaatagaatcagttgatgaggcaaacttgggatacagctatagcgtagttggcggagttgggttgccagacacagtggagaagatcacattcgaatgcaaattggctgctggcgccaacg

SEQ ID NO: 244409 - DNA, 381 bp, Glycine max
  unsure (1)..(381): unsure at all n locations
ggaggagttcaggaaggtattcaacaaagaacatcctgaaaacaaagcagtgactgctgtgggcaaagctgctggagcaaaatggaagaccatgtctgatgctgaaaaagcaccttatgtggtaaagtctgagaaaaggaaagtggagtacgagaagaacatgagagcctataacaagaaacaggcggaaggtcctactggtggggatgaagaagaatctgagaagtctgtatctgaggtgaatgatgaagatgatgatgangaaggcagtggcgaagaagaggatgacgattagagaatggactgataattgcatttatgtaggttctgatgattttgatcatctgttgtaggtggtctggtcatttcctgataaacata

SEQ ID NO: 244410 - DNA, 300 bp, Glycine max
ggattgggtttggttctcagtgtacccaaaaacagaggcaaagctgttgtttattattcgcattcgtggtattaatgccatggaccccaaatcaaggaagatcctgcagttgttgcgattgagacagattttcaatggtgtatttctcaaagttaacaaagccacagtgaacatgctgcacagagttgagccgtatgtgacttatggatacccaaatctcaagagtgtgagagaacttatttacaagagaaggtatggaaagctaatgaagcagaggactgctctaactgacaactctat

SEQ ID NO: 244411 - DNA, 212 bp, Glycine max
  unsure (1)..(212): unsure at all n locations
ggaacaaaacaagtgtttccaatagattatcctaagtccttgggaatagtgctgcaatggcttcaaatcaaggagaggttgaccctttgggagccactggaagcccatttgtgtgcaaggttcatattgccctcaagttgaanggagttcaatacgaatatgtcgaagaaaatttgaggaacaagagtgaactgcttctcaaatccaaccca

SEQ ID NO: 244412 - DNA, 325 bp, Glycine max
  unsure (1)..(325): unsure at all n locations
gtacggcctgatcgagacccacaagttgaacggccaattcagatggatttcatcgcagatgaaccgtgtgaggaatggagagctctaccgcgtgatctgcgacaccaggggtgctttcgtgcagcctgctgtatacgaggcttttggtttgacagtggttgaggccatgacttgcggcttgccaacattcgccacatgcaatggtggtcctgctgagatcattgtgcacggcaagtctggcttccacattgacccttaccatggtgaccgtgctgctgatctccttgttgacttctttgagaagtgcangcttganccaactcac

SEQ ID NO: 244413 - DNA, 344 bp, Glycine max
  unsure (1)..(344): unsure at all n locations
gattgaccgaacaaagactatggctgatgtctacggtgctttttttgattttgcttctatgttggagcccaaggttgacaaaaacggtcccaatgcaacaaaaacattgagcaggctggaagctatacagaaaacttgcagagaatctggtctcttaagtaaaaggaaatcttacattgtgaatgatgaaagtggatatggctcaaccatgattgtcatattggtcatcatggtttccatcatttttgcttatctgtctgctaaccaccataatagctagtgtaagttctgttgttaattttaatgtacggttganattgtaagaacaattatccttatctata

SEQ ID NO: 244414 - DNA, 325 bp, Glycine max
  unsure (1)..(325): unsure at all n locations
tacgccaatcctttttccacaataatccaaataattttgctgatgtangaggtggtgtcctaggctgtagaggattccactcaagctttagaactacacagagtggcctgtctcttaacatagatgtgtcaactacaatgataatttctcctgggcctgtggtggatttcttaatttccaatcaaaatgtgagagatccttttcaacttgactgggctaaaggccaaaaggacctaaaaaatctgaggattaannactagccatccaatcaagaattcanaatttctgggctcagtgaactcccatgcagagagcagacttttac

SEQ ID NO: 244415 - DNA, 383 bp, Glycine max
  unsure (1)..(383): unsure at all n locations
gtccaaccaagcctccgtaacggtgccaaaagaccacaaaaagggggacaaaaccctaaaaaacccaaagccttgaaaagcagaaaaaaaccaaacaatggggcgaagacccgcgaggtgttatangcaaattaagaacaaaccataccccaagtcacggttttgccgtggtgttcctgatcccaagatcaagatttacgatgttggtatgaagaagaaaggtgttgatgagtttcctttctgtgttcatctggttagttgggagaaggaaaacgtttctagtgaggccctggaagctgctcgtattgcttgcaacaagtacatggccaaatttgctggaaaggatgctttccacttgagagtcanggtgcacccattccatg

SEQ ID NO: 244416 - DNA, 384 bp, Glycine max
ggagtacgagtacattgaagaagatatctttaacaagagcagtctccttctggagttgaatccggttcacaagaaggttccggttcttgttcatgcccagaaacccatcgctgagtcattcatcatccttgaatacattgatgaaacatggaagaagtatccattgttacctcacaatccttatcaaagagcacttgctcgattttgggcaacctgtgttgaacaaaagcttgggaaggctggatgggtagcaatgtctaccagcggcgatgaacaagaagaggctatgaaagaagccaaagaaatgatggagaaaatagaagaagagattaaggcacacgaattttttggacgagaacatattgggtaccttgatattgcaat

SEQ ID NO: 244417 - DNA, 297 bp, Glycine max
ggtagtagaattgcagtgaaattggagagaaaaaaaaaaaatacactcaaacatggagggctatgagatcctcaaagatattggttctggaaattttgctgtggccaagcttgttagagacaactgcaccaatgagctttttgctgtcaagtttattgagagaggccagaagattgacgagcatgtccagagggaaatcatgaaccacagatcattgaaacaccccaatattattagattcaaagaggttctgttgacaccaactcatttagccatagtaatggagtatgcttctgg

SEQ ID NO: 244418 - DNA, 352 bp, Glycine max
gaaggtgaaaggtaatgttttcaagaacaagagagtcttgatggagagcattcacaagtccaaggctgagaaggcaagagagaagactttgtctgatcagtttgaggctaagcgtgcaaagaacaaggctagcagggaaaggaaacttgctcggagggaggagcgcttagcccaaggtcctattgacaagacatctactgcacccagtgccccagctgccacagcaccccagtctacccaagcgccaaagaaattcaagaagtgagtagcatatcctggaattcaaaggacgtggagtctttaatagctctggcaaaatctttagtctgctaaagtagttgtgtcgaatctc

SEQ ID NO: 244419 - DNA, 355 bp, Glycine max
gataccaatcttggaattcctttcggttctgtgctcaatgatgctgttcgtataagctacgccgcacacctgatgcttgtatttccagttgtcttctttccattgcgtctcaacatagatggcctcctcttctctaaatcaaggcctctggttctggataacttcagatttgcatcactcactattgcccttattggtgttatcttcctgagagcaaatttcatacctagcatttgggatgctttccagtttactggagcaactgccgcagtctgtataggattcatttttccagctgccatcactcttacggaccgctacaacattgcaactaaatcagacaagattttgtgtg

SEQ ID NO: 244420 - DNA, 378 bp, Glycine max
gaacaaaacaagagaagggtccaattttttgaaaattattaccatcattcatattcatcaacgacccctcttctgtgcccacttccaaatcttctcctctcgctatgggttgcggctcctcccttccagataggggctcaaggcagttgggtcgacccaattcagagaatggtggagggcaggacgccaagaatctgagggtcaagcttgttctcttaggtgattctggtgttggtaaaagctgtattgttctacgatttgttcgtggtcagtttgatccaacatctaaggtaactgttggagcttcttttttgtcgcaaacaatagctctgcaagactctacaacagtcaagtttgaaatatgggatactgctggtc

SEQ ID NO: 244421 - DNA, 387 bp, Glycine max
  unsure (1)..(387): unsure at all n locations
gaaggcaccagtaattaataacaagctagctattagttcgattttgtagtaagtgaggtgccaatatggtgaagatagctcttggtactttggatgactcttttagcgctgcctctcttaaggcttatttcgcagagttccacgcaactctgattttcgtgttcgctggtgttggatcagccatcgcttacaacgagcttacaaaagatgcagccttggatccaacggggctggtggcagtagctgtggcacatgcatttgcactgtttgtangtgtctccgtcgccgccaacatctcaagtggccatttgaacccagctgtcacttttggattggccattggaggcaacatcactctcatcactggtttcttatactggattgccc

SEQ ID NO: 244422 - DNA, 382 bp, Glycine max
  unsure (1)..(382): unsure at all n locations
ggaacaaaacaagtgtttcgaatagattatcctaagtctttgggaatagtgctgcaatggcttcaagtcaggaggaggtgacccttttgggagctactggaagcccatttgtgtgcagggttcatattgccctcaagttgaagggagttcaatacaaatatgtcgaagaaaatttgaggaacaagagtgaactgcttctcaaatccaacccagttcacaagaaggttccagtgtttattcacaatgagaagcccatagcagagtctcttgtgattgttgaatacattgatgagacatggaagaacaaccccatcttgccttctgatccttaccanagagccttggctcgtttctgggtcaaatttcattacgataaggtttt

SEQ ID NO: 244423 - DNA, 328 bp, Glycine max
gcaaatttcccgatcgccgttggggatctccggccaaccgatttcagttggtgagtcataggttcagtatatggttaagggtttttggattagtgtgttgatgtacacaggtggaagagggaggttctgtttgcttcccctgctcctgttctgttttcctctgttttttggtcagagaatatttaggcatttagctatattctccactttttttcttttttctttttgttgtatataataataataatagtgttattggatatatcatatgtgttttatttttttatttttttgtttggttagctttagttttctggtttgatatgtt

SEQ ID NO: 244424 - DNA, 354 bp, Glycine max
  unsure (1)..(354): unsure at all n locations
gctcatcgagtctcatatttttcatacaacacattctttctagacacgcaacacctagaagatttccttattctttttggtgctaaaccgttgggatatagcaacaacatgttaggaatgaagagacatagagataatgaagggtcagagagcttagatttggcaaaatgtcttgtgctgttctcttgtccaatagaaagcaacaaggcacaacagaaaagttttggggctgtggaatttgagtgcaagacgtgcagccgcaagttctcntcctttcaagcactgggaaggcacanggcaagccacaagaggcagaagctannaggggaagaactcaaagaacaagccaaaact

SEQ ID NO: 244425 - DNA, 349 bp, Glycine max
gactcacaaaacaatataacttaattgccttaaggaacgttcgagaccacagaggtttctctagtcttctcctgtggagagcttgttttctcttgttcattcatctcacttccaattaaggaacaagctttccaccaatttgaatcaccaatggctcgctctttctccaacctcaaggttctctctgctcttgtcgccgacggattctccaacactctcaccatgcgtgggtacgcagtagcgacacaaagcgcaacaagaggaggagcagcctccatcagcggcaagtcaggggaagacaaggtactgggaagacgtgctgaaaacgtttcgtgggttccagaccctg

SEQ ID NO: 244426 - DNA, 444 bp, Glycine max
  unsure (1)..(444): unsure at all n locations
taccggtctacgaattcncgggtccgaccacgcgtcaagtacggcggcaaaaaaacaacaaaaggggcagatttgaaaaaaaggaatggggcaaaggtaattggttcagaaatagacaaggaaagaattcctggtattgatatctatttgagtgatggtgataactggatgttcgcaggccatgaagtgcatatattggccacacctggtcacaccgaaggtcatgtaagcttctactttccaggttctggggcaatttttactggagacaccttgttcagcttatcatgtggcaagctcttagaaggaacccccgaacagatgctatcttctcttaaaaggatcatgtctttgccagatgatacaagtatttactgtgggcatgaatataccttgaacaattcaaagtttgccttgtctatagaacctgaaaacaaggaactc

SEQ ID NO: 244427 - DNA, 378 bp, Glycine max
ggaagtttgaaagacaaatacaccatggcagatatcctgagtgaagaacagattgttgattttaaagaggcctttggcttgtttgacaaagatggggatggttgcattactgtggaagaacttgccactgttattcggtcgttggattagaaccccaccgaagaagagctccaagatatgataagcgaagtggatgcagatggcaacggaaccattgaattcgatgagttcttgagcttgatggccaagaaagtgaaagacaccgatgcagaggaagagctcaaagaggctttcaaggtttttgacaaagatcaaaatggctacatatcagctagtgagttgagacacgtaatgatcaatctaggagaaaaactaacc

SEQ ID NO: 244428 - DNA, 353 bp, Glycine max
ggaatcgagattcatggagcacatgggtatctcattgatcaattcttgaaggatgcaatcaatgatagaacagatgaatatggtggattactagaaaaccggtgcaggttcttaacgcaggtggttgaagctattgtctctgcaattggagcggaaagagttggtctcagaatttcaccagcaattgatttcagtgatggctttgactctgacccacttgggctaggcttagcagtgattgagagactcaacaatttgcaaaaacaagtgagcacaaaactcgcctatcttcatgttactcagcctcggttcacactcttggcgcaaaacgggtcagtgagtgaaaaggaaga

SEQ ID NO: 244429 - DNA, 315 bp, Glycine max
ggagtgtgtgagagagagagcgagcagtttcagacacagagagaggggtttgggattggagggattgacgctgcgtctcttcctcttctctttcgatccatccctcattcctaatcctccaatccaaccacctcagcctcacgctcacatatacacatatctgaacgcgtatcgtccctcctatagcttcaaagcgcatcctcaaggagctcaaggacttgcagaaagacccaccaacttcttgcaccgctggtcaattacctgaggacatgttccattggcaagcaacattaatggtcctggctgatagtcctt

SEQ ID NO: 244430 - DNA, 374 bp, Glycine max
gaagctaacgggaaatcacctacaaggttcgcgtccaattttgacattttcagcaaattttgaaaaagatgcacattggaaactattaaaggagattttgttacagatatttgaaacaccaaaggaccacagaaaggccaagcctttccatgatcacgtttttgttttctcaatagttgatgaccatatatggttccggaattatcagatctctgctcatcataatgagtcggacaaattacctagaggtggccttgataaaatgacattgattgaggttggtccgcgattctgcttgaacccaattaaaatatttggtggcagttttggaggcccaactttatatgagaatccgctctatgtgtcaccaaatc

SEQ ID NO: 244431 - DNA, 506 bp, Glycine max
  unsure (1)..(506): unsure at all n locations
agatgtgcgttacagtcaacgtaagccgtcaggtagcggtctagaattcacgggctcgaccacgcgtccattacggtggcaaaagaacacaaaaaggggggcctggctcctgccttaagggaattcaaggccaaaatgaatccaatcccccaaagaaatgttcaaggaacaacaatccaaaatcttttggacatatttcccaatgtcaaaacaatgttcattgctataccatcgtttgctttgttatactcaatggatgatattgtagtggattcagccattactatcaaagctattggacatcaatggtattggacttatgagtattcagactataacaactctgatgaacaatcacttgcttttgatagttatatgattccagaagatgatctagaattagggcaattacgtttactagaagtggacaantaaatggtagtgccagctaaaaatcatctgcgtgttaataaaacatcagctgatgtacttcataattgggcagt

SEQ ID NO: 244432 - DNA, 396 bp, Glycine max
gaagatgagaagaagaagcaaggggagttgaaggagaagtttgacaacctatgcaaggtgatcaaggatgttttgggtgacaaggttgagaaggttgtagtctctgaccgtgttgttgattcgccatgctgactggtgactggagaatacggttggactgcaaacatggaaaggatcatgaaagctcaagccctaagggacaacagcatggcaggatacatgtcaagcaagaagacaatggagatcaaccctgagaacccaattatggaggagctcaagaagcgtgcggatgctgacaagaacgacaaatccgtgaaggaccttgttctgttgctgttcgagactgctcttctcacttctggtttcagccttgacgaacccaacacttttgggaac

SEQ ID NO: 244433 - DNA, 351 bp, Glycine max
gatataaaatatttctggtaaataaaaattgatagacagttttggttccgcatataaagcttctctggcgcttgggcttagcataacccttacctttggtatagagaagaagaatagagagtgatggagtgcgtattcggattggtgggtaatggattcgcgatcgtggtggctgattcatcggcggtgcacagcatcctcgtccacaagtccaacgaggacaagatcatgcttctcgattcccacaaactcatcgccgctagcggcgagcccggagacagggttcaattcactgagtacattcagaaaaacgtcgccttgtatcagttccgttacggcatccctctcaac

SEQ ID NO: 244434 - DNA, 371 bp, Glycine max
ggaagttgaaggggaaagagagaaaagaactagctagctggagtctgagaactctagcatgtactagtactactcctacattcctccatcttcctttgtactattttttttttaaccataaaagcaagagcacaaagatggtgagagctccttgttgtgaaaagatgggtttgaagaagggtccttgggctcccgaggaagatcaaatcctcacatcttacattgacaaacatggtcatggcaattggcgtgccctcccaaagcaagcaggcttgttaaggtgtgggaaaagctgtagactccgctggattaactatttgaggcctgatattaaaagagggaatttcacaattgaagaagaagaaactatc

SEQ ID NO: 244435 - DNA, 318 bp, Glycine max
  unsure (1)..(318): unsure at all n locations
gaagctagcagccaagtaatattcaatanaaatatggaactgacgaggctcatttcggttctcttcttcttgctagtgatcacggtgggatcttctgcttctccacagcattggagaaaaaaaagggttcgcgagccgtgcaagaagttggtgttttatttccacgacataatttacaacggccacaattccaagaatgccacttccgcaattgttggaacacccgcatggggaaacaggaccatactagcggggcagaaccacttcggtgacttggttgtgttcgatgaccccatcaccttggacaacaacttgcac

SEQ ID NO: 244436 - DNA, 378 bp, Glycine max
ggagcgaagaagatattagggtttttgagtgcggtgcggcgatcctagcactctcttctgcagctttcgccgacagcttcattcaccatggctgagcaaaccgagaaggcttttttgaaacaaccaaaagtgtttctcagctcgaagaaaactgggaagggaaagagacccggaaagggtgggaaccgcttttggaaatccattgggcttggatttaagactcccagggaagccatcgaaggaacctacattgacaagaagtgccccttcactggcaatgtttccatccgtggccgtatcttggctggaacatgtcacagtgctaagatgaacaggactattattgttaggaggaattatctccattttatcaagaag

SEQ ID NO: 244437 - DNA, 414 bp, Glycine max
gacaacttcattagcaaaacaaaagccataggttactactcttcgccttttcctttgcaattgttaccaaacaattcttgcttagcccttacaagcaagcattaacaacaatgaagaaagtagtgttaaaggtgggcttacatgatgatagaatcaagcgaaaagttatgagaacagcatctggtctttcaggggttgaatcagtttctattgacatgaaagacgagaaaatgaccttattagggaacattgatccagtgaatgcagtgtgcaagctacgaaagtgttgtcaaactgaaatagttacagttggtccagcaaaagaggataaggagaaagagaaggtggagccagtaaaagaacctgctcctctcaaactctatgatgcctatccctattattatcaaatgacac

SEQ ID NO: 244438 - DNA, 216 bp, Glycine max
gagagaaagagagagaaagatgtcgaagcgtggtcgtggtggttcggcggggaacaagttccgcatgtcgctgggtcttccagtggcggcgacggtgaactgcgccgacaacacgggggcgaagaacctctacatcatttcggtgaaagggatcaaaagccgtttgaaccgtcttccctcggcctgcgttggcgacatggtgatggccaccgtgaa

SEQ ID NO: 244439 - DNA, 374 bp, Glycine max
agagacgacagaagggggtgaactcaaggacgagctcttctgcatccgttttccttctattgaaaattgcaaaagcttcatggaaacattccaagaagttgctgaaacacaaaaggcagaggatgagaaggaatcatctgatgcagctggtcttattgagaaattaagtgttgaagagaaggctgatgcagagaagaaagatgaagagaagtctgaggacaaaactgtggagaaagaatctgcatcaggaaaggaaagcaaggcagttgaagagcctgcgtcctcagcttgagtaattcctaatcataatccaaacttggctaactgacaagggtaagttggtgaagtttttggcggccaaaacctgggaaaat

SEQ ID NO: 244440 - DNA, 260 bp, Glycine max
ggaagaaggcaaatcgcgaagactagatctgatctgagagaatggctcctcggtctagcagcaaggacgcccaagaccttttccgcgctctttgatcattgatctctatgtcatctatgccgtattcaccgcgttcatccacgttgtttacatggctttggttggataattccacttaactcttcctatcacgagtactttcttgtgtatgaactgctgttcttgctgtttgtctcaggatccacgtgaataaagagaat

SEQ ID NO: 244441 - DNA, 364 bp, Glycine max
aggggaacaaacccaaaatgcacgagtgctccatttgtggccttgaattctctctgggccaggctctgggtggccacatgagaaaacacagagcttccatcaacgaagggtttcctattattccttctatcgaccaagttattgcgaaaatcccggttttgaaaaggtcgaatagcaccagggttatgtgcttggacttggagttacacctgtagataatgactctgtgcttggaatcaactatgaaatcaccacctcaacttctttttctttgttctgactaactctttttacctctttctggacacatgtagtattctttcatttttgtgtaaaaatttcattgacttttcccttataaaga

SEQ ID NO: 244442 - DNA, 342 bp, Glycine max
agcaggtgatgacgaagaacctttcaatgataattcctcagactcttacttttgcttgggtgaactttttcttttctggatttgtaccacccaagataccctttccattgacacagaggtttaggtcaatgctacagaacggaatacaccttatcacagtagatgttagctatgtcagcagtcactcttggtacatcctcaatctgtttggattatcaagagtctttagtctcatcttgggtgaagaaaatgctgtacatgatacacaacgtatgatgcacatcggtggattttgatttgatccttcacatggtctaaatgctgagaaagacaatcttgaca

SEQ ID NO: 244443 - DNA, 311 bp, Glycine max
gggagacttaaagttgtaaaatttgactaacaatgtttgttgaccccaaatttaagtggttgcaagaaagctgcaactcctggccatggctatgccaggttccctttacatatggtccattgtggttggcatatgctatgcggtgccgcttgccattacactgccaactgcctcagagttatttggcctcaaaaattatggtcttatatacaacattctcaattttaaacttccctttgggtcgttcctctcttctggtctccctgctggcattctctatgatttggaggcaactaccaccgcacgaagag

SEQ ID NO: 244444 - DNA, 229 bp, Glycine max
ggttccactcgttctttagatctatccactcacctgcctcttcctcaaccctttctccatctaacgagtaaggaaaaatggcgcgtaagaagatcagagagtatgactcaaagaggttgttgaaggagcactttaagagactttctggcaaggagttgccgatcaagtctgcacaaattactgcatcaactgatttcactgagcctacagagaaagaaccctggctttc

SEQ ID NO: 244445 - DNA, 369 bp, Glycine max
tacagtgataaacgagaagctagatgacccggatatgactcaaacaaagcttagtttggatataattatgttgactatgaatggaagagagagaacggaaaatgactggaaacaactcttcactgaagcaggattcaatcactacaaaatatttcccatctttggttttagatctttgattgaggtctatccttgaacatttttatgatgtgtgtgtcacacttaacgtgttaattgtatttaatagtttgcgtgttgtgagctgaataaagctatgatggcatagcattgtcgcaacttctggtggaattacattatgttcctccccgctatgttgttaaatggtctgtgtacggatttcgcattcct

SEQ ID NO: 244446 - DNA, 312 bp, Glycine max
gacagcaacagacatcttcacaaactagtaatattattcttcgaatccattttattattcataatgggtattttcacatttgaggatgaaaccacctcccctgtggctcctgctaccctttacaaagctctagttacagatgccgataacgtcatcccaaaggctgtcgaagccttcatgagtgttgaaaaccttgaggggaacggtggccctggaaccatcaagaagatcactttcgttgaggatggagaaagcaagtttgtgttgcacaaaatacaatcagttgatgacgcacacttgggatacagctat

SEQ ID NO: 244447 - DNA, 203 bp, Glycine max
aggtgccatcatggccattcagactcattatcttggcaccgtggaaaggaatggatctacgatcatgtgtggtctaactactcctgatagtgactatggatggatcgataacagccaccatgagattgcgactcaggtcattcatccgctatatccttaaattctacatcatcacatatttgaagcgactgaggcttctaaac

SEQ ID NO: 244448 - DNA, 314 bp, Glycine max
  unsure (1)..(314): unsure at all n locations
gaaaacaaggtttggaacaccagacacatggaatggaaaacgcaaaatatcataacacattacacatggctttcacttgatgaanggcaaatcagcgcatcctatggaagattatttagtttcagaatttaagcaagaaaaggacagataattacgcttgtttgcaatatttgatggccacttaagccatgatgtancaagctatttgcagaaccaccttttccaaaacatcttgcaacagcatgacttttggactgagacagaaagcgcagtgaaaaaagcttacgttganacagatgagaaaatattggaac

SEQ ID NO: 244449 - DNA, 389 bp, Glycine max
  unsure (1)..(389): unsure at all n locations
gaggatattggcgttgacatgtccgttcctagcagcagatctgcaaccctgcaaagtttgcaatcggtttacaatgatgatactccacaagttagaaggcgacgagtaagatttcagctaccagaaaatcctggtatggatcccgatgttagggaagagcttttggatttaattcaagccaaggaagctggggttgcatatataatggggcactcgtatgtgaaagcaagaaaatcatcctcattcttgaaaaagcttgtgattgatattggctactcatttctgcgcaagaattgcangggtccagctgtagctcttaacattcctcacattagtcttattgaagttgggatgatatattatgtgtagttcttggtgaaatttacaac

SEQ ID NO: 244450 - DNA, 504 bp, Glycine max
  unsure (1)..(504): unsure at all n locations
gtnttatccgacaacagtataccggactngtacggctcaggaattcctaggccgacccgcccgtcagtacggctacgagaagacgacagaagggtacggctgcgagaagacgacagaagggtacggctgcgagaagacgacagaagggtacggctgcgagaagacgacagaagggtacggctgcgagaagacgacagaagggtacggctgcgagaagacaacagaagggtacggctgcgagaagacgacagaagggtacggctgcgagaagacgacagaagggtacggctgcgagaaacgacagaagggtacggctgcgagaagacgacagaagggtacggctgcgagaagacgacagaagggtacggctgcgagaagacgacagaagggtacggctgcgagaagacgacagaagggtacggctgcgagaagacgacagaagggtaccgctgccanaagacgaccgaagggtaacggctgccaaaaggccaaccgaaggggtag

SEQ ID NO: 244451 - DNA, 406 bp, Glycine max
ggtgtgagttcattaacatatacaaattctctgtgttgtgttgtgtacttgtgttaattgtgttgttgttgtaggaaatttaagtgaagagagaatgatgatgaagtctgctatgtgtgcattggtgcttgtggcactggttgtggttgaagtggggcccatggctgaggctgcggtgacttgcaacccaacacagttgactccttgtcttccggcaattaattcaggttctgcaccttcgagtgcttgttgccagaagctgaaggagcaaaagccatgcttctgtggctacctcaaaaaccctagcttgaagcagtatgttaactctcctaatgccaaaaaaaccgttagttcttgtggtattgcctatccaacttgttaagcacctcttatatatatataaaat

SEQ ID NO: 244452 - DNA, 396 bp, Glycine max
  unsure (1)..(396): unsure at all n locations
ggtatatggtcgcggtatcagagtaggactggttaccacaacatgtacaaggagtaccgtgacaccactctaaacggtgcagttgaggcaatgtacaatgaaatggcttctcgtcacagggtcaggagcccttgcatccaaattatcaagactgcgaccatcccagctaagctttgcaagagggagagcaccaagcaatttcacaattccaaaatcaagttcccattggtctacaagaaagttagaccacctaccagaaagctgaagaccacatacaaggccaaaaagcccaacttgtttatgtaacgtggttgatgaatgagttacaaatacttggtgtctatcaggcgtntttagtagagacgtacccgttggttttttactgccagattttgt

SEQ ID NO: 244453 - DNA, 491 bp, Glycine max
  unsure (1)..(491): unsure at all n locations
cttagaacgtctacgcgtcgaggtaccggtcacggactcccggctcgacccacgcgtcagtacggctgcgagaagacgacagaagggtacggctgcgagaagacgacagaagggtacggctgcgagaagacgacagaagggtacggctgcgagaagacgacagaagggtacggctgcgagaagacgacagaagggtacggctgcgagaagacgacagaagggtacggctgcgagaagacgacagaagggtacggctgcgagaagacgacagaagggtacggctgcgagaagacgacagaagggtacggctgcgagaagacgacagaagggtacggctgcgagaagacgacagaagggtacggctgcgagaagacgacagaagggcaaccaagggaacgggcttggcggaatcagcggcaaaaaaaanaaaaaaaagaaaaaaaaaaacggcccccctaaaggatccaacctaccttcccgtgcatgcgacg

SEQ ID NO: 244454 - DNA, 347 bp, Glycine max
gtacaaagaaccagtttggaatatatttttaatccttctttgtttcttcactttcttccatacacataaccatgtcttctcagaccgttgtcctcaaagttggtatgtcatgtcaagggtgtgctggagctgtaaacagggttttggaaaaaatggaaagtgttgagtcatttgacattgatctgaaagagcagaaagtgacagtgaaaggaaatgtgcagccggacgaagttctgcaagccgtttccaaatccggaaagaagacggcattctgggtggatgaagcacaaccacctgaaaacaagccttctgaaactgcacctgttacctcagctgagaatgataac

SEQ ID NO: 244455 - DNA, 325 bp, Glycine max
gggcaagttgacttggaagagaacaccatgatgatttagcacaatttatgccaggaatgggctatgctactgaagcacttcatttgcctggaatatctaagaggttggagtttgatttggcaattaagagcaatgatttgagaagagctcttcattgtcttcttaccatgagtaatagcagagatattggacatgatggtactcaaggacttggtttgaatgacattcttaatttatcagataaaaaaccaaattaagtatctgattaaaaacaagatatagttgaaggtgttcacggtatactgaaattcgcaaaagagttttt

SEQ ID NO: 244456 - DNA, 309 bp, Glycine max
tgcggttctagtgtgtgattgtttgttgttgtaactcgttcttcttcatttgttgttctgtgtatgtgtttgttttttctctcagctgaaaatgtcttgctgcggtggtaactgtggttgcggaagctcctgcaagtgcggcaaccgctgcagaggctgcaagatgtacccagacttgagcgacactgagtcaaccatcaccgagaccttggtcatgggaatggcacctgttaacgctcaatttgagggtgctgaaatgggtgtgcccgctgagaacgatggctgcaaatgtggaccaaactgctcctg

SEQ ID NO: 244457 - DNA, 377 bp, Glycine max
  unsure (1)..(377): unsure at all n locations
gaatagaaatagaactgtcttttcatatagatatcccttcaacacaacataggtcatcgaaaggatctcgaagacccaccaacgcacgaaagccgggatctttcagaaaatggattcctattcgaagggtgcataaccgcatggataagctcacactaacccgtcaatttgggatccaattcggttccttaggaggtatcgggaaggaattttggaatgtaataatatcgattcatacagatacagaagaaagggttttctattgattcaaacgctctacctacgagatagggatagagaaagaggaaaaaaccgaggatttcacatagtacttttggtcganaaatcgatctgatttntttcgtacttttcgctca

SEQ ID NO: 244458 - DNA, 349 bp, Glycine max
  unsure (1)..(349): unsure at all n locations
ggcaggtagagagagcgagagaacaagaacataagggaaccacagcggcggtaacagaagaacaagcagagaatgggtcgagtgagaacgaagacggtgaggaaatcctctcggcaggtgatagagcgtcactactcgcgcatgaccctggacttccacacgaacaagaagcttctggaggaagtggcgataatcccgtcgaagaggctaaggaacaagatcgcggggttctcgacgcacctgatgaagcgcatccagaagggccctgtgcgcggcatctccctcaagctccaggaggangagcgcgagcgccgcatggacttcgttcccgacgtctccgccatcaaca

SEQ ID NO: 244459 - DNA, 308 bp, Glycine max
ggagtgtgtgagagagagagcgagcagtttcagacacagagagaggggtttgggattggagggattgacgctgcgtctcttcctcttctctttcgatccatcccacattcctaatcctccaatccaaccacctcagcctcacactcacatatacacatatctgaacgcgtatcgtccctcctatggcttcaaagcgcatcctcaaggagctcaaggacttgcagaaagacccaccaacttcttgcagcgctggtccagtagctgaggacatgttccattggcaagcaacaataatgggtcctgctgat

SEQ ID NO: 244460 - DNA, 383 bp, Glycine max
  unsure (1)..(383): unsure at all n locations
ggacatgataataggtgtgtgcagtaacatttccatttcatttggagagacagagtagtgagtagtgagagggcgaagcgatgaatgccccagatcgttacgagcgtttcgtcgtccctgaaggcaccaaaaaggtttcttatgagagggacacgaagatcatcaatgcggcgtccttcaccatcgagagagaggagcacactatcggcaacatcctccgcatgcaactgcacagagaccccaatgtcttgtttgccggatacaagcttcctcatcctcttcaatacaaaattattgtcaggatacacaccactagtcagtcttcngcaatgcaggcatatanacagtctgttaatgatctggacagggaacttgatcatttg

SEQ ID NO: 244461 - DNA, 335 bp, Glycine max
ggtccttctttgcgagattgaatcgtaagcagcggctaccctaatcctctcctcttcctctctactaatttcagctatggccgacgaagctgtggttgttccagatcccaccagatcgatgtcaagctctttaaccgctggagcttcgacgatattgagattactgacatttctctggctgattatatcggagtggcgacatccaagcacgccacgtatgtgcctcacaccgccggcaggtactcggtgaagcggttcaagaaagcgcaatgccccattgttgaaaagctgaccaactccctcatgatgcacggtagaaacaatggcaagaaact

SEQ ID NO: 244462 - DNA, 347 bp, Glycine max
gaagtcgcggacgatcggcagggaacaagttccgcatgtcactgggtctgccggtggcggcgacggtgaactgcgccgacaacaccggcgcgaagaatctctacatcatatcagtgaaggggatcaacggaaggctgaaccggttgccgtcagcttgcgtgggtgacatgggtatcgccaccgtcaagaagggaaagcctgatctccgtaaaaaggtgctccccgccgtcatcgtccgtcagcgcaagccgtggcgccgaaaggacggtgtttacatgtacgtcgaagataatgctggggtcatagtgaatcccaagggtgaaatgaaaggttctgctatcactggt

SEQ ID NO: 244463 - DNA, 408 bp, Glycine max
aggggctgggcattccgtttcgcagatctgctccttccgttccccctcagaaatcagttgaagagcatgggtcgtggagttagcagtggtggtggtcaaagttcattgggttatctttttggcagtggagaggcccctgccccaaaaccagcaacaaataatgccccagcccaacctgaagtgcacgctgtaaataatgtgcctcctccaaaagcatctcctcctactaaaacaatagaccctaacaaagctgctggtatcaacagtcattctactgatggccagaacaccgggaacttcatcacggaccgaccctcaaccaatgtccatgctgcgcctggtggtgggttcttccccaggttatccccttggtgaacctggggaagggaaatgataccttgtttgcaa

SEQ ID NO: 244464 - DNA, 329 bp, Glycine max
ggaagagagaaaagcaaaatcgaattatcatagaaagaagtgaattgaatttcattgacagagtcagagtgaagtgttgcgcaaatctgaggtgcgcattgcattgtggttgatttgtaagaatggcgccagtgtcggctctcgcaaagtacaagctggtgttcttgggtgatcagtccgttgggaaaaccagcatcagcactcgcttcatgtacgacaaattcgacaacacttatcaggctacaagcggtatcgattttctgtcaaaaactatgtatcttgaagatcgaactgttcgactgcagttgtgggatagagctggacaggaa

SEQ ID NO: 244465 - DNA, 335 bp, Glycine max
gaagggagtttcagttaacgtacctagttgttggtctttatatttagttattgacatcaacagagtcatggaggaagttaatgtggttcaaaccaagaatggaactgtttcagtagcttctgcgtttgctggccacaaggaagctatacagcaaagggaccacaaatttttaagaattgctgttgaagaagcgtataaaggggtagactgtgaagatgggggtccctttggtgctattatagtttgtaatgatgaaattgttgctagatgtcacacatggttctgaggaacacagaacccactgctcatgcagaagtcactgtaataagaaaggc

SEQ ID NO: 244466 - DNA, 295 bp, Glycine max
ggggtcattgggtatcattgcaaccattgctaatgggttcgttgtaggtgccaacatcttaccagcacgcccattcagtggctgttcaatgaacccaactcgctcattctgcacacctgtggtcacatggacacttcgctgctaactggatccattgcgttgtgcccattgactgaaagacgtttggctgacctgatttatggacacgtcttcattggttcatataccagcgtcccaccctctgaaaccaatccctgagcatcaacttgaaaaatatgacttcttgttctatcca

SEQ ID NO: 244467 - DNA, 379 bp, Glycine max
agacaaattacttcctatcttgaaagtgagctccattttctatcctctagttttaccaagtggattggagctcagaaattctatccggaggccataaatggatggctgcacaaatgtgcttctcttaaacaaaagccaggcaagaaagagaccccaacgtccactcctaagaatgtatggtcctccaatatatgccacctgtgaaatctggttggaaaagctcggtgaattacccatccaggatgttgtggattctatgaagagtttagcaggtgaaattgcccggttcttaccgcgtcaagagaagaaccacagtaaaggtgcaaatcaaccccatataacatcttggaatgctcatatccgcagcgaatcatccgat

SEQ ID NO: 244468 - DNA, 254 bp, Glycine max
ggttctagtgtgtgattgtttgttgttgtaactcgtgcttcttcttgtgttgttctgtgtgtgtgtttgttttttctctcacctgaaaatgtctcgctgcggtggtaactgtggttgcggaagctcctgcaggtgcggcaacggctgcagaggctgcaagatgtacccagacttgagctacggtcagtcgacgggaccgatacgttggtcatgggagtgacacctgttaacgctcaattgtagggtgctgaaat

SEQ ID NO: 244469 - DNA, 322 bp, Glycine max
ggaacctttgcattctattcattcaagattcagcaagtgcgttttggaagcagagaccgaaatacttcgagatggcccgtagaaagcaaactgctcgtaagtcaactggaggaaaagctcccaggaagcagcttgcaaccaaggctgcacgtaagtctgcacgaacaactggtggtgtgaagaagcctcatcgttatcgcgctggaactgtggctcttcgtgagattaggagataccagaagagcactgagctcctagtgacgaagcttcctttccagaggttggttcgtgaaattgcccatgatttcaagactgatctgcg

SEQ ID NO: 244470 - DNA, 373 bp, Glycine max
gaatccaaatatttaatcctatcctatcgtagcaaagaaagaaagaaagaaaaccctagcttaccttttcaactttcaagatgcaaatctttgttaagacactcactggtaagacaatcacccttgaggtggagagttcagataccatagataatgtaaagtccaagattcaagacaaggaacggatcccaccagaccagcaacgtctcatttttgctggcaagcagcttgaggatggacgtacacttgctgattacaacattcaaaaggagtccactctacacttggtgctccgtctccgtggtggaatgcaaatctttgttaagaccttgaccggaaagacaatcacccttgaggtcgagagctctgacac

SEQ ID NO: 244471 - DNA, 365 bp, Glycine max
ggagaacaaaacaggtgtttcgaatagattatcctaagtcgttgggaatactgctgcaatggcttcaggtcaggatgaggtgacccttttgggagctactggaagcccatttgtgtgcagggttcatattgccctcaagttgaagggagttcagtacaaatatgtcgaagaaaatttgaggaacaagagtgaactgcttctcatatccaacccagttcacaagaaggttccagtgtttattcacaatgagaagcccatagcagagtctcttgtgattgttgaatacattgatgagacatggaagaacagccccatcttgccttctgatccttaccaaagagccttggctcgtttctggtccaaat

SEQ ID NO: 244472 - DNA, 320 bp, Glycine max
  unsure (1)..(320): unsure at all n locations
gtcattttttttgggaaaccttcggtgattggagctgtgcanggcatgatgactggacttgtatgcatcaccccacgggcacggcttgtgcaatcatgggctgctatagtgatgggaatattatctgggagcattccatgggtgactatgatgattttgcataaaaagtcaactttgctacagaaggtagatgacacccttggtgtgtttcacacacatgctgtggctggccttttgggtggtctcctcacaggtctattagcagaaccagccctttgtagacttctattgccagtaacaaattcaaggggtgcattcta

SEQ ID NO: 244473 - DNA, 398 bp, Glycine max
gaatggtgacgtatttgtcccgtttccacgcaattttcattgaaaagaaaagaagcaccgagcgaagccagccaggttgtcgtccgattccttcgtgcgtgcgattcttctgatattccaaggcgacgcaccgacaccggacccatctccggcgacatctcaccgatctccggcgaatccccggtccccactttcttccctcgaaatgaatcccgagtatgattatctgttcaagctccttcttattggagactctggtgttggtaaatcatgccttcttctgagatttgctgatgattcgtacatcgagagctacataagcaccattggagttgattttaaaatacgtactgttgagcaggatggaaagaccattacactacagatctgggacacag

SEQ ID NO: 244474 - DNA, 337 bp, Glycine max
gacaaaaaattattcgataaagtcactcgcattgaagcaagaagtgaaaagtttgacatgtttatgcacctggacattaattccgagatatatccgttaaaggttggtcagaagtttgcgcttgtgcttgtttcaacacttaatcctgatggaactccagacagtggatattatacccagatcagtcgacaatcactggccaacaattttgaggatgtcatgtatgggaagctctacaggataacagagggttcagggcgtgaaaaagcggagatgaatatttcatttcgtgggcttctgatgatgctgaatggagatacctctcattgcaacaagt

SEQ ID NO: 244475 - DNA, 311 bp, Glycine max
ggcagttcaattccaatatattccattctctctgtgtatttccctacctctcccttcaagatgcagatcttcgtcaagagcctcaccggcaagaccatcacccttgaggtggaaagctctgacaccatcgacaacgtcaaggccaagatccaggacaaggaaggaatccccccggaccagcaacgtctcattttcgccggaaagcaacttgaggacggccgtacccttgctgactacaacattcagaaggagagtactcttcacctcgtcggccgtctccgtggtggcagtcagatcgtcgttaacacact

SEQ ID NO: 244476 - DNA, 382 bp, Glycine max
  unsure (1)..(382): unsure at all n locations
agccttgaagatttattcaacttctgcagtcggaaattgcctctcaaaactgttcttatgcttgctgatcagatgctaaatcgagttgaatttgttcattccaaatcatttttacatcgcgacatcaagccagacaacttcctcatgggtttagggaggcgtgcaaatcaagtgtatattattgactttggcttggccaagaaatatagagacaccactacacatcagcatattccttacagagagaacaagaatttgaccggaactgctaggtatgctagtatgaatactcatctaggaattgagcaaagccgtanggatgatttagagtcacttggatatgttcttatgtactttttaagaggaagtctgccttggcaag

SEQ ID NO: 244477 - DNA, 364 bp, Glycine max
gataccaaaaacaaaacacaagccaagtgaaagtgagaaaacataaaaatcaaagagcataatgtcagggatcattcacaagattggggagacccttcatgtgggagggcacaagaaggaggaggagcataagggtgagcaccatgctggagaatacaaaggggagcaccatggtgaacacagtagtgagtacaaaggagagcatcatggtgaacacaaagctggacagtaccatggtgagcacaatccagagcacaaagatgggttcctagacaaagtcaacgacaatattcatggttatggccgctcctccgatggcgagaagaaaaataacgataagaagaagagcgaccatggccattag

SEQ ID NO: 244478 - DNA, 370 bp, Glycine max
  unsure (1)..(370): unsure at all n locations
gatcatcgtgatcatcacaattctaattcattcaccaaaaagttcttcgccccttctttgtccccattctttctctttaatatactttgtccatattttcctctttctcttcctatcaaacatccatggcttccttgtcttctagtacaaaacagagcaataataaccaagaggttgatgagaaaccaataccgcacgatcaaaacgttctgcaaaagcacgttgcgttcttcgacaggaaccacgatggcatcatatacccgtgggagactttccaaggatttcgagcaataggttgtgggtacttattatcgtccgttgctgctattttcatcaatggaggtctcagtcagaaanaccgcccgggaaa

SEQ ID NO: 244479 - DNA, 292 bp, Glycine max
gatagcagcatcatacaaagcattgaattcaaaaacttaagttcattccttgtgttttgctttcgtcctcaaaaccaaacatgtcgaacacatgcggcaactgcgactgcgctgacaagactatctgcaccaagggaaacagctatggtgttattgtagagactgagaagagttacatctagactgttgtcatggatgttccagcagctgagcatgatgggaagtgcaagtgtggcactaactgcacttgcacggactgcacctgtggccattaaggaatatgtaagaaaat

SEQ ID NO: 244480 - DNA, 270 bp, Glycine max
gaatggagaagtgagcggtgagaggaaacagaagagagaagagcaatcggtgagtgaatggaatggattcaggtcctccggcgaacgatttgtgttcagtgtgccatggcaactttcatattccatgccaagccaattgttctcactggttttgcggaaattgcacaatgcttgtgtggcagcacggatcagtgggttgttcatgcaaatgtccactgtgtcgtccagccatcagtctcttagtctccacagaaaagtctctgatgcaac

SEQ ID NO: 244481 - DNA, 396 bp, Glycine max
ggcaacaaggactactactcttcttttctttcttcatcgtcatcacgcactttttctctctaacactttcacactctttctctctctctctctctctctcagaattttctcctctctccgattccttttattaattggagttttctcgctcctttttctttccctgaaaacatttcatcttcgtattgatgtcggaaaagggtcggccacttcccaaatttggtgaatgggatgtcaatgatccagcctcagctgaggggttcacagtgatttttaataaggccagggatgagaaaaagacaggtggcaacccagagtcaccaggaaagactgctactgatcctcatagcaaacctgcagtagagcctggcaaaactcagactaaaaaatgggttt

SEQ ID NO: 244482 - DNA, 214 bp, Glycine max
tgataaaatgctgacagttgagcccaccaaaagaattacagttgaagaagcactagcccatccataccttgaaaaactgcatgatgtagctgatgaaccaatctgcatggagccattctcatttgattttgagcaacagcaattggatgaagtgcaaataaaagagatgatctacagggaagcattagcactgaatcctgagtatgcttaaagc

SEQ ID NO: 244483 - DNA, 299 bp, Glycine max
cgggataccaacggcagaacacaagccaagtgaaagtgagaaaaaataaaaatcaaagagcataatgtcagggatcattcacaagattggggagacccttcatgtgggagggcacaagaaggaggatgaccataagggtgagcaccatgctggagaatacaaaggggagcaccagggtgaacacagtagtgagtacaaaggagagcatcatggtgaacacagagctggagagtaccatggtgagcacaagccagagcacacagaggggttcctagacaaagtcaaggacaagatccatg

SEQ ID NO: 244484 - DNA, 372 bp, Glycine max
ggagctgggtttgttttcggcctttgatcttcgattctctctctttttctctcgcgaaaaccgtatcagcaatgtctggagaatcagccagcgctattcacaagggtcaagtcgatctcttagacttcattgactggtctggggttgagtgcctcaatcaaagctccacccactctctccccaatgctatcaaacacggttatagagaagacgatggtttgcatctggagagtgatgcagacgagcagcttttgctcgatattcctttcactcaagtcgttaaactttattcctttgttatcaaaggtcctgaagaaggccccaagacagtgaagctcttttcgaagaaggagcacatgggatttagtaatg

SEQ ID NO: 244485 - DNA, 393 bp, Glycine max
ctgggcattccatttaatattgcatcttatgcccttttgacatgcatgattgctcatgtttgtgatctcattcctggtgattttattcatgttattggggatgctcatatttaccgcaatcacgtgaggcctttgcaggagcagctccataaccagccaaagccttttccaactttgaagataaatccaaagaagaaagatatagattcttttgtggctgctgatttcaagctcataggctatgatcctcaccagaagattgatatgaagctgtctgtctaaaatctggggattctcactccttcaggcacaaccttaggaagattatgttaaatctgtgtacaattaaagaacatatcgtagcacatacttcatcgcataaatactgttact

SEQ ID NO: 244486 - DNA, 373 bp, Glycine max
gtatcagaggtcattcatgaaggggaagctttacattcacttcactgtggagttcccagattccctaaaccctgaccaggttaaggccttggaagctgttctgccaccaaagccttcttcacaattgacagacatggagctggatgaatgtgaggaaacaacactccatgatgtcaacatggaggaggagactaggaggaagcaacaacaagctcaggaggcatatgatgaggatgatgacatgcctggtggtgcacagagggtacagtgtgcccagcagtaatgacttgtgtggaagctagaatcagaattgatgaaaatgatgatgatactgttgatgtttccgtaaccgtagtgtgtgtggactaaagat

SEQ ID NO: 244487 - DNA, 366 bp, Glycine max
ggaggaagatgatgattttgaggagttagacccctcttgttgctttatgtgtgatcaagagcacaaaacaatagaagactgcatggttcacatgcacaagcatcatggattcttcattccagatgttgagtatttgaaggatccaaaaggcctcctcacctatcttggccttaaggtcaaaagggactacatgtgtctgtactgcaatgatcgatgttatccattcagcagcttggaagcagtcaggaaacatatggaggcaaaaagtcactgtaaagtgcattatggtgatggtgatgatgacgaggaggtagaattagatgagttctatgattatagcagcagttatgtggatgatcaacgcaa

SEQ ID NO: 244488 - DNA, 502 bp, Glycine max
cgctttcgagcgaacttctgcgcggctacgtatgccttacgaattccagcctcgaccgacccgtaagtacggctacgagaagcgacagacaggtacggctgcgagaaaacgacacaacggtaccgctgcgagaagacgacagaacggtacggctgcgagaagacgacagaacggtacggctgcgagaagacgacagaagggtacggctgcgagaagacgacagaagggtacggctgcgagaagacgacagaagggtacggctgcgagaagacgacagaagggtacggctgcgagaagacgacagaagggtacggctgcgagaagacgacagaagggtaccgctgcgagaagacgacagaacggtacggctgcgaaaagacgacagaagggtacggctgcgagaagacgacagaagggtaccgctgcgagaagacgacataacggtaccgcttccagaaaaccacacaagggtacggctgcgagaagaacacataagggttcc

SEQ ID NO: 244489 - DNA, 327 bp, Glycine max
  unsure (1)..(327): unsure at all n locations
ncgggaccaagaggttggccacaagagccttctccagagtgatgctctttaccagtatattctggagaccagtgtctaggcaagagaacctgaatccatgaaagaactgagagagttgacagcaaaacacccatggaacatcatgacaacctctgcagacgaagggcaattcttgaacatgctccttaagctcatcaatgccaagaacaccatggaaattggtgtctacactggatattcacttcgtgccaccgctctcgctcttcctgaagatggaaagatcttggccatggatattaacagggagaattatgaattgggtgtgcc

SEQ ID NO: 244490 - DNA, 315 bp, Glycine max
ggaggaacaaccatgttccctggtattgctgacagaatgagcaaggaaatttctgcattggcacccagcagcatgaagatcaaggttgtagcaccacctgagagaaaatacagtgtctggatcggtggttctatcttggcatctcttagcaccttccagcagatgtggattgcaaaggcagaatatgacgaatctggtccagcaattgtgcagagaaagtgcttctaaactgtgtcgatagatagggttattgaagggagagactactatcatcacaatttgtctggaagcaatgcattgcagattgtaaccctt

SEQ ID NO: 244491 - DNA, 321 bp, Glycine max
gaacctccgttatcaaaacgcagccaagtctctgttctgtattctagggtttggattctgagtttcgtttcagtttttgatcaccatgagagctaagtggaagaagaagcgtatgaggaggttgaagaggaagcgccgaaagatgaggcagagatcgaagtagtgtgcttgtttccccagcaactattgctactagttttgtgggatttcagctatgtttttgtttccaaatgttacgatacatttttattggtttctcttgcttttgtcttacctcaagagagatgctcttaccgcaaattaattagatttaatatttga

SEQ ID NO: 244492 - DNA, 355 bp, Glycine max
ggaacagtacccggtttcgacactcgcgtctcagcctcagtttcggatctctcccttctctcaccaatttccaggatttgaaaaatggcagattccaaaccaggattggggaagccagtgttcaccaaggtcgatcagcttcgtccagggaccagcgggcacactttaactgtgaaggtggtcgatgctaagatggtgatgcagaaaggtcgttctgatggtcctcaatcccgccaaatgcgaattgctgaatgtttggttggtgatgagactggaatgatcatattcactgccagaaatgatcaagtggatgtgatgaaagagggtactactgtgaccctgcacaatgccaaaa

SEQ ID NO: 244493 - DNA, 367 bp, Glycine max
  unsure (1)..(367): unsure at all n locations
gggagctgagctgagaaaacccccaaccccaacctcaaccttaacctctcctcactttcttttcaaccagaactatgattaagctttttaaagtaaaggaaaaacagagagaactggcagaaaatgcgagtggcggaccacccgttaagaagcaaagtgccggcgagttgcgtcttcacaaagatataagcgagctgaatctaccaaaatcatgtaccatgcaattcnccaatggcaaagatgacctgatgaactttgaagtttcaattcgacctgatgatggatattacttaggtggcacatttttgtnttcctttcaagtgtcttccatctatccacatgaagcaccaaaggttaaatgcaagac

SEQ ID NO: 244494 - DNA, 361 bp, Glycine max
agaagaccacaagaagggaaaagaagacggagaaggaagaaaagaaggggtggttgtccattccatagggagagatcatgagagaagagaaaagatgtttgagccgcagcagctatacactcgagcgaagaccgaggaattcgacctcgaatcaggggaaaccctctacccagggctgagcgtcggcgagaaccagctccgatggggcttcatccgcaaggtctacggcatcctctccggccagatggtcctcagcaccctcgtctctgtcaccaccgttttctatactccaatcaatgacctcctcaagggcaattccaccctcctcctcatcgtcctcgtccttcctttcatctttttg

SEQ ID NO: 244495 - DNA, 366 bp, Glycine max
gacaatatataccttctaaacattctcttgcacccaaaccctggaattaagcacgttatttcattagggttggttttgttgaacagaaaaaaagagaaaaaaaaattatgggaagcgatggcgtgaggaaaccaagattcctatgccttcatgggttccgaacaagctgagaaatattgaaaacacagttacataagtggcctcaatcggttctagacaacctcgatctagtatttgtggatgctccttttccttgccttggcaaatccgatgtagaaggcatttttgatcccccttactacgagtggtttcagttcaacaaggaatttacagagtacaccaactttgacgagtggcttcagtaca

SEQ ID NO: 244496 - DNA, 356 bp, Glycine max
ggcagttgttagcgaaggctgaaagaataacgatggtgggagtggtgatagaagatgaagttgttgttgctccaactaacttttcaatggttgaagagggaatttatcgctctagtttccctcgttcttcaaatttctcctttcttgaatctctcaatcttcgatccatcatatacttgtgccccgaaccctatccgcaagaaaatttagagtttcttcaatcgcaaaatattcggctctttcactttggtattgaaggcaagacggatctctctgtgtctgccgttagagataacatactggaggccgttaaagttttaattgatgtgagaaatcatccagttttaatccactgc

SEQ ID NO: 244497 - DNA, 210 bp, Glycine max
gaactacaacgtgagaaacatggcttccttaagctccttagtgctgctccttgcagctctaattctatcccctcaagttcttgcacactatgagaatcccccagtgtacaagcctcatactgagaaaccaccagtttataagcccccagttgagaagcctcctgtttacaatcctccagttgaaagaccctcaagttataagcctccagt

SEQ ID NO: 244498 - DNA, 212 bp, Glycine max
gagggatcttgtgtagagaggagttgctgttaaggagccatctgctccccatggagttcgtcttttgattgatgactatccttatccttcggatgggctagagatatgggatgccatcaactcctgcgtgtaagaatatgtctcagtctactactagtcagatgaggaacgctcaattgaccctgaactccaagcttggttgaaagaacttg

SEQ ID NO: 244499 - DNA, 221 bp, Glycine max
tgcgaacagagcctgaagagagcagagagccttccaccagatgggcatgatggaacaagaagcttggagagcccagagaggcttgccggagggttctgtcaacattttgagagcctggcttttcgagcattttctcgacccgtatccaagcgatgcagataagcatctgttggggcgagagactggcctatcgcgaaatcaggtatcaaactggttcatta

SEQ ID NO: 244500 - DNA, 331 bp, Glycine max
ggagaaaccaagtttgtgctgcacaaaatagaaagcattgatgaggcgaacttgggatacagctacagcgtggttgggggtgctgcattgccagacacggcggagaagatcacattcgactccaaattggttgctggtcccaatggagggtctgctgggaagctcactgtcaaatacgaaacaaaaggagatgctgagcccaaccaagacgaactcaaaactggaaaagccaacgctgatgctctcttcaaggccattgaggcttaccttttggcccatccccaatacaactaatcctcctcaacttacttgttatcactttcttgccttt

SEQ ID NO: 244501 - DNA, 405 bp, Glycine max
attcccgtctcgacacacgcgtaagtacagagacagaagggggcacacaacactagctatagtaagctacacttatttgaggttggagaaatatggctaaagatgttgaggttcaagagcaatgaggagagtactctgcaaaagactaccatgaccctcctccagcacccttgttcgacccagaggagctcacacagtggtccttttatagagccctaatcgctgagttcatagcaacccttctcttcctttatgtcaccgtgctcaccattattggctacaaaaggcagactgatgccacgctaggtggcaccgagtgtgatggggttggcattttgggcatcgcttgggcctttggtggcatgatcttcatccttgtttactgcaccgccggtatttcaggag

SEQ ID NO: 244502 - DNA, 339 bp, Glycine max
gggattttggtggatcgttatgaggagatgattgagaattatcacccggggcttggggatcatacgtggcctctggtgacccattttgtagggtgcaaaccttgtgggaagtttggggattaccctgtggagatgtgcttgaagcagatggatagggcctataactttggtgataaccagattttgcagatgtatgggttcactcataagtcgcttgctagccgcaaggtgaagagggtgaggaatgatactagcaaccctcttgaggttaaggatgatcttggattgcttcaccctgctttcaaagctatcaagctcccttcgtcttgataagatcga

SEQ ID NO: 244503 - DNA, 332 bp, Glycine max
actgacggctggtgtcataagtcatcgatctgatgaccggcagctagcgttggcgaggacacttgatgccttgattgaagggacgccatcccctgagacagattcatgcctctcgtttggtccccgtgctccaaagtctggttcaggagcatgtagcaggcatgtgcaaggaccatttattgaagcatttgtgttcacgatctggtggtaggaattacgttgaatattgtagtctgcaagagcttgcacaacatcatcagccatccagacatatgatatatcgaagattatacatgctaactggagttgactttgtagatcagctaacattg

SEQ ID NO: 244504 - DNA, 354 bp, Glycine max
catgcatcaaattgaaatcattgccatactttgtgaagaagaggaacaaaattccgacacacgtggcactgcaccaaccgctgatctcagcagcagcaatagcagcgtgagcagaagctacagcgaggcgagcctgcttcctcggcttgccacgtggtacaaatccagggacgtggcgcagaggatccttctctccgtggaatgccaaatgaggaggtgctcctacacgcttggtttgggcgagccgaacctagcggggaagccgagcctgctctacgacctcgtgtgcaagccgaatgagatccacgcgctgaagacgacgccgtacgacgagcgcgtggagaaccacgagaa

SEQ ID NO: 244505 - DNA, 399 bp, Glycine max
gggtaaccatgtatggaatatggtgcttcatcacggtcctgttgttctccccagtggcgttttcggaactgtgcaacccacaggacaagaaagtgttgctccaaatcaagaaggacttcaacaacccttacctgctagcctcctggaaccctaacaccgattgctgcaactggtactgcgtccagtgccaccccgaaacgcaccgcatcaactccctcgtcatattatcctctgttccccaaaccaatttatccggcccaataccaccctccgtcggtgacctaccttttcttgagacccttcaattccacaagctccctaaactcaccggcccaattcagcccactatagccaagctcactaaactcaaggagatctacatcagctggaccaatgtct

SEQ ID NO: 244506 - DNA, 311 bp, Glycine max
  unsure (1)..(311): unsure at all n locations
ggcgccaatggagttttgttctgagaattcgaatctaggatttgtttgagcgttcgcgaaggatcatggtggggttcagaaacagatacatggttatggaggtttttctgaaccctaatanggacaaaggtggggatgattctgttatagttacacagtttaatgtctccaaagctgtaagagacagcatattggtgaattttggggagtgtggtttggcttcgtcattgggatcgtttcagggaagtataacggcttgtaaaaatgctgccttgaaatgtgaggagtcaaaatttgagcagtacaaactc

SEQ ID NO: 244507 - DNA, 389 bp, Glycine max
ggagagaaaaaatggccagatcaatcaaattctttgggttgaacacatgggccaagattccttctcttgggttagggacttggcaagctgaacctggtgttgtagctgaagctctcaccacagccattcaggttggatacaggcatattgactgtgctagtgcgtataagaatcaagcagagattggttctgctcttaagaagctttttgatgatggtgtggtgaagcgtgaggacttatggatcacttccaaactctggtgttcagatcatgcaccagaagatgtgccacaagcattggataaaacattacaggaattgcaacttgactatcttgacctctatctgatccactggccagtccgcatgaaaagtggaacatttggactc

SEQ ID NO: 244508 - DNA, 368 bp, Glycine max
ggtgactgaaaaaaggttttagatcgtagtaactaagcactacgaaagcacgagatatcgaagatggctctgcccaaagcgaaggagatcgtgtcgtccaattccgtcgtcgttttcagcaaaacctattgccctttctgcgtcgatgtgaagaagctcttcggtgacctcggtgccaattacaaggccatcgaactcgaaactgactcggatggaaaagagctccacgcagcattagttgaatggacggaccagcgaagcgtgcctatcgtgtataatggtggaaaccacattggtggctgtgactcaacgactgccctgcacactcatgggaagctggttcctctgctgatatctgctggagctgt

SEQ ID NO: 244509 - DNA, 322 bp, Glycine max
ggacggcaaagacggaggaaaggtcgcaaacgcgaaaatggtgaagtttctgaaaccaaacaaggccgccattgtccttcagggacgctacgccggcaagaaagccgtgatcgttcgaaccttcgacgaaggaactcgcgagcgcccctacggccactgtttggtggcggggataaagaagtaccctgcgaaggtgatcaagaaggactcggcgaagatgacggcgaagaagtcacgcgtgaaggcgttcgtgaagctcgtcaactaccagcacctcatgcccacgcgctacacgcttgacgtggacttgaaggacgcggtt

SEQ ID NO: 244510 - DNA, 327 bp, Glycine max
gaattgtaagagaaagagaaagcccagatcacagaagcagaggaagagagagaaacaccagagatgggtcttttctttggttgcttcggcgtagacaaacgcatgagcaaggaagaagagagattggcctctgaagaagcgcgtgccaaagctgctgaagccgcacagaaaaggcaagagcaatttgagaattctgcagcaggacgagctgctcgtgcacagcaacaagcaatggcaaagcaatctgcaaataccaacaaaggcgaaccagttctaaagtggcaaatgagttgaggttagacattctgtcagttggagttaactttt

SEQ ID NO: 244511 - DNA, 345 bp, Glycine max
gatacttagatcttcttccttcactcaatcaagttttgactttatttggagtttctccaaaatgagccggccaatggaggaagatactgtgggtaagaatgaggaagaggagttcaacactggaccgctgtccgtactcatgatgagtgttaaaaataatactcaggtactgataaattgtcggaacaacaaaaagcttctgggtcgtgtaagggcttttgataggcactgcaacatggttcttgaaaatgtgagggagatgtggactgaggtgccaaaaactggtaaaggaaagaaaaaggcccagccagtcaacaaggatagattcatcagcaagatgttcct

SEQ ID NO: 244512 - DNA, 361 bp, Glycine max
catggaagttgagactgtcccatctgaagccaaacttttgccaccaaagccaaagtttgagcctttggagcctcatgagatgtctgatggtcaggtacagttccgcaaggtgaatgttccatctcatcgttatacgcctctcaagaaagcttggatggatatctatagtcccatatatgaacaggtgaaaattgatgtccgtatgaatttgaacgctcgtagagtggagctgaagacaaggcctgatacacctgatattagtaacctgcaaaaatgtgctgattttgtccatgctttcatgttgggttttgatgtcatagatgccattgcgcttctgcgtttggatgagctctacattgag

SEQ ID NO: 244513 - DNA, 337 bp, Glycine max
gaaaatcaattgggaaaaaggcaaaggggatcgctgaaatcaattactctggttgtactgggaaaagatgagaaactgagaatgggtggtgggtgcaagtgtttggtatccttggtgttggctttggtgttgatgaggaatttggcggaggcgcaatcgggcagcagcagcagctgcgctcaagaactaattcgatgtgtgaactttctgaatgggacaatcaatccatcaagctcttgctgtgaccctctcaaacataccgtggaaatacaactggattgccgctgcaacatcttcttcagccccggcttgcttcaaagcttcaacgtctctgttg

SEQ ID NO: 244514 - DNA, 275 bp, Glycine max
ttggttgggggttcaacttttttggaacctttgattttgggtttgtggttgatcaggatttgggcggatgcccaatcgggcatcagcaccagctgcgcccaggaactaattccatgtgtgaactttctgaattggacaatcatcccaacaagctcttgctgtgaccctctcaaacataccgtggaaaatcaactggattgccgctgcaacatcctcttcatccccggcttgcttcaaagcttcaacgtctccgttgattaagctctcgctctcag

SEQ ID NO: 244515 - DNA, 380 bp, Glycine max
  unsure (1)..(380): unsure at all n locations
atcaccttctcaacaacccaaatatattccgttaatgaaaaagcggtagccgctagagcangagattgaagggcgaaaaagaagactgagagaagagagatgggcgtgaccaaggaagaagttgaatcatccttgaaggccaaactgaacccttctcatcttgaagtggttgatacatctggaaggtgcggtgcaagttttgtggtggagattgtatcagaacaatttgaaggcaaaaggctacttgagaggcatcgaatggtgaatgctgccttagaggaagaaatgaaacaaatccatgctctctctattaagaaagctgttaccccagaccagtggaaacaacagcaagaatcaaccaatcaaatcctgctgcctaa

SEQ ID NO: 244516 - DNA, 346 bp, Glycine max
gaaagaggtttggcatgttgctgatgttccaaagaatgataaattccagtatacatactttgcacataaaataaacagctttgacactgcccctaaaaaattgttggcatcagactctcgtttacgtccagatagatatgcacttgagatgggtgatctatccaaatcaggggcagaaaagagcagtttggaggacaagcaacgcactgaaaagaaaatccgagaagccaaagagcataaatttacaccgagatggtttgatttaactgaagaagtgacatcaactccttaaggtgatttggagatctatcaatacaatggtaaatacaccgagcatcgggctgct

SEQ ID NO: 244517 - DNA, 285 bp, Glycine max
ggaagaagttctgcactgaacccaaatgcacctctattcatacctgctgctcttcggcaggtggaggatttttcacctcaatggtgggatcttgtgaaatcttcaacatggtttcgtgattattggttgagccaacataaggaggaagaatttgaagttgccaatgactctagtaatgatgatattgagaatatgctctcagaaacttttgatctaggcatggaagaagacttcaatgttctagagaacgagtttgagcagttggtgatgtcctctgaagctcta

SEQ ID NO: 244518 - DNA, 325 bp, Glycine max
gacagatattaacaaccatatctattcttacaagttacatccattgagaaacatgaaggtctcccccttagcattttcaatcctttttttgtccttcaccatagaactcttcattggcattgcttcagcagcacaagaagcagtgcttgacacctcatgccagaagctgagaacaggtgtcaagtactacattctaccagtcttcagatgcagaggtggaggcctaacactttcaagcactggcaacaacatatgccccctctttgtggtgcaagagaagcttgaagtctcaaaaggcaccccagttaccttcacaccctacaat

SEQ ID NO: 244519 - DNA, 380 bp, Glycine max
ggagagaaaaaatggccaaatcaatcaaattctttgagttgaacacaggggccaagattccttctcttgggttagggacttggcaagctgaacctggtgttgtagctgaagctctcaccacagccattcaggttggatacaggcatattgactgcgctagtgcgtataagaatcaagcagagattggttctgctcttaagaagctttttgatgatggtgtggtgaagcgtgaggacttatggatcacttccaaactctggtgttcagatcatgcaccagaagatgtgccaaaagcattggataaaacattacaggaattgcaacttgactatcttgacctctatctgatccactggccagtccgcatgaaaagtggaaca

SEQ ID NO: 244520 - DNA, 339 bp, Glycine max
gacagaagggggagagatgtactgtccaggtcaatcatattcgttgagttgaacacaggggtcaagattctctctcttgggtgatggacatggtatgctgaaactgatgttgtacctgaagctctcagcaaagtcattcaagttggctacacgcatattgactgcactagtgcgtacaagcatcaagcagagattgggtctgctcttaagacacgttttgatgatcgtgtggtgaagcgtgaggacttatggatcacttcgaacatctggtgttcagatcatgcatcataagatgtgccaacagcactgtgtaacacattacaggaattgcagcttgac

SEQ ID NO: 244521 - DNA, 402 bp, Glycine max
  unsure (1)..(402): unsure at all n locations
ggaaccaattatggcataccctcaacttcaaaaggtggaacctaatgtgcacatcaaggcttctgctgatcagttccataatgttttatgcaacaggacacaccatattgccaacattttccctggaaaagtacagtctgttgaaattcataaaggtgaatggggcactgagggatccgtcatctcctggaattatttacatganggcaaagtttgtgtggctaaggagatggttgaaggcatagacatgaaaaacaataaaatgacctttaaggtcatagagggagacctgctgggacattacaaaagcttcaagtttttaatgcaagttactccaaaggaaaagggaagcgttgtgaattgggttctggaatatgagaaacaaaatgacaatactcctga

SEQ ID NO: 244522 - DNA, 377 bp, Glycine max
gacctcagctgtgattgcaaaggttcataccattggattggactgtagagctccttaaaactgatactttacttgcaggcatgcgtgccaattggtatggattattaaggaagaaatttaaggatacatttgggcatgttggtggagtcatcttggggggattagtgggtcttaagagaccagaaaatcatggtgtcacatactctctaacagaggaatttgtgactgtttatagaatgcactcactcctatctgataacctacagctaagagacatatccgctactccaggatccaacaaatctcctccattagtcaaagaaattcctatgaagaaattgattggactgcaaggagaaaaaaacattatctgaaat

SEQ ID NO: 244523 - DNA, 368 bp, Glycine max
gtcttccaggggatggattggaggagcattttgtaatacaaatggaaggtgttaacatcttggctgtcagttatggtgccccaggggcttgcccttatccccgacaactgaagcttcctggaaagtggtctttcaagtcacacacagttctaaaaagcagtgaacaggcaccaagagctccaatatttactgaagaggcacttggcgggctggagggagacggtgaggctgtacagccaatagaaaggtccttttgggctaaatactggatgtacctgatcccgcttggactcatagtaatgaatgctgttactcaagctatgaatatgcccgaggaacaagctggccgacaacctgatgctccggca

SEQ ID NO: 244524 - DNA, 397 bp, Glycine max
gactacatcagaattcacaacacaaaccaaacttgccattcttcacaaaaccacaaagcatggcatcaaaactactactaagcctttctctgctactcctaactctcaccctccacacgtcttgcaccaccgcacttgccaaacgaaccaacccaaacccaacaataacaacaacaacagacttcatcaagtcctcatgcaaggccacgcgctaccccgccgcgtgcgtgcaaaccctctcgggccacgccagcgcgatccgccagagcgagcagcaactcgccgtcacggctctctccgtgagcgtgtccaagacgcgctcatgcgcgtcgttcgtgaagagaatgggctccgtgaagggaatgaagcccagagagtacaacgcactgcgtgactg

SEQ ID NO: 244525 - DNA, 399 bp, Glycine max
gtgaaaggtgtcgttggcttggccaaaggtctgaggaaggtgaaaagcacgtacccgctgctggttgcagtgttacccgatgttccagaacatcacggacacattcccacctcccaaggtgccattgtgagacaaattgaaaccgtgtacgctcctgagaatcacacgcaattcgccatggcatattacgtcatcaactaatccaagctacgtagttgcgaatgtgtataattcagcacgatgatagacctacacggtgatatacaagtgtctgacaatattgaccacttgtttgacttgccagataactacttttaatcggtgatgcgacgttattgtgatctcacttcgggtcacactctgcagtatcatatcggatactgccatcagtcccctcat

SEQ ID NO: 244526 - DNA, 357 bp, Glycine max
caacaagaggtatggtgctgccaaaattttcagtcaccctgatgtcgctgctgaggaaccatggtatggtattgagcaagagtataccttattgcagaaagatgtaaattggccacttgggtggccccttggtgggtttcctggaccacagatgcacattacaaagcttgtatttatgctggcattaacattagtggcatcaatggagaggttatgcctggccagtgggaatttcaagttggtccttctgttggtatctctgctggagatgaggtgtgggctgctcgctacattttggagaggattacggagatagctggagcaattgtttcatttgattccaagcctattccggga

SEQ ID NO: 244527 - DNA, 394 bp, Glycine max
caacaagaggtatggtgctgccaaaattttcagtcaccctgatgtcactgctgaggaaccatggtatggtattgagcaagagtataccttattgcagaaagatgtaaattggccacttgggtggccccttggtgggtttcctggaccacagatgcacattacaaagcttgtatttatgctggcattaacattagtggcatcaatggagacgttatgcctggccagtgggaatttcaagttggtccttctgttggtatctctgctggagatgaggtgtgggctgctcgctacattttggagaggattacggagatagctggagcaattgtttcatttgatcccaagcctattccgggagattgggatggagctggagctcactcaaactacagca

SEQ ID NO: 244528 - DNA, 352 bp, Glycine max
gactgctcaaactctctctctctctcttctcttacacacacaagcactacaacattttctttggtctctcattttctctatagctagatgggttctggtgctttacaacttcttctgatcttgggtcttctggctagctcatgcttagcacaagccccaggtgctgcacccacacaaccacccactacaaccccatcaccaccaccaccaagatcagcacctgcaccagcacccaccccgccagcaacaccaccaccagcaacaccaccaccagcagcagcaactcctccaccagcaacatcaccaccagcaacaacaccaacgccaacaccaacagctgcacctacacctg

SEQ ID NO: 244529 - DNA, 347 bp, Glycine max
agggacacatgcaaacactaatcataagccacgcacttaaccctatcttcttagttacatatttcaattttaaaactccaattacaatgatccttccaaacatcaaagttcgttttttcttactcttttgccttattgggatagtgtcagctcagttatcctctagcttttatgccaaaacgtgtcctaatgcactttcaaccattaaatcagaagtagtgtctgctgtgaacaacgagcgtcgcatgggagcctccttgctccgtcttcatttccatgattgctttgttcaaggttgtgatgcatcagtactattggatgatacatcgagtttcacaggtgagaag

SEQ ID NO: 244530 - DNA, 411 bp, Glycine max
  unsure (1)..(411): unsure at all n locations
caaaagaacaacagaagggaaaggaattggaatcagacctgaaaaaccctaacaatgggaggcaaatgtccgtataggaacgtgaagaagagaagatattctcacaagacagcgcggcgtacgaagtttgagttgaaaggggacgacatggtttatgcgcagctgaacaaacccgatgaagagagagcccctttacccctcgatgaagatttgcctgggatgggccagtactattgccttcactgcgatcggtacttttccaatgtagccgtgagggatgagcactttaagaccaaacgacacaagaagcgtataaaacaaatgatgggtcctgcaccacatactcaacttgatgccgatgtagctgctgggatgggtatgccagacaatggaacanagctaatgtctatg

SEQ ID NO: 244531 - DNA, 280 bp, Glycine max
  unsure (1)..(280): unsure at all n locations
tgggaatgccaatccattaatccttccgacctttctaaaatcacatttctgtcatctctgcgtcttcttcctctatcaatcgttttccatggctcgtaccatgcaaatcgctcgcaaatccaccggtggaaatgctcctacgaagcaactcgccaccaatgctgcaaggaaatctgcaccgacaaccggtggagtcaagaagcctcatcgctatcgccctggaactgttgctcttcgtgagatccgaaaataccanatgagcacagagcttctgatccgc

SEQ ID NO: 244532 - DNA, 349 bp, Glycine max
gactagttcagattatggacaccaagttgggtagccaatacccacaaaatggagcctacatggctgccactcttgctctaaaatgccttaataacgaagctaaggcaaagcctccaatgacagacgttttagaaacccttgaacagattgcagagtgctaaaagggtcccatttgaatcatacccctactgcattcccataatctgcttgcgtactctaaattttgaacatctgtaaatatattccttatttttataaggttggtttttacaatgagaaatgctacgaacacactattttgaacacttcctctcttgttagttgaaatttattgaagatgacaaaattt

SEQ ID NO: 244533 - DNA, 317 bp, Glycine max
aagcgatacgacaacagaaagggggcaaaaaccgctcaatggatccccgtactcgagggggtattacacatgcaatagcgtcaaaaggtctccgacgcggacacacatggaccgtactccggacgatccggcaatgtcgactgtgacatatgaatgagagcaccgtcactcgattccagagaacatttccggtcgagtgtgtttgagattcaatcacagtcaaggtagctgcaagcttaatctgacattagtacatcagtagattaaatcacaagggaaacatagtcggctctcaccaagatcatcgtaatcaacat

SEQ ID NO: 244534 - DNA, 337 bp, Glycine max
gaacaagaggtatattgctgcccgtattttcagtcaccctgctgtcactgctgaagaaccatcgacaggtattgagcaagagtagagcttatggcacaaaaatgttccatggacacctgcgtggccccttggatgatttccagtaccacatatgcacattacagcacttgtatctatgctggcattaacattactggcatcactggataggttatgcctggtcagtgggaaattcaagttggtccatctgttggtatctctgcaggcgatgaggtgtaggctgctcactacattttggagacgattacagagatatctggcacaattgtatcaattg

SEQ ID NO: 244535 - DNA, 341 bp, Glycine max
gaaacggggcaactttaccagagaagaagaggacactatcatcagtttgcatgaaatgttgggaaacagatggtcggctattgcggcaaggttgtcagggagaacagacaacgagatataagacgtgtggcacacccacttgaagaagaggctgccacaaaattaccaacagagccatcacactaaaaaacgaagcagaaaacaaccaccaaagttggatgcggacacctcgaaatccaagcaagacgccaaactagaacaacaagaccccgttaatattcatggatcgaactctgaggacatgatgatgccactatctcctcctcactgttctatcgaca

SEQ ID NO: 244536 - DNA, 359 bp, Glycine max
aacagaagacgacagaaggggacgggccaaagtttcgtcttgaactgtcagttccagagactctggatctgttggacctacgtgaacaagctggttcagcagcataagcaagaatcaaacaaagaatgaatgtgcaaaatatgtacgttttggtgtgccagctgtgtggttttggcagattttccgtgaagcgtaagcttggaaagtgaatcatcatcatgttttgggggaagtaaagggagcgtgttgttgagagtgagagaccctttgttggtgaataaatggttgttgtggtatctatcccctggaagatgctttgtagctgttacatgacatttactacctttgtatgattaagt

SEQ ID NO: 244537 - DNA, 410 bp, Glycine max
ttaccaagtggtgtgtggtgaaacatgcactgccaaacctatgaccactgtggaatggtacttggtgttcacctgtgtagctgtggtgctatcacagttgccaaacttgaattccagtgctggggtgtcactcattggagctgtcactgctgtacggtattgtactgccatttgggtaacctctgtggcacggggtgccctaccggatgtgagctataaccctgtgaggactggaaacagtgttgaaaatgcctttagtgtgcgcaatgcattgggtatcattgcctttgctttcaggggccacaatctcatccttgaaattcagtctactatgccttcaagcgagaagcatccatcacacgtgccaatgtggaaacgggtcaaagtttcctacacgatcattgcagcat

SEQ ID NO: 244538 - DNA, 403 bp, Glycine max
gatcacaacttcatttccaaaataaaaagacttccttttttgcaattgtcatttgtcaccaaacaattgttgttagctctcacaagcaagcttcagcaacgacaatgaagaaagtagtcttacagttggacttacatggtgatagaatcaagcaaaaagctatgaaaacagcatctggcctttcaggggttgaatcagtttctgttgatatgaaagacatgaaaatgatcgtgttgggggacattggtccagtgagtgcagtgtcgaagctacgaaagtgttgtcacactgaaatagtttcagttggaccagcaaaagaggagaagaaggagaatgtggagccagcaaaagtaccagttcctctaaagctccatgaagcctatcccctttattatcagatgac

SEQ ID NO: 244539 - DNA, 417 bp, Glycine max
agggatagcagcatcatactaagcattgaattcaaaaatttaagttcattccttgtgttttgctgtcctccgcaaaagcaaacatgtcgaacacatgcggcaactgcgactgcgctgacaagactagctgcaccacaggaaacagctatggtgttattgtagagactgagaagagttacgtcgagactgttgtcatggatattccagcagctgagcatgatgggaagtgcaagtgtggcactaaccgcacttgcacggactgcatctgtggccattaatgaatatgtatgaaaatgtaagtgccatgtgtttggcaatacatatatccaaataatgtaatcttcatatgaataaatgtgtgtgctgttatcctacttcaggtctgtgtagtcatgcaatctgaatcatttcaagttc

SEQ ID NO: 244540 - DNA, 383 bp, Glycine max
gaaattgaatcagtgcccaaagaaactcgttccttcgtcctcctcgcaaatcacaactcgcaaaccacaatgcctaagcagatccacgagattaacgaatttcgtccgactgcccggacgaaggatgccaagtccgtgaaaatcaagacgagcatggatgtccttaagtttaaggttccatgccccaagtacttgtacacgctttgggtctttgaccctgcaaaagccgataagttgaagcaaactcttcctcccggtttgagtgttcaagacctgtagagctgttcagtgtggcaccatgcgtttgtttctcattttgttacctgatgctctagattttgtggcatggctttacaggtaggtgatttttacgaagacatttt

SEQ ID NO: 244541 - DNA, 370 bp, Glycine max
ggcattgtgaaatcaacagagaaacatttcactaatagagagacataagcataatattgagaaataatggagggttgtacttattgtgtgaagttgctatgccttgttgggtttgtggtgcttgtgagtactattgcaggggtggagagtgctggtgaatgtgggaaatctagcaccccagataatgaggcttataagcttgcaccatgtgcctcagcagcacaagatgagaatgctagtgtttctcagagttgctgtgctcaggtgaagaaaattgggcagaacccaagctgcctctgtgcagttctgctctccaacacagccaaaatggctggtgtcaaccctcaagttgctgtcaccatccccaagc

SEQ ID NO: 244542 - DNA, 374 bp, Glycine max
cacccaaagttcagaagggagcaggatgacctctatattgatcacaatctcagcttaaccgaagcactctgtggcttccagtttgctgtcaaacatcttgatggtatgcaactagtgatcaaatcaaatcctgaggaagtcatcaaaccaggtcaatataaagcaataaatgatgagggaatgccacaacacaataggccattcatgaagggtcgcctttacatccagtttaatgttgatttcccagactcagggtttctttcccctgaccaatgccagttactggaaaaggtgttacctcaaaagagcagcaagcatgtgtcagacatggagctggatgattgtgaggagaccactttgcatgatgtcaactt

SEQ ID NO: 244543 - DNA, 341 bp, Glycine max
ggccttggaggatttgcagctgcacttgaatcacaaaagtcttgggtgatgaatgttgtgccgtcaattgctgagaacactttgggtgttgtctatgagagaggtctgatcggcatttatcatgactggtgtgaaagcttttccacatacccaaggacatatgatcttattcatgctaatggtttattcagcatataccaggacaagtgcaacctagaagacatccttctagagatggatcgcatcctaaggcctgaaggagcaatcatcatccgggatgaagttgatgttcgtaaccaggttaagaaaattgttgggggcatgagatgggatgccaaact

SEQ ID NO: 244544 - DNA, 404 bp, Glycine max
ccgacaacgctatcaaaaaccactggaactccaccttgaagcgcaagtgctcttcaaccatgatcgacgacaacacccaaccgctgaaaagatccgtgagtgccggcgcggctattccagtctctactggactctacatgaacccgcccacaccgggtagtccctccggatccgatgtgagcgagtccagcttaccggttgcatcctcttcgcacgtgttccgtcccgtgcctagaactgtcaaggttctaccacccgtagaaaccacgtcgtcctccaatgaccctccaacttcactttctctaacactccccggtgttggtgttgttgactcaaccgaagtctccaatcggacaactgagccgattcactttacaccgccaatgccacatcggtcgaatact

SEQ ID NO: 244545 - DNA, 393 bp, Glycine max
gaccgcattattcatcttttctcttctcattcaccaattcacaattcattttatttcttaagatgccaactgacccgtcatcagtttccggcgaaatcgtgtgtgtgaccggtgccggcggtttcatagcctcttggcttgtcaaacttctcttagagaaaggctacactgtgagaggaaccgtgagaaatccagatgattcgaagaatgggcatttgaaagaattggcaagacgcaaggagaagctaactctgcataaagttgatttcttcgatattgcccccaataaagcagctcttcacgggtgccacggtgtcctccaaaccgcttctccggtcaacgacaaccctgaagagatggtggagccagcagtgaaaggaacgaagaatgtga

SEQ ID NO: 244546 - DNA, 420 bp, Glycine max
ggaccccaattcatatggtggctagctgctcaaagtgtattctatcatctatacaatcaagtgtcatacatgtctctggatcagatctctcctttgacgtttagcattggaaacaccatgaaacgtatatctgtcattgtgtcttccattattatcttccacacaccagttcaacccatcaatgctcttggtgccgccattgctatccttggaaccttcttgtattcacaggcgaaactatagagttggggaactaagattcctctagggacttgtttgttacagtccttcatgctcaaccagggacaaggaagttgattttgtaatgtgtcactgctggatttttgtaatactaagatgatctggctatcagtccatctgtagatataataataaaaataatgctgctgaggaaacatt

SEQ ID NO: 244547 - DNA, 388 bp, Glycine max
  unsure (1)..(388): unsure at all n locations
ggacgggaagaaacgcatcgagcgtggagaaagagaaggatgatgaggttaaggtggagtgtactcgtaatggtcacgttcgctgtttctctgttttggcttggacccctgcaagtcaaagcctctaattctgtttccgccttcgttcaaaacgccatctactccaacagaatcgccgttttctccaaatcctattgcccctactgtttgcgcgccaaacgcttgcttgctgaactcaatgaaaaaccttttgtggtggagctcgatttgcgagatgatgggtttcaaattcagagtgttcttctggatttgataggtagaaggacagtcncgcaagtgtttgtgaatggcaagcatattggtggatcggatgattccagtgctgccg

SEQ ID NO: 244548 - DNA, 254 bp, Glycine max
ggagaaaaacgagccaattcatcattttctctcttctctgcttcttcttgttcaaatcttaggagctgaggagaatcaatcgagagaaatatgtctggtatcgctcgtggacgccttgctgaggaacgaaagtcatggcgcaaaaaccatccacacggtttcgttgccaagcccgagactctacctgatggcaccgtaaatttgatggtctggcattgcactattcctggcaagaccgggactgattgggaagg

SEQ ID NO: 244549 - DNA, 307 bp, Glycine max
gagagaaagagagagaaagatgtcgaagcgtggtcgtggtggttcggcggggaacaagttccgcatgtcgctgggtcttccagtggcggcgacggtgaactgcgccgacaacacgggggcgaagaacctctacatcatttcggtgaaagggatcaaaggccgtttgaaccgtcttccctcggcctgcgttggcgacatggtgatggccaccgtgaagaagggaaaacccgatctgaggaagaaggtcttgccagctgtcatcgttcgccagcgcaagccatggcgccgaaaggacggcgtctacatg

SEQ ID NO: 244550 - DNA, 341 bp, Glycine max
ggttctagtgtgtgattgtttgttgttgtaactcgttcttcttcttttgttgttctgtgtttgtgtttgttttttctctcacctgaaaatgtctcgctgcggtggtaactgtggttgcggaagctcctgcaagtgcggcaacggctgcggaggctgcaagatgtacccagacttgagctacactgagtcaaccaccaccgagaccttggtcatgggagtggcacctgttaaggctcaatttgagggtgctgaaatgggtgtgcccgctgagaacgatggctgcaaatgtggaccaaactgctcctgcaacccctgcacttgcaagtgaggtgttgggagag

SEQ ID NO: 244551 - DNA, 379 bp, Glycine max
gttgaaagcgagaggcatgaagcctagagaatacagagcggtgcaagactgcgtggagaacattggtgacagcgtggaccgtctcaggcaatcggttacggagttggggcggacgggcgaggacttcgtctggcacatgagcaacgtccagacttgggtcagcgctgccctcaccgacgacagcacttgtcttgacggcttcgctggttccgccatgaacggaaacgtgaaggctcttataaaggacaggattgtccacgttgctcaagtcacaagcaacgctctcgctttggttaaccgctttgcctcaagacacccaagtgctactcaaactccttaactcttatatatttctaatatccccagcatgcctttctgt

SEQ ID NO: 244552 - DNA, 419 bp, Glycine max
gcattaaaaagattagtttccaaagcaatcgcctcacttcaatgacgggatttgagggttgtgtagctctagaagaactgtacttgagccataatggtattgcaaaaatggaagggttgtcatcgttggtcaatcttcgggttttagatgtatcatcaaataagataacttcagtggatgacattgtgaacctgacaaaattggaagatttgtggcttaatgataaccaaatagcatcacttgaaggaattgctgaggcagtctctggttcaaaagagaagcttaccaccatctacctaaaaaataacccatgtgctaagacgcccaactatactggaatcctacgggaaatcttccccaacattcaacaaatagattctgatatattttcttagaagtttcttggcttcagccttttt

SEQ ID NO: 244553 - DNA, 386 bp, Glycine max
ggttctagtgtgtgattgtttgttgttgtaactcgttcttcatcttttgttgttctgtgtttgtgtttgttttttctctcacctgaaaatatcttgctgcggtggtaactgtggttgcggaagctcctgcaagtgcggcaacggctgcggaggctgcaagatgtatccagacttgagctacactgagtcaaccaccaccgagaccttggtcatgggagtggcacctgttaaggctcaatttgagggtgctgaaatgggtgtgcccgctgagaacgatggctgcaaatgtggaccaaactgctcctgcaacccctgcacttgcaagtgaagtgttgggagagcaagcttcaagcatagatagcccttaattaggaataatgataaac

SEQ ID NO: 244554 - DNA, 373 bp, Glycine max
  unsure (1)..(373): unsure at all n locations
aacaacacaaattcaaattttgaggaattgatcaacgttaacctatttggtgtctttctgggaacaaagcacgccgcaagggtaatgatccctgctagaagaggaagcatagttaacactgcaagtgtttgtggaagcatangtggtgtagcatcacatgcatacacaagttccaaacacgccgtggtggggctcacaaagaacactgcggtggagcttggagcatttggtgttagggttaattgcgtgtcaccctacgtggttgccacgcccttggctaagaatttttttaagcttgatgatgaccgagttcaagggaattaatcaaaccttaaaggtactgatcctgtgcctaatgatgtatcccaaactg

SEQ ID NO: 244555 - DNA, 322 bp, Glycine max
  unsure (1)..(322): unsure at all n locations
ggttctagtgtgtgattgtttgttgttgtaactcgttcttcctcttttgttgttctgtgtttgtgtttgttttttctctcacctgaaaatgtcttgctgcagtggtaactgtggttgcggaagctcctgcaagtgcggcaacggctgcngaagctgcaagatgtacccagacttgagctacactgagtcaaccaccaccgagaccttggtcaatggagtggcacctgttaaggctcaatttgacggtgctgaaatgggtgtgcccgctgagaacgatggctgcaaatgtggaccaaactgctcctgcaatccctgcacttgc

SEQ ID NO: 244556 - DNA, 335 bp, Glycine max
tacggctgcaaaaaaacaacacaagggaaggcccggcggaatcagcacaaaatggcaaaatgaactccaacattgcaaatcccaccactgggtgccagaagaagctggaaatcgatgacgacctgaagcttcgagcattttgggacaagaggatctcccaggaggttcttggtgatgctctgggtgaggagtttaaaggatatgttttcaaaatcaccggtgggtgtgacaaacaaggattccctatgaagcaaggactgctgacccctggtcgtgttcgacttttgctccatagaggaactccttgtttccgtggatatggaaggcgcaatgga

SEQ ID NO: 244557 - DNA, 266 bp, Glycine max
gagagagtttcatgttcggtaatttttgatttgataatttcaaccctcaatttttttttatatatccaccaatccgcaaagtgcaaatttcgaatctttcacgtaatgggttcttctcttttccctcttcggcaccgatcgatccaatgctcttcccataggtacgatctgacacaccaagctcagagccaaattggttcgtctcggggacatgggtgctgggaaatccaaccgcgttttgcgcattgtcaaaggtcaaattcccg

SEQ ID NO: 244558 - DNA, 397 bp, Glycine max
gcggcaacggctgcggaggctgcaagatgtacccagacttgagctacaccgagccaaccaccaccgagaccttggtcatgggagtggcaccagttaaggctcaattcgagagtgctgaaatgggtgttcccgctgagaacgatggctgcaaatgtggagctaactgcacctgcaacccctgcacttgcaagtgaggtgttggagagctaaagcttcaagcagaaatggcccttagaaataatgataaaaactatatgtagtttcaaaacttcaaaattatgtagtatgtactatgttgcactctggtgttttgtgtctaaacaaacacccttagaataaagtggtcatttcttgcccttgagcaagttcaagtgttttggacttgtgatgggtgtgt

SEQ ID NO: 244559 - DNA, 352 bp, Glycine max
gtaacaaggacatcatcatggttgaccacatgaggaaaatgaagaacaatgccattgtttgcaacattggtcactttgacaatgagatcgacatgcttgggctggagaactaccccggcgtgaatcgcatcagcatcaagccccaaactgacagatgggtcttccctgagaccaacaccggtatcagtgtcttggctgagggtcgattgatgaacttgggatgcgccactggacaccccagttttgtgatgtcctgctccttcaccaacccggtcattgctcagcttgagttgtggaaggagaagagtaccggcaagtacgataagaaggtttacgttttgcccaagcacct

SEQ ID NO: 244560 - DNA, 356 bp, Glycine max
gtaacaaggacatcatcatggttgaccacatgaggaaaatgaagaacaatgccattgtttgcaacattggtcactttgacaatgagatcgacatgcttgggctggagaactaccccggcgtgaatcgcatcagcatcaagccccaaactgacagatgggtcttccctgagaccaacaccggtatcattgtcttggctgagggtcgattgatgaacttgggatgcgccactggacaccccagttttgtgatgtcctgctccttcaccaaccgggtcattgctcagcttgagttgtggaaggagaagagtaccggcaagtacgataagaaggtttacgttttgcccaagcaccttgat

SEQ ID NO: 244561 - DNA, 377 bp, Glycine max
ttgggtcacatcgacatcatcatggttgaccacatgaggaacatgatcaacaatgccattgtttgcaacattggtcactttgacactgagatcgacatgcttgggctggagaactacctccggcgtgaagcgcatcacgcatcaggccccatactgacagatgggtcttccctgagaccaacaccggtatcattgtcttggctgagggtcgattgatgaacttgggatgcgccactggacacgccacttttgtgatgtcctgctccttcagcaaccgggtcagtgctcagcttgagttgtggaacgagaagagtaccggcaagtacgataagaaggtttaccttttgcccacgcaccttcatgagaaggtggctgca

SEQ ID NO: 244562 - DNA, 197 bp, Glycine max
aaaaaaacaacagaaggggggcccactgaagttacttgtggtggaaatgcactgaagttttatccttctgtgcggctaaatatcaaaagaattgggtttgtcaagaagggtgaaaagactttaggaagtcaggttcttgtcaaggttgtgaagaacaagcatgcccctccatttaatactgcacactttgagattga

SEQ ID NO: 244563 - DNA, 409 bp, Glycine max
gacagacacacaaacaatttaccagctatacttgttccttttgaaggttagaagtgctacaatacaaacaatgacagctactcaggaagatgtgaagcttttgggtattgtgggaagcccatttgtgtgcagggtccagattgcccttaagttgaagggagttgaatacaaatttttggaagaaaatttgggcaacaagagtgatttgcttctcaaatacaaccctgttcacaagaaggttccagtgtttgttcacaatgagaagcccatagcatagtctcttgtgattgttgaatacattgatgagacatggaagaacaaccccatcttaccttctgatccttaccaaagagccttggctcgtttctggtccaaattcattgatgataagattgtgggtgctgtatgg

SEQ ID NO: 244564 - DNA, 388 bp, Glycine max
gatggtggtgaaggtgtatggtccaacctatggatcccccaagagggtcctggtgtgtctgattgagaaggaaattgagtttgaaacagtgcatgttgatctcttcaagggagagaataaggaacctgagttccttaagctgcagccatttggatcccttcctgttattcaagacggtgattatactctctatgaatctcgtgcaataatcagatacttagctgagaagtataaagaccaagggactgacttattgggaaagacaatagaagaaaagggtctagtggaacaatggcttgaagtggaagctcataactttcacccaccactctacaacttggttattaatgttctgtttgcgccattaacggggggctctttcggacaa

SEQ ID NO: 244565 - DNA, 346 bp, Glycine max
caatggggaaccaaaagaggaactacgacaactacgacgtaacgcggagcgatgaggaaaatggatttgggagagtgcctccgcactattttctggcgaagacgataatctcttcgttctcggtgcacgatcgagttgggaggactctcaaaggacgcgatctcagtaaggttcgaaacgctatttgggctactacgggattccacgactatacccttatcataggatcacatgatcataacatatgttaattaccgtattaatttactactgtgataccaattgatacgacttttgttgagaagtcagttctagagttttcattttttcgattagcatctcagtg

SEQ ID NO: 244566 - DNA, 495 bp, Glycine max
  unsure (1)..(495): unsure at all n locations
taacgtcacgtcgtcgnggactggtcttaaaattaccgggtcgacgcacgcgtccgaccacacgtccgtacagctgcgagagacgacagaaggggggtaaggataaggtaatggaattgatagataaattcatagacctatgtaggataagagaatggataaagggaatagagatgatgatagacatcatactgagaaacagaataattccgtacgggtacaactcttagttgaactaactgaaagatatgcgatctttgttgtctaatagaacaaacacgaataccttaattgagtcagtcaagatcagatctgtttatcaaagtgcctctctgattgctcaagacatttcttttcaactgagaaagataacaagatcagttcgttccatttttagtagaatagtgatcgatattccattagtactgatcaaaagggttgaagggattcgtacatgttgtcaagtcgattacaatgcgcacaaatagctagaan

SEQ ID NO: 244567 - DNA, 399 bp, Glycine max
gggcgtaccctggctgattataatatccagaaggaatccactctgcatttggtgttgaggcttcctggtggtatgcaaatatttgtgaagactctgacagggaagaccgtaaccttggaggtggaaagctctgataccattgataatgtgaaagcaaagattcaggacaacgagggtattccaccacatcagcagaggcttatttttgctgggaagcaattggaagatggtcgtaccttggcggattacaatattcagaaggaatccaccctgcatcttgtcctccgccttcgtggtggtttctgagtctgtctgttatgtccaatattagttgaattctctgttgttatgtccagtgtatgttgaactcgttggttgcagctgttatttaggtgctgc

SEQ ID NO: 244568 - DNA, 406 bp, Glycine max
gattatggatggtaccagccttgtgcatattcttgacagtgaacttgaagaacagctatttcaacttgcaagtaggtgttctgttgttctatgttgccgtgtcgctccgctgcaaaaggctggaattattgcccttgtgaagaatagaacatctgacatgacactagccattggagatggtgctaatgatgtctcaatgattcaaatggctgatgttggagttggcatcagtggacaagaaggccggcaagctgtaatggcatctgattttgcaatggggcagtttaggtttttagttcctctcttattgatacatggtcattggaactaccaacggcttggttacatgatactgtacaatttttacagaaatgctgtccttgttcttgtcctattttggtatgtg

SEQ ID NO: 244569 - DNA, 364 bp, Glycine max
gacactttccgtgtaaacagaacagagcaacactgaacaatggcgcaaccttcctcctcctcgaagcctgttgtccctctcctgaaggacgagctggacatcgtgatcccgacaatccgaaacctcgacttcctcgagatgtggcggcccttcttcgaaccttaccacctcatcatcgtacaggacggagaccccaacaggaccatcaatgtccccgaaggcttcgattatgaactctacaaccgcaacgacatcaatcgcatcctcggacccaaagcctcctgcatctcgtttaaggattctgcgtgtcgctgctttggttacatggtctccaagaagaagtacatctacaccatcgatgacg

SEQ ID NO: 244570 - DNA, 333 bp, Glycine max
gatcatcaatacagctgagctcttgatagtactcaggcaagctacggtattattatggcttatcaagtgttgctaatttgtttggtctccaccatagctgtttgcatacatactatggagaaagcaaagcaggaaaaaccttctaccaagtctacaggcccttcacataattggccacctccagcttgtgtccccaattcaccaccacgatttttacaagctctcaaaccgccacgggcccatcatgcaacttttccgtggctcagtcccttgtgtggtggcttccaacgcagatcccgtcatcgagttccttacaacccacgacatcaactt

SEQ ID NO: 244571 - DNA, 409 bp, Glycine max
  unsure (1)..(409): unsure at all n locations
agaacaggcagggcaagacccgtcttgccaaatactacgttcctctcgaggactccgagaagcacaaggtcgaatacgaggttcatcggctcgtcgtaaacagagaccctaaatacacaaatttcgttgagtttcgtacgcacaagataatatacaggcgatatgctgggttatttttctcactctgtgttgatatcactgataatgagttggcgtatttagagtgcatccatttgtttgtggaaatattggatcacttcttcagcaatgtctgtgagctcgatttggtttttaacttccacaaggtctatcttatacttgatgaattcattctagcgggtgaactgcaagaaacaagcaagaaggctatcattgagagaatgggggaacttganaaactagaatgaaa

SEQ ID NO: 244572 - DNA, 406 bp, Glycine max
  unsure (1)..(406): unsure at all n locations
ggttttcatcattgtcgttctgaacggaaaagcactggcgcagctaccccgaggcttctcttctcttctcttctctgtcgtgagtcaccatggtgagggttagtgtgctgaacgatgctctgaagagcatgtacaatgctgagaaaaggggaaagcgccaagtcatgattaggccatcctccaaagtcattatcaaattccttttggtgatgcaaaagcacggatacatcggagagtttgagtatgttgatgaccacagggctggtaaaatcgtggttgaattgaacggtagactgaacaagtgtggggttattagtccccgttttgatgtggacgtcaaagagattgaaggttggactgctaggcttctcccctcaagacagtttgggtatattgtantgactac

SEQ ID NO: 244573 - DNA, 391 bp, Glycine max
caagaatggtgatgaagaaaaccatttggtggggtggccaccagttaaatcatggaggaggaaagaactccatcagcagcatcctgcgagaggccgaattaggaacgataggattcaagctaatgaaaatcaaagtagaggaccaaactctttatatgtcaaggttaacatggaaggggtagccataggaaggaaaatcaatttgaggcttttcaattcttatcagacactcacaagcagcttgatcagcatgtttgctaaataccaaaaatttgaggaagttggagaaagttacacgctcacctttcaaaacgaacaatgggaatggctgcaagtaggacatgttccatggcaatcctttataggtactgtgcggcgtttagtgatactg

SEQ ID NO: 244574 - DNA, 385 bp, Glycine max
ggtctcgtggaagtgtaagcaagcaaaaccctagcggcgcctgctttctttgttcgtgttttgcatcaggatggagtctcaggtgaagcacgcacttgttgtcaaggttatgggacgtactggatccagaggacaagtgacccaggttagagtgaagtttttggatgatcagaaccgtcacatcatgaggaatgtgaaaggacctgtgagagaaggagacattctcaccctactcgagtctgaaagggaagcaagaagattgcgctagatggtctctttttttttggcttgcctccaaattcgaacaaaagcaatatttttcttgatatttatggtagttagtcggtgctaaaggggttatagcaccctatcttattgttttgga

SEQ ID NO: 244575 - DNA, 411 bp, Glycine max
  unsure (1)..(411): unsure at all n locations
tacccaaagaatgaaaagcttttcctggtttgtttttcatttgctgaggggccattagcatgggctttgattgtttggcgttgcagcttagttttcagttcagttgacaaaattgtcagtgttcttatccatcttttacctgaattggttttctttaccattcgatggtggaatcctgcaacctttgaagccatgcgaccagcgggaatggctggaagatctacatggccttatattgaggataaatcctatctctggatgtggctgtttctggtacccttagcagtttacattctctggcaggttctatacttcctcattgtcaacgtcttgcgccaacaacggtttttaagagatcctgaagccatgacttcctacagggaactctccanaaaagctcagaaagcaaac

SEQ ID NO: 244576 - DNA, 412 bp, Glycine max
ggaggttatctcggctgagctgaaagtcaagcctcccacactcttgaagttgaaggagaattcccatgaaagagtgatcattcttcctgttactgctctcgcgttctgcaattacctcgtcaaggaaagcatcaactgcaagaaacgtggccttcatttccggaataaggccagtcagatagtcaacccaacccaacgaagggaagaaatcaccgacgcagaaagccgagaatagtctcataatctttcttcccagttctccaaagctgcaattcacgctatcacccactgtagcatcacacttccgtccaattacacatcttgaaacaatgttgttggaagctgcaatcagcatctcactcagattcacacatggtcgatttttccctttcactacaacacatgcttcacg

SEQ ID NO: 244577 - DNA, 411 bp, Glycine max
gaggtgaaacttaaggaaatgaagtcttctttaacagcacagttaacagacgaggctgatacatctgaagtcattgagactgtgaagctgcgagttagggatgctaaattgccggacattgaggtggtgcggatcttgtgggatgttttaatggatgctgttcagtggtctggaaaaaatcagcaacagaatgccaatgcagcccttcgtcaggtaaaaacttgggcagaattgttgaatacattctgcaccactgggaaacttgagctggaactgatgtacaaagtacagatgcaatgctatgaggatgctaaactgatgaagctgttccctgagattgttagatctctttatgaccaggatgtgctggctgaagataccattcttcattggttccgaaaaggaacaaac

SEQ ID NO: 244578 - DNA, 402 bp, Glycine max
gatacttcaaaatccaaatctagcgattaattatagtttaggcagcaaattatggaatcccatgatggggagcatgctgccaaactacttagagctcaaacccacatatggaatcacatatttagcttcataaactccatgtcccttaaatgtgtggttgacttaggcataccagatatcatacacaactatggccaacccatgccactctcaaacctcattgcttcactaccaatccacccatccaaaacttgcttcgtccattgcttgatgcgaatcatgatccattctggcttcttctctcaacaaaaccatgacttggagaatgagctagaagccaagtatgtgctaaccgatgcatctgtactattgcttaagaaccatccgctgagtgtgacacct

SEQ ID NO: 244579 - DNA, 360 bp, Glycine max
gagaggaacaccaggtatgttgatgctgttcttaccattcccaaaggaacattgttccccatgtgtggtatgaatctggcattcgatcgtcagctgattggacctgcaatgtattttggactcatgggtgatggtcaacctatacgacgatacgatgatatgtgggctggatggtgtgttaaggttatctgtgaccatttgggcttgggagtgaagactggccttccatacatccggtacagcacagcaagcaatccttttgtgaatctcaactaggagtacaagggcattttctggcaagaagaaatcattccattcttccacagtgccaccattccaaaagaatgcacttccgtccaa

SEQ ID NO: 244580 - DNA, 410 bp, Glycine max
gaaggaagggagggaagaatagaatgggatctggaagtggaaaacacactggagagttcgtcaggagaagggatgcatggaggaagcatccgatgctcaccaatcagctccgccacgccacccctggccttggcatcgccgtcgtcgccttcggtatctacctcgtcggcgaacaagtctacaataggctctatgctcccgatcctcattcgatttctcacgtgaaagccggggatcaccactaaacgtttggacggacgcactccattccatcatcacttaataagcttgctagcatgttctcgcagcctttaatgtttaaatttcagaccgtgttcgcttctttggcactcactatgttgtcctgtatgcctacattttatgccttcaatttgcattcacaatgaaac

SEQ ID NO: 244581 - DNA, 412 bp, Glycine max
gagaagaagcagaaagagaagcattagcaaaagcaagaagaactagtctaagcagaaatggcctcttcagtgatggcatctgtggccctcaaacctgcccctttcactgttgagaagtcctcagttagaggccttccctccctctcagggaactcctcttcattcagagttgtggccagtggtggcaagaagatcaagactgacaagccttatggaattaatggtggcatggctttgagggaaggagttgatgcatctggcaggaaaggaaagggaaagggcgtttaccagtttgtagacaaatacggtgctaatgtcgatggttacagtcctatctacgacaccaaggactggtctccaaccggtgatgtctacgctggcggtacgactggcttggctatctgggctgtga

SEQ ID NO: 244582 - DNA, 316 bp, Glycine max
acgacgggggatgggggttccatttctcaccagcttctgcttgttcggactctcatcgctcctctgctccgcatttctcatgggcacggtcaagatcgggatcaacgggtttgggctaattggccgtttggtagcgagaatggctctgctgatagacgatgttgatctcgttgccgttagctactctttcatcatcaccgattacagtgtcatacatgtttcagttcacattgttcatgggcactggcatcatcacgatgtcacggttttcgtcgagaagtcccttctcttcggtgactgccagtcactatttttg

SEQ ID NO: 244583 - DNA, 454 bp, Glycine max
  unsure (1)..(454): unsure at all n locations
ggtcgacgccgttatgctacaaaaacttcaacacgtccagaccgtcgtcaaaggtgccgacaatctccatctggctgtgctctttaattagccagctcagttcctgttgtgccaggaattcgtcttcaacaatgatgactttcacaatatcactccggctcaaagcaataacgtagcctgtgaggcgactggggtgcgttggttaggaatgtaaaacgcaatttccgtccccggctccaggcggcggatatgcagcccctcgccatacaataacttcacgcgatgatggacattcagcanggcaattttattgcccggcatttcattcgcttcgacncgctcaatcanctttggattcgatgcgtgcccggtatctcgcaacgcaatgcgtacccgatttccgcactctgcaacgctgatggtgacaacgcctttacctttgcaaggctgaata

SEQ ID NO: 244584 - DNA, 343 bp, Glycine max
ggagggagcccaaatactgtgcctgatcccagggacagtcccaactatggtggtcctgaaagtcccatgcatgaaagataccacagccagtcaccccctgcagaagaatgattgcagtctttgatgaagaagccggaagggccaactgattgtagtactgtttcatggctggactaaatttcatttcagcaatttgttttagtgtagtagtgataaagctctgaaacttgtgttgttgtgacaacttagtccttttttgtttagttagtttcatatttatttgtcagcttagtattgttgaatccttgtttacagttaaaagatggtactatatctttttgac

SEQ ID NO: 244585 - DNA, 396 bp, Glycine max
gagttgagatttgagaattgactctgagaatcgagaaaatggccggtttaccagcgaggctccgtctccaacccaccgacgtcaaagccgccgccttgtggggcgttaccgccgccactggcgctcactacctcattcagccatggggatggttgaagaagacattcttggagaagccagaacctgagcaaaaatgagttggcttctgagaagagtggtttgaatttttggatcatgccaaggatgggtaacagtcgaatattgttaatttctgctgaggtcttctcgcacctgtgctttatgttatgaatttggatactaaattttaatgttctgcgctgatcgtttttaacggagattttgctttaaatcaacttctcgcaccgtgttgaacga

SEQ ID NO: 244586 - DNA, 412 bp, Glycine max
ggcgtacacagcctcaacaaccctaacgcgtgtagagcagagagagacgcagccatggggcgaagacccgcgaggtgttataggcaaattaagaacaaaccataccccaagtcacggttttgccgtggtgttcctgatcccaagatcaggatttacgatgttggtatgaagaagaagggtgttgatgagtttcctttctgtgtccatctggttagttgggagaaggaaaacgtttctagtgaggccctggaagctgctcgtattgcttgcaacaagtacatggccaaatttgctggaaaggatgctttccacttgagagtcagggtgcacccattccatgttcttaggatcaacaagatgctttcgtgtgctggagctgataggctccaaactggaatgagaggtgcttttg

SEQ ID NO: 244587 - DNA, 414 bp, Glycine max
ggagaacaaaacaagtgtttcgaatagattatcctaagtctttgggaatagtgctgcaatggcttcaagtcaggaggaggtgacccttttgggagctactggaagcccatttgtgtgcagggttcatattgccctcaagttgaagggagttcaatacaaatatgtcgaagaaaatttgaggaacaagagtgaactgcttctcaaatccaacccagttcacaagaaggttccagtgtttattcacaatgagaagcccatagcagagtctcttgtgattgttgaatacattgatgagacatggaagaacaaccccatcttgccttctgatccttaccaaagagccttggctcgtttctggtccaaattcattgatgataaggtttttggtgctgcatggaaatccgttttcacagc

SEQ ID NO: 244588 - DNA, 404 bp, Glycine max
  unsure (1)..(404): unsure at all n locations
gatgaattaaagcgtcagaaggaagaagagcttgctcttctttatgctgatccttttgatgttgaagcacaaaagaagattgaagctgccatccgccagaaagggattgatgaaaattgggctgctgcattagaacataatcctgaagcttttgctagagtggtcatgttgtatgttgatatggaggttaatggtgtcncattgaaggcatttgtggatagtggagctcagtctaccattatatcaaaaagctgtgctgagcgtcttggattgttgagacttttagattagcgttacagaggaattgctcatggagttggccaatcagaaatattgggtcgtatacatgtagctccaatcaagattgggagtatattttacccttgctcattcctggtgctgga

SEQ ID NO: 244589 - DNA, 357 bp, Glycine max
  unsure (1)..(357): unsure at all n locations
acgcgtcaaaagacgacagnaagggggaaaaaatgaggaaagttgaagtattatctcaagttagaagaagagagacaacagaaattgcatgatgacgaagaagctcggaaacgtgaagatgctgataggaaaaagaatgaagaagaggaacgcttgcggaaattggacgagatagctgaaaagcagacgcagagagaaagggaacttgaagaaaaagagaaactcacgagagaagcattgttgggtacagctgctgctgaatcagctcctcctgcccgtccattggaatcgggatctgctgctcctgctgcagccgcagctgccgccgcagctccaacatcactgaaatatgtccct

SEQ ID NO: 244590 - DNA, 405 bp, Glycine max
tacggtcaggaattcccgggctcgaccacgcgtcagaccgctgcgaagaccacagaagggggaaaaagagaatggagaaagaagaagatggcgtccaaccgaacggtgccgttttggaaggcaaccgggaatgcattcatcacatactcaaacaaatgccccaatccggtcaagaaattgcccaaaggaacccaaaaaggttaaaccaaccccccttaaaaaggccaatttggctcccccaaaatgggtcaacgccaaccctgaaaaacctactattcgttcagacaccccagagcagtgatccggaataattggaagctataaatgcataaatctttgagatctggaagttcattgtcattttgaacctttctgtgatgtttaaatcctttgcctccttttttt

SEQ ID NO: 244591 - DNA, 226 bp, Glycine max
cggggagggcgatgaagccacatagagacacaatacagagtgagttgttgctccttcgccacaactctctgccaacatgggtatctccagagattctatgcacaataggcgtgccactggtggcaagaagaaggcctgtaggaaaaagagaaagtatgagcttggtccccagcctgctaaaactaagctgtcaagcaacaagacagtcaagaggatccgtgttaga

SEQ ID NO: 244592 - DNA, 390 bp, Glycine max
gaggcacgcgtcagtccagactgtcagtgcgctgagagagggatagagagcggggagggtgatgaacctacagagagatacaatgcagcgtgagttgttgctccggctccacaattctctgtgaacatgggttttgctagagattcgacgcagattaggcgtggcactggtggcaagaagaaggcctgtaggaagaagagaacgtctgagcttggtcgacagccggctaacactaagctgtcaggcaacatgacagtcacagaggatccgtgttagaggtctacatgtgacatgaagggcattgtgattggatactggaaagtacgcgtgaggaagtgaagctgtacgtcgcagtactcgtgtactacatctggtttacaaaggctcaac

SEQ ID NO: 244593 - DNA, 279 bp, Glycine max
ggatgttcttgctgttaaacaagcttgcaaatttgcaaaggaacatgctttgaagaatggaccccttattcttgaaatggacacttatagataccatggacactctatgtctgatcctggcagcacataccgtacacgtgatgaaatttctggtgtgagacaggagcgtgatccaattgagagagtaagaaagctggtattgtctcatgatattgctgctgaaaaggagctaaaagacattgagaaagaagtcagaaaagaatttgacaaaccaattgc

SEQ ID NO: 244594 - DNA, 302 bp, Glycine max
ggccgaatgtgtctctccgcagcagccacacttcttcgccgtttcagctgaagagccatccgcaggtaagcaatggttaagcataataatgttatccccaatgggcacttccggaaacactggcaaaactatgtgaagacttggtttaatcaaccagcccgaaagaccataagacggttggctcggcagaagaaggctgtcaagattttccccaggcctactgctggatctctcaagcctattgttcatggccagactctgaaatacaacatgaaagtcagagccgggagaggattttcact

SEQ ID NO: 244595 - DNA, 378 bp, Glycine max
acttctgagatatctgaaatagtgcatcattatcgccaagcagctattaatgcaattcgagcaggttttgatggaatcgagattcatggagcacatgggtatctcattgatcaattcttaaaggatgcaatcaatgatataacagatgaatacggtggaccactagaaaaccggtgcaggttcttaatggatgtagttgaagctgttgtcactgccattggagcggaaagagttgctatcagaatttcaccagcaattgatttcaatgacgcctttgactctgacccacttgggctacgcttaacagtgattgaaagactcatcaatttgcagaaacaagtgggcacaaaactcgcttatcgtcatgttactcaacct

SEQ ID NO: 244596 - DNA, 376 bp, Glycine max
ggttctggcagttcgcagaaacgtgtgttcctccgtcatggccctggcgcgtcaacattcctttcacgtcttcgcgcgtgccgtggccgaattgcgcggcggcaatgccaacgtgaagttcgcctggtacggtgcgtccagtaaggaagagataaatgacatcattcagcacggtttcggtcacgctcacagtaacggcctgcgtctctctccacaagattctccacttgaaagtgtgaagagttccgttgtggacgaagacggtttgaggcacttgttgctgtgccgcgttatcttggggaagacggaggtggttccacgtggctcctaccgatgccgttcgagttctcaagagtttgattctggggtggatgat

SEQ ID NO: 244597 - DNA, 397 bp, Glycine max
cagatgccagagacgagagaaagggaaccatttttcgttttccttacattatttcatcgaagcaaacaaaagatacgatcttatgatgaggggaagaacaagacatgaatgcgatgatcaatctcgaactttgtaccagatcgccgcgctcgttctcaacctccttcgctcgcctctgtcgtccttgacattctctgatgaagttccgccgttggcggcgtcacggcatcacgggctgggtcagatatcgccggcgggattcgcctcattgctgttgggaatatcgctggcgttgatgctttgtggatcggtgacgttcttcatcgggttcgtgttgatgccatgggttctgggattggtcatgctcctctacgtcgccggaaatctctcaagcctc

SEQ ID NO: 244598 - DNA, 384 bp, Glycine max
  unsure (1)..(384): unsure at all n locations
ggagaacaaaacaagtgtttcgaatagattatcctaagtctttgggaatagtgctgcaatggcttcaagtcaggaggaggtgacccttttgggagctactggaagcccatttgtgtgcagggttcatattgccctcaagttgaagggagttcaatacaaatatgtcgaagaaaatttgaggaacaagagtgaactgcttctcaaatccaacccagttcacaagaaggttccagtgtttattcacaatgagaagcccatagcagagtctcttgtgattgttgaatacattgatgagacatggaagaacaaccccatcttgccttctgatccttaccanagagccttggctcgtttctggtcaaattcattgatgataagtttttg

SEQ ID NO: 244599 - DNA, 300 bp, Glycine max
gagagtagagaatggaacgtgatggtggggagaggaaaagaggcgcacgtttatgctgcgtgtgcaagaaatcagaagcttcggtgaagaggccgaaaaccctagagcagatatgcagggagtgcttctacgatgcttttgagtctgagatccatcacgtaattcttgagaatcagctcttcagccctggtgaacgcgtcgcaatcggcgcttctggcggaaacgattccaccgtccttgcttacgtcctctccaagctcaaacgcctccacaattaatgcctccatctcttcctcctct

SEQ ID NO: 244600 - DNA, 260 bp, Glycine max
gaagaaaggctaggattcttcgcgtttgccatgtcgacgactttttagaccaccgcagacgcgcatccagtgtttctccaagaacgctacatcttcatgatggaaactgcttataacgcctatcgcagattgtcgtatctggattcccatgcactggatgcgttacccccattatcagttctctcgccggctttctcggaactcaccttttgggccgtaggcctgtaccgtggaatatcaggctttttgttttaatttct

SEQ ID NO: 244601 - DNA, 364 bp, Glycine max
ggtaaaggcagtgatgtaaattttgaaggttaatggtgatatttttgctgcacataaattggtactagcagctcgttcacctgttttcagagcacagctttttggtcctatgaaagatcagaatacccagcgtattaaagttgaagacatggaggctccagttttcaaggcattgcttcattttatatactgggactcactaccagacatgcaagagcttactgggttgaactcaaaatgggcatcaaccttgatggctcagcatcttctagcagcagctgatcgatatggcttagagagacttaggctgatgtgtgaagcgagtctctgtgaagatgttgctactaatactgtggctaaaact

SEQ ID NO: 244602 - DNA, 247 bp, Glycine max
gaagcaacatctagagatcaagtattcataccttgatgttgtcggcagaactgtggtggttctagaaaaaagaaatgcagttcctgagcataatactcctttccaggtatactacaggtttaaccccatattcatgcttgctgagccattgatgctggtatctgcatttttcttgttttttgtggcttccgtggcatatcttcacattgatctttccatacgcaagtgatgaacacctagctagttt

SEQ ID NO: 244603 - DNA, 269 bp, Glycine max
aagacagcggaagggggaattccaagccaaataagattccaaaccaaaaaagaaagcgttgtgaaaaatggccggagaaggaacagttattggggtccaaagcctaaaagaattgaaagaacatctcaagaagggagaagagtccaagaaattgaatgtggtggattttactgcatcatggtgcggtccatgccgtttcaatgccccaattcttgcagagtttgctaaaaagttgcccaatgtcaccttcctcaaagtggatgtggatg

SEQ ID NO: 244604 - DNA, 227 bp, Glycine max
ggacagacaaacaaacaatttaccagctagacatggtccttttgaacgttagaagtgctacaatacaaacaatggcagctactcaagaagatgtgaagcttttgggtattgtgggaagcccatttgtgtgcggggtccagattgcccttaagttgaagggagttgaatacaaatttttggaagaaaatttgggcaacaagagtgatttgcttctcaaatacaaacct

SEQ ID NO: 244605 - DNA, 239 bp, Glycine max
tggcgatgccagagatcatgtctgaggaatcaaatcccgagttggcattgtggaagcgttgggtggtagctcaggcagtcacaatctctgtcgggatgatatcttatccgttatacactgtccgtaggacgatgatgatgcaatctggcattgaacagccagtgtagaatagcactctggactgctggaggaagatctatagcacagaatggttggcttcattttaccgtggtgcagtt

SEQ ID NO: 244606 - DNA, 395 bp, Glycine max
gattgtgaaattaatagagagacataaaaaataaacatatattgagaatggagggttgtgtgaagaagttgctatgccttgttgggtttgtggtgcttgtgagtactattggtggggtggagagtgctggtgaatgtgggaaatctacaacccctgataatgaggcttataagcttgcaccatgtgcctcagcagcacaagatgagaatgctagtgtttctcagagttgctgtgctcaggtgaagaaaattgggcagaaccctagttgcctctgtgcagttcttctctctaacacagccaaaatggctggcgtcaaccctcaagttgctgtcaccatccccaagcgttgtaacctggttaatcgccctgttggttacaagtgtggaccttacact

SEQ ID NO: 244607 - DNA, 493 bp, Glycine max
  unsure (1)..(493): unsure at all n locations
gttaacatcaacgcggcgaggtataggtcaggaattcccgggctgacccacagcgtcagcggacgcgtgggcggctgcgagaagacgacagaagggtacggctgcgagaagacgacagaagggtacggctgcgagaagacgacagaagggtacggctgcgagaagacgacagaagggtacggctgcgagaagacgacagaagggtacggctgcgagaagacgacagaagggtacggctgcgagaagacgacagaagggtacggctgcgagaagacgacagaagggtacggctgcgagaagacgacagaagggtacggctgcgagaagacgacagaagggtacggctgcgagaagacgacagaagggtacggctgcgagaagacgacagaaagggacatctcatgtcacgcggggatacgctctgagtttacgcaaatgacaaaanaggtagcaaataaaaaaacaggggccccctaaagagtatcaatctttt

SEQ ID NO: 244608 - DNA, 300 bp, Glycine max
  unsure (1)..(300): unsure at all n locations
ggcactcgatcagtcacacactgagttcgagtgtagttgtttatgatcacaaagatggtgagaaccccatcttgtgacaaaagtggaatgaggaaaggaacttggactccggaggaagatatgaagttaattgcttatgtcactagatatggttgctggaattggcgccaactccccaagtttgcaggtcttgcaaggtgtgggaaaagttgtagattgagatggatgaattatctaagaacanacctcaaaagagggaacttcactcaagaagaggaagaatgcatcattagaatgcac

SEQ ID NO: 244609 - DNA, 311 bp, Glycine max
ggttgaatgggccttgaaactgaagggtgtaaagtatgagtatattgaagaagatgtctacaacatgagcagtctagttatggagttgaacccggttcacaagaaggttccgattcttgttcatgcccagaaaccaatcgctgagtcattcaccattcttgaatacattgatgaaacatggaagcagtatccactattacctcaagatccttatcaaagagcacttgctcgcttttgggccaatttcggtgagcaaaagcttatgagagcagcacgaaaagcaatgacaaccagccgggatgaacgcgcaa

SEQ ID NO: 244610 - DNA, 228 bp, Glycine max
gacatgctgattgtcacaattgtcttctgttactctgttattgctcctgtgataatcgcatttggtgctctatattttggcctaagatggcttgttttgccaaatcaggcactcaaagtctatgtgccaacatttgaaagttatggaagaatgtggccacacatacacaaccgtattctagcatccttgatattataccaaattacaatgtctgggtactttgggacg

SEQ ID NO: 244611 - DNA, 283 bp, Glycine max
ggtagaatttgttgttaagaatacagaggccattcaagctaaggctggaagatacaaaaaccctgaagaaaacgccttcttcccagaaaatttaccaccatcaattgtgccatcttactccttcaaacagtttttgcatcctggagctgcttcaattaacattaacaagtccatctggaaaatgtatttccaagagttacttccattggttgctacttcgggggatgatggaaactatgcacaaactgcagctaatgatctttcattagtgcaggccatctct

SEQ ID NO: 244612 - DNA, 333 bp, Glycine max
gggaacaagtgggccaccatcgcgcgcttcctcaatggccgcaccgacaacgccatcaagaaccattggaattccaccctcaagaggaagtgctccgagcctctctccgagcctcggcctctgaagagatccgccaccgtttcgggtagtcaatccggatccgatttgagcgattcgggtttacccattattcttgcaagaagcgtgagcgtgacggtagctccctctaaccaccttgcggaaaccgcgtcttcttcagtaactgatcctgccacgttattgagtttgtctctaccgggattcgattcgtgcgatggggctaataatgggcct

SEQ ID NO: 244613 - DNA, 509 bp, Glycine max
  unsure (1)..(509): unsure at all n locations
aggagtccttgggngtaccgcaaacgtgtagcgtctagtgccggttaagaattaccggctcgagccacgcgtcagtacggctgcgagaagacgacagaagggatcatactcaaaataagagtttgatcctggctcagaaggaacgctagctatatgcttaacacatgcaagtcgaacgttgttttcggggagctgggcagaaggaaaagaggctcctagcgtgaaggttgcttgtctcgcccaggaggtgggaacagttgaaaacaaagtggcgaacgggtgcgtaatgcgtgggaatctgccgaacagttcgggccaaaaaaaaaaaaagtaaataaatcaaaaaagcggccgctctagaggatccaagcttacgtacgcgtgcatgcgacgtcatagctcttctatagtgtcacctaaattcaattcactggccgtcgttttacaacgtcgtgactgggaaaaccctggcgttacccaacttaatcgccttgcagcaaaatcccctt

SEQ ID NO: 244614 - DNA, 255 bp, Glycine max
ggtagtaagtgaggtgaggtgccaaaatggtgaagataactcttggtactttcgatgactcttttggtgttgcctctcttaaggcttatttggcagagttccatgcaactctgattttcgtgttcgctggtgttggttcagccatcgcttacaacgagcttacaaaagatgcagccttggattcaacggggctggtggcagtagctgtggcccatgcatttgcactgtttgtaggtgtctccgtcgcagccaaca

SEQ ID NO: 244615 - DNA, 368 bp, Glycine max
gacataagggggtgatttgaaagataagccatggtggcaaaagatgcaaactcgtgaagagttggttgaagcttccgctatcctcatatggattgcttcagcccttcatgctgctgttaactttggacagtatccatatggaggtttaatcctaaacaggccaactattagcaggagattcatgcctgaaaaggggtctcctgaatatgatgcgttggctaagaaccctgagaaggagtttttgaagactattactggcaagaatgagaccctcattgaccttacagttatagaaatcttgtcaaggcactcatctgatgagttctaccttgggcagagagatggtggtgactactggacttctgatg

SEQ ID NO: 244616 - DNA, 63 bp, Glycine max
ggagctggctgtggtacatgttatcaggtaaagtgcctaatgccaaaattatgcgatgtgaat

SEQ ID NO: 244617 - DNA, 386 bp, Glycine max
gagaggaacaccaggtatgttgatgctgttcttaccattcccaaaggaacattgttccccatgtgtggtatgaatctggcattcgatcgtcagctgattggacctgcaatgtattttggactcatgggtgatggtcaacctataggacgatacgatgatatgtgggctggatggtgtgttaaggttatctgtgaccatttgggcttgggagtgaagactggccttccatacatctggcacagcaaagcaagcaatccttttgtgaatctcaaaaaggagtacaagggcattttctggcaagaagagatcattccattcttccaaagtgccaccattccaaaagaatgcacttctgtccaaaaatgctacattgaactctccaagca

SEQ ID NO: 244618 - DNA, 316 bp, Glycine max
gactacacgaaatttacaaaaaaaaaaaaaaaaaaaaaaaaaaaaaaaaaaaaaaaaaaaaaaaaaaaaaaaaaaaaaaaaaaaaataaaaataaataaaaaaaaaataaaaaataatttaaataaaattaaaaaaaattaaaaaaaaatcgggtctctttaaaggtttcaggtttacttccgtttcaatccaagttcaaacttcttcaatagtttccctaaatttcatttcagggtcgttctttttaaatttttgtaactggaaatccccggcttttccccattttaatccctttgaacaatatccccttttccc

SEQ ID NO: 244619 - DNA, 380 bp, Glycine max
  unsure (1)..(380): unsure at all n locations
ggaatcaactttggtgtatatataaaaacaagagagagctagcagtgcacgctttcaacatccaaaacaacagagagtttttggctttagaagctgaacgaatatagttatcacaatggggagagctccatgctgtgagaaaatggggttgaagagagggccatggactccagaagaagatcaaattctcatcaattacatcaacacttatggccatgctaattggcgtgcactgcccaaactagctgggctattaaggtgtggaaagagttgtagactccggtggataaattatctgagaccggacatcanacgggacaacttttacagagaagaagaggacactataatcagtttgcatgaaatgttgggaaacagat

SEQ ID NO: 244620 - DNA, 365 bp, Glycine max
gattggaaagatatcaaagctaaggctaggtagctagctagtactaaaaagctagattgatcgatcatcttaatttccacgggaaaaaaagaggtgataatggaatcatcacttgttgaagacattgtgattgtgggagctggaattgctggtctcgcaacatccttggcacttcacaggctgggtgtcccaagtttggtgttagaatattcagatactttgagggtcactgggtttgctttaacaacatggactaacgcttggaaagctttggatgctcttggcgtaggaaccattcttcgtcaccaacatgtccagctaaaagagaatgtgactaaatctttgattttaaggcagcaaacatc

SEQ ID NO: 244621 - DNA, 395 bp, Glycine max
gaacacactcatccaaacaaccttcttcctttttctgtgagcctttctttcaggttcttaacttgatcagtgtgcagtgtccaaatcataagggtagttgcaaattgcaatggctaagcatgatgttgagggtggttccttcgctgcaaaggactaccatgatcctcctccagcaccgttgattgatgctgaggaactcacacagtggtccttctacagggctttgattgctgagttcattgccacaatgctcttcctttacatcacagtgctcactgtgattggttacacgagccacagtgatgtaaaggctgggggtgatgtgtgtggtggagttggcattcttggcattgcatgggcctttggtggcatgatcttcagtctggtgtactgca

SEQ ID NO: 244622 - DNA, 391 bp, Glycine max
  unsure (1)..(391): unsure at all n locations
cggctcgagccacgcgtcagcccacacgttcgccaaaaaaaaagggatcacaaactaaatactggtttccaaccaaaaatggtaatttggccttccccaaccccaatcgtcaagggtgcttttgcttttgaagaaggaaactcctccaacgttgctccgggaacactctacaaagctctgacaaaagatgctgggactatcaatccaaagattatttggggcatccaaactattgaaatcgttgaaagaaatggaggaccgggnaccgtcaagaagataacagctagtgaaggttgacannnacagtttcgtgctgcanaaagtggatgcaattgacgaggctaacttggtatacgactacagcatantgggaaggacggggttgcatgaa

SEQ ID NO: 244623 - DNA, 353 bp, Glycine max
ggagaaaatggcaagaatatcaaattggtctcttgtcttcctcctcatctctacactactctacatagagcccagcctctcaagcccaagcccaagccccagcccaagcccgttcataaaatcctcctgcagcagcacccagtacccagccctctgcgtctcatccctctccgtctacgcctccagcatccaacaggaccctcaccaactggttcagacagcactctccctctccctgaaccgcacccaagccaccaaaaccttcgtggctaactgcaacaaattcagaggcctgaaacccagagagcacgctgcactcaaggaccgcgccgaggaaatcagcgacagcgttg

SEQ ID NO: 244624 - DNA, 397 bp, Glycine max
gggggacagtttcgattgtctctctctgacaccctacgatttctgcggcagcatcattccacacgcagagtcagtgtcgttcttcttctaattcatcgctcccgatgaaacgagggtaccaggaatccccttcaagctcgttaggtccacctcattccagagctagacatgatcctcaaggtggtgcacactttgttgaggatgaaagcacaaagatttttgctcggaaagtagcagatcattatagtgcgagattcaaccagactttggaagaacgggaggctagtccgataattcatttgaagaaactcaataattggattaaaagcgtcttaattcagctttatgctcgtcgaggagatgcagtacttgacctcgcctgtggcaagggtggtga

SEQ ID NO: 244625 - DNA, 356 bp, Glycine max
gattcccaggatttctcattctcccgttcctctccgaaccctcgatcactctcacgcgctcctatattcgctcctccagcgtcgctctctcgaacaaccacaacaccatcttcatcacatggcaaacgcagcatctggtatggcagtccatgatgactgcaagttgaggtttttggagctgaaggcacataggacacaccgtttcatagtttttaagattgaggagcagcagaagcaggtcattgtggagaagcttggtgagcctgcccagggctatgaagatttcactgccagccttcctgctgacgagtgccgttatgctgtttatgattttgagtatctgactgaagggaatg

SEQ ID NO: 244626 - DNA, 225 bp, Glycine max
gaacgggatcggaggctaatctattaggcgctgttctctcgtcttctacaaaattttctgttcgatctcaaccaaggttgttccttccaccgccatgagtttcatcttcggaaagcgaaaaacacccgcagagcttctgcgggaaaataagaggatgctggacaaatcaatcagagaaattgagtgcgaacggcaaggcttgcaaacgcaagagaagaaattgat

SEQ ID NO: 244627 - DNA, 353 bp, Glycine max
ggtcctgttagcgaagtctacgtgcctgccagcgaaggagtggaagcttatatttggttactggcaaaggcttatgttgttgtgaatgatgcatgctaccatcaaatcattagccattggctaagcactcatgcaattgttgagccatttgtcatagcaacaaacaggcaactgagtgtggttcaccctatttacaaacttctgtttcctcactaccgtgacaccatgaatattaattcacttgcccggaaagccctggtcaatgcagatggtattatagagaaaacattcttgtggggtaggtactctatggaaatgtccgctgtcatttacaaggactgggttttcactga

SEQ ID NO: 244628 - DNA, 373 bp, Glycine max
attttcatgcagactttcatgattccagggactgtgttcatgtcattgcttgctggagcactctttggagtctttaaaggtgtggctctggttgtgttcactgccacagcaggagcttcttcatgctatttcctgtctaaacttattggacgacctattctctcctctctgtgacctgaaaagttgaaattcttccaaacccaggtggctaaaagaagaaagggtttgttgaactacatgctttttctaagactgactccgaccctacccaacacatttattaattttgcttcaccaattgtggatgtgccttatcatattttcttcttggcaactgttattggactaatacctgctgcttatgtcactgtca

SEQ ID NO: 244629 - DNA, 360 bp, Glycine max
agggataagaaagaagatcaaaagaaaaaagagaaacaaatggcagcactgggtggctttaccgacatcaccggagcacagaacagcatcgatatcgaaaatctcgctcgctttgctgttgatgaacacaacaaaaaagagaatgcagttctggagtttgtgagggtgattagtgcaaagaaacaagtggtttctggcaccttgtactatatcactttggaggcaaatgatggtgtgacgaaaaaggtttatgaaactaaggtgttggagaaaccatggttgaacaccaaggaggttcaggaattcaagcccatcactgttgctgttaatcctctttcggtgacggtctagcacatagct

SEQ ID NO: 244630 - DNA, 383 bp, Glycine max
agcccaagcgtccggccaggcgttcagagaccccttggcgggctgcaaaatgccgaaagacgggaaaaaagcccggctttcaaaccctagcaaccttcatcaacccccgaactccgaaccccttcatcatccaggtcaaggataaaggttagggagcccaaggaggaaaatgtcaccctttggtcaaaaccgttatagacggtgaacatgtttccggcgtggctcgcatctttgcctctttcaatgaggaccttcatccatgtcacggaatttgtctgggatgcgaaacccttgttcgcatcactggtgggatcacagttaaagctgacatagatgaatcatctccatatgctgctatgcatgcagcacaggatgttgctgcc

SEQ ID NO: 244631 - DNA, 346 bp, Glycine max
aaagaatatattgagaaatgggagggtccagtggtagcaccatcacgccacaacctcaagctttttgctgacaaggagacatatgaatcaatggatgcattagcaaagcttcaaaacaagactgctcatcagttggccatggaagttatccgtaattatgttgcttccaaccaaaatggaaaaggcgaatgatttcatttttacttaacgaaggaagatgtatgtgatgttgctttatggttgacaggaatggtggataggcaactgaacacaactctgttgttactgtgtggtaactcgggttcgactaaactaatgtttgggtttttgtttttttatctgaaac

SEQ ID NO: 244632 - DNA, 345 bp, Glycine max
gacttgtcacaacttcatttccaagatgaaaaccatctcctaattaatattccaacaacccaagttacctgttgaccctcctcagccaaacaattcttgtttctagctctcacaagcaagctctaagaacaatgaataaagtagtgttaaaggtggacttacatggtgatagaaccaagcaaaaagctatgaagacagcatctggcctttcaggggttgaatcagtttctgtggacatgaaagatatgaaaatgatcgtagtgggggacattgatccagtgagtgcagtgtccaagctacgacagtgttgtcgcactgaaatagtttcagttgggacagcaaaag

SEQ ID NO: 244633 - DNA, 354 bp, Glycine max
gggggcaacaccaataacgatgataacagcaaggattccaaggctgctggcgacaagagattcaaaacgctgcccccagcagagtctcttcctaagaatgaaaccattggaggctacatccttgtttgcaacaatgataccatggctgagaatctcaagagacaactctttggtctgcctccacgatacagagattctgttcgggccattactccggggttgccccttttcctttacaactattccactcaccaactccatggaatctttgaggctgcaagttttggagggtcaaatattgatccatcagcttgggaagattagaaatgccctggtgaatctcgtttccccgct

SEQ ID NO: 244634 - DNA, 376 bp, Glycine max
ggcattgtgaaatcaacagagaaacatttcactaatagagagacataagcataatattgagaaataatggagggttgtacttattgtgtgaagttgctatgccttgttgggtttgtggtgcttgtgagtactattgcaagggtggagagtgctggtgaatgtgggaaatctaccaccccagataatgaggcttataagcttgcaccatgtgcctcagcagcacaagatgagaatgctagtgtttctcagagttgctgtgctcaggtgaagaaaattgggcagaacccaagctgcctctgtgcagttctgctctccaacacagccaaaatggctggtgtcaaccctcaagtttgctgtcacatccccaagcgttgca

SEQ ID NO: 244635 - DNA, 325 bp, Glycine max
gttgtgggagaagaagatgcaatttggatgctaaaattaatcctcccttacttgaatgagttcctagcgaaactcaaagccttgttttctggagatccaggtaccacaataaagttggcagtgttgctcgttgttttggccagatgtggcagctacataaccgtttggaagatggccaaatttggcttcgttggagtttatactgtaccaaagatatgctcttcgtattctgcacagttaactgaatatggaaatttttggattcgtcgattccgggatgcatgggattcatgcactcacaagaaagccgtggctcttggcatct

SEQ ID NO: 244636 - DNA, 318 bp, Glycine max
tgggggcacacgtgaagcttcatggactttggtaaactccctacactttgatggtggtatggaccttacagtttaaggatagaccagatccacacatataagaacaccgctacaatcagagtcttcaacttcgtgaatacaacccattagactctaaaactccagtgcttgtccataatggaacacccctaagtgagtccatgcttactgttgaatacattgatgagatctggtcacataagtcactacgtcctgctgatccctacgagagagctctggccatgttttcggtcaaatatgctgatgatgaccagtttt

SEQ ID NO: 244637 - DNA, 364 bp, Glycine max
ggagcggaagttgtctcagatgattttggacaagaagtttgctggaacattggatcaaggtgctggatgccttgtcatattcgacgatcccaagactgatgctatatatcctgctactctagagaccatttccaatgttgggaaagtcgtggacagtctttatgttaggtctgccaagataatggcatgagcactctggttattttactccgatgtcacgttgcttgttgttgctgttgttttcttcttaattgtgactagcttatcatctgtttttatctatttttatttttgttgaactcaattgtggtaaatctcttccggtggctttgaacatttaaatgttttggtggtcaatgccact

SEQ ID NO: 244638 - DNA, 349 bp, Glycine max
gaacccaaccaaactgaaccaaatcatcacacacacatactaagaagcaacaattcttctacaatggatctcctccttctggaaaagaccctcataggtctcttcctcgctgcggtggtcgccatcgccgtctccaccctccgcggccggaaattcaagctcccaccgggcccactccccgtcccaatcttcggcaactggctccaagtcggcgacgacctcaaccaccgcaacctcaccgatttggccaaaaaattcggtgacaccttcctcctccgcatggggcagcgcaacctcgtcgtggcttcttcccctgagctcgccaaagaggttctccacacgcagggcg

SEQ ID NO: 244639 - DNA, 361 bp, Glycine max
gagaaatctgacgtgtattcctttggagtggtgctgtttgagttactctgcgctcgtccgcctctgatcagaactgcggagaagaaacaggtgtcgcttgctgattgggcgaggcactgctgccaaaatgggaccataggccagattgtggaccccactttaaaggggaggatggcgccagagtgtttgaggaaattctgcgaggttgcggtgagttgtttgttggacgacggaacgctgaggccgtcgatgaacgacgtcgtttggatgctggagtttgcgttgcagttgcaggagagtgctgagcagcgtgaaaatactaatattgttgataatgaaattaatgagagaagagaggaag

SEQ ID NO: 244640 - DNA, 353 bp, Glycine max
gtgtgatgatggtaacaagaaggagaacaagagtgttagtgagtggtgagagtgcgaagaacgtgagggctacatatcatttatataaccctgagcagattggttggaacttggtcactgccagtgcctactgcgctgcatgggatgccaacaagcccttggcttggcgtaaaaaatatgcatggactgctttctgcggacccgttgggcctcgtggcagagaatcttgcggcaagtgcttgagggtgacgaataccggaactgggactgaggctacggtgaggattgtagatcagtgtgctaatggaggcttggacttggacgtcaacgtgttccgacaattggacactaat

SEQ ID NO: 244641 - DNA, 332 bp, Glycine max
gttctagtgtgtgattgtttgttgttgtaactcggtcttcttcttttgttgttctgtgtatgtgtttgttttttctctcacctgaaaatgtcttgctgcggtggtaactgtggttgcggaagctcctgcaagtgcggcaacggctgcggatgctgcaagatgtacccagacttgagctacactgagccaaccaccaccgagaccttggtcatgggagtggcacctgttaaggctcaatttgagggtgctgaaatgggtgtgcccgctgagaacgatagctgcaaatgtggaccagactgctcctgcaacccctgcacttgcaagtgacgtgt

SEQ ID NO: 244642 - DNA, 371 bp, Glycine max
  unsure (1)..(371): unsure at all n locations
gacagtagttggagtacaactaactgcaccatcaccagataaaacttgggtggtgccttttttctttttctttctctctatcgattctcgtaacaaaccctacccttttgagtcttccaagttttcaccatcgtaatgggttccgaaggatccagcgtcgtggttcctaggaatttcagattattggaagagcttgagagaggtgagaagggaattggggatggaactgttagctatggaatggatgatgctgatgacatatacatgcaatcttggactgggactatcatcggtccccctagtactgttcatgaagggcgtatctaccagttgaaattgttttgcagcanggattatccagacaatcctcc

SEQ ID NO: 244643 - DNA, 415 bp, Glycine max
aggcgagaagacgatagagggggaaccactacaagctgagagggaatatccagagttataatcttggtggcatgggttgcagtgctggacttatctctatagaccttgccaaacagctcctccaggttcatccaaactcttatgccttagtggtgagcatggtgaacatcactctcaactggtattttggcaacaacatgtcaatgctagtctcaaattgtctcttcagaatgggtggagctgcagttctactctccaacaagtcttctgatcgcagaagagccagataccaactgatccatacagtgcgtactcacaagggtgcagatgacagatcatatggttgtgtcttccaagaggaatatgagaagaatacaattggtgtggcactctcaaaggacttaatggctgttgc

SEQ ID NO: 244644 - DNA, 345 bp, Glycine max
ccaacccttaggaaggaaaaatgctgaaatccctccgatgcgaccccgtatccgcaccgtaaacggaacttgtataagatccagtactctgtgaactgggatgatccttcacccggtgctgctctgaatttcacgaaccaagctaagaagttgttcagttacatgaccccttttgtgtcaagaacccagaagtgcgtttttgaattacagggatcttgatattggggttaacagctttggtgaaaaaaaccttcaggaaagggttggttaatggaacaaatacttcaatgataattttcagaggcttgtgaagattaagaccacggttgatcctgaaaacttttt

SEQ ID NO: 244645 - DNA, 385 bp, Glycine max
agaagggggaagcggcgccaccatagttggtgtagctagctacggagggatatacggggaagcgtttattcattcattaagatggcatcggagcttcaattgcccccaggcttcagattccatccaacggaccaggagctggtgttgcactatctctgccgtaaatgcgcgtcgcagcctatcgccgttcccatcatcgccgaaatcgacctctacaaatacgacccctgggacctacccggattggcttcctacggagagaaagagtggtacttcttttcaccacgggaccggaaatacccgaacggttccaggccgatacgggcggctggaaacgggttactggaaggcaaccggggcggataagcccattggccaacccaaa

SEQ ID NO: 244646 - DNA, 353 bp, Glycine max
ggagataccaaggaaatttggttcttacctcttacccgcagacagatgaaagaagggaaatacatggaagctgtgtgtgcaagtggaagcagtgtttgggtcacatcctcgcttacacgcacacccaagatcacactccctctattccgcgccagttagcaccagctaacagcatttccttcacaatcccttcttttctcctatcacccttctcgctatgctaatgctagaaccctccgcgccacaacctcctccagacccattttccttccccacataagtgcatcactggaacaaatttactacacttatattatggtcaagcccgacggcgtcaaacgtggcctcgtggg

SEQ ID NO: 244647 - DNA, 354 bp, Glycine max
gaaactaagaagagtgagaaggtgattgacatgggtgttggttttgaagttgtttctggtgagtatttggggtcagcagttgtacaaccaccttggttagactttttgaggcaatggggtccaaaaatcacttatgacattgcaaaggagctggacaatttggcgaaggtgttccctgctttggaagcccttgaagatggtttgccaaatgacttgttgggacaggagggacccacaggacctaagctcaaaagaaattggcaaggtgatgaggtttgaaatggaagacttggagaatggtggcattattgacaccatgcaattataaaacgagactttaatttggttggtttg

SEQ ID NO: 244648 - DNA, 320 bp, Glycine max
gataagaaagaagatcaaaagaaataagagaaacatatggcagcactgggtggccttaccgacatcaccggagcacagaacagcatcgatatcgaaaatctcgctcgctttgctgttgatgaacacaacaagaaagagaatgcagttctggagtttgtgagggtgattagtgcaaagaaacaagtggtttctggcaccttgtactatatcactttggaggcaaatgatggtgtgacgaaaaaggtttatgaaactaacgtgttggacaaaccatggttgaacatcaatgaggttcaggaattcaagcccatcactgttgc

SEQ ID NO: 244649 - DNA, 380 bp, Glycine max
ggggagagaatagagaggagagatggatccagacgcgttggcaaaggcattcgtggagcactactacagcaccttcgacaccaacaggaacggcttagcgaatctctaccaggagggttccatgctcactttcgaagggcagaagatccaaggcgcttccaacatcgttgccaagctcacctccctcccttttcagcagtgccaccactcaatctccaccgtcgactgccagccctccggcgtcaacgccggcatgctcgtcttcgtcagcggaaaccttcagctcgccggcgaacagcacactctcaagttcagccagatgttccatttgatatcaacacctcaaggaagctattatgtgttgaatgacatattccgtt

SEQ ID NO: 244650 - DNA, 334 bp, Glycine max
gtattcacttccttctggaattacaaagtgtactatgtctatggcttcatgctactggtttttctgattcttaccattgttactgtttgtgtgacaattgtgcggacatactttttgttaaatgctgataactaccactggcaatggacttctttcctttcagctgcctcaacagctgtttacgtgtatttgtactcagtatactactactatgtgaatacgaagatatcacgcttcttccaaaccagcttcgatcttggatacactttgatgtcttgtcctgggctgggaattctgtgtcgaactgtgagttatcttggctcgaagttgtttg

SEQ ID NO: 244651 - DNA, 307 bp, Glycine max
aaaacaacaacaaaagggaagcaaaaccaccaccgccaccaacaacaagtaacaaaaatccaacaagcaaatcaatcctctctctctgtctcccaatcaaaacagacatgggtttgaacgaggattttgagcagtatgctgagaaagcaaagactttgccaccgactcaatcaaacgaagacttgcctatcctttatggattgtacaagcaggccaccgttggacctgtcaacaccagccgtccgggaatgttcaacatgagggacagagctaaatgggatgcatggaaagctgttgaaaggaaatc

SEQ ID NO: 244652 - DNA, 234 bp, Glycine max
cccaggcgtcagtagacgagtgagcggaggcgtgagcgggagcaagattaggacttaaggggggtgtcaacgttcaaaacgtcatgagcgtgttgctttccgtgcttgaaggacgtcctagtgatggcattagggttgatcttgtcattaactcatttgtagtgagatttattcaagcaggaattgaggcaagcatcattattcttatatggggaactcgtttgaaattgaata

SEQ ID NO: 244653 - DNA, 256 bp, Glycine max
taacgggcaactgcagtagacccaaagaaggggtcattgggtatcattgcacccattgctagtgggttcgttgtgggtgccaacatcttatcaccaggcccattcagcggcggttcacttaacccagctcgctcattcggcccacctgtggtcagtgcagacttggctgctaactggatctactgggttggcccattgattgcatgacgtttggctggcttgatttatggagacgtcttcattggttcctatgccc

SEQ ID NO: 244654 - DNA, 384 bp, Glycine max
agacgacagaaggggttcaatctttacccaaagacctggaactatattcaaatggatcgggccacgaggtagtgattgtggtatagtgaatgcaaacatacctacaaatggagctgaaattggtggtgcctttggtggagaaaaggcgacaggtggtggccgtgaagcgggaagtgactcatggaagcaatacatgcggcgttctacatgtaccatcaattatggaagtgaactaccattagctcaggggataaactttggctagaaagctatcctagcacatgaggctgcacaaaataatgcgattttgcagtctgaagagagttctatatataccgagatgttagtctggctgacatgggttcaaagtggtgtcctaacaag

SEQ ID NO: 244655 - DNA, 196 bp, Glycine max
  unsure (1)..(196): unsure at all n locations
ggacacttatggaactgggaagattcctgacaaggagattcttcaaattgtgaaggagaatttcgacttcagacctggaatgatcaccattaacttggaccttaagaggggtggccataggttcctcaagacagctgcttatggacactttggaagggatgaccctgacttcacctgngaagttgtgaagccactc

SEQ ID NO: 244656 - DNA, 404 bp, Glycine max
gaatctctgaaaccacaattcacaaccgaaacagtttccatctctctcacaaaatgacaacaatatcaaattgctcccttctcttcctcttcctcttcctctccaccctccacatagcttccaccctctcaacccccaccaacttcatcaagtcctcctgcagcaccacccagtacccagccctctgcatccagtccctctccgtctacgcctccaccatccagcaagacccccacgagctcgtccagacagccctctccctctccctcaaccacaccgaggccaccaaaaccttcgtcgcaaaatgcagcagattcagatgcctcaaaccgagagaatacgctgccttgaaggactgcgctgaagaaatcagtgacagcgtcgaccggctcagccggtcgctg

SEQ ID NO: 244657 - DNA, 336 bp, Glycine max
gtcgccgccaacatctcaggtggccatttgaacccaactgtcacttttggattggccattggaagcaacatcactctcatcactggttccttatactggattgcccaattgttgggttctatagtcgcatgcctcctcctcaatttgatcaccgctaagagcattccaagccactcgccggctaatggtgtgaacgatttgcaagctgtaatgtttgagattgttatcacatttgggttggtttacactgtgtatgcaactgcagtagacccaaagaaggggtcattgggtatcattgcacccattgctattgggttcgttgtgggtgccaacatc

SEQ ID NO: 244658 - DNA, 376 bp, Glycine max
aggcagttggcaagtgataataatagcagacgaattagacgtttcttttcttcgccgtctcaactcaattccattctcttctctgagtctcaacctaattcaccattcatccatctttacgtgtctgttggattccatggccaaaagctccttcaagcttgaacatcccatggaaagaagacaggctgagtctgctcgcattagagacaagtatcctgatagaatacctgtgattgttgagaaagcggaaagaagtgacatcccagacatcgataagaacaagtaccttgtcccagccgatttgactgttggtcagtctgttgatgttgtccgtagaacgactaacgtcaatgcggacaaggctatttttgttttt

SEQ ID NO: 244659 - DNA, 297 bp, Glycine max
gattccattgtgtagtaaccagtcagcgttagttcttcagtaacttattgtgggattcgattctaagattttgagattgtccagctgtgggtgtggaaacagctgcagctgtggcagcaactgcggttgcaacaagtactcatttgacctgagtgacgttgagtcgacaaccagagagactcgagttttgggtgttgggcctgtgaacgctcagttggaaggtgctgatatgggtgttgcatctgagaacggtggctgcaactgtggatgaagctgcacctgtgactcatgcatctg

SEQ ID NO: 244660 - DNA, 263 bp, Glycine max
  unsure (1)..(263): unsure at all n locations
gaatatgattatattttcctttgggatgaggacctangagttgagcatttccatccagataagtatgtttctattatcaaacgtgaagggctggagatatcacaaccagcactggatcctaaaaaaatcagaagtgcatcatcagattactgcacgtgggaggatgtcatcagtgcacagaacgacatataaagctagtaatgatggtaaagggtgtgataaaagcagcactgccccaccttgtacanggtggatagaaatga

SEQ ID NO: 244661 - DNA, 341 bp, Glycine max
ggcgagatagaagagaaagccgtcgctatcctagtctcttcttcccctctacccatttcagtttcaggatggaatctcaggtgaagcacgcccttgttgtcaaagttatgggtcgtactgggtctagggggcaggtgactcaggttagagtgaagtttttggatgatcaaaaccgacacatcatgaggaacgtgaagggacccgtgagagaaggagacattctcaccctacttgagtctgaaagagaagcaagaaggttgcgctagaggatctcttcatggtttggctcaggacttaaacaaaacatcattgtttttgttgtagttaaaggatgtcaaatg

SEQ ID NO: 244662 - DNA, 344 bp, Glycine max
gacggtttggccaacctgtccatccatccaaaattccccatcccgcaactaatttaattagttacttttccgttaattatcttccttccctggctcgagcatccaaaaaggttggttttttttttttttagaagaagaacaagataaggaagatgattatgatgactatggatgggatgatggacgaaggggtgttggatcatttgataagaaagcttctggaaaggaaaggaaggaaacaagtgcaactctctgagtccgagatacgttaactccaagtcaacgcccaagaaatcttcctctctcagccaattcttctcgacctacgtgctctcatccgcaac

SEQ ID NO: 244663 - DNA, 348 bp, Glycine max
  unsure (1)..(348): unsure at all n locations
agggaaggaaggaagaaattaaccgaatgagagcattaacctcttcttcttccactttcattccaaagcgttatttcttcttcttcttcctctccattctcttcgctcttcgatcctcgtccgggggctgctccgaataccaccaccaccacgcgccgatggccacgataggaggcttacgcgactcccaaagctctcagagcagcgtccaaaccgaggccctcgctcggttcgccgtcgatgaacacaacaagaagcagaattcacttctggagttttctanggtggtgaggacacatgaacaggttgttgcgggaaccctgcatcaccttactctcgaggctattg

SEQ ID NO: 244664 - DNA, 297 bp, Glycine max
gaacgaacttggagttgaataccgtgttggcaagttcccattcctggctaatagcatagctaaagcaattgacaatgctgaaggactggtgaagatattggctgaaaaggagacagacatgatattgggagtgcacattatggcgcccaatgcaggagagcttattcatgaagctgcaatagcactacagtatgatgcatcaagtgaggacattgcacgtgtgtgccatgcacatccaacaatgagcgatgctgtgaaagatgccgcaatggccacttatgacatgcccattcacat

SEQ ID NO: 244665 - DNA, 228 bp, Glycine max
ggcccctcttaaagatgaaagtgtattgatcatgggttctgggaatgctgttcacaacttgagagcacttgagcctcaatccactgttgctccctgcgctctagagtttgataattggttgaaagatgctcttcttgaatgaacatatgaagatgtaaatcattatgagcataaagcaccacatgcaaaaaacgctcatccctggccggattacttttaaccgctgca

SEQ ID NO: 244666 - DNA, 351 bp, Glycine max
ggttggagttgttcgcaagaaaccggagcgttgattttcttctatttctcgatcgtcgtcacgaggaagaatggcagagagttacttcaggcaagagcatgatcttgagaagagaagagctgatgctgctaggattagagagaaatacccagaccgtatcccggtgattgtggagaaggcagaaagaagtgatatcccatgtattgacaagaagaagtaccttgtccctgctgatctgacagttggacagtttgtctatgttatccgcaaaaggattaaattaagtgcagaaaaggcaatctttatctttgtggacaacgtccttccacctacaggagcaattaagtcttc

SEQ ID NO: 244667 - DNA, 334 bp, Glycine max
gaatctaaagataaataaaattcaggaaaaaaaaaaaaaaacatggtggtgaaggtgtatggtccaacctatggatcccccaagagggtcctggtgtgtctgattgagaaggaaattgagtttgacacagtgcatgttgatctcttcaagggagagaatacggaacctgagttccttaagctgcagccatttggatcccttcctgttattcaagacggtgattatactctctatgaatctcgtgcaataatcagatacttagctgagaagtatagagactaagggactgacttattgggaaagacaatacaggaaaacggtctagtggaacaat

SEQ ID NO: 244668 - DNA, 329 bp, Glycine max
gactcacaaataaacataattacttgccttgaggaacgttccagaccacatacagaggtttctctagtgatcttcgttcttctgtggagatcttgttttttcatctcacttttcttctaattaaggaacaagctttccgcagttgaaaaccctagctagctagcttccaccaatttgaatcaccaatggctcgctctttctctaacgtcaaggttctctctgctcttgtggccgacggattctccaacactctcaccaggcgtgggtacgcagcagcgacacaaagcgcaacaagatgaggagctgcctccatcagcagcaagatagct

SEQ ID NO: 244669 - DNA, 326 bp, Glycine max
gtccactccaatccaccagaacatttgttcaatggacagcatcctcgtggtaaatgccgtctcgccagatcaaccatcatctcagggcatataatgggatgtcataagcgtccatcccgtataattgattttcgaccgaatgagaaaaacatatatagtagaatcgtagccatagaatatcaccctaatctagatgcatacctttgtctcatatactatgtggatggtgagccaaaatatattttacacctcacacgggctataattggatatcccagtgtttctggtacagaagttccgatgagtctgggaaatgccctaccatt

SEQ ID NO: 244670 - DNA, 219 bp, Glycine max
tactcatatcacttataccattctctctcgcacgcacacgcacctcgataaccacatggttttacccatggcatccaatcagatcgtgaacgaacttaaggatcgtcatacggcatctcctacctcatgcatcgccagtcctgttgctgatcacatgtatcactggcaagcaacaattatgggtcatctagacaatccttatgcttcaagtgttttcct

SEQ ID NO: 244671 - DNA, 362 bp, Glycine max
ggagttgccattgaagaagaagctcagatcggaaaaattcacctctccaatcccaatcccatcgttgcaaatgatccgattcattctgttgcagaacatgcagggcaagacccgtcttgccaaatactacgttcctctcgaggactccgagaagcacaaggtcgaatacgaggttcatcggctcgtcgtaaacagagaccctaaatacacaaatttcgtcgagtttcgtacgcacaagataatatacaggcgatatgctgggttatttttctcactctgtgttgatatcactgataatgagttggcgtatttagagtgcatccatttgtttgtggaaatattggatcacttcctcagcaatg

SEQ ID NO: 244672 - DNA, 325 bp, Glycine max
gtcgttcgtgaagagaatgggctccgtgaagggaatgaagcccagagagtacaacgcactgcgtgactgcgtggagaacatgaacgacagcgtggaccgtctcagccagtcggtgaaggagctcgggctcgtcatgggtaagggcaagggtaagaaggactttacgtggcatgtgagtaatgttcagacttgggttagcgctgccatcactgatcaggacacgtgtcttgatgggtttgatgggccccacgtggacgccaacttgagggcttccgttaggcccagggtcgtggatgcatctcaggtcactagtaacggccttgca

SEQ ID NO: 244673 - DNA, 336 bp, Glycine max
tacaaaggggaaagaggataaaattgctgtaataatggggactgtaactgatgatatcagagtatatgaaattccaacattgaaaattacagcactcaagtttaacgagaaaacaagttccagaataaaaaaagctggtggtgaaatgctgacatttgaaggggcttgcccttagggtccctttgggacaaaatacagtccttcttaaaagccccaagaatgctcgggaagctgtgaaacactttggtcctgctcctggtgtgccacacagccataccaagccctatgtacgagcaaagggaagaaagttccatagggctataagaaagaggaaca

SEQ ID NO: 244674 - DNA, 324 bp, Glycine max
ggcccacttccaaatcttctcctctcgctatgggttgcggctcctcacttccagatacgggctcaatgcagttgggtcgacccaaatcacataatggttcaaggcaagacgccaagaaacttagggtcaagcttgttctcttacgtgattctggtgttggtaaaatctgtattgttctacgatctgttcgtggtcagtttgatacaacatctaacgtaactgttggagcttcttttttgtcgcaaacaatagctctgcaagactctacatcagtcaagttctaaatatgggatactgctggtcacgagaggtatgctgctttag

SEQ ID NO: 244675 - DNA, 298 bp, Glycine max
gatcagactgtgaccaatgaacacgttgttgctgaccttcaacatcatgttaacaggcctgtcgatcgatcgaagttcctgtaatggaataacatcttccaacgtaagccttctggccgttttggcactggtggcccgcatgatgaaactggactcactggaagagcgatcatcattgacacctatggtgggttgggtgcccatggtggaagtgccctttcaaggaaggaccctacgaaggttgacagatctgatggctaaaacgtgaggcacggcgcaaagaatgttgtgacattgg

SEQ ID NO: 244676 - DNA, 357 bp, Glycine max
gactgatcgagcgagcagcgtttgtttgttccttcctcagtcgttgtgacagtgtgtgtgagtgagtgagtgagagcgacgatgggcgcgagcagcgaccccacccaagacggttccgacgagcagcagaagcgttcggagatctacacctacgaggccccctggcacatctacgccatgaactggagcgtccgccgcgacaagaagtatcgcctcgccatcgcctccctcttagagcagtaccctaaccgcgtggagattgtccagctcgacgactccaacggcgagatccgttccgacccctccctctccttcgagcacccttaccctcccaccaaggccatcttcatccccgac

SEQ ID NO: 244677 - DNA, 384 bp, Glycine max
  unsure (1)..(384): unsure at all n locations
agagtcccggctagacgtacgcataggtgcgagaggacgacagcaagggacagacagacaaacaatttaccagctatacttgttccttttgaaggttagaagtgctacaatacaaacaatggcagctactcaggaagatgtgaagcttttgggtattgtgggaagcccatttgtgtgcanggtccagattgcccttaagttgaagggagttgaatacaaatttttggaagaaaatttgggcaacaagagtgatttgcttctcaaatacaaccctgttcacaagaaggttccagtgtttgttcacaatgagaagcccatagcagagtctcttgtgattgttgaatacattgatgagacatggaagaacaaccccatcttaccttc

SEQ ID NO: 244678 - DNA, 343 bp, Glycine max
gatctaaaagaatgttttttctttcctaattagaggtgacaatcttattgatgaatttgcagatgaaactcatcaaagtttcacatctatattgaggacatctaccacatagagacctaataggtgaactcaggaggaagttctcctcgtaggaaaaatgagatcatggttagggctctctgcggttggtaacttggaaccatgtgcccagctcctcttacagtgattagtgtgagccctttgtacccaaccaagtatcctcgaacctacatattgtaagcagtatattacttacgtgttgcttgtaaattcagaatagtaaataataaagcttaattaatta

SEQ ID NO: 244679 - DNA, 367 bp, Glycine max
ggtccaagtccttatcatctcctctctctaacggttgcggatcctcacttccagacacggggccaaggcacttcggtcgacccatttcatagaatggtggatggcaggacgccaacatacgtatggtcaagcttgtgctcttaggtgattctggtgttagtaacagctgtattgttctactatttgtgcgtggtcagtttgatatagcatcgattgtacctgttggaccctctttattgtctcggacaatcacactgcaatattctacatcagtgacgtctgaaatttgggatactgctggtcttgagaggtatgctgcgttagcacagcgatattaccgtagtgcaacagttgcagtttactgttt

SEQ ID NO: 244680 - DNA, 442 bp, Glycine max
aattcccggctcgacccaagcgtcagtccaggcgtcagaaggctgctaaatgaggacagaagggcatgtgggtaatggctcatactggcggaccttgacgcgccaagacacgttctgaagccacggcagaggactgtgcgataggtatatgcagttctgacagttccatcgagagccatggtggccgtgagtggaatcaacattgcctttaaccgtgaagcagttggtccagcattgatcccggctttgatgctggcacgggaagggaaattgaggtgggagactatagaagatataaggtgtggaatgtgtgtgaaagttatatgtgatcacataagccttgatgtgagaattgggttaccagatgtttggacaatagattcgagtgatacattacagatctatgaaaaagagtgtgaatgagtgcatttgatggaagatg

SEQ ID NO: 244681 - DNA, 317 bp, Glycine max
cccacgcgttcgcgcactcgtccgctgcagaatacgactgaagggagagcttgatattgatgttcttggtcatggagaaccagagagaggtgatgtggttgagtacttcggtgagcaattgtcaggctttgccttcactgttaatgggtgggtgcaatcctatggttcccgttgtgtgaatccaccaatcatctatggtgatgtgagcctcccaaagccaatgactgtcttctggtcatctctggctcaaaactttaccaagcgcccaatgaagggtatgcttaccgggcctgttaccattctcaacttgggccttt

SEQ ID NO: 244682 - DNA, 152 bp, Glycine max
tggttatgagggtcagtgagcagttcactggtatggaccggctcaaagcctggttggattggtacactggggagggtatggacgagatggagttcactgatgcatatagtaatatgaatgatttggtatcatagtaccagcatgtaccagta

SEQ ID NO: 244683 - DNA, 239 bp, Glycine max
taagctggaacactgggatacacatcacctgaatgtgcaatgcaaggtcaatgatcagagaaagccgatacctacaattatggtattgtggtcctagaaatcttaagtggtcaaaagagtaccaatgtaaaggttgatgacgagggtcgcgagtaccttcttcaacgagcatggaaactgtatgagagaggcatgcaatttgagcttgtggacaatgacatagaccccaatgaatatga

SEQ ID NO: 244684 - DNA, 382 bp, Glycine max
  unsure (1)..(382): unsure at all n locations
tgggaccactgaagcgaagaaaggggcgtacggttcggttgtggttggagatgcgaagtgtgattatcgaatcgcaaaattctgaatcaatcaatcaatcaatcantaatcagagccatcaacgactgcaatggtctgcgagaagtgtgagaagaaattatcgaaggtgatagtaccagacaagtggaaagaatgggccagcaatactaccgaaggtggtggccgcaagatcaacgagaacaagcttctctccaagaaaaacagattgaccccttactgaaacactaagtgcaccatttgcaagcaacaaatgcaccataatgctaagtactgccacacccgttcttactctaaatgaatttttgcaatgtttgtcaatcaa

SEQ ID NO: 244685 - DNA, 386 bp, Glycine max
gatagcagcatcatacaaagcattgaaggcaagaacttaagttcattccttgtgtgttgctttcttcctcaaaaccaaacatgtcgaacacatgcggcaactgcgactgcgctgacaagactagctgcaccaagggaaacagctatggtgttattgtagagactgagaagagttacatcgagactgttgtcatggatgttccagcagctgagcatgatgggaagtgcaagtgtggcactaactgcacttgcacggactgcacctgtggccattaaggaatatgtatgaaaatgtaattgccatgtgtttggcaatacaaatatccaaataatgtaatcttcgtatggataaatgtgtgtgctgttatcctacttcaagtctgtgta

SEQ ID NO: 244686 - DNA, 277 bp, Glycine max
tgtgaaacatggaacaagtatccattgttaccgcacagttcttatcaaagagcgcttgctcgattttgggcaacctgtgttgaacaaaatctttggaaggctcgatgggtagcaatgtctaccatctgcgatcaacaagaatatgctatgaaagaagccaaataaatgattgacaaaataaaagaagagattaatggaaagaattttattggatgagacattatttggtaccttgatattgcaattggatggattgcttactttgttccttttttgg

SEQ ID NO: 244687 - DNA, 284 bp, Glycine max
tggcatggagatagcatcaaaacataaacttggcgtgcatgactttgtggtgcgcaatgacatgggttgtggttcaaccattggtcctattcttgctagtggcatatgtattcgcactgttgatgtaggtgcaccgcagttgtcaatgcatatcatacgagaaatttgtgctgttgatgatgtgaagcattcatatgttcatttcaaggcattttactaataattttcttcatgtctatggtaatattgacatggatatttaattatttcccttggggcgaaat

SEQ ID NO: 244688 - DNA, 255 bp, Glycine max
ggccctaactccttcaacgaccgtcttcgccaagcgcctgcgtctctctgtgaagtgacaagcttaaagacaaagtcttaaatggctggtccaaggattgcccatgctaccttgaaaggtccgagtgtggttaatgagataataattggaataacacttggcttaactgctggtagcatgtggaagatgcaccactggaatgaacagaggaaaaccaggaccttctactatttactggaaaaaggtgatatcaat

SEQ ID NO: 244689 - DNA, 271 bp, Glycine max
taatgtgtgttgaaagaatgacaggcattaaagtatgactaaattttccttgcgagtgctcttggttggtgtattgaatggcttcaggcatattttcttgttcttgatgacattatggataactctcacacactccgcggccagccatgctggtttagagtgcccaatgttggaatgattgcatccaatgatggagttctactaataaaccatattccacggatccttatgaatcactttatgggaaatccatattacattgatcttcttg

SEQ ID NO: 244690 - DNA, 213 bp, Glycine max
tggggggaattgacttagcatctgagcatgagagaggcctaacagaggtgaaggttgagaagcccgtcattgtatataactatccaaaagatatcaaagcattctacatgcggcttaatgatgacttaaagacagtggctgctatggatgtgcttgtacccaaggttggagagctaattggtggaagccaaaaggaataacgttatgatgtca

SEQ ID NO: 244691 - DNA, 278 bp, Glycine max
gatttaagtaaatttccttccttgcttctgtaggggaaatctagatgctggtttctctgaattttttgagagtagagacatggttctgagtgggaaagtggagactgaagtagagattcaagcacctgcagctaagttctaccacgtctttagaaagcaaattcatcatgttcctaacatgtctacagaaagagtacatggagctaaagtgcatgaaggtgactgggaaaatattggttcagtcaaacactgggactttaccatagaatgtagaaaaa

SEQ ID NO: 244692 - DNA, 292 bp, Glycine max
tatcacgtttttatcccataatgtaggaactcatcgaaagagtgagcaaaaatgaattatcaaaactggactatccttgtctaaatgacccaagtccaactttccacggtacaccttatgctggaccagtaactcaaaatcctcctgctcattcaatgagatcaatgcgtacaccaacttgggctcgacctataagctctgattatggatattcaatctattcggtgctaaaacacgcatccattgatttcaagaaaattgggcaaagaatatttatattcattgttattgg

SEQ ID NO: 244693 - DNA, 290 bp, Glycine max
tgggacttcaattgcaatcaaattagttcagtctcgttgcgcagttccctagggctggtttcaagatgcagatcttcgtcaagaccctcaccggaaagaccatcacccttgaggtggaaagctctgacaccatcgacaacgtcaaggccaagatccaggacaaggaatgaattcccccggatcagcaacgtcttatcttcaccggaaaacatctctatgacagccgtactctctccgactacaacatccagaatgagtcaacccttcaccttgtccttcgtctccgttgt

SEQ ID NO: 244694 - DNA, 198 bp, Glycine max
  unsure (1)..(198): unsure at all n locations
acacaaataacgaatcatatttagagtttggacattcacctgaggtgcagagttctntatcacattgcagagaaaatgtctttgattccaagtttctttggtggcagaaggagcaatgttttggatcctttctccctctatgtttgggacccttttaaggattttccttttcccacttctatttctgctgaaaattca

SEQ ID NO: 244695 - DNA, 268 bp, Glycine max
ggatgaaatgatttctaaaactagttctgatgggtgtacaactgctcttggttggaatctctcttgccttgaagaagccaagcctatgattggcgtgactcaagctgtccagttcctaatccagcttcttcaatctgactctgatgttcaatgcaagcaagattctctccatgctctctataatctttctactgtgccctccaatattccatgccttctttcatttggcatcattagtggcttacaatcccttcttgtatgccaaggg

SEQ ID NO: 244696 - DNA, 194 bp, Glycine max
tgggctatgacggaagcgtcgcatttgatgggttcggaccctttgccacatgggggggcccacaagtccgggtctgttgggaaacccgtgggtcatgaaatgggcattttagacgaatcgggtctggtccaaaaggctggtatcagtggaaaagtttgcattcttagattcaatgttacgaatggatataaaaa

SEQ ID NO: 244697 - DNA, 220 bp, Glycine max
atcatgagtgtgatccggaagatcgtggagcatgtgagtcgggttgtaacggtgggttgatgaccactgcatttgagtacacactcaaggctggtggactaatgcgagaagaggattatccctacactggaagagaccgtggcccctgcaaatttgacaagatcaaaatcgctgcttccgtggctaatttcaatgtggttttccttgatgaagaacaaat

SEQ ID NO: 244698 - DNA, 329 bp, Glycine max
taagactacagaatggcctcaaaacaaaacacatcaacaacccgtgcggattctcgtgggtggctgagagcattggcactacggtttcaactacaccgattgggccttcaagactgccccattttacctcaatgatactctagttttcaaatatgatgctccaaatgccaccagtttcccacacagtgtgtacatgttcaaaagttttgggagcttcttgaagtgtgacattaaaaaggctaagatgctatcaaatcccacacaaggttcaggaaaaggcttcaagtttgtgttgaaaaattggcatcctcactacttttcctgttgtg

SEQ ID NO: 244699 - DNA, 148 bp, Glycine max
gaccgagcgcgttcttgcagcatgctacaaggctctaaatgatcaccatgttctgcttgagggcactctgttgaagcccaacatggtcacccctggttcaaagtctaagaaggtcaccccagatgtgattgctcaatacactgttaca

SEQ ID NO: 244700 - DNA, 271 bp, Glycine max
tactataagggattcacacaaacggaacaagatagatatgtagaagagtcttccatatatagcctcccaaaaaaatgaagagtactacctctttggctctctttctactttgtgccctaacttcatcatatcagccttcagccaccgctgatattgtattcgacgccgaatgcaatcctattcgaaacggcggcacatactatgtgttgccagttataagaagaaagggctgctgaatagaatttgccaaaaccgaaacagaaacacgccc

SEQ ID NO: 244701 - DNA, 188 bp, Glycine max
  unsure (1)..(188): unsure at all n locations
taatggggagcaaaaccctaatccctatttggctggctcantagtgtcatttacgcgtctcttctctgcagcgactatgcctaaccctaaggtcttcttcgacatgaccatcggcggtcaatctgctggccgcatcgtgatggatctctactccgacgtcactctccgcaccgcctagaacttccgct

SEQ ID NO: 244702 - DNA, 332 bp, Glycine max
atataaaccttggattactacttggcaatgtttgagtccattgatatgtctcttgcgagaaagagcaaggtgcagattaatatggagcaacattgtttggctcgggatattgtcaacattattgcttgtgaagggaaggaaagggtagagagacatgagctgttaggcaagtggaagtctaggttaacaatggctggctttcgtcaatatcctttgagttcttatatgaattctgtcataagaagcctgctgaagtgctattcaaaacattataatcttgtggaaaaggatggggccatgctactgggatggaatgacagaaatttgatttc

SEQ ID NO: 244703 - DNA, 352 bp, Glycine max
attcataagtgtgacagaaatggaggatttaaaggaaaaggtcgatgaaggggaaccaacgcaaattaagtatagaggagtacgtaggagaccatggggaaaatttgctgcagaaattagagattcagctagacatggtgctcgtgtgtggctcgggacatttaacactgctgaggaggccgcaagagcttatgatcgtgctgcctttgagatgagaggtgctacggccattctcaacttcccagatgaacaccctccttgcaatgtgacttctcttagcaagaagtcctcatcatctaacacctgagattggtaaacaagttgtggtatttgagtgcttggatgacaaatt

SEQ ID NO: 244704 - DNA, 367 bp, Glycine max
  unsure (1)..(367): unsure at all n locations
gggatccaatcgcgttagggtttttgagagcggcagtgtgcatacttgtgtaggatggtctcttagcantgatcgattgagatggcagacgaagctaacagaactgctttccttgaaattcaaagtcgcatgatcgatactactggaaaaataaaacaggtgcaaacccagatgcgttccaaagaagcagaaaagaagcgtgcttttctgaccatggaggagctgaagcaagttcctgatgatactaatgtttacaaatccattgggagaatgtttgtattggagaccaaggcaacattaatgaatgatcgggagaacaagtttaaggattgtgaagcttcaattacaactttacagagctcaaaat

SEQ ID NO: 244705 - DNA, 276 bp, Glycine max
gtagcaagctatttgcaaagccaccttttacagaacgctggcaacagcatgacttttggactgagacagaaagcgcagtgaaaaaagcttacgttgaaacagatgagaaaatattggaacaagaacttgtgttggggcgaggagggtcaacagctgtgactgcaatacttattgatggtcataagcttgtagtatcaaatgttggtgactcaagagctattatctgtgataatggaaaggcaatacaactatcagtggatcatgaaccaatcaatg

SEQ ID NO: 244706 - DNA, 273 bp, Glycine max
ggagagaaaaaatggccaaatcaatcaagttcgttgagttgaacacaggggccgggattccttctcttgggttagggacttggcaagctgaacctggtgttgtagctgaagctctcaccacagccattcaggttggatacaggcatattgactgtgctagtgcgtataagaatcaagcagagattggttctgctcttaagaagctttttgatgatggtgtggtgaagcgtgaggacttatggatcacttccaaactctggtgttctaatcatg

SEQ ID NO: 244707 - DNA, 334 bp, Glycine max
  unsure (1)..(334): unsure at all n locations
ggtgtcgggcaaacttgatgccatctttccagctggtactcgtgaataggcggcagtggattgangaattatggaatgatgctgccattaaggctacatacgaaaggagaagcgaattagaaatgctgcctagtgttgccagttatttcttagagcgggctgttaaaatattaaggacagattatgaaccctcagatttagacatcctttatgctgagggagttacttcatctaatggggtggcttgtgtggagttttcatttccccaatcagcttctgacgaaactgttgacactactgatctacatgattcctttgtcaggtatcatactaa

SEQ ID NO: 244708 - DNA, 270 bp, Glycine max
acacaccgtttgttctattcttaactcaacttgtgctacccactctcttggcgaagtccaaccacgcttttctctacagtcatgggcaaggtcaagatcggaatcaacggatttggaagaattggccgtttggttgccagagtcgctctgcaaagagacgatgtggagctcgttgccgttaacgaccctttcattaccaccgattacatgacatacatgtttaaatacgacattgttcacggacactggatacatcacgatgtcaccgtt

SEQ ID NO: 244709 - DNA, 231 bp, Glycine max
gtctcactaggttcttggtttattggacttggtgtgaatcacatagatgatcgaagactctgctgtggtacaccaccagattgtgaatggaaagcacaagcaggcaacgtttgtgttgcttcatttgattggacgtgcagtggaatttgcaggtctgctgaaaggatcaaagaggttcacaagagatgtggggaaggtgagaaagcctagtagaatgcctctttctaagtg

SEQ ID NO: 244710 - DNA, 404 bp, Glycine max
ggagaaatgaggtgcattcctaccacggcatgcgtttggaacgctgaagttagtgtttcgcctaaaaagacaattcggtgggatctaggttagcagcaaccagcgcaatctgggacttttctttctttctccccacacccagattcaaaaactcagctctgctctttcgtttggatctcaaaacatgttcttcttcgattggttctatggcattctagcttccctcggtctctggcagaaagaagccaaaattctcttcctcggtctcgataatgcagggaagaccaccctccttcacatgctcaaagactagagattagttcagcaccagccgacccaacaccccacttcggaggaattgagcattgggaagatcaaattttaaggcttttgatttagggggc

SEQ ID NO: 244711 - DNA, 389 bp, Glycine max
ggggagagaatagagaagagagatggatccggacgcgttggcaaaggcgttggtggagcactactacagcaccttcgacaccaacaggaacggcttagcgaatctctaccaggagggttccatgctcactttcgaagggcagaagatccaaggcgcttccaacatcgttgccaagctcacctccctcccttttcagcagtgccaccactcaatctccaccgtctactgccagccctccggcgtcaacgccggcatgctcgtcttcgtcagcggaaaccttcaactcgcctgcgaacagcacactctcaagttcagccagatgttccatttgataccaacaccttcaggaagctattatgtgttgaatgacatattccgttaaaactatg

SEQ ID NO: 244712 - DNA, 348 bp, Glycine max
ggagcagatgcatatcctttcaccgaggagaggataagagaaatagagagggaggaagaagagactgcaaaggggtggccggagaagctgaagcatgaattacatgagcatgagcttgtgttgacgcgccgcagggtgtattactgtgatgcttgcaatgaagagggacatatatggtcctactactgtggagattgtgactttgatctccatccaaaatgtgcattggaaaaggaggacaaagaatgaagcaaagatgatgccaaggaagaaaagtccaaagatgaatgggtttgtgatggagaagtctgcaaaaaagcctaaaaactgcttgtcaagggttttggt

SEQ ID NO: 244713 - DNA, 361 bp, Glycine max
ggtgatagactcctgaagcggtatgttgttgctgatcgagagatccaggaagaaaaggttgatagctctcttgagtttcttatattggctagtgatgggctatgggatgttgtctcaaatgaggaagctgttgctatgattaaaccaattgaggatgccgaggaggcagcaaagaggctaatgcaagaagcatatcagcgaagtagttctgacaacattacgtgcgttgtcgttcgttttttgtcaaaaccaagtgcatcttctcatagtaactctggctaaatgtccttcacttcgaatgctaatgtatatctggtgatggattaaaaaaatactggatgttggcaaaatcagtttatta

SEQ ID NO: 244714 - DNA, 196 bp, Glycine max
  unsure (1)..(196): unsure at all n locations
gactctcggcaacggatatggcngcgcctgcatcgatgaggagcgtagcgaaatgcgatacttggtgtgaattgcagaatcccgtgaaccatcgagtctttgaacgcaagttgcgcccgaagccattaggccgagggcacgcctgcctgggtgtcacacatcgtttccccaacgcaaacatgtaacaatgttgctg

SEQ ID NO: 244715 - DNA, 365 bp, Glycine max
ggagcaggggaaatgacaacgtctgaatcatggcggccaggcctagttgacgagacgaacaccattgactacttgaactacttgtgttacattggacttaacataaccacggttaaagtcatctccagaactgtccctgctaatttcagttgccctaaggattcaagttctgatctcatctccaacatcaactacccttccatagcagtaaacttcaccggcaaagcagccgtgaacgtgagtagaactgtcacaaacgttggtgaagaagatgaaacagcgtactctcccgttgtggaagctcccagtggagtaaaagtcacagtgactccatataaacttcaatttacaaagagtagtaaaaa

SEQ ID NO: 244716 - DNA, 353 bp, Glycine max
gacagccgcagcttgaagcagagcagagcgagcttgaagagctatggctgtcggaaagaataagaggatttccaagggaaagaagggtggcaagaagaaagcgttagtgcccattcccttcttcactcttttattctctcctttaaactctgatttctttcttcttcttccgtgattccacagcgctgatccctttgccaagaaagactggtacgatatcaaggccccttccctcttccaggtcaagaatattggcaaaaccctcgtctctcgtacccagggaaccaagattgcatccgaaggactcaaacatcgggtttttgaggtctcattggctgatctccaaggggatg

SEQ ID NO: 244717 - DNA, 400 bp, Glycine max
gaacaatatggtgctgtttgatcagggcacgtaggacaagctcctttgtggggcgtgccaaatacaatctcatcactccttccattctctctgatcgtttgaggattaatggatcacttgcaaggaaggctataagagaattgatggcaagaggttctatcaggatggtgtctgcccatgcaagtcagcaaatttataccagggcaacaaacacctaggtggtgaactgatcttagtttacggagtattggtatgaatagtgaattattgtacttttgaagtttgagatgcatctcaaatagcttctatcatatctagattgttgctgatatccgagctgatattgtatataagttttgctataatgttatatttattaagattttaatatgcaatattt

SEQ ID NO: 244718 - DNA, 214 bp, Glycine max
ggggagataatatagaagagagatggatccagacgcggtggcgaatgcattcgtggaggactactacagcaccttcaacaccaacaggaacggcttagcgaatctctaccatgagggttccatgctcactttcgaagggcagaagatccaaggcgctttcaacatcgttgccaatctcacctacctcccttttcatcagtgccaccactcaatc

SEQ ID NO: 244719 - DNA, 178 bp, Glycine max
tgtacatacaaacaaacaatttaccagctatacgtgtgcctttaaaaagtgagaggtgctacaatacaaacaatggcagctactcaggaagatgtgaagcttttgggtattgtgggaaacccatttatgtacaaaatccagatatcccttatatttaatgtaattaaattctaatttt

SEQ ID NO: 244720 - DNA, 218 bp, Glycine max
gataataaatacagtcgtattgctgggggtcatcaggaggtttgtagtgttcgggagaagcgtgctgacaatgtgtggttggcagccgaaggtgtctaccttccctttactgaaagcaaatgggttacttattatcgatacttattctaaactggtaaaccattgatagtgggagtgggtggctggcacctgttctgataacaaatgctagttttttt

SEQ ID NO: 244721 - DNA, 374 bp, Glycine max
gacacatagagatctcgattcgtcggaaagcaggctggactatatcagacttggtcaatcgcaggataccttgtggcgaagctgctgcttgcagacccaagtaaagcaaacacattgatcactgaagaggattctgagcttgtgaatgccttgataagtgccaaccctagaggaaagcgagggcgcaaaaatttgaggcagacttacattgtatgagtcttcatttgcaattcatttggttccttttggtcaaattcatttttcttcttattgttagcagcatgttattctagctagatacgacagggatatgcaaaaatatatagtagtttgggttgattgtgatgaaacatatactagtatatatataaatg

SEQ ID NO: 244722 - DNA, 245 bp, Glycine max
gggaaactcctctattctcaaaaccctaagccgacgtgcaccattcatccggtgagttcgagaggagcgaccgcggtgctatctcgtgccagcaggattcggtcgaagctgcaaacggcgctggaagccaccgttttggaggtggactacgtgtcttaccatcacgctggccacgccgccatgaatggtagttccgacaaagaaacccacttcaacctcaacatcttctcccccatattctatgg

SEQ ID NO: 244723 - DNA, 266 bp, Glycine max
gacactaattaacagagcatgaaaacaaccttcgttgggtgggttcttgatcagtgtcaaaaccaaaagggtggttgcaaattgcaatggctaatcatggtgttgagggtggttccttcactgcaaaggactaccatgatcctcctccatcaccattgattgatgctgaagaactcacacattggtccttctacaaggcttttattgctgattacattgccacaatgctcttccttttcatcacattgctcactgtgattggttac

SEQ ID NO: 244724 - DNA, 181 bp, Glycine max
gaattctatgattatagcagcagttatgtggatgatcaaggcaagcagcttgttgcatcttgtgatgcatctaacaatgtagaacttgttggtgggtctgagctcataatcaccacgaaatcttgtgaaagagcatcaaccataacactaagttcccgtgaaattttgcgttattattgtc

SEQ ID NO: 244725 - DNA, 265 bp, Glycine max
gaacttgctcaggtaactgatgaggttgcgagtgaaagtgaaaagaattggggtgatgagaagcctgcagttgaagaagatgtagctgatggtaacaaggacagccctactaatgaaactgaagaaaaagagcctgaagataaggagatgactctggaggaatatgaaaaagtgttggaagagagaaggaaggccttccaagcactcaatactgaagatagataagtggacactaaagagtcttaatacatgcaggccttattat

SEQ ID NO: 244726 - DNA, 250 bp, Glycine max
gacctgtgattcagcagttcagctgcggaaggccgggaaagtcactgtcagagaatcaaacttgaaaaaattaggtgctacccattttagaaccggcgtagcaaacgagcattccgaggtgacaaagtttgcacttttggagaccataaaagaagctgtaccagaaatgtggtcaccgactatgaagaatgcatggggagaagcttatgatcagctggtctatgccattaaatctgaaatggaaccaccc

SEQ ID NO: 244727 - DNA, 315 bp, Glycine max
gttgagtgtaaagctgctccgaaacccgggcgaccctaagtggttggtatcatggttgagaatggtggagaagcgaaggtataaaggagagtggttcacgtgagtcaccataaccttcaaagcgccttcatggctgcacatttataataaagctcctaaacctataatgagataatgaaatttgcccaaaatgccatggggaccaatgatgttagggtggatgtaatttttaacatatttttctggtaccattgtaatctgatttttccttagacgattattatttataattgctttcaaatttatttttttatt

SEQ ID NO: 244728 - DNA, 351 bp, Glycine max
gagcctcagcagaagcagaacgaggagaagcgtaaggagcaaaagcaatggcgccgaagaagccgagaaccacgacaaggaaccctgatttggttagggggattggcaagtattctaggtcgcagatgtaccacaagaggggcatctgggccatcaaggccaaaaacggtggcgttatgccccgccacgatcccaatcccaagccctatgcccctgcccataatccgcccaagttctaccctgcggactatgtttataagccccttgtctacaagcacatactcaaactttctaatctcagggcttatcattactacattgactttttttttactggtagcttggtatgtt

SEQ ID NO: 244729 - DNA, 266 bp, Glycine max
gattcacaaatcacaacatatccatggaaggagtataatgggtgaagaattggggctgctaaaagtcattgttgtgcaagggaaaaggttggtgatccgggatttcaagaccagtgatccttatgttgtgctcaagctagggaatcagactgcatagaccaaggtaattaatagctgcttgaatcctgtttggaatgatgagctgaattttactctgacagaacccttgtgagttctgaatttggaattgtatgattataatcttt

SEQ ID NO: 244730 - DNA, 289 bp, Glycine max
gagtgaattacattgcattgggttctagcagcgtatggcactcaccatgcgggcgtagtgataggtttaacatcaattctcagctcgagcatctccaagccaaatatgttggaactggccatgctgatttgaacagatttgagtgggcagtgaacattcaacgtgatagctatgcatcatatattgggcactaccctttactgggattctttgctattgctgaaaatgaatctattggaatagaacgctacagctttatgcataaaatgctcctgccttgtggtttgcc

SEQ ID NO: 244731 - DNA, 240 bp, Glycine max
tatgctgaattcagtgagactggaatcaggcgaactgggacaaccatatggggagtcacctttggtactgttaagcggacattcgcacgtttggtcattttattggtttcaatgggctatggtgttgtgagacctacccttggtgggctcacgttaaaggtggttatgcttggaggaaccttctttattgcatctgaagttcttgaattggtagagaatgttggtgcattaagtgatctt

SEQ ID NO: 244732 - DNA, 192 bp, Glycine max
caaggatgagagttaaacccttctgcgctggtaggtgaataagagaatggcttcagatcggaaacttcacactttcgaggaggtggcaaagcacgaccagaccaaggattgctggctcatcatttctggcaaggtgtatgatgtcacccctttcatagatgatcatcccggatgtgatgaggttttgttatc

SEQ ID NO: 244733 - DNA, 246 bp, Glycine max
gaagaaagaaaacagagagcgaagaaggagagtatgtcagaaaaatggcgtcgaaagctccaaagaaggccaatctcctcgatcaccactccatcaagcacatcctcgacgagtcagtctccgaggtggtaacgagtcgtgggtttgtggaagacgtgatattgagcaatgtgaggcttctcattggggcaatcatcatcgtcattgctctcttcgcccaattctacaataagaagttcccataaa

SEQ ID NO: 244734 - DNA, 247 bp, Glycine max
gagagaaaaaatggggaaagcaatcaaattctgggagtgggacacaggggccaagattccttctcttgggttagggacttggcaagctgaacctggtgttgtagctgaagctctcaccacagccattcaggttggatacaggcatattgactgtgctagtgcgtataagaatcaagcagagattggttctgctcttaagaagctttttgatgatggtgtggtgaatcttgatgacttatggatcact

SEQ ID NO: 244735 - DNA, 268 bp, Glycine max
ggcatctaacagagagagagaatggcagcacgtggtgggaatcgtgatgtgacgtgaggccagaacagcgttgagatcgatgctctagctcgctttgctgttgaagaacacaacaaaaaacagaatgcccttttggagtttgaaaaggtggtaactgcgaaacagcaagtggtttctggtaccttgtacaccatcactttggaggcaaaagatggtgggcaaaagaaggtttatgaatccaaagtttgggataagtcatggttgaact

SEQ ID NO: 244736 - DNA, 187 bp, Glycine max
gaggatggagaaagcaagtgtgtggtgcacaaaataggatgggttgatgaggcaaacttgggatacagctatagcgtagttggtggagttgggttgccagacacagtggagaagatcacattcgaatgcaaattggctgctggcgccaacggagggtctgctgggaagctaactgtcaaataccaat

SEQ ID NO: 244737 - DNA, 173 bp, Glycine max
ggagttgagaggatcgtgatgcgggcagtaaccgatatgccgtgaggggcaaaaatgaagacgattctttccaccgagaccatgaacattcctgacggcgtgagcatcaaagttcatgccaaggtcatctaacttgatggcccccgctgaaaattggtgctagactttaagca

SEQ ID NO: 244738 - DNA, 293 bp, Glycine max
ccctttatgcagaacttaagtgtagcctatggtctgcgagaaatcaaacctggtgaacctgttctggactggcctacaagaagacaggtggctctgggaacagcccgtggcttagaatatctccatgagcattgcaatcctaagattattcatcgggatgttaaggcagctaatgtattactagatgaagattttgaagctgttgttggtgattttggcttggcaaagttagtcgatgttcgaaaaactaacgtgacaactcaagttcgtgggacaatgggccacatagctcc

SEQ ID NO: 244739 - DNA, 328 bp, Glycine max
aaaagggcgcctaagcaaaatctgaggcatcagagtagcatgaacttcttgcctgcaggttgagaggagcacatagatctccggagcgagagcttggctaacagaagatccaagctttccagtgcaactcaacaagcatccacagcataaatctgctttcagacagatgaagtttaatcttcgctctagtacttgataagtctcatttcatgatccctttcttttggtattctggtattctaattcttttataaagtatcactttaatgctttgctctacagtttaatggaatttatgtttttattctttgttgttattttatgtact

SEQ ID NO: 244740 - DNA, 269 bp, Glycine max
gagcttttgctgcagccttgatcaatgatgccttgtgggtcatgaatgtggtctcatcttatggtcccaacacactccctgtggtttatgatcgtggccttattggaaccttccatgattggtgtgaagctttttcaacatatcctctaacctatgacctccttcatcttgattgactcttcactgctgaaagccacatatgttaaatgaagtatgtgttactggaaatggatcataattataatgcctgatttgcatactatcattct

SEQ ID NO: 244741 - DNA, 239 bp, Glycine max
ccactcatcctacgcttccaaaagcacaccgaatgggtattcaattccaatacattccattctggctcgatatttccctacctctgccggcaacatacacatcttcgtcaagaccctcacctgcaataccatcacccttaatgtgtaaatctctcacaccatcaacaacttctaagccaaaatccattacaatgaatcaattcctccttaccatctacattatcattttctccttaaaa

SEQ ID NO: 244742 - DNA, 224 bp, Glycine max
  unsure (1)..(224): unsure at all n locations
acttgaagcatgtcttaagaattcgtcgatcgantgtagaagactggatggagcaatgtcagtcactgcaagagataaagctgttaaagattttaacactctccctgaggtttcagttatgattatgtctttaaaggctgctagtcttggtctgaatatggttgctgcctgccatgttcttatgctagatctatggtggaatcctactactgaagatcatgctt

SEQ ID NO: 244743 - DNA, 355 bp, Glycine max
cgccatggagagcgttcacgcttctctagccagatacagcctggacaaaaacattaaaatctcctcacccatcgcactctcggctctccaaaactcgttccccgcctcatccggttccttcaaaaccgaactcctcgaaccggttatcaagcccatgctcgacttcctccgccaaaccggttcctacctaatggtgaatgcctatccgttcttcgcttacgctgcaaactctgataaaatctctttagactacgcgctgttcaatgaaaaccctggcgtggttgattcaggtaatgagttaaaatacaccaacttgttctaagcttaaatctacaccttatttgcttgccatatt

SEQ ID NO: 244744 - DNA, 243 bp, Glycine max
ggtctcgtggaagtgtaagcaagcagagcccgagcggcgcctgctttctgtggtcgtgttttgcatcaggatggagtctcatgtgaagcacgcacttgttgtcaaagttatgggtcgtactggatccagaggacaagtgacccaggttagagtgaagtttttggatgatcagaaccgtcacatcatgatgaatgttaaatgacctgtgagagaaggagacattctcaccctactctagtctga

SEQ ID NO: 244745 - DNA, 189 bp, Glycine max
gtacacgaacgtgtgtacgatgaatttatttgtaaagcaaaggcacgtgctttgaagcgtgctgttggtgatccattcaaggggggaatagagcaaggtcctcagattgattcagaacaacttcagaaaatactgaagtatattaagtccggtgtttaaagtggatctactcttgaaactggaggagat

SEQ ID NO: 244746 - DNA, 354 bp, Glycine max
gagaagaaaaaaaaaacattttcatcatcttgctcttctttttcatcaatcatcaccagtggttcttttccttctgagaagatcgaattgtgttttgcaaaaatgggagttccagagaaagaccctctttcccaattgagtttgcctcctggttttcggttttaccccaccgacgaggagcttctcgttcagtatctgtgccgcaaggtcgctggccaccatttctctcttccaattcattgccgaaattgacttgttcaagttctacccttgggttcttccaagtaaagcgattttcggtgaaaaaagagtggtacttttttaacctcagagtactggatattcccgaacggg

SEQ ID NO: 244747 - DNA, 214 bp, Glycine max
  unsure (1)..(214): unsure at all n locations
actcacaaaacaatataacttaattgccttagggaacgttcnagaccacagaggtttctctaatcttcttctgtggatatcttgttttctcttgttcattcatctcacttccaattaatgaacatgctttccaccaatttgaatcaccaatggctcgctctttctccaacctcaaagttctctctgctcttgtcgccgacggattctccaacac

SEQ ID NO: 244748 - DNA, 204 bp, Glycine max
taggggataataatgattcgttacttgacgggtattggggaagtgataggacggcattgtctaaatataaagcttatgctaggatatctctcggtgaaattagtattcaccaagcatggcttttgggacaagatgcgacttctccttatgggctttacaatggtcacagatgtggcatgtgtatgagatctgattctcatttac

SEQ ID NO: 244749 - DNA, 194 bp, Glycine max
gcagatagatctggttcttgttgttggaaagagaccgtagcgagcggaacaatggcagacgttgaggtcgatgtggcggctgcagcagcagcagggcagccgaagaagagaacgttcaagaagttcagtttcaggggcgtggatctcgacgcgcttctggacatgtccaccgatgaactcatgaagatgttctg

SEQ ID NO: 244750 - DNA, 208 bp, Glycine max
gaattcatagagagcgagacggcagcacgcgcaaaaatggtgaagtttctgaggggaaacaaagccgtcatcgtccttcatggactctacgccggcaaaaaagccgtgatagtgcgaaccttcgatgaaggcacgcgcgagcgcccctactagcactgcttggtggcagggataaataagtaccctgctaatgtgatcaataatgatt

SEQ ID NO: 244751 - DNA, 273 bp, Glycine max
ctcattgatcaattcttaaaggatgcaatcaatgatagaacagatgaatacgggggaccactataaaaccggtgcaggttcttaatggaggtagttgaagctgttgtctctgccattgtagcggaaagagttgctatcagaatttcaccagcaattgatttcaatgacgcctttgactctgacccacttgggctaggcttatcagtgattgaaagactcaacaatttgcagaatcaagtgtgctcaaaactctcttatcttcatgttactcag

SEQ ID NO: 244752 - DNA, 339 bp, Glycine max
gaagacagattacgttggtaccgtggaaaggaatggagctacctcaggggtggtctaactactcttgatcgtgattatggatggatcaataacattcaccatgacattggcactcatgtcattcatcacctatttcctcaaattccacactatcacttatttgaggctactgaagctgctaagccagtgtttggaaaatattatagagaaccatagaaatcatcagcacctcttccttttcaccttattggggaaataataaggagcttcaagactgaccattttgttagtgacacaggggatgttgtgtactattaatcttactctaatattaatggc

SEQ ID NO: 244753 - DNA, 186 bp, Glycine max
gccagcgcgatccgccagatgtagcggcaactcgccgtgacggctctctccgtgagcgtgtccaagacgcgctcatgcgcgtcgttcgtgaagagaatagggctccgtgaagggaatgaagcccagagagtacaacgcactgcgtgactgcgtggagaacatgggcaacaacgtggaccgtctcag

SEQ ID NO: 244754 - DNA, 229 bp, Glycine max
ggcagccaaagaaaagaaaatcctcaatttttggagcagccaaacactcggtctgtgtctctcgaaaattctcagtttgcagaaaaaatctgaatcatgtcgtggcaagcatatgtcgaccatcaccttctgtgtgacatcgaatgtaaccacctctctcgcgctgctatcatcggccaagacggcagcgtttgggctcatagtaccgactttcctcatttcaaacctg

SEQ ID NO: 244755 - DNA, 225 bp, Glycine max
  unsure (1)..(225): unsure at all n locations
tatgactacagaatgggattcatattttccttgcgtttcccttgcgttttggctcactttctcggctggccaaacacccctctctctcctccaataaccgaccagctcaccgacgaccatatcgcctaattcatagaagccttcatcctcttctacaaggacngcgatggttatattactactaaagaacattatactgtgatgctgtcactatggcaaaaccca

SEQ ID NO: 244756 - DNA, 264 bp, Glycine max
ggacactcctgaagaggatgatgagaagagcggaggggtggttgagccgtcagaaatcatgaagggcagcaagatgtactacaggtacatgggatcactcactgcacctccttgcactgaagacatcatttggaccgttgataagaaggtaagaactgtttcaagggggcaagtgaagttgctcaaggatacggtacttaaatattatgccaaatggaatgcaaggccgctgcagcccctaaatcatcgagcgatacaacttta

SEQ ID NO: 244757 - DNA, 320 bp, Glycine max
  unsure (1)..(320): unsure at all n locations
tgggagaggctgaagcggcaaatcgcgtctaccgagttccacagcgggagcttatcttantagcttaactctttctactggcgtggcgctgctggatgcttttgatcaatagaacaggaagaggagtcagccaaaaagaaagaccaccaaaagtaatgaccaccaagatatgcatagtgattcgatcttttgatcacccatttttggaaaaccattttggggggcttaatcctttcacacagaagattggattgcctgaatcacgagtcttatatactgggttacgatcaccttatattgataaaaagttcagagaacaa

SEQ ID NO: 244758 - DNA, 284 bp, Glycine max
ggtatcatgagggttccatgctgaccttcgaatgtcagaggatccagggcgcttggagtatcgtcgctaagctcacttccctccctttccagcagtgccaccactccatctccaccgtcgactgccagccctccggtgtcaacgctggcatgcttgtctttgtcagcggcaacctacagctcgctggctaacagcacactctcaagttcagccagatgttccatttgatacgcacgcctcatgagaaacaattaatgtgttgaatgacatattccgtttgaact

SEQ ID NO: 244759 - DNA, 277 bp, Glycine max
tataggtaaggatcagcagggagaattaggtgtggtatgatttacaccaaggaggggcagctcccgcaacagccatggttctcaaaactgaactatgccgattcaatggtgccaagatctacccaggaaagggcatcagatttgttcgtggtgattctcatgttttcctgtttgcaaactcacaatgtaagaggtatttccacaatctcctgaagccttctaatctcacctgtactgcattgtacataaagcaacatatgatagacatttcttatta

SEQ ID NO: 244760 - DNA, 306 bp, Glycine max
ggaactgactggaggaaagcatctaggcaatgttcaagggagagattcaagagtttgagcctaaatttgatgaaagatggctcgcttcagcttcatgatgaaattactggtcaagctgtggtggtttgagtgtaaagtaatttctttctgtagcctcatgccatgcgctcactcagttactcatttttcttgcaccacctattgtgcttgaaatatcgtttgcggaatctctccaaggaagcaagttttgggcaggtttgagttttagtggttgaagcattctaatgatcttgagtttgattatgt

SEQ ID NO: 244761 - DNA, 344 bp, Glycine max
ctccatgtaaatgaggatggaagcctgttaagcacaatttctgatggagagtgctctctagttgattgggtccttgtagatagtgcaaagggtggcagtggtaaagcattcaattgggaccagttgaaactgccaaacattaaaagcaagtatggttggctcttagcaggagggatccatcctgagaatgtttctgaggctctatctactttcaggcctgaaggggtggatgtcatcagtggcatttgtgcatcagatggtatccctaaggatcaatctttaataacttctttcatgaatgccttgcaatcttttcagtattgattaccttaaattattattaa

SEQ ID NO: 244762 - DNA, 250 bp, Glycine max
taaggtaacgcatccaagaaaagaaaatcctgacccgttttcttcgtaggcgggcactctgaaattctcagttatgtcgtggcaagcgtatgtggatgatcacctactgtgtgaaatctaaggtaaccacctcactcgcaccgctatcatctgccaatactgaagcttttgggctcataacaccaactaccctcatttcaaacctgaggaaataactgccatcaataatgactttaatgatcctggatca

SEQ ID NO: 244763 - DNA, 364 bp, Glycine max
taccttaggggtggtctaactactctggatcgggattatggattgatcagtaacattcaccatgacattggaactcatgtcattcatcacctatttcctcaaattccacactatcacttagttgaggctactgaggcagctaagccagtgtttggaaaatattatagagaaccaaagaaatcatctcctcttccttttcaccttattggggaattaataaagagcttcaagactgaccattatgttagtgacaagggggatgttgtgtactatcaaactgactctgagattaatggctcgtgcaaatcagagtgaagattaaaaatgcattttatataggacaagatagactgatacacaattc

SEQ ID NO: 244764 - DNA, 177 bp, Glycine max
acagcagcaaacatcttcacaaactaggtaaagagtaatattattcttcgaatcgcattttattattcataatgggtgttttcacatttgatgatgaaaccacctcctctgtagcaactgctaccctttacaaagctctaattgcagatgccgacaacgtcattccaaaagctgtag

SEQ ID NO: 244765 - DNA, 378 bp, Glycine max
  unsure (1)..(378): unsure at all n locations
gaggcaatagaaaagaaaaccaagtcgagttgtcactttgaagagaaggaacgagcgtaaagatgtctgcatcaggaggcagaggaagccaagaggaagagaggaagccttctgatcaaggagcacatattaatctcaaagtcaagggccaggatggtaatgaggttttctttaggattaaaagaagcactcagctcaagaaacttatgaatgcatactgtgatcgtcaatctgtagattntaacttcattgctatcttgtttgatggaaagagactccgagctgaacagactcctgatgagctagagatgggggatggtgattagaatgatgcaatgctgctccaaattaggggtatacactaatatcttataattg

SEQ ID NO: 244766 - DNA, 358 bp, Glycine max
tatagggtacttcatccaccataaccctcttaccctttaggtcagcaaactcatttctgtggaaaaccctcaaactcaacacctcttccccacactctcacctttcactacccctcaacaagtctttcacttgtagaagccaggctgaaccatcttctgactcatccaaagtccaagaactgaatgtgtatgagatcaatgagagagatcgtggaagccctgcttatcttagattgagccagaaaactaacaattcccttggtgacctaatccccttcagcaacaagttgtactctagatgtttgcaaaagagggtagggataacagctggaatttatgtgttgatccaaaacaaatc

SEQ ID NO: 244767 - DNA, 301 bp, Glycine max
gggataagtgtgaatgtgacgctgatattctggcttgcaagatatgaagctggggtagatgcttacttggatggtcttgaggcatctgggttaaatgacctctctagagttacaagtgttgcctctttctttgtcagtagagtggacactctcattgacaaggcccttgagaaaattggcaccccagaggctcttaatctacgtgggaaggcagcagtggcccaagcagcattggcttaccagcgtctccgaaggaaatgttctggtccaaggtgggaagctctagttaaaaatggggcca

SEQ ID NO: 244768 - DNA, 227 bp, Glycine max
gaacgtaaaaaaaaaaaagaataataaatagagggaggagcatgttgattatatagaaagtaaagggcaacaatcatttttgtttaccatgggtaaggacaccatcgctgacataataacctatataagaaatgctgacatgaataaaaaaggaatggttcaaataccatttactaacataacagaaaacattgtaaaaatacttttacgcgagggttttgttgaaa

SEQ ID NO: 244769 - DNA, 235 bp, Glycine max
gcactagaaaatattgaagagggaatgtaaggagttgacaatgagaaagcatgattaatgtctcaatcgaagtttgagaagaagtttgggcaatcatctgttttcatagcttcaacactcttggaagatgggggtgttccaaaatcatcatgttcctcatcactcttgaaagatgtccattctgtaattattttttgttattaatatatgtcctatttatgataaagatgtttat

SEQ ID NO: 244770 - DNA, 392 bp, Glycine max
gcagcaaaagacatttgaagcgccgtcgtttcaatctccatcgtcgccttgaaaagaaaaaccctaattacaagaagttgcaaaactaagtggaataagagctgaaaaaccctaataacaatgggaggaaaatgtccgcacaggaacgtgaagaagagaagatattctcacaagaccgcgcggcgaaccaaatttgagctgaaaggggacgacatggtttatgcgcagctcaacaaacccgatcaagagagaccccctttacccgtcgacgaagatttgcctgggatgggccagtactattgccttcactgcgatcggtactttgccaatataactgtgagggatgagcactttaagaccaaacgacacaagaagcgtataaaacaaatgat

SEQ ID NO: 244771 - DNA, 368 bp, Glycine max
gaccaaagctgatttggtgaacaacttgggtacaattgctagatccggtaccaaggaattcatggaagccttggctgctggtgctgatgttagtatgattggacagtttggtgtggggttctactctgcatatcttgttgctgagaaggtcattgttacagccaaacacaatgatgatgaacagtatgtttgggagtctcaagctggaggttctttcactgtcaccagggataacactggtgaagttcttggcaggggtactaagatcactctctacctcaaggaagatcagcttgagtaccttgaggagcgtcgcttgagggatctgatcaagaagcattctgagttcattagctacccaatttctc

SEQ ID NO: 244772 - DNA, 388 bp, Glycine max
ggagaacaagggaaagatttcactgttctccagttaatgatctattgtgtctttggtgttctggctggtgtagttggtggcatgttgggactaggaggaggattcgttatgggtccactttttctggagttgggagtcccacctcaggtgtcaagcgcaacagccacctttgcaatgaccttctcctcatctatgtctgtcatagaatactacctgttgaaacgttttccagttccttatgctctttacttcattcttgtggctactattgctgcctttgttggacagcacattgcgagaaaactaattatcctattcgggagagcatctcttataatcttcattctagcctctacaatatttgtcagtgccgtcttgttaggtggag

SEQ ID NO: 244773 - DNA, 254 bp, Glycine max
gctgatcgcatgagcaaggaaattagtgctcttgcacccagtagcatgaaaatcaaggtggttgcacctcctgagagaaagtacagtgtctggattggtggttctatcttggcattacttggcaccttccaacagatgtggatctgcaagggtgaatatgatgaatctgggccagccatcgttcatcggaagtgcttctaaagttgggtcaagtcgagctggatggtgatcaagttcttcatgcacccagtcct

SEQ ID NO: 244774 - DNA, 412 bp, Glycine max
gatcgagaaaggggtgttcggaagggatgcaatcaatgtgatagcatgtgagggggcagagagggttgaaaggccagaaacctacaagcagtggcaagttaggaaccagagagcagggttcaagcaacttccattggccccagagcatgtgaatagagtgaaggaaatggtgaagaaggaacatcataaagattttgtggttgatgaggatggcaagtgggttttgcaaggatggaaagggcgaattctttttgctgattcctcttgggttcctgcttgaggaatgaccaactcctaacccactcattggcaaggaaaattgttttaggtgtaaagtgcactaagggtatatttatccttgaatagaagggaatcatgatcatattttgtttctatttgaatagtgaaaata

SEQ ID NO: 244775 - DNA, 401 bp, Glycine max
ggattagatgaatcaggagctcacctctattacaactgtcccagtggaaactattttgaatatcaggcttttgctattgggtctcgctctcaagctgcaaagacatatttggaacgcaggtttgagaattttgtgggctcttcacgagaagatctgatcaaagatgcacttattgtaactagggagtccttgcaaggtgaaaaactcaggagttctgtgtgcacaattgctgtggttggtgttggtgagccattccacattttggatcaggaaactgttcaacagttgattgatacttttgagattgtgagggaggaagaagctgctccagctgaagaagaagctcagccagcagccggacaggatgctcccacagatccaggtgctgctgctggtgctgc

SEQ ID NO: 244776 - DNA, 359 bp, Glycine max
ggaggtaaatgtactcagcaatccaatccagagatttgcagtttggtttggaggatcagtgcttgcatcaacacctgaattttttacggcttgtcatacaaaggcagaatatgaggagtatggagcaagcatttgccggacaaatcctgttttcaagggaatgtattaaatcaacgacaaattagttgattatcgatgcagttatttgataagactgttgaatgaatgtctggctggttatcgttatccttaattcacttcttggtctttcttcccacctaaattcagagggcgacggaagtgagtgtaaaatatgtatattaagtgaaaatatgcattttgtttttatccgggcaatc

SEQ ID NO: 244777 - DNA, 388 bp, Glycine max
ggcagttcaattccaatatactccattctctctgtgtatttccctacctctcccttcaagatgcagatcttcgtcaagaccctcaccggcaagaccatcacccttgaggtggaaagctctgacaccatcgacaacgtcaaggccaagatccaggacaaggaaggaatccccccggaccagcaacgtctcattttcgccggaaagcaacttgaggacggccgtacccttgttgactacaacattcagaaggagagtactcttcacctcgtcctccgtctccgtggtggcatgcagatcttcgttaagacactcaccggcaagaccataaccctagaggttgaaagctccgacaccatcgataacgtcaaggccaagatccaggacaagg

SEQ ID NO: 244778 - DNA, 331 bp, Glycine max
taccaagtagctgatgatacattacttgtctattatgtcacacgccaggctacatttgagaatgctacaagatggttgaaagagttaagagatcacacagactccaacattgtggatcatgcttattggagataagtcgagatcttcgacaccttgactgctgtccacaacagaatatggaaaatttactgccgagaaggaatctctctacttcatggaaacttctgcattagacgcatccaatgttgaaaatgcatttacagaggtgatctatcagatataccgaatagtgagcatgagaactgttcaagacctcaagaatgccaaactt

SEQ ID NO: 244779 - DNA, 373 bp, Glycine max
gacaacatatccattttatttacaacaacaatggcttctgtgcctcaaccaaaaatctcccttctaaccttattcttcttctcgtccttcaccatcattgcgcatgcaattgttcctcaaaacgaaaccttcaaatttgagaactcaggtgaacttggaccctacatcgttgagtacggtgcagattacagaatgataagcatcttcaactctccattccaagttggtttctacaacaccaccccaaatgccttcactctagctttgcgtgtagggctccaacgctcggagcagctatttcgttgggtttgggaggccaatagggccaacccagttggagaaaatgccactttttcacttggcactgatggga

SEQ ID NO: 244780 - DNA, 380 bp, Glycine max
gatcacttaagcaaaacaatgatggctggtgttagtggcagtagcactactcccttattgtgctctttgttctttatttcttccttactttttgcttcctgcacccatgcctcctcccaggcacctcctccaattgtggatggactttcatgggatttctataggacgagctgtcccatgcttgaagggatagtgagcaagcatctccagaaggtgttcaagaaggacaatggtcaagctcctgccttactcaggatcttcttccatgactgctttgttcagggttgcgatgggtcgatattgttggatggaagtccaaatgaaaaggatcaaccggcaaacatagggatgaagccagaggctttgcagaccattgaaaa

SEQ ID NO: 244781 - DNA, 427 bp, Glycine max
agaagacgacagagggggcagcgcttgatttgaggccaggcaagccccactcaaccaccacacctctcctcgttcacgctacccctttctgctcttcttctacctttcaagttttaaaagtataaagatggcagagacattcctatttacctcagagtcggtgaacgagggacaccctgacaagctctgcgaccaaatctccgatgctgtcctcgacgcttgcctcgagcaggacccagacagcaaagttgcctgcgaaacatgcaccaaaaccaacttggtcatggtcttcggagaaatcacgaccaaggccaacgttgactacgagaagatagtgcgtgacacctgcaggaacatcggcttcgtctcaaatgatgtgggactggatgccgacaactgcaaggtcctcgtcaacattgagcagcag

SEQ ID NO: 244782 - DNA, 403 bp, Glycine max
ggggacaaggaggcacgccttaaaccaacttgtgtggctgcacttattgattccaattttcataaaattgcttgtgggcacagtttgacagcaggcctgacaaaatctggacgtgttttcactatgggaagtactgtttatggtcagcttgggaatcctcaatctgacggaaaggttccatgcttggtcggagacaagattgccagggaatcgattgaagaaattgcttgtggagcatatcatgtagctgtattaacatccaaaaatgaagtttatacttgggggaaaggtgcaaatgggagactgggtcatggagatattgaagatcgtaaaacaccggctttggttgaagcattaaaggatagacatgtgaaatatattgcatgtggttcaaattactctg

SEQ ID NO: 244783 - DNA, 398 bp, Glycine max
gatcaaacagatggtggtgatggctatgtttctgttgaagtatctcccaggctcgctgatgacactgagggaaccatagaagctgcaaaatggcttcataaagtggttgatcgccccaatgtgtatattaagattcctgctacagaggcatgtgtgccttcaattaaggaagttattgctaatgggataagtgtgaatgtgacgctgatattctctcttgcaagatatgaagctgtaatagatgcttacttggatggtcttgaggcatctgggttaaatgacctctctagagttacaagtgttgcctctttctttgtcagtagagtggacactctcattgacaaggcccttgagaaaattggcaccccagaggctcttaatctacgtgggaaggcagc

SEQ ID NO: 244784 - DNA, 402 bp, Glycine max
  unsure (1)..(402): unsure at all n locations
gacagacaaacgaacaatttaccagctatacttgttccttttgaaggttagaagtgctacaattacaaacaatggcagcttactcaggaaggatgtgaagcttttgggtattggggaaagcccattgtgtgcaggtccagattgccttaagtgaaaggagtngaatacgaatttttgggagaaaatttgggcaacaagagtgatttgcttctcaaatacaaccctgtacacaagaaggttccagtgtttgttcacaatgagcagcccatagcagagtctcttgtgattgttgaatacattgatgagacatggaagaacaaccccatcttaccttctgatccttaccaaagagccttggctcgtttctggtccaaattcattgatgataagattgtgggtgct

SEQ ID NO: 244785 - DNA, 409 bp, Glycine max
gaagacgacagaaggggaaaccgaatgttagcattaacctcttcttcttccactttcattccaaagcgttattccttcttcttcttcctctccattctcttcgctcttcgatcctcgtccgggggctgctccgaataccaccaccaccacgcgccgatggccacgataggaggcttacgcgactcccaaggctctcagaacagcgtccaaaccgaggccctcgctcggttcgccgtcgatgaacacaacaagaagcagaattcacttctggagttttctagggtggtgaggacacaggaacaggttgttgcgggaaccctgcatcaccttactctcgaggctattgaggcaagtgagaagaagctctatgaagccaaggtgtgggtgaaaccatggttgaatttcaaag

SEQ ID NO: 244786 - DNA, 335 bp, Glycine max
ggagttgggagagtgcctccgcacgagtttctggcgaggacgagaatcgcttcgttctcggtgcacgaaggagctgggaggactctcaaaggacgcgatctcagtagggttcgaaacgcgatttgggctaaaacgggattccaggactagacccttaccataggatgataggatcataacataagttaattaccgtattaatttactactgtattaccaattgaaacgacttttgttgagaggtcatttttagatttttcattttttcgatcagcatctatgtgtatcagatcggaatttgagattttaatttgcaccgagagctttttgtttat

SEQ ID NO: 244787 - DNA, 335 bp, Glycine max
aggcgtgcgaagacgtgtgagaggtaccagagcagggcattcactgtgtcggaaaaggaagacgagatatgagatgagtgtctgacgataacgacaaggtggaagagcgttgtcgatgtcgatagatagcactgaggctggtacgaactttgaacctgaactgaaacccgtcgatcgctatatgacatgtccgttactgttgcgagtgatcactaaaattgatagtcaccattctatgtaatactttggcgtgcgatgcaagtagctgaaggacgcggctcatatttacacctgtatggacactaatattcgagaactaactgatatcgtcatag

SEQ ID NO: 244788 - DNA, 378 bp, Glycine max
ggaaaaacggtaaacgatggtagtgtcgcaggcgtgtcttggctatggaagaatggatctggctgtggagcatgttatcaggttaggtgcaaaataccacaattctgcgatgagaatggagcatacgtggtggttacagattatggcgagggagacagaacagactttattatgagtccacgtgcctactcaagattggggagaaatgcagatgcatctgcagaactattcaaatacggtgtgatggatgtagaatacagaagggtaccctgtagatacggtggctataacctcttggttaaggtccatgaacacagcagaaaccctcactacttagccattgtcattctctatcttggtggaacttacgacgtaact

SEQ ID NO: 244789 - DNA, 409 bp, Glycine max
  unsure (1)..(409): unsure at all n locations
ggaaaatattatagagaaccaaagaaatcagcagcacctcttccttttcaccttattggggaaataataaggagcttcaagactgaccattttgttagtgacacgggggatgttgtgtactatcaaaccgactctaagattaatggctcttccaaattagagtgaatattaaaattcttttctatatagacaagagaggcttatacacaattcttattgctttaaagattgtcttgagtttctccgaaagttactgcacttacttggagttgaatccttcattaataaagggatggatggatcatataatttcaattgtaactgcatgatagaatgtttaggttatatgtagttttatctntcttgaatagtgaattcctcaatataaattgattatattgaagtgata

SEQ ID NO: 244790 - DNA, 398 bp, Glycine max
ggaacctgtgcgttctattcatacaggattcagcaagtgcgtactggaagcagagaccgaaatacttcgagatggcccgtacaaagcaaactgctcgtaagtcaactggaggaaaagctcccaggaagcagcttgcaaccaacgctgcacgtaagtctgcaccaacaactggtggtgtgaagaagcctcatcgttatcgccctggaactgttgctcttcgagagattaggaaataccagaagagcactgagctcctaatcaggaagcttactttacagaggttggttcgtgaaattgcccaggatttcaagactgatctgcgattccagagccatgctgtgcttgcattgcaagaggctgctgaagcataccttgttgggctctttgaggacactaac

SEQ ID NO: 244791 - DNA, 408 bp, Glycine max
ggcggcacaaagcattcactgtgtcggaaaaagaagaagagaaaaaagatgagcgacggaggaaaacgacaaggtggaagagcgttgccgccgccgccaagaggccctccgcctcctcccccctctcgccctcgcctcgaacccgtcgatcgcgaaaagacatgtccgttactgctgcgagtgttcactaagattgggagtcaccattccatggaagactttgccgtcagaggcaaagagcccaaagacgaggttcagatttacacctggaaggacgctactctccgagaactcaccgatcttgtcaaagaagttgctccggctgcaaggagaagaaacgccaaactctccttcgcctttgtattccccgacaaaaacggccgtttcaaagttcaagaggtgggcaag

SEQ ID NO: 244792 - DNA, 338 bp, Glycine max
gtgaagagtgatgtttatagctttggggtattgctcctcgaagcaattactggaagagacccagtggattatagccgaccagcaactgaggtaaatttggttgactggctcaagatgatggttgggaataggcgcgcagaagaggtggtagaccctaacattgagaccaggccatcaacaagttcccttaaacgtgcccttttgactgctttgaggtgtgttgatccagattctgagaaaagaccaaagatgagtcaagttgtccgcatgcttgaatcagaagaatatcccataccacgcgaggatcgaagacgccgaaagagccaggcaggaaatat

SEQ ID NO: 244793 - DNA, 313 bp, Glycine max
atggttatagctttggggtatggctcggggaatcaattactggaagagacccattggattatagccgaccagcaactgaggtaaatttggttgactggctcaagatgatggttgggaatatgcgcgcagaagaggtggtagaccctaacattgagaccaggccatcaacaagttcccttaaacgtgcccttatgactgctttgaggtgtgttgatccagattctgagaaaagaccaaagatgagtcaagcttgctcgcattgcttgaatcataagaaatttccattccactctaggatcgaaaatacctaaag

SEQ ID NO: 244794 - DNA, 416 bp, Glycine max
  unsure (1)..(416): unsure at all n locations
gatgggactcatggtgttgatgtggggatcaagagcgttgtagatgagaatgaaagaaaatcattgggtggtcatcatggtgctgcttgtcctgcatgtgagatggcggttgtttggatgcagaaccagctgagccgaaatcagacacaagatcagatactaagttacatcaaccagctttgcgataaaatgcctagcccgatgggagaatcagctgttgactgtgggaatatctcttcattacctgtagtgtcctttactattggtggaagaactttcgaccttagcccagaggagtacgtactcagggtgggtgaaggtcctgtggctcagtgtattagtggctntactgctatagatattccaccttcacgtggccctctctggatccttggtgatgtcttcatggggcggta

SEQ ID NO: 244795 - DNA, 331 bp, Glycine max
ggtagagaaagagagagaaagatgtcgaagcgtggccgtggtggttcggcggggaacaagttccgcatgtcgctgggtcttccagtggcggcgacggcaaactgcgccgacaacacgggggcgaagaacctttccatcatttcggtgaaggggatcaaaggccgttggaaccgtcttccttgggcctgcgttgccaacatggtgatggccaccgtgaaaaagggaaaccccgacctgaggaaaaaggccttgccagctgacatcgttcgccagcacaggccatggcgccaaagggacggtgtatacatgcacttcaaagataacgctggtg

SEQ ID NO: 244796 - DNA, 412 bp, Glycine max
  unsure (1)..(412): unsure at all n locations
ggcctcagggttctcaattcatactgggtgaatgaggactcgacttacaaatattttgaggtcattctggtggatgttgcccacagcgctgttagaaatgatccaagaatcaactggctctgcaacccagtccataaacacagggaactgcgtggcctcacttctgctgggaaaagtaacaggggtttacggggcagaggacatctctaccacaaaaatcgtccatcccgcagggcaacctggaagagaaacaacactctctcccttcgtcgctaccgttgattttgttgcagttatcgtatgttgcttcattttccaagtatttggagtgcattatatgtagactntaggaaaatcgtcagttttgaacgcctgaatcatgctttttccccccaaatcttgtcttagtact

SEQ ID NO: 244797 - DNA, 365 bp, Glycine max
tgtcacccctctgtctcttggtttggagactgccggtggtgtgatgactgtcctgatccctaggaacactacaattccaacaaagaagaaacaagttttctcaacatactctgacaaccagcctggtgtgcttatccaggtctttgagggtgaaagagcaaggaccggagataacaatttgttgggcaaatttgagctatctggcattcctcctgcacccaggggtgttcctcagattacagtgtgctttgacattgatgccaatggtatcttgaatgtctctgccgaagataaaaccactggccagaaaaataagatcactatcaccaatgacaagggtagattgtcaaaagaagatattgaga

SEQ ID NO: 244798 - DNA, 403 bp, Glycine max
ggagaaaaacgagccaattcatcattttctctcttctctgcttcttcttgttcaaatcttaggagctgaggagaatcaatcgagagaaatatgtctggtatcgcccgtggacgccttgctgaggaacgaaagtcatggcgcaaaaaccatccacacggtttcgttgccaagcccgagactctacctgatggcaccgtaaatttgatggtctggcattgcactattcctggcaagaccgggactgattgggagggtggatatttcccactgacaatgcacttcagtgaagattaccctagcaagcctcccaagtgcaaattccctcaaggtttctttcaccctaatgtgtatccatctggaactgtttgcttgtctatacttaatgaagatagtgggtggagac

SEQ ID NO: 244799 - DNA, 404 bp, Glycine max
ggaagaagagagtagcatactacaagaccctggactatcagctagcagagcgtgggagataccgtaatttgcttgatatgaatgcttgcttgggaggctttgcagctgcactgattgatgatcctgtgtgggtgatgaacactgttcctgttgaggctgaggtcaacacacttggtgccatatatgaacgtggattgattggaacctatatgaattggtgtgaagccatgtccacttaccctcgaacttatgacttcatacatggtgactcagtttttagcctctaccagaacaggtgtaaagtggaggacattcttcttgagatggatcgaattttgaggccagaaggaagtgtaatcttgcgagatgatgtggatgtgttgttgaaggtgaagagtttcaca

SEQ ID NO: 244800 - DNA, 396 bp, Glycine max
ggaaaaagcttgatcaagaattgaagcatattgatcttcagccatggctacacccttggcctaccaagagcaccttccggcggcacccgaatggctgaacaaaggtgacaacgcatggcagctaacagcagccaccctcgtcggtcttcaaagcatgccgggtctcgtgatcctctacgccagcatagtgaagaaaaaatgggcagtgaactcagctttcatggctctctacgcctttgcggcggttctaatatgttgggtgcttgtgtgttaccgaatggcctttggagaagaacttttccccttctggggaaagggtgctccagcactaggccagaagttcctcacgaaaagagccatagtcattgaaaccatccaccactttgataatggcac

SEQ ID NO: 244801 - DNA, 399 bp, Glycine max
ggaggaaaagttcttgttcagtttgaagattttgcgaaccacaatgcttttgagttgcttgcaaaatatggcacaactcatcttgttttcaacgatgatattcaggggactgcatctgttgttcttgctggggttgtggcagccttgaagctcattggaggtactctggctgaccacacattcttgtttcttggtgctggagaggcaggaactggaatagcagaactaatagctcttgagatgtcaaagcagacaaagacacctatagaggagactcgcaagaagatatggcttgtagactcaaagggtttgattgttggttcaagaaaggcttcacttcaacacttcaagcagccttgggctcatgagcatgagcctgtaggcagtctcttagaagct

SEQ ID NO: 244802 - DNA, 400 bp, Glycine max
gtcattaagatgccatctaacggcgacgttcccttcactcacgccaacgtcagcttggccttcagggatttcgcctacaaacccaccaccgatctctccaccggtctcagcaagttcgtcaagtggtacctcggttattacggccttcagccaagcctgaaaaaggataatcaccttcacaatattgaatgaccatttctataattatctctcctctattttgttctttttacggcaagaaaaaaaaacaaaaaaaccttccccttgctcatggatcatttttcttggttttggtgaatcattattattattattattggtattggttgtgtggtgtagcaattatacatcatataaatatctggtatagatgaaagacatgcatatatataaatgtcat

SEQ ID NO: 244803 - DNA, 312 bp, Glycine max
gcttgactgtactgctgctgatttgccaatggaggcaacccttaagccttggataaagcacttcaagttggaagtgtgccatttgatcagtacttgaggagcgtgaaggccctgtccaaggagcaattctttcaccgcgccactgtcaccaaagttagggctgctcaactgcaagctcaggttgccaatatggctgctcggagtcagcattatggttgctgaagctcgcaacaacgccatctggtttggtttgtgggtggttcaaatgatgaaatctgccattgtgagtacagaactacggaatggattttt

SEQ ID NO: 244804 - DNA, 372 bp, Glycine max
ggaagtggaactggctatggaatcaacactgggggtgcgcacactgaagcagggtatgggaaggagcatcgtcagcatgagcaatctcatggtggtcagcacgagaagaaagggatactggacaagattaaggagaagcttcctggaggacacagtgacaagtagatgcatcgtgcatgcatgcatatagtatatatataatattgttgtctttgaataaatttgctgcatatgtacttggaggatatagcatatggttatagtatattatatagaggaataaaaaatgtatgcctgtaatgtaagggttctcatatacatggctgaaatataaagcataataaaggcattgaatgtgtgcccaatcatatg

SEQ ID NO: 244805 - DNA, 410 bp, Glycine max
gattgggtgctgatcggaacaaacagggaatataagagagaaaaagatgggtttcataatggaattcgcggagaacttggtattgaagttgatggaggatccgaaggaaagggatcggaggttccgggagcacgtttatagagtgaaggacaggtgcgagaagacgaaggagatgtggagctaccctatgcgaccctatgggttttggactttcgaacgccacaattctcagcttgcttgggatgcacagattagccaagtggctgggaggagggacccttatgatgatatcctccaacatttctctaccccacctaagtgagtgttgctgaacttgccacaaacattgtaggtgaaaaaggatatgaacttggcgtaatttccccttgtaatatcctgtcttgttgcat

SEQ ID NO: 244806 - DNA, 407 bp, Glycine max
gggatagattattatcattctggtgccatccttcctacacctagagatctcattgacactgtacgaggtcttgttatttcgcgtggtcttagtctcatcattgaaccagggagatctctgatcgcaaacacatgctgcttagttaaccgggtgacaggtgttaaaagtaatggatctaaaaattttattgttattgatggaagtatggctgaactgatccgccctagtctctatgatgcttaccagcatatagagctggtttcccctgccccatcaaatgctgagacaacaacttttgatgtggttggccctgtctgtgagtctgcagatttcttaggaaaaggaagagaactacctactccagccaagggtactggtttggttgttcatgatgctggtgcttattg

SEQ ID NO: 244807 - DNA, 434 bp, Glycine max
aagacgacagaaggggccttagagcacgatgttttggaagcgttctcgtccattttgcctccagtttattccataggtcctttgaatttacacgtgaagcatattgatgacaaagagttgaatgctattgggtctaatctttggaaggaggagtccaagtgcgtggagtggctcgacactaaacaacccagtagtgttgtttacgtgaattttgggagcatcgcggttatgacaagtgagcaattgattgagtttgcatggggacttgctaatagcaacaaaaactttttgtgggccataagggcagatcttgtggcgggtgaaaatgctgttttacctccagagtttgtgaaacaaaccgaaaatagaggcctattgtctagttggtgctcccaggagcaagtgttggctcacccttcagttgggggattttt

SEQ ID NO: 244808 - DNA, 404 bp, Glycine max
taatgaaggttgcctatctttcccaggcatcaatgctgatgtaaagcgaccagaatctgtgaagattgatgcacgtgatatcaatggaacaaggttttcagtcaacttgtctgaccttcctgcacgaatatttcagcatgaatttgaccatctacaaggaattcttttctttgagagaatgactgaagaagttcttgatggtatttgtggacagttacaggccctagaaacaaagtacgagggaatgactggactctcaagccctgaaaagatagaaaaccgcaggaggagaaaggtcgctgttggttttgggaaacgatgatcttcaaggtcaatattaggcataatactgaatgcacacttgacagacatttcaagtttgaacttcataaaaagatgaagca

SEQ ID NO: 244809 - DNA, 385 bp, Glycine max
  unsure (1)..(385): unsure at all n locations
gagagcgaaagagatgtcgttggtttcaagcatgttcgggtgtggagtggtgatggcggcgtcgcaagcaatgggaattggaaggagaagcgatggtggattgacgatagtgtgttcgtctaggccgcagaagaaagcgacggcgcatcacatgaagactcggcctcggaagacgcaggcatgggatagaaaccgcaagcccaccgtctacgatccactcccttctcttcctcctgattggaccctcgttattcccgctgacgcttcttctgctcccgttacgccttcgncttcaactncctctgcctagtcactctctcggtactctctctcgttttcatgtaatcttatctttaattccagcagcttttctttcatgttttca

SEQ ID NO: 244810 - DNA, 220 bp, Glycine max
cacgtaggggttatagagagactacatagtgatcctgacttttaagcgcaacaatggaggtcgcaaccaacacggccgaagccacctcaagttcattcgatgctacgactggcgcaaatgctgtgctaaggaccaagctatcaagaggtattttgtgaggaacattggtgaacaggcttcagatagagatattcacgaggcttcgatctatgaacaatta

SEQ ID NO: 244811 - DNA, 389 bp, Glycine max
gaatctcagcttgagaaattgaagaagtatgcaactgtcattcgtgttctggctcatactcagataaggaagttgaagggtctaaaacagaagaaagcacatttgatggagatccaagctaatggtgggacagttgaccagaaggtggactatgcatatagcttcttcgagaagcaaatcccagtggatgctgttttccaaaaagatgagatgatagatatcgttggagtgactaagggtaaaggttatgaaggtgtcgtaactcggtggggcgtcactcgccttcctcgaaagactcacaggggtctaaggaaggttgcttgtattggtgcctggcaccctgctcgtgtttctttcactgttgccagggccggtcagaatggatatca

SEQ ID NO: 244812 - DNA, 408 bp, Glycine max
gggtcttctacccattcaatgggcctggaacagccaaagtatggctcatagatattccactagggaaaataggagaacatattggagactgggagcatgtgacactaagagtaagcaatttcgatggagaactaaaaaaggtgtatctctcacaacatagcaatggtcaatgggttgaagcttctcagctcgagttccaaagtgggaacaaatcaatgtgctattcctccttgaatggccatgccatttattcaaaagcaggacttgtcatgcaaggccttgatgggattggaaataagaatgaaacttagaagagtgagaaagtgattgacatgggtgttggttttgaagttggttctggtgagtatttggggtcagcaattgtagaaccaccttggttaaaccttt

SEQ ID NO: 244813 - DNA, 415 bp, Glycine max
ggaaccgaaacgaacctcaacaacgctgagcgcagaaaggggaaaaggggattagggtttaggaagcagcgacaacaatggatttcacagtggagaagaaggaatcagagaacaacgccgaaaatgctcacccaacaacgttagattcttcttctcaattggcatcggcacttgattccaacaacaaagaaatcgaagaacgacaagctcgtgaactcaaagccggacttcaccccctaaagcacaagtttgtcttctggtacactcgtcgaacacctggagttcggaatcaaacatcatatgaggacaacataaagaaaattgttgaatttaagtacggtggaaggattttgggtctgctactgccatcttggctcgtcctgcttctttacctagtccaacagatttgcacctt

SEQ ID NO: 244814 - DNA, 411 bp, Glycine max
gatctgaacgaaggagagagtgaaagatccttttgtggatcgaacatcttgcgttttattgtggtgttgaggatcgaaaatggatcagatattcaacaaggtcggatcctattggttcaaccagaaagcctccagccagctcaattccgttggtgatgacatcaattcgatgacaaacagtattgaagggggaaccaaatggttggtcaacaaaataaaaggaaagatgcaaaaggcattgccagagttgctaaaggagtacgatctaccaataggaatctttcctcgtgatgcaacaaactatgaattcaatgaagaaacaggaaagcttgttgtttacattcctcaagtatgtgaagttggctacaaggattcatcagtcttgcgtttcttcaccaccgtgactggtta

SEQ ID NO: 244815 - DNA, 356 bp, Glycine max
ggcgtaaaaacaaaaggcttgactagagaaagagagagagagagcttcgaatcgaaactcagaagtagaaagaaacacagatcacaatcgctatggctaggtacgaccgagcaatcaccgtgttctcccctgacggccatctcttccaggtcgagtacgccctcgaagccgtccgcaagggcaacgccgccgtcggcgtacgcggcaccgacaatgttgtactcggcgtcgagaagaaatccaccgccgaactccaagactccaggtcggtgaggaagatagtgaatctggacgaccacattgcgctggcctgcgcggtgctgaaggccgacgcacgcgtgctcataaacagggca

SEQ ID NO: 244816 - DNA, 396 bp, Glycine max
ggagtgtagtgttgttgaggttttttgtagcagaattcagtgcggtgtgttgtagcagcgattagaaagaaggaggaaagatgaacacagacatcactgcatcgacgaagccagagtacccagtcattgatcgcaaccctcctttcaccaaagtcgtcggcaacttcaacaccctcgactatctccgattcgtcacaatcaccggcgtttccgtcaccgtcggctacctctccgggattaagcctggaattaggggtccttcgatggtgacagggggtttgatcggtgtgatgggtgggttcatgtatgcttaccagaactccgctgggagactcatgggtttcttccccaacgatgatgaggtagctcgctacaacaaaaaataattcctttttt

SEQ ID NO: 244817 - DNA, 372 bp, Glycine max
gggttagaatgttgcttctttcccaggcatcaatgctgatgtaaagcgaccagaatctgtgaagattgatgcacgtgatatcaatggaacaaggttttcagtcaacttgtctgaccttcctgcacgaatatttcagcatgaatttgaccatctacaaggaattcttttctttgagagaatgactgaagaagttcttgatggtatttgtggacagttacaggccctagaaacaaagtacgagggaatgactggactctcaagccctgaaaagatagaaaaccgcatgaagagaaaggtcgctgttggttttgggaaacgatgatcttcaaggtcaatattaggcataatactgaatgcacacttgacagacat

SEQ ID NO: 244818 - DNA, 416 bp, Glycine max
  unsure (1)..(416): unsure at all n locations
gactgtggtggcgaaccctaggcagttcaagatcccagactggtttttgaacagaaagaaggactacaaggatggcaaatactctcaagttgtgtctaatgctcttgatatgaagctcagggatgatcttgagagactcaagaaaatcagaaaccaccgtggtttgaggcattactggggccttcgtgtccgtggtcagcacaccgagactactggccgtaggggaaagactgttggtgtctctaagaagcgttaagctattatgtttggcttggagattagattttgttgagaaggaaagtttgaagtacactagacatgttttgcatcataccaactttgtatccgtcgttaaatggcttgacaatttcaattntggttgttatttgcatcaagattcagtttagttaaatgat

SEQ ID NO: 244819 - DNA, 377 bp, Glycine max
ttggggcagagcaatatttccgtacgctctttgtttttcctttcatcggtttccttctccatttatttgtacgtattccaccactgctccccaaaacgcgcgagacttcactcgctggcctctttgaaaaatcaacacctctttttctcctccttctgattccgattccaattccattgaatatggagaaaactctcctcaaggatttcgagctccagcacaaaaatccctccgtcgaagccctccgccgatggagatccgccgtcactctcgtcaaaaaccaccgccgccgcttccgcatggtcgccgatctcgacaagcgcgtccaagccgagcagattaagcaggggatcaaggtttttttctttcactttcct

SEQ ID NO: 244820 - DNA, 403 bp, Glycine max
ggaagcataaaacaaagaaccctgcctagaaaaaaaaatggagtactctaatggattccctagaaaaagagatgtttctcttcaggaacttagcaaaaggcttgctgagtttgctgaagtaagaggatgggatcaatatcacagtcccagaaatcttcttttagctcttgtgggagaggtgggagagctttctgagatcttccagtggaaaggagaggttgcaaagggattgcccaattggagttctgatgataaggagcacttagaggaagagctttcagatgttttgctttatttagtgcgtcttgctgatgtttgtgggctagatcttggacaggctgctctgactaaaatagtgaagaatgctcagaaatacccagttactagtactaattaatcacac

SEQ ID NO: 244821 - DNA, 395 bp, Glycine max
  unsure (1)..(395): unsure at all n locations
ggaattgaaattgaagacaactgggataaggttaagactgcatttgtttcaactggaatgtctcttacgtcagaaatcgttgccccacttgttgcaacccttcccttggagatcaagggagaaattgaggaatttctcaaagtggttttcactctgtttcaagacctgnattttactttcttagagatgaatcctttcacattggttgatggaaagccttatcctttggatatgagaggcgagctagatgacactgctgctttcaagaacttcaagaagtggggagacattgaatttccgctgccatttggaaaggttatgagtgccaccgagtctttcattcatggattagatgaaaagacaagtgcatccttaaaattcacagtgttgaaccc

SEQ ID NO: 244822 - DNA, 315 bp, Glycine max
tgatcagcaactacaacgtgagaaacatggcttccttaagctccttagtgctgctccttgcagctctaattctatcccctcaagttcttgcaaactatgagaatcccccagtgtacaagccttccactgagaaaccaccagtttataagcccccaattgggaagccctcttgttaccaaccttcaagtggaaacccccccatttataaaccctccattgagaaaccacccatgtacaagccccccagtgggaaacccccaatggtccaacccccaattgaaaaacccccaatgtgcaagccccccatttagaaac

SEQ ID NO: 244823 - DNA, 397 bp, Glycine max
  unsure (1)..(397): unsure at all n locations
gtcttaggaagatgaaggaaaggtatgcaataacagacatgaggaagttagccaataggatgcaatttggagtcccagaagagagttcattaggagatggtctgggtgagggctatggaatgcttggtcaggctggcagtggcaagcttcgtgtgtctgttggtcaaagcaaacttgcagcaaaagttgctaaaaaatttaaggaaaagaattatggtagtagtggtgctacctctggtttgacatcaagtcttgcattcacaccagtgcagggtattgagctgacaaatccacaggctcatgcacaccaacttggtagtggaactcaaagcacttatttctctgaaacaggaacattttcaaagatcaagaggacatganaccatgcatgaatgca

SEQ ID NO: 244824 - DNA, 399 bp, Glycine max
  unsure (1)..(399): unsure at all n locations
agaaggggactcaaaattaaccacaagcataagcacaagcacaagcacaagcacttctctaattccctttcacactctattacagatttcacaagtgcttacacttcaaatggctttggaagctcttcaatcacccaccacagccactccatcgtttagtccctttgaagaaaccagtctcagttacttagagacaccgtggacgaaaggaaagcgttctaagcgtagccgcacggagcaacaactgcaacacccttcatgcaccgaggaagagtacctcgctctttgtctcatcatgctcgctcgcggcggcgccggcagtgtctccaccgccaaacccgctgtctccgacaacaattctgcgccgctatccgncgtcaaactgagctacaaatgttc

SEQ ID NO: 244825 - DNA, 409 bp, Glycine max
gggagggacggggttgcatgaaagtttggagaaggttacattccaaacaaaggtggttcctggcactgatggtaatggctctatcgccaaggccactctcacattccacaccaaagacgatgcaccactctcagatgcagtgcgtgatgaaacaaaggccaggggtgctggaattttcaaggccattgagggctacgttttggcaaatcctgctcaatgattatccttcaaaccacttgcatgcatgcaataataattatataagcttatgatctggttgttggagttaatttgtatcatgtggctttgtttggtttaattaatttcctttgtgagcaagtgtcggttttatttatgtaacatttttaaagtgttactattataattcggtgaatttggttgagtatac

SEQ ID NO: 244826 - DNA, 333 bp, Glycine max
  unsure (1)..(333): unsure at all n locations
gaacgcagccaagaaaagaaaatcctcacccattttcttcgcagccaaacactctgaaattctcagttatgtcgtggcaagcgtatgtggatgatcacctactgggggaaatcgaaagtaaccacctcactcacgccgctatcatcggccaagacggaagcgtttgggctcagagcaccaacttccctcagttcaaacctgaggaaataactgccatcaataatgactttaatgagcctggatcacttgctccaactggattgtatatcggtggcaccaaatacatggtcatncagggtgnagcttggtgctgtcattcgagggaagaagggt

SEQ ID NO: 244827 - DNA, 360 bp, Glycine max
gattctgattctgtccatccaaatcttaaaaatattcagtgaagatcaacctcaatggcatctcttggcgtgcgaccagttcttccccctccattaacttccatctccgacccacctcctcttttcgatggcaccaccaggttgtacatcagttattcttgcccctatgcacaacgtgtgtggatcgctaggaactacaaggggctacaagataagatcaatttggtccctattaaccttcaagacaggccagcttggtataaggagaaagtctaccctgaaaataaggtgccatccttggagcacaatggcaaggtgttgggagaaagtcttgatttgatcaaatatgtagatgcaaac

SEQ ID NO: 244828 - DNA, 334 bp, Glycine max
ggattagggtgggagaggtactatgatggagacccaaacctctaccaatttcacaagcactcttcaattgacctaatttccctcgccaaaagatttctccaagttcaactccatcaatatgtatgatatattcatcaagaaccccaatgtcttccatgtccgagataagtgagtcttcatttgttgatgtgccactatagtagctcctctccattcaccttaaatccttcatttgttggtggaactgcttttaccattggtgttaatatcggcttttattggcctctacttcctcatgttggtgtgctctgctatatagctagctatagtttga

SEQ ID NO: 244829 - DNA, 399 bp, Glycine max
catcaccaggatgaggacacaagtgtccctgttgagaaagttgaggttgttgaaacagcacgtgctgaggaaaagaaggggttcctcgacaagattaaggagaggctaccagggcacaagaagacagaggaggccacagctactactcctcctccaccaccacctgctgcatcattggagcatggtgaaggtgctcatcatgaaggagaggccaaggagaagaaaggtatattagaaaagataaaagagaagcttcctggttatcactccaagacagaggaggaaaaggaaaaggaaaaggagagtggtgctcattgatatttaagattgagacaaggcttttttgttggttggagatgcatgattgtggtgtgctttggtttcatttcatcatatgac

SEQ ID NO: 244830 - DNA, 334 bp, Glycine max
  unsure (1)..(334): unsure at all n locations
gaagacttgagctcacagctacaaactcaggcagcagagcaattcaaggctcctaatgtgagcaatgatggatcgaagcctgaaacctctgctgctgctgctcaagacgacgaggatgtcgacgagactggtgtagatcccaaggatatagagctggtgatgactcaagctggtgtgttgagatcaagagctgttaaggctctcaaagctgccaatggcgacattgttgctgccattatggagctaactaattgatgatggtcagatttgggataattntagaatttgcaatgtggagctattnttctgttagtcaaaatttttgctctccttt

SEQ ID NO: 244831 - DNA, 318 bp, Glycine max
gatagcagcatcatacaaagcattgaattcaaaaacttaagttcattccttgtgttttgctttcttcctcaaaaccaaacatgtcgaacacatgcggcaactgcgactgcgctgacaagactagctgcaccaagggaaacagctatggtgttattgtagagactgagaagagttacatcgagactgttgtcatggatgttccagcagctgagcatgatgggaagtgcaagtgtggcgctaactgcacttgcacggactgcacctgtggccattaaggaatatgtatgaaaatgtaattgccatgtgtatggcaataca

SEQ ID NO: 244832 - DNA, 396 bp, Glycine max
agaaaaaattggttgatgatgttaggaaggctctttatgcagccaaaatctgtagttatgcacagggaatgaatttgatccgtgcaaagagtattgaaaagggttgggatttgaagttgggtgaactggcccggatttggaaaggtggttgcatcattagagcaatattcttagacagaatcaagcaagcgtatgatagaaaccctaatctggcaaaccttcttgtggatccagagtttgcaaaggaaataatcgatcgccaatctgcctggaggagagttgtttgccttgctatcaattctggtatcagcactccaggtatgtctgctagtcttgcttattttgacacttacagaagggaaaggttgccagctaatttggtgcaagctcaacgag

SEQ ID NO: 244833 - DNA, 397 bp, Glycine max
gacagaaaagaaaaaggaaaccctagctggataggtcaaacatcatcatgtcggacgaagagcaccatttcgagtccaaggcagacgccggtgcctccaaaacctaccctcagcaagccggtaccattcgcaagaacggctacatcgtcatcaaaggacgcccctgcaaggttgtggaagtttcgacttccaaaactggaaagcacggtcacgccaagtgccactttgttggaattgatattttcactgccaagaaacttgaggatattgtgccctcttctcacaactgtgatgttcctcatgtgaatcgtactgattaccagctcattgatattgctgaggatggatttttgagtctgcttactgaaaatgggaacaccaaggatgacctcaagct

SEQ ID NO: 244834 - DNA, 405 bp, Glycine max
caagcaaaattgtgtacaagtcatggaaaatggaggtaacttatgtgatgggaaagaagttgatcagttttatcaaccctctggtggtattgaggttgtcgttgctaatgaggatggtctttcgtgcggatcagatctgaaagagattgacaaagtaaaaattatacaagaaagtgatttgtttaggggggatgcttcagaaggtgctctctgggatatttttcggagacaggatgtacctaaattgcaggaatatctgaagaagcacttcagagagtttaggcatattcattgctgtcctttaaagcaggttattcaccccatccatgaccagaccttctatctgactatggagtataagaagaagcttaaggaggagtatggaattgagccctggacttttac

SEQ ID NO: 244835 - DNA, 363 bp, Glycine max
aacagaatactgactaaacttgacgacaacacagcggattatattcgtaccggtttaagtcctaggtggagtgatctagatatcaatcagcatgtcaacaatgtgaagtacattggctggattctggagagtgctccacagccaatcttggagagtcatgagctttcttccatgactttagagtataggagagagtgtggtagggacagtgtgctggattccctgactgctgtatctggggccgacatgggcaatctagctcacagcgggcatgttgagtgcaagcatttgcttcgactggaaaatggtgctgagattgtgaggggcaagactgagtggaagcccaaacctgtgaacaacttt

SEQ ID NO: 244836 - DNA, 541 bp, Glycine max
  unsure (1)..(541): unsure at all n locations
agaggtnttgagaggtngtgtaactgantcactgaaccgtcgcgatgcgtaccggtccggattcccgggtcgacccacgcgttcgtccacgcgtccgttgcgagaagacgacagaagggtacggctgcgagaagacgacagaagggtacggctgcgagaagacgacagaagggtacggctgcgagaagacgacagaagggtacggctgcgagaagacgacagaagggtacggctgcgagaagacgacagaagggcacggctgcgagaagacgacagaagggtacggctgcgagaagacgacagaagggtacggctgcgagaagacgacagaagggtacggctgcgagaagacgacagaagggtacggctgcgagaagacgacagaagggtacggctgcgagaagacgacagaagggtacggctgcgagaagacgacagaagggtacggctgcgagaagacgacagaaggtgattgagaggagacaaattnatattttttttttttaaaaaaaagcggtcggtttaaaggattcaaggttca

SEQ ID NO: 244837 - DNA, 405 bp, Glycine max
gatccagcatttgtttgacaatgagacatcagtgcctccttctggtctccctggtgttggtctcctacgctgcccggtcggaatcagcgctgggcggctggagccccatcaaggacgtaaacgacagccacgtggcggagatcgccaactacgcgctgagcgagtacgacaagcgttctggggccaagctcacccttgtcaaggtcgtcaagggcgagactcaggtcgtttccggcaccaactaccgtctcgtcctcaaagccaaggatggatccgccacggccagttacgaagccatcgtctgggagaagccttggctccatttcatgaatctcacttccttcaaaccccttcattaatcttagacccatacttttcttcactttctctcttatcatatttcat

SEQ ID NO: 244838 - DNA, 402 bp, Glycine max
ggttccaatttgcgtgagaacgaaaaaagaaaaaaaaaaccctaacgcactcgagaccctgagatttttcatcttcgtttcgcattctctttttgatcatggacgtcgaggtgcggcagatcttcaacaagttcgacaagaacggcgacggaaaaatctcggtaacggagctgaaggacatgctcgcggccctcggatccaaaacgacggacgaggagttgaaacgcatgatggaggagctcgaccagaacggcgacggtttcatcgacctcaaggagttcgcggattttcactgcaatggcggtgccggaaaggacgactcgaaggagctccgcgacgcgttcgatctctacgacgtcgacaagaacggcctcatctccgcgaaggagttgcacgacgtgc

SEQ ID NO: 244839 - DNA, 405 bp, Glycine max
aaggggaaggcagcgaaagaccctaacaagccaaagaggcctccaagtgctttcttcgttttcatggaggagttcaggaaggtattcaacaaagaacatcctgaaaacaaagcagtgtctgctgtgggcaaagctgctggagcaaaatggaagaccatgtctgatgctgaaaaagcaccttatgtggcaaagtctgagaaaaggaaagtggagtacgagaagaacatgagagcctataacaagaaacaggcggaaggtcctactggtggggatgaagaagaatctgagaagtctgtatctgaggtgaatgatgaagatgatgatgaggaaggcagtggcgaggaagaggatgacgattagagaatggactgataattgcatttatgtaagttctgatgattttga

SEQ ID NO: 244840 - DNA, 372 bp, Glycine max
gtctcaaatgatgtgggactggatgccgacaactgcaaggtcctcgtcaacattgagcagcagagccctgatattgctcagggtgtacacggccaccttaccaaaaaacctgaagaaattggtgctggtgaccagggtcacatgtttggctatgccactgatgaaacccctgaattgatgccattgagccatgttcttgcaacaaaactcggtgctcgtctcaccgaggttcgcaagaacggtacctgcccttggctgaggcctgatgggaagacccaagtgaccgttgagtattacaatgacaatggtgccagggttcctattcgtgtacacaccgtgctaatctccacccaacacgacgagactgtcacc

SEQ ID NO: 244841 - DNA, 389 bp, Glycine max
ggagtgatgatactatttgttataagtgcttcaatgttttcgatgagcatggccaacaaggactggtcctttggtttcaactacactgattggtggtctagattcgggaatcatgctcagaacaaaacacaacaaccacccaggcagatacttgtgggtggttctgagcattggcactacggtttcaactacaccgattgggccttcaagaatgcaccattttacctcaatgatactctagttttcaaatatgatgctccaaatgccaccagtttcccacacagtgtgtacatgatcaaaagttttgggagcttcatgaagtgtgacattgaaaaggctaaaatgttagcaaatcccacgcaaggtacaggagagagcttcaagtttgt

SEQ ID NO: 244842 - DNA, 135 bp, Glycine max
tcgactgatggggagagaaggagagagaaggatgtctaaccgtgttcgtggtggttcggcggggaacaagttccgcatgtcgttgggtcttccattggcggcgacggtaaactgcgcagacaacacgggggcaaa

SEQ ID NO: 244843 - DNA, 403 bp, Glycine max
gggcgttacggtttgcgacgctgggtgcggtaccggttctctctctattcctcttgccaaagagtgcgctgttgtgttcgccagtgatatctccgccgctatggttgccgaggctgagaaacaggcaaaagaacagcttgcaaccagtgaagatggatctgtgcccgtgatgcctaagtttgtagtgaaggatttagagagcttggatggcaagtatgatacggtggtctgcctcgatgtcttgattcattacccacaacataaagccgatgggatgattgcacaccttgcatcattggccaacaaccgattgattctgagttttgccccaaagacgttttattatgatctgctaaagagggttggagagttgttccctggtccttcaaaggcaacaagagca

SEQ ID NO: 244844 - DNA, 391 bp, Glycine max
gaagcgaagaaagaagaacttgttcgatgtggctcagttcttacctaactggggaatcggctaccacatggccaagactcactggaatgaagtttcttacgaaatcactaaaatcaatctctacaaggatggaagacatggaaaagcatggggggttgcttttaaaaatggcttgccattagcagatgctccaaaaaaaattagtggagttcacaagcgctgttggagatacctaccaaatgtagtaaaagaattagaaagttcaacaaacttaatgagttccgcagacagtgactttgggtttttaggtcatcgacattagcccgtccatgtcttttcaatttggcttagttgttttcgataatggtatcgtttcttagtagatcatgta

SEQ ID NO: 244845 - DNA, 525 bp, Glycine max
  unsure (1)..(525): unsure at all n locations
aggagttttnaaaggaggtncgtgcttagganactacagtatctcttggcatgccgtaccggtccggaattcccgggtcgacccacgcgtccgcggctgcgagaagacgacataaggggaatgcattggatggatgcccgggcattgagaaggaaggacgctttcagagacgaaaggccatggggagataccgtctgtgatccatggatctccgatcgggaaaccgtatccaagctccgcggctagtctgcgctctttggacttttaaaacttagcgaactgaaacatcttagtagctaaaggaagggaaatcaaccgagaccccgttagtagcggcgagcgagagcggattggggtttgaagaaaaaaaaaaaaaaaaaaaaaaaaaaaaaaaaaaaaaaaaaaaaaaaaaaaaaaaaaaaaaaaagcggccgttctagaggatccaagcttacgtacgcgtgcatgcgacgtcatagctcttctatagtgtcacctaaattcaattcactggccgtcgtttat

SEQ ID NO: 244846 - DNA, 301 bp, Glycine max
cttcatcgagggcaaataataagatacaaaaaaaagatcgataaaggagaaagacagagaaaaaagtagaaaagagaaagaaaaaatttgaaaaaagtaaagggtgagcagagataaacgaatagaatgataaaaaaaaaaataaatatgaaaaaaaaagaaaaaatcgaaaagagaatatatggcctgatagaaaaaaaaaagaagtcatagataagaaagaaagtaataacaaaattagtagcacttaaaaaaataagaactgaaaaagaataaataaatgaaaacaaaaatagcattg

SEQ ID NO: 244847 - DNA, 381 bp, Glycine max
aggcgttagtacacgtccgagaggacagctgtaggtggtagtacactagatccacacgcatgatgagcttctcaaatacagccgtgctcactggaacgttccaatcatactgctcattgatcaccacgtagcaaagcacctagtaagcgtctaatacccagatctgaccttgagtatcaaccaactactacctgtgtgtacttaccacatagccatggctcggttaccgttgctattcatgggatgatgaaatagccagtgcattctcgaactctgatcacaaagctgacgatacagagcctgagacgaaggattgctaaacacatgaagactgatatgcgcttgcaaatgcactctatgactggattgcatgaagctgat

SEQ ID NO: 244848 - DNA, 313 bp, Glycine max
ggacaacataaccctcttctcaataataacggttatgtcattcttgttatcagtacctgtaactttgttgatggagggtgtcaaatttacccctgcttacctgcaatctgctggattaaatgttaacgaagtgtacatcagatcacttcttgctgcactatgtttccatgcatatcagcaagtttcttatatgatactgcagaaggtgtcacctgttacccactctgtaggaaattgtgtgaaaagggttgtgatcatcgtgagctctgtcatcttctttcaaacaccagtatcaccaattaacgcactgggg

SEQ ID NO: 244849 - DNA, 384 bp, Glycine max
gaggttagcaaccagcgatctgggacttttctttctcccccacaccacacccagattcaaaaactcgctctgctctgctctgcaattccccttccgtttcgtttcgatctcaaaacatgttcttcttcgattggttctatggcattctagcttccctcggtctctggcagaaagaagccaaaattctcttccttggtctcgataatgcagggaagaccacacttcttcacatgctcaaagacgagagattagttcagcaccagccgacccaacaccccacttcggaggaattgagcattgggaagatcaagtttaaggcttttgatttggggggtcatcaagttgcccgcagagtctggaaagactattacgcgaaggtggatg

SEQ ID NO: 244850 - DNA, 376 bp, Glycine max
gctctctcactctttctccgagaacaaaaaaaaaaaaaaaaatccgcgattcgctcttctcttggaaaagtgaaaaccagaagtacgaacgaaagagaagagcgatttagaagtgagagaagatggggttgtcgttcacgaagctgttcagcaggttgtttgcgaagaaggaaatgaggattctgatggtaggtctcgatgctgctggtaagacaaccatcttgtacaagctcaagcttggagaaatcgtcaccactatccccaccatcggatttaatgttgagactgtggagtacaagaacatcagcttcactgtgtgggatgttggtggtcaggacaagatccgtccactgtggaggcattatttccagaacac

SEQ ID NO: 244851 - DNA, 401 bp, Glycine max
  unsure (1)..(401): unsure at all n locations
ggagctgaaggcaaaaaggacacaccgtttcatagtttttaagattgaggagcagcagaagcaggtcattgtggagaagcttggtgagcctgcccagggctatgaagatttcactgccagccttcctgctgacgagtgccgttatgctgtttatgattttgagtatctgactgaagggaatgtccctaaaagcagaatttttttcattgcgtggtcccctgacacatcaagggtgaggagcaagatgatttatgcaagctccaaagacagattcaagagggagctggatggaattcaagtagagttgcaagcaactgatcctactgagatgggtcttgatgtgttcaaaagccgtgccaactaanatgattatataaaatagtaggctttctggtgggagc

SEQ ID NO: 244852 - DNA, 391 bp, Glycine max
gagaccaaacaatactcagaacctgattaaggagagtatggcacagtttagtggcaaaactttggtgcagtggttggtagcaacactgctgattgccttgttgggtggtgcacaagctgttgtgttatgtaacatcgactcaagtcaactaaacttgtgtcgtgctgcagttactggtcaaaacccttcaccaccagatgagaaatgttgtgcagttattcgccaagccaatttaccttgcctctgcagatacaagtctattcttcctttaattggaataaaacccgaaaaggctttggccttgcctggtaaatgtggtctccaatcccctcctaattgttgagtgtagtgaagcaattaatgaaggtcttgttcattacaagcacttaat

SEQ ID NO: 244853 - DNA, 366 bp, Glycine max
gaatcccatttcaacctctctttcttttcttctcgcagagcgaaatcccaatcccacacaaatggcatgctcagccacctctgcttctctcttctccgcaaaccccacacctctcttctctcccaaatcctccctctccctccctaacaactctctccacctcaaccctctccccacgcgcccttctctctccctcacgcgcccctcgcacactcgccgctccttcgtcgtcaaagccttctccagcgagcttccgctagttggaaacaccgcaccggatttcgaagcagaggctgtgtttgaccaggagtttatcaacgtgaaactatctgattacgttgggaaagaaatatgttgtgctcttct

SEQ ID NO: 244854 - DNA, 387 bp, Glycine max
gacaaaacaagtgtttcgaatagattatcctaagtctttgggaatagtgctgcaatggcttcaagtcaagaggaggtgacccttttgggagctactggaagcccatttgtgtgcagggttcatattgccctcaagttgaagggagttcaatacaaatatgtcgaagaaaatttgaggaacaagagtgaactgcttctcaaatccaacccagttcacaagaaggttccagtgtttattcacaatgagaagcccatagcagagtctcttgtgattgttgaatacattgatgagacatggaagaacaaccccatcttgccttctgatccttaccaaagagccttggctcgtttctggtccaaattcattgatgataaggtttttggtgct

SEQ ID NO: 244855 - DNA, 347 bp, Glycine max
ggcatcacaaactatatactaatctccatctaatagtgttaatttgtctttctctatctctatcggtcatgggtgcttttgcttttgatgaggaaaactcctccaccgtggctccggcaacactctacaaagctctgacaaaagatgctgacactatcatcccaaagattattggggccatccaaactattgaaatcgttgaaggaaatggaggacccggaaccgtcaagaagataacagctagtgaaggtgaccaaaccagtttcgtgctgcaaaaagtggatgcaattgacgaggctaacttggtatacgactacagcatagtgggagggacggggttgcatgaa

SEQ ID NO: 244856 - DNA, 406 bp, Glycine max
ggaccaaacacacttaagctcatatatgacagaggcctcattggaactactcatgactggtgtgaagcattttcgacatacccccggacatacgatttacttcatgcatggactgtcctctctgacatagaacagaaaggttgcagtccagaggatctattaattgagatggatcgcatgcttcgacctactggtttcgtgatcatccgagataaacagccagtgattgattttataaagaagtacctaagtgctttgcactgggaagcaattgattccagttctgactctgtccaagatggtgacgaagttgtttttatcatccagaagaaaatgtggctgactagtgaaagctttagggacacagaataggataaccattgcattttcattttcttataaatta

SEQ ID NO: 244857 - DNA, 411 bp, Glycine max
ggaaactggaatggtggaggatctgaaaaagatgccgctgccttgttttctccaacttcaaggggtgctgttagtgttagtgttagtgctgccaagtctctcactctcactgcaacagactgcaccaaccaaccaactgctttgggtgcttctgttctcaaggaaactgttccacactctccaaaaccattacatgagaataggccccagatttctgctccagctgcaaaggcgcaagttgtgggatggccaccaatccgttcattcaggaagaactcaatggcttctcagcctcagaagaatgatgctgctgctgatgcagaagccaagtctggatgcctttatgttaaagtcagcatggaaggcgccccatatttgaggaaagtggatctgaatagttttaccacttac

SEQ ID NO: 244858 - DNA, 388 bp, Glycine max
ggagacacaaactcacacactttgtactctccgtccttccttcttcgatccagatctctctccttctccctcaaatggcttcccttctgcaatgttccatgcccctcgtctctctttccaatcgagctctggtacccggtaccaggatctccaacccaagttcagtttccctttcaattaagggaagaagtttcccatccgttacattgcagcccagagggcgtcggtttcagcttagatgtgcggcaaaaccggagacagtgaagaaggtgtgtgacatagtcaagaagcaattggcactgccagatgaatcagctgttactggagagtctaaatttgctgcgcttggagctgattctcttgacacggttgagattgtgatgggact

SEQ ID NO: 244859 - DNA, 390 bp, Glycine max
ggttagatgtgttgagatccactgctgcagaatccaatttgtgacactaaatctaagttactatgactgcgcagacccaagaggagcttcttgcgcaacacctcgaacagcaaaagatccatgatgatgaacctgtcgtcgaggatgatgatgacgaggaagtggatgatgatgatgacgatgaggatgatgaccatgacgaaggactggaaggtgatgcatctggtaggtcgaagcagaccagaagtgaaaagaagagtcgcaaggcaatgcttaaacttggaatgaaacctgtcacaggtgtcagtcgagtgacagtcaagaagagcaagaatatcctgttcgtaatctcaaaaccagacgttttcaagagtccaacatctgacacgt

SEQ ID NO: 244860 - DNA, 406 bp, Glycine max
caggcaaaagttgatgaagcataccgtgataggaaaagatggctaaaaatgtccatcctaagcactgcagggagtggaaaattcagcagtgaccggacaattgctcaatatgccaaggaaatttggaacatagaagagtgccgcgtgccataatttctgctggatgtgtgtctcttgcactcaagttactgtatatagcaccaacagaatgataagtaaaaagaagtgaataataaaaattaaaaataatttctgaaaagagaaagtgaaggagattttagctttctataatatttagcttgtcatataagatttcagctgtattcttatattaattgctttctcaaccatctgcttctggcagatagagctttctatatgcaaataaatctatagtttcatatct

SEQ ID NO: 244861 - DNA, 368 bp, Glycine max
ggagacatcgaagaacagcactctggttgccgtgccaccatcttctccaaagttatcatattcgaagagaaaaaaggagtgactgtccaggttgggcaattagggacggaaaaggagaaacacgaaaatgtttttccacatagtactggagcgaaatatgcagcttcatccacgctactttggtcgtaaccttcgcgataatctcgtttccaagcttatgtaagacgtggaaggcacttgcagtggccgacatggatttgtggtggcagttacagggatagagaacatagggaaagggctaattcgtgatggaacagggtttgtgacatttccagttaagtaccaatgtgttgtcttcagaccgttta

SEQ ID NO: 244862 - DNA, 331 bp, Glycine max
gaagtcacactcatagcacattaatcaaacatggctagggttagtgctttgtttcactctttgctcttgatttcttcccttgtattggcttctcaaatccatgtttcctctgggaaactagtccctggactatcatggaattactatttgttgacatgtcccaagcttgagaggattataaggaagcatcttgaggatgtcttcgagaaggacagtggagtagctcctggcatacttcgactcttcttccatgactgctttcctaatggatgcgatgcgtctatattgttgaatggagacggtgacgagaagcaacaccgtgctaactttg

SEQ ID NO: 244863 - DNA, 387 bp, Glycine max
gaagtcacactcatagcagattaatcaaacatggctagggttagtgctttgtttcactctttgctcttgatttcttcccttgtattggcttctcaaatccatgtttcctctgggaaactagtccctggactatcatggaattactatttgttgacatgtcccaagcttgagaggattataaggaagcatcttgaggatgtcttcgagaaggacagtggagtagctcctggcatacttcgactcttcttccatgactgctttcctaatggatgcgatgcgtctatattgttgaatggagactgtgacgagaagcaacaccgtgctaactttggtttaaggcaagaggccattgacgccattgaaaaccttcaggttctcatttacaag

SEQ ID NO: 244864 - DNA, 367 bp, Glycine max
gcactcatacatccgcgatcatacatcgttagggctggttacttgctcgaatttcctcgaatcgattaatctgtatttgactagttaaaccgtaacgcggaatctcttttctcgaactggctaactctgaggcaagtggttctgacgctgattccagcaacaagcggctggtgctcgcactgtatgacgccctaaactgcggcgactccgacgccgtcgtcaagatcgtctgcgccgacctcgagtggcggttccatggtccgtcctcacaccagtttttgatgggcatgctcaccggcgaatccgctgtcgacaactccttccgctttctttcgcagtccatcgccgccttctgctccaccgtgat

SEQ ID NO: 244865 - DNA, 388 bp, Glycine max
ggatgatagtgatgaagatcaaagactcccccaccacaaagaacccaaggagtttgtctcgttggaccaacttgctgaacttggagtccttagctggaaactagatgctgataaccatgaaaatgatccagagctgaagaagattcgtgaagagcgtggttacacctacatggatgtttgtgaggtctgcccagaaaagttgccaaattatgaacagaaaatcaaaagcttctttgaagagcatcttcacactgatgaggagatccgcttttgtgctgctggaagtggctattttgatgttagggatcgcaatgaagcttggattcgtgtgttggtcaagaaaggaggaatgatcatcttacctgccggaatttatcatcgctttacg

SEQ ID NO: 244866 - DNA, 340 bp, Glycine max
tgcaggcgaacaaaacaagtgttccgaatagattatcctaagtctttgggaatagtgctgcaatggcttcaagtcaagatgaggtgacccttttgggagctactggaagcccatttgtgtgcaaggttcatattgccctcaagttgaacggagttcaatacatatatgtactaagaaaatttgaggaacaagagtgaactgcttctcaaatgcatcccagttcacaagaaggttccagtgtttattcacattgagaagcccatatcagagtctctggtgattgccgaatacattgatgagacatggaagaacaaccccatctagccttctgatccttacc

SEQ ID NO: 244867 - DNA, 378 bp, Glycine max
  unsure (1)..(378): unsure at all n locations
gaagtgaaaccatcaatcccctgtatatataaccactcttcctctcctccaaattaaaacacttatcatggatgttaagaaaggtgggtctgtagtacaagcacaagtgaagttgcagaagcataacgaaaaggagatgggcatgagaaaaggtccatgggcggttgaggaggacaccattctggtcaattacatcgccacacacggtgaaggccactggaattccgtggcacgatgtgcaggcatgcatgcatcttaattataatttaatttctgcatgtgccaagtaataatggtatatatgttaattatgagatttatcaattacaggtctaaagaggagtgngaagagttgcagattaaggtggctaaactact

SEQ ID NO: 244868 - DNA, 387 bp, Glycine max
gacagacaaacaaacaatttaccagctatacttgttccttttgaaggttagaagtgctacaatacaaacaatggcagctactcaggaagatgtgaagcttttgggtattgtgggaagcccatttgtgtgcagggtccagattgcccttaagttgaagggagttgaatacaaatttttggaagaaaatttgggcaacaagagtgatttgcttctcaaatacaaccctgttcacaagaaggttccagtgtttgttcacaatgagcagcccatagcagagtctcttgtgattgttgaatacattgatgagacatggaagaacaaccccatcttaccttctgatccttaccaaagagccttggctcgtttctggtccaaattcattgatga

SEQ ID NO: 244869 - DNA, 384 bp, Glycine max
tatgaggggttcacacaagcaaacgtgataccagctattcgcggtccttatgaaggctagaagtgctacactacagacaacggctgctactgatgatgatatgaagctttcgggtattgtgggaagcccatttgtgtgcaagcttcacattaggcttaagttcaagggagttgaatacagatctgttgaagaagattcgagccacatgagtgacatcggtcctcaaatacgaacgctgatcacaagaacgttccactatgtgctcacattgatccatccatagcacagtctcttgtgagagttgcatacattgatgagacatggtagaacatccgcatcttacctactgatccttaccaagaagccttggatcgtttctggttc

SEQ ID NO: 244870 - DNA, 401 bp, Glycine max
gaaggaaggaagaaataaaccgaatgagagcattaacctcttcttcttccactttcattccaaagcgttattccttcttcttcttcctctccattctcttcgctcttcgatcctcgtccgggggctgctccgaataccaccaccaccacgcgccgatggccacgataggaggcttacgcgactcccaaggctctcagaacagcgtccaaaccgaggccctcgctcggttcgccgtcgatgaacacaacaagaagcagaattcacttctggagttttctagggtggtgaggacacaggaacaggttgttgcgggaaccctgcatcaccttactctcgaggctattgaggcaggtgagaagaagctctatgaagccaaggtgtgggtgaaaccatggttgaat

SEQ ID NO: 244871 - DNA, 542 bp, Glycine max
  unsure (1)..(542): unsure at all n locations
aggagggnnngtgtgtcnatgacagtcgcatacgcgaccgtcgtaccggtccggaattcccgggtcgacccacgcgttcgtacggctgcgagaagacgacagaaggggtttgttgttggtattaacgagcacgagtacaagccagagcttgatattatttccaatgctagctgcacaaccaactgccttgctccacttgctaaggttattaatgacaggtttggcattgttgagggtttgatgaccactgttcattccatcactgccacccagaagactgttgatgggccatcagccaaagactggagaggtggaagagctgcttcatttaacatcattcctagcagcactggagctgccaaggctgttggaaaagtccttcctgctttgaacggaaaattgactggtatggcattccgtgttcccaccgtggatgtctctgttgttgacctcacagtgaggctggagaaggaagcctnctacgatgaaattaaaaatgctatcaaggaagaatcananggcaaatttaaaggaaattttgg

SEQ ID NO: 244872 - DNA, 361 bp, Glycine max
ggaggaggagatggagacgatgatgatgatgagctgcgtttcgatttcgagttcagtgacaagaggcgctattagcgtgggttcctcttcatctttgtgtttcggcacacccaagttgttcaattcagcaagggtagcggtgaatggtcggcgaagaaacaaaggtttgagttgcaacgccatgttcggtctgggggtgcccgaactggtcgttattgccggcgtggccgccctggtttttgggcccaagaaattgcctgaagtcggccgtagcatcggcaagactgtaaagagcttccaacaggctgcaaaggagtttgagtcggagcttaagaaggaacctgattccacccaaggggac

SEQ ID NO: 244873 - DNA, 363 bp, Glycine max
gtgctatatgcattctatcagcaacggggacaatttcaaatgttacacttcgtcaaccgtcttcttgtggtggtactttaacatatgagggacggtttgagattctttccttgtctggttcctttatgccaattaagaatggagttaccagaagcagatctggagggatgagtgtctctttggctggtccagatggtcgagtaatggggggcggacttgctggtttgttggtagctgctggtccagtgcaggttgtggtggccagttttcttcctggtcaccagttggagcataaaaccaagaagcaaagggtggggcatgtatcaactattagcccttcacctgttaatcttatcactagtg

SEQ ID NO: 244874 - DNA, 344 bp, Glycine max
gagggtggagaggcatgaacttttgggaaagtggaggtcaagactttccatggctggatttaaacagtgtcaattgagttcttcagtgatggttgctatacaaaatctcctaaaggagttcagtcaaaattatagacttgaacatagagatggtgctctttatcttggttggatgaacagacatatggccacctcttctgcttggaggtgaaactcactgattcgagagtttgcctcctttttgacctttaattgagcataattcaccatatatccgtagtagtctctccataggacttgagatttacctctgttctaaaatgctttctgtagaatctcaaagc

SEQ ID NO: 244875 - DNA, 353 bp, Glycine max
gacactaaacaagttaaaagaagagcatcgctgaactaacaaagcaaccctatgtcgaaggtggtttgtgtcaccggagccagcggcgccatcggatcatgggtggtcctactcctcctccagcgtggttacaccgtccatgccaccgtccaagatatcaaggatgaaaatgagacgaaacatttggaggaaatggaaggagcaaagagtcatctccatttttttgaaatggatcttcttgacatcgactccattgccgctgccataaagggttgttccggcgtaatccaccttgcatgtcctaacatcattggtcaagtcgaagatcccgagaaacagatattggaaccggc

SEQ ID NO: 244876 - DNA, 389 bp, Glycine max
gacaggacacttgacagcaatgagtgatgtgtacagttttggagtcgtgctcttggagcttctaacaggacgaaggtcagtggacaaagggcgcccacaaagagaacagaacctcgtggaatgggccaggtctgctttgaatgattcccggaaacttagcagaataatggatccaaggcttgagggtcagtattctgaggttggggcaagaaaagcagctgcattggcttaccaatgccttagccacaggccaaggagtagacccttgatgagcactgtggttaatgttctcgagccacttcaggactttgatgatgttccaattggaccctttgtttacactgttccagctgaacaacaacaatacaatgaagtcgcaaaagagagtg

SEQ ID NO: 244877 - DNA, 385 bp, Glycine max
ggctgagcaaaccttcatcatgatcaagcctgatggcgtccaaagaggccttattggcgagatcattagcagatttgagaagaaaggtttctacttgaaaggtttgaaacttgttactgtggaccgtctttttgctgagaagcactatgctgatttgtctgccaagcctttctttagtggtttggtggattacattatctctggccctgttgttgccatgacctgggagggcaagaatgttgttacaactggccgaaagattatcggagccacaaacccagctcaatctgagcctggaactatccgtggtgactttgccattgacattggaaggaatgttatccatggaagtgatgcagttgaaagtgctaacacggaaattgca

SEQ ID NO: 244878 - DNA, 384 bp, Glycine max
gatggctcaagtgggttctctatcttccgaaatggagacactgaatcatgtcctagccctagtggaggcattccgagcatttgacgcggacaacgatggccgaatcacgcaggcagagctaggaggaatcttggggtcactcgggtacaaccctagcgagcaagaagttagggcaatgattgaacacggcggcaagaacaaagacgggttgttgagcatccacgagttcttggagatgaacaccaaggatttggagggtggaaatctcgccaacaccctcagcaccgcgtttgaggctttggatgaagacgggaacgagattttaaccggggaagagcttcatgaggtcatgcaaaacttgggtttggacttgtctcttgagaa

SEQ ID NO: 244879 - DNA, 333 bp, Glycine max
ggagagagagagaaggcaagatgtcgaagagaggacgcggtggttcggcggggaacaagttccggatgtcgctgggtctgccggtggcggcgacggtgaactgcgccgacaatacgggggcgaagaacctctacatcatatcggtgaaagggatcaaagggcgtttgaaccgtctaccctcggcttgcgttggcgacatggtgatggccaccgtgaagaaggggaaacccgatctgaggaagaaggttttgccagctgtcattgatcgccagcgcatgccatggcgcctaaaggactgcgtctacatgtatttcgaagatcatgctggtgtta

SEQ ID NO: 244880 - DNA, 387 bp, Glycine max
gaacgataaacttgctgaaattgccatggccgatcctaagcgtgctaaaaggattttggctaatcgtctatcagctgctcgctcaaaagagaggaagatgcggtacatttctgaattagagctcaaagtacaaacacttcagacagagacaaccacattgtctactcagtttaccaaattacagatggataattcagagctgaaaagtgagaataatgagtacaaattgaggattcaagccttggaacagcagtcccaactaaaagacgctctgaatgagaccttggatgctgaagtgcggcgtttaagacgcacagttgcagaacttggtggagagtctcttctctcaagtcgcatggctcaacagcttgctattagccaacaagt

SEQ ID NO: 244881 - DNA, 318 bp, Glycine max
gacagacagacacacactcggttctgccttcacaaaaaaattatcgagatccccttttcctcctaagaaaagccatggctaagggtcccggtctctactctgacatcggcaagaaagccagggatctgctgttcaaggactaccacagtgaccagaagttcaccatcaccacctactcacccactggagttgctataacagcatcaggaaccaggaaaagtgaactgtttgtggctgatgtcaacacccagttgaagaacataaacatcactactgatatcaaagttgatacagattctaatctcttcacaactatca

SEQ ID NO: 244882 - DNA, 375 bp, Glycine max
gggactctactcttccctgctattaatgtcaatgactctgttaccaagagcaagtttgacaacttgtacgggtgctgtcactctctccctgatggtctgatgagggctactgatgtgatgattgctggaaaggtggctgttgtggctggatatggtgatgttggcaagggttgtgctgctgcattgaagcaggctggtgctcgtgtcatcgtgactgagattgaccccatttgtgcccttcaggctctcatggaaggccttcaggttctgaccttggaggatgttgtttctgaggctgatatctttgtcaccaccacgggtaacaaggacatcatcatggttgaccacatgaagaaaatgaagaacaatgccatt

SEQ ID NO: 244883 - DNA, 383 bp, Glycine max
ggcagcgcttgatttgaggccaggcaagccccactcaaccaccacacctctcctcgttcacgctacccctttctgctcttcttctacctttcaagttttaaaagtataaagatggcagagacattcctatttacctcagagtcggtgaacgagggacaccctgacaagctctgcgaccaaatctccgatgctgtcctcgacgcttgcctcgagcaggacccagacagcaaagttgcctgcgaaacatgcaccaaaaccaacttggtcatggtcttcggagaaatcacgaccaaggccaacgttgactacgagaagatagtgcgtgacacctgcaggaacatcggcttcgtctcaaatgatgtgggactgggatgccgacaact

SEQ ID NO: 244884 - DNA, 398 bp, Glycine max
gagagtgagaaagagaaagagagaattcgtaaaccctaatttcggaaagatcggcgatgactgcctccaaggatcgcgagaacttcgtctacatcgccaaactcgccgagcaggccgagcgttacgaagagatggtggaatcaatgaagaacgttgcgaatctcgacgttgaactgacggtggaggagcggaatttgctttctgttgggtacaagaatgtgattggtgctcgcagagcgtcctggaggatcctgtcttccattgagcagaaggaagaaacaaaagggaacgagttgaatgcgaagcggattaaggagtacagacagaaggttgaattggagctatcgaacatctgtaatgatgttatgagagtgattgatgagcaccttatcccttcg

SEQ ID NO: 244885 - DNA, 316 bp, Glycine max
gaagaagaagaagaagatggcattgggtgttcctgctcttcccctgacatacgtggctcacgttctggcacttgttgccagcatcttggtcgtgctctgggtcctcaattttaggggtggcttggcttgggattctgataacaaggccctcatcttcaatcttcatccagttcttattgtcattggcttactagtccttgggggtgaagctattataagctacaaagcattacccctgaagaaggaagtgaagaaattgatacaccttgttttccatgccatcgcattaatacttgggatagttggaatttatact

SEQ ID NO: 244886 - DNA, 371 bp, Glycine max
cccacgcgttcggcgagaagacgacatatgggtaaagaacgtgagtatgatcttagtggctgtgcagcttgcattgtgaataaagattctgtaatcaacgggtcaaacattgttgctggtgatgttattattggtctttcatctagtggagttcactctaatggtggctctcttgtaagaagagtgcttgctcaaagtggtctgtcactgaaagatcaacttactggcagtgatgttacaattgcagaggcattgatggccccaactgttatctatgttcaacaggtgcttgacttaattagtaagggacgcgtgaaaagaattgcccacatcatcggtggtggtttcacagataacataccccgagtttt

SEQ ID NO: 244887 - DNA, 377 bp, Glycine max
gaaggcactgaagctgcagcggccaccgctgcaactatacaatttgggtgtgcgatgtttccaactgaaatagactttgtagctgaccaccctttcttgttcctgatcagagaagatttaactggaacagtactctttatcggacaggtgttgaatcctcaggctgaataatattaacattggtagcaaaacttatgctcctattctgttgtcttgatttacctatggttggatgatccaaaatttctggcagtttcacatgtggcttaagaaggtaaaaaggtacatatggatcaccgttttaagttttgaacacttacgagtatggcgttgtctaactaatttcgtcttccaagggtgatatgcgaatagccaaa

SEQ ID NO: 244888 - DNA, 346 bp, Glycine max
  unsure (1)..(346): unsure at all n locations
gggagctgagctgagaaaacccccaaccccaacctcaaccttaacctctcctcactttcttttcaaccagaactatgattaagctttttaaagtaaaggaaaaacagagagaactggcagaaaatgcgagtggcggaccacccgttaagaagcaaagtgccggcgagttgcgtcttcacaaagatataagcgagctgaatctaccaaaatcatgtaccatgcaattccccaatggcaaagatgacctgatgaactttgaagtttcaattcgacctgatgatggatattacttaggtggcacattttntgtttcctttcaagtgtctcccatctatccacatgaagc

SEQ ID NO: 244889 - DNA, 283 bp, Glycine max
taccggtccggaattcgcggcacgcatcaggcgacccgtcaggcgacgcgatccggacttgctgctacgaagacacagacaggggtggtagtgtggcagcgacacgtatcaacttcaataatcgcatcgcaaaagcagcttccggggcatctgatcgtctcccaaaatgaacgacgcagatgtctcgaagcaaatccagcagatggtgcggttcatcccccaagaaactgaggaaaaagccaacgagatctctgtcttcgccgaagaggaattcaatatcgag

SEQ ID NO: 244890 - DNA, 417 bp, Glycine max
cccacgcgtccggacgacagaaggggattgtgtatattaatagagagacataaaaaataaacatatattgagaatggagggttgtgtgaagaagttgctatgccttgaaggttttgtggagctagttatttttttttatttaacattaacatttgcgcaaaaaactacacccttccaaccgacattgccaagttattacaatcacacttaccaattttgaccaagcttcatgctgtgtttttgttttttttgtttttttttttattatttaattttatttttttttttttttttattttatattttattatgtttttttttttgttatttttatttttttttattttttttgtatttcgttgatattttgtctttgggatttcaatgaaattgtattggttttggctatgtattttg

SEQ ID NO: 244891 - DNA, 351 bp, Glycine max
gtaggagaagaaaaagtttgtgccaaatccttgggaacagtaattgggtttgccattttaaagcttggaaagaacattcaagtactttcaaagttctttgtcaataagcaagaccaatacactgtggaaggagttgcagaatctttggagacaaagcagtgatgtgtcataggctaaaatttcagaactgcagtattttactgccatgaagtccgtgaaacaacagctttcatgggtccattggtggctggtgatggaaccaaaactcaggcacttgctatttgccactcaaatacttttggaatgaatcatcaaatgcttcatcaacttatgggaattgatcctggaact

SEQ ID NO: 244892 - DNA, 385 bp, Glycine max
tgggttggaagtgagtgaaaaaacaacaacgagaatagcacacacagttcgagcatggattgaagaaggaataaggtggttgttccttgtgggcgcagagaaagagtggcccgtgtttgtgggggctgtggctggattgttatcactatcttatttaggaagttgcatggacctcctaacactagtttatatgggtacgttagtgggaatggcagttccattaacttatgtgaagaacgaggacaagattaagaggtttgtggagtggttgagggagaaacacaagagatattatcagattattgacgagaagaccattcagaagattaaaagcagaatcgtaaaggagaagaaaacagagtaattagctttttaagagaaatgt

SEQ ID NO: 244893 - DNA, 379 bp, Glycine max
tgcacattggggactggatctgtaactgtggcttccacaattactcatcccgctctcagagcaaaaagtgcaatgcatctgctcctgcacttgggacacagcgattagcttcacaagagtcgtgttatgattgggacaacaggagattgaatataggaactacaaatgatcagcatcaaatatatacaagtgtagagcaagtggcagggacaggtgcagatccaaaacctggactcttaccctcttatcccagcatgaactcaactacagctccaagtttgccattggccacatggcttccacctcaagcttctgcacctgccctactagcaaaaggagcaaggcactggctaaatggacattggatgtgctcaaattg

SEQ ID NO: 244894 - DNA, 328 bp, Glycine max
tgaagtgaagtgggaaagagactgaaccgaaaatggttgcgactttgagtcttccgatcatagacctctcttctccccatcgtctttccacagccaattccattcgtcaggcatgcgtggaatatggtttcttttaccttgtgaaccatggggtggacaccgattttgtgagcaaagtcttcgaccaaagttgcaagttcttctcgctttcggtccaacgcaaaatggacctggcccgcagggaatatagaggctacactcctctctatcctgagacacttgatcctacttcactctccaaaggtgacccaaaagagacctattacat

SEQ ID NO: 244895 - DNA, 328 bp, Glycine max
ggagaactgagaaacgcaatgagttcgtcgaacctcagagatctttaacgcgaattggagaacaaagccaatgatctcagcaagcttcaaaaggaaattgcgaagaatcaccaaatgagaaagaatacacggtccagcttggtgagaacgagctcgtccttaaggaactggatttattgaaagacgacgcaaatgtttataagttgattgggccagtacttgttaagcaagatttggccgaagccaatgcaaatgtccgcaagagaatcgaatacatctcagctgaattgtagcgtctggatgccactgttcaagatttggaagagaa

SEQ ID NO: 244896 - DNA, 353 bp, Glycine max
tagggtgttgctgatctctctctcttccaccgcacgctctctgctcctagggtttctccttcgagtgagggaaatggctcccaaaccgactagtacgggtctgtttgttggactgaacaagggtcacgtcgtcaccaagaaggaattgcccccacgcccctcagatcgtaaggggaaaacaagcaagagggtgcactttgagaggaacctcataagagaggttgctggttttgcaccctatgaaaagcgtataactgagttgctgaaggttgggaaggataagagggcactgaaggttgcaaagagaaagcttggagcccacaaacgtgcatagaagaagcgtgaggaaatgt

SEQ ID NO: 244897 - DNA, 368 bp, Glycine max
ggtgttaaggggggattgactgaggcgccagtacctttcacatccactgatgcctagtgggtctgatccaatccgaaaacccactcgcctttgttgcccgaaaaacctttctttctgcttctcccatccatccatggcttctggaatctcctcatagttctttcagctgcctataccctcgctctttgcctctcacacactaaaagaaaccatgaaggttcggtcatctgtgaagaagatgtgcgaattttgtcagatagttaagcgccggggacgaatctatgtgatttgctctgggaaccctaagcacaagcaacgacagggcatggcaacatttgcaagtgaaggcccatctcaaccagtgtcct

SEQ ID NO: 244898 - DNA, 387 bp, Glycine max
gtatcaagggataaataatcggaccggtccttagatttttttaaggctttaagggagccgtatgaggtgaaaatctcatgtacggttctgtaatagagatggtaacagtaatgtcatcaccgattaggattatctaacagtttaagtacagttgatatagttgatgcacaatcaaaatatggtttttggggatggaatttgtggcgtcaacctatgggtttcattgtttttctaatctcgtccctagcagaatgtgaaagattaccttttgatttaccggaagcggaagaagaactagtagcgggttatcaaaccgaatactcgggtatcaaatttggtttattttatgttgcttcctatttaaacctattcatttcttccttattt

SEQ ID NO: 244899 - DNA, 396 bp, Glycine max
taagccaacataatcaaataccctttctacttcttcttcaacgctctttagtacagcggaagaacgaagcctcctcgttcttcttcttctgcgctttctctctccctctctagaaccgtaaccgtcgtttctttctttctctctcctcaaccagagataaagagtcaccttcttatttttctgaatctcgcggcgttgttctttctgctgctgcggctgtggttccggcggcgatgggacagcaatcgttgatctacagcttcgtcgctcgaggcaccgttatcctcgcggagtacaccgagttcaccggaaacttcaccggcgtggcggcgcagtgccttcagaaactcccttccttcaacaacaagttcacctacaactgcgatggccacacct

SEQ ID NO: 244900 - DNA, 395 bp, Glycine max
tgttgctgatctctctctcttccaccgcacactctctgctcctagggtttctccttcgagtgagggaaatggctcccaaaccgcctagtacgggtctgtttgttggactgaacaagggtcacgtcgtcaccaagaaggaattgcccccacgcccctcagatcgtaaggggaaaacaagcaagagggtgcactttgtgaggaacctcataagagaggttgctggttttgcaccctatgaaaagcgtataactgagttgctgaaggttgggaaggataagagggcactgaaagttgcaaagagaaagcttggagcccacaaacgtgcaaagaataagcgtgaggaaatgtccagtgttctcaggaagatgagggctggtggtgctggagacaagaag

SEQ ID NO: 244901 - DNA, 314 bp, Glycine max
gaaggatactgatgcacaggaagatctcaaagaggctttcaaggtgtttgacaaggatcaaaatggctacatttcagcaagtgagttgaggcacgttatgatcaatctgggtgaaaaactaactgatgaagaggtggagcagatgattaaagaagctgatttggatggtgatggtcaagttggctgtgatgaatatgtcaagatgatgatgattattggatgaaaatttagaccaacaaatttattgttcgaattcgcttttgcgccccactcttatttactcccaagaaatttataaggcttccaattaatgt

SEQ ID NO: 244902 - DNA, 370 bp, Glycine max
tttatgacagtgattgatgagcaccttatcccttcggctgcagctggtgaatccactgtgttttactataagatgaaaggagattattatcgttatcttgccgaatttaaggcaggcaatgagaagaaggaagctgctgatcagtctatgaaagcatatgagtctgctaccactgcagcagaagctgatttacctccaacacatcccatccgattgggtctagctttaaatttctcagttttctattacgagatcttgaactcttcagaaagagcctgtcatcttgcaaaacaagcttttgatgaagctatttctgagcttgacaccttgaatgaggagtcatacaaagacaggaccttaatcatgcaac

SEQ ID NO: 244903 - DNA, 347 bp, Glycine max
ggagagagagaacccttttggctctttcattctttgcttaattcctatggaggagtttcaaagatcaaggtcttatgcaaatgggcaaatgatgcagatagagagctactatggagctcctaggccttatgatcttagtctcagaacttatagtgcttcttatgcacaaactcaaataggtcctcctagggacttgaagttgaagaaaggaaaaggcatttctgcagggccttctttctccaagtcttggagctttgctgatcctgagcttcagaggaagaagagggttgctagctataaaatgtattctgtggaaagaaagatcaaagggtccttcaggaagagct

SEQ ID NO: 244904 - DNA, 367 bp, Glycine max
gggcgaagatacataatgaccggttcaagctatggtacgtggtggaaatcgcaaaggaagggtggaaatacagtgtagggttcatcacagagagtatcacgagggagcaccttccaaaagcgtcgagggattccttggctttgacatgtgggccaccacccatgattcagtttgcagtgcagcctaatttggagaaaatgggatatgatatcaagaacgatttgcttgtgttttagggcatggagaagtagctagattgctagattgtgttgtgtattgtatttgtttgtgtatcgggtgttattggagtattaatgtttgtttcattctttataagggtaaaaaaagaagtgaaaaattgtatatg

SEQ ID NO: 244905 - DNA, 394 bp, Glycine max
tgaaggttggaaattttaatccaattaaactttataggattccaattctctccctttgagggatagaaagaatgcaacattaaactttagtaatacttttgatctttctcttagcatctagttctacttgctcttctttcattcaagctttgtgagtgattcttagaagactctacaatgaacgattgggctcctcctttcatagctgcggctttgttttggctcttgagcccgggaatgatctttcagttgccggggaagaatgcaccctttgagtttatgaacatgaagaccactgtggcatccatgtttgtgcacactgttatttatggtttgtttcttatgctgttctttgttgttcttagtatccatctttatatttaagcagcaacat

SEQ ID NO: 244906 - DNA, 399 bp, Glycine max
  unsure (1)..(399): unsure at all n locations
tgaggaccaagaagtgaattcaaaacaggccacgaggttgtaacatatgaaagtccgcgaccgatgatggggattcatcgtttagtgtttgtgttatttcgtcaactgggtagggaaacagtgtatgcaccaggatggcgccagaatttcaacactagagaatttgctgaactctacaaccttggattgccagttgctgctgtctatttcaacattcagagggaatctggctctggtggaagaaggttataccattgagggttctagaaatatttctcccacactctttagtagtaaatgagtgcttttcaacttaatattaaactgagcatatagtgaaataaattgcttgctagatcagntggtagcaacaagtcctctacatatacacataaatga

SEQ ID NO: 244907 - DNA, 377 bp, Glycine max
ttgcctcaaagattggaacaacaggaacatgtgtactctcacaactgttcctgtgctcccttctaagcttaacaagcctccgctttctccgcaccacaattctctttttccctactgtggaagacgggtcgggaagaagaacaaagcaatggttcctgttgcaaggttgttcgggccagccatatttgaagcctcaaaactgaaggttttgttcttaggagtggacgaaaataaacacccaggaaatctcccaaggacttatacgctaacccatagtgatataaccgctaagctcaccttggcaatctctcaaaccataaataattctcagctgcaggggtggtacaacagatttcaaagggacgaaatggtggcac

SEQ ID NO: 244908 - DNA, 404 bp, Glycine max
gaaaaaaagaggcttgaggcagttgaaatgaatggcccattaaagggttctttgtccatgagtgccctttggttggtcccacaatttatgatcattggatttggtgatgggtttgctcttgtgggcttgcaagagtatttctatgaccaagtgcctgactcaatgagaagccttggaatagcactttaccttagcgtcattggggctgcaagttttcttagtagtttattaataacaattgtggatcatgtcactggtaagattgtgaagagttggattggtaaggatttgaatagtagccgcttggacaaattttactggcttcttgcagccatcaccacattgaacttgttcatgtttgtgatctttgctcgcaagtataactacaagaatgtgcaaaaggt

SEQ ID NO: 244909 - DNA, 272 bp, Glycine max
ttcctttagatcggaacaacaggaacatgggtaggctcacaactgttcctgtgctcccttctaagcttaacaagcctccgctttctccgcaccacaattctctttttacctactgtggaagaccgatcgggaacaataacaatgctctggctcctgatacaaggatgtgtcacccagccatatttgaagcctatcaactgaaggtgatgttcttaggagtggactaaaataaacacccatgaaatctcccatagacttatacgctaacccat

SEQ ID NO: 244910 - DNA, 410 bp, Glycine max
taatggccgtgtggttagcaattttgttgcacaggctattcgtaaacaaccattgactgtatatggtgatgggaagcaaacaagaagtttccaacatgtctctgatttggttaatgggctggtggctttgatggaaagcgaacatgtgggacctttcaacctgggtaacccaggggagtttaccatgttagagcttgctcaggttgtcaaagaaacaattgattcaagtgctacaatagaatacaaacccaaatactgctgatgatccacacatgaggaagccagatattagcaaagccaaggaactgctgaactgggagccaaaaatccctctgagagaagggttgcctctcatggttaatgatttccgaaatcgaattctgaatgaaaacgaaggaaaagggatgaaa

SEQ ID NO: 244911 - DNA, 377 bp, Glycine max
tgaagcaagcggagatctgatggcgctagagtgggttgtgctagggtacgtcgtcggccgcagaggccataatggttattctcctcaccatcccgggcctggaagctctccgaaagggtctgatcgcggtgacccggagccttctgaagccgttcctctcggtggtgcctttctgcctgttccttttcatggacatatattggaagtacgaaaccaggcctagctgtgagggagattcctgcaccccttccgagcaccttcgccaccagaaatctatcatgaagagccaacgcaacgccctcctcatcgccgccgcactcctcttctactggctcctctactccgtcaccaacctcgtcgtcaggatcgaccacttg

SEQ ID NO: 244912 - DNA, 395 bp, Glycine max
atacttgagatgtacaaggaggcagggctgtttgatccggttgctagttctgttcaagtgacagagtttacgataaaagatgcttacatcctaaatttttttgagaacaattccactcgcttgccaaaatggtgcaatgatggagacacggtgaagcttccttattgtcaaattaaaggcaagtatcgaatggatttacctggatacaacaccatgcaaccatatcctcatatgaatgaaagatgtccatctcttcctccaaagtactccagaccccagaattgctagcagtcttcaatttttttcctccaatcggagggctgattgcgcgtgaccagattttttggtcttctagatttggattgcttaggagattccaaatgaattattggttg

SEQ ID NO: 244913 - DNA, 351 bp, Glycine max
catcacggagctgaagtccaagcttcagaccctcgaatcagataaagatggaatgcagaagcagctggaaggtgtgaagaaggagctcgagaaaacaaccgagaacgtttcttctaatcacgcgggtaatagtagtagttgtaacaacaacaacaagttgtcgaatcagaagttaattgacgtgttggagatggacgtgaagatacttgggtgggacgcgatgataaggatccattgcagcaagaagaaccaccccggggcgaggttgttgacggcattgatggagttggacttggacgtgcaccacgccaacgtaaatttggtcaatgatatgaccatgctacaagcaac

SEQ ID NO: 244914 - DNA, 367 bp, Glycine max
  unsure (1)..(367): unsure at all n locations
gttcgtggtctctgcattgctatttgtgcccttaccttttggatctgtgatatcattgtcacctacacactcccagttatgctcaattctgtaggcctcgctggtgtttttggtatttatgctgtcgtgtgcttcatagcatgggtgtttgtctttttgaaagttccagaaaccaagggcatgccactggaagtgatcattgagttcttctctgtcggagcaaaacagtttgacgatgccaagcacaactgacccaaggacatgataaattcaaagttttgacggtaccttctaattattttcaatctacggctgtttgaaattttcccctcttttaaaattntattntctatttattctctctttt

SEQ ID NO: 244915 - DNA, 444 bp, Glycine max
cgggtcgacccacgccttccgcttgcaggaagacgacgaaagggggatggcttttcattagcagcgttaaagaagagagaagaaaaatgcgaaagttcgatccatggcccgttttcttcaagcgcgagtggaaacgcaactggcccttcctcgttggattcgcagtcaccggagctctaatcaccaaactttcccttggccttaccgaggaagatgctaagaattccaaattcgttaaggcgcacacaaggtgatttctgaatcgtgacatatgcctggctttgcactctatgttaggtttgtcaagattactttgcttgtctcgattttatggattgtaataacagaagagagatgctctagatagtctctttaagactgtatcccatgttcttattttcagttttggctgtttacctaaatctggttgaaaaaaaaccacaa

SEQ ID NO: 244916 - DNA, 404 bp, Glycine max
  unsure (1)..(404): unsure at all n locations
gaatcaattcagattcaacttaagggtgaagatttaaccaaacaatgggagaagtggagcttgatgctacacatcaaagctttccttgtgccagggtagaatgggctntaaggataaaaagtgttgaatatgagtacttaaaagaagacttagcaaataagagttctttgcttcttcaatctaaccctgtccacaagaaagttccagtgctcctacataataacaagcctatagctgaatcacttgtcatcctggagtacatagatgagacatggaagaagaaccctttgctaccacttgatccatatgagagagcacaggctcgcttctgggctaggtttattgatgagaagtgtgtgttagctgtatggggagctaccgtggcgcaaggagaagagaaagag

SEQ ID NO: 244917 - DNA, 380 bp, Glycine max
gacccattgtggatggaactccactttggaaagtgtgtgtgcgggagtgcctatgattacgtggcctctctcggccgagcaattttcgaatgagaagttgataactgaggttttgaagattggtgttcaagtgggaagcagagagtggttgtcgtgggattcagaatggaaagatttggtgggaagagagaaggtggaatccgcagtgaggaagttgatggtggagagtgaagaggcagaggaaatgacaacaagagtcaaagacattgcagagaaagctaaaagagccgtggaagaaggtggaacatcttacgctgatgctgaggcgttgattgaggagcttaaagctcgcagattggcaagacaagattagattttta

SEQ ID NO: 244918 - DNA, 186 bp, Glycine max
gactttggtgacccattgtggatggaactccacggtgggaagtgtgtgtgcgggagtgcctattattacgtggcctatctcggtcgagcaattttcgaatgagaagtttataactgatgttttgaatatagatgttcaagtgtgaagcatagagtgtatgtcgtgggatttagaatgtaatgattt

SEQ ID NO: 244919 - DNA, 357 bp, Glycine max
ggcagttcaattccaatgtattccattctctctgtgtatttccctacctctcccttcaagatgcagatcttcgtcaagaccctcaccggcaagaccatcacccttgaggtggaaagctctgacaccatcgacaacgtcaaggccaagatccaggacaaggaaggaatccccccggaccagcaacgtctcattttcgccggaaagcaacttgaggacggccgtacccttgctgactacaacattcagaaggagagtactcttcacctcgtcctccgtctccgtggtggcatgcagatcttcgttaagacactcaccggcaagaccataaccctagaggttgaaagctccgacaccatc

SEQ ID NO: 244920 - DNA, 393 bp, Glycine max
gggtcttgagcctaataatggattgacatgggagatgacaaaaagaaggggtgacaaagaagttcacatggtgacagaagagaaaccaggctggtgtagtgatccacatttgcctccttgtgctgcatttgtggaaattatggcacctgtcttttctcgtgaagcttggcgttgtgtgtggcacatgattcagaatgatctagtgcatggatggggattgggctttgctctcagaagatgtgtagagccagcacatgaaaaaattggtgtaattgattcacaatggattgttcatcaagtaatttcttctcttgggaaccagggagagtctgacaaaggaaaaatgccatgggattcggtccgagccagatgcaaaagtgaatgggcccagtt

SEQ ID NO: 244921 - DNA, 409 bp, Glycine max
gaattttattttttttaaatgaaataaaaaaaactaacataatgttatttaatattttttaatatttgttttattttaaatacttaaattttaaaaaactaaaattttaaaataaatattaaaatattttattattaatattaacttataatttatgaaataatattatttattttatataaaaaattactattaacaacatttaataatttaataataaaagtaattattaaattaaaaaacataatatattaatataaaatcaacaatacaaattaaaaaaattaaaaaaatagaaattatattaaccgtctacttatcaataattactaggattatattagaaaatatattaattttacttaaatgtcttaaatttttgaattaaaggcttttaaaaatttctttt

SEQ ID NO: 244922 - DNA, 363 bp, Glycine max
  unsure (1)..(363): unsure at all n locations
ggagaaatcagagctggagggtgagtttatcaaggaggctgctaaagagaagatggtgcagctcaagggacatagatcagtgggaggtatgagggcttctatttacaatgccatgcccttggctggggttgagaagttggtggctttcatgaaggattttcaggcaaggcatgcctaaaggagtaacctcaatctgaaacaaatacttgcatngcataaacctaatgcctaaaggattttatgctaataaaggtgttggctggtattcaaaaagggtcacaatctcttgtcaagtttttgctttccttaattaaggattcttgctggccttttttgggttaccttcttgttccatgtttgata

SEQ ID NO: 244923 - DNA, 404 bp, Glycine max
gatgatgggccattcttgcttggccaattcagtttggtggatattgcttatattccatttgttgaaagattccaaattgtctttgctgaggtgttcaaacatgacatcacagaaggaaggcctaaacttgcaacatggtttgaggagttgaataagctaaatgcttataccgagactagagtcgatcctcaggagatcgttgatcttttcaagaaacgcttcctgcctcaacagtgaacgttgtattgctgcaggcttcctctaaaatgtagactctgcccatatagcgtcctttcattcacgggatgggatgcatctgcagtcaaatgtcggttgtgtctatctgccagagttgcaggatagtttgaagtcataatcacgttcatttttcagcttggttggtt

SEQ ID NO: 244924 - DNA, 336 bp, Glycine max
tctagtgtgtgattgattgatggtgtaactcgatcttcttcttttgttgttctgtgtttgtgtctgacttttctctcacctgaaaatgtcttgctgcggaggtaactgcggttgcggaagctcctgcaagtgcggcaacggctgcagaggctgcaagatgtacccagacttgagctacactgagtcaaccaccaccgagaccttggtcatgggagtggcacctgttaaggctcaatttgagggtgctgaaatgggtgtgcccgctgagaaccatggctgcaaatgtggaccaaactggtcctagcacccctgcacttgcaagtgaggtgttgggag

SEQ ID NO: 244925 - DNA, 373 bp, Glycine max
gttcgtggtcagtttgatccaacatctaaggtaactgttggagcttcttttttgtcacaaacaatagctctgcaagactctacaacagtcaagtttgaaatatgggatactgctggtcaagagaggtacgctgcgttagcaccactctattaccgtggtgcagcagttgcagttattgtttatgatataacaagcccggaatctttcagcaaagcacagtactgggttaaggagctacaaaaacatggaagccctgatatagtgatggcactggtcggtaataaagctgatcttctcgagaagcgggaagttgctgtccaggatggcactgactatgcagagaagaatgatatgtttttcatagagacatctg

SEQ ID NO: 244926 - DNA, 392 bp, Glycine max
cacagaagtggagagactgaggataccttcattgctgacctttctgttggtttggcaacgggtcaaattaagactggagctccatgcaggtcagagcgtcttgctaaatataaccagctcttgagaattgaggaggagcttggtgcggaagcagtgtatgctggagctaacttccgtacccctgttgagccctactaaagttttcaagtggaaaaaacctggagatccccacgagtttgagcaatgagatttggatgcgcggttttagtcgtgatcaataagtcgatagttagaacaatagtcttggtataaggaccttgccaataattttttagttctgattcacagagctaagacagttccgtcttagactttaaaagttttgatattta

SEQ ID NO: 244927 - DNA, 328 bp, Glycine max
tatggcattgtaactctgaacgatgaaatgaaatggagttcccagacacgcgtttgtctctgagatcgagcttgacgttcggagagacgctgtgctcggtgttcattccgctcataggaatagtcgaagctttggttttcacattcgccagttgcttcgatttccaatctcccaagaagaataagaaacattcttctaccttcgatgacattctcaccctcgccgaggattctccatttttaagttgctgatttgtgtgtggcagttagtgttaatgaaatcgaggcgttgcatgagttgttcaagaagttgagtaggtctatcattg

SEQ ID NO: 244928 - DNA, 400 bp, Glycine max
gaggcttataagcttgcaccatgtgcctcagcagcacaagatgagaatgctagtgtttctcagagttgctgtgctcaggtgaagaaaattgggcagaacccaagctgcctctgtgcagttctgctctccaacacagccaaaatggctggtgtcaaccctcaagttgctgtcaccatccccaagcgttgcaacctggctaatcgccctgttggttacaagtgtggaccttacactctgccttgaaagagttgaggttgttgctgaaaacaaagatgacggggcgtaagtgcactatggctgttggctactacaaactgtgactacatgtttgttgtatcgtcttgtaactttctagtgaataagagctagctgctcactagtgtaccctataataaacatg

SEQ ID NO: 244929 - DNA, 325 bp, Glycine max
cttttgcagattatggaccggggtcactgcgtgacgcctgtcgcagaaaagaacctttgtggattgtgttcgaagtttccggcaccattcaactctcctcgtacttgaacgtgtcgtctcacaagaccatcgatggtcgtggccagaggatcaaactcagcggaaaaggcttgcggctgaaggaatgcgagcacgtgataatttgcaatctggagttcgaaggaggcatgaggcatgatgttgatgccattcagatcaaacctaattccaagcacatatggatcgatcgttgcacgctcaatgattttgatgatgggctcataga

SEQ ID NO: 244930 - DNA, 364 bp, Glycine max
ggaagagaaggccgagatgaagaagatgtacggcctgatcgagacctacaagttgaacgggcaattcagatggatttcatctcagatgaaccgtgtgaggaacggagagctgtaccgtgtgatctgcgacaccaagggagctttcgtgcagccggctatatacgaggcttttggtttgacagtggttgaggccatgacttgtgggttgccaacattcgccacatgcaatggtggtcctgctgagatcattgtgcatggcaagtctggcttccacattgacccttaccatggtgaccgtgctgctgatctccttgttgacttctttgagaagtgcaagcttgacccaacccactgggaaacaatc

SEQ ID NO: 244931 - DNA, 358 bp, Glycine max
gggtgttgtgttaatctcattcacacattcacagttatactctctctctctttgtcgcttggatcactgatctcatctcaattttcagatatgtcgacatctgataagccagaagtggtggaaaggggtagcaaggatgaaaaacacaaggaagatgatcaagaggaggggaagggtggattcattgagaaggtgaaggatttcattcatgacattggtgagaagattgaggaagctattgggtttgggaagccaactgctgacgttactgcgattcacattccatcgattaatcttcacaaggcagatcttgttgttgatgtgctcatcaagaacccgaatccggtgccaatccctc

SEQ ID NO: 244932 - DNA, 383 bp, Glycine max
  unsure (1)..(383): unsure at all n locations
gatctaaaagaagaaagaaccagcttaagaaagtttgtcaagtgccagttgagaatctctcctcagacatatgggcatggaggaaatatggccagaaacccataaaggggtctccatatccaagggggtactatagatgtagcagctcaaaggggtgtttggcaaggaaacaggttgaaagaaacagatcagacccaacaatgtttatagtgacttacactgctgagcacaaccaccctgctcctactcacagaaactctcttgctggctccacacgtcagaagccattggtacctcaaacagccaccaccactgaagaagactctgacaagagcaagagcctcacaaaacccacttnccctgccacctcaggggcagaagaa

SEQ ID NO: 244933 - DNA, 406 bp, Glycine max
cgacagaagggggcttcttcgtttgctacctaaaccctagtctccatacatcaacttgggaggttaaagagacggcaacgttgtgctgtccgccttgaccgagccagagcttcgtcttggccctcgattttgccctgtaaaactaatcccagtcacaacagaaataatcaatggcaccgaaacagaccaaggctgagaagaagatcgcttacgatgcgaagctgtgcgacctaatggaggagtacggccaaatcctcgttgtaaactccgacaacgtgggatcgaaccagctccagaacattcgcaagggtctccgcggcgactctgttgtcctcatgggggaagaacaccatgatgaagcgctctgtcaggatgcacgctgagaaaaccggaaacaatgcctatc

SEQ ID NO: 244934 - DNA, 326 bp, Glycine max
gacagacagacaaacaatttaccagctatacttgttccttttgaaggttggaagtgctacaatacaaacaatggcagctactcaagaagatgtgaagcttttgggtattgggggaagcccatttgtgtgcagggtccaaattggccttaagttgaaaggagttgaatacaaatttttggaagaaaatttgggcaacaagagtgatttgcttctcaaatacaaccctgttcacaagaaaggttcagtgtttggtcacaatgagaagcccatagcagagtctcttgtgaatgttgaatacattgatgagacatggaagaacaacccca

SEQ ID NO: 244935 - DNA, 418 bp, Glycine max
acgactgaatgggagggagcaacaagcagtgtaccgggtatactgggaccttgagaaggttagaagtgctaccatacaaacaatggcagctactgaggaagacgtgaagcttttggacatagtgggaagcccattcgtgtgcagggtccagattgcccttacgttgaagggagttgaatacaaattctcggaagaaaatttgggcaacaagagtgatttgcttctcaaatacaaccctgctcacaagaaggttccagtgtttgtgcacaatgagcagcccatagcagagtctcttgtgattgatgaatacattgatgagacatggaagaacaaccccatcttaccttctgatccttaccaaagagccttggctcgtttctggtccaaattcattgatgataagattgtgggtgctgta

SEQ ID NO: 244936 - DNA, 347 bp, Glycine max
tgagtgtgtgagagagcgagcgtgcaagcagtttccaagagaggattcgtgattatcaactcgagggattgatcctggtttcttgctcttatatgtctatttatcccttattcataatcttactatacagcatcgtgattctcacactcacacatacacacatattaaactcatatagatcctacgatggctttaaagcacatacttgaggagctcatggactagcagaacgtcccatcaacttcttgcaacgctattaccgtaattctagacatgttccattggcaagcaactattataggtactgctgatagtccttatgctggaagtctattccgtagtactat

SEQ ID NO: 244937 - DNA, 420 bp, Glycine max
gaaccaacttctttctttgttccgttctactttcccttcccaacaacaacaagaagatgccttctgcagaagcttcctccgaaaccatttgtgtcaccggcgctggtggcttcatcgcctcttggatggtcaaactcctcttggaaaaaggctacactgtccgaggaaccctcagaaatccagatgatcccaagaacgggcacttgaaggagtttgaaggagcctccgagaggttaactctgcataaggctgacctccttcatcttgactccgttagatcagttattaacggttgccatggtgtctttcacactgcttctcccgtcaccgataaccccgaagaaatggtggagccagcggtgagtggagctaagaatgtgatcatagctgctgcagaggctaaagttagacgtgtggtgt

SEQ ID NO: 244938 - DNA, 381 bp, Glycine max
agatggttggtttaggattcaaagagcttactctgaatccaactactataagttggtgttttgtacatctaatgatgatagttcgtgtggggatattgtggctcccatcgatcgtgaaggaaacaggcctttgattgtgactcatgatcagaatcatccattgttggttcagtttcagaaagttgaagcttatggatcatcaactgcatgagttggccttgaaaaatcatgcacgtgctttccggaattattccgatactttggttacttgtaagaccgaataaataatgctttggttgtaataaattattattattattatcattattattccaacgctaaataaattaaataaggatatataatgctttatttctatgt

SEQ ID NO: 244939 - DNA, 384 bp, Glycine max
ttatgagtggttgaggattcaaagagcttacgctgagtccaactactataagtaggtgttgtgtacatctaatgatgatagttcgtgtggggatattgtggctcccatcgatcgtgaaggaaacaggcctttgatagtgactcatgatcagaatcatccattggtggttcagtttcagaaagttgacgcttatggatcatcaactgcatgagtcggccttgaaaaatcatgcacgtgctttccggaattattccgatactgtggttacttgtaagaccgaataaataatgctttgggcgtaataaattattattattattatcattattattccaacgctaaatagcatcaaatcggatatataatgctatatttttatgtaaa

SEQ ID NO: 244940 - DNA, 406 bp, Glycine max
  unsure (1)..(406): unsure at all n locations
ggcatcacaaactatatactaatctccatctaatagtgttaatttgtctttctctatctctatcggtcatgggtgcttttgcttttgatgaggaaaactcctccaccgtggctccggcaacactctacaaagctctgacaaaagatgctgacactatcatcccaaagattattggggccatccaaactattgaaatcgttgaaggaaatggaggacccggaaccgtcaagaagataacagctagtgaaggtgaccaaaccagtttcgtgctgcaaaaagtggatgcaatcgacgaggctaacttggtatacgactacagcatagtgggagggacggngttgcatgaaagtttggagaaggttacattccaaacaaaggtggttcctggcactgatggtaatggctc

SEQ ID NO: 244941 - DNA, 368 bp, Glycine max
gattgaaattaacttgtgaaagaagatgggaagcgaagaagtgaagctgctgagcttttgagtgagtccatttggtaaaaggattgagtgggctttgaaactgaagggtgtagagtatgagtatatacaagaagatatcttcaacaagagtagtctccgtctggagttgaacccggttcacaagagggttgcggttcttggtcatgcagaaaaatccatcatagctgaatcattcatcatcgttgaatacatatatgaaaaatggaagcaatattcattgatacctcatcatccttatcaaagagcacttgctagcttttgggctgctactgctgaagaaatgttcaagaaggtagcatggattgctt

SEQ ID NO: 244942 - DNA, 280 bp, Glycine max
ttatggggtattgagattaacttatgaaagaagatgcgaggcgaacaaatgaagctgctgagctttcgagcgagaccatttggtaaaaggattgagtggtctataaaactatatgcattgcagtatgagtatatagaagacgatatctgctacaagactactctcattctggagtagaacccgattcacatgagctttccagctcttgttcatgcataataatccattatagctgaatcattcataatccgtgaatacataatatgaccatggaatgcaa

SEQ ID NO: 244943 - DNA, 364 bp, Glycine max
ggcagttcaattccaatatattccattctctctgtgtatttccctacctctcccttcaagatgcagatcttcgtcaagaccctcaccggcaagaccatcacccttgaggtggaaagctctgacaccatcgacaacgtcaaggccaagatccaggacaaggaaggaatccccccggaccagcaccgtctcattttcgccggaaggcaactggaggacggccgaacccttgctgactacaacattcagaaggagagtactcttcacctcgtcctccgtctccgtggtggcatgcagatcttcgttaagacactcaccggcaagaccataaccctagaggttgaaagctccgacaccatcgataacg

SEQ ID NO: 244944 - DNA, 377 bp, Glycine max
gtaggaagtgaaaaattgagtgatgaagcaattgaagaaactcttgaaaaggttgtcaagttgcttgcctatattagtgacaaagatttgtttgctgaattttataggaagaagcttgctcgaaggctcctttttgacaagagtgccaatgatgatcatgagagaagtattttgacaaaactgaagcaacaatgtggtggtcaatttacctcaaagatggaaggaatggttacagatttgacattggcaaaggagaaccaaacaagctttgaggagtatttaaccaataatcctaatgcataccctggaatagacttgaccgttacagttttgactactggcttctggcctagttacaaatcttttgatctcaatct

SEQ ID NO: 244945 - DNA, 363 bp, Glycine max
gctggtgaatgtgggaaatctaccaccccagataatgaggcttataagcttgcaccatgtgcctcagcagcacaagatgagaatgctagtgtttctcagagttgctgtgctcaggtgaagaaaattgggcagaacccaagctgcctctgtgcagttctgctctccaacacagccaaaatggctggtgccaaccctcaagttgctgtcaccatccccaagcgttgcaacctggctaatcgccctgttggttacaagtgtggaccttacactctgccttgaaagagttgaggttgttgctgaaaacaaagatgacagggcgtaagtgcactatggctgttggctactacaaactgtgactacatg

SEQ ID NO: 244946 - DNA, 371 bp, Glycine max
ggagagagagagagagagagagagagagagatagatggtgtctctgaaacttcagaagcggcttgccgctagcgttctcaagtgtggtagaggcaaagtttggcttgaccctaatgaggtcaatgaaatctccatggctaattctcgacaaaacataaggaaattggttaaggatggtttcattatcaggaagccaactaagattcattcccgttcccgtgctcgcagaatgaaggaggccaagaggaagggacgtcactctggttatggtaagcgtaagggtacaagagaggctaggctccccaccaaaatcctttggatgaggaggatgcgtgtcctcagacgattgctccgcaagtacagggaaacca

SEQ ID NO: 244947 - DNA, 297 bp, Glycine max
ccaagaggtttacttatgggggagagagagagagagagtgagagagagtgatagatggtgtctatgaaactttagaagctgcttgccgttagcgttatcatgtgtggtagaggcatattccggcttgaccctagttatgacaatgaagtctccatggctgacactagacataacataccgaaatcggttaaggatggtttcattatcatgtagccatctaacatccattgtagatcctgtgctttgataattacggatgccataatgaaagtacgtcactctgcttatggtaagcct

SEQ ID NO: 244948 - DNA, 401 bp, Glycine max
gtacagaaattaacaaccatatctattcttacaagttacatccattgagaaacatgaaggtctcccccttagcattttcaatcctttttttgtccttcaccatagaactcttcattggcattgcttcagcagcacaagaaccagtgcttgacacctcaggccagaagctgagaacaggtgtcaagtactacattctaccagtcttcagaggcagaggtggaggcctaacagtttcaagcagtggcaacaacacatgccccctctttgtggtgcaagagaagcttgaagtctcaaagggcaccccagttaccttcacaccctacaatgccgaaagtggtgtcattctaacctcaaccgatctcaacatcaagtcctatgtgaaaagcaccacttgtgataaa

SEQ ID NO: 244949 - DNA, 359 bp, Glycine max
gaatctctgaaaccacagttcacaaccgagacagtttccatctgtctcacaaaatgacaacaatatcaaattgctcccttctcttcctcttcctctttctatccaccctccacatagctttcaccatctcaacccccaccaactgcatcaagtcctcctgcagcaccacccagtacccagccctctgcatccagaccctctacgtctacgcctccaccatccagcaggacccccacgagctcgtacagacagccctctccctctccctcaaccacaccgaggccactaaaaccttcgtcgcagaatgcatccaatttagaggcctcaaaccgagagaatacgctgccttgaaggactgc

SEQ ID NO: 244950 - DNA, 359 bp, Glycine max
ggactcaagttggtcaaactgaggggagaggccatgcaggatgccgctgatgctgctagaagtgctatggttagtgtgataggactggactcagagaaggtccaacaattgtgtgatgcagccaatcaggaagttcctgaagctgagaaggttcagattgccaattacctgtgcccaggaaactatgctgtctctgggggattaaaaggagttgaagtgctagaatccaaggcaaagtctttcaaggctcgaatgacggtgcgcctagctgttgctggtgctttccacactagttttatggaaccagctgtgtcaagattggaagcagcattggcaacaacagaaatcagaaccccaag

SEQ ID NO: 244951 - DNA, 342 bp, Glycine max
gtaggggagaaagggagaggcgcgaaaatgagcggagcgaatgtgaagaagaagggagcgagcttcgtgatcgattgcacgaagtcgacggaggataagattatggacattgcttctctggagaagttccttcatgagaggattaaggtcggcggcaaggccggtgcactcggcgatttcattaccatcaccagggacaagagcaagatcaccgtcacctacgacagcaacttgtctaaacggtatctgaaatatttgaccaagaagtacttgaaaaagcacaatgtgagggattggcttctcgtgattgcatccaacatggagcggaatgtttatcagttg

SEQ ID NO: 244952 - DNA, 386 bp, Glycine max
gtgtgtggtgaacctggtcattttgctcgtgaatgccgcatgcgtggtggttcaggaagacgccgtagccgtagtccgcccagattccgtaggagcccaagttatgggcgaaggagttacagtcctcgtgggcggtcccctaggcaccgcagttcgtcacctcgtggacgtagctacagcaagtctccttcttatcgtgggcgtgaggaggttccttatgctaatggaaatggccttagggaacgacgcataagcagaagttgattttgagagtttggtattgcgtatctgtgatcgctaagagaatagtgagattttgttaatttagtggtgctttgactgaagtatgagtctgttttgatgggcaaggccctgagtttttactc

SEQ ID NO: 244953 - DNA, 389 bp, Glycine max
tctctcaagccgctccgcttcccggctcacgcccagaaggcgcccatcctccccaccaaggatctccccaaggatttcgattggcgagacaaaggagccgtcactaacgtcaaggaccaaggggcgtgtggttcgtgttggtctttcagtacgacgggagcgttggaaggagctcattatctggccactggtgagctcgtgagccttagcgagcaacagcttgtggattgcgatcacgtgtgtgatccagaagaatatggagcgtgtgactcaggctgtaatggtgggttgatgaacaacgcatttgagtacatacttcagtctgggggagtacagaaagaaaaggactatccatacaccgtgagagatggcacctgcaaatttgacaa

SEQ ID NO: 244954 - DNA, 394 bp, Glycine max
ggtgagcgcgaatatcgttttttagctgttgtccctgaaacactagatgggaagccctttatcaatccagcagttctctgtgcttcttacactgatgaggaattctttaaatttagatgcagtgagggcagggaaaaatattttgaacaatacggagaatataagatccataagatttggcgggatgatgttttcccatgccgtgtttatcttcgtcactgtgtcctggctgcaaaaagccttggcgatgaagtccacaataactttttggatcatactttccttgctgaccgtaaaacgaccatacgtcagtactttgaaaaagtgggtacaagcatcttggaagaagagccacctgagtctttgaaaacccgttatggtggttgattgatgt

SEQ ID NO: 244955 - DNA, 381 bp, Glycine max
tttgggttgtgatgagaagtggaatccctaaggtccgggcagctgcattagctctcagggatttacgatacaaagcagatggcattagattggactctggtgaccttgcatatttatcctgtgaggtcaagaacttctttcgctctatcgagaaggaatttggagtgcctgaatttgggaagttgcaaatcactgctagtaatgatcttaatgaggaaacattagatgctttaaacaaataaggccatgaggttgatgcctttggaattggtacatatctgggtacatgttacgctcaagcttgattatgtgttgatttcaagctggctgaaataaataattcaaccctctattaaaactttttgaaaaaatgttaaaggt

SEQ ID NO: 244956 - DNA, 368 bp, Glycine max
gatgtgatgagaagtggaatccctaatttccgtgcagttgcattagctctcagtgatttaggatacaaagcagttggcattagattggactctggtgaccttgcatatttatcctgtgaggtcaggaacttctttcgctctatcgagaaggaatttggagtgcctgaatttgggaagttgcaaatcactgctagtaatgatcttaatgaggaaacattagatgctttaaacaaatagggtcatgaggttgatgcctttggaattggtacatatctggttacatgttacgctcaagctgctttaggtgttgttttcaagctggttgaaataaataatcaacctcgtatcaaactttctgaagatgtgtc

SEQ ID NO: 244957 - DNA, 413 bp, Glycine max
ggcattgtgaaattaatagagagacataaaaaataaacatatattgagaatggagggttgtgtgaagaagttgctatgccttgttgggtttgtggtgcttgtgagtactattggtggggtggagagtgctggtgaatgtgggaaatctacaacccctgataatgaggcttataagcttgcaccatgtgcctcagcagcacaagatgagaatgctagtgtttctcagagttgctgtgctcaggtgaagaaaattgggcagaaccctagttgcctctgtgcagttcttctctctaacacagccaaaatggctggcgtcaaccctcaagttgctgtcaccatccccaagcgttgtaacctggctaatcgccctgttggttacaagtgtggaccttacactctgccttgaaagagtt

SEQ ID NO: 244958 - DNA, 353 bp, Glycine max
gaggtgtgaaagggacttatacagaaaatgttgacatctcaagaagaagaccaacgtgatgcttgtagatatggtatggatgcaactgtataccgtctacttgaatttatcgactgaacaaccacgtttaagactgccatgtgctgctgtgggtgatggatatatagctcagacatatggtttcaaaacacacaggcccacagaagcaccaagcagtggctcttcgcgtaggcgctgaccaatccgccataaacctctgtcgcattgatgccttccaagacactctctacgctcactctaacaggcagttctaccgagactctcttattactggcactgttgactctatattt

SEQ ID NO: 244959 - DNA, 380 bp, Glycine max
gctattataatttgtttcacttcatcaggaagggctgcaagattgatcgcaaagtataggccaacaatgccagtactatctgttgtgatcccccgactcaagacaaatcagctaaagtggagctttagtggagcttttgaggcaagacaatcacttatcgtgagaggtctctttcctatgcttgcagatccacgacatcctgctgagtcaacaagtgcaacaaatgagtctattcttaaggttgcccttgatcatggaaaatcattgggagttattaagtcacatggccgggtagttgtttgccagaaacttggtgatgcatctgtggttaagattattgagcttgaagattaaactattaaagagcactcaaccaacta

SEQ ID NO: 244960 - DNA, 381 bp, Glycine max
gaaggcaccagtaattaataacaagctagctattagttcgattctgtagtaagtgaggtgccaatatggtgaagatagctcttggtactttggatgactcttttagcgctgactctcttaaggattatttcgcagagttccacgcaactctgattttcgtgttcgctggtgttggatcagccatcgcttacaacgagcttacaaaagatgcatccttggacccaacggggctggtggcagtagctgtggcacatgcatttgcactgtttgtaggtgtctgcgtcgccggcaacatctcaggtggccatttgaacccagctgtcacttttggattggccattggaggcaacatcactctcatcactggtttcttatactgga

SEQ ID NO: 244961 - DNA, 311 bp, Glycine max
aggcgtgagaacacgtgagagaggaccaccgacggctgtaatcgcgtgagaaagttcattgaagctactaagccttttaccgtattggaaccatgtctagaagaaaggttatagatgccatggaagagaacgttactctgggcccatgtggtagagatggctaacatgtgtgcggcgtcggttacatgtgcgtctactatgaatcgatacatttattcatgtctgtgatctgtacgagagggaaacacttgatcggatcacaagctgaatgagcgctaaggctggcagatatgaatcgtgtccctattctg

SEQ ID NO: 244962 - DNA, 542 bp, Glycine max
  unsure (1)..(542): unsure at all n locations
gagtttagtagagtgtgtgcnattgatagaactcgcatagcaatgcacgtaccggtccggaattcccgggtcgacccacgcgtccgtacggctgagagaagacgacagaagggggcacatctgttaaaagataacgcatgtgtcctaagatgagctcaacgagaacagaaatctcgtgtggaacataataaaaaaataaaaaaatacaaaaaaagcggccgctctacaggatccaagcttacgtacgcgtgcatgctacgtgatatatcttgtatattgtcacctaaataaaattcactggcctgcgttatacaacgtatacactggtaaaaccatggcgatacccaacttaatctgattgcattacatgctccttatgcaagctggagtaataacaaataggcccgcaccgatcgcccttcctaacagttgcgcagcctgaatggcgaatgggacgcgccctgtagcggaacattaaacccggggtttgtaagggtacccgcaccttgaacggtcacttgtcagagccctattgcctaatc

SEQ ID NO: 244963 - DNA, 363 bp, Glycine max
gaagcatagcagcatcatacaaagcattgaattcaaaaacttaagttcattccttgtgttttgctttcttcctcaaaaccaaacatgtcgaacacatgcggcaactgcgactgcgctgacaagactagctgcaccaagggaaacagctatggtgttattgtagagactgagaagagttacatcgagactgttgtcatggatgttccagcagctgagcatgatgggaagtgcaagtgtggcactaactgcacttgcacggactgcacctgtggccattaaggaatatgtatgaaaatgtaattgccatgtgtttggcaatacaaatatccaaataatgtaatcttcgtatgaataaatgtgtgt

SEQ ID NO: 244964 - DNA, 418 bp, Glycine max
gctgctgaagaattgggtgtccccgaggtgctgttttggaccactagtgcatgtggatttatgtgttacgtgcaataccaacaactcattgaaaaggacctaacacctctcaaagactctagttatatcacaaatggttatttggagactaccatcgattggataccaggcattaaggaaattcgattgaagggtattcccagtttcgttaggaccacaaatccagatgagttcatgcttgatttcatacagtgggagtgtgggagggctcgaagagcttctgcaataattttgaacacgtttgatgccttagagcacgatgttttggaagcgttctcgtccattttgcctccagtttattccataggtccctttgaatttacacgtgaagcatgttgatgacaaagagttgaatgct

SEQ ID NO: 244965 - DNA, 392 bp, Glycine max
gtaggcaccagtaattaataacaagctagctattagttcgattttgtagtaagtgaggtgccaatatggtgaagatagctcttggtactttggatgactcttttagcgctgcctctcttaaggcttatttcgcagagttccacgcaactctgattttcgtgttcgctggtgttggatcagccatcgcttacaacgagcttacaaaagatgcagccttggatccaacggggctggtggcagtagctgtggcacatgcatttgcactgtttgtaggtgtctccgtcgccgccaacatctcaggtggccatttgaacccagctgtcacttttggattggccattggaggcaacatcactctcatcactggtttcttatactggattgcccaattg

SEQ ID NO: 244966 - DNA, 363 bp, Glycine max
ggactcggtttgtttgatatgatggtgaaaaagtatggactcaaggccagactacaacattatacttgtctggttgacctactgggcaggtctggttgtttggaggaggcagaggcaatgatacggtccatgcctgtaaaagcagatgcaattatatggaaaactttattatctgcatgtaaaatccacaagaatgctgaaattgcaagaagggttgctgatgaagttcttaggattgatcctcaagactcagcttcatatgttctacttgccaacatctattcttcagctaacagatggcaaaatgtttctgaggtgaggagagccatgaaagacaagatggtgaagaaagaaccaggcata

SEQ ID NO: 244967 - DNA, 352 bp, Glycine max
aacaaacaatttaccagctatacttgttccttttgaaggttagaagtgctacaatacaaacaatggcagctactcaggaagatgtgaagcttttgggtattgtgggaagcccatttgtgtgcagggtccagattgcccttaagttgaagggagttgaatacaaatttttggaagaaaatttgggcaacatgagtgatttgcttctcaaatacaaccctgttcacaagaaggttccagtgattgttcacaatgagcagcccatagcagagtctcttgtgattgttgaatacattgatgagacatggaagaacaaccccatcttaccttctgatccttaccaaagagccttggc

SEQ ID NO: 244968 - DNA, 377 bp, Glycine max
gaagtttaatgagtctgatattcccaaaggtggtgacagggcttatggggcttatattccccctgtacctagatcatttgaattggtagaagatgtgaatctcttgatcagaagggctgagagatgtctggaagcaggtgcagacatgataatgattgatgctgatgatgtcagcaaacatgctgataacatgcgtgcagacatcattgccaaaatcatagggcgccttggtattgagaagactatgtttgaagcatcaaatcagagaatatcggagtggttcatcaaacaatatggtccaaaggtgaacctctttattgatcattcgaacgtggtggatgtggagtgcctcagggggcgcaacttgggtagaaatc

SEQ ID NO: 244969 - DNA, 413 bp, Glycine max
cggctctgagttagcacagcgaattggcattaatgaagttgccgagagcattatggctttcaacaccaattacaaggacacaggtctttttggtgtttatgccgttgccaagcctgattgcttggatgatttgtcctatgcaataatgtatgagacaaccaagttggcttatcgtgtttcagaagatgatgttacacgtgctcgtaatcagtcgaaatcttcactgctactacacatagatggaacaagcccagtggctgaagatattggtcgtcagctactcacatatggtcgaagaatcccatttgctgaattgtttgctagaattgatgctgttgatgccagtacaattaaacgtgttgcgaaccgatttatctatgacaaggatgttgttattgctgccacgggtccta

SEQ ID NO: 244970 - DNA, 369 bp, Glycine max
ggagagaaaaaatggccaaatcaatcaaattctttgagttgaacacaggggccaagattccttctcttgggttagggacttggcaagctgaacctggtgttgtagctgaagctctcaccacagccattcaggttggatacaggcatattgactgtgctagtgcgtataagaatcaagcagagattggttctgctcttaagaagctttttgatgatggtgtggtgaagcgtgaggacttatggatcacttccaaactctggtgttcagatcatgcaccagaagatgtgccaaaagcattggataaaacattacaggaattgcaacttgactatcttgacctctatctgatccactggccagtccgcatga

SEQ ID NO: 244971 - DNA, 335 bp, Glycine max
caacggggagagttagcatggccaaatcaatcaaatgctttgagttgtacacaggggcctcgattgcttctcttgggttaaggactgggcaagctgaacctggtgtagcatctgaagctctgaccacagccatgctggttggatacaggcatattgactgtgctagtgcgtataagaatcaagcagagattggttctgctcttaagaagcttttcgatgatggtgtggagaagcgttaggacttatggatcacttccaaactctggtgtacagatcatgcaccatactatgtgccagaagcataggataaaacattacatgaattgcaacttgac

SEQ ID NO: 244972 - DNA, 417 bp, Glycine max
gaacacaacctggggtgttaaatagaaaagaggagtttgagaatggcaacgatcagcgcggttcaggtggagttcctggagtttccagcggtggttacttcaccagcctccggcaagacctatttcctcggcggcgcaggttcaatttcatttaatttctgcatgcctacctccaattaagtttctatgataagaaattaaacaaaagaatgaattgaattatgtatgtatatgcttgtaggggagagaggattgacgattgaggggaagttcataaagttcacaggcataggagtatacttggaggataaggcggtgccatcactcgccgctaagtggaagggtaaaacttcagaggagttagttcacaccctccacttctacagggatatcatttcagggccgtttgaaaagcta

SEQ ID NO: 244973 - DNA, 395 bp, Glycine max
  unsure (1)..(395): unsure at all n locations
gataccaaaaacaaaacaagccaagtgaaagagagaagaaaagtcaaagacaatgtcagggatcattcacaagattgaggagacccttcatgtgggaggccacaagaaggaggaggagcacaagggtgagcagcaccatggtggagaatacaaaggggagcatcatggtgaacacagtactgaatacaaaggagagcatcatgttggtgagcacaagccggagcaccatggaggagaagagcacaaagaggggttcctagacaagatcaaggacaagatccacggcgaggagggtggcgccaccgccgagggcgagaagaagaagaagaagaaggagaagaagaagcatgaacatggncatgacagcagcagcagcagtgacagtgattagatta

SEQ ID NO: 244974 - DNA, 395 bp, Glycine max
ggcgggtggacaacgaaatttctcagccaaagaacaaggatcagaatcgtttaatcaagttgaggaagatggcactagtctccggaggaagatcaacactgaaccctaacgcccctctttacattcccgccgcgttccgccaagtggaggatgtttctccagaatggtggcggctggtgacgacactgacatggtaccatgactactggctaagccagcagcacgatgatggagccttctatggcgaggatgggtttggtggcaatgatgtggttgatttgcttcctgattcgtttgattttgatgctggtgaagatctttttgaagagtttattcgatcttctgaatcccaagaagaaactggacccaaaggaactgcatgagcttttagagat

SEQ ID NO: 244975 - DNA, 399 bp, Glycine max
ggagaacaaaacaagtgtttcgaatagattatcctaagtctttgggaatagtgctgcaatggcttcaagtcaggaggaggtgacccttttgggagctactggaagcccatttgtgtgcagggttcatattgccctcaagttgaagggagttcaatacaaatatgtcgaagaaaatttgaggaacaagagtgaactgcttctcaaatccaacccagttcacaagaagattccagtgtttattcacaatgagaagtccatagcagagtctcttgtgattgttgaatacattgatgagacatggaagaacagtcccatcttgccttctgatccttaccaaagagccttggctcgtttctggtccaaattcattgatgacaaggtttttggtgcttcatggaa

SEQ ID NO: 244976 - DNA, 393 bp, Glycine max
  unsure (1)..(393): unsure at all n locations
ggaaactgaacgctgcagcagaagatgttcaaaaaaattttctggcgaagatgtgtctgcacagaaccaagtgaaggcatctgttcaacgaaaaatacgacaaagtattgctgaagagtatccgggccttgaacctgttttggatgatatacttcccaagaagtcccctcttatagttgctaaatgtcagaaccatctcaatctggttcttgtgaacaacgtgcctttgtttttcagtgtccgtgatggaccatacatgcccaccttgcgacttctccatcaatatccaaatataatgaaaaagttacaagttgaccgtggtgcaattagatttgtcttgccgggtgcgaacataatgtgtnccggtcttacatctnctgggggtgttttgga

SEQ ID NO: 244977 - DNA, 405 bp, Glycine max
gaacgaacaaatagaaaaacaaaatgttgcagcttctgtacgcggtgatatttgcggaaatgttcgtgatcgtgagcttcctcttcaaaactccggcgaggaagctggtgatcgtcacattggatcggctcaagcgcggtcgcggccccgttgtcgtcaagaccgtcgccgccacgctgctggtggtgctcgcttcctccctctacagcatcgcaaaaatccggcatcggaacctcgatgctcccgtcgctaaccccaccgaccaagtcctcgtgtacaagcacatgctcgaagcttctcttatggggtttgtgctgttcttgtctctgatgatagatagattgcaccattacataagagagcttcggttactgaggaaggccatggaggctgctaagaaacaga

SEQ ID NO: 244978 - DNA, 370 bp, Glycine max
gagtcttctccttatggaattaatgacacatctattctactataatgcctttgctaatagtgatttgtggaagcacttatctcctatggacgtgttcatcattggatatggcgtgttaaacttcatgtggctaaaatttttactgatctggcgctttttccgcttctggtcactgataaacggaattgagactccagagaatatgccaaaatgtattaataattgtcacaacttggaaggcttttggaaaaactggcatgcttccttcaacaagtggcttgtgaggtatatatacattcctcttgggggatctaagaaaaagctactaaatgtgtgggttgttttcacatttgttgcaatctggcatgat

SEQ ID NO: 244979 - DNA, 408 bp, Glycine max
agacgacagaaggggtttatgcatcaacaaagaaagcggaaagagagcttaaatggaaggcaaaatatggcattgatgagatgtgccgtgatcaatggaattgggctagcaaaaacccttatggctatggagatcagggctccaccgattaaccacttagttttctctttgggttcttttctgaactcacccacaccgtagtccgtaggtcttgtgaatttagttttcccaaaagcttttctttctttagtgatcttaaggtgacaaagtacttgtattattactattcatagttacatagtaaataagtagtggtttactatactgtaatttaaaggttctctaagttccttcttacaggttattgattattagattcggattctctcatgtggaagattctctcat

SEQ ID NO: 244980 - DNA, 381 bp, Glycine max
gactaattaacacacatcaaaacaaccttctttctttcaggtttttgatcagtgtcaaaaccaaaagggtggttgcaaattgcaatggctaagcatgatgttgagggtggttccttcgctgcaaaggactaccatgatcctcctccagcaccattgattgatgctgaggaactcacacagtggtccttctacagggctttgattgctgagttcattgccacaatgctcttcctttacatcacagtgctcactgtgattggttacaagagccagagcgatgtaaaggctgggggtgatgtgtgtggtggagttggcattcttggcattgcttgggcctttggtggcatgatcttcattctggtgtactgcactgctggaatc

SEQ ID NO: 244981 - DNA, 434 bp, Glycine max
  unsure (1)..(434): unsure at all n locations
cgggtcggcccaagccttcctaccggttgcaagaggccaccggaagggtataggtggaaatttaacctttccctccccaatttctgtccatgttttcatctgcggaaactcctncgttctcaaaaccctaacccgacgccaccattcatccgatccaatgagttcgagaggagccagcgcgctgctatctcgagccagcaggattcgctcgaagcttcaaacggcgctggaagccaccgttttggaggtggacgacgtgtcgtaccagcacgcgggccacgtcgccgtgaagggaagttccgacaaagaaacccacttcaacgtgaagatcgtatcgcccaagttcgagggccagagcctcgtcaaacgacaccgtctcgtctacgacctnctcgccgaggagctccagagcggcctncatgccctctctatcg

SEQ ID NO: 244982 - DNA, 539 bp, Glycine max
  unsure (1)..(539): unsure at all n locations
agtagtaggtnnttnnagttacggattctgatctcatgccgtaccggtccggaattcccgggtcgacccacgcgtccgtacggctgcgagaagacgacagaaggggggccgattgggtgtcttcattccagcgacaatacagaagatgaacgaaacgaagtgagaggccggagggcagggaacagagtcgagtcgatcaggctcgacgaccgggagaagcaaaacgaaattcggatttggccgaaaaagaagcaacgctatggataccatgaccgatcaccatcgataaagaagaatctttctaaattacttcgggtcagcggggccttcaagcatccgaaatacgccggggttgtaaatgacatagcgttcctgatagaaaatgacgactccttcaaaaaaaggaagttatttaagttatttttccccaagaagtcccgctccgacggcccgacgagtcatctatttaaaaggaccctccctgcagtgcgccccttcttgaattatttggtcatgcaatacttattgaatagaaagaa

SEQ ID NO: 244983 - DNA, 355 bp, Glycine max
gagagtggtggggtgtgcagaagagcgtcgcagttgtaaccctaatcagaagaagcgcaacttcaagcgagtgacagccaccagccatgggtcgtatgcacagacgcggtaagggtatatcctcttctgctttgccctacaaaaggacacctcctagctggctcaagatctcttcgcaagatgtcgaagaaaatatctgcaagtctgcgaagaaaggtttgaccccgtctcacattggtgtcattctcagagattgtcacggtactgctcatgtcaatagcgtcactggcagcaaaatccttcgcatcctcaaagctcacggacttgcgcctgaaattccagaggatctgtacca

SEQ ID NO: 244984 - DNA, 435 bp, Glycine max
gaggtgcaggaaaattaatctccctttcattttctctgcatctgtactctccaaaatgccgtccttagaggaggagctcttcccttcaaccccaggcaagttcaagatcgagcgggcccaccacatgaaccgccagctctaccgctgcttcgcctccaccagcaccatgttcctgtgggccctctttttaatcgccctcaccgcttcatatctcagcttccaaggcttcgttgattccggcagccgctacctctccgcctcctggggcgggatccagtgggagaagcaggtccgcacctccgcccagatccaccgtcaaggcggcatgtccgtcctcgtcaccggcgctgccggcttcgtcggctcccacgtctccctctcgttaaaacgacgcggagacggcgtcgtcggactcgacaacttcaacgactacta

SEQ ID NO: 244985 - DNA, 53 bp, Glycine max
tacggatgcaaaacgactacagatgggtaggcctaggggaagacgacagaagg

SEQ ID NO: 244986 - DNA, 391 bp, Glycine max
gaaggcaccagtaattaataacaagctagctattagttcgattttgtagtaagtgaggtgccaatatggtgaagatagctcttggtactttggatgactcttttagcgctgcctctcttaaggcttatttcgcagagttccacgcaactctgattttcgtgttcgctggtgttggatcagccatcgcttacaacgagcttacaaaagatgcagccttggatccaacggggctggtggcagtagctgtggcacatgcatttgcactgtttgtaggtgtctccgtcgccgccaacatctcaggtggccatttgaacccagctgtcacttttggattggccattggaggcaacatcactctcatcactggtttcttatactggattgcccaatt

SEQ ID NO: 244987 - DNA, 379 bp, Glycine max
gattcaaggccttcacagcattcgttgcggcattttaatcgatttatccaagcaggacagaatgaactaatggagtctaaaggtgggaaaaagaagtctagtagtagtagtagtaaatcattgttctacgaagctcccctcggatacagcattgaagacgttagaccaaacggtggaatcaagaaattcagatctgctgcttactccaactgcgctcgcaaaccttcctgatatccatccagattgatagttcattgcatgcaaccatagttttattaggttttttcttctttgttttcaattaggtttttgctgctctccttcaaactccgtctttccgaatcctctctttgtgattgtgttctgttctgcttcctac

SEQ ID NO: 244988 - DNA, 203 bp, Glycine max
tacagctagaattatgaattgcgttggcctgtatttaaaaaagctggtgttgaccacaaacttgaattcagagaaggtcctgctctaccagttcttgatgaaatgattaaagatgactagaaccatggaagctatgacttcatctctgttgatgcgtacaatgacaactacctcaactaccacaagaggttgatcgaacttgt

SEQ ID NO: 244989 - DNA, 317 bp, Glycine max
ggcagcgacaagatgtggaaccaaccattgggaaaaaccgatttggaaagcggttctcgcccgctgtatccgatgatgcttgagagccccgaactgcgctggtctttcatcagaaaagtatactccataatcgccatacagttgctcgtaaccatcgtcgtcggcgccgtcgtcgtcaccgtgcgcccaatcagcgtcttcttcgccaccaccggcgccggattggctctctacatcgtcctcatctttgtccccttcatcacattgtgtccactttactactactcccagaagcatactgtcaattacttgctcct

SEQ ID NO: 244990 - DNA, 323 bp, Glycine max
ggagatctggtcatcgtggggatctgcatacgccggatctgctaaaatacgcttgatccatatgggcctgctggaccacttgtgggacgacaccgtctccgacccaaggccggaaaacggtctgggcaagctccgaaaacaccacacgttgactttccgacctagctcctgcaaggaaacggagggcgaaagcgtgagatcgcacggagacgaatcgtcagaggaagcgacgagagtgacgcgtagtatcatgatcgtgaaaccgcccgggtaccagagtggatcgcctccggtttgttacggcggctctactactacgattt

SEQ ID NO: 244991 - DNA, 405 bp, Glycine max
tagaggggatctatgacaacaaggatggaacggtttttgttgcatctggttctaatggccatattgagctctactggggtattgcaggtgatggttctgttataatttctgaaaatctggagcttataaaagcaagttgtgctaaatcatttgcaccatttccagctgggtgtatgtttcatagtgaacacggtctcatgaactttgagcatccaacacagaagatgaaagcaatgcctcggattgacagcgagggggttatgtgcggggccaacttcaatgttgactctcagtcaaagatccaggtgatgccacgtgttggaagtgaagctaattgagcaacttgcggctaacaagcttagctgattcttagtccagcatttttctttctaagtggttaaaagt

SEQ ID NO: 244992 - DNA, 358 bp, Glycine max
gattccattgtgtagtaaccaatcatctttagttcttcagtaatttatcgtgggattctattctaagattttgagaatgtctagctgtgggtgtggaagcagctgcaactgtggcagcaactgcggttgcaacaagtactcttttgacttgagttacgttgagaagacaaccacagagactctagttttgggtgttgggcctgtgaaggcccaattggagggtgctgaaatgggtgttgcatcttagaactgtggctgcaactgtggatcaagctgcacctgtgacccgtgcaactgcaaggtatgtcaagatgtataaccttgaagcagagatagctgtaatatatgtatcaacaaa

SEQ ID NO: 244993 - DNA, 403 bp, Glycine max
  unsure (1)..(403): unsure at all n locations
acgacgacagaaggggcggagattgttgcctgaagagaaggttgaggctgtgaaaggtctttcactcactgctgatggaaatggcgttgcttttgatgtaccagctaaagatttagacatatatcttaatggtcacgaaaatgcctccaatgtatgtttagaggtagtgaaaacactgccacagttgcaacagaaagagccacaatcaagaggtggcagatttggtgataatggtggtcgtggtgggaactacaggtttggtggaagatgttgaagacgcaggaatggtaagttcttcaatggtggtgggcgttgcggcaactggggtggaaagagatggtgaagctganaagggactttgggagttgagtgttttcactctgctcggtgtgggatcataact

SEQ ID NO: 244994 - DNA, 379 bp, Glycine max
gaaaggtgttaggttataaaaaaaaaaaatcttagccacagacgcagaggaggagatggagacgatgatgatgatgagctgcgtttcgatttcgagttcagtgacaagaggcgctattagcgtgggttcctcctcatctttgtgtttcggcacacccaagttgttcaattcagcaagggtagcggtgaatggtcggcgaagaaacaaaggtttgagttgcaacgccatgttcggtctgggggtgcccgaactggtcgttattgccggcgtggccgccctggtttttgggcccaagaaattgcctgaagtcagccgtagcatcggcaagactgtaaagagctttcaacaggctgcaaaggagtttgagtcggagcttaag

SEQ ID NO: 244995 - DNA, 355 bp, Glycine max
gatggatgagaatcttggcttaaccaaagggtacatcaagaaggcactgaatggtggagatggagacaatgccttctttggcaccaaggtgagccactaccctccatgtccccatccagggcttgtgaagggtctgcgagctcacaccgactcaggaggcgtcatcctactcctccaagatgacaaggttggtggccttcagatgctgaaagatgggcaatggattgatgtgcagcctttgccaaatgccattgtcatcaacactggtgaccagattgaggtcctgagcaatggtagatacaagagttgctggcacagggttctggccacaccagatgggaacagaagatcaatt

SEQ ID NO: 244996 - DNA, 489 bp, Glycine max
  unsure (1)..(489): unsure at all n locations
agttagagaggactttgtgatggtctagtgtgctcngcgatgcggtaccggtccggaattcccgggtcgacccacgcgtccgtacggctgcgagaagacgactagagggtacggctgcgagaagacgacagaagggtacggctgcgagaagacgacagaagggtacggctgcgagaagacgacagaagggtacggctgcgagaagacgacagaagggtacggctgcgagaagacgacagaagggtacggctgcgagaagacgacagaagggtacggctgcgagaagacgacagaagggtacggctgcgagaagacgacagaagggtacggctgcgagaagacgacagaagggtacggctgcgagaagacgacagaagggtacggctgcgagaagacgacagaagggtacggctgcgagaagacgacagaaggggcaaaaacaaaatttacttgttgaagaaaaaaaagcggccgctctagaggatccaa

SEQ ID NO: 244997 - DNA, 403 bp, Glycine max
cgagaggcggcacgacggagagcgcgaatgacaatggaggaagcccttgcggaactggagcgagtccaaacccagcttctgcaacgcatatcgcaactggagcgttcgcatcttacatcaccctcttcccaaaacgacaccgtcgaagacactgccactgacaccgtggctcgactatactccattctgcgcagcaacgagctacccgatttctccttcaagagagtaccttacaattactacgactggaccatcgaagccacgtcacgacgccctctacgacgactcaatgcaccatctctgcataagcatcgttctcgttaacacgcaagcccacgacaacgtcgtcgattgcagcgaccgcaagaattccaaatactatgtcgttgtcgttcagtacacc

SEQ ID NO: 244998 - DNA, 400 bp, Glycine max
ggagcctaatgttgtcaataaaattgcttttgtggttcctgtttttgtcgtggtaccactttgccatcccatgtgaggccaaccaacaaggggaatatctctataagtttattcaaacaaagagggctcagaaacgctcttatggagaagcttcttctatggctacaaatcttggtggtgatgaacatttttcgaaggtttatgttgttaaggaacaatccgggttgatggaaggtgacaaagtgaaggctttgccgggacaaccatctcaaggggtggattttgatcaatatgctggctatgttacggtcgatgccaaggcagggagagcactgttctactactttgtggagtcacctcacaatgcttccaacaagccctttgttctatggttaaatgg

SEQ ID NO: 244999 - DNA, 377 bp, Glycine max
gaatctagtggaagagtgaataagagatatcaatatattatgataatggagggatacaataagaaggttatgattgtggggatggtgttgggcatggccatgattgggatggccaatggccaatactcgttttgtcgcatgcccagcgatgggttggcggcatgcaagccgagtgtgagtggggactatcctgctgatccctccactgcttgatgctcagccattgccaaggctgatcttaaatgcttctgccgcttcaaggattcgggccttctctctatgtatggtgttgatcccaacaagtgcatggaactccctgttaagtgcaaggttgccgactctttccactgctagattcattagagggggcactaatc

SEQ ID NO: 245000 - DNA, 366 bp, Glycine max
ggcgtgttttcatcattgtcgttctgaacggaaaagcactggcgcagctaccctgaggcttctcttctcttctcttctttgtcgtgagtcaccatggtgagggttagtgtgctgaacgatgctctgaagagcatgtacaatgctgagaaaaggggaaagcgccaagtcatgattaggccatcctgcaaaggtcttatcaaattccttttggtgatgcaaaagcccgggtacctcggaaagtttgagtatgttgatgaccacagggctggtaaaatcgcggttgaattgaacggtagactgaacaagtgtggggttattagtccccgttttgatgtgggcgtcaaagagattgaaggttggactgct

SEQ ID NO: 245001 - DNA, 383 bp, Glycine max
gtagatttgtatcttatccactggcctgctccgatgaagaaaggatcagctggctttaagcctgaaaatcttgtgcaaccaaacatacctaacacctggaaggcgatggaagcactctatgactctggcaaggctcggaccatcggtgtaagcaatttttccaccaagaagctctcggatttgctgctaattgctcgtgttcctcccgctgtcaaccaggtggagtgtcatccttcctggcagcaagacaagctgcaagctttctgcaattccaaaggtgtccacctctctggatattcacctttgggttcccctggaacaacctggcttaaaagtgatgtcctcaagcatcaagttataaatatgattgcggagaaactagg

SEQ ID NO: 245002 - DNA, 378 bp, Glycine max
  unsure (1)..(378): unsure at all n locations
tggagccggtggagaaatgtttgaggggtgctaagatggacaaaagaagtgttgatgatgttgtccttgttggtggttctaccagaattcccaaggttcaacaactgctgcagggcttctttaatggaaaagagctttgcaagagcattaatcccgatgaggctgttgcatatggtgcggctgttcatgctgcaatcttaagtggtgagggcaatgagaaggttcaagatcttctcctcctggatgtcacccctctgtctcttggtttggagactgccggtggtgtgatgactgtcctgatccctaggaacactacaattccaacanagaaggaacatgttttctcaacatactctgacaaccagcctggtgtgctta

SEQ ID NO: 245003 - DNA, 385 bp, Glycine max
ggagtagcgatggagaagaagaagggtgagctaaagtcaattttccttcctttcctttccactagtcacataatcccgctagtggacatggccagactcttcgccttgcacgacgtctacgtcaccatcatcaccaccgcacataacgccaccgttttaccaaaagtccatcgatttagatgcgagtcgcggtcgccccatcagaacgcacgttgtcaacttccgcgccgcacaagtgggtctccccgttgggatcgaagccttcaacgtcgatacgcctcgggaaatgactcccagaatctacatgggcctatcccttctccaacaagtcttcgaaaaactcttccatgacttgcaaccggatttcatcgtcaccgacatgttc

SEQ ID NO: 245004 - DNA, 367 bp, Glycine max
  unsure (1)..(367): unsure at all n locations
gataccaaaaacaaaacacaagccaagtgaaagtgagaaaaaataaaaatcaaagagcataatgtcagggatcattcacaagattggggagacccttcatgtgggagggcacaagaaggaggaggagcataagggtgagcaccatgctggagaatacaaaggggagcaccatggtgaacacagtagtgagtacaaaggagagcatcatggtgaacacaaagctggagagtaccatggtgagcacaagccagagcacaaagaggggttcctagacaaagtcaaggacaagatccatggtgagggcggcgccgncgaaggcgagaagaagaagaaggagaagaagaagaatgagcatggccatgagcat

SEQ ID NO: 245005 - DNA, 372 bp, Glycine max
gaatgatgaggatgatgacgaggaaggcagtggcgaggaggaggatgacgattagagaatggactgatgataatagcatttatgtaggttctgatgattttgatcatccgtgtaggtggtctggtcatttccttataaacatatttctctttccaaaaaatatttccctgctcctccttccgtaaattgctcgtctttccaaaacgtgaatagtttaaagaagggagttctctttatttgtatttctaaatccaactgtttagttaagggatggttatctcttgtagagcttttagtttgatttagagttttcttgttgaaatctggttaagtttgtatcaatataattgacttatcatcccctttctgctc

SEQ ID NO: 245006 - DNA, 370 bp, Glycine max
gagagtggagtaaaaaaaaagagcagtgtaagaaattagaaagggcgaaaggcgcactttatctgaaagcaaaaaccctacctagggtcaaccgtgacgccacaatcgccttcggcatctttgcaacgggatcaggtgctcctcgtccttcacgatggcgggaactgaagccaaaaaaactgaatccaaaaaacctgccgctaagcaatccggtgcgaagaagaaggaggtgaagaaggaaactggcttaggtctcacgcatcggaaggcggagaacttcggagagtggtattccgaggtggttgttaatgcggaaatgattgagtactatgatatttccggttgctatattctgaggccttggtcaatg

SEQ ID NO: 245007 - DNA, 354 bp, Glycine max
ggtcacttttctcagctgctgttcctgcgcgtgaacaagcctcaggtaagccaaagccatggttaagcataacaatgttatccccaacggacacttccgtaagcactggcagaactatgtgaagacctggttcaatcagccagcacggaagacaagaagacggttggctcgtcagaagaaagctgtgaagattttccccagacctacagctggacctcttagacccattgtacatggtcaaactttgaaatacaacatgaaagtgagagctggaaggggattttcccttgaagaactcaaggcagcatggattcccaaaaagcttgcaccaacaattggtatttgctgtgatca

SEQ ID NO: 245008 - DNA, 370 bp, Glycine max
gggtgcggagaatcccaaaaaggcaaaacttgcagccctcgtggggttatgttttagttacggtttgggtttctcggctttgtttttcgcagtttcggtgaggcacgtgtgggcttcgatgttcacaagtgacgcggagatcattgctttgacatcgatggtgttgcccatcattggactatgtgaacttggaaattgtccgcaaacaacggtttgcggcgttttgaggggaaccgcaaggcccaagttgggagcgaatataaatttgggttgcttctatctagtgggaatgcccgttgcggtgaggttgagtttctttgccggctttgatttcaaaggcttgtggcttggtttattggcagctcaagcc

SEQ ID NO: 245009 - DNA, 380 bp, Glycine max
ggtatatcatttacaatttcaatctctctctctctctgtctctctctctctagacctagattttgtgaatggctgaagtggaagagggacaggtcatcggcgtccacaccgttgatgagtggaagctgcaactccagaatgcaaaagactccaaaaaactgattgtggtggattttactgcttcctggtgtggtccatgccgttttatggccccagttcttgcagagattgcaaagaaaactcctgaattgatcttcctcaaagtggatgtggatgaagtgaggcctgttgctgaggaatattccattgaggccatgccaaccttcctcttcttgaaagatggcgagatcgtggacaaggtggttggtgctagtaaggat

SEQ ID NO: 245010 - DNA, 498 bp, Glycine max
agttggaggagggcgttgtgcgatcgaacagtagtcttacagcgatgctgtaccggtccggaattcccgggtcgacccacgcgtccgtacggctgcgagaaacgacagaagggtacggctgcgagaagacgacagaagggtacggctgcgagaagacgacagaagggtacggctgcgagaagacgacagaagggtacggctgcgagaagacgacagaagggtacggctgcgagaagacgacagaagggtacggctgcgagaagacgacagaagggtacggctgcgagaagacgacagaagggtacggctgcgagaagacgacagaagggtacggctgcgagaagacgacagaagggtacggctgcgagaagacgacagaagggtacggctgcgagaagacgacagaagggggacctgcataatctgcaacacagaaatctaggacagaagcatgacaaaaaaaaaaaaaaataaaaaaaaaaaaagcggccgctctag

SEQ ID NO: 245011 - DNA, 401 bp, Glycine max
ggctgcaaattaaaccaattttctttgtctatgcaacctacacttcaacaaagcttctctaaacccaatagctctgatttcaagatgagttcatttagccaaaaccactatgttttagtcctgttccttgttctcactgtgtggacatcccacataatgtctcgcaggttgtttgaggcctgcacttctgagagacatgagaactggatggcacagtatggtaaggtttacaaggatgctgctgagaagaaaaaacgtttccaaatattcaaaaacaatgtgcacttcattgagtcattcaatactgctggggacaaacccttcaaccttagcattaaccaatttgctgaccttcatgatgaggaatttaaggctttactaactaatggtaacaagaaggt

SEQ ID NO: 245012 - DNA, 384 bp, Glycine max
gaaggcatcgtgatgatagagaaacgggccgagaacgatctcgtgatcgtgaccgtgaacgatctcgagaccgtgatcgtgaccgcgaaagggattaccgtgagcgtgacaggcacaaagaagatagggacaggtatgcagatcatcacaggtacagagaccgggaagcagaacacgatgatgagtgggagaggggacgatcatcaaagcctcacagtaagtcacagttatcgcaagaggaggaacaccattctaggccaagagatgctgattatgggaagaggcggcggcttacttctgaataactttgtatgctgcccgttatttctctgaatgctttccactttggaaggaaaaaacagtaactgaaaatcacgatttgtc

SEQ ID NO: 245013 - DNA, 383 bp, Glycine max
ggtagcgacccatcagagaagatcgcgatcttctgaaacatgtctggggaagaggaagaaaacgccgcagagctcaaaattggagacgagtttttgaaggcaaagtgcttaatgaactgtgaagttgcattgattcttgagcacaagtatgagcagcttcaacagacatccgatgatcccatgaatcaagtttctcacgtatttgaaaagtcactgcagtatgtgaagcgcttcagccgctataaaaatcccgatgctgttagacaagttcgagaaattctcgccagatatgaattggctgagtttgagttgtgtgtccttggcaacctttgcccagaaactgtggaggaagctattgctatggttccatctatcaagtcaag

SEQ ID NO: 245014 - DNA, 381 bp, Glycine max
ggctcgcatagattttgctccaaagggtttgaacgctccccacactcaccctcgcggcactgagatccttatagtccttgagggtactctttatgttggatttgtgacttccaatcaagatggaaatcgcctcttcaccaaagtgctgaacaagggtgatgtgtttgtgttcccaattggtctcattcatttccaattgaatgtgggatatggcaatgctgttgccattgctggtcttagcagtcaaaatccaggagctatcactattgcaaatgctttgtttaaagctaatccacctatttcttctgaggttctcaccaaagctttccaggtggacaagagcataattgattatcttcaaaagcaatcttggtacgacaa

SEQ ID NO: 245015 - DNA, 377 bp, Glycine max
gattgtgaaatcaacagagaaacatttcactaatagagagacataagcataatattgagaaataatggagggttgtacttattgtgtgaagttgctatgccttgttgggtttgtggtgcttgtgagtactattgcaggggtggagagtgctggtgaatgtgggaaatctaccaccccagataatgaggcttataagcttgcaccatgtgcctcagcagcacaagatgagaatgctagtgtttctcagagttgctgtgctcaggtgaagaaaattgggcagaacccaagctgcctctgtgcagttctgctctccaacacagccaaaatggctggtgtcaaccctcaagttgctgtcaccatccccaagcgttgcaacc

SEQ ID NO: 245016 - DNA, 369 bp, Glycine max
gagatagatctgcttcttgttgttggaaagaaaccctagcaagcggaacaatggcagacgttgaggtcgatgtggcggctgcagcagcagcagggcagccgaagaagagaacgttcaagaagttcagtttcaggggcgtggatctcgatgcgcttctggacatgtccaccgatgaactcgtgaagatgttcagtgctcgcgcacgtagaaggttccagagaggcctcaccagaaagcccatggccttgatcaagaagcttcgcaaagcgaaaagagaagctccaccaggtgagaagccagaacctgtccgcacccaccttcgcaacatgattattgtgcctgagatgattggtagcattattggagtgt

SEQ ID NO: 245017 - DNA, 384 bp, Glycine max
gaagagagagagagagagagagagagtcctgaaacttgggtgcgattccttcactcacaacaacaacacatcactatggctcttctgagtcgagcctcttcacgcttccctcagctggtttcccctcaaagggtagtttcactccacacaacgctcccatctctgaacgcatccccatccacagccacgcctacaccatatgccccgccaccgcctccgtccgcttcctctcccgccggcgtttcgaaggcggcggagttcgtgatctcgaaggtggacgatctgatgaactgggcccgccgcggctccatctggcccatgaccttcggcctcgcctgctgcgccgtcgaaatgatgcacaccggcgcccgccgctacgatctc

SEQ ID NO: 245018 - DNA, 387 bp, Glycine max
gattcaatcccaagagaaattcctgacccaaatgctaaagagcctgaaaactgggatgaagaggaagatgggaaatggaaaccaccaaagataccaaatccagcatacaaaggaccatggaaaagaaagaaaatcaagaaccctaactacaaagggaaatggaaaactccatggatagataatccagagtttgaagacgaccctgatctttatgtgcttaagcctatcaagtatgtaggcattgaagtttggcaggttaaaggcggttcagtttttgacaacgttttgatttgtgacgaccctgattatgcaaaacaagttgttgaggaggtgtttgccaacagggagattgaaaaggaaggttttgaggaagcagagaaagtgaga

SEQ ID NO: 245019 - DNA, 374 bp, Glycine max
gctgtcgtgagctggacctggaccaaccactggatctactgggccggccctctcatcggaggtggaattgctgggcttatctacgaggttgtcttcatcagccacacccacgagcagcttcccagcactgactactagaggggaaaaatgaaataataaaaaaaaaaaaaatgtgtattattgaatttctccggaatcttcttctgtgtatggttttccttcctttgtgttttctttcctgttgaatcggtggccgctgatctttggtcggatggttgatgatcctgaagttttcttttaagttaatttaattatcattttgtgcatgctctcgctctcacctggtccacaattgaattgaatgtatgtatcat

SEQ ID NO: 245020 - DNA, 358 bp, Glycine max
gaggagatgaaaactgaagatgaagaccaaattggttggcagacttacagcaaccttgcttctatttatgttaagtttaaggactttgagaaagctgagatgatgcttaagatgctggaaaaacaagtgaagccgaaacagcgtgatgcttaccattgcttgcttggcctttatgcagggaccggtaatcttggggaggttcatagagtgtggaattccctcaagtctgtctcccctgtcaccaacttcagctatcttgttatgcttagtaccctccgaaagcttaatgatatagaggggttaacaaaatgctttaaggagtgggaagctagttgtgttagctatgatgtgaggttgg

SEQ ID NO: 245021 - DNA, 349 bp, Glycine max
gagagaaagagagagaaagatgtcgaagcgtggtcgtggtggttcggcggggaacaagttccgcatgtcgctgggtcttccagtggcggcgacggtgaactgcgccgacaacacgggggcgaagaacctctacatcatttcggtgaaagggatcaaaggccgtttgaaccgtcttccctcggcctgcgttggcgacatggtgatggccaccgtgaagaagggaaaacccgatctgaggaagaaggtcttgccagctgtcatcgttcgccagcgcaagccatggcgccgaaaggacggcgtctacatgtacttcgaagataatgctggtgttatcgtcaatcccaaggga

SEQ ID NO: 245022 - DNA, 372 bp, Glycine max
taccggcgatattttccggcagagcataacggaaatgcttgcggagtccccttccggtgcgccagaacttcacgttctcgccgtcgatgacagcctcgttgatcgcaaggtgatcgaacggttgctgaagatttcttcctgcaaagtgacggttgtggagagtggaacgcgcgctcttcagtatcttgggttggagggagagaacggttctcttgggtttgatagtgttaaggttaatctcataatgacggattattccatgccggggatgacaggatatgaattactcaagaaaatcaagcaagagtcttctgtgtttagagagattccggtggtgatcatgtcatcggagaatgttttgacccgaattga

SEQ ID NO: 245023 - DNA, 397 bp, Glycine max
  unsure (1)..(397): unsure at all n locations
ggaagtcgagtcgaagagttttgggagccaaatgggtcttctgagtatcataaggaaaatcaagcggaaagagaaggaaatgcgaattctaatggtcggattggacaattctgggaaaaccacaatcgttttaaagataaacggagaggactccagcgtcatcagtcccacgctcggcttcaacatcaaaaccataacttaccaaaagtatactctaaatatatgggatgttggggggcagaaaacaataagatcttactggagaaactactttgagcaaacagatggtttggtttgggtggttgacagttcagatctgagaaggttggatgattgcaaattcgagctcgataaccttctcaaggaagagaggctatctggagcatctntactgata

SEQ ID NO: 245024 - DNA, 364 bp, Glycine max
tgaagtcttgaatttctgaacatagaacaactcttcacacaacacaactttttctagcattgtagcatcatgactggcaaagacatcctccatataatgaaggtgaaagcagggtttgcaccaccagacacagggaaaggaaaaggcaaaatatcaaaacacatcacacatggctttcacttgatgaagggcaaatcggcacatcctatggaagattatttagtttcggaatttaagcaagaaaaggatagagaattaggcttgtttgcaatatttgatggccacttaggccatgatgttgccagctatttgcagaaccaccttttccaaaacatcttgaaagagcatgacttttggactgaga

SEQ ID NO: 245025 - DNA, 385 bp, Glycine max
gatgaataagatcttcagattttgttacagtttttcaaattattctgtggcaaggagagaagaaaagatcatagaaagtggtgattcttcgaatattgaagagagaaatatggggttgagattgaaggagacattctacttgtcccatggagcaccaactcttgccgtagatgattcaatccctgcgtggaacttcttcaattcgtggaaggagcagtttccgacgagaccctcttccattcttattatctccgcccactgggacacccatgttcccaccgtcaacgtcgttcaccagaatgataccatctacgacttctatggcttccccaaatccatgtacaagctgaagtatccagtaccaggggctccacacttagcaaag

SEQ ID NO: 245026 - DNA, 353 bp, Glycine max
gacaaatattgggatctgtattctaacgagtcacttgagcatgaccttcccggtcaccttctccgctaccccatcggggttgccagtgaaggagatgtcaccgagctgccaggatttgaattctttcccgacaccaaggctcgcattcttggtggcaaagctgactacctcccccctattctcactacttaatttgattttgtactttgttacaaacttgttattgcttacatcctaatctgtgttttcattactacttagtaataatcttaatatagtctgtgatgtcttgtggagatgttttttctgctatttttctgaagatttcagtgacagattttagttatctgatg

SEQ ID NO: 245027 - DNA, 348 bp, Glycine max
gtgttcacttgatccttcataagtcgtcatcaccatcattatcatcaccgttgattgaagaagatgccgatcagaaacatcgccatcggaaggcctgaagaggctactcaccccgacacgttgaaggcggggttggctgagttcatctccaccttgatcttcgtgttcgccggttcaggttccggcatcgcctacaacaagctcaccgacaacggcgccgtcactcccgccggcctcatctccgcttccatcgcccatgctttcgccctcttcgtcgccgtctccgtcggcgccaacatctccggcggccacgtcaaccccgccgtcaccttcggcgccttcgtgggc

SEQ ID NO: 245028 - DNA, 348 bp, Glycine max
ttgtggacatgcctggaaacggcgacgttccgtttactcacgcgaatattagttcggcccggagagaactcgggtacaagcccaccaccgatttgcaaaccgggttgaagaagttcgtcaagtggtacctttcctattacggctacaatcacggcaaacctgtaaattaattttattttattttgtttcccccccctttttttttctttttcggaaagggtttttttctttttttagtgtggtaggttttaagtcacagattaaaacagacggggaaaaaaaagaagaaagaacctggtcaagaagattagaagaagaagggaaattggggctaaaaggaaggaagaa

SEQ ID NO: 245029 - DNA, 396 bp, Glycine max
gtacctttggggtaggagtcctggcaagactggttctcactttgaccctagcagtgacttgttcgttcccaatgaaagaaaagatgttattacttccacagcttgttgggctgctatgttgggattgcttgttggattggggtttgtaatgggtccaattcaacttcttaagctttatggtgttccctatgttatattcgtcatgtggttggatttggtgacttatttgcaccatcatggccatgaagaacaattgccttggtatcgtggaaaggaatggaactaccttaagggtggtctaactactcttgatcgtgattaatggttgatcaataacattcaacatgacattggaactcatgtcattcatcacctatttcctcaattccacactat

SEQ ID NO: 245030 - DNA, 398 bp, Glycine max
  unsure (1)..(398): unsure at all n locations
ggccgaaaaccctaacaacacaggcgcagagcgtgatccattgacgaagatggtgcagcgtctcacctaccgcaagaggcacagctatgtcaccaaatccaaccaacacagggtcgtcaaaacccctggtgggaagctcgtttatcagaccaccaagaagagggccagcgggcccaagtgccccgtcactggcaagaggattcaggggattccacacttgaggcctgcagagtacaagagatcaaggttacccagaaaccgtaggactgtcaaccgtgcatatggcggagttttgtctggaagtgctgtcagggagaggattatccgagctttcttagttgaagagcanaagattgtgaagaaggtcttgaagatccagaaggcaaaagaaaagcaag

SEQ ID NO: 245031 - DNA, 372 bp, Glycine max
atcgacagtaggggtccgaaaaccctaacagcgcaggcgcagagcgtgatccattgacgaagatggtgcagcgtctcacctaccgcatgaggcacagctatgtcaccaaatccaaccaacacagggtcgtcaaaacccctggtgggaagctcgtttatcagaccaccaagaagagggccagcgggcccaagtgccccgtcactggcaagaggattcaggggattccacacttgaggcctgcagagtacaagagatcaaggttacccagaaaccgtatgactgtcaaccgtgcatatggcggagttttgtctggaagtgctgtcagggagaggattatccgagctttcttagttgaagagcatatgattgtga

SEQ ID NO: 245032 - DNA, 366 bp, Glycine max
tggtggggaccatcgctggtggataacgaaagatcttagacaaaaaacaaggatcagaaccgttgaatcaagttgaggaagatggcactagtctctggaggaagatcaacactgaaccctaacgcccctctttacattcctgccgcgtttcgccaagtggaggatttctctccggaatggtggcagctggtgacgacgctgacatggtaccatgactactggctaagccagcaacacgatgagggaaccttctacggcgaggacgacgggtttgatggcaatgaatgtcgtgatttgctttcctgattcgttgatcttgatgctggcgaggatctttttgaagagtttattagatcttctgaatcc

SEQ ID NO: 245033 - DNA, 386 bp, Glycine max
  unsure (1)..(386): unsure at all n locations
tgggtcacgtncaacaccaacaacaccatcctcaaaatctccaaactcgcgatcctccccgttttgttcgcttcagtctgcaacgtcgctatgtcggactccaccgccaaacccctcgaccagcacgccaccacgggctctgaccctactgcgccagcggttcacatcgtgtacaccgagagaccacagaacgaggagcctgaggcctaccacatcagaaccctcacttcagtccttggcagtgaagaggctggcaaaggaggctttgttgtataggtacaagtctgcaaccagtgggttctcagctaaagcttactccggagcaagttgaacagatttcaaagctaccaggtgttcttcaagttgttcctagcaggacatatcag

SEQ ID NO: 245034 - DNA, 316 bp, Glycine max
ggacaaagcatgaacgtggtgttagaaggcctgctagttcaagaagatcttcagctattgggaggccatcaaggaccttgcttgtaattaattttgatacataccataccagaacaagggacttggagaggcactttgaaccatgtggaaagattgtcagtgtgaggatcagaaggaattttgcttttgttcaatatgaatcagaggatgatgctagcagagcactggaagctacaaatatgagcaagttactggatcgagttatttctgtcgagtttgctgttaaagatgatgatgattggagaaatggatatag

SEQ ID NO: 245035 - DNA, 394 bp, Glycine max
ggaagttgaaggggaaagagagaaaagaactagctagctggagtctgagaactctagcatgtactagtactactcctacattcctccatcttcctttgtactatttttttttaaccataaaagcaagagcacaaagatggtgagagctccttgttgtgaaaagatgggtttgaagaagggtccttgggctcccgaggaagatcaaatcctcacatcttacattgacaaacatggtcatggcaattggcgtgccctcccaaagcaagcaggcttgttaaggtgtgggaaaagctgtagactccgctggattaactatttgaggcctgatattaaaagagggaatttcacaattgaagaagaagaaactatcattaagctgcatgacatgctgggg

SEQ ID NO: 245036 - DNA, 205 bp, Glycine max
ggctgcgactgcacgggatgatgaggactgcagtggcgacgacgccgctgtcgcttctcgactggtctgctccttgcatttctgtccgttctgctgcctttgctcctctgttgtccgtggtctggtcccttcctgctcggcctctctcttgcttccccctactctctccctggtccctccgtcccttgcctgtccttccgccccg

SEQ ID NO: 245037 - DNA, 206 bp, Glycine max
aatgaaaaaagctattgaattaactgaacaggcgggtacaaaaggagttcaagtacaaattgcacgacgtatcgacggaaaagaaattgcacgtgttgaatggatcagagaaggtagagttcctctacaaaccattcgagcgaaaatcgattattgttgctatacagttcgaactatttatggggttttagggatcacactttgga

SEQ ID NO: 245038 - DNA, 333 bp, Glycine max
ggcacaacaaagtacaacacagtgcaggggctcaattatggagaaagcaattcaaagacagagagctctgcttgaacatcttcaacccatttcttcaagttcaaatttttcctctcaaacccatcaatctacggatctctcagcttcatctatgttttgctgggaattcttcgcatggtcaaacaggtggatcagatgatgacgtggtgattgcagctgcatatcgtactgccatctgcgaggcaaagcgtggggtgctttaaggacacccctccagatgaccttcttgccacagttctgaaaggtgtaatagagaaaacaaatggtggaccc

SEQ ID NO: 245039 - DNA, 265 bp, Glycine max
ggggtcgtcgatgagaaggagcttgatcagttcatgagccattatgttctgttgctctgtgcctttaaagaacaactgcagcagcatgtccgtgttcatgccatggaggcagtgatggcttgttgggatctggagcagtctctgcaaagcttgacatgtgtatctcctggtgaaggaacgggtgcagcaatgtcagaggatgaagatgaccaggcagagagcaatgccaacttatactaaggaagccttgatgggggtgaaactc

SEQ ID NO: 245040 - DNA, 283 bp, Glycine max
gaacaataataatagcaataacaatagcaacgagaaaaaattaacgagggaggggagaagagaaagaacgaaggagacatttataaaaagctctttcccttcccctaaatccctcacactcattccatttttacctttctctctcgctcgcaaacgcaaattataaaaaacaaggttttagccatggcatcgaagcggatcttgaacgaactcaaggatctccaaaaggatcctcctacctcatgcagcccccgtcctgttgctgaagacatgtttcactggc

SEQ ID NO: 245041 - DNA, 252 bp, Glycine max
cgggtacacgtgggttgttattatggagttggcatagcaatgggcgcgtgttctcggcttttattttcaatttggtgccaacggaatgtggctgggaatgctaggtggcaccgttaggcacccacttattcgactgtgggtcacttttagaaccgattggactaatcgacgtagacgacgcagccacgcggctgaccagatgggaggacacgcacgaaccactactatattgcagaacctcttgtttatgta

SEQ ID NO: 245042 - DNA, 246 bp, Glycine max
ggaggagagaggagaagagaagctaaagaaagaaaggagatgggagtggagaagcagttgttgaggtctggcaccggtccgaagccggttcccggtcagaacgtaaccgttcactgcactggtttcgggaagaacggtgacctttctcagaaattctggagcacaaacgatcctggccagaacccattcactttcaaaatctcgcaaggttctgttatcaaacgatgggatgaccgtgtgcttggc

SEQ ID NO: 245043 - DNA, 210 bp, Glycine max
gcgtccaacccgatgtcagcacacgactcaatgggactcacataggtcaacgtcaggttcatacttcatcacatcccggggaagttctgaaacctaaatcatacatagctataattcatgaggggatgcgctatgtatcccacgtcattcatgactgggaaactttacattcacttcactgtagcatttccatattcacataactctgat

SEQ ID NO: 245044 - DNA, 353 bp, Glycine max
  unsure (1)..(353): unsure at all n locations
ggaggtggaatagaattcgccgcaacaggaaacgaaacatgccctctcactgtagtgcaatctccccttgaggtctctaanggtctaccactaatcatttcatcaccattcgaaatccttagcatccaagaaggccttattttgaacattgggttcacttttgtgcccccctgtgccctaattccttctgagtggactactgttaagggtttaccagaaggactcgctgttaaacttactgggtatgaaaataaagtgcctgcttggtttaaaattgagagattttcccttgaattcaatgactataaacttgtgttctgtgcaactgaaaataccacgtgtgtggatattgg

SEQ ID NO: 245045 - DNA, 394 bp, Glycine max
  unsure (1)..(394): unsure at all n locations
agttgggtgtttcttaagccagtggaccctgtagcattgagtattccagattattttacaatcatatctcatccaatggatttgggcacaattaaatctaagctggagagaaacatttattctggcactgaggagtttgcagatgatgtcagactgaccttctcaaatgcaatgaaatataatcctcccggtaatgatgttcatatgatggcgaaggaactcagcaaaatatttgacagaaaatggaaagactttggtaggaaatggaagtttgaagatgagcatgataaaagcgaaactgaaacaattaacgaaactgggagaaaaagtcttgatgcaatgcttccccggcatanagattcccttcccacaaaaagcacaattattcgaacac

SEQ ID NO: 245046 - DNA, 407 bp, Glycine max
ggtacaaatccaaggacgtagcgcagaggatccttctctcagttgaatgccaaatgaggaggtgttcctacacgctgggtttgggtgagccgaacctagcgggcaaaccgagcctgctctacgacctcgtgtgtaagccgaacgagatccacgcgctgaagacgacgccgtacgatgagcgcgtagagaatcacgagaaccacgcgttgcacgcgacgcaccagatcgccgagtcgtggatccacgcgtcgcggaaggttctagagaggatcgcagacgcggtgctctccagaaccttcgagaaggcggctgacgactgctacgccgtggaaaggatctggaagcttctcccggaggtggaggacctccacctgatgatggatccggacgatttcttgagactgaag

SEQ ID NO: 245047 - DNA, 420 bp, Glycine max
ggagaagagaggtgctggagctgatgcagactctgggaatggcaaatcatctgacaataagaatcaagaagttaccaatggccagaatcctacacctgctgcaaacacacaaaatggagtgctgtctgagaccaaagaagatgtcaagaatcttccaccaaataatgaagaatcatccaagcttgaggtcactgatgcagctggaggagacaatgatggtgaatatgaggagggaatggtgtacgatgaagcaggtgaggatcagtattatgaaggtgatgatcagagagatgcggactatgagtatgaacaaggtgaacgtgatgagggatactatgagtacgagcaaggtgaagagggtgaaaatcaagacgaagattacatggaagaagaagatggggatgattttgctaagaagat

SEQ ID NO: 245048 - DNA, 264 bp, Glycine max
acagaatgggacagacaaacaaacaatttaccagctatacttgttccttttgaacgttagaagtgctacaatacaaacaatggcagctactcaggaagatgtgaagcttttgggtattgtgggaagcccatttgtgtgcagggtccagattgcccttaagttgaagggagttgaatacacatttttggcagacaatttgggcaacacgagtgatttgcttctcaaatacaaccccgttcacaagaaggttccagtgtttgttca

SEQ ID NO: 245049 - DNA, 377 bp, Glycine max
cactgagagagatctcgaagacgaattccgcgttttcggagttattcggagtgtttgggttgcacgtagaccacctggttatgcttttattgactttgatgaccgcagagacgcacaggatgatatccgtgaattggatggcaagaatggttggagggttgagctttctcacaactctagaggtggaggtggtggtcgtggtggtcgctctggtggttctgatttgaaatgttacgagtgtggtgaacctggtcattttgctcgtgaatgccgcatgcgtggtggttcaggaagacgccgtagccgtagtccgcccagattccgtaggagcccaagttatgggcgaaggggttacagtccccgtgggcggtccccta

SEQ ID NO: 245050 - DNA, 421 bp, Glycine max
gacagacaaacaaacaatttaccagctatacttgttccttttgaaggttagaagtgctacaatacaaacaatggcagctactcaggaagatgtgaagcttttgggtattgtgggaagcccatttgtgtgcagggtccagattgcccttaagttgaagggagttgaatacaaatttttggaagaaaatttgggcaacaagagtgatttgcttctcaaatacaaccctgttcacaagaaggttccagtgtttgttcacaatgagcagcccatagcagagtctcttgtgattgttgaatacattgatgagacatggaagaacaaccccatcttaccttctgatccttaccaaagagccttggctcgtttctggtccaaattcattgatgataagattgtgggtgctgtatccaaatctgttttc

SEQ ID NO: 245051 - DNA, 263 bp, Glycine max
gagaatggtaaggccactgaaggtgtggatattttcctgggagggagaattggaagtgattcacatctagctgaggtgtataagaagggtgtgccttgcaagaacttggtgcctagtgtggtagacatactagtacagcattttggtgctgtccaaaggaatagagaggaatgggaagatcaaactttatcgccattgcgcattttactttcttcactaaatctaccattctccctctatcacagtatcagtgtcccccacat

SEQ ID NO: 245052 - DNA, 310 bp, Glycine max
ggaacggcgaggtagaacgacgacccccttctgcgttttgaccttcaatctcaatcatggccaaagctgaaggtggcaaggaaccaataaatgaacaagcagtagcaaatatgtatgctgcaatgaggtctgagctcaaccaaatttactccaaaataactgaactggagatggaagttagtgagcacacattggttaccaatgccattcaaccacttgaccaatctagacgatgctatcgtatgattggaggggtgcttgtggagagaaccatcaaagaggtcttgcctgctgtgcagcgaaataaaga

SEQ ID NO: 245053 - DNA, 329 bp, Glycine max
gataacagaatggtgaaccattttgttcaggaattcaagaggaagaacaagaaggatattagtggaaatgccagagcattgaggaggttgagaacagcatgtgagagggccaagaggactctctcttccactgctcaaaccaccattgagattgattccttgtatgagggtattgacttctacacaaccatcacccgtgcccgtttcgaagagcttaacatggacctattcaggaagtgcatggagcccgtggagaagtgtttgcgggatgctaagatggacaagagcaccgtccatgatgttgttcttgtcggtggttctactaggat

SEQ ID NO: 245054 - DNA, 416 bp, Glycine max
  unsure (1)..(416): unsure at all n locations
cacttcacttcactaatacatcatggcagacgagacccagaacaagtatgagagctctgaggttgaggtccaggatcgtggtgtttttgactttctcggtaagaaaaaggatgaagaagacaagcctcatcctcaggaggaggtcatcgccaccgagtttcaaaaagtcactgtctcagaccaaggagagaacaagcacagcctcttagaaaagcttcaccgatctgacagcagctctagctcttcaagtgaggaggaaggagaagatggagagaaaaggaagaagaagaagaaggaaaagaaagggctgaaagagaagatcgaggagaanatagagggtgatcatcatcatcacaaggatgaggacacaagtgtccctgttgagaaagttgacgttgttgaaacaacacatgctg

SEQ ID NO: 245055 - DNA, 278 bp, Glycine max
gaagtgaaatggggaattgacttagcatctgagcatgaaagatacctaacagaggtaaagtttcagaagcccgtcattgtatatagctatccaaaagatatcaaagcattctacatgcggcttaatgatgacttaaagacagtggctgctatggatgtgcttgtacccaaggttggagagctaattggtggaagccacaaggaagaacgttatgatgtcatccagacaagagtaaacgagatgggtttgcctgttgagccatatgagtggtaccttga

SEQ ID NO: 245056 - DNA, 404 bp, Glycine max
ggatgatgacgaacacattctcggcatcaggattgttggaggtgaccatacgctggggaactattcttccataatcaccgtccagcgacaggtcatcgatgggagacccggtacaatggtgatcgaatcatttgtggtggatgtgccccatgggaacaccagggatgaaacgtgtcacattgtggcggctttgctcaggtggcatccgtgctcctaaggttatttccccccatagattagtctctcatccgtcgctgcagattaagattacacccagttgctccaccagaggttcgacgagcatacaaacggataatgatctcatcatccaatctatcatcatcatcatgaggcgcaatctgagccttccaatcgacattccaacaggtttcacgcccacttgc

SEQ ID NO: 245057 - DNA, 399 bp, Glycine max
gattgtttgttgttgtaactcgttcttcttcttttgttgttctgtgtttgtgtttgttttttctctcacctgaaaatgtcttgctgcggtggtaactgtggttgcggaagctcctgcaagtgcggcaacggctgcggaggctgcaagatgtacccagacttgagctacactgagtcaaccaccaccgagaccttggtcatgggagtggcacctgttaaggctcaatttgagggtgctgaaatgggtgtgcccgctgagaacgatggctgcaaatgtggaccaaactgctcctgcaacccctgcacttgcaagtgaggtgttgggagagcaagcttcaagcagagatagcccttaattaggaataatgataaactattaatgtgtagctaaaaacttatg

SEQ ID NO: 245058 - DNA, 318 bp, Glycine max
  unsure (1)..(318): unsure at all n locations
ggttctagtgtgtgattgtttgttgttgtaactcgttcttcttcttttgttgttctgtgtttgtgtttgttttttctctcacctgaaaatgtcttgctgcggtggtaactgtggttgcggaagctcctgcaagtgcggcaacggctgcggaggctgcaagatgtacccagacttgagctacactgagtcaaccaccaccgagaccttggtcatgggagtggcacctgttaaggctcaatttgagggtgctgaaatgggtgtgcccgctgagaacgatggctgcaaatgtgggacanactgctcctgcaacccctgcac

SEQ ID NO: 245059 - DNA, 347 bp, Glycine max
ggaggcaagaagttgtattttggcatccccgtggcttcaagaagagaatctcaatggaggcccaggagctgaagcgcgtgttccagatgttcgaccgcaacggcgacgggagaataacgaagaaggagctgaacgactcgctggagaacctgggcatcttcatctctgacaaggacctgagccaaatgatccagaggatcgacgtcaacggcgacggttgcgtggacatggacgagtttggggagctgtatcagaccataatggacgagcgcgacaatgaggaggacatgagggaggccttcaacgtcttcgaccagaacgccgacggcttcatcaccgtcgacgag

SEQ ID NO: 245060 - DNA, 398 bp, Glycine max
gattcacacaaacggaacaagatagatatatagaagagccttccatatatagcctcccaaaaaaatgaagagtactacctctttggctctctttctactttgtgccctaacttcatcatatcagccttcagccaccgctgatattgtattcgacaccgaaggcaatcctattcgaaacggcggcacatactatgtgttgccagttataagaggaaagggcggcggaataaaaatttgcaaaaccgaaacaaaaacatgcctctcactgttgtgcaatctccctttgaggtctcaaagggtctaccactgataatttcatccccatttaaaatccttgacaatcaccaaagacttattttgagcctcagttttcactatgttaccccctgtgcctcaac

SEQ ID NO: 245061 - DNA, 388 bp, Glycine max
agggagaccatcaaagtttcacttctgccttatccggtttatggtttcggtttttgacccaacctttgacgtatcgacaccttaagtttcggatcaggtctgagcaatctggttggtaaaacctttggtctaagagagtcaagttttatgtctgaattagacgatcaaattcctactgccttcgatccatttgctgatgcaaatgctgatgactcaggtgctgggtcaaatgagtatgtgcacattcgcgtacagcatcgaaatggaaggaaaagcctgatcaccgttcaaggattgacataagaattcagctataacaagatacttaaagatgttaagaaagagttctgttgcaatggaacagttgttcacgacccagaactacgac

SEQ ID NO: 245062 - DNA, 345 bp, Glycine max
gacagagttgcaagagaaagataaaagaagatggcgactcttgattccgacgtgcctatggttcccgccggcgagccctcgagcagcgccggtccttcttccaagaagcccaagcgcttcgagatcaagaagtggaacgccgtcgctctctgggcttgggacatcgttgtcgataactgtgctatctgccggaaccacatcatggatctctgcatcgagtgccaagccaaccaggctagcgccactagcgaggaatgcactgtggcttggggagtttgtaaccatgcttttcacttccattgcatcagtcgatggctcaagactcgtcaagtttgtcccctagat

SEQ ID NO: 245063 - DNA, 279 bp, Glycine max
gtccaaccggatgcgagacgacgaccgctggggactctcttgcccgtgtcgcttctttgcctttcggatcgttcgtgaccacggtggtttctcttgtcttcttctgtggcgagcttggtttcgcttgttcattcatctcacttccaattaaggaacaagctttccaccaatttgaatcaccaatggctcgctctttctccaacctcaatgttctctctgctcttgtcgccgacggattctccaacactctcaccaagcgtgggtacgcagtagcgacac

SEQ ID NO: 245064 - DNA, 51 bp, Glycine max
aaaaaccccccccgcaccgcaccaaaaaaagcgggcgctctagaggatcca

SEQ ID NO: 245065 - DNA, 286 bp, Glycine max
gacaacaaaaagtggtgtcctaaagaaagaccatctttctcttttctgtatcaccgttggaagagactgagatgggttcaaaaaccaagacttttacctttgaagaggtggctaaacacaatcacaggaaggattgttggattatagtcaaagggaatgtgtatgatgtcaccgcatttttggatgatcatccaggatgtgatgaagttttagtgactgcaacatagaatgatggcacaactgattttgaagaaattggccacagtgattcagcaacacagatgat

SEQ ID NO: 245066 - DNA, 270 bp, Glycine max
ggaaaatattatagagaaccacagaaatcagcagcacctcttccttttcaccttattggggaaataataaggagcttcaagactgggcattttgttagtgacacgggggatgttgtgtgctatcacaccgactctaacattaatggctcttccaaattagcgtgactattcaacttcttttctatatagacaacacacgcttatccccaattcttattgctttaactattgtcctgagtttctcccgacgttactgcccctacttggcgt

SEQ ID NO: 245067 - DNA, 324 bp, Glycine max
gagagtggtggagtgtgcaaaagagcgtcgtagtcgcaaccctaatcagaagaagcgcagcttcaagcgagtgacagccaccagccatgggtcgtatgcacagccgcggtaagggtatatcctcttctgctttgccctacaaaaggacacctcctagctggctcaagatctcttcgcaagatgtcgaagaaaatatctgcaagtttgcgaagaaaggtttgaccccgtctcagattggtgtcattctcagagattctcacggtattgctcaggtcaatagcgtcactggcagcaaaatccttcgcatcctcaaagctcacggac

SEQ ID NO: 245068 - DNA, 251 bp, Glycine max
gagacagagaagcattagcatttgcacgacgaactagtctgagcatagatggcctcttcagtgatggcatctgtggccctcagacctgcacctttcactgttgagaggtcctcagttataggccttccctccatctcaaggaactccgcttcatgcagagttgtggccagtggctggcaataatgatcatgactgacattcctgacggtattaatggttgcatgtctttgacggaatgagttgatgcatct

SEQ ID NO: 245069 - DNA, 271 bp, Glycine max
cagtctcagttacttagagacaccgtggacgaaaggaaagcgttctaagcgtagccgcacggagcaacaactgcaacacccttcatgcaccgaggaagagtacctcgctctttgtctcatcatgctcgctcgcggcggcgccggcagtgtctccaccgccaaacccgctgtctccgacaacaattctgcgccgctatccgccgccaaactgagctacaaatgttccgtttgcaacaaagccttctcctctttacaagcactccgatgacac

SEQ ID NO: 245070 - DNA, 344 bp, Glycine max
  unsure (1)..(344): unsure at all n locations
tgncggggagattctgtcctggggtcccttgctggntnggtcactcatcatcatgtcggacgaagagcaccatttcgagtccaaggcagacgccggtgcctccaaaacctaccctcagcaagccggtaccattcgcaagaacggctacatcgtcatcaaaggacgcccctgcaaggttgtggaagtttcgacttccaaaactggaaagcacggtcacgccaagtgccactttgttggaattgatattttcactgccaagaaacttgaggatattgtgccctcttctcacaactgtgatgttcctcatgtgaatcgtactgattaccagctcattgatattgctg

SEQ ID NO: 245071 - DNA, 514 bp, Glycine max
gccggggggtgcgcaactcacttgacggcctgtccaccttacgggtcgagcctgcgtccaacctgagagaagacgacagaagggtacggctgcgagaagacgacagaagggtacggctgcgagaagacgacagaagggtacggctgcgagaagacgacagaagggtacggctgcgagaagacgacagaagggtacggctgcgagaagacgacagaagggtacggctgcgagaagacgacagaagggtacggctgcgagaagacgacagaagggtacggctgcgagaagacgacagaagggtacggctgcgagaagacgacagaacggtacggctgcgagaagacgacagaagggtacggctgctagaagacgacagaagggtaccgctgcgagaagacgacagaagggtacggctgccagaagacacagaaggctacggctgccagaagacgaccgaaggttccggttccagaagcacaccgaaggggtaggacagatgacatccaaaaaagcg

SEQ ID NO: 245072 - DNA, 363 bp, Glycine max
cgtccaaacggaagcgagaagacagaaggggagaccaaacaatactcagaacctgattaaggagagtatggcacagtttagtggcaaaactttggtgcagtggttggtagcaacactgctgattgccttgttgggtggtgcacaagctgttgtgttatgtaacatcgactcaagtcaactaaacttgtgtcgtgctgcagttacaggtcaaaaccctccaccaccagatgagaaatgttgtgcagttattcgccaagccaatttaccttgcctctgcagatacaattcaattcttcctttaatttggataaacccgaaaaggctttggccttgcctggtaaatgtggtctccaatcccctcct

SEQ ID NO: 245073 - DNA, 303 bp, Glycine max
gaatctaaagataaataaaattcaggaaaaaaaaaaaacatggtggtgaaggtgtatggtccaacctatggaccccccaagagggtcctggtgtgtctgattgagaaggaaattgagtttgaaacagtgcatgttgatctcttcaagggagagaataaggaacctgagttccttaagctgcaaccatttggatcccttcctgttattcaagacggtgattatactctctatgaatctcgtgcaataatcagatacttatctgagaagtataaagaccaagggactgacttattgggaaagaca

SEQ ID NO: 245074 - DNA, 408 bp, Glycine max
ggccctcaggttgacaaggaacaatttgaaaaggtcctttcatatattgagcatggaaagaaagaaggagctacccttttgactgggggtaaaacagtgggaaacaagggctactttattgagccaacaattttctccaatataagggaggatatgcttatagcacaggatgaaatatttggcccagtaatggcactgaagaagtttaagaccattgaggaagcaattaagagtgctaacaataccaagtatggcctagcagcaggcatagtgaccaagaatttggatacggcaaacacagtgtcaaggtccattcgtgcaggcactatttggattaactgctattttgcctttggcgatgatgttccctttggagggtataacgtgaatggatttggaaaagatcat

SEQ ID NO: 245075 - DNA, 382 bp, Glycine max
  unsure (1)..(382): unsure at all n locations
gagaacanaaaacaacattgaaaactccaaagtcttgtccttctcaagcacttgctccaactccaattcaaccatggttgcgagactcgcggtaacagcgctggtgctgatagctttggcaacaatttctctccaatcttcagcttcaccttcatcagtgggtaaattcgtcgacgaaaccatcacttcccacaagatcgtcattttttccaagacctattgcccgtactgtagaagagcaaaagctgttttcaaagagttgaaccagttccacatgttgttgagctccacgagagagaggatggttcaaagattcaggatatcatggttaaataattgttgggaggcgtactgtgccacangttttcatcaatggaaaaca

SEQ ID NO: 245076 - DNA, 282 bp, Glycine max
ggtgatatatagtgaaattcgtaagttataactgacaaagttttctgagaacgtaaggatgagtattatcgagagaatgcgcaggctcctcggacgagggacaagtcattagctgtcacaccgttgacgcatggaacgatcaactccagaagggcaaccagtcccggaagctcattgttgtgcattttagtgcttcttggtgtggaccatgccgtttcattgcaccattcttggcggagctggctaagacgttcgccagtgtcgtattcctaaacgtggatg

SEQ ID NO: 245077 - DNA, 328 bp, Glycine max
gaagacgggagcaacatagaagagggaggagcaagtagtgggtttggtaatagatccccaagagggtcgtccccacacaagaaaactcgctcgagcaacttcaacactagcgacggcctacttctagtgggtgacaagggagcaaggttcctttgactggttcaaactggtgatgaatcacgtggctgaagaggatcataggggagtcgttgagctccacagctattgcactacgtgtctatgaagagggtgacgcgcgcgcaactcttattgctatgttgcaatctttaaaccatgccaaaaatggcgtggatattgtccctggcac

SEQ ID NO: 245078 - DNA, 260 bp, Glycine max
gacagacaaacacatactttaccagctatacttgttccttttgaaggttagaagtgctacaatacaaacaatggcagctactcaggaagatgtgaagcttttgggtattgtgggaagcccatttgtgtgcacggtccagattgcccttaagttgaagggagttgaatacaaatttttggaagaaaatttgggcaacaagagtgatttgcttctcaaatacaaccctgttcacaagaaggttccagtgtttgttcacaatg

SEQ ID NO: 245079 - DNA, 329 bp, Glycine max
gaagaacagccagtaacacttaccagtatggctatccaacaatctctgttagacaggcctagaaaatctgtttccaaaactatctgcttaatcttttcgatagctgctgtcatgatctcatcagcctttgttggttcttatctcatcaaatccacctccttcttcaaccaatcctcgcctcaacatctctgtgatcatgcacttgatacggcaacatgtttaacccatgtctcagaagtggtacaaggtccgatcttgacccccacaaaagaccacaaattcaatttgttacagtcattcctaatgaaataaacctcacacattaagag

SEQ ID NO: 245080 - DNA, 422 bp, Glycine max
gaccaaacaacagatattcatggctttctttattctctccttcctcttccttcgtcttgtttcatctgccactgcttgtgatcgctgcttgtatcaatccaaggcttcctatttctccaaagctcctgctctttcatctggggcatgtgggtatggctctttggcactagacataagtggtggacaccttgcagctggtgtggattctctcttcaaaaatggagcaggttgtggtgcctgctttcagataagatgcaagaacccaactctatgtagcaaagaaggtaccaaagtggtattgactgatcttaatcacaacaatcaaactgattttgtgctaagcagcagagcctttgcgggcatgggtcaaaagggtatgggccaacaaatactgaagcttggcattcctgaaattgaataca

SEQ ID NO: 245081 - DNA, 372 bp, Glycine max
gaccgtttcggttaacactttccaatacaataatcactaactgaatattcgatcggagatgtctgccgccgccgaagaagctaacgctcccgccgtcgagaagccggttgaggaggtgaaggcgccgaaccccgcgaaggagaagaaacctaaggctccgaaggaggagaagccagaacaggccagaacagcttcacatcctccatattttcagatgattaaggaggctttgatcgctttgaacgagaaaggaggatcgagtccttatgcgatagcgaagtacatggacgagaagcacaaggcggtgctccctgcgaatttcaagaagattctaggtctgcaactaaagaaccaagctgcgagagggaagct

SEQ ID NO: 245082 - DNA, 398 bp, Glycine max
ggcagccaagaaaagaaaatcctcacccattttcttcgtagccaaacactctgaaattctcagttatgtcgtggcaagcgtatgtggatgatcacctactgtgtgaaatcgaaggtaaccacctcactcacgccgctatcatcggccaagacggaagcgtttgggctcagagcaccaacttccctcagttcaaacctgaggaaataactgccatcaataatgactttaatgagcctggatcacttgctccaactggattgtagatcggtggcaccaaatacatggtcatccagggtgagcctggtgctgtcattcgagggaagaagggtcctggtggtgttactgtgaagaagaccggtgcggccttgatcattggcatttatgatgaaccaatgact

SEQ ID NO: 245083 - DNA, 390 bp, Glycine max
caaggaattggctgaacagatagcaaaagatccatcgttcaatcagatggctgagcagcttcagaaaacttttcaaggagctccacaagatgctatccctagcttcgataatcaacaatatttttcaaccatgcaacaggttatgcagaatcctaattttatgaccatggctgagcgcctgggtaatgcattgatgcaggatccgtctatgtctgccatgcttgaaagtttttctaatccatcaaataaagaccagcttgaagaaagaatggcacgcatcaaagaggattcatctctgaaacatattttggaggagatagagactggggggtcctgctgctatgatgaggtactggaataatgaggaggttttgcagaagttgggacaag

SEQ ID NO: 245084 - DNA, 404 bp, Glycine max
ggttaaaaaaagagagaagaaaaatgcgaaagttcgatccatggcccgttttcttcaagcgcgagtggaaacgcaactggcccttcctcgttggattcgcagtcaccggagctctaatcaccaaactttcccttggccttaccgaggaagaggctaagaattccaaattcgttaaggcgcacaaaaggtgacttctgaatcgtgacatctgcctggctttgcattttatgttagggttgtcaagattactttgcttgacttgattttatggattgtaataacagaagagagatgctctagataatctctccaagtctgtatcccatgttcttattttcagttttggaggttgtttacctaaacctggttgagaaaatccacaataagttagtaatttccgattc

SEQ ID NO: 245085 - DNA, 323 bp, Glycine max
ggagctgacagatttaagataccagatgttcttttcaatccatccctggttcagtcaattcctggcatggagagctttgcagaaattgctccttcagttcgtggcctgccccaaatggtgattgaaagcattaataagtgtgatgtagacattcgaagagagttgtttaatagtatactgcttgctggtggtacagcttcaatgcaacaactaaaggaacgccttgagaaagacttgttagaggaatcccctcaagctgccagagtaaaagtattggccagtgggaatgctactgaaagaaagtttagtgtttggattcgggg

SEQ ID NO: 245086 - DNA, 352 bp, Glycine max
gagagtggtggggtgtgcagaagagcgtcgcagttgtgaccctaatcagaagaagcgcggcttcgagcgagtgacagccaccagccatgggtcggatgcacagccgcggtaagggtagatcctcttctgctttgccctacagaagggacacctcctagctggctcaagatcgctgcgcaagatgtcgaagaaaatatctgcaagtttggcaagaaaggtttggccccgtctcagattggtcgcagtcgcagagattctcacggtattgctcacgtcaatagcgtcactggcagcggaatccttcgcatcctcaaagctcacggacttgcgcctgaaattccagaggatctgt

SEQ ID NO: 245087 - DNA, 396 bp, Glycine max
attgatggggggaggtgaaggtatggggcccattgaggctactgctcgggcacttggagattcattatatgacgagaatattggggctcccgtaggtcagatccttgtgatctgtggtcgtaataagaaacttgctaataaactgagttctattaattggaaggttcctgtgcaggtcaaaggatttgttaccaaaatggaggaatgcatgggagcttgtgattgcataattacgaaggcgggcccagggacaatagcagaggcccagatccgaggcctccctattattctgaatgattacattactgggcaggaagctggcaatgtcccctatgtagttgaaaatggatgtgggaagttctcaaaatcccccaaggatatagcaaaaattgttgc

SEQ ID NO: 245088 - DNA, 165 bp, Glycine max
ggaagaagaaggatgtggcacgaggcgagaaggtcggagaagaaggtccacgacatgatggacgcggctcggaagagagcgcaacgacgcgccgtttacctcgccaagagacgcggcgatcctcagcaatccattcagctcgtcggctttcctagcccaacctat

SEQ ID NO: 245089 - DNA, 337 bp, Glycine max
gggagtggaagtagtagcaagtacgtcgtatatgtggttgatcttttgctggttgtttgttgtgttccttccaattgtcatatctgaatcaccggagtcagtcttcagactcacgcacactgaataccttctgaaggcgaccatcaccaccaccaccaccaccatgaagatcacgatcatcagcagtcatgatcatgatccccatcatcatcacgatggagagggagagaccaactcatgggtaggtaaggatcggaaggtgtaccatagccacgatggtctggcgccgcattctcacgaacccatttactccgccgggtacttcaccagaagagct

SEQ ID NO: 245090 - DNA, 212 bp, Glycine max
gacggcaacagaagaataatcgagacacagatcatagtgatcagttgtgagtgtctcagatttatccgacgtcgctgcagatccaccggccgtgatgggctgccttcagcggtgaggaagcgggaggcgtttttcggcttccttggcgccgcagcggcccgcgtcttcgcctgtatgggagctgcctatggcacagcgaagagtggcgtggg

SEQ ID NO: 245091 - DNA, 283 bp, Glycine max
gaacgcagccaagacgggaaaatccgcacccactttcttcgtagccaagcactctgaaattctcagttatgtcctggcaagcgtatgtggatgatcacctactgtgtgaaatcgaaggtaaccacctcactcacgccgcgatcatcgggcaagacggaaatgtttgggctcagagcaccaacttccctcagttcaaacctgaggaaataacgtgcatcaataatgactttaatgagcctgcatcacttgctccaactggattgtatatcggtggcacccaata

SEQ ID NO: 245092 - DNA, 350 bp, Glycine max
gaacacagatccacttgaaagggttaggtttcgggagaaaaagcaatccactcagagagctagaagaattcaacgatgcctcgctaggatgatagataccgcaatacccgtctctatgtggggcacttagcttcgaggactcgttcccgggatctggagcgtgccgtcagcatatatcgaagagtgcggggtgtggatatgaagaatgatttcgcctttgttgattttagtgatcctcaagatgctgatgacgggagatataacttggatggtcgggatgttgagagaagtcgtattattgtggagtttgcaaaaggggctcctcgtgggtgccgggaatatttggggcg

SEQ ID NO: 245093 - DNA, 409 bp, Glycine max
gggttctagtgtgtgattgtttgttgttgtaactcgttcttcttcttttgttgttctgtgtttgtgtttgttttttctctcacctgaaaatgtcttgctgcggtggtaactgtggttgcggaagctcctgcaagtgcggcaacggctgcggaggctgcaagatgtacccagacttgagctacactgagtcaaccaccaccgagaccttggtcatgggagtggcacctgttaaggctcaatttgagggtgctgaaatgggtgtgcccgctgagaacgatggctgcaaatgtggaccaaactgctcctgcaaaccctgcacttgcaagtgaggtgttgggagagcaagcttcaagcagagataaccccttaatagggaataatgataaactattaatgtgtagctaaaaac

SEQ ID NO: 245094 - DNA, 406 bp, Glycine max
ggggggttgtgaatttgtgtcttcttggctcccaacccacacgcaacgcaaccatagaatggaatgaatgaaggcaaagcttatacttataaaagagagatagaaattggttgtgaaaaacagaagcactttgtttctaagtaaaaggaatcttcagctgccatgtttcatcgctggagcaattctcatcaacaggatcagggaagcagcgagctttatgctgaatccaagattaaagagctgaagggtgttatcggacccttatctggacgcagtttgacgtattgcactgatgcatgttttaagagatatttggaagctcgaaactggaacgtagacaagtccaagaagatgttggaggagacactcaggtggagatcaacctataagccagaggaaattcgct

SEQ ID NO: 245095 - DNA, 322 bp, Glycine max
ggagttgaagctggttggtgagtacgggcttcggtgcaagagagagctgtggagggtgcagtacgcgctcagccgcatcctcagcaacgcgcggaacctcctcaccctcgacgagaagaacccgcgccggatcttcgagggagaggcgctgctccgaaggatgttccgttacggtctcctcgatgagacacagaacaagcttgattacgtcctcgccctcaccgtcgagaactttctcgagcgccgcctccagacccttgttttcaagtccggcatggccaagtctatccaacatgctagggttcttatcgagcagagacat

SEQ ID NO: 245096 - DNA, 345 bp, Glycine max
gacaggcaaacaaacaatttaccagctatacttgttccttttgagtgttagaagtgctacaatgcaagcaatggcagctactgaggaagatctgaagcttttgcctattgtgggaagcccagttgtgtgcacggtccagattgcccttcagttgcggggacttgacgacaaatttttggaagaaaatttgggcaagacgagtgatttgcttctcaaatacagccctgttcacaagaacgtcccggtgtctgttcacaatgagaagcccatagccgactctcttgtgattgttcgatacattgatcagacatggaagaacaaccgcatcttaccttctgatcctta

SEQ ID NO: 245097 - DNA, 408 bp, Glycine max
ggagccggagcgatgaggttttggatgctgaggagcaactgagaatcgctaatgagatcagagcccaattcgatgccttggaacccaagcgacccatcaagcccaacagaagcgaacccgacgccgttttgcaataccccgtcgcagccgcttctgtgaacaatatacctgagcttcacaagtttcaatcccttcaatctccctctcatgctataatttcatcggcggggtttgtggatgcacaggatgagtttgtggagacgcagtactataaagaattggcatccattgacaaacagcatcacacgacagggagtgggttcataaaggcggcgagagaaggacgggaaggtgaatatgagattcagttgcccaataatcatgttaatgccgctgaaacccaaccca

SEQ ID NO: 245098 - DNA, 384 bp, Glycine max
ggaatcagagagagtctggatttcttgttgaagatgcgacgctcttctgcatccaaaaagacgggtcaatccaattccacccccatcgccgccgatctcttccgctccgcttcaagtaaggcaagctcgaaggaatcagagcgaattgatagtctattctattcgtatgccaatgggtctactgggttgattgacccagaaggaattgaaacactttgtgctgatatggaggtggaccatacagatgtgagggttttgatgcttgcgtggaaaatgaaagctgaggagcaaggatattttaccttggatgagtggacgagaggcttaaaagcattaagggccgatactgtaagtaaattgacgaaggcactcccagacctagaa

SEQ ID NO: 245099 - DNA, 399 bp, Glycine max
  unsure (1)..(399): unsure at all n locations
gggatcttcgtgagcgaagagcttgaacagaaaatacggaacgttggtgggggtgtgttggaggagaacacgcccttagcatactcgcacgtgggaacagagctgcgtgtgcacaccaagatgtcgccatatcttaagcccgatgctgacatggcgtgttgtcatgacttggaggcttacttgcacttggtggatgggttcttggcctccaattgtcctttcagatccaatgctaagagaagcttggctaggttaatgcaagaccaaagtgccaatgtaaagaagttgtatactagcaaggcaaaatccctcactgtcaatcttagtaggcagggatctatgtccatgtctaattgtntgcctagtccatcttaatcaaaactcatatgcttccctttt

SEQ ID NO: 245100 - DNA, 394 bp, Glycine max
ggttctagtgtgtgattgtttgttgttgtaactcgttcttcttcttttgttgttctgtgtttgtgtttgttttttctctcacctgaaaatgtcttgctgcggtggtaactgtggttgcggaagctcctgcaagtgcggcaacggctgcggaggctgcaagatgtacccagacttgagctacactgagtcaaccaccaccgagaccttggtcatgggagtggcacctgttaaggctcaatttgagggtgctgaaatgggtgtgcccgctgagaacgatggctgcaaatgtggaccaaactgctcctgcaacccctgcacttgcaagtgaggtgttgggagagcaagcttcaagcagagatagcccttaattaggaataatgataaactattaatg

SEQ ID NO: 245101 - DNA, 371 bp, Glycine max
atacgggatcgagcagaccactaagagggggtccattcataattctagtagaactcaggatgcacttttagcggctgcatgtgtctcattgtgaatttgcttgataactgtatgccttcaataagtttgatacattttcgcagactatatagaaactttatcaggatactcatactcagcgcaatattgcaatgttgaatgatgaactctatgaagtccaccagataatgactcgcaatgtgcaggaagttcatggtgtttgtgaacacgttcgccatgtcagccaaatgtccagtcgcatatcatcaaaatcctcacatatatgctgatcacgctatagatttagaccgggagaaatatcatgctgcaat

SEQ ID NO: 245102 - DNA, 403 bp, Glycine max
gacaccgagtcgcagaaaaagaaaaaagcgatcatagtttcacttcggccttatccagtttagggtttcggttctctaccctatctttcacgtatcgaaaccttaaatttacgatcaggtctgagcaatctggttggtagaacctttggtcttagtgagtcaagttttatgtctgaattagacgatcaaattcctactgccttcgatccttttgctgatgcaaatgctgatgactcgggtgctgggtcaaaggagtatgtgcatattcgtgtacagcagcgaaatggtaggaaaagcctgacaaccgttcagggattgaaaaaagaattcagctataacaagatacttaaagacgtcaagaaagaattctgttgcaaatgaacagttgttcaggacccagaac

SEQ ID NO: 245103 - DNA, 383 bp, Glycine max
gagcatctagctagttaattcacaaacttgagttggattttggtgatcttgtgaattgatctgcgatgtcggacgaggtagttctgttggatacatgggctagcatgtatggtatgagggctaggattgcattggctgaaaagggtgttaggtatgaatacaaggaagagaatctcatgaacaggagtcctttgcttttgcagatgaacccaattcacaagaagattcctgttttgatccataatggcaaacccatttgtgaatctgcaataatagtgcagtacattgatgaggtctggaatgacaagtctccactcatgccctccgatccttacaagagatctcaagccagattctgggtggactacattgacaaaaagatt

SEQ ID NO: 245104 - DNA, 369 bp, Glycine max
caaaggaaagaggtctttaagatgaaaacaaaaaatgcaaatgtaggttccctttttcgaacacaaaatatttttacttccagtttttgactgaaagaatacaaaaatgatatgattcaacctcaaactcatttgaatgtagctgataatagcggagcacgcgaactgatgtgtattcgaatcctaggaagcagtaatccacgatatgcctaaattggggacaatggtgttgctgtaatcaaacaagcagtaccaaatacgaacttagaaagatcagaagtgatcagagctgtaattgtacgtacttgtaaagaactcaaacgtagcaacggtataataattcagtatgatgattatgctgcagttgtc

SEQ ID NO: 245105 - DNA, 344 bp, Glycine max
ggcagccaaagagaagaaaatcctcaattttctgagcagccaaacactctctctctgtctctcgaaaattctcagtttgcagagaaaatccgaatcatgtcgtggcaagcgtatgtcgacgatcaccttctgtgtgacatcgaaggtaaccacctcactcacgctgctatcatcggccaagacggcagcgtttgggctcagagtaccgacttccctcagttcaaacctgaggagataactgccatcatgaatgactttaatgagcctggatcacttgctccaactggattgtatctcggtggcaccaaatatatgggtcatccagggtgaacccggtgctgtca

SEQ ID NO: 245106 - DNA, 401 bp, Glycine max
  unsure (1)..(401): unsure at all n locations
gagggagaattacgtttttagggtttacaccgagcagccacacctcccgcagcagccatggttctcaaaactgaactatgccgattcagtggtgccaagatctacccaggaaagggcatcaggtttgttcgtggtgattctcaggttttcctgtttgcaaactcaaaatgtaagaggtatttccacaatcgcctgaagccttcaaagctcacctggactgcaatgtacagaaagcaacacaaaaaggacattgctcaagaagctgtgaggaagaggagacgtgctgccaaaaagccttactctaggtccattgttggtgccaccttggaagtaatccagacnaagagagctgagaagccagaagttcgagatgcagctagggaaactgctcctcgtgaaaa

SEQ ID NO: 245107 - DNA, 347 bp, Glycine max
gggttaaaggatgcagagaagtgcattgaacttgatccaagctttgtaaagggttatacccggaaaggtgcagtccagtatgtcatgaaggaatacgacaaggctttggagacatatagggaggggttgaaatatgactctaacaaccaggagttgcttgaaggcatcagaacatgcatacaacaaattaacaaggctagccgtggagacttaagtcctgacgaattgaaggagcgacaggcgaaggcaatgcaggatccagaaattcagaacatccttcaagaccctgttatgagacaggtattgattgatttccaggaaaatcgcaacgctgcacaggaacacac

SEQ ID NO: 245108 - DNA, 341 bp, Glycine max
ggtgttttggttgatgatggagatgatgacatcgtaggtgctgtgaaggacgatttgatagctgttaaagagagggaccctgcttgcataagttatgtgcattgcttgctgaatttcaagggttttttggcatgtcaggctcataggattgctcacaaattgtggcttcaagggaggaaggtcttggcgctgttgattcagaatacggtgtctgaggtttttgctgtggatattcaccctggtgccaaaattggacgtgggattttgctggatcatgcaacaggacttgttgtgggggagactgcagttatttgcgaataatgtgtcaattttacataatg

SEQ ID NO: 245109 - DNA, 189 bp, Glycine max
ggttctagtgtgtgattgtttgttgttgtaactcgttcttcttcctttgttgttctgtgtctgtgtctgttttttctctcacctgaaaatgtcttgctgcggtggtaactgtggttgcggaagctcctgcaagtgcggcaacggctgccgacgctgcaagatgtacccaaacttgagccacactgagtc

SEQ ID NO: 245110 - DNA, 405 bp, Glycine max
ggtgtgtgagttcattaacatatacaaattctctgtgttgtgttgtgtacttgtgttaattgtgttgttgttgtaggaaatttaagtgaagagagaatgatgatgaagtctgctatgtgtgcattggtgcttgtggcactggttgtggttgaagtggggcccatggctgaggctgcggtgacttgcaacccaacacagttgactccttgtcttccggcaattaattcaggttctgcaccttcgagtgcttgttgccagaagctgaaggagcaaaagccatgcttctgtggctacctcaaaaaccctagcttgaagcagtatgttaactctcctaatgccaaaaaaaccgttagttcttgtggtattgcctatccaacttgttaagcacctcttatatatatatat

SEQ ID NO: 245111 - DNA, 338 bp, Glycine max
gggcgaattgagaaatgggtactgaggagggcctttgatgatgaagaacatccttatctgccaaagcacattttatacaggtagaaagaacaattcagtgatggagttggctatggttggattgatggccttaaagctcatgctgagaaacatgtgactgacagaatgatgctcaatgctgctaacattttcgccttcaacacaccaaccaccagagaagcatactactatagaatgatatttgagaggttcttccctcagaactcacccaggctgagtgttcctggaggacgaagtgttgcatgtagcacagccaaagctgtagagtgggatgctgc

SEQ ID NO: 245112 - DNA, 314 bp, Glycine max
  unsure (1)..(314): unsure at all n locations
gatgagaggctggttgtgcacgccactgctgcggctgctgctgggggtttggctgctgtcgttaccacgccgctggaggtcgtgaagactcaattgcactgtcagggtgtctgtggttgtgatangttcacaagcggatcacgtggggatgttatgacgacacgactgggcaaagatggttacagaagggtgatgcgagggtcgattccaaggatggtcttgtcatgctcctgctgcggcgacttgctggtctacatatgaagctgggaagtccttattggaagattgcggtcagcagacagacactgggaccg

SEQ ID NO: 245113 - DNA, 204 bp, Glycine max
cgagaaagacaccggtagacatcattttggtcgtggttacgacggtgacactaacaggcaacatgatgctactcgtgtttatcccggaatagacattggtagagatgatggggactaccggtgtttatcggctaaacaccgacagacatcatggaacttctgggctgaatcccgggatagacacgcataaccaacaacatggga

SEQ ID NO: 245114 - DNA, 251 bp, Glycine max
ggggatgcaaggactgtggtaaagtgaaagcaggcggtgcttatactttgaataccgcaagtgctgtgacggtacggagcaccatcaggaggttgagggagcaaactgagagttgagctttttgttgatgttatcaattactattagactttgcgtgatatgcctagtttgtgttcactgaactgcattggttgtattcaaagtaaactccttaaagtttaattttgagatgactcttttaattttaaaaa

SEQ ID NO: 245115 - DNA, 399 bp, Glycine max
ggtaggaaagcaaaaacagtaagtgttcccctaattcagttaaggtccgaattggtcaacttgagatgatggcatcatttgcaaggactactcaaaagttcaaagcatgttaaaagactgtgtaattggtggattaactcaatggtgacaacaagattcaacaccaatcaagtttcaaatgccaacaatggaaaggtaaccctaagttgaattaataatggtcccttgaaggtgttttaaaccgttagcctcaatttggttaactccttaagaagacacggaaccttgacaaaagttttgaaggtattccaagaactgcaagacttgaaagatctgccgatcaggtccaaaccaatacaaaggtttcaaatttgtttgctggaactcacgaaaaatgtg

SEQ ID NO: 245116 - DNA, 502 bp, Glycine max
  unsure (1)..(502): unsure at all n locations
ntcaacagggcttaaaggctcctacctgtctacgnccncgggtcgnaccagcgtccgatacggctgcgagaagacgacataaggggatggctacaacaaaggtaccgctttgggtgctgagatcattggtacctttgttcttgtctacaccgttttctccgccactgatcctaagaggaacgctagggactctcatgttcctgtgttagcaccacttcccattgggtttgccgtcttcatggttcacttggctacaatccctgtcactggaaccggcattaaccctgcaaggagtttcggaccagctgtgatcttcaacaacgacaaagcctgggacgaccaatggatttactgggttggaccgtttgttggagctgcggtggctgcaatctaccatcaatacgttcttagaggttctgcaatcaaagctcttggatccttcangagcaacgcttaattaaaaaaaaaatcaagtttctccactacctaaattatgatgatt

SEQ ID NO: 245117 - DNA, 418 bp, Glycine max
  unsure (1)..(418): unsure at all n locations
gacgcacgcgtcagctgaaacacattatcaagtctacaaatatgaagtgcctgactccaccatcggcattggaaggggattgtggattccttgctgcaaacctttatgctaagagtgtttttggggaagatgctttggtgaatgtgagcattgaaaagcaatcagatggtaagttgagtggatacatcagaataagaagtanaactcacggaattgccctcagtcttggggataagataactttgaaacagaagggagccgcctaatangagtaaatgcccgtttttctctgatggttcttcgcttatatcaactttgtgtaacttcctgtggcgggtaacttcaagcttggttattgcttcaaattctgcggcttttggtggcaacccggctgttagtattaaattttttttcccct

SEQ ID NO: 245118 - DNA, 361 bp, Glycine max
cggacgcgtgggcggacgcgtggggcgcgttaagccaaccgcagaagctatcggcgtacgatgttctgatggagtacgggttcccggtgggtcttcttcccaagggagccatagggtattcgctcaacagagacagcggcgagttcgcagtgtattttcaaggagcgtgcagcttcgacatagagtcctacacgctcaagtacaaatccaccatcacgggtgttatctccaagggcaggctctataatctcaaaggtgtcaccgtcaaaatcttgctcctttggctcaacatcgtcgaggtctctcgtcaggggaacgatatttacttctctgtcggaatcgcttccgctgattttggcgt

SEQ ID NO: 245119 - DNA, 468 bp, Glycine max
tttaaggtcgcagcgccaggtaacggtcaggaattcccgggtcgacccacgcgtcagctcacctttcccttggcgacgccgtgagaaacgaaaagcgaacaaaaaaaaaacagagtggggtgggaggcacacgcacaaacgcagagtcagaatctccaatcttcaatcggagacaaagctagctcgaacgaacgaagtagagtagtgtgctacgaaaaatgtggcggtgcatcgcacgtggtctccgtggacctgcttccaccagatccacctccaatcactcacttggatctcaactttctagattcttctctagtggggcgaactcctcgtacaccgtggtggatcatacttatgatgctgttgtcgtaggagctggtggcgcgggattgagagctgctattggactttcagaacacgggttcaatactgcttgtattaccaagctcttcccaactcgttcacaca

SEQ ID NO: 245120 - DNA, 326 bp, Glycine max
ccggctcgacccacgcgtcagtataaccattcaaaatcctaatgcacttgacagcaaggttcttctggattttgatcatgttaaaaatagtttgaaagttgatgatgaagaactacagaaaatgagttcagatccaacctataacataaacatgtcgggtgatataaagcaaatgcttaaggagcttggaactgagaaaggaaaggaaactgcattgcatgggggaggcggtggcaaggcacaaaaagaaagagctgctgcacttgctgccatcttagctgcaaggtcacgtgttgaagaagattccaaatcaaatccaaataaag

SEQ ID NO: 245121 - DNA, 469 bp, Glycine max
gttaacatcgcacgcgccaggtaacggtcaggaattcccgggtcgacccacgcgtcaggccaaattaggattaggattagggctaccaataccaataccaataccaattctattctatggcttgctcaagcgcccaaatacacggtctcggaaccccttcctcccgaaccctatttttaggtcagaggctaaataccaaggccgcctttatcaagctcaagtccacacctagaagactccgccctctcagagtggttaatgagaaagtcgtcggtatcgatttgggaaccaccaactccgccgtggctgccatggaaggcggcaagcccactatcatcaccaacgccgagggccagagaaccacgccctccgtcgtggcctacaccaagaatggcgacaagctcgttggccaaatcgccaagcgttcaggcgtcgtcaaccccgaaaacaacttccttcccgtcaagag

SEQ ID NO: 245122 - DNA, 469 bp, Glycine max
  unsure (1)..(469): unsure at all n locations
ttagaacgtctnacgcgtcgaggtaccggtcaggaattcccgggtcgacccacgcgtcagcaagaagctaagattaacacaccaacccactagaaacatgaaaacccctaacaaagcctcattactcttattccctctcttgtccctttccttatttatcaaccattcccatgcagcaggaatcgctgtgtactggggccaaaacggtggagaaggcaccttagcagaagcttgcaacacaggaaactaccaatatgtgaacatagccttcttgtccacttttggaaatggccaaaccccacaactcaaccttgctggtcattgtgaccctaacaacaatggttgcacagggttgagcagtgatatcaatacttgccaagaccttggcatcaaagtgttgctctctcttggaggtggtgctggaagctactccctcagctcatctgatgatgccacacaacttgcanac

SEQ ID NO: 245123 - DNA, 439 bp, Glycine max
  unsure (1)..(439): unsure at all n locations
cccggctcgacccacgcgtcagcccacgcgtccgcctaaacctaaacataaactgaatttcccaaatccccttcccaattttcaccaaaacctaatactcccaaaccaatcttcgatcatggccgccgaatcacaacctcaactaatcgaagagagaagagaggagcaagaacttaagtacctggaatttgtgcaattcgcgaccatccaggccctgatgcgctgcgccatcctctactcctacgccaaggagcgcgcgggtcctctgaagcccggcgtcaacaccgtcgaggaggccgtgaagaccgtcgtggctccggtctacgacaggttccacctcgtcnccggcgaggtcctcanatacgccgatcgcaaggtcgccgaattggaccgccacgttccctcaaacgtgaagaaagtctcctcccaagcccgctcc

SEQ ID NO: 245124 - DNA, 468 bp, Glycine max
ttcgaacatctacgcgtccaggtaccggtcaggaattcccgggtcgacccacgcgtccgcgacgtgagcggttcgctgcccgcgacgttgtgagaagtccactgaaccttatcattaagaagaaggagaagcccaaaatgggaacaatggagagcttgaagttcttggtgtcttcaaagtacatcagagatcttgccactttagtggttgcttatggaatcagcatcaatcttgttgaggttacctggaagtctaagctcaaagctcagtttcctagtcccaacgagtactcttcttttatgggtgacttctcaactgcaactggaattgccacattcacaatgatgcttgtcagccaatttatatttgacaagtatggatggggagttgctgccacgatcacccctacagtcctgcttctgacaggagttggtttcttttctcttatattgtttgggggcccgcttg

SEQ ID NO: 245125 - DNA, 426 bp, Glycine max
ggtcaggaatatcgggctcgacccacgcgtcagcccacacgtccggaagagccttccatatatagcctctcaaacacatgaacagtactatctctttggctccctttccaaattgtggccccaacttcaacatatcagccttcagccaccgctgatattgtattcgacaccgaatgcaatcctactccaaacggcggcacatactatgtgttgccacttataagatgaaagggcggcggaatagaatttgccaaaaccgaatcagaaacatgccctctcactgttgtgcaatctcactttgaggtctcaaacggtctaccactgaaaatttcatccccatttaaaatccttgacatcaccgaatgacttattttgagcctcagtttcacttaagtacccccctgtgcctcaactccttctcggtgg

SEQ ID NO: 245126 - DNA, 279 bp, Glycine max
gacccacgcgtcaggccctagactacactacacactttgcaatggcggttgttgcgcaaacccctgacatcgccggcgagcgacagtccggccaagacgttcgcacccaaaacgttgtggcatgccaagccgttgccaacatcgtcaaaagctctttaggccccgttggcctcgacaagatgctcgtcgacgacattggcgacgtcactatccacagcgacggtgccacgattctcaagaagcttgaagtggagcaccctgctgccaacgttctggtgg

SEQ ID NO: 245127 - DNA, 441 bp, Glycine max
ggtcaggaattcccggctcgacccacgcgtcagaagaaaacctaagcttagaattagaaacaaagaaaagaagaaaggaaagaattgatcgttgaaaatgcagggaggaaagaaagcgggagagtccattaaggaaacagctacaaacattggtgcttctgccaaggctggcatggagaagaccaaggccactgtccaagagaaggcagaaagaatgacagcacgtgatccggtgcaaaaggagttggcaacccaaaagaaagaggcaaagatgaaccaggcggagctggacaagcaggcggcgcgtcagcataacacggcggccaaacagtccgccaccacggctgggcacatgggacatggccaccacaccaccggaaccgggactggaaccgccacgtattccaccaccggggaatatggtcagcccatggggggccc

SEQ ID NO: 245128 - DNA, 467 bp, Glycine max
  unsure (1)..(467): unsure at all n locations
tttaacgtccacgcgtcgacgtaccggtcccgaattcccggctcgacccacgcgtccggcgtagtgcaaatggggtagatgaaagcaaatattggcgtggtggctatggcgactatggtggttggcgtggtggtggttggcgtggtggctatggaggctggcgtggtggctatggtggtgggcgtggtggctatggtggctggcgtggtggctatggtggtgggcgtggtggctacggaggttggggtggtggctttggccctaacgaacataatgaggctgggattgatgctagccctcacaactaagaaggaaacttgctaaagcttatataggatttaagttatcgtaataaataaaacttcattggaagggtagttataatagatgtggagatcnttcttcgctctggtcatataaaggaataatacttttctattaatttccttatccttgtaactctccgn

SEQ ID NO: 245129 - DNA, 467 bp, Glycine max
ttcgaacatctacgcgtccaggtaccggtcaggaattcccgggtcgacccacgcgtccggaaattgtgaaggaagtttcttcctatttgaagaaagtaggatacaaccctgacaagattccttttgttcctatatctggttttgagggagacaacatgattgagaggtccacaaaccttgactggtacaagggtcctactctgctagatgcacttgaccagatctctgagcccaagaggccttctgacaagcccctcaggctaccccttcaggatgtgtacaagattggaggaattggaactgtgcctgtgggacgggttgagactggtgtcttgaagcctggaatggtggtgacttttgcaccaactggactgacaaccgaagttaagtctgtggaaatgcaccatgaagctctcacagaggctcttcgcggtgataatgttggattcaatgttaagaatgttgct

SEQ ID NO: 245130 - DNA, 487 bp, Glycine max
  unsure (1)..(487): unsure at all n locations
agagggnttcnggtatcgtctnaacgtctnagcgtccaggaaccggtcaggaattcccgggtcgacccacgcgtcagggagtttcttattggatgtttgctaattatctcattcttctggctctgcttcttcttcttgtagttgaattaagagatggggttgtctttcaccaagctttttagccggctctttgccaagaaagagatgcgtattctcatggtaggtcttgatgctgctggtaagactaccatcttgtacaagctcaagctgggagaaattgtcacaaccattcccacaattggatttaatgtggagactgtggaatataagaatattagctttactgtatgggatgtgggtggccaagataagattcgtcctttatggagacactacttccaaaacactcaggggcttatccttgttgtggataacaatgatcgtgaccgtgttgttgaagctanaaatgagctccaacggatgttga

SEQ ID NO: 245131 - DNA, 466 bp, Glycine max
gtcgaacatctacgcgcaaggtaccggtcaggaattcccgggtcgacccacgcgtccgcggacgcgtgggcgaccctgatcttctgtgaagggttcgagtgagagcatacctgtcgggacccgaaagatggtgaactatgcctgagcggggcgaagccagaggaaactctggtggaggcccgcagcgatactgacgtgcaaatcgttcgtctgacttgggtataggggcgaaagactaatcgaaccgtctagtaactggttccctccgaagtttccctcaggatagctggagcccgcgggcgagttctatcgggtaaagccaatgattagaggcatcgggggcgcaacgccctcgacctattctcaaactttaaataggtaggacggtgcggctgctctgttgagccgcgccatggaatcgagagctccaagtgggccatttttggtaagcagaactggcgatgcg

SEQ ID NO: 245132 - DNA, 350 bp, Glycine max
tgcggtcaggaattaccgggctcgagccacgcgtcagcttatgtgcttcactcttgggctggagggttaactgagttcacagatggaaggaatcaagagagcacaagtgaggctgtgagtgcatattattctgctgctttgatgggattagcatatggtgatgtacctcttgttgcacttggatcaacactcacagcattggaaattgaagggactaaaatgtggtggcatgtgaaagaaggaggtactttgtatgagaaagagtttacacaagagaatacggtgatgggtgttctatggtctaacaagaaggacactggactttggtttgctcctgctgagtggaaaga

SEQ ID NO: 245133 - DNA, 466 bp, Glycine max
aagcttcaaacttctacgcggcgaggtaccggtcagggattcccgggtcgacccacgcgtcagatacctactttcagctcctaagagcacgcatcactgttgcacttcttactcgttctccctcttttttttcttcttcttcttcttcgctaaaccccccctttatttttcctatctcactaacatcgatgggagacgagaataagaccaagtcccctgcttccggcgtgtggtccaccatcaagcctttcgtcaatggcggagcctccggcatgctcgccacctgcgtcattcaacccatcgatatgatcaaggtgaggattcaacttgggcaaggatcagctgcgcaggtcacttccaccatgcttaagaatgagggtgttgctgccttctataagggtctatctgctggattactcaggcaggctacatacaccactgcccgtcttggatcatttaaaatcct

SEQ ID NO: 245134 - DNA, 439 bp, Glycine max
ggtcaggaattcccgggtcgacccacgcgtcagcaggaagttccatcaaccctagtgagagaacctatccagaggagatgatacagacaggaatatctaccattgatgtcatgaattctattgctagaggtcaaaagatccctctattctcagctgctggtctcccccataatgaaattgctgcacagatatgccgtcaggctggcttagtcaagcgactagaaaagtctgataatcttctcgagggtggaggagaagaggacaattttgccattgtgtttgcagctatgggagttaacatggagactgcacagtttttcaaacgtgactttgaggaaaatggctcgatggagagagtgacccttttccttaatctggcaaatgatcctacgattgagcgtatcatcactcctcgtattgctcttactactgctgaata

SEQ ID NO: 245135 - DNA, 448 bp, Glycine max
  unsure (1)..(448): unsure at all n locations
acgctggcaggtaccggtcaggaattcccgggccgacccacgcgtcaggcaaactctggtggcagatgcctctcagttgaatatacagacagagttggagagttagctaagaagcatggactgaagcttcacattgatggggcccgtatttttaacgcatcagttgcacttggtgttccagtggataagcttgtccaggcggctgattcagtttccgtttgcctatctaaaggtataggtgctccagttggatctgttattgttggttccaagaattttattgccaaggctanacgactccggaaaaccttaggacgtggaatgagacagattggcctcctttgtgccgctgcacttgttgccttgcaggaaaatgttgggaagctggaaagtgatcacaagaaagctagacttttggctgatggattaaaagaagttaaaggactga

SEQ ID NO: 245136 - DNA, 463 bp, Glycine max
tttaacttgcacgcggccaggtaccggtcaggaattcccgggtcgacccacgcgtccgacatccccttattgttaaaccctttgtttgcacaagaaaagagttacttcatcatcatcatcaacatgagtcgcttcaacaatcagcaagaatcccctgtatcatatcctccagcactgtatgttagtgccccaccacctatgggttatccttccaaaggtgatcctacagctgtagggtacccccaacaaagagttccagaagaaaccacaagcaggggtgatggattttggaagggatgttgtgctgctttatgctgctgctgggtcctggattgttgcttctgattgaatcatagcacagatttgtgtttgtcaccatgttttctttttcacattgccagtttcctatttgtattctttgtagtttagaagaataaggatctttgtcctcttggacagcttg

SEQ ID NO: 245137 - DNA, 400 bp, Glycine max
tcccgggtcgacccacagcgtcagcccacgcgtccgctgaaaatgagttccaaggttttgcttgttctacttatgttcttggccactatacttctgatctcctctgaggttgcacccgatgatgcatacgagaattttgacaaaatagatgggaagcctagtgcagatggggtagatgaaagcaagtattggcgtggcggctatggtggcggctatggtggtggttatggaggtgggcgtggaggctatggaggtgggcgtggaggctatggagggggacgtggtggatatggcggcggacgacgtggctatggtggcgggcgtggtggctatggcggcgggcgtggtggcgggcgtggtggctatggtcctaatgaacataacgatgctggggttgatg

SEQ ID NO: 245138 - DNA, 467 bp, Glycine max
tccaacggtgcagcggccaggtaacggtcaggaattcccgggtcgacccacgcgtccgtgaaaatgtgccttcaaggattaacagatgtttggaggaaggagccgaagaatttttcttgaagcctgtgaggttgtcagatttgaacaagcttaaaccccacatgaagaaaaccaagttcaaagatcaaaagcaagaaacagtagaaaggtttgaagactcagaagttcaacagcaacagtcacaacaacaaatcatcatccaaaatgagcatcaccaagcaccaaaattacaagttcttcagccagagtcagaatcagagtcacatccacaaccaactattgaacaacagcaacaaattctacaacaagccaacaacaataacaagaggaagaccatggaacagggcctttcacctgagactgacagaacaagaccaagatacagtggcatagccactgtgggatga

SEQ ID NO: 245139 - DNA, 467 bp, Glycine max
ttgaacggtgcagcgcaaggtaacggtcaggaattcccgggtcgacccacgcgtccgctcaagagagggtctgcctgtctttgcaagtggtgttgggcttagcacatttgacaaagcatctgttcattagtatgtgcagtcacacattcaaattaatgaatatcgtgagcgtataatcttgccttctgcatcaaagaagcaggggcgacctattaccacttgtataaaggttttagacatgactggtctgaagttatcagccctgaatcagattaagttgctaactattatatcatccattgatgatctgaactaccctgagaagacaaatacttattacattgtaaatgctccatacatattttctgcttgttggaaggttgtgaagccacttttacaagagatgacactaagactgatacaggtgttaccaggttgtggacgatatgagctattgactatcatgg

SEQ ID NO: 245140 - DNA, 471 bp, Glycine max
tgccaacgtcgtagcgtccaggtaacggtcaggaattcccgggtcgacccacgcgtccgcccacgcgtccggaaacattggatgacgccagaaaaggttaaaacgtcaatcagaacttttccttcttcagctgaaatagtacctgaaccgctgggtgtcgtgttagtcatctctgcatggaactatccaatcttgttgtcccttgatccagtagttggagctatagcagctggtaatgctgtggttctaaagccatcagaaattgctccggccacttcatcagtactagcaaagttgatagagaagtatatggataactcatttgtaagagttgttgagggggcagttgatgaaacaactgcactattgcagcaaaagtggaacaagattttctacacaggtaatggaagagtgggaaaaatagtgatgactgcggctgcaaaacaccttacaccagttgtactggagctg

SEQ ID NO: 245141 - DNA, 471 bp, Glycine max
  unsure (1)..(471): unsure at all n locations
tccaaacgtctacgcgtccaggtaccggtcagggattcccgggtcgacccacgcgtccgcccacgcgtccgcccacgcgtccgcccacgcgtccgcccacgcgtccgcccacgcgtccgcacacaactactacaagtacttccctacaagcagaaccaacaacaactatggcacgttatcaaaagcactacgatgatcatggtcacaaggttgacgagtatggcaacgttgagaagcacaccgacgaatacggcaacccagtacatgctgctactgtcacctatgtagccaccagaactgctgctggtggttacagtgatgacattaagaggcaacatgataccaccaatgcctacggagtagacactggtagacagcattctagtggtggctacgatggagacactaatagacatcaaggaactactggtggctatgatgctgacaccaatagacatcatggaactaccn

SEQ ID NO: 245142 - DNA, 434 bp, Glycine max
  unsure (1)..(434): unsure at all n locations
gtcaggaattaccgggtcgagccacgcgtcagcccaagcgtccgcccacgcgtccgatttcctctcagaaccctcgatcactcccacgcgctcctatatcctctccttcaccgtcgctctctccaacgatcacaacaacatcgtcatcccatggcaaacgccgcatctggtatggcagtccatgatgactgcaagttaaggtttttggagctgaagacaaagaggacacaccgtttcatagtttttaagattgaggagcagcagaagcaggtcattgtggagaagcttggtgagccagcccaaggctatgaagatttcactgccagccttcctgctgatgagtgccgttatgctgtttatgattttgagtatctgactgaagggaatgtcnctaaaagcagaatttttttcattgcatggtcncctgacacatc

SEQ ID NO: 245143 - DNA, 475 bp, Glycine max
agcgttagctggcagtaccggtcaggaattaccgggtcgacccacgcgtcagggaccttaaagttaaaggatataccatatcaacacatataagaagaccgctacaataagagtcttcaacttcttggatacaacacagtatacaatagcactccagtgcttgtccaacaacgggaaaacccttaatgtgtagtctattgccttacttgttgaaatacaattgaatgagattttggtcaaataaatcataactcctgcggatccctacgaaagaaccctggaaaggttttgggttaaatatgctgatgatgacatgttttctgcagttattgcattcttccttatcactaatgatgaagagcgagaaaagagcatagagaagatatgggagcatctcaaggttgttgagaatcagtgttttggtgatcagaagaaattttttgggggagacattattaacattatgggcataacg

SEQ ID NO: 245144 - DNA, 418 bp, Glycine max
ggtcaggaattcccggctcgacccacgcgtcaggccctttttttttttttttcccttcatctttcccatcatcttctttccccttgactttctctgcatcaattttgtcatactttttcttctttgtccttcttctcttcatcatccttcccatcatcttctttcttcttgatcttctctgcatcagttttgccatcattgtctttcttctcctttttcttcttttccttcttctcttcatcatctcgggacaagtcccagcaccaccatctgcttctacaattccatcgccactgtctcctttggcaccttctataccactaccgtcccgttctcttcctgcgcctccaatgtctcttacgccaccagttccatctacagattccgctcgcagtcctccaccacctattgggtttgg

SEQ ID NO: 245145 - DNA, 472 bp, Glycine max
ttcaagggtgcagcggccaggttacggtcaggaattcccgggtcgacccacgcgtcagaaagaagcaagcatgtgtggcggagcaatcatcgcagatttcatacctcggcagcgtccccgcaccctcacagcctccgaactctggcccaagcgcagcgaacctcaacctcaacctcctcctcctccagttaagaggcagaggaaaaacctctacagagggatcaggcagcggccctggggcaaatgggccgcggagattcgcgatccacgtaaaggagttcgtgtctggcttggcaccttcaacaccgccgaagaagccgccagagcctacgacaaagaagcccgaaaaatccgcggcaagaaagccaaagtcaatttccccaacgaggacgaccctctgccgcaatacggatcttgcaagagcctcaacttggagttcggttacgatctcaaacaaaaaagggcttttccg

SEQ ID NO: 245146 - DNA, 465 bp, Glycine max
  unsure (1)..(465): unsure at all n locations
tcgaacttgcacgcggccaggtaccggtcaggaattcccgggtcgacccacgcgtcagctctctctctctctcacccttcccagtgatcaattcaacgatgttagagcagttgctgatattcacgcgcggagggctcatcctctggacctgcaaccacctcagcaacgccctgaggggatctccgatcgacacgttgatccgatcctgcctcctggaggagcgatccggtgcggcctccttcaactacgacgcacctggagccgcatactctctcaaatggaccttccacaacgacctaggcctcgtctttgtcgccgtctatcaacgcgtcctccacctcttgtacgtcgacgatttgctcgccgccgtcaagcgcgagttctcgcgcctctaccacccccaaaaaaccgcctaccgagattttgacgagatctttcagcagctccagatcgangccgagtccg

SEQ ID NO: 245147 - DNA, 467 bp, Glycine max
ttgagcgtgcagcgccaggtaacggtcaggaattcccgggtcgacccacgcgtccgccaaaccagggacccaaaacattgaggtagaacaactgaagaaccaacaagaggggtattgagattgagattcaagtaatggggaagagcaaggttcttgtggtggggggaactgggtacatagggaggaggatagtgagggcaagcctggcactgggccatgagacctatgtggttcagaggccagagttgagcctccagatagagaagctgcagaggctcctctccttcaagaagcaaggtgctcatctcattgaggcctctttcaatgatcacaagagccttgttgatgctgtgaagcacgttgatgttgtcatcagtgccatctctggtgttcacatcaggagccacagcatcactctgcaactcaaacttgttgaggccatcaaagaagctgggaacgttaaacct

SEQ ID NO: 245148 - DNA, 465 bp, Glycine max
  unsure (1)..(465): unsure at all n locations
aacgtgtacgctgccaggtaccggtcaggaattaccgggtcgacccacgcgtcaggttgctactattgaggatatatatcttgcatatgaacagttgaaagtggatgagaattctctatattcatgcattggaattgctggtgctcagactgcacaagatatagcagctcctttagaagaggaagtagcagatgatgtttatccaggtgttattccggtgggacgaggtttatctacaatgacacggccaacaacctgatatttttggactaagttttggcctgcttgctttaagatcgggaggagccatgtctggaagtttgattacaagttgtcgttcaaaggattagcggcatgtgtgtcacaacacaagaagttgctgcattcatttaacattcaaaccactcggtatacaagctgtttgatcaaacctaagaagcggttcttgacttgcgagtgaatgan

SEQ ID NO: 245149 - DNA, 465 bp, Glycine max
ttgaacttgctagcgccaggtaacggtcaggaattcccgggtcgacccacgcgtcagaaaagctcgtggaattgctagcaatggcgaggatcaaggtttacgagctgaggcagaagacgaaggctgatctgctgaatcaactgaaggacctgaaggcggagcttgccttgcttcgtgttgctaaggtcaccggtggtgcccctaacaagctttccaagataaaggtggtgaggttgaacattgcccaggttttgacggtgatttctcagaagcagaaggctgcgttgagggatgcctacaagaataagaagtacttgcctctcgatctccgccctaagaagaccagggctattcgcaggaggcttactaagcaccaggcatcattgaagacagagagggagaagaagaaagagttatatttcccactaaggaaatatgctatcaaggtgtaactttaaagcaatc

SEQ ID NO: 245150 - DNA, 468 bp, Glycine max
  unsure (1)..(468): unsure at all n locations
tgcagcatgcacgcgcaaggtaccggtcaggaattcccgggtcgacccacgcgtccgtcttcttcatctacattagtagttcttgttattcattattcttcatactcacacagcttcttctgggggcaaaaggggtcatttttcagatccgaggttgagctcctctacccatcatgatggagctcggatacctgaatcagggtcagccttctagaggaacaacaccacttgtcactcttccattgttgctttcaacacttgtgttcttctccactttcacacatgccttctcttcttctgtgtttccggaattgaatcctattaaacctaagcactcacgtcttctcaggagtgctgtgcaacgagaaactcctacatctcagttgtctgaactatggtcacctctggaaagccaaggatggaaaccttatgttgaatcanataagccaacatttaccagagaaatcn

SEQ ID NO: 245151 - DNA, 420 bp, Glycine max
ggtcagggattcccgggtcgacccacgcgtcagcccacgcgtccgcccacgcgtccgcacacacacagctagcagatattacatacacgtgaatcactaattaagccatggagaagaaatcaatagctgggttgtgcttcctcttccttgttctctttgttgctcaagaagttgtggtgcaaactgaggcaaagacttgcgagaacctggctgatacatacaggggtccatgcttcaccactggcagctgcgatgatcactgcaagaacaaagagcacttgctcagaggcagatgcagggacgattttcgctgttggtgcaccaaaaactgttaaatggatccattcactccaacgtgaagaagatgcatgcagcgctattttataaaaaataaaactactatatactatatataataag

SEQ ID NO: 245152 - DNA, 471 bp, Glycine max
  unsure (1)..(471): unsure at all n locations
ctccgaacgtctnagcgtccaggaaccggtcaggaattcccgggtcgacccacgcgtccgggaaaagcagaggagaattgccttctagaagcgttatctcgcagagatgggcactgtttctctgcttaggaagtttctgtgctggaatgctcttcactacaaggatatggactatacctgaaaacaacaaaggactagcacggccaacagcctcagaagctgaaaaattgagtttagtttcagaaggctgcaattccagaattttgcaagagatggaaatgaagcacgataaagacacttatggtgaagttttcaagagtcataattccatacaaacattggacaaggctatttcaaacttagagatggaattggctgctgcaagggcaactcaagagtctctacgaagtggtgctcctatttcagatgatataaggttgagtgaatcttcgggtaagagaaagtacctta

SEQ ID NO: 245153 - DNA, 468 bp, Glycine max
  unsure (1)..(468): unsure at all n locations
naacgtctacgctgccangtaccggtcaggaattcccgggtcgacccacgcgtcagcccatctgatcatataacacaacacactgcaggcttgttgtgttgtgctgtgttcattctgaaactttgatctatgtgagacaagttgtggctaccctgcaaagccagaaaaaatggtgccagagaacttgaagaaacaacttgctttggctgtgagaagcatccattggagctatgcaatcttctggactgattcaactacccaacccggggtgttgagctggggggaagggtattacaatggagacattaagactaggaaaacaagtcaaggagtagaactcaattctgaccaaatagggttgcagaggagtgaacagctgagagaactattcaaatccctcaaaactgtagaagtcacccctcaaaccaaaaggccttcagcagcagcactgttcccagaagatctcac

SEQ ID NO: 245154 - DNA, 471 bp, Glycine max
  unsure (1)..(471): unsure at all n locations
aactttgtagcggccangtaccggtcaggaattaccgggtcgacccacgcgtcaggcagaggttggtgtcctcgaagagcacaacgaggtaggcctctgcgacttcttggagagtggagacggcgctgctgtggaagtagagattggtcttgaagtccagagcgatttcccttacaagtctttggaaaggaagcttccttatgagaagctcggtgttcctctggtaccttccgatttcccttaacggcaacgtacttgggctgaaacgggtcagcttcctcaagccggcgggcccccgaaccgacttgtgtgctgccttcgtggcaagttgccttctcgaaacttttcctccgggggaactccttgccgtttgcctcctacgagccatttccaacacagagattgcctgaccttggaagaagactaatgggtacagcaacgttgtaagctgggattcaaggacagaaacac

SEQ ID NO: 245155 - DNA, 465 bp, Glycine max
aacgttagctgcaggtaccggtcaggaattaccgggtcgacccacgcgtcagcccacgcgtccgcccacgcgtccgcacacgcgtccgcccacgcgtccgcccacgcgatccgaagaaaccttatcttggtattttgattggttctgtggagagtttttttttctttggtgtggattttggtttgtgctgtttttggctgggaataacaatggccgatgatggaaacagaagcaattacttccagtccatcttggggttgcagaatgagtgcactgaattggagctaatgaatgcgtataagaaacatgcagagaaatggtacccagatcgttgttcagctagagggaattcagatttagtggaataagctactaaaaaatttcatgaaattccggaagcctattcaattttatctgaagccaacaaagcgttaatgtacgacatgggagtctaacacatttatt

SEQ ID NO: 245156 - DNA, 426 bp, Glycine max
  unsure (1)..(426): unsure at all n locations
gtcaggagttcccgggtcgacccacgcgtccgccaatactgagcggggcagcattgagaccagaggtggctttgtctcaaacatgccaggagatgttgcaagagtgaatgggcagctagcagtttctcgagctttcggagacaaaaacctcaaaacgcacttgcgatctgatcctgacattcagtatactgacattaccccagatgttgagcttttgatacttgctagtgatggtctatggaaggtaatggcaaaccaagaagctgttgatgttgcaagaaggataaaggatccacanaaggcagcgaaacaactagccactgaggcattgaacagagacagtaaggatgatatttcctgcattgtagttcgtttcaagggttgaaaaagggaacatacatactctctaaattcagggtatatata

SEQ ID NO: 245157 - DNA, 474 bp, Glycine max
ttcaacttgtcacgcggccaggtaacggtcaggaattcccgggtcgacccacgcgtcagaaaaaaaaaaaaaaaaaaaaaaaaaaaaaaaaaaaaaaaaaaagaaaaaagggcagcagctcaaaaggttccatacttaagtaagcgggcagccgatctaaaggatcatccataatgtcacataaattcaattcaatgagccctccttttatgacatcgaaattgagatcactgtgccatattatttacattattcgccttgcaaaaaatctgcctttcgccatcttaattactatgcagcagagcctcatttctcgaccttccgaacaattgtacaggctgaatgggatcgcccatccaacctgttacgaagcattaatcgcgaatggtatgctcgctgattccagccttaaagctcaacttgctagcgccttacccccagctcttttagcattcttcccctcgcttttatccg

SEQ ID NO: 245158 - DNA, 469 bp, Glycine max
  unsure (1)..(469): unsure at all n locations
ttcgaacgtctagncgccangtaccggtcagggactcccgggtcgacccacgcgtccgctctggtcgatggaacaatgtaggcaagggaagtcggcaaaatggatccgtaacctcgggaaaaggattggctctgagggctgggcacgggggtcccagtcccgaacccgtcggctgtcggtggactgctcgagctgcttccgcggcgagagcgggtcgtcgcgtgccggtcgggggacggattgggaacgggcccttcggggcctcttccccgggcgtcgaacagtcaactcagaactggtacggacaaggggaatccgactgtttaattaaaacaaagcattgcgatggtccctgcggatgttgacgcaatgtgatttctgcccagtgctctgaatgtcaaagtgaagaaattcaaccaagcgcgggtaaacggcgggagtaactatgactctcttaaggtagccaaan

SEQ ID NO: 245159 - DNA, 435 bp, Glycine max
ggtcaggaattcccgggtcgacccacgcgtcagcccggatggttcggttctccgtgctcagttacctggcaggccaactcgtgattctctatttgtggatccagccagagataggactagcttgctcaaaatatggaacctgaacaaatgctctggagttgttggtgtatttaactgccaaggtgctggatggtgcaagatagagaagaaaacccgcatccatgatacatctcctggtacactcaccgcctctgtctgcgcctctgatgttgacctcatcacacaagtagcaggtgctgaatggcttggagatacaattgtttatgcttacagatcaggtgaggtgattcggctaccaaaaggggtttcaattccagtgacactaaaagttctggagtttgagcttttccacttctgtccaatccaagaaatagc

SEQ ID NO: 245160 - DNA, 470 bp, Glycine max
  unsure (1)..(470): unsure at all n locations
ctcanaatgtctacgcgtccaggtaccggtcaggaattcccgggtcgacccacgcgtccgctcatggtcaattgggggacgcttttaaaagttatgtccgtactcgggattattgcactacatcaaagcacattgttcatatgtgtatgagtgcaattctggtcagcattgaaatgggtcaatttcctcatgttacaagctatgttagcaaggcagaacagtcaccagatgcccttgaagcagtaacagttgcaaagctacgatgtgctgcaggattggctaatctagaagccaaaaagtacaagcttgctgcccgaaagtttctagaaacaggacctgaactgggaagtcactataatgacgtaattgcacctcaagatgttgcaacatatggaggactttgtgcacttgcaacatttgatcgggcagagttaaaggcaagctctccattatattgttgtgatggttcn

SEQ ID NO: 245161 - DNA, 471 bp, Glycine max
ttcgcaacgtctacgcgtccaggaaccggtcaggaattcccgggtcgacccacgcgtccggtgaaatgttgctaacagacaccatgatcaggacccttgaattttcctccccttgtctatgatcgaggaagattatctgtaagagattatgcacaaaatagttaaggtcttttcctttaaatgggctggatcaatgaaccgagatcactgcaggttcatggggatgggaggattatgaggctatgttttttaatcttccgatgttactgttgtgattttttaatttcaatacggatattatatacttgctgcccaaaagggttgacgctctagacgatgaaagcttacgtacgcgtgcatgcgacgtcatacctcttctatagtgtcacctagattcaattcagtgaccgtcgtattagaatgtcgtgactgggaagaccctgtcgtaatacaacttaatcgccgtgcatg

SEQ ID NO: 245162 - DNA, 445 bp, Glycine max
ggtcaggaattaccgggccgagccacgcgtcagcagaggtgaagcttcatggattttggtatagtccctacactttgagggtggtatggaccttaaagttaaaggatataccatatcaaaacatagaagaagaccgctacaataagagtcttcaacttcttgaatacaacccagtatacaagaaaactccagtgcttgtccataatggaaaacccttatgtgagtccatgcttattgttgaatacattgatgagatttggtcacataattcattacttcctgctgatccctacgagagagctctggcaaggttttgggttaaatatgctgatgatgacatgttttctgcagttattgcattcttccttagcaataatgatgaagagcgagaaaagagcatagagaagatatgggagcatctcagggttgttgagaatcagtgttt

SEQ ID NO: 245163 - DNA, 406 bp, Glycine max
  unsure (1)..(406): unsure at all n locations
gggtcgacccacgcgtcaggtccacctcattgtatacttgcaagtaacacttccacaattgacttgaatctgattggagagaagacaaagtctcaagatcgaattgttggagcccatttcttcagtcctgcacatgttatgccgcttctggaaattgtacgtaccaagcagacctctccccaagtgatagttgacgtgttagatatttcanagaagataaagaaaactccagtggtggttggaaactgcacaggatttgctgttaataggatgttcttcccatacacgcaagcaggtctcttgcttgttgaacgtggtgcagatgtttatcaaattgatagaataataaccaaatttggaatgcccatggggcctttcagattggctgaccttgttgggtttggtg

SEQ ID NO: 245164 - DNA, 467 bp, Glycine max
  unsure (1)..(467): unsure at all n locations
gttagcgtgcagcgccaggtaccggtcaggaattcccgggtcgacccacgcgtccggcttcttgttgttggaaagaaaccctagcaagcggaacaatggcagacgttgaggtcgatgtggcggctgcagcagcagcagggcagccgaagaagagaacgttcaagaagttcagtttcaggggcgtggatctcgatgcgcttctggacatgtccaccgatgaactcgtgaagatgttcagtgctcgcgcacgtagaaggttccagagaggcctcaccagaaagcccatggccttgatcaagaagcttcgcaaagcgaaaagagaagctccaccaggtgagaagccagaacctgtccgcacccacctccgcaacatgattattgtgcctgagatgattggtagcattattggagtgtacaatggcaagacctttaatcaggttgaaatcaaacctgagatgattgggcan

SEQ ID NO: 245165 - DNA, 474 bp, Glycine max
  unsure (1)..(474): unsure at all n locations
ttcaacttgcagcgcacaggtaacggtcaggaattcccgggtcgacccacgcgtccgatctgagggagaggagagcattttcatttttcaacttgagagaagaagagaaggggaaaaggaaaaaaaggcaaaatgggtaaggatctgagcgatgagcaagtgtcttcaatgaaggaagctttctctttattcgacacagacggtgacggtcggatcgcgccgtcggagctggggatcctgatgaggtctctgggagggaacccgactcaggcccaactcaaagccatcgtggccgaagagaacctcacggctcccttcgacttcccccgattcctcgatcttatggccaaacacatgaaacccgaacccttcgatcgccaactccgcgacgccttcaaggtcctcgacaaggactccaccggcttcgtcgccgtctccgaactccgccacatccctaacaataattngggaaaa

SEQ ID NO: 245166 - DNA, 472 bp, Glycine max
ttgcaacggtcacgcgtccaggtaccggtcaggagattcccgggtcgacccacgcgtcagggcgaataatacgttaggtgggagtattcctaaagagttatgggacctgcctgtgcttaattatcctgatctttcaaggaatcagttctctggtgagattccaattgagctgcagaagttgaagcctgatttgttgaatttgtcgaacaatcagctttctggggtgattcctcctctttatgctaatgagaattatacaaagagttttcttgggaatcctggtttatgcaacgctctctctggattgtgtccaagcttgggtggtgacagtgatggtaagagcagaaagtatgcgtggattttccggttcatatttgtgcttgctgggattgtgttaattgttggggtggcgtggttttacttcaaattccgggacttcaagaatatgaaaaaggggtttcacttttcaaaa

SEQ ID NO: 245167 - DNA, 467 bp, Glycine max
  unsure (1)..(467): unsure at all n locations
ttcgaacgtctnagcgtccaggaaccggtcaggaattcccgggtcgacccacgcgtccgcggagctgtctgtgcaaatttgcgttgttcttcgcggcacacctcactcactgaacggtaagtatggcggacaaggctgttacaatccgaacccgaaagttcatgaccaacaggcttctttccaggaagcagtttgtcgttgatgtccttcatccagggagggcaaatgtttccaaggctgaacttaaggagaagctggctaggatgtatgaagtgaaagaccctaatactgtatttgtcttcaaattccgaacacattttggaggtggcaaatccactggatttggtttgatttatgatacagtggagaatgccaagaagtatgagcccaaatacaggcttatcaggaacggccttgacaccaaggtagaaaagtcaaggaagcaaatgaaggagaaaaagaattga

SEQ ID NO: 245168 - DNA, 471 bp, Glycine max
  unsure (1)..(471): unsure at all n locations
ctccgaaggtgtnaccgtccaggatacggtcaggaattcccgggtcgacccacgcgtccggctgatgacccttggttgcctccatgagaagcatcttgaggagcttcttgaatattttcgctttgggctgtggtgggttccccttggggttgcttcttcaaatggtcatggatctggtttgcacacatttgtcctatatttgggaccccacataacactgtttacattaaaagccgtgcaatgtggccgagttgatttgaaaagtgctccatatgatacgacacaattaagtagaagtgcttcttggcttgataaaaactgttctgagtttgggccaccattattccagtcagtatatgattcacaggttccgcttagcatcattttgcctcaagttcagctggaggctattctatggggtattggaacagctatangggagcttcctccttactttatctccagggcagn

SEQ ID NO: 245169 - DNA, 425 bp, Glycine max
ccgggtcgaccaacgcgtcagctcaggttatggtttccttggggtacatgcacagtcaaggtgttcataccctttttatataacattctcaagaaagcaaacttatggtacttttttttttggtctatttacatgatataattattgtaggtgataatgggttaatgaccttaaaaaacaaattataagggagaagttagctacttagtttgagaagaatgatcttcggaagctgaagtacattcttgggatagaagttgcctactctaagtaaggtatctttaattctcaaaggaaatatgtgcttgatctccttaaatagactggtaagttgggttgtaagatgtgcttgaccatgtgtacagggcccttaaccagctaaaatactcctaaagaaagacacatcagataaatctggattctac

SEQ ID NO: 245170 - DNA, 435 bp, Glycine max
gcctcccggctcgaccaacgcgtcaggacaattcgggcttctcgggcccgcgccgcagccccagtttcaacaacacgtgtggccgtggcgggagccgtggtggcggtggtgccggtgccggtgccggtagaggggtggtggtgaatgcagagaaagtctgtaattattggattcaggggaattgtagttatggagagaggtgcaagttccttcacacttggagtgtgggggatgggttttctttgctgacccagcttgaagggcatcagaaggctgtgagtgcaattgcctttccctctggttcagataagctgtataccggaagcactgatgagactgcaaggatttgggactgccaatctggaaagtgtgtacgtgtgatcaatcttggtggtgaagtacgttgtatgatcagtgaaagcccttgggtccttg

SEQ ID NO: 245171 - DNA, 284 bp, Glycine max
gggtcgacccacgcgtccgtaagcagtgtgaggagcttgggattcttgttgacagagatgatcagggcactctgcttcagattttcaccaagcctgttggggacagggcaacgatattcatacagataattcagaggatccggtgcatggtggaggatgacgaacggaacgtgtagcagaacggtgcatgtgggggttttgggaaaggcaatttttctgagcttttcaaatccattggagaatatgagaacactttggtagctaaaagaaccgcgtaagcacat

SEQ ID NO: 245172 - DNA, 515 bp, Glycine max
  unsure (1)..(515): unsure at all n locations
actgtcacgctgcangtaccggtccagaattcacgggtcgacccacgcgtccgggagaacgggctagaacaaaggacaacaatcttctcgggaagttcgagcttacagggatccctccagcaccaagaggagtgcctcagatcaatgtctgcttcgacatcgacgctaacgggattctgaatgtctctgcagaggataagactgctggtgtgaagaacaagatcacgatcacaaacgacaagggtaggttgagcaaggaggagattgagaaaatggtgaaggatgcagagaggtacaaggcacacgatgaagaggtgaagaaaaaagtggaggctaaaaattcgcttgagaattacgcgtataacatgaggaacacgataaaggatgagaagaatagaaggaaagctgagccccggatgagaaacacgagattggagaaagctggttgaggatgcgatacaatgtggtggaaggaaaacaagattggcggaaatggacaaattttaggacaaaaa

SEQ ID NO: 245173 - DNA, 508 bp, Glycine max
  unsure (1)..(508): unsure at all n locations
tcagngtgcnccggcacgtaacggtccagaattcccgggtcgacccacgcgtccgcaaactagaagtattattattcttccatttccattaaaaagaaaatatcataaatgggtattttcacattcgaggacgaaatcacctcccctgtggctcctgctactctttacaaagctctagttacagatgccgacaacatcatcccaaaggctcttgattccttcaagagtgttgaaaacgttgagggaaatggtggccctggaacaatcaagaagataactttcgttgagggtactaactcactcactaatcactagattcatttcattattattccatctctacctatctatatgttgcaatgtatgaatggacagatggagaaaccaagtttgtactgcacaagatagaagcagttgatgaggcaaacttgggatatagctacagcgtagtgggtggtgctgcgttgccagacacagcggagaagatcacattccactccaaattggg

SEQ ID NO: 245174 - DNA, 505 bp, Glycine max
  unsure (1)..(505): unsure at all n locations
taactgtgacgcctgcaggtacaggtccagaattcccgggtcgacccacgcgtccggcatgatgtgttttctgggtgtggttcacttcactgttgattcaggcacgctgtggtggaggaactagcggagtttggtgccacagtgtacacttgttccaggaatgaatcagagttgaatgcatgcttgaaggagtggagcagaagggattttcggtttctgggttggtttgtgatgcgtcttctccaccccaaagagagaaactcattcagcaagtggcaactgccttcaacggcaagctcaacatacttttgcttggcaacaaacaagttgttaatgagataacatctcaaacgccgattaagccgatggcagaaacgcatgaagtttcaaccttggtgactttcctttgtctgccagcagcatcctacatcactggacagattgtttctgttgatggaggattcactggtaatggatttcaaccaacatgagaaattcttaaagn

SEQ ID NO: 245175 - DNA, 508 bp, Glycine max
  unsure (1)..(508): unsure at all n locations
ttaagcgtgccgccggcaggtaccggtccagaattcccgggtcgacccacgcgtccgcccacgcgtccgcagagatcggagcgtggaacctctctctctctctctctctctctgcggaaaccggaatatctcagttctctgatcagatccatccgacgtcgtttcagtgataatggctccgttcagcggcgatgagacggcaccgtttttcggcttccttggagccgcagctgccctcgtcttctcctgtatgggagctgcctatggcacagcgaagagtggcgttggcgtggcttcgatgggtgtgatgagaccagagctggtgatgaagtctattgtccctgttgttatggctggagttttgggtatttatggccttattattgctgttattatcagtactggcattaatcccaaggccanatcttattacctctttgatggttatgcacatctctcctctggtcctgcctgtgggctggctgggctctctgctgggatggctatg

SEQ ID NO: 245176 - DNA, 386 bp, Glycine max
gtagccgtcgtaaattctagggtccacccgacgcgtccgcagaaatatcattttccgagacaatcccatcttccaattccatcttcaatatttcgtcgcatcgacaatcttcgcgaacgaaaacacagaaccctatacagatccattccatatccatgtcaggtgttggccctctatctcatgattgggaacccgtcgtcctccgcaagaatgctcccaccgccgccgccaagaaagacgagaaagccgtcaatgccgcccggcgctccggcgcggaaattgaaaccctaaaaaagtataatgctgggacaaatatagcagcatctagcagcacttcattgaacactaagatgctggatgatgatactgagaatctagctcatgat

SEQ ID NO: 245177 - DNA, 391 bp, Glycine max
  unsure (1)..(391): unsure at all n locations
ccgtccgaccacgcaaccggttcaggttccgcctcagaatgcgatgccaggtcccaacggtggtggtggtgccggtggtgctggaaaccagttcgtaacgacgtcgctttacgtcggagatctcgacccgaacgtcacggacgcgcagctctatgacttgttcaaccaattggggcaagtcgtgtccgttagggtttgcanggatttgaccagccggagatcgctcggttatggttatgtcaactttagcaaaccgcaagaagctggtaaagcaatggatggtctgaacttcaatcctcccaataacaaggccaaccgtaataagtaatcgcaacgtgatcccagtatccgttaaagtggacaaaggaatatatttaataagaatttgggt

SEQ ID NO: 245178 - DNA, 440 bp, Glycine max
  unsure (1)..(440): unsure at all n locations
gggtcgacgcacgcgtccgaccacgcgtccgatcggatcgatcaagcatcagggagctttgagggttgattctctggtgtagtagcaggcagcacaatagaaaatgttttttgacggatatggatatcatgggacatcatttgagcagatatatcgatgctacccagcttcctttattgaaaagccccaaatccaaagtggtgacaaaattatcatgcctccatcagcccttgaccgtctagcatctctgcatattgattacccaatgttgtttgaactccgtaatgatgctgccgaacgggtttctcattgtggggttctggagttcattgctgangaaggcatgatatacatgccatactggatgatggagaacatgcttttaaaagacggggacactgtcaaagtgaaaaatgtgacacttccaaaggggacatatg

SEQ ID NO: 245179 - DNA, 387 bp, Glycine max
aattcccgggtcgacccacgcgtccgaccacgcgtccgatttagttccccaaataaacaataccaatgttgacaagagtgtagcagccattcatgcaacggtgttcagctgtcttcgaaggcgtgaggttggggaacaactatatgatcctgttagaaatactgtgactgttgtttatgaggaatatagaaatcaatgtgcagccaattctttgagctcgaaaggaatgtttcaactgatccaaagaaaaggttcttcaaggaatctgatggctcttgttaatgatgatggatctgtggcaaaggcttggcctgttaatttagttgactgtaatgggaagcctgtatggtgccatggacctgagaatggagttggacatccaatgta

SEQ ID NO: 245180 - DNA, 459 bp, Glycine max
ccgggtcgacccacgcgtccgattgtttccttttgagacccgacgacagtacttttattctaccgcatttgggttatctcgtgcactgtatcgacttcaacagcagcaaggtgctgatggccatggttcaacaactgagagggaggtgagagttgggagattgcagcgccaaaaggttcgtgtctctcgaaatcgtgtcctggattctgctgcaaaagttatggagatgtattctagccaaaaagctgtacttgaagtagaatattttggtgaagttggcactggtctgggtcccacccttgagttttatacaattctaagtcatgatttgcaaaaagttggactgcaaatgtggagattctagtcttcagacaaacatcaaatgggaatagatggagatgaaaagaacaagaacagtgcaagctccgggcctaatttggctggagatggggaacttgt

SEQ ID NO: 245181 - DNA, 339 bp, Glycine max
cgtccgatggattaaaggatagtcaaactgtcctaagatatgactatggaaaatattatgcctcaaaaaccatttttgaggatggaaagaacagaatggtcttattgggttgggttaatgaatcctcaagtgtttcggatgatatcaagaaaggatgggctggaatccatactattccaagggccatctggcttcataaatctggaaaacagttggtgcaatggccggtggtggaacttgaaagcttacgtgtgaatcctgtccactggcccaacaaagtggtcaaaggtggtgaaatgcttcaagttactggtgttacttgcgcacaagctgacgttg

SEQ ID NO: 245182 - DNA, 480 bp, Glycine max
  unsure (1)..(480): unsure at all n locations
tagccgtccagaattcacgggtcgacccacgcgtccgtatagaagagccttccatatatagcctcccaaaaaaatgaagagtactacctctttggctctctttctactttgtgccctaacttcatcatatcagccttcagccaccgctgatattgtattcgacaccgaaggcaatcctattcgaaacggcggcacatactatgtgttgccagttataagaggaaagggcggcggaatagaatttgccaaaaccgaaacagaaacatgccctctcactgttgtgcaatctccctttgaggtctcaaagggtctaccactgataatttcatccccatttaaaatccttgacatcaccgaaggacttattttgagcctcagtttcacttatgtacccccctgtgcctcaactccttctcggtggancgttattctcaagggtctgccanaagaactccatgtcanactcactggctacaaaaa

SEQ ID NO: 245183 - DNA, 420 bp, Glycine max
ggtcgacccacgcgtccgagaaaacctaagcttagaattagaaacaaagaaaagaagaaaggaaagaattgatcgttgaaaatgcagggaggaaagaaagcgggagagtccattaaggaaacagctacaaacattggtgcttctgccaaggctggcatggagaagaccaaggccactgtccaagagaaggcagaaagaatgacagcacgtgatccggtgcaaaaggagttggcaacccaaaagaaagaggcaaagatgaaccaggcggagctggacaagcaggcggcgcgtcagcataacacggcggccaaacagtccgccaccacggctgggcacatgggacatggccaccacaccaccggaaccgggactggaaccgccacgtattccaccaccggggaatatggtcagcccatgggg

SEQ ID NO: 245184 - DNA, 372 bp, Glycine max
gggtcgacccacgcgtccgaccacgcgtccgcttttgctttgagatggcaaagtcgaagaatcacacagcacacaatcagtcctacaaggcccacaaaaacggcatcaagaaacccaagaggcatcgccacacttccaccaaagggatggatcccaagtttctgaggaatcacaggtacccaaggaaccacaccaggaaaattggtgaaacagccaccgaggaaaattgaaatggcactttctaacggacccattagggtttttatacgcacattttttgggaaaaactttgtgtgaactcaactttcaccagtataattaatttgtttacagaaaatgcagtacttatatcccaaacaaaaaacaagcaac

SEQ ID NO: 245185 - DNA, 252 bp, Glycine max
gggtcgacgcacgcgtccgaaaactccagcaggatttgcattgttttcgttgaaataagcaaaagagatcaaaggaagataacgaaaacttgattatattataagatagcaataaaaataagaggtagcggacgcgtgggtttttttttttttttttttttttttttttttttttttttttttttttttttcttttgtttttttttttttttttgtgtctttttttctttttttttcttttttgtttttttt

SEQ ID NO: 245186 - DNA, 425 bp, Glycine max
  unsure (1)..(425): unsure at all n locations
ggtccagaattcacgggtcgacccacgcgtccgcgaccatgttggagatgttccattgtctaagaaaattctcgctggatttacaactggtgctatggcaattgcagtggcaaatccaactgatcttgtgaaagttagacttcaagcagaaggaaaattgcctcctggcatgcccaagcgctactctggatcattaaatgcttattcaacaattatgagacaggaaggagttggagcactttggactgggatcggtcncaacatagcaaggaatggtattattaatgctgctgaactagccagctatgatcaaatgaaacagactaattttgaaaatcctggattcaccgacaatgttgttactcaccttcttgctggtccaggagcaagattttttgcagtctgtgttggctcccctgttgatg

SEQ ID NO: 245187 - DNA, 508 bp, Glycine max
  unsure (1)..(508): unsure at all n locations
taactgtgccgccggcaggtacaggtccagaattcccgggtcgacccacgcgtccgattcctcgatgccttcctcccccaattccaattgcacaccgacgaaaggcgcaggtggtgaaatcgtgtcaccaaaacgagagctctgcttcggctcacacagaccactcctcaaatccaaaggcatccgctgctgatggaaatggaatcatggaaaaacctgtgtgcagaaattgcttgggaagcggtgctgtgctttgtgatatgtgtggtggcacaggaaaatggaaagctcttaaccggaagcgagctaaagatgtttatgaatttactgagtgtccaaattgttatggtcgaggaaagcttgtctgccctgtttgtttgggaactggttttactaataatacaggtctccctaaggngcctgaaacaacgaaactgcttgataagatttataatggacggctacttccaaactctttaaaaccgttaatctgaacaaaggggttgtg

SEQ ID NO: 245188 - DNA, 230 bp, Glycine max
gtcgacccacgcgtccgcacacacacagctagcagatattacatacacgtgaatcactaattaagccatggagaagaaatcaatagctgggttgtgcttcctcttccttgttccctttgttgctcaaaaatttttggtgcaaactaaggaaaaaacttccaaaaacctgcttgtaaaataaaggggccaatccttaacaattggaacttccaagattaatggaagaacaa

SEQ ID NO: 245189 - DNA, 290 bp, Glycine max
  unsure (1)..(290): unsure at all n locations
attcncgggtcgacccacgcgtccgaaagagggttagagaaataaaaagagaaagccgacagcacatagatagagagaggaaaacgacttaatattctttttccttgagacctgaaggggctaaggaaaattagaaggacacacaagtataaaggcggtgaaataaaagagaaagacaagaagaagacatgggaagacaccttgttgtgacaaagaaggggtcaagaaagggccttggactcctgaagaagacatcatattggtgtcntatattcaggaacatggtcctg

SEQ ID NO: 245190 - DNA, 492 bp, Glycine max
  unsure (1)..(492): unsure at all n locations
ttcagccggcangtacgcgtccagaattccagggtcgacccacgcgtccgcaggattctgatcctattgtgttggccttcgggatcggagtaatgattaacagggacagtcgggggcattcgtatttcatagtcagaggtgaaattcttggatttatgaaagacgaacaactgcgaaagcatttgccaaggatgttttcattaatcaagaacgaaagttgggggctcgaagacgatcagataccgtcctagtctcaaccataaacgatgccgaccagggatcagcggatgttgcttttaggactccgctggcaccttatgagaaatcaaagtctttgggttccggggggagtatggtcgcaaggctgaaacttaaaggaattgacggaagggcaccaccacgagtggagcctgcggcttaatttgactcaacacggggaaacttaccaggtccagacatagtaaggattgacagactgagagctctttcctt

SEQ ID NO: 245191 - DNA, 388 bp, Glycine max
cccacgcgtccgacagtttttgtcatcactctctcagctgatcggtgcttatagatccagcgtcagcagattcaatttgacactggaagcaatttctcatttcaaagattaagtgaaaacatggttgtccttgctgcatccattgtgagcaaatctggcaaagttctagtttctagacagtttgtggacatgtctcgtatcagaattgagggtcatctagcagcatttcccaagtttataagcactggcaagcatcacacatatgttgatacggagaatgtgcgctatgtttaccagccaatggaagcactatacctgcttcttgtaacaaacagacatagcaacatactgggagatttgacaactctgagacttctctccaaacttg

SEQ ID NO: 245192 - DNA, 434 bp, Glycine max
  unsure (1)..(434): unsure at all n locations
ccacgcgtccggataaacttctccactatgcactcatcgatctctccaaaaagcatggccccttattctctctctccttcggctccatgccaaccgtcgttgcctccacccctgagttgttcaagctcttcctccaaacccacgaggcaacttccttcaacacaaggttccaaacctctgccataagacgcctcacttacgacaactctgtggccatggttccattcggaccttactggaagttcgtgaggaagctcatcatgaacgaccttctcaacgccaccaccgtcaacaagctcaggcctttgaggacccaacagatccgcaagttccttagggttatggcccaaagcgcagaggcccagaagccccttgacgtcaccgaggagcttctcanatggaccaacagcaccatctccatgatgatgctcggc

SEQ ID NO: 245193 - DNA, 361 bp, Glycine max
gggtcgacgcacgcgtccgacgcgaaccctccaacgccgccgccctccgccgcgccgcagtagtctggttccgcaacgacctccgcctcctcgacaacgagtgcctcaccgccgccaacaacgagtccctctccgtcctccccgtctactgcttcgaccccgccgactacggtaagtcggcctccggcttcgacaagaccggcccctaccgcgccgccttcctcatcgactctgtctccgacctccgccgtaacctccaggctcgcggctccgatctcgtcgttcgcgtttgggaacccgacgcggtgctggtggagctcgccaatgccgtccggggccgacgccgtgtacgccgcacgag

SEQ ID NO: 245194 - DNA, 322 bp, Glycine max
ggtccagaattaccgggtccacgcacgcgtccgacagattccaaaccaggattgaggaagccagtgttcaccaaggtcgatcagcttcgtccagggaccagcgggcacactttaactgtgaaggtggtcgatgctaagatggtgatgcagaaaggtcgttctgatggtcctcaatcccgccaaatgcgaattgctgaatgtttggttggtgatgagactggaatgatcatattcactgccagaaatgatcaagtggatatgatgaaagacggtgctactgtgaccctgcgcaatgccaaaattgacatgttcaaaggatcaa

SEQ ID NO: 245195 - DNA, 508 bp, Glycine max
taactgtgacgcctgcaggtaccaggtccagaattcccgggtcgacccacgcgtccgcaaaatactactagtaccttaataaacaaataaataaataaggtgagagaaaaaaaaaaatgtagaggaacctggaaacttccacgaggttttcggtgaaaaccaaatttggggctttgcatcgcaagatttaccctttccaatcaaaattcttctgccttcccctaccaattctttctctcaaccgatttatctgagtgaggggtttggccaatgacgagtggttttggtgaatcaacgagagcgtctgcaccgagcccatcatgctcggggaacagttcaaacgatgccggtgaatttgaatgcaacatatgcttcgatttggcgcaagaccctgtgatcacactctgtggtcacctattctgttggccatgcctttataggtggctccaccatcactcccattctcaagaatgccctgtttgcaaggcccttgtgcaggaagagaaag

SEQ ID NO: 245196 - DNA, 515 bp, Glycine max
  unsure (1)..(515): unsure at all n locations
taactgtgacgccggcaggtacaggtccagaattcncgggtcgacccacgcgtccggcgatttgtctggttaattccgttaacgaacgagaactcaacctggcaaataactaagttgaggtaaacctccaagggcaacttcctaaaaggactatgggcgcttaaggcaccggaatttgagggaataacaagtccgttatgcccttaaatgttccgggccgcaagcgcgctacactgatgtattcaacgaatctataaccttggccgacaagtcccggtaatctttggaatttcacaccgatggggatagatcactgcaattgttgggcttcaacgaggagatttcagataacccgagtcaccaaatccccgttactacatccccgccccttgtgtacacacggccgtgtctcccatagcgtttaacagcccccgtgaaaagtttctcgttactggggaaatcatcagctgttcgcttcccgagaatgttacgagaacgctcacgggaaccttatg

SEQ ID NO: 245197 - DNA, 406 bp, Glycine max
  unsure (1)..(406): unsure at all n locations
attcnagggtcgacccacgcgtccggagaaacatggcttccttaagctccttagtgctgctccttgcagctctaattctatcccctcaagttcttgcaaactatgagaatcccccagtgtacaagcctcccactgagaaaccaccagtttataagcccccagttgagaagcctcctgtttacaaacctccagttgaaaaccccccaatttataagcctccagtagagaagccaccagtgtacaagcccccagttgagaaacccccagtttataagcccccagttgagaaaccaccagtgtacaagcccccagttgaaaaaccaccagtgtacaagcccccagttgaaaagaccccagtgtacaagcccccagttgagagaacaccagtgtacaagcccccagttga

SEQ ID NO: 245198 - DNA, 445 bp, Glycine max
attcacgggtcgacccacgcgtccgaacttattgaaaatgatctcattttaattggtagcacagccattgaagacaagcttcaagagggagtaccagcttgcatagagactctgcaaagagctggtattaaaatttgggttcttacaggggacaagattgaaacagcgataaacatagcctatgcatgcaacttgataaacaatgagatgaagcaatttgttattagttcagaaactgatgaaattagagaagttgaagacaggggtgaccaagtataaattgcacggtttattaaagaagtggtgaaaagagagctgaagaaatgcctcgaggaagcacaaagctcctttcaatcgctacgttggacataattagcacctgtagttgatggaaaatgtctgatgtatgcgttggatccaagtttaagagtgatgctgctgaatc

SEQ ID NO: 245199 - DNA, 444 bp, Glycine max
tccacccacgcgtccgagtttattcatctaccgtcgggagggaggggatgaccacggcgccccgtgcgcccggcctcctcgtcctcgcgacaaacacaaaccccggcgcttcgtgcgccaaggaactcaaatctgttaagtgcgactcccgggggcccggagacggtgtcccgcgggagtcgtcacgacacaacatttacatacaatgactctcggcaacggatatctcggctcttgcatcgatgaagaacgtagcgaaatgcgatacttggtgtgaattgcagaatcccgtgaaccatcgagtctttgaacgcaagttgcgcccgaagccattaggccgagggcacgcctgcctgggtgtcacacatcgtttccccaacgcaaacatgtaacaatgttgctgccccgggtgtatgctgaactcccgcgagcaaccgcctcgtg

SEQ ID NO: 245200 - DNA, 497 bp, Glycine max
  unsure (1)..(497): unsure at all n locations
aagtgtcacgcctgcaggtaccggtccagaattcacgggtcgacccacgcgtccggccagtagtcatatgcttgtctcaaagattaagccatgcatgtgtaagtatgaactaattcagactgtgaaactgcgaatggctcattaaatcagttatagtttgtttgatggtatctactactcggataaccgtagtaattctagagctaatacgtgcaacaaaccccgacttctggaagggatgcatttattagataaaaggtcaacacaggctctgcctgttgctttgatgattcatgataactcgtcggatcgcacggcctttgtgccggcgacgcatcattcaaatttctgccctatcaactttcgatggtaggatagtggcctaccatggtggtgacgggtgacggagaattaaggttcgattccggagaaggagcctgaaaaaacggtaacaaaatcaaagaaaggagcangcgcccaaatttaccaatcctgga

SEQ ID NO: 245201 - DNA, 204 bp, Glycine max
gcgtccgaatcctatatcttttatgagagctacaggacaaaagccacaacgcatcatattttatatggatggtgtgagtgatggacagttttatcaggttctactgtttgagcttgatgctattcgaaaggcatgtgcatccctggaacccaattatcagcctcctgtgacttttgtggtggttcagaagcgtcaccacacaag

SEQ ID NO: 245202 - DNA, 422 bp, Glycine max
tacggtccaaaattaccgggtcgacccacgcgtccggaatatattacattaagaaagcccaaagaaagaagaagatggcgtccgagtgcaaaggtaagagctcatggcctgagttggttggagtggaaggaacggtggcggtggctacaattgagagggagaatcctttggtggatgctaacactgtgcttaaaggatccatcgtcaccgctgattttcgatgtgatagggttcgggtttgggtcaccaaacatggaattgtttatcaggctccaagaattggataagaagtgtttacactaaagcacttcatatatatgttatgagtcatgaatataatagtatttaaataaggagttattcttcaaattatggtaatttgattgaaaataaaaacattgactattaaaaaatttgttttt

SEQ ID NO: 245203 - DNA, 449 bp, Glycine max
ccggtccagaattcccgggtcgacgcacgcgtccgcggataacgaaagcaattttgatttgtgtcgaggaaaggacaggtcttagaacccttcttttcttcctcgtgtgcgtgaaaacgaagcaacgccacacgatggtgttctacttcaaagcgcgccctgaagccggcgatttcaccatcttcatgggcctcgacaagttcgagaacgaggaactcatcaaatacggttttcccgaagacatctggttccatgttgataaaatgtcttcagcccatgtctatgtcaggctgcacaaaggccagactctcgatgacctgagtgaggctttactggaagattgtgctcagcttgtcaaagcaaattcaatttcagggaattaagtgaacaatgttgaagttgtttacactccctggtctaaattaaagaaaactgcttcaatggatgtt

SEQ ID NO: 245204 - DNA, 479 bp, Glycine max
  unsure (1)..(479): unsure at all n locations
gcctgcangtactagtccagaatgcccgggtcgacccacgcatccgctgaatatctcacgccgaagaccgtgcgttgaaatcttgcaaggacgagatccaagcatcgttgttttccttcccagaatttacgctcttcttactatcatcaagatacaaaatggaatatcgacggaccagtggtaggcaggaaaccggtggccgtgacagaagacaatctaaaagggaacaggcatatcaggactctcttattgaggatttgtcacaggattttcgtttgccaatcaaccacagggcaacaaaaaatgttgatttggacaacgtagagcaagcatctttggacacacagataacatcatctaatattggctttaagctcctccaaaagatgggatggaaaggaaagggtcttgggaaggatgaacaagggatcattgagccaatanaatcctggatttagagatcaaacgttggggattgg

SEQ ID NO: 245205 - DNA, 498 bp, Glycine max
  unsure (1)..(498): unsure at all n locations
aactgtcacgcctgcaggtaccggtccgagaattcacgggtcgacccacgcgtccgcccacgcgtccgcatttgaggaacttgccatgggagtgcacagaggaggaactgattgagcttgggaagccgtttggcaaagttgttaacacaaaatgcaatgttggggcgaatagaaatcaagcttttattgaatttgcagatttgaatcaagccattgcaatgatatcgtactatgcctcatcatcagagcctgctcaagtacgtgggaaaactgtatacctacaatattcaaataggcaagaaatagtgaataacaaaactactgcagatgttcccgggaatgtattgttggtaacgattgagggtgcagatgcacgtcttgtcagcattgatgtcctgcacttggttttttcagcctttggatttgtgcataagattaacaatttcgagaagacagcaggatttcaggcactggtgcaattctcagaatcagagactn

SEQ ID NO: 245206 - DNA, 501 bp, Glycine max
aactgtcacgcctgcaggtacccgtccagaattcacgggtcgacccacgcgtccggcaaggcaccactctgagaagaaacgacgactaaacgtagatcaggtgaaggccttggagaagaacttcgaagtagagaacaaactggaacctgaccgaaaggtgaagctcgcgcaagaactcggcttgcaaccaagacaagttgcggtttggttccaaaaccgccgtgccagatggaaaacaaagcaattggaaagagattacggcgtcctcaaagccaattacggatcacttaaacttaactttgacaccctccaacaagacaacgaagccttactcaaacagataaaggaattgaaatcgaggctggtgcaagaagagaacaacaacaacactgaaagcgatgtttcggtgaaggaagagatgatagccactctgcaggatagtaacccgctctgtgaatccgccattccctgatcggactccaaggagttgagttacgattg

SEQ ID NO: 245207 - DNA, 419 bp, Glycine max
ggtcgacccacgcgtccgcacacgcgtccgtctctgtaagccttgctttcaattttctccttacaaaaaaatcctttcccttctctagtccccataactagcaaaagaagccaatagaaaactgttccatatagtttcccattcaaacttgttttgattttcattttaactcaatggagaatagaacaagctctgtactcccacctggcttcaggtttcaccccactgatgaggaactaattgtgtactacctttgcaaccaagcctcatcaaggccatgccctgcatcaatcattccagaagtggatatctataagtttgatccatgggaattacctgataaaacagactttggagaaaaggagtggtacttctttagcccacgagagaggaagtatccaaatggggtgaggcctaat

SEQ ID NO: 245208 - DNA, 369 bp, Glycine max
taccggtcctacattcacgggtccacccacgcgtccgatttcatacatatgttcacgttactatcgggctccagaactaatatttggtgcaactgaatacacaccttctattgatatctggtcagctggttgtgttcttgctgaacttcttctaggacagccattgtttcctggagaaaatcaagtggaccaacttgtggaaattattaaggttcttggtactccgactcgagaggaaatccgttgcatgaacccaaattatacagattttagattccctcagattaaagctcatccttggcacaaggttttccacaagcgaatgcctcctgaagcaattgaccttgcatcaaggctttcccaatattc

SEQ ID NO: 245209 - DNA, 354 bp, Glycine max
tgacggtccagaattcacgggtcgacgcacgcgtccggacaaatttgcttgctactgtcttgatcttcctaattgtgatatacttccaaggtttccgtgtggtcttgcctgtaagatcaaagaatgctcgtggacagcagggttcatatccaatcaaattgttttatacctccaacatgcccatcattcttcagtctgcccttgtttccaatctctacttcatctcccagctgctccaccgtaagtacagcggaaacttcttcgtaaatttattgggaaaatggaaagaatccgaatatggaagtggtcagtctgttcctgttggtggcattgcatactatatcactgcaccat

SEQ ID NO: 245210 - DNA, 508 bp, Glycine max
  unsure (1)..(508): unsure at all n locations
aactgtcacgctgcccgtaccggtccagaattcacgggtcgacccacgcgtccggactgcactgacctacattgattctgatggaaattggcatagagctagcaaaggggctcctgagcagataatcaccctttgcaactgcaaagaggatgtcagaagaaaggtccatgctgtaattgataagtttgctgagcgtggacttcggtctttaggtgtcgcaagacaggaagtacctgaaaaatcaaaagatagtcccggtggaccatggcaatttgttggtctgctaccattgtttgatcctcccaggcatgatagtgctgaaaccattcgaagagctcttaaccttggtgtcaatgttaagatgattactggggatcagcttgccattgggaaggaaacaggcccgaaggttgggatgggaacaaacatgtnaccttcatcggcattgcctgggcaagacaaggatgccttcaattcagctcctccacttgaagagttgattgagaag

SEQ ID NO: 245211 - DNA, 488 bp, Glycine max
ggtccagaattcacgggtcgacgcacgcgtccgtgatcactcagttacaagagagaaaattgaaggaagagctataacaccgagaaagcaaaatggcaagtctactatgtcaagggaagagttcgtggcctgaggttgtgggaacaaacggggtggtagcagtggagaagattgagagagagaatgataatgttcgtgcaagattggtgggagaaggatctatggtgacaatggacttttggtgcaaccgagtttgggtttgggtcgacaaaattggggtggtcactcgtgtgccaaagataggttagctaggcatgcaccttgtatgtatgtatcatgtatggaataatatatatatatatataatagccattaattacttacattaatggttcttatatatatatatatatacttcttactcttaaataaggcatcgcatgctcaggacgattatgcacattaatcccatcatgtcttcaacttga

SEQ ID NO: 245212 - DNA, 508 bp, Glycine max
  unsure (1)..(508): unsure at all n locations
ctaagcgtgacgcctgcaggtactagtccagaattcccgggtcgacccacgcatccgcaagaataatacgaaacccacatcatgagcacactttgtatggcggaaaatatgaaggaggtggaagttgaagatggatatgtcttgaaagaagagatccatctcacggtgctaaaaacctctctgttcttcgcgggcgatggcttcagcgtctacgattgcaaaggtcaactcgtgttcagagttgactcttatggacccgacactcgcgacatagacgaactcgttctcatggatcctaacggacgttgcctcctcaccgttcgtcgaaagcggccgagtttgcatcaacggtgggaaggtttcaaaggggagagaatggacggtgataaacccatcttcaacgtgaggagagcgtccattataggacggtcgcgtgcgagtttgacggtggagatgtacgattaccccggtgaggagtacaagatcgaggggtgcntctcgcaacgtg

SEQ ID NO: 245213 - DNA, 507 bp, Glycine max
gtaactgtcacgccgtcagtaccggtccagaattcccgggtcgacccacgcgtccgacaaaaagctcttttccttctaaatttgattccttagttcagcattctattattatatatggcttcttcaccttcctcagaaaacaaaaacctagagggagtagctggtggtgccggagagaaacccattccacttggtgagaacgttctgcagaagcatgctgcattctttgacttgaataaagatggtgtcatctacccatgggagacttttaaagggttgcgtgaaatcgggactggggttttgctgtccgttggaggtgctattttcatcaatgtgtttctcagtcaaagtactcgtcccggaaaagttccatctatactttttccaatttaaaattaaaaatatccaacgcggcaaacacggcagtgacactggagtctacgatactgaaggaaggtttgtaccttcaaaatttgaagaaattttaacaagcatgcacatacacat

SEQ ID NO: 245214 - DNA, 506 bp, Glycine max
  unsure (1)..(506): unsure at all n locations
tagctgtgacgcctgcaggtaccggtccagaattcccgggtcgacccacgcgtccggattcttggggtcaataacgagcagcgtggcatgcctgatttgaattctctaagggaggtgatgcaaaacccagagtttctacgcctgttttcctcacccgagacactgcagcaactcttgtcttttcagcaagctcttctgtctcagcttggtcagcaacaatcaacacaggaaccaggtcaaacaggtggaggcactggaccgatgaacaacttggggctggagatgttatcaagcatgtttggtggactcggagctggtagcctggctgttcctaacagatcanatgagccgccggagcaattgtatgccacccaactttctcagcttcaggagatggggtttcttgacacgcangagaacataaaggctcttattgctacatcanggaatgttcatgcagcagttgagccgcttttggggaactccggacagtagcaggttgtaag

SEQ ID NO: 245215 - DNA, 380 bp, Glycine max
tagccgtccagaattcaagggtcgacccacgcgtccgggagaagcgtacttttttggttggttattcattgtcaattgcagacctagcaatctgggcaggtcttgcaggttctggaaagagatgggaaagtctaaggaagtcaaagaaatatccaaatcttgcacgatggttcaattcaatagtggaagaacatggtactgccttaaatgaagtcacatcagtatatgctggcaaaaaaggattgggtgaaccaacagcaaccaagtcaaaagaacagtcagtaaacactgataaagtgaagaaggtgaatggagatgtgtctgagaacaacaaaggaggaagcaaaccttcagcagaaatagatcttccagatgctgaa

SEQ ID NO: 245216 - DNA, 504 bp, Glycine max
aactgtcacgcctgcaggtaccggtccagaattcccgggtcgacccacgcgtccgttccattctctctgtgtatttccctacctctcccttcaagatgcagatcttcgtcaagaccctcaccggcaagaccatcacccttgaggtggaaagctctgacaccatcgacaacgtcaaggccaagatccaggacaaggaaggaatccccccggaccagcaacgtctcattttcgccggaaagcaacttgaggacggccgtacccttgctgactacaacattcagaaggagagtactcttcacctcgtcctccgtctccgtggtggcatgcagatcttcgttaagacactcaccggcaagaccataaccctagaggttgaaagctccgacaccatcgataacgtcaaggccaagattcaggacaaggaaggtatccccccggaccagcaacgtctcatcttcgccggaaagcaactcgaagaacggcggcacctccgccaataaaaca

SEQ ID NO: 245217 - DNA, 308 bp, Glycine max
cgtctgggcacgatgtcacagaacaacaaaaggatgttggaaggaaaagctatggtgaaagaaacagacatgtcacccaagatgcagatccatgccatggcctctgcttctcaggctcttgatctctacgatgtttatgattgcatctctattgctgcccatatcaagaaggaatttgatagtgtgtatgggaatgggtggcaatgtgtggtgggatccaattttgggtgctatttcacccattcatcatggactttcatctattttgctctggagacccttaagttttcttatctttaagggaacat

SEQ ID NO: 245218 - DNA, 505 bp, Glycine max
ttaagtgtgacgccgtcaggtaacggtcaagaattcccgggtcgacccacgcgtccgagcccaggtttgaattgtgttctatgctaagattttgtgtcattgtcagatatataaggaggggtacaccagatgctggctttgctctttttgaatctgagtctctgaagtggccaggttttgtagagtttgatgatgtaaatgggaaggtattaacatactctgctcaagacagcatatacaaggtatttgacctaaaaaactatacaatgctgtactctatttctgataaaaatgtccaagagattaagatcaggtaatttttcttaccgtgcttgtattatttttacttttagaaaacacttccatccatagatgtgatgttctatggtcaattggtcatgcacaactttctgaaattatatcacattaactattaaatttttaagaatatattagttttttctacattttatagtttctttgggcgatcctggtttctatacaa

SEQ ID NO: 245219 - DNA, 427 bp, Glycine max
  unsure (1)..(427): unsure at all n locations
attccagggtcgacccacgcgtccgctaaaatagagactgtatttatcctgagggaaattgaggggcanggtgataataacagtaacagggatgagtgatatcatttcatttcagagggattaattattgttttatttttaagtgtggagtgctgtgcaggtcaaggcccttttacttgttcgtccggttgttcccatcttctctctcgtaccaatcaaatcacacttttgtgttgtgttgggaaaccctaaaccccgttttcggtgagatcgagatcgatcgaacatggatgaggagtacgatgtgatcgtgttgggcacgggtctcaaggagtgcattctcagcggtcttctctccgtcgatggcctcaaagttctgcatatggatangaacgactattacgggggagaatccacttcgctcaat

SEQ ID NO: 245220 - DNA, 309 bp, Glycine max
gggatgggggcattggcagcgtgcgtgaggtcaggatcacatctgggttacccgctggtgttagtgtggagaggttggacaagctcgatgatgagaagcatgtcttgaagtttagcatcattggtggtgatcacaggcgtgtcaagtatggttcaacgagtactttgcatgaggaggaagaggaataccgtgggaagacggtggcgatagagtcgtacgcggtggatgtcccggccgggactagcggcgacgatacgtgctcttttgctaatactatcatagcttgcaaccttaggtccttggctaaga

SEQ ID NO: 245221 - DNA, 510 bp, Glycine max
gtcaactgtcacgcctgcaggtaccggtccagaattcccgggtcgacccacgcgtccgggtttttatatttgatcttcagcagaggattgttcttggtgaacttcagaccccttttattaaatatgttgtctggtctgatgatatggaacatgttgctttactcagcaaacatgccattataatagctagcaagaaacttgtgcaccaatgcactctccatgagactatccgtgtaaaaagtggagcttgggatgaaaatggtgttttcatttatacaacactaaatcacatcaaatactgtcttcccaatggagataatgggataataaagacattggacattccaatttatatcacaaaggtctctggcaacacaatcttctgcttggatagggatggctatgattgcttatcttcagcagaagggctttcctgaggttgcactgcattttgtgaaagatgagaaaattcggttcaatttggctttagagagtgggaacattcaaatt

SEQ ID NO: 245222 - DNA, 553 bp, Glycine max
  unsure (1)..(553): unsure at all n locations
agcgcgcaggcancggcgagaggagntnggtgagtcgtagaagtgttacgcctgcaggtaccggtcaagaattnccgggtcgacccacgcgtccgacttgttcttcacatcatcctcatcatcttcttcaatcagttgactcttcgttcctccctctattctttcggatggagcccatggacatcgttgggaaggccaaggaagacgcttctcttcctaaagcgacaatgacgaaaattattaaagagatgttgcccccggacgtgcgtgtcgccagagatgcacaggatttattgatcgagtgttgtgtcgagtttataaaccttgtctcgtcagagtccaatgaagtctgtaacaaagaagaaagaaggacgattgcaccggagcacgtgttaaaggctttaggggttcttggatttggcgagtacattgaggaagtttatgcagcatatgaacaacacaagttggaaacaatgcaggattctttaaaaggtgcaaagtggagcaacagagctgagatgactgaggaagaagcattggctgaacagcaaag

SEQ ID NO: 245223 - DNA, 498 bp, Glycine max
  unsure (1)..(498): unsure at all n locations
ntaaaactgtcacgccggcaggtaccggtccagaattcccgggtcgacccacgcgtccgccgcgacccctccaacgccgccgccctccgccgcgccgcagtagtctggttccgcaacgacctccgcctcctcgacaacgagtgcctcaccgccgccaacaacgagtccctctccgtcctccccgtctactgcttcgaccccgccgactacggtaagtcggcctccggcttcgacaagaccggcccctaccgcgccgccttcctcatcgactctgtctccgacctccgccgtaacctccaggctcgcggctccgatctcgtcgttcgcgttgggaagcccgaggcggtgctggtggagctcgccaaggccgtcggggccgacgccgtgtacgcgcaccgagaggtctcgcacgacgaggcgaaggcggaggagagggtggaggcggccatgaaggaggagaatgtggaggtgaagtacttctggggaagcacgttgtat

SEQ ID NO: 245224 - DNA, 496 bp, Glycine max
taaaactgtccagccggcaggtaacggtccagaattcccgggtcgacccacgcgtccgggcaatgcaaatggcagcgaatatggttgtcttggagcgtgcttgtgattttttctttcgccatgctgcacaactttcaggtgttcccttgagaatggtggagagaagcagaaggcagttccctcttagaaaagcccgtgatgctgcagaagacatgctctctgggctactcaaagccaaggttgatggattcatgacattgatcgaaaatgtaaattggatgtgtgacgaggcacctcagagtggaaatgaatatgtaaacgaggtcataatttatttggaaattttggtttcaactgctcaacagatattgccatctcaagtccttaagagagttttacaggaggtttttgctcacatatcggagaagatagttgggactttagttagtgattctgttaagaggtttaatgtgaatgctattaatggaattgaagt

SEQ ID NO: 245225 - DNA, 316 bp, Glycine max
tcagcgtcgtcactgtttgtgtgtgtatcacgtgcagctaccaacgatggtgaagggtcgtcaaggagagcgcgtcagactctacgtgaggggtacaatccttggatacaaaaggtccaagtccaaccagtacgcagacacatccctgatccaaattgagggagtgaacaccacagaagaagtacgatcgtatgctggcaacaaaatggcctatatctacaaggctaaggtgaaaaaggatggaagccattacccctgcacattgggcaaggttaccaagcctcacggcaactcacctgagcacgttttaaatgct

SEQ ID NO: 245226 - DNA, 532 bp, Glycine max
  unsure (1)..(532): unsure at all n locations
gcaggcgtgcgacgcggaactgttacgcctgcaggtaccggtccagaattcacgggtcgacccacgcgtccgcatggtagcaattctcaagagacagggagaaaacgaatccgaagaaaccatcataggcttggcaaaaagtctcatgcaactctcgcgtgtccaacaacaaagcaataagcctcttctcaaaaccttttctccaacggagttcgagtgcaaaacttgtaaccgcaagttttcatcttttcaagctcttggtggccacagggctagccacaagaagcccaagttcgaagctgaagaactcaaagaagaagccaggaagactaaacccaggatgcacgagtgttcaatttgtggcatggaaattcctctggggcaagcaacggggggtcacaagagaaaacacaaaaggtgcaattagtgaaaacgacaataattatgaaacggtgtccttcataaagcaagcaatttgaaaaaccccgggttttgaacgaatgaattacaagaaggtcatgttcntggagaa

SEQ ID NO: 245227 - DNA, 352 bp, Glycine max
ttcagggtcgacccacgcgtccgctccaatctctatcctcaattcaacccttttggtggcaacttctatttatgctacaaaaaatgctgcgattgcacttcaccaccgcactctctcactttgcttccaaggcctcaccttttcctctcacacccgtttccgttaccgtttccagagctattgtttgcaacaaccccaccaggttcagatcgcaaatgggttctttctccacttcctcttcctcttcctccaaactcttgttccgccagctttttgagaaggaatcttccacctacacttaccttctcgctgatgcctcgcacccagaaaaacctgcacttctgattgaccc

SEQ ID NO: 245228 - DNA, 349 bp, Glycine max
attcaagggtcgaccgacgcgtccgcttcagcatgatgcacatggggtttaacaacttctctgggaagttccctccagagattgcaagtattcccattgtggtgctaaacatcacaagtaaccagttttcaggtgaaatccccgaagaaattggcaacttgaagtgtttgatgaatcttgacttgtcttgcaacaacttctctgggacgtttccaacaagtttgaacaaattgacagagcttaggaagttcaacatctcatacaaccccgtaatatccggtgtgggtccatcaacacgacagtttgctacctttgagaaagattcatatttaggcaacccctttcggat

SEQ ID NO: 245229 - DNA, 521 bp, Glycine max
  unsure (1)..(521): unsure at all n locations
ggcgctgcaagtgtcacgccggcaggtaccggtccagaattcccgggtcgacccacgcgtccgatctagccttctttctttttttcaatttccaaatcacgaaactcaagaagatggagaaagcgatcaacagacagaagattttgcttcatcatctcaacccttcatcatccacccaccccaacgaatcatcctccctccatgcttcagcatgtgtggcgggggatagcgctgcttatcaaaggacatcgacattcggggacgatgttgtgatcgtggctgcttatcggactgctcattgcaaagctaaacgaggtggtttcaaagacactcttcctgatgatctactggctcctgttttgaaggctgtaattgagaaaaccaatgtgaacccaagtgaagttggggatattgttgtacgtagtgtattggctcctggagctcagggagctagtgaatgccgaatgggtgcattttatgctggttttcccganactgtggctgttangaccgttaatagn

SEQ ID NO: 245230 - DNA, 517 bp, Glycine max
tacaaccgtgcagccggcaggtaacggtccagaattcccgggtcgacccacgcgtccgcccacgcgtccggtactagtacgtagtacattgaggtcggtgcaaattaaactaattaaaaccatatatatgtaatgagatacccttaattattctgagtaatcagcaccgactttatgatccactgtttcaattgaaactgagttggtatttaggtgatttgtcaggcctgaagagaccaaagtgtcgttcgatttcaggaccatccttctcgttttcatcaaacatggcaaagaggtaagtcgcgatgggtgcactaggcctcttgggggttccacctttggcatgacggaccaaattgcccgtaagacgttcctgccgttttgaacatttgctccaacgcttgcccaccaggccgtagggtttttaaccactgggccggcgggacgggccgcgatggcgtgggcggggttggcggggcagccttccctccatggcgggtggtggtgagtcgggctg

SEQ ID NO: 245231 - DNA, 378 bp, Glycine max
ggtccaaaattcccgggtcgacccacgcgtccgcaccaccaccaccaaccaaccaccccttccagacaaaaaagtggtgtcatcatgtgagaagaagaagaagaaaagtgtgagtgcagaaaagaagagtggtgggcgagctcggaagaacgtgtacagaggaatcaggcaaaggccgtggggcaagtgggccgcggaaataagggacccacataagggcgtccgcgtctggctcggcaccttccccaccgccgaggaagccgcccgagcctacgacgacgccgccaagcgcatccgcggcgacaaggccaagctcaacttcccggccaccgctccgccaccctccaaaaaacaacgctgccttaggcctgattccac

SEQ ID NO: 245232 - DNA, 277 bp, Glycine max
tagccgtccagaattcacgggtcgacccacgcgtccggttttagcaatggtgaaactggtgatgaaggacgtccaagaagagcatttgaacgccacagtgggactggacgatgaaatgaattcaaacgggaacggtctggacctggtaactggggtacacagaatgatgacattgctgacgtgactgaggaagtggtgaatgaaactgaaaacgttcttgctgatgacaagcctgtacgagacgaagatgcagcagaagggaacaaggacagtcctg

SEQ ID NO: 245233 - DNA, 361 bp, Glycine max
tagccgtccagaattcacgggtcgacccacgcgtccgaaaggatcattcatcacttcaaccggggcattggcaacactttctggggccaagacaggtcgctctccaagggacaagcgcgtcgtcaaggatgatcttactgagaacgagctttggtggggaaagggttcccctaacatcgagatggacgaacacactttcatggtgaacagagaaagagctgttgattacttgaactcgttggacaaggtcttcgtcaacgaccaattcttgaattgggacacagagaacagaatcaaagtccggattgtctctgccagagcttaccattcagtggtcagtcacaacatgtaattgaaaact

SEQ ID NO: 245234 - DNA, 469 bp, Glycine max
gtctagaattcccgggtcgacccacgcgtccgcaagatcggaaagccccacaccgttccctgcaaggttaccggaaagtgtggctccgtcaccgtccgcatggtccccgcccctcgtgggtccggaatcgtcgccgctagggtccccaagaaggtcttgcagttcgctggaatcgatgacgtcttcacttcctccaggggttccaccaaaaccctcggaaatttcgtcaaggctacttttgactgtttgctgaaaacctacggttttctaacacctgaattctggaaggagactcggttctccaaatcaccattccaagagtacactgatctattggcaaagccaacagggaaggcccttatcctcgaggaggaaacggtggaggcttgagtgagcagaagcagcagcagttttggtggtatccggatgattgtgcctcgtcgtaagcatgctaggacccagtaattag

SEQ ID NO: 245235 - DNA, 511 bp, Glycine max
tacaagcgtgcagccggcaggtaacggtccagaattcccgggtcgacccacgcgtccggggtctaccactgataatttcatccccatttaaaatccttgacatcaccgaaggacttattttgagcctcagtttcacttatgtacccccctgtgcctcaactccttctcggtggaccgttattctcaagggtctgccagaacaactccatgtcaaactcactggctacaaaaacacaatagatggttggtttaggattcaaagagcttcctctgaatccaactactataagttggtgttttgtacatctaatgatgatagttcgtgtggggatattgtggctcccatcgatcgtgaaggaaacaggcctttgattgtgactcatgatcagaatcatccagtgttggttcagtttcagaaagttgaagcttatgaatcatcaactgcatgagttgggcctggaaaaatcatgcacgtgctttccggaattaatccgatacgttgggtactttg

SEQ ID NO: 245236 - DNA, 497 bp, Glycine max
tcgaagtgtcacgcctgcaggtaacggtccagaattcccgggtcgacccacgcgtccgcccacgcgtccgactagtcatcataatattatatgctggttctagggcaactactagtccttgctatggctcatacaagctctatatggcaactcctagtggagaaacttccatcttgggtatgatcttctctggttctacagctttgacctggtttccataagctgatgcatgcactccaagtgctgctctacctgatggatcaaggttgttagaccaagcagcatcccactcaacagcttttgctgtgctacatgcaacacttggtcctccaggaacagtgagccttgctgagttctgagggaagaacctctcaaatatcattctatagtggtatgcttcattggtggttggtgtgttgaaggggaaaatgttggcagcattgaccatcagtctgtcagttacaatgtttcccaggattgagctttaagggcataac

SEQ ID NO: 245237 - DNA, 496 bp, Glycine max
  unsure (1)..(496): unsure at all n locations
atacaactgtccagccggcangtaacggtccagaattcccgggtcgacccacgcgtccgtggaggtggtgcacatgttggtgttcttcttcaggggaaaaaagttagagatgacaatagaacacttgtgcagactggtatatcttgcaatgaaaatttggataccctgagtttcatgttggagcccacttcactacaagcttctccaactgtttgtgttggtgatccttcttctcaatgtgaaacatcccagcctaccaggtccacagaaattcctgtcttagattcaggaattactgataccttgcacgactcacccttgctgacatatccgggcaacctaattgaaagtaaccatgagtctacttcttcacttgcggacactacacttgacaaactaacacctgattccagagcgatagttgttgttccagctaccacagaaacattagctgtggttcctgtgagtcagaaaaccaagcgctctgagtttgtaa

SEQ ID NO: 245238 - DNA, 493 bp, Glycine max
  unsure (1)..(493): unsure at all n locations
tgcaactgtccagcctgcangttacggtccagaattcccgggtcgacccacacgtccggaaagcgtggcctatcgatcctttagtccttcggaatttgaagctagaggtgtcagaaaagttaccacagggataactggcttgtggcacccaagcgttcatagcgacgttgctttttgatccttcgatgtcggctcttcctatcattgtgaagcagaattcaccaagtgttggattgttcacccaccaatagggaacgtgagctgggtttagaccgtcgtgagacaggttagttttaccctactgatgacagtgtcccaatatcaattcaacctattccaaaaggaaccgttgattcgcacatttggacaccgcgcttggttgaaacaccagtggcgcaaatctaccgtgcgtctggttatgactgaaaccctctaactcaaaccccgggccaaaagcgactcgttgcccccccctccctttgccgaacaaaan

SEQ ID NO: 245239 - DNA, 522 bp, Glycine max
  unsure (1)..(522): unsure at all n locations
cggagcttgaactgtcacgccggcaggtaccggtccagaattcccgggtcgacccacgcgtccggagatggacaaccaaagcagacaatctcttacatggctgaacgtgtggttgggactggttcttttggtgttgtttttcaggctaagtgccttgaaactggtgaatctgttgccataaagaaggtgttgcaagacaggagatataagaatagggaactccaggttatgcgcacagttgaccatcctaatgttgtcaaactaaagcactacttcttttcaactaccgataaagatgaattgtaccttaacctggttttggagtatgtacctgaaactgtctacaaagtttcaaaacactatgttaggatgcaccaacacatgcctatcatttatgtgcaactttatacctaccagatatctcatgcgttaaattatttacatcgagtgattggtgtttgtcaccgtgacatcaaaccccaagaccctacttggtaaatccgcagacagatgagttaaagn

SEQ ID NO: 245240 - DNA, 510 bp, Glycine max
  unsure (1)..(510): unsure at all n locations
ctcaacgtcagcctgcaggtaacggtccagaattcccgggtcgacccacgcgtccgaccacgcgtccgataactatgagaagatattgtctcacatgaagccaaacagtatacttgggctttcccatggttttcttcttgggcatttacaatcagtgggacttgactttccaaagaacattagtgtaattgctgtgtgcccaaagggaatgggtccatctgtaaggacgctctatgtccaaggcaaagagataaatggtgctggaattaatgcaagttttgcagtccaccaggatgtggatcgcagggctactgatgttgctttgggatggtctgttgcccttggttctccattcacttttgccactacattagagcaggaatacaggagtgatatgtttggggagagaggcattttacttggtgctgttcatggggttgtggagtccctgtttaagaaatacacggagaattggaatgaacgaagatcggggccaggaggaatagtgtn

SEQ ID NO: 245241 - DNA, 521 bp, Glycine max
  unsure (1)..(521): unsure at all n locations
tcggggctgcaactgtcacgcctgcaggtaccggtccagaattcccgggtcgacccacgcgtccgtttacttattccgtgaatcggaagcggggcactgcccctctttttggacccaaggtcggcttcggccggtcgatccgggcggaagacattgtcaggtggggagtttggctggggcggcacatctgttaaaagataacgcaggtgtcctaagatgagctcaacgagaacagaaatctcgtgtggaacaaaagggtaaaagctcgtttgattctgatttccagtacgaatacgaaccgtgaaagcgtggcctatcgatcctttagtccttcggaatttgaagctagaggtgtcagaaaagttaccacagggataactggcttgtggcagccaagcgttcatagcgacgttgctttntgatccttcgatgtcggctcttcctatcagtgtgaagcagaattcaccaagtgttggattgttcacgcaccaataaggaaacgttaactgggtttaagaccg

SEQ ID NO: 245242 - DNA, 495 bp, Glycine max
tcgaactgtgcagcctgcaggttacggtccagaattcccgggtcgacccacacgtccggctacttgaaattatatcaaagttaaaggatgaagaaggatgtctcatgggtgtcagtacttcaaatcttataattgccaactctggaaatgatttacctgttattgatcttacaagggtgtcacaggaacttgcataccttgccaatgatgcagatcttgtcatcttagaagggatgggtcgtggaatagaaacaaatctctatgctcaatttaaatgtgattccctcaagatagctatggtaaaacatcctgaagttgcggaatttcttgggtcacgtttgtatgattgcgtgatcaaatatgatgaactttagagcttaaaattaacgctgattctttactttgataaatacctaacactacatttgcaattagtccaggcttattgtttcaactgcatatgcctccaactttccaagttatcaaaattccaag

SEQ ID NO: 245243 - DNA, 497 bp, Glycine max
  unsure (1)..(497): unsure at all n locations
ttgaactgtgcagcctgcaggtaacggtccagaattcccgggtcgacccacgcgtccggcaacaaaccccgacttctggaagggatgcatttattagataaaaggtcaacacaggctctgcctgttgctttgatgattcatgataactcgtcggatcgcacggcctttgtgccggcgacgcatcattcaaatttctgccctatcaactttcgatggtaggatagtggcctaccatggtggtgacgggtgacggagaattagggttcgattccggagagggagcctgagaaacggctaccacatccaaggaaggcagcaggcgcgctaattacccaatcctgacacggggaggtagtgacaatanataacaataccgggctcattgagtctgggaaattggaatgagtacaatctaaatcccttaacgaggattcattggagggcaagtctggtgccagcagccgcggtaattccagctccaatagcgtatatttaag

SEQ ID NO: 245244 - DNA, 353 bp, Glycine max
attcaagggtcgacccacgcgtccggacacagctgcgaattagttcatcctttcccaagccagccaagcgaggcatgctctcaatttttgaaattacttgcatagatagagcatcatggccatgatgaaacgtgctgcttcctcttcggttcgctcgctactttcctcatcctccaccttcaccagaaaccttcatgcctcaggtgaaaagaagaaaattgtggcggtgttctacaaagggaatgggtatgctaaattgaaccccaatttcgtggggtgtgttgatcgagcattgggtatacgtgagtggctggaatcacagggtcatcagtacattgtcactgatgacaaag

SEQ ID NO: 245245 - DNA, 524 bp, Glycine max
ggcgcgtgcaacctttccgccggcaggtaacggtccagaattcccgggtcgacccacgcgtccgacaattgccatttcaatccccagtttcttcttcaacgtcctcttacgagcagatcccaattctccttcccagtttcaaaccctaattccctcattcccatggcctcagaagagcccactgtcgcggtggaacccgctcgcgaacctgccaccgccgagcctcccccggaggagaaggaggagcccaaacctgaggccagggctaagaaaaccaaggaacccagacctaaaaaggtttccagagcacgcaagcctcccacgcatccttcctacgaggagatgattaaacacgcaagtacctcgctgaaggagatagacggttcgagccaggacgcgatttgcaacgtcagcaacgagaacgacaagcaagttcaaccagagttggtggaacgttctcctccacgatgtgcggaaacgtgtgaccgcttggaaaaatcggtcagagtcagagggtccgttag

SEQ ID NO: 245246 - DNA, 511 bp, Glycine max
ttcaactgtcagcctgcacgtaacggtccagaattcccgggtcgacccacgcgtccgaccacgcgtccgatagaggaaggggaagcaaaagcacgtgagctcaatgtcatgttcattgaaactagtgctaaggctgggtttaatataaaggccctagttcgaaaaattgctgcagcactacctggaatgggaacactatcttctgcaaaacaagaagacatggttgatgtaaacttaaagtctacaaatgggactgctcagtctcaacctcagtcaagtggatgtgcttgttaagtatactttagcatgtgcggtccacctttttgtgtcatgctttttgttttatgcgggtttttctagagtcttctacagcattatatgaaaagatgaaagaatatagaagcggatcacggtaggggttgataaaagttctgtctacagaatttctgttgttaacttggttttttgccagaatggtgtacacataatttcttttttgttggcgggaaag

SEQ ID NO: 245247 - DNA, 518 bp, Glycine max
ggagactggagcgttcagccggcaggtaccggtccagaattcccgggtcgacccacgcgtccgtgaagctagcttgaagcgtcttgatgttgaatacattgatctctattatcagcacagagtggacacatctgtacctatagaggaaacagtgggtgaacttaagaaattggtcgaagagggtaaagtcaaatatattggattatctgaagccagcccagatacaataaggagagcacacgcaattcatcccatcacagctgtgcaaatagagtggtctttgtggactcgtgacattgaagaagagatagtccctctctgcagggaacttggtattggaattgtaccatatagtcctcttggtcgtggcttttttggcggcaaaggagttgtggaaaatgtgccgacaaatagctccctgaaagcacatccacgctttcagcgccagaacttagacaagaacaagaatatatatgaacgaattgaacgccttgctaagaagcatcagggcactcctg

SEQ ID NO: 245248 - DNA, 496 bp, Glycine max
gtgaagtgtgcagcctgcaggtaacggtccagaattcccgggtcgacccacgcgtccgcgtttcttctcttcactctgcccgctgcatcaatggcttcagagaagaaactttcgaacccaatgagggagataaaagtgcagaagctcgtcctcaatatctctgttggcgagagtggagatcgtctcaccagagcctccaaggtgttggaacaacttagtggccaaaccccagtgttttccaaaggttatttctcaataagtttctaaatgggtagtattcagggatgctggtaatgggcatagatctcaaatctgtgttcattgaaacgttttgttgatcattttttgtgattctatcattttcctaaaatatagattgctgctggtgaagtgattttgaagaattcctaaggtttacggtagtttattttagtgtttttaatggagagtttgttttgtttttttaattgtattgtcaacattcaaaggtctgatg

SEQ ID NO: 245249 - DNA, 495 bp, Glycine max
ttgaactgtgcagcctgcaggtaacggtccagaattcccgggtcgacccacgcgtccgcccacgcgtccgcccacgcgtccggtacttgaaccctatattggtggtgaagcaatatcagttttggcgcctggttactaatttcttgtactttcgtaaaatggacttggatttcctgtttcatatgttttttcttgctcgttactgcaagcttcttgaggagaactcgttcagggggaggactgctgatttcttttacatgctcttatttggtgccactgtattgactggaattgttcttcttgggggcatgataccttatttatcagagtcgttcgcaaaaataatattccttagcaactcattgacatttatgatggtttacgtgtggagcaaacaaaatcccttcattcacatgagcctcctgggtctctttactttcactgctgcctaccttccatgggttctcttggggttccctgtactcgttggtgcag

SEQ ID NO: 245250 - DNA, 310 bp, Glycine max
gacccacgcgtccgggcaaagaaagaagggttgtggaacttatggattcctattgatagtgctgtgagagcaagaaatcttctctttgatgggagcaataattatcgctctagtgatgcggatgacttgttattgggagctggtctcacaaatcttgggtatggatacctttgtgagatcatgggtcattctctttgggctccacaagtgtttaattgtggtgcacctgacacagggtaatatggaggtattactgcgctatggtagtgaaggacaagtacaagaatggctaattcctttgcttgatggg

SEQ ID NO: 245251 - DNA, 395 bp, Glycine max
cgggtcgacccacgacgtccggaggagaggagagaagagaggaagttttggggtttgaatctatagaatagaatcaaaccaaattgaaagaagatcgatcgatcgatcgatggctctggtcggagttgaagtgaagcatgcggcggagggcgcaccggaggagaattgctccgccaagcccaccaagcagggcgagggcctccgccactactattctcacaacatccacgagcatcagctccgtcgccgtcaaaaggagcataacctcagacgtcttgaggctcagagaaacgagctcaattccagggtgaggatgctgcgcgaagaagtacagcttttgcaggaaccaggctcttatgttggtgaagttgtcaaagtcaggggcaagaacaaag

SEQ ID NO: 245252 - DNA, 496 bp, Glycine max
  unsure (1)..(496): unsure at all n locations
tacaactgtccagcctgcatgtaacggtccagaattcccgggtcgacccacgcgtccgggggtcgtgttggagtgatcaagaacagagagaagcataagggaagctttgagactatccatgttcaggatgccactggccacgagtttgcaactcgtatgggcaatgtgttcaccattggcaatggaacaaaaccatggatatctcttcccaagggtaaaggtattaaactatcaatcattgacgaagctaggaaaaggattgccgcccaacaagcaactgctgcttaaatctttaggaaatgaatagactttgagtgtttggtagtttttatttaatggttttggtttctaatttattttgtcttgaaattttatccactgaatttcgtctcttaaatgctctatagaactttttattgcggcttctatgttcatgaatgaatctttccaaataaacaatccaataaacaaggcggccgcttcaacaggatccaan

SEQ ID NO: 245253 - DNA, 526 bp, Glycine max
  unsure (1)..(526): unsure at all n locations
gtcgtctccgcaactgtcacgccggcangtaccggtccagaattcacgggtcgacccacgcgtccgattccaatatattccattctctctgtgtatttccctacctctcccttcaagatgcagatcttcgtcaagaccctcaccggcaagaccatcacccttgaggtggaaagctctgacaccatcgacaacgtcaaggccaagatccaggacaaggaacgaatccccccggaccagcaacgtctcattttcgccggaaagcaacctgaggacngccgttacccttgctgactacaacattcaaaaggagaatactcttcagctcgtcctccgtctccgtggtggcatgcagatcttcgttaagacactcaccggcaagaccataaccctagaggttgaaagctccgacaccatccataacgtcaaggccaagattcaggacaaggaggggtaccccccggagcagcaacgtctcatcctcgccggaaacaactccacgactgccgcaccctccgcgaatacaaca

SEQ ID NO: 245254 - DNA, 515 bp, Glycine max
tccaaccgtccagccggcaggtaacggtccagaattcccgggtcgacccacgcgtccgcccacgcgtccgcccacgcgtcggcccacgcgtccgcacaaactagaagtattattattcttccatttccattaaaaagaaaatatcataaatgggtattttcacattcgaggacgaaatcagctcccctgtggctcctgctactctttacaaagctctagttacagatgccgacaacatcatcccaaaggctcttgattccttcaagagtgttgggaacgttgagggaaatggtggccctggaacagtcaagaggataactttcgttgaggatggagaaaccaagtttgtactgcacaagatagaagcagttgatgaggcaaacttgggatatacctacagcagtgcggttggaggaaggtgcccagcgaaatgggtagaggggggtgcctttgtctggcgaaaaaagcgcgaggggtttgggggttttgccaacgggggacaggggggttttggg

SEQ ID NO: 245255 - DNA, 514 bp, Glycine max
ttcaacgtcagctgcaggtaacggtccagaattcccgggtcgacccacgcgtccgaccacgcgtccggaagcccttgaacaaatttttaaagaaaaaggagagcacatagctgcatttattttagaacctgtccaaggtgaagctggggtgatatttcctccagatggttatttaaaagctgttagagatctttgctccaaatataatgtcttgatgattgctgatgaaattcaaactgggttagcaagaacggggaagatgctggcttgtgagtgggaagaagttcgcccagatgttctgatactagggaaagcattgggtggaggagttataccagttagtgcagttcttgcagacaaagatgtgatgctttgtatacaacctggacagcatggaagtacctttggtagtacttgaagggcgtgtcatcacgggggagaaggctaaaagacgacgtgggcgaaaccgcagaacaggggaaattatcaaggcgtgaaaacgaattcctgctca

SEQ ID NO: 245256 - DNA, 317 bp, Glycine max
gtctagaagtcccgggtcgacccacgcgtccgcacacgcgtccggtactttcttgcgaaacagaacggcgaaggggcaaacacaacttttttgtttttgtgtacagcgagagagaaagaaatgttggggatggtcagcagttccgtggtgtcggcgccggaggagctgctggctgccggcagcagaacgccgtcgccgaagacgacggccgggaagctgctgaaccggttcgtggagaacaaggcggcagcggtgtcgctgcatgtgggagagcacgtgcagttggcgtacacgcaccacaacgagtcagcgtggca

SEQ ID NO: 245257 - DNA, 509 bp, Glycine max
tacaactgtcagcctgcacgtaccggtccagaattcccgggtcgacccacgcgtccgatttctggcgtaggaggtgttctcttcaaggtttatatagttggtgatgctataaaggttgtaaggcggttttcgttacctgatgttagcaactgggaactctccaaagatgctggtatagatcgctttccaagggtttcttgtgctgcagcttctgcggatgatgcagatctggatcctactgttgccggtaagtttgtattcttgaccaaggctttctatagacctttacgttttcagacttaagacaggttttctcattctcccccctcgggaaggggaaaatagcatccttagaaaccaggtcctgtcgctgccattcacaaacataagaaaaacgagttcctggttggttcgcctgagttgataatcccattgaattcacgaacacgtttaagttcctggtctaggtctcatactatcaatttgtgtcaatccagttgagaaaagtg

SEQ ID NO: 245258 - DNA, 342 bp, Glycine max
gtcgacccacgcgtccggtcatcgtgtcgttcaccgataagatgtcgtattcaaggagatcaaggtattctcgttctccttctccatacaagcgatacagtaggtctgtgtccaggtctctcgcaaggacaagctccagaagccgttcaaggagtttatcaggagatgcagaagatccaggaaacaatttgtatgtgacaggattgtctcctaggatcaccaagagagaactggagaagcatttttctgctgacggaaaagtgatagatgtcgatctggtagttgatccttggacaagggaatcccgtgggtttggctttgtgacaatcgagactcttgagg

SEQ ID NO: 245259 - DNA, 432 bp, Glycine max
ccgggtcgacccacacgtccgaccacgcgtccgccctttctttctttccgatcccaccgtcaaacttgtcattctatatgctttgcagggtccattgaatatgtctccgtcgttggatcttcctcccaagggtggcttcagttttgatctatgccgaagaaacgcaatgcttcaaaacaagggcctcaaagccccaacctttctcaaaactggcaccactattgtcggtttagttttccagcatggtgtcattcttggtgctgatactagggcaactgaaggacctatagtggctgataaaaactgtgagaaaattcattatatggcacccaacatatattgctgtggagcaggcacaactgctgatacagacgctgttacagacatggttagctcaaagctgcaattacatcgctaccatactggtcgaga

SEQ ID NO: 245260 - DNA, 497 bp, Glycine max
  unsure (1)..(497): unsure at all n locations
ttaaacgtcagccgccagtaacggtccagaattcccgggtcgacccacgcgtccgcttctctctctcacactttctctcagcgttgaaacttgaaattcttcttctccgaaacctctttgaaccgggtcaagaaataaacctcgctgggaaccgttgattgggtttgtacgaataatttgaaatgaagattcagtgcaacgtgtgcgaggccgcggaggccaaggttctgtgctgcgcggacgaggcagcactgtgctgggaatgcgacgagaaggttcacgcagcaaacaagctcgccagcaagcaccagagggtccctctctctctctccgcctctcacatgcccaagtgtgacatatgccaggaaatggttggttatttcttctgtttagaggatcgagctttgctatgtaggaattgtgatgtatctatacatacagcaaatgcctgtgtctctgatcatcaaaggtttttgcttactggtgtgagagtaagn

SEQ ID NO: 245261 - DNA, 467 bp, Glycine max
  unsure (1)..(467): unsure at all n locations
gtaaggtcaaaattccgggtcgacccacgcgtccggagaaaagttagggttcacaacttttccttttccttttgcttgcgaatctgaatcaaataatcaatcatccattcattattcatcatgtcgtcggcgaagaaaatcacgctgaagagttcggacggcgaggctttcgaggtggaggaggcggtggcgctggagtcgcagacgataaagcacatgatcgaggacgactgcgccgacagcggcatccctctgccgaacgtgacgagcaagatcctggcgaaggttatcgagtactgcaagaagcacgtcgaggccgcgaatcccgaagacaaaccctccgaggacgatctcaaggcctgggacgctgaattcgtcaaggtcgaccanngcacgctcttcgatctcatcctggctgctaactacttgaacatcaagagcctgctggaccttacatgtcaaactgt

SEQ ID NO: 245262 - DNA, 503 bp, Glycine max
  unsure (1)..(503): unsure at all n locations
ttgcaactgtcacgcctgcaggtagcggtccagaattcccgggtcgacccacgcgtccggagatgaattgcctaagcttcctccttcgcagaaccgatttggtcaacactcgcctagcagttcaatagatggtaagacatctgaaacaagcatggagtttggaaatggtgaattcagctcagaggagctaaagaaaataaaggagaacgataaacttgctgaaattgccatggctgatcctaagcgtgcaaaaaggattttggctaatcgtctatcagctgctcgctcaaaagagaggaagatgcggtacatttctgaattagagctcaaagttcaaacacttcagactgagacaaccacattgtctactcagtttaccaaattacagatgaataattcagagcttaaaagtgagaataatgagtacaaattaaggattcaagccttggaacagcagtcccaactgaaagatgctctgaatgagaacttggatgctgaagtgn

SEQ ID NO: 245263 - DNA, 516 bp, Glycine max
  unsure (1)..(516): unsure at all n locations
ctccaacagtcangccggcaggtaacggtccagaattcccgggtcgacccacgcgtccgaattttactttgtgaaacagggtaactttgaccttgttggaaacaaccttcccgtcttctttgtacgtgatggcatgaagtttccagatatggttcatgctcttaaacccaatcccaagaagcacatccaggagaattgggggatccttgacttcttctctcactttccagaaagccttcacatgttcacctttgtagttgatgatttgggtgtcgcacaagattacaggcatatggatggttttggagttaagacatacacactgatcaacaaggctgggaaagcagtgtatgtgaaatttcactggaagaccactagtggtataaagtgtctattggaggaggaggccattaaggtcggaggagccaaccacaggcaggggagggccgggctgtatcgatccagtgggggtggggactagccttagttggacagggggggcggaggggggcgggg

SEQ ID NO: 245264 - DNA, 513 bp, Glycine max
ttcaactgtgcagcctgcaggtaacggtccagaattcccgggtcgacccacgcgtccgcacacgcgtccgcccacgcgtccggaagagccttccatatatagcctcccaaaaaaatgaagagtactacctctttggctctctttctactttgtgcccgaacttcatcatatcagccttcacgcaccgctgatattgtattcgacaccggaggcaatcctagtcgaaacggcggcacatactatgtgttgccaatttataggaggaaagggcgcgggaatagaatttgccaaaaccgagagagaagcatgccctctcactgttgtgcaatctccctttgaggtctcaaagggtctaccactgataatttcatccccatttaaaatccttgacatcaccgaaggacttattttgagcgtcagtttcacttatgtacccccctgtgccgcaactccttcgcgggggggcggttagtgccaagggtctgccagaaggaggtcatggtggaggcaatg

SEQ ID NO: 245265 - DNA, 522 bp, Glycine max
gtccaactgtgcagcctgcaggtaacggtccagaattcccgggtcgacccacgcgtccgcccacgcgtccgcagagatactgaaaaatagactcaaccaatatgttcaaggaaacaaagagggttttgttaatgatgcagaagctgaagtagcccggctatctaatgcagcttatggggttgatatgttgaataccattggctacatatacgcaaggcaggcagcaaaagagctagggaagaaagcaatttatttgggtgtgccttttattgctgagtggtttagaaacaaagggcactctattaaatctcaagttacagcagcaacaggggcaattgctttaatccaattgcaggaggatatgaaaaagcaactcagttcagaaggggactatactgaagaagagcttgaagaatacatgcaaaatcacaagaaattaatggttgactcactgtggaagctttatggtggaagccatttgaaccaatccttctccgcattttgtcaatgggttcttcaaaa

SEQ ID NO: 245266 - DNA, 507 bp, Glycine max
tgagcgtcagccggcaggtaccggtccagaattcccgggtcgacccacgcgtccgatgctttcatcggtttggcggttttccttatattgccggtcacacccgagtcagtaggagcaagagaggaagatgaattcagtggtcctattaaaagtggagaagaagcggcagagcctctgttaaggcaagagactccagttgaggagaaagaagcagttgggttcatagaagcatggaaaattccgggggttgctccctttgctctctgtctgttttttgccaaattggtcgcatataggtttctctattgggtcccattctatgttagccacacagcaattgatgggaaatatctatctagtgagacatcaggaactctatccactttatttgatgttggacgggtgctgggtggaattctagccggccacatttgcggtgacttagaggctagagccattagagcagcaagtttcatgtactgtgcaatcccagcgctcgtcgtcaag

SEQ ID NO: 245267 - DNA, 277 bp, Glycine max
ggtccagaattcccgggtccacccacgcgtccgaaactttgaagggacacctttgtttcccagtgatcctgccaagaaagagttcggtgagcaattgatatcccatgttgatacattcagcaaagacctgttcgtttcattgaaaggggatgctgtacagcaagccagtcacgcttttgaatacgtggagaatgctcttggtaaatttgatgatgggccattcttgcttgggcaattcagtttggtggagattgcttatattccatttgttgaaaga

SEQ ID NO: 245268 - DNA, 461 bp, Glycine max
tcccgggtcgacccacgacgtccgaccacgcgtccgctctccctcactctcaccatggaggcgcaaccaccaaccccctcgactgcgccgccgcctctgccgccacacctcagctaccccgactccgtggaatcctcgcctcgctcccgcaacaccgactcctgggacgagcccttcgcgccggcgtccaccaagctccgtctcatgtgcagctacggcgggcacatcgtcccccgcccccacgacaagtccctctgctacgtgggtggcgacacgcgcatcatcgtgtccgaacgcgccacctcactcgcagacctctccatgcgcctctcgaaaactttcctgaacggaagactcttcacgctcaagtaccagctccccaacgaggacctcgattccctcatctccgtcaccaccgacgaggacctcgagaacatgatcgacgagtacgaccgcaccgc

SEQ ID NO: 245269 - DNA, 361 bp, Glycine max
  unsure (1)..(361): unsure at all n locations
gggtcgacccaaacgtccgggagctgaagaaaaagttgccagagtatttgaagccccattatcatttttgaagacattaagtaatgccactttgcagaagtcctgttcttccgatgatatcatgggagatgttcagattttgggtgcaaatatgtcagctcttggactatcacagaaacctatttatgttcaagctgtgcacgaggcccctgaaagaagtggggtcaatggcctcgacacccttgaaactattcctgacgcagttccaactgtgttcactgaaccaccaattgaagatcaactagcttggcatacactttggcctgaatcacacanactctatggtcatggaaatgaacta

SEQ ID NO: 245270 - DNA, 369 bp, Glycine max
ggtaaaggtccaggggtcgagggacgcgtccggtcgataaactcatctgtcacaatccattctcgcgccctctaacagaagaacaaaagaataaataaataaataaattctccactcttcctcttctttcagtttcagatctctcagaggtgtgatatgtgatgtgattcaggtttgtaaaaatatggagtgtttgaattcggtggaggacgtggtggaggagataatgaggattcacagatcccttccagcccggtcagggatagacgaagtcgaagtggctagaagtttgatcgggaatgttgaaaaagaagaccaggcgaagctccaagccatagcgcggcaaagcaatggcgttcatgtgcccca

SEQ ID NO: 245271 - DNA, 498 bp, Glycine max
tcacgcgtgcagcctgcaggtaacggtccagaattcccgggtcgacccacgcgtccgaagagatcagaatcggcatctccacgatgtggatcttgattcttctgttgatgtgcttggggacagtgcacctcctgaatgggcgttgcttctcattggttgcctcattggactcaccactggcctctttgtggcactttttaataaaggggtgcataatacatgaatgggtatgggctggcactccagttgagggtgctgcctggcttcgtattcagagattggctgatacatggcatcgaatccttttaatacctgtcactggaggagtcattgtcggcatgatgtgtggtttactggaaatactggaccaaataaagcaatccacttcctctcaaacacaacgttttgattttcgtgcaggaatctttccaacaataaaggctatccaagctgcagttactttaggtacgggctgttcaatgggccccgaaaggtctg

SEQ ID NO: 245272 - DNA, 498 bp, Glycine max
tcaactgtatagccgtcacgtaccggtcaagaattcccgggtcgacccacgcgtccgaccacgcgtccgcccacgcgtccagcccagattcaaccagttaaacttggaacccaaggctttgaggtttcaaaattgggattcggatgtatgggccttactggagcgtacaatgaccctctccaagaacaggatggcatatctgttatcaagtatgcgttcagtaagggaatcacattttttgatactgcggatgtttatggagccaatgctaatgaacttttggttggaaaggctttgaagcagctgcccagagaaaagattcagatagccacaaaatttggtattgcttcacgaggttttcctgatatgaagattaagggttcgcctgaatatgtgcgatcatgctgtgaagctagcttgaagcgtcttgatgttgaatacattgatctctattatcagcacagagtggacacatctgtacctatagaggaaacagtt

SEQ ID NO: 245273 - DNA, 501 bp, Glycine max
ttaactgtgccgcctgcaggtacaggtccagaattcccgggtcgacccacgcgtccgtggtgctggagatcctcggcttgcaaattttaggttccgtcaggtacttattgatgagtccactcaagcaactgaacctgagtgcctcatacccttggttcttggagcaaagcaggttgttcttgttggtgatcattgtcagcttggtccagttattatgtgcaagaaagcagcccgtgctgggttagcacagtcactttttgaacgcctagttctacttggtgtcaaaccaattaggttgcaggttcagtaccgtatgcatccatgcctttcagaatttccctcaaacagtttctatgaaggcactctgcaaaatggagtcactgttaatgaaaggaagtcttctggaattgattttccttggccagtgccaaaccgtcccatgtttttctatgttcagatgggacaagaagagataagtgctagtggaacatcttatttaaa

SEQ ID NO: 245274 - DNA, 462 bp, Glycine max
ttcccgggtcgacccacgcgtccggcgaccgtgaccctgaacgaaacaggggagcaatactacatttgctccgttggatcacactgttccgctggccagaaactggcaattaacgttaacagagcttcttctaccggtccttcccctgcacctcaacccagaggaagtggttctccaccaagggctagccctgtccccacacaagcaccacaagccagtagccccactcctccaccaaggtctgcaccagcacctgcttttggtccatcctctgaaccagctactttcattgttggggaaaccgctggctggattgttcctggcaacgcttccttttacacagcttgggcctctggcaaaaacttcacggctggagacgtccttgtgttcaactacccatcaattacacacaacgtaaaggaggttacaaaggccaacttcgatgcttgcagctcagcctct

SEQ ID NO: 245275 - DNA, 514 bp, Glycine max
  unsure (1)..(514): unsure at all n locations
ataactgtgacgcctgcaggtacaggtccagaattcccgggtcgacccacgcgtccgcccacgcgtccgaaaagagaaggctaaatcagagacaagggattggttaaacaatgtggttggagagttagaatcccaaattgataactttgaagcggagcttgaagggctttccgttaagaaaggaaagagcaggccacccagattgacacatttagagacatcaattactcggcacaaggctcatataaaaaaatgtgaattcattttgaggctactagataatgatgaattaagtcctgaggaggttaatgatgtcaaagatttcttagatgactatgttgagcgtaatcaggatgattttgatgaatttgatgatgttgacgaactatacagttcattaactttagataaggtggagactctagaagatcttgttacaattccccctggtccttccaaaggtgcanctagtcctagcttgaagataacttgacaattacaacatacaatcaac

SEQ ID NO: 245276 - DNA, 504 bp, Glycine max
  unsure (1)..(504): unsure at all n locations
aatgttcagctgcagtacggtcctaaattcacgggtcgacccacgcgtccgaaagaaaagaagaacaaagatgcaatcctcaaaggagaagatgaaaaacatggcaagtgctgccaaggaacaagtcgacatctataaagccaaaatagacgagaaggcagagaaagcaacggcaagaacagaagaggagagggtgatagcccatgagcacgcaaaggcaaaggaagctggagcaaagatggagctgcatgaagctaaagcaaggcatgcagcagagaagctaagcgccaaccaatcacattatggtctccaccatggccacaacaaccctcccttagtaggaacaactcagactcactaccagcaagggcaccagcaccagccacttggggcagttcctatgcctggaaccacttatccatcttatccactaggagggaaatcctaacctccaaggaacanacatatataatagatctatctgtgttttgctgtagtacgtcn

SEQ ID NO: 245277 - DNA, 500 bp, Glycine max
  unsure (1)..(500): unsure at all n locations
gttaactgtgcacgccggcaggtaacggtccagaattcccgggtcgacccacgcgtccggttggtgtagctagcgagggagggatatagggggaagcgtttattcattcattaagatggcatcggagcttcaattgcccccaggcttcagattccatccaacggaccaggagctggtgttgcactatctctgccgtaaatgcgcgtcgcagcctatcgccgttcccatcatcgccgaaatcgacctctacaaatacgacccctgggacctacccggattggcttcctacggagagaaagagtggtacttcttttcaccacgggaccggaaatacccgaacggttccaggccgaaccgggcggcgggaaccggttactggaaggcaaccggggcggataagcccattggccaccccaaaccggttgggataaaaaaagctttggtgttttacgcanggaaagctccgaaaggggacaagagcaattggatcatgcacgagt

SEQ ID NO: 245278 - DNA, 501 bp, Glycine max
tcaactgtgacgcctgcaggtacaagtccagaattcccgggtcgacccacgcgtccgcccaaagcatgttttccaaccagtttttgaatttgcttctgtaagctgtcaaaatgcaaacccgaagtttcgggaagcatctgttactgctttgggtgtcatttcagaaggttgtttggaactcatgaaaagtaagctagaacctgttctccatattgtcctgggagctctgagggacccagaacaaatggtcagaggggcagcttcctttgctttgggtcaatttgctgagcacttacagcctgaaattgtatcccattatgagagtgttcttccctgcattttaaatgctcttgaggatgtatctgatgaagtaaaggagaagtcatactatgcgttggctgctttttgcgagaacatgggtgaagacatccttcctttcttagatcctttgatgggaagactgttgacagctctccaaaatagttcccgagtcttgcaaga

SEQ ID NO: 245279 - DNA, 505 bp, Glycine max
ttaactgtgacgcctgcaggtaccggtccagaattcccgggtcgacccacgcgtccggagaaaccaaacacaaggaattagaatggcaaaggtaagagatcagaagctatacgtcaccgttccgagtctctttcggtgcccaatctccatggacgtgatgcgctctcccgtaagcctctgcaccggcgtcacatacgatcgcgccagcattcagcactggctcgactcaggacacgacacgtgtcccgccaccatgcaggttcttccctccaaagacttcatccccaatctcacgctccaccgcctcatccgcctctggctcctctcctccccctcctcctcctccgccgccgaacctccctccccctcctcctccgccgaccacctccgccctctcctccgccaaatccaaacctccgacgacaacgtccccggtattctctccaaaatcgccgaattcgccaagaaatccggtgagaatcgccggtctctcgccgccttcccg

SEQ ID NO: 245280 - DNA, 499 bp, Glycine max
  unsure (1)..(499): unsure at all n locations
gtgaagtgtgcagcctgcaggtaacggtccagaattcccgggtcgacccacgcgtccgctcacgcatttcctcgtttttttcttcccttttcgctttctccggcgacgatctcagattccggccactcctctcgccggcgagcccttactcttccctcctccgtcgagccctctccgattcgaatcgttcccagcctcgcaccaccatgaatcccgaatacgattatttgttcaagcttttgctgattggagattctggtgtaggcaagtcatgtcttctcctgaggtttgctgatgattcataccttgacagctatatcagtaccattggagtggactttaaaatccgcactgtggagcaggatgggaagactattaaacttcaaatttgggacactgcgggtcaggaacgtttccgaacaatcactagcagctattatcgtggggctcatggcattattgtgagtcttttaaactggtcctcctttttgagttaatn

SEQ ID NO: 245281 - DNA, 515 bp, Glycine max
  unsure (1)..(515): unsure at all n locations
ctaactgtgacgcctgcaggtacaggtccagaattcccgggtcgacccacgcgtccggcttgcttgagttgccaactttaagtttgtcaatttccgtgctgcttggttggttgcaattgcaagtgaacaattggctagtgtgtactagttttgaatcacaatggcagaggatgatggttacacgaaagatggaacagtcgattactgtggaaatccagctaataaaaaggaaactggaacctggaaagcctgcccctatatcttaggtaattgttgtgttcgtttaagtccaaggtangatgtgatgtgtatgtactgtgttgtgtgtgaaatatttatcgtttcaagcttctatttgcaggaaacgaatgttgtgagagattggcttaatatgggatgagcacaaacctggtgctttatttcaagaaccggctaaatcagcatagtgctactgcttccaagaatgtctctaattggagtggaacttgctatatcacaccactggttggggcaca

SEQ ID NO: 245282 - DNA, 502 bp, Glycine max
  unsure (1)..(502): unsure at all n locations
gttaagtgtcccgcctgcaggtaacggtcaagaattcccgggtcgacccacgcgtccgatttttcttctttcggactcagcatcgtccccctccactggcgcaaccccaagaccattctcccgatggccctctccattaacaaccatccgcctcgacgactccgtctcctcctcatccgcgtcactctcctcctcatcatcagcatcgacaacgccatcagcaccctcactgtgcccattgttaatcccaaagggccgatcctcctcagcgccgtcaatctcgccgctcccagggtcatcctcttcctcctcctcctcctcatcctcctcctcgtcgtcactctcgggcctctcgttctcctccgcgtccatcttgtccaagtacttcaacgacttgatcaacccgaaaaccctatatcgatagtccttcacgcgcgtcacggggcactcgtacagattcagcgacaccagcttcaactgcgcgagcggtgcgagatctcan

SEQ ID NO: 245283 - DNA, 518 bp, Glycine max
  unsure (1)..(518): unsure at all n locations
ctaactgtgacgcctgcaggtacaagtccagaattcccgggtcgacccacgcgtccgcccacgcgtccgtaattggaagcagagaattaccataccagagattaaaatgcacccttggttcctaaagaatttgccactagaatttatggacgagggcgaaggggtgttgcagaatgatgatcatgtgaatgaagagtcatctgaaatcactcaaagcattgaagaaatactggccatagttcaagaggctaggaaaccgggtgagggcccaaaagttggtgagcaatttgttgggggcagcatggacctcgatgatattgatgcggatgctgacatcgatgacattgagacaagcggtgattttgtctgtgcattgtgaatgatgatgcttgcactttgcacactatttctccctcaaaagcagtttaagataagatgttgttccttgacgagatagatanggaagaatcaaacaaaagctctctagcctttactgccttcntccgttttttaaagcg

SEQ ID NO: 245284 - DNA, 418 bp, Glycine max
attcacgggtcgacccacgcgtccgcgcagaccgaggcgtttccagttcgaaagggaaatgaaagtgtctttgttggtgaagggtaggtgagagaaacgaaaggggtgtgtgttgggttgaataggtatagataggatcaatgagcaacaacaacgcaggaaaggtggtgtgtgtgacgggtgcttctggtttcatagcttcatggatcgtcaaattccttctccaacgtggttacactgtcagggccaccgttcgctacccaagtaatctgaaaaaggtagatcacttggttaaacttgagggcgcaaaagagaggttgcagctgtttaaggcaaatctgttggaagaaggttcctttgactctgttgtggaaggctgtcatggtgtttttcatactgcttcacctgtccgttttgt

SEQ ID NO: 245285 - DNA, 501 bp, Glycine max
gtcaactgtgcagccggcaggtaacggtccagaattcccgggtcgacccacgcgtccggtttgggatgttggaggacaagagaaactaaggccactttggaggcactattttaacaacacagatggcctgatttatgttgttgatagcttggatcgtgagagaataggtaaagcaaagcaggaatttcagacaatcataaatgacccatttatgctcaatagtgtcatcttggtgtttgccaacaaacaagacctgagaggggcgatgacgccaatggaagtatgtgaaggactaggtctctttgatctaaagaatagaaaatggcacatacatggcacttgtgcactcaagggagatggtctttatgagggcctggactggttggcttcaacactgaaggaaagaaaagctgctggatactcttcaataggaacctcatccttctaatctaagtattttgtcattgaggaacgtgcaaggtttggccagtttcattcaag

SEQ ID NO: 245286 - DNA, 500 bp, Glycine max
gtgaactgttacgcctgcaggtaccggtccagaattcccgggtcgacccacgcgtccgataaacctacgcattctcacaatctcttcacctctgttatgaccatgggatacagaacctgatcactcatcatcatatccgcaatggacatcagtgaacgtttgtctcttctccacgatggccgtatacactgtcgctacgctctccggagaggctctcgatcctcatggcgccaccagccatgtctacaatgacgacggcagtaaccccatgtggcactaccgcgtgaaattctccgtcaacgaatcgctggccaacgagaatcgtttgtctcttgagatcaagcgcgtctcagaccgcaacctcagtgacatcgttatctgcagcgtccatgttcctctcagggaactcatggacaatcgcggagacgacagttccttccgccacatcagttagcatgtgatgaagcactcacggaaatccaacgcatccttggatttcc

SEQ ID NO: 245287 - DNA, 502 bp, Glycine max
ttaactgtgcacgcctgcaggtaccggtccagaattcccgggtcgacccacgcgtccgctcggcacacaatacgccggggaaatgaagaagggtcttttcagtgtcatgcattatctcatgcctaagcgccaaatcctctccctacactccggatgcaatatgggcaaagatggggatgtggcactcttctttggactctcaggtactgggaagaccactctttccaccgatcacaataggtatttaatcggagatgatgaacactgttggggtgacaatggtgtctccaacattgaaggtggttgctatgccaaatgcattgacctctcacgggagaaagagccagatatttggaatgcaatcaggtttggcacagtgttggaaaatgtggtgtttgatgagcatgatcgagaagttgattactctgacaagtcagttacagaaaatactcgtgcagcttatcctatagagtacattccaaatgcaaagttaccttgtgtt

SEQ ID NO: 245288 - DNA, 500 bp, Glycine max
ttaactgtgccgcctgcaggtacaggtccagaattcccgggtcgacccacgcgtccgctagaaactaccaatatgtgaacatagccttcttgtccacttttggcaacggccaaactccacaactcaaccttgcaggtcattgtgaccccaacaacaatggctgcactgggttgagcagtgacatcaaaacttgccaagaccttggcatcaaagtgttgctctcccttggtggtggtgctggaagctactccctcagttcagctgatgatgccactcaacttgcaaactacctctggcagaatttccttggaggtcaaaccggatcacggccattaggtaatgttatattggatggcattgactttgacattgaatctggtgggagtgaccattatgatgacctagccagggcatttaatagcttcagctcacacaggaacgtgtacttgtctgcagcccacagtgcataatccctgatgctcacttggatagagccatcc

SEQ ID NO: 245289 - DNA, 501 bp, Glycine max
ttaactgtgacgccgtcaggtacaggtccagaattcccgggtcgacccacgcgtccgaagaagatggcgtccgagtgcaaaggtaagagctcatggcctgagttggttggagtggaaggaacggtggcggtggctacaattgagagggagaatcctttggtggatgctaacactgtgcttaaaggatccatcgtcaccgctgattttcgatgtgatagggttcgggtttgggtcaccaaacatggaattgtttatcaggctccaagaattggataagaagtgtttacactaaagcacttcatatatatgttatgagtcatgaatataatagtatttaaataaggagttattcttccaattatgttatttgattgaaaataaaaacatgactataagaaatttgttttttcttatttttaattatgttatgcactgcatataaatatacaaattgtgtgtttcattttctaaaaactaaaaaaaagggcggccgctctacag

SEQ ID NO: 245290 - DNA, 518 bp, Glycine max
  unsure (1)..(518): unsure at all n locations
ctaactgtgacgcctgcaggtacaggtccagaattcncgggtcgacccacgcgtccgcccacgcgtccgcccacgcgtccgcccacgcgtccggttttggcgacactcattaatgatgttctagatctttctcgacttgaagatggtagcctcgaattagaaaagggaaaattcaaccttcatggtgttttgggagagatcgttgaactgataaaaccaatagcatctgtgaaaaagttacctatcaccttaattctgtctcctgatctgcctactcatgccattggtgatgaaaagcgacttacacaaactcttttgaatgttgtgggtaatgctgtcaaattcactaaggagggctatgtttctataagagtatcggttgcaaaaccagaatctttacaggattggcgacctccagagttttatccagcatctagtgatggccatttctacatacgagtccaggttaaggactctggatgtggcattccccacaagaaatccgcatctctttacag

SEQ ID NO: 245291 - DNA, 491 bp, Glycine max
  unsure (1)..(491): unsure at all n locations
actgttaggtgcggtgcggtcgagnttacgggtcgacgacgcgtccgggaaggatgaaaagaacccccatcggggagtgaaatagaacatgaaaccgtaagctcccaagcagtgggaggaggctcgggactctgaccgcgtgcctgttgaagaatgagccggcgactcataggcagtggcttggttaagggaaaccaccggagccgtaccgaaaccgagtcttcacagggcaattgtcactgcttatggacccgaacctgggtgatctatccatgaccaggatgaaccttgggtgaaactaattggaggtccgaaccgactgatgttgaagaatcagcggatgagttgtggttaggggtgaaatgccactcgaacccagagctagctggttctccccgaaatgcctttaggcgcaccagttgactagacatctaagggtaaagcactgtttcggtgccgggccccaaaccggttccaaatccagggaaatg

SEQ ID NO: 245292 - DNA, 503 bp, Glycine max
tcaactgtgcagccggcaggtaacggtctagaattcccgggtcgacccacgcgtccgatgcaattgcagggtaacaacaacaaatgaagaggtgcaaaccctaaacacaaacactcacttcaacccacaggtcccacccctccgaaccctctcttcctcgaagcggttcgagggttcctcggagttcgtgaagctcctcatcaaggacttcctcaactcaatctccgacgaccaccaccgcgcctccccctctccctccgtctccgactggtggcgcactgtctccctctacaccgaccagaccggcgccaacatctcccgctccgtctccatcgccggcgagtactccgacctccgctactcccacggcacacacctcacccgcctctccgtgcaggacgtcatcgccaccgccgtccaggccaagcccttccccgtcgaccaccgcaacgggatctacctaatcctcaccgccgaagacgtcaccatggaagacttctgcc

SEQ ID NO: 245293 - DNA, 504 bp, Glycine max
ttaactgtgacgcctgcaggtacaggtccagaattcccgggtcgacccacgcgtccgcgagtatggtggaactgtggggattgtaacactcgaagatgttgttgaggaaattgttggtgaaatatttgatgaaaatgactcaaaggaggagatacagaaaaaaactggttacattgtaatgcgagctgagggtgtttttgatgtggatgcaaacacatccattgatcagctctctgaagatttgaacatcaagatgccagagggtcaccaatatgagacggtatcaggctttgtgtgtgaagcatttggatacattccaatgacaggtgagtgcatcaaagtagttcttgaaagggaagatgaagatgataacaatgagtccaatgctgaccagcaggatcagaaggagaagaaccagagtttcaaacttgagatactaactggaaatgccagaaagaaaatggaagagtgatgcaaactcagacaatgatgcagaatatgacg

SEQ ID NO: 245294 - DNA, 523 bp, Glycine max
ctaactgtgacgcctgcaggtacaggtccagaattcccgggtcgacccacgcgtccgattcataccttgctccagatcctactattcaagctctgttttagggttcgattccgatcgatccctaaccggcgagcgcgagttccttcgattcgtttcgtttcgacgactaagcttcttctccgtttaggatccgttgatcgattcatcatccatggcggcgatcgaggacttgtcggagctcgccgattcgatgcgccaagccgcggcgctcctcgccgacgaagacgtcgacgaatcctccaccaattctcgaagaccttccactttcctcaacgtcgttgcactcggcaatgttggtgctggtaaatccgcagttctcaacagtttgattggacatcccgttttgcctactggtgagaacggagctactcgaagctcctaaaagcaatggttcgggggcgagaacacttcgtggaccagaaaaccaattatctggcagatgtgcaccagttcagagaagttc

SEQ ID NO: 245295 - DNA, 504 bp, Glycine max
ctaagtgtgcgcctgcaggtacaggtccagaattcccgggtcgacccacgcgtccgacaaattacaactgaagatcaagatttccactacaaagttaattatactaccaatttctcactcaaaacttagggaaaatgattgagatacttctgaatttgcagctgttagctcctttcttccttttcttcatctttccagtgtttttcttcttctttctcacgtcctcatgtcctactaaaagaagcatcactatcccaaaaccatacccactgattggtcactacttagacctcaaaggcatcggcaaccgccgtatccagtggctatccgacatcgtcaaaatctcaccggctaccacgttcaccctccaccgccccttaggccgccgccaagtcatcaccggcaaccccgccaccgttgcgcacattctcaagacccgtttctccaactaccaaaagggctacaccttcattcacaccctctccgatttccttggcacaggaa

SEQ ID NO: 245296 - DNA, 521 bp, Glycine max
  unsure (1)..(521): unsure at all n locations
ntaactgttgcgcctgcangtacaagtccagaattcccgggtcgacccacgcgtccgcccacgcgtccggatgaaggcattaagctagttgttgaggcgatatgcgctggaatatttaatgacctaggaagtggaagtaatgttgacgtttgtgtgataaccaagggacacaaggatatctcaggaaccaccttctaccaaatcctcgtacctatgtcaatccaaaaggctttgatttccccaaaaagacagaggtcctcttaacaaagattaccccgttgaaggagaaggtggaagtgattgaaggagatgctatggaagagtaacaatcgttccaaaaaatatttggtgtttgagtataaaacttgattgtgcaatggctgtgatatttagttattgtactttcacaactttggctttcattaccanaaattatgtgaatttaattagattgtgcaaaaaacaaaaacnnccaacccaacccacaaccccaaaaaaaaaaaaaagggcggccccccaaa

SEQ ID NO: 245297 - DNA, 332 bp, Glycine max
ggtcgacgcacgcgtccgattgttaacgttacatggaagtccaagctcaaagctcagtttcctaatcccaatgagtactcttcattcatgggtgacttctctaatgcaactggaattgccacattcacaatgaagcttgtcagccaaattatatttgacaagtattgatggagaattgctgccacaatcacccctacagtcctgcttttgacaggaattggattcttttcgcttacattgtctggaggcccgcgtgcaactggacctgcaagtccttgaatgaatcacatctaactgcagtataagtgggtgctttgcataacatatttatc

SEQ ID NO: 245298 - DNA, 503 bp, Glycine max
ttaagtgtgcacgcctgcaggtaacggtccagaattcccgggtcgacccacgcgtccgcagaaggcctgcttctaatatggatccatatgtagtcacctccatgatcgcagagactaccatcctctggaaaccatgaaaaacagtcatatagtctctagatttggaccactaaaaattgtgttcaatagtcatttgatctaaaaatttatatttgcaaggtgatgtttagttaggaatttctaagtggtctttttgagcctccatgtgccatgtctatggttgagaataatttcgtcattaataacaagaatttcccataaaagaaaaaagtaaaaaaaagcaacagaaaaaaaaaaagtaaaacaaaaaatgaaagcgtcgggagcccgttctggtcagataaaagttaatctgctaagtcacgtcaatgcaactcgtagcaatctcgtaccttaaagtcaatgctcgtagttataaatccacgtatgtgagatctcaccgg

SEQ ID NO: 245299 - DNA, 520 bp, Glycine max
tgaacttgtacgccgcacagtataggtccagaattcccgggtcgacccacgcgtccgaggaaggcctgcttctaatatggatccatatgtagtcacctccatgatcgcagagactaccatcctctggaaaccatgaaaaacagtcatatagtctctagatttggaccactaaaaattgtgttcaatactcatttgatctaaaaatttatatttgcaaggtgatgtttagttaggaatttctaagtggtctttttgagcctccatgtgccatgtctatggttgagaataatttcgtcattaataacaagaatttcccagacaagacacaagtcaagaaaggcacgaggaaagagctatcctttgccataaagtcacgtcgcgtgcgccagtgcgtgacctgctaacagtactatctgctcactgcgtgccgtctggatagcggcgcactcatgtcagaggttccaggctctacgcctgcacggttggcagcgatcctatactaagatcggccgtcctggtg

SEQ ID NO: 245300 - DNA, 201 bp, Glycine max
cccacgaatccgagcaaggcctgcttctaatatggatccatatgtaatcacctccatgatcgcatagactaccatcctctggacaccatgagagacaatcatatagtctctagacttggagcactaaacagtgtgttcaatagtcatttgatcgagacatttatacctgcaaggtgatgtctagataagcacttctaagtg

SEQ ID NO: 245301 - DNA, 406 bp, Glycine max
attcccgggtcgacccacgcgtccgattttcttcatccttctctgttctcctagaacttgattacttgaacattccctatgacagatgaggtggttcttctggatttctggccaagtccatttgggatgagggtcaggattgcacttgctgaaaagggtatcgaatatgagtacaaagaagaggacttgaggaacaagagtcctcttctcttacaaatgaacccggttcacaagaagattccggttctcatccacaatggcaaacccatttccgaatccctcattgctgttcagtacattgaggaggtttggaatgacagaaatcccttgttgccttcagacccttaccagagagctcaggctagattctgggctgattatgttgacattaagatacatgatcttg

SEQ ID NO: 245302 - DNA, 543 bp, Glycine max
  unsure (1)..(543): unsure at all n locations
gcgccgctntgncgaagtgctaactgtgacgcctgcaggtacaggtccagaattnccgggtcgacccacgcgtccggaagatggtgtcaggttctggaatctgcgcaaagcgagtggtggtggacgctcgccaccacatgttgggtcggctagcgtccatcgtggcgaaagagcttctgaatgggcagaaggttgcggtggtgcgctgcgaagagatttgcatctccggcggtctggtgaggcagaagatgaaatacttgagattcctccgcaaacgcatgaacaccaaaccctcccatggccctatccacttccgcgccccagccaagatcttctggcgcaccgttcgtggaatgataccacacaagacaaagcgtggggaagctgctcttgctcgtttgaaggtttatgaaggaatccctcctccatatgacaagaccaagagaatgtttgttcctgatgctctcaaggtgtggaaggctcanaaaagacacagttccggtgtattggacaggttgcacgtgaattggatgggcaacaata

SEQ ID NO: 245303 - DNA, 307 bp, Glycine max
gcgtcccgaatgccaacaattatttgctcgagtctggtgggttggaggaggagtcttcatatccctacactggggagagaggtgaatgcaagtttgatccagagaaaatagcagttaagatcacaaatttcaccaatatccctgctgatgagaaccaaattgccgcatatttagtaaaaaatggtccacttgctatgggcgtgaatgcaattttcatgcaaacatacattggtggtgtctcatgccctctcatatgtagcaagaaaaggctgaaccatggtgtgttacttgtgggatatggtgcaaa

SEQ ID NO: 245304 - DNA, 474 bp, Glycine max
tccagaattcacgggtcgacccacgcgtccgggaaatggcaacaaagatggactgttctctgtgctactgagagactatagagcacatgctgctgcatcttgcatgaatcgtttagctaaattgagtgcacgatggattggcaatcatgggttctcaataggcattgatgatgtccaaccaaaagagattctgattaacaagaaagatgaaacaatttcagaaggttatagggaatgtgataaacacatagaagctttcaataagggaaaactagaactcttagctggttgtgatgctgcgcagacattagagactcggattactggggtattaaatggacttcgtgatacggcagggaaggtctgcatgcaaaccctacactggagaaatagtccattgatcatgtcacaatgtggctccaaaggatcttctattaatatcagtcaaatggttgcctgtgttggtcaacaatc

SEQ ID NO: 245305 - DNA, 356 bp, Glycine max
acgcgtccggtggggattggtggacagagagaagcctggggagtataattggggagggtacgtggaactcatggaaatggcgaagaagcatggcctcaacgtgcatgctgttatgtcatttcaccaatgtggccgtaacgtcggagactcttgcactattcctttgcccaaatgggttgtggaggagattgataatgaccacgatcttgcatatactgatcaatggggaagaagacactatgaatatatatcacttcgatgtgatactttgccggtgctcaaaggacgatccccagttcactgttatgctgatttcatgcgtgcattcatagacactttcatacaacgccttcctg

SEQ ID NO: 245306 - DNA, 504 bp, Glycine max
tcaagcgtacagcctgcaggtaccggtccagaattcccgggtcgacccacgcgtccgcccacgcgtccgcccacgcgtccgattccaatatattccattctctctgtgtatttccctacctctcccttcaagatgcagatcttcgtcaagaccctcaccggcaagaccatcacccttgaggtggaaagctctgacaccatcgacaacgtcaaggccaagatccaggacaaggaaggaatccccccggaccagcaacgtctcattttcgccggaaagcaacttgaggacggccgtacccttgctgactacaacattcagaaggagagtactcttcacctcgtcctccgtctccgtggtggcatgcagatcttcgttaagacactcaccggcaagaccataaccctagaggttgaaagctccgacaccatcgataacgtcaaggccaagatccaggacaaggagggtatccccccgggacagcaacgtctcatcttcgccggaaag

SEQ ID NO: 245307 - DNA, 499 bp, Glycine max
ttaactgtgccgccggcaggtaaaggtccagaattcccgggtcgacccacgcgtccgaacatctgcaagcatttcagcttgataaccatcggtttgaggtactattaaatacataacgtgcgcttattttgataattgatacaattaatctcattctaggtttcaaaattgggattcggatgtatgggccttactggagcgtacaatgaccctctccaagaacaggatggcatatctgttatcaagtatgcgttcagtaagggaatcacattttttgatactgcggatgtttatggagccaatgctaatgaacttttggttggaaaggctttgaagcagctgcccagagaaaagattcagatagccacaaaatttggtattgcttcacgaggttttcctgatatgaagatcaagggttcgcctgaatatgtgcgatcatgctgtgaagctagcttgaagcgtcttgatgttgaatacattgatctctattatcagcacg

SEQ ID NO: 245308 - DNA, 510 bp, Glycine max
ttgacacgtacagcctgcaggtaacggtccagaattcccgggtcgacccacgcgtccggttcactttagtttgaaggcaagttttgaaacattgtttgtcatttcagtttcatgatgaagcatatggattaacatgagccctgtttaaactgcacttttattgcaaagaacttgtgaaccccacgttatgcaaaaaaaaaaaaaaaaaaaaaaaaaaaaaaaaaaaaaaaaaaaaaaaaaaaaaaaaaaaaaaaaaaaaaaaaaaaaaaaaaaaaaaaaaaagggcggccgccctaaaggatccaagcttacgtacgcgtgcatgcgacgtcaaacctcttcaaaagtgtcacctaaattcaattcactggccgtcgttttaaaacgtcctgactggaaaaaccctggggttacccaacttaatcgccttgaagaacatccccctttcgccaactggcgtaataccgaaaaggccccaaccgatcgcccttccaaaaaattgcgcaaccg

SEQ ID NO: 245309 - DNA, 508 bp, Glycine max
ctaactgtgacgcctgcaggtacaggtccagaattcccgggtcgacccacgcgtccgcccacgcgtccgccggtttcccagatctgctccttcctcaccccacagaagtcagttgaagagcatgggtcgtggagttagcagtggtggtggtcaaagttccttgggttatctttttggcagtggagaggcccctgccgcaaaaccggcaacaaacaatgccccagcccaacctgaagtgcaggctgtaaataatgcgcctccttcaaaagcatctcctcctactaaaacaatagaccctaacaaggctgctggtataaacagtcattctactgatggccagaacaccggcaacttcatcacggaccgaccctcaaccaaggtccatgctgcccctggtggtggttcttctctgagttatctctttggtggacctggagaggggaaatgataccttgcttgcaaagcttttgctcgatgaacgattttatttgggaaatcaggtcctgga

SEQ ID NO: 245310 - DNA, 398 bp, Glycine max
tccagaattcccgggtcgacccacgcgtccgtttgtttccttgggtgctgcatgcactttcactcgaagaaccttgaagcgagtctgggccacagcaaccagcgacaacaactcaatcagctagggttgctttgcttgctatcttgttggaggattttctgttcaagagaagatggtaactagaattgtggatcttcgttcagacacagttacaaagccaactgaagcaatgagagctgctatggcaagtgctgaagttgatgacgatgttctaggctatgatccaactgcttttcgcttagaaacagagatggcaaagacaatgggcaaagaagctgctctttttgttccatctggcactatggggaaccttgtatctgtacttgttcattgtgatg

SEQ ID NO: 245311 - DNA, 546 bp, Glycine max
  unsure (1)..(546): unsure at all n locations
agggggcnncnnngcaactgttaactgtgacgcctgcangtacaggtcaagaattcccgggtcgacccacgcgtccgatttttgtgtgctcttggattggttgttagaatggagggtcagagtaagggtagttttaatgtgatggaagggagtgagggcaaaggaagggagtttgtggtggaaaagtctgcatcatcaatagtgggaacttgtgatttggttctaaggattttggcctttttactaacccttgtggctgctgtagttattgggacagataagcaaactgccattgttccaatcaagcttgtggattctatgccaactttgtacgttcctgttgcagctaagtggcattacttgtctgcctttgtctattatgtgggggcaaatgcaatagcatgtgcatatgcaatactgtctctcttgctcactcttgcaaatangcgtaaaggcaaaggaacgatggaaacattgatcactgtgctggacacagtaatggtagctttgctcttctccggcaacgggacccccatggcggttggn

SEQ ID NO: 245312 - DNA, 500 bp, Glycine max
  unsure (1)..(500): unsure at all n locations
naactgtcacgcctgcangtaccggtcctaaattcacgggtcgacccacgcgtccggactttatgaagtatgctcaagatgaggaagctgctgatgatcaagaggagacaggatggaagtacattcatggggatgttttccggtttccaaagttcaagtctttcttttcagcagcccttggttctggtactcaattattcacacttacaatcttcatttttatgcttgcactggttggtgtgttttatccatataaccgaggcgctttatttactgcactggtggtcatatatgctctcacatctggcatcgctggctacactgctacttccttctatattcaacttgaagggactaattgggttaggaacttattgctgacaggatgcctcttttgtggccccctattccttatgttctgtttccttaacacagttgcgattgcttatagtgcaactgctgccctgccatttggcacaattgtggtgattggcccaatn

SEQ ID NO: 245313 - DNA, 443 bp, Glycine max
  unsure (1)..(443): unsure at all n locations
attcacgggtcgacccacgcgtccgattcaagggaagctaagatttggaacaatgtgtttgagaaagctgagaaggtagcaggcatcgaaagaggaagcataagggcaactgttctgatagaaacacttcctgcagtgtttcaaatgaatgaaattttgtatgaactgaaggaccattcagtgggtttgaactgtgggcgttgggattacattttcagttatgttaagaccttccaagctcatccagatcgcctcttaccagatagggtcctagttggcatgactcaacacttcatgaaaagttattctgatcttctcatcaggacgtgccacaggcgcggcgtgcatgctatgggaggaatggcagcgcagattccaatcaaagaagatccagtggctaacgaagtagcactggaacttgtaaggaangacaagcttagaga

SEQ ID NO: 245314 - DNA, 465 bp, Glycine max
attcccgggtcgacccacgcgtccgattttagaatatatgtggggattctattataagtgaagagtgaagcaacagaaaaacttctcatagatcaattctgttctatttttctctgattttcttaaagctgaaagccatttttatctcccctatgactgacttgatttatttgcagcccacagtagacatcaagacagtgttatctcagttaatggacaggttgtcaaattatgctgcctctagtactgaagtattgcccgaatttctgcaagtggaagcatttaccaaattaagcacagcaattggcagggtgatagaagcacaagttgacatgcctattgtgggagcaatagctttgcatgtttctcttcttacatttactctccgtgttcatccagatcgacttgattatgtggaccaagtactgggatcatgtgtcaagaagctttatggaaaaccaaagc

SEQ ID NO: 245315 - DNA, 505 bp, Glycine max
gtcaagcgtgcagcctgcaggtaacggtccagaattcccgggtcgacccacgcgtccggtgggttcttcttcttctattacaacaacgtcgtccaagaccatgaccatggccatggccacgatcctgctcctgttcacggtcttcgcggtttcatcggccctagacatgtcgataatctcgtacgacaacgcccacgccgccacgtcgcgcagcgacgaggagctgatgtccatgtacgagcagtggctagtaaagcacggcaaggtgtacaacgcgctcggagagaaggagaagaggttccagatcttcaaggacaacctgcgattcatcgacgaccacaactcccaagaggaccgaacctacaagctcggactgaaccggttcgcggatctcaccaacgaggagtacagggccaagtacttgggaaccaagatcgatcccaaccggaggctcggcaagaccccgagcaaccgatacgcgccacgtgtcggcgacaaactacct

SEQ ID NO: 245316 - DNA, 504 bp, Glycine max
  unsure (1)..(504): unsure at all n locations
ntcaacgttgcagcggcaggtaacggtccagaattcccgggtcgacccacgcgtccgctcaattggtcagattttgccacagattacaaggatgccaaattttttgtcatcaaatcttacagtgaagataatgttcacaagagcattaaatatggtgtctgggctagtacaccaaatggaaacagaaagttagatgctgcatatctccaagcaatggagaagcaagatgcctgtcctatatttctttttttttcggtaaaatgctattgctcagttctgtggggtagctgaaatggttggacctgtcaattttgacaagagtgtggacttttggcagcaagacaagtggagtgggcagtttcccgtgaagtggcacataattaaagatgttccaaacagtcagtttcgtcacattgttcttgaaaataatgataacaagcctgtgaccaacagtcgagatactcaagaggtgaagttgacacaaggggttgaaatgttgaccaa

SEQ ID NO: 245317 - DNA, 376 bp, Glycine max
ccgggtcgacccacgcgtccgggcaaacacaccaaacaccaaacaccaaactagttggctcaattctctttgaatggctttggaggctttgaattcaccaacagcagccaccactccgttccgtggctaccaagaagaggaggaggacgaggaggctgaccttcacttacgtgagccttgggctaaaaggaaacgctccaaacgaccgcgttttgagacggaggaagagtacctcgctctttgcctcatcatgctcgcacaaagcggtaacaccagaaacatccacaacaacaacacccaattaccgtcttcttcactgtcagacaaagaagcgtcgccgccggtgaaactaacacacaggtgcaccgtttgcaac

SEQ ID NO: 245318 - DNA, 540 bp, Glycine max
  unsure (1)..(540): unsure at all n locations
agcggtnctgaagcgttagcttgccccagcanngtatggtccagaattcccgggtcgacccacgcgtccgcggacgcgtggggtcaattcttttgaattcctgcaccctctacttaggagtttggattatgaactgccaaagacttccctaccggtcgaccgtgctcttgttctcagcaggatttgctgggctgtttatacaatcctatatccatggctcaatcggtggtggcttccacagccattcatccttccctctgaagtacacaaggtgggagtgacccattatttctcttatcttaaagccaaagaggagattggctattttcccatggtgacctcgcgagaggggatggctttgaccatatcttactggcaagagaggaaacgaacaactctggatggaccaacaatctacgcgtggttgttttgtgtcattggaatgatctcactgttttgtggtgctttcctaactgacatanggaataggtcccctttcaaaaccaaagttcaaattggcctttggtcaatgtgggtgaa

SEQ ID NO: 245319 - DNA, 394 bp, Glycine max
tccagaattcccgggtcgacccacgcgtccgcaatcatcaacacagagctgagtgtgttgctctgtgaatccaccttcttcttccattggaggaccatttcctcctggaatagaaatactaccacacttttcttttttcacttctctaagttgctaagttaattgctccttcattttttcactcttcgttctcgcgtacccgtgtcacggtaactcgtggtgaagtgttcgaaaatgactgtcacacctaagatctcagttaacgatgggaaacttgttgtccatggtaagaccattctgactggagtgccagacaacgttgtgctgactccaggttctggaaggggtcttgtgactggtgcttttgttggtgccacagcttcacacagcaaaa

SEQ ID NO: 245320 - DNA, 401 bp, Glycine max
gggtcgacgcacgcgtccgaaatccaacaaccttatttttgtgtctggtgttcttggccttgttcccgagacagggaagttcgtatctgatgatgttgaagaccaaactgaacagcttcttaaaaacatgggggaaattcttaaagccggtggtgctagctactcgtccgttgttaagacaacaattatgttggctgacttgaaggactttaagaaggtcaatgagatctatgctaaatacttcccttcacctttccctgctcgttcaacttatcaagtagctgcattgccattggatgccaagattgaaattgagtgcatagcaactatataagcaccaagagtaatagtatatctggctccttcagcaaacttggttaataacacgggaagggacatat

SEQ ID NO: 245321 - DNA, 343 bp, Glycine max
  unsure (1)..(343): unsure at all n locations
acgcgtccgatttgtcacgacattcactcttcagcaaccaatgagtcactcacatgccgaaaataagcccgcggagaaaaagcccgcacagaatgctccggcggagaagaagcccaaggacgagaataagatatcgaaggaaggacgaagcgagaataagaagaagagaacaaagaagagcgtggagacctacaagatttacatcttcaaggtgctgaagcaggttcaccccgacatcggaatctcaagcaatgccatggggatcatgaacactttcataatcgacatcttctagaagctcgcccacgagtcgtccccattggctangtataacaagaaccct

SEQ ID NO: 245322 - DNA, 502 bp, Glycine max
  unsure (1)..(502): unsure at all n locations
ttaagcgtgccgccggcaggtacaggtccagaattcccgggtcgacccacgcgtccgaccacgcgtccgctcccttcttccttgtctctttctcttctcaacaacatgcagatcttcgtcaagactttgactggcaagaccatcaccctcgaggtcgagagtagcgacaccatcgacaacgtcaaggccaagatccaggacaaggaaggtatccctcctgaccagcagaggttgatttttgctggtaagcagctggaagatggtcgcactcttgctgattataacatacacaaggaatcaacacttcacttggtcttgaggctcangggaggaaccatgattaaagtgaagactctaactggaaaagaaattgaaattgacattgagccaactgatacaatcgaccggatcaaggaacgcgttgaagaaaaagagggaattccacctgtgcagcagagactcatatatgcaggtaaacagcttgctgatgacaaaacagctg

SEQ ID NO: 245323 - DNA, 499 bp, Glycine max
  unsure (1)..(499): unsure at all n locations
taagctgtaacgcctgcaggtaccggtccagaattcccgggtcgacccacgcgtccgggcgagtaaacccgtaaggcgcaaggaagctgattggtgggatccccctgtgggttgcaccgccgaccgaccctgatcttctgtgaagggttcgagtgagagcatacctgtcgggacccgaaagatggtgaactatgcctgagcggggcgaagccagaggaaactctggtggaggcccgcagcgatactgacgtgcaaatcgttcgtctgacttgggtataggggcgaaagactaatcgaaccgtctagtagctggttccctccgaagtttccctcaggatagctggagcccgcgggcgagttctatcgggtaaagccaatgattagaggcatcgggggcgcaacgccctcgacctattctcaaactttaaataggtangacggtgcggctgctctgttgagccgcgccatggaatcgatagctccaagtgggccatttttt

SEQ ID NO: 245324 - DNA, 509 bp, Glycine max
aacggttggccttgcaaaggcacgtaaaggtccagaattcccgggtcgacccacgcgtccggtttgtcacgagacccatagtgctgccaaattatagtaactctctttctctatctgaagaagaagaagttctgaagaagcatgtgtggaggtgctatcatctcagacttcattggtgtgaagcgtggccgcaacctcgccgcgcaggaactgtggtccgagcttgaccctttctctgacctccttggcttcgataccaccaccaccaccaccaaccaaccaccccttccagacaaaaaagtggtgtcatcatgtgagaagaagaagaagaaaagtgtgagtgcagaaaagaagagtggtgggcgagctcggaagaacgtgtacagaggaatcaggcaaaggccgtggggcaagtgggccgcggaaataagggacccacataagggcgtccgcgtctggctcggcacctttcccaccgccgaggaagccgcccgagcctacgacgacgc

SEQ ID NO: 245325 - DNA, 384 bp, Glycine max
ccgggtcgacccacgcgtccggcagaggtgaagcttcatggattttggtatagtccctacactttgagggtggtatggaccttaaagttaaaggatataccatatcaaaacatagaagaagaccgctacaataagagtcttcaacttcttgaatacaacccagtatacaagaaaactccagtgcttgtccataatggaaaacccttatgtgagtccatgcttattgttgaatacattgatgagatttggtcacataattcattacttcctgctgatccctacgagagagctctggcaaggttttgggttaaatatgctgatgatgacatgttttctgcagttattgcattcttccttagcaataatgatgaagagcgagaaaag

SEQ ID NO: 245326 - DNA, 475 bp, Glycine max
  unsure (1)..(475): unsure at all n locations
attcccgggtcgacccacgcgtccgggtaaggttcctctttattggggaatcacagctgatggatatgtagcatttgctgatgatgcagatttgcttaaaggttcttgtggcaagtcacttgcttctttccctcaagggtgtttctactctacagcagttggaggattgagatgctatgagaatccaaagaataagattactgcaatacctgctgatgaagaggaaatctggggtgcattcttcaaggtggaagggtcagcagtccttgcaggcacagagtaaaagattcattttcaaataaagtaccgtgtgatgtattaatggagtaatgtgtttatgtgcttgtgacggtaaggcttgcatgcggggccatgtaaatacctttaatgataactatgagaagaatgtgactggtagtagagtttatcatggtgttcattagctangattttctctgtttctcttgtacagttg

SEQ ID NO: 245327 - DNA, 362 bp, Glycine max
  unsure (1)..(362): unsure at all n locations
cgggtcgactcacgcgtccgtaatcactaactgaatattcgatcggagatgtctgccgccgccgaagaagctaacgctcccgccgtcgaaaagccggttgaggangtgaaagcgccgaaccccgcgaaggagaagaaacctaaggctccgaaggaaaagaagccaaaacaggccaaaacagcttcacatcctccatattttcagatgattaaggangctttgatcgctttgaacgagaaaggaggatcgagtccttatgcgatagcgaagtacatggangagaagcacaangcggtgctccctgcgaatttcaagaagattctaagtctgcaactaaagaaccaagctgcgagaaggaaact

SEQ ID NO: 245328 - DNA, 397 bp, Glycine max
gagagagtccatggggagtcaccggagagaatcatcctgaacccaaagctcaccgctgcaatgaccgtgtcgaggacgttattcaggcttgctttgagggaaacccattcaagactgttccgggacctttcaagctcttctggcagtgcatgcgttccaaacccggtgaggaaccaacagccccatttacttatctggatttggagcctctaaagagagaaacggaacctgtgaaacctgagtagtgtcacttttacttacaaatgccttaacagctttggcactgcatggtcctttagtggtttctaaatttccctccgtgtggatttttttttttgagaaaaatatgttactaaattgtttttgttgctttgctacataaaacagacgtcctatg

SEQ ID NO: 245329 - DNA, 388 bp, Glycine max
cacgcgtcaggatccttgcacttcagagatcttaccatggtgacacattgggtgctatggaagcacaggcaccgtcttcttatacaggcttcttgcagcaaccatggtacactgggagaggtctttttctggatcctccttctgtctttatgcacaacagtacatggaatgtttccatacctgaagggtatcatttggaaagtctgaaagggaaaagtatcacctttgcctcacctgatgaaatatttcacaagggcagagataagtctgagcttgctacagtttattcatcttacatatcaaaagtattatctggatttagagggtcgaataatgttggagcattaattatggaaccagttatccaacgtgctggtggaatgcatat

SEQ ID NO: 245330 - DNA, 411 bp, Glycine max
  unsure (1)..(411): unsure at all n locations
cggctcgacccacgacgtccgcggacgcgtgggaaaaaataatggcaaggaaggtgggtttgaattttatagggtgctccatcgttgcaatggttttcataattggtgtggctgaagcaacagattatatcgttggtgaaggcttcggatggagcgttccctccaatgagagcttttatacagactgggctagcaccaagagattcttcgttggtgacaatctcattttcaacatcagcggagagcattcggtgggaattagaacagaggctacttattatgagaattgcaacaccagcttattaactggtttcacgttcatangcgtcaatgggagtaattcgatgtttccacataatattattcctccaactgggcctcgctatttcctctgcaccgttggaaatcact

SEQ ID NO: 245331 - DNA, 443 bp, Glycine max
aatgcccggctcgacccacgacgtcagcagctagcagatattacatacacgtgaatcactaattaagccatggagaagaaatcaatagctgggttgtgcttcctcttccttgttctctttgttgctcaagaagttgtggtgcaaactgaggcaaagacttgcgagaacctggctgatacatacaggggtccatgcttcaccactggcagctgcgatgatcactgcaagaacaaagagcacttgctcagaggcagatgcagggacgatttttcgctgttggtgcaccaaaaactgttaaatggatccattcactccaacgtgaagaagatgcatgcagcgctattttataaaaaataaaactactatatactatatataataagactggcgctgcatcaatgacctatgtattatagtatatattattaccgatgtcagaacta

SEQ ID NO: 245332 - DNA, 443 bp, Glycine max
  unsure (1)..(443): unsure at all n locations
cgggtcgacccacgcgtccgatcgaggtaggaggcagaggcgcggagaagatgtggttcaccctctcaaggtctctctggaggacctttatctcgggacttctaagaagctctccctctccagaaatgtcatatgctccaagtgcactggtaagggttctaagtctggtgcttcgatgaagtgtgctggttgtcaaggaactggtatgaaggtttctataagacatcttggcccgtccatgattcagcagatgcagcatgcttgcaatgaatgcaagggtactggagaaaccatcaacgacagagatcgctgcccacagtgcaagggagaaaaggttgtgcangagaaaaaagtccttgaagttattgtggaaaagggaatgcagaacgggcagaagaatacattccctggcgaagctgatgaagcgccagacacaattactg

SEQ ID NO: 245333 - DNA, 428 bp, Glycine max
acgcgtcagaaaccttggaggtacactgggaaggaggagaatatggagagagaagatatcaagatgttagtgaaaaagtggtgggatatatatgaggatgagactttggactacaacaatccactcaatgtggataagttcactgcggcacttatggaggttggtgaagtcaagttcgtccgtgccccatctgctgcttaagagtgtctttggaaatcaagtgtgatccaagtacatgtacaaagtcatacatcattacattaacttttatgtatttctaaaagtcatacatcattacattaagttttatgtatttctaaagtcttaagacttaagaggaccttttttatgtgtcccgcttttctttttttctttttccaattctgtcattgtaaagcagtgaataccgtatccttaattttataaat

SEQ ID NO: 245334 - DNA, 406 bp, Glycine max
ccacgcgtcagcagacgcgtgggtctttccacacacactgagaattgtgttagaatgatcgaggccggggcagtgacagctcttgttagtgctttggggaatgaaggagtttcagaagaagcagctggtgcactggccttgatcgtccggcagccaattggggccaaagcagtggtgaatgaggaatcagcagtggctggattaattggaatgatgcgttgtggaacaccgagaggtaaagagaatgcggttgcagcgatgctcgagttgtgccggagtggaggtgcagctgcaacagaaagggttgtgaaggcaccagctttggccggattacttcaaacccttctttttacggggacaaaacgcgcaagaagaaaagcagcttcacttgcaagagtttttcaga

SEQ ID NO: 245335 - DNA, 440 bp, Glycine max
  unsure (1)..(440): unsure at all n locations
aattcccggctcgacccacgcgtccgcaattttcaaagccagacagacaaacatgtccgagaatattgagtccaattctccttcgctttccctctttatctgaaaggtatggagtgttttgacttctggaagagataatggtgcagtgcctagacggattaaagcatttgtgtgctgctctggtaaattgttgtgatgccgattcgtcaaagcaacctacaggtttagaaaatccagaagttcttgcaagagaaacagtgtttagtgtaagtgagattgaagcgctatatgaattgttcaagaagatcagcagtgcagtgattgatgacggactaattaataaggaagaatttcagttggcattgttcaagacgaacaaganagagagcttatttgcagatagggtgtntgacttgtntgatacaaagcacaacgggata

SEQ ID NO: 245336 - DNA, 439 bp, Glycine max
acgcgtccacaagaatttagaatcaattggagttccttttccgaagaggcaaccgatgaggatatactcaagcctatggaacgctgatgattgggccacaaggggtggacgcatcaaaaccgattggtccaaagctcctttcactgcatcctacagaaacttcaacgctaacgcttgtgtttggaacagaggaaaatccacatgcaaatcaaattcaccatcctctaatgcatggctatcacaagagctggattccactgctcagcaaaggctgagctgggtgcagaagaattacatgatttacaattattgctccgacaaaaacagatttgctcaaggccttccactcgaatgcacacattcgtagaggacttcatcttccactagcacaagtgttacattaaaatttcatttaccattcttttaatttaattttttt

SEQ ID NO: 245337 - DNA, 446 bp, Glycine max
ccgggtcgacccacgcgtccgagaaagattcgaaacgaagaaagaaagcgttgtgaagaatggcggaagagggacaagtgatcggtgtccacagcgtagaggagtggaaggaacatctcaagaagggagaagagtccaagaaattgattgtggtggattttactgcttcttggtgcggtccatgccgtttcattgccccaattcttgcagagtttgctaaaaagttgccgaatgtcaccttcctcaaggtggatgtggatgaattggagactgtttccaaggagtggggaattgaggctatgccaaccttcctgttcttgaaagaaggcaagctggtggacaaggttgtgggtgccaagaaagaggagctgcaattgacaatagccaaacatgccgcaattgctgctgcttgaagtgccatatgaatatgttaagaataatagact

SEQ ID NO: 245338 - DNA, 430 bp, Glycine max
cccggctggccccacgcgtcagaaatactagttctactcttatcattgtgaaacaaattgcccaattgttcgaggttgaatatcaggttgaaccttgcagcaaaggctacaatagtagtgcttgcattgatgtcagaaagacaagcttccctatgcaaactggtggatatgtcatctatggtgttggtcatcagcatgttggtgcaaatgaatcaactctatacggacaggatgggggagttatttgttcttcaataccaaaatatggaaatggaaacgaagcagggaatgagaaagggtatgttgtaggaatgtctacatgttaccctcgacgaggtactatcaaaataaaagatggtgaaaccctaactctagagattatctacagcaacaaccaaagccacagtggagtaatggggcttttctacat

SEQ ID NO: 245339 - DNA, 433 bp, Glycine max
aattcccggctcgacccacgcgtacgctgacttccaaaaagaagacaaaatcctctgcgagagagaaagagagaggcggtgatgtcttcaattagattcctatggatcctgatggtgtctttgacggcatcatgcgcgttaagccaaccgcagaagctatcggcgtacgatgttctgatggagtacgggttcccggtgggtcttcttcccaagggagccatagggtattcgctcaacagagacagcggcgagttcgcagtgtatttccaaggagcgtgcagcttcgacatagagtcctacacgctcaagtacaaatccaccatcacgggtgttatctccaagggcaggctctataatctcaaaggtgtcaccgtcaaaatcttgctcctttggctcaacatcgtcgaggtctctcgtcaggggaacgatattt

SEQ ID NO: 245340 - DNA, 432 bp, Glycine max
  unsure (1)..(432): unsure at all n locations
aattcccggctcgacccacgacgtacgctcttcttctcttgcggctagggttttagcgcagcttcttctagatttaaggaagatgggtaaggaaaaggttcacatcagtattgtggtcattggccatgtcgactctgggaaatccactaccactggtcacctgatttacaagcttggaggcattgacaagcgtgttattgagaggtttgagaaggaagctgctgagatgaacaagaggtctttcaagtatgcctgggtgctggacaaacttaaggctgagcgtgaaagaggaatcaccattgatattgctttgtggaagtttgaaacaacaaagtattattgcacagttattgatgcgcctggacatanggatttcattaagaatatgattactgggacatcncaagctgactgtgctgttcttatcattga

SEQ ID NO: 245341 - DNA, 436 bp, Glycine max
  unsure (1)..(436): unsure at all n locations
aatgcccggctcgacccacaagtacgcccacgcgtccgagcatcgctattctcttcattccatggctttgcccaaccagcaaaccgtggattaccctagtttcaaactcgttatcgtcggcgatggtggcacaggaaagacaacctttgtgaaaaggcatctcaccggagaattcgagaagaaatatgagccaaccatcggtgtggaggttcacccattggattttttcacaaactgtggaaagattcgattttactgctgggatactgctggacaggagaaatttggtggcctcagagatggatactatatccatggacaatgtgctattatcatgtttgatgttactgcccggctaacatacaaaaatgttcccacctggcaccgtgatctttgcanggtctgtgagaacatcccaattgttctttgcggtaac

SEQ ID NO: 245342 - DNA, 457 bp, Glycine max
cgggtcgacccacgcgtccgaacacactaagttctgaaaaatgagttccaaagtttttcttattctacttatgttcatggccactatacttttgatctcctctgaggttgcacccgatgatgcataccagaattttgacaaaacagatgggaagcgtagtgcaaatggggtagatgaaagcaaatattggcgtggtggctatggcgactatggtggttggcgtggtggtggttggcgtggtggctatggaggctggcgtggtggctatggtggtgggcgtggtggctatggtggctggcgtggtggctatggtggtgggcgtggtggctacggaggttggggtggtggctttggccctaacgaacataatgaggctgggattgatgctagccctcacaactaagaaggaaacttgctaaagcttatataggatttaagttatcgtaataaataaaac

SEQ ID NO: 245343 - DNA, 455 bp, Glycine max
  unsure (1)..(455): unsure at all n locations
gggtcgacccacgcgtccagtgagaaacaaagaaaggaaataattgatctttgaaaatgcagggaggaaagaaagctggagagtccatcaaggaaacagctgcaaacattggtgcttctgccaaggctggcatggagaaaaccaaggccactgtccaggagaaggcagaaagaatgacggcacgtgatccgatgcaaaaggagttggcaacccagaagaaagaggcaaagatgagccaggcagagctggacaagcaggcggcgcgtcagcataacacggcggcgaagcaggctgccacggcagggcacatgggacaacccatggggacccatcagacgtcagctatgcccggtcatggaaccggacagcccacgggccatgtcaccganggagtggtgggctcacaccctattggaaacaacagaagcccgggttggactgctacggcccataat

SEQ ID NO: 245344 - DNA, 420 bp, Glycine max
  unsure (1)..(420): unsure at all n locations
cccggctcgacccacgcgtcagctccttctcaaactagtagtattattcttccattcataatgggtgttttcacattcgaggatgaaatcaactcccctgtggctcctgctactctttacaaggccctagttacagatgccgacaacgtcatcccaaaggctcttgattccttcaagagtgttgaaaacgttgagggaaatggtggcccaggaaccatcaagaagatcactttccttgaggatggagaaaccaagtttgtgctgcacaaaatagaaagcattgatgaggcgaacttgggatacagctacagcgtggttgggggtgctgcattgccagacacggcggagaagatcacattcgactccaaattggttgctggtcncaatggaaggtctgctgggaagctcactgtcaaatac

SEQ ID NO: 245345 - DNA, 437 bp, Glycine max
aatgtcccggctcgacccacgcgtcacgtgccaacttcacatctcaagtcattatcatgaaccaccctggccagattggaaatggatacgcaccggtgcttgattgccacacttctcacattgctgtcaagttttctgaaatcttgaccaagattgacaggcgatctggtaaggagcttgagaaggagcccaaatttttgaagaatggtgatgcaggtatggttaagatgattccaaccaagcccatggtggttgaaactttctctgagtatcctccccttggtcgttttgctgtgagggacatgcgtcaaactgtggctgtcggagtcatcaagagtgttgagaagaaagaccccaccggagccaaggtcaccaaggccgctgccaagaagaagtgattgcatttgggcaattttgctagcacatgtgatcatcat

SEQ ID NO: 245346 - DNA, 439 bp, Glycine max
ggtaccagttaggaatgcccggctcgacccacgcgtacggcaaagcagagccaagaagaagaagaagaaaaccaacataatcaacaacaacaacaacaaaaagcttgcaaattagaagaatcttcagttaaaagggaagaagaacacacaagaagaaagagaagaagaaacgcgcgcgaatgaagggagaattagagttgccacctgggttcagatttcaccccactgatgaagaattggtgaatcactacttgtgtaggaagtgcgctggtcaaccaatcgcggttcccgtcatcaaagaggtcgatttgtacaagtttgatccatggcagcttccagaaattggtttttacggcgagaaagaatggtacttcttttctcctcgggaccggaaatacccgaacggttcacggccgaaccgcgccgccggaagccgcta

SEQ ID NO: 245347 - DNA, 432 bp, Glycine max
aattcccggctcgacccacgcgtacggtgtctgatgcggttcacttgacttttggttgtggtcttcttacattttcgttatttgttatggctgcgtctaggaagaaagccgatagagagtatacttatgggtataaaaggctagaagtcttgtctgcatttacaaatgccctgtttcttttgtttatgtcattctccctagcagttgaggcacttcatgcattcatacaagatgaatcagagcacaagcattacttgattgtttctgcagtgaccaatttatttgtgaatcttgttggtgtatggttcttcagaaactatgctcggattaatctcacttacagaaatgcagaagatatgaataatcactctgttttcctgcatgttgttgcagattccattcgcagtgcaggtctgatattggcatcctggt

SEQ ID NO: 245348 - DNA, 437 bp, Glycine max
  unsure (1)..(437): unsure at all n locations
ccacgcgtccgagaaaaaagggccctataaaactaaacgctccccttctcgaagaggccgctcgctctctagggtttttctttttctcttctcactgcatcgcttcaggttcttctgaaaagatgtctcgcgtgtatgttggtaacttggattcacgagtcactgagagagatctcgaagacgaattccgcgttttcggagttattcggagtgtttgggttgcacgtagaccacctggttatgcttttattgactttgatgaccgcagagacgcacaggatgctatccgtgaattggatggcaagaatggttggagggttgagctttctcacaactctagaggtggaggtggtggtcgtggtggtcgctctggtggttctgatttgaaatgttacgagtgtggtgaanctggtcattttgcccgtgaatgccccatg

SEQ ID NO: 245349 - DNA, 382 bp, Glycine max
tcccggctcgacccacgcgtcagcacacaccctattggaaccaacagaggcccgggtgggactgctacggcccataatacccgtgcggggggaaacccaaatgattatgggtatggaactgggggtacttacaattaaataatgatgatttagaaaaggaaagctacgacccataagaaggtttagttaagagtatgacttttgttgtggttatcttcttgtttggttatctttttgtttgtgtctccttttctctccatttttgttgtggagaattgggtgtggttacacgacagtgttttcacttctactaggtgcaagcattctgtgtcgtgatgttgtattccttcgtttcaatgaataaataaaatcgtggttgtgc

SEQ ID NO: 245350 - DNA, 453 bp, Glycine max
acggtttaggattccgggctcgacccacgcgtccggattcccaaacttttttactttttattccctttttctcactatacaatacaaatacacattcaacaattttcgattcaagttcaaagccatcgacgagtgttgaggaagaataacaatgggaatgatagtggattttgaaaatgaccaaaacgacgccgttctggttccgccccctaacttcgccatggttgaagactgcgttttccgatccagcttccccaccccttccaatttcccctttctccaaaccctaaaccttcgctccatcatatacctgtgccccgagccttatccggaagaaaatctcgagttcctccgctcgcagaatattcgcctctttcaatttggaattgaggggaaaacggacgtttctatgcctgttctcaaagattctatcatggatgcactggaagtttt

SEQ ID NO: 245351 - DNA, 436 bp, Glycine max
aatgcccggctcgacccacgcgtccgcccacgcgtccgctttgatggaaattttccagtggattcttggttaccaatttttgtgaattgtctttatcctgtaagtcaattaccttcagaagctgtcgttgtaaatgttacatgtggtagtggacgtggtggtttacccaccactgcttggattagttctgcagttaacaatcgctcctcagatatcaacaaaaagattcgcacagcacttgggaaaggtaagaaaattgtttttcttactagagttgatccttttccagtagctttactggctgttctttttggcgttaagaatgaaattctgagttctaacgccactaaccctatgctgacgcgacttcttgagaactgtaagagtctcaaatatctggttgatgagtgtccttttgcatttgtgaactagtgtg

SEQ ID NO: 245352 - DNA, 438 bp, Glycine max
ggtaccagttacgaattgccggctcgacccacgagtaagctaaagtttgcccccttacacgttttttgtcttcttttttctcccatctttgtttcgagaagcatttgacgaagagaagagacagtgaatcgcggtttcaattcaacccacttcatctcaggtgtttgaagttgagataaaaatgagcggaacagagaaagcaggatcaggaaccaccaaaacccccgccgatttcctcaaatccattcgtgggaggccggttgtcgtcaagctcaattctggtgttgattacagaggtatacttgcttgtctagatggctatatgaatattgcaatggagcagacagaggagtacgtcaatggacaactgaagaacaagtatggtgacgctttcatccgagggaataatgttctatacatcagtacctcaaagaggac

SEQ ID NO: 245353 - DNA, 435 bp, Glycine max
aattcccggctcgacccacgagtccgcccacgcgtccgattccaatatattccattctctctgtgtatttccctacctctcccttcaagatgcagatcttcgtcaagaccctcaccggcaagaccatcacccttgaggtggaaagctctgacaccatcgacaacgtcaaggccaagatccaggacaaggaaggaatccccccggaccagcaacgtctcattttcgccggaaagcaacttgaggacggccgtacccttgctgactacaacattcagaaggagagtactcttcacctcgtcctccgtctccgtggtggcatgcagatcttcgttaagacactcaccggcaagaccataaccctagacgttgaaagctccgacaccatcgataacgttaaggccaagattcacgacgaagaaggtatccccccggacc

SEQ ID NO: 245354 - DNA, 382 bp, Glycine max
  unsure (1)..(382): unsure at all n locations
cacgcgtccgctgaggatcttaggatcccatttgagcgctatggtcctgtgaaggatgtttatctacctaaaaattactacactggtgagcctcgaggctttggatttgtgaaatatcggtatggtgaagatgcagctgaggaaaagcaacatctcaatcatactatcattggtggacgtgaaataaggattgtttttgctgaggaaaataggaaaacttctcaagaaatgcgtgttaatactcgaggaagtggtcgacatggaggtggtagaaggaggaatcgtactagatccccacgaccccgatcctattctcggtctccatcaccagctagggatgattcaagggatggcangggtanggatgattattattctcctg

SEQ ID NO: 245355 - DNA, 430 bp, Glycine max
cgggtcgacccacgcgtccgctttggctggctacaaaccgtctcagactcagttactctttcctgcaaagcttgttgatactgtgaacacagagcatattgagctggatttctctgatgtctttggtcctgttacgttagatttgaataacattgattccactaccagtgagcctatggaagaagtgaacgagctggtttatgatgacccaccagtgatttacactcgctcacattctctggttggcccttcaacttgtgttagtcaatcacttaagcttggcaaactcaccatacatgagactgaggattcattggaactagtggagcatgtcaatggagaggccattaaagacatcaaagaatcttcctttgttgaagaatcattgaaagatgaagaatggaatctcatgaagatcacagagttagca

SEQ ID NO: 245356 - DNA, 445 bp, Glycine max
cgggtcgacccacgcgtccgcccacgcgtccggcaattcactctgtacaattcttcgttcgttctctgcagttatatcctttttgagcttcaatggcggacgctgaaaccttcgctttccaggctgagatcaaccagcttctaagtctcatcatcaacacattctacagcaacaaggagattttcttgcgtgaactcatcagcaatgcttctgatgctttggataagattcgattcgagagcttaaccgacaagagcaagctcgatgctcagccagagctcttcattcgtcttgtgcctgacaaggataacaagactctttccattattgacagcggcattggaatgaccaaagcagatttggtgaacaacttgggtaccattgcgaggtccgggaccaaggagttcatggaggcgttgcaggccggtgctgatgtcagcatgat

SEQ ID NO: 245357 - DNA, 437 bp, Glycine max
cccggctcgacccacgcgtcaggaacatggaccctaatcacctcttcttcacgcatttccgcgatggtgctattgcctcacgcattgagggccaacacagaggagctcttccttctgttattgtgattggtgctggaatatctggacttgcagcagcacgaagtctctatgatgcatcttttaaggtgactgtactggagtcacgagataggcttggtggtcgcattcatactgacttctcatttggctgtccagttgacatgggagcctcatggctacatggagtttgtaatgagaatccattggctccattgatacgtggcctggggctttcattatatcgtaccagtggtgacaactctgtcttatatgaccatgacttggaaagttatatgctttttaacatcgatggtaagcaagtccacaacagatggtca

SEQ ID NO: 245358 - DNA, 377 bp, Glycine max
ccacgcgtcagcacacgcgtccgcttggattggttgttagaatggagggtcagagtaagggtagttttaatgtgatggaagggagtgagggcaaaggaagggagtttgtggtggaaaagtctgcatcatcaatagtgggaacttgtgatttggttctaaggattttggcctttttactaacccttgtggctgctgtagttattgggacagataagcaaactgccattgttccaatcaagcttgtggattctatgccaactttgtacgttcctgttgcagctaagtggcattacttgtctgcctttgtctattatgtgggggcaaatgcaatagcatgtgcatatgcaatactgtctctcttgctcactcttgcaaat

SEQ ID NO: 245359 - DNA, 408 bp, Glycine max
  unsure (1)..(408): unsure at all n locations
ccggctcgacccacgcgtcagggaaaaggtgggaaccacttttggaagtccattgggcttggatttaagactcccaaggaatccattaaaggtatctctctcattcactactatctcttataaaatgtttattctatgcaatgtgaatctatcaggttattgttctatgatgaagatccaccttaaagtgtacagaagtatgttcttcattagtgtaggaaatggaatttggtttgggtgggaaggaataaggttgctgcattagagcctaatgaagtagaaacattgttgggcttcccaaggagccacactagaggaggtggaataagtangactgacagaaagtgacccattatcaggtttctctccatttctccttgtctggctactttaagataagtttcgctg

SEQ ID NO: 245360 - DNA, 408 bp, Glycine max
ccggctcgacccacgcgtcaggaaaaaggacgtcacttcctcgccacaccctgcttcgtgaatcttagtgcatcaagatctctgtctctctgtctctctgcaatcgaaaatgagcaagggaccgggtctcttcaccgatatcggcaaaaaatccaaagatcttttgactaaggactacagctccgatcagaaactcaccgtttcctcctacagcgtctccggagtgaccctcacttcaacatctgtgacgaaaggaggactctcaacaggggatgtggcagcactgtacaagtataagaacactgttattgatgttaaacttgacaccgcatcaactatctccacaaccctcacatttaatgacgttcttccatccaccaagactattgcttcatttaagctgcctga

SEQ ID NO: 245361 - DNA, 433 bp, Glycine max
aattcccgtctcgacccacgcgtcagtccatttccaccatcaatactattttcttgtcgttgagaagcttcgcgaacgaaagcaaagaaccctagaccgtcacagaaccattccatagccatgtctggtgttggccctctttctcaggattgggaacctgtcgtcctccgcaagaaggctcccaccgccgccgccaagaatgacgagaaagccgtcaacgccgcccgccgctctggcgccgaaatcgaaaccctaaaaaagtataatgctgggacaaacatagcagcatctagcggcacttcattgaacactaagaggctggatgatgatactgagagtctagctcatgagaaggtgccaactgaacttaagaaggctataatgcaagctaggatggacaaaaagcttactcagtctcagcttgctcaactga

SEQ ID NO: 245362 - DNA, 438 bp, Glycine max
ggtacctagtaaacgaattcccggctcgacccacgcgtacgcttggtggtacatcccatgtctccgcaagtaatgtttcttatcgtgttacagtgcttttctttggtggtggtgatgatcatgaagcccttgcttatggagctcgtatggctgagcaccctggcatcagattgctggttattcgctttgtaggggaaccaatgaatggagagattgtaagagttgatgtgggtgactccactagcaccaaattaatctcacaggatgaggaattcctcgatgaaattaagacgaaaatagccaatgatgactccatcatctatgaagagaaagtagtaaaagatggtgcagaaacagttgctattatccgtgagttgaaaagctgcaatctgtttcttgtgggttcaaggccagccagtgaagttgccagtgctatga

SEQ ID NO: 245363 - DNA, 429 bp, Glycine max
gggtcgacccacgcgtccaataaaaccaaatactttgcgtgcaaaaccatcacatcatcggcaacagtgacagtaacggtggaagagagaaaggattcgctctcctcaatccttatataagctccagcgacccaatttcttctcttatcgatttgattgtttctgagtaatggcttcgtcgcgagtagatctggatgggaaccccataaagcccatcaccatttgcatgattggcgccggtggcttcattgggtcccacctctgcgagaagctcatgtcggagacccctcacagtgtcctcgccttggatgtctacaatgacaagattaaacacctcttggaaccccacacgctcccttgggcctctcgcatccagttccatcggctcaacatcaagcacgattcccgttccgaaagcctcatcaaaat

SEQ ID NO: 245364 - DNA, 423 bp, Glycine max
  unsure (1)..(423): unsure at all n locations
cgggtcgacccacgcgtccgaggaagagtgcgaaagaaagatcgttctcgatgacagaggggaacggtgacaaaactctgcgaaagatcgcagacgcattcaatgaccttgcaaacgttttcaccgattctcagagcgcagaagcagaggtcaaggttgctcccttctctcatgcctgctctctcgtctcccctctcttcggttgcttgggcgtcgccttcaagttcgccgaaatggattacgtcgccaaggttcatgatctggcanaggcgtccaagtctattcagaatctgcagtctctgattgagctggatgtgcaagctaacactgttaggaaaggaggtagccatacgcggaatctgctcagagtgaagcgcggacttgacatggtcagagtgctctttgagcagattctagttacag

SEQ ID NO: 245365 - DNA, 418 bp, Glycine max
cgggtcgacccacgcgtccagttgacactgctatgaattctcagaggccatctgtggtatattcattgaaaaatgatcatggtggcagccaacttcaaaggctgcagtatcaagttacgaaaatgataaaaggattttctagccctccagaagttaaatatacaaattacaatccggaaatcttgacaactcagaagcgtcaatgggctgcaaactttcagttgcagtacacggaccataagtcttggaaggagccaacaaagctgtttgaaagcatggtggttgctggacttcatcctaattgtgatattcaggcactgcaaaggcaatgttttttaagaaagtctgaaagccctggtaaattgagaagtgcacttggttatcagaatcagtcccgtgtggaagtggaacccaatct

SEQ ID NO: 245366 - DNA, 236 bp, Glycine max
taaaggttcaaaccttacttacccttccatccaatttcataccccttcaaaattttcccctaatttcatttcattggccttctttttaaaagttctttatgggaaaaaccctggttttacccaatttaaccccctttcacaaaatccccctttcccaagttggcttattaccaaataggcccccaccatttccccttcccaaaatttccccaccctaattggcaaatggaactccc

SEQ ID NO: 245367 - DNA, 389 bp, Glycine max
cccggctcgccccacgcgtcagcaggtggacgcggcgtggaggcgtgccccgctgcggacgcggaccacatgccgtgcgaggatccgaggctgaacagccagctgagcagggagatgaactactacagggagaggcactgccccaggccggaggactcgcccctatgcttgattccgccgccccatgggtaccgggtgccggtgccgtggccggagagcttgcacaagatatggcacagcaacatgccatacaacaagattgctgacaggaaaggtcaccagggatggatgaaactagaaggtcaacactttatattccctggtggtggtacgatgtttccagatggagcagagcaatatattgaaaaacttggtcaatacattcctat

SEQ ID NO: 245368 - DNA, 440 bp, Glycine max
ccggctcgacccacgcgtcaggtggtaatacaagagaggtgcttcataaattcagtgtggatctcccaaagaaacatggaagaggagggcaatctgctctgcgttttgcccgtcttcgcatggagaagcgtcataactatgtgcggaagacggccgagcttgctacccagttctatatcaatcctgctaccagccaacccaatgtttctggattaatactggctggttcagctgatttcaagactgaacttagtcagtcagatatgtttgatcctcgacttcaggcaaaaatactcaatgttgttgatgtctcctacggaggcgagaatgggtttaatcaggctattgaactctctgctgaaattctgtccaatgtgaagtttatccaggagaagcgattgattggaaaatactttgaggaaatcagccaggatactggg

SEQ ID NO: 245369 - DNA, 433 bp, Glycine max
cccggctggccccacgcgtcaggattggagatccgtaacacgagcacggaagctgccaaatgatgagataacaagttgcaaattggccataagcaatcgatcaagattggaaccgcctcttccacacgagtactttggaaacgcagttgatgtggtgagcactgcagggttcacggcaggggaattgcttgagaaggatctaggatgggcagcatggaaggtgcacgtggctgttgcgaaccaaaacgacaaagcggtgagacaaaagctcaaagagtggttgaagcttcctgtggtgtaccaacttggtgtgcactttgatccttgtactgtgaccatgtcgagttccccgaggttcaacatgtatgggaatgaatttgggatggggaaagcggttgcagttctgagtggatatgccacacaaaatgatggg

SEQ ID NO: 245370 - DNA, 444 bp, Glycine max
  unsure (1)..(444): unsure at all n locations
aatgcccggctcgacccacgacgtagcaaatcttaaaaatattcagtgaagatcaacctcaatggcatctcttggcgtgcgaccagttcttccccctccattaacttccatctccgacccacctcctcttttcgatggcaccaccaggttgtacatcagttattcttgcccctatgcacaacgtgtgtggatcgctaggaactacaaggggctacaagataagatcaatttggtccctattaaccttcaagacaggccagcttggtataaggagaaagtctaccctgaaaataaggtgccatccttggagcacaatggcaaggtgttgggagaaagtcttgatttgatcaaatatgtagatgcaaactttgaagggacacctttgtttcccagtgatcctgccaaganagagttcggtgagcaattgatatcccatgttgatac

SEQ ID NO: 245371 - DNA, 435 bp, Glycine max
  unsure (1)..(435): unsure at all n locations
aattcccggactcgacccacgagtcagcccacgcgtccgcaaactagtaatattaatcttcgaatccattttattattcataatgggtagtttcacatttgaggatgaaaccacctcccctgtggctcctgctaccctttacaaagctctacttacagatgccgacaacgtcatcccaaaggctgtcgaagccttcaggagtgttgaaaaccttgaggggaacggtggccctggaaacatcaagaagatcactttcgttgaggatggagaaagcacgtttgtgttgcacaaaatagaatcagttgatgaggcaaacttgggatacagctatagcgtanttggtggagttgggttgccagacacagtggagaagatcacattcgaatgcaaattggctgctggcgccaactgaaggtctgctgggatgctaactgt

SEQ ID NO: 245372 - DNA, 446 bp, Glycine max
aatgcccggctcgacccacgcgtcacgaccaaagcagatttggtgaacaacttgggtaccattgcgaggtccgggaccaaggagttcatggaggcgttgcaggccggtgctgatgtcagcatgatagggcagttcggtgtggggttctactctgcttaccttgttgcagagaaggtcattgttaccaccaagcacaatgatgatgaacagtacatttgggagtctcaggctggtggctctttcactgttactagggacactgatggcgagcaactcggaaggggaaccaagatcaccctcttcctcaaggaagatcagttggagtacttggaggagaggagaatcaaggatcttgtgaagaagcactctgaattcattagttatcctatttacctttggactgagaagacaccgagaaagagatcagcgatgatgaagatgatgaa

SEQ ID NO: 245373 - DNA, 394 bp, Glycine max
cgggtcgacccacgcgtccgaagaatttgaacccatggagactacttctcaagaaaatgcgcaacagaccaatgaaactatgatgggatcaatcggactgacaccaatggctcctcatggattctttcctgcatatttacctgttccatttcccatgtggccatcaactgtggctcccccgtttgaagaagttaagggaggagagacatcccaccatcagatccacaagccaatcccagtcattcccaaggaacctgttaatgttgacgaacttgtgggaatgtctcatctaagcattggggaagcaaaggtacgtgatagagagccttcccctctttccttaaagttgttaggagagccctcaaggcagtcagcattccatgcaaatgctcca

SEQ ID NO: 245374 - DNA, 399 bp, Glycine max
acgcgtccgacacacgtccgaacagagagagcaaaaccctagagcatccatcacaagcagaggaagaagatggtgaagttcctgaagcctaacaaggcagtgatcgtcctgcagggccgctacgccgggcgcaaggcggtgatcgtgaggaccttcgacgagggaaccagggagcgcccctacggccactgcctcgtcgccggaataaagaagtacccaagcaaggtcatcaagaaggactccgcgaagaagaccgcgaagaaatctagggttaaggccttcgtgaagctcgtgaactaccagcacctcatgcccacgcgctacacgctcgacgtggatctaaaggacgctgttacccccgatgttctagccaccaatgacaagaaggttaccgctctc

SEQ ID NO: 245375 - DNA, 435 bp, Glycine max
cgggtcgacccacgcgtccgaccacgcgtccggtccgtagtgaagtgttcccattatcatccggtgcattccacgtgtgtccgtgagtccccaccggcgccgtaaccactctccgccgtggcctccaccattaatggaccaaatcccctaaacatccttctcccaattccgaatccatggctcgctcttctctccacgcgctctccaccattctcttcctactacgcttgttgttatctccttccacacacgcccttaaactccccttccgagtcaacgatgttctccccgttctcccccacggaatctcctggcccctcctcaacaacctccacagcgccgtcgacttgctcccttccttcgtcggcgccgtcacgcccgacaacggttcccttcagtggaagggcgcctgcttttacgataatcaagcctccc

SEQ ID NO: 245376 - DNA, 392 bp, Glycine max
  unsure (1)..(392): unsure at all n locations
cccggctcgacccacgcgtcagcccacgcgtccgcccacgcgtccggagttaggaaaatggggaagaagaagaagagaagtagggtttccgaagacgaggaaatcgaatccgataccaaccccttcgataaaaacgaaaactctctctatcaggttcttggtgtggagaaaacagcatctcaacaggaaataaagaaggcatactacaagttggcattgaggctgcatcctgataagaaccctggtgatgaggaagctaaagcaaagtttcagcaattgcaaaacgttattgctattcttggggatgaagaaaaacgggccgtttatgatcagactggttgtgttgatgatgctgaacttgcangggatgttgttcagaatcttaaagaata

SEQ ID NO: 245377 - DNA, 394 bp, Glycine max
ccgggtcgacccacgcgtcagcacagattttgatcatgtataccgaacaatgtccttcagtcggccaacaaacctcttaaatactacagctgctggcacttcatcttctgttccaacgtttcgtggtacaaattctgcagaagggatgcccgagttatctgaggcagacatggttgtgtttcttggtgattttaattatcgacttgatgacatttcttatgacgaagcaagagattttgtttctcaaagatgctttgattggcttagagaaagggaccaacttcgagcagaaatggaagctgggaatgtcttccaaggaatgcgtgaagcaattataacatttcctcccacatacaagtttgaacgggcacaagttggtttggcacggtatgat

SEQ ID NO: 245378 - DNA, 389 bp, Glycine max
cgcatcagagataattcactggctgacaatgtcaccgttgatcccgttgtgcgaggatttattagagattgggatgcaattgaggatttgttgcaccatgttttgtataccggcctcggatgggaaattggcaatgaaggacaaatactatttacagatccactttgtaccccaaaggcgaacaaagaacagttggtgcaactaatgtttgaaacattcaatatatcaggattttatgcctcagaacaagcagtgttatcactctatgctgtgggacgtatctcaggctgcactgttgatattggacatggaaaaatagatattgcaccggtaattgaaggtgctgttcaccacatcgcctcgagaagatttgagtttggaggtactga

SEQ ID NO: 245379 - DNA, 451 bp, Glycine max
  unsure (1)..(451): unsure at all n locations
ggtaccagttacgaattcccggctcgacccacgcgtcagcccacgcgtccgcccacgcgtccgaagaaaagtcaaagacaatgtcagggatcattcacaagattgaggagacccttcatgtgggaggccacaagaaggaggaggagcacaagggtgagcagcaccatggtggagaatacaaaggggagcatcatggtgaacacagtactgaatacaaaggagagcatcatgttggtgagcacaagccggagcaccatggaggagaagagcacaaagaggggttcctagacaagatcaaggacaagatccacggcgaggagggtggcgccaccgccgagggcgagaagaagaagaagaagaaggagaagaagaagcatgaacatggccatgacagcagcagcagcagtgacagtganntagatatctcccactgctgcatcacctatatacc

SEQ ID NO: 245380 - DNA, 337 bp, Glycine max
gacccacacgtccgcccacgcgtccgcccacgcgtccggaagaatgagaaatatgtgcctttgtttaccggcggtgatgattcggagatagttgaccggagaaacgggctgcgcaaacagattgaagataggttggttgcagctgctgcaagtggcaaggatttagaagagactggcagtgaggatgatggtcttttggatctgagtgatgatgatttttttcttgccgggagttctagtgacgaagcagatgcggatgatgaatggacagacaaaagttcaagagaacaagcttccaatgcctccgggaaaagtttgttcggcatgtccagtgacg

SEQ ID NO: 245381 - DNA, 434 bp, Glycine max
  unsure (1)..(434): unsure at all n locations
cacgcgtccgagntaacaacaagaaaagaaaaaaagaagagttgagattccctttgaagaaaagatggcatcccataggcaaagctatgaagctggtcaaactaagggccgaactgaggaaaagacgaaccagacgatgggcaatattggagagaaggctcaagctgcaaaggagaagacccaggaaatggcccaagctgcaaaggagaagacccaacatacagcccaagctgccaaggacaagacttgcgacacttcccaagcggcaaaggagaagacccaacagaatacaggagctgctcaacaaaagacctcagacatgggccagtccacgaaggaatcggcccagtcagggaacgacaacacccaagggttcctgcagcatacaagggacaaggttaagggcgcaacccaaggtgctacagaagctgtta

SEQ ID NO: 245382 - DNA, 401 bp, Glycine max
  unsure (1)..(401): unsure at all n locations
acgcgtccgaccaagcgtccgaaggggtggtggctgcttcgaaagcttaataatttgtttatttccagaacatcatagttttcgcagcagcaaactaacaaattactcatatcatataataagatggcccgttctctctcgcaagccaaacgtattggtgtccttgttgctcaatctatctccctaattcccgttcatcggcgaggttacgcagtggcatccgatgtatcggtaagagttggattgggtaatattgggcgaacgaatggaatcgtgggaggtgtagaagagaagcctgatacaagagatggttcanaagcctactcaactgattgggccccagaaccagtaacaggttactataggcccattaaccacacccctgaaattgacccggtgga

SEQ ID NO: 245383 - DNA, 367 bp, Glycine max
tgggaagaaagttgatgataaggagtggtatgttggaaaagcccagaaaaaatctgagcgtgaacaagaactgaaaggacggtttgagcagagtataaaggaatctgctgacaaatatcaaggtgtgaacctgtatctcaagaacttggatgatactatcagtgatgaaaaacttaaggaaatgtttgctgaatatggtacaataacttcatgcaaggttatgcgagaccccactggaatcggtagaggatcaggatttgttgcattttcaactcctgaggaagcatctcgtgctctcggtgagatgaatggtaaaatgattgctggaaaacctctgtacgttgcccttgcacagagaaaagaagac

SEQ ID NO: 245384 - DNA, 403 bp, Glycine max
cgggtcgacccacgcgtccgagtaacttcatcaataatcgcagaagcagtttccggtgcatctcatcgtcttccaaaatgaacgacgcagatgtctcgaagcaaatccagcagatggtgcgtttcatccgccaggaagctgaggagaaagccaacgagatctctgtatctgccgaagaggaattcaagatcgagaagctgcagttggttgaagccgaagagaagaagatcaggcaagaatacgaacgcaaagagcgccaagtcgaaattcgcaagaagattgagtactcaatgcagctgaatgcttcccggattaaagttcgtcgggctcaagatgacgtgatcacttccatgaaagaggctgcatccaaggaacttttgaatgtcagtcatcagcatgatga

SEQ ID NO: 245385 - DNA, 358 bp, Glycine max
gggtcgggcacgcgtccggttcaaactaagttctgaaaatgagttccaaggttttgcttgttctacttatgttcttggccactatacttctgatctcctctgaggttgcacccgatgatgcatacgagaattttgacaaaatagatgggaagcctagtgcagatggggtagatgaaagcaagtattggcgtggcggctatggtggcggctatggtggtggttatggaggtgggcgtggaggctatggaggtgggcgtggaggctatggagggggacgtggtggatatggcggcggacgaagtggctatggtggccggcgtggtggctatggcggcgggcgtggtcgcgggcgtggtgg

SEQ ID NO: 245386 - DNA, 322 bp, Glycine max
gacccacgcatccagcgatttgcagatacttacaagatggagtgccctgcagcgattaaccgtctcgtggtttctggtgtgcctgccaccgtggagcatcgtgcaactgcggctgcctctgcttccacctctgccgctactgtggccgagtgtgttcagaattttattacttcaatggattccttgaaacttaacatggtggctgtggatcaggtgcacccattgctctcggacctttatgcttcgcttaataagttgacgatcctgccgcctgattttgaggggaaaaccagaatgaaggagtggagtgcaaggttatcta

SEQ ID NO: 245387 - DNA, 392 bp, Glycine max
gacccacgcatccatgcaaactgtttttctctcttagcttaaaagttctctcttgctatccctcctccattaaccccattaataataagcaccatcaatttccttaattgcttcatatataggagaatacaatgaccaagatctttgtgctgttatgtctgctcttcttagcttcttctgggtttgtccatggctcttctaagaaggatcatattaggttatttgagctcaagagaggtgatttttctataaaggtcaccaattggggtgcaacacttgtgtccgtaatacttcccgataaaaaggggaagttgggtgatattgttcttggatgaggattctcccagggcatacacaggtgataaatcatactttggagctactgtgggccg

SEQ ID NO: 245388 - DNA, 443 bp, Glycine max
gggccgacccacgaatccacccacgcgtccggtttcattgctctctctcttgtgcggacacaatttttgatggggatatacctcagcactcccaaaacagagaaggcctctgaagatggtgagaacgacaagcttcgcttcggtttgtcttccatgcagggctggcgtgctaccatggaagatgctcatgcagctcatccatgtttggacgagtccacgtcatactttggtgtttatgatggccatggaggcaaagcagtttcaaaattctgtgccaagtatctacacctgcaggtgcttaagagtgaagcttacttagctggagatttaggcacatctttacagaaatcttttctcagaatggatgagatgatgcgtggacaaagagggtggagagaattagcaatcttgggggataaaatagaaaagttgtctggtatgct

SEQ ID NO: 245389 - DNA, 436 bp, Glycine max
gacccacgcgatccactttgattcccattactcatttccaccatttcaccttctcaatctgtttctctgctttactaatttgtcccaaatcagaaccagattgagcttctgcacaaccagaccagagattcaacgcagaaactgtgcttatccctggtccataggatctgatttggttcataagagagtagtacacgtttcattgctcgaaatagagttgaaaaatctggagtttccatgtctgagaaaccatcttcatcgttgacatctaccgtagctgctcgagaagttgatcccttgttgcaggatttgaatgaaaaaaagcagagctttaagcgcaacgtggtgtcgttagcggtggagttgaaggagccacgttgtcgcccagcttcccaagaacaatcctatgccaaggaaactcaaaacagacaggaag

SEQ ID NO: 245390 - DNA, 398 bp, Glycine max
gggtcgacccacgcatccagagagggtgtgtttctgggttttggaaatttcagccaatatcgaaaaacaagaagccccatcaataataatcatcgaaggaatttgaaaggtcgaaacttgagcatctgggatcgcgaaattggggtttttggttaaaagggtattatcttcggaactgattgatggcaaacctgtacgtgaaggcggtgccaccggcggatctgaacaggaacacggagtggttcacgtaccctggcgtttggaccacatacatcctcatccttttcttttcttggatcctcgtactctccgtcgtcagttgttcccctggcatcgcttggactatcgttaatctcgcacactttgctgtaacaatatcacttttatcactggaagaa

SEQ ID NO: 245391 - DNA, 446 bp, Glycine max
gacccacgcatccgagcgatagctgataagagagataccaacaagaaaagaaaaaaagaagagttgagattccctttgaagaaaagatggcatcccataggcaaagctatgaagctggtcaaactaagggccgaactgaggaaaagacgaaccagacgatgggcaatattggagagaaggctcaagctgcaaaggagaagacccaggaaatggcccaagctgcaaaggagaagacccaacaaacagcccaagctgccaaggacaagacttgcgacacttcccaagcggcaaaggagaagacccaacagaatacaggagctgctcaacaaaagacctcagagatgggccagtccacgaaggaatcggcccagtcagggaaggacaacacccaagggttcctgcagcagacaggggagaaggtgaagggcgcagcccaaggtgctaca

SEQ ID NO: 245392 - DNA, 402 bp, Glycine max
cgggtcgagccacgcgtccgatggaggttgcggcaaccttcgatcttaatcccacggggcaacgttggatctgttgaacttcttcttttatatgcactctgtgatttcgctacaccctcactccgcttcgccaccctatgggggacaacaacagcaacaacgatgccttcatgcgcaaccaaaacgccgccgttcaggcccgcaccaaagcgcagaaccgttccaacgtccttcagctcaaactgattggacagagtcacccaaccggtctaacagcgaacctgttgaagctcttcgagcctaggcctccgttggagtacaatccgcctccggagaaacggaaatgtccaccgttatcagggatggctcaatttgtgagcaagtttgcccagcctggcgatc

SEQ ID NO: 245393 - DNA, 397 bp, Glycine max
cgggtcggccacgcgtccgaccaagcgtccgtggaagaagctttgaaaatgcgtgaaatgatggaggctaagggattgtaccctggagttgttacttttaattcaattttgcgcaagctgtgccaagatggcaggataagggatgcaaacaaactcttgaatgagatgagtgaaaggaaaattcaagctgacaatatcacatgcaacacactaattaatgcttactgcaagattggagatttgaaatcagctttgaaatttaagaacaagctgttagaagctggtctaaaacctgatccatttacatataaggcactgagtcatgggttctgcaagacgaatgaactagaaagggcaaaggaattaatgttcagcatgcttgatgcctggatttaac

SEQ ID NO: 245394 - DNA, 369 bp, Glycine max
acgcgtccgaggcaatagcaactgctgctgcaacttccatctttcctgctattgagccagggactgtatgtctcattattgagggtttattgtttacatggtggatgtgtggcattcacactggtcaagtgcgccaatctttacagaagaaatatcacttgaagaattcaccgtgtaatgcatgttgtgtgcactgctgctttcactggtgcgccctgtgtcaagaacacagggagatgaatggacggctctcggacaacattttttcagaaatgaccgttgtaaaccctcctcgcgttcaagagatgagatctaccgatgacaaggaaactcctgaaacgtcttcacctaacaacatcgagcatactg

SEQ ID NO: 245395 - DNA, 281 bp, Glycine max
gacccacgcatccacccacgcgtccggtcccagttaaaaaagacgcttccaccctccaatatattactcaaatcaagcgaagaagagcactcgtcgcagaaaacctagtacttgacatcggtggccagttcctgtgggtcgagtgcgagagcagcgacgtctcctccacgtaccgcgccgcagcggtctggcgccgcgcagtgctctctcgggacatccgacagctggggaaactgcgtctccgcgcgaaaagccggcggcagggacaggcgtgcggcctc

SEQ ID NO: 245396 - DNA, 172 bp, Glycine max
acccacgcatccacgttgctgttcatagtgatacatggttacttgcccttgccttttattttggagccagatttggatttgataaaactcagaggaatcgactattcggtatgatcaatgaactagcaccgagagttcaagttgttacagcgcggaaacaggttagagagaa

SEQ ID NO: 245397 - DNA, 449 bp, Glycine max
gacccacgcatccgcccacgcgtccgcccacgcgtccgcccacgcgtccggtctgcaccaataacccctagaacagcttcagtagtaggaacacctgttgtggcatctccacctgtgtcatgtccaccctctcagcttcactcaccatctctaacaaggtcacctctacttcaccctgaggatggagatgcaccacgtcgtaaaacatctaagactccaaagactccaagaacccctagaacccctagaaccccacttagaatctctaatttgactccaaagttcatcacccctttgggaagccctatgagaaaagctctgaggttcaccaagcttgatcctcaggatgcttggcttccaatcactgagtcaaggaatggtaacaagtactatgctgcttttcacaccctttgttctggtattggaattcaggcccttgttctccctgt

SEQ ID NO: 245398 - DNA, 423 bp, Glycine max
gacccacgcatccatccacttccaattttcaataattcacgactccttccgagatctctctctctcgcccacaatccaaccatggcgaatacggggaatttagacgcggcgatagagcaattgctgaacgtggagaagcagatgaggctcgccggtgacgtggcgggtaccagaaaagcagccaccgatattttgcagctctgcttcgatgcacgagcctggaaaacactcaatgaccagattgtcgttttgtcaaaacgacgtggccagctcaagcaggctgtaacagctatggtgcaacaggctatgcaatatattgacgagacaccagatatcgaaactcgcatagaactcatcaaaacgttgaacagtgtgtctgcagggaagatatacgtggaaattgagagagctcgattgatcaaa

SEQ ID NO: 245399 - DNA, 449 bp, Glycine max
gacccacgaatccactggaaggggtcttgtgactggtgcttttgttggtgccacagcttcacacagcaaaagtctccatgtgtttccaatgggtgttttagaggggctccggttcatgtgttgtttccggttcaagttatggtggatgactcagagaatgggaacttgtgggagggatgttcctctggagactcaattcatgcttattgagagcaaagagagtgaaactgatggggagaattctccaatcatctacactgtcttgcttcctctcctcgaaggtcaattccgagctgttcttcaaggcaatgacaagaacgagatagagatttgcctcgagagtggggataatgcagttgagactgaccaaggccttcacatggtttacatgcatgctgggaccaatccctttgaagtcatcaatcaagctgtcaaggctgttgaaaaac

SEQ ID NO: 245400 - DNA, 288 bp, Glycine max
acgcgtccgatctatctccctctctctctctccctctctctctcatacttattctccctcgcgcgaaagataaacacatttttagttgcaactaatgggaactgttgaagctgcaaacaaggatgcaaatggaagcctcctagagaaaaatcctacagttgtttttgtgttaagtggcccaggcagtggaaacggtacccagtgtgcaaatattgtcgaaaattttgggtatactcacctcagtgctggtgatcttctgggagcagaaatcaaatctggttctgaaaa

SEQ ID NO: 245401 - DNA, 400 bp, Glycine max
gggtcgacccacgcatccgcccacgcgtccgcccacgcgtccgggcaccttttcaaccgttcactccttcttctgcgtcaccgtcaccatcataatcaccatccctttccttattcttcttctgtttcatccctctccccattttctcgctctcgtttcttgtcctctactcctttctccatggcttctgattcccctttccctgtcaccgctcaaaacatcaaccccaaggttctgaaatgtgagtatgctgttagaggagaggttgtcacacttgcccagaatttgcaaaaggatttacaggccaatccagcttctcacccatttgatgagatactttactgcaacattggaaatcctcagtctctgggcccagcagccaataactttttttccgaga

SEQ ID NO: 245402 - DNA, 296 bp, Glycine max
gacccacgcatccgaccacgcgtccgcccacgcgtccgcaaaaccctagctcgcgttctgctttcgtcttttacatcagcaggatggagtctcaggtgaagcacgcacttgttgtcaaagttatgggtcgtactggattcagaggacaagtaacccaggttagagtgaaattttgggatgatcagaatcgtcacagcatgaggaatgtgaaaggacctgtgcgataaggagacattctcaccctagtcgagtctgaaagggaagcaggaagattgcgctagacggtttcttttggc

SEQ ID NO: 245403 - DNA, 301 bp, Glycine max
cccacgcatccaagcagaccgagctagctagctagcaagcaagcacagagatggaggcaaagcgaggccatgccctcatgtgcttggcacgtgtttcactcttcctctgcgctctaaccctatccgctgctcacggaagcaccacggttcaagacatcgcgagaaagttgaaactcggggacgacgagcttctgcgcacggagaagaagttcaaggttttcatggagaattacgggaggagcgacgccacagaggaggagtggttgcgccgtttggggattttcgcccagaacatggtcag

SEQ ID NO: 245404 - DNA, 353 bp, Glycine max
gacccacgcatccagtttgtaagggagaggtgacacttaaaagtgttaccccaatatatggccgtgcgaacaatgtccgtggtcctgaggaggattctgcacttaagatccctcccaggccccaagcgaagagagttgagagtctgagacaaaccattcagagaaatgcatttgcactccctgtggaagagatgattcggcgtcttggaagcagaattgagcttacacgcgatttggttcagccacctgaaccggatgctgcccgtgaaacagctgagagaaccacttccttgctaaggttcttgactgcgccagggatacgtgcagagcatcagaatccagtgggcaccccc

SEQ ID NO: 245405 - DNA, 492 bp, Glycine max
  unsure (1)..(492): unsure at all n locations
ttgattcggcatgtcgcgctactatcttacaattgncgggtcgacccacgcatccattctgatcctattgtgttggccttcgggatcggagtaatgattaacagggacagtcgggggcattcgtatttcatagtcagaggtgaaattcttggatttatgaaagacgaacaactgcgaaagcatttgccaaggatgttttcattaatcaagaacgaaagttgggggctcgaagacgatcagataccgtcctagtctcaaccataaacgatgccgaccagggatcagcggatgttgcttttaggactccgctggcaccttatgagaaatcaaagtctttgggttccggggggagtatggtcgcaaggctgaaacttaaaggaattgacggaagggcaccaccaggagtggagcctgcggcttaatttgactcaacacggggaaacttnacangttcagacatagtaaggattgacagactgagagctctttctt

SEQ ID NO: 245406 - DNA, 408 bp, Glycine max
gacccacgcatccagttcactcttcctcccttgccgcaacggttttagcgcatcttcatctagatttaccgaatatgggtacggaaaaggttcacatcattattgtggtcattggccatgtcgactctgggaaatccactaccatctgatcaccttgatttataagcctggaggcactgacaaacgtgttactgataggtttaaaaaggaagctgcttacatgaacaagaggtccttcaactctgccttggtgctcgacaatcctacggctgagcgtgacagatgaatcaccattgatattgctttgtggaactctgaatcaacatcgtagcattgcacagttattgatgcgcctgcacatacggatctcattaagaatatgactactgggacatcccaatctgactg

SEQ ID NO: 245407 - DNA, 434 bp, Glycine max
acgcgtccggaaacattttcacccccttgataccgcttcaattcaccaatggcaagtcgaggaaaaacccagggatctggcacaaccaaaaagggcatctcccgaagcaacaaagctggtctccaattcccagttggtcgtattgctcgatacctcaagattggcaagtatgctgaccgtatcggttctggcgctcccgtgtatctcgcctctgttcttgaatatcttgctgctgaggttttggagttagcggggaatgccgcaatggacaacaagaagactcgtattatgcctcgccatatccaattggctgttaggaatgatgaagagttcagcaggcttctcggagatgtgactatcgccagtggtggtgtgacacctaacattcacaacaatgttgctgcctaaaaaagtttggacctcgaactcaacct

SEQ ID NO: 245408 - DNA, 279 bp, Glycine max
acccacgcatccacccacgcgtccgcccacgcgtccgtttttaagaatttattaaacataagctttctagcaaaaaaaaaaaaaaaaaaaaaaaaaaaaaaaaaaaaaaaaaaaaaaaaaaaaaaagggaagaaaaacaaaaaggtaaaaaaacttaaataaacataaaagcaatagtaaacaatattctaaagtgtcacctaaaattcaattcaagggccgtctttttaaaatgttctttattgggaatcccctggcttgacctaatttaatcgcctt

SEQ ID NO: 245409 - DNA, 252 bp, Glycine max
tcttctttttcttttttttctttcttttttttttttttgttctttttttttcttttcttttttttctttctgtttcttcttgtttttctttcttttttttttttttttttttttgtctttttttttttttttttctgtttttttctttttttttttttttttttttttttcttttgtgttttctttcttttttttcttttttttctttttttttttttttttgtttttttgttcgttgtttttttttttttt

SEQ ID NO: 245410 - DNA, 333 bp, Glycine max
gacccacgcatccagcgactctgatggatacgtacacggtggcatacggggttcctcgctcgaagtggttggatttggcgggtcatcagaaggacctgaatgcacccgctgacgaaattgataaactagtcattgactggctggacgagcaccttcagaacaaacctttgggtgaatacgttgaaagtgatatcacactttatgcacgtgatgatatcagcacctactagttcacaggtcgattggtctgatgctgacaccatatcctcagcgacaaccttgaagtcgatcctgtcaggaactgatactgctactgcgattctcacacgggca

SEQ ID NO: 245411 - DNA, 226 bp, Glycine max
gcgtccaaaaggaaatggctgaagcacaactacgagaccagcatggcaaccctgtcccactcaccgatcaatacggtaatccggttatcttaactgacgagcgcggtaatcccgtccaactcactggtgtcgctaccaccgctaccggcacagcaggttctgggtttgggtcctatggtatcggtgcttaccgtggtggtgcaagtgcaaccaccgttgcagatct

SEQ ID NO: 245412 - DNA, 217 bp, Glycine max
gacccacgcatccaaaattagttcattctctttgcgcagttccctacctctcctttcaagatgcagatcttcgtcaagaccctcaccggaaagaccatcacccttgaggtggaaagctctgacaccatcgacaacgtcaaggccaagatccaggacaaggaaggaattcccccggatcagcaacctctcatcgtcgccggaaagcagctggaggact

SEQ ID NO: 245413 - DNA, 262 bp, Glycine max
gagatcagtcagtgatccccatgtctacgttcaacatatgtgtgcgcagttgtgtctaacctaagtcacatggggagatagtgtggacatgggagatttgtgcccgcagtgttctatctaattcagctatggctgactcggcatagaccatccaactcaagcttggcgaattgtgagatctgcatttcgagcggctctagggtgaagcaagttggcgtccctgcattgcacatgacagcgactattggcctgactgttatgt

SEQ ID NO: 245414 - DNA, 439 bp, Glycine max
gacccacgcatccagcgcgatggaaaaggtagctttgtaaggcttgaagttgtcacagcttcactgggcttcctaactaattttgaggatgtgtataaattgtgggcttttgtggccaagtttctcaacccgacatttatcagagaagggggtcttcctactgttcaagaaggctccgagacatgagatggcagagttgcccgtgactttattcaattttggaaactgaacatgaaatgaaagattatgtgacaggttgccaaaaggggccgcagccgaagctgcaggaagaatggattggttcatgatgatctgtaagacccctagatagacacaaacttattttctgcatcaaaagaagaataagcaagccgggttgatttgttaattcatgtttcctgttgcctacaattttaataattttccccttttggttttt

SEQ ID NO: 245415 - DNA, 433 bp, Glycine max
gacccacgcatccgagcaaagatgctgctggacaagttcgtggttctccaaatgaatttgctggaataggctccacatcagcccttctttggctggctagaaggtttgcaattctatctgggcctaccattcctattattggcgagggtgatgaagaggcaaatgataggtatgtagaacaattagttgcaagtgcagaggctgctgtggaggaagttatccagcgtggggtaagctttatttttactgtatggagaatatgaagtttttagtcagaaatatgatgactcgtgatattttgggttgtcacttgtcacatctaggtggctgatccgaagaaaatagctgttggtggacattcctatggtgcgttcatgactgctaacctgctggcacacgcacctcatcttttttgttgtggaattgctccttc

SEQ ID NO: 245416 - DNA, 401 bp, Glycine max
caatgaccctgttgtgtccttcaagacagccttgtggtactggatggaacatgtgcgtcctgtcatcaaccagggttttggtgcaaccattatagctatcaatggccgacttgaatgtgatggtgcaaaccctagtactgttcaggctcgtgttaattactacacccagtattgttcacaacttggtgtttcccctggtgacaatcttacttgctaatttatcagtatacatggttccatatgatgacatcatacattcatacggtatatcttaacatatatcagaaaataaaccattcaaggcttacagccttaatttgattattaatgtaattactacttttgggaatattgtatctgattaccatctattatgtgcatccaatattgaataaaactac

SEQ ID NO: 245417 - DNA, 114 bp, Glycine max
gcgtccgacagaacttccatatatagcctcccaaaaaaatgaagagtactacctctttggctctctttccactttgtgccctaacttcatcatatcagccttcaaccaacgctg

SEQ ID NO: 245418 - DNA, 217 bp, Glycine max
  unsure (1)..(217): unsure at all n locations
gcgtccaatggaattccattaggttgggatgaacgtgctgtgacatcagattctggaggactgggtaatcgaagcagaggagccattttccaagggtttcccaatattgaccatactcaggatttcgtgagagaggatatcataggatcgctccgttggctgcgccacgaggtgggcggtccggnatttgcgatttgattttggagaggggttttca

SEQ ID NO: 245419 - DNA, 331 bp, Glycine max
ccggtcgacccacgagtccgagaggatgaaatcaactcccctgtggctcctgctactctttacaaggccctagttacagatgccgacaacgtcatcccaaaggctcttgattccttcaagagtgttgaaaacgttgagggaaatggtggcccaggaaccatcaagaagatcactttccttgaggatggagaaaccagagtttgtgctgcacaaaatagaaagcattgatgaggcgaacttgggatacagctagagcgtggttgggggtgctgcattgccagacacggcggagaagatcacattcgactccgaattgcgggctggtcccaat

SEQ ID NO: 245420 - DNA, 445 bp, Glycine max
gggtcgacccacgcatccacaaattcttctgttcaacaggtgtgtgctttggaatcagcatttggctatttggtctttgccaatggatgctaagtctgctgtagaattaatggagtcttcctcagaggttcatttttctggatttcacatggatggttttgagcaaagaaaggctagcatagaacaaccaacaacctcagaaactgacatgtataaacaaccttttgtcataggtgttgctgggggtgcagcatctggcaagacaacagtttgtgatatgattattcagcagcttcatgatcaacgagttgtacttgttaatcaggattctttttacaataacttgacggaggaggaacttacaagagtacaagattacaactttgaccatcctgatgcttttgatactaagcaattactacatgttatggacaagttgaagcat

SEQ ID NO: 245421 - DNA, 489 bp, Glycine max
  unsure (1)..(489): unsure at all n locations
atcgtcagcttgtacggtactatctacaattgncgggtcgacccacgcatccgagcagatctgagaccacctaccagattgctttgtctatcaaggacgaagtggaagaccttgaaaaggctggcatcactgttatccaaattgatgaagctgctttgagagagggtcttccactgaggaaatcagagcaagctcactacttggactgggctgtccatgccttcagaatcaccaatgttggtgtccaggataccacccaggtacactcttttggatcatcgcaaatcactgaattagaaattttttttgttcatcctcattttcacatatgttgtaataatcaacttttcgtattgacagatccacactcacatgtgctactcgaacttcaacgacatcatccactccatcatcgacatggacgccgatgttatcaccattgagaactctcgctccgacgagaagcttctgtcagtcctccgcgaaagg

SEQ ID NO: 245422 - DNA, 394 bp, Glycine max
gggtcgacccacgcatccaggtgaagcgggtctactatccaggcttgccgagtcaccctgaacatgagcttgccaagaggcagatgactggtttcggtggtgttgtcagttttgaggtgggaatttgacaagttgctattcaaacatgtggtttcctaataacactattttttttttcttttatcaagaatggtgtattggataacatcatgtgccatattttttttatagttaaattgccaatattgcagattgatggagatctacataccacaataaaatttattgattcattgaaaatcccatatattgcggcctcgtttggtggctgtgagagcattgtggatcaacctgctattttgtcctactggtactcatttggaatccatgttca

SEQ ID NO: 245423 - DNA, 448 bp, Glycine max
gggtcgacccacgcatccgtcactcacgagtctcacgcttttcacgatgggcttcattttcggagtggtggtcggaataattgtgggcctggccatcatagtgggcttcgtccgcggcgagaactcccgggccgcccaacgctcccagctcgccaccaccgttgccgccttcgctcggatgaccgtcgaagattccagaaagatcttgccgcctcagttctacccttcctgggtcgttttctcttccagccagaagttaacttggcttaactcgcatctcaccaagatctggccctatgttaacgaggctgcttctgagctcataaaagcgtcggtggaacctattctggaagaatatagacccgtggttttggcggctcttaaattttccaagtttactcttggtactgtagctccacagtttacaggcgtgtctataattgaggat

SEQ ID NO: 245424 - DNA, 460 bp, Glycine max
gggtcgacccacgcgtccgaccaagcgtccgatcagaacatcgaggaaatagcagcattggatgccattgatgcagggaagttgtaccattggtgcaaggctgttgacattcctgctgcagcaaatactattcgttactatgccggtgctgcggataaaattcatggggaggtcttaaaagcgtctagggagttccatgcatatactttgttagaaccaattggtgttgtaggacacattattccgtggaatttccccagcaccatgtttgttgccaaggtgagtccttccttggctgctggttgcacaatggtcctcaagcctgctgaacaaacacctccctcggccttgttttatgctcatctttgcaacctggctggaattccagatggagtgcttaatgtagtacccggatttgggcaaactgcaggtgctgcaataactcacacatggacattga

SEQ ID NO: 245425 - DNA, 332 bp, Glycine max
acgcgtccgaccacacgtccggtgggacatgtgcacgactattcaaatctgaagtacaatttggtcatgcaggagccaaaagtggtggtgagttggagtctgctcaagcaaagaatcaggcactaagggatgctggagctgttgttcccacatcatatgaagcttttgaagtttcaattaacgaaacatttgataaattggttgaagatgggaagatcacaccaatcaaggaaatcacacctccaccaatccctgaggaccttagtactgcaattaagagtggaaaagtccgtgctccaactcatattatttccaccatttctgatgacaga

SEQ ID NO: 245426 - DNA, 239 bp, Glycine max
gcgtccgaatttacgatcaatttgaaagaacttatccatttcttgcaattttagttgtgtacccataactccatgcatgcaactcgttgagctatctcaataaatgccgtttgtatgtgttagtatttagatttatataccttttcggcatgtttcgctgctattgttgtggactatgtgttccgtgtaatccaattaattaagagggagagtattaaattaggaagtaacgagagttt

SEQ ID NO: 245427 - DNA, 390 bp, Glycine max
acccacgaatccgatcaaaagcatataagagatggggttagaagggaaggaaacgccgtcgtttatgagggattttctcgataagtgtggtggctgcgccgttattgacggtggttttgccactgaacttgaaaggcatggggcggacctcaatgacgaactctggagtgccaaatgccttattagctccccagatcttgtccgaagggttcacctagattacctcgatgcaggagcagacataatattaacagcatcttatcaggccactattcaaggttttgaggccaaagggttctctagagaagaaggtgaaactatgcttagaagaagtgtggagattgcacgtgaggcacgagaaatttattaggataggtgcaccagagattc

SEQ ID NO: 245428 - DNA, 460 bp, Glycine max
  unsure (1)..(460): unsure at all n locations
aattgnccggtcgacccacgcatccagaaatttcactggaagaccactagtggtataaagtgtctattggaggaagaggccattaaggtgggaggagccaaccacagccatgccactcaagaccttcatgattcaattgctgctggtaactatcctgagtggaaactgttcgttcagacaatagatcctgagcatgaagacaaatttgactttgaccctcttgatgttactaagacttggcctgaggacattatacccttgcagcctgttggtcgcttggtcctgaataaaaacatagataatttctttgctgagaatgaacaacttgcattttgccctgccattgtggttcctggtgtatactactcagatgataagatgcttcagaccaggatattctcttatgctgattcacaaaggcacagacttggaccaaactatctgcaacttcctgctaatg

SEQ ID NO: 245429 - DNA, 441 bp, Glycine max
ggtcgacccacgcatccacttaatgggaagaaagttgatgataaggagtggtatgttggaaaagcccagaaaaaatctgagcgtgaacaagaactgaaaggacggtttgagcagagtataaaggaatctgctgacaaatatcaaggtgtgaacctgtatctcaagaacttggatgatactatcagtgatgaaaaacttaaggaaatgtttgctgaatatggtacaataacttcatgcaaggttatgcgagaccccactggaatcggtagaggatcaggatttgttgcattttcaactcctgaggaagcatctcgtgctctcggtgagatgaatggtaaaatgattgctggaaaacctctgtacgttgcccttgcacagagaaaagaagacagaagagcaaggttacaggctcagttttcacagatgaagcctgttgcaata

SEQ ID NO: 245430 - DNA, 333 bp, Glycine max
ttggactaactccgactaggatgttggaacagcccagaaaaaatctgagcgtgaacaagaactgaaaggacggtttgagcagagtataaaggaatctgctgacaaatatcaaggtgtgaacctgtatctcaagaacttggatgatactatcagtgatgaacaacttaaagaaatgtttgctgaatatggtacaataacttcatgcaaggttatgcgagaccccactggaatcggtacaggatcaggatttgttgcattttcaactcctgaggaaccatctcgtgctctcggtgagatgaatggtagaatgattgctggaaaacctctgtacgt

SEQ ID NO: 245431 - DNA, 514 bp, Glycine max
  unsure (1)..(514): unsure at all n locations
ggtaatatgttgggccaatgcatgcggncgcactgacgtaccggtctcgaattcccgggtcgacccacgcgtccgcctggaattaagcacgttatttcattagggttggttttgttgaacagaaaaaaagagagaaaaaaattatgggaagcgatggcgtgaggaaaccaagattcctatgccttcatgggttccgaacaagcggagaaatattgaaaacacagttacataagtggcctcaatcggttctagacaacctcgatctagtatttgtggatgctccttttccttgccttcgcaaatccgatgtagaaggcatttttgatcccccttactacgagtggtttcagttcaacaaggaatttacagagtacaccaactttgacgagtgccttcagtacattgaggaatgcatgatcaagtaccgacctattgataggcttcttgggtttttacaggggatcatattattcggttgggcctgcggggtttttaagaaaaagggcttggcact

SEQ ID NO: 245432 - DNA, 520 bp, Glycine max
  unsure (1)..(520): unsure at all n locations
gatttggaggggggatgtggtcgctggaacnattgntatgncgtaccggttcggaattcccgggtcgacccacgcgtccgcgtatcttcatcaataatcgcagaagcagtttccggtgcatctcatcgtcttccaaaatgggcgacgcagatgtctcgaagcaaatccagcagatggtgcgtttcatccgccaggaagctgaggagaaagccaacgagatctctgtatctgccgaagaggaattcaatatcgagaagctgcagttggttgaagccgaaaagaagaagatcaggcaagaatacgaacgcaaagagcgccaagtcgaaattcgcaagaagattgagtactcaatgcagctgaatgcttctcggattaaagttcttcaagctcaagatgacgtgatcagttccatgaaagaagctgcatccaaggaacttttgaatgtcagtcatcaccatgatgatcatgtgtatagaaaccttctgaaagatctcattgttcagtgtttgctaagactgag

SEQ ID NO: 245433 - DNA, 507 bp, Glycine max
  unsure (1)..(507): unsure at all n locations
ggagtggatcagtgatgaatccagtcnangncagtactggtccggaattcccgggtcgacccacgcgtccggttcatactaagttctgaaaatgagttccaaggttttgcttgttctacttatgttcggggccactatacttctgatctcctctgaggttgcacccgatgatgcatacgagaattttgacaaaatagatgggaagcctagtgcagatggggtagatgaaagcaagtattggcgtggcggctatggtggcggctatggtggtggttatggaggtgggcgtggaggctatggaggtgggcgtggaggctatggagggggacgtggtggatatggcagcggactaagttgctatggtggcaggcgtgtcggcttaggtatcgggcgtgtttgtgggcgtggcgtctttgggttgttatgtaagatatctggttttaggtgtatctagatatgttaattgattatggtgattagttattgttgatgtttatttgtagtctg

SEQ ID NO: 245434 - DNA, 512 bp, Glycine max
  unsure (1)..(512): unsure at all n locations
aggaggtataaatcagtcaatgaatgcatnctangtcatgcctgtaccgtctcgaattcccgggtcgacccacgcgtccggcgatttgcagatacttacaagatggagtgccctgcagcgattaaccgtctcgtggtttctggtgtgcctgccaccgtggagcatcgtgcaactgcggctgcctctgcttccacctctgccgctactgtggccgagtgtgttcagaattttattacttcaatggattccttgaaacttaacatggtggctgtggatcaggtgcacccattgctctcggacctttatgcttcgcttaataagttgacaatcctgccgcctgattttgaggggaaaaccaaaatgaaggaatggattgcaaggttatctaagatgggtgcagctgatgagttgacggaacaacaggctaggcaacttcactttgatcttgagtcttcttacaattcctttatggcagccctgcccaatgctggtccttgacttgattggccact

SEQ ID NO: 245435 - DNA, 466 bp, Glycine max
accggtctcggaattcccggctcgacccacgcgtccgtgcaaactgtttttctctcttagcttaaaagttctctcttgctatccctcctcgattaaccccattaataataagcaccatcaatttccttaattgcttcatatataggaaaatacaatgaccaagatctttgtgctgttatgtctgctcttcttagcttcttctgggtttgtccatggctcttctaagaaggatcatattaggttatttgagctcaagaaaggtgatttttctataaaggtcaccaattggggtgcaacacttgtgtccgtaatacttcccgataagaatgggaagttgggtgatattgttcttggatatgattctcccaaggcatacacaaatgatacatcatactttggagctactgtgggccgggttgctaacagaattggaggagctcagttcactctaaatggaatccattac

SEQ ID NO: 245436 - DNA, 521 bp, Glycine max
agagggcgtatgtggattgctgatatctgtgtctgtctgtaccgtccggaattcccgggtcgacccacgcgtccgcccacgcgtccggtttcattgctctctctcttgtgcggacacaatttttgatggggatggacctcagcactcccaaaacagagaaggcctctgaagatggtgagaacgacaagcttcgcttcggtttgtcttccatgcagggctggcgtgctaccatggaagatgctcatgcagctcatccatgtttggacgagtccacgtcatactttggtgtttatgatggccatggaggcaaagcagtttcaaaattctgtgccaagtatctacacctgcaggtgcttaagagtgaagcttacttagctggagatttatgcacatctttacagaaatcttttctcagaatggatgagatgatgcgtggacaaagagggtggagagaattagcaatcttggggggattaatagaaaatttgctggtatgctagatggctttatattagtttacg

SEQ ID NO: 245437 - DNA, 415 bp, Glycine max
acgcgtccggaaagtgaaaggcccttgttgtcctctcccctccccaccagcaccacgagacacagccgtgtcccccgtccactacgcccgcttcctggacttcctgaaatcccactgggccccacctttcaccccggacaccctcctccactttttgaaatccaagctccatcaccacccttccttctcccacttcgacttccacctcttcacatgggcctcctcctccctcgactctttccgccacacccacctcaccttccactggatggcccgctccctcgcctccacccaccgcctcccccaactccgcaccctcctccacctcatctcctccaacccctgcccctgctccccctccatcttctcctgcccccaaacccaacccatcttctccctctccatccacgccttc

SEQ ID NO: 245438 - DNA, 532 bp, Glycine max
  unsure (1)..(532): unsure at all n locations
tggttgnagggaggtggatgatagtgcgtacgctcgcatgctagtcntatgtacgtaccggtctcggaattcccgggtcgacccacgcgtccgacaagacttagaatgcgatgagcaaaaatagacctcaattccgaattcagagatagcacgcgaccaggagaagccatggctactcaatccccttcacctcagaacctaggtggtgaaattgagcaaacagaaaatgtagatcagcataataggggagaagagcttggtaaacagagttcagacacatcggtgtttgtgaactcagagccattgcgtgaggaacaaattcagaatgctgtgaaatttctgtcgcacccgaaagttagaggttctcctgtcatccacagacgatcgtttctggagaagaagggccttacgaaggaggagattgatgaagcctttcggcgtgtgcctgattcacctccaagtgtgcagacagctggcataaatcaagatggacaattgaagccatcatcaaacatttagcagcaaaggccac

SEQ ID NO: 245439 - DNA, 512 bp, Glycine max
  unsure (1)..(512): unsure at all n locations
cgtgggggatgttggtgatcggctgcatgctcngtcactgctgtaccgtccgggattcccgggtcgacccacgcgtccggagagggtgtgtttctgggttttggaaatttcagccaatatcgaaaaacaagaagcgccatcaataataatcatcgaaggaatttgaaaggtcgaaacttgagcatctgggatcgcgaaattggggtttttggttaaaagggtattatcttcggaactgattgatggcaaacctgtacgtgaaggcggtgccaccggcggatctgaacaggaacacggagtggttcacgtaccctggcgtttggaccacatacatcctcatccttttcttttcttggatcctcgtactctccgtcttcggttgttcccctggcatcgcttggaccatcgttaatctcgcacactttgctgtaacatatcacttttttcactggaagaaaggaactccatttgcggatgaccaatggatctacaatagattgacttggtgggag

SEQ ID NO: 245440 - DNA, 318 bp, Glycine max
ttcccgctcgacccacgcgtccgcccactcttccgcccacacgtccgttttgcttttgcatgcatcaatcataaaggatgtattctatctaatttctgactaaaattagcttttttatttcatttacatatgttttataaatgtttctaattctataatataatattgtattcattattttttatttattatatcattatttatttttttatatttttttttatatttattttttaattttttttattttatttaatatatatattaaatttttatattttattttattatttttttttatatttatattttttttta

SEQ ID NO: 245441 - DNA, 537 bp, Glycine max
  unsure (1)..(537): unsure at all n locations
aggtaggaggtcgtataggtcggcctgactgtaagtcgtncgcactgagcgagcnctgtccgaattcccgggtcgacccacgcgtccggcgatagctgataagagagataccaacaagaaaagaaaaaaagaagagttgagattccgtttgaagaaaagatggcatcccataggcaaagctatgaagctggtcaaactaagggccgaactgaggaaaagacgaaccagacgatgggcaatattggagagaaggctcaagctgcaaaggagaagacccaggaaatggcccaagctgcaaaggagaagacccaacaaacagcccaagctgccaaggacaagacttgcgacacttcccaagcggcaaaagagaagacccaacagaatacaggagctgctcaacaaaagacctcaaagatgggccagtccacgaaggaatcggcccagtcagggaaggacaacacccaaaggttcctgcaacagacaggggaaaaggtgaagggcgcaacccaatgtgcctcaaaagctgtgaaacaaact

SEQ ID NO: 245442 - DNA, 518 bp, Glycine max
  unsure (1)..(518): unsure at all n locations
aggggggggtgatgtggttcgctggaagctatcgctctgncagtaccggtccggaattcccgggtcgacccacgcgtccggtggcggttgcggcaaccttcgatcttaatcccacggggcaacgttggatctgttgaactgcttcttttatatgcactctgtgatttcgctacaccctcactccgcttcgccaccctatgggggacaacaacagcaacaacgatgccttcatgcgcaaccaaaacgccgccgttcaggcccgcaccaaagcgcagaaccgttccaacgtccttcagctcaaactgattggacagagtcacccaaccggtctaacagcgaacctgttgaagctcttcgagcctaagcctccgttggagtacaagccgcctccggagaaacggaaatgtccaccgttatcaaggatggctcaatttgtgagcaagtntgcccagcctggcgatccagaatatgctccacctgtcccagaaaccgagactcctgcacaaaaaagagccagn

SEQ ID NO: 245443 - DNA, 396 bp, Glycine max
accgtctcgaattcccgggtcgacccacgcgtccgcccacgcgtccgtggaagaagctttgaaaatgcgtgaaatgatggaggctaagggattgtaccctggagttgttacttttaattcaattttgcgcaagctgtgccaagatggcaggataagggatgcaaacaaactcttgaatgagatgagtgaaaggaaaattcaagctgacaatatcacatgcaacacactaattaatgcttactgcaagattggagatttgaaatcagctttgaaatttaagaacaagctgttagaagctggtctaaaacctgatccatttacatataatgcactgattcatgggttctgcaagacgaatgaactataaagggctaaggattttatgtttagcatgct

SEQ ID NO: 245444 - DNA, 322 bp, Glycine max
tcccggctcgacccacgcgtccgtggcaatagcaactgctgctgcaacttccatctttcctgctattgagccagggactgtatgtctcattattgagggtttattgtttacatggtggatgtgtggcattcacactggtcaagtgcgccaatctttacagaagaaatatcacttgaagaattcaccgtgtaatgcatgttgtgtgcactgctgctttcactggtgcgcccctttttctaagaacactaggtatatgaaattgactgttttttgttcctacttttttatctataattgtctctttttaaatcctttttccttt

SEQ ID NO: 245445 - DNA, 422 bp, Glycine max
attcccgggtcgacccacgcgtccgcccacgcgtccgcccacgcgtccgcccacgcgtccggtctgcaccaataacccctagagcagctgcagtagtatgaacacctgttgtggcatctccacctgtgtcatgtccaccctctcagcttcactcaccatctctaacaaggtcacctctacttcaccctgaggatggagatgcaccacgtcgtaaaacatctaagactccaaagactccaagaacccctagaacccctagaaccccacttataatctctaatttgactccaaagttcatcaccccttttggaaaccctatgaaaaaagctctggaggtcaccaaccttgatcctcaagatgcttggcttccaatcacttgaatcagggaatggaacaagtactaatctgcttttcacaccctt

SEQ ID NO: 245446 - DNA, 435 bp, Glycine max
tccgaattcccgggtcgacccacgcgtccgtccacttccaattttcaataattcacgactccttccgagatctctctctctcgcccacgatccaggcatggcgaatacggggaatttagacgcggcgatagagcaattgctgaacgtggagaagcagatgaggctcgccggtgacgtggcgggtaccagaaaagcagccaccgatattttgcagctctgcttcgatgcacgagcctggaaaacactcaatgaccagattgtcgttttgtcaaaacgacgtggccagctcaagcaagctgtaacagctatggtgcaacaggctatgcaatatattgacgagacaccagatatcgaaactcgcatagaactcatcaaaacgttgaacagtgtgtctgcagggaagatatacgtggaaattgagagagctcgattgac

SEQ ID NO: 245447 - DNA, 514 bp, Glycine max
  unsure (1)..(514): unsure at all n locations
cgtgggggtatgtggttgctggatgcattgntatgactgtacggtccggaattcccgggtcgacccacgcgtccgttatcctttcctgaaccttcttgtgatctcaaagcttaacgaatcaatcaaccgctgacatggcagaagaagaagaagaacgcaggatcctggtggccgtggatgaaggcgaggagagcatgtatgctctctcatggtgcctcaagaacctttcttttcaaaattccaaagacacccttattctcctatacgtcaagccccctcgagtcacttattcagccttcgatggcacaggatatttttttgcctctgacataacggctaccatggagaggtatagccaacaagttgccgattgcgtcttggagaaagccaagaaattgtgtaaaaatattgaaaatgtggagactagggtagagaatggcgatacaagggatgtgatttgtcagatggttcaaaagtagggtgctgatgtcttaatcatgggaagccatgggtt

SEQ ID NO: 245448 - DNA, 509 bp, Glycine max
ggtggtcattcgttgatgcctgcatcactgcactgcctgtaccgtccggaattcccgggtcgacccacgcgtccgcccacgcgtccgcccacgcgtccgggcaccttttcaaccgttcactccttcttctgcgtcaccgtcaccatcataatcaccatccctttccttattcttcttctgtttcatccctctccccattttctcgctctcgtttcttgtcctctactcctttctccatggcttctgattcccctttccctgtcaccgctcaaaacatcaaccccaaggttctgaaatgtgagtatgctgttagaggagaggttgtcacacttgcccagaatttgcaaaaggatttacaggccaatccaggttctcacccatttgatgagatactttactgcaacattggaaatcctcagtctctgggccagcagccaataacttttttccgagaggttcttgcattatgtgaccatccagctatattggacaaaaatgaaacacaaggt

SEQ ID NO: 245449 - DNA, 406 bp, Glycine max
taccgtccggaattcccggctcgacccacgcgtccgcccacgcgtccgcccacgcgtccgcaaaaccctagctcgcgttctgctttcgtcttggacatcagcaggatggagtctcaggtgaagcacgcacttgttgtcaaagttatgggtcgtactggatccagaggacaagtaacccaggttagagtgaaatttttggatgatcagaaccgtcacatcatgaggaatgtgaaaggacctgtgcgagaaggagacattctcaccctactcgagtctgaaagggaagcaagaagattgcgctagatggtttcttttggcttgcctccaaattcgaacaaaacattgtgattttgttgattttaatggtagttggtggatgtcaaatgttttatcaccctatcttatt

SEQ ID NO: 245450 - DNA, 265 bp, Glycine max
ggaattcccggctcgacccacgcgtccgtgcagaccgagctagctagctagcaagcaagcacagagatggaggcaaagcgaggcgatgccctcatgtgcttggcacgtgtttcactcttcctctgcgctctaaccctatccgctgctcacggaagcaccacggttcaagacatcgcgagaaagttgaaactcggggacaacgagcttctgcgcacggagaagaagttcaaggttttcatggaaaattacgggaggagctactcca

SEQ ID NO: 245451 - DNA, 521 bp, Glycine max
ggagtgcatatagttggatactgctgatcactgcatgactgtaccgttcgggattcccgggtcgacccacgcgtccgttctgatcctattgtgttggccttcgggatcggagtaatgattaacagggacagtcgggggcattcgtatttcatagtcagaggtgaaattcttggatttatgaaagacgaacaactgcgaaagcatttgccaaggatgttttcattaatcaagaacgaaagttgggggctcgaagacgatcagataccgtcctagtctcaaccataaacgatgccgaccagggatcagcggatgttgcttttaggactccgctggcaccttatgagaaatcaaagtctttgggttccaggtggagtattgtcgcatggcttgatacttattgaattgatttaatgggacctatctgattggtatatattgtttatatatattatattcttataaactattttatttcttaagtataatggttgtcatattctcattatatctaatagttttta

SEQ ID NO: 245452 - DNA, 406 bp, Glycine max
  unsure (1)..(406): unsure at all n locations
tccgattcccggtcgacccacgcgtccggttcactcctcttctcttgccgctacggaattaccacatcttcatctagctttaacgagagataggctcagataaggttctcctcatccttgctgtcattccccatctcaactcctcagnctccactaccaccctatcacctgacacactagctctgcaagcatagacacacttcgaactgatacgtgtaaataggtagctgcttacacgcacccgaggcccttgaactctgcctgggtgctcgactgacctgcggcttagcgattacgaggaatcaccattgatattgctttgtggaagtttgaaacaacaaagtattattgcacagttattgatgcgcctggacatacggatttcatttataatatgaatactggg

SEQ ID NO: 245453 - DNA, 458 bp, Glycine max
aattcccgggtcgacccacgcgtccggaaactttttcacccccttgataccgcttcaattcaccaatggcaagtcgaggaaaaaccgagggatctggcacaaccaaaaagggcatctcccgaagcaacaaagctggtctccaattcccagttggtcgtattgctcgatacctcaagattggcaagtatgctgaccgtatcggttctggcgctcccgtgtatctcgcctctgttcttgaatatcttgctgctgaggttttggagttagcggggaatgccgcaatggacaacaagaagactcgtattatgcctcgccatatccaattggctgttaggaatgatgaaaagttgagcatgcttctcggagatgtgactatcgccagtggtggtgtgacacctaacattcacaacatgttgctgcctaagaaggttgggacctcgaccttaacctttatgggt

SEQ ID NO: 245454 - DNA, 363 bp, Glycine max
tcccgggtcgacccacgcgtccggagaagcatgtaatgacttgatggcatattctttaattttgtcttgttgttgctatacttgctgcgtaaggaggaagcttcggaagatgttgaacatcacagggggatttattgatgatttcctctctcatttgatgtgttgctgctgtgcccttgtgcaagaatggagagaagtggatatccgtgggcttagtggttctaataccaatacaagcccttcaccctctcagtacatggaatcttatctaacaaatgagattatcatttggatgttggggattcaaggttccttgaagatcatatgataatataggctatattgctattagaattcttacat

SEQ ID NO: 245455 - DNA, 526 bp, Glycine max
  unsure (1)..(526): unsure at all n locations
tgggtaggggcgtaatgttgagtgctactggaagcagctgncatgacgtaccggtccggaattcccgggtcgacccacgcgtccggaaggaaatggctgaagcacaactacgagaccagcatggcaaccctgtcccactcaccgatcaatacggtaatccggttatcttaactgacgagcgcggtaatcccgtccaactcactggtgtcgctaccaccgctaccggcacagcaggttctgggtttgggtcctatggtaccggtgcttacggtggtggtgcaagtgcaaccaccgttgcagatcttttggcaacccaaccaaggagtggcagggaggctatagagcttcgtcgttcctccagttcaagctctagctcgttttggatgaatgttttatagtctgaggatgatgggcaagggtggaggaggaagataggagtgtaggattaatttattatataaactaccaggggtaggagggaggattaattattaagatcatgctcacacttataactgttgtaact

SEQ ID NO: 245456 - DNA, 515 bp, Glycine max
cggaggggatgtagttgtctgacgtctatcgctagtctgccgtaccggtctcgaattcccgggtcgacccacgcgtccgaaattagttcattctctttgcgcagttccctacctctcctttcaagatgcagatctgcgtcaagaccctcaccggaaagaccatcacccttgaggtggaaagctctgacaccatcgacaacgtcaaggccaagatccaggacaaggaaggaattcccccggatcagcaacgtctcatcttcgccggaaagcagctcgaggactgccgtaccctcgccgactacaacatccataaggagtcaacccttcaccttgtccttcgtctccgtggtggcatgcagatcttcgtcaagactctcactggcaaaaccataaccctagatgtcgaaagctctgacaccattgacaacgtcaaggccaagatccatgacaaggagggaatccctccataccatctacggctaactttgcctggaagccactttaggaccggcgcg

SEQ ID NO: 245457 - DNA, 408 bp, Glycine max
actcggtctcggattcccggctcgacgccacgcgtccggtgagatacactaagttatcctcataaatacactctaattatgtggcaagatgagtgtctaaccttagtaacattgccacatattgtgttcatttttgaattatgccactaatattttatttattacatttatatcttcttttattttttcttttctttatttcatatcatttatttttatacttttttatttcttttttattaatttattttttttttatttttttttttattttttatatattatttttatttatttttttttttttttattatttaatttattttaatttttagtttgttttttttaatatttattattttatatattttttattttttttattaattttttttttattattttttt

SEQ ID NO: 245458 - DNA, 284 bp, Glycine max
aattcccggctcgacccacgcgtccggcgcgatggaaaaggtagctttgtaaggcttgaagttgtcacagcttcactgggcttcggtaactgattttgattatgtgtataaatttatggcttttgatgtatatattttaaacattacatttatcataataaatatttataattatatatttaatattgtatctatattattataattaatattatattttatatatattttttataatattaaatattattatattatattttatattatattataattatatt

SEQ ID NO: 245459 - DNA, 519 bp, Glycine max
  unsure (1)..(519): unsure at all n locations
gtgtaggtgatgtcgcccactgaggactgacgtcntncgtaccgctccggaattcccgggtcgacccacgcgtccgagcaaagatgctgctggacaagttcgtggttctccaaatgaatttgctggaataggctccacatgagcccttctttggctggctagaaggtttgcaattctatctgggcctaccattcctattattggcgagggtgatgaagaggcaaatgataggtatgtagaacaattagttgcaagtgcagaggctgctgtggaggaagttatccagcgtggggtaagctttatttttactgtatggagaatatgaagtttttagtcagaaatatgatgactcgtgatattttgggttgtcacttgtcacatctaggtggctgatccgaagaaaatagctgttggtggacattcctatggtgcgttcatgactgcttacctgctggcacacgcaccttatttttttgttgtggaattgcttcgtctggtgcctatcacttaaaacttatg

SEQ ID NO: 245460 - DNA, 375 bp, Glycine max
aattcccgggctccagagaccgtggccaatgaccctgttgtgtccttcaagacagccttgtggtactggatggaacatgtgcgtgctgtgatcaaccagggttttggtgcaaccattagagctatcaatggccgacttgaatgtgatggtgcaaaccctagtactgttcaggctcgtgttaattactacacccagtattgttcacaacttggtgtttcccctggtgacaatcttacttgctaatttatcagtatagatggttccatatgatgacatcatacattcatacagtatatcttaacatatatcagagaataaaccattcaaggcttacagccttattttgattattaatgtaattaactcttttgggaa

SEQ ID NO: 245461 - DNA, 455 bp, Glycine max
cccgggtcgacccacgcgtccggaagagccttccatatatagcctcccaaaataatgaagagtactacctctttggctcgctgtctactttgtgccctaacttcatcatatcagccttcagccaccgctgatattgtattcgacaccgaaggcaatcctattcgaaacggcggcacatactatgtgttgccagttataagaggaaagggcggcggaatagaatttgccaaaaccgaaacagaaacatgccctctcactgttgtgcaatctccctttgaggtctcaaagggtctaccactgataatttcatccccatttaaaatccttgacatcaccgaaggacttattttgagcctcagtttcacttatgtacccccctgtgcctcaactccttctcggtggaccgttattctcaagggtctgccagaagaactccatgtcaaactcactggcta

SEQ ID NO: 245462 - DNA, 411 bp, Glycine max
cggtctcgaattcccggctcgacccacgcgtccgatggaattccattaggttgggatgaacgtgctgtgacatcagattctggaggactgggtaatcgaagcacaggagccattttccaagggtttcccaatattgaccatactcaagatttcgtgagaaaggatatcataggatggctccgttggctgcgccacgaggtgggcttccaggattttcgatttgattttgtaaaggggttttcaccaaaatatgtgaaagaatatattgaaggagcaaagccattgttttgtgttggggagtactgggattcttgcaactacaagggttctaccttggactattaccaaaatagccatttacagctaataatcaattggaatgatggcactggacaacttttaactgcattt

SEQ ID NO: 245463 - DNA, 371 bp, Glycine max
taccgtccggaattcccggctcgacccacgcgtccgcgaggatgaaatcaactcccctgtggctcctgctactctttacaaggccctaggtacagatgccgacaacgtcatcccaaaggctcttgattccttcaagagtgttgaaaacgttgagggaaatggtggcccaggaaccatcaagaagatcactttccttgaggatggagaaaccaagtttgtgctgcacaaaatagaaagcattgatgaggcgaacttgggatacagctacagcgtggttgggggtgctgcattgccagactctgcggataagatcacattctactccaaattggttgctggtctcaattggaggtctgcttggaagcttattg

SEQ ID NO: 245464 - DNA, 312 bp, Glycine max
attcccgggtcgacccacgcgtccgcccactcgtcctaaaaaaaaataaaaaaaaaaaaaaaaaaaaaaaaaaaaaaagaaaggaaaaaatataaaaatataaaaaaattaaataatcataaatacaaaataataaaatataaaataatgtaacctaaattaaatataattttcaataattttataacataaaataatagaaaaaccattaacttttacataacttaataacatttttattatatatctatttttttcaatatatcttatttatctaaaaggtttttactaatattctattttcaatatttt

SEQ ID NO: 245465 - DNA, 520 bp, Glycine max
tgaggtgatatattcagttgctggactgcatccggtaggcactgcggtaccggtccggaattcccgggtcgacccacgcgtccgcaaattcttctgttcaacaggtgtgtgctttggaatcagcatttggctatttggtcgttgccaatggatgctaagtcggctgtagaattaatggagtcttcctcagaggttcatttttctggatttcacatggatggttttgagcaaagaaaggctagcatagaacaaccaacaacctcagaaactgacatgtataaacaaccttttgtcataggtgttgctgggggtgcagcatctggcaagacaacagtttgtgatatgattattcagcagcttcatgatcaacgagttgtacttgttaatcaggattctttttacaataacttgacggatgaggaacttacaagagtacaagattacaactttgaccatcctgatgcttttgatacctaaccattactacatgttatggacaagttgaaccatggcgaaaccg

SEQ ID NO: 245466 - DNA, 374 bp, Glycine max
gtcgacccacgcgtccggcagatctgagaccacctaccagattgctttgtctatcaaggacgaagtggaagaccttgaaaaggctggcatcactgttatccaaattgatgaagctgctttgagagagggtcttccactgaggaaatcagagcaagctcactacttggactgggctgtccatgccttcagaatcaccaatgttggtgtccaggataccacccaggtacactcttttggatcatcgcatatcactgaattataaattttttttgttcatcctcattttcacatatgtatgtaataatctaacttttcgtatagacagatccacactctcatgtgctacttcgacttcaaccgacttcatccattcc

SEQ ID NO: 245467 - DNA, 521 bp, Glycine max
  unsure (1)..(521): unsure at all n locations
aggtgaggaggacgtgaccgattgagacatgagctatncntacccgtccggaattcccgggtcgacccacgcgtccgggtgaagcgggtctactatccaggcttgccgagtcaccctgaacatgagcttgccaagaggcagatgactggtttcggtggtgttgtcagttttgaggtgggaatttgacaagttgctattcaaacatgtggtttcctaataacactattttttttttcttttatcaagaatggtgtattggataacatcatgtgccatattttttttatagttaaattgccaatattgcagattgatggagatctacataccacaataaaatttattgattcattgaaaatcccatatattgcggcctcgtttggtggctgtgagagcattgtggatcaacctgctattttgtcttactggtactcatttggattccatgttcaatttgtcatgttgatgatttttgacacttcacagggaatgggcctttacttgaatgtgaacctgtggtg

SEQ ID NO: 245468 - DNA, 404 bp, Glycine max
accgcgtccgaattcccgggtcgacccacgcgtccgtcactcacgagtctcacgcttttcacgatgggcttcattttcggagtggtggtcggaagaattgtgggcctggccatcatagtgggcttcgtccgcggcgagaactcccgggccgcccaacgctcccagctcgccaccaccgttgccgccttcgctcggatgaccgtcgaagattccagaaagatcttgccgcctcagttctacccttcctgggtcgttttctcttccagccagaagttaacttggcttaactcgcatctcaccaagatctggccctatgttaacgaggctgcttctgagctcataaaagcgtcggtggaacctattctggaagaatatagacccgtggttttggcggctcttaaatt

SEQ ID NO: 245469 - DNA, 509 bp, Glycine max
ggaggatgtaagtgttgtatgcatgctgttgtcagtccggtccggaattcccgggtcgacccacgcgtccgcccacgcgtccggtgggacatgtgcacgactattcaaatctgaagtacaatttggtgatgcgggagccaaaagtggtggtgagttggagtctgctcaagcaaagaatcaggcactaagggatgctggagctgttgttcccacatcatatgaagcttttgaagtttcaattaaggaaacatttgataaattggttgaagatgggaagatcacaccaatcaaggaaatcacaccttcaccaatccctgaagaccttagtactgcaattaagagtggaaaagtccgtgctccaacttatattatttccaccatttttgatgaccgaggagatgtacccttgcttgctggtgtacccatgtcttccatattgaaaaaagttatgggggttgggatgttatctctcgttttgggttaaaataaacctttctcgttactggaat

SEQ ID NO: 245470 - DNA, 516 bp, Glycine max
  unsure (1)..(516): unsure at all n locations
cgggggtgtagtgagtcaatgaaagcatagnatcgcgtactggtccggaattcccgggtcgacccacgcgtccggattttcgatcaatttgaaagaacttatccatttcttgcaattttagttgtgtacgggtaagtccatgcatgcaactcgttgagctatctcaataaatgccgtttgtatgtgttagtatttatatttatataccttttcggcatgtttcgctgctattgttgtggactatgtgttccttgtaatccaattaattaagaaagaaagtattaaattataaagtaacgagaatttgaaaaaaaaaaacatataataaaaagggcggccgctctataggatccaagcttacgtacgcgtgcatgcgacgtcataactcttctataatgtcacctaaattcaattcactggccgtcgttttacaaacgtcatgactggggaaaaccctggcgttcccaaattaatcgcctttgcacacataccccttttgccaactgggggtaaaat

SEQ ID NO: 245471 - DNA, 515 bp, Glycine max
  unsure (1)..(515): unsure at all n locations
tagggagtgaagtgcgtcgctgcactcgangcatngcagtgcggtaccggtccggaattcccgggtcgacccacgcgtccgttcaaaagcatataagagatggggttagaagggaaggaaacgccgtcgtttatgagggattttctcgataagtgtggtggctgcgccgttattgacggtggttttgccactgaacttgaaaggcatggggcggacctcaatgacgaactctggagtgccaaatgccttattagctccccacatcttgtccgaagggttcacctagattacctcgatgcaggagcaaacataatattaacagcatcttatcaggccactattcaaggttttgaggccaaagggttctctagagaagaaggtgaaactatgcttaaaagaagtgtggagattgcacgtgaggcacgagaaatttattatgataggtgcaccataaattcttctgactttattaaagatgaaagatttaggatacgtcccattttaattgcagcttc

SEQ ID NO: 245472 - DNA, 358 bp, Glycine max
ccgaattccggtcgacccacgcgtccgaaattcactggaagaccactatggtataaagtgtctattggagaagagccattaagtgggaggagccaacacagccatgccactcaagaccttcatgatcattgctgctggtaactatcctgagtggaaactgttcgttcagacaatagatcctgagcatgaagacaaatttgactttgaccctcttgatgttactaagacttggcctgaggacattatacccttgcagcctgttggtcgcttggtcctgaataaaaacatagataatatctttgctgaaaattaaacacttgcattttgccctgccattgtggttcctggtgtatactac

SEQ ID NO: 245473 - DNA, 437 bp, Glycine max
ccggaattcccgggtcgacccacgcgtccgcttaatgggaagaaagttgatgataaggagtggtatgttggaaaagcccagaaaaaatgtgagcgtgaacaagaactgaaaggacggtttgagcagagtataaaggaatctgctgacaaatatcaaggtgtgaacctgtatctcaagaacttggatgatactatcagtgatgaaaaacttaaggaaatgtttgctgaatatggtacaataacttcatgcaaggttatgcgagaccccactggaatcggtagaggatcaagatttgttgcattttcaactcctgaggaagcatctcgtgctctcggtgagatgaatggtaaaatgattgctggaaaacctctgtacgttgcccttgcacagagaaaagaagacagaagagcaaggttacaggctcaattttcacagat

SEQ ID NO: 245474 - DNA, 619 bp, Glycine max
  unsure (1)..(619): unsure at all n locations
gcgtgtgtggtgtgtggtggttgttgttcgggggtgcggtgcgcggtgctcgtggtggtgcgtgtggggtgtgtgtgtgtgtggcggtgtgttgncctggcgtgggttggcgcatctgtcagtttgcangtcncggtcttnaccatcccgggtcgagccacgcgtccgagtttagatcgcgagcgccgcccttttttttttttttttttttttttttttttttttttttttttttttgtttttttgttttttgtgttttttttttttttttttttttttttcgtttttttttttttaaagaggttatagtctcagttgattaggctttctttgattgtatggggcaggtgtggagtcatacgatggtattgtggagagcgccatgcggggcatttcagagttagttcagagaatcgggcagggtgtttgcatgagcattgtacgtttcgaaggagtggttcgaccgtggggttttggaagtcagtcttggagtgtgaggcgttttaaggtttggagaagctcttggaggttgtgttttttggnggagaaggatttgcggcctcaagggttgttggcgtggtttacgtgtacagtttgggcggttggggttgggttgggg

SEQ ID NO: 245475 - DNA, 387 bp, Glycine max
gggccgacctacgaatggaatgaactatttgcaccaaaataatataattcacagggacctcaagactggcaatcttctgatggatgacaatgaagtggtcaaggttgctgattttggggttgccacggtgcaaactcagtctggagtgatgacagctgaaactggaacataccgttggatggctcctgaggtcattgaacacaaaccatatgaccagaacgcagatgttttcagttttggaatagctctttgggagcttttaactggagaactgccttactcttgcctgaccccattagaagcagcaattggccgtggtgcaaaaaggcctgcggcctacaattcccagaaatacgcacccaaagactttctgaacttcttcagcgg

SEQ ID NO: 245476 - DNA, 209 bp, Glycine max
acgcgtccgagtaagcgtcggcgtctttgggaattaaagctgcaaatggagttgtcattgctatggagaggaaattgcgatctatagtggttgatgaggcatcagtctagatgattcagttattaagagcaaatataggtgtcgtatatagtggcatgggtcctgagtttcgagttttggttggggaaagcaggaaagaagccgaggag

SEQ ID NO: 245477 - DNA, 286 bp, Glycine max
cgggtcgacccacgaagtcagggaagtacttgaaaaatcaaaagatagtctcggtggaccatggcaatttgttggtctgctaccattgtttgatcctcccaggcatgatagtgctgaaagcattcgaagagctcttaaccttggtgtcaatgttaagatgattactgtggatcagcttgccattggaagggagacaggcctaaggcttggaatgggaacaaagatgtacccttcatcggcattgcttggccaagacaaggatgcttctatttcagcgcttccagtt

SEQ ID NO: 245478 - DNA, 355 bp, Glycine max
acgcgtccagatgaattgattgtatataggatactctgtccagatgaagttattgggagtgttattgggaagaatgggaaagtgataaattcaataaggcaagaaaccagggcgaaagtcaaggttgtcgatccgtttcctggctccaaggatcgggtaataacgatctactgctatgtcaaggagaaggaagacgttgagattgatgatgagtttgctggtaaagaacctctgtgtgctgctcaagatgctcttctaaaggttcatgtagccattgcgagttccatagcacctattggagattccgagaagaagcgaaaggatagagatgaatgtcaaatccttggttccagca

SEQ ID NO: 245479 - DNA, 322 bp, Glycine max
gacccacgcatccagacacgcgtccgcccacgcgtccgcccacgcgtcagaaacatacttgcgatgcaggagtttatggttcttcccgtgggagcttcctctttgaaggaagccatgaagatgggtgtagaagtatatcagaatttgaagtctgtggattagatgaaatatggtcaagatgcagtagatgttggtgacgaatgtggctttgccgctaacatccagggataaggaggaacgtttggaagtgctgaatactgctattgccgtagctggttacacaggcaaagttgtcattggaagtgatgttgcagcttctgaa

SEQ ID NO: 245480 - DNA, 362 bp, Glycine max
gacccacgcgtccagcttaacctctctcaatccccatttcctcacctccttcaaccgctgctaaattctagggttccgaaatggacgctggcggaaagatcaagaagggcgccggatgtacaaagggcggcggcccaaagaagaagccggtttcaaggtccgtcaaagccggtctccaattccccgtcggaagaattggccgttatttgaagaaaggaaggtacgctcagcgtgtcggtaccggtgctcccgtatacttggctgcagttctcgaatacctagctgccgacgtgcttgagttggctgggaatgccgcacgtgacaacaagaagaacacgactattcgacgacacctgcttttg

SEQ ID NO: 245481 - DNA, 433 bp, Glycine max
ccacgcgtccaatataattaaactaattgcaaagatgaataccaagccctttttctccttgtgcttactctgcgcactgcttctcatctgtgttgtggcaactgagccatccaaagatgcgacacaagcagaagaaccaaagacacggccagatgcctggagaagtggtggaagtggaggacatggtggaagtgggggacatggtggaagcgggggacacggtggaggctggggacatggtggaggctggggacatggcggtggacatggcggaggatgcaaatgctgcggtcgaaagggctgcaaatgttgctgaagtaaaaaaacacaaacatgaactgaagacacacatacgtgtgtactccatgtaataagtatagtatgtagacataagacatacaagcatggaatctatatccgtgctagggctgtc

SEQ ID NO: 245482 - DNA, 421 bp, Glycine max
acggatggcaccatatcatttacagttttatcatgtgacaaacaagcgggtttggttcaatgccgatgcgagaactctgccactcttggtgagaggaagaatgttaatttgcctggagtgatagtggatctcccaactttgacagacaaagacaaggaagatatcttggcctggggagttcccaataaaattgacatgattgctctttcttttgttcgaaaaggttctgacctggtggaagtcaggaaagttctgggaaaacatgccaagaacattatgctcatgtctaaggttgaaaaccaagaaggggttgcaaattttgatgaaatccttgcaaattcagatgcatttatggtggcacgtggtgaccttggaatggaaattccaatagagaagatatttcttgcacagaaagtgatga

SEQ ID NO: 245483 - DNA, 410 bp, Glycine max
  unsure (1)..(410): unsure at all n locations
gggtcgacccacgcgtccagaatgtatcaatgtttggttcaaacataggtccagataaatcacttgaagtctttntgcatattttacctgctgcttctgaatttgatgaactacctgtgcgtcataatgaggaaaaatacaatgaagcactgtctgagaaagttaaatatccagtggataagaaccgtctagatgaccctcacatcaaagcacttcttctatttcaggctcatttttctcaattggagttaccaattagtgactatgtcacagacttgaaatcagtattagatcagagtatacgcgtaattcaggccatgattgatatttgtgcaaacagtgggtggctttcaagctcaattacttgcatgcatcttctgcanatggtcatgcangggtttgtggtttga

SEQ ID NO: 245484 - DNA, 233 bp, Glycine max
cacatgtatggttcattatatatatcatacctgaaaagaatgtcaggggtagggagaaactatcaattataaatatcactgtggagagtgcaagggaaagaaggttattgaggatatgacagtccttgaatttattgacgagcacgggatgtagaataggcacaagattacattcactggcgaagttaaggaggctggggagagtagtattggggatatcgtcattgtcatta

SEQ ID NO: 245485 - DNA, 368 bp, Glycine max
ccgggccgacccacgagtccaaaagatggagtgaaatttaccaacacgaagctcaagaaactaggggaccaatagcaacaaattcttgaggagtataaaagttgtcaaaaaaagttagttgatagagtagttcaaactgcggcaactttctctgaggtgtttgaatctttagctgaaataatttctgaattggatgtattactgagctttgctgatttggcttctagttgtcctactccctacacaaggcctgacatcacttcatcggacgaaggagatattactttagaaggatgcagacagccttgtgtagaggcacaagactgggtgaagtttatgcgaggtgattgtaagcgtgtcagaggaaa

SEQ ID NO: 245486 - DNA, 498 bp, Glycine max
  unsure (1)..(498): unsure at all n locations
ggggggtntngaaccgtcatccggtcgctactggtctagtattccgggtcgacccacgcgtccagtgacggtggtgatggaggctggagaaactagggcttgatgtcgttgattaaggtttatgattatgctcagtaattttagttgtgtttgagtttgagtatctttatggttttgtgtcaccgtggttcttgtttttgaccaatatatctggttgtttatagtcgatttaatgaaatgataatcagaaattggagtaaaaaaaaaaaaaaaaaaaaaaaaaaaaaaaaaaaaagggcggccgctctagaggatccaagcttacgtacgcgtgcatgcgacgtcatagctcttctatagtgtcacctaaattcaattcactggccgtcgttttacaacgtcgtgactgggaaaaccctggcgttacccaacttaatcgccttgcagcacatcccccttttcgcagctggcgtaataacgaagaaggccccaaccatt

SEQ ID NO: 245487 - DNA, 332 bp, Glycine max
ccaaaaggttccaacctaacttccccttacggcgacgctctacacttcaaagcttacatatgcgtgcattccacggcccacctcttcaaaagtgccacccgggtacaacccagtggtcgtccatttaaaccgccttgacggggaacccccttccgtaaccgggcttaatcgccttgcggcccatcccgttttccctacccggcatttccccaaccaggccggcaacggtgaccctccccagaactggccactcctgacgggggattgggaggctccccgtagcggcacagtaacccttgcaagtgtcctagttacgcccattttgacttcca

SEQ ID NO: 245488 - DNA, 407 bp, Glycine max
  unsure (1)..(407): unsure at all n locations
acgcgtccagcataatgtttccggcgaagaagccttgaagaagcgcgctgcgatgaaccgggccgggttcgggtcgggggccgtgtttggtgcgacgtccccgtcgccacccccggggaatgtggacgggtttacaatcgggaagtcggagacggngggattgggggttggggctggcgggcagatgacggccgcgcagcggatgatggcgaagatggggtggaaggaanggcaggggctggggaaacaggagcaggggatcaccacgcctttgatggcgaagaagaccgatagacgagccggggttattgtgaatgccagtgacaacaacaatagcagcagcagcaagaaagttaagagtgttaacttcaatggtgtgcctaccanggtgctgctgctcaagaaca

SEQ ID NO: 245489 - DNA, 381 bp, Glycine max
acgcgtccaccacgcgtccggttttgttagttcacacactaagttctgaaaaatgagttccaaagtttttcttattctacttatgttcatggccactatacttttgatctcctctgaggttgcacccgatgatgcataccagaattttgacaaaacagatgggaagcgtagtgcaaatggggtagatgaaagcaaatattggcgtggtggctatggcgactatggtggttggcgtggtggtggttggcgtggtggctatggaagctggcgtggtggctatggtggtgggcgtggtggctatggtggctggcgtggtggctatggtggtgggcgtggtggctacggacgttggggtggtggctttggccctaacgaacataa

SEQ ID NO: 245490 - DNA, 419 bp, Glycine max
acgcgtccaccacgcgtccggcactttagataatgactgccataaagacaaacaatattctttcaatactcatcatcatttgagactaattaagcttgcgtgattcctagaattgagaagagaaaagaatattttgttgttgggcttatgatatctagttgggaccccagcagcttaagtacatgacagttctcaaagactcttctgattgatttgccttctcatgttttagtgttgtggagatcatagcagaagaagaaagcttgttagcctgagagaatgagccaacatggtttttgagatggtgttgagctgatcttaaggcatgattccacctgcatataccttggtctttcaaggcctccacaattccaacacttgctgccacactccatgctctaattcctgaactcatcttg

SEQ ID NO: 245491 - DNA, 289 bp, Glycine max
cgggccgacccacgagtccacttcttccataattctcatgtttctgatccaaggtttaagatgttatagtttccgtgaattctcgtctgggttcaacctgtttgatgtttagactgaatcagtttgaattagtggagaatatctgataccgaaaaaaagattcagctctttttcttgtttctttgtcagagtacttggatttttgagaatctggatacatgggttgttgtgtaagtaaagagtcagagccagaagacaatggttagagacatggtcgaactggtggagt

SEQ ID NO: 245492 - DNA, 383 bp, Glycine max
acgcgtccacgatcacgtgtcattgatcttcttgtattcgttgccaagaagtctctttaaggtgttacatcaaagtagcttgtcttcacattattaccgtatgttgaggtgtagcggcgatttactgtcctgctcgagcgagacatgagaggtctgaataaatcggtttctgaaaccagtggtgttacttgttggaggagcattagctcttttttggacttttgatgttttctcttgtggagggggatcgagtttttggatttttatatactcgctgatgtacttggcttgaatacttgctaatgtacttgttattgattgttatagtagatatttgtccgtcctttttttcaaaaaaaaaaaccaaaaaaaaacaccccaac

SEQ ID NO: 245493 - DNA, 389 bp, Glycine max
cgtccgcccattcgtccgctgacgcgtgggtcgcccaggcgtccggaattcccaatgttcaacaactgctgcacgacttccttaatggaaaacagctttgccaggggagtaatcccgatgaggctgttgcatatggtgcggctgttcaggctgcaatcttaagtggtgagggcaatgacaacgttcaggatcttctcctcctgtatgtcacccctctgtctcttggtttggagactgccggtggtgtgatgactgtcctgatccctaggaacactacaattccaacaaagaacgaacaacttttctcaacatactctgacaaccagcctggtgtgcttatccaggtctttgacgggtaacagacacggaccagagataacagtttgttg

SEQ ID NO: 245494 - DNA, 441 bp, Glycine max
  unsure (1)..(441): unsure at all n locations
tcccgggtcgacccacgcgtccagcgagatagaagcgtaagcagcggctaccctaacctcgtcttcctctctactaatttcagctatggccgacgaagctgtggttgttccagatcccacccagatcgatgtcaagctctttaaccgctggagcttcgaggatattgaggttactgacatttcactggctgattacattggagttgcggcatccaagcacgccacatatgttcctcacaccgccggaaggtactccgtgaagcggttcaggaaggcgcagtgccccattgttgagaggctcaccaactctctcatgatgcacggtagaaacaatggcaagaaactcttggctgttaggatcatcaagcatgctatggagattattcatttgttgactgaccaganacccattcaggttattgttgatgctgtcatcaacag

SEQ ID NO: 245495 - DNA, 429 bp, Glycine max
  unsure (1)..(429): unsure at all n locations
acgcgtccaccaacgcgtccgattttcctggtaaatatcaagattgggcagccacagatccgttagatcnttttcaagctcaagttataaagaatgaatcaaacccaaaggcacatatatgtagacatttaagtcaagaagctcgtggatgtcgttatttggtattgtggttagattgtgatcgtgaaggagaaaatatatgttttgaggttataaagtctactggtttccatataaatgatacttaccgtgcacggttctcttctgttactgagaaagatgttgtgaaggctctagacaaccttgtcagacccaacagagatgaggcgctggctgtagatgctatgcaagagatagatttgaaagttggagttgcctttactcgatttcaaacgagttatttccagggaaaatatgggaacctagatt

SEQ ID NO: 245496 - DNA, 244 bp, Glycine max
gcgtccgaccaaacgtccgctttaccaggatacacatagtcagcgcaatattgcaaaattgaatgatgaagtctatgaagttcacgagataatgactcggaatgtgcaggaagttcttggtgttggtgaacagttggacgaggtcagccaaatgtcgagtcgcttatcagcagaatctcggatgtgtgctgagagggcgagagatttggatcgggaggcgttgattcggaggtgggcgagtgtt

SEQ ID NO: 245497 - DNA, 255 bp, Glycine max
aatgcccgggccgacccacgcatccagtttattcatctaccgtcgggagggaggggatgaccacggcgccccgtgcgcccggcctcctcgtcctcgcgacaaacgcagaccccggcgcttcgtgcgccaaggaactcacgtctgtgaagtgcgactcccgggggcccggagacggtgtcccgcgggagtcgtcagggagcatcgtttacagacaatgagtctccggggcggatggtccggggcttgcatcgatga

SEQ ID NO: 245498 - DNA, 116 bp, Glycine max
aaaaaaaaaaaaaaaaaaaaaaaaaaaaaaaaaaaaaaaagaaaaaaaaaaaaaaaaaaaaaaaaaaaaaaagggaggcaaaagaagagaataaaacaagaaagaaggaaagaaaa

SEQ ID NO: 245499 - DNA, 403 bp, Glycine max
acgcgtccagtatcactttctgttctgttttggatatttctcaacataaccaagctaaagcgttttactattttgttttctaatttcctccatctctctctcatagtcaccttctctctgggtcactgcaatctaagtccaagcttgactgcttcctctggcgtatgacacctgttgtgccgtctcagtttcttcccaatcacgagattcgaaaacttaaccgattgtagcatccgtgggagagagaagctgttgagtacttcactttgggttatctatggaatcgtttccatgaatggagtgcttacggagctggagttcccatcacgttgtccaatggggagacacttgttcagtactatgttccttatctctccgcatttcagatattcaccaacaacac

SEQ ID NO: 245500 - DNA, 354 bp, Glycine max
cgtccgaccacacgtccgcccacgcgtccgcccacgcgtccggccttggccgacaggtccgggtaatctttgaaatttcatcgtgatggccggaccaatcttgcattcatcacttgtgtcttcgactgattctcaccctgctaaaaagacatcaacatcaagggcaagtaaaggaaaacttgcgcctgctggtggtggaaggctgggtaagattgatgaagaaaaagctttcagtggaaatccactgaaatcaacatctgaaaacactgagcctcgtagatccattcgcaggattcagccgacgtcaagactattagaaggattgcagagctcttgaattagctcaaagattcc

SEQ ID NO: 245501 - DNA, 627 bp, Glycine max
  unsure (1)..(627): unsure at all n locations
gtgtcgcggcgagaggcggttcgcagggccgggaggcgcgaggtgagccagaggtgcggccggagggcggtgcgcggccgcgtcggaggntagncncggggtgggntggggaaaaccgtgactttgtcagacantggtccccccaaatccgggccggcccacgcgtccagtttatctgtaccagcttcttctacctataccgctgttgaagcacctaaaggagaatttggtgtctttctggtcagtaatggaagcaatcgtccctaccgttgtaaaataagagcacctggctttgcccatttacaaggactcgattttatgtccaaacatcacatgctagcagatgtggtcaccatcataggtactcaagatattgtgtttggaaaaaaaaaggaagaaaaacgaagaggagaacggggtcgggaagcgggagggcgcgggcatgaatgggcgagggggggggggagacggggggggaggggagagagaggaaaggggggggcgccctaggggttgcaaccttaggtgtgcggtgatgggagttgagacgcccttcaaaggggtcgccgaggttgaagttaggggccgctgtgtttaaaagggcgtggagggggaaaaccccgggtg

SEQ ID NO: 245502 - DNA, 438 bp, Glycine max
gacccacgcgtccacaaacattataatttctattacatacattttgtagctaggatgagcaagttactactcattcgtgttgctgggttcgtggcaacctttgtcaccatggtgatgatgatggtgcccaaaaacgtgagtgcccaaaacataggtgatgacatcgtcacacaagacttcttcaacagcataatcagtcaggctgatgatggttgtgcagggaagaacttctactcacgagatgctttccttaatgctcacaattcctacaatgagtttggtaggcttggtaatcaggatgactccaagcgtgaggttatttttgctacatagaagagattaacggtgcatcaggggactactgtgacgagagcaacaccgagtacccatgtgcccctaacaaagcgtactatgggcgtggaccaatccaactatcat

SEQ ID NO: 245503 - DNA, 415 bp, Glycine max
cacgcgtccaggggattctctcgctaaccaagaaggaactagggttttacagaatacaagctctctctctctctcgtcggttttcgtcaatcagatccaatccaatatcaaatatgagtcgtcatcgcgaggttaagtgggctcagaggcttgacaaggtctatatcacggtgcaattggctgattcaaaaaatgcaaaagtggatcttacgccagatggtatttttaccttctccggtagtgctggtgctgaagaccatcagtatgagctaaaactggagctctttgataaggttaacgttgaggagagcaaaattaatgtacgagagcgaagcatattcattgtagtgcagaagggagaggatggatggtggaaaaagttactgcgtggagaaggaagactccacattatgtg

SEQ ID NO: 245504 - DNA, 339 bp, Glycine max
atttgcatcgcatcgcacagagatgaattcaattacaagaagcggatcgcttagtatcatcctcgttgttttcttctctttgcacttcattcttggtttttccgacgactcatcacctgcttcaaaagatgctacaaagacagaacctcatgccggaagaagcactagtgctatagttatcattgtattaattgtgcttgtgttcttttctttgttctcctttgtactttttaagctgtggcggaagaagaaaagggaggagcaatatgctcgtcttttgaaattagttgaagaggatgatgagttagagcttgagcttggcctaagggactgagactc

SEQ ID NO: 245505 - DNA, 272 bp, Glycine max
caatcgtagccgtcgcactctgtgttttcagcgccgtctccgatctccgacaatggcgacccaaatgagcaagaagagaaagttcgtagctgatggagtgttcttcgctgaactgaacgaggttctgacaagagagttggccgaggacggttactccggcgtggaagttagggttacgccgatgcgcaccgaaatcataattagagccaccagaacccaagctgttctcggtgagaagggaaggagaataagggaacttacctctgtggttc

SEQ ID NO: 245506 - DNA, 212 bp, Glycine max
ccacgaatccactttgtcattgaagctttttcacccccttgataccgcttcaattcaccaatggcaagtcgaggaaaaacccagggatctggcacaaccaaaaagggcatctcccgaagcaacaaagctggtctccaattcccagttggtcgtattgctcgatacctcaagattggcaagtatgctgaccgtatcggttctggcgctcccgt

SEQ ID NO: 245507 - DNA, 512 bp, Glycine max
  unsure (1)..(512): unsure at all n locations
tgggttnntgcaacgtcatctgtcagcacggtcttcatatccgggtcgaccacgcgtccgactagatcccgggcggccgccgcaattcccaacgcttcggccaacgcttccgccaacgcttccgggcggggctacccgctgagtttaagcatatcaataaccggaggaaaagaaactaacaaggattcccttagtaacggcgagcgaaccgggaaaagcccaccatgaaaatcggtcgccctcggcgtccgaattgtagtctggagaagcgtcctcagtggcggaccgggcccaagtcccctggaagggggcgccagagagggtgagagccccgtcgtgcccggaccctgtcgcaccacgaggcgctgtcggcgagtcgggttgtttgggaatgcagccccaatcgggcggtaaattccgtccaaggctaaatactggcgagagaccgatagcgaacaagttacgcgagggaaagatgaanaggactttgaaaagagagtcaaagagtgctn

SEQ ID NO: 245508 - DNA, 434 bp, Glycine max
  unsure (1)..(434): unsure at all n locations
aattctcgggtcaagcgtcggatcacgcgtccggaggctatcangcangagcttaaggaattgcacccgaatgaccccaaaattgttgtcctcaaacatggattgtggaaagtaaagggaattattcangtttctagatctatangtgacgtatatatgaaacatgcgcagtttaaccgcgaacccattaatgcaaaattcagactccccgaaccaatggacatgcctttcttgtctgctaatccaactattctttctcatactctccaaccaaatgattccttccttatatttgcatcagatggtttatgggagcacttgagtaatgatcaagcagtggatattgttcacagcagtccacgcgcgggtagtgccaagagacttgtcaaggctgccctacacgaagcagcaagaaagcgtgaaatgcgatattc

SEQ ID NO: 245509 - DNA, 391 bp, Glycine max
agatttagattttagggtttctctcttaatataatcttttgacacttccgtaacaaacaaaaaaattacataaattttcccttataattattattatttggcttttatctttggattaactaggcttgagctatcacaaataattgtttcggagaatggaaaagaaaaaggtggcagttcccctcgtgtgccacggtcattctcgccctgtggttgatctcttctacagtcccgttacgcctgatgggtttttcctcatcagtgccagcaaggattcgagtcctatgctcagaaatggagagactggagattggattggaacatttgaagggcacaaaggtgctgtgtggagttgctgcttggataccagtgccttacgtgccgcaactgc

SEQ ID NO: 245510 - DNA, 504 bp, Glycine max
atacgtaagcctgtcaggtaccgatctagaattcgcgggtcgacccacgcgtccgagaaaattgatacggattcctgggaatttgccaatgaacactttgttaggggtcaaaagcatttgttgaagaatatacatacaaggaaacatccacacagtgcagatcagcaaaaggcattgccacagcaagacaattgtgatgaaccatcccaagaagcaccaaatcatggcctttggaaagaagttgagaatctaaaacttgataaaaattcgctcacacaggaattggtcaaacttaggcaacatcaggaatctgctgagagtaagttgctgctcctgagtgatcgccttcaaggaatggaaaagcatcagcagcagatgttgtcattcttagtcatggttgtgcaaagccctgtgttcatggttcagcttcttcatcctaatgaaaataattggcgtctggctgaatcatggaatagattggatcaagatacacaagatgacaag

SEQ ID NO: 245511 - DNA, 431 bp, Glycine max
gacccacgcatccgaccacgcgtccggaaaaattgaaggttatgttaccaatatttcttgaatgttgtgacgatatggtttccaaatgggaaaggttgttgtcttcaaatgacaaatccgaaattgatgtgtggcctttccttcaaaatttaacatgtgatattatatctagaacagcatttggaagcagttatgaagatgggaaacgtatatttgaacttctgaaagagcaaactggacttatgatgaaattgcagaacgcttacattccaggatggtggttgctgccaacaactacaaataagaggatgaaaaaaattgatactgagatacgagcattacttaaaggtgtcatcaacaaacgagagaatgcaatgaacgctggtgaagtcttgaacaatgacttgttgggcatgcttttggaatcaaac

SEQ ID NO: 245512 - DNA, 500 bp, Glycine max
  unsure (1)..(500): unsure at all n locations
atcgtcagccctgcaggtaccgatctacaattcncgggtcgacccacgcgtccgagcatccatgatacatctcctggtacactcaccgcctctgtctgcgcctctgatgttgacctcatcacacaagtagcaggtgctgaatggcctggagatacaattgtttatgcttacagatcaggtgaggtgattcggctaccaaaaggggtttcaattccagtgacactaaaagttctggagtttgagcttttccacttctgtccactccaagaaatagctccaagtatatcatttgcagcaatagggctactggatatgttcaacactggacgagcagtggagcatgttgagattcataaccgagcagcaacgaaaacaatagctcttaatggtaagggaaaaagcagatttggagtttaatcctcccataaaccactgaactgtgttgtaagtggccctgaaatcgaattcaactattactcaaagaacgggttgacaaactt

SEQ ID NO: 245513 - DNA, 462 bp, Glycine max
gggtcgaggcacgcgtccaaccaaatcaatcaaattctttgagttgaacacaggggccaagattccttctcttgggttagggacttggcaagctgaacctggtgttgtagctgaagctctcaccacagccattcaggttggatacaggcatattgactgtgctagtgcgtataagaatcaagcagagattggttctgctcttaagaagctttttgatgatggtgtggtgaagcgtgaggacttatggatcacttccaaactctggtgttcagatcatgcaccagaagatgtgccaaaagcattggataaaacattacaggaattgcaacttgactatcttgacctctatctgatccactggccagtccgcatgaaaagtggaacatttggactcaataaagaatatcttgagcaaccagacattcccaatacatggagagcaatggaggcactctatgactc

SEQ ID NO: 245514 - DNA, 414 bp, Glycine max
ccgggtcggcccacgcgtccgagctaccttacgctctctattgctgctccatgcaggtctaaatccattccctcaggttctggcattctatgacaatccctcagtgttcaagcctcccattgaagaaccacagtctagaaggccccagttgagaagcctcctgtttagaatcctccagttgaaaaccccccagtttagcagcctccagtacagaagccaccaggtgtcaagcccccagttgagatacccctagtttataagctcccagttgagaatccaccagtgtacaagctcccagttgacaatacaccagtgtataagcccccagttgaataacccccagtgtatcagcccccagtatagaaaccatcactgtaaaactcccagttgagaagccccagtttacaagccccc

SEQ ID NO: 245515 - DNA, 439 bp, Glycine max
acgcgtccgatcttacacttcacaaaaatgaaaaacatgaaattgtgttcggtgatgctatgcttatcactagcgttccttcttggggccacagcagaacaatgtggcacacaagctggtggagcgttatgcccaaatagattatgttgcagcaaatttgggtggtgtggtgacacagattcctactgtggagaaggttgccagagccaatgcaaatctgcaacaccctcaacaccaactccaacaacacctagtagtggtggagatattagcagactcattagctcttctctctttgatcaaatgcttaaataccgaaacgatggccgctgttctggccatggattctacagatatgatgctttcattgccgctgctggctctttcaatggctttggcacaaccggtgatgacaacactcgcaagaaggagattgctg

SEQ ID NO: 245516 - DNA, 464 bp, Glycine max
gggtcgagccacgcgtccgaattaatttacaatggccgtcacgaaaagcctctcaatcttcctcttcatcgcaatgagctgcgtcgccgcagctcaggcagcgaacttcaacatcacaaataactgcacctacacggtgtgggccgctgccgtgcccggcggcggcgcaaggcttaaccctggcgaatcgtggaacatcagcgtgacgaacggcacaacaggaggacgcatctggggtcgaacaaactgcaccttcgacaacgcgggacgcgggaagtgcctcaccggcgactgcgagggtgttctggagtgcaacaaaacaggtacacccccgaacacggtcgttgatttcgcgttgaaccagtataacaacctcgacttctacgacatctccctcgtcgacggtttcaacgttcccctacagctgaccccgacctacaactgcagttccgttaaatgcgccg

SEQ ID NO: 245517 - DNA, 454 bp, Glycine max
tccgggtcgacccacgcgtccacggacgcgtgggcggacgcgtgggcggacgcgtgggcggacgcgtgggttgtcaccgaaactttaatgcggtttctaaaagcaagggactgggatccttgcaaggcacataaaatgttggttgactgtttaaattggagggtgcaaaatgagattgacaatatattatctaaaccaattgttcctgctgatttatacagagcggtgcgtgattcacaactcataggattatcaggttactcaagagagggtctgcctgtctttgcaattggtgttgggcttagcacatttgacaaagcatctgttcattattatgtgcagtcacacattcaaattaatgaatatcgtgagcgtataatcttgccttctgcatcaaagaagcaggggcgacctattaccacttgtataaaggttttagacatgactggtctga

SEQ ID NO: 245518 - DNA, 438 bp, Glycine max
gacccacgcatccgaggaatttcaattcaaaaatcatatgtagatccctccatcaactatccaaggaattttcgaagagcactaatggtctcatggtcccatcttatgctttgtagaatcaaaaaaaaaaataaaaaaaaaaaaaaaaaataaaaaataaaaaaaaaaaaaaaaaaaaaaaataaaaaaaaaaaataaaaaaaaaaaaattataaaaaaaaaaaaaataattcaaaaaaaaaaaagattatcaagtaaaaaaaaaaaaaggtcagaaatatgggtgcaattcgtaattaggcttagcacatttgacagagcatcttttcattattatgtgcagtcacacattcaattttaatgaatatcgtgaacgtataatcatgccttctgcatcaaacaagcaggggagacctattatcacttgtataaaagttt

SEQ ID NO: 245519 - DNA, 440 bp, Glycine max
cacgcgtccgaccaaacgtccgctcaatggaaggatcaggatccggtgtggttacagtctacggcaacggcgccatcaccgagacgaagaagtcccccttctccgtcaaagtcggcctagcccagatgctccgcggcggcgtcatcatggacgtcgtcgacgccgagcaggcccgcatcgcggatgaggccggtgcctgcgcggtgatggccctggagcgtgtccccgccgacatccgggcccatggcggcgtggcccgcatgagcgattcgcagctcatcaaggatatcaagcgggccgtcaccatccccgtgatggcctaggcccgcatcggccacttcgtcgaagcgcagatcctcgaagccatcggcatcgactacgtcgacgagagcgaggtcctcaccctcgccgacgacgccatacacatcaacatacacaac

SEQ ID NO: 245520 - DNA, 421 bp, Glycine max
acgcgtccgaggaaatgcttgatatcacgccaggagaggccttggctgtgaattttcccttgcaactccatcacacagctgatgagagtgttcatgtgagcaacccaacggatggacttctgagattggtaaggtcactttctcccaaagtgaccacactggtggagcaggaatcaaacacaaacacaacccctttcttcaacaggttcattgaaaccttggattactacttggcaatctttgagtccattgatgtcaccctcccatgagatagcaaggagaggattaatgtggagcaacattgtctggccagggatattgtgaatatcattgcttgtgaaggcaaggaaagggttgagagacatgaactgttcggcaagtggaagtcgaggttaacgatggccggcttccgtcagtgtcc

SEQ ID NO: 245521 - DNA, 431 bp, Glycine max
acgcgtccgaccacgcgtccgggcgggtctacagccaagttagttgccaagtataggccatcggttccaataatgtctgtggtggttccagtgttgagcacggactcatttgattggacctgcagtgatgagacgccagcaaggcacagcctgatatagaggggcttgattcttaaactgtgcgagggatctgcaaaggctaccgatgcagaatccacagaggtcattctcgaagctgctcttaagtccgcagcacatagggccctttgtaagcctggtgatgcagttgttgccctgcatcgtattggagctgcctctgtcataaagatctgcatagtctaataatgcatgctcaactcaacgtgccgccaacgaatgcacggttatgtattgcctttgagctctttctttctgctgtttatccgtatcat

SEQ ID NO: 245522 - DNA, 450 bp, Glycine max
cgggtcgacccacgcgtccgaatgacacagttggaacagtggctagagcaagattcagcaatcaggatgtcattgctggagtgatccttggtacggggacaaatgcaccttatgtagagtgtgcacatgcaattccaaaatggcatggtcttctaccaaaatcaggagagatggttattaacatggagtggggtaatttccgttcctcgcatcttcctctaacagaatatgatcatgctctagatgcagagagcttaaaccctggagaacagatttttgagaagataatttctggtatgtatttgggtgaaattgtaaggagagttttgttgaagttggctgaagaagttgacttctttggagatactgttcctccaaaattgagaattcctttcgtacttaggacacctgacatgtctgcaatacatcaagatacatcttcagatctga

SEQ ID NO: 245523 - DNA, 326 bp, Glycine max
agacttaatggatgcattgaggattatggtgctgatgcatttcctttcacaaggaagaagcatgaagaattgatagccatagatataaggaagcgtgaggaagcaaacttggaagaattattgggacacaaaaggtgccactttctcatctcaagagatgatagaaaggtgcccatatctgaactagctggtaaaaccataggcctttattttggggcctattggtctcctccttgctgcgccttcactgtccaacttaccgatgcatacaacaatctcaaggtggaaaaaggcgactgctttgagaatgtttcaatctcaacaga

SEQ ID NO: 245524 - DNA, 458 bp, Glycine max
  unsure (1)..(458): unsure at all n locations
attcncgggtcgacccacgcgatccacccacgcgtccgaccgggacaaacctgctcagcaagaacaaggacaagataaacctgctcagcaagaacaaggacaagatgagcaagaaaaaggaaaagatgagctttgaaagggagctgttcctcacatgggatatagacacaaagttacatgtgggctgcacacccttttgtatctcgttatcagaatttagtgaaccttaggtgctacctatcttcctttgatcttcttttcttttcggttttcttttatgtatggtttacttaataaaaacgggagcttttgcttggtgtagtagagtttagtgcagggaaaggtgtagctgggattcgagttaaattaatggatgtttttagatcacccagttaaaaaagaagacgagattcagaatggtacaacatttgctaaagattgaaaaataaaagggcggc

SEQ ID NO: 245525 - DNA, 451 bp, Glycine max
gggtcgacccacgcgtccgaggaagcgtgggtcacaaaggagcagctccactctctcgtcacgcaggccgtggatatgtttcccgaattcgtcgatagcgtgcgccggcttgctgacgtggaccctgcgcacaggaaaatcttcgtccatggccttggctgggacgccactgccgatactctaaccgccgtgttcgggaaatacggcgagatcgaggattgcaaggccgtcaccgacaaggtctccgggaaatcaaagggttacgcctttatcctcttcaagcacagggacgatgctcgcaaggcgctgaaacaccctcaaaagaagatcggaaaccgcaccacctcgtgccagctggcctccgccggccccgttccggctccaccgccgaacgtgaccccggtgtctgagtacacccagaggaagatttttgtgagcaatgtgaatgctg

SEQ ID NO: 245526 - DNA, 422 bp, Glycine max
acgcgtccgaacacacgtccgggcaataataggtctgatgatgcgttacacgttctgggccgcaccgcgcaaactgatgtaacaacgagtccatatccatggccgacaagtccgggtaatctttgaaatttcatcgtgatcgggatagatcattgcagagttttctagctaatgtagataacgaataactgtgcccattaaagcagagtttatgctatgtatctcaacgagctagacattactagtcctaagtgttatccctattttctaaaacactgacatgttgtgcatccgaagttcaagttttttagtgctacatacgatcagtgagtgcctattagtctgtacgttgactgtctaaattgttctccgaatgaggttgcctttcagtacaatactttcttgggaagcaagtcatcttc

SEQ ID NO: 245527 - DNA, 431 bp, Glycine max
  unsure (1)..(431): unsure at all n locations
gggtcgacccacgcgtccgaccaagcgtccgatcatggccgacaataattctactactgatcattatgatatgggcatggaaaatgctgaactggttatggctgaggccaaaaaggcttgaaaggcttctgagagaacaaggccttcaaggcaactcatacacgctttttgttggggacttgaangagtttggcaagatgcgaaatgaagccttatccaaacccatgaatctcttctctcatgacatagcgccgcgcgtgttatcctttatccaacacactgtcaacaagcatggcaaaaattcttttatctggtttgggccaataccaanggtgaccctcacagatcctgagcaaatcaaagatgtactcaacaagatttatgactttggaaagcctgatatgaatccgcatgttangttactagctcct

SEQ ID NO: 245528 - DNA, 410 bp, Glycine max
cgggtcgagccacgcgtccgaccaagcgtccgagaacccaggccatgactcagatgaatggtgtttactgttctagcaggcctatgcgtattggagctgcaactccaaggaaatcatctggccatcaacaaggtgggcagtcaaatggcacagccaaccaatctgaagcagattctacaaacacaactatatttgttggaggactcgaccctaatgtttcagatgaagatctcaggcagccattctcccagtatggtgagatagtctctgttaagatacctgttggaaagggctgtggttttgtccaattcgcaaacagaaataatgctgaagaggccttgcagaagctaaacgggacatcgattggcaagcaaacagttcgtctttcttggggccgtaatccagcaaat

SEQ ID NO: 245529 - DNA, 458 bp, Glycine max
  unsure (1)..(458): unsure at all n locations
cggtcgacccacgcatccacagaggtgaagcttcatggattttggtatagtccctacactttgagggtggtatggaccttaaagttaaaggatataccatatcaaaacatagaagaagaccgctacaataagagtcttcaacttcttgaatacaacccagtatacaagaaaactccagtgcttgtccataatggaaaacccttatgtgagtccatgcttattgttgaatacattgatgagatttggtcacataattcattacttcctgctgatccctacgagagagctctggcaaggttttgggttaaatatgctgatgatgacatgttttctgcagttattgcattcttccttagcaataatgatgaagagcgagaaaagagcatagagaagatatgggagcatctcanggttgttgagaatcattgttttggtgattagaagaaattttttggggg

SEQ ID NO: 245530 - DNA, 458 bp, Glycine max
gacccacgcgatccactcgattccgctcccatgtcactgcttcccataacagagcaaaacgacgtccccgtcgtcgacattgacagcgacgaagacggcgtcgccgccgtagctcctgcaagaaacgacgcgtcgtctcacaagactccgtcgccacaagttgagcttgtgcagcaagaaacccctgcgtcgggttccgctctgtctgccgccgacggcctgtcacgaagcttctggaaagccggggactacgttgttggtccctcctcaaagcccagtcccttccaaggtcacttggaacatgctcgggtgcatcccaagtttttgcagtctaatgcaccgtcacatagatgggcttttggagcaattgctgagcttgtggataatgctgttgacgagattcataatggtgcaacattcgtgaagattgagcagtttgatgtccagaaggataattc

SEQ ID NO: 245531 - DNA, 445 bp, Glycine max
  unsure (1)..(445): unsure at all n locations
cgggtcggncacgcgtccgaagtactgaggttcttcattctggctcaggcgttgcgacatccccgtcccactctcttcttcagccttcttggagtctctcacgccagttgcacacacatctactggggctaaggtcggaacgatggctgcctcttaaaaacatgtgcatgacgcatgtactcagacctagtcatagccattctcagcgaattcggcaatggtccaaccccataaacgaaccgtgctggtcactgggaccccacagtcaattcctgcacaatgtacagctctgagttcgaagactgctactgcgaatgtatcaaggtgttgctttcattaggtggtcgcattggatgctacactttggcgtcactacaatacgcatgagtcgtttcaatgttgctgtggaacactttcttgggaggcaagtcatctacttcgccac

SEQ ID NO: 245532 - DNA, 428 bp, Glycine max
  unsure (1)..(428): unsure at all n locations
acgcgtccgaaaaaaatggccaaaagcaaaaactctcatgctttgcctcttctccttcccactctcttcttcactcttcttggaacctctcacgccggtggcatagccatctactggggccaaaaccggaacgagggcaccctctcagaagcatgtgcaacaggcaaatactcacacataaacatagcctttctcaacaaattcggcaatggcaaaaccccagaaatgaaccttgctggtcactgcaaccccacaaccaattcctgcacaaagttcagctctgaaatcaaggactgccaaagcaaaggtatcaaggtgttgctttcaatangtggtggcattggaagctacactttggcttcagtagaagacgcaagaaacgtttcaacgtttctgtggaacactttcttgggaagcaagtcatcttc

SEQ ID NO: 245533 - DNA, 426 bp, Glycine max
  unsure (1)..(426): unsure at all n locations
cgggtcgacccacgcgtccgaaaaaacattgcccttgtcctttcaaagttacaaaccacaattccacaacacaccagcaccatatggcgtctgaacaattggcccgcaaaaagaacaccaccaccgaaaaggaaattcacgttgaaaaatacagggttcccaaaatggccacccacttcaagcaccttgcggagcaagctaaagaatctgacatcaccgctgggaaggatactccgcagggtagcatanaagccttgcaagctggagagaaggtcaaagatcatgcangaaaagccatgggagatattggtggacgtgggaaagccagagagactcacgagctgggtgcacactttgaatccctggctgacaaagtaactgaccatgcagcagccaatgtagttggaaacaaagagagtcaaagag

SEQ ID NO: 245534 - DNA, 427 bp, Glycine max
cgggtcgacccacgcgtccgaatctatcgaaagaaaagagaaagcgaatcggagaagaagaaaaatggggttggctttgttagcttcgaaggccgtgagacccacatcaaggctcctcttcggttcccaaaaccctagcaccttcctcctccgaaccatcgtctccaagccccagcttcggaatcccgaagccaccgccgcgcatccggagcagccgccgcctgccgatctcccgccgcggactccgctcgccggcgcccgcgtccacttcccaaaccccgaggactccatcgaggttttcgtggacggctaccccgtgaaaatccccaagggaatgaccgttcttcaagcctgccaagtcgccggcgtcgacatcccgaggttctgccatcacagcagactctccatcgccggcaattgccgcatg

SEQ ID NO: 245535 - DNA, 443 bp, Glycine max
gggtcgacccacgcgtccgaccacgcgtccggcaatttttgtagtttctcttacttacctgtgtctatggagaagaagcaagaaaaagggaaagagattaccacctggtccaaaagggttgccaattttgggaaaccttcacaagttggggtcaaatcctcatcgtgatctgcatgaactagcccagaaatatggacctgtcatgtacttgcgcttaagatttgtgccagccataattgtttcttcaccccaagcagctgaactgttcctcaagacccatgatcttgtctttgctggtagaccacctcatgaagctgcaaagtatatggcttgggagcagaagaacttggcttttggtgaatatggttcttactggcgcaacgtgcgcaagatgtgcacattggaattgctaagccaaaccaaaattaactccttcagaacca

SEQ ID NO: 245536 - DNA, 384 bp, Glycine max
cgggtcgacccacgcgtccgatcaagggttgtgaaagcagagaagtgagatacactaagttatcctcataaatacactctaattaggtggcaagataagtgtctaaccttagtaacattgccacatattgtgttcattttggaattgtgccactaaaattctattcaattcatctatggctgcctcttcttatgctatgcaatcaatcctggcaaaccctttgatccgcatttccagcgggtctagggtgaaccaatttggcgttcctgctttgcacatgagaaggaatgttggcctgagagttaggtccatggctaaggaagaacaaccaagtgagcctgcaaccccagttacaccgccaccatcagtagaaccaagccacag

SEQ ID NO: 245537 - DNA, 462 bp, Glycine max
gggtcgacccacgcatccgaccacgcgtccgaaaaaaaattagaaaacaatatagatacgatcttttatcctataattttatcaattatgcagataagaaagactcatatatttatggatatagatccctatttcaagtaaaaaaaaaccaagtgatttcttctaattacaacacgtataaaaaagaattattggatatcatagataatctctttatcaagaattatatatcggaagatgcgattctagatatggaaaaaaatatgtatagaaagtattttgattggatgggaatcaatagagaaatactaaatcgttccatatcgaatccagaattttggttcttttcaaaatttgtgatattttatgacgcatataggggtaactcgcaggttataccaatcaaattactttttttttcttctaatgtaaatcaaaatgttagtgaaaataaaaagaaca

SEQ ID NO: 245538 - DNA, 461 bp, Glycine max
  unsure (1)..(461): unsure at all n locations
attcncgggtcgacccacgcatccacaatgtttaaccaactggattctcatccccctcatataagttcttatatgaagcttccaactcctgagggcatggttcatcatgactcaccaccaaatcatcaatttccaggaaatatgcttcgtcctccttttcgtcaaccaaacagtggacttgcagggccagggtttgatcctccagttcatcattctatgttacaacaacaaatgcatatgcaaggaaaccttcccccacctcatttattacgtggattcccaaggggtgcacctatgccatctcatgctagcaatccaatgactggcttcatgcaggaaccaaacccaatgcaaggccaaggcttcccatttagtggtcaccagcatcctacttttggtggccctggaatgcaattacaagctcctgatgttggtggtggaagaaatcatccagaagcact

SEQ ID NO: 245539 - DNA, 421 bp, Glycine max
cgggtcgacccacgcgtccaattaacatttgctcccagcactgagcttaaccgagcttcacaaagatgaatcgggaaaaattgatgaagatggccggttcggttagaactgggggaaagggcaccgtgagaagaaagaagaaggctgtccacaagacaacaaccacagatgacaaaaggcttcagagcaccctgaagagaataggggtgaatgccatcccggctattgaggaggtcaatatctttaaggatgacgtagttatccagtttctaaatcccaaagttcaagcatccattgctgctaatacttgggttgtcagtggttctccacaaacaaagaagttgcaggatatactccctagcattatccaccaattaggaccagataacttggaaaacctgaagaagctggccgagcaatt

SEQ ID NO: 245540 - DNA, 436 bp, Glycine max
cccacgcgtccgaccgcatctatcgcgacgatgtcgggggaaatatggtggatgcttttaggacccatattatgcaaacgaaggaccttggtacttgcccattgaggcagattggtggatgctctttcttttacatgaggatcagtaatgtctacattgtcattgttgtcagcaacaacgccaatgtcgcttgcgctttcaagtttgttgttgaggctgttgcattgttccgatcatactttggtggagcttttgacgaggatgcaattcgcaataattttgtactcatttatgagctcctagatgaaattatggactttggttacccacaaaatctttcaccagagatcttaaagctttatatcactcacgaaggagtgcgttccccattttcatcaaagcccacagatagacctgttccaaatgcaactttaca

SEQ ID NO: 245541 - DNA, 383 bp, Glycine max
cggtcggcccacgcgtccgaacaagcgtatgcccacgcatccgcgcgggcagccgctgcgatctacccaatgcgaccgaaaatgttcgtctgcacctatacacgcaccgggaacagatttagcgcgtagaggcacctccattggcggcaagcaactcgatccgcaatgggaatcgatttgcatgcaggatgtaggtcaactataacgaatccatgcgcccccagatgcgattaaatctacctcaagctgtccgtaaagctgtaccatgttcatggtcagaagactgggagtaacttcaacgctgttgtctccaaacgccattgcatgagcagggtcaacaagccgtcgctgtccctctcgtgattgatccgttacacgattgg

SEQ ID NO: 245542 - DNA, 465 bp, Glycine max
  unsure (1)..(465): unsure at all n locations
gggtcgagccacgcgtccaaaagcattataccaatagtggtgcttattggagccatgtagtgtttgagcaccctgcaacatttcaaacactagctatggatccaaaggagaaggaaatgatcattgatgatctcataacattcagcaaggcaggggagttctatgcaaggattggaagggcatggaagagagggtatctgctttatggtcccccagggaccggtaagtccacgatgattgcggccatggcgaatttcttaggctatgatttgtatgatcttgagttgactgctgtgaaggacaacactgagttgaggaagctcctcattgagacatctagcaagtctataattgtgattgaggatattgattgttcacttgatttaaccggtcaacgaaggaagaaaaaggaagaagtggaagagaaggatcaaangcaaaaacaacaaggaatgcaagaaagag

SEQ ID NO: 245543 - DNA, 505 bp, Glycine max
atacgtcaaccctgtcaggtaccgatctagaattcgcgggtcgacccacgcgtccgagaaggtatcacagcagcctatgacacgctcagcattggctcgaaatatcttgaatacggtacaacccgtgctgactatcacgtccatagggattctaccctgaagttggagttgcagcttcgtagtggcatgcattctttgtcagaactttgagatggattctccatcactttagttgttgatagttcagatatcaatgaaaagctcaatgcaaatatccaaagacaggagggtattccatcagatcagcagaagcgtatttttgctgggatgcatatgcatgattgacttacctctagcagattagaggtgacacaatgaatacaactttcaactccaccttcacctttgctctaggtgctaaacatgttttgtttcaagtgaacgtgttatgaatccctcctttcatcaggggttcttgagtctcatctacagtctgttcaatttt

SEQ ID NO: 245544 - DNA, 367 bp, Glycine max
cccacgcatccgcttgatccttctttttctccttgaactcaaacatggcagatgaggtggttctgctagatttctggccaagtccatttgggatgagggtcaggattgcacttgctgaaaagggtatcaaatatgagtacaaagaagaggacttgaggaacaagagtcctcttctcctccaaatgaacccggttcacaagaagattccggttctcatccacaatggcaaacccatttgtgaatccctcattgctgttcagtacattgaggaggtttggaatgacagaaatcccttgttgccttctgacccttaccagagagctcaggctagattctgggctgattatgttgataagaagatatatga

SEQ ID NO: 245545 - DNA, 421 bp, Glycine max
  unsure (1)..(421): unsure at all n locations
cagccgtccgaccacacgtccgcctttttttttttttttttttttttttttttttttttttttttttttntttttttttttttttttttttgtaaggattgctcatctttattataatttattattgatgaagtgagatacagatatatcataagtctcacaattatatgggaaaaggaaagaagaaaggaaagactggatacattggaaggcaacttaagttgagaacagagtgattggataagtctccaagcaagaaagtgatgacaagtaagttgaagaggattagttgcaatcctgatgtggcaggaagccagaacagccttgagatcgatggtttaactcgctttgctgttgaagaacacaacaaaaaacagaatgcccttttggagtttgaaaaggtagtaagtgcaaaacagca

SEQ ID NO: 245546 - DNA, 499 bp, Glycine max
  unsure (1)..(499): unsure at all n locations
aactttatagccggcacgtaccggtctagaattcncgggtcgacccacgcgtccgaaacgaagcaaaaccgcaaccgccgctgctccgaagaaaaccgaggcggttaaaagggcagcgaagaaggtanggccgaagaagacgaagaaagtgtcgacgcctgcgaagcccaagcagcccaagtccattaggtctccaaccaagagggcccggaaagcagccgttgctgcggcttgatacttgtcttgtttagttaaaactatgacatatatatgtagatatgaaaaggtgtgggtgtgggtgtatgtgtgtgccttgctgcacaatcttgaagaaagttgtgtagtgtaggatggtagatagtttagtgttctgcaatgttcgctctaataagtgatctaatggagatgagttttactgttttaaatcatccttttttgctgttgcttgttaaaaaaaaaaaaaaaaaaaaaaagggcggccgctctaaaagatcaanct

SEQ ID NO: 245547 - DNA, 392 bp, Glycine max
  unsure (1)..(392): unsure at all n locations
gtgatatcataatggattcccacaatctgttgtgtcacccttcaagagctcagtgttgggtgagggtgagaagcaaagttctgatgttttctcaggaaactctagtccttttgtcaaggacattgaagtgaatggcaaggaagtagtcatgtcaaatgtanaggagtttcttggagtgcttgatgtttacatacatcaagccacggacattcaaaacatttgcatataccacaagcaagatgtttatgccaaagattagtctgaccagtaatcctgagaccaccatgtccaccaaaaccatcaattgaagaagaaagaaccctgttttcaacgagaatcttcgtattgatgttaagactgttgatgcatctctcaagtgtgagatatggatg

SEQ ID NO: 245548 - DNA, 313 bp, Glycine max
cgcgtccgagcaagcgtccggtgatatcataatggattccccacaatctgttgtgtcacccttcaggagctcagtgttgggtgagggtgagaagcacaagtctgatgttttctcaggaaactctagtcctttgtccaacgacattgatgtgaatggcaacgaagtaatcatgtcaagtgtagaggagtttcttggagtgcttgatgtttacatacatcaagccagggacattcagaacatttgcatataccacaagcaagatgtttatgctaagattagtctgaccagtaatcctgagaccaccatgtctacc

SEQ ID NO: 245549 - DNA, 399 bp, Glycine max
gacccacgcgatccagctaaagatatttcactcactggtcacactaccaacagagcattctggacatggcatcatctgtctcttacgtgcttctacttcccgatctgatgattgtcgcctttgctggggagttaaactgatactttggacatcacatgtggagatttgacggaccaatatactaaaccacggactagttacgctctctttcagtggaaataccatcttgcccaggttttcagacaagaaacgattaaccctgtgggaagattgacatgccgctcaagcatgtccctggaaacactgctggcaccgtccctgccgatgaactcactccaaaaggatcaacttgggatcatttagactatgaacttcttggagttctgagtggtgatctat

SEQ ID NO: 245550 - DNA, 496 bp, Glycine max
atcgtctagccgccaggtaccgatctagaattcgcgggtcgacccacgcgtccgaaaaataagacattgtttggtttggttacttgctcgaatttcctcgaatcgcttaatttgtatttgattagttaaaccgcaacgcggaatctcttttctcgaactggctaactctcaggcaagtggttcggacgctgattccagcaacaagcggctggtgctcgcactgtatgacgccctaaactccggcgactccgacgccgtcgtcaagatcgtcgccgccgacctcgagtggtggttccatggtccgccctcacaccagtttttgatgcgcatgctcaccggcgactccgctgccgacaactccttccgcttccttccgcagtccatcgccgccttcggctccaccgtcatcgtcgagggctgcgacaccgcccgcaacattgcctggggtcaagcctgcaacgtcaccgattggaataattaccagattaaagaattg

SEQ ID NO: 245551 - DNA, 433 bp, Glycine max
  unsure (1)..(433): unsure at all n locations
acgcaaccacccacgcgtccggttcattctctttgcgcagttccctacctctcctttcaagatgcagatcttcgtcaagaccctcaccggaaagaccatcacccttgaggtggaaagctctgacaccatcgacaacgtcaaggccaagatccaggacaaggaaggaattcccccggatcagcaacgtctcatcttcgccggaaagcagctcgaggacggccgtaccctcgccgactacaacatccagaaggagtcaacccttcaccttgtccttcgtctccgtggtggcatgcagatcttcgtcaagactctcactggcaaaaccataaccctagaggtcgaaagctctgacaccattgacaacgtcaaggccaagatccaggacaaggagggaatccccccnagacagcaacgtctcatcttcgccggaaag

SEQ ID NO: 245552 - DNA, 463 bp, Glycine max
aattcgcgggtcgacccacgcgatccactggaatgattggtctagtttcatccaattccaaggacaagaagaagacacagccggtcaagcaatctgatacaaagagaacgagaagagataggggagagctggaggatataatgttcaagctatttgaaagacagcctaattgggccttgaaacagctcgttcaagagacagatcagcctgcacaattcttgaaagagattctgaacgaactttgtgtttacaataaaagaggtgccaatcaaggaacttacgagctgatgcctgagtacaagaaatctgttgaagatacgagcgccgaataagtgctatgttctttacattatactcttaactctaccgaggcacagaccctccataaatatacgctgatggaagaaagaatcttgggacatcaaacaagatgcaaactttgtatctgaaccgtgaagaatac

SEQ ID NO: 245553 - DNA, 405 bp, Glycine max
cccacgcgtccgattttttctcttagaaccatcatgtcacaatctgatcattcctctgcttttaccacacccagattagttctcaagaaggttttggccaaatctcaacatgaaggggatggagctgttgttagaagaggcattggaaggagcgagttgaagaacttggatcccttcctaatgttggatcacttctcagtatctcccccagcaggatttccggatcatccacaccgaggttttgaaaccgtcacctacatgctagagggaggcatcactcaccaagattttgctgggcacaagggtacaataagaaagggtgatgttcagtggatgaccgcaggcaggggaatcattcactctgaaatgctcgcagaagcagacaacaacaacggattgcaacta

SEQ ID NO: 245554 - DNA, 400 bp, Glycine max
  unsure (1)..(400): unsure at all n locations
attcgcggntcgacccacgcgaccgaccatttgcattcaggcttagctcgcttaccacactacaccatatggcggttgctgtagccatgttacctcgttggtcggtttttcttctttttctgtttgtcgtgtgtatctcatgagcaaatgttgtcaccattgatgtacgtgcagccaagagtctcatctagaccggttccatttatcctgatgttaggacggtggaggagttcaagaaagggcatgtgtatgcagataatgtccttaacattccatacatgttgaatacacccaagggcaatgtaaagaatggagactttctgaaggaggtttcatcatcatgcaacaaagaagatcatctcgttgtgggttgtcaaagtggggtgagatctctgtatgc

SEQ ID NO: 245555 - DNA, 469 bp, Glycine max
taccgatcaggaattcgcgggtcgacccatgcgaccagcagatattacatacacgtgaatcactaattaagccatggagaagaaatcaatagctgggttgtgcttcctcttccttgttctctttgttgctcaagaagttgtggtgcaaactgaggcaaagacttgcgagaacctggctgatacatacaggggtccatgcttcaccactggcagctgcgatgatcactgcaagaacaaagagcacttgctcagaggcagatgcagggacgattttcgctgttggtgcaccaaaaactgttaaatggatccattcactccaacgtgaagaagatgcatgcagcgctattttataaaaaataaaactactatatactatatataataagactggcgctgcatcaatgacctatgtattatagtatatattattaccgatgtcagaactatagatgcatgtactgtgcataac

SEQ ID NO: 245556 - DNA, 448 bp, Glycine max
ccgggtcgacccacgcgtccaaaagaatcactcccttatccatttccacaccacaccatggcctcaaccaacgctctctcttcagcctccattctacgctctcccaaccgccagtctctgacccgaagagcgaaccataatggaagagtaaattaccggaaaccgaataaccgtttctccgtgaaagcctccgccaaagagattgcctttgaccagcattcccgctctgctatgcaggccggcattgacaagctcgccgacgctgttgggctcactcttgggcccagagggaggaatgttgtgttggatgagtttggaagtcctaaagtggtcaacgatggtgtcaccattgctcgcgcaatcgagcttcccgatcctatggagaatgctggtgcagctcttatcagagaggttgctagcaagactaacgactctgcgggtgatggga

SEQ ID NO: 245557 - DNA, 366 bp, Glycine max
gacccacgcgtccgagaagattctggtgaatgcgtagaacaggaaaataaagaaattagcgtgaaaaatgttgggtgtgttcagcagctccatagtgtcgccgccggaggagctcgttgccgccggcagccgtacaccgtcgccgaagatgacggcggcggcgctgctgaagtggttcgaggagaagaacccctccgcagtgtcggtggaggtcggagagcatgtctagctcgcttacagccaccacaacgagtcgccgtttcagcctagatcctttgctgtgaacgatgaggtactctgcatgattgagggagcccttgacagtttgggcaacgtgagacgatattatggattggccaagtcaac

SEQ ID NO: 245558 - DNA, 436 bp, Glycine max
cccacgcgaccgaaaagcgcaaattaaagcgcaaaaaccattctccttcggtgctcttgaaaacatgggaaaacagagcacagaattctctgccctcaactgcatcgacctctccaaccctgagatcaaccaatccgtcaatttactcaaacaggcatgtttggattccggttttttctacgttgtcaatcatggaataagccaggaattcatggaagaggtttttgcacagagcaagaaattcttctctcttcctcacaaggagaagatgaagattctcaggaatgaacaacacaggggatacacccctgttcttgatgagttgcttgatcctgaaaaccaagtgcatggagactacaaagaggggtattatattggagttgaaaaaggttaagatgacccagaatcgatataacctttttatggaccgaataac

SEQ ID NO: 245559 - DNA, 459 bp, Glycine max
attcgccggtcgatccatgcgaccacatagcgcaaattaaagcgcataaaccattctccttcggtgctcttgaaaacatgggaaaacagagcacagaattctctgccctcaactgcatcgacctctccaaccctgacatcaaccaatccgtcaatttactcaaacaggcatgtttggattccggttttttctacgttgtcaatcatggaataagccaggaattcatggaagaggtttttgcacagagcaagaaattcgtctctcttcctcacaaggagaagatgaagattctcaggaatgatatacacaggggatacacccctgttcttgatgagttgcttgatcctgataaccaagtgcatggagactacatagacgggtactatattggagttgaaagatgtgaagatgacccagaatcgaataaaccttgttatggaccgaataactgggccgcac

SEQ ID NO: 245560 - DNA, 434 bp, Glycine max
aattcgccggtcgacccacgcgaccaggccttggagaagattgtgtgctttaccagcattttgggtagggttattgtacgatgaactttctctaaaaagtgttttggatatgacagctgattggactccagaagaaagacaaatgttaaggaataaggttcctgtaactggtctgaagacaccattccgagacggtttgctgaagcatgttgctgaagatgttctaaagttggcaaaggatggcttggagagaagaggcttcaaggaatcgggatttttgaatgaggttgccgaggtggttagaacaggtgtcactccagctgagaggcttttggaattgtatcatggaaagtgggagcaatccgtagatcatgtgtttgaggaattgctttattaaggtagtattgtctttcaaaggtctgtggaagattgtg

SEQ ID NO: 245561 - DNA, 426 bp, Glycine max
  unsure (1)..(426): unsure at all n locations
aattcgccggtcgacccacgcgaccacaagaagaaaaaaccgacacaaagatctagtcctagctagaatcaaacaggggcgatctcaccttcaagaacacatcgccatggcaaggaacttgcttcttgtgctttttgcagtagccaccctcctccatggctcagcagcccaaaccagacacatggtcggtgatgccacgggctggatcatccctgctggcggcgctgccacctacaccgcctgggcttccaacaaaaccttcaccgtaaacgacactctcgtgttcaacttcgccaccggccaacacaacgtggccaaggtaacgaaatcggctttcgacgcgtgcaacggcgggagcgccgttttcaccctgacctccggtcnagcgaccgtgaccctgaacgaaacaggggagcantactacat

SEQ ID NO: 245562 - DNA, 367 bp, Glycine max
cgacccacgcgtccggtttccattggcggagctccgattcgccaccaccgttctccgaaccggatcgggttgttgccgcctctcaaatgctcctctttggagccggaaaccgccccgcctcctcccttcgactggactcacaagttgatcgccggtgtcgccggcgtcggattcctcgaaacctcgtacctcacttaccttaaactcaccggcgcagacgccttttgccccgtcggcggcggcacctgctctaaaatactcgacagtgattacgccctcgttttcggtattcctcttcctctgattgggatggctgcgtatggcttggttgctgcacttggtgttcaattggcttcgaagaatttcg

SEQ ID NO: 245563 - DNA, 431 bp, Glycine max
gacccacgcgaccgaaagaagggatggcacacggggagtttaaggaacatacagaacgtgtggaaggcagagcagaagcacgaagcggagcagaagaagctggatgagctccgcagacagatccaggaggagagagagcgcaccgagtttcgtcgtcttcaggagaaagctggcctcgcatcaggagaggttggaatttctgtacgattcgggattgtcggttgggaaatcttcgaattccgaaggattcaaggcgctcgaacagttaccaaaatccgatgcaacggatgcagcaggctcctctgcttctgcatctgcttctaaggagggggcgagtgtgcctggggcattgttcgaggagaagcctcagtctgccaatgatgcttggaggaagcttcattctgaccctttgctcatgattcgccagcgcg

SEQ ID NO: 245564 - DNA, 444 bp, Glycine max
gacccacgcaaccagcgccggaaacaactgggccaaaggtcactacaccgaaggcgctgagttgattgactctgttctcgatgttgtcaggaaggaggcagaaaactgtgactgccttcaagggtttcaggtttgccactctcttggtggtggaactggttctggaatgggaacactgttgatctcgaagatcagggaagaataccctgactgaatgatgcttacattctctgtgttcccatcccctaatgtttctgacacagttgttgagccttacaacgcaacattatcagtgcaccagctcgttgaaaatgcatatgaatgcatggttttggataacgaagctctctatgacatatgcttccgcagccttgagcccatcaccccaagctttggagatctgaaccatctaatttcagccaccatgagtggtgtgacatgttg

SEQ ID NO: 245565 - DNA, 371 bp, Glycine max
attcgcgcggtcgacccacgcgaccactcaaatccaaatccaattccaattccaattcccaatcttctcaaaccctaattcctcatcttgaaaatgagagaaatcttgcacatccagggagggcaatgcgggaaccagatcggagcgaagttctgggaggtgatatgcgatgagcacggcatcgaccacaccggaaagtacagtggcgactctgaactccaattggaacgcatcaatgtttattacaacgaagcgagtggcggaaggtacgttccacgcgccgtcctcatggatctagagctcggcaccatggactccgtcagatccggcccctacggccagatcttccgccacgacaacttcgtcttcgg

SEQ ID NO: 245566 - DNA, 287 bp, Glycine max
  unsure (1)..(287): unsure at all n locations
cggggtcgaccacgcgtccgacagagatggaattgatgatgtcaaggaagcagcttccagagcaacaagggttagaagttcagaacccaaattcaataaaggccctgcagcagaaaattcaagcattacagcggggaaagaacacgaatggagatcctgagagatgaagatagacgacttcgagctcaactgatggatactgctgaagcactgcaagctgcaggtgaacttcntgtgcaacttaatgaagcagaagaagctgtcattaccgcacagaagcgggcgat

SEQ ID NO: 245567 - DNA, 327 bp, Glycine max
ttaaaaaattataacgttaatcgtccattttatatttcgtacaattcgtgtggttttactttcataataaacatcactctaaagtaatttaggattaataatctgataaataatataaagttctattattcataatttggagtacaaagcaacattttccccccccctttttccatccatgatactcttatctttgccatataactgcaaagtgtaaacaaaagcttgaaatgaagaagctaagagcaacccttgcaataatttgtaatctataactacattttgagcacctcttatttagcatatactcaatacatctcctgacat

SEQ ID NO: 245568 - DNA, 514 bp, Glycine max
gggggcgggtgtgcagcatccgtaagccggtcaggtaccgatctagcaattcgcgggtcgacccacgcgtccgatggaagcagatggctgatgctggaataaagtatattcctagcaacaccttctcactttacgatcaagtactggacacaacagccatgctcggggcagttccatctagatataattggaatggtggggagattgggtttgatgtttacttctcaatggcaagagggaatgcatctgtaccagctatggaaatgaccaagtggtttgacaccaattaccattacattgttcctgaattgggtcctgatgttaagttctcctatgcatcacacaaggctgtcgatgaatttaaagaggccaaagttctgggagttaatactgtacctgtgcttgtgggacctgtatcctacttgttgctgtcaaaaccagctaagggtgttgagaagtcattttcccttctttccctaattgacaagatccttcctgtctacagggaggttgt

SEQ ID NO: 245569 - DNA, 196 bp, Glycine max
  unsure (1)..(196): unsure at all n locations
gctggttgtcaaggaactggtatgaaagtttctataagacatcttggcccgtccatgattcagcagatgcagcatgcttgcaatgaatgcaagggtactggagaaaccatcaacgacagagatcgctgcccacagtgcaagggagaaaaggttgtgcangagaaaaaagtccttgaagttattgtggaaaaaggaa

SEQ ID NO: 245570 - DNA, 359 bp, Glycine max
ggtaccgaactagaattcgcgggtcgacccacgcgaccaatatattccttgacatatgttttttctttattggcaaggatagagtcaatgttacagagatattaaaaggttgtgatctgcatgctgaaattggaataacaatcctggttgaaaggagcctcataaagcttgaaaagaataacaagatcaaaatgcacaatttgctacgtgacatgggaagagaaattgttcgtcaaagttctctagaggaacctgagaagcgtagtcgattgtgggttcaccaagaagtgcttgatttgttgttagaacatactggaacaaaagcaattgaaggcttggctttgaagttacaaagaact

SEQ ID NO: 245571 - DNA, 509 bp, Glycine max
  unsure (1)..(509): unsure at all n locations
cgccgtgtgagcaacgtaatcggcatgcacggtctagatattccggtcgacccacgcgtccgatcaaactttaaataggtaggacggtgcggctgctctgttgagccgcgccatggaatcgagagctccaagtgggccatttttggtaagcagaactggcgatgcgggatgaaccggaagctgggttacggtgcccaactgcgcgctaacctagaccccacaaagggtgttggtcgattaagacagcaggacggtggtcatggaagtcgaaatccgctaaggagtgtgtaacaactcacctgccgaatcaactagccccgaaaatggatggcgctaaagcgcgcgacctatacccggccgtcggggcaagaccaagccccgatgagtangaaggcgcggcggtcgctgcaaaacccagggcgcgagcccgggcggagcggtcgtccgtgcagatcttggtggtagtagcaaatattcacatgagaacttttaaaggcccaagaagggag

SEQ ID NO: 245572 - DNA, 406 bp, Glycine max
  unsure (1)..(406): unsure at all n locations
ccggtcgacccacgcgtccagcgaagaggcgcagccgtagcagtaactcgtggaattgctagcaatggcgaggatcaangtttacgagctgaggcagaagacgaaggctgatctgttgaatcagctgaaggacctcaaggccgagcttgccttgcttcgtgttgctaaggtcaccggcggtgcacctaacaagctctctaagatcaaggtggtgaggttgaacattgcccaggttttgacggtgatttctcagaagcagaaggccgcgttgagggatgcctacaagaacaagaagtacttgcctctcgatctccgccctaagaagaccaggccattcgcangaagcttactaagcancaggcatcattgaagaccgagagggagaagaagaaagagttatatttcc

SEQ ID NO: 245573 - DNA, 378 bp, Glycine max
cggtcaaactagtccggtcgacccacgcgtccgatccctcccttcttccttgtctctttctcttctcaacaacatgcagatcttcgttcaagactttaactggcaagaccatcaccctcgaagtcgagagtagcgacaccatcgacaacgtcaaggccaagatccaggacaaggaaggtatccctcctgaccagcagaggttgatttttgctggtaagcagctggaagatggtcgcactcttgctgattataacatacaaaaggaatcaacacttcacttggtcttgaggctcaagggaaggaacatgattaaagtgaagactctaactggaaaagaaattgaaattgacattgagccaactgatacaatcgaccgga

SEQ ID NO: 245574 - DNA, 452 bp, Glycine max
gacccacgcgaccagataaaacaaataaaaacctctgttttctttgtgtgatttctcttctggttccgagtattgtgttattcaccaaaagcttgcacctttctgttgtggatcacctaaaacttgggttttggttgagatggctgagaaggaagaagccatgcatgctgttttgaaggaagctgtggatttggaaaacgttccacttgaggaagtttttcagactctgaggtgtgattcaaatggactcataacagaatctgctgaggagaggctggtcatctttggccacaacaaacttgaggagaagaaggagagcaaggttttgaagtttttaggatttatgtggaatcctctttcatgggtcatggaaactgcagcaatcatggccattgctttggccaatggaagatgaaaacctcctgattggcaagactttgttgggattacac

SEQ ID NO: 245575 - DNA, 289 bp, Glycine max
aattcgccggccgacccacgcgaccagtttccttggttcaagacactgcaaatacagcacttcttctgccattgaagaagaacccgttaaaccatcagtgcaagtagaacacacccaactcttaattgatggaaaatttgtagatgctgcttctggtaaaacttttccaactttagatcctaggacaggtgaagtaattgctcatgttgctgagggtcactctgaggatgttgatcgagcagttgcagctgcacgaaaagcatttgatcatggaccatggcctaagatg

SEQ ID NO: 245576 - DNA, 457 bp, Glycine max
gtaccgaactagaattcgcgggtcgacccacgcgtccatccagatctgtgttgtgatggcagcagcaccagcagctaccttcgctattggaaccaccggttccctcggccaaagaggaagctcgcttcctcaatcaaagtcctttgggttgaaattcaactctctgaatcatttgaagagcttctgtggcctcaaggccatgtcatccgtgagatgtgagtcggaatcctccttcttcggtaacaaaaccggtgctgctctacgggcgtcttttgcatccaaagctcaaaaggaaaacaaccacaactcgcagcctcaggcttcgtacaaagttgcggttcttggtgctgctggagggataggtcagccgctctcgcttctcatcaagatgtcgcctttagtttccaacctgcatctctatgatattgcgaatgtcaagggatttgctgctgatatc

SEQ ID NO: 245577 - DNA, 376 bp, Glycine max
gtaccgtcctagaattcgcgggtcgacccacgcgaccagtgagatcttgcagtcatccaatttaaagagctttaccttgtcagaacttaagacggccactagaaatttccgtccagatagcgtgttaggagaaggtggttttggatcagtttttaaggggtggattgatgagaattcattgaccgctaccaaacctggcactggcattgttattgctgttaaaagacttaatcaagatggcatccagggtcacagggagtggttggctgaagtcaactatcttggacagctttctcatcctcatctagtgagattgattgggttttgccttgaagatgaacacggccttctcgtctacgaatttatgccacgtgga

SEQ ID NO: 245578 - DNA, 374 bp, Glycine max
ccgggtcgacccacgcgtccgcccacgcgtccggaagaagaaggatgtggcacgaggcgaggaggtcggagaagaaggtccacgacatgatggacgcggctcggaagagagcgcaacgacgcgccgtttacctagccaagaggcgcggcgatcctcagcaatctattcagctcgtcggctttcgaagccgaacctatcgcgacgacgctctctaccaagccacgcaagattagcaaggcctgataccttggaatgggaaacaagatgtattgattgacagatttgatgggcgtgctctccttgaattcaatcgcgattctaaccacaagcgcgtcccggaaaagtctgaagaagaagaagagttagaagagttt

SEQ ID NO: 245579 - DNA, 428 bp, Glycine max
acccacgcgtccgaatagcctaaagagtcctccccaattgcttcaggcaattactgcatacactttgcggctgaaaagtctaatctccagagaaatagagaaaattgatgttagagccgatgcagagaccttgaggtacaaatatgaaaataacattgttatggatgtttcgtcatctgatgggagctctcctctacagtatcaactttatggcaatggaaagattggggttgatgtgcctccaggagggagtcaaaatcagcttcttgatagacagaaagctcatgttcaacaatttttggctactgaagatgcactaaacaaggctgcagaagcaagggatatgtgtgaaaaacttatgaaacgtttgcatggaagcactgatgtttcatcacgctcacttggtattggaagtaactcccaaaatg

SEQ ID NO: 245580 - DNA, 311 bp, Glycine max
  unsure (1)..(311): unsure at all n locations
ctgaattgtgtgaatcgaaaactaaacattgctattgtaaaagttgcaaatgcctataaacaccctaatattattgcagaatttatagctggacaattaaagaatagagtttcgtttcgtaaagcaatgaaaaaagctattgaattaactgaacaggcgggtacaaaaggagttcaagtacaaattgcaggacgtatcgacggaaaagaaattgcacgtgttgaatggatcagagaaggtanagttcctctaaaaaccattcgagcgaaaatcgattattgttgctatacagttcgaactatttatggggt

SEQ ID NO: 245581 - DNA, 464 bp, Glycine max
attcgcgggtcgacccacgcgtccggttagttcacacactaagttctgaaaaatgagttccaaagtttttcttattctacttatgttcatggccactatacttttgatctcctctgaggttgcacccgatgatgcataccagaattttgacaaaacagatgggaagcgtagtgcaaatggggtagatgaaagcaaatattggcgtggtggctatggcgactatggtggttggcgtggtggtggttggcgtggtggctatggaggctggcgtggtggctatggtggtgggcgtggtggctatggtggctggcgtggtggctatggtggtgggcgtggtggctacggacgttggggtggtggctttggccctaacgaacataatgaggctgggattgatgctagccctcacaaccaagaaggaaacttgctaaagcttatatatgatttaagttatcgtaataaat

SEQ ID NO: 245582 - DNA, 468 bp, Glycine max
  unsure (1)..(468): unsure at all n locations
gtaccgagctagaattcgccggtcgacccacgcgaccatttaaaggcagcaagaagcagcattcaatgcccaatgctcatgtgcgttcagaactcaaagatatggatcaaattcgaaaggagaggcagacaaaggccaacagggtttcttatataaagagcaagtcgacaaagggtaaaaggtttggtaaaaatggtaaaaaaaggaaaaggcaaatagagtttgtttgaagctctagaaattaattagttaaggagaaaaggcttgccaatgaatttttatattttggagtggtaaggggggggggggaaaggagaaacccaactgnagaaaaagtgactttttgattttgtttttttttcttggttcaccaacaaattttgtttgttcaaagtaatgattcttgcacttgttgctgtacatggatcacacatctgtgcgcttccttttatatttgaagttcccctt

SEQ ID NO: 245583 - DNA, 461 bp, Glycine max
gtaccgtactagaattcgccggtcgacccacgcgaccagagaacttccgcctgctgtatgacaccaaaggccgattccgtcttcactcagtcatagatgacgaggctaagttcaagctttgcaaagttcgctcagtgcagtttgggcaaaaaggtatcccatacttgaacacctacgatggtcgcactatccgctacccagaccctctcatcagagctaatgacaccattaagttggatttggaggagaacaagattgtcgatttcatcaagtttgatgttgggaatgtagtcatggtgacaggtggaaggaataggggtcgtgttggagtgatcaagaacagagagaagcataagggaagctttgagactatccatgttcaggatgccactggccacgagtttgcaactcgtatgggcaatgtgttcaccattggcaagggaacaaaaccatggatatct

SEQ ID NO: 245584 - DNA, 431 bp, Glycine max
gggtcgacccacgcgtccgagccgcttaagttaagactataacaacagccaagcgcattggcctatatatatcaacacaaaaactctttgattcagaaacatacatatatattcacacaaatatccatttatatatacatatatatagttctatatggcaatgacaacggtggtgtttgtcttgtgcatctttgtagtgttgaatgcaagtgcctctgatgccactcgcttattgctgaacaaaactgcaacaggtaacgtgtccagagagaagattgagagatacttacttgaaaatggactcggccagacaccccccatgggatggaatagctggaaccactttggctgtgatattaatgaaagtttaattcgagaaacagctgatgcattggtgtcatcgggccttgctgccttgggatacaaataca

SEQ ID NO: 245585 - DNA, 453 bp, Glycine max
gggtcgacccacgcgtccgaaacactgagctaaggaagctgttgattgagactccgagtaagtctatcacggtgattgaggacattgattgctcactcgatcttaccggccagaggaagaagaaaaaggaagagaatgaggatgaagaacaaaaagatcctatgaggagaaatgaggaggagagtagcaagagtagtaaggtgactctgtctgggttgttgaattttatagatgggatttggtctgcttgtggaggtgagaggatcattgttttcacgacgaattatgtggagaaacttgaccctgctttgattaagagagggaggatggataagcacatagagatgtcttattgttgctatgatgcattcaaggtgctggccaagaactacttggatgttgagtctcatcatttgtttggtgcaattggggaatgttggaagaaacagatat

SEQ ID NO: 245586 - DNA, 428 bp, Glycine max
tcgacccacgcgtccgaccacagcgtccgcagatttttagttgtttaaaattctgttttaaaattctaaaattttaaattctttataaaaagtatccaaacaataaattctaaattacagaaattcaaattctctgataaattactttcctcggttaaaattttctatccaaacgtactctaaggttaatcagttttaagatagaatttcaacagtgaaataaacttgattaacaacttaaccttttgttgatcattttttttttctgaatcaagatatctcttaattgaaagtcaaagattaatcttttgagataccgagatttatttaagagattaacatctttcaaacatatgtatgttttttcatatgtgcaggccaaaaatcaaacttatgaccacatatttttgttgaacatattgggttta

SEQ ID NO: 245587 - DNA, 476 bp, Glycine max
ggtaccgatctacaattcgcgggtcgacccacgcgaccgaaaacaaaaacatttccctgctacttcatcttcttcttcttcttcttcatcaccggtggttctgttcattcttccttgcaccttcttctttgaagatcgaaattgtgtttttgaaaaaatgggagttccagagaaagaccctctttcccaattgagtttgcctcctggttttcggttttaccccaccgacgaggagctcctcgttcagtatctatgccgcaaggtcgctggccaccatttctctcttccaatcattgctgaaattgatttgtacaagttcgacccatgggttcttccaagtaaggcgattttcggtgagaaagagtggtactttttcagccctagagacaggaaataacctaacgggtcccgacccaacagagtagccgggtcgggttattggaaagccaccggaaccgacaagatcatcaccaccg

SEQ ID NO: 245588 - DNA, 371 bp, Glycine max
attcgcgcggtcgacccacgcgaccgaccacgcgtccgaaaaaaaaaaaaaaaaaaaaaaaaaaaaaaaaaaaaaaaaaaaaaaaaaaaaaaaaaaaaaaaaaaaaaataaataaaaaaataaaaataaaaaaaaaaataaataaaaatataaaaaaataaataaatttaaattcaattgaatttttttttattttctaaagtttttggaagtaaccggctttttcatttatttaatctatttgctttatatcacgctttcttttcgtgagctgttgtcatagcgactctgaccgatttcatttcccttcactatcgttgcgataacctgattgtggaatgggaccttttttgtcacatttaattatgcgt

SEQ ID NO: 245589 - DNA, 497 bp, Glycine max
  unsure (1)..(497): unsure at all n locations
ttcatttggcctgcccngtacctatctagaattcgcgggtcgacccacgcgatccacaaagggtgttggtcgattaagacagcaggacggtggtcatggaagtcgaaatccgctaaggagtgtgtaacaactcacctgccgaatcaactagccccgaaaatggatggcgctaaagcgcgcgacctatacccggccgtcggggcaaggaccaagccccgatgagtangagggcgcggcggtcgctgcaaaacccagggcgcgagcccgggcggagcggtcgtcggtgcagatcttggtggtagtagcaaatattcaaatgagaactttgaaggccgaagaggggaaaggttccatgtgaacggcacttgcacatgggttagtcgatcctaanggacnggggaagcccgtctgattacgctctgtgcgccttatcgaaaaggaatccggttaaaaatcctgaaaccggacacttgcggttacaggaaactttaggaatc

SEQ ID NO: 245590 - DNA, 359 bp, Glycine max
ggtcgacccacgcgaccacgctctgtgcagtttcctcgctctcttttctgcaattttcttttttgttccttctctgcggttatctttttgagcttcaatggcggacgctgaaaccttcgctttccaggctgagatcaaccagcttctcagcctcatcatcaacaccttctacagcaacaaggagattttcttgcgtgaactcatcagcaacgcttctgatgctttggataagattcgatttgagagtttaaccgacaagagcaagctcgatgctcagccagagctcttcattcgtcttgtgcccgacaaggccaacaagactctttccgttattgacagcggcattggaatgaccaaag

SEQ ID NO: 245591 - DNA, 400 bp, Glycine max
  unsure (1)..(400): unsure at all n locations
tacggtcaaaaattnccgggtcgacccacgcgtccgattccattttcatttctttcgcaaaagttgcaactacttcctcagaaaaaaagtttctaagttaaggaaatccagagagacaaaaatggccggtgacggtgcagctacatgcatagacatcctccttgccatcattctccctcctcttggagtctttctcaaatatggctgccaggtggagttctggatttgtttggtgctgaccctttttggttatatacctggaattatctatgctgtctatgctatcaccaagtgatcaccctttaactttgtgtggacaataaacaaatgtcatgggcgtttctgtctttcaactcagatattagtgtttctttaatatatcgccaatgttgtcatattc

SEQ ID NO: 245592 - DNA, 431 bp, Glycine max
gggtcgacccacgcatccgaccacgcgtccgcgttgctctgctttcaattttcggaaaagaagagattctgtacagagatgctctgaaacggtgctactacactctggagcaagggtataactcaatgccaattaacgttccgggaacactgttccacaaggcgatgaaggcaacgaacgagcttgcacaaatcgtggcccaaataatctggagcaggatgcataggaagatgattgattacaaggacttgttgggttcattcatggatgagaaatcagggctcaccgacgaccagatagcggataatgttattggcgtcattttcgcagctcgtgacaccaccgccagtgtgctgacgtggatcgtcaagtacctcggtgaaaaccccagtgtcctagaagctgttaatgaggagcaagagtgcatattg

SEQ ID NO: 245593 - DNA, 362 bp, Glycine max
  unsure (1)..(362): unsure at all n locations
gggtcgagccacgcgtccgattcaattagttcatactaagttctgaaaatgagttccaaggttttgcttgttctacttatgttcttggccactatacttctgatctcctctgaggttgcacccgatgatgcatacgagaattttgacaaaatagatgggaagcctagtgcagatggggtagatgaaagcaagtattggcgtggcggctatggtggcggctatggtggtggttatggaggtgggcgtggaggctatggaggtgggcgtggaggctatgganggggacgtggtggatatggcggccgaccaagtggctattgttgccggcgttgtggctatgccggccggccttgtggcgggcc

SEQ ID NO: 245594 - DNA, 378 bp, Glycine max
ccgggtcgacccacgcgtccgagaaaatacacattacattactaagtctttgttcatttgagtagtagtgatggctagcctcaaggttgcatgtgtggttgctgtgatgtgcatggttgtggtggccatgagtgctgcacccatggcacaggccgcaatcacgtgcgggcaggtcgccggcgacatgtctccgtgcttcagttatcttcgaagcggcggaaaaccgtcgcaggcctgctgcaacggagtgaagtccctcagcagcgcggcgaagaccaccgccgaccggcagggggcgtgcagttgcctgaaaaaccttgccaataatatgggacaaaatttgaatgccgggaacgcaacctctctccctggcaaatg

SEQ ID NO: 245595 - DNA, 438 bp, Glycine max
gacccacgcatccgtggatctgctgtcaaccctggttctttccagcagcacattagacatgattctaatttgatgagtcagctctttcagagtgatccagagttggcacaagctattttagggaatgatctgaacaaattgcaggaagttttacgattgcgtcatcaccaaagagatgaattaaagcgtcagaaggaagaagagcttgctcttctttatgctgatccttttgatgttgaagcacaaaagaagattgaagctgccatccgccagaaagggattgatgaaaattgggctgctgcattagaacataatcctgaagcttttgctagagtggtcatgttgtatgttgatatggaggttaatggtgtcccattgaaggcatttgtggatagtggagctcagtctaccattatatcaaaaagctgtgctgagcgt

SEQ ID NO: 245596 - DNA, 381 bp, Glycine max
cacgcgtccgaccaagcgtccgatatttggtcctgatgatactccatgggatggaggcacgttcaagttgacactccaatttactgaggactatccaaataaaccaccgactgtacgatttgtgtctcgcatgtttcatccaaatatttatgctgatggaagtatttgtttggatatattacaaaatcagtggagtcctatttatgatgtggctgctatactcacatctatccagtcattgctttgtgatcccaacccaaattctcctgcaaactctgaagcagctcgaatgtttagtgagaacaagcgtgagtacaatcgaagagtgagggaaattgtggagcagagttggacagcagattaagttcatccttatatgca

SEQ ID NO: 245597 - DNA, 448 bp, Glycine max
cggtcgacccacgcgtccgaccacgcgtccgcttttctttattttattctcttctgttctccgctacctatggcgaatttcacctcttcctcctcctcctcttgttctcccttacctctatctctaactatgtcacacatttcacctccgtcatcttctgcggctttcgacgacagttccgaggacgcctgcagcatatgtctagagccattcagcacccatgaccctgccaccataaccagttgcaaacatgaatatcatctgcactgtatccttgaatggttgcagagaagcaaagaatgcccaatatgttggcagttacttatcttgaaagaccctgccagccaagagcttctaaatgcagtggaagctgaaaaacgcttaagttcaagaactgtatattcacatgcattcatggattctcgtagcccccttcaacggcttaaca

SEQ ID NO: 245598 - DNA, 411 bp, Glycine max
gacccacgcgtccgatcgaccattacatttatcaaggggagtggagaaaccaagtgggagggtcacatacacagttgttcctgaaggtttgtgcagatttagtgtccaggaactgagcatgagaggaatataccatactgcgaggataacttcccttgaaatgaccaagactgaactggaacaagtggagcaagacccagatttcataatgttgtctcgccaatttaaagctactgcaatggagcttatttctgttttggagctgaaacaaaaaactggtggtatgacacaagtccttttggacaacgttccagttcacaagttggctgatatatgtgttgctagttttgagataagttttgaagaccaattatctatgctggacttaatttgacccacagtgacgctttc

SEQ ID NO: 245599 - DNA, 444 bp, Glycine max
gacccacgcatccgctccctcatcaccttgctaaattctctggctaattcgcgattttcttgtagtaaacagagcaagcgagcttctccaattcaacatacatggcccccgaaaccgattcaattgaaatgttcttcttccccttcgtaggaggaggccatcagattccaatgatagacgcagcaagagtgtttgcatctcacggagccaaatcaaccattctagccacaccctccaatgctctccacttccataactcaatctcgcatgaccaacaatccggtcttcccatcgccattcataccttctccgccgatatatccgacacagacatgtctgctgccggtcccttcatcgactcctcggctctcctcgaaccgctgaggctgtttctcctgcaacgcccccccgactgcattgtcatcgacatgttccatcgttggg

SEQ ID NO: 245600 - DNA, 432 bp, Glycine max
gacccacgcgtccaatttttaacttcctctttctacatttcattcaaaacaatcatggcttctcttcattccattacattttcaacaaaaactgtcctttatgtatttgtattggcctcttccatcgcagcctctgctggcaacttctaccaggattttgacgtaacttggggagatggtcgtgccaagatactcaacaacggcgatcttctcactctttcccttgacaaagcctctggctcggggtttcagtccaaaaacgagtatctctttggcaagattgatatgcaactcaagcttgtacccggaaattctgcaggcactgtcaccgcctattatttgtcatcaaaaggattaaattgggatgagattgactttgaattcgtggggaatctgagcggtgacccatacattcctcacaccaatgtgttc

SEQ ID NO: 245601 - DNA, 418 bp, Glycine max
gtcgacccacgcatccaattgccccagacacccctcttaagctcgccgattacttcaaaatctccggtgttgtccgccccggatgcatatctgacagacccactggtggcggcatttaccttgacacttctgtgttacaagctgactacagaacttttgttgagattgtcatccagaacaactagaagatcgttcagagctaccatcttgattgctaatcgttctttgtccttggtatggacgggggacagtcgacacctgcgatcacgagccagtagaatctccgagatgcagttgcacgttgcaccacagaggtataccccttctcatgtactgctatttatagtgcccttgacaatgtgcgaatgtggaacttgaggtcagagttttgggcacgacaataccttgggcaacagtt

SEQ ID NO: 245602 - DNA, 377 bp, Glycine max
  unsure (1)..(377): unsure at all n locations
gacccacgcatccaatcatctttatataacctaattgcaaatatgaataccatgcccgttttcttcttgtgcttcctctgtgcactgcatctcatctctgttgtggcaactgagccatccaaagatgagacacaagaagaaccaatgacacagccagatgcctgaggaagatgtggaagtggggggcatgatggaagctggggacacggtggagactgggggcatggcggacgaggacacggtggaggacatggcggaggatgacacggtggacgacatggcggaggatgcagatgctgcagtcgaaagggctgcanatgttgctgaagtaaaaatcacaaatatatgaactgaacacactcatatacttgagtgta

SEQ ID NO: 245603 - DNA, 443 bp, Glycine max
gggtcgacccacgcgtccgaccacgcgtccgctttgtatcacgaaaactatacgattcgattccttgttttcaatggacaccttcttcaattctcaatcttcttcttcttcgagaagccgctggagttacgatactctcaagaatttccgtgagatctctccgctggttcagaatcacatcaaacgggtttattttacgttatgttgcgctgtggtggctgctgctgttggagcttttcttcatgttctgtggaacattgggggttttctcaccacgttggcttccattggaagcatggtttggttgctatctacaccccctgttgaagagcaaaagaggttgtctctgttgatggcttcggccttgtttcagggcgcttccattggacctctgattgatttggctattgccattgattctagccttaatgttagtgcatttg

SEQ ID NO: 245604 - DNA, 441 bp, Glycine max
cccacgcgatccgaccgacgcgtccgctttggtatcacgagaaactatacgattcgattccttgttttcaatggacaccttcttcaattctcaatcttcttcttcttcgagaagccgctggagttacgatactctcaagaatttccgtgagatctctccgctggttcagaatcacatcaaacgggtttattttacgttatgttgcgctgtggtggctgctgctgttggagcttttcttcatgttctgtggaacattgggggttttctcaccacgttggcttccattggaagcatggtttggttgctatctacagcccctgttgaagagcagaagaggttgtctctgttgatggcttcggccttgtttcagggcgcttccattggacctcggattgatttggctattgccattgatccgagccttattgttagtgcatttgt

SEQ ID NO: 245605 - DNA, 432 bp, Glycine max
gacccacgcgatccgagtatgacagtgatggtgagattattgatccagatcagcttcaaaaaccagaagcaaaatctgattcggaggcctctcaatatgaagatgaaaagccagatgctggtgaaggtccttgggaccaaaagcttagcaagaaggacaggcttttggatagacagttcatgaaaaaccctagtgagatcacgtgggacgcggttaacaagaagtttaaagaggttgtggctgccaggggaagaaagggaactggtaggttcgaacaggttgagcagctcactttcttaacaaaagttgctaagacacctgcacagaagttggaaattctgttcagtgtggtttctgctcagtttgatgttaatccgggcctcaatgggcatgtgcccataaatgtatggaaaaaatgtgtgcagaacatgc

SEQ ID NO: 245606 - DNA, 439 bp, Glycine max
cgggtcgacccacgcgtccgatccactatactgatgaggctcttgtagctgctgcacagctgtcctacaagtatatcagtgatcgatttttgccagacaaagctatcgatttgattgatgaagctggttcacgagtccggcttcaacatgcacagttacctgaagaagcaagagaacttgacaaggaggtgaggcagattattaaggagaaagaagaagctgttcgcaaccaagactttgaaaaggctggagagctacgtgatagagagatggatcttaaggcacagatctcaacacttgtagagaaaggcaaggagatgagcaaggcagagactgaggcacgggatgaaggtcctattgtgactgaagctgacatacagcatattgtctcatcctggactggtattcctgttgagaaagtctcaacagatgaatctga

SEQ ID NO: 245607 - DNA, 460 bp, Glycine max
  unsure (1)..(460): unsure at all n locations
attcncgggtcgacccacgcgaccgaccacgcgtccgatcaggtcaatcttgaatatcttggaagggttgtattcaacaatgagggcctactctatcctgacagtgtggttgggactgattcacataccactatgatagatgggcttggtgttgctggatggggagttggaggtattgaagctgaggcagcaatgcttggtcagcctttgagcatggttttgcccggtgttgttgggttcaagttatctggaaaactacgcaatggtgttacagcaacagacttagttctaactgtgactcaaattctcagaaagcatggtgttgtggggaaatttgttgaattttatggtgatggtatgggtgaattatctttggctgacanggccactattgccaatatgtctcctgaatatggtgccaccatgggcttcctccctgtggatcatgttacactacaag

SEQ ID NO: 245608 - DNA, 377 bp, Glycine max
  unsure (1)..(377): unsure at all n locations
cacgcgtccaatgaattgcaatgagtagcgaaaagtctccttcatcagcttctgcttcagcttcttcttcgagtagctacgagttgagcaaaggcatcaatggcctcgacaaggttattcttcgcgacccacgtggtagctccgctgaggtgtacttgtacggtgctcacgtgacttcatggaagaatgaacaggccgaggaattgctttttctcagtagtaaggctatatttaagcctccaaagccaattcgtggagggatcccaatatgttttcctcaattttcaaacctcggtcctctcgactcgcatggatttgctagaaatcggttctggaccattgatgattctcctcctccttttctgacanatactccg

SEQ ID NO: 245609 - DNA, 453 bp, Glycine max
attcccgggtcgacccacgcatccggcctggcctgtttcaaagcctcactcatccagattgaacaatgatcacgtgcttgaccaagttgacaaggagagcaaagttgagactgctacaagttatcggttgtttggaattgatcttattgatcattctaggaactctccttcagtagagaaggcatctgcacaagcaggaaatgcacccaaagttactactgaaggctgcaccagtaccttgacccgaactgatgctggccatctgtcggatgtaccaatggcttcttccaaggagaggaaacaagaacagcagcaagtatcaccaaaagagactcagagcaagcaaatttgtagaagtcgaaccaaggttcaaatgcaaggtgttgcagtgggtcgtgctgtcgatttgaccatgttggatggatatgatcaacttataaatgaattggagga

SEQ ID NO: 245610 - DNA, 438 bp, Glycine max
  unsure (1)..(438): unsure at all n locations
cgggtcgacccacgcgtccgaccacgcgtccgttctccctccttcttcaatggtcttagggtttccggtgtccatgcgtagcagctcgcactaatgcgcttttgaaacccgtgttcatctgtatccaacgatttactagaaggaggtcgcaatttctccatcttcacatttcgctagcacgtgaaatcaaaagttatcgacactttcgcgcgacacgaaatattgggaaccaagcaaaatatctatggctgacgaaccattatatccaatagcggtgcttatagatgagttgaaaaatgatgacatccagctgcggttaaactcaattcgtaggctatcaacaattgcacgtgctcttggggatgagcgaacccgtcgagaattaattccatttttaagtganaataatgatgatgatgacgaagtacttcttgcaat

SEQ ID NO: 245611 - DNA, 269 bp, Glycine max
tatgggtttaatgcttatttacgcttgtatgctaacttcatacctcttcaatattgtcacttaatttcatttcactggccttctttttaaaacttcgtgattggaaaaaccttggttttacccaacttattccctttgcagcaaatcccctttttgcaacctgggttattaccaaaaaggcccgctccattgtcctttccaaatatttgcccagcttaactggtaaatggaaccctccctgttacggcccattaaccccggtgggtttg

SEQ ID NO: 245612 - DNA, 444 bp, Glycine max
  unsure (1)..(444): unsure at all n locations
ggtacctatctacaattcncgggtcgacccacgcgtccgtttttgtattgtttctatttttatctttattttgttttggactaaaatttggtaaaacttagtttacattgcacactgtattgtgaaaacactcataccgctagatcttaaattttgggattctgctaggtgtggacattgcaaaagtcttgctcctgtaagtatatctttgaggttccttgttatcaatttaaggttgggacctttaattttcataaaaccaatattgtggaacctgactatgctcttttttccctccagacttacgagaaagttgccacagcatttaaattggaggaagatgtagtaattgcaaatctggatgctgataaatatanggatctggctgaaaagtacgacgtgagtggatttcctaccttgaagttcttcccaaagggcaacaaa

SEQ ID NO: 245613 - DNA, 449 bp, Glycine max
gggtcgacccacgcatccggaaatctgaaagggagaatgaattgaaacaacgatttgagcagagcatgaaagaagctgctgataaatatcaaggcgcaaacttgtatgtaaaaaatttagatgatagcattggtgatgaaaaacttaaggagctgttctccccttttggtaccattacctcttgcaaggttatgagagacccaaatggcttaagtcgtggatcgggttttgttgcattctcgactcccgaggaggcatctagagcactcctggagatgaatggcaaaatggtggtaagcaaacctctgtatgtgactctagcccaaaggaaagaagataggagagctagactgcaggctcagtttgctcaaatgcgacctgttggaatgccaccatctgttggtcctcgtgtgccaaatgtatccccaagtggtccaggtattggtcaa

SEQ ID NO: 245614 - DNA, 427 bp, Glycine max
cccacgcatccaaaaagctgaagcggagactgaactgaaacaacgatttgagcacagcatgatcgaagctgctgataaatatcaaggcgcaaacttgtatgtagtaaatttacatgatagcattggtgatgaaaaacttaaggagctgttctccccttttggtaccattacctcttgcaaggttatgagagagccaaatggcttaagtcgtggatcgggttttgttgcattctcgaatccctaggaggcatctagagcactcctggagatgaatggcaaaatggtggtaagcaaacctctgtatgtgacgctaccccatatgaaagatgatacgagagctagactgcaggctcagtttgctcaaatgcgacctgttggtatgccaccatctgttggtccacgtgtgccaatgtatcacccatgtggt

SEQ ID NO: 245615 - DNA, 420 bp, Glycine max
cccacgcaaccaacaatctgaaagggagaatgaattgaaacaacgatttgagcacagcatgatagaagctgctgataaatatcaaggcgcaaacttgtatgtaaaaaatttacatgatagcatgggtgatgaaaagcttaaggagctgttctcgccttttggtaccattacctcttgcaaggttatgatagacccaaatggcttaactcgtggatccggttttgttacattctctactcgctaagatgcatctatatcactcttggagatgaatggcataatggtggtaagcaaacctctgtatgtgactctaccctatatgaaagaagatacgacagctacactgcacgtacagtttgctcaaatgcgacctattggcattccaccatcggtcggtcctcgtgtgccaatgtatctccc

SEQ ID NO: 245616 - DNA, 440 bp, Glycine max
gacccacgcatccagcggtgtcatcactggcgtgtccgttgctgagtgattacggttacagcgtggcgccgccggaagtgcaaccggcgaattggtttctgagagagtggtttgagtcaggtaaggggaaattagaagaaggactgaggctttgcgcgcacattgggtgcggtcgaccggagacgcggccacacgagtttcgccggtgttcggtttgcggcaaagtgaattactgttcacgtggatgtcaggcgctggattggaagttgcggcataagattgagtgttcgccggtggaaatgtacggtgatggtggtgttgatgtggagaatgagtttgtggtcccaaacgatgccgtttgaagaagtgtttcagcgacagaatcaatttctaaggttgaaaaataagaaaatagagaggaaaagaagcgattctataaa

SEQ ID NO: 245617 - DNA, 507 bp, Glycine max
  unsure (1)..(507): unsure at all n locations
tgggttnnntgacaactgtaactcaggcatgtcacggtcaaacaatccgggtccgcccacgcgtccgagtcattaactggccgggtcgtgcctccggtgctgttactttgaaaaattaaaattgcccaaagcaacccaacccccggtaaacataagcatggaataacacaacaggattctgatccaattgtgttggccttcgggatcggagtaatgattaacagggacagtcgggggcattcgtatttcatagtcagaggtgaaattcttggatttatgaaagacgaacaactgcgaaagcatttgccaaggatgttttcattaatcaaaanaaaaaaaaaagggcggccgctctagaggatccaagcttacgtacgcgtgcatgcgacgtcatagctcttctatagtgtcacctaaattcaattcactggccgtcgttttacaacgtcgtgactgggaaaaccctggcgttacccaacttaatcgccttgcagcacaacccccttg

SEQ ID NO: 245618 - DNA, 395 bp, Glycine max
  unsure (1)..(395): unsure at all n locations
attataacacccaccaaagaaccatggctacccagttcctcaaatccctccttctcctctccaccttaaccctaaccatctcagcagaatacacaggctttgtgggcacaatagacccaaagtcaataggcataaagcacaagaaaaccctaagccacttcagattctactggcacgaagtcttcagcggagaaaaccccacatcggttagaatcattcccgcactccccaaatacaacacaaccacaacctttggttcggttgggatcttcgacaacgctttaactgtgggacccgaggtttactccaaggttgtcggaaaagccgagggcttgtttgcctccacgtcgcaaacgcagttggatcntttgctgattttcaacttcgcattgaca

SEQ ID NO: 245619 - DNA, 457 bp, Glycine max
gggtcgacccacgcgtccgacccaataaagggtttgctggggcttctgagagggctggtccgagggataggccggtcgagtttgagaatgaagaggctgatccgtttggtttggatcagttcttgactgaggtgaagaagggtaagaaggccatggagaaagtgggtggtggagggactatgagggcaagtgctggatcatctatgcgggatggtaacgagggaggttcaggtaggactcgcattggatttgaaagagggcattaggtaccacaatatttaatgttgcctgacctatttctagtgcgtaatgttgactgttgaatatccaccgtaatggcttaggttgctatgtctgaaaatgggtggttagaacaatgtgcttgtgttagcattttggtttttctccaaccccctgccctgccgccctgcttaagtggtgaaataaactgtttttg

SEQ ID NO: 245620 - DNA, 385 bp, Glycine max
cgatccagttcactacttccatgatgctagtttcaaccatgtgaagttgttgtgcgtgctgtgtttgttgttgtgtactgtattggaccttcataaccaaccatgaatctcagcatcggcaacggatccacttcgagttctcctccgaaagccggagattctgtcgccgaccagtttccggcgggtccccgggtgctagtggtgaatcatgaacccacctatcttatgatcattgatacgatgcgccgtgcatgtctctactaagtgacgatgtgtcatcgaactcaggttgcatcgtacttctcgatgacagacgatcaccggtttgataacgtttaaagcgatgtgcatatgccacatatggatggatttaagcttttggggc

SEQ ID NO: 245621 - DNA, 363 bp, Glycine max
  unsure (1)..(363): unsure at all n locations
gacccacgcgaccgaagagaattaggcaataagataattaaagatgtctgacgattgcaaaggtaagagctcatggcctgagctagttggagtgcaagggacagttgcggaggctacaattgagagagagaaccctttggtggatgctatcattgtgcccgaaggaaacatggtcatcactgatttccgctgtgatagggtttgggtttggatcgataaagatggaattgtcaaggaagttccccacattggatagaaactgctccccactagctanggatcaaataattgtttccagttttatgttattttattcagaataaagtttcagaaatgtcaaaagattaatgtaataaaccaact

SEQ ID NO: 245622 - DNA, 431 bp, Glycine max
attcccgggtcgacccacgcatccagtggtatcttatacactcctggcattaactcgatcatatgggatgcaagcgctggaatgggcaaaaaagagtgttttgttaattccatcaacagctgttacagatgtagagcgatcaagattcttaaaagcactttctgatgcagcatccggaggggatactaatggacttactgttcctgttgaagagctgtcagatgtttgccgacgtaacagggccgttcaggaaatagttcaggaagctttgagaccgcttgagttgaatatggtgaatgtatcatagaggattggtaaatgccattgatagagagggccattttgtttagggtcctgtctgttagttaggctagttggttgtgtattatctatctgttatattcatttttttttatccattatcattctcc

SEQ ID NO: 245623 - DNA, 426 bp, Glycine max
acgcgtccgatcgacagatgcagatcttcgtcaagaccctcaccggcaagaccatcacccttgaggtggaaagctctgacaccatcgacaacgtcaaggacaagatccaggacaaggaaggaatccccccggaccagcaacgtctcattttcgccggaaagcagcttgaggacggccgtacccttgctgactacaacattcagaatgagagtactcatcacctcgtcctccgtctccgtggtggcatgcagatcttcgttaagacactcaccggcaagaccataaccctataggttgaaagctccgacaccatcgataacgtcaaggccaagattcaggacaatgagggtatccccccggaccagcaacgtctcatcttcgccggaaagcagctcgatgactgccgcatcctcgccgactacaaca

SEQ ID NO: 245624 - DNA, 325 bp, Glycine max
cggtcgaccacgcgtccaactcagtcacagccctcatcttcatatcagacatctcaacctcaaggttcatagaaggagaatgatccaaatactacaactacttttgtgggtaatttggatcctaaggtcgctgatgatcatctgacgcaagttttcatccagtatggagaattattgcatgtgaagattccagcatgcaaacgatgtgcgtatggccaattcgcatacaggagctgtgcgtaacaggcatttcaggtgtataatgggacactgttgagtgagtaaaatgttcgtctttcatgtggccgcattcattcaaacaaac

SEQ ID NO: 245625 - DNA, 387 bp, Glycine max
ccgggtcgagccacgcgtccgaccaagcgtccgcccacgcgtccggtgagggtgcatgagtggtaatcgggatgtttttgttgcacggctccatgcttgcgcatgcaacgtgtgacatgcatccttttcattgtcaccttagccttcgtggcttaggtgctgacgattggttcctgtgttgcctacctaccaaacggtattcgtgtggctagtcagacccattccatccaggcctctttgttggggacgctggaggatttcaaagtcccacacgtgaaccacgttagtcgtccatcataacggcttcctgtggcacacgtgtggtgattgttctctcggatgcggtgcatgcagtgaacgtgggtggtctagtgccccacattgttc

SEQ ID NO: 245626 - DNA, 417 bp, Glycine max
gtccgcccacgcgtccggtgagggtgcatgagtggtaatcgggatgtttttgttgcacagctccatgcttgcgcatgcaacgtgtgacatgcatccttttcattgtcagcttagccttcgtggcttatgtgctgacgattggttcctgtgttgcctacctaccaaacggtactcgtgtggctagtcacagtcattccagctaggcctctttgttggggacgctggaagatttcagagtcatacacgtgaaccacgttagtcgtccatcataacggcttcctgtggcacacgtgtggtgattgttctctcggatgcggtgcatgcagtgaacgtgggtggtctagtgcccccacattgttccttaagatcggttgtctcggatgaaccttgccctggcgcttgctttttcaacgcgat

SEQ ID NO: 245627 - DNA, 400 bp, Glycine max
gacccacgcatccagtggaagaggtggaagtggggggcatgatggaagctggggacacggtggatactgggggcatggcaaatcaaacttcatggcatttgagtttccttattgacaatcccaaacagtctacagtttttgatattctcttgggaatttctcaagattttgaaattgctggtaatactcttatgccagctttttctgttccacaggctactgccagatcttctgaaaatgcggaatcctctgcatgatctggaatttgtgttatctttcgcttgttcgtttgtgtaattcaataaatgaaattaggcatgaccctcttgttgagtatgctctgcctatttgaaaatttccacacctcttttaactgtcgtaatgatgtgtgaactgtgtg

SEQ ID NO: 245628 - DNA, 449 bp, Glycine max
cggtcgacccacgcatccgccgccctttacaatatcttatctgaaacactcttctcatatctctctcactcaaacctactttctcctttctttctcttctggaaacaattactaaaggatgagtaaacaagacgtcttgaaagttcagagctgtgttctcaaggttaatatccactgcgatggttgtgagcaaaaagtcaagaaactgctgcagaaaatcgatggggtttattctgtgagaatagatgcagatgaagggaaagtggtagtggcaggagatgtggatccagcgaaactggtaaaaaagctaaagacgggatggaagcatgctgagatatggcagaaccagaaaggagaaatgatgtacaatcacaagtatcccatcaaccagaacatgatgcaacttgggggaatggacaataattagtctcaaaatcaaaatggtcaga

SEQ ID NO: 245629 - DNA, 452 bp, Glycine max
  unsure (1)..(452): unsure at all n locations
attcncgggtcgacccacgcatccaatgatgcagcaccagcccgagctcatgttcgagacactcaagcaccgcgcgcaggagtatgtcagccacgacaacgcagcagcgcttctggctgctggccttgctcgcacctttgacagaatgccttatctgctgtctctgtcttcctttgtggctgacgatgttgccgctgctgttcctgctgctcaagatctgggggagcagtggtcttattaatggatgtgcttcaattcaaatagtctcgcactagtcatcattccctttgtttctgttgcttgcttggttgttcttcttcttcttgttgatcgtcgtggtcgttgaggtcttcaattttttttttattattattccgttttcgctgtttttagttttgtcctggatgcaatgcaggataaagacagggtcagtcagttattgttctctgcat

SEQ ID NO: 245630 - DNA, 452 bp, Glycine max
atgcccggtcgacccacgcatccgaaagaaagagaagaaaagagtggaatcgaagacgaagacgaagatggaggacgcatcagcatcaaagttcatcccacaccaaatcggaggggtccaaaacgacgtgcttcgatttggtctccatggagtcaagagcgacatcgttggttcccaccctcttcaatcttcactccaatctacaaggagaatggatgaagcgatgaagaagcaatgcaaagttaacctgtacggaactgcttttcccctgaaggaggagcttgacaggcaaatcctgtctaggttccagcggcctcctggaccaattccatcttcaatgctgggtttggagactgttacaggaagtgttgatcactttggttttgaggattgtctaaatgacccccgtgagtcagagactttccggccattggacatgcatcatgggatgg

SEQ ID NO: 245631 - DNA, 423 bp, Glycine max
acgcgtccgaccacacgtccgctccgacacggtggacttccaccacttcctggcgcagcgccgcgccaacgatctccgtctcttctccttctccgacctgaaatccgccacgcgcgccttcagccgcgccctcctcgtcggcgagggaggcttcggctccgtctaccgcggcttcctcgaccaaaacgacgtcgcgatcaagcagctgaaccgcaacggccaccaagggcacaaggagtggatcaacgaggtgaacctgttaggtgtcatgaagcaccctaatttggtgaagttggttgggtactgtgccgaagacgatgagagagggattcagaggcttttggtttacgagtttatgccgaataagagcttggaggatcatctccttgcaagagtgccatcgacgataatcccttggggaac

SEQ ID NO: 245632 - DNA, 359 bp, Glycine max
gggtcgagccacgcgtccgattaattagggtttttgtgactgtgctccacaaccgagtcgccatggcgtcgcaggagagtatcgaaaagatgcaggcacggcagaattaccggaatttatggcacaccgatctcatgagatccattcaggccgatactccttattgttgcctcgcgttgtggtgtgcaccatgtgtgtcttaccttcttcgcaaacgagctctctatgatgatatgtcaaggtacacatgttgtgctggctacatgccttgcagtggtaggtgtggagaaagtaaatgtcctgaattttgcctttgcactgaggttttcctctgctttggaaattcagtcgcctcaact

SEQ ID NO: 245633 - DNA, 378 bp, Glycine max
tcaaatccagcagatggtgcggttcatccgccaggaagctgaggaaaaggccaacgagatctctgtctccgccgaagaggaattcaatatcgagaagctgcagttggtcgatgccgacaagaagaagatgaggcatgaatacgaacgcaaagagcgctaagtcgatattcgcaagaagattgggtactcgatgcagctgaatgcttctcggatcaaagttcttgaagctcaagatgacttgatcagtgccatgaaataagctgcatccaaggaactgttgaatgtgagtcagcatcatcatttgaagtctactgagtcatcatcatcatgagtacagaaaccttctgacagatcccattagtcagtgtttgcttagac

SEQ ID NO: 245634 - DNA, 492 bp, Glycine max
  unsure (1)..(492): unsure at all n locations
catcgtcaaggctgtcangtaccggtctaaaattcccgggtcgacccacgcgtccgaccacgcgtccggttgattgttgattggagatgtgaggtggcccgtaataccccatatgaagttaatatcacaatccctgttgagggttatgagccaattgaatttgtgcttacaaaaacatgtgactataaacaggatccagggggaggtcgcacaagaggatgggcaatatttggagtgctatcttgcatattttttgtctcttcaacactcttttgttgtggagggttcatttacaagacaaaagtggaacgccagcgtggaattgatgcattgcctggcatgacaattctttctgcgtgcttagagacagttagtggagctgggcaaggctactcacggccagaagacatcaatagtgcatttggcagtgaaacctcttgggaacgtcctcctggtccttctcaaggtgcangtgctgcatggagaacaacg

SEQ ID NO: 245635 - DNA, 434 bp, Glycine max
gacccacgcatccaaacaaacatacattacactataatgtctttgctcatgttcgtagtaacgaaggccaaccttaaggttgcacgtctggtcgccgtgatgtccatgattgcggtggctatcaatgccacacccatggcaaaggtcacattcaggtgccgtcaagtcgacgtgcacatgatctcctgtgcgtcagtgtccatacgaactgaggtaaaccgtctcaggactgctgcacaggtctgaaatcacacatcatcggcacgatgaccattgctgactgccagggagcatacaattccctgaaaatcgctgataacataacgtgacagagtttgaatgccggcatcgtcaacactcactctgtcatatgtgacgtcaagatcccataccagatcagcaacaccaactaatgcgctatcatcaagttctga

SEQ ID NO: 245636 - DNA, 446 bp, Glycine max
attcccgggtcgacccacgcgtccgaaggaatgcaaggaaagtgtagtgatggagagagagagcgaaaaggcgaaaccgcacttgatcttcgcgtacggcacgttgaagcgaggctttccgaaccactatctgatggaggagttgaggagcaaagacgacgccgttttgcttggcagctacgtgacgaacgagccttatccgctggtgtgtgggccccacgggatcccatacctgatcaaactacccgggtcggggcatcgcgtgaagggcgaggtctatgccgtgtcggaggaggcggtggttgtgctggacgagttcgaaggcgtgagcgcggggtattacgagcggttagcggtgacggcggcggaggaagaaggaagggggaaaggtggaggcggaggcgtattggggacacaggagattcggtgaagtgttgtggaagatg

SEQ ID NO: 245637 - DNA, 315 bp, Glycine max
gacccaagcgtcagtcaaaataaaagatggtgaaaccctaactctagagattatctacagcaacaaccaaagccacagtggagtaatggggcttttctacatcttggtggctgaacaactgccacaccaacacctcctttgacattattatgtgtcctaagtaaattcatcttggaatggatccaagagactattatattatatgatatctatatgagcaaatgaatatgttgtgatgaaaaataaagccagcactgagagtcttgtaataataggaaagcattaatttattatactatagtcacatatctttag

SEQ ID NO: 245638 - DNA, 445 bp, Glycine max
  unsure (1)..(445): unsure at all n locations
gacccaagcgtcagcccacgcgtccggaataccacgatcaccaccgcaaagcaatgggcgctatactttctgccttaactggcggtgccgcaacggcggcgacgtcttcgccggagagttctgcttctagggtccagtctttccactcttcggcgcgctggcagctccacttcaacgagctcaaagaaaccaataagctcgttgtgatagatttctcggcgtcgtggtgcggcccttgcaaattcatagagccagcgattcacgccatgtccgaaaagttcaccgacgttgacttcgtcaagatcgacgtcgacgaattgccggatgtggcgaaggagtttaatgtggaggcgatgccgacgttcgtgttgtgtaagaaagggaaggaagtcgacaaggttgtgggcgcaaagaaggacgagctcganaagaagattgagaaaca

SEQ ID NO: 245639 - DNA, 456 bp, Glycine max
aattcccgggccgacccacgcgtcaggatttggcataatacattgatttgtttcttaaaaacaacactgcaatgtctgccatatttctgcttgttggaatgctatcgtccattacagttgcacaatccataggagtttgctatggagtgattggtgataatctaacaacaaggcaagaagttgtggacttaatataaacaaatggcattggtaaaaatgcgtatatactaccaagatgaagaagcactccaagcccttagaggttcaggcattgagttgattatggacgtggctaaggaaacccttcaatcattgacagactccaatgctgctacagattgggtcaataaatatgttacaccttactcgcaagacgtcaatttcaagtacatcgctgttggaaatgaaattcatcccaataccaatgaggcacaatatattctatctgccatgacc

SEQ ID NO: 245640 - DNA, 405 bp, Glycine max
cacgcgtcagaaaaagttgatgtagcatgccataaaagcaagagctcttgttccttgtcatccagaaagaaatactgtagatctgggttaacaatggctcctggaagcaatgttttcaaagaagttcttgaatctcacctgatgtcctcagattatgaaatgggaaaagctaaatctgaaggcaagagttacaatacatctacaaaatccaacaatgggtttaattgaaagaatggaaataattccaacaatgggcttttagaaataatttgaatgccccttttgcagaaatttgagttacccccaaattcacagttgccaaaatggcaatacattaggttcccaattgtaaagttgaagtccataatatctgcccgtcctgccatcatgatcttgggaaatata

SEQ ID NO: 245641 - DNA, 440 bp, Glycine max
  unsure (1)..(440): unsure at all n locations
acgcgtcaagaccaagccccactcaaccaacaaaacactctctccgctcctcctccaactttcaagtttttaaagtaataagatggcagagacattcctaattaacctcagagtcagtgaacgagggacaccctgacaagctctgcgaccaaatctccgatgctgtcctcgacgcttgccttgaacaggacccagacagcaaggttgcctgcgaaacatgcaccaagaccaacttggtcatggtcttcggagagatcaccancaaggccaacgttgactacgagaagatcgtgcgtgacacctgcaggaacatcggcttcgtctcaaacgatgtgggacttgatgctgacaactgcaaggtccttgtaaacattgagcagcagagccctgatattgcccaaggtgtgcacgggccacttaccanaagacccgaggaaatc

SEQ ID NO: 245642 - DNA, 318 bp, Glycine max
cacgcgtcaactcaatcgtacgctccttctcaatcaaattatacatacaattcatcatacattccacactaaaggtttcatcaagggtgttgtaacattcaacgatccaagtagctctgctatgggttatgctaccctttttaaaggtccagttaacgttagcgaaaacgttgtttcaaacggtatggatgccttcaagatttttggaaatgtttacggaagtagtagccccaggatcattttccatatcgattgtcatgacgaatttgaaatccaatttgttgtagcccattgttgaagctaatgttgaagctaact

SEQ ID NO: 245643 - DNA, 436 bp, Glycine max
acgcgtcaacccaagcgtccgctcacgcgtccgggcaattgggaacaaagacacagttagtcgtgctcttcgagcagcttataatagcgcagagcgtgctaaagattacgtgtactctggaatcctgaagcagcagaagttgctgtgccaggttcccgaacagctgggatttcttctggagcagttcctgtaggacctcaatgatctcccttaaatatgtttccacaggagacgaattctaacactggtgctggacttggatagctagacttccttagagataagccccagtttcaagcattgcgttcaatggtgcaatccaatccacaaattctacagcctgtgcattaggaacttggtatgcagaatcctggtcttttaagaccgagtcaggaacatcatggggagtttctgcagttgatccatgaacctgttg

SEQ ID NO: 245644 - DNA, 293 bp, Glycine max
gacgtacgcgtcaggtgaggccagaggagcaggtatcaaaaccaggggagtttagtcaccaagagaatgagtcaaagggcagcatatatagtgagaattatcttgagagggatgaggtcaaaatggtgatggctaaacttggattttttttcagctcagaaagtgaggaacttcaggagaagtatggttccaaggagctttctgaactgtttgaggagcaggagccaagtttggaggaggtgaagcaggcttttgatgtttctgatgagaaccgcgatggctttattgattct

SEQ ID NO: 245645 - DNA, 454 bp, Glycine max
ccggctcgacccaagcgtcagaaattctcaaaggcaccaatttcattgctcagagttcccaaattctccccaagagataaaatgtctctaatcccaaacttcttcggtggccggagaaacaatgtgttcgatcctttctcactggacgtgtgggatcccttcaaggattttcctttcccaaatacgctttcttcagcttccttccctgaattttctcgggaaaattcagcatttgtgagcacccgtgtggactggaaggagaccccagaggcgcacgtgttcaaggcagatattccaggactgaagaaggaggaagtgaaggtgcagattgaagacgataaggttcttcagataagcggagagaggaacgttgagaaggaagataagaacgacacgtggcatcgagtggagcgtagcagtggcaagttcatgagaaggttcagattgccggaga

SEQ ID NO: 245646 - DNA, 460 bp, Glycine max
ggtcaggaattcccgggtcgacccacgcgtcaggaagacattccgcgtttgcgggaggaggatcgagcagaaagttgctatctgctgtttttggatcaattgaacagacagaaacagaaggatcaatcctcgcagccatcagttttgaggacaataattttatgccattggaaagaaattttaatatcaggattctttgcattgcttaaggtagttgctctgtcttcaggacctcttcttttgaattcttttatattggttgctgagggtaacgagagtttcaaatatgagggttttgtgttggccatatcacttttctttacaaaaaacatagaatccttatcacaaaggcaatggtacttccgctgcagactcattggtgtgaaagttaggtcgttgctaactgcagccatttatagaaaacaattgaggttatccaattctgctagattgatgcact

SEQ ID NO: 245647 - DNA, 432 bp, Glycine max
  unsure (1)..(432): unsure at all n locations
acgcgtcaaggtgaagccagtattggattctaagggtccctttccattctctcagacagtggaagcatttgcatacttgaagactaatagaaccattgggaaagtagttctacatcccatcccataaacatatttaattaagcatataaggagagagcacagccttttaattatgtaatatgaatattgttagtcaagaatgtttagatttagaaacagattgtccttataaggttgtattggtaaattttgtcatatctagttcaaatgaaggtggtgttatcgttcanaanaaaanaannnaaaaaaaaaaaaaaaaaatgacaaaaacataaaaagaatcaaaaaaaaaataaaaataaataccaactcaaaatcttacctaaacaatctccaaaaaaaaaagggggggcccttcaaaagattccaacc

SEQ ID NO: 245648 - DNA, 403 bp, Glycine max
acgcgtcagctctcataacgctttctcgtttgaaatccctcaagggatcaactaactgaaggagcaatggggttgacatttaccaagctttttagccggcttttcgccaagaaggaaatgcgaattctaatggttggtcttgatgccgctggtaagaccaccatcctgtacaagctcaaacttggagagatcgttaccacaattcccaccattgggttcaacgtggagactgtggaatacaagaacattagtttcactgtctgggatgttggtggccaggacaagattcgtcccttgtggaggcactacttccaaaatacacagggtctcatttttgttgttgacagcaatgacagggacagagttgttgaggccagagatgagttgcacaggatgttgaatg

SEQ ID NO: 245649 - DNA, 438 bp, Glycine max
  unsure (1)..(438): unsure at all n locations
acgcgtccacccaagcgtccggatagatatatagaagagccttccatatatagcctcccaaaaaaatgaagagtactacctctttggctctctttctactttgtgccctaacttcatcatatcagccttcagccaccgctgatattgtattcgacaccgaaggcaatcctattcgaaacggcggcacatactatgtgttgccagttataagaggaaagggcggcggaatanaaatttgccaaaaccgaaacagaaacatgccctctcactgttgtgcaatctccctttgaggtctcaaagggtctaccactgataatttcatccccatttaaaatccttgacatcaccgaaggacttattttgagcctcagtttcacttatgtacccccctgtgcctcaactccttctcggtggaccgttattctcaagggtctgcca

SEQ ID NO: 245650 - DNA, 448 bp, Glycine max
  unsure (1)..(448): unsure at all n locations
cccacgcgtcaggcagaccctcagaaaattcaccctgtgcaccatgatgttgaggcacaaaaccacccttcagcaccattggtgccaaggagcatgtccaaatctgatgcaggtgatccacaacgagtagtaatacaacaacaacaacaaaacattcctctgaagcaaaccaagccaccaccgaaagaaaagaagaagctgctgctgcaggttcttctgttggctaataagcatattgctgattctgatagtggcaattggcatcactgttggaatactctaccttgtcttcaggccaaagcttccaaagtactcggtggacgaacttagagtcacacactttgatcttgcagacaacaacagcttatcagtgacattcaacttgacaataaccgccagaaaccccaacaaaaaaattggaatagactatangggtggcagccacata

SEQ ID NO: 245651 - DNA, 453 bp, Glycine max
aattcccggctcgacccacgcgtcaggtggacctttcccttttctcttttgaaacagagaatggctggtggaggagtagagattggaggaccaggaaaaagggctcatctttacgagcacaagttcagttggtatttcgtctatacatgcttcgttggggcccttggcggttctctctttggctatgatctcggtgtttcaggtggggtgacttcaatggatgatttcctgaaggaattcttcccaaaggtttacagaaggaagcagatgcatctgcatgaaacagactattgtaaatatgacgaccaagtgctgacactgtttacatcatctctttatttctcagcacttgtcatgacattctttgcttccttcttgacaagaaagaagggaagaaaggccagtatcattgtgggagcccttagcttcctggctggggctatcctcaatgcc

SEQ ID NO: 245652 - DNA, 423 bp, Glycine max
  unsure (1)..(423): unsure at all n locations
gacgcacgcgtcaggtcgtcaacaccgttgatctcaagaaaggagaggtcaccaaagggtcatatgaaggaggaaagcctgatgcatctttttcgtttaaggatgaggactttgttaaggttgccttanggaagatgaatccgcagattgctttcatgaggggtgcgatgaagattaagggaagtttgagtgctgctcagaaatttactccggatatcttcccaaagccttctaagctgtgagctgagatttctgcaactacctgcacaaggttgctagaattatcgtttggctgcagtcaaacaaaatagatagcaatcatagtagcatcaaaagctgaggattataattatatctttagttaatgcatggatcatcattcctaaggttgttggtggttcatgattttaatatatctctgaa

SEQ ID NO: 245653 - DNA, 381 bp, Glycine max
  unsure (1)..(381): unsure at all n locations
atacaattaatttcactgaatcttattgaagatgtttctcacaagaactgagtatgaccgacgagtcaacaccttttctcctgaaggccgtttatttcaggttgaatatgcaatcgaagccatcaagctgggatcaactgcgattggattgaagacgaaagatggtgttgtccttgcagttgaaaagcgcatcacttcaccactgctggagccaagtattgttgacaaaattatggaaattgatgagcacatacgatgtgcaatgagtggattgattgctgatgctcgaacacttgtatagcatgcacgggttgaaactcacaatcatangttctcctatggtgaaccaatgactgttgagtctacaacccaagctctttg

SEQ ID NO: 245654 - DNA, 445 bp, Glycine max
acgcgtccgcccaagcgtccgcccacgcgtccgggatgctccagagatcttgacagtgattggcaaaatcccttatctttcagagtttttgaactccttatatgattgtcaatacaagtcttttttctcagcatttgctggcctgacggagcaaattaagttggaccgctatctgcatccacacttccgatattacatgagggaggtcagaaccgttgtttattcccaatttttggaatcttacaagagtgtgacaattgaagccatggcaaaagcctttggagtgacagaggatttcattgatgtggagctatcacgctttattgcagcagggaagcttcattgtaagattgataaagttgaaggtgttcttgaaactaatcgccctgatgctaagaatgctctttaccaagcaactattaagcaaggggacttcctattgaat

SEQ ID NO: 245655 - DNA, 421 bp, Glycine max
  unsure (1)..(421): unsure at all n locations
acgcgtccgcccaagcgtccggtaactttttgattcctaaattctccaaaattccaaattccaaattccttaagggaaaaaaaatgtttggtttttaattaatttggccggaaaaagccagggttcctgccaaccgaatcgatttgggaaacgacgtactcttgcgtcggcgtgtggcaacacgatcgtgttgaaatcatagccaacgatcagggtaacagaactaccccatcctacgtggctttcaccgacacagaacggttgatcggcgatgcngccaagaccaggtcgctatgaacccaccaacaccgtttttgatgctaaacgtttgattggaaggcctttttccgatgcatcagttacaggtgacatgaaattgtggccgttcaaggtgattcctggcccctgctgagaaacctat

SEQ ID NO: 245656 - DNA, 445 bp, Glycine max
  unsure (1)..(445): unsure at all n locations
cacgcgtcaggcttaccctttcaatctcatcagatcctttcgtggttgcgcgaaaccctaattttgaatccgcaaacatgtctgcagctatggaaatgtcgctcgacgacataatcaagaacaacaaaaaatctggattcggaagttcccgtggccggattcgaccctccggttccggaccttctcgccggttccccaaccgtgccgccaancgcgccgctccttatgccaccgctaaggcgccggangcgacgttgcaacaagaattaaaaggcaaatcagcaagtggctgcggcggggtaccctgctcaaggtggtcgtgcggcttccatagaaactgggactaagctttacatttcaaacttggattatggtgtttccagtgacgatattaaggaattgtttgctgaagttggtgacctgaaacggcatgcggttcattatg

SEQ ID NO: 245657 - DNA, 447 bp, Glycine max
gacccaaacgtcagcgaggctgctaggattagggagaaatacccagaccgtatcccggtgattgtggagaaggcagaaagaagtgatatcccaagtattgacaagaagaagtaccttgtccctgctgatctgacagttggacagttcgtctatgttatccgcaaaaggattaaattaagcgcagaaaaggcaatctttatctttgtggacaacgtccttccaccgacaggagcaattatgtctgccatatatgatgagaagaaggatgaggatgggtttctttatgttacttacagtggagagaacacctttggggatctgacttcccactagcattattttaaagattggcactataatctgattgcattctcattggctagtctcataaatttgtatcaatactcgatatcaaagtacattgctctcaatataatgtacagtttg

SEQ ID NO: 245658 - DNA, 444 bp, Glycine max
gacccacgcgtcagcccacgcgtccggaaaggggtgaatccagtggatcaaaagataaatcagatcaaaagacattaagacggcttgctcaaaatcgtgaggctgccaggaaaagccgactgaggaaaaaggcatatgtgcaacaattagagagcagtaggttgaaactgacccaacttgagcaggagctccagcgagcacgccagcagggaatatttatttcaagtactggagatcaggcacagtcaatgagtggaaatggcgctatggcatttgatgtagagtacgcacgatggttagaagagcataatagacaaaccaatgagctaagggctgcaataaattctcatgctggagatattgaacttcgaaccattgttgacaatttcatgacacaatttgatgatatcttcaggctgaaaggtattgcagcaaaagctgatg

SEQ ID NO: 245659 - DNA, 391 bp, Glycine max
cccacgcgtccgcccacgcgtccggtgactgggggtgactctgggattggacgagcggtgtgtaacttgtttgccttagaaggtgctaccgtgggcttcacatatgtgaaggggcatgaggacaaggacgcgagggacacgttggaaatgatcaagagggctaagacttcggatgctaaagatccaatggcggtaccagctgatttgggttacgacgagaattgcaagagagtggttgatgaggtcgtgaatgcttatggttgtattgacattctggtcaacaatgcagctgagcaatacgagtgtggaacagtggaggacattgatgagcctaggcttgagagggtctttcgtacaaatatcttctcctatttcttcatgaccaggcatg

SEQ ID NO: 245660 - DNA, 410 bp, Glycine max
gacgacgcgtcagagcagacgcaccacatgtccacgtttgattcgcagagtgagaagcacatgcggtataccgataccaggattgatgaacaggagaggaggatttcgatcaaggcggttcccatgtcgctcgtgctggaggatagcaattccaagtcctatttgtgtaacatcatggacacgcctggccatgttaacttctccgacgagatgaccgcggcgttgcggctcgctgatggcgctgtcttgattgtagatgctgctgaaggagtcatggtaaacacagagagagcgatacgtcacgcaattcaggagcggttgccgattgttgttgtaattaataaggttgacaggcttataactgagcttaagttgccaccgaaggatgcttatcataaactaaggcatac

SEQ ID NO: 245661 - DNA, 384 bp, Glycine max
acgcgtcagcccaagcgtccggagaaattgacaggtgtactgaacgattctaaagcttcacttgaggtgcttgcatttgctgctatttctttgggcttgatctatgtgggttcttgcaatgaagaaattgctcaagcaattatatatacactaatggaccggagcgagtcagagttgggagagccccttacacgacttttacctctcggtctgggtcttctatatcttggaaagcaagacagtgttgaggcaactgccgaagtttcaaagactttcaatgaaaaaattagaaagtactgtgacatgacactcttatcatgtgcctatgctggaactggaaatgttctcaaggttcaaaatctgttgggtcattgttcacaacat

SEQ ID NO: 245662 - DNA, 394 bp, Glycine max
acgcgtcagcagtatacaagcccccagttgagaaacccccagtttataagcccccagttgagaaaccaccagtgtacaagcccccagttgaaaaaccaccagtgtacaagcccccagttgaaaaacccccagtgtacaagcccccagttgaaaaaccaccagtgtacaagcccccagttgagaagcccccagtttacaagcccccagttgagaagccaccagtttacaagcccccagttgagaagccaccagtatacaagcccccagttgagaagcctccagtgtacaagccaccagtagagaagctccaggttacaagccaccagtagagaaacctccagtttacaagcccccagtggagaaaactcctatttacaagccacctgttgagaag

SEQ ID NO: 245663 - DNA, 73 bp, Glycine max
cccaaaagattcaagcttaattaacccttcaagcaaagttaaaacccttcaaaaatgtcaccaaaattcaatt

SEQ ID NO: 245664 - DNA, 301 bp, Glycine max
acgcgtcaaattcacctcactcaaactcgggattacagaaaccaacaacagttcctgccacgaaggttcacggaagttgccggaaactgcacttgggttgtttgggttaaccttggttctgcaacttccttctcacaccaagtgcaaaatcaaaagcaattcgccacctcccaacacctccaagcccaaagccccgtcgtcccttcattggccaacttcacctcttaaaagataaacttctccactaagcaatcatcgatccccccaaagagcatggccccctacttcccgcccctccttc

SEQ ID NO: 245665 - DNA, 300 bp, Glycine max
gacccaagcgtcaggaggcacaatatattctatctgccatgaccaacattcagaatgcaatttcatcagcaaatttacaaattaaggtgtcaacagctatagactctactttgattactaactcttaccctcccaatgatggcgttttcactagcgatgcggagccatacataaaacccataatcaacttcctagtgagcaatggggccccacttcttgccaacgtgtacccttactttgcttatgcaaatgatcaaagcattcctcttgcctatgctctttttaccaaccagggaacca

SEQ ID NO: 245666 - DNA, 453 bp, Glycine max
aattcccgggtcgacccaagcgtcagcccacgcgtccgcaacaacaactatggcaagttatcaaaagcactacgatgatcagggtcgcaaggttgacgagtatggcaacgttgagaagcaaaccgacgaatacggcaaccctgttcatgctgctagtgtcacctatgtagccaccagaactgctgctggtggttacagtgatgacattaataagcaacatgataccaccaatgcctacggcgtagacactggtagacagcattctagtggtggctacgatggtgacactaataaacatcatggaactactggtggctataatgatgacaccaatagacatcatggaactaccggtgtctatggtatagacaccgataggcaacaacatgggactactggtggctatgccggtgacactggtaggcaacatgggaacatcggtggcccttacta

SEQ ID NO: 245667 - DNA, 415 bp, Glycine max
gcgtcagcccacacgtccggcacgctgctgccaaggttttcagccatcctgatgttgttgctgaagtgccatggtacggtattgaacaagaatacaccttgttgcagaaagatatccaatggcctcttgggtggcctgttggtggtttccctggacctcagggtccatactactgtggtgttggcgctgacaaggcttttggccgtgacattgttgacgcacactacaaagcctgtatttatgctggcatcaacatcagtggaattaatggagaagtgatgcccggtcagtgggaattccaagttggaccttcagttggaatctcagctggtgatgagatttgggcagctcgttacatcttggagaggatcactgagattgctggtgtggtggtttcctttgaccccaagccaat

SEQ ID NO: 245668 - DNA, 399 bp, Glycine max
  unsure (1)..(399): unsure at all n locations
acgcgtcagcccacgcgtccgcccacgcgtccgcccacgcgtccgcactttccttgcagattcttttccaaggaaaaatttgggagttttgggggaaaaattaaaagtttaattaaaaaacggaaaggttaagttgaaccggaataaaaggataatcttgttgcttcaactctgtcagtcaagtggtccgagggcgttcttcatgttactccgggcaaaggcaagagcagtcagtcctcagtcaagtatggccatagcctagttaaagggaaagcaaaccatccgatggangactaccacgtagcaaaatttgtgcagttcaaagggcgagagcttgggctttttgctatatatgatggacacctgngtgacagtgtaccagcctatttacaaaagcat

SEQ ID NO: 245669 - DNA, 431 bp, Glycine max
  unsure (1)..(431): unsure at all n locations
cgggccgacccacgcgtcagctattattcatccacactccctcccttccagatccgatcctcgatggcggcggcgtcgcggaggctccgggacctgcagtccgaggccgggaacaagatttgccttgactgctcccagaagaaaccgcagttggcctccgtctcctacggcgtcctcatgtgcctcgaatgccccggcaagcaacgtgggctcggcgtccaaaatccccttcgtccgatcggtcaacaatggactcctggtccgacatccagatcaaganaatggaagccggcggcaacgacaagctcaacgcattcctcgcacagtactccatccccanaganaccgacatcgttacgaagtacaacaccaaagccgcttctgtttaacgcgaccggattcaggccatcgccgagggccgcccctggcgc

SEQ ID NO: 245670 - DNA, 412 bp, Glycine max
cgcgtcaacccaaacgtccgattttcagacgaacaatggcaggtaagggttcgacgtgcttcctcctcgagtttgctcattctcgccatcctccgtttcaaattgccgctgaggaatcatccgaaaaagaattcgtgctcacaatggattactccaactttcacgaaaatgttcagaagccacgatttcatcgccctcgagttctaagccccaaggggttgccactggtataaaccttccacccgagtatgacaaaaccggctccaacctgaattatcaagattcccccggttgttttgccaaaatttgaggcaaataagggaatgatcaatgacgtgcatctcaatatgatgttaggggatacccaacaattaagattctgagaaatgggggacagaatgttcaggaatac

SEQ ID NO: 245671 - DNA, 383 bp, Glycine max
aattcccggctcgacccacgcgtcaggcagattaccaacatcttggaggagaatgtggtgcagcccctgcttgtgagcaccagtgcgatcaccttggcgacagagtgtgtgcggatgattttgaagattgatgatattgtaactgtgaggtagagttgattgaacaatgacgaatttggagagaaactgaatcatccattatcttctttttttttttttgtctttcgtgctttaattttatgttggtagtttatatgttctttctagctactttggttaagttcttttgactttggctactgctgttgtttgcaattttgaatgtcctcaaggaatgggatgtttgcaagtcaacagaatccaaagtgttgggaatttaacaa

SEQ ID NO: 245672 - DNA, 469 bp, Glycine max
ggtataggtcaggaattcccgggccgacccacgcgtcagatttggaggaaggaaggtaaaggaagcaaacgcaagagcaagagcaagagcgaaagcggcagagaagatggaaggagaagagggttctcagcagccacagttggtgctcgcggacaagctattccttctccggcaacccgatgtgcaagacattgacaaggttcgctacaaagaggatgtcttcactcatgtcaaggaaaacgatatggtccctctgtacgaaaccctagtcgctgattccgtgttggacttggatcgtgcccttttggactctatgcgcgctaaaattgacgacgagctcaccaagctcgacgaaaagattgctgatgccgaggaaaacttaggagagagtgaagttcgtgaggctcatttggcaaaatccttgtttttcatccggattatggacaaggagaaagccttggaacatctg

SEQ ID NO: 245673 - DNA, 429 bp, Glycine max
ccgggtcgacccaagcgtcagcaggactcggtatcgctcgccaacgtcaagccattgtggatggactgagggacagtgtgcttgctttctctgagaacgtgcctgggacaacagctaaagatgtcatggacatggtgctggtgactcaatactttgacaccatgaaagagattggagcatcttcaaagtcctcatctgttttcataccacatggtcctggcgcagttaaggacattgccatgcagattcgggatggtctgcttcaggccaccacttcacagaattaagctttcctggagttgtaaataacaaatagtagcgtgccagattttttttcagtaaatgcttttcttgtttgaacttaaaatgtctgcatctttactcttatattggatagattcatggcagtgtctatttttatgcgtgtaa

SEQ ID NO: 245674 - DNA, 421 bp, Glycine max
gggtcgagcacgcgtcagtccacagccaccgcagcgtggacggaatcagagtgcagccatagcagcagcagcagcagcagcagcagcagtcattgaagtgctgctctagtttgaggcacaatgagattggagaaatgctggttttgctcttcaaccgtataccctggacatggaatccagtttgttcgtaatgatgcaaagatttttcggttttgtagatcaaaatgccacaagaactttaaaatgaagagaaatcctcgtaaggtaaagtggaccaaggcatatcgtcgagtgcatggaaaggatatgactcaggactcaacctttgagtttgagagaaaacgaaacaggcctgaaagatatgacaggaatcttgcggagaatgtcctgaaggccattcctaagattgataaaattagag

SEQ ID NO: 245675 - DNA, 402 bp, Glycine max
gcgtcagacactatgtaactctttattttattttctttctttctttctccgatcgcatagctcgctcgcaaccaccatgccttcccgaagaagaactctcttgaaggtcatcattctcggtgacagtggggtggggaagacatctttgatgaagcaatatgtgaataagaagtttagtaatcagtacaaggcaaccattggagcggattttttaaccacagaagtgcaattcgaagataggcttttcatcttacagatttgggatacagctggccaagaaagattccaaagccttggagttgctatctatcgtggtgctgattgttgtgttcttgtatatgatgttaattcgatgaaatcatttgagaaccttaataactggacggaggaatttctgattca

SEQ ID NO: 245676 - DNA, 457 bp, Glycine max
  unsure (1)..(457): unsure at all n locations
ggtctagaattaccgggccgacccacgcgtcaggtggttcttttccttctgagaagatcgaattgtgttttgcaaaaatgggagttccagagaaagaccctctttcccaattgagtttgcctcctggttttcggttttaccccaccgacgaggagcttctcgttcagtatctgtgccgcaaggtcgctggccaccatttctctcttccaatcattgccgaaattgacttgtaccagttcgacccatgggttcttccaagtaaagcgattttcggtgaaaaagagtggtactttttcagccccagagacaggaaatacccgaacgggtctcgacccaacagagtanctgggtcgggttattggaaagccaccggaaccgacaagatcatcaccancgaaggtagaaaattggcataaaaaaagccctcgttttctacgttggcaaagcccccaaaggc

SEQ ID NO: 245677 - DNA, 453 bp, Glycine max
  unsure (1)..(453): unsure at all n locations
ggtctagaatacccgggccgacccacgcgtccgttcattgttttgttttaactgtttcgaatccctgcgcttgcttanggaggaaccgttgaagtggattgacccagtactgctttcaatttgctgctgaaggaaagggttgggatgggttgtgacttttccaagtacacagtgtgctgcacgggttacggagcaagatggtccggctgctgaggctcaggttgatggtggaaacgaagacaatgttgttgagggcgttgacttgccgcggtttcatgaattcacaattgaacagcttaagagggctacatccggatttgccattgaaaatatagtttctgaacatggagaaaaggctccaaatgtggtctataaagggaaacttgataatcagatgcgaattgctgtcaaacggttcaacagaaatgcttggcctgaagcgcaaccattttt

SEQ ID NO: 245678 - DNA, 471 bp, Glycine max
ggtatcggtcaggaggtcccgggtcgacccacacgtcagtgtttcgttcaggtcgttacagtcggaaccgggaggttctagaagttggttgagttcgttcggaagcgagcgcgagcgaccggggaaggaacgcaagggatggtccataacggttcacgatctttccggttcaccggtggccgcagcttctatggtcacgcctttcgtcgcttcgcccggttcggaccgggtgagctgctccaaccctggttcgtggctaattcttcgcccgagcgacggcacgtggaagccatgggggaggctcgaggcgtggcgcgagcgcggcggctccgacggcctcggctaccgcttcgagctcataccggacaccaacggcggcatgagcgccgccggtatagtgcttgcggaatccacgctgagctccaacaaaggagggaagttcgtcatcgatttgagttgccgcaacgccgt

SEQ ID NO: 245679 - DNA, 455 bp, Glycine max
gaagtcccgggccgacccacacgtcagcccacgcgtccgcacaaagttgggacgtggcttgtacaaaagcacaagacggctttgctcgaagctctggaaaaggtcaaggctgagttgatgattttaggtttcatttcactgcttttaactttcgggcagagttacattgtcagaatatgtattcctgaaaagctcgcagacattatgttaccatgtccgtataaggaagccaaaaaggcatcagatagtgaagaggaacatcgtaggaaacttttgtcctatgagcgtagatatttagctgctgatactgcctcgttcaaatgcagcagggagggacatgagccacttttatctgtcaatggattgcaccagttacacatcctcatattcttcttagcagtcattcatgtgttttacagtgctatcacaatgatgcttggaagactaaagatacg

SEQ ID NO: 245680 - DNA, 450 bp, Glycine max
ggtctagaattaccgggccgagccacgcgtccgcccacgcgtccggcctcccaaaaaaaatgaagagtactacctctttggctctctttctactttgtgccctaacttcatcatatcagccttcagccaccgctgatattgtattcgacaccgaaggcaatcctattcgaaacggcggcacatactatgtgttgccagttataagaggaaagggcggcggaatagaatttgccaaaaccgaaacagaaacatgccctctcactgttgtgcaatctccctttgaggtctcaaagggtctaccactgataatttcatccccatttaaaatccttgacatcaccgaaggacttattttgagcctcagtttcacttatgtacccccctgtgcctcaactccttctcggtggaccgttattctcaagggtctgccagaagaactccatgtcaaac

SEQ ID NO: 245681 - DNA, 338 bp, Glycine max
cgtcagatttccccaggaagcagtgggatctcagctggaacgattgttgcaattgtggttccaattacggtcgctgtgcttatatttatagtcggaatttgtttcttgagtagaagagcaaggaagaagcagcagggttctgtaaaggaaggaaaaactgcgtatgacatccccaccgtggactccttgcaattcgatttcagcacaattgaagcggccacaaacaagttctctgccgataacaagttggggggaaggtggatttggtgaggtttacaagggcactctttcaagtggacaagtagtagctgtcaagagactctccaaaagctctggac

SEQ ID NO: 245682 - DNA, 405 bp, Glycine max
tcccgggctcgacccacgcgtcaggtagttatccagtttctaaatcccaaagttcaagcatccattgctgctaatacttgggttgtcagtggttcaccgcaaacaaagaagttgcaggatatactccctagcattatccaccaattaggaccagataacttggaaaacctgaagaagctagccgagcaattccagaagcaggctcctgaaggggccgctggttcaaccacagctcaagaggagaatgatgacgacgtcccaaagcttgttccaggccaggattttgagacagctgctgaggagaccaacgctgcttcttagattgtgccatcgctaaatatctcctgtgttttaattttttcgtcttcctgattttccattttaagtatttcaggtgtttggttc

SEQ ID NO: 245683 - DNA, 390 bp, Glycine max
ctcacgcgtcagcaagcaggtctcttacagagtcatcagagacgacaacggcaacgtcaaactcgactgccccgccattggcaaacagttcgctgccgaagaaatttctgcccaggttctgaggaagcttgttgatgatgcttccaagtttttgaacgataaggttaccaaggccgttgttacggtgcctgcttacttcaatgactcccaaaggactgccaccaaggatgctggtcggattgctggtctagaggttcttcgtattatcaatgaaccaaccgctgcatccttagcctatggctttgaaaagaaaaacaacgaaactatccttgtttttgaccttggaggcggtacctttgatgtctccgtgctcgaggttggcgatggagt

SEQ ID NO: 245684 - DNA, 360 bp, Glycine max
ccgggccgacccaagcgtcagcttcttcttctttttcatcaatcatcaccagtggttcttttccttctgagaagatcgaattgtgttttgcaaaaatgggagttccagagaaagaccctctttcccaattgagtttgcctcctggttttcggttttaccccaccgacgaggagcttctcgttcagtatctgtgccgcaaggtcgctggccaccatttctctcttccaatcattgccgaaattgacttgtacaagttcgacccatgggttcttccaagtaaagcgattttcggtgaaaaagagtggtactttttcagccccagagacaggaaatacccgaacgggtctcgacccaacagag

SEQ ID NO: 245685 - DNA, 388 bp, Glycine max
gacccgcccgtcagcattaagaaagcccaaagaaagaagaagatggcgtccgagtgcaaaggtaagagctcatggcctgagttggttggagtggaaggaacggtggcggtggctacaattgagagggagaatcctttggtggatgctaacactgtgcttaaaggatccatcgtcaccgctgattttcgatgtgatagggttcgggtttgggtcaccaaacatggaattgtttatcaggctccaagaattggataagaagtgtttacactaaagcacttcatatatatgttatgagtcatgaatatgatagtatttaaataaggagttattcgtccaattaggttaattgattgagaataagaacatgaggtataagaaattgtttttt

SEQ ID NO: 245686 - DNA, 183 bp, Glycine max
cgggaaagagcgcgtgagagtggcgcgcgtgtggaagacgacgcaggggcagcacttcgttgtggagtggcgcgtgggcatcactctcttctcagactgcgttaactcgtatctccgcgatgacaactctgacatcgttgctactgataccattaaaaacacagtgtatgcaaaagcaaagga

SEQ ID NO: 245687 - DNA, 445 bp, Glycine max
tcccgggctcgacacacgcgtcaagcggtttatgccgtcccaggctgatgaagagacgcatcagttgtcgtatctgcaaaagcacttggctaacattgtgtctcttctagcagagcctgtggagggagaaggcgatgagtccctggttttaaccatggatagatttgagcatcttgggttcctaattcagtttggtgataagggatcagaaggaaattcgtttagtcaatgttctcctttttttgcaaactcagaccctgacatgcctgctgttcctgttcctgccgcacaagttcatgattggcttctgcaaaatgtagcggctgctttggaatatatttctgaacggacttcttcaaaggaaaatggcccagctagtgcctctgatcaggatgttgccatgactgatgcaagcactgtctcatttaaggtctcaacaggtact

SEQ ID NO: 245688 - DNA, 387 bp, Glycine max
aattcccgggtcgacccacgcgtcaggctgaaacaaagaagtgaaaataacagcaaaaagtagcagctgctgcagctcccccgaagcttatctcagcagcagatactcaaccctgtttgagtagccgagaataacaccaatgggagaggaggaaaagaaaccagaggaacaacccaaggcagaggagaaaaaaccagaggaagagaagaagaaagaagaagcagcagcagcggaaaaaccaagcgaagagaaaaaaccggaacaagagtcgaaagaggaagttgctgctccgccaccgccaccgccaccggccgagattgtgctcaaagtgttcatgcattgcgagggttgcgctcgcaaggttcgtcgctccctcaaaggattccc

SEQ ID NO: 245689 - DNA, 411 bp, Glycine max
gactcacgcgtcagcccacgcgtccgctctataagaaggtgttcccgcacttctacatactgggctggtattcgactgggagtgatgcagaggaatcagatatgcatattcacaaagctttgatggatatcaatgaaagtccagtttatgttcttctcaatccttctatcaaccattctcagaaggatctacctgtcagtatttttgaaagtgaactgcatgtcatagatgggattccacaacttatctttgttcgctcaagttatactattgagactgttgaagcagaacggatatcagttgatcatgttgctcatcttaagccatctgatggtggttcagctgctacacaattggctgctcaccttactggtacacacagtgccatcaaaatgcttcatagcagaataa

SEQ ID NO: 245690 - DNA, 430 bp, Glycine max
ccgggccgacccacgcgtcaggcgtgctcagcggcagcggcactgtcaccaacgtcacgctccggcagccggcctcgccgggagcagttgtgacccttcatggaagatttgagattttgtccctgtccggttcttttctgccgccgccggccccacctgcggcgtcaggactagccatatatctggctggcggacagggacaggtagtaggtggaagtgtggtgggaccccttgtggcctcaggtcccgttgtcatcatggctgcttcatttggtaatgctgcttatgagagactgcccttagaggaagaggaaactccggtggcagttgctggcaacggaggattaggatccccaggaatcccaggaacccagcaacaaccgtaacagcaacagtacagagcattttgatgcatgtaagttggacaaat

SEQ ID NO: 245691 - DNA, 278 bp, Glycine max
ccgggccgacccaagcgtcagatattccattctctctgtgtatttccctacctctcccttcaagatgcagatcttcgtcaagaccctcaccggcaagaccatcacccttgaggtggaaagctctgacaccatcgacaacgtcaaggccaagatccaggacaaggaaggaatccccccggaccagcaacgtctcattttcgccggaaagcaacttgaagacgggcgttaccttgctgactacaacattcagaaggagagtactcttcacctcgtcctcc

SEQ ID NO: 245692 - DNA, 403 bp, Glycine max
  unsure (1)..(403): unsure at all n locations
aattcctaggtcgaccgacgcgtccgcccacgcaatccgcggacgcgtgggttgagctgttggatgccttattcaaggaatgtttccatgttggagaaaaaatggtttctgaaggtataattacaagagaagacatagaagaagccaaatctggtaatgggagtagagtcattagtattggtttgccagcatattgcttagtccagggactcttgcgctctgcaaaattaaattccgttggtataatgattagtgatgaaactgaactaactatcacaaacagaccaagggagacattttttgactggttcgttaatcnccttttgatcattaaggagcanatcaaagctgaaaatctttctgcctcagaagaggactacctctgcaaattagttctcttggg

SEQ ID NO: 245693 - DNA, 336 bp, Glycine max
gtaccggtctggaattcacgggccgacccacgcgtcaggagaaatggaagcagcatcatggccgacaataattcgactactgatcattatgatatgggcatggaagatgctgaactggttatggctgaggccaaagaagcttgaaaagcttctgaaaaaacaaaggcttcaaggcaactcatacacgctttttgttggggacttgaaagagtttggcaagatgcgaaatgaagccctatccaaagccatgaatctcttcgctcaagacataacgccgcgcgtgttaacctttaaccaacacactgtcaagaagcatgggaaaaagtcctttaaccg

SEQ ID NO: 245694 - DNA, 216 bp, Glycine max
aattcccgggctcgacccacgcgtcagcccacgcgtccgcccacgcgtccgaaaaaaaaaaaaaaaaaaaaaaaaaaaaaaaaaaaaaaaaaaaaaaaaaaaaaaaaaaaaaaaaaaaaaaaaaaaaaaaaaaaaaaaaaaaaaaaaaaaaaaaaaaaaaaagaaaataaaaagaaaaagacatcgaaaaaaaaaggtcgagagaggagaaaaagg

SEQ ID NO: 245695 - DNA, 414 bp, Glycine max
ccggctcgacccacgcgtcagcccacgcgtccggagattccttctttaatggacctaggccttaatccatctgcaacaatgtcacagaatggaaagtgcgttgctaatgcttctatggtaggaggggagactgaggcactgcagaagcttaaaaaatttgcagctgagtgtgcagctcagccacacaaggggtttaaggatggaacacagagtatatatggtgccaacttctcctgcaagatttctccgtggttggcaatgggatgcctttcccctcgcacaatgtatgaagaactgaagaagactgccggcagagtcatttctgcttcgtccaaccggaatgatggtggtaatggctcgtccagaactggaacaaattggttgatgtttgagttgctatggagggacttcttt

SEQ ID NO: 245696 - DNA, 404 bp, Glycine max
acccaagcgtcagaaaaaaatggatttccacggcggaggaccactccgttcccgcagttcccagtccccttctccctctcactccgcctccgcctccgccacctcctccatccagaagcgcaagctcgtgtccgaggaccacgcgcctcccttccccccctcctccttctccgccgacacccgcgacggtgccctcacctccaacgacgacctcgagagcatctccgcccgcggcgccgactccgactccgactccgaatccgaggacgccgtcgtcgacgacgacgaggacgactacgacaacgacaacgacaacgactcctccatgcgcaccttcaccgcctccaggctcagcaaccctccctccgctccccgcaacaccaagctcaagaccgataactcca

SEQ ID NO: 245697 - DNA, 368 bp, Glycine max
gacccacgcgtcagattgttgtgactcgtacttcttcgtcgttatcctcatcctttgtcgtttgtgtgtatgttctttctctcagctgaaaatgtcttgctgcggtggtaactgtggttacagaagcgcctgcaagtgcggcaacggttgcagaggctgcacgatgtcaccatacgtgagctacatcgagtcaaccaccaccgataccttggtcatgggagtggcatcagtcaaggctcaattcgagagtgctgaatagggtgttcacgctgagactcatggctgcatatgtggagctcactgcacctgcaactcctgcacttgcaagtgacgtgttggagatctaaagcttcatgtatcgatggccc

SEQ ID NO: 245698 - DNA, 412 bp, Glycine max
ccgggtcgacccaagcgtcagagagtagtgagtagtgagagggaggaagcagaagtgaagcgatgaatgccccagatcgttacgagcgtttcgtcgtccctgaaggcacaaaaaagttttcttatgagatggacacgaagatcatcaatgcgtcatccttcaccatcgagtaagaggagcacactatcaacaacatcctccgcatctgcacagagaccccaatgtcttgattgtcagatacaagcttcctcatgctcttcaatacaaaattattgtcagggttagcgtcttttccttattactactactactgccttctttcaatttcatggaatagtttaggttttagttctaagctatttcgaccatatagttagttagggttaaagaataagacccaaatcctactttt

SEQ ID NO: 245699 - DNA, 320 bp, Glycine max
aattcacgggctcgaccacgcgtccacccacgcgtccgctttgccggcaaaggaagttccaccagaacttccggaacctgcactccgaatcaattttgctaaggatggcatgaaccgcaaggactggctttctctggttgccgtgcacagtgattcgtgggtgctctctgtggccttctatcctggagctcgtcttaaccgcaacgaaaggaaacgtttaattaacttgattaatgatcttcctactgtttttgaacttgtgacagagaggaagccagttaaggacaagcccactgcagatagtggaagcaagtctaggg

SEQ ID NO: 245700 - DNA, 314 bp, Glycine max
ttcccgggctcgacccacgcgtcagagagtcttcccgtctcttcctcttcacttcttataccgtcgcccccaaacgacgccgttttctgttctcttatgtaaacgccgttcgagaacaaagcaaaaaaagaaaagaaaatcagttattgccgttgttgttttgtttccggttcggtttatttcaatggatcgggcggcgttgacggttggaccgggcatggacatgccgatcatgcacgacagcgaccgttacgatctggtacgcgacatcgggtccggaaatttcggcgtggccaggctgatgcaggataaac

SEQ ID NO: 245701 - DNA, 569 bp, Glycine max
gggcggggggcgggtggggcggggggggggggggggaggggggggggcgcgggcgcgggggtggcgcgcgggggggctgcaagcttagcggcacatacggtcaggaattcccgggtcgacccacgcgtccggttacctagtcgtggccccagagcatcccttgttgtcatcattggtttccattgcccagagcaaacatgtagaggattatgtagaccttgcctcaaggaagagtgaccttgagaggactgaacttcagaaggaaaagactggggtctttactggctgttatgcaaaaaatccagcaaacggggaagccattccaatatgggtggcagattatgttttggggagttatggaacacgagctatcatggctgtgcctgcacatgattcacgtgattatgaatttgccttgaagtatgatgttccaatttgctgggttgttatgccaagatggataaagtttcgaatcggggaaaggctttttacagtgaaggcacaatgttaaattcagcaaatacacgtgtggggcttgccattaagggcttgtcagccatgaagcttcc

SEQ ID NO: 245702 - DNA, 489 bp, Glycine max
  unsure (1)..(489): unsure at all n locations
tggggtgnnggcaacatcaaacatgcacgcggcgacgtaacggtcaggaattcccgggtcgacccacgcgtcagtcacagttgcagcaaacggagggcaagatttctacgacgtgagcaacgtggatggcttcaacgtgcccatgtccgtaaccccacaaggtgggagtggcgattgcaaaacctcaagttgccctaagaacattaactctgtgtgccctgcggagcttcaagtcaaagggtccgatggcaacgtcatcgcttgcaagagtgcttgcgaagcttttaaggaagatagatattgctgcactggacctaacaacaccgcagaaacatgtccacctacgaactactctcagattttcgaggagcagtgtcccgatgcttattcctacgcttacgatgataagagcagcactttcacttgctccaacaggcctgattatgccatcacattctgcccttgaagtgctcnacacgtggagagatc

SEQ ID NO: 245703 - DNA, 423 bp, Glycine max
gacccacgcgtcagatttattccgcgtctataagctttcttgttttgctattgcttgctccgcaatcataatttcatcatcgaatcaaatcaattttgaaggttcattataatggcggaagagataaccaagaacgacgtcggagtaacctccaaaaccaccagaagcagctccaggttctggcctcgttggattcccacttccaccgatcacatcatcgctgccgagaagcgccttctttccgtcgtcaagactggttatgttcaagagcatgttaacattggctctggtcctcctggctccaaagtgaggtggttccgttcatccagcaacgagccgcggtttattaacaccgttacatttgacagtaaaccccattctccaacgcttgtcatgattcatggttatgctgcttcacagggg

SEQ ID NO: 245704 - DNA, 456 bp, Glycine max
aattccagggccgacccacgcgtccgcttcatcgctgagaagagatgcgctcctctaatgctccgtttggcatggcactctgctggaacttacgacgtgagctcgaagaccggtggtcccttcggaaccataaagcacccctccgaactcgctcacggcgctaacaacggtcttgacatcgctgttaggcttttggagccactcaaagcggagtttcctattttgagctacgccgatttctaccagttggctggcgttgttgccgttgaggtcaccggtggacctgaagttcccttccatcctggaagagaggacaaacctgagccaccaccaagagggtcgcttggccgatgccactaagggttctgaccatttgagagatgtgtttggcaaagctatggggcttagtgagcgagatatcgttgctccgtcggggggtcagactattggagctgc

SEQ ID NO: 245705 - DNA, 303 bp, Glycine max
aattctagggtcgaccgacgcgtccgcgttgccattctcatcctcttctttctctctctaccattgccatggatccctacaagcaccggccatccagcgccttcaattctcccttctgggacacaaattccggtgctcctaattggaacaacaactcctccttaaccgttggggccagaagtccaattctgctggaagattatcaacctgtggagaagcctgcaaattttgatagggaacgtttcccaaaacgtgttgttcaaggcaagggggctagttcaaaaggtttccttgaagtcaccc

SEQ ID NO: 245706 - DNA, 363 bp, Glycine max
ggtcaggaattcccggctcgacccacgcgtcagcccacgcgtccgcccacgcgtccgggactggtggaaatttagtagccgccgggtgtaaatcgcagatactgttctgggattggagaaatatgaagcaagttgcatgcctggaggactctcatgtggatgatgtcactcaggttcattttgtccctaatgaacaaggcaagctgatttctgcttcagtagatgggttgatctgcacatttgatgctactggagatatcaatgatgatgatcatctagaatcagtgattaacatggggacttcaattgcaaaggtggggatttttggagagaattatcagaagctttggtgcctaacacata

SEQ ID NO: 245707 - DNA, 376 bp, Glycine max
cgacccaagcgtcagcccacgcgtccgcccacgcgtccgcttttggtgaggtttgtacttgcgtcctccttaagcttgttctgtctcgctagaacagaattgtttactgggctcatgagtctagactctagaagttccaatttatatatttatcctttattattgaataaaggaggatgcggtttggaaaaaaaaaaaaaaaaaaaaaaaaaaaaaaaaaaataaaaaaaaaataaaaaaaaaaataaaaaaaataaaaaaaaactgaatgaagaaaaaacagataattaaattcgaagagttgtgaatgtaataaactaattgcggtgaacatttataacaatcggcaggacctctagatgacagtaactataac

SEQ ID NO: 245708 - DNA, 418 bp, Glycine max
cggctcgacccaagcgtcagagaaaacctaagcttagaattagaaacaaagaaaagaagaaaggaaagaattgatcgttgaaaatgcagggaggaaagaaagcgggagagtccattaaggaaacagctacaaacattggtgcttctgccaaggctggcatggagaagaccaaggccactgtccaagagaaggcagaaagaatgacagcacgtgatccggtgcaaaaggagttggcaacccaaaagaaagaggcaaagatgaaccaggcggagctggacaagcaggcggcgcgtcagcataacacggcggccaaacagtccgccaccacggctgggcacatgggacatggccaccacaccaccggaaccgggactggaaccgccacgtattccaccaccgggggaatatggtcagccca

SEQ ID NO: 245709 - DNA, 423 bp, Glycine max
attcaagggccgacccacgcgtcagttcttccatttccattaaaaagaaaatatcataaatgggtattttcacattcgaagacgaaatcacctcccctgtggctcctgctactctttacaaagctctagttacagatgccgacaacatcatcccaaaggctcttgattccttcaagagtgttgaaaacgttgagggaaatggtggccctggaacaatcaagaagataactttcgttgaggatggagaaaccaagtttgtactgcacaagatagaagcagttgatgaggcaaacttgggatatagctacagcgtagtgggtggtgctgcctttccagacacagcggagaagatcacattccactccaaattggctgctggtcccaatggacgctctgctggcaagctcactgtcgaataccaaa

SEQ ID NO: 245710 - DNA, 161 bp, Glycine max
cggacgcgtgggaaaaaaaaaaaaaaaaaaaaagaaaaaaagaaaaaaaaaaaaaaaaaaaaaaaaaaaaaggaaaaaaaaaaaaaggaaaaggaaaaaagaaaaaaaaaaaaaaaagaaaagaagaaaaaaaaaaaaaaaaaaaggggggcgccccagaa

SEQ ID NO: 245711 - DNA, 467 bp, Glycine max
ccggtcaagacttcccggcttctactttgagtcatcttgatccttctttttctccttgaactcaaacatggcagatgaggtggttctgctagatttctggccaagtccatttgggatgagggtcaggattgcacttgctgaaaagggtatcaaatatgagtacaaagaagaggacttgaggaacaagagtcctcttctcctccaaatgaacccggttcacaagaagattccggttctcatccacaatggcaaacccatttgtgaatccctcattgctgttcagtacattgaggaagtttggaatgacagaaatcccttgttgccttctgacccttaccagagagctcaggctagattctgggctgattatgttgataagaagatataggatcttggaaggaagatttggacatcaaaacgagaagaagaagaagctgccaagaaagagttcataaaagcccttaaat

SEQ ID NO: 245712 - DNA, 414 bp, Glycine max
cggtcaggcattcccgggtcgacccacgcgtcagcccacgcgtccgcaatgccctatatatgggtgatgttcgagaacgtgtgaagatattggaaaatgtgggccatttgcctcttgcttacatcactgcatcagtccatgggctacatgatgttgcagaacggcttgcagctgaattgggagataatgttccatctttgcctgcaggaaaagtgccttctctcgtgatgcctccatcacctgtcatgtgtggaagtgattggcctcttctcagggtcatgcgaggcatgtttgatggggtgcttgacaatacaggtcggggagttgctgatgaagaagagtatgaggctgctgatggtgattggggtgaggagcttgacatagttgatgcagatgggttacaaaatggagatg

SEQ ID NO: 245713 - DNA, 197 bp, Glycine max
cccggctcgacccacgcgtcagattacttcaacactataattatatcataaaaaaaaaaaaaaaaaaaaaaaaaaaaaaaaaaaaaaaaaaaaaaaaaaaaaaaaaaaaaaaaaaaaaaaaaaaaaaaaaaaaaaaaaaaaaaaaaaaaaaaaaaaaaaaaaaaaaaaaacaaaagataaaaagggtggccacccaa

SEQ ID NO: 245714 - DNA, 419 bp, Glycine max
ccggctcgacccaagcgtcaggtgttttgttagttcacacactaagttctgaaaaatgagttccaaagtttttcttattctacttatgttcatggccactatacttttgatctcctctgaggttgcacccgatgatgcataccagaattttgacaaaacagatgggaagcgtagtgcaaatggggtagatgaaagcaaatattggcgtggtggctatggcgactatggtggttggcgtggtggtggttggcgtggtggctatggaggctggcgtggtggctatggtggtgggcgtggtggctatggtggctggcgtggtggctatggtggtgggcgtggtggctacggaggttggggtggtggctttggccctaacgaacataatgaggctgggattgatgctagccctcacaactaag

SEQ ID NO: 245715 - DNA, 409 bp, Glycine max
aattcccggctcgacacacgcgtcagctttagtgttttctcttgtcacataaaagtcatctaagaagaattacaagatcatcatcacaataacaagatgagttcaggaattagagcatggagtgtggcagcaagtgttggaattgtggaggccttgaaagaccaaggcatatgcaggtggaatcatgccttaagatcagctcaacaccatctcaaaaaccatgttggctcattctctcaggctaacaagctttcttcttctgctatgatatccacaacactaaaacatgagaaggcaaatcaatcagaagagtctttgagaactgtcatgtacttaagctgctggggtcccaactagatatcataagcccaacaacaaaatattcttttctcttttcaattctaggaat

SEQ ID NO: 245716 - DNA, 426 bp, Glycine max
cggtcaggaattcccgggtcgacccacgcgtcagcattaggatctcatgcgcctgggcacggcggtatgggggcattgcttgctggtggtgctgctgcggcagcagctgcgtatggggctcaccatgtttcccatggccatcatggatatggtgcatatggaggatatggacacatgccccatgggaaattcaaacatcatggcaagttcaagcatggaaagttcggcaagcatgggaaatttaagcatgggaagtttggcaagggtatgttcaagaagtggaagtgatgatattatattaattttctgtacatacaaaccgcgattctggatgctgctgcacattgcttttataataaactctactttgtttgatgtccatctatattttggtggaactctagtattttttttatagtcaaagat

SEQ ID NO: 245717 - DNA, 417 bp, Glycine max
cggctcgacccacgcgtcagcccacgcgtccgcccacgcgtccggagagagaggttttgacgcaacacactttcactgagaaaggatctctatctaccaaggagcagaataaaacccttctctctggtaagtgaataagagaatggcttcagatcggaaacttcacactttcgaggaggtggcaaagcacgaccagaccaaggattgctggctcatcatttctggcaaggtgtatgatgtcacccctttcatggaggatcatcccggaggtgatgaggttttgttatctgcaacagggaaagatgcaaccaatgattttgaagatgttggacacagtgattctgctagagatatgatggaaaaatactacattggtgagattgattcatcaactgtaccactaaaacgtacctacat

SEQ ID NO: 245718 - DNA, 417 bp, Glycine max
acccaagcgtcaggttcaaggtggcatgcacctgggaaccggcggatgggagcattgcttgctggtggtgctgctgcagcagcaactgcgtatggggctcaccatgtttcccatggccatcatggatatggtgcatatggaggatatggacacatgccccatgggaaattcaaacatcatggcaagttcaagcatggaaagttcggcaagcatgggaaatttaagcatgggaagtttggcaagggtatgttcaagaagtggaagtgatgatattatattaattttctgtacatacaaaccgcgattctggatgctgctgcacattgcttttataataaactctactttgtttgatgtccatctatattttggtggaactctagtatttttttttagagtcaaagatgtatcatcccg

SEQ ID NO: 245719 - DNA, 412 bp, Glycine max
  unsure (1)..(412): unsure at all n locations
taccgcgtctggaattncagggtcgacccacgcgtcaggagaatatcattgtccagtgctaaacaaagttttcactgaatttactcatattgtggcagtgaagaccacaggaaatgtgttctgctatgaggctgttaaagagttaaatattaagacaaaaaactggaaggagctcctcaccgatganccattcactaaggatgaccttataaccattcaaaatcctaatgcacttgacagcaaggttcttctggattttgatcatggttaaaaaataggtttgaaagttgatgataaggactacagaaaatgagttcagatccaacctataacataaacatgtcgggtgatataaagcaaatgcttaaggagcttggaactgagaaagggaaggaaactgcattgcatgggg

SEQ ID NO: 245720 - DNA, 376 bp, Glycine max
ccaagcatccgctcacgttctggcagttgttgccagcgtcttggtcgtggtctgggtcgtcaatttcaggggtggcttggcttgggattctgataacaagtccctcatcttcaacattcaaccagttcttaatgttattggcttactacttcaagggggtgaagctattataagttacaaaacttttcccctaaagaagggagttaagaaatttatacaccttgttttccatgccatcgcattaatacttgggatagttggaatttatactgccttcaagtgtcaaaatgaaagtgggatttgcaatctctaaagcttgcattcatggcttgggattgggggtaatgtcctttaggcattcaggtaaacaaaacac

SEQ ID NO: 245721 - DNA, 356 bp, Glycine max
attcaagggcatctccttctcaaaatagtagtattattcttccattcataatgggtgttttcacattcgaggatgaaatcaactcccctgtggctcctgctactctttacaaggccctagttacagatgccgacaacgtcatcccaaaggctcttgattccttcaagagtgttgaaaacgttgagggaaatggtggcccaggaaccatcaagaagatcactttcctttgaggatggagaaaccaagtttgtgctgcacaaaatagaaaacattgatgaggcgaacttgggatacagctacaacgtggttggggggtctgcattgccaagacacggcggggaaagatcacattcgac

SEQ ID NO: 245722 - DNA, 370 bp, Glycine max
ggtcaggaattcccgggtcgacccacgcgtcagctcaagctttcagaaaaagaaagagccagattgcttctgctgttgaggatgctttagaagttgcagaatttaaggggtatagcctacgcactcgagattcgttgtcctgctggtgccctgactcaattggttttaaccttattgaacatgtgctttgccacattgttaagaatgaaacgccaggtgctgttttggtttttatgactggttgggatgatataaactctttgaaggatcaacttcaagttcatcctttgttgggtgatcatagccaagtagtgattcttgcatgccatggctccatggccagctctgagcagaggttgatatttgaaaa

SEQ ID NO: 245723 - DNA, 310 bp, Glycine max
ttcccgggccgacacacgcgtcagcaagacaaagagggtatcccaccagaccaacagaggctgatctttgctggaaagcagcttgaggatggccgtacccttgccgattacaacattcagaaagagtccaccctccacctggtgctccgtcttcgtggtggcatgcaaatctttgtcaagaccctcactggaaagaccatcacccttgaggtggagagctctgacactattgacaatgtcaaagctaagattcaagacaaagaaggtatcccaccagaccaacagaggctcatttttgctggaaaacagc

SEQ ID NO: 245724 - DNA, 378 bp, Glycine max
tcccgggccgacccacgcgtcagcggacgcgtgggcggacgcgtgggcggacgcgtgggcggacgcgtgggcggacgcgtgggcggacgcgtgggtgcaagtggaagcccttttgaaaatgtagatcttggaaatggagaagttggccatgtaaatcaagccaacaacatgtacctgtttccagggtaggcatgcctttgtggcttatattttttcacggatcatgccactcagtggaaacattggcagaatgttcgaccgcaacatttcatttcaggattggtttggggacacttttatcacgtgctcgtcatataacagatggaatgttgcgagcagcagccgaatgcgcagtaatgcaggtgtggcaaaatggga

SEQ ID NO: 245725 - DNA, 354 bp, Glycine max
tcccgggccgacacacgcgtcaagcgcgagcaagcatcccaaaaccctagctcgcgttctgctttcgtcttttacatcaggatggagtctcaggtgaagcacgcacttgttgtcaaagttatgggtcgtactggatccagaggacaagtaacccaggttagagtgaaatttttggatgatcagaaccgtcacatcatgaggaatgtgaaaggacctgtgcgagaaggagacattctcaccctactcgagtctgaaagggaagcaagaagattgcgctagatggtttcctttggcttgcctccaaattcgaacaaaacagtgtgattttgttgattttaatggtagttggtggat

SEQ ID NO: 245726 - DNA, 425 bp, Glycine max
ggtcaggaattcccgggtcgacccacgcgtcagcagaggggttaggaagcgaccatggggacgctacgccgcagaaataagagacccatggaagaagacacgtgtctggctgggcacattcgatactcccgaggaggccgccctcgcctacgatggcgccgcccgctccctccgcggtgccaaggccaagaccaacttccctccggcgccgcccctctgcctcgacctcaacgtcccttcctccgatcaccgctggccccaccacgtccccccccgcagcctcgtcctcagcgacttcctccacaccgccgttctcagagatatcgacccgccccaacaacctttcccacccgccgccgcagtagctcaccgaaatccccacggcggagctatgcccgttggcggccgggttcaagtgatggaag

SEQ ID NO: 245727 - DNA, 449 bp, Glycine max
cgggtcgacccacgcgtccgatcaactgaaatctccttttggcacttcacttactataccttggtcaactgaaggtattgagtgcaacaaatgctggctggggccccgtcttcccatatgagttcaactgtcccaacatctcaaggaatatttccaacttcaagaattggaagtggtgaatcccccaatagtggggcctcttcttttacccagcctattgcagatatgaatgaaaatgacgaaacagacttgctctcaatatcatggaatcaggactatggttgctttgctgctggcacaagtcatggttttcgtatctataattgtgaaccttgcaaagaaactttcagacgtgatttaaaaagcggtggttttaaaattgtagagatgctgttccgctgcaatattctagcacttgttggtgctgtagctaattctcactatccacc

SEQ ID NO: 245728 - DNA, 254 bp, Glycine max
gacccacgcgtccgatccatctcccaggcttctacattctcacgccaccagtttcgggttcaaacaagttaacgaagaagaaaagggtcccaagggtggggacgtattcaagagcgttgcttcaagctacgatctcatgaatgacctaatgagtggcggtttgcatagattggggaaggataggttagtttccaagctgaatccgtttcctggaatgaagcatcttgatgtggctggtggaacaggggatgttg

SEQ ID NO: 245729 - DNA, 407 bp, Glycine max
ggtccacccacgcatccgacaaaatgactcaagcccagattcaaccagttaaacttggaacccaaggctttgaggtactattaactacattacttgctcttattttgataattgatacaattaatctcattctaggtttcaaaattgggattccgatgtatgggccttactggagcgtacaatgaccctctccaagaacaggatggcatatctgttatcaagtatgcgttcagttagggaatcacattttttgatactgcggatgtttatggagccaatgctaatgaacttttggttggaaaggctttgaagcagctgcccagagaaaagattcagatagccacaaaatttggtattgcttcacgaaggttttcctgatatgaagatcaagggttcgcctgaatatg

SEQ ID NO: 245730 - DNA, 414 bp, Glycine max
  unsure (1)..(414): unsure at all n locations
attcgcgggtcgacccacgcgtccgaccacgcgtccgtttcaaactcatcgatacaacaaacatgtgggtgagtttaagagccatcaagaggtttgttgacactgttgaagtaaggcagaagaagccctcattttcaaaggacacagcagctggaccagcaataaagttctttgataatgtatttggtgtctccgtgcccgaatctcgctttcttcccttggatgcaacatcagatctattacttcttcagtcagatctatacacttgtagagaaggtgttttaactcgaaatccagctagaactaaccctttaaatcctgtgatagacttgggacctgaatttgaaaagtttggtgactttcanagtcgcttcagatccattccaagcatcattgaggttggacagtttgatg

SEQ ID NO: 245731 - DNA, 391 bp, Glycine max
tcgacccacgcgtccggctccaatacaatcatcaaaatgtgcccttccgcctcccatttccgaccggcattccacgtcctcgacgccgaccacgacggcaaaatcagccacgacgacctccgcgccttctacgccggagtcggcggagaaggagacgacgtgatcggggcaatgatgacgctggccgacaccaacaaggacgggttcgtggagtacgaggagttcgagcgcgtggtcgcggcggagagaaaacccgtggggtgtggggccatggaggacgtgttcagggtcatggacaaggacggcgacggcaagctcagccaccgcgacctgaagacttacatggcctgggctggcttttcggccaccgacgacgacatcaacgccatga

SEQ ID NO: 245732 - DNA, 432 bp, Glycine max
attcgcgggtcgacccacgcgaccgcgtttttctgacactgcattctcttcccctttcaaagatttaaccttatttgctcgcagatatgcgcggttactgattcgtcgatggtatctgtcgaaaaaattcacatcgaaagggaacgaacacggaaacgccctcgtctcgcgtgggacgtagctcctccctccgcgtctgaggtaagcttccttcaattccctaattcatattaaattacggtttcttcttttcatagctttttcatcgtttattgtacgcacaacgggctctgccggtgcccggtgatgaaggtttcgaaagaaagcatgtttcgcctccgaaaatggacgacgatcgagagggccattatgtcttcaatcttggcgaaaatctcactcctagatataaaatcctcagcaagatgggtgaag

SEQ ID NO: 245733 - DNA, 400 bp, Glycine max
ccacgcgtcaggaaacatatccttattcactaaagagaaaccagaaggctcaaaatacaaccatgatcaatcatgctctttgtttcttagtattcctagctgcactccatgcattacatggagttgaatacactgtcattaacaacgcactctcaactcttgtcggcgtggctttccgtgacaaaatatgggctgaatacgccaagcgaagacttgactcggccaattaattcagatagatgatctttcagcataacaacccttctgacagaataaatgtgcagaatgtaagcttattcgttgatgacatcgatggtgttgcatatactagcaatagtcaaatccatctcagtgcaagatacgttggagacaattgaggggacgtgaaaagcgatataac

SEQ ID NO: 245734 - DNA, 363 bp, Glycine max
cttctacaaaattttctgttcgatctcaaccaaggttgttccttccaccgccatgagtttcatcttcggaaagcgaaaaacacccgcagagcttctgcgggaaaataagaggatgctggacaaatcaatcagagaaattgagcgcgagcggcaaggcttgcaaacgcaagagaagaaattgattgcggagataaagaaaagtgccaaacagggccagatgggaactgttagagttatggcaaaagatcttgttagaacaaggcatcacgttgagaaattttataagctaaaatctcagctccaaggtgtatcactcagaattcagactttgaaatcaacacaagcaatgggtgaagctatgaa

SEQ ID NO: 245735 - DNA, 457 bp, Glycine max
  unsure (1)..(457): unsure at all n locations
cgggtcgacccacgcgtccaattagttcatgtacggtctcttgttcggtctcgccgacacgtgggcggccatgccggataacaaaatggtcggaaaggccatcagggatcccgagaagttgaaggtcatagcgtcgaacccgaggcgctacacgggcccacccagggtggggaccatgcgggagctgcttaaggtgacacagtatgtacaggataatttctccaaggtaacgacgccgtttttcactgctcacggaacttctgacggcgttacctgcccttcctcgtccaagctgctgtatgagaagggttccagtgaggataagacgttgaagctctacgatggaatgtatcactctttgattcagggagagcccgatgagtctgcgaatctcgtgttgggggacatgagagagtggattgatgagaaggttncgacgtatggacctaacaaaaat

SEQ ID NO: 245736 - DNA, 422 bp, Glycine max
cggctcgacccacgcgtcagcaaaaccggttccaaggtcggagagtacgcagattacgcttctcagaaggccaaggaaacaaaagatgcaacgatggaaaaagctggagagtacacagattatgcttcgcagaaagcgaaggaagcgaagaagacgaccatggagaagggtggagaatacaaggattactctgcggagaaagctaaggagagaaaagatgctactgtgaataagatgggagagtataaggactatgctgcggagaaagccaaagaggggaaagatgctactgtgaataaaatgggagagtataaggactatgctgcggagaaaacgaaagaggggaaagatgcccactgtgaatagatgggagagtataaggattacactgcggagaaggcgaaagaggggaaagatacgac

SEQ ID NO: 245737 - DNA, 375 bp, Glycine max
  unsure (1)..(375): unsure at all n locations
ccgggtcgacccacgcgtccagttagtgttctctcctttcattaacgttgtgttgggtttgctagtgtacttggttttcattatggcgtcttcttcagcctctcgtgagggacactacagaggagttaggaagcgaccatggggacgctacgctgcagaaataagagatccgtggaagaagacacgtgtctggctgggcacattcgatactcccgaggaagccgccctcgcctacgacggcgccgcccgctccctccgcggcgccaaggccaagaccaacttccctccggcgccgcctctctgcctcgacctcaacgtcncttcctccgatcaccgctggccccacgtcccccctcgcagcctcgtcctcagcga

SEQ ID NO: 245738 - DNA, 434 bp, Glycine max
attctccggtcgatctatgcatccacgttttttatttctcacataactcctcttttcctcacctcaatctcacttttttttgtggttttctcttttgggtcttcagcttttcaagtgaagtcccaaagatcaaaatttcaggtttctggaagctaattaattattggcaatgagcaacctcaagctaggtgtggaagttgtgggtgctcatgaccttatgcccaaagatggacagggctcatgtagtacttatgtggaacttcactttgatggttggaaatttcggactacaactaaagagaaagatctgaatcctgtttggaatgagaaattttacttcaatgttactgattcaagcaaattgccgaatctcactcttgatgcctgtatctaccattatagcaagagaaataatttcaaaattttcccggggt

SEQ ID NO: 245739 - DNA, 414 bp, Glycine max
aattcgcgggtcgacccacgcgtccacccacgcgtccgcctcaattggcaaagaagttgaacaagattcttgcacaacacatcaagtctgtgttaccagggctgagagcacgtataagcgcttcactagtcactattgcaaaggaacatgcaagctatggagaaatcacagagtccaaggctggacagggtgctcttctccttaatattctttcaaaatactgtgatgcattctcctccatggtagagggaaagaatgaggagatgtctacatctgagctgtctgggggtgcaagaattcattacatttttcaatccatctttgtgaagagcttagaggaggtggattcatgcgaagatttgactgatgatgatattcgcacagccatacagaatgcaactggacctaaatcag

SEQ ID NO: 245740 - DNA, 415 bp, Glycine max
  unsure (1)..(415): unsure at all n locations
cggctcgacccacgcgtccgccaacgcgtccgaaatgtaggttccttaaggagctggatttgcaggaaaatgaagttgatgaccacagaggccagtggctaagctgctttcctgattgctgtacatcacttgtttctcttaattttgcttgccttaaaggacagattaatctgggggctcttgagagacttgtggcgagatctcctaaccttaaaagcttaaggttaaatcataccgtgcccctcaatgcactccaaaggatattgaggcgagcacctcaaatagtggacttgggtattgggtcatttatccctgatccaaattcaaatgtcttcattaagctaatgaacaccattatagagtgcaagtcaataaccagtttgtcanggttttttgaggttactcctcgatgcct

SEQ ID NO: 245741 - DNA, 270 bp, Glycine max
acgcgtcaggtatagtgtcattattcttcgattctgttcgacctagatttactcgtaattggtgttttcacattcaaggataatatctacatccccgtcgctcatgctactcgttagcatgtctctacttacatctgcctacaatgtcggcctcattgctcttgaggctcttaagagtgttgcagtcatatatcgaaatggtggcctcttaacgatcaatcagatcactttccttgatgatggcgaaacgagctttgtgctacctgctct

SEQ ID NO: 245742 - DNA, 386 bp, Glycine max
aatatcaatttacatatacatatatatagttctatatggcaatgacaacggtggtgtttgtcttgggcatctttgtagtgttgaatgcaagtgcctctgatgccacgcgcttattgctgaataaaactgcaataggtaacgtgtccagagagaacattgagagatacttacttgaaaatggactcggtcagacaccccccatgggatggaatatctggaaccacgttggctgtgatattaatgaaagtttaattcgagaaacagctgatgcattggtgtcatcaggccttgctgctttgggatacatatacattaatttagatgattgttgggcctaacttaatcgagaccatcatggaaatatggttcccaaggcttcaacattt

SEQ ID NO: 245743 - DNA, 388 bp, Glycine max
gggtcgacccacgcgtccgaccacgcgtccgcccacgcgtccgcataacttcaacaacttctttcttctcgatctcacgatggctcatttggccctgtctcagatggctgtaactgttcctgttggcaacgatttgtctctcagaagatctgcagttaaggcccctaacttgaacttttgggataaatcatgggcaccagtatttactttggacttgaagccaaacaacccaagtttaagaagtcgtcatgtggtatgcatgtccgtgcaacaagcaagtgtatccaaagttaatgtctcacctttagaattggaagatgctaaagaacctccattgaacttatacaagcctaaagaaccctatacagcaacaattgtttctgttgat

SEQ ID NO: 245744 - DNA, 407 bp, Glycine max
  unsure (1)..(407): unsure at all n locations
cgggtcgacccacgcgtccgagaatctggataaaaagcagaaagcttccaggggacagaataaagatgtccaagaaagtcgaggacaatccgtagtaggaaatactcaagatgctctagatgaagaagaggaagttaaacaggaaagagttattattacccttaggccattgaatatgcaggatttcaaagaggccaaaaatcaggttgctgcaagctttgcagctgaaggggctggaatgggtgagttgaaacagtggaacgatttgtacggagaaggcggttcaaggaagcagcagcagttgtcttacttcctgtgaattttactgaggatttcaatgaaactgtgtgggaacattttcgtggctacnacatttttcaatgatagtgtggggaaacattttccac

SEQ ID NO: 245745 - DNA, 447 bp, Glycine max
cgacccacgcgtccgaccatactggagcgtacaatgaccctctccaagaacaggatggcatatctgttatcaagtatgcgttcagtaagggaatcacattttttgatactgcggatgtttatggagccaatgctaatgaacttttggttggaaaggctttgaagcagctgcccagagaaaagattcagatagccacaaaatttggtattgcttcacgaggttttcctgatatgaagatcaagggttcgcctgaatatgtgcgatcatgctgtgaagctagcttgaagcgtcttgatgttgaatacattgatctctattatcagcacagagtggacacatctgtacctatagaggaaacagtgggtgaacttaagaaattggtcgaagaaggtaaagtcaaatatattggattatctgaagccacccagatacaattaagagagcaca

SEQ ID NO: 245746 - DNA, 451 bp, Glycine max
  unsure (1)..(451): unsure at all n locations
attcacgggtcgatccacgcgtccaaagatttggagattacaaagagagggtgaatgaatggaaggacgccttgctagaagtctacggttggactgctatggaataccaaaatgggtccggatacgaatatgaattcatccgagagattgttgatatagccaagaggcgccagcgccgccgatatgatgtttttctgagttttaggggaagagatacccgccactctttcacaggttttctctataaagccttttgccgggagggattctacgtcttcatggatgatgagggattggagggtgggaatcaaatttcacctacgattatgggagcaattganagatcaaggctttcaattgtagtgttctctgaaaactatgggttattcacgtggtgtcttgatgaactttccaagatcattgagtgcgtgaaaaccaggaatcaaatggt

SEQ ID NO: 245747 - DNA, 424 bp, Glycine max
attcgcgggtcgacccacgcgtccacccacgcgtccgcatcgctgatcaaacttcaaaccctagctaggatttcaaggtacacttaacgatggcttcaaaacgcattactaaggagttgaaggatctgcagcaggaccctcctgtttcctgcagtgctggccctgttggtgatgacatgtttcattggcaagctacaattatgggtccaactgacagtccttatgctggtggtgtattcctggtgaccattcacttcccaccagattatccatttaagccaccaaaggtttccttccgaaccaaggtatttcaccctaacataaacagcaatggaagtatctgtctggacattctgaaagagcagtggagtcctgcccttacagtttccaaggtgctactttcaatttgctccctgctgacaga

SEQ ID NO: 245748 - DNA, 372 bp, Glycine max
aattcgcgggtcgacccacgcgtccaatcgtttgaagtgacatgtttcaatttttaaaggagagaaagaatattatgaaagacagtttgctactctaaaatcatttgaagaagttgactccatagtaatatcggactgcactgatgtagaagacattggaaaacaagctgaacatgaacgggcaatgaagatttctaattatgcaaatgcagttttattggcattgaagatttatgtgactataaggagtggatcaatagctgttgcagcatcaacattggattctcttcttgacttcatggctggtggcatactttgctttacccaccttgcaatgaaggatataaatatgtacaaatacccaattggaaa

SEQ ID NO: 245749 - DNA, 362 bp, Glycine max
acgcgtcacgcaacgcgtccgtaacaatcattcttcatcatctgcaaatacttatccctcactgattcatcatggttcggttcagcaacaatgttatcggactccttaacttcctcaccttcctcatgtccatcccgatcctggtggccggagtgtggctgagcaagcaaggcgccatcgagtgcgaacggtggctggagaagcccgtcatcgcgctcggcgtcttcctcatgctcgtctcactcgccagcctcgtcggcgcatgctgccccgtgtcatggctcctctggctctacctcgtcgtcatgtttgtcctcatcgttcttcacatcgcctatcacaatttcgctttcgtcgttacc

SEQ ID NO: 245750 - DNA, 376 bp, Glycine max
  unsure (1)..(376): unsure at all n locations
cgggtcgacccacgcgtccaaccaagcgtccgcccacgcgtccggaaagggagtccaangaagcatttagagatagccataagaaggtaagagacagccatgatggtctcatcatttaccgcaacatggcgcttttcttctcgggtggagacaggaaagagttgaagctacgagtaacaggaaggatatggaaagaacagcaaaaccctgaaggtggagtgtgcatacccaacctgtgtagctaggttgattgcatattctcttgattgctatttcttgctgtagataatttgagaagtgttaatctttgactggtgaatggttatggggatatttcaacttccaaacanaataaaaaaactgagttcctaacaaa

SEQ ID NO: 245751 - DNA, 454 bp, Glycine max
cgggtcgacccacgcgtccggatatggcataatacattgatttgtttcttaaaaacaacactgcaatgtctgccatatttctgcttgttggaatgctatcgtccattacagttgcacaatccataggagtttgctatggagtgattggtgataatctaccatcaaggcaagaagttgtggacttatataaaacaaatggcattggtagaatgcgtatatactacccagatgaagaagcactccaagcccttagaggttcaggcattgagttgattatggacgtggctaaggaaacccttcaatcattgacagactccaatgctgctacagattgggtcaataaatatgttacaccttactcgcaagacgtcaatttcaagtacatcgctgttggaaatgaaattcatcccaataccaatgaggcacaatatattccatctgccatgaccaacat

SEQ ID NO: 245752 - DNA, 95 bp, Glycine max
gctagaagaatcaaacgtaacttaccttgctatcaatgttatcgcccttctaggttgtcacctaagttcacttaattggccttcctttcagttct

SEQ ID NO: 245753 - DNA, 465 bp, Glycine max
gggtggatgcaaatctatcagcgagtctatggttacgatatcccggctcgacccacgcgtcagtaatcatatgcttgtctcaaagattaagccatgcatgtgtaagtatgaactaattcagactgtgaaactgcgaatggctcattaaatcagttatagtttgtttgatggtatctactactcggataaccgtagtaattctagagctaatacgtgcaacaaaccccgacttctggaagggatgcatttattagataaaaggtcaacacaggctctgcctgttgctttgatgattcatgataactcgtcggatcgcacggcctttgtgccggcgacgcatcattcaaatttctgccctatcaactttcgatggtaggatagtggcctaccatggtggtgacgggtgacggagaattacggttcgattccggagaaggagcctgagaaacggctaccacatccaag

SEQ ID NO: 245754 - DNA, 377 bp, Glycine max
  unsure (1)..(377): unsure at all n locations
cacgcgtcagcaaacgcgtccggaaaaacaatttccggaaaattcaaaaagcttcaaatatttcaaactaaaatgggtcggtcttgcaataagatggtacttgtttgatgatccagatgatatgatggcaatgaagatgatcagccaagcacatgtgangaatgggaaaataaagtctttcacttcttaatgtggtggacttccatctcctgaagctgctaacaatccattagcatatagattcagttggaatcctgcaggagccatccgagctgggcgcaatcctgccacctacaaatggggtggtgaaactgtacatattgatggggacgatctttatgattcggctacaagactaaggctaccggaccttcctg

SEQ ID NO: 245755 - DNA, 319 bp, Glycine max
aacattctaggatcttcaaagagttccaaacaaaatgggtcagtcatgcaatcagactggacttgtttgatgattcagattagatgacggcaatgaagaagatcaaccacgcacatgtgaggaacgggaaaagaaagtctttcacttcctacagaggtggatatccagctcctgaagctgctaccactccagtaggagtggcattcagttggagtcctgcaggagccatctgagctgggcgcaatcctgcgagctacaaatggggtggtcaaactgtacatattgatggggacgatctttaagattcggctacaagact

SEQ ID NO: 245756 - DNA, 459 bp, Glycine max
  unsure (1)..(459): unsure at all n locations
gggtcgacccacgcgtccgaccaagcgtccgcttctttctttttttcaatttccaaatcacgaaactcaagaagatggaaaaagcgattaacaaacaaaagattttgcttcaacatcccaacccttcatcatccaaccaccccaacgaatcatcctccctccatgcttcagcatgtgtggccggggatagcgctgcttatcaaaggacatcgacattcggggacgatgttgtgatcgtggctgcttatcggactgctcattgcaaagctaaacgaagtggtttcaaagacactcttcctgatgatctactggctcctgttttgaaggctgtaattgagaaaaccaatgtgaaaccaagtgaagttggggatatttgtgtaggtagtgtattggctcctgaagctcanagagctagtgaatgccgaattgctgcattttatgctggttttcccgaaactg

SEQ ID NO: 245757 - DNA, 398 bp, Glycine max
cggtcgacccacgcgtccagagaagaagaatagagagtgatggagtgcgtattcggattggtgggtaatggattcgcgatcgtggtggctgattcatcggcggtgcacagcatcctcgtccacaagtccaacgaggacaagatcatgcttctcgattcccacaaactcatcgccgctagcggcgagcccggagacagggttcaattcactgagtacattcagaaaaacgtcgccttgtatcagttccgtaacggcatccctctcaccaccgccgccgccgccaatttcacacgtggcgaacttgccactgctctccgcaagaacccatactctgtgaacatccttcttgctggctatgacaaagagacaggccctgaactgtactaaattgactacat

SEQ ID NO: 245758 - DNA, 427 bp, Glycine max
gactcacgcatccatttgattaatactatcaactaagcccttttctgtttgcaatctggagctatgagttcgtcttcggcagatgtttttccagcaattcaggaagttatgctggagttccgtgctggcaaaatgtttcttgaggaaaaaagggttgttcccgatacacggaaaggacttgttcgaattgctaggggtgaggagggattagtacattttcagtggcttgatcgcacacaaaatgttgttgaagatgatcagataatatttcccaatgaggctatttttgagaaggttaatcaaacatctggaagggtttacatactgaagtttaatagcgatgacaggaagttcttcttctggatgcaggaatcaaatgctgatggtgattcacaactgtgtagctcagtgaatgattacattaata

SEQ ID NO: 245759 - DNA, 413 bp, Glycine max
  unsure (1)..(413): unsure at all n locations
ccggctcgacccacgcgtcagcttagtccaaaacctcacacgactccctttgttgcgttgtgtttcctttcgccgaaaccctcgctcgcaacttctacagaatccctttcaccatggatattgaggaggacatccgttctttacagctcgattcagcagaagacaataatggggtggtaaatgcagaggatggaaggccanaagaagttgagaaatctgataagatggatgaagatccaaagcaggatgttgaggctgagccaaaggctgttgaggctgagccaaaagtgaaggataaggaggttccttctgttcaagatgaagaagatgaaccagagattgacaaaagacacttgaatgttgtntttattggtcatgttgatgctggtaagtctacaactgggaggcagata

SEQ ID NO: 245760 - DNA, 335 bp, Glycine max
acgcgtacggatgatcatgtcatatcagagcacttttgaccgtcatggatatcaatggactagttgagcagaacgttcaatctagaagccctgtatctactatttcaggccagatggcatctcttgaagtggactccattgagaagcttgcaatggaactgtggtaacagcctgagaaatctggttctaaagtttcaacagttctgcatagatcagtaaagctccgtcacatgatttaaacgcttcatgcatcggtttcgatgtagaacaagttgtatgaggaagagcagttccttcagttcacgcagacccattcgtcacaaacacttgcagct

SEQ ID NO: 245761 - DNA, 363 bp, Glycine max
acgcgtcagccaacgcatctgtaagcatatgcccacgttgatcccggtgggatgcttccaacatctcattaattggtttaagcgccaaagtttccgaatttgcataacggtattgctagttgggcttacagtgcatttgggtcacatcctcgctgttcatctattcaacccacgacactgcacatctgggcataaggcaaaatctcacgccaatttaaacattgatgacgcatcaaaatcctacagtaaaacagaagtttcattgcataacagtagaacagactgttggataatcatcaagaacaacgtacatgatgttacctcacatgtggaagaatatccaggtggtgattccaatcgtgt

SEQ ID NO: 245762 - DNA, 394 bp, Glycine max
cgggtcgacccacgcgtccgaatatatgaagacgagttgagtcacttcgttaatactggcgcacttgatgagctcattcttgccttctctcgagagggacccaccaaggagtatgtacaacataaaatgatggagaaggcttcagaaatttggagcatgatatcacaaggagcttacatttatgtgtgtggtgatgccaagggcatggccagggatgtacaccgcgccctgcacacaattttgcaagagcagggttctctcgatagttccaaggctgagagcatggtaaagaatctacaaactactggcagatatttgcgcgatgtatggtgatgatatctgaatgcaagccgtgggggtgacgaagatattaataaaacatagagttgtggct

SEQ ID NO: 245763 - DNA, 513 bp, Glycine max
  unsure (1)..(513): unsure at all n locations
aggcgntcttnttatccgtagtcagcgngtcaagctacgatctacaattcgcgggtcgactcacgcatccaaatgattctacccgccgctcgatgggaattgcgcttcaaggcgtctcgtanggctaatccgcctcacgagggtcaccaacggcacgtgcctttggggggccgaggccccctactgctggtcggcaaacggacggcgggcgcacgcgtcgcttctagcccggattctgacttagaggcgttcagtcataatccaacgcacggtagcttcgcgccactggcttttcaaccaagcgcgatgaccaattgtgcgaatcaacggttcctctcgtactaggttgaattactattgcgacactgtcatcagtagggtaaaactaacctgtctcacgacggtctaatcccagctcacgttccctattggtgggtgaacaatccaacacttggtgaattctgcttcacaatgataggaagagccgacatcgaaagatcaaaaagcaacgtc

SEQ ID NO: 245764 - DNA, 382 bp, Glycine max
aattcgcgggtcgacccacgcatccacttgagaagacatcaaaaagcagatgttgaggtttgcatgctcttccaaactttgaatttaagtatgactgtactagtatgttacctaagtcatctaaaaaaaacaaagctcattgtggatgaaagttatgctgcttaatttaatagggattgttggctttctatggtcttcctctaccacacacactggttcaaggaactacccaacccctttcatccttgcctgatggagttcaatttgaaatgcacaccttgccggttgatgcaaaggcagtagcagatggagacactataactgtgtatgttagcacaacagaccccagggaatcagcatttgtccctggaaatgtgcatgc

SEQ ID NO: 245765 - DNA, 316 bp, Glycine max
gacccacgcgtccaagataagattactgtcgaaaatctagaaaatagagcacaaggaggggctgagccaatggagatctcccagagccccatgtcgtcgcctgatgatactccatgtggttatgtaaaacttttgaaaggtcatacatcagaggtttttgcttgtgcatggaatccatcagctccacttcttgcatctgggtttggagattcaacagctcgaattttggaaattgctgatggagcttgtgactctagtgtgcaaaatgaaccagttaatgttgtggtgctgcaacacttcaaagaaagcaccaatg

SEQ ID NO: 245766 - DNA, 377 bp, Glycine max
acgcgtacgccaacgcgtccgccggcagataaagaacaaaccgtacccgaaatcccgtttctgccgcggcgtgccggagccgaagatgcgaatctacgacgtgggaatgaacaagaacggcgtggacgagttcccgttctgcgtgcacctggtctcgtgggagaaggagaacgtctccagcgaggctttggaggcggcgcgcatcgcatgcaacaggtacatggccaagttcgccggaaaagatgccttccacctgcgcgtgagggtgcatcccttccacgtgctccgcatcaacaagatgctatcgtgcgccggggccgacaggctccagaccggcatgaggggcgcctttgggaagccgcaagggacctgcgcta

SEQ ID NO: 245767 - DNA, 404 bp, Glycine max
tcgacccaagcgtacgggagttttggtgttgtgcgtttgtcatattgcataaacgaatttacggctgacacgacagatgagtaagctcagcctatttgaaaatttcgacacctctttaaattgtccaagaggtatgtgaaatgtgtgtaacttggacttacaaaagatggttcaagcacttccacaatacagtgaataaattgacaagctctccctccatgtagagattgcaggaaaaattaacagaatcattagggagtcatgacttcgggaacgtgggaagctagagcaagatcttgtttttggagatgcacggatgaaagatgtgatcaaatttttgactacatacgaagatacaagtcgttgaaaaaagttgcgcttgataatgattcttgcgtccatat

SEQ ID NO: 245768 - DNA, 462 bp, Glycine max
ccgggtcgacccacgcgtccgaccacgcgtccgcccacgcgtccgctcgtttctggtccaaattcattgatgataaggtttttggtgctgcatggaaatccgttttcacagctgatgagaaagagcgtgagaagaatgttgaggaagcaattgaggctctgcagtttcttgagaatgagataaaggacaagaagttctttggaggagaggagattgggttggtagatattgctgctgtctacatagcattttgggtccctatggttcaagaaattgcagggttggagttattcacaagtgagaaatttcctaagctccacaattggagccaagaatttttgaaccatccaattgtcaaagaaagtctgccccctagagatcctgttttcccctttttcaagggtctctatgaaagcctttttggttcaaaatagatttgatgatgtggtgtgagacttagta

SEQ ID NO: 245769 - DNA, 503 bp, Glycine max
  unsure (1)..(503): unsure at all n locations
agcnttctnnaaccgtcatctgccggcactgtccaatattccgggtcgacccacgcgtccgactgccagtagtcatatgcttgtctcaaagattaagccatgcatgtgtaagtatgaactaattcagactgtgaaactgcgaatggctcattaaatcagttatagtttgtttgatggtatctactactcggataaccgtagtaattctagagctaatacgtgcaacaaaccccgacttctggaagggatgcatttattagataaaaggtcaacacaggctctgcctgttgctttgatgattcatgataactcgtcggatcgcacggcctttgtgccggcgacgcatcattcaaatttctgccctatcaactttcgatggtangatagtggcctaccatggtggtgaacggtgacggagaaattaggtttcgattccgaaanggagcctgagaaacnngctacacatccaaagaaggcagcangcgcgcaaattaccaaatcct

SEQ ID NO: 245770 - DNA, 168 bp, Glycine max
atttcagaaaatcataattttcgcagcaacaaaactacaagtttaccataacatatcacaagatggcccgttctccctcgcaagccaaacgtattggtgttcctgttgctcaatctatctccctaattcccgtccatcggcgatgttacgcagtggcatccgatgtat

SEQ ID NO: 245771 - DNA, 408 bp, Glycine max
gacccacgcgatccaaccacgcgtccgcacacagctagcagatattacatacacgtgaatcactaattaagccatggagaagaaatcaataactgggttgtgcttcctcttccttgttctctttgttgctcaagaagttgtggtgcaaactgaggcaaagacttgcgagaacctggctgatacatacaggggtccatgcttcaccactggcagctgcgatgatcactgcaagaacaaagagcacttgctcagaggcagatgcagggacgattttcgctgttggtgcaccaaaaactgttaaatggatccattcactccaacgtgaagaagatgcatgcagcgctattttataaaaaataaaactacaatatactatatataataagactggcgctgcatcaatgacct

SEQ ID NO: 245772 - DNA, 420 bp, Glycine max
  unsure (1)..(420): unsure at all n locations
ccggctcgacccacgcgtccgtgacgatccattgataaagacacgagcagtccttgagcttgacgatgacattatgatgccatgcgatgatgttgagcgaggttttaacgtgtggcgtcagcacccagatcggattgttggattctatcctcggctcattgatgggagcccgttaaaatataggggagaaaaatacgcccggtcgcataaggggtacaacatgattcttactggtgcagcttttattgattctcaagtggctttcaagaggtacgggagcaaggaagccgagaaaggtanggaactggtggacaagatatttaactgtgaagacgtgctcttaaactatttgtatgcaaatgcaagctcatcgtcaaggactgttgattatgtgaaaccagcttgggcaattgacacttc

SEQ ID NO: 245773 - DNA, 382 bp, Glycine max
cgacgtaagcgtatagatgattatgctctggatttgatttcctctcaaattgcagaagcacgagattcagagccgccgccatcaacggcaaggaccgctcctcctcgtccctcttagccgccgccaaggactcccgctccgcctccgtcaccgcccctatctccaagaattccaacgcttccgacgaggaatctgaaacagacagcgaggagtctgatgttagtggctccgacggagatgacacatcgtggatctcgtggttctgcaatttgagaggaaatgaattcttctgcgaggttgatgacgattacatccaggacgacttcaacctgtgtggattgagcagtcaagtgccttactatgattatgctctggatttgat

SEQ ID NO: 245774 - DNA, 388 bp, Glycine max
cgggtccggaatttttggatttgttaatttcaaccttcaattttttttaaaaaaccaaccaatccgcaaagtgcaaatttcaaatctttcacgtattgggttcttctcttttccctcttcgtctccgatcgatccaattctcttcccatggctacgatcggacacaacaatctcaatgccaaattggttcttctcggggacatgggtgctgggaaatccagcctcgttttgcgctttgtcaagggtcaatttctcgaatttcaggaatcaacaataggggcagcgttcttttcacagacgctggcagtaaatgatgcgacagtgaagtttgagatttgggacacagcaggacaagagaggtaccatagcttggctcccatgtattaca

SEQ ID NO: 245775 - DNA, 365 bp, Glycine max
tcgtcttctacaaaattttctgttcgatctcaaccaaggttgttccttccaccgccatgagtttcatcttcggaaagcgaaaaacacccgcagagcttctgcgggaaaataagaggatgctggacaaatcaatcagagaaattgagcgcgagcggcaaggcttgcaaacgcaagagaagaaattgattgcggagataaagaaaagtgccaaacagggccagatgggagctgttagagttatggcaaaagatcttgttagaacaaggcatcaggttgagaaattttataagctaaaatctcagctccaaggtgtatcactcagaattcagactttgaaatcaacacaagcaatgggtgaggctatg

SEQ ID NO: 245776 - DNA, 488 bp, Glycine max
  unsure (1)..(488): unsure at all n locations
aggggttntntgacaacgtcaactctgtcangcancggtcaaacnaatccgggcnngnncanncntcgancaaaangancnnnanaaacggctaccacatccaaggaaggcagcaggcgcgcaaattacccaatcctgacacggggaggtagtgacaataaataacaataccgggctcattgagtctggtaattggaatgagtacaatctaaatcccttaacgaggatccattggagggcaagtctggtgccagcagccgcggtaattccagctccaatagcgtatatttaagttgttgcagttaaaaagctcgtagttggaccttgggttgggtcgatcggtccgcctccggtgtgcaccggtcggctcgtcncttctgccggcgatgcgctcctgtccttaactggccgggtcgtgcctccggtgctgttactttgaagaaattagagtgctcaaagcaagcctacgctctgtatacaataacaag

SEQ ID NO: 245777 - DNA, 419 bp, Glycine max
gacccacgagtcagcagtgaaagacgtggtgtcgaaattgacgccgcttttgacgaataacaagcttttggattcggtcgctgctggtaccaaattgaaagatcttcaggaatgggctgggaacgacagatttataagagtgatgcctaataccccagcagctgttggccaggcagcatctggtattatatataacttcttcgttttttttactttttaagagcatattgtgtttagttcctcagttactttcaatacacagcagaatgtgagaatggatgctgcgtgaattagttgtttaacttggtagttccgtaattgactctctgaattcaaaattgtcagttatgttgatgatgaatgatgctattttatatgatggaagttgcacatgatttgctataagagtccatgttttg

SEQ ID NO: 245778 - DNA, 381 bp, Glycine max
cgacccacgagtacggtgctgctggtgcttcatcccttgtgtttgtttactctcttgactatgcccgataccgtcttgccaatgatgctaacgctgcaatgaagggaggagatagacagttcaatggccttgtcgatgtctatctgaagactttggcatctgatggtgttgctgggctctaccgtggtttcaacatctcatgtgttggaatcagtgtgtatcgtggtctgtactttggcatgtatgattccgtgaaatcagttgtcctcaccggatcattgcaggatatctttgttgctaccgttgcgctctgatggcttatcaccaatggtgcatgtcttgcatcaaacgcaattgacactgttacaataagaatgagta

SEQ ID NO: 245779 - DNA, 429 bp, Glycine max
acccacgcgtcaacccaagcgtccgcccacgcgtccgcgataagtctgatctgaagctggatgttttcatggttcagcacgacatggaaaacatgtacatgtgggttttcaaggagaggccggagaacgcgctgggtaagatgcagctgaggagttacatgaatgggcattctcgccaaggggagcgcccgtttccgtttagtgctgacaagggttttgctcggtcccacaggatgcaacgaaagcattatagaggactatcaaaccctcaatgcgtgcatggcgttgaggttgtttccacacccaatctgatgaccctggatgaggatgatcgaaaaaggtggatagaactcactggccgagacttgaattttacaattccaactgaagcaagtgatttcagttcatggagaaatcttcccaacacga

SEQ ID NO: 245780 - DNA, 367 bp, Glycine max
ccacgcgtcaaccaactcgtcagggaaataattgatctttgataatgcagggaggaaagaaatctggatattccaccaaggaaacagctgcaaacattggtgcttctgccaaagctggcatggataaaaccaatgccactgtccaggacaaggcagaaagaatgaccgcacgtgatccgatgcacaacgagttggcaacccagaacaaagaggcaatgatgagccaggcacagctggacaagcacgcgtcgcgtcagcataacacggctgctaagcatgctgccacggcagggcacatgggacaacccatggggaaccatcagacgtcagctatgcccggtcatggaaccggacaacccacgggcca

SEQ ID NO: 245781 - DNA, 440 bp, Glycine max
aattcccgggccgacccacgacgtcagtgatagtccaccaacatggcatccttctgatgaagaagggaatcttctaagcatacattttacttattctgagatcatctggccttggactggttatttggcccttcacatgcaaatcaaggaagaaggtgcacagttttctggaaagattgaaggtaatgtgactctcagggtttctagccccccggctcatggagagaaggaccctcgaattagcatatgtgtgcttcaattaaagttaaatgtggtgccaacaccaccacggtcaaaacgaattttgtgggatcagtttcacaatatcaaatacccacctggttatattcccagagattccttggatgttcgtaatgacattcttgactggcatggggatcatctgcatacaaattttcacatcatgttcaacatgttac

SEQ ID NO: 245782 - DNA, 422 bp, Glycine max
gacccacgcatcagaaaaataacaattaaccacacgactcacgacccagtaaccgggttctgcaaatttcgccacttgcagatgaaaagttccaaactttccactccaatccccggttaaatcctaaccccttgttcctttcactggttcttagaactactaggaccttgccaccaccatggctgccaaaaaggcatgtgagacattctcaaagtcattgattgaggaagtgaatagatggggttgcttgaagcagacaggggtgagtctcaggtacatgatggaattcgggtccaaacccactaacaagaatttgctgatctctgcccattttcttcacaaggaacttgccatcagaattgccagaagggccgttgaacttgagaatcttccctatggtttgtctcaaaaacctgctgttc

SEQ ID NO: 245783 - DNA, 421 bp, Glycine max
  unsure (1)..(421): unsure at all n locations
gacccacgcatcagggcggcacgatgagcagcagccatttgtaaatgggagctgtggagtagtgaacactatttatatagtgagagaaccagatatcttaccttccatcttaaatactgaaacacctggtcgatcacacatggaggttgacaacatggaagctaatcccaggatgactgtgtctgatctggaggtttctcgccaccgtatatcggtattcctgtccacgcatacttcatatgatttgcttcccgagtcaggaaaggtcattgccttggatataaatttaccagttaagcaagcattccatgttctttacgaacagggtatatctatggctcctctatgggatttttgcangagccagttcgttggagttcttagtgcaatggacttcattctaatattgaaagagctgggg

SEQ ID NO: 245784 - DNA, 401 bp, Glycine max
cgacccacacgtacgcccacgcgtccgctcactttcatttctacatccctggctctgttccgtcgatgacgatggcgtttagggtgcgaaaccctgacctccgctttctcattcttctctctctcttgtccatcacttccgccaaggtcttcttcgaggagcgtttcgatgacggatggggaaatcgttgggttaaatcagattggaaaaaagatgagaacctggctggggagtggaaccacacctctggccaatggaatggagacgctaacgacaaaggtattcaaaccagtgaggattacagattctacgctatttcagctcagtaccctgaattcagcaacaaggataagacactagtcttccaattttctgtcaagcatgaacagaagcttgactgc

SEQ ID NO: 245785 - DNA, 421 bp, Glycine max
aattccgggctcgacccacgagtacggcctcttgctccagtaattcctagacctagaactggggctgctttgtccagcacctcaagggttgaatttttggacacaaacaaggtagtggcaggtcctaagtttcaacctttgaggtgcaacctcagggagaggaattgggggctgaaagtgagtgcccctttgagggttgcttccattgaagaggagcaaaagagtgttgatttaaccaatgggactaatggggttgagcatgagaagcttccagaatttgaccctggtgctccgccaccattcaacttggctgatattagagcagccattccaaagcattgctgggtgaaggacccttggaggtccatgagctatgtggtgatggatgtgattgctgtcattggtttggctgctgctgctg

SEQ ID NO: 245786 - DNA, 277 bp, Glycine max
accacgcgtccacgtaactttcatttgttgtgcaatcttacaagttccaaacttctctattttgttattatttgttctcacttctcacacatacagatttgagccttttatattatcatggcttctaaggtggtttcggttttggttatagcgatgatgttgtttgccatgaactgtaactgcactagtgttggccaaatgccttcaaccaaagaggaaggtcacgattttcaggattctaaagccaaaaccaaccaaattgcaaacaaggccatgg

SEQ ID NO: 245787 - DNA, 315 bp, Glycine max
caaaaccgttggccataattggggcaatggcccttgccactgaaccaccaacggcaaggtttggtaaacctggtgtcattgcaccaacaggattaataacggttgcaattttccttcccattgaaatcactcaaaaaagcatagctgtccataacccaacaaaagtggctcggtttgtggtcaggccattggcattggctttccctggtgttgtatcctgtaggaagaattgttacttacctttcaatggggatgctgaaattgcttggcctaaaaggaagaagtgagccatatgtaactgaagatgagctaaaa

SEQ ID NO: 245788 - DNA, 369 bp, Glycine max
acccacgcatcagcccacgcgtccgttagaattaaaaagcgtgaaggacagtgataggtttggtttggaaggaagaagaaaatgaaggccatagtgataacgaggccaggaggtcccgaagtgctccaacttgaggaagtggaagatcccctagtcggagacgacgagcttctcatcggagtccacgccacttcccttaacagagccgatacctttcagaggaaaggctcctaccctccccctaagggcgccagcccttacctcggtctcgaatgttccggaactgtcctttccctgggtaaaaacgtttccagctggaaaatcggtgatcaggtgtgtgctcttctcgccggaggcggatatgccgag

SEQ ID NO: 245789 - DNA, 424 bp, Glycine max
gacccacgcatcaatgcacacgtcagaaaatgtggtttcttggttggaaagggcaatcggggttctcagcgtcctccacagccgaacaggtcactcaagggattgatggaaacgttctcacagccatcgtcacaggagcaacaagtggccttggtctggaaaccacccgggttcttgcattgcgcagtgtccatgttgttatggcagtaaggagtgtggacagtggtaagaatgtcaaagaaacaatacttaaggaaattccctccgctaaaattgatgtcatggaattagatctaagctctatggcatcggtaacgaaatttgcatcagattttaattcttctggtcatccactcaatatcctaatgtaagaacttttaattctatctgttttagatatcttgtaattaggtaatgtttttgt

SEQ ID NO: 245790 - DNA, 386 bp, Glycine max
  unsure (1)..(386): unsure at all n locations
aattgncgggccgacccacgcatcagcccacgcgtccgcccacgcgtccggggctatggcatttgatgtagaatatgcaaggtggctggaagagcagaatcgacaaattaatgagctaagagcaggtgtacattctcatgcaggtgatacagaacttcgcatgattatcgatggtataatggcacattatgatgagatatttaggctgaaggccaatgcagctaaggctgatgtcttccatttgctgtctggaatgtggaagacaccagcagagaggtgttttctatggcttggtggttttcggtcatctgaactcctcaagctcctggtaaatcaattggaacctctgacggagcaacagttagtgggtatcatcaacttgcagc

SEQ ID NO: 245791 - DNA, 392 bp, Glycine max
gacccacacgtcaggccaattgttaggatctccctcaggttatgttggttatggagagggtggcgttttaacagaagcaattagaagataactattcacactgttattgttggatgaagtagaaaaagctcatccagatatattcaacatgcttcttcagattttagaagatggtcaacttactgattctcagggtcggagagtttcagttaatgatgcactggtggtgatgacgtcaaatgtggggtcgagtgccattgctaagggtcgacacagctccagaggtttcttgattccagatgataaaacaatatcatacaatggcttgacatcgatggtaattgaagaactgaggtcatattttcgtctagaactgctcaacaggatagatg

SEQ ID NO: 245792 - DNA, 381 bp, Glycine max
cgacccacgacgtacgaaaaaaagtcaaaaaaaaaaaaggaagaaaaacaaaaagaaaaaaaaaatgaggataggggtggtagaggatgtaggactcactgtctacgttctcgtgaagtcaaagttcttcgacagtgtcagtgaaatttaattccagggcagtggctgtcgtttttcaacattgggacagggaagacgttgcccattttaatcgcagtcgacttgatgaacatgtcgctagctgtagtagtagtaaacaggaccgcgccgatagcgattcccaagacttgcactgtctcaacggaaaaggcgacgcggattgtcccggtacatgcagcgtaaccgctgtggttgttatggtcagcgtgaccgtgacatttg

SEQ ID NO: 245793 - DNA, 427 bp, Glycine max
  unsure (1)..(427): unsure at all n locations
cacgcgtccagctattcctccctcctcacaaacttcactttcttcttcttcattaatgtctcacttcaagggcaagtaccatgatgagcttatcgcaaatgctgcgtacattggcactcctggaaagggtattcttgctgctgatgagtcaacagggacaattggcaagcgtttggccagcatcagtgtanagaacattgaatccaacatgcgagctcttagggagctgcttttcactgctcctggtgttcttcaatatctcagtggtgtcatcctctttgaggaaaccctctaccagagcacagctgcatgcaagccctttgtgaatgtcttgaangaagctggtgtgcttcctggcatcaatgttgacaagggcacagtcgagcttgctggaactaatggagaaaacaccactcatggtctagat

SEQ ID NO: 245794 - DNA, 420 bp, Glycine max
aatgtccggctcgacccacgacgtacgcccacgcgtccgcccacgcgtccgcccacgcgtccgctttatataacctaattgcaaagatgaataccaagcccgttttcttcttgtgcttcctctgtgcactgcttctcatctctgttgtggcaactgagccatccaaagatgagacacaagcagaagaaccaaagacacagccagatgcctggggaagaggtggaagtggggggcatgatggaagctggggacacggtggagactgggggcatggcggaggaggacacggtggaggacatggcggaggaggacacggtggaggacatggcggaggatgcagatgctgcggtcgaaagggctgcaaatgttgctgaagtaaaaatcacaaatatatgaactgaacacactcatatacttgag

SEQ ID NO: 245795 - DNA, 408 bp, Glycine max
cgacccacacgtacgcggacgcgtgggcggacgcgtgggtaaattctgtagctgttgctccaaatgatagtttagtatgtagtggttctcaggatcgtacagcttgtgtttggagacttccagatctagtatctgtagttgtatttaaaggtcataaaagaggaatttggtcagtagaattttctcctgttgatcaatgtgtagtaacagcatctggtgataagacaataaggatatgggctatatctgatggctcctgtttgaagacatttgaaggacacacttcaagtgtgttaagagcattgtttgttactcgtggaacacaaattgtttcttgtggtgctgatggcttagtaaagctgtggactgtaaaaactaatgaatgtgttgctacttatgattatcatg

SEQ ID NO: 245796 - DNA, 385 bp, Glycine max
cgacccacacgtacggcagcaattcacactggtctttgcttctcgttactcatttctcacctaactttctattcttctcagtctcagatcagaaccttagccatggcagcgttccagaagatcaaggtcgccaaccccatcgtcgagatggacggagatgaaatgactagggttatctggaagtcaatcaaggacaagctcattttgcccttcttggagttggacatcaagtagtatgacttaggccttccttaccgtgatgagaccgatgataaagttacaattgaaagtgcggaagcaactctcaagtataatgtggcaattaagtgcgcaactattactccagatgaagctcgtgtgaaggagtttggtctgaagtcaatgt

SEQ ID NO: 245797 - DNA, 349 bp, Glycine max
acccacgcatcagaaacttctcagccacatctgaaagatgtacaagcaaaatctcatagtggttctgctagaagttgcactaaagttcacaagaagggtattgcacttggtaagtcagtggacctcacaaaattcagtgattatggggaattaattactgaattggatcaactattcgaatttggatgtgaattaacttctccacaaaaggattggcttattgtctacactgataatgagggagatatgatgcttgttggtgatgatccgtggcatgaatttgttgcaatggttcgcaaaatttatatctaccccatagaggagattcagaaaattagcccgggtacct

SEQ ID NO: 245798 - DNA, 420 bp, Glycine max
acccacgcatcaggcacaattacagtgactccgcttggttcctcttcttcgatcttcggtttgattctgcgtttgttcacatcatggccaccgcttcagtggcatttaagtccagggaggaccaccgcaagcagattgagttggaggaggcgcgtaaagcggggcttgcgccagctgaactcgatgaagatggaaaggaaatcaatcctcacattccccagtatatgtcctctgctccttggtatcttaatgctgagagacctagtttgaaacatcaaaggaaatggaaatctgaccccaattacaccaaatcatggtacgatagaggtgctaaaatctttcaggcagacaagtatcggaaaggtgcttgtgagaactgtggagctatgacacatgattccaagtcatgcatggaaagac

SEQ ID NO: 245799 - DNA, 402 bp, Glycine max
cgacccacacgtacgcccacgcgtccgggcagaacaaaaccgagcgagttgttgtgactgactcagtgagtgagcgagcgagcgagttactcatggcgaacgcggcgcttcggaacgtgaaggtgctcccgaactcggcgaatatggaggaagcgcgtcaccgagtcttcgaattcttcagaacggcctgcagatcgctaccttccgttatggaaatctacaacctctacgacgtcgtttccgtctccgaactccgctcctccgtcgcctcccagatccgcaacaacatccacgtcaccgatcccaaagtgatcgatatgctgcttttcaaggggatggaagagctgaagaatgttgtggaccattcaaagcagaggcatcatattattggtcagtacgtag

SEQ ID NO: 245800 - DNA, 411 bp, Glycine max
aattccgggctcgacccacgcgtacgcaaaggcccaggccttgaagactgctaaggcagttaagtcaggtgctacctttaagaagaaggtaaagaagatccgaacttctgtcactttccacaggccgaagaccttgaacaaggacaggaaccccaagtaccctcgcattagcgccccgccgaggaacaagcttgatcattatcagatcctgaaataccccctcaccactgagtctgccatgaagaagattgaggataacaacactttggttttcattgtcgacctgcgtgccgacaagaagaagatcaaggatgcggtgaagaatatgtatgacatccaggccaaaaaagtgaacaccttgatcaggcctgatggcaccaagaaggcatatgtcacgttgacacctgatta

SEQ ID NO: 245801 - DNA, 399 bp, Glycine max
cgacccacacgtacgattccattctctctgtgtatttccctacctctcccttcaagatgcagatcttcgtcaagaccctcaccggcaagaccatcacccttgaggtggaaagctctgacaccatcgacaacgtcaaggccaagatccaggacaaggaaggaatccccccggaccagcaacgtctcattttcgccggaaagcaacttgaggacggccgtacccttgctgactacaacattcagaaggagagtactcttcacctcgtcctccgtctccgtggtggcatgcagatcatcgttaagacactcaccggcaagaccataaccctagaggttgaaagctccgacaccatcgataacgtcaaggccaagatccaggacaacgagggtatcccccgga

SEQ ID NO: 245802 - DNA, 408 bp, Glycine max
  unsure (1)..(408): unsure at all n locations
ccgggccgacccacgcgtcaagagaaatctatcaagacaaaggttggagccttttctgttttgaaagaacttgtggttgtattgcccaactgtcttgcagaccatattgggtcactcattccaggaattgaaaaagcattaaatgacaaatcatctacctcaaatttgaagattgaagccctaacatttacaagattggtattatcttcacattctcctgatgtttttcacccttacatcaaggctctttctgcccctgttctgtcagctgttggtgagcgttattacaaggtcactgcagaggccttgagagtatgtggagaacttgtccgtgttgtgcggccaaacattgangggtctggttttgatttcagaccatatgttcatcccatatataacggcattatg

SEQ ID NO: 245803 - DNA, 422 bp, Glycine max
  unsure (1)..(422): unsure at all n locations
gacccacgcatcagcccacgcgtccgcaaaaccagagtggttctagtaatccggtgctgctagaggatgggaactagtgaatggcatatcgagcgaagatctagcttcggcactgaatcccccttagcaagagaggcaggaaatgtgcctgaaactgggtcactctctattgttgtgcttggcgcttctggggatcttgctaagaagaagacatttcctgcacttttccatctataccggcagggattcttaccagcagatgaagttcacatttttggctatgcaaggacaaaaatatctgatgatgaattgagaaaccggttgcgtggctatcttgttccaaacaaaggtgcttcttcccaactgttggaggatgtanagaaatttttacagctgatcaaatatgtaagtggctcctatga

SEQ ID NO: 245804 - DNA, 395 bp, Glycine max
  unsure (1)..(395): unsure at all n locations
aattcncgggtcgacccacgaatcagaagaagatcactttcgttgaggatggagaaagcaagtttgtgttgcacaaaatagaatcagttgatgaggcaaacttgggatacagctatagcgtagttggtggagttgggttgccagacacagtggagaagatcacattcgaatgcaaattggctgctggtgccaacggagggtctgctgggaagctaactgtcaaataccaaaccaaaggagatgctcagcccaacccagacgacctcaaaattggcaaagtcaagtctgatgctcttttcaaggccgttgaggcttaccttttggccaatcctcattacaactgatccaatattcaacttaattatcatcagtgtcttgcttatcatatacaagag

SEQ ID NO: 245805 - DNA, 405 bp, Glycine max
cgacccacacgtacgcaaacatgtccaccgcaacaactcacgtgctcgcttatcccttccctacctccggtcacgtgatccctctcttagacttcaccaaaaccctagtctctcgcggcgtccatgtcaccgttctggtcacaccctacaacgaagccttacttccaaaaaactattcccctcttctccaaacgcttctcctccccgaacctcagttcccgaacccgaagcaaaacaggctcgtatccatggtaaccttcatgcggcaccaccactacccgatcattatggactgggcccaggcccagcccattcctcctgcggctattatatcagatttcttcctcggttggacccacctcctcgcacgtgacctccacgtgccgcgcgtagtcttctccccct

SEQ ID NO: 245806 - DNA, 406 bp, Glycine max
tcgacccacgcgtacgattcactaatcactaccaattgctaaagatatttcactcactggtcacactactaatacatctttctggacatggcttcaactgtctcttacatgcttctacttctccttctagtgatggttgcctttgctggggacttacacaaagactttgacatcacatggggagatggccgctccatgatactaaaccatggagagttactcactctttcattggacagagcatctggctcaggttttcaatcaaagaatgagtatctctttgggaagattgacatgcagctcaagcttgtccctggaaactctgctggcaccgtcactgcctattatttatcttcaaaacgatcaacttgggatgaaatatactatgaatttcttggaaatctga

SEQ ID NO: 245807 - DNA, 431 bp, Glycine max
acccacgcgtcaaaaaaaaactaattgcaaagatgaataccaagccctttttctccttgtgcttactctgcgcactgcttctcatctgtgttgtggcaactgagccatccaaagatgcgacacaagcagaagaaccaaagacacggccagatgcctggagaagtggtggaagtggaggacatggtggaagtgggggacatggtggaagcgggggacacggtggaggctggggacatggtggaggctggggacatggcggtggacatggcggaggatgcaaatgctgcggtcgaaagggctgcaaatgttgctgaagtaaaaaaacacaaacatgaactgaagacacacatacgtgtgtactccatgtaataagtatagtatgtagaattaagaaataaaagcatggaatctatatccgtgctaaggctgtc

SEQ ID NO: 245808 - DNA, 398 bp, Glycine max
  unsure (1)..(398): unsure at all n locations
gaataaatggttaaggcaaaaaggattacggtgataaggaataatcctgcacctttgctggctttatgttggtattgggctacagatggtgtaggatcaaaagatatggttatccttccatataaggacagcttgttattatttagtagatacttgcaacagttggtcatggaatctctaagcaaggagtttgacttgaatggtaatcgggttaatcaaggaattagtgtctatggaaataaaggaagcacagatcagcatgcctacattcagcaactganggaaggtgtgcacaatttttttgtgacattcattgangtgctacgcgatagaccacctggtcatgattgggagcttgaacaagtgtcacatgtggtgactacctgtttggtatgcta

SEQ ID NO: 245809 - DNA, 421 bp, Glycine max
accacgcgtcaaaggcaatggctatcaggttgatggatttggactctccattcttcaacactctgcacagaatcatggatctgacggaggacgccgagaagaacttgaacgctccgactcggacatacgtgcgcgacgccaaggcgatggctgcgactcctgctgacgtgaaggagtaccctaactcgtacgttttcgtgatcgacatgcctggcctgaaatctggggacattaaagtgcacgtggaggacgacaacgtgcttctgataagcggcgagaggaagagggaggaggaaaaagagaaagaagggggaaagtatttgaggatggagagaacgcttggcaagtttaatgaggaagtttactctccctgagaatgccaacaccgatgctatctctgctgtctgccaagacggtgtgc

SEQ ID NO: 245810 - DNA, 424 bp, Glycine max
acccacgcatcaggggttcggaaggtgaagaggagaaaaagactatggagggtttgaagaagagaaagctggagctggacgaagcaggcaacggtgaattggcttccacggaagagcttcgcttcctcattgaacctctcgctaaaccccagctcgtcgatcttcttgctaaactatggtcccaatatccttcaattgcagaagaaataaaaagtattgcaagtgcagatcctgcccatcgaaagctttttgttcgtggcttggcctgtaataccacttcagaaacattgcgtgctgcatttcaagagcacggagaaattgaggaatgagctgtgatctttgataaagtgacaggaaaatcacgtggctatggatttataactttcaaaaatatggaatcaactcagcaagcattgagagccct

SEQ ID NO: 245811 - DNA, 413 bp, Glycine max
  unsure (1)..(413): unsure at all n locations
cgacccacacgtacgggaatacttcattgatgtgaaagctgttcagattgatggaaatgttgtgaacttaaagccttcccttttagctattgacaacaagggaaatgggggaaccaaactcagcaccatgagtcctttcactgaattacaaacaactgtctacaagactttcattcgagatttcatcaagaaggcttcggacagaagattaaagagggtggcatcagtggcaccatttgaggcatgttatgattcaaccagcattagaaattcctcaactggactagttgtgccaactattgatctagtgctgcgaggtggagtgcagtggactatttatggagccaattcaatggttatggcaaagaaaaatgtagcatgtcttgcaattgttgatgganggacagagccta

SEQ ID NO: 245812 - DNA, 307 bp, Glycine max
gttttctttcgcttgttcgtttgtttaattcaataaaggaaattaggcatgaccctcttgttgagtatgctctgcctatttgaaaatttccacacctcttttaattgtcgtaatgatgtgtgaagtgtgtgttattttaaaaaaaaaaaacaaaaaaaaaaaaaaaaaaaaagaaaaagaaaagggcggcagatcaaaaagagttaaaactaaggtaagcatgcatacgaaatcaaaaatcttcgatagtgtaaactagtctcaattgacaggcattcgttttacaccgatcttgattgggaaaaac

SEQ ID NO: 245813 - DNA, 422 bp, Glycine max
aattcccggctcgacccacacgtacggaaagaatgaacaacaacgaaatcggtggaacgcgtcagtttaaggatatacttgatgttttgttggacatacgcgaagatgacagttctgaaatcaaattaaccatagagaacattaatgccttcatcatggatatatttgttgccgggactgacacgtcagctgcaaccatggaatgggctatggcagagttaatcaacaatccatgtgtgttggagaaggcaaggcaagagatagatgcagtggttggaaatagtagaataatagaagaatcagacattgtcaaccttccttacctacaagccattgttagagaaacacttaggattcacccaggtggtccattgattgttagagagtcatcaaaaagtgttgtggtttgtgggtatgaaatt

SEQ ID NO: 245814 - DNA, 389 bp, Glycine max
aagttttggcgctgtattgtatgagatcctcacaggaagaaggtcattggaaagaaaccgtcccacagcagaacaaaagcttctagattgggtcaaacaataccctgccgacaccagcagattcgtcatcataatggacgctcgtctcagaaaccagtattctcttcctgcagctcgcaaaatagctaagttggctgatagctgcttgaagaagaatccagaagatagaccctccatgagtcagatagtggaaagcttgaagcaagcattgcaatattcagacactacttctcaggacattgctgaatcctcctcctcatctcgttctaaattggtccgaaaaaagtaaatatggagctttttttttttttgaaggacttgtgggaaat

SEQ ID NO: 245815 - DNA, 437 bp, Glycine max
gggccgacccacgcgtcaacccacgcgtccgcccacgcgtccgcccacgcgtccgcccacgcgtccgcggacgcgtggggttgttggaaaaggccaaaaactatgttgcggagaaagtcaccaacatgcccaagccagaggcgagtgtcaccgacgtggacttcaagcgcgtgagccgcgacagcgtcgagtacttggccaaggtctccgttcagaacccttattccacttccattcccatttgtgagatcaagtactccctcaaaagtgctggcagtggtgaagggagatagcagcaggaacaatacctgacccagggtcattgaaggcaagtgacacaacaatgttggatgtgccagtgaaggtgcctcatagcatattactgagcttggcaaaggacattggtgcagattgggacattgattaccaattggata

SEQ ID NO: 245816 - DNA, 294 bp, Glycine max
aaatttccgcctcctcccaatcccggaaccccccaatcaacatggtgaacgttccgaaaacaaagaagacatactgcaagagtaaggagtgcaggaagcacaccctgcacaaggttacccaatacaagaagggtaaagatagcattgctgcccaaggaaaacgccgttacgatcgcaaacaatctggttatggcggacaaactaagcccgtcttccacaagaaggctaagaccaccaagaagattgttctgaagttgcaatgccagggtttcaagcatgtctcccaacacgcta

SEQ ID NO: 245817 - DNA, 381 bp, Glycine max
cgacccacgagtacgcagctatacttgttccttttgaaggttagaagtgctacaatacaaacaatggcagctactcaggaagatgtgaagcttttgggtattgtgggaagcccatttgtgtgcagggtccagattgcccttaagttgaagggagttgaatacaaatttttggaagaaaatttgggcaacaagagtgatctgcttctcaaatacaaccctgttcacaagaaggttccagtgtttgttcacaatgagaagcccatagcagagtctcttgtgactgttgaatacattgatgagacatggaagaacaaccccatcttatcttctgatccttaccatagagccttggcccgtttctggtccaaattccatgatgat

SEQ ID NO: 245818 - DNA, 347 bp, Glycine max
cacgcgtcagagagtctagaaacaacacaacacaacgcgaatggctacggcgctggagaagaaagcgaaggaggcattcttcgacgacgaattcggtctggccgtcgatctctactctgaagccatacgattggatccgaacgacgccaatctcttcgcggacagagcccaagcccatatcaaactcaacgctttcactgaagccgtttccgatgccaacaaatccatccaattaaacccttccttgcccaaggcctatcttcgtaaagccaccgcttgtatcaaactccaagaatatcacaccgccaaggtagcgcttcaaaacggtgccgcttttgcccaagacg

SEQ ID NO: 245819 - DNA, 400 bp, Glycine max
  unsure (1)..(400): unsure at all n locations
gaggcacgcgtcaacccaaacgtccggtgacgctggaacttcatccaagctgttgatcaagggaggcaccgttgtcaatgctcaccaccaacaggttgccgatgtttatgtcgaagatggtatcattgtttccatcaaatccactattatggttggagatgaggtgactgtcatagatgccactggcaagtttgtcatgccagggggcaccgatcctcacacccacctagagtttgaatttatgggtacagaaactgtagatggcttcttcggtggtcaggctgcagcattagctggtgggacaacaatgcacattgactttgttataccacgtaaaggaagtttaacggctggtattgaagcctatganaagaaggcaaggaagtcttgcatggattat

SEQ ID NO: 245820 - DNA, 328 bp, Glycine max
cgactcaagcgtcagataatagagaggcagctaagaaatgcaggcttaagatcaaagcacatgttcaacagctaaagtcgaatacgattatgctgaatcagcttgaacaagagctacaacgtgctaaaactcagggcatgttgttgggtgtatgcacacttttgggtggagagcaaggcgttccggtcataactactactaggattacagatgcagcagtgttttaagtccaatcatcgtgacagatcttttagcaacacatcctaggattggcacggaggctagagatcttcgtcgtgcctccagttcacgctcttagcactgtttg

SEQ ID NO: 245821 - DNA, 420 bp, Glycine max
cggctcgacccacgcgtcagcccacgcgtccgctcaaaagtgatattcttaagaatcctgttgtcacagagattgcagagagattggggaagacaccagcacaagttgcccttcgatggggcttgcaagcaggtcatagtgtgcttcctaagagcactaatgagtccagaatcaagggaaattttgatatctttgactggtctattcctcaagatttgatgaccaagatctctgaaattaagcaggaaaggctagttaaggccagtttttttgttcacgagacctatggtgcctataggagcattgaagacttctgggatggtgaactctgagcaatatgcatctttgagacgttgaaaaatacattgctcctagagcaaatttattctgccttatacccactagttgtagtgattcaag

SEQ ID NO: 245822 - DNA, 357 bp, Glycine max
taatagggatgcagctaagaaaagcaggcttaggataaaagcacatgttcaacagctagagtcgagtacgattatgctgaatcagctgtgaacaagagctacaacgtgctacaactcagggcatgttcgttgggtggaggcgcacttttgggtggagagcaaggccttcctgtcactatgaatactattagcacggatgctgcaatgtttgacgtagaatatgctagatggcaagaggagcaccaccgcatactgtgtgagctaagagctgcagtgcaagagcaccttcctgaaaacgagcttagactgtttgtggacaattgtttggcgcattatgatgaagtgatgaacctcaag

SEQ ID NO: 245823 - DNA, 395 bp, Glycine max
  unsure (1)..(395): unsure at all n locations
gacccacgcgtcagcccacgcgtccggttgaaggaaatggctgaagcacaactacgagaccagcatggcaaccctgtcccactcaccgatcaatacggtaatccggttatcttaactgacgagcgcggtaatcccgtccaactcactggtgtcgctaccaccgctaccggcacagcaggttctgggtttgggtcctatggtaccggtgcttacggtggtggtgcaagtgcaaccaccgttgcagatcttttggcaacccaaccaaggagtggcagggaggctagagagcttcgtcgttcctccagttcaagctctagctcgtctgaggatgatgggcaaggtgggaggaggaagaagggagtgaaggataanataaaagagaaactaccaggggt

SEQ ID NO: 245824 - DNA, 280 bp, Glycine max
gactctaggattgctctggttggaccaatggagctgggaagagtacgttactgaagctaatgactggtgatttggaacctctagatggcatggttcgacgccacaatcaccttcggattgcacaatttcaccagcacttggctgagaagctagacttggaaatgtctgccctccagtatatgataaaagaataccctggaaacgaagaggagaggatgagagcagccattgggaaatttggactgtctggcaaagcgcaggtcatgcctatgaagaattt

SEQ ID NO: 245825 - DNA, 320 bp, Glycine max
gaaataaccgggaagccacacaaaggtaaagatgtaaccgaaaggtttgaagaagccccaacaaagttttaaggccttgtgcctaagcaagcacaatttcctaacaacacaacaaactcaagtggctgatctattaattccattgagagagttaacccacacagatgctaatgttgcataccacttgtgggtactggtatttccaattgtctgggttacattgaataaagacgaacaagtaacacttgctaaaccaatgattaatcctttgtccaaagaattacataagaggcagcaagccaacagaccaaatgttgtgc

SEQ ID NO: 245826 - DNA, 401 bp, Glycine max
acgcgtcagggcgaaggagatagtgaaagagcttcttcctctaattcgagtgtacaaggatggcagcgtggagcgtcttctaagctctgaaaacgtggcagcctcccctgaagatccccaaactggagtctcatccaaagacatagtcatcgcagacaacccctacgtctccgctcgcattttccttcccaaatcccaccacactaacaacaaactccccatcttcctctacttccacggtggcgccttttgcgtcgaatccgccttctcctttttcgtccaccgctatctcaacatcttggcctcagaagccaacataatagccatctccgtcgacttcagactcctcccacaccaccctatccctgctgcctacgaagacggttggaccaccctcaaat

SEQ ID NO: 245827 - DNA, 409 bp, Glycine max
ccggctcgacccacgcgtcagcagagttctcggcgcagtttgccttcgtttgagctctgttctgttctgtgcctccacaaaccaaaccaggcacaagtaatacggtttaaccaaacaaactaaattaaaccaagtgaaaggaagtagtcaagttaaagaaaatggcgaagtcattgagatcgaagagggagaagaggctgagggctattccgaaggagattgttgaacctttctatgacaagaaagaagctgctaagcttgctgcccaagaagctgcccttgccgcccctaagctggaggttccttcgaaaccaaatactgctatggaagcatccgcttccactgacaacaccaacatggatgtggaggtggctgatggaagccaaagcatggcttccttaaagcctgt

SEQ ID NO: 245828 - DNA, 423 bp, Glycine max
tcccgggtcgacccaagcgtcaaataacggagagtaataggactagatgatcatattgacctgtatattcataacctgttgattatttatttgtttgttttttattcatgccaggcccaggcatgtatagtcaagcattcagtttctgtgagaaagttaaggggaagttgagcagttcagatgattaccagacattcttgaagtgccttcatattttcagcaatggaataattaaaaggaatgatttgcaaaatttggtaactgatttacttggaaagcattcggatcttatggatgaattcaatgatttcttggagcgttgtgaaaatattgatggattccttgctggtgtcatgagtaaaaagtcactgtctactgatgctcatttatcaagatcatcaaagttggaagaaaaagacaaag

SEQ ID NO: 245829 - DNA, 431 bp, Glycine max
gacccacgcgtcaggaagaatattactaatggctaaaatatttcctacatgtttctcggccaagatgctttttgatagtagtattgttttacagggttgttgacaagtatttgtttttaccaaatttttggccacagaaataaaatatggcgtgattagagtaaaatgatttaaaaaatgaataaagaaaataacttggattgagctttggtcttttgcaattctaaatatagttcatttctgatagttgaatgtggtatagatgactaggcgttagtcaaataattaaatatgtaaatatttaattttataaaaataagagatgttttaattgtcaataataaatattttatttaaagaatattaaaatttaaaaatattatataatgaagaaattaaagatgtagtttttaatatcgagaaaaaataac

SEQ ID NO: 245830 - DNA, 404 bp, Glycine max
acaaacattatgtagctaggatgagcaagttactactcattcgtgttgctgggttcgtggcaacctttgtcaccatggtgatgatgatggtgcccaaaaacgtgagtgcccaaaacataggtgatgacatcgtcacacaagacttcttcaacagcataatcagtcaggctgatgatggttgtgcagggaagaacttctactcacgagatgctttccttaatgctcacaattcctacaatgagtttggtatgcttggtaatcaggatgactccaagcgtgaggttgcagctgctttcgcccatttcacccatgaaacaggacatttttgctacatagaagagattaacggtgcatcaggggactactgtgacgagagcaacaccgagtacccatgtgcccctaac

SEQ ID NO: 245831 - DNA, 391 bp, Glycine max
  unsure (1)..(391): unsure at all n locations
accgacgcgtcaacccacgcatccgcggacgcgtgggaaaanaatgtttgcntgatgccattgcccgtatggaaagggcagctgaacaaaggaaaagcaattgcagcagctgttgaaggagttgcaatacactggggaacatcagactccaatacatcagtcattgagactctgcgggagcaaatattcaagccatcattgtccacaatcattcccgagaattcaaaacttgtaacagtatcaccaacagattcagttctgacagcaacaaagatgatggttgaatttcgtgcaagttgtgcagttgtgacactttaatgacaaacctcgtggcatctttacttcacatgatattttgttccgggtaagtgcccacatctttctccagaat

SEQ ID NO: 245832 - DNA, 278 bp, Glycine max
  unsure (1)..(278): unsure at all n locations
gacgacgcgtcaatatggcatggccagatacgctgtcatatgccagaaaaagggctgggtccattgttgagcctgagatccntgttgatggatctcatgacattcacaagtgtgctgccgtcaccgaacgtgtccctgcagcatgctacaaagctttgaatgatcaccacgtccttcttgaggggtacctattgaagccaaacatggtcacccccgggatcaaatctgctaagggttcccctcaggttggtgcggancacaacggttaaagcccttca

SEQ ID NO: 245833 - DNA, 402 bp, Glycine max
gcgtcaggcagaggctaccctaatcctctcctcttcctctctactaatttcagctatggccgacgaagctgtggttgttccagatcccacccagatcgatgtcaagctctttaaccgctggagcttcgacgatattgagtggcgacatccaagcacgccacgtatgtgcctcacaccgccggcaggtactcggtgaagcggttcaggaaggcgcaatgccccattgttgagaggctgaccaactctctcatgatgcacggtagaaacaatggcaagaaactcttggctgttaggatcatcaaacatgctatggagattattcatttgttgactgaccagaaccccattcaggttattgttgaagctgttgtcaacagtggtccacgtgaagatgcaacaaga

SEQ ID NO: 245834 - DNA, 399 bp, Glycine max
acgcgtcagcccaagcgtccggcagtgttgattccattcttccagcaactcactggaatcaatgtcatcatgttttacgcgccggtcctgttcagctccatcgggtttaacgatgatgctgctctaatgtcagctgtgatcaccggcgttgttaatgttgtcgcaacttgtgtctcaatttatggtgttgacaagtggggtaggagagcccttttccttgaaggtggagtccaaatgctcatttgccacgctgtagttgcagctgcaattggagcaaagtttggaactgatgggaacccacgtgatttgccaaagtggtatgcaattgttgtggttctcttcatttgcatttatgtatcagcatttgcctggtcatggggtcccctaagttggttggtg

SEQ ID NO: 245835 - DNA, 395 bp, Glycine max
acgcgtcagcccaagcgtccgggatagggttaaggccatggagcgcatcatctgcgccaagtacaagctaggtcgcaagatcggaagcggatccttcggcgaaatctacctcgcgacgaatattgataccttcgagatcgtcgccgtcaagatcgagaacggtaaaacgaagcatccacaattgctttacgaggccaagctctacaatattcttcaaggaggaagtggcatcccgaacataaaatggtgcggcgtagacggggaggataatgtgcttgttatggacttgctgggacctagtcttgaggatctttttgtctactgtggaagaaagttctccctcaaatctgtgttaatgttggccgatcaaatgatgactagaatagaatatgtgc

SEQ ID NO: 245836 - DNA, 413 bp, Glycine max
gacccaagcgtcagcccacgcgtccgcgctctgtttctgtctctgtgtttgcggctgaggattccgaacgagcgaccttcttcgtttctcgcaaagtttaagtcatcatgggtaaggaaaagactcacatcaacattgtcgtcattggacatgtcgactctgggaagtcaactaccactggtcatttgatctacaagcttggaggtattgacaagcgtgtgattgagaggttcgagaaggaggctgctgagatgaacaagaggtcattcaagtatgcctgggtgcttgacaagctcaaggctgagcgcgaaagaggaattaccattgatattgctttgtggaagtttgaaaccaccaagtactactgcacagtcatcgatgcccccggacatcgtgactttatcaagaacatg

SEQ ID NO: 245837 - DNA, 415 bp, Glycine max
gacccaagcgtcagcccacgcgtccggccaaacgtttcctagccgaaaccctagctagctctttcttaatccataatctctcttctcttcttctctttctatctgcaaaacaaaaatgtctcacttcggacgttcgggtcccccagacatttccgacacttactctcttctcgttctcaacatcaccttccgtaccaccgccgacgacctattccctctcttcgacaagtacgggaaggtcgtcgacatcttcatccccaaggatcgaagaactggtgagtcaaggggttttgcattcgtgcgttacaagtatgctgatgaggctcagaaggccgttgagaggctcgacgggagaatggttgatggtcgtgaaataaccgtccagtttgcgaaatatgggcctaatgctgagaag

SEQ ID NO: 245838 - DNA, 409 bp, Glycine max
ccgggtcgacccaagcgtcagcccacgcgtccggctatctctcaggacaatggtcttgtgccaatcgttgagcctgaaattcttcttgatggagaccacccaattgagaggacgctggaagtggctgagaaggtctggtcagaagtctttttctatttggctgaaaacaatgtcctttttgagggaattttgctcaaacctagcatggttacacctggggctgaacacaaggaaaatgcttctccagaaaccattgccaaatatactctaatcatgcttagaagaagagttcctcctgctgtccctggaatcatgtttttgtctggtggacaatctgaagtggaagcaacactaaatcttaatgcaatgaaccaaagtcccaacccatggcatgtttcattctcatatg

SEQ ID NO: 245839 - DNA, 490 bp, Glycine max
  unsure (1)..(490): unsure at all n locations
ggttncngctaacgtaanaaggcgtatcgtcgccagcggctcaggccaaggctgagactgcagagatgcgagcacacgcgaagcattaccctctgccgttaccgaaaaacgggtgacaccggcgattcggcgcgtgagttcaccatgattcagtcagcaccgctgatgctgctggctgaccctgatgagttcgtgtccgtacaactggcgtaatcatggcccttcggggccattgtttctctgtggaggagtccatgacgaaagatgaactgattgcccgcctccgctcgctgggtgaacaactgaaccgtgatgtcagcctgacggggacgaaagaagaactggcgctcccgttgtggcaaagcttgaaagaggagccttgaataacacgaaggcctaacctttggcaattggcccctcctttttacaaacgtcctttaacggggaaaaacccctggcgctttacccaaaacttaaaccgcgcttggca

SEQ ID NO: 245840 - DNA, 370 bp, Glycine max
  unsure (1)..(370): unsure at all n locations
gacgacgcgtcaaatacacaannacccaacatgaaaacccttaacaanagcctcacttattttattccctctcttgttcccttccctattcaagcattcccatgctgcaagaatcgctatctaatggggccaaaacggtggaaaaagcaccttaacagaagcttgcaacactagaaactaacaatatgtgaacattaccttcttgtccacttttggcaactggcaaactccaaaactcaaactttcaagttaatgtgaacccaaaaacaatggctgcactgggtttagcaatgacattaaaactttccaagaacttggcatcaaagtgttgctctccccttgttgttgttctggaaactactccctcaat

SEQ ID NO: 245841 - DNA, 389 bp, Glycine max
  unsure (1)..(389): unsure at all n locations
acgcgtcagggagaaatcatgcaacctgactgggacatgttcatagttacaccagcagcagattatcaggcctgcagctcgtgcaattggtggatgtcctatttatgttagtgacaagccaagcaatcacaattttgatcttcttaagaagctggttctcccggatggttcggttctccgtgctcagttacctggcaggccaactcgtgattctctatttgtggattcagccagagataggactagcttgctcaaaatatggaacctgaacaaatgctctggagttgttggtgtacttaactgccaaggtgctggatggtgcaagatagagaagaaaacccgcatccatgatacatctcgtggtacactcancgcctctgtctgcgcct

SEQ ID NO: 245842 - DNA, 415 bp, Glycine max
gcgtcagtaacaatccgcatggttactggtgataacataaatacagctaaagctatagctaaagaatgtggtttacttacagagggtggtctagccatagaaggtccagattttcgtgacttgtctcctgagcaaatgaaggatgttataccaagaatccaggtgatggcacgatccttacctctggacaagcacagattagtaaccaatttgaggaaattgtttggtgaggttgttgctgttactggtgatggaactaatgatgctcctgcactgtgcgaggcagacattggacttgcaatgggcatagcaggaactgaggttgccaaagaaaatgccgatgtcattataatggatgataacttcacgactattgtcaatgttgtcaaatggggacgtgcagtatacataaaca

SEQ ID NO: 245843 - DNA, 293 bp, Glycine max
gcgtcagtctcaatctcaatctattattattattcctcaattaataatgggtgttttcatattcaatgatgattacatatcccctgtggtccatgcaaatcttgacaaggttttagttacatatctcgacaacatcttcccgatggcacatgattccttcaagagtgttgacaatgtttacggaaatagtggcacaggatacatcacgaatatcactttccttgaggatagataattcaagtttgtgctgcatagaatagaaagcattgatgacgctaacttgggatacattt

SEQ ID NO: 245844 - DNA, 406 bp, Glycine max
cggctcgacccaagcgtcaggaagtgactaagattccttgccaaagtaacgagtttgtgagtgaacttcttcgcggtgtgcggttccattttgatacgtttgtcggtgatcttaagtctggagatttagaaaaggcacaacttggtctggggcatagttacagcagagcaaaggtgaagtttaatgttaaccgtgttgacaacatggttattcaagctatcttccttcttgatacacttgacaaggatgttaattcgttctccatgagagtcagagagtggtattcatggcactttcctgagctggtgaaaattgtaaatgataattatctgtatgccaaagttgcaaaatttattgaggataaggcaaagttggctgaagacaagattccagccttaactgacat

SEQ ID NO: 245845 - DNA, 406 bp, Glycine max
gacccaagcgtcaggagaaacatggcttccttaagctccttagtgctgctccttgcagctctaattctagcccctcaagttcttgcaaactatgagaatcccccagtgtacaagcctcccactgagaagccaccagtttataagcccccagttgagaagcctcctgttgacaaacctccagttgaaaatcccccaatttataagcctccagtagagaagccaccagtgtacaagcccccagttgagaaacccccagtttataagcccccagttgagaaaccaccagtgtacaagcccccagttgaaaaaccaccagtgtacaagcccccagttgaaaaacccccagtgtacaagccgccagttgaaaaatcaccagtgtacaaacccccagttgagaagcccccag

SEQ ID NO: 245846 - DNA, 333 bp, Glycine max
  unsure (1)..(333): unsure at all n locations
aattctagggccgaccgacgcgtcaagcacggattagtgctgtttatggtgggacatatatgttgaataagcctgagtgcaaagtagaatttgatgangaangaaaggttgttggtgtcacatcctaangggaaactgcaaagtgcaaaaaagttgtttgtgatccatcataattgccccgcaaggttaagaaagtttgtaaggttgccagaaccataaccataatgaatcaaccaatccccaacactgaagaatcccaatccgttccaattaatttaccacaaaaacactttggtccgaaatccaaccagttactaatttggtggtcaaaaa

SEQ ID NO: 245847 - DNA, 251 bp, Glycine max
  unsure (1)..(251): unsure at all n locations
gcgtcaactcttaactttctcttgttaactaattaaaatgactctcaaaaaaggcctgttccttgttaacgctctaagctgcacctctggcgcaaatgccgcaacgtttgacatcacaaaccgatgctcataccctgtttgggccgcagctgtgcctggcggtggcatgaggctgaactcgggccagtcatgggctttagacgtgcctgcaggaacgacaggggcccgcgtttgggcccgaancggctgca

SEQ ID NO: 245848 - DNA, 412 bp, Glycine max
attcagggctcgacccacgcgtcagaaaaaaaaaaacacaaaaaaaaaaaaaaaaaaaaaaacaaaaaaaaaaaaaaatacaaagtaaaaaaatcaaaacaaaaaaacaagctacaaatgcaacacaagtttgaaatcacaaaacaatgcataaaaaaaagggggggccccccaaaaggttccaaccttacttccccttgcatgcaatttcaaaccccttcaaaagtgtccccaattttcatttcacgggccttcgttttaaaccttcttaactggaaaacccctggctttccccactttaacccccttgcagcaaatccccctttctccatctggcttaaaaccaaaaaggccccccccgatgccctttcccaacatttgcacaccctgattggcaaatggaaccccccct

SEQ ID NO: 245849 - DNA, 400 bp, Glycine max
acgcgtcagaactaattgcaaagatgaataccaagccctttttctccttgtgcttactctgcgcactgcttctcatctgtgttgtggcaactgagccatccaaagatgcgacacaagaagaaccaaagacacggccagatgcctggagaagtggtggaagtggaggacatggtggaagtgggggacatggtggaagcgggggacacggtggaggctggggacatggtggaggctggggacatggcggtggacatggcggaggatgcaaatgctgcggtcgaaagggctgcaaatgttgctgaagtaaaaaaacacaaacatgaactgaagacacacatacgtgtgtactccatgtaataagtatagtatgtagaattaagaaataaaagcatggaatcta

SEQ ID NO: 245850 - DNA, 72 bp, Glycine max
aaaaggttcaaaacgttagtttcccttgcttgcaagttcattactcttctatgttgtcccctagtttcattt

SEQ ID NO: 245851 - DNA, 426 bp, Glycine max
gacccaagcgtcagcccacgcgtccgcccacgcgtccgcccacgcgtccgcaagattcttgcaggtcgaaggagatatatgggtcacaaaagaacaattagaccaaatgcaaagaagcttagcacgatattggcaggaaggcatcaaatggactgggatacctttgccaaaaaggttaagtcatgccagagaggattcatgggagagccagatgagatgagacctggtcgaggtgaatttcatgaatttccaagttcttgcgtgtgcaagagaccatatgtggatgaagaactcagcaaagaggtatatcgttccccaaaactcgttgcaattaaccttactgcaaaagcttattcctcctcgaatggaattagaagaggcaggacatgaagttaacttgaaccatgaggttatccggaagggggg

SEQ ID NO: 245852 - DNA, 412 bp, Glycine max
ggctcgacccaagcgtaaggttcattctctttgcgcagttccctacctctcctttcaagatgcagatcttcgtcaagaccctcaccggaaagaccatcacccttgaggtggaaagctctgacaccatcgacaacgtcaaggccaagatccaggacaaggaaggaattcccccggatcagcaacgtctcatcttcgccggaaagcagctcgaggacggccgtaccctcgccgactacaacatccagaaggagtcaacccttcaccttgtccttcgtctccgtggtggcatgcagatcttcgtcaagactctcactggcaaaaccataaccctagaggtcgaaagctctgacaccattgacaacgtcaaggccaagatccaggacaaggagggaatccccccaaaccagcaacg

SEQ ID NO: 245853 - DNA, 384 bp, Glycine max
  unsure (1)..(384): unsure at all n locations
aaggactcgacgaagaagggtgcgtggaagaaccagggcaccactctgagaagaaacgacgactaagcgtggatcaggtgaaggctttggagaagaacttcgaagtagagaacaaactcgaacctgaccgaaagttgaagctggcacaagaacttggcttgcaaccaagacaagttgcggtttggttccaaaaccgtcgtgccagatggaagacaaagcaattggaaagagattacggcgtcctcaaagccaattatgaatcacttaaacttaactacgacaccctccaacaagaccacgaagccttactcaaagagatanaggaattgaaatcgaagctggtgcaagaagagaacaacaacaacactgaaagcgatgtttccg

SEQ ID NO: 245854 - DNA, 292 bp, Glycine max
gacgacgcgtcaacggagacattggccatggattatcatcgaggagctggtgttgaggttcgtattgctcgaattttcaatacatatggaccccgcatgtgtttggatgatgggcgtgtcgttagcaattttgttgcacaggctattcgtaaacaaccattgactgtatatggtgatgggaagcaaacaagaattttccaatatgtctcagatttggtaaatgggctggtggctttgatggaaagcgaacatgtgagacctttcaacctgtgtaaccctggggagtttacca

SEQ ID NO: 245855 - DNA, 394 bp, Glycine max
cacgcgtcagggataccttgcagcccttgcttgatttcctccgagctcacaaatacaagggccatgctctgatgttaaatgatagaatacaaaccatttccaaacttcagtctgcattggccaaggctgaggattatctctctaagcttgcacatgatacactctattcagagtttgaatatgtattgcaaggaatgggttttgagagaggttggggtgatactgctgaacgggtattggaaatgatgcatctgctattggatattcttcaggctcctgatccttctacactagagacttttcttgggagagtaccaatggtattcaatgttgctatattatctcctcatggctactttggacaagccaatgtcttgggtttgcctgaaactgg

SEQ ID NO: 245856 - DNA, 404 bp, Glycine max
cggctcgacccaagcgtcaggctactctttacaaggccctagttacagatgccgacaacgtcatcccaaaggctcttgattccttcaagagtgttgaaaacgttgagggaaatggtggcccaggaaccatcaagaagatcactttccttgaggatggagaaaccaagtttgtgctgcacaaaatagaaagcattgatgaggcgaacttgggatacagctacagcgtggttgggggtgctgcattgccagacacggcggagaagatcacattcgactccaaattggttgctggtcccaatggagggtctgctgggaagctcactgtcaaatacgaaacaaaaggagatgctgagcccaaccaagacgaactcaaaactggaaaagccaatgctgatgctctcttc

SEQ ID NO: 245857 - DNA, 414 bp, Glycine max
  unsure (1)..(414): unsure at all n locations
cggctcgacccaagcgtcagcccacgcgtccggcaccatttgttacacatccaagagaggtaagggagattcctatagaggttaaggatggtagtcaatccactcctcaagctggtcatgttccatccattgaagatgtcactggaaatgttgatgcccatggtccagatatccatgggactgtcataattgatgatgaagatgacgaaaatattccacctgcccagattgcacatcaagatgagcaaacacacaagatcttggctgacacttcactcaatagcagtgctagacctagtgctcctgaatctgagaatttgccagattatagcaatgacatagaagaagaaatgattcgtgcagccattgaggcttctaaacgggaagctgangaaaattatagaaatcacaaac

SEQ ID NO: 245858 - DNA, 393 bp, Glycine max
aattcccggctcgacccacgcgtacggtaaactcaaagatgaatatgctatgctaaatgaagaatctcgtgagttgactctagagaaaactgatctcagggaagagaaggcttctcttaaatcagatattgacaacttgaataatcagtatcagcagcagctcaggaccatgtttccatggactgcaatggagcattcagttatgatggctccatcatcgtatccatatccagtgccaatggcagtacctcctggtccaattcccatgcagccataccccttctttgctaatcaacatcctgcagtcatctccaacccctgttcaacttatgttccttatttagcccccaataccattgttgaacaacaatccaccctgtacgtatcccctcc

SEQ ID NO: 245859 - DNA, 403 bp, Glycine max
  unsure (1)..(403): unsure at all n locations
aattctaaggccgaccgacgcgtcaacccacgagtccgcttctattaacaagagacctattaatctttctctttccaaccctacgttcacagtcagaatgcactgctgaagaagcttacaagtggagccagggacgtgccatttttgcaagtgggagtccatttccccctgttgagtacgagggcaaagtgtttgtgcctggccaggccaataatgcatacatattccctggatttggtctcggtttaataatgtctgggaccattcgagtgcatgatgacctgcttctggctgcctctgaggctttgggcggcacaagtgagccaagaaaacttttgataaggactcatatacccaccatttcacancatcagaaagatttcagcacacatagctgccaatg

SEQ ID NO: 245860 - DNA, 361 bp, Glycine max
  unsure (1)..(361): unsure at all n locations
aattctagggccgaccgacgcgtcagatttgaacgctatcttgtgggagaaatcctaactgttggtgctgaggctggagaactaaaggctggaacaaaggtactagtttaactaccgtgaaggaggtgaaatagaaatggaaaaatgacaaagagtactattcactgacatgaatgcttatgaggtggatttggggactgatgcaaaacactgcttctgtaaagcaagtgacttattggccgttgtggagtaaggttttggccattgaacgagacanaaagggagcaatcttttttgtgatatctttgataagtgtatttttagtagaataaaccattttttttcattggtgttaaaaatt

SEQ ID NO: 245861 - DNA, 394 bp, Glycine max
acgcgtcagaacaaaaatttacattaagcatagtacaaaacaatgaagaccaaactgctagcatttctcctcttctttgccttgactacaaaaccactactacttggagcagctggagctgctccagagccagtgattgatacatcaggcaagaagctgagagctgatgcaaattaccatatcatccctgcagtgcccttcaccatatgtggctttgttggctgtttcactggtggaggcctttcactagacagcatagatgaatcttgccctcttgatataataatcgagaaagccaatgaaggcctaccactgagattctcaccagttaacaccaaaaaaggtgttattcgtgtctccaccgatttgaacatttttttctctgattctgatg

SEQ ID NO: 245862 - DNA, 338 bp, Glycine max
cgtaagcccacacgtccgcccacgcgtccgggaatatgttcaacacaagatgatggatcaagctgcattctctagagagggggccgaaaaggaatatgttcaacacaagatgatggatcaagctgcacagctgtggagtttgatttctcaaagaggttatctttacgtctgtggtgatgccaacggtatggccagagatgttcatcgaactcttcataccattgtccagcagcaggaaaatgtggactcgacaaatgctgagagctatagtgaaaaaacttcaaatggatggacgttacctaaaggatgtgtggtgatttttctgatcattcctctgc

SEQ ID NO: 245863 - DNA, 376 bp, Glycine max
acgcgtcagaagaaatgagaagattgcatgctatgtcactgtcagaggtgacaaggcaatgcaacttttggagagtggtttgaaggtgaaggaatatgaacttctcagaaggaacttcagtgatactggttgcttcggctttggtattcaggagcatattgatttgggaatcaagtaagttgaagaacccttggatttttatgctgttgtttttactttgcctgaggtaaacattttaggacttaagggaagctgattatttgatatgggttgtggtgtgcacaatgcatattcaaaattttggatatgacataacatatctcttctcctttaagctgcatttcagttttgacttgaaccaaatgttaactggttc

SEQ ID NO: 245864 - DNA, 399 bp, Glycine max
gacccaagcgtcagccaatacccatttcggtaaataatataatcgcaatccttcttcactcgcttcgatggcgacagggttactgaagagggcggcgcagaggctcccctcctcgccggggttcaagctggccctcctccgggcccacgcgtcggaggcccaggcccagcaggtggagcccaaggcccgcggcaccccgaccctcaaaaccttccaaatctaccgctggagcccggagaacccctcaaagcccgagctcaaggactaccagatcaacctaaaggagtgcgggcccatggtcctggacgcgctcatcaagatcaagaacgagatcgacccgagcctcacgttccgccgctcgtgccgcgaggggatctgcggctcctgcgccatgaacat

SEQ ID NO: 245865 - DNA, 431 bp, Glycine max
acgcgtcagcctcaaaccaaaccctcccgaattgaggtgacttgattttccctcttctctttttctctctcgtgagtctcgtccctgaagcgaaattctagaatggcggaagaagctcctgcatctgaaacctccgtcacaatgcctcaaccggcggaagtcatcaccgtcgacggaaccctaacctcttccgagaatgacaagagcggaatctccgtcgatgccgccgcgcacggcggtgaaaagacggtgtccaacgctgaaccttccggtagcgatcctcagaagtctctggagttggcgaacgagctgatggaaaaaggaaacaaggcaattaaggagaacgattttggagaagcagctgataacgtcagccgtgctctcgaaatcagagtggcacattatggtgaacttgctcctgagtgtgtgca

SEQ ID NO: 245866 - DNA, 355 bp, Glycine max
tagcgtcacgaattctagggccgcaggacgtctaagagacgacacggtggttcggcggggaacaagttccggatgtcgctgggtctgccggtggcggcgacagtcaactgcgccgacaatacggcggcgaagaacctctacatcatagcggtgaaagggatcatcgggcgtttgaaccgtctcgcctccgcttgcgttggcgacatggtgatcgccaccgtgaataacgggaaacccgatctgatgaagaacgttttgccagctgtcattgttccccagcgcaagccatggccccgaaatgacggtgtctacatgtatttcgaatataataccggtgttattgtcaatcccaaaa

SEQ ID NO: 245867 - DNA, 349 bp, Glycine max
gtcaggctagtactagtcgcgagcgcccttttttttttttttttttcttttttttttttttttttttttttttttttttttttttttttttttttttttttttttttttttttgaaagggatacgactcaataccaaatgctattggaataaacaccaacctgcgttaatacctaaatttccaacccaatttgggctccacataattaaatacaataaatggaaaaaaatcctttgagaccccttatttccgggcaacctccattttacccttagacgaatgcctagcatcccaaagctaaactcctaacaggacctggtcccccgcgaaatttaccccccataccgtg

SEQ ID NO: 245868 - DNA, 385 bp, Glycine max
acgcgtcaggtacaattaaagcatatgtgtctaacaatttatctcttggagaacggcaaattgctgcacagtttcaagaaattccattggatcttcgtatggtggaagctgagcgaattggatttgatatgctgaaggcaaccgcagttgacaaaattccctcagatttagaagggatggaagcatcaatgcaacatctgctagtcttgattgatgacatctacaaatatgttaacgatgttgtggaagggctagttgcaccagacaacaaaatcgggagatttatatcagatgctgtaggttcccttcccaaattgtccccatcagtttttgataagcttgtgaatgacagtttgcaggatcacttgcttttgctgtatttatc

SEQ ID NO: 245869 - DNA, 421 bp, Glycine max
acgcgtaagtgaaagaatcaagagtgttgaaaacgttgagggaaatggtggcccaggaaccatcaagaagatcactttccttgaggatggagaaaccaagtttgtgctgcacaaaatagaaagcattgatgaggcgaacttgggatacagctacagcgtggttgggggtgctgcattgccagacacggcggagaagatcacattcgactccaaattggttgctggtcccaatggagggtctgctgggaagctcactgtcaaatacgaaacaaaaggagatgctgagcccaaccaagacgaactcaaaactggaaaagccaaggctgatgctctcttcaaggccattgaggcttaccttttggcccatcccgattacaactaatcctcttcaacttacttgttaacactttcctggcttttc

SEQ ID NO: 245870 - DNA, 289 bp, Glycine max
ccccaaggggaaaactcccaaaccaatgaaaaagtgaaagcgaaaattcaggacaaggaaggaatcccaccggaccaacaaagggttatttttgctggcaaacagctagaggatggaaggaccctccctgactacaacatccagaaggagtcaactctgcacttggtgttgcgtcttcgttgggggttttaagctggagctgatttctgtgtgatgttcgatgttggattttcccaaacattttaagaagaaatgtgatgtgtaatgggtctgtaatgaacctttgaaa

SEQ ID NO: 245871 - DNA, 414 bp, Glycine max
aattcccggctcgacccacagcgtcaggcaccttgcagaatcaattttctctctcaatcgtctttcatggctcgtaccaagcaaaccgctcgcaaatccaccggtgggaaggctcctaggaagcaactcgccaccaaggctgcaagaaaatctgcacctaccaccggtggagtcaagaagcctcatcgctatcgtcctggaactgttgctcttcgtgagatccgaaaataccaaaagagcacagagcttctgatccgcaagctcccctttcagcgtcttgttcgtgaaatcgcgcaagacttcaaggtaagttctaaattcaaaaacaaggttttaaatattggttgcggtcctgttgtggtttcattgagaacgttgatattgcagcaaatcactgacattttttgttgatat

SEQ ID NO: 245872 - DNA, 486 bp, Glycine max
  unsure (1)..(486): unsure at all n locations
gggttgagaaacgtctagcggtcagtagccgtttagaattctagggccgaccgacgcgtccgcttaccaggtccagacatagtaaggattgacagactgagaactctttcttgaatccaagggttgtggtgcatggccgttcttaattggtggagcgatttgtctggttaattccgttaacgaacgagacctcagcctgctaaatagctatgtggaggtaaccctccacggccagcttcttagagggactatgggcgcttaggccacggaagtttgaagcaataacaggtctgtgatgcccttagatgttctggggcgcacgcgcgccacactgatgtattcaacgagtccatacccttggccgaaaagttccggttaacctttgaaattcatcgtgatggggatagatcanntgcattgttggtcctcaacgangaattcctagtaagcgcgagtcatcaactcgcgttgactacgttcctgccg

SEQ ID NO: 245873 - DNA, 430 bp, Glycine max
  unsure (1)..(430): unsure at all n locations
acgacgcgtcagcccacgagtccgcccacgcgtccgcccacgcgtccgccttgcagtgccgccaaagcaaccctgccctaaaaattgaacagggcagagagcgagtgaacatgggaacctccgcgaacgctgtcgcaggtggtcgtggcggcgcccctgtccccaaagacgtcgactacgccaattacttctgcacctacgctttcctctaccaccagaaggagatgctctccgaccgcgttcgcatggacgcttatttcaacgccatttttgaaaacaaacgccacttcgctggcaagactgttttggatgtggggactggaagtggcattcttgctatatggtcggcacaagcangtgcgaagaaggtgtatgcagtggaagctaccaagatgtcggaacacgcacgtgcactcatcanagcgaataa

SEQ ID NO: 245874 - DNA, 459 bp, Glycine max
taccggtcaggaattcccgggccgacccacgcgtcagagcagattgaaaagatgcgagaagttgttgaacttcccatgcttcatccagagaaatttgtcaagcttgggattgatcctccaaagggtgttctttgttatggccccccaggaactgggaaaacacttttagccagggctgtggctaataggactgatgcttgttttataagggttattggaagtgagctagttcagaaatatgttggtgagggggctaggatggttcgtgaactatttcagatggctcgttcaaagaaggcatgcattgtgttttttgatgaagttgatgcaattggaggtgcacgatttgatgatggcgttggtggtgacaatgaggttcagcgcaccatgcttgaaattgtgaatcagcttgatgggtttgatgctcggggaaacatcaaagttttgatggcaactaat

SEQ ID NO: 245875 - DNA, 420 bp, Glycine max
  unsure (1)..(420): unsure at all n locations
aattctagggccgacccacgcgtccgtgacaaacccattagagagataccaaaaacttgggctaagcgagtctctaccgaaaacctacagatacccaattgcgtgcagagagctaagctttattctgagggaagcttttcatcaattccccaaaaatttgcaatccatcgtcttccaagacaccctctccgccttccgtctcctcccagaaatacagactcagagtgctgtttcagcagtccacttcctccttcagagtgtagaagcagcactaccaaagcaaaaaaagaatgtggctgtaacagaatttaagcatgcaatggttgctcataagaggcgctgtaaagctcaccaggtagagaaaggttcattgccattgccacaagatattcctgtgctcactttcagttttcntgatat

SEQ ID NO: 245876 - DNA, 430 bp, Glycine max
acggacgcgtccgcccatgagtccggtcgtggtctttagcatttctcaccgactgcgaagggagagcgaataaaaaaaggcaaatcaaattcgagagaaggagagaatttagagagggaaaggatgaagatcacggcgttgttggtgcttaaatgcacgggcgagggatccgatccggtgattctggcaaacgcttccgatgtcagccacttcggctacttccagcgttccagcgttaaggaattcatcgttttcgttggtcgtacagtcgccagtcgcactcctcagggccaacgccaatccgtacaacacgaagagtacaaggtgcacacatacaacaggaatggtctttgcgcgttgggatttatggatgatcattacgcgattcggagtgcgttttctcttctcaatcaggtaatagatgaatatc

SEQ ID NO: 245877 - DNA, 426 bp, Glycine max
ctcccgggtcgaccaacgcgtcagcttgcttcttgcttctattacttgcttctttcttcaccatgtcacttgctgggaaaatcaccactgaaattggggttcatgcaaccgctgcaaagtggttcaacctctttgcaacacaacttcatcatgttcaaaaccttactgatagagtacatggaaccaagctgcatcaaggtgaagactggcatcacaacgagacagtcaaacactggacttataccatagatggtaaggctacaacatgtctggagagtattgaatccattgatgaacagaacaaaacaatcacctacaagctcttcagtggagacattgatcataagtataagaaatttaagttcacctttcaagccattgataaggatcaaggcggtgcttttattaaatggacggttgaatatg

SEQ ID NO: 245878 - DNA, 459 bp, Glycine max
ggtcaagaattcccgggtcgacccacgcgtcagcccacgcgtccgcacaaacacaaacaaagacaacaaccttgtttgtctgcaatcaaaacctttcaagctggcgttcgagaaccaagacacccctgtccgagaaatcaagcccaagaaccggagaatcatgggtgctggaggccctgatgacgaggacaataggtggccaccatggctgaaacctcttctcaaagagagcttctttgttcaatgcaagcttcacgctgattcgcacaagagcgagtgcaacatgtattgcttagattgtatgaacggtgctctctgctctctctgcctcgcttaccacaaagatcaccgtgctattcagataagaaggtcttcataccatgatgtgattacggttaatgagattcagaaggtgttggacatcacaggggtccaaacctacattatcaacagcgcaag

SEQ ID NO: 245879 - DNA, 438 bp, Glycine max
gacccacgcgtcagctgtggttatcatcttcttcttcctctttcttagatctcttctttctctacgccgcacgccgaaaccatggccggaaaaggagagggtcctgctatcggaatcgatctcggaaccacctactcttgcgtcggtgtgtggcaacatgaccgcgttgaaatcatcgccaacgaccaagggaacagaaccacgccgtcttacgtcggattcactgacaccgagcgtctcatcggtgatgcggccaagaatcaagtcgccatgaaccccatcaacaccgtcttcgatgccaagaggttgattggtcgtagattcagtgattcctctgttcagagtgatatcaaattgtggcctttcaaggtcattcctggtgctgctgacaagccaatgatcgtggttaactacaagggtgaagagaagcattttgcc

SEQ ID NO: 245880 - DNA, 436 bp, Glycine max
  unsure (1)..(436): unsure at all n locations
ggtcaagaattcccgggtcgacccacgcgtcagcccacgcgtccgcttccatttccattaaaaagaaaatatcataaatgggtattttcacattcgaggacgaaatcacctcccctgtggctcctgctactctttacaaagctctagttacagatgccgacaacatcatcccaaaggctcttgattccttcaagagtgttgaaaacgttgagggaaatggtggccctggaacaatcaagaagataactttcgttgaggatggagaaaccaagtttgtactgcacaagatagaagcagttgatgaggcaaacttgggatatagctacagcgtagtgggtggtgctgcgttgccagacacagcggagaagatcacattccactccaaattggctgctggtcncaatggaggctctgctggcaagctcactgtcgaata

SEQ ID NO: 245881 - DNA, 327 bp, Glycine max
cgcgtcagctgctattccctacactcctacctaaggagtgtactattatccgcagtttctattctctctagctactttcatgtatgttcaatgctatatatagccttgaattaatgtcaactatgttctaattaatgctatagcttcggtttgtgttaaaaaaaaaaaaaaaaaaaaaaaaaaaaaaaaaaaaaaaaacaaaaaaaaaataaaaaaaaaaaaaaacaaaaaaagaaagaaaaaaaaaaaaaaaaaaaaaaacaaaaaaaaaaaataaaaaaaagaacaattaaaagaaaaacaaaatcataggggggtggttcagaa

SEQ ID NO: 245882 - DNA, 427 bp, Glycine max
aattcccgggctcgacccacgcgtcaggatgcttatagaattggtgaatttccctattggtttcaccagacttggacaacaagcttacagctatgtatctcattagttatactttttcgtgctgttggatgggcaacaattgcctccttggtggtgatagtaatcactgtgctttgcaatactccacttgcgaagttgcagcacaagtttcaaagcaagcttatggtgacacaagatgagagattgaaggcttgttctgaggctcttgtgaatatgaaggtgttgaagctgtatgcgtgggaaaccaattttagaagttctatagagcgattaaggaatgaggagctcaaatggttgtctgcagtgcaattaagaaaggcatacaacacctttctcttttggtcctcccctgtcttggtctctgctg

SEQ ID NO: 245883 - DNA, 383 bp, Glycine max
cgcgtcaggcaaaaacgcattgtgtttctctctttccgcggcgtagatctgagcagtttgggaaaccctaactgctctcaccactctctttgctttttttcctctccgatcaacgacctctttcgtcgccctaagtcatggcaggacttgcacccgagggatcacagtttgatgctcgtcaatatgataccaagatgaatgagttgcttacatctgatggacaggattttttcacatcttatgatgaggtttatgacagttttgatgctatgggcttgcaggagaatctcctgagaggcatttatgcatatggttttgagaaccatcagctattcagcagagaggaatagttcctttctgcaaaggacttgatgttatacaac

SEQ ID NO: 245884 - DNA, 168 bp, Glycine max
cgacccacgcgtcagcccacgcgtccgaaaaaaaaaaaaaaaaaaaaaaaaaaaaaaaaaaaaaaaaaaaaaaaaaaaaaaaaaaaaaaaaaaaaaaaaaaaaaaaaaaaaaataaaaaatcaaaaaaaaaaataaaaaaaataaaaatcaaaaaaagaaattcttac

SEQ ID NO: 245885 - DNA, 435 bp, Glycine max
gacgacgcgtcaggggttcaaaagccatcatggtttctgatgacctgttgcttacctcctctggcgcttgatggccgttttatacggaaatgcaagcaagggtgtttgcagtttgtgattttgaagcccattttagttgttgttacacttatactttatgcaaaggggaaatataaggatggaaatttcagtccaaagcaatcatacttgtatcttacaatcatctatacgttctcatacacaatggctctctatgctcttgttttgttttatgtggcatgcaaggatctgcttcaaccattcaatccagtcccaaagtttattataataaaatctgttgtattcctaacttattggcaaggtgtcttagttttccttgcggcaaagtcagaatttgttaaagatgcagatgaaactgctctacttcaagatttt

SEQ ID NO: 245886 - DNA, 270 bp, Glycine max
acgcgtccagcggtgacagagaccgtggttatggttgttgttgttaccgttgttactcccttgtggtaacgttgtgatggaggctggagaaactaaggcttgatgtcgttgattacggtttatgattatgctcagtaattttagttgtgtttgagtttgagtatctttatggttttgtgtcaccgtggttcctgtttttgaccaatatatctggttgtttatagtccatttaatgaaatgataatcagaaattggagtatcgaagttcta

SEQ ID NO: 245887 - DNA, 219 bp, Glycine max
tatcgtggtggttgtgaccgtggttacccgcgtggtggtgaccgtggctgatgctgctgtacaaactagggcttgatgtcgttgattatggtttatgattatgctcagtaattttagctgtgtttgagtttgagtatctttatggttttgtgtcaccgtggttcttgtttttgatcaatacatctggttgtttatactccatttactcagttgataatt

SEQ ID NO: 245888 - DNA, 347 bp, Glycine max
acgcgtcaacgcgtgatcaacccttacggctccgcagcttacaactttgtcaccatgggcgcttacagaggtggcctcgacacgttcgctatcataggcatcgcttcgaagcctcttcatgtctacgccaaacccacctacgagtgcgcgtggttctcactcgccggcgacaagaaaaaactttccaccaccgtcggttacaagatcctccccgactggggctacggccgcgtctacaccgtagttatcgtgaactgcacattcccgattcccgtaaacgccgacaactcaggcgggaagctcgtcctctttgcctccacctccggccgcggtggtggataacgtac

SEQ ID NO: 245889 - DNA, 434 bp, Glycine max
gaccaacgcgtcagcccacgcgtccggagaattgttcctctcttctcttccattcgtgtacgcgcaaaagaatcatgacgagttcctctgctgccgctcgcaagaatctgagtaagattgcctgcaataggctccagaaagagctcgtggagtggcaggtcaatccccccactggtttcaagcacaaagtcacagacaatctccagaggtaccagattcttctcaatccacaccctaaatattatcgatttcgtgcttccattattcctttacattcctttgctttgtttctctctggaaggtgggtggttgaagtcactggagctcctgggacactttacgctaatgagacgtaccagcttcaggttgattttcctgagaattacccactggaggctcctcaggtgatattcttgcatccggctccgctgcat

SEQ ID NO: 245890 - DNA, 439 bp, Glycine max
aactcccgggctcgacccacgcgtcagcccacgcgtccgcccacgcgtccggcaattccccttccgtttcgtttcgatctcaaaacatgttcttcttcgattggttctatggcattctagcttccctcggtctctggcagaaagaagccaaaattctcttccttggtctcgataatgcagggaagaccacacttcttcacatgctcaaagacgagagattagttcagcaccagccgacccaacaccccacttcggaggaattgagcattgggaagatcaagtttaaggcttttgatttggggggtcatcaagttgcccgcagagtctggaaagactattacgcgaaggtggatgcagtagtttacctggttgatgcctttgacaaagagaggtttgcagaatcaaagaaggagcttgatgccttgctttcagatgaatc

SEQ ID NO: 245891 - DNA, 405 bp, Glycine max
tcccgggtcgaccaacgcgtcaggaagaacaagttcaaaacctcgtccaatcaacggtcgacgcttacggacaagtggacataatgttcagcaacgctgggatccttagtccctcccaacagacggtgcccgaactggacatgtcccaactagacaggctgttcgcggtcaacgtacggggaatggcggcgtgcgtgaaacacgcggcgcgtgcgatgttggaggggcgcgtgaggggaagcatagtgtgcacggcgagcgtgggtgggagccacggtgggccaaatgcgacggactacataatgtcgaagcacgcggtgttggggttgatgcgttcggcgagcgtgcagcttgcggaacacgggataagagtgaactgcgtctcacccaatgggttggcaacgc

SEQ ID NO: 245892 - DNA, 450 bp, Glycine max
aattctagggctcgacgacgcgtcagcccacgagtccgcccacgcgtccgcccacgcgtccgcaaggaagaaattagtcctcaaagtaactattgtgattccaccaacacacaatggccttgttatccaggacaaagttacaaaggcagaggaccaattcaactctcatggaactacaactatgggccagcagggaaggctttgggatttgatgggttgagaaacccggatgtggtgtcaaacaattcattgattgcctttcaaacaggtctctggttttggatgacagagcaaaagcccaaaccttcttgccacaatgtaatggttggaaaatatgtgccaacacaagctgacatagcagctaatcgaactaaagggtatggcctagtgactaacataatcaatggtggacttgaatgtggaattcctgatgattcaagggtgaatgat

SEQ ID NO: 245893 - DNA, 435 bp, Glycine max
acgcgtcagttttgaaaggacgaccctttggtgtttggatcttcaagaaagagagacccttgggatttcgtcaccatgagtctcttcggtcttggaaacagaaaccaaaaaacatttcgtccaaaaaagagtgctccatctggaagtaagggtgctcaacttcaaaaacacatcgatgccacgttgggtagtgggaacttgagggaggctgttaaactgcctcccggtgaagatattaatgaatggctagctgtaaacaccgtggacttctttaatcaagtgaatatcctgtttggtactcttacagaattctgcacgccaagtaactgcccttcaatgactgcaggaccaaagtatgagtatcgatgggctgatggtgttactataaagaaaccaatagaagtgtctgctccaaaatatgttgagtatttgatg

SEQ ID NO: 245894 - DNA, 439 bp, Glycine max
aattcacgggctgacgcacgcgtcagatatttaataataaatttaaatatgcttttgatttgtaatgaattaacatattttgttttaaatttttaataatttcttttctttgcttcgagtttcaaaataaaacaaaagaaaattgactttggtcattgttatttttagtttagacaatttactgtatatatttttgtttttgtcactagaatatttaggtcatttgttattagtttctatcaaatacttttttaaaaaaattaattaataattaattaaatattataaggattataatataacatagatatattacaaggattaaaacacaataacatatattaaaaacataattttatttaataaaaatctcaatatatagaaaaattataaaaaatgtaaaataaaattcattaattaacaatgaaacaaaacatat

SEQ ID NO: 245895 - DNA, 442 bp, Glycine max
tcccgggtcgacccacgcgtcagcgagaacaaaaaaaaaaacgtgattcgctcttctcttcgaataaaccacaaaaccaacaaacgagaagaggagtgagagaagatggggttgtcgttcacgaagctgttcagcaggttgtttgcgaagaaggaaatgaggattctgatggtaggtctcgatgctgctggtaagacaaccatcttgtacaagctcaagcttggagaaatcgtcaccaccatccccaccatcggatttaatgttgagactgtggagtacaagaacatcagcttcactgtgtgggatgttggtggtcaggacaagatccgtcctctgtggaggcattatttccagaacactcagggtctcatttttgtggttgatagcaatgatagggatcgagtggttgaggcaagggatgagttgcacaggatgttgaatg

SEQ ID NO: 245896 - DNA, 456 bp, Glycine max
ggtcaagaattcccgggtcgacccacgcgtcaggagaagtgaatgctgagcttcttgacacccaagtgaatcctgctgtgtgggaaattagtggacacatggttttaaagaggaggaaggattatgatgaggcgtctgaaggcaatgcttggaggcttcttgctgaggtgtccctttctcaagagaggtttcaagaagtcaatgatcttgtttttgaagccattggctgtggtgaattggaggatgtcaatgttcaaagtgtcaaaaaagaagttgatgcagtcagcacaagcgaacaccctactgtggtggtggtggctggttcacaagaatgtgtggttctacagtaacaaggctcttgtattttgaacaaattcagaaaatctgcagtgttttaagaataattgctgaaatgtgtcaccgtttaagtcatactattgccttgtgcttgagcct

SEQ ID NO: 245897 - DNA, 443 bp, Glycine max
aattcccggctcgacccacgcgtcaggcagttgagactgaccaaggccttcacatggtttacatgcatgctgggaccaatccctttgaagtcatcaatcaagctgtcaaggctgtggaaaaacacatgcaaacttttcttcatcgtgagaagaaaaggttgccatcttgtcttgactggtttggatggtgcacatgggatgctttctatactgatgtcacagctgagggtgttgaggaaggcctgaaaagtctatcacagggaggtacacctccacgattcctcatcatagatgatggttggcaacagattgaaaataaagcaaaggatgctactgaatgtttggtacaagaaggagcacagtttgctactaagttgactggtattaaagagaatactaaatttcaaaagaaattacagaacaatgagcagatgtcaggtctg

SEQ ID NO: 245898 - DNA, 442 bp, Glycine max
aattcccgggctcgacccacgcgtcagctcatcaagtccaagaaccaacctaccttttgcaatctcaattcaatggcgtcctctctcattgcgaagcgcttcctctcctcttccctcctctccaggtccctccttcgccccgccgcttccgcttcccaccgctctttcaacaccaacgccatgcgccagtatgacaaccgcgccgacgaccacagcaccgacatcgatcgtcactccgaacgctctttccctagcactgcgcgccgcgacgatatcttctcaggtagttgtagtcgctctctccctaacctcgcactaaccgattctcttaattcttctattttttatgtagtttagttgattcaatcgtggttttaaattgcgttgccgcaattgtccaaatctataaaaaatttatggctcaccgaaagtgcaatcgcaa

SEQ ID NO: 245899 - DNA, 389 bp, Glycine max
gacgcacgcgtccgcccacgagtccgcccacgcgtccggggaccgatcaggtcaaagaatgagcttcagaatctgcctcctgttcctcccgtagatgcgattttggaaccacaccatcaaacggtgccagttggaattgttatgtcgactcttggtgctcaagtcatcgtggaaggagtggagaagcatgaccctcttaatgagggttctattctttggttgactgaaagccaaaaaccactaggtttaattgatgaaatttttggaccagtcaagaacccttattatgttgtgagatacaattctgaaagtgaagtccccacggggatcaatgagggaaccttgatctcctttgttcaagaatttgctgatcacgtgattaataacaa

SEQ ID NO: 245900 - DNA, 428 bp, Glycine max
acgcgtcaggcccgaaggctcccatggcatctatccagagcctcgtgcacttaccacttctgagatatctgaaatagtgcatcattatcgccaagcagctattaatgcaattcgagcaggttttgatggaatcgagattcatggagcacatgggtatctcattgatcaattcttaaaggatgcaatcaatgatagaacagatgaatacggtggaccactagaaaaccggtgcaggttcttaatggaggtagttgaagctgttgtctctgccattggagcggaaagagttgctatcagaatttcaccagcaattgatttcaatgacgcctttgactctgacccacttgggctaggcttagcagtgattgaaagactcaacaatttgcagaaacaagtgggcacaaaactcgcttatcttcatgttactc

SEQ ID NO: 245901 - DNA, 374 bp, Glycine max
  unsure (1)..(374): unsure at all n locations
cgtcagggagatatggcacagcactagatcatggtgtcgtggctgttgggtatggtacagctaatggtcatgattattggatcgtaaggaattcatggggtcctagctggggagaagatggctacatcaggttagaaagaaatcttgctaacagcagatcaggcaagtgtggaattgcaattgagccatcttatccccttaagaatggtccaaatccacctaatcctggaccatcacccccttcacctgtgaagccaccaaatgtctgtgacaactactacagctgtgctgatagtgctacttgttgctgtactttccgntttcggaaatgcttgctttgagtggggttgctgtccccttgagggtgctacctg

SEQ ID NO: 245902 - DNA, 396 bp, Glycine max
ggtaaagaattcccggctcgacccacgcgtcagcaattctaacatacttttctttcttttttttcccctctttaaaagtctggcttttggtcctttgattcccaacttcacttgtcacatatcatattatgaagctcacaggtttcctgcaagcggtgactcttgctttggtgttagccaccgtctctgcatcagatcctgatcctcttcaagacctctgtgtcgcagaccttgcttcagcggttaaagtgaatggattcacatgcaaagatgctgccaaggtaaatgcgagtgatttcttctcagatatactagccaaaccatgtgccacaaacaacacctatggctccctagtgactggagccaacgttcagaatatcccaggactcaacaccc

SEQ ID NO: 245903 - DNA, 440 bp, Glycine max
tcccgactcgaccaacgcgtcagcccacgcgtccgcccacgcgtccgctctgatcagaattggagtttcacctcagtaatctgcataataaagatgtggtgtattcgaggattacatagattaccaaggtgaatctctaattttgattagagaacaacaccaactatatcaaggttttgttcttttccagttgaggttaccaatactcttgtatgattgtctttgtatgaatgaagatggatgatattggcattgctgttacactgacaatggtttgaatggattttatgcaggcaagccctttgtgaatgtcttgaaggaagctggtgtgcttcctggcatcaaggttgacaagggcacagtcgagcttgctggaactaatggagagaccaccactcagggtctagatggccttggtcagcgttgtgccaagtactacg

SEQ ID NO: 245904 - DNA, 414 bp, Glycine max
  unsure (1)..(414): unsure at all n locations
cccggctcgaccaacgcgtcagctgaacatggatctctttaggaagtgtatggagccggtggagaaatgtttgagggatgctaaaatggacaaaagaagtgttgatgatgttgtccttgttggtggttctaccagaattcccaaggttcaacaactgctgcaggacttctttaatggaaaggagctgtgcaagagcatcaatcctgatgaagctgttgcatatggtgctgctgttcaggctgcaattttaagtggtgagggcaatgagaaggttcaggatcttctcctccttgatgtcacccctctatctcttggtttggagactgctggcggtgtgatgactgtcttgatccctangaacactacaattccaaccaagaaggaacaggttttctcaacatactctgacaacca

SEQ ID NO: 245905 - DNA, 443 bp, Glycine max
  unsure (1)..(443): unsure at all n locations
aattcacgggccgacgcacgcgtcagctcaaacattgcatccctcttgatttgtagtttgttttgtgctttagataaaagttctgccaaatcaagacgggttttaagatcatactgtgtgttttgcaacaatggctaagttctttgctgctatgatcttggcactctttgccatttccatacttcaaacagtggtaatggctgctaatgaacaaggaggccacttgtatgacaacaagagcaaatatggaagtggaagtgtcaagagttaccaatgcccatcacaatgctcgaggagatgtagccagacccaataccacaagccctgcatgtttttctgtcagaagtgctgcangacatgcctgtgtgtgcccccggggtattatggtaataaagctgtgtgcccttgctacaacaactggaagaacaaggaatgaagaccca

SEQ ID NO: 245906 - DNA, 444 bp, Glycine max
tcccgggcaataacacactgtaaccgttccgttccgttttcctctgttttttttttctttctttcaaatccccgcttcgtggaaatcccgaaccagaaaccatgcttctccgaaccgctgctgcttctgcttcgtccctctccctcttcagcccgaacgccgaacctccccgttcggttcccgctcgtggattggtggttcgcgcagcgaaaggatccacgaaccaccgcgccctgaccggagtgatttttgaaccgttcgaagaggtgaagaaggagctcgatctcgttcccaccgttccgcaagcttctctcgcgcgccaaaaatacgttgacgaatctgagtccgccgttaacgaacaaatcaatgtggagtataacgtttcgtacgtgtaccatgccatgtttgcgtacttcgatacggacaacgttgcgctgagaggac

SEQ ID NO: 245907 - DNA, 442 bp, Glycine max
tccggctcaccacgcgtcagagcagttccaggtatagttcatgtgctgaagaagggaagcatggaggctcgggaaaatgcagcagcaacacttttcagcctttcagtaatagatgaaaacaaggttacaattggatctttaggagccataccaccactagtgacactgctaagtgagggtaaccaaaggggtaagaaagatgctgcaacagcactcttcaatttgtgcatttatcagggcaacaagggaaaggcagtgagggctggcgttattcccacgctgatgcgactactgactgaacctagcgggggaatggtggatgaagcattagctattttggcaatattggctagccatcctgaagggaaggctactattagagcttcagaggcagtgccggttttagtagagtttattgggaatggctcaccaaggaacaaag

SEQ ID NO: 245908 - DNA, 437 bp, Glycine max
tcccggctcgacccacgcgtcagtctggatcttacttttagcattgatgcagatgaggaaaagttgattttgtatgagcggacagaggtgactgattatgagctaattcctggtggacggaatacgaaagttacggaggagaataagcaccaatatgttgatttggttgctgagcatcggttgaccactgctattcgacctcaaataaatgctttcttggaagggttcaatgaattaattcccagggagttaatatctatattcaatgacaaagagctggaattattgatcagtggacttcctgatattgatttggatgacttgagagcaaatacagaatattctggatatagtggtgcctcaccagttatccaatggttttgggaggctgttcaaggtttcagcatagaagacaaagctagattgctgcagtttgt

SEQ ID NO: 245909 - DNA, 428 bp, Glycine max
aattcccgggctcgacccacgcgtcaagcaacaatggtgccgcaacccattttgcatctaacccttttgtcattaataatctctctgaccactctttccttggtcgatgccgccgatcccacatttggcttcacccctcttggattatctagtagctcaaacttgcaaatccaaaagccttacgacgttgcagtcaacgagcgctacagcttttcaaatggagtgcacagattttgggtatactccacggacaagcctcatatgcaaggcagcaatacgaagccacgaactgagattcgtatcgctggatacgattatacatccggtgtgtggcaatttcaagggtttttttacgtgcctagtggcacaagcggggtgtgcatccagcaagtgtttggtggagtaacttctgccacaacctcgcagac

SEQ ID NO: 245910 - DNA, 434 bp, Glycine max
  unsure (1)..(434): unsure at all n locations
cgcgtcaagacgaaacagagggattataaaaagagaagttactcgatagttcaaatcagaagatggttcctgtcacaccaactcaataacagatcaaaccaaacccaaactgttaggtttcctttgtttggtgtgaagccatggctgattcttcttccaacctgaaatccgacgcgataatggagcagatgaagcaacacctcgccaccgacgctggcaaacaagtcaccaataaaattggactcgtttatcagtttcacattgctcctaagaaacttggattcgacgaggtcgtctacaccgttgatctcaagaaaggagaagtcaccaaagggtcatatgaangaagaaagcctgatgcatctttttcgtttaaggatgangactttgttaaggttgccttaaggaagatgaatccgcagattgctttcatg

SEQ ID NO: 245911 - DNA, 435 bp, Glycine max
acgcgtcaacttgtgacactcagttactctctctctctctggagcgtcgtcgtttcgttagggcacaaaaccccttttcggatcggtggagcaaggcctcgccggcgagattcccgaggctgttcaatcagcgatcgagcaccggcgaaaagcggcgaagatgaaggttttcgtgaagactctcaagggcacgcacttcgaaattgaagtgaacccttcggacacgctttctgaagtgaagaaaaatatagaaactgttcagggtgcagatgtctatcctgctgcacagcaaatgcttattcatcaaggaaaagttctaaaggatggtactactttggaggaaaataaagtacctgaaaatagttttattgtaattatgttatcaaagactaagagttcatctggtgaaggatctactacttcaactgctccttc

SEQ ID NO: 245912 - DNA, 489 bp, Glycine max
  unsure (1)..(489): unsure at all n locations
aggtgagcaacgtccaacgtctagtagcgtctagaattctagggccgacgcacgcgtcagtcttaaagcgcagatatctgcacttatagaaaaaggcaaggagatgagtaaggcagaaagtgaggcaggagatgaanggtccatggtcactgaagttgacatacaacatattgtctcctcctggactggtattcctgtggagaaagtctcgactgatgaatctgatcgcctcctcaaaatggaagagactttacacaagcgagtcataggtcaggatgaagcagtgaaagccataagcagggccatccgtcgagccagggttggactgaagaaccctaaccgtccaattgccagcttcatcttttctgggccaactggtgtggggaagtctgagttggccaaagcattggctgcatactactttggttctgaagaagccatgattcggcttgacatgagtgaattcatgganaggcacacagtctcgaa

SEQ ID NO: 245913 - DNA, 409 bp, Glycine max
tccggctcgacccacgcgtcaagtggagtgattcttgctcagtttggaagctacaaaaagaaagaaaacatgggttctgcttcaagagttgaaagtagcaactacgattactcctttaaggttttgttgattggtgattctggtgttggcaagagtagtcttcttctcagctttatctccaactctaactccatcaatgacctctcccccactattggtgtggatttcaagataaagctttttacagttggtggtaaaagattgaagcttactatttgggatacagctggacaagagaggtttggaacagtaataagttcttattatagaggcgcacatggaatcattcttgtctatgatgtgacacgacgtgagacatttacaaacctcatcgatatatgggcaaaag

SEQ ID NO: 245914 - DNA, 442 bp, Glycine max
actcgcgggccgacccacgcgtcagaaaaaaatcaaaaaaaaaaaaaaaaaaaaaaaaaaaaaaaaaaaaaaaaaaaaaaaaaaaaaaaaaaaaaaaaaaaaaaaaaaaaaaaaaaaaaaaaaaaaaaaaaaaaaaaaaaaaccaaattcccggggggccccccaaaaggttcaaacctaacttacccttccaggcaagttcaaacccctccaaaagggcccccaaatttcaatccacggcccttcgtttaaaaacttcgtaacgggaaaaccccggggttaaccaaactaaacccccttgcacaaaacccccttttcccaaccgggcttaaaaccaaaaaggcccgaaccattcccccttccaaaaattgccccaccctaaaggccaaatggaaccccccttgtacggcccataaaccccgcgggttttggggttaacccc

SEQ ID NO: 245915 - DNA, 408 bp, Glycine max
  unsure (1)..(408): unsure at all n locations
tcccggctcgacccacgcgtcaggggacctcaaagataagtgtaggattggatcagggcctcagaatgagtggtatttcttcagccataaggacaagaaatacccaacaggaaccagaacaaatcgagcaactacagctggtttttggaaagcaactggaagagacaagtccatataccacactaattccaagaggattggcatgaggaaaaccctagttttctacactggtcgtgctcctcatggccagaagactgattggatcatgcatgagtatcgccttgatgaagatgatgctgatgttcaagaagatgggtgggtggtatgcanggtcttcaaaaagaaaaaccaaagccgaggtttccaacaagaacttgaagaagaagagcacttaaccacccacatgag

SEQ ID NO: 245916 - DNA, 434 bp, Glycine max
cccgggctcgaccaacgcgtcaggggtgttgtcagtagatgagatatcggagcaatactgggtggctgcatcatcttcttcatcatcatcatcatcatcgttcaagtcaaagatgaaccggagcgaatccgaatgggcctttcagcagttcctacagcaggaagctgcttcttcttcatctaattctgatcatgatgatgatcatcatcatgctaaactcaaaaaggaatccaacaccaacatccctgttactctacatgttgattcccaagactaccatgctattcttaagaccaagcttaatctcgcatgcgctgctgttgctatgactcggggatctttggtcaaatctcaaaaccctgacagtggaccacaggcatctaatttttctgaagttggatcgcatgctaccttaaaaggatctggcccttttg

SEQ ID NO: 245917 - DNA, 408 bp, Glycine max
  unsure (1)..(408): unsure at all n locations
tcccgggtcgacccacgcgtcagcgagaggagaggagagaagagaggaagttttggggtttgaatctatagaatagaatcaaaccaaattgaaagaagatcgatcgatcgatcgatggctctggtcggagttgaagtgaagcatgcggcggagggcgcaccggaggagaattgctccgccaagcccaccaagcagggcgagggcctccgccactactattctcacaacatccacgagcatcagctccttctccgtcaaaagacgcataacctcaaccgtcttgaggctcagagaaacgagctcaattccagggtgaggatgctgcccgaagaattacagcttttgcanggaacaggctcttatgttggtgaagttgtcaaagtcatgggcaagaacaaagtccttgtc

SEQ ID NO: 245918 - DNA, 426 bp, Glycine max
tccggctcgacccacgcgtcagcccacgcgtccgggatggaagtgatgcaattctccttggagcagagaccctgcggggacaataccctgtagagaccatttctatagttggaaaaatatgtgctgaggcagagaaagttcataatcaagatttgtattttaagaaggctgtcaaatatgtgggagagccaatgagccatttggaatcaattgcttcctctgcggttcgagcagctatcaaggttaaagcctctgttattatttgcttcacttcatctggaagagctgcaagattgattgctaagtacagaccaattatgcctgtcatatccgttgtcattcctcaactgaagacaaatcaactccgatggacattcaccggtgcttttgaggctaggcaatctcttattgtgaggggtctttttc

SEQ ID NO: 245919 - DNA, 491 bp, Glycine max
  unsure (1)..(491): unsure at all n locations
ggttgccgcaacctccaccggcacgtagcggtctacaattcacgggccgacgcacgcgtcaaatggaacaatgtacgcaacggaagtcggcaaaatggattcgtaacctcgggaaaacgattggctctgagggctgggcacgggggtcncagtcncgaaccgtcggctgtcggtggactgctcgagctgcttccgcggcgagagcgggtcgtcgcgtgccggtcgggggacggattgggaacgggcccttcggggcctcttccccgggcgtcgaacagtcaactcagaactggtacggacaaggggaatccgactgtttaattaaaacaaagcattgcgatggtccctgcggatgttgacgcaatgtgatttctgcccagtgctctgaatgtcaaagtgaagaaattcaaccaagcgcgggtaaacggcgggagtaactatgactctcttaaggtagccaaatgcctcgtcatctaattagtgacgcgcat

SEQ ID NO: 245920 - DNA, 444 bp, Glycine max
ggtaaagacctcccgggccgacccacgcgtcagcttttcgtctcaaaccttggcacaaatctaagctacgatccaatgaaaagaaaaaggatctaatgaaaaaaaagaacttttgttttctaacagtttgggggatggaagtcgacttgcccttttctggttctccccaaaaaaatagattttcatcattttttgaccccatttttaaagaactaaaaaaaaaaacgaaacaatttcaatttttcacttttcgagttctaaaagttttaagtgaaaaattgaaattgtttctaactatcttaatagaaaaagcaaaaaggattagcaaaagtattatcgaaagtattcttaaaagtattctcaaaagtattctaagcctaacgaaaataaaacaatttttcaaattgctatttattaaatttaaattcaaaaagatagatgaat

SEQ ID NO: 245921 - DNA, 442 bp, Glycine max
  unsure (1)..(442): unsure at all n locations
tcccggctcgaccaacgcgtcaacttcaatttattcatctctgacaccctcttaattctgcttccagttcctctgagtgatgggttcaaaacccgtggttgattttgagaatgtaagtgggagcaggatgacggataggcctttctttcaagcgttggagaaggaagagaactgtgatgaggattacgaggggtgtttccaccaaccggggaagaaaaggaggctcacaagcgaacaagttcagttccttgaaaggaactttgaggtagagaacaagcttgaacccgaaaggaaagtccaacttgcaaaagagcttggcttgcagccaaggcaagttgctatatggttccaaaaccgaagggcaaggttcaagaccaagcagctagaanaagactatggcgtgttgaaagctagttatgacagactcaanagtgactatgaa

SEQ ID NO: 245922 - DNA, 429 bp, Glycine max
cggctcgacccacgcgtcaggggcatgatatgattatcttggctggtgctgagtatgggagtggaagctctcgtgattgggctgcaaaggggccaatgctactgggcgtgaaagctgtcatagcaaaaagttttgaaaggattcaccgaagtaatttggtgggaatgggtatcattcctttgtgttttaagcccggggaggatgctgattctcttggattaactggtcaagaacgttacaccattgatctaccaagcaatgtgaatgaaatacgacccggtcaagatgtcacagtggtgacagacaccgggaaatcatttgtatctacattgagatttgatactgaggttgaactagcttacttcaaccatggaggtatcttacaatatgtcatcagaaacttgatcaatgctaaacattgaatcagat

SEQ ID NO: 245923 - DNA, 421 bp, Glycine max
cgcgtcaacccacgagtccggggcagtagccgagattccgtgagttgcaaaaatgaagacgattctttccaccgagaccatgaacatcccggacggcgtgagcatcaaagttcatgccaaggtcatcgaagttgagggcccccgcggaaaattggtgcgagacttcaagcatttgaatctcgattttcagctcattactgacgaaaacggtaaaagaaagctgaaaatcgacgcgtggtttggttctcggaaaacatccgccgccattcgcaccgccttgagccacgtggagaatcttatcaccggcgtcaccaagggctaccgctacaaaatgaggttcgtttatgcccattttcccatcaacgcaagcatcggcaacagcaacaagtctattgagattcgaaaattccttggcgagaag

SEQ ID NO: 245924 - DNA, 432 bp, Glycine max
  unsure (1)..(432): unsure at all n locations
aattctagggtcgacgcacgcgtccacccacgcgtccggctgatatggcggttgatcgctcncttacgaagtgctgtagcctcgtactgtggtcgtggatgttgctgaggatgatgatggcgcagggtgcagccgcgagggccaaccggaaggagtgggactcggtcataaagttaccggctgaaccggtcgatgctgactcggatcatgaagtgggaacacgatgggcggttcttgtggctggttcaaacggctatggaaactacaggcatcaagcagatgtgtgccatgcgtaccagttgctgataaaaggtgggctaaaagaagagaacatagtggtgtttatgtacgatgacatagctacagacgagttaaatcccagacctggagtcatcatcnaacaccctgagggacangatgtgtatgctggtg

SEQ ID NO: 245925 - DNA, 308 bp, Glycine max
  unsure (1)..(308): unsure at all n locations
ccggccgacccacgcgtcagattattattcttccatttccattaaaaagaaaatatcataaatgggtattttcacattcgaggacgaaatcacctcncctgtggctcctgctactctttacanacctcaatttacaaatgcgaacaaaatcatccaaaaggctcttgattccttcaaaattgttaaaaactttaaggaaaatgttggccctgaaacattcagaaaaataccttcctttaaggatgaaaaaaccaatttggtacggcacagaataaaaccatttaataaggcaaccttggaataaacca

SEQ ID NO: 245926 - DNA, 487 bp, Glycine max
  unsure (1)..(487): unsure at all n locations
cttcgaacgtcgtacgcgtcgacgtaccggtcaggaattcccgggtcgacccacgcgtccgcccacgcgtccgcccacgcgtccggacaggtgcaggtagcttgaccgccttacccgtcattgaaacacaagcgggagacgtatcggcctatattccaactaatgtgatctccattactgatggacaaatatgtttggaaacagagctcttttatcgcggaattagacctgctattaacgtcggcttatctgtcagtcgcgtcgggtctgccgctcagttgaaagctatgaaacaagtctgcggtagtttaaaacttgaattggcacaatatcgcgaagtcgccgcctttgctcaatttggctcagaccttgatgctgcgactcaggcattactcaatagaggtgcaaggcttacagaagtactgaaacaaactcaatatggcacactttcaaattgaaaaacaaattctagtcctttatgcagctn

SEQ ID NO: 245927 - DNA, 283 bp, Glycine max
tcccgggccgacccacgcgtcagctcactcatcaatctcgtttgttctcactaactattacttcatcatgtcgtcgagcacagttggtcaagtcatcaaatgcaaagctgcggtttcatgggaggcagggaagccacttgtgattgaagaagtagaggtggcaccaccacaagctggtgaagtgcgtttgaagatcctctacacctctctttgccacactgatgtttacttctgggaagccaagggccaaactccattgtttcctcgtatatttggtcatgaa

SEQ ID NO: 245928 - DNA, 434 bp, Glycine max
gaattcccggctcgacccacgcgtcagcccacgcgtccggctttgtttagatcagaaccagatcgtgttctcttcttccattggcaaacatggcaactcaaatgagcaagaagagaaagtttgtggcggatggagtgttcttcgccgaactgaacgaggttctgacacgtgagttggcggaggacggttactccggcgtggaggttagggttacgccgatgcgcaccgagattatcatcagagccaccagaacccaagccgttctcggtgagaagggaaggagaattagggaacttacctcagtggtgcagaagaggttcaaatttcccgagaacagtgtcgagctttatgctgagaaggtcaacaacagaggcctctgtgccattgctcaggccgagtcgcttcgctacaagcttctcggtggcctcgctgtt

SEQ ID NO: 245929 - DNA, 416 bp, Glycine max
gacaacgcgtcagctaactagctgagcagacggaggagaactcgactgaagctgcctctgcgacgccgtttcgattcagcctcagacatttccgttgcagtcatggtgcaagaaaatggcaagaggaagaaaccaaacattctggtgactggcacaccggggacaggaaagacaactgtgtgcactgctctagctgaagccacccagctctgccacatcaatgtcggagaattagtcaaagaaaagaacttgcatgatggatgggatgatgagcttgattgttaccttcttaatgaagacttggtttgtgatgaacttgaggatgttatggaagaggggggaaacattgtggactaccatggctgtgatttctttcctgagcgttggtttgattgcgtggttgtacttcaaactga

SEQ ID NO: 245930 - DNA, 390 bp, Glycine max
  unsure (1)..(390): unsure at all n locations
tcccantcccattcctaatcctcctttccctctcctctccgctcctccaattccccccaaactttctccctccgccgcttcgccgccgcctctctcgcttgccctccaccgccgccgccgcccctcgacgccatggcccagaaaatcggaaagtccacgcgccgccccggtgcctcctccaaggcccgcgtctatgccgatgtcaacgtcgttcgccccaaggaatattgggactacgagtccctcaacgtccagtggggggagcaagatgattatgaggtggtgagaaaggtgggtacggggaaatacagtgaggtgttcgaaggtgttcactgcaccgacggtgagaaatgtgtcattaagattcctgaaaccgtgaagaagaagaag

SEQ ID NO: 245931 - DNA, 427 bp, Glycine max
  unsure (1)..(427): unsure at all n locations
cccgggccgacccacgcgtcaggaacagtatgtctgggagtcccatgccggtggctcatttactgtgacaagagatacatctggtgagaaccttggtaggggaacaaagataactttgtttcttaaggaagatcaacttgagtatcttgaggaacgccgtctgaaggatttgataaagaagcattctgaattcattagctatccaatttctctctggattgagaagactactgaaaaggagatttctgatgatgaggatgatgaagagaagaaggatgagganggtaaagttgaagatgtggatgaagataaggaaaaggangagaagaaaaagaagaccattaaggaggtatctcacgagtggtcattggtgaacaagcagaagcctatttggatgangaaacctgaagagattacgaaagaagaa

SEQ ID NO: 245932 - DNA, 394 bp, Glycine max
acccacgcatcaggctcttgctagttgaagggtgtccatgtggttcctttggaagagagtggtatctcagaggaatctgtggaaaatggaactgaaagtgtttctgcacaagaggaagacactgagcagtattttagctttctgaaagtcttgactgaggtgaacaattggaggaagcaatgtgaagtagtagaacagttaaggctgctgctgagggatgacgaggaagccaggatttttatgggggcaaatgggtttgttgaagcacttttgcagtttttgcaatcagctgtgcgtgaaggtagtttgatggctctggaaagtggagcaatggctctcttcaacctggctgtgaataataacagagataaggaaattatgttatcggctggag

SEQ ID NO: 245933 - DNA, 402 bp, Glycine max
  unsure (1)..(402): unsure at all n locations
aattcgcgggtcgacccacgcatcagcttcttctctgcatcatcacaatggctgaagtacgttcacaacaacaacaaccccagcatgtgcaagtccacgcaaccacaacacacaccccacaacaccatggcggggaaggtggcagcggcattctgaacctcatcccggagatgtccctcacgggttcccaactcctagctctcctcgccggcgttccccttggtgcaatgctgctcctcctctccggcatctcgctcatcgccagcctcttggggctggcggtggcgacgccgctcttcatcttcttcagcccgctgctggtccccgccgccttcgccatangaatggcggtgaccgcggtgctggcggcgggggcgtgcgggctggcggggctcgtgttgt

SEQ ID NO: 245934 - DNA, 400 bp, Glycine max
  unsure (1)..(400): unsure at all n locations
acccacgcgtcaggcaaggagtacgaggtggagtgcgggcgacggtaacttaccaacgctaatgagttgttgagtttggtacatgggcggagaagtgttgacgatggcggacgtcacggccaacttgcaagcagcaaccaccgcatccaccccttacgcgcttcccaccagtctccctctcctctccgcttttctctccttcgctctcgctcagttcctcaagatcttcacctcctggtataaggagacgagatgggattctaaaaggttgcttgattcgggtggaatgccttcgtcacattctgcaacggtctcggctctggctgttgctatatgtcgccaagaatgggcagggtcacctgcctttgcgactgcaatggtcctggcatgtantgtgaag

SEQ ID NO: 245935 - DNA, 445 bp, Glycine max
ggtccagaatatccgggccgacccacgcgtccacggacgcgtgggtttctctctcccttagtcaaagggattcatcgttcttcttcccaggttatttagaaaagcaaaatggtgaagatttgctgcattggtgctggatatgtggggggtcctactatggcagtcattgcacttaagtgcccatccattgaagtcgctgttgttgatatctctaaatcccgcattgcagcctggaacagcgaccagcttcctatctatgaacctggccttgatggtgttgtgaagcaatgccgtggcaagaacctcttcttcagcactgatgttgaaaagcatgtctttgaggctgacatagtgtttgtctctgtcaacaccccaaccaaaactcagggtcttggagctggcaaagcagcagatttgacatattgggagagtgcagctcgcatga

SEQ ID NO: 245936 - DNA, 376 bp, Glycine max
  unsure (1)..(376): unsure at all n locations
gacccacgcgtcaggaaaaccttccatagatagcctcccataaaaatgaagagtactacctctttggctctctttctacgttgtgcccgaatttcatcatatcagccttcagccgtcgctgatattgtactcgataccgagtgcaatccgattcgaaacagcggcacatactatgtgttgccagttatgagaagaaagggcggctgaatacagtttgcgaaaaccgaaacagacacatgccctctcactgttgtgcaatctccctttgaggtctcaaanggtctaccactgatgatttcatccccagttaagatccttgacatcaccgatggacttattttgagcctcagtttcacttatgtactcacctgtgcct

SEQ ID NO: 245937 - DNA, 371 bp, Glycine max
ccacgcgtcagggagatgcggcgaagaaccaggtcgctatgaacccaaccaacaccgtttttgatgctaagcgtttgattggaaggcgtttttccgatgcatcagtacaaggtgacatgaaattgtggccgttcaaggtgattcctggccctgctgagaaacctatgattgtggtgaactacaagggggaggagaaacagttttccgcggaagagatatcctccatggttcttatgaagaataaagagattgccgaaggctatccaaggtccaacaataagaatgccgttgtcactgtgcctgcttacttcaacgactcacaacgtcaagccaccaaggacgctggtgtcatttctgggctcaacgtgatg

SEQ ID NO: 245938 - DNA, 340 bp, Glycine max
ccacgcgtcagcaacgcgtccgccttgcgggagagggcaagaaaattagatcagggtatcctgattataaggtttgagatgccctttaatatatggtgtggaggatgcaattcaatgattgcaaagggtgtccggttcaatgcagagaaaaaacaagttgggaattattactcaacgaagatatggagtttcgctatgaaatctgcctgctgtaaacatgagattgtcattcagactaatcctaagaattgcgagtatgtcattattagcggggcccagaaaaaaactgaagattttgatattgaagatgccgaaacttttgaattgcctgctgatgaag

SEQ ID NO: 245939 - DNA, 407 bp, Glycine max
aattcccggctcgacccacgcgtcaggaacttttatcaaccagttgcctgattggagcatgcttcttgctgctatcacaacaattttcttggccgctgaaaagcagtggatgatgcttgattggaagccacggcgacctgacatgcttattgacccctttgggataggaaaaattgttcaggatggtcttgtgttccgtgaaaacttttctattagatcatatgagattggtgctgatcgtaccgcatctatagaaacagtaatgaaccatttgcaagaaactgcacttaatcatgttaaaagtgctgggcttcttggtgatggctttggttccacgccagaaatgtgcaaaaagaacttgatatgggtggttactcggatgcaggttgtggtggaacgctatccta

SEQ ID NO: 245940 - DNA, 399 bp, Glycine max
  unsure (1)..(399): unsure at all n locations
aattcccgggccgacccacgcatcagcttagtgttgcggtggtggagggtttccgtggcctagcagtcacattcaaactagttaaccctaaaaaaggggtcattagggtttctactgacttgaacatcaaaacctccctaactaacacaagttgtagtgagtccacggtctggaagctagatgcctttgatgattcaactggacagtggtttgtgaccactggtggtgtgttgggaaaccctggcaaggataccatcgacaactggttcaagattgaggagtatgatgatgattacaagctcgtgttttgccccacagtgtgcaacttctgcaagcctttgtgtangaatgttggggtgtttagggatagtaatgggaaccagcgcgtggctctcactg

SEQ ID NO: 245941 - DNA, 389 bp, Glycine max
acgcgtcaaccgacgcgtccgcatttcccgacgaccaatcggagggaaggggctcgacgtgctgcatcttcgtgacagcaccttcacgccgacgaccttctgagatggccgcggacgaatcagcggtcaaacaatgcgtgtccacgcacgatcatgcccacctacacgactctgtgcaggtgcactatctcaaccgcggctagttccatgcaccaaggattggccacggaacgaagcatgtccccgagtaggtgaaatcagccacgaccatgagtagacacgattcaccagttgtgatggtgaaaagcaagtccaatgcggagaccaactaatagactgcgtcaccatacgatgccaggggaatggccccagatctgattctgcgacat

SEQ ID NO: 245942 - DNA, 364 bp, Glycine max
cgggctcgacccacgcgtcagcccacgcgtccgcattttcagaggaacaatggcgggtagggtttcgacgtgcttcatcttcgtgtttgctctttcactccttcttccttttcagatctccgctgaggaatcatcggagatagagttcgtattcacattggatcattctaactttcatgacactgtcaggatgcacgatttcatcgtcgtcgagttctacgcaccatggtgtggccactgtaagaagcttgctcccgagtatgagaaagctgcttctatcttgagtagtcatgatcctccggttgttttggctaaaattgatgccaatgaggagacgaacagtgagcttgcatctcaatatgat

SEQ ID NO: 245943 - DNA, 294 bp, Glycine max
cacgcgtcagccaattgatgctccgcctctcctcgctcgtctccaacgccaccctccaacagggcttcttcctcagtaacatctccctcggaaaccccgatgaggtcaagggactcttcctctgccgcggtgaagtcaccccctccgtctgtcacgactgcgtcgccgccgcggcaaccaatatcacagacctctgcaccatcccaacagattccgtgatccggtatgaccagtgtatgttgcgctactccaagctttccttcctcaataacatagtccctggagttcacttga

SEQ ID NO: 245944 - DNA, 358 bp, Glycine max
ccacgcgtcaggcaaaaccctagctgaaccctctttcccttctccggccaccgcaatggacttcactacgccgccgatcgaggacggtttcaccgccgagaagctcttcacgcacggcttctcctacacctacgatgacgtcatcttcctcccccactacatcgacttcgccgccgacgccgtggacctctccacgcgcctcacgcgccgtctccccctcgccgtgccgtttgtggcctctcctatggacaacgtgtccgagttcggcattggcgccgccatggcctccctccgggggatccccgttcttcaactcaaagttcccgccgccgatcatgcggccatcctccgcagagcg

SEQ ID NO: 245945 - DNA, 419 bp, Glycine max
aattcccgggccgacccacgcgtcagcccacgcgtccgcccacgcgtccgtacggtttctgtgactgtgctccacaaccgagtcgccatggcgtcgcaggagagtatccaatagatgcaggcacggcagaattaccggaatttatggcacaccgatctcatgagatccattcaagccgatactccctattgttgcctcgcgttgtggtgtgcaccatgtgtgtcttaccttcttcgcaaacgagctcactatgatgatatgtcaacgtgcacatgttgtgctggctacatgccttgcagtggcaggtgtggagaacgtaaatgtcctgaattttgcctttgcactgacgttttcctctgctttggaaattcagtcgcctcaactcgctttctagtgcaagatcaatttaacattcaaac

SEQ ID NO: 245946 - DNA, 441 bp, Glycine max
cgggccgacccacgcgtcagcccaagcgtccgattgaaacagaaaatttgaagagtttgtttattgtgaaaaaaagaaaaatgcaggcagcaaagaaagccatagagacctttaaggaaaccgcagccaacattggcgcctctgccaagtctggcttggagaaaaccaaggccactatccaagagaagaatgagaagatgaatgcagaagatcaaactcaaatggatatggctaccaagaggaaagaagagaagatcaaccaggctgagatggagaagcagcaggcccgtaagtactacgccgctgcaaaacaatacgccatggctgagcacatggcaaagggcaaccacgacaccgccgggcctagaatcgagactgccacacacatcaccagtgggcccgggactgacaatgctatgtactctaacactgggcctggga

SEQ ID NO: 245947 - DNA, 426 bp, Glycine max
gggccgacccacgcgtccgcccaagcgtccgctggaggtcaaattgacaaacatcatcatacaacaacttgatgatgcagccggtgatgtttccggacttgctgtcaaatgtcctgctccgttagtgaggaaggtgagtgaggtaagggttgtggaaatgaccagtaaactatgtgacaaattgctaaatgggaaggatcagcatcgcgacattgctagcatagctttgaagacagttgttgcagaagtttctactcagtctcttgcacaatctattctccagactctcacgccgcaattgataagaggaattactggtcctggaatgggttccgagattaaatgtgaatctctggatattttatgtgatgtccttcataaatttgggaatctaatggcagcggatcatgaactattactaagttc

SEQ ID NO: 245948 - DNA, 434 bp, Glycine max
cgggccgacccacgcgtcagctcaacttcttcttccgttcctccctttcgctctattaaggatctctatctctatctctccgatcgtcccaccatcatcgatcaaggtataaagagttttcaattggagaagcggactgggaacaagtgttacatgctttccgctagagatctgagcattatatggggtgacactactcattattgggagtggacaaccctaccagagtccaggttcgaagaagttgctaggcttcgagctgtgtgttggtttgacattactgggaggatgaacacccgcgttttgtcgccaaatactaattatgcagcttttcttgtgttcaagatgatcgatgccggtggatttcactacgatcctgcggtgttatcagtaggtattttgggaggcaatagcagtaccaaaaatgtttgttt

SEQ ID NO: 245949 - DNA, 433 bp, Glycine max
cgggccgacccacgcgtcagcccaagcgtccggaacttcttgttgacagtgtcccacgtgatctcactatggtccttcataaactgtttatccaaaagccggtccttcttgctaagcttttggtcccaatgaccatcaccagcatcttgcttttcattgtcatactgagaggcttcagaatcagattttgcttccggaagctgctccggctcaatatcatcactctcatactcgtcctcgctctcctcctcttccttttcctcctcactctcatgattctccctgcatttggtaatcaactcctcatactgcttattattcttcttcaacttctgcttcatggagttcaaggccttggcattgctactactcatcttcttcttggcatccttattagccatagcctgaaccaagaaatcgtccagcatcacaa

SEQ ID NO: 245950 - DNA, 386 bp, Glycine max
ccacgcgtcagcaacgcgtccgaagaaaatcctcaattttctgagcagccaaacactctctctctgtctctcgaagattctcagtttgcagagaaaatctgaatcatgtcgtggcaagcgtatgtcgacgatcaccttctgtgtgacatcgaaggtaaccacctcactcacgctgctatcatcggccaagacggcagcgtttgggctcagagtaccgacttccctcagttcaaacctgaggagataactgccatcatgaatgacgttaatgaacctggattaacttgcccaactggaatggaaccccgggggcacaaataaaaggtcatccacgggtgaaccggtgctgtcattcgatggaagaagggtcctggtggtgttactgt

SEQ ID NO: 245951 - DNA, 425 bp, Glycine max
aattccccggctcgacccacgaatcaggcaacacgtatctccttctcaaactagtattattattcttccattccgttctacatataatcattcataatgggtgttttcacattcgaggatgaaatcaactcccctgtggctcctgctactctttacaatgccctagttacagatgccgacaacgtcatcccaaacgctcttgattccttcaagagtgttgaaaacgttgagggaaatggtggcccaggaaccatcaagaatatcactttccttgaggatggagaaaccaagtttgtgctgcataaaatagaaagcattgatgacgctaacttgggatacagctacagcgtggttgggggtgctgcattgccagacacggcggagaagatcacattcgactccaaattggttgctggtcccaattg

SEQ ID NO: 245952 - DNA, 438 bp, Glycine max
ccgggccgacccacgcgtcagcccacgcgtccgcccacgcgtccgcggacgcgtgggctttgcgcagttccctacctctcctttcaagatgcagatcttcgtcaagaccctcaccggaaagaccatcacccttgaggtggaaagctctgacaccatcgacaacgtcaaggccaagatccaggacaaggaaggaattcccccggatcagcaacgtctcatcttcgccggaaagcagctcgaggacggccgtaccctcgccgactacaacatccagaaggagtcaacccttcaccttgtccttcgtctccgtggtggcatgcagatcttcgtcaagactctcactggcaaaaccataaccctagaggtcgaaagctctgacaccattgacaacgtcaaggccaagatccaggacaaggagggaatccccccagaccagca

SEQ ID NO: 245953 - DNA, 291 bp, Glycine max
cacgcgtcaagcaacgcgtccgcccacgcgtccgataaaatcgaagtcccttaggtcttcatcttctgttctgatccatgtatggcttcataacgcatcttgaacgatctcaaggatttgcaaaacgatcctcctacctcatgctgtgcaggccctatggctgaggacatgtctcactggcaagccacaatcatgggacctgctgatcacccataatcatgtggtgtattcctagtttcaattcattttcctcctgatcatcccttcaagccaaccaaagttgcttttccg

SEQ ID NO: 245954 - DNA, 224 bp, Glycine max
cacgcgtcaaggaactccttcgcaaactagtactattattcttccattcataatgggtgttttcacattctaggatgaaatcatctcgcctgtggctcctgctactctttataaggtcctaattacatattcagacaacgtcatcacaaaagctcttgaatccttcatgagtgttgaaaactttgagggaaatggtagttaggaatcatcatgatgatcacttt

SEQ ID NO: 245955 - DNA, 423 bp, Glycine max
cacgcgtcagcacaacctagcggcactacacacgttatctctctctctctctctctctctccctctctccttccccaagatgtcgagcgccgattccgagcaccgagaagaagaagaaggacccgccgtcggcgacgacgaggaaaacggagcacacgtcgctcccatcgtcaagctcgaggaggttgctgtcaacaccggcgaggaggacgaagatgcaatcctagatctcaaatcgaagctttaccggttcgacaaggatgggaaccagtggaaggagcgaggcgcgggcaccgtgaagttcctgaagcataaggctacgggcaaggttaggcttctcatgaggcaatccaagacgctcaagatctgcgccaatcatctcattttgcctactatgagtgtgcaagagcacgctgggaacga

SEQ ID NO: 245956 - DNA, 330 bp, Glycine max
actctgggtaggcggttgatcaagcaatcctggcagaagaggagcgtctggtcgtgatccgtttcgggcacgactgggacgaaacctgcatgcagatggacgaggtgttggcgtcggtggcggagacgataaagaactttgcggtgatatacctggttgacataacggaggtgccggatttcaacaccatgtacgagctctacgacccttccacggtgatgttcttcttcaggaacaagcacatcatgattgatctgggaaccggtaacaacaacaagatcaactgggctctcaaggacaagcacgagttcatcgacattgttgagaccg

SEQ ID NO: 245957 - DNA, 427 bp, Glycine max
cccgggccgacccacgcgtcagccaacgcgtccgcccacgcgtccggttcattctctttgcgcagttccctacctctcctttcaagatgcagatcttcgtcaagaccctcaccggaaagaccatcacccttgaggtggaaagctctgacaccatcgacaacgtcaaggccaagatccaggacaaggaaggaattcccccggatcagcaacgtctcatcttcgccggaaagcagctcgaggacggccgtaccctcgccgactacaacatccagaaggagtcaacccttcaccttgtccttcgtctccgtggtggcatgcagatcttccgtcagactctcactggcaaaacataaaccctaaaggtcaaaagctcggacaccattgacaacgtcaaggccaagatccaggacaaggagggaatcccccc

SEQ ID NO: 245958 - DNA, 392 bp, Glycine max
  unsure (1)..(392): unsure at all n locations
acgcgtcagtacatttgtggatgtgaaggaataggaggttgttttggggtgaaatgagggatgctatcaaggttgatggactttctgactgcctgctggcggcgaagattcttcccccgaacggcaaggtggttccgaggttacggggccgaaagaaaggctgctgtggtacaatgatgcngggcagcacttgtttggtgaatactcaatggctgttgtccaggccaataacctgctcgaggaccagagccagattgagtctggtcctctcagcctgcttgacactggcccttatgggacctttgttggtgtatatgatggacacggtggacccgagacgtcgcgctacgtctgtgatcatctcttccaacatctaaaacgatttgcatctg

SEQ ID NO: 245959 - DNA, 422 bp, Glycine max
aattcccgggccgacccacgcgtcagcagcaattttctattttcttctctcatggcttcagattccaaaaaggatttccctgctgatgacaaagctggaacagcagagaataaagcatccaaagatgaaacgtcatctaaagattctccagcagcacaaagagctactacagctacttctggacctgcaactggttttccaggcaacccttttgatttctctgcaatgtctggcctgctcaatgatccaagtatcaaggaattggctgaacagatagcaaaagatccatcattcaaccagatggctgagcagcttcagaaaacttttcaaggagctccacaggatgctatgcctagctttgataatcaacaatatttttcaaccatgcaacaggttatgcagaatcctaattttatgaccat

SEQ ID NO: 245960 - DNA, 416 bp, Glycine max
  unsure (1)..(416): unsure at all n locations
gtaccagtaaagaattcncgggtcgacccacgcgtcagagccttactacgttgcagtcaacgagcgctacagcttttcaaatggagtgcacagattttgggtatactccacggacaagcctcatatgcaaggcagcaatacgaagccacgaactgagattcgtatcgctggatacgattatacatccggtgtgtggcaatttcaagggtttttttacgtgcctagtggcacaagcggggtgtgcatccagcaagtgtttggtggagtaacttctgccacaacctcgcagactagggtctatggtggttctctcactcattaccaatcacctagtctggaaccaatcatctataataggtggattcggtttaacgtgatccatgatgtgggtgccaacaatgtgaagatttttccta

SEQ ID NO: 245961 - DNA, 392 bp, Glycine max
cacgcgtcaacgcaaacttacggcactactcacgttatctctctctctctcactcactctcgctctctccttcgccaagatgtcgatcgctgattccgaacatcgacttgaggatgaggcacccgccgtctgcgacgatgaggacaccggagctcacttcgcacccatcgtcaatctctatgaggttgctgtcaccacctgcgaggaggacgaatatgcattcctatatctcagctcgaagctttacaggttcgacaaggatgggaaccagtggaaggagcgaggcgcgggcaacgtgaagttcctgatgcataaggctacgggcaacgttaggcttctcatgaggcattccatgacgcccaagatctgcgctaatcatcgcattttgccta

SEQ ID NO: 245962 - DNA, 207 bp, Glycine max
ccacgcgtcagggcaaagataagcgccaattcaccatgtactttttccttccagaaacaaaagatgggctgttagctttggctgagaagttggcttccgaatcctgggttcctggaacgcaagcttcctaaccaaaaagtggaagtaggggacttcaagatcccaagattcaaaatttcttttgggtttgaagtccccaaagttgct

SEQ ID NO: 245963 - DNA, 435 bp, Glycine max
cgggccgacccacgcgtcaggtgtattataaatttaagagtgcaagagattatgattcaattcccatggacggtcctttcatctctgttggtacattgaaagaaaaaatatttgaatccaagcatttaaggaggggtactgatttcgaccttgtggtcaccaacgcccagaccaatgaagaatatcttgatgaagaaatgttgattcctaaaaatacctcagtgttaattcgtcgggttccatgaaggccacgtttaccaattgttactgaaatagaacataaggtggaaaataaggtggtggaatctgaacctgaaaatggaagcctaccagctgaagatacatctgccatgaaatatcctgaagattcagattgggatgaatttggcaatgatttgtattcaattcctgatcaagtgcctgttcaatcaagca

SEQ ID NO: 245964 - DNA, 388 bp, Glycine max
gacccacgcatcagggaagatccgatgctgctagatcgaatttgacaaaacccacttcgtgtctgatcgaagcaacaactgggttctgtctgaattttgagataagatggaatcggatcttggcaagctcttcattgggggaatatcttgggacactgatgaggaacgtctaaaggaatattttgggaaatatggggaggtgatagagactgtgatcatgagggatcgagtaaccggtcacgctcgcggctttggttttgttgtctttggtgatccttctgttgctgagagagtcattatggataagcacataattgatggccgcacagttgaagcatagaaagctgttcctagggatgattagcaaaacattaataggcaatctggt

SEQ ID NO: 245965 - DNA, 397 bp, Glycine max
gacccacgcatcaggtttctttcacttcacaaaaatgaaaaacatgaaattgtgttcggtgatgctatgcttatcactagcgttccttcttggggccacagcagaacaatgtggcacacaagctggtggagcgttatgcccaaatagattatgttgcagcaaatttgggtggtgtggtgacacagattcctactgtggagaaggttgccagagccaatgcaaatctgcaacaccctcaacaccaactccaacaacacctagtagtggtggagatattagcagactcattagctcttctctctttgatcaaatgcttaaataccgaaacgatggccgctgttctggccatggattctacagatatgatgctttcattgccgctgctggctctttcaat

SEQ ID NO: 245966 - DNA, 431 bp, Glycine max
gacccacgcgtcaagtgaattccagggctgaaagaaagaggagttaaacgttcaaattaaagataataacgttcgtcagataagcggagagaggaacgttgagaatgaagatacgaataacacgtggcatcgcgtggagcgtagcaacgtgcaagttcatgaggatgttcagattgccggagaatgcaaaagtggatatagtgaaggcttcaatggaaaatggggttctcactgtcactgttcccaaggaagaggttaagaaggctgatgtgaagaacattcaaatctctggttaagcaaaagcaaattgttgttggtcatttgtgtttatctttgttgtttgagaaattgtgtgattttctatgttctattgtgagtgatatgcttgggagaatgtatcgtacgaggtgtgattgtataaagaaataaaa

SEQ ID NO: 245967 - DNA, 423 bp, Glycine max
ccacgcgtcaggtttatgtgtgctcttggattggttgttagaatggacggtcagagtaagggtagttttaatgtgatggaatggagtgagggcaaacgaatggagtttgtggtggaaaagtctgcatcatcaatagtgggaacttgtgatttggttctaaggattttggcctttttactaacccttgtggctgctgtagttattgggacagataagcaaactgccattgttccaatcaagcttgtggattctatgccaactttgtacgttcctgttgcagctaagtggcattacttgtctgcctttgtctattatgtgggggcaaatgcaatagcatgtgcatatgcaatactgtctctcttgctcactcttgcaaataggcgtaaatgcacaggaacgattgagacattgatcactgtgctg

SEQ ID NO: 245968 - DNA, 378 bp, Glycine max
aattcccgggccgacccacgcatcaggttcaaaagcatataagagatggggttagaagggaaggaaacgccgtcgtttatgagggattttctcgataagtgtggtggctgcgccgttattgacggtggttttgccactgaacttgaaaggcatggggcggacctcaatgacgaactctggagtgccaaatgccttattagctccccacatcttgtccgaagggttcacctagattacctcgatgcaggagcaaacataatattaacagcatcttatcaggtaattatcatattaattttttttttcatccctacaactctacattttaattttgccgtctttttggggttggggtgcaggccactattcaaggttttg

SEQ ID NO: 245969 - DNA, 400 bp, Glycine max
aatgcccggctcgacccacgcgtcaggtttggaatgacagaaatcccttgttgccttcagacccttaccagagagctcaggctagattctgggctgattatgttgacattaagatacatgatcttggaaagaagatttggacatcaaagggagaagaaaaagaagctgccaagaaggagttcatagaggcccttaaattgttggaggaacagctgggagataagacttattttggaggagacaatattggttttgtggatatagcacttgttccattctacacttggttcaaagtctatgagacttttggcagcctcaacattgagaatgagtgccccaagtttgttgcttgggccaagaggtgcctacagaaagagagtgttgcaaagtctcttcctga

SEQ ID NO: 245970 - DNA, 497 bp, Glycine max
  unsure (1)..(497): unsure at all n locations
tgtncttttntgcagcatcatctagccgtcaggtacctatcaggaattcccgggccgacccacgcatcagcgacgatcggattgacagtccgggctttctgacaaatgactattatgatgtcatgttacatggccaaaatgcttggttatgcgaacagattttttactttttagatctaatcaactatgtcttctagttccgaaaatgtgaaacaaaagtttttcgagaaaaggtcccatccttcaatatcatgattgggtcgaccaggccagatcatgagtgaatagaaaatcgaaaatgtacatagctgttccagctgaaatacttggaataattctaccacttctactaggagtagcctttttagtgctagctgaacgtaaagtaatggcttttgtgcaacgtcgaaaaggtcctgatgtagtgggatcgttcggattgttacaacctctancaaattggttgaaattgaatcctaaaaaaacctaattcaccg

SEQ ID NO: 245971 - DNA, 465 bp, Glycine max
  unsure (1)..(465): unsure at all n locations
aacttaactcgcacgtctggctagantaccgggccgacccacgcgtcaggcgaatggctcattanatcagttatagtttgtttgatggtatctactactcggataaccgtagtaattctagagctaatacgtgcaacaaaccccgacttctggaanggatgcatttattagataaaaggtcaacacaggctctgcctgttgccttgatgattcatgataactcgtcggatcgcacggcctttgtgccggcgacgcatcattcaaatttctgccctatcaactttcgatggtaggatagtggcctaccatggtggtgacgggtgacggagaattagggttcgattccggagagggagcctgagaaacggctaccacatccaaggaaggcagcangcgcgcaaattacccaatcctgacacggggaggtagtgacaataaataacaataccgggctcattgagtctg

SEQ ID NO: 245972 - DNA, 405 bp, Glycine max
  unsure (1)..(405): unsure at all n locations
cccacgcgtcagcagtttaactcagttaaccaagttgaacccttaaacaaaaatttaacaaaaggtaaacttcaattccaaatgaacaacaacaaaagcaaccccaacccaaatggaataataaaataataaaagtgaagccgaaatttccggttgaaacccaacaagcttttaacttgaataaaggtaattcagaggctttcaacttaaaaagaaaaaatgcacggaaatgttgctgcaacttgcccggtggtgctgctggtgcatcatcccttttgtttgtttactctcttgactatgcncgttaccgtcttgcaaaatgatgcaaagctgcaaaaaagggtggagagagacattcaatggtctcgttgatgtctacangaagacattggcatctgatggtgt

SEQ ID NO: 245973 - DNA, 444 bp, Glycine max
ggtccagaattcccgggccgacccacgcgtcaggcatgcttgagttgccaactttaagtttgtcaatttccgtgctgcttggttggttgcaattgcaagtgaacaattggctagtgtgtactagttttgaatcacaatggcagaggatgatggttacacgaaagatggaacagtcgattactgtggaaatccagctaataaaaaggaaactggaacctggaaagcctgcccctatatcttaggaaacgaatgttgtgagagattggcttattatgggatgagcacaaacctggtgctttatttcaagaaccggctaaatcagcatagtgctactgcttccaagaatgtctctaattggagtggaacttgctatatcacaccattgattggggcatatttggctgattcctaccttggaagatattggacaattgctgttttttc

SEQ ID NO: 245974 - DNA, 359 bp, Glycine max
cgtcaggccagccttcctcgcccgcgttagctctgtccatttccgtgctgcctggttggttgcatgtgccagtgagcaactggcctgtatgtacgactgttgactcgaactggcataggatgatggttacactaaagatcgaccagtcgagcactgtgtacatccggcttcatccttgggagcctggaacctggaatgcctgcccctctatcttacgatacgaatgttgtgatagattcgcttatgatgggatgagcactaacctggtgctttaatcctagaaccggctgattcagcatagtgctactgcttccatgaatgtcgctaattggagtcgaacgtgctctatcacaccattg

SEQ ID NO: 245975 - DNA, 429 bp, Glycine max
ccggctcgacccacacgtcagctccttcaaactccatctttccaaatcctctctttgcgattgtgttttgatctgcttcctactgcgatagtttctctactgttacatggccatggcggtttccgcaattggttttgaaggtttcgagaaaaggttggaaatatcctttttccagccgggactttttgctgaccctgaaggaaggggtctaagggctcttacaaaatcccagttgggtgagattctaacaccagctgcttgcaccattgtttcttcgctcaaaaacgataatgtcgactcctatgttctatctgagtccagcctctttgtttatgcctacaagatcatcatcaaaacctgtggtactactaagctattgcttgcaatcccacccatattgaagttcgctgaaatgctttcccttaatgt

SEQ ID NO: 245976 - DNA, 396 bp, Glycine max
aattcccggctcgacccacgcgtcagcgagaacaaaaaaaaaaacgtgattcgctcttctcttcgaataaaccacaaaaccaacaaacgagaagaggagtgagagaagatggggttgtcgttcacgaagctgttcagcaggttgtttgcgaagaaggaaatgaggattctgatggtaggtctcgatgctgctggtaagacaaccatcttgtacaagctcaagcttggagaaatcgtcaccaccatccccaccatcggatttaatgttgagactgtggagtacaagaacatcagcttcactgtgtgggatgttggtggtcaggacaagatccgtcctctgtggaggcattatttccagaacactcagggtctcatttttgtggttgatagcaatgat

SEQ ID NO: 245977 - DNA, 382 bp, Glycine max
gacccaagcgtcaggccaggagaggagggcttgatattgttgggaaaaggttatccgcacttgcacagtcatgtcatgtaccctttgagttcaatgctgtaagagtacctgttactgaggtgcaacttgaagaccttgaacttcgcccttatgaagctgtggcagtgaactttgccattagtctgcaccatgtgccagatgaaagtgtgaacagtcacaatcatcgtgaccgattgttgagattagctaagcaactgtctcctaaggtggtgactctggttgagcaggaattcagcaccaacaatgcgccgttcttgcagcgcttcgttgagacaatgaactactacttggctgtttttgaatcaatcgatactgttcttcc

SEQ ID NO: 245978 - DNA, 431 bp, Glycine max
aattcccggctcgacccacgcgtcagaggaagggtagcatttgaggacatgatggctgtaaggaaagcactagaggaagctaatatccctttcacttagatctccgcaaacgctctttgctggatactttgctggcagcctctctcagatggggtcctttgtgccaccaacggacaaggtgcatctctttggagatggcacactcatagctatttttctggatgaagatgatgttgcaacatatacaatcaaggcaatagatgatccacgatcccttaacataacattgtacctaaagcctccagacaatattatctctcaagcatagcttattggaatttgggagagacttattggaaaggaactagagaagacatacatacctccagaacgctttctgacaacactgaaaaggttggattataaacttc

SEQ ID NO: 245979 - DNA, 413 bp, Glycine max
acgcgtcagccaacgcgtccgcccacgcgtccgctcattaccaaatgaaatagaaatgcttggaacagtgggccctcctgtaccaaatgtggatgtttgcctggaatctgttcctgaaatgggatacgatgccctagcaagtacaccaagaggagaaatttgtgtaaagggaaaaaccttgtttgcagggtactacaaacgtgaagacctcactaaagaggttctgattgatgaatggttccatacaggggatattggagagtggcaacctaatggaagcatgaaaattattgatcggaagaagaatatatttaagctttcacaaggagaatatgttgctgtcgaaaacctggagaatatttacggtcaagtttcttctattgaatctatatgggtttatggaaacagttttg

SEQ ID NO: 245980 - DNA, 436 bp, Glycine max
  unsure (1)..(436): unsure at all n locations
ccgggccgacccacgcgtcagcccacgcgtccggaagctagtgatcaatcatcaacacagagctgagtgtgttgctctgtgaatccaccttcttcttccattggaggaccatttcctcctggaatagaaatactaccacacttttcttttttcacttctctaagttgctaagttaattgctccttcattttttcactcttcgttctcgcgtacccgtgtcacggtaactcgtggtgaagtgttcgaaaatgactgtcacacctaagatctcagttaacgatgggaaacttgttgtccatggtaagaccattctgactggagtgccagacaacgttgtgctgactccaggttctggaaggggtcttgtgactggtgcttttgttggtgccacagcttcacacagcanaagtctccatgtgtttccaatgggtgtttt

SEQ ID NO: 245981 - DNA, 426 bp, Glycine max
  unsure (1)..(426): unsure at all n locations
gaatcccggccgacccacgcgtcagcccgaacatgggaaactgctgcgccacgccgtccacggacgaaacggcgaacaagaagggcaaaaagggaaaaaaggaaaaccccttcgcgatcgactacggtttcaacgccaccgccgcgaacgggtcgaagctcaccgttttgaagtccccgacgggccgcgagatcgaggcccgctacgagctgggccgtgagctgggccggggcgagttcggcataacctacctctgtacggacaaggggaccggagaggagctggcgtgcaagtcgatctcgaagaagaagcttcggacggcgatcgacatcgaggacgtgagganggaggtggagatcatgcgccacttgccgcagcatgcgaacatcgtgaccttgaaggacacctacgaggatgacaatgccg

SEQ ID NO: 245982 - DNA, 428 bp, Glycine max
  unsure (1)..(428): unsure at all n locations
cgacccacgcgtcaggttggtgtgaggcaatgacgcggcctttcggtgtgaagggggggaggaagcgaaagcacgcggaacccaaatacgacgcccatgacgaagaagaagaagaagaaacgcaaccaaagaaaactgtggtggaggtggagcacaaccaagaagaagaagaagaaactccagcaccagcaccagaggatgatggattgagcggtatcccaattgcgcccagtgcgaacaacactaacaaacccaacgtcatcttcattcttgaaaaagcttctttggaagtcgccaaagtcggcaagacatatcagctcttaaactccgacgaccatgccaatttcctccgcaaaaataacaagaatcgcggagattacaggcctgacattactcatcagtcncttctatcaattttggataaccca

SEQ ID NO: 245983 - DNA, 431 bp, Glycine max
  unsure (1)..(431): unsure at all n locations
aatgcccggctcgacccacaagtcagctttgttgaaatcaagggagttacatattgtggctcgtcgactacgtcaaaattgacaatggataatgtcccttggcatgctgatgtgaaagctttttctgaggccctagctttgaaaagccaaggagagtatgaagttgcatgtgagcatgctcactcgtgctgtgtcctcttagcaaagactaataagttcaaaattgatggccagtggtatacatggatagactatgaaaaatttcatgatctggtggcatctggaagaacttttgacagcagagattacatggctgcaacaccatcgtggtcagtctatggattagaagaaagtggatttgatccaggacaattgagatacangatagagagacatcacaagtctacgcgcaatcaagcaggttagacatt

SEQ ID NO: 245984 - DNA, 439 bp, Glycine max
aattcccgggtcgacccacgcgtcagcttcaagattcaggtactgcgtttcggaagcagacacagatggctcgtacgaagcaaaccgctcgtaagtccacaggaggaaaggctcctaggaagcagcttgcaaccaaggctgcacgtaagtctgcaccaactactggtggtgtgaagaagccccaccgttatcgtcctggtaccgttgctcttcgtgagattaggaaataccagaagagtaccgagcttttgatccggaagctccccttccagaggctggttcgtgaaattgctcaggacttcaagactgatctgcgtttccagagccacgccgtgcttgcattgcaagaagctgctgaggcataccttgttgggctctttgaggacactaacctgtgtgccattcacgccaagcgtgtaaccattatgcccaaggatat

SEQ ID NO: 245985 - DNA, 425 bp, Glycine max
gacccacgcgtcagccatctcaaactagtaatatatactattattcatccattccattctatatatttcataatgggtgttttcacattcgaggatgaaaccacctctcctgtggctcctgctaccctttacaaagctctagttacggatgctgacaacgtcatcccaaaggctgttgacgccttcaggagtgttgaaaacgttgagggaaatggtggccccggaaccatcaagaagatcactttccttgaggatggagaaaccaagtttgtgttgcacaaaatagaagcgattgatgaggctaacttgggatatagctatagcgtagttgggggagatgggttgccagacacagtggagaagatcacattcgaatgcaaattggctgctggctccaacggaaggtctgctgggaagctaactgt

SEQ ID NO: 245986 - DNA, 442 bp, Glycine max
aattccgggctcgacccacgagtcagctcggaggttactttaagggatgtcccaccggaagctttcaaggctatgcttaactttttatatgatgggcaattgaatgacaaagttatagattctggtgctttgttgctccaactccttctattagctgatcaatttggagtgacttttcttcaacaagaatgctgcaaaatgcttttagaatgtctctcagaggactcagtatgtctactcctccaagtggtttcttcaatgccatcatgtagacttattaaagaatcattgcagaggagaatttccatgaactttgactattatatcagtgcgagtactgactttgtgttattagatgagacaactttaatcaatatcattaagcatccagatctgacagtaacgtctgaagagaaagtccttaatgcaattctaatgtttg

SEQ ID NO: 245987 - DNA, 424 bp, Glycine max
cgacccacgcgtcagttcttttccttggtgatggttcggaagatgggaaagtcccacctgggtcactctgcatgatctcacacaaggaaaaggaggtactcaatgctctagacgatgctggctttccagcaaatgatgaggaggttcagcaagaagtggttgcaatgtctaaaacaaatatatttaggcccgggattgatgttacacaggcagttctgttgcctcagttgacttggatgcgacaggagaaaacataaatggtagggccttggaaagctaaggtctatgatatgcacaatgtagttgtgagcataaaatctagaggagttcctggagccatgacagatgatgaactcttttcttcttgcaatgaacatgaaacagagagtgaagagctcaatgatattttgactgaggatgaaag

SEQ ID NO: 245988 - DNA, 445 bp, Glycine max
  unsure (1)..(445): unsure at all n locations
aattcccnggctcgacccacgcgtcagcacggagtgatggctgtgcagctgtgggaaaccctgaaggaagccatcgtagcctacactggcttctctccttccaccttcttcacggtgctggcgcttctttttgccgtttactacgtcgtcacgggtctctttggctcctccgacgatcaccatcaccgccaccgccacgtcgaggaggaggaggagatgccgcctctgcgccccccggttcagctcggcgagatcacagcggaggagctcaaggcctacgacggcaccgatcccgagaagcccttgctcatggccatcaaggcccagatctatgatgtctcccagagcacgatgttttatggacctggtggaccttatgccctatttgctggcaaggatgctagcagagccttagcaaagatgtcttttgaagagaaagatctga

SEQ ID NO: 245989 - DNA, 417 bp, Glycine max
gacccacacgtcagcccacgcgtccgaaaaaaaaccctctctttctctctcttccaaaacctaattttcattttttctcttcaaacaaattttcaaaatgcgtgagatccttcacatccagggtggccaatgcggcaaccagatcggcgccaagttctgggaggtggtttgcgcggagcacgggatcgaccccactggaaggtacggtggggactcagagcttcagctcgagaggatcaatgtctactacaacgaagccagctgcggccggttcgtgccgcgcgcggttctcatggacctcgaaccgggcaccatggacagcgtccggtccgggccgtacgggcagatcttcaggcccgacaactttgtgttcgggcagtccggggcatgaaacaactgggccaaggggcactacac

SEQ ID NO: 245990 - DNA, 429 bp, Glycine max
aagtcccggctcgacccacacgtcagcacgaattccatcttcccagctgccatctcaaaggatggtcgatcatacaatgatcagttgtttagtgctggggctgatgttcttcacagaattggcgaggatgggagaattatacaggaatttattcaacttggcgcaaaagctaaagttgctgcttcagaggccatggatactgaagccactctaggggagataccagatgaattccttgatccaattcaatacacattgatgaaggatccagttatcttgccttcttcaaggatcacggttgatcgtcctgtcattcagaggcatcttcttagtgatagtactaatccattcaaccgttctcatcttaccgcggatatgttgattcccgacgatgagctaaaagcaagaattgaggagtttgtcaggtct

SEQ ID NO: 245991 - DNA, 435 bp, Glycine max
  unsure (1)..(435): unsure at all n locations
aattcccggctcgacccacacgtcagctttgctcgcttgtcaaagctcttgaatgatgataaggtttctggcaagattgtttatggaggcgaaaaggatgaaaagaaattaaggattgctcccactattttattggatgttccgcaagattcttcgataatgggtgaggagatatttggtccattgcttcccatcatcacggtcaataagctcgaagaaagtatagatgtgatcaactcaggagcaaagcccctcgctgcatatgtatttacaaccgacaacaagttcaaggagcagttcgtaaagaatgtttctgccgggggtttgctcgtcaatgacactgccttacatcttgtggttgataccttgccatttgggggaattggggagagtggaatgggtgcataccatgggaagttctcntttgatgctttt

SEQ ID NO: 245992 - DNA, 419 bp, Glycine max
acgcgtcagccaacgcgtccgaaagcataaaggaagtagtgagcaatggagggtttgatgtcatcattggcacagatgtgacatatattcctgatgctatattgccattgtttgcaactgctaaagaactgattgctcccagtggaaacaaggaagatgataatgttcctgcacttattctttgccacatctttcgccgagtagacgaaccaaccttactttcggctgcagcccatttcgggtttagattagtggacaagtggcctgctggaacttcaactaatttgtctcatagaattattggcaattggtttgttgacaatgatttaaaggatgatcttcctagtacagcattaaacatcttgctcttctgcaaggagtgatattgaacaacttgattcttctcttcattactatta

SEQ ID NO: 245993 - DNA, 446 bp, Glycine max
ccgggccgacccacgcgtcagcggacgcgtgggcggacgcgtgggcggacgcgtgggcggacgcgtgggttctcttcctccctggaagaaaaagaagagtcaccgctacgacgccgttcgtgcttttttgaggtgccacagtcatgtttgggcgtggtggaccaaggaggagtgacaactccaaatattatgatattctcggggtttccaaaaatgccagtgaagatgaaatcaagaaggcctatagaaaggctgctatgaagaaccatccagataagggaggagatcctgaaaagttcaaggagttaggtcaagcatatgaagttttaagtgatcctgagaagaaagacctgtatgaccagtatggtgaagatgcccttaaagaacgaatggggggaggaggctcgtttcataatccatttgatatatttgaatcattttttggg

SEQ ID NO: 245994 - DNA, 441 bp, Glycine max
ccgggccgacccacgcgtcagctaatagccaccgccacaacccttcgagtttcgaaaaccctaaccccacaaccccctctcacaaactcactctttttcattgtttgataattcgaacttcctccatctttcccgaagtttgctatcatggctgggttggcgccagaaggatcacaatttgatgctcgtcaatatgatgctaagatgaatgagttacttggaactgatgggcaagatttttttacttcttatgacgaagtttgtgaaagctttgatgctatgggattgcaggagaaccttctgaggggtatttatgcatatggttttgagaagccctctgcaattcaacaaagggggattgttcctttctgcaaggggcttgatgttattcagcaagcacaatctggaactggaaaaactgctaccttttgttctggagtt

SEQ ID NO: 245995 - DNA, 424 bp, Glycine max
gaccacgcgtcagggagtccctaaatacatgtgaatggttcagcgatttttgtccagttcgtgcacaccataataaccaatcactggcccatcaagcctacttctatgttgccatgaaattcaaggacctttatgcatccctcacagggaaaaaactctttgtggcacaagccagggcaatggaccgagtaactgttgatgaggcattcaagtacataaaagatatcctgaaatgggatgaatagaacgaggataatttctatggtccacctgaggattcattttacagcacagacataagctcctctacctttatcatacaatagtgaatgagtgtccataaaataatacattattacttggctgttgaaaacggttaaaaatgtaacgtgctggccagcttgtgttctgtgatcctatatgt

SEQ ID NO: 245996 - DNA, 430 bp, Glycine max
gacccacgcgtcagtgaattttaactaaccaaactaataagcaaaaatgttggcggtgtttgcaaaagccattggaaaaccaccggaggaactgaggcttccggcaatggggtccaataattcaaagaccccagaagaaattgtacagaaatttcaatctttgtggccagattctgcagtttacaaccttccacatgggaattttatggctctgtctcatgaagatgaaagtccaatacaccccaggtgtattgttgttttggatgatatcttctgcatttttatgggagctctagcaaacatagctgagcttagacatcattatgggctcccaagacaagcaacagaagccatgattgtgattgaagcctataaggccctaagagatcgcgctccctacccacctgaccaagttgctaaacatcttgat

SEQ ID NO: 245997 - DNA, 445 bp, Glycine max
aattcccgggctcgacccacgcgtcagcccacgcgtccgggataatcagctatatgcagttgagcatctgactaacatggtgaaaaaatatgacaaggaaaagaacacctggaatgaattggggaggcttccagtcagggcggattcttctaatggttgggggttggctttcaaggtttgtggagagcaacttttggttgtgggtggacaaaggggtccagagggtgaatctattgtgctgagttcatggtgtcctaagtcagggatcagcaatggcaccatagattggcaggtacttggcgtgaaggagcatgtcggggtgttcgtgtataattgtgctgttatgggttgttgagataattttagattgactcaacagaagatgctggtatccacaatctgacttagccttgaagggtgcctccatgttcaatcacctcattta

SEQ ID NO: 245998 - DNA, 410 bp, Glycine max
  unsure (1)..(410): unsure at all n locations
aattcccnggctcgacccacgcgtcagcccacgcgtccggaagaggttcttgaaaaagcactattgatgattcaaaattcccagaagaattacctctataaatgtgaccagttaaagtctattcgccaagacctaactgttcaacgaatacgcaatcaattaacagtcaaggtgtatgaaacacatgcccgattggcactggaatttggggacctgtttgagtataatcagtgccaatctcagttgcaaactctttatgccgaaggcattgaggggtctgatatggaatttgccgcttacaacttgctttgtgtcataatgcattcaaataataacagagatcttgtaaccaccatgggcaaggttatctcacgaagcaaagaaggatgaagctgtaaaacatgcccttg

SEQ ID NO: 245999 - DNA, 439 bp, Glycine max
aattcccgggctcgacccaaacgtcaggcttttcatctctcttcaatgttctctccactggatcgaggccttttctcaccttggagtggtttaaagcatctgggtatctcagctaaaccaaaacctcttcttcacatagatagaaagggagggtgtaagggtaaagtggtatatgcttctctctttggggttggagctcctgaggctttggtaattggggtcgttgctttgttggtttttggccctaaaggtcttgctgaggttgctcgaaatctgggaaaaacattgcgtgcatttcaacccaccattagagagcttcaggatgtttcaagggaatttaagagtacacttgagcgggagattggtcttgatgacaatttaagtcctacccagaacacatacaattccaatgtacgtaataccacaccaacttcatcat

SEQ ID NO: 246000 - DNA, 427 bp, Glycine max
atgcccggctcgacccacgcgtcagcaggcctcaagtcctctgcatttgaacaaaatttcaatacaaaagtcctgtccgcggtgaagaaattgactaaaaaatctccccctgatattgtgctgtacgtggatcgcctggacctgcaaactagagatatgaatgatctgccaatgttaagatcaattaccagtgtcctgggttcatcaatatggcgaaatgtcatagtcactctgacccatgctgcctctgctcctccagacgggccatcaggtgccccattgagttatgatgtatttgttgctcaaagatctcacatagttcaacaaaccattggacaagctgttggggacctacgtcttatgaatccgagcttaatgaatccagtttctcttgttgaaaatcatccttcttgtcggaaaaatagag

SEQ ID NO: 246001 - DNA, 433 bp, Glycine max
aattcccgggtcgacccacgcgtcagcccacgcgtccggcttacgttttggcccatcccgaatacaacaaaccctcttcacattacatgtcatcacatttcatgcatggatacatatccaatcactctgttctcaacgtacattgccttccaatgtatctaatctttcctgtctacgatccatatcccagattggtgtgagacttaggagatatctgtatctcacatcagtactaatcacatttgctaaacatgaacactcattgcattgaagggtctgatatggaatttgccgcttacaacttgctttgtgtcataatgcattcaaataataacagagatcttgtatcatcaatggcaaggttatctcacgaagcaaagaacgatgaagctgtaaaagatgcccttgccgttcgtgctgctgtaacttcagg

SEQ ID NO: 246002 - DNA, 429 bp, Glycine max
gtcccgggctcgacccacacgtcagcccacgcgtccggaataggttcttgaacaagcactattgaagaatcacacttcacagaagaagtacctctatacatgtgatgagtaaatgtctattcgccaagatctaactgttcatcgaatacgcaagcaattagtagtcaatgtgtacgaaacacatgcccgattggcactggaatttggggacctgtgtgactaaaatcagtgccaatctcagttgcaaactctttatgccgaatgcattgaggggtctgatatggaatttgccgcttacaacttgctttgtgtcataatgcattcaaataataacagagatcttgtatcatcaatggcaaggttatctcacgaagcaaagaaggatgaagctgtacaacatgcccttgccgttcgtgctgctgtaacttc

SEQ ID NO: 246003 - DNA, 441 bp, Glycine max
cggtcaggatatcccggctcgacccacgcgtcagcccacgcgtccggatgctttaatacaattatatcacaatttcatcacagactttgagacgaaaatcaaccttctcaagcttgcacattttgctgttatagtttctcggcagtattctgaaaaagaagctgctgttggttatcttggaggggtcattcagaaacttcaagacactagggagcagcgcatagaagaacctattctttacattaagatgcaaatagcaatattcaagcttgagcaatgtgatcaaaatgaatgcaagaaacttctagaagatgggaagagtacactcgacagcatgacagatattgattcatctgtatatgctagctattactgggtatcatctcagtttcataagacatgccaagaatttgctgagttctacaaaagtgcccttctcta

SEQ ID NO: 246004 - DNA, 439 bp, Glycine max
aattcccggctcgacccacgcgtcaggtctgattgcagatgtttgatatagtgctagctccaactcccaatcatctgcattcacttcttcacaatacacctatcactaatccaacgattaacatcatcgaatgttttatctaaggtaagctgcacaatctctgcctcactgccgtttgcgcatctatcaccgccagctcgcaacggttgtcatcgtgtcagagacacacgatcacagtcgcggtgcgtatggaaacctcgacatacagaggatctccactcttccatatgtatatgataagcactcacagtacatcatcaactgagtgtcaatcacacgagtaataccatcattagcagttactccactaatcacagtgcacaatgttcctacggatgaagggacacaatagcagtagatatgcttcatgccatcggag

SEQ ID NO: 246005 - DNA, 407 bp, Glycine max
cgacccacgagtcagcccacgcgtccggaaaccgtgtcaattgagctcaagaatggcactattgttcatggcaccattacaggtgttgatatcagtatgaacacacatttgaaaacagttaaactaactctgaaagggaaaaatccagtgactctggatcatctcagtgtgaggggtaacaacatccgttactacattcttcctgacagcttgaatctcgagaccctgcttgtggaagagacacctaagatcaaacccaagaagccaactgctgggaaacctttgggacgtggacgaggaatgggccgtgggcgtgggcatggacgtggtggtcgttgagttgcacctttcttcatttttgtggcatgtggttataagctatgcagcaagaatttctgggtggtttt

SEQ ID NO: 246006 - DNA, 433 bp, Glycine max
aagtcccggtcgacccacacgtcagctttggttctcctgagctgtgtttattctctttctctgccctctcatcttcgagctccgatggcgagcctgtggcgcgcggcaaccggcatgacggacaacgccaccgattacgacggcgtcgagttctggtcgaaccccgagcggaccggctggctcaccaagcagggcgagtacatcaagacctggcgccgccgctggttcgtcctcaagcaaggcaagctcttctggttcaaggactccgccgtcacgcgtgcgtctcgtccacgcggcgtggtccccgtcgccacgtgcctcaccgtcaaaggcgccgaagacatcctcaacaagcccaacgccttcgagctctccacgcgctccgacaccatgtacttcatcgccgactccgagaaggagaaggaggattgga

SEQ ID NO: 246007 - DNA, 430 bp, Glycine max
ccgggccgacccacgcgtcaggttacgaatagattatcctaagtctttgggaatagtgctgcaatggcttcaagtcaggaggaggtgacccttttgggagctactggaagcccatttgtgtgcagggttcatattgccctcaagttgaagggagttcaatacaaatatgtcgaagaaaatttgaggaacaagagtgaactgcttctcaaatccaacccagttcacaagaagattccagtgtttattcacaatgagaagtccatagcagagtctcttgtgattgttgaatacattgatgagacatggaagaacaatcccatcttgccttctgatccttaccaaagagccttggctcgtttctggtccaaattcattgatgacaaggtttttggtgcttcatggaaagctgttttcacagctgatgagaaag

SEQ ID NO: 246008 - DNA, 430 bp, Glycine max
tccgggccgacccacgcgtcaggcaccctgtcatcaaccaaggctttggtgcaaccatcagagccattaacggtcaacttgaatgtgatggtgccaacccttccacagttcaggctcgcgttaattactacactgactactgtagacaattcggtgttgccaccggtgataatcttacttgctaaggtagcaagccacgctacctatacacatattatatagaataaattatgtatcttcttataccactcattttttcttttcaataaagaattgaaagcttgttccctcgctcaattcacttttaggaggagttttaaacgtatatatcttcattcacacttgtatgagagagattaattcttctagatttctttatgtccatgaatttgaaactcaaatataataagattacgtgtttaatatattt

SEQ ID NO: 246009 - DNA, 426 bp, Glycine max
  unsure (1)..(426): unsure at all n locations
aattcccgggtcgacccacgcgtcagggatccttggccccaaggccaattgcatctccttcaaggactctgcatgccgttgctttggctacatggtctccaaaaagaagtacatctacaccattgatgatgactgctttgttgccactgatccatctggacacaagattaatgcacttaaacagcatatagaaaacctcctctgtccatccacacccttttttttcaacaccctctatgaacctttccgagaaggtgcagattttgttcgtggttaccctttcagtctccgggaaggtgtaccaactgcagtttctcatggtctttggctcaacatcccagactacgatgctcctacccagcttgtgaagcctcttgagaagaacactaggtatgtggatgctgtttttgacanntacaaaggcac

SEQ ID NO: 246010 - DNA, 451 bp, Glycine max
  unsure (1)..(451): unsure at all n locations
aattcccggctcgacccacgacgtcagcatggatcggataaaagggccatggagtcctgaagaggacgaagcgttacggaggttggttcagacttacggccctaggaactggtccgttataagcaaatccattccgggtcggtctgggaaatcgtgccgcttgcggtggtgcaacgagctgtctccggaggtggatcgccggcctttcacggcggaggaagacgatgcgatcctgaaggctcacgccaggttcgggaacaagtgggccaccatcgcgcgcttcctcaatggccgcaccgacaacgccatcaagaaccattggaattccaccctcaagaggaattgctccgagcctctctccgagcctcggcctctgaagagatccgccaccgtctcgggtagtcaatccggatccgatttgagcgaatcgggtttacccattantcttgca

SEQ ID NO: 246011 - DNA, 446 bp, Glycine max
gaatgccgggctcgacccacgagtcagcccacgcgtccgcccacgcgtccgccaacttcgatccctccccctccggccaccaccgtccccttcactgtcgaacccagcaatcacgtgacccccgccgacaacaccaacaccaaccaccctccttacgatgagatgatatacacagcaatcggggctctgaaggagaaagatggttcgagcaagcgagccataggaaagtacatggaacaagtgtacaaggaccttccacccacccactctgctttgttgactcaccatctcaaccgattgaaatccgctggtcttctcatcctcgtcaaaaaatcctacaagctccccggatctgatcctcttcccgtgctccaggcccaaaagccccgcggtcgccccccaaagctcaaatcccagcccaacactgagctcacatggcctgcgct

SEQ ID NO: 246012 - DNA, 424 bp, Glycine max
aggtcccggccgacccacacgtcagagaacctgtgctttttgaggatatactgtgccagattattgacatgattggacctgaggaagagagctatataactctgcgtgacctgaaaggtggtaaactctcaggaagtgttttcaatatcctgttcaatctgaataagttcatggcctttgaaactcgtgacccatttttgattcgtcaggaacgtgagaatcctacattgacagagtgggatcgctttgctcatagagaatatattatgctttctatggaagaagatgtagaggatgcctctaacggtagtgcagaagtttgggatgaatcactagaggctcccttctgacgtcatttattgtatgaaaagatattaacgccccagatcggatggactggccattgttcagagacacatgactc

SEQ ID NO: 246013 - DNA, 432 bp, Glycine max
ccggctcgacccacacgtcaggttcatactaagttctgaaaatgagttccaaggttttgcttgttctacttatgttcttggccactatacttctgatctcctctgaggttgcacccgatgatgcatacgagaattttgacaaaatagatgggaagcctagtgcagatggggtagatgaaagcaagtattggcgtggcggctatggtggcggctatggtggtggttatggaggtgggcgtggaggctatggaggtgggcgtggaggctatggagggggacgtggtggatatggcggcggacgaggtggctatggtggcgggcgtggtggctatggcggcgggcgtggtggcgggcgtggtggctatggtcctaatgaacataacgaggctggggttgatgctaaccctcacaactaagaaggcaactttctaa

SEQ ID NO: 246014 - DNA, 441 bp, Glycine max
ccgggccgacccacgcgtcagcacaaacaccaaaccctacaaccaacaacaaccctccaaacaccatcaccccagcttccttccccaacttctccgcagatctcttgtcgaattcgagtttttcatcgacttcgtcggaggaaacaacgacgatggggggagggggaatgaggcgcaagaggaagaggaagtggaaggacttctttgagaggctgatgaaggaggtgatagagaagcaggaggggctgcaaaggaggttcttggaggccattgagaaaagagaacaagagcgtgtggtgagagaggaagcgtggagaatgcaagagatgcaaaggatcaacagggaaagggagattctagcacaggagaagtccattgctgcagcaaaagatgctgctgttatgacatttttgcaaaagatagccgaacatcaacaacaag

SEQ ID NO: 246015 - DNA, 339 bp, Glycine max
  unsure (1)..(339): unsure at all n locations
ctgcacttcttgatcattcgatttttcccctcaagatgcagatattcgtaaaaactttgaccggcaagaccatcacccttgaggtggaatcctccgacaccattgacaacgtaaaagctaagattcaagacaaggaagggatcccacctgaccagcagagacttatctttgcgggtaaacaacttgaggatggtcgcacccttgccgattacaacatccaaaaggaatcaaacctccatctcgtgcttcgcctcaagggtggcatgcanatctttgtcaagactttgaccgggaagaaacatcaccttgaggtggaatcctcggaacacattgataatg

SEQ ID NO: 246016 - DNA, 421 bp, Glycine max
aattcccgggccgacccacgcgtcagcccacgcgtccgcccacgcgtccgcccacgcgtccgcgattatccgaaatacctgctaagcagttggaaaatgataaatctgagcagaaaaaaattgttattagacctaggcctaataaaaacagtttgaatgatgctaacggagttgggaggaaaggaaaccctttaagaagtgtggaagaaaggaaggaggaatatgaccgggcacgggcacgtatctttagtagccctagaagctctgaatcaggtgatacctcatccgtggttccaatggatgggagatattcttctactagcaaggatgagaatgaaactagcaagaaccccatggctgattcagaaagatatatcagtaccagggatagttgttcgactcgagttgccatactcagaga

SEQ ID NO: 246017 - DNA, 434 bp, Glycine max
gacccacacgtcagcccacgcgtccgcccacgcgtccgcccacgcgtccgcatattcttcttcttcttgttcttgttctatctgtgacgagcatcatggcctcgagagcagtgctattgttggctatgtgtgtgcttccggccatggttgtggccattcgcccagcaaagaaccctttttgcgtgaagggtcgcgtctactgtgacccttgccgtgctggttttgagacctcagcaaccacctacattgccggtgctgagattatgttgcaatgcaagagcagggttagcaacgaggttgtgtacaccaagaaggggtacactgactcaactggagcatacacaatgtacgtggacgaggatcacgcagattaaatatgcagtgccaagcttgtaagcagccctcaccctcaatgcaaggaagtcaccccgggc

SEQ ID NO: 246018 - DNA, 423 bp, Glycine max
gacccacaagtcaggatcaatctctctctctgtctcccaatcaaaacagacatgggtttgaaggaggattttgagcagtatgctgagaaagcaaagactttgccaccgactcaatcaaacgaagacttgcttatcctttatggattgtacaagcaggccaccgttggacctgtcaacaccagccgtccgggaatgttcaacatgagggacagagctaaatgggatgcatggaaggctgttgaagggaaatccaaggacgaagcaatgagtgattacatcactaaggtgaaacagctgctggaagcagccggcatgcctgcttgataacattgtcatgccttgctttcttattctgtgctagaagttcccaacagtttggaaataaacaattgcagtgtttgaagcttttattatcataatctt

SEQ ID NO: 246019 - DNA, 401 bp, Glycine max
  unsure (1)..(401): unsure at all n locations
attcccgggtcgacccacgcgtccacctaaccctacaattatgccccattaacacaaatcgcaattaccccaaattcctcaccctaccgtagatccatctcctcttccttcgtgaattctggttcagggtggttgccatgtatggcacttagtattttttttccctttttaggattattangggtgggtgggttgtgtctcgcttagggttccaaagtttgtcgctttgaatggaacctcgtgttgggaataagtttcgcctgggtaggaagatcggaagcggctcctttggggagatctatttaggcactaatattcagacaaacgaagaggttgcaataaagctcgaaaatgtcaagacaaagcatccccaattgctgtatgagtccaagttgtacaga

SEQ ID NO: 246020 - DNA, 424 bp, Glycine max
aattcccggccgacccacgacgtcagcccacgcgtccggtctcaacttctgctcttccaactcctacaacgcttttctctgcactcatgggcaaggtcaagatcggaatcaacggatttggaagaattggccgtttggttgccagagtcgctctgcaaagagacgatgttgaactcgttgccgttaacgaccctttcattaccaccgattacatgacatacatgtttaaatacgacagtgttcacggacactggaagcatcacgatgtcaccgttaaggacgagaagacccttctcttcggtgacaaggcagtcactgtttttggacacagaaaccctgaagagatcccatgggggtcaactggagctgacatcattgttgagtccaccggagttttcaccgataaggacaaggctgccgcaca

SEQ ID NO: 246021 - DNA, 395 bp, Glycine max
gggtcgacccacgcgtccgaccaagcgtccgggtggctgctcttggctatgataatggattctattgccctggaagatgctcacaagaatatgggaattgtactgctggcaactcatgcactgaaccttacattgttgcccacaatttgatattgtcgcatgcagcagctgttcaaagataccgagcgaagtaccaagaaaagcaaaatggaacgattgggatcctcttggattttgtttggtatgagcctcttacaagattaaaggctgacaattttgcagctcaaagagccagagactttcatattggatggttcattcatccccttgtttatggagagtaccaaaaatcattcaacatattgtttggaatagactcccaaattcactagtga

SEQ ID NO: 246022 - DNA, 432 bp, Glycine max
ggtcgacccacgcgatccgaccacgcgtccgccttgatatgatccgcaagattgctgatgatgatcctgacgactcaactgacagagaaaagaaagatgcatcctctgacaatgatgacaagaatggtcaatattctaagttctggaatgagtttggtaaatccataaaacttggtatcatcgaggatgccaccaacagaaatcgtttggcaaaactgctcagatttgatagcaccaagtctgagggtaaattgacatctctggatcagtagatatctagaatgaaaactgggcagaatgatagcttttacatatctggaaccagcagagaacaactggaaaactctcccatccttgaacggcctaagaagataaattttgatgttattgtcttcacggattcagttgatgagtacttgatgcaatacctga

SEQ ID NO: 246023 - DNA, 447 bp, Glycine max
gacccacgcatccgaacatatatagaagagccttccatatatagcctcccaaaagaatgaagagtactatctctttggctctctttctactttgtgccctaacttcatcatatcagccttcagccatcgctgatattgtattcgacatcgaatgcaatcctattcgatacagcggcacatactatgtgttgccagttataagaggaaagggcggcagaatagaatttgccaaaaccgaagcagaaacatgccctctcactgttgtgcaatctccctttgaggtctcaaaaggtcgaccactgataatttcatcgccatttaaaatccttgacatcaccgactgacttattttgagcctcagtttcacttaagtatccccctgtgcctcaactccttctcggtggaccgttattctcaatggtctgccagaagaactccaatgttaac

SEQ ID NO: 246024 - DNA, 388 bp, Glycine max
acccacgcgaccgaacaaagtggtccaattgctataggcgtgaatgcacttttcatgcaaacatacattggcggtgtctcacgctctctcatatgtaccaagatcaggatgaaacacggtgtgtaacgtgtaggatatggtgcaaaaggcttctcaattcatacgcttggcaggaaaacacactggatcatcaagaattcgtggggggagaaatggggagaagatggctattacagactctgcagatggcatggcaagtgtggtacaaacaccatggtttctgctgcaagggtgacgcatccacacttaacacctacatagaattatgcatcttattaactatgcacttaaggacatctatttcaataatttgcactctaggtgatgt

SEQ ID NO: 246025 - DNA, 423 bp, Glycine max
  unsure (1)..(423): unsure at all n locations
accacgcgtccaaaaacagtcaacantagcttgctagctactcctgttgctgtgagaaccgttgatgtagatgctttgcaagcaagatttagagactccaacaataaaagccatgcttaacacctaccatgcctccaaactctcatcaaaccagtgtggttctagccttgtgcaaacaatagatgcacctttacctctcgtatggtccctcataaggcgctttgagtatccagaagggtacaagctctttgtgaagaagtgcaaccttcttgatggggatggtggcattggaagcgtgcgtgaggtcatgatcacatctgggttacccgctggtgttagtgtggagaggttggacaagctcgatgatgacaagcatgtcttgaagtttagcatcattggtggtgatcacagggttgtcaatta

SEQ ID NO: 246026 - DNA, 592 bp, Glycine max
  unsure (1)..(592): unsure at all n locations
cgggggcggggggntggagggagcggtnggggcgcggggggggggcggtaggcagggggcttgcgcataggcagagcgggcttgtgggccttgncgcaacgctacgcggcacgtaccggtcttatattcccgggtcgacccacgcgtccaacaggattgagtctcgccgccccgagcaaaactttaccatattgagggaactggatatccggcaaaggcaggaagacgacatagctagagtagcggcagttctttccatacctcgggtttctgcgagcatcctacttcgtcactacaactggagtgttagtaaggtgcatgatgcttggtttgctgatgaagatcaagtccgaaaaacagttggtttgttggagaagccagttttccagaattctaatactagagagcttacttgtggcatctgttttgaaatgtatcctcgtgcacgggttgaatctactgcttgtggccacccttaatgctattcatgctgggcaggataatttagcacatcaattaatgatggtcccggatgttttggtcttagatgtcctgattcctcgtgtggtgctgcttttggtcaagatatgat

SEQ ID NO: 246027 - DNA, 438 bp, Glycine max
  unsure (1)..(438): unsure at all n locations
cacgcgtccgagcgaccatctcatccacgtcaccgccgtcgatatctccgtcgcagacctcctctccccgtcgtcgtcgtcgtcgtcgtccgatgtccctccaatcgtcaaacagctcttcgccttcgaccacggtatgagttacaccgctcagtccacgccaatcatggccttccaggtcaacgacctcgccgacggcatcttcctcggctgcgccgtcagtcatgccgtcaccgacggcgcctccttctggaacttcttcaacaccttcgccggaatctcaatacgagccacgaactctcnctccatcctcccggattttcgtcgcgaatccatcatcaactccaatgtcgtgctccgcctgccacaagaaatgcaagtgacctttaatgtagacgaggcttttcgcgagagaatcttcagcttcagccgctaatc

SEQ ID NO: 246028 - DNA, 423 bp, Glycine max
  unsure (1)..(423): unsure at all n locations
gtcgacccacgcgtccgaccacgcgtccggacgttcttgcaatccacgccacacgaagggtcgacccaacaacttggcccattggtcacagtcccacaattcctcttttcttgtgcaccttccttccttgttcaaaagggtcttcctagaaacactcaatgtgtggctgggttaggccatgcaccaatttctcttccaaaccaactcgcttcccactttggcctacaacgccaattcaccacttgcctttctcgctaccctacttcatagggtgctataatattcggggatgcacctatcaacatgcgacagtttcaaaaccaagatattttccacgatttggccttcaccccattaaccatcaccctgcanggagagtacaacgtgagagtcaactcaataagaatcaaccagcacagtgtg

SEQ ID NO: 246029 - DNA, 440 bp, Glycine max
gacccacgcgaccgattaatcctacaatggattatgtgttatctttctgttaacggttaaggtgtatgtagattcaggaccggcgaggtgttaccggcagataaagaacataccgtactcgaaatcccgtttctgccgcggcgtgccggagccgaggatccgaatctacgacgtgggaatgaacaagaaaggcgtggacgagtacccgttctgcgtgcacctggtctcgtgggagaaggagaacgtctccagcgaggctttggacgcggcgcgcatctcatgcaacaagtacatggccaagttcgccggaaaagatgccttccacctgcgcgtgacggtacatcacttccacgtgctccgcatcaacaagatgctatcgtgcgccagggccgacaggctccatatcggtatgaagggcacctttgggaaaccgcaaggga

SEQ ID NO: 246030 - DNA, 457 bp, Glycine max
attcgcgggtcgacccacgcatccgagagaggttggaagacttgtgatgtggagtatcaatcttactttgctcttgatgatctctgggaatcgtttaaggagtggagtgcgtatggagcaggagtccctttggtacttgatcaaagacaatctgttgtgcaatattatgttccgtatttgtcggctattcaagtatatggtcaatcagataagaagtcaaatgctaagccaaggtacaccagtgaagatagtgacggtgattactgccgagattcaagcagcgatggaagcagtgacagtgaatttggaaaaaggactgaactttttacagcacaaagaaatagtcactatcatacaggtgatgcttcgtttcaaatgagcaggctatctgtacatgatcacaatacaatgcaagacggattttctagtgacgatagtgaaactgggaatcctaaag

SEQ ID NO: 246031 - DNA, 600 bp, Glycine max
  unsure (1)..(600): unsure at all n locations
gggtggggggntggggggggggcgggtggggggggggggggggggggggggggggggggggggggggggtggtggggagagtagctgacgggcaggntaggtgtggannggggncnanngnggggaagaggggnggggggggggggggggggggggggggggggnggggggggggggggggggnggggggggggggggggggggggggggggggggggggngggggggggggggggnnggggggggggnggggggggggggggggggggggggggggggggggggggngngggggggggggggggggggggggggggggggggggggggggggggggggggggggggggggggggggggggggggggggggggggggggggggggggggggggggggggggggggggngnggggggggggggggggggggganggggggggggggggggggggggggggggnaggggggggggggggggggagaggggggaggggggggggggggggggggggggggangggggggggggggggggggagggggggggggggggggggggaggggggggggggggggggaggggaggggggggggggggg

SEQ ID NO: 246032 - DNA, 459 bp, Glycine max
  unsure (1)..(459): unsure at all n locations
ggggccanccacgcgtccgaacaagcgtccgcccaagcctccgcgaaaattccgttgagaacaataacaatgggcttcaaagaattccaattcgaagatgaaaatcgtacatggcaatgctggttacatacttgaagacgttcctcacttcgccgactatattccaaatcttcctacatatccgaatccgcttcgatccaatcctgcttactcggttgttaagcagtatttcgtgcacatggacgacactgttcctcagaagggcctcggcaaaaggtatactttaaatcggatgaagtgcatgcatgcattgtcacgtgtggtggactctgccctggcctcaacactgtcataagggaaattgtctgtggtctttcctacatgtatggtgttaacaaagtccttggcatagatggtggttatagacgcttttattccaaaaacaccattactttaaca

SEQ ID NO: 246033 - DNA, 439 bp, Glycine max
  unsure (1)..(439): unsure at all n locations
ccacgcgtccgaaaaaattataatttctattacatacattttgtagctaggatgagcaagttactactcattcgtgttgctgggttcgtggcaacctttgtcaccatggtgatgatgatggtgcccaaaaacgtgagtgcccaaaacataggtgatgacatcgtcacacaagacttcttcaacagcataatcagtcaggctgatgatggttgtgcagggaagaacttctactcacgagatgctttccttaatgctcacaattcctacaatgagtttggtacgcttggtaatcaggatgactccaagcgtgaggttgcagctgctttcgcccatttcacccatgaaacaggacatttttgctacatagaagagattaacggtgcatcangggactactgtgacgagagcaacaccgagtacccatgtgcccctaacaaag

SEQ ID NO: 246034 - DNA, 381 bp, Glycine max
acgcgtccgaagcaatcggagggtaagatttctacgacgtgagcaaagtggatagccttcaacttcccaatttcgttaccccgcaagggtggaattgttgattgcatggcacaagtttgcgcgaaaacattaactctgtgtagcctgcagatcttcacgtcatcaggtccgatggcaacgtcatcacttgcaataatgcttgcgatgcttgtacaggtaatagattctgctgcactggacctatcaataccgcacagacatgtcaacctaagatcgactcgcatattttccaggatcactgtccccatgcggattcctacgcttacgatgatttgagcaacactttcagatgcttcaacaagcctgaatatacgatcacat

SEQ ID NO: 246035 - DNA, 410 bp, Glycine max
gacccacgcgaccgatcacgcgtccgggacatcacatggagagcatggagattctgctaaaattgagttcagagatgcccttaaattgttggcggaacagctgggacacatgacttattttggaggagacaatctaagttttgtggatataacgcttgttccattctacacttggttcacagcctatgagacttttggcaccttcaacatagagagtgagtgccccaagtttattgcttgggccaagaggtgccttcagacagtaagcgttgccaagtctcgtcctgatcagtataaggtttatgagttcattatggatctatgaatgacgttaggcattgagtaagttggaacttaatggccattgtgaactaatggttttccactggtcgttcatagcctttcaaata

SEQ ID NO: 246036 - DNA, 422 bp, Glycine max
gacccacgcgatccgagactaccacaccctcaatgcgtgcatggcgttgaggttgtttccacactcaatctgatgaccctggatgaagatgatcgaaaaacgtggatagaactcactggctgaaacttgaattttacaattccaactgaagcaagtgatttcagttcatggagaaatcttcccaacacggactttgagcttgagatgccacctcccccaatcaagaatggtcataatgcacacccgattaagctgcataatggatctggacttaacggatctggcctgaacggatctggtcttaatggatctggacttcacctatctaaccacagtaatgatgataggttggacctctctcctgtcagcagcaagaagatgaaagaccttttccctcatgggaatgaagaagaatgttacct

SEQ ID NO: 246037 - DNA, 405 bp, Glycine max
gacccacgcatccgattaattcttctgggacactctagtttcgctaatagggagcactactggtctgggagtgacatcattgaatacaaaggaactggtagataatttgcatcattatggagtaatcacatctataacggtagctgaagtaatggtgaccattgatacagcattgtgtatacccacctgcggtggacactaaccatatgtgcacagtcctatgccgattggctacaatgccaccatcgctgctccgcatatgcatgccacctgtacttcagttgcttgagaagaatttgcaacctggaatgcatgttcttgaccttggatccggatcaggataccagacagcatgctttgccatgatggatgataccccacagccgtactattgctgtcgcacat

SEQ ID NO: 246038 - DNA, 433 bp, Glycine max
cacgcgtccgatagaatagatagattctctgaagatgaatccaagggtgaagaaaatggaactggtggtaaccaagggttacggggatatggatgtggatgatgttctcaggacaaatgaagacctggttgtgaagagtggctcaaaattgttgccaggacatcttgaatactcgagacttgtgaatgcaaatattcaggaccctgctaatggtcccataaattcagtcgagttccatccgaatgcgcagttgtttcttgcagctggattggaccggaagcttagattttttcaaattgatggcaagcggaacagcacaattcagagcgtcttccttgaagattgccccattcgaaaagcctcttttttgccagatggatctcaggttatagtatcgggaagaagaaagttcttttatagttttgatttagtt

SEQ ID NO: 246039 - DNA, 411 bp, Glycine max
tcctggacgcgcaggcctgggagagcctcaagtttcccgtgatagcgaagcctctcgttgccgacggcagcgccaagtcgcacaagatggcgctcgtgttcacgcgcgacgcactgaacaagctcaagccgccgatcgtgctgcaggagttcgtgaaccacggtggcgtgatcttcaaggtgtacgtggtgggcgagcacgtgcgctgcgtgaagcgcaagtccctccccgacgtgtccgacgaggagaatgcgctcggcggcgtttccgaggacctgatgtcgttctcgcaggtctccagcctcgccaacgtgaacgactgcgacggctattaccgtttgatggatctcgacgacgacaccgaaatgccccccgatggccttcgtcgtcgacatcgctgggggcctcagg

SEQ ID NO: 246040 - DNA, 422 bp, Glycine max
cccacgcgtccgattcactcgccaatgcacatcacaaatgcctgatgattttctcactctggatgacttatattacattgtcagtacatcacccgaaggaaatatcatagctttgaagtttgacacaatgaactggctcattagtatgcataataagtgggtcctttagattctgtcgtgtatgttctcctaagttgtctgtgtctatttaccatcacttcaacgtctcatgaagggcctgagacgtcatataagtgtgcgtggaacagaagaataaagttcgtcattgtagctatattttgaatgatataacttgccttatgtatactaacaatgaaaatcattatactataaatttgttaaatctctttacaagatctcgtagtactacatagtattgttgcaacaactacacatgaaac

SEQ ID NO: 246041 - DNA, 446 bp, Glycine max
cgggtcgaccacgcgtccgactcatctgttttgacacagcacaagaaacagagtgaacacagaaccatcgccatgcttgatccaagaacacagcacaccaccaagtcttttgaattgtacgacgcagcaccacacagacctcacacatgggaagctacgaacagttccggtttgtggccctcgaaagcagctttcgacgaggtacaggttgatgattccggactatgtcacctccatgtggacaacgagccctgcacgccgcaagaacaacctccgtagcctctcgccgacgtcgatgacgcaagccatagtgagtgggcagacggagctcatggagatggtgaagaacatgccagagtccaactacgagctctctttgaaggacctcgtggagcaccacagggttgttgatgctactagacatgagacaaatgtggtggaagaga

SEQ ID NO: 246042 - DNA, 424 bp, Glycine max
gtcgacccacgcaaccgcccacgcgtccgggacatcaaaaggagaagaaagtgaagctgctaagaaggagttcatataagcccttaaattgttggaggaacagctgggagacaagacttattttggaggagacaatctaggttttgtggatatagcgcttgttccattctacacttggttcaaagcctatgagacttttggcaccctcaacatacagagtgagtgccccaagtttattgcttgggccaagaggtgccttcagaaagaaagcgttgccaagtctcttcctgatcagcaaaaggtttatgagttcattatggatcgaagaaagaagttaggcattgagtacgttggagcttaatggccaatgtgaagtactggttttccattggtcgttcatagccgttcaaataagtaatatttg

SEQ ID NO: 246043 - DNA, 438 bp, Glycine max
gacccacgcgaccgcgcgaaccaacaatcgcggagatggtctgctgactgctatacgtaaagaatgtctaagagttatggattataaagagttgcttttaaacgattgtggcgatcgcgttgctcagttgttacatgttcagtcagctaccccctttgtacaaaacccaaaaggcagtgttcctcaagagtttctgattgtgaacacccacctgttatttcctcatgattcaagtctttgtgtagtgagattgaatcaggtttaccagatattgcaatatgtggaattgtatcagagagaaaacaggctcaaacccatgcctattatactctgtggtgactggaatggaagcaagcgtgggcatgtttacaagttcctaaggtcacaggggtttgtatcatcatatgacattgctaatcaatacagtgacagttatgc

SEQ ID NO: 246044 - DNA, 453 bp, Glycine max
  unsure (1)..(453): unsure at all n locations
tacggtcttacattcncgggtccacccacgcgtccacattatcagtatcattcattgtcactacgattgttctaaaagcaattattactcttgagaagaattaaaatatcatcatcacaataacaagatgagttcaggaattagagcatggagtgtggcagctagtgttggagttgtggaggccttgaaagaccaaggcatatgcaggtggaatcatgctttaagatcagctcaacaccatctcaaaaaccatgttggctcattctctcaggctaacaagctttcttctactgctatgatctccacaacactaaaacatgagaaggcaaagcaatcagaggagtccttcagaactgtcatgtacttaagctgctggggccccaactagatatcataagtccaataagaaaatattctttctcttttaatttctaaaaattatcaagcttagtc

SEQ ID NO: 246045 - DNA, 395 bp, Glycine max
ccacgcgtccgaaaactagtaatattattcttcgaatccattttattattcataatgggtattttcacatttgaggatgaaaccacctcccctgtggctcctgctaccctttacatagctctagttacagatgccgacaacgtcatcccaaaggctgtcgaagccttcaggagtgttgaaaaccttgaggggaacggtggctctggaaccatcaagaagatcactttcgttgatgatggagaaagcaagtttgtgttgcacaaaatagaatcagttgatgaggcaaacttgggatacagctatagcgtagttggtggggttgggttgccagacacgtgtggagaatatcacattcgaatgcaaatttgctgctggcgccaacggagggtctgctg

SEQ ID NO: 246046 - DNA, 452 bp, Glycine max
  unsure (1)..(452): unsure at all n locations
tacggtctcatatccgggtcgaccacgcgtccgaacacgcgtccgcacanaccctcgcctcacactcctcaaaccctagcggcactacacacgttatctctctctctctctctctctctccctctctccttccccaagatgtcgagcgccgatcccgagcaccgagaagaggaggaggcacccgccgtcggcgacgacgaggacaccggagcacacgtcgctcccatcgtcaagctcgaggaggttgctgtcaccaccggcgaggaggacgaagatgcaatcctagatctcaaatcgaagctttaccggttcgacaaggatgggaaccagtggaaggagcgaagcgcgggcaccgtgaagttcctgaagcataaggctacgggcaacgttaagcttctcatgangcaatccaagacgctcaagattctgcgcaatcatctcattttgcctac

SEQ ID NO: 246047 - DNA, 371 bp, Glycine max
cacgcgtccacatgcccaatccaacaaccgctacgtctttgacacacatggcgaccctcttgaaactgacgatgaatattacatcaggccggccataacagacaacggagggcgtttcacattgatcaacagaaacaggtcgtgccctttgtacgtcggtctcgaaaacaccgacacaccgcagggctacccgatgaaattcaccccttttgccaacaaggacgacgacgataacgtgagggtgaacacggacttgaaagtgacactggtgcaagtttccacaacgtgtgtgcaatccaccgaatggaagttgggttggaatgacacgaggaatggaaggaggctcatcgtcactgggcgagataatggga

SEQ ID NO: 246048 - DNA, 436 bp, Glycine max
ccacgcgtccgatccacctgcaattgagaatcttatggagcttctcacaatgattgatgcctgcatgagggcttcagccaaaaatattactgctgtcattccatattttggatatgccacagctgatagaaagacgcaaggacgtgaatccattgctgccaagcttgtagcaaatttaattacagaagcatgtgcaaatcgtgtacttgcttgtgacctccattctgggcagtccatgggctattttgatattccagttgatcatgtgtatggccagcctgttatacttgattaccttgccagcaagactatttgttcagatgatttggtagttgtctcgccagatgttggtggtgttgccagagcacgtgcttttgccaaaaaattatctgatgctcctttagctattgttgataaaacgcgccatgggcataat

SEQ ID NO: 246049 - DNA, 391 bp, Glycine max
gtcgacccacgcgaccgtccatacctcgcgcctgccgctaatggggcgccttccatgtcaggaaccatggcgtacccccttcactcatcacctcccgccgccgcgccggcctcaccatcttctcggacactcacattcctgacaagctctgggactcctgctcggcctccgctcacgaaggttactgaagcaaaatgctcgcatcaactatctccgatgaaaacgatgccgttcaggtcctcgattgaaaggactacttcgaccaccatacgctgctactctcacgccggaactctaacaggtggccggagtttcataccgactatcgtgagctggtggcgacgtataacgactagatgacgattctggcgcaaaagttgctggctttgat

SEQ ID NO: 246050 - DNA, 547 bp, Glycine max
  unsure (1)..(547): unsure at all n locations
gggggggggggtgtgggggggggtgtgtgggtgtggggggcgggggggggggggggcgggggtgcgggggggggggggtgatgggtatgggagggtagcgtcagtacggtgtagttccggtcgaccagcgtcgaagnggggggggggggggggggggggggggggggcggggtgggggngggggggggggggggnggggggtgggggggggngggggtgggggtgagggggtgtggttgtgtgtgggtgtggggggggggggggggggggtgggctgtgtaggcgcgtgggggggagggtcgttgtttgtgaggtggtgggggggggggggggggggggtggggtggcggggggggggggggggggaggccggggggggggggtgggggcgtgggggggggggggggganggggggtgggggggggggggggggttggggggggtgtgggggggtgggggggggtggggggggtggggtgggggggggggcgtgggcggtgggggggggggggggggggggggggggggggggtggggggggggggg

SEQ ID NO: 246051 - DNA, 413 bp, Glycine max
taccggtcttacattcccgggtccaaccaagcgtccgataagaaatccgcaaaatttttgggaataaaggttggcaacttcgaaaattaacaaaatttcgaaccgaatttgttgcccaaattcccggctgcaaatttgaaaattgagatcttccttctcttgattcctaatgttgtaaaattgtaaaataaagatactgggttataaggtgtgagaatttagatcatttgctttaatttgatttgtttattttcccaggtaacgtctccttatggaaataaccttcaccacaatgaaaatgccacgcaaggtcaatttgcatttacaacagcggagagtgggaactatgtggcatgcttttggatggatggtaaacatcaagaagaagcaactgtaagccttgactggaaaac

SEQ ID NO: 246052 - DNA, 423 bp, Glycine max
acgcgtccgaactcagagaggaaagatggcatttttgtggtcagatctgatgcaacaagggtaagcagccaggttctgaaggctggagctcgtaagcatgaattgttagttactaatgcagttgcaacaaaggaaggccgtcctgcggcttctacatcaaaatctgggcatgaacttctcctttttgaggccctacgtgaaggtttggaagaagaaatggagagggatccttgtgtatgtgtcatgggcgaagatgtaggtcactatggaggatcctacaaggtgactaaaggtcttgccacaaagtttggggaccttagagttttggacacccctattgctgagaactccttcacggggcatggcattggggctgccatgactggtctgaggccagttgttgagggcatgaacatgggattc

SEQ ID NO: 246053 - DNA, 460 bp, Glycine max
ggtcaaacctaccgggtcgacccacgcgtccgactaaatgtttcaactatgaaggagaatgtggcggttcggcttttcactgacattgatcctaactatgaccctctgcagtatgagtatcctgtgaagacaaattttccgcagtttgtgttccatcagagcgggacggggacaggttgtgagtgtgcggacaggtgtgttgaggggtgcttttgtgccatgaagaatggatgggattttccttagaatcagagtgggattctcttgagagggaagcctttggtttttgagtgtggcccattttgtcgttgtcctcctcactgtcggaatcgtgtcacgcagaaggggttgaaaaatacgttggaagtgttcagatctacggaaactggttcgggagttaagtccatggaccttattcaagctggtgcttttatatgcgagtacacatgggttgttctga

SEQ ID NO: 246054 - DNA, 445 bp, Glycine max
tcgacccacgcgatccgaaacatctttccctccccttctgcttcaaaaagcttcgcttcgcggacttcttccttctccgctgctcatgcactcttcggatagaccgttccgctactggagcgaccgcgggtagtccacctcatctgctcactatcagatcctagagtacagtggtcgctggtgtcatcgaagggcttgatgggaagatcgctatcatggacaatgaaaatcgttacactggaaacttgacaagtcatctaaagcctggtggcggcgattttggaaacttctacaggcttccttctgtcaatgatttgagaattgacatgttaccatgatccatcagaattctccttgaatctgctattcgtacttgtgacaattttcatgtcaaatgcagaagattttgataagatactcgattgtgaaaataattctacgaagc

SEQ ID NO: 246055 - DNA, 425 bp, Glycine max
attgccggtcgacccacgcatccgaccacgcgtccgcccacgcgtccgcccagacgtctgcaagttgcttggcaaatttgagttatctggaattccacctgctcctacaggtgttccacacatcaccgtttgctttgacattgacgccaacggtatattgaacgtgtctgcagaggacacaatcactggacagaagaacaagattacaattaccatcgacaaatgaaggctttctaatgaggagattgagaagatggtgcatgaagctgagaagtacaacgctgaggatgacgagcataagaagaaagtggaggccaattcgacattggagaattacccctataacatgaggaacacaattaaagatgataagattgcttccaagctgtctgctgatgattacaagaacattgatgatgcaattg

SEQ ID NO: 246056 - DNA, 415 bp, Glycine max
ggtcgacccacgcgtccgaccatgcgtccgcactcttgcccgtatttgctaatacatacgctcttcccaatgcaactaatggggctgtcgattatggtcaatctgggtctccactctcgcagatttggccactggttgatccaaagcacttgtggaatctcgggggagggtcgttattggggtttggtatggctttccagtgaacatagcatatagcgcttgatgctttctggtaatcttcttgaggatagggtattcgagatgcaggggtgaacagtaccgattatgtatttttggtatctcgcatgagcaaatttggcattatgtaaatgtaccagtgcataagacatatttttggctataattacagtacgaacattgtgtcatgggatgtctacatacttttgagttatgt

SEQ ID NO: 246057 - DNA, 425 bp, Glycine max
cacgcgtccacaacgcgtccgcccacgcgtccggcaaattaaagtggttcacgaaccttagcataggctctccttgggtgctcttcaaacatgggaaaacagagcataccccaattctctgccctcaactgcatcgatctctccaaccccgagatcaatcaatccgtcaacttactcaaagaggcatgtttggattccggttttttctacgttgtcagtcatggaatacggcaggaattcatggacgaggtttttgcgcagagcaataagttcttctctcgtcctcacaacgagaagatgaagacgctcaggaatgaacaacacaggggatacacccctgttcttgatgagttgcttgatgctgaaaaccaagtacatggagattacaaagaggggtattatattggtgttgaggaaggtgaaga

SEQ ID NO: 246058 - DNA, 380 bp, Glycine max
ccacgcgtccgatctacttcaaccttgcggatcaagaagacgccgcagccatggtgaactactccatagaatccgacaatcccaccatagtcctgcaaggccagatgcgcttagcttacagtgcatttcacgaacactatggagactgcctttgccatcacgaagttgcccctagttaaagctaacagatacctgcacgatattttggcccacagacaggccatccctttccgacgcttctgtagtggtgttcggacgacagcccaggctaacagcagacactcgaatggtcaatgacgctggcccgtcaaatcagctaagttcatcctagatttgctgaagaacgctgagagtaatgctgacgtacaaggtttggatat

SEQ ID NO: 246059 - DNA, 444 bp, Glycine max
cacgcgtccgatgcacacaggatgcacattcaaccatcgttatgtgaaatcaaatccacgagaagtagagaatgccacttggatgctcacagtatttcattgttttggccaatatttctgccttcattttgaagctttccagcttggcatggcccctgtatacatggcattccttcgttttatgggtgatgaaaatgaggctcggaattatagctatagcctagaggttggggccaatggtaggaaactcatttgggagggtacaccacgaagtgttcgtgatagtcaccgtaaggttagggatagccatgatgggctcattattcaaagaaatatggccctatttttctctggtggggatagaaaggagctgaagctcagagtcacaggaagaatatggaaagaacagaattcagatgctggggtgttgcatgcaaatctctg

SEQ ID NO: 246060 - DNA, 438 bp, Glycine max
ggtcgacccacgcgtccgagaagtttatgtatcttgcattcctacttctatttgttttctctagccaattcttgcttggaggagcagatgcttcccccagacaagtgattgacacagaaggcaagaaagttcgagctggcgtagattactatatccgaccggtcccaacaaccccatgtgatgggcgtgggccgtgtgtggttggaagtggctatgttctcatagcaaggtcatccaaccacacttgccctcttagtgttgcggtggtggagggtttccgtggcctagcagtcacattcaaactagttaaccctaaaaaaggggtcattagggtttctactgacttgaacatcaaaacctccctaactaacacaagttgtagtgagtccacggtctggaagctagatgccctttgatgatcaactggacagtggtttg

SEQ ID NO: 246061 - DNA, 365 bp, Glycine max
  unsure (1)..(365): unsure at all n locations
ttcggccgccgacccacgtccagtattatctggttcataattatatatgtttatcctcatttttgactcagtcgtatgcttgtgattaaagatgggatttgctgtctgggaaccaccacatggtcattacaaaatgcttaagtatccatggaagaattatgtgaaattaagtggggctctaaggcactgtgcgtttatggtcatggctatgcatgggtgcatactttctgaaatacaggcccgagctgagaagagacaagttttccgcagtgagcttcagagggtaggttctgaangancaaaagtgttgcgtgaacttggaaacaaagttaaaaggatggagaaactaggtcgtggaaacttgc

SEQ ID NO: 246062 - DNA, 399 bp, Glycine max
  unsure (1)..(399): unsure at all n locations
cacgcgtccgagataagagtgtcatccaccaactttatcgcccattggttagttctggcattggttttggtgctcacagatggattgccaccctcctaaggcagtgtgactgcttggcaatcctcaggtctcctcaaggcccatctgaagaccccacagcccaagcgggtacgacaaacatgatgaagctcgcacaacgcatgaccgagtgcttctgctcagggatctgtgcttcatctgcttgcaagtgggacatactgcacattggtaatctggctgatgacatgagaatcatggcccggaaaatcgatgacccaactgaagctcctggcattgtgctgagtgcttcaacttctgtttggatgccggtgtcacngaaacaggtgtttgatttttctg

SEQ ID NO: 246063 - DNA, 438 bp, Glycine max
acgcgtccgaaaatattgaaaagccgcgagggaggtttcgtttcgtttcgttcagttcacacattctattctctatcgattcctcttccctttttctcaatccactacaccacagttatgaggagccaacttgtgtgtaatgggtgtaggagcatcttggtttaccctagaggagcaaccaatgtttgctgtgcgttgtgcaacaccattacctctgttcctcctcctggaatggacatgtcacaactctattgtggaggctgtacgacattgctaatgtacacacgtggtgctacaagtgtgagatgttcctgctgtcacactattaaccttgtaccagaatctaatcaagtcattcattgtgcgaactgccggacaacactcatgtatccttatggagcttcctcagtcaaatgtgcaatttgttgctatattact

SEQ ID NO: 246064 - DNA, 384 bp, Glycine max
acccacgcatccaaactgttacaccctctacttttcgtaatttctctcatccttctttctttcaagtgcaaaatcgatctctcactgcctcagcaatggctgcagatgatggtgtgaaacctccaactctcgagtttctcagcatctgcaagtctctcctcgccggcggagttgccggaggagtgtcacgaactgctgtagctcctctggagcgattgaagattctgctgcaggttcaaaatcgtcaagatataaaatacaatggaacaattcaaggcttaaaatatatatggaaaactgatggttttagaggaatgtttaaaggaaacggaacaaattgtgctcgtatagtcccaaattcagcagtgaagttctttagctatg

SEQ ID NO: 246065 - DNA, 474 bp, Glycine max
taccggtcttacattccgggtcgacccacgcgtccaaattagtccaaaaaaaaccccattggataacaaacccccgtttgggccaatgccgttgcctagagccgagggacatatcagctatggtggagcgcttaagcccggtgaaggtgatgccattgcacagtatgttcaacaagggaagcgtattccgcgaagaggagaagtgggtctttctgcggaggagattcagaagtttgagagccttggttatgtgatgagtggtagtaggcatcagaggatgaatgccattcgtattaggaaagaaaaccaggtttatagtgctgaggataagcgcgctttggctatgtttaactatgaagagaaggctaaaagggagcacaaggttatggctgatttgcagcgcctcgtgcagcggcacattggccaggatgttggcccaactcatgatccttttgctgcaaaagcctctgatgg

SEQ ID NO: 246066 - DNA, 407 bp, Glycine max
gacccacgcgtccgcccacgcgtccggtcttctcaactacgctactatgtatatatgtttttgcattttgctgggtctacattgtaagaattatggcatcagaggagacaacaatttggaaggcaatgataaaaactccagcctccatagtgttgataatttacacctttatatcaatgtggtttgtaggtggcctcactgccttccatttgtatttgataagtaccaatcagactgcatatgaaaacttcagataccgatatgatcggcgagccaacccatataatgaaggagtgttgaataatttcaaagagatattctgcatcagcattcccctttcagaggacaattttagggcaatggtgccgagagaaccagcattacctactcgattagttggtggaggc

SEQ ID NO: 246067 - DNA, 536 bp, Glycine max
  unsure (1)..(536): unsure at all n locations
cgtacggaaagttgatagcctgaanatcgatgcaatagtactgcggtaccggtccggaattcccgggtcgacccacgcgtccgtagatatatagaagagccttccatatatagcctcccaaaagaatgaagagtactagggctttggctctctttctactatgtaccctaacttcatcatatcagccttcagccaccgctgatattgtattcgacaccgaaggcaatcctattcgagacggcggcacatactatgtgttgccagttataagatgaaagggcggcggaatagaatttgccaaaaccgaaacagaaacatgccctctcactgttgtgcaatcgtcccttagagggctgaagtggtctaccacttataagttcatccccatttaaaagccttggaatgaggaggaggacttagagggaggctcaggttcactgatagacccggctgtgccgtaagctctaggaggtgggagcagtattgtaaagggtcatggaagaggaagtggaggtgtagactgagtggcagcaaan

SEQ ID NO: 246068 - DNA, 535 bp, Glycine max
  unsure (1)..(535): unsure at all n locations
ggataggatgttagtggantcctgaaatcgaagcgtngcgcatgccgtaccggtccgattcccgggtcgacccacgcgtccgtaaaaaatggtacacttgctatgggcgtgaatgcaattttcatgcagacatacattggtggtgtctcatgcactgtgatatgtagcaagaaaaggctgaaccatggtgtgttacttgtgagatatggtggaaaaggattctgaatagaagagatggtgggcaagccatgatggagcatgaggaattcgtggggggagaaatggggagaagatggctattacgggctatgcagagggcgttgcatgtgaggaatgaggagctaggggaagtgcaggtgagggtgcggaaaggacagtcgagagggtcagaagatagggaggtgggagggaggaggaggtggaagggagtgctaaaggagtaagggtcagtgtgtggaggtgtgtgtatgtagtgtgagttaggatttgtgggaacggaagagtggtaagagatgttgaatgagaggaaggagag

SEQ ID NO: 246069 - DNA, 520 bp, Glycine max
  unsure (1)..(520): unsure at all n locations
agtgggnatatgtccacgctgaggactgagacgtncgcatgccgtaccggtccggaattcccgggtcgacccacgcgtccgaaaacaatcaacaatagcttgctagctactcctgttgctgtgagaaccgttgatgtaggtgctttgcaagcaagatttagagactccaacaataaaagccatgcttaacacctaccatgcctccaaactctcatcaaaccagtgtggttctagccttgtgcaaacaatagatgcacctttacctctcgtatggtccctcataaggcgctttgagtatccacaagggtacaagctctttgtgaagaagtgcaaccttcttgatggggatggtggcattggaagcgtgcgtgaggtcatgatcacatctgggttacccgctggtgttagtgtggagaggttggacaagctcgatgatgacaagcatgtcttgaagtttagcatcattggtggtgatcacaggcttgtcaattatagttcaacgattactttgcatgaggag

SEQ ID NO: 246070 - DNA, 522 bp, Glycine max
tgagaggaggagttgtgtactgatcagtatcagtgccatgactgtaccgttcggaattcccgggtcgacccacgcgtccgaccggattgagtctcgccgccccgagcaaaactttaccatattgagggaactgtataggcggcaaaggcaggaagacgacatagctagagtagcggcagttctttccatacctcgggtttctgcgagcatcctacttcgtcactacaactggagtgttagtaaggtgcatgatgcttggtttgctgatgaagatcaagtccgaaaaacagttggtttgttggagaagccagttttccagaattctaatactagagagcttacttgtggcatctgtttttaatatgtgttctactgcacgggtgggatcttctgcttgtgtgctcgcttactgctatggatgctgtgcaggattttttatcatcatcaattagagaatgacctgtatgtttgttcagtatattagtagagtaataatttgattctaatttatttgtagatacg

SEQ ID NO: 246071 - DNA, 336 bp, Glycine max
taccgtccgaattcccggctcgacccacgcgtccgctagaatagatagatcctctgatgatgagtcgacggatgatgaaaatgaagctgttgtgagccaaggttacggggatatggatgtggatgatgtactcaagacaaatgaacacctggttgtgaagagtgggtcaaaattgttgccaggacatcttgaatactcaatacttgtgaatgcaaatattcaggaccctgctaatggtcccataaattcattccagttccatccgaatgcgcagttgtttcttgcagctggattggaccggaagcttagattttttcaaattgatggctagcggaa

SEQ ID NO: 246072 - DNA, 523 bp, Glycine max
tgagaggagcagtgccgtctgagatcgaggcagtagtcatgctgtaccggtccggaattcccgggtcgacccacgcgtccgccaccctcctggacccgcaggcctgggagagcctcaagtttcccgtgatagcgaagcctctcgttgccgacggcagcgccaagtcgcacaagatggcgctcgtgttcacgcgcgacgcactgaacaagctcaagccgccgatcgtgctgcaggagttcgtgaaccacggtggcgtgatcttcaaggtgtacgtggtgggcgagcacgtgcgctgcgtgaagcgcaagtccctccccgacgtgtccgacgaggagaaggcgctcggcggcgtttccgaggacctgatgtcgttctcgcaggtctgcaacctcgccaccgtgaacgactgcgacggctattaccgtttgatgcatctcgacgacgacaccgaaatgctccccgacgccttcgtcgtcgacatcgcttgggggcttatgcgcgctcttgaggttagccttttcag

SEQ ID NO: 246073 - DNA, 415 bp, Glycine max
ccgtccggattcccggctcgacccacgcgtccgctttatcagtatcattcattgtcactacgattgttctaaaagcaattattactcttgagaagaattaaaatatcatcatcacaataacaagatgagttcaggaattagagcatggagtgtggcagctagtgttggagttgtggaggccttgaaagaccaaggcatatgcaggtggaatcatgctttaagatcagctcaacaccatctcaaaaaccatgttggctcattctctcaggctaacaagctatcttctactgctatgatctccacaacactaaaacatgagaaggcaaagcaatcagaggagtccttcaaaactggcatgttcttaagctgctggggccccaactagatatcataagtccaataagaaaatatatct

SEQ ID NO: 246074 - DNA, 327 bp, Glycine max
taccgtctcgattcccgggtcgacccacgcgtccgcaaactagtaatattattcttcgaatccattttattattcataatgggtatcggcacagttgaggatgaaaccacctaccctgtggctcctgctaccctttacaaagctctagttacagatgccgacaacgtcatcccaaaggctgtcgaagccttcaggagtgttgaaaaccttgaggggaacggtggccctggaaccatcaagaagatcactttcattgaggatggagaaagcaagtttgtgttgcacaaaatataatcagttgatgaggcaaacttgggatacagctat

SEQ ID NO: 246075 - DNA, 524 bp, Glycine max
  unsure (1)..(524): unsure at all n locations
tgggtaggatgtagttgcacgactgagtcagtagacctncncacgccgtaccggtccggaattcccgggtcgacccacgcgtccgcccacgcgtccgcacaaaccctcccctcacactctccaaaccctagcggcacgacacacgttatctctctctctctctctctctctccctctctccttccccaagatgtcgagcgccgatcccgagcaccgagaagaggaggaggcacccgccgtcggcgacgacgaggacaccggagcacacgtcgctcccatcgtcaagctcgaggaggttgctgtcaccaccggcgaggaggacgaagatgcaatcctagatctcaaatcgaagctttaccggttcgacaaggatgggaaccagtggaaggagcgaggcgcgggcaccgtgaagttcctgaagcataaggctaccggcaaaggtaggcttctcatgaagcaatccaagacgctcaagaactgcgccaatcatctgattttggctactatgagtgtgcaggaccccg

SEQ ID NO: 246076 - DNA, 531 bp, Glycine max
  unsure (1)..(531): unsure at all n locations
tggtgagggagcacgtgaccggttgtaggacttaggcctatagncatgcctgtaccgtccggaattcccgggtcgacccacgcgtccgcttgcccaatccaacaaccgctacgtctttgacacacatggcgaccctcttgaaactgacgatgaatattacatcaggccggccataacagacaacggagggcgtttcacattgatcaacagaaacaggtcgtgccctttgtacgtcggtctcgaaaacaccgacacaccgcagggctacccgatgaaattcaccccttttgccaacaaggacgacgacgataacgtgagggtgaacacggacttgaaagtgacactggtgcaagtttccacaacgtgtgtgcaatccaccgaatggaagttgggtgaaaatgacacgaagagtggaaggaggctcatcgtcactgggcgagataatgggatacaaagtgcaggtaactattatagaatagtggaaacagaaagaggtggtatttataacaatcggggggtgctctacggaag

SEQ ID NO: 246077 - DNA, 262 bp, Glycine max
cccggctcgacccacgcgtccgaaaaaaaaaaaaaaaaaaaaaaaaaaaaaaaaaaaaaaaaaaaaaaaaaaaaaaaaaaaaggaaaaaaaaaaaaaaaaaaaaaaaaaaaaaaaaaaaaaaaaaaaaaaaaaaaaaaaaaaaaaaaaaaaaaaaaaaaaaaaaaaaaaaaaaaaaaaacaaataataacgaaaaaaaaataaaaataaaaaaaaaaaccaccatataaaaaaaaaaagtaataacaaaaaaaaaaatataa

SEQ ID NO: 246078 - DNA, 522 bp, Glycine max
  unsure (1)..(522): unsure at all n locations
gggtaggagcatttcccgatggacgcagtaggcagtagncacgcctgtaccgtccggaattcccgggtcgacccacgcgtccgtgaagaaatctgcatactttttggtattaaagttggacacttctgacattaggcaaatgtctgagctgatttgttgctcacattccctgctgcagatttgagaattgagatcttccttctcttgattcctaatgttgtaaaattgtgaaataaagatactgggttataaggtgtgagaatttagatcatttgctttaatttgatttgtttattttcccaggtaacgtctccttatggaaataaccttcaccacaatgaaaatgccacgcaaggtcaatttgcatttacaacagcggagagtgggaactatgtggcatgcttttggatggatggttaacatcaagaagaagcaactggtagccttgactggaaaacaggaatttatgccaatgattgggagtctgttgcatagaaagaatagatagaggttaactgatcg

SEQ ID NO: 246079 - DNA, 535 bp, Glycine max
  unsure (1)..(535): unsure at all n locations
tgtggggagtatgtgcgctacagtatacgtagcagtagtcatgcagtaccggtccggaattcccgggtcgacccacgcgtccgctctcagagaggaaagatggcatttttgtggtcagatctgatgcaacaaggggaagcagccaggttctgaaggctggagctcgtaagcatgaattgttagttactaatgcagttgcaacaaaggaaggccgtcctgcggcttctacatcaaaatctgggcatgaacttctcctttttgaggccctacgtgaaggtttggaagaagaaatggatagggatccttgtgtatgtgaaatggtcgataatgtattatattattaatgatatttgtatgtattataaattttattttttaaggtgaggtatgaattaaattttatatatgtatatttataaattagattatagattatataaggaatatatatttataatttaatattatattatagtttttagattttaatatatatatataatatatatgataatgaaataataagattattaan

SEQ ID NO: 246080 - DNA, 460 bp, Glycine max
attcccggctcgacccacgcgtccggccccagtatttcaagagtgcatttgtaggatacactgttggcttggtccttacaattgttgtgatgaactggtttcaggctgcacagcctgctcttttgtatattgtaccttctgtaattggatttttggctgctcattgcttatggaatggtgatgtcaaacagttgttggagttcgatgagtcaaagactgccaattcacctcaagagagtgctgacgacaagtctagcaaaaaggttgaataagttgaagcatgcccaataccaatacttccgagtcacagaacaaatactgcttttttctgagaaaaccgtttcttttaaagctaacttatttcagcagcacacctctgtaactgattgtgattaaaaaaaaatgtattacttatttttcaaattggcgttttgcttttactggctgaatgccccaatct

SEQ ID NO: 246081 - DNA, 518 bp, Glycine max
  unsure (1)..(518): unsure at all n locations
agtgaggagggtgtgccccactgagactcaggcatagcactgtgtaccggttcgattcccgggtcgacccacgcgtccggttttatctggttcatnttatatatgtttatcctcatttttgactcagtcgtatgcttgtgattaaagatgggatttgctgtctgggaaccaccacatggtcattacaaaatgcttaagtatccatggaagaattatgtgaaattaagtggggctctaaggcactgtgcgtttatggtcatggctatgcatgggtgcatactttctgaaatacaggccccagctgagaagagacaagttttccgcagtgagcttcagagggtaggttctgaaggagcaaaagtgttgcgtgaacttggaaacaaagttaaaaagatggataaactaggtcgtggagacttgctgtatgaagtgcactaggcagcaaaagaattgcaacagaagatcgattaaaaatcttaccttcttgtcaattcagagagctgggaaattggaaaccc

SEQ ID NO: 246082 - DNA, 540 bp, Glycine max
  unsure (1)..(540): unsure at all n locations
cgggggggagttaggtgnaaattagtaatcgaaagcagtngcgactgccgtaccggtccggaattcccagctcgacccacgcgtccgttctgttacaccctctacttttcttaattactctcatccttctttctttcaagtgcgaaatcgatctctcactgcctcagcaatggctgcagatgatggtgtgaaacctccaactctcgagtgaatcagcatctgcaagtctctcctcgccagcggagtggccggaagagtagcacgaagtactgtagctcctctggagctattgaagattctgctgcaggttcaagatcaacaagatataaaatacaatggaacaatagaaagctgaaagtagatgtggaaaactgaaggtattacatgaatgtgtgagaagaaacgggaagagaagatagtaggagagacaaggagtgaactgggagggagtaaggcgaggaacagcaatgagtggagaagagagaggtctaaatatagtttaggagagaagagatgagagcaggtagataggaagaagtg

SEQ ID NO: 246083 - DNA, 393 bp, Glycine max
taccgtctcgattcccgggtcgactcacgcgtccggtttgagtctcagaagaaacccgcattggataacgaacccgcggttgggccagggccgttgcctagagccgagggacatatcagctatggtggagcgcttaggcccggtgaaggtgatgccattgcacagtatgttcaacaagggaagcgtattccgcgaagaggagaagtgggtctttctgcggaggagattcagaagtttgagagccttggttatgtgatgagtggtagtaggcatcagaggatgaatgccattcgtattaggaaataaaaccaggtttatagtgctgaggataagcgcgctttggctatgtttaactatgaatagaatgctaaaagggagcacaaggttattgct

SEQ ID NO: 246084 - DNA, 460 bp, Glycine max
accgtctcgaattcccgggtcgacccacgcgtccgcccacgcgtccggtcttctcaactacgctactatgtatatatgtttttgcattttgctgggtctacattgtaagaattatggcatcagaggagacaacaatttggaaggcaatgataaaaactccagcctccatagtgttgataatttacacctttatatcaatgtggtttgtaggtggcctcactgccttccatttgtatttgataagtaccaatcagactacatatgaaaacttcagataccgatatgatcggcgagccaacccatataatgaaggagtgttgaataattgcaaagagatattctgcatcagcattcccctttcaaagaacaattttagggcaatggtgccaagagaaccagcattacctactcgatcagtgtgtggaagctttatgaaccataatttgagaaaagctgggga

SEQ ID NO: 246085 - DNA, 434 bp, Glycine max
ccgggtcgaaccagccttcgacaaggcttccggtggaattaccacaaacattgcatgttcagctccaatttctgcagtttatactttctcctatgaatcagttaacgcagctttgcttcctcatcttccaaaggagtattgttcttttgcccattgcgtgggaagtgttgtgcaagcattgccacctctttcatttttactcccagtgagcgaataaagcagcagatgcaagttggttctcattatcgcaactgctgggatgtattggttggaattatcagaaatggtggtttttcctccctatatgcaggttggagagctgtactattccggaatgttccacattcaattatcaagttttacacatatgaaagcttgaagcaagtgatgccatctagtattcaacccaactcggttaagacggtaatgtgtgg

SEQ ID NO: 246086 - DNA, 419 bp, Glycine max
ttgctagtggtactgtcttagctttgattctctgttctctgttttgttctgtttcgcgtattgtcttcatacaggaacttgaacaatgaagaatgcaaagggcaagggagcagcaagggcctcaaaagaatcactgaagcccgttgatgaccggttggaaagcggaaggcttccggtaagcctgggagaagtagtgcaccaaagaaggagaagaaggccaagaaagaccccaacaagcctaaaagaccacccagtgctttctttgtgttccttgaggagttcaggaagacctttaaggctgagaatcctaatgtgaaggctgtatcagttgttgggaaagctggatgagagaaatggaaatccttgtccagtgctgagaaagctccatatgaagccaaggctgcgaaaaggaaagctga

SEQ ID NO: 246087 - DNA, 420 bp, Glycine max
cacgcgtccgaacacgccttcgcacaattttgattgtgatttaatggatttaattcactacgaaagtgcattgtacctatgaataacatccataattgatgccacaatttgattgtgagttaatggatttggttctcttatttgatacttcaggagtacatgttaagggcagagtttcgtcttcccagtatagtagatgaggaagcaactcctgagagaaaagctcctatacgtgtaaaatttgagataccatattttactgtgtctgggatacaggtattgctccgtgtactgatgtacaatcttcttatattctgaatattgttatgcctgtatgcatctctatcttattaaaagatgaatatgtcatgtattttatatctcacatttgtcaccattgatgtctcacatgtcattttg

SEQ ID NO: 246088 - DNA, 445 bp, Glycine max
gacccacgcgtacacggacgcgtggggcacaatggactaccttctacttcttccactaataatcaccatagtatggataaacattcatgtattcatctctagcttcaaaccactcaaatcctctaaaaatcccccgggtcctcgcccttttccaatcataggaaacatcttggagcttggcaaccagcctcaccaagcacttgccaagctttctcaaatttatggtcctataatgagtctcaagcttggtaagactaccaccattgtcatttcctctccacaagttgccaaagaagtgctacaaaaacatgatcaaatttttgctaataggacagtccctgatactctccgagcacttgatcatcacatactttctgtggtgtggatgccacctttagcacaatggaggacccttaagcgagtttgtgctaccaaagtgttctct

SEQ ID NO: 246089 - DNA, 465 bp, Glycine max
acggtcacgaattcccgggtcgacccacgcgtccactcagttctctcacacactcattcggtgctccgaatctcagattctagggttagggttcccaatttctccaccgatcagaaaatgagttcaactggtggttctaccaagggcggaaggggcaagcccaaagcctccaaatccgtttcaagatcgcagaaagctggtctccaattccccgttggaagaatcgctcgattccttaaggctgggaaatacgccgagcgtgttggtgctggtgctcctgtgtacctctctgcagtgctcgaatatctcgctgctgatgttttggaattggctgggaatgctgctagggataacaagaagaatcgtattgttcctaggcacattcagcttgctgtgaggaacgatgaggaactgagcaagcttttggggtctgttaccattgccaacggaggtgtcttgccgaac

SEQ ID NO: 246090 - DNA, 458 bp, Glycine max
aattcccggcccgacccacgcgtcaacgaatttctatctatctcttgtttcaatttcaacaacggttactcctttttcgttttgagtttcaatcaagccatcatcatgtctaccgcatcgcaacccaaggccaagaaaacggcgtcgtccaagaagcccctctcccaccctcccttcgccgtgatgatagcagaggcgattgcgagtctgaaagagagaaccggttcgagccaatacgcgataaccaaatacatcgaagggaagcacaaggagttgcctgcaacctacaagaagcttgtcctcgttcatctcaagaaatctgttgctgctggcaagcttgttaaggtgaaaaactcctttaagctcgcaccgactaagcctgctccggttaaggccgctgctcccaaaaagccaaccaaagctgccactaagcccgcttccaagcccaaagctgctac

SEQ ID NO: 246091 - DNA, 457 bp, Glycine max
aattcccggctcgacccacgcgtcaatccatccaaaccttaaaaagattcagtgaagaacaacgttaatggcatctcttggtgtgcaagcagttcatcctcctccattaacatccacctccgacccacctcctctttttgatggcaccaccaggttgtacatcagttattcttgcccctatgcacaacgtgtatggatcgctcggaacttcaagggactaaaagacaagatcaatttggtccctataaaccttcaagacaggccagcttggtataaggagaaagtctaccctgaaaataaggtgccatccttggagcacaatggcaaggtgtttggagaaagtcctgatttgattcaataagttaaatgaaaacttttgaaaggacacctttgtttcccagagattctgccaagaaagagttcggagagcaattgatatcccatgttgatacattca

SEQ ID NO: 246092 - DNA, 404 bp, Glycine max
tttccgctttcacttcttctctctcaccctccaactatgagttactacaaccagcagcagccacccgtcggtgttcctcctccccaaggttacccaccgccggaatcttacggaaaggacgcgtaccctccgccagggtaccctccacagggaggataccctccgcaggcgtatccagcacaggggtaccctccaccctacgcgcctcctcagtacgctcagcctccgccgcaacaacaccagaattcatctggcccgggttgcttagaaggatgtttggctgctctctgctgctgttgcctgttggatgcctgcttctgagaaagaaaagagaggttgctttgcacaaattggatttgaaactgtgttttgactttgaacatgaccattatcgctcttagttt

SEQ ID NO: 246093 - DNA, 428 bp, Glycine max
cccacgcgtccgaccacgcgtccgcccaagccttcgggttgatcgggatcaagagtccttcagtttctcctcgttgttcttcgctttcctgttttcaatttcgattctttcgttaatttaataagatgtttgggagggcaccgaagaagagcgataatacgaggtactacgaaatcctcggcgtctccaagaacgcttcgcaggatgatctgaagaaggcttacaagaaagccgccattaagaatcaccccgacaagggcggtgatcccgagaagtttaaagagctggcgcaagcttatgaggttctgagtggacctgagaagcgtgagatatatgatcagtatggtgaagatgcgcttaaggaatgaatgggtggtggcggtggccatgatccatttgatatcttttcatctttctttggctgtggg

SEQ ID NO: 246094 - DNA, 505 bp, Glycine max
  unsure (1)..(505): unsure at all n locations
cggttgngttnnnggcaatgttcaaggggccaggtaccggtgaggaattcccggcgcgacccacgcgtacagccagtagtcatatgcttgtctcaaagattaagccatgcatgtgtaagtatgaactaattcagactgtgaaactgcgaatggctcattaaatcagttatagtttgtttgatggtatctactactcggataaccgtagtaattctagagctaatacgtgcaacaaaccccgacttctggaagggatgcatttattagataaaaggtcaacacaggctctgcctgttgctttgatgattcatgataactcgtcggatcgcacggcctttgtgccggcgacgcatcattcaaatttctgccctatcaactttcgatggtaggatagtggcctaccatggtggtgacgggtgacggagaattagggttcgattccggagagggagcctgagaaacggctaccacatccaaggaaggcagcaggcgcgcaaatttacca

SEQ ID NO: 246095 - DNA, 425 bp, Glycine max
cccacgcgtcagaatggcttctagttcagaatctcaatctcagtctaaaccgctccaagaccgagttgcaatcgtcaccggctcgtcccgcggaatcggccgagaaatcgcgcttcacctcgcctcactcggcgcgcgactcgtcgtcaacgagacctccaactcggcccaagccgactcagtcgcggcgcagatgaacgccggttccgccaccacgacaccgcgcgccgtcgtggtccaagccgacgtgtccgatccggctcacgtgaagtcgctcttcgactcggccgagcgcgccttcgactcgccgatccacatccttgtcaactcggcgggcgtgatcgacggcacgtatccctccgtcgccgacatcaccgtggagtccttcgaccgcactttcgcggtgaacgcccgtggcgccttcg

SEQ ID NO: 246096 - DNA, 195 bp, Glycine max
acccacgcgtccacaaaaaaaaaaaaaaaaaaaaaaaaaaaaaaaaaaaaaaaaaaaaaaaaaaaaaaaaaaaaaaaaaaaaaaaaaaaaagaacaaaaataaaaaaaaaaaaaatgattatgcatgtggggcgggggccccagcgtttccgtctttgggtttcctttctttggctttcgttttccttcttcttt

SEQ ID NO: 246097 - DNA, 437 bp, Glycine max
aattcgcgggtcgacccacgcgtccagtctcttgcacatcaaatgtacaagactggcaattataagcaagccctagaacacagcaacactgtctatgagagaaatccgctccgtactgacaacttactactcctgggtgcagtttattatcagttgcatgattttgatatgtgtgttgcaaaaaatgaagaagcactgaggattgagccacactttgctgagtgttacgggaatatggcaaatgcatggaaggagaaaggaaacattgaccttgcaattcgctactacttgattgccatagagctccgtcccaattttgctgatgcatggtcaaatctagctagtgcatacatgcgtaaaggaagactcactgaagcagcccagtgttgtcgtcaagcacttgctagaaatcctctaatggttgatgcccatagcaa

SEQ ID NO: 246098 - DNA, 303 bp, Glycine max
ggtaccggtcatcggaattcggggccgacccacgcgtccagagacacgtgatttgattgatcggtataagaggttgaacggtaggatgatcaggctattccgttcaatgatatgtgcaaatgcgacagtagactcacaacgattcaaggggaatattgaagaagttagcactgctggacatctagtgggcacagagtgctaaattacatggacagtgaggctgtcaaaactcaagccaacaactagtctgcttcacaaggagggcaaaatcatatcataagcgagtagacaagtagctttatg

SEQ ID NO: 246099 - DNA, 598 bp, Glycine max
  unsure (1)..(598): unsure at all n locations
cgggggcggggggnntcggcggggagggggcgggagcgagggagggggaggcgggcgggaggcggnagggggtcagtgggccgggcggggtggggggggtcggataagttccaggcgtccagtacggtcaggaattcgcgggtcgacccacgcgtccgagcaaagcttattccatcatacatgactcatgtcagcacacgtgtggcatgaacaataggttatttggcaccagagtatgcaataagggggcagctgacacgtacagcagatatttacagctttggtgtccttctcgtggagatagttagtggaagatgccacacaaattcacgattaccaataggagagcaatatcttttggaaatgacatgggaacgttatcagaatagagaattggtagggcttgtagacatatcactagatggccatttcgatgccgaggaggcatgtaagtttctgaaaattggacttctttgcactcaggacacgtcgaagctccgggcgaacatgtcatctgtggtcaaaatgctcacaagagagatggatattgatgaaagtaagatgataaagccaggcctgattccagattttaacgacc

SEQ ID NO: 246100 - DNA, 424 bp, Glycine max
aattccccggcagacccacgcgtccacatttataaaaaagtcacaaacagagaattaggcaataagataattaaagatgtctgacgattgcaaaggtaagagctcatggcctgagctagttggagtgcaagggacagttgcggaggctacaattgagagagagaaccctttggtggatgctatcattgtgcccgaaggaaacatggtcatcactgatttccgctgtgatatggtttgggtttggatcgataaagatggaattgtcaaggaagttccccacattggatagaaactgctccccactagctagggatcaaataattgtttccagttttatgttattttattcagaataacgtttcacaaatgtcaaaagattactgtaataaaccacctacagttggccttgtataatgttttagac

SEQ ID NO: 246101 - DNA, 489 bp, Glycine max
  unsure (1)..(489): unsure at all n locations
aactcaacggagctaggtaccggtcacgaattcccgggtcgacccacgcgtccacccacgcgtccggagaagaaaggtcaatattctaagttctggaatgagtttggtaaatccattaaacttggtatcatcgaggatgccaccaacagaaatcgtttggcaaaactgctcagatttgagagcaccaagtctgagggtaaattgacatctctggatcagtacatatctagaatgaaaactgggcagaaggatatcttttacataactggaaccagcaaagaacaactggaaaactctcccttccttgagcggcttaagaagaaaaattttgaggttattttcttcacggatccagttgatgagtacttgatgcaatacctgatggattatgaagacaagaagttccaaaatgtgtccaaggagggtttgaaacttgggaaagattcaaaagacaaggaactgaaggaatcttttaaggatctttacaan

SEQ ID NO: 246102 - DNA, 438 bp, Glycine max
acccacgcgtccacccacgcgtccgcccacgcgtccggcaggctttctgaccccagcaacgtgcttcagagctgggacccaaatctcgttaatgcttgtacttggtttcatgttacctgcgactccaacaatcacgtcattcgcttagacttgggcaattctaagctctccggaactttgggaccagaacttgcccagctaccccacctccaatacctggagctctacaggaataacataagtggcaacattcctcgggaactttctaaattgaagaaccttattagtatggatttgtatgacaaccaatttcatggcaaaatccccaagtcttttggcaacttgaactcacttaaatttctacgcctaaacaacaacaaactgacaggagcgatcccaagagagctcactcatcttaaaaatctcaaaatccttgat

SEQ ID NO: 246103 - DNA, 287 bp, Glycine max
aattcgggctcgacccacgcgtccacggacgcgtgggttttgttatttgcatctgagattccgattagttaaatgatgttggttttcttagttgtagagaaccttgaatagtatttttgaaattacgaattcaagaaaaaaattaaaaaaaaaaaaaaaaaatgaggagagaaaagagagaaaaataaaaaaaataaaaaaaaaaaaaggaaaaaaaaaagaaaagtgagataaaatgaaagaggaaggtggaagtagaaaaaaaaagggggggtcgcccaaagggt

SEQ ID NO: 246104 - DNA, 350 bp, Glycine max
acgcgtcagactcccacctccaccaccattgtcaaaacccccaccagtagcaagagaacggcttccatctctaccacccctccctgagaaagttgacccacctattgtcactctggatgatctcttccgcaaaaccacagcaactcctcggatctactatcgacctttgtctgaagagcaagttgccgcaaaactttcaacacagggtaaaagcgggaggcagtagataggccattagcctgcaaatcgtcccttgcagccctttaactgatttggatagttttagtagtgctatgggattattgtgaatgcgtcgtgttggcagatctggtggtgttttgtctcgggaa

SEQ ID NO: 246105 - DNA, 444 bp, Glycine max
acaagccttcgaacaagccttcgttcaaaggaaccaattaaggaaaaagaaaaccaccctgaaaacctcaggaattatcagaacattcccgggggaaaatttgtacttcaccccatcatgaatgtcccctcagaatttgagcatgtggaacagggggatgcattgtatgcaatggaattagctttgtctttggagaagttagtgaatgagaaacttctgaatgtgcacagtgtggcagatcgcaacaatgaccctcaaatggccgacttcattgaaagcgagtttttgtctgaacaggttgaatcaattaagaaaatttcagagtatgtggctcagttgagaatggttggaaagggtcacagtgtgtggcactttgatcaaagacttcttgattaggaagatgctgcttaatcttgaatagccttattattagtcttcatttac

SEQ ID NO: 246106 - DNA, 503 bp, Glycine max
  unsure (1)..(503): unsure at all n locations
ggtggttnnnggcaaacgttaccggtcaggtaccggtctaaaattcccgggtcgacccacgcgtccgaggagtttaaaagaggacatgaagaaaaacctttgaaatgaccgaccttggtttgatgagttacttcctcggcatagaggtaagtcagagaaatgaagggatattcatctcgcaaaagaaatacacagaaggcttacttaagaaattcaagatgtatggttgcaaacctattgctactccactcataacaaatgagaaactacagaagaatgatggagcaccagaagctgatgcatccaaataccgaagtctaattggaagcctcctatatttgacagctacacggcctgacataatgtatgctacaagtcttctatcaagattcatgcaaagcccaagtcaaatacactttggagcaggaaaaagaattttgaggtatctacaaggaacaaaagagttcggtatatggtatactaccgaaaccaactcaaaatta

SEQ ID NO: 246107 - DNA, 445 bp, Glycine max
gacccacgcgtacacttgctcatcaagtccaagaaccaacctaccttttgcaatctcaattcaatggcgtcctctctcattgcgaagcgcttcctctcctcttccctcctctccaggtccctccttcgccccgccgcttccgcttcccaccgctctttcaacaccaacgccatgcgccagtatgacaaccgcgccgacgaccacagcaccgacatcgatcgtcactccgaacgctctttccctagcactgcgcgccgcgacgatatcttctcagatgtgttggatccattttttccgactcggagtttgagccaggttctgaacatgatggaccaggtcatggacaatccgttcctctccgcgtcgcgcgggatcggagctggcgctggagtgcgtcgcggatgggacgcgagggagacagaggatgctctgcatctgcgcgtgg

SEQ ID NO: 246108 - DNA, 444 bp, Glycine max
aattcccggtcagacccacgcgtccacaggtgtatttactggtgtcttctgcttcttgcaagtagcaagtgcagagctgcaacaagcattacacattcatcgcatatctgaacaaacttcattgaaaagactgacagatttaacttatttgaagcggcaaatcgagattcctttatatgggattatgttctctcggaaattgttacagggtactgaattgggagctgaagaatgacaatttctgcaaatgggcagtcggtgtcaacgccagattagcaaaattctggatgactcggatcttgaaagcatcattgatggctacatggattttgatatggctgaattcattttgcatgaagttctggttgactctctaagctcgagtcatgatcaagagtaatgcacaaggtattcgagtattcaatgaagttgatgagaagatca

SEQ ID NO: 246109 - DNA, 489 bp, Glycine max
ccgatcgtacgggcgaggtaccggtcacgaattcgcgggtcgacccacgcgtccagaaaccttaaaaaacaagtagtgttccgaaaagatggctcagcaggaagtggtagaagggttcaagttcgaacagaggcacgggaaagagcgcgtgagagtggcgcgcgtgtggaagacgaggcaggggcagcacttcgttgtggagtggcgcgtgggcatcactctcttctcagactgcgtcaactcgtatctccgcgatgacaactctgacatcgttgctactgataccatgaaaaacacagtgtatgcaaaagcaaaggaatgctcagacatactctctgctgaggactttgctattttgcttgctaagcactttgtatcattttacaagaaggttactggtgctattgtgaatattgtggaaaaaccatgggagcgtgtcattgtggatggtcaacctcatgaacatggtttcaaacttgggtctgagaa

SEQ ID NO: 246110 - DNA, 308 bp, Glycine max
aattcggggccgaccacgcgtcaacacgcttcttctttttctcttctctcatttttcagtttctccgtttcttattcgttagatctcatcttacactcgccatcaagttcgtctcgcgccaccgtctacgcagctccgatcacctcctttggttccctcactttctcgctctgcttcttctcagaaatatgccttctcagaaggttgaaacgggtcatcaagacacggtcgatgatgttgcgatggattactatggtaagatgctggccacggtttcatcagatcacactagtaagataattggggtc

SEQ ID NO: 246111 - DNA, 470 bp, Glycine max
  unsure (1)..(470): unsure at all n locations
cggtctcatattcncggggccacccacgcgtccacacatacagatttgagccttttatattatcatggcttctaaggtggtttcggttttggttatagcgatgatgttgtttgccatgaactgtaactgcactagtgttggccacatgccttcaaccaaagaggaaggtcacgattttcaggagtctaaagccaagaccacacaaactgcgaacaaggccatggaaactggtaaagagggacaagaagccgcagagtcatggacagaatgggctaaagagaaactcagtgaaggtcttggcttcaaacatgatcaggaatccaaagaatccaccactaacaaagtctctgattatgccactgacactgcacagaaatccaaggattatgcaactgacactgctcagaaatcaaaggactatgcaggtgatgctgctcagaaatcaaaggactacgcaggtgatgctgctc

SEQ ID NO: 246112 - DNA, 462 bp, Glycine max
  unsure (1)..(462): unsure at all n locations
taccggtcttatcattcccgggtcgacccacgcgtccgatttgttgcaggcatcacatctgatctcacacgattcggattcggaattttctcgatccctttctgatctgtgatctctgatctgtttgcgttacttgatcttatgatacttgtgttactatatgattcttttattactctcacgccaatagattatcaacgatcgtgagactggaagatccaggggttttggatttgtgaccttcgcctcggagcagtccatgaaagacgccatcgaagggatgaacggccaaaaccttgacggccgtaacatcactgttaacgaagctcagtcccgtggtggcggtggcggccgaggcngtggangtggtggatatggtggtggtcgcggtggtggatatggtggtggtggtcgcggttgtggagggggatacaaccgtatcggtggcggtcgacgctatgg

SEQ ID NO: 246113 - DNA, 446 bp, Glycine max
  unsure (1)..(446): unsure at all n locations
gggtccacccacgcgtccaaatccttttcccttctcggtccaaaggggtgccctgagatcacattgaacaatggtgaaggctgtggccgttcttggcagcagtgagggtgtcactggaactattcacttcgttcaggagggaagtggtccaaccaccgtaactggatctcttgctggtcttaagcctggtctccatggtttccatgtccatgccttgggggacactaccaatggttgcctctcaactggatcacatttcaatcctaataacaaggagcatggtgcccctgaggatgagaatcgtcatgctggtgatcttgggaatgttaatgtcggtgatgatggtactgtcagcttcactattactgacagccagattcctctcactggaccanacaacatcatangaatggcggttgttgtccatgctgatcctgatgatcttg

SEQ ID NO: 246114 - DNA, 490 bp, Glycine max
aaaagtctacggggctaggtaccggtcaggaattcccgggtcgacccacgcgtcaactttggtttcacgtatgagctgaagctttcaacgaggccagagaaatacctaggagatattgcaacttgggacaaagctgaaagtgctcttaaagaagctttagatgattttggcaagccttggcagttgaatgaaggggatggtgcattctacggaccaaagatagacatcagtgtatctgatgcattgagtaggaaattccagtgtgcaactttgcagcttgacttccagcttcctgatcgttttaagttggaattctcagctgaggatgaagccaaaattgagagacctgtaatgatacacagagccatcctaggatctgttgaacgcatgtttgccatacttttagagcactacaagggtaaatggcctttctggctcagtcctcgtcaagcgattgtatgccctgtgtctgaaaagtcacaatcttatg

SEQ ID NO: 246115 - DNA, 469 bp, Glycine max
  unsure (1)..(469): unsure at all n locations
taccggttaggaattcccggctcgacccacgcgtccacactagaagtattattattcttccatttccattaaaaagaaaatatcataaatgggtattttcacattcgaggacgaaatcacctcccctgtggctcctgctactctttacaaagctctagttacagatgccgacaacatcatcccaaaggctcttgattccttcaagagtgttgaaaacgttgagggaaatggtggccctggaacaatcaagaagataactttcgttgaggatggagaaaccaagtttgtactgcacaagatagaagcagttgatgaggcaaacttgggatatagctacagcgtagtgggtggtgctgcgttgccagacacagcggagaagatcacattccactccaaattggctgctggtcccaatggaggctctgctggcaagctcactgtcgnaatacanaccaaaggagatgctcag

SEQ ID NO: 246116 - DNA, 270 bp, Glycine max
gacccacgcgtcaacccacgcgtccgcccacgcgtccgcttccgatctctttaccttattgctcgtggcaccggtggcattaatccttgtgtctcatcctatggagcagatcagtttgatgatactgactcggctgagactgaacgcacgagttctttcttcggttggttctatttttcaatgaacattggcgctcttagtgcatcttctctattggtttggatacgcgatggtgtgggttcgggatggggctttggtattcctgctgta

SEQ ID NO: 246117 - DNA, 387 bp, Glycine max
gacccacgcgtacaaccaagcctagaagcgaaatcgcaatcgcaatccagcgaatatgaaggtcgtcgctgcatacttgctcgcagtgttgggagggaatccttccccttctgccgatgacatcaaacacatcctcggcgcagttggagctgaggctgagaatgagttggttgagttgctcttgactgaagtcaagggaaaagacttcaatgagctaattgctagtggaagtgggaagatgtctgcagtgtctggtggctgtgcagcggttgccgttgctgctgcaccagctggaggtgctgctgcagttgctgccgaggcagacgaagaagagaggttcgaagagaaggaggagtctgagtaggatatgggtttcagtttgttcga

SEQ ID NO: 246118 - DNA, 313 bp, Glycine max
cacgcgtccgattgctgaacgtgacactaatcgaggactacaccaaaatctgggagaactttggtaggttcataaaattaggttgcattgaagacactggacttcactacgcgcattacaccagtactgcacgttttacacttccaccagtgaggaggaacttacgagcctagatgattatgttgaaaacatgggagaacaccaaaaggctatcttttacctagcaactgacagcttgacgagtgcaaagactgctccatttttggagacattggttcagacagatattgaggttctttatctggttgaacct

SEQ ID NO: 246119 - DNA, 490 bp, Glycine max
  unsure (1)..(490): unsure at all n locations
aaacatgaacctgtcaggtaccggtcttacaattcccgggtcgacccacgcgtccgattgctgaaagttaaaattaagaaggctaccaaaaaatccgggaaaaacttgggaaggtccataaaattaggttgcattgaaaacacgggaaatcataagcgcattacaccattattgaggttttacacttccaaaagtgaggaggaacttaaaagcctagatgattatgttgaaaacatgggagaaaaccaaaaggctatcttttacctagcaactgacagcttgaagagtgcaaagactgctccatttttggagaaattggttcaaaaagatattgaggttctttatttggttgaacctattgatgaggttgccattcagaacctacagacctacaaagaaaagaaatttgttgatatcagcaaggaagatttggaattangtgatgaggatgaggtcaaagagagggaaaacaagcaagaatacaacctac

SEQ ID NO: 246120 - DNA, 436 bp, Glycine max
cccacgcgtccaaaaagccctgtatgattctgtgacggagcaatataatgtgctgaaatctgcaatacatggcaaaaaaggatttgaagcatcaactccagtagtttctttgtcacagtcatggaagtagatgaaatctgcatttcttcattgcaatttgctctgatgcaggctccaactgctatgttccctttcagaagcaagttacaagacttcagtcaaacaatttcaactgattcacttctgagggactgcctattactacaccggtcaccgaatgatttagcttgttggaagtttgcagtcaaatacatatttttcatttcatttttccttttgctcttggttgccgttatcagcattcaattcatctggaatctgtttcagttcagaatgttcaaattctgctgcttactgtacaggtctctcttagttc

SEQ ID NO: 246121 - DNA, 456 bp, Glycine max
attccgggtcgacccacgcgtccgacctggaaattttccttccctcaaacctaaaatggccaaggtggtgttccggttccccccaaagcacccctgagattcgttcgcaaaaagcttaataagaacaaaaaataaaaataatattcttcgttattatttcatttcaatttcgttttcgttttcgttttctgttttgatttgatcttccaatggcgtccgatggctttaccgacaagaacaccgtgttcagaaagctcaaggcgaagtctgaaaataagatgtgtttcgattgcaatgcgaagaaccctacctgggcgtccgtcacgtatgggatctttctctgcatcgattgctccgccgtacaccgcagtctcggcgtgcacatcagcttcgtgaggtctacaaatttagactcatggagtcctgagcaactaaaaacaatgagctttggaggaa

SEQ ID NO: 246122 - DNA, 427 bp, Glycine max
aattcccggccagacccacgcgtccaatttctctatcaggttgttactctatttataactcagatatttgagaaggctttaagagatggtgcttttgggacttctcttggtgggatttctctcgcagctgggttcatcagtttcagcttctggttatggttggatggatgcacatgcaaccttctacggatggggtgatgcctctggcaccatgggtggagcatgtggatatgggaacttgtacagctagagctatggaggacagactgctgctttgagcatagccttgttcatcaatggtttaagctgtggggcatgtctccatattaggtatgttaatgatcatatgtgcgtgccttctacgctcacttattgtcactgcaaccagtttctgtctccgttacaaaggattccctattaatgcatg

SEQ ID NO: 246123 - DNA, 463 bp, Glycine max
cggtcaggaattccccggccgacccacgcgtccagcatcacttgccacgcttggagccctgaccaatccatggttgctttatgcccaaacaataatgaagtgcacatctataggttggttgaagacaaatgggaaaaggtgtatgttcttcaaaagcatgaccaggtaatttctgggatagactggagtgcaagatcaaatagaatagttactgcatcccatgatcggaattcatatgtctggaaccttgaaggatcagaatgggtgccaactcttgttatccttagactaaaccgtgctgccctttgtgttgaatggagtccaaaagaaaacaaatttgcagtgggaagtggagccaaaactgtttgtatatgctactatgagcaggagaacaactggtgggtcagcaaacttatcaggaaaagacatgattcttccgtgacaagtgtttcttggcatcctg

SEQ ID NO: 246124 - DNA, 360 bp, Glycine max
gacccacgcgtcaagttttctccttttcttctctccacacaatttctctctcctctctctctctacaaatccttctttctttcttctcttcgctgctcactgtgaccatggctttcagagtaggaggagcgggagggggaaatgcctcttctggcatgggtgttgctgagcatagtgtaaacaccttcctggaattgcagaggaagaaagttcatcgctatgtgatttttagaattgatgagaaaaagaaggaggttatcgttgaaaatactggatgccctgctgacagctatgattatttcactgcatccttgcctgaaaatgattgccgatacgcggtccttgactttgattttgtga

SEQ ID NO: 246125 - DNA, 309 bp, Glycine max
acgcgtacacccacgcgtccgggaactttgttactctcacacatgtctcgctccgtgcctttggtttcaaccatttttgtcttgcttctgcttctggtggccactgagatgatggggccagcaatggtggcataagcaagaacttgtgagtctcacagccaccgtttcaaggggccatgtttgagtgacaccaactgtggctctgtttgccgaaccgagcgtttcacgggaggacactgccgtggcttccgtcgcagatgcttctgcaccagacattgtgaattttaggaggtgggttaggagtgcgtt

SEQ ID NO: 246126 - DNA, 167 bp, Glycine max
acaaaaggtgtggaggctttacttacacgttgcacgcatacgttacacctcttcgaaagtttcacctacttccaattcacggcccatcttcttacaacgtgccgtcggttaaaaccctgtcgttaggcaacttactcgccttgcccaacttccccctttcgcaacct

SEQ ID NO: 246127 - DNA, 449 bp, Glycine max
aattcccggccagacccacgcgtcaacaaacccataaatcctctcaccaaataaacctcaatttattgcattgcataataccatgtcaatgaagttgtatgcttccctcacccttacggtgtggcttttcatggccacattttcgcgagcccaatacgttattgacacaaatggcgaacccgttgacaatgatgatgagtattacatcaggccagccataaccgacaacggagggcgtttcaccttgatcaaccgaaacgggtcgtgccctctctacgtgggtcttgaaaacaccgatacgccacttggttatccagtgaaatttacccattttgccctcaacgttcaagatgaggatataagggtgaacagcgacttgagaatcgaattcctggaagtttccacaacgtgtgtgcaatccacggaatggagggtgggtgagaaccaca

SEQ ID NO: 246128 - DNA, 446 bp, Glycine max
gacccacgcgtcaatatttccctacctctcccttcaagatgcagatcttcgtcaagaccctcaccggcaagaccatcacccttgaggtggaaagctctgacaccatcgacaacgtcaaggccaagatccaggacaaggaaggaatccccccggaccagcaacgtctcattttcgccggaaagcaacttgaggacggccgtacccttgctgactacaacattcagaaggagagtactcttcacctcgtcctccgtctccgtggtggcatgcagatcttcgttaagacactcaccggcaagaccataaccctagaggttgaaagctccgacaccatcgataacgtcaaggccaagatccaggacaaggagggtatccccccggaccagcaacgtctcatcttcgccggaaagcagctcgaggacggccgcaccctcgccgactacaac

SEQ ID NO: 246129 - DNA, 335 bp, Glycine max
aattcggggccgacccacgcgtacacggaagcgtgggaaaaaattgaagaaaaaaaaagaatatgttaatttaacgggttagagaaaggaggggagtccaaaaggatagagacagatataggtgtacatgagaggtgatagctcgtataatgtgagataaattcaggacactggagagtggttataataacagcttttaaccaggtgaaagaaatggtggttattaaacttaatcggcttggtggaaaacggtcttttgtgagctggcgtaatagggaaaaggttagtactgaatgggcttcgcaatagttgcgcatcatgaaaggtgaatggga

SEQ ID NO: 246130 - DNA, 479 bp, Glycine max
taccggtcttatcttcccgggccgccccacgcgcgtaccataagatttggcataatacattgatttgtttcttaaaaacaacactgcaatgtctgccatatttctgcttgttggaatgctatcgtccattacagttgcacaatccataggagtttgctatggagtgattggtgataatctaccatcaaggcaagaagttgtggacttatataaaacaaatggcattggtagaatgcgtatatactacccagatgaagaagcactccaagcccttagaggttcaggcattgagttgattatggacgtggctaaggaaacccttcaatcattgacagactccaatgctgctacagattgggtcaataaatatgttacaccttactcgcaagacgtcaatttcaagtacatcgctgttggaaatgaaattcatcccaataccaatgaggcacaatatattctagctgccatgaccaacattc

SEQ ID NO: 246131 - DNA, 323 bp, Glycine max
tttggcataatacattgatttgtttcttaaaaacaacactgcaatgtctgccatatttctgcttgttggaatgctatcgtccattacagttgcacaatccataggagtttgctatggagtgattggtgataatctaccatcaaggcaagaggttgtggacttatataaaacaaatggcattggtagaatgcgtatatactacccagatgaagaagcacgtccaagcccttagaggttcaggcattgagttgattatggacgtggctaaggaaacccttcagtcattgacagactccagtgctgctacagattgggtcaataaa

SEQ ID NO: 246132 - DNA, 440 bp, Glycine max
ccacgcgtccaaatttacaatggccgtcacgaaaagcctctcaatcttcctcttcatcgcaatgagctgcgtcgccgcagctcaggcagcgaacttcaacatcacaaataactgcacctacacggtgtgggccgctgccgtgcccggcggcggcgcaaggcttaaccctggcgaatcgtggaacatcagcgtgacgaacggcacaacaggaggacgcatctggggtcgaacaaactgcaccttcgacaacgcgggacgcgggaagtgcctcaccggcgactgcgagggtgttctggagtgcaacaaaacaggtacacccccgaacacggtcgttgatttcgcgttgaaccagtataacaacctcgacttctacgacatctccctcgtcgacggtttcaacgttcccctacagctgaccccgacctacaactgcagttccg

SEQ ID NO: 246133 - DNA, 270 bp, Glycine max
attcccggccagacccacgcgtccatatagttctgacatcggtaataatatatactataatacataggtcattgatgcatgtactgtgcataacggctgagttatgtacttatgttaagaataaaataaagtgctgttgttgcaaaaaaaaaaaaaagaaaaaaaaaaaagaaaaaaaaaaaaaaaaacaaaaaaaaacaaaaataacaaaccgcacaacatgagagaccaaactggggtcgaacaaaacgcaacttccaccacaaagga

SEQ ID NO: 246134 - DNA, 490 bp, Glycine max
aaacggtcagcggggccgggtacgggtaagggaattcgccgtccgacccacgcgtccactgagctcaacgagaacagaaatctcgtgtggaacaaaagggtaaaagctcgtttgattctgatttccagtacgaatacgaaccgtgaaagcgtggcctatcgatcctttagtccttcggaatttgaagctagaggtgtcagaaaagttaccacagggataactggcttgtggcagccaagcgttcatagcgacgttgctttttgatgcttcgatgtcggctcttcctatcattgtgaagcagaattcaccaagtgttggattgttcacccaccaatagggaacgtgagctgggcttagaccgtcgtgagacaggttagttttaccctactgatgacagtgtcgcaatagtaattcaacctagtacgagaggaaccgttgattcgcacaattggtcatcgcgcttggttgaaaagccagtggcgcgaagcta

SEQ ID NO: 246135 - DNA, 467 bp, Glycine max
taccggttattgaattcccgggccgacccacgcgtcaagtttctaagaactttattaatttttaatactgtaatgcatttgttgttatatcaggtgtctacattttcttttgtctacaaactaattttctttttatttgttacttgaacaggaactccttgcttccgtggatatggaaggcgtaatggagagcgtatgagaaagtctgttcgtgggtgcattgtcagcccagacctctctgttttgaacttggtaattgtgaagaaaggtgagaatgatttaccaggattgactgatgttgagaagccaaggatgagaggcccaaagagagcatccaacatccgtaaactgttcaacctgtctaaggaggatgatgttaggaagtatgtcaacacctaccgtcgtacatttacgacaaaatgaaaaagtgagcacagctcccaagatacgaagactggtcactcctc

SEQ ID NO: 246136 - DNA, 259 bp, Glycine max
  unsure (1)..(259): unsure at all n locations
gggggggggggggggggggggggggnggggngnggggggggggggggggggngggnggggngggggggggggggggggggggggggggggggggggggggaggggagggggggggggggcgacgggggggggggcggggggcgggggggggggggggggggagcgggggggcggggccggcggggcgggggggggcggggggggggggggggcggggcggggggcgggggggcgggggggcgggggggggggggggggg

SEQ ID NO: 246137 - DNA, 419 bp, Glycine max
attcggcggccgacccacgcgtacaggagatgtcggtggagcagaaagcagcagggaaggaggaggagggaaaactgcagaagggaattgcagagttctacgacgagtcgtctggcatatgggagaacatttggggcgatcacatgcaccacggcttttatgacccggattccaccgtttctgtttctgatcatcgcgctgctcagatccgaatgatccaagaatctcttcgttttgcctctctgggttctgagaacccttctaaatggcccaagagtatagttgatgttgggtgtggcatagggggcagcggcagatacgtggccaagaagtttggagcaacgagcgtacgcggtactctgagtcctgttcaagcgcagagagcagagtctcttgctgctgctcaacggttgggggac

SEQ ID NO: 246138 - DNA, 118 bp, Glycine max
ccacgcgtccggcagcattgggagatagaaagagagtagagtatgagagagagagaaagacccttagcctgggctatcgctcgctttcctttgacgcttctgacccttgctatgtctg

SEQ ID NO: 246139 - DNA, 244 bp, Glycine max
cgacccacgcgtccgcgcaatcttcgccttcgcccacaacaactcctccttcaggatcgctgccaacgtggctttccatttttacccttcatcctcgagaaaaaaatggcgaacgcagcatctggtatggccgtccatgatgagtgcaagctaaagtttctggagctcaaggcgaagaggacgtaccggtatatcgtttttaagattgaggagaaatctaagcaagttattgtggagaagctgg

SEQ ID NO: 246140 - DNA, 200 bp, Glycine max
cccgcgtcgacccacgcgtccgggaaaaatggtttcgctgaaactgctgaagcggctcgcagccagcgtcctcaagtgtggcagatgaaaggtttggcttgaccccaatgaagtcaacgaaatctccatggctaattctcgccaaaacataaggaacctggttaaggatgggttaataatcaggaaccccttcaagattc

SEQ ID NO: 246141 - DNA, 522 bp, Glycine max
  unsure (1)..(522): unsure at all n locations
ggagtgagttgtgtgtatgnnttgggagctgagacattcatgtaccgtccgnaatccccgtcgacccacgcgtccgcacggaccaaggagtctgacatgtgtgcgagtcaacgggcgagtaaacccgtaaggcgcaaggaagctgattggtgggatccccctgtgggttgcaccgcctaccgaccctgatcttctgtgaagggttctagtgatagcatactttttcttgactctaatgttggttaataatttctttatctttgcttattcctaataatttttctattatttttattatttattttctgatttattattttttattatataattttattttttattatttatatatatttattttttatattttattttattgttttattatatttactaattaattaatatattaattttatttaatttttgtattttttttttatatttttttttattttttttctttattatctattattctaatattttttattttttattattatatttatttatatt

SEQ ID NO: 246142 - DNA, 173 bp, Glycine max
cgcccacgcgtccgttcaaaccgacaaaaaaacttgttacgatggtttcttccgacaaggagccaggagaggaagtccttcaagcatggtacatggatgatagtgattaagatcaaagactcccccaccacatagaacccaatgagtttgtctcgttggaccaacttgctgaa

SEQ ID NO: 246143 - DNA, 378 bp, Glycine max
ccagcgtcgtcacaaccatggataattccaaccttcaacgtctcttcactctcttcctttttgccctaattgcaccctctttggctcaacaatccttcagacccagagccctcgttgtcccagttaaaaaagacgcttccaccctccaatatattactcaaatcaaacaaagaacaccactcgtcccagaaaacctagtacttgacatcggtggccaattcctgtgggtcgattgcgacaacaactacgtctcctccacttaccgccccgcacggtgtggctccgcccagtgctccctcgccagatccgacagctgcggaaactgcttctccgccccaaaacccggctgcaacatcaacacgtgcggcgtcatgccag

SEQ ID NO: 246144 - DNA, 500 bp, Glycine max
  unsure (1)..(500): unsure at all n locations
ggtagagtatgttgtagttagggcttcntctgcgntccgtccgtattccacgtccaccacgctccgcttgatatttagtaaagcgcactctctctaacggcgtaccttttgcatgatgggtcagcgagaaaatgggaacagcggcttaagccattaggtgtaggcgcctttcataggtggaatcttctagttcttcctatttgaccctataccgatcgatctagccttgaacaggtttaatagagctctaacatgccttggatgtccgatgccacatatgttgcattaattggggctgccttttcttttgatgttttttgcgttacttttttgtgtttatttttttattttttttttattgattatttgaattatatgttattattatattttcgtatttaaatttttgttttttatatttgctctttttaattttctttctatatattattgtttttattatatttttatttattttttattaatattattttgttttt

SEQ ID NO: 246145 - DNA, 448 bp, Glycine max
cgacccacgcgtccgatagacactgaattattactaaatttaatcacttgaatttagccaagcgagagggttaaattgaaggtgaagtcagataacatattatatattgagttgattagtattgagatatattaattatattttaattttatataattatattatttatattaaatataataatattaattatattatattataagtatttaatttttataataatatattatattaatatttttattttatattatatttttatatatttttttatttattttgtattatttatttattattattttaatatattattattattaaatttaatattataaattaattatattatgttattttaataaatgtaatatatattatttattaatttaatttatatttttttatataattattatattattatatattttattatatttat

SEQ ID NO: 246146 - DNA, 221 bp, Glycine max
cccacgcgtccgttcctactccaaccgcacttctgcttcgcaattatcatgggcaaggtcaagatcggaatcaacggatttggaagaattggccgtttggtagccagagtggctctgcagagagacgatgttgaactcgttgccgttaacgaccctttcatcaccaccgattacatgacatacatgtttaaatacgacagggttcatggactctggaatct

SEQ ID NO: 246147 - DNA, 129 bp, Glycine max
ttttttttttttttgtttttttttttttttgttttttttttttttttttgttttttttttttttttttttttgttttttttggggtttttttgtgttttttttttttttttttgttttttttttttttt

SEQ ID NO: 246148 - DNA, 173 bp, Glycine max
tcgacccacgcgtccgaaatggcagttcaagctcttctaaggttaggtcagtacagtttggccagaaggggatcccatacctgaacacctatgatggtcgcaccatccgttacccagaccctctcatcatgtcctatgacactgataatctggatcttgaagaataataatat

SEQ ID NO: 246149 - DNA, 283 bp, Glycine max
tcgacccacgcgtccgcacaaactagaagtattattattcttccatttccattaaaaagaaaatatcatagatgggttatttcacattcgaggacgaaatcacctcccctgtggcttctgctactctttacaaagctctagttacagatgccgacaacatcatcccaaaggctcttgattccttcaagagtgttgaaaacgttgagggaaatggtggccctggaacaatcaagaagataactttcgttgaagattgagaaaccaagtttgtactgcacaagat

SEQ ID NO: 246150 - DNA, 283 bp, Glycine max
ccacgcgtccgggtcaagattgggtgggttgcttgttacttatccatcactgagaaaatatcataggtgggtattttcacattcgaggacgaaatcacctccactgtggctcctgctactctttacaaagctctagttacagatgccgacaacatcatcccaaaggctcttgattccttcaagagtgttgaaaacgttgaaggaaatggtggccctggaacaatcaataagataactttcgttgaggatagataaacctagtatgtactgcacaatataaaat

SEQ ID NO: 246151 - DNA, 197 bp, Glycine max
cgtccgcgacaactactacaagtacttccttataatcaaaaccaacaacaactatggcaaggatcaaaagcactacgatgatcagggtcgcaaggttgacgagtatggcaacgttgagaagcaaaccgacgaatacggcaaccctgttcatgctgctagtgtcacctatgtagcctccataactgttgctggtggat

SEQ ID NO: 246152 - DNA, 209 bp, Glycine max
cccgcctccacccacgcgtccgattgtttaaacctaattctcattttttcatcgttcgattcttctcctcctaaagaggcagatcttcgtgaaaactttgaccggtaagaccatcacccttgaggtggagtcctccgacaccatcgataacgtgaaagctaagattcatgacaaggaatggatcccaccttaccagcagagacttatct

SEQ ID NO: 246153 - DNA, 252 bp, Glycine max
cccgcggtcgacccacgcgtccgattccgtgttttcagctcctgtaacctctccttctccgccgccgttgctatctgggccgtgaccttccatccctcaacgccccacagatcttcaatttgattgcttgggtcaacaatttctgtcattctcaatcatggcaactagacttcagtttgaaaataattgtgaagttggagtcttctctaaactcaccaatgcttactgtttggttgctattggatgttctga

SEQ ID NO: 246154 - DNA, 360 bp, Glycine max
tccgtatacccgcgtcgcacccacgcgtccgcagcagaatactacaggtctctaccacctgtgagcaagacctatggagtggcctgtttgatgaccacttctgcatattatctgcaactctatgatgcaaggaacatagcacttgattatggcccagtgtttaaaagccttcaagtttggaggcttatcacaaatttcttctttcttggctcattttcattaccatttgcagtccgtctgataatgatagcaaaatatggtgtttcattggaaagagggcccttagactagataactgcatattatgttgtgatgttcataagtggtgcatattttattctttttatttatattctgtat

SEQ ID NO: 246155 - DNA, 510 bp, Glycine max
  unsure (1)..(510): unsure at all n locations
ggtgaggagtgaggtcacgtcgttggaatgnatacttgcgtcactagctagtaccgtccggaattcccgggtcgacccacgcgtccggttgccattctcatcctcctctgtctctctctctccaccattgccatggatcctgacaagctccggccatccagcgccttcaattctcccttctggactacaaattctggtgctcctgtttggaacaacaactcctctttaaccgttggagctagaggtccaattctgcttgaggattatcatcttgtggagaagcttgcaaactttgacagggaacgtatcccagaacgtgttgtccatgccaggggagctagtgcaaagggtatctttgaggtcacacatgacatatctcacctgacatgtgcagatttccttcgagcctttggagttcagactctttgtaattggttcgttctttaattgtatttatgatctaggtaacccttgatacttttatgagttcttaaaggttttaattattat

SEQ ID NO: 246156 - DNA, 448 bp, Glycine max
tcccggctcgacccacgcgtccgcccacgcgtccgccagatctcactctcactctcactctgttttgctcagtgcggagaggagaagaaaatatggcggtgatggcggttcaccaattcgcgcaatgcatcacttgccacgcttggagccccgatcaatccatggttgctttatgtccaaacaataatgaagtgcacatctataggttggttgaagacaaatgggaaaagttgtatgttcttcaaaagaaaacaaatttgcagtgggaagtggagccaaaactgtttgtatatgctactatgagcaggagaacaactggtgggtcatcaaacttatcatgaaaagacatgattcttctgtgacaagtgtttcttggcatcccgataatattcttcttgctctacctccacaaattggaaatgcttaatattcatcacctttattaaaa

SEQ ID NO: 246157 - DNA, 456 bp, Glycine max
ggaattcccggctcgacccacgcgtccgtgataatgtaattactagcttgcctcctcctgatgaagggcctaatttgagcgatcagtcgtcttgaggatcaattggcacttcttggaaaggtgttgagtgctggtgatgatcaagttggattagagcaactagatgaagatgcagatgaaattgcccttcagagtgcccgtcgctctcaaggatccatgagtgcaatgtcaggtgcaaaagggatggtttatatggagtacagtactgtgcgtaaaggccaacaaggacagatcaagagcaagccgaaagatccagcgaagagacatttcttgtttaaaagaagatatggggcaacctaaatgtgccgtctttgtaatggtaccatacgaaaagttatcaagtatgcaggattgatggcttacttgacataacgcttggtgcctttttcttaaaaa

SEQ ID NO: 246158 - DNA, 388 bp, Glycine max
caatggattctcactaatgatggaacacgacagagaaaggaaaatagcacttgttgcggctggtgcagcagctggtatttcttcaggcttcaatgctccagttgctggttgtttctttgctattgaaactgtgctgaggcctcttcgtgcagagaactcacccccatttacaactgccatgattatattggcttctgttatctcgtcaactgtatctaatgttttacaggggacccaatcagcttttacaatacccgagtatgatttgaaatctgctgctgagctacctttatacctgatattgggaatgctatgtggtgttataagtgttgccctgactcgtttggttgcttgggtcaacaaattacttaagattattcaagataag

SEQ ID NO: 246159 - DNA, 437 bp, Glycine max
ccgctcgacccacgcgtccggtggtctccaactgatccaattaacgctctttttgctcctgagatcggacgccgtcggcagcctgacaacgtctatctggttcaaatccccagcaaaatggaactcaggcagataaacctcttcagtgtcactgactgcaatatgtactggcaaatcaatggagactacctggctgttaatgtacagaggtacacgaaaacgaagcataccacatacacacgcttcgagcttttccgtataaacgaacaggatatacccattgaagttttcgaacttgagaataagaatgataagatcattgcattagcttgggatccaaagggccacaggtttgcacctattcatggtgataaccctaaacctgaactgaacatttactccatgcatactggtcagaacatccgactatcaaaact

SEQ ID NO: 246160 - DNA, 508 bp, Glycine max
  unsure (1)..(508): unsure at all n locations
ggtagagtatattggtcgctgaaaagctcacnatcgctgtaccggtccggaattacccgctcgacccacgcgtccgctcaaagattaagccatgcatgtgtaagtatgaactaattcagactgtgaaactgcgagatggctcattaaatcagttatagtttgtttgatggtatctactactcggataaccgtagtaattctagagctaatacgtgcaacaaaccccgacttctggaaaggatgcatttattagataaaaggtcaacacaggctctgcctgttgctttgatgattcatgataactcgtccgatcgcacggcctttgtgccggcgactcatcattcaaatttctgccctatcaactttctatggtaggatagtggcctaccatggtggtgacgggtgactgataattatggttcgattccagacatggaaccttgaaaactgttattacattcatagaaggcaactagccctctaaatactccattccttacttgtgtat

SEQ ID NO: 246161 - DNA, 402 bp, Glycine max
ccggctcgacccacgcgtccggtcctggattgggtctttgctgatggtccacctaagaaggcagttgtctatgataagaatcgtaaacaagattgccatgccattgtccctggggctatacctgatgaacagtattgggttgaggaagagcagctgatatacagaaaatttcaggaggagaggaggttaagagaggatgcgatacgtgcaaaggctgaaaaaacagcacaaatgaaagctgaaacaaaggaaagaactttgaaaggatttttgctttctcaaaagcatattgtattcactgaccctctcgatgttcaagcaaggagtacagtgacaatattttataacccgtccaacacaaatcttaatggaaaacctgatgtttggtatatatgtacattt

SEQ ID NO: 246162 - DNA, 396 bp, Glycine max
agtcgagcctcccgaagaaaaagcgaaggggccgtcgcacaagacattcagaatcaagaagaagttggcgaagaagatgaggcagaacaggcccatcccctactggatccgcatgaggaccgacaacaccatcaggtacaacgcgaagcgccgtcactggcgtcgcaccaagcttggattctgaggtgcttgctttgcctcgattcagtttatccaattaattagtgttttattttcttgagccaaaaacaatgctttggagtttttaatattttgcattttattccaagactatattgtgtaaagaatttattgtagtaccgttgacgtgagtctatttgcaatttcgagtatttgggcaaaaccaatctggtttgggcagaccttcataatctc

SEQ ID NO: 246163 - DNA, 235 bp, Glycine max
  unsure (1)..(235): unsure at all n locations
gaaaccgattaacggtttttccgtgaaaggcctccgccaaagagattgcctttgaccagcattcccgctctgctatgcaggccggcattgacaagctcgccgacgctgttgggctcactcttgggcccagagggaggaatgttgtgttggatgagnttggaagtcctaaagtggtcaacgatggtgtcaccattgctcgcgcaatcgagctttccgatcctatggagaatgctgg

SEQ ID NO: 246164 - DNA, 400 bp, Glycine max
gacccacgcgtcccaaaaatcccacttcctttttcttctttttatgatccttgtgattaggctcattagaagcttgcatatataaagcaggcggtacaatcctaccttattggcaataacgccattgctaaggagctaagtattaatgggcaactgcacaacatgcatatgaaatcagctcatggaaaagctcaagaatctatttaccgccagaggaatcccgttgctccagagaatggaagagggcaccagagaatgatagacctacacggtctgcacgtaagtgaagcgattcacgtgctgaaacacgaactgagtgtgctaagaagcacggccagaaccgctgagcagcttttgcaggtttacatctgtgttggcacttgtcaccatactcggggct

SEQ ID NO: 246165 - DNA, 177 bp, Glycine max
atcctgagggacgtgctactcacataatcatcctcaatgctgctaacattctccccttcaacacaccaatcaccaaaataccatactactatacaatgatatttgacaagttcttccctcataactcatccattccttatgttcctagattaccaaatgtcacatgtaacacatcca

SEQ ID NO: 246166 - DNA, 149 bp, Glycine max
gacccaagcgtccgaagaaaaaaaaaaataaaaaaaaaaattaaataaaaaaaaaaaaaaaaaaaaaaaaaagagaggaaaaaaaaaaaaatgggaaaaaaaaaaaaaaataaaaaaaaaaaaaaaaaaaaaaaaaaaagtgataaaat

SEQ ID NO: 246167 - DNA, 437 bp, Glycine max
gtaccggtctcgaatatacccggctcgacccacgcgtccgcaaatatgtattctgagctgcgggaggaggctcgtgatcatgcacgcttgcggaatgcatattttgagcaggcgcgacaagcctaccttattggcaacaaggcccttgcaaaggagctaagtgttaaggggcaactgcacaacatgcatatgaaagcagctcatggaaaagctcaagaatctatttaccgccagaggaatcccgttgctccagagaatggaagagggcaccagagaatgatagacctacacggtctgcacgtaagtgaagcgattcacgtgctgaaacacgaactgagtgtgctaagaagcacggccagagccgctgagcagcgtttgcaggtatacatctgtgttggcactggtcaccatactcggggctcccgcactcccgcaag

SEQ ID NO: 246168 - DNA, 330 bp, Glycine max
cgacccacgcgtccgggaagaagtatttttgaaggacaggatacccacctggtttgcagcttctggagatgtgggcttggctgcgatagccatagcaacaataccaattatcttccctcctctcaaatggtacttggttctgtgctcttacatcctcgcccctgcccttgccttctgcaactcttacggtactggcctcacatactggagtctggcatccacttatgggaagattggtcttttcatcattgctgcatcagtaagccaaaactgtggtgtaatagcaagggtagcaccctgtgctgagatgatgtcaatcgttgtaactag

SEQ ID NO: 246169 - DNA, 447 bp, Glycine max
tcccggctcgacccacgcgtccggctattatccccagacgccaccgtcgctacaccagaagaagaagaagagtgatggcggagtacgacctaactccgcggatggcgccgaatctcgacaggcaccttgtgttccctctcctggagttcctgcaggagcggcagctctacgacgacgaccacatcctgaaggcgaagatcgaccttctcaacaacaccaacatggttgactacgctatggacatccacaagagcctctaccacaccgaggacgtcccgaacgatatggtcgaccgccgcgccgaggtcgttgcccgccttaagtcgctcgaggaggccgccgcccccctcgtcgccttcctccagaacgaggctgctgtgcatgagctccgaacggacaaacagtacaatctccagatgcttaacgaccgatttcagattggtcctg

SEQ ID NO: 246170 - DNA, 383 bp, Glycine max
agcctatatttcctggaaaagatgagccagaggaattaaataaaatatatgagctgtgtggagcaccaaatgaagtcaattggcctggggtttccaagataccttattataataaatttatgccaacaaggccgatgaaaagacgtttgagggaagttttcaggcattttgatcatcatgctctggaattgttggagaagatgttgacacttgatccggctcagagaattactgcgaaagatgcacttgatgctgagtatttctggacagatccattaccgtgcgatcccaagagtttacccaagtacgaatcatcacatgagtttcagactaagaaaaagcgccaacaacaacggcaaaatgaagaaatggctaagcgtcag

SEQ ID NO: 246171 - DNA, 393 bp, Glycine max
tcctcgaatcgcttaatttgtatttgattagtgggaccgcaacgcggaatctcttttctcgaactggctaactctcaggcaagtggttcggacgctgattccagcaacaagcggctggtgctcgcactgtatgacgccctaaactccggcgactccgacgccgtcgtcaagatcgtcgccgccgacctcgagtggtggttccatggtccgccctcacaccagtttttgatgcgcatgctcaccggcgactccgctgccgacaactccttccgcttgcttccgcagtccatcgccgccttcggctccaccgtcatcgtcgagggctgcgacaccgtccgcaacattgcctgggtccacgcctgcacccttactggtgggataattactcagatc

SEQ ID NO: 246172 - DNA, 299 bp, Glycine max
cgacccacgcgtccgctcacgcgtccggagaaaccaagtttgtactgcacaagatagaagcagttgatgagggaaagttgggatatagctacggcgtagtgggtggtgctgcatttccatacacatctgtgaagatcacatttcactccaaattggctgctggtcccaatggaagctctgctggtcaactcactgttgaattccaaaccaaatgagatgcttaatccaaccaagaccaactcataactggaaaagccaaagctgatggctctttcaaggccattgaagcttaccttttg

SEQ ID NO: 246173 - DNA, 239 bp, Glycine max
cgacccacgcgtccgattcttccataattctcatgtttctgatccaaggtttaagacgttatagtttccttgaattgtcgtctgggttcaacgtgtttgatgtttagactgaatcagtttgaattagtggagaatatctgataccgaaaaaaagattcagctctttttcttgtttctttgtcacaatacttggatttttgagaatctggagacatgggttgttgtgtaagtaaatattc

SEQ ID NO: 246174 - DNA, 363 bp, Glycine max
acccacgcgtcccatgttatacacgcagaaagaacaattctttgattgagttggctatggttggattgatggccttaaaactcatgctgaggaacattttactgacagaatgatgctcaatgctgctaacattttccccttcaacacaccaaccaccaaagaagcatactactatagaatgatatttgaaaggttcttccctcaaaacttaaccaggctgaatgttcctggaagaccaagtgttgcatttatcacaaccaaaactgtataatgggatgctgctttgtctaacaaccttgatccatctggtaaggcagcacttgtattgcatgcatcaacttatggaaatcatgtcaaaacttt

SEQ ID NO: 246175 - DNA, 507 bp, Glycine max
  unsure (1)..(507): unsure at all n locations
agagtgaagtatgtcgctgaatcgaatncntnagtactgctgtaccggtccggaattcccggctcgacccacgcgtccgcagccaagcgcattggcctatatatatcaacacaaaaactctttgattcagaggcagacatatatattcacacgaatatccatttatatatacatatatatagttctatatggcaatgacaacggtggtgtttgtcttgtgcatctttgtagtgttgaatgcaagtgcctctgatgccactcgcttattgctgaacaaaactgcaacaggtaacgtgtccagagagaagattgagagatacttacttgaaaatggactcggccagacaccccccatgggatggaatagctggaaccactttggctgtgatattaatgaaagtttaattcgagaaacagctgatgcattggtgtcatcgggccttgctgctttgggatactaatacatttaattaaatgattgttgggcccaacttaatctataacata

SEQ ID NO: 246176 - DNA, 302 bp, Glycine max
cccggctcgacccacgcgtccgcacacgcgtacattgacgcatgtgtatcaataccataactataggataaataggcggacatatataattaccacggaatatccaataatatatacatatatatagttctatatggcaatcacaactgtggggctcgaatactacaacataccatcatagtctgcaacatcctctatacctactagatatcagcggatgacgactgtagcactacactggcacctaatgaaaattcaaagactctgagttcaagatggactctggctgacacgctgaaact

SEQ ID NO: 246177 - DNA, 318 bp, Glycine max
cacgcgtccgctgacacgaaatgcttcattaccattatgattgacatatcataaagtcgtatattcagcatgtatgaccaaatcattggccctgttggctctgctactgtttacaaagcactcggtgctgatgccaataacatgatcgacatagctgttgattcctttaagagtgttgaaaacattgcaggaaattggggacctggaacaaataggacaataactttcggggatgatggaaaaaccaaatatgtactgcacaagatataagcaggtgataatgcaaacttgggatatagctacaacgtagtgggtgga

SEQ ID NO: 246178 - DNA, 245 bp, Glycine max
ccggctcgacccacgcgtccgccgtaacctcgggaaaaggattggctctgagggctgggcacgggggtcccagtccggaacgcgtcggctgtcggtggactgctcgagctgcttccgcggcgagagcgggtcgtcgcgtgccggtcgggggacggattgggaacgggcccttcggggcctattccctgggcatttaacagtcaactctgatcttgtaccgactaggcgaatccgactggttaatt

SEQ ID NO: 246179 - DNA, 345 bp, Glycine max
cccggctcgacccacgcgtccgggcttattcacattcctgaaatggcatctgcatcaactctatccaattacaagctcgagctacttgggtgaccaatccgtgagcaatatctacatcattactcgcttcatgtacgataaattcgataacacctatcatgctacaattggtattgattttctatcaaaaactatgtatctcgaagatcgaactgttcgactgcagttgtaggatacagctggccaggaaagatttagaaatcttattccaagctacattagggactcatatgtagctgttattgtatatgatgttgcaagccggcatactttactaaatactgc

SEQ ID NO: 246180 - DNA, 376 bp, Glycine max
tctcctaattctctctcactacatccatcctgcggagacaaaacaagcctcttagcgtgcgttcaagtttcacacgttcttccactatgtcctggttgagacacctctcctccaagttctcctccaccaccatcacaagcacgcgccgcttcacttccctgtcccggttcagtacctcgaccgctccggctcgtcatgcgggcctggggcccactcaggcccatgagaaagcccaggtggtggtgctgggctcccggttggcccgggtggccgcttagaaagggctcgacactgcaatctacgacgtcgtttgcgtgatcccttgcatccacatggtcttcacgcctctcttggcctccacggtgtgggaactttt

SEQ ID NO: 246181 - DNA, 450 bp, Glycine max
ccggctcgacccacgcgtccggctccttctaatcccatcccatgtgcttttacttttaatccttttttcaagaaaaagagagcttgttttgtttgtgggaagccaggacattttgctcctcagtgtaggtatagagttatcagaaatggcaatcctcctaaatgatgcaatcctaccccccaagggcattggatagaagactccaagaaaattgggccaaagatgcaagagaaggccctagggttctcatgagtcttagggtagattttgggcccatgggctaagtatgagcttacttatctttgtacatattagattagggtttcattattttttgggccttgtatttagggctctatactgtatggatgataccctagtaatatatgattttttaacccttgtatattatggcacctatactagtttttgtattaggggtggttttgt

SEQ ID NO: 246182 - DNA, 385 bp, Glycine max
ccggctcgacccacgcgtccgctttttgattcctaaattctctaaaattcgaaattctaatttcgttaggggaaagagattgggtgtgtgtgagtgagtatggctggaaaaggcgagggtcctgctatcggaatcgatttgggaacgacgtactcttgcgtcggcgtgtggcaacacgatcgtgttgaaatcatagccaacgatcagggtaacagaactaccccatcctacgtggctttcaccgacacagaacggttgatcggcgatgcggcgaataaccaggtcgctatgaacccaacctacaccgcttttgatgcttagcgtttgattggaatgcgtagttccgatgcatcattacaaagtgatcctgaaattgtggctcgtt

SEQ ID NO: 246183 - DNA, 422 bp, Glycine max
tcccggctcgacccacgcgtccgtattatccttccattccgttctacatataatcattcataatgggtgttttcagatgggacgatgaaatcaactcccctgtggctcctgctactctttacaaggccctagttacagatgccgacaacgtcatcccaaaggctcttgattccttcaagagtgttgaaaacgttgagggaaatggtggcccaggaaccatcaagaagatcactttccttgaggatggagaaaccaagtttgtgctgcacaaaatagaaagcattgatgaggcgaacttgggatacagctacagcgtggttgggggtgctgcattgccagacacggcggaaaagatcacattctactccaaattggttgctggtcccaatggaaggtctgctgggaagctcactgtcatattc

SEQ ID NO: 246184 - DNA, 336 bp, Glycine max
tactcttcttctcttgctgctagggttctagcgcaacttcttctacatttaaggacgatgggtaaggaaacaggttcacatcaatattgtggttattgcccctgttgactctgggatagctcactaccactggccacctgctctacatgcttggacgcattgacaagcgtgccattgacagatctgataaggatgctgctcagatgcacaatacggcttatgagtatgcctgggtgcttgatcagctcatagcttagcgtgaaagacgaatcacaattgatcttgccctgtggaagtttgaaaccactcagtactattgcacagacattgatgccc

SEQ ID NO: 246185 - DNA, 384 bp, Glycine max
ctactgggatttgacaatttcatcccacgcgttgcaaacactagtggctcagacacacttaagggtgtgaactatgcatccggagcagctgggattctaccagagagtggtacacatatgggtgccaacatcaatttgagggtacaaatgttaaatcacctattcatgtactccacaattgctatcaaacttggaggttttgtcaaagctaaacagtacctcaacaagtgtttgtactacgttaatataggaagcaatgattacataaacaattacttccttccccagttttacctaacaagccgcatctatacccctgatcaatatgccaacattcttattgcccagctatctcaatatatgcagacactgcatgacgaaatt

SEQ ID NO: 246186 - DNA, 374 bp, Glycine max
catagcagagcgaccttgaagagctatggctggcggaaagaataagaggatttccaagggaaagaagggtggcaagaagaaagccgctgatccctttgccaagaaggactggtacgatatcaaggccccttccgtctttcaggtcaagaatgttggcaaaaccctcgtctctcgtacccagggaaccaagattgcttctgaaggactcaaacatagagtgtttgaggtctcattggctgatctccaaggagatgaagaccatgccttcaagaagattcgtttgagagctgatgatgttcaagggaaaaatgttctgacaaacttttggggaatggatttcacaactgataagttgaggtccttggtgctgaaat

SEQ ID NO: 246187 - DNA, 422 bp, Glycine max
cccggctcgacccacgcgtccgaaacaaacaaaacagccaccgtcatactcaagaagaagaagaagaagaaagtggttggagaggttggtggcaaacatggggatgcgcgacctcgtttcgggcgctgcggcatgtggcgactcttcttcttcttcctccgcaaaccctctcgcttccctcgccaacgcccttattggctcttcctccaaaactccggaaaggttgaaggagattcccacatccactcccactgaccctacatcccaattttactccacagctcttcccgccaatcagcttcccggcaccgaactctatgagcctctattgaatgccaactctcatgcttcggaatttttgcataagttccctggcaccaccggccttgatgagacgtgggatgagatacaacctgatgggg

SEQ ID NO: 246188 - DNA, 447 bp, Glycine max
ccgactcgacccacgcgtccgaaaaaaaaaaaaaaaaaaaaaaaaaaataaaaaaaaaaaaaaaaaaaaaaaaaaaaaaggaaaggaaaaaaaaaaaaaaaaaaaagaaaaaaaaaaaaaaaaaaaaaaaaaaaaaaaaaaaaaaaaaaaaaaataaaaaaagggaggaataaaaaaaaaaaaaaattataaaatgacaaaaaaaaaaaaataaaagagcatataggaaaaaataaaaaaaatatgaaaaacgaaaaaattaaaaaaaataaaaagtaaaaaaaaaattaaggaaataaaaataaaacaataatgaaaaaaaagcaataaaggagaaagttatataaacaaaaaaagaactaaaaaagaaaattagaaaaaaggtataaaacattaaaaatgaaaaaatgaaaactaaaatgtatataaaaaaaaaaaataaaaaga

SEQ ID NO: 246189 - DNA, 364 bp, Glycine max
  unsure (1)..(364): unsure at all n locations
atgtgctcatgtattttttgagaggaagtctcgcatggcaaggcttgagagctggcaccaaaaagcaaaaatatgacaagataagtgagaagaagatgcttactccaatagaggtcttatgcaagtcatatccattggaattcacatcatacttccactactgccgatcattgcggtttgaagataagcctgattattcttatcttaagagactctttcgggacctatttatccgagaaggttagcttcatatatatatatatatatatatgtngcttaatgagtcatgaaattctattaggcttgtaaaatcttgcttttacaggttatcagtttgattatgtatttgattggactatgctga

SEQ ID NO: 246190 - DNA, 446 bp, Glycine max
cgacccacgcgtcccgtagaaagcaatcgaattccagaggcagctttaatggctcgatcttatctcccaagggaggtctcagagatagtggcaattgggagaaaagacctcaataaggtcaatccaaaagctgctgaatcattggctaatcctgaagaatatccaaatttgtttgaagattggcaagttgcactagctgtcgaatctaaagctgtggaaacaaggaatgtgtaccctcctgcggagcagtacgtcaaccatgctgacaaatcacacattacccttgttgaagcttttagaagcatgcagattgaggaaggagaggagcatctggagaatggggactctactcatgagttgactgaacgaaatggagaagagcactacacagaggagcaggatgaacagaatggataggaatgaagccaagatgaagcagttgtagt

SEQ ID NO: 246191 - DNA, 366 bp, Glycine max
cggctcgacccacgcgtccgggttgagcacctcttctttgctcagcagtaccatgacaggaagcaaagagaggagaggatgagaatgagcagggaagagagggcaaggaccccttatgttgattacttgaggccaatcatagctgatggcgacactggttttggtggtaccacagcaactgtcaagctttgcaagctatttgtggagagaggtgctgccggaatccacattgaggaccagtcttcagtgaccaaaaagtgttggccacatggctggaaaagtgcttgttgccatcagtgaacacatcaataggcttgtggctgcaagacttcagtttgatgtcatgggggtggaaactgttttggt

SEQ ID NO: 246192 - DNA, 183 bp, Glycine max
acgtagatcgctccgttcgcaaaaagaacggccctaaggttggatgattgggtgctttgccgtatttacaacaagaagggcacgatcgagaaactgcaaccaagcagcgatgttgctcatagccgaaatatcgaatcctcggagatcgaagacaggaagcccgagattctgaatagctgagga

SEQ ID NO: 246193 - DNA, 383 bp, Glycine max
cttggggaaggtttacagaaaggagtgggtgttatcaaccatggatatggactgcaggaaaccatgaaattgattttgctccagaaattggtgaaactgtacctttcaagccttatacccaccgttaccatgttccttataaagcatctcaaagtacttcacccttctggtattctatcaagagagcttcagcacacatcattgttttggcctcatattcagcgtatggaaaatatacaccacaatataaatggcttgaaaaggagctaccgaaagttaacaggacagagactccttgggtgattgtactcatgcattcaccttggtataatagctacaattatcactattatggaaggtgaaacaatgagagtcaatgtatg

SEQ ID NO: 246194 - DNA, 347 bp, Glycine max
tcacacttatacaaaattctccaattagggagcttgttgagagttgctgcttggaagaaaggctgtttaatggtcaagattgtgatgtctgggaatgcagcagtcaaaaggagtgattgggcctcattggtacaagtgtttttaacaaacagcaacagtacagagcattttgatgcatgtaagtggacaaaatcagaaccacattcctgggaattgatcttcccaatagaggtatgtggtcctaataatggttttgaaatgtggagttctgagtgggcaaatcaaacttcatggcatttgagtttccttattgacaatcccaaacagtctacagttttagatattct

SEQ ID NO: 246195 - DNA, 568 bp, Glycine max
  unsure (1)..(568): unsure at all n locations
gagggaaggagagagaggagggggaggggatgagggggaggagagggaaggaggtggntaggataggggggagtaacttgcgacaatgaaaacgctaggcatgccgcaccggtccggaattcccggctcgacccacgcgtccgaagaaaagtaaacactgccacagcaagagtgttcaaatgggagagggaaaaggaagagtgtgcgtcactggatgcacaggattccttggttcatggataatcaagagcctccttgaacatggatatgctgttaataccactataagatctgacccaggacgcaagagagatgttggcttcctcacaaacctacctggtgcatcagaaaagcttaagatggttcaacggctgatctcaccgacccaaagagttttgggccagcggtggagggtggtgggggaggagtcaggagggcaggcagagtggatttgcagggaacgaggcggaagaaaaggagaggaagggggccgttggagagaggaggagcctagtgaaagcgagggtaagagcagtgactgtgaagggggtagtgggaggagtgggaa

SEQ ID NO: 246196 - DNA, 280 bp, Glycine max
cggttccggaattcccggctttgttagttcagaaagtagtccagagaaggacccagttgtgctatggctgaatggtggacctgggtgctggggctttgatggctttgtttacgagcatggaccattcagctttgaggctgcaaattcaaaagggaatctacccactttgcatatcaatccttgcggctggtctaaggtttccgacatgatatatttggactcccctgctggtgttgggctctcttactccaagtaacacaagcgggtatgccgctgggga

SEQ ID NO: 246197 - DNA, 358 bp, Glycine max
tgagaggccttctgctatacagcaaaggggaatggttcctttctgcaaaggactggatgtgattcaacaggctcagtctggaacaggaaagacagcaacattttgttctggaattttgcagcagcttgattatggattggttcagtgccaggctttggttttggcaccaacaagggagctagcacagcagatcgagaaagttatgcgagctcttggtgattacttgggagttaaggtccatgcttgtgttggtgggacaagtgttcgtgaggatcagcgcattctccaagctggtgtccatactgttgttggcactcctgggcgagtgtttgacatgctgcggaggcagtctcttctc

SEQ ID NO: 246198 - DNA, 283 bp, Glycine max
cgacccacgcgtccgcccacgcgtccgaaaacaatcatgagcttcattctgtttccgattctctttgcatttaggtttctgtcctcgcccgtgtctctctgcttcggatctggtcctcgccaaggttgaccgtcgcattgatctgacttcacagattgtgcgcatcactacttcactaaaggtgcagaatacgggatctgatgttgtgtctgagattatgctgtcctttcctgagaacgaggcaagtggcttggcgtacttgaaggcaacacggggggatggg

SEQ ID NO: 246199 - DNA, 389 bp, Glycine max
atttccggcgagttttcctctctcgaatctgcgagaccgacgaatctcgctcaccggaatttcgcattcagaaaatggctttaggtggaacagctcccccaagaggaagtgcagcggctactgcaagcatgaggagaaggagaacaaccggtggtgcggcctctggaggagcagctggaactatgctccaattttacacagatgatgcccctggactcaagatctccccaaatgttgttcttgtaatgagcattggcttcatagcatttgttgccatccttcatgtgatgggcaagctgtactttgtgcgtaaggaggcttagagaatagatcaagatgttaagtccaatttttttggattttcaatacacctctggtatgaaatttag

SEQ ID NO: 246200 - DNA, 390 bp, Glycine max
tgccacattacaacataagaaaccagcttctagtgttgatgctgaaattgtaggtggatcaacgataagttctcaggctatgctgaagcaagaggtttctactgcatcgtcaaagggcactactcttaaagagggtgatcgagtaaaatttgttggtaactttccttctgccgtctcatcactgccaaattatccttcaaggggacctagctatggctcccgaggcaaagttctgcttgcttttgaagataataggtcttcaaaaattggggttaggtttgataaatcaattccagatggcaatgatcttggaggcctttgtgaggaagaccgtgggttcttttgttctgcaaatcatttactacgggtagatggttcttggagggatga

SEQ ID NO: 246201 - DNA, 243 bp, Glycine max
gtccgattcccgctcgacccacgcgtccgcgagcgtgggctcactgtcaaatacttatcaaaaggagatgctgagcccaaccagagacggaactcaaaactggaaaagccaaggctgatgctctcttcaaagccattgatgcttaacctttagcccatcccgattacaactaatcctctacaacttacttgtcatcactttcttgcttggagacttatccaatcactctgttctcaacttaag

SEQ ID NO: 246202 - DNA, 295 bp, Glycine max
taccggttccggattcccggctcgacccactcgtccgcccacgcgtccgattctcttctcatctatggggcagaagtctctgatctacgcgggggtgtcgcggggaacagtgattctcgcggagtacaccgaattcagcggaaacttcaactccatggccttccagtgccttcagaagctccctgccaccaacaacaagttcacctacaattgcgacgcacacaccttcaattacctcgtcgacaatggctacacatattgtgtaggtgcagatgaatcaattggaagacaggga

SEQ ID NO: 246203 - DNA, 354 bp, Glycine max
cactgaattcaaaaacatcgaaagagagaggcatggccgagcaaaccttcatcatgatcaagccagatggcgttcaaagaggccttattggcgagattattagcagatttgagaggaagggtttttacttgaaagggttgaaactcgttactgtggaccgtccttttgctgagaagcactatgctgatttgtctgcaaagcctttctttagtggtttggtggattacattgtctctggccctgttgttgccatgatctgggagggtaagaatgttgttacaactggccgaaagattatcggagccacaaacccatctcaatctgagtcctgaactattcatggtgactttgcta

SEQ ID NO: 246204 - DNA, 497 bp, Glycine max
  unsure (1)..(497): unsure at all n locations
tgggggttagtggtgcctactcgagntctagtnagtancagcaccggtccgtgattcccgggtcgacccacgcgtccgcccacgcgtccggggagtacaggaagaagcacaagcatgtgtccatgagggccttgagggagtggtccaagcatatcttggaagggctgaattacttgcatttgcatgatccttgtatcatccacagagacctcaactgcagtaatgtgttggtgaatggtaatactgaccaggttaagattggtgacttgggcttggctacgattggggggaagaaccagtgtgcacattgctttcttgggacacgagaattcatggcagcagaattgtatgtgaagaattcagtggaattgaggtgtgtaggngatgtggaatgggtgtagaaatgagggtgaggtatagttaatgattgtttagagtgagattgttgagataggtttgatggatatggtataaagtgttatggtgagtagatagaa

SEQ ID NO: 246205 - DNA, 284 bp, Glycine max
gtaccggttccggattcccggctcgacccacgcgtccgttctgatcaagctggtaaggttcctctttattggggaatcacagctgatggatatggagcatttgctgatgatgcagatttgcttaaaggttcttgtggcaagtcacttgcttctttccctcaagggtgtttctactctacagcagttggaggattgagatgctatgagaatccgaagaataagattactgcagtacctgctgaggaagaggaaatctggggtgcattcttcaaggtggaagggtc

SEQ ID NO: 246206 - DNA, 150 bp, Glycine max
cacgcgtccgaaaaaaaaaaaaaaaaaaaaaaaaaaaaaaaaaaaaaaaaaaaaaaaaaaaaaaaaggggaaaaaaaaaaaaaaagaaggaaaaaaaaaaaaaagaaaaaagaaaaaaaaaaaagggggggaagggggaaaggaccaaag

SEQ ID NO: 246207 - DNA, 288 bp, Glycine max
aaaattcctgaaccgggacgtggcggctgacgcaacgttagggagtccggagacgtcggcgggggccccggaaagagttatcttttctgtttaacagcctgcccaccctggaaacggctcagccggaggtagggtccagcggctggaagagcaccgcacgtcgcgtggtgtccggtgcgcccccggcggcccttgaaaatcccgaggaccgagtgcctcccacgcccagtcgtactcataaccgtatcatgtctcctaggtgaacaacctctggtcgatggaacaatg

SEQ ID NO: 246208 - DNA, 391 bp, Glycine max
ccttcaaagtgaggtctctaagtttcactttgtttgcatagggcaacctcctttctctgtgactctgagtatcgtatcgttttattattatttctaattctctcttatcaggtccattgaatatgtctccgtcgttggatcttcctcccaagggtggcttcagttttgatctatgccgaagaaacgcaatgcttcaaaacaagggcctcaaagccccaacctttctcaaaactggcaccactattgtcggtttagttttccaggatggtgtcattcttggtgctgatactagggcaactgaaggacctatagtggctgataaaaactgtgagaaaattcattatatggcacccaacatatattgctgtggagcaagcacagctgctgatac

SEQ ID NO: 246209 - DNA, 408 bp, Glycine max
cgattacccgctcgacccacgcgtccggtcctccgtctccgtggtggcatgcagatcttcgttaagacactcaccggcaagagggtaaccctagaggttgaaagctccgacaccatcgataacgtcaaggccaagatccaggacaaggagggtatccccccggaccagcaacgtctcatcttcgccggaaagcagctcgaggacggccgcaccctcgccgactacaacatccagaaggaatcaacccttcacctcgtcctccgtctccgtggtggcatgcagatcgtcgttaagacgcttagcggcaggactattaccctagaagtcggaagctgcgacgccatcgacgaagtgaaggctgagattcaagacaaggagggaatccggggagccagcagaggctgatct

SEQ ID NO: 246210 - DNA, 359 bp, Glycine max
cctacgaggatgacaatgccgttcatcttgttgtggagctttgtgagggcggggagctcttcgaccgcatcgtggcgcgaggccactacaccgaacgcgccgccgccgccgtcaccaagaccatcgtcgaagtcgttcagatgtgccacaagcaaggtgtgatgcatcgggatctcaagccagaaaactttttgtttgcaaataaaaaggaaactgcggctttgaaggctatagattttgggttgtcggtgttctttaaaccaggggaaaaatttaatgagattgttggaagtccatattacatggctcctgaggtattgaagctaaattatgggccataagtggatatctggaatgct

SEQ ID NO: 246211 - DNA, 406 bp, Glycine max
cgacccacgcgtccgcccacgcgtccgctttgtagtgttgaatgcaagtgcctctgatgccactcgcttattgcggaacaaaactgcaacaggtaacgtgtccagagagaagattgagagatacttacttgaaaatggactcggccagacaccccccatgggatggaatagctggaaccactttggctgtgatattaatgaaagtttaattcgagaaacagctgatgcattggtgtcatcgggccttgctgctttgggatacaaatacattaatgtagatgattggagggccgaacttaatcgagaccatcagggaaatatggagggcaaggcttgagcgtggccttcaggaattaaggctctggctcattatgttcataggaaaggtttgaagttggggatatat

SEQ ID NO: 246212 - DNA, 530 bp, Glycine max
cgggggttaattttgctcctacatacatactgatttgctgtacctgttccgaatacccggctcgacccacgcgtccgaaaaaaaaaaaaaaaaaaaaaaaaaaaaaaaaaaaaaaaaaaaaaaaaaaaaaaaggggggaaaaaaaagtaaattggggaaaaaaaaataaaagaaaaaaagaaaaaaataaaaaagaagaaagtaaaataaaaaaaaattaaataaaaatagagaatgaaaaatatgatagaatagaaaaaaaaataggtaattaaaggaaaaaagagttaaaagatttaaaagaataaagaaagaaatgtattaaaaaagagtaaagaaaaaagtagaaaataaaaaagaaatataaaataataaaataaaaagaaaaaaagaaaagaagaacaaaagaataataaatgtaaagaaaaaaattaagtaaaaaaaaaattaaaaagataaaataactataaaaaagatataagatagaagatatataagttgaagatatataaaagagataataataaaag

SEQ ID NO: 246213 - DNA, 361 bp, Glycine max
tgaatccaaaaccctagccctcactctgaccaccattttttcaattctggagctatgtttcagggataatagggcagggatgtacaaagaacgagagcgaggtggtgtttccgtttccgcctctaaatccgaggatcggaagcgaatcaacgacgttctcgataagcacttggaacgatcctctccttccacttcccgccccatcaacaccgcttccaagaattccaacctccaagtggaggaatctgagacggagagtgaagagtctgatgttagtggctctgatggggatgacacctcttggatctcgtggttctgtaatctaagagggaatgagttcttttgtgaggtggatgatgat

SEQ ID NO: 246214 - DNA, 386 bp, Glycine max
  unsure (1)..(386): unsure at all n locations
gaaaaacttgtcaccatggtttcttccgagaaggatccacgagaggatgtccttcaagcctggtacatggatgatagtgatgaagatcaaagactcccccaccacaaagaacccaaggagtttgtctcgttggaccaacttgctgaacttggagtccttagctggaaactagatgctgataaccatgaaaatgatccagagctgaagaagattcgtgaagagcgtggttacacctacatggatgtttgtgaggtctgcccagaaaagttgccaaattatgaacagaaaatcaaaagcttctttgaagagcatcttcacactgatgaggagatccgcttttgtgctgctggaagtggctattntgatgttanggatcgcaatgaagc

SEQ ID NO: 246215 - DNA, 183 bp, Glycine max
ccggttccgaatacccggctcgacccacgcgtccgcccacgcgtccggcggaggcagatcggagatctgtgatagatatagatggagggagggggggcccggcttgggcgggcctcgacccgctacagaccgggcacagtgttcactggaccggtgcggaagtggaagaagaaatggatccac

SEQ ID NO: 246216 - DNA, 395 bp, Glycine max
aagttttgttctttcctagcaattcggcgcaagcgtcttctgcttcaaggaaggagagcttgttattctctatcaacaaggaaaatgtcaggtgaagaggttgttgttgcagctgagccagctgctgccatcccaggcgagcctatggatatcatgactgccttgcaacttgtgctcagaaaatctctggcttatggtggtcttgcacgaggccttcacgaaggggcaaaagtgattgagaagcatgctgcacaactctgtgttctagcagaagactgtgaccagcctgactatgttaaactggttaaggccctttgtgcagagcacaatgttagcctgctgacagttccgagtgcaaagacccttggagaatgggctggtttgtgcaagattga

SEQ ID NO: 246217 - DNA, 396 bp, Glycine max
cttttatcagctaaggccacctttggggagaaagaatggtatttcttcagtcctagagaccgaaagtacccaaatggtgcaaggccaaacagggcagctgcttcagggtattggaaggccactggcactgataagaccatagtgacatcattgcaaggaggagcacaagagagcgttggtgtgaagaaggctttggtgttttacaaaggaagacccccaaagggtgtcaagaccaattggatcatgcatgaatatcgccttgtagacaacaacaaacccatcaagctcaaagactcctccatgagagtaagtgtcacatgtccctactagcaataaggttttttagattacattttcatagtaattcttgatattgtcgaacttaggagaaattat

SEQ ID NO: 246218 - DNA, 403 bp, Glycine max
attcgttcccatggttcgatccttcccggtgaaacgcggcgtgttcgaattctgatcgcttttacgcgagaaagggggaccaccctctaagcctaagtattcctcaatgaccgatagcgtacaagtaccgtgagggaaaggtgaaaagaaccctatttaaggagtgcaatacagaacctgagatcctgatgcgaacaatcattcgaaggagcttacagcctttacttgatatttagtaaagcgcactcactctaacggcgtaccttttgcatgatgggtcagcgagaaaatgggaacagtggcttaagccattatgtgttagcgcctttcataaggggaatcttctagttctttctatttgacctggaaccatccgatctaaccctgactctgtagaataaag

SEQ ID NO: 246219 - DNA, 405 bp, Glycine max
cctttttccaaagcgggaccagcacgaagaactatactagctcggtcggaccggaccggtagttaagagagggatcgaattcgaagcgaagttagacggagaaagcgagaatgatgttggacggaaccgaagacgaagagaagtttctcgccgccggaatcgccggccttcagcagaattccttctacatgcaccgtgcattggactcgaacaatctcagggacgctttgaagtattcggctcagatgctctccgagctcaggacttccaagctttcgcctcacaagtactacgaactatacatgcgcgcctttgatcagttaaggaagctggagatgttcttcgaggaagagactcgtcgcggttgctccattattgatctttatgaactcgtccaagacgccg

SEQ ID NO: 246220 - DNA, 521 bp, Glycine max
  unsure (1)..(521): unsure at all n locations
nggagagngtgnttttccgtcctacgaaggggaggattgttggctcgctcggcccggaattcccgggtcgacccacgcgtccggggattcagggttattcccctaaaagttaaggttttggctggatcctgctaaggatccaggttttgtcgcaaggccttggccaagtaacatgatacgattttttaggacccaggatgaatcatggagccatgaggttgccatatcagtgaaaccattgaaagtgcaaaactggattctttctgaaatgcctgggcttattactgattntctgatttctcttgatgatcggtttctgtattttgtaaactggcttcatggngatataaggcagtataacatcgaggacgttaaaaatcctaaactgactggacaagtatgggttggtggacttatccagaaaggaagccctgagtagctataactgatgatggtgaaacatggcaagctgaagtccagagattcagggaaacaagttgagaggggcccttaaatgatta

SEQ ID NO: 246221 - DNA, 475 bp, Glycine max
ccgggcccggaattcatggccgggtcgacccaagccgtccggcacgtctctctctctctctcgccatggctatggctatgcaaagcggaatcggagtctccaagatcctcatcatagcaggagcaggttacaccggcaccgtcctcatcaaaaacggaaaactctcggatttaatcggcgagcttcagttgctggtgaagggattggaaaaatctggggagcatgctgaaggtgaaggtgaatatgctgatgccatagctgctcaggtgcgtcgcctggcgaatgaagttcggcagctagcatcaaacaggccaatcacagtactgaatgggggttctgaacaaagtaatttatcatcccttgtcgttccagctgctgccttgggcgctctgggttatggctacatgtggtggaagggaatttcattctcagatcttatgtatgtgactagacggaatatggaaaaagctgttgc

SEQ ID NO: 246222 - DNA, 384 bp, Glycine max
taaatactaacaaataaaaacatagataatttctttgctgagaatgaacaacttgcattttgccctgccattgtgggtcctggtgtatactactcagatgataagatgcttcagaccaggatattctcttatgctgattcacaaaggcacagacttggaccaaactatctgcaacttcctgctaatgctcccaagtgtgctcaccacaataatcatcatgaaggtttcatgaatttcattcacagggatgaggaggtaagttaatgtttaatttcttatattttcttatttgttttctgtttgaaaatctggttgccttgttaactacttagtgctgttagattattcatgcacatgctgattgggtaatattgctgcctattc

SEQ ID NO: 246223 - DNA, 534 bp, Glycine max
  unsure (1)..(534): unsure at all n locations
gggttanctggaagtccatcactgacacgtcgctactgccgtaccggtccggaattcccgggtcgacccacgcgtccggaagttttcaaggaattttatcaaacataaactaagcacaggaaacttacttggatttattccttgggaacctgcaacattagtgggaaattcgatccaaaaactgtggagctgattgtaacaacttaccaggcttcggcattgcttctatttaattcctcagatagactgagttattcggagataatgtctcagttaaacttatctgatgacgatgttattagactgctccactccttgtcatgtgccaagtacaagattcttaacaaggaaccgagcacgaaaacaatatcttctaccgactattttgaatgtaattcanaatttacagacaaaatgaggagaatcaagattcctcttcctactgttgatgagaagaagaaagtaattgaagatgttgacatagacagaagatatgccattgatgcctcaattgtgcgtattatgaataggcgn

SEQ ID NO: 246224 - DNA, 438 bp, Glycine max
ggctcgacccacgcgtccgcccacgcgtccgtccacgcgtccgccaaagcctctgatggttgcgaggatattgtttttaatcccaatgttttcactgaattcaaacttgctgggagtccagaggaaatagcagctgatgaagataatgttagaaaagttagtcaatatcttactgatgtggtacttccaaagtttatacaagacttgtgtacacttgaagtttcaccaatggatggccagacattaactgaagcattgcatgctcatggaattaatgttcgctatattggcaaagtggctggagggactaaacatctacctcatctgtgggatctttgtaataatgaaattgttggcagatctgctaagcatattatcaaggacttattgagagagacagaggaccacgatcttgcaccagcactatctcatttctta

SEQ ID NO: 246225 - DNA, 446 bp, Glycine max
ccgggtcgacccacgccttccggttatgaccggtgtgaaccaaactccggggaaaagtccctggtccagttggaagactttgcaaatcacaatgcttttgagttacttgctaaatatgggacaactcatctcgttttcaatgacgatatacaggggactgcatctgttgttctagctggagttgtagcagccctaaaactcattggtggtacattgcctgagcacacattcctcttccttggtgctggagaagcaggaactggtatagccgagctaatagctcttgagatgtcaaagcaggtgatcaagccaacagttttgattggatcatcaggagtgggaagaacatttacaaaggaagtagttgaggctatgacttcaaacaatgataaacctctcattctggctctctccaatcctacctcacagtctgagtgtacagctga

SEQ ID NO: 246226 - DNA, 519 bp, Glycine max
  unsure (1)..(519): unsure at all n locations
gggggagagtgctttcgtcttaagaaggtagtttgctaggccgtaccggtccggaattcccgggtcgacccacgcgtncgaaattcttccaaaatcacgttattcagggatagtatcatggcaactgcaaccatggctactgcagcaggtgcagctgcccttttgtactacacattgaatcggaaattgcagactcacgatgcaatcgacgaagatggtgaagaaaatgggagtgatacgcccactgatacgccattaggtattggccgtgtttctcatcggttaatccaagcccctgcaacatggttggagacaatttcaacattgtcagagactctcaagttcacgtattcggagacacttgggaaatggccaattggggatttggcgtttggcatcagctttcttctaaagcggcagggaaactatcatgttgacagtgaattttgggtacggacagtgtacagctgaaaggatctgagattactgctgaacttaagtatctcttaaacttgttgn

SEQ ID NO: 246227 - DNA, 511 bp, Glycine max
  unsure (1)..(511): unsure at all n locations
ggagaggtgtgtcctccatagaagtagttcgtatgccgtaccggtccggaattcccgggtcgacccacgcgtncgnccacgcgtccgattaatgaatggctagctgtaaacaccggggacttctttaatcaagtgaatatcctgtatggtactcttacagaattctgcacgccaagtaactgcccttcaatgactgcaggaccaaagtatgagtatcgatgggctgatggtgttactataaagaaaccaatagaggtgtctgctccaaaatatgtcgagtatttgatggactggattgaatctcagctagatgatgaaacgattgtccctcaaagattgcgtatgtatgacatattgataaagctagttggccagttagctgaatcatctggattgttatttgctaataatatgcatcatagcactattttaattaattgctgcatagctataagggcctcctttccaaccaatttccgagatgttgtcaagacaattttgaagcgattat

SEQ ID NO: 246228 - DNA, 511 bp, Glycine max
agggcttgattcttttaagtatgttgtaggcactgccgtaccggtccggaattcccgggtcgacccacgcgtccgctgatactttcttttaggatctactgtggagacctcaaaatcagagatcttttgctagtacaaccaatgtagaaggactccacatcagaattacttttatcaggattcggaagaattagttagcgttgtttatgtatgttaaaagagaaattaagggttagtcaatttaatgcaaatcccagctttacatcgtatcacaatgctagagatcaatgttaaatataatattttatcctaaaaaaaaaaaaaaagggcggccgctctagaggatccaagcttacgtacgcgtgcatgcgacgtcatagctcttctatagtgtcacctaaattcaattcactggccgtcgttttacaacgtcgtgactgggaaaaccctggcgttacccaacttaatcgccttgcagcacatccccctttcgccagctggcgtaatagcg

SEQ ID NO: 246229 - DNA, 516 bp, Glycine max
  unsure (1)..(516): unsure at all n locations
agagtacattaagtccatgtaggaagcgtacgctcactgccgtaccggtccggaattcccgggtcgacccacgcgtccgcccacgcgtccgcccacgcgtccggtacttacaagaaaaatgggactgctgctgcaattcaatatggtaccggagcaatttctggtttctttagctacgacagtgtcagagttggtgatatatttgtaaagaaccaggaatttattgaagcaactagggagcctggtgttacatttttggcagccaagtttgatggtatactgggacttggatttcaagagatatcagttggaaatgctgttccagtgtggtacaacatggttgaccaaggtcttattaaggaaccagtattttcattttggttcaaccgcataccggaggaagaggaagggggtgagattgtttttggtggtggtggatcctgctcactataagggaaagcacacttatgtgcctgtgaccagaaaaggatattgncagtttgatatgggagatgt

SEQ ID NO: 246230 - DNA, 468 bp, Glycine max
  unsure (1)..(468): unsure at all n locations
ccgggtcgacccacgcgtccgatccttttaatcaggagcctgcttctgtggctttctcagctctcaatctcgcaatgcattttcatggttgggtttcctttttcattcttatacactataaattgcctctaaaagatggaaagaaggcatattatgagtatgctggtttgtggcatatgtatggacttttatcacttaactcctggttctggagtgctgttttccacagtcggtaagttacttatgtggatattttcagtattttgcactgattctaaagaatgattgattgttatgctgtctattggtatttcttagtgcagtgatactacttagttcttatattgaagttttaatcacctggcaaactatgtgacacaaattgaataacaatatatgcatacaacatgctaatgcataaactatntcttatgttaatttttagtatatgattattcctaatacttc

SEQ ID NO: 246231 - DNA, 594 bp, Glycine max
  unsure (1)..(594): unsure at all n locations
ggatatggtgtgnncgtattatgtgtataagtgtggggtagtggatgtagtnagttaggtgganttgatagagtttatgttggaggggagtagtagcctacatgatgctcttccggtccggaattcccgggtcgacccacgcgtccggatttatgctgagggtgctgaaaatggcttggagttcacaattgtgaggccttttaactggattggacctcgaatggatttcattcctggcattgatggtccaagtgagggtgttcctcgggttcttgcatgctttagcaataatcttctcagaggagagcccctcaagcttgtggacggtggccagtcccagagaacctttgtttacattaaagatgctattgaagctgtcttgctgatgattgaaaaccctgccagggccaatggccacatatttaatgtgggtaacccaaacaatgaggttactgttaggcagcttgctgaaataatgattaaggtttattcaaaggtaagtggcgaacaaactcctgaaacacctaccgttgatgtgagctcaaaagaattttatggtgaaggatatgatgatagtgacaagagaatnccttn

SEQ ID NO: 246232 - DNA, 527 bp, Glycine max
  unsure (1)..(527): unsure at all n locations
agtaggangtcgaggttatccctcgccgtccgcatgctgtaccggtccggaattcccgggtcgacccacgcgtccgattccgttctacatataatcattcataatgggtgttttcacattcgaggatgaaatcaactcccctgtggctcctgctactctttacaaggccctagttacagatgccgacaacgtcatcccaaaggctcttgattccttcaagagtgttgaaaacgttgagggaaatggtggcccacgaaccatcaagaagatcactttccttgaggatggagaaaccaagtttgtgctgcacaaaatagaaagcattgatgaggcgaacttgggatacagctacagcgtggttgggggtgctgcattgccagacacggcggacaagatcacattcgactccaaattggttgctggtcccaatggagggtctgctgggaagctcactgtcaaatacgaaacaaaaggagatgctgagcccaaccaagacgaacttcaaactggaaaagccaaggttgttg

SEQ ID NO: 246233 - DNA, 355 bp, Glycine max
ctttgacattcaaaacatttgaaagcggctagcttacactgttttaggggagagcccattttaaaaattttcaagaaattaaactttgctggtggggctgtgacattttttggtgaaaatgtgtctactgggctgaaagttgaggatcagattgctgtcgggaaacgcgtggtattagtaggtagcacaggggttgtgaagtctcaaactgattctgcttatggtgccaatgttgaagtgcggcttaaagaggcagattttccaattggccaagaccagtcttcaactgagcctttctcttgtgaagtggagaggagacctggctttgggggctaatcttcagtcccaattttct

SEQ ID NO: 246234 - DNA, 522 bp, Glycine max
  unsure (1)..(522): unsure at all n locations
gtggaaatgaggtgntttccnntcnctaagatgcantgccgtacgcccgtaccggtccggaattcccgggtcgacccacgcgtnccgaaaaaccatttntgaggatggaaagaacagtaaggtcttattgggttgggttaatgaatcctcaagtgtttcggatgatatcaagaaaggatgggctggaatccatactattccaagggccatctggcttcataaatctggaaaacagttggtgcaatggccggtggtggaacttgaaagcttacgtgtgaatcctgtccactggcccaccaaagtggtcaaaggtggtgaaatgcttcaagttactggtgttactgcggcacaggctgacgttgaaatttcatttgacgtgaatgagtttggaaagggcgaagtattggaccaatgggtggatccccaaattctgggtagtagaaagggtgcagccgtaaagggtggtttgggaccctatggcttgctagtttttgcttctcgtggcttgcaagagtacacggc

SEQ ID NO: 246235 - DNA, 512 bp, Glycine max
gagtagtgtagtccactgacgcacgtcgtacgcctgccgtaccggtccggaattcccgggtcgacccacgcgtccgaaaagcaagaacaattactttagtgttttctcttgtcacataaaagtcatctaagaagaattacaagatcatcatcacaataacaagatgagttcaggaattagagcatggagtgtggcagcaagtgttggaattgtggaggccttgaaagaccaaggcatatgcaggtggaatcatgccttaagatcagctcaacaccatctcaaaaaccatgttggctcattctctcaggctaacaagctttcttcttctgctatgatatccacaacactaaaacatgagaaggcaaatcaatcagaagagtctttgagaactgtcatgtacttaagctgctggggtcccaactagatatcataagcccaacaacaaaatattcttttctcttttcaattctaggaatcaagcaagcttaattagtctcaaatgatgatgagta

SEQ ID NO: 246236 - DNA, 521 bp, Glycine max
  unsure (1)..(521): unsure at all n locations
gttagagtngtgtagtccatgtagtatggtgnggcactgcgtaccggtctcggaattcccgggtcgacccacgcgtccgaaaaaaaaaaaaaaaaaataaaataaattaaaaaaaaaaaaaaaaattaaataataaaaagaaaaaaaaaaaaaataaaaaaaaaaaaattaaaaataaaatgggaggatcgttctaagtgttccagtgttagttacccttgaatggggcttctttttttttggatacaggtatttaaattcattgctattggcggttgttttttatattggggcctggaaaatccatggcgttgccgaactttttagctttgctagcacttgcaaatttttgtagttggcgaattaattgagctgctgcatatttatcgtttttccaaactgtgtgtatacccagaatggccattgtgtagcgcctttgtaacggttttttaacctcgatgggtattggggttccccccttggtgccgtttaattcgctagggctgtgcggcttttctttc

SEQ ID NO: 246237 - DNA, 530 bp, Glycine max
  unsure (1)..(530): unsure at all n locations
agagtnanntatnnttagggnatcttgtagccctcacgcatgctcgtaccggtccggaattcccgggtcgacccacgcgtccgccgacacaaacacactccaagcgcacgttagcagtctccgccgtcttcgccaccgtgccatcgccgtcgatggagtctctcttcggctcgatcaacgttcgcgacctcctctcggcgcaggacctctcggaccctaactcccctctctcagcgccggatctccgtctcctgatccagcgcctggagtcgcagtccttccagatccgttctcaggtgcagtcctaccttgtctcgcaccacgaagacttcgcgcgcctcttctctctttgtaacgacaccgtttcgcagacgcgcgaggtctncgatgatgtttccgccatcctcggcctnctctccgaccacccgatcgatgccgaggtgcgcgagatcgtgtcggagacgaagtcgaagaaggaggagctgaagatgaagaaagagctgctgggattggtcggaacccgtgtggcc

SEQ ID NO: 246238 - DNA, 511 bp, Glycine max
  unsure (1)..(511): unsure at all n locations
gggttgtttcgtcttaagtaagtagttggtcatgccgtcccggtccggaattcccgggtcgacccacgcgtncgattttgtcaagtatgcacatgatgaagaatctgcggaggatcangaagagactgngtggaaatatatccatggggatgtgtttaggttccccaagtttaagtctctgtttgcggctgcgcttggatctggcactcagttgtttacccttacggtgttcatattcatattggctcttgttggtgtgttttatccgtacaatcgaggggcactgtttactgcactggttgtcatatatgcacttacttcggggattgctggatacaccgcaacttcattctattgtcagttggaaggaacaaactgggttaagaatctgctggtgactggattccttttctggggaccctttgttctgacctttctgttttctaaacactgttgcaattgcttacaaagctactgctgccctcccatttgggacgattgtggttatagt

SEQ ID NO: 246239 - DNA, 509 bp, Glycine max
  unsure (1)..(509): unsure at all n locations
gtagaggtgtgtcgtccccattgcagtccgtatgacgtaccggtccggaattcccgggtcgacccacgcgtncgaccacgcgtccgtccacgcgtccgttttcctttgcctgtgcgtgtgaaagatcgcagcaactccaccaccatcacaacaggaccgtaaccgatttccaaggttgagttatttgctggtctaacttaaccatactgtctattttgactcctgagattgctagtgagtcatggggcatagacatttatatagctcatctccaatatttgagggtgaacctgaccagaactggaatcatatgcatatggatcaacaatatgtgaaccatggtaggagtaccactttcagacaatggttctttaatttatcctttggaaaatatgtccatagatagcattctttttcattctaatggaaccactgccccagggtcaaccggttttccttcaacaggtctaacattgaagcaccccctcatcaaacagatgtatcatgcc

SEQ ID NO: 246240 - DNA, 523 bp, Glycine max
  unsure (1)..(523): unsure at all n locations
ggatggtactttagtccatgtagtataatanggcactgctgtactcggtccggaattcccgggtcgacccacgcgtccgaaaaaaaaaaaaaaaaaaaaaaaaaaattataaaaaaaaaaaaaaaaaaaaaaaaaaaaaaaaaaaaaaaaaaaaaaaaaaaaaaaaaaaaaaaaaaaaaaaaatttaaaaaaaaaaaaaaaaaagggccgccctttttaagggttcaagttttccttccccttctttccaactttttatttttttttttggtcccctaaatttaatttatttgccctttttttaaaaacttcttatttggaaaacccttgcttttcccaattttattccctttgaacaatttccctttttcccaatttgctttattaccaaaaggccccgccccattcccttttccaaaaatttccccaccttaattgccaattggacccccccttttaacggccttttaaccccgccggttttggtgtttcccccaattttaccttttacttttgcaagctc

SEQ ID NO: 246241 - DNA, 522 bp, Glycine max
  unsure (1)..(522): unsure at all n locations
ngggggaggggacgtgcgtcctttgacagaaagttgtcggcacgccgtaccggtccggaattcccgggtcgacccacgcgtccgcccacgcgtccggccacatagagacacaatacagagtgagttgttgctccttcgccacaactctctgccaacatgggtatctccagagattctatgcacaagaggcgtgccactggtggcaagaagaaggcctggaggaaaaagagaaagtatgagcttggtcgccagcctgctaacactaagctgtcaagcaacaagacagtcaggaggatccgtgttagaggtggaaatgtgaaatggagggcattgagattggatactggaaattactcctggggaagtgaagctgtaactcgcaagactcgtgtactagatgtggtttacaatgcctcaaacaatgagcttgtgcgtactcagactcttgtcaaaagtgctatcgttcaggttgatgctgctccattcaaacagtggtatcttcagcactatggtgttgagatn

SEQ ID NO: 246242 - DNA, 528 bp, Glycine max
  unsure (1)..(528): unsure at all n locations
agggtttnattnntagtgaccatgatccgtcggcatgccgtaccggtccggaattcccgggtcgacccacgcgtccgaaccattgttcgttgtggcagtagcaaaacaacacctttttgaaacccgaggttcagagagaaaagaaacattttccaaattaatggggcgttggatgaaaccagaggtttaccctctattggctgcaatgacctttgttaccggcatgtgtgtgttccaactaacaagaaatgtgctcgggaaccctgatgttaggattaacaaaactcggagaagcatggcagtgttggagaacagagaagagggagagaaatatgctgagcatggcctgaggaagttccttcgtactcgaccaccagagattatgccaaccatcaaccacttcttcagcgaggataaatgaaagagtgtcacacgtagtagaataccaaaataattcaacttatggaagaaaaatcaaagtttctaaatctgtcaagcagcttgcatatgaaccttgtcatattacgt

SEQ ID NO: 246243 - DNA, 473 bp, Glycine max
aattcccgggtcgacccacgcgtccggttttgttagttcacacactaagttctgaaaaatgagttccaaagtttttcttattctacttatgtgcatggccactatacttttgatctcctctgaggttgcacccgatgatgcataccagaattttgacaaaacagatgggaagcgtagtgcaaatggggtagatgaaagcaaatattggcgtggtggctatggcgactatggtggttggcgtggtggtggttggcgtggtggctatggaggctggcgtggtggctatggtggtgggcgtggtggctatggtggctggcgtggtggctatggtggtgggcgtggtggctacggatgttggggtggtggctttggccctaaccgacattatgaagctgggaatgatgctagccctcacaactaaggaaggaacttgctaaagcttatatagtgattaagttatcgtaataaataaa

SEQ ID NO: 246244 - DNA, 474 bp, Glycine max
tccggtccggattcccggtcgacccacgcgtccgcccacgcgtccggagaaagagaagagagaatcgaaaccctaatttcggaaagatcggcgatgactgcctccaaggatcgcgagaacttcgtctacatcgccaaactcgccgagcaggccgagcgttacgaagagatggtggaatcaatgaagaacgttgcgaatctcgacgttgaactgacggtggaggagcggaatttgctttctgttgggtacaagaatgtgattggtgctcgcagagcgtcctggaggatcctgtcttccattgagcagaaggaagaaacaaaagggaacgagttgaatgcgaagcggattaaggagtacagacagaaggttgaattggagctatcgaacatctgtaatgatgttatgagagtgattgatgagcaccttatcccttcggctgcagctggtgaatccactgtgttttactataagatg

SEQ ID NO: 246245 - DNA, 442 bp, Glycine max
cccgggtcgacccacgcgttcggaaagggtgcttcctgagtggtacacagagtaaggggtagagttaatacttagcacagaaatagtcaatgtggaccttgcggcaaaatctctgatcagtgcgggaggagaaacattcagttatcagattttgattgttgcaactggctcaacagatataaagctgacagattttggtgtacaaggagctgatgcgaaaaacatcttttatttgaaggaggtcgatgatgctgacaaattgtatgaggcaatcaaggcaaagaagaatgggaaagctgtggttgttggcggaggatacattggtctggagcttagtgcagtgctgaaactcaacaagtacgatgttaccatggtctacccggagccttggtgtatgccacgactgtatacagctggtatagctgaattctatgatgagtat

SEQ ID NO: 246246 - DNA, 513 bp, Glycine max
  unsure (1)..(513): unsure at all n locations
gttgaggtgtgttcgtcccactcacgacttcgtactgacgtaccggtccggaattcccgggtcgacccacgcgtccgccggtttctcttgtcacaccaaatggaccgacccgccgccatattttccgacaccgtcaacctcaacggcacggtgacgcagctgtctctgctcgccgacgggaggctgtggtggccggagggcggtcaacgcaatttgagcatcgagaaagaggttctcgggttcaccggcgacggtcccgatataaggctcaaaacaatcgtggaaaccgaagatggatgctgtggcggtgcaagcagagcaaaactagtccgaaacgacgtcgtttttcggccatcgtccgaggaaacgcataagctctggtgccagaagcttggcgaattcatcgattctctcggacgacccaagaggctttttggttctgctaatccattcngngggacgaaatctgctgtcattggttttcgtgatcaaataaagcctctgcttgaagac

SEQ ID NO: 246247 - DNA, 457 bp, Glycine max
  unsure (1)..(457): unsure at all n locations
ttcccgggtcgacccacgcgtccgggcatacataaaacccataatcaacttcctaatgagcaatggggccccacttcttgccaacgtgtacccttactttgcttatgcaaatgatcaaagcattcctcttgcctatgctctttttacccaacaaggaaacaacgacgttgggtaccaaaacctctttgatgctatgttggattcaatatatgctgctttggagaaagtgggagcgtccaatttgcagatagtggtttctgagagtgggtggccatctgaaggtggagctggagcctcaattgataatgcaggcacttactatgctaatttgattcgtcatgcctcgagtgggaatggaactccaaagaggcctggtgagtctatagagacttacttgttcgccatgtttgacgaanaccagaagcaaggtgctgatactgagcgtcattttggtctc

SEQ ID NO: 246248 - DNA, 516 bp, Glycine max
ggggttgaggtgtgtcgtaccaagacgtatcgtgctcctgccgtaccggtccggaattcccgggtcgacccacgcgtccgattagcatcaaaaccagtaatccggtgctgctagaggatgggaactagtgaatggcatatcgagcgaagatctagcttcggcactgaatcccccttagcaagagaggcaggaaatgtgcctgaaactgggtcactctctattgttgtgcttggcgcttctggggatcttgctaagaagaagacatttcctgcacttttccatctataccggcagggattcttaccagcagatgaagttcacatttttggctatgcaaggacaaaaatatctgatgatgaattgagaaaccggttgcgtggcttattctggtccaaaccaaagggccttttcccaactggtggaagatgtagaggagtttttacagctgatcaaatatgtaagtggctcttatgattctgaggatggatttcgcttgttggataaagagatttcaga

SEQ ID NO: 246249 - DNA, 511 bp, Glycine max
  unsure (1)..(511): unsure at all n locations
gggagggagtgcgtccatgaaagatcctgagcactgccgtaccggtccggaattcccgggtcgacnacgcgtccggaaaagttaccacagggataactggcttgtggcagccaagcgttcatagcgacgttgctttttgatccttcgatgtcggctcttcctatcattgtgaagcagaattcaccaagtgttggattgttcacccaccaatagggaacgtgagctgggtttagaccgtcgtgagacaggttagttttaccctactgatgacagtgtcgcaatagtaattcaacctagtacgagaggaaccgttgattcgcacaattggtcatcgcgcttggttgaaaagccagtggcgcgaagctaccgtgcgttggattatgactgaacgcctctaagtcagaatccgggctagaagcgacgcgtgcgcccgccgtccgtttgccgaccagcagtagggggcctcggccccccaaaggcacgtgccgttggtgaccctcgtgaggcggat

SEQ ID NO: 246250 - DNA, 509 bp, Glycine max
  unsure (1)..(509): unsure at all n locations
tgggngtgtagtcttgtaagtatctgttggcactgccgtaccggtccggaattcccgggtcgacccacgcgtccggtgaggtagaacccttccacggtggtgactgcgcgatgggtgcctacaagtatgtttcagagctatggcgcaagaagcagtctgatgtcatgcgcttcttgcagcgggtgaggtgctgggagtataggcagcaaccttccattgttcgcttgacaaggtcgacccgccctgacaaggctcgtcgcttgggcttcaaggctaagcagggctatgtgatataccgtgttcgtgttaggaggggtggccgaaagaggccagttcccaaaggtattgtttatgggaagcccacaaaccagggtgttacccaactgaaatttcagcgtagcaagaggtcagttgctgaggagcgagctggacggaagctgggtggacttagggtcctcaattcttactgggtgaatgaggactctacttataaatactntgaggtgatt

SEQ ID NO: 246251 - DNA, 458 bp, Glycine max
  unsure (1)..(458): unsure at all n locations
attcccgggtcgacccacgcgtccgctgaccttcctcaaactgaagaaattagagatgttttggacacatttcatgtcatagcagaactaccaccagacaactttggagcctatatcatatcaatggcaactgcaccatctgatgtgcttgcagttgagcttctacaacgtgaatgtcacatcaagcatcccttaagagttgtgccattgtttgagaagctagctgatctagaggctgctcctgctgctctggcacggttggtctcgatagactggtacagaaataggatcaatgggaagcaagaagtgatgattggatactcagattcagggaaagatgctgggaggttctctgcagcatggcagctatataaggctcangaggaacttataaatgttgccaagaaatttggtgttaagctaaccatgttccatggtcgcggtggaactgttggaag

SEQ ID NO: 246252 - DNA, 529 bp, Glycine max
  unsure (1)..(529): unsure at all n locations
gggagggnngttcgaagtccatcacttagctcgctcgcatgtcgtaccggtcccgaattcccgggtcgacccacgcgtccgaaaaaccctacttggctcttttcttcacttgttcactttcttccaacctctaacctacctctttttcttctctctcaacaacttcaccttcttcctcctcgatcatgtctcacttcaagggcaagtaccatgatgagcttatcgccaatgctgcgtacattggcactcctggaaagggtattcttgctgctgatgagtcaacagggacaattggcaagcgtttggccagcatcagtgtagagaacattgaatccaacaagccaactcttaaggagctgcttttcactgctcctggtgttcttcaatatctcagtggtgtcatcctctttgaggaaaccctctaccagagcacagctgcaggcaagccctttgtgaatgtcttgaaggaagctggtgtgcttcctggcatcaaggttgacaagggcacagtcgagcttgctggaactan

SEQ ID NO: 246253 - DNA, 512 bp, Glycine max
  unsure (1)..(512): unsure at all n locations
gggttgtgtcgtacttcagttcataccgtatgacgtaccggtccggaattcccgggtcgacccacgcgtncgatctttatataacctaattgcaaagatgaataccaagcccgttttcttcttgtgcttcctctgtgcactgcttctcatctctgttgtggcaactgagccatccaaagatgagacacaagaagaaccaaagacacagccagatgcctggggaagaggtggaagtggggggcatgatggaagctggggacacggtggagactgggggcatggcggaggaggacacggtggaggacatggcggaggaggacacggtggaggacatggcggaggatgcagatgctgcggtcgaaagggctgcaaatgttgctgaagtaaaaatcacacatatatgaactgaacacactcttataacttgaatggactccatgtaataactagtatatatgtaagaaatcagaaattaaagcatggactctattcgtgcttgggctggcatatgt

SEQ ID NO: 246254 - DNA, 509 bp, Glycine max
  unsure (1)..(509): unsure at all n locations
aggttgtttataacacgtagcatgtcgtactgccgtaccggtccggaattcccgggtcgacccacgcgtccgganaggcaaaggggatcgctgaaatcaattagtctggttgtagtgggaaaagaaaagaaaatgaaaatgggtggtgggtgcaagtgtttggtatcgttggtgttggctttggtgttgatgaggagtttggcggaggcgcaatcgggcaccagcaccacttgcgcccaggagctaattccatgtgtgaactttctgaatgggacaaccaccccaccaagctcttgctgtgaccctctcaaacaaaccgtggaaaaccaactggattgcctctgcaacatcttcttcagccccggcttgcttcaaagcttcaacgtctctgttgatcaggctctcgctctcagtcgccgctgcggcgtcaccaatggtatcaccagctgctcaaacgggtcagctccagcttcgggttcagggccaccaccagtcacacctggaggtga

SEQ ID NO: 246255 - DNA, 521 bp, Glycine max
  unsure (1)..(521): unsure at all n locations
ngggtaggggcgtgtcgtccattacagagagtcataggcacgccgtaccggtccggaattcccgggtcgacccacgcgtccgctaaaatcccctccgaagaaacccgattcggaacccgttcaacccgattccgcatccacccccaatcccaccacgcgcggcgtcaaagaggatttttccgagctcaccaaatccttttcccgccagctctggggagtcgcctccttcctcgccccgccgcccgatccccaatccgaaaagcccgtcgccgattccaatcccaatcccactgacgacgacgaagaggaagatatcatcgccaggaatccgaaacgatttcgcggagattagtggcaagttcaagagcgggatctccaaaatttctggtaataagacggtatccgaattcactaagatagcttcgagtttccttcagcctggatccgaggaggaatacgatctccaaggtgtcctcggagttaccgaaggatgtggttgccttcgccagaagcgtagcttt

SEQ ID NO: 246256 - DNA, 512 bp, Glycine max
gggagggactgtattctttgtggggagtgttgcgactgccgtaccggtccggaattcccgggtcgacccacgcgtccgcttctctaactttcgcatattcgaaaaccaaaagcatgggtcagggaacaccgggcggtctgaaccggcagggtcttccgggggaccggaagccggacggcggcgacaagaaggagaagaagttcgagccggcggcgccgccggcccgcgtgggccgtaagcagcgtaagcagaagggcccggaggcggcggcgcggctgccgacggtgacgccgctgtcgaagtgcaagctaaggctgctgaagctggagcgcataaaggactacctcttgatggaggaggagttcgtggcgaaccaggagaggctgaagccgcaggaggagaaggccgaggaagacagatccaaggtcgatgatctccgaggttctcctatgagcgttggtaacctagaggaactcattgacgagagtcatgccataggttcgtcctcggtg

SEQ ID NO: 246257 - DNA, 516 bp, Glycine max
gggaagggtctgtagtcaactgaagcaggcctcaggcactgccgtaccggtccggaattcccgggtcgacccacgcgtccgcccacgcgtccggtactgttctattagttcatactaagttctgaaaatgagttccaaggttttgcttgttctacttatgttcttggccactatacttctgatctcctctgaggttgcacccgatgatgcatacgagaattttgacaaaatagatgggaagcctagtgcagatggggtagatgaaagcaagtattggcgtggcggctatggtggcggctatggtggtggttatggaggtgggcgtggaggctatggaggtgggcgtggaggctatggagggggacgtggtggatatggcggcggacgaggtggctatggtggcgggcgtggtggctatggcggcgggcgtggtggctggcgtggtggctatggtcctaatgaacataacgaggctggggttgatgctaaccctcacaactaagaaggcaactttct

SEQ ID NO: 246258 - DNA, 440 bp, Glycine max
ccgtaccggtccggattcccgggtcgaccacgcgtccggtcttccatttgtgtgtcatacacttgttgcgaagcctgttcagctgtcatataacaagtctttaatcctgatcataccatgtcatacccacaatgtacgaaacaagggctcactgtttaacacattatctgctattacagcgatctcagtttgaccttggattgcccttcttccactatgagcttgttgcttcgcaatgctaagcccctatttgactgtatatgagactcaatcgactactctttcaattactaccattcattccattactatcattgtacttaaatgactccaacaccaagtacagttttcacgacagcactggtcaaacatggatactatatgctacctacgctcatgaaggacgcaccagcactcttgctaagatagcttctaatgca

SEQ ID NO: 246259 - DNA, 532 bp, Glycine max
  unsure (1)..(532): unsure at all n locations
gtagttnttatccntagtgnctgatgaacctcgttcgcatgctcgtaccggtccggaattcccgggtcgacccacgcgtccgtcttcttactccttacaagatgggcaaattcaatctgtcccatagagttgttttggcaccgctgaccagacagaggtcttacgacaacgtcccacaaccccatgccatcctctactactcccagagaacttccaacggaggccttctcattactgaagccactggcgtctctgacacggctcaaggctatccgcaaacccctggcatatggactaaagaccatgttcaagcttggaaacccattgtcgatgccgtccacgccaaaggcggtgttttcttctgtcagatttggcacgttggaagagtttcagattcagtttatcagccaaatggacaagcacccatatcttctacggacaagccactcacaccccaaattcgaagtaatggcattgatcaagtacaatttacccctccaaggagattaaggactgatgaaattccgcatat

SEQ ID NO: 246260 - DNA, 537 bp, Glycine max
  unsure (1)..(537): unsure at all n locations
agagggancttcnntgttcgttctctagctcacatcgtcatgctcgtaccggtccggaattcccgggtcgacccacgcgtccgctgcctgcaaattttcttcccctcaatctatattactcaggtggtgttcctgttcccctcaagcacccctgagattcattcccaaaaagcttaaaaaattctattcaattcaaattctaaatttaatttccatttcgttttcgttttctgttttgatttgatcttccaatggcgtccgatggcttcaccgacaagaacaccgtgttcagaaagctcaaggcgaagtccgaaaataagatgtgtttcgattgcaatgcgaagaaccctacctgggcgtccgtcacgtatgggatcttcctctgcatcgattgctccgccgttcaccgcagtctcggcgtgcacatcagcttcgtgaggtctacaaatttagactcatggagtcctgagcaactaaaaacgatgagctttggaggaaacaatcgtgcacatggtttctttaagcaacatggttggg

SEQ ID NO: 246261 - DNA, 530 bp, Glycine max
  unsure (1)..(530): unsure at all n locations
gtagtnantatcnnaagtccacgtagtatcttcttcngatgctcgtaccggtccggaattcccgggtcgacccacgcgtccggcataatacattgatttgtttcttaaaaacaacactgcaatgtctgccatatttctgcttgttggaatgctatcgtccattacagttgcacaatccataggagtttgctatggagtgattggtgataatctaccatcaaggcaagaagttgtggacttatataaaacaaatggcattggtagaatgcgtatatactacccagatgaagaagcactccaagcccttagaggttcaggcattgagttgattatggacgtggctaaggaaacccttcaatcattgacagactccaatgctgctacagattgggtcaataaatatgttacaccttactcgcaagacgtcaatttcaagtacatcgctgttggaaatgaaattcatcccaataccaatgaggcacaatatattctatctgccatgaccaacattcagaatgcaatttcatcag

SEQ ID NO: 246262 - DNA, 533 bp, Glycine max
  unsure (1)..(533): unsure at all n locations
gagggacgtcgnaggtctatcttatgtcctgatcgcatgctcgtaccggtcccgaattcccgggtcgacccacgcgtccgcccacgcgtccgcttcatcttctgttctgatccaggtatggcttctaaacgcatcttgaaggagctcaaggatttgcagaaggatcctcctacctcatgcagtgcaggccctgtggctgaggacatgtttcactggcaagccacaatcatgggacctgctgatagcccatatgcaggtggtgttttcctagtttcaattcattttcctcctgactatcccttcaagccaccaaaggttgcttttcggactaaggtgttccacccaaacatcaacagcaatggcagtatatgtcttgacattctcaaggagcaatggagcccagccctaaccatttccaaggtccttttgtcaatttgctcattgttgacggatcccaaccctgatgatccactcgtaccagagattgcacacatgtacaagactgacagggccaagtatgaggctacngnccg

SEQ ID NO: 246263 - DNA, 510 bp, Glycine max
  unsure (1)..(510): unsure at all n locations
aggtanttcgtcaatgacgtagtcctanggcactgccgtaccggtccggaattcccgggtcgacccacgcgtccgcgggaaaattctgcattcgtgagcactcgtgtggattggaaggagaccccagaagcacacgtattcaaggctgatattccagggctgaagaaggaggaagtgaaggttcagattgaagatgataaggttcttcagataagcggagagaggaacgttgagaaggaagataggaataacacgtggcatcgcgtggagcgtagcagcggcaagttcatgaggaggttcagattgccggagaatgcaaaagtggataaagtgaaggcttctatggaaaatggggttctcactgtcactgttcccaaggaagaggttaagaaggctgatgtgaagaacattcaaatctctggttaagcaaaagcaaattgttgctggtcttttgtgtttatctttggtgtttgagaaattgtgtgattntctatgttctattgtgagggg

SEQ ID NO: 246264 - DNA, 536 bp, Glycine max
  unsure (1)..(536): unsure at all n locations
agggttattgttggagtcnttgctgcagacggtcgcatgctgtccggtccggattcccgggtcgacccacgcgtccgaaaaaaaaaaaaaaaaaaaaaaaaaaaataaaaaaaaaataaaaaaaaaaaaaaaaaaagaaaaaaaaagaaaaaaaaaaaaaaaaaaaaaaaaaaaaaaaaaagaaaaagaggaaggggggtctaagttttttaggtttgattgctagtgctggggactattgggggagaccttatgttgatgaagttgtaaatcattgtccattggccggacttgaaattttgggaatggcaaaaatttgagagttttcgcagtgattgtggattgcgtgaaattttggctttttgtagtttgggctaattgggcagggccgtagggggatggccttttgaaagagtctgtaaggttgaatggtaaaggggttggatcttggctgttattgtaaggttcgagggttttgggcgtagctcgataggttgcactttgaatgtgcctggcttctggttcctttttttttt

SEQ ID NO: 246265 - DNA, 272 bp, Glycine max
  unsure (1)..(272): unsure at all n locations
ccaaaaaaccctaattattattattaaacatgaggccgattctgatgaaaggccacgagaggccactgacgttcctcaagtacaacagggacggcgatctncttttcttctgcgccaaggaccacaaccncaccgtctggttcgccgacaacggcgaacgcctcggcacctaccgcggccacaacggcgccgtttggtgctgcgacgtctcaagagattcgggtcggctcataacgggaagtgcggatcagaccgncaagctatggaacgtg

SEQ ID NO: 246266 - DNA, 456 bp, Glycine max
  unsure (1)..(456): unsure at all n locations
cgggtcgacccacgcgtncggtggatatcatctttgtagatattttttctccccacgtttgcgatagagataacccacccatgcatgcttccatttccatgtaccccacattatgaattattaattaattggtgccataaattgcatatcgtggatgcaagaataatacgaaacccacatcatgagcacactttgtatggcggaaaatatgaaggaagtggaagttgaagatggatatgtcttgaaagaagagatccatctcacggtgctaaaaacctctctgttcttcgcgggcgatggcttcagcgtctacgattgcaaaggtcaactcgtgttcagagttgactcttatggacccgacactcgcgacatagacgaactcgttctcatggatcctaacggacgttgcctgctcaccgttcgtcgaaagcggtcgagtttgcatcaacggtggga

SEQ ID NO: 246267 - DNA, 513 bp, Glycine max
  unsure (1)..(513): unsure at all n locations
gggagggtgtttcntaaaaatactgcagttgcgtatgccgtaccggtccggaattcccgggtcgacccacgcgtccgcccacgcgtccgaattgtgctagataggcacccagaactaaggcaacaaggacttgcccatgaagtgctacaatggtttatatgcagaatggaagcttggtttgctgctgatgcagatatgatttcactgaaaacctgggatcaggaacatgtcctgtctggtggtcatggactcatggtgcaaggatatgatccaatcataaaagttcttgcaaaagatattgacatatgcttgaaccaaagggtgaaaatgatatctagtggttacaacaaggtaatggtcacggtcgaggatggcaggaactttgttgctgatgctgctatcataactgttcctattggaatcctaaaagccaatttaattcaatttgaaccaaaactttctgattggagggttcagncatttcagacctttggtgtggcaattgaaataaaa

SEQ ID NO: 246268 - DNA, 460 bp, Glycine max
gtaccggaattcccgggtcgacccacgcgtccgcccacgcgtccgcccacgcgtccgatcaggtcatgccatggaagactatcttgttgctcaatttaagcaagttgacaacaaagagttgggtttatttgcaatatttgatggccactctggtcacagtgtacctgattacttgaagtctcatttgtttgataatatcttgaaagaggtaatgaggcctaacttctggacagaacctgctgaggctgttaagagagcatatagtataactgattctactattttagacaaatcaggtgaattgggtagagggggttcaactgcggttacagcaatattgatcaacttgttacaagctactagtgggcaatattggggattcccgggctgtcttatgtaagaaatggcgtaccaaacaactatcggtggatcatgaaccaagcatagaaagtgaagatat

SEQ ID NO: 246269 - DNA, 512 bp, Glycine max
  unsure (1)..(512): unsure at all n locations
ggaggtgtgtcctaaataagtagactancgtatgccgtaccggtccggaattcccgggtcgacccacgcgtccgcccacgcgtncgnccacgcgtncggtcagggctgaaggaattgctgaagaaagggttaggtttaggcgacatggcgttcaacgccggcggcggagccataacctggttccccggccacatggccgccgctacacgtgccatccgccaccgcctcaaactcgctgacctcgtcatcgaagttcgcgacgctcgcattcccctctcctccgccaacgccgacctccagccacacctctccgctaaacgacgcgtcgtcgcactcaataaaaaagacctcgccaaccctaacatcatgcataaatggacgcattattttgagacgtgtaatcagaattgcgttgcgatcaacgcgcacagcnagagttccgtgaagaagcttctggacgtggtggagttcaagttgaaggaagtgatttgcaaggagccgacgctgcttgt

SEQ ID NO: 246270 - DNA, 525 bp, Glycine max
  unsure (1)..(525): unsure at all n locations
cggggaggggacagtgcagttccaatggtacgcatgctcgtaggactgccgtaccggtccggaattcccgggtcgacccacgcgtccgctttcccattcccattcctattcctcctttccctctcctctccgctcctccaattgcccccaaactttctccctccgccgcttcgccgccgcctctctcgcttgccctccaccgccgccgccgcccctcgacgccatggcccagaaaatcggaaagtccacgcgccgccccggtgcctcctccaaggcccgcgtctatgccgatgtcaacgtcgttcgccccaaggaatattgggactacgagtccctcaacgtccagtggggggagcaagatgattatgaggtggtgagaaaggtggttagggggaaatacagtgaggtgttcgaaggtgttcactgcaccgacggtgagaaatgtgtcattaagatcctganacccgtgaagaagaagaagatcaagagggaaatcanaatattacagaatctttgtggagggcg

SEQ ID NO: 246271 - DNA, 446 bp, Glycine max
aattcccgggtcgacccacgcgtccgtgcaaaacgaaaattatacatatccaacaatgacgaccacccgtgttgctctctgccttttatttgcattcctcttctacgcggctgaaggagccaaggttagtttcaataacaagtgcacatacacggtatggccaggaaccctaaccggtgaccaaaagccccaattatcaacaactggtttcgagttgggtccaggagcatccaactctgtggaccttccatctccatggtccggtcggttctgggcccgaacaggatgctccaacaacaacggaaggttcagctgcgccaccgccgattgcgcctccggtcaagtcgcatgcaacggtgccggtgcaatcccgccagctactttggtagaaatcacagttgcagcaaacggagggcaagatttctacgacgtgagcaacgtggatg

SEQ ID NO: 246272 - DNA, 529 bp, Glycine max
tgaggtatcgtcgaagtcgttaatgaggctgctaggatgcctgtccggtccggaattcccgggtcgacccacgcgtccgtgatggagttgcaaggcttgaaggccgtggacaaggaggagccgccgaggattctgcatttcaatccgaggctgagaggtgattggagtgggaagccagtgattgagcagaacacttgttataggatgcagtggggttctgctctcaggtgtgaggggtggaagtctcgtgcggatgaagaaactgttgatggacatgtgaaatgtgaaaagtggattcgtgatgacaataatcgttctgaagagtggaaggcgacatggtggttaaacagattgatagggcgaaaaaagaaggtgacggtagactggccatatccttttgctgagggcaagttatttgttctcaccataagtgctggcttggaaggttaccatgttagtgtggatgggaggcatgtgacatcctttccctatcgcacgggatttgctcttgaggatgctactggactat

SEQ ID NO: 246273 - DNA, 413 bp, Glycine max
  unsure (1)..(413): unsure at all n locations
gccgggtcgacccacgcgtgcgcgacaacctcggctcagtgtctctctgcactgcaaactccctataacccttcccttcctcgcacttcattcttttatttcatttatttatactcttcatgaaaaattaagggaattttcagagagagagagagggagagagtagttatggaaggagaagaaggaggaattgcaacaaagaagagagggaaagagggtgaaactgagacgacgcgctacaaaggaatcagaatgagaaagtggggcaagtgggtcgctgagattcgagaacccaacaagcgttcaaggatttggctcggttcttactccacgcccgtcgcggcggcgcgtgcttacgacaccgncgttttccacctccggggcccctctgcgcgcctcaacttccccgagct

SEQ ID NO: 246274 - DNA, 602 bp, Glycine max
  unsure (1)..(602): unsure at all n locations
tgttaggaggagtatgaaagaatggagatgggncagattgtgagnaggttaatatgtgggagaggagataaggatgggggtgagtcagagtagttatctcttgcgcatgccgtaccggtccggaattcccgggtcgacccacgcgtccggttattgtgagcaaagaaagatagtgagtgaagtaactgaagagaagaaaaaatgccgtgcctcaacctcagcaccaacgtgtccctcgaaggcgtcgacacctcttccatcctcgccgaagccacctcctccgtcgccagcataatcggcaaacccgaagcctatgtgatgattgtactgaaaggatcagtacccatagcttttggtgggaatgagcagccagcagcttatggagaattggtttccattggtggtcttaaccctagtgtaaacaaggaacttagtgctgcaattgcttcaattctggaaaccaaattgtcaatggccgaagtcgcggttcttcttgaaattctatgacaccaagggttccaacttcngatggnaatggatctacattctgaaatccgaatttcatggtacattgtttgtggtactttggatgttggatggaa

SEQ ID NO: 246275 - DNA, 621 bp, Glycine max
  unsure (1)..(621): unsure at all n locations
gtgtagattgtatgattagtatttaggtatattatannatattgatgtgnatgtggtatttttgggagtattatatagagagaggagggggtgatgtaagtcatatgtatgtagtctgtatgccgtaccggtccggaattcccgggtcgacccacgcgtccgcatggcctgagttggttgcagtggaatgaactgtggcggtggctacaattgagagggagaatcctttggtggatgctaacactgtgcttaaaggatccatcgtcaccgctgattttcgatgtgatagggttcgggtttgggtcaccaaacatggaattgtttatcacgctccaagaattggataagaagtgtctacactaaagcacttcatatatatgtcatgagtcatgaatataatagtatttaaataaggagttattcttgcaattatgttatgtgattgaaaataaattatgtaatttgattggaaactaaactgtaaaggacaaaaacagaggataaattggaaattctaaagaccaaaagggaatgtcccttggaaggggaatcgacgtttaagctgaatataagataccaaatttaaaaaaggggggggtctttttaaaagtacaaggtttt

SEQ ID NO: 246276 - DNA, 615 bp, Glycine max
  unsure (1)..(615): unsure at all n locations
gttagattgntgtgatgtggtaagtgtgtgattagatnatgaagatgtgnaagtaatattgatgggatgtggtgattgatagaggtgagggtnnttntttttttgtatgcaactcgttggcacgccgtaccggtccggaattcccgggtcgacccacgcgtccgcgtttctttcacttcacaaaaatgaaaaacatgaaattgtgttcggtgatgctatgcttatcactagcgttccttcttggggccacagcagaacaatgtggcacacaagctggtggagcgttatgcccaaatagattatgttgcagcaaatttgggtggtgtggtgacacagattcctactgtggagaaggttgccagagccaatgcaaatctgcaacaccctcaacaccaactccaacaacacctagtagtggtggagatattagcagactcattagctcttctctctttgatcaaatgcttaaataccgaaacgatggccgctgttctggccatggattctacagatatgatgctttcattgccgctgctggctctttcaatggctttggcacaaccggtgatgacaacactcgcaagaaggagaatgctgctttcttggctcaaacct

SEQ ID NO: 246277 - DNA, 531 bp, Glycine max
  unsure (1)..(531): unsure at all n locations
agggtaatatcatagtgnctcatgagctctacgnanctcgtaggcacgccgtaccggtccggaattcccgggtcgacccacgcgtccggctgttgcttatggtgctgcagtgcaggctgcgattctcagtggcgagggtaatgagaaagtgcaggatcttcttttgttggatgttactcctctatccactggtttggagactgcaggaggagtcatgactgtgttgattcccagaaacacaaccattcccaccaagaaggagcaggtgttctcaacctactctgacaaccagcccggtgtgttgattcaggtctatgaaggtgaacgaacgaggactcgtgacaacaatttgcttggcaaatttgagttatctggaattcctcctgctcccagaggtgttcctcagatcactgtttgcttcgacattgatgccaacggtatattgaacgtgtctgcggaggacaaaaccactggacagaagaacaagattacaattaccaacgacagggcaggctttctaaggaggagatn

SEQ ID NO: 246278 - DNA, 527 bp, Glycine max
  unsure (1)..(527): unsure at all n locations
gtggatgatcgaactcttatggaactctngcgcactgcggtaccggtccggaattcccgggtcgacccacgcgtacgaccacgcgtccggtgtatgtccctacctctcccttcaagatgcagatcttcgtcaagaccctcaccggcaagaccatcacccttgaggtggaaagctctgacaccatcaacaccgtcagggccagaatccaggccagggaaggattcccccggacccaccaccgcttaatttcgcccgaaagccacttgaggaccggcgtacccttgctgactaccacattcagaaggagagtactcttcacctcgtcctncgtcttccggggtggcatgcagatcttcgttaagacactctaccggcaagaccataaccctaaaggttgaaaagctccgacacccatggttaacgtcaagggccaaaatccangccaaggagggtatcccnccggaccagcaaacgtttaantttcgccggaaagcagctcgaggactggcgnacccttgccgactaca

SEQ ID NO: 246279 - DNA, 546 bp, Glycine max
  unsure (1)..(546): unsure at all n locations
agagtatantttaagaggactgatgaaactgcatcgaanctcgtaggcatgccgtaccggtccggaattcccgggtcgacccacgcgtccgaaaaaaaaaaaaaaaaaaaaaaaaaaaaaaaaaaaaaaaaaaaaaaaaaaaaaaaaaaaaaaaaaaaaaaaaaaaaaaaaaaaaaaaaaaaagaaaaaaaaaaaaaaaaaaaaaaaaaaaaaaggccaaaataaaaaaaaatgaaaagaaaaaaaaaaaagcaaaaaaaaaaaaaaaaattgccgaaagcaaaaaaaaagtactgacgtacaaaaagctgaatacaacacagatatagagaggacaacgaaccaggtactgagtgtacgtggtggcatgcacatattggtaaagacaattggcatttacaccataacgctagactaagaaagctattggatcagccataaagccaaagtatatattcagaacatggagggtatacgccctgacactcacacaataatgttaatacggataggcaattaaggatgaacttacctatcaagaataac

SEQ ID NO: 246280 - DNA, 660 bp, Glycine max
  unsure (1)..(660): unsure at all n locations
gagtatgaaagaagaatagagaaaaaatgaaannnagaagaaagaaagaaaaaagaagtgaaaggaaataataaagaaaggtacttaagtccatgtaagtatatcttggcacgcagtaccggtccggaattcccgggtcgacccacgcgtccgaaaaaaaaaaaaaaaaaaaaaaaaaaaaaaaaaaaaaaaaaaaaaaaaaaaaaaaaaaaaaaaaaaaaaaaaaaaaaaaaaaaaaaaaaaaaaaaaaaaaaaaaaaaaataaagagaaaagtaaataaaaaaaagaagacgaaaagaaaacaaaaaaaaagcatataaaaaccaagacgaaaaacaaacttaataacacatacattactataaacaaaattaaaaacgaaacataagaatataaaaaggactgaacaggatgtggccatatcaaacacattatgcagtacctaaatgacataaacgaaaacagcgccactaaaaacggcaacacttaagccaaaaatcgataatatgtaaatagcgcagcaaacgatgaccagaatacagacttagaagcagcacctaaacacacaggacttatacgtaaaaatataaatgtactatactgttaaacaattcagatagatatttaataagataaaaacttttgaaaaatgggggaga

SEQ ID NO: 246281 - DNA, 604 bp, Glycine max
  unsure (1)..(604): unsure at all n locations
gttatgagatattgttatattaatggtgatttgnnantatatatgtagaagataatatgggtgttgcagtattgatgtaaagtggagttaagttctcgtaagtatctcttgtcatgccgtaccggtccggaattcccgggtcgacccacgcgtccgctagaaatgatttcccgtaatacaaatcaacaagttgcatgaccgatgaagaacaacacaaataaacaagcaaagtcaatgacgattgaaatgataatcccgagagaatggccaaaaaatttgaggagccctaacctccatgaaattcaaatgagcctcgagaaggtgcatgtagaccaaccaatcaccattcccagtagaagaaggcattggcatgacatagccagaatctccaccccaaggaaaatggtacgatgcaaacacgggctttccccacccaaaatcaacctttgactccggaaacctttgaccagaagaaaccacaaaacttggtccttcttccttgccatgcccacaataaatcctagacaaaccaggagctggtcgatgtacctcaacccaatcaacaagtcccaaaaaatgctcttctgtcaaaccaaatctcaaa

SEQ ID NO: 246282 - DNA, 533 bp, Glycine max
  unsure (1)..(533): unsure at all n locations
gtagttncatcaaggtcnctgatggaactccatgcaagcgtnggcactgcggtaccggtccggaattcccgggtcgacccacgcgtccgggtgaagcttcatggattttggtatagtccctacactttgagggtggtatggaccttaaagttaaaggatataccatatcaaaacatagaagaagaccgctacaataagagtcttcaacttcttgaatacaacccagtatacaagaaaactccagtgcttgtccataatggaaaacccttatgtgagtccatgcttattgttgaatacattgatgagatttggtcacataattcattacttcctgctgatccctacgagagagctctggcaaggttttgggttaaatatgctgatgatgacatgttttctgcagttattgcattcttccttagcaataatgatgaagagcgagaaaagagcatagagaagatatgggagcatctcagggttgatgagaatcagtgttntggtgatcagaagaaatcttttgggggagacatttn

SEQ ID NO: 246283 - DNA, 606 bp, Glycine max
  unsure (1)..(606): unsure at all n locations
gtagtgtaatgagtaggaggagagtggagtgaagnnnagagatgagagtagagaagttgagtgaggggtggagtgaaggaggaagggggtggttcagctttagtatgtattcgcttgccgtaccggtccggaattcccgggtcgacccacgcgtccgggaaatggctgaagcacaactacgagaccagcatggcaaccctgtcccactcaccgatcaatacggtaatccggttatcttaactgacgagcgcggtaatcccgtccaactcactggtgtcgctaccaccgctaccggcacagcaaggtctgggtttgggtcctatggtaccggtgcttacggtggtggtgcaagtgcaaccaccgttgcagatcttttggcaacccaaccaaggagtggcagggaggctagagagcttcgtcgttcctccagttcaagctctagctcgtctgaggatgatgggcaaggtgggaggaggaagaagggagtgaagggttaaattaaaggagaacctcccagggtaggaaggaggaaattatnataaggagcatgcacacacaacaactgcttcaacccaccggcataaccaccctggtgatcagcatgaa

SEQ ID NO: 246284 - DNA, 618 bp, Glycine max
  unsure (1)..(618): unsure at all n locations
gtgtataatgnagtatgattatttattgtgagtagtgnaggtgtgatgggnatggaatattatagggagtattgtgatgattaatggagaggtgtngtcnncatttagtatcttctcggtatgncgtaccggtccggaattcccgggtcgacccacgcgtccgcagatgaaattccttcagaacaaaatggtgttgaccaacaagccaaggacaatagtgttgtctccaaaacagatgaaaacccccactctgaaattacttcaggagaaaatgaccaaatggtaacagaaaatgttggcgatgatgaagaaaactctgagacgaaagaagcaaaggaaactgaaagtgaagaaaacaatgggatgaaagaaggaaaggtaaccgaaggtgaagacaagaaacgacaagctgtggaaaattttctgccgctgcttacaaggacaacatggatgttgtctcacgtgaggatttgaagagtgtctttgagaaatttggtacagtgaagtacattgatttcaagattggagcagagtcaggatacattcgctttgaagaaactgaagctgctcagaaagcacgtgctgctgcagttatttcagaaaaagatggcttgggtt

SEQ ID NO: 246285 - DNA, 609 bp, Glycine max
  unsure (1)..(609): unsure at all n locations
ggagaggcatatagaggattagaataaatgaaatnnntnatagagatgaatggaaaattatagtgaataggagattatagggaaaaggtgcagtcagtcttacgttagtagtctcgtacgccgtaccggtccggaattcccgggtcgacccacgcgtccgatcaatcgtgcgattcataacaggcgatgatacattcaacgatgaaatgaactccgctgcggcttatgatactctatacacagacctagttaccgatgccgacaacgttatccaaaacgctcttgatagccttcaacagtgttgaaaacgctgagcgaaatactgtcccaaaaaccactaacaagatcactgtacttgccgatggagaaacccacatagtgctgcgcataatagaaagcatcgatgaggccaacttcggatacagctacagcactgttagcggcagctgcattggcaaacacgacgtttaacatcacattggactccaaaccgaatgctggtcccaatggaaggcctactgggaagctcaatgtcaaatgcgacgcaaaaggagaccctgaaccactccaagacgaactgaacactggaaaagccgacgctgatgccaa

SEQ ID NO: 246286 - DNA, 604 bp, Glycine max
  unsure (1)..(604): unsure at all n locations
ggaatggagttgtatgatttgttaggtgatgtagatgtagatttnatgggatttattggagttgatagtagagttggaggtgcgttagtanctcgtatgtatctctaggcacgccgtaccggtccggaattcccgggtcgacccacgcgtccgcaatgaactaaaatgcgctattgaccacattttggatgcccagagaaaaggcgagatcaacgaagacaacgtcctttacattgttgaaaacattaatgtcgctgcaattgagacaactctatggtcgattgaatggggcattgctgagcttgtgaaccacccagagatccagcagaaggtgagggatgaaattgatagagttcttgaagcagggcaccaagtgactgagccagacatccaaaagctgccataccttcaagcagttgtgaaggaaactcttcggcttcgaatggcaatccctttccttgtcccacacatgaacctccacgatgcgaagcttggtggctatgacatcccagcagagagcaagatattggtgaatgcatggtggctggccaacaaccctgcacactggaagaagccagaggagttccggccagagaggttcttg

SEQ ID NO: 246287 - DNA, 533 bp, Glycine max
  unsure (1)..(533): unsure at all n locations
agaggtancgtgnaagtcnccgatcgaactcttaggaaactcgtaggcactgccgtaccggtccggaattcccgggtcgacccacgcgtccgcccacgcgtccgtccacaagagcctctaccacaccgaggacgtcccgaacgatatggtcgaccgccgcgccgaggtcgttgcccgccttaagtcgctcgaggaggccgccgcccccctcgtcgccttcctccagaacgaggctgctgtgcaggagctccgagcggacaagcagtacaatctccagatgctcaacgaccgatatcagattggtcctgcacagatagaagcgttgtaccaatatgccaaattccagtttgagtgtggaaactactctggtgctgctgactatctttatcagtacagagctttgtgcacaaatagtgaaaggagtttgagtgcattgtgggggaagctggcagctgaaattttgatgcaaaacttgggacatcgctcttgaagagctcaaccgcttgaaggaaatcattgactcaaagaatttt

SEQ ID NO: 246288 - DNA, 540 bp, Glycine max
  unsure (1)..(540): unsure at all n locations
agagtnntnantnagagaggacgtcatggaactctccgtcanctcgtaggcactgccgtaccggtccggaattcccgggtcgacccacgcgtccggaagcgcaagaagaagacctacaccaagcccaagaagatcaagcacaagcacaagaaagtcaagctcgccctcctccagttctacaaggtcgacgactccggcaaggtccagaggctccgcaaggaatgccccaacgccgagtgcggcgccgggactttcatggccaaccacttcgatcgccactattgcggcaagtgtggtttgacctatgtttaccagaaggctgaggcttagggttacatttcgttttttctagtttctggattttggaattttattattagtataatactctgtttttttgtctgtattttggtcgcatattattatgactgcctgaatgttctgccttttcaaaaaaaaaaatataaaacaaaaaataaacaaaaaatatttaaaatataaaaaaatttaaagaaataattnacttatctaattttgcaa

SEQ ID NO: 246289 - DNA, 617 bp, Glycine max
  unsure (1)..(617): unsure at all n locations
gtggaggtatgagagaggaggatgggaggtagatagtgnnagnatgggattganagagggatatgagtgggtggtggtgagtgaggagagaaggaggtgtagtccnaactcaggtatgtactcggtaagccgtaccggtccggaattcccgggtcgacccacgcgtccgcccacgcgtccgcccacgcgtccggctgatatgactggaaaagagattgaacgggctctactgaaggaagttatcagtaatcccagaatttttgtgtttgaacaccattttgctatagatcttctcacttgtcaggatcgatctgatatgatttgtcttggtgttgacacactgaattctaaaaccctagagcttttaggtgattagatttctttcaaaggtcactttacttgcgtcaggtggagctggacatatttatcctaaaactacaaatcctctggtagccactggagatggaattgccatggcacaccgagctcaagctgtgatttccaacatggagtttgtgcaattccattcaactggcttaactgatgaaaggcttcctattaaaccaaccaagcctcgggaaaatgcatttctgattactgaagctgtcagaggggat

SEQ ID NO: 246290 - DNA, 611 bp, Glycine max
  unsure (1)..(611): unsure at all n locations
agtataatgaaaagaaatataaaagatatagnataatgaaantaaaaaaataaaaaggaaattatataataaagagaggtgtgtantattagtatgtatcntatgccgtaccggtccggaattcccgggtcgacccacgcgtccgaaaaaaaaaaaaacaaaaaaaaaaaaaataaataaaacaaaaaaaaaaaaacaaaaaaaagaaaataaaaaacagatcaaaaacaaaaactattaaaatacttaaagaaaaaaaaaccaaaataataacagaaaatatatgcaatgaattaataaaaacctaaaacaaaaaaaacacaatgaaactaaaagacaataaaacaattagatgaataaacgaaagggaaccgtaagttaagacaattaaagaccaagctatacaaaatattatgacactatttaaaaggactacatgagatgttgaataacgagaggataataaaaagggcaattagacattcagatcaaagaaagtacatgaactcaaaaatggaacaaaattcaggaaacctccaattgaaaaatactgaaactttttaaaaaagaacgtgcctatgcaaacaattcagaaaaaggaaggctttgta

SEQ ID NO: 246291 - DNA, 607 bp, Glycine max
  unsure (1)..(607): unsure at all n locations
gtgtatgaagagagaggaggagataggaagataggtgnatnagttataggnatgtggatagtattgggagttggtgagtatatagtagaggtgcgttcgttctacgtacgtagttcgtacgcagtaccggtccggaattcccgggtcgacccacgcgttcgcccacgcgtccgcccacgcgtccggttcaattacacgattctgagagacacaaaggatgttctggttataactgccagagggagcagtgcggagattataccctttctcaaaacgtgggtgaaccttcccatggccgttgggttcatgttgttgtacacaaagttgtccaatgttttgtcaaagcaagctcttttctacaccgtgattcttccattcattgctttctttggggctttcgggtttgtgttgtaccctctcagcaattatattcaccctgaggcatttgcggacaagcttctcaacatcctcggacctaggttccttggcccctttgcgataatgaaaattggaacctctggttggtttaatggcagggtgaattgtggggggaagtgggtaatttccgacttctttggggggttgctaatcagataactactattga

SEQ ID NO: 246292 - DNA, 602 bp, Glycine max
  unsure (1)..(602): unsure at all n locations
ggtgtgaagattgtgatttgaaggttgattgttgntgattatgtgnaaattatatttgtgggtgtgatttgttgtgganaaaggtgctgaagtcttcgtaagtatctgttggcacgccgtaccggtccggaattcccgggtcgacccacgcgtccgcttttatttcgttcctctattcgctacgtcgtcgttagggtcgtcttcggatcggtggaacttgactgcgccggcgtgaattccgacgctgcgagtggcaccgaattgcgatagcggtgacgaatatgaaggttttcgttaagactctcaaaggcactcacttcgaaatcgaagtgacgccgcaagacacggtttctgaagtgaagaaaaatatagaaactgttcagggtgcagatgtctatcctgctgcacagcaaatgctaattcatcaagggaaagttcttagggatgcttctaccttggaggagaataaagtagttgaaaatactttcattgtaattatgctatcaaagagtaagagcccatccggtgaaggatctactactttaactgctccatcaaccaaggccccacagacaagtacagttcctgcttcaaacccttca

SEQ ID NO: 246293 - DNA, 606 bp, Glycine max
  unsure (1)..(606): unsure at all n locations
tagaatgaagaagagatgagaaaaagagatagnaaaagagagnataaaaaaataaggataaaatgagaaaaaaaggaggggtgtagtaaatgtatctatctgttgccacgccgtaccggtccggaattcccgggtcgacccacgcgtccgcccacgcgtccgaaaaaaaaaaaaaaaaaaaaaaaaaaaaaaaaaaaaaaaaaaaaaaaaaaaaaaaaaaaaaaaaaaaaaaaaaaaaaaaaaaaaaaaaaaaaaaaaaaaaaaaaaaaaaaaaaaaaaaaaaaaggggcggcctttaaaagaaccaaagttaacgtccccgtaaatgcaacgaaaaaccttttttaaagggaaactaaaataaaattaatgggccgaaatataaaaagttgggaaagggaaaaaccttggcataaccaaattaaatcgcttggaagaaaatcccctttaagccagttgcggaaaaaccaaaaagcccgaaacgaatcccatttccaaaaagtgcccaacctaaaagggaaaaggaaacccccctttaacgggacataaaaccccgatggtggggggggtaacccccagggtaacacgtaaattgaaaagggcaat

SEQ ID NO: 246294 - DNA, 597 bp, Glycine max
  unsure (1)..(597): unsure at all n locations
ggtgggttttggagagtatataggagattgggatgtatagggnatggtagtacttgggtgtgatgtggtggtatagaggtagttngtcaatgtaagcatctgttggcacgccgtaccggtccggaattcccgggtcgacccacgcgtccgcccacgcgtccgaagcaacaggttttggaagctaaggaatcttctcctgttcctccaaaactagatctggatgagatgctaaagcaactggcaagggaggtcgatctagaatactctgaggcagttaaagccacgggcttgacagacagtttgttgaaactaagggaggaagtttcgaaagcaaatgcagataatcaaattgttgatccattgctggagggtaagatagaaaagctaagggtggagtttgaacagcaattgcgtgcagcttccaattatggtaggctgcagaataagcttaactatctgagcgaattatgtaaagtaaagcttctgtcagatggaaagaagggcaatgaagctgtcacatttaagcaagagttgaagaaaaaaattgatgatgccttgagtgatccaaaaataagggagacatttgaagcattaaag

SEQ ID NO: 246295 - DNA, 542 bp, Glycine max
  unsure (1)..(542): unsure at all n locations
agtagttnangttgnntagttgaattacgtatgctctacgaatctcgttggcactgccgtaccggtccggaattcccgggtcgacccacgcgtccggaaggtttggaagaatcgcgatggagggtgaggaaggaggaggcataaggctgagcaagcgaatcgcaaacggagaggttgactacaagacgaaatccggcaccgcctggagccactcctatctcaaccagaagccatggcaccctctttcttaccccaaccaacgccgcaagtggatcgccgaacagacccacgccaatcgccaacgccgcaccgaagaggtttctcgcgagttcgctcaggagcaagagttctttcgccaaaccgctctcatctccaaaaaagagaaagaaaaggtccgaatcggattcttttttctttctctgcgtcttccctcgtttcatgaattttgaaattagggtttggggtaggtggagctcatgcaagctggtaagttcatggaccgtcggtcctccgggctaccacggccaagagtgccaaagctg

SEQ ID NO: 246296 - DNA, 624 bp, Glycine max
  unsure (1)..(624): unsure at all n locations
tgtgtatatagaatgagatgagtatgatagtttgattagatnatgagtgatgatntatgtggattagagtgggtggtggagatgtagttgtagaagagtgtagtaantacctcggatgctcggtcgttctgcagtaccggtccggaattcccgggtcgacccacgcgtccgcccacgcgtccggcaaacctagtcacgttcctctctctctgagctcgatctatcgggctcttcgaattcggttcccgatttccgacccataaaagctagcaagttccttcacttcaatcttcagaaatgcctctcagactcgaaatcaagcgaaagcttgcccaaagatcagagagagtaaagtctgtggatctacatccaacagaaccatggattctagcaagtttgtactctggaactgtctgtatctggaactaccaatctcagaccatggccaagtcttttgaagttactgagttaccagttaggtcagccaagtttattgcacgcaaacagtgggttgttgcatgggcagatgatatggntaattcgtgtttataattacaacacaatggataaagtaaagtatttgaggcacatacagattacttaaggtgtgtggcaattcaatcc

SEQ ID NO: 246297 - DNA, 615 bp, Glycine max
  unsure (1)..(615): unsure at all n locations
tgtgtatatataatgtagatttgtttggttgatggntgatgatttatgannatgtaatttatttgtgtatattatttataggtatggagggtgngtaaatacctagtatgtagtcngtatgncgtaccggtccggaattcccgggtcgacccacgcgtccgcgcaaatatgtttttggtggacatggtgctttctatatgaagatcttggcagaagatgaaccagagaaataccagtcacacttcagcgaatacatcaaacgtgggatagaggctgatggtattgaagcactttacaagaaggttcatgctgccatccgtgctgatcctactctcaagaaatctgataagcagcccccgaaggagcacaagaggtacaacatgaagaagctgacttatgaggagaggaaggctaagtcggttgcacgcgtggcagccatcaactctgctgctgataatgatgaagatgatgagtgaaagttcattgcggatgctgtctcatagctggacaagtagaaaactatgttatttgcctgtactgattattttctatggccaaaatttggatactttttggagtcgagagccttatttttggtcaaattaggggtaagct

SEQ ID NO: 246298 - DNA, 595 bp, Glycine max
  unsure (1)..(595): unsure at all n locations
gtaatgaagagtaggtgagattgtagagagagatgaagagagnaatgaataattagggggtaatgatagtgagtttaggtagttngtcnctgtaagaatttgtaggcacgccgtaccggtccggaattcccgggtcgacccacgcgtccgaggagcccgagcgtgaccgcaagaaaacgaagaacatcaagcacaacggcaacatctcgctagacgacgtcatcgagatcgctagggttatgaggccgaggtcaatggcgaaggacctcagcggcagcattaaggagattctcgggacgtgcgtctccgtcggatgcaccgttgatggaaaggatcccaaggacttgcagcaggagattaccgatggtgatgttgaggtccctctcgattaaggaggaaggctttgttactctctttctctctttttcttttgtctttcttcagatcgtttcgtgttctttttaatataaatttgggggaactatcgaacgttttgtctaaggttattttaccgctttggataatttaaatgaatggttcgagagatattataattatgggctgattagtttctttctctgctcacattatgata

SEQ ID NO: 246299 - DNA, 608 bp, Glycine max
  unsure (1)..(608): unsure at all n locations
gttataatgattatgagtatagaggatatttatattattgagantatgtttttattagtgaagttatattaggttggggagtacttaagttctcgtatgcatctctaggcactgcagtaccggtccggaattcccgggtcgacccacgcgtccgccacaatggccgtcacgaaaagcctctccatcttcctcttcatcgccataagctgcgtggccgtagctcaggcagcgaacttcaacatcacaaacaattgcacctacacggtgtgggccgcacgatcgtgcccggcggcagctcaaggcttaaccctggcgaatcgtggaacatcagcgtgacgaacggcacgacttgaggacgcatctggggtcgaacaaactgcaccttctgcaacgcatgactcgggaagtgcctcaccggcgactgcgacggtgttcttgagtgcaacaaaacaggtacaccttcgaacacgttggtggaattcgcgttgaaccagtacaacaacctcgacttctacgacatctccctcgtcgacggtttcaacattcccttgcaggtgaacccgacctacaactgcagctccgtgaaatgcgcccgccacatcatttga

SEQ ID NO: 246300 - DNA, 519 bp, Glycine max
  unsure (1)..(519): unsure at all n locations
gggngtcatgaaactgtcagtaaactcgtaggcactgccgtaccggtccggaattcccgggtcgacccacgcgtccgcccacgcgtccgtgcagtgaagaagattgaagacaacaacactgtggatttgatagtcgacttgcgggctgacaagaagaagatcaaggatgcagtcaagaagatgtatgatattgagaccaagaaagtaaacaccttaatcaggtgagtctttatgtagagatgcttttagaatttgttagatgatatgatattgctaatgacaatggtatgcttgcagcgaatactattactgagacatacatgtggtgtgctttatggtttgtggcatgctggtgtgacaacgggttcatgttgcgcacagggaaactttgaaatgtggcatatgaaactcaatgttgccataacatgcaaatgagacagcaaatttgtatgagatacttgcatcgatacttacaacatatcattacttctgaatgtagattgttctgttgcacgcccg

SEQ ID NO: 246301 - DNA, 591 bp, Glycine max
  unsure (1)..(591): unsure at all n locations
tggaggagaggatagattaggatgttgagtgagtagagnagttagatttggggtttggtgtatgggtgaggtgctgtagtcctcgttagtanttctaggcacgtccggtccggaattcccgggtcgacccacgcgtccggttgtcttgaagagatgttggctagcccgctactggggtcttgctgtaaaacatggcatatgtgcagatatagcacaatccaagcatgagcattggtcttctctagctcctcttccttttgaacttgtcatctatgctggacaaaaggctaaagaggaatcctggaacaaaagtgctgatggtccagatagaagcaaacttgttcgtgatttgaatgatcttgctggggaaggaaatattgagagtatgctctcagttgagatgggtttgagggaacttgcttccttaaaggttgaggatgctgttgtgcttgcattagcccaacacagactgtcaaattcggttcgacaatccgttttagattccaaatcacgtggtgatgccaaatattcagaagcatttgaattaagtgaagaggaagcagaagatgttcttttcaaagaggcatggtt

SEQ ID NO: 246302 - DNA, 598 bp, Glycine max
  unsure (1)..(598): unsure at all n locations
tttatgtatgattagttgataatgttgattttgatatatatattagtattatttagtgtttggtttggtttgttgagggtagttaattctattgtagtagttgttggcactgncgtaccggtccggaattcccgggtcgacccacgcgtccgggcaaatggaaggagtctgaatatggaggtggtcagtctgttcctgttggtggtattgcatactacatcactgcaccttccagcttagctgatatggcagccaatcctttccatgcattattctaccttgtgtttatgttgtcagcctgtgccttgttctctaaaacttggattgaagtctctggttcatctgctagagatgttgcaaagcagctgaaggaacaacaaatggtaatgcctggacatcgggaatcaaacttgcagaaagaactgaaccgatacattcccaccgcggcagcatttggaggcatatgtatcggtgcattgactgtgttggcagatttcatgggggcaattggttcagggacaggaatattgcttgcagtaacaatcatctatcagtacttcgaaacatttgagaaggagagagccagcaaacttggctt

SEQ ID NO: 246303 - DNA, 618 bp, Glycine max
  unsure (1)..(618): unsure at all n locations
tgtttggttgatatagatgatgtatggttgtattatgattattnatgtnnatgttatatattgttgtggtgtatattgtgtgtattgtggtnnntttagtanctagtatgtatctcttnggcactgccgtaccggtccggaattcccgggtcgacccacgcgtccggtgagaaacaaagaaaggaaataattgatctttgaaaatgcaaggaggaaagaaagctggagagtccatcaaggaaacagctgcaaacattggtgcttctgccaaggctggcatggagaaaaccaaggccactgtccaggagaaggcagaaagaatgacggcacgtgatccgatgcaaaaggagttggcaacccagaagaaagaggcaaagatgagccaggcagagctggacaagcaggcggcgcgtcagcataacacggctgcgaagcaggctgccacggcagggcacatgggacaacccatggggacccatcagacgtcagctatgcccggtcatggaaccggacagcccacgggccatgtcaccgagggagtggtgggctcacactctattggaaccaacagaggcccgggtgggactgctactggccataatacccgtgcggggggat

SEQ ID NO: 246304 - DNA, 609 bp, Glycine max
  unsure (1)..(609): unsure at all n locations
tggaggattagagagatgatgtagggtgatgtgagatgaggatgagnaggggtaagttagggtgatgagtttgagggaagagggnngtcngtnctcgtatgcatctcgttggcacgccgtaccggtccggaattcccgggtcgacccacgcgtccgggagaacaagaagaaaaaaccgacacaaagatctagtcctagctagaatcaaacaggggcgatctcaccttcaagaacacatcgccatggcaaggaacttgcttcttgtgctttttgcagtagccaccctcctccatggctcagcagcccaaaccagacacatggtcggtgatgccacgggctggatcatccctgctggcggcgctgccacctacaccgcctgggcttccaacaaaaccttcaccgtaaacgacactctcgtgttcaacttcgccaccggccaacacaacgtggccaaggtaacgaaatcggctttcgacgcgtgcaacggcgggagcgccgttttcaccctgacctccggtccagcgaccgtgaccctgaacgaaacaggggagcaatactacanttgctccgttggatcacactggtcccgttggccgaaactggcaatta

SEQ ID NO: 246305 - DNA, 536 bp, Glycine max
  unsure (1)..(536): unsure at all n locations
gtaggnangttgntagtcncttattgagctctaaggtatctcattggcactgccgtaccggtccggaattcccgggtcgacccacgcgtccgcaaaagcctacaagaaatggacaaagaaaatatcagaaatcaagccaccaactagtcccttaagaaggagggcaaaatcatcaaagaagcaaccagaaaaagagctttatgctatcatatcacaacgcaaacatgagaggaaagaccactttgattccatgttctcatctctaatttcaaagtatggtgggggtcaaatgccagaaccctctgaagaggaatttgaagctgcacagagaaaggtggaaagtggaaggtcctcaaaaaaattaaagcgaaaataacaaacttatatctgtgtacaattcgtttaagtgtgaacggtacttcagcttttgttagtggaaattcttcttttctgatgaagtacgggaagttagttattttcatgtgtatgttaatgttactggttactgtcaatagtgtcaatggtgaaacagccgn

SEQ ID NO: 246306 - DNA, 531 bp, Glycine max
  unsure (1)..(531): unsure at all n locations
aggtnttttnnaggcactatgagctctaagtaactctncgcactgccgtaccggtccggaattcccgggtcgacccacgcgtccgagcaaatggagatagtgaggaggatggctagggactgttgtaagtatgggacagagaatcttggtagtagttacctccttgcaagggcttctcttcaatttggtaacacatatgatacaatggaaaatgagagagagactctgctcgggatcttaggcgatcaggtttgtatagatctctgagccactacgggcacagataacaggagctcctttggaggatgcacgccacctcactcgccgctatgacaaacttcatcaagaggtagaagcccaggctgctgaagttttgaggcgtcgatcaaagttgaagaattcttctgtttctgcagagagttccgcgaggcttcaaaatgcataaacaaggttgaaagaacttaaatttgccttggcagcacttggtagaaaaaccaacctctgctatgttgtctgtcgaagaacagcagc

SEQ ID NO: 246307 - DNA, 533 bp, Glycine max
  unsure (1)..(533): unsure at all n locations
agggggattcnagatcccttatgatctctacgcaactctnggcatgccgtaccggtccggaattcccgggtcgacccacgcgtccgcggacgcgtgggcacacacaactactacaagtacttccttacaatcaaaaccaacaacaactatggcaagttatcaaaagcactacgatgatcagggtcgcaaggttgacgagtatggcaacgttgagaagcaaaccgacgaatacggcaaccctgttcatgctgctagtgtcacctatgtagccaccagaactgctgctggtggttacagtgatgacattaataagcaacatgataccaccaatgcctacggcgtagacactggtagacagcattctagtggtggctacgatggtgacactaataaacatcatggaactactggtggctataatgatgacaccaatagacatcatggaactaccggtgtctatggtatagacaccgataggcaacaacatgggactactggtggctatgccggtgacactggtaggcaacatgggn

SEQ ID NO: 246308 - DNA, 612 bp, Glycine max
  unsure (1)..(612): unsure at all n locations
tgttatgatgatggatgagtagatagtgtgattagagaataatgagagnatagtatttaattgggatgtgggttgtagagatagaggtgcgttaagtattatgtatgtatctctatgccgtaccggtccggaattcccgggtcgacccacgcgtccgaattaaactaattgcaaagatgaataccaagccctttttctccttgggcttactctgggcactgcttctcatctgtgttgtggcaactgagccatccaaagatgcgacacaagcagaagaaccaaagacacggccagatgcctggagaagtggtggaagtggaagacatggtggaagtgggggacatggtggaagcgggggacacggtggaggctggggacatggtggaggctggggacatggcggtggacatggcggaggatgcaaatgctgcggtcgaaagggctgcaaatgttgctgaagtaaaaaaacacaaacatgaactgaagacacacatacgtgtgtactccatgtaataagtatagtatgtagaattaagaaataaaagcatggaatctatatccgtgctagggctgtcataagttgaccggttttccaataaccatgcatgtagt

SEQ ID NO: 246309 - DNA, 604 bp, Glycine max
gttatgtatgattatttgttgataggattttattgatgtatatttgttttgttaattagtggtattgtttattgagatttagggtgagtaagtactatgtatgtagttcttcgcagtaccggtccggaattcccgggtcgacccacgcgtccggaagaagaagatggagaagtatcagatctggagcaggagaatagcgttggcagcgtttgcgtttgctctgctgttccaatcggcctcagcagacgacgtcgttgtgctctctgaagataacttcgagaaggaagttggtcaggacagaggagctctcgttgagttctatgctccttggtgtggacactgcaaaaagcttgctccagaatatgaaaagcttggtagcagcttcaagaaagccaaatctgttttaattggcaaggttgactgtgatgagcataagagtttgtgcagcaagtatggagtctctgggtacccaacatttcaatggtttccaaaaaggatctcttgaaacccaaaaagtatgaagggccacgcactgctgaatcacttgttgaatttgtaaatactgaaggaggaacgaatgtaaagattgctacagtttctttca

SEQ ID NO: 246310 - DNA, 594 bp, Glycine max
  unsure (1)..(594): unsure at all n locations
tggattattagtagagattattatgttttgatagtattgnattagatttatgtgtgtggtgatagttagaggtgattaagtctatgtagtagttgttagncagtaccggtccggaattcccgggtcgacccacgcgttcgggtgccgcaacccattttgcatctaacccttttgtcattaataatctctctgaccactgtttccttggtcgatgccgccgatcccacatttggcttcacccctcttggattatctagtagctcaaacttgcaaatccaaaagccttacgacgttgcagtcaacgagcgctacagcttttcaaatggagtgcacagattttgggtatactccacggacaagcctcatatgcaaggcagcaatacgaagccacgaactgagattcgtatcgctggatacgattatacatccggtgtgtggcaatttcaagggtttttttacgtgcctagtggcacaagcggggtgtgcatccagcaagtgtttggtggagtaacttctgccacaacctcgcagactagggtctatggtggttctctcactcattaccaatcacctactctggaaccaaacatttat

SEQ ID NO: 246311 - DNA, 620 bp, Glycine max
  unsure (1)..(620): unsure at all n locations
gtagtgatattatgtatgatgatgaatgtttgagtagtgnatgattttaagntatgttgtatagtgtgtgtgttgtatatggatggtagaatgggaggggtgaagttatttgttagttatcttgttggcatgcccgtaccggtccggaattcccgggtcgacccacgcgtccgttcttaggttaaaagttggaactgagtgattacccaactaatgttatgatcagttggaagcgttggcaagaaagaatacgtaatagtggtgttgtttgttcattttggtcaaagaaatagtatctgggtacccaggatattgtagttgtaagatgggttatctcaattcagttttgtcatcttcaagccaggttcatgttgcagatgatgcaattgtgagcggcgggggtctaagtcacaatggaaaattcagctacgggtatgctagctctcctggcaagagatcttcaatggaagatttttatgagacaagaattgatggtgttgaaggtgaaattgttggccttttcggagtttttgatggtcatggtggtgctcgtgctgctgagtatgtcaagaaaaacctgtttagtaatttgatcagtcacccaaaattcatttctgaca

SEQ ID NO: 246312 - DNA, 609 bp, Glycine max
tgtaatttagaattgatgattatgtatgtatatggtatgagatgatgtgtattttttttgggtgatttgatatttgggttaaggtacgtgcagttctcgtaagctattgttggcatgcagtaccggtccggaattcccgggtcgacccacgcgtccgaaaagccatccgaatttcccaattgtggcataggaatgccctcttgttctctatttcaccacacaaattcccaattctaacttggtttttttttgtctctcacacactcctttcaatctccaattaattacttttcttcaatttgaagcgtgtctgaagttggttgaagcattgtgttattgttctggttttggtctccgaggtttgtgtcggattccgatgtattatgtaaaagaagctgcgcatgtcgaccccatgttcgtagctgataacaccaaccccaaggattattacaaagtgctggaggttgaatatgatgcaaccgatgaaaatatcaaattaaattaccgaagactcgcgctgaaatggcatcctgacaagcacggaagagatagtgctgttactgcaaaatttcaagagataaatgaagcttacaatgtattaagtgatcc

SEQ ID NO: 246313 - DNA, 612 bp, Glycine max
  unsure (1)..(612): unsure at all n locations
gttatgaagaatggaggtggtggtagtgtgatgggtgnatgtgggagttgnatgggaggttggagggtggtggagtttgtggtgtattgggaggagtgaagtctttgtatgcaacttgttggcacgccgtaccggtccggaattcccgggtcgacccacgcgtccgcccacgcgtccgcccacgcgtccggttggacccgaattcgtgggaagcatcgaattcggtgtttgtttataatttcttgtcggcgaagtggcgccgcggggcggacatgccgggtgggcctcgcacattcttcgcgtgcgcgtcggattccgaggagacagtttttgttgccggcggacacgacaacgagaagaacgcgctgcggtcagcgttggcctatgatgttacctcggacctgtgggtcatgcttccggacatggaggcggagcgcgacgagtgcaagggcgttttctgccgcgggaggttcgtcgctgttgggggttccccgacggagacgcatggaaggttcgtgaagagtgcggaggcgttcgatcccgccacgcggagttggagcggaatgaacgaggacttcttggattgcgccacgtgtcccgagaccttcgtgg

SEQ ID NO: 246314 - DNA, 620 bp, Glycine max
  unsure (1)..(620): unsure at all n locations
tggtaggatggaggatgtgtagtaagttagatgggagnaagtaggagggnnagagtggatatatagggaggtagatgaagagggtgagaggtgaagttaagtcttatgtacgtaatctcttngtcacgccgtaccggtccggaattcccgggtcgacccacgcgtccgcccacgcgtccggagcggtaaattccgtccaaggctaaatactggcgagagaccgatagcgaacaagtaccgcgagggaaagatgaaaaggactttgaaaagagagtcaaagagtgcttgaaattgtcgggagggaagcggatgggggccggcgatgtgtcccggtcggatgtggaacggtgagagccggtccgtcgatcgactcgggacattgaccgacgcggattgcgatggtggcccaagcccgggctgttgatatgctcgtggagacgtcatcatcgcgattgtggatggcagcgcgcgcccttggcgtgcctcggcacctgcgcgctcctggcgtcggcctgtgggctccccattcggcccgtcttggaacacggaccaaggagtctgacatgtgtgcgagtcaaacggcgagtaaacccgtaaggcgcaagggaactgattggtgg

SEQ ID NO: 246315 - DNA, 531 bp, Glycine max
  unsure (1)..(531): unsure at all n locations
ggaggtnncgtcnaagggngttatgtaactctaagtagccctcaggcatgccgtaccggtccggaattcccgggtcgacccacgcgtccgggatggggccttggcttcgccttttgaaaaaccttgcccaagctcataatcttgtccctgaatttgagattactttagaggccactcaccatggaccgttgaccaataagccaaccatgtttttggagattggtagtactgaagactattggaagagacaggatgctgctcaagttatggcacagttagtatgggaaggacttggacttggaggtgtgtcagatgtaggaaactggagcagggagaatgataacaagaaaatccttcttgggataggtggtggacattatgcacctcggcatgtggatgtagtattgaaagataatgtatgggtgggtcacctactttctggatattcgctgccaatggaagatccaaaccagtcaaaaggagaaaaaaatgtggagattggtggaacatggagacagtctataaaagctg

SEQ ID NO: 246316 - DNA, 534 bp, Glycine max
  unsure (1)..(534): unsure at all n locations
gggtnnnttntagtggcttatgatctctactgaactcttggcactgcagtaccggtccggaattcccgggtcgacccacgcgtccgcccacgcgtccggaagaacgaatcgaataaagaaagatcatggcgatggcaaacttggctcgacggaagggttacgccgtcgttttgtcgtcgaggtcgtcgctttgtctgacaaggtggagggggttcgcgtccggatctgacgaaaacgacgtcgtggtcatcggcggcggtcccggcggctacgtggcggccattaaagcggcgcagctgggtctgaaaaccacttgcatcgaaaaacgtggcactctcggcggtacctgcctcaacgtcggatgcatcccttccaaggcacttttgcattcttcccacatgtatcatgaggctaaacatgcatttgccaaccatggggtcaagttttcatctgtcgaggctgatttgccagccatgatggccctaaaagattaagccagttcttatcttaccaagggttttgaaggtctattca

SEQ ID NO: 246317 - DNA, 519 bp, Glycine max
  unsure (1)..(519): unsure at all n locations
gggggctaatgatncctaatggatgctgttggcactgccgtaccggtccggaattcccgggtcgacccacgcgtccgaaaaatgtcgtcgttgataacagatttgctccgtcaaaccggcggcaccgccgtcatcgacggcggtctggcgacggagctggagcgccatggcgccgacctcaatgatcctctttggagcgccaagtgcctcttttccttccctcacctcattcgccaagtgcaccttgattacctggaaaatggtgcagacattataatcacagcatcttaccaagccaccattcaagggtttaaagccaaaggctattctgatgaagagagtgaagccttgctcagaagcagtgttgaaattgcacgggaggcacgcgaagtttactataaaaattgtgctggatgtcgttcgggtgatggggatgatgatggtagaatcctcaaacaacggcctatcttggttgctgcatcagtagggagctatggggcttatttggccgacgggtcn

SEQ ID NO: 246318 - DNA, 474 bp, Glycine max
cggtattgccgggtcgacccacgcgtccgttcttcattctccctttttttgccctaaattagatcctttcttttacaatcattaattaattagattagaattgatttgatttgatttaccttaatccttcgtctgctttttccttcccttaactccaccattcctgaattttctgcatcaatctatcaagttcattgtaggtgtatatccttgattttgtgtgggtttgagttagggtgcatgtgaatgaaaaggagatttgctggaggtgatgcatttgcatagatgaaggcagaaaaagtttggcgtttaggcagcatgggtgatatgcaaatactgcctgggtctcgccaccgtcctcccatgaagaagccgatgtggattattgtcttggtgttgtttgtctgtgtctttctaatctgtgcttatatctacccaccgcagagcagttcagcctgttatgtcttctctttc

SEQ ID NO: 246319 - DNA, 620 bp, Glycine max
  unsure (1)..(620): unsure at all n locations
tggaatgaatgatggattagtatttaatttgattatagtatatatattannattgaatgtaagtgtgtagtggtgtggtgtttgaataaggggctgttgttctttgtaagtatcttgttggcactgncgtaccggtccggaattcccgggtcgacccacgcgtccgcacaactaagaaggaaacttgctaaagcttatataggatttaagttatcgtaataaataaaacttcattggaagggtagttataatagatgtggagatctttcttcgctctggtcatataaaggaataatacttttctattaatttccttaaaaaaaaaaaaaaaaaaaaaaaaaaaaaaaaaaaaaaaaaaaaaaaaaaaaaaaaaaaaaaaaaaaaaaaaaaaaaaaaagggcggcctttttaagaggacccaagcttacgtacgcttgcatgcaacgtcatagctcttctatagggtcacctaaattcatttaactggccgttgttttacaacgtacggactgggaaaaccttggcgttacccaacttaatcgccttggcagcaatcacccttttgccaagttgccgtattactaaaaagcccctaacaaatcgcctttccaaaaagtgga

SEQ ID NO: 246320 - DNA, 648 bp, Glycine max
  unsure (1)..(648): unsure at all n locations
agtgtatgggatgaatgtgatggaggatatgaagtgatggagagtgatgntggagtggataatgnnatgtgagaattgagtgagtggagagtggntggtgtgtgtagatggggggtgnagttcngtcttatgtataggtagcttcttcgtncgtncngntccggtccggaattcccgggtcgacccacgcgtccgcccacgcgtccggtttctcccgcaaaatgataggaaagaaattcttatgcgttgttgtagcggtggcctttgttatgataacaaaggtgccccaaaatgtgagtgctcaaaactgtggttgtgctgaagggttatgttgcagccaacatgggtattgtggtaacggtgaggagtactgcggcacagggtgcaagcagggtccttgttattcgagcacaccaagtactaacaatgttaatgtggctgacattgtcacaccacaattcttcagtggcataattgatcaggctgactctggctgtgctggcaagaacttttactcacgagatgcttttcttaatgctctcaattcctataatgactttggtagacttggttcccaggatgactccaagcgcgagattgcagctgcttttgcccatttcacacatgaaactggacatttttggcaca

SEQ ID NO: 246321 - DNA, 594 bp, Glycine max
  unsure (1)..(594): unsure at all n locations
ggaagtagaggagagagaatgagagaggntgaggagagaaggaagaaaggggggaggaaggagaaggagaggggcttaattcaatgtagcatctgttggcacgncgtaccggtccggaattcccgggtcgacccacgcgtccgcgcgatataacgtataccagaccaaaatcaatctgaggagtcagaaagccatggatccctacatgaatagggcatcaagcgcgtgcaattatcactaatggactacatattacggtgctcccatatggaacaataactgatcgataactgatgaatatagaggtgcaattgtgttggacgattaccatttggagcataagcttgcaaactctgacagggaacggatccacgaacagtgtagccacgcgtctgtatctagcgcaaagggctgatctgaagtcacgaatgacatcactctacatatcatgtcacgattaacatgcaacggctgatattcagacccccctcatacgtcggaaattcactgttgtacgagagcgtgggcgttcaaaaagccgtagggcttccagagtaatgttggcaaattctgcagccagaaaggttatcttct

SEQ ID NO: 246322 - DNA, 534 bp, Glycine max
  unsure (1)..(534): unsure at all n locations
agagttancatcnnagggnctgatgtaactctacgtaagctgtnggcactgccgtaccggtccggaattcccgggtcgacccacgcgtccggaagaagcgaaatctcctagaaagcgagtttctctcttctctctctcaattttcacatagtcagcgaaaacaaacaaactattggaacacgaaacacaaacatcataacataagcagcagcagcagcaccacccaccttgttcattgttttgaattcaactgagaaaaacgacaaacgaggatgtttcaagagagcagcgcgacacggtggccgactcagccgactcagtggactcgctaccacgacaagctcttcgagcgggctctgctggtcgtgccggaggacctgccggaccggtgggagaagatcgccgaccaggttcccggcaagtcggcggtggaggtcagggaacactacgaggccctcgttcacgacgtcttcgagatcgactccggccgagtcgaggtcccgagttacgtcgatgactcggtggcgacaccgn

SEQ ID NO: 246323 - DNA, 237 bp, Glycine max
  unsure (1)..(237): unsure at all n locations
atgccgtaccggtccggattcccggtcgacccagcgtccggangtgatttcgaacattggctcgcaagacagagggttttcaggttcagatatatctgtctgtgtgaaggatgttttatttgaacctgttcgcaaaacccaagatgccatgtttttctttaggaatcctgaagatatgtggatcccatgtggaccaaagcaacagagtgcagtacaaactacaatgcaggatcttgc

SEQ ID NO: 246324 - DNA, 541 bp, Glycine max
  unsure (1)..(541): unsure at all n locations
agttatggtgcgtgtattccaccgctgatgccgtacgcactgccgtaccggtccggaattcccgggtcgacccacgcgtccgctctaagaaaccaaaaagatgaagcaaatcgacgacggcgatgacgagcagcgatccctctcccctctgccggaacaggtcctggagaacgtcctggaaagcgtgctccacttcctcacctcccgtcgcgaccgcaacgccgcctcactggtctgcaagtcctggtaccgcgccgaggccctcacccgccccgacctcttcatcggcaactgctacgccgtttccccccggcgcgccaccgcccgcttcccccgcgtccggtccctgaccatcaagggcaagccccgcttcgccgacttcgacctcatgcccctgaactggggggcccacttcaccccctgggccaccgcactctcccaatcttacccttccttcctcaacaaactccaccttaaacgcatgtccctcaccgaccacgacctcatcctnctctcccactcccttccctnctttcaagag

SEQ ID NO: 246325 - DNA, 426 bp, Glycine max
ggaattcccgggtcgacccacgcgtacgcacaaattaacacggctagccgtggagacttaagtcctgacgaattgaaggagcgacaggccaaggcaatgcaggatccagaaattcagaacatccttcaagaccctgttatgagacaggtattgattgatttccaggaaaatcccaaggctgcacaggaacacacgaagaatccaatggtgatgaataagatccaaaagctggtcagtgctggaattgtccagatgaagtaagtttgtggcaggtggcagttcgtgtgaaaaagcaatcaagcaatcgataatgatgtctcagtgtgactattttgacatttaaatagatgtgactgggaaaaaagttgggaaattttgagttgctttacctttgtttggtttagtgaattcatataatttacgaat

SEQ ID NO: 246326 - DNA, 522 bp, Glycine max
agatagggctgtgtccaatcatgcagtcgtagcatgccgtaccggtccggaattcccgggtcgacccacgcgtccgcccacgcgtccgtgctgttgtaacatctgctggtcaattatttacttttggtgatggtacatttggtgctttgggtcatggagacaggaaaagtgtttcattaccaagggaagtagagtctctcaagggtcttcgaacagtgcgggctgcatgtggtgtttggcatactgctgcagttgtggaagtcatggttggaaattcaagttccagcaactgctcttcggggaagctgtttacttggggtgatggagacaaaggtcgacttgggcatggtgataaggaagcaaaacttgttccaacccgtgttgcccttggtaatgttaaacccaatttttgtcaagttgctttgtgtcatagtctcactgttgcacttaccactaagggccatgtctatacaatgggtagtccagtctatggccagttaggaattccttaagctgatgggg

SEQ ID NO: 246327 - DNA, 539 bp, Glycine max
agattgagggttaagtccacggatcgagatcgtagctgtacccctgcagtaccggtccggaattcccgggtcgacccacgcgtccgcccacgcgtccgaaaaacaccaattctccaccctctcattgaaaaaaaaacaaccaaacaaaaaaaatcaatcattttattttatttttctacgaaaatggttgatttacattggaaatcaaagatgcctagttccaaaacaccaaaactctctctctccgacaacaagtccttaccctctttgcaactacccttccgcaccacagatatctctcccgccgctccttccgtttgcgccgcttacgactactatctccgtcttcctcaactcagaaagctttggaactccactgattttcctaattggaacaacgaaccgattctaaaaccaattttgcaagctctcgaaatcacgttccgctttctttccattgttctctccgatcccagaccttactccaaccacagagaatggactcgccggatagagtctctcatcatgcaattaaatgg

SEQ ID NO: 246328 - DNA, 529 bp, Glycine max
  unsure (1)..(529): unsure at all n locations
agttttgaggaggtcttgtatcctgagacggangctgtacgcactgccgtaccggtccggaattcccgggtcgacccacgcgtccgcccacgcgtccgcaaacttccttcgcttgtagtactgccctaattccccaaattcgggtcttttttttttcttttttttttttttgttctttcttctcagatcccggtggccttttccctccctttctcaggaaaattcccccgattttctcgagaaagtgaaacggaattatgagctttcaggacatcgaggccgggcgccccttcggttcgaggcgcgggttgatgaatgggaagcaagaccccacgcaagcggtggctgccggcatattccagatcaacactgccgtctccaccttccagagactcgtcaacaccctcggaacccccaaagacaccctcgacctccgcgaaaagctccacatgacatgactacatattgggcaattggtaaaggatacatcagctaaacttaagcaagccagtgacattgatcaccatgn

SEQ ID NO: 246329 - DNA, 531 bp, Glycine max
ggtactgaggaggacagtgtatcattgattacgtatgctcctagcgacgacgtaccggtccggaattcccgggtcgacccacgcgtccggtaattttaatgaatattgaaataaatttaaaaaactgaacaagctggagcagtttactcaggtgattaattctttgctcatgtatatttctgatcttcagccaaaatattagtcaaggctctattcaattgaaaaagtttttttttcttttaacaggaactgagtgatatgactgccattaaagctgaagacatattaaccactctgcagagcctagaattgattcaatacaggaaaggtcagcatgttatatgcgcagatccgaaagtgttggatcgccatcttaaagctgctggcagagggggcctggaggttgatgttagcaaactgatctggactccttataaagaacaaagttgatggtcattggtcatatccatcaaggaaatactatgataatcctttggcgtgctatagctgcagctgccagtgtaacgtttc

SEQ ID NO: 246330 - DNA, 536 bp, Glycine max
  unsure (1)..(536): unsure at all n locations
agtgaggagcgtgtgtccnnccgctgcatgcctaacgcacgccgtaccggtccggaattcccgggtcgacccacgcgtccggcaagccccactcaaccaccacacctcttctcgttcacgctacccctttctgctcttcttctacctttcaagttttaaaagtataaagatggcagagacattcctatttacctcagagtcggtgaacgagggacaccctgacaagctctgcgaccaaatctccgatgctgtcctcgacgcttgcctcgagcaggacccagacagcaaagttgcctgcgaaacatgcaccaaaaccaacttggtcatggtcttcggagaaatcacgaccaaggccaacgttgactacgagaagatagtgcgtgacacctgcaggaacatcggcttcgtctcaaatgatgtgggactggatgccgacaactgcaaggtcctcgtcaacattgagcagcagagccctgatattggctcaggtgtacacgggcaccttaccaaaaaaccctgagaaatggtgcttgtga

SEQ ID NO: 246331 - DNA, 533 bp, Glycine max
  unsure (1)..(533): unsure at all n locations
ngttggtaggtgggtcngcccatcgaacaagtaggctcgtcgtaccggcccggaattcccgggtcgacccacgcgtccgcccacgcgtccgcccacgcgtccggccaggggcaccgtccagggcctccgtgaggctgagtccggcgactccctcaaaatccgactcaaccgagtcctcaactcggggggccacgcgggtcgcagactcgggaactcgctcggcgtggtgggcctcatcttcgcgggactcgagagtgggatgacctacttaaggggcaccgatgacctcgtcaacagcgccgtcgccggactcggcaccggaacgctctttagggccgccgccggaccccgatccgccgctattgccggcgccatcggcgggatcgccgccgccggcgcggtttccgggaagcaagctttgaaaagatacgttccgatctaggaaacaattaggttaacgaccatggggatggtggtacaaattagattaatattttggaataaattgtcctcccttntnttttatcaatata

SEQ ID NO: 246332 - DNA, 525 bp, Glycine max
  unsure (1)..(525): unsure at all n locations
agttntagggaggtgttctatcatggcagtgacagcatggcgtaccggttcggaattcccgggtcgacccacgcgtccgcgtttctttcacttcacaaaaatgaaaatcatgatattgtgttcggtgatgctatgcttatcactagcgttccttcttggggccacagcagaacaatgtggcacacaagctggtggagcgttatgcccaaatagattatgttgcagcaaatttgggtggtgtggtgacacagattcctactgtggagaaggttgccagagccaatgcaaatctgcaacaccctcaacaccaactccaacaacacctagtagtggtggagatattagcagactcattagctcttctctctttgatcaaatgcttaaataccgaaacgatggccgctgttctggccatggatgctacagatatgatgctctcattgccgcttgctggctctatcaacggctttggcacacccgatgatgactacactggctagtaagacattggtgcttgttaggctc

SEQ ID NO: 246333 - DNA, 443 bp, Glycine max
ggaattcccgggtcgacccacgcgtccgcccacgcgtccggcaggaatggctttgttcggatagaaagagtggtattttttcacgccgagggaccgcaagtacccgaacggttcgcggccgaaccggtccgcgggaaccgggtactggaaggcaaccggagcggataaaccagttggtaaaccgaaaccggttgggatcaagaaagcgttggttttttacgctggaaaagcgcccaagggagagaaaactaactggatcatgcacgagtatcgtcttgcagacgtggatcgttccgttcgcaaaaagaacagcttaaggctggatgactgggtgctgtgccgaatttacaacaagaaaggtgcaattgaaaagcaacaacttccaccaccgagtggggtccgcaaaattgaatgttccgaaatggaggacgagaaaccggaga

SEQ ID NO: 246334 - DNA, 534 bp, Glycine max
  unsure (1)..(534): unsure at all n locations
aggttagagcgtntgtcnnagtatcgaaactgaggctgtngcgatgccgtaccggtccggaattcccgggtcgacccacgcgtccgggactttccatgtcaaaggctactgccaagaaaattgtgaaagctgatgcttatgtagctgcttgtgatgtccctggaattaagagattacttccatcaaagtggagggaacaggagtttttcaataacatatatgaactagttggagttcctgtagtcacagtgcaacttagatacaatggttgggttacagagttgcaggatctagaaaagtcaaggcgactggggaaagctgttgggttggataaccttctctatacacccgatgcagatttttcttgctttgcagaccttgcactttcatctccagaagattattacattgagggacaaggatcattgctccaatgtgttctgacgccaggagatccatacatgcccttaccaaatgacgaaattattgcaagggtagcaaaacaggttttagcgctgttcccatcatctcagg

SEQ ID NO: 246335 - DNA, 523 bp, Glycine max
  unsure (1)..(523): unsure at all n locations
agtttggagagtactgnatcctggaatcgatgcgtaggcatgccgtaccggtccggaattcccgggtcgacccacgcgtccgcccacgcgtccgctttatgaatataaaattttggtggatgcccaaaaaactaacctttttattttttgcaggttggacagcatttggattcttgtgtttttcttggagcaaacagtagctattcagctttagaggatgatcatgtctacttggaagaattagttgaaagccctcagtctaggtctttgagaggaagtgtggatgaattaccatctcagaatagtgcagttaacaactccacagaattgatcattgagcttcaggctgttggcccagagcttaccttttataacacatcaaaagatgtaggagggttattaaacctgtctaataaacttctacttgcacagttggatgcattttgcaggtgagttcctctacttaatagattaatatgttaggagggctgaacatttggcatggtattcaagtgtatcttag

SEQ ID NO: 246336 - DNA, 384 bp, Glycine max
acaggtgaagcttcatggattttggaagactgcctacactgtgagggcggtatggaccttaaagtgaaaggatataccatatcaaaacatagaagaagaccgctacaataagagtcttcaacttcttgaatacaacccagtatacacgaaaactccagagcttgtccataatggaaaacccttatgtgagtacatgcttatcgctgaatacattgatgagatacggtcacataattcattacttcctgctgatccctacgagagagctctggcaaggttttgggttaaatatgctgatgatgacatgttatctgcagttattgcattcttccttagcaataatgatgaagagcgagaaaagagcatagagaagatatgggagca

SEQ ID NO: 246337 - DNA, 537 bp, Glycine max
  unsure (1)..(537): unsure at all n locations
agttntntgtggtgtatcnnaatcatggaacatgccgtctgacgtaccggtccggaattcccgggtcgacccacgcgtccggtgactgcacccttttggaaatcaatcccattgcggagacagctgataaccaattggtggctgctgatgctaagttgaattttgacgataatgctgcatatcgccagaaagagatatttgctctccgtgatacaacacaagaggaccctcgagaggtgactgctgcaaaggcagacttaaattatattgggttagatggagaaataggctgcatggtgaatggagcagggttagcaatggccacaatggatataattaaattgcatgggggtactcctgccaattttttggatgtaggtggcaatgcctctgaaggccaggtggttgaggcatttaaaatattgactgctgatgacaaagtgaaggcaattttggttaacatttttgggggtataatgaagtgtgatgttatagcaagtggaatagtgaatgctgcaaaagaggttgcactgaaaa

SEQ ID NO: 246338 - DNA, 535 bp, Glycine max
  unsure (1)..(535): unsure at all n locations
agtttnttaggtgtgtcnactgatggatcactcagncatgccgtaccggtccggaattcccgggtcgacccacgcgtccggtactgttctattagttcatactaagttctgaaaatgagttccaaggttttgcttgttctacttatgttcttggccactatacttctgatctcctctgaggttgcacccgatgatgcatacgagaattttgacaaaatagatgggaagcctagtgcagatggggtagatgaaagcaagtattggcgtggcggctatggtggcggctatggtggtggttatggaggtgggcgtggaggctatggaggtgggcgtggaggctatggagggggacgtggtggatatggcggcggacgaggtggctatggtggcgggcgtggtggctatggcggcgggcgtggtggcgggcgtggtggctatggtcctaatgaacataacgaggctggggttgatgctaaccctcacaactaagaaggcaactttctaaagcttatatatgggtttaagttatcgcaan

SEQ ID NO: 246339 - DNA, 527 bp, Glycine max
  unsure (1)..(527): unsure at all n locations
gttagaggggagttgngtctcggatctgatgctcatggcgaacccgtccggaattcccgggtcgacccacgcgtccgcccacgcgttcggaagtgaacaattacagcacaagcctgtgcctgttctttctctgcctaaagaagtcgttttctcttcgccaagaccggttagtgagcttgatgctgccgcaactaaacttcaaaaagtgtacaagagttaccgcactagaagaaaccttgcagattgtgctgttgtggtggaagagctctggtggaaggcattagactttgctgctcttaaacggagctctgtttcattctttgatgtggagaaacaagaaaccgccgtgtcacggtgggcaagagcaaggacaagagcagctaaggttggaaaaggtttgtccaaggatgataaggctcaaaaattagccctccaacattggctagaagctattgacccacgtcatcgctatggacacaatttgcacatgtattacgatatttggtttgagagccaagcacccaccc

SEQ ID NO: 246340 - DNA, 459 bp, Glycine max
tcggaattcccgggtcgacccacgcgtccggatagggcttggtctaatcaatggtgaatggattcttgcatacaagactctatctggagctaaaagacttcaaagaatccgttcatcttgcgttacagtttgccgctctcattttgagctatgattggtgtactgggctgcttggaagtttcacattgacaagggcattgacaatgtctacagcctgcattcatggctaggccttgcatgcctttacctattcaccatacagtgaggtgctggctgcgcaacattatggtacccacgatggtcaagaaatagtagagctgccttattgccatggcatgtgtactatggtatctatatctaatgcttggctatagccacatctgctactggtattcatagaaaagctacattccttcagttaacaacatcatatcacgcgtttccaatgatggacttttg

SEQ ID NO: 246341 - DNA, 534 bp, Glycine max
  unsure (1)..(534): unsure at all n locations
tgtattgtagcgtgtagtccaatgactgctacctancgcactgccgtaccggtctcggaattcccgggtcgacccacgcgtccgcttgtactgttctattagttcatactaagttctgaaaatgagttccaaggttttgcttgttctacttatgttcttggccactatacttctgatctcctctgaggttgcacccgatgatgcatacgagaattttgacaaaatagatgggaagcctagtgcagatggggtagatgaaagcaagtattggcgtggcggctatggtggcggctatggtggtggttatggaggtgggcgtggaggctatggaggtgggcgtggaggctatggagggggacgtggtggatatggcggcggacgaggtggctatggtggcgggcgtggtggctatggcggcgggcgtggtggcgggcgtggtggctatggtcctaatgaacataacgaggctggtgttgatgctaaccctcacaactaaaaaggccactttctaaagcttatatatgggtttaagtt

SEQ ID NO: 246342 - DNA, 526 bp, Glycine max
  unsure (1)..(526): unsure at all n locations
agtttaggagggtgtatcatctgctgtagctgnagcatgccgtaccggttcggaattcccgggtcgacccacgcgtccgcccacgcgtccgcccacgcgtccgggatggtcttgtgttccgtgaaaacttttctattagatcatatgagattggtgctgatcgtaccgcatctatagaaacagtaatgaaccatttgcaagaaactgcacttaatcatgttaaaagtgctgggcttcttggtgatggctttggttccacgccagaaatgtgcaaaaagaacttgatatgggtggttactcggatgcaggttgtggaggaacgctatcctacatggggtgacataatccaagaggacactagtgtttctggatcgaccatcagagcgttgcgccgtgaatggcttttacgtgactgcaaaactggtgaaatcttgacaagagctttcagtgtttgggtcatgatgaataagctaacacggaagctgtctaaaattccagaagatgtcagacaggagaattggatctn

SEQ ID NO: 246343 - DNA, 537 bp, Glycine max
  unsure (1)..(537): unsure at all n locations
agttaggaggggacttgnatcatggaatgcagctcgtgcgatgccgtaccggtccggaattcccgggtcgacccacgcgtccgcacacgcactagatggactatattgcggttataaccttcttcatatatcgcttgttatgagaagctctagaaatgatcacaggcacctaaggttgacattgtgttctagatccttcactcaaatctgacactccgacaacgctgatagagctgctagcttcagatatcaccccaccaacactgacgctggtggtaacagagatcacatttacacgcggcaccatacctgcattgactacatcattgacactaatatacagatttctagtattatatacgacagtgacactactagacatcatgaggctacactgggttatcaaggagacacagagatacagcatgtgctctaccggtgtctatggtataggctcctaggagcggcaccatgaatcatccgaatgctaatcatgagacactcttaaatatcactaatacagtatttgacctaacg

SEQ ID NO: 246344 - DNA, 534 bp, Glycine max
  unsure (1)..(534): unsure at all n locations
gttattggaggaggatcttgtgttattggacatggaactcgtagtcactgctcgtaccggtccggaattcccgggtcgacccacgcgtccggtcttgaagcacaaaatctttcatcggatgagagagaaaagcggagtgaattgataggccttctttgtgggtgcatgcaagtaattattcagaaactagggtctttggattctaccaaatatgtgttggtgcagtattctgatcagataatgagactattcttcagggtctttgcttgtagaaatgccactgcacacgaggaggcaatgctagccattggagcccttgcctactcaataggccaggagttttccaattacatgccagaattttacaagtttctcgagatggaccttcagaactttgaggagtaccaagtttgtgctgtcactgttggtgtcataggggacatatgcagggcattggagttaaaaatactgccttattgtgatgggattatgacacaactcctcaagaatttgtcaagtgataatttgcaccgn

SEQ ID NO: 246345 - DNA, 534 bp, Glycine max
  unsure (1)..(534): unsure at all n locations
agtttnataggtgtgtcgctgactgagcataacgacngtcgtaccgcttcggaattcccgggtcgacccacgcgtccgcttcttcttctttttcatcaatcatcactagtggttcttttccttctgagaagatcgaattgtgttttgcaaaaatgggagttccagagaaagaccctctttcccaattgagtttgcctcctggttttcggttttaccccaccgacgaggagcttctcgttcagtatctgtgccgcaaggtcgctggccaccatttctctcttccaatcattgccgaaattgacttgtacaagttcgacccatgggttcttccaagtaaagcgattttcggtgaaaaagagtggtactttttcagccccagagacaggaaatacccgaacgggtctcgacccaacagagtagctgggtcgggttattggaaagccaccggaaccgacaagatcatcaccaccgaaggtagaaaagttggcataaaaaaagccctcgttttctacgttggcaaagcccccaaaggcc

SEQ ID NO: 246346 - DNA, 460 bp, Glycine max
aattcccgggtcgacccacgcgtccgaccagctatacttgttccttttgaaggttagaagtgctacaatacaaacaatggcagctactcaggaagatgtgaagcttttgggtattgtgggaagcccatttgtgtgcagggtccagattgcccttaagttgaagggagttgaatacaaatttttggaagaaaatttgggcaacaagagtgatttgcttctcaaatacaaccctgttcacaagaaggttccagtgtttgttcacaatgagaagcccatagcagagtctcttgtgattgttgaatacattgatgagacatggaagaacaaccccatcttaccttctgatccttaccaaagagccttggctcgtttctggtccaaattcattgatgataagattgtgggtgctgtatggaaatctgttttcacggttgatgagaaagagcgtgagaagaatgtt

SEQ ID NO: 246347 - DNA, 526 bp, Glycine max
agtttagagggtgtagtcatctgctgcagtcatagctatgccgtaccggttcggaattcccgggtcgacccacgcgtccgcctagattcagccacagtttcggaggatatagaatatagtcgttcgagatggcccgtacgaagcagactgctcgtaagtccacaggaggaaaggctcctaggaagcagcttgcaaccaaggctgcacgtaagtctgcaccaactactggtggtgtgaagaagccacatcgttaccgtcctggtaccgttgctcttcgtgagattaggaaataccagaagagtaccgagcttttgatcaggaagctccccttccagaggctggttcgtgaaattgctcaggacttcaagactgatctgcgtttccagagccacgccgtgcttgcattgcaagaagctgctgaggcataccttgttgggctctttgaagacactaacctgtgtgccattcacgctaaacgggtaaccattatgcccaaggatatccagctgccagaaagattcgcggt

SEQ ID NO: 246348 - DNA, 537 bp, Glycine max
  unsure (1)..(537): unsure at all n locations
cgatttagtagggagggaacgtgcnagttattgggcatgcaggctcgtaggcatgccgtaccggtccggaattcccgggtcgacccacgcgtccgcggacgcgtgggcggacgcgtgggcggtcgcgtgggcggacgcgtgggcagttttctacttgaatcttcgttatccttctttttttctccttgaactcgaatattcactatggcagatgaggtggttctgctagatttctggccaagtccatttgggatgagggtcaggattgcacttgctgaaaagggtatcaaatatgagtccaaagaagaggacttgcagaacaagagccctttgctcctcaaaatgaacccggttcacaagaaaatcccggttctcatccacaatggcaaacccatttgtgaatctctcgttgctgttcagtacattgaggaggtctggaatgacagaaatcccttgttgccttctgacccttaccagagagctcaggctagattctgggctgactntgttgacaataagatatttgatcttggaaga

SEQ ID NO: 246349 - DNA, 533 bp, Glycine max
  unsure (1)..(533): unsure at all n locations
agttttgtaggaggacgttgtgtactggcatgcancctgncgcatgccgtaccggttcggaattcccgggtcgacccacgcgtccgcacacacagctagcagatattacatacacgtgaatcactaattaagccatggagaagaaatcaatagctgggttgtgcttcctcttccttgttctctttgttgctcaagaagttgtggtgcaaactgaggcaaagacttgcgagaacctggctgatacatacaggggtccatgcttcaccactggcagctgcgatgatcactgcaagaacaaagagcacttgctcagaggcagatgcagggacgattttcgctgttggtgcaccaaaaactgttaaatggatccattcactccaacgtgaagaagatgcatgcagcgctattttataaaaaataagactactatatactatatataataagactggcgctgcatcaatgacctatgtattatagtatatattattaccgatgtcagaactatagatgcatgtactgggcattaacgg

SEQ ID NO: 246350 - DNA, 525 bp, Glycine max
  unsure (1)..(525): unsure at all n locations
ggtttgagaggaatgtgtcctgaatcgnacgctgtagtcatgccgtaccggtccggaattcccgggtcgacccacgcgtccggataactcaatgtataacattcccactgtacctagtgactacccgtctgctggaaatgagcctggtgcaaataacgagataaaaggtggaaggcctggtccatacatgcaacctcctccttcaacgtggacgaaccagaaccagaaccaaagggctccacttgacgtcaatgttgcttacgtggaagggcgggatgaggcggaaagaggagcttcaaatcaacctctgacacaggacttcttcatgtcctcggggaagcggaaacgtgatgaaattgcttctcaatataatgctggtggatatatacctcagcaagatggagctggagatgctgcttctcaaatttttgaaattgaagtgtatggagggggcatgtccattgatgcaggtcactctacttctaaaggaaaaatgccagcacaatcagacaggccagcttttta

SEQ ID NO: 246351 - DNA, 485 bp, Glycine max
  unsure (1)..(485): unsure at all n locations
ccgtccgnattcccgggtcgacccacgcgtccgctttcacttcccgcattctcctcttggttgcctccatgttcctcctcgcagccttcgttctcgccctctacttctcctccccaacgtcgtcgtcgccgtcgctgcctccgccacgcgccaagctcccccacccggtggtgatcctcatttcctccgacggcttccgattcgggtaccagttcaagacccccgctcccaacatccagcgtctgataaaaaacggcaccgaggccgagaccggactcatccctgtctttcccaccctcaccttccccaaccactactccatcgtcaccgggctctaccctccccaccacggcatcgtcaacaacgtcttcttcgaccccctcaccggcgagaagttcaccatgcaatcccaccaacccaagtggtggctcgcccagcccctctgggagaccgtccttcttcacaaccttttcgncggcacctac

SEQ ID NO: 246352 - DNA, 535 bp, Glycine max
  unsure (1)..(535): unsure at all n locations
agttaggaggtgtatcngttgcctagctcactcnagnctgtacgtaccggtccggaattcccgggtcgacccacgcgtccgcttgaaatgagagggtgtgtatttttcagtgaacgtgcacttgctgtggctgcaacacaattgacttctcttaggtacttgtgggtgcaaggttatggtgtatctccatctggacgtgatcttttggtaatgtctcgacccttttggaacattgagttgattccttctagaaaggtggctacgaataccaatccagatgagactgtagttgttgagcatcctgctcatattcttgcatattattctcttgcagggcagagatcagattttccagatactgttgtgcctttggacactgccacatgcgttgatacctagaggccagagctgtgtatatataccagttttcttttgtttttcttctcccctttcatatgctgnttctatgttcctgctctatttgtagttcattttagacaattagtcttgtaataagcctgtgttttcatttgaa

SEQ ID NO: 246353 - DNA, 526 bp, Glycine max
agtctagagggtgtatcctatgctgcagtcgatagctatggcgtacccgttcggaattcccgggtcgacccacgcgtccgcccacgcgtccgcccacgcgtccgcccacgcgttcggctatacttgttccttttgaaggttagaagtgctacaatacaaacaatggcagctactcaggaagatgtgaagcttttgggtattgtgggaagcccatttgtgtgcagggtccagattgcccttaagttgaagggagttgaatacaaatttttggaagaaaatttgggcaacaagagtgatttgcttctcaaatacaaccctgttcacaagaaggttccagtgtttgttcacaatgagaagcccatagcagagtctcttgtgattgtggaatacattgatgagacatggaagaacaaccccatcttaccttgtgatccttaccaaagagtcttggctcgtttctggtccaatttcattgatgataatattgtgggtgctgtatggaaaattgtattcacgggtgatgaaa

SEQ ID NO: 246354 - DNA, 523 bp, Glycine max
  unsure (1)..(523): unsure at all n locations
aggtagaggtgtgtcntatgtgcaagctaagcatgccgtaccggttcggaattcccgggtcgacccacgcgtccgcccacgcgtccgcaaaaggagtgattgttcctcattggtacaagtgtttttaacaaacagcaacagtacagagcattttgatgcatgtaagtggacaaaatcggaaccacattcctgggaattgatcttcccaatagaggtatgtggtcctaataatggttttgaaatgtggagttctgagtgggcaaatcaaacttcatggcatttgagtttccttattgacaatcccaaacagtctacagtttttgatattctcttgggaatttctcaagattttgaaattgctgggaatactcttatgccagctttttctgttccacagggctatgccagatcttctgaaaatgcggaatcctttgcatgatctggaatttgtgctgtctttcgattgcacgttcgattaattcaatatgggaaatttcgattcaacttattgttgaaaggaatt

SEQ ID NO: 246355 - DNA, 533 bp, Glycine max
  unsure (1)..(533): unsure at all n locations
ggttggagaggtcttgtctaatcggaatcgnaactcgtacgcactgccgtaccggtccggaattcccgggtcgacccacgcgtccgcccacgcgtccgggcttctcctcttcttactccttacaagatgggcaaattcaatctgtcccatagagttgttttggcaccgctgaccagacagaggtcttacgacaacgtcccacaaccccatgccatcctctactactcccagagaacttccaacggaggccttctcattactgaagccactggcgtctctgacacggctcaaggctatccgcaaacccctggcatatggactaaagaccatgttcaagcttggaaacccattgtcgatgccgtccacgccaaaggcggtgttttcttctgtcagatttggcacgttggaagagtttcagattcagtttatcagccaaatggacaagcacccatatcttctacggacaagccactcacaccccaaattcgaagtaatggcattgatcaagtacaatttaccccttcaaggagatt

SEQ ID NO: 246356 - DNA, 529 bp, Glycine max
ggaattggggaggacgtgtgttactgaacggacgctgtacgcactgccgtaccggtccggaattcccgggtcgacccacgcgtccgcccacgcgtccgctcagcactatcaaccgcgaattgctcaagccttctgcttccgtcgcgctccaccgccactccaacgcgctcgtcgaggtgctgccgccggaggccgactccagcatctcgctcctcagccagtccgagaagcctgacgtcacttataatgacattggaggatgtgatatccagaaacaggaaatccgtgaggctgtggagctaccccttacacatcatgaactatacaaacaaattggtattgatcctcctcgtggtgttttactgtatggaccccctggcactggcaaaacaatgcttgccaaagctgttgctaatcataccactgccgccttcatcagggttgtaagatctgagtttgtgcaaaagtatcttggtgagggtccacgaatggttcgtgatgtatttcgtctcgctaaagagaatgcgcc

SEQ ID NO: 246357 - DNA, 535 bp, Glycine max
  unsure (1)..(535): unsure at all n locations
agtttagaggtgtgtcagactgtggaacacttagncngtcgtaccggttcggaattcccgggtcgacccacgcgtccggcagaactctgcttcttcggattccgatcgcacgcgccgtcaccatggtgaacgttccgaaaacaaagaagacatactgcaagagtaaggagtgcaggaagcacacgctgcacaaggttacccaatacaagaagggtaaggatagcattgctgcccaaggaaaacgccgttatgatcgcaaacaatccggttatggtggacaaactaagcccgtcttccacaagaaggctaaaaccaccaagaagattgttctgaggttgcaatgccagggttgcaagcatgtctcccaacacgctattaagaggtgcaagcactttgagattggtggtgacaagaagggcaagggaacatcactcttctagtttgagaattaggatttagagncttatgtttcagcaatgttggaatgttttgtttctctctggatttttcttgctagtatatattattatttggg

SEQ ID NO: 246358 - DNA, 340 bp, Glycine max
cggaattcccgggtcgacccacgcgttgcttctccgccccaaaacccggctgcaacttcaactacgtgcggcgtcacgccagacaacaccgtcaccggcaccgccaccagcggcgagctcgcgcaagacgtcgtctgcctccaattcaccaacggttttaaccctatacaaaacgccgccgtttcgcgcttcttattctcctgcgctccaaccttcttactccaaggccttgccaccggtgtcagcggcatggccggtctcggcagaactagaattgctctcccctcgcagctcgcttccgctttcagcttgcgtagaaaattcgccgtctgcctctcat

SEQ ID NO: 246359 - DNA, 527 bp, Glycine max
  unsure (1)..(527): unsure at all n locations
ggttagaggagtgtgtcaatggtggcagctgaccgcatgcacgtaccggtccggaattcccgggtcgacccacgcgtccgtaaaagcaaggctagaacacttgcaagttcgaaagagccatttttatttatcagtcaccgaaacaactatggatacaatcaagtccttcaagggctacggcaaagttgacgagttggagcagcaagcctatcagaagaagacacgtaagcgcctcataataatcacagtctcttcaatcgttctaattgcggtgatcatcgccgctatcgcaggggttgtcatacacaagcgcaacacctcatcatctccctcatccgactcgcccccgcaaactgagttaaccccggccgcgtcactcaanagcggttgcgacgtgactcagtaccctaactcgtgcttctccgcaatctcctcgttaccggattccaacactactgatnccggagctctcttcaagctctctctccgcgtcgccattgacgaaatatcaaagctttgagctttct

SEQ ID NO: 246360 - DNA, 532 bp, Glycine max
cgtttagaggagggcgtgtgtcctgcgacggacgctgtagtcactgccgtaccggtccggaattcccgggtcgacccacgcgtccgcccacgcgtccgcgtagtgcaaatggggtagatgaaagcaaatattggcgtggtggctatggcgactatggtggttggcgtggtggtggttggcgtggtggctatggaggctggcgtggtggctatggtggtgggcgtggtggctatggtggctggcgtggtggctatggtggtgggcgtggtggctacggaggttggggtggtggctttggccctaacgaacataatgaggctgggattgatgctagccctcacaactaagaaggaaacttgctaaagcttatataggatttaagttatcgtaataaataaaacttcattggaagggtagatataatagatgtggagatctttctttgctctggtcatataaaggattaatgcttttatattaatttccttaaataaaaactatatataaaataattgaattattttattagttg

SEQ ID NO: 246361 - DNA, 518 bp, Glycine max
  unsure (1)..(518): unsure at all n locations
cgttagagaggaagtgtatgctgcgacgntagcgtacgcacgcgtaccgtccggattcccgggtcgacccacgcgtccgatacacttgtactgttctattagttcattctaagttctgaaaatgagttccaaggttttgcttgttctacttatgttcttggccactatacttctgatctcctctgaggttgcacccgatgatgcatacgagaattttgacaaaatagatgggaagcctagtgcagatggggtagatgaaagcaagtattggcgtggcggctatggtggcggctatggtggtggttatggaggtgggcgtggaggctatggaggtgggcgtggaggctatggagggggacgtggtggatatggcggcggacgaggtggctatggtggcgggcgtggtggctatggcttgctgcctggtggcggtcgtggtggctatggtcctaatgaacataacgaggctgggtttgagcttacctttacaacttataaggcactttcttaagctaatn

SEQ ID NO: 246362 - DNA, 539 bp, Glycine max
  unsure (1)..(539): unsure at all n locations
gggtatggcttagaggaggaagtgntgttactgacacgtanctcatacgcactgccgtaccggtccggaattcccgggtcgacccacgcgtccgctcaatcctctgtaacttcaaaacatacacctcttctctctgtttctcttcactctctgtctccctccctcttcaactaacatggcaattgaaaaccaagacaccgctgtcagagaaatcaagcccaagaacaggagaatcatgggtgctggagggcctgatgatgaggacaataggtggccaccgtggttgaagccactgctgaaagagagcttctttgttcaatgcaagttgcatgctgattctcacaagagcgaatgcaacatgtattgcttggactgtatgaatggccctctctgctctctctgcctcgcccaccacaaagatcaccgtgcaatccagattaggaggtcctcataccatgatgtgatcagggtctctgagattcagaaggtgttggacatcactggtgtccaaacctacattatcaacagcggcagggtgg

SEQ ID NO: 246363 - DNA, 530 bp, Glycine max
  unsure (1)..(530): unsure at all n locations
agtattggggggacttgtggaatcgtacgntagctattgcatgccgtaccggtctcggattcccgggtcgacccacgcgtccgaaaaaaaaaataaaattaaaaattaaatttaaaaaaaaaaaaaaaaaaaaaaaaagaaagaaaaaaaaaaaaaaaaaaaaaaaaaaaaaaattaaaaaaaaaaaaaaaggggcggccgttttaaaggatccaagtttacttacccttccttgcaacttcataccttttttatagggtcccctaatttcatttcattgcccgtggttttacaacttcgtaactggaaaaaccttggctttccccaatttaatcgctttgcagaaaatccccttttcgccagttggcgtattaccaaaaagccccgaaccgatcgcctttccaaacatttgcccaccctgaatggcaaatggaaccccccctgtaccggcccattaaccgcgtcggttttgttggttacgcccagggtgaccgttacatttgccaaggccctatcgccctttttttttg

SEQ ID NO: 246364 - DNA, 534 bp, Glycine max
  unsure (1)..(534): unsure at all n locations
agttaggagtgtgtctgctgcccttagcatgcagncngtcgtaccggctcggaattcccgggtcgacccacgcgtccgcgcattataaccgaggctgttggtggccaggttgtggagcagtatgtggaggcaactccggttgaggcagggcgaagcagtgcaattaaggagaatgccataacaataggagaggcattggaggcgacggcacagactgtgggtcagaaagcggtggatcagagtgacgcctccgcgattcaggcggcggaggtgagagcaacgggaagtaacgttataacgccgggtggacttgcggctatggctcaatcagctgctgcttataatgctgactgcaagcttgaccaggacaaggtcaagctcgccgacattttggccggagccacagccaagttgcccgcggacaaggccgtcacactgcaagatgctgaaggtgtagcgtgtgctgaggtgaggaacaaccctgatgccaccggcactcccggtggcgtagccgcttctgttgcggctgcttcn

SEQ ID NO: 246365 - DNA, 312 bp, Glycine max
actgttggggagttctattctgtggctttgacgaataactatcagcatgcggataccgggaccaagatgatacacaaagggaagaacacgaagagtaggattatatgcaaaggaatatcggctgggcattccaggaactgttatagaaggcttgttcaagttctgtccaaggctgacaatgcccgaaactcgtcacagtgtgaatctatgcttattggtgacaatgctgctgcaaatacctatccttatatccaggtgaaaaattcaaccgcaagaattgaacatgaaactagtacatactaaattggagaa

SEQ ID NO: 246366 - DNA, 465 bp, Glycine max
accggttcggaattcccgggctctctctctctctctcttgaagtgttggaatttgttttcaacttcccaagggggaaaaaagtcaaaaaacaagaaaaaaaaggggattgtgtttgtgactttttatcgagacaaaatcgagtctttatttataaagtgatatattttgcaattatatgtatgaatatgtaccaattgcaacagtttcatattcaacccatgatgatgaagatggataatacgatgaggaagagggagagaagcaaggccatggagaaagagaggcttcatgtgatggacttgagtggcatgtccttggagtttcttcccaaaccttcgcttgatttagccaccatttgcaagttggacctatctaataacaatctccaggaaattccggaatccttaacggcaagacttctaaacgtggaagtgttggacgtgcgttccaaccagctaaagtcc

SEQ ID NO: 246367 - DNA, 523 bp, Glycine max
  unsure (1)..(523): unsure at all n locations
ggttaggggggtgtcntatctggcactgacagctatgcgaaccgcgtccggaattcccgggtcgacccacgcgtccgtgcagaccgagctagctagctagcaagcaagcacagagatggaggcaaagcgaggccatgccctcatgtgcttggcacgtgtttcactcttcctctgcgctctaaccctatccgctgctcacggaagcaccacggttcaagacatcgcgagaaagttgaaactcggggacaacgagcttctgcgcacggagaagaagttcaaggttttcatggagaattacgggaggagctactccacagaggaagagtatttgcgccgtttggggattttcgcccagaacatggtcagagcggcggagcatcaagcgctggaccccaccgncgttcacggcgtcacgcagttcttcgatctcaccgaggaccagtttgaaaagctctacactggcgtcaatggcggcttcccgtcatcgaataatggccgccggggtatttgcccggcctttgag

SEQ ID NO: 246368 - DNA, 522 bp, Glycine max
  unsure (1)..(522): unsure at all n locations
agttaggggtgtgtcatatgctacgcctcagcatgccgtaccggttcggaattcccgggtcgacccacgcgtccgcccacgcgtccgcccacgcgtccgcggactcgtgggtccacccaatgatgctgttttcagtagcgatgcagagccatatgtaaaacccataatagacttcctagtgagaaatgaggcgccacttcttgccaatgtgtacccttactttgcttatgcgaatgatcaacaaaacagtattcctcttgcctatgctctttttacccaacaaggaaacaacgacgctgggtaccaaaacctcttcgatgctatgttggattcaatatacgctgcagtggagaaagtgggagcatccaatttgcagatagtggtttctgagagtgggtggccatctgaaggtggtggaactggagcatcaatcgataatgcatgcacttacaatgctaatttgattagtcatgccttgggtgggagtgggactccaaagaggcctggngggtctataaagac

SEQ ID NO: 246369 - DNA, 537 bp, Glycine max
  unsure (1)..(537): unsure at all n locations
agttataggagggggnacgcangtggatcgagcacttaggccctcagtcactgccgtaccggtccggaattcccgggtcgacccacgcgtccgaaactaacaaacaaatcccagggagccactcaaccatggcttccaagctctgcgactcatgcaaatcagccactgctaccttgtactgccgccccgacgcggccttcctctgcggcgcctgtgactctaaggttcatgccgccaacaagctcgcatcgcgccacccgcgctcgtgctctgcgaggtgtgcgagcaggcgcccgcgcatgtgacctgtaaagccgacgccgccgcgctctgccttgcctgcgatcgcgatatccactccgccaaccccctcgccagccgccacgagcgcatccccgtcacgccgttcttcgagtccgtacattcagtcaaggcctnctcgccgatcaacttccaccaccgcttcttctccgacgccgacgctgatgctgacgtcagcaccgaggaggccgaggccgcgtcatggctgctacctaa

SEQ ID NO: 246370 - DNA, 532 bp, Glycine max
  unsure (1)..(532): unsure at all n locations
agttctagaggggganttancggttgaagcttagctcatacgcactgtcgtaccggtctcggaattcccgggtcgacccacgcgtccgcccacgcgtccgcccacgcgtccgaaatacttcccttacccccccctctctctctctcggaaaacaaacgaacaaacaaatatgcaagtggcggcagaactccaacgcgcccatcaccaccaccaaaggcacaaacaagacactcccatgtgccgccaaatccagctcactatctccgatcacaccaccgccggagacgacgacggcgaggatctcttcattccgcccctcaacttcgccatggttgataatggcattttccgctccggcttccccgaacccgccaacttctccttcctccaaaccctcggcctccgttccatcatatatctgtgtcctgagccgtatccggaggccaatatggagttcctcaagtcaaatgggatcaagctttttcagtttgggattgagggtcataaggagccttttgtgaacatcccagag

SEQ ID NO: 246371 - DNA, 533 bp, Glycine max
  unsure (1)..(533): unsure at all n locations
agtcaggagtgtgtcngatcatggaacatgcagnctngtcgtaccggtccggaattcccgggtcgacccacgcgtccgcagaggtgaagcttcatggattttggtatagtccctacactttgagggtggtatggaccttaaagttaaaggatataccatatcaaaacatagaagaagaccgctacaataagagtcttcaacttcttgaatacaacccagtatacaagaaaactccagtgcttgtccataatggaaaacccttatgtgagtccatgcttattgttgaatacattgatgagatttggtcacataattcattacttcctgctgatccctacgagagagctctggcaaggttttgggttaaatatgctgatgatgacatgttttctgcagttattgcattcttccttagcaataatgatgaagagcgagaaaagagcatagagaagatatgggagcatctcaggggtgttgagaatcagtgttttggtgatcagaagaaattttttgggggagacattattaacatn

SEQ ID NO: 246372 - DNA, 532 bp, Glycine max
  unsure (1)..(532): unsure at all n locations
agttggtagtgtctcngctgatgatcactcagncngtcgtaccggttcggattcccgggtcgacccacgcgtccgggcaccttggtccttctatgattcagcatatgcagtatccttgcaatgagtgtaagggtactggagagacaatcaatgacagagacaggtgccaacagtgcaagggagagaaggttgttcaggagaagaaagtacttgaagttgttgtggagaagggaatgcagaatggacagaagattacattccctggtgaagctgatgaagcgcctgatacagtcacaggggatattgtctttgtcctacaacagaaggaacacccaaagttcaaacgaaaggcagatgacctttttgtagaacacacattgtctcttactgaggctctatgtggcttccagtttgtgctgactcacctggatagcaggcagcttctgatcaaatcaaaccctggggaggttgttaagcctgagtcattcaaggcaataaatgatgagggaatgccaaactaccagaggcactn

SEQ ID NO: 246373 - DNA, 534 bp, Glycine max
  unsure (1)..(534): unsure at all n locations
agtntagaggtgtctcntctgctagtncacttcgtctgccgtaccggtccggaattcccgggtcgacccacgcgtccgggtgtatcagaatggcaacgatcagcgctgttcatgtggagttcctggagtttccagcggtggttacttcaccagcctccggcaagacctatttcctcgtcggcgcaggggagagaggattgacgattgaggggaagttcataaagttcacaggcataggagtatacttggaggataaggcggtgccatcactcgccgctaagtggaagggtaaaacttcagaggagttagttcacaccctccacttctacagggatatcatttcagggccgtttgaaaagctaattagagggtcgaagattctgccattggctggcgctgaatactcaaagaaggtgatggaaaactgcgtggcacacatgaagtctgttgggacttacggtgatgctgaagccgcagccattgaaaagtttgctgaagccttcaagaatgtgaattttgcacctggtgcccttg

SEQ ID NO: 246374 - DNA, 526 bp, Glycine max
gggattgtaggagtgagtggtaggtcggcactgcagctcatagcgaccgcttcggaattcccgggtcgacccacgcgtccgatatgcttgtctcaaagattaagccatgcatgtgtaagtatgaactaattcagactgtgaaactgcgaatggctcattaaatcagttatagtttgtttgatggtatctactactcggataaccgtagtaattctagagctaatacgtgcaacaaaccccgacttctggaagggatgcatttattagataaaaggtcaacacaggctctgcctgttgctttgatgattcatgataactcgtcggatcgcacggcctttgtgccggcgacgcatcattcaaatttctgccctatcaactttcgatggtaggatagtggcctaccatggtggtgacgggtgacggagaattagggttcgattccggagaaggagcctgaaaaacggctaccacatccaaggaaagcaagcagcgcgcaaattacccaatcctgacacggggaggtagg

SEQ ID NO: 246375 - DNA, 534 bp, Glycine max
ggttacggttggagggggacgtgtgttctgatttatgtcctaccgcactgccgtaccggtccggaattcccgggtcgacccacgcgtccgcccacgcgtccggtggattctgaggatcttcctctcaacatttctagagaaatgctgcagcagaacaagatcctgaaagtcatcaggaagaacttggtcaagaagtgcattgagatgttctttgaaattgctgagaacaaggaagactataacaagttttatgaagccttctctaagaatctgaaacttggtattcatgaggattctcagaacaagacaaaacttgctgaattgctcaggtatcactccaccaagagtggtgatgagatgaccagcctcaaggactatgttaccaggatgaaggaaaggcagaatgacatctactacattactggtgaaagcaggaaagctgttgagaattcccctttccttgaaaagcttaagaagaaggggttcgaggttctctacatggttgatgctattgacgagtatgctgttggtcag

SEQ ID NO: 246376 - DNA, 527 bp, Glycine max
  unsure (1)..(527): unsure at all n locations
agtttaggggagtaattntgctcgattagtatccctaagtcactgccgtaccggtccggaattcccgggtcgacccacgcgtccgcccacgcgtccgcccacgcgtccgcccacgcgtccgcccacgcgtccggcaaaagtgatatatcgagacttcaaagcttcaaatatcttacttgattcgaattacaatgcaaaactttctgattttggcttggcaaaggatggaccagctggtgataagagccatgtctctacaagggtaatgggcacatatggctatgctgctcctgaatatatggccacaggtcacttgacaaagaagagtgatgtatacagcttcggggttgttctgcttgaaattatgtccggcaaacgtgcacttgacagcaacaggccaagtggggagcacaatttaattgaatgggccaaaccttacctcagcaacaagcgcaggatcttccaagtcatggatgcgcgcattgaaggccaatacacgttgcgcgaatcaatgaaagtagccaacc

SEQ ID NO: 246377 - DNA, 507 bp, Glycine max
gaatagaaactgatactctcgtatgccgtaccggtctcggaattcccgggtcgacccacgcgtccgatttggctaagcaagcttttgatgaggcaattgcggagttggacaccctgagtgaagagtcatacaaggacagcactttgatcatgcagctgttgagagacaacctgactctctggacctctgatttgcctgaggatggaggtgaggacagcataaaagctgaagaaaccaaaccttctgagcctgagcattgatgtgattcaatagtcagaaatctaaggtactctcaaagaggacattttctagcaatggatttggacccggacaatagggactgtggttggtggccatttcataattcttatgctctttaatatctttacccaagctagaagatctgacccttttttttttcttcaaacttttttcctattacccttctctccggtttaaagtaaaaggtcaagttagccattgaccatttaccatttaccctattaa

SEQ ID NO: 246378 - DNA, 534 bp, Glycine max
  unsure (1)..(534): unsure at all n locations
ggggtaggggtgtgtcnacttatgagccctaagncatgccgtaccggtccggaattcccgggtcgacccacgcgtccgccgtgaatcgataagcaaccaaaccgacgtggccctgagcatctcaaagctcctgttgtcgaaagaagctcgggacaagaacctcgtgtattcgccgctgtcgttgcacgttgttctgagcatcatcgccgctggctccaagggccccacactcgatcagcttctctccttcctccgatccaaatccaccgatcatctcaactccttcgcctctcagctcttcgccgtcgtgctctccgacgcctctcccgccggcgggcctcgcctctccttcgccgacggcgtgtgggttgagcaatccctctcgcttctcccttccttcaaacaacttgtcagtgctgattacaaggccactttggcttcagttgatttccagaccaaggctgttgaagtggccaatgaagttaattcatgggctgaaaaggagacaaatggacttgttaaagaccttcttcn

SEQ ID NO: 246379 - DNA, 537 bp, Glycine max
  unsure (1)..(537): unsure at all n locations
aggttgtaggtgtgtgtgccgaatggaagacttagcgctgtcgtaccggtccggaattcccgggtcgacccacgcgtccgccggtgtctgcggtgttggttccatagtaagggccaccgatgttcccatgttgcctaccagtgtcaccggcatagccaccagtagtcccatgttgttgcctatcggtgtctataccatagacaccggtagttccatgatgtctattggtgtcatcattatagccaccagtagttccatgatgtttattagtgtcaccatcgtagccaccactagaatgctgtctaccagtgtctacgccgtaggcattggtggtatcatgttgcttattaatgtcatcactgtaaccaccagcagcagttctggtggctacataggtgacactagcagcatgaacagggttgccgtattcgtcggtttgcttctcaacgttgccatactcgtcaaccttgcgaccctgatcatcgtagtgcttttgataacttgccatagttgntgntgtttttgattggtaagaan

SEQ ID NO: 246380 - DNA, 531 bp, Glycine max
tgggggatgtgtgtagacgctgtagcgtagcatgccgtaccggtccggaattcccgggtcgacccacgcgtccggatcttttgactttgccttcattgatgctgtacaaggagaactatgtgaactaccatgagaggcttataaagctggtcaagattggggggttgcttgtgtatgacaacagactgtggggtggacgtgtttgctggcctgaagacaaagttccaccacacgctggatcagggagggacgctgcaattgaatttaacataacaatcacaaacgattctcgtggtgaatttgctcttacttccgtaggggatgggctcgatatttgtaggcgcgttgcttgactgtagtgtgaatggtctagtatcggataatgtggttttcttttatgcgcctggataaacattgggtgtggtggtgctgggggaaaagaggggggagggtgggagagatgggctggtcgtttttaaggatccaagcttacgtacgcgtgcatgcgaagtcatagctcttgtatattga

SEQ ID NO: 246381 - DNA, 546 bp, Glycine max
  unsure (1)..(546): unsure at all n locations
ggttaggggtggatatatagtagaagctggatgcgcncgcactgctcgtaccggtccggaattcccgggtcgacccacgcgtccgtattcttccatttccattaaaaagaaaatttcataaatgggtattttcacattcgaggacgaaatcacctcccctgtggctcctgctactctttacaaagctctagttacagatgccgacagcatcatcccagaggctcttgattccttcaagagtgttgaaaacgttgagggaaatggtggccctggaacaatcaggaagataactttcgttgaggatggagaaaccaagtttgtactgcacaagatagaagcagttgatgaggcaaacttgggatatagctacagcgtagtggatggtgctgcgttgccagacacagcggagaagagcacattccactccaaattggctgctgagtccaatggaggctctgctgggaagctgatggcgaataccaaaccaaaggagatgctcaggccaaccaagaccaactcaaaactggaaaagccaaggctgatgct

SEQ ID NO: 246382 - DNA, 296 bp, Glycine max
gggtcgacccacgcgtcccatctgccccactgaatcaccacacctcttttcgatttcgctacccctttctgctctactggtaccggtcaagttttaaaggggtaaagatggcagatacaatcctatttaccttatagtcgatgaacgatggacaccctgacaagctactgcgaccaaatcttcaatgctgtactctacgcttgcctcgagcaggacccagacagcaaagttgactgcgaaacatgcaccatacccaacttgctcatggtcttcgagaaatcactactcaagccaac

SEQ ID NO: 246383 - DNA, 531 bp, Glycine max
  unsure (1)..(531): unsure at all n locations
ggtagttagaggcgtgtgcgaatgaancatgatactataggacgccgtaccggttcggaattcccgggtcgacccacgcgtccgcccacgcgtccggaaatttcagcgcagcaagaggtctgttgccgaggagcgagctggaaggaagttgggtggcctcagggttctcaattcatactgggtgaatgaggactcgacttacaaatattttgaggtcattctggtggatgttgcccacagcgctgttagaaatgatccaagaatcaactggctctgcaacccagtccataaacacagggaactgcgtggcctcacttctgctgggaaaagtaacaggggtttacggggcagaggacatctctaccacanaaatcgtccatcccgcagggcaacctggaagagaaacaacactctntcccttcgtcgctaccgttgattntgttgcagttatcggatgttgcttcattttccaagtatttggagtgcaatatatgtagactttaggaaatcggcagttttgacgcttgaata

SEQ ID NO: 246384 - DNA, 549 bp, Glycine max
  unsure (1)..(549): unsure at all n locations
gtttagtttggaggagggtgtgtgatgatcatgagctctncgcactgtcgtaccggtccggaattcccgggtcgacccacgcgtccgcacacacacacagacccacagacccacacttaacacatgcacctaaccacacttggttaatctcttcttcaaggcactatgtaataactggcatttctcgaatgttctgtatgtgattggatccattaaaaggttttttgagtctaaagttattatgtaagtggacaaaaaaaaaaaaaaaaaaaaaaaaaaaaaaaaaaaaaaaaaaaaaaaaaaaaaaaaaaaaaaaaaaaaaaaaaaaaaaaaaaaaaaaaaaaaaaaaaataaaatataaaaaaaaaaaaacaaaaaaagaaataacaaaaaaataatgtaccctaaaattaaattaaatagcacctatatttaacaacatttaaactggaaaaacctaatacattgccaaactaatttagcatgcaagcaaattggctttatatcatttgcctaaaaaatcataaggcataaatggattggcttttt

SEQ ID NO: 246385 - DNA, 548 bp, Glycine max
agtatagatggtgtatagtgtgataggaacatgaatgctgtacgcctgcacgtaccggtccggaattcccgggtcgacccacgcgtccggtgattatgttcaatggattggctgaactttccatggtcgtttcacggcttcctgttttctacaagcaaagggactatctcttcttcccttcatgggtatatgcacttcctgcatggatcctaaaaatccccttgacttttgtggaagtgggtgtttgggtattccttacctactatgccattggttttgatccatatgttggaagattgtttaggcaataccttgttcttgtactagtaaatcaaatggcatctgcatttggccgaatagatgcagcaaactggaaggagaatacagtgggtctaacacatgggtcgtttacacttgccctactatatgctatgagaggggatgttctattataagaaaattttataaaaataggggctttggggctttagaagctacctatgatgtatgtcaacaagccccggtgaaaaatgaggtccttgggagag

SEQ ID NO: 246386 - DNA, 556 bp, Glycine max
  unsure (1)..(556): unsure at all n locations
ntaatgtgatgttaggtatagagatgatcgnannctcgtaagctcgtacgcctgcagtaccggtccggaattcccgggtcgacccacgcgtccgagcacgcattcgattacatgagctcagatgttgtcaccgttgacatctgtgtgtacgactaggagcttatggcatgatttcgttgaagtgtaaagtacggtgctggaatctgccatggagagtatgacttccactgtggatgcttacaatgaactgaaaagatcgatgacagaatctacttgacgatgtcatagctcgagaagaacatttatgaaacataccatggctgatgactctagaccaataggatcactgatgtgtacactgaacctctaaacatatatgccatgagtcatctctttcatagcgtacttgtcaagtgaatggcatacgattgtggaatctgactggtcatttggtcatgactaatattataatacaccaatcttataattaactatatattgcactgcatcaataacatacgtgtggaatagttacatgtctaagcatgctctgtga

SEQ ID NO: 246387 - DNA, 541 bp, Glycine max
tgttgtggaggagggtttgtcgatcgatgcattatgctcgtacgcactgccgtaccggtccggaattcccgggtcgacccacgcgtccgcccacgcgtccgacttcacatatatgatttacatgaaatggtgttcggtgatgctatgcttatcactagcgttccttcttggggccacagcatatcaatgtggcacacaagctggtggagcgttatgcccaaatagattatgttgcagcaaatttgggtggtgtggtgacacagattcctactgtggagaaggttgccagagccaatgcagatctgcaacaccctcaacaccaactccaacaacacctagtagtggtggagatattagcagactcattagctcttgtctctttgatcaaatgcttaaataccgaaacgatggccgatgatctggccatggattctacagatatgatgctttcattgacgctgctggctctttcaatggctttggcacaaccggtgatgacaacactcacaagaaggagattgctgctttcttggctcacact

SEQ ID NO: 246388 - DNA, 541 bp, Glycine max
  unsure (1)..(541): unsure at all n locations
ggttagtnanngagggaggtgttgtgtttgagctcgtagcctancgcactgccgtaccggtccggaattcccgggtcgacccacgcgtccgatcactctagctgttgcaaatttctactatttttcaatggcttctgcagatgttgagttccgttgctttgttggtgggcttgcttgggtcaccggcaacgatgccctcgagaaagccttttcaatctacggcgacatcgttgaatcgaaggttatcaacgaccgtgagactggaaggtccagaggattcggatttgtgaccttcgcctcagagcagtcaatgaaagatgcgatcgcaggaatgaacggccaggaccttgacggccgtaacatcactgtcaacgaagctcagacccgcgccagccgtggtggtggtggaggcggtggtttcggaagtggtggtggatacaaccgcggtagcggtggatatggtggtggtggtggcggcggctgatacggtggtcgtcgtgaaggtggatacaaccggaatggttgnggtggaggttgaaag

SEQ ID NO: 246389 - DNA, 545 bp, Glycine max
  unsure (1)..(545): unsure at all n locations
gtatatagtatagagaggggtgttanatttggaagatggtacgcctgtggtaccggtccggaattcccgggtcgacccacgcgttcgcgccgttgccgacacctcctccgcgtatccttccattcccggcacggaaaccggtgagtgctccctccgcggcgtgggcgtgggcgacggtgttctggttcctccacggcgagaagtatacgatgaggggcgaatcttcgacatcactcacagatatgtccccgagatgccggtgtgggactcgacggaggggctcgagcaacacttcctgtggctcgataagagcatgaagaatggctcgctcgctaacagctctaacatggagctcggtgttcacaccggcacccatgttgactcgcccggtcacttttacgacaattactacgacgctggcttcgacgttgactcactcgacctaacgctgctcaatggccttgcacttctggttgatgttccgcgggataaaaacattactgctgaggttatgaggtccctgaatatccctagaggtgtaaggc

SEQ ID NO: 246390 - DNA, 550 bp, Glycine max
agttttagttagataagaatgtggtggtagaaatttggaagccggtacgcctgcagtaccggtccggaattcccgggtcgacccacgcgtccggtgaaaataacagcaaaaagtagcagctgctgcagctcccccgaagcttatctcagcagcagatactcaaccctgtttgagtagccgagaataacaccaatgggagaggaggaaaagaaaccagaggaacaacccaaggcagaggagaaaaaaccagaggaagagaagaagaaagaagaagcagcagcagcggaaaaaccaagcgaagagaaaaaaccggaacaagagtcgaaagaggaagttgctgctccgccaccgccaccgtcaccggccgagattgtgctcaaagtgttcatgcattgcgagggttgcgctcgcaaggttcgtcgctccctcaaaggattcccaggtgtcgacgatggtgtcaccgattgcaaatctcacaaggtggtcgttaagggagagaaagcggatccgttgaaggttttggagagaatacagaggatgagtcacagac

SEQ ID NO: 246391 - DNA, 539 bp, Glycine max
gggggggatagtgttgatagactttgaagctgtacgcctgcagtaccggtccggaattcccgggtcgacccacgcgtccgctcacccattttcttcgtagccaaacactctgaaattctcagttatgtcgtggcaagcgtatgtggatgatcacctactgtgtgaaatcgaaggtaaccacctcactcacgccgctatcatcggccaagacggaagcgtttgggctcagagcaccaacttccctcagttcaaacctgaggaaataactgccatcaataatgactttaatgagcctggatcacttgctccaactggattgtatatcggtggcaccaaatacatggtcatccagggtgagcctggtgctgtcattcgagggaagaagggtcctggtggtgttactgtgaagaagaccggtgcggccttgatcattggcatttatgatgaaccaatgacttcaggtcaatgcaacatggtagttgaaagggctttggcgatatctcattgatcaaggtctctaatctttgctttatgtcttg

SEQ ID NO: 246392 - DNA, 390 bp, Glycine max
gaattggaaatctaggatgctatgcttatcacttgcagtgcttactgaggctctcagacgatctacgtgacacacacactgattgagcgttatccctaaaatgatgtgttgcaacatatttagtacggtgtggtgacacagattgctactgaggacagagttgacagagccaattagatctgcataccttaaacaccaacttcaacatcacctaaatgcggtggtgagattatcagattcatcatctctagtctatttgatcaaatgcttaaataccgagacgatggcctatgatctgaccatggatactacagatatcatgattgcattgaccctggaggatctttcaatagctttggcacatctgcagatgacaacactcataggaac

SEQ ID NO: 246393 - DNA, 537 bp, Glycine max
  unsure (1)..(537): unsure at all n locations
ggtagtntnaaggtagattgtcctcgaanaatgaggctgtacgcctgccgtaccggtccggaattcccgggtcgacccacgcgtccgtgctttctctgtctggcaaagtgcaccatttacgatggttggatttgttcctcgaatgcactggctggataaggagcaaaataatgctgcatattacaggtatggaggatggtggtctgtttggtggatgggcacttatagcatggttctctcaaaggctgcattctttcacaggaaatacttggatttatatactcatgagatgtctccatcaattcaggactatgtttccagggagagaacttgtgaagacattgcaatgtccctttatgttgctaatgctacaagtggtcctccaatatgggtgaaaggcaaaatctatgagattggtgcatcgggtattagcagtctgagagggcatagcaacaggagaaacaaatgtctcaatgacttgatatcactatacggaactcttccacttgtgtcaactaatgtgaaagcaggtagtgc

SEQ ID NO: 246394 - DNA, 541 bp, Glycine max
  unsure (1)..(541): unsure at all n locations
agtttagtgagaggtatgtgntgatcgatgcatggacctcgtacgcactgccgtaccggtccggaattcccgggtcgacccacgcgtccgcacattagttcagtctctaagtgcagcttcctacctatccttacaagatgcagatcttcgccaagaccctcaccggaaagaccatcacccatgaggtggaaagctctgacaccatcgacaacgtcaaggccaagatccaggacaaggaaggaattccgccggatcagcaacgtgtcatcttctccggaaagcatctcgaggacagacgtaccctcgccgactacaacatccagacggagtcaacccttcaccttgtccttcgtctccgtggtggcatgcagaccttagtcaagactctcactggcaaaaccataaccctagaggtcgaaagctctgacaccattgacaacgtcaaggccaagatccacgacaaggagggaatccctccagaccagcaacgtcttatcttcgacggatagcaacttgaggactgatgcaaactcggctacta

SEQ ID NO: 246395 - DNA, 544 bp, Glycine max
gattaagtagtggtggagtaataaaataggatgccggtacgcctgcagtaccggtccggaattcccgggtcgacccacgcgtccgctctcatgtcatcggatcgatcaagcatcttggagctttgagggttgattctctggtgtagtagcaatcagcacaatggaagatgttttttgacggatatggatatcatgggacatcatttgagcagatatatcggtgctacccagcttcctttattgaaaagccccaaatcgaaagtggtgacaaaattatcatgcctccatcagcccttgaccgtctagcatctctgcatattgatgtcccaatgttgtgtgaacttcgtaatgatgctgacgagcgggttgctcattgtgggggtctagagttcattgctgaggaaggcaggatatacatgccatactggatgatggtgaacatgctttgacaagagggggacattgtcaaattggaaaatggtacactttcaaaggggacatatgttaagttacagccccacacaaaagactttttgggtattag

SEQ ID NO: 246396 - DNA, 539 bp, Glycine max
  unsure (1)..(539): unsure at all n locations
ggtattgattgtgagtggttattgaaagtgtacgcctgcagtaccggtccggaattcccgggtcgacccacgcgtccgcggacgcgtgggtttcgattgaacgtagtccgccgattgaggaggttatacagactggtgtggtttctcgctttgttgagtttctcatgagggaagactttccacagttgcaagttgaggcatcctgggctttgacaaatatagcttctgggacgtctgaaaacaccaaggttgtcattgatcacggtgctttcccaattgtcgtgatgctacttgcttctcctagtgatgatgtccgtgaacaggcagtgtgagcattatgcaatgtcgcgggtgattcacctagatgtcgtgatcgtgttctcagtcatggggctttgcttcctgtgtagcacaattaaatgaacatgccaagctttctatggttagaaatgcttcctgggcactttctnacttttgcatgggcaagccacagccttctttttgatcaggtaaacctgcacttcttgttttgccctttg

SEQ ID NO: 246397 - DNA, 541 bp, Glycine max
agaaagtagagtgaagatagagtttgtatgccgtacgcctgcagtaccggtccggaattcccgggtcgacccacgcgtccggaattttatgcaagcaagcactctgtgaatgtaaagaaggaagctggtgtgcttcctgtcataaatgttgacatgggcacagtccagctgactagaactaatggagagaccactaataaatgcctaaattggctctatcagcattgtacccattactacgaagctgttgcacattgtgccaaatggcgtgcagaagtgaagatcggtgctaactagccatatgatctgactatgcatgagaacgcctattgattgagtaagaacgctttcatatgctcaggagaatggcacagtttccaatgttgagcctgagatccttgttgatcgtcctcatgacattcacaatgttgccgaggacaccgaacgtgtttgtgcatcattgctcaagagtttgaatgatcaccatgtccttatttgaggtactctattggatccaaacatggtcaccactggatccata

SEQ ID NO: 246398 - DNA, 548 bp, Glycine max
  unsure (1)..(548): unsure at all n locations
tgttataggagtgagatatgtggtgatanganatagtaagccggtacgcctgcagtaccggtccggaattcccgggtcgacccacgcgtccggtccatccaaaccttaaaaagattcagtgtagaacaacgttaatggcatctcttggtgtgcaagcagttcatcctgctccattaacatccacctccgacccacctactctttttgatggcaccaccaggttgtacatcagttattcttgcccctatgcacaacgtgtatggatcgctcggaacttcaagggactaaaagacaagatcaatttggtccctataaaccttcaagacaggccagctttggataaggagaaagtctacccttgaaataaggtgcaatccttggagcacaatggcagggtgttgggagaaagtcttganttgatcaaatatgtagatgaaaacctttgaaggtgcacttttgtttccaaaaattcctgccaagaaggatttcggagagcaattgatatcccatgtggatacattcaacaagagacctgttcgtttcattta

SEQ ID NO: 246399 - DNA, 547 bp, Glycine max
  unsure (1)..(547): unsure at all n locations
ggaggaaggggttgtgtatgttaggacatagaaagcctgtacgcctgcacgtaccggtccggaattcccgggtcgacccacgcgtccgcccacgcgtccgcccaactcgccctcgactcacatccttgtccgattccgcgaacgagtcgagtgaatcgggttggtaagatctattctgtttcttcgtcatggcaaccggacaactattctcgcgtactacacaggctttgttttacaactacaagcaacttcccatccagcggatgcttgattttgacttcctttgcggcagggaaacaccatcagttgctggaataattaaccctggttctgagggatttcaaaaacttttttttggtcaggaggaaattgccatcccagtgcatgctaccgttgaagcagcttgtgctgcacatcctactgccgatgtcttcatcaactttgcttcatttagaagtgctgcagcatcatccatggctgctttaaaacagccaacaattagagttgttgctattattgctgaaggagtacccgagtcagacactan

SEQ ID NO: 246400 - DNA, 535 bp, Glycine max
  unsure (1)..(535): unsure at all n locations
agttagtaggtgtgtgcgccgatgatntatgtagctgtccgcctgcacgtaccggtccggaattcccgggtcgacccacgcgtccgctcagattccggtcactcctctcgccggcgatcccttattcctccgtcctccgtcgagtcctttccgattcgaatcgttcccagccttgtgccaccatgaatcccgaatacgattatttgttcaagcttttgctgattggagattctggtgtaggcaagtcatgtcttctcctgaggtttgctgatgattcataccttgacagctatatcagtaccattggagtggactttaaaatccgcactgtggagcaggatgggaagactattaaacttcaaatttgggacactgcgggtcaggaacgtttccggacaatcactagcagctactatcgtggggctcatggcattattgttgtttatgatgtcactgaccaagagagcttcaacaatgttaagcagtggctgaatgaaattgaccgttatgcaagtgaaaatgttaacaagcttct

SEQ ID NO: 246401 - DNA, 540 bp, Glycine max
  unsure (1)..(540): unsure at all n locations
tggttagtagttagagtattgtgtgatgancatggaactcgtacgcacgccgtaccggtccggaattcccgggtcgacccacgcgtccgcccacgcgtccgcccacgcgttcgggttaaccatgaagtttatgtatcttgcattcctacttctatttgttttctctagccaattcttgcttggaggagcagatgcttcccccagacaagtgattgacacagaaggcaagaaagttcgagctggcgtagattactatatccgaccggtcccaacaaccccatgtgatgggcgtgggccgtgtgtggttggaagtggctatgttctcatagcaaggtcatccaaccacacttgccctcttagtgttgcggtggtggagggtttccgtggcctagcagtcacattcaaactagttaaccctaaaaaaggggtcattagggtttctactgacttgaacatcaaaacctccctaactaacacaagttgtagtgagtccacggtctggaagctagatgcctttgatgattcaactggacagtggtn

SEQ ID NO: 246402 - DNA, 553 bp, Glycine max
gattatagaatgtgtgtagtgacgaacatcgtaagcctgtacgcctgcacgtaccggtccggaattcccgggtcgacccacgcgtccgctagaagtattattattcttccatttccattaaaaagaaaatatcataaatgggtattttcacattcgaggacgaaatcacctcccctgtggctcctgctactctttacaaagctctagttacagatgccgacaacatcatcccaaaggctcttgattccttcaagagtgttgaaaacgttgagggaaatggtggccctggaacaatcaagaagataactttcgttgaggatggagaaaccaagtttgtactgcacaagatagaagcagctgatgaggcaaacttgggatatagctacagcgtaatgggtggtgctgcgttgccagacacagcggagaagatcacattccactccaaattggctgctggtcccaatggaggctctgctggcaagctcactgtcgaataccaaaccaaaagagatgctcagcccaaccaagaccaactcaaaacttgaaaaagcca

SEQ ID NO: 246403 - DNA, 541 bp, Glycine max
ggttatgaatgagggaagtgtaaaaatagaaagctgtacgcctgcagtaccggtccggaattcccgggtcgacccacgcgtccgctcacgcgtccggtcttggtaagatcaatttggctcacgatgaagtcagatctagggtgtcaagagctttgcatgctgtaagcctgtctgactacatgaaggtattaaggatgacaaccttgagcactcatacaaatgtgtgaattatacaataaatgaactgtccttctgtgacaatattcacagatctgtccaaactctgagtggcggtcagaagcagagggatgccattgctggtgctcttgcttaagcttgtaaagttctggagtcggatgagctcacaacatacttagatgaagctgaccaggttgcggtcatcaaagctgtgaggaactcattggatacctttgcagaaggtacagcattatgattcacccatcgcttggataaactggagtatgcaaatggtgccatctacatggaggatgggaaagtaaccatgcatggagatgccagt

SEQ ID NO: 246404 - DNA, 546 bp, Glycine max
ggattagttgtgtggagtagaaccatagaaaactgtacgcctgcagtaccggtccggaattcccgggtcgacccacgcgtccgaatttgtgcgctgggctctgcaacctactggttatttcaagagttggcatattggtgtccgtgttaaaagttccaaaaagatggttgcctttataacaggtgttcctgctagaatccgagttcatgatgaggttgttcatatggcagagatcaattttctgtgtgtccataaaaagcttctaacaaagaggcttgctcctgtcatgatcaaagaggtcaccaggaaggtgcatctggaaaatatgtggcaggcagcctacactgccggagtagttctttctacacctatagcaacttgtcaatactggcacagatctttgaatcccaagaagctaactgatgttggtttttctcggcttggtgcacgaatgacaatgagtcgaaccatcaagctttacaagctaccagaatcaacaatcaccccagggtttaggaagatggaaattcatgatgtttctgcaat

SEQ ID NO: 246405 - DNA, 547 bp, Glycine max
  unsure (1)..(547): unsure at all n locations
tgattagttagtaagtagtgagaaaattagaaaatagtaagccggtacgcctgcaggtaccggtccggaattcccgggtcgacccacgcgtccgttttctctctctctctctctctctctctctctctctcatcattacttgcgcatatactagaacatgccattcctagaactgacatgagtatcttcatgtgtagctggatggtctttttaactcatggtgtgaatcttggaggaggaagatgtggttgaaaacatctgttggatcatatgagtgaatgtgtatgctcttacggtgttaaacatgtagatatagggtaagataaatacctgcattgtatgtatatttggaagggttatattagaggaaataaggctcgtttctgtgagtcttgctaactaatgtgttatgctgantattatgcaatcaattttataatctatttattatagtatcatgtataacattattttacgcagttatacttcaagttactcaacttaatataatagttaatatttggtatatatgtaattcaaaagataa

SEQ ID NO: 246406 - DNA, 532 bp, Glycine max
cggagtaatggttgtttgaacatgtaagctgtacgcctgccgtaccggtccggaattcccgggtcgacccacgcgtccgcccacgcgtccggtttaattcaaagacacttattccatttgacattagaggccgtgttcgaatacttcatcctccagttatgacttgtttcccattctcatttggtaagaaagtgcgctttgtggcaacacatgatccagatattgatgaagtactctcaggcattcaaaatgtaagaatctatacctacaaagaactaaaagttgcctctgacaatttcagtccggccaataaaattgggcagggtggatttggttcagtttataagtgaaaccttaacaatattatggtggatgatcagggactgctaaaagatgggaaagtagctgccataaaagtactttcagcagaatcaagtcaaggggtaaaggaatttatgacagagattaatgtaatctcagaaatagagcatgaaaatttggtaagctatatggttgttgtgtggaaagtaat

SEQ ID NO: 246407 - DNA, 539 bp, Glycine max
agatggtaggtgtatgtgtcgatcgagcatgaggctgtacgcctgcagtaccggtccggaattcccgggtcgacccacgcgtccgacggcacgtgcagcgcgatactcagccttcggaacacgctactgctgtatcacagttaccgattgaattacccacacgctactatgtcgacattgggcttcttctttcctggacattgactttgaccttgcttcgtcctacgatggccactgttctgcacccattatgattcagatgactagctgaagctaactagatcctcctccatctacagatccactatcaaatgcttgactcaatatcctctttattcactagttgacaactcccataactatctcgagagcttacacgaaggggaacgtcattcctctcttatgctgcatagtctacgatcacctcactcagatgcttgcgtaccgctccctgattaaggaggacgagagagatgctcccagtcagatcttcgaatcggtagagccaggccatatgtctatcatcggacggttcaggg

SEQ ID NO: 246408 - DNA, 539 bp, Glycine max
agttttagggtagtattgtgtgatcgaaacattatgctcgtacgcactgccgtaccggtccggaattcccgggtcgacccacgcgtccggctaatcttagccacagttctgcaggcattttttgattctgtgggccttctgctcagaggcaatgtagacaagaaggaagcactagagaacttggatctcattctattgtgcattgatgaaattgttgatggcggtatcatacttgaaactgatccaaatgttatagctgggaaagttgctagtaatagtatagattctggagctcctttgtccgaacagactctaagtcaagcattggccacagccagggaacatcttgcaaggtcccttcttaaatgattcatatggcatttcacaatgacggaggaaacttgtctttaggtttctcctataaacgtttataagacagaacctcattgcattctcgagaagtcgaacctggatgacgatgttacttgcgtagtgaaagttaatatcgacatgctaatacaggctattctagcagtacc

SEQ ID NO: 246409 - DNA, 551 bp, Glycine max
  unsure (1)..(551): unsure at all n locations
gggataggagaagtggagtgagaaccaatcgtaagcctgtacgcctgcacgtaccggtccggaattcccgggtcgacccacgcgtccgctcgaactatcattattcttccatttccattaaaaagaaaatatcataaatgggtattttcacattcgaggacgaaatcacgtcccctgtggctcctgctactctttacaaagctctagttacagatgccgacaacatcatgccaaatgctcttgattccttcaagagtgttgaaaacgttgagggaaatggtggccctggaacaatcaagaagataactttcgttgacgatggagaaaccaagtttgtactgcacaagatagaatcagttgatgaggcaaacttgggatatagctacagcgtagtgggtggtgctgcgttgccagacacagcggataagatcacattccactccaaattggctgctggtcccaatggatgctctgctggcaagctcactgtcgaataccanaccaaacgagatgctcagcccaaccaagaccaactcaaaactggaaagcca

SEQ ID NO: 246410 - DNA, 548 bp, Glycine max
agttatatgaggaaggtgtgtgatgttttgacactgaagcctgtacgcctgcaggtaccggtccggaattcccgggtcgacccacgcgtccggagcttttgtcaattttctattgaccttctcggtggaggaattttagtggacaaaactggagattggatcacacttatacaaaattctccaattagtaacttgttgagagttgctgcttggaagaaaggctgtttaatggtcaagattgtgatgtctgggaatgcagcagtcaaaaggagtgattgggcctcattggtacaagtgtttttaacaaacagcaacagtacagagcattttgatgcatgtaagtggacaaaatcagaaccacattcctgggaattgatcttcccaatagaggtatgtggtcctaataatggttttgaaatgtggagttctgagtgggcaaatcaaacttcatggcatttgagtttccttattgacaatcccaaacagtctacagtttttgatattctcttaggaatctctcaagatttgaaattgctggtaatactcta

SEQ ID NO: 246411 - DNA, 547 bp, Glycine max
  unsure (1)..(547): unsure at all n locations
gaaaatgaggatgagtgtgaagatanganttagtaagcccgtacgcctgcagtaccggtccggaattcccgggtcgacccacgcgtccggttcaaaccactcagcttcgtcttcataccacaacacagagacatgttcccatcatcatctcccacctcactccacaccccaatccttcaccaccgttactgtcaccaccctacaccgtcccgcacccagttctcccctctcaccctcccacccttccgtcacaccctctccttcctcgtccctccgccgcttcttccggctgcgcgcgccatccccgccgcatccgccgcgaagggcgacaagtccggcgagcagaagtgggtcctcgagggtctggtcatggagtccctcccgaacggcatgttccgcgtgcgccttgacaacgaggacttgattctaggctacatctccggcaaaatccgcaagaactacgttcggatcctccccggcgatagagtcaaggtcgaggtcacccgctacgactcctncaaaggacgcatcgtttacaggctccgca

SEQ ID NO: 246412 - DNA, 536 bp, Glycine max
  unsure (1)..(536): unsure at all n locations
agttggtaggtgtatgcgccgactgagnacgcaagctgtacgcctgcggtaccggtccggaattcccgggtcgacccacgcgtccgttctcaagggctgaacctccaacatccggtttcggcgtaatcggttgccccgccatcggccgcagggtttggggcgcaatttccttggcccccaaggccgccctttacgccgtcggcagccgttccctcgacaaggcgcgtgccttcgccgccgccaacggtttccccgccgccgccaaggtgcacggttcctacgaggcggtcctcgacgatcccgacgtcgacgccgtgtacgtaccgctccccactagcctccacgtgcgctgggccgtgctcgccgcgcagaagaagaagcacgtcttgctcgagaagcccgtcgcgctccacgcggcggagttcgacgagatcgtcgaggcgtgcgaatccaatggggtgcagctcatggacggtacgatgtggatgcaccacccncgcaccgccaaaatgaggggacttctctccgatcttacc

SEQ ID NO: 246413 - DNA, 532 bp, Glycine max
  unsure (1)..(532): unsure at all n locations
agttagggtgtattgcgatgatcatcgagctcgtccgcactgccgtaccggtccggaattcccgggtcgacccacgcgtccgcaaaatctggaattcaaacactctctttaccttgtgtttgtgagatacggcttcgaggttttcctgttcaaacatcatcagtccccgtgatatcctccacagaagttatacctgatactcagaacgttgcttttagcttttaccttgaggaatctgatttaaaagcgttgttagctcccggttgcttctacaacactcatgcttgtttggagattgcggtgttttcagggaggaagggatcccattgtggagttggcaacaaaaggcagcaaattgggatttttagaatgcaggttggccccgagtggggtgaaggaaagccagtgattctttttaatgggtggataggtattggcaagaacaaacaggataatggaaagccgggtgcggagttacatttaaaagtgaaactagatcctgaccctagatatgtgttccagtttgaagatn

SEQ ID NO: 246414 - DNA, 533 bp, Glycine max
agttagtagtgtattgtgtgatgatcatggacctcgtacgcactgccgtaccggtccggaattcccgggtcgacccacgcgtccgaccacgcgtacgaggaggggttcgggtgtgagagcgagaatcagaccatgaagaaagaggacacagcgacgctgatcagtgcctaaggttctgaatttgtggtctacagagaagctgctatggtttcacagaccatacataacatgcttacttatccaaggagtttcgctgagaaggcacacggtgatattacctatcctgaaatcagcaccaccattctggataagatttgccagtacttttattggcatgtacaattcgccagtgcgaaggatacggaatttaccattgaacctgaattaactctggagctaatgatggatgccaattaccttcatacatatcattatgaacttcacaagggtgatagtacttcgaacacataatggaactatagcctagttgggcatttaaagggaaactagcgtattaatgttgccacttgaac

SEQ ID NO: 246415 - DNA, 546 bp, Glycine max
  unsure (1)..(546): unsure at all n locations
agttatagattgggtggagtaggataataggaagctgtacgcctgcagtaccggtccggaattcccgggtcgacccacgcgtccgggatccacatcgttctcttcctctcttctgtcttcttctccttcaacattcccaaacccaaaaaggttttgattggggttaccgagcgaacaggtgttttaacagctacaaaataagtgatttatgatatgatggagtttggtgtgaatttcattcactgattcaacgattaggatcaactgtcattggtttttttgtgttgggactagaaatgtcaatgtcaggatttgaagggcaatgtagtaatgatgagattagagagaggaggtccgatgttgagaactcagaagacgagatgcggtcgttgagaattgngaacttgaataagaaggcgatgaatgcgtcatctagattcactcattctcttaagaatagaaggaaaagggaaatcgattatcgggttccgtccatgtccattgaagatgtaagagatgcgcgggaggagactgccgttcactaat

SEQ ID NO: 246416 - DNA, 547 bp, Glycine max
gttaaagagaggagtagtagaagagttaggaaactagtaagctgtacgcctgccgtaccggtccggaattcccgggtcgacccacgcgtccggcaaaaagaaaatcagtaggcgtagagaacagcaaagaaagaggaataatggagcaggaagagcacgaagtgtacggtgcagacattcccgacgaggagattgacatggacgcagacgccgagcaacaagatgagcaacttgcccccaatcacacaaacaaggaactggaggacatgaagaagaggctgaaggagatcgaggaggaagctagcgcccttcgcgaaatgcaggccaaggtcgagaaagagatgggcgctgttcaagattcgtcgggcacttccgcaactcaagctgaaaaggaggaagtggatgctcggtcaatctatgttggtaatgttgactatgcatgtacgcctgaagaagtccagcagcattttcagtcctgtggaactgtgaacagggtgacaatactgacagacaaatttggtcaaccaaaaaggtttgcttatgtaga

SEQ ID NO: 246417 - DNA, 529 bp, Glycine max
  unsure (1)..(529): unsure at all n locations
gggagagggtatggcgatgatcatgtaactgtacgcctgccgtaccggtccggaattcccgggtcgacccacgcgtccgcccacgcgtccggagcatacctgtcgggacccgaaagatggtgaactatgcctgagcggggcgaagccagaggaaactctggtggaggcccgcagcgatactgacgtgcaaatcgttcgtctgacttgggtataggggcgaaagactaatcgaaccgtctagtagctggttccctccgaagtttccctcaggatagctggagcccgcgggcgagttctatcgggtaaagccaatgattagaggcatcgggggcgcaacgccctcgacctattctcaaactttaaataggtaggacggtgcggctgctctgttgagccgcgccatggaatcgagagctccaagtgggccatttttggtaagcagaactggcgatgcgggatgaaccggaagctgggttacggtgcccaactgcgcgctaacctagaccccacaaagggtgtngggtcgatt

SEQ ID NO: 246418 - DNA, 535 bp, Glycine max
  unsure (1)..(535): unsure at all n locations
agggaggagtgnattcgacgatcgagcatgatgctctacgcactgccgtaccggtccggaattcccgggtcgactcacgcgtccgggagcattggtggaccccaaatgccattacttatggtgccgtgatgcatgggctacgtagggagggaaaattgtccgaggcgtgtgatttgaccagggaaatggttgaaaaaggcttgttacctactacaggtgaaattaacctgctaatacagtctctctgtcaaaatcagaaggtagtataagctaagaagtatacagaggaatgtctgaataacgagtgtgccattaatgtagtacacttcactactgtaattcatcgcttttgtcagattggtgacatggaagctgctctatccgtgctagatgacatgtacttaagcggcaaacatgctgatgctggcacatatacggcattgattgatgcattgggtaagaaaagttgactggatcgagcagctgacttgattgaaagatgctcagcataagtttggatccaactactgtaacc

SEQ ID NO: 246419 - DNA, 548 bp, Glycine max
ggtttgagatagagtggtgtaggaacatcgtatgatgtacgcctgcacgtaccggtccggaattcccgggtcgacccacgcgtccggctacgcaccagtttcactgcatacacttgtgagaaaactctgcagacatgttggtttatcacgacctccttacaggtgatgagcttctatgggactgcttccgttacaatgaaattgataatgggatgctgtgggaagttgaggggaagtgtggagttaagggagcggttggcgttgacattggtgcaaaccctatctgctgaaggtgtagaagatgatggagtcgatgacgcagctgccaaggttgtcgacgttagtagaaacattcagactttaggagcagcccggttttgattataagcaatcttgtacgcttatggaatgggatatcaagaatgtgactaccgaactcaaggcagaaatcaagatatggttaagaagcacatttggggtgcaactagaatcctgctctctaagattgatgacttccaggtcttagatggggagagcattaatgatga

SEQ ID NO: 246420 - DNA, 542 bp, Glycine max
gtaatggtaggtgtgtaaaacaatgtaagctcgtacgcctgcacgtaccggtccggaattcccgggtcgacccacgcgtccggctactcagaagactgttgatggtccatcaaacaaggactggaggggtggaagagctgcttccttcaatataattcccagcagcactggagctgctaaggctgtaggaaaagttcttccagcactgaatggtaaattgactggcatgtccttccgagtccccactgtagatgtgtcagttgttgacctcactgttaggctagagaagccagcaacctatgagcaaatcaaatctgctatcaaggaggaatcagagggcaaattgaagggtattttgggttacacagaacatgatgtagagtctactgattttgttggtgataacatgtctagcatatttgacgcccaagtcggaatttctttgaatgacaacttttgtaaacttgtttcctagtatgacaacgaatggggttacagttcccgggtgattgatgtgattgtccacattgcatccgtggctt

SEQ ID NO: 246421 - DNA, 552 bp, Glycine max
  unsure (1)..(552): unsure at all n locations
agaatntagtaaagagtgatngttatgatcgatcggaagatcgtacgcctgtacgtaccggtccggaattcccgggtcgacccacgcgtccgcggacgcgtgggcggacgcgtgggcggacgcgtggtcggacgcgtgggcttgttcctccgctcaacaactataataacatctttctctctgcgaacagatcacactatggccaccttaagcgccaaatcagtccatgatttcaccgttaaagatgccaagggaaatgatattaatcttggtgactacaaaggaaaggtccttatcattgtcaatgttgcctcacaatgtggcttgactaattcaaattacactgagctcagtcagttgtatgagaaatacaaacagaaaggtctggaaattctggcatttccatgcaatcagtttggggcacaggaacctggatctaatgaacagatacaagagtttgtttgtactcgcttcaaggctgagtttcccgtttttgacaaggttgatgtgaatggggacaaagctgctccactgtacaagtatctaaaatcn

SEQ ID NO: 246422 - DNA, 545 bp, Glycine max
gtaatgaagaagtaatgtgtgttttgacttcgtaagctcgtacgcctgcacgtaccggtccggaattcccgggtcgacccacgcgtccgcccacgcgtccgcccacgcgtccgatttgcttcaggggtgacatagttcaagtggacacttgggtttctggatcagggaagaatggtatgcgccgtgattggcttttacgtgactgcaaaactggtgaaatcttgacaagagcttccagtgtttgggtcatgatgaataagctaacacggaggctgtctaaaattccagaagaagtcagacaggagataggatcttattttgtggattctgatccaattctggaagaggataacagaaaactgactaaacttgacgacaacacagcggattatattcgtaccggtttaagtcctaggtggagtgatctagatatcaatcagcatgtcaacaatgtgaagtacattggctggattctggagagtgctccacagccaatcttggagagtcatgagctttcttccatgactttagagtataagagagag

SEQ ID NO: 246423 - DNA, 552 bp, Glycine max
  unsure (1)..(552): unsure at all n locations
tgtatatgagagaagtaatgtgtaagtttagaacaatcgaangctgttacgcctgcacgtaccggtccggaattcccgggtcgacccacgcgtccggctgttctttgcatcaccaaatctggggaggttctaaattatcaggcattcactgatgctaaggggatatacacagtggccgagacaatgccggagagtgatcgttgggatgcatgtcttgcccgaccaatcagtagtttccatgagcaatgcactcaacttggtgaaggcagcattggggttaaattcagttacaatcatccatcaggacattcacacactgtcaggacctttgtttatcgacccaccagtgttccaacttactgcatttgatatatactaatgagtatatgaatctgagagtgtctatgcttgattgaactagtgcaaaactaatgagtatatgagcatattttatttatactatatgtatgtgtagtggtgttccggcatgtatttctatagagcttagtcaaagtaagcatgagacgtttaagtaactgtaaatggcaatan

SEQ ID NO: 246424 - DNA, 548 bp, Glycine max
  unsure (1)..(548): unsure at all n locations
ggtttagtatgatanattgagaagatttgaacctgtaagctgtacgcctgccgtaccggtccggaattcccgggtcgacccacgcgtccggtcactccttgctcttagccctgctcctcttcgccgccgtggccaccggcgcgatggcggtgtccgatttcgacgccgtctgacatactgatccgtcaggtggtgccagatgttggcgaagccgaagaggaggacaacctgctgaacgccgagcaccacttcgcgagcttcaaggccaagttcgccaagacctacgccaccaaggaggagcacgatcatcgcttcggcgtcttcaagtccaacctccgcagagccaggctgcacgccaagctcgacccctccgccgtccacggcgtcaccaaattctccgatctaactccggccgagttccgccgtcagttcctcggcctcaagccgctccgcttcccggcgcacgcccagaaggcgcccatcctgcccaccaaggatcttcccaaggatttcggatggcgagaccaaaggacccgtcacttacttca

SEQ ID NO: 246425 - DNA, 536 bp, Glycine max
aggggagagctgtatgcgccgtcggaaaatgtaagctgtacgcctgcagtaccggtccggaattcccgggtcgacccacgcgtccgatgtcttcttctcttcctcctcgtactctccgacttctccatttccgaatcacaatccccctgggctgccaagaaaaaacgcatgagagacaaagttcgcaatatcttttaccacgcatatgacaactatatgactcatgcatttccgcatgatgagcttaagcctatctctaaaactttcaccaactctctaagtgagttgggaaatttgaagcttgaacacttgcctcaagactacaacggctctgcccttacgcttattgaatcactgtctagccttgttattatgggaaattatactgaattcgagagggcagtgctctggctttcagaaaatctgacatttgatgttgatgcgcgcataaatctttttgagtgcaacataagagttcttggaggacttgtctctgctcatttacttgcatctgattcttcaaagaagttttttca

SEQ ID NO: 246426 - DNA, 539 bp, Glycine max
  unsure (1)..(539): unsure at all n locations
agtagaaggtgtatccgacgcatgagcatgnaggctgtacgcactgccgtaccggtccggaattcccgggtcgacccacgcgtccgatatcccattctctctgtgtattccccttcctatcccttcaagatgcagatcttcgtcaagaccctcaccggcaagaccatcacccttgaggtggaaagctctgacaccatcgacaacgtcaaggccaagatccaggacaaggaaggaatcccctcggaccagcaacgtctcattttcgccggaaagcaacttgaggacggccgtacccttgctgactacaacattcagaaggagagtactcttcacctcgtcctacgtctccgtggtggcatgcagatcttcgttaagacactcaccggcaagaccataaccctagaggttgaaagctccgacaccatcgataacgtcaaggccaagatccaggactaggagggtatcccaccggaccagcaacgtctcatcttcgccggaaagcagctcgaggactgacgaacccttggcgactacaaaac

SEQ ID NO: 246427 - DNA, 544 bp, Glycine max
  unsure (1)..(544): unsure at all n locations
agttttagtaggagtgatgtcgtcgttcgaccctcgtaggctcgtacgcactgccgtaccggtccggaattcccgggtcgacccacgcgtccgcaagatgagttcaggaattagagcatggtgtgtggcagcaagtgttggaattgtggaggccttgaaagaccaaggcatatgcaggtggaatcatgccttaagatcagctcaacaccatctcaaaaaccatgttggctcattctctcaggctaacaagctttcttcttctgctatgatatccacaacactaaaacatgagaaggcaaatcaatcagaagagtctttgagaactgtcatgtacttaagctgctggggtcccaactagatatcataagcccaacaacaaaatattcttttctcttttcaattctaggaatcaagcaagcttaattagtctcaaatgatgatgagtattgaaagaatattgcttgactntatggcagtcattatgtaaattttgatattgatagtgatgagctgttgccaaattttaattggagtgttctttatg

SEQ ID NO: 246428 - DNA, 541 bp, Glycine max
  unsure (1)..(541): unsure at all n locations
agttagtagctgncgtccgccgatagaanattgtagctcgtccgcactgccgtaccggtccggaattcccgggtcgacccacgcgtccggcagcaagcatctccttctcaaactagtagtattattcttccattccgttctacatataatcattcataatgggtgttttcacattcgaggatgaaatcaactcccctgtggctcctgctactctttacaaggccctagttacagatgccgacaacgtcatcccaaaggctcttgattccttcaagagtgttgaaaacgttgagggaaatggtggcccaggaaccatcaagaagatcactttccttgaggatggagaaaccaagtttgtgctgcacaaaatagaaagcattgatgaggcgaacttgggatacagctacagcgtggttgggggtgctgcattgccagacacggcggagaagatcacattcgactccaaattggttgctggtcccaatggagggtctgctgggaagctcactgtcaaatacgaaacaaaaagagatgcttaacc

SEQ ID NO: 246429 - DNA, 430 bp, Glycine max
taccggtccggaattcccgggcggacgcgtgggttctggtacatcattgtctttggctctcggtgagggttttagggcacacaccgcagggagacggtttctttcactctctgcaattcgcgatggctgacgaggactatgaagatattgacatggggtacgaagatgaaccgccagagcccgagattgaggaaggtgcagaggaagatgtggagaacaaaaacgatgaaataactggagagcctattgacaccgaggataaggaagaggaacaaccagtgaagcggcctcgaaagacatcgaaatatatgactaagtatgagcgtgctagaattttgggcacccgtgctcttcaaatcagtatgaatgcacctgtcatggtcgagttggagggggaaactgacccactccagattgctatgaaagagct

SEQ ID NO: 246430 - DNA, 408 bp, Glycine max
cccgggtcgacccacgcgtccgcttactcgtacgattgcttttagcatttgttatagtattatgaaacatgacatcagcaagcagacacaatacaagagttatattatttgtaaaccgtgcttctcacagtccaagtgaattattcagagtcatatatagttaactaaacaagctctttgcttgagttattaagacctggaactgaaaggaaagcactgcatttctattttttaaaaatctggatatccctccaacgagattccatgtagttggaagcaccatgctgtgcgtaaaccccaaacttgaagtagtgagtgctggctccacggacaggtccattgtacctgggattatcctgcccattaagaaaaatcttgacattgtttgcacccacatgatggatcacg

SEQ ID NO: 246431 - DNA, 499 bp, Glycine max
  unsure (1)..(499): unsure at all n locations
agtagtttagtttttcnngtgctgatacgtatccctcgcgcactgcggtaccggtccggaattcccgggtcgacccacgcgtccgcccacgcgtccgttgcagtgtacccaggaaatgtcttggccttgcacatgtctaaaccacaaggatttaagtactctagtggacagtatatttttctgagctacccagatgtctcgccttttcaatagtaagtgaacattggttttcttaatatttatatagcttattaccattaaaatcagggagagacgttaacaaaaaaattaatttgcttctttgtaaatttcccatttcttttagttgttaggaagtagtagatatatatcagacttgggaaaatgacatggttggaaggattgacaacagtttcacattttattgcatgttatttattatgagatttatttttattataactataaagatttatttgattaaagtttttagttttttttaaggaaaaagattttaatn

SEQ ID NO: 246432 - DNA, 502 bp, Glycine max
gggcgaagtgggtgtgtcgctgttcaacgccctacgtcatgctgtaccggtccggaattcccgggtcgacccacgcgtccggtcatgactgtgttgattcccagattctacaaccattcccaccaagaaggagcagggattttcgacctattccgacaaccagcctggtgtgttgattcaggtctatgaaggtgaacgtacgatgactcgtgataacaatttgcttggcaaattggagatatctggaattcctcctgctccgagaggtgttcctcagatcaccgtttgctttgacattgacgccaacggtatattgaacgtgtctgcagaggacaaaaccactggacagaagaacaagattacaattaccaacgacaaaggaaggctttctaaggaggagattgagaagatggtgcaggaagctgataagtacaaggctgaggatgaggagcataagaagaaagtgtaggccaaaaatacattggagaaatacccctataac

SEQ ID NO: 246433 - DNA, 500 bp, Glycine max
  unsure (1)..(500): unsure at all n locations
gggggtnaaggggtgtatttacgacaggaaggtgatggcatgccgtaccggtccggaattcccgggtcgacccacgcgtccgtgatgacgggaagaacatgacatgattaagatgagccatctcgagctgtgtaccagctctccgcgctcggtctcaacctccttcgctcgcctctgtcgtcgttgacgttctctgacgaggttccgccgttggcggcgtcacggcgtcccgggctgggtcagatatcgccggcgggattcgcctccttgctgttgggaatatcgctggcgttgatgctgtgtggatcggtgacgttcttcatcgggttcgtgttgatgccatgggttctgggattggtcatgctcttctacgtcgccggaatcctctccagcctctccgtcttcggccgctccattctctgctacgccaccgctacaccctcgccacgtaaggacattcccgcatggaagcttatgtgaggtgacccgatgaaaaagga

SEQ ID NO: 246434 - DNA, 408 bp, Glycine max
  unsure (1)..(408): unsure at all n locations
tccggaattcccgggtcgacccacgcgtncgcanaactcatctcgaaaccctaagcactcgctcgggttcgtgtagtgccaaaccctagggctcattttccagatctattcagtttttctctcctctcttttccgatccaccgttggagatcgaagatggtgtccgacgccagcaagaagaaggccgcacagaagaaggccgtcgccgccgccaagagaggtggcaaagctgccgccgctgccgttatggccgtcacctcttgcaaagccgccgacaaggtcgccaacggaatcgccgatattcagatttcggatcggacctgcaccggcgtcctctgttcgcatcctctctccagagatattcgaatagagtctctatccgtcacattccatggacatgatctcatt

SEQ ID NO: 246435 - DNA, 417 bp, Glycine max
tagcctactctctttttttcaatttccaaatcacgaaactcatgagatggagaaagcgatcaacagacagaagattttgcttcatcatctcaacccttcatcatccacccaccccaacgaatcatcctccctccatgcttcagcatgtgtggcgggggatagcgctgcttatcaaaggacatcgacattcggggacgatgttgtgatcgtggctgcttatcggactgctcattgcaaagctaaacgaggtggtttcaaagacactcttcctgatgatctactggctcctgttttgaaggctgtaattgagaaaaccaatgtgaacccaagtgaagttggggatattgttgtaggtagtgtattggctcctggagctcacagagctagtgaatgccgaatggctgcattttatgctgg

SEQ ID NO: 246436 - DNA, 427 bp, Glycine max
  unsure (1)..(427): unsure at all n locations
tcccgggtcgacccacgcgtccgcccacgcgtccgcccacgcgtncgttcacgtttccgcccacgcgtccgcgcttctgattgtctctctactcgttttgaagatgtttctcacaaggactgagtatgaccgaggagtcaacaccttttcccccgaaggacgtttgtttcaggttgagtatgcaatcgaagccatcaagctgggatcaactgcgattgggttgaagaccaaagagggtgttgtcctcgcagttgaaaagcgcatcacttcgccgctcctggagcctagtagtgttgagaaaattatggaaattgatgagcacataggttgtgcaatgagtgggttgattgcagatgctcgaacacttgttgagcatgcacgggtggaaactcagaatcataagttctcctatggtgagccgatgact

SEQ ID NO: 246437 - DNA, 505 bp, Glycine max
agtggtaagtgggtgtgtcactgccgatgcgcctcagtcactgctggtaccggtccggaattcccgggtcgacccacgcgtccggtcaaggctaagattcaggacatggttggaatccccccagaccagcagaggctgagcttcgccgggaagcagctcgaggacggacgcacccttgctgactacaacatccagaaggagtcaactctccacttggtgttgcgtcttcgtggtggtatgcagattttcgtgaagactcttacgggtaagactattaccctcgaggtggagagctctgacaccattgacaatgtgaaggccaagattcaggacaaggaaggcatcccaccggaccagcagaggctgatttttgctggcaagcagctcgaggatggaaggaccctcgctgactacaacatccagaaggaatcaacccttcaccttgtcctccgtctccgtggggggttttaagctcgttgtgtaatggtggatgtgttcccaaaag

SEQ ID NO: 246438 - DNA, 370 bp, Glycine max
ccgtccgtattcccgggtcgacccacgcgtccgcggacgcgtgggcggacgcgtgggtttactcgtgggaaaaaaaaaaaaaaaaaaaagaagaaaaaaaaaaaaaaaaaaaaaaaaaaaaaaaaaaaaaaaaaaaaaaaaaaaaaaaaaaaaaaaaaaaaaaaaaaaaaaaaaaaaaaaaaaaaaaaaaaaaaaaaaaaggaggaaattaaataaaattaaagttaaaagaaaaaaaaatggaaaaaaaaagttttttttaagagaaattaaaattaaattaaattgggtatttaattaaaaaggaataaaatggaaaaaattatggattaatataatttattagtagtgaaaaaaattttatttttta

SEQ ID NO: 246439 - DNA, 487 bp, Glycine max
  unsure (1)..(487): unsure at all n locations
tggaggtgtattctagttctagctcccgatgncactgccgtaccggtccggaattcccgggtcgacccacgcgtccgcggacgcgtgggcggacgcgtgggcttacgcgtgggtgataactcgtcggatcgcgacggcctttgtgccggcgacgcatcattcaaatttctgccctatcaactttcgatggtaggatagtggcctaccatggtggtgacgggtgacggagaattagggttcgattccggagagggagcctgagaaacggctaccacatccaaggaaggcagcaggcgcgcaaattacccaatcctgacacggggaggtagtgacaataaataacaataccgggctcattgagtctggtaattggaatgagtacaatctaaatcccttaacgaggatccattggagggcaagtctggtgccagcagccgcggtaattccagctccaatagcgtatatttaagttgttgcaggtaaaaag

SEQ ID NO: 246440 - DNA, 494 bp, Glycine max
gatggttaaggggttgtggttggatcgtagacactgcagtaccggtccggaattcccgggtcgacccacgcgtccgcattcatttaaattacgatatcaagcagttgaaattatgagcccagaggaagaagcacgtcagatagtagcagcaatgaggattcaacatgcctttcgcaactatgagtcaaagaaaaagatggcagccgctgctcggattcagcttagattccgtacatggaagtaccgtagagaatttctcaatatgcggcgtcaggctattaaaattcaagctgctttcaggggctttcaagcacggaagcaatatcggaaaatcgtatggtctgttggggtgcttgagaaagtgatcctgcgttggcttttaaagagaaaaggcttccgtggtctccaggttaatcctgccgaggaggagacacaggaaagtgatacaattgcagaggaggatttctttcgcaccagccggaaacaagccgaag

SEQ ID NO: 246441 - DNA, 498 bp, Glycine max
  unsure (1)..(498): unsure at all n locations
gggtagatagtgtgtcnatgtcgaatccgtactcnacgnctagtaccggtccggaattcccgggtcgacccacgcgtccgaggtatccaagctggccaaaggagtttatgctaatgttgaacattggatcaatgtggacgggggctagagtagttgctgtgaagaatgacttggcgaagttgcaacttacttcccctgtgtgcactagcaagggtgagaagattgcacttagtcgacgtgttgagaagcattggcgtcttatcgggtggggacaaatccaagctggaatcactcttgatgtccctcccgcccccgatctgagtcgaacactgatcacaagaaacaccagcagctataaaaaactgagatgaatttagatatgtgggaagggaggcaattgttgggaaccatttttgtgaggtggagaagaaaacgttctttgattgttgtcttctatattgttttcacatcgttattggtttattttcccaactgtac

SEQ ID NO: 246442 - DNA, 315 bp, Glycine max
taccgtccgtattcccgggtcgacccacgcgtccgcccacgcgtccgcgaacgatttgattgtttggaatgcattaacaaagcaacgagtgttcggttcgaaaccagcagagagaaaaaaaaaaaaaaaaaaaaaaaaaaaaaaaaaaaaaaaaaaaaaaaaaaaaaaaaaaaaaaaaaaaaaacaaaaacaaaaaaaaaaaaaaaaaaaaaatataaataaaaaaataaaaaacaaagagaatcaaaaggaatagagtcagattaaatagaaggcttttaacagaaagtgaaggttacgattaagacgagcaga

SEQ ID NO: 246443 - DNA, 411 bp, Glycine max
taccgtccgtattcccgggtcgacccacgcgtccgcccacgcgtgcgggatcccatggcttctcttaattggccttcttggaggtatggattgaggcattgataccggctattcaagcagagaatcaccaaggaaggtcaggaggacgtagcagaggactggatcgagaagtatagcccctgggatgtcgtgaggcatgacattttataccccatcagagtctatgctcatgttgaggttaatcctgattgaagccgaaaatgggttgtacgagaggttgcgcatgcactggcttatgaagtgccaattacaggttaccacaccaagatcaccatcagtcttggtctatcgaatgcaaaagctagtgctgaagatttcaataaatatggatataatgatgctcatcatgat

SEQ ID NO: 246444 - DNA, 352 bp, Glycine max
ccgggtcgacccaagccttccaataattcttccattcataatgggtggtttttatcattcgaggatgaaatcaactccgctggggctcctgctactctttacaaggccctagttacagatgccgacaacgtcatcccaaaggctcttgattccttcaagagtgttgaaaacgttgagggaaatggtggcccacgaaccatcaagaagatcactttcgttgaggatggagaaaccaagtttgtgctgcacaaaatagaaagcattgatgaggcgaacttgggatacagctacagcgtggttgggggtgctgcattgcccgacacggcggagaagatcacattcgactccaaat

SEQ ID NO: 246445 - DNA, 505 bp, Glycine max
  unsure (1)..(505): unsure at all n locations
tggttgagtttaagtgncttgnagtaatcgaaaagaaagtcatgcgcactgcggtaccggtccggaattcccgggtcgacccacgcgtccgcagagagaaatgatatggttgagtacttcggtgaacaattgtcaggctttgccttcaccgttaatgggtgggtgcaatcctatggttcccgttgcgtgaagccaccgatcatctatggtgatgtgagccgcccaaagccaatgaccgtcttctggtcatctctggctcagagctttaccaagcgcccaatgaagggaatgcttaccggtcctgttaccattctcaactggtcctttgttagaaatgaccaacctagatctgagaccacctaccagattgctttgtctatcaaggacgaagtggaagaccttgaaaaggctggcatcactgttatccaaattgatgaagctgctttgagagagggtcttccactgaagaaatcagagcaagctcactacttggactgngctgtnc

SEQ ID NO: 246446 - DNA, 486 bp, Glycine max
atgggtgtatcactgttcagcccctacgcactgctgtccgtccgtattcccggtcgacccacgcgtccgcagagagaaatgatatggatgtagtatatcggagaacaattgtcaggctttgcctggaccgttaatgggtgggtgcaatcctatggttcccgttgcgtgaagccaccgatcatctatggtgatgtgagccgcccaaagccaatgaccgtcttctggtcatctctggctcagagctttaccaagcgcccaatgaagggaatgcttaccggtcctgttaccattctcaactggtcctttgttagaaatgaccaacctagatctgagaccacctaccagattgctttgtctatcaaggacgaagtggaagaccttgaaaaggctggcatcactgttatccaaagtgatgaagctgctttgagaaaaggtctttcacttgagaaatcagaacaagctcactacttggactgggcttgccat

SEQ ID NO: 246447 - DNA, 507 bp, Glycine max
  unsure (1)..(507): unsure at all n locations
tggtggntgaagtncttcngtttactgtacgtagcctangcgcactgcggtaccggtccggaattcccgggtcgacccacgcgtccgccaaaattacggtttttgtcgtagcttgaagaagcagcaatggcgcctaagataacacgcaaggtcagcagaaaccccgaattgataaggggaatcggaaagtactcgaggtcgcagatgtaccacaagaggggcatttgggctatcaaggccaaaaacggtggcgttttacctcgccacgaccgcaaacccaaacctgaaactcccactgaaaaaccacccaaattttaccccgctgatgatgtcaagaaaccccttgtcaacaagcacaaacccaaaccagctaagctcacggctagcattacccccggaacagtgttgattcttcttgctggtagatttaagggaaagagggtagtgtttttgaaacaactaccttctgggttgcttcttgtaacaggtcctttcaagggtaatggg

SEQ ID NO: 246448 - DNA, 496 bp, Glycine max
  unsure (1)..(496): unsure at all n locations
aggggtgaagtgcgtgtgggtcggtacgtatgctcngcactgctgtaccggtccggaattcccgggtcgacccacgcgtccgctttttagggcaaggatgggctttcttaccctgggtcaaggctaatggtgagttgggattttggctcaagaggcttgcagaatggccggacatgatgtatgtcagggtgttggtttggccagcggttcaaagataaaggggatgccccacatttatttccatgacacacatacacacaaactagtaatattattcttcgaatccattttattattcataatgggtattttcacatttgaggatgaaaccacctcccctgtggctcctgctaccctttacaaagctctagttacagatgccgacaacgtcatcccaaaggctgtcgaagccttcaggagtgttgaaaaccttgaggggaacggtggccctggaaccattaagaagatcactttcgttggagatggagaaagccag

SEQ ID NO: 246449 - DNA, 496 bp, Glycine max
  unsure (1)..(496): unsure at all n locations
ggtgggttaggtgcgtgagtcatgaaccgtatgctanggcactgcggtaccggtccggaattcccgggtcgacccacgcgtccgtgtactttcttgcgaaacagaagggttaaggggcaaacacaacttttttgtttttttgtagagcgagagagaaaaaaatgttggggatcttcagcagttccgtggtgtcgccgccggaggagctggtggctgccggcagcagaacgccgtcgccgaagacgacggcggggaagctgctgaaccggttcgtggagaacaaggcgtcggcggtgtcgctgcaggtgggagaacacgtgcagttggcttacacgcaccacaacgagtcaccgtggcatcccagatcatttgctgttaaggatgagatattctgcttggttgagggggctctagacaatttgggcagcctgagacaacaatatggactgggcaagtcaggcaatgaagtggttttgtgaatggaggctaacaaggc

SEQ ID NO: 246450 - DNA, 480 bp, Glycine max
  unsure (1)..(480): unsure at all n locations
aggatggtgtgtcagtattcgacgnacttagctactgccagtaccgtccggaattcccgggtcgacccacgcgtccgatcacgcgaacgcgcgcatgtcctgtactaactagtagtatgattcttccattcataagggctgttttcacattccaggatgaaatcaactcccctgagtctcctgctactctttacaaggccctagttacagatgccgacagcagcatcccaagcgctcttgatcacgacaagagcgtagacaacgtcaagagaaacggcgacccaggaaccatcatgaagatcactttccttgtagattgagagaccaagtttgggctgcacaaaatagacagcattgatgaggcgaacttgggatacagctacagcgtagtcggggtgctgtattgccagacacgacggagcacatcacattcgacacctaattgtatgctggacctattggaagacttgctgaaaaccc

SEQ ID NO: 246451 - DNA, 422 bp, Glycine max
  unsure (1)..(422): unsure at all n locations
cggtccggaattcccgggctcatgatcgttgtgaagccgttgtcacaatcgcttatgatgtttaggctcgtatcagagaccctgtctatggctgtgtctctcacatttttgccttacaacaacaggtaccattatatatgttattacaaacctcatcaaaacttttaaacttttttttctctagaaataatagatcttgtcatgctcatctttaatgtttatatatcctgttagacatcaaataagtaacacattaacacctatttaatgtaggacaaaacttagatggagttctaatggtgtttttgatgttatttaatcagaattggagtttccaaaatacctaaagaattgtatgtaggttatattcttttatggttntcaataacggaagaaatagacttaaatatctaaacatttgc

SEQ ID NO: 246452 - DNA, 480 bp, Glycine max
  unsure (1)..(480): unsure at all n locations
nggaggctgtgtcntagttcgacgcctacgctatgccgtaccggtccggaattcccgggtcgacccacgcgtccgacagcatcgaacccgtcgtagcagataatcttgtcaccatggtttcttccgacaaggatccacgagaggatgtccttcaagcctggtacatggatgatagtgatgaagatcaaagactcccccaccacaaagaacccaaggagtttgtctcgttggaccaacttgctgaacttggagtccttagctggaaactagatgctgataaccatgaaaatgatccagagctgaagaagattcgtgaagagcgtggttacacctacatggatgtttgtgaggtctgcccagaaaagttgccaaattatgaacagaaaatcaaaagcttctttgaagagcatcttcacactgatgaggagatccgcttttgtgctgctggaagtggctattttgatgttagggatcgcaatg

SEQ ID NO: 246453 - DNA, 502 bp, Glycine max
  unsure (1)..(502): unsure at all n locations
agtgggggtagtgattcgttgtggacggcttagnatcgcagtaccggtccggaattcccgggtcgacccacgcgtccgttttacttcccctatggctcgtcacttcttgctcttagccctcctcctcttcgccgccgtggccaccgccgcgatggcggtggccgcgtccgacgccgacgacatcctgatccgtcaggtggtgccagatgttggcgaagccgaagaggaggacaacctgctgaacgccgagcaccacttcgcgagcttcaaggccaagttcgccaagacctacgccaccaaggaggagcacgatcatcgcttcggcgtcttcaagtccaacctccgcagagccaggctgcacgccaagctcgacccctccgccgtccacggcgtcaccaaattctccgatctaactccggccgagttccgccgncagttcctcggcctcaagccgctccggttcccgcgcacgcccagaaggcgcccatnctccccaccaagg

SEQ ID NO: 246454 - DNA, 493 bp, Glycine max
  unsure (1)..(493): unsure at all n locations
tggtagggagtgtgtgngttcgactgtactgcatgccagtaccggtccggaattcccgggtcgacccacgcgtccgatcccccaaagcttcaatctttgtattcaattcaccctttctctctctccatgggcacttgtgttgatgccccaacccctctttctcggaagcctaacgggtcccaatccgatgatcgttccttcaattacatgaaattctgccgacccactttctctgatcgcgttccctgcatacccatttgcaagaatcgtgacactgccttcacacgcgtggaggagtttgacacatgtgtggaggataatgatgatattgaagttgaggttgtggagggtgttgatctttggttgaagattcaagaggaggcaaggttagatgttgatcaagaaccaatcttatgcagctactatttcagttccattttgtctcacacatctttggagagtgccttggtcaaccacctctccacaaatttgn

SEQ ID NO: 246455 - DNA, 510 bp, Glycine max
  unsure (1)..(510): unsure at all n locations
tggaataaagaggtgagtccgtcgctgtacgtatccctcagtcactgctgtaccggtccggnattcccgggtcgacccacgcgtccgcccacgcgtccggttcggcataattgtatcgatcgatggcggcgttgataaggtcagcggcggtgatactggcgatcctgacgatctcggcgtgcatcgcgtgtacggcgtcgtacgggggattggtcgggggaaggtcgaagatccctgacgtgaaggcgaacaagaaggtgcaggatctagggcggttctcggtggaggagcataaccggatgctgaggcaggcgcagaatgaggaggagcaagtcacgttcgtggaagtggtggaggcgcaacaacaagtggtgtctgggatcaagtactacatgaagatatcggccacgcagggtggcgacggtggagattccagaatattcgaatccgttgtggtggtgaagccgtgggctcgttccaagcagcttcttaatttcgctcctttcacgg

SEQ ID NO: 246456 - DNA, 505 bp, Glycine max
  unsure (1)..(505): unsure at all n locations
gagtgagttaggtacgtgncgctacggatagtatgtcgtacgcactgccgtaccggtccggaattcccgggtcgacccacgcgtccgcccacgcgtccgacaacccatcggtgaaattcaaaagccccgaaagcgtgacgcgcccactctcctcacagcgcgtaaacgacgacgtcgtcgtcgtcttcttattactactcctcaacgacagcttcccagcctgcgttttcttaaccgttcgatccgccgtcaagtcaacggaacagtcaatgtcttcaatcactataattgaacggttcgtcgtttggatcagtaatgagcgtaactcggagttatcagagactntggttagttccaagtcgtaaacgtcgtaacagagaaaattcgccattgccggtattaagctcgaattacccgagcccgggtggccgtggagtaaatacccacgcttccaggccccggcccacgcgcctattaaaactctttacccctttggaaacgcggt

SEQ ID NO: 246457 - DNA, 506 bp, Glycine max
  unsure (1)..(506): unsure at all n locations
aagttnnntagtgtgttcagttacggaccgtatgtcataggcacgcggtaccggtccggaattcccgggtcgacccacgcgtccgcttagtcactctatcagtatcattcattatcactacgattgttctaaaagcaatgattactcttgagaagaattaaaagatcatcatcacaataacaagatgagttcaggaattagagcatggagtgtggcagctagtgttggagttgtggaggccttgaaagaccaaggcatatgcaggtggaatcatgctttaagatcagctcaacaccatctcaaaaaccatgttggctcattctctcaggctaacaagctttcttcttctgctatgatctccacaacactaaaacatgagaaggcaaagcaatcagaggagtccttcagaactgtcatgtacttaagctgctggggccccaactagatatcataagtccaataagaaaatattctttctctttaatttctagaaatatcaagcttaa

SEQ ID NO: 246458 - DNA, 415 bp, Glycine max
ttcccgggtcgacccacgcgtccgattttgtgggaatgtggagttatgctggctcactgaacaggtcgttttctctgaccgttataaagtttctcaatatagtcgttgtacttccccgctatcttgatcgtgatgctgaggctgttcgggaagacaatctgctgaagcttgaagttgctgagctgaaatccaagttcattgaaagggcccaggcactaatacatggagatctacacactggttctgtgatggttactcgtgaatcaactcaagttattgatccagaatttgcattttatggaccaatgggttttgatattggagcattcttgggaaacttgattttggctttctttgctcaatatgggcatgctgatcaagcaaatgatcgaagattctataggaatggattctt

SEQ ID NO: 246459 - DNA, 498 bp, Glycine max
  unsure (1)..(498): unsure at all n locations
agagagtaggtgtgtgngtgtcggaccgtatgtcatgccgtaccggtccggaattcccgggtcgacccacgcgtccggaaaatcctgtttcccgataaaaaccccgttcgtacatggtctggtcacgcggatcgggttgattgagatgcacaccgcgagcaggagcaacggcggcggcggcggcgtgctggcgtcgcggacgagttcgcggtcggtgacggagacggtgaacgggtcgcacaagttcgtgataaagggatactcgctggcgaaggggatcggagtcggaaaacacatcgcgagcgagacgttcacggtaggagggtaccagtgggcgatatacttctaccctgacggcaagaacccagaggacaacttcgnctacgtctncgtcttcatcgggctcgccttcgagggcaccgacgtccgngccctgtttgagctcacgctgctcgaccagagcggggaatgggaagcacaaggtgcatagcccacttg

SEQ ID NO: 246460 - DNA, 392 bp, Glycine max
tcgacccacgcgtccgaccacgcgtgcgattggatctctctatccaattcttgcttggaggagcagatgctggccccagacaagtgattgacacagaacgcaagaaagttcgagctggcgtagattactatatccgaccggacccaacaaccccatgtgatgggcgtgggccgtgtgtggttggaagtggctatgttctcatagcaaggtcatgcaaccacacttgccctcttagtgttgcggtggtggagggtttccgtggcctagcagtcacattcaaactagttaaccctaaaaaaggggtcattagggtttctactgacttgaacatcaaaaccttcctaactaacacaagttgtagtgagtccacggtttggaagctagatgccctt

SEQ ID NO: 246461 - DNA, 357 bp, Glycine max
ccgggttgacaccaagccttccgccaacccttccgctaacgcgtccgttacttttccggttttaaacttttctgggggctattatgaaatccttaactcgccagatcgtgcttgtaatcttgccaagcaggcatttgatgaggcaatttccgagcttgacacattgggtgaagagtcatacaaagatagtacattgatcatgcaacttctccgtgacaatctgactttgtggacatcagacatcacggacgatgctggagatgagatcaaggaaacatctaagcaacaaccaggcgaataggcgatggcagttgcgatgtgggtagtgattggatatgtattaccgataatatggat

SEQ ID NO: 246462 - DNA, 423 bp, Glycine max
tcccgggtcgacccacgcgtccgcgttcctttccgatgggtcgtatggtatttgtgattggtggagatttgacggcacgcgcattatcaaaatccttactgtgtttctttcgcggtcattgcctcttttctgttcgtggcttcaggattattttaattctgcagctccgaaatatagataaaccaatcatcaggctgtacaggagaatggcagaatctatatctagcttctggggtccagtcacgttcaccaaagacgtgttgtgaattaaattatgcttattgctcttacattgctgaattctttaatacaacatccagcattgcaacaatactttcggctctgattgtgcttataaatgcattaagacaacagattcgagaaaagattgagggttcttcatgtttcagatatgacacttgc

SEQ ID NO: 246463 - DNA, 497 bp, Glycine max
  unsure (1)..(497): unsure at all n locations
gtaggtngtgtgtcatgatagtaagcctcgcgcactgcggtactcggtccggaattcccgggtcgacccacgcgtccgcccacgcgtccgcccacgcgtccgcttacgcgtccgcccacgcgtccggcattaagctagttgttgaggcgatatgtgctggtatatttaatgacctaggaagtggaagtaatgttgatgtttgtgtgataaccaagggacataaggaatatctcaggaaccaccttctaccaaatcctcgtacctatgtcaatccaaaaggctttgatttccccaaaaagacagaggtcctcttaacaaagattacaccgttgaaggagaaggtggaagtgattgaaggagatgctatggaagagtaacaatcattccaaaaaaaattggtgtatgagtatgaaacttgattagtgcaatggctgtgatatttgattttgtactttcacaactttggcttttattaccaaaattaattggatttcaat

SEQ ID NO: 246464 - DNA, 482 bp, Glycine max
  unsure (1)..(482): unsure at all n locations
aggtgtgtagtcgtttcaatctcgtcgtactgccgtcaccggtccggaattcccgggtcgacccacgcgtccgcaacgcgccactctctccctctcttttcctcctcttgctctctccaaacccgccatgtgctccgccgctccggtcaccgaactcagcgacgagtccgacttcgaatctctcctctctcccgacggccacatctccatctgcggcttcggctctctcctctccgagagaagcgcccgaagcactttccccgacttggccaacttccggaccgcacggttgaaccggttccgccgcgtcttcgcgcacgtcgctccggttttcttcgagcgcggcattgccaagccagaaaccatggagatttccagcttgagtgtggagccatgtgaaggagaaactcttggggtgacagtctttgagattagaaaatcggagattccaagatttatcaagaagggaggtgagtttccgn

SEQ ID NO: 246465 - DNA, 505 bp, Glycine max
  unsure (1)..(505): unsure at all n locations
ggtagggtgaggtgtgtccacctctggaccctanacgaatgcggtaccggtccggaattcccgggtcgacccacgcgtccgacaggctctgcctgttgctttgatgattcatgataactcgtcggatcgcacggcctttgtgccggcgacgcatcattcaaatttctgccctatcaactttcgatggtaggatagtggcctaccatggtggtgacgggtgacggagaattagggttcgattccggagagggagcctgagaaacggctaccacatccaaggaaggcagcaggcgcgcaaattacccaatcctgacacggggaggtagtgacaataaataacaataccgggctcattgagtctggtaattggaatgagtacaatctaaatcccttaacgaggatccattggagggcaagtctggtgccagcagccgcggtaattccagctccaatagcgtatatttaagttgttgcagttaaaaagctcgtagttggaccttgggtn

SEQ ID NO: 246466 - DNA, 397 bp, Glycine max
  unsure (1)..(397): unsure at all n locations
taccgtccgattccgggtcgaaccacgcgtncgctcggcacctcgaactcaacacactcttcgaaactctggatctgttcttctgcttctaagagacaacattctcttcttgaatctcaatctctcggaaactaaaccctaagaacagacaaagatggtttacaccatctcgggaattcgatttccggttcttccttcgctgcacaactcccgcttccgtggcgatcgcagaactgcgtctcttcccgtttttctcagaaacaactccttctctcgtaaaacccttgctctaaaatcttcccatgattctgattccttgtcttctgcgattgccaaatctgataaagtacttattcctcaagatcaagataactctgcatccttgacagatcaactt

SEQ ID NO: 246467 - DNA, 507 bp, Glycine max
  unsure (1)..(507): unsure at all n locations
ngtaggggaggtacgtgtattaatcgtacgcatccctcgcgcactgcggtaccggtccggaattcccgggtcgacccacgcgtccggagagagatgtcatcatcttcagacctggacaggcaaatagagcagttgaagaggtgtgagcctcttaaggagtctgaagtgaaggcgctttgcctcaaagccatggaaatccttgtcgaagagagcaacgttcaaagggtcgacgcccctgtcaccatatgtggtgatattcacggtcagttttatgacatgaaggagcttttcaaagtaggaggggattgccccaaaactaactatttgtttctgggggattttgttgatagagggttttactcggttgaaacgtttctgcttctgctcgctcttaaggtgaggtatccggatcggataacactcattaggggaaaccatgaaagccgtcagatcacccaggtgtatggattctatgatgagtgccttcgaaaatatggttcagtcaag

SEQ ID NO: 246468 - DNA, 504 bp, Glycine max
ggggaggtgtattccatttatgtatcgtagcgctacgccatgctgtaccggtccggaattcccgggtcgacccacgcgtccgctggtaattggaatgagtacaatctaaatcccttaacgaggatccattggagggcaagtctggtgccagcagccgcggtaattccagctccaatagcgtatatttaagttgttgcagttaaaaagctcgtagttggaccttgggttgggtcgatcggtccgcctccggtgtgcaccggtcggctcgtcccttctgccggcgatgcgctcctgtccttaactggccgggtcgtgcctccggtgctgttactttgaagaaattagagtgctcaaagcaagcctacgctctgtatacattagcatgggataacaccacaggattctgatcctattgtgttggccttcgggatcggagtaatgattaacagggacagtcgggggcattcgtatttcatagtcagaggtgaaattcttggatttatg

SEQ ID NO: 246469 - DNA, 502 bp, Glycine max
  unsure (1)..(502): unsure at all n locations
ngggaggtaggtactgngtttatgacgcaggtgatggcactgctgtaccggtccggaattcccgggtcgacccacgcgtccggtccatgcgtagcagctcgcactaatgcgcttttgaaacccgtgttcatctgtatgcaacgatttactagaaggaggtcgcaatttctccatcttcacatttcgctagcacgtgaaatcaaaagttatcgacactttcgcgcgacacgaaatattgggaaccaagcaaaatatctatggctgacgaaccattatatccaatagcggtgcttatagatgagttgaaaaatgatgacatccagctgcggttaaactcaattcgtaggctatcaacaattgcacgtgctcttggggaggagcgaacccgtcgagaattaattccatttttaagtgaaaataatgatgatgatgacgaagtacttcttgcaatggcagaaagaagttggagtgttaattccttaggttgggggagtggaacatt

SEQ ID NO: 246470 - DNA, 77 bp, Glycine max
ttttaaaggacccaagtttacgtacccttgattgcaacgtcatactttttcaatagggccccctaaatccaattaat

SEQ ID NO: 246471 - DNA, 490 bp, Glycine max
  unsure (1)..(490): unsure at all n locations
ngggagggtgtgttctaagtacagacgcacgtcgtcatgcagtcaccggtccggaattcccgggtcgacccacgcgtccggaaagatgggaaaattactcaatgtggaaaatataccgatcttcttaatagtggtgctgattttatggaacttgttggtgcacacaaaaaagctttgtctacactagattcattggatggagcggcagtatctaatgaaataagtgtgttggaacaagatgtaaacgtctccgacacgcatggttttaaagaaaaagaggctagcaaagatgagcaaaatggtcaaacagacaataaaagtgaactacaaggccagcttgttcaggaagaagaaagagagaaaggtaaagttgggttttcagtctattggaaatgtatcacaacagcatatggaggagctcttgtaccattcatattgttggctcagattctttttcaagctcttcaaattggaagtaattattggatgn

SEQ ID NO: 246472 - DNA, 398 bp, Glycine max
  unsure (1)..(398): unsure at all n locations
ccaagccttcggacctgccggacggcttagcctcgggtgcatgattcaatggaccagccttggaaaggtggttgtggggggcctattccgctgcccttttcctggtcctattcctcggcttgaagttggttttccaaagcagaaaattgagaaacataccaccaggtcctcctccttttcccataataggaaaccttaacctnctcgaacagccaatccaccgtttcttccaacgcatgtcgaaacagtacggcaacgtggtttccctctggttcggttcacgtctggccgttgtcatctnctctccaacagcataccaagaatgcttcaccaaacacgacgttgcctttgccaaccggctaccttctctctcgggaaaatacatcttctacaacaca

SEQ ID NO: 246473 - DNA, 526 bp, Glycine max
  unsure (1)..(526): unsure at all n locations
agttagtttaggggttnatactgaatcgtacgctgccgtaccggtccggaattcccgggtcgacccacgcgtccgagaacatacaccttttctcgtggcccgagcactgccgtacttatttgactagggtggctgccggcangatgaggcatccacaatggcaaaccaacactccagggaatgatatagctgatgaagagtctttcaatgactcactaaaggatgttcaggacatgtcccttaggctctcaattgatgctgacttagcaggtttaagttctggacccgacatgcaagaccaagtgaagcgtctcctaagcaggatgaagaagccagattctggtggttcaaatgacactgatggtgggaataagatgcctgacaatgtaactgggaaatatcctctactgtggagaagacgtcggttgattgttatcgaactagatttatatgacaacaatggacttccggataggaagatgatccaaatagtgcaaagggatcatgaaagctcttaactagaccn

SEQ ID NO: 246474 - DNA, 196 bp, Glycine max
  unsure (1)..(196): unsure at all n locations
caaaatgccttaggtggtggtccaactatcccatccacaacaccgaatgatactggttnttcagaacaaaaagtacagccgttgtttcagcctctggttcatctgaaagaaatttatcaacatctgctttgatggaaagaatgccaagtaaatggccacgtcctgtatggcacgcaccatggaagaactacagggt

SEQ ID NO: 246475 - DNA, 528 bp, Glycine max
  unsure (1)..(528): unsure at all n locations
ggttagaagttatttnagtacgtacagtatctctgctatgccagtccggtccggaattcccgggtcgacccacgcgtccgctagcgtgtgccaaatatgctgtgttcggtatggattatgaagggcatggacgttctgaaggtgctcgttgttacataaaaaaatttgataacatcgttaacgattgttatgactttttcaagtcagtcagcgagctgcaagagtataaggcaaaggctagattcttgtatggagagtccatgggaggagcagtgagccttcttttacataaaaaggacccttcattctgggacggtgcagttctcgtcgcacccatgtgtaagatatcagagaaggtgaagccacacccggtggtggtcaacatattaactaaagttgaagatataatcccaaagtggaagatagttcccacaaaggattgtatcgattcagcncttaaagaccctgctaaacgagagaggattaggataaacaagttgatataccaggacaagccaaggctaaaan

SEQ ID NO: 246476 - DNA, 545 bp, Glycine max
  unsure (1)..(545): unsure at all n locations
tggtttagtgagggcgtgtgtttacgtatctactctcangcgcctgccgtaccggtccggaattcccgggtcgacccacgcgtccgcccacgcgtccgcccacgcgtccggattttttcacgaactgtggaaagattcggttcgattgttgggatactgctgggcaagagaagtttggtggcctcagagatggatattatatccatgggcaatgtgcgattatcatgtttgatgttactgcccgtctaacatacaaaaatgtccctacctggcaccgtgatctttgccgggtctgtgaaaacatcccaattgttctttgcggtaacaaggttgatgtcaagaataggcaagtgaaggcaaagcaggttactttccacaggaagaagaatttgcagtactatgagatatctgctaagaaccaccttccatttttgaaaggccatttttggtactttgcccaggaaaaccttgcaggccgatggctaacttgcaactntgtagaaatctcctgcatttgggctccaaccagaagttcaaaattggat

SEQ ID NO: 246477 - DNA, 507 bp, Glycine max
agaaggtcatgtgtgattctagcccctaccgcatgccgtaccggtccggaattcccgggtcgacccacgcgtccgtgtaacttcaaaacatacacctcttctctctgtttctcttcactctctctctccctcccgcttcaactaacatggcaattgaaaaccaagacaccgctgtcagagaaatcaagcccaagaacaggagaatcatgggtgctggagggcctgatgatgaggacaataggtggccaccgtggttgaagccactgctgaaagagagcttctttgttcaatgcaagttgcatgctgattctcacaagagcgaatgcaacatgtattgcttggactgtatgaatggccctctctgctctctctgactcgcccaccacaaagatcaccgtgcaatccagattaggaggtcctcataccatgatgtgatcagggtctctgagattcagaaggtgttggacatcactggtgtccaaacctacattaatcacagcgcaaggg

SEQ ID NO: 246478 - DNA, 499 bp, Glycine max
  unsure (1)..(499): unsure at all n locations
tagtgtgtttgataaagaggacgatagcatgctctaccggtccggaattcccgggtcgacccacgcgtccggttagttcacacactaagttctgaaaaatgagttccaaagtttttcttattctacttatgtgtcatggccactatactnttgatctcctctgaggttgcacccgatgatgcataccagaattttgacaaaacagatgggaagcgtagtgcaaatggggtagatgaaagcaaatattggcgtggtggctatggcgactatggtggttggcgtggtggtggttggcgtggtggctatggaggctggcgtggtggctatggtggtgggcgtggtggctatggtggctggcgtggtggctatggtggtgggcgtggtggctaccgangttggggtggtggctttggccctaacgaacataatgaggctgggattgatgctagccctcacaactaagaaggaaacttgctaaaggctatataggatttaagtt

SEQ ID NO: 246479 - DNA, 496 bp, Glycine max
  unsure (1)..(496): unsure at all n locations
agaggtgnttggtactagtaggctccgcatgccgtaccggtccggaattcccgggtcgacccacgcgtccggttgccattctcatcctcctctgtctctctctctccaccattgccatggatccttacaagctccggccatccagcgccttcaattctcccttctggactacaaattctggtgctcctgtttggaacaacaactcctctttaaccgttggagctagaggtccaattctgcttgaagattatcatcttgtggagaagcttgcaaactttgacagggaacgtatcccagaacgtgttgtccatgccaggggagctagtgcaaaaggtttctttgaagtcacacatgacatttctcacctgacatgtgcagatntccttcgagcccctggagttcagacgcctgtaattgttcgtttctcaactgtcattcatgagcgtggtagccctgaaaccttgaaggaccctcgaggtttgccctgaagtttaca

SEQ ID NO: 246480 - DNA, 215 bp, Glycine max
aaattaaaaattaaaaagatctatttaaaaaaacaaaattttaaaaaattaaaattcaaataaaaaattatttaaaattaaaacataaattaaatttattaaacttatttttaaaaaaaaaccaatttaaaaaacattttattttcctaaataaaaatcctattaaaaaaaattatattatataaattagaattatataaaaaattcccttaaaa

SEQ ID NO: 246481 - DNA, 239 bp, Glycine max
aataacactgatactggaacaagagatggagcgagaaataacaatggtaataaaagcgagttgggtagggaagagagtccagactcagaatcacaaggttggggtcccaataagcttcagaaagtgaacccttccaatcctatggatcaatccactgcagaagccacaatgagaaaagctcgtgtctcagttcgtgcccgatcagaagctcccatgattagtgatgggttccaatggag

SEQ ID NO: 246482 - DNA, 529 bp, Glycine max
  unsure (1)..(529): unsure at all n locations
ggttagagaaggctgnattacgtatcgagacttactgtgcatgccgtaccggtccggaattcccgggtcgacccacgcgtccgcccacgcgtccgcccacgcgtccgcccacgcgtccggtcatcagattcttctgagcaggtccggtctgctttggcttcagtaataatgggaatggctccagtgttgggaaaggaagcaacaattgagcagcttcttcctattttcctttcccttttgaaggatgaatttcccgacgtgcgcctaaacattatcagcaagcttgatcaagtgaatcaggttataggaattgatctgttatctcagtctttgttaccagccattgttgagcttgctgaggataggcattggaaggtccggcttgcaattatagaatatatacccttattggcaagtcacatgggggttaagtttttcgatgacaagctttgtgctctttgcatgcaatggttacaggataagggtcaatcaattcgtgaagcagctgctaacaacttgaaacgccttg

SEQ ID NO: 246483 - DNA, 507 bp, Glycine max
  unsure (1)..(507): unsure at all n locations
agtgagaggactgcngtttacgtaccgaagttcatgccgtacccgtccggaattcccgggtcgacccacgcgtttcgccacgcgttcgtctgatattggaaactcggaagattaaaggcggccagtccagaattgggaccctgaaaaataaagccattgattcctcctctaaattcactcattctctttaaaaaagagggaaaagggaaatttattatccggttccatcaatgtccctttgagattttagaaattccccggaagagacctgcctgcatttaattggcccgaaacttttttagaggggatctttaacctccaaggctttttgcctattatacctggttagggtttctaaaagccagggcccttaacattggaaggccctttacatatttggaagaaatccttacttggcaaaagggattatggaactgataccaatcttgaggattttgaatttggagagctggaagaagtattgcagtattatcctcaagggtacct

SEQ ID NO: 246484 - DNA, 508 bp, Glycine max
  unsure (1)..(508): unsure at all n locations
nagggtagggtgtcttgtgtattatgtagtgctaatccatgccgtaccggtccggaattcccgggtcgacccacgcgtccgcctgactcttgtacacatatgcacattttcgagaattaagtgcaaggtaagtgcttcaagtgactagcatgaagcgcatattacggacaaatgaacgtagacagtgctggtgaagagagtgcagatctcatcctcacggccactggacttacggtgcactcacgctatcttcgtatcaactatccattcacccattagagagcacttctgttgcactcaaagtgctatccttggaatcctgatcctgatatatataagacttggagacagagtacgactgtctatcctatcattgatgcacgaatgcatatactgtattcatcacgatggatacacatcacaataagagtaatagtatccagactgctgatgcaatgatacttctactctggaaatggtgaatgagatatatacgcgacacactcat

SEQ ID NO: 246485 - DNA, 270 bp, Glycine max
cggaattccgggtcggaccaagccttccggtgcctataaaaaagggagtagatatggggttggacccttgcaatggttctgtactcaggtatgcgcgcacgaaaggcgacagaggaaaactcaaacaagttttgtgcaatttactgagcaatgctgttaaatttaccgaggaggggcacatagctgatcgagcatgggctcagaagccaagcttgcagagctcaatgattgctactcaccaatactggtccagtagacttttgacgcgct

SEQ ID NO: 246486 - DNA, 373 bp, Glycine max
  unsure (1)..(373): unsure at all n locations
ttgtgtggcttcgcaatttgtgctgactcagtnggatagccgtcagcttcttattaaatcaaatcccggtgaagttgtgaagcctgattcatacaaggctataaatgatgagggaatgcccatgtatcataggccattcatgaacgggaaactttacattcacttcactggggagtttccagattctctaaaccctgatcaagttaaggccttggaggctgttctgccaccaaagccttcttcacaattgacagacatggagctggatgaatgtgaggaaactacactccatgatgtcaacatggaggaggagactaggatgaagcagcatcaagctcaggaggcttatgatgaggatgatgacatgcctggt

SEQ ID NO: 246487 - DNA, 522 bp, Glycine max
ggtaaaagggatctgtgtatgacggagcttatgcactgctcgtactcggtccggaattcccgggtcgacccacgcgtccgacaatctaaatcccttaacgaggatccattggagggcaagtctggtgccagcagcctgtgtaattccagctccaatagcgtatatttaagttgttgcagttaaaaagctcgtagttggaccttgggttgggtcgatcggtccgcctccggtgtgcaccggtcggctcgtcccttctgccggcgatgcgctcctgtccttaactggccgggtcgtgccttcggtgctgttactttgaagaaattagagtgctcatagcaagcctacgctctgtatacattagcatgggataacaccacaggattctgatcctattgcgttggcctctgtgatcggagtaatgattaacatgtactgttcggggcattcgtatttcatagtcagaggttaaaattctgggattatgaatgacgatacactgcgaaagcatttgcaagggttgtt

SEQ ID NO: 246488 - DNA, 530 bp, Glycine max
  unsure (1)..(530): unsure at all n locations
nagttttaggagggctcnnattacgaatccgagacccttgcgcactgcggtaccggtccggaattcccgggtcgacccacgcgtccgcgtttccattctatctctatcttcacatatctctacctccctcaaacagtttgatgctagctcttgttccaatggcttcctcagttaaactcttatttttgtgctttctctcattgttcatctctttctccatagctcaaccctctttcagaccaaaggcacttgttcttcctgtcaccaaagatgtttctgcctcagttcctcagtatgttacacagatcaaacaaagaaccccacttgtgccagtgaaactaacagttgatcttggtggtggctacttttgggtgaactgtgaaaaaagctatgtctcatcaacctcaaaaccagctcggttgggctctgctcaatgctcacttttcgggttattatggttgcaatgtttaggccaaaattttgagccgtcttttaagaacaccggtaccggtgcttcccatttggggaaa

SEQ ID NO: 246489 - DNA, 522 bp, Glycine max
  unsure (1)..(522): unsure at all n locations
agttttgagtttaggttacgaccgtagcctancgcactgccgtaccggtccggaattcccgggtcgacccacgcgtccgttctgccgtcatactcacaccactcttcttccattttcattttctctgcgaatgcctagtcccatacacaaaccaaatgggtattaagggtttaacaaagcttttggcggacaatgccccgaagtccatgaaggagaacaaattcgagagctacttcggtcgcaagatcgccattgacgctagcatgagcatttaccagttccttattgttgtgggaagaagcggaactgaaatgctcactaatgaggctggtgaagttaccagtcatttgcaagggatgttttcgcggacaatcagacttctagaagctgggataaaaccagtatatgtttttgatgggaagccaccagatttgaagaaacaagagctggccaaacgttactccaagagagctgaggctactgaagatttgtcagaagccttatagactgccaatagggaag

SEQ ID NO: 246490 - DNA, 539 bp, Glycine max
  unsure (1)..(539): unsure at all n locations
nggtagagagtgtttgtgtttaacgtagcgtagtgtcatgccgtaccggtccggaattcccgggtcgacccacgcgttcgcccacgcgtacgcaagaacttagtaagtgaagaccaggagcagattgttgaggggataatgcaaaatattgagaaggatttaattcttcttggtgctactgcagttgaagacaaactacaagatggggttcctgaatgcattgacaagctagctcaagctgggattaagctatgggttttaactggtgataaaatggagacagcaattaatattggatttgcttgtagtttactcagacaaggtatgaaacaaattataattagctcagattcttcagaatcttaatcattgggaaaaaatggaggacaagtctgcttgcttaaagccggaatttaaatcaaggtggttctttcgttaaactaaagggaggtccaaaggcattgggtttttttacaagcatgattggaaacctaattgagggccttaagcccccggattcaattggattggggaaagtc

SEQ ID NO: 246491 - DNA, 504 bp, Glycine max
  unsure (1)..(504): unsure at all n locations
aggtnttaggtctttggtaatcgtaagtagctgctagccctaccggtccggaattcccgggtcgacccacgcgtccgcccacgcgtccgcccacgcgtacgggaagatggcttgggtcaaaattctcattctctgaagaagggctgtgattgtgtaggctatatcaaatactctgatgcgcatttcacaaacttctatggaggtgttgaaacaatcgaaaactgtgtttgtttgcacgaagaagatcatggtattttatggaagcatcaagattggacaacaggtttggctgaagttcgaaggtctagaatgctgacagtttcgtttatatgcactgtggctaactatgagtatggatctttctggcacttttatcaggatggcaagatagaagcagaagtcaagctcacaggaattctcagcttacgagcattgcagccagatgcatctcgaaattatggcacaaccatcgcacctggactatacgcgcctgtccaccaacat

SEQ ID NO: 246492 - DNA, 502 bp, Glycine max
agttgaggggtgttggtagatgtagcgtattcgatgccgtaccggtccggaattcccgggtcgacccacgcgtccgcaagattctaagagagatcttgctgctctttgaagaagggtgtttgcttgattttggagagtgtcgctgctctcagatctcatcaaccttaacctctcatacactactgagaaggtgatcgcagagtacatatggatcggtggatcaggaatggacctgaggagcaaagcaaggactcttccaggaccagttagcgacccttcacagcttcccaagtggaactatgatggttccagcacaggccaagctcctggagaagacagggaagtgattatatacccacaagccattttcagggatccattcagaaggggcaaccatatcttggttatctgtgatacttacacttcagcttgagaacccatttccactaacagatgcccgatgctgccaaggttttaagcattctgatgtgttgctgaaaag

SEQ ID NO: 246493 - DNA, 507 bp, Glycine max
ggtgtatggtgttcgtcgtcgtacgctagtcgctcgcacgtaccggtccggaattcccgggtcgacccacgcgtccgcacacatcgtacgaccgaattcactgcaatcctaattctgcacttcgcgagcattcgaagatggggctgatgatacatctcatcatccttactctgtcagacactactatcaccgttatcgcagagtacatatacaccattgactccggaatggccctgattcagcgacacggggactatcccaggaccagtgcacagccttatctatcttgctaagcagctctatgatggttgcagcataggcgatgctaacatacaagacggatcaaccattatatacgcacttgccattagcagtgacccactcatattgggcaacactatcaccgttatgaccgatactcacactgcagcttgataacacattattactaacgtgaggcacgatactcacaacgtttacagccttcctgatgatcatgctgagctg

SEQ ID NO: 246494 - DNA, 520 bp, Glycine max
  unsure (1)..(520): unsure at all n locations
nagtttaagaggtgtgnatatggtgtggggggtgatgtcatgctgtaccggtccggaattcccgggtcgacccacgcgtccgctcacgcgtccgaaggtcccaattttttcgtaaaccctagaacacacactctctctcggagaagaagaagctgctgcagaagagaatttccaaaatgtcgatgtcgaagagttccaagatgcttcagtacatcaactaccgtatgcgtgtcaccattcaggacggtcgccagctcgtcggaaaattcatggccttcgaccgccacatgaacctcgtcctcggcgactgtgaggagttccgcaagcttcctccggccaagggcaagaagccagccgaaggcgccgaccgcgaggaccgccgcacgctcggcctcgtcctcctccgcggctaggaggtcatctccatgaccgtcgagggccttcttccgccgaagaagtccgttccaagccctcggtccggcggtctgcatgccccgcatcggactgcttgcgtagagga

SEQ ID NO: 246495 - DNA, 283 bp, Glycine max
ctctcatctgtcaacaacattcttcaaatcacaagctgacctattcgtttcaccattcaagacagtctccagctcctctgaaaattcatggccttcgaccgccacatgaacctcgtcctcggctactgtgacgagttccgcaagcttcctccggccaagggcaagaagccagccgaaggcgcctaccgcgaggaccgccgcacgctcggcctcgtccttctccgcggcgaggaggtcatctccatgaccgtctagggccctcctccgccggaagagtcccgct

SEQ ID NO: 246496 - DNA, 525 bp, Glycine max
  unsure (1)..(525): unsure at all n locations
nggtntntaaggggtggatttacgacaggagatctgatggcatgctcgtaccggtccggaattcccgggtcgacccacgcgtccgatggagcagatgaagcaacacctcgccaccgacgctggcaaacaagtcaccaagaaaggtggactcgtttatcagtttcacattgctcctaagaaacttggattcgacgaggtcgtctacaccgttgatctcaagaaaggagaggtcaccaaagggtcatatgaaggaggaaagcctgatgcatctttttcgtttaaggatgaggactttgttaaggttgccttagggaagatgaatccgcagattgctttcatgaggggtgcgatgaagattaagggaagtttgagtgctgctcagaaatttactccggatatcttcccaaagccttctaagctgtgagctgagatttctgcaactacctgcacaaggttgctagaaatatcggttggctgcagtcaaacaaatagatagcaatcatagtagcatcaaaagctgaggat

SEQ ID NO: 246497 - DNA, 507 bp, Glycine max
  unsure (1)..(507): unsure at all n locations
gggtgaggtgtgtgtgtaatagaaagtaactgctagcccgtaccggtccggaattcccgggtcgacccacgcgtccgattgcaaagatgaataccaagcccgttttcttcttgtgcttcctatgtgcactgcttctgatcgctgttgtggcaactgagccatccaaagatgagacacaagaagaaccaaagacacagccagatgcctggggaagaggtggaagtggggggcatgatggaagctggggacacggtggagactgggggcatggcggaagaagacacggtggaggacatggcggaggatgacacggtggaggacatggcggaagatgcagatgctgcggtcgaaagggctgcaaatgttgctgaagtaaaaatcacgaatatatgaactgaacacactcatatacttgagtgtactccatgtaataactagtatatatgtaagaaataagaaataaaagcatggactctatccgggcttgggctggcataagtngaatgn

SEQ ID NO: 246498 - DNA, 521 bp, Glycine max
ggtattgatggttttgtgtcgtagctgattcatgctgtaccggtctcggaattcccgggtcgacccacgcgtccgcccaaattcattttaatcctaattctgcacttcttgatcattcgatttttctcctcaagatgcggatattcgtaagaactttgaccggcaagaccatcacccttgaggtggaatcctccgacaccattgacaacgtaaaagctaagattcaagacaaggaagggatcccacctgaccagcagagacttatctttgcgggtaaacaacttgaggatggtcgcacccttgccgattacaacatccaaaaggaatcaaccctccatctcgtgcttcgcctcaagggtggcatgcaaatctttgtcaagactttgaccgggaagaccatcacccttgaggtggaatcctcggacaccattgataatgttaaggccaagatccaggacatagagggcatcctcccagatcagcagatgctgatttttgccggtaaacaacttgaggatggg

SEQ ID NO: 246499 - DNA, 348 bp, Glycine max
tcatgacttcttcaatggtgcctgcagaaaccttgtttgtactgatcttttcactaggggaatagacattcaagcagtcaatgttgttattaattttgattttccaaagaactcagaaacttatctgcacagggttggtcgttcagggaggtttggacacctaggtttagcggtgaacttgatcacctatgaggatcgcttcaatttatataggattgaacaagaacttggcactgaaataaaacaaattccaccacacattgatcaggcaatatattgccggtaactggtggtaaatacccagattgtattcacaaccgtggtgaatagcattggttgatgcgaatg

SEQ ID NO: 246500 - DNA, 523 bp, Glycine max
tagtttttgagggtgtgtgatggaaagaatcctcaggcactgctgtaccggtccggaattcccgggtcgacccacgcgtccgcgaacggcacaacaggaggacgcatctggggtcgaacaaactgcaccttcgacaacgcgggacgcgggaagtgcctcaccggcgactgcgagggtgttctggagtgcaacaaaacaggtacacccccgaacacggtcgttgatttcgcgttgaaccagtataacaacctcgacttctacgacatctccctcgtcgacggtttcaacgttcccctacagctgaccccgacctacaactgcagttccgttaaatgcgccgccgacatcatcggagagtgccccactcagctccaggttcctggcggctgcaacaacccctgcacggttttcaatacgactcagtactgttgtagcaccggagctgctgggtgcggtcccacagattattccaagtttctcaaggagaggtgccctgatgcctacagttaccctatggacgatg

SEQ ID NO: 246501 - DNA, 527 bp, Glycine max
  unsure (1)..(527): unsure at all n locations
natgtgaggtgnagtgngaatatgtcaggttanctgcatgcacgtaccggtccggaattcccgggtcgacccacgcgtccgattcccgcacaagcatacctagcatatgggctgtgggtgatgtcacaaaccgaatgaatgtaactccggtggccttgatggaagcatcgtactttgctaaaactggatttggtgggcaaacaatcaagccagactacagtaatattccctatgcagtgttcaacattccaccactttctgtaattggtctcaatgaggaacaaggcatagagccaacccatgggggatcttgtgggttttacatcaacccttcaatccctatgaaaaaataccaatctctgggcggacaggaaaaaactggtattgaagcttgttgntggatgcttgagacagataaaggttctcggaaccctcaatggtgtggacctgatgcaacctggaaatattgccggggttatgctggtgccgtttaaatgtggaacctaccaaggcacagtttgatagcn

SEQ ID NO: 246502 - DNA, 507 bp, Glycine max
  unsure (1)..(507): unsure at all n locations
ngggaggaggtgtttgtgtctccgaccgccattcgctagccgtaccggtccggaattcccgggtcgacccacgcgtccgctccttcgcactcctctttctctccgtgttgccgttcagtgacagcgagtgaaagaatagaagagaagagaacataaccgaaagagaagaagaagaagaaagctagggtttttgcaattgcaacgatggcgcatcaaggagaaccggcgaagctgcgatggggagagctggaggaggacgactgagaggatttggacttcctcctgccgccgcggcaggtgatagggcccgacgagaacgggataaagaaggtgatcgagtacaagttcgacgaggacgggaacaaggtaaagatcaccaccaccacacgcacgcgcaaactcgccaacgcgcgtctcagcaaacgcgccatcgagcgccgctcctggcccaagttcggcgacgccgtacacgaagacgttggcgcccgtcttaccatggtcttcacc

SEQ ID NO: 246503 - DNA, 530 bp, Glycine max
  unsure (1)..(530): unsure at all n locations
agtttnntaaggggtgtgtgattacgtaccgtatctcatgccgtaccggtccggaattcccgggtcgacccacgcgtccgctccgacacaatcgataacgtgaaagccaagattcaagataaggaagggattcctccggatcgacaacgtttgatcttcgccggaaaacaactcgaagacggcagaaccctcgccgattacaatatccagaaagaatcgactctgcatttggtgcttcgtctccgcggagggatgcagatcttcgtgaaaaccctaaccggcaaaacgattacgctagaggtagagtcctctgacacaatcgataacgtgaaagcgaagatccaggataaggaaggtattccaccggatcagcaacgtcttatcttcgccggaaagcagttggaagacggcagaaccctcgccgattacaatattcaaaaggaatcgacgcttcatctggtgcttcgtctncgcggaaggatgcaaatcttcgtgaagacgctcaccgganaaacgattactcttgaggn

SEQ ID NO: 246504 - DNA, 544 bp, Glycine max
  unsure (1)..(544): unsure at all n locations
agttttttaaggggtgnagtgatggtacgcagtcctacgcgcactgcagtaccggtccggaattcccgggtcgacccacgcgtccggcgcttattctctcgcattccgtggagatctagtgcttctgctgcaagacctggctggggattagggtttcgattcggaggtagactaagatgttcggaagggctccaaagaaaagcgacagcaccaggtactacgaaatcctcggcgtttccaagaacgcttcgccggatgacttaaagaaggcttacaagaaagccgccattaagaaccatcctgacaaaagcggggatcccgagaagtttaaagagcttgctcaagcctatgaggttcttagtgaccctgagaagcgcgagatttatgatacatatggagaagatgctcttactgaagggaatgctagtgggttgaagttgccttaaattcattgtaattaaattaaattcaatgaacatttggaaagtcccttaggtgtaggatatacattatttcctataaaggaatcactatggcgaaagga

SEQ ID NO: 246505 - DNA, 500 bp, Glycine max
  unsure (1)..(500): unsure at all n locations
agtgagggcttgtgtctacgtacgtagntgctagccgtaccggtccggaattcccgggtcgacccacgcgtccgcttcaaggctgtgtgcacattgtgctttctttatgggtttgcagaggaaacagggagaggttggtcaagaaggtcagcaatttgatatacgagggacagttgaagaatttcggcattctgttaatatgtacatgttctggaaaccggggatggagatttatgtttctcatgttcgtagaaggcaaattccattctatgttgttcctgatggttataaacgatctcggctatcaaggccaacatcacaagttgagaattgtaaatcatttcataatgaggtttcggggactgaacatgttgagagaatccgtaagaggaagaacaatgactgtgtggatgtgaggggggatgctatagttaaaaggcaatctgctagtccttctgaagatagattggcaagacacaggcaccttggtactggtggtn

SEQ ID NO: 246506 - DNA, 497 bp, Glycine max
  unsure (1)..(497): unsure at all n locations
ggagggcctggtgtacgtagtactcatagacgtaccggtccggaattcccgggtcgacccacgcgtaccgtccacgcgtacgttaaagatcttgcaacatctgatgcaattaaaatttcccgtgaagtgggccgtactggagataggaccattggagttttgacaaagattgatcttatggacaagggtactgatgctgttgatatattggaaggaagagcatataggttaaagtttccctggattggtgttgtgaatagatcacaacatgacataaacaagaatgttgacatgattgctgctaggcgtagagaacgtgagtacttcaatagtacccctgaatataaacaccttgcgaacagaatgggttccgagcatctggcgaagatgctctcaaagcatttggagacagtaatcaagtccaaaattcctggcattcaatctctaattaacaaaacaattgctgaacttgaagctgaactaactcgtttaggaan

SEQ ID NO: 246507 - DNA, 519 bp, Glycine max
agtttgggtgggctgaagacacgaacagtctctcctggcatgccgtaccggtccggaattcccgggtcgacccacgcgtccgaccacgcgtcccaaaaagctcttttccttctaaatttgattccttagttcagcattctgttattatatatggcttcttcaccttcctcagaaaacaaaaacctagagggagtagctggtggtgccggagagaaacccattccacttggtgagaacgttctgcagaagcatgctgcattctttgacttgaataaagatggtgtcatctacccatgggagacttttaaaggttgcgtgaaatcgggactggggttttgctgtccgttggaggtgctattttcatcaatgtgtttctcagtcagagtactcgtcccggaaagtttccatctatactttttccaattgaaattaaaaatatccaacgcggcaaacacggcagtgacactggagtctacgatactgaaaggaaggttgtaccttcaaaattgaagaaatttt

SEQ ID NO: 246508 - DNA, 529 bp, Glycine max
  unsure (1)..(529): unsure at all n locations
aggtctagggaaggctgnattgatcgacagagtcctanggcactgccgtaccggtccggaattcccgggtcgacccacgcgtccgcccacgcgtccgcccacgcgtgcgcccacgcgtccgttccaacattattgagaatgaggctgtttctacttcaaatgtggtcaagtttgaagtgcagctttacaaaacccgggaagaaaagtatctgcttgatcttcaaagggtgcagggtccacagtttcttttcttggatctatgtgctgctttccttgcacagcttcgtgtcctctagagcgaagagcttaggctcaccagagacataaatatgccttgtgtttcatgtgaataagcttacattgtacatacaagtatcttttcggtccaagcttatcctctgttttctacccgtttatctgtgggtaaacattataatgagccaatcccaagtatgggatttgcttcgttaacaatggtgctcgactaggtttcccttctcttgtgattttaattttatcagtgtattga

SEQ ID NO: 246509 - DNA, 522 bp, Glycine max
  unsure (1)..(522): unsure at all n locations
agttttaagaggcgtgnagccatgatacgatactcttggaacgccgtaccggtccggaattcccgggtcgacccacgcgtccgtctaattctgcaacaagttccaaactttcaaatctcaccgccccaaaaattctttttgggttacccatttgactttagcctctgcaacagagtctcagatctctgcattccaattcccatggctggtcgctatgacagtaaccccttcgatgaggaagaagttaaccctttctctaatcctggaagtgttcccgctgccaccaattcaaggcttccacctcttaagccagaacctgttgattataattatggctttggtgcgacagttgatatacctcttgattcatcaatggatttgaaaaagaaggagaaggaacttcaagccaaggaaactgaattgagaaaaagggaacaggaagtgagacggaaagaagaagctgcttcacgagctggaattgntcttgaggaagaagattggccggctttttttccaataatn

SEQ ID NO: 246510 - DNA, 506 bp, Glycine max
gagattaggtgtattgtgattatgtcagggtaacgcatgccgtaccggtccggaattcccgggtcgacccacgcgtccgatggagcattacaggaggagctactgcacatacgacgagtcttagcaccagttgtggatgctcgcccagaacatggtcagagccgcggatcatgaggcgctggaccacaccgtcgtccacggcgtcacgcacttcttcgatctcaccgaggacgagtttgagaagctgtacgctggcctcaatggcggcttcccgtgatcgaataatgcctccggcggtattgcccccccgtttgaggtggactggctggcggacaatcttgattggaaagaggaaggaactgtcaccggagctaagttacagggtaaatgtcgatcatgctgggctttcagctccacaggatctatcgaaagagccattatttgtgccaacggaaaggtcgccagacttagggacaacatcatcttgactgggacaacaagtgtga

SEQ ID NO: 246511 - DNA, 504 bp, Glycine max
  unsure (1)..(504): unsure at all n locations
aagggaggtgtgttgngtttaagtagcggtcctgcatgccgtaccggtccggaattcccgggtcgacccacgcgtccgctccttcccctgctcctgaagcacatgcaccagcaccaaaagccactagccccatttctgcaccaaggtctacaccagcacctggcccttcctctggatcagttacttacactgttggagagactgcaggctggattgttcctggcaacgcttccttttacccagcttgggcctctgccaaaaacttcaaggttggagacatcctagttttcaactacccatcaaatgcacacaacgtagaggaggtgacaaaggccaactacgattcttgcagctcagcctctcctatcgccactttcaccactccaccggccagagtcccccttagcaaatccggtgaacattactacatctgtggaattccggggcactgtttgggaggacaaaagctttccatcaacgtcaccggcggcagcaccgtcaccc

SEQ ID NO: 246512 - DNA, 501 bp, Glycine max
agtaggtgagtgtttctagacgcgtactgcatgccgtaccggtccggaattcccgggtcgacccacgcgtccgcgaaaaattgaggattttgttgcaagagcaaaggaaacagcatgtggcagagttattggagaaggtggaatcgaatgctcttcatttgttgagacagaaagatgaagaaatagcgcaggcaacaaagaaaagcaccgagttgaaagaatttatgacaaggctgaaggaggttgaagccgtttgcaacccaatcatcagtgctgcgtatcagagatcaggaggagccccaggtggtgcaggtggcgaaggcgaagacgaggatgattctcacgatgagctctagattagtctaaatttttatcatatatgggaaattaagaattcccatgcgctctgcgcttgctttcttggtgccgatgataagatacttgtgaaattactgtcaaaaagctttcatcaacgttaccggcggcagcacccgcaccgta

SEQ ID NO: 246513 - DNA, 309 bp, Glycine max
ggatggcccttctgcttcggctggaggttgctgcagtggaagagtacctatcataacctatctgcatcaatgtagtcctttatgtcttctcttctttcattttgggtttggatatgaagatatatatgttctacgtccattcataaaatcagataattgtataatgttttctttttaatcttgactttgtttctttgaaaaacccaaactcgtgctggacacgatagcaaagaccaacatgattctctcgatatgcatctacttacgtctaaattattaccaggttcgcccactctagagttcccatgc

SEQ ID NO: 246514 - DNA, 526 bp, Glycine max
agtttagttagggttttatgctgtagcgatacactgcacgtaccggtccggaattcccgggtcgacccacgcgtccggagagaacccataacagctagttaatggccctcgctttcacttcttcaatttccgcaccaactgccaccttcccatcatcggaacccaaacttccgcaaattgggtcaattaggatttcggagaggcccattggaggcgccgttaatttcaatttatctcaaagacggagcttggtaaagcccgttaacgccgaaccttcacgcaaggattccattgttcctctcgcagcaacaaccatcgttgcttctgcttctgagacgaaagaggaagattttgaacagatagccagtgatctcgacaatgcttcacctcttgaaatcatggatagagccctcgacaattcggcaacgacttaactatggcctcaatggttcctgaggaatgtgcttggattgagtatgcgaaattgaccggtcgaccttttagggttttcagtttggacactgga

SEQ ID NO: 246515 - DNA, 519 bp, Glycine max
  unsure (1)..(519): unsure at all n locations
agtttnaagaggcgtgnatttacggacaagcacgctcgcgatacccgtccggaattcccgggtcgacccacgcgtccgctcttctcttcgctcctgcacttgttgtttctttgcccttcatggcatctcaagctagccttgtccttcaaaagcagctcaaagatctttgcaaaaaccccgtcgacggcttctctgccggtttggtcgatgaaaccaacatttttgaatggagtgtcaccataattgggccgcccgatactctctacgaggggggatttttcaatgctattatgagtttcccatccaattacccaaatagtccaccttcagtgaagttcacctcagagatatggcaccccaatgtatatcctgatggccgggtttgcatatcaattcttcatcctcctggtgaggatccaaatggttatgagcttgcaagtgagcgctggacacctgttcatactgtagagagtatagtattgagtatcatatcaatgctttccagccctaatgatgaat

SEQ ID NO: 246516 - DNA, 529 bp, Glycine max
  unsure (1)..(529): unsure at all n locations
agggtgaggtgagggagtgtattgtctttcgcgtagtctgatgccagtacggtccggaattcccgggtcgacccacgcgtccgctttgatggaaattttccagtggattcttggttaccaatttttgtgaattgtctttatcctggaagtcaattacctccagaagctgtcgttgtaaatgttacatgtggtagtggacgtggtggtttacccaccaatgcttggattagttctgcagttaacaatcgctcctcagatatcaacaaaatgattcgcacagcacttgggaaaggtaagaaaaattttttcttactagagttgatccttttccagtagctttactggctgatctttttggcgttaagaatgaaattctgagttctaacgccgctaaccctatgctgacgcgactttttgagaactgtaagagtctcacatatctggttgatgagtgtcctttgcatatgtgaactagtattgaatattttatcacttaattatacgccattctatgtgcaatgagtgtgtn

SEQ ID NO: 246517 - DNA, 503 bp, Glycine max
ggggaggtgtgtgtgttgtcagctcgtatccatgacgtaccggtctcggaattcccgggtcgacccacgcgtccgcccacgcgtccgctttcacatcatttctcaatcttacttgcttgcactctcatcagaggaggaaagcttttgataaagaaagaaacagaaagaaccttgtaacttttggcttgaaaagccatggccagggagcaaattcaggtgctaaatgcgcttgatgtggcgaaaacacaatggtaccatttcactgcaatcatcattgctggaatgggcttcttcaccgatgcatatgatctattctgcatatcccttgttacaaagttgcttggccgcatatactatcacgttgatggcacagcaaagcccggaacattgccttcaaatgtttcagctgctgtaaatggcgtggctatctgtgtaacactctcaggccagcttttctttggctggcttggtgataagatgggaaggaaaaaagtctattgcat

SEQ ID NO: 246518 - DNA, 501 bp, Glycine max
aggtggtgtgtgtgtttacgtagctcatctcatacgcgtaccggtccggaattcccgggtcgacccacgcgtccgcccacgcgtccgcccacgcgtccgatatatttatcttttcttggaagaaggaatccatagaatggcaatgcacaagagcagttcaggttcagcattgggtccgggaggcttggacttaactcaagccttcttcaagtcgatcatgaacgctgcagcttcttctcccaccaaacgccacaacaaaatctctgttgttggggcaggcaacgtgggaatggccatagcccaaaccatcctcactcaggatctcaccgacgagcttgtgctcgtggatgcaattcctgacaaactccgcggcgagatgcttgacctccagcacgccgctgccttactgccccgcaccagaattcaggcctacaccgattactcggtcacgctagtctctgacctttgcattgtcacagccgtagctcgtcaaattaacgg

SEQ ID NO: 246519 - DNA, 501 bp, Glycine max
  unsure (1)..(501): unsure at all n locations
gagctntgtcggaattttgatgcgtacggcatgccgtaccggtccggaattcccgggtcgacccacgcgtccgagtcagtccaagttggatgacgagcagtggctagcttattggatcatctattcgttcctgacccttacggaaatggttcttcaacctatcttagagtggataccaatttggtacgatgtgaaactattgacggtggcatggctggtgttaccccagttcgcaggagctgcgtacttgtatgaaaggttcgtgagagagcatataaggaaatacataacggagaaggagtatctctatgtcaaccaccagcaacaaagcaaaaagtctcccaataacgggggcaaggccaagaagttcgttgaattcgtcacacccaagaaaggggatcaggaggtgtattgagttggcaattggacggtgccgagaagtgtagaggtttttaactgaggatcttcgtattggtctttgaatcaactttcctttaattg

SEQ ID NO: 246520 - DNA, 404 bp, Glycine max
  unsure (1)..(404): unsure at all n locations
cctcgtactgtaaaggaaatttgctctgttgccaatggggccacaaagaaggaaattggccgagctaaagaatacatagtaaaacaactgggtttggagaacggtaatgctgtggagatgggtacaatacatgcatgggacttcatgaggcgattctggtctaatcttcgtatgaataatcaagctgttaaagctgctcaggaagctgtgcataaatcagaagaatttgatataaggaggagtcccatttcaattgctgcagcagttatatacatcataactcagctttctgatgataagaaacctctcaaagatatatcacttgccacaggcgttgcagaaggaacgattaggaactcctacaaggatctttatccccatgtntccaaaataataccaaattg

SEQ ID NO: 246521 - DNA, 403 bp, Glycine max
gctgtaccggaattcccggttcgacccacgcgtccgagccgaagtaggccgagtatctcttgctgaagtgagtgaccgaggtgaagccgcagggcagggccacctctagcaccgacagggtggagtgctgcagcaggcgccgtccttcggtgatgcgcaattccaggtagtagcgcatgggcgcggtgtcgagctgctcgcgaaacagccgctcgacctggcgccgagagcggccggcgtagtcgcacagctgctcgatggtcaggggctcctcgatgttggcctccatcagggtcaccacctagcgcagcggcggcgtcatctgcaccttgagcgtctgattgacctggccgaagcgcgattcctcgaaagccaggatattgaccaggccatcggccagggc

SEQ ID NO: 246522 - DNA, 518 bp, Glycine max
  unsure (1)..(518): unsure at all n locations
ngggaggtcgtagngtgtcctatgaggggaagaagtatagcacgctgtaccggtccggaattcccgggtcgacccacgcgtccgcccacgcgtccgacccggagccttggtgtatgccacgactttttacggctggtgtaggtgaattctatgagggatattacgcaaataagggtgtaaatatcattaaaggaactgttgctgttggattcacttctaattctgatggagaggtaaaagaagtcaaactaaaggatggcagggtcctggaagctgatattgttgttgttggtgttggaggaaggcctcaaacagtcttagtcaaagggcaggttgaagaggagaagggtggaatcaagaccgatgctttcttcaaaactaatctctccgatgtatatgctgttggtgatgttgctactttccctttgaaattatacggtgaattgagaagagttgaacatgttgatcattctcgcaaatcggctgaacaggctgtgaaggccatcaaagcagctgag

SEQ ID NO: 246523 - DNA, 510 bp, Glycine max
ggagtgtgtattgatgagggaagatgtatgagatgctgtaccggtccggaattcccgggtcgacccacgcgtccggagcttttgtcaattttctattgaccttctcggtggaggaattttagtggacaaaacgtggagattggatcacacttatacaaaattctccaattagtaacttgttgagagttgctgcttggaagaaaggctgtttaatggtcaagattgtgatgtctgggaatgcagcagtcaaaaggagtgattgggcctcattggtacaagtgtttttaacaaacagcaacagtacagagcattttgatgcatgtaagtggacaaaatcagaaccacattcctgggaattgatcttcccaatagaggtatgtggtcctaataatggttttgaaatgtggagttctgagtgggcaaatcaaacttcatggcatttgagtttccttattgacaatcccaaacagtctacagtttttgatattctcttaggaatctctcaagatt

SEQ ID NO: 246524 - DNA, 383 bp, Glycine max
ccgtccggattcccggtcgacccagcgtccgcatggccgtatctccaattttgtcgttgttggctatctgctatctcatttatggcacgggtggtcttcccattgaatctacccaccatgtttacagaaatcttcagactctatcttctgattcctctgatcaaccttatagaaccgcttaccatttccaacctcccaaaaattggataaatgaccctaatggaccaatgaggtacaaatgactttatcatctcttctaccaatacaattcaaaaggtgctgtatggggtaatattgtgtggccccactcagtatcaaatgatctcgtgtattggactcctctagatcatgccatctaccctcctcaaccttatgatatcaac

SEQ ID NO: 246525 - DNA, 510 bp, Glycine max
  unsure (1)..(510): unsure at all n locations
ggtattgaggtgtttgggccctagttcgtaccgcatgncgtaccggtccggaattcccgggtcgacccacgcgtccgcccacgcgtccgggtgccctgtctaatctaggccatatatgctcgatgctgttggacggtaggttgtcaatgcagctgactcatctatgttcggacaagatggtagacttatctgaacttcaaaaccactatctggaaatggaaacgaaacatggaatgagaaaggatatgcagtcagaatgtctacatgtaacccttgacgaggtactatgaaaataaacgatggtgcatacctaactctaaagatgatatacagcaacaacgagtgccgcattggagtaatgaagattttctacatctaggaggctgaacaactgtcgcacgaacacctgctatgacatgatgcatgcgtactaagtgaatagatcttggaatggatccaacagactattatcttatatgatatctatatgagcaaatgaatatggtgaga

SEQ ID NO: 246526 - DNA, 315 bp, Glycine max
ccactcgtcctaaaaaaaaaaaaataaaaaaaaaaataatttaataaaatataaaataatataataaattagtaagttataatataaaaattaataaataataaaaaaaaaaaaaaaaaaaaaaaaaaataaaaaaaaaaaaaaaaaaaaaaaaataaataactttatcattttaaaaaacaatatttttcttattcattctattcttaaaaaaatcatataaattattattaataaaatatattacaattactactattaaaattttttaatttaaaaatattaattatatcaaatttaaattcccttatataa

SEQ ID NO: 246527 - DNA, 514 bp, Glycine max
  unsure (1)..(514): unsure at all n locations
nggaaaggtgttgtattatgagaggaagatagtatgcatgtatcggtccggaattcccgggtcgacccacgcgtccggagagtataatgtaagtatttactttcctgtcttaagttccatggaactcagatagcggagatgccattcattggaactcgccatatatataggcgccaggggatgtgccgccggcttttttccgccattgaatcgaccctatgctctctgaaggttgaaaaactagttattcctgccattgctgaagtcacaaatacatggacgacagtttttggcttcacacatctggacaaatcactcaggcaagaaatgaagtcactgaatatgatggtcttccctggtatagatatgttacagaagctgttagtggaacaaggaaaccatgagggttctgagaaaatggaaaatgaagacgatgattttatcaagaccaaaatggaaagtaggtcagatgtgggttcttcaactccacaagatcctcatggtagtgatgatg

SEQ ID NO: 246528 - DNA, 514 bp, Glycine max
agagaaggcttctatccatgcacgtagcatacagcactgccgtactcgtccggaattcccgggtcgacccacgcgtccgctttccacacacacaacacaaatacctctctttctctctcttcttcgcattctgcggacatacaaaaactcacactctctctctctctcttcaaatcaaaacccctcacaaaattcacaacaacatacacacaaatcccaaatcctgtcttctcatataaaagaacccttctttcgaatccttcccgctctctctctctcttattctttttccctatccgattcaattcgcgcgcagttccaaaccctagtccccctctccgagctctgtgattcttgggttgataaaaaaaattagggtttgatggctgaccaaggattggaagggagccaaccagtggatctacagaagcatccttctgggatcgtgcctacccttcaaaatattgtgtccacagtcaatttggactgtaagttggacctcaaaacaattgcc

SEQ ID NO: 246529 - DNA, 516 bp, Glycine max
gggggagtgtctggtcctagggggtaggagtgatctatgctcgtactcgtccggaattcccgggtcgacccacgcgtccgcggcgagcgaaccgggaaaagcccaccatgaaaatcggtcgccctcggcgtccgaatggtagtctggagaagcgtcctcagtggcggaccgggcccaagtcccctggaagggggcgccagagagggtgagagccccgtcgcgcccggaccctgtcgcaccacgaggcgctgtcggcgagtcgggttgtttgggaatgcagccccaatcgggcggtaaattccgtccaaggctaaatactggcgagagaccgatagcgaacaagtaccgcgaggtatagatgaaaaggactttgaaaagagagtcaaagagtgcttgaaattgtcgggagggaagcggatgggggccggcactgtgatccggtcatagttcgtaatgtttagagctttgccttctatgggctttttagaattgaaatttgtaatttggctaatttcc

SEQ ID NO: 246530 - DNA, 509 bp, Glycine max
gtgaagttctgtgctgtagagaaactcagcactgctctaccggtccggaattcccgggtcgacccacgcgtccgcctaaccttccttccattcactactcctccttcacttaaaaaatttcagccttgcagggcctcaacttttacaattattacaatttagcatcactctttctcttcctcaatccaatcccctctcgatcgaaccaagaaaatttaagaacccaaaccatgtatttatcggagaagcctcgccccatcgatttctacaaggaggaaggcgcgcgtgacatgatgatcgaggtcgtctccaacggcgacctccctcctccgcctcctccgccgcctccgccgatgatcctcggcgagagcagcggcgaggaccccgaggtcgagataaaggccccgaagaagcgcgccgaaacctgggttcaggacgagacgcgctccctcattggccttcgccgcgagatggactcgctcttcaacacctccaagtccaacaagccc

SEQ ID NO: 246531 - DNA, 508 bp, Glycine max
  unsure (1)..(508): unsure at all n locations
gaggggnaagtgtgtgggtatagtgatggaagtaagctgtaccggtccggaattcccgggtcgacccacgcgtccgcaaaacccaacatgaaaacccttaacaaagcctcacttattttattccctctcttgttgctggccctattcaagcattcccatgctgcaggaatcgctatctactggggccaaaacggtggagaaggcaccttagcagaagcttgcaacactagaaactaccaatatgtgaacatagccttcttgtccacttttggcaacggccaaactccacaactcaaccttgcaggtcattgtgaccccaacaacaatggctgcactgggttgagcagtgacatcaaaacttgccaagaccttggcatcaaagtgttgctctcccttggtggtggtgctggaagctactccctcagttcagctgatgatgccactcaacttgcaaactacctctggcagaatttccttggaggtcaaaccggatcatggccattatgtn

SEQ ID NO: 246532 - DNA, 434 bp, Glycine max
tcccgggtcgacccacgcgttcgaccacgcgttcgatcactcgttcgcattcattggcttaatgctagcaatgtcttcctggttgtgcattcatttctttcctcttctctcaataacccttttttcaatttggtgcttaacaacatctcaagcctccaataacatatcacacccctatatccttcccattaataaaggccccggcacaaaatatgtactacacttcagttggcattggaactcctaggcacaaccttgattcagtcattgatctttctggtgaaaacttatggtacgattgtgacactcattacaactcatcatcctacagacctatatcttgtggctcaaagcaatgcctcgaaattggatgtgttggatgcaatggccccttcataccaggttgcacaaacaatacattccctgttaatgta

SEQ ID NO: 246533 - DNA, 512 bp, Glycine max
ggtggaggtgtgtgttcctagagggaagaagtaatgctgtcccggtccggaattcccgggtcgacccacgcgtccgctgttccgttctgatcagaaagggaataacggtaacggagatatggggcttctgtctggcagagtaactagagagagcctgaaaccaggggatcacatctactcttggaggactgcttacatatacgctcatcacggcatttatgtcggcgatgacaaagtcattcacttcactagacatgggcaagaagtaggaaccggtactgcactagatcttctcctcatcagttcaggaccagccaagcctcgagaaagttgcccaacttgtacagcaccccaagaggaacacggggttatctcctcatgcatgaactgcttcctagctggtggcgttctgtatcggttcgagtatgccgttaccccagcccttttccttgcgaaagcccgcggtggaacgtgtactcttgctgtctctgatgacgatgataatgtcgtcc

SEQ ID NO: 246534 - DNA, 373 bp, Glycine max
ttcccgggtcgacccacgcgtccgtccatttgcatttgctctctctcagtttccaagaatcttaagctatgggaaagtcttgtccgaccgtgagcgctgattaccagaatgccgttgagaaggctaagaagaagctcagaggctacatcgctgataagagatgcgctcctctaatgctccgactggcatggcactctgatggaacttacgacgtgagctctaagaccggtgcaacgtacggatctatgatgattcagtacaaactatttcaaaaccttttcgacgttacagacatctaccgtactctgatcatgcctgtcggactcgacgcatatataatcagtttgctcgctgttgaataccgaaactaatg

SEQ ID NO: 246535 - DNA, 415 bp, Glycine max
  unsure (1)..(415): unsure at all n locations
cgtccgnattcccgggtcgacccacgcgtccgcccacgcgtccgtccacgcgtccgcacacgcgtacggaagcatgctggaccatggcgggcatcacagctgggaacacaaagcagattcaggatgtaattgaggctagtataattgctcctttagtccatgtgcttcaaaatgctgagtttgatatcaagaaagaggctgcttgggcaatctcaaatgctacttcgggtggatctcatgaacaaatcaagttcctggtaaggcaagggtgtattaagccctggtgtgatcttcacatatgtcctgatcctaggattgcgacagtgtagctggaatggcttgagatcattttcgaagtactgaagctgagaaaaatgtgaaccatactcatggtgtgaatgtaaatgcatatact

SEQ ID NO: 246536 - DNA, 497 bp, Glycine max
ggagaagtgtgtattgcatgaggaaagacgaaggcactgctgtaccggtccgggattcccgggtcgacccacgcgtccgcccacgcgtccgcggacgcgtgggcgccattgctattgtggaaaaacagacaggaggttcgcttatgattcgcttacttgcgtcaactgaaagtaccaaaaccctgccacacctgccctcacaacctcgccttctgttccccctacgatctccgcaatttcatcgtacccggtcacaacaacctctacctcgccgacgtcgccgattccttcgtcttatctctctctgctcatgacaacatatgcagcgtccagattgcgttgaatgtcgttcaacgccggtgtgtcaaagtttcttccggcgattccgtgcaagtgagccgatttgtgcccactgaagacttcaacctcgcactgctaactcttgatttggaatctgttaaaaaggtgagtaagaatgaacagattgattctgttct

SEQ ID NO: 246537 - DNA, 508 bp, Glycine max
  unsure (1)..(508): unsure at all n locations
tgaagcgtctgttgcatgagggaaagatcagcatgctgtaccggtccggaattcccgggtcgacccacgcgtccggggaatgagttcttttgtgaggtggatgatgattacatacaggatgactttaacctgtgtggattgagcagtcaagtgccctactttgattatgcccttgatttgattctcgacgttgagtcatcccatggtgacatgttcacggaggaacagaatgagttgattgaatcggcggcggaaatgctttatggtatgattcatgctcgatatgtgttgaccagcaaaggaatggctgccatgcttgacaaatacaagagctatgattttggtagatgcccaagagtttactgctctggacagccctgccttccagttggtcaatcggacattcctaggtcaagtactgtgaaaatatactgccctaggtgtgaagatctttactatccgcgttccaagtatcaaggcaacattgatggagcttactttggaacan

SEQ ID NO: 246538 - DNA, 503 bp, Glycine max
  unsure (1)..(503): unsure at all n locations
gtggtgagtggtgntttatgagggaaggatggtcgctgtaccggtccggaattcccgggtcgacccacgcgtccgagagaagtagggttcgaaaatggcagcagaatcatcagagggcgaagaagaaaccaagtgaagcggaggtaaccaattgctcatagttgacgatgacttaacggaaatgggaaagaaagccgcttggagcgtgagttcctgcaaacccggtaacggcgtttcctctctccgtgacgacaatctcgaaacttattggcaatccgacggagggcaaccccatttagttaacattcagtttcagaagaaagttagacttcaattaattgtgctgtacgtggatttcaagcttgacgagagttacacgccgagcaaagtttccatccgtgccggtgatggttttcacaacttgaaggagattaagaccgtggaactcgtgaagccaactggatgggtttatctttccttgtctggagttgatcctaggaacc

SEQ ID NO: 246539 - DNA, 459 bp, Glycine max
  unsure (1)..(459): unsure at all n locations
tccgnattcccggtcgacccacgcgtccgtctctgtccccctccgactgcgatcgatcaaggcagcgtctacaatgagaaaggtggagatggctagatacaacgcgctgctgattctcctgctccttctaatacagtgaaaacacagagagaagcactcttctcactaccttttctagatacagaaactcatggcctgagttaatccgaacggcttcgacgattctccggcgactccaacgcacaagctacagttcattcactacaacatattcggaaacctcttctaggttacggccaaataccgtcctccaatcatgcctgtcagacgcggctcgtatggaatcgattgctcgctgttgaataccgagacgaatgagctgatggcggttaagaagatagcgaacgctttctacaatcacatggacgctaagcgtacgcttcgtgagattaaccttct

SEQ ID NO: 246540 - DNA, 420 bp, Glycine max
tccgattcccggtcgacccacgcgtccgcttgtactgttctattagttcatactaagttctgaaaatgagttccaaggttttgcgtgttggacttatgttcttggccactatacttctgatctcctctgaggttgcacccgatgatgcatacgagaattttgacaaaatagatgggaagcctagtgcagatggggtagatgaaagcaagtattggcgtggcggctatggtggcggctatggtggtggttatggaggtgggcgtggcggctatggaggcgtgcgtgaaggctctggaaggtgccgtgctgcaatcatgcctgtcggacgcggctcgtatggaatcctttgctcgctgttgaataccgagacgaatgagctggtggcggttaagaagatagcgaacgctttcgacaatcaca

SEQ ID NO: 246541 - DNA, 509 bp, Glycine max
  unsure (1)..(509): unsure at all n locations
ggaggggaggtgttgtttccatccgaatagtagtangctataccggtccggaattcccgggtcgacccacgcgtccgcccacgcgtccgaatttgttgaggcacattaccttggacaacaatgagaacaaacctggcagtaacagtagggatacacaagaggttatgttggagcctgggctgaaattaattaaaattttcaaggaatataccagcaagacatgcattttggatgattttggcttctatgaggctcgtcagaaaactattttggagaagaaagcaaagcaacaattcccaaagcaggtatgggaagggaaacctgctgatgagaagattgagataaatggggaagttaatactcaaaaatctgaagttagctcggaattgctcaaggagtctacccttgctgagaaggatagtgatgaccacaaagttcccgagaatggatctgctacaaaaactggagatgccccaaagggtgctaaaccagttgttcccgagagtaaa

SEQ ID NO: 246542 - DNA, 421 bp, Glycine max
cccggtcgacccacgcgtccgtacttgcgatctctgcttgagttgcacccaatgaatacgaaaattttaacaaaaaaggatgcaagcatgctccaaatgggttatatgatagcaaatggggttacggttgttggggaggatcatgttaaggtcgcaggagcaagtcacaccaatatttcctgcccaattagaaaggattcgcaacaaaattgtactacacttcagttggcattggaactcctaggcacaactttgatttagtcattgatctttctggtgaaaacttatggtacgattgtgacactcattacaacttatgattctacagacctatagcttgtggctcaaagcaatgccctgaaattggatgtgttggttgcaatggccctttcaaactcatgtgcacaaacaatacatgccc

SEQ ID NO: 246543 - DNA, 506 bp, Glycine max
  unsure (1)..(506): unsure at all n locations
gggaatgtttgtatagatggaaggagtaggctgtctcggtccggaattcccgggtcgacccacgcgtccgccaagcctgagactcgcgactcaccaccactgctcgccggcctctaattttgaaagcgtgtgcgcctcccacgccatttttgatactctctttgtgttcgcatagtgagatatggggaagaaggcgaagaaagctatgaagaagaatttgaaaagggcttcctttaataagaatccatctgaggatgctgatttcttgcccttggaaggtggccctgctcgtaagctcgccggccagcagaagccgccgccgccgccggagaacaccgccacggttttgtacgtcggtcggatcccacatgggttctatgagaaggagatggaaggttattttgggcaatttggaaccattaagaggttgagaatcgcaaganataaaaagtctggaaaatcaagacatttgggttcatagaatttgaatctcccgaggtagcaan

SEQ ID NO: 246544 - DNA, 411 bp, Glycine max
ttcccgggtcgacccacgcgtccgctctgtcagaaccaaatagtacctttcacatcatcaaaactcatgctccaaatgggggggttacacctttgaattcattttttcacacatggacaagatcgacgtgcctacgttcttcgtgtgccctatttcattagagctcatgaaggaccccgtgacggtctccaccggcatcacctacgaccgcgacagcatcgagaagtggctcttcgccgaggtgaagaacgacacgtgtcccgtcacgatgcatactctccattccggacctcactccgaaccacacgctcctcaaactcatccaagcctggtgcaccttcaacgcctcctacggcgtccagagaatccccacaccaaaaccaccggtcgacaaaaccctcatcgagaaac

SEQ ID NO: 246545 - DNA, 524 bp, Glycine max
  unsure (1)..(524): unsure at all n locations
tgagggggagggctgtatgggttccccctacgccnanttgcacgcacataccggtccggaattcccgggtcgacccacgcgtccgatgacacattactagtaaatgtgtactctcatgttacgaacacatttctcaatcaagagcatgagcactgaagtatgctcgcataacatccctaaggtgaattacatcatatggtcagagatgcagttctaattcaaacagtgatgcattgcatctaatcagatcactcagagcatgcatatcactatacaccttatacattgaaagaagctgagtggatgagcatggtgtatgatgattatttttgcactcatttgttgctatacggacaccctaatgagatattgctttgaaagcagagaatgaatcactagctatccagatatcggagaagctgcattcggaaaatatggtcgtattattgtctcaatcatattgtacactgaattatattcatgttgtgtggaattcatcaccttggaaggagacatcctcactt

SEQ ID NO: 246546 - DNA, 517 bp, Glycine max
ggggaggaggtgattggtacatgcagggatcgtgtactgcacgtaccggtccggaattcccgggtcgacccacgcgtccgcccacgcgtccggggagctcagaatagcttgtacgttggcacaaatggagcgtgaaggagggatcagtccccgagtatcacctttggcacaggttcgagatgctgggaatcttttgactagggcaggtttcacccttccaggggttgatgttgatgagtatgtagttaaatatgaaagtgctctggagcttatagaacatctccgtgcaatgggtgaaacaaatgctctttatcaaatgaacaatatcctaaagagggacacagcgttagcaactgcagctatttatgattcaatgttttctgcagaagacggcactgtacctgcaacattccaggttatatacatgacggggtggagagaacatccttctcagcagaaaggcaaaagaaggggatcagccactatatctttcaacgatattcagaagcaatttgga

SEQ ID NO: 246547 - DNA, 510 bp, Glycine max
  unsure (1)..(510): unsure at all n locations
ggaatgtgtgntactagtgaatggatgtactgctctaccggtccggaattcccgggtcgacccacgcgtccgggccaccgttccagggcagctcgtgtgggagatcgtcaagaaaaacaattccttctgggtcaagcagtttggaaggggcacccagagcgtcgaattcagcagagagagcaacaatctctacaacctcaattcgttcaagtactctggtttggcaaacaagaaaactgttactgttcagcctgagggcaaagatcaggctgtgttgttggctacaaccaagacaaagaagcaaaacaagcccgctgcattgctccacaaatctgtgatgaagaaggagttcaggaggatggcaaaagctgttgaaaaccaggtggccaaaaattactacaggcctgatctcaagaaggctgcccttgcaaggttgagtgctgttcacagaagcctcaaagttgccaagtctggtgtcaagaagaggaatagacagggcgtgagagtcgt

SEQ ID NO: 246548 - DNA, 425 bp, Glycine max
gtccggaattcccgggtcgacccacgcctccgtccttcgcctttctctctcttcttttaactctctctctgtctctctctacgctttctggtgcgagatccctcaagggatccactaactgaaggagaaatggggttgacattcaccaagcttttcagccggcttttcgccaagaaggaaatgcgaattctgatggtgggtctcgatgcagctggtaagaccaccatcctgtacaagctcaaacttggagagatcgttaccacaattcccaccattgggttcaatgtggagactgtggaatacaagaacattagtttcactgtctgggatgttggtggccaggacaagattcgtcccttgtggaggcactacttccaaaacacacagggtctcatttttgtggttgacagcaacgacagggacag

SEQ ID NO: 246549 - DNA, 509 bp, Glycine max
gaaagtgtgtggtacttgaggaagattgtacgctctcccggtccggaattcccgggtcgacccacgcgtccggaagaattgaattcgaaaaatcgtagcgtagcgttggttgcgattgaaacggtacggtgggaagaggaaaattcaagagcaagcccaccggtcgccgccagttctccaccccggaagatatgcttgctggaacctctaaccgtcctcgaacttttagacagaaagaagctgagcatgaagaggagcctgaggaagtatctggggatgaatctggagaagaatcagaagaggaaacttctaagaaaaaaggaacacaaggagttattgagattgaaaatcctaacttggtaaagccaaagagcttgaaagctagagatgttgatgttggaaaaacaacagaactttcaaggcgtgaaagagaggagatagagaaacagagagcccatgagcgctatatgaggctgcaagagcaaggaaaaacagaacaagcaaagaaa

SEQ ID NO: 246550 - DNA, 530 bp, Glycine max
  unsure (1)..(530): unsure at all n locations
nggtggagggtgcgtgnnagttgaatcgtcttgatcggcagtancagncactgctcgtaccgggtccgtaattcccgggtcgacccacgcgtccgcccacgcgtccgcttcggtgatcatcgtaactacctctacatttgtttgtttatcatgtctttgctcgtatcaatgtctaacaccagcaacaatgtcgctggggtcgacaacacgttcagaagaaaatttgatcgagaagagtatctagaacgagcacgggagcgcgagagacaggaggaggagggtcgagcgaaacctaaagccaaaggtcctcccgtgcagaggaagcccttgaaacatagagattatgaagtggaccttgaatcccgcttgggcaagactcaggttgttacgccggttgcaccactaagtcagcaggctggatactactgctcagtttgtgagtgtgtggtgaaggactctgcaaactacttggatcatattaatggaaagaaacatcaaagagccttgggcatgtccatgcgagtagaacg

SEQ ID NO: 246551 - DNA, 372 bp, Glycine max
taccgtccggattccctggtcgacccacgcgtccggcccgtcttcttgaacttggttacaaacaacaactcaagcgtgatctttcgtaggaggcgatttcaaatttctccctctcgtcatccgtttcatcagtgctgactggtatcaccactctatacaacactgggttgaactacagtgtccccgtctcactgcagtacgcgggactctattataggagtgccaagctagctgtccctacattggcactctatgactcctggattactggctgcatacaatatcatcaggtcagtcttcaggttcaacatgcttacatcttacactcgcacagcttatccactcttattattcatactacaacctcctgct

SEQ ID NO: 246552 - DNA, 507 bp, Glycine max
  unsure (1)..(507): unsure at all n locations
nggtatnatgggggtgngttctgctaagaatagtacgcatcatactcgtccggaattcccgggtcgacccacgcgtccgcccacgcgtccgctcaccgtttgccaggtcgtcgatacctccgtcagagaggttcaggctttgatattgtcaccaacgagggaactggcctcgcaaactgagaaggttatattggctattggggatttcatcaatatacaagctcatgcatgcgttggaggtaaaagtgtgggagaagacataaggaaacttgagtatggagttcatgtggtgtctggaactcctggccgagtttgtgacatgatcaaaaggagaacattacgcacaagggctatcaagatgctagttcttgatgaatctgatgaaatgttgagcagagggtttaaagatcaaatttatgatgtgtatagatatctcccacctgaccttcaggtttgtttgatctctgctactcttactcatgaaatactggagatgacaaacatgtt

SEQ ID NO: 246553 - DNA, 459 bp, Glycine max
cggtccggattcccgggtcgacccacgcgtccggtttaaacctaattctaatttcttaatcggtcgattcttctcctcctaaagatgcagagctgcgtgaaaactttgaccggtaagaccatcacccttgaggtggagtcctccgacaccatcgataacgtgaaagctaagattcaagacaaggaagggatcccacctgaccagcagagacttatctttgcgggtaaacagcttgaggatggtcgaacccttgccgactacaacatccaaaaggaatccactctccacctcgtgcttcgcctcaggggtggcatgcaaatctttgtcaagactttgactggcaagaccatcaccctcgaggtcgaatcctcggacaccattgataatgtcaaggccaagatccaggacaaggagggtatccctccagatcagcagaggttgatatttgctggtaaacaa

SEQ ID NO: 246554 - DNA, 519 bp, Glycine max
  unsure (1)..(519): unsure at all n locations
gggtgggatggtgtttggtancctactggcagtcagntatgcccgtaccggtccggaattcccgggtcgacccacgcgtccgcacctcttcctctctcgccccctcagattcaaaagtctttgcgtcgtcaatctcaagagacctgttcccccgctaaaagcatcgatggcggagaccaacaacaacgttgccgtcgaggtcttcgaaaaagaggatcttgccgtgtccctggccaaatacgtcgccgatctctccaacaaattcacttccgaaagaggggctttcactgtctgcttgtctggcggctctttgatcaattatctccggaaacttctggaacctccttatgttgatacccttgaatggtccaaatggcacgtgttttgggtggatgagagagtcgtgcctaagactcacgaagatagcaactacaagcttgctttagatggacttctctccaaggtgccaattcccccgggcaatgtttatgcaatcaatgatgcgctttcagccgaggg

SEQ ID NO: 246555 - DNA, 443 bp, Glycine max
  unsure (1)..(443): unsure at all n locations
taccgtccgnattcccgggtcgacccacgcgtccgcccacgcgtccgtttccgcttcatgtagtttctgcgttcccaactccttctcccgacggtaccctgactcgcccgagtccacactcaaacccgcgctcatggcaaataacccttccgacgctcccgccgatgacttccttgaacaaatcctcggcctcccgaacttcgcttccgccgactccggcctttccgctgccgatgtcggcctcgccggtgcggccactcaggctccgatgatgctgcaactcaactccgccgacgccaacgctcacctcgccggcgccgccttccacgcgcccgtgtatcaactagggctgagcttggaccaaggcaaaagtgggttcatgaagcccgaggaagcctccgctagcggaaagcgctttcgcgacgacgtccttgataatagag

SEQ ID NO: 246556 - DNA, 417 bp, Glycine max
accgtccggattcccggtcgactccacgcgtccgaagcaattgtgattcctgaagattttctttgccctatatccttggaactaatgaggggtcctgttattgtagccactggtcagacatatgagagatcttacatacagagatggatagattgtggaaatacaacatgtccgaaaactcagcagaagctccagcatttgacccttacaccaaattatgttttaaggagccttatttctcagtggtgtatagagcacaacattgagcagccaacaggactaaccaatggaaaattaaagaaaagtgatggatcgttcagagatgttacaggtgacatagcagtaatccaaactttggtccagaagctctgctgcctaactgatcacgagcgtacagcagctggcactgatctctta

SEQ ID NO: 246557 - DNA, 512 bp, Glycine max
  unsure (1)..(512): unsure at all n locations
nagtntnttatgggcgtcnaaattatgtgaggatccgtgatgcccgtaccggtccggaattcccgggtcgacccacgcgtccgcggacgcgtgggacgaagtgcaaatagcaattccgctactcacaaaaaaccttttcctattccctttctctttcctgaacccaacacaacaacacaacacaggataaataaattaaattaaaaactagctaaattcctctctctctctctttctcttcgagggtttgggtttctcttcctcccttggagaaaaagaagagccaccgctgcgacgccgttcgtgcatttttgaggtgccgctgtcatgtttgggcgtggtggaccaaggaggagtgataactccaaatattatgatattctcgggatttccaaaaatgccagtgaagatgaaatcaagaaggcctatagaaaggcggctatgaagaaccatccagataagggaggagatcctgaaaagtttaaggagttaggtcaagcatatgaagtttt

SEQ ID NO: 246558 - DNA, 366 bp, Glycine max
tatactagcatgggtgtatgcccacagcatgacttgctgtgggaatccctaacaggaagagagcacctactcttttacggcagacttaaaaatcttaaaggttcagccttaacacaagcagtggaagaatcgttgaaaagtgtaaacctttttaatggaggagttgctgataaacaagctggaaaatacagtggaggaatgaagaggaggcttagtgtcgcaatttcattgattggagatcctaaagttgtttatatggatgaaccaagtactggattagaccctgcatcaagaaacaacttatggaatgttgttaagcgtgcaaaacaggatcgtgcaatcattcttaccacacattccatggaa

SEQ ID NO: 246559 - DNA, 528 bp, Glycine max
  unsure (1)..(528): unsure at all n locations
tggggggggagcttgngttcggtaaataagaagagtagactggtatgcatgtactcgtccggaattcccgggtcgacccacgcgtccgcacacacagctagcagatattacatacacgtgaatcactaattaagccatggagaagagatcaatagctgggttgtgcttcctcttccttgttctctttgttgctcaagaagttgtggtgcaaactgaggcaaagacttgcgagaacctggctgatacatacaggggtccatgcttcaccactggcagctgcgatgatcactgcaagaacaaagagcacttgctcagaggcagatgcagggacgattttcgctgttggtgcaccaaaaactggttaatggatccattcacttccaacgtgaaagaagatgcatgcagcgctattttataaaaaataaaactactatatactatatataataagactggcgctgcatcaatgacctatgtattatagtatatattattaccgatgtcagaactatagatgcatgtactggn

SEQ ID NO: 246560 - DNA, 512 bp, Glycine max
aggagagggtgtttgttactagtggggagactgtatgcatgtactcggtccggaattcccgggtcgacccacgcgtccgttcacttgcaaaatggttgccttctctttccgaaggcctggttttcctttgccatggttatggtatggaatgcagtggcttcatgagagaatgtggtgtacggctagcgtgtgccaaatatgctgtgttcggtatggattatgaagggcatggacgttctgaaggtgctcgttgttacataaaaaaatttgataacatcgttaacgattgttatgactttttcaagtcagtcagcggtatggatccaaataatttaaattctcaactctattgaaacctgagatattttggcaaaactttatggctcataattcatttgcatatttcagagcttgcagagtataaggcaaaggctagattcttgtatggagagtccatgggaggagcagtgagccttcttttacataaaaaggacccttcattctgggacggg

SEQ ID NO: 246561 - DNA, 352 bp, Glycine max
taccggtccggaattctcgacgcacgcgtccggtcatcatgaattgagggtaacaaggctggcaaaggctaatatcaggatgctatttagatatcaataatgtagcccttcttgatgttggacttcctagatatttggttggttaaaatttttaatttagactgtaatactattttatatgcaacagataattatgagcagtttcgaaggcaaaaaaaaaaaaaaaaaaaaaaaaaaaaaaaaaaaaaaaaaaaaaaaaaaaaaaaaagaaggaagaattaaaggataaaaaaattaataactctattaagggacgtaatatttttggtatagagttatggatattcattca

SEQ ID NO: 246562 - DNA, 509 bp, Glycine max
  unsure (1)..(509): unsure at all n locations
tggtcttccttgacttcggaccgctccncgtctgccgtaccggtccggaattcccgggtcgacccacgcgtccgagaaaaagttaaccataacaaatatcccgccacgtccagaaagaagtgccgtcgggagggctgacgtgtacttgtatcatcgtttgacttgccagctttacagtgttagctgcctcctatgatgggaggagtgtcgggcggcgacgactacttcgttcaaatccaccaaccgaacaagcccggcgaccctttcatcatcaccttcaattgccccgacaaaaccggtctcgcttgcgatatctgcagaatcattctcgatttcggtctctgcatcaccaaaggaggtctctcactttcatggaattcttcgtttacagatcctattccattttattcttatcttaatttaatggaccttcttttgaatatcattcagatgtttcaaccgatggagtgtggtgttactttgtgttatgggttattccacacttcgct

SEQ ID NO: 246563 - DNA, 518 bp, Glycine max
  unsure (1)..(518): unsure at all n locations
ngggggagttcttgttttagaggaaaaaggattgatgtgactgctcgtaccggtccggaattcccgggtcgacccacgcgtccgcttatagcttcatcccaaaaagctcttttccttctaaatttgattccttagttcagcggtctattattatatatggcttcttcaccttcctcagaaaacaaaaacctagagggagtagctggtggtgccggagagaaacccattccacttggtgagaacgttctgcagaagcatgctgcattctttgacttgaataaagatggtgtcatctacccatgggagacttttaaagggttgcgtgaaatcgggactggggttttgctgtccgttggaggtgctattttcatcaatgtgtttctcagtcagagtactcgtcccggaaagtttccatctatactttttccaattgaaattaaaaatatccaacgcggcaaacacggcagtgacactggagtctacgatactgaaggaaggtttggaccttcaaaatttga

SEQ ID NO: 246564 - DNA, 514 bp, Glycine max
  unsure (1)..(514): unsure at all n locations
ngggtaatagaggtgagtgnngtgcatggatcgtatctcctgcacgtaccggtccggaattcccgggtcgacccacgcgtccggtttctctctttccgcggcgtagatctgagcagtttgggaaaccctaactgctctcacgactctctttgctttttttcctctccgatcaacgacctctttcgtcgccctaagtcatggcaggacttgcacccgagggatcacagtttgatgctcgtcaatatgataccaagatgaatgagttgcttacatctgatggacaggattttttcacatcttatgatgaggtttatgacagttttgatgctatgggcttgcaggagaatctcctgagaggcatttatgcatatggttttgagaagccatcagctattcagcagagaggaatagttcctttctgcaagggacttgatgttatacaacaggcccagtctggaactgggaagacagcaactctctgctctggaattctgcagcaacttgactatagtgt

SEQ ID NO: 246565 - DNA, 503 bp, Glycine max
  unsure (1)..(503): unsure at all n locations
ggtgttgagggctgtgtgactgaacttannctcagtcataccggtccggaattcccgggtcgacccacgcgtccggttactctctttccgcggcgtatatctgagcattttgggaaaccctaactgctctcaccactgtctttgctttttttcgtctccgatcaactacctttttcgtcgccctaagtcatggcaggacttgcaccctagggatcacagtttgatgctcgtcaatatgataccaatatgaatgagttgcttacatctaatggacagtattatttcacatcttatgatgaggtttatgacaactttgatgctatggccttgcacgagaaattactgagacgcatctatgcatatggttccgagatgccatcaactattcatcatatactgatagttatcttctgaccggtacttcttgttatgcatcattcccagtctgatactgggatgactgcaactctttgctcttgaatgctacaataacttgactgcat

SEQ ID NO: 246566 - DNA, 510 bp, Glycine max
  unsure (1)..(510): unsure at all n locations
ggaagtgtgtggtccattatgcttaacgcactgccgtaccggtccggaattcccgggtcgacccacgcgtccggggccatctggctggcttccactttctctttatggtaattcacactctgcagcttctgccaagaccaacacaacaggaagctatgcatcctctcttccatcaaacctttgtcgtcatttctcatttgctgaaatcaaggctgccacgaacaactttgacgaggctttgcttcttggtgtgggaggatttggtaaggtttacaaaggggaaattgatggtggaacaaccaaggtagcaattaaacgtgggaatccactatctgagcagggggtgcatgagttccaaactgagattgaaatgctctcaaaacttcgtcaccgccaccttgtttcactgattggctactgtgaagaaaacactgaaatgatccttgtgtatgactatatggcctatggaaccactcaggagcatctgtacaagactcagaaacctncacg

SEQ ID NO: 246567 - DNA, 407 bp, Glycine max
cgtcacgcgttcgccaacgcgtccgcttcaattctcccttctggactacaaattctggtgctgctgtttggaacaacaactcctctttaaccgttggagctagaggtccaattctgcttgaggattatcatcttgtggagaagcttgcaaactttgacagggaacgtatcccagaacgtgttgtccatgccaggggagctagtgcaaagggtttctttgaggtcacacatgacatttctcacctgacatgtgcagatttccttcgagcccctggagttcagacgcctgtaattgttcgtttctcaactgtcattcatgagcgtggtagccctgaaaccttgagggaccctcgaggttttgccgtgaagttttacaccagagagggtaactttgaccttgttggaaac

SEQ ID NO: 246568 - DNA, 525 bp, Glycine max
  unsure (1)..(525): unsure at all n locations
tgaggagagggtggtgtangtcgcactgcaggtatgtcggtacgcctgccgtaccggtccggaattcccgggtcgacccacgcgtccgctgtgaaggagcagaggagtattattcccgcgccatacttgcagacccggatgacggagaagttctatcacagtatgggaagttagtttgggagctacatcatgaccaagaacgtgcctccagctattttgaaagagcagtccaagcctctcctgaagacagccatgtacaagcagcatatgctagtttcctttgggacacggaggaagacgaggatggtagcaacgaaccacaatgtttgccgccacattctcttcaaggagctatagctactgcaggtgcttgaattggtggtgaagtttgtacgtgcaagagagtgtctcatgatgtaaacaagttcttatattgaagccaatgttgtagctgttgagaaagcagtaaataactgaatgcataaactcatgtgtagtaacactaagacaggcgaccaccctttg

SEQ ID NO: 246569 - DNA, 450 bp, Glycine max
  unsure (1)..(450): unsure at all n locations
taccgtccgnattcccgggtcgacccacgcgtccgcggacgcgtgggcaagcagcctccaattcgtgccactctcttcaaaatggccgtggcggtctcaaatctccacacagaatcaggtctcaagtccctcgacgacttcctctctgggaaggtctacgtttctggggatcagttcacaaaggacgacatcaaagtgtatggtgctgttttggagaagccaggtgactcttttcccaatgctgccaagtggtacgaggttgtctcatctcagcttgctgcaagcttccccggcaatgctcaaggcgtgagattcagtggcaaagcttctgctccagcggaggctgctcctgcgaaaccggatgcttctgctgctgaagatgatgatgaccttgatctctttggcgatgagactgatgaagacaaaaaggcagcagaggaaagggaggct

SEQ ID NO: 246570 - DNA, 520 bp, Glycine max
  unsure (1)..(520): unsure at all n locations
gagttggtggggnnttnnttnaattgattctagtctcataggaatgctcgtaccggtccggaattcccgggtcgacccacgcgtccgctcgttggcgaaaccggtagcggcaaaaccactcagattcctcagtttgttttggaagctgtggatatagaaaccactgataaacgtaggaagatgatgattgcgtgtactcagcctcgtagagtggctgcaatgtctgtttccaggcgtgtggctgaggagatggatgtgagtatcggagaagaggttggctacagcatcagatatgaggattgcagtagtgccaggacagttttgaagtatctcactgatggtatgctttcgagagaggcattgacagatccgctattgtagcgatacagagttattattctggatgaagcacatgataggactttggctactgatgtgctatcaggccttcttaaggaagtgcttagaattagacctgactagaaggtagttgctatgagtgcgacactggatgctaaca

SEQ ID NO: 246571 - DNA, 513 bp, Glycine max
  unsure (1)..(513): unsure at all n locations
ggttttttaaggtgggtgtaacatggatgcgttcgcactgccgtaccggtccggaattcccgggtcgacccacgcgtccggaaaaaataaaaatcaaagagcataatgtcagggatcattcacaagattggggagacccttcatgtgggagggcacaagaaggaggaggagcataagggtgagcaccatgctggagaatacaaaggggagcaccatggtgaacacagtagtgagtacaaaggagagcatcatggtgaacacaaagctggagagtaccatggtgagcacaagccagagcacaaagaggggttcctagacaaagtcaaggacaagatccatggtgagggcggcgccgccgagggcgagaagaagaagaaggagaagaagaagaaggagcatggccatgagcatggccatgacagcagcagcagcagtgacagtgattaaactgctgcatcacctatatatttaaaaggtttatgggaccatagtagcgagggctgtgccttaatn

SEQ ID NO: 246572 - DNA, 490 bp, Glycine max
gagtggagctgattggcccagtatccctaaggaatgccgtaccggtccggaattcccgggtcgacccacgcgtccgcgacaagcaaacgaaaagtaaatcaatcaatcgttggaatctctcaacttatcgctgcttcctggtacgtccattttctcttttgtttctatgttatcttgttagggtttccttctcaattgcaattgcaattcgcacattattattgattagttttagatttgggggtttccgtttcaatggacgacggcgagctggatttctcgaaccatgaagtgttttcgagtccgaacatgggggagcttccgagcagcggttcaatggacagtttcttcgacgagcttctcaaggacacgcacgcgtgcacccacacccacacgtgcaacccttccgggcccgaattcttccaacttacacgtgctaccacgtacacaccaaaatcgtccccgcccctggagaggaccaagtcgctac

SEQ ID NO: 246573 - DNA, 491 bp, Glycine max
  unsure (1)..(491): unsure at all n locations
ngggggagtaaggggtgattaggggggaaagggtatgctctaccggtccggaattcccgggtcgacccacgcgtccgcccacgcgtccggcttccctatgcaaactggtggatatgtcatctatggtgttgggcatgagcatgttggtgcaaatgaatcaactctatacggacaggatgggggagttatttgttcttcaataccaaaatatggaaatggaaacgaagcagggaatgagaaagggtatgttgtaggaatgtctacatgttaccctcgacgaggtactatcaaaataaaagatggtgaaaccctaactctagagattatctacagcaacaaccaaagccacagtggagtaatggggcttttctacatcttggtggctgaacaactgtcacaccaacacctnctttgacattattatgtgtcctaagtaaattcatcttggaatggatccaagagactattatattatatgatatctatatgaa

SEQ ID NO: 246574 - DNA, 494 bp, Glycine max
  unsure (1)..(494): unsure at all n locations
tggtggtgggagtgnattgncccatggagctgangcaattgcatgccgtaccggtccggaattcccgggtcgacccacgcgtccgcgagcccaagatcagtgctgagaaagcggtgcaactgtgtgatcggaacttgggcgttggagctgacggagttatctttgtcttgcctggcatcagtggcaccgattataccatgaggatttttaactctgatggtagtgagcctgagatgtgtggcaatggagtgcgatgctttgccaaatttgtttctcagcttgagaatttacatgggaggcatagttttaccattcatactggtgctggtctgattattcctgaagtcttggaggatggaaatgtcagagttgatatgggggaaccaattcttaaagcctcagatgtgcctactaaattacatgcaaataaagataatgctgttgtaaaatcagaactagttgtagatggagtattctggcatgtgacctgtgtt

SEQ ID NO: 246575 - DNA, 500 bp, Glycine max
  unsure (1)..(500): unsure at all n locations
aaggggaaggaataggcttntgttaaaggaaggggggagggaggggaatgctcgtaccggtccggaattcccgggtcgacccacgcgtccgcgaaaatgtggaagagaacgggttttgaagaagaagcagttcaattgatcaactcggatttcagggacctaagtctagctgctaatagactcgcccatcatgccatcaaacttggtggcattggctttggagcctcttttttcggattgtttgctgccattgctgctatttatctgttgattttggatcgtacaaactggaaaacaaatattctcacagcactactcattccatacattttcttcagcttgccttcattaattttcgacgtcttcaggggagagcttggaaaatggattgctgcagttgctgttgtattacgccttttccttccaagacacttccctgattggctggaattgcctggtgctctgattcttcttatcgttgtagctccttctctaaatgc

SEQ ID NO: 246576 - DNA, 490 bp, Glycine max
  unsure (1)..(490): unsure at all n locations
gtggcctgtnatttacgacaggcgggagggagaggactgctcgtaccggtccggaattcccgggtcgacccacgcgtccgcccacgcgtccggttcactcactcaaccgttcctttatcttttggattcccttctgattcactttcactttcactccttagcctggttataggagctagggtttatcgagggtttcgttccttcctctctgcaacaacaatggcgaaacctgggcgaggtcgtcgctctccctccggttccgtttccggctcctcctctcgctcctcttccccctccgactctcgttcctcctctcgctcgcgctccctttctcggtcccgttctccctcgcgctccagatcctcttccccctcctcctgctcttcctcccgaagctcccgcagccgcagccctcccccgcagaggcgccgaagtcctgctgacgcaactaggcgaggtcggtctcctccacctcagtctaagagagctt

SEQ ID NO: 246577 - DNA, 421 bp, Glycine max
ggtttggaattcccgggtcgacccacgcgtccgcccacgcgtccgcccacgcgtccgcccacgcgtccgaaaaaaaaaaaaaaaaaaaaaggaaaaaaaaaaaaaaaaaaaaaaaaaaaaaaataaaaaaaaaaaaaaaaaaaaaaaaaaaaaaaaataaaaaaaaaaaaaaaaaaaaaaaaaaaaaataaaaaaaaaaaaaaaatgggcctccttttaaaaattccaatttttaatatcctttcttttaacattaaaatttttttttatggtccccaaaattaaaatatttgtcccattttttaaaaatcgtgattttgaaaaacttttgggttttccaaattatactcttttaaaaaaatccccttttttcaaattgggtatataccaaaaaggcctcatcaaatagctttttcaaaaa

SEQ ID NO: 246578 - DNA, 505 bp, Glycine max
  unsure (1)..(505): unsure at all n locations
ngggggnaaggctcttttagagggcgggtatggcatgctgtaccggtccggaattcccgggtcgacccacgcgtccgcccacgcgtccgcccacgcgtccgcccacgcgtccggctgagtggactgaaatcggtggagaacgcgcacgatgattcggtgtgggcggtcacatgggtacccgcaaccgccaaccggccaccgctcctcctaaccggttccctcgacgagaccgtcaggctctggcgctccgacgacctcgttttggagctcaccaacaccggccactgcctcggcgtcgcctccgtcgccgtccaccccctcggctccgtcgtcgcctcctcctccctcgacagcttcgtccgcgtgttcgatgtcgattccaacgccaccatcgtcaccctcgaggctcctncctctgaagtctggcaaatgcgcttcgatcccaagcgacaagtgttgaaattgactctntcattgtttttgtcggcacccgtgcactggcaaa

SEQ ID NO: 246579 - DNA, 502 bp, Glycine max
  unsure (1)..(502): unsure at all n locations
aggggnagggttttataggggggaagggtaatgccatgctctaccggtccggaattcccgggtcgacccacgcgtccgattgcctctcagagaagtctccttgaggtcatggctgaatttccatcagccaaacctgcaattggtgtcttttttgcagcagttgctcctcgcctgcagcctagattttattcgatctcctcatctccaagaatggtgccaaacagaattcatgttacctgtgcattagtacatgagaaaatgcccaccggaaggattcacaaaggagtgtgttcaacatggatgaagaattctgtaccattggagaaaagccaggactgcagttgggctcctatttttgttaggacctccaactttagactcccttctgataataaagtgcctataatcatgattggtcctggcactggattggctcctttcagaggtttcttgcaggaaagattagctctgaaagaaggaggagctgaactcggcccctcag

SEQ ID NO: 246580 - DNA, 508 bp, Glycine max
  unsure (1)..(508): unsure at all n locations
ngggggnaagggctcgtgtgtattgacggggggttgatgtgatgctgtaccggtccggaattcccgggtcgacccacgcgtccggcgaagaagaagctcagaggcttcatcgctgagaagagatgcgctcctctaatgctccgtttggcatggcactctgctggaacttacgacgtgagctcgaagaccggtggtcccttcggaaccataaagcacccctccgaactcgctcacggcgctaacaacggtcttgacatcgctgttaggcttttggagccactcaaagcggagtttcctattttgagctacgccgatttctaccagttggctggcgttgttgccgttgaggtcaccggtggacctgaagttcccttccatcctggaagagaggacaaacctgagccaccaccagagggtcgcttgcccgatgccactaaaggttctgaccatttgagagatgtgtttgccaaactattgggcctaatgaccgagaaatggtgctctgctt

SEQ ID NO: 246581 - DNA, 421 bp, Glycine max
  unsure (1)..(421): unsure at all n locations
acgcgtccgggggatttcgatttccaagaccatgcagttggaaagttctattcaaacccctgggtccagtactttaaccgaaacccctagttctattcacgcgattccgcagaaccagagcgtcttctccagagaattgaacttttctgagtatggtttcgacccaaagactgggaacaatcagaatcaccattctctgaagccggaatccggcgagattctcagcttcggcgagagcaagagaacctnctacggcggcgtcaatgggaattccaattccaattcccattttttctccggtcagtcgccgtttgttgctgctgcggatgagaacaccaacaaaaataacatcaacaacaatgggaagacaaagtcaccgaattcgcgcggtagcaacgacgacggaatgctttccttcacc

SEQ ID NO: 246582 - DNA, 506 bp, Glycine max
  unsure (1)..(506): unsure at all n locations
naggtgagtagaatgcttttattaacgatgagctaagtaaatatgactgctagtaccggtccggaattcccgggtcgacccacgcgtccgcccacgcgtccgaaaaaaaaaaaaaaaaaaaaaaaaaaaaaaaaaaaaaaaaaaaagaaaaaaaaaaaaaaaaaaaaaaaaaaaaaaaaaaaaaaaaaaaaaaaaaaaaaataaaaaaaaaaaaaaaaataaaaaaaaaagaaaaaataatacataaatctatctatttagaatattattatcaaccttattgacaattaatactatcacaaaaactcaaaattatcatcactgaattaatacctattatcaaggttgatacattttgctaaatgatatttattaatcatactttcattcagtattataatattagatttaaaagagaattgccattatattatatctcaaaatcctacttataaatttaaaaacccatctctacaatacaatttgactaaatcatttacacttta

SEQ ID NO: 246583 - DNA, 498 bp, Glycine max
  unsure (1)..(498): unsure at all n locations
gtggtgtaaaaggctgnagccactgtaaaagaaatgattgcgactgctcgtaccggtccggaattcccgggtcgacccacgcgtccgcccacgcgtccgtgttaggttacctctgtgacatttgtgctgctagttcatataggggcggctgacaccgagaaggaaagcaggaaacaaacaaaaaggagcagatgggtagctcaggtttctcatggaaattggcggatcatccaaagcttccaaagggtaagactgtggctgctgtggtattggatggttgacgagaggccacacccaatgagtacaactgcatccacaaggctgaaacaccctgcatggattcacttaaaaagggtgctcctgaacggtggagattggtcagggctcatggtactgctgtaggacttccaacagaagatgacatgggcaatagtgaagttggtcacaatgcccttggggctggtcgcatatttgctcagggtgctaagcttgtcgacc

SEQ ID NO: 246584 - DNA, 502 bp, Glycine max
  unsure (1)..(502): unsure at all n locations
agggaggtgttnagaggcttttngttatagaatggagggagtgattggcatgctcgtaccggtccggaattcccgggtcgacccacgcgtccggctttgatgattcatgataactcgtcggatcgcacggcctttgtgccggcgacggagtcattcaaatttctgccctatcaactttcgatggtaggatagtggcctaccatggtggtgacgggtgacggagaattagggttcgattccggagagggagcctgagaaacggctaccacatccaaggaaggcagcaggcgcgcaaattacccaatcctgacacggggaggtagtgacaataaataacaataccgggctcattgagtctggtaattggaatgagtacaatctaaatcccttaacgaggatccattggagggcaagtctggtgccagcagccgcggtaattccagctccaatagcgtatatttaagttgttgcagttaaaaagctcgtagttggaccttgggtt

SEQ ID NO: 246585 - DNA, 496 bp, Glycine max
  unsure (1)..(496): unsure at all n locations
agggangganaagtgctgnctttacgtaagaaggttattgcactgctctaccggtccggaattcccgggtcgacccacgccttcgggtggccggagcattctcgtccgcgattaaaggggctgcactttcccgatctttagggaaaagctcttacaacagagccctcattcgttctgctattgagctaaaccaaggtagagttgaaggccttcaaatcgagtaccttgatatttcgcctttgccccttctcaacaccgatcttgaggtgaatgggacctaccccccacaagttgaagactttctccagaagattctcgcagctgatagtatcctctttgcttcccctgagtacaattactctgtcgcaagtgctttaaagaatgcacttgactgggcatcaagggcaccaaatgtttgggctggtaaacctgctgccatagtgagtgctggaagaggctattgtggttgaagatcaccatatcatctacgccaaat

SEQ ID NO: 246586 - DNA, 510 bp, Glycine max
  unsure (1)..(510): unsure at all n locations
nggggnggaggggttttntcaatagaacggggaggtgatggcatgctcgtaccggtccggaattcccgggtcgacccacgcgtccgaaaaaagcttctttgtctctcgtgccgattctccaccactattcccttcaccggaatgacactttccgctattagtgtagaagatgagtacgctggatgcaacaagggctgaacttggtcttcttgttttatatttgggcaaggctgaagcaagggacaaaatatgcagggcaatacaatatggttccaaatttttgagtaatggggaacctggtactgctcagaatgtagacaaaacaaccagcttggcacgaaaagtcttccgtctctttaagtttgtcaatgacctacatgctttgataagtccaacaccacaggggacacccctccccctagctctgttgggaaagtccaagaatgctctactctccactttcttggttcttgatcaatttgtgtggcttggcagaacaggcatctacca

SEQ ID NO: 246587 - DNA, 491 bp, Glycine max
gggggagtttaggggtgatatgggggaggatgtatgctgtaccggtccggaattcccgggtcgacccacgcgtccgtcttcatctttcttcttctcgtttttactttgacggtttctagagagagaaagttggttgtagagagagaaagcgcgctgctgcttcttctgctgctgcttcgacagtgagaagagagagagaagcgctcttctccgtaccgtttctagagagagaaactgatggccggagttaatccgaacggcgtcgccgattttccggcgactccaacgcacggcggacagttcattcagtacaacatattcggaaacctcttcgaggttacggcgaagtaccgtcctccgatcatgcctgtcggacgcggcgcgtatggaatcgtttgctcgctgttgaataccgagacgaatgagctggtggcggttaagaagatagcgaacgctttcgacaatcacatggacgctaagcgtacgcttcg

SEQ ID NO: 246588 - DNA, 487 bp, Glycine max
  unsure (1)..(487): unsure at all n locations
ggaaaaggtgnataaggaagggggggtattgaatgctgtaccggtccggaattcccgggtcgacccacgcgtccgcaaaattttacttccaaacccaaccaaatcaaagaaatgaaggataaggagacatgccctattgcgaaaaaggaagcctctgattcaggtttattcggaagaggaagctacaaattctgggcactagctgccatgctgctcttggcattctggtccatgttcaccggcacagtctctctccgctggtccggcaccctcaacactttctcccacgcgtcccttcacgaccacctcgacgtcctcgaaatcgaagagcgggagaagctggtgaggcacatgtgggacgtgtacacgaataaccgtaggatcaggttgccgcggttctgggaaaaggccttcgaggctgcctacgaggatttgaccagcgacgccgccgatgttagagacgttgccgtcgccgagatcgttaaca

SEQ ID NO: 246589 - DNA, 500 bp, Glycine max
  unsure (1)..(500): unsure at all n locations
nggggggagtnnaagggcgtgnnatataggacgggggggttgaaggacatgctcgtaccggtccggaattcccgggtcgacccacgcgtccggagagctccaagtgggccatttttggtaagcagaactggcgatgcgggatgaacgggaagctgggttacggtgcccaactgcgcgctaacctagaccccacaaagggtgttggtcgattaagacagcaggacggtggtcatggaagtcgaaatccgctaaggagtgtgtaacaactcacctgccgaatcaactagccccgaaaatggatggcgctaaagcgcgcgacctatacccggccgtcggggcaaggaccaagccccgatgagtaggagggcgcggcggtcgctgcaaaacccagggcgcgagcccgggcggagcggtcgtcggtgcagatcttggtggtagtagcaaatattcaaatgagaactttgaanggccgagaggggaaaggttccatgtgaacggca

SEQ ID NO: 246590 - DNA, 508 bp, Glycine max
tgggaaaactttgtttaaaggggagatatgtgatgctctaccggtccggaattcccgggtcgacccacgcgtccgaaaaaaaaaaaaaaaaaaaaaaaaaaaaaaaaaaaaaaaaaaaaaaaaaaaaaaaaaaagagaaaaaaaaaaaaaaaaaaaaaaaaaaaaaaaaaaaaaaaaggggcggccgttttaaaggatccaagcttacgtacccttgcttgcaacgtcatacctcttctatagggtcacctaaattcaattaactggccgacgttttacaacgtcggaactggaaaaaccttgggtttacccaacttaattgccttgcagcacatccccctttcgccagctggcgtaataccgaaaaggcccgaaccaatcgcccttcccaacagttgcgcatcctgaatggcaaatgggacgcgccctgtatcggcccattaaacgcggcgggtttgggtgttacgcccagcgtgaccgttacacttgccagcgccttaacgccgcc

SEQ ID NO: 246591 - DNA, 510 bp, Glycine max
ggtggggaatgctttgtcacgagggggattatagcatgctctaccggtccggaattcccgggtcgacccacgcgtccgaaacaataaaaaaaaaaaaaaaaaaaaaaaaaaaaaaaaaaaaaaaaaaaaaaaaaagagaaaaaaaaaaaaaaaaaaaaaaaaaaaaaaaaaaagggcggccgctctagaggatccaagcttacgtacgcgtgcatgcaacgtcatagctcttctatagtgtcacctaaattcaattcactgcccgtcgttttacaacgtcgtgactgggaaaaccctggcgttacccaacttaatcgccttgcagcacatccccttttcgccagctggcgtaataccgaaaaggcccgcaccgatcgcccttcccaacagttgcgcagcctgaatggcaaatgggacgcgccctgtagcggcgcattaagcgcggcggttgtggtggttacgcgcagcgtgaccgttacacttgccagcgccctagcgcccgttcctttc

SEQ ID NO: 246592 - DNA, 330 bp, Glycine max
  unsure (1)..(330): unsure at all n locations
tccggattccgggtcgaccacgcgtacgnccacgcgtacgaaaaaaaaaaaattttaataaaaaaaaaaaaaaaaaaaaaaaaggaagggaaaaataaaaaaaaaaaaaaaaaaaaaaaaataaaaaaaaaaaaaaaaaaaagtaatgcaagattaaaacatcacaaacttaagtaatcgaaattgcaaataaattaatattgtgtaacaactcaaaaattaaatcaattagccccaaaaatagatggtgctaaatggcaaaacctatacatggccgaacttaaaaggattaaaccaaaatcagtattaggaagctgccgtatttgaaaa

SEQ ID NO: 246593 - DNA, 488 bp, Glycine max
  unsure (1)..(488): unsure at all n locations
taggtgagttaaggggttgataatgggggaagatgtatgctgtctcggtccggaattcccgggtcgacccacgcgtccgcccacgcgtccgcccacgcgtccggtttcttttcgtgaaacaaaagaaaacaaaggatgaggttttgtgatgtcgggcatggagaggcttcagaggatgttcgcgggtgcaggtggagcgctgggccatcccccaccggattcccccaccctcgattcctccgagcaggtctacatctcctccctcgcccttctcaaaatgctcaaacacggaagagctggggtacccatggaagtgatgggtctgatgttgggggagttcgtggatgagtacaccgttcgcgttgtggatgtgtatgcgatgcctcagagtgggaccggtgttagcgttgaagctgttgatcatgtttttcagactaatatgcttgatatgttgaagcanactggaaggccggagatggttgtggtgt

SEQ ID NO: 246594 - DNA, 497 bp, Glycine max
  unsure (1)..(497): unsure at all n locations
gagggggggtnagggattgttcatagaatagtagttgatcgctcgtaccggtccggaattcccgggtcgacccacgcgtccgcccacgcgtccgaaagactccttttctctctggtcacgaaggcattactcaatcagcatcgtggaaggaaggtttagtgcaaaaacatttatctggtgaattacccattggtcgtgagtgcagctttcttcaaacagttttcaatgcaactaatgtgatggctggagtaggcattctgtctacaccttatacattgaaagaagctgggtggatgagcatggtgttgatgattctttttgcagtcatttgttgctatacggccaccctaatgagatattgctttgaaagcagagaaggaatcactagctatccagatatcggagaagctgcatttggaaaatatggtcgtattattgtctcaatcatattgtacactgaattatattcatgttgtgtggaattcatcaccttggaa

SEQ ID NO: 246595 - DNA, 502 bp, Glycine max
  unsure (1)..(502): unsure at all n locations
gggggggaggtggagggcttntgtctaatgacgaggggattaactggaatgctcgtaccggtccggaattcccgggtcgacccacgcgtccgcccacgcgtccggatacctgctgcaaaaaccatgaatgccattgacgagggttagagaattgcaagggcacaaacacttattgccctatgtagtacaggatctggctactggttcacagtggctctcattgacaagattggaagatttgctatccaattgatgggattcttgttcatgactgccttcatgtttgctattgccattccttatgaccactggactcatatagataaccggataggattcgtggtgagctattcattgaccttcttctttgcaaatttcgcacctaatgccaccacattcgtcgtgccggcagagattttcccagctagattccgatctacttgccatggaatctcatcagcattcgagaagctcggagctattgctggtgcatatggcttct

SEQ ID NO: 246596 - DNA, 501 bp, Glycine max
  unsure (1)..(501): unsure at all n locations
nggggagaagctttgtctagcgaaggattatggcatgctctaccggtccggaattcccgggtcgacccacgcgtccgaaaaaacaaacaaatacataatagcaaaaaaccaaaaaagccataaacgaagaaggcagggatacaacaacacaatcacttctatgccctatgtagtacagcatctggctactggttcacagtggctctcattgacaagattggaagatttgctatccaattgatgtgattctagttcatgactgccttcatgtatgctcttgccattccttatcaccactggactcatatggataaccggataggattcgtggtgatttattcgttgaccttcttctttgcaaatttcgcacctaatgccaccacattcgtcgtgccggcagagatttttccagctagattccgatctacttgccatggaatctcatcagcattcgagaagctcggggctatagattgtgcataaaggtctagtacttggccc

SEQ ID NO: 246597 - DNA, 513 bp, Glycine max
  unsure (1)..(513): unsure at all n locations
gggggaggagggcttttgttatgtgtggggagggttgattggatgctgtaccggtccggaattcccgggtcgacccacgcgtccgcccacgcgtccgggtcagatgtcttggatcctgcacttcgccggccaggaagatttgatcgtgtagttatggtagaagcacctgatagaattggaagagaagccatcctaaaagttcatgtttccaagaaggaacttcctttagccaaggatgttgacctcagtggcattgcttgtatgaccactggttttactggagcagatcttgcaaacctagtaaatgaggctgctttactggctgggagacaaaataaagttgtggtggagaaacttgatttcatccaagctgtagaaagatctatagctggcatagagaagaagactgccaagttgcgaggaaatgagaaggcttgtattgcacgacatgaggcctgtcatgctgtagtaggtactgcagttgcaaagcttnttnctggacagncacgtgtt

SEQ ID NO: 246598 - DNA, 500 bp, Glycine max
  unsure (1)..(500): unsure at all n locations
naggggnaggttagagggattgnataatagaagggggggatgtaatgcatcgtatcggtccggaattcccgggtcgacccacgcgtccgcccacgcgtccgcttttgcattgaatttagcagacgcagagccaagtgtcgctgattctgaattgaaggatgatcttaaaccatcatatcatgtggctcttggttcagataacacatggtatctatttacagaaaagtggattaaaacggtatatgggacaggctttcctaatgttccattggctgaaggggatgctcgacctcgagaaattatgagtattctccttgataaggaggacatgaagtgggataagctttctcactccgagcatggtggtttatggttcatggaaggatctctagatacatggtcttggagcttgaatgttcctgttttgagtagcttgtcagaaaatgatgagctactactacagtctcaagactacaaagatgccattgaacgttacaagg

SEQ ID NO: 246599 - DNA, 501 bp, Glycine max
tgagagtaaatgcttgcgttctatccccgactcagtacgctcatacggtccggaattcccgggtcgacccacgcgtccggtgttgttccaactttgtggacggcagtgcgtgttaaaggatgttgattgtaacagcagattttaagatttttttttatgaatcaactaaaataaaaaaaaaaaaaaaaaaaaaaaaaaaaaaaaaaaaaaaaaaaaaaaaaaaaaaataaaaaataaataaaaaaaaaaaaaaaaaaaaaaaaataaaaaaaaaataaaaaaaaaacaaacataaaataaaaaaaaaaaaaaaggggaatcctataaagaagtccaaactttaaagcacttgatatatatgttataagtcattaatatgagaccatataaataatgaattacccttttaataaaaacatttgattgaaaaaaaccagaggactacaaaataaaagccctttcaaaaaatatcctttttcccaattgggcaaaaaaaaaaaa

SEQ ID NO: 246600 - DNA, 501 bp, Glycine max
  unsure (1)..(501): unsure at all n locations
aaggggaagttntagggcttgnagcatgcgacgaggagggttgattggactgctcgtaccggtccggaattcccgggtcgacccacgcgtccgatttttgtgaattgtctttatcctgtaagtcaattacctccagaagctgtcgttgttaatgttacatgtggtagtggacgtggtggtttacccaccactgtttggattagttctgcagttaacaatcgctcctcagatatcaacaaaaagattcgcacagcacttgggaaaggtaagaaaattgtttttcttactagagttgatccttttccagtagctttattggctgttctttttggcgttaagaatgaaattctgagttctaacgccactaaccctatgctgacgcgacttcttgagaactgtaagagtctcaaatatctggttgatgagtgtccttttgcatttgtgaactagtatgtaatattttattcacttaaataaagcgcattactatgtgcaatgagn

SEQ ID NO: 246601 - DNA, 497 bp, Glycine max
  unsure (1)..(497): unsure at all n locations
gagggagttaggggttnnattacgaaagggagttattgtactgctgtaccggtccggaattcccgggtcgacccacgcgtccgcattaagaaagcccaaagaaagaagaagatggcgtccgagtgcaaaggtaagagcgcatggcctgagttggttggagtggaaggaacggtggcggtggctacaattgagagggagaatcctttggtggatgctaacactgtgcttaaaggatccatcgtcaccgctgattttcgatgtgatagggttcgggtttgggtcaccaaacatggaattgtttatcaggctccaagaattggataagaagtgtttacactaaagcacttcatatatatgttatgagtcatgaatataatagtatttaaataaggagttattcttccaattatgttatttgattgaaaataaaaacatgactataagaaatttgntttttcttatttttaaaaaaaaaaannnnaaaaaaaaaaaagggc

SEQ ID NO: 246602 - DNA, 513 bp, Glycine max
  unsure (1)..(513): unsure at all n locations
agggggnngagggcttgttttaagaaggaaaggctagcgcatgcccgtaccggtccggaattcccgggtcgacccacgcgtccgctgtaagtttgcaacttttttcctttcattcattattcttctcttgccttgagttgaggatgggcaatgtgaacgtgactcctgaagaagaagaagtttctgcaagtgcatgggcaaccgatgagaacgccatgcctgagtctgctgccacctgtcctacagctatccatttccccctcatattcgctcctcaagttccggtggttccgctacaaagacctgatgagatgcatgttccaagttgttcctggatggacacaacttcagggtatgaagatgtgtaccgtgaagtaggaattccaacagtgattacttggagttatgatggaaaggaagtagctgtggagggatcgtgggataatcggaaaacatgaatgcccctggagagatcatggaacgactctgcaataatgaatgctctgtcatctg

SEQ ID NO: 246603 - DNA, 505 bp, Glycine max
  unsure (1)..(505): unsure at all n locations
tggggntgaggtnttnttaatgaagagggatacggcaagctctaccggtccggaattcccgggtcgacccaccgtccgcggacgcgtgggcgacagagacaacatagctctcaaaggacttgcaaagttcttcaaggaatcaagtgaagaagaaagagagcatgccgagcagcttataaagtatcagaacattcgtggtggacgagtggtgctgcacccaatcacaagtcctccctcggaatttgagcattcggaaaaaggggatgccttgtatgccatggaactagctttgtctttggagaagttgacgaatgagaaacttctgcacgttcacagtgtggcagaacgtaacaatgatcctcaattggcagacttcattgagagcgagttcttgtatgagcaggttaaatcgattaaaaagattgcagagtatgtggctcaactgagattagttggaaagggtcatggtgtgtggcactttgatcaaaagcttcttcacgatgaa

SEQ ID NO: 246604 - DNA, 490 bp, Glycine max
  unsure (1)..(490): unsure at all n locations
agtntgagtttgagggctgntttaaggaaggaggtctatgccgtaccggtccggaattcccgggtcgacccacgcgtccgctcgctgtgggtgtcaagcttacatgcggattagcaaaacaacagaatttggagctccagaatggcgtgtgactggttttgctaaccatcacaatcatgaacttttagaaccaaaccaagttcggttcctccctgcatacagaactatctcggatgctgacaaaaaccgaatactcatgtttgccaaaacaggaatatctgttcatcaaatgatgaggcttatggagcttgagaagtgtgtggaacctggatatttgccttttactgaaaaagatgtaaggaatttactccagtcatttaggaaattagatccagaagaagaaagcttagatttattaagaatgtgcagaaatattaaggagaaagatcctaattttaaatttgagtacacacttgatgcanacaaccgt

SEQ ID NO: 246605 - DNA, 494 bp, Glycine max
  unsure (1)..(494): unsure at all n locations
aggtngggtaaaggcgtgggttaaagaggagggatgtattgctcgtaccggtccggaattcccgggtcgacccacgcgtccgcccacgcgtccgcccacgcgtccgacactagagtgttggagcattctattgctagctaataatgggcttaataataatggtgagaaagaaaagaatggccaaggtaataaaattctttgagttgaacacaagggccaagattccttctggtgggttaggcacttggcaagctgagcctggtgttgtagccaaagctgtcaccacagacattctggttggatacacgcatattgattgtgctcaaacgtatatcactcaaacacagatttggtctgctcttaagaaactcttttgagatagggtggtgaaacgcgaggacttatggagcacctccaaaatcttgtgttcaaaacatgctgcataagatgttccccaagaattgtttaatacatcgttggatgtgcaacttgtt

SEQ ID NO: 246606 - DNA, 493 bp, Glycine max
gagagagtagggctttatcatgatagaaggtacggcatgccgtaccggtccggaattcccgggtcgacccacgcgtccgctttggcgctgcgcagaagagagagaacgaacgaacgaacgagcataacacgctttaataatctgtggcagtgagtagtgatatgcagcaaggtgatccaacggtcctaagcttgaggcctggtggtggtcgtggcggcggaagcaggcttttcggtcactcctcctcctctctctccgccgatctccctctctgccgccctcatgcctatttctctctcaaggaatggaatgggagttgagagtttgaaacttggaatgtcctgattcttggtgggggcacttggttatgtgttcttgctgtaatatggacagaaagcaacagcatgtgggctgtaggtgtgcttcgttgagttttagattgcccataaaggacccacacacattcctgctcgtttgcctttccaactagggt

SEQ ID NO: 246607 - DNA, 516 bp, Glycine max
  unsure (1)..(516): unsure at all n locations
tggggggaagggcgtgnagtgttggatgagggagttgatggcatgctcgtaccggtccggaattcccgggtcgacccacgcgtccgcactctggcaaattattgaaccatacgacggatccatccactagtccggaagccgctgtgagaaaagctcgtgtctcagttcgtgcccgatcagaagcacccatgatcagtgatgggtgccaatggcgaaaatatggacaaaagatggctaagggaaacccttgtcctcgagcatactacagatgcaccatggcagttggttgcccagttcgcaaacaagttcaacgttgtgcggaggacagaacaattttgacaacaacgtacgaggggacccataaccatccactgccaccagctgcaatggctatggcatcgaccactgcagctgctgctagcatgttgttgtctgggtcaatgaccagtgctgacggaataatgaaccccaatttgctaactagagctattcttncatgttctagcatggcaacac

SEQ ID NO: 246608 - DNA, 514 bp, Glycine max
  unsure (1)..(514): unsure at all n locations
tggtttnagaggtgcgtgngtgatggatggagaagtgtacgcactgcacgtaccggtccggaattcccgggtcgacccacgcgtccgcccacgcgtccggtgcttgaaaaaatctgcaacttttccaattcctaatacaatgttgccttcaagcccatctgataaggaggctgatacttcagtcacaggaccactcaatgagcattctgctcatcaaacttactcactctcagtatctccgcctgctcctctgaagcttatatctgccatgaaaggtagccgtgagaaacatgggggatcacaggtgaaattgaatgtgaaatgggcctctgatgtgtatgatcctatacctacattattatcacacactgttagaagcaacaagaagcagcagaaatccaggaagaagaagcctgaaaagaagaatggaaagaagggtcaaaagggaaattcatctcgagggggcagcaacaaagattagcaggttcgcaagctaggtgggacttctggtttg

SEQ ID NO: 246609 - DNA, 513 bp, Glycine max
agaaggagagggcgttttttgtctgatggggagactcaggaatgctgtaccggtccggaattcccgggtcgacccacgcgtccggaggaagcatatccctacacaggaaaagatggtgtctgcaaattctcagctgaaaatgttgctgttcaagtccttgactctgtgaatatcaccttgggtgctgaagatgaactaaaacatgcagttgcatttgttcggccagttagtgtggcctttcaggtggtgaatgggttccatttctacgagaatggagttttcactagtgacacttgtggtagcacttcccaggatgtgaaccatgccgttcttgctgttggatatggagttgaaaatggtgtcccatattggctcataaaaaattcatggggagaaagctggggtgaaaatggctacttcaagatggaattggggaagaacatgtgtggtgttgcaacttgtgcatcttatccaattgtggcataaattgcataacaatatggtccctggtga

SEQ ID NO: 246610 - DNA, 414 bp, Glycine max
cggtccggattcccgggtcgacccacgcgtccgcttgtgttgtgctggtgcattcttctacttcaattctcagccatgtcggtggttgcttgcgattgcaaccacaccacagagaaagataaccttagtggtgaaagtgagagctttcacaagttttttgagtgctggatttctgagcaaaaacaacatctgaaggaccttttaactgctgaatcaacccagctaattagtgatgaggagcttcaggcactgaatgataaagtggttgagcattatgagtactactacaaggccaagtcaaggtgtgcaaagcaagatgtattggccatgctgttcccaacatggatgagttccttggaagaagcttttctttggattggtggatggagaccaactatggcatttcacttgata

SEQ ID NO: 246611 - DNA, 501 bp, Glycine max
  unsure (1)..(501): unsure at all n locations
aagtttnagtaaggggcgtgncgtgtcggacagtatctcatcgccgtaccggtccggaattcccgggtcgacccacgcgtccgcccacgcgtccgaagacttcttgttcgcaccctacggaccctattggaagttcatgaagaaactctgcatgtccgaactcctcggtggccacatgctggaccagtttcttcccgtgagacagcaagagacaaaaaaattcatcaaacgtgtcctccaaaagggtatttctggtgaggccgtggattttgggggagagttcatcacgctctcgaacaacatcgtgtcgagaatgatcgtgagtcagacgagtactactgaggacgagaacgaagttgaagagatgaggaagctggtgaaggatgccgcagagctctcggngaagttcaacatatcggacttcgtttcgttcttgaagcgctttgatttgcaggggttcaacangaggctcgagaggattcgggactgctttgacaccgt

SEQ ID NO: 246612 - DNA, 482 bp, Glycine max
  unsure (1)..(482): unsure at all n locations
gggctgngtgatcgcacgatcactcagcatgctgtaccggtccggaattcccgggtcgacccacgcgtccggttcgttgtggcagtagcaaaacaacacctttttgaaacccgaggttcagagagagaagaaacattttccaaattaatggggcgttggatgaaaccagaggtttaccctctattggctgcaatgacctttgttaccggcatgtgtgtgttccaactaacaagaaatgtgctcgggaaccctgatgttaggattaacaaaactcggagaagcatggcagtgttggagaacagagaagagggagagaaatatgctgagcatggcctgaggaagttccttcgtactcgaccaccagagattatgccaaccatcaaccacttcttcagcgaggataaatgaaagagtgtcacacgtagtagaataccaaaataattcaacttatggaagaaaaatcaaagtttctaaatctgtcn

SEQ ID NO: 246613 - DNA, 513 bp, Glycine max
  unsure (1)..(513): unsure at all n locations
gggggtnagagaggcgtgnngtttttgtaagttatctgctgcgcctgccgtaccggtccggaattcccgggtcgacccacgcgtccgatatctctatctctctctctcttcatatgaatgcaaacatggcatcttcaccaaccttaataccctttctcctcatcttcttcctcttccacttccaccgttcctcctccctccccctctccgtggagaaccccgaagatgacgtcatagtctcgtcgccgaagggaaccttcaccgcagggttcagccccgtgggggagaacgcgtactccttcgcgatatggttctctacgcaagcgacgacgaagaccgttgtgtggatggcgaaccgcgatcaaccggttaacgggaaacggtccacgctttcgctcctcaagacggtgaacctcgttttaaccgacgcgggacagttcgatgtctggtccaccaacacgctctcctcgaagacgcttgagctgcatttgttcgacaccggcaacctcgtac

SEQ ID NO: 246614 - DNA, 519 bp, Glycine max
  unsure (1)..(519): unsure at all n locations
ggggggagagagggcttgngtgatgtgcatgatgatctcataggcatgcccgtaccggtccggaattcccgggtcgacccacgcgtccgcccacgcgtccgggatttccccgactcagggtttctttcccctgaccaatgccagttattggaaaaggtgttgcctcagaagagcagcaagcacgtctcagatatggagctggatgattgtgaggagaccactttgcatgatgtcaactttaaggaggagatgagacgaaagcagcaacagcaacaccgcgaggcatacgacgaagatgatgatgagccatctggtcaccgagtgcaatgtgctcaacagtagtgcaatttatggtagtagaggttctataatttctgcttggtttatcttttgtttggataatgcagttataactgcgtgataaatttacctttaggttttggctggtaatgttatttagtttacagttcttggcaaacaagaactgcattagatcaacaccgacaacctantactcaa

SEQ ID NO: 246615 - DNA, 490 bp, Glycine max
  unsure (1)..(490): unsure at all n locations
aagangagtnagtgattggcctagtagggtcgcattgccgtaccggtccggaattcccgggtcgacccacgcgtccggttgttatgcgccgaaagtaatatgatggttgcattggaattgataaaacagcagcagggggaaatgggagatctagaggaacaaggcgagggtgctggctcctacttggaattggaagctactattccagagacccatgctgaaattccaatatcagatggcatctgattcaacaatcagagcgcgattttccaagccatctaggttgtgtaacgagactcgttggccatcgctcagagtttcacttctctgttcgcttccctgcgattggccctctccgaatccacatccacctctctgcatcacatgcagtgcttcaccgatgccttcggtcgccttcaggaatctgtgcttgatgcagctaccatagagaatcgctatataaattcctgtctcagatagaatgaggaga

SEQ ID NO: 246616 - DNA, 494 bp, Glycine max
  unsure (1)..(494): unsure at all n locations
ggttanagtatagggcgtgttcctgaacagcagcctanggcactgccgtaccggtccggaattcccgggtcgacccacgcgtccgaaagagcgtgtacttgttcttgctgctacaaacaggccttttgatcttgatgaggctgttattaggaggcttcctcgacgattgatggttaatttgccagatgctccaaacagagaaaaaattctcagagtcattttagtgaaagaagatttggcacctgacgttgattttgaagcaatagctaatatgactgatggatattctgggagtgacctaaaggttgtatgtatatttatgtatttttcacttcctttcttggtttctggagaaggtaccatctgtttctacataaaatattctcattgttatcttttgattgcagaatctgtgtgtcacagcagctcactgtccaatacgagagatcttggagaaggaaaagaaagagagaagcttagctntgtctgagagc

SEQ ID NO: 246617 - DNA, 498 bp, Glycine max
ggtttattaggtactggaggtcgaatgcatgctatgcatgtcgtccggtccggaattcccgggtcgacctacgcgtccgctcaaattacatggtcatagtgtacacctagttaggcaaacacaccaaacaccaggcaccaaactagttggctcaattctctttgaatggctttggaggctttgaattcaccaacagcagccaccactccgttccgtggctaccaagaagaggaggaggacgaggaggctgaccttcacttacgtgagccttgggctaaaaggaaacgctccaaacgaccgcgttttgagacggaggaagagtacctcgctctttgcctcatcatgctcgcacaaagcggtaacaccagaaacatccacaacaacaacacccaattaccgtcttcttcactgtcagacaaagaagcgtcgccgccggtgaaactaacacacaggtgcaccgtttgcaacaaggcctttggttcttatcaagcactcggg

SEQ ID NO: 246618 - DNA, 493 bp, Glycine max
  unsure (1)..(493): unsure at all n locations
agggttagtaagggctgngtgatgaaggggagttattggactgctcgtaccggtccggaattcccgggtcgacccacgcgtccggaaaaattggaatggttaccagaagggtttgaggagagaattttaggtcaaggaaggggtttgatcataagaggttgggcaccccaagtgatgattttggaccatgaatccgttggagggtttgtgacacattgtgggtggaactcagtattggagggggtgtgtgcaggggtgccaatggtgacatggccaatgtacgcagagcaattttacaatgctaagtttttgacggacatagttaagattggggtgagtgtaggcgttcaaacgtggattgggatgatgggaagggaccctgtgaagaaggaaccggttgagaaggctgtgaggaggatcatggttggagaggaggcagaggaaatgaggaacagagcaaaagagcttgctcgaatggcaaagcgtgctgtgg

SEQ ID NO: 246619 - DNA, 504 bp, Glycine max
  unsure (1)..(504): unsure at all n locations
aggggnnaggagcgtgnttnnncgatggatatgtatctcatcgccatgccgtaccggtccggaattcccgggtcgacccacgcgtccgcggagccacattcgtgtctccgaagttcgaacttcgattagagagctattccacgtttggtcgagtggaaataagaacgagtctagttatactttggtggatattacgcaatggttcgcgtatttaactttcaacatggttgtgcgaatggtcgttgggaagaggtattttggtgtcatgcacgttgaaggcaaagacaaagcagaaaggtttatgaaaaatataagagagttcatgaatttgatggggactttcacggtggcagatggggttccttgtttgaggtggttggatttggggggttatgagaaggccatgaagggaaccgctaaggaaattgataaattattgagtgagtggttggaggagcaccttcagaagaagcttttgggtgaaaaggttgaaagtgatagaga

SEQ ID NO: 246620 - DNA, 519 bp, Glycine max
  unsure (1)..(519): unsure at all n locations
nagggggnnggaggtncgtgnngttgacggatgagattctgttgcgcctgccgtaccggtccggaattcccgggtcgacccacgcgtccgcccacgcgtccgcgggtgtattcctgatgataagtttggtgggttcaaagatgtgggcaccaatgtgtcttgtgttgtttcaaggagggacatggcaacccagatgagcccacaggggatgtgcaggtagatgaacacttaccgtgacaagatggtccaagaaacatagggccttattcactggctgaggctcagaacaagtcaaaagctggaaaaaagaaaaagtaagcactcaattgtcaacttgggatgtttctgaaacgccaaaacctgccccaaaggcaaaaagtgaggaagccaaaatctctgcatgggagaacttgcaaaaggcaaaagcggaggcagcaatacggaaactagagatgaaattggaaaagaggcgagcatcctctatggattagattatgaacaagcgtatattggcttana

SEQ ID NO: 246621 - DNA, 504 bp, Glycine max
  unsure (1)..(504): unsure at all n locations
aggaggtnngtcgnaatacggatcgtatctattgcatgacgtaccggtccggaattcccgggtcgacccacgcgtccgagcacatcgagggagcaactaaatacctgctctctaagattaaagatttccaatggtttgttggtgagagcatgggtgatgatgcttgcttggtctttgcctactacaaggacggcgctgctgatccaacattcctgtactttgcatatgccttaaaggaggtcaagtgctaagtgacttaatgtaccgagctatctactcattttatctagtttttttttacgttctgtcctaagttacttgaaactttgacctggtattttgattttaatggtgagacgtgtgctactgctacatcataattcccatcaaatttaattatcgatgggttagaatttcaaaaaaaaaaaaaaaaaaaaaaaaaaaaaaaaagggcggccgctctagaggatccaagcttacgtacgcgtgcatgcgacgttatan

SEQ ID NO: 246622 - DNA, 504 bp, Glycine max
gtaagagggctttgttgctgtcaagcccactacgtcatgacgtaccggtccggaattcccgggtcgacccactcgtccgcccacgcgtccgggctcttaggaagcttgtggatgatgcttacaagtttttgaacgacgaggttaccaaggctgttgttactgtgcctgcttacttcaatgactcccaaaggactgacaccaaggatgccgatcctattgctggtcttgaagttcttagtattatcaatgaaccaacctctgcatccttgtcctatggcttcgaaaagaaaaacaatgaaacaatccttgtttatgaccttggaagcctcacctttgatgtctctgtgctcgatgttggtgatgagagtgtttgaagtcctctctacttctggtgacacccacttgggtggtgatgactttgataagagaattgatgattggctggctttcaacttcaagagagatgaaggcatatacctttatgaagacaaacaagctcttcag

SEQ ID NO: 246623 - DNA, 511 bp, Glycine max
  unsure (1)..(511): unsure at all n locations
gggtggagagactgtngtgcttgtaaagcatctcgtacgcctgcacgtaccggtccggaattcccgggtcgacccacgcgtccgcccacgcgtccgaaatctgatgcccacagaatggtgaggactggtcttcaaaaagaaggatcaagagtgatttttggtgttcctaaacctgggaagaaaagaaaatttatggaagtaagcaagcattatgttgcagatgggacaagcaagatcaatgatggaactgattcagtcaagctttcaaatttcttgatacctcaaggtactggatcacgtgggtggaaaaatagttcaaaaaatgataccaaggaaaaactaggagctgactccaggcccacctttaagtctggaaagtcgcagagtgttttgggtagagtggtcccaccaaaagaaaacccattatcaaactctcgtactaatgatttgacaagtcatgcagaaaggatcaaggattcatcaagtcattttaagaatgtatctcagagtg

SEQ ID NO: 246624 - DNA, 508 bp, Glycine max
  unsure (1)..(508): unsure at all n locations
agtntgagagggtgntgtagaactgacagggggattgatggcatgcctcgtaccggtccggaattcccgggtcgacccacgcgtccgcaacaatagcttgctagctactcctgttgctgtgagaaccgttgatgtagatgctttgcgagcaagatttagagactccaacaataaaagccatgcttaacacctaccatgcctccaaactctcatcaaaccagtgtggttctagccttgtgcaaacaatagatgcacctttacctctcgtatggtccctcataaggcgctttgagtatccacaagggtacaagctctttgtgaagaagtgcaaccttcttgatggggatggtggcattggaagcgtgcgtgaagtcatgatcacatctgggttaccccctggtggtaagtgtgagaggtgggacaagctcgatgatgacaagcatgtcttgaagtttacatcattggtgggatcacaggcttgtcaatatagttcaacgattactttgca

SEQ ID NO: 246625 - DNA, 505 bp, Glycine max
  unsure (1)..(505): unsure at all n locations
nggggaggtacgtttgtcatcgattgatgcgtncgcctgcagtaccggtccggaattcccgggtcgacccacgcgtccgcttcttctcttgcggctagggttttagcgcagcttcttctagatttaaggaagatgggtaaggaaaaggttcacatcagtattgtggtcattggccatgtcgactctgggaaatccactaccactggtcacctgatttacaagcttggaggcattgacaagcgtgttattgagaggtttgagaaggaagctgctgagatgaacaagaggtctttcaagtatgcctgggtgctggacaaacttaaggctgagcgtgaaagaggaatcaccattgatattgctttgtggaagtttgaaacaacaaagtattattgcacagttattgatgcgcctggacataaggatttcattaagaatatgattactgggacatcccaagctgactgtgctgntcttatcattgattcgaccacttgttgtttttgag

SEQ ID NO: 246626 - DNA, 507 bp, Glycine max
  unsure (1)..(507): unsure at all n locations
tggagaggcttntgtggctgtcacgcaggctgcacgcactgccgtaccggtccggaattcccgggtcgacccacgcgtccgcttggaactgcaacaatggtgccgcaacccattttgcatctaacccttttgtcaggaatggtctctctgaccactctttccttggtcgatgccgccgatcccacatttggcttcacccctcttggattatctagtagctcaaacttgcaaatccaaaagccttacgacgttgcagtcaacgagcgctacagcttttcaaatggagtgcacagattttgggtatactccacggacaagcctcatatgcaaggcagcaatacgaagccacgaactgagattcgtatcgctggatacgattatacatccggtgtgtggcaatttcaagggtttatttacgtgcctagtggcacaagcttagtgtgcattcatcaagtgtttgatggagtaacttttgtcacatcctctcagactacggtctatgggggt

SEQ ID NO: 246627 - DNA, 508 bp, Glycine max
  unsure (1)..(508): unsure at all n locations
gtgagagtgctgntgttgatcgcccatcgcataccgcactgccgtaccggtccggaattcccgggtcgacccacgcgtccggaacaggatgctccaacaacaacggaaggttcagctgcgccaccgccgattgcgcctcgggtcaagtcgcatgcaacggtgccggtgcaatcccgccagctactttggtagaaatcacagttgcagcaaacggagggcaagatttctacgacgtgagcaacgtggatggcttcaacgtgcccatgtccgtaaccccacaaggtgggagtggcgattgcaaaacctcaagttgccctaagaacattaactctgtgtgccctgcggagcttcaagtcaaagggtccgatggcaacgtcatcgcttgcaagagtgcttgcgaggcttttaaggaagatagatattgctgcactggacctaacaacaccgcataaacatgtncacctacgaactactctcagaatttcgaggagcagtgtcccgatgcttg

SEQ ID NO: 246628 - DNA, 506 bp, Glycine max
  unsure (1)..(506): unsure at all n locations
gaggtaggggcttcngtctacgaagcgaaaatgataggcactgccgtaccggtccggaattcccgggtcgacccacgcgtccgcggacgcgtgggttaatttccactcatatgcacctttgtagtttgtactaacacaagcagcaagtgcttggtctatatccacaaacatggtagttggaggttcgaataccggtgttcatggatggcgagacatcaagagtctcaccgtccaagtcatcaccgggagatggttcgtggtgttcgcctcctttctaatcatggccgccgctggagccacctacatgttcggtctctattccagcgacatcaaaacaaccctcggttacgaccaaaccactctcaatctcctcagtttcttcaaggacttgggcaccaacgttggggtcatctcaggcctaatcaacgaggtcgctccaccttgggttgtcctcgccattggtgccatcctcaacttctttggctacttcatganttggctttccg

SEQ ID NO: 246629 - DNA, 511 bp, Glycine max
  unsure (1)..(511): unsure at all n locations
agagagagagtgcgtgnngtcaactgaactgcatgctcgtacgcctgcagtaccggtccggaattcccgggtcgacccacgcgtccgtccacacccaacattctcacaagtcacagccaaacaccatttcattaattcttgcagaatattgcttagttttgttttatctgaatttggaaacagcttttgaatggctttttcaagagttgcactgctaatatgcacggtcgggtattttgtgattgcctctgccggcaatttccaccaagattttgatatcacatggggagatggtcgggctaagatactcaacaatggagagcttctcactctgtcacttgacaaagcctctggctcgggtttccaatccaagaacgaatacctttttggcaaaattgacatgcaactcaaactagtccctggcaactctgctggcaccgtcactgcctactatgtaagcatataatcatattctaccttactatactntaatctaagtcatacttattgn

SEQ ID NO: 246630 - DNA, 506 bp, Glycine max
  unsure (1)..(506): unsure at all n locations
agtaggtgtgtcggaatacggaccgtcatctgtaacgcctgcacgtaccggtccggaattcccgggtcgacccacgcgtccgcttccattccgttctacatataatcattcataatgggtgttttcacattcgaggatgaaatcaactcccctgtggctcctgctactctttacaaggccctagttacagatgccgacaacgtcatcccaaaggctcttgattccttcaagagtgttgaaaacgttgagggaaatggtggcccaggaaccatcaagaagatcactttccttgaggatggagaaaccaagtttgtgctgcacaaaatagaaagcattgatgaggcgaacttgggatacagctacagcgtggttgggggtgctgcattgccagacacggcggagaagatcacattcgactccaaattggttgctggtcccaatggagggtctgctgggaagctcactgtcaaatacgaaacanaaggagatgctgagcccaaccaagn

SEQ ID NO: 246631 - DNA, 500 bp, Glycine max
  unsure (1)..(500): unsure at all n locations
gagaggggtagtctgattaagaaggctaacnatcgctgccgtaccggtccggattcccgggtcgacccacgcgtccgcggcgcgtgggcacacacacagctagcagatattacatacacgtgaatcactagttaagccatggagaagaaatcaatagctgggttgtgcttcctcttccttgttctctttgttgctcaagaagttgtggtgcaaactgaggcaaagacttgcgagaacctggctgatacatacaggggtccatgcttcaccactggcagctgcgatgatcactgcaagaacaaagagcacttgctcagaggcagatgcagggacgattttcgctgttggtgcaccaaaaactgttaaatggatccattcactccaacgtgaagaagatgcatgcagcgctattttataaaagataaaactactatatactatatataataagactggcgctgcatcaatgacctatgtattatagtatatattattaccgg

SEQ ID NO: 246632 - DNA, 268 bp, Glycine max
gcacaagtctattcagagcatgctggaaaatctgcaattgactgtgacgacgttaagcttgcgattcagtccaaggtcaacttcagcttctcgcaaccaccccctcgtgaggtgcttctggagttggctcaaaaccgcaacaagataccgttgccaaagactatagcaggacctggtatcccacttccacctgatcaggacacattaatcagtcctaactaccagtttgcaattcctaacaaaaggcctgccgaacctttagaagaaa

SEQ ID NO: 246633 - DNA, 529 bp, Glycine max
  unsure (1)..(529): unsure at all n locations
agtaggggctgntgtcngatcatggaactctnggcactgccgtaccggtccggaattcccgggtcgacccacgcgtccgcccacgcgtccgcacagttggaaaaaaaaaaaaagttgttcgagatggcacgtacgaagcaaactgctcgtaagtccacaggaggaaaggcacctaggaagcagctcgcaaccaaggctgcacgtaagtctgcaccaactactggtggtgtgaagaagccacatcgttatcgtcctggtaccgttgctcttcgtgagattaggaaataccagaagagtaccgagcttttgatcaggaagctccccttccagaggctggttcgtgaaatngctcangacttcaagactgatctgcgtttccagagccatgctgtgcttgcattggcagaagctgctgaggcataccttgttggactctttgaggatactaatctgtgtgccattcacgcttagcgtgtaactattatgcccaaagatatccagctggcaagaaagattcgtggtgagcgtc

SEQ ID NO: 246634 - DNA, 521 bp, Glycine max
  unsure (1)..(521): unsure at all n locations
gttttagagcgtgtgtcaaccatgactgctngccttgccgtaccggtccggaattcccgggtcgacccacgcgtccgcacaaactagtaaatagtaatattattcttcgaatccattttattattcataatgggtgttttcacatttgaggatgaaaccacctcccctgtggctcctgctaccctttacaaagctctagttacagatgccgacaacgtcatcccaaaggctgttgatgccttcaggagtgttgaaaaccttgaggggaacggtggccctggaaccatcaagaagatcactttcgttgaggatggaaaaagcaagtttgtgttgcacaaaatagaatcagttgatgaagcaaacttgggatacagctatagcgtaattggtggaattgggttgccagacacagtggagaagatcacattcgaatgcaaattggctgctggtgccaacggagggtctgctgggaagctaactgtcaaataccanaccaaaggagatgctcagcccaacccaga

SEQ ID NO: 246635 - DNA, 138 bp, Glycine max
ccacgcgtccgaaaaaaaaaaaaaaaaaaaaaaaaaaaaaaaaaaaaaaaaaaaaaaaaaaaaaaaaaaaaaaaaaaatataaaataacaaaataaaaaaaaaataaataaaaaaataataaaaaatatataaattaa

SEQ ID NO: 246636 - DNA, 518 bp, Glycine max
  unsure (1)..(518): unsure at all n locations
cgggggtatttatccaacgtggaaactangncatgactgtaccgtccgtaattcccgggtcgacccacgcgtccgcaagtattggcgtggcggctatggtggcggctatggtggtggttatggaggtgggcggggaggctatggaggtgggcgtggaggctatggagggggacgtggtggatatggcggcggacgaggtggctatggtggcgggcgtggtggctatggcggcgggcgtggtggcgggcgtggtggctatggtcctaatgtacataacgaggctggggttgatgctaacccttacaactaagaaagcgactttctaaagcttatatatgggtttaagttatcgcaatagatataattttatgtgaaggttagtagtaatattagtggaaaactttgtagaggtttaatactgtattttgaattttcttaaaaaaatgtaatttatgtagatatgatagtttcttaatatatttattcttaaaaggctgctatgttttttaattttcttn

SEQ ID NO: 246637 - DNA, 513 bp, Glycine max
gtagggcgtacatccacccacggagtctgatgaaactctgtaccggtccggaattcccgggtcgacccacgcgtccgggagaaaccaagtttgtgctgcacaaaatagaaagcattgatgaggcgaacttgggatacagctacagcgtggttgggggtgctgcattgccagacacggcggagaagatcacattcgactccaaattggttgctggtcccaatggagggtctgctgggaagctcactgtcaaatacgaaacaaaaggagatgctgagcccaaccaagacgaactcaaaactggaaaagccaaggctgatgctctcttcaaggccattgaggcttaccttttggcccatcccgattacaactaatcctcttcaacttacttgtcatcactttcttgcttggagacttatccaatcactctgttctcaacttaagttgccttccaatgtatccagtctttcctttcttctttccttttcccatataattgtgagacttatgatatat

SEQ ID NO: 246638 - DNA, 518 bp, Glycine max
gggagttaggtgtgttggttgatgaacgcgttggcatgcactgtaccggtccggaattcccgggtcgacccacgcgtccgatttgctcccagtacagagcttaaccgagcttcacaaagatgaatcgggaaaagttggtgaagatggccggttcggttagaactgggggaaagggtaccatgagaagaaagaagaaggctgtccacaagacaacaaccacagatgacaaaaggcttcagagcaccctgaagagaataggggtgaatgccatcccggctattgaggaggtcaatatctttaaggatgacgtagttatccagtttctaaatcccaaagttcaagcatccattgctgctaatacttgggttgtcagtggttctccacaaacaaagaagttgcaagatatactccctagcattatccaccaattaggaccagataacttagaaaacctgaagaagctagccgagcaattccagaagcaggctcctgaaagagccgtcggttcaaccacagct

SEQ ID NO: 246639 - DNA, 396 bp, Glycine max
cgacccacgcgtccgattccaacaacaccacaatgggaagaagaccggcgaggtgttaccggcagataaagaacaaagcgtacccgaaatcccgtttctgccgcggcgtgccggagccgaagatccgaatctacgacgtgggaatgaagaagaaaggcgtggacgagttcccgttctgcgtgcacctggtctcgtgggagaaggagaacgtctccagcgaggctttggaggcggcgcgcatcgcatgcaacaagtacatggccaagttcgccggaaaagatgccttccacctgcgcgtgagggtgcatcccttccacgtgctccgcatcaacaagatgctatcgtgcgccggggccgacaggctccagaccggcatgaggggcgcctttgggaagc

SEQ ID NO: 246640 - DNA, 530 bp, Glycine max
  unsure (1)..(530): unsure at all n locations
tagtaggagtntctcanataatcggaactgtatccctcacgcactgccgtaccggtccggaattcccgggtcgacccacgcgtccgctcatcttgcaaaattctctcagctaattcgctattttcttgtagtaaacagagcaagcaagcatatccatttcaacatggccctcaaaactggttcagttgaaatgttcttcttccccttcgtaggaggaggacatcagattccaatgatagacacagcaagagtgttcgcatctcacggagccaaatcaaccattctagtcacaccctccaacgctctaaacttccaaaactcaatcaagcgcgaccaacaatccggtcttcccatcgccattcacaccttcttcgncgacatacccgacacagacatgtctgccggtcccttcatcgacaccttggcccttctcgaacctcttcggcagctcctcatccaacgccccccggattgcattgttgtcgacatgttccatcgctgggccggcgatgtccgttacaaacttcgga

SEQ ID NO: 246641 - DNA, 563 bp, Glycine max
  unsure (1)..(563): unsure at all n locations
agtaggagggcttgaggctcgccatcgtgcctanacgcatgcggtaccggtccggaattcccgggtcgacccacgcgtccgataaaagccctagttagaagagttggtcgaatgagggatagctcaataattaatgtagaggaaaactcttaagtgcctttgaagactattaaaaggattcgttttttacataaaaaaaaaaaaaaaaaaaaaaaaaaaaaaaaaaaaaaaaaaaaaaaaaaaaaaaataataaaaaaaaaaaaaagcaaaaagaatagcagccatatcatataacaacgttagtatacagcgctaggtcgatctatgctgttacaacttgtttcacaactgaagttactgtggtaaaactctgttaatgtaagcaatgtcagtttaatttgcctaaacttttactgatatctagacatagtgacatttcgtaatgaaggaggtattttaaaaaaatagttttattacaattcattttcgccctcatgtaatgcgattatggaaaattggatcttataaacggatcgttaaaatcgggttcgtgtctcattac

SEQ ID NO: 246642 - DNA, 517 bp, Glycine max
  unsure (1)..(517): unsure at all n locations
agggagggaggtcggtttggtcatgaaaccctcgcgcatcccgtaccggtccggaattcccgggtcgacccacgcgtccgcttccattcataatgggtgttttcacattcgaggatgaaatcaactcccctgtggctcgtgctactctttacaaggccctagttacagatgccgacaacgtcatcccaaaggctcttgattccttcaagagtgttgaaaacgttgagggaaatggtggcccaggaaccatcaagaagatcactttccttgaggatggagaaaccaagtttgtgctgcacaaaatagaaagcattgatgaggcgaacttgggatacagctacagcgtggttgggggtgctgcattgccagacaccgcggagaagatcacattcgactccaaattggttgctggtcccaatggagggtctgctgggaagctcactgtcaaatacgaaacanaaggagatgctgagcccaaccaagacgaactcaaaactggaaaagccaaagctgatgc

SEQ ID NO: 246643 - DNA, 460 bp, Glycine max
  unsure (1)..(460): unsure at all n locations
taccgtccggattcccggtcgacccacgcgtncgtttttggaattcattattattattccacttattttgtctcattactaatagtttctctaggatgaagctaaacctaatcatgcgtagttctaccttttcttctattggttgcaattttcatgcaacaatgtgtccatggagaatcgcaagtgccctgcctttttgtctttggggactctctgtctgataacggaaataataacaaccttccaagcactacaaagtccaattacaaaccatatggcatcgacttcccaaccggcccaacaggacgatttacgaatggacaaacatctattgacctaattgctcaactactgggatttgagaatttcatcccaccctttgcaaacactagtggctcagacacacttaagggtgtgaactatgcatncggagcagctgggattctaccagagagtggta

SEQ ID NO: 246644 - DNA, 517 bp, Glycine max
  unsure (1)..(517): unsure at all n locations
ggttaggagctgatgtgtgtgcccaacgccctacggcacgccgtaccggtccggaattcccgggtcgacccacgcgtccgggaaatggctgaagcacaactacgagaccagcatggcaaccctgtcccactcaccgatgaatacggtaatccggttatcttaactgacgagcgcggtaatcccgtccaactcactggtgtcgctaccaccgctaccggcacagcaggttctgggtttgggtcctatggtaccggtgcttacggtggtggtgcaagtgcaaccaccgttgcagatcttttggcaacccaaccaaggagtggcagggaggctagagagcttcgtcgttcctccagttcaagctctagctcgtctgaggatgatgggcaaggtgggaggaggaagaaaggagtgaaggataaaataaaagagaaactaccaggggtaggaggagggaataataataaggagcatgcacacacaacaactgctccaaccaccgncactaaccacccttgtt

SEQ ID NO: 246645 - DNA, 522 bp, Glycine max
agtaggctgtcttgtgaaatagtagggtacagcatgccgtaccggtccggaattcccgggtcgacccacgcgtccgaaagaagagaaagcgtccttgccaagacgctgtggctcccaccacggaagacgacaactgctgcaccaaggccgccgccgcatcacacggtttcatatccgttatagggcggcggcgcgtgatggaggatgcagtgaaggtggttaccggtttggtggcggcggaacaacactgtggcggttacgatttcttcgcggtttacgacggccacggagggaccttggtggccaacgcttgccgcgacaggctgcacttgttgctggcggaggaagtagtgagggggaccgcagcagacaaagggctggattggtgccaggtgatgtgttcctgtttcatgaagatggacaagggagttggtgaggagaacgatgatggcggcggaaacaccatgggttcgacggcggcggtggtggtggtcggaaaggaggagattgtggtggccaaat

SEQ ID NO: 246646 - DNA, 514 bp, Glycine max
  unsure (1)..(514): unsure at all n locations
agaaggtgtgtgngctatagagatgaatgtcatgctcgtaccggtccggaattcccgggtcgacccacgcgtccgaagaactttcttataaccaaaaccaacaacaactatggcaagttatcagaagcactacgatgatcacggtcgcaaggtcgacgagtatggcaatgttgagaggcaaactgactaatatggcaacccggttcatgccactagtgtcacttatgtagccaccaaaagtgttggtggctacaatgatgacgctaataagcaacatgatattactggtgtctatcccgagaaagacaccggtagacatcattctggtcgtggttacgacggtgacactaacatgcaccatgatgctactggtgtctatcccggaatagacattggtagagatcatgggactaccggtgtttatggcctatacaccgacagacatcatggaacttctggggtcgatcccgggatagacacccataaccacaacatgtgactaccgttggttatg

SEQ ID NO: 246647 - DNA, 509 bp, Glycine max
  unsure (1)..(509): unsure at all n locations
ggagtagctgggtcgnggtaagacacctgatggcatgctgtaccggtccggaattcccgggtcgacccacgcgtccgcccacgcgtccgctctaaaataaaaaaccctaacttctgaacctttcaccgcatcgcgaccgattccctatctccactaatcaaagaaaagaaaatgagtagacgctcgagcagaactgtctacgttgggaatctacccggtgatatccgtgaaagagaagttgaagatttgtttctgaagtacggacacataacacacatcgacctaaaggttcccccaagaccacctggttatgcatttgtagagtttgaagatgctcaagatgctgaggatgcaattcgtggtcgtgatggctatgattttgatggccaccggttacgggtggagcctgcccatggtgggcgtggtcattcatcctcaaaagatcggcacaatagtcacagcaatggccgaggtggacgtggggtatctaggcgctctgaatatcgngt

SEQ ID NO: 246648 - DNA, 515 bp, Glycine max
agtagggactgtgtctgagtagtagcctacgcgacgctcgtaccggtccggaattcccgggtcgacccacgcgtccgatcttcttatagcttcatcccaaaaagctcttttccttctaaatttgattccttagttgagcattctattattatatatggcttcttcaccttcctcagaaaacaaaaacctagagggagtagctggtggtgccggagagaaacccattccacttggtgagaacgttctgcagaagcatgctgcattctttgacttgaataaagatggtgtcatctacccatgggagacttttaaagggttgcgtgaaatcgggactggggttttgctgtccgttggaggtgctattttcatcaatgtgtttctcagtcagagtactcgtcccggaaagtttccatctatactttttccaattgaaattaaaaatatccaacgcggcaaacacggcagtgacactggagtctacgatactgaaggaaggtttgtaccttcaaaatttg

SEQ ID NO: 246649 - DNA, 518 bp, Glycine max
  unsure (1)..(518): unsure at all n locations
ngagctgtgtgngatatgtaacgtacgcgatgccgtaccggtccggaattcccgggtcgacccacgcgtccgcccacgcgtccgcttctctctctctttttcgcctcattccattttcatctatcaatggctccagtagcagcagcatcttcagattcaatcaagccaagagatgtttgcatcgttggtgttgcacgtacaccaatgggtggatttcttggtactctgtcatctctatctgccaccaagctaggctctatagctattgaagctgctcttaaaagggccaatgttgatccatcccttgtggaagaagtattttttgggaatgttcttagtgctaatttggggcaagctcctgcaagacaagctgctcttggagcangaatatccaattcagttatctgcactaccgttaacaaaagttgtgcatcaggaatgaaagctgcaatgcttgctgcacagagtattcaattaggcacanatgatngtgttgtggctggtggtatggaaagcat

SEQ ID NO: 246650 - DNA, 526 bp, Glycine max
  unsure (1)..(526): unsure at all n locations
tggaagagtatgtgangtcatggcatgtagcctgagcgcactgcagtaccggtccggaattcccgggtcgacccacgcgtccgccgtttctccgtcaaagcctccgccaaagagattgcctttgaccagcattcccgctctgctatgcaggccggcattgacaagctcgccgacgccgtcgggctcactcttgggcccagggggaggaatgttgtgttggatgagtttggaagtcctaaagtggttaacgatggtgtcaccattgctcgcgccatcgagcttccagatcctatggaaaatgccggtgcagctcttattagagaggttgctagtaagactaacgactctgccggtgatgggactaccacggcttcagctcctgctcgcgagataattaagctggggcttcttagtgcgacttctggggctaatcctgtgtctcttaagagaggggatgatataactgtacaaggtttggagtaggagcatatgatgaaggccaggcctgtttaaagtaaaagaaatc

SEQ ID NO: 246651 - DNA, 518 bp, Glycine max
  unsure (1)..(518): unsure at all n locations
ggggagtgtgtcnttcatgaatcgtacctcatcgcgcactgcagtaccggtccggaattcccgggtcgacccacgcgtccgacacaccactttatatacgcacacgagagtcggaagcactactctcttcgccggttgctcgctctctctcgctctttcagctttgactttggtggaaactaaagactagtcaaaatggtgaagttcacagctgaagagctgcgtcgcattatggactataagcataatatccgtaatatgtctgtcattgcccatgttgatcacggaaaatcaaccctgactgattctcttgtggctgctgctggtattattgctcaagaagttgcaggtgatgtccgtatgactgatacccgtgcagatgaagctgagcgtggtattacaatcaagtctacgggtatctcactctactatgaaatgactgatgaagctctcaagagttttaagggagagcgcaatgggaatgagtatcttattaaactcattgactcccctgggcc

SEQ ID NO: 246652 - DNA, 511 bp, Glycine max
  unsure (1)..(511): unsure at all n locations
agtagtaactgggtcngacataagtagccctacggcatgctgtaccggtccggaattcccgggtcgacccacgcgtccgcttgtgtcatatgtttggaggaaactgatgttggtcagattttttcagttgatggctgtcaacaccgctattgcttctcatgcatgaaacagcatgtggaggtgaagttgcttcatggaatggtgccaaagtgccctcatcaggggtgcaagtatgagctcctagttgacagctgccagaagttcttgactcaaaagttaaccgagaccatgcagcaacgaaaattggaagcttcaattcctgttgctgaaaaaatttattgtccttatcctacgtgctctgcattaatgtcaaaaactgaggtcttagagtactccaaagatatcactggtcaatctgaacaatctgaacccaagatatgcctaaaatgtcgtggccttttctgttttaactgcaaggtcccttggcatagtggtatgacatgtaatactt

SEQ ID NO: 246653 - DNA, 518 bp, Glycine max
  unsure (1)..(518): unsure at all n locations
agtagggnactgntttggaacatgaatcctanggcacgccgtaccggtccggaattcccgggtcgacccacgcgtccggctatcttgcccctttcagaaggaacatatatcatttgcgcgatttttgtgaaggatgtggacgtccacatggaaaagaagaattattcaattacagacagtcttcattaaggaatgtcattgaaagatgcgttggagttttgaaagcaagatttccaattttgaaattgatgccaagttatcccattagaagacaaagattaattctcattgcttgttgcactatacataattttataagaatgcaaaatggcgtggatacactctttgaccaatatgctgaacaactcgtggacatggatgagcaatggttaagtgtagagcaacaaggtgtcaacaaaaatcaagcagctaaagtggcacaagttcgacaaaccataacaaatgaaatgtgggaagattaccgtaaatcttaaaagaatttatattaaatgttaagc

SEQ ID NO: 246654 - DNA, 519 bp, Glycine max
  unsure (1)..(519): unsure at all n locations
aggagttnagtggcttcgacctcgtagcctangcgcatcgctgtaccggtccggaattcccgggtcggacccacgcgtccggttgctctctactctgcttagggttccaactttcaacccaacacttaatggtctcatgcaacaagggaaaatgaagcctattttctgtggaaattttgaatatgatgcccggcagtcagagctggagcggctttttagacgatatgggaaggttgatagggtggatatgaagtctggttttgcttttatctatatggaagacgagagagatgctgaagctgctattcgtgctcttgatcgagtagaatttggtcggaagggacgcagactccgtgtggaatggacaaagcatgaacgtggtgttagaaagcctgctagttcaagaagatcttcagctaatgggaggccatcaaagaccttgtttgtaattaattgtgatacataccataccagaacaagggacttggagaggcactttgaaccatatggaaagatagt

SEQ ID NO: 246655 - DNA, 522 bp, Glycine max
  unsure (1)..(522): unsure at all n locations
nggggagtgtcttgtgatcctgacgtcgtattgtcatggctataccggtccggaattcccgggtcgacccacgcgtccgcccacgcgtccgcccacgcgtccgcccacgcgtccgcccacgcgtccgagcgttttgggtcacttgtcaagatgccactattgaaatctgataggaatccccttcctgagccagtgcagtctgttttggaggaaggaattgatctatataaacttcacactaagagacatggaagattagagtctaccaaaggatcctacgcaaaagaatggataaaatgggaaaaacagttacgggatattctttgtggaaatgctgagtattttaattctattcaggttccatttgagtttgctgtcaagcaagtgttggaacaattgagaagcattgctaagggagagtacacaccaccagatactgaaaggaggaaatttggtaccattgtttttgctgctctcagcatgccagttactgaaattcatggcgtcctcaataaattggcg

SEQ ID NO: 246656 - DNA, 485 bp, Glycine max
gtaccggtccggaattcccgggctaacaccgtcctctcttggcgttctggcgtggaaaaggacccggatgaagtgctgcagtcccacactgtttataccaatgtttccaaaggggttcttgccaagtccaaggatttaatttcagcttttggcaccgatgaccactccaaaatttgcttagatattttaaagaaaggggagcttcaggtagctgggaaagagagggaatcattgttatcgagtcagttcaaggatattgcgaccattgtgatgcacaagacttacaatcctgagactcaacgtccatacactatcagtatgattgaacgcctcatgcgggaaatccattttgcttgtgatccacacagcaccttcaagaagcaagctctggagttaattcaagagcttcagaagcacttccctataaaacggtgtccgttgagaatacgtgctactgctcctgatgaccaggtgcctgaactttt

SEQ ID NO: 246657 - DNA, 513 bp, Glycine max
gggagggttctatataggggggagagagattggtatactcgtccggaattcccgggtcgacccacgcgtccgattttcttcatccttctctgttctcctagaacttgattacttgaacattccctatgacagaggaggtggttcttctggatttctggccaagtccatttgggatgagggtcaggattgcacttgctgaaaagggtatcgaatatgagtacaaagaagaggacttgaggaacaagagtcctcttctcttacaaatgaacccggttcacaagaagattccggttctcatccacaatggcaaacccatttccgaatccctcattgctgttcagtacattgaggaggtttggaatgacagaaatcccttgttgccttcagacccttaccagagagctcaggctagattctgggctgattatgttgacattaagatacatgatcttggaaagaagatttggacatcaaagggagaagaaaaagaagctgccaagaaggagttcatag

SEQ ID NO: 246658 - DNA, 521 bp, Glycine max
  unsure (1)..(521): unsure at all n locations
nggaaggtgctgtgtgatgaatgcatcctacgccatgcgtaccggtccggattcccgggtcgacccacgcgtccgaatttgaaagaaatcttataaaaagaagggacaaacattatgagaaggctcctatatgtagagagagagggaggtagtagcaaatatctagcacacagtatatgtaattattgaataaagtagtgataattgactttgcattgcagcagaaaatatggaattctacatgtccagagcatgtgttggaaaatctgaatggttgcacggaagattgtaacacagaacaggagcaagaagctattggttttaaagtgaagaatgcaatgctgtatccgcgtgaagtggagaaaggactatggccagaagattattctttttctgatcatgctagactcacaactgtgtttttaccaacaaggatgagatgttctgcctcacaaaactgaatgtacttcatggcactaatagtcttagcccacagaaaaatattcaattttgggaccaag

SEQ ID NO: 246659 - DNA, 410 bp, Glycine max
cccaattccgacccgcacgtacgcatctcttgatccttctctgttctcctataacttgattacttgaacattccctatgacagatgaggtgcttcttctggagttgtggccaagtccatttgggatgagggtcacgattgcacttgctgaaaagggtatcgaatatgagtacaaagaagaggacttgaggaacaagagtcctcttctcttacaaatgaacccggttcacaagaagattccggttctcatccacaatggcaaacccatttccgaatccctcattgctgttcagtacattgaggaggtttggaatgacagaaatcccttgttgccttcagacccttaccagagagctcaagctagattctgggctgattatgttgacattaagatacatgatcttggaaaga

SEQ ID NO: 246660 - DNA, 521 bp, Glycine max
  unsure (1)..(521): unsure at all n locations
nagaaggggactgnttcctgatagtatcctanggcactgccgtaccggtccggaattcccgggtcgacccacgcgtccggaagcgtgagatatatgatcagtatggtgaagatgcgcttaaggaaggaatgggtggtggcggtggccatgatccatttgatatcttttcatctttctttggcggtgggagtccctttggatcaggtggaagtagtcgaggtaggaggcagaggcgcggagaagacgtggttcaccctctcaaggtctctttggaggacctttatcttggaacttccaagaagctctccctctccagaaatgttatatgctccaagtgcagtgggtaagtgaattcggagtttggtttggttttgattggtgattagtttttcaagggaagaaatgcttttttagtttttaaagtatgatattgattaatttgatgtagcatggtcctaaattgtggtggcagcctttgttgcaattcttgatattactgggaatttcaaacaaatgtgttn

SEQ ID NO: 246661 - DNA, 518 bp, Glycine max
  unsure (1)..(518): unsure at all n locations
agtagggagtgggtgtttcccttcggcgtacgcaaccgctgtaccggtccggaattcccgggtcgacccacgcgtccgtgatatcccagttattccagtagagcctaaaactgtctctgtgcaacctttatttggtgcaggtccagaagggagtggtgaggcaaagctgaaggatggaccaaaacgctgcagcagctgcaacaagcgagttggtttgacagggtttaattgtcgatgtggtgaccttttttgtgctgtacatcgctactcagacaagcataattgcccatttgattaccgcactgctgctcgggatgccatagctaaagcaaacccagttgtcaaggctgagaagcttgataagatctaagatttgaagtcaaagtttcatggcctgagatgaagttatgcataatttcatcatgaaatgatccgagtttccttcacattttatttggtgttcttattatattgttatatgtggtgggtgacttggagttattggacatctctgcaan

SEQ ID NO: 246662 - DNA, 512 bp, Glycine max
  unsure (1)..(512): unsure at all n locations
tgtagttgagctgtcttcntcccctgcagcctcgcacatccctgtaccgtccggaattcccgggtcgacccacgcgtccgcgtttccattctatctctatcttcacatatctctacctccctcaaacagtttatgctagctcttgttccaatggcttcctcagttaaactcttatttttgtgctttctctcattgttcatctctttctccatagctcaaccctctttcagaccaaaggcacttgttcttcctgtcaccaaagatgtttctgcctcagttcctcagtatgttacacagatcaaactaagaaccccacttgtgccagtgaaactaacagttgatcttggtggtggctacttttgggtgaactgtgaaaaaagctatgtctcatcaaccttaaaaccagctcgttgtggctctgctcagtgctcacttttcgggttatatggttgcaatgttgaggacagattctgtagtcgttcttttagcaacactgttactggtgtcttcac

SEQ ID NO: 246663 - DNA, 514 bp, Glycine max
  unsure (1)..(514): unsure at all n locations
ngggagggctgnngttatgaaatgaatctcatgccatcncggtccggaattcccgggtcgacccacgcgtccgaaagattaagccatgcatgtgtaagtatgaactaattcagactgtgaaactgcgaatggctcattaaatcagttatagtttgtttgatggtatctactactcggataaccgtagtaattctagagctaatacgtgcaacaaaccccgacttctggaagggatgcatttattagataaaaggtcaacacaggctctgcctgttgctttgatgattcatgataactcgtcggatcgcacggcctttgtgccggcgacgcatcattcaaatttctgccctatcaactttcgatggtaggatagtggcctaccatggtggtgacgggtgacggagaattagggttcgattccggagagggagcctgagaaacggctaccacatccaaggaaggcagcaggcgcgcaaattacccaatcctgacacggngaggtagtgacaataaa

SEQ ID NO: 246664 - DNA, 522 bp, Glycine max
  unsure (1)..(522): unsure at all n locations
agaaagggggctgnttcatgacatgcatcccttaggcactgcggtaccggtccggaattcccgggtcgacccacgcgtccgcccacgcgtccgcccacgcgtccgcccacgcgtccgaaaagaagaagaagaagaagagaggaaagtagtagaagaatacagggcagagctgcagccaacaccacccatggctgaatccgtttcagtggacatggagatgatctttctcggcggaaaggaacatcatattcaaactggctgtggttctgtatctgtaatagtctgtggggatcaagaaaaaccagctctgatcacttatccagatatagcgctaaattatatgtcatggttccaagggttatttttctggccaaaagccacttctttggttcttcacaacttctgcatctatcatatcaatccttctgggccttaattgggaaccggttcaatttggtctgatgatccatcccttctgcttgagacttagcagatcaaataattgaggttctcaattatttt

SEQ ID NO: 246665 - DNA, 525 bp, Glycine max
  unsure (1)..(525): unsure at all n locations
ggtggggggggtgnatcatcgaatgcanctcgtgcgcactgccgtaccggtccggaattcccgggtcgacccacgcgtccgcccacgcgtccgctccagggaaacaacctgagaaagtgtgcacctcggtcaaaaaacggtgccggcactcgtatctgtgacaccgtgttcaattcggatccaaaaatctgatttatcgggtctcttcccaactcccccacctccaaccaacttccaccagtagtaaacagaaatacaagcataagcaaaagaagacccgcgacacatcgcaacatcgtatcatgtctgcaacaaacgtccccaaagtgctgttacaactacaaccaccctgcaaatcgaacccactctgcgtgccggtgataggactcggcaccgncgcggtccacaacgacggtgacacggtgaaggctgcagtcatagaggctatcaaactcggttacagacacttcgacaccgcggcacagtacggatcggagcaagctcttggagaagccattgccgaag

SEQ ID NO: 246666 - DNA, 515 bp, Glycine max
  unsure (1)..(515): unsure at all n locations
ngtagggggctttttaatgaatgcatctctngccatgccgtaccggtccggaattcccgggtcgacccacgcgtccggctgttaaggatttgaagcgtggttatgttgcctcaaactcaaaggatgaccctgcagaggaggctgctaacttcacagcccaagtcatcatcatgaaccaccctggtcagattggaaatggctatgcccctgtcctcgactgccacacttctcacattgctgtcaagtttgctgaactcatgaccaagattgacaggcgatccggcaaagagcttgagaaggagcccaagtttttgaagaacggtgatgctggttttgttaagatgattccaaccaaacccatggttgttgaaactttctccgagtatcctccacttggtaggtttgctgttagggacatgcgtcaaactgttgctgtgggagtcatcaagaacgttgagaagaaggatcctaccggagccaaggtcaccaaggctgcccagaagaagaagtgaatc

SEQ ID NO: 246667 - DNA, 511 bp, Glycine max
  unsure (1)..(511): unsure at all n locations
gtaggtnactgtgtctgcgcctagctcctangtcatgccgtaccggtccggaattcccgggtcgacccacgcgtccgtttcaatccccagtttcttcttcaacgtcctcttacgagcagatcccaattctccttcccagtttcaaaccctaattccctcattcccatggcctcagaagagcccactgtcgcggtggaacccgctcccgaacctgccaccgccgagcctcccccggaggagaaggaggagcccaaacctgaagccaaggctaagaaaaccaaggaacccaaacctaaaaaggtttccagaccacgcaaccctcccactcatccttcctacgaggagatgattaaagacgcaattacctcgctgaaggagaaaaccggttcgagccaacacgcgattgcgaagttcatcgaggagaagcacaagcagcttccaccgaacttcaggaagcttcttctctaccatttgaagaaacttgtagccgctggaaaactcgtcaaagtca

SEQ ID NO: 246668 - DNA, 517 bp, Glycine max
agtttaggagtgtctgtgtcctggatccctcgcgatcctgtaccggtccggaattcccgggtcgacccacgcgtccgcccacgcgtccgcccacgcgtccggaagaggtggtgtgaagagaatcagtggtttgatgtacgaggaaaccaggggggttctgaagattttcttggagaacgtgattcgagatgctgtgacctacaccgagcacgctaggaggaagacggtgactgccatggatgtggtttatgcgctcaagaggcagggaaggaccctctacggttttggaggctaaagaatttaacccttcttttctgggttgcaggataagacattggttcttttgaatttgcgtggtgttttagtttaggtttgttatgtatcatacgaatctctggtttgcatagaaaatatttcatttgaaatttaaatggagtatcggttctgttaggcaaaaaaaataaaaaagggcggccgctctagaggatccaagcttacgtacgcgttcatgccaatt

SEQ ID NO: 246669 - DNA, 516 bp, Glycine max
  unsure (1)..(516): unsure at all n locations
cgtagtaagtgcgtcntccatgatgcctcgcacactatgtaccggtccggaattcccgggtcgacccacgcgtccggttagttcacacactaagttctgaaaaatgagttccaaagtttttcttattctacttatgttcatggccactatacttttgatctcctctgaggttgcacccgatgatgcataccagaattttgacaaaacagatgggaagcgtagtgcaaatggggtagatgaaagcaaatattggcgtggtggctatggcgactatggtggttggcgtggtggtggttggcgtggtggctatggaggctggcgtggtggctatggtggtgggcgtggtggctatggtggctggcgtggtggctatggtggtgggcgtggtggctacggaggttggggtggtggctttggccctaacgaacataatgaggctgggattgatgctagccctcacaactaagaaggaaacttgctaaagcttatataggatttaagttatcgtaataaata

SEQ ID NO: 246670 - DNA, 523 bp, Glycine max
  unsure (1)..(523): unsure at all n locations
ggttttgagcggtgtgngatcatggactgcatgcaatgccgtaccggtccggaattcccgggtcgacccacgcgtccgttctttctctgtcgtcgctctttcttcaacttcaagcttaattcctcatgtctttcagaggcctcagccggccaaatgccacatcaggcatgggtgttgctgatcacagcaaaaacaccttcatggaattgaagcagaagaaggttcatcgttatgtgatctttaaggtcgatgagaagaaaagggaggttgtggttgagaagactggtggcccggctgagagctatgacgattttgctgcatctttgccggagaatgattgcagatatgctgtctttgactatgatttcgtcacttctgagaactgtcaaaagagcaaaatcttcttcattgcatggtccccttcaacatctcggatccgtgccaagatgctctatgccactactaaagacaggtttagacgtgagctagatggtgtccattatgaaatccaggctactgaccc

SEQ ID NO: 246671 - DNA, 525 bp, Glycine max
  unsure (1)..(525): unsure at all n locations
ggttagagagggctcgtgtgttgacatgtagcatacgccatgccgtaccggtccggaattcccgggtcgacccacgcgtccgaaaaccctacccttctcagttgcagagccatgtctcactccgacagcagcaagaagaagaagcagcagcagcgtagcaagcacgaaggaggaggaggagaggaagaatcgaaagacgaaggcgggttgatgatcaagccgcagagcttcactcccccaatcgacacctcccaatggcccatcctcctcaaaaactatgagcgtctcaatgtccgcaccggccactacacccccatccnctccggctactcccccttgaagcgcccnctcgccgagtacctcaaatacggcgtcctcaacctcgacaagcccgccaacccttcctcccacgaggtcgtcgcctggatcaagcgcctnctccgcgtcgaaaagaccggccactccggcaccctcgaccccaaggtcaccggcaacctcatcgtctgcatcgaccgcgccactcgc

SEQ ID NO: 246672 - DNA, 519 bp, Glycine max
  unsure (1)..(519): unsure at all n locations
gaggggggtgtcnacccatgaactgcatgctgtacgcatgccgtaccggtccggaattcccgggtcgacccacgcgtccgcctgccagtagtcatatgcttgtctcaaagattaagccatgcatgtgtaagtatgaactaattcagactgtgaaactgcgaatggctcattaaatcagttatagtttgtttgatggtatctactactcggataaccgtagtaattctagagctaatacgtgcaacaaaccccgacttctggaagggatgcatttattagataaaaggtcaacacaggctctgcctgttgctttgatgattcatgataactcgtcggatcgcacggcctttgtgccggcgacgcatcattcaaatttctgccctatcaactttcgatggtaggatagtggcctaccatggtggtgacgggtgacggagaattagggttcgattccggagagggagcctgagaaacggctaccacattcaaaggaagcagcaggcgcgcaaattacccaan

SEQ ID NO: 246673 - DNA, 519 bp, Glycine max
  unsure (1)..(519): unsure at all n locations
agtagtatctcgtttggtgcccagcncactcagcacctctctaccggttcggaattcccgggtcgacccacgcgtccgcagaaagaaaagaccatcaaagtttcacttcagccttatccggtttagggtttcgggtgttgacccaacctttgacgtatcgaaaccttaagtttcggatcaggtctgagcaatctggttggtagaacctttggtcttagagagtcaagttttatgtctgaattagacgatcaaattcctactgccttcgatccttttgctgatgcaaatgctgatgactcgggtgctgggtcaaaggagtatgtgcatattcgcgtacagcagcgaaatggaaggaaaagcctgacaaccgttcagggattgaaaaaagaattcagctataacaagatacttaaagatgttaagaaagagttctgttgcaatggaacagttgttcaggacccagaactaggacaggttattcaacttcaagtgatcagaggaagaatgttctaccttccc

SEQ ID NO: 246674 - DNA, 522 bp, Glycine max
  unsure (1)..(522): unsure at all n locations
agttaggaggtgttgagttaagaagatgttcccctgccgtaccggtccggaattcccgggtcgacccacgcgtccgagaaaacctaagcttagaattagaaacaaagaaaagaagaaaggaaagaattgatcgttgaaaatgcagggaggaaagaaagcgggagagtccattaaggaaacagctacaaacattggtgcttctgccaaggctggcatggagaagaccaaggccactgtccaagagaaggcagaaagaatgacagcacgtgatccggtgcaaaaggagttggcaacccaaaagaaagaggcaaagatgaaccaggcggagctggacaagcaggcggcgcgtcagcataacacggcggccaaacagtccgncaccacggctgggcacatgggacatggccaccacaccaccggaaccgggactggaaaccgcacgtattccaccaccggngaatatggtcagcccatgggggcccaccagacgtcggcaatgccctgccattgaaccgggcagcc

SEQ ID NO: 246675 - DNA, 341 bp, Glycine max
ccgggtcgacccacgcgtacgcgtctattagttcatactaagttctgaaaatgagttccaaggttttgcttgttctacttatggtcttggccactatacttctgatctcctctgaggttgcacccgatgatgcatacgagaattttgacaaaatagatgggaagcctagtgcagatggggtagatgaaagcaagtattggcgtggcggctatggtggcggctatggtggtggttatggaggtgggcgtggaggctatggaggtgggcgtggaggctatggaaggggacgtggtggatatggcggctgacgatgtggctatggtggcgggcgtggtggctat

SEQ ID NO: 246676 - DNA, 521 bp, Glycine max
  unsure (1)..(521): unsure at all n locations
ggttggagaggggtgnatcatgacatgcaactcgtaggcactgccgtaccggtccggaattcccgggtcgacccacgcgtccgcggacgcgtgggcgccaataggttatcaacgaccgtgagactggaaggtccagaggattcggatttgtgaccttcgcctcagagcagtcaatgaaagatgcgatcgcaggaatgaacggccaggaccttgacggtcgtaacatcactgtcaacgaagctcagacccgcgccagccgtggtggtggtggaggcggtggtttcggaagtggtggtggatacaaccgcggtagcggtggatatggtggtggtggtggcggcggcggataccgtggtcgtcgtgaaggtggataccaccgtaatggtggnggtggaggttgaagataccgcggtggtagagacccgggttacggtggtgatggtgggtctcggtactcttggcgtgggggaagccggtggatcccatggaaactggagaaattggcttatgaccctgtaaat

SEQ ID NO: 246677 - DNA, 517 bp, Glycine max
  unsure (1)..(517): unsure at all n locations
gttagggagtgggtctgtccatggatcctacgcgcacgcatgtaccggtccggaattcccgggtcgacccacgcgtccgcaacaacaaagaaaaaaacgagcagaagaagtcccacatcggataagctgaagaatcaacacccctgtgagaagcaggcgatgaaaccgtacagaggaataaggatgcgaaagtgggggaagtgggtggcggagatcagagaacccaacaagaggtcgaggatttggttgggttcgtacacgacacccatggccgccgcacgcgcctacgacacagccgttttctacctccgaggtcccaccgcacgccttaacttccccgaactcttgttccaggacgaccaggaggagggcaatgattcggtgcagcacggtgcagcagcaaggaacatgtccgctgattccattcgccgaaaagccacgcaagtcggcgccagagtcgacgctctccaaaccgggctttaccaccacgcgtcaagtaccaactcttttnaaaccc

SEQ ID NO: 246678 - DNA, 522 bp, Glycine max
  unsure (1)..(522): unsure at all n locations
gttaggggcggtgtgtgtgcatggaaccctacgtacctctcgtaccggtccggaattcccgggtcgacccacgcgtccgcccacgcgtccggttagttcacacactaagttctgaaaaatgagttccaaagtttttgttattctacttatgttcatggccactatacttttgatctcctctgaggttgcacccgatgatgcataccagaattttgacaaaacagatgggaagcgtagtgcaaatggggtagatgaaagcaaatattggcgtggtggctatggcgactatggtggttggcgtggtggtggttggcgtggtggctatggaggctggcgtggtggctatggtggtgggcgtggtggctatggtggctggcgtggtggctatggtggtgggcgtggtggctacggaggttggggtggtggctttggccctaacgaacataatgaggctgggattgatgctagccctcacaactaagaaggaaacttgctaaagcttatataggattaaagtattcn

SEQ ID NO: 246679 - DNA, 530 bp, Glycine max
  unsure (1)..(530): unsure at all n locations
aggagtnntagtgaagtcnnacggatcgaancttgatggagctgctgtgccggtccggaattcccgggtcgacccacgcgtccggattccatctctcacatcatttcccactcccgcgtttcctttatcatattcttattccgccatgtcccagttgaacggagcctactatggcccctccatcccgccgccgaaaacctnctaccaccgcccagggcgcggcggaggctgctgctgcggctgcctcttcagcctcatcttcaagctcatcttaaccgtgataatcatcgttggcatcgccgggttcgtgttctggctcatagtccgtccgaacgtggtgaaattccacgtgaccgacgccaccctgacgcagttcaactacaccgncaacaacactctccactacgacctcgccctaaacatcacggtccgaaaccccaacaagaggctcggaatctactacgaccgcatcgaggcgcgtgcaatgttccacgacgcagggttcgattcacagtttcccgaacccgtct

SEQ ID NO: 246680 - DNA, 542 bp, Glycine max
atggtgagaggaatagtagagcttgaaaccggtatgcctgtacgcctgccgtaccggtccggaattcccgggtcgacccacgcgtccgtgggaagatgcaaaaaagatgccaataacttcaagggtcattcaggagactctaagagttgcttcaattttgtcttttactttcagagaagcagtagaggatgttgaataccaagggtatcttattccaaaagggtggaaagtgctacctctatttaggaacatacaccacagtccagacaacttcaaggagccagaaaaatttgatcccccaagatttgaggctgctccaaagcccaacacttttatgccatttggcagtgggatccacatgtgtccagggaatgaattagccaagttgggagattttggtcctgctacatcatctgaccacaaaggtcaggtggtcttgtgtgggtgcaaagaatgggattcaatatgggccttttggtctttcccaaaacggcttacccatcacattattttccaagagcaagtagataatcaatcacacg

SEQ ID NO: 246681 - DNA, 521 bp, Glycine max
  unsure (1)..(521): unsure at all n locations
cganttntaggttagatacgtgcatcgaaaccctcggaagctgtacgcctgccgtaccggtccggaattcccgggtcgacccacgcgtccgcgataacgtgaaggcaaagatacaggacaaagaggggattccaccagaccagcagaggcttatctttgctgggaagcagctggaagatggtcgtactcttgctgattataatatccagaaggagtccactctgcatttggtgttgaggcttcgtggaggtatgcagatatttgtgaagactctgacagggaagaccattaccttggaggtggaaagctctgatactattgacaatgtgaaagctaagattcaggacaaggaaagtatccctccagatcagcagaagctcatttttgctgggaagcaattggaaaatggtcgtaccttggcagattacaatattcagaaagaatccactttgcatcttgtccttcgccttcgtggtggttgctaaggggaatcccttttatgaagtgttctcatatgtctt

SEQ ID NO: 246682 - DNA, 532 bp, Glycine max
  unsure (1)..(532): unsure at all n locations
attgttagtgtgtgtgatatcgatcatgnatctcgtacgcctgccgtaccggtccggaattcccgggtcgacccacgcgtccggaccaatgctcgaggtgaacttaaatacccaatcaagggaatcactatctggatagctgatggaaaaagtgctagagacagctttctgatgaatggttatgctctaaatactggccgtgctgctcaaggaatgccttttagggttgcccctgcaagaattgcctgtcttgatctctatcttcagaagacaaaaatgcagttgcgtgttcaagttctagttacagatcctagggagctagagaaagttcgttaaaaacaggctgatatgactaacgaacgtattgaaaaactgctgaaggctggatctaatgtcactctgacaactaatggaattgctgacatggttcctaagtccctttgcgaggatgaagacactcctgtaagatcgtatcagcaaaattgcaagaccaatgatgatacggctactgaggctacaatgtgtcaacttt

SEQ ID NO: 246683 - DNA, 536 bp, Glycine max
  unsure (1)..(536): unsure at all n locations
atagtggggagggtgtgatgttagaatcatagaanctcgtacgcactgccgtaccggtccggaattcccgggtcgacccacgcgtccgcccacgcgtccgcccacgcgtccggtctgatcctacggagaatgacagtgttgaagggctgcggccaaatgctaggggtccaggattagtcacttttgggcctgatcgagtaatggaattttgcaacaacaatgatcttcagctgattgttcgtgcacatgaatgtgtgatggatggctttgagcgttttgcccaggggcatttgatcacacttttctctgctacaaactactgtggtacggcaaataatgctggggcaatattagttttgggtagagatctcgttgtggttcctaaattgattcatccattaccgcctgcaatttcttcaccagaaacgtcaccggatcgtcatattgaggatacatggatgcaggagttgaatgctaacagaccaccaacaccaactagaggccgtcctcaagtaacaaacgaccgatcatgatgc

SEQ ID NO: 246684 - DNA, 534 bp, Glycine max
agtgttaagtgttgtcgatttgaacatgttgctgtacgcctgccgtaccggtccggaattcccgggtcgacccacgcgtccgcccacgcgtccgcttttgttccccacagcagattcagcaaggccattttcaatgcttggccttggtgatattgttatccctggtatttttgtagcattggctttgcgatttgatgtatctagaggaaaacagccccagtatttcaagagtgcatttgtaggatacactgttggcttggtccttacaattgttgtgatgaactggtttcaggctgcacagcctggtcttttggatattgtaccttctggaattggatttttggctgctcattggttatggaatggtgatgtcaaaccagtgttggaattcgatgagtcaaagactggcaattcaccttaagagaatgctgacgacaagtctagccaaaagggtgaattagttgaagcatgcccaataccaatactttcgagtcacagaacaaatactcggtttttctgagaaaaaccgttctc

SEQ ID NO: 246685 - DNA, 516 bp, Glycine max
  unsure (1)..(516): unsure at all n locations
ggtagtagtcagtagtgcactgataccatgnaactcgtacgcctgccgtaccggtccggaattcccgggtcgacccacgcgtccgcctaagtctttgggaatagtgctgcaatggcttcaagtcaggaggaggtgacccttttgggagctactggaagcccatttgtgtgcagggttcatattgccctcaagttgaagggagttcaatacaaatatgtcgaagaaaatttgaggaacaagagtgaactgcttctcaaatccaacccagttcacaagaaggttccagtgtttattcacaatgagaagcccatagcagagtctcttgtgattgttgaatacattgatgagacatggaagaacaaccccatcttgccttctgatccttaccaaagagccttggctcgtttctggtccaaattcattgatgataaggtttttggtgctgcatggaaatccgttttcacagctgatgagaaagagcgtgagaagaatgttgaggaagcaattgaggctctg

SEQ ID NO: 246686 - DNA, 530 bp, Glycine max
  unsure (1)..(530): unsure at all n locations
aggttttgtgttttgaatttgaagctagagcctgtagtaccggtccggaattcccgggtcgacccacgcgtccgagctaattcacttttgcaacctcaatttcctggaacccttgtattggaacttgattggttgcccttgcgaactgttaagaatgatccactggtactgtgcattgctggagcagatagtagttttcgtcttgttgaagttaatgcaaatgataaacgatttggttatgcaccccatatcagaaatacaaaggagagattccggtcaatgcctatatgttgtcccatacttcttcctttaccacatgccttggcattgcgcatgattttacaattgggtgttaaaccttcttggtttaacacttgcagtacaaccatagaaaagagacctcacttaattccaggaactccttcatctaaaggggatcttcgcacctacatgatcgacataccanctcttggcgacttcgtggggccctgagatgctctaaaaagtatgggaacattttggaaaggagg

SEQ ID NO: 246687 - DNA, 538 bp, Glycine max
  unsure (1)..(538): unsure at all n locations
gtgtttgggagggagtgatgttggaatcatcgatgctcgtacgcatgccgtaccggtccggaattcccgggtcgacccacgcgtccgcccacgcgtccgcccacgcgtccggttggccttcgggatcggagtaatgattaacagggacagtcgggggcattcgtatttcatagtcagaggtgaaattcttggatttatgaaagacgaacaactgcgaaagcatttgccaaggatgttttcattaatcaagaacgaaagttgggggctcgaagacgatcagataccgtcctagtctcaaccataaacgatgccgaccagggatcagcggatgttgcttttaggactccgctggcaccttatgagaaatcaaagtctttgggttccggggggagtatggtcgcaaggctgaaacttaaaggaattgacggaagggcaccaccaggagtggagcctgcggcttaatttgacccaacacggggaaacttaccaagtccagacataataaggattgacagactgagagctctttcttgattcn

SEQ ID NO: 246688 - DNA, 508 bp, Glycine max
  unsure (1)..(508): unsure at all n locations
gaggtagtagatcctccactgagagcttgatgcgtnggactgccgtaccggtccggattcccgggtcgacccacgcgtccgattattctttcgcaccttcgaaaatcaattttctgtcttctctgcgtctgcttcctgtatcaatcgttttccatggctcgtaccaagcaaaccgctcgcaaatccaccggtggaaaggctcctaggaagcaactcgccaccaaggctgcaaggaaatctgcaccgacaaccggtggagtcaagaagcctcatcgctatcgccctggaactgttgctcttcgtgagatccgaaaataccaaaagagcacagagcttctgatccgcaagctccccttccagcgtcttgttcgtgaaattgcgcaagacttcaagaccgatttgaggttccagagtcacgctgttcttgcgcttcaggaagctgcggaggcttacttggtgggtttgtttgaggacaccaacttgtgtgcgattcacgccaagagggtga

SEQ ID NO: 246689 - DNA, 386 bp, Glycine max
ccatgcctacccacgcgttatagctcataccaaaaagttcttctccttcaaaatttaattctataattgaacattcgattattatatatggcttctttaccttcctaagaatacaaaaacctattgggagtatcttctggtgcctgagagaaacccattccacttggtgagaacgttctgcagaagcatgctgcattctttgacttgaataaagattgtgtcatctacccattgtagacttttaaagggttgcatgaaatctgtactggggttttgctgtccgttggatgtgctattttcatcaatgtgtttctcaatcagagtactcgttccgtaaaagtttcatctatactttttccaattgaaattaaaaatatccaacgcgg

SEQ ID NO: 246690 - DNA, 519 bp, Glycine max
  unsure (1)..(519): unsure at all n locations
ggagtntagtgaggttgtgcatcgaactattgaactctncgcactgccgtaccggtccggaattcccgggtcgacccacgcgtccgaatcaacaatagcttgctagctactcctgttgctgtgagaaccgttgatgtagatgctttgcaagcaagatttagagactccaacaataaaagccatgcttaacacctaccatgcctccaaactctcatcaaaccagtgtggttctagccttgtgcaaacaatagatgcacctttacctctcgtatggtccctcataaggcgctttgagtatccacaagggtacaagctctttgtgaagaagtgcaaccttcttgatggggatggtggcattggaagcgtgcgtgaggtcatgatcacatctgggttacccgctggtgttagtgtggagaggttggacaagctcgatgatgacaagcatgtcttgaagtttagcatcattggtggtgatcacaggcttgtcaattatagttcaacgattactttgcatgaggg

SEQ ID NO: 246691 - DNA, 541 bp, Glycine max
  unsure (1)..(541): unsure at all n locations
tttgataggttagtgtgtgtgatcatcgaacactgatnctcgtcacgcctgcaggtaccggtccggaattcccgggtcgacccacgcgtccggagagagagagagagagatctagtagagaggctagtaggtggtcctcgaacgaagatgttggcggtgttcagcgggcaggtggtggaggtgccggcggagctggtggcggcgggcagccggacgccgtcgcccaagacgaaggcgtcgcagctggtggggcgcttcctggccgcctccgagccggccgtgtccgtgcagctcggcgaccacggccacctcgcctactcccacaccaaccaggcgctcctccgccccaggtcgttcgcggccaaggacgaggtgttctgcctgttcgagggggtgctggacaacctgggtcgtctgagccagcagcacgggctgtcaagcaagggcgccaacgaggtgctcctcgtcatcgaggccctacagacgctgggcgaccgggcgccttacccggccagtttatgcttggccaggttaaccggtt

SEQ ID NO: 246692 - DNA, 537 bp, Glycine max
atagaggtctcgttttgtgaccctaccgcgtaccgcactgccgtaccggtccggaattcccgggtcgacccacgcgtccgaaaggattctacccgccgctcgatgggaattgcgcttcaaggcgtctcgtaaggctaatgcgcctcacgagggtcaccaacggcacgtgcctttggggggccgaggccccctactgctggtcggcaaacggacggcgggcgcacgcgtcgcttctagcccgaattctgacttagaggcgttcagtcataatccaacgcacggtagcttcgcgccactggcttttcaaccaagcgcgatgaccaattgtgcgaatcaacggttcctctcgtactaggttgaattactattgcgacactgtcatcagtagggtaaaactaacctgtctcacgacggtctaaacccagctcacgttccctattggtgggtgaacaatccaacacttggtgaattctgcttcacaatggtagggagagcccacaatgaatgatcaaaaagcaacgtcgctattaacgctgg

SEQ ID NO: 246693 - DNA, 530 bp, Glycine max
atgggttagtattaagattatgatacctgacgacgtcgtaccggtccggaattcccgggtcgacccacgcgtccgaatagatttcgtcagtgttgaaatcacgagaaattcatggctgctccaccggcaagagctcgtgcggattacgattatctcataaaacttctcttgattggcgatagtggtgtcggaaagagttgccttcttctacgattctctgatggttctttcacaactagtttcatcacaactataggcattgattttaagataagaaccattgagcaggatggaaaacggatcaagctccaaatttgggatactgcaggtcaggagcggttccgaacaattacaaccgcttactatcgtggtgctatgggcatattgctagtctatgacgttacagacgaatcttcatttaacaatatcaggaattggattcgtaacattgagcagcatgcttcagacaatgttaacaaagtactggtggggaacaaagctgacatggatgaaaacaaaacggttgtgcc

SEQ ID NO: 246694 - DNA, 540 bp, Glycine max
gatggatgggtgtatgtgaagtagaatcatggaggctgttacgcactgccgtaccggtccggaattcccgggtcgacccacgcgtccgttttgctttaccaaattccattttccaattcaaaaccctaactccgttcgaagcaccaaatcgtgatggcaccaaaggcagagaagaagccagcagagaagaagcctgtggaggagaagaaatcgacggtgggagacaaggctccggcggagaagaagccaaaggccggaaagaagcttccgaaggagggaggcgccggcggagaaggtaagaagaagaagagaaacaagaagagcgtggagacatacaagatctacatcttcaaggttctgaagcaggttcaccctgacattggtatctcaagcaaggccatgggaatcatgaacagcttcatcaacgacatcttcgagaagcttgcccaggaatcttctagacttgcccgcttacacaagaaaccaaccatcacttcaggggaatttcagaccgcggtcaggcttgtgctgcccggtgac

SEQ ID NO: 246695 - DNA, 398 bp, Glycine max
  unsure (1)..(398): unsure at all n locations
gttggtgcaaagcatccttcggttcaatttctctctctcagcgctttctgcaatcgaacctttcatctccaaagggatccacaggccgaaggagaaatggggctgacattcacaaagcttttcagtcggcttttcgcgaagaaggaaatgcgaattctgatggttggtcttgatgctgctggtaagaccactatcctgtacaagctcaagctcggagagatcgttaccacaattcctaccatcgggttcaatgttgagactgtggaatacaagaacattagcttcactgtttgggatgttggtggccaggacaagattcgtcccttgtggaggcactacttccagaacacccagngtcttatntttgttgtagacagcaatgatagggacagagttgt

SEQ ID NO: 246696 - DNA, 525 bp, Glycine max
  unsure (1)..(525): unsure at all n locations
ggatgtnnagtnaggttctgcaattgaancctacggatnctcgttgcgcctgccgtaccggtccggaattcccgggtcgacccacgcgtccggcccactaatgtgccaagctcgagagtctaaaattcaaatcctagcttgggttaacttagatatgagttctctatttttaattttccttatccttcttgttgccgatggggtccttgtccgaggaagtataaatattacagaaataagcttcgatcaaaactatgaggttacgtggggtgataatcatgttgtctccttaaaccaagggaaagaaattcagctcacaatggataactcttcaggatccggttttggatccaagatgtcatatggctctggactattccatttgaggatcaaagtaccagataggaattctgctggagttgtcacagcttactacttaacttcacaaggaagaagtcatgacgagttagactntgaattcttgggcaatagagaagggaagccatatagattacaaaccaatgg

SEQ ID NO: 246697 - DNA, 532 bp, Glycine max
  unsure (1)..(532): unsure at all n locations
tagattttagggtctgatcatgtagcatcgagactgtcgtaccggtccggaattcccgggtcgacccacgcgtccgaaaactactgcctgcaaggatgctgaaactaagaagtatgtttcagaattgaatgctgaggaggatgatgttgatggcaatggagatgaatgtcgcttgtgtggcatggatgggaccttgctttgttgtgatggttgtcctgctgtttatcattcaaggtgtattggtgtgatgaagatgcatataccagaaggggcatggtattgtccggagtgcaaaatagatatgattgggcctactattgcacggggaacatcacttaaaggggctgaagtattcggaaaggatttgtatgggcaagttttcatgagtacttgcaaccacttactggtgtatgtttaacttcttttgtgtntcttccactccttcatttgttatgctggatgattctggctcaatgtcaacagtgatgggctttggtcttaaatactancatcaggatgacatacctagagt

SEQ ID NO: 246698 - DNA, 539 bp, Glycine max
  unsure (1)..(539): unsure at all n locations
ataggtttggtgtcngatctcgatgcctgacgcctgtcgtaccggtccggaattcccgggtcgacccacgcgtccgggcaaggaaggtgggtttgaattttatagggtgctccatcgttgcaatggttttcataattggtgtggctgaagcaacagattatatcgttggtgaaggcttcggatggagcgttccctccaatgagagcttttatacagactgggctagcaccaagagattcttcgttggtgacaatctcattttcaacatcagcggagagcattcggtgggaattagaacagaggctacttattatgagaattgcaacaccagcttattaactggtttcacgttcataggcgtcaatgggagtaattcgatgtttcgacataatattattccttcaactgggcctcgctatttcctctgcaccgtttggaaatcactgggaaaggggcccagaggtttagtttcagcggttgagtcttattcctgatttccggttgctcctactacactggcaattcaaaaatcttatctg

SEQ ID NO: 246699 - DNA, 536 bp, Glycine max
gtggtatgggggtgtgaatttgaatctcgaaactcgtacgcactgccgtaccggtccggaattcccgggtcgacccacgcgtccgggaagctaactgtcaaataccaaaccaaaggagatgctcagcccaacccagacgacctcaaaattggcaaagtcaagtctgatgctcttttcaaggccgttgaggcctaccttttggccaatcctcattacaactgatccaattcgatcttcagtattcagtgatctgcaaagaccttgttttatattatatacaagagttttcttgccttgtgtggagtgttattcaatcactttgagtgtgtggtgtggcttccaattgatgtaacgagtgtttcctttcttatttcctttttccacagaattgtgagagccagttgatgtctttgtatgtcacttcatcaataaatcaatatgttataataatagacaataataatacatcatcagaagaaattgtaatactgcttggtaatattatactagactgtggagtcataattgattgtgaa

SEQ ID NO: 246700 - DNA, 536 bp, Glycine max
  unsure (1)..(536): unsure at all n locations
gtagggggggggtgtgaaatagaancatcgaaactcgtacgcctgccgtaccggtccggaattcccgggtcgacccacgcgtccgcaaaatccttagtttgaacaaatgataatctcccagctctcgaagttgtttatcttttgtttcatatgcattacactcatatgtttctcttcaagttctaatttcccagtgcaatactccatattaggccctaatttggacaagcttccttcacaggatgaaaccatccaactattccaactatggagaaaagagcatggactagtgtataaagacctaaaagagatggcaaagagatttgagattttcttgtccaatttgaattatatcattgagtttaatgctaaaagaagctccccttctggctaccttcttggtctaaacaattttgctgattggagccctagtgagttccaagaaatctacttacatagccttgatatgcctacagatagtgctcctaagctgaatggccctcttttatcatgtattgctcctgcatcggtagaat

SEQ ID NO: 246701 - DNA, 518 bp, Glycine max
  unsure (1)..(518): unsure at all n locations
gttggtnnagttaggtgcgtcgtttgtaaaccaatggaagctgttacgcctgcagtaccggtccggaattcccgggtcgacccacgcgtccgtacggaggagaatccacttcgctcaatcttattcagctttggaagagattcaggggagatgacaagcctcctccacatttgggcgctagcagggactacaacatcgatatgaaccccaagtttattatggctaatggcaatttggtgcgggttctcatacataccgatgttactaagtatctctatttcaaagctgtggatgggagctatgtgtttaataaaggaaaggttcataaggtgcctgcaaacgacatggaggccttgaagtccccacttatggggctatntgaaaaacgccgggcaccgcagtttttcaattatgtgcaaaactacaacgagagcgatcccaagacccacgaggggatggacttgacaagagtgtctactaaagagttgatagcanaatacggccttgatgataacact

SEQ ID NO: 246702 - DNA, 523 bp, Glycine max
  unsure (1)..(523): unsure at all n locations
gtttaagtagtanagttgtgcattgaaaccctcgtagactgtngcgactgccgtaccggtccggaattcccgggtcgacccacgcgtccgcgattctcaccttcggcccccacgccgtctactattctgccacgcccttatctgagtatgatacactcggcacctctatcaaagccgctgttgtttatcttgcaacggcattagtgaagcttatttgtctagctacttttctcaaggtatcagagagcgatagctttgatccgtatcaggagtttttgaaggcgttaataggttttatagatgttgctgggctttattttgccttgacccagttgactcacaggaacatctctcagaatcataaatttcaagcagttggacttggctgggcatttgctgactctgtgctgcatcggttggctccactttgggttggtgccagaggattagaatttacttgggattacattcttcagggccttgaggctaatgcaaatttggtgttgagcatatcccttgctgc

SEQ ID NO: 246703 - DNA, 549 bp, Glycine max
ataggggtagtggttatgttcatgtatgcactggagcctgtcgtaccggtccggaattcccgggtcgacccacgcgtccggtcagactggcagacgcacttcgctgcgtacctaatgaacatgaagcaaagcttcaagtggtggaggttgagaagatctccctttatgcatccagttcatccatcactgaacttcagaaacttgtacttgacccaacacttgtcgcccagatcggttcttgagatcctaatgagactgcagtgtggtcctagaattactcgacgatggttaacctgaggcatattacttgcgctcgaacttacacactccgtcattgaatccggtaagaggtaggactgctgacatccattgtatatgagcaatatcttatctggtcgtatattcagtaaacttctagatccaatacctaagtcaatgcattaatatgtgtataatgagtatcaacgagactaatcatgccagtgactcaactgaaaatgcttatttcatgtcattatggtggaaaatgatcacaatgtggctatatac

SEQ ID NO: 246704 - DNA, 539 bp, Glycine max
  unsure (1)..(539): unsure at all n locations
gatgtgttatagaggtgtctcgatctcgtaagcattgagcctgtcgtaccggtccggaattcccgggtcgacccacgcgtccgctcaaatctgcaaactaggctttttcccaacgggttcagtttattcaagttttacaatttcgtggctctgaaactattagatggggaattgtttgcgcaaggctcatgcggatgatgattctgatcatattgtggagcttgcttctgggaatgtgcaacttattactaccaaagaatcttgggaccaaaagttggatcaagcgaggaaggagagtaaaattgtaattgcaaatttcagtgcaacatggtgtggtccttgtaaggtgattgcaccacattattgcgagttgtccgtgaaatacccgtctatcatgttcttattagtcgatgtggatgaactagctgacttcagcacttcgtgggacatcaaagccacaccaactttcttctttcttaaagatgggaaaagaagttgacaaaacttgtangagccaacaagccatagctggagaggat

SEQ ID NO: 246705 - DNA, 532 bp, Glycine max
  unsure (1)..(532): unsure at all n locations
ttgtttaaggggtgtgaattgaatatcgatgctgtacgcactgccgtaccggtccggaattcccgggtcgacccacgcgtccgcagctttctgtcgcaaattgatgatatttgggtgttgatgcgcttctgtcatttggtttagattcaggatgaaaatgtcactggtttggcctctcttaacgaggcgaggattcagcacaagctctgagaatcttgttgcttctgtgctctttgagagattgccagtggtcattcccaaaattgatcctgtggtttatgcatttcaagaattctcgtttcgatggcgacaacaatatcaacgcagataccctgatgaatttcttgacaaatctgatgcaagggggaaaggtgattatcagattgactatgtgccagcaccacgaatcactgaagccgaccaaagtaatgaccgaaggtcattacaaagagctcttgacagaagactctaccttcttctctatggtaatgcatatggggctccaagtgggaagcctgtgtggcattttcan

SEQ ID NO: 246706 - DNA, 535 bp, Glycine max
agagggtaggggtgtgagctagaacatcgatgctgtcacgcactgccgtaccggtccggaattcccgggtcgacccacgcgtccggttatggatgaggctgataagcttctctcccaagagttccaaccttcaatagagcagctgattcaatctcttcctggaaaccggcaaatcctgatgtatgctgctacatttactgttactgtcaaggacttcaaagatcgatatcttcgtaagccatacatcgttaaccttatggatgagctaactctgaaaggtattacacaatatgacgcatttctggaagagaggcagaaagtccactgcctaaatacacttttctctaagctgcaaataaatcagtcgatcatcttctgcaattccgtgaatcgggttgagctactctccaagaaaatcacagaacttgggtattcatgtgtctatattcatgcatagatgttgcaagatcaccgaaatagagtgattcatgacttgtgcaatggtgcctgcagaaacctttgttgtactgatctt

SEQ ID NO: 246707 - DNA, 534 bp, Glycine max
  unsure (1)..(534): unsure at all n locations
ttaggtttaagggttgtgccatcgagccatcganctcgtcggcatgccgtaccggtccggaattcccgggtcgacccacgcgtccgcaagtgtttttaacaaacagcaacagtacagagcattttgatgcatgtaagtggacaaaatcggaaccacattcctgggaattgatcttcccaatagaggtatgtggtcctaataatggttttgaaatgtggagttctgagtgggcaaatcaaacttcatggcatttgagtttccttattgacaatcccaaacagtctacagtttttgatattctcttgggaatttctcaagattttgaaattgctggtaatactcttatgccagctttttctgttccacaggctactgccagatcttctgaaaatgcggaatcctctgcatgatctggaatttgagtcttctttcgctagttcgtttgtttaattcaataaaggaaattaggcatgaccctctggttgagtatgctctgactatttgaaaatttccacacctattttaatgtgtcga

SEQ ID NO: 246708 - DNA, 532 bp, Glycine max
  unsure (1)..(532): unsure at all n locations
agtntagtggagtnnagtgcgtgccatcgaaacttacgtatnctcgttgcgcactgccgtaccggtccggaattcccgggtcgacccacgcgtccggtatgatcctatacctacattattatcacacactgttagaagcaacaagaagcagcagaaatccaggaagaagaagcctgaaaagaagaatggaaagaagggtcaaaagggaaattcatctcgagggggcagcaacaaagataagcaggttcgcaagctaggtgggacttctggtttgtgctacaagtcaatggattcttgtgataaagtgcttggagcttctactgaattagatgctcttgaagttcgaagccaggattcatactgtggaactagcttcctgaaaaaatcagttactgaagtgcactactcggttgcagaagcactatgagtgaaatactctgaatgtcttttcctatttccttgaatgtacataaataagcgatattttgctgttggcttatttggtggaaaaattaaaagaaaaagaccttgt

SEQ ID NO: 246709 - DNA, 528 bp, Glycine max
  unsure (1)..(528): unsure at all n locations
gttgttttaggtagtacgtgaactgancccatgnanccctcgcgcatgcggtaccggtccggnattcccgggtcgacccacgcgtccgaaaaaaaaaaaaaaaaaaaaaaaaaaaaaaaaaaaaaaaaaaaataaaaaaaaaaaaagaaaaaaaaaaaaaaaaaaaaaaaaaggggcggccgctctaggggatccaagcttacgtacgcgtgcttgcaacgtcatagctcttctatagggtcacctaaattcaattcactggccgtcgttttacaacgtcgtgactgggaaaaccctggcgttacccaacttaatcgccttgcaccacatccccctttcgccagctggcgtattagcgaagaggcccgcaccgatcgcccttcccaacagttgcgcagcctgaatggcgaatgggactcgccttgtagcggcccattaaacgcggcatgttttgtggtcacgcgcaacgttacccgtacacttgccaagtccctatctcctggttcttttcgttttcttcttttcttt

SEQ ID NO: 246710 - DNA, 535 bp, Glycine max
  unsure (1)..(535): unsure at all n locations
gtagaggtacgtgggtgtcgagctggcatcattgagnatgtcgtaccggtccggaattcccgggtcgacccacgcgtccgctcagaatttctatctatctcttgtttcaatttcaacaacggttactcctttttcgttgtgagtttcaatcaagccatcatcatgtctaccgcatcgcaacccaaggccaagaaaacggcgtcgtccaagaagcccctctcccaccctcccttcgccgtgatgatagcagaggcgattgcgagtctgaaagagagaaccggttcgagccaatacgcgataaccaaatacatcgaagggaagcacaaggagttgcctgcaacctacaagaagcttgtcctcgttcatctcaagaaatctgttgctgctggcaagcttgttaaggtgaaaaactcctttaagctcgcaccgactaagcctgctccggttaaggccgctgctcccaaaaagccaaccaaagctgccactaagcccgctttcaagcccaaagctgctactcctaagaaaaaggcttgtg

SEQ ID NO: 246711 - DNA, 528 bp, Glycine max
ttagggatgggtgtgtcatgatcatagagctcgtcgtaccggtccggaattcccgggtcgacccacgcgtccgcccacgcgtccgcccacgcgtccgcccacgcgtccgctttttgacaggattattgccaagggccactacagtgaaagggctgctgcttcaatatgtaggcaggttgttaaggttgttaacacctgccattttatgggtgtcattcatagggatctcaagccagagaatttcttgctatctagtaaggatgacaagggacttctcaaggccacggattttggcttgtcagtcttcattgaagaaggaaaggtgtatcgagatatagttggcagtgcttactatgttgctccagaagttctacgtcgtaactatgggaaggaagcagatatatggagtgcaggagttatattgtatatcttacttagtggtgtaccttcattttgggcagagacgggaaagggaatatttgatgtcatattgcaaggtcatattgattttggaagtagtccatggcc

SEQ ID NO: 246712 - DNA, 531 bp, Glycine max
  unsure (1)..(531): unsure at all n locations
tgaggggaggggtgtgaactagaagcatgacgcctgtagtaccggtccggaattcccgggtcgacccacgcgtccgcccacgcgtccgagagacccaattattgtatctgttggatggaggcgttaccagacaaccccaatttatgccattgaggatagtaatggaagggatcgtatgctaaaatatactccagaacacatgcattgccttgctatgttttggggccctcttgctcctcccaacactggggttgtagcctttcagaacttatcaaacaatcaggcaacatttaggattactgcaactgcagttgtacttgagtttaatcatgcagcaaggatagtgaagaaaatcaaattggttggttatccatgcaagatattcaagaagacagcacttatcaaggatatgtttacctcagatcttgaagtagctcgttttgaaggtgcagctattcggacagtcagtgggattagggggcaggtcaagaaggctgcanaagaagagataggtaatcaagcgaaaaggaa

SEQ ID NO: 246713 - DNA, 537 bp, Glycine max
gtaggttatgggggtgtgaagatgaaacatcgaactcgtacgcactgccgtaccggtccggaattcccgggtcgacccacgcgtccggcaacataaaaaaaaaaaatagaaagaaaaatgatgctcggagaacaccatcgcgggaatccgacggtcctcgtgccaccgtggccagcccacgacgatccgacggctgagatgtactccgcgttcttaacaaacgacgtcaatgctggtgagtactctccgtaccatcttcaagaagcactaacggcgctgcagcgttttctgccgtcaaacgaaacggacgcagactcggactcctcggaggcggctcagcccgacgcggcggtggacgcgtacacgtgcgaccatttccgcatgtacgagttcaaggtccgtcgatgcgcacgtggcaggtcacacgactggacggagtgtccgtacgcgcatcccggcgagaaggcccgtcgacgtgacccgcggaggttccactactctggcgtggcgtgcccggagttctcgcagggaaactgc

SEQ ID NO: 246714 - DNA, 531 bp, Glycine max
  unsure (1)..(531): unsure at all n locations
gtagggcggttataaatttgaacatgtagctgtacgcctgcagtaccggtccggaattcccgggtcgacccacgcgtccggtttctctcacattacaatgtagtcagtctattgggcttagggtgccaccataatactattaattctcacacataacatataaaataaagttgtggataattaaccacattaaatttattgattcagtgattaaagactcctaggcaccttaagttgtctgtttaagtctcaaaacaggaggaactatcagcagcaagaggaatgctattgatccaagcagtgatatgaaaagggaagcagccacttggtcacaaaatttcccaaactcattgcacactttgttccaatgcacatgtgagtttccttgcaagccaaggagaccaaccgtcatggcggctacgttgccgggagagagcaaagctaccattactgtgtccaacacagtgatcaatgtctncatcgttcctttgcctttacgcctatttgcaagagtgagcaagagagacagtt

SEQ ID NO: 246715 - DNA, 518 bp, Glycine max
  unsure (1)..(518): unsure at all n locations
ggaggtttagtagatacgtgcattgtaaaccatcgnangctgtacgcctgccgtaccggtccggaattcccgggtcgacccacgcgtccggtttttggacttgaatatgacctggatctcttcaatgttgttgctgtcccagattttaacatgggagccatggaaaacaagagcttgaatattttcaattcaaagcttgtattggcctctccagaaactgctactgatgcagactatgctgcaatattgggagttattggccatgagtatttccacaactggactggcaacagagtgacatgtcgcgactggttccagcttagcctgaaggaaggtctcactgtttttcgtgatcanggaatttcatctgacatgggaagttgtactgtaaagcggattgctgatgtttcaaaacttagaaattaccagtttccacaggatgcaggtcctatggcccatccagtgcgaccacactcttacatcaagatggacaacttctacacagttacggtctacga

SEQ ID NO: 246716 - DNA, 535 bp, Glycine max
  unsure (1)..(535): unsure at all n locations
ggtagttagagttcatgacgtgcatggaaancctcgnatnccctangcgcactgcagtaccggtccggaattcccgggtcgacccacgcgtccgaaaaaaaaaaaaaaaaaaaaaaaaaaaaaaaaaaaaaaaaaaaaaaaaaggaaaaaaagaaaaaaaaaaaaaaaaaaaaaaaaaaaaaaaaaggggcggccgttttagaggatccaagcttacgtacgcgtgcttgcgacgtcatagctcttctatagggtcacctaaattcaattcactggccgtcgttttacaacgtcgtgactggaaaaaccttggcgttaccaaacttaatcgccttgcagcacatccccctttcgccagctggcgtaataccaaaaaggcccgtaccgatcgcctttccaaacatttgcccagcctgaatggcaaatggaacgcgccctgtatcggcgcattaagcgcggcggttgtggtggttacgcgcagcgtgaccgttacacttgccagcgccttagcgcccgttcctttggtttttttcct

SEQ ID NO: 246717 - DNA, 525 bp, Glycine max
agtagttagtaggtgcgtgccactgaacccatgaaacccttacgcactgccgtaccggtccggaattcccgggtcgacccacgcgtccggtactgtgcataacggctgagttatgtacttatgttaagaataaaataaagtgctgttgttgcaaaaaaaaaaaaaaaaaaaaaaaaaaaaaaaaaaaaaaaaaaaaaaaaaaaccaaaaaaaaaaaaaaaaaaaaaaaaaaaaaaaaaaaaaaaaaaaaaaaaaaaaaaaaaaaaaaaaaaaaaagggccgcccttttaaaagaaccaaagttaactaacccttccttccaacttaaaacctttttaaaagggcccccaaatttaaattaattgcccgtattttaaaaactttgaaactggaaaaacctgggcttaaccaaattaaatcccttggaaaaaaatccccttttcgcaagtttgcataataccaaaaagccccaaaacaatggcctttccaaacattggccaacctaaaatggaaaatggaacccccc

SEQ ID NO: 246718 - DNA, 528 bp, Glycine max
  unsure (1)..(528): unsure at all n locations
gttagggnctgnnatcnacgatcaatgctcacgnanctcanacgcactgccgtaccggtccggaattcccgggtcgacccacgcgtccggtgaaggttccgtgattatcattctcgcagcgattcggatcgcgaaagcggtccgccagccttaattttgatttgtgtcgaggaaaggacaggtcttggaaccctaacacgcacctctttctttcttaccgagtgcgtcaaagcgaagcaacactacacgatggtgttctacttcaaagcgcgcccctaagcccgcgatttcaccatcttcatgggccttgacaagtacgagaacgaggaactcatgaaatacaggtttgccgaagacatgtggttccatgtcgataaaatgtcttcagcccatgtctatggcatgtttcacaaaggccagaccattgatgacatgactgatggtttactggaagactgtgctcatcttgtcaaagcaaattcaattcaaggaaatgaaatgaacaatgtcgatgttggataaacaccc

SEQ ID NO: 246719 - DNA, 535 bp, Glycine max
  unsure (1)..(535): unsure at all n locations
atgtggtnagtggtctgatgcttgaagcctgnagcctgtcgtaccggtccggaattcccgggtcgacccacgcgtccgctgaagcacaactacgagaccagcatggcaaccctgtcccactcaccgatcaatacggtaatccggttatcttaactgacgagcgcggtaatcccgtccaactcactggtgtcgctaccaccgctaccggcacagcaggttctgggtttgggtcctatggtaccggtgcttactgtggtggtgcaagtgcaaccaccgttgcagatcttttggcatcccaaccaaggagtggcatggaggctagagagcttcgtcgttcctccagttcaagctctagctcgtctgaagatgatgggcaaggtgggaggaggaagaaaggagtgaaggattaaatatatgagaactaccaagggtaggaggaggggattattataatgagcatgcacacacaaccaactgctccaaccactggcactaactcaccctgctgatcagccttgagaggaagggcttaatt

SEQ ID NO: 246720 - DNA, 523 bp, Glycine max
atggtttagtggtgtgatcatgaacatagagctcgtcgtaccggcccggaattcccgggtcgacccacgcgtccgaaggcaatgaatctgatgcaggcggttcgctacgacgcctacgggggaggtcctgccggcctcaagcacgttgaagttgccgttcccagtccaaaggcaaatgaggttttaatcaaactggaagcagttagcattaaccctattgattggaagattcagaagggtcttctccgtcctttatttctccccagaacctttccccacataccttgcactgatgtggctggagaaatagttgagatcggaactcaagtcaaagatttcaaagttggcgaccaagttcttgctaaactcactcatcaatttggaggtgggtttgccgagtttgctgtggctagtgagagcttaacagcaaccagaccatctgaggtctaacccgttgagcttgaccatggccaatcgccggcttacaagttggatgccctacttaattggaggatcaagctgg

SEQ ID NO: 246721 - DNA, 530 bp, Glycine max
taggagggttgaattgaacatcgaactcttacgcatgcacgtaccggtccggaattcccgggtcgacccacgcgtccgagttactgttgatgttggccacacaccaagggaaaatcaaagcacagggaaaatggtcttgccctttgagccactgtcaatagcatttaaggatgttcagtattttgttgacattcctccggagatgaaaaaacatggttccgatgagaaaaggctacaattgctttgtgatatcacaggagcctttaggccaggaattctcactgcactgatgggggtcagtggagcaggaaagacaactctgatggatgttctttcaggaagaaaaactggaggtatcattgaaggagatataagaatcggaagctaccccaaagtgcaaaagacatttgaaagagtttcaagttactgtgagcagaatgacatacattctccatatataaccgttgaagaatctgtcacatactcagcttggttgcggttgccaacagaaattgattctgtcacgaaag

SEQ ID NO: 246722 - DNA, 528 bp, Glycine max
  unsure (1)..(528): unsure at all n locations
agtagtatagtnnatactgcatcgatactcatgaanctcgnaggcactgccgtaccggtccggaattcccgggtcgacccacgcgtccgcgacggaaccgcgtccatgcggttcatgaccacgtgggccaagttggctaggaaggaaaatttggaccacgtggaaatgatgccgtgctgtgatcgaaataagttgaattcgtacaaggttgatgattcgaggtcccacgaccattcggagtttcgcactcctccgaattggttaggttcattaggaggcagagacactaatgttgtggttgcaatagtgaagctcacagatgcacaagtgaagaagctcaagcacaaggtaaattacgttaacataattaacactactagagctagtagtacttcacgaccttattcaacttttgaggttgttgctgggtatttgtggaagtgtgtgagtaaagcacgttatgaggggaaaagtgaccaacctacgaggttgtctactttggttaattgtaggaaccgaataacttcn

SEQ ID NO: 246723 - DNA, 521 bp, Glycine max
  unsure (1)..(521): unsure at all n locations
gttgtnttagtnaggtcctcgcatcgcannccctcggaagctgttacgcctgccgtaccggtccggaattcccgggtcgacccacgcgtccgcccacgcgtccggcaaaagacacccgcattcccctggtttcatttactggaagttcaaaggttggcttgatggtccagcaaacagttaatgagagatttggcaaatgcttgcttgagttaagtggtaacaatgcaataatagtcatggatgatgcagatatcaaattggctgtacgatctattttgtttgcagctgtgggtactgctggtcagcggtgtacaacttgccgtagactgtttctgcatgaaagtatttacgcagatgtactagaccaacttattggagtctacaaacaagtcaaaattgggaatcccttggagaaggggactctagttgggcccttgcatactcctacttcagtggaaaactttcagaagggtatttcagtcataaaatctcagggagggaagatcctaacaggtggatcn

SEQ ID NO: 246724 - DNA, 529 bp, Glycine max
  unsure (1)..(529): unsure at all n locations
nggagagtgntttcnggccacggatctcatagcgatgcccgtaccggtccggaattcccgggtcgacccacgcgtccgattcacacaaatatccatttatatatacatatatatagttctatatggcaatgacaacggtggtgtttgtcttgtgcatctttgtagtgttgaatgcaagtgcctctgatgccactcgcttattgctgaacaaaactgcaacaggtaacgtgtccagagagaagattgagagatacttacttgaaaatggactcggccagacaccccccatgggatggaatagctggaaccactttggctgtgatattaatgaaagtttaattcgagaaacagctgatgcattggtgtcatcgggccttgctgctttgggatacaaatacattaatttaaatgattggtgggccgaacttaatcgagaccatcaaggaaatatgggtcccaagggttcaacctttccttcaggaattaaggctttggcttcaatatggtcatggaaaaggtttaaagttgg

SEQ ID NO: 246725 - DNA, 523 bp, Glycine max
  unsure (1)..(523): unsure at all n locations
gagtnatggggcgttngtttatgaagcgtatttcatggctctaccggtccggaattcccgggtcgacccacgcgtccgcgacttggttatgtcggtgttgtaaatcgcagtcaggaggattttcaaatgaaccgcagtgtagaggatgctcttgatgctgaagagaattttttgcgcaatcgtcctgtatacaatggtttagcatatagttgtggtgttcctgaactagcaaagaagttgaaccagattctggcacaacatataaaggctgtgctacctgagctgagagcacgtataagcacttgactagttgctgctgcgatagagcatgcaggctatggagagatcaccgagtgcaatgctgtcatggtgcactgctgctgatattctttcacatattgtgaaacggtcttcttcaatgctcgagggaaagattgagaagtctacatccgaactatctggtgaacaacgatttcaatactttttgcaatcgatctttgtaaaaatttaaaaggagttgatt

SEQ ID NO: 246726 - DNA, 521 bp, Glycine max
  unsure (1)..(521): unsure at all n locations
tgaggggtgnngccatgacgagagagttgatgcatgctctaccggtccggaattcccgggtcgacccacgcgtccggaaacgatgaaggaactatgggcacaaatggggtcactaatggccactattgtgttcatgtacacaatctttgagcgcttcttccctccacacttgcgtgaaaaacttcaagcctatactcataaactcaccaaccatttcaacccttacatccaaataagcttccctgagttctcaggggaacgactgaagaagagtgaagcatacacagccatccaaacctacctgagtgcatactcatcccagagagccaaaaggctcaaagctgaagttgtgaatgatagccaaacccctcttgtccttaacatggatgacaacgaagagattactgacgagtttcatggcatcaaactatggtggagtgcaaacaaagtaagcaacaatccacaaagatacaaccctttttcttattacggttcctcagacgagaaaaggttctacaagc

SEQ ID NO: 246727 - DNA, 392 bp, Glycine max
  unsure (1)..(392): unsure at all n locations
caagccttccgcgaaaatcaattttctgtcttctctgcgtcttcttcctctatcaatcgttttccatggctcgtaccaagcaaaccgctcgcaaatccaccggtggaaaggctcctaggaagcaactcgccaccaaggctgcaaggaaatctgcaccgacaaccggtggagtcaagaagcctcatcgctatcgccctggaactgttgctcttcgtgagatccgaaaataccaaaagagcacagagcttctgatccgcaagctccccttccagcgtcttgttcgtgaaattgcgcatgacttcaagaccgatttgaggttccagagtcacgctgttcttgcgcttcangaagctgcggaggcttacttggtgggtttgtttgaggacaccaac

SEQ ID NO: 246728 - DNA, 385 bp, Glycine max
ctcgtaccgattcgcaggtccgaccaaggcgtccgtgttatttccgttcccaggtcaggggcacttgataccaatgagtgatatggcgagagcatgtaatggaagaggggtgaggacaaccatagtgaccactccactcaacgtagccactattcgtggaacaataggaaaagagacagagacagatatagaaatcctgacggtgaaattccctagtgcagaggctggtttacctgagggatgcgaaaatacagagtcaatcccctcccctgacttggtactgactttcttaaaggcaatcaggatgttggaagcccccttggaacacctactccttcaacaccgtcctcattgccttatagccagtgctttcttcccttgggca

SEQ ID NO: 246729 - DNA, 334 bp, Glycine max
  unsure (1)..(334): unsure at all n locations
gaattcccgggtcgacccacgcgtccgcggacgcgtgggtccgaactcgctcacggcgctaacaacggtcttgacatcgctgntaggcttttggagccactcanagcggagtttcctattttgagctacgccgatttctaccagttggctggcgttgttgccgttgaggtcaccggtggacctgaagttcccttccatcctggaagagaggacaaacctgagccaccaccagagggtcgcttgcccgatgccactaagggttctgaccatttgaaagatgtgtttggcaaagctatggggcttagtgaccgagatatcgttgctctgtctgggg

SEQ ID NO: 246730 - DNA, 534 bp, Glycine max
  unsure (1)..(534): unsure at all n locations
ggtggaggaggggggaggtgttgntgttattgaatttattgcatgcctctaccggtccggaattcccgggtcgacccacgcgtccgagagattcaatgacagttctatcgatttcaaaggaaatagctttgagtatataccttttggggcaggaaggagaatgtgtccaggcatgacatttggattggctagcattacgcttccattagctttattactctatcattttaattgggaactcccaaataagatgaaacctgaggatttggatatggatgaacacttcggaatgacagttgcaagaaaaaacaagttgtttttgattcccactgtttatgaagcttcatgatacacgtattttttttataggccaaaagagatttaataagaataccagtggtactcaaaataaaaaaaagttatggagaataaagaaacttaaaacacacacaaatataatatttgtagtgtctgttgacacctncacactttggggagtctagtttgatgtaattttttggttgttattgaatc

SEQ ID NO: 246731 - DNA, 429 bp, Glycine max
acgcgttcgcactctaaggctgtattatatgacaaatgatacatgagcaggtgttcaaaaccaggtataaatctacatgctgatacaaaaacataaaaaatcacttaaataaaaaatcacatgaaccaaaaatatgaaaaatcacatgtttttcgattttcacatcttgttttaaaaatcaaatcagtatatcataattatattaatgtttatattgcgataattaataacgagtattaactaattcattactaagatttaatatataatcacgatgtatatggaattctcatgtacttatatagctaaaaacgaatgttacatatcatgggatacacgaattactattatattataaaataagttgataatattattatattgtaatactaaatagaagtgaagagtataattgttaattaaaatata

SEQ ID NO: 246732 - DNA, 528 bp, Glycine max
  unsure (1)..(528): unsure at all n locations
agagggctgnngttcactgataggaggagtgataggcatgcccgtaccggtccggaattcccgggtcgacccacgcgtccgcccacgcgtccgcccacgcgtccggagaaaagcgtgaatcatgtcggacgaagagcatcacttcgattctcaggcggatgcgggagcgtccaagacgtatcctcagcaggctggtaccattcgcaagaatggctacatcgtcatcaaatccaggccttgcaaggttgtagaggtctctacgtcaaagacaggcaagcatggacatgcanagtgtcactctggtgcaattgatattggtaatgggaaaaaagctcgaagatattgttccatcatnccacaactgtgatgttccacatgtgaaatcgcactgactatcagcttattgatatctctgaagacggctttgtgagtctgttgactgataatggaaataccaaggatgatctgaagcttcctactgatgaggcattgcttgctcagattaaagatggattttctgaaggaaac

SEQ ID NO: 246733 - DNA, 530 bp, Glycine max
  unsure (1)..(530): unsure at all n locations
nggtatggagggctgnngtgatcggtacgtagctcataggcatgcccgtaccggtccggaattcccgggtcgacccacgcgtccggtggctggcagatgaatcagaacattcctcttgttcctcccaacttttcttgcgttttcagttccaattccaattacaattccaatgtccttcaaaacgccttcaataagaatgttgttcagccttcagcctcatatcctcaatgcttggctattgagtttgatcaacagagggagattgatcaccatatcagatcacataacgaagaattgaggattttgttgcaagagcaaaggaaacagcatgtggcagagttattgaagaacgtggaatcgaatgctcttcatttgttgagacagaaagatgaagagatagcgcaagcgacaaagaagagcaccgatttgaaagaatttatgacaaggttggaggtggagaaccaatcatggcgtaaggtagccgaggaaaacgaggctatggtattgtcccttcacaacaccttagaagn

SEQ ID NO: 246734 - DNA, 412 bp, Glycine max
ccggatttcccggttcgaccaaggcgtccggttagttcacacactaagttctgaaaaatgagttccaaagtttttcttattctactgatgtgcatggccactatacttttgatctcctctgaggttgcacccgatgatgcataccagaattttgacaaaacagatgggaagcgtagtgcaaatggggtagatgaaagcaaatattggcgtggtggctatggcgactatggtggttggcgtggtggtggttggcgtggtggctatggaggctggcgtggtggctatggtggtgggcgtggtggctatggtggctggcgtggtggctatggtggcgggcgtggtggctacggaggttgcggtggtggctttggacctaacgaacataatgaggctgggattgatgctagccctt

SEQ ID NO: 246735 - DNA, 387 bp, Glycine max
ccgggttgaaccaagccttcggccaagccgtccgttcaaatccgactgaccgaagaaaatattagggtttttgagtgcggtgcggcaatcctagcactttcttttgcagctttcgccgacagcttaattcaccatggctgaccaaaccgagaaggcttttttgaaacaaccaaaagtgtttctaagctcgaaaaaaactgggaagggaaagagacccggaaagggtgggaaccgtttttggaaatccattgggcttggatttaagactcccagggaagccatcgaaagaacctacattgacaagaagtgccccttcactggcaatgtttccatccgtggccgtatcttggctggaacatgtcacagtgctaagatgaacaggactat

SEQ ID NO: 246736 - DNA, 429 bp, Glycine max
tcccgggtcgaccaagccgtccgacaaagcgtccggtttgaaaaggacctaccgaaggttaacaggacagaaactccttggtggatggttctaatgcattcaccttggtataatagctacaattatcactatatggaaggggaaacaatgagagtcatgtatgagccctggtttgtgcagtacaaggttgatgttgcgtttgctggtcatgtacatgcctatgaacgatctgagcgtgtttacaatgttgcatacaatattgtaaatggtctttgagctcctgtaaatgataaatcagatcctgtatatataaccattgtggatggaggaaaccttgaaggtttagcatccaacatgacggaaccacagtcaaagtattctgcattccgagaggccatctttggacatgccatttttgacataactaac

SEQ ID NO: 246737 - DNA, 541 bp, Glycine max
  unsure (1)..(541): unsure at all n locations
gggtgnnagtaggaaggaggggttttntttctgaattggcatctgtatggcatgctgtaccggtccggaattcccgggtcgacccacgcgtccgcccacgcgtccggaagaaccagatctctctttctcaaatcaccaagttgaaaatggggctgtctttcacgaagctgttcagccggctctttgcgaagaaggagatgcgtattcttatggtgggtctcgacgccgccggtaagaccaccattctctacaaactcaagctaggagagatcgtcacaaccattcccaccattgggtttaatgttgaaactgtggaatacaagaacatcagcttcactgtctgggatgttggtggccaggacaagatccgtcctctgtggagacactacttccaaaatacccaagggcttatctttgtggttgataacaatgaccgggatcgggtgggtgaagcctgggattaacttgaccagattgttaaatgagggtttaattaagaaacccttggcctcaagtttttgcaaaccaaccaaaatttttc

SEQ ID NO: 246738 - DNA, 524 bp, Glycine max
  unsure (1)..(524): unsure at all n locations
ggaagaggggtgnngttaatgatggaggatttattggcatgctgtaccggtccggaattcccgggtcgacccacgcgtccggtgccaagctcgagagtctaaaattcaaatcctagcttgggttaacttagatatgagtggtctatttttaattttccttatccttcttgttgccgatggggtccttgtccgaggaagtataaatattacagaaataagcttcgatcaaaactatgaggttacgtggggtgataatcatgttgtctccttaaaccaagggaaagaaattcagctcacaatggataactcttcaggatccggttttggatccaagatgtcatatggctctggactattccatttgaggatcaaagtaccagataggaattctgctggagttgtcacagcttactactattcttaatgtatttgatgcagttaacttcacaaggaagaagtcatgacgagttagactttgaattcttgggcaatagagaagggaagccatatagattacaaaccac

SEQ ID NO: 246739 - DNA, 524 bp, Glycine max
  unsure (1)..(524): unsure at all n locations
naggaggaggggtcntttaagtaaggaggtgtattgcatgctgtaccggtccggaattcccgggtcgacccacgcgtccgctctgtcgtcgctctttcttcaacttcaagcttaattcctcatgtctttcagaggcctgagccggccaaatgccacatcaggcatgggtgttgctgatcacagcataaacaccttcatggaattgaagcagaagaaggttcatcgttatgtgatctttaaggtcgatgagaagaaaagggaggttgtggttgagaagactggtggcccggctgagagctatgacgattttgctgcatctttgccggagaatgattgcagatatgctgtctttgactatgatttcgtcacttctgagaactgtcaaaagagcaaaatcttcttcattgcatggtccccttcaacatctcggatccgtgccaagatgctctatgccaatactaaagacaggtttagacgtgagccatatgggggtcattatgtaatccaggcttctgaccccccca

SEQ ID NO: 246740 - DNA, 195 bp, Glycine max
ccgggtcgaaccacgccttcgccgaccccttggttccggccaattacccgattctttggcccggttaactaacctcaggttccttgacctttcctttaataacctttaaggcccaatcccaagttaattttccaagttgtccaacctagtttccttacccttggaccggaataggctcacggccccaatcccgga

SEQ ID NO: 246741 - DNA, 214 bp, Glycine max
ccgggtcgaaccaagccttcggttttgttgaaggcccgaaccattcctgacttccaaatcgtcctctgaactgggtattagggccaaaggattattcaaaccgtttataacctggttccttccaaagtttccttaaggttacttgaaccccccggccaattttattcgggtaaagccattgtttaaaggcttgggggccccaaggccttgaact

SEQ ID NO: 246742 - DNA, 539 bp, Glycine max
  unsure (1)..(539): unsure at all n locations
ngtagtagaagggaagaagggtcgtgngatcgtttagctagtaccgcacgacgtaccggtccggaattcccgggtcgacccacgcgtccggtactgccctattacaccatactatgctcttaaaatttgatccatggcctaacttgctcgacttatcagcttgaccactataccttagatatggtatcatgttacacgatcagattcatacgacaaatcttacagattgactgagatgccatagaccagattgatcagatgatcgctcagcgtcacgctcatgactatccttatcggatatggacatggctaatgatgactgagtccttgctataccatgatgacaccgatgatatagtgacagtcgtaagggctatagcaactgtcaaatataatgtggcaacaaacttcgcgactattactccagacgaagctacctgtcaaggagtctcatcgtgcagtcgaacgtcaagagtcctatatgggacagctacgaacatcacgtatggaagcagcttcataagaccaaatattcggca

SEQ ID NO: 246743 - DNA, 521 bp, Glycine max
  unsure (1)..(521): unsure at all n locations
gagtggaggggtgngttagaaggaaagattgatgcacgctgtaccggtccggaattcccgggtcgacccacgcgtccgaattgacatctctggatcagtacatatctagaatgaaaactgggcagaaggatatctttgacataactggaaccagcaaagaacaactggaaaactctcccttccttgagcggcttaagaagaaaaattttgaggttattttcttcacggatccagttgatgagtacttgatgcaatacctgatggattatgaagacaagaagttccaaaatgtgtccaaggagggtttgaaacttgggaaagattcaaaagacaaggaactgaaggaatcttttaaggatcttaccaagtggtggaaaactgctctttccaaagacaatgttgatgatgtgaagatttccaaccgattagataacactccttgtgtagtggtgacatcaaaatttggttggagtgctaacatggagagaatcatgcaatcttaaactttggcaaatgctacc

SEQ ID NO: 246744 - DNA, 383 bp, Glycine max
cgggtcgacccaagccttcggccattaccggcattaagaatggcttggtttattccggccatttggaaaggacccaggcaagggttaccatccgacgccaagctgcaaagcttcgttccattttacaggcgccaaagctcagaatatcccaggaggagatggtgactatacccttgattggttctacttatgacagctatgcggcaacatggagtgataaatacaaggacaatgataaaaaaattagtggatcagtcacgaatcagcttccatcatctaaagattaccttggggactttcttgtatggaaacctcctgtcgggttagggaaaaatcgagctttctgggttggcctaacaatatggttgggattagttggagct

SEQ ID NO: 246745 - DNA, 266 bp, Glycine max
ccgggttggaccaagccttcggccaacgcttccgggaagattgcaagaggtgttgccttcccgacatgtgtgcctgtgaacaacactgcctgccacttctatcttcttgccagtgatgaaacattgttggaagacggcgatatattgaaaattgacatggcttgtcttttacatgggttcattgttgctgtggctcacacccatgttcttcatgaggggcctgttacgggacggccagctgatgctattgcagcagcaaacaccgc

SEQ ID NO: 246746 - DNA, 443 bp, Glycine max
  unsure (1)..(443): unsure at all n locations
ccgggttggaccaagccttccggtaccagcatttaaaactggcctttgcttttggttactcatttttaacctaacttggaatccttctcaggctcagatcagaaccttagccttggcaacgttccaaaggatcaaggtcgccaaccccatcgtccatatggacggagatgaaatgactagggttatctggaagtcaatcaaggacaagctcattttgcccttcttggagttcgacctcaagtattatgacttacgcctttcttaccgtgatgagaccgatgagtaagttacaattgaaagtgccgaagcaactctcaagtataatgtggcaattaagtgcgcaactattactccagatgaagctcgtgtgaaggagtttggtctgaagtcaatgtggaagagtccaaatgggacaattaggaacattntgaatggaactgtct

SEQ ID NO: 246747 - DNA, 421 bp, Glycine max
ccgggtcggaccaagccttccgccaagccttccgattaattgcagggcgagcaaccatttcaaatatttcatggttttgccgttggtccgattgaattctaaatttccctcaagtgacaatgctattgggagaattaaagctaagttgatctctggagggggtgatctactttcctatccaaatggcaatggcattgtgataggtaaaaatctggttggtgatgaatctgttcgaattgaagtacagccgaatagaacactggcagcagacacagggctaacaagcaatgttttctctattgacaacgatgaatttgatttggacagccccacagcaggttttgcttccatttctgaggcaattgaagacattcgccagggaaagatggtagtggttgtggacgatgaagatcgagaaaat

SEQ ID NO: 246748 - DNA, 539 bp, Glycine max
  unsure (1)..(539): unsure at all n locations
ggggnnngggaggagagtgctgngttaaaggaggggggattaatggtatgctgtaccggtccggaattcccgggtcgacccacgcgtccgctcaaaggaaagaaaaggaaagaaaagaaaagaaaaagaagagagtgtaggtaaacagaagcacacactacacagttaccaaaatcaggttcaaacgcacagatctgggagaagagaagaagaagaagaagaagatgggacaggatcagaaccagagatcgctgatctacgcgttcgtgtctcgcggcacggtgattctcgccgagtacactgaattcagtggcaacttcaacacaatcgcgttccagtgccttcagaagctccctgccttcaacaacaagttcacctacaactgtgacggccacacctttaactacctcgtcgacaacggattcacttaatggggttgtggcggatgaatcgaatgggaaaacaggtccctgtggttttcttggaacggttaaaggatgactttggggccaattacggnnngcggaaagggcagaacc

SEQ ID NO: 246749 - DNA, 526 bp, Glycine max
  unsure (1)..(526): unsure at all n locations
nagggagaaatgctgnttttaaggatgagggatataatggcatgctgtaccggtccggaattcccgggtcgacccacgcgtccgcacccccatcacatgtggttgcaattacaaatggtgatgcccgtcttcttgaacttggggacaaacaagaactcaagcgtcatttttcattaggttctctctttctcgtttaattgaattccttccttcattttgtgttcttttttggtttatcattaatttccaattctaggttcttagcttgatcagggccatttgaattttcgccctctcgttttctgttttatcagtgctgactggcatcaccaattcaccaccctctacaacactgggttgaactacggtggccccgtttcaatgcaatatgggtggtttatggctttagctttcaccatgcttgttgcactctcaatggctgaaatttgttcttcaatccaactactggaggtctctattattggagtgccaaacttgctggccctagatgggcaccctttgcttc

SEQ ID NO: 246750 - DNA, 532 bp, Glycine max
gggggggggaggggaggcgtatgttagtgcgaagagattattgcactgctctaccggtccggaattcccgggtcgacccacgcgtccgcccacgcgtccgcaattacttctggaatcataattaataatccaacttattttgtgtcatgactatagtttctctagatggaagctaaaactaagtcatgcgtagttctaccttttcttctattggttgcaattttcatgcaacaatgtgtccatggagaatcgcaagtgccctgcctttttgtctttggggactctctgtctgataacggaaataataacaaccttccaagcactacaaagtccaattacaaaccatatggcatcgacttcccaaccggcccaacaggacgatttacgaatggacaaacatctattgacctaattgctcaactactgggatttgagaatttcatcccaccctttgcaaacactagtggctcatacacacttaagggtgtgaactatgcatccggagcagctgggattctaccagagagtggtc

SEQ ID NO: 246751 - DNA, 501 bp, Glycine max
  unsure (1)..(501): unsure at all n locations
ggggagagaggatttgagttgggggtggatgtatgctcgtccggtccggaattcccgggtcgacccacgcgtccgcccacgcgtccgggacaacaatttttgtatgggcaaggacccccagccatgatgcctccacaagctggatttggataccagcagcaactagttcctggaatgagacctggtggtggtcccatgccaagcttctttgttcctatggttcagcaaggccaacaagggcagcgcccagggggccgccgaggaacaggtcctgtgcaacaaccccaacagccaatgccaatgatgcagcagcagatgcttccaagggggcgtgtctatcgttaccctcctggccgcaacatgcaagatgtcccacttcaaggtgtagctggtggaatgatgtcagtcccttatgacatgggtggtctgccaatccgcgatgctgtgggacagccaatgcccattcaagctttggccacggctcttgcanatgctcccccc

SEQ ID NO: 246752 - DNA, 444 bp, Glycine max
tccggaattcccgggtcgacccaggcgtccgttcttctgtccctaaatggaaggatcaggatccggtgtggttacagtctacggcaacggcgccatcaccgagaccaagaagtcccccttctgcgtcaaagtcggcctagcccagatgctccggggcggcgtcatcatggacgtcgtcgacgccgagcaggcccgcatcgcggaggaggccggtgcctgcgcggtgatggccctggagcgtgttcccgccgacatacgggcccagggcggcgtggcccgcatgagcgatccgcagctcatcaaggatatcaagcgggccgtcaccatccccgtgatggccaaggcccgcatcggccacttcgtcgaagcccagatcctcgaagccatcggcatcgactacgtcgacgagagcgaggtcctcaccctcggcgacgacgccaacca

SEQ ID NO: 246753 - DNA, 524 bp, Glycine max
  unsure (1)..(524): unsure at all n locations
aggaagaggggtggaataagaaactgatggcatgccctaccggtccggaattcccgggtcgacccacgcgtccgcccacgcgtccgcagagagtgaagagaagagaagaggttgatgggtcggcgaaagaacaagagcagcaacaatcagtgctcctcaagcaaggaagacgctgacatgaatagcaaccaccttcggtttgaagaagctgacgaggctgtcgacgagagttccaacctcgaccaatccatgtgcgacatcgaagaatccgatgataaaaccagcgccgactattacttcgattcctactctcattttggaattcacgaagaaatgttgaaggacagtgtgagaaccaagacatatcanaatgttatttatcagaaacaaattttattcaagaaataagtagttcttggaggtggggcttggactgggaatttatcactaatttggggccaaacaagggccgaacacgtctatgccggtgaatgcgtccatatgggttacattgggaaggagaa

SEQ ID NO: 246754 - DNA, 325 bp, Glycine max
ccggtccggaattcccgggccgaccaaggcgtccggaagttgaccaattcattagtcccaaccgttggaggaagcttggcattgctatgattccgaataggtttggtatatcctttacaccaaagcttatgaaccaggcaggtgctctggttcaagtctatacggatggaactgttttagttacccatgggggtgtagaaatggggcaaggtttgcataccaaagttgcccaaattgctgcttcagctttcaacatccctcttagttctgtcttcatatcagatactagtaccgacaaggttcctaatgctttagcaacagcagc

SEQ ID NO: 246755 - DNA, 490 bp, Glycine max
actcggtccggattccctggtcgactccactcgtccgaaaaaaaaaaaaaaaaaaaaaaaaaaaaaaaaaaaaaaaaaaaaaaaaaaaaaaaaaaaagaaaaaaaaaaaaatataaaataaaaaaaaaaaaaaaaaataaaaaataaaaaatataaaaaataaaaataaaaaatataaaaaaataaaaataatataaaaaaataaaagtggatgaatttttatgactttaattttaaatatgtttttttagataataattttttttttttgattaattctaatttaataattttggattttttttaaaaagatattatttttaaaaaactgttaatttttcaaattttatttattttaaaaaaatttcttttttcaatatttgatattttttataaatgctttaaactttctgtttttataaaatttttcaatattaatttgtaaatttgccccctctttttatcggtttttttaccctttgattttttt

SEQ ID NO: 246756 - DNA, 534 bp, Glycine max
  unsure (1)..(534): unsure at all n locations
gaggggnaggtgggttttntttaaggatatgtagacttgtatggcactgcccgtaccggtccggaattcccgggtcgacccacgcgtccgctcgcggcttctttctccaagattaagtttcagtagtaatgggtaaggaaaaggttcacattaacatcgtggtcattggccatgtcgactctgggaagtcaaccaccaccggtcaccttatctacaagctcggaggtattgacaagcgtgtcatcgagagattcgagaaggaagctgctgagatgaataagaggtctttcaagtatgcctgggtgcttgacaagctcaaggctgagcgtgaaagaggaatcaccattgatattgctctgtggaagtttgagaccacaaagtactactgcacagtcattgatgcccctggacatagggatttcatcaagaacatgattactggaacatcccaagctgactgtgctgntcttattattgattccaccactggtggttttgaagctggtatttccaaggatggacagactcgtgagc

SEQ ID NO: 246757 - DNA, 500 bp, Glycine max
  unsure (1)..(500): unsure at all n locations
agtnnaggaggggtgngtatgatattgatctctgcagtaccggtccggaattcccgggtcgacccacgcgtccgctcttaggttcttggtgtggagaaaacagcatctcaacaggaaataaagaaggcatactacaagttggcattgaggctgcatcctgataagaaccctggtgatgaggaagctaaagcaaagtttcagcaattgcaaaacgttattgctattcttggggatgaagaaaaacgggccgtttatgatcagactggttgtgttgatgatgctgaacttgcaggggatgttgttcagaatcttaaagaatatttcagagcaatgtacaagaaggtcactgaagctgatattgaggaatttgaagcaaactatagggggtctgacattgagaaaaatgatttgaatgatctgtacaagaagtgccaacgtaatatgaacaagctaatcttgtcattgctttggtcagaatctaaaccttgactaaaacggat

SEQ ID NO: 246758 - DNA, 461 bp, Glycine max
ccggaattcccgggtcgacccacgcgtccggtccagactctcattgttgatatagagcctgatgttaatgtcaagagagcaatgaacgagattaacgcagctgctagattgaggttggctgcaaatgagaaggctgaagcagaaaaaatactgcagatcaaaaaagctgaaggagaagcagaatccaaatatctgtcaagactcggtatcgctcggcaacgtcaagccattgtggatggactgaaggacagtgtgcttgctttctctgagaacgtgcctgggacaacagctaaagatgtcatggacatggtgctggtgactcaatactttgacaccatgaaagagattggagcatcttcaaagtcctcatctgttttcataccacatggtcctggcgcaattaaggacattgccatgcagattcgggatggtctgcttcaggccaccacttcacagaatta

SEQ ID NO: 246759 - DNA, 525 bp, Glycine max
  unsure (1)..(525): unsure at all n locations
ggggtgaagggctgnngtgtatgacggaggagttgatggcatgctgtaccggtccggaattcccgggtcgacccacgcgtccgaagaaagctacctagagcttgcacctattggtatcttctacaatatcctctcatagtgctcttcttcttcttcattttcattatcaagatgtctttgctttcggatctcatcaacctcaatctctcagaatccacagaaaagatcgttgctgagtacatatgggttggtggatctggtatggacctcagaagcaaagccaggactcttcctgggccagtgagtgaccctgcaaagcttccaaagtggaactacgatggctctagcacagaccaagctccaagggatgacagtggaatcatcctatacccacaagctattttcaaggacccctttaagagaagcaacaatattcttgggatttgtgatgtttacacccccgctggtgagccactttcaacaacaggaggtatgaagcctgcaaattttcaggccccttgcggc

SEQ ID NO: 246760 - DNA, 526 bp, Glycine max
gggtggagagctgcagtatgagagaggaggattaatgcgatgctgtaccggtccggaattcccgggtcgacccacgcgtccgcccacgcgtccgaacatttggtggcaaaaggttgcaaaaagatggtggttgtcaatagaactgatgagagagttgctgcaatacgtgaagaactgaaggatattgagattatctacaaacccctttcagaaatgctcacctgtgctggcgaagcagatttagttttcaccagtactgcatcagaaaacccattattcttgaaagaacatgtcaaggaccttcctcctgcaagtcaagaagttggaggccgtcgctttttcattgatatctctgttccccggaatgtgggttcatgtgtctcagaccttgagtctgtgcgagtttacaatgttgacgaccttaaagaggttgtggctgccaataaagaggatcgcctaagaaaagcaatggacgcacaggcaatcattgctgaaaaatctaagcaattcgaagcttggatggact

SEQ ID NO: 246761 - DNA, 528 bp, Glycine max
  unsure (1)..(528): unsure at all n locations
tggaggaggggtgntttgtatgtaaggagaatatatggcatgcatgtaccggtccggaattcccgggtcgacccacgcgtccgaaaccctggaattaagcacgttatttcattagggttggttttgttgaacagaaaaaaagagaaaaaaaaattatgggaagcgatggcgtgaggaaaccaagattcctatgccttcatgggttccgaacaagcggagaaatattgaaaacacagttacataagtggcctcaatcggttctagacaacctcgatctagtatttgtggatgctccttttccttgccttggcaaatccgatgtagaaggcatttttgatcccccttactacgagtggtttcagttcaacaaggaatttacagagtacaccaactntgacgagtgccttcagtacattgaggaatgcatgatcaagtacggacctattgatgggcttcttggtttctcacagggatcaatattatcggctgcgctgccgggtcttcaggagaaaggcgtggcactcacga

SEQ ID NO: 246762 - DNA, 525 bp, Glycine max
gggggaaaggcttgggtataggcatgaggagttattggcatgctgtaccggtccggaattcccgggtcgacccacgcgtccgcccacgcgtccgcccacgcgtccgcccacgcgtgcgcaaatttgcaaccttctgaataaacctgacatagtgaaccaagcagggcaagaacacaaacccttacaatcgaaatttgtgttgcagaaaagccatgacgggggaagagactaccgggaagaagagggtggtgacagaatccctgggatggctaacggaatcgtcgataatgccaaagaagcaccgagccatagcgggcgttggcgcatcctcaattctcgaattgaaggccgaactgtacaagtctcaggaagattccaaaaagtctcgcgaattggcaggccccgatgccgagtaccaacgcgccaagaacaaaatcgcccccaaagacaaattctccgtcaaaaaccgcggcgtcgatgcccgcgctcacaaggacaagcttgagttgaagcggtgagtgatgg

SEQ ID NO: 246763 - DNA, 540 bp, Glycine max
  unsure (1)..(540): unsure at all n locations
nggggggggggggggaaaagtgttttnngttaagatatgagagagtctatggcgaaccgcgtccggaattcccgggtcgacccacgcgtccggcatcgctcacctttccctttgcgacgccgtgagaaacgaaagcaaacagaaaaaaaaggacagagtggngtgggaggcacacgcacaaacgcagagtcagaatctccattctccaatcggagacaaagcgagctcgaacgaacgaagtagagtagtgtgctacggaaaatgtggcggtgcattgctcgtggactccgtggacctgctttcaccagatccacctncaatcactcacttggatctcacttttatagattcttctctagtggggcgaactcttcgtacaccgtggtggatcatacttatgatgctgttgtcgttggtgctggtggcgcgggattgagagctgctattggactttcagaacatgggttcaatactgcttgtattaccaagctcttcccaactcgttcacacactgttgcagctcaaggcggtataaatgct

SEQ ID NO: 246764 - DNA, 260 bp, Glycine max
tgaagatggatttctgaaggcttttaaggttgcaaattttgaatatgttgatgaggctgaagctgcagcagaggggtcatcgccaccgagtttcaaaaagtcactgtctcatacctatgatagaacaatcacttttgcacttctaaacggcagcatcagacatatcttcagactctcaccactagacttgaggaaatgagagtcaaaaggcgttattcagaacagtggatgcaccatcgcttactcccacaagatcttaa

SEQ ID NO: 246765 - DNA, 387 bp, Glycine max
gacctacgcgtacgcttactgcttatggtgggggctccagaattcgagtacacttggccagggacttcaaactagcacctatcctggggaggttatcttttcaatagcactagctataagtggcctcatcctttttgcccttctgattggcaacatgcagacatatcttcagtctctcaccattaggcttgaggaaatgagagtcaaaaggcgtgattcagaacagtggatgcaccatcgcttactcccacaagatcttaaaaaaccttttaaaccgtattacccatattagtggcttgccacacctggtgtaaaatgaagaaaatttagttcaaagtttaccaaaggatcttcgaaaagatattaaccgtaatctttgttgggcct

SEQ ID NO: 246766 - DNA, 385 bp, Glycine max
gtgaaatgatttgaagcttttaagttgcaatttgaattgtgatgagctgagctgcacagaggaggcatcgcaccgagttaaaaagtactgtctcgaccaggagagaacagcacagcctcttaaaaagcttaccgatctgacagcagctctagctcttaagtgaggaggaaagagaagatggagagaaaaggaagaagaagaagaaggaaaagaaagggctgaaagagaagatcgaggagaaaatagagggtgatcatcatcatcacaaggatgaggacacaagtgtccctgttgagaaagttgaggttgttgaaacagcacatgctgaggaaaagaaagggttcctcgacaagattaaggagaagctaccagggcacaagaagac

SEQ ID NO: 246767 - DNA, 430 bp, Glycine max
tgctgtaccggtccggagttccaggcacgactcacgcagcgccaaccacctccatccgaattgggaatcgatttgaaggcaggaggtaagtccaggaaaagcaaacgtacagcccccaaatccaatgatattaacctcaagctcctcgtcaagctgtaccgttttcttgttcggaggactggtagtaacttcaatgccgtcatcctcaaacgccttttcatgagcaaggtcaacaagcccccgctatccctctctagattgattcgttacaccaagggaaaggaggataagatagctgtggtagtcggtgccgtgaccgatgacattagggtgtatgaagtccctgctctgaaggtaactgccctgaggttcactgaaactgccagagctagaattgagaaagctggtggcgaatgcctcacctttgatc

SEQ ID NO: 246768 - DNA, 522 bp, Glycine max
atggtgagtgggttggatatgagggacgtagaggtatgtctctaccgcgtccggaattcccgggtcgacccacgcgtccgaatacattgatgagttgaaacagattgttgaggagtggaaagcaaagaagtcttggcttgcacaagaacgagtagacgaggtcataaaaagttctgaaaaattgaagaattggttggatgagaaagaagctgagcaaacaaagacttctggattcagtaagccagcatttacatctgaagaagtatatctgaaggtgcttgatctgcaaaccaaggttgccagtattaatagaattcccaagcccaaacctaaggttcagaagcccgtaaaaaatgaaaccgaaagcagtgagcagaatacagagaattctgattctaactcagctgatagttcctctttaagtgattcatccgttaacagttcagaaagcacaagcgaagaaacggtaactgagcaaactggaggtcatgatgagctattgataaccttgcatacatgtaa

SEQ ID NO: 246769 - DNA, 520 bp, Glycine max
  unsure (1)..(520): unsure at all n locations
gaggaagaggggttgnagtaagtgaaagggggagttagatggatgctgtaccggtccggaattcccgggtcgacccacgcgtccgcttccgaaactctggacaatctttactccgagaagaggtcactgaccttgatattacagagattgttagcaaatggaccggtataccattatcaaacctccaacaaacagagagagaaaagttagtcttgctggaacaggttcttcacaagagggtggttggtcaggatactgctgtaaaatctgtcgctgatgcaattcgccgttcaagggctggattgtctgatccaaatcggccaattgcaagcttcatgttcatgggtccgactggtgttggcaaaactgagcttgccaaggctttggctggttacttgtttaacactgaaaatgctcttgttagaattgatatgaatgagtacatggagaaacatgctggttcacgtctaggtggagccccttctgggtattttggtatgaagaaagcgtcagctaactg

SEQ ID NO: 246770 - DNA, 518 bp, Glycine max
  unsure (1)..(518): unsure at all n locations
aggaaggagtgtattcgtgtattgaaatggggagttaatcgtatngctgtaccggtccggaattcccgggtcgacccacgcgtccgcttttgacaggatcaatatggtaaggtacctctatattgcggaatcactgatgatggctacgtagcattcgccgatgatgcagaattgcttaaaggtgctcgtggcaagtcacttgcttctttccctcaacgatgtcactactctacagctgttgcaggattgatgtgctatgataatcctaaagataatattactgcaggtcctgctaatgaggaagaaatctggggagcgactctcaaggtggaagggccagcagttgtcctactcagacaatagattttcctttctgctggtgagatgccatatgatgattagtggaggagactgctaaaggcatacatgatggccaatgtaactaaatggcatggggagtgatcactgtaattgggaaatattatgggtgtaactctgatcattagatagagaatttt

SEQ ID NO: 246771 - DNA, 521 bp, Glycine max
  unsure (1)..(521): unsure at all n locations
agtaagagaggctcgngttatggaaagaagaagttgaataggatgctgtaccggtccggaattcccgggtcgacccacgcgtccgctcaaggagcccatcggagttgttgcattaattactccatggaactatcctctattgatggctacatggaaagttgctcctgctctagctgctggttgtacagcaatattgaagccatctgaattggcatctgtgacctgtttggagctggctgaaatatgcagagaagttggccttcctccaggggtattaaacattgttactggattaggcaatgaagctggtgctcctttgtcatctcatcctgacgtagacaagatttcctttactggaagctctgcaactggaagcaagattatgacagctgcaacacaacttaccaaacccggttcttttaaacctggtggaaaaaggccaatcattggttttggaggatgttgacctggttagaactgctgattgaaccatcttggcctgctctttcacaaatggccaa

SEQ ID NO: 246772 - DNA, 401 bp, Glycine max
ggaattcccgggtcgacccacgcgtccgaacaatgtccacgcttccgaagcaccaacccgaagcgaaaccccaagatcgccctgcggatcaaccagcttcggcgccctcggatgcaaaacccgaagatcttcatccgaaccagccaggttcggagtctcccgaagccaaagcagagggggaagaagaggatgaagaagaagaaggagagtgcgggttctgcctcttcatgaagggtggtgggtgcagagacgagttcatagggtgggaaaattgcgtccaggaggccgaaaacaacaacgaggacctcctcgagaagtgcgcccaggtcaccgccgctctcaagcgctgtatggacgcccactccgactactacgagcccatgctccgcgccgagaagctc

SEQ ID NO: 246773 - DNA, 508 bp, Glycine max
  unsure (1)..(508): unsure at all n locations
nagtagggtgtgtcnagtaggtgaggggagtaatcgcannccntaccggtccggaattcccgggtcgacccacgcgtccgggagtctgacatgtgtgcgagtcaacgggcgagtaaacccgtaaggcgcaaggaagctgattggtgggatccccctgtgggttgcaccgccgaccgaccctgatcttctgtgaagggttcgagtgagagcatacctgtcgggacccgaaagatggtgaactatgcctgagcggggcgaagccagaggaaactctggtggaagcccgcagcgatactgacgtgcaaatcgttcgtctgacttgggtataggggcgaaagactaatcgaaccgtctagtagctggttccctccgaagtttccctcaggatagctggagcccgcgggcgagttctatcgggtaaagccaatgattagaggcatcgggggcgcaacgccctcgacctattctcaaactttaaataggtanggaccgttccggttggtcttgn

SEQ ID NO: 246774 - DNA, 515 bp, Glycine max
  unsure (1)..(515): unsure at all n locations
agtatagagaggcttgnagtactgatagaaggttatgcgatgctcgtaccggtccggaattcccgggtcgacccacgcgtccgaaaatattaaactctgtacactattgtatccaacactttgtgaagtgactactatgacgaaaccttgtacaaatttgttgtatggtttaatgtatcactatttattaaaaaaaaaaaaaaaaaaaaaaaaaaaaaaaaaaaaaaaaaaaaaaaaaaaaaaaaaaaaaaaaaaaaaaaaaaaaaaaaaaaaaaaaaaaaaaaaaaaaaaaaaaaagtaactgacattcaaatagttcaaatgacttgggtataggctcgaaagactaatcttaccgtctagtacctgaaaaacatacgaagtttccctcatgataacaggagcactcgggcaaattctatcagttaacgtcaatgatcacatgcatcgatagcgcaaatccctagacgtattatcatcctttaaatcggtaagaaggggccttttgatatgca

SEQ ID NO: 246775 - DNA, 517 bp, Glycine max
  unsure (1)..(517): unsure at all n locations
cgtntnntaagagtatcggagatgatggaagaataggtatctgtaccgctccggaattcccgggtcgacccacgcgtncgctcttacagaattctgcacgccaagtaactgcccttcaatgactgcaggaccaaagtatgagtatcgatgggctgatggtgttactataaagaaaccaatagaggtgtctgctccaaaatatgttgagtatttgatggactggattgaatctcagctagatgatgaaacgattttccctcaaagattgggggctcccttttcaaccaatttccgagatgttgtcaagacaattttcaagcgattattccgtgtatatgctcacatttaccactcacattttcagaaaatagtgagtttgaaagaagaagcttaacttaatacttggttcaagcattttggtttatttacttgggaattcccgttgaatcgacaaagcgaagttgcaccctttggaggaccttgtgaatctattggtcagntatagtgcctgtggagg

SEQ ID NO: 246776 - DNA, 518 bp, Glycine max
  unsure (1)..(518): unsure at all n locations
gaggagaggggttggagacgggggagagaggtaatcgtaaccgcgtccggaattcccgggtcgacccacgcgtncgcggacgcgtgggcggacgcgtgggcggacgcgtgggaaaaaaaatcgtagttggaggcgccgcactccactccactccaatcaatcagatactagcgatggggaggaagcgaaaggtagcaccgaaatcttctgtatccgccgagcccccgctgaagcaacaccaaccaaaacccgaaaatgccgctcaggaatacgaagaagaggtcgaagaggaagttgaggaagacgaggtagaggaagaggtcgaagaggaagacgaagatgaggaggacgaagaggacgaggaagaagaagaagaagaccataaagaccaataccagcaccaacaacaacagcaagacgaagacgacgacccgatctgcaagcttctggaacccgttgagcaggaccaggtnctcatncttctatgcgagggcggccggcaaagcaccagaacgtgc

SEQ ID NO: 246777 - DNA, 518 bp, Glycine max
  unsure (1)..(518): unsure at all n locations
agtnagagggactgnngttacggatgagggagttattgcactgctctaccggtccggaattcccgggtcgacccacgcgtccggtgaaagccaagattcaagataaggagggtatccccccagaccagcagaggcttatctgtgctggtaaacagcttgaagatggacgaacccttgcagattataacatccagaaggaatctaccctgcacttggttttgaggcttcgtggtggcatgcaaatctttgttaagactttgaccggaaaaacaataactttagaagttgaaagttctgataccatcgataacgtgaaggcaaagatacaggacaaagaggggattccaccagaccagcagaggcttatctttgctgggaagcagctggaagatggtcgtactcttgctgattataatatccagaaagagtccactctgcatttggtgttgaggcttcgntgaggtatgcaaatttttgtgaagactctgacaggaaagaccataactttggaggtggaa

SEQ ID NO: 246778 - DNA, 510 bp, Glycine max
  unsure (1)..(510): unsure at all n locations
gggagagaggcgtgngcatcgaatagggagctacgcgactgctcgtaccggtccggaattcccgggtcgacccacgcgtccgcacgatagcccttagagatattgctatacccaaggaagatacctcgtatagtcttgtcttcaagcttgtgcctcttcacgtctggaatatgaatgtagcatatagatccaaatacccttaggtgctttgcaaatggttttttcccgttccaagcttcaatttgagtcttgtcttttacagacttagttggacatctgttaagtatgtaaacaacagtgtagactgcttcagcccagaatgtgttaggtagtcccttctccttgagcatcgatctagccatttccataactgtgcgattctttctctcggacactccattttgttgaggagaatatgtgactgtaagttgtcgctcaatgccttcatcctcacaaaatctttcaaactcgcaagaggtgtactctnttgccgcgatcactttntagtac

SEQ ID NO: 246779 - DNA, 516 bp, Glycine max
  unsure (1)..(516): unsure at all n locations
aggtaagaggaggnntgtgtngaattgaacacttcagcctangcgcactgcggtaccggtccggaattcccgggtcgacccacgcgtccgatggctcgtgggccttaaccgacagtgtcccttctaacatgactcttatggtccaggttgacaataagtagcgcatgcaattgttcctcagcaccaaaccttgcaaattgagaacccaagtgaacttggaccctacatcggctagtaccgtgaccattacagaatgctaagcatcttcaactattcattcgacgtgggtttgtactacatcacgccgcataccgtgactctagcttagatgatatggctccaacgctctgatcagacatcccgattggcttgagaggccaatatgggcatcccagttggagaaaatgccactatatcacttggtactgatgggtacgttgcgatgacagatgctgatggcagaacagcatggaagactacaattagaaaaatggttttggggcccacaactaatac

SEQ ID NO: 246780 - DNA, 518 bp, Glycine max
agtagggaggctgtgctcggcttagttcactacgggactgctcgtaccggtccggaattcccgggtcgacccacgcgtccgcccacgcgtccgcccacgcgtccgcccacgcgtccgcggacgcgtgggaaaaaaaggaaaaaaaaaaaaaaaaaaaaaaaaaaaaaaaaaaaaaaaaaaaaaaaaaaaaaaaaaaaaaaaaaaaaaaaaaaaaaaaaaaaaaaaaaaaaaaaaaaaaaaaaaaaaaaaaaaaaaaaaaaaaaaaaaaaaaaaaaaaaaaaaaaaaaaaaaaaaaggggaataaattataatgattcaaactttaaatgcatgtgcttaaaaattataatcttatatttaggagaactaaaaaaatagaaggggggctattgataaaagctatagagatggaaaaaactggagttttaaaatttaataggatttagatataattatttttttaaaaggggagaaaatttgaaaaaggggtaaattaatgggagattcaaaaaattgat

SEQ ID NO: 246781 - DNA, 516 bp, Glycine max
  unsure (1)..(516): unsure at all n locations
aggttanaaaggtgtggagatagaggacgtatggtactacctaccgctccggaattcccgggtcgacccacgcgttcgcaacaatggcttatgagccttaaccaggaatctgccttctaaccttaatcttcttatcgggcttgagcattattgcgcatgcaattggttcttaaaacgaaaccttcaaatttgaaaactcaggtgaactttgaccctacatcgttgagtaccgggcaaattaccgaatggttagcattttcaacttttcattcccaggtggtttcttccacaacaacccaaattgctttaattttacctttgctggtagggctccaaccttggtacaagctatttcgttgggtttgggaggccaatagggccaacccagttggagaaaatgccactttttcacttggcactgatgggaaccttgtgttggcagatgctgatggcagaattgcattgcanactaacactgncaaccanggtgttgtggccttcaggcttctttcaaaa

SEQ ID NO: 246782 - DNA, 515 bp, Glycine max
  unsure (1)..(515): unsure at all n locations
tgaaggagtgtttgngtctctagaaatactgtatgctctaccggtccggaattcccgggtcgacccacgcgtccgcccacgcgtccggcgaagatgtagagaacaaagaatgagagagagatttgaatgtaaggggggaatcataaccaaaattggccccaggccaaaaagatgctctcatcgccggcgttgaaaagcacggccccggaaagtggtagaacattctcaaggatccccaattcgcccctttcctcacttaccgttccaacatcgacctcaaggataaatggcgcactttgagcgtcagtaacggtgctcatggctccaaagaaaaatctaaggttcccaagcttaaagccctccctgctcctactgctactaccgncactcctcataacgccgctcctgctctgcataacgcagcatctgatgtcactccatcatatgcttctcagaatgaccaagatgcccaataccctncaagtataatgcaatgatttctgagctctatcacc

SEQ ID NO: 246783 - DNA, 522 bp, Glycine max
  unsure (1)..(522): unsure at all n locations
gtntntnnaagaggctcgtgttatgaactgatggagttgatggcactgctctaccggtccggaattcccgggtcgacccacgcgtccgaagaatcactcccttatccatttccacaccacaccatggcctcaaccaacgctctctctgcagcctccattctacgctctcccaaccgccagtctctgacccgaagagcgaaccataatggaagagtaaattaccggaaaccgaataaccgtttctccgtgaaagccttcgccaaagagattgcctttgaccagcattcccgctctgctatgcaggccggcattgacaagctcgccgacgctgttgggctcactcttgggcccagagggaggaatgttgtgttggatgagtttggaagtcctaaagtggtcaacgatggtgtcaccattgctcgcgcaatcgagcttcccgatcctatggagaatgctggtgcagctcttatcaaagaagttgctagcaagactaacgactcttcaggtgaatggacttccacc

SEQ ID NO: 246784 - DNA, 524 bp, Glycine max
  unsure (1)..(524): unsure at all n locations
tgtggtagtgtgtgngatatgtgtatggaaagttgtatgcgatgcctcgtaccggtccggaattcccgggtcgacccacgcgtccgggttgtcaaggaactggtatgaaggtttctataagacatcttggcccgtccatgattcagcagatgcagcatgcttgcaatgaatgcaagggtactggagaaaccatcaacgacagagatcgctgcccacagtgcaagggagaaaaggttgtgcaggagaaaaaagtccttgaagttattgtggaaaagggaatgcagaacgggcagaagattacattccctggcgaagctgatgaagcgccagacacaattactggggatattgtctttgtccttcagcagaaggaacatcccaaattcaaaagaaaggctgaagatctttttgtagagcacattttgtcccttactgaagccttatgtggcttccaatttgtgctgactcacttggatggccgtcagcttcttattaaatcaaatcctggggaagttgtcaagcct

SEQ ID NO: 246785 - DNA, 510 bp, Glycine max
  unsure (1)..(510): unsure at all n locations
agtaaggaggnttgtntctcganaatgagagtcataggcactgccgtaccggtccggaattcccgggtcgacccacgcgtccgatccatcaccctttctttcattctgttgggaaatggaagtcacactttcagcgtgcaagtccattagctcgccttctgttcccgtcgcagctttatttgcggggaaagcaggaactaagagttcgcaatgcagttttttagctggagcaaacaaagtgaggtttcctaggcaagtcggtcaagttagccacgttcgcaaacagcgccaaacgcgtcactgtggtgctctccacgcgacttgcagcggtgacaagatcctgatcgcgaatagaggcgagattgcggttcgcgttattcgaaccgctcatgaattggggattccgtgtgtggctgtgtactccaccattgataaggacgcccttcatgtcaaactggctgatgaagctgtatgcaatcgggaaacgccgagtagccagtcgtacttgct

SEQ ID NO: 246786 - DNA, 510 bp, Glycine max
  unsure (1)..(510): unsure at all n locations
tggtagaagaggnttgtttaatcgattggggagctacgcgactgccgtaccggtccggaattcccgggtcgacccacgcgtccggggggcccatgttcccaaggctgcatgtgaatgatgcagagaaaggagggccaagagcaccaccaaggaacaagatggctctttatgaacagttcagtattccatctcagaagttcaatccacgccttcttccacgaaaaccaaattcttcttctaacatagttccttccccaacccagggaaatggccatgagagaagttatgtctacccagttcgtttctcttcacatacacccactcatcgagctgaaagttatatttctcgccaatctgatgatggatcaaggtcgaacacttcattggtgcaacttgaacggagaaaaaaagtagatgatgacattcacgtgtacacttgctcggggattgatcaatctaatgatanaacgatggacagtgtanatgggaaaaaattcactcctttcgttc

SEQ ID NO: 246787 - DNA, 517 bp, Glycine max
  unsure (1)..(517): unsure at all n locations
agtntagggagggtgtgtagaatcgatataagaaccttangcgcactgccgtaccggtccggaattcccgggtcgacccacgcgtccgcttttccacacttccatcgtccggcacttcatggccgcggcggagcccactataagcccatctaacacgcgcgtgggctggatcggcacgggcgtcatgggccagtccatgtgcgcccacctcatccgtgccggctacaccctcaccgtcttcaaccgcaccccctccaaggcccagcccctcctcgacctcggggcctacttcgccccctacccccacgccgtcgcagcccgctccgacgtcgtcttctccatcgtcggctacccctcggacgtccgctcagtcctcctacacccctcctgcggcgccctctacggcctccgacccggcggcgtgctcgtcgacatgaccacctccgaacccttgctcgccgtcgaaatcgggggacgccgttacggccaagggctgcaactcaatcgacgcccccgt

SEQ ID NO: 246788 - DNA, 332 bp, Glycine max
gtcgacccaggcgttcggccacgccttcggccaagccttccgaaaaacaggaagtttccaccattgactaccacccgggttggtatctgactttgctttgcattcctttactacgcggttgaaggagccaaggttagtttcaataacaagtgctcatacacggtatggccaggaaccctaaccggtgaccaaaagccccaattatcaacaactggtttcgagttgggtccaggagcatccaactctgtggacctatcatctccatggtccggtcggttctgggcccgaacaggatgctccaacaacaacggaaggttcagctgcgccaccgc

SEQ ID NO: 246789 - DNA, 526 bp, Glycine max
  unsure (1)..(526): unsure at all n locations
nagtntgaggagtgtngtcngacggatcgatgattgtatgctcgtacgcactgccgtaccggtccggaattcccgggtcgacccacgcgtccgatttttttctctgtctctcttcctatcacatcataaattctatcatgattcatgcttatgttttttttattctctttcgaggtattgcatagagatttggggtgttcattatacttttttcaatagttttgcatagagatttggggtgttcattatacttttttcaatagttttatcacttgattgattatatatatccaccatgattcgtgcttaagtagttgattaacaatatgtcattttctgtgttgaaggtaaaccatgggaatctagtgaagttggagggattttgcatagacccagaagaagcaaattgctatctagtctatgaatatgtagagaatggatctctatactcatggctgcatgagggcaaaaaagaaaagttgagctggaaaataaggctangaatagccattgacattgccaatgg

SEQ ID NO: 246790 - DNA, 520 bp, Glycine max
  unsure (1)..(520): unsure at all n locations
ggggnnngagagactcgtgtgtttgaaaggggagtttatggcactgctgtaccggtccggaattcccgggtcgacccacgcgtccgcacagcagcaaacatctccttctcaaactagtaatatatactattattcatccattccattctatatatttcataatgggtgttttcacattcgaggatgaaaccacctctcctgtggctcctgctaccctttacaaagctctagttacggatgctgacaacgtcatcccaaaggctgttgacgccttcaggagtgttgaaaacgttgagggaaatggtggccccggaaccatcaagaagatcactttccttgaggatggagaaaccaagtttgtgttgcacaaaatagaagcgattgatgaggctaacttgggatatagctatagcgtagttgggggaaaatggttgccagacacagtggagaagatcacattcgaatgcaaattggctgctggcgccaacggagggtctgctgggaagctaactgtcaaatc

SEQ ID NO: 246791 - DNA, 523 bp, Glycine max
  unsure (1)..(523): unsure at all n locations
agggaagtagtggattgngcgtatgaggactgatggtcttccctaccggtccggaattcccgggtcgacccacgcgtncggacacacacagcttgcagatattacattcccctggatcactaattaagccctggggaaggaatcaatagctgggttgtgcttgctcttccttggtctctttggtgctcaagaaagtgtggtgcaaactgaggcaaagacttgcgagaacctggctgatacatacaggggtccatgcttcaccactggcagctgccatgatcactggaagaaccaagagcacttgctcagaagcagattccaggaccattttcgcttttggggcccccaaaactggttaatggatcccttcacttcaacgtgaaaaagatgcattcagcgctattttattaaaaaataaactactatatactatgtattaataggactggcgctgaatcaatgacctattgattatagtatattatattacacgatgtcagaactatagatgcatgtactgtcc

SEQ ID NO: 246792 - DNA, 520 bp, Glycine max
  unsure (1)..(520): unsure at all n locations
ggggtagaggagtnnctgtgtngtcatcganattgtaatgtcgttgcgactgccgtaccggtccggaattcccgggtcgacccacgcgtccgcgcattcctccttgcctctttgttctctctttttctctctccttctttctttgtttctgtgtgttcgagattgaagaagatgatgcaggctggacccggcggcatggcccaacaagcgaaccaacaatacgcacagcaacagcaacaaccctacatgatgatgccgccgcagcctcagccccctcagatgtgggccacatcggcccagcctccgtcccagtcggtggctcctccgcaacccaccagcgccgatgaggtccgtaccctctggatcggtgatttgcagtactggatggacgaaaattatctctacacctgtttggcacacaccggcgaggtggcttcagttaaagtcattcggaacaaacaaactagtcaatcggagggatatggggttattggagtttactagtcgtgctggtgctgaa

SEQ ID NO: 246793 - DNA, 511 bp, Glycine max
  unsure (1)..(511): unsure at all n locations
agtagaggctgtacttgngtctcgatcatggaagctgtgcgcctgcagtaccggtccggaattcccgggtcgacccacgcgtccggggtgcttgcatgataatttgtgttggtgcactcatgcctgccatttcagtgcgttcatctggtgaaggcctgaaaattgaagcaaagattacaaataaaagtatggtgtctcttatttcttgtgttctactgattggactctttgttatgcaacaccgtggctcctacaaggttgcattcgtgtttccccccataatcatcctatggctactgactattttcatgattggtatttacaatgtcatcaagtggaatccaagagtatatcaggctctatctccatattatatatacaagttctttaggcttacaggaaaagatggttggactaatcttggacgagtatttctgtgcgttacaggaactgaagctatgtatgcagaccttgggtactacagacatacacntgttaaggctggattttt

SEQ ID NO: 246794 - DNA, 506 bp, Glycine max
agggaagagagggttgtagatagaaaagagactgttggcactgccgtaccggtccggaattcccgggtcgacccacgcgtccgcaacttttgcttgtccttttgcttgcgaatctgaatcaaataatcaatcatgcattcattattcatcatgtcgtcggcgaagaaaatcacgctgaagagttcggacggcgaggctttcgaggtggaggaggcggtggcgctggagtcgcagacgataaagcacatgatcgaggacgactgcgccgacagcggcatccctctgccgaacgtgacgagcaagatcctggcgaaggttatcgagtactgcaagaagcacgtcgaggccgcgaatcccgaagacaaaccctccgaggacgatctcaaggcctgggacgctgaattcgtcaaggtcgaccaggccacgctcttcgatctcatcctggctgctaactacttgaacatcaagagcctgctggaccttacatgtcaaactgtagccgacat

SEQ ID NO: 246795 - DNA, 521 bp, Glycine max
  unsure (1)..(521): unsure at all n locations
agggagggagagtattgnnctatcgagtaagtatctcatagcgatgccgtaccggtccggaattcccgggtcgacccacgcgtccgcaggtctagagcttgatgatattgatctttttgaaataaatgaggcatttgcctcccagttcgtgtattgccgtaacaagctagggcttgatccagaaaagatcaatgttaatggaggtgcaatggcaattgggcatcctctgggttcaacaggtgctcgatgtgttgcaactctgttgcatgaaatgaagaaacgtgtcaaggactgtcgatttggagttatatctatgtgcataggtactggaatgggggcagctgctgcttttgagagtggtgattgtgctgatgagctatgcaatgcccggaaagtggatgaccttcttttatccaaagatgctcgcttgaaataggtactttatactcactatatntggtcatcatataagaaatcacagtanagtctttttctatggtagtgataatgtcaaccactcc

SEQ ID NO: 246796 - DNA, 526 bp, Glycine max
  unsure (1)..(526): unsure at all n locations
agggagttagagtactggtctctcgattatagtctgtcgtacgcactgccgtaccggtccggaattcccgggtcgacccacgcgtccgggcgcaaccgccaaccccctcgaccgccccgccgcctccgccgcagcacctcagctaccccgactccgtggaatcctcgccacgctcccgcaacaccgactcctgggacgagcccttcgcgccggcgtcgacgaagctccgcctcatgtgcagctacggcggccatatcgtcccccgcccccacgacaagtccctctgctacgtcggcggcgacacgcgcatcatcgtctccgaacgcgccacctcactcgcggacctctccacgcgcctctcgaaaacattcctgaatggaagacccttcacgctcaagtaccagcttcccaacgaggacctcgattccctcatcttcgtcaccaacgacgaggaccttgagaacctgatcgacgagtatgaaccgaacgncggcggcggcaacttcggcggtaaaaccttttcgat

SEQ ID NO: 246797 - DNA, 525 bp, Glycine max
  unsure (1)..(525): unsure at all n locations
agtnnnaggagaggattgntgttatgaaaagggtggctgataggcatgcctcgtaccggtccggaattcccgggtcgacccacgcgtccgcgtaagtctgtgaaaaaaataatctctgaggatgagcagactcctgtgcgcgaaaaaaccccaaccacaagaacgaaagaaggaaaaatcaagcgtggtagtggtacagaaaaacagaaactgcgggaacaaataagagagatgctgctgaattcaggttggacgatagactatcgacctcgaaggaacagagactacctggatgcagtttacattaatccagcaggtacagcctattggtctatcatcaaggcctatgatgctcttcaaaagcaatcaaatgatgatgctgatgaggtcaagcccaaaggggatagttcttcttttgctcctattgctgatgaagttctcagtcagctaacaaggaaaactaggaagaaaatggagaaagaattgaaaaaaaaaaaaaaaagggcggccgttctaaaggatcca

SEQ ID NO: 246798 - DNA, 531 bp, Glycine max
  unsure (1)..(531): unsure at all n locations
nagggtggggagcagtactgngtcgttattgaatatgagtgagttgtcgcgcatgcccgtaccggtccggaattcccgggtcgacccacgcgtccgagaagatgaacacgaagttgtctgatgtatctgctgagccggagcatgtaactgaagattgtcagtctgatttctttccaatgcttcgttctggagcttgtactgatattggattccggtcaaatatggaagatgcatatgtttgtgttgacaattttatggaggattatggactcaagaaccatatagacggacccagtgctttctatggggtatttgatggacatgggggaaagcatgctgctgactttgcttgtcttcatctgccaaagttcattgttgatgacaaagatttccctagagatattgaaaggatagttgcttcagcatttctgcaagcagacaatgcctttgcagaagcttgctctctggatgccgcacttgcatctgggaccactgcattagctactctngttataggaagtttctgattgc

SEQ ID NO: 246799 - DNA, 381 bp, Glycine max
ccggggcccaacaccaatgttgggccagaaccgtgggctaaattggagtggatggatggtggctcctgttaaaggtgaatcgattccaatcaaactggttcctcggtccttatgagctgaccccacacatcgtaacattaataacaaatttagtgtgaagtactttttaaatcttgtgttggttgatgaagaggacagacgatatttcaagcagcaggaaatcacaatgtataagctgcaagaagaaacttcatgattacttatcattcggggagtgagtattaggtttggtaacaaataaaaaagattgtgatggacattcttaaaatggcttagtgttctagcttgctttcatcactttcggtcatgtacatcgacaga

SEQ ID NO: 246800 - DNA, 508 bp, Glycine max
  unsure (1)..(508): unsure at all n locations
agggagagagtattgnattctgaatggtactattggcatgccgtaccggtccggaattcccgggtcgacccacgcgtccgaggccctgatgcgctgcgccatcctctactcctacgccaaggagcgcgcgggtcctctgaagcccggcgtcaacaccgtcgaggaggccgtgaagaccgtcgtggctccggtctacgacaggttccacctcgtccccggcgaggtcctcaaatacgccgatcgcaaggtcgccgaattggaccgccacgttccctccaacgtgaagaaggtctcctcccaggcccgctccgtcgtctccgaagtccgccgtgatggtgtctccgcctacgccaaaatcgtttactcgaagtatgagcccacggcggagcagtgtgccgtctccgcatggaggaagctcaaccagcttccgctcttccctcaggttgccaatgtcgtgttgcccaaagctgcctactgcactgagaagtacattgaggcggttgtttcc

SEQ ID NO: 246801 - DNA, 515 bp, Glycine max
  unsure (1)..(515): unsure at all n locations
agggtaaggagagnnnctcnnnncttactgantagtgcatctcattgcgactgccgtaccggtccggaattcccgggtcgacccacgcgtccgatttggggatggtctagaaaatgattatcaactaattaaggagttcattgataaagactgtaaatttttattggaaatttcttcagctgaaaattcaggtttgcatgtctttgacttcttagccaattcaatccttaaggaggttctctctgcaattcagaagggaaagccaggtgcattttctcccggaaggccaacagagttcttgaaaaattacaaatcaagcttagatttcttggcttttctagaaggctactgtccatccagatctgctgttgctaaatttcgatctgaagcaatttatacagaattcatgaagcaatggaacattggagtatatttctctttgaggtttcaggaaatagcagggtcactagattctgtgcttacaacatccagtcttgtccctgttcaaaattcan

SEQ ID NO: 246802 - DNA, 514 bp, Glycine max
  unsure (1)..(514): unsure at all n locations
agttttagggagtnncttgntgtatcgaactctgtaagctgttgcgcctgccgtaccggtccggaattcccgggtcgacccacgcgtccgcggacgcgtgggcggacgcgtgggtgtggatccaaactctccaacttattccaaagtcatccataggcttcctgttccttatttaggtgacgaattgcatcacacaggctggaattcatgcagctcttgccatggagacccctcagcagaccgacgatttctcatcgtacctgcactcgtatcaggtcgagtatatgtggttgatgtgaaaacaaatccaagggctccatctttgcacaaagttgtcgagcctgccgatatcatacagaagactggattagcttatccacacacatctcactgccttgcttctggtgatataatgatctcgtgtcttggagataaagatggaaatgctgcangaaatggatttcttcttcttgattctgagtttaatgtgaagggaagtgggagaaaccggtca

SEQ ID NO: 246803 - DNA, 509 bp, Glycine max
  unsure (1)..(509): unsure at all n locations
agtaaggggntgtaggaggctgacgccttangcatngcacctgcagtaccggtccggaattcccgggtcgacccacgcgtccgcccacgcgtccgccacaacggactaccttatacttcttccactactaatgggcatggcatggataaacattcatgtattcatctatagctccaaaccactcaaatcctctaaaaatcctgcggctcctcgcccttttacaatcataggaaacatctaggagctaggcaaccagccttaccaatcacttgccaagctttctcaaatttatggtcctataatgagtctcaagcttggtaagactaccaccattgtcatttactctccacaagttgccaaagaagctctacaagcacatgatcaaattggtgctaatacgacaatctgtaatactctaggagctcatgaatcataaaattcctgcggtggggtggctactttttttagcacggtggaaccaccatggaacttttgcgaaccaaacatcg

SEQ ID NO: 246804 - DNA, 517 bp, Glycine max
  unsure (1)..(517): unsure at all n locations
aggggagtagtgngtgtgatatagtaaactgatgtatgcacctaccggtccggaattcccgggtcgacccacgcgtncgcccacgcgtncggttagttcacacactaagttctgaaaaatgagttccaaagtttttctgattctacttatgttcatggccactatacttttgatctcctctgaggttgcacccgatgatgcataccagaattttgacaaaacagatgggaagcgtagtgcaaatggggtagatgaaagcaaatattggcgtggtggctatggcgactatggtggttggcgtggtggtggttggcgtggtggctatggaggctggcgtggtggctatggtggtgggcgtggtggctatggtggctggcgtggtggctatggtggtgggcgtggtggctacggaggttggggtggtggctttggccctaacgaacataatgaggctgggattgatgctagccctcacaactaagaaggaaacttgctaaagcttatttgggaattaagt

SEQ ID NO: 246805 - DNA, 526 bp, Glycine max
  unsure (1)..(526): unsure at all n locations
aagtnnagttaggtgtagtgnngagaaagagaaatgatggccatgacctaccggtccggaattcccgggtcgacccacgcgtncgtaaccatgaagtttatggatcatgcattcctacttcgatttgttggctatagccaacacgtgcttggaggagcagatgcttacagcagacaagtgattgacacagaaggcaagaaagttcgcgctggcgtagattactatatccgaccggtgccaacaaccccatgtgatgggcgtggcccgagatgggaatggaagtggctatggactcatagcaaggtcattcaaccacacttgcgctgttagtgtcgctgtggtagacggtttccgtggcctaacagtcacattcaaactagttaaccctaaaaaaggggtcatcaaggattctactgactngaacgatctgacctacctaactgacacaagttgtaatgaggccacggtcgtgaagctagatgccttttatgagtcaactggacagaggggtggggacaacggggga

SEQ ID NO: 246806 - DNA, 522 bp, Glycine max
  unsure (1)..(522): unsure at all n locations
agtagatagtgggttggggtagaagatagatggtaatcccgtaccggtccggaattcccgggtcgacccacgcgtncggactgaacaagtgatcaaagcatcagaagagaaagtagctctacaaggattgaaagtcacgcgcagcacctaaatgtaaaaaaagcaagaagagccagaacaagagtgtggtgaagcaggtgacaacagcagaaggtcttgatgatgcatgggcatggcgaaaatatggacagaaaccaataaagggttcaccctatcctcgaagctattatagatgcagcagttccaaagggtgtttggcgaggaaacaggttgaaaggagccacttagatcctgcggtttttctggtaacctacactgctgaacacagccatccccacccaactcgaagaaactctcttgctgggaccactaggaagaacaattcccttgttcctnctacaacaaccactcgtcaccaaaagaagactacttgntcctcaagcgttcaacaaagcatggact

SEQ ID NO: 246807 - DNA, 524 bp, Glycine max
  unsure (1)..(524): unsure at all n locations
agttaggtagagtgttgnngtatcgatacagtatctctacgcacgccgtaccggtccggaattcccgggtcgacccacgcgtccgcccacgcgtccgctcagattatatatatactccacatctgaagccacaccatcaaactcaacactgaccaaaatggcctcaccccaaacccctctatcccttctcacaattgcactcctttccctaatccctctcttcatcttcttcttcttcaaccgctccaaaggcaaacaacccaaagaaccaccaaccattcccggcgcatggcccatcctcggccacctccccctcctagcccgctccccaaccacccaccacctcctcggcgccatcgccgacgaccacggccccctcttcaccatcaagctaggcacagtaaaagccctagtcgtcagcaactgggaaaccgctaaagaatgcttcaccacaaacgatgtcgcccgttcttatcgcccctatggggtccgcaacgaacataataactaacacgttggcattc

SEQ ID NO: 246808 - DNA, 415 bp, Glycine max
tgccgtaccggtccggaattcccgggcaattcctaattgtttaaacctaattctcatttcttcatcgttcgattcttctccttctaaagatgcagatcgtcgtgaaaactttgaccggtaagaccatcacccttgaggtggagtcctccgacaccatcgataacgtgaaagctaagattcaagacaaggaagggatcccacctgaccagcagagacttatctttgcgggtaaacagcttgaggatggtcgaacccttgccgactacaacatccaaaaggaatccactctccacctcgtgctttgcctcaggggtggcatgcaaatctttgtcaagactttgactggcaagaccatcaccctcgaggtcgaatcctcggacaccattgataatgtcaaggccaagatccaggacaa

SEQ ID NO: 246809 - DNA, 513 bp, Glycine max
  unsure (1)..(513): unsure at all n locations
agtataggagtgctcgtttacgctcatcntacantgtactgcggtaccggtccggaattcccgggtcgacccacacgtcctaaacctaattctaatttcttcatcgttctacacttctcctactaaatatggggatcgtctttaaatcttttaccactaataccatcaccctatatgtggaatcctccgtcaccatctatcactagaacgctaacattcactacaacgaaagatatactacctgaccatcatatactaatatgtgcatctaaactgcttgaggatttcctaaccctaacctactaccacatccaaactgaatccactattcacatctagcttcttctcatacttgacatgcaaatctttgttaagactttcactgacattaccattaccctataagatgtattctattacaccattgatcatgttatagccaatattcattacatggaaactattccatccatatcatcatttgttgatttttatttgttaaacatttttttg

SEQ ID NO: 246810 - DNA, 509 bp, Glycine max
  unsure (1)..(509): unsure at all n locations
aggggnaggcaggattcgccgtacgaaaatgaatctcttgcgcactgccgtaccggtccggaattcccgggtcgacccacgcgtccgctctttctaaacatttggatttcaaagggattacatccgaccttgttactctgaacatcctcatcaactgtttctgccatctgggtcagatcactctttccttttctgtattggccacgattctcaaacggggttatcacccagatgtaataaccctcaccacactcatcaaaggcctctgtcttcgtggggaggttaagaaagcactgaaatttcacgatgatgtcgttgccctagaattccagttagaccgaattagttatgggacattaatcaatggtttgtgtaaaataggagaaacaaaggctgccatacagttgatgaggaatctggaagaacgctccattaagcctgatgtggtaatgtacaatataataattgatagcttatgcaagaataaactngtaagggaagcttgtatt

SEQ ID NO: 246811 - DNA, 523 bp, Glycine max
  unsure (1)..(523): unsure at all n locations
aggagtagaggnttgncttatgattattgagctcatagcgactgccgtaccggtccggaattcccgggtcgacccacgcgtccggcatctgcagctatcttcaaaaggatcaacttgggatgaaatagactatgaatcacttggaaatctgagtggcgatccatacatccttgacacaaacgttgctagccaaggcgagggggacagggaacaacaattctatctatggtttgacccaactgctgatttacacacttactccatcatgtggaacccccaaaggattatattctcagttgatggcactcccattagagagttcaagaactcggaggctatcggggatcccttcccaaagaatcagccaatgaggatatattctagtttgtggaatgctgatgactgggcaacaagaggtggacttgtgaagactgattggacacatgctccgttcacagcttgctacagaaactttaatgctgacgctngcatatggtcttctggagcatcttcttgcgctaaa

SEQ ID NO: 246812 - DNA, 517 bp, Glycine max
  unsure (1)..(517): unsure at all n locations
agtnagtagaggctgtgtctgataagtatctgtacgcctgccgtaccggtccggaattcccgggtcgacccacgcgtccgcccacgcgtccggcaaaattctcttccgtttcaggattagggtttcaccgttacagtgaaacatggcaaaaccaaagcgaatctctctgcgtatctttgcgctgctcctcttgatttccacctcttcgtttcagcttctccgcgcttccgatgacgccgatgatgatgcgatcttctatgattcgttcgacgaggattttgaagaccgttgggttgtgtctcagaaagatgagtacagtggtgtctggaaacatgccaagagtgagggacatgatgattatgggcttcttgtcagtgagaaagcaaggaaatatgctatagtaaaagaacttgatgaggccgtgagtctcaaggatgaaacaaggtgtcttcaggttgaaacctcggctttagaaatggccttgatggtggggggcctatctaaaatatcttccacc

SEQ ID NO: 246813 - DNA, 465 bp, Glycine max
  unsure (1)..(465): unsure at all n locations
cgaatttccgggtcggaccaagccgtccgtgcaaaacgggaggtatccaccattgactaccacccgtgttgctatctgcctttgctttgcattgctttactacgcggctgaaggagccaaggttagtttcaataacaagtgctcatacacggtatggccaggaaccctaaccggtgaccaaaagccccaattatcaacaactggtttcgagttgggtccaggagcatccaactctgtggaccttccatctccatggtccggtcggttctgggcccgaacaggatgctccaacaacaacggaaggttcagctgcgccaccgccgattgcgcctncggtcaagtcgcatgcaacggtgccggtgcaatcccgccagctactttggtagaaatcacagttgcagcaaacggagggcaagatttctacgacgtgagccaacgtgatggcttcaacgtgcccatgtccgt

SEQ ID NO: 246814 - DNA, 523 bp, Glycine max
  unsure (1)..(523): unsure at all n locations
agggggagaggaggncttgntgtaatcgaaaaagtagtcctangcgactgcagtaccggtccggaattcccgggtcgacccacgcgtccgcaataacaggtctgtgatgcccttagatgttctgggccgcacgcgcgctacactgatgtattcaacgagtctatagccttggccgacaggtccgggtaatctttgaaatttcatcgtgatggggatagatcattgcaattgttggtcttcaacgaggaattcctagtaagcgcgagtcatcagctcgcgttgactacgtccctgccctttgtacacaccgccaagaagaaaaaaaaaaaaaaaaataaaaaaaaaaaaaaataaaaataataaaaaaaaaaaataaaaaaaaaaaaaaaaaaaaaaattaaaaaaaaaaaaaaaggaattaaaaaaaaacgaaaaaaaaggaaattaaattagaaaaaattaaaaaattaattaaaaattaattggaaaaggaaattagtggaaaattaaaaaaaaaaaaaag

SEQ ID NO: 246815 - DNA, 507 bp, Glycine max
  unsure (1)..(507): unsure at all n locations
aggtggaggcaggagtcgnngttgtgaaaaaggcactcatacgactgccgtaccggtccggaattcccgggtcgacccacgcgtccggggaccatggaggcaaattcaggtgccagcgaccgaatttcgagaatcgccggccacctccgcccccagagagaggatgatgtttgtttgaagcgtagcgattgccgtgcaaaaggtggggtctccggattcaaggtggccatattgggtgccgcaggaggcatagggcaacctctggcgatgttgatgaagatgaatccactcgtttcacttctccacctctacgatgttgttaacacccctggcgtcacttctgatataagtcacatggacaccggcgctgttgttcgaggatttttggggcagcagcagcttgaggatgcacttataggcatggacttggtgatcatccctgctggtgttcctcgtaaacctggaatgacaagagatgatctcttcaatataaatgctggaattgtt

SEQ ID NO: 246816 - DNA, 516 bp, Glycine max
  unsure (1)..(516): unsure at all n locations
aggataggagagtanctagngccatcgattgggtgtgcctgagcgactgtcgtaccggtccggaattcccgggtcgacccacgcgtccgctccgaactccgaagcccttcagcaaccatgtcgaggagaaaggttagggagccaaaggaggaaaatgtcactcttggtccagccgttagagacggtgaacatgttttcggcgtggctcgcatctttgcctccttcaacgacaccttcatccatgtcactgatttgtctgggagggaaacccttgttcgcatcactggtgggatgaaagttaaagctgacagagatgaatcatctccatatgctgctatgcttgcagcacaggatgttgctgccagatgtaaggaactgggcataactgctcttcatatcaggctccgtgccactggtggaaacaagaccaaaacacctggtcctggtgctcaatcagctcttcgagcccttgcacgttcaggaatgaaaaatggtcgtatagaggatgttactccc

SEQ ID NO: 246817 - DNA, 518 bp, Glycine max
  unsure (1)..(518): unsure at all n locations
gaggagaagtgggtcggaaatagaaatgatcgcatgccgtaccggtccggaattcccgggtcgacccacgcgtccgcccacgcgtccggaagtattattattcttccatttccattaaaaagaaaatatcataaatgggtattttcacattcgaggacgaaatcacctcccctgtggctcctgctactctttacaaagctctagttacagatgccgacaacatcatcccaaaggctcttgattccttcaagagtgttgaaaacgttgagggaaatggtggccctggaacaatcaagaagataactttcgttgaggatggagaaaccaagtttgtactgcacaagatagaagcagttgatgaggcaaacttgggatatagctacagcgtaatgngtggtgctgcgttgccagacacagcggagaagatcacattccactccaaattggctgctggtcccaatggaggctctgctggcaagctcactgtcgaataccaaaccaaaggagatgctcagccc

SEQ ID NO: 246818 - DNA, 292 bp, Glycine max
  unsure (1)..(292): unsure at all n locations
aacacaacaaaaaagagaatgcaagtctggagtttgtgaaggtgattagtgcaaaagaacaagtggtttctggcaccttgtactatatcactttggaggcaaatgatggtgtgacgaaaaagggttatgaaactaaggtgttggagaaaccatggttgaacatcanagaggtcaggatttcaagcccatcactgttgctgntaatcctctttcggtgacggtctaacacatagctaggtaattgaagtgactagcttgggccgcagaagtataatatgtatgaactgaataa

SEQ ID NO: 246819 - DNA, 524 bp, Glycine max
  unsure (1)..(524): unsure at all n locations
agggtgtaagagggctgntgtgttgacatcggaactcgtacgcactgccgtaccggtccggaattcccgggtcgacccacgcgtccgggtggccccaaatcggtttatcaaaagatcaaaattctcctccttacaagaagcctcatgacctgaagaaggcgtggaaagtcggtgttctgactgcagttattaagcacatgtctcctgatattgcaaagattcgcaagcttgtgaggcagtccaaatgtcttcaagataagatgacagcaaaggaaagtgcaacctggcttgcaatcatcaatcaagaggaggccttagcaagagagctataccctgattatatccccccattagcctcagctggaggtagtggatctttggtgatcaatgatagcaatgagtatgatgttgaagggggtgaggatgagcctaactttgacgtggaagactgcaaacatgagaatcttcacacatccaatcttgggatggaaagagtgagggtaactctgccagttcaacagccc

SEQ ID NO: 246820 - DNA, 370 bp, Glycine max
tcccgggtcgacccacgcgtccgtccacaccttcaaaagacaacaaatactttcacttttttactacaactgactcacactactgggaatgttcacctatcatcttgaggatatctttccaataacactaactataactcacctaatcctttatgcccttctcatttccaacatccaaacatatcttcatactctcaccattactatcaccttacactaaatcacaacgcattaatcatatcattttatgcaccatctcttacttccacaagatcttataaagctattgatacattatgaccaatataagttactggcaactcatcctttaaatgaagaaaatttaattcaaaatctaccaaatgatctt

SEQ ID NO: 246821 - DNA, 524 bp, Glycine max
  unsure (1)..(524): unsure at all n locations
tgggtgagtnnatcnnnttatgatatggcagctgatagcgcactgccgtaccggtccggaattcccgggtcgacccacgcgtccggtcggctagagagcggggctattcttcttccggggagtgaaagtcgtcccctcagttcgggggtcttcgtcaacatgtgttgaggctccagtcttcggcgggtcaccattacttgacttagaaaggcgaacatctaggcaagggaaattgcagtgcgcctggtgcaaatggctttcttttttcatgatataccaatcagaatggaggaccctacctacgtacatgattgatagaagaactacctagggggtcggtcaacttgatgcgggagaggcatgagtgcagttcgatcttgtggtgtattcgtttgtagtgagtagggcctcttttttatcagtttgcctncgctctaatggaaagtctncaatccctatgccggttttgtcaacgaaccgcgtcttcggcccggattgactaacctaacccttacttaaggggg

SEQ ID NO: 246822 - DNA, 442 bp, Glycine max
ttcccgggtcgacccacgcgttcggcgccactcgatgtttccatttgcctgcatgcctttggtattgtggggtgtgggtcgtttaatggtgtcaagtcttgcgaacgtgagggtgccttaatggtaatcgggatgtttttgttgcacggctccatgcttgcgcattcaacgtgtgacatgcatccttttcattggcaccttagccctcgtggcttaagtgcttaccattggttcctggggtgcctaactaccaaacggtattcgtgtggctagtcagacccattccattcaggcctctttgttggggacgcttgaggatttcaaagtcccacacgtgaaccacgttagtcgtccatcataacggctttctgtggcacacgtgtggtgattgttctcttcgatgcggtgcatgcagtgaacgtgggtggtctagtgcccccac

SEQ ID NO: 246823 - DNA, 511 bp, Glycine max
  unsure (1)..(511): unsure at all n locations
ggttagagagtnctggagtatcgaaagtatctgtncgcactgccgtaccggtccggaattcccgggtcgacccacgcgtccgcccacgcgtccgcggacacagaaccgagcttgcagcagcgatttctcatttcattggtcacacttcaacaatggcgaaaaccttcaaatacatcatcctcggtggaggagtttccgctggttatgcggcgagggagtttgccaaacagggcgttaagccaggggagttggctatcatttcgaaagaagcggtagcaccttatgaacgtcctgctctgagcaaggcttacctttttccagagtcccctgctagacttcctgggttccatgtctgtgttggaagtggaggagaaaggttgcttcctgagtggtacacagagaaagggatagagttaattcttagcacagaaatagtaaaggtagaccttgctgcaaaatctctgatcagtgctggaggagaaacattcagttatcagattttgattgttgc

SEQ ID NO: 246824 - DNA, 507 bp, Glycine max
  unsure (1)..(507): unsure at all n locations
aggggaggnnttntttnnnnctattgaaacgaatctcttgcgactgcggtaccggtccggaattcccgggtcgacccacgcgtccggtttatttcacttgtatattcatcacagatacaggcattagctgccttgtggcggcttttcaggggtcggaaatggaatcctctgaggcagcggttagatagctttgactatactgtgaagcaacacattgttggatcacttttatttacaccacttctacttcttttaccaactacttctgttttctatatattctttagtatcatggacacaaccattaaccttgtctgtctactgattgaagtcactatttcggtaattcatgttaccccttataccaagatatttctttggttggtaagaccaagaagattcccttctggaatatggcttgaaattattggttgtcagagtaataagactgcttcttcaagtgctgatattactgatgaaatgaccttatacaaggagtcattgctt

SEQ ID NO: 246825 - DNA, 548 bp, Glycine max
  unsure (1)..(548): unsure at all n locations
aggggagaagctggagtccaactactgattctctacgcacgccgtaccggtccggaattcccgggtcgacccacgcgtccgcacccagaagaattgaatggccatggaaaatcaaaattttctagagtattgggttttgccactacttatgatgcttttgttgggtcattggatctctgttcaagctgccccttcaccctctctcatcactcaactccctggctttaacgccaatttcccatccaagcactattccgggtatataagtattgatggaaatgctgaaagtgggaagaacctgttctactactntgttagttcagaaagtagtccagagaaggacccagntgtgctatggctgaatggtgaccctgggtgctccagcttgaatggcttggttacgagcatggaccattcaaactttgaggcttgcaaattcaaaagggaatctacncactttgcatatcaatccttacagctggtctaaggtttccaacattatatatttggactcccctgctggtgttgggctctcttacttcaagaaa

SEQ ID NO: 246826 - DNA, 552 bp, Glycine max
  unsure (1)..(552): unsure at all n locations
agttgagttnagtgnngttttnccaatcganncacgtaagctcgtacgcctgcagtaccggtccggaattcccgggtcgacccacgcgtccgctatgaccaagtaatgaacctgaagagcatggtggccaaaaccgacgtattccaccttgtttttggcgtgtggaagaccccagccgaacgttgctttatgtggattggtggcttcaggccatctgaactcatcaagataattctgggtcaaattgagcctcttacggagcaacaaatacttgggatatgtgggttgcaacaatctacacaagaggcagaagaggctctttcccaagggcttgatgctcttaatcaatctctctcagagactataacatcagactctctgtggtgtcctccaaatatgactaactacatgggacaaatggctgtggcaatcaacaaactctccacccttgaaagctttgtgagacaggtacgttacatatatgctttgactagtactatattatataaccattatttctgctaactntttaaatgagtgcatatttacccc

SEQ ID NO: 246827 - DNA, 534 bp, Glycine max
  unsure (1)..(534): unsure at all n locations
ggttagtagagttgtgtcnaaccatgcagctctngcgcactgccgtaccggtccggaattcccgggtcgacccacgcgtccggagacattacagtttgtattattgtagaagagagagggagagagatggagttgagcatgaaagtgttggtgaaagttgcttcgttgcttttcctattggaattcactgcaacagttgttgatgctcgcttcgatccaagttcattcatcactcagtttctccccaatgctgaagccaacaattactatgttaaatccacaacaaaagcgtgctgtaacagctgtccttgcacaaaatcaatccctccacagtgtcgttgttcagatattggagaaacatgtcactctgcatgcaaaacttgtatttgcactcgctcaattcctccacagtgtcattgcagtgacataaccaaccttctgttatgaaccttgcaactcctctgaaaccgaagctcactaggaatattgagcatgttccagtgactaacatgtttgacagagtcactaggcttt

SEQ ID NO: 246828 - DNA, 529 bp, Glycine max
  unsure (1)..(529): unsure at all n locations
ggtnaaggttnagtgtgtacacggatggatgccctcacgcactgcacgtaccggtccggaattcccgggtcgacccacgcgtccgccaaccttcaacgtctcttcactctcttccttttttccctaattgcaccctctttggctcaacaatccttcagacccagagccctcgttgtcccagttaaaaaagacgcttccaccctccaatatattactcaaatcaaacaaagaacaccactcgtcccagaaaacctagtacttgacatcggtggccaattcctgtgggtcgattgcgacaacaactacgtctcctccacttaccgccccgcacggtgtggctccgcccagtgctccctcgccagatccgacagctgcggaaactgcttctccgccccaaaacccggctgcaacaacaacacgtgcggcgtcacgccagacaacaccgtcaccggcaccgncaccagcggcgagctcgcgcaagacgtcgtctccctccaatccaccaacggtttcaaccctatacaaaacg

SEQ ID NO: 246829 - DNA, 531 bp, Glycine max
  unsure (1)..(531): unsure at all n locations
aggttnagtttnaggtgatgttcgtgaccatagaagccatagaagcactctcgtaccggtccggaattcccgggtcgacccacgcgtccgcagaaagcaacactggaaattaagagagctgatggtaatgaggccatcattgctgaagaggcatataaaggggtagattgcaaagatggaggcccttttggtgctgttatagttcataatgatgaaatagttgctagttgtcacaacatggttctgtgtaacacagacccaactgctcatgctgaggtgacagcaataagagaggcttgtaagaagcttaagcagatagaacttgcagattgtgaaatatatgcttcttgtgaaccttgccccatgtgctttggtgcaatccacctttctcgaataaagaggttggtttatggagcgaaggctgaggcagcaattgctattgngtttgatgatttcattgcagatgcactgcgaggtactggattctatcagaaagcaacactggaaattaagagagctgatggtaatgag

SEQ ID NO: 246830 - DNA, 551 bp, Glycine max
  unsure (1)..(551): unsure at all n locations
agtnaagttnagtgttgtgtgacgatcgaangatgnacgctcgtagcgtaccggtccggaattcccgggtcgacccacgcgtccgcccacgcgtccggcagaactttggttcccaacctccattgcctccgcttctacctcgctaccatgatcattcctgagaagaaccgcaaggagatctgcaaatacctcttccaagagggagtttgctttgcgaagaaggacttcaatttggcgaagcaccctgagattgacgtgccgaatctgcaggtgattaagctgatgcagagtttcaagtctcgcgagtatgttagggagacttttgcttggatgcactattactggttccctaccaacgatgggaatcgagtttcttaagaacttaccctaaacctcctttcgaaaatgggcctggtaccttgaaagaacaggccaagccaacttgcaggcccttttgccggccattccgtgatcgccctaggggtccaccacgctttgaaggggagcgtaagtttggtggtgatcgtgatggataccgtggaaggtccccc

SEQ ID NO: 246831 - DNA, 547 bp, Glycine max
  unsure (1)..(547): unsure at all n locations
nggggnnatggaggaggtgtgtcgatcgganatgggaatagtgttaggcactgcacgtaccggtccggaattcccgggtcgacccacgcgtccggggaaagaacgaggcggacgactagaagcgagagctggtgttcaaggaggacgggcaggagtacgcgcaggtgctccggatgctgggtaacgggcggtgcgaggcgatgtgcatcgacgggacgaagaggctctgccacatccgcgggaagatgcacaagaaggtgtggatcgccgccggagacatcatcctggttggactcagggactaccaggacgacaaggctgacgtcatcctcaagtacatgcccgacgaggccaggctcctcaaggcctacggcgagctccccgacaccactcgcctcaacgagggcatcggcgccggcttggacgaggaggacgacgccaccgtcaacgactacatcgagttcgaggatgaggatattgataaaatctaatcaccctcgcaatcgcaattatcattcatatctgtctctgtctggctctagtagaa

SEQ ID NO: 246832 - DNA, 551 bp, Glycine max
  unsure (1)..(551): unsure at all n locations
aaggaagttagtgggttntacttganncatgaactctncgcctgccgtaccggtccggaattcccgggtcgacccacgggtccgcccacgcgtccggtcaaaaccaagctaaaaggtcatcagaagagaattactggtcttgccttttctcatgttctaaatgtgcttgtctcatctggagctgactctcagttgtgtgtttggagcacagatggatgggaaaagcaagcaagtaaattcctacaaatgcccagtggacgaccgtctgcacctcttgcagatactcgggtccaatttcatctagacccgacacatttactggctgttcatgtaactctaatagccctatattgtggcacccaagttggaatgtattaagcagttttcacctctggaagccgattcaatcacacatgctgcataactctgtggtaatccccacacattttgtgatgctctaaagatgtagtagtagtcgttcttactagtgccgctgctcatatattaaggtgtaataatacaacaatcttgatatcctncctcaccacacg

SEQ ID NO: 246833 - DNA, 461 bp, Glycine max
gtcgacccacgcgtccgtgcttcacaagccaaatctaacttgtctctgtgttctccgatctagtactactatcaatggccggaaaaggagatggtcctgctatcggaatcgatctcggcaccacctactcctgcgtcggagtgtggcagcacgaccgtgtcgaaatcatcgccaatgaccagggtaacagaaccacgccgtcttacgtcgctttcactgattccgagcgtttgatcggtgacgccgccaagaaccaggtcgccatgaaccccgtcaacaccgtcttcgatgctaagcgtttgattggaaggagattttctgatgcctccgttcagagtgacatgaagctatggccatttaaggtcatccctggtcctgctgacaaacctatgattgtggtcaactacaaaggtgaggacaagcagttctccgctgaggaaaattcttccatggttctcatg

SEQ ID NO: 246834 - DNA, 524 bp, Glycine max
  unsure (1)..(524): unsure at all n locations
agttagttnagtgtgtccacgctggatccctcacgcacgcacgtaccggtccggaattcccgggtcgacccacgcgtccgcttttccgtcagcaacattctttattctatatgcctcagcagtataaagaagttgcttactcataagcatgctcaatttcttgtttccctgttgaaactggttggtaatctttgaaccactcgcatacattaagtgggacctgcacaatgcaagacattattagactgaaatgatgataccgctccagcaaggataaaatgtacaacattcagatggttcttactttcaggatcttcttctcaaatatgtcaaacttgtttaagaataacatgaaggatgttttctgtgtagaaaagagaatgacatcatttttttgtgagataagtagaaaagttaactgacaaaaaagtacaaagggacctgagaaagaaaagtatggcatagaaatttctacgtaattgtagtagaagttgaagttaaaaaagactataaaaaggaaacct

SEQ ID NO: 246835 - DNA, 530 bp, Glycine max
  unsure (1)..(530): unsure at all n locations
gtgagttaaggtnttagtagttgtgcccatgaatcaatgcacctgtcgtaccggtccggaattcccgggtcgacccacgcgtccgcccatttgcattcaggcttagatcgcttaccacaccacaccatatggctgttactgtggccatgttacctcgttggtcggtgtttcttctttttctgtttgtcttgtgtagctcaggagcaaaggttgtcgccattgatgtacatgcagcaaagcgtctcatccagaccggttccatttatcttgatgttaggacggtggaagagttcaagaaagggcatgtggatgcagttaatgttcttaacattccatacatgttgaatacacccaagggcaaggtaaagaatccagactttctgaaggaggtttcatcagcttgcaacaaagaagatcatctcattttgggttgtcaaagtggcgtgagatctctgtatgcaactgctgatcttctgtctgaaggttataagaatgtgtaagacatggtaagaggttatgtggactgcgtt

SEQ ID NO: 246836 - DNA, 545 bp, Glycine max
  unsure (1)..(545): unsure at all n locations
aggggagtgagtgggtgcgacgtataggatgactcacgcacgcacgtaccggtccggaattcccgggtcgacccacgcgtccggcggtttcctttgttggtgttgctgggaactgttttcctggcatcagtttgtgtctcattaaaggtgagagaggatgagaataaccctttctacttgagaagctctaacagcttccaaactctctttgagaaccaaaacggtcgcattcgtctcctccagagattcaacaaacgctccccacaacttgagaaccttcgagactaccggattgtccagtttcagtcaaaacccaacacaatccttctcccccaccatgctgacgccgatttcctnctctttgtccttagcgggagagccatacttaccttggtgaacaacgacgaccgggacctctaccacctttaaccttgccattcccaaaggaatccaacttggaacacattactattgggtaacccttacgaccaccagaatctcaaaataatcaaacttggcatacccgtaacaaacctggcagatat

SEQ ID NO: 246837 - DNA, 548 bp, Glycine max
  unsure (1)..(548): unsure at all n locations
tggggtagtnaggtgtgtgcngccgttgtgaagatggtatgctcgtacgtaccggtccggaattcccgggtcgacccacgcgtccgccaattcgtgctgatcccaggctatttgaatatccagaaaatgcatgagatgacaagaatgaaaagaacaccattgtcttcaagctacatgttcgttgtcaagtgggtcaacctcgtattactgtaaaatcagataaactgaagtggttacctaatgggagtgagcttccctgtgaagatgtcaaaccaaatgcaggttcaaaaccaaaaacatttacatctttcacttgcagccaagattcacttcctgaattttccaacaattcaattggtcttacatattcggatattatattggctaaacttggacctggtcaggaaattgaacttgaagcacatgcagttaaaggcattggtaagacacatgcaaaatggtccccagttgccactgcttggtaccggatgcttccggaggttgtactcttggaagcttgtgaggatgagctggctgaagaataaaaa

SEQ ID NO: 246838 - DNA, 544 bp, Glycine max
  unsure (1)..(544): unsure at all n locations
ngtnttttgtggaggaggtgtgtcgactggattaaggatgctggtacgcactgcacgtaccggtccggaattcccgggtcgacccacgcgtccgtaaggatcgcctgcctcctgcaaattgtttcggggaaggccatgtcgatatcaaagacttgcaggtcagatatcggccaaacactccttcggttcttaaaggcattaccctaagcatcaacggaggggaaaagattggagttgttggtcgaacaggaagtggaaaatcaactttaattcaagttttcttcaggctggtggaacctacaggaggaaaaataatcattgacggcattgacatatccgacttggggcttcatgatcttaggtcacgggttggtatcatccctcaagagcctgtactttctgaaggaaccgtcagaagtaccattggttcaactggacagttcacagatgaacagatatgaacaagttggaaccgtggcaactaaaaaaatgcagtgcgttttagccctgagaacctggcaccttaatggggtgataatggaaa

SEQ ID NO: 246839 - DNA, 526 bp, Glycine max
  unsure (1)..(526): unsure at all n locations
aggtaagttnaaaggagttgtgcttttgatacttggtacctgctgtaccggtccggaattcccgggtcgacccacgcgtccggcaccaactatccaactcacacgaaacctaatggacaagggcatgattggaagcattggtcgagccacatattaccaacctatgcagctgtgggacaaagccacagggaatctcacagatttcacaacccatttttcttttgtcatagattcacagaaccgaagtaaatatggagatgggattgcattcttacttgcccctgctggttcaaagattcctaatgccacaaaaggagcttctatgggtcttacacttgataaccaacaattgaactccacagacaattcatttgttgctgtggagtttgatatctatcagaatggctgggatccaccccatgaacatgttggaatagacatcaactctatgagatctgcttctaatgtaacatggntggctgatatcaaagaagggaaactcaacgaggcctggatcagctacaac

SEQ ID NO: 246840 - DNA, 525 bp, Glycine max
  unsure (1)..(525): unsure at all n locations
ggttagtttaaagtgggtcgtggcatgacccatgnagcctcgtcgtaccggcccggaattcccgggtcgacccacgcgtccgctcaaaattgcatcagagacctcgcctaaccctgcagcttcaattgggttatatcttgactgtggttccatctatgagacgccattttcaagcggggcttcacacttgctagagcgaatggctttcaaaagcacaacaaaccgtagtcactttcgcattgtaagggaagtagaagcaattggtggtaatgtaggagcctcagcctctcgggagcaaatgggttatacatttgatgccttaaagacctatgttccacaaatggttgaattactggttgactgtgtaaggcacccagccttcttggattgggaagtcaatgaagagcttcggaaagtaaaagcagagcttggagaactctctaacaatccccagggcttgcttttggaagcaattcactctgctggttattctggtgcattggcttatcctcttttggctcctga

SEQ ID NO: 246841 - DNA, 229 bp, Glycine max
ttgtcttggcttttattatgggttctttggcccctggagaatcctcaaaggattttgggaatggtccagttggcacctaaggccctgagccttacatggttgcccacaatttgatattgtcacatgcagctgctgttcaaagataccgagagaagtatcaagaaaagcaaaagggaaggattgggatcctcttggattttgtttggtatgagcctcttaccagatcaaa

SEQ ID NO: 246842 - DNA, 535 bp, Glycine max
  unsure (1)..(535): unsure at all n locations
gtttaagtgggtggttcgccataggatcttgtaagctcgtcgtaccggtccggaattcccgggtcgacccacgcgtccggtctcttcctcctctctctgcatcgctgcgttttccgaatcgaaaggtgaggttagtaagtaacaatggtggagaaggccaagggtaggaaggaggaangttgtcactcgagagtacaccatcaaccttcacaaacgcttgcatggctgcacatttaagaagaaggctcctaaagcaattaaggagataaggaagtttgctcagaaagcgatggggacgaatgatgtaagagtggatgtgaagctcaacaaggctgtgtggagccaggggatccggagcgtcccaaggaggattaaggttcgcattgctcgcaagaggaacgacgattaagatgcaaaggaagagctctaatcccttggtactggcgtccaaaatcccaaggaagagctcaaagggtttggaaaccaagggtatngatgatgaagattgattatgtnngtggtatatatctngttt

SEQ ID NO: 246843 - DNA, 548 bp, Glycine max
  unsure (1)..(548): unsure at all n locations
tgttatagtnagtagggtgtgtcgatcgaaactcgtaggctcgtacgcctgccgtaccggtccggaattcccgggtcgacccacgcgtccggtcttcactactatcctcctggaagggtgttgcattttcagcatttggtttgggagttgtcactctactcatgcacatcttgatcatgttctcacaatctgagcgttcaaccccttccaaggttgcccctacaaaaaagtccaagaatagcgaacaactggaagctagggataacaaacaagactagatcacacacgttacctgaatattctatacataagagaattcttctgaggtcacatcttgaacttgttttgcatttatgtgcttttttttataaaaaaaattgcattaacgtgtgtttagggactcactaccccctttctttatttgtttgctttggaattgtacctcgtatgtgttcagttcttgtattatgtattatgcatatactattcattactttcaaattaattaagatgaatttgtataaaaaaaaaaaaaaagggcggccgcn

SEQ ID NO: 246844 - DNA, 542 bp, Glycine max
  unsure (1)..(542): unsure at all n locations
tgttttagggaaggagttgtgtngtttgnattatttatgctcgtacgcctgccgtaccggtccggaattcccgggtcgacccacgcgtccgcccacgcgtccggtgctacaatacaaacaatggcagctactcaggaagatgtgaagcttttgggtattgtgggaagcccatttgtgtgcagggtccagattgcccttaagttgaagggagttgaatacaaatttttggaagaaaatttgggcaacaagagtgatttgcttctcaaatacaaccctgttcacaagaaggttccagtgtttgttcacaatgagaagcccatagcagagtctcttgtgattgttgaatacattgatgagacatggaagaacaaccccatcttaccttctgatccttaccaaagagccttggctcgtttctggtccaaattcattgatgataagattgtgggtgctgtatggaaatctgttttcacggttgatgagaaagagcgtgagaagaatgttgaagaaacatatgaggctcttcagtttcttgagaatgg

SEQ ID NO: 246845 - DNA, 544 bp, Glycine max
agggggagtagtagggtgtgtcgatcgaactatgacgctcgtacgcactgcagtaccggtccggaattcccgggtcgacccacgcgtccgatttattaataattagaactttcttttttcttaaaaaaaaaaaaagtaaataaaaagatttgatagaatcgtaatttcaattcgattatatagatacatagaaaaaaagaatatataataatagaagtaggaattattgatagaaattcattcaaaaatgaattcttaattaatagtaatagtaatataaaagattttatttagaagagaatatctattataatagattatatctatatagatataatctattatatacatttattttgaattacccctaatagaatatcaggccgatctctgtacaaataaaataacatatcaagtacattaaaaacgcggatatagtccaatggtaaaatttctctttgccaaagagaagacaccggttcgaatcccgctattcggccctacttaggtatttaaatatgtatttaaaaatcataggagaaaa

SEQ ID NO: 246846 - DNA, 543 bp, Glycine max
  unsure (1)..(543): unsure at all n locations
aggggnnagtntagtaggtgtgtcgatcgannataggtagctggtacgcctgcacgtaccggtccggaattcccgggtcgacccacgcgtccgaaactcctcaacatctccaaaatttctgaccagagaagaagctgaccagattcctttctcatgcaaacacctaccatcccttctcaaattcttctccatcccacaacactctccccaagccaaggcaatgaaatataccctcaaacaatgtgaatttgaacccatggaaggagagaccaagttctgtgccacttcgttggagtccttgtttgattttgcgcactatctgtttgggtccaatgcacaattcaaagttctgaccactgtccatctcacaaattcaacagccctgctacagaactacacaatctcagaagtgaaagtgatttcagttccaaatgttatagggtgtcaccccatgccttacccttatgcagttttttactgccacagtcagcatagtgacaccaatctctatgaggtgatggtagaaggtgagaatgganggag

SEQ ID NO: 246847 - DNA, 529 bp, Glycine max
  unsure (1)..(529): unsure at all n locations
agtaaggtnnagtagttcgtggcatggagctattgatactcctcgtaccggcccggaattcccgggtcgacccacgcgtccgaaaaaaaaaaaaaaaaaaaaaaaaaaaattaaaaaataaaaaaaaaaaaaaaaaaaaaaaaaaaaaaggaaaaaaaaaagggcggccgctctaaaggatccaagcttacgtacgcgtgcatgcaacgtaatagctctccaatagggtcacctaaattcaattcactggccgtcgtttaacaacgtcatgactgggaaaaccctggcgttacccaacttaatcgccttgcagcacatacccctttcgccagctggcataatagcaaaaaggcccgtaccgatcgcccttccaaacagttgcgcaacctgaatggccaatggaacgcgccctgtagcggcgcattaaacgcggcgactgtcatggttacccccaaagtgaccgttacacttgccaacgccctatcgcccggtcctttcgccttcttcccttcctttctcggcacgttcc

SEQ ID NO: 246848 - DNA, 522 bp, Glycine max
  unsure (1)..(522): unsure at all n locations
agtnagtnnagtgtgttcnaccatggatcctcagcgcactgccgtaccggtccggaattcccgggtcgacccacgcgtccgcccacgcgtccgcatttgagagatgtgtttggcaaagctatggggcttagtgaccgagatatcgttgctctgtctgggggtcacactattggagctgcgcacaaggagcgttctggattcgagggtccctggacctctaatcctcttattttcgacaactcatacttcaaggagttgttgagtggtgagaaagaaggcctccttcagctaccttctgacaaggcacttttgtctgaccctgtgttccgccctcttgttgagaaatatgcatcggacgaagatgccttcttcgctgattacgctgaggctcaccaaaagctttctgagcttgggtttgctgaagcctaagcaacgttttggggattgttggagaggcacggtgcccataatatttctctcataaattctatggtcatggtttctaatgcgccactgtgggtt

SEQ ID NO: 246849 - DNA, 531 bp, Glycine max
  unsure (1)..(531): unsure at all n locations
agttagtnatttagtggattcgacacataggaagcatgacgcccgtcgtaccggtccggaattcccgggtcgacccacgcgtccgcacactagtatttctcataaaagggagattaccttggcagggttatcagggtgacaataaaagttttcttgtttgtaagaagaaaatggccacttccccggagttgatgtgctgctttgttcctgctccatttaagcagtttcttgaagctgttactaatatgagatttgatgaggagcccaattatgccaagcttatatcactttttgaaagcttgattgaaccatgcactccgttgagacctattagaatagatggagctttaaaggttggccaaaagcgaggaaggatgcttataaatctggaagaagatgagcaacctaagaagaaagtgcgattggggagtcctgctactcagtggatatcagtgtataatgctcgccgtcccatgaagcagagatatcactataatgttgcagacactaggctacggcagcatgtagacc

SEQ ID NO: 246850 - DNA, 542 bp, Glycine max
  unsure (1)..(542): unsure at all n locations
aggggnaggaggtgtgtcngacgatagaatgctggtacgctcgtcgtaccggtccggaattcccgggtcgacccacgcgtccgttcggataccgttgtggagccttacaacgctaccctctctgttcaccaacttgttgagaatgctgatgagtgtatggttttggacaatgaagctctctatgacatctgtttcaggactttgaagctcgccacgccgacatttggtgaccttaaccacctgatatctgccaccatgagtggagttacttgttgtctacgtttccctgggcaattgaactctgatcttcgcaagcttgctgtcaatcttatcccattccctcggctccatttcttcatggttgggtttgcgcccttgacatcaagaggatcccagcaataccgtgctttgactgttcctgaattgactcagcaaatgtgggatgccaagaacatgatgtgtgctgctgaccctcgtcacggtcgttatttgactgcttcagctatgttccgtggtaagatgagcacaaaagaggtggatga

SEQ ID NO: 246851 - DNA, 549 bp, Glycine max
  unsure (1)..(549): unsure at all n locations
agtnnntagtnaggtgttgttcngccaatcgtatgctggtacgctcgtggtaccggtccggaattcccgggtcgacccacgcgtccggtcttaccgtctcttcctcttcacttcttataccgtcngccccaaacgacgccgttttctgttctcttatgtaaacgccgttcgagaacaaaccaaataaagaaaagaaaatcagttattgccgttgttgttttgtttccggttcggtttatttcaatgggatcgggcggcgttgacggttggaccgggcatggacatgccgatcatgcacgacagcgaccgttacgatctggtacgcgacatcgggtccggaaatttcggcgtggcgaggctgatgcaggataaacaaaccaaggaactggtcgccgtcaagtacatcgaaaggggtgataagattgatgaaaatgtaaagagggaaatcattaatcacaagtctctgaggcatcctaacattgntagatttaaagaggtaattntaacacctactcatcttgctattggtaatggaatatgcaatctggg

SEQ ID NO: 246852 - DNA, 542 bp, Glycine max
  unsure (1)..(542): unsure at all n locations
aggggttntaggngagtgtggtgtgntcgtttgaanctcgtatgctcgtacgcctgcagtaccggtccggaattcccgggtcgacccacgcgtccggtggaagatagggttacgccgatgcgcatcgaaatcatcatcagagccaccagaaccctagccgctctcggttagaacgtaaggagaatcagggagcttacctacgtggctcagatgaggctcaagtttcctgagaacagcgttgaactctatgctgaaaaggtcaacagtaggggtctttgcgctatagcacaggctgagtctgtgcgatacaatctccttgttggcctagctgtgcgcaaggcttgctatggtgtcttgaggtttgttatggaaaggggtgctaacggatgctaggtcagtcgtagtggctaattgagagcccatatagcctaagctactgaagttcagatggttacatgatatcttcatggccacctgttgaagatacatcgactctgcagagagacatgtgcttctgagacagagtgatctggctcttaaga

SEQ ID NO: 246853 - DNA, 529 bp, Glycine max
  unsure (1)..(529): unsure at all n locations
tgggtagttaagttnagtgtattcnacgcatggaactcgtacgcactgccgtaccggtccggaattcccgggtcgacccacgcgtccgctctcatgcttttttccacttgcaaacttcaaattcactctgacagtttttgcagctaagtaagaagaacttaacagacatataaacatagtgatcgttatgtctacgcaaccaaagcttggtcggattcccagtatcagagaccgagttgaagacactctctctgctcaccgtaacgaactcatttctctcctctccaggtatgtggctcaagggagagggattttgcaaccccataatttgattgatgaacttgacaacatccctggcgatgatcaagcaatagtggatcttaaaaatggtccctttggtgaaatcgtcaagtctgcaaaggaagccatagttttgcctccttttgtggcaatagcagttcgtccaagacctggtgtttgggaatatgtccgtgttaatgtctctgagctcagcgtggagcaattaatn

SEQ ID NO: 246854 - DNA, 523 bp, Glycine max
agttagtttagtagtttccgcgcatgaagtatgtagcatcgttctaccggtccggaattcccgggtcgacccacgcgtccgcccacgcgttcgcccacgcgtccgcaattatcttcacaaactagtaatattattcttcgaatccattacattattcataatgggtattttcacatttgaggatgaaaccacctcccctgtggctcctgctaccctttacaaagctctagttacagatgccgacaacgtcatcccaaaggctgtcgaagccttcaggagtgttgaaaaccttgaggggaacggtggccctggaaccatcaagaagatcactttcgttgaggatggagaaagcaagtttgtgttgcacaaaatagaatcagttgatgaggcaaacttgggatacagctatagcgtaattgctggagttgggttgccagacacactgtagaagatcacattcgaatgcaaattggctgatgtcgccaacggagggtcttttgggaagctaactggcaaataccaa

SEQ ID NO: 246855 - DNA, 526 bp, Glycine max
  unsure (1)..(526): unsure at all n locations
ggttagtnaagtnagtgggttcnacgactgatgagtgacgcactgtcgtaccggtccggaattcccgggtcgacccacgcgtccgcccacgcgtccgcccacgcgtccgcccacgcgtccgcccacgcgtccgcacgttaaaaaaaaaaaaaaccaaaagcatgggtcagggaacaccgggcggtctgaaccggcagggtcttccgggggaccggaagccggacggcggcgacaagaaggagaaaaagttcgagccggcggccccgccggcccgcgtggggcgtaagcagcggaagcagaaggggccggaggcggcggcgcggctgccgacggtgacgccgctgtcgaagtgcaagctgcggctgctgaagctggagcgcataaaggactacctcttgatggaggaggagtttgtggcgaaccaggagaggctgaaaccacaggaggagaaggccgaggaagatagatccaaggtcgatgatctcagaggttcccctatgagcgttggtaacctcgaggaactcat

SEQ ID NO: 246856 - DNA, 547 bp, Glycine max
  unsure (1)..(547): unsure at all n locations
aggggnagtnagtagtgtccngacaatagatagtatgtacgctcgtacgtaccggtccggaattcccgggtcgacccacgcgtccgaaaactagtattttcttagccacacgtactcttccacaatgtcttcctcaaagctcttcaccacttttcttttctcactaaacttagctctccttctccaaacatcttttggagccgaccctctcttccatttctgttcaaattctgagaacttcacagccaacagtccctatgaatcaaacttgaaaacactcatcaactcactcatctacaagaccccttcaactgggtttggtgttggctctgtgggccaataccaaaaccaaaaggcatatgcgcttgccctttgccgcggcgacgtgtcggccctagagtgcaaaacttgtgtctctgaggcacccaaagaaatcctcagtcgctgtccatacaacaaaggtgccatcaattggtacgactattgcatgttcaagtacttggacactgacttncttgggcaaaatttgacacacanaccagttctt

SEQ ID NO: 246857 - DNA, 541 bp, Glycine max
  unsure (1)..(541): unsure at all n locations
aggttnnaggggagtggtgttcngactatcggatgcagtgacgcctgtcgtaccggtccggaattcccgggtcgacccacgcgtccgggatggtgaaccactttgttcaagagttcaagagaaagaacaagaaggacattagtggaaaccccagagcacttagaaggttgaggactgcttgtgagaaggccaagagaacactttcatcgactgctcagaccaccattgaaattgattctctatacgagggaattgatttctactccactgttactcgtgccagatttgaggagctcaacatggatctcttcaggaaatgtatggagccggtggagaaatgtttgagggatgctaagatggacaaaagaagtgttgatgatgttgtcctttgttggtggttctaccagaattcccaaggttcaacaactgctgcanngacttcttaatggaaaagagcttttgcagagcattaatcccgattgagcttgtgcatatggtgccgctgttcaagctggaatctttaatggtgagggccattaga

SEQ ID NO: 246858 - DNA, 547 bp, Glycine max
  unsure (1)..(547): unsure at all n locations
ggggtagtagaggagtatgtgntcgtttgannctcgtaggctcgtacgcctgcagtaccggtccggaattcccgggtcgacccacgcgtccggactcgttcttcttcgtcgttatcttcttcttttgttgtttgtgtgtttgttttttctctcacctgaaaatgtcttgctgcggtggtaactgtggttgcggaagcgcctgcaagtgcggcaacggctgcggaggctgcaagatgtacccagacttgagctacaccgagtcaaccaccaccgagaccttggtcatgggagtggcaccagttaaggctcaattcgagagtgctgaaatgggtgttcccgctgagaacgatggctgcaaatgtggagctaactgcacctgcaacccctgcacttgcaagtgaggtgttggagagctaaagcttcaagcagagatggcccttagaaataatgataaaaactatatgtagtttcaaaacttcaaaattatgtagtatgtattatgttgcactctggtgttttgtgtctaaacaaacacccttagaataaa

SEQ ID NO: 246859 - DNA, 537 bp, Glycine max
  unsure (1)..(537): unsure at all n locations
aggggaggagtggattgtgattganctaggatagtcgtacgcctgccgtaccggtccggaattcccgggtcgacccacgcgtccggctagctagcaagcaagcacagagatggaggcaaagcgaggccatgccctcatgtgcttggcacgtgtttcactcttcctctgcgctctaaccctatccgctgctcacggaagcaccacggttcaagacatcgcgagaaagttgaaactcggggacaacgagcttctgcgcacggagaagaagttcaaggttttcatggagaattacgggaggagctactccacagaggaggagtatttgcgccgtttggggattttcggccagaacatggtcagagcggccgagcattaagcgctggaccccaacgncggtcacggcgtaacgcagttctcgatctcaccgaggacgagnttgagaagctctacanctgcgtcaatggcggctttccgtcatcgaataatgccgccggcggtatttgcgccgcgtttgaggtggacgggcttgccgagaaa

SEQ ID NO: 246860 - DNA, 540 bp, Glycine max
  unsure (1)..(540): unsure at all n locations
agcttcagggaggtgtgttcnaccactgatncctgnatagctgtacgcactgccgtaccggtccggaattcccgggtcgacccacgcgtccgctttttctcaaacaaacgactactttcctttcctgctgcgttcattccaaattgcaaacccaccataatatctagcttcttgtgaaggctgctagtttgatttagaagttgatattgataatttgctgcgatgggtggccaaaggagtggttatggtaagcgttcccactctcaatctgaccatgataatgggccaaataaaaggaggaatcatggtgatgacagagagcagtttgtgattgatttggaggatactgtgtatcgatacgtgtgcccgggtcgaaagattggcagtgttattggtaggggaggtgagattgttaagcagctgacggtggagactaaagctaagattaggattggtgagacggtgccgtggtgcgaagagcgtgtcgatactatttatagtcccagtgatgagactaatgcatgtgaaggtggtggcaan

SEQ ID NO: 246861 - DNA, 527 bp, Glycine max
  unsure (1)..(527): unsure at all n locations
aggggagttnnagtgaggtcgtgatcatagaatgcatgnagcctgtcgtaccggtccggaattcccgggtcgacccacgcgtccgggagaagcggactgggaacaagtgttacatgctttccgctagagatctgagcattatatggggtgacactactcattattgggagtggacaaccctaccagagtccaggttcgaagaagttgctaggcttcgagctgtgtgttggtttgacattactgggaggatgaacacccgcgttttgtcgccaaatactaattatgcagcttttcttgtgttcaagatgatcgatgccggtggatttcactacgatcctgcggtgttatcagtaggtattttgggaggcaatagcagtaccaaaaatgtttgtttggatcccaacttagtagataatcgacttgatgatagattccatggactccaacgtccaactgtgaggagcgatgggtggctggagattgagatgggtgagttcttcaatccaggcctagaagaagatgagttg

SEQ ID NO: 246862 - DNA, 530 bp, Glycine max
  unsure (1)..(530): unsure at all n locations
ggggggaaggaaggtnaggtgtttcnaagccctgcccctaagcactgcctaccggtccggaattcccgggtcgacccacgcgtccggcccaaagaaagaagaagatggcgtccgtttgcaaaggtaagagctcatggcctgagttggttggagtggaaggaacggtggcggtggctacaattgagagggagaatcctttggtggatgctaacactgtgcttaaaggatccatcgtcaccgctgattttcgatgtgatagggttcgggtttgggtcaccaaacatggaattgtttatcaggctccaagaattggataagaagtgtttacactaaagcacttcatatatatgttatgagtcatgaatataatagtatttaaataaggagttattcttccaattatgttatttgattgaaaataaaaacatgactataagaaaaaaaaaaaaaaaaaaaaaaaaaaaaaaaaaaaaaaaaaaaaaaagacaaacaatataaaggatccaaacttacntacactttcattcctc

SEQ ID NO: 246863 - DNA, 515 bp, Glycine max
  unsure (1)..(515): unsure at all n locations
agtaaggtagtgggttcntcctagtatgcatcgcgcactgctgtaccggtccggaattcccgggtcgacccacgcgtccgcaactggacagtggtttgtgaccactgttggtgtgttgggaaaccctggcaaggataccatcgacaactggttcaagattgaggagtatgatgatgattacaagctcgtgttttgccccacagtgtgcaacttctgcaagcctttgtgtaggaatgttggggtgtttagggatagtaatgggaaccagcgcgtggctctcactgatgagccttacaaagttaggttccagccatctgcttgaagcttcattaatgcatatgcatgaaaaaagatatgtaattaatgagaacatgatatttcatctggaaaattaagcatcatcatcatgcacgaataaaattgatgcttttgtcaaaaaaaaaaaaaaaaaaaaagggcggccgctcttagagatccaagctaacttaccgtgcattgcacgtaatagttttttt

SEQ ID NO: 246864 - DNA, 536 bp, Glycine max
  unsure (1)..(536): unsure at all n locations
tggggnagtgaggtgggtgtgccgatcgatcatgtatgctggtcgtaccggtgcggaattcccgggtcgacccacgcgtccgttcaacctggtgctgatcaccaacgtcgcacgtgcaggggatatcgtgcgcgtgagcgtgaaaggaagcaaaaccgcgtggatgagcatgagccgcaactgggggcaaaattggcaatccaacgcggatctggtgggccaggccctttcctttagggttaccggcagtgaccgacgcacctcaacctgctggaacgtggcaccacctaattggcagttcggacaaaccttcaccggaaagaatttccgtgtctaaatccaagaagaagaagaagaagaagacaagagagaagaaaataacaatactcttaaattaatggctcctggtatttttgagtttgtttgcttcagtttccctgcttctaacttccctctattttcctgggaaagctttggaatgggtggtaaggggttaaaagaaaattacgagtaaggtagttttaggacaagtataa

SEQ ID NO: 246865 - DNA, 275 bp, Glycine max
cgtgattcccggcaagtgaacaccgatccggtacactgtttgtcgaatgcttttttctcttccggaatggataccgttgaagcaactccatcagaggatgtgaagggatttatacgataaaatgcttgactctgtaaaagttaaacgatcaatgcctccaaatgcttggttatggtcaatgattgcaaattgcaaacagcagcacgatattagacttctgttcgacattttgcagaaccttcgcagatttaggttgtcgaatcttcgaattcatg

SEQ ID NO: 246866 - DNA, 536 bp, Glycine max
  unsure (1)..(536): unsure at all n locations
agttttaggttagtggtgtgtgtcgactgatgactcacgnccgtcgtaccggtccggaattcccgggtcgacccacgcgtccggccacctggaacccacaactgagtcgtgtttcggttctttcacactgaaccatgcaagttttctgtaacgctcgccgagcctcttggcttctcctctttcctcatctccgaacctcggaagctcctcactccaccgggctctctctcttctcagggctcgcgcaacgtgattcccggcaagtgaacaccgatccggtacactgtttgtcgaaggcttttttctcttccggaatggataccgatgaagcaactccatcacaggatgtgaaggaattatacgataaaatgcttgactcttgaaaagttaaacgatcaatgcctccaaatgcttggttatggtcaatgattgcaaattgcatacagcagcacgattttagacttctgttcgacattttgcagaaccttcgcagatttaagttgtcgaatcttcgaattcatgacaattttaatgcg

SEQ ID NO: 246867 - DNA, 533 bp, Glycine max
  unsure (1)..(533): unsure at all n locations
aggggnagtagtagntnnnnctttganttatgaagctcttcgcctgcagtaccggtccggaattcccgggtcgacccacgcgtccgatctccagctgcttccttatcagaagcgcttcgccccagagattctcgcttcctctccttcaatccttcttccaacgctattaattacaaaattaacctctccgcttccctccgatccattcactccctccctcttaaaacctccttgcggatcaaatgctccaaacagatgggaatgaagtcctgcaaagaggacagtgcttcatgatctttatgagaaagaagggcagagtccatggtatgataatctctgcagacctgttacagaccttcttcctcttatagcaagtggtgtcagaggcgtcactagcaaccctgcgatttttcagaaagctatctcatcatcgaatgcttacaatgatcagttcagggaacttgtgcaagcagggaaagacattgaaagtgcctattgggaacctggaatggaggatatccaagatgcttgcc

SEQ ID NO: 246868 - DNA, 535 bp, Glycine max
  unsure (1)..(535): unsure at all n locations
ggtnaaggagtaggtgtgtcgatganaatagtagctctacgcctgcagtaccggtccggaattcccgggtcgacccacgcgtccgcccacgcgttcgcggacgcgtgggcgggctttgtgccggcgacgcatgattcaaatttctgccctatcaactttccatggtaggatagtggcctaccatggtggtgacgggtgacggagaattagggttcgattccggagagggagcctgagaaacggctaccacatccaagaaggcagcaggcgcgcaaattacccaatcctgacacggtgaggtagtgacaatgaataacaataccgggctcattgagtctgataattggaatgagtacaatctaaatcccttaacgaggatccattggagggcaagtctggtgccagcagccgcggtaattccagctccaatagcgtatatttaagttgttgcagccactttagaaactgtgttggacaacattcagttgccatctaaatctcgctaaggtaaaaaaaatacaaaagctttcaataa

SEQ ID NO: 246869 - DNA, 517 bp, Glycine max
agttagtttggtgattttaccaatgatactcgtgcgcccgccgtaccggtccggaattcccgggtcgacccacgcgtccgcccacgcgtccgcgcaaactcgccgtgtatctcattcccttccctcgtctgcacttcttcatggtgggatttgccccactcacttcccgcggttcccaacagtacagggctctcactgtccctgaattgacccaacaaatgtgggatgctaagaacatgatgtgtgcagctgatcctcgccacggtcgttacttgacagcttctgcgatgttccgtggaaagatgagcacaaaggaggttgatgaacagatgatcaatgttcagaacaagaactcatcgtacttcgtggaatggatccccaacaatgtgaaatccactgtctgggacatccctccaactgggttgaaaatggcatcaaccttcattggcaattctacctctattcaagaaatgttcaagaaggtgagcgagcaattcacggctatgttccgcagaaa

SEQ ID NO: 246870 - DNA, 514 bp, Glycine max
agttagttagtaggttgtgccatgagcctcgacactgtcgtaccggtccggaattcccgggtcgacccacgcgtccggggacacgtagcgaaagatcgtgaaatttaagcttacggggttattttttgacatagccacgtgcatgaggggcagttacgggattatagtaaacacgtgtgaagccatcgaagagagtgtgttggaagcgttcaacgaagggttgatggaaggaaccacgccgaaagtgttttgcattggacccgtgatttcttctgctccttgtagaaaggatgataacgggtgtctgagttggttaaactcgcaaccgagtcagagtgttgtgtttttgagttttggaagcatgggaagattctcgaggactcagttgagagagattgctattgggttggagaagagtgaacaaaggtttctgtgggtcgtgaggagcgagttcgaagagggtgagtcggcggagccaccgagtttggaggagttgttaccaggaaggtttttg

SEQ ID NO: 246871 - DNA, 527 bp, Glycine max
  unsure (1)..(527): unsure at all n locations
aggggnagtnagtgtcgtcnaactctgaagctggtacgcccgccgtaccggtccggaattcccgggtcgacccacgcgtncggttgcagtcactgctttggttagatcagaaccagatcgtgttctcttcttccattggcaaacatggcaactcaaatgagcaagaagagaaagtttgtggcggatggaatggtcttcgccgactgacgaggtctgacactgagtgcggagacggtactccgcgtgaggttaggttacgccgatgcgcaccgagattatcatcagagccaccagaacccaagccgttctcggtgagaagggaaggagaattagggaacttacctcagtggtgcagaagaggttcaaatttcccgagaacagtgtcgagctttatgctgagaaggtcaacaacagaggcctctgtgccattgctcaggccgagtcgcttcgctacaagccttctcgtggccctgctgnntcgcaggcttgctatggngttttaagatttgtgatggaaaagtgggccc

SEQ ID NO: 246872 - DNA, 544 bp, Glycine max
  unsure (1)..(544): unsure at all n locations
tgtntaaggtaggtggtgttccgccgataggatgtacgtacgctcgtacgtaccggtccggaattcccgggtcgacccacgcgtncgtgcagatgttgctactgtcaattccactgatggaaacaatcctactaaggtggtttctgtgcctaaattcctcttcatatgtggatcaaatgttgtccaaaaaggccttgctagtggtgtcacaggtatggctggtcttggcagaactaaagtttctcttgcttctcaatttgcctcagctttcagctttcatagaaaatttgccatttgcttgagttcttctactatgacaaatggtgtaatgttctttggtgatggcccttacaattttggttatttgaactcggatctctccaaggttctaactttcacccctctcatttcaaaccctgttagcactgctccaagttatttcccaaggngagcccctcagtggaataccttaattggggtgaaatctaattaaagtctcagacaaaaatgtagcattgaacacaaccctgttgtctatcgatag

SEQ ID NO: 246873 - DNA, 546 bp, Glycine max
  unsure (1)..(546): unsure at all n locations
aggttnagtttaggagtntgtgntgatcgannctcgtaagctcgtacgcctgcacgtaccggtccggaattcccgggtcgacccacgcgtccgggatggtcgcacccttgccgattacaacatccaaaaggaatcaaccctccatctcgtgcttcgcctcaggggtggcatgcaaatctttgtcaagactttgaccgggaagaccatcacccttgaggtggaatcctcggacaccattgataatgttaaggccaagatccaggacaaagagggcatccccccagatcagcagaggctgatttttgccggtaaacaacttgaggatggaagaacccttgctgattacaacattcagaaggaatccacccttcacttggtgcttcgtttgagaggtggtatgcagattttcgttaaaactttgaccggaaagaccatacccttggaggtggagagttcagataccatagacaatgtgaaagctaagattcaggacaaggaaggtatcccaccagaccaacagaggcttatctttgccgggaaacagct

SEQ ID NO: 246874 - DNA, 540 bp, Glycine max
  unsure (1)..(540): unsure at all n locations
tggggnggtgaggtggggtgtgccactganaatgtaagctgtacgcctgcagtaccggtccggaattcccgggtcgacccacgcgtccgcacttgacccctaaattcgtgcccattcccacaactgcacattcttctttctatatattccaaatcccttttccgatttccaccaaaatctaaaccgaaattcccaattacccttcccaattttcaccaaaacctaatactcccacaccaatcttcgatcatggacgccgattcacaacctcaacaactcgaagagagaacagaggagcaagaactgaagtacctggaattcgtgcaattcgcgaccatacaggctctgatgcgctgcgccatcctctactcatacgccaaggagcgcgcgggtcctctgaagcccggtgtcgacaccgtggaagaagccgtgaagaccgtcgtggctccggtctacgataggttccaccttgtccccggcgaggtcctcaaatacgcggatccggagggtggcgagttagacagccacgttcccttcaac

SEQ ID NO: 246875 - DNA, 545 bp, Glycine max
  unsure (1)..(545): unsure at all n locations
gggttggtanaggggggttgntgtattgataacgtatgctgtacgcctgccgtaccggtccggaattcccgggtcgacccacgcgtccgcccacgcgtccgggcaaaaataccaagctgtcttatcctttggaaaaattcagctctgatatttctgggagaagctttcacaatggccgtttcatacagagaatgcgagaaaaggcttcgtctcttccaaatgtaaaattagaacaaggaactgtcacatctctacttgaagagaaaggaaccatcactggggtgcactacaaaatcaaaagtggacaagagttcacagcaaaggctcccctcaccatagtatgtgatggttgtttttccaacttgaggcgttctctttgcaatcctaaggttgacgttccctctcattttgttggtctggtcttggagaattgtaatcttccatatgcaaatcatggtcacgtcatcttaagtgatccttcacccgttttggtttatcccatcagtagcactgagattcgctggtttggttgatgtgccccgcca

SEQ ID NO: 246876 - DNA, 538 bp, Glycine max
  unsure (1)..(538): unsure at all n locations
agttttagtaggtggggtttacaatcgaagactgatgctgtacgcacgacgtagcggtccggaattcccgggtcgacccacgcgtccgcccacgcgtccgggcaaaaataccaagctgtcttatcctttggaaaaattcagctctgatatttctgggagaagctttcacaatggccgtttcatacagagaatgcgagaaaaggcttcgtctcttccaaatgtaaaattagaacaaggaactgtcacatctctacttgaagagaaaggaaccatcactggggtgcactacaaaatcaaaagtggacaagagttcacagcaaaggctcccctcaccatagtatgtgatggttgtttttccaacttgaggcgttctctttgcaatcctaaggttgacgttccctctcattttgttggtctggtcttggagaattgtaatcttccatatgcaaatcatggtcacgtcatcttaggtgatccttcnacccgtttgttttatcccatcagtagcactgagaatcgctgtttggttgatgtgccc

SEQ ID NO: 246877 - DNA, 531 bp, Glycine max
agttaagttaagtaggtctgtaatgtaactaagtatctgatggcacgccgtaccggtccggaattcccgggtcgacccacgcgtccgaaaaaaaaaaaaaaaaaaaaaaaaaaaaaaaaaaaaaaaaaaaaaaaaaaaaaaaaaaaaagaaaaaaaaaaaaagaaaaaaaaaaaaaaaaaaaaaaaaaggaaagaagaaaaaaaaagggccaagcttacaaaagggatccaaaataatgaccgagttgaaaaaaaagacaaaaatggtaaaacgattgccaaaagaaaaaaaacgggacgacggtaaaaacacagtggactggaaaataaatgggataaaaaaacataaccgtttggaaataaagccaatttgacaaaagggctgaacaaacgaaaaggccaaaaaagtgggcatttaaaaaaagaagaggaacatgaatggcaaaggggactcaatccgatagggataggtaattaaccccaattgaaagggtaacccacaagaggcccataaagttggaactattctac

SEQ ID NO: 246878 - DNA, 518 bp, Glycine max
  unsure (1)..(518): unsure at all n locations
agatagtttagtgtttttaccatgtatgctttacgccgccgtaccggtccggaattcccgggtcgacccacgcgtccgctgaaacggactgataaaataagtagatgccttaatttgggatcatacaactatcttggttttgcggcagcagatgaatactgcacgcctcgagtagttgatacgttgaagaagtattctccaagcacttgcagtacacgtgtggatgggggaacaactgtgcttcaccttgaattggaggagtgtgttgcaaactttgttgggaagccagctgctatagtttttggtatgggctatgtgacaaactctgctattcttccagtcttgatggggaagggaagtttgattattagtgattcattgaaccacaactccattgttaatggtgcacgaggatcaagagcaacaattcgcgtttttcaacataacgagccatctcatctagaagaagtgttgagagaacaaattgctgagggacaacctangacacataggccttg

SEQ ID NO: 246879 - DNA, 530 bp, Glycine max
  unsure (1)..(530): unsure at all n locations
gtnnnagannnaaggaggatcgtgngtttgaagcatcgaaactcgtagcgcatgccgtaccggtccggaattcccgggtcgacccacgcgtccgcccacgcgtccgctcatagctcccactcactttctcgcagaaacgtattgtttttctctctttccgcggcctagatctgagcagtttggaaaccctaactgctctcaccaacgacatcaccactctctccgatcaactacctctttcgtcgccctaagtcatggcaggaattgcacccgagggatcacagtttgatgctcgtcaatatgataccaagatgaatgagctgcttacgtccgatggtcaggatttcttcacatcctacgatgaggtttatgacagttttgatgctatgggcttgcaagagaatctcctgagaggcatttatgcatatggttttgagaagccatcagctattcagcaaaggggaatagttccattctgcaagggacttgacgttatacaacaggcccagtctggaactgggaaaacagca

SEQ ID NO: 246880 - DNA, 534 bp, Glycine max
ggattagtagggtgtgtccaagcacgtatctcgtagcgcactgccgtaccggtccggaattcccgggtcgacccacgcgtccggacgtgagagagattgagaagtgtgctcatagcggatcaagaaattctccgctatatgtacacactttaactgagtttgtgaagacatataattactagctactaaaagatggccacagttggaaggaacgcagcatcttcctagctgtttcttaacttgatcatgtattctattgacctaggcttagctagtatggtgcctgaacaaggacatcaatggccaaacttaccaccctagctttgctggaaatggtgcatctatgtattgctaaatcttctacatactagcatccgatgagggcatagtgatcaagcttttgggtgcgcatcacatgatgacatggacgaatgacagtttagcatctgcaggagccacatcgactcgttgacttggcagtcactgctctagcatatgagatggcttgcgctcgaatgccctatgttggcacac

SEQ ID NO: 246881 - DNA, 259 bp, Glycine max
ttggaactgcaaacccaccaaaccgtgttgatcagagcacctatcctgattactactttagaatcagcaactgtgaccacatgaccgagctcaaagagaaatttcagcgcatgtgtgacaagtctatgatcaagacgagatatatgtacctaaactaagagatcttgaaagagaatccagacatgtgtgcttacatggcaccttctttggatgctaggcaagacatggtggtggttgaggttccaaagctagggaaaga

SEQ ID NO: 246882 - DNA, 531 bp, Glycine max
  unsure (1)..(531): unsure at all n locations
gggagtnaagaggncttgngttttgaaatagtatgttgtagcgacgccgtaccggtccggaattcccgggtcgacccacgcgtccgcttcttggaactgcaacaatggtgccgcaacccattttgcatctaacccttttgtcattaataatctctctggaccactctttccttggtcgatgccgccgatcccacatttggcttcacccctcttggattatctagtagctcaaacttgcaaatccaaaagccttacgacgttgcagtcaacgagcgctacagcttttcaaatggagtgcacagattttgggtatactccacggacaagcctcatatgcaaggcagcaatacgaagccacgaactgagattcgtatcgctggatacgattatacattcggtgtgtggcaatttcaaaggtttttttacgtgcctagtggcacaaagcgggtgtgcattcaagcaagtgtttggtgagtaacttctgccacaaccttgcagactatggtctattgtggtctctcactcattacc

SEQ ID NO: 246883 - DNA, 524 bp, Glycine max
  unsure (1)..(524): unsure at all n locations
gggtnnggntagagtactcgngtcttgatatgcagctcgttggcacgccgtaccggtccggaattcccgggtcgacccacgcgtccgcccacgcgtccgggaagaatttgatgaatcagacaagtcacatcataatgaagctccagaatatagacacctaattgccattcatgctgggaagcctaaaggtggattagtggaatgcctcaaagtggatcctgaaaaagtgagacgtctaagtttaagtgatcaacagcttgaaaaggctgctataaattatggacaacaaattgtcaggtttactcagcggaatatactgagggtgtatccaaaaggtactcgcattgactcatcaaattataacccattaattgggtggatgcatggagctcagatggttgcatttaatatgcaggggtatgggagatctctttggttgatgcatggaatgttcagagccaatggaggntgcggttatgttaaaaaaccaaattttctattggagactggtccagatgacgagg

SEQ ID NO: 246884 - DNA, 525 bp, Glycine max
gtggaggggtgtgtcagatgatgcatgctgtagcactgccgtaccgtccggattcccgggtcgacccacgcgtccgaaaaaaaaaaaaaaaaaaaaaaaaaaaattaaaaaaaaaaaaaaaaaaaaaaaaaaaaaagaaagaaaaaaaaaaaaaaaaaaaaaaaaaaaaaaaaaaaaaaaaaaaaaaaaaaaaaaaaaaaaaaaaaaaaaaaaaaaaaaaaaaaaaaaaaaaaaaaaaaaaaaaaaaaaaaaaaaaaaaaaaaaaaaaaaaaaggggattgattaaagatatattaatttaagaagagggaaaatataaaatggtttgtttttataggggtaaaaaaaaaaagataattgggagaattttttaaaaatatgaaatgggaaaaaaatgtgtgagataaaataaaatttttttgtgagaaatatgttttttaaaaagttggtataattttaaaaaatgctaaaaattttgtgtataaaaatttggttaaattttataatttttagtgaatacctttc

SEQ ID NO: 246885 - DNA, 467 bp, Glycine max
ggacgtaccggtccggaattccgggcttgactgcctacagttcatactaagttctgaaaatgagttccaaggttttgcttgttctacttatgttcttggccactatacttctgatctcctctgaggttgcacccgatgatgcatacgagaattttgacaaaatagatgggaagcctagtgcagatggggtagatgaaagcaagtattggcgtggcggctatggtggcggctatggtggtggttatggaggtgggcgtggaggctatggaggtgggcgtggaggctatggagggggacgtggtggatatggcggcggacgaggtggctatggtggcgggcgtggtggctatggcggcgggcgtggtggcgggcgtggtggctatggtcctaatgaacataacgaggctggggttgatgctaaccctcacaactaagaaagcaactttctaaagcttatatatgggttt

SEQ ID NO: 246886 - DNA, 274 bp, Glycine max
ccgggtcgacccactcgtccggttcatctcttgaggaagaagtcttgctttaccctgcatctacacttataaaggttgcgaatgcttacgcggtttcgttgttgattccaactgatgtagtcatagcatacaagtatgcttctgatgctaacactaaaactgtacccgcatcaatcaaaccaaactggaggatgggattacatatatgaaccgagtccaacaaaacattaggtgaaccatttgatatgtcccatacctgcattctaaatgtacc

SEQ ID NO: 246887 - DNA, 532 bp, Glycine max
  unsure (1)..(532): unsure at all n locations
ngggtaagttagggtgtgnagttacgtagagtatgtcatgcccgtaccggtccggaattcccgggtcgacccacgcgtccggcaaaacatctcagtttttgaattccaccttctccgaccaatggctgccaaacctcttactaccgaggcgattgcgcttacggaaaagaagatggacatgacactagatgacataatcaaaatgtctaaaaacccgaagaataagaagcaaagaagggttccgaacaaaagtcaaaaattttcaaacaattttactcaggataagtctgcaaaggtccagcgttatatggaatcgagatcttctcttagacagggggctcttgcaaaaagaaggtctaatttccagggaaaccaatttcctgctgcagttgaagttgcgcgaaaagctgttactgctcctctgcacaatagagtccctaatcgtaataaggtggctaactggaataaaacaagatttcaagttcctgtaggtcagaaaaaggctgctaatggaaggttttctgcttaaaaa

SEQ ID NO: 246888 - DNA, 535 bp, Glycine max
  unsure (1)..(535): unsure at all n locations
aggtnagggggagggnttttngtgttgaatagtatctcgtaggcacgccgtaccggtccggaattcccgggtcgacccacgcgtccgggaaccttggccacagatatcggagagtgccaagagccttgtgcggcgaatgttggagccggatcctaaaaagcgcttgacagcggaacaggtgcttgaacatccctggctgcaaaatgcaaagaaagctccaaatgttccattaggagatattgtgaggtcaaggcttaagcagttttctgtgatgaatagattcaaaaagaaagctctgcgggtaattgcagaacatttatctgttgaagaggtagaaataatcaaagacatgtttacattgatggatactgacaaagatggcagagtaacatttgaggaactgaaggctgggttgaggaaagttggttcacaattggctgagccggagattaagatgctgatggaagtggctgatgttgatgggaatggagtacttgactatggagagtttgtagctgttacaattcacttgcga

SEQ ID NO: 246889 - DNA, 513 bp, Glycine max
  unsure (1)..(513): unsure at all n locations
aggttcatgtattcttgacatgaatctgttggcactgccgtaccggtccggaattcccgggtcgacccacgcgtccggttcatctcttgtggaggaagacaagcttagccttgcaactacacttctcgaaaaggccaaggctaaaggggtttctttgttgcttccaactgatgtggtcatagcagacaagtttgctgctgatgctaacagcaagactgtgccagcatcaagcatcccagacgggtggatgggattagatattggtcccgattccatcaagacatttggtgaagcattggataagacccagaccgtcatttggaatggaccaatgggtgtttttgagtttgataagtttgccacaggaacagaggccatagccaagaaactggcagagctgagtgggaagggagtaacgaccatcattggaggaggtgactctgttgccgctgtggagaaggttggtcttgcagacaagatgagccacatctncactggtggtggtgccagctt

SEQ ID NO: 246890 - DNA, 516 bp, Glycine max
gagaaagagtgctgtcagtcgaaagaagtaggtggtcggccgtaccggtccggaattcccgggtcgacccacgcgtccgttccaaacaaaacccatcaaagtctttctccctcagtgatcatatattcattcagttctatacaaaatcctcaaaaactcttcctctctgccatgaccatggaatacagaaccttagaactcaacatcatatccgcaaaggacatcaagaatgttaatctcttctccaagatggacgtatacgccgccgtttcgctctccggtgaccctctccaccctcagggcgccaccacccacgtccacaaagacgccggcagcaaccccacgtggaactaccccgtgaaattctctgtcaacgaatcgctggcgaaggaaaatcgtttatctcttgagatcaagctcatctccgaccgcaccctcggcgacaccgtcatcggcaccgtccatgttcctctcagggaactcctggataaccccggcgatgacagctccttccgg

SEQ ID NO: 246891 - DNA, 517 bp, Glycine max
  unsure (1)..(517): unsure at all n locations
agtatctaaggggtgtgtcnatgatggatgctgtacgcactgccgtaccggtccggaattcccgggtcgacccacgcgtccgcattgccatccaaattctcagccgcggcttcttccctctctgggctggagttctaatcactgcttcagattgctttttctttctatttcttgagaactatggagtgaggaagttggaagctgcttttgcggttctcatcgctgttatgggtctttcttttgcctggatgttcggcgatgctcaacctaatagaaaagagcttttaatgggtatttcggttccaagactaagctcgaaaacaattcgtcaggctgtgggtgttgtgggttgtgtcattatgcctcacaatgtattcctgcattctgctttggtgcaatcaaggaaggttgatcctaacacgataggtcccgtgcacgaggctctcaactactattcacttgaatcgtcggcggcacttgcattctgattcatgatcaatctattggtcacaacggn

SEQ ID NO: 246892 - DNA, 440 bp, Glycine max
  unsure (1)..(440): unsure at all n locations
ccacgcgtccgcgccgatgccaaacgattccgatcgcgaaagttgcatccggcgccgccagatcgatattccgatcatgctccgncagccggtcagcgtttcgcgtcgcatcggaatccaaaccggttcgttctccgttccgtatcgcgtccaataagcctctctcgcagtcccaatccactctcaggttccccgtggaattgagttcgtgtgttgaatcgatgatgccgtaccacacggccactgcttctgcgctcatgaattccatgctttcaatttcaagccgcacgagcgcttggattcccgaaggtagctagcatctctaggattccttgatgttctttctacaattaattttcgggccaaaagcagactacttgaagatcaggaagcatagatgggattgcacggacattctatgatatgatgttcatcttgaa

SEQ ID NO: 246893 - DNA, 518 bp, Glycine max
  unsure (1)..(518): unsure at all n locations
aggggaagtttagtgtgtccaactattgatttctacgcctgccgtaccggtccggaattcccgggtcgacccacgcgtccggttgccccacttgttgcaacccttcccttggagatcaagggagaaattgaggagtttctcaaagtggttttcactctgtttcaagacctggattttactttcttagagatgaatcctttcacattggttgatggaaagccttatcctttggatatgagaggcgagctagatgacactgctgctttcaagaacttcaagaaatggggagacattgaatttccactgccatttggaagggttatgagtgccaccgagtctttcattcatggattagatgaaaagacaagtgcatccttaaaattcacagtgttgaacccaaagggccgaatttggacaatggtagctgggggaggtgctagtgtcatttatgctgatacggtangagatcttggctttgcatctgagcttggaactatgctgaatacagtggtgcaccc

SEQ ID NO: 246894 - DNA, 527 bp, Glycine max
  unsure (1)..(527): unsure at all n locations
gtngggggagggggtgcagttaagaaatgctcacgattgacgtaccggtccggaattcccgggtcgacccacgcgttcggtgaaaaaaaaaagagagagagaagaaaagaacgcagaaactgaactcaacaatggcagaacccaagggtaaatacgatcgccaactcagaatatggggcgaacaaggacaggcagcccttgagaaatctagtatttgcttacttaactgtggtcctactggttctgaaacacttaagaatcttgttcttggtggggttggaagtattactgtagtcgacggatcttaagttgaagtgggtgacctcggaaacaattttttggtggatgaagcaagtcttgggaagtcaaaagccaaatgtgtatgctcatttcttcaagagctgcatgatgcagcttaagcgaaatttgtagaagagtcttcagaaacattgattgagacaaatccatcattcttttctcaatatactattggtgttgccactcaacttgtggaaanattaatgata

SEQ ID NO: 246895 - DNA, 522 bp, Glycine max
  unsure (1)..(522): unsure at all n locations
nggnnttaggnntagaggcttnngtctatgatagtatctcgtaggactgcagtaccggtccggaattcccgggtcgacccacgcgtccggcacaatggactaccttctacttcttccactaataatcaccatagtatggataaacattcatgtattcatctctagcttcaaaccactcaaatcctctaaaaatcccccgggtcctcgcccttttccaatcataggaaacatcttggagcttggcaaccagcctcaccaagcacttgccaagctttctcaaatttatggtcctataatgagtctcaagcttggtaagactaccaccattgtcattttctctncacaagntgccaaagaagtgctacaaaaacatgatcaaatttttgctaaaaggacagtncctgatacctttcgagcacttgatcattacatactttctgtgggtggatgccaactttagcacaatggaggacccttaagcgagtttgtgctaccaaaggttctcttntcaacagcttgatc

SEQ ID NO: 246896 - DNA, 528 bp, Glycine max
  unsure (1)..(528): unsure at all n locations
ggttgtggagggngtgnngtaatgaaaggagagtcattgcgactgccgtaccggtccggaattcccgggtcgacccacgcgtccggaactttgcaactttgagcagaaaatctcacagtcgaaggaagaaataatcaccaatggcaattgaacacgaagacgatctcaaagacgagaagaaccctcgacccctcgacgaggatgacatcgccctcctcaaaacctacggtttgggaccttattccacaagcataaaaaaggcggagaaggaaatcaaagatatggccaagaaagtgaatgacttatgtggtatcaaggagtctgatactggattagcagcaccaagccagtgggatcttgtttctgataagcaaatgatgcaggaagagcagcctcttcaggtggcacgatgcacaaagatcataaatccaaactctgaagatgccaaatatgttatcaatgtgaagcagatagcaaaagttgtgttgggctaggagacaaggtttcccccactgacattgaagaaag

SEQ ID NO: 246897 - DNA, 525 bp, Glycine max
  unsure (1)..(525): unsure at all n locations
gagttaagttagggnnttnnctaatcgaattgaatctcttggcactgccgtaccggtccggaattcccgggtcgacccacgcgtccgggaagagataaccaagaacgacgtcggagtaacctccaaaaccaccagaagcagctccaggttctggcctcgttggattcccacttccaccgatcacatcatcgctgccgagaagcgccttctttccgtcgtcaagactggttatgttcaagagcatgttaacattggctctggtcctcctggctccaaagtgaggtggttccgttcatccagcaacgagccgcggtttattaacaccgttacatttgacagtaaaccccattctccaacgctggtcatgattcatggttatgctgcttcacaggggttcttttttcgcaattttgacgcgcttggctctcgaattaaaaggcatggtggtgaccaacttggatgggttgaacgaccaaactggatttaccgcgaaagcccttgagaactgagcattggttaatggtt

SEQ ID NO: 246898 - DNA, 449 bp, Glycine max
cgggtcgacccacgcgtccggcacaatggactaccttctacttcttccactaataatcaccatagtatggataaacattcatgtattcatctctagcttcaaaccactcaaatcctctaaaaatcccccgggtcctcgcccttttccaatcataggaaacatcttggagcttggcaaccagcctcaccaagcacttgccaagctttctcaaatttatggtcctataatgagtctcaagcttggtaagactaccaccattgtcatttcctctccacaagttgccaaagaagtgctacaaaaacatgatcaaattcttgctcataggacagtccctgatactcttcgagcactcgatcatcacatactttctgtggtgtggatgccacctttagcacaatggaggacccttaggcgagtttgtgctaccaaagagttctcttctcatcagc

SEQ ID NO: 246899 - DNA, 517 bp, Glycine max
  unsure (1)..(517): unsure at all n locations
aggaggggtgtattcntagacttatgctcgtccgtccgccgtaccggtccggaattcccgggtcgacccacgcgtccggtcctattatactcccaatgtaccccgttcactcgatgattactgcaatcattgacaatggctatcaacacttcatgaatccctcattgctgctcaatacattgtaggaggtttgtaatgacccagatagcttggtgagctaatcaccataccagaaagcacacgctagatcactgggctgattatgctgatctgaagatatctgcgtctcgcaaggccgatatggacatgtcaatgagcagaccttgtagctgaacctaaggagtttattgaaccacatcaattgtcggatgcacagctacgagacatgacttattctggaggagacagtactcgttttagccgatatagctctcgttccattctacactccgttcacagtctatgagactatcgagaccgttatcctagaaagtgtgtgccgcatgcttattgcttg

SEQ ID NO: 246900 - DNA, 524 bp, Glycine max
  unsure (1)..(524): unsure at all n locations
aggttnngtnnagggtgtcgnatcatagaaaggtatgtcatgccgtaccggtccggaattcccgggtcgacccacgcgtccgtcttcattgtgatctgcacttcaacccttgtgtgcacaaattggcagagggaagaccagaccgaacaggtttgcggttgtcgaatgagctggccaaacttgatgtttcagtgaaacttctaatagattctgctgttgcatatactatggatgaggtggacatggtttttgtgggtgcggatggagttgtcgaaagtgggggcataatcaacatgatggggacctatcaaatagcattggttgctcacagtatgaataaaccagtttatgtcgctgctgagagctacaagtttgctcgcctttaccctcttgaccaaaaggatttagcccctgcattacgccctattgattttggcgtacctattccatcgaaggttgaggttgaaaggtccgcgcgggactacacccctnctcaatacctgactctgcttttcacagattta

SEQ ID NO: 246901 - DNA, 525 bp, Glycine max
  unsure (1)..(525): unsure at all n locations
aagtttnaggggaggtgtagtccaccgatcgaatctcgtacgcctgccgtaccggtccggaattcccgggtcgacccacgcgtccggtttaccttcgcagcgctctttctctctgaaccctaatttacacacactccctttattcgatccctctctccaaccatggcgatcaactcttccaagaatccagatggttctgtccaaaatgcaatgccttcgtatttttattctccaccactagatgtttctgctgcatttccacaagcaacaccagcatcaacgtttcctccttgtgcttcagattattttcaattggacaacttattgacagcagaggagcaagccattaggaagaaagtaagagagtgtatggaaaaagaaattgctccaataatgactgagtactgggagaaggccaaatttccatttcatgttattccaaagcttggtgcattgcgcattgctggtggcacaatcaaggattatggttgtcctggtctttctatcactggaagtgctatagct

SEQ ID NO: 246902 - DNA, 529 bp, Glycine max
agttagggagaggcttgtgttcggttagtgtactaagcatgctgtactcggttcggaattcccgggtcgacccacgcgtccgaaaaaaaaaaaaaaaaaaaaaataaaattaaaaaaaaaaaaaaaaaaaaaaaaaaaaaaaaaaaaaaaaaaaaaaaaaaaaaaaaaaaaaaaaaaaaaaaaaaaaaaaaaaaaaaaaaaaaaaaaaaaaaaaaaaaaaaaaaaaaggggaggagtttttaggggtctaaatttaactatatgtatattggaaagttatgattttttttagggtatcctaatttaaattatattgcacggtttttaaaatcttgatatttggaaaaatttgatgtttaccaatttattaagttttttaaaaaatcctcttttaatgatttggtttataagaaaatgggcattctctatagattttttcaaatatttgtagattttaatggatatttgaatcggcattatttagggtaatttaagctggcagagttgtgggttaactcaaaattgaatc

SEQ ID NO: 246903 - DNA, 507 bp, Glycine max
aggtgtgtcgtgcactcagtagtgcgtactgccgtaccggtccggaattcccgggtcgacccacgcgtccggacctttgttcactcttctactcttgcttctagggatttagcgcatcttcttctacatttaaggaagatgggttaggaaaaggcccacatcagcattgaggtcattggccatgtctactctgggaaatacactaccactgatcacctaatttacaagcttggatgcattgacaagcgtgttactgagaggtttgagaaggaagctgctgagatgaacactaggtcttatcacgtatgcctgggtgctggacaaacttaaggctgaacgtgaactacgaatccccattgatattgcttcgagtaagtctgaaacatcaacgtattattgcacagatcttgatacacctggacatatggatatgattacgaatatgattactgggacattccaagctgactgtgctgctcttatcatcgattctaccactggtggttg

SEQ ID NO: 246904 - DNA, 511 bp, Glycine max
  unsure (1)..(511): unsure at all n locations
ggggaggcttgtgtcgtagcatgcagcactccgtcactgccgtaccggtccggaattcccgggtcgacccacgcgtccgctccgcccctggacaaaatcaaggtcctatttatgcaagctttgattcacattcctgttcgtttttccttcgcaccttttcttcttcttcgctccgtgccatgtcttcctctctcgctcttccttccactcccttcttcgccaatggaacaagaatcttcgctctcaagcactctctccctcgctctagggtttccatgagcgtctccgctggatctcaggcttccgttcaccaggctttgttcgccgattacaaggcctccacttcattcctcttcccgggccagggtgctcaagctgttggaatggggaaagaagctcaaaatgtgcctgctgctgcggttttgttcaacaaggcaaatgacattttggggtttgatcttcttgatatatgcatcaatgggccaaaagaaaagttagattccaccgtttn

SEQ ID NO: 246905 - DNA, 512 bp, Glycine max
gtgaggttgtttcgtagcatgtatgctgtcggtactgccgtaccggtccggaattcccgggtcgacccacgcgtccgctcatttttgcaatttccttagatttgcggttcttaagaaggatcattctttcatggcagttggtggtccatgggaacctgttgatgggggtgatccatctattgacaataactctttaatcaaaactgccctcagatatgcaaaggatgttattcaacttgacttgcagaattgtcaacattggaatccttctcttgagttacattatgatagaattggcaaagatggtttctttagccacaaggaaatcactgttctttatgttcctgatttgtctgactgcctcccttcgttggatgaatggcgtgacaagtggcttgcccacaagaaagctgtggctgaaaaagagcgtcaactttctttgaaaaaagagaaatcaagagataacaaggaagtatctaaagataaatcagataaaaggaaggattctactc

SEQ ID NO: 246906 - DNA, 513 bp, Glycine max
  unsure (1)..(513): unsure at all n locations
agaaggcgttgtgttcntagatcgcttgctcgtccgcctgcacgtaccggtccggaattcccgggtcgacccacgcgtccgcgaaaaaaaaaaacccaacctaacccattacctcattcctcaattcaattcaatgttttccctctcaaaacccatcctttctccggttcgccccacccttcctccggttcgctgcgggtcccgcgagctccgcgagcgaatcaagaccgtccaaaccactcaaaagatcaccgaagccatgaaactcatctgcgccgcgcgcgtccgccgcgcccaggaggcccgtgtcagtggccggcccttctcctcaaacctcgccgcaatgctaaacgacatcacccagcgcctgcaaaacgacgacgtctgcacccctctcaccctcgccagacccgtcagaaccgttgcactcgtcgtcgtcaccgcggaccggggactatgcggcggctttaacaaatcggttatccgaaaagccctcgtacgaatcgaggaact

SEQ ID NO: 246907 - DNA, 514 bp, Glycine max
gattagaaggtgtgtccatcatgtactcatacgatgccgtaccggtccggaattcccgggtcgacccacgcgtccgcggacgcgtgggctttgatgaagtcatatactctgttgacatgccacaggaaatgaaggaacagggtgtacaataggacagattggtgcttttgaagggtgttagtggtgcattcaggcctggtgttctcacagctttgatgggtgtaagtggagctggtaagactactttgatggatgttctggctggtaggaaaaccggaggatatattgatggaagcatcaaaatttctgggtaccctaagaagcaagaaacatttgctcgtatctctggctactgtgagcaaaatgatatccactcacctcatgttacagtttacgaatccttgctctactctgcatggcttcgtttaccttcaggtgttgattccaaaaccagaaaggttagttagtgtgaactacaaacagtaaaacatgtttaagctggtcattgatatag

SEQ ID NO: 246908 - DNA, 305 bp, Glycine max
actttgccgacaagccacaggaaacgaaggacggtacgtacaagaggagagaggggagctaatgaagggagtaagaggagcatacaagcctggagttctcacagcttttatgggtgtaagtggatctgttaagactacttttatggatgttctgtctggttggaaaaccggaggatatattgatggaatcatcaaaatttctgggtaccctaaaaagcaagaaacatttgctcgtatctatggctactgtgagcaaaatgatattcactcacctcatgttacagtttacataatcctagctctac

SEQ ID NO: 246909 - DNA, 524 bp, Glycine max
  unsure (1)..(524): unsure at all n locations
agtctagtttagggagtgtatttctgcgacggantcactgtcactgccgtaccggttcggaattcccgggtcgacccacgcgtccgcccacgcgtccgcccacgcgtccgccttctcgtccgcccacgcgtccggcaatcactggctcgctcctttgatccattcttgaaattctcgttatcgctcttcgaactcaagctctctcgctagcgattcctacttctgcaccaatttctacgttttctcaagtcacaggtttaagagcaaaggtcgcatttatcccgttattctccccgtccaaaacaacaaagttaatggcaggtgcttcttggtatctccggagtagaactagatatcttagatgagttcaaggatgttgaatatactagaactgatgttgaggtttccttgaaggacaagtctgaaaggttacaagttagcgcttatgtttggagcaacccaaatgatcctaacttatatgcagagtgggattttgaggattgaattgtggattggacataatg

SEQ ID NO: 246910 - DNA, 523 bp, Glycine max
  unsure (1)..(523): unsure at all n locations
ggtntgtaagaggacgtgnatctatggatcagtatctcgtgcgcactgccgtaccggtccggaattcccgggtcgacccacgcgtccgcccacgcgtccgcccacgcgtccgggattggtatgcaaactatacatgattatgaggtggagctgggtagatatctgtatgaaaggcttctttcagtcccaaatattcgcatctatgggccagcgccttcagaaaaagtcgaacgagctgccctttgttcttttaatgttgagaatttgcaccctactgatcttgcaacacttctggatcaacagcatggagtggcaatcagatcaggtcaccactgtgcccagcctctccatcgctatttaggcgtcagctcaagtgcacgtgctagtctctatttttataacacaaaggaggatgtagacaactttatccatgccctcaatgacacagtcagctttttcagttcattgatgtaagtggaatgtatttntatgtatattatattttgtttatacacgaatgagn

SEQ ID NO: 246911 - DNA, 529 bp, Glycine max
  unsure (1)..(529): unsure at all n locations
ngggtttaggttaggtaagtgnttcctcgaatagtatgctgtacgcctgccgtaccggtccggaattcccgggtcgacccacgcgtccgcaccctcctccgtcgccgtggccaacttcctcgtcaacatgtacggcaagtgcggtgacctaaccgccgcgcgccaagtgttcgacgaaatcccggaccgagaccacgtgtcgtggaactccatgatcgcgacgctgtgtcgcttcgaggagtgggaactgtcactacatttgttccggttaatgctgtcggaaaatgtggaccccacttcgttcacgctggtcagcgtggcacacgcgtgctcgcacgtgcgtggtggggtgcggctcgggaagcaagtgcatgcttatactctgaggaatggcgatttgagaacttacacgaacaatgcgttggtaacgatgtatgcgagattgggcagagttaatgatgctaaagcattggttgggtgtttttgatggtaaaagacttggtgtcatggaaacactgtaataagttcg

SEQ ID NO: 246912 - DNA, 514 bp, Glycine max
  unsure (1)..(514): unsure at all n locations
ggggaaggcgtgntgttcgtacgacctcacgcatcgctcgtcctgccgtaccggtccggaattcccgggtcgacccacgcgtccgcccacgcgtccggggaagtaagatatttctcaccacaaggaattgggatgttgctttacatgttgatgcttgtagcaatccgcatcagttgaggccattgacagaagatgagagtttcagattgctctgcaacaaagcgttccctggagcgaagggcatcccgttagagttggtccagttggagagtcttgcaaaggagattgtggttaaatgtggagggttgccattggctgtggtagtggttggtggttcgctgtctaggaaactcaagtcaagtggtgaatggaaacggaggctgcataatatcagctggcacttgctagaagagcatgagaagatagcatgaattttggccctaagctacaatgatctgcctgctcatttgaagtcatgctttctatatctgggttttattccggagggtgtaac

SEQ ID NO: 246913 - DNA, 511 bp, Glycine max
gtgaggttgtttcgtagtcgtatgtgttgcgtactgccgtaccggtccggaattcccgggtcgacccacgcgtccgcaaggttcatggagccaacttcctcgtggaaagacacacgcgcacgctcctctgccacgcgtgccagtcgcccacgccgtggaaggcctccggcgccgccctcggaaacaccgtctcgctgtgcgagagatgcgccggcggaaccaccgaacaaggtcaagagagccaaggaggcaatgacgacgacatagacaccgacatagacaccgacgatgaggatgactacgatgagagcgaggacgaggttgccgccgacgaggaggacggagacaaccaggttgtcccttggtcctccgagccgccgccaccagccccgagctcttccagcagcgaagaatcggttagccggtgcaacaacgtggacgaggtttcgaccacattgaaacgccgtcgccaggaggacaatgattttcagggttggaattcgaataattg

SEQ ID NO: 246914 - DNA, 524 bp, Glycine max
  unsure (1)..(524): unsure at all n locations
nagttttaagtagatggtgttcnattcatggtagtgcataccactgcacgtaccggtccggaattcccgggtcgacccacgcgtccggtggacttcggtctctaggtgttgcaagacaggaagtacctgaaaaatcaaaagatagtcctggtggaccatggcaatttgttggtctgctaccattgtttgatcctcccaggcatgatagtgccgaaaccattagaagggctctgaaccttggtgtgaatgttaagatgattactggggatcagcttgccattggaaaggaaacgggccgaaggcttggaatgggaacaaacatgtacccttcatctgcattgcttggccaagacaaggatgcttctatttcagctcttccagttgatgagttgattgagaaggctgatggatttgcaggagtatttcctgaacacaaatatgaaattgttaagaagctgcaagagaggaaacatatatgtggaaatgtaccgtgatcgtggtgttgatgctgagaatgagtttgn

SEQ ID NO: 246915 - DNA, 455 bp, Glycine max
cgggtcgacccacgcgtccggtggacttcggtctctagtgttgcatttcagttagtacctggaaaatcaaaagataggcctggtggaccatggctatgtgttggtctgctaccattgtttgatcctcccaagcatgatagtgccgaaaccattagaagggctctgaaccttgttgtgaatgttaatatgattactggggatcagcttgccattggaaaggaaactgtcctaatgcttgtaatgggaacaaacatgtaccctacatctacattgcttggccaagacaaggatgcttctatttcagctcttacagttgatgagttgattgacaaggctgatggatatgcaagagtatttcctgaacacaaatatgaaattgttaagaggctgctagataggaaacatatatgtggaaatgtacggtgatcgtggtgttgaactcgagaatgagtttt

SEQ ID NO: 246916 - DNA, 517 bp, Glycine max
  unsure (1)..(517): unsure at all n locations
gtttggggagaggtgtgcaatatagtatttgatgtctgccgtaccggtccggaattcccgggtcgacccacgcgtccggtactcaagcaagctaaggcattattatggcttatcaagtgttgctaatttgtttggtctccaccatagtgtttgcatacatactatggagaaaacaaagcaagaaaaaccttccaccaagtccaaaggcccttcccataattggccacctccaccttgtgtccccaattccccaccaagatttttacaagctctcaacccgccacggacccatcatgcaacttttccttggctcagtcccttgtgtggtggcttccaccgcagaagccgccaaagagttccttaaaacccacgaaatcaacttctccaaccgccccggccaaaacgtcgccgttaagggcttagcctacgattcccaagacttccttttcgcgtttgcacccttcggaccctactggaagttcatgaagaaactctgcatgtncgagcttctcaacgg

SEQ ID NO: 246917 - DNA, 523 bp, Glycine max
  unsure (1)..(523): unsure at all n locations
gttggtaagggngtgtattactgatagagagctangcgcactgctcgtaccggtccggaattcccgggtcgacccacgcgtccgcccacgcgtccgcccacgcgtccggtggacttgccagaaggtgcattgtgcaagtgtcttatgccattggtgtgcctgagcctttgtctgtgtttgttgacacctatggcactgggaagatccatgataaggagattctcaacattgtgaaggaaaactttgatttcaggcctggtatgatctccatcaaccttgatctcaagaggggtggaaataacaggtttttgaagactgctgcctatggacactttggaagagaagaccctgacttcacatgggaagtggtcaaacccctcaagtgggagaaggcctaagtaattcattccactgctctatgctggaagttttttgagcgttgcccttataatatgtctaatatccataactttccacgtctcttactctgtgtgtttctctcctcttcctcctattttggtat

SEQ ID NO: 246918 - DNA, 518 bp, Glycine max
  unsure (1)..(518): unsure at all n locations
gggtggtagaggtatccnatcatgaatttgatctcttggcactgccgtaccggtccggaattcccgggtcgacccacgcgtccggtaggtagcttatctagtggactctgtaggcatcgcgcaattctcttcaagagattggcggattacataggtttgccatgtcgaattgctcggggttgtaggtactgtgtttcagatcatagatcgtcttgccttgtcaagattaaagatgatagacagctctcaagggaatatgtagttgatctggttggggaaccaggaaatatccatgggccggattcctctattaatggagcatatgtgtcttcaataccttccccatttcaaatttctcatttgaaagaatcccaatcaccatatgtggatgttgcagcatgttctcaatctcttggtaacacttctttaggctgtgtacaggaagatcaacaagctgaagaaactgatctgcagaaaaataataatggctctatttatcctgcaatagatcaaactcg

SEQ ID NO: 246919 - DNA, 524 bp, Glycine max
  unsure (1)..(524): unsure at all n locations
gtngggaagggncttgtatttattgaaaagtatgtcattggcactgccgtaccggtccggaattcccgggtcgacccacgcgtccggctggttcaaatgttactcttcttgcagaccaggtaaaaagatttaagcctcaacttgttgctgttagaaatgagtccctaattgctgaacttaaagaggccttgcatgacgttgaagaaaaacctgagatcatccctggagagcagggaatcattgaggttgctcgtcacccagatgcagtcagtgtagtcacaggaatagtaggctgtgcaggactgaagccaacagttgctgcgatagaagcagggaaatacatagctttagccaacaaagagacattgattgctggaggtccttttgttcttcctcttgctcagaagcataatgtaaaaatacttccagctgattcagaacattctgccatctttcagtgtatccaggggttgccagagggtgcacttaggagagttattttaactgcatcttgaggtgctttc

SEQ ID NO: 246920 - DNA, 508 bp, Glycine max
  unsure (1)..(508): unsure at all n locations
ggaagtggtnctgtcngttcctcgtatgcagctcgtaggnacgtcccggtccggaattcccgggtcgacccacgcgtncgntcttcagcaaggcttgacatcacatagttgttatctgcgtcactatactctgggtacatgctcatagcatgctacgcctgctttgtcgcaaccggaaccataggattctatgcgtgctcttggttcacacggctgatctactcgtgagtcaagattgattagttatagcaaccactggtttggatcaatctactacacttctgaaaggatgaagaccggtttgtgtaacgattttgaaactcaagaactgtcatgttctgaatcagatgttacctaattctatacaattgtgaatcgcgacgacactgttaatgttatgtttcactatcttccactggcctgagttatcgaactatacgtttctaaggtgtacactgcagtctaacttggctgacgttgcctgagtactgtcggggtattaccagtt

SEQ ID NO: 246921 - DNA, 522 bp, Glycine max
  unsure (1)..(522): unsure at all n locations
agtnaaagggagggaattcnaactatgtaactcatagccctgccgtaccggtccggaattcccgggtcgacccacgcgtccgcccacgcgtccgagcagcagcagcaagctatggcggaagaaccgaaagttccaccaccttccaatcctacgttgtcgtttgatcctagtcgaacggttggtattatcaagaggaaggccttgatcaaagacttagctgcggtataccatgccgaatgccttgcatactgtcaagagcttttggaacttcaaactaaatgggaagagccatatattgacttaaaaactccagaggaatcaaaaaaggagacagcacgaccctctaaacgtgtaaaaaagttgcgttaggttttcaggtggttgatgcataactcatttagagagcaaaatatgcaccgtcagaggataccttttgcttgctgctggtgtagctgatagtatcagagcacacatttaatgtagtattgatgtacttttcaaatgctactgagacgtcatgtt

SEQ ID NO: 246922 - DNA, 525 bp, Glycine max
  unsure (1)..(525): unsure at all n locations
tgtttggtaaggtncgtgnattaatggttaggaagtgctgccgcactgctgtaccggtccggaattcccgggtcgacccacgcgtccgacacacagctagcagatattacatacacttgaattactaattaagcccttgagaagaaattcattagctgggttgtgcttcctcttccttgttctctttgttgctcaagaagttgtggtgcaaactgaggcaaagacttgcgagaacctggctgatacatacaggggtccatgcttcaccactggcagctgcgatgatcactgcaagaacaaagagcacttgctcagaggcagatgcagggacgattttcgctgttggtgcaccaaaaactgttaaatggatccattcactccaacgtgaagaagatgcatgcagcgctattttataaaaaataaaactactatatactatatataataagactggcgctgcatcaatgacctatgtattatagtatatattattaccgatgtcagaactatagatgcatgtactgn

SEQ ID NO: 246923 - DNA, 523 bp, Glycine max
  unsure (1)..(523): unsure at all n locations
agtnttagtagagtnnatcnngtgatgatcatgnanctcttgcgactgccgtaccggtccggaattcccgggtcgacccacgcgtccgattttcataaccaaatttaatctcaaaagaatacaaaatgccgcgcccgtcttaagggctaaggcttctcagtcctctaaaaatttctagagtctctttcttcactttcttcctccacatggcagagacaccaaccctcagaatccacgaagtctgccccatctcgccgccacaagaaaccccatcaaccactattcccttcaccttcttcgacgtcctatggctacgcctncccccagtggagcgtctgttcttctattccttcccaaacccaacaacaacctcttcattcttcgacaccaccattctcccaaatctcaaacactccctctccctcactctccaccacttccctcctctcgccggcaccatcacatggccacttcacacaccccttcccctcatcacctacacccccggaaactcaatcccctc

SEQ ID NO: 246924 - DNA, 505 bp, Glycine max
  unsure (1)..(505): unsure at all n locations
ggagagtcgttagtccatgaatgagctctatgcagtaccggtccggaattcccgggtcgacccacgcgtccgcggacgcgtgggagaaataaaaagagaaagccgacagcacatagatagagagaggaaaacgacttaatattctttttccttgagacctgaaggggctaaggaaaattagaaggacacacaagtataaaggcggtgaaataaaagagaaagacaagaagaagacatgggaagaccaccttgttgtgacaaagaaggggtcaagaaagggccttggactcctgaagaagacatcatattggtgtcttatattcaggaacatggtcctggaaattggagggcagttcctgccaaaacagggttgtcaagatgcagcaagagttgcagacttagatggactaattacctgaggccaggaatcaaacggngcaacttcacagaacaagaggagaagatgataatccatcttcaagatcttttaggaaacagatgggct

SEQ ID NO: 246925 - DNA, 420 bp, Glycine max
aaaactgaagctcgaggaagataactacgatgaaacaagaggaatggatgattacgacagcgttgctatcgttgctgtttgtttcatcttttccgccgttgagttacggagttgttcctcctcgtactctgctcaataagctgtcggagggcaaatatctcaacactcaggagctctggttcgaccaaaccctcgatcacttctctccctatgatcaccgacaattccggcaacgttactatgagtttctagactatttccggattcccgatggaccaatttttttggtaataggtggtgaaggtatattgaatggggtagcaaatgactatcttgctgtactggcaaagaagtttggagcagctatggttactcttgaacatcgctactacggaaagagtactccatttaattctttgg

SEQ ID NO: 246926 - DNA, 516 bp, Glycine max
  unsure (1)..(516): unsure at all n locations
gatttgtagaggactgnattatgacatgatactctgcagtaccggtccggaattcccgggtcgacccacgcgtccgaaaattttctgaatcacatcagattcaattgaattatacccctcaatgcaatggtggtctgcaaatgtcgcaaggctactaagttatattgcttcgtgcacaaagttcctgtctgtggggaatgtatctgcttcccggagcaccaaatctgcgtggtccggacttattcggaatgggttatagatggggagtatgattggcccccaaaatgctgccaatgccagtctgttttggaagagggggatggatctcaaacaactcgactgggttgcttgcatgttatccacacaaattgcttggtctcgcatatcaagagttttcctccacatactgcccctgcaggatatgcgtgtccttcatgttctacttcaatatggcctcctaaaagtgtgaaagattcangatcacgtcttcattccaagttgaaggaagctatcatg

SEQ ID NO: 246927 - DNA, 525 bp, Glycine max
  unsure (1)..(525): unsure at all n locations
agtnnttttggagggtgnngtccnagtcatgaattagtatctcgtgccgtaccggtccggaattcccgggtcgacccacgcgtccgcccacgcgtccggcgcaaattacccaatcctgacacggggaggtagtgacaataaataacaataccgggctcattgagtctggtaattggaatgagtacaatctaaatcccttaacgaggatccattggagggcaagtctggtgccagcagccgcggtaattccagctccaatagcgtatatttaagttgttgcagttaaaaagctcgtagttggaccttgggttgggtcgatcggtccgcctccggtgtgcaccggtcggctcgtcccttctgccggcgatgcgctcctgtccttaactggccgggtcgtgcctccggtgctgttactttgaagaaattagagtgctcaaagcaagcctacgctctgtatacattagcatgggataacaccacaggattctgatcctattgtgttggccttcgngatcggagtaatga

SEQ ID NO: 246928 - DNA, 516 bp, Glycine max
  unsure (1)..(516): unsure at all n locations
agtagagtacttgngtaatgataagtatctgttgcgactgccgtaccggtccggaattcccgggtcgacccacgcgtccgaatccctcatctcattgctgagatctgcaagctggctatggactacgaaccctacgacagtagcggaactgatgatgaccttccaccaacccatcaaaatagaatttccaggggaggaggaggacgtctcgctgggaatgggagatctgctgttggttcaattccttacccaaggatgtatggtgaaattgatatggagacccaaattcatcagcttgagcaagaagcatacagttcagttctaagagcctttaaagctcaagccgatgccattacttgggagaaagaaagtttgattacagagctgagaaaagaactgagattgtcaaatgaggagcacagagaacttctaggtcgagttaatgctgatgatgtgatacggaggattaaggaatggagacaggcaggtggccatcagcctggtgtacttagcact

SEQ ID NO: 246929 - DNA, 525 bp, Glycine max
  unsure (1)..(525): unsure at all n locations
ggtnnttggaggtgntttnnnatgttgaaattgatactcttacgcctgccgtaccggtccggaattcccgggtcgacccacgcgtccgggaacatttggatatttggccccagagtactttatgcatggagttgtggatgagaaaactgatgtatttgcttttggagttttgctgttggagctcataacaggtcaccgtgctgttgattcgaatagtagacaaagtcttgtcatctgggcaaagccactgctggacacaaacaatgtaaaggatttagcagaccccagattaggagaggaatatgatcttactgaaatgaagcgcaccatgttgacggcttccatgtgtgtccaccatgcatcctccaagcggccatacatgaatcaggttgtgcttctactaaagggtgaagagacaattatagaaccaaagaaaaatttagttgcacagaaatctctcatgttagaggcatgtgacctagaagattatacttgctcaagttactttgaaggacctcaatcgcc

SEQ ID NO: 246930 - DNA, 407 bp, Glycine max
cggaattcccgggtcgacccacgcgtccggttatacatcgcgagcggtcccctattcttatattccatattcctggttcacttcatgcgtgattcctattcctctgattttttctcctttttctctctactaatattaatgcatcctacgctctttccttctcagatcaacctggtaactgcgttggtactgaattccttaatcgagtccagtattcataatctttgagttgatatgggcaactggagcagtgaacgtcatcaaaccactcaacaaagtgatctcggtgcaattttgcgtgatggaaaagaagtacttcttcaagcattcaactgggagtccaacaaatacaactggtggaataatttagaaggcaaagtttctgacatagctaaagcaggatttac

SEQ ID NO: 246931 - DNA, 517 bp, Glycine max
  unsure (1)..(517): unsure at all n locations
ggtattgagagtgntgtcngtagtaagtatgctgtcgctactgccgtaccggtccggaattcccgggtcgacccacgcgtccgcccacgcgtccgcgattctcctttatcctcaaattccatattcctggttcacttcatgcgtgattcctattcctctgattttttctcctttttctctctactaatattaatgcatcctacgctctttccttctcagatcaacctggtaactgcgttggtactgaattccttaatcgagtccagtattcataatctttgagttgatatgggcaactggagcagtgaacgtcatcaaaccactcaacaaagtgatctcggtgcagttttgcgtgatggaaaagaagtacttcttcaagcattcaactgggagtccaacaaatacaactggtggaataatttagaaggcaaagtttctgacatagctaaagcaggatttacttcagtctggttgccaccaccaacccactccttctcacctgaaggttatactccgc

SEQ ID NO: 246932 - DNA, 459 bp, Glycine max
taccggtactgaccgggtcgacccacgcgtccgcttgactcgtttattttaaatctaattaggtttttcttgaggtttaagttataatatcagcaactatggatgataagcaagaaaatttgttaacgttgtccttgcctagccaattggtatcaattgatgaggaactatggcggatggctgaagacagggtgcaagagatactatggacaattgaaccaaatgttttatctgaagtgaacagaaaggatgttattgactatgttcagaggctgattaaaggttactatggagcaaaggtcttgccattcggttctgttccactaaaaacctatcttcctgatggagatgttgatttgacaactctcattcatgaagatgcagaggaggatttggcacaagcaatatgcaatatacttaaaagtggagatgactctgaataccaagtaaaagacatac

SEQ ID NO: 246933 - DNA, 517 bp, Glycine max
  unsure (1)..(517): unsure at all n locations
agatctaaggggtgtgtcgtccnccgatgtaatctgtacgcctgcacgtaccggtccggaattcccgggtcgacccacgcgtccggaaactttttcacccccttgataccgcttcaattcaccaatggcaagtcgaggaaaaacccagggatctggcacaaccaaaaagggcatctcccgaagcaacaaagctggtctccaattcccagttggtcgtattgctcgatacctcaagattggcaagtatgctgaccgtatcggttctggcgctcccgtgtatctcgcctctgttcttgaatatcttgctgctgaggcaatttttcttaatcgcctttgatttttgttttcgtgtgttgtcattggatttagggtttataaattagggcttattttcctaaagtttagtggatggttttggtttaatgatcaaccttgaataattgaaatgataaatttactttaatcaatattaattacttttttgaaaggtttatatcacacttggtgtgttcaggtn

SEQ ID NO: 246934 - DNA, 520 bp, Glycine max
  unsure (1)..(520): unsure at all n locations
aaggggtaggagcgtggtgtcnnatttatggagctcatactcttgcacgtaccggtccggaattcccgggtcgacccacgcgtccgcccacgcgtccgcagcatttgagtgaggaattgaaacgtaggttctacaagaactggtgcaagtccaagaagaaggccttcaccaagtactctaagcagtatgaaactgaggagggaaagaaaaacattgaggcgcagctggagaaactgaagaagtatgctactgtggttcgtgttttggctcacactcaggtactaaccccacattaatgtgattgcataccttttctttgtttccctgatttcattttatataatggttgttacatatataatgatagtttagcactttcttttcaagcatttatccattttatgggtttattttgccttgtgtcctgagaatgatgaaattcttgttcttgtgcaaatgcagcaccatgaattaggtgctatgagcggcactttccacacgagatttctgactcccattt

SEQ ID NO: 246935 - DNA, 514 bp, Glycine max
  unsure (1)..(514): unsure at all n locations
agattatagagggtgnattgaagtcatgctacgctagctctgcccgtccggtaccgaattcccgggtcgacccacgcgtccggtggggagtttggctggggcggcacatctgttaaaagataacgcaggtgtcctaagatgagctcaacgagaacagaaatctcgtgtggaacaaaagggtaaaagctcgtttgattctgatttccagtacgaatacgaaccgtgaaagcgtggcctatcgatcctttagtccttcggaatttgaagctagaggtgtcagaaaagttaccacagggataactggcttgtggcagccaagcgttcatagccgacgttgctttttgatccttcgatgtcggctcttcctatcattgtgaagcagaattcaccaagtgttggattgttcacccaccaatagggaacgtgagctgggtttagaccgtcgtgagacaggttagttttaccctactgatgacagtgtcgcaatagtaattcaacctagtacgagaggaac

SEQ ID NO: 246936 - DNA, 509 bp, Glycine max
  unsure (1)..(509): unsure at all n locations
gggtnagaggaggtattgactatcgatatgaactctnggtatgccgtaccggtccggaattcccgggtcgacccacgcgtccgcccacgcgtccgagaagtcctaggagtgtaaaacagagacgcaaaatgaagacgatcttgtcgtctgagaccatgaatattcccgacggcgtgagcatcaaggttcacgctaaggttatcgaggttgagggccctcgtggaaaactcgtgcgagacttccaccatctgaacttggacttccaacttattaccgacgatggcggtaaaaggaagctcaagattgattcttggttggttctcgtaaaacctccgccgccatccgcaccgccctcagccacgttgagaatttgatcaccggcgtcaccaaaggataccgatacaaaatgagaatcgtgtacgcacattttccgatcaacgctagcattggcaacaacagcaagtccatcgagatcagaaatttcctcggcgagaagaaggtgaggaaag

SEQ ID NO: 246937 - DNA, 524 bp, Glycine max
gtaagagtacgtggtgtcaatagctactgccctaagtcatgccgtaccggtctcggtattcccgggtcgacccacgcgtccgaaaaaaaaaaaaaaaaaaaaaaaaaaaataaaaaaaaaaaaaaaaaaaaaaaaaaaaaaaaaaaaaaaaaaaaaaaaaaaaaaaaaaaaaaaaaaaaaaaaaaaaaaaaaaaaaaaaaaattaaaaaaaaaaaaaaaaataaaaaaaaataagaaaaaaaaatatatagataaaaaaaaaaaaaataaataacaaatataaattaatctaaaaataagcttatttccaatatcatctataacgacgaggtcaaatataacaaaggtattatatagatgaaatatatcaacgattaaccaagagaattggatatatagtttcgactttgagtctttcaataaagattgttatgattgtaggtaaggattcattgaaggattgattattatggtaacctttgtgtatgatgtattgtttgattaccattttttttagacttttt

SEQ ID NO: 246938 - DNA, 518 bp, Glycine max
  unsure (1)..(518): unsure at all n locations
agtttaagagggtgtgttcnatgtacggagctcatactactgccgtaccggtccggaattcccgggtcgacccacgcgtccggtgcggtaggctcatccgagaccggaagcagcaatggggatcgatctcaaggccggaggtaaaagcaaaaaaaccaaaagaacagcacccaagtccaatgatatctatcttaagctcttggtcaagctttatcgcttccttgttcggagaactggcagcaaattcaatgccgttatactcaagagattgttcatgagcaaggttaacaagcccccattgtctttgtcaaggttgattaagtataccaaggggaaggaagataagattgctgtggtggtgggcaatataaccgatgatattcgtgtttatgaagttccagcctttaaaggtcacagcactcaggtttacagagactgctcgggcaagaattgagaaggcaagtggtgaatgcttgacggttgatcagttggctctcaaggctcctctgggacagaac

SEQ ID NO: 246939 - DNA, 516 bp, Glycine max
agtttagagaggtgtgtatgatgcagtcgtagcatggcgtacccgttcggaattcccgggtcgacccacgcgtccgcccacgcgtccgaaaaaaaaaaaaaaatttaaaatataaaaaaaaaaaaaaaaaaaaaaaagaaaaaaaaaaaaaaaaaaaaaaaaaaaaaaaaaaaaaaaaaaaaaaaaaaaaaaaaaaaaaaaaaaaaaaaaaaataaaaaaaaaaaaaaaaaaaaaaaaaggggggggcctttttaggggtcccagttttattttccctggtttgggttttcttgttttttttttggggtccctaaatttaatttatttggccgtgtttttaaacctttggttttggaaaacctttgggttttccaattttattccctttgaaataattccccttttcccaggttgggttattttaaaaagggcccgtccggttggcttttcataaagtttgccattcttgattggtattgggaacctcctttttttgggctttttaacgtgggggt

SEQ ID NO: 246940 - DNA, 510 bp, Glycine max
  unsure (1)..(510): unsure at all n locations
agttgggggtgtgtcnattatgagcctaaccatgccgtaccggtccggaattcccgggtcgacccacgcgtccgaattgatactgtggtagcagtaggactgcttcaattggcacccaagacagttactcctcgcgtaactggggcttttggatttgtttcgtctctaatatcttgctatcagttgcttcctgccccggtcaagtccaaaactgtgtgaagtgtggaagaatagaaaggttctcatgacgtgtctgtcgtcaaataattatatgaattggtcaggaaatgtcggttggtgtgagcattgaccaattttcatcatagttacaattgttctctaaaactgttgtgtagggcatctttctattttggtctttcaaaatatatgcaactataatatgttgctccataatttacaaatacatgaatttgtcccctaaaagacatgcaatatcaaattggttcccccacttncnctaaaaaaaaaaaaaanaaaaaaaagggcaga

SEQ ID NO: 246941 - DNA, 525 bp, Glycine max
agtattaggaggaggacattgtgtcatggacatggaaccctaagcgatgccgtaccggtccggaattcccgggtcgacccacgcgtccgcccacgcgtgcgtccacgcgtatgaaaataaaaagaataaaaaaaaaaaaaaaataaaagaaagaatgaaaaaaaaaaaataaaaaaataaaaaaaaaaaaaaaaaaaaaaataataaaaaaaaaaaaaaaaaattaaaaaaaaaaaaaaaaaaaaaaaaaaggtgaaaataatagatggctttacattaatcttcggtgttgtaataaagatctgtaactttttaaaagagatagatggatagactgaactctttctttaaaaacctaagatactggataaaatctgtgtttatctatttagatgattttgatatctatataaacttataatatttgtatatatcattaaatgatttgatcaaaaccatttagtaaagaatgttgaaactttataagtgtatgatgaatgtcatatgaaagagttttgatactga

SEQ ID NO: 246942 - DNA, 537 bp, Glycine max
gtttagagagtacgtgtattgatcggcatgcatgccctcagtcatgcacgtactcggtccggtattcccgggtcgacccacgcgtccgaaaaaaaaaaaaaaaaaaaaaaaaaaaaaaaaaaaaaaaaaaaaaaaaaaaaaaaaaaaaaaaaaaaaaaaaaaaaaaaaaaaaaaaaaaaaaaaaaaaaaaaaaaaaaaaaaaaaaaaaaaaaaaaaaaaaaaaaaaaaaaaaaaaaaaaaaaaaaaaaaaaaaaaataaaaaaaaaaaaaaaaattaaaaaataaaaaaataaataaaaatataaaaaaaaaaaaataataagattttagaatagtaatcgagaaaaaatacaatagaatatagttaaaaaaatttgtaatgttataattattgtaaaggggaataaatttattggtaagtggtaagttaaagttgattgtgattattaattattgatatttgttgttatttttagatgttttgtatgttattattatatttttttttaatttttgtttttttttataattaggatt

SEQ ID NO: 246943 - DNA, 514 bp, Glycine max
  unsure (1)..(514): unsure at all n locations
gtntaggagggtacttgtatcactgacatgnanctcataggcactgccgtaccggtccggaattcccgggtcgacccacgcgtccgaaggcaactagggagaaggcagagaaagaaataggaaaggaagccaaagaattctacacaaaaatggttgaacaaaaaaatcaggtcatccctcttcttactccttacaggatggggaacttaaatctttcacacagaatcgttttggcgccactatttagagcaagatcttacaacaacgttgctcagccgcatgctattctatattactctcaaagagctaccaagggaggtcttctgattactgaagctactactatttcacccacttctaaataccatccaaacgcagttggtatatggtcaagagagcaaatcgaagcatggaaacccattgtggatgctgttcatgccaaaggtggtatattcttctgtcagattgttcatactggaagggcttacgatccagatcttaagcccgatggaca

SEQ ID NO: 246944 - DNA, 530 bp, Glycine max
  unsure (1)..(530): unsure at all n locations
ggtattaagagtacgtgtattcgatagctactngctanagtactgcagtaccggtccggtattcccgggtcgacccacgcgtccgaaaaaaaaaaaaaaaaaaaaaaaaaaaaaaaaaaaaaaaaaaaaaaaaaaaaaaaaaaaaaaaaaaaaaaaaaaaaaaaaaaaaaaaaaaaaaaaaaaaaaaaaaaaaaaaaaaaaaaaaaaaaaaaaaaaaaaaaaaaaaaaaaaaaaaaaaaaaaaaaaaaaaaaaaaaaaaaaaataaaaaaaaaaaaaattaataaaaataaaaaaaaataaaaattttataaaaaataaaatattaagggaaatataataatattggaattgaaaaaaaaaaaattattaaaaggaaaatgggaaatgtaataaaaatgatagttaaatattaaattgaatgggtaaaataggtaaattgaaagtaaaaatttcaattgtataaattttaaaagttaatgatatattaaattataattggaaaaaataaagttttttattttaaaattac

SEQ ID NO: 246945 - DNA, 509 bp, Glycine max
  unsure (1)..(509): unsure at all n locations
gggggagaggtcttgagtcatgaatctgatactcctgccgtaccggtccggaattcccgggtcgacccacgcgtccggaatattttcgttttcgaaatccaccgatctctctcattcttcaatggccaccctttccgcatgcgcttcccctccatggccaaaccctaattctcccaattcaaatccagaccctaatttcctccccgatcaatcccaaaccctcgacttcgactccctcatgcctccgcaacccgaatctccaccgccccaccaccaccactcccccgacgcatcgccgccggaatcctccccatcgctcccgccgccgtcgctcctctacctctccttcaaccaggaccaggcctgcttcgccgncgncgncgacagcggcttccgcatctacaactgcgaccccttccgcgagctcttccggcgcgatttcgacggcggcggaatcggccacatggagatgctcttcctctgcaacatcttcgccctcgtcggcggcg

SEQ ID NO: 246946 - DNA, 521 bp, Glycine max
  unsure (1)..(521): unsure at all n locations
naggtnaaggggtgtattcnacttatagaactaataccaatgccgtaccggtccggaattcccgggtcgacccacgcgtccggccacgcgtccgtccacgcgtccggggaaataatgttaatctcgccgattacaaaggaaaggtccttctcattgtcaatgttgcctcacaatgcggcttgactaattcaaactacacagagcttaaccaattgtatgagaaatacaaagggaaaggacttgaaattctggcattcccatgcaatcagtttggggctcaggaaccaggaactaatgaagagattgtggagtttgcttgtactcgcttcaaagctgagtctcccattttcgacaaggtggatgtgaatggggaacaatgctgctccactgtacaagtttctgatatcaagcataggtcgacttctttggggatagtatcaaatgggaacttctgcaaattccttgttgataaggatgggaatgtcgctgaccgctatgcacccacaacttgntctctgacc

SEQ ID NO: 246947 - DNA, 456 bp, Glycine max
  unsure (1)..(456): unsure at all n locations
ttcccgggtcgacccacgcgtncggaaaagggtatcgaatatgagtacaaagtagaggacttgaggaacaagagtcctcttctcttacaaatgaacccggttcacaagaagattccggttctcatccacaatggcaaacccatttccgaatccctcattgctgttcagtacattgaggaggtttggaatgacagaaatcccttgttgccttcagacccttaccagagagctcaggctagattctgggctgattatgttgacattaagatacatgatcttggaaagaagatttggacatcaaagggagaagaaaaagaagctgccaagaaggagttcatagaggcccttaaattgttggaggaacagctgggagataagacttattttggaggagacaatattggttttgtggatatagcacttgttccattctacacttggttcaaagtctatgag

SEQ ID NO: 246948 - DNA, 513 bp, Glycine max
  unsure (1)..(513): unsure at all n locations
aggtnaagagagtactttgtgtcctgataagtagctcataggcatgncgtaccggtccggaattcccgggtcgacccacgcgtccggcagcgttgcaacgctgtttcctttctgtttcttttcttcttccttccgacgagatctacaacgttgttgttgtttagatcttgaatagtgttttggtgttcggtgagatggaagaaaggaagcaatcacgttatgtgaagttgactaaagatcagacacctctcgaagacattacccctggcgaactcaaccagccaattcaggttcctcagttggacgttcgcaagtgccctgaatgtagacagccgctacctgaaagctatgctcctcctgcagatgaaccttggatgactgggatctttggatgtgctgaagacagagaaagctgcttgaccggactgttttgtccttgtgtattatttgggcgcaatgtagaaagattgaaggaagacactccttggactgggccatgcatttgtcatgcca

SEQ ID NO: 246949 - DNA, 513 bp, Glycine max
gagagtacgttgtgtgttgataagtatgctcgtacgcatgccgtaccggtccggaattcccgggtcgacccacgcgtccgctattacatacattttgtagctaggatgagcaagttactactcattcgtgttgctgggttcgtggcaacctttgtcaccatggtgatgatgatggtgcccaaaaacgtgagtgcccaaaacataggtgatgacatcgtcacacaagacttcttcaacagcataatcagtcaggctgatgatggttgtgcagggaagaacttctactcacgagatgctttccttaatgctcacaattcctacaatgagtttggtaggcttggtaatcaggatgactccaagcgtgaggttgcagctgctttcgcccatttcacccatgaaacaggacatttttgctacatagaagagattaacggtgcatcaggggactactgtgacgagagcaacaccgagtacccatgtgcccctaacaaagcgtactatgggcgtggacca

SEQ ID NO: 246950 - DNA, 520 bp, Glycine max
  unsure (1)..(520): unsure at all n locations
ngattagagagtacgtgnagtgatcgatacgcaactcgtaggcactgccgtaccggtccggaattcccgggtcgacccacgcgtccgggcaaagagagagagagaaaagcgtgaatcatgtcggacgaagagcatcacttcgattctcaggcggatgcgggagcgtccaagacgtatcctcagcaggctggtaccattcgcaagaatggctacatcgtcatcaaatccaggccttgcaaggttgtagaggtctctacgtcaaagacaggcaagcatggacatgcaaagtgtcactttgttgcaattgatatttttaatgggaaaaagcttgaagatattgttccatcatcccacaactgtgatgttccacatgtgaatcgcactgactatcagcttattgatatctctgaagacggctttgtgagtctgttgactgataatggaaataccaaggatgatctgaagcttcctactgatgaggcattgctggctcagattaaagatggaatntctgaaggaa

SEQ ID NO: 246951 - DNA, 522 bp, Glycine max
  unsure (1)..(522): unsure at all n locations
ggagggaagaggtncgtgtnngtccnattgatagtaagctcataggcacgccgtaccggtccggaattcccgggtcgacccacgcgtccgggacatattgcttgctctacttgctgtgtgagactcagtaacaagtgtcctatgtgtttaatgcccattggttataaccgttgccgggctattgagaaggtcttggagtgtattaaaatgtcatgcccaaatgcaaactatggctgcaaagagacatttagttacagcaggaaaaacaaccatgagaaggaatgcatctatctaccatgttcatgccctcttactggttgtgattttgttgcctcatccaaggagttattcctccacttcagccatagacatgtaggcatgggaacacggttcgcatatgataaatttttcactgtattcttaagtattaaccagagaacaattgttcttcaagagaaaaatgatggtaatctgtttattgttcacaataaccattaacatcttggggacatagtccgcatt

SEQ ID NO: 246952 - DNA, 513 bp, Glycine max
aggagaggtcgtgtagtcaatgacagtatctcataggcactgccgtaccggtccggaattcccgggtcgacccacgcgtccgcaaaattcaattttgagcactaaccagcaccacttccaatggcttcaaatcatgaagaagtgatacttttgggcaagtgggccagcccatttagcaacagagtagaccttgctctcaagctcaagggagttccctacaaatactccgaggaagatcttgctaacaagagtgctgatcttctcaggtacaaccccgtgcacaagaaggttccggttttggtccacaatgggaacccattacccgagtcacttatcattgttgaatacatcgatgagacatggaaaaataatcccctcttgcctcgagacccttatgagagagccctggctcgtttctggtctaagaccttagatgacaagatcttgcctgctatatggaatgcttgctggagtgatgagaatggacgtgagaaagcagtggaggaagccttg

SEQ ID NO: 246953 - DNA, 509 bp, Glycine max
  unsure (1)..(509): unsure at all n locations
gagagttcgctcgttcgatgatcgcacctcgtacgactgccgtaccggtccggaattcccgggtcgacccacgcgtccgacaaaacaaggtcattgagaaaccccaaaacaatcaacaatagcttgctagctactcctgttgctgtgagaaccgttgatgtagatgctttgcaagcaagatttagagactccaacaataaaagccatgcttaacacctaccatgcctccaaactctcatcaaaccagtgtggttctagccttgtgcaaacaatagatgcacctttacctctcgtatggtccctcataaggcgctttgagtatccacaagggtacaagctctttgtgaagaagtgcaaccttcttgatggggatggtggcattggaagcgtgcgtgaggtcatgatcacatctgggttacccgctggtgttagtgntgagaggttggacaagctcgatgatgacaagcatgtcttggagtttagcatcattggtggtgatcacaggcttg

SEQ ID NO: 246954 - DNA, 507 bp, Glycine max
  unsure (1)..(507): unsure at all n locations
ggttagaggggagtgnctttcgtatcgtatcgtctgccgtaccggtccggaattcccgggtcgacccacgcgtccgcccacgcgtccgcccacgcgtccgtttccattcccgtttaaaccctagcagagggttttagctcgcgccacacgaagcttctccatgatccatttcgaaggcgcattctaagccatggctgcttcaaagttaacctcatgcgtggcggtaacttccgcgcggtggtttccatgtccgccttctccgatcgtgcctacgccgattcttacttccgactccctttcttctcctctaaaccttccaatgaaccctcgccgccgaaccagacctccgactccaagtccgagcctccgccgcccgatgaacctaacaaatcgggtggcttcgacccggaatccttagaaagaggagccaaagcactccgtgaaatcaatagttctccctacttcaagcagctgttcgatttaatgcgaaaacaggaggaaactcgn

SEQ ID NO: 246955 - DNA, 515 bp, Glycine max
  unsure (1)..(515): unsure at all n locations
gagtttnagagcgtgtgttcnattcatgtatctgatgtcatgacgtaccggtccggaattcccgggtcgacccacgcgtccgcccacgcgtccgcccacgcgtccgcttttctattctattaattacagggaccatcaaaaccaaaaaagccaattaatagttattcttttggattcttattgttcatcgcagactcaacactctctccagacacttccttcatcaaatggcttctcacgacggcatctccgctgcttcttcagattccgtcttcaatcacctcgttcgtgctcccgaagatcctatcctcggggtaactgttgcttataacaaagatccaagtccagttaagctcaacttgggagttggtgcttaccgaactgaggaaggaaaacctcttgttttgaatgtagtgaggcgagttgagcagcaactcataaatgacgtgtcacgcaacanggaatatattccgattgttgggctagctgattttaataaattgagtgctaagctt

SEQ ID NO: 246956 - DNA, 518 bp, Glycine max
  unsure (1)..(518): unsure at all n locations
naggggnagtagaggacgttgtgtgatgatacagcatctcatacgcactgccgtaccggtccggaattcccgggtcgacccacgcgtccgcggacgcgtggggtacgtagtgtgaagatatagtattgtatgctgcagaatatgattgtcttttgcaatggcggttgttgcgcaaacccctgacatcgccggcgagcgacagtccggccaagacgttcgcacccaaaacgttgtggcatgccaagccgttgccaacatcgtcaaaagctctttaggccccgttggcctcgacaagatgctcgtcgacgacattggcgacgtcactatcaccaacgacggtgccacgattctcaagatgcttgaagtggagcatcctgctgccaaggttttggtggaactcgccgagcttcaggaccgagaagtcggaaacggcactacttcggtgcgaattggctctgctgagcttctcaaaagggcaaatgaccttgtcaggaacangattcatcctacctcgattn

SEQ ID NO: 246957 - DNA, 509 bp, Glycine max
  unsure (1)..(509): unsure at all n locations
agttagagaggactgtgtgctggtcaatncctangccatgccgtaccggttcggaattcccgggtcgacccacgcgtccgcccacgcgtccgctttgttgccataggtactgttgttttagcagagcacacgcaatataccgggaatttcagtaccattgccgttcagtgcctgcagaagctgccatcaaatagcagcaaatacacgtattcctgtgatggtcacaccttcaatttcctcctagacaatggatttgttttccttgttgttgctgatgaatcgattggcaggagtgttccttttgtatttcttgaacgggtgaaggatgactttatgaagcgctatggtgctagcattaagaatgacggtgcccatccacttgccgatgatgaggacgatgacgatttgtttgaggacagatttagcattgcatataatcttgacagagaatttggaccagcactcaaggagcatatgcagtattgcatgaaccatccagaggaaatgag

SEQ ID NO: 246958 - DNA, 517 bp, Glycine max
  unsure (1)..(517): unsure at all n locations
agttttagtagagacgtgtcgtcttgaatgagatccctcaggcactgncgtaccggtccggaattcccgggtcgacccacgcgtccggaaaggcaaaggggatcgctgaaatcaattagtctggttgtagtgggaaaagaaaagaaaatgaaaatgggtggtgggtgcaagtgtttggtatcgttggtgttggctttggtgttgatgaggagtttggcggaggcgcaatcgggcagcagcaccacctgcgcccaggagctaattccatgtgtgaactttctgaatgggacaaccaccccaccaagctcttgctgtgaccctctcaaacaaaccgtggaaaaccaactggattgcctctgcaacatcttcttcagccccggcttgcttcaaagcttcaacgtctctgttgatcaggctctcgctctcagtcgccgctgcggcgtcaccaatggtatcaccagctgcacaaacgggtcagctccagctccgggttcagggccaccaccagtcacacctg

SEQ ID NO: 246959 - DNA, 519 bp, Glycine max
  unsure (1)..(519): unsure at all n locations
nggttttgaagaggacgtgtattgatgataagcagccctacggcactgccgtaccggtccggaattcccgggtcgacccacgcgtccgaaataacaaggctcctcggttagaattcctgatcggtcatggctgattttcagacctctacccacagagccaagtggattttctctcctcaacagctggttgagaaatatagagctgccaatcagagagccaaacaaattctagagaagtgtggagcaacactaatggaagtagatgttgatggatcgttgtcatatcctgaaccccaaatgactgcaaaggatagtgctgaaaagcattctcgaacaaaacctcttactattgaagaagaacaatgtataaaggtattttatgaaaacaagctacaagaagtatgtaacaatttccgcttccctcataagatccaggcaacagcccttatctattttaaaagattctatctgcaatggtcagtgatggaacatcaaccaaaacacattatgttgacctgc

SEQ ID NO: 246960 - DNA, 517 bp, Glycine max
  unsure (1)..(517): unsure at all n locations
ggaggaagaggncgtgnngtccatgtacggcagctcgtcggcacgccgtaccggtccggaattcccgggtcgacccacgcgtccggaaaaagttagggtttgtaactttgtcttttgcttgcgaatctgaatcgaataataatcaatcaatcatcatgtcgtcggcgaagaagatcacactgaagagttcggacggcgaggctttcgaggtggacgaggcggtggcgctggagtctcagacgataaagcacatgatcgaggacgactgcgccgacagcggcatccctctgccgaacgtgacgagcaagatcctggcgaaggtgatcgagtactgcaagaagcacgtcgaggccgcgaatcccgaagacaaaccctccgaggacgatctcaaagcctgggacgccgatttcgtcaaggtcgaccaggccacgctcttcgatcttatcctggctgcgaactacttgaacatcaagagcctgctggaccttacatgccaaactgtagccgacatgatcaa

SEQ ID NO: 246961 - DNA, 508 bp, Glycine max
  unsure (1)..(508): unsure at all n locations
tgagttcgtgtngtccgatcgcacgcaactcgtacgactgccgtaccggtccggaattcccgggtcgacccacgcgtccgcccacgcgtccgcccacgcgtccggttttcaggtcatatatgttaacagattcttaccatcatcaaggaagcaggctgttagggaaataaagaaatctgctttcaaggaactgaataacagagaagggcctcttgtgataaatttcctcgagtactattatttcccgagggaacaacaactaatggcaggaaccttatctccttccaacttggtgcatttatccctggatacccaatccagcctgtaattatacgctatcctcatgtacactttgaccaatcctggggtaatgtttctttgggaaagcttatgttcagaatgttcactcaatttcacaacttttttgaggtagaatatcttcctgtcatttatcccctggatgataaggaaactgctgtacattttcgggagaggactagccgtgcta

SEQ ID NO: 246962 - DNA, 514 bp, Glycine max
  unsure (1)..(514): unsure at all n locations
gagggaagggtcnttnngtcaatcgacgcaactcgtacgactgccgtaccggtccggaattcccgggtcgacccacgcgtccgcccacgcgtccgagaattcttcattttgctattattggaggtggtccaactggagtggagtttgcagcctcactacatgactatgtcactgaggatttggtcaacatatatcctgggataaaagatctagttaaaattacccttctggaggctggagatcatattttgagcatgtttgataaaagaattactgcttttgctgaagagaagttcggaagagatggtatggatgtgaaaactggatccatggttgtgaaggtatccgagaaagaaatttctactaaagaaatgaaaaatggaggagcaattactacaattccatatggaatggctgtctggtcaactggtattggcactcgtccatttataagagattctatgtcacaaattggtcagactaacagacgtgccatagctactgatgaatggtt

SEQ ID NO: 246963 - DNA, 515 bp, Glycine max
  unsure (1)..(515): unsure at all n locations
gggtnagttaggtgtgtgcaatgataggacctcatacccttgccgtaccggtccggaattcccgggtcgacccacgcgtccgattttctgtatcaattgttacgagggctcaaatatgtacattcagcaaatgttttgcaccgagatctaaagcctagtaatttgctattgaatgccaattgtgaccttaagattgcggactttggtcttgctagaaccacatctgaaactgactttatgactgagtatgtggtcactagatggtaccgagctcccgaattgcttcttaattgttcagaatatacagcagccattgatatatggtctgttggttgcatacttggtgaaatcataacaaggacaaccgctctttcctggcaaagattatgttcatcagctgagacttatcacagagctgataggttcgccggatgatgccagccttggatttctacgaagtgataatgctcgtagatacgtaaaacagcttccgcagtatccaaaacaaaactttt

SEQ ID NO: 246964 - DNA, 513 bp, Glycine max
  unsure (1)..(513): unsure at all n locations
agattagagatgtgtgnatgatgcatcgatgctatgccgtaccggtccggaattcccgggtcgacccacgcgtccgaaaaaaagaaacaattgttacaagggcattaaatttgtacattcagaagatgttaagatgcgagatctaaaacctagcatatatgctattgaatgcaaattagagaccttacgattgctgacttgggtcttgctagaaccacatatggatactgactttatgactgagtatgtggtcactagatggtaccgagctcccgaattgcttcttaattgttcatagtgtacaccatccattgatatatggaactgttggttgcatacttggtgaaatgataacatgacatccgctctataatggccaagatgatgtgcattagctcagacttatcacacagctgataggttcgcccgatgatgccagcctcggattaatacgaagtgataatgctcgtacatacatagaacaggttccgcaggctgcaaaacaaacgtttt

SEQ ID NO: 246965 - DNA, 515 bp, Glycine max
  unsure (1)..(515): unsure at all n locations
agtttnagttagtgtattcnaccgtgaagactcaacccactgacgtaccggtccggaattcccgggtcgacccacgcgtccgattcctaccacatgcgtttggaacgctgaattaattttcgcctaaaaggacaatctaagacttcggtgggatctaggttagcaaccagcgatctgggacttttctttctcccccacaccacacccagattcaaaaactcgctctgctctgctctgcaattccccttccgtttcgtttcgatctcaaaacatgttcttcttcgattggttctatggcattctagcttccctcggtctctggcagaaagaagccaaaattctcttccttggtctcgataatgcagggaagaccacacttcttcacatgctcaaagacgagagattagttcagcaccagccgacccaacaccccacttcggaggaattgagcattgggaagatcaagtttaaggcttttgatttggggggtcatcaagttgcccgcagagtctgga

SEQ ID NO: 246966 - DNA, 517 bp, Glycine max
  unsure (1)..(517): unsure at all n locations
agtttaagtagcgtgtgtcnnatgcatgcacctcatgcactgccgtaccggtccggaattcccgggtcgacccacgcgtccgattttccagaaaaaaaaaaaaaaaaagatagatagaaatggcgcatattcctcagacccccaccaatgacgcggcggcttctggtgcaaatccgtcgatgacgaccatctcgttgtacgtcggggatcttgaccacgacgtcaacgatccgcagctctatgatctcttcaaccaggttgcccaagtcgtttccgttcgaatttgcagggacgtggccacccaacaatcccttggttacggctacgtcaatttcagcaacgctcgagatgccgcaaaagcaatggatgtgctgaatttcactccgctaaatggcaaaaccattagaataatgtactctattcgggaccctagtgctcggaagagtggtgcagctaatgttttcataaagaatttggacaaggcaatcgatcacaaggctttgttggatccattttn

SEQ ID NO: 246967 - DNA, 523 bp, Glycine max
  unsure (1)..(523): unsure at all n locations
gggttttagtaaggggacgtgnnatcattgatacaggatccctgccgcactgccgtaccggtccggaattcccgggtcgacccacgcgtccgaaaaccatgaagaaaggtgaaaatgctattttcaccatcccttccgagctagcttatggtgaatctggttccccttcaactattcctcctaatgctacactccaatttgatgttgagctgctgtcatggactagtgtaaaggacatatgcaaggatggcggtatatttaagaagatagttactgagggggacaaatgggagaaccctaaggatcctgatgaagtattggttaagtatgaagttcatctagaaaatggaaagcttgtagcaaagtctgatggggtggagttcacagtcagagagggtcattattggcctggattggccaaaggctgttaaaaccatgaagaagggagagaaagtgcttttgacagttaagccacaatatggatttggtgagaaggggaagccagaacaaggtgatgaaagtg

SEQ ID NO: 246968 - DNA, 517 bp, Glycine max
  unsure (1)..(517): unsure at all n locations
aggtntagaagagtactgtctcactgaacgcaactcgtacgcactgccgtaccggtccggaattcccgggtcgacccacgcgtccgcccacgcgtccgcccacgcgtccgcccacgcgtccgcccacgcgtccggcaatcacttgctcgctcctttgatccattcttgaaattctcgttatcgctcttcgaactcaagctctctcgctagcgattcctacttctgcaccaatttctacgttttctcaagtcacaggtttaagagcaaaggtcgcatttatcccgttattctccccgtccaaaacaacaaagttaatggcaggtgcttcttggtatctccggagtagaactagatatcttagatgagttcaaggatgttgaatatactagaactgatgttgaggtttccttgaaggacaagtctgaaaggttacaagtttgcgcttatgtttggagcaacccaaatgatcctaacttatatgcagagtgggattttgaggattgaaatgnggattgga

SEQ ID NO: 246969 - DNA, 515 bp, Glycine max
  unsure (1)..(515): unsure at all n locations
ngagggaaggtactgnagtcttttaagagacgtaaggcactgccgtaccggtccggaattcccgggtcgacccacgcgtccgaaacaagcttggacctcaaattggtcttatccacactcccttcaagcaacaactaccaaagtgtgtgcacccttgacaaggtcaagtcagcacttgagagggcagagaaagagcctattgttaggaaaagaacctcattcttgaagtcacctctctcggcttcatcgccgtcgtattcctcctcgtcgtcatcgattagggaaacaattcaagaagaagaatgtgaagagagacttaatgtttcatcatcccctttggctgcagggtgccctggttgcttatcatatgtaatgatcatgaagaacaaccccaagtgtcctaggtgtaactctcttgttcctattccttccatgaagaaacctagaattgacctcaatatatcaatttaagtgaggtaattgatgaaaattgtctccattttcaatataatttg

SEQ ID NO: 246970 - DNA, 517 bp, Glycine max
  unsure (1)..(517): unsure at all n locations
gagggagaggtncatgnagtccatgatagaanctcgtaggcactgccgtaccggtccggaattcccgggtcgacccacgcgtccgaaaacatagaacgaagaagaagaacagatcagaaaaatggcgtccaaagttccaaagaaggccaatctcctggatcaccactccatcaagcacatccttgacgagtctgtctccgaggtcgtaacgagtcgtgggtatgtggaagacgtgagattgagcaatgcgaggcttttcattggggcaatcatcatcgtcattgctttattcgctcaattctacaagaagaagttccccgaaaatagggattttctcatcgcttgcatcgccttgtatgtgatcttcaatgggttgttgcagctgatcatatacactaaggagaaaaatgccattctgtttacttatcctcctgttggatcctttactagtaccggtttggtggtttcctccaaattgcctagattttctgacatgtacacactcactatagccagc

SEQ ID NO: 246971 - DNA, 517 bp, Glycine max
  unsure (1)..(517): unsure at all n locations
agggttgaggagcggtagtgangtncatggatcgtatactaatgccgtaccggtccggaattcccgggtcgacccacgcgtccgcccacgcgtacgtccacgcgttcgctctgaggttgcacccgatgatgcataccagaattttgacaaaacagatgggaagcgtagtgcaaatggggtagatgaaagcaaatattggcgtggtggctatggcgactatggtggttggcgtggtggtggttggcgtggtggctatagaggctggcgtggtggctatagtggtggtcgtggtggctatggtggctgtcgtggtggctatggtggtggccgtggtggctactgaggttgaggtggtagatatggccctaaggtacataacgaggatgggacagatgcttgacatgatagctatgaacgaaacgtgctagtgctcatattggatctatgctatcgtagcgtataacacgttattgtgtagagacatttcctaattcgcgctgagattggtcggcctgaa

SEQ ID NO: 246972 - DNA, 515 bp, Glycine max
  unsure (1)..(515): unsure at all n locations
agtntnaaggaggtgtgtccattcatggagctgatgctatgccgtaccggtccggaattcccgggtcgacccacgcgtccgcttcccgccgagagaggaggctcgacgacgacgccgccattcgtgagcaggccatcgccgccgcgattctctttaagcagcaccagcaacaacagcaacagcagcagcagcaattcgatcgctctgcatcgcttcggtatccgaatggagtctccaagaagagtaacgccaacgccttgcccaggagttcgagttccagggcaaggtccctcaccgaccctctccttcaacctcaccagcttctcaatcagggtgtgaatgtcgatgatctcgagacaaatcatgttgtccttgttcatggaggtggcttcggngcatggtgttggtacaaatccatagcacttctagaagaaagtggttataaagtaactgccatagatttaactgggctcggtgtgagttcatttgatgcaaacagcattacaagtctgtcg

SEQ ID NO: 246973 - DNA, 512 bp, Glycine max
gaggacgttgtgttgttggtaagggcgactgatcggcactgcccgtaccggtccggaattcccgggtcgacccacgcgtccggaacaatggcgggtagggtttcgacgtgcttcttcttcgtgtttgctctttctctccttcttccttttcagatctccgctgaggaatcatcggagaaagagttcgtactcacattggatcactctaactttcatgacactgtcagcaagcacgatttcatcgtcgtcgagttctacgctccatggtgtggccactgtaagaagcttgctcccgagtatgagaaagctgcttctatcttgagtagtcatgatcctccggttgttttggctaaaattgatgccaatgaggagaagaacaaagaccttgcatctcaatatgatgttaggggatacccaacaattaagattctgagaaatgggggaaagaatgttcaggaatacaaaggtccccgtgaagcagatggcatcgttgactatttgaagaaacaaag

SEQ ID NO: 246974 - DNA, 518 bp, Glycine max
  unsure (1)..(518): unsure at all n locations
ggttttagaagagtncttgngtgatgataagtatctcttgcgcactgccgtaccggtccggaattcccgggtcgacccacgcgtccgatcatatcagccttcagccaccgctgatattgtattcgacaccgaaggcaatcctattcgaaacggcggcacatactatgtgttgccagttataagaggaaagggcggcggaatagaatttgccaaaaccgaaacagaaacatgccctctcactgttgtgcaatctccctttgaggtctcaaagggtctaccactgataatttcatccccatttaaaatccttgacatcaccgaaggacttattttgagcctcagtttcacttatgtacccccctgtgcctcaactccttctcggtggaccgttattctcaagggtctgccagaagaactccatgtcaaactcactggctacaaaaacacaatagatggttggtttaggattcaaagagcttcctctgaatccaactactataaggtggtgtttgtacatt

SEQ ID NO: 246975 - DNA, 525 bp, Glycine max
  unsure (1)..(525): unsure at all n locations
agtattagtaggggtctcangtgactggtacgtagccctcngcgatgctgtaccggtccggaattcccgggtcgacccacgcgtccggctaaactcaaaaaaaaaaaaaaaaaattaaaaaaaaaaaaaaaaaaaaaaaaaaaaaaagaaaaaaaaaaaaaaaaaaagggtagaagatataaaagatcaaaaaattaaataaaaataaatgaaaaataataagatattatatagggtcacctaaattcaattaattggccgaaattttacaacgtcagtgactgggaaaaccctggagttacccaacttaatcgccttgcagcacatacccgtttagccagctggcgtaatagcgaaaaggcccgaaccgatcgcccttctaaacagtggtgcagcctgaatggcgaatgggacacgctctgtagcggcacattaatcgcgacaggtgtggaggttacgcgcagcttgaccggtacatttgcaagcgccctaacgcccgttcattccggtttgttactttcttat

SEQ ID NO: 246976 - DNA, 510 bp, Glycine max
  unsure (1)..(510): unsure at all n locations
gggaaggtngtgtagtcaatcgtagacgccctacggcactgccgtaccggtccggaattcccgggtcgacccacgcgtccgcttttggggagaccaccggagatatgtacggacggagtgattcttacgaatccgatttggcgcttctggattcgattcgccgccacttgctgggagagtccgaattgatattcggagccccgaatttcggttcgggtcggagctccagtttcagcagcttggactcgtgtttgagtgatgattggggagagcttccgtttaaggaggacgattcagaagatatggtgttgtacggcgttctccgtgacgcagttaatgtggggtgggtcccatccctcgatgccggctcgcccgagagcgtctcgtcgggttttccggcggtgaagctggagcctgatgtcatgccggcgttgattaatccgtgtccgccttcggcgccggcggtggaggagaagaagttgttccgccgaaggggaagcactaccgcgg

SEQ ID NO: 246977 - DNA, 507 bp, Glycine max
  unsure (1)..(507): unsure at all n locations
nggagggtgctgtcgtacctcgtaagtagctcgtcggcacgacgtaccggtccggaattcccgggtcgacccacgcgtccgcccacgcgtccgacgggaggagctactccacagaggaggagtatttgcgccgtttggggattttcgcccagaacatggtcagagcggcggagcatcaggcgctggaccccaccgccgtccacggcgtcacgcagttctccgatctcaccgaggacgagtttgagaagctctacactggcgtcaatggcggcttcccgtcatcgaataatgccgccggcggtattgcgccgccgttggaggtggacgggctgccggagaattttgattggagagagaaaggagctgtcaccgaagttaagttacagggtagatgtggatcatgctgggctttcagcaccacaggatctatagaaggagccaattttcttgccaccggaaagctcgtcagtcttagtgaacaacagctccttgactgtgacaacaagt

SEQ ID NO: 246978 - DNA, 506 bp, Glycine max
  unsure (1)..(506): unsure at all n locations
aggtngtgngtcttcatggagggctanggcactgccgtaccggtccggaattcccgggtcgacccacgcgtccgggctgaggctgctgcagcctcctttggggaaccagaaagtgagaaacaaaagtttttgggtatttgaagttgccaccttgaagaagattgtgcctctggggatgatgttcttttgcatcctcttcaactatacaatcttaagggacacaaaagatgtgttggttgtgacggccagaggaagcagtgctgagattataccgttttctcaaaacctgggtgaaccttcccatggccattgggttcatgttattgtacacaaagttggctaatgtgttgtccaagcaggctctcttctactctattattcttcccttcattgccttctttggggcctttggttttgttttgtaccctctcagcaactatattcaccctgaggcttttgcggataagcttctcaacatccttggnccacggttccttggtcctctn

SEQ ID NO: 246979 - DNA, 520 bp, Glycine max
aggttttagttaggtgtgtcaaataatagaatctgatactcctgcacgtaccggtccggaattcccgggtcgacccacgcgtccggccgcaccaagtgatcgacgcgaacagagagaaattcatcgtcgcagtaatcatgggtaaggtccatggatcacttgcacgtgctggtaaggttagagggcaaaccccgaatgtggccaagcaggataagaagaagaagccacgtggccacgcccacaagaggatgcagtacaatcgccgattcgtcaccgtcgaggtgggattcggcaagaagaggggacccaactcgtatgagaagctaaggcctacgcttgacgaatatgttggtactctatttgatttatctatgctgtcatacattcatgtttaatttgcatgttttgatagtgatgtgtgaacggtgattgttagctatatatcaaacttgaaatgttgcgtacaatatctaactatctaaagtcattgctgctttcaactgagaaaggatttggtcaa

SEQ ID NO: 246980 - DNA, 523 bp, Glycine max
  unsure (1)..(523): unsure at all n locations
naggttnntagtgagagtgnagtcanattctacttacctcatactatgcacgtaccggtccggaattcccgggtcgacccacgcgtccgcacaactactacaagtacttccttacaatcaaaaccaacaacaactatggcaagttatcaaaagcactacgatgatcagggtcgcaaggttgacgagtatggcaacgttgagaagcaaaccgacgaatacggcaaccctgttcatgctgctagtgtcacctatgtagccaccagaactgctgctggtggttacagtgatgacattaataagcaacatgataccaccaatgcctacggcgtagacactggtagacagcattctagtggtggctacgatggtgacactaataaacatcatggaactactggtggctataatgatgacaccaatagacatcatggaactaccggtgtctatggtatagacaccgataggcaacaacatgggactactggtggctatgccggtgacactggtaggcaacatgggaaca

SEQ ID NO: 246981 - DNA, 524 bp, Glycine max
  unsure (1)..(524): unsure at all n locations
aggtntaagttagaggggattttatcatcgatatggtatctcgtaggaatgccgtaccggtccggaattcccgggtcgacccacgcgtccgcccacgcgtccggttactttatcagtatcattcattgtcactacgattgttctaaaagcaattattactcttgagaagaattaaaatatcatcatcacaataacaagatgagttcaggaattagagcatggagtgtggcagctagtgttggagttgtggaggccttgaaagaccaaggcatatgcaggtggaatcatgctttaagatcagctcaacaccatctcaaaaaccatgttggctcattctctcaggctaacaagctttcttctactgctatgatctccacaacactaaaacatgagaaggcaaagcaatcagaggagtccttcagaactgtcatgtacttaagctgctggggccccaactagatatcataagtccaataagaaaatattctntctcttttaatttctagaaaatatcaagcttagtn

SEQ ID NO: 246982 - DNA, 516 bp, Glycine max
gttttagaagggatgtgtgtcatgactcgcgccctccgcatgccgtaccggtccggaattcccgggtcgacccacgcgtccgaaaaaaaaaaaaaaaaaaaaaaaataaattaaaaaaaaaaaaaaaaaaaaaaaaaaaaaaaaaaaaaaaaaaaaaaaaaagggcggccgttctagaggatccaagcttacgtacgcgtgcatgcaacgtcatagctcttctatagtgtcacctaaattcaattcactggccgtcgttttacaacgtcgtgactgggaaaaccctggcgttacccaacttaatcgccttgcagcacatccccttttcgccagttggcgtaatagcgaagaggcccgcaccgatcgcccttcccaacagttgcgcagcctgaatggcaaatgggacgcgccctgtaacggcgcattaagcgcggcggatgtggtggttacgcgcagcgtgaccgttacacttgccagcgccctagcgcccgttcctttcgctttcttcccttcctt

SEQ ID NO: 246983 - DNA, 521 bp, Glycine max
  unsure (1)..(521): unsure at all n locations
agttnnagttagaggacgtgnnctatcgaaccgagacctacgcgcatgccgtaccggtccggaattcccgggtcgacccacgcgtccgccattctctctgtgtatttccctacctctcccttcaagatgcagatcttcgtcaagaccctcaccggcaagaccatcacccttgaggtggaaagctctgacaccatcgacaacgtcaaggccaagatccaggacaaggaaggaatccccccggaccagcaacgtctcattttcgccggaaagcaacttgaggacggccgtacccttgctgactacaacattcagaaggagagtactcttcacctcgtcctccgtctccgtggtggcatgcagatcttcgttaagacactcaccggcaagaccataaccctagaggttgaaagctccgacaccatcgataacgtcaaggccaagatccaggacaaggagggtatccccccggaccagcaacgtctcatcttcgccggaaagcaactcgaggaccggcgcaccct

SEQ ID NO: 246984 - DNA, 517 bp, Glycine max
  unsure (1)..(517): unsure at all n locations
gggtaagggtcgtgnagtccatgatagagaccgtacgcgactgctctaccggtccggaattcccgggtcgacccacgcgtccgcccacgcgtccgcaagctgcaaaggagaagacccaggaaatggcccaagctgcaaaggagaagacccaacaaacagcccaagctgccaaggacaagacttgcgacacttcccaagcggcaaaggagaagacccaacagaatacaggagctgctcaacaaaagacctcagagatgggccagtccacgaaggaatcggcccagtcagggaaggacaacacccaagggttcctgcagcagacaggggagaaggtgaagggcgcagcccaaggtgctacagaggctgtgaagcaaacccttggcttgggcgagcatgatcaagacaaccgcagaaattactaatactataatttgaagtgctttcttgtagtagtggtttacgcagcatggctttttaaataagctgctattccctacactnctacctaaggagtgta

SEQ ID NO: 246985 - DNA, 512 bp, Glycine max
  unsure (1)..(512): unsure at all n locations
nagggaggggtgtattcgtccatcgatgcaactcctaggactgccgtaccggtccggaattcccgggtcgacccacgcgtccggcgaaggagatagtgaaagagcttcttcctctaattcgagtgtacaaggatggcagcgtggagcgtcttctaagctctgaaaacgtggcagcctcccctgaagatccccaaactggagtctcatccaaagacatagtcatcgcagacaacccctacgtctccgctcgcattttccttcccaaatcccaccacactaacaacaaactccccatcttcctctacttccacggtggcgccttttgcgtcgaatccgccttctcctttttcgtccaccgctatctcaacatcttggcctcagaagccaacataatagccatctccgtcgacttcagactcctnccacaccaccctatccctgctgcctacgaagacggttggaccaccctcaatggattgcttcccacgccaacaacaccaacaccaccaacc

SEQ ID NO: 246986 - DNA, 517 bp, Glycine max
  unsure (1)..(517): unsure at all n locations
aggtaaagggtactgtagtccctgacgcanatcgtacgcactgccgtaccggtccggaattcccgggtcgacccacgcgtccggtgagaaacatggcttccttaagctccttagtgctgctccttgcagctctaattctatcccctcaagttcttgcatactatgacaatgccccagtgtacaagcctaccactgagaaaccaccagtttataagcccccagttgagaagcctcctgtttacaaacctccagttgaaaaccccccaatttataagcctccagtagagaagccaccagtgtacaagcccccagttgagaaacccccagtttataagcccccatttgagaaaccaccagtgtacaagcccccagttgaaaaaccaccagtgtacatgcccccagttgaaaaacccacagtgtacatgcccccagttgagaaaccaccagtgtacaagcccacagttgagaagcccccagtttacaagcccccagttgagatgccaccagtttacaagcc

SEQ ID NO: 246987 - DNA, 511 bp, Glycine max
  unsure (1)..(511): unsure at all n locations
ggaagagtgcgttcgttccatgcatgcacctcgtaggcacgccgtaccggtccggaattcccgggtcgacccacgcgtccgattcagtgaagatcaacctcaatggcatctcttggcgtgcgaccagttcttccccctgcattaacttccatctccgacccacctcctcttttcgatggcaccaccaggttgtacatcagttattcttgcccctatgcacaacgtgtgtggatcgctaggaactacaaggggctacaagataagatcaatttggtccctattaaccttcaagacaggccagcttggtataaggagaaagtctaccctgaaaataaggtgccatccttggagcacaatggcaaggtgttgggagaaagtcttgatttgatcaaatatgtagatgcaaactttgaagggacacctttgtttcccagtgatcctgccaagaaaagagtcggtgagcaattgatatnccatgttgatacattcagccaaagacctgttcgttcat

SEQ ID NO: 246988 - DNA, 520 bp, Glycine max
agtatttagaaggagtgtgtccaacgcatgaactgcatactgctgcacgtaccggtccggaattcccgggtcgacccacgcgtccgcccacgcgtccgggaggacaagaaatatatgttgggccgctgggtcgtcactctagtcatttgatcaagtattttgagagcattgaaggggtgagcaaaatcaaagacggatataacccagctacttggatgttggaagttacaacttcagcacaagaacttagtttgggtgttgattttactgacttgtacaagaattctgatctatataggagaaacaagcagcttatacaagaactgggtcagcccggctcccggttcaaaggatctttatttccctactcaatactctaagtcattctgggcccatggccaaccttgctaatgaaaccaccgttgtcataatggcgtaatccaccatacactgctgtgaggtttttcttcactactttcatagccctgatgtttggaacaatgttctgggacctcggaag

SEQ ID NO: 246989 - DNA, 524 bp, Glycine max
  unsure (1)..(524): unsure at all n locations
agtnnttnggtaggaggnncttgnngtgatcgatacgtatactcctgcggatccggtccggaattcccgggtcgacccacgcgtccgctttgttgtaagcagcacgttgaagttgccgttcccagtccaaaggcaaatgaggttttaatcaaactggaagcagttagcattaaccctattgattggaagattcagaagggtcttctccgtcctttatttctccccagaacctttccccacataccttgcactgatgtggctggagaaatagttgagatcggaactcaagtcaaagatttcaaagttggcgaccaagtccttgctaaactcactcatcaatatggaggtgggtttgccgagtttgctgtggctagtgagagcttaacagcagccagaccatctgaggtctcagccgctgaagctgcagcattgccaatcgccgggcttacagctcgtgatgccctcactcaaattgcaggagtcaagcttgatgggactggccagctcaagaacattntagtaac

SEQ ID NO: 246990 - DNA, 515 bp, Glycine max
  unsure (1)..(515): unsure at all n locations
aggggtagagaggtgttcnactatggatctctacccctgccgtaccggtccggaattcccgggtcgacccacgcgtccgcaaaaagatcaagttgaccttcttcattatgatctttgcctctgttcactttgtactgtctcacctgcccaacttcaactccatttctggtgtatctctggcagcagcagttatgtccttgagttactctacaattgcctgggcagcttctgctcataagggtgttcaagagaatgtagaatatggttacaaagctaagagtacatcaggaacagtctttaacttctttagtgcccttggggatgttgcttttgcctatgcttggacacaatgtggtgttggaaatccaagcaacaattccatctacaccagagaaaccatccaagggtcctatgtggagaggagatgttggtgcttacatagttgtggctttatgctacttcccagttgcccttattggttactggatgttcggcaatacagttgaagataacat

SEQ ID NO: 246991 - DNA, 521 bp, Glycine max
  unsure (1)..(521): unsure at all n locations
gggtttaggagagtatcgtgtngttcttcgccttgtaagctcgtacgcctgccgtaccggtccggaattcccgggtcgacccacgcgtccgcccacgcgtccgtattcttcgtgtcttgttgtgtttttcatctgagatgtgtggaggagctatcatctctgatttcattccggcggcggcgatcgccgggtctcgccgcctgaccgccgattacctgtggccggatttgaagaagcggaagtctgacttggacgttgacttcgaggctgatttcagggattttaaagacgattctgatatcgacgacgacgacgacgatcaccaagtcaagccctttgctttcgccgcctcttctcgtctgtctacggcagcgaaatctgtggcattccaaggtcgggctgagatatctgcaaatagaaagaggaagaatcagtataggggaatccgtcaacgcccttggggaaaatgggcagctgagattcgggatccaagaaagggggttcgtgtctggcttggaacc

SEQ ID NO: 246992 - DNA, 519 bp, Glycine max
  unsure (1)..(519): unsure at all n locations
agttntagaagagtacgtgtgttttgacatgaaactctaggatgccgtaccggtccggaattcccgggtcgacccacgcgtccgttgcaaattgagaaacgtttgagaactgatttggaagaggaaaaggcacaagaaattgctaagttacaggaagctttacatgcaatgcaaatacaagtagaagaagcaaataccaaggtcatcaaagagcgcgaggcagcacgaaaggccattgaagaagcacctccagttgttaaggagactcctattataattcaagatactgaaaagattaattcattattggctgaagtcaatagtttgaaggaatcactcctattggaaaaagaggctaaagaagaggccagaaaagctcaggctgaggctgaagctagaaataaagagatggttaaaaaggttgaagattctgaccgcanagtggatcaacttcaagaattggttcagagattggaggaaaagatttccaatgcagagtcagaaaatcaagttcttcgc

SEQ ID NO: 246993 - DNA, 520 bp, Glycine max
ggtttagagagtacgttgtgttcttgatacgcatgctcgtacgcactgccgtaccggtccggaattcccgggtcgacccacgcgtccgcaaatgtgctcaatgatgccttccccatttctcatgatggagagtttggaacaattaacaattttcgacttggaagacttcctaaaattcctgttgaatgggatgagataaatgctgcctggggccaagcttgcctccttcttcacactatgtgccagtatttccgaccgaagtttcaatatcgaataaagataattcctatgggtagctaccctcgaatcacagacaccaataacagtacttacgagctgtttggtccagtcaacttgttctggagtactcgctatgacaaagcaatgacattgtttttagcatgcctcaaggattttgcagactttgccaaatccaaggatcaagagaataacataccacctgagaaatgtttcaaactgccttacaagattgagaatgacaaggtggaaaactattcca

SEQ ID NO: 246994 - DNA, 495 bp, Glycine max
gttgaaatcgaatcgtagcgatgccgtaccggtccggaattcccgggtcgacccacgcgtgcggccatctttcccaaaactgggcatagaagttttatctcacaaggctcaaaatcttcaacaataatttatcaggcagtatttcaccagagctaagtcaggcaaccaagttacatgtacttcacctgtcttcaaaccatctgacaggaggcattccagaagattttggtaatttgacctacttggtccatctttcttttaataacaataatctttctggaaaaggtcctattccaatagcatcattgcaagaacttgaaccttagaccttggagcaaattattttgctagcttaattccaaatcaacttggcaatttggtcaagttattgcatttgaatttgagccaaaataattttagggaaggtattccatccgagtttggtaaattaaagcatcttcaaagtcttgatcttagcagaaactttttgagtgg

SEQ ID NO: 246995 - DNA, 516 bp, Glycine max
  unsure (1)..(516): unsure at all n locations
gggagagggcttttattcngtcgatcgtactgcactctcgtagaacnnccgtaccggtccggaattcccgggtcgacccacgcgtccggccgcgcgcgcgcactctctgtctcttgcgcatggggtggtagcgcagctccttctagatgtaaggaagatgggtacggacaaggttcacatcagtattgtggtcattggccatgtcgactctgggaaatccactaccactggtcacctgatttacaagcttggaggcattgacaagcgtgttattgagaggtttgagaaggaagctgctgacatgaacaagaggactctcaagtatgcctgggtgctggacaaacttaacgctgagcgtgaaagatgaatcaccattgatattgctttgtggaagtctgaaacaccaccagattattgcacagtcattgatgcgcctggacataaggatttcattaagaatctgattactgggacatcccaggctgactgagctgatcttatcagtgactcgaccac

SEQ ID NO: 246996 - DNA, 518 bp, Glycine max
  unsure (1)..(518): unsure at all n locations
nggttttaagaggggtgtattcttttaagaagccctcagtcactgctcgtaccggtccggaattcccgggtcgacccacgcgtccgcccacgcgtccgaaaaaaaaaaaaagtcaaacagagaattaggcaataagctaaagatgtctgacgattgcaaaggtaagagctcatggcctgagcttgttggagtgcaagggacagtggcagaggctacaattgagagagagaatcctttggtgaatgctatcattgtgcctgaaggaaacagggtcatcactgattaccgctgtgatagggttgggtttggatcaacaaagatggaattgtcaaggaagttccacacattggatagaaacttttccctctagctagggttcaaataattgtttccagttttatgttattttattcagaaagtttcagaaatgtcaaaagattaatataataaaccaactagagttggccttgtaaaatgttttagattcaaaatctgttgttgtcattgcataaaaaaaa

SEQ ID NO: 246997 - DNA, 492 bp, Glycine max
  unsure (1)..(492): unsure at all n locations
gattgattgcantctgtaggcactgccgtaccggtccggaattcccgggtcgacccacgcgtccgcttttcttattgcttgttgcgttctccctcgttttcgcggccgtgtcggcctcttcggacggcggcaacgaggaaccgctgatcatgcaggtggtcgatggcggtgacgtccggctgggagcagagcaccactttttggagttcaagcgcaggttcgggaaggcgtacgattccgaggacgagcacgattacaggtacaaggtgttcaaggctaacatgcgccgcgcccgccgccaccagagtctggacccttcggcggctcacggcgttacgcgcttctccgatcttacgccgtcggagttccggaacaaggtgttgggtctgagaggtgtgaggttgcctttggacgcgaacaaggctcccattctccccactgataatcttccgagtgattttgattggagagatcacggagcagttacccctg

SEQ ID NO: 246998 - DNA, 521 bp, Glycine max
  unsure (1)..(521): unsure at all n locations
gtatagttttaggtggtcgggccactgaagcattacgactgtcgtaccggcccggaattcccgggtcgacccacgcgtccgaaaattgcagtcttctgtgaatgttgattataagcctaataatgatggttacaactggaggaagtatgggcaaaaacatgtgaaaggtagtgacttctcaagaagttattataagtgcacacgtccaaattgtcctgtgaagaaaaaacttgagcgttctcttgagggtcatgtgactgcaattatttataaaggagaacacaatcatcaacgtgctcatcgcagtaagattgtgaaagaaacacaaacttcaaatgaaaattcagtgtctaagatggatctagggtctagtcaggccacaggtgaacatggatcaggaacacgtgatagtgaggaagtacatgaccatgaaactgaagcagatgagaaaaatgatgaacctgatgccaagagaagaaacacaggaaccaggatccatgatccagccactttgcatagan

SEQ ID NO: 246999 - DNA, 521 bp, Glycine max
  unsure (1)..(521): unsure at all n locations
aggtnaggttnagtgtgtcgaccgctggatgctgnagactgtcgtaccggcccggaattcccgggtcgacccacgcgtccgcccacgcgtccgcccacgcgtccgaatacaacgaatggatgagccattcgtgaccgtgaattcgggctccatattttacccacaactcaaagacctaccacgaaatccagcatcatccatcattacccacccattaaccaatcgaattaagactcaacagaaagcaccacccttttctatgtgggagcagtgaagggcgttcaacgccggcggcggagccataacctggttccccggccacatggccgccgctacacgtgccatccgccaccgtcttaaactcgctgacctcgtcatcgaagttcgcgacgctcgcattcccctctacttcgccaacgccgacctccagccacacctctccgctaaacgacgcgtcgtcgcactcaatagaaaagacctcgccaaccctaacatcatgcataaatggacgcattattttg

SEQ ID NO: 247000 - DNA, 520 bp, Glycine max
  unsure (1)..(520): unsure at all n locations
agagtnagggaaggtggatataccaatgatgcatgatactctcgcgcactgccgtaccggtccggaattcccgggtcgacccacgcgtccggggatattttgtttgccaccttctggggtcatccctcttcacaatcaccctggaatgacggttttcagtaagctactttttggcactatgcacatcaagtcatatgattgggtcgttgactcgcctcctgaatctcctacaactctcaaaccatcagaaaaccaaggtcctgagatgaggttagccaaagttaaggttgatgctgatttcactgctccttgcaacccttccatcctttatccagaagatgggggcaacttgcactgtttcacagcagtgacagcatgcgcagttctagatgtgcttggtcctccatattctgatgctgaaggcagacactgcacatactaccacgatttccccttttccaacttttcagtggatggattatccataccagaagaggaaaagaatgcttatgaatggcta

SEQ ID NO: 247001 - DNA, 512 bp, Glycine max
  unsure (1)..(512): unsure at all n locations
gtaggtcgtgccactganccatggaagctgtagcgcactgccgtaccggtccggaattcccgggtcgacccacgcgtccggtcaaacttagccttcttgtttcatctataagagtagcaaccatgtggtctgcagtaacagatcccattagagctttttttgcaaattttctccgccatttcatccacaaagacttccatgaagcagtggccagaatgaccataatagatgctttcctcttcgttattgtgcactccattgataagttggggatatggccacgcttgccggttttcttagggctattgtacctggcgattcggcggcggcttcatcaggagtacaacctcttcaacgttggaacaacaccggtgggggttaggtttaaccattctgattttccatacagaacagctgatggaaaatataatgaccctttcaacgaagttgctggcagccatgggactntctttggcaganatattctccctgtggatcagaaaaaaaagcta

SEQ ID NO: 247002 - DNA, 534 bp, Glycine max
  unsure (1)..(534): unsure at all n locations
gtcaagttgaggtgngtacnaccactgatncctgnagactgtcgcgacgccgtaccggtccggaattcccgggtcgacccacgcgtccgcaataacatagcatagagtgagaagtgagaagagaaaaatggcaatctccatacccagtagacaacttttcatagatggagagtggaaagtccctcttctcaacaatcggtttccgatcatcaaccccgctactgaagacatcatagggcatattccagccgctactaaggaagatgttgaccttgcggtggatgctgctaaaagagccttttcccataacaaaggcaaagattggtcttcagctcctggctctgttcgtgctcgctatcttcgagccatcgcttcaaagataacagagaaaaaggatgaactaggaaagcttgaagcaattgattgtggaaaaccactagatgaagcactggcagacctggatgatgttattggttgttttaactactatgccgagcttgcagaaggattggacgcaaagcaaaatgctcctgn

SEQ ID NO: 247003 - DNA, 337 bp, Glycine max
gaattcccgggtcgacccacgcgtccgcagagagcaacactggatattaagagagctgatggtaatgaggccatcattgctgaagaagcatatataggagtcgattggggagatggatgcccttttggtgctgctatagttcataatgatgaaatagtttctagttaccacaacatggttctgtgtaacacagacccaacttctcatgctgaggtgacatcaataagatatgcttgtaagaatcttaagcagatagaacttgcagattgtgaaatatatgctttttgagaaccttgccccatgtgcttaagagcaattcacctttcttgaataaata

SEQ ID NO: 247004 - DNA, 517 bp, Glycine max
  unsure (1)..(517): unsure at all n locations
agttaggtttagtagtgtgtcgtgatggatgcatgagactgtcgtaccggtccggaattcccgggtcgacccacgcgtccgcccacgcgtccgtggagctgaatatggctgtggaagctctagagattgggctgccaagggtccaatgctactgggagtcaaagctgtgatagccaagagtttcgagagaattcatcgtagtaacttggtaggaatgggtatcattcctctttgcttcaaacccggtgaggatgcggacacattgggattaactggtcatgaacgttattcaattgacctaccaagtaaaatcagtgagattaggcctggccaagatgtgacagtcacaaccgataatggaaaatctttcacctgcacagtacgctttgacactgaagtcgaacttgattacttcaaccatggaggcatacttccatatgtcataaggaacctcattaagcagtgaaggccattgtcgatggaaaaattccaggtcattgtcccaatatgcttttan

SEQ ID NO: 247005 - DNA, 524 bp, Glycine max
  unsure (1)..(524): unsure at all n locations
cgataagtttgagtagtnatcatnccgatggatcccctgtaagctgtgcgcactgccgtaccggtccggaattcccgggtcgacccacgcgtccggttaaccagtatgttaaccctgccccgttccctggaaacggagttcaagtctcacctgttactccatctgctgatgttactgcttacttcagctctgagcattcgagcaactcgtttgattattctgaccttggatggggtgaacaagtccccaagacccccgagatctcatccttgctttctgctgctcctttggagggtgctgctgatcaggttcagaagaccaacaactcgcaggatgtggtggctgcacaagatgattctgcaaaaaccctttccgaagagcttgcagacattgaatcccagctcaagttctttgagaccccttcttttcttgatgaagcctgngctgatgctacattggcgtctttgctcggcggagacgcaactcatgacgccgccggaaaccctatgaacctttggagcttc

SEQ ID NO: 247006 - DNA, 352 bp, Glycine max
tcccggtcgacccacgcgtccggccacgcgttctgccaagcgttcgcacatcgttacagatccgtttcaagtttcactggggacttcatctgttgatgaaactgctgatttgaggtaataccataccagaaactatgcttattctaaccgctgctgattgtgctaacaacctctcactattcagccagaatgctgaacgttttcggttggttcttgctagtggattggtggttagggcaacgaaaggatccactaaccagatgtcgctgatcggaatgatgattgaaccgatccaataggcgaagaacgagctcgcattgaatcccacctcaaggtatgctagactcgtgcg

SEQ ID NO: 247007 - DNA, 514 bp, Glycine max
  unsure (1)..(514): unsure at all n locations
ggggagttagtagntntnncactgancattgatactctagcgccgccgtaccggtccggaattcccgggtcgacccacgcgtccgcccacgcgtccgaaataatgaaaaagtacaacctaagagagaagggaggttctgaacatcagacatatgctttgggaattaaagaggtttgggaaattgatgagaaaaagcatcaacctggtgctgtaatccacacattgggatggcccttggatcataaaacatacggaggatcttttctgtatcacatgaaagataaacaaatatctataggccttgtggttgctttaaactatcagaaccctttcatgaatccttatgaggaattccagaaactaaagcatcatcctgcaattaaatcatttctggaaggtggaacagttatccagtatggagctcgcactttaaatgaaagtggttttcagtttttcctggaggagcaattattggatgttcagctggcttcatgaatgtgccaaaaataaaggg

SEQ ID NO: 247008 - DNA, 510 bp, Glycine max
  unsure (1)..(510): unsure at all n locations
gtaggtgtgnctttganaatagatgctcttcgcactgccgtaccggtccggaattcccgggtcgacccacgcgtccgctttttgattcctaaattctctaaaattcgaaattctaatttcgttaggggaaagagattgtttgtgtgtgagtgagtatggctggaaaaggcgagggtcctgctatcggaatcgatttgggaacgacgtactcttgcgtcggcgtgtggcaacacgatcgtgttgaaatcatagccaacgatcagggtaacagaactaccccatcctacgtggctttcaccgacacagaacggttgatcggcgatgcggcgaagaaccaggtcgctatgaacccaaccaacaccgtttttgatgctaagcgtttgattggaaggcgtttttccgatgcatcagtacaaggtgacatgaaattgtggccgttcaaggtgattcctggccctgctgagaaacctatgattgtggtgaactacaaggnggaggagaaacagtttt

SEQ ID NO: 247009 - DNA, 534 bp, Glycine max
  unsure (1)..(534): unsure at all n locations
gggtnagtttntnagtagttnctnncttttgaanncatcgaaactcgtgcgcctgccgtaccggtccggaattcccgggtcgacccacgcgtccggctccatgcttgcgcatgcaacgtgtgacatgcatccttttcattgtcaccttagccttcgtggcttaggtgctgacgattggttcctgtgttgcctacctaccaaacggtattcgtgtggctagtcagacccattccatccaggcctctttgttggggacgctggaggatttcaaagtcccacacgtgaaccacgttagtcgtccatcataacggcttcctgtggcacacgtgtggtgattgttctctcggatgcggtgcatgcagtgaacgtgggtggtctagtgcccccacattgttccttaaaatcggttgtctcggatgacgctttgccctgcgcttggcttgntaaacgcgatgctactacttctagttagctagcgctggcaatgctcgtggcaagtgctttgtcattaacggatgctaccctgttgatcct

SEQ ID NO: 247010 - DNA, 538 bp, Glycine max
  unsure (1)..(538): unsure at all n locations
ggggaggggnagttnnagaggaggtcntgnctatgnanncatggaggatttatgcgatgcccgtaccggtccggaattcccgggtcgacccacgcgtccgtaggcctcagcctctccaatatgtggtcaatgcggcctttttggctgccctatatagtgattatcttgatgctgctgatacacctggatggtattgtggacctaatttcttttcaaccgacgtgctccgtagctttgccaagtcccagattgattacatccttggaaataacccaaggaaaatgagttatgtcgtaagttttggtaatcattacccaaaacacgtccaccatagaggagcatctgtaccgaagaacaagatcaagtatagctgtaaaagtggatggaaatggaaggacacttctaagccaaacccaaatacaatttttggtgccatggtttgccgtcctgacaagcatgatggctttcatgattgtcgtaccaactacaattacacagagccaacacttgctggaaatgccggtttaantgctgcact

SEQ ID NO: 247011 - DNA, 521 bp, Glycine max
agtaagtaagtaggtctgcatcgatcccttcgcctaccgcatgccgtaccggtctcggaattcccgggtcgacccacgcgtccggtgatgttcaagctttcagaaagatcagtctattcacgatagttaacccttcaatttgggggaaatttccatgtaaaatcaatgccagattttgaagtggtttttattttgcatgaatcttcaattgaattttatattacaaaaaccaaattgattacatacttgaaaataacccaaagaaaatgaattatgtcaaaaagatttggtaatcattacccaaaacacagtacaccatagaggagcatctgtaccgaagaacaagatcaagtatagctgtaaaggtggatggaaatggagggacacttctaagccaaacccaaatacaattgttggtgccatggttgccggtcctgacaagcatgatggcttccatgatgttcgtacaaactacaattacacagagccaacacttgctgaaaatgccggtttaattgctc

SEQ ID NO: 247012 - DNA, 518 bp, Glycine max
  unsure (1)..(518): unsure at all n locations
gtagtntggtnnagtggggtgtgatcatgaagctcggacgctgtcgtaccggtccggaattcccgggtcgacccacgcgtccgctctgaaggaaaaggatgcgggaaatgcatcttataagaagaaggattttgataccgcgattcaacattacacaaaggctttggagttggatgatgaggatatttcgtatctcactaaccgcgctgctgtctacttggaaatgggaaagtatgaggaatgcataaaagattgtgacaaggctgttgaaagaggaagagaactaagatcagattttaagatgatagcaagagctttgacaaggaaaggaaatgccttggtgaaattggcgaagtgctcaaaggattatgagcctgccattgagacataccagagagcactcaccgagcaccgcaaccctgacactttaaagaaacttaatgaagccgaaaaggcaaagaaagaactagaacaacaggaatattttgatccatagttggctgatgaggagagagaaa

SEQ ID NO: 247013 - DNA, 518 bp, Glycine max
  unsure (1)..(518): unsure at all n locations
ggtaagtcttagtgggtcnatgatggagccatgagcacgtcgtaccggtccggaattcccgggtcgacccacgcgtccgataatccagacatgtatgcttacatggctccttatttggatgctaggcaagacatggtggtggtagaggtaccaaagctagggaaagaggctgcagtggaggccataaaggagtgtagccagccaaagtcaaagattacccacttgatcttctgcaccactatcggtgaggacatgcctggtgctgattaccgactcaccaaacaattggaccttagcacttatgtgaagaggtacatgatgtaccaacaaggttgctttgcatgtggcacgggtcttcattaggccaaggatttggctgagaactacaagggtgcacgtatgcttgacgtctgctctgacattactgcggtcacatttcgtgcgccaagtgacactcaccttgatagtcttgtggaccatgcattgcatggagatggagctgctgcaaacattgttgg

SEQ ID NO: 247014 - DNA, 521 bp, Glycine max
agtaggctagatgagtggtgtctaatgatggagcatgcacgcctgtcgtaccggtccggaattcccgggtcgacccacgcgtccggaaaaaatgggcagattatagtgcctgttttttaccatgttgacccaacccatgtacgccatcaaacgggtagctatggacatgcttttgcaatgcacgaacaacgttttgttggcaacatgaacaaggttcaaacttggcggcttgtgctgggtgaagtagccaatatatctggctgggattgcttaaccacaagggtggagtctgaactagtagagaaaattgcaatggacatattacaaaagttggactctattacaagcgggggcctagaaagacgcatagcaacgtacaagcaaatggcacagcaaaagctagaaaagtcactgaagacgagtaacatgagagacatggaagacttgatcacgacactgctccaacttggggagctgaaattggagaaagccatgcgcactgatgattcgagcgtttggga

SEQ ID NO: 247015 - DNA, 521 bp, Glycine max
  unsure (1)..(521): unsure at all n locations
ggaggtaggtgagtaggtgtgcgactgaggctgntagctgtacgcactgccgtaccggttcgggattcccgggtcgacccacgcgtccggggaaaaccattgtggatttgttcgcttttgaattcaaaggtcgaccttatgagtattaggtaagtgcagcgaaatgtggaaggattcaagtggatggtgagatggtaccggtgtcatacatagttaaatcatctcaaaagataagccatttcttacacaggcatgaaccacctgtgatggcttgtgaggttcctgttcttcaaaaagatattgatgcgctaactgtttgtaagccagcatatgtcccttaggtgcacccatgtagtcaatatcggaagaacactgttgttggcattcttcaagctagagcatgggctgacccctttatttcctggtcattagactggatcgccttgtctcaggacttcttaatttggccagagatgcagcaaaatctgacattctttaggaacagattgaaacgggtttaa

SEQ ID NO: 247016 - DNA, 527 bp, Glycine max
  unsure (1)..(527): unsure at all n locations
ngatagtttaggtttaggtaggtctcgnccatcggannctcttaggctcgtacgcctgccgtaccggtccggaattcccgggtcgacccacgcgtccgcccacgcgtccggtagaattcacaaaggagtatgttcaacctggatgaagaatgctattcccttagaaaaaagtcccgactgtagctgggctcctatttttattaggccatcaaatttcaagctaccagttgatcattcaattcctattattatggttggacctggtactggtcttgcacctttcaggggatttttacaggaaagatttgccctcaaagaggctggtgttcaacaaggccctgcaatactcttctttggatgtaggaatcgtcgattggtaaattaattgatctttgtgctttagatccaaatgggttttcagagcaatttctgatttcccaatatgtttgtataggattttatttatgaggaggagctaaagaattttgtggaacaaggttctctgtcaggtttgataggtgcattct

SEQ ID NO: 247017 - DNA, 526 bp, Glycine max
agttttagtttagtgaggtgtgatcatgatgcatggctccctcacgcactgccgtaccggtccggaattcccgggtcgacccacgcgtccggccagtggagagatctgggagaaggagctgaaggaggaggaggtgcaaggtttgatataataatttgcccaccaaagactcgccggccgcctggaaggcctaaaaagaaggttatacgagtggagaactttaagcgtcccaaaagagttgttcaatgtggtcgctgtcatatgttaggacattctcaaaagaaatgcacaatgcccatttgaaaaatttgtttacttgttgaaatatcttttgtttatgggacatatatgagatagaacgaatgttgtgtttgtattgtaatttaaatgtattctgaacaaaataagaatccattagtttttgccaaggttctcatcaaaaaaaaaaaaaaaaaaataaaaaaaaaagggcggccgctctagaggatccaagcttacgtacgcgtgcatgcgacgtcatagctcg

SEQ ID NO: 247018 - DNA, 524 bp, Glycine max
  unsure (1)..(524): unsure at all n locations
agtnagtnatagaggtgtgcgctgatgcatgnaactgtngtcactgccgtaccggtccggaattcccgggtcgacccacgcgtccgcccacgcgtccgaagttttggtcattcattcttcaaggactcttttaagcgagtttttgaggatggggagcaatctcttggtctttgtttcaatggaaccctagagataaattgctccaaggaaatcaaaattcagggaattattggaccttgcacctcgttggaaaagaaagggccttctgttgctgatactgttataggagagggaaacacaacagcatggaagatgtgtggccttgacaagagtacatgcttgactgtgatgtttgatctttcatcaagtgatcgttcaaatacccctggtgctgttaacccacaattgtacctacagttccttacaagttaccaggacccaagtggtcaatcagtgcttcgtgtcacaacagtaactagaagatgggtggatagttctgttagctctgaggaattggttcaagg

SEQ ID NO: 247019 - DNA, 388 bp, Glycine max
  unsure (1)..(388): unsure at all n locations
aattcccgggtcgacccacgcgttcgccgatctcggttggtgtagaactcttcatggtcatgccggaaaggtgtactcattggattggacttcagaaaagaatcgaattgttagtgcattccaagatgggagattgatagtgtggaatgctctaacaagccagaaaacacatgccataaagcttccctgtgcgtgggtcatgacctgtgctttcttcccaaccggtcaatctgttgcatgtgggggccttgacagtgtttgctccctttttaatcttaattcccccactgacagggatgggaatctagccgtttcacggatgcttagtggacattaaagttatgtntcctcttgtcagtatgttccagatgaagatactcacttgatt

SEQ ID NO: 247020 - DNA, 401 bp, Glycine max
cggtctcggattcccgggtcgacccacgcgtccgcccacgcgttcgaaaaaaagaaaaaaatttaaaattttaaaaaaaaaaagaaaaaaataatgtaaaggtaaaaaaaaaaagataaaagtaaaaaaaaaagaagaaaaaaataaaaaaggacaccatcttacaagacaaacgcttgagtggatgcacattaaagaataaggatcttaaagcagttcacgagataatgaaattggctcacaaagcgatagagactaatgatgtaatagtggatgtgaagctcaagatggctgtgtggaaccagtggatactcagcgtggtaagtaggattaggattcggattgctcgaaagaggaactacgatgaggatgcaaaggaagagcttaattgtaacgttact

SEQ ID NO: 247021 - DNA, 522 bp, Glycine max
  unsure (1)..(522): unsure at all n locations
gttagtttagttagtaggtgtgtcgctgatgcatgnagctcgtacgcactgccgtaccggtccggaattcccgggtcgacccacgcgtccggtgctggcataacttcaacaacttattctttgttctcgatctcacgatggctcatttggccctgtctcagatggctgtaactgttcctgttggcagcgatttgtctctcagaagatctgcggttaaggcacctaactttaacttttgggataaatcatgggcaccagtatttactttgtacttgaaggcaaacaactcaagtttaagaagtcgtcatgtggtattcatgtcagtgcaacaagcaagtgtacccaaagttaatgtatcacctttagagttggaagatgctaaagaacctccattgaacttacacaagcctaaagaaccctatacagcaacgattgtttctgttgataggctagtgggaccaaaggctcctggggaaacttgtcatattgggattgatccatgggggaaatgttccctactgg

SEQ ID NO: 247022 - DNA, 518 bp, Glycine max
  unsure (1)..(518): unsure at all n locations
aggttagttagtatggcgtgcctccgatgtcatactatcatntcgtacgacgtaccggtctcgaattaccgggtcgacccacgcgtccggtgctggtataactacaactttttagtctatgctctagatctcacgacaagggatttgggcctgtcttagatggctacaactgttattgttggcagcgattagcctcttagaagatctgatggtaatgcaactaacttcaactttcgggataaatcatgggcaccaagttctaacttgtacttgaaggcaaacatctcaagtttaagaagtcgtcattgaggtattcatgacagtgccacaagctagtgtacacatcgttgatgtatcatctttacagttgtaagattcctaagatccttcaatagacttacagcatcctagataaccctttacataacggattattgtgatattatccttttgtaccaaatgcttctaatttatcttggactatatataatgattatggttgtaatgattcactctcg

SEQ ID NO: 247023 - DNA, 532 bp, Glycine max
  unsure (1)..(532): unsure at all n locations
agatttgagaagtgaggtatgatgattgatgccccagcncactaagncatgcctgtaccggttcgggattcccgggtcgacccacgcgtccgaaaaaaaaaaaaaaaaaaaaataaaaaattaaaaaaaaaaaaaaaaaaaaaaaaaaaaaaagaaaaaaaaaaaaaaaaaaaagaaaaaaaaaaaaaaagaaaaaaaaaaaaaaaaaaaaaaaaagaaaaaaaaaaaaaaataatatagagaaaccaaaataaaataaaaatggaagaggtataaaaaaataaatgactggaaaaacaaaggcgttaccaaaataaataggcttgcaggaaaaaaacatttggcaaggtggagaaatagcaaaaaggaccataccgatcgcccttgcaaacagttgtgcaacctgaatggcaaatgggactggccctgtaacggggaataaaaatgaaaggctgtagtggttacgcgcaaggtaccgttaaatttgtaagagcattaaagcctgtactttagatttaatacgataacttag

SEQ ID NO: 247024 - DNA, 530 bp, Glycine max
  unsure (1)..(530): unsure at all n locations
ggggtaggtnaggtaagtgggttcnagccatcgaaacatgcagtatctcgtcacgccgtaccggtccggaatttccgggtcgacccacgcgttcgcccacgcgttcgaagaaaaattgcacctaccaccggtggagtcaagaagcctcatcgctatcgtcctggaactgttgctcttcgtgagatccgaaaataccaaaagagcacagagcttctgatccgcaagctcccctttcagcgtcttgttcgtgaaatcgcgcaagacttcaagcaaatcactgacattttttggtgatatcggtgccaatgtgaccgatatgattccagactgatttgagggtccagaatcacgccgttcttgcgcttcaagaaactgcggaggcttacttgggggggttggttgaagacaccaaactttgtgcgatccacgcccagagagtgaccatcatgcccaaagacatttcactcgcacgccgcattcgtggagaacgtgcttaggcttataataatgataatagcatagttgtcgcc

SEQ ID NO: 247025 - DNA, 419 bp, Glycine max
cggcctcggattctccggtcgacccacgcgtccgcccacgcgtccgctcatggcctgagttgtttggagttgaaggaacggtggcggtggctacaattgagagggagaatcctttggtggatgctaacactgtgcttaaaggatccatcgtcaccgctgattttcgatgtgatagggttcgggtttgggtcaccaaacatggaattgcttatcaagctccaagaattggataagaagtgtttacactaaagcacttcatatatatgttatgagtcatgaatataatagtatttaaataaggagttattcttccaattatgttatttgattggaaatgataacatgactataagaaatttgttatgtctgatatctaattatgttatgctctgcaaattaatatacaaattgtgtgattc

SEQ ID NO: 247026 - DNA, 517 bp, Glycine max
agttttagtagtgggtctgatcatggatgcatgcagctcgtacgtaccggtccggaattcccgggtcgacccacgcgtccgcaatttaccagctatacttgttcctttttaaggttagaagtgctacaatacaaacaatggcagctactcaggaagatgtgaagcttttgggtattgtgggaagcccatttgtgtgcagggtccagattgcccttaagttgaagggagttgaatacaaatttttggaagaaaatttgggcaacaagagtgatttgcttctcaaatacaaccctgttcacaagaaggttccagtgtttgttcacaatgagaagcccatagcagagtctcttgtgattgttgaatacattgatgagacatggaagaacaaccccatcttaccttctgatccttaccaaagagccttggctcgtttctggtccaaattcattgatgataagattgtgggtgctgtatggaaatctgttttcacggttgatgagaaagagcgtgagaagaa

SEQ ID NO: 247027 - DNA, 360 bp, Glycine max
ggaattcccgggtcgacccacgcgtccgcaatttaccagctatacttgttcctttttataggttataagtgctacaatacaaacaatggcagctactcaggaagatgtgaagcttttgggtattgtgggaagcccatttgtgtgcagggtccagattgcccttaagttgaagggagttgaatacaaatgtttggaagaaaatttgtgcaacaagagtgatttgcttctcaaatacaaccctgttcacaagaaggttccagtgtttgttcacaatgagaagcccatagcagagtctcttgtgattgttgattacattgatgagacatggaataacaacctcttgttaccttttgatcctta

SEQ ID NO: 247028 - DNA, 527 bp, Glycine max
agtttttaggagtgaggtcatgcccatggatgctcgtatgctcgtcgcgcctgccgtaccggtccggaattcccgggtcgacccacgcgtccggaaaatgggaggaagaaggaaagaaagggtatcatggattattcaacatctaaacgccgtcgtcggcataatttgtgtgtctgtagaatacaactcattccccttcgaaacttgaaataaacaaaaacccacacaacctgcgatcatcaacacaattaggttttcccctcaatggtcgccaattcccacagagtgggttcttcctacggtggcgctgccccttaccgatcaagagatgggcttagcccccgacccgttggtgcctcagaggagatccaattacgaattgatcccttggacttggacgatgagatcactggtcttcatcgccaagttagaagattgaaacatgtatgtatctgaagacctttttttcttaatttcttttttctatctattcactttgtacttgttatttctttgtttttgttggg

SEQ ID NO: 247029 - DNA, 524 bp, Glycine max
agttttagttgagtaggatgtgatgatcgtatgatcgtagtgtgatacgcctgccgtaccggtccggaattcccgggtcgacccacgcgtccggcagggcgaccggaagccggacggcggcgacaagaaggagaagaagttcgagccggcggcgccgccagcacgcgtggggcggaaacagcggaagcagaagggcccggaggcggcggcgcggctgccgacggtgactccggtgacgaagtgcaagctgcggctgctgaagctggagcggatcaaggactacctactgatggaggaagagttcgtggcgaatcaggagcgactcaagccgcaggaggagaaggccgaggaagacagatccaaggtcgacgatctccgaggctctcccatgagcgtcggaaatctcgaagagctcatcgacgaaaatcacgctattgtttcctcctccgtcgggcctgagtattacgtcggaatcttgtctttcgtcgataaggatcaattggagcctggttgtgctattttga

SEQ ID NO: 247030 - DNA, 414 bp, Glycine max
cccgggtcgacccacgcgtccgaaaaaaaaaaccactttgatcaagtattttatgagtttgaacaagaaagacattaaatggggaccccgagagcacttaaaaggatgaagactgcatgtgagaaggccaaagagaacactttgatcgactgctcagaccaccatagaaattgattctatatacgacggaattgatttctactccaatggtactcgggccagatttgaagagctcaacatggatctcttcacgaaatgtatggagccggtggaaaaatgattgagggatgcttagatggacagaagaagtgttgatgatcttgtccttgtgggtggatctaccagaattcccaaggttcaacaactgcttctagacttctttaacggaaaagagctatgcaagagcattaattc

SEQ ID NO: 247031 - DNA, 450 bp, Glycine max
taccgtccggaattcccggtcgcccacgcgtcgtcttcttgtctctagaactgtttctgaacattccctatgacagatgaggtggtcttctggatttctggccaagtccatttgggatgagggtcacgattgcacttgctgaaaaggtatcgaatatgagtcaaagaagaggacttgaggaacaagagtcctcttctcttacaaatgaacccggtcacaagaagattccgttctcatccacatggcaacccatttccgactccctcattgctgtcagtacattgaggaggttcggaatgacagaaatcccttgttgccttcagacccttaccagagagctcaggctagattctgggctgattatgttgacattaagatacatgatcttggaaagaagatttggacatcaaagggagaagacaaagaaactgccaagaaggagttcataga

SEQ ID NO: 247032 - DNA, 520 bp, Glycine max
  unsure (1)..(520): unsure at all n locations
aggggaggagtaagtgtgcgactgaggctgnangctgtacgcatgctcgtaccggttcggaattcccgggtcgacccacgcgtccggccacgtcatatcccagatcttacataatctccacctgaatcacagaaatgcatgattccgatcacccaaataaaactttctaacaagggagtctgttttaaattctattagtaaccggtagatgaaaccaaaacattatgctcctttaaacgtttctgaaaatgagctaaacgggtttgcaactgcaggatgccagcagccttctgagaaagaatggcgtttagtcttgttatgtaatcatccagctgattccctggttgatctgcttcaaccaagaggttcatctcctctctaacaatgttcatggtctcctctacttgtgtccggtgagcatttacaaggtcctcttcttcctgtaggagggcatttaaatcatcctcagcatgtgtggtttgaggttcaacttttgggaggtccttccatttgattcatc

SEQ ID NO: 247033 - DNA, 521 bp, Glycine max
  unsure (1)..(521): unsure at all n locations
gtnttgtttagtaggtcttgcgactgagccatggagctcgtacgcctgccgtaccggtccggaattcccgggtcgacccacgcgtccgcccacgcgtccgcccacgcgtccgcacaatcagccccttcgtcaggaaagttgagaaggctgtagatatgccacttgacagcgatgtctttgctattcctcctggttataatgccccccagcaggttcatataacgcaaggtgacctagtggggaaagcagtgatcgtgtcatgggtgactgtggatgagccggggtcgagcgaagtgcgttactggagtgagaacagtgaccagaagaagatagttgaaggaaaacttgttacttataggttcttcaattacacatctggttttattcatcacaccaccatcagaaatttggagtacaacaccaaatactactatgaggttggacttgggaacacaacacggcagttttggtttgtgactcctnctgaaatcggtcccgatgtgccatatacatttggtctg

SEQ ID NO: 247034 - DNA, 528 bp, Glycine max
  unsure (1)..(528): unsure at all n locations
aggtagtnntaggtaggttgtgccatcgaancaatggagctcgtacgcctgccgtaccggtccggaattcccgggtcgacccacgcgtccgcttggtttgtgagagagacagaggcacatagagaaaatggtttcggggtcaggaatctgcgcgaagagggtagttgtggacgcgcggcaccacatgctggggaggctggcatcgatcgtggcgaaggaacttctgaatgggcagaaggtggtggtggtgcgctgcgaggagatttgcatctccggtgggctcgtcaggcagaagatgaagtacttgcgtttcctccgcaagcgcatgaacaccaagccctctcacggccccatccatttccgtgcacccggcaagatcttctggcgcaccgttcgtgggatgataccacacaagacaaagcgcggggaaactgctcttgcacgactgaaagtgtacgagggcattcctnctncttatgacaagaccaagaggatggttgtccctgatgctctcaaaggtgtgaggct

SEQ ID NO: 247035 - DNA, 522 bp, Glycine max
tgtagttaggaaagtggttttgtgcgatggaagctatagtaggactcagcgatgctgtaccggtccggaattcccgggtcgacccacgcgtccgccgcggatcaaactgtggtcatcacatgttctactcaggggttgttgccggagccagggaggcgttgttatctggtgtaccagctttatcgatgtcattaaattggaagaaggatgaaagtcaagaaaatgatttcaaggatgcagtgtcagtctgtttaccgttaataaatgcagctattagggatgttgaaaagggaacttttcccaaaagctgttttttaaatatagaaattcccacatctcctttgaatagcaagggtttcaaattgaccaaacaaagtatatggagatccactccaaactggctagctatttcctccagccgctatccaactggtcatttcttagccaatcaaggtggccttggtcttcagtttgcacagcttggccgagatgcttctgctgctggtgcagctcgtcgattgg

SEQ ID NO: 247036 - DNA, 517 bp, Glycine max
  unsure (1)..(517): unsure at all n locations
gtttagtttagtgtgtccacccatgatgcatgnagctcgtcgtaccggcccggaattcccgggtcgacccacgcgtccgctttctttttttcaatttccaaatcacgaaactcaagaagatggagaaagcgatcaacagacagaagattttgcttcatcatctcaacccttcatcatccacccaccccaacgaatcatcctccctccatgcttcagcatgtgtggcgggggatagcgctgcttatcaaaggacatcgacattcggggacgatgttgtgatcgtggctgcttatcggactgctcattgcaaagctaaacgaggtggtttcaaagacactcttcctgatgatctactggctcctgttttgaaggctgtaattgagaaaaccaatgtgaacccaagtgaagttggggatattgttgtaagtagtgtattggctcctggagctcanagagctagtgaatgccgaatggctgcatnttatgctggttttcccgaaactgtgcctgttaggac

SEQ ID NO: 247037 - DNA, 523 bp, Glycine max
aggttagtaaagtgaggtgtcgtcatgaagcattgacgcctgtcgtaccggtccggaattcctcgggtcgacccacgcgtccgcccacgcgtccggccaacattttccccttcaacactccaaccaccaaagaagcataccactatagaatgatatttgagaggttcttccctcagaactcagcaaggctcactgttcctggaggaccaagtgttgcatgtagcacagcaaaagctgttgagtgggatgctgcttggtctaacaaccttgatccatcaggtagagcagcacttggagtgcatgcatcagcttatggaaaccaggtcaaagctgtagaaccagagaagatcatacccaagatggaagtttctccactaggagttgccatatagagcttgtatgagccatagcaaggactagtagttgccctagaaccagcatataatattattatactagtcatcataaaatgaaaattttgcttgctttgtagtttatccagggaatggtatataaatagata

SEQ ID NO: 247038 - DNA, 519 bp, Glycine max
  unsure (1)..(519): unsure at all n locations
gatagtggagaggtgtgtgctgatggcagcgcntancgcactgctcgtaccggtccgggattcccgggtcgacccacgcgtccgcccacgcgtccggaagtatccaacaatgtctaccacccgtgttgctatctgtctttgctgtgcattcctttactacgcggctgaaggagccaaggttagtttcaataacaagtgctcatacacggtatggccaggaaccctaaccggtgaccaaaagccccaattatcaacaactggtttcgagttgggtccaggagcatccaactctgtggaccttacatctccatggtccggtcggttctgggcccgaacaggatgctccaacaacaacggaaggttcagctgcgccaccgacgattgcgcctccagtcaagtcgcatgcaacggtgccggtgcaatcccgtcagctacttgggtagaaatcacagttgcagcaaacggatggcaagattactacgacgtgagcaacttggaatggtttaaacttactcaagt

SEQ ID NO: 247039 - DNA, 519 bp, Glycine max
  unsure (1)..(519): unsure at all n locations
gtttagtnaggtggttcnncgactgancatgatactgtaggcactgccgtaccggtccggaattcccgggtcgacccacgcgtccgcccacgcgtccgtcaatcatcaacacatagctgagtgtgttgctctgtgaatccaccttcttcttccattggaggaccatttcctcctggaatagaaatactaccacacttttcttttttcacttctctaagttgctaagttaattgctccttcattttttcactcttcgttctcgcgtacccgtgtcacggtaactcgtggtgaagtgttcgaaaatgactgtcacacctaagatctcagttaacgatgggaaacttgttgtccatggtaagaccattctgactggagtgccagacaacgttgtgctgactccaggttctggaaggggtcttgtgactggtgcttttgttggtgccacagcttcacacagcanaagtctccatgtgtttccaatgggtgttttagaggggctccggttcatgtgttgtttcc

SEQ ID NO: 247040 - DNA, 525 bp, Glycine max
  unsure (1)..(525): unsure at all n locations
agttaagtttgagtagtatgtgtngattganncatggatgctcgtacgcacgccgtaccggtccggaattcccgggtcgacccacgcgtccgtaggcctcagcctctccaatatgtggtcaatgcggcctttttggctgccctatatagtgattatcttgatgctgctgatacacctggatggtattgtggacctaatttcttttcaaccgacgtgctccgtagctttgccaagtcccagattgattacatccttggaaataacccaaggaaaatgagttatgtcgtaggttttggtaatcattacccaaaacacgtccaccatagaggagcatctgtaccgaagaacaagatcaagtatagctgtaaaggtggatggaaatggagggacacttctaagccaaacccaaatacaattgttggtgccatggttgccggtcctgacaagcatgatggcttccatgatgttcgtacaaactacaattacacagagccaacacttgctggaaatgccggtttagttgcn

SEQ ID NO: 247041 - DNA, 530 bp, Glycine max
  unsure (1)..(530): unsure at all n locations
ggttagtttagtagnntnnnccattgaaacactgaaccgtcgcgccgccgtaccggtccggaattcccgggtcgacccacgcgtccgcccacgcgtccgttccattctctctgtgtatttccctacctctcccttcaagatgcagatcttcgtcaagaccctcaccggcaagaccatcacccttgaggtggaaagctctgacaccatcgacaacgtcaaggccaagatccaggacaaggaaggaatccccccggaccagcaacgtctcattttcgccggaaagcaacttgaggacggccgtacccttgctgactacaacattcagaaagagagtactcttcacctcgtccctcggcttcctggtggcatgcaaatcttcggtaaaaaccctacccgccagaacctaacccctagaggtttgaaagctccgacaaccatcgataacgttcaggcccaagatccaggacaaaggagggtatccccccggaccaacaacgtctcaatttcggcggaaaagcaactcgaggacc

SEQ ID NO: 247042 - DNA, 530 bp, Glycine max
aggaagggggatgtattcgtctgcgatcgatccctgtacgtccgtccggttcggaattcccgggtcgacccacgcgtccgcccacgcgttcgcgcatactcgccgagatgctcattcccttccctcgtctgcacttcttggtggtgggatttgccccacgtgacttcccgcggttcccaacagtacagggctctcactgtccctgaattgacccaacaaatgtgggatgctaagaacatgatgtgtgcagctgatcctcgccacggtcggtacttgacagcttctgcgatgttccttggaaagatgagcacatatgatgttgatgaacagatgatcaatgttcagaacaggaactcatcgacttttgttgaatggatccccaccaatgtgaaatccactggtctgggaccttccttccaactggttttaaaaatgcgattcacccttattggccatttttacccttattcaataaaatgtttaaggaaggttagccgaccaatttactggtttagttcctcataaaaggg

SEQ ID NO: 247043 - DNA, 522 bp, Glycine max
  unsure (1)..(522): unsure at all n locations
agtntaggtttaggtgtgttcgaccgctgcatgcatgnagactgtcgtaccggtccggaattcccgggtcgacccacgcgtccgcccacgcgtccgaaataaaaataccacttatggaatacataatactaaagtggattatgtgcctagatacctcttcatatgtggatcaaatgttgtccaatcacggccttggttctggtgtcacctgtatggctggtcttcgcagaactaaactctgtcctgcttctcaatctgcctcagctttgagctttcatagaaaatccgccatttgctcgagttcttctactatgacaaatggcgtaatgttctttgctgatggcccttacaattttggtcatttgaactctgatctctccaaggttctaactgtcacccctctcattatccaccctgttagcactgcttcaagttatttgcaaggggagccctcagtggaatactctattgctgtgaaatctattaaagtctcagactacaatgtaacattgaacacaaccc

SEQ ID NO: 247044 - DNA, 524 bp, Glycine max
agttagttagaggaggtgtgtcgcttgatggctggacgctgtagtcactgccgtaccggtccggaattcccgggtcgacccacgcgtccgccacaggggtatgattttgtctttggcaatgtctcctgatggtcgctatatggcatctggcgatgaagatggcacaatcatgatgtgggacctctctagtggccgctgtctcacacctttgattgggcacacatcatgtgtctggtccctcgctttcagttctgaaggttctgtgatagcatctggatctgctgattgcactgtaaaattgtgggatgtaaatacgagcaccaacgtttctagggctgaagaaaaaggtgggagtgctaacagacttagatcgctgaaaactctaccaaccaaatctactccagtttactcattgcggttttctcgaacgaatcttctttttgcggctggtgctctatcaaaaagtggctaatatatgagtatgtctactaatagataagatcagatcataggggttgaagctt

SEQ ID NO: 247045 - DNA, 519 bp, Glycine max
  unsure (1)..(519): unsure at all n locations
ggtaggtagtaggtgtgcgactgaggctgnagncgtagcactgccgtaccggtctcggaattcccgggtcgacccacgcgtccggtaaccagctatagttattttttgagtgaaggttagaagtgctacaaacaatggcaactaatcaggaagaggtgtctcttttgggagttgttggaagcccatttgtgtgcagggtgcagattgccctcaagttgaagggaattcaatacaagttttttgaagaaaatttggtcaacaagagtgaactgcttctcaaatacaaccctgttcacaagaaggttccggtgtttgttcacaatgagaagcccatagcagagtctcttgtgattgttgaatacattgatgagacatggaagaacaaccccatcttgccttctgatccttaccaaagagccttggctcgtttctggtccaaattcattgatgacaagaatgggggtgctgtatggaaatctgttttcacggttgttgagaaataccgttagaagaatgttg

SEQ ID NO: 247046 - DNA, 531 bp, Glycine max
  unsure (1)..(531): unsure at all n locations
gtnntagttnttgagtagtntcgtgtngttcganccatcgatgctcgtacgcactgccgtaccggtccggaattcccgggtcgacccacgcgtccggagagagagagagggggcaaggcaccggtaaaagtgccactaattgtgatgccgaatcccgaggctcaccacccctcccggtcccgggcccggccctccacgtcagccgcggcccgccccccggcccgggcccgcgtctccctccgccagcttctgcgcgtggcatcagtcgcgagcggcatccagttcgggtgggccttacagctctctctgctgacgccctacgttcagcagctggggatcccccaccaatgggccagcatcatctggctctgcggcccagtctccggcctcttcgtgcagcccctcgtcggccacatgagcgaccgctgcaccagccgctacggccgncgcaggcccttcatacttgnnnggcgccgtcgccatcgtngccgttgttctcgtcatcgcttacgccggcgacatcggcttggc

SEQ ID NO: 247047 - DNA, 527 bp, Glycine max
  unsure (1)..(527): unsure at all n locations
aggttagttagggtgnattcnaacgcttgatncatgnaggctgtccgcactgccgtaccggtccggaattcccgggtcgacccacgcgtccggagtgataacacccaccaaagaaccatggctacgcagttcctcaaatgcctccttctcctgtggaccttaaccctaaccatctcagcagaatacacaggctttgagggcacaatagacccaaagtccataggcataaagcacaagaaaaccctaagccacttcagattctactggcacgaagtcttcagcggagaaaaccccacatcggttagaatcattcccgcactccccaaatacaacacaaccacaacctttggttcggttgggatcttcgacaacgctttaactgtgggacccgaggtttactccaaggttgtcggaaaagccgagggcttgattgcctccacgtcgcaaacgcagttggatcttttgctgattttcaacttcgcattgacacaagggaagtacaacggcagcaccatcacgttcactgg

SEQ ID NO: 247048 - DNA, 472 bp, Glycine max
cggaattcccgggtcgacccacgcgtccgtctccttttctctctctagaattctcagatttgcggggcgagatgatgcagcagccaggacccggcatggcacctcccaccatgggccagcagccgcagcaacagtaccagcagcagcctccgccgcagcagcaacaaccctacgtcatgatgccgccgcagcatcaggcgccgcagcctatgtgggccccatccgcccagcctccgctgccgcagcagcctgctagcgccgacgaggtccgaaccctctggatcggggatctgcagtactggatggacgagaactatctctacacctgctttgctcataccggcgaggtttcgtcagttaaagtgattcggaacaagcaaactagtcaatctgaaggttatgggtttattgagtttaatagtcgtgctggagctgagagaattctccaaacatataatggggctattatgcc

SEQ ID NO: 247049 - DNA, 517 bp, Glycine max
  unsure (1)..(517): unsure at all n locations
cgtagtttatcgnatagaaaccatggatgctcgtacgcactgccgtaccggtccggaattcccgggtcgacccacgcgtccgcgatcatcaagcctaatagagggctaatccttcacttgtttgttttgtggtgtattattacattttgcaccatgccttctctcttcgctagaaaccagaggttctcattggctactctcctgcttcttctggaactattgacaggaaaccttcgcatggcagatgctcaaattggtgtgtgttatggcatgctgggcaacaatctaccgtcagcaaacgatgttataggtctttatagatcaaataacataaagagaatgagactctatgatcctaatcaagctgctctagaagcacttagaaattctggcattgaactcattcttggggtgccaaactctgacctttaaagccttgccaccaattctgacacttntcgtcaatgggtgcaaaaaaacgtgttgaacttttggcctaatgtcaaaatcaaatccc

SEQ ID NO: 247050 - DNA, 414 bp, Glycine max
aattcccgggtcgacccacgcgtccgattcaacactcatatccttatcctgtttctttcaatggaagtcatttctgcttctagcttgaatccgaacgctccgatgttcgtgccactcgcctatcggacggtggaggatttctccgaccagtggtgggacctcgttcactcctccccctggttccgcgactactggctccgcgagtgcttccaagatccccagttccaaaacgacgacgctttcgacttcgactttgacctagatctccaagatgaagatgaaagggaacgaaaggaagggaaggaggtggtgtcgttggggctgctgaaatggcgaagctgtggaggaagatgggcccaggcgccgaagtatgtggaaaaagcccccaagtttgtgaaacccaaagtgagccca

SEQ ID NO: 247051 - DNA, 527 bp, Glycine max
  unsure (1)..(527): unsure at all n locations
gtagggctgtgtatcctactgagctgtnctcactgcagtaccggtccggaattcccgggtcgacccacgcgtccggtgaatcctccgccgagcacttcccgccaccactcgatccgccgaaacctgagaatgtcccttaacaacaacgattcaaagctgaacccttcttctctgctgaattccgtcaccaaattactatggggccaatcgctcccgccggggctcctcgtcgccaccgtccgcaccgcctggaactccacgtggcacctcatgatgtcgcagctcgccccctccgactcctcaggcggctactcccgccccgccttcaaattccgcttctcctcaaccaccccttcccagggcagcagcctccacctctacgtgggcctggcatgcccatgggcccaccgcaccctcatagtgcgcgcgctgaagggcctggaaaacgccgtgcccggtttggtggcgtttccgggcccttacaggtcctgggagttcaaaaagggccgtttgtcccatacaaattt

SEQ ID NO: 247052 - DNA, 545 bp, Glycine max
  unsure (1)..(545): unsure at all n locations
ggtagtttttagggagggngtgttgtaatcaggttgnattgtgtcgctacttctgtaccggtccggaattcccgggtcgacccacgcgtccgctctcgcgtccgactcgctgcacgctgggtatgattccgacgaggaggtttatgctgctgccaaagctgtggatgctggtatgattgagtatgattctgatgataaccctattgttattgacaagaagaaaattgaacccattcctgctctcgatcactcttccattgattacgagcctttcaataaggatttttatgaggagacaccttcaatatcaggtatgagtgagcaggatgtaagtgaatacagaaagagtttggctattcgtgtatcgggttttgatgtttccaagccaataaagacatttgaggactgtgggttttcttcgcagattatgaatgctattaaaaaaacaaggattttgaaaagccaacatttatacaatgtcaagcttttgccaatttgcgttttgggcaggatatcattggtttttctaaaaatctgtgtctgta

SEQ ID NO: 247053 - DNA, 392 bp, Glycine max
attcccgggtcgacccacgcgtccggaaaactatacgattcgattccttgttttcaatggacaccttcttcaattctcaatcttcttcttcgtcgagaagccgctggagttacgatactctcaagaatttccgtgagatctctccgctggttcagaatcacatcaaacgggtttattttacgttatgttgcgctgtggtggctgctgctgttggagcttttcttcatgttctgtggaacattgggggttttctcaccacgttggcttccattggaagcatggtttggttgctatctacaccccctgttgaagagcaaaagaggttgtctctgttgatggcttcggccttggttcaaggcgctttcattggacctctgattgatttggctatt

SEQ ID NO: 247054 - DNA, 540 bp, Glycine max
agtagggatagtcgtttgtgtgctggaagctgtagtactccagtactcgtccggaattcccgggtcgacccactcgtccggactaagccttcgaatctctctgaaacttttctcttctctttgattcttctctatcagttaaacatgagaatgagccgttcacaggatccacacccttcccgatctttcttcccttttggaaatccttttcggatgatatcacctaaaggctctcgcatgtctccacaacttcttgcagtgttgcaagcttttgaggcaacattggcagagaggctgaaaaatcttatgcctaaaagcaaggatgaaatcctcaccttgtcttggatgactttagctatgaagtcactttgtgaaagtcacaatgacatacggtcccttatgactgcccttgaacttcctgtgagtgattgggaggacaaatggattgatgtgtacttggacattagttctatagtgcttgacaatttccatgcattaagattttagctttcacagttttacccttgttaacctttccct

SEQ ID NO: 247055 - DNA, 545 bp, Glycine max
agtagtgtccgtgtgtctgtttcgtacatctgtctgtactgcgtcaccggtccggaattcccgggtcgacccacgcgtccgggtacagccccacttcacctgggtacagccccacttcacccgggtacagccccacctgtcctactgagagtcctagctctccgggatatagtcctacaagtccagcttattcgcccaccagtccatcctactctcccacatcaccgagctacagccccacatcacccttcttcagtcccacatcacccagctacagccctacctctcccagctatagcccaacttcaccagcttacagccccacttcacctgcttacagtcctacttcaccagcatatatcccctcatcttctttctatatttcgacttcaccttcttatattccatcttcacctttctacattctttctttaccctgtaacgtttcgacatcttctttattttgttcctacttttcttctttacatctcttatttttctcgtgttctatttattcttttttttctcttttttctattctttcc

SEQ ID NO: 247056 - DNA, 237 bp, Glycine max
cccacacgtccgagggatcccccaagatggtcctggtatctctgattgaaaacgaaatggagtttaaagcagttcatgctgatctgttcaaagtctacaataaagaacctgagttacctaagctgcatccattaggatcccttcctgttattcaagaccgttattatactctctatgaatctcgtgcaataatcctatacttatctgacaagtataaataccaaaggactgacttat

SEQ ID NO: 247057 - DNA, 543 bp, Glycine max
  unsure (1)..(543): unsure at all n locations
cgtagttattagggagggngtgctgtattcctgttgtattctgttgctactgcagtaccggtccggaattcccgggtcgacccacgcgtccgctaaaattaaattaccatatatagtcacattttctttacactttgtgaggtctaaaatgttgtccatttttcacaaggggtttgctcacccacctgaagagcttaaaagccctgcatctaacagtggctccaacaagcctaagattcctgaggaaactctaagagaatttctttctcatcatccccataacactttttctctgagttttggtcactctgctgttctagcttatactcgtcctgatccaccttcctttgttcatcaaaggttgttttgtgggattgatgacatatactgtatctttttggggagcttgaacaatttgtgctcactcaacaagcagtatggtttggcaaagggcaccaacgaaaccatgtttgtgattgaagcttacaagacacttcctgaccgttgttcataccctgcaaatcaaattgtgaaaggtccttg

SEQ ID NO: 247058 - DNA, 525 bp, Glycine max
  unsure (1)..(525): unsure at all n locations
agaggttgttgttcgagctcatactgagctcgtacgcactgccgtaccggtccggaattcccgggtcgacccacgcgtccgcaagacctgcaggtgtaggtcttgcaggtgtaactgcctgtccgttgcggaggattccggagtcgtagacgggagtgaaatcaggttggaagacctacacctacaagacctgcagctcctacaaaacctgcacctgcagtaggaggtcaaaaatggtgtgtgccaaaggcagatgctagcaaccaagctttgcaagcaaacataaactatgtgtgcagccaaggagttgattgtaggccaattcaaccaggaggagattgctttgcagccaacaacgttaaggctcttgccacttatgccatgaatgcctactaccaggccaatgggcgccatgatttcaactgtgacttctctcaaactggtgttattactactactaatccaagccatgataaatgcaaaatctgagcatgtntatttaaaggttataatcagaggcaagga

SEQ ID NO: 247059 - DNA, 529 bp, Glycine max
atgtagttattttatgatcctatgctacttcatatgcactgccgtactcggtccggaattcccgggtcgacccacgcgtccgcccactcttccaaaataaaaaaaaaaaataaaaaaaaaaaaaaaaaaaagaaaatttaaagaaaaataaaaaaaaaaaaaaaaaaaaaatataaaaaaaaaaaataaaaaaaaataataataatataaaaactaaaactacaaaatataaaacaacaattacattttataaattcaaattctatctactaaacatttcaaacatacataacttttctatacacataaacattatattatattacaatttttacattattatatatattttcaaccaacaatcttaattcttttaccacttttactatatatacttatttctattctaattttttctattatttcaaatttaaattcttttatactattttttttactattattaattcaatttttatattattaaaaatctttatagattatttataattattattaatattttaat

SEQ ID NO: 247060 - DNA, 526 bp, Glycine max
  unsure (1)..(526): unsure at all n locations
cgatggntgnnngatggatnccntnaatgtatgctgtacgcctgcagtaccggtccggaattcccgggtcgacccacgcgtccgccggaagcttgttattgcttccgcttggaggaaacagatgccgaagctcgcgctttcgcttggtctcgctcagcaaatgcctgatatgattgaagagttgatcagcaaagggcagcagcttgatgcggttcactttacctatgaagtgggtctggtggaaaagttccctcctgttcccttgttgaagtcttttctcaaggatgctaagaaagttgcggcttctattttggaagatcctaataatgcaggccgagctgcgtacctagctgcaaggaaagagcagtctgcactcagggctgtgattaaatgcattgaagaatacaaacttgaggatgagttccctccagaaaatctgaagaagcgacttgaccagttagagaaggtgaagaccgagaaaaggaaaccagtggcagttcctgccaataagagaactagagcaagg

SEQ ID NO: 247061 - DNA, 525 bp, Glycine max
ggctagttaggcgatgatcctattacgtatccctaacgcatgccgtaccggtccggaattcccgggtcgacccacgcgtccgcccacgcgtccgggcaataagataattaaagatgtctgacgattgcaaaggtaagagctgatggcctgagctagttggagtgcaagggacagttgcggaggctacaattgagagagagaaccctttggtggatgctatcattgtgcccgaaggaaacatggtcatcactgatttccgctgtgatagggtttgggtttggatcgataaagatggaattgtcaaggaagttccccacattggatagaaactgctccccactagctagggatcaaataattgtttccagttttatgttattttattcagaataaagtttcagaaatgtcaaaagattaatgtaataaaccaactagagttggccttgtataatgttttagactcaaaatctgttcttgtcattctatatatataaaaaaaagttaatataacaatctcttatatgc

SEQ ID NO: 247062 - DNA, 536 bp, Glycine max
  unsure (1)..(536): unsure at all n locations
agtaggtgntngtgtgctgtgatgctgtatcctgtcgcattcagtaccggtccggaattcccgggtcgacccacgcgtccgctcttttttactattgtttgttttaggtactgggaagaccactctttccaccgatcgcaatatgtagttaatcggagatgatgaacactgttggggtgacaatggtgtctccaacattgaaggtggttgctatgccaaatgcattgacctctcacgggagaaagagccagatatttggaatgcaatcaggtttggcacagtgttggaaaatgtggtgtttgatgagcatgatcgagaagttgattactctgacaagtcagttacagaaaatactcgtgcagcttattctatagagtacattccaaatgcaaagttaccttgtgttgggccttacccaaagaatgtcatacttttggcatgtgacgcatttggtgttactccatccgttttcaaggtttacctggcacaaaacatgttccattttattagtgggtataccgtttttgtgggtggtc

SEQ ID NO: 247063 - DNA, 543 bp, Glycine max
  unsure (1)..(543): unsure at all n locations
agtagggtnatcgtgtagtgngatgatagattgctgtagcatgcagtaccggtccggaattcccgggtcgacccacgcgtccgcttggaactgcaacaatggtgccgcaacccattttgcatctaacccttttgtcattaataatctctgtgaccactctttccttggtcgatgccgccgatcccacatttggcttcacccctcttggattatctagtagctcaaacttgcaaatccaaaagccttacgacgttgcagtcaacgagcgctacagcttttcaaatggagtgcacagattttgggtatactccacggacaagcctcatatgcaaggcagcaatacgaagccacgaactgagattcgtatcgctgtaagccccaactcgtagcttgcttaatcattgtctatgagaaatattagtaatacattcatgacccttatttttcagggtcttgctgattaatattcctaaaacacaacactatggtttttttttggattagatatatttttaatttccctaaaaaaaatgtggaattttg

SEQ ID NO: 247064 - DNA, 544 bp, Glycine max
  unsure (1)..(544): unsure at all n locations
ggtagttttttgaggtgagggnctgatagtantccatcctggatgcagtagctactgcagtaccggtccggaattcccgggtcgacccacgcgtccgctcgtgcctctagggttatcatatctccatttccatttcctctctctcagtttccaggaatcttaagctatgggaaagtcttacccaaccgtgagcgctgattaccagaaggccgttgagaaggcgaagaagaagctcagaggcttcatcgctgagaagagatgcgctcctctaatgctccgtttggcatggcactctgctggaacttacgacgtgagctcgaagaccggtggtcccttcggaaccataaagcaccccttcgaactcgctcacggcgctaacaacggtcttgacatcgctgttaggcttttggagccactcaaagcggagtttcctattttgagctacgccgatttctaccagttggctggcgttgttgccgttgaggtcaccggtggacctgaagtttcctttcattctggaaaagagggcaaacctgagcccccg

SEQ ID NO: 247065 - DNA, 533 bp, Glycine max
  unsure (1)..(533): unsure at all n locations
gggagggatactgtattcactgatagcngtagtactgcatgtaccggtccgtaattcccgtgtcgacccacgcgtccgaagagaacgttcatctcgttatggagctttgcgccggcggagaactctttgatcggggcgtctcgcgggggcactacagcgagcgtgcggcggcgtacgtggcgaggactattgctgaggttgttagaatgtgtcacgccaatggagttatgcatcgtgaccttaagccagagaattttctgtttgcgaataagaaggagaattctgttctcaaggctattgactttggactctccgtgttttttaagccaggggagagattttcggagattgtggtgagttcttattacatggctccttagggattttagaggtattatgtgcctatatgtttttgtgttggtgtgttgttttttttgttttattatgtttttgatgtttgtattattttattttgtttatttgtttatatatatttttttattttttttttttattgttttaattttttgaag

SEQ ID NO: 247066 - DNA, 281 bp, Glycine max
tactcggtctcggattcccgggtcgacccacgcgtccgaaaaaaaaaaaaaaaaaaaaaaaaaaaataaaaaaaaaaaaaaaaaaagaaaaaaaaaaagaaaaaaaaaaaaaaaaaaaaaaaaaaaaaaaaaaaaaaaaaaaaaaaaaaaaaaaaaaaaaaaaaaaaataaaaaaaaaaaaaaaaaaaaaaagggttttttctatattaaatatacatttttaaattattgccctaaatttaaattaattgcctttttttaaaaacctttaaatttataaa

SEQ ID NO: 247067 - DNA, 525 bp, Glycine max
  unsure (1)..(525): unsure at all n locations
gggtaggtaggcgctgatacgtttcagctcacttagtatgtcgtaccggttcggaattcccgggtcgacccacgcgtccgcccacgcgtccgcccacgcgtccggccggagccgaagatccgaatctagtacgtgtgaaggaagaataaaggcgtggacgagttcccgttctgcgtgcacctggtctcgtgggagaaggagaacgtctccagcgaggctttggaggcggcgcgcatcgcatgcaacaagtacatggccaagttcgccggaaaagatgccttccacctgcgcgtgagggtgcatcccttccacgtgctccgcatcaacaagatgctatcgtgcgccggggccgacaggctccagaccggcatgaggggcgcctttgggaagccgcaggggacgtgcgctagggttaacattggtcaggtgctgctctcggtgaggtgtaaggatgctaacagtcaccatgctcaggaagctcttcgtaaggccaagttcaagttccccggcccgcagaagatcatn

SEQ ID NO: 247068 - DNA, 535 bp, Glycine max
  unsure (1)..(535): unsure at all n locations
agtttgacgtagtagtaattnatagaaagctggtcgcactgcgttaccggtccggaattcccgggtcgacccacgcgtccgacccctcttagtcccaattttctagggttttattcattttccgatggcttctgcagatgttgagtagcgttgctttgtcggtgggctcgcttgggccactgacgaccatgccctcgagagagccttctctcagtacggcgaaatcgttgaaacgaaggtctgtttgttgcaggcatcacatctgatctcacacgattcggattcggaattttctcgatcccgttctgatctgtgatctctgatctgtttgcgttacttgatcttatgatacttgtgttactatatgattcttttattactcacgccaataggtacgttcatcttctttctttcaccaaaggcgaagatcgatcggcttctatttggttctgggttttgtttttcgtgctgttttgtttatatctgtatattgggttacagggttatagttagattttctactttcgggggaacg

SEQ ID NO: 247069 - DNA, 535 bp, Glycine max
agtaggttatagtgtgtcaataactgaatctgttggactgcagtaccggtccggaattcccgggtcgacccacgcgtccgcccacgcgtccgaagagaactccaagaagaggcaggcactttacgtaatgaatcctaataagttcagagcgtgtgagtttctcataaatttccatgaagggacacgtggtgataaaattatagtctttgctgataatctgtttgctctcactgagtatgccatgaaactccgcaaaccaatgatatatggtgctacaagccatgttgagagaacaaaaattttgcaagcattcaaaactagcaaagatataaatactatatttctttccaaggtgggcgacaactcaattgatattcctgaagcaaacgtaataattcagatctcttcacatgctggttcaaggcgacaagaagcccagcgtctgggtcgtattcttagggcaaagggaaagcttgaggataggattgcaaggggccaggaggagtttaaggtttttttatatccctggttaaat

SEQ ID NO: 247070 - DNA, 366 bp, Glycine max
aattcccgggtcgacccacgcgtccgagaaaatggtaaggtaaggtaagatcgatagcagaaaaggaaaaaatgacgatggacgatgatagcgccatatatgtagggggtcttccctacgactccaccgaagaaaccattcgcaccgtcttcaatttgtatggcgctatccttgatgttaagataatcaacgacccacgcaccaggggcaagtgctattgttttgttactttcacaaatcctaggtctgcaattgatgccatcaacgacatgaatggcagaaccattgactgccgtgtggttaaagttaacggggtgaggactcgtgggggcaggtcaaattttggccgagaacgttattactatc

SEQ ID NO: 247071 - DNA, 528 bp, Glycine max
agtagggctgttgtatcatctgtaggcagtagctactgcagtaccggtccggaattcccgggtcgacccacgcgtccgcagacactgcaccaaacaccaacaacgctttagctctctctcttctctccataaccgcgcaccggcgatctggcactaacagatcgccgctgctacatctgaacccgatccagccaacagatctctccaattcaaatggagaatctaatctctttggtcaacaaaatccagagagcttgcaccgccttaggtgaccacggcgaaaacagtgcactccccacactatgggactctctccccgccatcgccgtcgtcggaggccagagctcaggaaagtcctccgtcttggagagcgttgtcggcaaagatttcttacctcgtggatcaggtattgttacgcgacgaccgctcgtgttgcagcttcacaagattgaaaagggaagcacagagtacgcggagttccttcaccttccgaggaagaggttcaccgatttttgtgctgtgagagag

SEQ ID NO: 247072 - DNA, 538 bp, Glycine max
gtttctaggaagggtgtgtagtattcctgtagtatgcagttgcgactgcggtaccggtccggaattcccgggtcgacccacgcgtccgcccacgcgtccgtatgacagggccaaggatcaagcgcgggaagccaaagacagaacagaggatttcgcacacgacgcataggagaagacgaaggacgctgcggggtcgatgagggacagggcggagagtgcggcggagaagacgaaagagtatgcttacgacacataagagagtgccaaggacgcggcgggaacggtggcggacaagagtagggagggggctgagaggacgaaggagaagacggaggaggtggcggcgtcggcggtggaggcgctgaagaacgtgggggagaaggcgaagcagggcgtgcaaggtgcgtgggagacggcgaaggacactacggcagcagaaggaagaagaaaagacgggagaaccaattggacctatgattctggcgagggaagacgccagggcaattaatgtctgagagagcccaaaaaaccctttatg

SEQ ID NO: 247073 - DNA, 531 bp, Glycine max
gggagggagtgtagtagtcaatcctggatgcagtcgctactgcatgtaccggtccggaattcccgggtcgacccacgcgtccgccaacttccgctacttcctactccaaccactttcttttttcccgcagtcatgggcagggtcaagatcggaatcaacggatttggaagaattggccgtttggtggccagggtggctctgcagagagacgatgttgaactcgttgccgttaacgatcctttcattaccaccgattacatgacatacatgtttaaatacgacagtgttcacgggcactggaagcatcacgatgtcaccgttaaggatgagaagacccttctcttcggtgacaagccagtcactgtttttggacacaggaaccctgaagagatcccatggaagtcgactggagctgacatcattgttgagttcaccggagttttcaccggatagggtaaagctgtcccacatttgaagggttgtgcaaagaaaggtattatttttgtccccagttagggttcccccattttt

SEQ ID NO: 247074 - DNA, 536 bp, Glycine max
aggtcgtttgtcttgatggaatcttatgtgattgctggtacgcctgcacgtaccggtccggaattcccgggtcgacccacgcgtccggtttgaaaaagtttctacaagtgaggaacgccagtccttcattgataagcttgatcaggtgcaagattggttgtatacagatggtgaagatgccaatgccacagagtttcaagagcgtctagatcagttaaaagctgttggagatccaattttcttcaggttaaaagagcttacagctcggccagcagcagttgagcatgctaataaatacattgatgagttgaaacagattgttgaggagtggaaagcatagaagtcttggcttccacaagaacgagtagacaaggtcataaaaggttttgaaaaattgaaaaattgtttgaatgagaaagaagcttagcaaccaaagacttttggattcatttcccagcatttaccattttaaaattattttctaaggtcccttgatcttttatactaaggtttgccagtttttattaaaattctcc

SEQ ID NO: 247075 - DNA, 541 bp, Glycine max
  unsure (1)..(541): unsure at all n locations
aggtagttgatncgtcgtagtgtgatgatgcatccggtcgtacttcagtaccggtccggaattcccgggtcgacccacgcgtccgaaatgactcaagcccagattcaaccagttaaacttggaacccaaggctttgaggtttgaaaattgggattcggatgtatgggccttactggagcgtacaatgaccctctccaagaacaggatggcatatctgttatcaagtatgcgttcagtaagggaatcacattttttgatactgcggatgtttatggagccaatgctaatgaacttttggttggaaaggctttgaagcagctgcccagagaaaagattcagatagccacaaaatttggtattgcttcacgaggttttcctgatatgaaaatcaagggttcgcctgaatatgtgcgatcatgctgtgaagctagcttgaagcgtcttgatgttgaatacattgatctctattatcagcacatatttggcacatttgtacccatttaggaaacagttggtgaacttaaaaaaatgtttcaaaggg

SEQ ID NO: 247076 - DNA, 539 bp, Glycine max
  unsure (1)..(539): unsure at all n locations
gtgtttattagtagggatcttgtaatcctgtagtatgcagttgcgactgcatgtaccggtccggaattcccgggtcgacccacgcgtccggctaaagggaaggttttgatgcaagctatgtatggagtaaaggtgcagacagtattgttatgcagtgtgtttgctgcggctttttcgggctctacaaagaatatgtcagatttggatgtggctgatgtatattcttgggctccaacctttaaaagtttgcaagatcttgtaaatggggaaattagagttagaagtgggcgatttactatattgaatgagttggaagtagttgattcctctgtgaaggaattatatcctattatccagggcgtctcagatgccattgagacagaatcacttgcgaagattgttggggaattaggcagagcaacagagaagctttcacaaggactagatcttcttacaaaggaagtcgatagctttttccaaatggtcttgactggtcctgaatccttgctatctagttttgaggtcangtgcaactttta

SEQ ID NO: 247077 - DNA, 546 bp, Glycine max
  unsure (1)..(546): unsure at all n locations
aggagttatatagggagtaanagagtagtattccaaacagtatgctgtngcgactgcaggtaccggtccggaattcccgggtcgacccacgcgtccgaatgaacaggctggtcttgtcggtcaccaggacgtcaccgacatcaccggcgaccatggcgtcacagtcacagaaactacattccatggaagacgcataataaccgaggctgttggtggccaggtagtggaacagtatgtggagccaaatccagttgaggctggacgaaccagtgcaattaaggagagtgctataacaataggagaggcattggaggccacggcacagacggtgggtcacaagccggtggatcagagtgatgcctcagcgattcaggcggcggaggttagagcaacgggaagtaacgttataacgccgggaggacttgcggctatggctcaatcagctgctgcttataatgctgactgcaagcatgaccaggacaagggcaagcttgccgacgttctgaccggagcaaccggcaaatttcccccggacaaaggcccgag

SEQ ID NO: 247078 - DNA, 539 bp, Glycine max
gagttttttagtagggatgctgtatcctgctgcagcagttgtcactgcatgtaccggtccggaattcccgggtcgacccacgcgtccgatccgagaattgacaggttaccatattccatcagaattctccttgaatctgccattcgtaattgtgacaattttcaagtcaaaaaagaagatgttgagaagattctcgactgggaaaataattctacgaagcaagttgaaattcctttcaagcccgctcgtgttctcttgcaggattttactggagtcccggctgttgttgacctggcctgcatgcgtgatgctatgaataagcttggcagcgattcaaataagatcaaccctctggttcctgtggatcttgtcattgatcattcagttcaagttgacgttacaaggtcagataatgcaatgcaagccaatatggagcttgaatttcagagaaacaaggagagggttgctttttttaaatgggggggcaactgcattccttaacatgccctgttgtttctacggggttgggttaatgtcaa

SEQ ID NO: 247079 - DNA, 189 bp, Glycine max
tcccgggtcgacccactcttcctaaaaaaaaaaaaaaaaaaaaaaaaaaaaaaaaaaaaaaaaaaaaaaaaaaaaaaaaaagaaaaaaaaaaaaaaaaaaaaaaaaaaaaaaaaaaaaaaaaaaaaaaaaaaaaaaaaaaaaaaaaaaaaaaaaaaaaaaaaaaaaaaaaaaaaaaaaaaaaataataa

SEQ ID NO: 247080 - DNA, 532 bp, Glycine max
  unsure (1)..(532): unsure at all n locations
agggtgtgtgggtttctggatnctatctactgatgctgtcacgcactgccgtaccggtccggaattcccgggtcgacccacgcgtccggtgtcttccaagattggagttattgaatccttgttggagaaagttaatgttctcttgcttggtggaggaatgatctttaccttttacaaggctcagggttattcagttgggtcatctcttgtggaggaagacaagcttagccttgcaactacacttcttgaaaaggccaaggctaaaggggtttctttgttgcttccaactgatgttgtcatagcagacaagtttgctgctgatgctaacagcttgactgtgccggcatcaagcattccagatgggtggatggcgttggatataggtcctgattccatttagtcatttgttgaatcatcggtttctactctttcctttatttgcaatgtactcttgtgtgttttttatttcgttttgtttcttccatgtaactatattattatttagatacttttttatcttatttgtaaattt

SEQ ID NO: 247081 - DNA, 522 bp, Glycine max
  unsure (1)..(522): unsure at all n locations
agggttttgnnacgctgatactntnctagacccgtacgcctgccgtaccggtccggaattcccgggtcgacccacgcgtccggccagaagaacctctgttattcgcgctctcactcacgacgttgatgaagtttacggcctctgtgatccagataaggataacctgtgcctctatggacatccaaatgaggcctgggaagtaactctgccagcggaggaagttccgccagagctcccggagccggctcttggaatcaattttgctagggatggcatgaaccgcagggactggctttctctggttgctgtccacagtgattcatggttggtttctgtggccttttaccttggggctcgtcttaaccgcaatgaaaggaaacgattatttagcttgatcaatgatcttccatctgtttttgaagttgtgactgacaggaaaccagttaaggacaagccaactgcggatagtggaagcaagtctaggggaagtgccaagagatctaccgatgggcaaggtaaaaa

SEQ ID NO: 247082 - DNA, 530 bp, Glycine max
  unsure (1)..(530): unsure at all n locations
agtaggtttggacgactgagactatnatagangctgtacgcactgccgtaccggtccggaattcccgggtcgacccacgcgtccggagagagagagaggagagagtattggcgcttcatcaagatgggtatgggtagggattccatgcacaagaggcgtgccactggtggcaagaaaaaggcttggagaaagaagagaaagtatgagcttgggcgtcaggcagcaaacaccaagttatcaagcaacaagacaatcaggaggattcgtgttagaggtggcaatgttaaatggagggcattgaggctggatactggcaattactcatggggtagtgaagcagttactcgcaagactcgtattctagatgttgtttacaatgcctcaaacaacgagcttgtgcgaactcagaccctggtcaagagtgctattgtccaggttgatgctgctcctttcaggcagtggtaccttcagcactatggtgttgaaattggtagaaaaaagaaagtggcagccaagaaggattctactga

SEQ ID NO: 247083 - DNA, 521 bp, Glycine max
  unsure (1)..(521): unsure at all n locations
gtatatactgattcttctgattcttngccatgctgtaccggtccggaattcccgggtcgacccacgcgtccgggaatcaaggactcaattcctgcttggattaaatttgctgtacaggctcccggtgaaattccatacagcggaatatactatgatcccctagaagaggtaagattctagacttcttacatgtaggatacacttagaaaaagagatgacaaatctaaatatctctttttccattatgggatagaattgtatctatgacctctctttgtagtactcatcatgacagaacttttaatggtgatatgcaatgatgttgaaagttttgtagtttcttttaagccattggcacactctggctttattcttatattaggaagaaatattccccactcttttgcccaaagggataatggtatgatcgatgtatataagaagtgtatataagaagtgcgatattttaccatgtttcaaaaaataaaattgattatatgtttttattttttttgtaataa

SEQ ID NO: 247084 - DNA, 300 bp, Glycine max
cgtccgtattcccgggtcgacccacgcgtccggagcaagtgcagtgcttcgggcggaagaagacggcggtggcagtgagctactgcaagcgcggccgaggcctcattaagatcaacggctgcccgatcgagctggtggagccggagatcctccgcttcaaggccttcgagccaatcctccttctcggtcgccaccgcttcgccggcgtggacatgcgcatccgcgtgaagggcggcggtcacacctcccagatatactccatcaggcatagcatagccaaggctcttgtcgcttactacc

SEQ ID NO: 247085 - DNA, 561 bp, Glycine max
gtagggaaaaggagtgaagtatagtattcctaatagaatgcagtagctactgcatgtaccggtccggaattcccgggtcgacccacgcgtccgaaaaaaaaaaaaaaaaaaaaaaaaaaaaaaaaaaaaaaaaaaaaaaaaaaaaaaaaagggaaaaaaaaaaaaaaaaaaaaaaaaaaaaaaaaaaaaaaaaaaaaaaaaaaaaaaaaaaaaaaaaaaaaaaaaaaaaaaaaaaaaaaaaaaaaaaaaaacaacaaaaaaaaaaaaaaaaaccatgacataacaaaacaaaaatcaaaaaacaaaaaatccccttttcgaaagctgacaaaaaagctaagagaccctaacatatcgaccttacaaacagtagcgcaacccaaaaggcaaatggaacacaaacattaaagacgaattaaacacgaaaagactaagtcagaaaaaaaaaaaaattacaaaataataaaatataaaaaacaaaataaaaaataaaattaagaaaatacactaaataaaaaaaacaaaaataattaaaaatataaaaataaaataataaaatat

SEQ ID NO: 247086 - DNA, 528 bp, Glycine max
  unsure (1)..(528): unsure at all n locations
aggtgnttgnnacgatagataccnntntttagaagctgtacgcctgcagtaccggtccggaattcccgggtcgacccacgcgtccgcccacgcgtccggtttaggtgaactaattcggagaccttgcaagacttgatcaatggctgtcaaagtttatattgtgtactactccatgtatgggcatgttgagaaactagcagaagaaataaagaaaggggcttcctctgtggaaggtgttgaggccaagttatggcaggtacctgagacactgctggatgaggtgcttggtaagatgagtgcaccacccaagagtgacgtaccagtcattacccccaatgaactatccgaggctgatggctttgtattcggcttcccaacaaggtttggaatgatggctgctcagtttaaagcctttctagatgctactggaggcttatggagagcacaacagcttgcaggcaagcctgctggcctcttctacagcaccggttcacaaggtggtggacaagagactacagcactcactgg

SEQ ID NO: 247087 - DNA, 533 bp, Glycine max
agggtgttttgttgtttgaaccatcatagatagctgtacgcactgcagtaccggtccggaattcccgggtcgacccacgcgtccgcccacgcgtccggtttacctatgcaattctaatacttttatgatgctggattcataatgtaaggccagttattccttcaaactgtccacctgcaatgcgagctttaatcgagcaatgttggtctttgcatccggacaagaggcccgagttctggcaggttgttaaggtattagaacaatttgagtcttcgcttgctcatgatggaactctgactctggtggaaaatccttgttgccctgatcataagaaagggcttctccattggattcaaaagcttgttcctgttgcatcataataatggccctgtgcctaaaccgaaatttacatgagtcttcaaagtgtcctggctttttgtagtattccggtttcattgtaattaatattgaatggttttaaataccctgatttaaaatctaaaggtttgtattattgatgttttctatgcttt

SEQ ID NO: 247088 - DNA, 530 bp, Glycine max
  unsure (1)..(530): unsure at all n locations
aggtgatgtgtgttgatgaataccgtnatagaggctgtacgcctgcagtaccggtccggaattcccgggtcgacccacgcgtccgtgatactcgaaatttagctgatgtgaaacccagaattgttgatgaaggtgtggaaaaatctaggatatggaagctgacagaaattaatgaaccatcacaatgccgctccctgaaacttcctgatagtttatcatctatgagggtttctaggttaatttatacaaatcagggggttgcaattttggctttggcagcaaatgctgttcacaagctttggaaatggcagagaaatgagcggaacactactgggaaggcaactgcaagtattcaaccacaactatggcaaccttctagtggaatactgatgactaatgatataagtgatactaacccagaggatgctgtgtcatgttttgcactgtcaaagaatgattcatatgttatgtctgcttcagggggaaaaatttctctattcaatatgatgacatttaagacaatgacaact

SEQ ID NO: 247089 - DNA, 539 bp, Glycine max
  unsure (1)..(539): unsure at all n locations
ggagttattgtagtagtcanatatagaatgctgatcgtatgcagtaccggtccggaattcccgggtcgacccacgcgtccggcgattttttcttcaatttccagatcacgaaactaaagaagatggagaaagcgatcagcagacagaggattttgcttcatcatctcaacccttcatcgtctacccacgtcaacgaatcatcctccctctatgcttcagcatgtgtggcgggggacagcgctgcttatcaaaggacatcgacattcagggatgatgttgtgatcgtggctgcttatcggactgctcattgcaaaggtaaacgtggtggtttcaaagatactcttcctgatgatctactggctcctgttttgaaagctgtaattgagagaaccaatgtgaaccccagcgaagttggggatattgtcgtaaggagtgtattggctcctggagctcaaagagctagtgaatgccgaatggctgcattttatgctgggtttcctgaaaccgtgcctgttaagaccgttaaaagcgatggtcat

SEQ ID NO: 247090 - DNA, 298 bp, Glycine max
tcccgtgtcgacccactcgtcctaaaaaaaaaaaaaaaaaaaaaaaaaaaaaaaaaaaaaaaaaaaaaaaaaaaaaaaaaagaaaaaactaggactataataaatcctaaacttacttacacatccttccaacaacataacaaatctttaaattacacctaaattaaataaactaccacgccattttacaacttcataacttctaaaacctcgtcgtctctcaacttattatcctttctgcaaatcatcctttttccatcttccttaataacaaataagccccctcctattacccttc

SEQ ID NO: 247091 - DNA, 392 bp, Glycine max
aattcccgggtcgacccacgcgtccgggaggagcggcattaaaaatgcagatcttcgtgaaaaccctaacggggaagaccatagccctcgaggtcgaaagcagcgacaccattgacaatgtcaaggctaagattcaagacaaggaaggcatccctccggatcagcagcgtttgattttcgccggaaagcaacttgaagatggaaggaccttggccgattacaacatccagaaggaatcaacccttcaccttgtcctcaggcttcgtggtggcatcatcgagccttccctcatggctttggctcgcaaatacaaccaggacaagatgatttgccgcaaatgctatgctcgtctgcaccctaaggctgtgaactgccgtaagaagaaatgcggt

SEQ ID NO: 247092 - DNA, 306 bp, Glycine max
cccgggtcgacccactcgtcctaaaaaaaaaaaaaaaaaaaaaaaaaaaaaaaaaaaaaaaaaaaaaaaagaaaaaaaaggaaaaaataaaaaaaaaaaaaaaaaaaaaaaaaaaaaaaaaaaaaaaaaaaaaaaaaaacaaaaaaaaataaaataaaataaaacaattaaaataaattaaaaaaatctaaactaaaaaattaaaagaaacactaacataatataaatctaaatactaataataactttaaaacaacatacataaagaatattacataaaaataacacaaattatataaaaattaa

SEQ ID NO: 247093 - DNA, 446 bp, Glycine max
tgtaccgtccggattcccgggtcgactccactcgtccgtccatcgtccgaagtagagacatatggccgtctaaaccttctcattaatgcgtctgggattctttcaatacctgaagtaatacatccagaaacaacattgaacaaagtggagaaatcatctttaatgcttgcatatgaggttaatgcagtgggtcctatcttagttatcaagcacatgtggcctcttctaaaagtaggaggcggccacgggactggaagaagtgctgcagtggtggctagtttgagtgcaagggttgcatctattggggacaatcgtcttgggggctggcactcatatcgatcttcaaaggctgctcttaatcaattatcaaagactgtctccctggaatttgcaagaaagaaggatccaattgtatgcattttactgcatcctggtacagttgacac

SEQ ID NO: 247094 - DNA, 536 bp, Glycine max
  unsure (1)..(536): unsure at all n locations
agggagggagtgtagtatcctgctaatngtcatagctacttcattaccggtccggaattcccgggtcgacccactcgtccgatgtctctgccgaagacaaaactaccggccaaaagaacaagatcaccattaccaatggcaagggtaggttgtcaaaggaagagattgagaagatggttcaagaggctgagaagtacaaatcagaagatgaagagcacaagaagaaggtagaggccaagaatgcattggagaactactcatacaacatgaggaataccattaaagacgagaagattggaggaaaacttgacccagctgacaagaaaaagattgaggatgccattgagcaggccatccaatggctagacagcaaccagcttggagaggcttatgaatttgatgtcaaaatgaatgatgtggatagcattctcaaccctattattgccaatatgtactcaggtggttcttgtttcatacgtttggtgtttacatgtatttttatatttctattttattaaaattatttcttgtctaat

SEQ ID NO: 247095 - DNA, 548 bp, Glycine max
  unsure (1)..(548): unsure at all n locations
agtagtgtgagtctggagtaaangaaatagtaatactnttcagtaatctgtnacgcctgcagtaccggtccggaattcccgggtcgacccacgcgtccgattattattcttccatttccattaaaaagaaaatatcataaatgggtattttcacattcgaggacgaaatcacctcccctgtggctcctgctactctttacaaagctctagttacagatgccgacaacatcatcccaaaggctcttgattccttcaagagtgttgaaaacgttgagggaaatggtggccctggaacaatcaagaagataactttcgttgaggatggagaaaccaagtttgtactgcacaagatagaagcagttgatgaggcaaacttgggatatagctacagcgtagtgggtggtgctgcgttgccagacacagcggagaagatcacattccactccaaattggctgctggtcccaatggaggctctgctggcaagctcactgtcgaataccaaaccaaaggagatgctcatcccaaccaagacccacttaaaactggg

SEQ ID NO: 247096 - DNA, 526 bp, Glycine max
  unsure (1)..(526): unsure at all n locations
aggggtatggacgctgatacaattttgatactgtaggcactgccgtaccggtccggaattcccgggtcgacccacgcgtccggtgagatacggtattggagcataaacaatggcagttgtgctagagtgggcaagggtggcaccacacagatgagatttcagcctcgtctcgggaggtaccttgctgcagcggcagagaatattgtgtctatatttgatgtggagacacaagcgtgtcgatattcactaaagggacacacaaaaccagtggattgtgtttgttgggatccttctggggagttgctggcatctgtgagtgaggactctgtcagggtttggactcttggatcagggagtgaaggggaatgtgttcatgaacttagctgtaatggcaataagtttcatgcatctgttttccacccaacgtacccttcattgctggtcattggctgttaccagtcattggagctgtggaatatgagcgagaacaagacaatgactctgtctgctcatgatggtctcattn

SEQ ID NO: 247097 - DNA, 151 bp, Glycine max
aattcccggtcgacccacgcgtccggcagatattacatacacgtgaatcactaattaagccatggagaagaaatcaatatctgtgttgttcttcctcttccttgttctctttgttgctcaagaagttgtggtgcaaactgatgcaaatact

SEQ ID NO: 247098 - DNA, 524 bp, Glycine max
aggtgactgattcctctgaagctgtacgcctgcagtaccggtccggaattcccgggtcgacccacgcgtccgctgtattatttccttcttcagcttagctcaaccacttccacttcaacaatcaacatggcttcatcactcgcaaccatactcgtcgccttgccccaaaccccgcaatgccgtagcaccttccgatccgatccacccaaactatccctaaccctaaaacccaaggccactgttacatgtaaggccaccctgtccactaccctggagactagcatccagcagcagcagcagcaagatgaccaaaaacaaaagcccgtggccgaggtgtggcgcaagatccacggggaggacaactgggccgggcttctggacccgatggacccggttatgcgaggcgagctgacccgctacggcgagatggcccaggcctgctacgacgcattcgacttcgacccgtactccaaataccgtggcagctgcaagtttcccttgtgcgaaattttgaactccctggg

SEQ ID NO: 247099 - DNA, 514 bp, Glycine max
atagaatcctatagaaatctttcgcctgcagtaccggtccggaattcccgggtcgacccacgcgtccgcccacgcgtccggcaaatattggcgtggtggctatggcgactatggtggttggcgtggtggtggttggcgtggtggctatggaggctggcgtggtggctatggtggtgggcgtggtggctatggtggctggcgtggtggctatggtggtgggcgtggtggctacggaggttggggtggtggctttggccctaacgaacataatgaggctgggattgatgctagccctcacaactaagaaggaaacttgctaaagcttatataggatttaagttatcgtaataaataaaacttcattggaagggtagttataatagatgtggagatctttcttcgctctggtcatataaaggaataatacttttctattaatttcaaaaaaaaaaaaaaagggcggccgttctagaggatccaagcttacgtacacgtgcatgcgaagttattattg

SEQ ID NO: 247100 - DNA, 531 bp, Glycine max
taggtcgtatgcatcactgaaactgtagtgaaagctgtacgcctgcagtaccggtccggaattcccgggtcgacccacgcgtccggaagcatcaagatttagccccaagcctgatataattttgcagaggtgtgatccaacataccaagcaacaaaattgcattttgaagacctagctaagagatatggcaatccaattattgttctgaatttgattaagacagttgagaagcggcctcgagaaatgatgttgaggcgtgaatttgcaaatgctgttgggtatctgaaccaaattctaccagtggagaaccatcttagatttattcactgggattttcacaagtttgcaaagagcaagtctgccaatgttttggcagttttaggagctgtagcaagtgaagcgcttgatttaactggtttttactacagtggtaaacccagcatcattaagagagccaacaagagcaatcaaacaagcacagggagggatacttcactgagagatctgaaagctagttctgtggatcttgg

SEQ ID NO: 247101 - DNA, 532 bp, Glycine max
ggggtgtgtgggctatagatactgtactgcatgccgtaccggtccggaattcccgggtcgacctacgcgttcgagcaaagcgtccggccacgcgttcggctatcgaaccgggcgagggggtgggccatcccagggcgaatccggatatggatccccagcagcgtccgttaatgtcggaccgggtcaccgttaacggctccgtcacgccgcttgctcttctcgccgacggccgtctatggtggtctgagggaatccaacggtgtttgtcgatcgaaaaggacgtcctcgggatcgttgccagtgggccctacataaaaatcaagagcctcgtggagacccgagacggatgctgcatcaccagcgcccctgcaagactcgttagaaacgacgtcgtctttatgccttcctacgaggaatctcacaggctctggtgccataaacttcgtgaattcattgattctctcggtcgtcctaagaggttgttggttgatgctaatcccgttggtgggaagaaatccgctacgaagaattt

SEQ ID NO: 247102 - DNA, 508 bp, Glycine max
  unsure (1)..(508): unsure at all n locations
ggtaggggctgntttcgccaatggatgctactcgtactgccgtaccggtccggaattcccgggtcgacccacgcgtccggatttggcataatacattgatttgtttcttaaaaacaacactgcaatgtctgccatatttctgcttgttggaatgctatcgtccattacaggagtttgctatggagtgattggtgataatctaccatcaaggcaagaagttgtggacttatataaaacaaatggcattggtagaatgcgtatatactacccagatgaagaagcactccaagcccttagaggttcaggcattgagttgattatggacgtggctaaggaaacccttcaatcattgacagactccaatgctgctacagattgggtcaataaatatgttacaccttactcgcaagacgtcaatttcaagtacatcgctgttggaaatgaaattcatcccaataccaatgaggcacaatatattctatctgccatgaccaacattcagaatgca

SEQ ID NO: 247103 - DNA, 503 bp, Glycine max
  unsure (1)..(503): unsure at all n locations
gagggggtgcgttggtccacgtatgtagtgcgatactgcagtaccggtccggaattcccgggtcgacccacgcgtccgggactcttgaagtggaaatatgcttatctgaattcagttgattttcttttcgaggttgatggtgatcgtgagctactttttctcaatgagcggggaaagaagaaacttttggaagggaatagggttgaattcacagatggttcagatccctcactttattctggaaagataattgaatgttcttgggattttgacaaactggaatggaagtatatgcgaatcagaacagataaatcaactccgaatgagtttaatacttacaggaaggtgctgcgaagcataagagacaacatcaccgaggaagatttgttgaatgaaataagtgagataattcgccttcccatgtatgctgaccggatcagaatngatagtaaagcgaatcagcatgctaatgtcgcanggcgaaagtgatttggtggggttaa

SEQ ID NO: 247104 - DNA, 506 bp, Glycine max
  unsure (1)..(506): unsure at all n locations
gggtggaagtgngtcaatcatgaacgtatccctcaggactgcggtaccggtccggaattcccgggtcgacccacgcgtccgctttcccgtgaaaagggaccatggaggcaaattcaggtgccagcgaccgaatttggagaatcgccggccacctccgcccccagagagaggatgatgtttgtttgaagcgtagcgattgccgtgcaaaaggtggggtctccggattcaaggtggccatattgggtgccgcaggaggcatagggcaacctctggcgatgttgatgaagatgaatccactcgtttcacttctccacctctacgatgttgttaacacccctggcgtcacttctgatataagtcacatggacaccggcgctggtgttcgaagatttttggggcaacagcagcttgaggatgcacttataggcatggacttggtgatcatccctgcttgtgttcctcggtaacctggaatggacagagatggatctcttcattataaatgc

SEQ ID NO: 247105 - DNA, 514 bp, Glycine max
  unsure (1)..(514): unsure at all n locations
ggttaggggttactcgngtgcctgtagtatcctanggcatgccgtactcggtccggaattcccgggtcgacccacgcgtccgcccacgcgtccgaaaaaaaaaaaaaaaaaaaaaaaaaaaaaaaaaaaaaaaaaaaggaaaaaaaaaaaaaaaaaaaaaaaaaaaaaaaaaaaaaaaaaaaaaaaaaaaaaaaaaaaaaaataaaagggggggcctttttaaaggatccaattttacttccccttgttttcaaatgtattagctttttttttgggtcacttaaattaatttaactggccgtggttttaaaaattcttgattggaaaaaccttggtgttaccaatttaaatccctttttagaaaattccctttttgccaattgggttaataccaaaaggccttccacaaattgcctttccaaaaatttggaaagcttaaatgcctattgggacgctttttttagaggccatttaaaccgtaccggttttggtgtttctcccatttttacccttt

SEQ ID NO: 247106 - DNA, 504 bp, Glycine max
  unsure (1)..(504): unsure at all n locations
aggaggggtgcgtcnntcatgtacgtatctcttaggactgcggtaccggtccggaattcccgggtcgacccacgcgtccgcagaactggtacggacaaggggaatccgactgtttaattaaaacaaagcattgcgatggtccctgcggatgttgacgcaatgtgatttctgcccagtgctctgaatgtcaaagtgaagaaattcaaccaagcgcgggtaaacggcgggagtaactatgactctcttaaggtagccaaatgcctcgtcatctaattagtgacgcgcatgaatggattaacgagattcccactgtccctgtctactatccagcgaaaccacagccaagggaacgggcttggcggaatcagcggggaaagaagaccctgttgagcttgactctagtccgactttgtgaaatgacttgagaggtgtaagataagtgggagctggaaacagcgaaagtganataccactacttttaacgttaatttacttattccgtga

SEQ ID NO: 247107 - DNA, 502 bp, Glycine max
  unsure (1)..(502): unsure at all n locations
nggctgggtcgaccatgagctcctggcaatgcacgtaccggtccggaattcccgggtcgacccacgcgtccgtttctctgcaaaagcaccgatctccatcaagctccatgcttccacctcccttttcttgtcttccaagtcctccttcaaaacgggaagactctgcttccagttatgctccactttgcaagaggtagcagcaacagaagaaacacctgagctaacgcaaccaacagacaacgtaaagaagctgtacgtggttaacttgtcttggtctctgacggcggcagacatcaatgacctctttgcccaaagcggaaccgtaaccgacgtcgagagcaaagacgggaggagcaagggctatgccttcgttactatggcttccggggaagaggctcangctgctgntgataaatttgactcttatgaattatcaggacggataataaaggtagaacttgcaaagagattcaaaaaacctncttctnctncaccttctnca

SEQ ID NO: 247108 - DNA, 520 bp, Glycine max
  unsure (1)..(520): unsure at all n locations
aggtnntagggagtgngtcgngcccatggagcctanagcgcatgcacgtaccggtccggaattcccgggtcgacccacgcgtccgcccacgcgtccgcctacttctacttcccccctttgctctcaaaccttatcacctaatgcttatcctcccaaaccagaaaaccatgtctacctccgcagcttccctcgcactcccaaccctcactctccgaacccgacaacctctatgttctccccaatgcttctcctcgtccctctccctcacacccaacaacaaacccatttccatttctgctgtttttctcaaaccaacaactctgtcgtcgtctcgcttcgttccccacgtcgtggtgtcgtcggatttggggcaggaggaggacaccttcagtgacggagacggccccagcttctcccccgaccttaagctctttgtcgggaaatcttccgttcaacgtcgacagcgcgcagctcgcggagctctttgagagtgccgggaatgtgaaggtggttgaggtan

SEQ ID NO: 247109 - DNA, 516 bp, Glycine max
  unsure (1)..(516): unsure at all n locations
agttttaagggctgtgtgcgccgctgcagtcgatgcgatgccgtaccggtccggaattcccgggtcgacccacgcgtccggttactttatcagtatcattcattgtcactacgattgttctaaaagcaattattactcttgagaagaattaaaatatcatcatcacaataacaagatgagttcaggaattagagcatggagtgtggcagctagtgttggagttgtggaggccttgaaagaccaaggcatatgcaggtggaatcatgctttaagatcagctcaacaccatctcaaaaaccatgttggctcattctctcaggctaacaagctttcttctactgctatgatctccacaacactaaaacatgagaaggcaaagcaatcagaggagtccttcagaactgtcatgtacttaagctgctggggcncccaactagatatcataagtccaataagaaaatattctttctcttttaatttctagaaattatcaagcttagtcacaaaggaagaagg

SEQ ID NO: 247110 - DNA, 501 bp, Glycine max
  unsure (1)..(501): unsure at all n locations
gagggggtgcttngtccatgcatgctagttcgtccgcagtaccggtccggaattcccgggtcgacccacgcgtccggctaaagaggtcaagcatccattcaggaatcttctcaagcgcaggaaccgaccccaacttgtcatttccgttgccctacagatattccagcaattcacaggcatcaacgcaatcatgttttatgccccggtgctgttcaacacgttaggattcaagaacgatgcatccctgtattctgctgtgataactggggctgtgaacgtgctctccactgttgtatcgatctactcagtggacaaagtgggacgtcgcattctgttgctggaagctggtgtgcagatgttcttgtctcaagtggtgattgcaatcatactgggaataaaagtgacggaccattctgatgacctttcaaaaagcattgcaattctggtgggtgtgatggtctgcactttcgtgtctttcttgcatggtcttggggtcctctn

SEQ ID NO: 247111 - DNA, 507 bp, Glycine max
agggtaggggcgtgctgtccatcaattgtatgtactccgtccgccgtaccggtccggaattcccgggtcgacccacgcgtccgcccacgcgtccgccttaaagggaagagtttagcaactcttatgcaacaaggcatggctgctgggaagagtggagctgagcttcaggctttggaggatgagtggctctcaaaggcacagttgaagactctctcagaagcagttgtggaggcaattgagaggcagaacattggagaggaagagaagagaaggaagctgaatgagtggatgcaccattcaagctatgaaaggtgtctttccaatgaggagggtagggagatagctgaaaagttaggagtaaggaacctcttttgggattgggacttgcctaggactagagaagggttctacaggttcaaagggtcagtgattgcatcagttgttagaggttgggctttgctccacatgctgatgtgatatggatgggaactggaagcccaaatgtga

SEQ ID NO: 247112 - DNA, 508 bp, Glycine max
agcggggggatgcgtacgtctctgactgtcattgtcggcactgcggtaccggtccggaattcccgggtcgacccacgcgtccgcttcctcagaaacacatcctaatggcagagcgcggaggtggcgatcgtggcggcgaccgtggcggtttcggacgtggattcggcgggcgaggacgcggaggtgacaggggccgaggccggcgccgaggcccccgccgcgaggaagaggagaagtgggtcccagtgaccaaactgggccgcctggtgaaggagggaagaatccgaagccttgaacagatctacctccactcgctcccgatcaaggagcaccagatcatcgacacgctcgtgggtcccaccctcaaggacgaggtgatgaagatcacgccggtccagaagcagacccgggccgggcagaggacccggttcaaggcctttcgcgtcgtcggagacaacaacgggcacgtttggctgggcgttgagtgcaacaagggaagtggcgacag

SEQ ID NO: 247113 - DNA, 501 bp, Glycine max
  unsure (1)..(501): unsure at all n locations
gggggtagttngtgcctgtagcaactcgngcgactgcggtaccggtccggaattcccgggtcgacccacgcgtccggccctcactcttccctcttttctttctttcatccccaaatcaaaacctaaattcggaccttcaactttctcccccaaatcgaccaccaccactgtcaagcccattcatttatattttattcgtatatatacatacagagagtgagtgagagagagagagagaagaatggattcggatcaaggcaagcttttcatcggtgggatttcatgggatacgacagaggacaagctcaaggagcatttcggtaactacgacgacgttttgagcacttccgtcatgcgggagaagaacactgggaagccaaggggcttcggtttcgtcgtttttgcggatcctaacattctagatagggttatggaagacaaacatggcatagatggcagaacggtaacgcttctatcattttttttgtcaattccttacct

SEQ ID NO: 247114 - DNA, 506 bp, Glycine max
  unsure (1)..(506): unsure at all n locations
gggtaggggtancttntgtgtttgtacgcatctcttggcactgcggtaccggtccggaattcccgggtcgacccacgcgtccgcccacgcgtccgcccacgcgtccgtacaattcgctctgtgcagtttcctcgctctcttttctgcaattttcttttttgttccttctctgcggttatctttttgagcttcaatggcggacgctgaaaccttcgctttccaggctgagatcaaccagcttctcagcctcatcatcaacaccttctacagcaacaaggagattttcttgcgtgaactcatcagcaacgcttctgatgctttggataagattcgatttgagagtttaaccgacaagagcaagctcgatgctcagccagagctcttcattcgtcttgtgcccgacaaggccaacaagactctttccgttattgacagcggcattggaatgaccaaagcagatttggtgaacaacttgggtaccattgcgaggtccgggaccaaggaat

SEQ ID NO: 247115 - DNA, 380 bp, Glycine max
ccggaattcccgggtcgacccacgcgtccgggcagaagagatgaatttgttatcatcgccttccagtgccgcttctacttctctatcaccttgctgttttcttccttgctaccctcatcatggtttcacttctctctctctctctctctctctctctctctctctgacatgggtttctggtttggttagcagggttctcttctggtaccttcaaattctccaagaaagagagtagatgtataaagaaagctggaagtatcactgcaaagttcgagttgaagccaccaccctatccactgaattctttggagccaattatgagtgaagagacaatcgaataccattgggggaagcatcacaggacttatgtagaatatctg

SEQ ID NO: 247116 - DNA, 518 bp, Glycine max
  unsure (1)..(518): unsure at all n locations
gggttggtgggcggggtcggcccatgcagcgtangcaatgccgtaccggtccggaattcccgggtcgacccacgcgtccgtatgatttgaatcagcaactgacgcctgaactttacgtttgaacctgaggtggaactttgcataattcgaccttggaggcatacttccatatgtctgtcagtcataaggaacttcatttagaaatgtgattttgcttaattgtagttatgtattatcggcttaataattacaattgtggcacaacttaaggagtattttgcacctgacattcgctcaaaaaaaaaaaaaaaaaaaaaaaaaaaaaaaaaaaaaaaaaaaaaaaaaaaaaaaaaaaaaaaaaaaaaaaaaaaaaaaaaaaaaaaaaaaaaaaaaaaaaaaaaaaaaaaaaaaaaaaaaagggggggcccttttaaaggacccaagtttaattccccgggcttggaacagtaaagctttttttaaggggcccctaaattcaatttcatggcccgggtttc

SEQ ID NO: 247117 - DNA, 438 bp, Glycine max
cgtaccggtccggattcccgggtcgaccagcgtccgatacattaagaaagcccaaagaaagaagaagatggcgtccgagtgcaaaggtaagagctcatggcctgagttggttggagtggaaggaacggtggcggtggctacaattgagagggagaatcctttggtggatgctaacactgtgcttaaaggatccatcgtcaccgctgattttcgatgtgatagggttcgggtttgggtcaccaaacatggaattgtttatcaggctccaagaattggataagaagtgtttacactaaagcacttcatatatatgttatgagtcatgaatataatagtatttaaataaggagttattcttccaattatgttatttgattgaaaataaaaacatgactataagaaatttggtttttcttatttttaattatgttatgcact

SEQ ID NO: 247118 - DNA, 498 bp, Glycine max
  unsure (1)..(498): unsure at all n locations
gttaggagtgcgtcngtcatcgatgtatncgctctgcagtaccggtccggaattcccgggtcgacccacgcgtccgaacagctgagcagacaccgttatctgctttatatgcagcaaaactatttcatgaggctggacttcctgctggtgttttaaatgtagtatctggctttggtccaactgctggtgctgctcttgctagccacatggaagttgacaagcttgcttttactggttccactgatactgggaaagttgtccttgaactggcagctaaaagcaatcttaagcctgttactttggaacttggtgggaaatccccctttattgtgtgtgaagatgctgatgtagatcaggctgttgagctagcccattttgctttattctttaatcaaggacaatgttgctgtgctgggtctcgaacatttgtacatgaaagtgtatacgatgagtttgttgagaaagcaaggctcgtgctttgaaccgtgtgttgggatn

SEQ ID NO: 247119 - DNA, 505 bp, Glycine max
  unsure (1)..(505): unsure at all n locations
ggttaggggcgtgngtcnnaccacggaactcgtccgcctgccgtaccggtccggaattcccgggtcgacccacgcgtccgcccacgcgtccggcccttcaagcatttattgatcatggtaccgtatccaggacaatagactcaaatgcatctgaagctgaaggaatatacaatgctctccagaaattgggtattgactggagctttgttggttcccagcttgaacttgaaggagtggactcgtttaagaagagctttgacagcctcctggattctctgcaagagaaggcaaactctcttaagttggtcagccactgaagtttgaacgtcatggttagtaatgcagtgctgtgtatgatggcatctatggattaataaaaggcagcggctgtgcattttgtgctgctgcanatgtgcttcatggagtcatttatttagacgatagtgatacaatgtaaatgggaaaaattgtccgcttcaagtcaagcgttttgttttttccccac

SEQ ID NO: 247120 - DNA, 508 bp, Glycine max
  unsure (1)..(508): unsure at all n locations
ngttaaggggctgtagtgggcccatggatgctgtccgcactgccgtaccggtccggaattcccgggtcgacccacgcgtccgcccacgcgtccgcccacgcgtccgcccacgcgtccgcccacgcgtccgcataaccttagtcatcttcttctttcatctttctccctaacggtatcgagggaaaaatatggcggaagaacacagatgccaggcaccgcgcttctgcgccaacaattgcggtttctttggcagccctgccacgcagaatatgtgctccaagtgctaccgcgatttccagctcaaggagcagcaatcttccaacgccaagatggttctcaatcagtcgctggttccttcaccgccaccggcggtgatttctcagccgtcgtcttcttcttcggccgcggtagatccgtcatcggcggtggttgatgacgcgccacgcgaggcggangaggttaaggcgccgcagcagaaccggtgtatgacgtgcaagccgcnccttgg

SEQ ID NO: 247121 - DNA, 509 bp, Glycine max
  unsure (1)..(509): unsure at all n locations
ngtttaggggttacgtgacgtaattgcatgcaagctgttacgcctgcagtaccggtccggaattcccgggtcgacccacgcgtccgggcaaaggggatcgctgaaatcaattagtctggttgtagtgggaaaagaaaagaaaatgaaaatgggtggtgggtgcaagtgtttggtatcgttggtgttggctttggtgttgatgaggagtttggcggaggcgcaatcgggcagcagcaccacctgcgcccaggagctaattccatgtgtgaactttctgaatgggacaaccaccccaccaagctcttgctgtgaccctctcaaacaaaccgtggaaaaccaactggattgcctctgcaacatcttcttcagccccggcttgcttcaaagcttcaacgtctctgttgatcaggctctcgctctcagtcgccgctgcggcgtcaccaatggtatcaccagctgcacaaacgggtcagctccagctccgggttcaaggccaacaacaatcaaac

SEQ ID NO: 247122 - DNA, 499 bp, Glycine max
  unsure (1)..(499): unsure at all n locations
cggtngtcaaccactgcatcgatacactgcagtaccggtccggaattcccggtcgacccacgcgtccgcccacgcgtccgaatgaaatgtattatattggtgggaattctgagagtgtggaacaagatgtgatgcattcttataacatggcatttggtggtggtggatttgcaatcagttatgcattagcagctcaactagccaaaataatggatggttgtctaagtagatacttctatttttatggttctgatcaaagagtctgggcctgtattcatgaaattggggtgccccttaccagagaaaatggattccaccagtttgacataagaggaaatccatatggttttctagcagctcaccccttggtaccacttgtatcactccatcaccttgaccaattgagccccttctttcccaaccagactcaattacactcaaatgaaaagctcatcagtgcataccacattgaccctgcccggatagtgcaacaaaatan

SEQ ID NO: 247123 - DNA, 512 bp, Glycine max
  unsure (1)..(512): unsure at all n locations
aggttggaggtaggtgagtgngcccatgaactgatgncctgccgtaccggtccggaattcccgggtcgacccacgcgtccgaaattctcaaatccaaatccaattccaattccaattcccaatcttctcaaaccctaattcctgatcttgaaaatgagagaaatcttgcacatccagggagggcaatgcgggaaccagatcggagcgaagttctgggaggtgatatgcgacgagcacggcatcgaccacaccggaaagtacagtggcgactctgaactccaattggaacgcatcaatgtttattacaacgaagcgagtggcggaaggtacgttccacgcgccgtcctcatggatctagagcccggcaccatggactccgtcagatccggcccctacggccagatcttccgccccgacaacttcgtcttcggccagtccggcgccggaaacaactggggccaaggtcactacaccgaaagcgcttgactcattgactccgtcttgacgtcgtt

SEQ ID NO: 247124 - DNA, 512 bp, Glycine max
  unsure (1)..(512): unsure at all n locations
agttttnaggggtgtgtgagcccatggagctctngcgatgccgtaccggtccggaattcccgggtcgacccacgcgtccggtccttccagacactcccaattccatgattgaaaggggtgatcgcgagaaggccaaggctcagcttcagagaattcgcggcatcgacaatgttgatgaagagttcaatgaccttgtggcagcaagtgaatcctctagccaagtggagcacccttggaggaacttgttgcaaagaaagtacagaccccacctcaccatggcagtgttgattccattcttccagcaactcactggaatcaatgtcatcatgttttacgcgccggtcctgttcagctccatcgggtttaaggatgatgctgctctaatgtcagctgtgatcaccggcgttgttaatgttgtcgcaacttgtgtctcaatttatggtgttgacaagtggggtaggagagcccttttctttgaaggtggagtccaaatgcctatttgccaggctgtn

SEQ ID NO: 247125 - DNA, 504 bp, Glycine max
  unsure (1)..(504): unsure at all n locations
gggtgagggctgngtcagtcctggatgctcgtacgctcgccgtaccggtccggaattcccgggtcgacccacgcgtccggaaaaaaataatggcaaggaaggtgggtttgaattttatagggtgctccatcgttgcaatggttttcataattggtgtggctgaagcaacagattatatcgttggtgaaggcttcggatggagcgttccctccaatgagagcttttatacagactgggctagcaccaagagattcttcgttggtgacaatctcattttcaacatcagcggagagcattcggtgggaattagaacagaggctacttattatgagaattgcaacaccagcttattaactgggttcacgttcataggcgtcaatggggagtaattcgatgtttcgacataatattattcctccaactgggcctcgctatttcctctgcaaccgtggaatcactgtgaaagaggccagaggttagtatcaacgttgagtctcaatccgn

SEQ ID NO: 247126 - DNA, 518 bp, Glycine max
agttataggaggtccttaagtccccgaaagcagtcgtactgacgtaccggtccggaattcccgggtcgacccacgcgtccgcccacgcgtccgatttatgtaatgttctacctgaaaaataataatataatctgttttagtattgttaaaaaaaaaaaaaaaaaaaaaaaaaaaaaaaaaaaaaaaaaaaaaaaaaaaaaaaaaaaataaaaacaaaaaaaaaacaaaaaaaaaaacaaaatcaaatagacacctaaaaacaaagaactggcacaaagcaataaaacgataacgaaatacaaaaccactgaagctaaccaacttaattgccttctacaacatacttgttttcgaaaatgtcaaaaaatctaaagatgctcgcaacgatggctaatgtcaaacaaatcgtttaacctgaaacctaaaaagcacgctccctgtaacggcgcttttagcacaaagtcaatcaaagttaccactaaacgtgaccggtaaacttaacatggctcttcctaaca

SEQ ID NO: 247127 - DNA, 512 bp, Glycine max
  unsure (1)..(512): unsure at all n locations
ggtttgagaggtagttncgtcaatgtatgctatctcgngcgcctgcggtaccggtccggaattcccgggtcgacccacgcgtccgctctggttgattcggatctagagtcttcagtttctcctcgttgttcttcgctttgctgttttcaatttcgattctttcgttaatttaataagatgtttgggagggcaccgaagaagagcgataatacgaggtactacgaaatcctcggcgtctccaagaacgcttcgcaggatgatctgaagaaggcttacaagaaagccgccattaagaatcaccccgacaagggcggtgatcccgagaagtttaaagagctggcgcaagcttatgaggttctgagtgaccctgagaagcgtgagatatatgatcagtatggtgaagatgcgcttaaagaaagaatgggtggttgcggtggccatgatccatttgatatcttttcatctttcttttggcggtgggagtcccttgggatcaggtggaaagtagtcga

SEQ ID NO: 247128 - DNA, 500 bp, Glycine max
  unsure (1)..(500): unsure at all n locations
ggagtanctgaattgatagtagcaactcgngcgcacgcggtaccggtccggaattcccgggtcgacccacgcgtccgctcttgtttcaatttcaacaacggttactcctttttcgttttgagtttcaatcaagccatcatcatgtctaccgcatcgcaacccaaggccaagaaaacggcgtcgtccaagaagcccctctcccaccctcccttcgccgtgatgatagcagaggcgattgcgagtctgaaagagagaaccggttcgagccaatacgcgataaccaaatacatcgaagggaagcacaaggagttgcctgcaacctacaagaagcttgtcctcgttcatctcaagaaatctggtgctgctggcaagcttgttaaagtgaaaaactcctttaagctcgcaccgactaagcctgctccggttaaggccgctgctcccaaaaagccaaccaaagctgncactaagcccgcttcaagccccaagctgctactcctaga

SEQ ID NO: 247129 - DNA, 509 bp, Glycine max
  unsure (1)..(509): unsure at all n locations
ggtggggttaggtgtttggaccatgaactcatagcctgccgaaccggtccggaattcccgggcggcctttgtgccggcgacgcatcattcaaatttctgccctatcaactttcgatggtaggatagtggcctaccatggtggtgacgggtgacggagaattagggttcgattccggagagggagcctgagaaacggctaccacatccaaggaaggcagcaggcgcgcaaattacccaatcctgacacggggaggtagtgacaataaataacaataccgggctcattgagtctggtaattggaatgagtacaatctaaatcccttaacgaggatccattggagggcaagtctggtgccagcagccgcggtaattccagctccaatagcgtatatttaagttgttgcagttaaaaagctcgtagttggaccttgggttgggtcgatcggtccgcctncggtgtgcaccggtcggcttgtcccttctggcggcgatgcgcttctgtcctaaa

SEQ ID NO: 247130 - DNA, 511 bp, Glycine max
  unsure (1)..(511): unsure at all n locations
agttnnnaggagtgngtgcgcccatggatctcatgcgatgccgtaccggtccggaattcccgggtcgacccacgcgtccgcacaggtccaaatgggcagcatctttgcatggtccttgagtttcttggcgatagcttgcttcgcttgatcagatacaaccgctataaaggtcttccattgaataaagttagagagatttgcaaatgtgttttgactggtttggattacttacatactgatcgtggtatgatccacactgacctaaaacctgaaaacattcttctatgttcaaccattgatcctgccaaagaccctttaaggtctggactttccccaattcttgagcggcctgagggaaacacaaatggtggagttacaagtcttattgagaaaaggttgagaaggagagcaaggacagcagttgctaagatatctggaagaagagcatcaatgggaggaataagaaatgctgcaaaacctgtagaaatattgatgggaatgatgtgaaaag

SEQ ID NO: 247131 - DNA, 511 bp, Glycine max
  unsure (1)..(511): unsure at all n locations
ggtntgagggctgatttcngaccacggattgtactcgcttcgccgtaccggtccggaattcccgggtcgacccacgcgtccggagatctcagattgcaattgcctcttctcttctcccagaatcggtgtaggttacaggtttaagggttttgttttcatttaggtcactaatccgatatcatgaagctcgatacgactagtctcgaatcgtttcccacactgattgcacctcaaaacgacgtcgccggagaactctccgccgctccgttctttgaccttccgaattccaatgacttcgatgggttcttgaaagacgctattcagatggtgaagcccgcgaagggtactacaactcttgcttttatatttaaagaaggtgttatggtaactgctgattctcgagctagcatgggaagatatatatcgtcgcaatctgtgaagaaaattatcgaaatcaatccctatatgcttgggacaatggcttgttggtgcttctgatggccagttttgg

SEQ ID NO: 247132 - DNA, 511 bp, Glycine max
agttttagggctcgtgtgagaccatggatccccttcggtatgccgtaccggtccggaattcccgggtcgacccacgcgtccggctttttctgttccacaggctactgccagatcttctgaaaatgcggaatcctctgcatgatctggaatttgtgttttctttcgcttgttcgtttgtttaattcaataaaggaaattaggcatgaccctcttgttgagtatgctctgcctatttgaaaatttccacacctcttttaattgtcgtaatgatgtgtgaagtgttgttattttaaaaaaaaaaaaaaaaaaaaaaaaaaaaaagggcggccgctctaaaggatccaagcttacgtacgcgtgcatgcgacgtcatagctcttctatagtgtcacctaaattcaattcactggccgtcgttttacaacgtcgtgactgggaaaaccctggcgttacccaacttaatcgccttgcagcacattccccctttcgcagtttggcgtaataccaaaaa

SEQ ID NO: 247133 - DNA, 509 bp, Glycine max
  unsure (1)..(509): unsure at all n locations
aggttttaggggtgntgtgcgtccatggatgcatttcgtactgccgtaccggtccggaattcccgggtcgacccacgcgtccggaaaaagaaggatgcagagcaatctgcagcagagattgctatagagaagcttggcgatttgtacagaggccattgatcccactccacaggaagcacaagaaagtttagtatctcgaattgcctacatattttctgaaaagtttgttgtatgtgatcatccactcagtggtcacattcgagcaactttgttgaggaaaggtgatctttgtggttccattcctatttctgtcattgctttctatgatgcaaagcttttcagcttgtgtaaatgtattaatcctgaggtggagtcaaacccatttttagttatttcatacataatgaatgccactgcaaacttacaccagtttcttgctacttctgaacgacatctctggattagaaggctgagtccatatccacaagatattatagagtcattgatga

SEQ ID NO: 247134 - DNA, 507 bp, Glycine max
  unsure (1)..(507): unsure at all n locations
agtagttactctnagtccatcgcatgcagctcgtacgcactgccgtaccggtccggaattcccgggtcgacccacgcgtccgagcgttgccattctcatcctcttctttctctctctaccattgccatggatccctacaagcaccggccatccagcgccttcaattctcccttctggactacaaattctggtgctcctatttggaacaacaactcctctttaaccgttggagctagaggtccaattctgctggaggattatcatcttgtggagaagcttgcaaattttgatagggaacgtatcccagaacgtgttgtccatgccaggggcgctagtgcaaagggtttctttgaggtcacccatgacatttctcacctgacatgtgcagatttccttcgagcccctggagttcagacgcctgtaattgttcgtttctcaactgtcattcatgagcgtggtagccctgaaaccttgagggaccctcgaggttttgccgggaagtttaca

SEQ ID NO: 247135 - DNA, 503 bp, Glycine max
  unsure (1)..(503): unsure at all n locations
agagttacgttagtcaatgcatgcaactcctaggcactgcggtaccggtccggaattcccgggtcgacccacgcgtccgcccacgcgtccgcccacgcgtccgcgaggtgttgggagcagtaggtgaaaccgtggctgagattggacagaacatgatgaagccagcggagatagttcaggaacgcgctcacgttcgacaagcgggtggggtcttggatgccattggtgaaaccattgctgagattgctgaaacgactcgagtcatggtttctggagaggacgagagagtgctgaggcagagcgtggtgttggagactcgcgtaactggtcgtgccaagcatgaagaagggtcgcacggtgcttgagtctcttgagtgaacgctgtgttttttaaggtttatttctgttaatgtcatgtttagtctgtgtcaagtttcatgtttcgggtttggtgactttggtctatggaaatggaacccaataagaatctncttttnttgaga

SEQ ID NO: 247136 - DNA, 510 bp, Glycine max
gttggagaggtacttgtgtccctggactgcatctgtacgcacgcggtaccggtccggaattcccgggtcgacccacgcgtccgcagattcggtccttccaatcatcccgagttctggtcaacttttctccattcggcggatttgatcattctgctcctgattctgctcagacaccgcacagagaacaaatccaccattcattatgctttttcgcaacagcgcactggctctaagatccttgccgatactgaagcacctactctagcggtggatcccggaccgatccatgacgtacatgcaccgaccgtgctatgggacactgcggtcggtgacactgatccgggtcgacaggatcgggccgatggtgactggcgcggagtaaccggtcatggaggccatgcacacgcccgtctacgtcaagaagatccagggccacggcaacaggaacgccgtgcgcgccgatgttctatggtattgtcggcaaaacaaaggctggttttatggaaggaa

SEQ ID NO: 247137 - DNA, 505 bp, Glycine max
  unsure (1)..(505): unsure at all n locations
ggtttgagaggtcctctngtccatgtacgtatctcgagcgcacgcagtaccggtccggaattcccgggtcgacccacgcgtccgctagggtttcatctttgccatcagtaaacgacaatgatttacgacgttaactctgctcttttccgatccttcctcagccagaagggaggctcctctgataagaagaaatcggacgaacagaagccaaaagagcagaaacccaaagccagggagaacaaacctataatgactggatggtaacaactgagctgcattcagttgtagaatgaaaataggtggtaggtattggatttggtgctaaactaagaactttttggctggggtctgaagtatatgccggcgatgttggtctttgttattggaatggtttgattttggatatgggtataacgaaaacttataatggacacaagttgaacttggagcacgcatgacacatgcaatgaagtacctcgtttaaaagtggttgaaaaaaaaaaaa

SEQ ID NO: 247138 - DNA, 507 bp, Glycine max
  unsure (1)..(507): unsure at all n locations
agatnngnagggggtgnctatcgaatgctgccctgccgtaccggtccggaattcccgggtcgacccacgcgtccggctaatacgtgcaacaaaccccgacttctggaagggatgcatttattagataaaaggtcaacacaggctctgcctgttgctttgatgattcatgataactcgtcggatcgcacggcctttgtgccggcgacgcatcattcaaatttctgccctatcaactttcgatggtaggatagtggcctaccatggtggtgacgggtgacggagaattagggttcgattccggagagggagcctgagaaacggctaccacatccaaggaaggcagcaggcgcgcaaattacccaatcctgacacggggaggtagtgacaataaataacaataccgggctcattgagtctggtaattggaatgagtacaatctaaatcccttaacgaggatccattggagggcaagtctggtgccaacaagccgcggaaattcaggttca

SEQ ID NO: 247139 - DNA, 513 bp, Glycine max
  unsure (1)..(513): unsure at all n locations
aggtaggagggagtgngtccnaccatcggatactgtacgcctgccgtaccggtccggaattcccgggtcgacccacgcgtccgcgaaaactatacgattcgattccttgttttcaatggacaccttcttcaattctcaatcttcttcttcttcgagaagccgctggagttacgatactctcaagaatttccgtgagatctctccgctggttcagaatcacatcaaacgggtttattttacgttatgttgcgctgtggtggctgctgctgttggagcttttcttcatgttctgtggaacattgggggttttctcaccacgttggcttccattggaagcatggtttggttgctatctacaccccctgttgaagagcagacgaggttgtctctggtgatggcttcggccttgcttcaaggcgcttccattggacctctgattgacttggctattgccattgatcctagccctattgttagtgcatttggggcaacttcttggcttttgcttgcttc

SEQ ID NO: 247140 - DNA, 517 bp, Glycine max
  unsure (1)..(517): unsure at all n locations
gggtgtgggagagtgtcgtgcttgatcgaaatcganactctgcacgtaccggtccggaattcccgggtcgacccacgcgtccgcccatttcgccttaccaaccccagggaaactccgaatataggcctagatcgtttgtacagacagacttttagggtgctaagatccaaagtcgagagggaaacagcccagatcgtacgctaaggtccctaagcaatcacttagtggaaaaggaagtgatcgagcgatgacaaccaagaggtgggcttggaagcagccatcctttgaagaaaggcgtataactcactggtctaacttcattggacccaaaatgtattaaggcttaagtgaatcaaccgaaccaccagaacttggaaggtggtttttcaagtgtcaataacgggaccttctggcaattggggaaaggttttggtgaccacacctggagatattagaaatgagaatgcttacatgagttacgcttaatactgtgaaaaacacgatatccttgccaggg

SEQ ID NO: 247141 - DNA, 516 bp, Glycine max
  unsure (1)..(516): unsure at all n locations
ggtntatagagcgtcgtgttttgtcctcggatagcgttacgcctgcagtaccggtccggaattcccgggtcgacccacgcgtccgcccacgcgtccgcgttgtggcagtagcaaagcaacacctttttgaaacccgaggttcagagagaaaagaaacattttccaaattaatggggcgttggatgaaaccagaggcttaccctctattggctgcaatgacctttgttaccggcatgtgtgtgttccaactaacaagatatgtgctcgggaaccctgatgttaggattaacataactcggagaagcatggcagtgttggagaacacagaagagggagagaaatatgctgagcatggcctgaggaagttccttcgtactcgaccaccagagattatgccaaccatcaaccacttcttcagcgaggttcaatgaaagagtgtcacacgtagtagaataccaaaatacttcaacttatggaagaaaaatcaaagattctaaatctggtcaggcagcttgc

SEQ ID NO: 247142 - DNA, 506 bp, Glycine max
  unsure (1)..(506): unsure at all n locations
aggttgatgagtgnngtcnntccatggatgtactccgctcgccgtaccggtccggaattcccgggtcgacccacgcgtccgaccacgcgtccgctttgttcaagagttcaagagaaagaacaagaaggacattagtggaaaccccagagcacttagaaggttgaggactgcttgtgagagggccaagagaacactttcatcgactgctcagaccaccattgaaattgattctctatacgagggaattgatttctactccactgttactcgtgccagatttgaggagctcaacatggatctcttcaggaaatgtatggagccggtggagaaatgtttgagggatgctaagatggacaaaagaagtgttgatgatgttgtccttgatggtggctctaccagaattcccaaggttcaacaactgctgcangacttctttaatggaaaagagctttgcaagagcattaatcccgatgaggctggttcatatgttgccgctggtcaggctg

SEQ ID NO: 247143 - DNA, 501 bp, Glycine max
  unsure (1)..(501): unsure at all n locations
agggggcgtgngtctttgtatgtatcctanggcactgcggtaccggtccggaattcccgggtcgacccacgcgtccgatcctcacacaaacgaaaacaaatatctttcacttcttctgcatccgacgctagaagaggtgtcggaacaaacaagcttcgtttcgccggaacgatgaccggcggcggatcgacggggaggttgccaacatggaaggagagagaaaacaacaagaggagagagaggagacgaagagcgatcgccgctaagatctacaccggtcttcgagctcaggggaactacaagcttccgaagcactgtgacaacaacgaggtcctgaaagctctatgcgccgaagctggttggatcgtggaagaggatggcaccacttatcgaaagggatgcaagagacccagcgcgagtgagattggaggaacagtggcaaacataagcgcgtgttcttcgattcaagcaaagtcacaaatcttggcatacccgagtcct

SEQ ID NO: 247144 - DNA, 504 bp, Glycine max
  unsure (1)..(504): unsure at all n locations
agagggnctgnagtgatgtaagtagtccctcaggactgccgtaccggtccggaattcccgggtcgacccacgcgtccgcccacgcgtccgcacgagactcatacattgtgctgccaattatagtaactctctagttctctttccatctctcaagttctgaagaagaaacatgtgtggaggtgctatcatctcagacttcattggtgtgaagcgtggccgcaacctcgccgcgcaggaactatggtctgagcttgaccctttctctgacttccttggcttcgataccaccaattccaaaaaccaaccacccctgcagaaaattccagacaaaaaagtggtgtcatcatgtgagaagaagaagaaaagcgtggtgggtgcagaaaagaagaagagtgatagtgggcgagctcgtaaaaacgtgtacagaggaatcaggcaaaggccatggngcaagtgngcccgcgagataagggacccacacanggntgtcgtgtctggctcgcc

SEQ ID NO: 247145 - DNA, 333 bp, Glycine max
cggacgcgtgggcggacgcgtgggcggacgcgtgggtggccttttacctcggggctcgtcttaaccgcaatgaaaggaaacgtttatttagcttgatcaatgatcttccatctgtttttgaagttgtgactgacaggaaaccagttaaggacaagccaactgcagatagtggaagcaagtctaggggaagtgccaagagatctagtgatgagcaagttaaaagcaacccaaagtttgtagatgagggttatgaggaggatgaagatgagcataatgaaacactttgtggaagctgtggcggaaattacaatgctgatgagttttggatttgct

SEQ ID NO: 247146 - DNA, 518 bp, Glycine max
agacggaggtagtgtcgtgagtcattgaactcgatactatgcacgtaccggtccggaattcccgggtcgacccacgcgtccgaaaaaaaaaaaaaaaaaaaaaaaaaaaaaaaaaaaaaaaaaaaaaaaaaaaaaaaaaaaaaaaaaaaaaaaaaaaaaaaaagggcggccgttttagaggatccaagcttacgtacgcgtgcatgcaacgtcatagctcttctatagggtcacctaaattcaattcactggccgtcgttttacaacgtcgtgactgggaaaaccctggcgttacccaacttaatcgccttgcagcacatccccctttcgccagctggcgtaatagcgaaaaggcccgaaccgatcgcccttcccaacagttgcgcagcctgaatggcaaatgggacgcgccctgtaacggcgcattaagcgcggcgggtgtgggggttacgcgcagcgtgaccgttacacttgccagggccctaaggccccgttctttcggtttcttccctttcttt

SEQ ID NO: 247147 - DNA, 512 bp, Glycine max
  unsure (1)..(512): unsure at all n locations
ggtatnaggggcgtgnagtcnnccaatcgaatgctgtacgcctgccgtaccggtccggaattcccgggtcgacccacgcgtccgccagattgatagttcattgcatgcaaccatagttttattaggttttttcttctttgttttcaattaggtttttgctgctctccttcaaactccgtctttccgaatcctctctttgtgattgtgttctgttctgcttcctaccgcgatagtttctcttctgaagcatggccatggcggtttctgcaattggttttgaaggtttcgagaagaggctggaaatatcctttttccagccgggactttttgctgaccctgagggaatgggtttaagagctcttgcaaagtcccagttggatgagatacttacaccggctgcttgcaccattgnttcatctctcagaaatgatcatgtcgactcctatgttctgtctgagtccagtctctttgtttatgcctacaagatcatcatcaaaacctgtggtactaca

SEQ ID NO: 247148 - DNA, 501 bp, Glycine max
  unsure (1)..(501): unsure at all n locations
gtaggtgnngtttatcctcggatgctagntcgtctgcagtaccggtccggaattcccgggtcgacccacgcgtccggccgaagaaggttcatccaatccccgaagcccttcaccgcattgcaaccatgtcgaggagaaaggtcagagagccaaaggaagaaaacgtgactctgggcccagctgttagagatggtgaacatgtctttggcgtcgctcgcatctttgcctccttcaatgataccttcattcatgtcactgatttgtctgggagggaaacgcttgtccgcatcactggtggaatgaaggttaaggctgacagagatgaatcgtctccttatgctgctatgcttgcagctcaagatgttgctgccagatgcaaggaacttggcataactgctcttcatatcaagctccgtgccactggtggaaacaagacatagacacctggccctggtgctcaatcagctcttcgtgccctagcttggtcaagaactggaaatg

SEQ ID NO: 247149 - DNA, 513 bp, Glycine max
  unsure (1)..(513): unsure at all n locations
cgtgttgagggttatctgnagtcattgcatgcaagctgtacgcctgcagtaccggtccggaattcccgggtcgacccacgcgtccgtctctctctctctcataaattcaatgctctcatcgttttccctcataaaccgctttctcgtgttgtaacacactcatcactcatcatattcattcacacttcccactttccaatatggaatgctgcataatcgccaggctcaagacccaacctttatggttcgcgctgctcttcgttgtcggattgttaacgattctcaaattggctttcgttgttttcagatgggtctacgtcaatttcctccgaccaccgaagaatctcaaaaagtacggatcttgggcagtggttactggacccactgacggcattggaaagagcttcgctttcgagctcgctcgcaagggcctgaacctcgtccttgtcggaaggaaccccgacaagctcaaagacgtgtcggattcgatcgcggcgaaagtcagaagacccn

SEQ ID NO: 247150 - DNA, 508 bp, Glycine max
  unsure (1)..(508): unsure at all n locations
agttttaggagtangttnngtccttgaatgcaactcgngcgcatgccgtaccggtccggaattcccgggtcgacccacgcgtccgcagaaaccttaaaaacaacaacgtaggagtgttcggaaaagatggctaagcaggaagtggtggaagggttcaagttcgagcagaggcacgggaaagaacgcgtgagagtggcgcgcgtgtggaagacgaggcaggggcagcacttcattgtggagtggcgcgtggggatcactctcttttcggattgcgtcaactcgtacctccgcgatgacaactctgacatcgttgctactgataccatgaaaaacaccgtgtatgcaaaagcaaaggaatgctctgacatactttctgccgaggagtttgctattctgcttgctaagcactttgtatcattttaccagaaggttactggtgctattgtgaatattgtggaaaaaccatgggagcgtgtcactgtggatgggcaaccttattgacaatggt

SEQ ID NO: 247151 - DNA, 491 bp, Glycine max
atagattgcaatctgtgcgcctgcagtaccggtccggaattcccgggtcgacccacgcgtccgcagaaaccttaaaaacaacaacgtatgagtgttcggaaaagatggctaagcgggaagtggtggaagggtgcaagttcgagcagaggcacgggaaagaacgcgtgagagtggcgcgcgtgtggaagacgaggcaggggcagcacttcattgtggagtggcgcgtggggatcactctcttttcggattgcgtcaactcgtacctacgcgatgacaactctgacatcgttgctactgataccatgaaaaacaccgtgtatgcaaaagctaaggaatgctctgacatactttctgccgaggagtttgctattctgcttgctaagcactgtgtatcattttaccagaaggttactggtgctattgtgaatattggggaataaccatggaagcgtgtcactttggatgggtaaccttatggaacttggtttaat

SEQ ID NO: 247152 - DNA, 512 bp, Glycine max
  unsure (1)..(512): unsure at all n locations
gtttttagtagttacgtgnagtnattagtttgtcaagctgttacgcctgcagtaccggtccggaattcccgggtcgacccacgcgtccggccattctcatcctcctctgtctctctctctccaccattgccatggatccttacaagctccggccatccagcgccttcaattctcccttctggactacaaattctggtgctcctgtttggaacaacaactcctctttaaccgttggagctagaggtccaattctgcttgaggattatcatcttgtggagaagcttgcaaactttgacagggaacgtatcccagaacgtgttgtccatgccaggggagctagtgcaaagggtttctttgaggtcacacatgacatttctcacctgacatgtgcagatttccttcgagcccctggagttcagacgcctgtaattgttcgtttctcaactgtcattcatgagcgtggtagccctgaaaccttgagggaccctcgaggttttgccgtgaagttttac

SEQ ID NO: 247153 - DNA, 515 bp, Glycine max
  unsure (1)..(515): unsure at all n locations
agtngaaggaagtgtcgtgnatcatcgaaatcgatagccctgccgtaccggtccggaattcccgggtcgacccacgcgtccgcccacgcgtccgggcataatacattgatttgtttcttaaaaacaacactgcaatgtctgccatatttctgcttgttggaatgctatcgtccattacagttgcacaatccataggagtttgctatggagtgattggtgataatctaccatcaaggcaagaagttgtggacttatataaaacaaatggcattggtagaatgcgtatatactacccagatgaagaagcactccaagcccttagaggttcaggcattgagttgattatggacgtggctaaggaaacccttcaatcattgacagactccaatgctgctacagattgggtcaataaatatgttacaccttactcgcaagacgtcaatttcaagtacatcgctgttggaaatgaaattcatcccaataccaatgaggcacaatataatctatctgccatg

SEQ ID NO: 247154 - DNA, 517 bp, Glycine max
  unsure (1)..(517): unsure at all n locations
ggggggtgagggtgncgtcggcactacggatcttgtaggcatgccgtaccggtccggaattcccgggtcgacccacgcgtccgcttcggcaaaggacatggatcggataaaagggccatggagtcctgaagaggacgaagcgttacggaggttggttcagacttacggccctaggaactggtccgttataagcaaatccattccgggtcggtctgggaaatcgtgccgcttgcggtggtgcaaccagctgtctccggaggtggagcgccggcctttcacggcggaggaagacgaggcgatcctgaaggctcacgccaggttcgggaacaagtgggccaccatcgcgcgcttcctcaatggccgcaccgacaacgccatcaagaaccattggaattccaccctcaagaggaagtgctccgagcctctctccgagcctcggcctctgaagagatccgccaccgtttcgggtagtcaatccggatccgatttgagcgaatcggggttacccattattttt

SEQ ID NO: 247155 - DNA, 520 bp, Glycine max
  unsure (1)..(520): unsure at all n locations
aggggnaagtggcgtgncgttgngccttacggattctctacgcactgccgtaccggtccggaattcccgggtcgacccacgcgtccgcaaagacacattctttcagcctcccttcaacacccttttggcccttcattcttccaagtctcaaatcgaagctcgaagacctgcgaagaacaaagggttgtttaaattctgtgtggttgttgttggaggttgaaatacaagttgccgcctcaagtgtgtgttaatcttaaatttcacaagcaagttgtatttttggagtattgtattatatgaccaaatattttagtgttttaggactagatattttgcttctggtggcaatttttctcttctccttctggttctcatcttttgtgttcttctttggttctcacctttctgaagatttttccatcttaattcctggaagcaccaagaaccttgaccaaataattaaccttttttttcttctaatttttctgaaatttcaatttttagtccaatggccacctgg

SEQ ID NO: 247156 - DNA, 515 bp, Glycine max
  unsure (1)..(515): unsure at all n locations
agtngnagagggtgngttgggtgatcgaactgatgccctgccgtaccggtccggaattcccgggtcgacccacgcgtccggtgagagagagagagagagagaggcacttggaatccaaaaatgagagaaatcatcagcattcacataggtcaggccgggatccaggttggcaactcctgctgggaactctactgcctggaacatggcatccagcccgatggcatgatgccaagtgactcctccttcggtgtagcccacgacgccttcaacaccttcttcagcgaaaccggatccggcaagcacgtccctcgcgccgtcttcgtcgatctcgagcccaccgtcatcgacgaagtccgttgtggcacttaccgtcaactcttncaccccgaacaactcatcttcggcaaggaagatgccggcaacaactttgccagaggccactacaccgttggcaaagaaatcgtagatctgtgctttggatcgcgttcgaaaggctgcagaacaatgtgctggtt

SEQ ID NO: 247157 - DNA, 512 bp, Glycine max
  unsure (1)..(512): unsure at all n locations
aggcntggtgcgtgtttcagccactgatagcgtacgcctgcagtaccggtccggaattcccgggtcgacccacgcgtccggaaagaaaaaaaagaagaagaaagagttctgaccatggctgcatcattatttatgccttcatccatagtggacgaagaagcgaggtttgaagccgaagtggcggaggtgcaagcatggtggaactctgagaggttcaggctaacaaaaagaccatacacagcaagagatgtggtgtccctccgaggcaacctcagacaaacctatgcctcgaacgagatggcgaaaaagctctggtgccttctgaagaaccaccaagccaacggcacagcctcaaggacttttggtgcacttgatcctgttcaggtcactcaaatggccaagcacttggacacaatctatgtctcagggtggcagtgctcagccacacacaccacgagcaacgagccgggcccttgacctgctgattacccttatgatactggtcccaacat

SEQ ID NO: 247158 - DNA, 505 bp, Glycine max
  unsure (1)..(505): unsure at all n locations
gggtaggtgtgtgattttgtccatgatagcgtcgtctgcagtaccggtccggaattcccgggtcgacccacgcgtccgctttgctttggcactcatcttgcatgaaaagttcactgttcaagagattttctgggcattttcaatatacttggaggcagttgcaatattaccccaggtggttttggtgcaaaggaatggaaatgtggacaatttgactgggcaatacatattctttcttggtgcatatcgggcattttacatcctgaactggatataccggtatctgactgaaccacattttactagaaggatagcttgggtctcaggtgttgatcaaacagctttgtatgcagaattcttctactattacttcatcagctggaagaacaatttcgaactgaaagtgccttgctgaaatatctcaagtngttttggaatttagacctgtgtgaccagtcaccgctataatttacagagcgtcntggtttggatgatgttagttttt

SEQ ID NO: 247159 - DNA, 384 bp, Glycine max
ccgacccacgcgtcccgttcgatcaaaacactcatcttgcatgacaagcagactcactaagagattttctgggcagtgtcaatatacttggaggcagttgcaatattaccccagttgcttttgctgcatatgactggaaatgttgacaatttgactggtcaatacctattctttcttggtgcatatcgtgcatttcacatgctgaactggatctaccggtatctgactgagccaccttttactagatggatagcttgcgtctgacgtcttgttcacacagcttagtatgcagatttcttctactattacgtcatcagctggacgaacactacgaatctgaaggtgcctgcctgaattatctcaagttgttttggaatttagacc

SEQ ID NO: 247160 - DNA, 517 bp, Glycine max
  unsure (1)..(517): unsure at all n locations
ggttggagaggaggnctcgngtaatgatacgtatccctaggggatgtcgtccggaattcccgggtcgacccacgcgtccgggaaaagcaatcacaaccatccctgaaaatttcacacctcatagagcagtgaagaggatatatgaacaacgggcccaaatgattgaaactggggaagatattgactggggatttgcagaggcgcttgcttatgctaccttgcttattgaaggtaaccatgttcgattaagtggtcaggatgttgaaagaggaacttttagtcaccgccatgctgtagttcacgatcagacaacaggagagaaatattgtcccctggacaatgttataatgaaccaagatgaagagatgtttaccgttagcaatagttcactttctgagtttggtgttcttggatttgaattgggttactcaatggaaaatcccaattcattgataatttgggaggctcagtttggtgattctgctaaaggtgctcatgtcatatttgacaatttttt

SEQ ID NO: 247161 - DNA, 520 bp, Glycine max
  unsure (1)..(520): unsure at all n locations
ggggatggaggcgtgtgtcnngtcatcgaaatccgatacccctgcaggtaccggtccggaattcccgggtcgacccacgcgtccgcaaaaagtttacgttacaaatcgcataataaccgtcctaagtttattgagagaattttgcaagtgtgagaaacatggcatctcgtcaaaacaacaagcaagagcttgatgaaagagcaaggcaaggagagactgttgtcccgggtggaactggtggcaagagcctggaggctcagcaacaccttgctgaaggaaggagcaagggagggcaaacaaggaaggaacagctgggtacagaagggtaccaggaaatgggacgcaaaggagggttgagcactgtggacaaatcaggagaagaacgtgctcaagaggaaagcattggcatcgatgagtccaagttcaggactggtaataacaagaaccagaatcagaacgaagcccaggataagtgataatgtaacaccctttaatagcatgggtaatgggttcttatgct

SEQ ID NO: 247162 - DNA, 384 bp, Glycine max
gagggtcgacccacgcgtacgcggacgcgtgggtgcatacgagaattttgacaaaatagatgggaagcctagtgcagatggggtagatgaaagcaagtattggcgtggcggctatggtggcggctatggtggtggttatggaggtgggcgtggaggctatggaggtgggcgtggaggctatggatggggacgtggcggctatggcctcaaacaaggtgcctatgatggcagacgtggaaggtacagctgggtacagtaagggtaccacgaaatggctagcgtactgaaggacatcactagggacaaattgatgctagaacttgcatctaaggaaggcattggcttaagttaatccaaggtcatgacttgtcataacaagtacca

SEQ ID NO: 247163 - DNA, 509 bp, Glycine max
  unsure (1)..(509): unsure at all n locations
naggatgctanattgngacctgaagccctcagtcactgctgtaccggtccggaattcccgggtcgacccacgcgtccggtttatgtatcttgcattcctacttctatttgttttctctagccaattcttgcttggaggagcagatgcttcccccagacaagtgattgacacagaaggcaagaaagttcgagctggcgtagattactatatccgaccggtcccaacaaccccatgtgatgggcgtgggccgtgtgtggttggaagtggctatgttctcatagcaaggtcattcaaccacacttgccctcttagtgttgccgtggtggagggtttccgtggcctaacaagcacattcaaacttggtaaccctaaaaaaggggtcaataagggttctactgacctggacattaaaaacctcctaactaacacaagttggagtgagtccacggtctggaagctagatgccttggatgattcaactggacagtggtttgggaccactggtggtg

SEQ ID NO: 247164 - DNA, 506 bp, Glycine max
  unsure (1)..(506): unsure at all n locations
naggttggtaagtgagtcatggatagtatgtcatcgcagtaccggtccggaattcccgggtcgacccacgcgtccgctctctctctcataaattcaatgctctcatcgttttccctcataaaccgctttcgcgtgttgtaacacactcatcactcatcatattcattcacacttcccactttccaatatggaatgctgcataatcgccaggctcaagacccaacctttatggttcgcgctgctcttcgttgtcggattgttaacgattctcaaattggctttcgttgttttcagatgggtctacgtcaatttcctccgaccaccgaagaatctcaaaaagtacggatcttgggcagtggttactggacccactgacggcattggaaagagcttcgctttcgagctcgctcgcaagggcctgaaccttgtccttgtcggaaggaaccccgacaagctcaaagacgtgtcgggttcaatcgcggcgaaattcagaagaaccgaggttt

SEQ ID NO: 247165 - DNA, 510 bp, Glycine max
  unsure (1)..(510): unsure at all n locations
agggagctnnttttgaccatgaatcggatccctacggcatgcggtaccggtccggaattcccgggtcgacccacgcgtccgctcacttcctcttggtgaccaagcagagcactgtgattctttgttttcggacggtgtaatgagttttttttttatccttgagagctttggtatagaagggatatagaaaaagataggagcagggagagggaggaggatagggacaggagacaagaaaaggaaagagataggagctgggatacagtgatggagagggataggagaagggaaaaggaaagagatagaagtagggacagaataagaggtggcaagagagataaagacccagagaatgaaagggatgataagcatcgggcaagagaaaaaaaaaaaaaaagggcggccgctctagaggatccaagcttacgtacgcgtgcattcgacgtcttagctcttctatagtgtcacctaaattcaaatcactggccgtcgttttacaacgtggtgacg

SEQ ID NO: 247166 - DNA, 507 bp, Glycine max
  unsure (1)..(507): unsure at all n locations
nggttgagggactgtattattgtcagtatcgtacggcatgccgtaccggtccggaattcccgggtcgacccacgcgtccggggttttcccaaccctcttcccttgttcgaaactagcctaatcaaaaccgaaacagacgattacaaaaacaagaaaagaagaaaaataatcattcattgctcggtgagaagagagagaggaacggcccgatgaccgggaaggcgaagcccaagaagcacacggcgaaggaaatcgccgcgaaggtggacgccgtcaccactaaccgcggcggcgggaaggccggcctgaaggaccgatccgggttggagaagggcgggcacgcgaaatacgagtgccctcactgcaaagtgacggcgccggacgtgaaatcaatgcaaaatcaccacgacgcgcgtcacccaagatccctttgaggaggacaaagtcgtcaatctttacgcgacgcacgttctggaacctccaagccnggcccggtgttcgcggaac

SEQ ID NO: 247167 - DNA, 508 bp, Glycine max
  unsure (1)..(508): unsure at all n locations
ggatttggtgtctgtggtcatgcactgcattgcatgnccctgcagtaccggtccggaattcccgggtcgacccacgcgtccggcaggaacaaagtaatggttttggaagcagaagaagaagttggcggtggtgagtttgagcatctgcctgaaggttgcatagcgaatataggttcgttcaccactcctccagatgcctgcgttctctctttggtctcttcctccttcagatctgccttagttaccgacttcgtatgggaaaggttcctaccctacgattatcacgctatcatttcccaatcttacaagcactgcactctcaccatttactgttacaagacggacctctacctgcacctatgccataacccgctgctcatagacgctggtgaacagagctttgcactcgactaactgaacggcataatatgctgcatgctctcagccggagtctctcatttgttgggggagacactcccaggacttgaagatggacttttgttccacn

SEQ ID NO: 247168 - DNA, 513 bp, Glycine max
  unsure (1)..(513): unsure at all n locations
tgtattaggagtnagtgngtcatgaactcnatgcgtacgcctgccgtaccggtccggaattcccgggtcgacccacgcgtccggaacagctgaggctttggctgcacaagtgagccaagagaactttgataagggactcatatacccaccattcaccaacatcagaaagatttcagcacacatagctgccaatgttgctgctaaggcttatgaacttggcttggccactcgccttcctcaacctaaagatttagtgaagtttgcagagagctgtatgtataccccagcctacagaagctaccgatgaaaagtgataataataaataggcgctnttttctttttcatttatcatgaaatcatttcattggcaattttttaaatttttaccttccttaaggtcctggtatggtttttggaaagtatttggattgggtgggttaattaggtaagaccgttgttggtggtgaattggtcctcggcccaaaaggtccctggaaaattggggtttcgct

SEQ ID NO: 247169 - DNA, 517 bp, Glycine max
  unsure (1)..(517): unsure at all n locations
agtttttattagcgtgcctcgngtgatgattctacgtccgtacggaatgccgtaccggtccggaattcccgggtcgacccacgcgtccgattgatgttgtgtgcaacccattggggaagtctggaggtgccctcatccagcaatttatgatattgacttttgggtcactagctaattcaaccccatacttgggaggagtgcttctgctgattggttctgcctggctagcagcggcaaaatccttggatacccaatttactgcattgcgtaaagaggaagaactcgagaaagagatggaacgagcagccgccgtcaagataccagtggtggctgagactgaaagtggaaatgggtctcttgcaactggttcaacacttgattcattcttagggggactcttaagcaatncattctgagccctaaactcttcgcatttaaaatgtgcctccttctgtgaagaaattgcctcacagaatgagcaaatagagctcttttgagagcagtgttaggtgaaacc

SEQ ID NO: 247170 - DNA, 512 bp, Glycine max
cggtgggaggtgtataggccgactgaatcctgtgcgatgccgtaccggtccggaattcccgggtcgacccacgcgtccgcgttttttaagagagagaaagtagagagagagacacacacaactcccacaattgcggtgcctaaccttaatttcaggacacttcgaagctaccaggaccaattgttgttgttcttccctttttgtgctttttgattcagagatttttggttttcgtttttttttttcacaaggagaaagttcggtgtctttaagttgaataacttgttgggacatatttgatttggcgctttttcttttggtgcttgcctcatgggaaacagtgaggaagagaaatctgttaaaactgggaagccttcttctttacctgcaacaactgagcagaccaaccaacctaatattcacgtctatcctgattgggctggcatgcacttttatgggccaggagtcaacattccaccatactttaaccttaactggggctttctggtaac

SEQ ID NO: 247171 - DNA, 505 bp, Glycine max
ggttgaggggctgtgtttttgctgcatccctcgcgcactgcggtaccggtccggaattcccgggtcgacccacgcgtccgtacacttgtactgttctattagttcatactaagttctgaaaatgagttccaaggtgttgcttgttctacttatgttcttggccactatacttctgatctcctctgaggttgcacccgatgatgcatacgagaattttgacaaaatagatgggaagcctagtgcagatggggtagatgaaagcaagtattggcgtggcggctatggtggcggctatggtggtggttatggaggtgggcgtggaggctatggaggtgggcgtggaagctatggagggggacgtggtggatatggcggcggacgaagtggctatggtggcgggcgttgtggctatggccgcaggcgttgtggctggcctagtggctatgggccttaatgacataaccaggctgggtggatcgttaccctgacaactaataaggcaact

SEQ ID NO: 247172 - DNA, 505 bp, Glycine max
  unsure (1)..(505): unsure at all n locations
ngggggagggaactanaatcatggtacgtatcctacgcgactgcggtaccggtccggaattcccgggtcgacccacgcgtccggaataaacatgttctggttgtcggatctggcaattccggcatggagattgcgctggacttgtccaattttggtgccaaaccttccatcattgttcgcagcccggttcattttctttcgagggatatgatgtattatgcgtcgcttatgctgaattacttgtcgctgagtacggtggagaaggtgttggtgatggttagcaaggttgtgtatggagatctgagtgagtatgggataccgtatccgagtgaggggcctttcaccatgaagatgaagtatgccaagttcccaatcatcgatgtaggaactgtcaagaaaattaaatctcgagagatacaggtgttgccagctgaaataaagagtttaagaggaaatgaagttttgttccaggatggcaaaatgtacacattcaactcaattgttt

SEQ ID NO: 247173 - DNA, 518 bp, Glycine max
  unsure (1)..(518): unsure at all n locations
agtttnntnaagaggngtcncgccttgatatagaaagagtccggcatgtccgtaccggtttcggaattcccgggtcgacccacgcgtccgcaccaatcttcgatcatggacgccgattcacaacctcaacaactcgaagagagaacagaggagcaagaactgaagtacctggaattcgtgcaattcgcgaccatacaggctctgatgcgctgcgccatcctctactcatacgccaaggagcgcgcgggtcctctgaagcccggtgtcgacaccgtggaggaggccgtgaagaccgtcgtggctccggtctacgttaggttccaccttgtccccggcgaggtcctcaaatacgcggatcggaaggttgccgagttagacagccacgttcccttcaacgtgaagaaagtctccttccaggcctgctccgtcgtctctgaagtccgccgcgatggcgtctncggctacgccaagaccggttacttcaaataccaagcttacagcgaacaatgcccacaggt

SEQ ID NO: 247174 - DNA, 502 bp, Glycine max
  unsure (1)..(502): unsure at all n locations
tggaggagaggcgtgncttctagtatgtatctctcgccgtaccggtccggaattcccgggtcgacccacgcgtccgcccacgcgtccggtctttatcctgtaagtcaattacctccagaagctgtcgttggtaatgttacatgtggtagtggacgtggtggtttatccaccactgcttggattagttctgcagttaacaatcgctcctcagatatcaacaaatagattcgcacagcacttgggaaaggtaagaaaattgtttttcttactagaggatccttttccagtaactctattggctgttctttttggcgttaagaatgaaattctgagttctaacgccactaaccctatgctgacgcgacttcttgagaactgtgagagtctcaaatatctggtcgatgagtgtccttttgcatttgtgaaactagatgtaaaattttattcccttaattaagcgcattactaagggccatgattgggttcaattttaaaaaaaaca

SEQ ID NO: 247175 - DNA, 507 bp, Glycine max
gggggggggtgagtgggggtttgatgggtacggcactgccgtaccggtccggaattcccgggtcgacccacgcgtccgcccacgcgtccgtccacgcgttcgcccacgcgttcgaccacgcgtccgatggactgcatctagtgctgacagctcagcgggtcgggctcctggctacggtgtcatcaccaacataatcaacggtggcctcgaatgcggccacggccaggataatcgggtccaagatcggatcggcttctaccgaaggtactgccagatgatgggaataagccccggagacaacttggattgtaacaatcaaaggccatttgcttaagcaaattgctcacatatatcatccatatagagaataaatagtatgtaataaaggatctaccatgatcttacatgtactgggaaacttgtttctaaagaagttccccttatcttgattaaataggaaactttaatattttaccacctttaaaaaataaaatgcgaacaattgaa

SEQ ID NO: 247176 - DNA, 512 bp, Glycine max
  unsure (1)..(512): unsure at all n locations
ngtgagggtggtnnttanaataatgtactgcaatgtgttacgcctgcagtaccggtccggaattcccgggtcgacccacgcgtccgagagaatggctcccaagggtttaatctttttggctgtgttatgcttctcagcactgtcactgagtcgttgtcttgcggaggataatggacttgttatgaacttctacaaggaatcatgccctcaggctgaagacatcatcaaagaacaagtcaagcttctctacaagcgccacaagaacactgctttctcctggctcagaaacatcttccatgactgtgctgttcagagttgtgatgcttcactgttgctggactccacaagaaggagcttgtctgataaggaaacagatagaagctctgggttgagaaatttcaggtacattgagaccatcatagaagctatggaaagggaatgcgcaggagttggttcctgtgctgatatcctcgttctctctgccagagatggcattgtttcgctaggaggtc

SEQ ID NO: 247177 - DNA, 512 bp, Glycine max
  unsure (1)..(512): unsure at all n locations
ngaggaggaggaggcgtgntttcatcgtatgcagtcgtacgcgcatgccgtaccggtccggaattcccgggtcgacccacgcgtccgcgccgctgcctcatttctgttctgttctcgtcacagattgtggtgattctattaggcgttggctgggttcaattgatgagagacaattgtggggatgcttgtttctgtcaattggctctgttttctttgttgggtatttctctattgctgttctttgcaagcttttcccaccttcacacattcccctcatttctgcactgcaaaatgactggtactactgcttcttggtgccattgactctccctataattgtggttgctgtgtactttcattggctcagcatgaagctgttcaagcatgcttaattagcttaactttgccagattttgaaggcagaaagaaatacatgtatgctngtggagcaagcaacaactacctatgacaattgctgcactcctctctcctaatcacctcaaaaagagttc

SEQ ID NO: 247178 - DNA, 505 bp, Glycine max
  unsure (1)..(505): unsure at all n locations
ggnaggggggctgngtcctgtaagtatcctacggcatgccgtaccggtccggaattcccgggtcgacccacgcgtccgcgacaacgacgagtacggcgagttcctccacctccccggccggaaattccacgaggtctccgagattcgcagggaaattcaggctgaaactgatagggaagcgggtgggaacaaaggtgtatcagacaagcagatccgacttaagattttttcaccaaatgttcttgatatcacactggtagatctcccaggcattacaaaggttcctgtgggtgaccagccttctgatattgaagctcgcatcagaacaatgatcatgtcatatatcaaaactcccacctgtctcattctagctgtcacaccagctaattcagatttggctaattcagatgctcttcagatggcaaggattgctgatcctgatggtaatagaacaaatcgtgtaatcacaaagttggatttaatggacagaagtactgatgcccgn

SEQ ID NO: 247179 - DNA, 507 bp, Glycine max
gaggactcgtgtgttgataagacagcctacggcactgctcgtaccggtccggaattcccgggtcgacccacgcgtccggaaaccctagctagccacaatgcagatattcgtgaaaaccctaacggggaagacgatgaccctagaggtagagtcatcggacacaatcgacaatgtgaaggcgaagatccaggacaaggagggcatcccgccggaccagcagcgcctgatcttcgccggtaagcagctggaggacggccgcaccctcgccgactacaacatccagaaggagtccacgcttcacctcgtcctccgcctccgcggcggcgccaagaagcgcaagaagaagacctacaccaagcccaagaagatcaagcacaagcacaagaaagtcaagctcggcctcctccagttctacaaggtcgacgactccggcaaggtccagaggctccgcaaggaatgccccaacgcccaatgcggcgcccggactttcatgggcaacaatttgat

SEQ ID NO: 247180 - DNA, 515 bp, Glycine max
  unsure (1)..(515): unsure at all n locations
ngggggtgagagggcgtgngtcatgatatggaactcgtacgcactgccgtaccggtccggaattcccgggtcgacccacgcgtccggaaattcccaattacccttcccaattttcaccaaaacctaatactcccacaccaatcttcgatcatggacgccgattcacaacctcaacaactcgaagagagaacagaggagcaagaactgaagtacctggaattcgtgcaattcgcgaccatacaggctctgatgcgctgcgccatcctctactcatacgccaaggagcgcgcgggtcctctgaagcccggtgtcgacaccgtggaggaggccgtgaagaccgtcgtggctccggtctacgataggttccaccttgtccccggcgaggtcctcaaatacgcggatcggaaggttgccgagttagacagccacgttccctccaacgtgaagaaggtctcctcccaggcctgctccgtcgtctctgaagtccgccgcgattgcctcttccgctaccgcaa

SEQ ID NO: 247181 - DNA, 507 bp, Glycine max
  unsure (1)..(507): unsure at all n locations
gagggcgtgnngtcttcgatattggagctcgtgcgcactgccgtaccggtccggaattcccgggtcgacccacgcgtccgctcagtttctcgttttcccaatcgcagctaaaaaatcctctgtacccttttacccttttctcaataagaagaaattaggaaacgcaacaatggctcaagcggttgaagaatggtataagcagatgcccgtcatcacgcgctcctatctcaccgctgctgttgtcaccactatcggatgctcccttgatataatttctccgtatcatttgtacttgaaccctatattggtggtgaagcaatatcagttttggcgcctggttactaattacttgtactttcgtaaaatggacttggattttctggttcaatatgtatttctgctcggtactggcagcttctttgaggagaactcggtcagggggagaactgctgattcctttaacaggctctaatttggtgccactgtattgactggaattgttcttct

SEQ ID NO: 247182 - DNA, 509 bp, Glycine max
  unsure (1)..(509): unsure at all n locations
ngagtggtggtgtgttggattatgtatctcatgcgactgccgtaccggtccggaattcccgggtcgacccacgcgtccgcaaactttgtaacttcaaaacatactcctctgttctctctgtttctcttcaatcgtcctgaaaaaaacaaaaacacgaaaaatcatccaccctctcacattctctctctctctcctttcaactaatatggcaattgaaaaccaagacaacactgtcagagaaatcaagccaaagaacaggagaatcatgggtgctggaggccctgatgatgacgacaataggtggccaccgtggttgaagccactgctgaaagagagcttctttgttcaatgcaagttgcatgctgactctcacaagagcgaatgcaacatgtattgcttggactgtatgaatggccctctctgctctctctggcttgctcaccacaaggatcaccgtgcaatccagattaggagggccttataccctgatgtgatcagagtctctgaaa

SEQ ID NO: 247183 - DNA, 345 bp, Glycine max
  unsure (1)..(345): unsure at all n locations
accggtccgaattccccggtcgacccacgcgttcgnccacgcgttcgggcagcagcttgatgcggttcactttacctatgaagtgggtctggtggaaaagttccctcctgttcccttgttgaagtcttttctcaaggatgctaagaaagttgcggcttctattttggaagatcctaataatgcaggccgagctgcgtacctagctgcaaggaaagagcagtctgcactcagggctgtgattaaatgcattgaagaataccaacttgaggatgagttcccttcagaaaatctgaagaagcgacttgaccagttagagaaggtgaagaccgagaaaaggaaaccagt

SEQ ID NO: 247184 - DNA, 508 bp, Glycine max
  unsure (1)..(508): unsure at all n locations
ggtgggggaaggcgtgtgttctggtaagtatccctcaggcactgccgtaccggtccggaattcccgggtcgacccacgcgtccgggaggcacaccatttttgcgcgcaccagaacgaggagatgaggcagtgccttatgtacgacagccccgagaagaaagccaggctcatagggctggaatacatcatctccgaaaacctttacttgacactccccgaccaggagaagcgtctgtggcactctcacttgtacgaggtcaagagtggcctcttcttcatgcctaaggttcctgctctcattcagcgcccagacatggagactgtctgcaccacttatggcaaagtctttcatttctggcaggtcgataagggtcactctcttccatttgggatacctcagctcatgatggctctcactagagatggccagatctatgatcacctnctccaaagtcagcagagcgcatggggatagactatgaggaagaaagaaaagcgagagaatata

SEQ ID NO: 247185 - DNA, 513 bp, Glycine max
  unsure (1)..(513): unsure at all n locations
ggtnttnntaggggctcncgttatgataagtagcctacggcatgctcgtaccggtccggaattcccgggtcgacccacgcgtccgcccatcttccagggtccggtgatagctgctgcaaaatgaaccttcagtttgtagatcgtaattcaagtgttgttggaaaatcttttaaattaaccctacctgaagtgaccagtttcccagattttcttgttgaaagaaccaggtttgacgctgctatgcaaagaaattggacacgcagggataaatgcagggtttggtggaagaatgaggatagttcctctggtaattggtgggatggtcgaattctgtgcatgaaagccaagtcttctgaatttccagaccgtccattggaaaagtattccggtccgtaccaggagggacttaattgaaccacattggcttagtccttggaagctttttgatgctgatactgattgggaacagcctaacattgatgatgacatgagaaataaactgcaatccacact

SEQ ID NO: 247186 - DNA, 512 bp, Glycine max
  unsure (1)..(512): unsure at all n locations
gagtaactcgngttatcgcacatggaacccttaggcactgccgtaccggtccggaattcccgggtcgacccacgcgtccgttttgggaatttctcaagattttgaaattgctggcaatactcttatgccagctttttctgttccacaggctactgccagatcttctgaaaatgcggaatcctctgcatgatctggaatttgtgttttctttcgtttgtttgtttgttcaattcaataaaggaaattaggcatgaccctcttgttgagtatgctctgcctatttgaaaatttccacacctcttaattgtcgtaatgatgtgtgaagtgtgtgttattttaaaaaaaaaaaaaaaaaaaaaaaaaaaaaaaaaaaaaaaataaaaaaaaataaaataaaattaaaaaattaaaaaaaaaaggggcggccgttctaaaggatccaagcttacgtacgcgtgcatgcgacgtcatagcttctttaatggggccccctaaatccaattcactggccg

SEQ ID NO: 247187 - DNA, 509 bp, Glycine max
  unsure (1)..(509): unsure at all n locations
nggtatagaggtgngtanattcatgaatttgatctctcgccgtaccggtccggaattcccgggtcgacccacgcgtccgggaaccaataaatgaacaagcagtagcaaatatgtatgctgcaatgaggtctgagctcagccaaatttactccaaaataactgaactggagatggaagttagtgagcacacattggttaccaatgccattcaaccacttgaccaatctagacgatgctatcgtatgattggaggggtgcttgtggagagaaccatcaaagaagtcttgcctgctgtgcagcgaaataaagaaaggctctaaaaagttgtggcaaggcttaacgaggcgttggaaaagaagaaaaagggaatttctgagtttgaggctcattataaaatcaggataagggaagctgatgctgaagtgaaagatgaaatctgtangaaagaagggtctgctcaaggggttcttgtgggtcctgcaagtggaaatgaatgatttggctatttc

SEQ ID NO: 247188 - DNA, 507 bp, Glycine max
  unsure (1)..(507): unsure at all n locations
gggggcgggtgagtaggtccatggacctcatgcgattgcggtaccggtccggaattcccgggtcgacccacgcgtccgtggatttgtaggttccactatttgagagtatggatgagagattgcttgatgccatatgtgagagactgaaaccgtgtttatttacagagaatacttacattgttcgggaaggagatccagttgatgagatgttgttcatgatacgtggtcgccttgagagtgttaccacagatggtgggaggagtggatttttcaaccgaggttttctaaaagaggctgacttctgtggggaggagcttttaacctgggccctggatcctaaatctggttctaatcttgcatcttgtactagaacagttaagggcataatggangttgaagcttttgccttaactgcttgtgagttaaaaattggtgctagtcagtgtaggcgccttcacagtggacaggttaaacacacttttccggatttacttccaacgatggaga

SEQ ID NO: 247189 - DNA, 510 bp, Glycine max
  unsure (1)..(510): unsure at all n locations
tgttatagtggtgtngtcngagatagaattctgtacgctctgcagtaccggtccggaattcccgggtcgacccacgcgtccgggccttgcctggcgccaccatgttccctcaagtcatctcaaccgctgcttcgtttaatcagtcgctgtggcaggaaattggacgggtggtgtctgatgaagcaagagcaatgtacaacggtggacaggctggtttgacgtattggagtcctaatgtgaacattttccgtgacccacggcggggccgtggccaagagactcccggcgaggacccgacattggccgcaaaatacgccgccagctatgtcaaaggactccaaggcgatggtgccggaaatcgcctcaaggttgctgcttgttgtaaacactacactgcctatgatcttgataattggaatggtgtggacaggtttcatttcaacgccaagctgagtaaacaggatttggaggacacttatgatgtaccatttaaagcgtgcgtgttggaag

SEQ ID NO: 247190 - DNA, 505 bp, Glycine max
  unsure (1)..(505): unsure at all n locations
gaagaaaggctgtgtgttgtaagtagtcctacggcatgccgtaccggtccggaattccgggtcgacccacgcgtccgtctctcaatcgttttctacataatacaaacctctctaatttttgaagcttattatgcccaatctcgatatgcagatcttcgtgaaaaccctaactggcaagacgatcaccttggaggtggagtcctctgacaccatcgacaacgtgaaggccaaaatccaagacaaggagggcattcctccggatcaacagcgtttaatcttcgccggaaaacagctcgaagacggcagaaccctcgccgactacaacatccaaaaggagtccacgctncacctcgtcctccgncttcgcggcggcatgcaaatcttcgtcaaaacccttactggcaaaacaatcacgctagaggtggaagtctncgacacattcgtttacgtgaaagccaagaatcaggataagggaggaatttcctccggatcaacaacgtttgan

SEQ ID NO: 247191 - DNA, 509 bp, Glycine max
  unsure (1)..(509): unsure at all n locations
nggtggagaggtgcttntgttatcgtacgtatcctacggcatgcggtaccggtccggaattcccgggtcgacccacgcgtccggcaacctggaacctcaactaggacactccttcctatggttatgttccagaacatgtcccaaggtcctcctagctcacttttgcaggttgctgtaaaaaacaaccaacagcctgtgtggtattttaatgataaattctcattccatgtactttttactgaggatggtagaatggaacgttccgctttcttagagacttggaggtcccttcctgattcaaacgaggtttccaaggacttcccagacattgtgattggcggtgtggaagcgacactggatcgactagctgcatcaaacgtgttctttattgcaaagcgcaagaatgcaaaccaggatgtgttntacttctcagctaagattcctcgagggataccattataaattgaacttaccacattggccggaaaccctggcgtcaaatgtgcaat

SEQ ID NO: 247192 - DNA, 526 bp, Glycine max
ttgttgtagagaactctctcttgacatgcatcctcagcatgccgtaccggtccggaattcccgggtcgacccacgcgtccgattaatcctatgtctttttggtccaaaaaaaaaaaaaaaaaaaaaaaaaaaaaaaaaggaaaacaaacaatataataaaatccaaacttacatacacatgcatgcaactttataaaatattatataaagtaacctaaattaaatatgactgaccttttttatacaaccaacttactggaaaaaccttgccgttacctaacttaattttcttgcaatacatcttcatttcaccagctgtctttttacacaaagatgccctggaccaatcgctgctttccaacactttaaacatgcctgaatggcagaatggcacttctccctgtagccgctacattaaaacgcggcttagtgccgtgcttacttctcaaagtgttcgatacacttgccatcaaactaacgcccacttttttcggtttttttactttttttttttggggagttttat

SEQ ID NO: 247193 - DNA, 521 bp, Glycine max
  unsure (1)..(521): unsure at all n locations
nggtgggggagagggngtgangtgtttggtacggtatctcgtacgcactgccgtaccggtccggaattcccgggtcgacccacgcgtccgcccacgcgtccgcagctacgatgggtaagggaacggggagtttcggtaagaggaggaacaagacccacaccctctgtgtgaggtgtggccgccgcagcttccacctccagaagagtcgttgctctgcgtgcgcttaccccgctgcgcgcaccaggaaatataactggagcgtgaaggccattaggagaaagaccaccggaactggaaggatgaggtacttgcgtaacgtgcctcgcagattcaagagcggcttcagagagggtaccgaagctgcacccaggaagagaggagctgctgcctctgcctaagctttgaatgaatgacagcaatttttgctgggtcagtgaattataggagttaatgtttctgtgttggtgccaaactctttggaacacattttctttctgtcggtttaatttcatttaatatgt

SEQ ID NO: 247194 - DNA, 332 bp, Glycine max
gttccattatcatctttgcgccaaaccatacagccaaagcataaccacagaaaataactaacataactgtgcctagaccagcgccagctgtggaaccttcatgaactcctgatttgtaagcatctacaagaaatttgctataactagatactgcttgcttttccccagtaaaggatgcaacctggaaatatacacagggaaagaaaatataattattatagcactgtcaagacgcaagcaacaagcaataaacacattctcaaccaagaaattatagaattccacagatatctacttaaggtttcaacaaataacatacagttcttattgat

SEQ ID NO: 247195 - DNA, 404 bp, Glycine max
gccgtaccggtccggaattcccgggtttcgcttttccattccaacctctttcacacttcagatctgtttcttcatcggttgttcaagtaaatggcctttgtcaccactgctgaagtgtgtgatgcgaacccacagttaattttgagtggggagcttcgtgcccttcagccagtttttcagatttatggccgtcgacaggttttctctggacctatagttaccttgaaggtgtttgaagacaatgttttggttcgtgagttccttgaagagaaaggcaatggaagagttctagttgttgatggaggcgcgagtttacgctgcgctatattgggtggcaaccctgtggtacaagctcaaaacaatggatgggcaggtattattgtgaatggatgtataagagatgt

SEQ ID NO: 247196 - DNA, 523 bp, Glycine max
tgggggtgaaggcgtttgttcatgttcaccgggtacggcatgctgtaccggtccggaattcccgggtcgacccacgcgtccgcccacgcgtccgaaaaatgattctcaaattcagagactaaaacaccaattaaatcgttacttttttacctttcaaaaaaaatttaaaaaaagaataaaaaaaaaaaaaaaaaaaaaaaaaaaaaaaaaaaaaaaaaaaaaggaaaaaaaaaaaaaaaaaaaacaaaaagtataaaaaaaagaaaaataaagtataagtacttaaaaaatgacaactaaaaaaaaaaaactgaaccggaggataccaaaataaatactaggaaaaaccaggtagtatacaacgaaatataggatgagagaaaaagcccttatcgaaatgggcttactaagcaaagaagaccctacaaattcggacttgccaccaaatggacaaatatgattggggaatagtaaaaagccttttaacagggcaattaataaacgtcgaaattgggagtgaaca

SEQ ID NO: 247197 - DNA, 527 bp, Glycine max
  unsure (1)..(527): unsure at all n locations
gggatatggaggganctcgaagtaatagataactaaactcgtgcgcctgccgtaccggtccggaattcccgggtcgacccacgcgtccgcccacgcgtccgagcagtttcttggaattgtaggcgatacagcaaacactgttgctaagaagccacccccacctcctcctctggtgtcacgcaaaccggcgttcattgatgcattcttgtataagatgaagaagaatccaaatcttttgttgaacaagaccatttggtcacggagatcgactatcttgccagaatttggtgatagcactggcaagaattacaatgggaaaaccactattcggtgtaagatcacttaaggaaaaggtggtcattaggttgggaaagttggctctcaacaagaaaccgcagaaccggaggaccaaggccaatttcaaaaaattgtaacaccacctaaggaaaaaggaagtgaatgtcttcgtcttctttntttttcctgaatttttgaccaaaactaagtttgccggtaattttatttcc

SEQ ID NO: 247198 - DNA, 516 bp, Glycine max
  unsure (1)..(516): unsure at all n locations
gttggggagagtaacgtgngtcatgatacggatgctgtngcgcactgccgtaccggtccggaattcccgggtcgacccacgcgtccgcggacgcgtgggcaacaatagcttgctagctactcctgttgctgtgagaaccgttgatgtagatgctttgcaagcaagatttagagactccaacaataaaagccatgcttaacacctaccatgcctccaaactctcatcaaaccagtgtggttctagccttgtgcaaacaatagatgcacctttacctctcgtatggtccctcataaggcgctttgagtatccacaagggtacaagctctttgtgaagaagtgcaaccttcttgatggggatggtggcattggaagcgtgcgtgaggtcatgatcacatctgggttacccgctggtgttagtgtggagaggttggacaagctcgatgatgacaagcatgtcttgaagtttagcatcattggtggtgatcacaggctttgcaattataggtcaacgcata

SEQ ID NO: 247199 - DNA, 512 bp, Glycine max
  unsure (1)..(512): unsure at all n locations
nggtnatgagggctgagtgngagctacgtattctatagcgatgccgtaccggtccggaattcccgggtcgacccacgcgttcgaagcaatgcgtgattgtgaccctttatctgctcgtcactggattgttaggaacactaggactgtaaaccgaactgggcatctaactggttacaagctagtacctggctcaaattggttacctttagctggctcagaggccaagtttttgagaagggcagctttcttgaaacacaacctttgggttactccttatgcacgcgatgaaatgcatcctggaggagagttccctaatcaaaatccacgtgttggaaaaggtttggctacttgggttaagcaaaatcgatcactggaggaagctgatataggtctttggtacgtatttggagtgacacacattcctagattggaagatggnctgttatgcccgtggaacgcattgggttcatgcttatgccgcatgggtttttcaattgctcgcctgctgttga

SEQ ID NO: 247200 - DNA, 515 bp, Glycine max
  unsure (1)..(515): unsure at all n locations
gggggagaggttcgtgnatccctgacatgcatgctgcgcgcactgccgtaccggtccggaattcccgggtcgacccacgcgtccgcccacgcgtccgcccacgcgtccgtccacgcgtccgctcgaacctgaccgaaagttgaagctggcacaagaacttggcttgcaaccaagacaagttgcggtttggttccaaaaccgtcgtgccagatggaagacaaagcaattggaaagagattacggcgtcctcaaagccaattatgaatcacttaaacttaactacgacaccctccaacaagaccacgaagccttactcaaagagataaaggaattgaaatcgaggctggtgcaagaagagaacaacaacaacactgaaagcgatgtttcggtgaaggaagagatgctgaccaccacgctctgtgaaaccgncattcctggatcgtacacgaaggatttgagttacgagtggtttaaacaggagtgataagggtggaggggtttcttctgtgttccat

SEQ ID NO: 247201 - DNA, 523 bp, Glycine max
  unsure (1)..(523): unsure at all n locations
atggatgggggaacttaanatccatcggtacgcatgcgctcgcgcatgcggtaccggtccggaattcccgggtcgacccacgcgtccgaaaaaaaaaaaaaaaaaaaaaaaaaaaaaaaaaaaaaaaaaaaaaaaaaaaggaaggaaaaaaaaggaaaaacgataataaaagatccaaactaaaaaaaacatacatacaaaagggtcggccttttttaaggtccaccgcattccaatccattgatccaagttttacaccttcttatctgggaacccaatttcatttacctgcccaatttttataaccttcttgcctggtaaaacctttgggtttcctaactaaaaggcccttgacaaatatcccttttttacaagttggcttattgactgacaaaccgaacccgacctggttttgccacattttgccccaccttaatggcgattgggccccccctttaaggtgccctttaaaccgcgctaagcccgtgttttttctcctatgtgtcccctttttttttggcaa

SEQ ID NO: 247202 - DNA, 507 bp, Glycine max
gggaggggtgcgtgactcctgaatcgatgctgtacgcatgcggtaccggtccggaattcccgggtcgacccacgcgtccgctctctctctctctctctctctcttcacgttcgatctttcgcttctgaatctccaacgatggtgctcgaggcgactatgatctgtattgacaattcggaatggatgcgtaacggggattactctccttctcgatttcaagcccaaacagacgccgtcaatcttatttgcggtgctaaaacccagtctaatccagaaaatacggtgggagttctcacgatggcggggaagggcgttcgtgttttggtgacccctaccagtgatctgggcaagatcttagcttgcatgcatggactagaaataggcggtgagatgaatctagctgctggcattcaggttgcacaattggctcttaagcatcggcagaaccaggagcagcaacaaaaggattataggcctttgtggaggtcctgttaagcatgagaagag

SEQ ID NO: 247203 - DNA, 519 bp, Glycine max
  unsure (1)..(519): unsure at all n locations
agggttaggtagtgnngttgncgcattggaatccgatagctgtacgcctgcggtaccggtccggaattcccgggtcgacccacgcgtccgcccacgcgtccgaattgctaaagatatttcactcactggtcacactactaatacagctttctggagatggcttcaactgtctcttacatgcttctacttccccttctagtgatggttgcctttgctggggacttaaacaaagactttgacatcacatggggagatggccgctccaagatactaaaccatggagagttactcactctttcattggacaaagcatctggctcaggttttcaatcaaagaatgagtatctctttgggaagattgacatgcagctcaagcttgtccctggaaactctgctggcaccgtcactgcctattatttatcttcaaaaggatcaacttgggatgaaatagactatgaatttcttggaaatctgaatggtgatccataccatccttacccaaccgttttcagccaaggc

SEQ ID NO: 247204 - DNA, 520 bp, Glycine max
  unsure (1)..(520): unsure at all n locations
ggttagggagagtantttgngtcttggagatggatgatgttacgcctgcaggtaccggtccggaattcccgggtcgacccacgcgtccggcataatacattgatttgtttcttaaaaacaacactgcaatgtctgccatatttctgcttgttggaatgctatcgtccattacagttgcacaatccataggagtttgctatggagtgattggtgataatctaccatcaaggcaagaagttgtggacttatataaaacaaatggcattggtagaatgcgtatatactacccagatgaagaagcactccaagcccttagaggttcaggcattgagttgattatggacgtggctaaggaaacccttcaatcattgacagactccaatgctgctacagattgggtcaataaatatgttacaccttactcgcaagacgtcaatttcaagtacatcgctgttggaaatgaaattcatcccaataccaatgaggcacaatatattctatctgccatgaccaacattta

SEQ ID NO: 247205 - DNA, 514 bp, Glycine max
tggttggaggtgactttgttccacgtagggtatgtcatgccgtaccggtccggaattcccgggtcgacccacgcgtacggcaccaccaccagcaccaccaccagcaccgttctattcttctttcacaatgggtatgtctcgtgattccatgcacaagaggcgcgccaccggcggcaagaagaaagcttggaggaagaagagaaagtatgagcttgggaggcagccagcaaacacaaaactatcaagcaacaagacggtgaagaggattaaggttcgcggtggaaacgtgaaatggcgtgctttgaggcttgataccgggaactactcttgggggagtgaggctgtgacccgcaagacaaggattcttgatgttgtgtacaatgcattcaacaatgagcttgtttcggactagacgctggtcaaaagtgccattgttcaagtcgatgcaaggcccttttaacaatgggtatttgcaacattatggcggttaaggttggccgcaagaagaagaaat

SEQ ID NO: 247206 - DNA, 512 bp, Glycine max
  unsure (1)..(512): unsure at all n locations
gaggggaggtncttangtaatgaatgcatgcgtnggcactgcggtaccggtccggaattcccgggtcgacccacgcgtccgcccacgcgtccgcaacatcaagacataggtttagatgcttatactgaatcaggatgatggaaaattggatctgaattctgtacaaaagatgtttcttaagggaatgtgtagttttggcagtactgattctgacatagttgagatttaccactgctcaggtgcgtcaatgcaagcacgatgggagctgttccagaagcaagctgaaattaccaaaagaaatcatggggaagctaacattcggtatgcttggcttgcttcctctaaaggagaactatctacaatgatgaactatggacttagtcattatggactatctggatcaaagtgcacatatggcattggtggtcatcttgctgctgttacttgccctgatgcccagtagccgtattggtgatgtgactaaaaatggggtgtcgaaatttggcccgttt

SEQ ID NO: 247207 - DNA, 507 bp, Glycine max
gggtagggggacgtgagtaatgattagtatctgttgcgacgccgtaccggtccggaattcccgggtcgacccacgcgtccgcccacgcgtccgatacccacctgaagcaaattatttatttctcggagattatgttgatcgtggtaagcagagcatagagacaatatgtttactcctcgcctacaagatcaaatacaaggagaatttctttcttctcaggggcaaccatgagtgtgcatccatcaatcgtatatatggtttctatgatgagtgtaagaggaggtttaatgttcgcctctggaagacatttactgattgctttaattgccttcctgtcgctgctctgatagatgagaagatcctttgcatgcatggtggactatcgcctgatcttaaacacttggatcagattcgaagtattgctcgtcctattgatgtgccagatcatgggcttctatgtgaccttctatgggctgatcctgataaagatcttgatgggtggggaga

SEQ ID NO: 247208 - DNA, 517 bp, Glycine max
  unsure (1)..(517): unsure at all n locations
tggggaggagagtancgtgnngtaaatgactcgcatgctgtnacgcctgcaggtaccggtccggaattcccgggtcgacccacgcgtccgaagaaaagcacgttaaagattgtaataatttgtaaaaactatggctagcgatggcagcgaagagtttaggctagtgtcaccggcgttcagcaacgaggggaagttacctcggaactacactgacgagggccagggtgcgaaaaagaacatatcccctccgttggagtggtacaacctgccggaggggaccaagaccctcgccctcgtcgtggaggatatcgatggatccgattcagatgggcccatcatgccatggacccactgggtcgtcgcaaacatcccggccacggtgaagggcctgccggagggattctccggcaaggctgccgagatgggcggngattacgcgacgatcaaggaggggtacaatgacctgaagaagaacggttggaatgggcccaggctgcccacgcctggccacaggatt

SEQ ID NO: 247209 - DNA, 512 bp, Glycine max
ggtgtaggtagtgctgcctttttgaatgaagctgtacgcctgccgtaccggtccggaattcccgggtcgacccacgcgtccgcacaactacaagaaagaacttccttataaccaaaaccaacaacaactatggcaagttatcagaagcactacgatgatcagggtcgcaaggtcgacgagtatggcaatgttgagaggcaaactgacgaatatggcaacccggttcatgccactagtgtcacttatgtagccaccaaaagtgttggtggctacaatgatgacgctaataagcaacatgatattactggtgtctatcccgagaaagacaccggtagacatcattttggtcgtggttacgacggtgacactaacaagcaacatgatgctactggtgtttatcccggaatagacattggtagagatcatgggaactaccggtgtttatggcctaaacaccgacagacatcatggaacttctggggtgaatcccgggatagacacccataaccaac

SEQ ID NO: 247210 - DNA, 534 bp, Glycine max
  unsure (1)..(534): unsure at all n locations
tggtttttgaggaggactcggaggctcgncatcgtancccttagctatgccgtaccggttcggaattcccgggtcgacccacgcgtccgaaaaaaaaaaaaaaaaaaaaaaaaaaaaaaaaaaaaaaaaaaaaaaaaaaaaaaaaaggtaaaaaaaaaaaaaaaaaataaaaataaaataaaaaaaaaaatataaaaaaaaaaaaaaaaaaaaataaattatatagaatcactaaataatgggactagtgttaataatttaacaattttaataatgttaaaactataacaattacttttttttagggcatactattattaatttctttccccagttttatacacatttatatttggaaaatcgttgttgctatctaaataattttttttgctgatgaattcttttttacttatttgtgtttttacacattaagttcacatccgatttgtattttttaaatatttgctaaattccaatttgtaaatggcctactttttggattttcccatttatatccctttttgtgtggtaatt

SEQ ID NO: 247211 - DNA, 524 bp, Glycine max
  unsure (1)..(524): unsure at all n locations
agtgtagctgtgtgntgtcatgaagcctcagcgcacgtcgtaccggtccggaattcccgggtcgacccacgcgtccggattcattagaaagtcctctccagatattgntttgttctttgaacggcttgattttatcaatgctggttatgttgacttcccacttttgaaacttgtaactgaagtgtttggctcggcaatttggttcaacaccatcatagtcatgactcattcttcctctgccattccagaaggacctgatggttatacttttaattatgagtcatatatttcttattgtactaatatagtacagcaccatatacaacaggcagtgtttgattctaaggtttgaaaccctgtacttttggtggagaaccattctcgatgcccacanaatattatgggagagaaaattctcccaaatggacaagtttggagatctcaactcttggtattttgcatttggaccaaagttctgggtgatggtaaatctcttttaaagtttcgaacagtgttaagcttgg

SEQ ID NO: 247212 - DNA, 343 bp, Glycine max
aatgaaagaaaatcttaacactgtgaaaccggaaaatgagccatattgacaatgatgatcacaatcttgaaggctactacagtccaatagatcatgtggaacaagaaccactggttaaccagtatgttaaaccctgccccgttccctgtaaacggattttaagtctcacctgttactccatctgctgatgttactgcttacttcagctctgaacattctagcaactcgtttgattattctgaccttggatggggtgaacaagtccccaatacccccgagatctcatccttgctttatgctgctcctttggaggttgctgctgatcaggttcagaaaaccaaca

SEQ ID NO: 247213 - DNA, 525 bp, Glycine max
  unsure (1)..(525): unsure at all n locations
agagtnagtgngtcnnacgatcgaacatcganctcatcggactgccgtaccggtccggaattcccgggtcgacccacgcgtccgatctacacaaagagaacccaagggcacctttgtttgttgttgggactagcattggagcgtaatattctgataaaatatcttggtgaggatggtgagaatattcctgtagctggagctgtggctgtttgctctccttgggaccttttgataggagacagatttataacccgtaggcatgtgcagaagttttatgataaagcacttgcaattggacttcaaggttatgcaaaattacatcagcctcatttttctcgccttgctaattgggaagggattgaaaagtcaatttccattcgagattttgatcatcatgccacccgcattgttgggaagtatgagactgttgacacgtactatagacgctgcagcagttctacttatgtgcaatctgtttcgattccacttctctgtattagtgctctggatgatccagtctgtacc

SEQ ID NO: 247214 - DNA, 422 bp, Glycine max
aattgccggatgcacccacgcgtccgggtgaatccagaggctcagccaatgaaggaaaatctgaacaccgtgaatccggaaatgggccagatgttcaattttggtcacaatctggagggctactacagcccaatagatcaggtggaacagaaaccactggttaaccagtatgttaaccctgccccgttccctggaaacggagttcaagtctcacctgttactccatctgctgatgttactgcttacttcagctctgagcattcgagcaactcgtttgattattctgaccttggatggggtgaacaagttcccaagacccccgagatctcatccttgctttctgctgctcctttggagggtgctgctgatcaagttcagaagaccaacaactcgcaagatgtggtggctgcacaagatgattc

SEQ ID NO: 247215 - DNA, 519 bp, Glycine max
agaggagtggttgtcatgaataagatctgtcgcgatgccgtaccggtccggaattcccgggtcgacccacgcgtccgccttcccctacttcatcaccatcaacacatacacctggtgatggattaaatacagcaggcagcatgcagcatgtccaaaagagcatgatgatgtatggtacagaggcaacaggaggccttgcatcatcgtcgaatttgctggacgacatggatcgatttggagatgttgatgctttagatgataatgttgaatcctttctatcaaatgatggcggagatggtgggaatctctatggaacagtgaaacaaagtccagctgagcaacagaaagagtcttctaaaggtttcacctttgctgaagttggttgcagaagaacaaggaacagcaaagttacttgttgtcacttttcttcagatggaaagtggctagccagtgctggagatgacatgaaagttgacatctggaacatggacactttagaaacagagagcactcctgcaa

SEQ ID NO: 247216 - DNA, 514 bp, Glycine max
  unsure (1)..(514): unsure at all n locations
ggatagggtgtgtgngctatgcacgcgttgcgactgcacgtaccggtccggaattcccgggtcgacccacgcgtccgagagaacccgcgacctggagtcattattaacagtccacatggaaatgatgtttacaagggagtccctaaggattacattggtgaagatgtaactgttggcaacttttttgctgctatacttggaaataagtcagctcttactggtggcagtgggaaggttgtggatagtggtcccaatgatcatatatttatatattactctgatcatggcggtcctggagtgctagggatgcctactaatccatacatgtatgcatctgatctgattgaagtcttgaagaagaagcatgcttctggaagttataaaagcctagtattttatctagaggcatgtgaatctgggagtatctttgaaggtcttcttcctgaaggtctgaatatttatgcaacaacagctttaaatgccgaagaaaaccagttgggaacctattgtcctt

SEQ ID NO: 247217 - DNA, 530 bp, Glycine max
  unsure (1)..(530): unsure at all n locations
agaggtgagtaggtgtcgtgctgaagnaaggaaaacgtcgtactgccgtaccggtccggaattcccggatgcgacccacgcgtccgccttcccctacttcatcaccatcaacacatacacctggtgatggattaagtgcagcaggcagcatgcagcatgtccaaaagagcatgatgatgtatggtacagaggcaacaggaggccttgcatcatcgtcgaatttgctggacgacatggatcgatttggagatgttgatgctttagatgataatgttgaatcctttctatcaaatgatggcggagatggtgggaatctctatggaacagtgaaacaaagtccagctgagcaacagaaagagtcttctaaaggtttcacctttgctgaagttggttgcagaagaacaaggaacagcaaagttacttgttgtcacttttcttcagatggaaagtggctagccagtgctggagatgacatgaatgttgacatctggaacatggacactttagaaacagagagcacttctgcagag

SEQ ID NO: 247218 - DNA, 531 bp, Glycine max
  unsure (1)..(531): unsure at all n locations
aggtagttntagtgggtctcgtgatagcatctagtcaggctcgtcgtaccggcccggaattcccgggtcgacccacgcgtccgaggctctggctcggaaccttcgacacggcggaggaagctgctttggcttacgacaaaggcgcgtgtaggctccgaggcgacttcgcgaggctgaacttcccgagcctgaaaggctcgtgccccggggaggagtacaagcctgtgcattccgcggtggacgctaagctcgacgcgatttgcgccaacttggcggaaatgcagaagcaagggaagacggagaaaggtgccaggtcagcgaagaaatcgaagcaaggtccgaaccaggaggccaagcccgaacctcaagcttccgctgaaagtgagggttctgcggattcttctccgctgtctgatcttacctttgatgtaaccgagccgcaatgggaacattttaatctgcagaagtttccttcttatgagatcgattgggattctctctgaacttcggctttggttttatggctaggct

SEQ ID NO: 247219 - DNA, 512 bp, Glycine max
ggtagggtggtgtagtcgcactcagcacatcgtatgccgtaccggtccggaattcccgggtcgacccacgcgtccgcccacgcgtccgatcgtaacaagatcacatttgttttgttttgtgttgtttgtgttggggttgtgttgttgatctgataataacaacatggagggtgagaacaagaagtacatcacatctgaggagctgaaggagcacaataagccaggggatttgtggatttcaatccaagggaaggtttacaatgtttcagattgggcaaaggaccaccctggaggagaggttcccttgttgaaccttgcaagccaagatgtgactgatgcattcgtagcataccatccaggctcagcatggaagtatcttgatcccttcttcacagggtaccacctaagagatttcaaggtctcagaggtgtcaaaagattacagaaagcttgtgtctgagttttgccaaaagggtctttttgagaagaaagagcttgtacattttacacacg

SEQ ID NO: 247220 - DNA, 525 bp, Glycine max
  unsure (1)..(525): unsure at all n locations
ggtagggaagtagttatgtcatgaanctggtagctcgtcgtaccggcccggaattcccgggtcgacccacgcgtccgattcagaaggagtctaccttacacttggttcttcgtttaagaggtggcatgcagattggcgtcaggactttgacgggaaagaccatcaccttggaggtggagagttcagataccatagacaatgtgaaagccaagattcaagataaggagggtatccccccagaccagcagaggcttatctttgctggtaaacagcttgaagatggacgaacccttgcagattataacatccagaatgaatctaccctgcacttggttttgaggcttcgtggtggcatgcaaatctttgctaagactttgaccggaaaaacaataactttagaagttgaaagttctgataccatcgataacgtgaaggcaaagatacaggacaaagaggggattccaccagaccagcagaggcttatctttgctgtgaagcagctggaaaatggtcgtactcttggtt

SEQ ID NO: 247221 - DNA, 525 bp, Glycine max
  unsure (1)..(525): unsure at all n locations
gttagtnagtagtttcgatctgaaacacgtagctcgtcgtaccggcccggaattcccgggtcgacccacgcgtccgaccagacagacatatacacgagccttccatatatagccttccaaaactatgaagagtagtacctggttggctctgtttctacttcgtgccctaacttcatcatatcagccatcatccaccgctgatattgtattcgacacctaaggcaatcctattcgaaacggcggcacatactatgtgttgccagttataagaggaacgggcggctgaatagaatttgccaaaaccgaaacagaaacatgccctctcactgttgtgccatctacctttgaggtctcaaagggtctaccactgataatttcatacacatttaaaatccttgacatcaccgaaggacttattcagagcctcaggatcacttatgtacccccctgtgccttaactccttctcggaggaccgttattctcaagggtcttccaagaacaacttccatgtcaactcactggct

SEQ ID NO: 247222 - DNA, 529 bp, Glycine max
  unsure (1)..(529): unsure at all n locations
agtagggcgtagtgtgtgatcgaatacgatgcagttcggcactgccgtaccggtccggaattcccgggtcgacccacgcgtccgcccacgcgtccgcccacgcgttcgcccacgcgtccgctgattttctgatgtggcagaggaagtgaaggcaaaatatcctaaaattacatatgcagatctcttccagcttgcgggtgttgttgcagttgaggttactgggggtccaacaattgatttcgttcctggtagaagagattcaaaagtatctcctaatgaagggcggcttcctgatgctaaaaaaggtgttccacatctccgtgatatcttttatcgaatgggcttgactgaccgagatattgttgcactatctggaggacatacactggggagagcacatccagagagatcagggtttgatggcccttggacggaggaccctctgaagtttgataactcatactttgtggaacttttgaaagaagattctgctgggctgcttaaacttccaacagacaaggctttattn

SEQ ID NO: 247223 - DNA, 531 bp, Glycine max
  unsure (1)..(531): unsure at all n locations
gggaagttnagtaggtgtgatcatcgaacatagtatcactccggcatgccgtaccggtccggaattcccgggtcgacccacgcgtccggccaagctcgcgtctcacttctctctcttatattaatcactcccgcacacagagcatggttcacctttcttttccgaccaaaggttcgccagaaaatgcttctatcctcctcctgctccgccgccggctccgccgtctccggcgagatcatgctgttcggcgtgagagtcgtagtggactccatgaggaagagcgtgagtatgaacaacctctcgcagtacgagctccctcgcgacgccgncaacgccaaagacgacgtcgctgccggctacgcctncgctgacgatgccgctccgataaactccggcaagaaccgcgaccgcaagcgagggattccatggacggangaagagcacaagctattcttggtggggttgcagaaagtggggaaaggtgattggagagggatctcaaggaactatgtcaaaacgaggacgccaacc

SEQ ID NO: 247224 - DNA, 513 bp, Glycine max
gaggctgtcgtccgtttaagaaggcctcaggcactgccgtaccggtccggaattcccgggtcgacccacgcgtccgcaggaaactctttctcttcttccgtttcctagtctcacacccaaacctcatggaaggcggctgtcaacgaacgtcttgattttgggaagatgggatatgggtgcaatcattaccggagaagatgcaggattcgggctccctgctgcaacgagatctactcatgccgtcactgtcataacgacgctgcgagcttgttgaagaatccctttgatcgccacgagctcggtcgccaagatgttaaacaagttgtttgttcagtttgtgacactgagcaacctgttgctcaaggttgcacaaactggggcgtctaaatgggagaatacttctgcaacatctgcaaattcttcgatgattatgttgagaaagaacaatttcactgtgatgattgtgggatctgcagggttggtggtcgagataattttttccactgcaagaaa

SEQ ID NO: 247225 - DNA, 523 bp, Glycine max
  unsure (1)..(523): unsure at all n locations
agttaggagtgtgttgatcatgatgcatcaggctcgtcgtaccggcccggaattcccgggtcgacccacgcgtccgcccacgcgtccgtaaaaaacagagcaactactcaattcttcactctgtttccccttacgttacacactctaacacatggattcaccttcctccttcttcaactcaccctcttccggcttctgctccgaatcttcctctccggaagccttctcgtgggaagggtacctacccttcaacgagaacgacccgtaggagatgcttctatacggcatgatcgccggcgcgacaaccgaggagcactccggcgagagggcgagctcggaggagagtgctgcagcacggaaggagaagtcgtaccgcggcgtacggcggcggccgcggnggaagttcgcggcggagataatggactccacgcgccacgggatgagggtgtggctggggacattcgacagcgccgaagccgcggctctggcttacgaccaagccgngttctccatgcgcggctcg

SEQ ID NO: 247226 - DNA, 531 bp, Glycine max
  unsure (1)..(531): unsure at all n locations
agattaggaggtggtgtgatgatgtatncactgnatgctcgtccgactgccgtaccggtccggaattgccgggtcgacccacgcgtacgtacatttggggcactgaagcaaaagggccatcgccatcaccttacggcgcggcccttggggctcttctccaagctggtttttgcatggccatgtatttaaacctcgtgcctcattttcctttgtccaaatttactgatcctacctaccatgaatggtgtttctggaaaaaattaagttaccagtatatgtctggctttactgcacgctggaagtattatttcatctggtcaatttcagaagcttctattatcatctctggcctggggttcagtggctggactgattcgtccccacctaagcctcgctgggaccgggccaaaaatgttgatataattggtgttgagtttgcaaagagtgcagttactattccagctgtgtggaatattcaagtcagcacctggcttcgtcattatgtttacgaaaggcttattcagactgggn

SEQ ID NO: 247227 - DNA, 535 bp, Glycine max
  unsure (1)..(535): unsure at all n locations
agtttgagggagtggggtgtgatgatcgatnctacgtagtctgtcggactgcacgtaccggtccggaattcccgggtcgacccacgcgtccgcttttgttcccgattttctcaaattgctttcggttttcgttctgattctgcgaaatcggggagatggagcgcatcgttgaattccctcacacctacatggatcgacccccaagaaagagagcgcgtttgggctgggacatcgctgaggcccccaagataagatccatagtaaaatgggcgaaggaacttttgggcaggtcttggagtgctgggacagagaaaggaaggaaatggttgccataaaaattgtccgtgggataaagaagtatcgagaggcagccatgatagaaattgaggtattgcaacagcttgggaaacacgataaaggtagcaatcgttgtgtgcaaatacggaactggtttgactatcgtaatcatatctgtattgtgtttgagaaacttggaccaagcttatacgattntcttcggaaaaacagntatcgn

SEQ ID NO: 247228 - DNA, 512 bp, Glycine max
  unsure (1)..(512): unsure at all n locations
gggaggggtgtgtgntagcactcagctcatcgtactgccgtaccggtccggaattcccgggtcgacccacgcgtccggttcatggaccactcattgttattggcatgatttctcagtatcaaggaaagaagggtgggacgccatcaaaataccctggactattggagaaactcttagcatagagccaaacagtgtctggctttttcctggtgcaatatggtcacttgtggcaagaacatcttgacagactatttaatctttactcttcaggaaagctaaaggctgctattgatccaaagaaatttataggcctgcattctgctgcagacgctgctgaatatctccattcaggcaaaagtgttgggaaggttgtcgtctccgtggacccaagctntcttactcaagtggccaaattgtgaatcaacccatgtcaaatgacctcacagattatattataactcttttaaattaaaaaggataagttaaacgtgcaacttttgtgcaaataattt

SEQ ID NO: 247229 - DNA, 512 bp, Glycine max
  unsure (1)..(512): unsure at all n locations
gttaggtgctttcgtcgatgacagagctgtnggactgccgtaccggtccggaattcccgggtcgacccacgcgtccggtcatttcagaggaagcagttagctctgtatgaagatgatgaatttggattgtcagatgaacaagctctttctctcctagcttctaaggcgtgcagatctggtcaaggagagggtttagccaatgctgctgcaatacaaatacagacaaagtttcgtggttggacgaagagaaaagaattcttgattattcgccaaagaattgttaaaatccaggcccatgtaagaggtcaccaggtcaggaagcagtataaaccaatcatttggtctgtgggaatcctgcaaaaggttatattacgctggagacgcactggcagtggattacgtggatttcgaccagctacccataccagggtccctgaacaaccaaccgaatctcggaaagacgatgactatgattacctcagggaaggaagggaacatagtgaactgaaatt

SEQ ID NO: 247230 - DNA, 527 bp, Glycine max
gggagggagtgggtatgatcatggaactcgtatgctcgtcgtaccggcccggaattcccgggtcgacccacgcgtccgcagaaacgaacaccgtgattcctctcgccgtagatctgctccatttcgccgttcatccatggccggcgacttcgaattcgccgacaaagtccctacttccttcgatcgcgcggcttcaaaagggttcaacccagctttaattgttctcctgcttgttggtgggttgctgttgacattcctcattggaaactatgtactctacacatatgcacagaagaccctccctcctagaaaaaagaagccagtctcaaagaagaagatgaaaaaggagagactgaagcaaggcgtctctgcacctggagagtagaactttttcctcactttatattctgtgatgttaaattgtactctctaagaaaaaatttatcgttctgtggtctcttgagttatgttaaaaattatataaaagggcggccgctctagaggatccaggctacgtacgcgtgctt

SEQ ID NO: 247231 - DNA, 526 bp, Glycine max
  unsure (1)..(526): unsure at all n locations
agtntagggagtgtgtctcgtcatgatcatgcagctcgtcgtaccggcccggaattcccgggtcgacccacgcgtccgggtagccggtcccaatggagggtctgctcgtaagttcactgccaaataccaaacatagggagacgctgagctcaaccaagacgaactcataactggaaaagccaaggctgatgctctattcaaggccattgaagcttaccttttgacccatcccgattacaactaatcctcttcaactcacttgtcatcactttcttgcttaggagacttatccaatcactctgttctcaacttaacttgccttacaatgtatacagtctttccttacttatatgcttatacgatataattgtgagacttatgatatatctgtatctcacttcatcaatactaagttataataaagatgagcaatccttacatggatcgtcctacgatatcgtatctgaattcagtaaaagtatcattggtcacactttatagattaacctggcctaagtttaaatca

SEQ ID NO: 247232 - DNA, 530 bp, Glycine max
  unsure (1)..(530): unsure at all n locations
aggtaggggagtaggtctcgtcatgaagcatgcagctcgtcgtaccggcccggaattcccgggtcgacccacgcgtccgcccacgcgtccgggaagcggggcactgcccctctttttggacccaaggtcggcttcgggcggtcgatccgggcggaagacattgtcaggtggggagtttggctggggcggcacatctgttaaaagataacgcaggtgtcctaagatgagctcaacgagaacagaaatctcgtgtggaacaaaagggtaaaagctcgtttgattctgatttccagtacgaatacgaaccgtgaaagcgtggcctatcgatcctttagtccttcggaatttgaagctagaggtgtcagaaaagttaccacagggataactggcttgtggcagccaagcgttcatagcgacgttgctttttgatccttcgatgtcggctcttcctatcattgtgaagcagaattcaccaagtgttggattgttcacccaccaataggggacgtgagctgggtttagaccgtccn

SEQ ID NO: 247233 - DNA, 327 bp, Glycine max
tgttttttggtttttttttttttttttttttttttttttttaaagcatcttgaattttattttaatgcccctttggtaacttaaaaaaaaaaaaaaaaaatggcccatcattaccaatgggaatcaagaaattttgaacagtttgtaaataatcgaaaccaaattgacttgatgaaattaaatgaacccaaactattgaaccaagcccctttgcttgaaaacatttagcatggcagctccaattttggcaggggactccacaaccatgaccccagcttccctgagggttttaattttgtcttgtgcagtgcccttgccacccgacac

SEQ ID NO: 247234 - DNA, 526 bp, Glycine max
  unsure (1)..(526): unsure at all n locations
ggtaagggagtgggtgtgccactgaaggctgnaactcgtccgactgccgtaccggtccggaattcccggatcgacccacgcgtccgctaagtcccaaaacacacataaattgagcacattagagattaggttagtgtgacactcgcctcaccctctctctgtctctcccctgcggctagggttttgtctttcactcactctcttctctttcttttcttctcattccccttctctttcgatctgaacaataataattaaccatggaaccgtcgctgagttaacctttttcttctgcgcggtgctgttctcttttgttgtttgggttttttttttctttctgagaagggcttgttgttgttgtgtttcgaaataatggcgactacgaatccctttgatttgttgggcgacgacgccgaagacccctcacagttgatcgcggcggagcaactgaaggccgcggcagccgcggccaccgcgccacccaagaaggaccaggccaagcccggagctcgcagcggcgcgcccg

SEQ ID NO: 247235 - DNA, 519 bp, Glycine max
  unsure (1)..(519): unsure at all n locations
ngggttaggggtctgtcgtcccatgatgatgtcctactgccgtaccggtccggaattcccgggtcgacccacgcgtccgactcaatatcaaattctttgtcccacaaaagatggggttcactcccacaagtactgcggcgatgctttctcataatagcacctctggttgtgctatggtgttggaagctactaaagtgggtgtggctgatgccaaagagattggagagagcattaagggcacagggccttcaggggaatccctacagcctcttgattggggacactaaggaaatgtacacagtgctcatgcaagctgccagatctcaacaatctacaagttcttttctctctaaagataaagatgcagcaccacatatcacaacctttaaccatcacattgtcaacanattcggcaagaattcatttttttgggaaggtaccaaaccaaaagtggtaatcactgaccctgagcaaatcaaagaagtcttcaacaagatccaagactttgagaaaccccag

SEQ ID NO: 247236 - DNA, 513 bp, Glycine max
  unsure (1)..(513): unsure at all n locations
gtgcgtgggtcgtccgctcgaagctgtccgcacgccgtaccggtccggaattcccgggtcgacccacgcgtccggaaggatgaccccaacgcgatttccaacttcaggatttcggaaccattgagggagaaagtgaaggagaagggtatcgaatcgctgtttcccattcaggccatgaccttcgacaccgttctcgatggttctgatttggttggccgtgctcgcactggtcagggtaaaactctggcatttgtgttgcccatattagagtctttaataaatggtccagcaaaatctgcgagaaagactggctacgggaggactccgagtgttctcgtgcttctacctactagggaattggcttgccaggtgcatgctgattttgaagtgtatggtggggcgatgggattgagttcatgttgtttatacggtggagctccatatcaaggtcaagaacttaagctgangaaaggtgttgatattggcaatggcacaccaggccgtgttgaagat

SEQ ID NO: 247237 - DNA, 523 bp, Glycine max
ggtagttagtgtgtgtgtcatgatgcatcgagctcgtcgtaccggcccggaattcccgggtcgacccacgcgtccgcgaaggttgttgtttgatttactcacatcatcaagaagggagagccaacttttagtgggcttgtgtcaagattcttgctcggaaaagcattcccaataccagtttatctgtcactgctgccaattattggtggtggtgcactagctgcagtgactaagctcaatttcaacatgattggcttcacgggggctatgatatcaaatttggaatttgtctattgcaatatattctcaaagaaggggatgaagggaatgtctattagtggaatgaacaactattcttgtttttccataatgttactgtcaattctcacaacttttgccattgttgttgaggaccccaaggtttgggctgcaggctggcaaacaaatgtgtctcaaattggtcccaattttgtatggtgggtagctgctcagagcgtcttctaccacctgtacaatcaagtcc

SEQ ID NO: 247238 - DNA, 532 bp, Glycine max
  unsure (1)..(532): unsure at all n locations
agttagtntagtggctagcgccctcggatnccatgcacnctcgtccgtaccggcccggaattcccgggtcgacccacgcgtccgcccacgcgtccgatagaagagccttccatatatagcctcccaaaaaaatgaagagtactacctctgtggctctctttctactttgtgccctaacttcatcatatcagccttcagccaccgctgatattgtattcgacaccgaaggcaatcctattcgaaacggcggcacatactatgtgttgccagttataagaggaaagggcggcggaatagaatttgccaaaaccgaaacagaaacatgccctctcactgttgtgcaatctccctttgaggtctcaaagggtctaccactgataatttcatccccatttaaaatccttgacatcaccgaaggacttattttgagcctcagtttcacttatgtacccccctgtgcctcaactccttctcgggggaccgttattctcaagggtctgccagaagaactccatgtcaaactcactggctt

SEQ ID NO: 247239 - DNA, 532 bp, Glycine max
  unsure (1)..(532): unsure at all n locations
ggtgttngagtaggtgtgangcttganncatgatactcgtacgcacgcacgtaccggtccggaattcccgggtcgacccacgcgtccggagacgatccttagcattatcacagctcccttaatttgattttctttttgcttgcaatgttttttgtataatcgttgttaggttaaaacttgacaagacgaaatgattatctaaattttcctaggcttatatattatgattgtaatgtaaggattacctgtggtttctttttaaatgttactgaccagactcaattgtcatgtgctatgcttttgtttctcagatactttaaggggcctgaacttctagttgatttgcaagactatgactactcattagacatgtggagccttggctgcatgtttgctggaatggtgtgaattataactataagttactggttatatatggcatactcttgacatttatgcagatggtctaaatttgagcgtacatgattaanaatgtaaaattctcgtcataatttgttcgttgtactctttn

SEQ ID NO: 247240 - DNA, 514 bp, Glycine max
gggagaggtgtcttggccgctgaaactcgtccgcactgccgtaccggtccggaattcccgggtggacccacgcgtccgggaaattccttcttgttgtctgaaggccaaggcttcaatccccgagtcagaggcaaaagtccattccactgttgtggctgggtggttctcagcttctcaaacttgctctgggaaatctgggaaagctgtttatttcaacaacccaatgtggccaggagaagcccattcaatcaaagtagaaaagatcttatacaaggaaaagtcggagtaccaggaggtcttggtttttgagtcatcaacttatgggaaagtgcttgtacttgatggaatagttcaattgactgagaaggatgaatgtgcttaccaggagatgatagctcatcttcccctctgttcaattcagtcccccaaaactgttttagttgttggtggtggaaatggtgggtgtctcagggaaatatcccggccaactttgttgaacatattgatatttggt

SEQ ID NO: 247241 - DNA, 360 bp, Glycine max
cgcactgccgtaccgtccggattcccggtcgacccacgcgtcgccaccttcgtggactctgagctgagcttgaactgagcttactaaggctggggctcgttacgatgtgaagttgttcgatgagacagctagtgggaagtctaatgggtaattgtcagagttcaggtttattgacccttctgctggcactgcttgataagaacggatgaatgggcatgtttttaatgggacgccgagtgttgttgcgtccgcatcgccttttacagttaagaaaatgctggaggctcagatcaatagcaatcagcagatgaacccttctgctgttcctcagggaatgctgacgcctgctgatgcacgggc

SEQ ID NO: 247242 - DNA, 515 bp, Glycine max
gaggggtctgtcgtccgatgctggctcgtccgtactgccgtaccggtccggaattcccgggtcgacccacgcgtccgcaggaaccaaaactaatttaataccgcattcacattattcctccgaagatgacagtggcgagtggagaagaagaaggcgccgttggaggagttcagatccaacacaggagcagaatggtgctcccagattttctccagagcgtgaatctcaagtacgtgaaattaggttaccactacttgatctccaacctcgtaaccttattccttgtccctcttatgctcgtcacgctcattcatgtttttcagaccaccgacatcgcccacctccgctacctctggctccacctccagtacaacctcctcaccatacttacctgctccgtcgtcctcgtcttcagtctcactctctacgccgtcactcgcccacgggccgtctaccttcttgacttcggctggttccgacccgactaccaccttaaggccccctttcgtagcttg

SEQ ID NO: 247243 - DNA, 512 bp, Glycine max
gagaggtcgttttatcgtcgtatgtcatggtatgccgtaccggtccggaattcccgggtcgacccacgcgtccgcacacgcgtacgctcctttactcttctatgtctaatgggtgccctgagatcacattgagcagtggtgaaggctgtggccgttcttggcagcagtgaaggtgtcactggaactattcactttgttcaggatggaagtggtccaaccaccgtaactggatctcttgctggtcttaagcctggtctccatggttttcatgttcatgccttgggggacactactaatggttgtctttcaactggatcacattacaatcctaataacaaggagcatggtgcccctgaagatgagaatcgtcatgctggtgatcttgagaatgttaatgtccgtgatgatggtactgacagtttcactattactgacagccagaatcctctcactgcaccaatacacatgatacgaagggccgtggatgtcatgctgaatctggtaatcttggg

SEQ ID NO: 247244 - DNA, 527 bp, Glycine max
  unsure (1)..(527): unsure at all n locations
aggaggggagtgggtctatcatgagcagtgacgctgtcgtaccggtccggaattcccgggtcgacccacgcgtccgcacattctcagactctgcacacaccttagaagaacagagcagaaccaccagtgctttaggaagacggtttcagcaatggcgttcttaaataaaattggaaatctggtcaagaattctgctgtcaagcacatcagtcaagatttttcagtgtctaccccatcacttttccaagcaattagatccatgtcatctgcaaagctttttgtctgaggtattgcttacagcactgatgatatgagtttgcgagagtctttagctcgctatggagaagtaatagatgtcaaggtcattatggatcgtgaaactggcacgtcaagacgttttggcttcataactatngcaacatgtgatgatgcatcttctgccattcagggcatggatggtcaggatcttcatggtcgcaggatacgggtgaattatgctacagaaaggtcacgtncagggattggtg

SEQ ID NO: 247245 - DNA, 524 bp, Glycine max
  unsure (1)..(524): unsure at all n locations
ggtagctagtggtctgatcatgatgcatgnagctcgtcgtaccggcccggaattcccgggtcgacccacgcgtccgcttttccttctaaatttgattccttagttcagcattctattattatatatggcttctggaccttggtcagaagacaaatacctagagggagtagctggtggtgccggagagaaacccattccacttggtgagaacgttctgcagaagcatgctgcattctttgacttgtataaagatggtgtcatctacccatgcgagacttttaaagggttgcgtgatatctggactggggttttgctgtccgttagaggtgctattatcatcaatgtgtctcttagtcagagtactccgtccggaaagtttgcatctatactttcttcaatggaaatttaaaatatccaacgcggcatacacggcagtgacactggagtctacgatactgaatgaagggttgtaaccttcaaaatttgaagagatctttaacaagcatgctcatacccctgcaaat

SEQ ID NO: 247246 - DNA, 420 bp, Glycine max
caagcattcgatactatgttatgcccatcagttgcaaggatccgtgcgttctacccatgaggtctgcggctatactaccgatcttcgctcatagtgctactccagatgcgtacccataattcacactttacatatgcgagatctcacccactgtggataatgagttgctgctctctgtgcttcaattatgtggaactattatagacctggaactggctgaggatttatcaactggaactgctacaagttttgcgttttatgagttcgagtctgcaaaaggggttctccgggccttgcgtctccttactaaactgaatattgatgggcaagaactgaaagtcaacgtgaatcaagctatgaaagacattctggagctgtatgttaagacaaaaactgagaacttgaagaacaaagaaactc

SEQ ID NO: 247247 - DNA, 531 bp, Glycine max
  unsure (1)..(531): unsure at all n locations
agtcgttaagtaggtgtgcgatcgaacaatgaaactcgtacgcactgccgtaccggtccggaattcccgggtcgacccacgcgtccgcccacgcgtccggagagatggaagcaactggaaaattcaaaatgcaaaggaagaaactgttccagttggtgggcaaggcaaattcaaatcttgctgatgtgattctaaagcttggactatttgagagatcagatattgcttggaaagatgccaaatatgctcagatatgggaatatctcatggatgaatttgaattaactcagagatttgctagtcttgatttcaagttgaaatttgtggagcataacatccgttttctacaagaaattcttcaaaataggaaatctgatttcctagagtggctcattattgcattgattggtgctgaaattcttctgtctctctatgacattgntcatcggtctgccatgaaattttagcagcattntttctggtggcatgtaaggttagcatgccattgaagagctgtagcatactagtagt

SEQ ID NO: 247248 - DNA, 513 bp, Glycine max
  unsure (1)..(513): unsure at all n locations
ngaggggtgtgtcggaccatgatgctcgtcggcatgcacgtaccggtccggaattcccgggtcgacccacgcgtccgcacgacactgagcatcagcaatggcaagcgcaagtgttggtaaagaactgacgctgtagtcgtattggaggagctgttgctcccaccgagtccgaatcgctctcaaccatcaagggcttacatacgaatacaagcccgtcaatctgctcaagggagaacaatctagccctgagttactccagctcaatcctgttggttgtgtccccggtctagtggatgaccacgatgctctctatgactctttcaccattattatgtattcggaagatacagtatcctgacaatcctttgctccctcatgatatttacaagagagcaatcaatttccaggctgctagtgttgcttccttaacaatccaacctcttcagtacttgggtctactgaactacattggggagaaagtcgcccttattaaaaagtttccttgggccaaaa

SEQ ID NO: 247249 - DNA, 526 bp, Glycine max
aggtaggagtaggtgtcgtcatgatgcatggagctcgtcgtaccggcccggaattcccgggtcgacccacgcgtccggagaagaggagggtggaggagttaggtgggttcattgatgatggatatctcaatggtgatctttgagtaactcgagcccttggggattgggacttgaaatttccacttggtgctgcatcccctcttattgctgagccagatgttcggctggttacattgactgagggtgatgagttcttgatcattgggtgtgatgggatttgggatgtaatgtctagccaagttgcagttagtcttgttcgccgaggattaagaaagcatgatgacccacagcaatgtgcccgagagctagtcaaggaagcattgcgcctaaatacatcagataatctcactggcattgttgtatgcttgtcgcccattggaagcataggcgaatcatgttcaccccaaaagagaagattccaaacctggaatttgtcctgaagaaggccggtattcaatcgaaaacc

SEQ ID NO: 247250 - DNA, 525 bp, Glycine max
  unsure (1)..(525): unsure at all n locations
ggtnagagtgtgtgtgtctagtagatagaagctctccgtaccgccccggaattcccgggtcgacccacgcgtccgcccacgcgtccgcccacgcgttcgcccacgcgttcgtccacgcgtccgaagaaaacctaagcttagaattagaaacaaagaaaagaagaaaggaaagaattgatcgttgaaaatgcagggaggaaagaaagcgggagagtccattaaggaaacagctacaaacattggtgcttctgccaaggctggcatggagaagaccaaggccactgtccaagagaaggcagaaagaatgacagcacgtgatccggtgcaaaaggagttggcaacccaaaagaaagaggcaaagatgaaccaggcggagctggacaagcaggcggcgcgtcagcataacacggcggccaaacagtccgncaccacggctgggcacatgggacatggccaccacaccaccggaaccgggactggaaccgncacgtatttcaacaccggggatattgtcagnccatgggn

SEQ ID NO: 247251 - DNA, 537 bp, Glycine max
  unsure (1)..(537): unsure at all n locations
agtnagtttnagtagggttgtgccgattgaangcatgnaggccngtccgactgacgtaccggtccggaattgccgggtcgacccacgcgtncgctaacttgtttatgagagctataagtcaccaccttctagtttcactactcgagtggagaatctctacctcacgatcccttttttctcttagaaccatcatgtcacaatctgatcattcctctgcttttaccacacccagattagttctcaagaaggttttggccaaatctcaacatgaaggggatggagctgttgttagaagaggcattggaaggagcgagttgaagaacttggatcccttcctaatgttggatcacttctcagtatctnccncagcaggatttccggatcatccacaccgaggttttgaaaccgtcacctacatgctagagggaagcatcactcaccaagattttgctggcacaagggtaccataggaaaggttgatgttcagtggatgaccgcaagcaggggaatcattcactctgaaatgccngcagaagc

SEQ ID NO: 247252 - DNA, 391 bp, Glycine max
gtaccagtcccggattgaccgatggcatccacgcctaacgtccacgcgtcccctgacgcgtagggttttcatgttctgtccctgtgatgaatggaacaggatttattgagattgaggaccaaagtttgagtagcagctttattcctttcattgttgtggacgaggatgtttgctcagaaatctgtacacttgagcctcttctacaattaagtgaaactgatccagatattgaaggggcatgaaaaatcaaagccttaaattaagccatggatcttattcatgacacgggttggcttcttcacagaagccagttgaacacaaggatggtttataatgtggatctatttccattgaaacagttcaagtggctcatttagtctcccatggatca

SEQ ID NO: 247253 - DNA, 525 bp, Glycine max
  unsure (1)..(525): unsure at all n locations
gtttaggggggtntcccatcgaatacgtaactctcgcgcacgccgtaccggtccggaattcccgggtcgacccacgcgtccggaaagaaaagaccatcaaagtttcacttcagccttatccggtttagggtttcggtttgggacccaacctttgacgtatcgaaaccttaagtttcggatcaggtctgagcaatctggttggtagaacctttggtcttagagagtcaagttttatgtctgaattagacgatcaaattcctactgccttcgatccttttgctgatgcaaatgctgatgactcgggtgctgggtcaaaggagtatgtgcatattcgcgtacagcagcgaaatggaaggaaaagcctgacaaccgttcagggattgaaaaaagaattcagctataacaagatacttaaagatgttaagaaagagttctgttgcaatggaacagttgttcaggacccagaactaggacaggttattcaacttcaaggtgatcagaggaaagatgtttctacctttctgg

SEQ ID NO: 247254 - DNA, 531 bp, Glycine max
tggttagggtgtgtctttcaactgataccgtccgtatgccgtaccggtccggaattcctcggtcgacccacgcgtccgaaaaaaaaaaaaaaaaaaaaaaaaaaaaaaaaaaaaaaaaaaaaaaaaaaaaaaaaaaaagaaaaaaaaaaaaaaaaaaaaaaaaaaaaaaaaaaaaaaaaaataaaaaaaaaaaaaaaaaaaaataaaaaaaaaaaaagtgcacccttttttaggttttcatttttaattacccttttttccaaaattttattttttttttagtttcccttaattcaatttaattgtccctttttttacacattttaatttggaaaaccttttgctttcccaattttaatcctttttgagacaatttcccttttttcaaatttgtttatttttcaaaaagcctcaaacagtttccttttttaaaaaatttttcatttttaaatggccattttgcactcctctttttactcttccttttatacctttgtttttttggttttttaccccttaattttccacttt

SEQ ID NO: 247255 - DNA, 380 bp, Glycine max
  unsure (1)..(380): unsure at all n locations
ccgggtcgacccacgcgtncgctctaaaaaaaacctaccaatggctcccgcaaggcagagaagaagcccgcggagaagaagccggcagagaaggccccagcggagaagaagccgaaggcggagaagaagatatcgaaggaaggaggaagcgagaagaagaagaagagaacaaagaagagcgttgagacctacaagatctacatcttcaaggtgttgaagcaagtgcaccccgacatcgggatctccagcaaggctatggggatcatgaacagtttcataaacgacatcttcgagaagctcgcccaggagtcatcgcgtctcgctaggtacaacaagaagcccaccattacttccagggagatccaaacggcggtgcgttt

SEQ ID NO: 247256 - DNA, 309 bp, Glycine max
ttgggtggacatttgacagtgcagaaactaacaagttaataaatgcattagggaactgcttgttgaccttcaggcagtataagcagagctgggaagggctccaacggcgagggatgacgcaggatcttagttgggacaatgctgctcagcagtatgaggaggttcttgttgctgctaagtaccaatggtaaattcttggcttctactctacctaagcagactgatcaatatggagtgctctcatgctgagtgatatcaaggtctgtgcagggaaaggacttggtcaagttgttaaaaccttcatgttgc

SEQ ID NO: 247257 - DNA, 556 bp, Glycine max
  unsure (1)..(556): unsure at all n locations
gagatgggaaggaggtatgggaatggagggagnaggtgggttttatatgatgcctgaggactgtcgtaccggtccggaattcccgggtcgacccacgcgtccggcagtttcctcgctctcttttctgcaattgtcttttttgctccttctctgcggttatcgttttgagcttcaatggcggacgctgaaaccttcgctttccaggctgagatcaaccagcttctcagcctcatcatcaacaccttctacagcaacaaggagattttcttgcgtgaactcatcagcaacgcttctgatgctttggataagattcgatttgagagtttaaccgacaagagcaagctcgatgctcagccagagctcttcattcgtcttgtgcccgacaaggccaacaagactctttccgttattgacagcggcattggaatgaccaaagcagatttggtgaacaacttgggtaccattgcgaggtccgggaccaatgagttcatggaggcatttgaggctggtgctgatgtaaagctggatgggcagttcggtgtggagttctactctt

SEQ ID NO: 247258 - DNA, 413 bp, Glycine max
ccggaattcccgggtcgacccacgcgtccgtgcgactgtagcccaacggaaagaagataggagagctagactgcaggctcagtttgctcaaatgcgacctgttggaatgccaccatctgtcggtcctcgtgtgccaatgtatcccccaggtggtccaggtattggtcaacaaatattttatgcccaaggccctgctgctatcattccttcccagcctggatttgggtatcaacaacaacttgctcctggtatgaggccaggtgcagctcccgtgccaaatttctttgtgccaatggttcagcagggacaacagggacagcgtcctggtggaaggcgtacaggtgcagtccagcagtcccagcagcccgttccaatgatgccacagcaaatgctacctagggggcgtgtttatc

SEQ ID NO: 247259 - DNA, 573 bp, Glycine max
  unsure (1)..(573): unsure at all n locations
gatatgtgtatataatggnaatagagnagattagaggganagaggtgaggtctgatttatgtatccctanagcacgtccgtaccggtccggaattcccgggtcgacccacgcgtccgaaaatattttgttgtcagaaactgcctgcctaatgtcaagtcagatatgcttttgtcagcatggaatcctccatccgaatggggaaaatagagatttatccccttaagatccatttaacagagacgatgtacagaatgatgtgggaatatttcttcccagaagaagaacaagattcccaacgtcgtcaggaggtttggaaggtttcaaccactgctggtgcaaggcgtgtaaagaaaggttcatcagttcttgaagcttctgcttcaaacagtcacacaacaaaagagtctgaggcttcatccaaatctggcatatctgcaatgctatttcccacatcaagtcagccttcaacccatgttgactcagctcaagcatccaaaacacaaaatgtcaaagcaaaccccttgcaatggtgcaaccccccgatttgagaaagacttcatcttttgacagaa

SEQ ID NO: 247260 - DNA, 548 bp, Glycine max
  unsure (1)..(548): unsure at all n locations
ggagaggagaggaagtgagggagaagagggggttcacctgaagtagtatctcgtcgccnacgcgtaccggtccggaattcccgggtcgacccacgcgtccgcacatcccttcgtcaacacctctccgactcttctcgttctctccatggcttcagtcgctgcttcaaggtggcgaggagcaaacgcgttacgacaccgatcacttggagctcttcaggcacgagagttacttcgcttacttgtttggagtcatagagcctggattctatgcagctattgacgttgcaactgggaattctatcctatttgctcctaggttaccttctgagtatgctgtttggttgggggagattaagccactctcctactgtaaggaacactacatggttaccacgtgttgcttctcagatgaaattgaaagtgtattgcaacaacattaccaagggtccgggaaacccttggctgtgcttttgcatgggcctaataccgatagcgattataactctaacccgcaccagttcaagggattggataagtttgacaaggat

SEQ ID NO: 247261 - DNA, 515 bp, Glycine max
  unsure (1)..(515): unsure at all n locations
ggagggtgtgtcgtccactgtagtagatcgtacgcacgccgtaccggtccggaattcccgggtcgacccacgcgtccgctcttgctcttcgcaacaatggttgccgccaagaaaaccaagaagacccatgagagcatgaacaacaggcttgctcttgtcatgaagagcggcaaatacacccttggttataagaccgttctcaaatctcttaggagctccaaagggaaattgattatcattgctaacaactgcccccctttgagaaagtcagagattgaatactatgccatgttggcaaaggttggagttcatcattacaatgggaacaatgtggatttgggcactgcctgcggcaaatattacagagtgtgctgccttagcattattgatcctggtgattcggatatcattaagacactgnctggtgaacagtaaagtaatcgtgaagttacttgcttggtattttctgggtttaagttgattcggacttttgaaagattatcttgttgagttgt

SEQ ID NO: 247262 - DNA, 515 bp, Glycine max
  unsure (1)..(515): unsure at all n locations
agaggtgtcttgntatgacttaggctcgtcggtactgccgtaccggtccggaattcccgggtcgacccacgcgtccggaaattcagaacatccttcaagaccctgttatgagacaggtattgattgatttccaggagaatcccaaggctgcacaggaacacacgaagaatccaatggtgatgaataagatccaaaagctggtcagtgctggaattgtccagatgaagtaagtttgtggcaggtggcagttcgtgtgaaaaagcaatcaagcaatcgataatgatgtctcagtgtgactattttgacatttaaatagatgtgactgggaaaaaagttgggaaattttgagttgtttttacctttgttatgttttagtgaattcatataatttacgaatatcaggtgcagtccatttatatttcaatggcttattgtggtgacatgacttccttttaatttaaaatcggtagggtgcgaatgtgaaagtgcggttaagtttttaggttaaaaaaaca

SEQ ID NO: 247263 - DNA, 556 bp, Glycine max
  unsure (1)..(556): unsure at all n locations
gagatgggaatgattnatattgatgtttgtgagagagggaggttattttgaactatgagactgtcgtaccggcccggaattcccgggtcgacccacgcgtccgcccacgcgtccgctggtgaatgcgtagaaaaggaaaataaagaaattagcgtgaaaaatgttgggggtgttcagcagctccatagtgtcgccgccggaggagctcgttgccgccggcagccgtacaccgtcgccgaagatgacggcggctgcgctgcggaagtggttcgaggagaagaacccctgcgcagtgtcagtggatgtcggagagcatgtccagctcgcttatacccaccagaacgagtcgccgtttcagcccagatcctttgctgtgaaggatgacgtattctgcttgtttgacggagcccttgacaatttgggcaacttgagacaacaatatggattggccaagtcaaccaatgaagtattgttggtcattgaagctttcaaagcattgcttgacagagcaccctaccctgctaatcacgttggtgggcattttaggggaagcttt

SEQ ID NO: 247264 - DNA, 550 bp, Glycine max
  unsure (1)..(550): unsure at all n locations
ggaaggaaagaggnatgtgagtattggagaaaggggttgtgatgaagtatgtaattgtcgtaccggcccggaattcccgggtcgacccacgcgtccgcccacgcgtccgatggagaatgcgtagaaaaggaaaataaagaaattagcgtgaaaaatgttgggggtgttcagcagctccatagtgtcgccgccggaggagctcgttgccgccggcagccgtacaccgtctcccaagatgactgcggcggcgctgccgaagtggatcgaggagaagaacccctacgcagagtcagtggaggtcgcagagcatgttcagctcgcttatacccaccagaacgagtcgccgtttcaacccagatcctttgctgcgaaagatgaggtattctgcttgtttgagggagcccttgacaatttgggcaacttgagacaacaatatggattggccaagtcaaccaatgaaatattggtggtcattgaggcttacaaagccattgctttacagaacaccctaaccgggtaatcaccgttgttggccattctaatgggagct

SEQ ID NO: 247265 - DNA, 279 bp, Glycine max
taccgcccggaattcccggtcgaccagcgtccgaacaacaacggcaaaccacgacaaaaacggagagactgattccgagaatcgggacggggcactatcactgttatggacccaaggtcaacttcggccggacgatccaggcggtcgacattatcatatgcgagaattcaactgttgtcggcacatctatgaaaagatcacgcatgtgtccctggacgagcttaaccacaactagaatctccgaatacaacaaaatggccaaacctagtccgattctga

SEQ ID NO: 247266 - DNA, 556 bp, Glycine max
  unsure (1)..(556): unsure at all n locations
ggaagtagaaggaggnagagagagataaaggagagagtggtctcactttgaactatgaactctcggcatngcgtaccggtccggaattcccgggtcgacccacgcgtccggggcgggggaatatggatggggaactacacataatgttatttccgttcccaggtcaggggcacttgataccaatgagtgatatggcgagagcatttaatggaagaggggtgaggacaaccatagtgaccactccactcaacgtagccactattcgtggaacaataggaaaagagacagagacagatatagaaatcctgacggtgaaattccctagtgcagaggctggtttacctgagggatgcgaaaatacagagtcaatcccctcccctgacttggtactgactttcttaaaggcaatcaggatgttggaagcccccttggaacacctactccttcaacaccgtcctcattgccttatagccagtgctttcttcccttgggcatcttaatccggcattaaactcaaaatgccaaggcttgtctttaatggcaccggtgtctttcc

SEQ ID NO: 247267 - DNA, 512 bp, Glycine max
  unsure (1)..(512): unsure at all n locations
gaggggncttccgtcaatcgactgctagctcgtacgcacgccgtaccggtccggaattcccgggtcgacccacgcgtccggttagaacgggcacatatgggcatctttactgagttaggagttctgtatgctagagacggccctgagaagcttatggagcatatcaaactattctcaacccgcctcaatattcctaaactcataagagcttgtgatgaacaacagcattggaaagaattgacctatttgtatatacaatatggtgagtttgataatgctgcaactaccatcatgaaccattcacctgaagcatgggatcacatgcaattcaaagatgttgttgttaaagttgccaatgtggagttgtactacaaggctgttcacttctacttggaagagcatccagatcttatcaatgatgttctgaacgtccttgcacttcgtgtggaccatgcacgtgttgntgacatcatgcgggaggctggtcacctncgtcttgtgaaaccgtatan

SEQ ID NO: 247268 - DNA, 555 bp, Glycine max
  unsure (1)..(555): unsure at all n locations
ngaatgggaagtaggnagaaagatgtttggaagggncgggtccactatgagctgtgatctctcgtaccggcccggaattcccgggtcgacccacgcgtccggaactgcaacaatggtgccgcaacccattttgcatctaacccttttgtcattaataatgtctctgagcactctttccttggtcgatgccgccgatcccacatttggcttcacccctcttggattatctagtagctcaaacttgcaaatccaaaagccttacgacgttgcagtcaacgagcgctacagcttttcaaatggagtgcacagattttgggtatactccacggacaagcctcatatgcaaggcagcaatacgaagccacgaactgagattcgtatcgctggatacgattatacatncggtgtgtggcaatttcaagggtttttttacgtgcctagtggcacaagcggggtgtgcattcagcaagtgtttggtgggagtaacttctggcacaaccttgcatactagggtctatggggggttctctcactcattaccaatcacctactctg

SEQ ID NO: 247269 - DNA, 328 bp, Glycine max
  unsure (1)..(328): unsure at all n locations
cggcccggaattcccgggtcgacccacgcgtccgcccacgcgtccgctggngaatgcgtagaaaaggaaaataaagaaattagcgtgaaaaatgttgggggtgttcagcagctccatagtgtcgccgccggaggagctcgttgccgccggcagccgtacaccgtcgccgaagatgacggcggcggcgctgcggaagtggttcgaggagaagaaccccttcgcagtgtcggtggaggtcggagagcatgtccagctcgcttatacccaccaaaacgagtcggcggttcagcccagatcctttgctgggaaggatgaagtattctgcttg

SEQ ID NO: 247270 - DNA, 564 bp, Glycine max
  unsure (1)..(564): unsure at all n locations
gagagggggaaaggnatgtgaaggttgggagaagggggatgtgtgttgaacttgtaactctaggcacgccgtaccggtccggaattcccgggtcgacccacgcgtccgcgactttttacggctggtatagctgaattctatgagggatattacgcaaatgagggtgtaaatatcattaaaggaactgttgctgttggattcacttctaattctgatggagaggtaaaagaagtcaaactaaaggatggcagggtcctggaagctgatattgttgttgttggtgttgggaagaaaggcctcaacagtcttagtcaaaaggcaagttgaaagaggaaaaggtggaaatcagaccgatgctttcttcaaaacctatctcttcgatgtatatgcctggtgtgatgttgctacttttccctttgaaattatacggtgaatggagaagagttgaccatgttgatcaatcttggcaaatcggcttaacaggctttgaaaggccattcaggcaacttatggaagggaaaaaccggtttaggagtttgattacctttcatacttcaaattccc

SEQ ID NO: 247271 - DNA, 560 bp, Glycine max
  unsure (1)..(560): unsure at all n locations
gagattagaaggaggnagagagaagttatgtagaanagtggtcgtgtcatcgaacattganactgtccgcctgccgtaccggtccggaattcccgggtcgacccacgcgtccgctcagctaaatcttcttatccaccatctcttcgcccataacctaattagtgctcaatcgcaaaacatcaatttctctatgatcatgatgatgatgatgggttcaaacacaaaaccccttgtgcacctttctcttctaattttggttctcttttcttcttcaaccgaatccctcagattcgaactccaatctgggcacaccaaatgcatctacgaggacatcaagagcaattccatgaccgtgggcaagtaccaaattgttaactccaacgagggtcagcctcttcccgattcccaaagagtcacccgtcagggtgacttcgtcttaatggaacaactattactaccgggatcgcgttcaaaccgggcaatttgcctttgccgcaattggaggcctgagaatacatgactngcttttgggctgtggatcacaaccttggggaaacgtt

SEQ ID NO: 247272 - DNA, 556 bp, Glycine max
  unsure (1)..(556): unsure at all n locations
gagagtgagaatgaggatagtgaattaagtnagagagtnaaggtgagttgaagtagtatctctcgcgcactgcgtaccggtccggaattcccgggtcgacccacgcgtccgtggaaaactacagctaattgccgagaaagagacaaaaggagctgtttattgcttgaatgcatttaatggtaaattgcttgctgctattaatcaaaaaattcagctgtataagtgggtgctccgggatgatggtacccatgaattgcagtctgaatgtggacatcatgggcacatcctagcactttatgtgcaaactagaggagattttattgtagttggtgatctgatgaagtcgatttccttgttaatctacaaggtaaattttaaactgttgtgacactagtttctgtctggttttggtaaatttcaactgttgtgctgcttatcgttttggatgaataactgattttttgtatatataatgagtacaccatgttcttttggaatgataagttgttcttaatggtagcatgaaaaagtcctttttaagaaagaacctctgact

SEQ ID NO: 247273 - DNA, 555 bp, Glycine max
  unsure (1)..(555): unsure at all n locations
gagagtggaaggtggnatggtaatggaggnagagagtgggttcaatttgagcatgactctgtcgtaccggcccggaattcccgggtcgacccacgcgtccgcatattcagtggacatgtggttgcattattgcatatttgctataagcacatatggggagccaaaggctgttcgtaggctttttgaacgaggattagcttatgttggaacagattatctttcttttcccctctgggataaatacattgaatatgagtacatgcagcaggactgggcctgccttgctgtgatctacaccagaatattagagaatccaaatcaacaattagatcggtatttcagcagcttcaaagagttagctggaaatcgtcctttatcagagttacgaactgctgatgaagctgctgcagtggcaggagttgcttcaaaggctactggccaagctactggaggaggagttcattccgatggtgcagagcggtctcctaaatctgaaagtgctgggtttacagaaaccaaaaaagttggagaagtttatggccatttgagaagagt

SEQ ID NO: 247274 - DNA, 556 bp, Glycine max
  unsure (1)..(556): unsure at all n locations
gagatgggaaggaggnagagagaaggtatgaagtaaagtgtgtacgactatgatgcatcgagcacgtcgtaccggcccggaattcccgggtcgacccacgcgtccgtacattcgatgcaggtgaagcttttgccatgatgatggcatcctatgttgctcttgcagagtccagcggagctttcattgctgtctatcggtatgcaagtgcatcaccattaccaccatctatgcttagtcgcggcatcggttggcagggagttggcattctattatcaggattgcttggaactggcaatggatcctctgtatctgtagaaaatgctggtcttttggctttaactcgtgttgacagtcgaagagtggtgcaaatatctgccggagttatgatgctcttttcaattctggggaaatttggagccgtttttgcatccatttcacctgcaaatgtggccggactgtactgcttgatcttcgcttatggtggagcgggaagtctaagttttcttgcaatctgcaaccttgaccagtttagaacaatatttgtattagggtactc

SEQ ID NO: 247275 - DNA, 558 bp, Glycine max
  unsure (1)..(558): unsure at all n locations
gagagagggaggaggncaggagatggaagggagaggagtnagtcgactatgatgcatgaggctgtcgtaccggcccggaattcccgggtcgacccacgcgtccgattccaatatattccattctctctgtgtatttccctacctctcccttcaagatgcagagcttcgtgaagaccctcaccggcaagaccatcacccttgaggtggaaagctctgacaccatcgacaacgtcaaggccaagatccaggacaaggaaggaatccccccggaccagcaacgtctcattttcgccggaaagcaacttgaggacggccgtacccttgctgactacaacattcagaaggagagtactcttcacctcgtcctccgtctccgtggtggcatgcaaaacttcgntaagacactcaccggcaagaccataacccctaaaggtgaaaggctcgacaccatcgattacggtcaaggccaaaattcaggacaaggagggtatccccccggacaagcaacggttaatcttttccggaaagcagttcgaggacgggcgaacctttgccgaa

SEQ ID NO: 247276 - DNA, 567 bp, Glycine max
  unsure (1)..(567): unsure at all n locations
gagagtgggcatggatggnatggagaatgagaatgtaggataggtgggngtgccactgagcattgcaactgtccgcacgccgtaccggtccggaattcccgggtcgacccacgcgtccgaccacgcgtccgcccacgcgtgcgtctacacatccctagctctgtcgttccgtcgttggcgatggcgtttcgggtgcgaagccctgacctacgctctctctatcttctctctctcttgtccatcgcttccgccaatgtcttcttcgaagagcgtctcgatgacgggtgggaaaatcgatgggttaaatcagattggaaaaaagatgagaacgtggctggggagtggaaccacacctctggtcaatggaatggaaacgctaatgacaaaggtattcaaaccagtgaggattacagattctatgctatttcagctgaataccctgaattcagcaacaagggttaaaacactaggctttcaattttgtggtaagcgcgaacagaatcttgactggggggaggggctaccataaagtgcccaggggggatgttgaccataaaaaatttggcg

SEQ ID NO: 247277 - DNA, 569 bp, Glycine max
  unsure (1)..(569): unsure at all n locations
gagatggtgggaggatggnatggagaagaggaggnagntgagtntggtgtgatgatcgaactatttanctcgtcggcactgccgtaccggtccggaattcccgggtggacccacgcgtccgggaaaataaagaaattagcgtgaaaaatgttgggtgtgttcagcagctccatagtgtggccgccggaggagctcgttgccgccggcagccgtacaccgtcgccgaagatgacggcggcggcgctgcggaagtggttcgaggagaagaacccctccgcagtgtcggtggaggtcggagagcatgtccagctcgcttatacccaccagaacgagtcgccgtttcagcccagatcctttgctgtgaaggatgaggtattctgcttgtttgagggagcccttgacaatttgggcaacttgagacaacaatatggattggccaagtcaaccaatgaagtattgttggtcattgaggcttacaaagcattgcgtgacagagcaccctaccctgctaatcacgttggttggccatctcaatgggaacttggctttctaagttttggccaatctat

SEQ ID NO: 247278 - DNA, 511 bp, Glycine max
  unsure (1)..(511): unsure at all n locations
ggggggtgtcgtccgacgtacgcacctcgtacgcacgccgtaccggtccggaattcccgggtcgacccacgcgtccgattttcttctatctcatcctttcttttagttttatttttatttttttatcttgggtaaaaaaaatcatgggtgttttcacttctgaaagcgaacacgtttcccccgtctctgctgcaaaattatacaaagctattgtcctagatgccagcaatgtcttcccaaaagcattgccaaatttcattaagagcgtagaaaccattgaaggagatggagggccaggaaccattaagaagcttactcttgctgaaggtttaggttatgtgaagcaccacgtagatgcaattgacacagaaaactatgtgtacaactatagtgtgattgaaggcagtgcattgtcngagccattggagaagatatgttatgagtacaaactggtggcaaccccagatgggaggatccatgtgaagtccacaagccaatactattccaaagg

SEQ ID NO: 247279 - DNA, 561 bp, Glycine max
  unsure (1)..(561): unsure at all n locations
gagatggggagtaggnatggtgatagtaagtnatgggcgtggtccgactatgatgcatcganacgtcgtaccggcccggaattcccgggtcgacccacgcgtccgcttgccatagagttgagtttgccacatcctcagggagatcaatctggtgcttttagtcgagttttgctgcctgcagatgaaggtgttgaaagttctatttggctgctagcaaaggcttatgtagttgtgaatgactcgtgctatcatcaacttgtcagccattggttaaacactcatgcagttgttgagccattcatcatagcaacaaacaggcatctcagtgttgttcaccctatttataaactccttcaccctcactatcgtgacaccatgaacataaatggccttgctcggttatcactggtcaacgacggtggcgttatagaacaaacatttttgtgggggaaggtgtttctggggaaatgtccgctggaagttaacaaggatggggttttaacggatcaggcatggccggctggacttttaaaagaaggaatggcaatttagggtcccttt

SEQ ID NO: 247280 - DNA, 552 bp, Glycine max
  unsure (1)..(552): unsure at all n locations
gtgtgggaagtaggnaggagatggaaggagggagggtctgaaatgatcatcgagccgtcgtaccggcccggaattcccgggtcgacccacgcgtccgctagaaatgatttcccgtaatacaaatcaacaagttgcatgaccgatgaagaacaacagatataagcaagcaaagtcaatgacgattgaaatgataatcccgagagaatggccaaaaaatttgaggagccctaacctccatgaaattcaaatgagcctcgagaaggtgcatgtagaccaaccaatcaccattcccagtagaagaaggcattggcatgacatagccagaatctccaccccaaggaaaatggtacgatgcaaacacgggcttnccccacccaaaatcaacctttgactccggaaacctttgaccagaagaaaccacaaaacttggtccttcttccttgccatgcccacaataaatcctagacaaaccaggaagctggtcgatgtaccttaaacccattcaacaagtccaaaaaatggctctctggcaaaccaatctccaaaaactat

SEQ ID NO: 247281 - DNA, 557 bp, Glycine max
  unsure (1)..(557): unsure at all n locations
gagatgggaaggaggnagtgtaaggtatgaagaaaagaggtgtgagatcgattatgaactctcgcgcatgccgtaccggtccggaattcccgggtcgacccacgcgtccgctctcctgcttcttctggaactattgacaggaaaccttcgcatggcagatgctcaaagtggtgtgtgttatggcatgctgggcaacaatctaccgtcagcaaacgatgttataggtctttatagatcaaataacataaagagaatgagactctatgatcctaatcaagctgctctagaagcacttagaaattctggcattgaactcattcttggggtgccaaactctgaccttcaaggccttgccaccaatcctgacacttctcgtcaatgggtgcaaaaaaacgtgttgaacttttggcctagtgtcaaaatcaagtacgtggcagttggaaatgaaatgagtcccgttggaagctcttcttcggtagcccaatatggtctacctggcattccaaatggtttccaagccattaaaagttaaaggccttattgaccaatccaaggtt

SEQ ID NO: 247282 - DNA, 576 bp, Glycine max
  unsure (1)..(576): unsure at all n locations
gagagagagaaggagannagaaagaagagaaagtagtaaagaaggtgtgatatcgaaactaagaaactcgtcggcacgcagtaccggtccggaattcccgggtcgacccacgcgtccgaaaaaaaaaaaaaaaaaaaaaaaaaaaaaaaaaaaaaaaaaaaaaaaaaaaggaaaaaaggaaaaaaaaaaaaaaaaaaaaaaaaaaaacaaaaaaaaaaaaaaaaaaaaaaaaaaaaaaaaaaaaacaaaaaaaaaaaaaggaagcgaaaaaaaaaaaccacataccacaagccagatacagcaccaattaacacatgaaaaaggacatagcatgaaaagaacggagataatccctaaaaaaaacgaacccagaaaaaaccaagcaaccccaaacaactagcagtagagaaaaaactagcataggcccataagccaatactcaaaaaggcccagaaaagaatgccaaccccaaaagaaaccacagttgaacaggaaaaggagccgaccacaataagaggaaaataaagaccgagaaaaaagaaggatcaagacaaagaaaaaccggcaaaatgggag

SEQ ID NO: 247283 - DNA, 516 bp, Glycine max
  unsure (1)..(516): unsure at all n locations
acgagcgtgtgtcgtccgtttgacgaanctcgtaggactgccgtaccggtccggaattcccgggtcgacccacgcgtccggtatttcgatattcagatccatggcaaattagcgggtcgcatagtcatgggccggtatgggaacacagtaccgaaaactgcacaaaactttcgagcgctttgtacaggagagaaaggagtgggaagaagtgggaagtctcttcattataaagggagcacattccataggattataccgagctttatggtccaagggggtgatttcacccgtggtgatggaagaggtggagaatcaatctatggtgataagtttgctgatgaaaactttaagctgaagcataccggaccgggatacttatccatggcaaattctggggaagacaccaatgggtcccagttcttcattacaacagttaaaaccagcttgcttggatggacgccatgtcgtatttggcaaggtacttttccggattggatggtttgtacaagattgaac

SEQ ID NO: 247284 - DNA, 515 bp, Glycine max
gggagtggtccggtcgtccatcgatcgaagctgtacgcctgcagtaccggtccggaattcccgggtcgacccacgcgtccgcagaagcatggtgctactggatggcttgttaacactggttggtctgctggaagctatggtaatggaagccgtattaaactacaatacacaaggaaaatcattgatgctattcactccggaagtctcctgaatgcagagtacaagaagactgaaatttttgggcttgagattcccaccgaagtggagggtgtcccttcagaaattctggatcctatgaacacttggtcaaacaaaaaggcctacaaggagacactattgaagttggctggattgttcaagaacaattttgaaaccttcaccaactacaagattggcaagggaaacaacaacctgacagaagagattctcgcagctggtccaatcttttgagacaatgttatgcaacatgttgtgtggttgggaatgttaaggtggtagataaaatcttttcttaa

SEQ ID NO: 247285 - DNA, 555 bp, Glycine max
  unsure (1)..(555): unsure at all n locations
gagaggggaggaggnagtataagggaggtagatagtgtgtagactatgatcatgacgactcgtcgtaccggcccggaattcccgggtcgacccacgcgtccgggaacaatggcgggtagggtttcgacgtgcttcttcttcgtgtttgctctttctctccttcttccttttcagatctccgctgaggaatcatcggagaaagagttcgtactcacattggatcactctaactttcacgacactgtcagcaagcacgatttcatcgtcgtcgagttctacgctccatggtgtggccactgtaagaagcttgctcccgagtatgagaaagctgcttctatcttgagtagtcatgatcctccggttgttttggctaaaattgatgccaatgaggagaagaacaaagaccttgcatctcaatatgatgttaggggatacccaacaattaagattctgagaaatgggggaaagaatgttcaggaatacaaaggtccccgtgaagcagatggcatcggtgactatttggagggaccaagtgggcctgcttcaactgaaaat

SEQ ID NO: 247286 - DNA, 554 bp, Glycine max
gagatggggtgatggaggggatggtagggggaggtggtccaatatgagcatgacactgtcgtaccggtccggaattcccgggtcgacccacgcgtccgcccacgcgtccgcccacgcgtccgcccacgcgtccgcgaaagccgaaccttaaacacagacgccggatctagcaactattgagttttgttttctttgaaacatcgtgtgcacagtaccccagaagatcgaacaaggatctccacgaagacaaacctctgttctcaactgtgtttctttacctctcacctactttcagaccataccagattgactaggctgagaagatgcagcagacaccggctatgattcctatgatgccttcgttcccacctacgaacataaccaccgagcagattcaaaaataccttgatgagaacaagaagctgattctgggaatattgggcaattcaaaatctgggaaaacttgcagaatgtgcccagtacaaagctcagctttcaaaggaattggaaggatttaactgcaattgctgattcccaggctttaaaaaccagcc

SEQ ID NO: 247287 - DNA, 403 bp, Glycine max
cggtccggaattgccgacgcgacccacgcatccgaacgactctatctctgttcgatccggtcttccttgcgctcctcctagttggttcgttgtccctcgcgtagatcggcaatggcagataccgagacgtttgctttccaggctgagatcaaccagctcctcagtctcatcatcaacaccttctactccaacaaggaaatcttacttcgtgaactcatcagcaacgcctctgatgctttggacaagattagatttgagagtttgacggacaagagcaagctcgatgctcagccagagttgttcattcatattattcccgacaagactaacaattcggtgaccattgttgacagtggcattggcatgaccaaagcttatttggtaaaccacttgggtacaattg

SEQ ID NO: 247288 - DNA, 558 bp, Glycine max
  unsure (1)..(558): unsure at all n locations
gagatgggtaggaggnagggtgagtgttaggggaaaggggtcgtgtaactgagctatganatgtcggcacgccgtaccggtccggaattcccgggtcgacccacgcgtccgatcttcacatatctctacctccctcaaacagtttatgctagctcttgttgcgatggctgcctcagttaaactcttatttttgtgctttctctcattgttcatctctttctccatagctcaaccctctttcagaccaaaggcacttgttcttcctgtcaccaaagatgtttctgcctcagttcctcagtatgttacacagatcagacaaagaaccccacttgtgccagtgaaactaacagttgatcttggtggtggctacttttgggtgaactgtgaaaaaggctatgtctcatcaacctcaaaaccagctcgttgtggctctgctcagtgctcacttttcgggttatatggttgcaatgttgaggacaaaatctgaagtcggtctctaagcaacactgttactggggtctccacatttgggggaattcatgccaagggtgtggttat

SEQ ID NO: 247289 - DNA, 525 bp, Glycine max
  unsure (1)..(525): unsure at all n locations
ngggagtggggngtgtccgtccgacggattgctaatctgtacgcctgcagtaccggtccggaattcccgggtcgacccacgcgtccgcccacgcgtacgcccacgcgtccgcccacgcgtccggctttgttgtacgtgtgaaactgtacctttcaagccttatacccaccgttaccatgttccttataaagcatctcacagtacttaacccttctggtattctatcaagagagcttcagctcacatcattgttttggcctcatattcagcgtatggtaatgctagatgtcttttgcatgatacatatatatgtagagagcactggctgattctatgatttcagacaaacacgattctgaatgtaataattacaccttactgattacctatatgacttggaaaagatcaaatttgactgaataatttcagttcttagatctatatatatctatctgtatgtatgtatgttaccattaaatgtggaatgttaaatatcacagacaaacacttgccttaaatgatctt

SEQ ID NO: 247290 - DNA, 517 bp, Glycine max
  unsure (1)..(517): unsure at all n locations
ggggggcgtgtngtacaattgtacgcatgctcgtacgcctgccgtaccggtccggaattcccgggtcgacccacgcgtccgcttagttactttatcagtatcattcatcacaacaacaagatgagttcaggaattagagcatggagtgtggcaactagtgttggagttgtggaggccttgaaagaccaaggcatatgcaggtggaatcatgcattaagatcagctcaacaccatctcaaaaaccatgttggctcattctctcaggctaacaagctttcttcttctgctatgatctccacaacactaaaacatgagaaggcaaagcaatcagaggagtctttcagaactgtcatgtacttaagctgctggggccccaactagatatcataagtctaataagaaaatattctttctcttttaatttctagaaattatcaagcttagttccaaaagaagattaaggttgagaaattcggggtcacaatggattaagttttgaaggttggttgggtaaagt

SEQ ID NO: 247291 - DNA, 513 bp, Glycine max
gagagggctgtcttcgatgtagagctgatggcacgccgtaccggtccggaattcccgggtcgacccacgcgtccgcacagctagcagatattacatacacgtgaatcactaattaagccatggagaagaaatgggtagctgggttgagcttcctcttccttgttctctgtgttgctcaagaagttgaggtgcaaactgaggcatagacttgcaagaacctggctgatacatacaggggtacatgcttcaccattggcagctgcgatgatcactgcaagaacaaagagcacttgctcagaggcagatgcagggacgattttcgctgctggtgcaccaaaaactgttaaatggatccattcactccaacgtgaagaagatgcatgcagcgctattttataaaaaataaaactactatatactatatataataagactggcgctgcatcaatgacctatgtattatagtatatagtattaccgatgtcagaactatagatgcatgtaccgtgcata

SEQ ID NO: 247292 - DNA, 555 bp, Glycine max
  unsure (1)..(555): unsure at all n locations
gagaggagaaggaggnaagttaagataagaagganagtgtttggacactgagctttgagacgtcgtaccggcccggaattcccgggtcgacccacgcgtccgacaacaacactctgaaactaacaacaacaataaaagaccatgtcggtgaaggagtgcgagcaccacaaggggaagaagaggaagatcttccggcaagtgttctggtgcttagtggtgttccttttcatcgtgctggtcacaattcttttgatatgggcaatccttagacccaccaaacccaccttcacgctccaagacgtcaccgtctacgccttcaacgccaccgtggcgaacttcctcacttcgaattttcaggtcacgctcatctcgcgtaacccgaacgaccgcatcggtgtttactatgatcgcctcgaaaccttcgtgacctaccggagccagcaggtcacgtaccgaaccgccatcccttcgacatatcaaggccataaagagatcaatggttggtctccgtttggttatgggaccaacatgcccgttgcgccgttcaattttctt

SEQ ID NO: 247293 - DNA, 550 bp, Glycine max
  unsure (1)..(550): unsure at all n locations
agaggtngtgaggagtgagagataaggggtagtggtctattatgaactatgagctcgtcgtaccggcccggaattcccgggtcgacccacgcgtccgcgcagttgagatttgagaattgactctgagaatcgagaaaatggccggtttaccagcgaggctccgtctccaacccaccgacgtcaaagccgccgccttgtggggcgttaccgccgccactggcgctctctacctcattcagccatggggatggttgaagaagacattcttggagaagccagaacctgagcaaaaatgagttggcttctgagaagagtggtttgaatttttggatcatgccaaggatgggtaacagtcgaatattgttaatttctgctgaggtcttctcgcacctgtgctttatgttatgaatttggatactaaattttaatgctctgcgcttgatggttttaaaaaaaaaaanngttaanatcanaaatatggtttttgaaaagatgaaaaaaaagggccggccgttttaaaggatccagtttacttccccgtccttccaaa

SEQ ID NO: 247294 - DNA, 555 bp, Glycine max
  unsure (1)..(555): unsure at all n locations
gagaggggaggaggnaaaatgaggtagggggagagtggtataaattgaagcctgagaccgtagtaccggcccggaattcccgggtcgacccacgcgtccgcgcacgcgtccggaatatcttgtcgtttggagcgatccgagaaaaactctgtgcacatgttggagtaccaggacctccttacaggtgatgagctactctctgactcctttcgttacaaggaaattgagaatggaatgctgtgggaagttgaggggaagtgggttgttaaaggagcagttgatgtagacattggtgcaaacccttctgctgaaggtggaggagaagatgagggagttgatgatgcagctgttaaggttgttgacattgttgacacattcagacttcaagagcaacccgcattcgataagatgcagtttgataccttcatgaagaggtttatcaagaattggactcccaagctcgatgcatagcaacaggagttggttaagaagcacatcgggggagcaactaaatacctggttctataagattaaagaatttcaaatttttagttg

SEQ ID NO: 247295 - DNA, 560 bp, Glycine max
  unsure (1)..(560): unsure at all n locations
gagtggggattaggnagtagagtataggggagaggggtgtgaattagaagcatcgaantagtagtcactgccgtaccggtccggaattcccgggtcgacccacgcgtccgattacattaagaaagcccaaagaaagaagaagatggcgtccgagtgcaaaggtaagagctcatggcctgagttggttggagtggaaggaacggtggcggtggctacaattgagagggagaatcctttggtggatgctaacactgtgcttaaaggatccatcgtcaccgctgattttcgatgtgatagggttcgggtttgggtcaccaaacatggaattgtttatcaggctccaagaattggataagaagtgtttacactaaagcacttcatatatatgttatgagtcatgaatataatagtatttaaataaggagttattcttccaattatgttatttgattgaaaataaaaacatgactataagaaatttgttttttcttaattttaaaaataagatagaaaaaggggcggccggttctaaaggatccaagcttacgtacgcgtgcatt

SEQ ID NO: 247296 - DNA, 556 bp, Glycine max
  unsure (1)..(556): unsure at all n locations
gagatgggaaggtggnagtggatgtttagggtatagaggtgtgtcttgaactaagatctctcgccacgcagtaccggtccggaattcccgggtcgacccacgcgtccggtaggaatgagcacatgttatcctcgaccaggttctgtaaagataattgatggtgagactttaactctagaatctaactatagcagcagccgtgagcacactggagtgatggggcttttctatctattggtggcagaacagcttccagaccaacacttcagacatacctctcgttcttcattctttatgaatataaatagtatatttcattgatagataactagtgaaatgctaatatatttggagtgtcatcgatggtatcaaagtatgtatgacggtcaaaagaaatataatgacagaacttagaagtataattggaaaaatatacttctcttgtcggcggcaatagacaacaaaggtaaaagccggcgaagagcatatttccaagtttgaggattggtgaaatggggtcataagtcaattggcttggggagaggttagaccggtt

SEQ ID NO: 247297 - DNA, 563 bp, Glycine max
  unsure (1)..(563): unsure at all n locations
gagatggtaaggaggnaataagaatggatggaagataaggaggtgtgaaattgangtaagtatctcttaggcacgccgtaccggtccggaattcccgggtcgacccacgcgtccggtgcattcttctacttcaattctcagccatgtcggtggttccttgcaattgcaaccacgaccacagagaaagataaccttagtggtgaaagtgagagctttcacaagttttttgagtgctggatttctgagcaaaaacaacatctgaaggaccttttagctgctgaatcaacccagctaattagtgatgaggagcttcaggcactgaatgataaggtggttgagcattatgagtactactacaaggccaagtcaaggtgtgcaaagcaagatgtattggccatgctgtccccaacatggatgagttccttggaagaggcttttctttggattggtggatggagaccaagtatggcatttcacttgatatattcaaaggccggcttggaattcgaggcccggctcgaaggagttcttcaagggctaagaacacatgaattgggggaccc

SEQ ID NO: 247298 - DNA, 414 bp, Glycine max
ccggaactagattcactgccacactctcctatgcaacttattctcaaggcttcacaagacaaacgcttcgtatgtgaggcagctgagaaaagccttgatagcactgactacttggatttgccctatttctttattgccaaaattgcaaccatgccttaagaataagaatcctcgtatccgtgcaaaggcatcaatgtgcttttctcgaagtgtttcacgactgggggaagaaggcataaagacatatgggattgacaaattgatccaagtagctgcatctcagttgagtgaccagctccctgagtccagggaagcagcccgaactctacttcttgagcttcaaaatgggtatgagaaatcttctcatgatctcatgccagctactcctgtccataatgatcataataatgtcaa

SEQ ID NO: 247299 - DNA, 556 bp, Glycine max
  unsure (1)..(556): unsure at all n locations
gagatgggtaggaggnatgtagaaggtgtggagggagtgggtacgacatgatgcatgacgacgtcgtaccggcccggaattcccgggtcgacccacgcgtccgactaattgcaaagatgaataccaagccctttttctccttgtgcttactctgcgcactgcttctcatctgtgttgtggcaactgagccatccaaagatgcgacacaagcagaagaaccaaagacacggccagatgcctggagaagtggtggaagtggaggacatggtggaagtgggggacatggtggaagcgggggacacggtggaggctggggacatggtggaggctggggacatggcggtggacatggcggaggatgcaaatgctgcggtcgaaagggctgcaaatgttgctgaagtaaaaaaacacaaacatgaactgaagacacacatacgtgtgtactccatggtaataggatagtatgtagaattaagaaataaaacatggaatctatatccgtgctanggcttgcataaggtgaaccggnttttcataaaccatgcatggagtttgc

SEQ ID NO: 247300 - DNA, 518 bp, Glycine max
  unsure (1)..(518): unsure at all n locations
gttgagaggtgctgtncgtccgtagactgcaactcataggactgccgtaccggtccggaattcccgggtcgacccacgcgtccgaagacatgcatatggagggtacaagaagatgctcatatacgtggaagcttgcgaaagggggagcatgtttgagggtataatgcctaaggatctgcagatttatgtcacaactgcatccaatgcacaagagaatagttggggaacttattgccctggaatggatccttctccacctccagagtacatcacttgcctaggggatttgtacagtgttgcttggatggaagatagtgagactcataatctaaaaagggagtccgtgaaacaacaatacaaatcggtaaagcaacggacttcaaatttcaacaactatgcgatgggttcttatgtgatgcaatacggtgacacaaacatcacagctgaaaagctttatttataccaaggttttgatccttccgatttggaatttcctttccagaaacggaaagcttgaa

SEQ ID NO: 247301 - DNA, 520 bp, Glycine max
  unsure (1)..(520): unsure at all n locations
tgaggcgtgctgtgcgtcgatcgatcgagtncgatgcgcctgccgtaccggtccggaattcccgggtcgacccacgcgtccgaaagcttctctcgagtcagatattgagtgttttataagtgaaaagattatacttgccaacaaggtgatagtgaagcatgctgtcaccaaaataagagatggtgatgttcttctaacttttgggtcttcatctgctgttgaaatgatactattgcatgcacatgagttgggaagacagtttcgtgttgtggtagttgactctcgtccgaagcttagagggcaacttttacttcgccggcttgtggagaacggtcttagctgtacatacactcatataaatgctgtttcctacataatgcacgaagttactcgagtttttctgggtgcatcagcagttttgtctaatggaacagtatattcaagagtggggactgcatgtgttgcaatggttgctcatgcatttcgtgtacctgtcataaaatggtgtgaggcctattaa

SEQ ID NO: 247302 - DNA, 509 bp, Glycine max
  unsure (1)..(509): unsure at all n locations
gggtctgtgtcccatgagcacatctagtgccgtaccggtccggaattcccgggtcgacccacgcgtccgtttttttgaacacaaaatatttttacttccattttttgactgaaagaataaaaaaatggtatgattcaacctcaaactcatttgaatgtagctgataatagcggagcacgcgaactgatgtgtattcgaatcctaggagctagtaatcgacgatatgcttatattggtgacattgttgttgctgtaatcaaacaagcagtaccaaatacgaacttagaaagatcagaagtgatcagagctgtaattgtacgtacttgtaaagaactcaaacgtagcaacggtataataattcagtatgatgataatgctgcagttgtcattgatcaagaaggaaatccaaaagggaactcgaatctttttgtgcaatcgccccgggaattgagacangtaaatttcactaaaaatagtttcattagcacccgaggtattataagaccaaa

SEQ ID NO: 247303 - DNA, 342 bp, Glycine max
  unsure (1)..(342): unsure at all n locations
ttgggtggacatttgagagggcataaactaacaagttaataaatgcattatggaactgcttgttgaccttcaggcaatataagcagagctgggaaaggctccaacggcgaaggatgacgcaagatcttagttgggacaatgctgctcagcagtatgaggaagttcttgctggtgctaaataccaatggtaaattcttggctagtactctacctaagcagactgatcaatatggagtgctctcatgctgagtgatatcaaggtctgtgcagggaaagggacttggtcaagttgttaaaaccttcatgttgcaggtcctggaggaacattnttggccctaaact

SEQ ID NO: 247304 - DNA, 512 bp, Glycine max
ataggaagctgtacgcctgcagtaccggtccggaattcccgggtcgacccacgcgtccgccagtagtcatatgcttgtctcaaagattaagccatgcatgtgtaagtatgaactaattcagactgtgaaactgcgaatggctcattaaatcagttatagtttgtttgatggtatctactactcggataaccgtagtaattctagagctaatacgtgcaacaaaccccgacttctggaagggatgcatttattagataaaaggtcaacacaggctctgcctgttgctttgatgattcatgataactcgtcggatcgcacggcctttgtgccggcgacgcatcattcaaatttctgccctatcaactttcgatggtaggatagtggcctaccatggtggtgacgggtgacggagaattagggttcgattccggagagggagcctgagaaacggctaccacatccaaggaaagcaacaagcgcgcaaattacccaatcctgacacggggaggtat

SEQ ID NO: 247305 - DNA, 538 bp, Glycine max
  unsure (1)..(538): unsure at all n locations
agttaggcgtgacgtctngtccatgaactcgatngctgatgcacgtaccggtccggaattcccgggtcgacccacgcgtccgcttgggcgaaaccctaatctccccccttcacccttcgtacaccgcgtcgcatctacttccatcttctctcagatccaatctccgattcttgcttcactatcacaagcaaacatgtctgcggctttggatatgaccctcgaagatataattaagaacaacaagaaatcttccctcgccaacaccaggggccgaggccgagcctcgggacccggacccgctcgccgcctccccaaccgtgccgccaatcgcgccgcaccgtatgccgctgccaaggcgccggagacagcttggaaacacgatatgtacgcgaaccagccagtggccgcggcgtatccaggtggtcgagcgtcttccatcgaaacagggactaagctctacatttccaatttggattatggcgtttccaatgatgatattaaggaagtgtttcttgaagttggcgacgtgaaacggcat

SEQ ID NO: 247306 - DNA, 442 bp, Glycine max
  unsure (1)..(442): unsure at all n locations
aattcccgggtcgacccacgcgtacgcccacgcgtccgcccacgcgtccgaagaaacgaacggcgggttctggtggcggtggacgaaggcgaggaaagcatgtacgctctttcttggagcctcaagaacataattttccaaaattccagcgatacccttatccttctttacgtcaagccccctcatgccgtttattcccccttagattccacagccaggatagatcatcctgaaactccaggatatttgttttcgtcggacgtaagtgcggccatcgagaagtatggccaagaagtggcagattgcgtgttagagaaagcaaaaaaattgtgtaaagatctccaaaacgtcaaggtggaaacccgggtagaaattggagacccaagggacgtgatctgtgacatgtctcaaaagttgngtgctgacttgntaatcatgggta

SEQ ID NO: 247307 - DNA, 538 bp, Glycine max
  unsure (1)..(538): unsure at all n locations
agagaggcgtgtcgtctgatgatagatnctcgtaggcatgcacgtaccggtccggaattcccgggtcgacccacgcgtccggttcacagacagggggcagcagtctggggaggtgctgcaagctttaatagacttatgcgatatgcacatcctcaggtaaaacttattgatttttcgcctggtgagaagtatttggtaacatatagcagccatgaaccaagcaatccccgagatgccaatagagttgtgataaatatatttgatgtgaggactggtaaagtgatgagggacttcaaagggagtgctgatgattttgcagttggaggtgctgggggtgtcactggagtttcatggcctgttttcaaatggagtggtggaagagatgatcaatactgtgcaaggatggngaaaaatatactctncgtttatgaggcatagacctttgctctaggtgacacganatcttttaaaggttgaaaatttaatggagttctgctgatctacaactgatccaattattgctcctttttgttcctga

SEQ ID NO: 247308 - DNA, 529 bp, Glycine max
  unsure (1)..(529): unsure at all n locations
agagggtgtgnagttttgacatcgaactcataggcatgccgtaccggtccggaattcccgggtcgacccacgcgtccggaaaaaacaacaacaacaacaaaaaaaaacatcatcatcaaaaaaacttccgagagtttaatggcaacacgcgtgatccctccaagaatcctcaagaagctccgttacaacacaacaaccaagccactcaacgctgcccacccctcaatctctccagtcatcgccccaccgtcactcttcgagaggtcgccgtcccctgtcgcggatgctgtttcaacaacatccacgactatggagacggcgaatctcaacctcgacgacgcggagcggcttttcgcgtcagtatcgacggaaaagctgctccggtcgtccgcggttttgcatgcgacggcggtggggcccatggtagacctgggaatgtggttgatgaagtctccggtgttccagaccgggctgccgaaggatctcatcatggccgncacgaaggagacgttcttctcgcacttctggg

SEQ ID NO: 247309 - DNA, 533 bp, Glycine max
  unsure (1)..(533): unsure at all n locations
aggagggtgtcnngttctagacatggaactcataggcactgctgtaccggtccggaattcccgggtcgacccacgcgtccggcaacaggggcttccccacaccatcctctcccaacaagagccccctgcttaaattgtgcactccttctttatcccattctttcctcagattcgcgccaccattggaaaaaaaaaggtttccggtgttggggagcctagggttagggtttctgagagatatgggatgttccatgcattcgtgagccttatcgcacgcggttggaagctgtttgggcacggtgatgacgtcggtaatgtcgccgccgccaccggaagagaatgcaaggaggacctcctctggtttcgcgacatcggaaagttcgctgccggcgatttctccatggccgtcgtccaggccaactaggtcctcgaggtctagagctagatcgagtccggcggcttcagcaccttcatcggcgtctacgacggccacggcggccccgattgctcccgctatgtctgtgataacttgg

SEQ ID NO: 247310 - DNA, 532 bp, Glycine max
  unsure (1)..(532): unsure at all n locations
agtaggagttgaagtatagaaaatcgacgctgtggcgcactgccgtaccggtccggaattcccgggtcgacccacgcgtccgggaaaagaaagtccttgatctcatattagtcccaagtggtttccttgtgttgttggcttaccatttctggcttctccaccaagtcatgaaacaacccaccaaaacagtcattggtgtcaatgcaatcaatcgccgtttctgggtccaagccatgatggaggatgcgtccaagaatgggattctagctgtgcaatcattgaggaacaacataatggcatcgacccttttggcatccacagctataatgctgagttccctcattgctgtgttgatgagcagtggcaatgagagaaaaaccgtggtttctgaggtttttggggatagaactgagcttggtttgtccataaagttcttttccatattggtgtgtttcttgttggcatttttgctgaatgtgcagtccataagatactatagccatgcaagcatcttaatcaacgtgccctttcn

SEQ ID NO: 247311 - DNA, 545 bp, Glycine max
  unsure (1)..(545): unsure at all n locations
nagtaggtgtantttggtgtaatgagtctgtagcatacgatgccgtaccggtccggaattcccgggtcgacccacgcgtccgctgggatgcgttttcctagggttgtgtcaaaccagataattaagatagaagcttagttgtgcatatatagaaatcattgtttgagatagccccttaaaaaaaaaaaanaataaaaaaaaaaaaaataaataaaaaataaaatataaaaaattaaaaattataataaaaaataaaaaataataataaaataaataaatattttataaaaaaaaaaagggaagaatttttaaaagggttaaaattaaaaaagggagggtttaaaaattaaaattatttttatagggtgagaaatgaaaaaataatgggggtttattgtaaaaaattgttattttgaaaaaacctggtttttaaaaaatttatgggtggtaaaaaaatttgtttttttacaaaaattgttttttaaaaaaaaacctttataaaagtggtggttttaataaaatatgtaccccttataatttcttta

SEQ ID NO: 247312 - DNA, 538 bp, Glycine max
agagattttagtttgtcacacctactgatgcctttgcgatgctcgtaccggtccggaattcccgggtcgacccacgcgtccgcccacgcgtccgaaaaaaaaaaaaataaaaaaaaaaaaaaaaaaaaaaaaaaaaaaaaagggaaaaaaggataaaatgtaaattgaaataaaaaaaaaaatgaataaaaactaaaaaataaaaaatataaatatgtaatatatatttgaccataataattatatatacctatctatagcaaaaacataactggcagtcatctacatggaccgaactgaaaagtcctttgttgaaggcaacttggattgtaactggtcataggaatcaatctttaagctttttgctgacttgaacattgcacaatttgaacctcatgttgatgttgcctttgcacctccctttctgtatgtcgatcaagtgtgaatactaatcagtgaacggattgaaatatctgattataattcttggttcggaaaatgtggtgctattactggagaaatttttttagggcttttc

SEQ ID NO: 247313 - DNA, 513 bp, Glycine max
ggagtactccactgaagcgctgacacgatgtaccggtccggaattcccgggtcgacccacgcgtccgcaagttcggtgattgacgatgtcgggcttgaagcttggcacgactgcttccatctacgttcgaacagcgaaaaccaaaagcaaacccctcttatcatggagaagcccaccccaacacccccgcagccgcaggtacatgctttccccttccaaaaatcaaatcctagggttcacacctagaaacaaattgccatgctattctttgggaagggctggtcttgtcacagattttggttcgtcagtgccccaacctcaacctcaacctcagccaaagccagagccagaaccagaacctgaaccttgcaaattgcttacgttgccaacaattgtgactctaggccgtgtcgccgatgtcccacttattgatgctactatctacatggacggttggcgtggaactgctgctactaccagcattttcgtcgctgcatcaatcactgattggct

SEQ ID NO: 247314 - DNA, 422 bp, Glycine max
tccgaggcctcgtggaacacaacacctttcccttttcccttccgttggtgccattcttgcagcaccggatgctctaatttttccggggataactttcccttttccggcgaattcaccgtttcctcgatatgaatccccagtatgactatctgttcaagctccttctgattggagactctggtgttggtaaatcatgccttcttctaagatttgctgatgattcatacattgagagctacataagcaccatcggagttgattttaaaattcccactgctgagcacgatgggaagacaattaaactacagatttgggatactgctggacaagaacgatttaggacaataactagtagctactatcgtggagcacatggaatcattatctgttatgacgtgactgatgaagatagcttcaattat

SEQ ID NO: 247315 - DNA, 545 bp, Glycine max
  unsure (1)..(545): unsure at all n locations
agagagggcgtgttgtcnaatgatcgaagctcgtagcgactgccgtaccggtccggaattcccgggtcgacccacgcgtccgaaacagcgaaagtgaaataccactacttttaacgttattttacttattccgtgaatcggaagcggggcactgcccctctttttggacccaaggtcggcttcggccggtcgatccgggcggaagacattgtcaggtggggagtttggctggggcggcacatctgttaaaagataacgcaggtgtcctaagatgagctcaacgagaacagaaatctcgtgtggaacaaaagggtaaaagctcgtttgattctgatttccagtacgaatacgaaccgtgaaagcgtggcctatcgatcctntagtcccttcggaatntgaagctagagggtgtcagaaaagttaccacaggggataactggctttgtggcaagccaagctttcataggggacgtngcttttttgatccttcgatgtcggctctttctatcattgtgaagcagaattcaccaagtgttggattgtcc

SEQ ID NO: 247316 - DNA, 452 bp, Glycine max
  unsure (1)..(452): unsure at all n locations
ccggaattcccgggtcgacccacgcgtccgcaaaatatcatttcatgcagtatgctgaccaaattatgggtttgtttttgagagtgtttgcttctcgaagtgcaacagctcatgaggaggctatgcttgccattggggctttggcctatgcaaccggtgctgattttgcgaaatacatgacagaattttacaagtatttggagatgggtctccaaaatttcgaggactaccaggtttgtgctatcacagtgggtgtggttggtgatgtatgcagagccttggaggagaaaatactgccttattgtgatgggataatgacccaacttcttaaagatttgtctagcaatcagttgcataagtccggtaaagcttctaatttttcatgttttggaaacattgccttggcattggnagaaactttgagaaatacctgttatatgcaatgcctatgc

SEQ ID NO: 247317 - DNA, 538 bp, Glycine max
  unsure (1)..(538): unsure at all n locations
aggaaggtgacgtgaagtcgtaggaatcgatagctgtacgcctgcagtaccggtccggaattcccgggtcgacccacgcgtccgggattttcatttttcactacatgcaatcttctcaactcagcaggttcctttcttctacttcaggttcttgagatataggagcggttcaagctgtgtcccgtgaggcttatttcacagccattgacggtaccggggctgataatagtggaggtttgccaccagaaatttcaagcgccaagaaaaatcgtttgccaggtcttaaaggagagaccagtaacaaatctcttgaggccatggtgaagagcacgggcaaagagtccttacagtggggagtggctgcaggattgtattcaggtctcacatatgggctaaaggaagctcgtggagctcatgactggaaaaacagtgcagttgctggagcaatcactggggcgacccttgcacttacattggaagactccactcatgagcagattgtgcaatgtgccatcactggagcagctatcttcactgn

SEQ ID NO: 247318 - DNA, 540 bp, Glycine max
  unsure (1)..(540): unsure at all n locations
tgaagggagcgttgtgnngttttagaaatcgatagctgttacgcctgcaggtaccggtccggaattcccgggtcgacccacgcgtccggccgcttaagttaagactataacaacagccaagcgcattggcctatatatatcaacacaaaaactctttgattcagaaacatacatatatattcacacaaatatccatttatatatacatatatatagttctatatggcaatgacaacggtggtgtttgtcttgtgcatctttgtagtgttgaatgcaagtgcctctgatgccactcgcttattgctgaacaaaactgcaacaggtaacgtgtccagagagaagattgagagatacttacttgaaaatggactcggccagacaccccccatgggatggaatagctggaaccactttggctgtgatattaatgaaagtttaattcgagaaacagctgatgcattggtgtcatcgggccttgctgctttgggatacaaatacattaatttagatgattggtgggccgaacttaatcgagaacan

SEQ ID NO: 247319 - DNA, 530 bp, Glycine max
cgtgtttttagagtgctgttgaagccgatcgactgcgttaccggtccggaattcccgggtcgacccacgcgtccgcccacgcgtccgcccacgcgtccgatactaccagaaaaagaagaacccttctaaaaacctgcggcagaaagaaccaacaatgtcgccgagcttcgtcttcgaccctcctagcgacgaagaaatcgaacactccgaacacgaagaagaagaagaagaagaatcagtaggagaaccagagtcaggatcagaatcagagtcagaaggagaaggaggagaagtagaagaagggcataaagaagcgcgggttccgaagaagaagaagaagaaaacacagtctccatgggacttcgccaaatacacggaatcagtggccgaggaacacgctcgcaggagcacaacctcggtcgacgagaaaatctcaaaagcactcaaacaacgttccacgcctctcgttgctgagctcgaccacagctccgagtccgaacctgatgaacaagaagattattgaccggagg

SEQ ID NO: 247320 - DNA, 525 bp, Glycine max
  unsure (1)..(525): unsure at all n locations
gggagtttntcaggagtanttcatcgatgcctcgcactcgatgtaccggtccggaattcccgggtcgacccacgcgtccgaaaccaaaccctaatatcaacttcatctgtttcatttgattttgattcgaacccagacagagacatagcctctttctttcgtttggagaaacaaacccctcgtttcaatcattgatcctttcctgttagatacgaattactcttccaatttcatcatggccaaaacctccttcaagcttcagcatcctttggaaagaaggcaggctgaagcttctcgcattagagagaaatatcctgatagaatacctgtgattgtggagaaagctgaaagaagtgacattcctgatattgataagaaaaaataccttgtccctgctgatttgactgttggccagtttgtatatgttgtccgcaaaaggattaagctcagtgcagagaaggctatntttgttttcatcaataacactctgcctncaactgctgcattgatgtctgctatttatgn

SEQ ID NO: 247321 - DNA, 460 bp, Glycine max
aattcccgggtcgacccacgcgtccgcccacgcgtccgtgcgtattcaaacattccaatgacctcatatgagcttcctgatggccagacagtggaaattggagctgacagatttaagataccagatgttcttttcaatccatccctggttcagtcaattcctggcatggagagctttgcagaaattgctccttcagttcgtggcctgccccaaatggtgattgaaagcattaataagtgtgatgtagacattcgaagagagttgtttaatagtatactgcttgctggtggtacagcttcaatgcaacaactaaaggaacgccttgagaaagacttgttagaggaatcccctcaagctgccagagtaaaagtattggccagtgggaatgctactgaaagaaggtttagtgtttggatcgggggtagtatattggcatctcttggctccttccagcaaatgt

SEQ ID NO: 247322 - DNA, 534 bp, Glycine max
  unsure (1)..(534): unsure at all n locations
agtaagttnntccatgagtctctactgaagcccatccacctcatctacaggtccggaattcccgggtcgacccacgcgtccgaaaaaaaaaaaaaaaaaaaaaaaaaaaaaaaaaaaaaaaaaaaaaaaaaaaaaaaaaaaaaaaaaaaaggaaaaaaaaaaaaaaaaaaaaaaaaaaaaaaaaaaaaaaaaaaaaaaaaaaaaaaaaaaaaaaaaaagggccgccctttttaaaggtccaaagtttacttccccttctttccaatttaaaactttttttaaagggccccctaattaaatttaattgccctatttttaaaaacgtggtacttggaaaaaccttggctttaccaatttaaatccttttaaacaatatccccttttccccatttgccttattaccaaaaagccccgaacaattcgcctttcaaaaaatttcccaaccctaaatggcaaatggaaccccccttttaccggccatttaacctccgcctttttggtgttaccccccagtttaaccgttaaattttcaac

SEQ ID NO: 247323 - DNA, 385 bp, Glycine max
  unsure (1)..(385): unsure at all n locations
cggaattnccggggggagccacgcgtccgcccacgcgtccggataatnccaaccttcaacgtgtcttcactctcttccttttttccggaattgcaccctctttggctcaacaatccttcagacccagagccctcgttgtcccagttaaaaaagacgcttgcaccctgcaatatattactcaaatcaaacagagaacaccactcgtgccagaaaacctagtacttgacatcggtggccaattcctgtgggtcgattgcgacaacaactacgtctgctgcacttaccggcccgcacggtgtggctcctgccagtgctccctcgccagatccgacagctgcggaaactgcttgttcgacccaaaacccggctgcaacaacaacacgtg

SEQ ID NO: 247324 - DNA, 532 bp, Glycine max
  unsure (1)..(532): unsure at all n locations
agaagttagtgtgtcnaccattgaatccgtacccctgcagtaccggtccggaattcccgggtcgacccacgcgtccgcaacattctccaaaatcacctcaaaaaatttcaagtgctcgccatggctgatggcagtagtagcaacaccaagagcaattccctgatcctccatcaccccacaaacttgaagggtggttggaatgctgccatcttcatcatatttgtggaatttgctgagagatttgcttaccaagggttggcaagtaatctcatccaataccttacaaatgttctgaatgaaccaatcacacaagcagccaaagatgtgaacacatgggttggtgcctnctctctcttccctttgcttggtggcttcatagctgattcctatctgggtcgcttcaacaccatactctngtcctcagtcatttatttcgtgggcattgtttntcttgacactttcagtgtcngcactcaaacacanatttcttttttctttgcactttattgtcttgccattcgcgacggaagta

SEQ ID NO: 247325 - DNA, 537 bp, Glycine max
agatagtacgtaggtacgaccttggaatctgtacgcctgcaggtaccggtccggaattcccgggtcgacccacgcgtccggaacaagcaaaattaagcacaaaagcccaaccctctctctcgctgttggtctctcctatttggcattcgcagatcgattacgaagtaatttcactgaatcttattgaagatgtttctcacaaggactgagtatgaccgaggagtcaacaccttttctcctgaaggccgtttatttcaggttgaatatgcaatcgaagccatcaagctgggatcaactgcaattgggttgaagacgaaagagggtgttgtccttgcagttgaaaagcgcatcacttcgccgcttctggagccaagtagtgttgagaaaattatggaaattgatgagcatataagttgtgcaatgaatgggattgaatgctgatgctcgaacacttgttgagcatgcacgggtttgaaactcagaatcattaggtctcatatggtgaaccaatgactgttgagtccacaacccaagctg

SEQ ID NO: 247326 - DNA, 530 bp, Glycine max
ggtagtataggttgtatggatttgaagctttacgcctgcaggtaccggtccggaattcccgggtcgacccacgcgtccggaaaactcagcgtgtgattgaaatttgaagagtgtgaagatggcgatggaagtggagcagaatcagaatcatcaattagggtttcccttctggaaaccgctccgtcgcaggttcggacccgaatctcctttcttcgctcatggcaacctcgaacgggaacttctcgccaaacagcttgctttggaattaacagaagagaaacaacagcttgagaaatggatgcaagaggaagaaggaagggaagtcttttgtcccattgtgggttgtggtgcacgcttgacctcaatggaggactttgaaaatcactataatgcaaggcatactgcatcctgttctgtgtgctccagagtttacccgacatcttggttgctcagcatacatgtatctgaagtgcatgattcttttcttcaagcaaaagttgcacgtggctatgatatgtacgaatgcttgg

SEQ ID NO: 247327 - DNA, 538 bp, Glycine max
  unsure (1)..(538): unsure at all n locations
aggaagttnnccgtgnngtattggaaattcgatagctgttacgcctgcagtaccggtccggaattcccgggtcgacccacgcgtccgcccacgcgtccgaaacaatcaacaatagcttgctagctactcctgttgctgtgagaaccgttgatgtagatgctttgcaagcaagatttagagactccaacaataaaagccatgcttaacacctaccatgcctccaaactctcatcaaaccagtgtggttctagccttgtgcaaacaatagatgcacctttacctctcgtatggtccctcataaggcgctttgagtatccacaagggtacaagctctttgtgaagaagtgcaaccttcttgatggggatggtggcattggaagcgtgcgtgaggtcatgatcacatctgggttacccgctggtgttagtgtggagaggttggacaagctcgatgatgacaagcatgtcttgaagtttagcatcattggtggtgatcacaggcttgtcaantatagttcaacgattactttgcatgangagg

SEQ ID NO: 247328 - DNA, 527 bp, Glycine max
gggaggtagtgtgtttgaattgaagctgtacgcctgcagtaccggtccggaattcccgggtcgacccacgcgtccgcccacgcgtccgaatagattatcctaagtctttgggaatagtgctgcaatggcttcaagtcaggaggaggtgacccttttgggagctactggaagcccatttgtgtgcagggttcatattgccctcaagttgaagggagttcaatacaaatatgtcgaagaaaatttgaggaacaagagtgaactgcttctcaaatccaacccagttcacatgaaggttccagtgtttattcacagtgagaagcccatagcagagtctcttgtgattgttgaatacattgatgagacatggaacaacaaccacatcttgccttctgatccttaccaaagagccttgactcgtttctggtccaaattcattgatgataaggtttatggtgctgcatggaaatccgttttcacagctgatgagatagagcgtgagaagaatgctgaggaagcaattgaggctg

SEQ ID NO: 247329 - DNA, 527 bp, Glycine max
  unsure (1)..(527): unsure at all n locations
ggagggttggtagattgacttgaagctgtacgcctgcagtaccggtccggaattcccgggtcgacccacgcgtccgaaatgcaccgcctggatgccgttttaaattaaagtctgtccccttcagtaaaaacactatgtttggaattgaagatgttaaggagctgatctctatcttgtctgatggtgatggtcatgtggaatgttccatagttggtagctataaactggacacctcagattctgtttgcccttcaagagttcgtgcaatgttggcatcacgagcatgtcgatcatctattatggttggtgatgcacttggaagaaatgaaatgcagaagatacttgagcatatggctgagctgaaatccccatggaattgtccccatggcagaccaaccatgcgccatttagtcgacttaacaaaaattcacaagagctatgaacttacaatgcagatgtaattaataatggacttttttccctaatccccatcgttaacttagaagttcanggaattattgtacttn

SEQ ID NO: 247330 - DNA, 546 bp, Glycine max
agtaagtttattaaggagtttgttacatgcatgccattgatactatcgtacacgtcccggaattcccgggtcgacccacgcgtccgaaaaaaaaaaaaaaaaaaaaaaaaaaaaaaaaaaaaaaaaaaaaaaaaaaaaaaaaaaaaaaaaaaagaaaaaaaaaaaaaaaaaaaaaaaaaaaaaataaaaaaaaaaaaaaaaaaaaataaaaaaaattaaaaaaaacaacaaataaaaaaaaaaatagaataaaaaaaaattaaaaattaaaaaacttaataaactttaaacaaaattctaatattagtcaaatagggtaaaaacgtaatatgctcataaccaattgtactatcaaacattttctcatctctgaatttcaaaatgtgacgtaattatataaagattcaattaaccttactaacatttgtggttacaaaaatcgtgatcgcattacattgtatatccttaatttacgctccttttattatcttaaattcataaatcgtcacgttatatttttttaatcgttaaattctaaaactgtaa

SEQ ID NO: 247331 - DNA, 513 bp, Glycine max
  unsure (1)..(513): unsure at all n locations
nttgaatcgatcccctgcagtaccggtccggaattcccgggtcgacccacgcgtccgctaataaaactagtagtataattcttccattccgttctacatataatcattcataatgggtgttttcacattcgaggatgaaatcaactcccctgtggctcctgctactctttacaaggccctagttacagatgccgacatcgtcatcccaaaggctcttgattccttcaagagtgttgaaaacgtcgagggaaatggtggcccaagaaccatcaagaagatcactttccttgaggatggagaaaccaagtttgtgctgcacaaaattgatagcattgatgaggcgaacttgggatacagctacagcgtggttgggggtgctgcattgccagacacggcagataagatcacattcgactccaaattggttgctggtcccaatggaaggtctgctgtgaagctcactgtcaaatgcgaaacataatgagatgctgagcccaacctagaccaactnaa

SEQ ID NO: 247332 - DNA, 530 bp, Glycine max
  unsure (1)..(530): unsure at all n locations
agttgtgtgggtgtanataattgaagtcgtacgcctgcagtaccggtccggaattcccgggtcgacccacgcgtccggaaaaaaataagaggaaatgtatgtggcttttggtaagaactaactttgaatttggccatgctattgtgtgcgttgaatgctatcctggaagaaaagaggaagacacatactaaaaataaattgaatagcattaaatgtgcatctatgctgtgaacattgaacttaaatatgcaagttgactctgtatctatgctgatattaccaatgtatgttgaaacatcactatcttttgtacacgttgaatcaattaagaggatatcagagtatgtgactcagcttagaatgattggaaaggctcacggtgtttggcactttgatcaaagactttctgaataagaagatgctgcttaatcttgaatagccctaatattagtcatcagttacatgttggtctttactgaaattctgggatgtgtctcatatagtagtatttaaaggattttactatgacc

SEQ ID NO: 247333 - DNA, 533 bp, Glycine max
  unsure (1)..(533): unsure at all n locations
tgtagtgggtgggttnnatcataggaatcgatacccctgcagtaccggtccggaattcccgggtcgacccacgcgtccggattgttgtgactcgttcttcttcgtcgttatcttcttcttttgttgtttgtgtgtccgttctttctctcacctgaaaatgtcttgctgcggtggtaactgtggttgcggaagcgcctgcaagtgcggcaacggctgcggaggctgcaagatgtacccagacttgagctacaccgagtcaaccaccaccgagaccttggtcatgggagtggcaccagctaaagctcaattcgagagtgctgaaatgggtgttcccgctgagaacgatggctgcaaatgtggagctaactgcacctgcaacccctgcacttgcaagtgacgtgttcgagagctaaagcttcaagcagaaatggcccttagaaatcatgataaagactatatgtagtttcaaaacttcaaaaatatgtaggatggaatatgtagcacctctgtggttagtgtctaaacaaacaccc

SEQ ID NO: 247334 - DNA, 532 bp, Glycine max
  unsure (1)..(532): unsure at all n locations
atagagggatcgtgagtattgaaactgagctgtacgcatgccgtaccggtccggaattcccgggtcgacccacgcgtccggtatacctctaaagttgacatgtgggcaatgggtgctataatggctgagcttttctctcttcgtcctcttttcccaggtgccagtgaagcggatgagatttacaaaatatgtggtgtgataggcaatccaacctttgaatcatgggcggatggactcaaacttgcaagggatattaactaccagtttccacagcttgccggtgtgcatctttctgctttaattccgtctgctagtgatgatgcaatcagccttattacatcactttgctcctgggatccctgcaagaggccaacggcttcagaggcacttcaacatcctttcttccagagttgcttttacattcctccatcccttcgcaacagagcagtagcgagaactcctccacccgctggaacaagaggagcactggatcagcanggagtcaagagatattccggtgctttacctactn

SEQ ID NO: 247335 - DNA, 528 bp, Glycine max
gagggcgtgtgtgtgattatgatctgttggcactgccgtaccggtccggaattcccgggtcgacccacgcgtccgggagatgtaaaagtgattctggcaaccaacagaattgaaagtcttgatccagctttgctacggcctggtcgaattgacaggaagatagaatttcctcttcctgatatcaaaacaaggagacgcatctttcagatacacacatcgaggatgacattagctgatgatgtcaacttggaagaatttgttatgactaaagatgaattctctggagctgatataaaggcaatatgtactgaagccggtttacttgctctacgagaacgccgaatgaaggtgactcatgccgactttaagaaggccaaggataaagtgatgtttaagaagaaagaaggggtgcctgaagggctgtatatgtgaaatactatcctctatcatcctcgctcctcctgtctttttttcaatgttctagttatgcgaacaaatgataattcatttggattatgcgaacaaatg

SEQ ID NO: 247336 - DNA, 247 bp, Glycine max
tccctggtcgacccacgcgtccgtaaaaaaaaaaaaaaaaaattaaaaaataaaaaaaaaaaaaaaaaaaaaataaaaaaaaggaaaaaggagaaaataaaaaaaaaaaaaaaaaaaaaataaaaatgtaaaacatttttatggatccaagctttccttccctttcatacaatttctttctttttttcttgtgccacctaaattaaatttattttccatcgttttaaaatcttaataccttgaaaac

SEQ ID NO: 247337 - DNA, 465 bp, Glycine max
  unsure (1)..(465): unsure at all n locations
ccggaattcccgggtcgacccacgcgtccgttggattcactcactcacgagtctcacgcttttcacgatgggcttcattttcggagtggtggtcggggataattgtgggcctggccatcatagtgggcttcgtccgcggcgagaactcccgggccgtccaacgctcccagctcgccaccaccgttgccgccttcgctcggatgaccgtcgaagattccagaaagatcttgccgcctcagttctacccttcctgggtcgttttctcttccagccagaagttaacttggcttaactcgcatctcaccaagatctggccctatgttaacgaggctgcttctgagctcataaaagcgtcggtggaacctattctggaagaatatagacccgtggttttggcggctcttaaattntccaagtttactcttggtactgtagctncacagtttacaggcgtgtctataattg

SEQ ID NO: 247338 - DNA, 422 bp, Glycine max
acgcgttcgactacgcgtccgctttccctcgatttttaagagagagaaagtagagagagagagaaacacaactgctttgccaaaccttaatttcatggcacttccaagctaacaggaccagttgttgttccctttatgtgttgattgattcagcgatttctggttttcggaacttttctttctttgttacaaggagagttcgatgtctttaagttgaataacttgttgggacatatttgactcggtgcttttcttttggtgcttgcctcatgggaaacagtgaggatgagaaatctgttaagactggaagcccttcttcttcacctgcaacaactgatcagaccaaccaacctaatattcatgtctatcctgattgggctgccatgcagtattatgggccaagagtcaacatttcaccatac

SEQ ID NO: 247339 - DNA, 530 bp, Glycine max
  unsure (1)..(530): unsure at all n locations
gagtgncgtgnagtatttgaatcgagtccgcttgcaggtaccggtccggaattcccgggtcgacccacgcgtccgccgagttttctgatcgctcatagagagttcgacgcggcggttgcagaagaagattgcaagatgaagttcaacatcgcgagtcccaccactggatgccagaagaagctcgagatcgacgacgatcagaaactacgagcattttgggacaagaggatctcacaggaggtcagcggagatgcacttggtgaggaatttaagggctatgtcttcaaaattactggaggttgtgacaaacaaggattcccgatgaaacagggagtgcttactcctggtcgtgttcgacttttgcttcacaggggaactccttgcttccgtggatatggaaggcgtaatggagaacgtaggagaaagtctgttcgtgggtgcattgtcagcccagacctctctgttttgaacttggtaattgtgaagaagggtgagaatgatttaccaggattgactgatgctgagaagcc

SEQ ID NO: 247340 - DNA, 532 bp, Glycine max
  unsure (1)..(532): unsure at all n locations
tgtgagagggtgtntgtattgacatcgancccctgcggtaccggtccggaattcccgggtcgacccacgcgtccgcggacgcgtgggtttcgattgaacgtagtccgccgattgaggaggttatacagactggtgtggtttctcgctttgttgagtttctcatgagggaagactttccacagttgcagtttgaggcagcctgggctttgacaaatatagcttctgggacgtctgaaaacaccaaggttgtcattgatcacggggctgtcccaattttcgtgacagctacttgcttctactagtgatgatgtccgtgaacaggcagtgtgggcattaggcaatgtcgcggaggattcacctagatgtcgtgatcttgatctcagtcatggtgctctgcttgctttgtatgcacaattaagtgaacatgccaagctttctatgcttaagaaatgctcctggacactttcgaacttcttgcagggcaagccacagccttcctttcgaacaggttaaccctgcacttcctgctctt

SEQ ID NO: 247341 - DNA, 530 bp, Glycine max
tgggaggttttgtgggtattgacatgatgctgtacgcatgccgtaccggtccggaattcccgggtcgacccacgcgtccgtgtttatgctagccgcgaatcgggttccgtttggaccttggcatcttggactattaggatttgtgcagttgattagccccaacccaacaatgaaatataagctcacatcaacatttgtgaagacattgatcttggaaaggcctctgatcccagctgtgtatgctgttgctgtggctgtgtcgttgaaagccggcaacactggcagaattggtctcgggagctgtccattttttttgctgcaggtggcggatttgtattctaggattgcagtggtggtggtgttgtcaaatgcagcattcatcgcggtttgatatgcgcgcgctgccatgtagtatcgcccgggggtttgatcagcagtgaccaggacattgattgtctgaccaggacctatcatgaggacattggtggtgaaaggcttggtgtaagcagcatcagtagcaacaacagtca

SEQ ID NO: 247342 - DNA, 535 bp, Glycine max
  unsure (1)..(535): unsure at all n locations
agaggagagtaagtgtattatgacatcgaactcanaggcactgcggtaccggtccggaattcccgggtcgacccacgcgtccgctactccctcagttcagctgatgatgccactcaacttgcaaactacctctggcagaatttccttggaggtcaaaccggatcagggccattaggtaatgttatattggatggcattgactttgacattgaatctggtgggagtgaccattatgatgacctagccagggcattaaatagcttcagctcacaaaggaaggtgtacttgtctgcagccccacagtgcataatccctgatgctcacttggatagagccatccaaactgggctttttgactatgtgtgggttcaattctacaacaacccttcatgccaatactccagtggaaacaccaacaatttgatcaattcatggaaccaatggatcacagtgccagcttctcaaatcttcatggngcttcctgcatctgangcagctgctccaagttgtggctttgtgccctttgatgtgttga

SEQ ID NO: 247343 - DNA, 528 bp, Glycine max
  unsure (1)..(528): unsure at all n locations
gagtaagtataattaggagtncntcnataggaaaccatcgacactattggcaggtccggaattcccgggtcgacccacgcgtccgcccacgcgtccgcaacactggaggagcagtggagcaggttgagattcataaccgagcagcaacgaagacaatagctcttagtgtaaggggaagaggcagatttggagtttactcctcccagagaccactgaagtgtgtggtaggtggcgctgaaaccgacttcaactatgactcagagaccgggttgacaaccttctccattccagtttctccagaggagatgtacagatggtcaatagagatccaagtttgagtcctttttaagacttggtgtttgatgcattgttgtatcaggagaagggttttgttgtaattaagcattgagggaattgttggagtcaggcagagagagaggggggaggtttgttgtaagacacctagtattagtatcatgtagtggagaaaaagggttgttgatcctaatagctagacaaggcatgttg

SEQ ID NO: 247344 - DNA, 524 bp, Glycine max
  unsure (1)..(524): unsure at all n locations
gttagttntnctagagtcgtgaatgaagcatcgatactctcggcaggtccggaattcccgggtcgacccacgcgtccggcagttccaggtatagttcatgtgctgaagaagggaagcatggaagctcgggaaaatgcagctgcggcacttttcagcctttcagttatagatgaaaacaaggttacaattgggtctttaggagccataccaccactggtgacactgctaagtgagggtagccaaaggggtaagaaagatgctgcaacagcactcttcaatttgtgcatttaccagggcaacaagggaaaggcagtgagggctggcgttattcccacactgatgcgactactgaccgaacctagcgggggaatggtggatgaagcattagctattttggcaatattggccagccatcctgaagggaaggttactattagagcttcagaggcagtgccagtgttagtagagtttattgggaatggctccccaaggaacatagagaatgctgctgctgttttagttca

SEQ ID NO: 247345 - DNA, 440 bp, Glycine max
  unsure (1)..(440): unsure at all n locations
tccggtccggattcccgggcacccacgcgtccgcccacgcgtccgtttcgtttctatcatacccacttcgccttctccgtttctcactagggtcagatcgcgcctccatttcgctgcattccctctgcgttctccaacgaggaaactcatgtcgcacactcttgcacgtgccactcttggtctcacacacccttctaatatcgaaacccccaagatctcttttggtgctaaggatgttgatgtgacggaatggaaaggggacattctggcagtgggtgttacggaaaaagatttggctagagatgcaaactcgaagtntgagaatgtgantttgagcaagattgactcanagttgggtggtttattagctgaagcctcttctgaagaggatttctctggcaaagttggtcagtcaactgttcttagaattacaggacttg

SEQ ID NO: 247346 - DNA, 529 bp, Glycine max
agtaaggggtcgtagagttcgagactgaacctaccgatcactgtaccggtccggaattcccgggtcgacccacgcgtccgaaaacttccacttgagagaaaagtagtgtattaagactacaaattttcaatttttcaatggcgtcgaggcaacaaaaagaggatcgagctgaggcagctgcgaaagttgctgcgaaagaactcgaacaactcaaccgagaaaaagaccgtgatttcagtgttggtgttgcagaccaacaccaacaagaagaacatcagttagatcaacaaaagcgtggtgtaatcggatccatgttcaaggcggtgcaagacacctacgagaacgccaaggaagctgtcgttggcaagaaagaaccttcgacgacgactaactcgtacagtaccagagaggttattcacgacgttgacattcaacccgatgacgcggctgcagcgagggaagtgagagacaaatcagcctcatagtcaccaggtatctacaattctgccactgctgacaacaaaaccgg

SEQ ID NO: 247347 - DNA, 472 bp, Glycine max
aattcccgggtcgacccacgcgtccgccgatttgtaccggaagcttgttattgcttccgcttggaggaaacagatgccgaagctcgcgctttcgcttggtctcgctcagcaaatgcctgatatgattgaagagttgatcagcaaagggcagcagcttgatgcggttcactttacatatgaagtgggtcttgtggaaaagttccctcctgttcccttgttgaagtcttttctcaaggatgctaagaaagttgcggcttctattttggaagatcctaacaatgcaggccgagctgcgtacctagctgcaaggaaagagcagtctgcactcagggctgtgattaaatgcattgaagaatacaaacttgaggatgagttcccaccagagaatctgaagaagcgacttgaccagttgtgagaaggtgaagacggtgaagaccgagaaaagggaaaccggttgctgtcctgccaataa

SEQ ID NO: 247348 - DNA, 467 bp, Glycine max
  unsure (1)..(467): unsure at all n locations
ccgggtcgacccacgcgtccgttcaggacaaagagggtatcccaccagatcaacagaggctcatctttgctggaaagcagcttgaggatggccgtacccttgctgattacaacatccagaaggagtccactcttcacttggtactccgtctacgtggtggaatgcaaatctttgttaagactctgaccggaaagacaatcacccttgaggtggagagctctgacaccattgacaatgttaaggctaagattcaggacaaagagggtatcccaccagaccaacagaggctcatctttgctggaaagcagctagaagatggccgaaccttggctgattacaacatccaaaaagaatctaccctccacttggttctccgccttcgtggtgggatgcaaatctttgtcaagactctcactggaaagaccatcacccttgangtggagagctctgacactattgacaatgtc

SEQ ID NO: 247349 - DNA, 524 bp, Glycine max
  unsure (1)..(524): unsure at all n locations
ggggggagtgagtcatgaatcgatacgctgcagtaccggtccggaattcccgggtcgagccacgcgtccgtgccgcttaagttaagactataacaacagccaagcgcattggcctatatatatcaacgcaaaggctctttgattcagaaacatacatatatattcacacaaatatccatttatatatacatatatatagttctatatggcaatgacaacggtggtgtttgtcttgtgcatctttgtagtgttgaatgcaagtgcctctgatgccactcgcttattgctgaacaaaactgcaacaggtaacgtgtccagagagaagattgagagatacttacttgaaaatggactcggccagacaccccccatgggatggaatagctgggaccactntggctgtgatattaatgaaagtttaattcgagaaacagctgatgcattggtgtcatcgggccttggctgttttgggatacaaatacataatattagatgattggtgggccgaacttaatcgagaccat

SEQ ID NO: 247350 - DNA, 399 bp, Glycine max
aattcccgggtcgacccacgcgtccgaatgggtgtatctgcaaattagacattagagtgtgaactccaaactctgaaaccctggactcgcatccaatccttaggtgggtaccgaattggagtccaaccaaatcctaaacacatggactcaactctgtcacgggtgcatctccacaatctgcctactctttcctccgtcgctcaccgtcctctcttgcagcctctcaccgccgtcgcttctttctaccgctcttctcctcctctaccacgcctacgtctatcgccgcttctcgctgctaacaccctcaccgctaatgacgtctcgccaagaagtggactatacactgtcagtgactttatgacaaagaaagaggatttacatgtggtgaaacccacaaca

SEQ ID NO: 247351 - DNA, 533 bp, Glycine max
agtgagtagtatgtgaagtattgacatcgaagctgtacgcctgcaggtaccggtccggaattcccgggtcgacccacgcgtccgcaaaattagggtttttgtcgtagcaggaagaagcagcaatggcgccgaagataacacgcaaggtcagcagaaaccccgaattgataaggggaatcggaaagtactcgaggtcgcagatgtaccacaagaggggcatttgggctatcaaggccaaaaacggtggcgttttacctcgccacgaccccaaacccaaacctgaaactgccactgaaaaaccacccaaattttaccccgctgatgatgtcaagaaaccccttgtcaacaagcacaaacccaaaccagctaagctcagggctagcattaccctcggaacagtgtcgattcttcttgctggtagatttaagggaaagagggtagtgtatttgaagcagctaccttctgggttgcttcttgtaacatgtcctatcaagggtaatgggagtgctttgagacgtgtgaatcaggcctaa

SEQ ID NO: 247352 - DNA, 535 bp, Glycine max
  unsure (1)..(535): unsure at all n locations
tgtaagtagtnacgggagtattgacactggaagctgtacgcctgcagtaccggtccggaattcccgggtcgacccacgcgtccggcaaaacttttcaaacccaaaaaaaatccaaaaaaagaaaaacaaaacgcttaacgcaatacaaaaaccacagtttcaatcacatctctctctctctttctcgcaaatttctactttctgggttttctatttgagattcgttgttccaatgagcgatcacttggtggtgttcgttgaccgtctcgcgcgccctgtccccgttgacccggtggcgcagccgccttccgagccgtctcctcctccggcccccgtgaatgctgacgcttccgggagctccggcaccgctccggtggaggattgtgacggagagggcggcggcgaggaggagccgctgatccagatggcggagtgccgcatctgccaggaggaggacggcgtttccaacttggagacgccctgcgcctgtagcggcagtcttaagtatgctcacagaaagtgtgtccagcattgg

SEQ ID NO: 247353 - DNA, 525 bp, Glycine max
gtttagtaataaggagtagtgcactgaagcactgacctcatgtaccggtccggaattcccgggtcgacccacgcgtccgactgaaacaaaacaagtgacttctgcatgtcgggtgtgcccttttggaagtaaagcaatgtgtagggtgcaacaatggagagctcttcatttggagcatccgttctctaaatatatgaaatggttcatcatctgaacatagttatcagaatactcctttgctcaaacttaacttatgatacaagtctgactgcatttccataggatcaataaaatgggctcatgctggaggaaaggctagtcgactatatattatggcagcctatgactgtgcaacttcaaacttgttgcaagtagtgacgctgaatgatcatacagaaactcgcacaattaatctgggacttcatatgtctgaatgctgtattgacatggagatcatatcaacttcaactgagcatagcatgaataaacaagattctttgattatgcttggtgaagtcagggcct

SEQ ID NO: 247354 - DNA, 227 bp, Glycine max
aattcccgggtcgacccacgcgtacgggtaccttgagcttggcgttggctgattatgtgttgagagagagccatttcaaacatggatggggtcttctcagtgaagagaacatacaccaattaaccaacacctgatatgctgataccgtgcaaactcctttacttttttgaccaccataattgctgctaaaactaattctagctcgacaacagcaaacgtggtgactc

SEQ ID NO: 247355 - DNA, 514 bp, Glycine max
atacgaattcgatacactgcaggtaccggtccggaattcccgggtcgacccacgcgtccgtgcctctggacattgaatttgacttacaggatctggttgtggacttgcgtcccaatatggttgggtacacttctatcgaggaagtgaatgccgctctagtagaactcgatgaacatgatcggattgactctgctgataaggtcaccactgaaaaacatgctggcactgagaagcctttaattacgaccactttcactactgcagaggctggcaatggacaaagcattgataatggtaccgtacaaaatgaagtgcaagatgatcatgaccgtgagactgatccatggagtgacacctttgatgtggagcgacatgatgaaagattggatgacgagagtcaagatgattgggagtcagactgaggatgatgatgatgatgacgatgaccggtctggaccgatttatgactaggacgatgaagtccatcgtgcacacatagttaccctaggaggag

SEQ ID NO: 247356 - DNA, 514 bp, Glycine max
ttcgattcgatagctgtacgcctgcggtaccggtccggaattcccgggtcgacccacgcgtccgattagggtttgccgattgagttagaatgagaaatgggagaacgaaaaggaatgccaagggctttggggctcttggcgatgatcctcttcttcattgcttcctcttcctctcacctcgttcgcgcttccgatgacgccgacgacgcgatcttctacgagtcgttcgacgaggattttgatggacggtggattgtatccgacaaggaggattacaatggtgtctggaagcatgccaagagtgatgggcatgatgattatggacttcttgttagtgaacaagccaggaaatatgctatagtcaaagaacttgccgagtctgtcagtcttaaggatggaacagttgttcttcagtttgagactcgccttcagaatggccttgaatgtggtggtgcatatattaaattatcttcgaccccaggagagcggatggaaaccaaaggaatttgacaag

SEQ ID NO: 247357 - DNA, 532 bp, Glycine max
  unsure (1)..(532): unsure at all n locations
agaagttttgtgtcgtatagacatcgaagctgtacgcctgcaggtaccggtccggaattcccgggtcgacccacgcgtccggtccagtgggcctccctcattcaggctctcgcctccaacaaaacgggcccaccgggcgcacaccttcgtataaccgcattgtcccgcaccggctccggacgccgctccatcgccaccgtccaagaaaccgggcgccgcttagccgccttcgccgcctcccttggccaaccgttctccttccaccattgcaggttggagcccgacgaaacgtttaaaccttcgtcgcttaagctggttcgcggagaggctttggtttttaactgtatgctaaacttaccgcaccttagttaccgcgcgcccgaatcggttgcgtcgtttttgagcggagccaaagcgttgaagccgaggctggtgactttagtggaggaggaagtggcctncattgttggagggttcgtggcgccggttattgaatcccttgattactaatcaaccggggttggacttggtg

SEQ ID NO: 247358 - DNA, 511 bp, Glycine max
  unsure (1)..(511): unsure at all n locations
nttgattcgtagctgtacgcctgcagtaccggtccggaattcccgggtcgacccacgcgtccggtcatatgcttgtctcaaagattaagccatgcatgtgtaagtatgaactaattcagactgtgaaactgcgaatggctcattaaatcagttatagtttgtttgatggtatctactactcggataaccgtagtaattctagagctaatacgtgcaacaaaccccgacttctggaagggatgcatttattagataaaaggtcaacacaggctctgcctgttgctttgatgattcatgataactcgtcggatcgcacggcctttgtgccggcgacgcatcattcaaatttctgccctatcaactttcgatggtaggatagtggcctaccatggtggtgacgggtgacggagaattagggttcgattccggagagggagcctgagaaacggctaccacattcaaggaaggcaacangcgcgcaaattacccaatcctgacacggggaggtagt

SEQ ID NO: 247359 - DNA, 471 bp, Glycine max
ggaattcccgggtcgacccacgcgtccgcccacgcgtccgtgaacagatgcagatcttcgtgaaaactttgaccggtaagaccatcacccttgaggtggagtcctccgacaccatcgataacgtgaaagctaagattcaagacaaggaagggatcccacctgaccagcagagacttatctttgcgggtaaacagcttgaggatggtcgaacccttgccgactacaacatccaaaaggaatccactctccacctcgtgcttcgcctcaggggtggcatgcaaatctttgtcaagactttgactggcaagaccatcaccctcgaggtcgaatcctcggacaccattgataatgtcaaggccaagatccaggacaaggagggtatccctccagatcagcagaggttgatatttgctggtaaacaacttgaggatggaagaacccttgctgattacaatattcagaaagagtcta

SEQ ID NO: 247360 - DNA, 518 bp, Glycine max
  unsure (1)..(518): unsure at all n locations
agtnntagagcggtgtcgncctattgatcctaagcgacgtcgtaccggtccggaattcccgggtcgacccacgcgtccgcagaaatctcgtcttctccgaaaacgtcctgcgcgtaacaaactcttatataacaacacgccttctggttctcttttcagtttacgtttacgtttacgcattcactcgcttatatcgtcttcctccgtttttttctttctcgtgaaacgcttcttccaactatgcctgccccattgattctggttactggcggagccggttacatcggtagccacaccatccttcagcttctcttcggcggttaccatgtcttcgccgtcgacaacttcgacaattcttccgaaaccgccatcaacagagtcaaggaactcgccggagaattagcaaataacctttccttttgcaagcttgacttgcgggacagagctgccctcgagaaaatattttcaaccgtaaagtttgatgccgtcatacattttgctgggcttaaagcaatggg

SEQ ID NO: 247361 - DNA, 441 bp, Glycine max
  unsure (1)..(441): unsure at all n locations
cgggtcgacccacgcgtncggtaaaactttatatgtaccagattttcagggggctggcttatatacacactgtgcccaaagtttgccacagagacttgaagcctcaaaatatattggtggatcctcttacacaccaagtgaagctatgtgattttggaagtgcaaaagttctagtaaaaggtgaagctaatatatcatacatatgttcacgattctatcgtgctccagaacttatatttggtgccacagagtatacaagttcaattgatatttggtcagctggctgtgtccttgctgagcttcttttgggccagccattattccctggcgaaaatgcagtagaccagttcgtacatataataaaggtgcttggaacaccaattcaaaaggaattcccctgaatgaatccaatttccatggccttaaggtttcaacagttaa

SEQ ID NO: 247362 - DNA, 387 bp, Glycine max
  unsure (1)..(387): unsure at all n locations
taccttccaacactggggtcctggttttggtccttcaatggcggaaccctaaccgggcttggctcttaaactttccatgggcctggcccgcccttgcctaaagcctcaattctttcaatcctcaatcttctctcttcttgaccctaaacttcgcctattcctcttttcaaccaaacccttacgcgccgtcatcgacatggcccgcaccgggaagttctttgctggtggcaactggaaatgtaacggaacaaaagactcaatcagcaaacttgatgctgacttgaacaatgcanaatttgaacctgaaggttgatgttgtcgttgcacctccctttctttaacattgatcaagtgaaaaacttaattaattgaccgaatggaatattt

SEQ ID NO: 247363 - DNA, 523 bp, Glycine max
  unsure (1)..(523): unsure at all n locations
aggggagtnagtnaggtcgtgcgactgaaataggaggcttattggcatgctgtaccggtccggaattcccgggtcgacccacgcgtccgcccacgcgtccgcccacgcgtccgatccaatcatatgtttttgatgtcatcagggccagggtaccaaagttggagttggattctgtctttgagcagaagaatgatatagcaaaggctgtggaggaggagcttgagaaggccatgtcaacctatggatttgagatagtccagactctcattgttgatatagagcctgatgttaatgtcaagagagcaatgaacgagattaacgcagctgctagattgaggttggctgcaaatgagaaggctgaagcagaaaaaatactgcagatcaaaaaagctgagggagaagcagaatccaaatatctgtcaggactcggtatcgctcgccaacgtcaagccattgtggatggactgagggacagtgtgcttgctttctctgagaacgtgcctgggacaacagctaaagatgt

SEQ ID NO: 247364 - DNA, 527 bp, Glycine max
  unsure (1)..(527): unsure at all n locations
agggtnnagtnnaagtagggtctcgtctaacgaagacggaggagttgtatggcactgccgtaccggtccggaattcccgggtcgacccacgcgtccgcccacgcgtccgatggacatcaaaacctttgctttcgccccatcttctccgccgttaccggtaatcgccgccgccaagctcgccggaatctctccctcgattgatacctctctctctcctgactcacctcccgcatttatcttctccgatgggctcaagttgcatggagcatatgctcttctacgttatatcggccgagttgccagccttcccaatttctatgggcaaaatgcattagaatctagccagattgatgaatggctggactatgctcctatcctctcatctggccctgcttttgagaatgcatgcaaatatatagatgaatacctggaaaaaggtacctttttgggtgggtaatcaatggccattgccaaacctaccatttgggccaggcttgccaggtcctggaaaagatatgggaaactta

SEQ ID NO: 247365 - DNA, 529 bp, Glycine max
  unsure (1)..(529): unsure at all n locations
agagtnnnaagtgtgtttccaatcganctatgatacttatcgcacgctcgtaccggtccggaattcccgggtcgacccacgcgtccgcggacgcgtgggcggacgcgtgggggaggctgttaggcgttgggatgtctctaccggtgcgtgcctgcaagtttatgaaaaaaacggtcctggcctcatctcctgtgcatggtttccaagtgggaaatatatactttctggcctcagtgacaagagcatttgcatgtgggatttagatgggaaagaagtggagtcttggaaaggacaaagaacccttaagatttctgatttggaaataacaggtgatggggaacacatgctgagtatttgtaaagacaattcaatactgtacttgaacaaagaaacgagggatgagagatatattgatgaggaccagacaataacttccttctctgtatcaaaggatagcagactcttggtggttaatcgtttgaacccaggaattacattctttgaaatattaaaggcgatcctaaacttg

SEQ ID NO: 247366 - DNA, 531 bp, Glycine max
  unsure (1)..(531): unsure at all n locations
agaatggttagggaggttcgtgcaatggatggctgnatgactgtgtaccggcccggaattcccgggtcgacccacgcgtccgctctttctctctttgaccaatcccaaacccaaaacaaaaaataaaaatggagggggatctgaagcggaagctgttgagaagaagaaaggaagaggaagaagaagaagaagaagagttatcattggccaagagggtgtggaatgagagcaaggttatgtggatagtggcggcaccagccatattcacaaggttttacacctttgggatcagtggtataagccaagcttttgttggccatattggttctaaggaattggccgcttatgctctcgttgtcaccggtctcattaggttcgccaatggtgttctggtaggaatggctaatgcgttgtcaacactatggggacaaacatatggggcaaaaaaattatggcatgaatgggagtgtatctttcaaagatcattggattaggtttgntctttaactgcagtctggcttaattcctggg

SEQ ID NO: 247367 - DNA, 522 bp, Glycine max
  unsure (1)..(522): unsure at all n locations
agtttagggtgaagtgtgtgtnatcatggatgcctaccgcacgtcgtaccggtccggaattcccgggtcgacccacgcgtccgctagagaaccactttttgccttcttcaaatccctctatgaaagcctttctgcttcaaagtagattgtttaagaatgattgtgtgaactacttgtcgctcattgaattattgttgtttgaatttcatgtcaatttgatactatatgtaatttagtaacctgggatattaggatatccccaaggaacaaagaatcctaggattttgtttccattttggccatttcagttaataattaaagaaactctattttttcttgttaaaaaaaaataaaaataacaaatataataaaaataaccaattataataataatactaataattaacatccttacaaacactttattataatctttatccttctaaataatatttcctaattttaatttatcacaaaaaacggggcgccctttttaagaaacccaaatttaatccccctgcc

SEQ ID NO: 247368 - DNA, 528 bp, Glycine max
agtttagggagtaggtcgtgcaatcgaagcatggatccctaaggcactgccgtaccggtccggaattcccgggtcgacccacgcgtccgattcctatgttgccaatcagatattcccaaattccaccctcgcaccctggaacggggagtccgattccgacaccaccgccaccaacgcccccgtggtggcgatggccgaggccgaggccgaggctgtggtggaacaagaagaggaacagaaaaaaatggaagaagtggaagagaaagatgatgatgaggaggatgagggggaggaggaggaggaggaggaggaagaggagaaggagaagagattgatgtggtggaaggttccttttgatgtgaactggtcacgctcgtatacttgagtgtactccatgtaatgactagtctatatatgtctaagccgtcgatgctcttctgagacttttattcctgggacggaggttgcacagaaagagggcgcgcgactcttaacgtttcaactttaccttccttttcatggtaatac

SEQ ID NO: 247369 - DNA, 533 bp, Glycine max
  unsure (1)..(533): unsure at all n locations
gatagttttaacaggggttttnctttgaaccatcgaacctangcgcactgccgtaccggtccggaattcccgggtcgacccacgcgtccggccttagtgatccaagctagtattttagggatcagggcatgaagtctattcaaactgggcaaccagcaccagatccatttggtttgcttggcctgttaagtgtgatcaggatgagtgatcctgacctgacatctcttgctcttggaattgatcttactacactggggttaaatttgaattcatcagaaaatcttcacaagacctttgggtctccatggactgatgaatcagctaagggagatccagagtttacagtgccacaatgttattttgccaaacagccacctgctctacatcaaggttatttttccaagttttcggtggaaacattgttttacatattttatagcatgcccaaagatgaagcccaattatatgccgccagtgagctttacaacagaggttggttttatcacatagaacatcgtttatggttaataaga

SEQ ID NO: 247370 - DNA, 529 bp, Glycine max
  unsure (1)..(529): unsure at all n locations
gggagggtnnaaaggagtgcgtgatcganncatgggggatttatgcgatgctgtaccggtccggaattcccgggtcgacccacgcgtccgcccacgcgtccgtgaaaatgtcttgctgcggtggtaactgtggttgcggaagcgcctggaagtgcggcaacggctgcggaggctgcaagatgtacccagacttgagctacaccgagtcaaccaccaccgagaccttggtcatgggagtggcaccagttaaggctcaattcgagagtgctgaaatgggtgttcccgctgagaacgatggctgcaaatgtggagctaactgcacctgcaacccctgcacttgcaagtgaggtgttggagagctaaagcttcaagcagagatggcccttagaaataatgataaaaactatatgtagtttcaaaacttcaaaattatgtagtatgtattatgttgcactctggtgttttgtgtctaaacaaacacccttagaataaagcggtcatttcttgcccttgagcaagttcaagtgtc

SEQ ID NO: 247371 - DNA, 437 bp, Glycine max
  unsure (1)..(437): unsure at all n locations
ggaattcccgggtcgacccacgcgtccggccacgcgttcgcccacgcgtccgcccacgcgtccgagaatatattacattaagaaagggcaaagaaagaagaagatggcgtccgagtgcaaaggtaagagctcatggcctgagttggttggagtggaaggaacggtggcggtggctacaattgagagggagaatcctttggtggatgctaacactgtgcttaaaggatccatcgtcaccgctgattttcgatgtgatagggttcgggtttgggtcaccaaacatggaattgtttatcaggctccaagaattggataagaagtgtttacactaaagcacttcatatatatgttatgagtcatgaatatattagtaattaaataaggagttattcttccaattatgttatttgattgaaaataaaaacatgactatanag

SEQ ID NO: 247372 - DNA, 167 bp, Glycine max
  unsure (1)..(167): unsure at all n locations
cggaattcccgggtcgacccacgcgtncggaaaagtcaaagacaatgtccaggatcattcacaagattgaggagacccttcatgtgggaggccacaagaaagacgaggagcacaagggtgagcagcaccatggtggagaatacaaaagggagcatcatggtgaacac

SEQ ID NO: 247373 - DNA, 519 bp, Glycine max
  unsure (1)..(519): unsure at all n locations
gggttaagtttnagtaggtgtgtcatagataacaggaggcagctcggtaccgctccggaattcccgggtcgacccacgcgtncgaagcaaccacttgatcggtctcttaaacttcctaacattcctgctgtcgattccgatcctacgaggcggaatatggctgaccagcagggcgaacaacaccgactgcctcaagttcctgcaatggccgctcatcatcatcggcgtcagcatcatggtcgcgtccctggcgggattcgacggcgcgtgttaccgcaacaccttactcatgcggctctacctcgtcgtcatgttcctggtcattgccgttctgatcgggttcatcatattcgcctacgttgtcaccgacaaggagtacggtcggagggtgatgaaccgtgcttacttggagtattatctcgaagactattccgagatgttggaagaacgcgtagcgaagtgatacctcctggggaagattgactcctggggtaaggaatctaaagcatgtgggaagat

SEQ ID NO: 247374 - DNA, 392 bp, Glycine max
tttaaattaaagtctgtccccttcattggacactggatttggaattgaagatgttaacgagctgatctctatcttgtctgatggtgattgtcatgtagaatgttccatagttggtagctataaactggacacctcagattctgtttgcccttcaagaattcgtgcaatgttggcatcacgagcatgtcgatcatctattatggttggtgatgcacttggaagaaatgaaatgcagaagatacttgagcatatggctgaactgaaatccccatggaattgtccccatggcataccaaccatgcgccatttaatccacttaacaaaaattcacaagagctatgaacttacaatgcacatgtaattaataatggacttttttccctaatacccat

SEQ ID NO: 247375 - DNA, 513 bp, Glycine max
  unsure (1)..(513): unsure at all n locations
ggggaggaagtggtgtgctacgataaggagacttatgtcatgctctaccggtccggaattcccgggtcgacccacgcgtccggggtattttcacatttgacgatgaaaccacctnccctgtggctcctgctaccctttacgaagctctagttacagatgccgacaacgtcatcccaaaggctgtcgaagccttcaggagtgttgaaaaccttgaggggaacggtggccctggaaccatcaagaagatcactttcgttgaggatggagaaagcaagtttgtgttgcacaaaatagaatcagttgatgaggcaaacttgggatacagctatagcgtagttggtggagttgggttgccagacacagtggagaagatcacattcgaatgcaaattggctgctggcgccaacggaaggtctgctgggaagctaactggcaaatacccaacctaaggagattgctaagctcacccagaccacctcaaaattggccaaagtaaatctgatgcttttatac

SEQ ID NO: 247376 - DNA, 533 bp, Glycine max
  unsure (1)..(533): unsure at all n locations
agtaagttttcctcggagttccntttgtgtactatggggggattaatggaatgctgtaccggtccggaattcccgggtcgacccacgcgtccgcttgctagctactcctgttgctgtgagaaccgttgatgtagatgctttgcaagcaagagttagagactccaacaataaaagccatgcttaacacctaccatgcctccaaactctcatcaaaccagtgtggttctagccttgtgcaaacaatagatgcacctttacctctcgtatggtccctcataaggcgctttgagtatccacaagggtacaagctctttgtgaagaagtgcaaccttcttgatggggatggtggcattggaagcgtgcgtgaggtcatgatcacatctgggttacccgctggtgttagtgtggaaaggttggacaagctcgatgatgacaagcatgtcttgaagtttagcatcattggtggtgatcacaggcttgtcaattatagttcaacgattactttgcatgaggaggaagaggattacggtggg

SEQ ID NO: 247377 - DNA, 517 bp, Glycine max
  unsure (1)..(517): unsure at all n locations
agagggctgntttgaaccgtgaagctcacgcgcactgccgtaccggtccggaattcccgggtcgacccacgcgtccggttctgaactttctgaattcttcactttgatcatcatcttcttcaattccagcaagggggtcacagcaaggcgaatcatcggacccgaaatcggggaagaaggacttctcgaccgcgattctggaacgtaaaaagtcgccgaaccggcttgttgtggatgaggctgtcaacgacgacaactccgtagtgaccatgcacccccaaaccatggaaaagcttcagcttttccgaggggacactatccttatcaagggtaagaaacgaaaggatactatttgcatagctcttgctgatgagaactgtgaggagccaaagatcaggatgaacaaagttgtgaggtcgaatttgcgggttcggcttggagatgttgtgtctgtgcaccagtgcccggatgttaagtatgggaaacgtgtgcacattcttcctattgatgataccan

SEQ ID NO: 247378 - DNA, 530 bp, Glycine max
  unsure (1)..(530): unsure at all n locations
agggagtntnctagagtncgtgatggatctatggggagtgatggcactgccgtaccggtccggaattcccgggtcgacccacgcgtccggtgagtcagcagattcacactatggtatggggcatacataggagcagagtgacaccagaggtagtgcttggctgcttgattataaatagagggcactcctctgctaaagaagcacacagcagcaagcatctccttctcaaactagtagtattattcttccattcataatgggtgttttcacattcgaggatgaaatcaactcccctgtggctcctgctactctttacaaggccctagttacagatgccgacaacgtcatcccaaaggctcttgattccttcaagagtgttgaaaacgttgagggaaatggtggcccaggaaccatcaagaagatcactttccttgaggatggagaaaccaagtttgtgctgcacaaaatagaaagcattgatgaggcgaacttgggatacagctacagcgtggttgggggtgctgcattgc

SEQ ID NO: 247379 - DNA, 276 bp, Glycine max
ccacgcgtccgcccacgcgttcgcccacgcgtccgaaaaaaaaaaaaaaaaaaaaaaaaaaaaaaaaaaagaaaaaagaaaaaaaaaaaaaataaaaaaaaaaaaaaaaaaaaaaaaaaaaaaaaaaaaaaaaaaaaaataaaaaaaaaaaaaaaaaaataaaaaaaaataaaaaaaaataaactttataaaaaaaaaataaaaaaataaaaataataaaaaaaaaaaaaaaaaaaaaaaaatgtgaattttttaaaaattaaaaaatttttaaaa

SEQ ID NO: 247380 - DNA, 363 bp, Glycine max
ggaattcccggatcgacccacgcgtgcgccttgctgtgtgagagaaagagaaatggcaacaagcgaagaagtggttgcggctgcgcgggatggggccgagccggaggcagggttgaagcacaaactggagagaaaatggacgttttggtgcgacaaccaatccatacccaagcaaggcgctgcttggggaacctctcttcgcaaggtctacaccttcgacaccgttgaagagttctggtgtttgtatgatcaggtattcaagcccagcaagttgcaaatcaatgccgattatcacttgttcaagactgggattgaccctaaatgggaagatccagagtgcgcccatgggatgaaagtggtcta

SEQ ID NO: 247381 - DNA, 446 bp, Glycine max
gtcgaccacgcgtccgatttttttggtaattgaccttacaggatcaaaaaattggattggaaaactaacagtacttgggcgaagtccattggcacattggtatcaatcgctggagccttaataattactctgtacaaaggccaagcagtcataaagaatcatccatcaaataaattgttccccaaaaaacatgtttcatctgaacaatttgactgggtattaggggcagtgttgcttgcgggtcatagctttgttctctcattgttgttcatagttcagacatggataatcagaaattaccctacagagcttgtgataatgctcactcgcagtacattagttgctatgctatctatcccaccttcactgatttcggtaacagatccaaaagctttgagattaggatttgatgtgaatttgatagctattgcattccaagccatttt

SEQ ID NO: 247382 - DNA, 519 bp, Glycine max
  unsure (1)..(519): unsure at all n locations
aggtaagggtagtgntnnnnaactgancatgtagactatcggcatgcccgtaccggtccggaattcccgggtcgacccacgcgtccgcttcttatagcttcatcccaaaaagctcttttccttctaaatttgattccttagttcagcattctattattatatatggcttcttcaccttcctcagaaaacaaaaacctagagggagtagctggtggtgccggagagaaacccattccacttggtgagaacgttctgcagaagcatgctgcattctttgacttgaataaagatggtgtcatctacccatgggagacttttaaagggaaagtttccatctatactttttccaattgaaattaaaaatatccaacgcggcaaacacggcagtgacactggagtctacgatacttgaaggaagtttggaccttcaaaaatttgaagaaattttaaaaaggcttgcccttccccatccaaatgctttgcctatggattgagtaaccggatatgataaaggcaata

SEQ ID NO: 247383 - DNA, 522 bp, Glycine max
  unsure (1)..(522): unsure at all n locations
nggggttgagggaaagaggcgtgtcgatcgantaagaaggctgatggcacgctgtaccggtccggaattcccgggtcgacccacgcgtccgctgctcttctcttctcttctacctgtcaagtttctgaagtataaagatggcagagacaggcctattcacctaggagtcagtgaacgagggacaccctgataagctctgcgaccaaatctccgatgctgtcctcgacgcttgcctagaacaggacccagacagcaaggttgcctgcgaaacatgcaccaagaccaacttggtcatggtcttcggagagatcaccaccaaggccaacgttgactacgagaagatcgtgcgtgacacctgcaggagcatcggcttcatctcaaacgatgtgggactcgatgctgacaactgcacggtccttgtgaacattgagcagcagagccctgatattgcccacggcgttcaccgtcaacttaccaaaagacctgaagaaaatggcgcttgtgaccagggtcacattgttg

SEQ ID NO: 247384 - DNA, 520 bp, Glycine max
  unsure (1)..(520): unsure at all n locations
aggggagttntagaggtctnncgactgaantaaggcactttatgcgacgctgtaccggtccggaattcccgggtcgacccacgcgtccgcagtagttgagtctagttgtttcccttaaagccatggaatattctccattgtccattgggattaccttctttgtgttcttgctcttgcattggctagttaaaacttacaagcaaaaatcgagtcacaagttgccccctggcccatggaggttacccatcattggtaacctccatcagctagcattagcagcttcacttcctgatcaagctctccaaaaacttgtccgcaaatatggacctctcatgcaccttcaactaggtgaaatttcaacactttgtgtgtccttccccaagatggctatggagatgatgaaaacccaatgtggtcaatttgtgcaaaagccccaacttttggcttcaccatttattggccattgggcaacacataatggctttggtccataacgggagattattgggggcaaataaga

SEQ ID NO: 247385 - DNA, 551 bp, Glycine max
gtatagtaataaaggagtagtgtttggaaaccatgaagcctacaggcatgccgtaccggtccggaattcccgggtcgacccacgcgtccgaaaaaaaaaaaaaaaaaaaaaaaaaaaaaaaaaaaaaaaaaaaaaaaaaaaaaaaaaaaggaaaaaaaaaaaaaaaaaaaaaaaaaaaaaaaaaaaaaaaaaaaaaaaaaaaaaaaaaaaaaaaaaaaaaaaaaaaaaaaaaaaaaaaaaaaaaaaaaaaaaaaaaaaaaaaaaaaaaaaaaaaaaaaaaaaaaaaaaaaaaaaaaaaaaaaaaaaaaaaaagaataaaaaataagtaaaaatagcaaaagaaccaaaaaacaaaaagttaactgaaaatgaataaatgtcacgaaccgtataatcttatgaaatagtcaagataacccaaatgggaaatggataaagagactgatcatttaaataagactcctaaagaacctaatgctatcgctcaattgaataagtaacttttgaaaaatagtcaagtactaaaacaaagcgcttaactagattattac

SEQ ID NO: 247386 - DNA, 520 bp, Glycine max
  unsure (1)..(520): unsure at all n locations
agagtgctgcactganntcccgaaagctgtaggcactgccgtaccggtccggaattcccgggtcgacccacgcgtccgctctcgtacgcagggtaccaagattgcttctgaaggacttaaacatagagtgtttgagggctccttggctgatcttcaaggggatgaggatcatgcattcaagaagattaggttgagagctgaagatgtgcaagggaagaatgtcctgacaaatttctggggaatggatttcacaactgacaagctgaggtcattggtgcgaaaatggcaaactctaattgaagcccatgtggatgtgaagacaactgataactacacattgaggatgttttgcattggatttaccaagagaagagctaaccaagtgaagagaacctgctatgcacaatcaagccagattagacagattcgtaggaagatgagggagatcatgaccaaccaggcaacatcctgtgatttgaaggagttggtccgcaagtttattcctgagattattggaaaa

SEQ ID NO: 247387 - DNA, 526 bp, Glycine max
  unsure (1)..(526): unsure at all n locations
agggaggancgtgnatttcgagaacattgtattgctcgttgcgcactgcacgtaccggtccggaattcccgggtcgacccacgcgtccgataaatttatattacttttataacagagaaagacagaagtaagataagaagaaagagaaagtgtgagataagatgagtgtgatgaaaaagataaaaataaataaataaattgttgtatgaatttgttttatgaataggatatccttttgtttaaatataggatatgagatcatcaaattttaacaatatctcttcgattttgacaatttttccggattcaagaaacgttgacataacaactaccttttttatttattaataaaattataaagcaataggggtcttagtacctaggattctgaacagtgccatatgttccatccatccatttaggataatgtttgctaaaaggatctatcacctagtagatgtgtatattaattanttaatattaatgatgcgtgtgagagaactttgatttgattcatgtcattggt

SEQ ID NO: 247388 - DNA, 321 bp, Glycine max
tcgacccacgcgtccggcctgcagaaccacgtgcttcagttttggacaaggttaagttaggagagcctgtatacggggatgggtattatgctgaaaaatttggtgcattggatccggataagattgacaaaatcaagaaagatacactcttaaaatatgtacaaggcctttgttgggtttgttggtactactaccaagggtgtatagctcatggtaatggtactacctataccattatgctccttctgcttctgatcttaaagatctacatgatctggagataacattacttttgcgagaaccatgtaaaccatttgatca

SEQ ID NO: 247389 - DNA, 523 bp, Glycine max
  unsure (1)..(523): unsure at all n locations
aggggtaggggtaagaggtgtgnngtcnganttggaggagtttatggcatgctgtaccggtccggaattcccgggtcgacccacgcgtccggaacagtatgtctgggagtcccatgccggtggctcatttactgtgacaagagatacatgtggtgagaaccttggtaggggaacaaagataactttgtttcttaaggaagatcaacttgagtatcttgaggaacgccgtctgaaggatttgataaagaagcattctgaattcattagctatccaatttctctctggattgagaagactactgaaaaggagatttctgatgatgaggatgaggaagagaagaaggatgaggagggtaaagttgaagatgtggatgaagataaggagaaggaggagaagaaaaagaagaccattaaggaggtatctcacgagtggtcattggtgaacaagcagaagcctatttggatgaggaaacctgaagagattacgaaagaagaatatgctgctttctacaagagtcttacc

SEQ ID NO: 247390 - DNA, 519 bp, Glycine max
  unsure (1)..(519): unsure at all n locations
aggggagttnnnagaggctgncatcganatggggagttatggactgctctaccggtccggaattcccgggtcgacccacgcgtccgaaaacattattctcgaattagggttttccactgatctccgagcacacaccactactctgttcctcagattcaacaccaccttgcgtggcgccaatgggaaaagccttcgacatcggagccgttccgttcaacgccgacgggtggggtccgccggacaacgcgacctcaggcagcaacaacaacaacctccctctgaacgtccccttcgcccccttctcccgctccgacaaattgggccgcatcgccgactggacccgcaacttcaacaatccgacccgctccaagaacccccgccgatgccgttttcgacttcgccaacgacgactccttccccgcctccgccgacgacgacgcctccttccgcctcgtcgacggaaagcccccgccgngccccaaattcggccccaagtggcgcttccagcagcagcgccag

SEQ ID NO: 247391 - DNA, 522 bp, Glycine max
  unsure (1)..(522): unsure at all n locations
agagtnctntttttaanacttggaggattaatgcgatgctgtaccggtccggaattcccgggtcgacccacgcgtccgcccacgcgtccgttttttttttaaagggaaaatgaaattcacacaagaagccaaagaaagcagaaacagaggaagagagagaaacaccaaagatgggtctttgctttggttgcttcggcgtagacaaacgcatgagcaaggaagaagagagattggcctctgaagaagcgcgtgccaaagctgctgaagccgcacagaaaaggcaagagcaatttgagaattctgcagcaggacgagctgctcgtgcacagcaacaagcaatggcaaagcaatctgcaaataccaacaaaggcgaaccagttctaaagtggcaaaatgagttgaggttagacattctgtcagttggagttaacttttaattacgtgtaagtatcgatgacaggtnncaaccagaattatatgcctctgcatgcttcccttgttccgaaaatgtaaagatctttt

SEQ ID NO: 247392 - DNA, 517 bp, Glycine max
  unsure (1)..(517): unsure at all n locations
agaaggncgtgtttgaaccctcgatgctgtacgcactgccgtaccggtccggaattcccgggtcgacccacgcgtccggcttcttcgagtttcacagccaagtcgtaaaagggtttcaagggatggaaaacatgcagagcttctggcaattgggtgatgaactccgtgggcactcaaaagcatcggaggatcacaagtggttaatggttgcctcgaaactggccgaacagacaagattgaagggggagcgtgtgaacaaccttgatctttcaaagggacccattgaaacaaggtcaagggataaatttgggttccaggaagagaacaaatttgattctcttaacttgagcatgttgaacctggactctaaatttactgagaatgtgagcaaaagctcacttcgaaatggtgtttatggtatgaatgcagtgtatcagaaaaacaatgcaaacttggtgagtaatgtcaggccagtattgcatcattatgacgggccaaagtttcgtcttgaactgtn

SEQ ID NO: 247393 - DNA, 537 bp, Glycine max
  unsure (1)..(537): unsure at all n locations
gatnagtnnnnnnagagagtncgtgncttganncccacggaggctgttgcgcactgccgtaccggtccggaattcccgggtcgacccacgcgtccgcccacgcgtccgcagagggtgatgttagcagggcgagttgagttcttcgaacacttaagtcggagggactgctgaagacgcaacccaaccaaccatggctgcttctgatcccaacaagttgatggccaaagctgataaacaaacaagactcagtctcacgaggtggagtgcggattggaaaagtgctactgttctatatgagcaggcagctaatgggtttagagttgccaaggactatgagaatgccaaaatagcatatgagaaagcttcgaaaggacaagagatgctttcttcaccttgggatgcagctaagcacatggaatctgctgctgctctagcgaaggatctaagacactggcaagaagttgtggacttctatcgaagggcatctgaattgtatatggagtgtgggagaccccaacctgcatcagacgctcttgc

SEQ ID NO: 247394 - DNA, 522 bp, Glycine max
  unsure (1)..(522): unsure at all n locations
agttnttagggagagggcgtcnnaagcacggatgcagtcaggcacgtgcgtaccggtccggaattcccgggtcgacccacgcgtccggaataactggcccgcaccaggtgttcttccagggtggagggagaccatggaaaagttcgatagagagacattagaagtagggaaagcagttgcaaagataatagcccttgcacttgatttggatgctaatttttttgatcagccagaaatgcttggagagcccattgcaactctgcgtttgctgcactatgaaggtcaagtttcggatcccttgaaaggattatatggagctggagctcatactgactatggtttaattacactgttagcaacagatgatgtctcgggtcttcaaatatgcaaagatagggatgctaaacctcagaaatgggaggatgtagcaccattgaagggagcattcatagtgaatcttggtgacatgctggagcgctggagcaactgcgttttaagtccacactgcacagagttctaggg

SEQ ID NO: 247395 - DNA, 525 bp, Glycine max
aggtagttataagagtttaatttagttcttattgcatgttgtaccggcccggaattcccgggtcgacccacgcgtccgcccacgcgtccgaaaaaaaaaaaaaaaaaaaaaaaaaaaaaaaaaaaaaaaaaaaaaaagaaaaaagaaaaaaaaaaaaaaaaaaaaaaaaaaaaaaaaaaaataaaaaaaaaaaaaaaaaaaaataaaaaaaaataaaaaaaaaaaaaaaaaataaaaaaaaaaaaaaaaaaaaaataaaaaaaaaataaaaaaaaaaaaaaaaaaataaaaaaaacaacacatactaaatatgaaaaaatgatgtaaatgataaaaaatgacaacaatactaccaataacaaaaataaagaataatgaatgtccaatgataatcaaaatgaaaagttaaaaaaaacgtgagaacgaaaaaaaaactttcagaatgaaactttaaattgccaaaaacctaatgaaaaaaactttacacttaattctttcattaaaaaactaacaggaagtgtagaa

SEQ ID NO: 247396 - DNA, 522 bp, Glycine max
  unsure (1)..(522): unsure at all n locations
ggggnaaggggnagaggtgtgncgtttganttgcgcactttatggcactgcccgtaccggtccggaattcccgggtcgacccacgcgtccgctttcttctatatccaatctgcaacacccagaaaccagtttctttttttccttgtcatttcaggttattcaccagtttgagttgttgaatctcctccactgcttcttctcctgatcctgttcagaatccaaggagcttgggaacaaactcctgctccttcttcaccctggtcataagttcatgtctttgtttcttcatttcattttaattaccagaggcaccacttctggtttattgataggcaatgggaggtgcactgggaaagattgaatcacccaaaaagggatcagtgccagaaactaagctcgaggctaaaatggttgaagcaatgctgcgtagggaatctcaaggaagttccgtgaaatcattcaacactataatcttgaaattcccaaagattggttagagccctataaaatgcgcagcccttt

SEQ ID NO: 247397 - DNA, 515 bp, Glycine max
  unsure (1)..(515): unsure at all n locations
ggtgggggaaagaggttgncactgaataagaagtgatacagcatgctgtaccggtccggaattcccgggtcgacccacgcgtccgaatagctaaaacattcatgtttaatgttatggcagccattaatcacaatgacaacacaggtttaacacgggacaaaagaagaaacatcagccataacagttaagcaaattctcgtgggcatccaagacttacttgaccagccaaatcctgctgaccctgcccagacagaaggctatcatctattcatccaggatgcagcagagtacaagagaagggtccgccagcaggcaaagcaatatccacctcttctctaaggttgcatcagctaaatttatgaactatttttactatggcagatgtttcttcttttgtcccgggttaaaactgtggtgtcattgtgattaatggctgccataacattaaacatgaatgttttagctattcatgcgcgctggtagatctgggagaactgggccggttcagcaggcgt

SEQ ID NO: 247398 - DNA, 538 bp, Glycine max
  unsure (1)..(538): unsure at all n locations
ganagttnntntaagaggagtgattgaaactttgatgcatacatcatgctgtaccggtccggaattcccgggtcgacccacgcgtccgaaaaaaaaaaaaaaaaaaaaaaaaaaaaaaaaaaaaaaaaaaaaaaaaaaaaaaaaaaaggaaaaaaaaaaaaaaaaaaaaaaaaaaaaaaaaaaaaaaaaaaaaataaaaaaaaaaaaaaaaaaaaaaaaaaaaaaaacaataacaaaaaaacaaaaaaaaaaaaaaaaaatgaaaaaatgaataaaaacaaaaaacataaaaaaaagacaagaacaaaaaaaaatgatactgacaaaaaaaaagctaatttacatgtaggtggacaagtacaaagatgcaaattattaagcggatttaacaacagatgttcctgaagtataaaaacatagacatcatctggaaacacataaacatatgtgctccatgtaatagaaataagcataacgaccaataaatttggcatgcaatttatatctgatcttataatttcataagtttaattggaaa

SEQ ID NO: 247399 - DNA, 532 bp, Glycine max
  unsure (1)..(532): unsure at all n locations
tgtnntagtnnnaagtaaggncgtgcttagannncatcggaagctcgttgcgcctgccgtaccggtccggaattcccgggtcgacccacgcgtccgcccacgcgtccggttactctatttataactcagatatttgagaaggctttaaaagatggtgcttttgggacttctcttggtgggatttctctctcagctgggttcatcagtttcagcttctggttatggttggatggatgctcatgcaaccttctatggagggggtgatgcctctggcaccatgggtggagcatgtggatatgggaacttgtacagccagggctatggaacaaacactgctgctttgagcacagccttgttcaacaatggtttaagctgtggggcatgtttcgagattaggtgtgttaatgaccaaaggtggtgccttccacgctcagttattgtaactgcaaccaatttctgtcccccaacaatgcactccctattaatgcaggtggatggtgcaaccctccccttcaccacttcgacctttccc

SEQ ID NO: 247400 - DNA, 524 bp, Glycine max
  unsure (1)..(524): unsure at all n locations
agaggtcgtgattgganaacctcgtagactcgnacgcactgccgtaccggtccggaattcccgggtcgacccacgcgtccgcaacgatgagttactacaatcagcagcaaccacccgtcggtgttcctcctccccaaggtgtacccaccgccggattcttacggaaaggacgcgtaccctccgccagggtacccgccgcaaggaggataccctccgcaggcgtatccagcacaggggtaccctccaccctacgcgcctcctcagtacgctcagcctccgccgcaacaacaccagaattcatctggcccaggttgcttagaaggatgtttggctgctctctgctgctgctgtctgttggatgcgtgcttctgagaggagaagaggttgctttgcacaaattggatttgaaactgtgttttgactttgaatatcgtcgttagttnttattattctatgttgatttacatttcgtggatatgaaatattgcttcgaaagatatgttctgtttcatttacaggattct

SEQ ID NO: 247401 - DNA, 524 bp, Glycine max
  unsure (1)..(524): unsure at all n locations
aggggagtnnaaggaggcctgtttanccttgagtctgttgcgcactgccgtaccggtccggaattcccgggtcgacccacgcgtccgacagaatacaaacaaacaaatagaaaacccaaaataaccgagaaaagaaaattagatagagagaagaagaaagcgtatctggaattttcgtttcgttggtgtgtcgtgtgcgtgtggaggttcttttctttgagactttccttcaaattctagattgcttccctttcttttctttcccttataaccaccaacctctccctttcccccttttcatttcttcctcgattttccatttccataaccttagtcatcttcttctttcatctttctccctaacggtatcgagggaaaaatatggcggaagaacacagatgccaggcaccgcgcttctgcgccaacaattgcggtttctttggcagccctgccacgcagaatatgtgctccaagtgctaccgcgatttccagctcaaggagcagcaatctttcaacgcccaaaa

SEQ ID NO: 247402 - DNA, 524 bp, Glycine max
  unsure (1)..(524): unsure at all n locations
ggggntgagggngcgggctttngacataggaagatttgatggcacgtctctaccggcccggaattcccgggtcgacccacgcgtccgcttcgagatacccgactacaccgncgacgtcgtcgccaccggcgccctccgcctcctcgaggccgtccgttcccacatcgccgcctccggccgctcccacatccgctactaccaagccggctcctccgagatgttcggcgccacccctccgccgcagtccgaaaccacccccttccacccccgctccccctacgccgcctccaaatgcgccgcccactggtacaccgtgaactaccgcgaggcttactccctcttcgcctgcaacggcatcctcttcaaccacgagtccccccgccgcggcgagaatttcgtgacccgcaagatcacgcgggccgtgggccgcatcaaggtcgggctccagagcaagctcttctttngcaaacctcaggcctncaaagaatggggcttcgctgggggctacgttgaagccatgtggg

SEQ ID NO: 247403 - DNA, 448 bp, Glycine max
  unsure (1)..(448): unsure at all n locations
accaaggcgtccggttaactttgggttgccaaaccttccaacaggttttaaagccatgggcatagtagttactaccggtcctaaggaacctgaagttgaaaaagttagatgcgtgcaaaatgatctaacagaaactttgtgagacttttgatctgttactgactgtaaagtcaaaatttgcaaaagattcatttcaggtttggaacacacaaccctgtgatagaggtatgttagctagaggtgtagatgtngggacattcttctgtggcagtacctattttgattctgaacaagtggtggatatcatgtgcctggagaatcttgaatctttcctggattccaatgccaattagaacccgattcatgcacttattcaggatttatggtcccactggatactttcattctgatgagaagtacttgccatcatcagtgcaatggtttttta

SEQ ID NO: 247404 - DNA, 528 bp, Glycine max
  unsure (1)..(528): unsure at all n locations
ggggnnnnaggggngagagtgtgtgnngattgnanaaacggaaagctgttacgcctgccgtaccggtccggaattcccgggtcgacccacgcgtccggtttctttcacttcacaaaaatgaaaaacatgaaattgtgttcggtgatgctatgcttatcactagcgttccttcttggggccacagcagaacaatgtggcacacaagctggtggagcgttatgcccaaatagattatgttgcagcaaatttgggtggtgtggtgacacagattcctactgtggagaaggttgccagagccaatgcaaatctgcaacaccctcaacaccaactccaacaacacctagtagtggtggagatattagcagactcattagctcttctctctttgatcaaatgcttaaataccgaaacgatggccgctgttctggccatggattctacagatatgatgctttcattgccgctgctggctctttcaatggctttggcacaaccggtgatgacaacactcgcaagaaggagattgct

SEQ ID NO: 247405 - DNA, 513 bp, Glycine max
  unsure (1)..(513): unsure at all n locations
aggtagtacatggtctgngatcgactacgagctctaggcactgccgtaccggtccggaattcccgggtcgacccacgcgtccgacgttttgcgcgttgtttatgtgcagggtttttacattgtctcttatggactcggaatgtaccttctgaatctcttgattggttttctctcccctttggttgatcctgagctcgatccctccgactcccctttgcttccaaccaaaggctccgatgagttcaaacccttcattcgccgccttccggagttcaagttctggtattctttcaccaaggctctctgcatagcgtttgtgatgacctttttttccctgtttgatgttcctgtcttttggcctatattactctgttactggtttgttctctttgtccttacaatgaggcgccaagttgctcacatgatcaaatacaaatatatccgcttcaacttggggaagcagaagtatagcggtaataaatcttctgcaaggagcagtagctctcgtgcaga

SEQ ID NO: 247406 - DNA, 516 bp, Glycine max
  unsure (1)..(516): unsure at all n locations
ggggagtnnnaggggtgtgcgatcganntttgatacttattgcacgctctaccggtccggaattcccgggtcgacccacgcgtccgctaaacctgctggtttcaagtttgaagcttcgagggaaacggctgttgttatcatgaagcatgttaaccttgttgagatcctcatggacgtgaaccaatggtccacagtgttcgctggcatagtctcaagagcaatgactttggaagtgttatcaacaggggtggcagggaattacaacggtgcattgcaagtgatgacagcagaagtgcaagtaccttcacctctggtgccaactcgagagagctattttgtgaggtattgtaagcagcacggtgacgggacttgggcagtagtggacgtgtcattggataatttgcgtcctagtccttctgccagatgtagaagaaggccctcaggttgcttaattcaagaaatgcccaatggctactcaaaggtcatatgggttgagcatgtagaagtggatgacac

SEQ ID NO: 247407 - DNA, 525 bp, Glycine max
  unsure (1)..(525): unsure at all n locations
ggngagttttaggagtcntcatcgaaccatgatactcgtacgcactgccgtaccggtccggaattcccgggtcgacccacgcgtccgctgcacaggatttatgtgatcgcaacatgggagtttgtttgagcgcccaaattaaagctgaaagcccatataacactgggttcaattcaaagtatgtgagtacggatggaaatgatttcggcagcacaaacgataaggtttcagcaaactcaattcctcaaactcctcggagtgagggtgagatcttgcggtcatccaatttgaagagctttcccttgtcagaacttaagacggccactagaaatttccgtccagatagcgtgttaggagaaggtggttttggatcagtttttaaggggtggatcgatgagaattcattgactgctaccaaacctggcactggcattgttattgctgttaaaagacttaatcaagatggcatccagggtcacagggagtggttggctgaagtcaactatcttggacagctntctcatc

SEQ ID NO: 247408 - DNA, 539 bp, Glycine max
  unsure (1)..(539): unsure at all n locations
ggggagttnntaaggnaggnctctttagnannccctcggagctcgttggcatgccgtaccggtccggaattcccgggtcgacccacgcgtccgaaaaaaaaaaaaaaaaaaaaaaaaaaaaagaaaaaaataaaagataaaaaaaagaaaaaggacgacatcctacatcgtggttcctatattataaaatcaaatatgctaaatacgggcggccgttatacaacatcgtaaatactttcactgtcctgcgattaacaacgttaagcttgttgcacctcatccttttgtcaactgatgtcgtattacacgaggatgtcttgaaacatcctggttaacaacagttggaggccgaatgccgattgatattgactacgtgttgcgcagcatgaatggcgaagggtgaggtggttgctaccagccaataaggcgccaatactgaagagcttactgagcactgctattgctactttctttaggtccctagtcacggctgtttccgtttagcgccatcctgttattgaacggctgcttgcattacg

SEQ ID NO: 247409 - DNA, 448 bp, Glycine max
gacccacgcgtccggccacgcgtccggaccagcttgcgaagctggtttgcaattgtatggggggttcagctgctgtatcgtaagatgatctttttgctatctggagggagcgcattaatgatctacgagattgcttaggatctgttgttgtaccaattggcagtctatctactggactttgcaggcatcgtgctgtattattcaaagtactagctgacaccattgatttgccttgtcgaattgctaagggctgtaaatattgttcaagagatgatgcctcctcatgtcttgttcgatttggacttgacagggaatacatggttgatcttattgggaagccgagttgcttatgcaagcctgattacatggcccaacggttgattaacttaagaaatgcctaatggctactcaaaggtcatatgggttgagcatgtacaagcggatgaca

SEQ ID NO: 247410 - DNA, 421 bp, Glycine max
  unsure (1)..(421): unsure at all n locations
gaccgacgcgtccggatcaaaagaagatagattatcggttaaatagatggtttgaaaaaccttattctacgcgacccttgtggattagcataacagagacatccatcctcagtcattcgcaatggcccgacgactccttccactcacctccctccgccacctctccatcgccgcctcgcgtcgcctcctctcctctgcactccccgtcgctccccgcccctatccgcccctcaccgcccgcttcgccgtcgtccggtgcctctgcaaccgccccggagactcggcgtactcgcccctgaacacgggaaagcccacctncatcttgtcgtcgatcacggagcgccctncgacggacatggcgcccctgttcccgggctgcgactaccatcactggctcgtcgtcattcacaagcccggcggc

SEQ ID NO: 247411 - DNA, 523 bp, Glycine max
  unsure (1)..(523): unsure at all n locations
ggggntnnagggaagaggtcgtgngatttgantacggaatgtgatacgcactgccgtaccggtccggaattcccgggtcgacccacgcgtccgggagaatttgtatgagggtccccttgatgatcaatatgcttcggctatcagaaactgtgatcctgagggtcctctgatgctctatgtctcaaagatgattccagcatctgacaagggcagattttttgcttttggtcgtgtattctctggcagagtttcaactggtttgaaggtgaggattatgggaccaaattatgtccctggggagaagaaggatttgtatgttaaaagtgttcaaagaactgtcatttggatgggaaaaagacaggaaactgtggaagatgtcccctgtggtaacactgttgctatggttggtttggatcagttcataacaaagaatgctactttgactaatgaaaaggaagttgatgcccatcccattcgagctatgaagttttctgtctcacctgttgttcgtgttgctgttcaa

SEQ ID NO: 247412 - DNA, 530 bp, Glycine max
  unsure (1)..(530): unsure at all n locations
ggttaagttnaagaggtgtgtgatcgagtttagttcatatagcatgctctaccggtccggaattcccgggtcgacccacgcgtccgaaaaaaaaaaaaaaaaaaaaaaaaaaaaaaaaaaaaaaaaaaaaaaaaaaaaaaaaaaagggaaaaaaaaaaaaaaaaaaaaaaaaaaaaaaaaaaaaaaaaaaaaaaaaaaaaaaaaaaaaaaaaaaaaaaaaaaaaataaaataaaaaaaaaaaaaaaaaaaaaagaaaaaaaaaaaaaaaaaaaaaaaataaaaaaaaaataaaataaaataaaaaaaaaaattatatttggaaaaaaataattaatagagaaaataataggaattaaaaaaaattaaaaatattagattgaatttgaatgggaaagggaaagtgaattaataagggaatttatagtggtggtgatgaataatatgaattaaagttaaattataatttaaaggttatttaataaaggtatttattattgtattagtttatttgttagaaatttaagtagaa

SEQ ID NO: 247413 - DNA, 446 bp, Glycine max
gtccggaattgccggatcgacccacgcgtacggacacgcgtacggaagcccatagcagagtctcttgtgattgttgaatacattgatgagacatggaagaacaaccccatcttgccttctgatccttaccaaagagccttggctcgtttctggtccaaattcattgatgacaaggttgtgggtgctgcatggaaatatatttatactgttgatgagaaagagcgtgagaagaatgttgaagagtcatatgaggctctgcagtttcttgagaatgagctgaaggacaagaagttttttggaggagaggaaattgggttggtagatattgctgctgtcttcatagcattttggatccctataattcaagaagtattgggtttgaagttattcacaagtgagaaatttcctaagctctacaaatggagccaagagttcatcaaccaccc

SEQ ID NO: 247414 - DNA, 327 bp, Glycine max
acccacgcgtgcgcccacgcgtccgtgcacagatgcagatcttcgtgaattctttgaccggtaagaccatcaggctttaagtggagtcctacgacaccatcgataacgtgaaagctaagattcaagacaaggaagggatcccacctgaccaacagagacttatctttgcggttaaacagcttgaggatggtcaaacccttgccgactacaacatccaaaatgaatccactctccacctcgtgcttcccctcatgggtggcatgcaaatctttgtcaagactttgactggcaagaccatcaccctcaaggtcgaatcctcggacacca

SEQ ID NO: 247415 - DNA, 538 bp, Glycine max
  unsure (1)..(538): unsure at all n locations
ganagagttntnngaggagtncntncaatggannccatcggagactcgtaggcactgccgtaccggtccggaattcccgggtcgacccacgcgtccgggagaacgaaaccttcatatgcacggtccccatgtttcacatatacggcctggtcgccttcgccacggggcttctggcttccggctccaccatcgtcgtgctctccaagttcgagatgcacgacatgctctcctcgatcgagaggttccgcgccacttacctcccgctcgtgccgcccattctggtggccatgctcaacaacgccgccgctatcaagggcaagtacgatatcacgtcgctgcattcggtgctctccggtggggctccgttgagcaaggaggtcatagagggctttgtggccaagtatcccaacgtcaccatccttcagggttatggtttgacggaatccaccggcgttggggcctccaccgactccttggaggagagtcgaaggtacggcacggcggngctcttgtctccggccacccaggctatgatcgn

SEQ ID NO: 247416 - DNA, 419 bp, Glycine max
  unsure (1)..(419): unsure at all n locations
ccggtccggattcccggtcgacccacgcgtccggcaacctttgctgtggtagtggaagcacacanagagcacaacgttacatatagtaactgtggcgagagtgggtagaatgaaacttggttcagaagggtttgaagtgtctatgcagggacttgggtgcatgggcatgtctgcattctatggtcctcctaagccagagcccgatatgattgcactcatccaccacgccgtccaaagcggtgtcacttttcttgacacttctgatgtctatggccctcacaccaatgaactccttctgggaaaggctttgaagggaggggttagaaagaaggttgaattggctaccaagtttggaatcagctatcctgaagggaaatgggagatccgtggtgatccagcatacgtgagggatgcttgtg

SEQ ID NO: 247417 - DNA, 336 bp, Glycine max
  unsure (1)..(336): unsure at all n locations
tttggtggaattctcaactcccgaggaggcatctggagcgctcctggagatgaatggcanaatggtggtaagcatacctctgatgtgacttagccaaagaaagaagataggagagctagactgcangctcagtttgctcaaatgcgacctgttggaatgccaccatctgttggtcctcgtgtgccaatgtatccnccaggtggtccaggtattggtcaacaattattttatagccaaggccctnctgctatcattccttcccagcctggatttggctatcaacaacaacttatgcctggtatgaggccaggtgcagcttctgtgccgaattttttc

SEQ ID NO: 247418 - DNA, 335 bp, Glycine max
tcggaattcccgggtcgacccacgcgtccgcccacgcgttcgagcggtgcacccaaagaagaggaggtcttgcagtatgccagagttgtaattgattgtgcaactgcaaaccctgatggccagaagagagctcttgtgataggaggaggcatagccaactttactgatgttgctgccacatttagtggtataattcgggcattgaaggagaaggagtcgaaattgaaagcagcaaggatgcacatctttgtgaggagagggggtcccaactaccagaagggtctagctttgatgcgagcacttggagaagagattggcattcccattgagggtta

SEQ ID NO: 247419 - DNA, 543 bp, Glycine max
gagttggtagggtgagtagttggcacgcagtccctacggcatgccgtaccggtccggaattcccgggtcgacccacgcgttcgtccacgcgttcgtccactcgtccgtgcatgcaggccggtgctttggaggatgttgttagggcatctcatcttgagatcattgagcttaagcatactgggggtgaattaaaggcagaattgaacttacttaagcagcatatagaagctcaagtcaaggagcttgaccatagaatgcatcggatagaggaacttgaagagaaagagagagtggcaaacgaaaatattgaaggactgatgatggacattgctgctgctgaagaagaaattaacagatggaaagtggcagcagagcaagaagctgccgcaggcagaggcgtcgaacaggaatttgtggcacagttgtcagcacttaagcatgaacttgaagaggcaaagcaattcatgttagaatcagagaagtaactaaatttcaagaagaacagcttgttgttgcattggatcccaaatgcttcagaaaaaa

SEQ ID NO: 247420 - DNA, 347 bp, Glycine max
acccacgcgttcgaaaatatgttggaaattatgacttcccggggtcacttgaggattatgttcatcgcatggggcggacagggagggctggtgcaaaaggaactgcgtacacatacttcacaggtgctaatgccagattcgctaaggaacttatagccatactcgaagaagctggacagatagtgagtactgaattaacagccatggggcgtggtgcaccacctccaccttcaggtccgcgaggcttacaagaccgctggaggggttatggcagttctcgtacatggagctgatgggacggtgcagacacaccaacttgattgacggaggaaactcccaagaattat

SEQ ID NO: 247421 - DNA, 553 bp, Glycine max
  unsure (1)..(553): unsure at all n locations
ngggtgggttagaggtcgagtagtatgacaggggagttgatggcactgctcgtaccggtccggaattcccgggtcgacccacgcgtccgcggcgttaagctaaacgtaacggagggacgacggtttttggtgcaagcaaacgctcgtgaactcgccggcgtgctctccgccgggaataccaagcgcccctggctgacctggagccaccaccctgtcacccacccgcggctccggtcgggttgcccgttgatgagtgattacgggtgcaatgttccggcgccggatgctcacccggcgagtcagtttatgtcggagtggtttgatatccggggcgggtttccgggtccggatatgaggctatgttctcattcgggttgcgggcgacccgagacatggaagcacgagtttcgaaggtgttcggtttgcgggttggtgaattattgctcacgcgctngtcaggcgcttgattggaagttccggcacaaggcggaatgtgctaccgnttaaaagtggctctattaccacagcgaaaagcgttttccccgtagaaaac

SEQ ID NO: 247422 - DNA, 486 bp, Glycine max
cactcggcgtaccggggtcgacccacgcgttcgattcgcacttcttcttttcacactgccgctgcaacaatggctccagagaagaaactttggaacccaatgagggagataaaagtgcagaagctcgttctcaatatctctgttggcgagagtggagatcgtctcaccagagccgccaaggtgttggaacaacttagtggccaaaccccagtgttttccaaagcaaggtacactgttcgttcctttgggattagaagaaatgagaagattgcatgctatgtcactgtcagaggtgacaaggcaatgcaacttttggagagtggtttgaaggttaaggaatatgaacttctcagaaggaatttcagtgatactggttgcttcggctttggtattcaggagcatatcgatttgggaatcaagtatgatccttcaactggtatttatggaatggatttcttttgtgttctggagcgtcctggctatcgt

SEQ ID NO: 247423 - DNA, 482 bp, Glycine max
ggtccggcattcccgggtcgacccacgcgtccgggcgaaggagagcaattagtgagggacatgttaacgacacacatgcagtgttgaatatggctgcaatgtggctcttccctcaactttgcttgggtggcatagctgaagcattcaatgcaataggccaaaatgagttctattacaccgagtttcctaagactatgtcgagcattgcttcttccctttttggactaggaatggctgtaggatacgtgttatcttctttggtattcagtgttgtggaaaaggttacttcaagagggggaaaagatggatgggtttcagataacattaacaagggtcgtttcgacaagtactactggctttttgccacactcagtgctgttaatgtactgtattatctagtatgcagttggatttatggaccaactgctgatcaagaatcaaaagtaactgaagaaaatggttccaatgaggaagaattgcca

SEQ ID NO: 247424 - DNA, 417 bp, Glycine max
ccggaattcccgggtcgacccacgcgttcgtccacgcgttcgtccacgcgttcgcacgtctatattggatatggctggagttttgttacctttgttgaagtggtttattggaggaagctcttcaaatggtcctaaagtactcaattttcttgtacgttctccgtggagtactattgatgttgttggccagatcaaacaacctatcctttttctctctggattgcaagatgagatggtccccccatcacatatgcaaatgctatatgctaaagcagctgctcgaaataatcagtgtctctttgtggattttcctactggcatgcatatggatacttggctggctggtggtgatcagtactggagaacaattcagcagtttcttgagcagcatgccccagagcaaaaagaagacagatc

SEQ ID NO: 247425 - DNA, 287 bp, Glycine max
  unsure (1)..(287): unsure at all n locations
tgcctcactcttcctctctctccccaccattttccccttcgttcaacccaagaatatcccatcaaccacccttcaaccaaccaagctcaaagtcccaacccaagcctcatccctcacacacctttctctcttcaccaccactcctgctgcttccaaaacctgcttcaaatccaccgtcttcgccaacccccttcacgcccctctctgcctcgctccccaccgtccccgcgacccttccaacgccgtcgtccttcgncgcgccgtcgtcgtctggttccgcaacgacc

SEQ ID NO: 247426 - DNA, 535 bp, Glycine max
  unsure (1)..(535): unsure at all n locations
ggagtttaggctgngttacgcacagatgtatggcatctcgtccggaattcccgggtcgacccacgcgttcggctatcggtattttcattcgagttgcagtttggcggttaaacgtcttcttctcttctggtctcggcatccatcagatccaaattttctcgcgatacgaaggagcaatgtcagatgctaaagttgaggatttgaagaaggaagaagaagttggtgatgattctcctaagaacgaagttgacagtgaaaaatctgcggatgatctgaaagattcggataacgataaaagcgatggaaaccccatgccctcatcccagcatgaggaagcagctgttaagaaaaagtatggagggatgttaccaaagaagcctncactaatatcgaaggatcatgaacgtgcttactttgactctgctgattgggctttggggaagcaaggagcacaaaagcctaaaggaccactttgagcactccggccaaagttgcagccnacacaacaacacgctcgtttaagacacttattttt

SEQ ID NO: 247427 - DNA, 547 bp, Glycine max
  unsure (1)..(547): unsure at all n locations
nggttagtncagtgctgtgtgtctatcnactacagcatgacgtaccggtccggaattcccgggtcgacccacgcgttcgcggacgcgtgggtgccgctgctggctctttcaatggctntggcacaaccggtgatgacgacagtcgcaagaaggagattgctgctttcttggctcaaacttctcatgaaaccacaggtgggtgggcaagtgcaccagatggtccatatgcgtgggggtattgttttatcaacgaacaaaaccaggcaacttattgtgatggtgggaattggccatgtgctgctggtaaaaaatattatggccgaggaccaatccaacttacacacaactacaattacgggcaagctggcaaagcacttggtctggatttgataaacaatccggatcttgtagccacagacgcaaccgtgtcattcaagacagccctatggttttggatgactgcacagggaaacaagccattaagccatgatgtgatcactggaagatgggcttcatatagtgctgacagataaaagggttcgcgtcc

SEQ ID NO: 247428 - DNA, 286 bp, Glycine max
  unsure (1)..(286): unsure at all n locations
ttcccgggtcgacccacgcgtccgccaatacaatcatcaaaatgtgcccttccgcctcccatttccgaccggcattccacgtcgtcgacgccgaccacgacggcaaaatcagccacgacgacctccgcgccttctacgccggagtcggcggagaaggagacgacgtgatcggngcaatgatgacgctggccgacaccaacaaggacgggttcgtggagtacgaggaggtcgagcgcgtggtcgcggcggaaagaaaacccgtggggtgtggggccatggaggacgt

SEQ ID NO: 247429 - DNA, 465 bp, Glycine max
  unsure (1)..(465): unsure at all n locations
ggcattcccgggtcgacccacgcgtccgcccacgcgtccgattatccccagacgccaccgtcgcagcaccagaagaagaagaagagtggtggctgagtgcgacctaactccgcggatggcgccgaatctcgacaggcaccttgtgttccctctcctggagttcctgcaggagcggcagctctacgacgactaccacatcctgaaggcgaagatcgaccttctcaacaacaccaacatggttgactacgctatggacatccacaagagcctctaccacaccgaggacgtcccgaacgatatggtcgaccgccgcgccgaggtcgttgcccgccttaagtcgctcgaagaggccggcgcccccctcgtcgccttcctacagaacgaggctgctgtgcaagaactccgagcggacaagcagtacaatctncagatgctcaacgaccgatatcagattggtcctgcaca

SEQ ID NO: 247430 - DNA, 528 bp, Glycine max
  unsure (1)..(528): unsure at all n locations
ggagcggttctgattatgtagcccgatagnagagcccnttccggtccggaattcccgggtcgacccacgcgtccggtgttctgtttgtgctgccggattcgtatgttgatcctgagaacaaggactatggtgctgaattatttgtgaatggagagatcgtccagagatcacctgaaagacagagaagggtggaaccacagccacaaaggcatcaggacagaccacgatacaatgatagaacaaggtatgtccggcgcagagaaaacatgcagtgaaggaccaatttgagatagggagagggatgtgatgtacatacactatggaagtactttgttacatgcactattttagtcttgcctttggagacattccatatatttccggtggggtaactcaaatgtttgttgtcaaacttctatggctgtatcagatggacacctcttcgttatcatttttactataaacataatgttggactcttttcacgtcaaaaaaaaaaaaaaagggcggccgctctaaaggatccaa

SEQ ID NO: 247431 - DNA, 465 bp, Glycine max
ggcattcccgggtcgacccacgcgtccgatggatcccccaagagggtcctggtgtgtctgattgagaaggaaattgagtttgaaacagtgcatgttgatctcttcaagggagagaataaggaacctgagttccttaagctgcagccatttggatcccttcctgttattcaagacggtgattatactctctatgaatctcgtgcaataatcagatacttagctgagaagtataaagaccaagggactgacttattgggaaagacaatagaagaaaagggtctagtggaatggcttgaagtggaagctcataactttcacccaccactctacaacttggttattaatgttctgtttgcgccattaacgggggctccttcggaccaaaaagtgatagaagaaagtgataaaaagattgagaaagtgctggatgtttatgaggagaggctgtcaaagagcaagtacttg

SEQ ID NO: 247432 - DNA, 543 bp, Glycine max
tagtagttttaggcttggattaaggtactgatgctatgacgtaccggtccggaattcccgggtcgacccacgcgtccgcaagaattggtggattgtgatacaggatataacgaaggatgcaatggaggacttatggactatgcatttgagttcattatcaacaatggcggcattgattctgaagaggattacccttaccgtggtgttgatggtagatgtgacacatataggaaaaatgctaaggttgtttctattgatgactacgaagatgttcctgcctatgatgagttagctttgaaaaaggctgttgcaaatcagcccgtcagtgtagctattgaaagaaggggcagggaatttcaattatatgtatctggtgtattcactgggagatgtggcacagcactagatcatggtgtcgtggctgttgggtatggtacagctaatggtcatgattattggatcgtaagggattcatggggtcctaactggggagaagatggctacaatatgttataaaagaaaattttcttacaacagatcagg

SEQ ID NO: 247433 - DNA, 347 bp, Glycine max
ccgggtcgacccacgcgtccgcgtaaactttctgattgtgattcaagactgcgacgacgatgcaagtgatagacactcggctgggcagaacatgtaactgaatacaatcgaactatggacccatacgtgactgaatcctatggagtcgctatcaaatactgagacgggattctaatggccgctgacatgggaggtacggatggatatacccttcggtacaagaatgatgagcgtattaagcctattggaaagcattatcttcttggtactagcggtgagataagtgactttcaggagattctgcgatacctagatgagcttatcatatatgacaacatgtgagatga

SEQ ID NO: 247434 - DNA, 350 bp, Glycine max
ttcccgggtcgacccacgcgttcgcttcagtcatttgaaaggatcttgtttcttgtggagaatgcacattggttttatgaaggtaatgccgtataaaataatccatctctgaagtcattaaatctgaaggagttcacttctttattgttcaatagctgtgatgtttttcagccttatgtggcccatatagatgatattttcaaggacttcacttcctataaggttcgagttcctgtaactggggcaataattcttgatgaaacatatgaaaggtgcttgctagtgaagggatggaaaggtacaagttggagtttccctcgtggaaaaaagagcaaagacgaagaagatca

SEQ ID NO: 247435 - DNA, 541 bp, Glycine max
  unsure (1)..(541): unsure at all n locations
ggtagtggagctgctgnagttacgcagtgatcgatgtcgtaccggtccggaattcccgggtcgacccacgcgttcgtccacgcgttcgtccacgcgttcgtccacgcgtacgattttagggcatattaatgggcggaaagtcacttctgggtggggagcaaggctttcctatggccatgagtggaattagctcaggtgatctttctaatgcttatagagtctaatatttttatatattgtaattataaatatgttaaattattaattaaatttttaatgtagttattatgaaaatcaacaaatatttattatatttataattaaacgaaaatgtaaatacgagtactgcatatactatttatttgtaattataaataaaacatgcatttctaatatatatgatcttctatatatgaatatgacatttgcttgtgcctatgttatatatagctttgtgcatttaccaatcaatttcagaggcttcaatgttcgacgtggaatatgcgagatggttagaggagcaccaccgcttaatgtggga

SEQ ID NO: 247436 - DNA, 317 bp, Glycine max
cgtccgtattcccgggtcgacccactcgtccgaaaaataaaaaaaaaatgtgacctacaatataaaaaaaaaactatagaacaagaggcaggataatgatatgagaaacttgaaaagaatgaagagctgaaagtataaacagcaacaattgtattgaacgtttgacaaggtctactcacacatataaggctaatctcttgactttcaaggctaagcatggttacttgatttaccatagttcaagtaccaaaaggtggtcgtattaaaccatttccaaagggtattgtatatagtcagcctaccaaccaatgtgttac

SEQ ID NO: 247437 - DNA, 549 bp, Glycine max
  unsure (1)..(549): unsure at all n locations
tggttaggttaaatggtgnagttattgaacagacaccctacgtcatgctcgtaccggtccggaattcccgggtcgacccacgcgtccgataaaacactcatactcacacaaacacttaaacatcatcaatatcgtatattcttgttgtgttgtttaagttgtaaaagaatgtctggggtttgggttttcaagaacggtgtggtgaggctggtggagaaccctgggggtgaggcagtggaaggaagccgtggaggaagaaggaaggtgcttgttcatagagcaagctacgaggttatcacctcttatgcggtgttagagcgaaaactgtattcacttgtgtgggagcgttactatgacgaccctgatcttcttcaatttcactaacgctacaccgtgcaccttatttccctaccaagagactttaacaagttcaagcccattcgcatgtgttacctattgggggaaaaccagacccttttttaagttttgcccatttttgggttggcccaagacacctttttttttttatatatttttggtgccaaaccc

SEQ ID NO: 247438 - DNA, 424 bp, Glycine max
ccgtccgtattcccgggtcgacccactcgtccgctttcaactaaataatatctgtgtcataagaaagcatgaagtttcgcacattcgagtggcgttgtataactcgtatatgattgactggagtgcgggtgctcaagaactgcgtggctaggcttatggagatccatcgtggtgactcatcgaaggcgaagctcgtgactaatatcgaaggtgcttgatcataccatgtgctgctcaggaataacctattatgcactgtttgagcgtaaactgtattcacttgagtgggaacgtctctatgactactgtgatcttctgcagttgcacaaactctcatccgcgcaccttattttcctatcaagagactattgcaagttcaagcccatgctcatgtatgacatagtggtgaaaaacatgtacgctt

SEQ ID NO: 247439 - DNA, 533 bp, Glycine max
  unsure (1)..(533): unsure at all n locations
cagcttttgttatccaacgnacttactcatgacgtactcggttctgaattcccgggtcgacccacgcgtccgaaaaaaaaaaaaaaaaaaaaaaaaaaaattaaaaaaaaaaaaaaaaaaaaaaaaaaaaaaaaaaaatttaaaaaaaaaaaaaaaaaaaaaaaaaaaaaaaaataaaaaacaaccattttaaaaaatccaaattttcatccccctccttcctacctcatacctctttttatattttcacctaaattcatttaattgcccttcattttacaccctttttacttgaaaaaccctgactttcccaaacttaatctcttttacatacatcccctttttaccattttacctaatacccaataggccctttccattcgccttttacaacactttcacatctttaatgcccaattttaccccccttttttcattccatttaaccccttttactttctttttccgccctatttttacccttaatatttgcctaatcccttttgctcctttcctttcccttttttaccttt

SEQ ID NO: 247440 - DNA, 546 bp, Glycine max
  unsure (1)..(546): unsure at all n locations
aggttagggagctggtgngattaagtaggctattctcatgacgtaccggtccggaattcccgggtcgacccacgcgttcgacaacaccaaatactactatgaggttggacttgggaacacaacacggcagttttggtgtgtgactcctcctgaaatcggtcccgatgtgccatatacatttggtctcataggggatcttggtcagagttttgattcaaataaaactctttctcactatgaattgaacccaagaaaaggacaaactgtactattcgttggagacctctcttatgcggataactacccaaatcatgataacattaggtgggattcttggggaaggtttacagaaaggagtgttgcttatcaaccatggatatggactgcaggaaaccatgaaattgattttgctccagaaattggtgaaactgtacctttcaagccttatacccaccgttaccatgttccttataaagcatctcaaagtactttacccttctgggattctatcaagagagctttatcacacataattgtttttggctc

SEQ ID NO: 247441 - DNA, 543 bp, Glycine max
tagttagttacggttggttctagccctgatgcactgctgtaccggtccggaattcccgggtcgacccacgcgttcggtggccaacgctcgggttcctggcgtttgcggcggcagcggtggttgagtggccggtgggggctctcgtgtattgctttcgccacacaaagggtcgcaaaatcatgggtcatcccgctacagtcatatatccttcagtcaccaatgccatccccatctaagttctaactatatgttaattaatttccccatgataataatgttatatatatatatatatatatatatatatatatatatatatatatatatatatatatatatatatatatatatatgtagatagatctatctataaatatgtgtcttaaaatagcgttccaatgtatattatgcgtaacgcttggattacggagtcggtcagataaatttgcttttccgtatgtatgcacaaaataagcttaaacaatcttttttggccctttttaccgtgatttatatagaaacccatggaagggactcttttcc

SEQ ID NO: 247442 - DNA, 549 bp, Glycine max
agttagtaagctgagtaactggccagcgctcctacacgactgcggtaccggtccggaattcccgggtcgacccacgcgtctcgcccacgcgtccggaaacatggcttccttaagctccttagtgctgctccttgcaggtcggattctatcccctcaagttcttgcaaactatgagaatcccccagtgtacaagcctcccactgagaaaccaccagtttataagcccccagttgagaagcctcctgtttacaaacctccagttgaaaacccctcaatttataagcctccagtagagaagccaccagtgtacaagcccccagttgagaaacccacagtgtacaagcccccaattgaaaaacctccagtgtacaagcccccagttgagaaaccaccagtgtacaagcccccagttgaaaaacccccagtttacaagcccccacgtgaaaaacccctattgtacaagcccccattttgaaaaccccccagtgtacaatcccccaatttagaagcccccagtatacaagccccaattttagaaaccccattttt

SEQ ID NO: 247443 - DNA, 549 bp, Glycine max
  unsure (1)..(549): unsure at all n locations
agtanatgtagatggtgagtacttgaacagcagccgtcgcgcactgccgtaccggtccggaattcccgggtcgacccacgcgttcgctgaattttatgtatagtaataccttgagcattacttcaccacctgctttattggatgggttgatggctgctgacaaattcgaagttgcttcctgtatgagatactgtagccgattattgcggaatatacctatgacacctgagtctgcattgctttaccttgagcttccttctagtgtcttaatggctgatgcagttcaaccattgactgacgcagcaaagcagtatcttgccagtcgatacaaagatataacaaatttcacatatgaccaggttccaggaagaggttatgggcttgcctctagctggaatagaagcaatattgtctagtgatgaactccaggttgcatcagaggatgctgtatatgactttgtgttgaagtgggtccgaacacagtatccaaaacttgaanagcggagaagaatcctgggtacacgaattgtcccggttaattgcgttccc

SEQ ID NO: 247444 - DNA, 480 bp, Glycine max
ggtccggcattcccgggtcgacccacgcgtccggtcccaattttctagggttatattcattttccgatggcttctgcagatgttgagtaccggtgctttgtcggtgggctcgcttgggccactgacgaccatgccctcgagagagccttctctcagtacggcgaaatcgttgaaacgaaggtctgtttgttgcaggcatcacatctgatctcacacgattcggattcggaattttctcgatcccgttctgatctgtgatctctgatctgtttgcgttacttgatcttatgatacttgcgttactatatgattcttttattactcacgccaataggtaccgttcatcttcttcctttcaccaaaggcgaaagatcgatcggcttctaattggttctggctttggttttttgtgctgatttgctatagatctgataattggtttactggcttatgttcagattatcaacgatcgtgagactg

SEQ ID NO: 247445 - DNA, 549 bp, Glycine max
  unsure (1)..(549): unsure at all n locations
agttagtntagaggtangtttatgtcagctactctcatgcacagtccggtccggaattcccgggtcgacccacgcgttcgtccacgcgttcgtccacgcgttcgaccttatcaacatcctttacctcttaatttttctgatcaggttaaaactactattcttcagaaaaaggttaaaaaacccagcaccaagtccaccatctcttccaataatcggaaacctccatcagctgaagaaacagccacttcaccgagccttgtacgacctctcacagaaatatggccctaataatatcctctctctgcggttcgggtcccaacccgtcctcgtcgtttcgtccgcatccgcagcggaagaatgtttcaccaaaaacgacatcatcttcgcgaaccgttttcgctcttcattgacaaagtacatcggcttcaaccacaccattattacagcatcatcgtacggcgaccactggcgcaacttacgtcgtataagctcgctcgagattctcttcaaccaccgtgtcaactcctttttatgggggcccaaagacca

SEQ ID NO: 247446 - DNA, 367 bp, Glycine max
gccgtaccgtccgtattccctggtcgacccactcgtccgcccactcgtacgttcactcgttcgaacataaataatgggtgcccttagatcacattggggaatggtgaaggctaaggccagctaatggctacaccaaatccaacactggaactttacactgccttcatattgacagagatccaaccactgtagctcgataaattgcttgtacctatcctggtctcaatgcttttcatgttaatacatcgggggactctaccaatgattctctttcaagtggatcacacctcaatcatcttcaccctgagcatgctgcccctgacgattcgaatctgcatgctgatgatcctcacaatattcatatggg

SEQ ID NO: 247447 - DNA, 417 bp, Glycine max
tgccgtaccggtccggaattcccgggttgtagaagaccagcaagaaaagggaagggaggagaggggagagaaaatgccaatattagaaggttgtagatggaattagtgaacatacccgctcaaagcgacacccaaattacacgcacaaccacacctttaaattctccgcagaaggaaaaaaaggaaaaaagataaagaagccaaaagtccctcgttccatttccccctttcctccgcccggcgagaaaatgagagaaatcctccacatccagggcggccaatgcggcaaccagatcggagccaagttctgggaagtaatctgcgacgagcacggcatcgaccacaccggaaagtacagcggcgactccgaactccaattggaacgcatcaatgtctactacaacgaggccagcggcg

SEQ ID NO: 247448 - DNA, 527 bp, Glycine max
agggtgtgtctgattaaggatctcatcgcacgacgtaccggtccggaattcccgggtcgacccacgcgtccgctaacgttcattccgctcttcgctttctttcacatccaatcaacgaaaaatgctggctggtttcgacaaatcggtggcaaagagcccagagggtcttcagagccctcactcaaattccgtctcagccctaaaagacgtttttctcgcagagcacttctcttccgttcaccctggttccgtcaccgttaaccttggctcttccggtctcttggcctattctcttcacaaacagaaccccctcctcccaaggctgtttgcagtcgtggatgacattttctgtttgtttcaaggtcatcttgagaatgttgctaaccttaagcaacaatatggattgaacaaaacagcaactgaggtgatcattatcattgaagcatacaggactctaagagatcgtggtccctatcctgctgctcaggttgtgagagacttccaaggcaaatttgcatttattctgg

SEQ ID NO: 247449 - DNA, 551 bp, Glycine max
  unsure (1)..(551): unsure at all n locations
tagtttagggatagtggtgtngtttctgtcatcggagtcgcactgccgtaccggtccggaattcccgggtcgacccacgcgttcgagcatgcgcaaatttctactatttttcaatggcttctgcagatgttgagttccgttgcggtgggggtgggcttgcttgggtcaccggcaacgatgccctcgagaaagccttttcaatctacggcgacatcgttgaatcgaaggttatcaacgaccgtgagactggaaggtccagaggattcggatttgtgaccttcgcctcagagcagtcaatgaaagatgcgatcgcaggaatgaacggccaggaccttgacggtcgtaacatcactgtcaacgaagctcagacccgcgccagccgtggtggtggtggaggcggtggtttcggaagtggtggtggatacaaccgcggtagcagtggatatggtggtggtggtggcggcggctgataccgtggtcctcgtgaaagtggatacaaccccctatggttagggtggaagtgtgggaaaccgtgtattttggaccaccga

SEQ ID NO: 247450 - DNA, 527 bp, Glycine max
caggtgtgtggtttgatgaacgcgatcgtgcagactatcggtccggaattcccgggtcgacccacgcgtccgcacaaaagtgttccacttgagtgaaaagtagtgtgttaagaactaaacaatttttcaatggcgtccaagaaacaagaggagcgagctgaggcagctgcgaaagttgctgccaaagaactcgaacaagtcaacagagaaagaagagaccgtgatttcggtgttgatgctgaacaacaacaacaacatcatcaggaagatcaacaaaaacgtggtgtaatcgggtccatgtttaaggcggtgcaagacacctacgagaacgccaaggaagctgtcgttggcaagaaagaagctactaataacgcgtacagtcatacagaggttattcacgatgttaacattcagcccgatgacgtgtcggcaacgggcgaagtcagggacatatcaatcacaaagactcatgatatctacgattctgacacggaccacatcaacaactaaaccggtttcaaagacgg

SEQ ID NO: 247451 - DNA, 524 bp, Glycine max
  unsure (1)..(524): unsure at all n locations
aagcggnattgtgatgacagaaggctataggtacgccctaccggtccggaattcccgggtcgacccacgcgtccgcccacgcgtccgggctgggcacgggggtcccagtcccgaacccgtcggctgtcggtggagtgctcgagctgcttccgcggcgagagcgggtcgtcgcgtgccggtcgggggacggattgggaacgggcccttcggggcctattcaccgggcgtcgaacagtcaactcagaactggtacggacaaggggaatccgactgtttaattaagacaaagcattgcgatggtccctgcggatgttgacgcaatgtgatctatgcccagtgctctgaatgtcaagtgaaggaattaaccaagcccgggtaaccagcggagtaactatgactctcttaagtagccaaatgcctcgtcatctaattagtgacacgcatgaatggattaacgagattcccactgtccctggctactatccagcgaaaccacaggccagggaaacgtgcttggcgggaan

SEQ ID NO: 247452 - DNA, 552 bp, Glycine max
  unsure (1)..(552): unsure at all n locations
tagtttagttctagcgggtcnattttaagtatttgactctaatgcacgtaccggtccggaattcccgggtcgacccacgcgttcgcggacgcgtgggcggacgcgtgggtggcacaagaaagttttgaagactagagacccaagtatggtatctgttggatggaggcgttaccagacaaccccaatttatgccattgaggatagtaatggaagggatcgtatgctaaaatatactccagaacacatgcattgccttgctatgttttggggccctcttgctcctaccaacactggggttgtagcctttcagaacttatcaaacaatcaggcaacatttaggattactgcaactgcagttgtacttgagtttaatcatgcagcaaggatagtgaagaaaatcaaattggttggttatccatgcaagatattcaagaagacagcacttatcaaggatatgtttacctcagatcttgaagtagctcgttttgaaggtgcagctattctgacagtcagtgggattatggggcacgtcaagaaagctgtaaaagaaga

SEQ ID NO: 247453 - DNA, 546 bp, Glycine max
  unsure (1)..(546): unsure at all n locations
tagttagtntacgtgtgtatttaagtagtcatgcgatgccgtaccggtccggaattcccgggtcgacccacgcgttcgaccacgcgttcggccttnctagaacgaaacaaataagaagagcatttttccctcaccagggaagagaaagcatacaatggccgatcaacttaccgatgaacagatctcctagttcaaggaagccttcagcttgttcgacaaggacggctatggttgcatcacaaccaaggagcttggaactgatatgcgttcattggggcaaaacccaactgaggcagagcttcaggacatgatcaatgaagtggatgctgatgggaatggtaccattgacttacctgagttcctaaatctcatggccaggaagatgaaggacactgattctgaggaggagctgaaagaggcattccaggttttcgacaatgaccagaatgggttcatctctgctgctgaactccgtcatgtgatgaccaacctcggggagaagctcatccgatgaaagggtgatgagatgattttcgaggcccttat

SEQ ID NO: 247454 - DNA, 242 bp, Glycine max
aaaaaaaaaaaaaaaaaaaaaaaaaaaaaaaaaaaaaaaaaaaaaaaaaaaaaaaaaggaaaaaaaaaaaaaaaaaaaaaaaaaaaaaaaaaaaaaaaaaaaaaaaaaaaaaaaaaaaaaaaaaaaaaaaaaaaaataaaaaaaatataaaaatataaaaaaaaatagaaaaaaataataataataaaatgaattcataaaaattaaaagaaaataaatattaacataataattatatgaaa

SEQ ID NO: 247455 - DNA, 383 bp, Glycine max
  unsure (1)..(383): unsure at all n locations
aattcccgggtcgacccacgcgtccgaagatgagtagttcatcaaggccggtgccgaggagagagagtccatggcgagtcaccgtatagaatcatcctgaacccaaagctcaccgctgcaatgaccgtgtcgaggacgttattcaggcttgctttgagggaaacccattcaagactgttccgggacctttcaagctcttctggcagtgcatgcgttccaaacccggtgaggaaccaacagccccatttacttatctggatttggagcctctaaagagagaaacggaacctgtgaaacctgagtagtgtcacttttacttacaaatgccttaacagctntggcactgcatggtcctttagtggtttctaaatttcccttcgtgt

SEQ ID NO: 247456 - DNA, 558 bp, Glycine max
  unsure (1)..(558): unsure at all n locations
tagtttagttagacgggtgtagtaattgaatcgnatgctatagccactgacgtaccggtccggaattcccgggtcgacccacgcgtccggcaacacgaacgagttaactgccgatggtactagcactgcaataatttagcctggtgggatgattaagtctggactactaacattcgctattactgctaatcctatttctttgaagaaggggatggattgaactgcaaaggatctgttaaagtactcgaatgatagaaatgtacctgactaaagaactgagcatattcgagctctatgctcaatttctgctggaaacgacgattatgtaccgtaactctgattgcatgaagcatattgacgactagtgtgtcagatgggcagatatctaatgagtcttaaccatcattggaatcctgtgatgtaattgctgtagggatgaatgtatacataacgctttgaggacagattacactaatgaaagctctttgcataatgaaattttgaggacaggtatttataacatgtgggcttatagaccattttcctagtacccaatcg

SEQ ID NO: 247457 - DNA, 525 bp, Glycine max
  unsure (1)..(525): unsure at all n locations
cggctgtgtgggttgctgcagccgtagtagacacgatcggtccggaattcccgggtcgacccacgcgtccgccaaatcaaatctctcacaagtcaaaactcaagctccatatttcttttttctctttacacgtctgaattcatttcttctcacatggacgagatcgacgtgcctcctttcttcgtatgccctatctcattagagctcatgaaggaccccgtgaccgtctccaccggcatcacctacgaccgccacagcatcgagaagtggctcttcgccgccgtgccgaagaacaacacgtgtcccgtcacgaagcagcccctcctcccggacctcactccgaaccacacgctccgcaggctcatccaagcctggtgcaccgtcaacgcttctcacggcgttcagagaatccccacgccaaaaccttccgtcgacaaaaccctcatcgagaagctcctncgggacgccttggcttccgattccccgagccttcaacttcggtcccttcgaacccttaagttcatt

SEQ ID NO: 247458 - DNA, 530 bp, Glycine max
  unsure (1)..(530): unsure at all n locations
cggcgggtgtgnngattacggactctcatagtagtacacctttcggtccggaattcccgggtcgacccacgcgtccggtttgtttgttcaaactattttcttctttttttctctgacgcgtggaaatgatatgcacgcacgcttctgtgggagaggaagtaggaaatagcagagtttagactttagactttagagtcagtgtacgcagaagagtaaaatcgattggcgatgatggagttgaaagagattcagagactcgaaggccacaccgataaggtttggagcttggcctggaacccgaccaccggtcacgccggtatcccactcgtcttcgcttcttgcagcggcgacaaaaccgtccgaatctgggagcagaacctctgctctgggctttgggccttgacggcggttctggatgaaacgcacacttgaactggtcgatcttgggcttggtcaccgtcgggtaagctattggccactgcaagcttcgatgccaacactgncatttgggaaaattgtgggtggtgatn

SEQ ID NO: 247459 - DNA, 517 bp, Glycine max
  unsure (1)..(517): unsure at all n locations
ngggagtgnnttcnccccatcgaatctcattgntatgctcgtaccggtccggaattcccgggtcgacccacgcgtccgcccacgcgtccgtgcattggtgtcatcgggccttgctgctttgggatacaaatacattaatttagatgattgttgggccgaacttaatcgagaccatcagggaaatatggttcccaaggcttcaacatttccttcaagaattaaagctctggctcattatgttcatgggaaaagtttgaagttggggatatattcagatgcaggaaatcaaacttgcagtaaacgtatgcctggatcactaggacacgaagaacaagatgcaaaaacatttgcttcttggggaagtgactacttgaagtatgataattgtgaaaataatggtatattagccacagaaaggtatccaccaatgagtgaagctttgttaaaaactggaaggccaatcttcttctctatgtgtgaatggngatggcaagacccagccactttggccaaaaat

SEQ ID NO: 247460 - DNA, 507 bp, Glycine max
  unsure (1)..(507): unsure at all n locations
ggggaggtgtcgtcttatcagaaaagattgttcgnatcgtctcggtccggaattcccgggtcgacccacgcgtccgcccacgcgtccggtttatgtatcttgcattcctacttctatttgttttctctagccaatgcttgcttggaggagcagatgcttcccccagacaagtgattgacacagaaggcaagaaagttcgagctggcgtagattactatatccgaccggtcccaacaaccccatgtgatgggcgtgggccgtgtgtggttggaagtggctatgttctcatagcaaggtcatccaaccacacttgccctcttagtgttgcggtggtggagggtttccgtggcctagcagtcacattcaaactagttaaccctaaaaaaggggtcattagggtttctactgacttgaacatcaaaacctccctaactaacacaagttgtagtgagtccacggtctggaagctagatgcctttgatgattcaactggacagtggtttgtga

SEQ ID NO: 247461 - DNA, 444 bp, Glycine max
ccggtccggccgggtcgacccacgcgtccgcagattattgagaagaatatcctgcgcacccagacactcttgtgtgatctggtgatgcgagatgcacccctgggaattgtgtcagagagccccaatataatggatcttgtgaaatgtgatggagctgccctcatatataagaacaaggtatggagattaggagtaacaccaagtgaatcccagataagagagatagctttttggttgtctgagtaccatatggattccacaggcttcagtacagatagcttgtctgatgcagggttcccatcggctctttctctgggtgatgttgtttgtggaatggcagcagttagagtaactgcaaaagacgtagtattttggtttcggtcacacactgctgcagaaatccgatggggtggtgcaaagcatgaagctggagaaaaagatgat

SEQ ID NO: 247462 - DNA, 426 bp, Glycine max
cggaattcccgggtcgacccacgcgtccgcggacgcgtggggcaaccaccatgccttcccgaagaagaactctcttgaaggtcatcattctcggtgacagtggggtggggaagacatctttgatgaaccaatatgtgaataagaagtttagtaatcagtacaaggcaaccattggagcggattttttaaccaaagaagtgcaattcgaagataggcttttcaccttacagatttgggatacagctggccaagaaagattccaaagccttggagttgctttctatcgtggtgctgattgttgtgttcttgtatatgatgttaattcgatgaaatcatttgacaaccttaataactggagggaggaaattctgattcaagaaacaaaatagatattgatggtggggacagcagagtggtgtcagaaaa

SEQ ID NO: 247463 - DNA, 511 bp, Glycine max
  unsure (1)..(511): unsure at all n locations
aggtttctgancacctagaaaatagtatgcactaccgnttcggtccggaattcccgggtcgacccacgcgtccgggaactgagcaagcttttggggtctgttaccattgccaacggaggtgtcttgccgaacattcaccagactctgcttcccaagaaggctggaaaggggaagggcgaaattggatctgcctctcaagagttttagggtttttgttttacccatttggactatagttttgattttattgcgtttgtaacatacatgtttcggttattttctacatgtcttctctgagaaattaggtgcttctcagtctgatgaactggatggtgtattatcacttttgaatcagatgtgaatgtgaagtgctatttggattaaaaaaaaaaaaaaaaaaaaaaaaaaaaaaaaaaaaaaaaaaaaaaaaaaaaaaaaaaaaaaaaaaaaaaaaaaaaataaaaaaaaaaaaaaaaaaaaaaaaaaaggggcgccctttttaaaggaccac

SEQ ID NO: 247464 - DNA, 510 bp, Glycine max
  unsure (1)..(510): unsure at all n locations
ngagaggtgtctgagatggggatctaatgcaatgctctaccggtccggaattcccgggtcgacccacgcgtccgcacaaacagaggctacgtacgatcaaattaattaagatggcggaagtgaagaacaaacaagtggttctgagggactatgtgagtggttttcctaaagaatcccacatgaacatagttgaaaggaccacaatattgaaactttcacaaggttccaatgaatggcttttaaaaatctctacctttcctgtgacccttacatgaagaatgcttcatgaccaaggtggaaaggcctcgacgtgtttggcacctatacacctggctctccattaacagggtatggagtgtccaaagtcctagaatctggacacccagattacaagaaaggtgatttaatggtgggatctacaaaatgggaagaattcaacttggtgtccccaactcaaatacttttcaaaatgaaccaaccgatgttcccttttatattataccggggttt

SEQ ID NO: 247465 - DNA, 524 bp, Glycine max
  unsure (1)..(524): unsure at all n locations
gttggggtgggggggttagtatctgcaataagaatagacagtatgctgtaccggtccggaattcccgggtcgacccacgcgtccgggaacaagagcatctccaatattctggaatgcggggaattatagtggagatactgttatcattgagattttttatctaccagtatggtctggtatatcacttaaatattacgaagaaaggcacaaaaagttttctggtctatggcatttcatggttggtgatattcgtaatattgtttgtgatgaagacggtatctgttgggaggcgtaaattcagtgcaaattttcaacttgtcttccgactaatcaagggaatgatattcctcacttttgtctcgattcttgtcattttgattgctcttccgcatatgacagtgcaagacattgttgtttgcattcttgctttcatgccaactggttggggaatgctgcagattgctcaagcattaaaacctgtagtacgcncggctgggtttttggggatcagtgaaaactcttgc

SEQ ID NO: 247466 - DNA, 526 bp, Glycine max
  unsure (1)..(526): unsure at all n locations
ggaggggagggagtggagggtcngtctaaaagaaaggacagtacgcatctctcggtccggaattcccgggtcgacccacgcgtncgatcacatgcctcttttctataaattcccaatccctttcccagtttccaccaaaacctaaaggtaaacctaaacctaaacctaaacataaactgaatttcccaaatccccttcccaattttcaccaaaacctaatactcccaaaccaatcttcgatcatggccgccgaatcacaacctcaactaatcgaagagagaagagaggagcaagaacttaagtacctggaatttgtgcaattcgcgaccatccaggccctgatgcgctgcgccatcctctactcctacgccaaggagcgcgcgggtcctctgaagcccggcgtcaacaccgtcgaggaagccgtgaaagaccgtcgtggctccggtctacgacaggtcccacctcgtccccggcgaggtcctcaaatacgccgatcgcaaggtcgccgaattggaccgccacgttt

SEQ ID NO: 247467 - DNA, 499 bp, Glycine max
ggagtgtttgtcttggggggcgatgtatagatgtctcggtccggaattcccgggtcgacccacgcgtccgatcaagcaagtggatggtataatcggctcattgggtagactactaatagaagatcaggtcaagatcgttgcagcattaaaagaagctggaaacgttaagagattttttccatctgaatttgggctggatgtggaccgtcacgatgcaactgagccagtcagagaagttttcgaggaaaaagcgaaaatccgaagagtaattgaagctgaaggaattccatacacttacctatgttgccatgcctttactggttacttcttacgtaaccttgcacagattgacatcactgttcctcctagggacaaggttttcattcaaggagatggaaatgtcaaaggagcgtatatcactgaggccgatgtgggagtttttacaatccaagcggcaaatgaccctaatgcctttgacaaagctgtgcacattagactc

SEQ ID NO: 247468 - DNA, 524 bp, Glycine max
ggtaagcttgtcttcacgtaaagacacagtcagcattgctcgtactcgtccgtaattcccgggtcgacccacgcgtccgcggacgcgtgggaaaaaaaaataatttaaaaaaaaaaaaaaaaaaaaaaaaaaaaaaaaaaaaaaaaaaaaaaaaaaaaaaaaaaaaaaaaaaaaaaaaaaaaaaaaaaaaaaaaaaaaaaaaaaaaaataataaaaaaataataattaaaaaaataaattttaaaaaaaaataataaaattaaaaataaaaaataaaaaaaataaaaaaaaaaaaattaaaaaaaaattagaaatttagtaaaaatgatttggtttttaatatatttggttttttaaaatttttggttttttatagggggatttaataataaatatttttgattatttttgaaattttaaattttggataaaattaattgttgaatggttaattatttgttggggaatttaatgtttgttagttttttaatttttgtatttgttgtagtttatttttttttttt

SEQ ID NO: 247469 - DNA, 499 bp, Glycine max
aggtgtgtctatgaaggggggttgatggaatgctgtaccggtccggaattcccgggtcgacccacgcgtccgccgtttctttcacttcacaaaaatgaaaaacatgaaattgtgttcggcgatgctatgcttatcactagcgttccttcttggggccacagcagaacaatgtggcacacaagctggtggagcgttatgcccaaatagattatgttgcagcaaatttgggtggtgtggtgacacagattcctactgtggagaaggttgccagagccaatgcaaatctgcaacaccctcaacaccaactgcaacaacacctagtagcggtggagatattagcagactcattagctcttctctctttgatcaaatgcttaaataccgaaacgatggccgatgttctggccatggattctacagatatgatgctttcattgccgatgctggctctatcaatggctgtggcacaaccggtgatgacaacactcgcaagaaggag

SEQ ID NO: 247470 - DNA, 515 bp, Glycine max
ggaatatggttcctcaatagaaaggcgatgtattgtcactgctcgtaccggtccggaattcccgggtcgacccacgcgtccgcccacgcgtccgcacaattgtttgatgagctggttgagtctaaagttcatataaaagtttcaaccctaaatgccatgcttgatgtttactgcttaaatggtttaccgcaggaagcagattcactgtttgaaagagcaattagtataaaaatacatcctgattcatcaacatttaaacttctttataaggcttacactaaagccaaccagaaggagcttcttgataaattgctgaagcatatggataaagatggtattatcccaaataagaggttcttcttggatgctttgggtgctgttgcgtctttaccagcaaattcagaatctgctaatgctgcaactgattcaaacacagcaaattcagaatctgctaatgctgcaactgattcaaacgcatcaaattcagaatctgctaatgctgcaactgattcaaa

SEQ ID NO: 247471 - DNA, 508 bp, Glycine max
  unsure (1)..(508): unsure at all n locations
nggtagggtctcgtcaaagtagggaggaagtgaagtgattgctgtaccggtccggaattcccgggtcgacccacgcgtccggaaacattttccaaattaatggggcgttggatgaaaccagaggtttaccctctattggctgcaatgacctttgttaccggcatgtgtgtgttccaactaacaagaaatgtgctcgggaaccctgatgttaggattaacaaaactcggagaagcatggcagtgttggagaacagagaagagggagagaaatatgctgagcatggcctgaggaagttccttcgtactcgaccaccagagattatgccaaccatcaaccacttcttcagcgaggataaatgaaagagtgtcacacgtagtagaataccaaaataattcaacttatggaagaaaaatcaaagtttctaaatctgtcaagcagcttgcatatgaactttgtcatattacgtnngtgttgatgtctcttcgcgtcttgtaaatgtcggcatca

SEQ ID NO: 247472 - DNA, 444 bp, Glycine max
  unsure (1)..(444): unsure at all n locations
ccggaattcccgggtcgacccacgcgtccgcacaacccatggccaccacctncgcattcctcctccttcccctcctcctgctgctccacctcgccatcgccgctcacggcatcggcatcaactacggcacgctcggcgacaaccttccaccgcccgcggcggtggcgaacttcctgaagacgaagacgaccatcgaccgcgtgaagatctacgacgtgaacccggacatcctgcgggccttcgccggcagcggcatctccgtgacggtgaccgcccccaacggcgacatcgccgccttaaccaaaatcgactcggcgaggcagtgggtggcgacgcacatcaaaccctttcaccctcagaccaaaattaattacatcctcgtcggcagcgaggttctccactggggcgacaccaacatgatccgcggnctcgtccctgccatga

SEQ ID NO: 247473 - DNA, 510 bp, Glycine max
  unsure (1)..(510): unsure at all n locations
ngggaaagttttgcatggagggagaagtatgctctaccggtccggaattcccgggtcgacccacgcgtccgaggacattcaagcttacagatccatcgtcagagcactgccctcctggagagttcgtccgagaaatccctctttcaacccgaattcctgaagacgccaacatagaagcatactacgatgggccaggatctgtgcttgagatcctggtgccaaaacatcgcgtgggacctgaagagcatgaagtccgtgtttgcctccgccctcatctgggagggaatgatcttaagttaacttgagataataggcacttaaaaaaattgttaggcattccagtatggttcgtatgtcattgtttttctaaccttgtaccatacactgttatttgcaataagaattgtgtgtcttatgtttgtctctagcaattntagctcactgactgccctggttcttttggttccgtgcatctgtatgcttctgattgtaagcaggattgaacagctt

SEQ ID NO: 247474 - DNA, 516 bp, Glycine max
  unsure (1)..(516): unsure at all n locations
ngtgagaatagtatcntgtaagaagggagagataatgatgtactcggtccggaattcccgggtcgacccacgcgtccgaatgtgccaagctcgagagtctaaaattcaaatcctagcttgggttaacttagatatgagtgctctatttttaattttccttatccttcttgttgccgatggggtccttgtccgaggaagtataaatattacagaaataagcttcgatcaaaactatgaggttacgtggggtgataatcatgttgtctccttaaaccaagggaaagaaattcagctcacaatggataactcttcaggatccggttttggatccaagatgtcatatggctctggactattccatttgaggatcaaagtaccagataggaattctgctggagttgtcacagcttactacttaacttcacaaggaagaagtcatgacgagttagactttgaattcttgggcaatagagaagggagccatatagattaccaaaccaatgtgtttgtngacgg

SEQ ID NO: 247475 - DNA, 506 bp, Glycine max
  unsure (1)..(506): unsure at all n locations
gggaggggtctgtctatgagggaggagtgnaggcatggctcggtccggaattcccgggtcgacccacgcgtccgatcaggagcgactcaagccgcaggatgagaaggccgaggaagacagatccaaggtcgatgatctccgaggctctcccatgagcgtcggaaacctcgaagagctcatcgacgagaatcacgctattgtctcctnctccgttgggcctgagtactatgtcggaatcctgtctttcgttgataaggatcagttggagcctggttgtgctattttgatgcataataaggttctttctggtgttgggcttcttcaagatgaagttgatccaatggtctctgtcatgaaagttgagaaggcctctctggaatcttatgctgacnatggtggtttagatgcccaaatccagaaaataaagaagcagttgagctacccctgacgcatcctgaactatatgaagacattggtatcaagcctccaaggggggtcatttaaat

SEQ ID NO: 247476 - DNA, 501 bp, Glycine max
  unsure (1)..(501): unsure at all n locations
aggtgttntaaatagaagtagantgtactgctcgtcccggtccggaattcccgggtcgacccacgcgtccgtttcactggaaggagaccaggaagataaaaccgacacaaaaatctagtcctagctaggaatcaaacaggggcgatctcaccttcaagaacacatcgccatggcaaggaacttgcttcttgtgctttttgcagtagccacccttctncatggctcagcagcccaaaccagacacatggtcggtgatgccacgggctggatcatccctgctggcggcgctgccacctacaccgcctgggcttccaacaaaaccttcaccgtaaacgacactctcgtgttcaacttcgccaccggccaacacaacgtggccaaggtaacgaaatcggctttcgacgcgtgcaacggcgggagcgccgttttcaccctgacctncggtccagcgaccgtgaccctgaacgaaacaggggagcaatactacatttgcttcgttgg

SEQ ID NO: 247477 - DNA, 513 bp, Glycine max
  unsure (1)..(513): unsure at all n locations
nggggtaggttgtctttcttttgttgggaggaagtgactggactgctcgtaccggtccggaattcccgggtcgacccacgcgtccgtttctctatataagtttgttctttcattttcaaaattttatcacatgctaacattattgttttcaatgtttcagaattgttttacaaaaatattggaggagtgtcttataaggctgatgtctatagctttggaatgcttttgatggaaatggcgagtaggagaaggaactcaaatcctcatgcagaacattcaagccaacattacttccccttttggatttatgatcaatttaaagaagagaaaaatattaacatgaacgatgcttctgaagaggacaacattctatctaaaaagatgttcatggttgcactttggtgtattcagttaaatccaagtgatcgtccttcaatgagtagggtagtggagatgcttgaagggaagattgaaagccttgaattgccttcaaggccttcttttcataaaaac

SEQ ID NO: 247478 - DNA, 500 bp, Glycine max
  unsure (1)..(500): unsure at all n locations
agcctcttcatgtggggagttatggatcgtcgtaccggtccggaattcccgggtcgacccacgcgtccgctcagtctagtattttcatacatgaaagattttctgcttctaggaaagtggttgaaagagagtacaaacttttgaatctgctggatttcactagcaaaagaaagcgtatgtcagtgattgtgcgtgatgaggagggcagtctttttcttttttgcaaaggggctgacagtatcatatttgatcgattgtcaaagaatggaaaacattatttggaggctactaccagacatctaaatgaatatggagaagctggtttgagaacactagccctggcttatagaaagcttgatgagcaagaatacactgcttggaacaatgaatttcagaaagccaaagctgctgttggggctgacagagattcaatgcttgagcgggtatcagatatgatggagaaagggttgattcttgttgnggctacagctgttgaagac

SEQ ID NO: 247479 - DNA, 504 bp, Glycine max
gggaagcttagtccatgaagaggatttattggatctgctcgtaccggtccggaattcccgggtcgacccacgcgtccgcccacgcgtccgcccacgcgtccgtgataacttaattagtgttcatgaatatgtcaagccttactttagtggttctaaattgaaaagctttctagctggtcataatatcaccattactgatggtattgacaaaactagtgcaactttgcaatttagaaagttagcagattgtgattttctcaagagaaactttaagcagatgtctaatgttttgtgggtggctcctgaggacaaggcgagtttatggtcacaacttcattatgtttcgtgtaataatctggaaatgcaagaagcttatcttgtcaatctcgtaaatgtgttacgagaattgtatttgcacagtccagaggaagctcgccaattgagaagggaagctctctctcgtattgaatggctgcaaaaagcttattgtgcctaccatagcac

SEQ ID NO: 247480 - DNA, 519 bp, Glycine max
  unsure (1)..(519): unsure at all n locations
ngtgagaggaggtgtgtaatagaggagagaaagtatgctgtactggtccggaattcccgggtcgacccacgcgtccggttgacttttagtgatgtatgttttagttgtctatttgtttgtgtatcttgtgctgcggtatgtactgtcatcgtaggtgagttcacttgtttttatttggggttacaacttttctttttgcagaatcgtcatagaaatccagcaatgtctggtggttattctcagcaaggttaccaaacttgggcaaccaatagctgggggtccccttgttgttctattgcacaatcttgttatgggtatgtgcaggcaggaacatactctggtacaccccagtattacatgcctcnagcaacaatatgcaggctattctccccagtcatctggtggatattctgccaccaacctgggatcagtccactgccccacagcagcagtcaacccatgcagggtatgagtactattggcaacaagcagcctgcaaaatcctggaacttaattttt

SEQ ID NO: 247481 - DNA, 542 bp, Glycine max
  unsure (1)..(542): unsure at all n locations
gtggggggaggagagtatcntgttagtgaagggaggatactctgtacccgtccggaattcccgggtcgacccacgcgtccgggtttttggcatgtcattgagtcttttccctagcttgtagctcatgcttggggttctgtctggtccttcgctcttggagttttggcattggaccaannnttttttctttgccccgaagtcttccttcgcttggcttggtcaaccaaaaggaaagggatgcttcgaaggctaaaaaaggtgcttccaaaagattgggcgggacgggaggatgtgtcgggccgagatggcgttgctggttgaagggtcttcgggattgggggtgatacatctatagaagagtacataattggccctgctgacaaggtggctgatggtcatgaacatgcaacagagaaagataaaattcgattatatggatcccaagcaggcctctcttggttagcaaaacctgtcactggacagagttctattggccttgcattacgccatggaagcattatttaccaaagcatgccacttaa

SEQ ID NO: 247482 - DNA, 358 bp, Glycine max
aacaaaaatatataaacgcatgaaagtaaaacatgttttaagtacaaaacatttgcaatacgagaaacgattacattaaaaagtaatcacgagtcactattaggggtggaaatgagctaagtcaagctaagctttactagatttgaactgaatatgtaaagcttgaacttgacacaaggcttggctcgacttacataaaagcctgacttggctcacaagcctatttaaaagcttgcttaaagacgtctttgattaattaattattttaaaacctagtgaaatactaactaaaaaaagaaacctataaaattttgtataagtcatgtacaaatccaaaaaattattggttaaccaaaat

SEQ ID NO: 247483 - DNA, 501 bp, Glycine max
  unsure (1)..(501): unsure at all n locations
gaaggttctgtttaggtggagggagtaagtgatgtctcggtccggaattcccgggtcgacccacgcgtccgatcaaacaagggctgncctgaaggcaaatcaagttctggatgaaccctgtttggtgcctactgtgtggtagaatgggctctccaagttggaaatcatgctgcagggaaagtggatggccaactcatgctgtaacctgtggagctggtactggagtgtttctgttgattaagagaacaacaatcctactacagagatctgcacgtcaggccccctggccctctccttacttagatgcttttggtgaggaggattttgaaatgcatcgaggcaagccactttatctgaatgaggaacgctatgcagctttgacttatatggtcgcttctcatggtctggaccggagttccagggtccttggtcagaccactattggttccttctttcctggtttagttcaaattctacatgtttattttgtgtgaagaatgt

SEQ ID NO: 247484 - DNA, 316 bp, Glycine max
tcccgcgtcgacccacgcgtccgggtgtaccagagtccaacattatatttctcaatctcgtatcagcacctcaaggtgtgcatgtggtctgtaaaagatttccaagaataaaaatcctgacatctgagattgagattggtttgaatgaagatttccgtgtcatacctggcatgggtgagtttggggaccggtactttggaacagataatgatgaccagcaggtggtacccccttcacagtagttatacttgggaggaaattcacaatattttatggttcgtcatcattaatgagacctttactgccgaagggggaa

SEQ ID NO: 247485 - DNA, 509 bp, Glycine max
  unsure (1)..(509): unsure at all n locations
gaggaggnttngtnaacgaaagatactttatgccacgctcgtaccggtccggaattcccgggtcgacccacgcgtccgcaactctgcttcccctggcaaccttcttcttagttctctccgcttcttatctccagattgctggggcgaaagcacaaccgttgactagtctcaagcttaactctccgatccttcaggagtctattgctaaagagatcaatgaaaatcctgaggcaggatgggaggctgctataaatcctcatttctccaattatacagttgaacaatttaagcgccttcttggagtcaaaccaacgcctaagaaggaactgagaagtacacctgctatatctcacccaaagtcattgaaattgccaaagaattttgatgcaaggacagcttggtctcagtgtagcactattggaagaattctagatcagggtcactgtggttcttgttgggcatttggtgctgttgaatcattgtcagatcgcttttgcattcattttgat

SEQ ID NO: 247486 - DNA, 512 bp, Glycine max
  unsure (1)..(512): unsure at all n locations
ngttggagtatcntgtaagggggaggagaagatgatgctgtaccggtccggaattcccgggtcgacccacgcgtccgcccacgcgtccgcccacgcgtccgctcctcttgacctagtcaagtgtaatatgcagattgatcctgctaagtacaagagcatctcttctgggtttggagttttgcttaaggagcagggattcaggggctttttccgtggctgggtgcctaccttgcttggttacagtgcccagggtgcttgcaaatttggcttctatgagttctttaagaagtactattctgatattgctggcccagagtatgcaagcaagtacaagaccttgatctaccttgctggttcagcatctgctgaggttattgctgatattgctcttttcccaatttgaggctgtgaaggtccgtgtccaaactcagccaggttttgcaaggggtttgtctgatgggctcccaaaatttgtcagatccgaaggaaccttagggctgtacaagggattt

SEQ ID NO: 247487 - DNA, 508 bp, Glycine max
  unsure (1)..(508): unsure at all n locations
ggaggggaaaggtttgtcagaagaagaagtatgctctaccggtccggaattcccgggtcgacccacgcgtccgcagttttgcctatggagtcttgaggagatttttgcctgaagagaangttgaggccgtgaaaggtctttcaatcactgctgatggaaatggcgttgtttttgatgtagcagctaaagatttagacatatatcttaacggtcaggaaaatgcctcgaatgtaagtttagagatagtgaaaacattgccacagttgcaacagatggagcaacaccaaagaggtggcagatttggtgatggtggtggtcgtggttaccggtttggtggaagaggtggaggaggcaggaatggtaggttctccaatggtggcggaagaggtggacgtggcggcaacctggggtggaaagagatggtgaagctgagaaaggacttagggagttgagttttcactctgctcaattttgaaggagcattgttgcgtgatccaaccacatggaa

SEQ ID NO: 247488 - DNA, 504 bp, Glycine max
  unsure (1)..(504): unsure at all n locations
aggggaggctctgtttttgaagttattggtagtgctgtcccggtccggaattcccgggtcgacccacgcgtccgcaacaacatggccgaacgtggaggctgagaccgtgccggtttcggtcgcggctttggcggtcgtggacgcggcggcgacaggggacgagggcggcgcagggcaggagggcgccgcgacgaggaggagaagtgggtcccagtgacgaagctggggcgcctggtgaaggaggggaaaattcggagcctggagcagatctacctacactcgctcccaatcaaggagcaccaaatcattgacaccctcgtggggcccaccctgaaggacgaggtgatgaagatcatgcccgtccagaagcagacccgcgccggtcagcgaacccgcttcaaggccttcgtggtggtcggcgacaacaacggccacgtcggtctcggagtgaagtgcagcaaggaagtcgccaccgncatacgccgcgcccttatttctcgcaag

SEQ ID NO: 247489 - DNA, 505 bp, Glycine max
  unsure (1)..(505): unsure at all n locations
agctctcatttaaaggaggggggaaggataggaatgctccggtccggaattcccgggtcgacccacgcgtccgcccacgcgtccgctacgtgtttgctcttagcactattttagatcttatatgctttggttatcaaccaaatgaagacattagagatgccattgacgccttaaagaccgcagatatggataaacaagatttagatgatgatgagaaaggggaacaacaaaatttaaatatagcacgaaatatttgttctatcctaaaacaagttgatccaattagaaccaactattggatttggcgcaagagcagacttcctctatcagcttagtaaccaaagtaattaaagggcaactctgggttatgtgtaacctagtttattgaaactggatgtttatttattattattttttatgttgtcatgtatctgtttgtgcaaatttatctttttgtcatgccattactggcatttgagtgtaaggattgaaagccatgccnaat

SEQ ID NO: 247490 - DNA, 508 bp, Glycine max
ggggaaggttcgtctatgaggggatgaagagagtgtcgtaccggtccggaattcccgggtcgacccacgcgtccgaacgaaaacactttctctccgattctcagcatccaatcagaggttccatttctcttgattccctctcacccaagttccaatcgctcactactgcactatatgcttccaactaagagaccttgcgaaggactggttgcagaagaagagactcacaacaacaacgacaacaacaacaacagcaacaacaacaacaacaacaacaacaacaacaacaacaataacaacagcaacaacagcagcagcagcagcagttctctcaagaagaatcggatcgccgctgccagaaccgccgattctacggtgaagaactacgaaagcaccgaccagagcttcaacaacaacaacagcaacagcggaaacgcgagtgagggagcgtcggatatggctttgggtgaatcgaaccaggccgacatcgatgaggatctccacagcc

SEQ ID NO: 247491 - DNA, 508 bp, Glycine max
ggggtaggtcgtgtccacgaagggggagtgtacgggatcgctcgtaccggtccggaattcccgggtcgacccacgcgtccgcttgcttccacgaaacaaccgaagacaatgtcataagacttgtaacgggggttgggatacaagttctgtgcagctatgtgacattgccatatgctctagtcacacagatgggttcaaccatgaggcccaccatcttcaatcagagagtagcatcagctctgaagaactggcacaacactgccaagaagcatgtaaaaaacagtaagcacaccacaccattctcaagcaggccatcaacccctcaatatggtatgtctccaactcatctgctacacaaacaccttgctggaagaagtgagagtgcacaaacttctccaagaacatccaactatgaaaatgaacagtggggtgttgaaggatcaccttccccgagccaccatgcaatagcttgtgatgaaacccaaatgcaagttttggagccagcctc

SEQ ID NO: 247492 - DNA, 509 bp, Glycine max
  unsure (1)..(509): unsure at all n locations
gggaaggttcgtcaaaggtagggggatgtgacaggacgctcgtaccggtccggaattcccgggtcgacccacgcgtccgtgaagcttcatggattttggtatagtccctacactttgagggtggtatggaccttaaagttaaaggatataccatatcaaaacatagaagaagaccgctacaataagagtcttcaacttcttgaatacaacccagtatacaagaaaactccagtgcttgtccataatggaaaacccttatgtgagtccatgcttattgttgaatacattgatgagatttggtcacataattcattacttcctgctgatccctacgagagagctctggcaaggttttgggttaaatatgctgatgatgacatgttttctgcagttattgcattcttccttagcaataatgatgaagagcgagaaaagagcatagagaagatatgggagcatctcannggttgtgagaatcagtgttttggtgatcagaagaaattttttgg

SEQ ID NO: 247493 - DNA, 507 bp, Glycine max
  unsure (1)..(507): unsure at all n locations
ngggaagtgtngtccatgatagacgaattgattggactgctcgtaccggtccggaattcccgggtcgacccacgcgtccgtaaactaattgcaaagatgaataccaagccctttttctccttgtgcttactctgcgcactgcttctcatctgtgttgtggcaactgagccatccaaagatgcgacacaagaagaaccaaagacacggccagatgcctggagaagtggtggaagtggaggacatggtggaagtgggggacatggtggaagcgggggacacggtggaggctggggacatggtggaggctggggacatggcggtggacatggcggaagatgcaaatgctgcggtcgaaagggctgcaaatgttgctgaagtaaaaaaacacaaacatgaactgaagacacacatacgtgtgtactccatgtaataagtatagtatgtagaattaagaaataaaagcatggaatctatatccgtgctagggcttgcataagttgaccgggt

SEQ ID NO: 247494 - DNA, 509 bp, Glycine max
gggggcggtctgatatgaggggagatgttatgctgtactggttcggaattcccgggtcgacccacgcgtccgttcactcgtacgatggtagagccgaacttttatagccttccaaaaaaatgaagaagtcgtcctttttggctctctctctactatggggcctaacttaacgtataagcttcagcgccggttatattggattctacacctaaggcgatcctattcgaaacctcggcacatactatgtgttgccagttataatatgaaagggcagcagaatctaatttgccaaaaccgaatcagatacatgcactataactgttgagcaatctaccttagaggtctcacagggtctaccactgataataccatccccatttaaaatccttgacatcaccgaatgacttatattgagcctcaggttcacttatgtacccacctgagcctcaactccttctcggtggaccgttattctcaagggtctgtcagaataactccatgtcaaaccc

SEQ ID NO: 247495 - DNA, 505 bp, Glycine max
  unsure (1)..(505): unsure at all n locations
tgaggaagggttgttatggaagaatgtatgctatactcgtccggaattcccgggtcgacccacgcgtccggcaccactagcggtgtggacatgcctggtgctgattaccaactcaccaaacaattgggcctgcgcccttatgtgaagaggtacatgatgtaccaacaaggttgctttgcaggtggcacggttcttcgtttggccaaggatttggctgagaacaacaagggtgcacgtgtgcttgttgtctgctctgagatcactgcagtcacattccgtgggccaagtgacactcaccttgatagtcttgtgggccaagcattgtttggagatggagctgctgcagtcattgttggttctgacccaattccacaagttgagaagcctttgtatgagcttgtttggactgcacaaacaattgctccagacagtgaaggtgctattgatggacaccttcgtgaagttggactcacatttcacctnctcaaggttgttcccgggattn

SEQ ID NO: 247496 - DNA, 512 bp, Glycine max
  unsure (1)..(512): unsure at all n locations
agagaggtgtcttaagaggggaaagagtatggtatactcgtccggaattcccgggtcgacccacgcgtccgaaaaaagtcacaaacagagaattaggcaataagataattaaagatgtctgacgattgcaaaggtaagagctcatggcctgagctagttggagtgcaagggacagttgcggaggctacaattgagagagagaaccctttggtggatgctatcattgtgcccgaaggaaacatggtcatcactgatttccgctgtgatagggtttgggtttggatcgataaagatggaattgtcaaggaagttccccacattggatagaaactgctccccactagctagggatcaaataattgtttccagttttatgttattttattcagaataaagtttcagaaatgtcaaaagattaatgtaataaaccaactagagttggccttgtataatgttttagactcaaaatctgntcttgtcattctatatatattaaaaaaagttaatataaa

SEQ ID NO: 247497 - DNA, 505 bp, Glycine max
agggttgtcatggaggtagatgtatgcatgtcccggtccggaattcccgggtcgacccacgcgtccggaatcttcgttatccttcctttttttcttccttggaactcgaatattcactatggcagatgaggtggttctgctagatttctggccaagtccatttgggatgagggtcaggattgcacttgctgaaaagggtatcaaatatgagtccaaagaagaggacttgcagaacaagagccctttgctcctcaaaatgaacccggttcacaagaaaatcccggttctcatccacaatggcaaacccatttgtgaatctctcgttgctgttcagtacattgaggaggtctggaatgacagaaatcccttgttgccttctgacccttaccagagagctcaggctagattctgggctgactttgttgacaataagatatttgatcttggaagaaagatttggacatcaaagggagaagaaaaagaagctgccaaaaaggagttcata

SEQ ID NO: 247498 - DNA, 497 bp, Glycine max
  unsure (1)..(497): unsure at all n locations
ncttgtctgtctatagaggggcgatgtaaggctcgtctcggtccggaattcccgggtcgacccacgcgtccgggcagttgatgaaacaaccgcactattgcagcaaaagtgggacaagattttctacacaggcaatggaaaagtgggaagaatagtgatgactgctgctgcaaaacaccttacaccagttgtgctggagcttggaggaaaatctcctgttgttgttgattccaatgtcgatttgcagatagcagctaggcgaataatttctggcaagtggggattgaataatggacaagcctgcatttctccagattatgttataacaaccaaagattgtgctcccaagttggtggatgccctaaagactgaattggagaaatgttattgaaagaaccccttggaattcagagatttgtctcggattgtgactttcaaccactttggtcgattgcaaagcttttggatgatgataaggtgcttgcaggatgtttatg

SEQ ID NO: 247499 - DNA, 511 bp, Glycine max
ggattggtttctgtatttgagagggggagaggggatgtgtatgtctcggtccggaattcccgggtcgacccacgcgtccgcaagttcttaaaagggttcaatgccgtttccaagaaattggattaaggaaccaggcgaggggccaatgaatcctgtgggaggtttaaaacaggtggttctttctgggcttaaaagaaagggattggattattcccaggaaaatgttgaaggcccatttagaccggccaaaagccagggattattagtggaattaggtttggagtattaatccttgggctggattcaagttatgccaccaagttttaatcttgaacctgaatggtccagggttggaaaggcacctttaccggaggttttccggtcctttttggttttaaaattggcggccttaggattttttaatttggcttttttggtcctggattaacttaaggcaaaaggggcttgcttgttcaatattggccattcttgaccgaaagtcaaaaattga

SEQ ID NO: 247500 - DNA, 504 bp, Glycine max
tagctgtcgtcattgaggggggagtgatagaatgctgtaccggtccggaattcccgggtcgacccacgcgtccgcccacgcgtccgcccacgcgtccgcggggaatttttgtagaaacccttacaacgtgactggggtttgtaaccgaagctcgtgccctttggctaatagtcgctatgccaccattcgcgacgacaatggagtgttttacctttacatgaaaactattgaaagagctcatatgccgaaagatttgtgggaaagagtaaagcttcctaggaattacgagaaggcacttgaaatcatagataaacatctgatgtattggcccaaacttcttatacacaagataaagcaacgtttgaccaaaatgacacagatgcggatacgtatgaggaaacttgctttgaagacaagggagaaaataatgacaactccaaggaaagagaaaaagagagaggcttcgagagaagagaaggctgaaaaagccgcttttgtagaaaa

SEQ ID NO: 247501 - DNA, 503 bp, Glycine max
  unsure (1)..(503): unsure at all n locations
ngggaaggttcttttttgagggggagagtatggtatcgtcgtaccggtccggaattcccgggtcgacccacgcgtccgcccacgcgtccggccaggtgcattttctcccggaaggccaacagagttcttgaaaaattacaaatcaagcttagatttcttggcttttctagaaggctactgtccatccagatctgctgttgctaaatttcgatctgaagcaatttatacagaattcatgaagcaatggaacattggagtatatttctctttgaggtttcaggaaatagcagggtcactagattctgtgcttacaacatccagtcttgtccctgttcaaaattcagatgctggcgaagcaaattatcaaggtttaacattaaagcaaagtgttactttgttggaaaagttgagatcatgctggagaagagatgttcttgtcccttcttgttctgacagattccttcggctatccttgcagcttctttctagatactcaagttgct

SEQ ID NO: 247502 - DNA, 128 bp, Glycine max
atacataattcatgaacaattttacattagaatatttttataaattaaaactcaagaaattatatgtttactaaattctaaacttacaacatcaagtcttgtacataaaaaaaattcagatgctgggg

SEQ ID NO: 247503 - DNA, 495 bp, Glycine max
  unsure (1)..(495): unsure at all n locations
aggntnntncatgatgtagagtacgtcatgctgtaccggtccggaattcccgggtcgacccacgcgtccgcccacgcgtccgggacgaagatgccttcttcgctgattacgctgaggctcaccaaaagctttctgagcttgggtttgctgaagcctaagcaacgttttggggattgttggagaggcacggtgcccataatatttctctcataaattctatggtcatggtttctaatgcgccactgtgggttcctcaaatttttagatagcttttgaatgtattttgctggacgtggtgatgatgattggagttgggttgtttttatttgtggtcgatccttttgttaaataacattgttcagcgattgcgatattattaccctttgtagtatgtgaccatttaccgtaataactagtaatttgtctattattactgggacaaaacaaaaanatatgattataattgaagattgttttaaaagcttaagttgtata

SEQ ID NO: 247504 - DNA, 507 bp, Glycine max
ggagttaagggttgtttaagaaggtgtgcatgctctaccggtccggaattcccgggtcgacccacgcgtccgttcaagttttccgattttgtactgagtatacaatagaagagaaagtcattgaaaggggctacaaaaagcttgcacttgatgctctggtgattcagcaagggcgattggctgagcagaagacggtaaataaagatgaattgcttcaaatggttagatttggggctgaaatggttttcagttccaaggatagtacaattacagatgaagatattgatagaattattgctaaaggagaagaagcaactgctgagctagattccaagatgaagaaatttactgaagatgccatcaaatttaagatggatgacactgccgagttatatgattctgatgatgagaaggatgaaggcagattggatataaaaaaattgtgagtgagaactggattgaaccacccaaaagggagcggaagcgcaattactcaaagtctggata

SEQ ID NO: 247505 - DNA, 519 bp, Glycine max
gggaggggagttagggtgtgttatgcgaggaagagatattgctatactggtccggaattcccgggtcgacccacgcgtccggtttcgaatagattatcctaagtctttgggaatagtgctgcaatggcttcaagtcaggaggaggtgacccttttgggagctactggaagcccatttgtgtgcaaggttcatattgccctcaagttgaagggagttcaatacaaatatgtcgaagaaaatttgaggaacaagagtgaactgcttctcaaatccaacccaagtcacaagaaagttccagtgtttattcacaatgagaagcccattgcagagtctcttgtgattggtgaatacattgatgagacatggaagaacaaccccatcttgccttctgatccttaccaaagagccttggctcgtttctggtccaaattcattgatgataaggtttttggtgctgcatggaaatccgttttcacagctgatgagaaagaacgttagaagaatttgaaggaaccattt

SEQ ID NO: 247506 - DNA, 514 bp, Glycine max
gggagttgaggatctgtatgacgggagaggataagctgtcccggtccggaattcccgggtcgacccacgcgtccgaaagaattgaagcttgtgagatatttggaggtcttaccggaaaactaaaaattctaagtataatagttaaaaaaattgaaaaatcactaaccaacccaatatatgaattggcagattttatgtggataacatccctattagggtatacaagaataaaagcgatattggagtcggatacccaacaaagccaatgcaaatacaagcatctttatgggatggagatagttgggcaacaaatggtggcaaaaccaaaactgattggagcttatgcaccattcagagcaagtttccaaggctttgaagttagtggttgtcaagttccaacctcaaatattagccaaaattgttcttctgataagtactggtggaatacgcagaatttttggcggttggattctgtacgacaaagacaatatgaacgtgttaaacacaagtgttt

SEQ ID NO: 247507 - DNA, 504 bp, Glycine max
  unsure (1)..(504): unsure at all n locations
tgtggntcgtcaattgaggtaaatgtagtgcatcgtcccggtccggaattcccgggtcgacccacgcgtccgcaaaaataagacattgtttggtttggttacttgctcgaatttcctcgaatcgcttaatttgtatttgattagttaaaccgcaacgcggaatctcttttctcgaactggctaactctcaggcaagtggttcggacgctgattccagcaacaagcggctggtgctcgcactgtatgacgccctaaactccggcgactccgacgccgtcgtcaagatcgtcgccgccgacctcgagtggtggttccatggtccgccctcacaccagtttttgatgcgcatgctcaccggcgactccgctgccgacaactccttccgcttccttccgcagtccatcgccgncttcggctccaccgtcatcgtcgagggcttgcgacaccgccgcaacattgcctgggtccacgcctgcaccgtcacggatgggataantactcana

SEQ ID NO: 247508 - DNA, 501 bp, Glycine max
  unsure (1)..(501): unsure at all n locations
aaggttgtgtcaactgctcatctgagtangcactgctggtccggaattcccgggtcgacccacgcgtccggtggaattttgcacctttttaggtcataatcctttcaaaattccgtgcttcggctggacatcgatttctctgcactgcccaaagaattggttgtgcagtccttgttttcagacaccgtctttaagttactgtcgacgtttgagttctataatgcccagtgattcttctgtaatctccaatggacacagcaatggcagtgtcaatccactacctaacctgcaaaggacttaccaagtggtagtggctgccactcaagattggggcatcggtaaggatgggaaattaccctggagattgcctactgatctcaagttttttaaggagatcactatgaaaacatctgatcctgggaagaagaatgccattgtaatggggaaggaaaacatgggaaagcatccctcttgagttcaggcctttttctggtcgcctta

SEQ ID NO: 247509 - DNA, 421 bp, Glycine max
cggaattcccgggtcgacccacgcgtccgaatcaatcaaattctttgagttgaacacaggggccaagattccttctcttgggttagggacttggcaagctgaacctggtgttgtagctgaagctctcaccacagccattcaggttggatacaggcatattgactgtgctagtgcgtataagaatcaagcagagattggttctgctcttaagaagctttttgatgatggtgtggtgaagcgtgaggacttatggatcacttccaaactctggtgttcagatcatgcaccagaagatgtgccaaaagcattggataaaacattacaggaattgcaacttgactatcttgacctctatctgatccactggccagtccgcatgaaaagtggaacatttggactcaataagaatatcttgagcaac

SEQ ID NO: 247510 - DNA, 437 bp, Glycine max
  unsure (1)..(437): unsure at all n locations
tccggaattcccgggtcgacgcacgcgtncggtgcgggttccaagcacgactaaaatcaccgtcatttttctcacaccgacagtttcaaaaggcaaaggaagagttcgcatgaatcatggtggagattcacgaagaaatcaacccctttgatcaagaagaaaatgaagacattggagaggaagaaatcgactatgaccagcttaagaagcggatgtggaaggatcggatactgctgcagaagatgaaggagaaacggcccaaagaagagccagtccaagaagcaaaacaagaagcatctaggcggaagaagatgtcaagagcgcaagactcggtcctcaagtacatgatgaagattatggaagtttgcaatgctcaaggttttgtgtatgggattgtccctgaaaagggaaagccagtgactggttcttctgacagc

SEQ ID NO: 247511 - DNA, 533 bp, Glycine max
  unsure (1)..(533): unsure at all n locations
atgtgagaggttntttttgagttttggagtggtgntnncatcgatcacattggactgctgtaccggttcggaattcccgggtcgacccacgcgtccgnccacgcgtccgcccacgcgtccgtacgatcctttgcaacaaccaaccaccaatcatttcaatgggggcaacaagttacctggtgaccattgtggtgattctggttttgaccaaagggtcctaactgctcccataaaatctgctgttgacaagttccagcttattcctgagttcctcaaggttaggggattggtgaagcaacatttggattcctttaactattttgtgaggacagatttaaagaaaatcgttcgtgctaacaatcttatcatggcgagtaggtacccacacatatatctaaggtttttaaatgtcggaattggtaaaccatccatgatgattgatgaggttactgagggccttactccacanacgtgccgcttaagtgacctgacgtatgcngctccaatatgtgccgatgttgaatacacgctcc

SEQ ID NO: 247512 - DNA, 504 bp, Glycine max
gggagggtgtctgtaattgatgtagggtggtaaagtattgctcgtaccggaattcccgggtcgacccacgcgtccggtgaaactgcgaatggctcattaaatcagttatagtttgtttgatggtatctactactcggataaccgtagtaattctagagctaatacgtgcaacaaaccccgacttctggaagggatgcatttattagataaaaggtcaacacaggctctgcctgttgctttgatgattcatgataactcgtcggatcgcacggcctttgtgccggcgacgcatcattcaaatttctgccctatcaactttcgatggtaggatagtggcctaccatggtggtgacgggtgacggagaattagggttcgattccggagagggagcctgagaaacggctaccacatccaaggaaggcagcaggcgcgcaaattacccaatcctgacacggggaggtagtgacaataaataacaataccgggcttaatgagtctggtaa

SEQ ID NO: 247513 - DNA, 507 bp, Glycine max
  unsure (1)..(507): unsure at all n locations
nggaggtgtctttttgaggggggagctatggatctctcggtccggaattcccgggtcgacccacgcgtccgcaccacacaaaaaaagcaaaaacagagagtaacaactgttactcacacacgccatgggtaaatgaatggtttttgagcaacagcagttaaaagagaaaagggattcagcgaagatgacatcggttggtgtggcaccaacttcgggtttgagagaagccagtgggcatggagcagcagctgcggatagattgccagaggagatgaacgatatgaaaattagggatgatagagaaatggaagccacagttgttgatggcaacggaacggagacaggacatatcattgtgactaccattgggggtagaaatggtcagcccaagcagactataagctacatggcaaagcgtgttgtanggcatggatcatttggagttgtcttccaggctaagtgcttggaaaccggtgaaactgtggctatcaaaaaggttcttcaaga

SEQ ID NO: 247514 - DNA, 182 bp, Glycine max
atgggtagtgaaggaagccagaatccctcttcctgctttatgatataatacaaataaaatagcgattccggaaatcatgtctgtagctgctctttttatttatgtgataaatgtaaaacgctttggtttggcttggccgttgtgcattaggttgaaaaaataaatgttataattactcagaa

SEQ ID NO: 247515 - DNA, 267 bp, Glycine max
ttttttttttttttttttttttggtttatatttttttttttttttttattatttttttttttttttttttttttttttatttttttattaatttttatatttattatattattttattttttattttattatttaaaataaaaaaaaaaaaaaaaaaaaaataaaaaaaaaaaaaaaaaaaaaaaaaaaaaaaaaaaaaaaaaaaaatataccaaaaaaccctaaaaaaaaaaaataaaaaaaaaaaaaaaaaaccacataatatat

SEQ ID NO: 247516 - DNA, 506 bp, Glycine max
  unsure (1)..(506): unsure at all n locations
tgaggtgtcgtctactgatagaagaatgatagcatcgctgtaccggtccggaattcccgggtcgacccacgcgtccgcggacgcgtgggcggacgcgtgggctgacgcgtggggtacgatcaaaagcattgagattgttgagcctgccaagcccaaaccaccacctcaaccagaaaagcccaaggaaccagagaagccaaaagagccacagaagccgaaagagccagagaagccgaaagagccagagaaaccgaaggagccaccgaagcctaaggaacctgaaaaaccaaaggaaccagagaagcccaaagagcctgagaagcccaaggagccagagaagcccatagagcccgagaagcccaggaacccgagaagcccaaggagcccgagaagcccaagcctgaatgccctcctccggtgccggtttgtcccgcaccggtgccagtgtgtccgncacagccaacaccttcgncaccggtggtgttccgatgggggtgtgctgtgtt

SEQ ID NO: 247517 - DNA, 399 bp, Glycine max
  unsure (1)..(399): unsure at all n locations
ttcccgggtcgacccacgcgtccgcccacgcgtccgcccacgcgttcggactataacaaccgccaaacgcattggcctatgtatatcaacaccaaaactctttgaatcaaaaacatacttatttattcacacaaatatncatttatatatacatatatatagttctatatggcaatgacaacggtggtgtttgtcttgtgcatctttgtagtgttgaatgcaagtgcctctgatgccactcgcttattgctgaacaaaactgcaacaggtaacgtgtccagagagaagattgagagatacttacttgaaaatggactcggccagacaccccccatgggatggaatagctggaaccactttggctgtgatattaatgaaagtttaattcgagaaacagct

SEQ ID NO: 247518 - DNA, 530 bp, Glycine max
  unsure (1)..(530): unsure at all n locations
nggtggggggggggggtttagtgtctgtttaggggaggaggagagtaagcatgtactggtccggaattcccgggtcgacccacgcgtccgcccacgcgtccggaatttaagggacaggctttatcgtgaacttgagcggaatctggctatgaaagttgaagatggtgaaacagctgatacatttgttgtcagtgggcgtggaactttgcatatcaccatacttatagaaaatatgcgaagagaaggatatgaattcatggttgggcctcccaaagttatcaacaagaaggtggatgaaaaactgttggaaccgtatgagattgcaactgtggaggtaccagaagagcacatgggagctgttgttgaacttcttggcaagagacgaggacaaatgttcgatatgcaaggagttggattggaagggactacactacttaaatttagaatccaaaccggtggccttcttggattgcggaattcaatnttaacttgcctcccgagggactgctattctcaacactggttttgaa

SEQ ID NO: 247519 - DNA, 456 bp, Glycine max
ttcggaattcccgggtcgacccacgcgtccgtagagattttccaaatcagcctccgattgtgtatgactataccgacccaaacataacgagcactacagaattagccttcaaaatcggacccaaatcaacgaaagtgaagacgttgaagttcaattcaactggtcagattggacttcaaaacacgggcattggctctgcagagaaccaccccattcacattcaccggttcaatttccatggtttggctcaagggttccggaattacaaacgccctagaagccagccccaggtcaaatcttgtcaaccctcagatacggtacacaaatttctgtccccgtcggaggatggtccgttgttagattccaagcaaataatccaggtgtttggcttgtgcattgccatttggaaactcatttgccgtgtgggctagccatggctttcgaggttgagaatgg

SEQ ID NO: 247520 - DNA, 540 bp, Glycine max
  unsure (1)..(540): unsure at all n locations
atgagggacggaggaggagtatgtngactgatacctaagncatgccgtaccggtccggaattcccgggtcgacccacgcgtccgataaattctattctggttgacgcttctctcaccatccccatttcgcgttggtgcaaagcatccttcagttcaatttctctctctcagcgctttctgcaatcgaacctttcatctccaaagggatccacaggccgaaggagaaatggggctgacattcacaaagcttttcagtcggcttttcgcgaaaaaggaaatgcgaattctgatggttggtcttgatgctgctggtaagaccactatcctgtacaagctcaagctcggagagatcgttaccacaattcctaccatcgggttcaatggtgagactgtggaatacaagaacattagcttcactgtttgggatgttggtggccaggacaagattgcgcccttgtggaggcactacttgcagaacacccaaggtcttatatttggtgtaaacacggcattttttaggcacaaaattttttaagccca

SEQ ID NO: 247521 - DNA, 515 bp, Glycine max
  unsure (1)..(515): unsure at all n locations
cggtcttactcatgcctagttgntacgctctacaggtccggaattcccgggtcgacccacgcgtccggagcaactactcaattcttcactctgtttccccttaccttacacactctaacacatggattcaccttcctccttcttcaactcaccctcttccggtttctgctccgaatcttcctctccggaagccttctcgtgggaagggtacctacccttcaacgagaacgacccggaggagatgcttctatacggcatgatcgccggcgcgacaaccgaggagcactccggcgagagggcgagctcggaggagagtgctgcagcacggaaggagaagtcgtaccgcggcgtacggcggcggccgtgggggaagttcgcggcggagataagggactccacgcgccacgggatgagggtgtggctggggacattcgacagcgccgaagccgcggctctggcttacgaccaagccgggttctccatgcgccgctcgccggcgattctcaacttccccg

SEQ ID NO: 247522 - DNA, 452 bp, Glycine max
accggaccggaattcccgactcgacccacgcgttcgatctattctactttgagtcttcttgatccttgtacctctccttgaactcaaacatggcagatgaggtggttctgctagatttctggccaagtccatttgggatgagggtcaggattgcacttgctgaaaagggtatcaaatatgagtacaaagaagaggacttgaggaacaagagtcctcttctcctccaaatgaacccggttcacaagaagattccggttctcatccacaatggcaaacccatttgtgaatccctcattgctgttcagtacattgaggaggtttggaatgacagaaatcccttgttgccttctgacccttaccagagagctcaagctagattctgggctgattatgttgataagaagatatatgatcttggaaggaagatttggacatcaaaaggagaagaaaaa

SEQ ID NO: 247523 - DNA, 529 bp, Glycine max
atttagaggaagggggagttatctattgaagaaatgatgcacgctcgtaccggtccggaattcccgggtcgacccacgcgtccgaaaaaaaaaaacgaaaatgctgagaatcgccgcaagcgcaaagagaattgttcaaacggcgtcgttggaggcgccaccgttggggattagggttctgccgcgtctctaccacgagagggtggtggaccactacgacaacccccgcaacgttggatccttcgacaagaacgaccccaccgtcggaacgggtcttgttggtgcacccgcgtgtggcgacgtcatgaagctccagattaaggttgacgacaaaacggggaagatcgtcgatgctcgcttcaaaaccttcggttgtggatccgccattgcttcttcctccgtcgctactgaatgggtgaagggaaagcaaatggaggaagttttgaccattaaaaacactgaaattgcaaagcatctttcacttccaccagtcaagcttcactgccacatgctagctgaggatgctata

SEQ ID NO: 247524 - DNA, 506 bp, Glycine max
agctttgtcacgagggagagtgaatgtacgctctaccggtccggaattcccgggtcgacccacgcgtccgggcctcgaaagccttaagcctgaactcaaatcatcaattgagaagggaatcaaatttgccaaccagtaattgaacatgttatcacatacatgtctggtaggttactggatattcctttaagaaccaaatcaaattttgcattctcagaaccattgatgtattgttgtcggcagtggtgtggcggttttgttgttttatttagtgtaggtatacgccatggtttaataattaaagtctgagagctgtttgttgccaaagggattgaacgatcttaaaaccaggtttaggatttggcattccattaataatggtcccttttaactgtatggtttcacttaatgtaatttgcagggtgttgtaccctttattcacatttttttctcacttaaaaaaaaaaaaaaaaagggcgggcgctctaaaggatccaagctaactt

SEQ ID NO: 247525 - DNA, 517 bp, Glycine max
  unsure (1)..(517): unsure at all n locations
nggngggaggtaggttttngtttacgtaaggcggggataatgtcatactccaccggttcggaattcccgggtcgacccacgcgtccgcaacactggaggagcagtggagcaggttgagattcataaccgagcagcaacgaaaacaatagctcttagtgtaaggggaagaggcatatttggagtttactcctcccagagaccactgaagtgtgtggtaagtggcgctgaaaccgacttcaactatgacttagagaccgggttgacaaccttctccattccagtttcttcagaggagatgtacagatggtcaatagagatccaagtttgagtcctttttaagacttggtgtttgaagcattgttgtatcaagaagagggttttgttgtaattaagcattggaggaattgttggagtcaggcacagagaaaagggggaggttgttgtaagacacctagtattagtatcatgtagtggagaaaaagggttgttgatcctaatagctagaacaagcatgttg

SEQ ID NO: 247526 - DNA, 524 bp, Glycine max
gtggttgtgggagtaggtgtgtctacgtaggaggatatgtgactgctctaccggtccggaattcccgggtcgacccacgcgtccgcttggaactgcaacaatggtgccgcaacccattttgcatctaacccttttggcattgataatctctctgaccactctttccttggtcgatgccggcgatcccacatttggcttcacccctcttggattatctagtagctcaaacttgcaaatccaaaagccttacgacgttgcagtcaacgagcgctacagcttttcaaatggagtgcacagattttgggtatactccacggacaagcctcatatgcaaggcagcaataccaaagccacgaactgagattcgtatcgctggatacgattatacattcggtgtgtggcaatttcaagggtttttttacgtgcctagtggcaccaagcgggtgggcattcaacaaggtgtttggtggaggtactttctggcacaaacttgcagactagggtctatggggggtcttttcacc

SEQ ID NO: 247527 - DNA, 426 bp, Glycine max
taccggtccggaattctcgacccacgcgtccggcccctcgctgcatatgtatttacaaccgacaacaagttcaaggagcagttcgtaaagaatgtttctgccgggggtttgctcgtcaatgacactgccttacatcttggggttgataccttgccatttgggggaattggggagagtggaatgggtgcataccatgggaagttctcttttgatgcttttacacacaaaaaagcagttctttatcgcagttttgctggggattcaaccataagggtcccaccataccacgatacaaaactgagattgatgaaggctcttcgcggtggtcgtatcctcggaataattcgtgctcttttcggatggtcctaagcttaacttggtttgaaacctaactattttttatggattcttcggtccgggtttttt

SEQ ID NO: 247528 - DNA, 538 bp, Glycine max
agtttgtataatagagtagatgttttagcctagcctaagtgtacgcatgtaccggtccggaattcccgggtcgacccacgcgtccgcccacgcgtccgaaaaaaaaaaaaaaataaataaaaaaaaaaaaaaaaaaaaaaggccggctggtataaaaaaaggcaaggctgatctagaggatcaagccatacatacgctatcatgtaacgtcatatcaattcaatggactgacctaaattaaatatcgtggcgagtgataaacaccttacggaacggaaaaaccttgccttgcaccacattaatctcttgtcagctgataccatattggccaggtcccataatatcgaacaggccaacaccaatccaacttgcaaaccgtatggcaccctgaatggcgcatggaacgcaccgcgtagcgcggctttaatccccgcagcttgagcggttacctgcacagtaacctataaacttgtcagtgccttaacttcgcttcctttcgcgttacatcctttcgttttttcccgcttataacgaattt

SEQ ID NO: 247529 - DNA, 409 bp, Glycine max
taccgtccggattcccgggtcgcccacgcgtccgcaaagatgaaaccaagcccgttttcttcttgtgcttcctctgtgcactgcttctcatctctgttgtggcaactgagccatccaaagatgagacacaagcagaagaaccaaagacacagccagatgcctggggaagaggtggaagtggggggcatgatggaagctggggacacggtggagactgggggcatggcggaggaggacacggtggaggacatggcggaggaggacacggtggaggacatggcggaggatgcagatgctgcggtcgaaagggctgcaaatgttgctgaagtaaaaatcacaaatatatgaactgaacacactcatatacttgagtgtactccatgtaataactaggatatatgtaagaaat

SEQ ID NO: 247530 - DNA, 527 bp, Glycine max
tgtagtattaaggtagtgatggtcataaagaaaatgatgcatgctcgtaccggtccggattcccgggtcgacccacgcgtccgcccacgcgtccgcccacgcgtccgtctgagtccgccgttaacgaacaaatcaatgtggagtataacgtttcgtacgtttaccatgccatgtttgcgtacttcgatagggacaacgttgcgctgagaggacttgccaagttttttaaggaatcgagtgaagaagaaagagagcatgctgagaaattgatggagtatcagaacaaacgtggtggaaaagtgaagttgcagtcaattgtgatgccgctttctgattttgatcatgcagataagggagatgcgctgcacgcaatggaactcgctctgtcattagagaagctaaccaacgagaagctccttaacttgcacagtgttgccacaaagaatggtgacgtgcagttggctgacttcgtggaacctggatttctgggtgaacaggtggaagccatcaaaagaattatccggtac

SEQ ID NO: 247531 - DNA, 537 bp, Glycine max
  unsure (1)..(537): unsure at all n locations
agtatggatgggaagaaatgttngttcctcgtacgtagcatacaggcacgctgtaccggtccggaattcccgggtcgacccacgcgtccgatgatgagctgcgtttcgatttcgagttcagtgacaagaggcgctattagcgtgggttcctcttcatctttgtgtttcggcacacccaagttgttcaattcagcaagggtagcggtgaatggtcggcgaagaaacaaaggtttgagttgcaacgccatgttcggtctgggggtgcccgaactggtcgttattgccggcgtggccgccctggtttttgggcccaagaaattgcctgaagtcggccgtagcatcggcaagactgtaaagagcttccaacaggctgcaaaggagtttgagtcggagcttaagaaggaacctgattccacccaaggggactcatccgagaaacctattggtacagtcactgagcagcagcaggaggacaatgaggtgtctacttctaaggagactgtatgatattttcgccatgaaataaactattctgtg

SEQ ID NO: 247532 - DNA, 533 bp, Glycine max
  unsure (1)..(533): unsure at all n locations
gtgagggatgatggtnaaagttagtcgatgaagagaatgatgccacgctcgtaccggtccggaattcccgggtcgacccacgcgtccgcccacgcgtccgcagaaaaccaaggactatgccggtgacactgcacagacatcaaaggactatgccggtgatgctgctcagaaatcaaagggctatgtcggtgatgctgcacaaaagaccaaagaatatgttggtgatgctgctcagaagaccatggattatgccactgatgcagcacagaagaccaaagattatgctactcagaagactaaggactatgcaagtgatgcaactgatgctgcaaaaaagactaaagattatgctgctcagaagaccaaggattatgcaagtgatgcaactgatgctgcaaaaaagactaaggattatgctgcgcagaagaccaaggactatgccagtggtggtgcgcagaagaccaaggactatgccagtggtgctgcgcaagagaccaagactatgccagtgatgcctcgcanaggcaccaggg

SEQ ID NO: 247533 - DNA, 517 bp, Glycine max
ggttggggggataggtttgtcatggaggaagagtattgtatgctctaccggtccggaattcccgggtcgacccacgcgtccgagagaagaagcatatatatcaaaatggctgcagagatggagagggagtcattgataactgaagctcctaatgcaccagttactgcacagagaagggtcagaaatgacttagaaaattctctaccaaaaccatacttgccaagagcattgaaagctcctgatacgggtcacccaaatggaacagcaggccacaggcaccacaacttatctgttcttcagcagcattgtgctttttttgatcaagatgacaatggaatcatttacccttgggaaacttacatggggctgcgttctattggatttaatgttgttgcatctgttattatggctattgttatcaatgttggattgagttaccccactctacctaattggttcccttctctcttttttctatctacatacacaacatacccaaagcaaagcatgggagtga

SEQ ID NO: 247534 - DNA, 543 bp, Glycine max
  unsure (1)..(543): unsure at all n locations
gtgggaagagggggnaggtgagggaggtctgtgtttaccggtagctgntctgctctactggtccggaattcccgggtcgacccacgcgtccgcgatttgttgtggattggatgatggaaaaaccagcaagcccctttcattgaaagggcgcagtgaactgtaattgtgaaaaggttggaagatctggccaaagaaggtgatagccctgtagattcgttcccatggttcgatccttcccagtaaaacgcggcgtgttcgaattctgatcgcttttacccgagaaagggggaccaccctctaagcctaagtattcctcaatgaccgatagcgtacaagtaccgtgagggaaaagtgaaaagaaccctatttagggagtgcaatagagaacctgagatccgatgcgaacaatcagtcgaaggagctttaaacccttaactggatatttagtaaagcgcactcactctaaaggcgtaccctttgcattatgggtcaaccagaaaatgggaacagcggctttaagccattaggggtaggggccttttn

SEQ ID NO: 247535 - DNA, 530 bp, Glycine max
gagatgtaggatggtggaggtttacttattggtagtgctatgctctaccggtccggaattcccgggtcgacccacgcgtccgagacgtgaaaacacccgatcccattccgacctcgatatgtggaatcgtcttgcgccatatgtactgaaattgttcgggagacatggtcaaagctcggaagaaaagtgctaaacgcacaagtcaaaatcgaaagggccattgagaaagctctgctctccgacgggtattcccgggatgagctttctcaaaggagcaaacgagatgaaagaaggaccttgttgttctaccgtactgggaaacttctttcgatgaaaacatatgactcatatgtaaaagaagtcgaattagggacccaccggagccaaccctataaggttcttatcaatgccatctcttcttccaatctttttttaaagaaagtcaaaaaaatcaagaggtgggaacgggggtgaaacagattgggctcacagaatacttcagggcttgccacgcacctgtcaagaactct

SEQ ID NO: 247536 - DNA, 532 bp, Glycine max
  unsure (1)..(532): unsure at all n locations
gttttggtggtaggaaagttatccatgaggagcgtacgnactgccgtaccggtccggaattcccgggtcgacccacgcgtccgggagattggatcggatagctaaggatggtgcacttcacaaaaaattgattcaggcagaaatagtaactgtagaagatttcctacgtcttcttgttcgtgagccacaaaagttaagaagtatacttggtagtggaatgtccaatagaatgtgggagaatactgtggagcatgccaagacatgtgtcttgggtggcaagctctttgtatactacactgatgaaaccaatagtgctggcattgtgttcaacaatatatacgagctgagaggcctcatttctgatggccaatttttctctttggaatcacttgctccaaatcagaagatgtctggagattccttggtgaagaaagcatattaaaattggggatcaagtttgtagaatatgatggaaaaagttttaaaattctctttgcttaatccgaaaaaggggttcaaaacttgtgggccc

SEQ ID NO: 247537 - DNA, 517 bp, Glycine max
  unsure (1)..(517): unsure at all n locations
ggggggttaggttncgtcattgaacgaggatgtattgctacgctgtaccggtccggaattcccgggtcgacccacgcgtccggtcaattccaacaacaccacaatgggaagaagaccggcgaggtgttaccggcagatgaagaacaaaccgtacccgaaatcccgtttctgccgcggcgtgccggagccgaagatccgaatctacgacgtgggaatgaagaagaaaggcgtggacgagttcccgttctgcgtgcacctggtctcgtgggagaaggagaacgtctccagcgaggctttggaggcggcgcgcatcgcatgcaacaagtacatgggcaagttcgccggaaaagatgccttccacctgcgcgtgagggtgcatcccttccacgtgctccgcatcaacaagatgctatcgtgcgccggggccgacaggctccagaccggcatgagggggcgcctttgggaagccgaaggggacgtgcgctagggttaacatggtcaagtgcttgtctcgggg

SEQ ID NO: 247538 - DNA, 508 bp, Glycine max
ggggaaagggtcgttacgtcggaagggtaatgtatgctctaccggtccggaattcccgggtcgacccacgcgtccggtcccattgtttttcggggctatcacaaagatgaagcccagacgagagatgtcattggtgaagatggatggctacatactggaaatattgggacgtgggtacctggtggtcgtctcaaaattattggtaggaaagaagaatatctttaaattggcacaaagcgagtacattgctcctgagaagattgaaaatgtatacgccaaatgcaaatttgtggcgcaatgctttgtatatggtgatagcctaaattcttctttggtagctgatggctcggtggatcatgataacttgaaagcatgggctgcttcagaagggataatgtataatgatttggcacaaactttgcaatgatttaaaagtcaaggcaactggcttggctgagatggatgctgctggacgagacgctcaacttagagttttggattcctaaag

SEQ ID NO: 247539 - DNA, 518 bp, Glycine max
gggagagaggaagggtcctctttgatgaggagggacggtatgctctaccggtccggaattcccgggtcgacccacgcgtccggccacgcgtccgctggtccctacaacttcacttaacttctccctctatatgtgtctgttaatacacaccaaaacattcattcattggtattattcatacaacaaatcaaaaaatgttacccaacaatacttgcactattgttcccgacgcgggggcccggcaccacacccacgtggtgtccccgcagcaatgctgatccgccgtggtccaagagatcgccagcccggtcttcaacggatggtccgaagtgcggggctttgacaacccgcaaggctacaagcactttgctaaaaagctgtcacgtgattctcggcgactgcgacatcaggacccttcgcgaggtccacgtgatctacgggctacccgccgtcgttagcaccgagacgcctgacgtcctcgagacgaacggcacgttattcgtttaagcatggccggg

SEQ ID NO: 247540 - DNA, 529 bp, Glycine max
  unsure (1)..(529): unsure at all n locations
atgatgttggaagggaaaggttntattactgaaaganagtaatgcatntctcggtccggaattcccgggtcgacccacgcgtccgcccacgcgtccgcgggtgtgtagtagaattgcagtgaaattggagagaaaaaaaaaaatacgctcaaacatggagggctatgagatcctcaaagatattggttctggaaattttgctgtggccaagcttgttagagacaactgcaccaatgagctttttgctgtcaagtttattgagagaggccagaagattgacgagcatgtccagagggaaatcatgaaccacagatcattgaaacaccccaatattattagattcaaagaggttctgttgacaccaactcatttagccatagtaatggagtatgcttctggaggagaactctttgagaggatatgcaatgcttgtagaatcagtgaggatgaggcaagatttttctttcagcaattggtatcaggaatcagttactgtcattcaatgcaaaattggcatagagatctgaac

SEQ ID NO: 247541 - DNA, 442 bp, Glycine max
gtccggaattcccggtcgactcacgcgtccgattttatttacaacaacaatggcttctgtgcctcaaccaaaaatctcccttctaaccgtatgcttcttctcttccttcaccatcattgcgcatgcaattgttcctcaaaacgaaaccttcaaatttgagaactcaagtgaacttggaccctacatcgttgagtacggtgcagattacagaatgataagcatcttcaactctccattccaagttggtttctacaacaccaccccaaatgccttcactctagctttgcgtgtagggctccaacgctcggagcagctatttcgttgggtttgggaggccaacagggccaacccagttggagaaaatgccactttttcacttggcactgatgggaaccttgtgttggcagatgctgatggcagaattgcatggcaaactaacact

SEQ ID NO: 247542 - DNA, 531 bp, Glycine max
  unsure (1)..(531): unsure at all n locations
atgatggaggaaggtggaggtngtccatgaagtagcagttagccacgctcgtaccggtccggaattcccgggtcgacccacgcgtccgctgaagatggcttcacgcaggctcgtatcttctctgattcgatcctcccttcgtagagctcaatcgaagccctcaatttccgcatcgacatcgaggctcacgtcatccaaccgtgcctcaccgcacggatacttgctgaaccgcgtcgccgagtacgccaccgccgcggctgctgctaccgctcctccctctcctcctcctccggggaagaaggagctcggcggcggcgggaagatcaccgatgaattcaccgggaagggcgcgatcgggcaggtctgccaggtcattggtgccgtcgtcgatgtcagattcgacgagggtttgcctccgatcatgaccgcgctggaggttctggatcactcgtcgaggcttgtgttggaggtggcgcagcatttgggtgaaggcgttgtccgaaccattgctatggatgccaccgaaggtgt

SEQ ID NO: 247543 - DNA, 512 bp, Glycine max
  unsure (1)..(512): unsure at all n locations
ngtgggaaggtttgttatgtacgtagagtatgccatgctgtaccggtccggaattcccgggtcgacccacgcgtccgaacacactcttcgaaactctggatctgttcttctgcttctaagagacaacatgctcgtcttgaatctcaatctctcggaaactaaaccctaagaacagacaaagatggtttacaccatctcgggaattcgatttccggttcttccttcgctgcacaactcccgcttccgtggcgatcgcagaactgcgtctcttcccgtttttctcagaaacaactccttctctcgtaaaacccttgctctaaaatcttcccatgattctgattccttgtcttctgcgattgccaaatctgataaagtacttattcctcaagatcaagataactctgcatccttgacagatcaacttgaaactcctgatataacctcagaggatacacagaacttagaggatttaaccatggaagatgaggattaatacaacattagtgaagcca

SEQ ID NO: 247544 - DNA, 513 bp, Glycine max
gggtggagaaaggtgttcacgaaccgaagtatagcatgctctaccggtccggaattcccgggtcgacccacgcgtccgaacacactataaaaaactaaagagaatatgaaaaaaagataataaaaaacaacatgataggaaagaatataaatatgtaggggactaaaccctaagaacagacaaggatggtttacaccatctagggaattcgatttccggatcttccttcgctgcacaacttccgcttacgtggcgatcgcagaactgcgtgtcttcccggggatctcagaaacaactccttctctagtaaaacccttgctctacaattttcccatgattctgattgcttgtcttctgcgattgccaaatctgatagagtacttattcctcaagatcaagataactcgtgatccttgacagatccacttgaaactcccgatataacctcagaggatacccaggaacttagaggatctaaccatggacgatgatgataaatcctccatttttgat

SEQ ID NO: 247545 - DNA, 525 bp, Glycine max
ggggttgggggtaggtgtcttaactgacaagaaattgatagctactgctcgtaccggtccggaattcccgggtcgacccacgcgtccgataccaagcccgttttcttcttgtgcttcctctgtgcactgcttctcatctctgttgtggcaactgagccatccaaagatgagacacaagcagaagaaccaaagacacagccagatgcctggggaagaggtggaagtggggggcatgatggaagctggggacacggtggagactgggggcatggcggaggaggacacggtggaggacatggcggaggaggacacggtggaggacatggcggaggatgcagatgctgcggtcgaaagggctgcaaatgttgctgaagtaaaaatcacaaatatatgaactgaacacactcatatacttgagtgtactccatgtaataactagtatatatgtaagaaataagaaattaaagcattgactctatccctgcttgggctgggcataggtgaattgttttccgccaaccatgc

SEQ ID NO: 247546 - DNA, 528 bp, Glycine max
  unsure (1)..(528): unsure at all n locations
agattgatgatggtggaggtagtctatgaagtagntgttcgcactaccggtccggaattcccgggtcgacccacgcgtccgaagaaagctacctagagcttgcacctattggtatcttctacaatatcctctcatagtgctcttcttcttcttcattttcattatcaagatgtctttgctttcggatctcatcaacctcaatctctcagaatccacagaaaagatcgttgctgagtacatatgggttggtggatctggtatggacctcagaagcaaagccaggactcttcctgggccagtgagtgaccctgcaaagcttccaaagtggaactacgatggctctagcacagaccaagctccaggggatgacagtgaagtcatcctatacccacaagctattttcaaggacccctttaggagaggcaacaatattcttgtgatttgtgatgtttacacccccgctggtgagccacttncaaccaacaagaggtttgatgctgccaaaattttcagccaccctgtccttgg

SEQ ID NO: 247547 - DNA, 529 bp, Glycine max
  unsure (1)..(529): unsure at all n locations
agtatgatgataggggaggtagtctagacagtagctgttggctctaccggtccggaattcccgggtcgacccacgcgtccgtgaatcttcgttatccttctttttttctccttgaactcgaatattcactatggcagatgaggtggttctgctagatttctggccaagtccatttgggatgagggtcaggattgcacttgctgaaaagggtatcaaatatgagtccaaagaagaggacttgcagaacaagagccctttgctcctcaaaatgaacccggttcacaagaaaatcccggttctcatccacaatggcaaacccatttgtgaatctctcgttgctgttcagtacattgaggaggtctggaatgacagaaatcccttgttgccttctgacccttaccagagagctcaggctagattctgggctgactttgttgacaataagatatttgatcttgggaagaaagatttggacatcaaagggagaagaaaaagaagctgccaaaaaggaagtcatagaaggccttan

SEQ ID NO: 247548 - DNA, 533 bp, Glycine max
  unsure (1)..(533): unsure at all n locations
gtgatgatgaaggtngagttcgtcgatgtcatgcatgatgnactgctcgtaccggtccggaattcccgggtcgacccacgcgtccgatcgacgaacatcccaacttatgtcaatctgatgatgaatgcatgaagaaaggaagtggcaatttttgcgctcgttaccctaataattatatcgattatggatggtgttttgattctgattctgaagcactgaaaggcttcttggccatgcctagggcaaccaccaagtaatatggtgggtatgccaaagtgggcatgcttgatgcatcttctactacttaaaaataaaagcttatgatgcatctactgctttaaacaaaagagtgctccactacgcaactttagtttccaacttatagttggttacgttttatgtaaactcaacccatgtatgttttggagcattccagttaataaaaaatgtttctataaaaaaaagatgtgaggagatgtatgagtgagagtgaatattataaaaggataaagtgttaagtaatagtgaatgag

SEQ ID NO: 247549 - DNA, 304 bp, Glycine max
tcccgggtcgacccacgcgtccgcccacgcgtccgaaaaaaaaaaaaattaaaaaaaaaaaaaaaaaaaaaaaaaaaaaaggaaaaaaaaaaaaaaaaaaaaaaaaaaaaaaaaaaaaaaaaaaaaaaaaaaaaaaaaaaaaaaaaaaaaaaaaaaaaaaaaaaaaaaaaaaaaaaaaaaaaaagggggagctttttaaaaaattcaattttaactaactttttattgattgataattgttttaataatggagcatctaaatcattttaattggacgttttttaaaatttttgaaattggaaaa

SEQ ID NO: 247550 - DNA, 509 bp, Glycine max
  unsure (1)..(509): unsure at all n locations
ngggtagaggtgctcatgaggaggttgatgcactgctctaccggtccggaattcccgggtcgacccacgcgtccggttttgctgcatataaagcagataacggtgtctgctcagctgttttgagaacaatggtgttgccacaggccaatgccggtccaaccttccaggcaaacatgagaagagggaagttccaaggaatgatctgaccggcaacaccaattggttcatgtaatgtttgcacatgatatggtccatcagctggaactgttagaccatggatcttatctgcccaaccagcatagtatcgaatcaggcgaacaagcattggaacttcaatcttagcagcttggttcataaggctntccattatcccaagtctcaagtgctgcaagctcatcattatgcttctcaagcagatcagctgcgcgcaacaagatcctttgccgttcataagccgtcatcttaaggcatggtccatgatcaaatgcttttcgtgcanctgcaactgc

SEQ ID NO: 247551 - DNA, 521 bp, Glycine max
  unsure (1)..(521): unsure at all n locations
gggggggatgagcctnntaaagaggaggaatgtatgctacgctcgtaccggtccggaattcccgggtcgacccacgcgtccgtttaaacatgccagtacctttcactactggttattccacattcgaagaaataaactcacccactaagcactacacaaatcacacagagttgcaagagaaagataaaagaagatggcgactcttgattccgacgtgcctatggttcccgccggcgagccctcgagcagcgccggtccttcttccaagaagcccaagcgcttcgagatcaagaagtggaacgccgtcgctctctgggcttgggacatcgttgtcgataactgtgctatctgccggaaccacatcatggatctctgcatcgagtgccaagccaaccaggctagcgccactagcgaggaatgcactgtggcttggggaggttgtaaccatgcttttcacttncattgcatcagtcgatggcttcaagactcgtcangtttggtcctctagataaccgggggtg

SEQ ID NO: 247552 - DNA, 236 bp, Glycine max
ccggattcccgggtcgactcacgcgtccgcccacgcgtccgggaagatccaggggttttggatttgtgaccttcgcctcggagcagtccatgaaagacgccatcgaagggatgaacggccaaaaccttgacgggcgtaacatcactggtaacgaagctcagtcccgtggtggcggtggcggcggaagcggtggaggtggtggatatggtggtggtcgcagtggtggatatggtggt

SEQ ID NO: 247553 - DNA, 413 bp, Glycine max
  unsure (1)..(413): unsure at all n locations
gctcgtaccggaattgccgggtcgacccacgcgtccgattattttcagggtttgtgggtgaactttgcaaaggatcagttattttgtcttctaggacccaatggagctggaaaaactacagctattaattgcttgacaggggtaactccagtaactgatggagatgcgttgatttatgggcattcaatcagaagttctactggcatgtcaaacattcgaaagcttataggagtctgtccacagtttgatatcctatgggatgcactgtctggtcaggaacacctncaactctttgctactattaaaggcctgtccccagcttccataaaatcaattacccagacttcattagcagaggtaagactcacggatgcagccaaagtgagagctggaagttacagcggaggaatgaa

SEQ ID NO: 247554 - DNA, 517 bp, Glycine max
  unsure (1)..(517): unsure at all n locations
agtgcgtctcatgccagcccagtaagncacgctcgtaccggtccggaattcccgggtcgacccacgcgtccgcgccggcatggagccacgcataatccgcgagatcgacgccatgcgccgcctccaccagcaccctaacatcctcaaaatccacgaggtgctcgccaccaaaaccaagatccacctcgtcgtggagctcgccgccggcggcgagctcttcgccaaaatctcccgccgcggaaagcttccggagtccaccgcgcgccgctacttccagcagctcgtctcggcgctccggttctgccaccgcaacggcgtggcgcaccgcgacctgaagccgcagaatctcctcctcgacggcgacggcaacctcaaggtctgcgacttcgggctctccgcgctgccggagcagctcaagaacggcctcctccacaccgcctgcggcacgccggcgtacaccgngccggagatcctccgccagagcggcggctacgacgggtccaaggccgacgcttgg

SEQ ID NO: 247555 - DNA, 535 bp, Glycine max
  unsure (1)..(535): unsure at all n locations
nagttgtatgtattgnaggagagttgaggttttttaagaaggggaagtatgcacgctccaccggtccggaattcccgggtcgacccacgcgtccgactacaagtacttccttacaatcaaaaccaacaacaactatggcaagttatcaaaagcactacgatgatcagggtcgcaaggttgacgagtatggcaacgttgagaagcaaaccgacgaatacggcaaccctgttcatgctgctagtgtcacctatgtagccaccagaactgctgctggtggttacagtgatgacattaataagcaacatgataccaccaatgcctacggcgtagacactggtagacagcattctagtggtggctacgatggtgacactaataaacatcatggaactactggtggctataatgatgacaccaatagacatcatggaacttccggtgtctatggtatagacaccgatgggcaacaacatgggactacttgtggctatccggtgacaactgtaggcaacatggggacatctgtggcccttat

SEQ ID NO: 247556 - DNA, 518 bp, Glycine max
  unsure (1)..(518): unsure at all n locations
gtgggggggaaataggtgnctctatgaagcaggattattgcacgctctaccggtccggaattcccgggtcgacccacgcgtccgctcaaactagtagtattattcttccattccgttctacatataatcattcataatgggtgttttcacattcgaggatgaaatcaactcccctgtggctcctgctactctttacaaggccctagttacagatgccgacaacgtcatcccaaaggctcttgattccttcaagagtgttgaaaaccttgaaggaaatggtggcccaagaaccattaagaaaaacacttttcttggaggttggaaaaaccaagttgggctgcacaaaatagaaagccttgatgaagccaaccttgggatacagcttcagcgtgggttggggtgctgcattgccagacacggcggaaaagaacacattcgactccaaaattggtgcttgtccccaatggaggtctgctgggaagctcactggcaaattccaaacccaagggaaatcctgc

SEQ ID NO: 247557 - DNA, 515 bp, Glycine max
gggaggagcctttgtaatagacgtgacatggtattgtatgctctaccggtccggaattcccgggtcgacccacgcgtccgatttgcatcccagacaaagaagatgaatcggggccaatcatacttcattaggattcttggggtcttaactctagttaatcagttcttgattatattaaaagctatttgattgaagaaaataactacatggatcgagaagacattgcttcagatgtttcaattgctgataaaatatggaaacgccttcctagttgaatccaatctcacaatattcaagatcaccaacataagagttactatgactgaggtcgttctgtattgtacttcattgaacgattaatggaagaagcaatccagagactgagaatgaaagagttatatattgtcggaaagcgatggttcaaacccttagaagtgcacaatttgagagggaaaaatcgaaggtgcttgtagaaagaatacggaattactcaccgattattggtacttggcaac

SEQ ID NO: 247558 - DNA, 532 bp, Glycine max
atgaaggatggaaagtggaaggatcttcgtcatgttatatgtatgctctaccggtccggaattcccgggtcgacccacgcgtccgcccacgcgtccgcccacgcgtccggttgatttgagagcattggctaggcacactcaagggttcagtggtgctgatattacagaaatatgccagcgagcatgcaaatatgccataagagaaaacatagagaaggacattgagcgagagaggaagagtagggaaaaccctgaggccatggatgaagataccgtcgacgacgaagttgcggagatcaaggctgctcattttgaggagtcaatgaagtttgcacggaggagtgttagtgatgctgatattcgcaagtatcaagcatttgctcagaccttacagcaatcaagagggtttggaagtgaatttaggtttccagagtctggagataggactactactggatctgacccctttgcagcttctgctggtggggctgacgaagatgatctatataggtaggctttattattacgggga

SEQ ID NO: 247559 - DNA, 534 bp, Glycine max
  unsure (1)..(534): unsure at all n locations
agtttgaggtggttgaggtcngtccatgcacgaagcagtacaggcgtgcctgtaccggaattcccgggtcgacccacgcgtccgtgtgactcgttcttcttcgtcgttatcttcttcttttgttgtttgtgtgtctgtttggtctgtcacctgaaaatgtcttgctgcggtggtaactgtggttgcggaagcgcctgcaagtgcggcaacggctgcggaggctgcaagatgtacccagacttgagctacaccgagtcaaccaccaccgagaccttggtcatgggagtggcaccagttaaggctcaattcgagagtgctgaaatgggtgttcccgctgagaacgatggctgcaaatgtggagctaactgcacctgcaacctctgcacttgcaagtgaggtgttggagagctaaagcttcaagcagagatggcccttagaaataatgataaaaactatatgtaggttcaaaacttcatagatatgtaggatggattatggtgcactcttgtgttatgaggctaaacaaactccctt

SEQ ID NO: 247560 - DNA, 516 bp, Glycine max
  unsure (1)..(516): unsure at all n locations
agtattntattatagaatagactgtaggctctaccggtccggaattcccgggtcgacccacgcgtccgcacaaatttacattaagcatagtacaaaacaatgaagaccaaactgctagcatttctgctcttctttgccttgactacaaaaccactactacttggagcagctggagctgctccagagccagtgattgatacatcaggcaagaagctgagagctgatgcaaattaccatatcatccctgcagtgcccttcaccatatgtggctttgttggctgtttcactggtggaggcctttcactagacagcatagatgaatcttgccctcttgatataataatcgagaaagccaatgaaggcctaccactgagattctcaccagttaacaccaaaaaaggtgttattcgtgtctccaccgatttgaacatttttttctctgattctgatgaaaggtgtccacaccattccactgtgtggatgcttgatcaatttgatgcctctattggacagacc

SEQ ID NO: 247561 - DNA, 538 bp, Glycine max
  unsure (1)..(538): unsure at all n locations
atgttttagnagatagaggtttattccatgcctagctnagtancgcattgccggtccggaattcccgggtcgacccacgcgtccgtacttatactagttttctacgattattcatagtgaggcaatagtagcagccattcacgctggtctttgcttctcgttactcatttctcacctaactttctattcttctcagtctcagatcagaaccttatccatggcagcgttccagaagatcaaggtcgccaaccccatcgtcgagatggacggagatgaaatgactagggttatctggaagtcaatcaaggacaagctcattttgcccttcttggagttggacatcaagtattatgacttangccttccttaccgtgatgagaccgatgataaagttacaattgaaagtgcggaagcaactctcaagtataatgtggcaattaagtgcgcaactattactccagatgaagctcgtgtgaaggagtttggtctgaaagccaatgtgaagaagtccaaatgggacaattagaacattttgatn

SEQ ID NO: 247562 - DNA, 513 bp, Glycine max
  unsure (1)..(513): unsure at all n locations
agttctttcatgagtagagtanagncacgctgtaccggtccggaattcccgggtcgacccacgcgtccgaaacgatgaaggaactatgggcacaaatggggtcactaatggccactattgtgttcatgtacacaatctttgagcgcttcttccctccacacttgcgtgaaaaacttcaagcctatactcaaaaactcaccaaccatttcaacccttacatccaaataagcttccctgagttctcaggggaacgactgaagaagagtgaagcatacacagccatccaaacctacctgagtgcaaactcatcccagagagccaaaaggctcaaagctgaagttgtgaatgatagccaaacccctcttgtcctcagcatggatgacaacgaagagataactgacgagtttcatggcatcaaactatggtggagtgcaaacaaagtaagcaacaatccacaaagatacaacctttttcttaatacgggtccttaaacgagaaaaggtcttcaagcta

SEQ ID NO: 247563 - DNA, 522 bp, Glycine max
  unsure (1)..(522): unsure at all n locations
gggggtgtggggagaagtatctgtaattgcgattattgctngcactgccgtaccggtccggaattcccgggtcgacccacgcgtccgcccacgcgtccggtcgctgctccgtaccagtttcactgcataaatttgagagaaaactctgcaaacatgttggtttatcaggacctccttacaggtgatgagcttctctcggactccttccgttacaatgaaattgagaatggaatgctgtgggaagttgaggggaagtgggttgttaagggagcagttgatgttgacattggtgcaaacccttctgctgagggtggagaagatgagggagtcgatgacgcagctgttaaggttgttgacattgctgatacattcagacttcaggagcaacccgcttttgataagaaacagtttgttaccttcatgaagaggtttatcaagaatttgactcccaagctcgatgcagagaaacangaagttgttaagaagcacattgagggagccactaaattacttcttctttaa

SEQ ID NO: 247564 - DNA, 446 bp, Glycine max
gtccggattcccggtcgacccagcgtccgcgaagcgcaatttgtcagtggaagaacttttaaatatgacataattggtgctggttgacattcttctgaggaactttctgaagaaaagaatcagggaaaagtaaagcaggttgatgctaggttgaggcaaagaatagatccacaatacaatgaagttcaagctcaaatggaaacaaatctattcaaattgtctcttgatgatgttgagactccaaaaggttccatgttagacctcaagatttcccaatctaagattgcactttccaaaaatacagttggagggaccattttgcgcagtgatttgctggcaaatttcttaacagaaggcaattttagagcaagtgttgatttgcaacgtacccaccgtatcaaaggaatgattaaaatggtggctacagttggcatttctggaaacac

SEQ ID NO: 247565 - DNA, 517 bp, Glycine max
  unsure (1)..(517): unsure at all n locations
agggtcatgtcatgagctagatgctaggncgtcccggtccggaattcccgggtcgacccacgcgtccgctttttagagagtcatctataagagctttggtttgtgggtattatattccaacaaagggctggatatttggcaaatgttgggctattggtagggaccccaatcactgggagaaccttcttgagtttaggccagagagggtttgttgaaaaatgggaagagtcaattggatgttaggggacaacattatcatctacttncgttcggtagtggaagaagagcatgtcctggtacttctttggcattgcaagttgtgcatgtgaatttggcagttctaattcagtgtttccaatggaaggttgactgtgacaatggcaaggtgaacatggaagaaaaggctggcatcactcttccgagggctcaccccataatttgggtccctattcgaagacttaacccattccctggtgtgtgaatggtttttattttaaacatcanttttcattcacgg

SEQ ID NO: 247566 - DNA, 533 bp, Glycine max
  unsure (1)..(533): unsure at all n locations
agttaggatggaggtaaagtttgtcgatgtcagctcatanagnactgccgtaccggtccggaattcccgggtcgacccacgcgtccgcccacgcgtccgcccacgcgtccgcccacgcgtccgcccacgcgtccgcccacgcgtgcgcccacgcgtccggttgcaagggataacataacagagtttcgttgaatctgcactaagaccctacgcgcacatcttgcaactccaatcgacatagcagcaatgtctacgctcgaaattgaagctcgagatgtcatcaagattgtgcttcagttttgcaaagaaaattcgttgcatcagacttttcagatgctgcagaacgaatgccaggtttctctgaacaccgttgacagcattgagacctttgttgctgatattaatagtggaaggtgggatgcaatattgcctcaagtttctcaactcaagcttcccaggaataagttggaggatttgtacgagcagattgtattagaaatgattgaactttcagaccggattctggacgtcct

SEQ ID NO: 247567 - DNA, 540 bp, Glycine max
aggaagagtttgtggatagagtgtctgatataagaatatgtatgctatctcgtccggtccggaattcccgggtcgacccacgcgtccggtgttttgttagttcacacactaagttctgaaaaatgagttccaaagtttttgttatgctacttatgttcatggccactatacttttgatctcctctgaggttgcacccgatgatgcataccagaattttgacaaaacagatgggaagcgtagtgcaaatggggtagatgaaagcaaatattggcgtggtggctatggcgactatggtggttggcgtggtggtggttggcgtggtggctatggaggctggcgtggtggctatggtggtgggcgtggtggctatggtggctggcgtggtggctatggtggtgggcgtggtggctacggaggttgcggtggtgggcttgggcctaacgaacataatgaggctgggattgatgctatcccttacaactaaaaaggaaacctggctaaagcttattttgggatttaagtaatttgtattaaataaa

SEQ ID NO: 247568 - DNA, 529 bp, Glycine max
  unsure (1)..(529): unsure at all n locations
ggaaaggtggaaggtaaagttngtccatgatcgacatgatgccacgctctaccggtccggaattcccgggtcgacccacgcgtccgcggcgatgagacggcaccgtttttcggcttccttggagccgcagctgccctcgtctggtcctgtatgggagctgcctatggcacagcgaagagtggcgttggcgtggcttcgatgggtgtgatgagaccagagctggtgatgaagtctattgtccctgttgttatggctggagttttgggtatttatggccttattattgctgttattatcagtactggcattaatcccaaggccaaatcttattacctctttgatggttatgcacatctctcctctggtcttgcctgtgggctggctggcctctctgctggcatggctattggtattgttggtgatgctggtgttagagccaatgcacagcagccaaagctttttgttggaatgattcttatgctcatttgtgctgaagctcttgctctctatggtctcattgttggtatta

SEQ ID NO: 247569 - DNA, 515 bp, Glycine max
gagagttttgtttaccaagaaaaatattgtcatgctcgtaccggttcggaattcccgggtcgacccacgcgtccgcttcatgaccataatcgactactgtttaaatctgaaaaaaaaaaaaaaaaagaaaagggaaaaaaaaaaaaaaaaaaaaaaaaaaaaaagaaaaaaaaaaaaaaaaaaaaaaaaaaaaaaaaataaagcatgctgtggattaatttttacgtactctcgcttatagctaattcactgtccgttggtgtacagcaaattgactgctaaaaccatgccattacccaacttaatagccttaacctaaatggtaccttgggcaatagcctagtaaccagaaggttatcaccaacaggcgtaccgacatggtgaccaggctgaatggccatttgggattggccgttcagcggctcattaaattcggacgtccattgaatactccctgaatcaccgctttactagtgagaactctaaaggggactccttaaatttcaatacctaat

SEQ ID NO: 247570 - DNA, 521 bp, Glycine max
  unsure (1)..(521): unsure at all n locations
nggggtgggagaggtnnntcactgaatgtagaccatcggcatnctctaccggtccggaattcccgggtcgacccacgcgtccgaaaagctcagaaactcttaatgttgttccgagagcagcgacgggacccttcaccaggtaagacacataagtgcccacctgaaactgctagtgatttgtctatgccacctgctgaaatgaaaccgatatgcaagtcgattttgagaagaaagtccgggagagcttttagctttttctggaaaaacaagagctattctgtataccagtgttaagttccattggttgttgtaaatctgtgttagcatcttttatttttgtggccctgcttttatcctcctnctctacttcttggtcccatggggtgctctggttaattttggttcaaagcgaaaaaaaaatgtacaagccctgtgtaatttatggatttgttttcttctttcgcttttctctttgtgaaaatcaaatttccagggttttttcaaaaaaaaaaaaaaaaaaa

SEQ ID NO: 247571 - DNA, 298 bp, Glycine max
ccgctcgacccacgcgtccgggggaacaaccgcttccttatccaaatgcatttcacaccaaggcctcaaccaacgggccctggttaaagtccatgcggacgctctactaaccgggagtctctgacccgaagagcgaaccataatggaagagtaaattaccggaaaccgaataaccgtttttacgtgaaagcctccgccaaagagagtgcctgtgacctgcattcccgctctgcgatgcaggccggcattgacaagcgcggctactctgattggcatactcatgagcccagagggagtg

SEQ ID NO: 247572 - DNA, 89 bp, Glycine max
ccgctcgacccacgcgtccgcggacgcgtgggcttacgcgtggggttaacttacttaatcaagtagttgtggaatggcagggttaaagg

SEQ ID NO: 247573 - DNA, 403 bp, Glycine max
ccggcacgacccatacgtccgcaggaagaaagaagtgcaatggacattggaatctatggctatcctacaccagcagggaaagggatagagtcttactatgatgtgccagagggagtggatattcggggaagatatgatgcagagtttgcaaaaatcctcacaaaagatgctttgaaattcgttgctgacttgcaacgtgagttcaggaaccatatcaagtatgcattaaagtgcagaagagaagcaaagaagaagtacaatgaaggggctcttccagagtgtgatcctgccacaaggtacatcagagagcaagagtgggtgtgtgcacctgttccaccagcagttgctgatagaaaagttgaaatcactggccctgtggatagaaagatggtcatcaatgctc

SEQ ID NO: 247574 - DNA, 534 bp, Glycine max
  unsure (1)..(534): unsure at all n locations
nggtgagctggtttcngagatagtacangtcacgcatgtccgtaccggtccggaattcccgggtcgacccacgcgtccggtcaaaaacagggagaagcttctcacatcccttcgtcaacacctctccgactcttctcgttctctccatggcttcgtcctccttcaaggtggcgaggagcaaacgcgttacgacaccgatcacttggagctcttcaggcaagagagttacttcgcttacttgtttggagtcatagagcctggattctatgcagctattgacgttgcaactgggaattctatcctatttgctcctaggttaccttctgagtatgctgtttggttgggggagattaagccactctcctactttaaggaacactacatggttaccacgtgttgcttctcagatgaaattgaaagtgtattgcaacaacattaccagtgttccgggaaacctttgctggttctcttgcatggccctaatacagataggggatattactcttaaccagcacaagttcagggcattgataa

SEQ ID NO: 247575 - DNA, 532 bp, Glycine max
agtttagtagtgtttccgaatatagtgattgatggtaatcccgtaccgctccggaattcccgggtcgacccacgcgtccgcaaacacgttcgtctcgtttcgttcccatggcggtctccgtttccgcgtcctccgcgattgcttgtttgaactccgaacgctccacgcgcttggcaccctcactcgtctccgcatcttcttccgccaagcaatcctcgctgcaattcacgtcgcccacgcgccttcttcggattagtactccacgcgctcccgctccttcgcgacctcgattccttcctctggttcaagcgaagaaacaaacctataactcgtttgaagatttgcttgccaattctgaaaagcctgtgttggttgacttctatgcaacctggtgtggtccttgtcaattcatggttcccatactcaatgaagttagcactcggcttcaggataagatacaagtgggtgagattgatactgagaagtatccaaccatttgctgacaatccagaatggagcgttgccgacttta

SEQ ID NO: 247576 - DNA, 451 bp, Glycine max
cggaattcccgggtcgacccacgcgtccgcccacgcgtccgcaaaacgagaagtatccaacaatgactaccacccgtgttgctatctgtctttgctttgcattcctttactacgcggctgaaggagccaaggttagtttcaataacaagtgctcatacacggtatggccaggaaccctaaccggtgaccaaaagccccaattatcaacaactggtttcgagttgggtccaggagcatccaactctgtggaccttccatctccatggtccggtcggttctgggcccgaacaggatgctccaacaacaacggaaggttcagctgcgccaccgccgattgcgcctccggtcaagtcgcatgcaacggtgccggtgcaatcccgccagctactttggtagaaatcacagttgcagcaaacggagggcaagatttctacgacgtgagcaacgtgga

SEQ ID NO: 247577 - DNA, 536 bp, Glycine max
  unsure (1)..(536): unsure at all n locations
ggaggagctcgtgtgtgatcatcaatcactaggctcttnctgatgcccgtccggtccggaattcccgggtcgacccacgcgtccgcccacgcgtccggctcagacacgcacagatctgatctgatctgatctatctgaagccgaaaacgccgacggtgatgatgaagatggggtgttcacgttgctccttcttcctcttcctcatcctcttagtggcgctcttcccctcgtcgctctccgagatccgcttctccgagatccgaaacgacgatcgccgcatcatccccttcgatcagtttggattcacccacaagggtcgccttgagctcagcgtttccaaaatctcactctccaattccaatttggacctctcgaaggtcggcttctttctctgcaccctcgattcctggcttcatgtcctccagcaactcgaggacggtgagattcggtgcgcccttcaatccgatctggtcaagtccgtctattccttcaattctctaaacggcaaggactctttcagcacgctctancaagag

SEQ ID NO: 247578 - DNA, 528 bp, Glycine max
  unsure (1)..(528): unsure at all n locations
ggtagaggttctactactgaacctgcccctacgcatgacgtaccggttcggaattcccgggtcgacccacgcgtacgattagctttggtcgtcgggtgactgaaggatatggaatgacagagagtacttgtattatgagtttcattgatgagggtgacaaacttggtggtcatgttggctctcctaatctagcctgagagataaaacttgcggatgctccacaaatgaactatacatctgatgatcagcccaatccccgtggtgaaatttgtgtcaggggtcccattgtttttcggggctatcacaaagatgaagcccatacgagagatgtcattgatgaagatggatggctacatactggagatattgggacgtggttacctggtggtcgtctcaaaattattgataggaagaagaatatctttaagttggcacaaggcgagtacattgctcctgagaagattgaaaatgtatacgccaaatgcaaatntgtggcgcagtgacttgtatatggtgatagcctaaaat

SEQ ID NO: 247579 - DNA, 453 bp, Glycine max
accggtccggaattcccgggcacttttctctttgattcatcaatggcaaccgcgaggaccgtgaaggatgtttcgcctcacgatttcgtgaaggcgtacgcctcccatctcaagcgttccggcaagatggagcttcctgagtggactgatattgtaaaaacagcaaaatttaaggaattggctccatatgatcctgactggtattatgttagggctgcctcaatggcaagaaagatttatttgagaggcggtcttggtgttggggctttccagaggatctatggtggaagcaagagaaatggaagccgtcccccacatttctgcaagagcagtggggctattgcaagacacattctgcaacaattgcaaaacatgagcattgttgagattgatacaaaaggaggtatgaaaatcacatctagtggtcgaagggatcttgatcaaattgctggg

SEQ ID NO: 247580 - DNA, 536 bp, Glycine max
  unsure (1)..(536): unsure at all n locations
ngggggagtgttcntatatagaaagaagtatgctctaccggtccggaattcccgggtcgacccacgcgtccgcttagatcggttgggaatcgatgattttgatatggaagaagaggtgagacccgatttcggttgcccctattgttatgaagactttgacatcgcgtctttgtgttctcatcttgaagatgaacattcttgtgaatcaagagtcacgatttgtcctatatgctccgataaagttgcacggaacatgttaagtcacataacgctgcaacatgggcatttattaaagttacagagaaggcgcaggttaagaagagttgctattccaaacagtcagacattgtcccttttgggtcgagatcttcgtgaggctcatctacaggtgcttcttggtggtggaacgtgatggtggataccggtcaaatagtgtagctgcagccgtatctaatgctggtgctactgagacttcctaatcttaattattttgaactttcctgcttgtgaagctgaagaaatttcataatctgtgg

SEQ ID NO: 247581 - DNA, 537 bp, Glycine max
  unsure (1)..(537): unsure at all n locations
tagggtgtcttcngtagattgaaggagggaagtattgctagactggtccggaattcccgggtcgacccacgcgtccggttcttcatgttcgaattcggcggaactttgcatttgtgcagtttgagacacaagaagatgctaccaaagctatagagtgtacaaatatgagtaagatcctggacagggtggtgtctgtggagtatgctctgagggatgatggtgagaggggggacaattatgacagtcctagaagaggtggttatgagagatcacccagtccttatcacaggcgaccaagtcctgactatggtcgtccacgcagccctgtctatgataggtacaatggtggtggaccagacaggcggaggagtcctgattatggcaggcacagaagtcctgattatgggaggcgcaggagttctgattatggaaggcgcaagagtcctgattatgggaaacccaggagttctgaatatggtagatatcgcaancgttcgccggttccaaaggttagaacatatgggaactcttggtttt

SEQ ID NO: 247582 - DNA, 546 bp, Glycine max
  unsure (1)..(546): unsure at all n locations
nggttaagtgtgtctntagcaccagaaacgattgtatgcatgtaccggtccggaattcccgggtcgacccacgcgtccgattatgcgtgcgcccatgcgtccgtgctttgaatactcacacagtgagacacttgaacgtgagacctctgctgtgtaccgtccacggatgcttcagatcctgcactgatcgtcctttggctggtgtgctgtgcatgattgtggagttagaactgacgatattcactagtctcacagatgcattcttagagattcacaaggctcttgattacatgctgaaaggtgtgtctatcatatgcatcattcgcatggctgtgataatctctatgagaccagtgctgacatgacatggtacctgttgtatgactgagttctcaatctggatgtgtacatgagcaagtatattgcatatatgatgtatatgactccatgattatggaactatgtgaaaactcgtgagtttgagtgtttagaatgatacggcctttgctgctgttattagcctaaggcattcttaatatcaggggg

SEQ ID NO: 247583 - DNA, 528 bp, Glycine max
agtgagggggttggagcatgcatagtatgtcatccgtacccgtccggaattcccgggtcgacccacgcgtccgcccacgcgtccgcccacgcgtccgcgattttcgattctcttctctgcaactatgcctaaccctaaggtcttcttcgacatgaccatcggcggtcaacctgccggccgcatcgtgatggagctctacgccgacgtgactccgagcaccgccgagaacttccgcgcgctctgcaccggcgagaagggcgccgggcggagcggcaagcccctccactacaaaggctcgtccttccaccgcgtgatcccgaacttcatgtgccagggcggcgacttcaccgccggaaacggcaccggaggcgagtcgatctacggcgccaagttcgccgacgagaacttcgtgaagaagcacactggtcccggcatcctctccatggcgaacgctcgtcccggaaccaacggatctcaggtcttcatctgcacgacgaagactgaatggctcgaccgaagcacgttctt

SEQ ID NO: 247584 - DNA, 438 bp, Glycine max
ccggaattcccgggtcgacccacgcgtccggaaagctggaaggagataagaaatgataatacagttacttggttagcctattggagtgaccctatcaatcccaagttattcaaatatgtatttctggctgctagtagttccttgaaggggcaaagcgacaaggaaaagtatgagaaagctaggatgttaaagaattatatagggaatattaggtctgcatacacaaaagattttaccagtaaagatattacaaagcagcaaattgctgttgctacttatcttattgataaattagctctgagggctggcaatgagaaggatgacgatgaagctgatacttgtggttgctgcacgttaaaagtagagaatgtgactagagaaccccccaacaaactgaagtttaacttccttgggtaagattctatcaagtatgaaaat

SEQ ID NO: 247585 - DNA, 533 bp, Glycine max
  unsure (1)..(533): unsure at all n locations
agtataggggctcnnatcatgtatcagaggcctcagcactgccgtaccggtccggaattcccgggtcgacccacgcgtccgctttcttctaaaccctatggccgacgaagccaaagccaaaggcaacgcagccttctcctgcggggactatcctgccgccatccaccacttctccgatgccatcgccctggctccctccaaccatgtcctctattccaaccgatccgccgcatacgcctccctcaaaaactacgcagatgcattagcggatgccaaaaagacagttgaactcaagcccgactggtccaagggttacagccgtctcggtgccgcgcatcttggcctttcccaatacgatgatgctattttggcttacaaaaggggtctcgaaatcgaccctcacaacgagccccttaagtctggtttggcagatgcgcagaaggccttggccgcggcctncaggcctcgcccctcggcctctaaccccttcggtgatgctttctctgggcctgagatgtgggcccgtctcaccg

SEQ ID NO: 247586 - DNA, 538 bp, Glycine max
  unsure (1)..(538): unsure at all n locations
nagtagtgtgggtcngaggcattagtagtagcgcttccgcatgcacgtaccggttcggaattccagggtcgacccacgcgtccggtgaaaactgaactatgcaagctggaagatacgctttctgcgttgaggtcttggatgcggtctcagtctccaccgcttgatgcctcagttggtccttctgtagattatcaccagagcgaatatgtgtactcacgagacaagcgccgcgaattcggataccgcttcactggaagtgccggctaggcacttataacacagaatgaagcactgctgaggactgatggacgatgtctattgcatgctgatcaagaacttagtgctcagtggaagcttatgcgtattggtgaagatcctgctgtaaatatccggataggcgataatttgccaaaaaacgcattcattgggggacgacccttggtgcatttgaaatgatactggttaaaaattgggaccgtgccttatgcctaaaaacaactaggctggtttcaagcttcaaaaaattgggtggttgaac

SEQ ID NO: 247587 - DNA, 530 bp, Glycine max
ggtgggtagagggtgagtatggtcagcggatgagcactgccgtaccggtccggaattcccgggtcgacccacgcgtccgattcgtccgggaaattagggttagggttgcagcgtcctccatcagcacccgtatataaatacccttttcccgcccacttgttctaccgtaatccttacgctctctcactcacaaacgcacactgaattcaaaaacatcgaaagagagaggcatggccgagcaaaccttcatcatgatcaagccagatggcgttcaaagaggccttattggcgagattattagcagatttgagaggaagggtttttacttgaaagggttgaaactcgttactgtggaccgtccttttgctgagaagcactatgctgatatgtctgcaaagccctttcttagtggatacgtggattacattgtctctggctcctgtagctgccatgatctggggagggtaagaatgatgttacaactggcccgaaagattatcggagccacatactcagctcaatttgagcct

SEQ ID NO: 247588 - DNA, 539 bp, Glycine max
  unsure (1)..(539): unsure at all n locations
ggggagggtgtcntaaatggggggagatggtatgctgtaccggtccggaattcccgggtcgacccacgcgtccgcgaagagaagaagatggaggttagtttatcctcaacatcatgtatacccttaagctcgaagttgaagcataagcatggccttttccactctcaaattcccattcccacagcttcaaccaaaaccagaagaacaaaacctttgtccatagttaacgcctccagacaaaccttgtcctccaactggctcgtttctccacacgatttttctgcatccaccgcttccccatggcttcccagattcgaagagctcgacgccaccaacatgcttctccgtcaaagaattatttttttgggttctcaggtggatgatatgactgcagattttatcattagtcagcttttggttttggatgctgaagactccaagaaagacattaagttatntataaattcacctggtgggtctgtaactgcttggatgggaatttacgatgccatgaaaatgtgcaaagccatgtgttaaac

SEQ ID NO: 247589 - DNA, 320 bp, Glycine max
ctttctcttctctgaatccatttactttgtgtggaagtcaatatgagtcttaagggatttttcgagggtggtgtcgcttccatcgtcgcaggctgcaccactcacccactcgacctcatcaaagttcgaatgcaacttcaagaaacccacactctccgcccagcctttgcctttcacgcttccactccaatgcctcctccgccgccctccggccccatctccgtcggcctccgcatcgttcagtcggagggactcgccgctcttttctccggcgtctccgccaccgtcctccgccagacgctctactccaccacccgcat

SEQ ID NO: 247590 - DNA, 545 bp, Glycine max
  unsure (1)..(545): unsure at all n locations
ggtgaagtggtcntagaacagaagtgattgtatgctctactcggtccggaattcccgggtcgacccacgcgtccgagcatcatcatgtccaccgcagcgcagcccaaggccaagaaaacggcgtcgtccaagaagcccgtctcccatcctaccttcgccgcgatgatagcggaggcgatagcgagtctgaaggagagaaccggttcgagccaatacgcgataaccaaattcatcgaaggcaagcacaaggagttgcctccaacctacaagaagcttgttctcgttcatctcaagaagtctgttgctgctggcaagctcgttaaggtcaaaaaactctttcaagctcgcaccgactaagtctgctcctgttaaagccgctgctgctcccaagaagcccaccaaagctgcggctaagcccgccgncaagcccgcttccaagcccaaagctgctgcacctaaaaaagaagctgttgcccaacccaaggccaaaactgtngccacccagcccaaaggccagaccggctaagagcccgcccaaaaaagtt

SEQ ID NO: 247591 - DNA, 380 bp, Glycine max
  unsure (1)..(380): unsure at all n locations
ggaattcccgggtcgacccacgcgtccgcacaaactcagcgtgctaaaagaatctcgttctcgcggtctcaaggaaccctagatcggatcatgtctggagcgtacggtcaagacggcggcggttccgcgccaccgtcttatggagccagcggcggatacggttccaccggcggtggtgccggtggaggtggtagttatggtggcggaggctatggaggaggaggaggtggtggcggatatggtggtagtgatggcggnggaggtggaagttacggagccaaaggcagcggaaacggctgcggatatggtggtaacgatggtggaggttatggcggaagaagcggctacagtggaaaccgtggcggaggctatggaggaag

SEQ ID NO: 247592 - DNA, 520 bp, Glycine max
ggaggctgtgtggatcatgagatgatgtatgctaacgctccggaattcccgggtcgacccacgcgtccgggaactatgcctgagcggggcgaaccagaggaaactctggtggagcccgcacgatactgacgtgcaaatcgttcgtctgacttgggtataggggcgaaagactaatcgaaccgtctagtagctggttccctccgaagtttcctaggatagctggagcccgcgggcgagttctatcgggtaaagccaatgattagaggcatcgggggcgcaacgccctcgacctattctcaaactttaaataggtaggacggtgcggctgctctgttgagccgcgccatggaatcgagagctccaagtgggccatttttggtaagcagaactggcgatgccggatgaaccggaagcttggttaacgtgcccaacttggcgctaacctagaccccacaaaaggtggtgggtcgattaagaacaacaggacggtggtcattggaagtcgaaatccgctaaggag

SEQ ID NO: 247593 - DNA, 528 bp, Glycine max
tagttagtgggtttatctgaattagaggctaccgcatgccgtaccggtccggaattcccgggtcgacccacgcgtccgcaaccgttgactagtctaaagcttaactctccgatccttcaggagtctattgctatagggatcaatgaaaatgctgaagcaggatgtgaggctgatataaatactcatttctccaattatacagttgaacaatttaagcgccttattggagtcaaaccaactcctagaaatgaactgaatagtacacctgctatatgtcacccaaagtgattgaaattgccaatgaattgagacgctaggtcagcttgatctcactgttgcactattgaaagaattctagatcacggtcactgagattcttgtagggcatttgatgctagcgaatcattgtcagatcgctcttgcattcattatgatgtaaatatgtgtctctattgtaatgaccttcttggatgctgtggctttatgagtggatactggtgtcattggggataatcactgtttccgagg

SEQ ID NO: 247594 - DNA, 532 bp, Glycine max
  unsure (1)..(532): unsure at all n locations
ngtttggtagaggttgnattatgggttagtggactcagcactgccgtaccggttcggaattcccgggtcgacccacgcgtccgctcgcactctctctacgcacgcctcaacatcccttctctgctccattcattatgtctccgtcgttggatcttccccccaagggtggcttcagtcttgatctatgccgaagaaacgcaatgcttcaaaacaagggcctcaaagccccaacctttctcaaaactggcaccactattgtcggtttagttttccaggatggtgtcattcttggagctgatactagggcaactgaaggacctatagtggctgataaaaactgtgagaaaatccattatatggcacccaacatatattgctgtggagcaggcacagcttgtgatacagaagctgtaacagacatggttagctcacagctgcaactacatcactaccatactggtcgggaatcaagagttgctacggcactgactcttgttaagagacaccttgtcaattatcaaaggcatgtctc

SEQ ID NO: 247595 - DNA, 258 bp, Glycine max
cacccgtgggcccacgccttcggatctttcttttttcatctgttgtgcaattctagccatattcgaccgggttaacccctttctatattgcaccataggatttgtcaagaagagaatatgatgggaaagtcctggatgtttgttcttgttgggtgaccttatatgtaaagtcctttggagcatattcttttgaagacccagaagatccacgatacttcataactacacttcatctaattcttaatggacacatattca

SEQ ID NO: 247596 - DNA, 550 bp, Glycine max
  unsure (1)..(550): unsure at all n locations
ggggggaaagttcgtcngtcaatgaaggggaggatggtaagcatgtctcggtccggaattcccgggtcgacccacgcgtccgcccacgcgtccgccaacaatgactaccacccgtgttgctatctgtctttgctttgcattcctttactacgcggctgaaggagccaaggttagtttcaataacaagtgctcatacacggtatggccaggaaccctaaccggtgaccaaaagccccaattatcaacaactggtttcgagttgggtccaggagcatccaactctgtggaccttccatctccatggtccggtcggttctgggcccgaacaggatgctccaacaacaacggaaggttcagctgcgccaccgncgattgcgcctncggtcaagtcgcatgcaacggtgccggtgcaatcccgccagctactttggtagaaattacagatgcagcaaaccgaaggccagaattcttacgacttgagcaacgtggatggctttaacgtgcccatgtgcgtaaccccacaaagggggagtggcaattgtgaaactcc

SEQ ID NO: 247597 - DNA, 536 bp, Glycine max
  unsure (1)..(536): unsure at all n locations
ggaggtatgtcttagatggagggggatgtatgctctaccggtccggaattcccgggtcgacccacgcgtccgcccacgcgtccgatccgatccccgatggcggcggcgtcgcggcggctccgggacctgcagtcctcggcggggaacaagatctgcgtggactgctcccagaagaaccctcagtgggcctccgtctcctacggcgtcttcatgtgccttgagtgctccggcaagcaccgcggcctcggcgtccacatctccttcgtccgatccgtcaccatggactcctggtcagacatccagatcaagaaaatggaagccggcggcaacgacaaactcaacgccttcctcgcccagtactccatccccaaagaaactgacatcgtcacgaaatataacaccaacgccgcttctgtgtaccgcaaccggatccaggccatcgctgagggacgtccctggcgcgatccgncggtggtgaaggaaaacctcttccgcccgaaaggggaaaccgccgctgacacanaagccgggggaac

SEQ ID NO: 247598 - DNA, 566 bp, Glycine max
  unsure (1)..(566): unsure at all n locations
tgtagctagtttgataccgactcgnangcagtcgtactcttcggattcccgggtcgactcacgcgtccggttcggattgcggcgacgtgagcggttcgctgcccgcgacgttttgagaagtccactgggccttgtcatttatagtaaggagaagtcgtaacaaggtttccgtatgataaccatgctgaaggatcaatcgtcgatgctctaaacatatgattgtcacatcgtacacagattatctatttaccatcttttattaatgatggcttataatgtgttgttctatgtgcagatacctcttcttactatgatgcttttcattaatgcttcacaattatctacaatgagatttgttatagttttggtaaatttttattacttctatgctttatgttttctttttgctttctgtccattttactccattaaatcactgacatattattctactatataaaatgattatacggtgtattattggtactttttttttacttagtgctataacctttttctcatgttttacctttactattgctttttttttatcctttttctaattt

SEQ ID NO: 247599 - DNA, 529 bp, Glycine max
  unsure (1)..(529): unsure at all n locations
nagttttggtggtttgtcatgagatagtatgtatgctctacccgtccggaattcccgggtcgacccacgcgtccgcaaaaataccagctagcaggaaaattgggtccatgaggctggatgactgggtcttgtgcaggatctataagaagaagagcatggtaaaagcattggagcacaaagaggcacacccagaagtccaaattgctaatcttgcgcctgcaaatcatgatgttgaacagaaaatgatgaaccttcctaggacttggtcccttacttaccttttggatatgaattacttgggtccaattttatctgatggctcttattgctcaaccttggattttcaaattaacaatggggattagacccttttgggaaatctcaaccggttgaaatgaaacattatgtaacaaaatcaaggaaagaccaaggtgaacaaaatagcaacattggacaagccatatatgtgaaacaaatgtatgatttgctaggataaaaccaatangaaaaaaaaaaaagagcttggatt

SEQ ID NO: 247600 - DNA, 425 bp, Glycine max
accggttcggaattcgagggtacgacgtacgcgtacgaccacattataattaatattacatacattatgctgcttggctgagcaaggtactacttgtacatgttgatgggtatgtggcaaccattgtaacaatggtaatcataatggtgcctaaaaacgtgtgtgctcaaaccatcggatcttacatctgaacacaagactatttaaacagcataatctggcaggctgactatggttgtgcatgtaagaaattctactcacgagatgcttgacttaatgcatagaataactacaatgagttagattggctaggtaatcaagatgacttcaagcgtgatgaagcagctgatttcgaccattttagccatgaaacaagacatgtctgctacatagcagagattcacggtgcatcaggcgactactgt

SEQ ID NO: 247601 - DNA, 437 bp, Glycine max
acggttcgaattcccggtcgacccacgcgtccggaagaaaacctaagcttagaattagaaacaaagaaaagaagaaaggaaagaattgatcgttgaaaatgcagggaggaaagaaagcgggagagtccattaaggaaacagctacaaacattggtgcttctgccaaggctggcatggagaagaccaaggccactgtccaagagaaggcagaaagaatgacagcacgtgatccggtgcaaaaggagttggcaacccaaaagaaagaggcaaagatgaaccaggcggagctggacaagcaggcggcgcgtcagcataacacggcggccaaacagtccgccaccacggctgggcacatgggacatggccaccacaccaccggaaccgggactggaaccgccacgtattccaccaccggggaatatggtcagcccatgggg

SEQ ID NO: 247602 - DNA, 545 bp, Glycine max
  unsure (1)..(545): unsure at all n locations
nggggtaaggtgtcatacctactgaaaatagtcgctctatcggtccggaattcccgggtcgacccacgcgtccgcccacgcgtctcgccacgcgttcggcggtaccagtattgatgtacattataatcaataggagaattagtataaaaagtcatggccaagattaacaaatttggtgaacattaattattcctgaagcactaatgaagccttaccctttccatacaaggacactgaccaagagaaggcagaaagaaagacagcacgagatccggtgcaaaatgagttggcaaccacacaagaaagaggcaaaagatgaaccaagcggagctggacaagcatgcggcgcgttagcataacacggtggccaaacaagacgtcaccacggctgtgcacatgggacatgggcaccacatcaccggaacacggactggaaccgacacgtgtttcaccactcgggaatatgggcaaaccatgggggcccaccaaacttggtgaagactggcaatggacccggcagaccacgggccctgttaaaaaaagaa

SEQ ID NO: 247603 - DNA, 529 bp, Glycine max
  unsure (1)..(529): unsure at all n locations
aggtgttcgtacatgaagagggatgtaagatctaccggtccggaattcccgggtcgacccacgcgtccgaaatgaaattcatcccaataccaatgaggcacaatatattctatctgccatgaccaacagtcagaatgcaatttcatcagcaaatttacaaattaaggtgtcaacagctatagactctactttgattactaactcttaccctcccaatgatggcgttttcactagcgatgcggagccatacataaaacccataatcaacttcctagtgagcaatggggccccacttcttgccaacgtgtacccttactttgcttatgcaaatgatcaaagcattcctcttgcctatgctncttttacccaacaaggaaacaacgacgttgggtaccaaaacctttttgatgctatgttggattcaatatatgctgctttggagaaagtggaaccttccaatttgccaatgggggttcttagaaatggttgccacatttaaagggtgaatctggagcctcaattgataatg

SEQ ID NO: 247604 - DNA, 533 bp, Glycine max
  unsure (1)..(533): unsure at all n locations
taggtttagagtgggtcngatatagaaatagaaggtatgcggtaccgctccggaattcccgggtcgacccacgcgtccgcggacgcgtgggcgcgcacttcctcgagcacatgatcttcaagggcaccgcgaagcgcaccgtcagggagctcgaggaggagatcgagaacatgggaggccacctcaacgcgtacacgtcgagggagcagacaacgtattacgctaaggtcacggagaaggatgttcctaaagcgcttgatattttggctgatatattgcagaattcgaagtttgatgaaaaaaggattagccgcgagcgtgacgtgattcttaaagaaatggaagaggttgaggggcaaatggaggaagtaatttttgaccatttacatgcaactgctttccagtacactccacttggtagaacaattcttggtcctgctcagaatattatgaccatcacttaagatcatctacaaaactacattcagacacactacacggctcctaggatggtngttgctgcatctggagct

SEQ ID NO: 247605 - DNA, 381 bp, Glycine max
accggtctcggaattcccgggtacgacccacgcgtacggttagcagtcactgctctgattaaccgattctggacgtatagatcacaaccaagtattggactctatcattggcacacatggcagctcaaatgagcaagatcagaaagtttgtcgcggtcagattgttcactgccgagctgtactaggatctgacacatgaattgtcagcagacgtacactgcggcgtctatattagggttaccacgatgcgcaccaaaatcatgataagagccaacatatcacaaaccggtctaggtgagaagggaaggtgaattagggaacttaccttactggttcataagaggttcataatccacctaaacaacatactgctatatgctc

SEQ ID NO: 247606 - DNA, 380 bp, Glycine max
aatttcaccttttatactctaccttagttatcttttattatatatctataacattttattccacctaaactcttacacatctatttagcatacaacttattacactaaattcacatataaagatattcctaatgcgcttgatattttttctaatatattccataattctaaattttattaataaacgattatcctctatctttacattattcttatataaatttaataaatttatttgcaaatttattaattaattttttaccatttacattcaactgcttttcaatacactccactttttataacaattatttttccttctcataatattattacaatcactataaatcatctacaaaactacattcatacacactata

SEQ ID NO: 247607 - DNA, 545 bp, Glycine max
  unsure (1)..(545): unsure at all n locations
ngggtttaggtgtcttgtaagagaggatagtatgctgtctcggtccggaattcccgggtcgacccacgcgtccgcggacgcgtgggcggacgcgtgggccgacgcgtgggttccattccgatctacatataatcattcataatgggtgttttcacattcgaggatgaaatcaactcccctgtggctcctgctactctttacaaggccctagttacagatgccgacaacgtcatcccaaaggctcttgattccttcaagagtgttgaaaacgttgagggaaatggtggcccaggaaccatcaagaagatcactttccttgaagatggagaaaccaagtttgcgcttgacaaaatcgaaagcattgatgatgcgaacttcggatacagctacagcgtggtttggggtgctgcattgccagacacggcggagaagatcacattcgacttcaaatatggtgcctggtccaaatgaaggttctgttgggaagctaactgtcaaatacgaaacaaaaggagatgctgagcccaaccaagacgaactctaaa

SEQ ID NO: 247608 - DNA, 371 bp, Glycine max
ccggaattcccgggtcgacccacgcgtccgctaccctccacttggtgctccgtctgcgcggtggtatgcaaatctttgtgaagaccctgactgggaagaccattactttggaggtagagagctcagacacaattgacaatgtgaaggcaaagatccaagacaaggagggtatcccaccagaccaacagaggctcatttttgctggcaaacagcttgaagatggccgaaccttggctgattacaacatccaaaaagaatctaccctccacttggtgctccgtctgcgcggtggtatgcaaatctttgtgaagacccttactgggaagaccattactttggaggtagagagctcagacacaattgacaatgtg

SEQ ID NO: 247609 - DNA, 530 bp, Glycine max
  unsure (1)..(530): unsure at all n locations
naggattgtgtttngtcatgagacgtatgtatgctctaccggtccggaattcccgggtcgacccacgcgtccgcccacgcgtccgcccacgcgtccgggtcacaacaaccattggttatggttctcctaacaaggctaactcctacagtgtgcatggaagtgcactgggtgccaaagaagttgatgccacaaggcagaaccttggatggtcacatgagccattccacgtgcctgaggatgtcaaaaagcattggagtcgccacacccctgagggtgctgcacttgaagctgaatggaatgctaagtttgctgagtatgaaaagaaatacaaggaggaagctgcagaattgaaatctattatcaatggtgaattccctgctggttgggagaaagcactttcgacatacactccagagagcccagcggatgccaccagaaacctgtctcaaacaaaccttaatgcccttgcaaaggttctttcccggtctgcttggtggcagtgcacatcttgcttatttccacatgaactt

SEQ ID NO: 247610 - DNA, 531 bp, Glycine max
  unsure (1)..(531): unsure at all n locations
tagtngagtgtgtgtgctctcgagatagtatgtatgctcaaccgctccggaattcccgggtcgacccacgcgtccggagcgctcaatgggactccactggcagcacatgctgaatactacgctcagagatcaacaccgggtggatttctcatcactgaaggcaccttgatctctccaacttcttctgggtttcctcatgttcctggaatatactcagatgaacaggtagaggcatggagaaatgtagtggacgccgtgcatgccaacggcagctttatcttctgtcaactctggcatgttggccgtgcatcacatccagtgtatcagcctggtggggctctaccctcttcgtccaccagcaaacccatatcagacaagtggaaaattctcatgcccgatggctcccatggcatctatccagagcctcgtgcacttaccacttctgagatatctgaaatagtgcatcattatcgccaagcagctattaatgcaattcgagcacagtttgatggaatcgagaatcatggagca

SEQ ID NO: 247611 - DNA, 533 bp, Glycine max
ggtgttgagtggtttgttcatgcattagtagctaatcgtaccgctccggaattcccgggtcgacccacgcgtccgcttgtcaaccctttgagagttagaatggctgctgctattgaaatccccacaatagtgttgccaaactcctctgcccaacagaggatgccagtggttggaatgggatctgcccctgacttcacatgcaagaaagacacaaaggaggctatcattgaggccgtgaaacagggttacagacacttcgacactgctgctgcttatggctctgaacaggctctcggtgaagctctcaaggaagctatccatcttggcctcgtcttccgccaagacctctttgtcacttccaagctttgggtcaccgaaaatcatcctcatcttgtccttcctgctttgcgcaaatcacttaaaactcttcaactagagtacttggacctgtatctcatccactggcccctgagttctcaaccagggaagttctcattttcaattgaagtagaagatcctcttgccttttgagg

SEQ ID NO: 247612 - DNA, 536 bp, Glycine max
  unsure (1)..(536): unsure at all n locations
gggttgggaggctcangtgactgaaccttaactcatagctatgacgtaccggtctcggaattcccgggtcgacccacgcgtacgtatacttgtaccttttgaaggctaaaagtgcttcaatacaaacactggctaactgctcaggatgatgtgaatctcttgagtattgcagtaagcccctatgtatgcaatgtccaaatggcccatatgttgaagggacgtgaatccagatatgtggaagaaaatgtgagcaagcagagtgatttgcttctcaaatacaacgctgttcacaagactgtttcagagtttgaacacaatgagcatgacataacatagtctgttgtaattgctgaatacatatatgagacatgagatgacaaccccatcttaccttatgaagcttacccaacatactctgctcagagctgatccaaattcatcggtgatctgattgagactgctgtatctgacattgcatatacggttgatgacatgatagctgccatgcatgatttagaatcatatacatgtccttt

SEQ ID NO: 247613 - DNA, 529 bp, Glycine max
tgtaagaggctgtggcatgcgcacgtcacttactatgacgtaccggtctcggattcccgggtcgacccacgcgtccgtatacgcgactccactggcagcacaagctgcatactacgctcaaacatcaacacctcggggatatctcatcactgaaggcaccgtgatatatccaacttcttccaggtttcatcatgttcctagaatatactcagatgaacacgtataggcatggagaaatgtagcggacaccgtgcatgccaactgcagatctatcttctgtcaactatggcatcattgccgggcatcacatacaatgtatcagcctggtctagctctaccctcttattccatcatcaaacacatatgatacaagtggtaaaacctcatgctccatagctaacatcgcatgtatccagcacctccagcacttaccacttttgagatatctgaaatagtgcatcattatcgccaagcaactattaatgcaattctagcatggtttgattgaaatccagattcatggtacccc

SEQ ID NO: 247614 - DNA, 534 bp, Glycine max
tagtttagagaggttgtagcatgcctacgctacgtcagtatgactgtaccggttcggaattcccgggtcgactccacgcgtccgggacgtttgattgattgtttggagcgccgctatgctgtgctcaaccagtgcagctatgttgttcttgatgaggccgatcgtatgattgacatggggtttgagccccaggtgatgggtgtcctcgatgccatgccttccagcaatctcaaaccggagaatgaggatgaggagcttgacgagaagaagatttaccgcaccacctatatgttcagcgccaccatgccacctgctgtggagaggcttgctaggaaatatttgaggaaccctgttgtggtcaccattggcactgctggaaaggcaactgatttgatcagccagcatgtgatcatgatgaaggaggccgagaagttttccaagcttcataggttgcttgatgagcttaacgacaagactgcgattgtgtttgttaacaccaagaagaatgcggatcatgttgccaagaatttggtg

SEQ ID NO: 247615 - DNA, 550 bp, Glycine max
  unsure (1)..(550): unsure at all n locations
gttagtgtgtcngtaaatgaggggagattggtatgctctaccggtccggaattcccgggtcgacccacgcgtccgcttcttctcgtttttactttgacggtttctagagagagaaagtttgttatagagagagaaagcgcgctgctgcttcttctgctgctgcttcgacagtgagaagagagagagaagcgctcttctccgtaccgtttctagagagagaaactgatggccggagttaatccgaacggcgtcgccgattttccggcgactccaacgcacggcggacagttcattcagtacaacatattcggaaacctcttcgaggttacggcgaagtaccgtcctccgatcatgcctgtcggacgcggggcgtatggaatcgtttgctcgctggtgaataccgagaccaatgaactggtggcggttaagaagatagcgaacgctttcgacaatcacatggacgcttagcgtaccccttctgagattaagcttcttaggcatttggatcatggaaatgtgaatgggttgagagaagtgaattcctcccccc

SEQ ID NO: 247616 - DNA, 464 bp, Glycine max
  unsure (1)..(464): unsure at all n locations
cggattcccgggtcgacccacgcgtccgcccacgcgtccgcccacgcgtccgcgagatataattctaaactttgttattgcggggaaggacacgacggctgccacactttcttggttcatgtacatgctgtgtaagtatcctgaagttcaagaaaaagcagcagaagaagtgaaagaagcaacaaacacaaaaagaattagtagctataatgagtttgtgtacagtgtcacagatgaagctcttgaaaggatgaactatctccatgcagcaattactgaaactctcagactttatcctgcagttcccgtggatgcaaagatttgtttttctgatgatacactacctgatggatatagtgtaaataaaggagatatggtatcttaccaaccttatgcaatgggtcggatgaaatttatatggngtgatgatgcagaggattttagaccagaaagatggcttgatg

SEQ ID NO: 247617 - DNA, 528 bp, Glycine max
  unsure (1)..(528): unsure at all n locations
nagttaggtgttttgtccatgcacgattgtatgctctacccgtccggaattcccgggtcgacccacgcgtccgaagatgaataccaagcccgttttcttcttgtgcttcctctgtgcactgcttctcatctgggttgtggcaactgagccatccaaagatgagacacaagcagaagaaccaaagacacagccagatgcctggggaagaggtggaagtggggggcatgatggaagctggggacacggtggagactgggggcatggcggaggaggacacggtggaggacatggcggaagaggacacggtggaggacatggcggaggatgcagatgctgcggtcgaaagggctgcaaatgttgctgaagtaaaaatcacaaatatatgaactgaacacactcatatacttgagtgtactccatgtaataactagtatatatgtaagaaataagaaataaaagcatggactctatccgtgcttgggctggcataggttgaatgttttncgncaaccatgcatgtagttgaca

SEQ ID NO: 247618 - DNA, 451 bp, Glycine max
actcgctccggattcccgggtcgacccacgcgtccgtgggacccgaatacgaagtcgacgctgacacagatccctctgctggggacgaaggctggtccacgagacggggcggcatggacgcagaggctgaaggaagagtacaaggctctgatagcgtacacgcaaatgaacaagtccaacgacaacgattggttccgcatctccgccgccaatccggaaggcactcgctggaccggtaaatgctggtacgtctacaacctcctcaagtacgaattcgacctccaattcgatgtccccgtcacttacccttccaccgcccccgaactcgaactccctcaattggatggcaaaacccaaaagatgtataggggtggaaagatctgcttgactgtgcacttcaagcctctctgggccaaaaattgccccagatttggaattgcacatgcacttt

SEQ ID NO: 247619 - DNA, 409 bp, Glycine max
accggtctcggaattccggtcgacccacgcgtacgggccagtaaaggcgtaaacatataggctgagatcagagagtacagatatggttgcaaaggtggagctctcacagaaggcgtgaagcacagctctgtgaatccgtgtgactatgtggacatctttgatgcagatttacaacctgaccctaacttactttggcgcaccataccataccttgcttacaacccataagtgagcactagtccaagctcgatggaaattgactaatgctgatacaatgcttaatgaccagaatgcaagagatgtcattggattatcatttccttgtggagcatgacgtttgttcctcaagctatgccttctttagtttcaatggcacatctggtgagtggagaatatgagcattatatga

SEQ ID NO: 247620 - DNA, 536 bp, Glycine max
  unsure (1)..(536): unsure at all n locations
agttttatggtggctcnncctactgagtacgtagcacttacgcatgcctcgtaccggtccggaattcccgggtcgacccacgcgtccgcccacgcgtccgaattacctttagataggcattttgatatcaacaatgtgaagaggattgtgttagaagcagatggttatcagccgtatcttatttcccctgaaaagggattgagatctctaatcaaaggggttctagagcttgcgaaagagccatcacgtctttgtgttgatgaggtacatcgtgtcctgatagatattgtttcgtctgctgccaatgctacacctggtttgggaagatacccacctttcaagagagaggttgtggctattgcaacttccgcactagaagggtttaagaatgaatcgaagaaaatggttgttgcactcgttgatatggagcgtgcttttgtcccacctcaacacttcattcgcttggtacaaagaaggatggaaagggcaacgtcagaggaggagctgaaggcccgatcctcanaaaaggggcagat

SEQ ID NO: 247621 - DNA, 550 bp, Glycine max
gtggataagtgtcgtaaatgaaggggcgatggtatgctgtactcggtccggaattcccgggtcgacccacgcgtccgaatcactcatagtggtcctaatgtgaatggtagtttgcttgggatgggaaggccagttctgaggccaatgtctgatatgtggataccccatggagacccccatatgtcagcattgcagccaatgttttcaggaagaccaaggggagcacccagactaatgggcatgatgggggcacatagaggtataagtattccttcaatgcatagactcccattggggcctaatgcaccagggagtagtcctaatgcaatgccacaaaaaccaagaagttttgatgatgatatgaaggatcttgaagcattgttgaataagaaatcatttatggagatgcaaaaatcgaaaactggtgaagaacctttggaacttaattaacggaccactgcaaggaaaccggttgaacccgttaagtcaaaccaaaggggggtcttaagggagggcattattgggcttattgccaaagaaggatggcgcc

SEQ ID NO: 247622 - DNA, 453 bp, Glycine max
  unsure (1)..(453): unsure at all n locations
ccggaattcccgggtcgacccacgcgtccgcccacgcgtccgacgtcgcaacgcaaagcaaattgttgtccatttttgaaacagagaaacaaaagggaaaaaaaaaactcttccaaagtagaggcagagaatctgaaagctagggtttgggatgccgaagaacaagggaaagggaggaaagaaccggaagcgcggtaagaacgaggcggacgacgagaagcgggagctggtattcaaggaggacggacaggaatacgcgcaggttctccgaatgctcggaaacggtcgctgcgaagcgatgtgcatcgacggcaccaagcgcctctgccacatccgcggcaagatgcacaagaaggtctggatcgccgncggcgacatcatcctcgtcggccttcgcgactaccaggacgacaagggctgacgtcatcctcaagtacatgcccgatgaggccc

SEQ ID NO: 247623 - DNA, 532 bp, Glycine max
  unsure (1)..(532): unsure at all n locations
agttggggggtggtgtctaacggccgtcgccagcctgccctgacgttatgccgtcggaattcccgggtcgacccacgcgtccgggccccggaaagagttatcttttctgtttaacagcctgcccaccctggaaacggctcagccggaggtagggtccagcggctggaagagcaccgcacgtcgcgtggtgtccggtgcgcccccggcggcccttgaaaatccggaggaccgagtgcctcccacgcccggtcgtactcataaccgcatcaggtctccaaggtgaacagcctctggtcgatggaacaatgtaggcaagggaagtcggcaaaatggatccgtaacctcgggaaaaggattggctctgagggctgggcacggnggtcccagtcccgaacccgtcggctgtcggtggactgctcgagctgcttccgcggcgagagcgggtcgtctcgtgcctgtcgtggacggattgggacgggccctntcgggcctttttccgggcgtggacagtcaactcagaactgttcggaca

SEQ ID NO: 247624 - DNA, 289 bp, Glycine max
accgttcggaattccgggtcgaccagcgtacgcatcaacctcgctaatgatggattcctctgtcgcagatccaccgctcaagggaagaatgcgagtagtgtgtgttgcacgagagatcccaaattcaaaactaacattactactgatgaagagtttctgccacgtcagagtggtgatcttaccattatgtatgatgtgatcagaacttatgattcaaattactgtgctgatgttactattgcgaaccataacccacttgggaagcttgaccactggaaggtgagcttgg

SEQ ID NO: 247625 - DNA, 549 bp, Glycine max
  unsure (1)..(549): unsure at all n locations
ngggggggaggctgtcngtttatgtgggtgaattgtatgctctaccggtccggaattcccgggtcgacccacgcgtccggtttggttgtaagcagaaacttctctgttttaaatcattgtttgtgatttagctctatggtttttggttctgtttgtgattgaacagatgcagatcttcgtgaaaactttgaccggtaagaccatcacccttgaggtggagtcctccgacaccatcgataacgtgaaagctaagattcaagacaaggaagggatcccacctgaccagcagagacttatctttgcgggtaaacagcttgaggatggtcgaacccttggccgactacaacatccaaaaggaatccactctccacctcgtgcttcgcctcaggggtgcatgcannatcttgtcaagactttgactggcaagaccattacccttcgaggtcgaatcctcggacaccatttgataatgtcaaggcccaagatccacggacacggggggttttccctccagataagcccaaggttgatatttgctcgggaacaaac

SEQ ID NO: 247626 - DNA, 547 bp, Glycine max
  unsure (1)..(547): unsure at all n locations
agtnaagtgggtnnntttactgaaggggagggatggtatccttcgtccggaattcccgggtcgacccacgcgtccgggaaggattgggatcctcttggattttgtttggtatgagcctcttacaagatcaaaggccgacaanttagcagctcanagagccagagactttcatgttggatggttcattcatccccttgtttatggagagtatccaacaaccattcaaaatattgttgggaatagactccccaaattcactagtgaagaagttaaaatcgtgaagggttcaatagattttgttggaatcaaccattttcctccgacctacaggattgatctctttcagccaaaacttaaggcccaggtatctaaagggctcggaagcgcggattgcttattccaagaacggagtgcctatttgggccaaggcttattttaattgggtttcaacgtaccatggggatgtccaaaaattggtgtcctaaaggaacgctattgaaacacaccgtggtctattcccaaaaggggggtgaatccggaaacccac

SEQ ID NO: 247627 - DNA, 618 bp, Glycine max
  unsure (1)..(618): unsure at all n locations
agaagagaggaggagagagattattagatagtagatgaaagttgaaagatgaataagaagatgagagaatggaggaaatagaaatataagaaggtgaataanaatatgtatctgttgccatgncgtaccggtccggaattcccgggtcgacccacgcgtccgcggacgcgtgggtttgaacgttcctcttactgctaagtggcaccaaatgtctgcctttgtgtactttctggtgaccaatgcaatagcatgcacgtatgcagccatgtctctactacttgcccttgtgaacagaggtaaaagcaaaggcttgtggacattgatcgctgttctcgacacattcatggtggctttgctcttttccggcaacggcgccgctgcagcagtcggtatccttggctacaaaggaaactctcatgtgaattggaacaaggtgtgcaatggctttgggaaatattgtgatcaagaggctgcttcgattggtgtgtcactgattggatcattagcattccttatggcttcggggtattcctttggtaaggcttgatggagaaacttagtggattaattaaataaccaaagggtaattattatccaacaattaatctgagagaactt

SEQ ID NO: 247628 - DNA, 594 bp, Glycine max
  unsure (1)..(594): unsure at all n locations
atgtaatatgatgataggtgataaggtatgtttgagatataggatgtaggagtataatgaggaagttaggaattggtgctgngtagtattagtagtagctggtagtcataccggtccggaattcccgggtcgacccacgcgtccgcggcttcagaatggccttgagtgtggtggtgcatatctaaaatatctccgaccacaggaggctggatggaaatccaaggaatttgataatgaatctccatattctatcatgtttggtcctgacaagtgtggtgccacaaacaaagtacacttcattttcaagcataagaatcccaagagtggggagtatgttgaacaccatcttaagaatcccccttctgtcccgtctgacaaattatctcatgtgtacactgccattttgaagcctgacaatgagttgcaaattttgattgatggggaacagaagaagaaggtaaatttcttatctgctgatgattttgaaccccctcttatcccttccaagacaatcccaaatcctgatggtaaaaacctggagactgggatgagtgaaggaaaattcatactcaggtgcataaagccgattactgg

SEQ ID NO: 247629 - DNA, 606 bp, Glycine max
  unsure (1)..(606): unsure at all n locations
agagtgtgaggagaattgaggattatatgtgatggagagtaggggatgaaatagagatggaggatgggaagtagaagaggtagggaggctctngtagcctgcttaacgttcgtcgtcacgncgtaccggtccggaattcccgggtcgacccacgcgtccgggcaactctaacgtttctggaactctgggcccagaacttggccagctacagcatctgcggtacttggagctctacaggaatgagataacaggaaagattcctaaggaacttggtaacttgaaatcacttattagcatggatttgtatgataacaagttggagggtaaaattccaaaatcatttggaaagttgaagtcacttaaattcttgcggctaaacaacaacaagttgacaggatccatcccaagagaactcactcgtctcactgatctcaaaatctttgatgtttctaataatgatctctgtggaacaataccagttgagggaaactttgaatctttcccaatggaaagttttaaaaaccacagggttagtggtcccgagcttgaaggacttggttcatatgaatttggatgctgaagaagattaaaatcctttttatcatt

SEQ ID NO: 247630 - DNA, 539 bp, Glycine max
  unsure (1)..(539): unsure at all n locations
ngggatgtgtgtgtgatcatggagctcaatgcatggcatgacgtaccggtccggaattcccgggtcgacccacgcgtccgcccacgcgtccgctgaaaatgagttccaaggttttgcttgttctacttatgttcttggcgcactatacttctgatctcctctgaggttgcacccgatgatgcatacgagaattttgacaaaatagatgggaagcctagtgcagatggggtagatgaaagcaagtattggcgtggcggctatggtggcggctatggtggtggttatggaggtgggcgtggaggctatggaggtgggcgtggaggctatggagggggacgtggtggatatggcggcggacgaggtggctatggtggcgggcgtggtggctatggcggcggccgtggtggcgggcgtggtggctatggtcctaatgaacataacgaggctggggttgatgctaaccttaacaactaagaaggcaactttctaaagcttatatatgggtttaagttatcgcattaaataaaacctcatgagag

SEQ ID NO: 247631 - DNA, 603 bp, Glycine max
cgtgggatagatggttgttgtgagagtttgaggtgggagagggtggagtaggtgagtagttgttgggtaggtagtagtgtacgtatgtagttgctagtcagtacggtccggaattcccgggtcgacccacgcgtccgggttaaaattcctgaaccgggacgtggcggctgacggcaacgttagggagtccggagacgtcggcgggggccccggaaagagttatcttttctgtttaacagcctggccaccctggaaacggtttagccggaggtagggtccatcggctggaagagcaccgcacgtcgcgtggagtccggtgcgcccccggcggcccttgaaaatccggaggaccgattgccttcaaggcccggtcgtactcataaccgtttcaggttttccaagggaaacagcttttggtcaatggaacaatgttgggcaaggagaagtcggcaaaatgggtcccgaaactttgggaaaaaggattggctttaaaggcttggacacgggggtccaagatccaaagcccgttgggttgtcgagggaactggtttaaacgttttcccgggaaaaagggggtttttacgggtccccattgggagaaat

SEQ ID NO: 247632 - DNA, 593 bp, Glycine max
  unsure (1)..(593): unsure at all n locations
tgataattgtttttgtattaatttttatatgattttatttatatatattatttattttttattggttatttagaagtgttgttatttatggaatactgtatgncgtaccggtccggaattcccgggtcgacccacgcgtccggagaatacaccaaaacccaacatgaaaacccttaacaaagcctcacttattttattccgtctcttgttcctttccctattcaagcattcccatgctgcatgaatcgctatctactggggccaaaactgtggagaaggcaccttatcagaagcttgcaacactagaaactaccaatatgtgaacatagccttcttgtccacttttggcaacggccaaactccacaactcaaccttgcaggtcattgtgaccccaacaacaatggctgcactgggttgagcagtgacatcaaaacttgccaagaccttggcatcaaagtgttgctctcccttggtggtggtgctggaagctactccctcaattcagctgataattccacttaactttgaaacttccttttgcaaaaatttcttggagtcaaacacgttcagggcccttaggaatgttttattt

SEQ ID NO: 247633 - DNA, 380 bp, Glycine max
gtccggaattcccgggtcgacccacgcgtccgcccacgcgtccgcccacgcgtccgataccaagccctttttctccttgtgcttactctgcgcactgcttctcatctgtgttgtggcaactgagccatccaaagatgcgacacaagcagaagaaccaaagacacggccagatgcctggagaagtggtggaagtggaggacatggtggaagtgggggacatggtggaagcgggggacacggtggaggctggggacatggtggaggctggggacatggcggtggacatggcggaggatgcaaatgctgcggtcgaaagggctgcgaatgttgctgaagttaaaaaacacatacatgaactgaagacacacatacgtgtggac

SEQ ID NO: 247634 - DNA, 611 bp, Glycine max
  unsure (1)..(611): unsure at all n locations
agagtttgagtagatagtggagaagaatgtgatggatnatgtagtggaatgagataganagagagttggagaaggataatgaagagggtgtgcctanttctatgtacgtaatttctcgtcatgncgtaccggtccggaattcccgggtcgacccacgcgtccgattgtaccaggcaccaccttgcaaggagagtaccaacttactaatggttatggtgctaagagagctcctcaaatcatgagggatcactggagtacatacataactgaagatgatttcagattcatgtcagaaaatggcttaaatgcagtgagaatacctgtgggatgggggatagctaaaggtccaaacccttctaaagctttagttggacggacatttgcagcattggacaatgctttcatttgggcacaaaaccatgggatgaaagtgatcatagacttgcatgcagctgaaggttcacaaaatggcaatgaccacaatggcacaagaaatggatatacagaaaggggagaattatacataccaaacacagtgcaagtcatagacctcttaagcgaaagatttgtaataggccaaactttagaggaatagaactgatgaatgaacc

SEQ ID NO: 247635 - DNA, 542 bp, Glycine max
  unsure (1)..(542): unsure at all n locations
gaggagagggttcgtgcatgaaagaaatantgcactgctcgtaccggtccggaattcccgggtcgacccacgcgtccgcagaagcctggttctttgcggagtgaaagcagctttgcgctagtgacaggaaacacatgtatggattcagcagagaagaggctcaatgagcttggttacaagcaagaactgagaagagaaatgactgtgtttaagactctggcaatatcattgtccacaatgacccttttcactggaattacacctctctatggttctagtcttcaatatgcaggccctgcaactcttgtttgggggtggatagtggtttctttcttcacttggtttgttgggattgcaatggctgagatatgctcatccttcccgacgactggttctctgtacttttgggctgcccatttagctggtccaaaatggggaccatttntcttcatggtgctgtgctttggcttgagaccatagggcttatagctgggatagggactcaggcatatgcaggttcacaaacgttgcanagtataatc

SEQ ID NO: 247636 - DNA, 535 bp, Glycine max
gaagggttcctcttatgaaggaagaagtgatgtacgctctaccggtccggaattcccgggtcgacccacgcgtccgcccacgcgtccggatctttcttcagtcatctgttttgcactcccagccaaaatcaacggtaggaacccctgcctatattgcaccagaggttttgtcaagaagagaatatgatgggaaggtcgcggatgtttggtcttgtggggtgaccttatatgtgatgttggttggagcatatccttttgaagacccagaagacccaagaaacttcagaaaaacacttcagcgaattcttagtgtccactattcaattccagactatgtacgaatcagtaaagagtgtaggcaccttttgtctagaatatttgtggccaacccggaaaagagaattaccataccagagattaaaatgcacccttggttcctaaagaatttgccactagaatttatggacgagggcgaaagggtgttgcagaatgatgatcatgtgaatgaagagtcatcttgaatcactcaaagcac

SEQ ID NO: 247637 - DNA, 372 bp, Glycine max
ccgtccggattcccggtcgaccccgcgttcgcatgagcacactttgtatggcggaaaatatgaaggaggtggaagttgaagatggatatgtgttgaaagaagagatccatctcacggtgctaaaaacctctctgttcttcgcgggcgatggcttcagcgtctacgattgcaaaggtcaactcgtgttcaaagttgactcttatggacccgacactcgcgacatagacgaactcgttctcatggatcctaacggacgttgccttctcaccgttcgtcgaaagcggccgagtttgcatcaacggtgggaaagtttcaaaggggatagaatggacagggataaacccatcttcagcgtgaggagagcgtcgatca

SEQ ID NO: 247638 - DNA, 589 bp, Glycine max
  unsure (1)..(589): unsure at all n locations
gaggggatgttatgtatttatagatgtgattagggataaagaggtgatttgtgttagagtattaagaagtgttgtgattgatggatactgtatgncgtaccggtccggaattcccgggtcgacccacgcgtccgcccacgcgtccgcccacgcgtccgcgagaaagcatggtaggtcagacagtgaaccctctgttgaacatccagatgatgaaattgaagggaagaggagtagactggctggaaatgagagcagaatcaatataactgggcctcggcctcaatctcacagcttctgcttccagagctcaactgtcagctacggtggtccaaatgggatgtattatacatcctcaagggcaaggaggagtggaagtgatggagtgacctttgaagagaggaaggaggctgatagttcaacaaggaaagcttctcacctaatttctagaggcattcgtggcaagggacattctctctcaagaaatctgaattcagatgggtaggtagatactatgcagactctgcacaatttaaatgaagatgagcttgctggctttgaaaaaagaattggagggaaaaggtcaaaaatt

SEQ ID NO: 247639 - DNA, 598 bp, Glycine max
agagtggttgggtaaagagggtgtttgtgatgattgagtgagaagggagagagaaggagagagttaaagtgtggagagggtctagtcaatgcaagtacagtacggcatgccgtaccggtccggaattcccgggtcgacccacgcgtccggcaattcccaatggcctccattttcaagctctcaacgccatctccagctgcttccttatcagaagcgcttcgccccagagattctcgcttcctctccttcaatccttcttccaacgctattaattacaaaattaacctctccgcttccctccgatccattcactccctccctcttaaaacctccttgcggatcaaatgctcccaaacagatgggaatggaagtcctgcaaagaggacagtgcttcatgatctttatgagaaagaaaggcagagtccatggtatgataatctctgcagacctgttacagaccttcttcctcttatagcaagtggtgtcagaggcgtcactagcaaccctgcgatttttcagaaagctatctcatcatcgaatgcttacaatgatcagttcaaggaacttgtgcaagccgggaaagacattgaaagtgcct

SEQ ID NO: 247640 - DNA, 599 bp, Glycine max
  unsure (1)..(599): unsure at all n locations
atggtggagataaggagtgaggagagagaggtattttggggagtgggatgatgatgagtgggtagttatgttggtnaggggttaattccatgtaagtagctcgtccgcacgccgtaccggtccggaattcccgggtcgacccacgcgtccgcccacgcgtccgcccacgcgtccgcccacgcgtccgctcttctgacggtgggactcaaaattcacatcgtgatattgaagctgagttgcgtgaaataaggttgagtctattgatggagatagagaagcggaagcaagttgaagaaacccttgacagcatgcaaagccactgggagagacttgggcaacggttatctcatattggaattgttttgccttcagatcttactgctgagggtgggcagctgagttctgatcctatggaagatgtatgtcagcaactttacattactaggttcatatcaaacactattgggagaggaattgccagggcagaagcagagattgagatggaagctcaattacaatcaaagaactttgagattgctcgactattggaacgtcttcactgttatgagaccatgaatagggagatgtctcaaaaggac

SEQ ID NO: 247641 - DNA, 539 bp, Glycine max
  unsure (1)..(539): unsure at all n locations
aggcttcgtcgactgaaacgacaatattgtcacgctgtaccggtccggaattcccgggtcgacccacgcgtccgcccacgcgtccgcggacgcgtgggctcgcactctctctacgcacgcctcaacatccctgctctgttcacttgctttgcaggctccattcattatgtctccgtcgttggatcttccccccaagggtggcttcagttttgatctatgccgaagaaacgcaatgcttcaaaacaagggcctcaaagccccaacctttctcaaaactggcaccactattgtcggtttagttttccaggatggtgtcattcttggggctgatactagggcaactgaaggacctatagtggctgataaaaactgtgagaaaattcattatatggcacccaacatatattgctgtggagcangcacagctgctgatacagaggctgtaacagacatggttagctcacagctgcaactacatcgctaccatactggtcgggaaatcagagttgntacggcactgactcttcttagaaacaccc

SEQ ID NO: 247642 - DNA, 621 bp, Glycine max
  unsure (1)..(621): unsure at all n locations
tgattatatgtgtattatgatttgtggataatatgtaattgaaaagnatgtaattattgatgaatgtatattattatgaaataattagtagaggntttgntattttatgtttagtgctatgncgtactggtccggaattcccgggtcgacccacgcgtccgcccacgcgtccgacgaggccaaatatttaatgttgttgccaactccagaatgattgttagagttgcagacgtgcaaagagtacgataaggatgtgattttggattacctgaaagaactaatccttttcttgcaatattatgttgtgtgtacccataactccatgaatgcaactcgttgacctatctcaataaatgccgtttgtatttgttagtatttaaaaaaaaaaataatgattaaaataataaaaaataaatttatttaaaaaaaaaagagtagtaagaattaaatatcaattgttaaaattgaaggggcgccctttttaaaggatccatgttaactatctctttctttgatcgtaaaatttgtttatttttaattttttaatttaatttcaaagagcttaagtataaaacttcgtaactgtgaaaaaccttgaggtacacaaatttaagtgtttat

SEQ ID NO: 247643 - DNA, 585 bp, Glycine max
atgtggatgaaggggagagatgagatattattggttaattatgaggttatttgttaatgagtaatggtgagggttcgtatagtagagtattgctacgctctaccggtccggaattcccgggtcgacccacgcgtccgttctattcctcactcaagggatgcgtcggaacagccctgcatactacagtcctccgcggcgaggatacggcggtggtggccgaggaggaggaggaggaggaggaggaggagggtccggcaggagggggttcggtggaggcaggcgcagggacagcaatgggagcctcttggttcgtaacattcccctcgattgcagacccgaggagcttcgcgtccctttcgagcgatttggacctgttcgtgacgtttacatacccaaggattattactctggagaacctcgaggctttgcctttgtgcaatttgtggatccttatgatgcctcagaggcacaataccatatgaacagacagatttttgctggaagggaaatattctgaagttgtgctgaagagacgaggaaaaggacataggagatgcccccaggacttgtaggttaagagggcca

SEQ ID NO: 247644 - DNA, 596 bp, Glycine max
  unsure (1)..(596): unsure at all n locations
atgtgttagatagtgtatgattatattgtttcatttttggatttttgttgatgattatgtttcgaaattattggaaggtgtggtatttatggtaatgctacgncgtaccggtccggaattcccgggtcgacccacgcgtccggtgaaaaatctggttatggaaaacttaggaagagatatcaacaaattgagaagaatgctaaaattattcatgtgccactttcaaaggcagttcaagctaaggtagagaggaaggcagcatatgaaatatcaaagaaagatgtcaccaagtggcagcatattattcagagaaatagagaggccccaactattttctttgatgaaaatgtaaatttagggttttcaactgtaggagcaatagcttctgaatttgaacccagaactgaatttgagaagaaaattgctgcactagtttatgatgaggaagttatggaagctcataaaaaggatggttctaagcttcttgaaaagaacaagggctctattgaagatgagaaggatatggcaaatcggattgctaaaatggcgaaccttttttttcggcatgaaatgaaagccaagcttatttaaaaaaa

SEQ ID NO: 247645 - DNA, 600 bp, Glycine max
tgttgtgaggagtattatgttgttatgagaagatgaaaagatgagagatgatgtagtattatatttggagttatggtgagaggtgtagtctatgtaagagagtcgtcggcacgctcgtaccggtccggaattcccgggtcgacccacgcgtccgcccacgcgtccgacaacatcgtattctgcaaattcaaaccgggtcttggttttctgaaagatgggaggtggcaaggacaagcatcatgatgaatctgacaaaggaattttttcacaccttgctcatggggtagctggtgcagcacatggtggacatgggtacccacctggggcttacccaccaccacctggggcataccctccacaacaaggatatcctccagctgggtatcctccacaacaagggtattctccagctgggtacccttcacatcaaggctatcctcctgctggttaccccccagctggttatcctggttcatcacatgcaccaggttctcatgggcacggcggtatgggagcaatgctcgctgggggtgctgctgcggctgctgctgcttaaggggctcaccatgtttttcatggttcccatggctcctatggcca

SEQ ID NO: 247646 - DNA, 446 bp, Glycine max
accgtccggattcccgggtcgaccccgcgtccgcccacgcgtccgcgattgcaaaaatcgaaacgagtttcatgggcctccgatttagatctttgtcaggttaggctattcttatcagaggaatctccttcacaggttgggttaaattctcaagaccacgtccaagcaaagacatcattgctgttgcatccagatggagcaggttctgacgacattctgcctcctggatttgagggaactcatgctaaaagtcagtccgagattaagctatcccaaataccagttattaaatggattactcctccaaagggtacattggagagtttgagtacgttgatgatcacagagctggaaaaattgttgttgaattgaatggtagactgaacaaatgtggggttattagtccgcgttttgatgttggtgtcaaagagattgaatgttggact

SEQ ID NO: 247647 - DNA, 366 bp, Glycine max
  unsure (1)..(366): unsure at all n locations
ccgggccgacccacgcgnccgctaaacccaaaccgaaacanaaactgacagacccaaaacccacacccaaacaagaccaggacccaacactcccaaaccaagcggcgaccatggccgacgaatcacaacctcaactaatcgaggagagaagagaggagcaagaacttaagtacctggaatttgtgcaattcgcgaccatccaggccctgatgcgctgcgccatcctctactcctacgccaaggagcgcgcgggtcctctgaagcccggcgtcaacaccgtcgaggaggccgtgaagaccgtcgtggcttcggtctacgacaggttccaccttatccccggcgaggtcctcaaatacgccgatcgca

SEQ ID NO: 247648 - DNA, 534 bp, Glycine max
  unsure (1)..(534): unsure at all n locations
gggaagttgtcgtgcatgtagtagnagttagcacgacgtaccggtccggaattcccgggtcgacccacgcgtccgcccacgcgtccgcccacgcgtccggaaagaccatctttctcttttctgtatcaccgttggaagagactgagatgggttcaaaaaccaagacttttacctttgaagaggtggctaaacacaatcacaggaaggattgttggattatagtcaaagggaaggtgtatgatgtcaccccatttttggatgatcatccaggaggtgatgaagttttagtgactgcaacagagaaggatgccaccactgattttgaagatattggccacagtgattcagcaacacagatgatggaaaaatactttgtttggggaggtgacaccaacactcttccagcacaagttaccaaccacaaacagtgtacgccaaccaacacaagcaccacctgcctataacaatcaatcttcaggatttgttgtgaagatgttgcagtacataatgccattgctgaaattggccttttct

SEQ ID NO: 247649 - DNA, 535 bp, Glycine max
  unsure (1)..(535): unsure at all n locations
agggaaggcttngttctatgacgagggattaatgcacgctctaccggtccggaattcccgggtcgacccacgcgtccgggccgtatctccaattttgttgttgttggctatcttctctctcatttatggcaatggtattcttcccattgaagctacccaccatgtttacagaaatcttcagactctatcttctgattcctctgatcaaccttatagaaccgcttaccatttccaacctcccaaaaattggataaatgaccctaatggaccaatgaggtacaaaggactttatcatctcttctaccaatacaatccaaaaggtgctgtttggggtaatattgtgtgggcccactcagtatcaaaggatcttgtgaattggacccctctagatcatgccatctacccttctcaaccgtctgatatcaacggttgttggtcaggctcagccacaatacttcctgggggcaaaccagccattntatacacaggaattgaccctaataatcaccaagttcaaaacttagccctacccaaa

SEQ ID NO: 247650 - DNA, 546 bp, Glycine max
  unsure (1)..(546): unsure at all n locations
gggnntagggttngtccactgagaaggattgatgcatgctctaccggtccggaattcccgggtcgacccacgcgtccgcccacgcgtccgatttaaacaaaaaaactttttactcaattgaatcagaggtctctaaagaagaaaaaaagtgaaaagaaaatacaatcatatgatcaccgcccacgcgtccgcttggtttgggcaacatcaaagcatgatgtatatcttgtttcgagttactcaattatacactggtcgtctttaaattccaagagatctgaaatcctaaatgtatcagggcatgtagctccgtgtgagaaacatcctggaagccttttggaaggatttactcagacacagattagtacactggctgtgcgggataagttggtgattgccgggggttttcaaggagaacttatttgccagtatgtagatcgacctgtgttagnctttgttctagaactacttatgatgacaatgcaataacaaatgctngtgagaattatgaacatccaaaggggctgttcattatatggcgtttaa

SEQ ID NO: 247651 - DNA, 594 bp, Glycine max
atagtgtgtgtataaagatgagatggtgaatggataatggtgtgtgagaagtgtattatggagttgaaagataagtttggttttcgtatatgaaggagatggtacgctctaccggtccggaattcccgggtcgacccacgcgtccgcccacgcgtccggtcggtggaggtcggagagcatgtccagctcgcttatacccaccagaacgagtcgccgtttcagcccagatcctttgctgtgaaggatgaggtattctgcttgtttgagggagcccttgacaatttgggcaacttgagacaacaatatggattggccaagtcaaccaatgaagtattgttggtcattgaggcttacaaagcattgcgtgacagagcaccctaccctgctaatcacgttgttggccatctcagtgggagctttgctttcatagtttttgacaaatctacttctaccctctttgtggcctctgatcaatatggtaaggtacctctatattggggaattactgctgatggctacgtagcatttgccgatgatgcaaaattgcttaaaagtgcctggtgcaaagcaactggttctttttcttaaagaagg

SEQ ID NO: 247652 - DNA, 604 bp, Glycine max
  unsure (1)..(604): unsure at all n locations
agattgagagtggtgagagtatgttgagagattnatgtttatgaagagaagaggagtaagtaggagtttgagatnaatggagaggggtgagtanttgttcatcgctcatcgcacgncgtaccggtccggaattcccgggtcgacccacgcgtccgtgcatttctatttctaactaattattgtgcttattattattgttgagaaagaaaagaatggcaaagttaataaaattctttgagttgaacacaggggccaagattccttctgttgggttaggcacttggcaagctgagcctggtgttgtagccaaagctgtcaccacagccattctggttggatacaggcatattgattgtgctcaagcgtataacaatcaagcagagattggttctgctcttaagaagctttttgatgatggtgtggtgaagcgtgaggacttatggatcacctccaaactctggtgttcagatcatgcttcagaagatgtgcccaaagcattggataaaacattgcaggatttgcaacttgattaccttgacctctatctgatccactggccagtgcgcatgaaaagcggatcaattggattcaagaaggatatctt

SEQ ID NO: 247653 - DNA, 593 bp, Glycine max
  unsure (1)..(593): unsure at all n locations
atgagggatgttgatagatgagatgagatatgtaatagggaagtaagaggaggaggaggatttaaataaggaggaggttagtgaatgtagagctctcgcacgncgtaccggtccggaattcccgggtcgacccacgcgtccgcaaaaatgaaaaacatgaaattgtgttcggtgatgctatgcttatcactagcgttccttcttggggccacagcagaacaatgtggcacacaagctggtggagcgttatgcccaaatagattatgttgcagcaaatttgggtggtgtggtgacacagattcctactgtggagaaggttgccagagccaatgcaaatctgcaacaccctcaacaccaactccaacaacacctagtagtggtggagatattagcagactcattagctcttctctctttgatcaaatgcttaaataccgaaacgatggccgctgttctggccatggattctacagatatgatgctttcattgccgctgctggctctttcaatggctttggcacaaccggtgatgacaacactcgcaagaaggagattgctgctttcttggcttaaactttttaagaaacacaggt

SEQ ID NO: 247654 - DNA, 371 bp, Glycine max
gcgttcggtcaaaaggagtgattgggcctcattggtacaagtgtttttaacaaacagcaacagtacagagcattttgatgcatgtaagtggacaaaatcggaaccacattcctgggaattgatcttcccaatataggtatgtggtcctaataatggttttgaaatgtggagttctgagtgggcaaatcaaacttcatggcatttgagtttccttattgacaatcccaaacagtctacagtttttgacattctcttgggaatttctcaagattttgaaattgctggtaatactcttatgccagctttttctgttccacaggctactgccagatcttctgaaaatgcggaatcctctgcatgatctggaattt

SEQ ID NO: 247655 - DNA, 445 bp, Glycine max
ggattcccggccgaccccgcgtccgcacacactaagttctgaaaaatgagttccaaagtttttcttattctacttatgttcatggccactatacttttgatctcctctgaggttgcacccgatgatgcataccagaattttgacaaaacagatgggaagcgtagtgcaaatggggtagatgaaagcaaatattggcgtggtggctatggcgactatggtggttggcgtggtggtggttggcgtggtggctatggaggctggcgtggtggctatggtggtgggcgtggtggctatggtggctggcgtggtggctatggtggtgggcgtggtggctacggaggttggggtggtggctttggccctaacgaacataatgaggctgggattgatgctagcctttacaactatatggaaacttgctaaagcttatataggatttaagtta

SEQ ID NO: 247656 - DNA, 540 bp, Glycine max
  unsure (1)..(540): unsure at all n locations
gagggtgagtggttcngtcgctcgtttagcncatacagncacgacgtaccggtccggaattcccgggtcgacccacgcgtccgcccacgcgtccgcccacgcgtccgacgcgaatgagaaggttcacgtggttcacgccgtagcggcgccatttgctttcgttcctgaccttagaatcgctcgtggataaaggagaatcaacattcagcaaagtctcgtcgtctcgccaatcgtttttgctcgctcgagctttggtcaattgtggtttcgtcacgaaaacgcaggagtctctgattccgagagtaccgttaagatatcgttattttcatgccacagcattttcttcgtcagctgaccgagactactatcgaactcttggtgttcctgaaaatgccagtcaggacgagataaagaaggcatttcactcgcttgctaaaaagtaccatccagatgcaaataagaataatccatctgctaagaggaaatttcaagatttaagagaagcttacgagacattgagagactctaaaagagagccga

SEQ ID NO: 247657 - DNA, 553 bp, Glycine max
  unsure (1)..(553): unsure at all n locations
gggggaatagggtcngtagatagaatgacgattgtgatcgcatgctcgtaccggtccggaattcccgggtcgacccacgcgtccgtgcagccagatctggaaaagggtgataaaattatcatgcctccctcagcccttgatcgccttgcgtctttgcacatagagtaccccatgttatttcaaattaaaaatccttctgctgaaagagttactcactgtggggtgctagaattcgtatctgatgaagggatcatatatatcccatactggatgatggaaaatatgctcctccaagagggagacattgtaaaagtgaaaaacaccaaccttgcaaaaggaacgtatgtgaagctgcagcctcacacaaaggattttttggatatctccaatccaaaagccatgttagtatttcttttctaatatctagttatacctttaacagtgtcaattgatatttccttcaatctcttgatatttgcagcttagagactacacttaggagctactcatgtttaacactggtgacacaataatggttccttataacaacaga

SEQ ID NO: 247658 - DNA, 604 bp, Glycine max
  unsure (1)..(604): unsure at all n locations
tgaaagagatgaggaggagaggagtagatgagatagcaattgatgaatgagagagagatggaggaggaagtggttagagagagtttgtgatttggatttacgtgtctcgctagncgtaccggtctcggattcccgggtcgacccacgcgttcggggagggaagcggatgggggccggcgatgtgtcccggtcggatgtggaacggtgagaggcggtccgccgatcgactcgggacattgaccgacgcggattgcgatggtggcccaagcccgggctggtgatatgctcgtggagacgtcatcatcgcgattgtggatggcagcgcgcgcccttggcgtgcctcggcacctgcgcgctcctggcgtcggcctgtgggctccccattcggcccgtcttgtaacacggaccaaggagtctgacatgtgtgcgagtcaacgggcgaggaaacccgtaaggcgcaaggaagctgattggtgggatccccctgtgggttgcaccggcgaccgaccctgatctttctgtgaaaggttcgagtgagagcatacctgtcgggaacccggaagatggtgaactattgcctaacggggcaaaaccacaagaaaac

SEQ ID NO: 247659 - DNA, 600 bp, Glycine max
  unsure (1)..(600): unsure at all n locations
agattattagtattagatagtagggtgagatatttatagaagtnatgaaataggattatggagaaatatgatagaatggaaagagttaatagtagtaagtattgctngncatancggtccggaattcccgggtcgacccacgcgtccgatctgaacaataataattaaccatggaaccgtcgctgagttaacctttttcttctgcgcggtgctgttctcttttgttgtttgggttttttttttttctttctgagaagggcttgttgttgttgtgtttcgaaataatggcgactacgaatccctttgatttgttgggcgacgacgccgaggacccctcacagttgatcgcggcggagcaactgaaggccgcggcagccgcggccaccgcgccacccaagaaggaccaggccaagcccggagctcgcaacggcgcgccggcccagttgccgtcgaagccgctttcttccttttaagctgtaagggaagctaaaaatgaaacttcttacggcgggcgtgggggtggccgaagaagtgtaaaagatttggacacgggcttgtggccacagtggcttttggcccggattttttcaagaagaaaaa

SEQ ID NO: 247660 - DNA, 613 bp, Glycine max
  unsure (1)..(613): unsure at all n locations
agagagagagggagatagagtagggggtgggagagnaggatggtaatgaaagatggagttagtatgagaaggggttgntagaggaggaatgtgagtatatagtacgtattgctagtcatgccgtaccggtccggaattcccgggtcgacccacgcgtccggcattattctcccctctcactctgttccttcctcatccacaattcaatggtattggtgagactggttcccatggcttcttcttcaatacgacccgctctctcaacaccttcctccttttctctcttcagcccttctcgccgtatctctttctcccatcttccctctccctctgtgtctcaatccaatagttttggcctcaaagcttccagagtgttgagacaatatggtaactccacgagaatcatggcatcaggggacttgtctcattcagttgcggctgcttcaccagaaaatgtgcttgagtgggtcaaacaggacaagagaagaatgcttcatgttgtatatcgtgttggggacctggacaggaccataaagttttatacagagtgcctaagaatgaaactcctcagaaagagggacattccagagggaaaatatacttatgccttttt

SEQ ID NO: 247661 - DNA, 604 bp, Glycine max
  unsure (1)..(604): unsure at all n locations
atgtgttgatgtgaagagagaagtgtgagagaggnagtgtgtgaagataagtggagtaaggatagatatgttagagaggggaggattattttctgaagaactggtccgcatgccgtaccggtccggaattcccgggtcgacccacgcgtccggaagaacaataatccagacacgaagatatatgacagggatgagcttcttgcacggatgcagtcagaggcagaaaagatagtagagatgaggagaaattctagctctgacacagggccgtctaacattcaatcttctggtgaaaatgttggtggtagttcctcatcaaataatgtaattgtgggatttgttgggtatcctaatgttggcaaaagttcaactattaatgctctggttggtaaaaaaaggacaggtgtcacctctactccagggaagacaaagcatttccaaacattaattatttctgaccaactgaccctttgtgactgtcctggattagttttcccatctttcttaagctcaaggtataagatgattgcttgtggagtgttgcctatcgataggatgactgaacataaggaggctgtccaaattgtaaccgataaaagtccaa

SEQ ID NO: 247662 - DNA, 377 bp, Glycine max
gaattcccgggtcgacccacgcgtacgctttgacacaaggcataagcctatccatattaacccatatgttcatccagactcggtcgagggacaactgtaacgaattgattcctgaatatttatgctcatccaagggtattgcggattccgaaaatctaccacttcacattttaagacaaatgttgcaacagaacaagaacttgaaagtcatcagaaagaacttcgataaaaaatgccctgagctcttctttgaaattgcagagaacaatgaggattacaacaagttctatgacgcttctttcaagaacttcaaactaggtatccatgaagattcacagaacataggaaagattgctgaattgctcaggtaccacttc

SEQ ID NO: 247663 - DNA, 550 bp, Glycine max
gagggaaatgtgtcctcttagaatcgacagtacagcacgctctaccggtccggaattcccgggtcgacccacgcgtccgaagactacccagaaaagcccccaagtgttcggtttcattcacgaatcaatatgacttgtgttaatcatgaaactggagtggttgaatcaaagaaatttggtcttcttgcaaattggcaacggaggtttaccatggaagatatactgacccagctgaagaaggaaatggcgggtttcacataaccgcaagcttgtccaacctcctgaaggtactcactattagtgtccaagatcataccgatattggatcatattgcatttgcagtatgcaatatatagtatgtattactcttgatccttctaaattcaagaacataattgggaatgctcaaaagagcttcattcttaccttcattgattggttttgttgcatacattttcactgtgttgaagggatctctttgaattggtcctaatatgaaagcaacttttaaggtaaaaaaaaaaaaaaaaggggcggccctttaaaaaa

SEQ ID NO: 247664 - DNA, 415 bp, Glycine max
cggatcggaattcccgggtcgacccacgcgtccgggcaccgcgtacacaacgcacgcggaagaggatgaggcttatcgaggaagatagcgatggtgacgagaatgaagaagagaaacaacaagaggtgccggaactgcctcagcctgcggaggacgctaagcctcttggcgaacccgttagggtttcgggaaaaggaagaggaaggaagaggcactatgattccttcgagttcgatggcatccaatatattctcgaggatcctgttcttcttgtacccgaggagaaaggccagaagccatatggtgcaattattaaggacattacgcagtctatcagtggcaacgtgaaagtgacggggcagtggttttatcgtcccgaagaaaccgagaaaaaaggtggtggaaactggccatc

SEQ ID NO: 247665 - DNA, 556 bp, Glycine max
  unsure (1)..(556): unsure at all n locations
gagttaaatgtgtcgtcgtaagagggaaggaagtaagcatcgctctaccggttcggaattcccgggtcgacccacgcgtccgcggacgcgtgggcggacgcgtgggcggacactgtggttgaaattgttttccatttgtttgatgcaaatcgggatggaaacctaagttttgacgagtttgtcagagtgctacacaagcgcgaaagggacattgcacaacccgtggagacaggaatacggggttggttgtcttgcggttggaactgtacgcataacttctcatcttcatgattgttttcctgatatagaagatttaatgccacaaacatttcaagaacagacataacagaatggattggaacccttgatgggaagagaaaaacgaaagaaaaacaaaggaagagatgggtagtgatggttggtctgggactggagaagtttcccgtaaaatacatttgtgggtcaaacacaagtcttncttatatcacctcactttgcagtacccttaaaagaaaagatgggcacataaattatctacttcgtaatagcgtaaaaa

SEQ ID NO: 247666 - DNA, 595 bp, Glycine max
  unsure (1)..(595): unsure at all n locations
agagatgtatgaggtgaagtagaagagagaggaatatgtataaatatgaggatgagattaggtagattggagggtgtagtgttagtgagtaattgntcagctctaccggtccggaattcccgggtcgacccacgcgtccgagagtacaagatttaaacacgcgaacaccgtgtttgaaaatcgaacataagagaagagggcgcaatcgttagggtttccaagatggaaggcatggttgatcacctggctttcgagcggaacaattcgcagttcgatgtcgacgagatgaagatcgtttgggccggttctcgtcacgcttttgaagtatctgacaaaatggctcgcctcgttgccagcgatccggcattcagaaaggatgatagagttgtgcttgataggaaggctttatttaagaacactttgaggaaagcagcttatgcatggaaaaagattattgagctccgtctcaatgaagaggaagctgctatgctcagatcctttgtggaccaacctgcttttacggatctacattggggaatggtttgttccgctttcaaaagacaagggactgaggaacacccgaagaaatggtttt

SEQ ID NO: 247667 - DNA, 592 bp, Glycine max
  unsure (1)..(592): unsure at all n locations
atgtgtaatatatggtagatgttgtatatgttatgtaagatatagaggatgattagatataaaatattgagaggattagtatatgatagtactgctnggctgtccggtccggaattcccgggtcgacccacgcgtccggcgccaaacggcttgatagcatatggggtgcttggtttttcttcagattttacttcaagccggcattggttgagaagtccaaggccaaggttgttagggacagcaatggtgtttcggggttcgataaatccgatatcaagcttgatgttttcatggttcaacacgacatggaaaacatgtacatgtgggttttcaaggagaagccggagaatgctttgggtaagatgcagttgaggagctacatgaatgggcattcccgccaaggggagcgcccatttccatttagtgctgaccggggttttgttcgatcccaccggatgcagcggaagcattatagaggactttcaaatccacaatgtgtgcacggcattgagggtgttccatcacccaatcttatgaggcttgataaagtttatccaaaaagttggattgactcactgggcgaaattggaat

SEQ ID NO: 247668 - DNA, 637 bp, Glycine max
  unsure (1)..(637): unsure at all n locations
atgatgtgtgattagtaagtaggatagatgtggatggtgatagngagatttatggaatggtggtgatgtnagtaattgaggtagtattgaggagnagtagagaagtggagtgaagtattacttcaatgtagtttcttagtcagnncgtaccggtccggaattcccgggtcgacccacgcgtccgagggccattgagcttgagaatcttccctatggtttgtctcaaaaacctgctgttttaaaggttagggattggtatgtggattctttccgtgatctcagagccttccccaacatcaagaatgtgaatgatgaacaagatttcactgaaatgatcaaggccatcaaagtgaggcacaacaatgtggtacccacaatggccttgggtgttcagcaattgaagaaacgtatggatccaaagattgtttatgaagatcttgttgagattcatcagtttctagaccggttctacatgtcaaggattggaatccgtatgcttatcgggcagcatgttgagttgcacaatcccaatccttcctcccatgttgtgggctatttacctactaaaatgtctcctggggaagtagcaaaggattgccattaggattcacgtgctcatatgttgccgcgaaatttt

SEQ ID NO: 247669 - DNA, 290 bp, Glycine max
  unsure (1)..(290): unsure at all n locations
cggaatacccggancgacccacgcgnccgggagaagcgacggaaagagcaagaggagaggggnnncaaacaggangangagaacaaggagancaagaggaagaacgagaacgagccggaccaaacccaagacgcacacagaggaagagaagacagaggagaaacagagggggaccaaaagcgggaagaggaacaggagaggggagnacgngacaaagagaggaagaagagactgcgcgagaaaaacaaaggaagccccaaacgagaaggaacggaaggaaaaaacggcga

SEQ ID NO: 247670 - DNA, 542 bp, Glycine max
cgggtgagtgcttcgtcgactttcattccgtccgtatgactgtaccggttcggaattcccgggtcgacccacgcgtccggtctatgcatatgctgctgctcaagtgaagaaagccatagaggtgacacattatggggggggagaaaattatgttttctggggtggtcgtgaaggttatcaatctcttttgaacacagatatggagcgagagcttaatcatttggctaggttttttgaagctgctgatgcatacaaaaagaagattggattcaatgggacatttctaatcgaaccatagccacatgaacctacaaaacaccagtatgattgtgatgcttcaaccttaactaatgtcttgcgaaaatatcgactgacatgggaattcaaacttaacataaaatgcaaccatgccaccctttttggccacaaattgcatcatgagctttaaactgccaggattcattggattgctggtaatatttgtgccaccactggtgatcctcaaattggtttggaaacctgttctatttttttaaaaaatc

SEQ ID NO: 247671 - DNA, 550 bp, Glycine max
  unsure (1)..(550): unsure at all n locations
ngtaaagatcttcatagaggaggaggaagtacgctctaccggtccggaattcccgggtcgacccacgcgtccgaactcatcttatataattaaactaattgcaaagatgaataccaagccctttttcggcttgtgcttactctgcgcactgcttctcatctgtgttgtggcaactgagccatccaaagatgcgacacaagcagaagaaccaaagacacggccagatgcctggagaagtggtggaagtggaggacatggtggaagtgggggacatggtggaagcgggggacacggtggaagctggggacatggtggaggctggggacatggcggtggacatggcggaggatgcaaatgctgcggtcgaaagggctgcaaatgttgctgaagtaaaaaaacacaaacatgaactgaagacacacatacgtgtgtactccatgtaataagtatagtatgtagaattaaggaaataaaagcatggaatctatatccgtgctagggctgtcataaggtgacccggttttcatcaaccatgcatgtagnttgacac

SEQ ID NO: 247672 - DNA, 534 bp, Glycine max
  unsure (1)..(534): unsure at all n locations
gggaggctttgtcgatgcttcacctgatatcatgctctaccggtccggaattcccgggtcgacccacgcgtccgcccacgcgtccggtttgtactgcacaagatagaagcagttgatgaggcaaacttgggatgatagctacagcgtagtgggtggtgctgcgttgccagacacagcggagaagatcacattccactccaaattggctgctggtcccaatggaggctctgctggcaagctcactgtcgaataccaaaccaaaggagatgctcagcccaaccaagaccaactcaaaactggaaaagccaaggctgatgctctcttcaaggccattgaggcttaccttttggccaatcccgattacaactaatccaattcgatcaacttcatgattatcatcactatctctcttgctgtntctgagactgcatatatctgnatctcacttcatcaaataatcaaccaatattaataaagaaattagccatcattaaaaaaaaaaaaaaaaaaaagggcggccgtcttgaagataca

SEQ ID NO: 247673 - DNA, 316 bp, Glycine max
  unsure (1)..(316): unsure at all n locations
tcgacccacgcgtncgggaaatggctgaagcacaactacgagaccagcatggcaaccctgtcccactcaccgatcgatacggtaatccggttatcttaactgacgagcgcggtaatcccgtncaactcaatgggggcggttccaacggttcccggaccagaaggtcctgggttggggtcctatggtcccggtgcttacggtggtggtgcaagtgcaaccaccgttgcagatcttttggcaacccaaccaaggagtggcagggaggctagagagcttcgtcgttcctccagttcaagctctagctcgtctgaggata

SEQ ID NO: 247674 - DNA, 441 bp, Glycine max
aattcccggctcgacccacgcgtccgcgcgaatttcattgctagagtgttatttagagtattagcatcaatggctccaattgcagtgggagacatgattccagacggcattttggcttacttggatgaagaaaacaaaccccaaactgtctccattcactctctcgccaccggcaagaaagtcatcatctttggggttcccggtgccttcactcctacttgcagcttgaagcacgttcctggcttcattgagagagcagaagagctgaaagggaagggtgtggacgaaataatctgtatcagtgtgaatgatccatttgtgatgaactcatgggccaaaacattcccagagaacaagcatgttaagttccttgctgatggtgcagccaaatacaccaatgcccttggtcttgagcttgacctcactgacaagggtctcggc

SEQ ID NO: 247675 - DNA, 251 bp, Glycine max
aaaaaaaaaaaaaacaaacaaaaaaaaaaaatgaaccacaacaaaaaacatcaaaagaaaataaacaaaaacaaaaacaaaaaaaacccaaaaaaataaaaaaaaataaaaaaaaaaataaaacaaacacaaaaataacataaaaaaaaaaaaaaaaaaaaccaacaaaaacaaaaaaaaaaacaaaaacaaaaaaaaaaaaaaagaataaacaaaaaaaaaaaaaacaaaaaaaaacaaaaaaacaaaaa

SEQ ID NO: 247676 - DNA, 415 bp, Glycine max
  unsure (1)..(415): unsure at all n locations
cacgcgtacgtaagcgcggaattcggctcgagttgaganatactaagccatcctcataaatacgctctaaggaagtttcaagataagtgtctaaccttagtaacattgccacatattgtgttcattttggaattgtgccactaaaattctattcaattcatctatggctgcctcttcttatgctatgcaatcaatcctggcaaaccctttgatccgcatttccagcgggtctagggtgaaccaatttggcgttcctgctttgcacatgagaaggaatgttggcctgagagttaggtccatggctaaggaagaacaaccaagtgagcctgcaaccccagttacaccgccaccatcagtagaacccaagccacagccagtctctgctccttcaccaaaggtgagcactaagttttct

SEQ ID NO: 247677 - DNA, 276 bp, Glycine max
taagccatacccaaaaacacactcaatgtaaatttcaaaattagagaataacctcaatcacattgcctcatatcgtggtcaacataaaattctgccactaaaacacacatcaattcatctacgacaacctctacttatgctacgcaatcaatcctgtcaaacaccatgatccgaaattacagcgtgtctacgctaaaccaattctgcagaactgcatagcacatgaaaatgaatgccttccccagagtcagtaccatgactaaagaagaacaacca

SEQ ID NO: 247678 - DNA, 433 bp, Glycine max
ccgctcgaccacgcgtccgagaggatcagctcttctctttcggcatgcaagccgcggatatgtatcccgaattcggcgattttttaagcctgcttgatcacgtgtaccctgcgcacaggaaaatcttcgtccatggccttggctgggacgccactgccgatactctaaccgccgtgttcgggaaatacggcgagatcgaggattgcaaggccgtcaccgacaaggtctccgggaaatcaaagggttacgcctttatcctcttcaagcacagggacgatgctcgcaaggcgctgaaacaccctcaaaagaagatcggaaacctcaccacctcgtgccagctggccttcgcctgccccgttccggcttcaccgccgaacgtgaccccggtgtctgagtccacccagaagtaagattttgtgatcaattgtaatgc

SEQ ID NO: 247679 - DNA, 373 bp, Glycine max
cacgcctacgtaagctgggtattcggctcgagtctgaagttcattagcaccagaaatgctaggcaaggcgagacttatcaattaggatacagcactcccatgagttcagaaccggcgtgttcccacctgcatgaacctacaactactgggcaaactcctacacactagttcgagtagagatggcactgatggtgattacatagcacataaaattccaagactgtgccaaacgcactctctatgggcaaacagtactgactacgactagacaaggggcttggaagttctggagagccagcttacccaggaggacctttctacaacccacttggctttggtaaggatgagaagtccttgaaggaattaaagctca

SEQ ID NO: 247680 - DNA, 237 bp, Glycine max
  unsure (1)..(237): unsure at all n locations
acgaaaaaaagaaaagaaaaggaaaacagcacacaggaaaagaggcaagccaaagaaggnacgaggcaaggccaaaaaagcagggagaaaaacacccgcaacaggaaaggaaacgaacccaacaaagacaaagcagcacaaaaaccacaaaagacagagaaggaaaaaaaacaaaaaagaaaaacaagcagaaaccacaacacaaagaaagcaacagacccaacagaaaaaaaaaga

SEQ ID NO: 247681 - DNA, 510 bp, Glycine max
  unsure (1)..(510): unsure at all n locations
ggcagtnctnactttaagtcgctgtgttgtangttatgtatgcctacagtaccactatagaagatctatgacgtcgcatgcacgcgtacgtaagctcggaattcggctcgaggttatggcattggtaccattcttccacccaacaataagggcgcgccattggaggtcggtaaaggaagggtattaaaggagggaagtagggttgctcttgttggttatggaacaatggtccaaagttgtatggaagcagctaaggttcttgaagctcatggcatctcaacaactgtggttgatgcaagattttgtaagcctctagatggagatttgatgaggagactcgctagagagcatgagattcttatcacagttgaagagggatccattggaggatttggttctcatgtttctcattttctaggcttgaatggtcttctagatggtaatctcaagtggcgagccttgacattgcctgacagatatataaaccatgggtttcagacagatcagatt

SEQ ID NO: 247682 - DNA, 511 bp, Glycine max
  unsure (1)..(511): unsure at all n locations
gtagtaatcttctaagtgtgccttcgaagttctggcttgcttcnagtactgnctgtaccagttccagaatcttccgcgatgcacgcgtacgtaagctcggaattcggctcgagtttgacactaattcatcaacaatgccattagcggattcgggttttcagggttctctatatggttgcatggattcatcggagttgttgcaaagcgcagggcatgttgacccagaaaaccagagtcaaacctttgtcaaggtttacaaatcagggtcagttgggcgctcacttgacatatccaggttcagcagctatcatgaactacgcgaggagttggctcagatgtttggaattgaggggaagttagaagaccctcttagatcaggctggcagcttgtgttcgttgacagggagaatgatgttcttctccttggagatgatccgtgngaatcattcgtcaataatgtttggtatatcaaaatactttcacctgaagacattcagaacaatggggaaca

SEQ ID NO: 247683 - DNA, 235 bp, Glycine max
ccacgcgtccgcgtgttgcttgcgattcttaatcgaataattagcaatcaatcatcatgtcgacggggaaggatatctcactgaagagttcggacagcgatgctttcgaggtggacgaagcggtggctctggaagctcagacgataaagcacatgatcgaggacgactgtgcagatagcggcatacctctgccgaacgtgacgagcaagatcctggcgaaggtgatgagagtact

SEQ ID NO: 247684 - DNA, 240 bp, Glycine max
ccgctcgacccacgcgtccgcgcacgcgaccgcttcaacagcagcggtgaccacccaaccaactagctgcatagaagtcggcttcaagaaagcaacggcaaccacaaccaggcggccagctacctgtagcctacccccagcaatatctaccatacaaccaactggcagcattgaacgctcctgcataaatacagcggcaagcaactactaccattcagccagctagctggcgcgagccct

SEQ ID NO: 247685 - DNA, 499 bp, Glycine max
agtgtgtggtcactgatgctgtcgtcatgcagtaccggtccggaattcccggctcgacccacgcgtccgttgatattgatgatattgatgctgctggattaacaagaaaacaatgggagggccacacagataagacattgcatcagctacttgttgaaatggatgggtttgagcagaatgagggaataatattaatggctgcaacaaacttgcctgatattcttgacccatctttaacgaggcctggcatatttgatcggcatattgttgtaccaaatccagatgtgcgatgtcggcaagaaatattggaactctatcgtcaagataaacctatagctgatgatgtagatgtcaaaacatttgctcgtggtaccccaggggctaatggagcgtgaactgcgaatttcgtgaatgttgcatgccttaaagctggcactgaaggtgcagagaatgttacagctgcacaattggagtttgcaaatgacagactttttgtagg

SEQ ID NO: 247686 - DNA, 249 bp, Glycine max
  unsure (1)..(249): unsure at all n locations
cccacgcgtccgcgcacgcgtccgattcttcaacccttttattgccaacacgcaatcgcagcangcgggtagcttttataaaacttgagcctgccacaaccgtgggccctattacagcagtaacccttggtgcatatgtaggcacaaaacatcaatgcacaacaactacaacaacaagtgctaggaaacctagctgcctactctcagcagacagcggtatatgcaatacaaccaacatgctgcatagaa

SEQ ID NO: 247687 - DNA, 126 bp, Glycine max
tacaagcggcggctgtggctgccagacaccacctgttcatctaccgcctccgatctatatgccgactccgatctatctgccgcctcagcaacaaaccacagccatggcaataccccactcaaccac

SEQ ID NO: 247688 - DNA, 388 bp, Glycine max
ttcccgctcgacccacgcgtccgagaaggtcctagaacaattgaacgagttttctgatgaagatattgattctgctgcggaggcattgaatgatatgcctatcagaaagctatacatgttgattgagatggcagcgcaaggggagcaaggtggatctgcagaagccatcttttctggcaaagagaagattaatatcgctcatttctatgattgcctccaggatgttgttagataataagttgtcgtgttaagcgctttctcagttagagtgcatataatccttattgagttgaaatctcattttttttttacaacaattcattcctacattgcttgatactgttcagttgcagagtttgtgtgttggttggttgagctgatagttatt

SEQ ID NO: 247689 - DNA, 294 bp, Glycine max
aaaaacaaaaacaaaacaacaaaaacaaaaaaaaaaccacaaaaccaaacaaaaaaaaacaaaaaaacaaacaaaaaaaaaacacaaaaacaccaaacacaaaaaaacaaaaaaaaaaaaaaaaaaaaaaaaaacaaacaaaaacaaaaaaaaaaaaaaaaaaacaaacaaacaaaaacaaaaaaaaccaaaaaacaaaaacaaaaacaaaaaaaaacacaaacaaaaaaaaaacaaaaaaacaaaaaccacgaaaaaaacaaacacaccaaacaaacaaaaacaaaaaaaaaa

SEQ ID NO: 247690 - DNA, 397 bp, Glycine max
  unsure (1)..(397): unsure at all n locations
gaattcccgggtcgacccacgcgtccggtgatgtataatatacgtaacaangttaaccttctgtggaatgcacttgtacttgggggggtgaaaaacgggcagaagtaccttggcatggttaacatgattggcattaattttgaggacaaccatgtagcaaccgggcttggaaatcatctcgctaggccaattctccgtgatgagtggcatgaaaacttgacctttgaagagggcgtcaagttactggaaaaatgcatgcgtgtgcttttataccgtgataggtctgctgtcaacaaaatccagatatctaaaattacagatgaaggtgccactgttttcccaccattcttattgaaaacgtactgggagttctctgccttcaataatccaactgttg

SEQ ID NO: 247691 - DNA, 196 bp, Glycine max
  unsure (1)..(196): unsure at all n locations
ccgctcgacccacgcgtccgtgatgtgctcatcttcgcctgaccctgagaattcgatcatccaaggcacattagcgtggcgttcnaatcctgagtgaaccggcgtttgaaagcaaacttatcctcaggaggatagatggggcgattcatgtgagatccagtgtacatcctactttgctcttcactcgggggatccg

SEQ ID NO: 247692 - DNA, 296 bp, Glycine max
cgacccatgcgtccggagaaaacccccaactctcaaccataactagaacctctactcactgacttttcaagcaggactattattaagctttttaaagccaacgataaacagagagaactggcagaaaatgcgagtggcggaccacccgttaagaagcaaagtgccggcgagttgcgtcttcacaaagatataagcgagctgaatctaccaaaatcatgtaccatgcaattccccaatggcaaagatgacctgttgaactttgaagtttcaattcgacctgatgatagatattactt

SEQ ID NO: 247693 - DNA, 302 bp, Glycine max
gacccacgcgtccgctcgtattgatttttatgctctttctctaatcttgcatttgaggcattacattggatggctttatttagtgcctgcacctggatttgaagcttacggggaccccactagttaccctggaagttctaataacaaaggcagcaatagtgaactaattgatgaggaacctttgaagttacaaaggctaggctatcaaggacctgaaattgacctgtataatcagagttggagagttttaaatggaccatatatttctgtctggcttcacaatgtggcttggggtgctgtaa

SEQ ID NO: 247694 - DNA, 257 bp, Glycine max
cgacccacgcgtccgcacacacacagctagcagatattttcattacgtgaatcactaattaagccatggagaggatatcattaactgggttgtgctccctcttccttgttctctttgttgctcaagaagttgtggtgcaaactgaggcaaagacttgcgagaacctgactgatacatacaggggtccatgcttcaccactggcagctgcgattatcactgcatgaacaaagatcacttgcttagaggcagatgcttg

SEQ ID NO: 247695 - DNA, 390 bp, Glycine max
  unsure (1)..(390): unsure at all n locations
cgacccactcgtccgtggaggttcacgacttcacctctcactttaattaccccaccagcgaccaaatngacaggacgggtttcaaagaagnncaaacagccgattccaaaaccgccacaaccagctgcaaatcgcccccaggaccaaggacactaccgctcataggaaacatgcaccagttagttggctcactgccggttcatcactgcttaaaaaatttggcagataattatgggccgctaatgcatctaaaactaggagaggtatctatcatcataggcacgtcacacgaaatggcacaggagattctgaagacgcgcgatctcaacctctctgataagccaaaccttggatcatcttaaatatgttacttacaacggcagctcacat

SEQ ID NO: 247696 - DNA, 518 bp, Glycine max
  unsure (1)..(518): unsure at all n locations
aggcttngtggttggctgcatctgttgntatgacgtaccgattcggaattcccgggtcgacccacgcgtaccgccgagattcattcttcaccaattttnctcaaagaaacactacacatccatggcaactgctggcgtgcaagaagttcgtgttccccctctaacttccacctctgagccaccttctctctttgacggaaccaccaggttgtacatcagttatatttgtccctatgcgcagcgtgtttggatcactcggaactataagggactacaagacaagatcaaactggttcctattgacctacaaaacaggcctgcttggtataaggagaaagtctaccctgaaaacaaggtgccatcattggagcacaatggaaaagtcttgggtgaaagtctcgaattggtcaaatacatagatgacaactttgaaaggccgtctctagttcccagtgatcctgccataaaaagatttggtggaggaagtgatttcccatgtggataccattcccaaagag

SEQ ID NO: 247697 - DNA, 166 bp, Glycine max
cgacccacgcgtccggagattttcttcatccttctctgatcactgataactcgattacttgaacattcccgatggcttattaggtggttcttctggacctctttccaagtccatttgtgatgagggtcacgattgcacttgctgaaaagggttttgtatattgatt

SEQ ID NO: 247698 - DNA, 362 bp, Glycine max
  unsure (1)..(362): unsure at all n locations
gacccacgcgtccgccgacgcgtccgattaaaactcttaaatantattcctgatagaaaaatagaaaggatcgatttttagcaaggttcacaaaactggttggaattagtaaaactgttttgatcaaaagtgtagccgcaggaattaaccttctataagtatgattctttcatagaaagaaaaaatggtatgttgctgccatttttgaaaagattgaagaaacccgaagtaatgccaaaacctaatgatacagagaaaagctaaaagaatatggaacaagtaatatccatatacaaaatgtattatcaattctattatatataaatataaaaatatatattatatattatacatttcacttg

SEQ ID NO: 247699 - DNA, 225 bp, Glycine max
cgacccacgcgtccgcagcaataggagatctcctaatttggctactccaactagtcaagacagagcagggccggcataattacaatcatttccagaccctctgaaatctaaactgaatgctgtatcaacaagatacaaggagtcaattaccaagagcacaagatggtggaaggatagattgatctctcataacaacaccatgtcagaccttggattctcaattaa

SEQ ID NO: 247700 - DNA, 313 bp, Glycine max
gacccacgcgtccgccgacgcgtccgaataggtaactggaatctcctcgaacaacctattcaccgtggcttgcaacgtttgtacaaagaatatggaatcatcgtttccctttggttcggttcacgtctcgccgttgtcatttcctcaccaacagcataccaagaatgcttcaccaaacacgacgttgccttggccaaccggctaccttctctctcgggaaaatacatattctacaacaacaccaccgtaaggtcctgctctcaccgggagcactggcggaaccttcgtcacatcatcgtcctggactgtctct

SEQ ID NO: 247701 - DNA, 399 bp, Glycine max
gattacccgctcgacccacgcgtaccgctctctaccattgccatggatctttattgcaccggccatccagcgccttcaattctgccttctttactacaaattctggtgctcctatttggaacaacaactcctctttaaccgttggagctagaggtccaattctgctggaggattatcatcttgtggagaagcttgcaaattttgatagggaacgtatcccagaacgtgttgtccatgccaggggcgctagtgcaaagggtttctttgaggtcacccatgacatttctcacctgacatgtgcagatttccttcgagcccctggagttcagacgcctgtaattgttcgtttctcaactgtcattcatgagcgtggtaaccctgaaaccttgagggaccctc

SEQ ID NO: 247702 - DNA, 242 bp, Glycine max
ggaacaaccacaccacaataaccgcaggagctagagggccacagcagcaggaggaacatcaaccagtggagaagcatgcaaatatagatagggaacgtatcccagaacgcgtagaccatgccaagggcgccagagcaaagggaatacaagaggtcacccatgacatatcacacctgacaagtgcagaaaaacaacgagccccagaagagcagacaccagaaaaagaacaaaccccaacagac

SEQ ID NO: 247703 - DNA, 189 bp, Glycine max
  unsure (1)..(189): unsure at all n locations
gacccacgcgtccgattcgaccactggttgttttgattcaataatatccaaggatggacagactcggggacgtgttctattaaaatncacccaagctttcaaacagatgataagctgctgaaacaaaatggatgctactacacccaagaataccaaggccaggaatgatgaaaaagagaatgaagacac

SEQ ID NO: 247704 - DNA, 221 bp, Glycine max
cgacccacgcgaccgctcgctctgtctctctctctccatagattcatggatccttacaagctccagccggccgtttcctttaaaactcccttctggactacaaattctggtgctcctgtttggaacaacaactcctctttaaccgttggagctagaggtccaattctgctagaggattatcatcttgatgtagaatcatgcaaacttattcttggaacgta

SEQ ID NO: 247705 - DNA, 377 bp, Glycine max
taccggaattgctgggtcgactccacgcatgcgtgctcttactactgaatacgatgagcgtactaagatctaccgcatgaaacttctgggccactctacgaggtacgtgccaaatccaagttctggtattttttgagaaaattgaagaaggttaagaaaagcaatggacaagtgctagccatcaatgagatttttgagaagaatcctaccaagattaagaattatggaatttggctgcgttatcagagccgcactggttatcacaatatgtacaaggaataccgagatacaactgtgaatggtgcagttgaacatatgtacactgaaatggcatctggtcatagggtgaggcattcatgcattcagataattaagac

SEQ ID NO: 247706 - DNA, 504 bp, Glycine max
agggaggtgtgtctgtgcctagttttagtagctaggactgtccggtccggaattcccgggtcgacccacgcgtccgagagatttgagagggctcctcctcctcctcctcctccccatctaagttaccgtgaaggacgtccccgagattatgatgctctgtctggctcaaaacgttcttatgctgctatagatgatgttcctccacgatatgctgatactggtgctcgccaatcaagagctcgactggactatgactatggcggtagtgcttcacagtatggagatgcttatggtgatagacttggaagatctagtatgggatatggtggtggcagcagaagttctatttccagtcaagattcacatgggttgtatagcagtcggcagggcatgagttatggaggaggttcttttggtagtggtgatgttggtggcatggattcatcaaaggtatggtggtgaatacatttcttggggaagttgatggtgtgggcagttcatatc

SEQ ID NO: 247707 - DNA, 537 bp, Glycine max
  unsure (1)..(537): unsure at all n locations
agaggaagctgtatgngtctatgaatgcagtctactgtactactgtaccggtccggaattcccgggtcgacccacgcgtccgcccacgcgtccgcccacgcgtccgaaaaaaaaaaaaaaaaaaaaaaaaaaaaaaaaagaaaaaaaaaaaaaaaaaaaaaaaaaaaaaaaaaaaaaaaaaaaaaaaaaaaaaaaaaaaaaaaaaaaaaaaaaaaaaaaaaaaaaaaaaaaaaaaaaaaaaaaaaaaaaaaataaaaaaaaaaaaaaaaaaaaaaaaaaaaaaaaaacgaaagagaaaaaaaactaaaacaaatgtaaaaattatttaaaacccaaaataaatgtaaataaaaagattttaaaaaaattaaaaacatatggttacataataaaaaatatttaaaataataaataattaaaaaggatcttaaaataaaataggtattaaaaaaaatatcaatatattataattttaaaaaaatttattatcattttaaaaataatattataattataaaattataatattatataaat

SEQ ID NO: 247708 - DNA, 451 bp, Glycine max
ctcgtactcggtacctgaatgtctcggactcgacgcgacgcggtctgctcactccgtgaatatgatgagcgtactaagatctaccgtatgaaaatctgtgccaccatacgtaggtcacgtgccaaatccaagttctggtattttttgagaaaattgaagaaggttaagaaaagcaatggacaagtgctagccatcaatgagatttttgagaagaatcctaccaagattaagaattatggaatttggctgcgttatcagagccgtactggttatcacaatatgtacaaggaataccgagatacaactctgaatggtgcagttgagcatatgtacactgaaatggcatctcgtcatagggtgaggcatccatgcatacagataattaaaactgccaacatcccagctaagctgtgcaaaagggagagcaccaagcaatttcacaattcttaaa

SEQ ID NO: 247709 - DNA, 508 bp, Glycine max
aggtgggaggtgctgtcattgcatcgttagttccctacgtactgccgtaccggtctcggaattcccgggtcgacccacgcgtccgctcgtattgatttttatgctctcactcgaatcttgcatttgaggcattacattggatgtctttattttgtgcctgcacctggatttgaagcttacggggaccccactagttaccctggaagttctaataacaaaggcagcaatagtgaactaattgatgaggaacctttgaagttacaaaggctaggctatcaaggacctgaaattgacctggagaatcagagttggagagttttaaatggaccatttatttctgtctggcttcacaatgtggcttggggtgctgaaaacaccaaggcagcaccagatgcaaagttctcagatggttatctggacttgatcattacgaagaattgcccaaagttaccattgctgtcgttgatgtcagatttgaataatggaaggcatggaaaattaacctttg

SEQ ID NO: 247710 - DNA, 307 bp, Glycine max
cggaattcccgggtcgacccacgcgtccgcaggttttcctgtttgctaactcgaaatgtaagaggtatttccacaacaggttgaagccatcaaagctcacctggactgcaatgtacagaaagcaacacaagaaggacattgctcaagaagctgtgaagaaaagaagacgtgctgccaaaaagccttactccaggtccattgtcggtgccactttggaagttatccagaaaaagagagctgagaagccagaagttcgagatgcatatagggaaactgcccttcgtgaaattaaagagaggaacaagaa

SEQ ID NO: 247711 - DNA, 496 bp, Glycine max
  unsure (1)..(496): unsure at all n locations
gaggggagaggcttcgtaatgatgtagcgtacggcactgctgtaccggtccggaattcccgggtcgacccacgcgtccggtgggcgccttcccagccatgtccttgtccggcctgtttgccaacgctgtgctccgggctcagcacctgcatcagctggctgctgacaccttcaaagagtttgagcgcacctacatcccggagggacagagatactccatccagaacacccaggttgccttctgcttctctgaaaccatcccggcccccacgggcaagaatgaggcccagcagaaatcagacttggagctgcttcgcatctcactgctcctcatccagtcgtggcttgggcccctgcagttcctcagcagagtcttcaccaacagcttggtgtttggcacctcggaccgtgtctatgagaagctgaaggacctggaggaaggcatcctggccctgatgcgggagctggaagatggcacccnccgggctgggcagatc

SEQ ID NO: 247712 - DNA, 497 bp, Glycine max
  unsure (1)..(497): unsure at all n locations
agggaggtgngtctgtctactcgaaaatggtacgccactgcggtaccggtccggaattcccgggtcgacccacgcgtccgcggacgcgtggggcccaacagacccaccatgaagtccttatgagcttgattcttgggttgctgcgctcctggaatgaccctctctatcacctagtcaccgaggtgcggggtatgaaaggagccccagatgctatcctatcgagggccatagagattgaggaagaaaacaaacgacttctggaaggcatggagatgatatttggccaggttattcctggagccaaagagactgagccctaccctgtgtggtcaggactcccgtccctgcaaactaaggatgaagatgcacgttattccgctttttaatacctgctccactgcctgcgcagggattcaagcaagattgacacttaccttaagctcctgaatngcagaatcatctacaacaacaactgctaaacccacattcatcctatc

SEQ ID NO: 247713 - DNA, 191 bp, Glycine max
tccctggtcgacccacgcgtccgaaaaaaaaaaaaaaaaaaaaaaaaaaataaaaaaaaaaaaaaaaaaaaaaaaaaaaagagaggataaaaaaaaaaaaaaaaaaaaaaaaaaaaaaaaaaaaaaaaaaaaaaaaaaaaaaaaaaaaaaaaaaaaagtaattacttaattatattattcataaaaaataa

SEQ ID NO: 247714 - DNA, 134 bp, Glycine max
aaaaaaaaaaaaaaaaaaaaataattaaaataaaataaaaaaaaataaaaaaaagattttttaaaaaaaaaataacaaaaaaaaaaataaaataaaaaaaactaaaaataaaaaaaaaatacaaactatataat

SEQ ID NO: 247715 - DNA, 507 bp, Glycine max
  unsure (1)..(507): unsure at all n locations
gagtatagagtgtgtcttgtttatgataggctaagtgctcgtcncggtccggaattcccgggtcgacccacgcgtncgacaatttcattttcattacaactctctctctctctctcagcagcagaaacacaatacgcttgtgcaattgtgccaaagggcaatgaactatattcagaccaaatgcgtggtcaagcgcaaaggcaaagaaaccggtgaaagtgaaaccttgtgttttacaaagtccaaggataacaacaataacaacatgtgcgaccgccactgcggaaaacgctaccctctgttgtcgttttgggagctgccggaattcatgaaggacaacgaatacattcttcgttattacagagccaattggcctttcaagcaagctctctttagcctctttcgttggcataacgaaaccttaaatgtttggacgcatttaattgggtttttactctttctcggattgaccctcgcgaatttgatgaagcctaaagtggtgaatcc

SEQ ID NO: 247716 - DNA, 508 bp, Glycine max
agtggagagtgtgtcttcgtatgaaagaagagtacgcgactgctcgtaccggtccggaattcccgggtcgacccacgcgtccgcacacacacagctagcagatattacatacacgtgaatcactaattaagccatggagaagaaatcaatagctgggttgtgcttcctcttccttgttctctttgttgctcaagaagttgtggtgcaaactgaggcaaagacttgcgagaacctggctgatacatacaggggtccatgcttcaccactggcagctgcgatgatcactgcaagaacaaagagcacttgctcagaggcagatgcagggacgattttcgctgttggtgcaccaaaaactgttaaatggatccattcactccaacgtgaagaagatgcatgcagcgctattttataaaaaataaaactactatatactatatataataagactggcgctgcatcaatgacctatggattatagtatatattattaccgatgtcagaactctg

SEQ ID NO: 247717 - DNA, 501 bp, Glycine max
  unsure (1)..(501): unsure at all n locations
gggggagagtgcgtgtgttcctagttctagctcatcgcagtactgtaccggtccggaattcccgggtcgacccacgcgtccgtgatattcctgccaagcgcctgtactgcttcttctcttctctttactctgtgctggttcgtggaggccgagctgtcctgcagttgtaccctgagaattcagagcagttggagctgatcaccacccaggccaccagggccggcttcactggtggtgtggtggtggactaccccaacagtgccaaagccaagaagttctacctgtgtttgttttctggaccttcaacctctctaccagagggcctgagcgaagataccgaggaggagaagcctgccgagtccacgttcacggctgataggatcccgtacaggatagcaagacggggtgtggtgaggaagagccgagaatgggtcctggagaagaaggcacgccgncgncggcagggcaaggaggtcttgcctgacacccagtacaccgggn

SEQ ID NO: 247718 - DNA, 304 bp, Glycine max
ctgttttttgggtaaattgtactttttttatgggaaaacaaatatacaacttggaatggatttgaggcaaattgtgccataagcagatcttctttaagtggctaaaacaaagtttaaaaagcatgttaacaataaaagaaaatgtttctggtataggaccagcagtacaaaaaaatagtgtacgagtacctggataaaacacccgttttgcaatagtgcaacttttaagtacatattgttgactgtccgtagtccacgcatagttacaactccacacttcaacaacaacatgctgacagttcct

SEQ ID NO: 247719 - DNA, 503 bp, Glycine max
gggagggagctttagtgatcgacagcaggagtatatagcactgctcgtaccggtccggaattcccgggtcgacccacgcgtccgcctgaattgcagaatcatctacaacatcaactgcttaaggtaagtgtcaatcttgcttgaatccctgcgcaggcagtggagcaggttataaaaagcaagattgacacttaccttaagctcctgaattgcagaatcatctacaacaacaactgctaagcccacattcatcctatccatttctgagatggttcttaatgatccattccctggcaaacttctctgagctttatagctttgtaatgcatgcttggctctaatgggtttcatcttaaataaaaacagactctgtagcgatgtcaaaaaaaaaaaaaaaacaaaaaaaaaaaaaaaaaaaaacaaacaaaaaaaaagggcggccgctctagaggatccaagcttacgtacgcgtgcatgcgacgtcataactcttctatagtgcc

SEQ ID NO: 247720 - DNA, 503 bp, Glycine max
  unsure (1)..(503): unsure at all n locations
agagtgtgtctttgcctcccagcntntcagtacgnncngtctcggtccggaattcccgggtcgacccacgcgtccgctcacctgctggaaaggatgaatattcagagtgggtgattgcctctcagagaagtcgccttgaggtcatggctgaatttccatcagccaaacctccaattggtgtcttttttgcagcagttgctcctcgcctgcagcctagattttattcgatctcctcatctccaagaatggtgccaaacagaattcatgttacctgtgcattagtacatgagaaaatgcccaccggaaggattcacaaaggagtgtgttcaacatggatgaagaattctgtaccattggagaaaagccaggactgcagttgggctcctatttttgttaggacctccaactttagactcccttctgataataaagtgcctataatcatgattggtcctggcactggattggctcctttcagaggtttcttgcaggaaagattacct

SEQ ID NO: 247721 - DNA, 507 bp, Glycine max
  unsure (1)..(507): unsure at all n locations
tggtggggaagtgtgtcttanctctgaatagatagtactgctcgtaccggtccggaattcccgggtcgacccacgcgtccgctttgagagagagagagggaggagggagagtgttgacgctccatcaagatgggtatttctagggattccatgcacaagaggcgtgccactggtggcaagaagaaggcatggagaaagaagagaaagtatgagcttgggcgtcaggccgcaaacaccaagttatcaagcaacaaaactatccggaggattcgtgttcgaggtggcaatgttaaatggagggcattgaggttggataccggcaattactcatggggtagtgaagcagttactcgcaagactcgtattctagatgttgtttacaatgcctcaaacaatgagcttgtgcgaactcagaccctggtcaagaatgctattgntcaggttgatgctgctcctttcaagcagtggtaccttcaacactattggtgttgaattggtaagaaaaaa

SEQ ID NO: 247722 - DNA, 505 bp, Glycine max
gggtgagaggtgtgtgtgagcttagtttagtccgtactgctgtaccggtccggaattcccgggtcgacccacgcgtccgtaagatttggcataatacattgatttgtttcttaaaaacaacactgcaatgtctgccatatttctgcttgttggaatgctatcgtccattacagttgcacaatccataggagtttgctatggagtgattggtgataatctaccatcaaggcaagaagttgtggacttatataaaacaaatggcattggtagaatgcgtatatactacccagatgaagaagcactccaagcccttagaggttcaggcattgagttgattatggacgtggctaaggaaacccttcaatcattgacagactccaatgctgctacagattgggtcaataaatatgttacaccttactcgcaagacgtcaatttcaagtacatcgctgttggaaatgaaattcattccaataccaatgaggcaccatataatctaatcggc

SEQ ID NO: 247723 - DNA, 505 bp, Glycine max
agtggaggtgtttcgtaatgaaagtagtcgtacggcacgctcgtaccggtccggaattcccgggtcgacccacgcgtccgccgagattcattcttcaccaaaacttcgcaaagaaacactacacatccatggcaactgctggcgtgcaagaagttcgtgttccccctctaacttccacctctgagccaccttctctctttgacggaaccaccaggttgtacatcagttatatttgtccctatgcgcagcgtgtttggatcactcggaactataagggactacaagacaagatcaaactggttcctattgacctacaaaacaggcctgcttggtataaggagaaagtctaccctgaaaacaaggtgccatcattggagcacaatggaaaggtcttgggtgaaagtctcgatttggtcaaatacatagatgacaactttgaagggccgtctctagttcccaatgatcctgccaagaaagagtttggtgaagaattgaattcccattt

SEQ ID NO: 247724 - DNA, 502 bp, Glycine max
gaggggagatgtttgtctacgacgaggcagtacgctctaccggtccggaattcccgggtcgacccacgcgtccgtggaggttcacgaccacacctcttacttaatttacttcattagctctattattgtctgcgcgttattcaaattagttcaaggatcggattccaaaacctcctctacctgctgcaaattgcccccaggaccaaggacactaccgctcataggaaacatgcaccagtttgttggctcactgccggttcatcactgcttaaaaaatttggcagataattatgggccgctaatgcatctaaaactaggagaggtatctaacatcatagtcacttcacaagaaatggcacaagagattatgaagacacgcgatctcaacttctctgataggccaaaccttgtatcatctagaacaggttcttacaacggctctaacattgtcttcaggcaacatggacagtattggatgccacttccgagaatttgcacaggg

SEQ ID NO: 247725 - DNA, 499 bp, Glycine max
gtgaggccttcgtgcatgctaggggagtaaggactgctcgtaccggtccggaattcccgggtcgacccacgcgtccgcccacgcgtccggtttttgtgtgctcttggattggttgttagaatggacggtcagagtaagggtagttttaatgtgatggaagggagtgagggcaaaggaagggagtttgtggtggaaaagtctgcatcatcaatagtgggaacttgtgatttggttctaaggattttggcctttttactaacccttgtggctgctgtagttattgggacagataagcaaactgccattgttccaatcaagcttgaggattctatgccaactttgtacgttcctgttgcagctaagtggcattacttgtctgcctttgtctattatgtgggggcaaatgcaatagcatgtgcatatgcaatactgtctctcttgctcactcttgcaaataggcgttaaggccaaggaaccattgaaacctttgacaattgcc

SEQ ID NO: 247726 - DNA, 495 bp, Glycine max
  unsure (1)..(495): unsure at all n locations
taaggtgtgtgtgccctccgattagtgctcgncgtgctgtaccggtccggaattcccgggtcgacccacgcgtccgcggacgcgtgggtttcaatagatcgcagcgagggagctgctctgctacgtacgaaggcccgacccagaagcaggtcgtctacgaatggtttagcaccaggcgccccacgaacgtgcggtgcgtgacgggcgagggggcggccgcctttccggccgcgccccgtgtcccgggacgaagggctctccgcaccggaccccggtcccgacgcgcggcgggggcgcgccgcgccgcgccccgggggacgcgggcgacggcccgtcggcggggacggcggcggaccggctatccgaggccaaccgaggctcccgcggcgctgccgtatcgttccgcctgggcgggattctgacttagaggcgttcagtcataatcccacagatggtagcttcgccccattggctcctcagccaagcacatacacn

SEQ ID NO: 247727 - DNA, 499 bp, Glycine max
aggggaggtgcttcagtgtatagaagaaggacgtgacggcactgctgtaccggtccggaattcccgggtcgacccacgcgtccgggcgggcctctcgcggctggacacctccgtcatctttgaagccttggccacaggctgcaccagcaccacggcctacatgagcatccacaacatgtgtgtctggattatcgaccgcttcgggagcgaggagcagcggcaccggctgtgcccgcccctctgcaccatggagaagttcgcctcctactgcctcacagagccagggagtgggagcgacgctgcctccctcatgacctctgccgtgcgacaacacgatcattacatcctcaatggctccaaggccttcatcagtggtggcggcgaagctgacatctatgtagtcatgtgccgcacaggagggccaggccccagaggcatctcctgcgtagtggtggagaaggggaccctcggcctcagctttgcatgaaggagaaaatgt

SEQ ID NO: 247728 - DNA, 501 bp, Glycine max
  unsure (1)..(501): unsure at all n locations
ggaggaggtgctgtctgtaacagatgaaggaagtacgccacctgctcgtaccggtccggaattcccgggtcgacccacgcgtccgggcggatgaccgcagccctcgctgctgcccgtgccgctgcgaccatggcctctggcagcagcggcctcgccgccgcccgcctcctgtcccgcgccttcctcttgcaacagaatggaattcggcattgctcttatacaacttccaggaagcatctctatgttgatagaaatacgaagattatttgccagggtttcactggtaagcagggcacctttcatagccagcaagcactggaatatggcaccaaactagttggaagaaccactccagggaaaggaggaaagacgcacctgggcttaccagtctttaacactgtgaaggaggccaaagaacagactggggcgacagcatcttgcatttatgtnccctcctcctttgctgctgctgccattgatgaagctatcgaggcggaagtg

SEQ ID NO: 247729 - DNA, 499 bp, Glycine max
  unsure (1)..(499): unsure at all n locations
ngggagacgtgttctttgtaagaagggaggattattggactgctcgtaccggtccggaattcccgggtcgacccacgcgtccggtgtctactctggcctgggtttagcagtcgtgcgaggaggttgtggcgtctgctgcttccaggcgatttgaggtgagggagccaggtggaggaatccggagtcggggaaagggaacccctgaagtctcgattcagttgcctcccagtcctcgctttgtgttgctccagccaggatgatcgaggttgtttgcaacgaccgtctgggaaagaaggtgcgcgttaagtgcaatacggatgacaccatcggggaccttaagaagctgatcgcagcccaaactggcacccgttggaacaagatcgtattgaagaagtggtacacgatttttaaggaccatgtgtctctgggggactatgaaatccacgatgggatgaacctggagctntattaccagtggagcagaatttccttntcctgc

SEQ ID NO: 247730 - DNA, 446 bp, Glycine max
tcccggtcgacccacgcgtcctcccactcgtccgaaaaaaaaaaaaattaaaaaaaaaaaaaaaaaaaaaaaaaaaaaagaaaaattaaaaaaattaaaaaataaaaaaaaaaaaaaaaaataaattcaaaattttatattttttaaaaatttaaattaatttaattatacttacactaatttttaaaaatttttatattgttaaatccttcttttttatccattttaattattatttcatcttataccctttttcttaatcttttttatttacttttattcatactactttttctctttttaacattttttcaatttttatttattattttactttctttataattttcacatttatttattatttttttttaattaccttttttttccctataattttttaatttctattttttatttttttttttttttttttttaatttttt

SEQ ID NO: 247731 - DNA, 505 bp, Glycine max
  unsure (1)..(505): unsure at all n locations
nggtngtgagaggtgtcttactactgaatagactgtatgctgtctcggtccggaattcccgggtcgacccacgcgtccggccttcttaccgaacatgacttgagctttccatggaagaagaacacgccgcaaaggcgccactgccggacgctttccttcagttcctggagaccaacgggctcgacccttccatttacactgctattgattccaccccacgatacattcggttgaaacccggtttcgaatcatgtattgaagaggttgaagcagaggtgaaatgcaaactcgaaaaattagagtggttaccgggattttactctcttccacctcacgttcaaattgctggttctagggcataccgagaagggaagatatatggaattgatgcagcttctggagctgcagttatggctttaaatatatcacctggggatcatgttctcgacctgtgtgctgctcctggtgccaaactttgtatgattttggaccttcttggtgattn

SEQ ID NO: 247732 - DNA, 502 bp, Glycine max
  unsure (1)..(502): unsure at all n locations
gagttngagtgtttttacatagaaaagtccgtatgctcgtaccggtccggaattcccgggtcgacccacgcgtccgtgcaaccttacaatgactcaaatctgtggtctgttggaaagggatgagtaaagatgtttgagcttttgttcagaaatgcagtgtatgtcaaaagtgtaaatatgagaccaaggcttctcctggattgctgcaaccattgcctattccggatctgatttggcagcatattaccatggattttatagaaggcatgcctagttcctttggtaagtaggtgatttttgtagtagttgataggttgagcaaggcagcccactttatggctctttctcatccttattctgctgctgatgttgctcaatccttccttgatcatgtattcaagttgcatggattttcagattctatcaccagtgacagagattcaatatttctcaatcagttttggcaggacctctttgcttttcaaggtggtcaaggtcaact

SEQ ID NO: 247733 - DNA, 493 bp, Glycine max
  unsure (1)..(493): unsure at all n locations
agaggtgctttgtccctcgatctgcgtacggactgctgtaccggtccggaattcccgggtcgacccacgcgtccggtcaaatctactcttgtgccagggtgtggtctccacccccgtctgtcccaatgggcgctggcaactgccaggtatcccttcgagacctgtttgaccgggcagtcatggtgtcccactacatccatgacctctcctcggaaatgttcaacgaatttgataaacggtatgcccagggcaaagggttcattaccatggccctcaacagctgccatacctcctcccttcctacccctgaagataaagaacaagcccaacagacccaccatgaagtccttatgagcttgattcttgggttgctgcgctcctggaatgaccctctctatcacctagtcaccgaggtgcggngtatgaaaggagccccagatgctatcctatcgagggccatagagattgaggaagaaaacaaacgacttctgga

SEQ ID NO: 247734 - DNA, 496 bp, Glycine max
aggaaggcgttctgtgcctaccgcagtagtaagcatctgcggtaccggtccggaattcccgggtcgacccacgcgtccgcccacgcgtccgaggaggagcgggacttcctgcggtgccagctggacaagttcatgtcctctgcccgcctggacgcagacgaccactgccgggggaagcccgggcctcggcgggccgagggggacggccgaggggggaccgtgggcgaggcctcagaccccgagtcagctgcctcctacctcagcggagcatctgaagaaggcagcaccgtggagaggaagaggcagaagcagaaaggaggcccaggccggcagcgcttcgggaagcccaaggcccgttagaggcagcggttgaaggacgcatatggggtcctctgccgatacaagaagatcctgagcaccttccagatgttgaagagcatgtatctgtccgtctagcaccatttagtggaccgaaacacgagagccctgatcattc

SEQ ID NO: 247735 - DNA, 504 bp, Glycine max
  unsure (1)..(504): unsure at all n locations
agtgtgaagtgtttngttgcatgataggaaagagtacggcgactgctcgtaccggtccggaattcccgggtcgacccacgcgtccgcggacgcgtggggagatggtggaggacagagagcctagcttgctgcggtccatggggttacaaagagtgggacacaagttagaaactgaacaacaagaagtagatataacttatcttcgaacataacaccaactggtaaaaaaaaatacttgaataaagcaactagtaagatcccctggagaagggcatggcagcccgctccactattcttgcctggagaatcccacggacagaggagcctggcgggctacagtccactgtgtcacagggagtcagacactactgacatgacttagcatgcacacatgtacaaactaggaatagtcaatctagagtcatttgtataatgttctatctagttgtacatgtcaactcatacagaagctttttaaaacagtgaaaaaaataccttggattt

SEQ ID NO: 247736 - DNA, 505 bp, Glycine max
  unsure (1)..(505): unsure at all n locations
aagttntagaggttttttccctagttcagtcagtactgctgtaccggtccggaattcccgggtcgacccacgcgtccgcccacgcgtccgatttcaaaggcatgttttttcaacaaagttcattctacccacgagtcgattcaacaaacccagacgctaattctcccttctctatccccgcaccatcttcttcttcttcttccatttatccctcagtggaaacaacagagaatctcatttgggaagagccaaacacgactacagaagaagccatggaaaacgttctggtcacggtcccgggtgcgattctgcatctgatagaaaaggattccagcgtgcaccttgcttcgggcgacctcaccatatcgaccctcggagaaggcgacaaagtggtggcggttctggcatgcgtcggcgatcaggttcagtggccgttggcgaaagacgtgtcggccgtgaagcttggttagtcgcactaactcttcaccggccaagtcccacaagg

SEQ ID NO: 247737 - DNA, 503 bp, Glycine max
gagagtgagtgtgtgtcttaccctcagttggatgaagtgctgtcccggtccggaattcccgggtcgacccacgcgtccgatatacacttgtactgttctattagttcatactaagttctgaaaatgagttccaaggttgtgcttgttctacttatgttcttggccactatacttctgatctcctctgaggttgcacccgatgatgcatacgagaattttgacaaaatagatgggaagcctagtgcagatggggtagatgaaagcaagtattggcgtggcggctatggtggcggctatggtggtggttatggaggtgggcgtggaggctatggaggtgtgcgtggaggctatggacggggacgtggtggatatggcggcagacgaggtggctatggtggcgggcgtggtggctatggctgcggtcgtggtggctggcgttgtggctatggtcctaatgaacattaccaggctttatttgaagcttacccttacaacttataaag

SEQ ID NO: 247738 - DNA, 509 bp, Glycine max
  unsure (1)..(509): unsure at all n locations
agatggaagggtgtattggatgctcagcntacttagtcactgctcgtaccggtccggaattcccgggtcgacccacgcgtccggtgcgagtcaacgggcgagtaaacccgtaaggcacacggaagctgattgatgggatgccgatgtgggttgcaccgagctaccgaccctgatcttctgtgaaaggttcgagtgagtagcatacctgacgagacccgaaagatgatgaactatgcctgatcggggcgaacccagaggaaactctggtggatgcactctacaatactgacctgcaaatcatactgatgactagcatatagatgcgaaagactaatcaaactgtctagtagctgaactaacctccagaatttccctcaggatatctggcaccatagtgctgattatatcgattaaagatcatgattagaggcatatgatgcacaacggcctagacctattcttaaactttaagatagtgggacagttccggttgtatcttaaaactgccc

SEQ ID NO: 247739 - DNA, 355 bp, Glycine max
tgggtaaattgtaatttttttattggaaaacaaatatacaacttggaatggatttgaggcaaattgtgccataagcagattttctttaagtggctaaaacaaagtttaaaaagcaagttaacaataaaagaaaatgtttctggtataggaccagcagtacaaaaaaatagtgtacgagtacctggataaaacacccgttttgcaatagtgcaacttttaagtacatattgttgactgtccgtagtccacgcagagttacaactccacacttcaacaacaacatgctgacagttcctaaagaaaactactcaaaaaaaaaaaaaaaaggcataacccagatgttccctcatttgac

SEQ ID NO: 247740 - DNA, 502 bp, Glycine max
  unsure (1)..(502): unsure at all n locations
tgaggngagacggtgttgtgcacgatagacaccgtacgcgcactgctgtaccggtccggaattcccgggtcgacccacgcgtccgtgccgaagtgctggaatcaaggtcatcatggtcaccggagaccatcccatcactgccaaagccattgccaaaggtgtggggatcatctcagaaggtaatgagactgtagaagacattgctgcccgcctcaacatcccagtgagccaggtgaaccccagggatgcccgggcctgcgtggtacatggaagtgatctgaaggacatgactcccgagcagctggatgacatcttgaagtaccacacagagattgtgttcgccaggacctctccgcagcagaagctcatcattgtggaaggctgccagagacagggtgccatcgtggctgtaactggagacggtgtcaatgactccccggctttgaagaaggcagacattgnagttgccatggggattgcaggctcagacgtgtctaagcaa

SEQ ID NO: 247741 - DNA, 497 bp, Glycine max
gagggaaggcctgtgttgatgtttagctcgtacggactgcctgtaccggtccggaattcccgggtcgacccacgcgtccggtggaaatctgtattgcaacacctggaagactgatagactttttagaatgtgggagaaccaatctaagaagaaccacctaccttgtccttgatgaagcagatagaatgcttgatatggggtttgaaccccaaataaggaagattgtggaccagatcagacctgacaggcaaaccctaatgtggagtgctacttggccaaaagaagtaagacagcttgctgaagatttcctgaaagactatattcatataaacattggtgcactagaactgagtgcaaatcacaacattcttcagattgtggatgtgtgtcatgacgtagaaaaggatgaaaagcttattcgtctaatggaagagatcatgagtgaaaaggagaacaaaaccatttgtttttgtgaaaccaaaagaagatgtgatgaa

SEQ ID NO: 247742 - DNA, 502 bp, Glycine max
  unsure (1)..(502): unsure at all n locations
gagggagagccttcngtgtctgacggaaggattattgcactgctgtaccggtccggaattcccgggtcgacccacgcgtccggccagtgtcattctctttggaaccaacaatagcagctccatttctggggtctgggtctttcgaggccaggagcttgcttttccgctgagtccagattggcaggtggactacgagtcatacacatggcggaaactggatcccggcagcgaggagacccagacgttggttcgagaatacttctgctgggaaggggccttccagcatgtgggcaaagccttcaatcagggcaagatcttcaagtgaatacctcttgccatcgcccagctgcctgcacctgcccttcggggagaatgggggtcattaaaggaaactgaacattgaaaaaaacagaaaaacgttgaaataaaatacgaggatacgaataatgaaggcatttgaagttgacgatgggaattgaaagcgtcaaaagtatattaagca

SEQ ID NO: 247743 - DNA, 228 bp, Glycine max
gtcgacccacgcgtccgaaaaaaaaaaaaaaaaaaaaaaaaaaattaaaaaaaaaaaaaaaaaaaaaaaaaaaaaggaggattaattaaaaatataccaaaacaaaaaaaaacaaacatacaaaaaaaaaagcccccccatttataaacttcaatcttaataacccccttcatcctaacaaatacttttcttaaaatcccccaaatttaaataacatacccgtctttt

SEQ ID NO: 247744 - DNA, 500 bp, Glycine max
ggggaggcctgagtgcatgtcagtcactcagcactgccgtaccggtccggaattcccgggtcgacccacgcgtccgcaacaataggagatctcctaatcagtcatctccaagtagtcaagacagagcagggccatcagaattacaatcattttcagaatctctgaaatctaaactgaatgctgtatcaacaagatacaaggagtcaatttccaagagcacaagagggtggaaggagagatggttctctcggaacaacactatgtctgaccttggatctgaagttaggcgagaagttaatgcagggattgcaactgtgtcacgcatgatggaacgcctggagaccagcgacaataatagaagcaatagcaattctgcccccagtaatatagaggatggttcagttcaggaatataatggtcaaactttaacaccaggcaatgaaggggacggtcttttgagagacaattacccaaaagcttcttgtgctgcaagctctaat

SEQ ID NO: 247745 - DNA, 506 bp, Glycine max
agtggaggtctttcgtccatgcttatgtagtacggcactgctgtaccggtccggaattcccgggtcgacccacgcgtccgcccacgcgtccgaataggtaaccttaacctcctcgaacaacctattcaccgtgtcttccaacgcatgtccaaagaatatggaaacatcgtttccctttggttcggttcacgtctcgccgttgtcatttcctcaccaacagcataccaagaatgcttcaccaaacacgacgttgccttggccaaccggctaccttctctctcgggaaaatacatattctacaacaacaccaccgtagggtcctgctcccacggggagcactggcggaacctccgccgcatcaccgccctggacgtcctctccacgcagcgagtccactctttctccggaatccgaagcgacgagacgaaaaggttggtacagaggttgctggccaagaacttcaaggagggttttgccccccttgaaaataacctcaatgttcattg

SEQ ID NO: 247746 - DNA, 501 bp, Glycine max
  unsure (1)..(501): unsure at all n locations
nagttnaagagcttccgtaatgtaggaagggattaatgcaactgctcgtaccggtccggaattcccgggtcgacccacgcgtccgcggacgcgtgggctcgtgcacggaaaatccagcgtttcttgtctcagccattccaggtggctgaggtctttactggtcatttggggaagctggtacccctcaaggagaccatcaaaggattccagcagattttggcaggtgaatatgaccatctcccagaacaggccttctatatggtgggacccattgaagaagctgtggcaaaagctgataagttggctgaagagcactcatgagggggtccttttggcaaattaagcactcatcctccatggtgtccctctcctcgcccctaatccggaaatcgcagttttctctgtaggccacgtgagggccttgattgaagacattgtgttctgtctgaagaatatttaaggtttccaatannatgtatatccctcanaaaaaaaaaaaag

SEQ ID NO: 247747 - DNA, 508 bp, Glycine max
  unsure (1)..(508): unsure at all n locations
gggggaggggttcttgcttatgcctagntgcacggcacgtaccggtccggaattcccgggtcgacccacgcgtccgggaccaaccatgtcgcctagtttcgtcttcgacccgcctagcgacgaagaaatcgggcactctgaacacgaagaagaagaagaatccgaagaagaaccagagtcaggatcaggaacaggatcagaatcagagtcagaaggagaaggagaagaagaagaagggcacgaagaagcgcgggttccgaagaagaagaagaagaaaacgcagtctccatgggactttgctaaatacacggaatcagtggcggaggaacacgctcgcaggagcacaacctcggtcgacgagaaaatctccaaagcactcaaacaacgttccacgccgctcgttgctgagcttgaccacagctccgagtccgaacctgatgaacaagaagattatagaccaagaggaagaggatggaggaggaggtnaatgatggtgatagcaaatccn

SEQ ID NO: 247748 - DNA, 277 bp, Glycine max
tttgctgaaacacccaccgcgttagtcaataacatgtttgctcgtccggttcaattcgcgggttctctcttcttcttcctcttctgctcgaccctcatatctcttttcgccggaatcctctgctcttctctcgcatctaaaccttccaactcttctacgacgtcgtcttgttcttaccctctgctgctgcttcttcatcttcttctccttcttctccgtttcggcttcgccttcccaagccttccaccgtgttctctgcttcttcttctgcttcgtc

SEQ ID NO: 247749 - DNA, 414 bp, Glycine max
tcccgggtcgacccacgcgtccggtaaccctggacggaggtgaaacgtggcaagtgtgcacactggactgtccggagaagccgaacaaatatggaaagtactggtgttggtgtttttggtctgtggaggttgaggttttggacctgctcggagccagggagattgcggtgcgtgcttgggacgaggccctcaacacccaacctgaaaagctcatttggaatgttatgggcatgatgaacaactgctggttcagagtgaaaaccaatgtgtgcaggccccacaagggtgagataggtatagtgtttgaacaccccacccaaccaggcaaccaatccggcggatggatggcaaaagaaaaacacctagagaaatcatctgagtccaacccaaccctcaagaagagtgtcttcttcc

SEQ ID NO: 247750 - DNA, 503 bp, Glycine max
  unsure (1)..(503): unsure at all n locations
nggaggtttgtagtggatcgttagctaagtacgtcactgctcgtaccggtccggaattcccgggtcgacccacgcgtccgctctctaccattgccatggatccctacaagcaccggccatccagcgccttcaattcgcccttctggactacaaattctggtgctcctatttggaacaacaactcctctttaaccgttggagctagaggtccaattctgctggaggattatcatcttgtggagaagcttgcaaattttgatagggaacgtatcccagaacgtgttgtccatgccaggggcgctagtgcaaagggtttctttgaggtcacccatgacatttctcacctgacatgtgcagatttccttcgagcccctggagttcagacgcctgtaattgttcgtttctcaactgtcattcatgagcgtggtagccctgaaaccttgagggaccctcgaggttttgccgtgaaggtttacaccagaaagggtaactttgaacctgtn

SEQ ID NO: 247751 - DNA, 505 bp, Glycine max
  unsure (1)..(505): unsure at all n locations
gagagagtgttctgtgcctgtatgctnagtaagtcacgctgtaccggtccggaattcccgggtcgacccacgcgtccgcggacgcgtacggccacgcgtccgggaggagcttgagaaggccatgtcaaccgatggatttgagatagtccagactctcattgttgatatagagcctgatgttaatgtcaagagagcaatgaacgagattaacgcatctgctagattgaggttggctgcaaatgacaaggctgaagcagaaaaaatactgcagatcaaaaaagctgagggagaagcagaatccaaatatctgtcaggactcggtatcgctcgccaacgtcaagccattgaggatggactgagggacagtgtgcttgctttctctgagaacgtgcctgggacaacagctaaagatgtcatggacatggtgctggtgactcaatactttgacaccatgaaagaaaatggagcctttttcaaggtcttaagctgttttcatactacttgg

SEQ ID NO: 247752 - DNA, 503 bp, Glycine max
  unsure (1)..(503): unsure at all n locations
gggggagggttgtagtggatgctagttgacttagncacgctcgtaccggtccggaattcccgggtcgacccacgcgtccgattcgaccactggtggttctgaagctggtatttccaaggatggacagactcgtgagacatgctctgctttcattcaccctaggtgtgaaacagatgatgagctgctggaacaaagtggatgctactacacccaagtattccaaggccagatgtgatgaaattgtgaaggaagtctcttactacttgaagaaagtatgatacaaccctgacaagattccttatgttcctatctgtgattacgagggatacatcatgattgagaggtccacaaaccttgactgatacaagggtccaactctgcttgatgcacttgaccagattagtgagcccaagatgccctctgacaagcccctcaagcttatcctttaggatgtgtacaagattggagggaatggaacaggtccagtggacctttttacaacc

SEQ ID NO: 247753 - DNA, 499 bp, Glycine max
  unsure (1)..(499): unsure at all n locations
agggaagtgcttntttgctcgctcagtccgtgacggcactgcggtaccggtccggaattcccgggtcgacccacgcgtccgcggacgcgtggggcttggctctaatgggtttcatcttaaataaaaacagactctggagcgatgtcaaaatctaagactgcaattttgtcaatgtttcttatcttcatttaatagacaatcaaatgaaaatccttccttatgattgagagaaagaacttctgattaaaatttgtcacaaatagcaaaaaaaaaaaaaaagggcggccgctctagaggatccaagcttacgtacgcgtgcatgcgacgtcatagctcttctatagtgtcacctaaattcaattcactggccgtcgttttacaacgtcgtgactgggaaaaccctggcgttacccaacttaatcgccttgcagcacatccccctttcgccagctggcgtaatagcgaagaggcccgcaccgatcgcccttcccaacagttg

SEQ ID NO: 247754 - DNA, 503 bp, Glycine max
  unsure (1)..(503): unsure at all n locations
gtgagagctcttctgtgcccccagctccncacacngcncntgccngtactcggtctcggaattcccgggtcgacccacgcgtccgcggacacttatcactagtctctaatacccttcatgttaaatgaacacacacggtggaccaatttcaaaatctaagactgcaatttcgtcaatgtctcttatcttcatttaatatacaatcaaatgaaaatccttccttatgattgagagaaagaacttctgattaaaatttgtcacaaatagcataaataaaaaaaatggtcgtccgctctagaggatccaagcttacatacgcgtgcatgctacgtcatagctattctatagtgtcacctaaattcaattcactggccgtcgttttacatcatcgtgactgttaaaaccctgtcgttacccaacttaatcgccttgctacatattccccattctccaacttacgtattatctaatagtcccgtacctttcgctcctttcaacaattt

SEQ ID NO: 247755 - DNA, 504 bp, Glycine max
atagagggcgtttgtccatgatcgactagtacgcacgtgccggtccggaattcccgggtcgacccacgcgtccgcccacgcgtccgagaagctgtaaagaaacgatgaatgcttcagactcagagaaagaggacgcagaaattgaagcaacagaaactgcacccgatgaagagaatgcgaaattgaagaagaaagagaagaaaaagaagaagaaagcttcgtcgaaggatgcagagaagaagcgcggcgtgtgctatatgagtcgaatcccccctcacatggaccacgtcaagcttcgccacattctctctcagttcggcgatattcaacgaatttttctcgctcctcaagattcttctgtccaagtgtctgccaagaggtcacgtggatcccgagaccaagcatattcagaaggatgggttgaattcggtaataaaagtgttgctaaaaaggttggcaatatgttaaatggggaccaaatagggggtaagaagaggtcatcat

SEQ ID NO: 247756 - DNA, 240 bp, Glycine max
  unsure (1)..(240): unsure at all n locations
ctacgggagttgtcctcctcgtactctgctcaataagctgtctcagggcagttatctcaccactcaggagcaatggttcaatcaaaccctcgatcacttctctccctatgatcaccatcaattccgtcaacgttacttcgagtttctagactatttccggattcctgatggaccaattntcttggtaatcggtggtgaaggtccatgntatgggataacaaatgactatattggtgtact

SEQ ID NO: 247757 - DNA, 505 bp, Glycine max
  unsure (1)..(505): unsure at all n locations
nggangaggtcctgagtgaatgtttacctccctcaggcactgctgtaccggtccggaattcccgggtcgacccacgcgtccgctcctctgtctctctctctccaccattgccatggatccttacaagctccggccatccagcgccttcaattctcccttctggactacaaattctggtgctcctgtttggaacaacaactcctctttaaccgttggagctagaggtccaattctgcttgaggattatcatcttgtggagaagcttgcaaactttgacagggaacgtatcccagaacgtgttgtccatgccaggggagctagtgcaaagggtttctttgaggtcacacatgacatttctcacctgacatgtgcagatttccttcgagcccctggagttcagacgcctgtaattgttcgtttctcaactgtcattcatgagcgtggtagccctgaaaccttggaggacccttgagggtttgcccgtaaggtttacaaccaaagaggt

SEQ ID NO: 247758 - DNA, 503 bp, Glycine max
ggtgaggtcctgagtcgatgttatgtcctaaggcactgctgtaccggtccggaattcccgggtcgacccacgcgtccggagaaaacccccaaccccaacctcaaccttaacctctcctcactttcttttcaaccagaactatgattaagctttttaaagtaaaggaaaaacagagagaactggcagaaaatgcgagtggcggaccacccgttaagaagcaaagtgccggcgagttgcgtcttcacaaagatataagcgagctgaatctaccaaaatcatgtaccatgcaattccccaatggcaaagatgacctgatgaactttgaagtttcaattcgacctgatgatggatattacttaggtggcacatttttgttttcctttcaagtgtctcccatctatccacatgaagcaccaaaggttaaatgcaagacaaaggtctatcattcaaatattgacttggaagggaatggttggcttaactatttaacaagaggtatggaa

SEQ ID NO: 247759 - DNA, 499 bp, Glycine max
ttgggaggtacttgagtcctcgaaagaagcgtacggcactgctgtaccggtccggaattcccgggtcgacccacgcgtccggctggagaaggagaaaagtgccccggatcctttcaggactcttggtctttggggagcgacccaaatcgactgagggaagagggaggaaaattccctggatccctgcagggttaatttattcaaaaaggaaatcgaaaaatactcaacatgcaaaaatcttgtggagaaaatgaaagaaaaccacagaacatgccaaaggctgaggaagaccgccctttggaagctgtaccacaggaggcagaaggaaatcctcaaccttctgaagaaggtgtaagccaggaagcagaaggaaaccttagaggagggctgactcagcctggtcagggatataaagaggactctcctgttaggcatttggaccctgaagaaatgataagaggagcagatgagttggaaaggctttaggaggagataggaa

SEQ ID NO: 247760 - DNA, 510 bp, Glycine max
  unsure (1)..(510): unsure at all n locations
ngagggnggaggtgtagtcnagttatgcagaaggaggtatcattgccactgctcgtaccggtccggaattcccgggtcgacccacgcgtccggccgggttgagaggagcgtggccttctcctctccccgccatggcgtgtgctcgtccactgatatcagtgtactccgaaaagggggagtcctctggcaaaaatgtcactttgcctgctgtgttcaaggctcccattcgacccgatattgttaactttgttcacaccaacttgcgcaaaaacaacagacagccctatgctgtcagtgaattagcaggtcatcaaaccagtgctgagtcttggggtaccggcagagctgtggctcgaattcccagggttcgaggtggcgggactcaccgttccggtcagggcgcttttggaaacatgtgtcgtgggggccgcatgtttgcgccaactaagacctggcgacgttggcaccgcagagtgaatacgacgcagaagcgatacgccatctgctctg

SEQ ID NO: 247761 - DNA, 500 bp, Glycine max
  unsure (1)..(500): unsure at all n locations
nagatagatgtccttcgtccatgcttacgtcgtacggcactgctgtaccggtccggaattcccgggtcgacccacgcgtccggtcgcgcagggactggagcaggggaagccggtgctgcccgtgcggagacagcgagagctcgtatcgcggaggcggtgtgcgcccgactgttaccatgagcgatcaggctctgatcttgctgaaagacttcttgtccggcggcatggccgctgctcatctccaagactgctgtcgcgcccatcgagagggtcaaactgctgctgcaggtccagcatgccatcaaacaaatcattgctgataagcaatacacagggatcattgattgcgtggtgagaatccccaaggagcaagtctctgtctccttctggacgcgtaacctgaccaacgtgatccgttacttacgcacgcaagctctcaaattcgccttcaatgacaagtacaagcagatcttactgaggggcgtagaccggtataagca

SEQ ID NO: 247762 - DNA, 334 bp, Glycine max
cgacccacgcgtacggccccaaaatgtgagtgctcaaaactgcggttgtgctgaacggttatgttgcagccaagatgggtattgtggtaacggtgaggagtactgcggcccatggtgcaagcatggtccttgttattcgagcacaccaagtactaacaatgttaatgtggcgacatcgcacaccacacttcttcagtggcataattgatcaggctgactctggctgtgctcgcaagtactcttactcacgagatgcttttcttaatgctctcaattcctataatgactttggtagacttggttccaggatgactccgagcgcgagattgcagct

SEQ ID NO: 247763 - DNA, 528 bp, Glycine max
  unsure (1)..(528): unsure at all n locations
aggttttagctggnttnnccgatcgcatctgatgtcatagccatgctgtaccggtccggaattcccgggtcgacccacgcgtccgctttcatatccaaattccaatgcttcttcttccttcttatttcaatttcaatcactactattattactctttcacgcttttgcttctcgatttttaaaccctaaatctatctatctgtctaatagataagatagggcaaaaacataacanaacataataaaaccctagccaaagaaagaccttgttgagcagcagcagcagagagagagaggcttatggaaggagtaccgcacccaatacccagaactgtcgaagaggttttcaccgattntaagggcagacgcgctggtttgattaaggccctcactactgacgttgaaaagttttaccagcagtgcgatcccgagaaggagaatttgtgtctatatgggtttccaaatgaaacatgggaagtgaaattgccctgtgaggaagtgccctctgaacttcctgaaccagcattn

SEQ ID NO: 247764 - DNA, 522 bp, Glycine max
  unsure (1)..(522): unsure at all n locations
gagtnnnagagtaggttgnagctcgaattgttgggaccgtaggcatgctctaccggtccggaattcccgggtcgacccacgcgtccgaaaaccctaatttctcgaaaggtatggttttgcatagcctactcctcctctcacggtttcttctttctatcttctcacctttcttcttccactggtctaatctaagatgggcaagtcaagcaagaaatcacctctcaaggtcgacgcttttccagctgtggttcccccatccaagtctgccaagaatggaggcaagagacaagctcatgatgaaattgactagcaattgagtgccaaaaaacagaagattaatgaggttgctcagaaacaaaaggaggcaaaggtgcacaagaaggaaagtagctcagatgattcttcttcagaatctgaagatgagaaacctgcacccaaatctgctgatctttcaaaaaagatacctgctaagaatggtgctgcccctgcaaaagaaagccagcctcgcttcaagtcttctta

SEQ ID NO: 247765 - DNA, 526 bp, Glycine max
  unsure (1)..(526): unsure at all n locations
agggtnnnagctatgttgggtatgaggggggaggagtattgtcgaaccgcgtccggaattcccgggtcgacccacgcgtccggagaaatctgtcaccatttctgttgatgatggaattcgacctggcacaacagtgtctgatctaggaaggctcaaacctgtgttcaagaaagacggaagcactactgctggtaattctagtcaggtgagtgatggtgctgcagctgttctgctgatgaaaagaagtgttgcgttgcaaaaggggctacccattcttggtgtattcaggactttcgcagcagttggtgttgatcctgccataatgggtgttggtcctgctgctgcaattcctgttgctgttaaggctgcaggtctagagcttgatgatattgatctttttgaaataaatgaagcatttgcttcccaggtcgtatattgtcgtaacaatctaaggcttgatccaaaaaagatcaatgttaatggangtgccatggccattggacatcctntggggtcaaacagtgct

SEQ ID NO: 247766 - DNA, 522 bp, Glycine max
  unsure (1)..(522): unsure at all n locations
aggggagagtgatttgtctacgtatgattgtcatgctctaccggtccggaattcccgggtcgacccacgcgtccgatacaactgaatctaattgcaattcctgtgagccgtggcaaagcttttgaatttagtgcgctctcctctctgtttacccttccagatattgcagatacagcaagatcatgagtgggacttcggaaaagaaacttgtaagaatcgatgttagttctgatactgtatgcccatggtgctttgttggcaaaaaaaatctagacaaggccatagctgcctccaaggataaatacaactttgagataatatggcatccctttcaacttagccctgatgcccctaaagaaggcattgacaagagggagtattacagaagaaaatttggatctcaatcagaacggatggaagctcggatgtcagaggtgttcaagaatgttggcttggaatatagcttgtctggactcacgggaaacactattgacagccacaggcttatatattttgctaggn

SEQ ID NO: 247767 - DNA, 530 bp, Glycine max
  unsure (1)..(530): unsure at all n locations
agggtanntagctaggtgtagtttatgtggtgtgatggtatgcctcgtaccggtccggaattcccgggtcgacccacgcgtccgcccacgcgtccgcagcgtgtgcttctgctggcggcggcggttcaagctggcgctggcggaggcgccgtcggaaatcaagaccctattcaatgagtactccgagaatgagctcatgacaccttcgcatcttaagagattcctggtcgatgtgcagaggcaagagaaggccactgaagaagacgcgcaagccatcatcgatagcttcaggcatttccatcgcagaggcgctggcctcaatctcgaaactttcttcaagtacctcttcagtgacgataatcctnctcttcttccttctcatggggtgcaccatgatatgactntaccctngtcacattatntcatatatactggccataattcctatttaactgggaatcagctgagcagcgactgcagtgacgtccccatcataaatgcactgaagaaaggtnttccggttgatggaa

SEQ ID NO: 247768 - DNA, 523 bp, Glycine max
  unsure (1)..(523): unsure at all n locations
aggtattggtgatgtgngtcatgaacatgatactcagcatgtcgtaccggtccggaattcccgggtcgacccacgcgtccgaaaagatgcagacagaaaaagaacagctgagttaaagaataatttagaaggatatatatatactaccaaggaaaagattgaaacgcttgaggagtttgaaaaagtttctacaagtgaggaacgccagtccttcattgagaagcttgatcaggtgcaagattggttgtatacagatggtgaagatgccaatgcaacagagtttcaagagcatctagatcagttaaaagctgttggagatccaattttcttcaggttaaaagagcttacaactcggccagcagcagttgagcatgctcataagtacattgatgagttgaaacagattggtcaggaatggaaagcaaaaaacccttgctttcacaggaaagagtagacgaggtcataaaaagttctgaaaaattgaagaattggttggatgagaaagaagcttgacaaagaagag

SEQ ID NO: 247769 - DNA, 514 bp, Glycine max
agtgagtgagtttatcatgtattagagccctcagcactgccgtaccggtccggaattcccgggtcgacccacgcgtccggggagcaacaccatctttcattttccggcgatctcttgtttcttccatcatcaccgttgtccggcgatccctaatcctcgcaaacagaaatgacgacatcaaggcgccttgcggacaggaaggtggagaagtttgagaagaacatcacaaaaagaggatttgtgccagacactaccactaagaagggaaaagactaccctgttggcccagtgctgctcggtttcttcgtctatgttgtcattggatcatctctcttgcagataatcaggacagcaacgagtggaagcatggcttaaatggagcttggtttggattatgtgtcatcttctctttcttagcctcctcgtagaaaatgctaatacttctctacatgtactgtacttgtactagaccctggttctggtcatgttttaatgaacttattaggatttggag

SEQ ID NO: 247770 - DNA, 516 bp, Glycine max
  unsure (1)..(516): unsure at all n locations
gaggtntagggagcgtgnagctcgaatgaggagttatagcatgctgtaccggtccggaattcccgggtcgacccacgcgtccgatgaatcattagttagggtttattctccaagaaaagcaatgagtgcgtccaggttcatcaagtgtgtcactgtgggtgacggtgccgttggcaagacttgcatgctcatctcctacaccagcaacacttttcctacggactacgtgccaactgtctttgacaatttcagtgcaaatgtagttgtggatggaagcactgtgaatcttgggttgcgggatactgctggccaagaagattacaatagattaagacccttaagctatcgtggagcatatgtattcctgcttgctttctctctcatatgcagggctagctatgaaaatgttgccaagaaatggattcctgagttgaggcattatgctcctggtgttccaattattcttgttggaacataacttgatcttcgggatgataagcagttctttcaagacca

SEQ ID NO: 247771 - DNA, 513 bp, Glycine max
  unsure (1)..(513): unsure at all n locations
agtttgaagagcgtgtgctacgatacgaaactgagcactgctcgnaccggtccggattcccgggtcgacccacgcgtccgaccaaagccaaaaccatgttaggcactcctcacaccctcatactccttctcttcctcttgctcatcaccaccttctcccactcccttgtcttcaacataaccaacttcgacgaccctgccgccgccaccgccatatcctacgagggcgacggaagaaccaccaacggctccatcgacctcaacaaagtcagctacctcttccgcgtcggaagggccatctactccaaacccctccacctgtgggaccggtcctccgaccttgccatcgacttcgtcacgcgtttcaccttctctattgagaagttgaacttaaccgaagtcgcctatggagacggcttcgcgttttacttggctccgttggggtaccggattccgccgaactccggcggcggaacctttgggcttttcaacgctaccaacaacagcaaccttc

SEQ ID NO: 247772 - DNA, 524 bp, Glycine max
  unsure (1)..(524): unsure at all n locations
agtttttaaggtggtgtgtctacgaacgtattgtcatgctatacccgtccggaattcccgggtcgacccacgcgtccgcaagcattaagcatgcctggactttggtacgtgcatcatgacttttaagaagttacatgaatattttgactgaggacttcttgcttaaggtttcttatttactcttctatgttgcttttagagaatctagagtaagcattgtccatctttaatgcaggtagatgcagtggtctacttggtagatgcatatgacaaggaacgatttgcagagtctaaaaaagagttagatgctctgctctctgatgagtctttgactactgtccctttccttatccttggaaacaagatagatattccatatgctgcctcagaagaagagttgcgttaccatttgggcctgaccaattttaccacaggcaagggaaatgtaaatttgtcagactctaaagtccgtcctatggaggttttcatgtgcagtattgggaaaaaaaatggggtaccgggan

SEQ ID NO: 247773 - DNA, 458 bp, Glycine max
  unsure (1)..(458): unsure at all n locations
tccggattcccgggtcgacctacgcgtccgataaatttcaacatttggttatacggatcaatatttacatgaaatttaaccttgaatggggatgcttatagttgatatatagtagtatgtgttgagatatcattagagatgtaggaagaatgcataatgatataacatgaactggttctgattttgtcattgatcatgaattgatgaaattattaatattcacttgtttggtgcctagtaatatctcatttgccctttaaagtagatggaacttttaaatttatgctaaacaatatatttgatctctgtatgtaataactgttttagaatgagtttcattcaatgtagtaaattgacacatttattgtgattattgcaaacctatgttgcaaatgtatctccatttgatatatatacatttcattggtttttttaaaanaaattgtatgtcactatgt

SEQ ID NO: 247774 - DNA, 272 bp, Glycine max
cccggtcgacccacgcgtccgaaaaaaaaaacataaaaaaaaacaaaaaaatatctacataaaaaaaaaaaaccaaaaagaggaagggctaacatacaactatataactctgatttaagatctcctaaattctattaacttgaacgcataatgactatcacattaactggtaaaaccttcgtgttacaacactaaatcacctagcaactcatactcatttcgccagttcctattatatctaaaattcccctaccaatcagctttatcaacaa

SEQ ID NO: 247775 - DNA, 450 bp, Glycine max
taccggtccggaattcccgggcgctccatctctccactcttatctcgttccctttcacaactcaaacaattcccaaaatcccacccttgtgccctgtggtcctcctccttctccttctgcctccacacactccgcaagtccacttcccctattcgcgcctcttcttctttttctccctccatggctgcttcttctccgctaaacgacgccgtcgaaggcaatcctcttctgcagaacttcgacttcccacccttcgatgtcgtcgagcccaaacacgtgcgacccggcattcgcgccctcctcggcaagctggaaagtgaattggaggagctcgaacggaacgtggaaccgtcgtggccaaagttggtggaaccgttggagaagatcgttgaccggttatctgtagtttggggcatgatcaatcatctaaagtctgttaaggatagttcg

SEQ ID NO: 247776 - DNA, 525 bp, Glycine max
  unsure (1)..(525): unsure at all n locations
agttgaggagagcgtgncttattgatgggagatattgcactgctcgtaccggtccggaattcccgggtcgacccacgcgtccgagaagttattaatgagaaggtggacatatgggctcttgggtgtctcctttttcgcatgtgctacttcaaaagtgcttttgatggggagtcaaagctccaagtcttaaatggaaactaccgcattcctgaattaccaaaatacaattcacctgtgacggacttgataagagacatgctccaagctagaccagataacagaccagatatcacgcaggtctggtttcgtgttaatgagcaactacctattaatttacagaagtcattacctgacagaccacctgaattgccctcatccaacgatcatgaaggtgtgtcaatgccctcaaacagatcacctgcaatgcctcgtaggaacccaccttctccaccttcatctggagaacccaaaacttcaccacagccatcccctgcttctaggggagggggaaagtggggttcactt

SEQ ID NO: 247777 - DNA, 528 bp, Glycine max
  unsure (1)..(528): unsure at all n locations
agtnttttgagagcgtcgtgcctcgatagaagagatataggactgctcgtaccggtccggaattcccgggtcgacccacgcgtccgaagcaaatgatggtatacaaaaccttccaggttgcaaattatgcaagatcagaaaggagattgctttctcggaagcaggttgagtgtcaaccttggtctaaccacacatacaaggttgatgacaagatagagttactttgtcaagatagtggcatcagaggctgctggttcaggtgtacagttgttcaggtagcccggaagcagttgaaagtccaatatgatgatgtccaggatgaagatggaagtggaaatcttgaggaatggatccctgctttcaagttagccaggcctgataaacttgggatgaggcattctggccgccccaccatcaggcctgctccaacttatgaggaacaggaactagcttgttgaggtggaaatgcaattgatgcatggtngaatgatggcttgttggaaggggtttgtactaggaatgacaact

SEQ ID NO: 247778 - DNA, 518 bp, Glycine max
gagaaatgggcttttctcatagaaaggggagactcagccatgctgtaccggtccggaattcccgggtcgacccacgcgtccgcccacgcgtccgagacgcgcaaacattgcaaggctgagagaactgcatacactgacgggccatgttgagtctgtgtttagactgaagggccttgacattgacacaatacagcaagcatacactatctagaataatgttgagtttcatgcatgaatcgtttatgtttaatgtatgtataatgccgttagaagagtgtgatcatagagcagcaaaaaatatatactttataaatgtttgttcaaagcagttttggtggacttttgtagacatgaaactattggtgcatttaaatgttaaagagttccatttatgcttccaaaaaaaaaaaaagtataaaagtacacatgaaaaacaatacaatgattatgaggttagtaaaataagctgtattctgtggtattattgaatcctgtgcttaactatttaatactggcta

SEQ ID NO: 247779 - DNA, 518 bp, Glycine max
  unsure (1)..(518): unsure at all n locations
ggttttaaggtaaagagctgntgtaagtaagggaagttattgcactgctgtaccggtccggaattcccgggtcgacccacgcgtccgctttttcacccccttgataccgcttcaattcaccaatggcaagtcgaggaaaaacccagggatctggcacaaccaaaaagggcatctcccgaagcaacaaagctggtctccaattcccagttggtcgtattgctcgatacctcaagattggcaagtatgctgaccgtatcggttctggcgctcccgtgtatctcgcctctgttcttgaatatcttgctgctgaggttttggagttagcggggaatgccgcaatggacaacaagaagactcgtattatgcctcgccatatccaattggctgttaggaatgatgaagagttgagcaggcttctcggagatgtgactatcgccagtggtggtgtgacacctaacattcacaacatgttgctgcctaagaaggttgggacctcgaacctaacctttatgggtcct

SEQ ID NO: 247780 - DNA, 396 bp, Glycine max
  unsure (1)..(396): unsure at all n locations
ccggattcccggtcgacccacgcgtccgcaacagctcccccgacggtgaggtcgacgacaccaccggcctgatgctcaaactcaagggcttgtgcctacgcatggacgcattcgggttcttcgccttcgtcagcgccaagaagaaggagctcgacggcctacgcgccgagatgcctgtggctctggcggagtgcgttgatccggcgaaattcgtgctggaggcgatctccgaggtgtttgcggtcgacaagagaggggacaaggccgggcacgacttgngctgggcctgcgtacttgtcctggagtcgctgattccggtcgtggtcgaccccgtcatcggaaaatcgaggctgttggtgactcctattgcgaaggagcaagccacggagatcgcag

SEQ ID NO: 247781 - DNA, 527 bp, Glycine max
  unsure (1)..(527): unsure at all n locations
nggttttagagtgggtgncttcatgataagaagataagccactgctcgtaccggtccggaattcccgggtcgacccacgcgtccgcccacgcgtccgcacaatcccaaattcccaattctctcttccttctccacaccaattggcaaaaccctaacccccaaattctccttcagcgattcatctctcttgaatcgaatcgatggcacggatgggcccagggttccgattccaccccaccgacgaagagctggtggtgttctacctgaagcgcaagatgaccggaaacctctcccgctacgaccacatcgccgttgtcgacgtctacaagctcgagccctgggaccttccccgttagcacccaattatcttcttccttccccttttttgtggtctcaatagataggcttttgagaattttggaagtgttttaatttgtttcggtgtttcagctctgtcgaagctgaagacgaaggacttggaatggtacttcttcagcgcgctggaccgcaagtacggaaactggtcc

SEQ ID NO: 247782 - DNA, 520 bp, Glycine max
gtttagaggggtgtgtatcgaatagatggtcagcatgctgtaccggtccggaattcccgggtcgacccacgcgtccgatagaagagccttccatatatagcctcccaaaaaaatgaagagtactacctctttggcgctctttctactttgtgccctaacttcatcatatcagccttcagccaccgctgatattgtattcgacaccgaaggcaatcctattcgaaacggcggcacatactatgtgttgccagttataagaggaaagggcggcggaatagaatttgccaaaaccgaaacagaaacatgccctctcactgttgtgcaatctccctttgaggtctcaaagggtctaccactgataatttcatccccatttaaaatccttgacatcaccgaaggacttattttgagcctcagtttcacttatgtacccgcctgtgcctcaactccttctcggtggaccgttattctcaagggtctgccagaagaactccatgtcaaactcactggctacaaaaac

SEQ ID NO: 247783 - DNA, 525 bp, Glycine max
  unsure (1)..(525): unsure at all n locations
agttttgagagggtgngtcattgaagaaggactaccgcatgctcgtaccggtccggaattcccgggtcgacccacgcgtccggttttctcttgtcacataaaagtcatctaagaagaattacaagatcatcatcacaataacaagatgagttcaggaattagagcatggagtgtggcagcaagtgttggaattgtggaggccttgaaagaccaaggcatatgcaggtggaatcatgccttaagatcagctcaacaccatctcaaaaaccatgttggctcattctctcaggctaacaagctttcttcttctgctatgatatccacaacactaaaacatgagaaggcaaatcaatcagaagagtctttgagaactgtcatgtacttaagctgctggggtcccaactagatatcataagcccaacaacaaaatattcttttctcttttcaattctaggaatcaagcaagcttaattagtctcaaatgatgatgagtattgaaagaatattgctngtctttatggcagg

SEQ ID NO: 247784 - DNA, 523 bp, Glycine max
  unsure (1)..(523): unsure at all n locations
agtntatagagggtgngtcatgatgagagatattgcactgctcgtaccggtccggaattcccgggtcgacccacgcgtccgtttctaatctcattctccttctgttcaaacactctctctcatggcatcagataagaagattaggatcggcatcaacgggtttggaaggattggccgtttggtggccagggttgcccttcaaaggaatgatgttgaacttgttgctgtcaacgatcctttcatcaccactgattacatgacatacatgttcaagtacgacaccgttcatggccagtggaagcattttgatgtgaaggtgaaggactctaagacccttctctttggtgagaagcccgtcaccgtttttggaatcaggaaccctgaggaaattccatggngtgaggttggtgctgattatgttgttgagtcaactggtgtattcactgacanggacaangctgctgctcacttgaagggtggtgccaagaaggttgtcatctctgccccaagcaaagatgcaccc

SEQ ID NO: 247785 - DNA, 417 bp, Glycine max
tcaccattgtggcttgtctaggtcttcaatcgaactcgccaggaacggaactttctcagattgacacacaccatgaaggaaagtggtttcgagaataatgatacaaagcaagctgctgctgatgtgttgtttctatattcaaaatttgcaatggcatgcattggatgtaaggctcgtccatgtgatttgaggtttcatttgatgaaggagatttcaggtatgccctcttctctaaatagggagtcaccacagaatgcagcatctcctgatgcaatgggtgagtcatccagcacaggaacagcaagacttgatagaacagacagttttcgtgcactctagttgagagtggactgtgaccatgtttttggttggggctgtggcatagtaggtgtttgtgtcttggtaaaagcacttttt

SEQ ID NO: 247786 - DNA, 512 bp, Glycine max
ggagagagtttttatatgatatggagagttatagcatgctgtaccggtccggaattcccgggtcgacccacgcgtccgcaaaaatgtaaaaaaaaattcattattttttaccccatttttaaagaactaaaaaaactaaacaattttaatttttcactttttggggctctttgacggtagaaaaagaaaaaaaggaaactaaaaaaaaataaaagaatatagaatataataatgaatagaaatcaaatagaaaaaagagataagataaaaaaataagatattactattatatttatattttaaattttctattttatcatttttattttattcgtttgttttctcgattgtagttttttttttcattgtatttattccattacagtggtgatcataaatgaatgttttacctctttgtgattcacctacaggtcttgccattcggttctgttccactaaaaacctatcttcctgatggagatgttgacttgacaactctcattcatgaagat

SEQ ID NO: 247787 - DNA, 525 bp, Glycine max
  unsure (1)..(525): unsure at all n locations
taggttaaggagtgtgtgtngtccactgaaagtattgtatgctctactcgtccggaattcccgggtcgacccacgcgtccgccacgcgtccggtcaccggatggcggaccaactggcgaggcccctgccgattccaattccctgatcaagcttcttcttattggcgatagcggtgtgggaaagagttgtctgcttttgcgattttctgatggttccttcacaaccagttttatcaccaccattggcattgattttaagataagaaccattgaacttgatggcaaacgcattaagttacaaatctgggatacagctggtcaggagcgatttcgaactattaccacagcttattaccgtggagccatgggtatcttgctcgtttatgatgttactgatgaagcatctttcaacaatattagaaattggattcgcaacattgaacaacatgcttctgacaatgtaaacaagatacttgtgggtaacaaggctgatatggatgaaagtaaaagggctgtgcctacctcn

SEQ ID NO: 247788 - DNA, 318 bp, Glycine max
actcggtctcggattcccgggtcgacccacgcgtccgcctatacatccgaaaaaaaaaaaataaaaaaaaaaaaaaaaaaaaaaaaaaaaaagaaaagaaaaaaaaaaaaaaaaaaaaaaaaaaaaaaaaaaaaaaaaaaaaaaaaaaaaaaaaaaaaaaaaaaaaaaaaaataaaaaaaaaaaaaaaaaataaaaaaaacaaggccattaatttaggggcaagtcttaaagcttctgcctaatttacaccttaaaatttcccgagactccttttatgactgcatgtatacagtgacatgaattgacttttaaaacca

SEQ ID NO: 247789 - DNA, 524 bp, Glycine max
  unsure (1)..(524): unsure at all n locations
nggtttagagagggtttgtcatgaatagaacactcagctatgctcgtaccggtccggaattcccgggtcgacccacgcgtccgcccacgcgtccggcgtgaaatcgattaaaatcgacgaaaagacagtgccgttaaacacgactttgttgtccataaacagcaaaggcgttggtggaaccaagattagttccgttaacccttacactgttttggaggattctatcttcaaagcggtgacggaggctttcgtgaaagcttcttctgctaggaacataacgagggtggcttctgtggcgccgtttgaggtgtgcttcagtagggagaacgtgctcgccacgcggttgggggcggcggtgccaactattgagcttgtgctgcagaaccagaagacggtttggaggatttttggagcgaactcgatggttagtgtgagcgatgataaggtgctatgccttgggtttgtgaatggaagtgagaatccgaggacttcgatagtgattggaggatatcagctggaagata

SEQ ID NO: 247790 - DNA, 514 bp, Glycine max
  unsure (1)..(514): unsure at all n locations
nagggaggaagagggtgtgaatcgattggggagttatgcgatgctgtaccggtccggaattcccgggtcgacccacgcgtccggaaatatggggagagtgaagcttccgatcaaaaagattgagaacacaaccaataggcaagtcactttctccaagaggaggaatggactcatcaagaaagcttacgaactttctgttctttgtgatgttgatgtggctctcatcatgttttccccatcaggaagagccactttcttctctggcaacaaaagcattgaagaaattctagaacgatatgttaatctttcggagggtgaacacggaaggatgcataataaagagcacattcaaaagttgcttagtaagttgaaagatgaagctggtcaaatatgtcaagcccctagctcaatgacttcagattcccaaattgaggatcttcgaagagaaattttcacttgcaagtctcaattggaagagatggagaagcgactaaggatatttgaaggtgatcct

SEQ ID NO: 247791 - DNA, 526 bp, Glycine max
gaggtgagagtgtgttgtgtcctagttagtaccgcatgcccgtaccggtccggaattcccgggtcgacccacgcgtccgtgaatcgtgaaaatgttcagaaaccagtacgacacggacgtgaccacatggagccctgcggggaggctgttccaggtggagtacgctatggaggcggtgaagcagggctcggcggcgatagggctccgatcgaagacccacgtggtcctcgcatgcgtcaacaaggccaactccgaactctcctcgcaccagaagaagatcttcaaggtcgacaatcacatcggcgtcgccatcgctggcctcaccgccgatggccgcgtcctctcccgctacatgagatccgaatgcatcaactataattacacctacgagtcgccgctccccgtcggcagactagtcgttcagctcgccgataaggctcaggtttgcacacagcggtcttggaaacgtccttatggggttggactcctggtagcttgattagatggatcaggagctcacctctat

SEQ ID NO: 247792 - DNA, 527 bp, Glycine max
  unsure (1)..(527): unsure at all n locations
tagttntagagtgcgtgtagnctccaccgcttattgtcatgctatacccgtccggaattcccgggtcgacccacgcgtccgtattattcctcttccatctctattctccataacacccaccacaccacttgtgaaaaacgtcattaatatcacacactgacatgtatctctgagctccaatccaatacaagaccacaccttgtcgtgtcggacgaaccttggtgtctgtttttttttttttttttcattattttctccgaagagatgaggaagggcagaggtggaggcgcctcggcggcggcggtggatgtgaacggatccattttaaaggagcctcggtaccggggcgtgaggaagagaccgtgggggagattcgccgcggagatcagagacccgttgaagaaagccagggtttggttgggaaccttcaattctgccgaggatgctgctcgtgcctacgacgccgncgttcggactctccgaggtcccaaggccaaaacaaattttcccccttttttacctttttg

SEQ ID NO: 247793 - DNA, 526 bp, Glycine max
  unsure (1)..(526): unsure at all n locations
ggggttaggggttgtctgatatttgtacgtattgtcatgctgtaccggtccggaattcccgggtcgacccacgcgtccggttttgtcccattggccaattcggccactctcctctgagaaagcctccagcctctcctccaaagtcccctgcggttcgttcggttattcttcgaaccgttgtctgaagtttacaactcaaaacttcaccgaacgcatttcattcaccaattcgtccaagtctcgtatcaatcaatcagcctatccgtcttgcggttggagagatcggaggggagagcagccatggcgcatcgagtagaccacgagtatgactatctgttcaagatcgttttgatcggagactcaggtgtaggcaaatccaacatcctctccaggttcactcgaaacgagttctgtttggagtccaaatccactatncgagttgagttcgccaccagaactcttcangtagagggtaaaactgtgaaagcacagatctgggacacagcaggtcaagagcggtaccgtg

SEQ ID NO: 247794 - DNA, 526 bp, Glycine max
  unsure (1)..(526): unsure at all n locations
naggttntaatggggtgtngttatagaagaggggatgtatgctatacccgtccggaattcccgggtcgacccacgcgtacgcccacgcgtccgacttctggaatcataattaataatccaacttattttgtctcattactatagggtctctagatggaagctaaaactaagtcatgcgtagttctaccttttcttctattggttgcaattttcatgcaacaatgtgtccatggagaatcgcaagtgccctgcctttttgtctttggggactctctgtctgataacggaaataataacaaccttccaagcactacaaagtccaattacaaaccatatggcatcgacttcccaaccggcccaacaggacgatttacgaatggacaaacatctattgacctaattgctcaactactgggatttgagaatttcatcccaccctttgcaaacactagtggctcagacacacttaagggtgtgaactatgcattcggagcagctgggattctaccagagagtggtacacatn

SEQ ID NO: 247795 - DNA, 529 bp, Glycine max
  unsure (1)..(529): unsure at all n locations
nagtttagagaggctcgtgtgtcgaatagaagcactcaggcactgctgtaccggtccggaattcccgggtcgacccacgcgtccgcccacgcgtccgctgagggagaggagagcattttcatttttcaacttgagagaagaagagaaggggaaaaggaaaaaaaggcaaaatgggtaaggatctgagcgatgagcaagtgtcttcaatgaaggaagctttctctttattcgacacagacggtgacggtcggatcgcgccgtcggagctggggatcctgatgaggtctctgggagggaacccgactcaggcccaactcaaagccatcgtggccgaagagaacctcacggctcccttcgacttcccccgattcctcgatcttatggccaaacacatgaaacccgaacccttcgatcgccaactccgcgacgccttcaaggtcctcgacaaggactccaccggcttcgtcgccgtctccgagctccgncacatcctcaccaacatcggcgagaagctcgagccctccgagtt

SEQ ID NO: 247796 - DNA, 524 bp, Glycine max
  unsure (1)..(524): unsure at all n locations
tagttaaggaggctgtcttatggcttagttcctaacgcatgccgtactcggtccggaattcccgggtcgacccacgcgtccgcacacccaacattctcacaagtcacagccaaacaccatttcattaattcttgcagaatgttgcttagttttgttttatctgaatttggaaacagcttttgaatggctttttcaagagttgcactgctaatatgcacggtcgggtattttgtgattgcctctgccggcaatttccaccaagattttgatatcacatggggagatggtcgggctaagatactcaacaatggagagcttctcactctgtcacttgacaaagcctctggctcgggtttccaatccaagaacgaatacctttttggcaaaattgacatgcaactcanactagtccctggcaactctgctggcaccgtcactgcctactanttgtcttcaaaaggagcgacatgggatgagattgactttgaattcttgggcaattttagcggtgacccatacatcct

SEQ ID NO: 247797 - DNA, 517 bp, Glycine max
  unsure (1)..(517): unsure at all n locations
gagtaaatggggtgnngtcatgattggaggggactcagccatgctgtaccggtccggaattcccgggtcgacccacgcgtccgcccacgcgtccggagaatacaccaaaacccaacatgaaaacccttaacaaagcctcacttattttattccctctcttgttcctttccctattcaagcattcccatgctgcaggaatcgctatctactggggccaaaacggtggagaaggcaccttagcagaagcttgcaacactagaaactaccaatatgtgaacatagccttcttgtccacttttggcaacggccaaactccacaactcaaccttgcaggtcattgtgaccccaacaacaatggctgcactgggttgagcagtgacatcaaaacttgccaagaccttggcatcaaagtgttgctctcccttggtggtggtgctggaagctactccctcagttcagctgatgatgccactcaacttgcaaactacctctggcagaatttccttggaggtcaaac

SEQ ID NO: 247798 - DNA, 512 bp, Glycine max
agggtaggagagttgtgcatgataggggagctgagcactgctgtaccggtccggaattcccgggtcgacccacgcgtccgcccacgcgtccgcggacgcgtgggtttatagaaagaaaaaaaagaagaagaaagagttctgaccatggctgcatcattatttatgccttcatccatagtggacgaagaagcgaggtttgaagccgaagtggcggaggtgcaagcatggtggaactctgagaggttcaggctaacaaaaagaccatacacagcaagagatgtggtgtccctccgaggcaacctcagacaaacctatgcctcgaacgagatggcgaaaaagctctggtgccttctgaagaaccaccaagccaacggcacagcctcaaggacttttggtgcacttgatcctgttcaggtcactcaaatggccaagcacttggacacaatctatgtctcaaggtggcagtgctcagccacacacaccacgagcaacgagccgtgccctgaccttgc

SEQ ID NO: 247799 - DNA, 525 bp, Glycine max
  unsure (1)..(525): unsure at all n locations
gggggnnnggagggagagaggctgnngtttgtaatgaaggggttgatggaatgctgtaccggtccggaattcccgggtcgacccacgcgtccgcccacgcgtccgcccacgcgtccgggcattgtcagcacaatgtccttgtgggcaatactgccattgttggtgttgttttatgtagcatatttatactatcagagcaccgctcgtgaagtaaagcgcttagactcaattagcagatctcccgtttacgcacagtttggagaagcactgaatggcttatcaacgattcgtgcttacaaagcgtatgatcgaatggcagatataaatgggaaatccatggacaacaacatccgattcactctggtgaacataagtggaaaccgatggcttgcaatccgattggaaactttgggaggcctcatgatatggttgactgcaacctttgccgtcatgcagaatggcaaggcggagaaccagcaagaattcgcatccaccatggggttactacttagctatgctctgaac

SEQ ID NO: 247800 - DNA, 510 bp, Glycine max
  unsure (1)..(510): unsure at all n locations
agggttatgagtgtcnacatgttgggtggagttatgcactgctctaccggtccggaattcccgggtcgacccacgcgtccgcggacgcgtgggttgtactgttctattagttcatactaagttctgaaaatgagttccaaggttttgcttgttctacttatgttcttggccactatacttctgatctcctctgaggttgcacccgatgatgcatacgagaattttgacaaaatagatgggaagcctagtgcagatggggtagatgaaagcaagtattggcgtggcggctatggtggcggctatggtggtggttatggaggtgggcgtggaggctatggaggtgggcgtggaggctatggagggggacgtggtggatatggcggcggacgaggtggctatggtggcgggcgtggtggctatggcggcgggcgtggtggcgggcgtggtggctatggtcctaatgaacataacgaggctggggttgatgctaaccctnacaactaagaaggc

SEQ ID NO: 247801 - DNA, 522 bp, Glycine max
  unsure (1)..(522): unsure at all n locations
tagtntaggagggtgtgtgatggctcagctcgtaccgcatgccgtaccggtccggaattcccgggtcgacccacgcgtccggcctgagccaccaccagagggtcgcttgcccgatgccactaagggttctgaccatttgagagatgtgtttggcaaagctatggggcttactgaccaagatatcgttgctctatctgggggtcacactattggagctgcacacaaggagcgttctggatttgagggtccctggacctctaatcctcttattttcgacaactcatacttcacggagttgttgagtggtgagaaggaaggtctccttcagctaccttctgacaaggctcttttgtctgaccctgtattccgccctctcgttgataaatatgcagcggacgaagatgccttctttgctgattacgctgaagctcaccaaaagctttccgagcttgggttgctgatgcctaagcaacgtttaggggattgttgaaaaggcatggtggccataaatattctttaaaa

SEQ ID NO: 247802 - DNA, 525 bp, Glycine max
  unsure (1)..(525): unsure at all n locations
agggtnnnagagcgtgtattatgaagggaagaggtattgtactgctcgtaccggtccggaattcccgggtcgacccacgcgtccgcagaggtgaagcttcatggattttggtatagtccctacactttgagggtggtatggaccttaaagttaaaggatataccatatcaaaacatagaagaagaccgctacaataagagtcttcaacttcttgaatacaacccagtatacaagaaaactccagtgcttgtccataatggaaaacccttatgtgagtccatgcttattgttgaatacattgatgagatttggtcacataattcattacttcctgctgatccctacgagagagctctggcaaggttttgggttaaatatgctgatgatgacatgttttctgcagttattgcattcttccttagcaataatgatgaagagcgagaaaagagcatagagaagatatgggagcatcttaaggtttgtgagaatcaagtgtttggtgatcaaaaaaaatttttgggggag

SEQ ID NO: 247803 - DNA, 525 bp, Glycine max
  unsure (1)..(525): unsure at all n locations
gagtttaggaggctgnctcatcgaaaagaatttatcgcatgctgtaccggtccggaattcccgggtcgacccacgcgtccgcccacgcgtccgaaaacctcatccatggcttctcttctccgcttcaacggcgtctcccgctttcccttaccttcccaacccacacgtgaccccatcctccccaaaccgtcacgcctcgtaacggtgcgcgcggaggtgaaagagacctccgcacccgccgccgccacatcctccgacgaaaagatccgcgaaatcctccgcaaccgtgactacgacaagaaattcgggttcagcgtggagatcgagtccttgacgatcccaaaagggctctcaaaagaaaccattggtctgatctcgtccctgaaggaggagccccactggatgctcgaattccgcctgaaggccttggataaattcctctccatgaaggaacccacgtggtctgacaacacttaccctnccatcgacctccagaatatctgctactactccgnccccaagatt

SEQ ID NO: 247804 - DNA, 512 bp, Glycine max
  unsure (1)..(512): unsure at all n locations
agtaaagagggtgngtcatgaatagagaccctcagcatgctcgtaccggtccggaattcccgggtcgacccacgcgtccgtggtttcaaacttgggtctgagaagcatacaacagaggcaatagtacaaaagtctggttcacttcagttgacttctggtattgaaggattgtcagtgttgaagacaacccagtctggttttgtgaatttcataagagacaagtacacagcacttcctgatacccgtgaaaggattctggcaacagaagtaaccgcactgtggaggtattcgtatgaatcacagtatagcctccctcagaagccattttactttacagaaaagtatcaggaagtgaaaaaagttctggctgacactttttttggcccaccaaatgggggagtctatagcccatctgttcaaaacacactctacctgatggcaaaggccacactgaacagatttcctgacatagcttatgtcagtctaaagatgccaaatcttcatttcttacc

SEQ ID NO: 247805 - DNA, 511 bp, Glycine max
  unsure (1)..(511): unsure at all n locations
agtnttagagagtggngtatgaggaggggagttatgtgatgctgtaccggtccggaattcccgggtcgacccacgcgtccggacatacttttcaaggtcaaaagtgaaagcttcaaagctcataagttgatacttgcagcccgatctcctgtgtttagagcccagttttttgggcttgttggggatcctaccttagaggaagtagtggtagaggatattgagccctttatcttcaaggcaatgcttctctttgtttactctgacaaacttcctggcatatatgaggttatggactcaatgcccttgtgctcatacaccgtcatggtgcagcatctcttggctgctgctgatctctataatcttgatcggctcaaactgctttgcgaatcaaaattgtgtgaagaaatcaatactgacaatgtggccacaacacttgcgctggcagagcaacatcactgtccacagcttaaggcaatctgtttaaaatatattgcaaatcctgcaaacttgg

SEQ ID NO: 247806 - DNA, 514 bp, Glycine max
  unsure (1)..(514): unsure at all n locations
aggggaggagagtttgnagtatggagaggggggttaatgcatgctctaccggtccggaattcccgggtcgacccacgcgtccgcaatttctctctttttgctcagtttctgttgtattttctcaattacaacatcgtattctgcaaattcaaaccgggtcttggttttctgaaagatgggaggtggcaaggacaagcatcatgatgaatctgacaaaggaattttttcacaccttgctcatggggtagctggtgcagcacatggtggacatgggtacccacctggggcttacccaccaccacctggggcataccctccacaacaaggatatcctccagctgggtatcctncacaacaagggtatcctccagctgggtaccctncacatcaaggctatcctcctgctggttaccccccagcttgttatcctggttcatcacatgcaccangttctcatgggcacggcggtatgggagcaatgctcggttggggtgctgctgcngctgctgcttat

SEQ ID NO: 247807 - DNA, 523 bp, Glycine max
  unsure (1)..(523): unsure at all n locations
agtctatagagagcgtgtngaccctccacgtttttactcagctatgccgtccggaattcccgggtcgacccacgcgtccggttttgcttaaggagcagggattcaggggcttttttcgtggctgggtgcctaccttgggtggtgatagtgctcagggtgcttgcaaatttggattttacgagttctttaagaagtactattctgatattgctggcccagagtatgcaagcaagtacaagaccttgatctaccttgctggttcagcatctgctgaggttattgctgatattgctctttgcccatttgaggctgtgaaggtccgtgtccaaactcagcctggttttgcaaggggtttgtctgatgggctcccaaaatttgtcagatctgaaggaaccttatggctgtacaaggngttagtgcctctctgtggacgacanattccatacacaatgatgaagtttgcttcttttgagaccattgttgagctgatctataagcatgcaatcccaacaccaaagaatgg

SEQ ID NO: 247808 - DNA, 471 bp, Glycine max
  unsure (1)..(471): unsure at all n locations
accgtccggattcccggtcgacccacgcgtccgaagagccttccatatatagcctcccaaaaaaatgaagagtactacctctttggctctcggtctactttgtgccctaacttcatcatatcagccttcagccaccgctgatattgtattcgacaccgaaggcaatcctattcgaaacggcggcacatactatgtgttgccagttataagaggaaagggcggcggaatagaatttgccaaaaccgaaacagaaacatgccctctcactgttgtgcaatctccctttgaggtctcaaagggtctaccactgataatttcatccccatttaaaatccttgacatcaccgaaagacttattttgagcctcagtttcacttatgtacccncctgtgcctcaactccttctcggtggaaccgtattctcaagggtctgccagaagaactccatgtcaaactcactggctacaaaaa

SEQ ID NO: 247809 - DNA, 376 bp, Glycine max
cggtccggaattcccgcctcagcttcgggtgattcagaaaagtagcccctgatcggcgggagtcctcgaccgagtttttccgccggggcgggaagcggcttctgtgcgaaattcaccggcggaagatctcctcgccggcttaatctccgacggctccggcgacggtttcggccactgcgccgatgccgttgactgcgataccgatcatatcgccgtctaactccggccaggagcaggtgacgtcgtcgaactcatcgccggtcgagcttctagacgagaacgagcgactgaggaaagagaacgttcagctaatgatagagctcccggagatgagatcgctctgcagcaatatttactctctcatgtcaaattacgc

SEQ ID NO: 247810 - DNA, 542 bp, Glycine max
  unsure (1)..(542): unsure at all n locations
gagttaaggaggctgtngttgctggtctagttcagtaccgcatgccgtaccggtccggaattcccgggtcgacccacgcgtccgaattgatgtaacgagtgtttcctttcttatttcctttttccacagaattgtgagagccagttgatgtctttgtatgtcacttcatcaataaatcaatatgttataataataaaagaaagcatcatttataaaaaaaaaaaaaaaaaaaaaaaaaaaaaaaaaaaaaaaaaaaaaaaaaaaaaaaaaaaaataaaaaaaaaaaaaaaaaaaaacaaaaacatgcaataaaaataaaaaaacaaatataactaaaaagaataaaaaagaaataccaaagataaatggcatcccatttaaaaatcctcgacatcacctaacgacttattatgatctctagtttcaattatgtacccctatgtgccttaaactgttcttgtttgtaccattattctcaaagggaaataccagaagaaactccattttcaaacatctttggctacaaaaaacctctttggatt

SEQ ID NO: 247811 - DNA, 526 bp, Glycine max
  unsure (1)..(526): unsure at all n locations
agtntntgggagtgtctgttatggagggaagaggtattgcaatgctcgtaccggtccggaattcccgggtcgacccacgcgtccgcccacgcgtccgagattcaatttcgaagggcacaaggggatggaaggagaggctcttgtctcccaattcttctatgtcagaacttggttcagaagttaggagagaattgaatgctaaaattgctagcgtgtcccgattgatggagcgccttgaaacaagagaaaataatagtgctgcaggaacttctttatcaaatcatttggtgaaccgttccattgcagagacaagcaaccaaagcaatgtggaagctcgtggagagaactctttgcatggcaataatactccaactactttttctgcaagctcagattcaaaatgatctctagtttgcttctgtgaaggcatctttgctcaacgtatcatgtttgaaggctaactgtttgctcagacatgacatgatgaggaatatatgctcatggcagttgttggatttcatttaat

SEQ ID NO: 247812 - DNA, 382 bp, Glycine max
cacgcgtccggacggttacaacctccccatgatcgtggagccacagggcggaaccggcgccggaaactgcaccgccacggggtgcgtggtggatttaaacacgccgtgcccggcggagctgatggtgatgagcagcggagagggcgtggcgtgcaaaagcgcgtgcgaagctttcgacgatccacagtactgctgtagtggcgcttacgcgacgcctgacacatgcaaacccagttcatactcgcagttctttaagagcgcgtgcccacgcgcttatagttacgcttatgacgatggctccagcaccttcacttgcgccacagcggattataccatcactttctgcccacaaccattcactagttcgattaaatcgggaaat

SEQ ID NO: 247813 - DNA, 512 bp, Glycine max
ggtgaagagggtgtgactcgaataagaatatgagccatgccgtaccggtccggaattcccgggtcgacccacgcgtccggccagctagcgcttcttctctcgcattccgtggagatctagtgctgccaaacctggctgaaaattagggtttcgtttcggaggtagacgaagatgttcggaagggcaccgaagaaaagcgacagcaccaggtactacgaaatcctcggcgtttcgaagaacgcttcgccggatgatttaaagaaggcttacaagaaagccgccattaagaaccaccctgacaaaggcggtgatcctgagaagttcaaagagcttgctcaagcctatgaggttctgagtgaccctgagaagcgtgaaatttatgacacatatggagaagatgctcttaaggaaggaatgggtggtggtggcggtggccatgatccatttgatatcttcagttctttctttggtggaagtccgtttgggtcaagtggtagcagtagaagacggag

SEQ ID NO: 247814 - DNA, 195 bp, Glycine max
tctaaaaaaaaaaaaaaaattaaaaataagattttacataaaatttattaaaaaaaaggtccatgtaatattataaatttaagtttaattatcaaaaatttacaagaattaaaaattaatattaaatatatataaaattatttaaaaaaattttaattttaaaaaaacttcaattaaaaaaaaccaaattttaaa

SEQ ID NO: 247815 - DNA, 466 bp, Glycine max
tcgaccgcacgcgtccgatacatttgattatgctcgccactttctttcttgctgcagtagaatgctaggtctggacggtgaatctaagcgaggagatatagggcttgattactttggccgcactatatttattaaaattttgcctgtaagcattcacatgggtaggcttgaatctgtgttaaatctttcttctacatctgctaaactaaaagaggttcatgaagagtttaaggataagaaagtaattcttggtattgatgacatggatatttttaagggcattagtctgaaacttctagctgtggagcatctgctgcagcagaatccagatttgcagggcaaagttgtcctagttcaaattggaaatcctgcaaggggctctgtgaaggatgttcaggaagcatagaacgaaacatatttaattgcccagagaatcaacgatacatatagctcagataattatcag

SEQ ID NO: 247816 - DNA, 435 bp, Glycine max
cacgcgttcggctatgcgaaaaatgaaaaatgagtttatggtaaagggcgatggtctgcgtgcaaaagataaagagcgtgtacttgttcttgctgctacaaacaggccttttgatcttgatgaggctgttattaggaggcttcctcgacgattaatggttaatttgccagatgctccaaacagagaaaaaattctcagtgtcattttggcgaaagaagatttggcacctgacattgattttgaagcaatagctaatatgacagatggatattctgggagtgacttaaagaatctgtgtgtcacagcagctcactgtccaatacgagagatcttggagaaggaaaagaaggagagaagcttagcattgtctgagaacaaacctttacctggattgtgtagcagcggtgacattcgtcccttaaagatggatgattt

SEQ ID NO: 247817 - DNA, 466 bp, Glycine max
tcgaccgacgcgtccgcaagcgagcacaacctcgatatgggtcgagggagctgagacagggatactgtcgtgcgtggtcttcgagcattctggagcaaccctgagagagctgtggaatatttgtatacaggtatccctgatcaagctgaaactacaattgtaaccagcacgcctgtaagtgctcaacctacaaatcctactgatgatgctgcacagacagcacaacctgctgaacttacctcagatggacctaacgctaatccttgagacctttgtgcccagggtcatcctaatgtgggttctggtgctgctgctgctggttcatcggactgttcacgcaacagtcaacaattgcaagcctcgcgagctatggcgcatgctaatccacacatattgcactcaatgctacaagagctcggcaagcaaaatccccatctgatgagattgattccagaccatcaagctg

SEQ ID NO: 247818 - DNA, 447 bp, Glycine max
tacggggccggaattcccggatcgacccacgcgtccgcaggctagcacaatcttgatatgggtggagggagctgggacagggatactgtcgtccgggctcttcgagcatgcctacaacaaccctgagagagctgtggaatatttgtatacaggtatccttgatcaagctgaaactacaattgtaaccaggacgcctgtaagtgctcaacctacaaatcctactgatgatgctgcacagacagcacaacctgctgaacttacctcagatggacctaacgctaatcctttagacctttgtccccagggtcttcgtaatgtgggttatggtgctgctggtgctggttcatcggactgtttacgcaacagtcaacaatggcaagcctcgcgagctatggtgcatgctaatccacatatattgcactcaatgctacaagagcttgacaagca

SEQ ID NO: 247819 - DNA, 515 bp, Glycine max
  unsure (1)..(515): unsure at all n locations
catggaaaccntttgaannncatgatactcatagcactgcctgtccggtccggaattcccgggtcgacccacgcgtccggtttctcatccctaatgggaaaatgtttcctacagtgggaaggattcacatggctccttgcagtgatgaatatttgtttgttgaaattgctaataaggccctgttttggcagcagcaaaactattatggtgttgatttgacgcccttacatgggactgcctttcaaggatacttttctcagcctgtggtggatgcttttgatccaaggttgttaatagctgctcctatgttccatgtgttagactttaccaaaataaaggaagaagagctgtatgaaattgacattcctctcagattcacagccactgtgggtgccaggctacatgggttggcatgttggtttgatgtactgttcaatggaagtactgcacgaaggtggcttaccactgcccctggttcacctacaacccactggtatcagttacgctgtgttctc

SEQ ID NO: 247820 - DNA, 332 bp, Glycine max
attcccggtcgagcgcgcgtacgaaaacaaaaagtttacgttacaaatcgcataataaccgtcctaagtttattgagagaattttggaagtgtgagaaacatggcatctcgtcaaaacaacaagcaagagcttgatgaaagagcaaggcaaggagagactgttgtcccgggtggaactggtggcaagagcctggaggctcagcaacaccttgctgaaggaaggagcaagggagggcaaacaaggaaggaacagcttggtacagaagggtaccaggaaatgggacgcaaaggatggttgagcactgtggacaaatcaggagaagaacgtgctc

SEQ ID NO: 247821 - DNA, 469 bp, Glycine max
taccggtacggcagttcggggaacacgagacccaaagtccataggcatacaccacaagaaaaccctaagccacttcaggttctactggcacgagggcttcagcggagaaaaccccacatcggttagaatcattccctcactccccaaatacaacgcaaccacaaccttcggctccgttggaatctttgacacccctttaaccgtgggacctgaggtgtactccaaggttgtcggaaaagccgagggcttgtttgcctccacgtcacaaacgcagtttgacctgttactgatttacaacttcgcgttgacccaagggaagtacaacggcagcaccatcacgttcacggggaggagccccctctcggagaaggtgagggagctgcccattgttggtggtagtggggtcttcaaatttgccactgggtatgttgagtctaggacgctaagttttgatccccaaacaaggaat

SEQ ID NO: 247822 - DNA, 469 bp, Glycine max
tcgacccacgcgtccgcccacgcgtgcgcaaattagttcattctctttgcgcagttccctacctctcctttcaagaggcagatcttcgtcaagaccctcaccggaaagaccatcacccttgaggtggaaagctctgacaccatcgacaacgtcaaggccaagatccaggacaaggaaggaattcccccggatcagcaacgtctcatcttcgccggaaagcagctcgaggacggccgtaccctcgccgactacaacatccagaaggagtcaacccttcaccttgtccttcgtctccgtggtggcatgcagatcttcgtcaagactctcactggcaaaaccataaccctagaggtcgaaagctctgacaccattgacaacgtcaaggccaagatccaggacaaggagggaatccccccagaccagcaacgtctcatcttcgccggaaagcaacttgaggacgggcgcaccc

SEQ ID NO: 247823 - DNA, 517 bp, Glycine max
  unsure (1)..(517): unsure at all n locations
ctttgagccccttggatgnncctagcactcgtagcactgccgtaccggtccggaattcccgggtcgacccacgcgtccgggaaacgtgaaattagggttcatcgaggaggaagaagaagaagaagatgtcgtacctggggcctcacttgcactctggatgggccgtcgatcaagcaatcctcgccgaagaggagcgtctcgtcgtcatccgtttcggccacgactgggacgaaacctgcatgcagatggacgaggtgttggcgtcagtggcggagacgataaagaactttgcggtgatatacctggtggacataacggaggtgccggatttcaacaccatgtacgagctctacgacccttccacggtgatgttcttcttcaggaacaagcacatcatgattgatctcggaaccggtaacaacaacaagatcaactgggctctcaaggacaagcaggagttcatcgacattgttgagaccgtctatcgtggagccaggaagggacggggtctcgtcat

SEQ ID NO: 247824 - DNA, 519 bp, Glycine max
  unsure (1)..(519): unsure at all n locations
ccatcgaaaccntttgaannnncnctacgactcatcgcactgccgtaccggtccggaattcccgggtcgacccacgcgtccgcccacgcgtccggtgatatattatatcatatcacaatgtgtggcatacttgctgtgcttgggtgctctgattcatctcaagccaaaagggttcgcgtccttgagctttctcgcagattgaagcaccgtggtcctgactggagtgggctccaccaatatggtgataactatttggctcatcaaaggttagccatagttgatccagcttctggtgatcaacccctcttcaatgaagacaaaactgtcgtggttacggtgaatggagagatctacaatcatgaagaactcaggaaacagttgcctaatcacaccttccgtacaggaagtgactgtgatgttattgctcacctgtatgaagagcacggagaaaactttgtggacatgcttgatggtatattttcgtttgttctgctagatactcgtgacaacagttttata

SEQ ID NO: 247825 - DNA, 463 bp, Glycine max
  unsure (1)..(463): unsure at all n locations
tcgaccgcacgcgtccgcccacgcgtgcgggataccgtcccgtgattttccaattcgacgaataagggtatcacgtctcttaatcaaaacgtgttacccgaatttttggtaaacctaaacaggaagccaatactctaaccactttggataagttaaatgagacacttgaaatgttggagaaaaaggagaaagtactcctaaaaaaggctgctgcagaagttgaaaaagccaaagaattcactagggcaaagaataaaagggcggcaatacaatgtttgaagaggaagaggctatatgaacagcatgtagagcagcttggaaatttccagctgcgtattcatgaccagatgataatgttggaaggtgccaaggcaaccacagaaactgttgatgcattgagaactggagcagctgctatgagggctatgcanaaagcaacgaatattgatgatgttgacaagac

SEQ ID NO: 247826 - DNA, 463 bp, Glycine max
tcgaccgacgcgtccggacacgcgtgcggatgcctcaggcaccatgggttgagcatgcggatatgggaacttgtagagccagtgctatggtgcgaacactgctgctttgagcacagctgtgttcaacaatggtgtaagctgtggggcatgttgtgagataaagcgtgttaacgaccaaaggtggtgccttacacgctcagttattgacactggaaccaatttctgtgcactaaacaatgcactacctaataatgcaagtggatggtgtaaccattcccttcaccacttagaccttttccaacctattgttcaacacattgctcaatacaaagctggaatagtacccgtggcttaccgaagggtgccttgccgaatgagagagggcatcagattcaccatctacggtcactcatacttcaacctagacctaatttgcaacgttggaggtgcaggtgatgttcac

SEQ ID NO: 247827 - DNA, 462 bp, Glycine max
  unsure (1)..(462): unsure at all n locations
tcgacccacgcgtccgcccacgcgtccgctgtctttttttctctttctctctctagattgtctttcttcttcttcggtatgagccctaactgggggccccatagtcgtcgctgctagctagccatgtcgctgaggaaggtcttccgctcccgcaagttctccaaatcgttcaaagaggtgctgccggcggagggcgccgccgtcgagggcggggtcgccggcaccgtcgaggaggcggcgaatgggaataataatgggtggtctagcatgctgccggagatcctcggcgagatcgtgcggcgcgtggacgccgncgaggagcagtggccgaaccgccaaaacgtcgtcgcctgcgcgtgcgtctgcaagaggtggcgtgacatcacgcgcgaggtcgtgcgtgtgccctcgcataccgggaaaatcactttcccttcgtgccttaaacagccaggaccacgt

SEQ ID NO: 247828 - DNA, 519 bp, Glycine max
  unsure (1)..(519): unsure at all n locations
acttgagcccccttggangtagcctgccagcaatagcacctgccgtaccggtccggaattcccgggtcgacccacgcgtccgcccacgcgtcctcccacgcgtccgcggacgcgtgggtttttctgaaaacttaatttctgggtgattttctccctcacttttatttctctctttctggattattctctctgtgtagattgtggcgtgttctcgatgatgatgatgatgagccgcagcggcgccaaccgggtagcgaacaccgcaatgtttgtggcgaagggtttaagcggcgaagttggtggtttaagagcattatatggcggtggtgtgaggagtgagagcactttggctttgtcagagaaggaaaagattgagaagaaggttggtttgtcttctgctggtgggaacaaagaagaaaaagtgatcgtgagttattggggcattcaaccctccaagatcacataaaaagatggcacagaatggaagtggaattgctttaagccatgggagacatccat

SEQ ID NO: 247829 - DNA, 484 bp, Glycine max
ccggaattcccgggtcgaccgacgcgtccgcccacgcgtccgggaaccctagctagggtttggaagaagctgatccgagaagatggtgcagcgtctcgcctaccgcaaacgccacagctatgctaccaaatccaaccagcacagagtcgtcaagactcccggtggcaagcttgtttatcagaccacgaagaagagggccagcggacccaagtgccctgtcactggaaagaggattcaagggattccacatttaaggccagcagagtataatagatcaaggttacacagaaaccgaaggactgtgaaccgtgcatatggtggtgtgttgtctggcagtgctgttagagaaagaatcattcgagctttcttggttgaagagcaaaagattgtgaaaaaggtcttgaagatccaaaagacaaaggaaaaacaagctttgaagggctgagttttgagaaagagtgataaagatctttttggagggatt

SEQ ID NO: 247830 - DNA, 399 bp, Glycine max
aattcccgggtcgacccacgcgtccggtccttggtgtttgagtgtgttaggactgtgctcactagcttgagtgattatgagtctgctggtaagggcgccgttgagaaggttagggaattgttggtcgatcaggatcccaatcttagatatcttggcctgcaggcgctttcggttgccacacccgagcacttgtgggcggtgattgagaataaggaagcggtggttaagtcgttgagtgatgatgattcgaatatcaagatcgagtcactgcgattggtgatggccatggtgtctgagagccatgtggcggatatctccagggtgttgctcaattatgcgtttgaagtctgaacccggatttttctaatcagaatttggggttcattttggacaacgtgt

SEQ ID NO: 247831 - DNA, 462 bp, Glycine max
tcgacccacgcgtccgaaattacttgtttatgggagattatgttgttcgtggctattattctgtcgaaactgttgcgcttttggttgcccggaaagtgcgttatcgtcagcgtattactattctgaggggaaatcatgaaagtcgccagattactcaagtttatgggttttatgatgagtgcctgcggaagtatggtagtgctaatgtttggaagatctttaccgatttgtttgactactttccgttgacagcattggttagtatactattacataatttttggaaaggattgtgggatattttgttagattgtcatttttctcaggtccaaggtagtttgttcaattcaatgatcctgggcacccttattatgctggcttgcatttaagattacaccatggtggaattggctgctatcgctgtgctgtattgtggaatctgttggagcagatgaccctatt

SEQ ID NO: 247832 - DNA, 530 bp, Glycine max
  unsure (1)..(530): unsure at all n locations
tgagccattgtggggttgaccgcctagcactcatcgtactgcatgatcgctnctggaatccccggtcgacccacgcgtccggttttatcctctgcatgacctggaatacgtgttgcctttcgattgttcgattgcttaatgtcatacaagaaattaggcatgaccctattgatgagtatgctctgcctatttgaaaatatccacacctcttttaattgtcgcaatgatgtgtgaagagtgtgttactttaaaaaagaaaaaaaagggcggccgatctagaggatccaagcttacgtacgcgtgcatgcgacgacatagctattctatagtgacacctaaattcaattcactggacgtcgttttacaacgtcgtgactgggaaaaccctggcgttacccaacttaatcgccttgcagcacatacccctttcgccagctgtcgtaatagcgaagatgcccggaccgatcgaccttcccaacatttgcgcaaactgaatggcaaatgggacgcgccctgtagcggcacattaa

SEQ ID NO: 247833 - DNA, 373 bp, Glycine max
tcgacccacgcgtccggccacgcgtccgacttgaccagctatacttgatgcttaagtaggttagaagagcttcgcggcgaacaatggcagctgctcatgaagatgtgaagctcttgggcatcgtgggaagcccatttgtgagcagggatcagatcgcccttaagtagacgggagttgaatacatatttactggagaaaatctgtgcagcaagagtgatctgcttctcaaatacaaccctgatcacaagatggttacagtgcatgatcacaatgagcaagccatagcagagtctcttgagattgatgaatacattgctgagacatggaagaacaaccccatcttgacctatgatccttaccaaatagccttggc

SEQ ID NO: 247834 - DNA, 525 bp, Glycine max
  unsure (1)..(525): unsure at all n locations
ngatgagaacaattgtannnncctacgaactcatcgcactgccgtaccggtccggaattcccgggtcgacccacgcgtccggccacacatccttcttgaccagctatacttgatgcttaagaaggttataagagattcgcgtcaaacaatggcagctactcaggaagatgtgaagctcttgggtattgtgggaagcccatttatgagcagggatcagatcgcccttaaggagcagggagttgaatacataatttactggaacaaaatctgtgcagcatgagtgatctgcttcttaaatacaaccttgatcacaagaaggttacagtgcatgatcacaatgagcaagccatagcagcagtctcttgagattcgaagagtacattgcatgagacatggaagaacaaccccatatggacctaagatccttaccaaatagcactgcctcgactgatggacagatccagtgatgataagacatgtaggagctgtatcgtaaatctgctttaaaccggcgacgagaaacat

SEQ ID NO: 247835 - DNA, 521 bp, Glycine max
  unsure (1)..(521): unsure at all n locations
aatcgaggcccctttgaangnancctagcacttcatcgcactgtctgtaccggtccggaattcccgggtcgacccacgcgtccgttcatctccgaaccgcgtttctatttttgactctctctctctactcagtaagaatgtatgctaatattggtatgccaccgggggtacctcagcatcatcctcaacctccaacgagctcacaacctaatctgttcgggaatgcattcaattctgctggttctggactcattcgaggtggattgggtgcgtatggagaaaaaatattaggatcaagctccgagtatgtccaaagcaatataagccggtatttctctgatccccaatactactttcaagtgaatgaccactatgttaagaacaaattaaaggttgtgttgttcccattcttgcaccggggtcattggactaggattactgaaccagtgggaggtaggctctcttataaaccaccaatttacgacataaatgctcctgacttgtacattccattaatggca

SEQ ID NO: 247836 - DNA, 520 bp, Glycine max
  unsure (1)..(520): unsure at all n locations
ncctcgatnacacttgnannnncnctacgactcatcgcactgccgtaccggtccggaattcccgggtcgacccacgcgtccgctacgtctcatcgaataatttcagatctcgtcgatctgagctcaaaacaatggcgaaacgaaggtactctcgtcttccacctcgcaagtcatcgtcgtcttccacgctgattctgactctgttcctggtcttcaccttcctcgttctaattctcctggctctcggcatcctctccattcctagctcctcgcgtggaaatttgcccaaacctaacgatctcgcatccattgctcgcaacacaatccacacttccgacgatgacgacgtgaggggagagcagtgggttgaagtagtgtcgtgggagccgagagcctttgtctatcacaattttctgacgaaggaggaatgcgagtatctaattgacatagcaaagccaaatatgcataagtcatcagttgttgatagcgaaaccggaaagaagtaagacagcaggttttn

SEQ ID NO: 247837 - DNA, 329 bp, Glycine max
attcccgggtcgaccgacgcgtccgggaacctcatcaaaaccaagaacagcttcgtcacaaccatcagaaacttcgtccaagcgcaaaggaggagttttccaaaaagaattgcagcacatgatgtatggctttggagatgatcctaatccacttcctgaaagtgtggctcttatggaggacattgttgtggagtatgtcacagaactggtacataaagcccaagatattggatctcagagggggaagctatcagttgaggatttcctctatttgattcgcaaggattcgccaaaacttaaccgctgtacagaactactttctatgaatg

SEQ ID NO: 247838 - DNA, 393 bp, Glycine max
cggaattcccgggtcgagccacgcgtccgggaaacgcttgtgcaaaaggaaaaccagttgctcatgtctcttgctccaatttttctggaggtgagaagcatgcaagtaggccaaagcagtattcaaattcttctgaacaactatctgctccaataacttcagaattaaatgttcccaaatccttctccagtaacctaaaatccttcagcttgaatgatcttaaagaggccactaagaacttccggcaagaaaatttaattggagagggaaggattcgggcgcgtcttcaaaggatggatcgatgagaacacatatggtcccaccaaaccaggcactggaattgtagtgcccattaaaaacctaaagccagaaagcttccaaggccacaaggaa

SEQ ID NO: 247839 - DNA, 464 bp, Glycine max
tcgacccacgcgtccggtttgttgttgtaactcgttcttcttcttttgttgttctgtgtttgtgtttgttttttcgctcacctgaaaatgggttgctgcggtggtaactgtggttgcggaagctcctgcaagtgcggcaacggctgcggaggctgcaagatgtacccagacttgagctacactgagtcaaccaccaccgagaccttggtcatgggagtggcacctgttaaggctcaatttgagggtgctgaaatgggtgtgcccgctgagaacgatggctgcaaatgtggaccaaactgctcctgcaacccctgcacttgcaagtgaggtgttgggagagcaagcttcaagcagagatagcccttaattaggaataatgataaactattaatgtgtagctaaaaacttatgtattatgtctgtgatggttttcgtgcactctggtgttttgtgttaaacaaaca

SEQ ID NO: 247840 - DNA, 464 bp, Glycine max
tcgacgcacgcgtccgcccacgcgtgcgcggacgcgtgggtagctagctaggcagccacgaaccttggcgcatttgcttttttctgtgggcgagtataataataattgcagtaaaatggcatttctgaggtcaatagcaacaacagcaattgctactatacctgcagccttagcattctcatcatcttcatcatcttctttccctcgctcttcccaatcccccaatccccaaaatagattaagtcttgtcaaaacacttgctactcctccctctgctctccacatggaccacaaactctcttctcagcctgacgctgtcttgcccgagttactgacggagttcatggtggacatgaaatgcgaaggttgtgttaatgctgtcaaaaataagttgaacgagataaatggagttaagaacgtagaggtggacttgagcaatcaggttgtgaggattctcggttcaa

SEQ ID NO: 247841 - DNA, 397 bp, Glycine max
gcacacacatacgttcaagatcacaactggtccttcaccttttgcttcctaatcttaattgcatcatccatcatacagccattattcatcatggcgtctcctaataaaatcactctgaatagctcaaactcacatgctttctacttctatcattcaatagcactctaatcccagacaatctagcacattatccagcactactacaccaacagcaacatccctctgcccaacactacgagcaataccctttccaacgttatcacttactacaagaatcacatttagaccaataatccccattactaaccctactaggaccatctcatatcctctgactcttaattcatcataatctaccataccacactctctcatctcatccatactcctaactact

SEQ ID NO: 247842 - DNA, 520 bp, Glycine max
  unsure (1)..(520): unsure at all n locations
agctgaaaccgcttgtannnngctgagaaccnatagcactgccgtaccggtccggaattcccgggtcgacccacgcgtccgcacacacaaacgttcaggatcacaccttttcctgcaactatgggttgcaaatcttaattggatcatgcatcctacatccattattcatcatgtacgctcttcaataataaaactgctgaatagctcagacggacaggcttgctactggtatgaggcagtggagctctaacacaagacaatctagcacattatccaggactactgcaccaacagcaacatgcttctgtcgtacactacgagcaatacactgtggaaggttattacttactgcacgaatcacatttaggccgatgctcccgatgacagaccctacgcggacgatctctatgcctgggactctgaattcatcaaggtcgaccatgctcacgctcttggatctcatcctggctgctaactacttgaacactaagatcctagctgaccttacatgtcagactga

SEQ ID NO: 247843 - DNA, 522 bp, Glycine max
  unsure (1)..(522): unsure at all n locations
ngtcgataccacttggannnnaatgagaactgatagcacctgccngtaccggtccggaattcccgggtggacgcacgcgtccgctctctctcgtaattttctctcttattgaggctagaaaaagagagcaaaaaaactaaaggatgcctgcagtcggaggtataaacaccggagggggcaaggagtaccctggaagcctaactctatttgtgacggtaacatgtatagttgcagacatgggtggtttaatcttcggttacgatatcggaatttcatgtggagtgacgtccatggatccgtttctgctcaagtttttaccgtcagtgttccggaagaaaaactcctacaaaacggtgaaccagtactgccaatacgacagccagacactgacgatgttcacgtcgtccatgtacctctacgcttagctgtcatcgttggttgccgtcaccgtcacgcgtaaattctgacggaaactctccatgctttacggatgcttgcttatactcgtcggtgacctcatca

SEQ ID NO: 247844 - DNA, 453 bp, Glycine max
aattcccgggtcgacccactcgtcctcccactcttcctataaaaaaaaaaaaaaattaaaaaaaaaaaagaaaaataaaaataaaggaaaaatataaaaaaaaaaaaaaaaaaataaaaaaaaataaaaaaaaatatataattattttaatttattttaattaattttatttttattaatattttaattttttaaaatttatttaactttctttcttattcttatttttgtttatttcaatatttcttttttttatttctttttttttttcccaaattcttttctttttttctattttttctttatcttgattttaattatcaattttctctctaatttttttccttttcttacatttttctattttattttcttttttatctctacttttttcttttccttttttttttttactttttttttcttccttaactttattttttcatttttctt

SEQ ID NO: 247845 - DNA, 573 bp, Glycine max
  unsure (1)..(573): unsure at all n locations
cggtggtgngtagtcccaacgccgtccgcacgtacgtaccggtccggaattcccgggtcgaccgacgcgtccggaacaaaacaaaaaagaagaagaaagaaatatggctggaggatcatacgaggaagccattgcggcgttgacgaagcttctcagcgagaaagccgacctgggtggtgtcgccgccgcaaagataaaacagctgacggcggagctggataccgccaccgcaaacgggtcgacgccgtttaacccggacgagaggatccgaaccgggttcgcccacttcaagaacgagaaataccagaagaacccggaattatatggcgaacttgccaaaggccagagtccaaagtttatggtttttgcttgctcagactctcgagtttgcccatcccacattctggatttcaatccgggtgaaagccttgggggccgaaatatcggcaccatggtccaccctatgaccaggaccaatttcaaggacccgggccggcatttgatattgcagcttaccnttaaagtngagaatattggggtcatttggcacaactggtgttgaggtataagggg

SEQ ID NO: 247846 - DNA, 271 bp, Glycine max
ctctctccttaattcccgggtcgacccactcgtactcccactcgtcctaaaaaaaaaaaaaaaaagaattaaaaaaaaaaaaaaaaaataaaaaaaaaaaaaaaaattaaaaaaaaaaaaaaaaaaaaaaaaaaaaaaaaaaaacaaacatataaaaaaaatccatacttaaattcacatacatacaacaaaaaaaaatattctattatattacctaatttaaattaattacccctctttttacaactttactactttaaaaacctttttt

SEQ ID NO: 247847 - DNA, 573 bp, Glycine max
  unsure (1)..(573): unsure at all n locations
ncgctgagttgatcctagctcangtacgtacttaccataccgctccggaattcccgggtcgaccgacgcgtccgagcagcacttgctttcctttcctttgctgaccaaacttcactatgctatctatcgtcggtatgcgttggccagaacaggaatcctcaccttgtgccctctgctccctttcatcaaaacctctccaaaactataccttcctgtcaccgagcgcactgtaagtgacaccaaaaactggcgcgatgcgcctgctttgatagtcattgctggagggttgacttcaatggcaacagccggttccattctggctgtgatcacataggtttcttcctcggcaaacatttgtgaccgtgcgcgtgacaacttgagttctcacaagatgggaaattgttattgatggggggttaaaatttgatggttggcccatggaggggtaccatgggggggaagggaggttcctaacttaatgaccataatggctaggggtggggcacaaaaagctcttttaatcctgtgccctggcaaatggtgaatcaatttatttaaatatgccggataaag

SEQ ID NO: 247848 - DNA, 370 bp, Glycine max
tcgaccgacgcgtccggcaacgtggtcacacccactagcagtattattacaaccatccataactttattcatacggggtatatgaacattcggggatgaaaccacctcatgaggtattgctgctaccatgaacctaactctatttacagaagcctgcctcttattgccgacagctgtcgaaaccttgatgcatgactggaacctagaggcgaacatattgcatctaaccatcagaaacatcactttcaggattgactgatatagcttctcagggatgcacacaatataatccgctgatcaggcactactttctatacaatgaatagcttaaacaatgcaggagaggttgccagactcagacgaagaagat

SEQ ID NO: 247849 - DNA, 400 bp, Glycine max
ccccggtcgaccgcacgcgtccggttaataccatgcgcatgcacagaatggtttgatgctataccatatgatcttgatccaggggtcttaactgttcgaggggcacactacatatggatgattatggccatggttggatcgctactagctacattgacctactactggatgattaacatgcccgaaaccgcttatgataccgctctagggaccaataacacgaggcttgcagctgtagactatgtctcatagtttgcctgtttgaaatcaagctgaaccacaagactcggagcatatggctaactcatatggctagacctccaaggactttctcagtcgtcatgtactgcatctactctgtacatctcagcacatggtacttgctcgatattgcgttcta

SEQ ID NO: 247850 - DNA, 522 bp, Glycine max
  unsure (1)..(522): unsure at all n locations
nattgagcccccntggttgaaccctgcnactcatcgcactgctgtaccggtccggaattcccgggtcgacccacgcgtccggttcgtggcgatgaggctgcacacgagggaccaggccagggagggcgagaaggaggtcaagcagcccgaggagaaagccgttaccaagtgggacccatccgtcgaagggtacctgaaatttcttgtggacagtaagctcgtttatgacacgctggagaaaatcgttcaagaggctcctcatccttcttatgctgaattcagaaacactggattggaaaggtctgcaagtttggcagaagatttggagtggttcaaggagcaaggttataccattcctgaaccttcttctcctggtcttacctatgcacaatatcttaaggagttatctgtgaaggatccccaagcattcatttgccatttttacaatatctactttgctcattcagctggtggtcgaatgattgggaaaaaggttgctgaaaagttacttaacaacaaggt

SEQ ID NO: 247851 - DNA, 522 bp, Glycine max
  unsure (1)..(522): unsure at all n locations
ccaatgataccgcttggannnncatgataactnatagaactgccgtaccggtccggaattcccgggtcgacccacgcgtccgctgcaaatgagctgaaaatgatgtatgtcaacagaacacctaggtcaaacaaagcaattgatattgtttctagtgcttacaaggctactttaacttggaataatatgcgcactctccaggaatgtcgtgaagcctgtggaggacaaggagttaaatctgaaaatcgtgttggcaatttcatgggtgaatttgatgtgcattcgacatttgagggggacaacaatgttctaatgcagcagattagcaaggcactctttgcagaatatgtagcaagtcagaagaaaaagaaaccattcagcggtttgggattagaacacatgaacaaacctttgcctgttatcccatctcagctaacaagttcctacattaggaacagtgaatttcagattgatctgttccacctaagagagcgagacctattgagacgttttgctgaagag

SEQ ID NO: 247852 - DNA, 230 bp, Glycine max
gcccactcttcctatttagcatctatacttcttcctttttaatgttataatgtctacgttacaaacaatggtagctacttattaatattttaaactttttatcatcttattaaccccatttttattcactgtccacatatcccttaattttaatataatttaatacaaatttttataataaaattttgtcaacaatattcatttacttctcaaatacaacctctttcaca

SEQ ID NO: 247853 - DNA, 471 bp, Glycine max
  unsure (1)..(471): unsure at all n locations
tcgaccgacgcgtccgcccacgcgtgcggatagagatcatggaaaaagttggggtaaggctggtggtattgctgtgtgtcattgtgacggcggcgatggcccaaaactgcgggcgacaagctggtgggcagacatgtggcaacaacctatgctgcagccaatacggttggtgtgggaacagcgaagatcattgttctccctctaagaactgccaaagcacatgctggggcagtggcggtggcggaggaggcggtgaaagtgcgtctaatgttcgcgccacgtatcataactatttaccagagcaacacgggtgggacttgaacgccgtgagtgcttattgctcaacttgggacgctgccaaaccttactcttggcgcagcaaatatggctggactgctttctgtggccccgttggacctagcggccgtgatgcttgtggaaaatgcctncgggtgacgaatacagggacgg

SEQ ID NO: 247854 - DNA, 568 bp, Glycine max
  unsure (1)..(568): unsure at all n locations
aatggtactgatgttaaaccactacgcacgactactcggtcctgaattcccgggtcgacccacgcgtccgatttccttaacaaaaaaacaaaaagtctagtatttattaaaaaactacaacaataacaaataagagctacatacaaaattctgggcaccaaaactcaacttcaacaactactaccgctacaccaccaaagcgcccaccgtttaggctcacaagatcgtctacctcttcatcaagaatcctgcccagaatcccaagccctctgctgtgtcgtcctcttctccagacatcaaccaccaactctccaaatactacggtcctgacaaaaggatctacctgccagataatctcttttaccgctctgaggtacctgagtaccatacccgatatgtccgttgagactataagtacgaccctcttacgctgacaagaaacccaatgacttcgaccagtacaagccttcgatctgattcattcccgaagggtcattctcgtaccgcttgcgcttatattcaaanccttcaaaagttcagcgctaattgggcccctattcgttttttc

SEQ ID NO: 247855 - DNA, 430 bp, Glycine max
  unsure (1)..(430): unsure at all n locations
ccgctccggaattcccgggtcgaccgacgcgtccggctttatctgacccacgggtcacccatgagatccgcagtgtctggatatcatactggtctcaggctgaccgttctctaggccaaaagatagcttctcatctcagcacgaggccaaatatttaatgttgttgccaactccagaatgattgttagagttgcagacgtgcaaagagtacgataaggatgtgattttggattacctgaaagaactaatccttttcttgcaatattatgttgtgtgtacccataactccatgaatgcaactcgttgacctatctcaataaatgccgtttgtatttgttagtatttaaaaaaaaaaataantaannaaataattataaaaaaaaaaaaaaaaaaataaaaaaaaaaaaataaaaaataataaaataaaatt

SEQ ID NO: 247856 - DNA, 469 bp, Glycine max
cgctcctgaattcccgggtcgaccgacgcgtacggaagtatccaacaatgactaccacccgtggtgctatctgtctttgctttgcattcctttactgcgcggctgaaggagccaaggttagtttcaataacaagtgctcatacacggtatggccaggaaccctaaccggtgaccaaaagccccaattatcaacaactggtttcgagttgggtccaggagcatccaactctgtggaccttccatctccatggtccggtcggttctgggcccgaacaggatgctccaacaacaacggaaggttcagctgcgccaccgccgattgcgccttcggtcaagtcgcatgcaacggtgccggtgcaatcccggcagctactttggtagaaatcacagttgcagcaaacggagggcaagatttctacgacgtgagcaacgtggatggctttaacgtgcccatgtccggaaccccaca

SEQ ID NO: 247857 - DNA, 470 bp, Glycine max
tcgaccgacgcgtccgcccacgcgtccgcccacgcgtccgcccttgtgtggtggcttccaccgcagaagccgccagagagttccttaaaaccgacgaaatcaacttctccaaccgccccggccaaaacgtcgccgttaagggcttagcctacgattcccaagacttccttttcgcgtttgcacccttcggaccctactggaagttcatgaagaaactctgcatgtccgagcttctcagcggccgaatgatggaccagttccttcccgtgaggcagcaagagaccaagagattcatcagccgcgtgttccgaaaaggagtcgccggcgaggccgtggatttcggagacgagctcatgacactctccaacaacatcgtatccagaatgacgctgagtcagaagacttctgagaacgacaaccaggctgaggagatgaagaagctcgtgtcgaatatcgcggagctcatgggg

SEQ ID NO: 247858 - DNA, 466 bp, Glycine max
  unsure (1)..(466): unsure at all n locations
gtcgacccacgcgtccgaccacgcgtgcggaaaaccggtgcaagttcttaatggaggtagctgaagctgttgtctaggccattggagcggagggagttgctatcagaatttcaccagcaattgatttcaatgacgcctttgactctgacccacttgggctaggcttagcagtgattgaaagactcaacaatttgcagaaacaagtgggcacaaaactcgcttatcttcatgttactcagcctcgattcacacttttggcgcaaaccgagtcagtgagtgaaaaggaggaagctcatttcatgcagaaatggagagaggcttatgagggaacattcatgtgtagtggagcttttactacggactcatgaatggaagctgtagctgaaggccatgctgatttggtatcctatggtcgtcttttcatctgcaatccagacttggttntaaagcttaagctcaatgcacc

SEQ ID NO: 247859 - DNA, 520 bp, Glycine max
  unsure (1)..(520): unsure at all n locations
cgatgaaagcatttgaannnncatgagactcatagcactgccgtaccggtccggaattcccgggtcgacccacgcgtccgcctcaattggcaaagaagttgaacaagattcttgcacaacacatcaagtctgtgttacgagggctgagagcacgtataagcgcttcactagtcactattgcaaaggaacatgcaagctatggagaaatcacagagtccaaggctggacagggtgctcttctccttaatattctttcaaaatactgtgatgcattctcctccatggtagagggaaagaatgaggagatgtctacatctgagctgtctgggggtgcaagaattcattacatttttcaatccatctttgtgaagagcttagaggaggtggatccatgcgaagatttgactgatgatgatattcgcacagccatacagaatgcaactggacctaaatcagcactgtttgttcctgaagtcccgtttgaagtgcttgtacgcaggcagatatctcgactattgga

SEQ ID NO: 247860 - DNA, 520 bp, Glycine max
  unsure (1)..(520): unsure at all n locations
gcatgaaaaccctttggannnncctgagaactgatagcactgccgtaccggtccggaattcccgggtcgacccacgcgtccgctttgcagcactgggttctgatggaggagtgaagctgtattggggtattgcagctgatggatctgtggtgatctctgatgatctagaagtcataaaagagggttgtgccaaatcctttgctccctttccaacagggtgtatgtttcacagtgaaggaggtctgatgagctttgagcatccaatgaacaagttgaaggcaatgccaagagtggacagtgaaggggccatgtgtggggccaacttcaaagttgataagttcgccagagtcaacagcattcctcgagtgggaagtcaatccaattggatggaatgggaccaacattagcttaaaaataaagccttaggataatgtaaaataaacaaaaaaatgtcatctatgtatgctcctttcctaaaaaaaaaaaaaaaaagggcggccgctctagaggatccaagctt

SEQ ID NO: 247861 - DNA, 451 bp, Glycine max
acgcactcgttcgctgacgcatatttcagatactagtgatcaatcatcaacacggagctgactgtgttgcgctgtgaatccaccttcggcttccattggaggaccatttcctcctggaatagaaatactaccacacttttcttttttcacttctctaagttgctaagttaattgctccttcattttttcactcttcgttctcgcgtacccgtgtcacggtaactcgtggtgaagtgttcgaaaatgactgtcacacctaagatctcagttaacgatgggaaacttgttgtccatggtaagaccattctgactggagtgccagacaacgttgtgctgactccaggttctggaaggggtcttgtgactggtgcttttgttggtgccacagcttcacacagcaaaagtctccatgtgtttccaatgggtgttttagaggggctccggttcatgt

SEQ ID NO: 247862 - DNA, 297 bp, Glycine max
ggttactcatccaacaaaactgtagaacgatgaagaattctgtccaacctatcatgacaatatattaagtgcaatcagaaattcactgaattttaagaaccactactcaaaagacacggtacgattttcccatggtactcttcagatataggcagcgaacgttctgccaattcttttttcagcaagagacaaggaagttaacactcaagtgtacatttttggagaattggcttttcctccaagctaacattccccaaaagttacttccattgcagagaaccttcttaagctggaact

SEQ ID NO: 247863 - DNA, 579 bp, Glycine max
  unsure (1)..(579): unsure at all n locations
cacggtnnctngacgnctggggccctaccgcatgtacttaccggtccggaattcccgggtcgagccacgcgtccggtcgaaacgacgtcgttcattgtgcgatgaaagtagctcaacaagtgttgaatctctgaactgtttgggattcgaatcttgagtcgttgatcgtttccggcaatggattcgtggctcaaagccgctgaaggtttatttgaagttgtagatcgacgagcgaaggctgttgccagtgacttatcagaggagcagggtgattctaagtctccagcatcaaatgggcaaggatctcagggcaagaggacaaaatcaaaaccaaaggctcaaaaggcactatccgactcaccaactataattagtgatactactcacgagaaaagtggatcttcatcagcacctgtggacataagcactttcaatagacaaagttgatcctggaattgatgtgagcgctttcacgggtccaaaccaaccaaaggagcacaaccttaacatgcaccataaccttggtagggtcttcattatccaaaattctatgggatgatagttggtaacatgacacan

SEQ ID NO: 247864 - DNA, 386 bp, Glycine max
  unsure (1)..(386): unsure at all n locations
gcgtncgatctttctcttgttaactaattaaaatgactctcacaaaggccttgttctttgtgaccgctctatgctgcacctctgccgcatatgctgcaaggtttgacatcacaaaccgatgctcataccctgtttgggccgcggctgtgcctggcggtggcaggaagctgaactcgggccagtcatgggctttagacgtgcctgcaggaacgaaaggggcccgcgtttgggcccgaaccggctgcaacttcgacggctcgggccgcggtggatgccagaccggtgactgcggnggtgtcctcgactgcaaagcttacggcacgccttccaacaccctagcggaatacgcgctgaaccaattcagcaatttggacttcttcgacatc

SEQ ID NO: 247865 - DNA, 313 bp, Glycine max
ttggaacacgcgtgcggccttgcgtccgcaaacacctgttggagtcattcactgttccgagaatccaaactcatgtgttcataatgcccttgtactaagaattgcatctcacaacaaacttttggatcagcttagtcatgatgctctatatctaccaatttatcaattcacaccattgtgccgcattctttacaaggcaccttcttgtgtccaatggggagaacatgcactgccactatctccatttcatctgttcttgaatgtaacttgaaccccaatactgacgaactgagtgatatcaaatatgtgaacc

SEQ ID NO: 247866 - DNA, 300 bp, Glycine max
  unsure (1)..(300): unsure at all n locations
cccccagttgaaaaacccccagtgtacaagcccccagttgaaaaaccaccagtgtacaagcccccagttgagaagcccccacgttacaagcctccaattgagaaacccccaagttacaagcccccagttgagaagccaccagtatacaagcccccagttgagaagcctccaggggtcaagccaccaatagagaagcctaccgtttacaagccaccagtagagaaacctccagtttacaagcccncagtggagaaacctactatttacaagccacctgttgagaagccttcggtctacaag

SEQ ID NO: 247867 - DNA, 372 bp, Glycine max
  unsure (1)..(372): unsure at all n locations
ccggttcggaattaccgggtcgacgccacgcgtncgnccacgcgtacggncacctcttgtgtggcctaatcttcaaggaagaagttcagttggtgtctttcatatttgcacacagcattgtctatgcttttaggacctttgagcaagtttgggaggagctttgtgttgatatcaaggaaggtgtccttaacagcaaggtcacagtgccctccattatggaagccatgtctaaactcctaaaacctgaccctgagctggccaacttgatccacaacaagtgcatggggcttagcaactggtatggcctaataccagagctttttcccaatgttaagtatgttcatgggatcatgactgggtcaatggaacctt

SEQ ID NO: 247868 - DNA, 403 bp, Glycine max
  unsure (1)..(403): unsure at all n locations
cgggtcgaggcacgcgntgcgcccaacctagttgggagaagactgttgactgctacagtcctaggcaagggttgatgccagcaagcttgagggttagaactgtgcctcttgacggtagcaatgaagcatttgaggaagttttggatcctgattttggtgaatcagctattggtcgtgttgcgcctgttgattcaggattgtggtggattatattgttgagagtttatgggaaattaactggtgactatgctttgcaagagagagtggatgtccaaacaggcataagactgatccttaagttgtgtctgactgatggatttgacatgtttccttctctattagtcactgatggttcctgcatgattgatagaaggatgggcattcacggtcaccctcttgagat

SEQ ID NO: 247869 - DNA, 435 bp, Glycine max
  unsure (1)..(435): unsure at all n locations
cgggtggagccacgcgtgcgcccacgcgtncgtgtgaagcaagtggacttgggcgttgcaagataaataatggaggctgttggcatgaggctcaaaatggacatgcattttctgcttgtttggataatggaggggtcaaatgccagtgtcccacagggtttaaaggtgatggtgtaaaaaattgtcaagatatagatgaatgcaaagagaagaaggcttgtcagtgccctgactgtagctgcaagaatacttggggaagctatgactgcagttgtagtggagatcttctgtatatgagggaccacgatacctgcataagtaaaactggcagtcagggaagatctacctgggctgctttttggttgattttacttggcgtagttatgattgctggtggggcattccttgtgtacaagtacagaataaagcaataca

SEQ ID NO: 247870 - DNA, 414 bp, Glycine max
  unsure (1)..(414): unsure at all n locations
accggtccggaattcccggggcgagccacgcgtncgggaggctacaatttttgagctacgttatcgaacaaatgtgggtgagttgcttgggcgtgtgcgcaaagagctgccatggggtgatgcaaaagttgccaagcaacttgttgatgcgcaactatatgaactacttggtgatcggacagcagcagatgatgaaaagccttctagaaagaagaaggagaaacctgctaaagtagaggataaggcagctcctgtttctacccctgaaaagtcacctgaagaagacgttaatccatttttaatattccctaatccagaggaaaatttcaaggtgcatactgaagtgccttttagtgatggtagtattttgagatgttgcaatacaagagatctgcttgacaaacacttaaaagc

SEQ ID NO: 247871 - DNA, 516 bp, Glycine max
  unsure (1)..(516): unsure at all n locations
gtgccatgagactcttctcttgttgatcattgcgacngctcgtaccggtccggaattcccgggtcgacccacgcgtccgcttggagaccacaatttacaaagctgtgtctgaggcctttgtaaaagcagtaggagcgcctacagttgcacctgtggctccatttgggacttgctttgcaaccaaagacattcagtctacaagaatgggccctgctgtgcctgacataaatctagtgctgcagaatgaagtggtgtggagcatcattggtgcgaattcaatggtgtatactaatgatgtaatttgcttgggttttgtggatgctggatcagacccaagtacggcccaagttggatttgtggtgggttattctcaaccaattacttcaatcacaattggagcacatcagttggagaacaacatgctacaatttgacttggctacctcaaggcttggcttccgctccctcttcttggagcacgccaactgtgccaaacttaactntacctcttttggtt

SEQ ID NO: 247872 - DNA, 427 bp, Glycine max
  unsure (1)..(427): unsure at all n locations
ccgggtcgacgcacgcgtgcggacgagcgcgacaagaagcggcggggttacccaaaccttgggcttcaagccgtaccgtgcacctgaaagtgtaaccgaccatgaaaacgcngtgtcntgcgtgaagttctcgaacgatggaaccctcctagcctcggcctccctggacaaaaccctaatcatatggtcctncgccaccctcaccctctgccaccgcctcgtgggccactccgagggcatctccgacctagcctggtcctccgactcccactacatctgctccgcctccgacgaccgcaccctccgcatctgggacgccaccgtcggcggcggctgcatcaagatcctccgcggccacgacgacgccgttttctgcgtcaacttcaacccccaatcgagctacatcgtgtccggttccttcgacgag

SEQ ID NO: 247873 - DNA, 525 bp, Glycine max
  unsure (1)..(525): unsure at all n locations
agagtgtcccnnttnncgggcttcactccctcgccagccctcatgcacgccgtaccggtccggaattcccgggtcgagccacgcgtccgagcgagtgttctttcttcgtttcaacaccttaatttgcacacgctgcttcttcagcgtgagaaatggcacaagaaacctttctattcacatctgaatctgtaaacgagggtcaccccgacaagctgtgcgaccagatctctgatgcagtgctcgatgcgtgccttgaacaggaccctgacagcaaggttgcctgtgagacatgcaccaagaccaacatggtcatggtctttggagagatcacaaccaaggccaacgtagactatgagaagattgtccgtgacacatgccgcgaaattggattcatctttgatgatgttggtcttgatgctgacaaatgcaaggtgttggtcaacattgagcaacaaagccctgatatcccccaaggtgtgcacggtcacttcaccagcgcccaaaagaggtttgtgcttgctcaca

SEQ ID NO: 247874 - DNA, 356 bp, Glycine max
accggccggattcccgggtcgacgccagcgtccggcaaatttattgacccccatcacagggttccattgaccagccctggtggaactctggggtatagaccaccagaactcttacttggagcctctaattacggagatgctgtggatttgtggagcactggttgcatactgggggaactgaatcgtagcagacctatattacctggaaaaacagaggttgaacaattgcatacgatttttaaactttgtggctcaccatctgacgactattggtgcaagctgtggactccacattcaacagtattcaggcctcctcaccattataggcgttgtgttgctgaaacatttaaagaata

SEQ ID NO: 247875 - DNA, 537 bp, Glycine max
  unsure (1)..(537): unsure at all n locations
agatgggcnccnntttnnnnggctccagcccttatgccagcccatcactggacngctgtaccggtccggaattcccgggtcgagccacgcgtccgcaaaactcatcatcaggaatgaggcctccaactctcaacattttcccctctaagcctgggcatgtagagccatcatcatccaaggccaaggctaacatagagctagtttctccacaaacaagtggatcaaagaggccatcagagccgtcgatggagttggccaaccctcgaaacgaaactgcttctgcccctcagccacccaaacctgtcaagcgagagagcaaccgcaaaggtccaacgtcaagttctgaacatgaaggacctaaaacaccagatcctaagacactcagaagacttgctcaaaataaagaggcagctaggaaaagcaagcttaggaaaaaggcatatgttcaacaactagagtcgagtaggattaagctgaatcagctggaacaagagctacaacgtgctaagactcanggcatggtcttgggtggaagcc

SEQ ID NO: 247876 - DNA, 409 bp, Glycine max
  unsure (1)..(409): unsure at all n locations
cggtcgacgccacgcgtncgaatacaccaaaacccaacatgaaaacccttaacaaagcctcacttattttattccctcgcttgttcctttccctattcaagcattcccatgctgcaggaatcgctatctactggggccaaaacggtggagaaggcaccttagcagaagcttgcaacactagaaactaccaatatgtgaacatagccttcttgtccacttttggcaacggccaaactccacaactcaaccttgcaggtcattgtgaccccaacaacaatggctgcactgggttgagcagtgacatcaaaacttgccaagaccttggcatcaaagtgttgctctcccttggtggtggtgctggaagctactccctcagttcagctgatgatgccactcaacttgcaaacta

SEQ ID NO: 247877 - DNA, 398 bp, Glycine max
cgggtcgacccacgcgtgcgcgtcaacaaacgccacaatggccgtcacgaaaagcctctccatcttcctcttcatcggcataagctggggggccgtagctcaagcagcgaacttcaacatcacaaacaattgcacctacacggtgtgggcccgcccccgtgcccggcggcggcttaaggcttaaccctggcgaatcgtggaacatcagcgtgacgaacggcacgacaggaggacgcatctggggtcgaacaaactgcaccttccacaacgcaggacgcgggaagtgcctcaccggcgactgcgacggtgttcttgagtgcaacaaaacaagtacacctccgaacacgttggtggaattcgcgttgaaccaagacaacaacctcgacttctacgacatc

SEQ ID NO: 247878 - DNA, 446 bp, Glycine max
ccgggcaaaacacgattctctgatttcattttttctcactacaaaaccacactcactctcctcctctcgcctctttccttgtttctttcgcgcattctcctaaattcctccaaaaaccctaacactctctcattctcagtttttctcaatcttatgattaatggaagaccacgcgcatgctgcactacctcccggttaccggttctacccttccgaagaggttctcgtcggttactacttaaccaagaagaacgagaaccgggaggagggtttctacggttctgatttgatcagagaacttgacctctacgatcacgatcccttcgaattaccggacgctgctgcttgcttttcgtacggttacaaagggaggaagaagcattggttctgttacgctaaagagaccaaacgcagaaacagaagaaaggtgaaaagcgggttctggc

SEQ ID NO: 247879 - DNA, 342 bp, Glycine max
accggtccggaatcccgggtcgagccacgcgtccgttactcttgcttggtatttcgacgtctagatcttcaggatatagcgtctcttatggaggaccggtcaaactccaaggaagctctatcaattgcgtcgcgctctcgccttacccttgactgggtgccctaattgacagcatacgatatcgtaccttttctcgaccttgttctcactccaggctatgaaacacacgccacattggctgcgtatcttgccaacgaggatgaacatgagatggaagtagacactctaacatctgctattcaaaccccagtcaaacactttatgcctgagcaagaaatatac

SEQ ID NO: 247880 - DNA, 519 bp, Glycine max
  unsure (1)..(519): unsure at all n locations
gtgtcctagtcatactccacccatcactggacngctcgtaccggtccggaattcccgggtcgagccacgcgtccgctacctctttctcttctatctcaacaactacaccttcttgctactggatcatgtctcgagttcaagggcaagtaccatgatgagcttatcgccaatgctgcgtacattggcactcctggaaagggtattcttgctgctgatgagtcaacagggacaattggcaagcgtttggccagcatcagtgtagagaacattgaatccaacaggcgagctcttagggagctgcttttcactgctcctggtgttcttcaatatctcagtggtgtcatcctctttgaggaaaccctctaccagagcacagctgcaggcaagccctttgtgaatgtcttgaaagaagctggtgtgcttcctggcatcaagggtgacaagggcacagtcgagcttgctggaactaatggagaaaccaccactctaggtctagattgccctttgtcaagcgtctgg

SEQ ID NO: 247881 - DNA, 372 bp, Glycine max
ctcagcaagttgtcaagacatattgttcaatgaagccagcatggatttgcttcaaatgtggtagaaaaatgtttggagtatggtgatgccactgaacgggagttgctaattgcagagatatttgggcatgatgaccaatgtgataatttattgacaatgatgaaagatcaatttgcgaattatgtggtccagaaggtcattgatatctgttctgaaaatcagcgagcaatgttgctttctcacgtaagaatccatgctcatgctttgaagaaatacacttatggaaaacacattgtggctcggttggaacatcaatttggagagaatcaaacacccagctcatgatagaataaagagacaaagccatgggtc

SEQ ID NO: 247882 - DNA, 294 bp, Glycine max
gctctgaaatcgattagtcttcttcgtttttcttcacattcctcgtgacagatctaatctaatcatgctgttgggggtgactcagacattgcatgcatatcggtggttgtgttggatgctataaaaggcctacactgagtgctactgtggatgtgccatcgaaagggttggccacacatggtaactgactgaggaaaccaagctcatgctaggatttttggaccactagcacgcatgatatggacaacagcgctgtccaatcacaggggagcatatattcagccattctaacaa

SEQ ID NO: 247883 - DNA, 417 bp, Glycine max
  unsure (1)..(417): unsure at all n locations
cgggtcgagcacgcgtncgcaaaatgaataccaagcccgttttcttcttgtgcttcctctgtgcactgcttctcatgtctgttgtggcaactgagccatccaaagatgagacacaagcagaagaaccaaagacacagccagatgcctggggaaaaagtggaagtggggggcatgatggaagctggggacacggtggagactgggggcatggcggaggaggacacggtggaagacatggcggaggaggacacggtggaggacatggcggaggatgcagatgctgcggtcgaaagggctgcaaatgttgctgaagtaaaaatcacaaatatatgaactgaacacactcatatacttgagtgtactccatgtaataactagtatatatgtaagaaataagaaataaaagcatggactcta

SEQ ID NO: 247884 - DNA, 247 bp, Glycine max
tcctcttctttcatatttctgcctaacggtatcgagggaaaaaatttgcctgagaacacagatgccaagcaccgcactattgcgccaacaattgcggtttctttggcagcccttccacgcaaaatatgtgctccaagtgctaccgcgatttccaactcaaggagcagcaatctttcaacgccaagatggttctcaatcagtcgctggttccttcaccgccaccggcggtgatttttcagccgtcgtc

SEQ ID NO: 247885 - DNA, 438 bp, Glycine max
  unsure (1)..(438): unsure at all n locations
cggtcgacccacgcgtgcgggccgcgtncgaacaagtacgtgaaagcatactcacaaaacgtgaaattcaagtacattgcagttggtgacgaaattcaccctggtgactctttagcagggtctgtacttccagcacttgaaaacattcagaaagcaatttctgccgccaatttacaaggccaaatgaaggtgtcaacagcaatagacaccactttacttggcaactcttacccaccaaaagatggcgttttcagcagtagtgcaagttcatacataagaccaattgtaaactttttagcaagaaatggagccccacttctcgcaaacgtgtacccttacttcgcctatgttaacaaccaacaaagcattggtcttgactatgccttgtttactaaacatggtaacaacgaggttgggtaccaaaacctgtttgatgca

SEQ ID NO: 247886 - DNA, 332 bp, Glycine max
ggaaaaaaaaagaaggaaatgcttccgagattgttattaagtcacaagcacttcaacagcttcaaatcaatttaccccttttcaggaaactatgtattttgaaaggtgtaactccccgggagcccaagaaaaagttcaagggaactcatcaaacttattaccatgtcaaggatgtttccttccttcatcacgagcctttggttgaaatacatagagcgataagagtgcatgagagaaaaattaagaaagccgaggcaaagaaaaaccttgaacgtgctaacaggcttcgcgagaaaacacccaaaccgaagatcgctaggattattcggcag

SEQ ID NO: 247887 - DNA, 437 bp, Glycine max
  unsure (1)..(437): unsure at all n locations
ttcccgggnggaggcacgcgtgcggtccttattctctctggctttctctcttggactcgctcttcttctcatcaagcacagagttacagacgcaccgatcttccgattgtctttcgtcttggattatgagctcgaaagagagacccactcttggtggcacgcggattaagacccgcaaacgaaatattgctgcgccgctggaccctgcagcattctcggatgcagtggtccaaatttatttggataatgctggtgatctggaacttattgctaagagtattgaatcttcagaccttaactttttaagatacggtgacaccttttatgaggatgctttcactgggggtcgttcacaacctggaactaccaagcctgatgagggggaccgccacccatactctataatagagtgtgagcctaagcgtgaagtcatttta

SEQ ID NO: 247888 - DNA, 284 bp, Glycine max
tgcatacgatcatgaacacaagctgagtcaaaaaggtagcaccaacgtcaaagaggaagaggtttctgtggagagggagttccagcaccttctggtgccatcatggaggaaccaattgacagagagagcctttgtggtcagctttgcactcagcatactcttcagcttcattgtgatgaagctcaacctcaccactggtattattccttcactcaatgtctctgctggccttatggggttcttctttgtgaagacatggaccaagttcttggaaaaatctaaca

SEQ ID NO: 247889 - DNA, 533 bp, Glycine max
  unsure (1)..(533): unsure at all n locations
gggatggncccccnttnngggcgccctagctcctacctcacttccctccgcgacgnctgtaccggtccggaattcccgggtcgacgccacgcgtccgcttcatgagacagccccgcatctggtggattccatatgtgcatatcgtggtggctacggggcaaaggaaagaagaaaaatagagagttcattttttggtggtaaaatatgtggtgttgctgcaactaatgctcttgagttgggcattgatgttggagaaattgatgccactctgcatctaggatttcctggtaatattgcaagcttgtggcaacaagctggtagaggtgggaggagagatagaccatctcttgctgtctatgttgcatttggtgggcctcttgatcaatacttcatgaaaaatcccaagaaactctttgaaagaccaattgaatgttgccatgttgattcccaaaacaagcaggttcttgaacaacatttggtctgcgcagctcatgaacaccctttgagtgtgaactatgatgagcatattttgg

SEQ ID NO: 247890 - DNA, 513 bp, Glycine max
  unsure (1)..(513): unsure at all n locations
gatgccatgagctcctcccacccatcactggacngctcgtaccggtccggaattcccgggtcgagccacgcgtccgcttatataatccattcttctccctggttttttctttcttcattccccattaccatgggttgcctttccaccaccccttttcttcccttcactgcaaaaaatgcttctactagaatccctcctcccacatcattctcttacagcaagcaacgtagtaacagggatcccaagaaggttgtctgcgcctgcatcgctcctcctcaaaacttcaagagccaggactcttccgccattcatttcaatggttcgtccaaatcagagcaattgagcactgcgcgggatcatgaggatgattctgatgttcttattgagtgtagagacgtgtacaagtcttttggggaaaagaaaatcttaaatggtgtcagcttcaagatcaagcatggtgaaactgttggaataaattgtccctctgggactggcaaaactacaagtttgaag

SEQ ID NO: 247891 - DNA, 535 bp, Glycine max
  unsure (1)..(535): unsure at all n locations
ggggtgcgcnnnnnncgcggtccagcgctttatgcagcctgtactggacngctcgtaccggtccggaattcccgggtcgacgccacgcgtccggcagcttctaatgatatttcactaagtggaatgattcttccagctggtgtgtatttgtggcaaataccacattttatggccctagcctatttgtgtcgtgatgactatgctgctggagggtttaagatgtactctcttgctgatgcatctgggcatagaacagcattggtggctttaaggaactctatatatctaatccctttggggttcttggcttatgattggggtttgacttctggatggttttgtcttgagtccgctgcacttacacttgcaataagcgctgcagcattttcattctatagaaaccgtaccaaagaaaaggcaaggagaatgttccatgccagtcttctttacctncctgtgtttatgtctgggcttttgattcaccgtcgttctgaaaacgacaatttttaatagacaaagcaaagggtttggtgaa

SEQ ID NO: 247892 - DNA, 542 bp, Glycine max
  unsure (1)..(542): unsure at all n locations
gggatgccncnnttnnggnnttatgtgactcttcttattgccctacggacngccgtaccggtccggaattcccgggtcgacccacgcgtccgaacaaattgaagcactatcagaagaagaacgtggtcaaattatgccgactttgtcagagagattaaagctttcaaagttgcagccaatttccacagatggcatggacatgggtacagaaggtggtggtgctgctggactgaaggttgaggagaaaaaggcagagaaaacagcttttgatgtgaagttggagaaatttgatgctgctgcaaagatcaaggtgattaaggaggtaagagcatttaccaacctaggattgaaagaggccaaagatcttgttgaaaaggttccagttgtgctaaaacaaggagtcacaaaagaggaggcaaatgaaataatagaaaaaataaaagctgctggaggagttgcagtcatggagtagaattttgattggtggttgagatcacaattctttaatttccaatatgtttttnaaggtgccattcgcgtgg

SEQ ID NO: 247893 - DNA, 333 bp, Glycine max
tcatggtgcgggaaaatggcaagaggaagaaaccaaacattctggtgactggcacaccggggacaggaaagacaactgtgtgcactgctctagctgaagccacccagctctgccacatcaatgtcggagaattagtcaaagaaaagaacttgcatgatggatgggatgatgagcttgattgttaccttcttaatgaagacttggtttgtgatgaacttgaggatgttatggaagaggggggaaacattgtggactaccatggctgtgatttctttcctgagcgttggtttgattgcgtggttgtacttcaaactgataacaccattttgtatg

SEQ ID NO: 247894 - DNA, 511 bp, Glycine max
  unsure (1)..(511): unsure at all n locations
gtaacatgagccccctccgcgccctcgcgaccgccgnaccggtccggaattcccgggtcgacccacgcgtccgcacacacacagctagcagatattacatacacgtgaatcactaattaagccatggaggagaaatcaatagctgggttgcgcttcctcttccttgttctctttgttgctcgtaagctactacttttaataagaagttgtggtgcaaactgaggcaaagacttgcgagaacctggctgatacatacaggggtccatgcttcaccactggcagctgcgatgatcactgcaagaacaaagagcacttgctcagaggcagatgcaaggacgattttcgctgttggtgcaccaaaaactgttaaatggatccattcactccaacgtgaagaagatgcatgcagcgctattttataaaaaataaaactactatatactatatataataagactggcgctgcatcaatgacctatgtattataggatatattattaccgatgtcaga

SEQ ID NO: 247895 - DNA, 374 bp, Glycine max
  unsure (1)..(374): unsure at all n locations
ccgggccggaattcccgggtcgagccacgcgtncgcttcttcttcttttgtttctttgtttttctgcgtangcaaagagagagagagaaaagcgtgaatcatgtcggacgaagagcatcacttcgattctcaggcggatgcgggagcgtccaagacgtatcctcagcaggctggtaccattcgcaagaatggctacatcgtcatcaaatccaggccttgcaaggttgtagaggtctctacgtcaaagacaggcaagcatggacatgcaaagtgtcactttgttgcaattgatatttttaatgggaaaaagcttgaagatattgttccatcatcccacaactgtgatgttccacatgtgaatcgcactgactatc

SEQ ID NO: 247896 - DNA, 507 bp, Glycine max
  unsure (1)..(507): unsure at all n locations
gttgagccggtagtgagtctgacnatgactatcatncgatancccttccggttcggaattcccgggtcgacgccacgcgtccgcctaagtctttgggaatagtgctgcaatggcttcaagtcaggaggaggtgacccttgggggagctactggaagcccatttgtgtgcagggttcatattgccctcaagttgaagggagttcaatacaaatatgtcgaagaaaatttgaggaacaagagtgaactgcttctcaaatccaacccagttcacaagaagattccagtgtttattcacaatgagaagtccatagcagagtctcttgtgattgttgaatacattgatgagacatggaagaacaatcccatcttgccttctgatccttaccaaagagccttggctcgtttctggtccaaattcattgatgacaaggtttttggtgcttcatggaaagctgttttcacagctgatgagaaagagcgtgagaagaatgttgaggaagcatttgt

SEQ ID NO: 247897 - DNA, 512 bp, Glycine max
ggttagagcgggccgtgtcgatgcaccacgcactattgcaacgccgtaccggtccggaattcccgggtcgacccacgcgtccgtttctctctctagaattctcagatttgcggggcgagatgatgcagcagccaggacccggcatggcacctcccaccatgggccagcagccgccgcaacagtaccagcagcctccgccgcagcagcagcaaccctacgtcatgatgccgccgcaggcccaggccccgcaggccatgtgggccccctccgcccagcctccgcctcagcagcagcccgccagcgccgacgaggtccgaaccctctggatcggggatctgcagtactggatggacgagaactatctctatacctgctttgctcacaccggcgaggttacatcggttaaagtaattcgaaacaagcaaactagtcaatctgaaggttatgggtttattgagtttaatagtcgtgctggagctgagagaattcttcaaacatataatggggcaata

SEQ ID NO: 247898 - DNA, 271 bp, Glycine max
tctgtcctgaattccctggtctacccactctttctcccactctttctaaaaaaaaaaaaaaataaaaaaaaaaaaaaaaaaaaaaaaaaaaaatgtaaaaaataaaaaaattaaataaacatacatacaccttcatataatcttatatactataatacttataacatttaactaaccattatttttcttctttttatactctaaaatcctttgatttacccaacttattcaactttttatcccatccaaatttttccattttcctttttat

SEQ ID NO: 247899 - DNA, 511 bp, Glycine max
agtttagggcttcctgatattcgctaggacgctacctctctaccgcgtccggaattcccgggtcgacccacgcgtccgaacaaaagattaggttttgtgatgtcgggcatggagaggcttcagaggatgttcgcgggtgcaggtggagcgctgggccatcccccaccggattcccccaccctcgattcctccgagcaggtctacatctcctccctcgcccttctcaaaatgctcaaacacggaagagctggggtacccatggaagtgatgggtctgatgttgggggagttcgtggatgagtacaccgttcgcgttgtggatgtgtttgcgatgcctcagagtgggaccggtgttagcgttgaagctgttgatcatgtttttcagactaatatgcttgatatgttgaagcaaactggaaggccggagatggttgtggggtggtatcactcgcatcctggatttgggtgttggctttctggagtggacattaatacgcaacagagttttgagg

SEQ ID NO: 247900 - DNA, 522 bp, Glycine max
  unsure (1)..(522): unsure at all n locations
agtntagatgcgtntggctgaggtctagctcatgactggcctactgtaccggtccggaattcccgggtcgacccacgcgtccgaccaaacgtccaaggcgtaaatagggacaaagttggcagacgatatcacgatatatggggcacatgatacaggtaccagcggatgtacacatgtctagagctgcactaaaaggatgggcgagcccatgctcaaatggaaaacaagcgctgaaacttactaaaagctgttggtacacacgtatgtatagccattaatggcaaaagaagtggtagctccattagcaagatgctctgcataatgctcaacgttatgacagaatgccacaggaagctgaacctcaggctattgaagtgtctaaacgctacgcacaagtaacagaaatgccacccagtgcacagaatactatgagattataagcacctggagctaagctacaagatctgtatagccacatgaccatactggggaaagaagcatgtgcatctatagctgctgttt

SEQ ID NO: 247901 - DNA, 215 bp, Glycine max
catggcgcggaaaagaagagattgtgaagaaggctcaggaagcccttttggtaagagccaaggctaactcagaggcaactctgggaacctacaagggtaactcacagcttgctgatggtgcctcagagagcctccatgtttcgaactacagctactgatcaatcgaagttggtgttgtttgaagagactagtgcgagtaggaatcggtattatgg

SEQ ID NO: 247902 - DNA, 520 bp, Glycine max
  unsure (1)..(520): unsure at all n locations
agattaggcgtgtcctgtggaactgcaatctatgacnngcactgtcgtaccggtccggaattcccgggtcgagccacgcgtccgaaaaaaaaaaaaaaaaaaaaataaaaaaaaaaaaaaaaaaaaaaaaaaaaaagggaaaggaaaaaaaaaaaaaaaaaaaaaataaaaaaaaaaaaaaaaaaaaaaaaaaaaaaaaaaaaagggcgtatctttttaaagtacccaattttacttccccttgaatccaaagctttaccttttttataagccctcctaatttcaatttattggccatttttttaaaaattctttactggaaaaaccctttttttaccaaatttaatagctttgaaaaacatcaccttttgcccagcttgattatttaataaaaggcccgaaacatcggccctttcaaacatttgcacaccctgaatgccaaatggaactcacctttaaattgcgaataaaacacgtcctttattttggatacccccactttcaccttatcattttccag

SEQ ID NO: 247903 - DNA, 515 bp, Glycine max
gttggagaggtgcctgtgccatgaatcccgcacgtgactgcactgctcgtaccggtccggaattcccgggtcgagccacgcgtccgctcagaaagattttcaaaacttgctgtccaattatggtggtgctccaagagacattgggactgagctgtccactgctgcccttagtccacagccatttggggtgccagacatgccttttaagcctggatgctcaagtgatattgccatcaatgatcctggggttttgaataatggcttgtgggctaatcagactcaacgaatgcgaacatatactaaggttcaaaaatgtggctctgttggaagatgtattgatgtcacccgttacaagggatatgatgaactccggcatgatttggctcggatgtttggaattgaaggacagctagaagatcctcaaaggaccgagtggaaactagtatatgtggatcatgaaaatgacattcttcttgttggtgatgacccttgggaagaatttgtaagctgtgtcc

SEQ ID NO: 247904 - DNA, 511 bp, Glycine max
agtaggccgttgcctgaactcgcaacggagtatcgtgctaccgctccggaattcccgggtcgacccacgcgtccgcccacgcgtccgcccacgcgtccgcccacgcgtccgacaacttctgctacttcctacgccaaccgcacttctgctccgcaattatcatgggcaaggtcaagatcggaatcaacggatttggaagaattggccgtttggtagccagagtggctctgcagagagacgatgttgaactcgttgccgttaacgaccctttcatcaccaccgattacatgacatacatgtttaaatacgacagtgttcatggacactggaagcatcacgatgtcaccgttaaggacgagaagacccttctcttcggtgacaagccagtcactatttttggacacagaaaccctgaagagatcccatgggggtcaactggagctgacatcattggtgagtccaccggaggtttcaccgattaagacaagggccggcggacattttatagggg

SEQ ID NO: 247905 - DNA, 504 bp, Glycine max
  unsure (1)..(504): unsure at all n locations
ngagagcgtgcctgtaccgcacacgacgtacgtcctaccgctccggaattcccgggtcgacccacgcgtccgcatttctctacttgcgaagtgtacggaaagacgattggagcctttctccctaaagatagtcctgttcgtaaggatccggcatactatgttcttaaagaagacgagtctccttgcatttttggttctattgaaaaacagaggtggtcttatgcctgtgcgaaacagttgattgagaggctgatttatgctgagggtgctgaaaatggcttggagttcacaattgtgaggccttttaactggattggacctcgaatggatttcattcctggcattgatggtccaagtgagggtgttcctcgggttcttgcatgctttagcaataatcttctcagaggagagcccctcaagcttgtggacggtggccagtcccagagaacctttgtttacattaaagatgctattgaagctgtcttgctgatgaatgaaaacccc

SEQ ID NO: 247906 - DNA, 400 bp, Glycine max
ggaattcccgggtcgacccactcgtccgcaaacttggcaagatgctcattttgggatctatcttcaagtgtttggatcccataatgactattgctgctggtcttagtgtaagagatccatttgtaatgccgtctgacaagaaggatcttgcatagtctgccaaagcccaatttgctgctcgtgactatagtgatcatcttgcactcatccgggcttatgatggttggagagatgctgaagcgcatcatgctggttacgagtactgttggcgaaattttctttcttctcaaacacttagggccattgactctcttctaaagcaattctcttatttgctcaaagatatttgtctggctaataacaattctgaaacctacaatacatggagtcatgaagagca

SEQ ID NO: 247907 - DNA, 278 bp, Glycine max
tttttgctccgatcaacatgaagttgatcaataaaccatcgaaactacgttcctttttgagccttttgtgctccattttgctgctctgggaattagctttcgtggctgcggaggacccttatagattcttcgactggaccattacctatggtgacatttatcccctaggagttaaacaacagggtattcttatcaatggccaattcccaggccctgaaatctattctgttaccaatgacaatttgatcattaacgtgcacaataacttgaccgagccg

SEQ ID NO: 247908 - DNA, 459 bp, Glycine max
ccggaattcccgggtcgacgccacgcgtccgacatcttcacaaactagtaaatagtaatattattcttcgaatccattttattattcataatgggtgttttcacatttgaggatgaaaccacctcccctgtggctcctgctaccctttacaaagctctagttacagatgccgacaacgtcatcccaaaggctgttgatgccttcaggagtgttgaaaaccttgaggggaacggtggccctggaaccatcaagaagatcactttcgttgaggatggagaaagcaagtttgtgttgcacaaaatagaatcagttgatgaggcaaacttgggatacagctatagcgtagttggtggagttgggttgccagacacagtggagaagatcacattcgaatgcaaattggctgctggtgccaacggagggtctgctgggaagctaactgtcaaataccaaaccaaa

SEQ ID NO: 247909 - DNA, 428 bp, Glycine max
ccggaattcccgggtcgacgccacgcgtccgattctagcgatgttgtaaccgctggaaaacatggaaaacgtactctagttaaaattgtggctgcgtcttctgctgccctggctcttctgctagttgttgtgacagttgttttctttacaaggaagaatgtggtgacaaggagaagagaaagaagacagtttggcgctcttctagccacagtgaataagtccaagctaaatatgccttacgaggttcttgaaaaagcaacaaattacttcaatgaggccaacagccttgaccaaggggaaccaggttctgtttataagggagttatcccatatggaaacactgtggccataaaagggcttatctatcacacaacacagtgcacagaatatttttactgtggggtcaattagctcaggggtttatatca

SEQ ID NO: 247910 - DNA, 435 bp, Glycine max
ggtccggattcccgggtcgacgccacgcgtccgctcagttacaagagagaaaattgaaggaagagctataacaccgagaaagcaaaatggcgggtctactatgtcaagggaagagttcgtggcctgaggttgtgggaacaaacggggtggtagcaatggaaaaaaatggaaagaaagaatgataaggttctgccagaatggttggaaaaaggatctatggtaccattggactttgggggcaaccaatttgggttttgggtcaccaaaatggggggggcaattcttgtgccaagaataggttactctggctatgcacctggatgtgtggattaagtgttggaaaaatatatatatatatataatcgccataattctctcacataaggggctcatatatatatatatatacactttacactctaatatagggtatca

SEQ ID NO: 247911 - DNA, 510 bp, Glycine max
ggtagagaggcctatggatgaacccgcagttattgtattgctcgtaccggtccggaattcccgggtcgacccacgcgtccggtttgatggtatctactactcggataaccgtagtaattctagagctaatacgtgcaggaaaccccgacttctggaagggatgcatttattagataaaaggtcaacacaggctctgcctgttgctttgatgattcatgataactcgtcggatcgcacggcctttgtgccggcgacgcatcattcaaatttctgccctatcaactttcgatggtaggatagtggcctaccatggtggtgacgggtgacggagaattagggttcgattccggagagggagcctgagaaacggctaccacatccaaggaaggcagcaggcgcgcaaattacccaatcctgacacggggaggtagtgacaataaataacaataccgggctcattgagtctggtaattggaatgagtacaatctaaatcccttaacgaggatcca

SEQ ID NO: 247912 - DNA, 408 bp, Glycine max
ccgctccggaattcccgggtcgacgccacgcgtccgcccacgcgtccgggaaaatggagaggatcagatgttgcaattaaaagaataaagaagagctgctgcgctggtcgatcttcagaacaagaaagattgaccatagagttctggcgggaagctgacatactttccaagcttcaccatccaaatgtggtggcattttatggtgtagttcaggatggaccaggagcaacattagcgactgttaccgagttcatggtggatggttctcttaggaatgttttgcttcgtaaggataggtatcttgatcgccgcaagaggctgataattgccatggatgctgctttcggaatggaatatttacactcaaaaaatattgtgcattttgacttgaaatgtgacaatttgctc

SEQ ID NO: 247913 - DNA, 514 bp, Glycine max
  unsure (1)..(514): unsure at all n locations
agtnaagccggtggctgaagaccagccatacggaggtagcctgctaccgctccggaattcccgggtcgacccacgcgtccgacttaatttccacttctaattaacaaagttaagcaagcattgacttggtacctataaggagtaatggctgtggctttgacgattgtgttgagcttgctctcggttctctcttctgcatcttgtgcacgaatggtgggggggaagacggaggtccccgacgtgagaacaaacagggaagtgcaagagcttggaaggttcgcggtggaggagtacaaccgcggtttgaaacagtggaagaacaatgggagtgaacagttgaacttttcggaggtggtggaagcgcagcaacaagtggtgtcaggaatgaagtactacttgaagatctcagctactcataaaggggttcacaaaatgttcacctcttgtgtggtggtcaagccatggcttcattccaagcaacttcttcattttgcgcctgcaggaccattcaata

SEQ ID NO: 247914 - DNA, 505 bp, Glycine max
ggagagcgtggctgaaccgcatacgcgatacgtgctaccgctccggaattcccgggtcgacccacgcgtccgcccacgcgtccgccgtcgaggtcttgcccattcaatcaaagcacaaaaatggaggtgactgttttcactcctgcactggaaggaattaagcttgtaaaatcagagcaaggagaaattttgacccagcctttcttggatgcttgcaagcatatacttcctgttatagataagtttggagctgctatggcccttgttaaatctgacattggtggtaacatatcgagattggaatctaagtactcctccaatccaaccaaattcaactacctgtacagtttggtacaagttgaggttgaaactaaaacggctaaatcatcatccagttgtaccaatggacttctttggcttacaagagcaatggatttcttggtggcattgttccaaaacttaattgagcatgcagattggtcaatgtcacaagcctgtacaaatt

SEQ ID NO: 247915 - DNA, 436 bp, Glycine max
ggaattcccgggtcgagccacgcgtccgacgagactcatacattgtgctgccaattatagtaactctctatttctctttccatctggcaaggtctgaagaagaaacatgtgtggaagtgccatcatcttagactctaatggtgtgaaacgtgggcgcaaactctccgcgcacgagctctatgctgagctcgagcctttctctgacactcttggctttgataccccccatttcaaaaacccaccacacctgtgcaaaatttcacacacaaaagaggtgtcgtatcatgagaaaaagaaaaaaaacagggtgggtgcagcaaagaagaagaagagtgatagtgggcgagctcgtaaaaacgtgtacagaggaatcaggcaaaggccatggggcaagtgcgccgcggagataagggacccacacaggggtgttcgtgtc

SEQ ID NO: 247916 - DNA, 511 bp, Glycine max
agtaagagcgtgcctgtgtcgtatccgccactgatgcactgctgtaccggtccggaattcccgggtcgacccacgcgtccgctaatccctatttttcttcctcagtagtgtcatttacgcttctcttctctgcggcagctatgcctaaccctaaggtcttcttcgacatgaccatcggcggtcaatctgctggccgcatcgtgatggagctctacgccgacgtcactccccgcaccgccgagaacttccgcgcgctttgcaccggcgagaagggcgtagggcggagcggcaagcccctccactacaagggctcgtccttccaccgcgtgatcccgagtttcatgtgtcagggtggcgacttcaccgccggaaacggaaccggcggcgagtcgatttatggcgccaagttcgccgacgagaacttcgtgaagaagcacaccggtcccggcatcctctccatggcgaacgccggtcccggaaccaacggatctcagttcttcatttgcacgga

SEQ ID NO: 247917 - DNA, 517 bp, Glycine max
  unsure (1)..(517): unsure at all n locations
cgttaggagagtgcctgtggctggtaccgccctcantcnattgctgtaccggtccggaattcccggctcgacccacgcgtccgaaaaaaaaaaaaaaaaaaaaaaaagattaaaaaaaaaaaaaaaaaaaaaaaaaaaaaagaaaaaataaaaaaaaacaaaataagggctcccgttcttcaggatcctaaccttccatacgcatgcattcaacattcatacctcttcttttgtgtcacctaactgcatttctctgcccttcattttacaacatcctttctggaaaacccctgacgttccccaacttaatccccttttttcacatccccctttcgccaattggcgtactatcccatagccccttcccaatcgcccttcccaccatttgcccatcctcattgcccattggcaccccctttttacccgccctttaagcgctttccctttgtggttccgtacatcttgaccgtttcactggcccagtcccttatccctgatacttttcttttctcccctc

SEQ ID NO: 247918 - DNA, 399 bp, Glycine max
cggaattcccgggtcgacccacgcgtccgctcttttcactccctctgcatatatgatatattcttccataattctcatgtttaagacgttatagtttccttgaattctcgtctgggttcaacctgtttgatgtttagactgaatcagtttgaattagtggagaatatctgataccgaaaaaaagattcagctctttttcttgtttctttgtcacaatacttggatttttgagaatctggagacatgggttgttgtgtaagtaaagattcagagccacaacacaatggttacagacatggtggaactggtggagtgcacaaccagaagactcatgaacctttagtcaaccaatcaagagcacctgcaaatcaaccttatcatttacctgaaaagcatgct

SEQ ID NO: 247919 - DNA, 513 bp, Glycine max
  unsure (1)..(513): unsure at all n locations
agtagtagcttggctgatacaagcactatgacgtcacgtcctaccgctccggaattcccgggtcgacgccacgcgtccgaacaatttaattctagtttccactctccttatgttgcttcaactccacttcaccccggcaaaagccgccatcaaaggaggctactggtactccgaaagtggccttgcagtttccaacattaacccctctcatttcacccacctcttctgtgcatttgcccacctcgaccccaacaccaacaaagtcaccatttcctcgtcagactcatctcagttctcaaccttcactcaaaccctccaagcaaagaacccttcagtgaagacccttttgtccataggcggcggtttcggtccttctttggctgcaaatttctccagaatggcaagacaagccaacaccagaaaatcattcatagactcttcgatccaacaagccagatcgaacaactttctcggacttgacctaaattgggagtaccctttctcggacacaan

SEQ ID NO: 247920 - DNA, 507 bp, Glycine max
  unsure (1)..(507): unsure at all n locations
nggagagcggtgctgaaactcgcatacgacgtaacgtgctaccgctccggaattcccgggtcgacccacgcgtccgctcagattgcaattgcctcttctcttctcccagaatcggtcactaatccgatatcatgaagctcgatacgactagtctcgaatcgtttcccacactgattgcacctcaaaacgacgtcgccggagaactctccgccgctccgttctttgaccttccgaattccaatgacttcgatgggttcttgaaagacgctattcagatggtgaagcccgcgaagggtactacaactcttgcttttatatttaaagagggtgttatggtagctgctgattctcgagctagcatgggaggatatatatcgtcgcagtctgtgaagaaaattatcgaaatcaatccgtatatgcttgggacaatggctggtggtgctgctgattgccagttttggcacaggaatctcgggattaaggggatctttgcaaccttgagcttac

SEQ ID NO: 247921 - DNA, 402 bp, Glycine max
tttggtggtccggggttggggttggttttttctgtaacgtgaaaaatgtcttgctgcggtggtaactgtggttgcggaagctcctgcaagtgcggcaacggctgcggaggctgcaagatgtacccagacttgagctacactgagtcaaccaccaccgagaccttggtcatgggagtggcacctgttaaggctcaatttgagggtgctgaaatgggtgtgcccgctgagaacgatggctgcaaatgtggaccaaactgctcctgcaacccctgcacttgcaagtgaggtgttgggagagcaagcttcaagcagagatagcccttaattaggaataatgataaactattaatgtgtagctaaaaacttatgtattatgtctgtgatggttttcgtgcactctgg

SEQ ID NO: 247922 - DNA, 454 bp, Glycine max
ggaattcccgggtcgacgccacgcgtccgcccacgcgtccgcacacactaagttctgaaaaatgagttccaaagtttttcttattctggttaggttcatggccactatacttttgatctcctctgaggttgcacccgatgatgcataccagaattttgacaaaacagatgggaagcgtagtgcaaatggggtagatgaaagcaaatattggcgtggtggctatggcgactatggtggttggcgtggtggtggttggcgtggtggctatggaggctggcgtggtggctatggtggtgggcgtggtggctatggtggctggcgtggtggctatggtggtgggcgtggtggctacggaggttggggtggtggctttggccctaacgaacataatgaggctgggattgatgctagccctcacaactaagaaggaaacttgctaaagcttatataggat

SEQ ID NO: 247923 - DNA, 510 bp, Glycine max
gttatagccgtggtgaatacgagcctacgtactgctgtaccggtccggaattcccgggtcgacgccacgcgtccgtgatgatgttgatttagagagaattgcaaaagatactcatgggtatgttggtgctgagcttgctgccctttgcactgaagctgctttgcaatgcattagggagaagatggatgtaattgacttggaggatgagacaattgatgcagaagtactgaattccatggcagttacaaatgagcatttccagactgcccttggaacaagcaacccatcagctttacgtgaaactgttgttgaagtgcctaatgtcagctgggatgacattggaggcctcgaaaatgtcaagcgtgaactgcaagagactgtacaatatccagttgagcacccagaaaagtttgagaagtttggtatgtctccatcaaaaggagtactcttctatggtcctccgggatgtgggaaaactttgttagccaaagcaattgctaatgaatgtca

SEQ ID NO: 247924 - DNA, 233 bp, Glycine max
aaaaaaaaaaaaaataaaaaaaaaaaaaaaaaaaaaaaaagaaaggaaaaaaaaaaaaaaaaaaaaaaaaaaaaaaaaaaaaaaaaaaaaaaaaaaaaaaagggaaaaaattttagaggtttcaatattaccaaggcttacttacaaattattgcaatttatatattgtaatataaattaaattaaatgcaattaatttgcacaacgttttaaactggaaaaacctgtaaaaa

SEQ ID NO: 247925 - DNA, 460 bp, Glycine max
accggtttcggaattcccggctgcgagccacgcgtctcgcccacgcgtctcgacctgcttctggggttagagatgtgaatgcaagttctgttgctgttgaaaggttgcctgatgagatgaatggcatgaaaattagggatgaaagggaaatggaagcaactgtggtagatggaaatgggactgaaacaggacatataattgttactaccattggtggtaaaaatggccagccaaagcagacaataagctacatggctgagcgagttgttggaaatggatcatttggtgtagttttccaggcaaagtgcttggagacaggggaaactgtggctataaagaaggttcttcaagacaagaggtacaagaaccgggaattgcaaaccatgcgtcttctggatcaccccaatgttgtaactttgaagcattgcttcttttcaacaactgaaaaagacgagcttta

SEQ ID NO: 247926 - DNA, 514 bp, Glycine max
  unsure (1)..(514): unsure at all n locations
agtnagtaggccttggtgaagtactgatcatgacgtacgtcgtaccgctccggaattcccgggtcgacgccacgcgtccgaatttgcacagtaacatattccctgacaacacaacaatgagtcgcaagagagacagggcagctgacttttcccgccacgactccgccaagcgccgcctccccttgccggagcccgcggaggaggagacgcctacgatgagaccggcgccgccgtccgcggtggtcgtgatgggcctcccccaggactgctccgtcctcgatctcaagtcccgattcgagatctacggcgccatctcccgcatccgcatcgaccgcgacgccgtcggatacatcacctaccggaccaaggactccgccgacgctgccatcgccgccggcctcgaccccaccttcggaatcaccgttaactctaaaatggttcaagtgttgtgggcaacggaccctctaaccatgtggaaggaaagagttggtaatagcaggaacaaaagttctat

SEQ ID NO: 247927 - DNA, 508 bp, Glycine max
agtaggccgatcggtgaaatacgcatatgtgtcactctctaccgctccggaattcccgggtcgacccacgcgtccgcccacgcgtccgttcaacttcagcagccgcgcctctaacttgtagcagcgatacctcgtctcttatcactaaaaaatgaccaagagaaccaagaaggccggtattgttggaaaatacggcacccgatatggtgctagtttaaggaagcaaatcaagaagatggaagttagtcagcacagtaaattcttttgtgagttctgtggaaagtacgctgttaagaggaaggccgtgggtatttggggctgcaaagattgtggaaaagtgaaggctggaggtgcttacacattgaatactgcgagtgctgtcactgtccggagcaccattcggaggctgagagagcagactgagagttgaaagcagtttacacttttcatttgtttccaaagcttattttaaaattatcatacaattttggcaggtctatggtaagaa

SEQ ID NO: 247928 - DNA, 452 bp, Glycine max
ccggaattcccgggtcgacccacgcgtccgcggacgcgtggggtctgcaccgtcagcaatattctccctgggtttaggatggggtgcgcagatgggtggtgaacttatggattttatagttgttcttcgtgatatgaaagctgtaaagacattctgcagtcatatgcatttttctcttggtgctggttgtagtgctgcagcagggcctgttgggagagtgcttgaagcagatattcgtgctggtgacagaggctctggcatgtgttacacttacagttgcagtaaaggtgcatttgtgggagtttctttggaaggaaatatagttgcaaccaggatggatgccaatttgcgcttctatggtgatccttacctcaccacatctgatattctactgggaatggtggacagaccaaaggctgctcaacccatgtatgccagtcttcaagaactat

SEQ ID NO: 247929 - DNA, 464 bp, Glycine max
ccggaattcccggggggagccacgcgtccgcacggctgagggatggtgaaacccctaatgctgtaccatcacatgcaaaattacatggactgcttcttgaggagcgtattgagaatggttatagtaatcctgcacgcctagtgaagttgaagaaaagacaattgaatggaccagcagttgaaacaagagctgggaagagttacatggagaaatttctggaaactccttcacctgatcataaaatggtttgtgaaacttcaatctttccattgcctgtgaaacagacatcagatgatgctagcgaggctgggattaaaattcttgaaatcagcagcattagtcctgtgaaaaagtcattgggaaataaaaacacctattcatcccctgatgagaaggaattagaactaaaaccattttcacaaatggatggtgggacaaatggagatcttgtgaaggtgaaagaa

SEQ ID NO: 247930 - DNA, 517 bp, Glycine max
agttagagcgtgtcctgtggactgaacccgacccgttcgctacctgcggtaccggtccggaattcccgggtcgacccacgcgtccgtagaccaattcatgacaatccagatgaaatgactgctgctttgtatctacagagtcagtatagttagccaggctttgatatttgtcacccgttcgcgcagctggtccttcatcgaacgccctggattgctgttagtgactgctttcgttattgctcagctgattgctacagtaatagcagtgtatgccaactggggctttgcaaggatccaaggaattggttggggttgggcaggagtgatttggctctacagtattgtcttctatttcccacttgacatcatgaagttcgccatccgctacattttgagtggcaaagcatggaacaatctcctagaaaacaagactgccttcaccaccaagaaagactatggtaaagaggagagggaagctcaatgggctcttgctcagaggaccctgcatggacttcaa

SEQ ID NO: 247931 - DNA, 507 bp, Glycine max
  unsure (1)..(507): unsure at all n locations
ggagtngtcgatgtggactgaaacaacgcacttcaatgtattgctcgtaccggtccggaattcccgggtcgagccacgcgtccgcccactcgtgcggaaactattgccaaacatgcatacaccacgaagattgtgctctggctgttttatggatggaaaattctatgtgattggtggcatgtcaagtcctactggttcattgacttgtggcgaggagtctgacctttagacgagaaactggcggataatagagcgtatgtatccatatgttaatggggctgctcaggcacctccacttgtggcacttgtggataaccagttgcatgcggctgagcatctaaccaacatggtgaggaaatatgacacggaaaggaacacctggagtgaatcgggaaggcttgcagtacgtgccgattcttctaatggatggagcctgtctttcaaggctcgtggagagaaacttctgcttgtgagtggacaaaggagtccagaaggtcaagctgtttn

SEQ ID NO: 247932 - DNA, 514 bp, Glycine max
agttagagagtgcctgtgcacgtatcccgcaataactcattgctgtaccggtccggaattcccgggtcgacccacgcgtccggtcacagattcagaagctttgagaaagagagtattttatggtggacttgagcacgagttacaaaatgaggtatggggtttgcttttgggatattatccatatgaatcaacatatgctgagagagaattcctgaagtcagttaagaagttagaatacgagaacataaagaaccagtggcagagtatatcctcagcacaggctaaaagattcacaaaattcagggaaaggaaagggcttattgagaaagatgtggtgagaactgatagatcactcgctttctatgaaggcgatgataatccaaatgtaaatgttctgcgagatatcctgttgacatattcattctacaactttgatcttggttattgccagggaatgagtgatcttctatctccaatattgtttgtgatggataatgaatcagaggcattttgg

SEQ ID NO: 247933 - DNA, 378 bp, Glycine max
tcggaattcccgggtcgacgccactcgttcggattgcaagaggaaaagaagaagagaataggcttcaccgaaatcaatttcccacagaagcaaacagatcgttggagttggaaaacaaaacaagagaaaatgggtggacgcaagtgtttgttaacgttggtgttgagtttggtgttgatgatgagtatggcataggcgcaatctggtactagcgcatactgcgcccaggagctaattccatgcctggactaccttaatggcacgatcaacccaccaagctcctgctgcgaccctctgaaacgaacagtgcaaaacgaactcgcctgcctctgtaacatctacttctgccctggccttcttcaaagcgtcaatgtcact

SEQ ID NO: 247934 - DNA, 512 bp, Glycine max
aggtagtgccttggctgaaacccgcatatgagagtatcttctctaccgctccggaattcccgggtcgacccacgcgtccggcggaagaacgaagcctcctcgttcttcttcttctgcgctttctctctccctctctagaaccgtaaccgtcgtttctttctttctctctcctcaaccagagataaagagtcaccttcttatttttctgaatctcgcggcgttgttctttctgctgctgcggctgtggttccggcggcgatgggacagcaatcgttgatctacagcttcgtcgctcgaggcaccgttatcctcgcggagtacaccgagttcaccggaaacttcaccggcgtggcggcgcagtgcctccagaaactcccttcctccaacaacaagttcacctacaactgcgatggccacaccttcaactacctcgtcgataacggattcacttactgtgtggttgccgttgagtctgctggacggcagattccaatggctttccttgaacgaaa

SEQ ID NO: 247935 - DNA, 506 bp, Glycine max
agaagcctgtggctgaacacgcatcgacagtactctctaccggctcggaattcccgggtcgacccacgcgtccggatggcttctcctcttcttactccttacaagatgggcaaattcaatctgtcccatagagttgttttggcaccgctgaccagacagaggtcttacgacaacgtcccacaaccccatgccatcctctactactcccagagaacttccaacggaggccttctcattactgaagccactggcgtctctgacacggctcaaggctatccgcaaacccctggcatatggactaaagaccatgttcaagcttggaaacccattgtcgatgccgtccacgccaaaggcggtgttttcttctgtcagatttggcacgttggaagagtttcagattcagtttatcagccaaatggacaagcacccatatcttctacggacaagccactcacaccccaaattcgaagtaatggcattgatcaagtacaatttaccccttcaag

SEQ ID NO: 247936 - DNA, 447 bp, Glycine max
gaattcccgggtcgacccacgcgtccgggatctctttccattgaaacggttcaagtggcttattgagttttccatggatcatgattggagggcagcagtgagaaaactgttgaacctactgcttgatggaactgtaaatacaggagatcatccttccttgtatctcgcgctttcagagatgggtctccttcacaaagctgtaacgagaaacagcaagcagttagtggagtgtcttttgagatatgttcctgagaatatttctgataaactaggacctgaagacaaggcactggttgatggcgagaatcagaccttcttgtttagacctgatgttgttggtcctgctggtttgacaccactccatatagcatccgggaaagatggttctgaggatgtacttgatgctatgactaatgatccttgcatggtgggaattgaatcatggaa

SEQ ID NO: 247937 - DNA, 505 bp, Glycine max
gtagtgcctgtggactgagtacacgatccctacgctactgcctgtaccggtccggaattcccgggtcgacccacgcgtccgcggacgcgtgggtattattcgtgatccaatctctgcatttaatgtctcagctgatggggagtttcttgcgtgacctcaagggtgcattttgacaagaacttatttcttctgttttggtgggttgacatgcagtggaacaccttcaggagacattgtagttgtaaattcaacaaatatgcagattcacacaatgataaaaaaggctcaccttggcatagtaactgctttagcattctcccctgattcaagggcggtggcttctgtatccatggattcaagtgcgagggtaacaataattgaagagaagaagactaatgggcttagcttgtggattgcattatttatcatcctacttgcagtagccgcttacttcctgaggcaagaaattgaaaagtgaaggttccaagattttgcttattgaaat

SEQ ID NO: 247938 - DNA, 504 bp, Glycine max
gtagtccttgctgataagcacttgtgtatcgctctaccggcccggaattcccgggtcgagccacgcgtccggtcaagagatcataaaccaggttgcaacaaagaaaagaagcgtatcgaggcatctggggggtatgtctacgatggatatctcaatggacaacttaatgttgctcgtgcacttggtgactggcacatggaaggaatgaagagcaaagacggtggaccactgactgcagaaccagaacttatgactacaaaactgactgccgaggacgaatttctcatcattggttgtgatgggatttgggatgtatttcggagccaaaatgcagtggattttgctcggcgcatgcttcaggagcataacgatccagccatgtgtagtaaggatctggttgacgaagctttaaagagaaaaagtggagacaatttggctgcagtcgtggtttgctttcaacaacaaccttcttctaacttggtggcaccacgctctaaaatacaa

SEQ ID NO: 247939 - DNA, 384 bp, Glycine max
taccgctccggattcccgggtcgacgccactcgtccgaaaaaaaaacataaacaaaaaaggataaaaaaaaaaaaacaaataaaagcatatgggggatatgaatacaatggatataaaaaatggacaacttaatgttgctcgatgcacttggtgactgacacatgagaacgaatgaaaagcagagacggtggaccactgactgcagatccagaacttatgactacaaaactgactgccgatgacgaatttctcatcattgattgcgatgggatttggtatgtatttcggagccaaaatgcactggattttgctcggctcatgcttcacgagcataacgatccatccatgtgtagccaggatctggttgacgaggctttaaagag

SEQ ID NO: 247940 - DNA, 514 bp, Glycine max
aggtaaggccggtggctgaataaagccatacgacgtaactctctaccgctccggaattcccgggtcgacccacgcgtccgaacctaattgcaaagatgaataccaagcccgttttcttcttgtgcttcctctgtgcactgcttctcatctctgttgtggcaactgagccatccaaagatgagacacaagcagaagaaccaaagacacagccagatgcctggggaagaggtggaagtggggggcatgatggaagctggggacacggtggagactgggggcatggcggaggaggacacggtggaggacatggcggaggaggacacggtggaggacatggcggaggatgcagatgctgcggtcgaaagggctgcaaatgttgctgaagtaaaaatcacaaatatatgaactgaacacactcatatacttgagtgtactccatgtaataactagtatatatgtaagaaattagaaattaaagcatggactctattcgtgcctgggcttgcataagttg

SEQ ID NO: 247941 - DNA, 444 bp, Glycine max
ggaattcccgggtcgacccacgcgtccgtctagttcgagttcgacaacaaacgtggtgactctgaaggcggcgtgggttctcccggagcggaggcagaacatccgtgaggtgtacgaggtggggcggaagttggggcagggtcaattcgggactaccttcgagtgcacgcgccgcgcgtccggggggaaattcgcgtgcaagtcaattcccaagcggaagctgctgtgcaaggaggactacgaggacgtgtggcgggagattcagataatgcaccacttgtcggagcacgcgcacgttgtccgcatcgaagggacgtacgaggattcctcggcggtgcacctcgtcatggagttgtgtgagggtggcgaagtgtttgacaggatcgtgcagaaaggacactacagcgagagacaggctgccagggtgataaagacgattgttga

SEQ ID NO: 247942 - DNA, 513 bp, Glycine max
agtagtaggaggcctgtggatgtaccgcagcctaccgaactcgtccggaattcccgggtcgacccacgcgtccgaaaacaatcaacaatagcttgctagctactcctgttgctgtgagaaccgttgatgtagatgcgttgcaagcaagatttagagactccaacaataaaagccatgcttaacacctaccatgcctccaaactctcatcaaaccagtgtggttctagccttgtgcaaacaatagatgcacctttacctctcgtatggtccctcataaggcgctttgagtatccacaagggtacaagctctttgtgaagaagtgcaaccttcttgatggggatggtggcattggaagcgtgcgtgaggtcatgatcacatctgggttacccgctggtgttagtgtggagaggttggacaagctcgatgatgacaagcatgtcttgaagtttagcatcattggtggtgatcacaggcttgtcaattatagttcaacgattactttgcatgaagag

SEQ ID NO: 247943 - DNA, 447 bp, Glycine max
ggaattcccgggtcgacccacgcgtccgcccacgcgtccgaccagcgtccgcttcgttccttccccaacccaatcttcgccttcggccacagcaactcctccttcaggatcgctgccaacgttactttccatttttacccttcatcctctagaaaaaaacggctaacgcagcatctggtatggccgtccatgatgagtgcaagctaaagtttctggagctcaaagcgaaaaggacgtaccggtatatcgttgttaagattgaggataaatcgaagcaagttattgtggagaagctgggtgaccctgcaaatggctatcatgaattcactgccagtcttcctgctgatgagtgtcgatatgctggttatgattacgattttgtcactgacgagaattgcctaaagagcagaatcttcttcattgcttggttccctgatacatctacgg

SEQ ID NO: 247944 - DNA, 456 bp, Glycine max
  unsure (1)..(456): unsure at all n locations
gattcccggtcgacccgggcgttccacacgcgtgcgccacgcgtccgagatactatactaataaantattgttgacagatcaagagtggttttgtatctcgaggcttgttattttcattggcaatacttgtggttactttgaagattttgggaagacagaaagtaatatgaaagtgaaatcaactgtttttctgtcccccaagtttgaacttggaccaggatcagctaccataaggcattattatgacattgagtttccaagaggtcacgttgcactcaaaaatttcagtggtgaagtagttgatgaagcaaggaaccctgtgcctcttcatgaaacttatctccaccactggattggtgtgagatatactatcaacaacgtaaagatgtgacacacacaatgtatgatgattgcctttgacacttaaccactctgattatattttggttaggaac

SEQ ID NO: 247945 - DNA, 501 bp, Glycine max
gagtgccgttggctgatacgtatccctacgtactgccgtaccggtccggaattcccgggtcgacgccacgcgtccgcaactactactcacactcactgcagatctcaatccatggctaccattgttagcatcagaggcccgccagatctttgacagtcgtggcaatccaaccgtcgaggtggatttgacatgctccgatggtacttttgctagagctgctgttccaagtggtgcatccactgggatttatgaggcccttgaattgagagatggaggatctgactaccttggaaagggtgtatcaaaggctgttgacaatgtgaacaccattattgcccctgctttggttggcaaggacccaactcagcagactgctattgacaacttaatggttcaacaacttgatggaactgttaacgaatggggttggtgcaagcaaaagcttggagcaaatgccatattggcagtgtctcttgcagtctgcaaagctggtgctgctgt

SEQ ID NO: 247946 - DNA, 521 bp, Glycine max
  unsure (1)..(521): unsure at all n locations
ggatattagcgaggcgctntggctgagtaccgatcccttcgtactgctgtaccggtccggaattcccgggtcgacccacgcgtccgctcatctttatataacctaattgcaaagatgaataccaagcccgttttcttgttgtgcttcctctgtgcactgcttctcatctctgttgtggcaactgagccatccaaagatgagacacaagcagaagaaccaaagacacagccagatgcctggggaagaggtggaagtggggggcatgatggaagctggggacacggtggagactgggggcatggcggaggaggacacggtggaggacatggcggaggaggacacggtggaggacatggcggaggatgcagatgctgcggtcgaaagggctgcaaatgttgctgaagtaaaaatcacaaatatatgaactgaacacactcatatacttgagtgtactccatgtaataactagtatatatgtaagaaataagaaataaaagcatggactctatccgtgcttgggg

SEQ ID NO: 247947 - DNA, 512 bp, Glycine max
agtttgtagagtgcgctgtgactgattcagcctcccatcggactgctgtaccggtctcggaattcccgggtcgagccacgcgtccgcttcgaatccattttattattcataatgggtattttcacatttgaggatgaaaccacgtcccctgtggctcctgctaccctttacaaagctctagttacagatgccgacaacgtcatcccaaaggctgtcgaagccttcaggagtgttgaaaaccttgaggggaacggtggccctggaaccatcaagaagatcactttcgttgaggatggagaaagcaagtttgtgttgcacaaaatagaatcagttgatgaggcaaacttgggatacagctatagcgtagttggtggagttgggttgccagacacagtggagaagatcacattcgaatgcaaattggctgctggcgccaacggagggtctgctgggaagctaactgtcaaataccaaaccaaaggagatgctcagcccaacccagacgacctcaa

SEQ ID NO: 247948 - DNA, 191 bp, Glycine max
  unsure (1)..(191): unsure at all n locations
caatccacagcattattcataatttttatatccacattccatgatgaaaccaagtcccttttaacagctggtagcctttacaaaactctanttacatattcctacaactacatcccaaatgctatcaaaaccttcaagagtgttgaaaacctctatatgaacaagacccctcgaaccatcaagaacatcac

SEQ ID NO: 247949 - DNA, 278 bp, Glycine max
ttcccgggtcgacgccactcgtccgaagttatatataatcgttcttcatctctttcacggattaaaaaaaaaaaaaaaaaaaagaaaaaaaaaaaaaaaaaaaaaaaaaaaaaaaaaaaaaaaaaaaaaaaaaaaaaaaaaaaaaaaaaaaaaaaatacaaaaaaaaaaaaaaaaaaaaaaaaacaaaaaacaaaaaaaataacaaaaacaaaaaatctaaactcaaaaaccataactaaaattaaacagaactccaaaaaaactacatttaacaaaa

SEQ ID NO: 247950 - DNA, 513 bp, Glycine max
  unsure (1)..(513): unsure at all n locations
agggaagccgntggctgaatcaccgcatatatagtatcgctctaccggtccggaattcccgggtcgacccacgcgtccgcccacgcgtccgcacaactactacaagtacttccttacaatcaaaaccaacaacaactatggcaagttatcaaaagcactacgatgatcagggtcgcaaggttgacgagtatggcaacgttgagaagcaaaccgacgaatacggcaaccctgttcatgctgctagtgtcacctatgtagccaccagaactgctgctggtggttacagtgatgacattaataagcaacatgataccaccaatgcctacggcgtagacactggtagacagcattctagtggtggctacgatggtgacactaataaacatcatggaactactggtggctataatgatgacaccaatagacatcatggaactaccggtgtctatggtatagacaccgataggcaacaacatgggactactggtggctatgccggtgacacttgtangc

SEQ ID NO: 247951 - DNA, 468 bp, Glycine max
ccggaattccggtcgcccacgcgtgcgccacgcgttcgccagcgtccgccagcgtccgattgttctttcacaaactctgacgttccaagaggagacacttgttagttcttacattacatggctcatttggtttatggtgaaactccgtcttttggagcctcacaccatggacaggctcacaaattgttccatttcaaaccacttcgagctccttaaggatcctgctcttacatggcaacttagaaatatgggtcaacgaggccagaaaccttcccaacatggacatgttccacaagaaaacgggagaaatggtttccatgttgtcccgaaaacttggcggcaaaatcgaaggtcacatgtccaaagctggaaccagtgatccctatgttacggtatctgtggccggtgctgtgattgccagaacttttgtcatcagaaacagtgagaaccctgtttggacacagcatt

SEQ ID NO: 247952 - DNA, 518 bp, Glycine max
  unsure (1)..(518): unsure at all n locations
cgtatggcctatgattgaataacgagacttcagcgatgtcgtaccggtccggaattcccgggtcgaccgacgcgtccgaagtatggacataaaattctacagggcattcaaaatgagaacaagaacatgaaaaaatcaggtaangacgtggttactgagaatgaatttgagaaaaaactacttactgatgttattccaccgactgatattggggtcacatttgacgatattggagctttagaaaatgttaaggaaaccttgaaggaattggtcatgcttcctcttcaaaggcctgaattgtttggcaaaggacagctggccaagccttgcaagggaatattgctttttggcccccctggcacaggaaaaacaatgcttgcaaaggctgtggcaactgaagctggagcaaattttattaacatttcaatgtccagcattacatccaagtggtttggtgaaggagaaaaatatgtcaaagcagtcttttctcttgccagcaaaattgctccaagtgttat

SEQ ID NO: 247953 - DNA, 385 bp, Glycine max
ggaagatatcaatacgtaatttattcatacaaaaatagaatatgacaaaagcatcaattttattcgtgcatgatgatgatgcttaattttccagatgaaatatcatgttctcattaattacatatcttttttcatgcatatgcattaatgaagcttcaagcagatggctggaacctaactttgtaaggctcatcagtgagagccacgcgctggttcccattactatccctaaacaccccaacattcctacacaaaggcttgcagaagttgcacactgtggggcaaaacacgagcttgtaatcatcatcatactcctcaatcttgaaccagttgtcgatggtatccttgccagggtttcccaacacaccaccagtggtcacaaacc

SEQ ID NO: 247954 - DNA, 513 bp, Glycine max
  unsure (1)..(513): unsure at all n locations
ggataggcgtgtcctgtagactgaanaccgcagtcctacgcgactgccgtaccggtccggaattcccgggtcgacgccacgcgtccgggaacccagtgccacctcatcaccaacaagtacggtttggttcatattgctgctggagatttacttagggcagaaattgccactggaagtgataatggaaagcgagccaaacagtatatggagaagggacagttggtccctgacgaaattgttgtgatgatggttaaggagcgtctcttgaaaccagattcgaaagagaatggttggcttttggatggatatcccaggagcttatcacaggccactgcacttgaggctcttggctttcggcctcatatttttcttcttcttgaggtttctgaagatgttcttgtggagagagtagttggacggagattagatcctgttaccggcaagatatatcacttgaagtattctnctncagagacacaagatatagccgcaaggcttacccaacgctttgat

SEQ ID NO: 247955 - DNA, 517 bp, Glycine max
gttagggcgttgcctgaagatcgtaactacgagtcactccggactgccgtaccggtccggaattcccgggtcgacgccacgcgtccgcaaggattcccttagtaacggcgagcgaaccgggaaaagcccaccatgaaggtcggtggccctcggcgtccgaattgtagtctggagaagcgtcctcagtggcggaccgggcccaagtcccctggaagggggcgccagagagggtgagagccccgtcgtgcccggaccctgtcgcaccacgaggcgctgtcggcgagtcgggttgcttgggaatgcagccccaatcgggcggtaaattccgtccaaggctaaatactggcgagagaccgatagcgaacaagtaccgcgagggaaagatgaaaaggactttgaaaagagagtcaaagagtgcttgaaattgtcgggagggaagcggatgggggccggcgatgtgtcccggtcggatgtggaacggtgagagccggtccggcgatcgaactgggacattggg

SEQ ID NO: 247956 - DNA, 526 bp, Glycine max
  unsure (1)..(526): unsure at all n locations
agaagtagcgcgtgctgagtacgatgcgctagaacgtcgtaccggcccggaattcccgggtcgacccacgcgtccgatccactcttgcctcatctcctgaatcagattcatccttttttaagacacactcctcaggtcctcttgtacaaagtggctctggcagtgatgttgtgtacacaccatctgaccctggtggactaggcaactcaaggtcatggttttcatatgaagaactaatcaaggtcacaaatggtttctcaactcaaaatcttttgggcgagggtggatttggttgtgtgtataaagggtgccttcctgatgggagagacatagcagtcaaacagctgaagattggtggaggtcagggagagagagagttcaaggccgaagtggaaattattggtcgcatacatcatcgccatttggtttctctggtgggatactgcattgaagacagcagaagactacttgtctatgactatgtccctaacaataacctntattttcatctacatgggggaggcca

SEQ ID NO: 247957 - DNA, 452 bp, Glycine max
  unsure (1)..(452): unsure at all n locations
accggcccggaattcccggtcgacgagcgtccgcntatattccattctctctgtgtatttccctacctctcccttcaagatgcagatcttcgtgaagaccctcaccggcaagaccatcacccttgaggtggaaagctctgacaccatcgacaacgtcaaggccaagatccaggacaaggaaggaatccccccggaccagcaacgtctcattttcgccggaaagcaacttgaggacggccgtacccttgctgactacaacattcagaaggagagtactcttcacctcgtcctccgtctccgtggtggcatgcagatcttcgttaagacactcaccggcaagaccataaccctagaggttgaaagctccgacaccatcgataacgtcaaggccaagatccaggacaaggagggtatccccccggaccagcaacgtctcatcttcgccggaaagc

SEQ ID NO: 247958 - DNA, 522 bp, Glycine max
  unsure (1)..(522): unsure at all n locations
gccgtagcgtgcgcgttacgatgtacgtgtacactcgtaccggcccggaattcccgggtcgacccacgcgtccgcgctggaggatttcaaagtcccacacgtgaaccacgttagtcgtccatcataacggcttgctgtggcacacgtgtggtgattgttctctcggatgcggtgcatgcagtgaacgtgggtggtctagtgcccccacattgttccttaaaatcggttgtctcggatgacgcttgccctggcgcttgctttgttcaacgcgatgctactactcttagttagctagcgctggcaatgctcgtggcaggtgcttggtcattaacggatgctacctggttgatcctgccagtagtcatatgcttgtctcaaagattaagccatgcatgtgtaagtatgaactaattcagactgtgaaactgcgaatggctcattaaatcagttatagnttgtttgatggtatctactactcggataaccgtagtaattctagagctaatacgtgcaacaaacccc

SEQ ID NO: 247959 - DNA, 402 bp, Glycine max
accggcccggaattcccgggtcgaccgcacgcgtccgtttcagcttatctttacttcaaaaggcaattgatttttcttcatgatgccgagtgttaagcctgatgcatttgacaaagactcagaaccatttgttgaagttgatccatcaagaagatatggaagatacagtgaactattacgatatggcgctgtgaaaaaggtgtgtagggcatttgatcaagaagagggaatagaggtggcatggaaccaaatgaaactgaggaacttgagttatgacccttccatggaggataggctctactatgaagtgaaggttgtaagaagcttgaccaacgaaaacatcatttccctttacagcgcttggagggaggagaaacacgacaccttgaacttcattactga

SEQ ID NO: 247960 - DNA, 522 bp, Glycine max
  unsure (1)..(522): unsure at all n locations
gttcgtagcgttgccatagctgacggctgaagntcatcgtatgtccgtccggtccggaattcccgggtcgaccgacgcgttcgcggacgcgtgggcaaggagcctctcctctggcgcaccatcgacatgcgcaattggggcgagattggattggatttccatttattggccatgtgccaccgcgcaattgactacagctccggccacttgctccatatcaatgtcgagtatttcggcaccgatgatctcctccaccacatcacccattctacaagtaatctacgaagcctacgtcttgcatgttgctatcagatttcagatgaaggactgtgtgaaattgcagaaaagcttcctcagctggaggagcttgatatatcaatcagcaacttaaccaaggaccctctagaagctattggccagtgttgcccacacttaaaaacactgaaattcaatatggaaagttacagacgttcgcacattgagtgtgatgaggaggctnttgctattgcagaaaccatgccc

SEQ ID NO: 247961 - DNA, 513 bp, Glycine max
  unsure (1)..(513): unsure at all n locations
ggactgatngtctggataagtccangtatgtccgtaccggtccggaattcccgggtcgacgcacgcgtccgctccattttccctctgtcttccccccgtcctctacacaaaaatatattattaggatggagaaggtgaattttgtgaagaatggagagcttagattgcctccggggttccgtttccacccgactgatgaggagctggttctgcaatacttgaagcgcaaggtcttctcctgccctttgccagcctctatcattcctgagcttcatgtttgcaagtctgatccttgggatttgccaggttcctttctattttccattcacacccatcatcccctttctctttctctaatttcaattccatgcccccatttttaggtgatttggagcaagagagatacttctttagcaccaaagtggccaaatatcccaacggaaatcgctccaacagagccacaaattcgggttattggaaggcaactggcttggacaaacaaattgttacttc

SEQ ID NO: 247962 - DNA, 333 bp, Glycine max
gaattcccgggtcgaccgactcgtccgaaaaaaaaaaaaaaaaaaaaaaaaaaaaaaaaaaaaaaaaaaaaaaaaaaaaaagggaaaagggtataaataaaaaaaagataaaaaaaacataaatacaaaaaaaataaaataaaatatggtctcaccttttataaattcaatgttcagttcctttacaatgccatgacttagattacctttagggtacccaaatttaaatcaattgtaccacattttaacaatatccagattggaaaaaccctaacattccctaacttattgacttttcaaaaaattcccctttctcaatgtggaatattaccc

SEQ ID NO: 247963 - DNA, 522 bp, Glycine max
  unsure (1)..(522): unsure at all n locations
agtnaggaggcnntnnntnnaangcctgagtaccgcaggcatacgctactgccgtaccggtccggaattcccgggtcgacgccacgcgtccgcccacgcgtccgtttctctcttctctctccacccaaaccctaactcccgacgctgttgccctctcgtatccgtcatgaaaggaggaaagtccaagaccgaatctaagagagccgatcccaaacttgctgtgaataagaagggagccgccaccaaggctaggaaacccgccggcaaggggaaggcagcgaaagaccctaacaagccaaagaggcctccaagtgctttcttcgttttcatggaggagttcaggaaggtattcaacaaagaacatcctgaaaacaaagcagtgtctgctgtgggcaaagctgctggagcaaaatggaagaccatgtctgatgctgaaaaagcaccttatgtggcaaagtctgagaaaaggaaagtggagtacgagaagaacatgagagcctattaccagaaacaggcggaagg

SEQ ID NO: 247964 - DNA, 521 bp, Glycine max
  unsure (1)..(521): unsure at all n locations
aggatagcctntcnctgaagttcaattcccagancacttcgncactgtccttaccggtccggaattcccggatcgactccacgcgtccgaaaaaataaataaataacaaatttaaagctagcatagactagaaacctaaaaaatagaaatggctagaaggctatgacgattgtgttgagcttgctctcggatctctcttctgcatcttgtgcacgaatggcgggggggaagacggaagtccccgacgtgagaacaaacagggaagtgcaagagcttggaaggttcgcggtggatgagtacaaccgcggtttgaaacagtggaagaacaatgggagtgaacagttgaacttttccgaagtggcggatgcgcatcaacaagtgatgtcacgaatgaagtactacttgaagatctcagctactcataaaggggttcacaaaatgttcacctctgttgtggtgttcaaaccatggcttcattccaagcaactccttcaatttgcgccttcagcaacattcaaaag

SEQ ID NO: 247965 - DNA, 327 bp, Glycine max
cctgtttgatggtatctactagttttataactttagtaattctagatctaatactgtcaacgtgaccccgtcttctggaaagtattcattcattacataaaaggtcaacacattctctaactctttctttcattattcatgataactcttcatatcacactgccttaattcctgctactcattattcaaatatctgccctatctactttcgattttttgatagtctcctaccattttaattacttattactcataattaggtttcctttccatatatgtagccttataaactgttaccactttcatactatatcatcattctctcat

SEQ ID NO: 247966 - DNA, 523 bp, Glycine max
cgtagtgagagttccaaggacgagtacagcacctaccgtatgtcgtaccggtccggaattcccgggtcgacccacgcgtccgctaggggtgaacgtggacgtcatcgtgatggatcgaaggcaaaccagaagccaacaaagaccctttttgtgattaactttgacccaatccgtactagagttcgtgatatagaaaaacactttgaaccttatgggaatgttcttcatgttcgaattcggcggaactttgcatttgtgcagtttgagacacaagaagatgctaccaaagctatagagtgtacaaatatgagtaagatcctggacagggtggtgtctgtggagtatgctctgagggatgatggtgagaggggggacaattatgacagtcctagaagaggtggttatgagagatcacccagtccttatcacaggcgaccaagtcctgactatggtcgtccacgcagccctgtctatgataggtacaatggtggtggaccagacaggcggaggagtcctgattatg

SEQ ID NO: 247967 - DNA, 512 bp, Glycine max
agtaggccgtgcctgtattacgatacccgcatatactgcactgccgtaccggtccggaattcccgggtcgacccacgcgtccggttacttactcctcacactttctctatcgttttcatctctgtttcagatctgagctcgcgtatattccccagccatggccgaaaaggtcaccataatgaggctcaaggttgatcttcagtgccacaaatgctacaagaaggtcaagaagattctctgcaaattccctcaaatccgagaccaggtgtacgacgagaagaataacatcgtgaccatcgcggtggtttgctgtaaccctgagaagctcagggacaaaatttgctgcaaaggttgtggtacgatcaaaagcattgaaattgttgagccttccaagcccaaaccaccacctcaaccagaaaagcccatagaaccagagaagccaaaagagccacagaagccgaaagagccataaaagcccgaagagccagataaaccggaggagccaccgaaag

SEQ ID NO: 247968 - DNA, 513 bp, Glycine max
agaagagggtgccgatgtacgaatatccgccatatattgcattgctcgtaccggtccggaattcccgggtcgacccacgcgtccgcagaggcgaatctcgtggtgaaccgatgatacggatgcacgaggaaggtcggactcagagtacttcatggccgatgcggacagatcttattaggggagctccattactccgaccgacactactgaagatactactacgcacgcggcaggagagaagtgatggtgagggagaatccggagactagagccgaaactaacgctaacggctgtcataatacttggcataaggaagatacctgaacggatcagaatctcgaaacgacgtggtgaacggtcgagctttcgagggatcggtgtcacggcacagctacagcttcaactactcgcagaactacatattgagagtagacatcacgggtcgcataccacacgttagggtcagaaagtaatacaaccggatggtttagaatgcaatggttcacgacacaa

SEQ ID NO: 247969 - DNA, 522 bp, Glycine max
  unsure (1)..(522): unsure at all n locations
agggaagagcatgggccgtntagtaagtatnacaccgcagtatantgcgactgctcgtaccggtccggaattcccgggtcgacccacgcgtccgcccactcgtacggtctttgctgttgtcttgtcttcttgctccaaaacatgggaacaagcaacactctaacattgaccacaacacacacaaagacaacatccttgctggtctgcaatcaaaacctatcaagctggcgttcgagaaccaagacacctgtgttcgagaaatgaagcccaagaaccggacaatcatgggcgctggaggccctgatgactaggacaataggtggacaccatggctgaaacctgttatgaaagagagcttctttgttcaatgcaagcttgacgctgattagcacaagagcgagtgcaacatgtattgcttagattgtatgaacggtgctctctgatctctctgcctcgattaccacatagatcaccgagctattcagattagaaggtcttcataccatgatgtgattaagcgca

SEQ ID NO: 247970 - DNA, 477 bp, Glycine max
ggcccggaattcccgggtcgaccgacgcgtgcgctacctactaatattccaggaagcaacactaaaacagttatcgaaaatgagttaaaggcagtcagttctgttgccacacagaatactgaattaccttcagcgagagcttggaaacctgctcctggtttcaaggcaaaatctctcttagaaattcaactggaagaacaaaaaaagtcactgacagaaaagcttgtatctgaggttgctactcctgtcaattccatgagctcaacaactccctgggttggagttgtcgccaatccagactctatgaaggtgtcaaatgatggccacagagaagcagaaaatactgaatatctggctaaagctgaaaaatctcaaaatagtaaaagcaagaaaagcccattacatgatctattggcagaagatcttgtaccaaaatctagtgaaagagatggcaaggttcctgacagtatgctcccc

SEQ ID NO: 247971 - DNA, 521 bp, Glycine max
cgtagttagcttggtgaatacgaggactagtaccgtcgtccggtccggaattcccgggtcgaccgacgcgtccgcccacgcgttcgcccacgcgtccgtccacgcgtccgctttttagcaagaaatggagcccgagttctcgcaaacgtgtacccttacttcgcctatgttaacaaccaacaaagcattggtcttgactatgccttgtttactaaacatggtaacaacgaggttgggtaccaaaacctgtttgatgcattgttggattctctatacgctgctcttgagaaagtaggggcaccaaatgtgaaggttgttgtgtctgagagtggttggccatctgaaggtggagttggagcaactgttcaaaacgcaggaacctattaccgcaatttgattaatcatgccaaaggtggaacccccaagaggcctagtggacccatagagacttacctctttgccatgtttgatgaaaaccagaaggatggtcctgaaatcgaacgacactttggtctcttcag

SEQ ID NO: 247972 - DNA, 534 bp, Glycine max
  unsure (1)..(534): unsure at all n locations
ggtatctgaggagtggcgctntgaactggatgtntcgttgaggccagtaactgtcgtaccggtctcggaattcccgggtcgacgcacgcgttcggtgtgctgcctaagagcactaatgagtccagaatcaagggaaactttgatgtggttgacgggtctattccagaagaagtgatggataagttctctgaaattaagcaggatagactaattaagggcactttttttgttgacgagacctatggtgcctttaagaccgttgaagagctttgggatggtgaactctgagcaatatgcttcatagagatgttgacaaatgcactgctcctcaatcagattgattccgccttttacctgttaagatcttaaagctaccagctgtagtgattcaagtatgcttgagattttgagaagagctattgttcataataacacaaagtaaccgagacttatttttcatttataattgatgaatctttaattcaatctaaagaaaccagtgcagtgaattttaaaaaataatgttccctaaaa

SEQ ID NO: 247973 - DNA, 529 bp, Glycine max
  unsure (1)..(529): unsure at all n locations
ggttagttaggagtggcctatgactgaaatcagctgacttacgtatgtcgtaccggtccggaattcccgggtcgaccgacgcgtccgggccccccgccagataagtgccctatcgttgaaagccttaattaatttatacatataatggggtacataatatacatacatccctgatgaaagtggaggaaaaggttccctccaaaatagtgcatgctagtttagtttagtgtacaaagtggataactgggtgggtgacaggtgtatccgccccactcctgaagagctggagaattttggtactccggacttcactatatacaatgctggacagttcccctgtaatcgttatactcactacatgacatcctccactagtatagatcttaatcttgctaggagggaaatggtcatcctcggcacacaatacgccggggaaatgaagaagggtcttttcggtgtcatgcattatctcatgcctaagcgccaaatcctctccctacactctggatgcaatatgggcaaagatggn

SEQ ID NO: 247974 - DNA, 422 bp, Glycine max
  unsure (1)..(422): unsure at all n locations
ccggttccggaatgtcccgggntcgacgccatcgcgtctcgtataaaattaaaaaagtcatggataacataaaaaattgggaagaagagagattaagcgggtggcggcccaaagagttaggtgtaccaacctcatagcactaataacacatatttgaagacgaatagaagaaagaaagctaattggaaaattcgtataggaacacaaaaaatggcagatattcctcgggtgaagcttggaagccaaggcctggaggtttccaagttaggatttggttgtatgggcctaagtggagtgtacaacgatcctgttcccgaagaggttggcatctctttgatcaaacacgcattcaccaaaggggtcactttctttgattctgcagatttttatggagcacgtgccaatgaagttttggtcggaaa

SEQ ID NO: 247975 - DNA, 511 bp, Glycine max
  unsure (1)..(511): unsure at all n locations
aggagagagggcctntgtacgtatacccgcatatactgcactgctgtaccggtccggaattcccgggtcgagccacgcgtccgcgcagggtttcccgaagatttaacacctatggctcctaaagctgatagttgaaagaaggctgatccaaaggcacaagccttgaaaactgctaaggctgttaagtcaggtgctactttaaagaaaaagaccaagaagatccgaacatctgttaccttccatcgaccaaagaccttgaaaaaggataggaaccctaaatacccacgcattagtgctccacccaggaacaagcttgatcactatcagatattgaagtatcctctcacaactgagtctgcaatgaagaagattgaagacaacaacactttggttttcatagtcgacttgcgggctgacaagaagaagatcaaggatgcagtcaagaagatgtatgatattcagaccaagaaagttaacaccttaatcaagcccgacgggaccaagaaggctt

SEQ ID NO: 247976 - DNA, 513 bp, Glycine max
agtagtagaggtgcctatggactgagtaccgcaccataccggactgccggtaccggtccggaattcccgggtcgacccacgcgtccgcccacgcgtccgcccacgcgtccgcaacgggcgagtaaacccgtaaggcgcaaggaagctgattggtgggatccccctgtgggttgcaccgccgaccgaccctgatcttctgtgaagggttcgagtgagagcatacctgtcgggacccgaaagatggtgaactatgcctgagcggggcgaagccagaggaaactctggtggaggcccgcagcgatactgacgtgcaaatcgttcgtctgacttgggtataggggcgaaagactaatcgaaccgtctagtagctggttccctccgaagtttccctcaggatagctggagcccgcgggcgagttctatcgggtaaagccaatgattaaaggcatcgggggcgcaacggcctcgacctattctcaaaccttaaatatgttagaccgttccgctgctctt

SEQ ID NO: 247977 - DNA, 310 bp, Glycine max
ggggaaacggaataaaaatgttataatgctaaatctctggatggagcccggtaggcagaaaagtttcctttaaaaatctcacatcaaataaaaggtttcattgttgatgttgacaattattaaacaaaaataatggaagttctcctatagggactagggagcatgttgaaaactgttgtcaacatgttttagacaactcgggttacagctgcatgtatcgcattcgccagaagtgggacagttttggaactcagaccagccatgctaatcctcccatcaaatgtcatgtatatatggaactctttaatca

SEQ ID NO: 247978 - DNA, 479 bp, Glycine max
accggcccggaattcccggtcgacccacgcgtccggtctctttcttcatagcatttggaaatttggctgatgacaccattaattttgaggcttttgcccacaagctggtacagtttggagagattcaggaaaaagttgtattgaaattttcacaagaggaatttcttacagcttggtcaactcaggtgcgtcctgcaacaactctgttggctgatgggtgtccatatttgtatgctatggtgcatgatagttcagtgtctacaataccaggtgattttgtcattggtgttaagttgacaaccataaacaatatgtgtgcatatgggcttaatcctggtatttcaggttctcgtcttttgggtaccattcctcagtctatttcacagcaaactgtttggaatcaaatggcaacagtgagaacaccattgaattttgattctagcaagcagagcttttgtcaattttctattgaccttctc

SEQ ID NO: 247979 - DNA, 526 bp, Glycine max
gggggagccgtgtggctgaattatgtagcttgatggacagtcgtaccggcccggaattcccgggtcgaccgacgcgtccgagaagcttcagttagcagctagggttattgttgcaattgagaaccctcaggatatcattggtcaatgcgcaaggccttatggtcaaagagcggttctgaagtttgctcagtacactggtgctcatgctattgctggaaggcacactcccggtaccttcaccaatcagcttcagacttcgttcagtgagcctcgtctccttatcctcactgatccaagaacagatcaccagcctattaaggaagctgctcttgggaatattcccaccattgctttctgtgacactgattcgcctatgaggtatgtggacattggaattcctgccaacaacaagggaaaacacagcattggttgtctcttttggctccttgcaaggatggtattgcagatgaagggtacaattcgccctggcctcaaatgggatgtcatggttgaatttgttttctat

SEQ ID NO: 247980 - DNA, 525 bp, Glycine max
  unsure (1)..(525): unsure at all n locations
ggtaagttagctgtggctgaatacgtatgnactagnacgtcgtaccggcccggaattcccgggtcgacccacgcgtccgattcaattttgcgtttctctgcctaaaaggattgaaagatgggtcaagcattcggttgctaccaagtcgatcagtcaaatgtggctatcaaggagcattttggaaaatttgatgatgtcctagagcctggatgtcactgcctgccttggtgtcttgggtaccagattgctggtagtctgtcgctgcgagtgcagcaacttgatgttcgatgtgagacgaaaaccaaggacaatgtctttgtcaatgtggttgcatctgtgcaataccgagctgtgtctgagaaagcatctgatgcattctataggcttaccaacacaagggagcagatccaatcatatgtttttgatgtcatcagggccagtgtaccaaagttggagttggattctgtctttgagcagaaaaatgatatagcaaaggctgtggangangagcttgagaaggccatg

SEQ ID NO: 247981 - DNA, 523 bp, Glycine max
ggataataggtgtgccatgactgaatacgagtatcatagtactgtcgtaccggtccggaattcccgggtcgaccgacgcgtccggttgcttttcacttatagttaacaactttcatcactaccattacgtgcattacagatccatcattcatcccaagttggtggaaggcgttggcttcgatctttttgatatggatttagagtttgaatatcaagaagtaattaactcctcccttttctttcaacaatacactcctctctctctctctctctctctctctctctctatatatatatatatatatatatatatatatatatatatattcttctggttatggtaacatatatatggagattgcaacatcaggaatacaggaggaactcaaggggagtgcaactcttcacttgcaaatggttgcctttctcttctccgaagggcctggttttcctttgccatggttatggtatggaatgcagtggcttcatgagagaatgtggtgtacggctagcgtgtgccaaa

SEQ ID NO: 247982 - DNA, 526 bp, Glycine max
  unsure (1)..(526): unsure at all n locations
ggttcttagcatgtgcctgtgactgaattcagctgaacttcgtcacgtcgtaccggtccggaattcccgggtcgacccacgcgtccgttccattctctctctatctgttcaatcttctctcccttctacttctagggtttagcttcggcatcggacatgtcttcttcaactcatcacagttgactttactagcgaattcaatcaggcttgagaaggtatcctgatgtttcttgttcaccatcatatccatgatggaatactgtaaagatgtcctcagctatcttgattctgatacatctattaagatactcatgtctctggatgatctggctgaccttgttcgggccacctgtgtctcgcgctcttggagagacattgtgattgcaaatggtctttgcaagcagctgtgcttgagaatgtttcctcagttatctagagttgcttttgttgttgaactgaatcaaaatggagcgaatgaacatgcagaggttggatctagctattctatggaatggctatctctacn

SEQ ID NO: 247983 - DNA, 520 bp, Glycine max
  unsure (1)..(520): unsure at all n locations
agtnaggagcaggtgcactatagaatgaataaccgacancatacgcgactgtctgtaccggtccggaattcccgggtcgacgccacgcgtccgctcacgcgtacgatgaatttcaccactcttataaattctgagaatgaattggtatgagcgaagcattagcctttttctgtgtcgacactggtttcgatcccacacccactaactcatacgcttgatcctttgaatgctcttgcgtacttctttcactacctaattactaactcacactcacacaacgggtgatatcaatgtcgactactgctatgaagaggctcatgagagatttcaagaagctgcatcaagacccgactgcaggaatcagcggtgcacctcaagatatcaacataatgctgaggaacgctgccatatatggtccttatgatactcgatgggatggaagcacgtttaagttgactgtccaatatactgacgattattcaaacgagccaacaactgttcgaatggtctattgaatggt

SEQ ID NO: 247984 - DNA, 438 bp, Glycine max
accggtccggaattcccggctcgacgccacgcgtccgtccacgcgtccgcaaaatttcagatccctttgaagaaggttgtaggctagggcctatggttagtgaaggacagtataaaaaagtgttgaattgtatctcaactgctaagagtgagggtgcaacaattctgattggagggtctcgcccagagcatttgaaaaaggggtactttgttgaaccaaccatcataactgatgtgactacctcgatgcaaatttggacagaagaagtttttggacctgtgctatgtgtgaaaacattcagtaccgaagaagaagctattgaactagcaaatgacacacactacggcttaaggtctgctgtaatgtcaaaagatctagaaagatgcgagcgcatatcaaaggctattcaagctggaattggatggataaattgtgctc

SEQ ID NO: 247985 - DNA, 513 bp, Glycine max
  unsure (1)..(513): unsure at all n locations
aggaggccggtggctgatgtactgatcaccgacncatangcgacgtccgtaccggttcggaattcccgggtcgacccacgcgtccggcgtgacattacctccacgatgtgtgcagttaaagccggcaaagatgtccgcgcttatgctgatcactcttgaggctttgctgatgccaccacctctagttatgaaccaaaacctgtcaaacacatcagggtggccataatgcatttgaactttgagagggtttgccaaaaccctctgccccaatgtgacaaaactcgtttcttgacctgacatgaaccatacaagagaggaaacagaaccggtaaaaatgtgttccctcactccaagcccaattgtctccacggaaaccaacctgctatgatccacagatgcagtatattatcacataccatgaccaattattctaaaaatatattagaacatacaaaatataattaaaattaagaacatattttttgggcattactgtgaagatgtggcaatgtn

SEQ ID NO: 247986 - DNA, 527 bp, Glycine max
agttaagtagctatgggtgaatcacgtctgctctatgcacgtcctaccggcccggaattcccgggtcgacccacgcgtccgcccacgcgtccgctctaagctttgctttcaatcttctccttacaaaaaaaaatcctttccctctcttgtcccaataattagcaaaagaagccaacagaaaactattccatatagttttcaattcaaacttgttttgattttcattttaactcaatggagaacagaacaagctctgtactcccacctggcttcaggtttcatcccactgatgaagaactaattgtttactatctttgcaaccaagccacatcaagaccatgccctgcatcaatcatcccagaagtggatatctataagtttgatccatgggaattacctgaaaaaacagactttggagaaaaggagtggtacttctttagtccacgagagaggaagtatccaaatggggtgaggcctaatagagcaaccgtgtctgggtattggaaggccactggcacagataaagc

SEQ ID NO: 247987 - DNA, 524 bp, Glycine max
gggttggcctgtgagtgaataaagcatagaagcatgttctaccggcccggaattcccgggtcgacccacgcgttcgcccacgcgtccgctggctcctcatcggaataggactcgctggcgcggtcgttgttgtgggcgagacccggcggcggcgacaccggaaccttcccaaagaggacttcggtgcattcgttgagcgtatcgaacttctccccattcctcagcccaaccaaacgcaaacgctctctgctcttaccttcgccatcaaagacatattcgatgtgaaagggtatgtgacggggttcggaaaccctcagtggaagaagacgcacggcgaggccgggaagactgcgattgtcatcaccgctctcctcagcgacggtgccacttgtgttggcaagactgttatggatgaattctcttttgggatttctggtgagaacaagttttatggaacaccaaccaatcctcaaatgccatcttctatccctggaggttcctccagtggttcaactgttgctgtt

SEQ ID NO: 247988 - DNA, 528 bp, Glycine max
  unsure (1)..(528): unsure at all n locations
ggatagttagctgtgcgtgaagaccgtaggacatagntacgctcgtaccggcccggaattcccgggtcgacccacgcgtccgccggaaccatatatctgacaatgtggctgtaaccccatatcgtgatacatctcgctatggaatgggaagtgaaacaccaatgcatccttctcgaactcccttacatccatatatgactccaatgagagatcctggagcaacacctattcatgatggaatgagaacacctatgcgtgacccagcatggaatccttatactccaatgagtcctccaagggataactgggaagatggaaatccaggctcttgggcagccagtccacagtatcagcctggaagccctacttcacggccatatgaagccccaactcctggtgctggttgggctagcactcctggtggaaattatagtgaagctggaacaccgcgggacagttctgcctatgccaatgctccaagcccatatttaccatcaacacctggtggacagcctatgacaccgagtt

SEQ ID NO: 247989 - DNA, 529 bp, Glycine max
cgtaaatgcctgtgggtgaagtatgatagacttagtacgtcgtaccggcccggaattcccgggtcgacccacgcgtccgaacttctgctacttcctactccaaccgcacttctgctccgcaattatcatgggcaaggtcaagatcggaatcaacggatttggaagaattggccgtttggtagccagagtggctctgcagagagacgatgttgaactcgttgccgttaacgaccctttcatcaccaccgattacatgacatacatgtttaaatacgacagtgttcatggacactggaagcatcacgatgtcaccgttaaggacgagaagacccttctcttcggtgacaagccagtcgctatttttggacacagaaaccctgaagagatcccatgggggtcaactggagctgacatcattgttgagtccaccggagttttcaccgataaggacaaagccgtcgcacatttgaagggtggtgcaaaagaggttattatttctgcccccagtaaagatgcccccatgtttgtt

SEQ ID NO: 247990 - DNA, 524 bp, Glycine max
  unsure (1)..(524): unsure at all n locations
ggattgtagcagtgcctntggctgaatacgtatgcctagtacgtcgtaccggtccggaattcccgggtcgacccacgcgtccgggacgtagtcaacgcgagctgatgactcgcgcttactaggaattcctcgttgaagaccaacaattgcaatgatctatccccatcacgatgaaatttcaaagattacccggacctgtcggccaaggctatagactcgagttggaaaaaaaaaaaaagttgttcgagatggcacgtacgaagcaaactgctcgtaagtccacaggaggaaaggcacctaggaagcagctcgcaaccaaggctgcacgtaagtctgcaccaactactggtggtgtgaagaagccacatcgttatcgtcctggtaccgttgctcttcgtgagattaggaaataccagaagagtaccgagcttttgatcaggaagctccccttccagaggctggttcgtgaaattgctcaggacttcaagactgatctgcgtttccagagccatgctgtgcttgca

SEQ ID NO: 247991 - DNA, 513 bp, Glycine max
  unsure (1)..(513): unsure at all n locations
ggttgagtagtgcctntaaactgaatacgactccctcgctactgtccgtaccggtccggaattcccgggtcgacgccacgcgtccgctcaagcccagattcaaccagtttcaaaattgggattcggatgtatgggccttactggagcgtacaatgaccctctccaagaacaggatggcatatctgttatcaagtatgcgttcagtaagggaatcacattttttgatactgcggatgtttatggagccaatgctaatgaacttttggttggaaaggctttgaagcagctgcccagagaaaagattcagatagccacaaaatttggtattgcttcacgaggttttcctgatatgaagatcaagggttcgcctgaatatgtgcgatcatgctgtgaagctagcttgaagcgtcttgatgttgaatacatcgatctctattatcagcacagagtggacacatctgtacctatagaggaaacagtgggtgaacttaagaaattggtccaagagggtaa

SEQ ID NO: 247992 - DNA, 530 bp, Glycine max
  unsure (1)..(530): unsure at all n locations
gggagtgcctttgnctgaatacgtactcactacgtacgtcgtaccggtccggaattcccgggtcgacccacgcgtccgggacagtcaagtatgttggagaacccatgacccacttggaatctattgcatcctctgcggtacgggctgcaattaaggtgaaagcatctattataatttgtttcacttcatcaggaagggctgcaagattgatcgcaaagtataggccaacaatgccagtactatctgttgtgatcccccgactcaagacaaatcagctaaagtggagctttagtggagcttttgaggcaagacaatcacttatcgtgagaggtctctttcctatgcttgcagatccacgacatcctgctgagtcaacaagtgcaacaaatgagtctattcttaaggttgcccttgatcatggaaaatcattgggagttattaagtcacatgaccgggtagttgtttgccagaaacttggtgatgcatctgtggttaagattattgagcttgaagattaaactattaaagag

SEQ ID NO: 247993 - DNA, 533 bp, Glycine max
  unsure (1)..(533): unsure at all n locations
agtttattttagccagtgagtgaagtctgtagnnacattcgnacgctcgtaccggcccggaattcccgggtcgacccacgcgtccgctttcttcgctacgtcgtcgttagggtcttcttcggatcggtggaacttgaccctgccggcgtgaattccgacgctactcgtggcgccgaattgctatagcggtgacgaatatgaaggttttcgttaagactctcaaaggcactcacttcgaaatcgaagtgacgccgcaagacacggtttctgaagtgaaaaaaaatatagaaactgttcagggtgcagatgtctatcctgctgcacagcaaatgctaattcatcaagggaaagttcttagggatgctactaccttggaggagaataaagtagccgaaaatactttcattgtaattatgctatcaaagagtaagagcacatctggtgaaggatctactacttcaactgcattatcaaccaaggctccacagacaagtacaggtcccgcttcaacccctccagtgtcagtagcgcct

SEQ ID NO: 247994 - DNA, 467 bp, Glycine max
accgcccggaattccggtcgacgacgcgttcgccacaactactacaagtacttccttacaatcaaaaccaacaacaactatggcaagttatgaaaagcgctacgatgatcagggtcgcaaggttgacgagtatggcaacgttgagaagcaaaccgacgaatacggcaaccctgttcatgctgctagtgtcacctatgtagccaccagaactgctgctggtggttacagtgatgacattaataagcaacatgataccaccaatgcctacggcgtagacactggtagacagcattctagtggtggctacgatggtgacactaataaacatcatggaactactggtggctataatgatgacaccaatagacatcatggaactaccggtgtctatggtatagacaccgataggcaacaacatgggactactggtggctatgccggtgacactggtaggcaacatgggaaca

SEQ ID NO: 247995 - DNA, 464 bp, Glycine max
cggtctcggaattcccgggtcgaccgacgcgtccgttcacgcgttcgagtacattaagtgtagtcatgctacattatagaaatagatctgttagggtatgagtgactgtgagctatattatctgttgtagcacaaaacatttagtatcatgagtaacccatattacaatttaatatttgtgcgggattcgctacttttgcagttcatccagaaagttggaatcccatgtggtctggatcaagcatattaacagggcttgtatcattcatgatggacaacaattcaaccactggcagtgtaaacaccaccactgctgagaagcatcgtttagcaaaatcttccctttctttcaactgtaagaatgctacattcaggaagatgttacctgagtatgttgagaagtacaacctgcaacagctttctgagcaggctggttcagagagggtctcatcggatacgtcttc

SEQ ID NO: 247996 - DNA, 511 bp, Glycine max
  unsure (1)..(511): unsure at all n locations
gactgaagccgtaantcatcgtatgtcgtaccggtccggaattcccgggtcgacccacgcgtccgcccacgcgtccgcttttcaagtttagaagaggcctatgaggccctaagagtttttgagaggcttgggattgggaataagcctgatgtgagcacaaccacttgcaagaaagtagcagaaaaccttgagttgtcatcgcctgtgaaggatttgttctattcgttaaaggttaatggcatattaaaatgcaaggttgatggggatgttttcaaggatattgctttgagacttaaagccactgtcaatgatgcaagtactttggtggacatgtactattcaataggaagtctggttcttataaaggaccaggcttctgatgttgatgtgcttcttactgatgctgatgggactntncattcaatcaaggctctgagtcaaagtgatggaagatggcgttatagttctgataatccaaaatctagtacctatgctggttgattagcacttg

SEQ ID NO: 247997 - DNA, 513 bp, Glycine max
  unsure (1)..(513): unsure at all n locations
nactgaacacagaccactacgtatgacgtaccggtccggaattcccgggtcgacccacgcgtccgcccacgcgtccggttccttggtacggaaaccatatcacttggacgagtcggtgatgattgttggtgcacggacccagctggagatccaaacggtacctattggctgcaagggtgtcacatggtgcactgtgcttacaacagcttgtggatgggaaatttcatacacccagattgggacatgttccaatctgatcatgcttgtgccgaattccacgctgcttctagagccatttctggtggaccaatttatgtaagcgactctgttggaaaacacaacttcaagttgcttaagaagcttgttctacctgatggctccattttgcggtgtcaacattatgcacttnccacccgagactgcttatttgtagatcctttacatgatgggaaaacaatgctcaaaatttggaacctcaataaatgttccggggttttgggtctggtcaattgc

SEQ ID NO: 247998 - DNA, 513 bp, Glycine max
  unsure (1)..(513): unsure at all n locations
agtaggcctgtggctgaagcctagcnngatcgatgcnctacgtacgtccttaccggtccggaattccggggtcgacccacgcgtccgcagagtttgctcacccctactcttcttccagtctctatctcaatctccatgaaatttaactatggctactgaagaggttttggttgatgaaatcacttaccctaccaagatcactactaccaagcccctatctttgcttggccatggaatcaccgacatggagattcacttcatccatgtgaaattctattcaatcggggtttatttggagccagaagtagtacgccacttggaccagttcaaaggaaaatctgcataggagctggaagataatgaagagttcttcaatgctctcatttctgccccggtggagaagtttattagacttgtggtgatcaaagagatcaaaggtgcacagtatggggttcagattgagactgcagtgaaggataggctggcagctgaggacaaatatgaagaggaaga

SEQ ID NO: 247999 - DNA, 513 bp, Glycine max
gggaagagtgcctgtgtacgagtacgagatcttacgcgatgccgtaccggtccggaattcccgggtcgacgcacgcgtccggtgattgtgggaaaaagatgccgcagaggcactcgaagaacaacaacgatcttgcgttgttcacgtacgatgagaagcgaaaactaggttatgggacccagaaggagaggttgggcaaggactccattaagcccttcgatgcttgctctctctgcctcaaatccctaattgatcctatgagctgccagaaaggccatctcttttgcaaagagtgcattcttcagtgcctcttgtctcagaagaaagacattcaaaggaagcttgcagcccatgctgctcagcagaagcaagaaaaagaggaagaagaagagaagttgaagttgcaaaaggctaaagagcttgatgcatttgatcaacaaaatcatggtgcttgtccacaattcagcgacagaaattatagtcgggataagaatgggtttcattgggcaaaca

SEQ ID NO: 248000 - DNA, 520 bp, Glycine max
  unsure (1)..(520): unsure at all n locations
agtaatggcgtntgggctgaattacgctgnaccgacgatactcnctgactgtcggtaccggtccggaattcccgggtcgacgccacgcgtccgcccacgcgtccgcccacgcgtccgcccacgcgtccggttaaacactcttcgtcatcgtcgtcgcaatgggacgtgtgatccgtgcgcagcgtaagggagcaggctcggtcttcaagtcccacacgcaccaccgcaagggccctgcccgcttccggagcctggatttcggagagcgcaacggctacctgaagggtgtcgtcactgacgtcatccacgatcctggccgtggcgcgcctctcgctaaggtcgccttccgccacccgttccgctacaagaagcagaacgagctcttcatcgccgccgagggtctctacaccggccagttcatctactgcggcaagaaagccaccctcgttgtcggcaatgtgttgcctcttcgatccattcctgaaggagctgtcatctgcaacgtcgagcaccatgtcgg

SEQ ID NO: 248001 - DNA, 506 bp, Glycine max
aatgataccgtaagacgctcgtaccggtccggaattcccgggtcgacccacgcgtccgatttttttcataaaacaaatcattttagttctggtaaaattaatttattttgtatttcatccttaaaaatactatcattttttcattatttaaaatattttttttacaatttaaaacactatctaaagttctttaaatatgaaaaataaaacaaatacatttcactagtactaaaatgaaaaatataaatttgtaaaacaaaaatttaaaaacactaaattgtatgaaaaaaaatatatttaaacatgttatttaaattaaatttcctctactttccagatacaaggaaaaagaaaagacattttgatcatgaacggtggagggacaaatttgattccatcacattttacaaacggatgcccataaaatatcttatccttctttttggttacacaaaatatcttatccttctgccaaaagttattatccccaaaaaagaaattgtggg

SEQ ID NO: 248002 - DNA, 300 bp, Glycine max
gatgtatataggttttaattgaatgaatcaacgggcttacaagaagaagaaatccgacaaatgcacatctaggaaataacagttgcaacaagaaaacaacataaattgcccataaactaaactatgtcaacggcattatatgatcaaaacagcaaaaccccctcttcctcaagttgcagatgagattcaaggttgttgctgagcatcaatgtagccagcatcaacaagaaccttctctttcttagccatctcaatgtcccggtcaaccatcatcttcacaagctgctcaaaccccacttt

SEQ ID NO: 248003 - DNA, 267 bp, Glycine max
gaattcccgggtcgacccactcgttcgaaaaaaaaaaaaaaaaaaaaaaaaaaagaaataaaaaaaaaaaaaaaaaaaaaaagataaaggggacaccttcctataatacggttacctaccttaccaactcttgcatgctaacactactctcttgtatatcctcacctaaattaattcaactgcccgtctctatacaacttctggacagtcaattcccttaccttacccaacttattcccctttcatgacatcctccttttcccagct

SEQ ID NO: 248004 - DNA, 516 bp, Glycine max
gtatggcctataattgaattacgagatcatcgtactgtcgtaccggtccggaattcccgggtcgacccacgcgtccgctctccgacgtacatttccatctttttagggtttcatttcatggactccgattcctggatgtccacgcgcctctcttcctcttcacgccgccaccattatcgatctgatctgtacgcggaggagagtgaagggaacgatgatttcagggcggagtttctatgccctttctgcgccgaggattacgacgtcgtttccctctgttgccacattgacgaccaccaccctatccaagccaaaaacggggtgtgtcccatttgtgggaagaaggtgggagtggatctcgttggacattttactacacaacatgggaacttcttgaggatatcctttttgcaagttgaacttacgtgcagcgcaaaaggagggtcaggaaaggaggctctgcttcaacaatttctatattgagaaaagagttacaagaaggagccttgcagtccc

SEQ ID NO: 248005 - DNA, 520 bp, Glycine max
  unsure (1)..(520): unsure at all n locations
gctgaaagctgagaccctcgcgactgtcgtaccggtccggaattcccgggtcgacccacgcgtccgtgcttattttaagtatctatctgagtcaatcagtacagggagtccaacttgtgttgcagagatcttgggcatttatcaggtaacatcaaagcacctcaaaggagggaaggaaacaaagatggatgttttggttatggaaaaccttctttacaggcgtaacattagacgactttatgacctcaaaggttcttcccgatcacggtacaatccagatacaagtgggagcaataaagtgctgctggatcagaatctcattgaagctatgccaacctctccaatatttgttgggaacaaggcatagcggntgcttgagagggccgtgtggaatgacactgccttncttgcatcaatatatgtgatggactactcattgcttggtgagtggatgangaaaaacatgagctgggtttaggtatcattgattttatgaggcagtatacatgggacaaacact

SEQ ID NO: 248006 - DNA, 507 bp, Glycine max
  unsure (1)..(507): unsure at all n locations
agcaagccgtgcctgagtacgtttacgagttctctcggactgccgtaccggtccggaattcccgggtcgacccacgcgtccgccggtcgtgcagaatcacctgaagcaggtttattttactctgtgttttgccgtggttgctgcggctgtcggggcttaccttcatgtcctcttgaacattgggggttttcttactacagtggcatgcatgggaagcagcttttggttactctccacacctccttttgaagagaggaagagggtgactttgttgatggccgcatcactgtttcagggttcctctattggacccttgattgatttggctattcatatcgatccaagccttatctttagtgcatttgtgggaacagctttggcctttgcatgcttctcaggagcagctttggttgcaaggcgtanggagtacctgtaccttggtggcttggttcttctggattgtccatccctttctcggtgcactttgcttcttccatacttggaggg

SEQ ID NO: 248007 - DNA, 456 bp, Glycine max
aattcccgggtcgacccacgcgtacggatatttcccaaaaccaattgcatcactctcgtccgataccgacgctgccctagaccacgggcaagcggggtcgcacaccgccttcatccggtagggcaaaaatgagtcgaggaagtggaggtggatacgatcgtcacatgactattttctcccctgaaggacgtctctttcaagtggagtatgctttcaaggctgtgaaggctgcaggaatcacctcgattggtgtacgaggaaaggattcaatttgtgtcgttactcataagaaggttccggataagcttttggacaacacaagtgttacacacctctttccaatcaccaaataccttggattattggctactggcatgacagctgatgctaggacactggtccaactagcaagaaatgaaacagctgaatttcgctttacatatgggatatgagatg

SEQ ID NO: 248008 - DNA, 396 bp, Glycine max
gaattcccgggtcgacccacgcgtccgcccacgcgtccgcccacgcgtccggcgatgcggatgaggcgccactcgatgtttccatgggcctgcgtgcctttggtattgtggggtgtggttcgtttagtggtgtcaagtcttgcgaacgtgagggtgcatgagtggtaatcgggatgtttttgttgcacggctccatgcttgcgcatgcaacgtgtgacatgcatccttttcattgtcaccttagccttcgtggcttaggtgctgacgattggttcctgtgttgcctacctaccaaacggtattcgtgtggctagtcagacccattccatccaggcctctttgttggggacgctggaggatttcaaagtcccacacgtgaaccacgttagtcggcca

SEQ ID NO: 248009 - DNA, 518 bp, Glycine max
  unsure (1)..(518): unsure at all n locations
gggtttagcggtggtgtccatgagacaactgatacactcgtnangtcgtaccggtccggaattcccgggtcgacccacgcgtccgagagctcagtcggtttagaggcacaggaagaccacccttatccttttgcaggagcttcaaatgttaaagtgcgccttggggttgtttcagtagctggaagctccattacttggatggatcttctctgcgggggcacagaacagcaaaacaatgaggaggaatatttggcaagagtcaattggatgcatggaaacattctcactgctcagattttgaacaggcaccacactaaaataaagatcgttaagtttgatattagaacaggccaaaggaaaaatatattgttcgaagaaaacagcagttggatcaatatacatgactgtttcacacctcttgataaaggagttaccaaattttcgggtggatttatcntggctagtgagaaaacaggatttagacatncttatcntcatgatgcaaatgggacttgttt

SEQ ID NO: 248010 - DNA, 511 bp, Glycine max
  unsure (1)..(511): unsure at all n locations
tgtgtnttaggaggcccatgatacctcattgcctaccgcactgccgtaccggtccggaattcccgggtcgacccacgcgtccggcaaagcatccttcgtttcaatttctgtctctcagcgctatctgcaatcgagcctttcatctgcaaagggatccacaggccgaaggagaaatggggctgacattcacaaagcttttcagtcggcttttcgcgaagaaggaaatgcgaattctgatggttggtcttgatgctgctggtaagaccactatcctgtacaagctcaagctcggagagatcgctaccacaattcctaccatcgggttcaatgttgagactgtggaatacaagaacattagcttcactggttgggatgttggtggccaggacaagattcagaccttggggaggcactacttgcagaacacccagggtcttatttttgttgtagacagcaatgatagggacagagttgtttgagccagagatgagttgcataggatgttgaatga

SEQ ID NO: 248011 - DNA, 522 bp, Glycine max
ggttattaaggatgtgtgcccactgatacccaggataccctcaggaacgccgtaccggtccggaattcccgggtcgacccacgcgtccggatgaggaagaattgcaacttggagcttcgccttttccctccttccctctgcgatcttggccccatgatggaagcagaagttagtgagagaccccaacaacaggtcgcccaccatcaacagcaacagcaaccacaaccacaacatccgctgaccattttctatgatggcaagatttcagtttcagatgtcacagagcttcaggccagatccatattaatgctagcaaataaagagatggagaaaagagtgatgacaccaacggggtcagaaccatcttcaccaatattactgcaatcacctcataacatgtatagccccggcactggactttacatgaaaagatcactgcagaggtttctccagaagagaaagaatcgtgtgcaagaaacatgcccataccatcacgagctaattaatgttaaattatcaaaa

SEQ ID NO: 248012 - DNA, 469 bp, Glycine max
ccgcgtctcgacccacgcgtccgagcagctatcagaaatatccacaacacagctgagaagttcattttcaaaatggccggtggggtggttcctgtggatgcatcaccgattggaaatggcttcgttggcaagataacgctctcagttatcatcacttgcatcgttgctgcatccagtggactccttttcggatatgacctcggaatttcaggaggtgtcacaacaatggtaccatttctggaaaaattcttcccagatatattgagaaaagttgctggtactgaagtgaacatgtactgtgtgtatgatagtcaagtgttgacattgttcacatcttctctataccttgctgggttagtgtcatctctcgcagctagtcgagtcacagcagcatggggtcggcgaaacaccatcttaattggtggcgttacatttcttattggtggtgcccttaatggaagtgctgaaa

SEQ ID NO: 248013 - DNA, 518 bp, Glycine max
  unsure (1)..(518): unsure at all n locations
aggcttgacggagtggccccactgaanaccactgnanntcatcgcaggtccggaattcccgggtcgacccacgcgtccggcagcgatggcgccaccgtcgccaccgtcactttccacggccgcttcgatatcctctcgatgtccgcgaccttcctccaccacgcctccccggcggcgatcccgaacgccttcgccgtgtccctttccggaccgcaggggcagatcgtcggcggattcgtcgccggcaggctcctcgcggccggcacggtgttcgtgattgccgcgtcgttcaacaatccgtcgtatcaccggctttcgtcggaggaggaggcgcagaacaactctggcggcggcgcaggagacgcgcagtctccgccggtttccggtggcggcgtggagagcggacacgttccggctgagtcgtttatgtacagctgtcaccttcctttcgatgtgatttgggcttccacccctagaccacctttttgatcatcatcaaatcaccttatttttaaatg

SEQ ID NO: 248014 - DNA, 441 bp, Glycine max
gaattcccgggtcgacccacgcgtccgcaaaactctctctctccgacaacaagtccttaccctctttgcaactacccttccgcaccgcagatatcgctcccgccgctccttccgtttgcgccgcttacgactactatctccgtcttcctcaactcagaaagctttggaactccactgattttcctaattggaacaactaaccgattctaaaaccaattttgcaagctctcgaaatcacgttccgctttctttccattgttctctccgatcccagaccttacttcaaccacagagaatggactcgccggatagagtctctcatcatgcatcaaattgaaatcattgccatactttgtgaagaagaggaacaaaattccgacacacgtggcactgcatcaaccgctgatctcagcagcagcaatagcagcgtgagcagaaact

SEQ ID NO: 248015 - DNA, 512 bp, Glycine max
  unsure (1)..(512): unsure at all n locations
gttgtggtcaggtggtgaagctgaancctacgactcactgtacaggtccggaattcccgggtcgacccacgcgtccgcttttgtcattaataatctctctgaccactctttccttggtcgatgccgccgatcccacgtttggctgcacccctcttggattatctagtagctcaaacttgcaaatccaaaagccttacgacgttgcagtcaacgagcgctacagcttttcaaatggagtgcacagattttgggtatactccacggacaagcctcatatgcaaggcagcaatacgaagccacgaactgagattcgtatcgctggatacgattatacatccggtgtgtggcaatttcaagggtttttttacgtgcctagtggcacaagcggggtgtgcatccagcaagtgtttggtggagtaacttctgccacaacctcgcagactagggtctatggtggttctctcactcattaccaatcacctactctggaaccaaacatctataataagtgg

SEQ ID NO: 248016 - DNA, 431 bp, Glycine max
accgtccggaattcccggtcgacgcacgcgtccgagcagagggatgatggttcagtgcaacaacactaataacaacgtgtgcagctgcaagcgctctccctcggccaccttagaccttctaatcctcctcctggtcctcttctccggcgccttcctactctactcctacctctgctacatcttcaactccctctccctcctcctcccctgcctccccctctcctacctcctccccttcctcctattcttctccctctccctcgccgccttcttctgcggctcccgatcccgccgctgccagcgccagggatgcacgggcctcaagaaggccatggagttcgatttgcagattcaacgcttcggcttcttctacgacgaaatcgattaacttccctggaaaggccgcactgaggccaaccccgattacgact

SEQ ID NO: 248017 - DNA, 516 bp, Glycine max
agagtgggagagttgcctcatcgaaacttcatgtccctacggaatgccgtaccggtccggaattcccgggtcgacccacgcgtccgctttcgtgcaaggtagctacagattcatctgggcaatcaaagggctatggctttgttcaatttgataatgaggaatctgcccaaaaggccattgagaagctgaatggaatgctgctgaatgataaacaagtgtatgtgggacccttccttcgcaagcaagagagagaaagtactgctgacaaggcaaagttcaacaatgtttttgtgaagaatctgtcagaatcaaccactgatgatgaattgaagaatgctactggtgaatttggaactattactagtgctgtcgtaatgacggatggagatgggaaatcaaagtgctccggatttgagaattctgagaatgctgatgatgctgctagggctgttgatgctctcaatggcaaatagtatgatgactactaatggtatgtcggaaaagctcaaaagacat

SEQ ID NO: 248018 - DNA, 517 bp, Glycine max
ggtgtgatcagtgtgtccccctgagactctactgcctaccgcactgtcgtaccggtccggaattcccgggtcgacccacgcgtccgctcacgcgttcgcagaattacccaaattgtgctctttggtgtcttttttaactgacatgcgaaactgaatggttcttaactctcattaacctgctattggaaccaaaatcctcaaaacggaattgcctgcataatctcctcctaaatcatttgggcattaaccattccgaacctgccttgaattggccaatcctaccctggtttaattgggaaactttaaacttggaattcacattgttgaatgacttgaccttaaggcattacctgatccaggtttctttcacctgttgataaccactaagctctgcttggaaaggttaacttaatgggtgtgggaaatctcaccgagacagatatattgtgtacatggtatactcacatgtatgcactctaggggctctaagcctaaaccgatgtaaaagagtaaggtg

SEQ ID NO: 248019 - DNA, 411 bp, Glycine max
tgttcgttcctgttatcaaaagacaatgaacggatgaacatgggaagaagtgggtggctttgggtcataagatgcaaataattgattggtatgcccaaactgaacttggccatggatctaatgttcaagggcttgaaacaactgcaacctttgatcccagaacagacgagtttgtaaattataggcccacattgacttcaagcaaatggtggcctggtggattgggtaaagtgtcaacacatgccgtggtttatgcccgactaattactgatggacaagatcatggagtgcatggtttcattgtccaactgcggagcctggatgatcacttaccttttccatgcataactgttggtgatattggaatgaaatttggagatggagcatataactccatggataatgggatgc

SEQ ID NO: 248020 - DNA, 392 bp, Glycine max
acccacgcgtggacgcacgcgtccgaccgaatactttacttcacaaaaattagatccatgaaaacgtgttctgtgatgctatgcctgtaaacgtatcgaagtcttactggggccacagcataacaatgtggcacacactcttgtggagcgtaatgcccaaatatatcatgttccagcaaatttgggctgtgatatgacacacatatctactgactagaaagttgccatatccaatagctgatcgcaacaccctaaacatctacttcaacaacacctaaatctggtggagatattagcatactcattatcttttttctctacagatcaaatgctttaataccgatacgattgcccgtagtctagtcatggattctacagatatgatgcttaca

SEQ ID NO: 248021 - DNA, 512 bp, Glycine max
ggtgtgagcatggtgaacatgatgcctcgagatcactgtccggtccggaattcccgggtcgacccacgcgtccgcacttgaaatgctggagaaaaaggagaaagtgctccttaaaaaggtggcagcggaagttgaaaaggccaaagaattcacaagggggaagaacaaaagggcggcaatacaatgtctgaagaggaagaggttatatgaacagcaaatagagcagcttggaaatttccagttgcgtattcatgaccagatgatattgttggaaggtgctaaagctaccactgaaacagtagatgcattaagaactggagcagctgctatgaaggctatgcaaaaagcaacgaatattgatgatgttgacaagaccatggatgagatcaatgaacagaccgagaacatgaaacagattcaggatgcattgtcagctccaattggtgcagctgctgattttgacgaggacgaattggaaacagaacttgaagaattggagggtgctgagtggg

SEQ ID NO: 248022 - DNA, 518 bp, Glycine max
  unsure (1)..(518): unsure at all n locations
agagttgtagcaggtgcctcactgatatcatgangtcatcggatgccgtaccggtccggaattcccgggtcgacccacgcgtccgctccataaccgccaccggcgatctggcactaacagatcgccgctgctacaggtgaaccggatccatccaacagatctctccaattcaaatggagaatctaatctctttggtcaacaaaatccagagagcttgcaccgccttaggtgaccacggcgaaaacagtgcactccccacactatgggactctctccccggcatcgccgtccactgaggccagagctcacgaaagaactgcgtcttggagagctgagtcgtcacagatttcttacctcgtggatcaagtattgctacaccacgaccgatagagttgcaccttcacaggacttgagacggatacagatagcacgcggagctcctacagctgccgatgaagatgttcacccgatctagttgctgagcaggaacgaggatcaagacgaaactgatagataga

SEQ ID NO: 248023 - DNA, 458 bp, Glycine max
tcccggttcgacccacgcgtccgcgttcattttatctttgagtccattgattttttcccaagttgggttgtataatcggatgagtttgctgtgtgtgatgatcatgggatgcttgtgcttacctcactttcttcttccggtgtttgtatttgctaatagctccaatgggtactattgttgaagcacatgacacatataccaagatcctaggaagatggccagccttttactatggcatggggcacatgctcaatgacatatctgctgcttgtcggttcacctatttattattgttcttgacagatattggactttcacctaggaatgcagctgctgtgatgctatcaggtcaagtggctgatggatatgccaccatacttgttggcgaactgatcgacaagttcggacacttcaagatatagcacggtgctggatctttattggtcgcaatatcattt

SEQ ID NO: 248024 - DNA, 439 bp, Glycine max
ttcccgggtcgacccacgcgtgcggggaagcttcatggattttggtatagtccctacactttgatggtggtatggaccttaaaggtaaaggatgggccatatcaaaacatagaagaagaccgctacaataagagtcttcaacttcttgaatacaacccagtttacaagaaaactccagtgcttagccataatggaaaacccttatgtgagtccatgcttattgctgaatacattgatgagatacggtcacataattcattacttgctgctgatccctacaagagagctctggcaaggctcagggttaaatatgctgatgatgacatgttttctgcagatatacgcattctttcttagcagtaatgatgaagagcgagataagagcatagagaacatatgggagcatctcacggttgttgagaatcactgtttaggtgat

SEQ ID NO: 248025 - DNA, 350 bp, Glycine max
gaattcccgggtcgacccacgcgtccgcccacgcgtccgaaaaaaaaaaaaaggataaaaaaaaaaaaaaaaaaaaaaaaaaaaaaaggaaaaaaggaaaaaaaaaagggcggacgttctataggttccataagctttccttctcatgcatgcaactgttatttcttttttttattgtcaccttaattgaattcacttgccctactttttcaactgtaataactgtaaaaacccttgcgtttcccaacttatttgccttgtctcatattcccctttctccagtttgcgtaatatccaaaagtccctgaccttattgccctttccaacagtttgtcaatcttaatggcgaa

SEQ ID NO: 248026 - DNA, 513 bp, Glycine max
ggtgtgtccgggtgtccactgatacctagagccctcagcacgccgtaccggtccggaattcccgggtcgacgcacgcgtccgatcgttttctacataatacaaacctctctaatttttgaagcttattatacgcaatctcgatatgcagatcttcgtgaaaaccctaactggcaagacgatcaccttggaggtggagtcctctgacaccatcgacaacgtgaaggccaaaatccaagacaaggagggcattcctccggatcaacagcgtttaatcttcgccggaaaacagctcgaagacggcagaaccctcgccgactacaacatccaaaaggagtccacgctccacctcgtcctccgcctccgcggcggcatgcaaatcttcgtcaaaacccttactggcaaaacaatcacgctagaggtggagtccttcgacacaatcgataacgtgaaagccaagattcaagataaggaagggattcctccggatcaacaacgtttgatcttcgccggaa

SEQ ID NO: 248027 - DNA, 387 bp, Glycine max
taaaggtggtaaaatattggagtttcggatttaatcaagataaggggaacttctttagaaacaagtttcccagtacatgtaagatcatggtagatcctttattacatactatttattctctatatggatgatatatgtgagcaatttgcttaagcaaatggcctttgattgttacaatccaagttgtctccggggcttattcccatcatctggcagtaccttcggtagaagccgatccgatcttggacccgattatcctggccgtggccgcattcgaggccaccgttgattatgttggtgatgacaccgtagccaggagcccgacccgctgagctgtcagcactagattggagtcatcttccagtgatcacatcatggcttgatggc

SEQ ID NO: 248028 - DNA, 432 bp, Glycine max
cgacgcacgcgtacgaacgcgtctattgaagggtgtcagtggatctttcaggccaggtgttctcactgctctgagaggtgtcggaagtgcaggcagaacaactctgatggatgtactcactggtagaaaaactgggggatatattggggggaatatcacaatctctggttatccaaagaagcaagaaacatttgcacggatttctggatactgcgagcaaaatgatatccactctcctcatgttactgtatatgaatctttgctttactcaacatggcttcgactgtccccagaaatcaatgctgacaccaggaagatgttcatcgaggaagttatggaacttgtggaactgaaagcactaaggaacgcattagttggattgcctggtattaatggtctcttaacagagcaacgcataaagttgactattgc

SEQ ID NO: 248029 - DNA, 387 bp, Glycine max
taaaggtggtaaaatattaaagtttctggtttaatcagggtaaggggaacttctttagaaacaagtttcccagtacatgtaagatcatggtagatcctttattacatactatttattctctatatggatgatatatgtgagcaatttgcttaaccaaatggcctttgattgttacaatccaagttgtctcctgggcttattcccatcatttggcagtaccttatgtcaaagccgatccgatcttggacccgattatcctggccgtggccacattcgaggccacccttgattatgttggtgatgacaccgtaaccaggatcccgacccgatgatctgtcaacactagatggagtccatcttccagcgatcacatcatggctcgatggc

SEQ ID NO: 248030 - DNA, 317 bp, Glycine max
attcccgggtcgacccacgcgtccggatagattaaaattgctgcgaaagagaaatacatttcacagtcattttgtcatataaatgggtatacaagctcaattctaaagacctggtgacacattaagcaccaatggcaggagtttaacctgatgagcactacaaacaagatcaagatcacgtttctgaagaaattgagagatcttatcatcaccacatgtgcatgaaactcctctgtcattcattccgcatccttgaatatctttgctcggcttaaaccacataacaacacacagcagatacgcttctgaaacatctg

SEQ ID NO: 248031 - DNA, 516 bp, Glycine max
  unsure (1)..(516): unsure at all n locations
ggagtgtcgcggtgggtgatcctagttcatattgaacctctttgcaggtccggaattcccgggtcgacgcacgcgtccgattggctctattgaagggtgtcagtggagctttcaggccaggtgttctcactgctctagtgggtgtcacaggtgcaggcaaaacaactctgatggatgtactcgctggtagaaaaactgggggatatattggggggaatatcacaatctctggttatccaaagaagcaagaaacatttgcacggatttctggatactgcgagcaaaatgatatccactctcctcatgttactgtatatgaatctttgctttactcagcatggcttcgactgtccccagaaatcaatgctgacaccaggaagatgttcatcgaggaagttatggaacttgtggaactgaaagcactaaggaacgcattagttggattgcctggtattaatggtctctcaacagagcaacgcanaaggttgactattgcagttgaacttgtggcaaatc

SEQ ID NO: 248032 - DNA, 455 bp, Glycine max
gaattcccggtcgacccacgcgtccggagaaacatatggcagcactggatggctttaccgacttgaccggagcacagagcagcggggatatcggaaatctcgctcgctttgctggtgatgaacacaacaaataagagaatgcagttctggagactgtgagggtgattagtgcaaagaaacaagtggtatatggcaccttgtactatatcactttggaggcaaatgataggtgtgactaaaaaggtttatgaaactaaggtgttgtagaaaccatggctgaacatcaaggaggttcacgaattcaagcgcatcactgttgctgttgatcctctatcggtgacggtctaacacataactaggttatggaagtgactagcttggcctcaagagtcataatatgtatgaactgaataaatgtacctattaactctacatacggtcgcgggttgtgcatg

SEQ ID NO: 248033 - DNA, 369 bp, Glycine max
acgcgtccgatctccatttccatttgctgtctctaagtttccaagaatcttaagctatgggaaagtcggacccaaccgtgagcgctgattaccagaaggccgttgataatgcgaagaataagctcagaggcttcatcgctgtgaagagatgcgcttctctaatgctccgtttggcatggcactctgctggaacttactacgtgagctcgaataccggtggtccctttggaaccatatagcacccctccgaactctctaactgcgctaacaacggtcttgacatcactgtctaggcttctggagccactcaaagcggagtttcctatttcgagctacgccgatttctaccagttggctgtcgttgttgcc

SEQ ID NO: 248034 - DNA, 511 bp, Glycine max
ggagttgtagagtgcgccatgatacctagatcctacgcactgccgtaccggtccggaattcccgggtcgacgcacgcgtccgggacaatacaataagagtatggaaccttgaaaccttgcagtgtttacagacactaacagagcacacatctgttgtgatgtctgttctctgctgggaccaattccttttatcttgttcattggataaaacagtgaaggtatggtatgctactgaaagcggaaacttggaagtgacatatactcacaacgaagaaaatggtatacttaccctatgtgggatgcatgattcacaaggcaaacccattttgctgtgcgcttgcaatgataatactgtgcacctctatgatctgccatcatttgcagagagaggcaagatattgacaaaaaaagaggtacgagcaattcagatagggcctaacggcatattcttcactggtgacggtactggtgaaagtagagtgtggaattggattacggaggcaactactac

SEQ ID NO: 248035 - DNA, 519 bp, Glycine max
  unsure (1)..(519): unsure at all n locations
tgtgattttagatgtgtcgccactgataccctcagttcactacgcatgncgtaccggttcggaattcccgggtcgacgcacgcgtccggagtaacttcactttccccaactccacctgagaaaaagatacccataattcgcacgcacgcacgcacgcacttgttctgactcagtgcttgtgttggacgcagaagaaccagaaaagaaaaacaagcacgaggagatgattaacttcgaagaaaccgagttgcgactcggcctccctggcgggtctgcgagtgatcacaacgagtcaacaacggtcaagggcagtggtggaaagagaggcttctctgaaactgcttctgttgatttgaagcttaatctttcttccagtgatgactctgcctcagattcaccttcatctgcgtctacagagaagactaccactgctgcacctnctcctccttctcgagccaacgaccctgcaaaaccacctgcaaaggcacaagtggtgggttggccaccagttaggtcatt

SEQ ID NO: 248036 - DNA, 452 bp, Glycine max
cgcaattcccgggtcgacccacgcgtccgggaaaattcacaaaaaaatatggggacttaaccagggtagatgctcgtctagatatatgggcagcttcagggtttgcaaagaagattctgaatggttccagtagttcaactgctgatgttagcaaacaaccatcagcctcaccccggctaaatttaatctttcaacagcaggttgcagggccagttgattttcgagctgattcccggattgcccttgagtctttcgccaggaaaaacggtgtgtcagtagaggattttatttgcagcctgagttactccttgaaggatcttcagtctggaaagatcgttgcttggtattctccataaagaaaagagggaatggttgaatttcgcatgtatgagttatagcagaatgcaacaaccctcacatttttgtaacttacgcttagagatcttacaatg

SEQ ID NO: 248037 - DNA, 464 bp, Glycine max
ttcccggttcgacccacgcgtgcgcgacattctcataatcaaataccatttcattcattcttacatattgcttaattttatctggattttgaaagaccttctgaatggctttttcaagagttgcattgttaatatgcactgtaattgggtattttgtgattgcctctgcgggcaatttttaccaagattatgatatcacttggggagatgggcgtgctaagatactcaacaatggcgagcttatcactctgtctcttgacaaagcctctggctcgggtttccaattcaagaacgaatacctttttgataaaattgatatgcaactcagactaggttcaggcaactctgcttgcaccgtcacatgctactacttatgtccataaggatcatcatggtatgagactgactatgaattcttgggtaatatgatcagtgagccatacatgcttcacaccaacgtgttc

SEQ ID NO: 248038 - DNA, 513 bp, Glycine max
  unsure (1)..(513): unsure at all n locations
gagttgtcagtgtggtgtcgctgagacgatcgacttcgtngcaggtccggaattcccgggtcgacccacgcgtccgtggaaatgtttccaggtggtacaagcacattgatgctttgttgagaatctctggtgttactggcgagggatctggtgttattgttgagggatctctagttgcagagcctgttgcaactccccctgctgcagacacaaaggctgctgttgctgaggatgacgatgatgatgatgtggatttgttcggtgaagagacagaagaagagaagaaggcagcagaggaacgggcagctgcagtgaaggcatctacaaaaaaaaaagagtctgggaaatcatctgttctgttggatgtgaaaccatgggacgatgaaactgacatgaagaagctcgaagaagcagtgagatctgttcagatggaaaggttgctttggggtgcattcaaacttgtaccttgtgggtacggtatcaagaaacttgcaaatatgcttactatttggg

SEQ ID NO: 248039 - DNA, 515 bp, Glycine max
  unsure (1)..(515): unsure at all n locations
gttttntcagggtggtttccactgatacgatcgatactcatgcgacgccgtaccggtccggaattcccgggtcgacccacgcgtccgcccacgcgtccgtactgatcctttgttgcttgaaaggactctatatccatgcatcggatggcaacttcatcccatccagaacagaacagaacagaactggtggttgcattgaatcggaggggtaagtgggaagacgtgtcttgttttgtagctttcccttccctctctcttttccccgccgcatgtgccggattagacgcgaactgcttccataattcacctactgcaatcaaccatcacaagatttcccactgattggatggaagaagcatgtgaatttcgaagttgggctgaattgattcctgatgccctgggggtaatcttcaccaatctttctcttcaggagagggtaacagtgatccccagggtgtgcaaatcatgggctaatgcagtaactggaccttactgctggcaagagatagacatca

SEQ ID NO: 248040 - DNA, 422 bp, Glycine max
acgcgtacgcacacgcgtgcgcacacgcgcgcaactcactcatccgtctactcatcagcccacgcttccgggtacacggggatcatcagcatcaatttatgagatatcaattgctaccgacgctcgtattattgagggtgatccttagaatgttgatcattctgctcttactggagaatcactccctgtaacaaagaattcctatgatgaacagtattccggatcaacggtcaagaaggattatatagaagcaattgagattgcttctggggatcacacctactatggcaaagcagatcatttggtggacagtaccaaccaaattggacacttccagaaagtgcttacagcaattggtaacttctgcatttagctaattgccgatggaatcgtcatccagctcatagtcatgtacccgattc

SEQ ID NO: 248041 - DNA, 458 bp, Glycine max
cccgggtcgacccacgcgtccgagcattctttcgcaccttcgaaaatcaattttctgtctgctctgcgtcttcttcctctatgaatcgtttgccatggctcgtaccaagcataccgctcgcaaatccaccggtggaaaggctcctaggaagcaactcgccaccaaggctgcaaggaaatctgcaccgacaaccggtggagtcaagaagcctcatcgctatcgccctggaactggtgctcttcgtgagatccgaatataccaaaagagcacagagcttctgatccgcaagctccccttccagcgtcttgttcgtgaaattgcgcaagacttcaagaccgatttgaggttccagagtcacgctgttcttgcgcttcaggaagctgcggaggcttacttggtgggtttgttcgaggacaccaacttgtgtgcgaatcacgccaagagggtgaccatcatgc

SEQ ID NO: 248042 - DNA, 274 bp, Glycine max
ttgtaactataccaattttacatatttttacctttctcttgaatcctgtaataatatgcactttttcaccaactggactcacaactgaaatcaaatctgtggaaatccaccatgaatcttttacccagccacatcctgatgacaattttgaatacaatgttaaaaatgtttctgtcaaagatttaaaccctggtaatttttcctaaaactcaaaggataaccctccaaaagaggctcttaactttacaccccaagtaatcatcataaaccaccc

SEQ ID NO: 248043 - DNA, 444 bp, Glycine max
cccgggtcgacccacgcgtccgaggaggctcaatggatgcacattgacatggctggtcctgtgtggaatgacaagaagcgctgagcaacagggtttggcattgctactttagtggaatgggttttgaaaaatgcttcaaatgccaactgaaatttcaaatcttgttacatcgcatgtgaaacacaggatgagataagctcatcttgtgatgtttgtgcttcaatggggaatggttatatgaaataagttatttaaagggatggaaaatgtggttaaatgaggcatctgttagcgtattcaaactgttttctacatacaaataacaaccttttatgcttgttcacatttaccaatagttcacattgtctgtgatcattcgtcttacttatattgacacgtagactttcccagtagtgatactaatatactatattaaaccgtttc

SEQ ID NO: 248044 - DNA, 511 bp, Glycine max
  unsure (1)..(511): unsure at all n locations
tgagggcgttggtgcacatgagccgtcgcactccttaccggtccggaattcccgggtcgacccacgcgtccgcccacgcgtccgcccacgcgtccgcccacgcgtccgcccacgcgtccgcccacgcgtccgcggacgcgtgggtaatcagcatcaagttaggagatatcattccggccgacgctcgtcttcttgagggtgatcctttgagtgttgatcagtctgctctgactggagaatcactccctgtaacaaagagtccctcggatgaagtgttttcgggatcaacggtcaagaagggtgagatagaagcagttgtgattgctactggggtgcacaccttttttggcaaagcagctcatctggtggacagcaccaaccaagttggacacttccagaaagtgcttacagcaattggtaacttctgcatttgctcaattgcggttggaatcgtcatcgagctcatagtcatgtacccgattcagcaccgcaggtacagggatggaattgn

SEQ ID NO: 248045 - DNA, 220 bp, Glycine max
cgcctgctgtcacgcttcgggggacgcgtccgtaaacacgatgatagtaacgtatatactattgccatatgactcttgactctttgaggttgatcctttatacgtttatcagacagctttaacttgacaatcacttcttgtaacaaaaaattcctttaatgaagggttaacgggatcaacggtcaacaacgtatatatagaagcagcagtgatagctact

SEQ ID NO: 248046 - DNA, 459 bp, Glycine max
cgggtcgaccgcacgcgtccggggcaaactcctgaaacacctaccgttgatgtgagctcaaaagaattttatggtgagggatatgatgatggggacaagagaatccctgacatgaccataataaacaggcagcttggatggaatcccaagacttcactttgggacctgcttgagtccactctgacatatcagcacaggacatatgctgaagccgttaagaaagtcattgcaaaacccgttgcaagttaagctttttacagtgatggtgatgtgctacctttgagaagggtgttcttgtcttgcccaagtgttctgccatattatactggttgattttatataaaatcgtaaatgttcctcctattggtttcgttagcctgtaggcaatatagcccccacatggagaagtaggaatttatacaagggcaatctgtgctctatgtcattttaatgtagaga

SEQ ID NO: 248047 - DNA, 451 bp, Glycine max
ttcccggtcgacgcacgcgtgcggactgacctagcttcgaatctacaatatctgtccctttctttaatggccttgccttgtaggaccattcgggatctgaaactcagctactgatgctacttctacttctacttctacttcttctttcgcctacatgatactctgcatgtgcctctccgcacctgaaccacgcttctgaacgcaatggctcggcctaattgccctcttgctctctgcatctctttcatcttcgttgctcttcctctttccctcgccaccactgacccttctgatgttcaagctcttgaggacatgtacaaagtgtccaatagtccaactcatctaacgggttggaaaatcggtggtggcgacccatgtggagagtcatggaaaggggtaacgcgtgagggatcaatcgatgacttcattatactctcaagttcaagactcg

SEQ ID NO: 248048 - DNA, 324 bp, Glycine max
ttcccgggtcgacccacgcgtccgggcgaacaccgcctccgtaactaccgctccgtcaccaccgtccactccttcgacgacgacaacgcctccggcgacggcaagatctacaccgtcgtcctcgaatcctacgttgtcgacgtccccgacggcaacaccgaagaggacacgcgtctcttcgccgacaccgtcgtcaagctcaacctgcagaagctcgcgtccgtcaccgaaggaaccaacggcgacggtgacggtaagccacactcgcggtgaggaagcaagcaagcctcaataaaaaaatatatatatattaaagcaaacaac

SEQ ID NO: 248049 - DNA, 304 bp, Glycine max
attcccgggtcgacccacgcgtccggccacgcgtccgaccactcgtccgcccactcgtccgaaaaaaaaaaaaaaaaaaaaaaagaggaaaaaaaagagaaaaaaaaaaaaaaaaaaataaaaaaataaaaaaaaaaaaaaaaaaaacaaaaaaaaaaaaagtcaatgaggttcaaactactcatattccctaacccatcattaacaattcatttagcgctgatcagtctcacagcttatagattgaataaaggcataatgattaacctaaaaaaaagggaaactcactataattagacaactt

SEQ ID NO: 248050 - DNA, 511 bp, Glycine max
  unsure (1)..(511): unsure at all n locations
tgctgtggtccgatggtgtccctgagccgctgnactgcgtnaccggtccggaattcccgggtcgacccacgcgtccgattatattctctcactctcttactctttcactctacttctctctcctattgcggctagggtttaggtgtttctttcaccgtctccgttccttcaatcttcttattctctttcatctctgatggagacgttgcgggtttagttctaaggggtggttctggccttgggtttttggaacgtacggtgtcgttttggggttgggaaaacaaattctgagagatggcaaccacgaacccttttgatttgttgggtgacgacgctgaggacccttctcagctcatcgccgccgagcaactcaaggcggcggctgcggcctcggctgccacctgggctcccaagaaggcgccggctcagcataacaagccggctcagctccctaccaagccgtcttcttcggctcatgctgtgaaggatgccagaaacgagccagttcgtg

SEQ ID NO: 248051 - DNA, 522 bp, Glycine max
  unsure (1)..(522): unsure at all n locations
tgagttgtgcatttgtcctccatcgaaaccatcgacancnactggcaggtccggaattcccgggtcgacccacgcgtccggcgatcgtggcggcgaccgtggcggtttcggacgtggattcggcgggcgaggacgcggaggtgacaggggccgaggccggcgccgaggcccccgccgcgaggaagaggagaagtgggtcccagtgaccaaactgggccgcctggtgaaggagggaagaatccgaagccttgaacagatctacctccactcgctcccgatcaaggagcaccagatcatcgacacgctcgtgggtcccaccctcaaggacgaggtgatgaagatcacgccggtccagaagcagacccgggccgggcagaggacccggttcaaggccttcgtcgtcgtcggagacaacaacggccacgtcgggctgggcgtgaagtgcagcaaggaagtggcgacagctattcgtggcgcgattattctggcgaagctgtctgttatccccgtgaggagggggta

SEQ ID NO: 248052 - DNA, 501 bp, Glycine max
gagtgcctgtctatatcattgagtcgtagtactgccgtaccggtccggaattcccgggtcgaccgcacgcgtccgctagtgttttgttagttcacacactaagttctgaaaaatgagttccaaaggttttcttaggctacttatgttcatggccactatacttttgatctcctctgaggttgcacccgatgatgcataccagaattttgacaaaacagatgggaagcgtagtgcaaatggggtagatgaaagcaaatattggcgtggtggctatggcgactatggtggttggcgtggtggtggttggcgtggtggctatggacgctggcgtggtggctatggtggtgggcgtggtggctatggaggctggcgtggtggctatggtggtgggcgtggtggctacggaggttggggtggtggctttggccctaacgaacataatgaggctgggaatgatgctagcccttacaacttagaatgaaacttgcgtaagcttatttt

SEQ ID NO: 248053 - DNA, 401 bp, Glycine max
tcccggttcgacgcacgcgtgcgcgcacgcgttcgcccacacgtgcgcccacgcgtccgtccacgcgtgcgaatttaccagcggtactcgtgggttttgaaggctagaagtgctgcaatacaaacaatggcagctactcaagaagaagtgaagcttttgggtattgacggaagccgctttgtgtgcaaggtccagattgaccttaagatcaacggagttgaacacaaatttttggaataaaatttggacaataagactgatatgcttgttacatacaaccctgttcacaagaaagttccagacgatgatcactatgagcagcccatagcagacgctcttgttaatgttgaatacattgatgatacatggaagatcaaccacatcttaccttctgatcccta

SEQ ID NO: 248054 - DNA, 459 bp, Glycine max
ttccgggtcgacccacgcgtccgcccacgcgtccgagcatttagtgacaatgctctggcttaccttgccagcttctgcagaaaactgaaagtggtaaatctttgtggatgtgttagagctgcatccgatactgcattacaggctattggacaatactgcaatcagctacaatctttgaaccttggatggtgtgataatgttggcgatgttggagtgactactttagcatatgggtgtcctgatcttaggatagttgacttgtgtggctgtgtccgtataacagatgacagtgtgattgctttggcgactagatgcccccatctgaggtccctaggactgtactactgcaagaacatcacagatagagcaatgtattccttggcacacagcatggtgaacaacaggatgtggggaactgtgaaaggaggaggaaatgatgaagatggcttaaggactttg

SEQ ID NO: 248055 - DNA, 409 bp, Glycine max
aatccccgggtcgacccacgcgtccgagggactggtccctggcctttgctttggtgcgggtcttggaattacggtctttgggatggcgtacatgtttgtgcgcgatggattggttcataagagattcccggtgggccccattgcaaacgtgccctatctcagaagggtggcctctgctcaccaacttcaccattcggaaaaattcaatggagtgccatatgggctgtttttgggacccaaggaaattgaagaggtgggagggctagaagagctggagaaagagataagtaggagagcaagatcatacaaaatagctaatgagaacaactaatacaaatcaagaatgtttcgaagaattatcagtgtaaatcagaaatatgaaataaaatgatccaaaaattttgcttgc

SEQ ID NO: 248056 - DNA, 474 bp, Glycine max
gaatccccgggtcgacccacgcgtccgcccacgcgtccggcgacggtggagctctggtggatgacgtgctttctctaacaactgctctgagaaaagagagagagaatggcggtggagtacacatgctgctcaacggcgttcttcgttcacatagtggtaatcgtgctgctggtgctgttcgcgggcctcatgtcgggcctcaccttgggcctcatgtcgctcagcctcgttgatcttgaggttctcgctaagtccggcactcctcaggatcgtaaacacgctgagaagatattaccagttgtcaaaaaccaacatttattgctatgtactcttctaatttgcaatgctgcggccatggagacacttcctatttttcttgatggtcttgttactgcttggggcgctatcctgatttcagtgacattaattcttttgtttggtgagattataccccaatcagtttgttctcggtat

SEQ ID NO: 248057 - DNA, 528 bp, Glycine max
  unsure (1)..(528): unsure at all n locations
ggccnnntttnaggtaccggctgataccgatggnactgacatccctgtatngncgcaccggtccggaattcccgggtcgacccacgcgtccgcccacgcgtccgcataaatcctctcaccaaataaacctcaatttattgcattgcataataccatgtcaatgaagttgtatgcttccctcacccttacggtgtggcttttcatggccacattttcgcgagcccaatacgttattgacacaaatggcgaacccgttgacaatgatgatgagtattacatcaggccagccataaccgacaacggagggcgtttcaccttgatcaaccgaaacgggtcgtgccctctctacgtgggtcttgaaaacaccgatacgccactgggttatccagtgaaatttacccattttgccctcaacgttcaagatgaggatataagggtgaacagcgacttgagaatcgaattcgtggaagtttccacaacgtgtgtgcaatccacggaatgganggtgggtgagaacgacacgaggag

SEQ ID NO: 248058 - DNA, 531 bp, Glycine max
  unsure (1)..(531): unsure at all n locations
tggccnnattttggagggacctggactcatggtccagctacactacgtactgacgtaccggtccggaattcccgggtcgacccacgcgtccgctccgatcgcatagctcgctcgcaaccaccatgccttcccgaagaagaactctcttgaagggcatcattctcggtgacagtggggtggggaagacatctttgatgaaccaatatgtgaataagaagtttagtaatcagtacaaggcaaccattggagcggattttttaaccaaagaagtgcaattcgaagataggcttttcaccttacagatttgggatacagctggccaagaaagattccaaagccttggagttgctttctatcgtggtgctgattgtcgtgttcttgtatatgatgttaattcgatgaaatcatttgacaaccttaataactggagggaggaatttctgattcaagcaagtacttctgatccacagaagtctccttttgttgtcataggacacaaaatagatattgatggtgggaacagcagagtgg

SEQ ID NO: 248059 - DNA, 522 bp, Glycine max
  unsure (1)..(522): unsure at all n locations
tggcnnnttgagctgcggcacnactcatgtcagtcctcatcgactgacgtaccggtccggaattcccgggtcgaccgacgcgtccggcgatgttttgttcctctttggttcttcgtgcccttcccaatcttcaactttagggttcctgtaatctcgttattcctcttcactcccaaactccgttcactccaacaacactctgatttagaaatggatggaccggctggtcgaggtggtgctggactggacatgtttctgccaaattataaattgggaaaaacacttgggattggatcttttggcaaggtcaaaattgcagaacatgtattgactggccataaggttgcgatcaagattcttaaccgacgcaagataaagaacatggaaatggaagaaaaagtgagaagagaaatcaaaattttaagattattcatgcatcctcacattatacgactttatgaagtcatagaaacttcaactgacatatattttgtcatggagtatgtgaagtcttgaaagctg

SEQ ID NO: 248060 - DNA, 530 bp, Glycine max
  unsure (1)..(530): unsure at all n locations
ggccgangtgtgagtgggcaggtatcatcgtccagctccctacgnactgacgcaccggtccggaattcccgggtcgaccggcgcgtccgaacttcttcttgagtgttttctcagttcctcacatcatgtaccgctttggaacctccctcggctgcaaagctagaattgccaggagcagcactcaacagattggaagtagggtcacttggaacaggaattatgcggccaaagacattaagtttggtgtggaggctcgggctctgatgcttaagggtgtcgaagagctcgctgatgccggtaaagtaacaatgggccctaaggggcgtaatgtggttattgagcaaagttttggagcacctaaagtgacgaaagatggagtaaccgttgctaagagcattgaattcaaggacaaagtcaagaatatcggtgccagtcttgtaaagcagggtgctaatgctactaatgacgtggctggtgatggaaccacttgtgctacaattcttactaaagcaatttttacggcaggatgn

SEQ ID NO: 248061 - DNA, 524 bp, Glycine max
  unsure (1)..(524): unsure at all n locations
gggaaggctcggataggtccgcatgagctctatgggacatattgtactgctctaccggtccggaattcccgggtcgacccacgcgtccgcggacgcgtggggggaatgtttgttcctgctatcaaaggacaaggaactgaggaacaggagaagaagtggttgcctttggctcataagatgcaaataattggttgttatgcccaaactgaacttggccatggatctaatgttcaagggcttgaaacaactgcaacctttgatcccagaacagacgagtttgtaattcatagccccacattgacttcaagcaaatggtggcctggtggattgggtaaagtgtcaacacatgccgtggtttatgcccgactaattactgatggccaagatcatggagtgcatggtttcattgtccagctgcggaacctggatgatcacttacctcttncaagcataacttgtggtgatattgaaatgaaatttgaaatggggcttatactncattgataatgggatgctaaggtttg

SEQ ID NO: 248062 - DNA, 505 bp, Glycine max
  unsure (1)..(505): unsure at all n locations
gggccacatgattctcntaaagaattatataggatctgctctaccggtccggaattcccgggtcgacccacgcgtccgaccgtttctttcacttcacaaaaatgaaaaacatgaaattgtgttcggtgatgctatgcggatcactagcgttccttcttggggccacagcagaacaatgtggcacacaagctggtggagcgttatgcccaaatagattatgttgcagcaaatttgggtggtgtggtgacacagattcctactgtggagaaggttgccagagccaatgcagatctgcaacaccctgaacaccaactccaacaacacctagtagtggtggagatattagcagactcattagctcttctctctttgatcaaatgcttaaataccgaaacgatggccgctgttctggccatggattctacagatatgatgctntcattgccgctgctggctctgtcaatggctttggcacaaccggtgatgacaacactcgcaagaagga

SEQ ID NO: 248063 - DNA, 461 bp, Glycine max
ccgggtcgaccgacgcgtccgcccacgcgtccgtaaagaagaaactaaccatagatgatatccatgacatttatgggctgcgcttgattgttgacaaggaagaagactgttacaaagctttgacagttgttcatcgattatggtctgaggtgcctggaaagctgaaagattacatatgtcgtcccaagttcaatggatatcaatctctgcatactgttgtgatgggtgaaggcaaggttccccttgaagtacaaattcggaccaaagatatgcatttacaagcagaatttggatttgctgctcattggagatacaaggaagatgattgtcagcattcttcatttgtgcttcagatggttgagtgggctcgatgggttgtcacctggcagtgcgaagcaatgagtagagattgttcatctgttggatatgctgattcagtcaatcccccatgcaagttccct

SEQ ID NO: 248064 - DNA, 433 bp, Glycine max
ccgggtcgacccacgcgtccgattcgctcgcattgcttcgcctcacaacagcagctgcagcagcaatggctcccaaacgaggtggaaaggctccggctcttgccgctaagaagaagcctgagaaggtcacgaatccgttgttcgagaagcgtccgaagcagttcggaatcggaggggcgttgcctccgaagagagacttgactaggttcgtgaagtggccaaagaatgttcaaattcagaggaagaagaggattctgaagcagaggttgaaggttcccccagctttgaaccagtttaccaaaactcttgacaaaaacctagcaacaagtctgttcaagttgcttctgaagtacaggcccgaggacaaagctgaaaagaaggagaggctcttgaaaagggctcaggcagaggctgaaggcaaaactgttgaagc

SEQ ID NO: 248065 - DNA, 324 bp, Glycine max
ccgggtcgacccacgcgtccgtaatttaatattaatgttcgggtacccccctccggctcgtagttgagaagagctttcgtttaggaaagggctaaatgggtgcgatccctctcgttgagagtcaagggtctcctggagtagaaggcacatcctggatctattaagccggcaagggttcagcattggctttcacgaccgcaaaggggccatctctcagtcggagtagataagatagatatacttaatttaatatcttttattatatattttaatataataaagaaaatcgtgaataaaagagcgtgacgagaaaaaaataacaac

SEQ ID NO: 248066 - DNA, 464 bp, Glycine max
accggtccggagttcccgggtcgaccgacgcgtccgcccacgcgtccgaagaggtcgagtttcacagcagcaatggtgtacgtcagggctcagaaatgaggagcctacttcaagagatatcaagtcaagttcaagagaagaagagagggaaaaaccgattaccgtgccaggattcggttgattaatcaggacaagaacaaatataacactccgaaataccgatttgttgttcgctttagcaacaaggacattgttgcacaaataatatctgctagcattgctggcgatattgttcttgctgcagcatatgcacatgagctgccacaatatggtcttgaagtagggcttacaaattatgctgcagcttattgcactggtctcctgttggcccgaagagtcctcaatacacttgaaatggatgaggagtatgaaggaaatgttgaggctactggagaggattattc

SEQ ID NO: 248067 - DNA, 527 bp, Glycine max
  unsure (1)..(527): unsure at all n locations
gtccannttttagagtgcctggactcatctanagaagatgactnactgctccaccggtccggaattcccgggtcgaccgacgcgtccggtggctgtttgtggtatggttggttcagggaaatcaagttttcttttgtgcatccttggagagattcctaaaatttctggtgaagttagagtgtgtggctcttctgcatatgtctcccaatcagcatggatacaatcaggaactatagaagaaaatatcctctttggaagcccaatggacaaagcaaagtacaagaatgttcttcatgcttgttcactgaaaaaggacctagaacttttctcacatggtgatcttacaattattggggatagaggtataaacctgagtggtggccagaagcagcgggttcagctggctcgggcactctaccaagatgctgatatttatcttcttgatgatcccttcagtgcagttgatgctcacactggatcagacttgtttagggagtatatattgacagcacttgcagattaaacag

SEQ ID NO: 248068 - DNA, 472 bp, Glycine max
ccggttcggaattcccgggtggacgcacgcgtccgtttctccaatttaatcaccattgtacaacctaattcccttcgtcgttttggattaacagggcaatggcacgtaccaagcagaccgctcgcaagtccaccggaggaaaggctccgaggaagcaattggcaaccaaagccggtcgcaagtcatccccggcgaccggcggagtgaagaagccccaccgcttcatgccaggaacggtggctctgagggagattcgaaagtaccagatgagcaccgaacttctgatccgaaaactgccattccagaggctcgtcagagaaatcgctcacgatttcaaaaccgatctccgctttcagagcaacgccgtttcggctcttcaggaagccgctgaggcttatctcgctggactctatgaggacactaacctctgcgctattcacgctaagcgagttaccattatgcccaatgacat

SEQ ID NO: 248069 - DNA, 380 bp, Glycine max
ccggtccggaattcccgggtcgacgcactcgtccgcccacgcgtccgaaaaaaaaaaaaaagagatataaaaaaataaaaaaaaagaaaaaaaaagagaaataataaaaaagaaactagaaaaaaaaaaactaaaaaaacaataaataataaacaagtgttccatcgttttaatggtcccaagtttccttatacttccttattactttttaattttttttttgtgtcacctttttaaaattcattgcctttccttttaaaacatcattcctgtaaatacctttgattctccaaacttattcacctttcaaaccatccccttttttcaaatttccttattacctaaattgccctgcccaatagactttcccaacattttcc

SEQ ID NO: 248070 - DNA, 454 bp, Glycine max
gaattcccgctggacgcacgcgtccggaatgctcacgccttctgcttccgtggcgctccaccccactccaacgcgctctcgaggggcttccgccggaggcgagtccgcatctcgctcctcagccagtccgagaagcctgacgtcacttataatgacattggaggatgtgatatccagaaacaggaaatccgtgaggctgtggagctaccccttacacatcatgaactatacaaacaaattggtattgatcctactcgaggtgttttactgtatggaccccctggcactggcaaaacaatgcttgccaaagctgttgctaatcataccactgccgccttcatcagggttgtaggatctgagtttgtgcaaaagtatcttggtgagggtccacgaatggttcgtgatgtatttcgtctcgctaaagagaatgcgcctgctattatatttattgatg

SEQ ID NO: 248071 - DNA, 460 bp, Glycine max
ccgggtcgacccacgcgtccgcaaacgcattaagttacaaatctgggatactgctggtcaggagcgatttcgaactattaccggagcttattaccgtggagccatgggcatattgcttgtttatgatgttactgatgaagcatctttcaacaatattaggaattggattcgcaacattgaacaacatgcttctgacaatgtaaacaagatacttgtgggtaacaaggctgatatggatgaaagtaaaagggctgtgcctacctccaaaggtcaagcccttgctgatgagtatggtatcaagttttttgaaaccagtgcgaagacaaacatgaatgtggaggaggttttcttttcaatagcaagagatatcaagcaaaggcttgcagacacagattctaaggctgaacctcagactatcaagattaaccaacccgaccaggcagccaccgggggtctagct

SEQ ID NO: 248072 - DNA, 416 bp, Glycine max
ccgggtcgacccacgcgtccgggcaggtactggaaaaggtgttacctcaaaagagcagcaagcatgtgtcagacatggagctggatgattgtgaggggaccactttgcatgatgtcaactttaaggaggagatgagacgaaagcagcaacagcaatatcgcgaggcatatgatgaagatgatgatgagccatctggtcaacgagtgcaatgtgctcaacagtagtgcaatttatggtagtagaggttctataatttctgcatggttattatcttttgattgcataatgcagatataactgcgtgataaatttaccctttaagttttggctggtaacggtatttagtcttggcagatttctaaagtctgttatttggtggaatatatgaaaattaaatgatttggtacaaagcgcgc

SEQ ID NO: 248073 - DNA, 459 bp, Glycine max
cggaactcccgggtcgacccacgcgtccgcccacgcgtccggatttcagaaggaggtagaaagcgagcttttctctttgggaatgaccaagtttaacgtggaagaagagtctactagtgacttggaggaggaactgaagcgggtgactgcagaaaacaagaagttggccgaaatgctctcagtggtgtgtgagaactacaacactttgagaaaccatttgatggaatgcatgaggaaaaatggtgaaaaggaggtcagcccaacatcaaagaaaagaaagtctgaaagcagcaacaacaatagtaatttgatgggaactaacaatggaaactcagagagcagttctactgatgaagaatcttgcaagaaaccaagggaagaaatcatcaaagcaaaaatttcaagagtttatgtcaagactgaagcatctgatactagccttattgttaaagatggata

SEQ ID NO: 248074 - DNA, 528 bp, Glycine max
  unsure (1)..(528): unsure at all n locations
ggccggaatggacgtgggnttaaagctcatcgtccagctcacctacgaaactgacgtaccggtccggaattcccgggtcgaccgacgcgtccgggaattttctcgatccctttctgatctgtgatctctgatctgtttgcgtgacttgatcttatgatacttgtgttactatatgattcttttattactctcacgccaatagattatcaacgatcgtgagactggaagatccaggggttttggatttgtgaccttcgcctcggagcagtccatgaaagacgccatcgaagggatgaacggccaaaaccttgacggccgtaacatcactgttaacgaagctcagtcccgtggtggcggtggcggcggacgcggtggaggtggtcgatatggtggtggtcgcagtggtggatatggtggtgagcgtcgctgagatgatgggagctacaaccgtaacagatgctgtaactgcctaggaccgtgatactcgaccttgtggtgaaaatgggtgcccgttttggagatattagc

SEQ ID NO: 248075 - DNA, 525 bp, Glycine max
  unsure (1)..(525): unsure at all n locations
aggtcctnttttgaggtgcggactagaccncttcagtctcactacgactgacgtaccggtccggaattcccgggtcgacgcacgcgtccgctcgcctcaatttgttacaaaccctgagaagttgattgttgaatttgagaatgcgagagtgttgattacagatcagaagatttcagcaataaaagacattataccactgttggagaaaaccactcagttgagagctcctttgcttatcattgccgaggatgtcactggtgaggctttggccacccttgtcgtgaataagctgcgtggtatccttaacgttgctgccattaaagctcctggctttggtgagcggcgaaaggccctgcttcaagacattgctatattgactggtgctgagttccaagctagtgatctgggtctgcttgttgaaaacacctcagtggagcagcttggtttggctaggaaaattaccatctccaaggattctaccactgtcattgctgatgctgcgacaaaggatgagttgcaagccag

SEQ ID NO: 248076 - DNA, 509 bp, Glycine max
  unsure (1)..(509): unsure at all n locations
tgtgccgactaggccagctctagctcaggtccgtacctgccgtaccggtccggaattcccgggtcgacgcacgcgtccgcccacgcgtccgcccacgcgtccgggaaaatggtctgttgtttgttccaaagggccaggggcagaatccgcaagcacagatgttctctgatccgaacatggccatggatatgatgaagaaaaacctttcaatgatcattcctcagactcttacttttgcttgggtgaactttttcttttctggatttgtagcagccaagataccctttccattgacacagaggtttaggtcaatgctacagaatggaatagaccttagcaccgtagatgttagctatgtcagcagtcgctcttggtacttcctcaatctgtttggattaagaggattgtttagtctcatattgggtgaagaaaatgctgtagatgatacacaacgtatgatgcaaatgggtggatttggatttgatccttcaaagggtctgagtgctgan

SEQ ID NO: 248077 - DNA, 514 bp, Glycine max
  unsure (1)..(514): unsure at all n locations
cggttcgatgagaccntatatgcatactatagtatctgctctaccggtccggaattcccgggtcgacgcacgcgtccgaaaaaaaaaatgcagccccaccagaaccctcccgcactggattccgacccgcagctcccggagatcaaaatccaccaccctgcctccccacgccaccatcacccttcctccgccggcgccgcgacccccacccccaccgccggcgcgcgtcgcaaaatcggcgtggccgtcgacctctccgacgagagcgcctacgcggtccgctgggccgtgcagcactacatccgccccggcgacgccgtgatcctgctccacgtcagcgctaccaacgtcctcttcggcgccgactggggctccatcgacctctccatcaacaccgaccccaactccgacgaggatgccgtcagcgccgtcaacaacagcaacgaccacaacagcaagcgcaagctggaggacgacttcgacgcctttacggcgtccaaggcggcggatctcg

SEQ ID NO: 248078 - DNA, 528 bp, Glycine max
  unsure (1)..(528): unsure at all n locations
aggtgtcccgnnnnttnggaggccgctcgagngctcttaagaagagtatatagtattgctctaccggtccggaattcccgggtcgacgcacgcgtccgaattgaaagaagatcgatcgatcgatcgatggctctggtcggagttgaagtgaagcatgcggcggatggcgcaccggaggagaattgctccgccaagcccaccaagcagggcgagggcctccgccactactattctcacaacatccacgagcatcagctccttctccgtcaaaagacgcataacctcaaccgtcttgaggctcagagaaacgagctcaattccagggtgaggatgctgcgcgaagaattacagcttttgcaggaaccaggctcttatgttggtgaagttgtcaaagtcatgggcaagaacaaagtccttgtcaaggtccacccagaaggaaaatatgtcgttgatattgacaaaagtattgacattacaaagattactccatccactagagttgcacttcgcaacgacagttatgttctt

SEQ ID NO: 248079 - DNA, 467 bp, Glycine max
gaatccccgggtcgacccacgcgtccggccaatctctaggtgtttctgccagcaccttgacaaatatatttaattgctccagtgctcgctgttggagtagtgatgcttacaacccagttcctgggctgatggaaggggtgccctcgtcaggggattataacggagggtttgcatccaagcttatggcaaaagacttgaatctagcagtagaatcagctaagctggctggatgtaaatacccactaacatcacaagcgcaaaagatatatactgagctctgcagcgttggccatgaagccaaagacttttcatgtgcttttcgccattattactctggaattgacgaacctcatgatcagtaaattaagacgttggttgtatgcataaaactgttgtgatcccatgcctagtatatatggcaagaagatcaattgagctcaatgaagttgtagaaacagttgcgagtt

SEQ ID NO: 248080 - DNA, 465 bp, Glycine max
cccgggtcgacccacgcgtccgcacagctagcagatattacatacacgtgaatcactaattaagccatggagaagaaatcaatagctgggttgtgggtcctcttccttgttctctttgttgctcaagaagttgtggtgcaaactgaggcaaagacttgcgagaacctggctgatacatacaggggtccatgcttcaccactggcagctgcgatgatcactgcaagaacaaagagcacttgctcagaggcagatgcagggacgattttcgctgttggtgcaccaaaaactgttaaatggatccattcactccaacgtgaagaagatgcatgcagcgctattttataaaaaataaaactactatatactatatataataagactggcgctgcatcaatgacctatgtattatagtatatattattaccgatgtcagaactatagatgcatgtactgtgcataacggc

SEQ ID NO: 248081 - DNA, 531 bp, Glycine max
  unsure (1)..(531): unsure at all n locations
aggccganagtattgcggtcgctgagtagtcctggtcatgtcactcatcgtactgacgcaccggtccggaattcccgggtcgaccgacgcgtccggtgaacaacaattgcagcaccagcctgtccctgttctctctctgcctaaagaagtggttttgtcttcgccaagaccggttagtgagcttgatgctgcggctactaagcttcaaaaagtctacaagagttaccgcactagaagaaaccttgcagattgtgctgttgtggtggaagaactctggtggaaggcattagactttgcttctcttaaacggagctctgtttcattctttgatgtggagaaacacgaaaccgccgtgtcacggtggacaagagcaaagacaagagcagctaaggttggaaaaggtttgtctaaggatgataaggcacaaaaattggccttgcaacattggctcgaagctattgacccacgtcatcgctatgggcacaatttgcacatgtattacgatacttggtttgaaagccaaagcaccca

SEQ ID NO: 248082 - DNA, 513 bp, Glycine max
  unsure (1)..(513): unsure at all n locations
tgggactgatacgttgtctagccgagctacgnactgacgtaccggtccggaattcccgggtcgaccgacgcgtccgtcttcatttcattaaactacattttttggtacaacatgaaacgttttgtgttttctctagcatgggtttttgctcttgtgctagcttcttcgttggctcatgctgcggttgtggaacacacttttaatgtggaggacattactgtgcagcgtttgtgtcgtcaacaattgatcactgccgttaatggaaccctaccaggaccaacaattaacgctcgagagggtgatactattgtcgtccacgtattcaacaagtcaccctataatcttactcttcattggcacggtattattcaatttttaactccttggtcagacggtcctgaatttgtaactcaatgcccaataccttccggtagcagatacacatacaaatttaacctaacgggacangaagggactcnttggtggcatgcacactcatcatttctgcgtgct

SEQ ID NO: 248083 - DNA, 529 bp, Glycine max
  unsure (1)..(529): unsure at all n locations
tggcctntntttagagtgccatagactcatcgaacgaagatgactgtactgctctaccggtccggaattcccgggtcgacccacgcgtccggcaggaattaggaatattcgacaggtagagtttcttcaatggctcctaaagttgataagaagaatgatccaaaggcccaggccttgaagactgctaaggcagttaagtcaggtgctacctttaagaagaaggtaaagaagatccgaacttctgtcactttccacaggccgaagaccttgaagaaggacaggaaccccaagtaccctcgcattagcgccccgccgaggaacaagcttgatcattatcagatcctgaaataccccctcaccactgagtctgccatgaagaagattgaggacaacaacactttggttttcattgtcgacctgcgtgccgacaagaagaagatcaaggatgcggtgaagaaaatgtatgacatccaggccaaaaaagtgaacaccttgatcaggcctgatggcaccaagaaagcatatgtca

SEQ ID NO: 248084 - DNA, 528 bp, Glycine max
  unsure (1)..(528): unsure at all n locations
agtgccgtgttggngagtggccaggactcatgtcaggagatcactgactgacgtaccggtccggaattcccgggtcgaccgacgcgtccgggtccaatgctactgggagtcaaagctgtgatagccaagagtttcgagagaattcatcgcaggaacttggtaggaatgggtatcattcctctttgcttcaaacccggtgaggatgcggacacattgggattaactggtcatgaacgttatacaattgaactaccaagtattatcaatgagattaggcctggccaagatgtgacagtcacaaccgataatggaaaatctttcacttgcacagcacgctttgacactgaagtcgaacttgcttacttcaaccacggaggcatacttccatatgtcataaggaacctcattaagcagtgaagccatagccgattgaaaattccaaggtcattgttcccatatgcttttaaagttgtaaaatgtgagaataattttctgagagataggaaaagatccctttttttagagggg

SEQ ID NO: 248085 - DNA, 518 bp, Glycine max
ggtcccgtggtgaggtcgcctcgacgctctagctccctacgatagcgtaccggtccggaattcccgggtcgacgcacgcgtccggcataccagaattttgacaaaacagatgggaagcgtagtgcaaatggggtagatgaaaggaaatattggcgtggtggctatggcgactatggtggttggcgtggtggtggttggcgtggtggctatggaggctggcgtggtggctatggtggtgggcgtggtggctatggtggctggcgtggtggctatggtggtgggcgtggtggctacggaagttggggtggtggctttggccctaacgaacataatgaggctgggattgatgctagccctcacaactaagaaggaaacttgctaaagcttatataggatttaagttatcgtaataaatcaaacttcattggaagggtagttataatagatgtggagatctttcttcgctctggtcatataaaggaataatacttctctattaatttccttaaaaaaaaaaa

SEQ ID NO: 248086 - DNA, 532 bp, Glycine max
  unsure (1)..(532): unsure at all n locations
gagtccgntantttaggccaccaggtactgtcttacctcagcttagaactgacgtaccggtccggaattcccgggtcgacgcacgcgtccgcccacgcgtccgcccacgcgtccgcccactcgtccgaaaaaaaaaaaaggaaaaaaaaagagaaaaaaaaaaaggaaaaaaaaaaaaaaaaaaaaaaaaaaaaaaaaaaaaaaaaaaaaaaaaaaaaaaaaaaaaaaaaaaaaaaaaaaaaaagaaaaaaaaaaaaaaaaaaaaaaaaaaaaaaaggggaccctttataggagacaaaaccttactaccaaggaattaaaaataataaacatttacaataagagtaacaaaaattaaataaagtggcagaagttaaaaaaccgataagcctgaaaaaaccgggggatacccagattaattaatttgaaacaaacattcctttaacaaaaatggcggataaacaaaaaagcccacccaaaaaggcttatcaaatttgcacgaacctaaaagggcaaatgaaaccctccttat

SEQ ID NO: 248087 - DNA, 453 bp, Glycine max
gaacccccgggtcgacccacgcgtccgccattattaattccgttagcaaaacttcaaaccccatcttcttctctagagaaagattgatctctggcataggcgcaaataaccagatataatggcggtatcggtgaaagtcagcaacatctcttcaactgcaaccgagcaagatttgagggaatttcttgcgtttccgggaaaaatcgaatatattgaaatgcaaagtgataagggaaattcccaagttgcgtatgttaccttcagtaatccagagggggcagaaactgcagttcttctctcgggggcggtggtgtgtggacagtctctaaccatagctttggctccggatcatgctctgcctgcctctgctgcatctgcaacacagactagtaatgctgagagtggcgaatctggtttgagaaaggcagaggatgttgtaaccggcttgctagc

SEQ ID NO: 248088 - DNA, 454 bp, Glycine max
gggtcgacccacgcgtccgagaggaggaaaaggatgacaaaattgatgtatagaaggtcaaggtgaaagaagatgatggggaagatgaagggaggaaggagaagaagaaaaaggaaaagaaggacaaagatgaagaaacagacacattaaagggaaaggaaaaaaatggtgatggtgaagagaagaaggaaaagaaagagaatgagaagaaaaaggaaaagaaggacaaagatgaagaaacagacacattaaaggaaaagggaaaaaatgacgaaggcgaggatgctgaagagaagaaagaaaagaagaaaaaggaaaagaatgacaaggatgacaaaactgatgtatagaaggtcaaggggaaagaagacaaagagaaaaaacaaaagataaagaaggaaaaagatgacaaaattgatgtagagaaggtcaaggggaaagaagatgatgggga

SEQ ID NO: 248089 - DNA, 513 bp, Glycine max
  unsure (1)..(513): unsure at all n locations
tgtgccgactgaaaccncttcaggctcgctacgcactgccgctaccggtccggaattcccgggtcgacgcacgcgtccgcccacgcgtccgcccacgcgtccgagaacaatcgtatgcagttttaagccacctgcatcgtttggtcatgcgtgcaccttatatattttcctcagactacaaacacttctattgccagtataatgagccatcatatgtcaaaaagttgaagcttgaaatgctgactgcagttgcaaatgaaagtaacacctatgagatagtgacagaattatgtgaatatgctgcaaatgttgacattcccattgcaagggaatcaattcgagctgttgggaagatagcattgcagcagtatgatgtcaatgctattgttgatcgacttctccagtttcttgagatggaaaaggactatgttacttctgaagctctggtgcttgtgaaagatctgctaagaaaatatccacaatggagtcaggattgtatttgctgtgttggaa

SEQ ID NO: 248090 - DNA, 506 bp, Glycine max
ggtgccgctgagtactgttctagctcactacgcactgccgtaccggtctcggaattcccgggtcgacgcacgcgtccgattggaactgtgccagtgggacgtgttgagaccggtgtcttgaagcctggaatggtggggacttttgcaccaactggactgacaactgaagtcaagtctgtggagatgcaccatgaatctcttacagaggcacatcctggtgacaatgtgggattcaatgttaagaatgttgctgttaaggatttgaagcgtggttatgttgcctcaaactcaaaggatgaccctgcaaaggaggctgctaacttcacagcccaagtcatcatcatgaaccaccctggtcagattggaaatggctatgcccctgtcctcgactgccacacttctcacattgctgtcaagtttgctgaactcatgaccaagattgacaggcgatccggcaaagagcttgagaaggagcccaagtttttgaagaacggtgatgctggttt

SEQ ID NO: 248091 - DNA, 459 bp, Glycine max
aacccccgggtcgacccacgcgtccgatgcagagtccctcacaatggcggaatcgtgccttctatccctgccttccctcttctacgccgaaaacaatacccgggtctctctcaattcccaccaagcccctcaacctccatcttccatgctccaactcttcgctctttcccctcaccaccaaaacaacgcgccactcttctctcctcacattcgtggctcagacatcggattgggccaaagaagaagaggaagaagaaacctcgtgggagaaccaaggcgacaccgcgtggggaactgaagaaggtggccacgaagaagggggtttcgctgaaaaagctgaggaagataagatcttcgttgggaacttgcctttcgacatcgacagcgagaatttggcgtcgctcttcgggcaagctggcaccgttgaggttgctgaggttatttataataaggccactg

SEQ ID NO: 248092 - DNA, 460 bp, Glycine max
ccgggtcgacccacgcgtccggtgggaaatggcgtacctgaacgctaggcgcaccttagcatctaccctgtcacgagctcttgcttcttcatccggtagcgcctctcgctttcgcttcgcattcgcattcgcgttgctccccgccaaacaaaccgcacccaaccctcactgggcgagtttcgcggttcggactcaatcttcgggttcgggttactcgcccctgaacgacccgtccccgaactggagcaaccgtcccccgaaggagaccattcttctcgatggctgcgactacgagcactggctcatcgtcatggagttccccgataaccctaaaccctctgaggaccacatggtcaacgcctatgtcaaaaccctagctcaagtccttggaagtgaggaggatgccaaaaacaagatatactctgtttccacttctacatacacaggtttcggcgctctc

SEQ ID NO: 248093 - DNA, 528 bp, Glycine max
  unsure (1)..(528): unsure at all n locations
tggcccgnttggnagatgggcctggctcatcgtcagcctcactccgactgacgtaccggtccggaattcccgggtcgaccgacgcgtccgcccacgcgtccgagaatatattacattaagatagcccaaagaaagaagaagatggcgtccgagtgcaaaggtaagagctcatggcctgagttggttggagtggaaggaacggtggcggtggctacaattgagagggagaatcctttggtggatgctaacactgtgcttaaaggatccatcgtcaccgctgattttcgatgtgatagggttcgggtttgggtcaccaaacatggaattgtttatcaggctccaagaattggataagaagtgtttacactaaagcacttcatatatatgttatgagtcatgaatataatagtatttaaataaggagttattcttccaattatgttatttgattgaaaataaaaacatgactataagaaatttngtttttcttatttttaattatgttatgcactgcaaaataatatacaa

SEQ ID NO: 248094 - DNA, 516 bp, Glycine max
  unsure (1)..(516): unsure at all n locations
tggcgctgagaccgttggctcagcctcactacgnactgacgtaccggtccggaattcccgggtcgacccacgcgtccgcccacgcgtccgctgaaaagctcatgaaatatcagaacactcgcgggggaagagttgtactgcaccccatcaagaatgtcccctcagaatttgagcatgtggaaaagggggatgcattgtatgcaatggaattagctttgtctttggagaagttagtgaatgagaaacttctgaatgtgcacagtgtggcagatcgcaacaatgaccctcaaatggccgacttcattgaaagcgagtttttgtctgaacaggttgaatcaattaagaaaatttcagagtatgtggctcagttgagaagggttggaaagggtcacggtgtttggcactttgatcaaagacttcttgattaggaagatgctgcttaatcttgaatagccttattattagtcttcatttacatttggtcttttctgaaattctgggttgttttctaattta

SEQ ID NO: 248095 - DNA, 468 bp, Glycine max
ccggtctggaattcccgggtcgacggacgcgtacgattctttcgcaccttcgaaaatcaattggctgtcttctctgcgtcttcgtcctctatcaagggttttccatggctcgtaccaagcaaaccgctcgcaaatccaccggtggaaaggctcctaggaagcaactcgccaccaaggctgcaaggaaatctgcaccgacaaccggtggagtcaagaagcctcatcgctatcgccctggaactgttgctcttcgtgagatccgaaaataccaaaagagcacagagcttctgatccgcaagctccccttccagcgtcttgttcgtgaaattgcgcaagacttcaagaccgatttgaggttccagagtcacgctgttcttgcgcttcatgaagctgcggaggcttacttggtgggtttgtttgaggacaccaacttgtgtgcgattcacgccaaaagggtgaccatcatgc

SEQ ID NO: 248096 - DNA, 470 bp, Glycine max
  unsure (1)..(470): unsure at all n locations
ccggtctcggaattcccgggtcgacgcacgcgtccgcataacccttacctttggtatagagaagattaatagagagtgatggagtgcgtattcggagtggtgggtaatggattcgcgatcgtggtggctgattcatcggcggtgcacagcatcctcgtccacaagtccaacgaggacaagatcatgcttctcgattcccacaaactcatcgccgctagcggcgagcccggagacagggttcaattcactgagtacattcagaaaaacgtcgccttgtatcagttccgtaacggcatccctctcaccaccgncgtcgccgccaatttcacacgtggcgaacttgccactgctctccgcaagaacccatactctgtgaacatccttcttgctggctatgacaaagagacaggccctgaactgtactatattgactacattgcaacgcttcacaagcttgaaaagggggcttt

SEQ ID NO: 248097 - DNA, 508 bp, Glycine max
  unsure (1)..(508): unsure at all n locations
gtgccgaactaagccagcctagctcactaagnactgacgtaccggtccggaattcccgggtcgacgcacgcgtccgggccctcaaggagcccgagcgcgaccgcaagaagaccaagagcatcaagcacaacggcgagatctcgctcgatgacgtcatcgagatcgctagggttatgaggccgaggtccatggccaaggacctcagcggctccattaaggagattctcggaacatgcgtctcggttggttgcaccgctgatggaaaggatccaaaggacttgcagcaggatatttccgatggtgatgttgaggtccctctcgattgaggaagaagactttgtttatctctctctttgcttctctcttatagacgtttcgagttttttaaatataaatctggggaaactattgaacgtactgcctaaggctattctactggtttggataatttacatgatggttcttagaggtcaacatgaaacctttaaccagcctgaaaagagagcgg

SEQ ID NO: 248098 - DNA, 520 bp, Glycine max
gggtccgattgtaggtgaagctaggactcctctagctactcatcgcactgcctgtccggtccggaattcccgggtcgacgcacgcgtccggtcaaacacaaataccactcctttcttcaacaggtttatagaaaccttggattactacggggcaatgtttgagtccattgatgtgtctcttccgagaaagagcaaggtgcacattaatatggagcaacattgatcggctcgggatattgtcaacattattgcttgtgaagggaaggaaagggtagagagacatgagctgctacgcaagtggaagtctaagttaacaatggctggctttcatcaatatgctttgagttcttatatgaattctgtcataagaagcctgctgaggtgctattcaaaacattataatcttgtggagaaggatggtgccatgctactggcatggaaggacagaaatttgatttcaacttcagcttggtatcgattacatgcagataggaaataatgcagtggtagaaatatgttc

SEQ ID NO: 248099 - DNA, 455 bp, Glycine max
gaaccccgggtcgacccacgcgtccggtttggtttggttacttgctcgaatttcctcgaatcgcttaatttgtatttgattagttaaaccgcaacgcgggatctcttttctcgaactggctaactctcaggcaagtggttcggacgctgattccagcaacaagcggctggtgctcgcactgtatgacgccctaaactccggcgactccgacgccgtcgtcaagatcgtcgccgccgacctcgagtggtggttccatggtccgccctcacaccagtttttgatgcgcatgctcaccggcgactccgctgccgacaactccttccgcttccttccgcagtccatcgccgccttcggctccaccgtcatcgtcgagggctgcgaacaccgccgcaacattgcctgggtccacgcctgcaccgtcacggatgggataattactcagatcagagagtact

SEQ ID NO: 248100 - DNA, 460 bp, Glycine max
ccgggtcgacccacgcgtccgcccacgcgtccgtcgtcaattccaacaacaccacaatgggaagaagaccggcgaggtgttaccggcagataaaggacaaaccgtacccgaaatcccgtttctgccgcggcgtgccggagccgaagatccgaatctacgacgtgggaatgaagaagaaaggcgtggacgagttcccgttctgcgtgcacctggtctcgtgggagaaggagaacgtctccagcgaggctttggaggcggcgcgcatcgcatgcaacaagtacatggccaagttcgccggaaaagatgccttccacctgcgcgtgagggtgcatacctttcacgtgctccgcatcaacaagatgctatcgtgcgccggggccgacaggctccagaccggcatgaggggcgcctttgggaagccgcaggggacgtgcgctagggttaacattggtcaagtgct

SEQ ID NO: 248101 - DNA, 534 bp, Glycine max
  unsure (1)..(534): unsure at all n locations
tgtgcctnnattgtgagagggctgaggccgatagcttagctcacctacgtactgacgtaccggtccggaattcccgggtcgaccgacgcgtccgagaccctatagcttctctctggctctcctttgacgcttatgacactgcgcctctactttcggtgcgagtcctaatggctctccccgactcttgctcgtgccacagctgcctgatcccctacttcatctactactcttactccaaaacgctccctatacaccacatgctcaactccgacttcggcgccgccctctcccagccgtcggaaaacctacacgccggatcgcgcggcctcatgattccctctgccaacgagccacgcaagatcgagatgtactccgctgacttctacgtcgactgcaccgacagtggaatcctgagctgaggcctcactcacatggccgacactcctgttgacctagtcaagtgtaatatgcagattgatcctgctaagtacaagagcatctctactgggtttggagttttgcttaatgagcagn

SEQ ID NO: 248102 - DNA, 513 bp, Glycine max
gtgccatagtgccctcgcctagctcactacgtactgacgtaccggtccggaattcccgggtcgaccgacgcgtccgcccacgcgtccgctttaattttttttttatttcattcgataatattaattatattcctgttgagtgaatactgtcttattccttggtttttgttctccatttgaaaattgctacctaaaccagcctatcgaaatctgaatattttcctaaactgaatttctctgtccttttttgttaacctatgaattaggccgtatttttgttaaaaaagaaaaccaattccccggggtttattataattttgtgccaagtttgtttcgaagagggtgtgttcttgttggagaatgcatattgagggtggtgggggagaacaatggcgaatctggtaccgggggtgcttctgaagcttctgcagcacatgaacacggatgtgaaggttggtggtgagcacaggtcttcgcttttgcaagttgtgagcattgttccggcacttgcag

SEQ ID NO: 248103 - DNA, 527 bp, Glycine max
  unsure (1)..(527): unsure at all n locations
aggtgctctnnttttgtggtccgcatgaaactcgtaaagaatcatgatgcactgccgtaccggtccggaattcccgggtcgacgcacgcgtccgctcgtttcgtcttcacacttgcaacgcaacaacgtaacgttgctaattgcttgcacttcgcatggtcgcttcttttgtttcacattagctgtttttgtttttgtcttagttttacacctttcctcatttccgcagtagcaacctgcgaatcaacctctctgagaaaaaaaatggcgtcgaacgggaatggcagcgttgcgaacggtaacgggagcgctaggaacggacttgcgaagattcagacgcagaagaagcatgacgggatttgtcacgacgacagcggtccaacggtgaaggctcagaccattgacgagcttcactcgctgcagaagaagaaatccgcacccaccacccccgttacggggtttcaggctcctttcgccaccctcaccgaagaagaacgtcataagcaacaactccaatccatcagtgc

SEQ ID NO: 248104 - DNA, 524 bp, Glycine max
  unsure (1)..(524): unsure at all n locations
agtgtcctgttttagggtgtagctgataccgcngtagcntatcatagcactgccgtaccggtctcggaattcccgggtcgacgcacgcgtccggtgatctgcaaaggctactgatgcagaatccacagaggtcattctctaggctgctcttgggaccgtaacataaagggccctttataagcctggtgatgcagttgctgccctgcatagcattggagctgcctctgtcataaagatctgcatagtcaaataatgcatgctcaactcaacgtgcacgcaactaatgcagggttatgctttgacttttattcctttctctctgctgcttatacgtatcatcaaatggaggatttagttactagctgtaaatcgagtggttcatggtatactgctgatatattgccgagcacttctaaatcagattatcatggaaataatactcttaccttttaaaatgtgattggttttgcggaaaaaaaataccgaaaagggacgtcgttctaaaggattcaagcttacctacn

SEQ ID NO: 248105 - DNA, 514 bp, Glycine max
  unsure (1)..(514): unsure at all n locations
ggtcctttnttaggccgatagaccgaaagaacatgatgactgactgtccggtccggaattcccgggtcgacgcacgcgtccgcccgggcattgagaaggaaggacgctttcagaggcgaaaggccatggggagataccgtcggtgatccatggatctccgatcgggaaaccgtatccaagctccgcggctagtctgcgctctttggacttttaaaacttagcgaactgaaacatcttagtagctaaaggaagggaaatcaaccgagaccccgttagtagcggcgagcgagagcggattggggtttgaagaaaaaaaccaggtttcattcgatttgttgtggattggatgatggaaaaaccagcaagcccctttcattgaaagggcgcagtgaactgtaattgtgaaaaggttggagatctggccaaagaaggtgatagccctgtagattcgatcccatggttcgatccttcccagtaaaacgccgcgtgttcgaattctgatcgcttttacgcg

SEQ ID NO: 248106 - DNA, 477 bp, Glycine max
gaatccccgggtcgacccacgcgtccgcccacgcgtccggaaatggggcaaggtttgcataccaaagttgcccaaattgctgcttcagggttcaacatccctcttagttctgtcttcatatcagatactagtaccgacaaggttcctaatgcttcagcaacagcagcttctgcaagttctgatatgtatggagcagcggttttggatgcatgtgagcaaataatggcacgcatggaacctattgcttcacagcataacttcaactcatttgctgagctagttggtgcatgctatgcagaacgaatagacctttctgcccatggattttatattactcctgatattggttttgattggacgacgggtaaaggaaaacctttcagatatttcacttatggggctgcatttgctgaggttgaaattgacaccctgactggagattttcacaccagagtggcaaacgtatttttggatcta

SEQ ID NO: 248107 - DNA, 465 bp, Glycine max
tgctctacgggtcgaccgacgcgtccgcccacgcgtccgcagaaacatgcgattgattggggtatagagtgcatgttgcgctactccaaccgctccatattgagcctcatggaaactcaacctatggtggaactcgtgtacacgttggatgtaaagggttcagtggaacaattcaacgaggcgctgcagagcttgatgaggaatctaacacgcacagctgcatcaggtgactctcgtctcaagtatgctacggctagcacacctgctccgagttttcaaaccatatttggttatacgcagtgcacccctgatttgtcatcggaagattgcaccaagtgcttggaagaagctatttcaaaaattccagagtgttgtagtggcaaggctggtggcaatgttttaaaacccagttgtagaattagatttgacccctacgtcttctatggaccaacattaaaattagac

SEQ ID NO: 248108 - DNA, 519 bp, Glycine max
  unsure (1)..(519): unsure at all n locations
tgtgcgactagtacgntcggccagcnaccctacgtactgacgtaccggtccggaattcccgggtcgaccgacgcgtccggggctttcagcaccacaggatctatagaaggagccaattttcttgccaccggaaagctcgtgagtcttagtgaacaacagctccttgactgtgacaacaagtgtgacataacagaaaagacttcatgtgacaatgggtgtaatggaggtcttatgacaaatgcctacaattatttgctcgagtctggtgggttggaggaggagtcttcatatccctacactggggagagaggtgaatgcaagtttgatccagagaaaatagcagttaagatcacaaatttcaccaatatccctgctgatgagaaccaaattgccgcatatttagtaaaaaatggtccacttgctatgggcgtgaatgcaattttcatgcaaacatacattggtggtgtctcatgccctctcatatgtagcaagaaaaggctgaaccatggtgtgttactt

SEQ ID NO: 248109 - DNA, 527 bp, Glycine max
  unsure (1)..(527): unsure at all n locations
ggccnanttggagctgactcagtactcatcgtaagagcctcatcgtactgctctaccggtccggaattcccgggtcgaccgacgcgtccgattaatgaagaagtggatgttataatttccgaatggatgggctatatgcttctgtatgagagcatgcttggaagtgttattaatgctagagatcgttggctcaaacctggtggtcttattcttccttcaagttcaacgttgtacatggctcctgtcactcatacggacagatacagtgacagtgttgacttctggcgcaatgtttatggaattgatatgtctgccatggtatcactggctaaacaatgcgcatttgaagaaccttccgtggagactataactggtgaaaatgtcttgacatggccacatgtggtaaaatatattgatagttattctgttaccatccaagagttagaatctgtaacagccaagtttaagttcaattccatgatgcgagcaccactgcatggttttgcattttggtttgacgctcaatt

SEQ ID NO: 248110 - DNA, 504 bp, Glycine max
ggtccctccgatatcgtatgatgatcatggacgtccgtccggtcctggatgcacgcgtcgacgcacgcgtccgaccggtcattggcaacgaatgacgctttcataggccaaaggccatgggggagatccaggtgtgatccatggatctccgatcgggaaaccgtatgcaagctccatagatagtctgcgctctttggacctttaaaacttagcgaactgaaacatcttagtcgctaaaggaagggaaatctaccgtgacccccttagtagcggcgagcgagagcggattggggtttgacgaaaaaaaccaggtttcattcgatttggtgcggattggatgatggaaaaaccagctagcccctttcattgtacgggcgcaatgaactgttattgtgaaaaggatggagagctggccaaaaaaggggatacccctgtggattcaatcccatgggtcgatcccttccaggtaaaccccgagtgttcgaattctgatcgcttttcacc

SEQ ID NO: 248111 - DNA, 525 bp, Glycine max
  unsure (1)..(525): unsure at all n locations
ggtgcctgtagtgtgtgtcactgaaaccctnctgattatcgataggactgccgtaccggtccggaattcccgggtcgacccacgcgtccgcccacgcgtccggagtgccctagttccaggaggcattcgcattggggcaccagcaatgagaacaagaggacttggtgagaaagaattttcactcattgctgatttcattcatgagggtgtgcaaataagtcttgaagccaaaagtttggtctcaggaacgaagctccaagattttttgaagtttgtaacatcttctgaatttcctttgggagagaaggtatcagagttgcgtaggaaagttgaagctcttactactcagtatccaatacccggagtctaagtgtacccgcataatgaatacttaaaactaagacgctgttaaaaaattttgtacaataatcatgcttcgatgtgtgttgctaataatatgttgtaacattttatggcaaatgcagcagcagctttatgattatcccatttataattggaagcaaa

SEQ ID NO: 248112 - DNA, 451 bp, Glycine max
ccggaattcccgggtcgacccacgcgtccgcccacgcgtccggttttgttgttggtgggtttcagcgttccgcttcaacttcaaattctcagtgaagccaattcagttcagtccaaatcccaaatccgaagtgagatttgcgatggagaggcttcagcgaatgttcgcaggtgcaggtggagctctagggcaccctcccccagattccccaactctcgattcctccgagcaggtctacatctcctcactcgctctcctcaagatgctgaagcacggaagggctggggttcccatggaagtgatgggtttgatgcttggagaattcgtggacgagtacaccgttcgtgtggttgatgtcttcgcaatgccgcagagtggtactggtgttagtgttgaagcttgtgatcatgtttttcagactaatatgcttgacatgctcaaacaaaccgga

SEQ ID NO: 248113 - DNA, 521 bp, Glycine max
tgaaatgctgaatggcggggaagaaaagtatgccccgtccggaattcccgggtcgacccacgcgtccgcccacgcgtccgatttattggacatactgctagtgttgaagatctgcaatggagccctacagaatctcatgtttttgcttcttgttctgtggatggaaacattgcaatatgggatacccgtttggggaagtcaccagctgcatcttttaaggcacataatgctgatgtgaatgtaatgtcatggaacaggttggctagttgtatgttggcctcggggagtgatgatgggactatttctattcgtgatctcagactgctcaaggaaagaaattctggtggagcccatttcggaatttaccagcacccaattacattcattgagtggagtccacattaagccttttcattggcaggttcttcatctgataatcaacttaccatattggacctctttttagaaaaggaccaagaagaagaagcttgatttaaagcttaaacttaagaaccaggtta

SEQ ID NO: 248114 - DNA, 536 bp, Glycine max
  unsure (1)..(536): unsure at all n locations
ggtaggttaagggctnctttagaatcgacgtgtgtaatgtatcgcttcaccggtccggaattcccgggtcgacccacgcgtccgcccacgcgtccgggatgttcccgggattgtctcaaagaacattgataaggcactttttgaggctttcaacccattgaacatctctgattacaactccatcttttggattgcacaccctggtgggcctgcgattttagaccaagttgagcaaaagttgggtctcaaacctgagaagatgaaggccactagagatgtgcttagtgaatatgggaacatgtcaagtgcttgtgttcttttcatcttggatgagatgaagaagaaatctgctgaaaatggacattaaaccacaagtgaaagacttgaatggggtgtggtggtcggttttggacctggacttaccattgaaactggtgntttgcataatgtggccatctgagatgcctcatatattatttcattattgtgtaccacttttcaaacttgcttggggtttgtaacaacaacaaccacca

SEQ ID NO: 248115 - DNA, 519 bp, Glycine max
  unsure (1)..(519): unsure at all n locations
tgctgtatgtggcgggaggacgggaatgctcaccggtccggaattcccgggtcgacccacgcgtccgcaacgcctgggtactaaccctcgacggcgacgacggcgacgtccaacaccgcctcaacccaggcctaattgattccctcctctcaacgcttaaccgtctcgcatctcaagccactcccggctccgtcctcgtcaccaccgccaccggcaaattcttctccaacggcttcgacctttcctgggcgcgcgccgccgcttccgcctccgccgccaccgaccgcctccagttcatggtggactccctcaagcccgtcttggcggcgatcatgtcccttcccatgcccaacatcgtcggcatcaacggccacgcctncgncggcgggttccttctcgcggtcagccacgattacgtnctcatgcgcagcgaccgcggcgtgctctacatgccggaggtagacctcgggctgccgctgccgggctacttcgccgncgtcataaggtccaagatcaggc

SEQ ID NO: 248116 - DNA, 432 bp, Glycine max
ggtcctgaattccctggtcgacccacgcgtccgaaaaaaaaaaaaaaaaaaaaaaaaaaaaaaaataaaaaaaaaaaaaaaaaaaaataaaaaaaagaaaaaataaaaaaaaatgaaatcaaaaaacaaaaatattatattatattacaataaacttaattaactgtccttatcttcaaattttacttactgtaattcccctacccttacctaatttaatcccctttaaaaacatctaacttttaccaaatcacgttttatccaattggtccactcctatcgaatttcccttcacttaaatatactgaatttcaaattggaccctccctttaacgattcattaaacttgttgtgtattgttttttaactcaacttaaccttttcacttgccatagccctaacgtccacttcttttatttcacttatttcctt

SEQ ID NO: 248117 - DNA, 526 bp, Glycine max
  unsure (1)..(526): unsure at all n locations
tgaaagttngtatgagggaagggaggacggaaatgatgctaccggtccggaattcccgggtcgacccacgcgtccgcaaactttaaataggtaggacggtgcggctgctctgttgagccgcgccatggaatcgagaggtccaagtgggccatttttggtaagcagaactggcgatgcgggatgaaccggaagctgggttacggtgcccaactgcgcgctaacctagaccccacaaagggtgttggtcgattaagacagcaagacggtggtcatggaaatcgaaatccggttaaggatggggtacaacttaactggccaaataacttagcccgaaaatggattgggcttaagcgcgcgaactatacccgggccttcgggcaagggcccagccccgattaattagaaggccccggcgtcggtgtgaaacccaaggcgccagcccgggcggagccgtcgtcggggcacatattggggggaggtgccaatattctaatgagaactttgtaaggccaaaagggggaagggt

SEQ ID NO: 248118 - DNA, 546 bp, Glycine max
  unsure (1)..(546): unsure at all n locations
nggggnncggcggggnnnnnntttgtaatatgtaacggatagtcttcaccgctccggaattcccgggtcgacccacgcgtccgggccgatgcgttggtgcagggctccattgttggctccgcgggcgagctgcccgataggtatatgcaagctgtcatcgccggcactgctgcttctggagtgcttgtttctgccctgaggatatttacaaaagctgtttacccacaagatgcctctggcctgcaaaagagtgcaaatctctacttctctgtatcaatcgtgattgtgttcttatgcatggttttctacaacatggtgcacaaacttcctgtgatgaagtactataaggaacttaaggttgaggcagtcactgcaaatgaagacaatggtcccctgactggacctgtctggaggtcaactgtatggaatattgtgcggagaatcaggtggtacgggtttggcattgtgctcatttatgttgtgactctggcaatatttcctggttacattacagaggatgttcactctcaaattcttaaaggatgg

SEQ ID NO: 248119 - DNA, 466 bp, Glycine max
ccggaattcccgggtcgacccacgcgtccgctccgattctccttgtaaacagcggtgccaggttcgatctttgcgttcttcatgtttttttttgcacgttttatcgatctgctaacttgacatttgatccaacgcaagttcgttgcttttttgattgaaaatcagattttgagataccctttgtgttcccaattaatgggttttttctggtgattgtatgggtgttaatttagaagttgatataggatgggggcaatgatgtcgagattctggttcatgttattccctgcaaaagagtataagattgttgttgttggattggataacgctggaaaaaccactaccctttataaattgcatctgggtgaggttgtaactaccaaccctactgttggtagcaacgtcgaagagctcgtctacaagaatatacgatttgaggtctgggatcttggtggacaagaaagat

SEQ ID NO: 248120 - DNA, 299 bp, Glycine max
ttcccgggtcgacccacgcgtacgcccacgcgtccgcccacgcgtccgaaaaaaaaaaaaaaaaaaaaaaaaaaaaaaaaaaaaaagaaaaaaaaaaaaaaaaaaaaaaaaaaaaaaaaaaaaaaaaaaaaaaaaaaaaaaaaaaaaaaaaaaaaaaaaaaaaaaaaaaaaaaaaaaaaaggggcttaagtttaatagaatctaaatttaaatacacttgatttaaatgtaaaaacctttttataaatcacctaaattgaattaaatggcacgtcttttaaaacgttttaattgaaaaa

SEQ ID NO: 248121 - DNA, 538 bp, Glycine max
  unsure (1)..(538): unsure at all n locations
nggggtaggggtaaggcttggtaggttagagtgagggaatgtaagtatttctccggaattcccgggtcgacccacgcgtccggttgaagagagctctaacaggccttggaggaccgaacccacgtatgtggcaaaatacggggatgacttgtggctaggggtgaaaggccaaccaagatcggatatagctggttttccgcgaaatctatttcagtagagcgtatgatgtcgatggcccgaggtagagcactcaatgggctagggtggccccatttcgccttaccaaccccagggaaactccgaatacaggcctagatcgtttgtacagacagnactttanggtgctaagatccaaagtcgagagggaaacaagccaaatcgtacgcttaaggtcctaagccatcacttaatggaaaaagaagtgatccagcgatgacaaccaagaggtgggcttggaagcagccattctttgaagaaagcgtaatagctcactggtctaacttcatggcaccgaaaatgtatcaaggctcaagtgatt

SEQ ID NO: 248122 - DNA, 520 bp, Glycine max
atgtctatggtggactgagggaaggagatgatgcaccggtccggaattcccgggtcgacccacgcgtccgatgtgggtgttggagggtacggttatccagctttagtggcccttaaccttaagaaagctgtgtatgctcctctcaagagtgcttttgaacttgaccagattatagaatttgtgaaagaagctggacgtggaggcaaagggaatttgcccctgcaaggcactccaaccattggtaagacagaaccatgggatggaaaagatggagaaataattgaagaagatgaattttctcttgaagaactaatgggggaagatgcttcaagcaaggatgagctatgatcaatttattagggatttataccaaattaaaggttcaaccaccgatttttacgttacaggcaacttgtttctcatgattattgtgatcactattctggttttccatgtgtcaagttaaaaaaccagtctagtgatgagtgatcttctctgaggattttgatatatgtcattc

SEQ ID NO: 248123 - DNA, 535 bp, Glycine max
  unsure (1)..(535): unsure at all n locations
nggtnttggtaaatggtanaatgaagggggaggggaaggaattttttatcggtccggaattcccgggtcgacccacgcgtccggctagatctgaagagaacagatgttgagaaagagctgaaaagtgtgattcaacagaaggaagaaatattaaaactacaacaatatgaaaaaaaaaagttaaagaatgagaaacaaggcacacaggcatatgtgcaaagggagttagaaactcttaagttggctaaagagtcatttgctgcaaaaatggagttggagaagtcaagcctagctgaaaaagctcaaagtgagaggaaccaaatacttttggattttgagctgcaaaaaaaggaacttgaagctgatttgcagaatcagtttaagcagaaggaaaaagatttgtttgaaaggaagaagttttttgaggaaaaagaagaaagggaattaaacatttttaactccttgagagaagtnactaattgagaaatggatgaaatgaagctttaaagaagtaagtttgaaaaggaaaaaccca

SEQ ID NO: 248124 - DNA, 485 bp, Glycine max
ccggaattcccgggtcgacccacgcgtccgcccacgcgtccgcccacgcgtccgcccacgcgtccgcccacgcgtccgggacaatcactagcagctactatcgtggggctcatggcattattgttgtttatgatgtcactgaccaagagagcttcaacaatgttaagcagtggctgaatgaaattgaccgttatgcaagtgaaaatgttaacaagcttctagttggaaacaagtgtgatcttacggcaaataaagttgtgtcctctgagacagcaaaggcatttgctgatgaaattggaattcctttcatggaaactagtgctaaaaatgccaccaatgttgaacaggctttcatggccatggctgctgaaattaaaaacagaatggcaagccaaccagtgaacaatgccaggccttcaacagttcaaattcgaggacagccagtgaaccagaaggctggttgctgctcgacttagaaagagacg

SEQ ID NO: 248125 - DNA, 334 bp, Glycine max
  unsure (1)..(334): unsure at all n locations
ccggaattcccgggtcgacccacgcgtccggaatgttaccaatgatgaagtatatcgagttaccgtaaaaccaattattcccacaatttttgagaaacccaaagctacttgttttgcttatggtcagacaggaagtggcaaaacatacacaatgcaaccgttgccgctcagagctgcagaagaccttgntagacaatngcatcgaccagtatatcgaaatcagagatttaaatngtggcttagttactttgagatatatggtggaaaaacttttgatcttcttagtgatagaaagaaactctgcatgagagaagatggcggcaacaaatgtgta

SEQ ID NO: 248126 - DNA, 542 bp, Glycine max
  unsure (1)..(542): unsure at all n locations
gggtnnnnnggaattnntgngatgataggtaaggaagaatgtcacccctccggaattcccgggtcgacccacgcgtccgctgggagcttagaagtggcattcgagcaattccactgcatagccaaaagggagataaatacaagactgtaaagcttctcatgcgctttgagtttattaataattgattctgtgcaatgtgcatccttctgctccccattattattattattattatgtacagtcattaagatgtgttagtagcaagagtttgtatgtagtagctggatgatatcgtgaattatgtgccccgttaaatgatgtaagaaacaaaatgtgttgtgtaaaaaaaaaaaaaaaaaaaaaaaaaaaaaaaaaaaaaaaaaaaaaaaaaagggcggccgctctagaggatccaagcttacgtacgcgtgcatgcgacgtcatagctcttctatagtgtcacctaaattcaattcactggccgtcgttttacaacgtcgtgactgggaaaacccttgcgttacccaacttaatcgccttgc

SEQ ID NO: 248127 - DNA, 437 bp, Glycine max
ccggaattcccgggtcgacccacgcgtccgcaacagccaagcgcattggcctatatatatcaacacaaaaactctttgattcagaaacatacgtatgtattcacacaaatatccatttatatatacatatatatagttctatatggcaatgacaacggtggtgtttgtcttgggcatctttgtagtgttgaatgcaagtgcctctgatgccactcgcttattggctgacaaaaactgcacagggaaacgtgtccaaagagaaaatgggaagatactaactggaaaatggactcggccaaacacccccaatggaatggaatagctggaacaactttggttggaatataaatgaaggttaaattcaggaaacagttgtggcatggtggtaatcggccttggtggttttggattccaattccttaatttagatgaatggt

SEQ ID NO: 248128 - DNA, 537 bp, Glycine max
  unsure (1)..(537): unsure at all n locations
tgattagacaaattgtacccctcncagtatagtatgtatccttcaccggtcctgaattcccgggtcgacccacgcgtccgaaaaaaaaaaaaaaaaaaaaaaaaaaaaaaaaaaaaaaaaaaaaaaaaaaaaaaaaaaggaaagaaaaaaaaaaaaaaaaaggaaagaaaaggccggccgctctaaaggatccaagcttacgtacgcttgcatgcaacctcatagctcttctataatgccacctaaattcaattaactgaccagtaatttacaacgagctgactggaaaaacccttgcgttacccaacttaaacggcctggaacaaatcccccttttgccaactggcgcaaaaacgaaaaagcccctaccaatcgtcctttccaacctttgcccaaccttaattgggaattggaccccccctttatcgggccattaaacgcgggatttttgggggttacccccaaagtgaccgcttcacttgccaaagccttatcgcccgtttttttagctatttttccttcctttcttgccacgag

SEQ ID NO: 248129 - DNA, 542 bp, Glycine max
  unsure (1)..(542): unsure at all n locations
ngggggnnnngaaatggtgtngntttgtcagggaggaaggtaaatcttcccgctccggaattcccgggtcgacccacgcgtccgcccacgcgtccggtggaatttgatttctcagggaggttatctttatgtttgtggtgatgctaggggcatggcccgagatgttcatcggactcttcataccattgtccagcagcaggaaaatgtggactcttcaaaggcagaggctatagttaaaaaactccagatggatggacgttatcttagagatgtctggtaaattttctgattattcatctttctgggttgtgccttccttgctatttggtctgttaagttcaagattggttgaaggatatttgatactcttctatcacggagttttgggacaccaatgatggaggctgaaatttccttgagaaagcaaatcgttttcgtggacatttgtgtggttttcttatatttttcgccgccttgatattctctcttgtcatgatatttgaactaggattatttttagggggactgatagatagcttcat

SEQ ID NO: 248130 - DNA, 534 bp, Glycine max
  unsure (1)..(534): unsure at all n locations
ggtnnnntacgggtgctgtggggagaaggaatattaccggtccggaattcccgggtcgacccacgcgtccggtttgcttcccaagtctctcgaagcatctttctttctcttcctgcagaagctatccgtgttagggggttcccaagtctccaacaagcaaagtacatggttgatttggaaatccaggtccccagcgcattcgacccgtttgccgaggcgagagaatcagatgcccccggggcaaaggagtatgtgcacatacgaattcagcagaggaatggaaagaagagtctgacaacagtgcaagggctgaagaaggagttcagctacgagaagatcctcaaggacctcaagaaggacttctgctgcaacgggactgtggtgcaggacaaggagcttggcaagattatccaactccaaagcgaccagcgcaagaacgtatcccatttcctcgttcaggccggtcttgtccggaaagaccaggtcaagattcatggattttgatttaacgattggtccttgttatgttggggt

SEQ ID NO: 248131 - DNA, 528 bp, Glycine max
  unsure (1)..(528): unsure at all n locations
tattttgatgttggaaaagaggaaaatcattaccgcgtccggaattcccgggtcgacccacgcgtccgaaggctttctgcgttcagtcaatctacgcagagtgaatcggtccctaaggaagccccgacccggaaagggctgccgtccgatgggtacacgaaagtgacgaagttgctttgactacagaaccatgcctgtctgttggagtgaattggatgatcgggccgagggctgccccctcttcccctcactctcctttccctaagatgaaccttgcttgagtcatcaaagcctttctgactcggcctggcccggtcgccctacgcgactggcgcttcaaaaggtagttgacttgcttactcgttagagtaggggtcgcgagagagcagagcgtaccgncctgccataatcgcgagtcaaaaaaaaaaaaanaaaaaaaaaaaaaaaaaaaaaaaaaaaaaaaataaaaaaaaaaaaaaaaaaaaaaaaaaaaaaaataaaaaaacaaaaaaaaaaagggcattctta

SEQ ID NO: 248132 - DNA, 534 bp, Glycine max
  unsure (1)..(534): unsure at all n locations
ggcttcttgtaggagtggtgtcttagctngagatcgtacgtctcaccggtccggaattcccgggtcgagccacgcgtccggtcaagtacaactgtttcattaagttgtggagaggagtatgatctcaagacaaggagttggcggaaaatagaggggatgtatccatatgttaacgtgggtgttcaggcacctccacttgtggctgttgtggataatcagctatatgcagttgagcatctgactaacatggtgaaaaaatatgacaaggaaaagaacacctggaatgaattggggaggcttccagtcagggcggattcttctaatggttgggggttggctttcaaggtttgtggagagcaacttttggttgtggtgggcaaaaggggtccaaagggtgatctattgggcctaagtcaatggggtcttaattaagggttcaccatgggaccctaaaatggccagtaccttgccttaaagaacctttccgggtggtcctgtattaatgggcctgtattggttggtgaaataaattta

SEQ ID NO: 248133 - DNA, 475 bp, Glycine max
ccggaattcccgggtcgacccacgcgtccgcccacgcgtccgcccacgcgtccggtctatagttttggtgtggttcttcttgagcttcttactggcagaaaacctgttgaccataccatgcctagaggacagcagagtcttgtcacatgggctactccaagattaagtgaagataaagtgaaacagtgcgttgacccaaaactgaagggagaatacccccctaaaggggttgctaagcttgcagctgttgcggcgctgtgcgtgcagtatgaagctgagtttaggccaaatatgagcattgttgttaaagcactccaaccacttctgaagtctcccgttcctgctgctccaaaaagttgaaccaattaaaatcgctaaaatgcctgcatcgcttgaccagttcgattcagtattttcaaaatttaatcaattcctgcggtttaaccattcctccataattttttaaaaattttgg

SEQ ID NO: 248134 - DNA, 530 bp, Glycine max
tggtaagatggttagaggaggaggaggaaagtaagtcctggtccggaattcccgggtcgacccacgcgtccgcccacgcgtccgctttctccaaacaaagatccccaagatgcctccttgcaagtactttgcagttccgtcgattctcttcttcctgctaagcttcttaatctttccaaccaaagcagctccaatttacagttcccatgcgtgcacagactcttctaaataccaaccaaacagcacattccaaaccaacctcgacctcctcctctcttacctttcttccaacgccacccaaggcgtccacttttacaaaacaacagttggcagtgaaacccccaacgccgtcaaggggccttttctttggccgccagacaaccttaacggcctgtgccaccaatgggttaacgccggaagccaagacctgacacgccggtgcccaattgagaaagaaggccttatctggtaccacctgtgcctgggacgctacttcaacccaaacttccttaacaacatagtacccggag

SEQ ID NO: 248135 - DNA, 541 bp, Glycine max
  unsure (1)..(541): unsure at all n locations
ngttnnttntaaggggtgcatgtgggggagatagaaaatactcaccggtccggaattcccgggtcgacccacgcgtccggttgttttttccagcatgaaacaggattatgcaagaatttacttcaggaatatgctcagaaagtgaactatgcaatgccaatgtatcagtgcaagaaggatgaaacaccaggtcgagcatcagtattttcatgtacggttgacattggggggattctatatattgggggagcagcaaaaacaaagaaggaagcagagataaaagctgctagaactgctttattagctatccagtcaagtgcatctcatgcttccgaaaaccaggttggccatccacagttgaccgtccttccatgcagaaaaagggcaacaagttctgttgccatagctgatgagaattcaaatcccccaaagcctaagaaagcgcggtttaaaaagaagtcttccaagaggaaaccctctagagataagatgggccaaattcatacttgaaacttgggcattggagaaattatcaatcatg

SEQ ID NO: 248136 - DNA, 526 bp, Glycine max
  unsure (1)..(526): unsure at all n locations
tagtcgtgaaatgtggggaatgagaatgctgcaccggtccgtaattcccgggtcgacccacgcgtccggaatgaacttggtgttgtttctgcagaaagcattgctggtgcaactatggttccagtaagttggacagagatgcagtgcccgttaactggtcaaattgagcaaagaaaggttgcaaaggctgcaagctgactagaatacttcatcgagctggaatctgttctgttttgtagaaatagactaacatgcgttgttgttagggtgagaaattatagccagtttgtattttacattgcaagttggcctacttataaagtatcacanacctgngatttcaattcactcgtgctatgagcaggattttatttactttntattgtattttttcaatttaaagctattgattactggcattttaagacatggttcaattttcaactttgaaaaaaaaaaaattaaataacaaaaaaaactaaatataaaaaacataaaacaaataataactaaaaaattaaataaa

SEQ ID NO: 248137 - DNA, 541 bp, Glycine max
agattatttattaaaatagtgatcctaacgtagatatgaagtatccatcaccggtcctgaattcccgggtcgacccacgcgtccgaaaaaaaaaaaaaaaaaaaaaaaaaaaaaaaaaaaaaaaaaaaaaaaaaaaaaaaaaaaaaaaagaaaaaaaaaaaaaaaaaaaaaaaaaaaaaaaaaaaaaaaaaaaaaaaaaaaaaaaaaaaaaaaaaaaaataaaaaaaatagacactcttatataaacttattaacttaactataactaaaaatgctatcaattaaattggaagagaccatactaaataaactaattgtagttaataccgatatatcacttaataactaagggaacatcttttttacaaacaaaaatttgagttggatatacacgatgatcctataaaatattctattggaatgcactctcattccataaatggcggtgcatatattgtaagttttaatccaactatgtttgcccttttaaaatctatgtatgtgaacataatcgaatttattgggaattctttatattatc

SEQ ID NO: 248138 - DNA, 529 bp, Glycine max
  unsure (1)..(529): unsure at all n locations
nggtaagttnctataggggatgaagggagtgatgcttcaccggtccggaattcccgggtcgacccacgcgtccgggagaatgaaccagcttcagaaacatctcagtgatgaagatcatccgtatcataaatgtagtgcagggaactgggacactttggaagttagaccaaaagcaaaaggattagatacaaggagcgagcttctcaaattctatgaagaaaactattctgctaatctaatgcatctagttatatacacaaatgaaagcctttgataaaatcaaaaaccttgtagaaaaaaagtcccaggatttaggaacaataaccaaaggtggtttcgggctcgtggtcaagcctgccaatcaaaacatttgcaaattcttgtgaagacttggccaattaagcaagggcattaattgagaattggatgggcagtgacccctgaaattcattattacacttgaaggccatgcaagtatcttggtcatctaaatggtcattaacgagaaaggtctttatattacatcttt

SEQ ID NO: 248139 - DNA, 533 bp, Glycine max
  unsure (1)..(533): unsure at all n locations
gggggnnaaggaaaatggtgatgatgatgggagtgagaaggatagttttcaccggtccggaattcccgggtcgacccacgcgtccgcccacgcgtccggtttaagtctgcttgatcctacttatgcaagcaagtatataccaatcatggctagtgttagtgagcatcagccacctacttggccttcatactttatggatatcaatgtcttggcattcctcgttccagctggcattattgcatgcttttctcccctatctgatgcaagctcctttgtggtactttatattgttacgtcggtatacttttctggagtcatggttcgcttgatgcttgtacttgctccagcagcatgtatcttgtctgggattgctccttcttaagctttttgatgttttcacaagatctattaagttgcagttgcccagcctattgggtcattcttacgttgatgcagggaaagccagttctgaaagtgttggaacaattgattcattgaatctggttaagtgagggcacttcaagggaccgacc

SEQ ID NO: 248140 - DNA, 525 bp, Glycine max
agtggtgtatggtaggtgaagtaatcctcaccggtccggaattcccgggtcgacccacgcgtccgcccacgcgtccgattcctcatcatagatgatggttggcaacagattgaaaataaagcaaaggatgctactgaatgtttggtacaagaaggagcacagtttgctactaggttgactggtattaaagagaatactaaatttcaaaagaaattacagaacaatgagcagatgtcaggtctgaagcatctagtacatggagcaaagcagcatcacaatgtgaaaaatgtatatgtatggcatgcactagctggttattggggtggagtgaagccagcagcaaccggcatggaacattatgacactgccttggcatatccagtgcagtcaccaggcgtgctaagaaaccaaccagacattgtcatggacagcttggcttgacatggccttggcctaatgcacccaaagaagggtttcaatttctacaacgagctccatgcttacttagcttcttgtggagtagaa

SEQ ID NO: 248141 - DNA, 526 bp, Glycine max
agcgggtgcatgttgtgtggtatgtaatgcactcaccggtccggaattcccgggtcgacccacgcgtccgcaggaaaattaaaaagatcgaccaaaatgatgagtgctttacgaacaaatggattaagaatgtgaggtttctcagggcttcgtactttcaatcctttggatactatgttgagacctggaatagattttcattctaaggtatccattgcaacttcttcacggcgagcaagagctaccagatgcgtgcccaaagccatgtttgagcgtttcactgagaaagcaatcaaagtaattatgctagcccaggaggaagcaagacgtcttggtcacaattttgttggaacagagcaaattctattgggtcttatcggcgaaagaactggtattggttgctaagtgcttaaatcaatggggatcaaacctaaagatgcacgaatggaaattgaaaaaattattggaaggggtaatggatttgtggctggtgaaattccggttacttcccgggcaaaacgtgttt

SEQ ID NO: 248142 - DNA, 526 bp, Glycine max
ccgttgtgaatgttgggaggatagtatgtatcaccggtccggaattcccgggtcgacccacgcgtccgcttttattctgatgggagtggtcttcccatgccatacactgtgacagttctgaagcatggtagcgtgagagatctttgccaagcattatgcactgcatgctgcttgaagagtgatgaaatgcttttgcttgcagaggtttatgagcataagatttatcgatatctagagaatccgatggaaccattaaattcaattaaagatgatgaacatattgggggctatcgaatcaaaagtggagccaggaaaacgaaagttgaaataatgcatcgatggctggataatatgaagggtggagacaggaagctctttgggaccccgttggtactggtttggaggaaaatcctcaatttggagccacaattgaggcattgacataaaatgttggcccctttaaaaaaacctatttcttgaggtaagctcattattgggaaggaaaaaggtttaatttccgtggcaa

SEQ ID NO: 248143 - DNA, 524 bp, Glycine max
  unsure (1)..(524): unsure at all n locations
atggctncatgtggggggatggtaatctgcccggtccggaattcccgggtcgacccacgcgtccgcccacgcgtccgtgataatccatcttcaagatcttttaggaaacaaatgggctgcaatagctggatactttcaaaagggaacagccaatggcttaaagaactatgggacacccattttggaaaagaagctgaagaaaatgcaagtaggttgtgaaagtggtagctttgggagaaaggttttcagcctcaaagcaaatccctagaggccagtgggaaagaaagctccaaactgatatccaaatggcaaagagagccctcagtgaagctctttcaccagagaagccatcttggaatttatctgcctcaaactcaaacccttcagatagtagcagctccttctcttccacaaaaccaacaacaacacaaactgtgtgctatgccctaagtgctgacaacataactagaatgctaaagggttggatgaaaaacccaccaaagtcctcaagaacaaacttatca

SEQ ID NO: 248144 - DNA, 531 bp, Glycine max
  unsure (1)..(531): unsure at all n locations
ggtnttntgggctggtgccttgcagggatgagatgttttctccgtccggaattcccgggtcgacccacgcgtccgcccacgcgtccgtgcaaaacgagaagtatccaacaatgactaccacccgtgttgctatctgtggttggtttgcattcctttactacgcggctgaaggagccaaggttagtttcaataacaagtgctcatacacggtatggccaggaaccctaaccggtgaccaaaagccccaattatcaacaactggtttcgagttgggtccaggagcatccaactctgtggaccttccatctccatggtccggtcggttctgggcccgaacaggatgctccaacaacaacggaaggttcagctgcgccaccgncgattgcgcctccggtcaagtcgcatgcaacggtgccggtgcaatcccgccagctactttggtggaaatcacaagtgcagcaaacggagggcaaaattcttacaactgagccaacttggatggtttaaactggccaatgtccgaaacccaca

SEQ ID NO: 248145 - DNA, 480 bp, Glycine max
ccggaattcccgggtcgacccacgcgtccgcccacgcgtccgcccacgcgtccgggtgaacctagttttcctatgcgacaaagcctttctggtggtgctcttgatacgatggccagaaaacctgcagatccagaagaggagctcagatggatgtctcaagaagtgcgtggttatgttgaagctgttcttaacagcctcgctgcaaatgttccaaaagcagttgttctttgccaagtagagaaagccaaagaagacatgctcaaccagctatacagttccatcaggggatcaacacaaagacactttgggcatacaagtaggcaaaacttgggaaggtgcataatgtatttgggtggagcaatgggcttgcatatttaatgatggtccttgcattttcaacttggtcttggataggattatatttttggtggctctgatggtttggctattgctacttcaagggagttgccatttctgata

SEQ ID NO: 248146 - DNA, 356 bp, Glycine max
  unsure (1)..(356): unsure at all n locations
ccggaattcccgggtcgacccacgcgtccgcccacgcgtccgcttttctcttatcatggcttctcacaacatcaaaatttacgaccacttaagggtggcccctccctcagcaacagaaatatccctctctctcactttcttcgacctgttctggctcaggttccaccccgtggaacgcatcttcttctacaccctncctacaccccattcaaatccatccattttctattccaaacttgttccaaagctcanaacatctctctctcgcactctccaacactntccccctttcgccggcaacgtcgtttggcctgataacaccccaaacccaaccgtccaataaaccccaggggact

SEQ ID NO: 248147 - DNA, 533 bp, Glycine max
  unsure (1)..(533): unsure at all n locations
ggatanntagtaaaggttntctcgagggggaaagatggtatgcatgcaccggtccggaattcccgggtcgacccacgcgtccgatgtctgattcatacattatatatattctgaaatactctacccgttaggggaaagagattgcgtgtaagtgagtgagtgttgctggtaaaggcgacggtcctgctatcctaatcgatttgggaacaacgaaatcttgactaggtgtgtgaccacactatcgatgctaaattataccctaggatcaggctagcagaactaagccatactacctgcgtatcatggactcaaaacaactgatcgatgatctgccgagaaatcacgaccatatcaaccgttgactcccagatgatgatgctaagcacttgatggaacgtcgtttttccgtaacatgattccaggctgcatgcaaacaactgcagggcacggggaaccatggacctgctgagacacctaattattcagggagtacacggccgcttgacgaaacatcttcacaaaaaggggctctc

SEQ ID NO: 248148 - DNA, 506 bp, Glycine max
  unsure (1)..(506): unsure at all n locations
agagaagatgatgtaccggtccggaattcccgggtcgacccacgcgtccgcaaaagtgttccacttgagtgaaaagtagtgtgttaagaactaaacaatttttcaatggcgtgcaagaaacaagaggagcgagctgaggcagctgcgaaagttgctgccaaagaactcgaacaagtcaacagagaaagaagagaccgtgatttcggtgttgttgctgaacaacaacaacaacatcatcaggaagatcaacaaaaacgtggtgtaatcgggtccatgtttaaggcggtgcaagacacctacgagaacgccaaagaagctgtcggtggcaagaaagaagcttctaattacccgtaccgtaattccaaaggtattcaacaaggtaacaattaagccgattacctgttcgcaaccggggaaaggagggacctattaaccacaaagactcatgatatctacgaatcttgcaccgacaacaaccaccaccaaaccgggttcaaaggtnggag

SEQ ID NO: 248149 - DNA, 532 bp, Glycine max
  unsure (1)..(532): unsure at all n locations
ntgttaatgtgtttatatatttttagggagaagatgtatgtccggtccggaattcccgggtcgacccacgcgtccgggaggctaatctattaggcgctgttctctcgtcttctacaaaattttctgttcgatctcaagcaaggttgttccttccaccgccatgagtttcatcttcggaaagcgaaaaacacccgcagagcttctgcgggaaaataagaggatgctggacaaatcaatcagagaaattgagcgcgagcggcaaggcttgcaaacgcaagagaagaaattgattgcggagattaagaaaagtgccaaacagggccagatgggagctgttagagttatggcaaaagatcttgttagaacaaggcatcaggttgagaaattttataagctaaaatctcagctccaaggtgtatcactcagaattcagactttgaaatcaacacaagcaatgggtgaggctatgaaaggcgtgacaaaggccatggggcaaatgaataggcagatgaacttgccatcattgcagaaa

SEQ ID NO: 248150 - DNA, 528 bp, Glycine max
atgttttgaatggggaaggatggtaatagtcccggtccggaattcccgggtcgacccacgcgtccgcaaaattttctgttcgatctcaaccaaggttgttccttccaccgccatgagtttcatcttcggagagcgaaaaacacccgcagagcttctgcgggaaaataagaggatgctggacaaatcaatcagagaaattgagcgcgagcggcaaggcttgcaaacgcaagagaagaaattgattgcggagataaagaaaagtgccaaacagggccagatgggagctgttagagttatggcaaaagatcttgttagaacaaggcatcaggttgagaaattttataagctaaaatctcagctccaaggtgtatcactcagaattcagactttgaaatcaacacaagcaatgggtgaagctatgaaaagcgtgacaaaagccatggggcaaatgaataggcagatgaacttgccatcattgcagaaaatcatgcaagaatttgagagacagaatgagaagatggaattgac

SEQ ID NO: 248151 - DNA, 473 bp, Glycine max
  unsure (1)..(473): unsure at all n locations
ccggaattcccgggtcgacccacgcgtccgcggacgcgtgggcaaatttgcaaccttctgaataaacctgacatagtgaaccaagcagggcaggaccgcaaacctttacaatcgaaattggggttgcagaaaagccatgacgggggaagagactaccgggaagaagagggtggtgacagaatccctgggatggctaacggaatcgtcgataatgccaaagaagcaccgagccatagcgggcgttggcgcatcctcaattctcgaattgaaggccgaactgtacaagtctcaggaagattccaaaaagtctcgcgaattggcaggccccgatgccgagtaccaacgcgccaagaacaaaatcgcccncaaagacaaattcttcgtcaaaaaccgcggcgtcgatgcccgcgctcacaaggacaagcttgagttgaaagcggtgagtgatggaacggcgagctatgtggcgctcg

SEQ ID NO: 248152 - DNA, 522 bp, Glycine max
  unsure (1)..(522): unsure at all n locations
atggttgaattgggggtggacgtaaagttgtaccggtccggaattcccgggtcgacccacgcgtccgggtggcttcaaggtccaggttatggctgatgcgagtaaatcagacttggatgaggctgaatggtccgaattccattctaatgtgaagcgtggggacatagttggtatcactgggtttccaggcaaaagtaagaagggtgaacttagtattttccccaagacttttgtgttgctgtctcattgtttgcatatgatgccaaggcaaaagtctgctgctgctgcggataatgcanatttgaagaaaaatccatgggtaccaggaagtaccaggaatcctgaaccatatattttgaaggatcaggaaactaggtttcggttacgccattgggatttgatgctaaatccaaaggttcaggaattttttagaacccggcttaaataaattggttcacattgaaggttcctggataacctgagattttggaaggtggaacacccatggtggacattattgcc

SEQ ID NO: 248153 - DNA, 525 bp, Glycine max
  unsure (1)..(525): unsure at all n locations
ngggaaagtcgtgaattgtggagagatggaaagttgtatcggtccggaattcccgggtcgacccacgcgtccgctcagaccatgcctccgtggtctccatgaacttatttgtggcacttctttgtggttgtattgggcttggccatcttcttgaggagaatcggtggatgaacgagtctatcactgctcttttgattggtgtttgcactggcatagtcattttgctgtttagtggtggcaaaagctcgcatattcttgttttcagtgaagatcttttctttatataccttctgccgcctataatatttaatgccgggtttcaggtgaaaaagaagcagttttttgtaactttcatgaccataatgtggttggggcctttggccccataaaattctggacccatattacctttgggggcacaccaaatttttagaaggttgattgttggccacctgaattaaggggattcctaaccattggtgccataattggtgtgaccgaatctgtttgcacaatgcaagtggt

SEQ ID NO: 248154 - DNA, 532 bp, Glycine max
  unsure (1)..(532): unsure at all n locations
gatgttngtagtttgtgtggatagtaagtaatgcactcaccggtccggaattcccgggtcgacccacgcgtccgtcaggtttttgtggataagagtgagctataatggctgccaggagaccgggtttaattgctttgtttgatgttgacgggactcttacagctcccaggaaggtggtcacaccggaaatgttgacattcatgcaagaactacgaaaggttgtaacggttggagttgttgggggttctgaccttataaagatatcagagcaacttggcagcacagttaccaatgagtatgattacgtattttctgagaatggtcttgtggctcacaaggaaggaaagctcattggaactcagagcttgaagtcattccttggtgaagaaaagctcaaggagtttattaactttacacttcattatattgctgatttggacatccccattaagaagggaacatttatggagttccgtaatgggatgctgaatgtgtcacctattggccgaaactgtagccaagaagaaagaga

SEQ ID NO: 248155 - DNA, 390 bp, Glycine max
cctgaattcccgggtcgacccacgcgtccgcacaaatctgtcatgaaaaaggagttccgtaggatggcaaaggctgtgcaaaatcaggtagcagataactactacaggcctgatctcaaaagggcagctctggcaagattgagcgctgtcaataggagcctcagagtagctaagtctggtgtgaagaagaggaacagacaggctgtgaaggtccccagcaggaagtgaatttagaagagttaaattgcattctaaatttcttccatcctttccccattttgtagtttgtgttccagaactcaattctagattttctagttttgtttggagaggcaatttattgtgttttcaatatacaacaaccggaactactatgttatagctttcaac

SEQ ID NO: 248156 - DNA, 339 bp, Glycine max
  unsure (1)..(339): unsure at all n locations
cggtcctgaattcccgggtcgagccacgcgtccgctcatacattccttcttcttcttcttcttcttcttcttctttcacaatcacaatggcgcgaggggatctggatggtaaccccatcaagccacttacgatctgcatgatcggcgcttgcgggttcatcgggtcgcacctctgcgagaagcctatgtcccaaaccccttaaaccgtccttcgcctcgacctttacaaccaccagatccaacaccttctggattccggcgatttccaccttccttgggctggncgcattaactttcaacggcttaaccttaaacaacaattttggcttgaaaggctta

SEQ ID NO: 248157 - DNA, 386 bp, Glycine max
gcgtacgctttcgaaagaaacgggtggtggctgcttcgaaagcttaataatatgtttatatccagatcgtgatggtttcctcagcagcaaactaacaaattactcatatcatataataagatcgaccgttctctctcataagccaaacgtctagatgaacttgtttctcaatctatctccctaatttccgatcatcgactaggttactcaacgacatccgatgtatctgtaatacttgcattggctaatacaatgctaaagaatccaatcctatgaagtgtataagataagccatatacaacaaatggttaaaaagcctacataacttatttggacctaaacctcttgacaaggtactatttgcccatttaccacaccccaaaaat

SEQ ID NO: 248158 - DNA, 526 bp, Glycine max
  unsure (1)..(526): unsure at all n locations
gtgtngtgaatagagatgtaagcatgcactcaccggtccggaattcccgggtcgacccacgcgtccgatcgaagtccttcattttcattctcttccttgtcactgatcgtcatgtacagagttgcagcatgatcattcagaaggcatctcaagggccatggaggtaacttgggatccactaggttttcaacttcagccgcggtagctgcaaggacttcatcaggtggtttgtttagctggcttactggagagcgttctagtgctcttcctcctctggacatgccccttggtggtgttgctctccccgattcacttccagattacgtcgaacaaagcaagaccaagatcacaacactccccaatggactcaaaattgcgtcagagacctctnctaaccctgcagcttcaattgggttatatcttgacttggggtccatctatgaaacgccatttgtaaacggggtttcacacttgctagaaaaaatggctttcaaaaagacaacaaaccggagtcactttcgtattt

SEQ ID NO: 248159 - DNA, 536 bp, Glycine max
  unsure (1)..(536): unsure at all n locations
acgtacttgaatgtgtagatagtaagtgatgcactcaccggtccggaattcccgggtcgacccacgcgtccgcccaagtctctcgaagcatctttctttctcttcctgcagaagctatccgtgttacttgttcccgagtctccaacaagcaaagtacatggttgatttggaaatccaggtccccagcgcattcgacccgtttgccgaggcgagagaatcagatgcccccggggcaaaggagtatgtgcacatacgaattcagcagaggaatggaaagaagagtctgacaacagtgcaagggctgaagaaggagttcagctacgagaagatcctcaaggacctcaagaaggacttctgctgcaacgggactgtggtgcangacaaggagcttggcanngatatncaactncaaggcgaccagcgcangaacgtatcccattttctcggtcaagcccgtctttgtccggaagaccangtcaaagattcaatggtttttgatttaacgattggtcctctgttatgntgtggtagtaata

SEQ ID NO: 248160 - DNA, 529 bp, Glycine max
  unsure (1)..(529): unsure at all n locations
cgtgttgctaagatttagttnccctacgcactgacttaccggtcctgaattcccgggtcgacccacgcgtccggtgaatttgaaattgaattagctggggcatgtgggtatggctctttggcactagacataagtggtgggcaccttgcagctggtgtggcttctctcttcaaagatggagcagtttgtggtgcctgctttcagataagatgcaagaacccaactctatgcagcaaagaaggtaccagagtggtattgactgatcttaatcacaataatcaaactgattttgtgctaagcagcagagcctttgcgggcatggctcaaaagggtatgggcaaacaaatattgaagcttggcattgctgacattgaatacaagagagtaccttgtgaatacaaaaaacagaatttagccgttcgtgttgaagaatcaagcaagaagccagaatacttagcaattaaatttttgtatcaagggggacaaacggagatagtagcccgtgatgtggctcaagttgngtcttcaa

SEQ ID NO: 248161 - DNA, 359 bp, Glycine max
attcccgggtcgagccacgcgtccgcacttgacccctaaattcgtgcccattcccacaactgcacattcttctttctatatattccagagagtggcttttccgatttccaccaaaatctaaaccgaaattcccaattacccttcccaattttcaccaaaacctaatactcccacaccaatcttcgatcatggacgccgattcacaacctcaacaactcgaagagagaacagaggagcaagaactgaagtacctggaattcgtgcaattcgcgaccatacaggctctgatgcgctgcgccatcctctactcatacgccaaggagcgcgcgggtcctctgaaaccccgtgtcgacaccgtg

SEQ ID NO: 248162 - DNA, 374 bp, Glycine max
ccggaactccctggtcgacccacgcgtccgaacagatcttagcattccattctgagacacgcttctctacagagctcttactgctatatctggggcgtgttcccttcattatcggaatgttaatcgttgccatctaattcgatatgctggagtgatcgccattgcaaggtggtaccctaaactatgatatttgactctgagtctcttgcacaacttctgtgatatagctcatggctgaattggcagaacactgctcattgttgacagaaatagtactttcacactgtcgaccaactacacatgctgtactaacacatcttgtaaaacgctgctgcacagaacttgagtcatgccacatggtatattgctctgga

SEQ ID NO: 248163 - DNA, 527 bp, Glycine max
  unsure (1)..(527): unsure at all n locations
tgtggaggggtgtgccgacgagtacgtatcctctccggtccggaattcccgggtcgacccacgcgtccgctcccaattactttgttgcatttcacacaccaacttcccatagaagagagaagagagaagagagctgtccttccatccttcaactcaaatcatcatgcaagactccagctcaatgaagatctcccctctggatctcatgtccgccatcatcaagggcaagctcgacccctccaacgtctcctcctccaccaacgccgccgccgccgccgccttcctcctcgagaaccgcgacttcctcatgctcctcaccacctccgtcgccgtcctcatcggctgcgtcgtcgtcttcatctggcgcagatcctcctnccccaaggccaagcctctcgagcctnctaaacgcgtcgtcgagaagcttccgaaatcgaagtcgccaacggcacaaaaaaggcacaatcctttcggcattaaacccggaaccgccgaagccttggccaagcatcagttgagaaggccaa

SEQ ID NO: 248164 - DNA, 316 bp, Glycine max
taattcccgggtcgacccacgtcgtcctcccacgcgtcctcccactcgtccgtccactcgttctaaaaaaaaaaaaaaataaaaaaagaaagaataaataaaaaaaaaagaaaaaaataaaaaaaaaaaataaaaaaaattaaaatataaaaaaaaaaaaataataatctaaataataatatttatacatttacacatcttacagtttatttatatacttatatattcaacatatctctctttatctaatataaactgcattttaccaattcttcattataaatcctctgatgtactaatctattctctacttata

SEQ ID NO: 248165 - DNA, 538 bp, Glycine max
  unsure (1)..(538): unsure at all n locations
atgggccgctgngtgtttcccgcaccgaacgtacgtttgcccgctccggaattcccgggtcgacccacgcgtccggggagagtatcaaagctgtaatgaagcttcctaggcttcagaaccttgtaatgcagcatgtagggcattcagctggcgatctcatacatctcttgcaggggttacttagatatgacccctctgaaagacttacagccaaggaagctcttagacattccttctttatgagagatcaatttagaagataattcactttctaagctgctgcatcatcgttgaccttcctaagggattaactttagaagatgtgggcaaatgaactcacctgggtgatggctggtttttcctgcagctgtcttcactcctgctgaaaaatcctcatttaggaatttttgaattgatccgaattcaaagtacagaagaaaaaaatgctaatgttgtggtgaaaattgtagctttgtgctcacaaatttaattctccatttgagggtatgaaatnttaataatttattatagaaaaaaa

SEQ ID NO: 248166 - DNA, 483 bp, Glycine max
  unsure (1)..(483): unsure at all n locations
cgaacctcagggtcgacccacgcgtccgcggactcgtgggcatccagctaagtataggatgctggtcggaatggttgatgtcatattttcggatgtggctcagcccgatcaggcaaggattttggggctgaatgcttcatattatctgaaagcaggaggtcattttgttatttcaatcaaggctaactgcatagactccacagtccctgccgaggcagtgtttgaaagcgaagtgaacaagttgaaggcagatcaattcaaaccattcgagcaagtcacccttgaaccatttgagagggaccatgcctgtgtggttggtggatacagaatgcccaataagaacaaagatgctgctgagtagattgctttccggtagccagtaggcttaatgtcatttcacgagattgtgttaattntgttttgaaacctcggttatcaaacatactttgtaccttttctatagtagtaatgtagtcaagtttg

SEQ ID NO: 248167 - DNA, 400 bp, Glycine max
ccggaattcccgggtcgacccacgcgtccgtcttcctcttcgatcatcacctctccacaatgccgccgaagttcgacccctcccagatagtcgaggtgttcgtccgcgttaccggcggcgaagtcggcgcggcgagttccctggccccgaagatcggtcccctcggtctctcccccaagaagatcggagaagacatcgccaaagaaaccgccaaggactggaagggcctccgcgtcaccgtcaagctcaccgttcagaatcgtcaggcgaaggtcacggtggtcccctccgccgtcgtcctcgttatcaaggccctcaatgagcccgagcgcgaccgcaagaagaccaagaacatcaagcacaacggcaacatctcgctcgatgacgtcatcgagatcgc

SEQ ID NO: 248168 - DNA, 528 bp, Glycine max
  unsure (1)..(528): unsure at all n locations
gtaggtgggtctgagaactgttagtnnagtangcactatctgtccggaattcccgggtcgacccacgcgtccgcccacgcgtccggtcttaaaagccacgcgaatgagcttaagcttaacctccatatttagctgggtgcgtgaataaaaccatgaggcataacctaatatggcttactattttttcctctttcgtcctcgttcctctcgtgatcttgaattcattcaacacctttcccaaattaagctatagccaataaaacaaaatagtataataattttcattaatgatgagcagcggtagtggtagtggcagcagtagtggtagcccttgtggtgcttgcaagttcttgaggaggaagtgtattccgggttgtatatttgctccgtactttgattcagagcaaggtacaagccattttgcggcggtgcacaaagtttttggggccagcaatgtgtccaagcttctccttagcattccagtgcataagatgcttgataccgtcatcaccatttgttatgaagcag

SEQ ID NO: 248169 - DNA, 355 bp, Glycine max
cgtccgtccacgcgtccgcttgactatgccttgtttactaaacatggtaacaactaggttgtgtaccagaacgtgtttgatgcatagttggattctctatacgctgctcttgagaaagtaggggcaccaaatgtgaaggttattgtgtctgacagtggttgtccatctgaaagtggagtacggagcaactgttcaaaacgcaggaacctattaccgcaatttgattaatcatgccaaaggtggtacccacaagaggcctagtggacccatatagacttacctatttgccatgtttgatgaacaccagaaggatggtactgaaatcgatcgacactttggtctcttcaagcctgac

SEQ ID NO: 248170 - DNA, 533 bp, Glycine max
  unsure (1)..(533): unsure at all n locations
gtggagaggcgtntnccaactgaccgaaactcgatgaacgacctaccggtcctgaattcccgggtcgacccacgcgtccgcccacgcgtccgaagatcaccaacactttgctggtgccactctttctgacttctcttccaaggacacttcctccaccaaccttaaaaaaacagaggaaagccatgagtcgcagaaacgaaagtggtccaaagcttgacttgaagctgaacctgtccccaccgagggctgatcggagactggagtcaccgacacgatcggcgacggcgtcgccgacgtcaccgccgagctcgtgcgtgtcgtcggagctgaaccaagaggacaaaagttactctaacagccctgaagccacttccatggttcttgtgggttgccctcgctgcctcatgtatgtgatgctctctgaggatgatccaaagtgccccaaatgcaaaagcaccgttttgcttgattttctccatgacaccaaaaaccccaccataaggaggagttagactgatagagttatgatcctn

SEQ ID NO: 248171 - DNA, 537 bp, Glycine max
  unsure (1)..(537): unsure at all n locations
tgatgcccaggggtgagtcactgacacanctgacgcatcgacttaccggtccggaattcccgggtcgacccacgcgtccgcaaggccaccgttttcgccaccgacacgattctgtccactctcatgtgtgcccctcgggctagttattcctgggacattggcgtccaacgtgtcggaaacaagcttttctttgataagcgcgatgggtcgcagctcgatttgctctctggtcatgaaacctcgcaagaaccattgcctgagtcgaaggatgatattaactctggccattcgttgagcgttgaggctgcttatatcaaccagaatttctctcagcaggtgctcattatggatgggaataagggtactcttgatgaggctaacccttttgctaatgaaggtgatgaggttgctgctgtcgcttataggtatacgaggtggaagctcgatgatgatatgtatcttgttgcgaggtgtgaggatcataatgatggtgacgtgaacaagcataggtcgttcttactttgaattgcttggaac

SEQ ID NO: 248172 - DNA, 528 bp, Glycine max
tgagggtcttgctttgatccgcaatgtaactcatcgactctaccggtccggaattcccgggtcgagccacgcgtccgaatgataatactctcttttttaaagatcacgttgttgataatcaaatgattattgaagatagggtaacattttagagaaaatattactttatgcgttttatttgcatgcatatagtctttgattttgttttaattttcaatatctcttatatatcattcaattattgcattaatgtgtagaagaagttgtggtgcaaactgaggcaaagacttgcgagaacctggctgatacatacaggggtccatgcttcaccactggcagctgcgatgatcactgcaagaacaaagagcacttgctcagaggcagatgcatggacgattttcgctgttggtgcaccaaaaactgttaaatggatccattcactccaacgtgaagaagatgcatgcagcgctatattataaataatgaaactactatatactatatataattaagactggcgcttcatta

SEQ ID NO: 248173 - DNA, 533 bp, Glycine max
tggaggaggtgaacagaagggccgggggagggtactccctctccggaattcccgggtcgacccacgcgtccgatttcctctcagaaccctcgatcactcccacgcgctcctatatcctctccttcaccgtcgctcggtccggcgatcacaacaacatcgtcatcccatggcaaacgccgcatctggtatggcagtccatgatgactgcaagttaaggtttttggagctgaagacaaagaggacacaccgtttcatagtttttaagattgaggagcagcagaagcaggtcattgtggagaagcttggtgagccagcccaaggctatgaagatttcactgccagccttcctgctgatgagtgccgttatgctgtttatgattttgagtatctgactgaagggaatgtccctaaaagcagaatttttttcattgcatggtcccctgacacatcaagggtgaggagcaagatgatctatgcaagctccaaagacagattcaagagggagctggatggaattcaagtagagctgcaag

SEQ ID NO: 248174 - DNA, 449 bp, Glycine max
cgggtcgagccagcgcgtccgcccacgcgtccggaggaattgtgttcagatcttcttgacaggctcacgacacccgttgaaacgtatggacggatgcaaaggtcgcgtttaaggatcttgacgaagtcatccttgttggtggatcaacacgtatcccagctgttcaggatcttgtaaagaagttgactggcaaggacccaaatgtcactgtcaatccagatgaagtggttgcccttggagctgctgttcatgctggtgtcttggctggagatgtcaacgacattgtgctgttggatgtcactccattatctttgggtctggaaactctaggtggtgtgatgacaaaaattatccccagaaacactacccttcccacctcatagtctgaggttttctcaactgctgctgatggacagaccagtgtagagatcaacgtccttcatggtgag

SEQ ID NO: 248175 - DNA, 437 bp, Glycine max
ccggaattcccgggtcgacccacgcgtccgcaattccatttgctctctggaccgagtcaggcggcggcgaatcggcatgactcggcgctgctgccagggcaccaacaacggccacaactcccggacatgcccgtcgcggggagggggcggcgtcaagctgttcggggtgaggctgacggatggatcaatcataaagaagagcgctagcatggggaaccttaacctctcctccttctcctcctccgccgccgccgcacatctgcaattccgttcatctccttcttcttccaacctccccgcggcctcatcgcccaatccaagctccccgtgctccgacccgccccaaggctacttgtccgatgaccccgcccacgtctccaccttcgctaaccgccgcggtgatagaaaaaaaggtgtgccatggactgaagaaaaca

SEQ ID NO: 248176 - DNA, 541 bp, Glycine max
agtaggctctacactggtgcgatgaccagcaatatatcgtatgcctgctaccggtcctgaattcccgggtcgacccacgcgtacgcttaatattcttgcatatacattaaaaactatattgacttaactgataagttcacattcaagggcgacttctccaactctgtaactgctgctacatctttacagatgcttagcttcatataccaacatcattatcccactggctataacttgctttacaattgttataaacgtaatgggaaatgttggacctagaacaatcaagaatataacatgaagagaggactcataaactaagtttgtactacacagtatataaccatcagcttaagcaaactagaattttatctacagcatacagtacgtgactgtggatcctgacacaatgtcaagaatgacattcacattttaattgatacatgtttcaaacgaatgactcgatgtacatgctaaagcacaatcccttactagagaagttgctaaactcaacaaagaccattacaatattggaaatcaa

SEQ ID NO: 248177 - DNA, 478 bp, Glycine max
cggtcctgaattcccgggtcgagcgacgcgtccgacaataatgaattgtgaaacaaaaaaatgcaaataaatcattaaaaatagtataaaataggaggtataaagtaagattatatgcctaattgactgttttgaaatgttaaagtagtaggtgataaagcaaagaaatcataaaaaataaaataaaataaaaaatattgaataagattatatatatgattaactattatgtaatgctaaaagtagtaggtgataaagcaaagaaatcataaaaaataaaataaaataaaagatatagaataagatgatatatatgattaactattatgtaatgctaaaagtagtaggtgattcttagtcttgaatttctatctcttgtcaaattcattgaatgtaatgcatcgttataagaactttctcctcttatttgcacataaaagtttcaataattgtaagttaacataatggtacagtattt

SEQ ID NO: 248178 - DNA, 447 bp, Glycine max
taccggtcctgaattcccgggtcgagcgacgcgtccgcgaaattttctggagaggagtttgacaacttttctgccttagcagagaagttgcgttgtgaggatgactttggtcacacgctgaatgccaaactccttccaagaggagagtcatcagtttctgggcccgtagttaggctgttcaagccattcgatgaactttttgttgacttccaggatttcaatgtggaagctctagagaagtttgttgaggaatctagtacccctgttgttactgtctttaacaatgaaccgagcaatcaccctttcgttgtcaaattcttcaacagtcccaacgcaaaggcaatgttgttcatcaacttcacttgccgaaggtgcttaagctatcaaatcaaaataccctgaaactggttagccattttaaccacagggtggcaactttttggtggg

SEQ ID NO: 248179 - DNA, 403 bp, Glycine max
ccggtcctgaattcccgggtcgagcgacgcgtccgattatgattcttccatttccattaaaaagaatatatcataaatgggtattttcacattcgaagacgaaatcacctaccctgtggctcctgctactctttacaaagctctagttacagatgccgacaacatcatcccaaaggctcttgattccttcaagagtgttgaaaacgttgagggaaatggtggccctggaacaatcaagaagataactttcgttgaggatggagaaaccaagtttgtactgcacaagatagaagcagttgatgaggcaaacttgggatatagctacagcgtagtgtgtggtgctgcgttgccagacacagcgtagaagatcacattccactccaaattggcttgctgtcccaat

SEQ ID NO: 248180 - DNA, 483 bp, Glycine max
ccgaattcccgggtcgacgccacgcgtccgtgggaattgaagctttgaagtatattagttaccctgctcaggtgctggcgaagtcctctaaagggaggccagttatgctgatgggtactctggtatatggtataagatacacttttccagaatacctttgtacttttcttgttgctggaggggtatcaacatttgcacttctaaagactagctcaaagactatcagcaagctggcacatccaaatgctccccttggatatgggttgtgtttcctgaaccttgcttttgatggatttaccaatgcaactcaggattctttaaaagcaaggtatccaaaaacaagtgcttgggatattatgctgggcatgaatttatggggaaccatatacaatatgatttacatgtttggatggccccgtgccagtggatttgaagcagttcgcttttgccagcagcatccagaagcagcatgggatatttttc

SEQ ID NO: 248181 - DNA, 407 bp, Glycine max
ccggaattcccgggtcgacgccacgcgtccgcagttttttacttgaattttcttcatccttctctggtctactagaacttgattacttgaacagtgccgatgacagatgaggtggttcttctggatttctggccaagtccatttgggatgagggtcaggattgcacttgctgaaaagggtatcgaatatgagtacaaagaagaggacttgaggaacaagagtcctcttctcttacaaatgaacccggttcacaagaagattccggttctcatccacaatggcaaacccatttccgaatccctcattgctgttcagtacattgaggaggtttggaatgacagaaatcccttgttgccttcagacccttaccagaaagctcaagctagattctgggctgattatggtga

SEQ ID NO: 248182 - DNA, 530 bp, Glycine max
  unsure (1)..(530): unsure at all n locations
cggtgctaggatagataggagtaggctcgcctcactcggtccggaattcccgggtcgacccacgcgtccggctcagagaagcaaaggggctgctgaatatgctagtgatgcggctcagaggaccaaagagtatgctggtgatgctaccaagagaagcaaagaggcttctaatgatcatgccaatgacatggctcagaagaccaaagactacgccagtgacactgctcagagaaccaaggaaaaactccaagacattgcatctgaagctggtcaatacagtgcagagaaagctagagaaatgaaggatgcagcagcagagaaggcaagtgacatagcaaaggctgcaaagcaaaaatcacaagaggtgaaagagaaattaggtggacaacaccgggatgccgagctttgagaattgagatgtttgaatcactttgaaccttttaattatgccaacaatagtngtctaaatctgccagaaataatggtgtgtgtatatattatatggcaagatctggccttgtgtgatcaaa

SEQ ID NO: 248183 - DNA, 540 bp, Glycine max
  unsure (1)..(540): unsure at all n locations
aggaggtcttaatggtgnaacttgacgtnacctacgtactgacttaccggtcctgaattcccgggtcgacccacgcgtccgattatgattcttccatttccattaaaaagaatatatcataaatgggtattttcacatgcgaagacgaaatcacctcccctgtggctcctgctactctttacaaagctctagttacagatgccgacaacatcatcccaaaggctcttgattccttcaagagtgttgaaaacgttgagggaaatggtggccctggaacaatcaagaagataactttcgttgaggatggagaaaccaagtttgtactgcacaagatagaagcagttgatgaggcaaacttgggatatagctacagcgtagtgggtggtgctgcgttgccagacacagcggagaagatcacattccactccaaattggctgctggtcccaatggaggctctgttggcaagctaactgtcgaataccaaaccaaaggagatgctcagcccaaccaagaccaacttaaaactggaaaagccaact

SEQ ID NO: 248184 - DNA, 410 bp, Glycine max
tcctgaattcccgggtcgacccacgcgtccgcccacgcgtccgcgctctgataacatcaggactagtatttccgctcagatgaccaaacagtaggctgggtgattctaccaagagaggcagacatacttataatgatcatgccaatgacattgctcagaataccaaagactactccagtgacacatcttcatagaaccaacgaaaaacttcaatacattacatctgaagctgatcaatacagtacagataaagctcgagaaataaaggatgcaccatcacataatgcaagtcacatacctaatgctatacatcaaaaatcacattacttgataaagacattattaaaacatcaccttaattccgatctttgaaaatctatatgtttgaatcacttactaccttttaatta

SEQ ID NO: 248185 - DNA, 462 bp, Glycine max
ctgtcctgaattcccgggtcggcccacgcgtccgcaaaagcctaaactcactcagtcctacgatacgattctcttccgcctcccttcccttgaactggccggcgcagatccgaggagtttgggaaaccctaattcattcctctttgcttcttctatctctattcctctaacaccagtgatggcaggtttggctccagaaggatcgcagtttgatgctcggcaatatgattctaagatgaatgaattgctttccgccgatggacaagaatttttcacttcatatgacgaagtctatgatagttttgatgcaatgggccttcaagaaaatcttctgagaggcatatatgcttatggttttgaaaggccttctgcaatccagcagaggggaattgttcctttctgcaagggtctggatgtgattcagcaagctcagtctggaactggaaagacagcaacgttctg

SEQ ID NO: 248186 - DNA, 480 bp, Glycine max
tcctgaattcccgggtcgacgccactcgtccgtatcgattctgatgaggctccactcgatgtttccatttgcctgcatgcctttggtattgtggggtgtggttcgtttagtggtgtgaagtcttgcgaacgtgagggtgcatgagtggtaatcgggatgtttttgttgcacggctccatgcttgctcatgcaacgtgtgacatgcatccttttcattgtcaccttatccttcgtggcttatgtgctgactattggttcctgtgttgcctacctaccaaacggtattcgtgtggctagtcagacccattccatccaggcctctttgttggggactctggaggatttcaaagtcccacacgtgaaccacgttagtcgtccatcataactgcttcctgtggcacacgtgtggtgattgttctctcggatgcggtgcatgcagtgaacgtgggtggtctagtgcccccacattgttccttaaaa

SEQ ID NO: 248187 - DNA, 486 bp, Glycine max
ccggaattcccgggtcgacgccacgcgtccggttcccttctgccgaggaacctccacgtcgcagaggtactgaaacaagtagtgatctttctgggtgtgccaagaaaggaatagcagtgaaaccgcatagaggggacgcacttcttttcttcagtcttcacacaaatgctaccccagacactagcagtctccatgctggatgccctgtaatcgaaggtgagaaatggtccgcaacgaagtggattcatgtagactcgtttgataagactgtgggagctggaggtgattgttctgatcatcatgtaagctgtgagagatgggcttcacttggagaatgcactaaaaatcctgagtatatgattggatcttcagacgttcctggctattgtaggaaaagctgcaagtcgtgttaaaaattttactgaatgcttcccaagatactacatgttatctctgccacgggtttcaaatttcaactagttcttg

SEQ ID NO: 248188 - DNA, 487 bp, Glycine max
ccggaattcccgggtcgacgccacgcgttcgcccacgcgttcgcccacgcgttcggcatattcacatgagctgccacgatatggtcttgaagtaggacgtacaaattatgcagcagcttattgcactggtctcctgttggcccgaagagtcctcaaaacacttgaaatggatgaggagtatgaaggaaatgttgaggctactggagaggattattcagtggaacctgccgagagcaggaggccattccgtgcactccttgatgttggtcttgttaggactacaacaggaaatcgcgtctttggtgcccttaagggagctctggatgggggtttggatattcctcacagcgacaagaggtttgctgggtttgataaggagaagaaagagcttgatgctgaggttcatcgcaaatatgtttttggtggacatgttgctgcctatatgaagatcttggcagaagatgaaccagagaaataccagtcacac

SEQ ID NO: 248189 - DNA, 531 bp, Glycine max
  unsure (1)..(531): unsure at all n locations
gtgcaggtgcctgcgactgacnctgnacgaatgcaactttcggtccggaattcccgggtcgacccacgcgtccggaagaagagggaagaggaggaatcaaaggatgacccagttgactctgatgctgatgaggaagagggggatgctgatgaagctgggaatgactccgatgctgaatcaaagacggaagctggagaagacaccaaggaagagggtgtacatgatgaactctaggaagtttgcaaaacggataaagagtgagcggaagttatattccggaaagttatatctttttcagttgtagtgtttttttgtttttatttttccctagataagcagaccgtggaaaactgcaagtgaaagctggagcttttgcttcaatcacatttgactatttcactgattagaacaggcaaagatgtctcttttgggttgatctttttatgtttcgatcaattgaattttccattaaaaaaaaaataaaaaaagggcgggccgtctagaggatccaagcttacgtacgcgtgcatg

SEQ ID NO: 248190 - DNA, 472 bp, Glycine max
  unsure (1)..(472): unsure at all n locations
tccggaattcccgggtcggcccacgcgtccggccaatacccatgtgcaacgaaattcaagcccaagcccaagcccaagcccaagcccaacctgggttgaagctcgtcggttgcaagaacttcgtccgaaccaatcctaagtcggaccgctttcaagtcaaccgcttccaccacatcgagttctggtgcaccgatgccaccaacgcctctcgccgattctcttggggacttggaatgcctattgtggcaaaatctgatctctccaccggaaaccaaatccacgcctcctacctcctccgctccggcgacctctccttcctcttctccgctccttactctccctctctctccgccggctcctccgctgcctcctccgcctccattcccagtttcgacgccgncacctgccttgccttcgctgccaaacacggcttcggcgtccgcgccatcgccttggaagtcgccgacgcgga

SEQ ID NO: 248191 - DNA, 373 bp, Glycine max
tccttaattccctggtcgacccacgcgtccgcccacgcgtcctaaaaaaaaaacaaaaataatataataaaactaaaaaacaaaaaacaataaagataagaaataaaaaaaaaggttgtaaatataataaaacaaatacatttaaaataaaaaatcaaagattgcacttactaaaaaaagatatcgaatataaatacacataacattacttgatgaacaagattcctcttctgttacaaatgaaccctgttcacaagaagattccccttctcatccacaatttcaaacccatttccaaatccctcattgctgatcactacattgtaccacgtttggaatgacagaaatcccttgctgccttcaaacccttacc

SEQ ID NO: 248192 - DNA, 532 bp, Glycine max
  unsure (1)..(532): unsure at all n locations
agaggcatggtgtgctgctgtcacgaccatgcatgcactgacgtaccggtccggaattcccgggtcgagccacgcgtccgctaattttaagcattcccttctcttttccattgcagctagcaaagaagcgaagaccccttttgctggttattaacagagtcataaaaaaccaaagttttctattctctgtagctcacatggtgggctaagaatatctgactttggggtggaaagtatggttggcaaggagagtttgagaactgaggtcttgaacttgagctttgagaagcttatgatggttgaatgtggtggaaatagtgggaaaggagtgaacattaaagctggtgtgatcacggagtggaaggatattccagttgagcttttgatgcaaattntgtcacttgtggatgatcaaacggttatcatagcttctgaagtgtgtcgtgggtggagagagggcaattgctttggccttactcggtatcactctcatggtgtaacaggaacatgattacactggtcctatcctttt

SEQ ID NO: 248193 - DNA, 529 bp, Glycine max
  unsure (1)..(529): unsure at all n locations
agggtacgctgacccgactatanctgatcgattaccggtccggaattcccgggtcgacccacgcgtccgcttgaattttcttcatccttctctgttctcctagaacttgattacttgaacattccctatgagagatgaggtggttcttctggatttctggccaagtccatttgggatgagggtcaggattgcacttgctgaaaagggtatcgaatatgagtacaaagaagaggacttgaggaacaagagtcctcttctcttacaaatgaacccggttcacaagaagattccggttctcatccacaatggcaaacccatttccgaatccctcattgctgttcagtacattgaggaggtttggaatgacagaaatcccttgttgccttcagacccttaccagagagctcaggctagattctgggctgattatgttgacattaagatacatgatnctggnaagaagatttggacatcnaaaggaagaagaaaaagagctgccaagaaggagttcatagaggcccttaaaatg

SEQ ID NO: 248194 - DNA, 536 bp, Glycine max
  unsure (1)..(536): unsure at all n locations
tgatgataggtntgatcactatacgcaaaggtattgaacgcctgcaccggtccggaattcccgggtcgagccacgcgtccgaaccgttgtcttctcacttcgtcaaaaccaaccaaacccctccccaattctcaagccaaccagggtcttccttcaagagcaagtaccaagatgaactcattgccaatgctgcttacattggcaccccagggaagggtatccttgctgctgatgagtcaactggtacaattggcaagcgattggccagcattaatgtcgagaatgttgaagcaaataggcgtgctcttcgtgaactcctattcaccacacctggtgcttttgagtgcctcagtggtgtgatcttgtttgaagaaaccctataccaaaagacagcttcaggaaaacccttcgtagagttgatgaaggaaagaggagttctccctggtatcaaggttgacaagggcacagtagagcttgcaggaactaatggggagactactacttaaaggttgagatggctttgcccccgattccac

SEQ ID NO: 248195 - DNA, 460 bp, Glycine max
ccttaattcccgggtcgacccactcgtctctaaaaaaaaaaaaaaaaaaaaaaaaaaaaaaaaaataacaataaaaaaaaaaactaacttaaacacgaaagcgtaaaaaataaaaaaattttctataaataaatactatataaaaataactatcaaacataaatacaacttcataacaaactaaaacccttcctttacccaaatttatagcctttcactacattcacctatcttcagcttaagatacctcatattgccccgcacttatacccctttcctacatttaaacctactaaatatacttttgaacacctcatttctcatcccattatacccgaatgcatttattcactaactcacttttaacaatccaattaccagcgtctatatcctccgatctcattcctttcttccctttctttttcaacacgttactcgtcttttcccgtaaatccctaat

SEQ ID NO: 248196 - DNA, 533 bp, Glycine max
tgatgaggttctgtacagattgatacgtatgcctcaccggtccggaattcccgggtcgacccacgcgtccggccatataatttttttttatttgaaataatgtccgggatcatccacaagattgaggagacccgccatgtgggagggcacaagaaagaggagcacaaaggagaacaccatggtgagcacaaaggtgaacacaaaggagaacaccatggtgagcacaaaggtgaacacaaaggagaacaacaccatggggagcacaaggagggacttgtggataagatcaaggacaagatccatggtgatggccatgacaagggtgagaaaaagaagaagaaggacaagaagaagaaggagcatggacatgaccatcatggtcatagcagcagcagtgacagtgattagatcttatatgttaagcaggtgtacggtacgatggtagtgaagagccagaatccctctttctgctttatgatataatacaaataaaatagcgattccggaaatcatgtctgtaactgctcttttta

SEQ ID NO: 248197 - DNA, 528 bp, Glycine max
cggatgacgtgctgtctaagcacgagatagtattcctcaccggtccggaattcccgggtcgacccacgcgtccgtgacatgcatgctgactactctggccaaggatttgatcagcttttagatgttattaacaagagaaagcataatcccaatgatcgaaggatcattctctcagcgtggaatccatctgatcttaaattgatggcacttccaccctgccacatgtttgcacaggtccgcagctatatttgggtttctctttggaagagctctctctttttctctcatgaagttttgtcaacttccttttattgttttttccctgtagttctatgtagctaatggggagctatcatgtcaaatgtatcagcgatctgccgacatgggcctgggtgtcccatttaatattgcatcttatgcactcctgacatgcatgatcgctcatgtttgtgaccttgttcaggtgattttatccatgtaatgggggatcacatgttaaccgaattcatgtgaaacccttgcaggacc

SEQ ID NO: 248198 - DNA, 540 bp, Glycine max
  unsure (1)..(540): unsure at all n locations
aggagcccgagcggtgngatgaccagcatctgaccttatgtctctaccggtccggaattcccgggtcgacccacgcgtccgagacactccgtgaccgtggtccataccctgcagatcaagttgtgaaggatcttgatggcagggttggctttgttgtctatgacagcaaggttggcagtgtctttgcagcactgggttctgatggtggaattaagctgtattggggtattgcagctgatgaatctgtggtaatctcggatgatctagatgtcatgaaagaggggtgcgccaaatcctttgctccctttccaccagggtgtatgtttcacagtgaaggaggattgatgagctttgagcatccaatgaacaagttgaaagcaatgcctagaatagacagtgaaggggccatatgtggagccaacttcaaggttgacaagtacgcaagggtcaacagcatacctcgagtatgaagccaggctaattggatggaatggacccagcattagcccanaaaataaaatagttgaaatgtgggtttat

SEQ ID NO: 248199 - DNA, 535 bp, Glycine max
  unsure (1)..(535): unsure at all n locations
atgaagctcggtgtgntcactacaagcatactatcgcacgcctgcaccggtccggaattcccgggtcgagccacgcgtccggtacaaccactggggtgtcagctcacgatagggcaacaacagtcttggcccttgcgtctagagattctactccaggcgatttcaaccggccaggccatattttcccactaaaatacagggaaggtggtgtcttgaagagagctggacatacagaagcttctgctgatcttgctgtacttgctggcttggatccagtggcagttctgtgtgagattgtagatgatgatggttccatggctagactgccaaagcttcgccagtttgcagagcgtgaaaatttaaaaattgtatctattgctgacttaataaggtatgcagttacaattcatggaccatgtaataaaattcattgcatgcatatttatgtctagactcttgcttagtgcagatacctatactttttaaggtttaagtagcgttaaatttataaaatgagttggaattaggtgtaatt

SEQ ID NO: 248200 - DNA, 491 bp, Glycine max
ccggaattcccgggtcgacgccacgcgtccggttgacagaaagtttgctcaactgtcccattattggcgttagctatgctacccactggagcaggagagacccaattacgtgagagcaacagtcagaaggtccatcctcaaccaatagaagaggccatgaatcagaatccagaagcaatggaaaccctaatatctaaagtttttatgaatatctcttccttgaagtcagcttatattgagcttcaagctgctcatactccctacgaccctgataaaattcacactgctgataaacttgttattagtgagctgaaaaatctgtctgaactcaagcatttctacagggagaacaacccaaaaccagtgtgtgtttctccccaagactcacgtttagctgcagaaattcaagaacaacagagccttctgaaaacttatgaggtcatggtgaagaagttccaatctgaaatccagaataaagattcagagatcca

SEQ ID NO: 248201 - DNA, 532 bp, Glycine max
aggaaagcgtgctgttagcggggaggtgagaagttatatctctccggaattcccgggtcgacccacgcgtccgaatttctattacatacattttgtagctaggatgagcaagttactactcattcgtgttgctggggtcgtggcaacctttgtgaccatggtgatgatgatggtgcccaaaaacgtgagtgcccaaaacatatgtgatgacatcgtcacacaagacttcttcaacagcataatcagtcaggctgatgatggttgtgcagggaagaacttctactcacgagatgctttccttaatgctcacaattcctacaatgagtttggtaggcttggtaatcaggatgactccaagcgtgaggttgcatctgctttcggccatttcaaccatgaaacaaggcaatttttgttcatagaaaagaataacgggtccataagggaattcctggaccagaggcacaacgaatacccattttgcccttacaaaacgtgctattggcgtggaccaattcaactattattggacctc

SEQ ID NO: 248202 - DNA, 529 bp, Glycine max
tgtatatgtactagtcttatgcaatactatgtatcactcgtccggaattcccgggtcgacccacgcgtccgggtaaaaagacattgtattccaggggagtcacaatccagtttagaaatgatgaggagagtgcagccgtccattgtgtagttcaacagtggaagaaggaagtaaatgctcaagaaggaaatggacgaaatggaactattacaacttctaaaagcaaatttgatgataagatagagtcatcatcttctaaaatgtattttcattattatggacaacttctgcatcagcaaaatatgttgcaggactatgtgcggacagggacctatcatgctgctgttcttgagaaccgtactgatttcattggtcgtgttgtagttgatgtgggtgctggtagtggtattttgtcattatttgctgctcaggctggtgcaaaacatgtttatgctgtggaagcatctgaaatggcagaatatgcacggaaacttataactggaaacccaacactggcttaacgaattac

SEQ ID NO: 248203 - DNA, 538 bp, Glycine max
  unsure (1)..(538): unsure at all n locations
tggtgacggntgngactgaccgagnctccactgcattctcttccggtccggaattcccgggtcgacccacgcgtccgcaacgaggccttcgatttcaatgtcgcgctctccgatcacgagaagtacgtccgccgcgagcgcgagaaggaggccggccacggtgccgccgccgccgtcgaggagtcgcagatcgacattcaccccgccgtcaatcacaggctcaaggaaggggaaaccattaggattaatgtgaagcacatatcaactagtggaactggcatgctttcagctgctggcctaaccggtgggcatgctgcaacaccaaagccaaaaaccgtgagtcttgctcccccaccaagtggagctgggaaaatcaggtctnctcttccaccnccaccaaatgatcccgttgctgttcggattgcttccaccnggtgcgctacaggtccctaaaggacatatgaaagtgtgaaacattctacggacgctttatcaagattttctcaacttcagaaaaatcttccttcaacgaccactt

SEQ ID NO: 248204 - DNA, 537 bp, Glycine max
tgaaggaggttcttgtttacgatggagtatgtatgacttaccggtccggaattcccgggtcgacccacgcgtccgccggcttcaacatgcacagttacctgaagaagcaagagaacttgacaaggaggtgaggcagatgattgaggagaaagaagaagctgttcgcaaccaagactttgaaaaggctggagagctacgtgatagagagatggatcttaaggcacagatctcaacacttgtagagaaaggcaaggagatgagcaaggcagagactgaggcaggggatgaaggtcctattgtgactgaagctgacatacagcatattgtctcatcctggactggtattcctgttgagaaagtctcaacagatgaatctgatcgcctcctgaagatggaagagactttacataagcgagtcattggtcaggatgaagcagttaaagccattagtcgggctatccgtcgagctcgggttggactaaaaaatcctaatcgtcccattggcagcttcatcttttcttgtccaacttgtgtggg

SEQ ID NO: 248205 - DNA, 390 bp, Glycine max
aattcccgggtcgacccacgcgtacgcacatatgcgaatgccgggctggtggatgaagcaatctctctgtataagagtattcctcggtttaggtgtgtgaattggacagaatccttcaacaccatgttgcagataatggtcaaggagaaccggcttgaaattgcacaccggctttttgtggagagctcttgtggttaggaagtgaggtctctggttcgagcattgaactggcttatgtatgctctttgtcaaaagagtcgctctgatctggcattgcaattattccaagagatggattatcaaagttgctaccctaatagggatagatatgcaattttgatgaagggactgtgccaagacaggatgttgcatgaggccacccatttgttg

SEQ ID NO: 248206 - DNA, 531 bp, Glycine max
  unsure (1)..(531): unsure at all n locations
tggcaacgtngtgtttcagccgagtactgtatgacttaccggtcctgaattcccgggtcgacccacgcgtccggtttttttcacagatatgaaaccggggaccatgttggtgtttactgtgagaatttgtctgaagctgtggaagaggcgataaggttaataggtttgtcaccagatacctatttctcaatccatactgatgatgaggatggaaaaccacttggtggaagctccttgccacctacattcccaccctgtactctaagaaaagcacttgcacaatatgcggatgttttgagttcacccaaaaagtctgccttgcttgccttagctgctgatgcatctgatccatctgaagctgatcgactaagacatcttgcctcacctgctggaaaggtttaatattttattattttatatcaagggaattttaagtaactttttctacttatttttctcattcgtatgctactcttgtgtgcctttgtaggatgaatttcaaaattggtgaataacctttaaaaaagtctt

SEQ ID NO: 248207 - DNA, 532 bp, Glycine max
  unsure (1)..(532): unsure at all n locations
ggtagtggngtataacgacagaccactgacgtactgacgtaccggtccggaattcccgggtcgacccacgcgtccgcccacgcgtccgggcatgcactagctggttattggggtggagtgaagccagcagcaaccggcggggaacattatgacactgccttggcatatccagtgcagtcaccaggcgtgctaggaaaccaaccagacattgtcatggacagcttggctgtacatggccttggcctagtgcacccaaagaaggttttcaatttctacaacgagctccatgcttacttagcttcttgtggagtagatggagtgaaggttgatgtgcagaacattattgagacccttggtgcgggacatggtggccgagtgtcacttactcgcagctatcatcacgcgcttgaggcttncattgctagcaattttactgataacggatgcattgcgtgtatgtgtcacaacactgatggactttatagtgctaagcagactgctaatgtgagaggctctgataattttaaccctg

SEQ ID NO: 248208 - DNA, 533 bp, Glycine max
  unsure (1)..(533): unsure at all n locations
tgggaacgtncttggtacacagaacaatgtattgcatcgacttaccggtccggaattcccgggtcgacccacgcgtccgctgagttctatcaatctgtgaaaattggcattgtacaatatatgatactgaagatgatgtgtgcaatagtggcaataattcttgaatcttttggggtttatggagaggggaagtttgaatggaaatatgggtatccttacttggcactagttcttaactttagtcagacatgggccctatattgccttgtacagttctatgctgttattaaagataagttgaaaccaatcaaaccattggcaaagtttctaacttttaagtcaattgtcttactgacatggtggcaaagtgtggctgttgcattactttcttatatgggagcttttaggggatcattggctcangagttgaaagcacgtattcaagactacatcatcttgatagagatggctggggctggctgtgtgcacctttatgtctttccagccngaccttaccaaatgggagaaagatt

SEQ ID NO: 248209 - DNA, 482 bp, Glycine max
  unsure (1)..(482): unsure at all n locations
cctgaattcccgggtcgacgccacgcgtccgaattcaataccatttaccaaactcactcatcaattctcatctttcttctcactaactattaatggatcgtgtcgagcacagctggccaagtcatcaaatgcaaagctgcggtttcatgggaggcagggaagccacttgtgattgaagaagtagaggttgcgccaccacaagctggtgaagtgcgtttgaagatcctctacacctctctttgccacactgatgtttacttctgggaagctaagggccaaactccattgtttcctcgtatatttggtcatgaagctggagggattgtggagagcgtangtgagggtgtgactcatctgaaaccaggggaccatgcccttcctgtgtttaccggggagtgtggggactgccctcattgcaagtcagaggagagcaacatgggtgatcttctcaggatcaacactgataggggtgtcatgatcca

SEQ ID NO: 248210 - DNA, 424 bp, Glycine max
tcgacccacgcgtccgcccacgcgtccgtttgtgttcttttattagtgccaacaaatattggttatcattaatcctatggtgcgttcctctttaattgttggtatcagcttatttttcccttctccatgctccaagcactcaatcttgtaatcttgacggcatgcatttccattattgaaagcatatagttgtgccttttcattaattgctattgcgggatatactctggctgtgatgcaagccctttcctatcctacaaaactcttcactactgagcgatcaatcaaagagtaacccaatatatgattaatgataaccaatatttgcgttcttttattaatgccaacaaactttattattactgtactactatcaccatagtgcttgtcattcacgttaaaagcaataattctatcagaaaat

SEQ ID NO: 248211 - DNA, 439 bp, Glycine max
  unsure (1)..(439): unsure at all n locations
aattcccgggtcgacccacgcgtccgattacgtcagattgtggagcagtctctatcattcacgatgagcaaggttatgcaaaaactgcagaggacgctatagccgatgtctttagggcagggatggatgtggagtgtggtgattacataaccaagcatggaaaatcagcagtgtcccagaaaaaactgcccatatctcaaatcgatcgtgcccttcaaaacctcttctccattagaataagactaggcctattagatggaaaccccaccaagcttccatttggcacaattggtcccgatcaagtgtgctccaaacaaagcctncaactagccctcgaggcaacaggggatggcataatccttctaaagaacacaaactcacttcctccaacttccaaaaacaaaccccactattgccttaataggccccaatgccaatg

SEQ ID NO: 248212 - DNA, 553 bp, Glycine max
  unsure (1)..(553): unsure at all n locations
gttatttttgaggatgagctgatgggggtatatgtaatgtggtaccggtccggaattcccgggtcgacccacgcgtccgcccacgcgtccgcccacgcgtccggtaatttcccccaccttttgctcctgccaaatactagtgtttcaaataccctgccaaatactaacatcatatccatggctgtgcaaattgtaggttttgatggggttgagatccatggggctcatggctacctgcttgagcaatttatgaaagataaagtgaatgaccgaacagacgaatatggtggatcccttgagaaccgctgccgatttgctttggaagttgttgaagcttgtgttaatgagataggggcggacagagttggaattaggctatcgccattcgcagaatattcagagtctggagactctaatccaaaagaattggggctttacatgatgaatgccctcaataagtatggtattctntactgtcacatggtggaaccaagaatgaagactgttggagaaaaaactgaatgccctcatagcctggtgcctatgagaaagg

SEQ ID NO: 248213 - DNA, 579 bp, Glycine max
  unsure (1)..(579): unsure at all n locations
tgatgggctagagtggnnctgatgagatgataattttatattatagcggatgatgatgatcttcgtatgncgtcccggtccggaattcccgggtcgacccacgcgtccggcactaatcactactacacagatcacacacacacacacagagttgcaagagaaagagagcgagattccgatggcgactctggattccgacgtgcctatggttcccgccggcgagccctcgagcagcgccggtccttcttccaagaagcccaagcgcttcgagatcaagaagtggaacgccgtcgctctctgggcttgggacatcgttgtcgataactgtgctatctgccggaaccacatcatggatctctgcatcgagtgccaagccaaccaggctagcgccactagcgaggaatgcactgtggcatggggagtctgtaaccatgcttttcacttccattgcattagtcgatggctcaagacccgtcaagtttgtcctctagataacagtgagtgggagtttcaaaaatatgggcactagaactatgacgtgggtgaacctccctgggcattggaaagtctataccacac

SEQ ID NO: 248214 - DNA, 560 bp, Glycine max
  unsure (1)..(560): unsure at all n locations
cgttgagatngcaaaagtagctngatggtacatgnactgtcgtaccggtccagaattcccgggtcgacccacgcgttcgcaacactattcttttaacgattcttggttatgtagagcctacaacttttaagatcaactagatcactaaagggattataaaaaaaaaaaaaaaaaaaaaaaaaaaaaaaaaaaaaaaaaaaaaaaaaaaaaaaaaaaaaaaaaaagggcggccgttttaaaaaaatcaagcttacgtacgcgtgcattcaacgtcataactcttctataaagtcaactaaattcaattcactggccgtccttaaacaacaaaatgacaagaaaaaaccctgcgttacccaacttaatcgccttgctaaaaaaccccctttcgacagctggcataatagcaaaaaggcccgaaactatcaccatttccaacaatttctcaacctgaattgcgaatgggaaataaccctaaacaggcacattaaacatcaaaaaaataaaaagaaaaaacaatgataacaatataaatttcaaaaccctaaaccccctttttg

SEQ ID NO: 248215 - DNA, 407 bp, Glycine max
  unsure (1)..(407): unsure at all n locations
cggaatncccggggcgacccacgcgtccgcccacgcgtccgaccacgcgnccgcctacctatgcacatgctccagtcactgctcactgtgaatccaaaatatggtgctcatatcatcttacataagttgtagtgtcatctattaatttgtatcctgcacacctaattatctccattcctttcttatgttctaatctcttgtatttatagagggaaacctctttattatattgaatgctatttttatttcctaaaaaaaaaaaaaaaaaaaaaaaaaaaaaaaaaaaaaaaaaaaaaaacacaaaaaaaataaaaaagataaaaaaaaaacaacgataagactaaaaaaacaaaaaaaaaaaggggcggccgttctaaaggacccaagtttacgtacccgggcttgca

SEQ ID NO: 248216 - DNA, 545 bp, Glycine max
  unsure (1)..(545): unsure at all n locations
ngccgatgtgctatgatattgaagattgtcgtcaccggtccggaattcccgggtcgacccacgcgtccgaccaagcatatctcatttgaatacattccttgtagtttatactgaaagatgggtttgaagatggcgttactgatcctaggcctttccctcatgctccttttggtctcctctgaggtggcatccacgaatacaaaagaggaggcaaatggagtggatgatgccaaatatcccggtggaagctatggagggggttacccaggtcatggcggtggcggttatcctggccatggcggtggcggttatcctggccatggcggtggtggtggctatcctggtcatggtggtggccaccctggtcatggtggcggctaccctggccgtggtggtggatactgtaggcatggctgttgcggtggccggacatacaacggaggttgcagaaggtgctgctataacgctggcgaagctgttgctgcacaaactcaagataagactcacgattaagacgatgcagttctacttaattagtacttttn

SEQ ID NO: 248217 - DNA, 391 bp, Glycine max
aattcccgggtcgacccacgcgtccggcctatcttacatcatgaaagtccatagaatgaagatgatggcgtccgagtgcaacggtgagagcttatgggctgcgtaggttgaagaggatggaacggtggatgtggctacaattgacagggagaatcctttgacggatgctaacactgtgcttaaaggatccatagtaaccgctgatttacgatgtgatagggttcgggtttgggtcaccaaacatggaattggttatcatgctccaagaattggataagaagtgagtacactatagcacttgatatatatgttatgagtcatgaatataatagtatttaaataacgagttattcttccaattatgttattagattgaaaattgtaacatgac

SEQ ID NO: 248218 - DNA, 553 bp, Glycine max
ggagaatgttcatgagactcttcagctctcatacgactgccgtaccggtccggaattcccgggtcgacccacgcgttcggaagcccaaacagggaagagcaaagtggtggagtttgggaacatgcaaacgagggcagtggctatcttggtccacacaatcatcttctttggtctcattaccatctttcttgttgctattggctaaatgcttggaaactggcgagccagtggccattaagaaggttttactggacaaaagatataagaatcgtgagctacagttaatgcacttgatggatcatccaaatgtgatctctctgaagcatcgtttcttttccactacaagtgcagatgaactttttcttaatttgattttcagggggctggcttatatccacactgttcctggaggttgccacaaagatttgaagcctcaaaatatactggttgaccctcttacacaccaggttaagatatgtgattttggaagtgcaaaagtgctggtcaaaggtgaagctaatatatcacatatatgttcacttttctaccgggg

SEQ ID NO: 248219 - DNA, 553 bp, Glycine max
  unsure (1)..(553): unsure at all n locations
tgaggagtttacttgnatcgnctcnnctcatcgactgacgtaccggtccggaattcccgggtcgacccacgcgtccgtacgactcctgaatataaattgcgtttgttgatgatttatgcatctgtctgtcctgaaaggtttgattgtgataaagcttcaaaactaatgcatttgtcaaaactatcacctgatgacatgaaagttatcagtaatatgcaacacctgccggtatcattaatctgaaatcatctgctacttgttggtactcactcaagttcagtaatccatagaccaaacaagcaactcgcaaatatcttactgaataagaataaacatggcaattatctcgattttatcccatgttaaaagatctcattgaaaatttaatttaggtataatttgcaaagaaataatattcctgtttaaatgaaccaaatctagtaattcacgaggttcagatagaatcatataacattacccatacactgttaaaatacatgctctttatccaattagatctagtattaactgcaactgtggacttactcttact

SEQ ID NO: 248220 - DNA, 546 bp, Glycine max
  unsure (1)..(546): unsure at all n locations
ngatggtggctactaatctaaagaaaagtanttgactgctctaccggtccggaattcccgggtcgacccacgcgtccgaattgatgcttgtgctgttaaaggtggcgtaaaatttggtgattatcaatgtaataatgcgatgggtatatggtctaagatgaagggaaagcagacaggatttaggggtcccccagcaattggtcaggctatcgttaacaatcttcctccatctgaaatgatagattcgtgctctgtagctggtcctggatttgtcaatgttgtattgtcaaagaagtggatagctgagagcttacagagaatgctaattgatggtatcaattcatgggcacctcgacttccagtcaagagggctttgattgatttttcctcacctaatatagcaaaggaaatgcatgttggccacctgagatctaccattatcggtgatacattagctcgtatgcttgaattttcacgtgtagagtgtgtaatccgtagaaatcatgttggtgactggggaacacagtttgggatgctgattacaaa

SEQ ID NO: 248221 - DNA, 548 bp, Glycine max
  unsure (1)..(548): unsure at all n locations
tggaggttgtgtcctagttctgantgatnagtagcgccggtccggaattcccgggtcgacccacgcgtccgcccacgcgtccgaaaaccttgcccaagctcataatcttgtccctgaatttgagattacttgagaggccactcaccatggaccgttgaccaataagccaaccatgtttttggagattggtagtactgaagactattggaagagacaggatgctgctcaagttatggcacagttagtatgggaaggacttggacttggaggtgtgtcagatgtaggaaactggagcagggagaatgataacaagaaaatccttcttgggataggtggtggacattatgcacctcggcatgtggatgtagtattgaaagataatgtatgggtgggtcacctactttctggatattcgctgccaatggaagatccaaaccagtcaaaaggagaaaaaaatgtggagattggtggaacatggagacagtctataaaagctgcatatgaagccacttattctgcatttcctggtggtgaaaatcttgcacatn

SEQ ID NO: 248222 - DNA, 491 bp, Glycine max
  unsure (1)..(491): unsure at all n locations
aattcccgggtcgacccacgcgtccgctccccaaacgcccctctctctcctccaatggccgaccagctcaccgacgaccagatcgcggagttcaaggaggccttcagcctcttcgacaaggacggcgatggttgcattactaccaaggaacttgggactgttatgaggtcacttggtcaaaacccaactgaggcagaactgcaggatatgataaacgaggttgatgctgatggcaacggaaccatcgatttcccagagttcctcaacctgatggctcgcaagatgaaagacaccgactcagaggaggagcttaaggaggctttccgtgtgtttgacaaggatcagaatggtttcatctctgcagctgagctccgccatgtcatgacaaatcttggggagaagctgacggacgaggaggtggatgagatgatccgtgaggcccttgttgactgtgatggacagatcaactattangagtttgtcaaagtcat

SEQ ID NO: 248223 - DNA, 548 bp, Glycine max
agtagaaggtgtccagcaccgtccgattgcggtaccggtccggaattcccgggtcgacccacgcgtccgatacaccgtttctttcacttcacaaaaatgaaaaacatgaaattgtgttcggtgatgctaggcttatcactagcgttccttcttggggccacagcagaacaatgtggcacacaagctggtggagcgttatgcccaaatagattatgttgcagcaaatttgggtggtgtggtgacacagattcctactgtggagaaggttgccagagccaatgcaaatctgcaacaccctcaacaccaactccaacaacacctagtagtggtggagatattagcagactcattagctcttctctctttgatcaaatgcttaaataccgaaacgatggccgctgttctggccatggattctacagatatgatgctttcattgccgctgctggctctttcaatggctttggcacaaccggtgatgacaacactcgcaagaaggagattgctgctttcttggctcaaacttctcatgaaaccacaggggggtg

SEQ ID NO: 248224 - DNA, 551 bp, Glycine max
  unsure (1)..(551): unsure at all n locations
ngatggtgtgtcccacnactcattgagtncgatccgactgacgtaccggtccggaattcccgggtcgacccacgcgtccgaaatacagaattttcttgaccaagctgttggtgctagttgtgagggattaagtattaaagcattaaatgaggatgctacatatgaaccttccaagcgatcactcaactggctaaaactgaagaaagattatatggacagtataggggactcactagatttggtacctattgctgctttccacggtcgtgggaaacgtacaggagtttatggtgccttcctccttgcttgctatgacaatgataatgaagaatttcaaagtatttgcaagataggaacgggattctctgaagctgtgcttgaagaacgttcttctagtcttcgttctaaagtgattcccaaaccaaaggcatactatagatttggagaaacaataaatcctgatgtctggtttgaagccagtgaggtgtgggaggtgaaagctgccgacctgaccattaaccctgttcaccgtgctgcagtgggcatagtat

SEQ ID NO: 248225 - DNA, 547 bp, Glycine max
  unsure (1)..(547): unsure at all n locations
tgagagttcactaaactcagctactcatccgactgacgtaccggtccggaattcccgggtcgacccacgcgtccgggaacgagtatctgcagagcatgagagacccttctaaggctcagagctggggtcaacagcgtgttcagccttacatttcacaaaccagaatcacttgcatcactgtaggaaatgaggtattcaactacaatgatacacagctcacagcaaatcttctcctagcaatgcaaagtgtgtataatgcccttgttaatctaggactagcacaacaagttactgttacgactgctcattctttcaacattttagccaattcttttcctccttcatctggggcattcaggcaagatctgatacaatacattcaacccctccttagctttcatgctcaaatcaaatcacccttcctcattaatgcatatcccttttttgcatacaaggacaatccaaaccaaatctccttgaactatgtgctatttcagccaaatcaaggggccactgatccaaacaccaatttgcattatgataacan

SEQ ID NO: 248226 - DNA, 411 bp, Glycine max
cggaattcccgggtcgacccacgcgtccgcggacgcgtgggcggacgcgtgggcggactcgtgggaaaatggccaaatcaatcaaatgggttgagttgaacacaggggccaagattccttctcttgggttagggacttggcaagctgaacctggtgttgtagctgaagctctcaccacagccattcaggttggatacaggcatattgactgtgctagtgcgtataagaatcaagcagagattggttctgctcttaagaagctttttgatgatggtgtggtgaagcgtgaggacttatggatcacttccaaactctggtgttcagatcatgcaccagaagatgtgccaaaagcattggataaaacattacaggaattgcaacttgactatcttgacctctatctgatccact

SEQ ID NO: 248227 - DNA, 547 bp, Glycine max
  unsure (1)..(547): unsure at all n locations
nggaggtggttaaagatgtgactgtatcttctaccggtccggaattcccgggtcgacccacgcgtccgcttttctctttcctctctctctctctacgctttctcgtttgagatccctcaagggatccagtaactgaaggagcaatggggttgacatttaccaagctttttagccggcttttcgccaagaaggaaatgcgaattctaatggttggtcttgatgccgctggtaagaccaccatcctgtacaagctcaaacttggagagatcgttaccacaattcccaccattgggttcaacgtggagactgtggaatacaagaacattagtttcactgtctgggatgttggtggccaggacaagattcgtcccttgtggaggcactacttccaaaatacacagggtctcatttttgttgttgacagcaatgacagggacagagttgttgaggccagagatgagttgcacaggatgttgaatgaggatgaactgagagatgcagtattgcttgtatttgctaacanacaagatcttnccaatgcaatgaa

SEQ ID NO: 248228 - DNA, 551 bp, Glycine max
aggtgagctgatccagctcatgactgacctcgttaccggtccggaattcccgggtcgacccacgcgtccgctttcaggtctaatccgcacaaggattgcaagctcctcaaactcttcatggccatgagaagggcatactgagaactcgggggttaagatctggctcgtaattgggtaactcagactgagggtgattatatcttgttcttatgaagggactacatccgagtctactattgaaggtagaaagatgattagcttgcgtgagaatgatgaatgcaactattgacgactatatctttggatctacctcgataaagacgtatctgagaatgtctttatatcatatcaaatgtatgcgttagagatacggcattgacttgccaatgatgactaaggtgctttaatcacagagaatcatcaataatgtgaccatgtcatctgaaaatgtgccttcaaggattaacagatgtttggaggaatgagcatgaagaatttttcttgaagcctgtgaagctgtcagatttaaacaagcttaaaccccatatgag

SEQ ID NO: 248229 - DNA, 551 bp, Glycine max
  unsure (1)..(551): unsure at all n locations
aggagatgcgtgtcctagctcttgncatctctcatcgcaggtccggaattcccgggtcgacccacgcgtccgaccaattaccctttgcaattttcaccaaaagctactacttctacaccaatcttggatcatggacgccgggtcacaacctcaacatcttgaagagagaacagaggcgcacgaactgatgtacctgcaattcgtgcaattcgcgaccatacaggctctgatgcgctgcgccatcctctactcatacgccaaggagcgcgcgggtcctctgaagcccggtgtcgacaccgtggaggatgccgtgaagaccgtcgtggctccggtctacgataggttccaccttgtccccggcgaggtactcaaatacgcggatcggaaggatgccgagttagacagccacgttccctccaacgtgaagaaggtctcctcccaggcctgctccgtcgtctctgaagtccgccgcgatggcgtctccgnctacgccaagaccgtttactgcaaagtcgagcctacggcggagcagtgcgcagtgtctgcatggc

SEQ ID NO: 248230 - DNA, 550 bp, Glycine max
gggagttgtgtccatcacatgacgtatctcatcgcactgccgtaccggtccggaattcccgggtcgacccacgcgtccgattgatttgtttcttaaaaacaacactgcaatgtctgccatatttctgctggttggaatgctatcgtccattacagttgcacaatccataggagtttgctatggagtgattggtgataatctaccatcaaggcaagaagttgtggacttatataaaacaaatggcattggtagaatgcgtatatactacccagatgaagaagcactccaagcccttagaggttcaggcattgagttgattatggacgtggctaaggaaacccttcaatcattgacagactccaatgctgctacagattgggtcaataaatatgttacaccttactcgcaagacgtcaatttcaagtacatcgctgttggaaatgaaattcatcccaataccaatgaggcacaatatattctatctgccatgaccaacattcagaatgcaatttcatcagcaaatttacaaattaaggtgtcaacagctata

SEQ ID NO: 248231 - DNA, 548 bp, Glycine max
tggagtatgggtcactagacctccagcccactaacgactgctctaccggtccggaattcccgggtcgacccacgcgtccggatgtctttaagttgaataacttgttgggacatatttgactcggtgcttttcttttggtgcttgcctcatgggaaacagtgaggatgagaaatctgttaagactggaagcccttcttcttcacctgcaacaactgatcagaccaaccaacctaatattcatgtctatcctgattgggctgccatgcagtattatgggccaagagtcaacattccaccatacttcaactcagctgtggcttcaggtcatgctccacacccatacatgtggggaccaccacagcctatgatgccaccttatgggccaccttatgcagcattttattcgcatggaggggtttatactcaccctgcagttgctattgggccacacttacatggtcaaggagtttcatcttcacctgctgttgggactcattcaagcatagaatcaccaaccaaattatctggaaatactgatcagggtttaa

SEQ ID NO: 248232 - DNA, 552 bp, Glycine max
  unsure (1)..(552): unsure at all n locations
cgccgtctccgcctagagttccagnntcgatcgtactgacgtaccggtccggaattcccgggtcgacccacgcgtccgaatgtctataaaaaaaataacttctcggttcttctaaaactcaatactaatgttaaaatagcgatcctcatgaaaaacaactgatgataacaaatctctttctaactgtaagcccttcttcttcacctgcaacaactgatcataccaaccaacctaatattcatgtctatcctaattgctctgccatgcactattatctaccaagaattatcattataccatactgcaactcaactgaaactacatgtcattctccacacccatacatgttattaccaccacatcctattatactaccttattggccaccttatgcaacattttattcgcattcactccatcatactcaccttacatttgctatagtgcctcactgacatggtcaatgagttccatcttcacctacatttaatactcatatcaacaattatataccaaccaaattatttgtaaatactgatcatgctttaatga

SEQ ID NO: 248233 - DNA, 577 bp, Glycine max
  unsure (1)..(577): unsure at all n locations
atatttatatatttgnntaattagttgagatgnnatgtanatgacgaggtttagttccgatcgtatanatctaccggnccggaattcccgggtcgacccacgcgtccgcccacgcgtccggtacttcttttcaccacgggaccggaaatacccgaacggttccagggggaaccgggcggcgggaaccggttactggaaggcaaccggggcggataagcccattggccaccccaaaccggttgggataaaaaaagctttggtgttttacgcagggaaagctccgaaaggggacaagagcaattggatcatgcacgagtatcgtctcgccgatgtagatcgctccgttcgcaaaaagaacagcctaaggttagatgattgggtgctttgccgtatttacaacaagaagggcacgatcgagaagttccaaccaagcagcgatgttgttgttagccgaaaaatggaatcatcggagatcgaagacaggaagccggagattctgaaaagcggaagatgttgtcttttggcgccggtttcggccgcctaagggaaagccggtggtaaaacccgttttaatttc

SEQ ID NO: 248234 - DNA, 432 bp, Glycine max
cggaattcccgggtcgacccacgcgtccgcccacgcgtccgcacgaaaccttgcagtaacaaaaaatgcggagtttcactttctttggacgagtttctagagctttccgcgatcatgggtccaacttcaagcttgtactcctctgcaccaccgtaagtggtggagggattgtagcttacggagaggctgctgccgcatctgaagcagcggcggcggcgacggagaagaaaaaggtggtggtgctgggaactgggtgggctggcacgagtttcttgaggaacctggacaaccccaaatatgaggttcatgtggtctcccctcgcaattactttgcattcactcctttgctgcctagtgttacctgtggcaccgtggaagctcgcagcattgtcgaacccgtccgcaatattttcaggaagaaaaagatggaca

SEQ ID NO: 248235 - DNA, 462 bp, Glycine max
aattcccgggtcgacccacgcgtgcgcaatgttctagggttttattcattttccgatggcttctgcagatgttgagtaccgttgctgtgtcggtgggctcgcttgggccactgacgaccatgccctcgagagagccttctctcagtacggcgaaatcgttgaaacgaaggtctgtttgttgcaggcatcacatctgatctcacacgattcggattcggaattttctcgatcccgttctgatctgtgatctctgatctgtttgcgttacttgatcttatgatacttgtgttactatatgattcttttattactcacgccaatagattatcaacgatcgtgagactggcagatccaggggttttggatttgtgaccttcgcctcggagcagtccatgaaagatgcgatcggagcgatgaatggacagaacttggacgggcgtaatatcactgtcaatgaagctc

SEQ ID NO: 248236 - DNA, 549 bp, Glycine max
  unsure (1)..(549): unsure at all n locations
ngatggagtggaagggattataaggatctcgttaccggtccggaattcccgggtcgacccacgcgtccgcccacgcgtccggtgactttatcaagaacatgattactggtacctcccaggccgactgtggtgtccttattattgactccaccactggtggttttgaagctggtatttctaaggatggacagacccgtgagcatgctcttcttgctttcaccctaggtgtgaagcagatgatctgttgctgtaacaagatggatgccactacccccaagtactctaaggctaggtatgatgaaatcgtgaaggaagtctcttcttacttgaagaaggttggttacaacccagacaagattccctttgttcccatctctggttttgagggtgacaacatgattgagaggtccaccaaccttgactggtacaagggaccaactctccttgaggctcttgaccaaatcaatgagcccaagaggcccttcgacaagcctctaaggcttccattgcangatgtctacaagattggtggtattggtactgtgccag

SEQ ID NO: 248237 - DNA, 353 bp, Glycine max
aattcccggtcgaccgcacgcgtgcgcccacgcgtacggtgactttatcaagaacatgattactggtgcctcccaggccgactgctgtgaccttgggattgactgcaccgctggcggatatgaagatggtgattctaaggatggacacacccgtgagcatgctcttcttgctttcaccctacgtgtgaaacaggtgatctgatgctgtaacaagatggatgccactacccccaagtactctaagtatacgtatgaagaaatcgtgaacgaagtctctagttactggaagaacgatggctacaacccatacaagattccctgggatgccatctctggcgttaaagttgacaaca

SEQ ID NO: 248238 - DNA, 551 bp, Glycine max
  unsure (1)..(551): unsure at all n locations
tgacgatgctgtccagctcatctcagtctttcatacgactgcctgtaccggtccggaattcccgggtcgacccacgcgtccggttttgggaagttctcaaaggcttttcactggaaaacaggaagaaatttctgaagtttgtgacaggttgctctcgtgggccattgcttggtttccgatatcttgaacctatgttttgcatacaaagggcttccggtaatgccgctgaggaatcacttgaccgattaccaacatcggctacttgtatgaatctactaaagcttccgccttatacaagcaaggagcaattggaaaccaaattactgtatgccataaatgccgatgctggctttgatttaagttaaaaggaggcagcggagtttacgatatctttaggtttgaagccggtagaaaatgactcacagatgaccattaattggaaacgacanataatatggtggatagaattgaataaatttatcctgtgtgagagtttatgtatatatattcttaattttattcaatcttcattgtcaattggtatctctatg

SEQ ID NO: 248239 - DNA, 554 bp, Glycine max
agatggcattgattgagatcgatgcatgtcatagtactgacgtaccggtccggaattcccgggtcgacccacgcgtccgaaagaagaggggggcgaagagaagaagatggaggttagtttatcctcaacgggatgtatgcgccttaagctcgaagttgaagcataagcatgatcttttccactctcaaattcccattcccacagcttcaaccaaaaccagaagaacaaaacctttgttgatggttaacgcctccagacaaaccttgtcctccaactggctcgtttctccacactatttttctgcatccaccgcttccccatggctgttcagattcgaagagctcgacgccaccaacatgcttctccgtcaaagaattattttattgggttctcaggtggatgatatgactgcagattgtatcattagtcagcttttgttattggatgctgaagactccaagactgacattaagttatttataaattaacctggtggttctggaactgctggaatgggaatttacgatgccatgaagttgtgcaaggcagatgtg

SEQ ID NO: 248240 - DNA, 550 bp, Glycine max
gctggtgtatgcctttgatgcctgactatcagtacaggtcctgaattcccgggtcgacccacgcgtccgaaaaaaaaaaaaaaaaaaaaaaaaaaaaaaataaaaaaaaaaaaaaaaaaaaaaaattataagaaaaattaggaaaaaaaaaaaagaaaaaaaaaaaaaaaaaattggtgtggcctttttaaaggatccaagcttacttacccttccatgcaacgtaatagcttttttatattgtcacctaaattaaattcactggccgtcttttaacaacttctttactggaaaatccctggctttacccaacttaattgccttgattcacattcccctttcgccagttggcttaataccaaataggccctatacaatcgcctttccaaacattttcccatcctaaatgtcaaatggtacactccttgaatcggcacattatactcgataagtatgattgattctcccatcttaaccttttcacttttcaaatctttacctcccgttcctttactttttttcctttcttttttgccactttcgccggttt

SEQ ID NO: 248241 - DNA, 553 bp, Glycine max
  unsure (1)..(553): unsure at all n locations
atgagtgtggataagatatgacagaactgtctgctaccggtccggaattcccgggtcgacccacgcgtccgcccacgcgtccgcccacgcgtccgcagaaacaaacattatttggttttctgaattgtttggattgcgagaaaaaaaaagggggggaaatggcaaaggatattcgattcttcgacctcaacacgggcgccaagatcccttcagtcggcttgggaacttggcagtctgatcctggccttgttgctgaagccgtcgcggcggccatcaaggttggttaccgccacattgattgtgctcaaatctatggcaatgagaaggagattggctctttgttgaagaatctgtttgaggagggtgtagtgaagcgcgaggatttgtggattacatctaaactctggaatactgatcatgctccagaagatgtaccactggcactggaccggaccttgaaagatttgcagctggattatgtagaattggatcttatccactggcctgctncgatgaaaaaaggatcaactggctttaagcctgnaaatcttgn

SEQ ID NO: 248242 - DNA, 545 bp, Glycine max
agtgagctgtcactgactcatgatactcatagaactgacgtaccggtccggaattcccgggtcgacccacgcgtccgcccacgcgtccgcgcgttggtgcaaagcatccttcgcttcaatctctctctgtctctttgcgctttctgcaaaccgaacatttcatctccaaagggatcaacaggtcgaaggagaaatggggctgacattcacgaagcttttcagccggcttttcgcgaagaaggaaatgcgaattctgatggttggtcttgatgctgctggtaagaccactatcctctacaagctcaagctcggagagatcgttactacaattcctaccattgggttcaatgttgagactgtggaatacaagaacattagcttcactgtttgggatgttggtggccaggacaagattcgtcccttgtggaggcactacttccagaacactcagggtcttatttttgttgtagacagcaatgatagggacagagttgttgaggccagagatgagttacataggatgttgaatgaggatgaactgagag

SEQ ID NO: 248243 - DNA, 546 bp, Glycine max
  unsure (1)..(546): unsure at all n locations
gtgatgtgcgcgccagggacccccagccgcgtagccactgatctaccggtccggaattcccgggtcgacccacgcgtccgcccacgcgtccgcgcactcgtgcacagcatccttcgctttaaactgtttgtgtgtctatgggctatctgcgaaccgaacatgtcatcgacaaagggttctacaagctcaacgagaactccagcatacattcactaagcttgtcaacctgctattctcgtattangctatgcgaataatcactggtggtcttcatcatggtgggataccacctatattatcgagctcaaactatagagatcgatacgacattgcctaccattgaataatctgttagactgggaatacaataacataagattactgattgacattaagctggtcaatactgaacatgctccttatgatgcactactttcataacactgacgttgataatattgcagctgacagatataaattggacatatatgctaatgcctgatacgattacaaaagaacatctaacttgaacaactgaaatatgcc

SEQ ID NO: 248244 - DNA, 337 bp, Glycine max
aattcccgtgtcgacccaggctcgacgccacgcgttcgataattaataataattagtatctattcaagtatcaacaatataagcaataggttgctgtggctaaagctcgatattaatttcgtggtgttgtaatataggttcaacgttgtgctgatgatagaaccattttggttacaacatatgaaggcacgcataatcatccactgccacctgctgctatggccatggcattaaccactacagatgctgctagcatgttgctttctggatcaatgtccagtgcagatagtataatgaacccaaatatgctagctagagcaattcttccttgctctac

SEQ ID NO: 248245 - DNA, 378 bp, Glycine max
  unsure (1)..(378): unsure at all n locations
cggaatncccgggtcgacccacgccgccgagcagaaagcaaggatgggcgcagcggctagggaggcagctatggtggtggttatggaggggggctgtcaagctatggaggtggccgtgctagcttaacgctacctgaccaaaaaacactaaccggccgaactgcaccttgaggttccattcgagatggcagagtctaagaatcacacagcgcacaatcagtcctacaaggcccacaaaaacggcatcaagaaacccaagaggcatcgccacacttccaccaaagggatggatcccaagtgtctgaggaatcagaggtacgcgaggaagcacaacaagaagagcggcgaaattgccactgaggaagagtgaagtggcac

SEQ ID NO: 248246 - DNA, 543 bp, Glycine max
  unsure (1)..(543): unsure at all n locations
nttcgtgtgtctagctcttgagggaactccttaccggtccggaattcccgggtcgacccacgcgtccgcccacgcgtccgcacaactactacaagtacttccttacaatcaaaaccaacaacaactatggcaagttatcaaaagcactacgatgatcagggtcgcaaggttgacgagtatggcaacgttgagaagcaaaccgacgaatacggcaaccctgttcatgctgctagtgtcacctatgtagccaccagaactgctgctggtggttacagtgatgacattaataagcaacatgataccaccaatgcctacggcgtagacactggtagacagcattctagtggtggctacgatggtgacactaataaacatcatggaactactggtggctataatgatgacaccaatagacatcatggaactaccggtgtctatggtatagacaccgataggcaacaacatgggactactggtggctatgccggtgacactggtaggcaacatgggaacatcggtggcccttactatggaaccaacacc

SEQ ID NO: 248247 - DNA, 502 bp, Glycine max
aattcccgggtcgacccacgcgtccgtcccattcttgcaccggggtcattggactaggattactgaaccagtgggaggtaggctctgttataaacctccaatttatgacataaatgctcctgacttgtacattccattaatggcatttggtacctatgttgttcttgctggcatctcattgggtcttcgtggaaagtttagtcctgaagctttgaactggttatttatcaagggattggttggttggtttatgcaaacagcactgcttaaagttactttactttcattaggcagtggggaagcacctctattggacattatagcgtacgccgggtacacttttcctggcttgtgtttggctgtttctggaagaataatatggagttactcctactactttctgatgctgtggacctgcttatgtatggcagtgtacttggttaaaacaatgaagagagtcctttttgcagaagttaggagttatgattcaagcaaacaccac

SEQ ID NO: 248248 - DNA, 544 bp, Glycine max
cgacggatgtgcatgactctcagtactcatcgcactgacgtaccggtccggaattcccgggtcgacccacgcgtccgcccacgcgtccgcccacgcgtccgctcctcctaaagatgcagatcttcgtgagaactttgaccggtaagaccatcacccttgaggtggagtcctgcgacaccatcgataacgtgaaagctaagattcaagacaaggaagggttcctacctgaccagcagagacttatctttgcgggtaaacagcttgaggatggtcgaacccttgccgactacaacatccaaaaggaatccactctccacctagtgcttcgcctcacgggtggcatgcaaatctttgtcaagactttgactggcaagaccatcaccctcgaggtcgaatcctgggacaccattgataatgtcaaggccaagatccatgacaaggagggtatccctccagatcagcagaggttgatatttgctggtaaacaacttgaggatggaagaaccctggctgattacaatattcagaaggagtctaccttacc

SEQ ID NO: 248249 - DNA, 553 bp, Glycine max
cgatgtgttcaactaggccgatcgactctcatacgactgacgtaccggtccggaattcccgggtcgacccacgcgtccgaccggcttcgcggaggtgcgcctctacggcgacgtggtgctccgctacgtcagctacaaggacgccgcgccgcatgcgccacacgcagatccgtcgcggtggttcctgccgggattcgaggccgcggcgtcgtcgtcttcgtttccggagctggactacgggatccggcggctggaccacgccgtcgggaacgttccggagctggcgccggcggtgaggtacctgaaaggcttcagcggattccacgagttcgcggagttcaccgtggaggacgtgggaacgagcgagagcgggttgaactcggtggttctggcgaacaactcggagacggtgttgctgccgctgaacgagccggtttacggaacgaagaggaagagccagattgagacgtatttggaacacagcgaatgtgctggtgtgcagcaccttgcgcttgttactcacgacatcttcaccacactgagagagatgaga

SEQ ID NO: 248250 - DNA, 460 bp, Glycine max
  unsure (1)..(460): unsure at all n locations
ccggggcgacccacgcgtccgcantcctctctcaagccctaatttccccttatttccatggccacagaatagcccactggggcggtggaacccgctcccgaacctgcctccgccgatcctcccccggaggagaaggaggagaccaaacctgaagccaaagctaagaaaaccaaggagcccaaacctaaaaaggtttccagacctcgcaaccctcccactcatccttcctacgaagagatggttaaagatgcaattacctcgctgaaggagaaaaccggttcgagccaatacgcgattgcgaagttcatcgaggagaagcacaagcagcttccaccgaacttcaagaagcttcttctctaccatttgaagaagctcgtcgccgccggaaaactcgtcaaagtcaaaggctcgttcaagcttccacctaccatacctgctgcatcttctttctcttcttttt

SEQ ID NO: 248251 - DNA, 409 bp, Glycine max
  unsure (1)..(409): unsure at all n locations
cggaattcccgggtcgacccacgcgtccgctngaatnnncttcatccttctctgttctcctagaacttgattacttgaacattccctatgacagatgaggtggttcttctggatttctggccaagtccatttgggatgagggtcaggattgcacttgctgaaaagggtatcgaatatgagtacaaagaagaggacttgaggaacaagagtcctcttctcttacaaatgaacccggttcacaagaagattccggttctcatccacaatggcaaacccatttccgaatccctcattgctgttcagtacattgaggaggtttggaatgacagaaatcccttgttgccttcagacccttaccagagagctcaggctagattctgggctgattatgttgacattaagatacatg

SEQ ID NO: 248252 - DNA, 418 bp, Glycine max
ccgggtcgacccacgcgtccgcccacgcgtccggcaaaacgaaaaggatacatatccaacaatgacgaccacccgtgttgggctctgccttttatttgcattcctcttctacgcagctgaaggagccaaggttagtttcaataacaagtgcacatacacggtatggccaggaaccctaaccggtgaccaaaagccccaattatcaacaactggtttcgagttgggtccaggagcatccaactctgtggaccttccatctccatggtccggtcggttctgggcccgaacaggatgctccaacaacaacggaaggttcagctgcgccaccgccgattgcgcctacggtcaagtcgcatgcaacggtgccggtgcaatcccgccagctactttggtagaaatcacagctgcagcaaacgga

SEQ ID NO: 248253 - DNA, 299 bp, Glycine max
ccggaattcccgggtcgacgccacgcgtccggccacgcgtccgattaacacactacgcgtgcaaagaacctgtgctctcctcttgcttttgggagagaagaaagaagcgagaagatgtcagacgcgttctgcagcgactgcaagaggcagacggaggtggtgtatgaccactctgccggcgacacggtgtgctcggagtgcggcctcgtactggagtcccactctatcgacgagacctctgagtggcgtaccttcgccaacgagtccggtgacaacgatcccaatcgtgtcggcgggcc

SEQ ID NO: 248254 - DNA, 510 bp, Glycine max
  unsure (1)..(510): unsure at all n locations
gtttgtcgtgctgctaagaatagaancttaactgcacgactctaccggtccggaattcccgggtcgacccacgcgtccgggatgaggagcatcatgagccccataatcatctccatgttcaacccaaaatccacggtctggtccatactcatcaatatagatttttggacaaggcagcgatcatagatgaaattgatgccaagacgaagacaagagacccttggaggctatgttcagtgacacaagttgaggaagtgaagcttgtccttcgtttgattccaatatggctaagttgcttaatgttcactgctgtacaagctcaagtgcacacatttttcattaagcaaggtgccacaatggtacgtaccataggaccacatttccaagtcccaccagcatcggtacaaggcctagttggaggcacaatactctttgctgagccattctatgaccgtgtctttgggccaatagcaaggaaaatcacaaggaaacccactgggataacaaggc

SEQ ID NO: 248255 - DNA, 283 bp, Glycine max
ccggtcctgaattcccgggtcgagccacgcgtccgtggttggattgaccggcttcagtggtctcttaactgaacaacgaaagagactgactgtggcgggtgaattactggctgacccgtccataattttcatggatgagcctacttctgggttagatgcaagagctgctgcaattgttatgagaacagtcatgaatactgtggacactgcaagaaccgttgtttgcaccatacatcagactaacattgacatatatgaagcattccatgagctattactaatg

SEQ ID NO: 248256 - DNA, 546 bp, Glycine max
  unsure (1)..(546): unsure at all n locations
gggttngtggaagtncgtgactagcggatgcggactgtaacgtattgcctgcaccggtccggaattcccgggtcgacccacgcgtccgcccacgcgtccggcgagaaagcgaagacagccatggcgtcgtttcttcaatcgtttgtggaggggaagaagaactggttcgccgctcagcacatgaaatccctctccaaacgcctccgcaaatatgggctccgatacgacgatttgtacgatccttactacgatctggatgtgaaggaggcgctgaatcggcttccgaaagaggtggtggacgctcgccacgcgcgtcttaaacgcgccatcgatctttccatgaagcacgagtacctccctgacaatctgcagtcaatgcaaacaccattcaggggctaccttcaggatatgctgactcttgtgaagagagagagagcagaacgtgaagcattgggaggtttgcccctatatcaacgatccattccttgagtgcatcaagtatttcatgaaggtattttgattgaagtgggaggtctaaattgtatt

SEQ ID NO: 248257 - DNA, 521 bp, Glycine max
ttggtgcatggaggaggatggatagtatgcctcaccggtccggaattcccgggtcgacccacgcgtccgcccacgcgtccgggaagcccatctcactaccggaaactacccctccgggacccctcttgttcggcgccggccaccgttgacgacgtcttctcctccgctgcaaccactactggcggctatgactccgattccgatttggtgaacctcaagatcagcttgttgggtgattgccatattggaaaaactacttttgtgatcaagtatgtggggaatgagcaagaaaagggaagcttacagatggaaggattgaatctaatggacaaaactttgtctgttcaaggagctcgtatttcgtttagaatatgggatgttgcaggagataaaaggtccctggatcaaattcccatggcttgtaaagatgcggttgcgattttgattatgttcgatctcaccagtcgttgtacactaaatagtgttgttggatggtatagtgaagcaagaaagtggaatca

SEQ ID NO: 248258 - DNA, 309 bp, Glycine max
cctgaattcccgggtcgacccacgcgtacgctctcgaatcatctttctttctcttcctgcagaagctatccgtgttacttgttcccaagggtccagcaagcaaattacatgggtgatttgcaaatccaggtccccagcgcattctacccgtttgcctacgcgagagaatcagatgcccccggggcaaaggagtatgtgcacatactaattcagcataggaatggaaagaagagtctgacaacagtgcaagggctcaataaggagttcatctacgataagatccttaaggacctcaagaaggacttctgc

SEQ ID NO: 248259 - DNA, 309 bp, Glycine max
cctgaattcccgggtcgacccagcgcgtccgttcagtacaccaagatcctgtcgttgcaacatcaccaacccggcatgcaatttcagcacacgaagtgatgtatgagctgctcggatgttccctcgaggaggcaacatttggttcggtgcttgcttcacgagcaattagagcagctcattgtctgacttcaattcatttctcacctacatctgagcacatactacttgcgtatggtcagcgccatggttctcttcttaaaagtattgacattgatggagaaacaacttttcctttatgtacaatggtaa

SEQ ID NO: 248260 - DNA, 497 bp, Glycine max
  unsure (1)..(497): unsure at all n locations
taggtgtgaatagcatgagantgtaatgtatgtctctaccggtccggaattcccgggtcgacccacgcgtccgcccatttttgtactaagaagcatttgttacatttatgtaaccaaaggaaaatcaaaagtacgcangaggtgaagctcggtggcgaaatcaacatgcaacgcagtgaaagcatgcgactaaaggagaaaaaagtgaaggatttgatggttgacaagaagaggctagtggaggtgccgtacatggcgtncctggcccacacaatgactacactggtggcgaacaaggttgtggcggtgccggtggctgcgccgccggngcaatggatcggagcccggaggtccatggatcgtgagtcttgatagcaaaccggaaccgtacggaagcacttcattaggaatgggactattcttggccatgggggtcacaatggttgggataccaattggatggggaacataatgttttaaccaagaaccttgttcaa

SEQ ID NO: 248261 - DNA, 546 bp, Glycine max
  unsure (1)..(546): unsure at all n locations
ngggnnntaaacggggtagaatgtcagggagagggagaaaggtatgcctgcaccggtccggaattcccgggtcgacccacgcgtccgcccacgcgtccgcaagacgagagaatagaggaagcttggggtttgaatcgaatcgaagggaagcgattcatcgatcgatcgatggctcttgtaggagttgaactgaagcatgcggcggagggcgtaccggaggcgaattgctccgccaagcccaccaagcagggcgagggcctccgccactactattctctcaacatccacgagcatcagctccttcttcgccaaaagactcataacctcaaccgtctcgaggctcagagaaacgacctcaattctagggtgaggatgctgcgcgaagaattacagcttctgcaggaacccggctcttatgtcggtgaagttgtcaaagtaatgggcaagaacaaagtccttgtcaaggtccacccagaaggaaaatatgttgttgacattgacaaaaatattgacattacaaagattactccatccactagagttgcn

SEQ ID NO: 248262 - DNA, 524 bp, Glycine max
  unsure (1)..(524): unsure at all n locations
tatggtggaatgactagcaaagctacgtantgcacttaccggtccggaattcccgggtcgacccacgcgtccgatttgggctttgtcaagggtattgttgattctgaagatctcccactcaacatttcaagagaaatgttgcaacagaacaagatcttgaaggtcatccgtaagaacttggtcaagaagtgccttgagctcttctttgaaattgcagagaacaaggaggattacaacaagttctatgaggctttctctaagaacttaaagcttggtatccatgatgattcccagaacaagggaaagattgctgaattgctcaggtaccactccaccaagagtggtgatgaactgacaaggctcaaggttatgtgacccggatgaaagaaaggcagaatgccatctactacttaaccggtaaaaccatgaagcttgttaagaactcccatttcttggagaagtggaagaggaaagggaatgaggttcttatcatggttgatgccattgatgaatatgctgttggc

SEQ ID NO: 248263 - DNA, 503 bp, Glycine max
  unsure (1)..(503): unsure at all n locations
agtttgcgtaagtgtgtgacgactgacggatcgcatgcacntaccggtccggaattcccgggtcgacccacgcgtccgcccacgcgtccgaccagctatacttgttccttttgaaggttagaagtgctacaatacaaagaatgggagctactcaggaagatgtgaagcttttgggtattgtgggaagcccatttgtgtgcagggtccagattgcccttaagttgaagggagttgaatacaaatttttggaagaaaatttgggcaacaagagtgatttgcttctcaaatacaaccctgttcacaagaaggttccagtgtttgttcacaatgagcagcccatagcagagtctcttgtgattgttgaatacattgatgagacatggaagaacaaccccatcttaccttctgatccttaccaaagagccttggctcggttcttgtccaaattcattgatgataagattgtgggtgctgtatcgaaatctgttttcacggttgatgaa

SEQ ID NO: 248264 - DNA, 493 bp, Glycine max
  unsure (1)..(493): unsure at all n locations
gttaggttgtgcgctagctctgctatctcatgcacttaccggtccggaattcccgggtcgagcccacgcgtccgcccacgcgtccgcccacgcgtccgcccacgcgtccgggatgttttaattctcttgcaagaaggtgacactgcttacaaagtctgtttatctgaggtagagtgggagagagtcacagcagttaccagctacttgaagctttttgttgaggttatcaatgttttcactaagagcaagtatccaactgcaaatatatatttccctgagctctgtgatgttaagttgcatttgattgaatggtccaagaattcagatgagtttatcagttctttggcgtcaagattgagaagcaagtttgatgagtattgggagaaatgtagcttaaggttggctggtgctgcaatggtagacccttcgttcaagatgaaattggtagattattattatccgcaaatttttggcagcatggctgcaaatcgan

SEQ ID NO: 248265 - DNA, 508 bp, Glycine max
  unsure (1)..(508): unsure at all n locations
ggtttttgacggtggtgacgctgcaccgtcncgctacgtactgcacgtaccggtccggaattcccgggtcgacccacgcgtccgtttacagagaagcgaagaggcgcagccgtagcagtaactcgtggaattgctagcagtggcgaggatcaaggtttacgagctgaggcagaagacgaaggctgatctgttgaatcagctgaaggacctcaaggccgagcttgccttgcttcgtgttgctaaggtcaccggcggtgcacctaacaagctctctaagatcaaggtggtgaggttgaacattgcccaggttttgacggtgatttctcagaagcagaaggccgcgttgagggatgcctacaagaacaagaagtacttgcctctcgatctccgncctaagaagaccagngccattcgcaggaagctaactaagcaccaggcatcattgaagacagagagggaagaagaagaaagagttatatttnccaactgaggaaatatgctatcaagn

SEQ ID NO: 248266 - DNA, 499 bp, Glycine max
  unsure (1)..(499): unsure at all n locations
gtttttgaatttggtgagnggggcatgnnncgatggactgacctaccggtcctgaattcccgggtcgacccacgcgtccgctctctgtgtatttccctacctctcccttcaagatgcatatcttcatcaataccctgaccggcaataccatcagccttgatgtggaaagctatgacaccatctacaacgtctaagccaagatccatgacaaggaaggaatcctccctgaccagcaacgtctcattttctcctgaaagcaacttgatgactgacatacccttgctgactacaacattcagaacgagagtactcttcacctcgtcctacgtctacgtcgtggcatgcagatctctcctaaaacactcaccgtaaaaaccataaccctagagtttgaaagctccaacccattcaataccgtcaaggccaaaatcaagaacatggaagtaatccacccgtacagtaaacgattaatcttccccaaaaagcaatttaaggactn

SEQ ID NO: 248267 - DNA, 492 bp, Glycine max
  unsure (1)..(492): unsure at all n locations
ngaaggtnntggaatcgacagacactccactgcatgcctgctaccggtccggaattcccgggtcgacccacgcgtccgcccacgcgtccggagagggaagacggttgtggggattcgatgggggccaccgttcactcgccgctagtcacttatgcttccgtcatatctctgcttacactctgtcctccgtttgtcatacttctgtaagtaataatctcatttactctctctctgatctgaaatctgaatgattgaattgcgttgcagatggtacaccatgactcttgctgacggatctgtttccgagacattccattatttaaggcagaatgggttgcaaggtttgctacatatatggcccacccccactcccaccgnctgcaaaatcattgcagtctatgctgcatttgaagcaacacttcagcttcttcttcccgggaaaaccgtttacggccctatttctccaaccggccaccgacctgtctacaaggc

SEQ ID NO: 248268 - DNA, 529 bp, Glycine max
  unsure (1)..(529): unsure at all n locations
tattgctacttnaagtttcaggangtacantnctatacgttcttaacctcaatttccaggtagacctacgcatactcattcccttcacaacatctacacataattaatcaaatcataccgaagactctaccacagctgggttgtacttcagctggtgcaccaaagatacgaaattgattttactacaaaaccatgcctatctccttgacacaatttaatgatcactccgactactgccccctatttaactcactcttctttccctaagataaacacttcttgagtcattatagactttctaactcaccctcgcccaaatgccctactcgactgacgcttcaaaaaaatatattactagcttactccttagaatacaagatctctagagagcagaacataccgacctgtcatattcactagttcaaaataaatcatattgtatcacataaatttatactttatcattcaatttaaaatattatatttccaatattaatttatatcatatcattaacaacttttttcctag

SEQ ID NO: 248269 - DNA, 519 bp, Glycine max
atgctacatggggtgggagtatgtgatgctcaccggtccggaattcccgggtcgacccacgcgtccgtccgttctttgcttttctcgggctacgaaaaacgacgtcgttttcccaattttccccggcgagcgggaaatggtggagccggtggagcttcgcggcgaggagcagctctcgttgctgtcagattccagcaatggtgaccggtcgtggcggttgaacttcgacgggtttcagctatcttcggagcacacggagaagcaagtgaaaccccctcgcggactccatgactgttatggggttcttggtcaagaagataatattgcggagtactatcagcagcaggtagaagtgcttgagggctttactgaaatggatgctttagcaaagcgtggttttattcctggaatgtcaaaggaagagcaagacaagttagcaagaagtgagacttttgccattagagtgtcaaacgcaacaaacatggttctttttggtgccaaagtttatgcatcagtcaa

SEQ ID NO: 248270 - DNA, 445 bp, Glycine max
ccggaattcccgggtcgagccacgcgtccgcggacgcgtgggcggacgcgtgggtggctgctctttggcgctgtcgccgttcttagccctagtctgtctgtctctcgacgcctctctgcaagttagctgggacaagccaccaaggaaaacattttactgtgaagaacaatgaggaagcttaagtttcatgaaaagaagcttttgaagaaggttaattttttggaatggaagacggaagggggtcacagagagaacctcattatgcaacgctaccatgttactggacgggacgattacaaaaaatattcaggtttatgccatatggttcagaagttagtaaacatattgaaacagatggacccaaaggatccctttcgggttgatatgactgataagctattggagaaactctacaacatgggtgtgattccaaccaggcaaagca

SEQ ID NO: 248271 - DNA, 488 bp, Glycine max
gtggtgcgtgggcagttgcggtcgcactgactaccggtccggaattcccgggtcgagcgacgcgtccggtactgttctattagttcatactaagttctgaaaatgagttccaaggttttgcttgttctagttagtgttcttggccactatggttctgatctcctctgaggttgcacccgatgatgcatacgagaattttgacaaaatagatgggaagcctagtgcagatggggtagatgaaagcaagtattggcgtggcggctatggtggcggctatggtggtggttatggaggtgggcgtggaggctatggaagtgggcgtagaagctatggacggggacgtggtggatatggctgcggacgacgtggctatggtggctgccgtcgtggctattgcggatatcgttatgatggccgtggtggctatggtcccaatgaacataacgaggcttgggttgatgctaaacctcacaactcataatggtact

SEQ ID NO: 248272 - DNA, 500 bp, Glycine max
  unsure (1)..(500): unsure at all n locations
agtcatagagggtgcggaggnaaagtcccannngatggactgcacgtaccggtccggaattcccgggtcgagccacgcgtccgagaatatattgagtatcttattgacacttaaagatgtgagggatgatcatggaaacgagcggactgataccgagattgaaggactacttctgaacatgtttacagcaggaactgacacatcatcaagcaccacataatgggccattgcagaactaataaaaaacccacaaattttggccaaactccaacaagagttggacaccgatatgggtcgagataacagtttcaaagaagaggacttggcccacctgccatacttacaagctgttatcaacgaaacctttaaactctacccatcaacctctatttctgtgccacgtgctgattccgatagtagtgagatatttagctaccacatcccaagggggctacactctttgtgaacatttgtgccataaccctataccaaaaaaaggt

SEQ ID NO: 248273 - DNA, 409 bp, Glycine max
gtcgacccacgcgtacgcgaccattttgaagcgtatcatgctttgtcacacagtgtaagagaccggttgattgaacgcgggcgtgatactcatgtgtacgtcaagagaacaaaacctaagcgcctctacttcctttcgcttgagtttcttatgggtcgttccttgtcaaatagtgtcatcaatcttggcatccaggatcaatatgcagaagccctaagccaacttggatttgagtttgaagttgtggcagagcaagaaggagatgccgccttaggaaatggtggccttgctcgtctatcagcatgccaaatggattctttagcaacattggattatcctgcatggggttatgggctgcgatatgaatatgggctgtttcgtcagatcatagtggatggctttcaacatg

SEQ ID NO: 248274 - DNA, 484 bp, Glycine max
  unsure (1)..(484): unsure at all n locations
gagttgtctacttccaagtggcccgnatgtctatcgttctgaatttcatctcgagcaggcgtcccctaccgcttgctttgttcaacgcgatgctactactcttagttagctagcgctatcaatgctgctggcatgtacttggggattgacggatgctacctggatgatcctgccaatagtcatatgcttgtctcaaagattaatccatgcatgtgtaagtatgaactaattcatactgtgaaactgctaatggctcattaaatcaattatagtttgtttgatggtatctactacttggataaccctaataattctagagctaatacttgcaacaaaccccgacttttggaacggatgcatttattagataaaaagtcaacacacgctctgactgttgctttgaatatttatgataactcgtttgatcgcacaatctttttaccgacgactcattattcaaatttctgccctttaactttcgatg

SEQ ID NO: 248275 - DNA, 532 bp, Glycine max
tcgttgtgaggccaccccagcaacgctacgcctgcacttaccggtccggaattcccgggtcgacccacgcgtccggttagggtttgagtctcaaccactctttctttaaagcacagtctcacatacctcattggctcggcttcgttctctctctgtctctctctctcttttctctgcgtgtgtgcgtggattggtgaatatgagattgaagaagatgatgcatgctggacccggcggcatggcccaacacgcgaaccagcactacgcacagcaacagcaacaacaacaacaacaagcctacatgatgatgccgtcgcagcctcagccccctcagatgtgggccccatcggcccagcctccgtcccaatcggtagctcctccgcaacccaccagcgccgatgaggtccgtaccctctggatcggcgatttgcagtactggatggacgaaaattatctctatacctgtttcgcacacaccgacgagctggcttcagtcaaagtcattaggaacaaacaaactagtcaatcggag

SEQ ID NO: 248276 - DNA, 537 bp, Glycine max
  unsure (1)..(537): unsure at all n locations
gttcttgaagatggggtgggctgcacgtccntgcatcgcctgacctaccggtccggaattcccgggtcgacccacgcgtacgggcaaaggctagattcttgtatggagagtccatgggaggagcagtgagccttctttggataggaaggacccttcattctgggacggtgcagttctcgccgcacccatgtgtaaggtatgaactactaataataataaaatttttcaacaatattgttagtctaagaaaatgaatcatactaatggaatacaaataattcgagtaactctataaattgcattaattgaataggcactttttcctacgtaaaaattaaacatggcttattcaaatgttgaaacactaagccagatatcatagaaggtgaagccacacccggaggtggtcaacatattacctaaggtcgaggatttaatcccaaaggggaacatagtcccaacaaaggatgtcatcaattaagccttaaaagaccctgctaaccgaaagaggttgaggtttatatgggaaatggtaat

SEQ ID NO: 248277 - DNA, 425 bp, Glycine max
acttaacctcaatttccaggtaggcgtacgcatgcaaattaataatatcgaccaaaatgatgatttctttactaacatatggattaagaatgtcgagtttctcaaaacttcgtactgtcaatcctttttatactatgctgagacctgtaatatattttcattctaaggtatccattgcaacttctttactgcgagcaatagctaccaaatgcattcccaaagccatgttttaacatatcactgacaaagcaatcaatacaattatactcacccaacatgaagcaagacgtcttgctcacaattctattggaacaaaccataatctatattgtattatctgccaatgaactcctattgctgctaaagtacttaagtcaatgcggatcaaccttcaagattcaccaatcgaactataaaaaataatt

SEQ ID NO: 248278 - DNA, 492 bp, Glycine max
ctgtgtcgtgcgatgtatcgtctatgcattgacttaccggtccggaattcccgggtcgacccacgcgtccgctggcgcttgctttgttcaacgcgatgctactactcttagttagctagcgctggcaatgctcgtggcaggtgcttggtcattaacggatgctacctggttgatcctgccagtagtcatatgcttgtctcaaagattaagccatgcatgtgtaagtatgaactaattcagactgtgaaactgcgaatggctcattaaatcagttatagtttgtttgatggtatctactactcggataaccgtagtaattctagagctaatacgtgcaacatacccccgcttctgggaagggatgcatttaataggttaaaaggtcaacaaaggttttgccggtggttttaagaattcatgtaacttggtggatcgcacgggctttgggcccgggaaccaatattcaaaattctggcctattcacttttgatg

SEQ ID NO: 248279 - DNA, 500 bp, Glycine max
  unsure (1)..(500): unsure at all n locations
atggtgngtcagagcctgaacctgctncgctaccgccntgcacgtaccggtccggaattcccgggtcgacccacgcgtccgcccacgcgtccggtccgccatctccgccgtcctcctccagctctgcagccactgcgggcaggtggtcgtctccagagcgctgtaccgtgggacccacgcgctcctctcacactttctcccgcgcacgtgcggaatatccactagcttcagggaggcgacggatcttgacatgggtgatgctgccataatagaagggaaaacaaaagggctttacttcgaatctgcttccaaccccacccttacggttgcgaacatacctgaactgtgccacatggcacaccggaagggagtgactgtggtggtggacaacacgttcgcgcccatggtgctttcgccagcgcgtcttggtgcttatgttgtcgttcacagtatctccaagttcatcagcggtggggccgatatcattgcatgagcggggn

SEQ ID NO: 248280 - DNA, 281 bp, Glycine max
actctgtccttaattcccgggtcgacccacgcgtccgatcacatcttatgcaatctattacattaatatttatatatatactattaaaattgggagaggttacaaatactggtggaggtgtttaaacaatattataattaatatttatattaacaaatatttacaaatgtattaaatactaatgacgaattattaattctactatataatattatatttaatatataatattttaaaaaataatatgcttcaatataatatttataaaacattaaattaat

SEQ ID NO: 248281 - DNA, 527 bp, Glycine max
tatgggtgccataaagggggatggtatagctacgactgcaccggtccggaattcccgggtcgacccacgcgtccggcaaaacgagaagtatccaacaatgactaccacccgtgttgctatctgtctttgcttggcatgcctttactacgcggctgaaggagccaaggttagtttcaataacaagtgctcatacacggtatggccaggaaccctaaccggtgaccaaaagccccaattatcaacaactggtttcgagttgggtccaggagcatccaactctgtggaccttccatctccatggtccggtcggttctgggcccgaacaggatgctccaacaacaacggaaggttcagctgcgccaccgccgattgcgcctccggtcaagtcgcatgcaacggtgccggtgcaatcccgccagctactttggtagaaatcacagttgcagcaaacggagggcaagatttctacgacgtgagcaacgtggatggcttcaacgtgcccatgtgcgtaaccccacaaggtggga

SEQ ID NO: 248282 - DNA, 407 bp, Glycine max
aattcccgggtcgaccgacgcgtacgtttagtttcaacatcccatttatcgttgattctagtcaatcagactagaattacgatcaggtatgcaaatcacattctagtgtaacagagtgtggacatcataggtatcactgctttattcaggcacaagtacacaacggtgaacttagtattttccccaagactttcgtgtatctttctcattgtttgcatatgatgccaaagtacaagtctgactgcgctacagttaatgcacatctgaagaaaaattcatggttaccaagaagtaccattaatcctaacacatatattttgaaagatcatgcaactaggtatcggttacgccatctagattagatgcttaatccacatgatcaaaaaatatttaagacccggtctaaa

SEQ ID NO: 248283 - DNA, 426 bp, Glycine max
gtccggaattcccgggtcgaccgacgcgtccgggacaaacaatattggatttgcttttgtctgaaacacagccgaagaagatctgttcccgagttggattgtgtgcttttgatgggactcgtggtgttgatgtggggatcaagagtgttgtggatgagaatgaaagaaaatcatcgggtggtcatcatggtgctgcttgtcctgcgtgtgagatggctgttgtttggatgcagaaccagctgatccgaaatcagacacaagatcagatactaagttacatcaaccagctttgcgataaaatgcctagcccgatgggagaatcagctgttgacttggggaatatctcttcattacctgtagtgtcctttactattggtggaagaacttttgagcttagcccaaaggagtacatacttaaggtgggtg

SEQ ID NO: 248284 - DNA, 491 bp, Glycine max
  unsure (1)..(491): unsure at all n locations
tgctgggtgtggcgacttttcgtnaactaccgcatgcacgtaccggtccggaattcccgggtcgagcgacgcgtccggcgattgtcgattctctactctgcaactatgcctaaccctaaggtcttcttcgacatgaccgtctccggtcaacctggcgggcgcatcgtgatggagctctacgccgacgtgactccgagcaccggcgagaacttccgcgcgctctgcaccggcgagaagggcgcctggcggagcggcaagcccctacactacaaaggctcgtacttccaccgcgtgatcccgaacttcatgtgccagggcggcgacttcaccgtcggaaacagctaccgaagcgagtcgatctacggcgccaaattcggcgaccaagaacttcgtgaattaagcacacttgtcccgggatcctcttcatggcgaacgccggtcccggaaccaacggatctcagttcttcatctgcacgactaagacggaatgg

SEQ ID NO: 248285 - DNA, 449 bp, Glycine max
acctaacctgaattcccgggtagacctacgcgtccgagcagcttgaggatggacgtacacttgcttattacaacattcaaaaggagtccactctgcacttgttactccgtctgcgtgcgtcgaatacaaatctttgttaagaccttgaacctacagacaatcaccctttatgtccagagctctctacaccatcgacaatattcatgctaaaattcaccacatacatggtatcccaccacaccaacaactgcttatatttgcatcaaaacacctagatcatatccttacattacatgattacaatatacacatcgaatctaccctccacttggagctccgtcttaatcatgagctgcaaatatctatcaacaccttgcctcatcagacatttactcttgacatcgccatttctaaccccacttacattgagacatctaatattcaacaca

SEQ ID NO: 248286 - DNA, 528 bp, Glycine max
  unsure (1)..(528): unsure at all n locations
catgactagtgcatcgaaagcatagtactaggcntgcacgtaccggtccggaattcccgggtcgacccacgcgtccgcttgcgatgtgtaatcattttcttttgttttaatgaaggtgtcttgatagagcggctggggtgtctgatgctgagagcaaaagtggtgattattctaaccagtggagactttgcaccgtgacacaagtagaggaattgaaaatcttgattcgaatgtttccagtttgggctactgggattgtttttgctgctgtttatgctcagatgtcaacattgtttgtggaacaaggaacgatgatgaacacaaattttggttccttcaggattcctccagcttccctctcgagttttgatgtgataagtgttattttctgggtccctgtctatgacaggattattgttcccattgcaaggaaatttacaggcaaggagaggggcttttcagagttgcaaagaatgggaattggcctttttatttcagtcctgtgcatgtcagcagctgctatagtgg

SEQ ID NO: 248287 - DNA, 530 bp, Glycine max
  unsure (1)..(530): unsure at all n locations
tgggtngtgngaccgtcccgcactgcaatcgcatgcacgtaccggtccggaattcccgggtcgacccacgcgtccggcttcttagagggactttcggaagacaattcagagagttcttagtgtccagtattccggtccggacggtgttcaaatatctccagagtgtcgccaccttatttcaaggatctttgtttttgacccggcagagagaatcaccatgtctgaaatctggaaccatgaatggtttctgaagaatctcccggcagacctgatggacgagaagataatgggcaatcaatttgaagagccagaccaacccatgcagagcatcgatacgatcatgcagataatttcagaagctaccgtaccagcagttgggacctattcttttgaccagtttatggaggaacaaatttatgacttggaatctgaatctgatgctgaatctgatcttgatatagatagcactggggagatagtgtatgccatatagtttgatcttagctacacttgaaagacaacaacatatg

SEQ ID NO: 248288 - DNA, 464 bp, Glycine max
tgaattcccgggtcgacccacgcgtccgcccacgcgtccgctccttcatcttcctcatccacatggaaatctccaacctcctcttgaggaagattctcatcaacgaaatagtcatggacgaaacaaagcctaacacacctcaatacaacaagctcgatcacatgatctcttcagaaatggtcactcttgtggtcttcaaaatcgcatacttcactctgctcctcatattctccctcctctccacctcggcagtggtctacaccatcgcctccatctacaccgcaaaagacgtgacattcaagagggtcatgagtgttgtccctaaagtgtggaagaagctcatgttgacctttctatgggcctttgctgctttcttcggttacaatatcatgactgggctaggtatggtcttggccatagtcacaattgggttaagtagtggtgggcttgcggttttggtttcg

SEQ ID NO: 248289 - DNA, 502 bp, Glycine max
  unsure (1)..(502): unsure at all n locations
tgagggntgtgtgcccatgaatacgacatgcatcgattctcggtccggaattcccgggtcgacccacgcgtccgagctgatgagaataaaaaacatcttgaaaggcaaaggatggaaatgcaagaggacatagatgtacttgttgacctcaacaggaagctgaaaaatcagcgggaacaatttattgtggaaagacgacgctttattgagtttgttgagaaacttcggagttgccagaactgtggggaaatgatctctgaatttgtgctttctgatttacaatcctctgttgacattgagaacttggaagtgccatctctcccaaaattagcagctgatattgtacagggagtttctaatgaaaatttagcttcttcaaggcaaaatactggattgtctcctgcaactgatcccaagtcacctgtttctggtggcactgtctcttggctacgtaaatgcacctctaagatttttaaaatcttcccgattagaaagattgaat

SEQ ID NO: 248290 - DNA, 459 bp, Glycine max
taccgaattccgggtcgacccacgcgtccggttaacaacacttttgtcttcgttccattatctagttctcaattctcttcaccctttgccgctgagtgaaatgtgtagtcttgaagcggaaagaacaacagtatgattggcatcatgagacccttcatggattctctgcccatacacttacgatctaagatacacatgccctgatgatgtttacattaaagttcactactgaggaatatgccattctgatctccatcagattaaaaatgatcttgtcatgtccaactatcccatggtcccaggacatgaagtggtcggtgaggtactggaggtgggatcaaacgttagcaggttcagagtgggagagttggtgggagttggactcctcgtaggttgctgcaaaaactgccagtcatgccaacaagacattgagaattactgcatcaagaagatctggtc

SEQ ID NO: 248291 - DNA, 482 bp, Glycine max
  unsure (1)..(482): unsure at all n locations
tgaatgggtnnngcgtatcgagactgattgcatgacctaccggtccggaattcccgggtcgacccacgcgtccggtttttcttcacagaagcaccttctagcatgaggtctttggccacatcactctcttgggccgctttggctgtagggtattaccttagttcagcaattgtgtcaattgtaaatagtgtcactggcaacacctcacatagaccatggctctctgggacaaaccttaaccactaccacctagagaggttttactggctcatgtgtgtgctgagtgcgttgaatttcttgcattacttgttttgggctatcagatacaagtatagagggacaggaactacaaacaactgaaaatgaagaaaaattacccaaagggaagttttcaaaatgggatatagataaagccttatgtttaattaccaagggcattaatcaaaatatatattttcgagccataatattatgcttcggtg

SEQ ID NO: 248292 - DNA, 505 bp, Glycine max
  unsure (1)..(505): unsure at all n locations
gtaggggnnnncccccatgaccttgactctcatcgcatgacttaccggtccggaattcccgggtcgacccacgcgtccgcggatattgcctatgtttcatttcttgaaaggttccaaattgtcttctctgaaatttttgagcacgacatcacagcaggaagacccaaactagccacatggattcaggaggggaataagatcgatggttataagcagacaaaagttgacagggaggaatatctggaagctttcaagaaaaagtttttggcttgggcctgatgagtggcagtgggctggcttgttgctgtgggctggcttgctgttgtgggctacttttctgatagaatgctttttcagtttaaaaatgatgtgttctatttgcttgttactttgacttctcattaatgcttttgtatgggaacatccaaatgtatagtcccgcaatctataataaataagttgaagacaagtttgacttggaaatggtgaaaaaaaaaaaaaaaaa

SEQ ID NO: 248293 - DNA, 526 bp, Glycine max
  unsure (1)..(526): unsure at all n locations
atgtnntgacctcgaatagcaggtaattgtatgacctaccggtccggaattcccgggtcgacccacgcgtccgcccacgcgtccgcccacgcgtccgaagtttatgtatcttgcattcctacttctattgggtttgtctagccaattcttgcttggaggagcagatgcttcccccagacaagtgattgacacagaaggcaagaaagttcgagctggcgtagattactatatccgaccggtcccaacaaccccatgtgatgggcgtgggccgtgtgtggttggaagtggctatgttctcatagcaaggtcatccaaccacacttgccctcttagtgttgcggtggtggaaggtttccgtggcctagcagtcacattcaaactagttaaccctaaaaaaggggtcattagggtttctactgacttgaacatcaaaaccttcctaactaacacaagttgtagtgagtccacggtctggaagctagatgcctttgatgattcaactggacagtggtttgtgaccactggt

SEQ ID NO: 248294 - DNA, 565 bp, Glycine max
  unsure (1)..(565): unsure at all n locations
cgtgcgctgtgncaggaccctaccgactgccgtaccggtccggaattcccgggtcgacccacgcgtccgcccgggcgtgcgactacgcgtccgattttttgactttcttgggcagatcacagactcgggcaggagatactctaaactgcgaaaaaaccactgcgatcaatggcaacgatcaagggcgacaaagctcggcagatcttcgacagccgaggaaatccaaccgtggacgttgacggtactctcatcgatggaagtcttacacagagacagcagtgcgctagcggagcgttaacaggtgtgatatgaggcttcggaattaatggatcgacgctcatactacgctcggaaaggtgctctcaatgctgaggagaatgtgtattcaatcatagtacctgctctgactggcaaggacccatcgaagcacactgacattgacaatattcatgggctacaacttcgatggacttgtaattcaatgagggtggtgcatgcctcaacctttgaaccaacgctagtggtagcagtggcaacttgaatgtatgcaagggttgtggtatac

SEQ ID NO: 248295 - DNA, 552 bp, Glycine max
  unsure (1)..(552): unsure at all n locations
ngcgcgtgctagtcctagctcatgattgcacgctcgtaccgctccggaattcccgggtcgacccacgcgtccgctacactcattgcaacgaattgctaacgtcccacacgctacagagaagatacgacagagtgagagagaaagaagcacaacaaggatgtcttcgtcgtcatcgtcgtcgtcgtcgtcggaagatgaatctatgtcggaacagagcaatgaattaggacttgatttcatcttgagcttggacaatgttccatcaaagctccctccacacctcgaactctttaaaacacgtgttctttgcaacaacgatgctcctgtgcacactgatactgttcaatattccggtgcctatgctattatgggagttgataatagtgtgcggttggatagcttctgtgaaaactttaaggttgaagtgaagcggctgacggatagcgatattgaatttgatatgattggaatcgatccccgcattgccaatgcatttcgaagaatcctatagccagaggttcaacaatggctattgaaagagtatatatcgca

SEQ ID NO: 248296 - DNA, 471 bp, Glycine max
  unsure (1)..(471): unsure at all n locations
cggaattcccgggtcgacccacgcgtccgcccacgcgtccggggggcgcgggttttagacgggagtgcgaatgcgatgatgaagggagagggaagcgaagacgatcgtccatggcaatcttaccacactgtttacacaaccgccaaagcaggaatggaattggttgacaaggagaaagttcaaagggtagtttatgaaatgagcaaaggatccaaatattttcaaaacgaggaacgcaaggaagcttttattaagcagaaaattgataacctgcgaattcagtgtgcaaacctcacacaagaagacttggcccattatcaaaaggttgctgatagaagaattgttgagctggaagcttcgcgtgacctttcaaggatttggttacatgtagatatggatgctttctatgctgcagttgagactttaagtaaccctacattaaagggcangccaatggcttgtgggagcatg

SEQ ID NO: 248297 - DNA, 552 bp, Glycine max
  unsure (1)..(552): unsure at all n locations
atgcgtgtnaatgagttctagctcgactcagnactgtcagtaccggttcggaattcccggctcgacccacgcgtccgaagaaattcaactctctccaaacatgcctctgatagacacagaaaactttccatggcggggctttaataagatcttctttgaccatcttgtgcaagagatgaaaactttggagttaggagagtggtggctttgcaacactacttatgatcttgagcctggagcattttccgtatcaccaaagttcctacccattggcccattgatggaaagtgacaacagcaaaagtgcattttgggaagaagatacaacttgcttagagtggttagatcaacaaccacctcaatctgtcatatatgtttcctttggcagtttggcagtaatggatccaaaccaatttaaagaattagctcttgcacttgatctccttgacaagcctttcatttgggttgtacgtccatgtaatgacaacaaggaaaatgttaatgcatacgcacatgatttccatggaaagcaaggtaaaatagttggtttggc

SEQ ID NO: 248298 - DNA, 470 bp, Glycine max
ggtcctgaattcccgggtcgacccacgcgtacgctttctctctctaaagttgaagctccgtcactgcaacaaaacaagcactcaaagtgcgtcgggttcgtcactgatcacgtttcggcaatgcaccgtgtgggtagtgcgagtaacggaaacaattcaactcgcccgcgcaaggagaagagaataacctacgtgttgaatgattctgatgacacaaagcattgtgcaggcataaattgtctggctctacttacatctgcagcatctgatgggtctgattatctcttcactgggagccgtgatggtaggttaaaacgatgggcactagatgtgaatagagcaacatcatcggctacctttgaatctcatgtcgattgggttaatgatgctgctcttgttggtgatagcacacttggttcttgttcttcagatacaacccttaagacatggaatgcccttgtctttggaac

SEQ ID NO: 248299 - DNA, 574 bp, Glycine max
  unsure (1)..(574): unsure at all n locations
cgatggccnctgtcgctgagtccaatactcatcgccatgacgtaccggtccggaattcccgggtcgacccacgcgtccggtgagatgggtatgtcatggctgtgctgctgagaatggctcagcctcacaatggcagcaccagcaacacttcaaaccagcaattggtactccatgactttctgggtatgaggcccgccgccgattcccccaaaaccgccgatgtcaggttaccggagccttcggcctccgcctcttccaccggaggacgcggccccttctccgccacctccgacatcgcttccgaaaaacaggtacgaaatcatctcgagggagtttcattctatggcccgaggagtgatttttctggcactgagataagcaacagattagtgtgaagcaagagatgtaattctgattccacttttatgggttcctccagagatgccttccaattggtccctgattcctttcaagactcacatttgatgaaggttctccggaatgcagctggaggagaaagggctataagcccaatgatgatgcagtgttacttggtatgcagtcaatgaagcct

SEQ ID NO: 248300 - DNA, 495 bp, Glycine max
gaattcccgggtcgacccacgcgtccgcgagtttagagaaacaagtgccgttcttcaggttaaagagtcagagcttgttgatgctgggctagagatccatcgtttgaaatctgaaaaggcttctcttcagggtatcttggaggagaaagacttggagctttccagtgctaggaaaatgctgggggatgttaaccaggaaatctatgatcttaagatgcttatgcacagtaaagaaacccagctcattgaagcaaacagtatgctaagggacaaagatgagcatgtgaaggtaatccagaacaagttgaataatacaaaccagaaggcttttgaggctgaaactgtggtagaaagaattttagatctcacaaacagacttgttgcttccattaaggatgaagatatgaactcatcaaaaccactactagatgaaatgggtaaccaactacttgatcaactattggagaaaccttgttatgaattgaaatgccaaca

SEQ ID NO: 248301 - DNA, 451 bp, Glycine max
  unsure (1)..(451): unsure at all n locations
gaattcccgggtcgacccacgcgtccgcagcaagctaggctcttccctttgttagcttctgcctatgccttcagatttgttggtgagtggttgaaatggctttatatggatgtgatgaaaagattgcaagccagtgatttttcaaccttacctgaggctcatgcgtgcactgcagggttgaagtccttgactacttcagcaactgctgatggaattgaggaatgccgcaaactatgtggtggccatggttacctttgcagcagtggtctccctgagttatttgcagtctacattcctacctgcacatatgaaggagacaacactgtgctgcttttacaggtggctaggcatctcatcaagactatttctcagttgggctccagaaacaagcctgttggtacaacatcttacattggacgagtggaacagcttatgcaatatcngtctgatg

SEQ ID NO: 248302 - DNA, 461 bp, Glycine max
accggttcggaattcccgggtggacccacgcgtccggcttattctctcgcattccgtggagatctagtgcttctgctgcaagacctggctgaaaggtagggtttcgattcggaggtagacgaagatgttcggaagggctccgaagaaaagcgacagcaccaggtactacgaaatcctcggcgtttccaagaacgcttcgccggatgacttaaagaaggcttacaagaaagccgccattaagaaccatcctgacaaaggcggggatcccgagaagtttaaagagcttgctcaagcctatgaggttctgagtgaccctgagaagcgcgagatttatgatacatatggagaagatgctcttaaggaaagaatgggtggtggtggcggtggccatgatccatttgatatcttcagttcattctttggtggaagtccgtttgggtcaagtggtagcagtagaggac

SEQ ID NO: 248303 - DNA, 447 bp, Glycine max
accggtctcggaattcccggctggacccacgcgtccgcattctctctgtgtatttccctacctctcccttcaagatgcagatcttcgtcaggacccgcaccggcaagaccatcacccttgaggtggaaagctctgacaccatcgacaacgtcaaggccaagatccaggacaaggaaggaatccccccggaccagcaacgtctcattttcgccggaaagcaacttgaggacggccgtacccttgctgactacaacattcagaaggagagtactcttcacctcgtcctccgtctccgtggtggcatgcagatcttcgttaagacactcaccggcaagaccataaccctagaggttgaaagctccgacaccatcgataacgtcaaggccaagatccaggacaaggagggtatccccccggaccagcaacgtctcatcttcggcggaaagc

SEQ ID NO: 248304 - DNA, 267 bp, Glycine max
cccggctcgacccactcgtccgaaaaaaaaaaaaaaaaaaaaacttaaaaaattataaaaaaaaaaaaaaaaaaaaacgcaaaaattgcaaaaataataactcacatatcctaacacctaaatacaatcaatctcaactaataaatacaacttcaaatccttacaaaaccctctctctacccaacttaatctccttccatcacattctcctttcttcttctaaccctcatatctataaaccccacacctatcacccttcctcccatt

SEQ ID NO: 248305 - DNA, 352 bp, Glycine max
  unsure (1)..(352): unsure at all n locations
cggtccttaattccggnggcgacccacgcgtactcttgcgtatgtacctcacattgtgttcatatctttacgtcgactcctaaccacccagaacaggatccattcgttctgcaccatattcaaaaagttattaagccaaatcgatatataccgttacgagactatccaactgcagaccttcctcatgaaaggttctataacaactaacaaacgatcagtcataacttttatcacagaagttatggaactcttgcttactatacatcaactgagacctcgacatatatattcaaacaacttacttactatgttcacacacatcatgtatactgcaaacaagttgataaccctt

SEQ ID NO: 248306 - DNA, 415 bp, Glycine max
ccggtcctaattcccggtcgacgacgcgtccggttctcaggtccatggatctcttgcgacaccacgtttctcccatcacttcgtagatgtctgtgtagccttttatcttctgaactatgtaccttctgttgctcatcataaatatgaggcttagtggtacttctttgtacagcttcgcttttccttcaagatttgtgtccagaagctccattaccctcattaactgcgccgcataagatgttcctctcactgtatcttagacaaaatttaagcaatttaaggccgagatgccattttccacgcctacattaaggcattggtggaaaatccagactatacaaaaacctatgcccaaagttggaagaatgagctggagttcaaaatccaacttctctcggtgagttttcattccaag

SEQ ID NO: 248307 - DNA, 579 bp, Glycine max
  unsure (1)..(579): unsure at all n locations
tgcgctgtgctgtctactaggatcgatagcagtagcactgtcgtactcggtcctgaattcccgggtcgacccacgcgtccgcccacgcgtacgtgttgttgtaactcgttcttcttcttctgttgctctgtgtctgagtttggggtctctctcacctgaaaatgtcttgctgcggtggtaactgtggttgctgaagctcctgcaagtgcggcaacggctgctgaggctgcaagatgtacccagacttgagctacactgagtcaaccaccaccgagacctcggacatggtagtggcacctgttaaggctcaatttgagggtactgaaatggatttgccagttaaaaccgatgcctgcaaatgtggaccaaactgctcctgcaacccttgcacttgcaagtgaggtagttggaagagcaagcttcaagcagagatagcccttaattaggaataatgataaactattaatgtgtaccttatatcttatgtattatgttctggatagttttcgtgcactctagtgttttgattttaacaaacattcttatataaagtgttaattttttgacatttagtagttn

SEQ ID NO: 248308 - DNA, 571 bp, Glycine max
  unsure (1)..(571): unsure at all n locations
atgccgctgncactgagtcaggccccctangcactgacttaccggtcctgaattcccgggtcgacccacgcgtccggctgcaaccaatgtcatctttggccttgctctgggatacaagtctgtcattattcctatttgggccatcgcaatcagcatttttgtgagttttacttttgctgcaatgtatggcattgctgtggctgcccttgggatgctgagcaccattgcgacagggttggctattgatgcctatgggccaatcagtgacaatgcaggaggtattgctgagatggcaggcatgagccatcgtattcgtgagagaactgatgcccttgatgctgctggcaacactactgctgccataggcaaaggatttgctaatgggtctgctgcttttgtgtctttggccctaattggtgcatttgggaaccgaacttgaattttgacttgtgatgtcttgacttccaaagtctttattggactcataggtggtgccatgctttcttactggttttctgccatgaccatgaagaagtgtggaagtgcagctttgaagatggttgangaggtn

SEQ ID NO: 248309 - DNA, 449 bp, Glycine max
  unsure (1)..(449): unsure at all n locations
accgccccggaattcccgggccgacccacgcgtccgggcgaggtaaaatgtgctcaagttctcctcgaggctggagcaaaagtggatgctttggagaagaataagaacactgctctccattatgcagctggttatggcagaaaggaatgtgtggcccttctccttgaaaatggtgctgcagttactctccagaatatggatggtaaaactccaatcgatgttgcgaagctaaacaatcaaaatgaagtcctaaagctacttgagaaagatgcttttctgtagttgtaatgcatgatgccatgctgtcaccaacaagcaaagggggaaactgaggggaagaaggcatggtgacttcgttattttctcttttggtttcttccagccatttagtgtgttaaactaaattgattagcgttgttggatgagttaccatagaatttgntatctat

SEQ ID NO: 248310 - DNA, 476 bp, Glycine max
ggaattcccgggtcgacccacgcgtccggattttttttcctttttttttgtgctgtttatttatcctcagagcggtggatagggatttttcactctgcagcgttccgttccattgtgatttgttgaagtttctgatggagcagcgaaagcttgtggttttggggattccgtgggatatcgatactgagggattgagggaatatatgagcaagtttggtgagctggaagattgcattgtcatgaaggagcggtcaactggacggtctcgtggttttggatatgttacatttgcttcagtggatgatgctaaggaagtactatcaagtgagcatattcttggtaataggacgctggaagtcaaagtggcaacaccaaaggaagaaatgagggcaccggtcaaaaaagttactagaatatttgtagccaggattccacaatcagtaacagaagctactttcagaagtcattttgagaaa

SEQ ID NO: 248311 - DNA, 369 bp, Glycine max
ggaatttccgggtcgacccacgcgtccggtctgtcgctgcgagtgcagcaacttgatgttcgatgtgagacgaaaaccaaggacaatgtctttggcaatgtggttgcatctgtgcaataccgagctgtgtctgagaaagcatctgatgcattctataggcttaccaacactagggagcagatccaatcatatgtttttgatgtcatcagggccagtgtaccaaagttggagttggattctgtctttgagcagaaaaatgatatagcaaaggctgtggaggaggagcttgagaaggccatgtcaacctatggatttgagatagttcatactctcattgatgatatagagcctgatggtaatgtcaagaga

SEQ ID NO: 248312 - DNA, 555 bp, Glycine max
  unsure (1)..(555): unsure at all n locations
agcgcgtntatncctgatagccttctgctcatcgacctgcccgtaccggtccggaattcccgggtcgacccacgcgtccgctctcgccgtctaggtttttctctcaaaatttcgaaaccccgattttctctcggttcgagtctgcgattcatcgtaacctaaattattagatagttatattatctctctgcgtttctttcagcaattttctattttctcctctcatggcttcagattccaaaaaggatttccctgctgatgacaaagctggaacagaagagagtaaaacatccaaagatgagacttcatctaaagattctccagcagaacaaagagcgacagctacttttggacctagacctggacctgctgggcatccaggcaacccttttgatctctcagcaatgtctggtctgctcaatgatccaagtatcaaggaattggctgaacagatagcaaaagatccatcgttcaatcagatggctgagcagcttcagaaaacttttcaaggagctncacaagatgctaatcctagcttcgataatcaacaatatn

SEQ ID NO: 248313 - DNA, 431 bp, Glycine max
cggttcggaattcccgggtggacccacgcgtccgatcatcgaataaaactagggtttccgatcgtcgtcgaggagaatgccgaagagcaaggggaagggaggaaagaaccggaagcgcgggaagaacgaggcggacgacgagaagcgggagcttgtgttcaaggaggacggtcaggagtacgcgcaggtgctccggatgctggggaacggccgctgcgaggcgatgtgcatcgacggcaccaagcgcctctgccacatccgcggcaagatgcacaagaaggtctggatcgccgccggcgacatcatcctcgtcggcctccgcgactaccaggacgacaaggccgacgtcatcctcaagtacatgcccgacgaggccaggctcctcaaggcctacggcgagcttcctgacagcaccaggcttaacgagggca

SEQ ID NO: 248314 - DNA, 181 bp, Glycine max
actcggtctttaattacgcgggtcgacccacgcgtacgcggactcgtgggctgacgcttgggcttacgctttggcggacacgtgggaaaaaaaagaaaaagtaaaaaaaaaaggaaaaaaaaaaaaaaaaatataaaaaaaataaaaaaaaaaaaataaaaaaaaaaaataaaaaaaataa

SEQ ID NO: 248315 - DNA, 461 bp, Glycine max
ccggtccggaattcccgggcaaagttttcaatcacccaataagaatgcattgttgatgacatccttaccacaagactcacagtttcagcaacgaatagaccagcaagctagtctcttacagaggcagcagcagcagcagacacagttgcaatcatctccgttgcagttattgcaacaaagcttgtcacagagggcatcacagcaaccacaaatgactcaaatgtgtcagcaaaacagctcagagcaacaaccacagttgcagttgctacaaaaattgcagcaacagcagcagcagcagcaacaacaacaacagcaacaactgctttccacttctagcccacttttgcagtctcagcttctacatcaacaaaatactcatcaacaaaaccagcaattgccgcaacttgctctatcacaaggtcatcagccttaacaagctggaaacaatgctttctcaatgg

SEQ ID NO: 248316 - DNA, 549 bp, Glycine max
  unsure (1)..(549): unsure at all n locations
gcggctattaactgagaacttancgacngtcgtaccggcccggaattcccgggtcgacccacgcgtccggggggaggcttaattatggtcggtgaaggcatcaatgatgccccagcactagctgctgcgactgttgggatagttcttgctcaccgagctagtgcaactgccatcgctgttgcagatgtattgttgcttagagaaagcatttctgcagtgccattttgtattgccaagtctcgccgaacaacttcactgattaaacaaaatgtggctttagcattgacgtccattctcatggcttcccttccatcagttttgggatttctgccattgtggttaacggttcttttacatgaaggtggaaccctgcttgtctgtctcaattccgtacgtgctctgaatgaaccatcttggtcctggaagcatgatatattccatttgattagcgagattaaatctagactcctgtctctcaagacaaatatcacgggctcaaacagtatcataacgacgaatttgtaacgtaatggtggaatgcatggattg

SEQ ID NO: 248317 - DNA, 554 bp, Glycine max
  unsure (1)..(554): unsure at all n locations
cggacgtgcgtgctccaggggaacttcgncgnatcgtatccgctccggaatttccgggtcgacccacgcgtccggcgagcagtttcagacacagagagaggggtttgggattggagggattgacgctgcgtcggttcctgttctctttcgatccatccctcattcctaatcctccaatccaaccacctcagcctcacactcacatatacacatatctgaacgcgtatcgtccctcctatggcttcaaagcgcatcctcaaggagctcaaggacttgcagaaagacccaccaacttcttgcagcgctggtccagtagctgaggacatgttccattggcaagcaacaataatgggtcctgctgatagtccttatgctggaggtgtattcctagtcactattcacttccctccggattatcctttcaagcctcctaaggttgcctttaggactaaggtgtttcacccgaacatcaatagcaatggtagcatttgtcttgatatcctgaangagcaatggagccctgcactcaccatctctaaagtactgtttctaac

SEQ ID NO: 248318 - DNA, 552 bp, Glycine max
gtggtccttctgtcgtaatacgtctctctttcgactgccgtaccggtccggaattcccgggtcgacccacgcgtccgcgggggaagagatccagcagcaatggtgtacgtcaaggctcagaaatcaaaaggctactggaagagatatcaagtcaagttcaagagaagaagagagggaaaaaccgattaccgtgccaggattcggttgattaatcaggacaagaacaaatataacactccgaaataccgatttgtggttcgctttagcaacaaggacattgttgcacaaataatatctgctagcattgccggcgatttagttcttgctacagcatattcacatgagctgccacgatatggtcttgaagtatgacttacaaattatgcagcagcttattgcactggtctcctgttggcccgaaaagtcctcaaaacacttgaaatggattaagagtatgaaggaaatgttgaggctactggagaggattattcagtggaaccctgccagagcaggaggccatttcgtgcacttcttgatgttggtcttgttagg

SEQ ID NO: 248319 - DNA, 499 bp, Glycine max
ccggttcggaattcccggctggacccacgcgtccgacggattagcatcaaagcaagttaacaaaatttgggtgcgtcctggattgacccttttggcccctctccctcaccctccactaactcctcctttttggtttttataaagcacattcccaatagaggagggtccctacacaacacaacccttcaatgacgtccatggccactttcttcgcccaaacctccttcccctcccactctctctccaaaaccttcgatacccatttcgcccctgccccgaaagtcaacgtctttgtgaacttcagggcgaggaggcacgttggggtgcgagtttcgaacgcgctgatcgaaccagatggagggaagctcgtggagcttgtggtgacggattttgagagggatttgaagaagggtgaagctctttcgttgccgaggatcaagctctcaaggattgacctttgagtggtccatgtcctcagcgaaggattggccacacccct

SEQ ID NO: 248320 - DNA, 576 bp, Glycine max
  unsure (1)..(576): unsure at all n locations
gtccgcnnnnttccctgaatcagcctctcgatcgcacgacttaccggtccggaattcccgggtcgacccacgcgtccgcacacacacagctagcagatattacatacacgtgaatcactaattaagccatggagaagaaagcaatagctgggttgtgcttcctcttccttgttctctttgttgctcaagaagttgtggtgcaaactgaggcaaagacttgcgagaacctggctgatacatacaggggtccatgcttcaccactggcagctgcgatgatcactgcaagaacaaagagcacttgctcagaggcagatgcagggacgattttcgctgttggtgcaccaaaaactgttaaatggatccattcactccaacgtgaagaagatgcatgcagcgctattttataaaaaataaaactactatatactatatataataagactggcgctgcatcaatgacctatgtattatagtatatattattaccgatgtcagaactatagatgcatgtactgtgcataacggctgagttatgtacttatgttaagaataaaataaagtgcttgttgtgcaan

SEQ ID NO: 248321 - DNA, 474 bp, Glycine max
ccggtcctgaattcccggggcgacccacgcgtccgcttttctccatggatggataatgggtcaaagccaagttggtgttccttcaatgcttcctcacgtgggtgctagtcgtgacaatctatcccaacagattggttcttcttcttacataatggcatctaatcattccacttctaatgttgatgcagcgatgccatcttcagcaatacctgtcagcatcagcataccgggttcttcaatgagatcaggtttacggaatcacttttcacaatcccgtgtacctgtatctgaatctggcaatcttgctgcttctattaataccccacatgatggatttgatatgcaaaccatcgtaagtcgaattcagtcagaacttgccacatcagtggctgcaacagctgcagagttgccttgcactgtgaagttaaaagtgtggtcacatgacataaaaaatccctgttccccacttaatgc

SEQ ID NO: 248322 - DNA, 551 bp, Glycine max
  unsure (1)..(551): unsure at all n locations
gcgcgtcgtgtgctgagagcgtacgactgtcgtaccggcccggaattcccgggtcgacccacgcgtccgcttgcttacaaaagtttgttttcaaagtgtgttttgtttcccaaatcctactcttgtgggacaacccttcctcctctttcttttgaaacctctttttttctattccccaaccaaacaagcaaacgctactcactcatcatcactgagatcatggctcctaatatcaccactgtcaaaaccaccatcaccgacgctcaagccaaggtcgccaccgatcatggtcgtgcctacgtcaccttcctcgccggaaacggtgactatgtgaaaggtgtcgttggcttggcaaaaggtctgagaaaagtgaagagcatgtaccctctggtggatgcagtgctacccgatgttccccaagatcaccgcaacattctcacctgccaaagttgcattgttagagagattgagcccgtgtacccnccaaagaatcaaacccagtttggcatgggatattacgggatcaactattcccagctacctatttgggn

SEQ ID NO: 248323 - DNA, 552 bp, Glycine max
  unsure (1)..(552): unsure at all n locations
cggtattgtctctgatactcgtcgacngtcgaaccgctccggaattcccgggtcgacccacgcgtccggtgcctttaaagggttgaggattaaggtgaagaacccttctcttaggaggttggttagcggtgcctttgctggggcggtttcacggaccactgtggcgcccttggagacgataaggactcatttgatggtggggggtagtggcaattccactggggaggtgttcaggaatatcatgaagactgatgggtggaagggcttgtttaggggtaatttcgttaatgtgattcgggtttgttctggcaaggccattgagctatttgcttatgatactgttaacaagaacctcttgtcaaagccaagggagcagcccaaacttcctatttcagcatcattgatagcaagtgcttgtgctggagtttgtacaactttatgcacttatcccttataggtactaaagactttgcttacttttcataggggtggttaatgatggtcttgtgaatgcatttctgaataattgtttacagatggaagtgcctgttn

SEQ ID NO: 248324 - DNA, 459 bp, Glycine max
cggaattcccgggtcgacccacgcgtccgctcacgcgttcgatcctgtgccatcgaaggctgaataagtgacctgcgtcgcaggcactgttcatggccatgtctcgggttgataacagaaattcctcagccaccaagcgtgctaggactgatggtagtcgtagggaagatgattggacatgccccagctgtggcaatgtcaatttctctttcaggacaacttgtaacatgcgtaattgcactcaaccaaggccggctgatcataattcggtatgatattatatgtaatgtcattttttttttaaaatgtgattttcatttcgttaatgatttatggttaacatttatttgatgatttctttttatcaatttctctctttttgcttgtgattcttattgggctttcttttattttcctattttacggtcactcgagttccatgaagttttttacccaatt

SEQ ID NO: 248325 - DNA, 562 bp, Glycine max
cgtgctatcactttgactacgttgcatcttcggacgccgtaccggtctggaatgtccgggtcgacccacgcgtccgcttcaacaaacgccacaatggccgtcacgaaaagcctctccatcttcctcttggtcgccataagctgcgtggccgtagctcaggcagcgaacttcaacatcacaaacaattgcacctacacggtgtgggccgccgccgtgcccggtttctgctcatggcttaaccctggcgaatcgtggaacatcatctttacgaacggtactacaggaggacgcttctgtggtcgaacaaactgcacctttgacaacgcatgactcgttaagtgcctcaccggctgactgcgatagttttcttggtagcatcaatacaagttcacgttcgaacacgttcgtggtattcttgtttaaccgttacgactatccttgtactttaccatcttctaaatagtagaacgtaattaaacttatctttcattagattccttacctattatctgattttcctttaaatgcttgtcaccatcattctattgatagttaatctatg

SEQ ID NO: 248326 - DNA, 408 bp, Glycine max
tccggttcggaattcccgggtggacccacgcgtccgggtaaatgagtggtttttgagcagaagcagttaaaagagaaagggattcagcgaagatggcatccgttggtgtggcaccaacttcgggtttgagagaagccagtgggcatggagcagcaggtgttgatagattgccagaggagatgaacgatatgaaaattagggatgatagagaaatggaagccacagttgttgatggcaatggaacggagacaggacatatcattgtgactaccattgggggtagaaatggtcagcccaagcagactataagctacatggcatagcgtgttagatggcatggatcatttggagttgacttccaggctaagtgcttggaaactggggaaactgtggctattaaaaaggttc

SEQ ID NO: 248327 - DNA, 508 bp, Glycine max
cggtcctgaattcccggggcgacccacgcgtccgagcgtagttctgacgagcagataaatgtggaatacaatgcttcctacgtgtaccacgccttggttgcatactttgacagggacaacgtggctctcaagggatttgccaagttcttcaaggaatctagtgaggaagaaagagagcacgctgaaaagctcatgaaatatcagaacactcgcgggggaagagttgtacttcaccccatcaagaatgtcccctcagaatttgagcatgtggaaaagggggatgcattgtatgcaatggaattagctttgtctttggagaagttagtgaatgagaaacttctgaatgtgcacagtgtggcagatcgcaacaatgacccttaaatggccgacttcattgaaagcgagtttttgtctgaacaggttgaatcaatgaagaaaatttcagagtatgtggctcaattgagaaaggttggaaagggtcactgtgtttggcactttgatcaaagac

SEQ ID NO: 248328 - DNA, 581 bp, Glycine max
  unsure (1)..(581): unsure at all n locations
tgggaggccgcttgggcctaggntcctactcgtagcactgtcctaccggtccggaattcccggggcgacccacgcgtccgcaactctgatctgaggaaattggccgtgaatctcattcccttccctcgtctgcactgcttcagggttggatttgcgcctctcacctctcgcggctctcagcaataccgcgcattgacagtgccagagctgacacagcaaatgtgggatgccaagaacatgatgtgtgctgcagatccaaggcacgggcgttacctcacggcatcagccatgttccgtggcaagatgagcaccaaggaggtggacgagcagatgataaacgtgcagaacaagaactcttcatattttgtcgagtggattcccaacaatgtcaagtcgagcgtgtgtgacattgctcctagagggctctccatggcgtccacattcattggaaactcgacctcgattcatgagaatttcatgaaggtgagtgagcagttcacggtcatgtttatgatggaaggttttttttgattggtacacccggggaaggcatggacgataatggatttcacacaagcctn

SEQ ID NO: 248329 - DNA, 550 bp, Glycine max
  unsure (1)..(550): unsure at all n locations
agccgtactaatccacnaactaccgactgtctgaccggtccggaattcccgggtcgacccacgcgtccggaattctggttcatttttctttgtctgaatcgaacacacgtgagtatgtctgatcacgaggaccatgcagactacgcagacaatgaatcctttgcaaagcgtaggttcagggataggtccaaggaggcattgtccaaacaagccgttaagttagccaaacaagctgaagagcatgaaaggttcatcaacaaggtgactcatcttttgggggttcttggctttggttggttttgcttcatctttggggcaaggccacaagccgttcccttggtatattgtttgttctatgtggtatttgttcctctccgttggatatattacaggttcaagaaatggcattactatctcctggatttttgctattatgccaatacaatcttcttggtttacctccttttctacccaagcaatgaaaagcttttcctggtttgcttttcatttgctgaggggccattaaccggggctttaattgtttgcgctt

SEQ ID NO: 248330 - DNA, 554 bp, Glycine max
  unsure (1)..(554): unsure at all n locations
tgtcgtgctgatgctaggagcatanagtactgtcgtaccggtccggaattcccgggtcgacccacgcgtccgcccacgcgtccgcccacgcgtccgcccacgcgtccgaagaaagaaatgactgggttggggattggtgtggcaagcatgaaagctggggagcgtgcgttggtgcgtgtgggctgggaattaggatatggagaggaaggaagcttctcttttccaaatgttccacccaaggcagatttagtttatgaagttgagctcattggctttgatgaaacaaaagaagtaagttgccattaaattatggatggctgtggacttggttagatgcttatagcacctgatttcacaggggaaagctcgcagtgatatgactgtggaggaaagaattggtgcagcagaccggagaaagatggatggaaatgctttgtatcaggaagaaaaactagaggaggctatgcaacagccattgcatatatgggagatgacttcatgttccagttgtttgggaaggatagagatatggctcttgcaataaagtatccatt

SEQ ID NO: 248331 - DNA, 553 bp, Glycine max
gctcgtgctgatcccaccaacgtccgactgtctgaccggcccggaattcccgggtcgacccacgcgtccgcccacgcgtccgcacagcacggtggggacgaccatggttagagacgatctatgcatcagggttcccagcttcttccgctgccctatatccctcgacgtcatgaaatcccctgtgagcctctgcaccggcgttacctacgaccgttccagcatccaacgctggctcgacaacgggaacaacacctgtcccgccaccatgcaggttctccaaaccagagatttcgttcccaaccgaaccttacagaggctcatccagatctggtctgactcggtcaccctccgagtggactcgcccgagtcacctaccttcacccagtccgaatcagtcctctccaaggaccaaatcctcgtcgccatctccgagttgcagactcactgcgcgaaccgcttcgactcgctcgccaaaatcgcgcgtttcgcgcaagattccgaggaagacctcgattttctcgttagaacggaatgctttgtgccggcgcttgtt

SEQ ID NO: 248332 - DNA, 447 bp, Glycine max
ggaattcccgggtcgacccacgcgtccgcccgcaaaatgataggaaagaaattcttatgcgttgttgtagcggtggcctttgttatgataacagaggtgccccaaaatgtgagtgctcaaaactgtggttgtgctgaagggttatgttgcagccaacatgggtattgtggtaacggtgaggagtactgcggtacagggtgcaagcagggtccttgttattcgagcacaccaagtactaacaatgttaatgtggctgacattgtcacaccacaattcttcagtggcataattgatcaggctgactctggctgtgctggcaagaacttttactcacgagatgcttttcttaatgctctcaattcctataatgactctggtagacttggttcccaggatgactactagcgcgagattgcagctgctttttgccatttcacacatgaaact

SEQ ID NO: 248333 - DNA, 556 bp, Glycine max
  unsure (1)..(556): unsure at all n locations
cgaggtacttgaggcagcnactcatagaacctgccgtaccggtccggaattcccgggtcgacccacgcgtccggagtttagttcataatagtagttggatcttctgcataatcatattcaatatgattttctgaagaggcaacaccgccatgtctgccatattgctgcttcttggaatattatcttccactggagtagaatttacgggggcacaatctgttggtgtgtgttatggaggaaatggaaacaatctaccaacaaagcaagcagtggtggatctttacaaatcaaacagaataggcaaaatccgtttatactatccagacgaaggagtccttcaagccctcagaggttcaaacatagaggtgatcctcggtgtccctaatgaccaacttcaatctctcaccaacgctggagctgccacaaattgngtcaacaagtacgtgaaagcatactcacaaaacgtgaaattcaagtacattgcagttggtaacgaaattcaccctggtgactctttagcagggtctgtacttncagcacttgaaaacattcagaa

SEQ ID NO: 248334 - DNA, 383 bp, Glycine max
ccggccgaattcccggtcgacccacgcgtccgaacaatggcttctgtgcctcatccaaaaatctcccttctaaccttattcttggtctctggcttcaccatcattgcgcatgcaattgttcctcaaaacgaaaccttcaaatttgagaactcatgtgaacttggaccctacatcgttgagtacggtgcagattacagaatgataagcatcttcaactctccattccaagttggtttctacaacaccaccccaaatgccttgactctagctttgcgtgtatggctccaacgctcggagcagctatttcgttgggttttgggaggccaacagggccaacccagttggagaaaatgccactttttcacttggcactgattggaacc

SEQ ID NO: 248335 - DNA, 621 bp, Glycine max
  unsure (1)..(621): unsure at all n locations
agtccgactactagaatccaattaacangtcacgatctaccggtcctgaattcccgggtcgacccacgcgtacggatttgtcgtacaggatggtcttaatgtcgtatctttattccttgtctataaaattggatatgtattcaaaaaaaaaaaaaaaaaaaaaaaaaaaaaaaaaaaaaaaaaaaaaaaaaaaaaaaaaaaaaaaaaaaaaaaaaaaaaaaaaaaaaaaaaaaaaaaaaaaaaatatatagacaaataacaaaaaagacaaaaataaattaaaaaacaaacaaaaacaaaatactcaaaacatataacattttctaagtattatctaaatgaaatataactaacaatcacctacaaatacatcttaattatattaaactttaacaaacttaaaactttaaacatagccctttgactacattacacatcataacctttaaaaaaaaaataaattcaatgtatcaatcaccaagagtaaatttaaccttatatgaccttatataaaaaccacaattcacaaaaaaaaatagaatatttgaataaataacaataaaatcnaaactctaaaaaggcaattatatttatatggacattataaaaaaaccaaatttg

SEQ ID NO: 248336 - DNA, 444 bp, Glycine max
ggaatttccgggtcgacccacgcgtccgcggacgcgtgggttccaaatcatttttacatagggacatcaagccagacaacttcctaatgggttgggggaggcgtgcaaatcaagtttatgccattgactttggtcttgctaagaagtacagagacacctctacccatcaacatattccttacagagagaataagaatttgactggaactgctagatatgctagtatgaatactcatcttggaattgagcaaagccgtaaggacgacttagaatcacttggatttgttcttatgtattttttgagaagaagtctcccgtggcacggattgaaagcaggtactaagaagcaaaagtatgagaaaatcagtgagaagaaagtttctacttctatcgagtctctgtgccgtggctacccctcagagttcgctttatactttcattact

SEQ ID NO: 248337 - DNA, 236 bp, Glycine max
aatttccgggtcgacccacgcgtccattcacgcgttcgattcttgcataattgatatggagacatgataatggatgactcaaatgcgagtgtggcacattgtccacaggtaattgtgtaaaaaatcgttaatatattgatgaatgccaagagaatatggcttgtcagtgcccttaatgttgcttcaataatacctttagcttctacgactgcacatctaatctacatcttcacctt

SEQ ID NO: 248338 - DNA, 553 bp, Glycine max
  unsure (1)..(553): unsure at all n locations
atgcatatcaatgatncttagctcacttagcatctgctcgtaccggttcggaattcccgggtcgacccacgcgtccgcccacgcgtccgcccacgcgtccggggagaggctgcgcagatctactgcgagctggttcggctcggggcgaacatgcgagtcatcgatattggaggtggactgggcatagattacgacggttccaaatcttgtgactcagatatttctgttgagtacggtctcgaggagtatgctgcagcggttgttcacgcggttcagtgtgtgtgcgaccgaaggtccgtgaaacaccctgtcatctgcagcgagagtgggagagccatcgtgtctcatcattcggtcttgattttcgaggcggttggcaccagcagcacaaacggcggaggagctcccccggcattgtcagcgcattacctggcggaggagctgtcggaggactacggatatctctcggagctggcgttccgaggggactatgaaacgtgcctggtgtacacggaggagatgaaagagccgtgcgtggagcagttcaagcagg

SEQ ID NO: 248339 - DNA, 550 bp, Glycine max
  unsure (1)..(550): unsure at all n locations
ctggtgntagatgctagcctgatgatcgcatcgacgtaccggtccggaattcccgggtcgaccgacgcgtccgtaattgcaaagatgaataccaagcccgtgttcttcttgtgcttcctctgtgcactgcttctcatctctgttgtggcaactgagccatccaaagatgagacacaagaagaaccaaagacacagccagatgcctggggaagaggtggaagtggggggcatgatggaagctggggacacggtggagactgggggcatggcggaggaggacacggtggaggacatggcggaggaggacacggtggaggacatggcggaggatgcagatgctgcggtcgaaagggctgcaaatgttgctgaagtaaaaatcacaaatatatgaactgaacacactcatatacttgagtgtactccatgtaataactagtatatatgtaagaaataagaaataaaagcatggactctatccgtgcttgggctggcataggttgaatgttttccggcaaccatgcatgtagttgacacatctttttactataca

SEQ ID NO: 248340 - DNA, 403 bp, Glycine max
tccacgcgtccggctggagaaaacctaaccttataattacaaacatagaagagaggagtggaaagaattgatcgttgaaaatgcaaggaggaaagaaagcgggagagtccattaaggaaacagctacaaacattggtgcttctgccaaagctggcatggagaagaccaaggccactgtccaagagaaggcagaaagaatgacagcacgtgatccggtgcaaaaagagttggcaacccaaaagaaagatgcaaagattaaccacgcggagcttgacaagcatgctgcacgtcagcataacacggcggacaaacagtacgccaccaccgctgggcacattggacatggtcaccacaccacctgtaccgggactggaaccgtcacctattccaccaccgtggaata

SEQ ID NO: 248341 - DNA, 541 bp, Glycine max
  unsure (1)..(541): unsure at all n locations
tgttnactaatttcactcagaagtgcatagnagtgcccgtaccggtccggaattcccgggtcgacccacgcgtccgtgcgaagttgaagagttcgggagctaaggtttcaatgccagttgcttctaatgaagtgcccagaagttcaagccacattgaaaaggtaaaaagctcccgttctgttcagcaggagaaagaactactgccttccgttccttcaggaccctctttgggagattttgttctttggaaaggagagacaacaagcccatctcctcctccagcatggactaccgattctgctaggattcctaaaccaacatcattaagggacattttaaaggagcaggagaagaagtcctatgcagtactaccaaaccaactgcctacccctcaaaaatcacagcctgcccaagctgcacggaatagtggttcttcacgcccaatttcagcttcatctccatcaaaaactgcaccttctagccagataaactcccaagcttctctgtcaaaatacagaggggatgatgatttgttttgggg

SEQ ID NO: 248342 - DNA, 548 bp, Glycine max
  unsure (1)..(548): unsure at all n locations
atgggnntnctgactgtcagccactcacgnactnacgtaccggtccggaattcccgggtcgacccacgcgtccgtctgcttcttcttcttctctattcctatgtttccataacaacaccgccgattcattgcgtcagcgtcactaacttcatcatcataaaacattttcatataaataaatatattcattcattcattcattcacataataatcattaactatcattctctcttctctctctctctttcaattttagacagacaaaagaaagaaagaagagaacaacagagcaatggaaggaggaggagctgctccgtcggccgacaccgtgatgtccgacgcggcgccaccgtcgcagcagcctccggtggcgatggggatcgagaatattccggcgacgctgagccacggtggcaggttcatccaatacaacatattcggcaacatattcgaagtcaccgtcaaatacaagccacccatcatgcccatcggaaaaggcgcatacggcatcgattgctcagtttgaactcggagacgaatgagcacg

SEQ ID NO: 248343 - DNA, 539 bp, Glycine max
tagggctctaacgcagaaatgatcgacgactgaccgtccggaattcccgggtcgacccacgcgtccggcgaaactaaagtcagcattcgaaaaagatgagtagcatcggtacaggttacgatctatcgggcaccactttctcccgtgatggccgcgttttccagatcgagtatgccgctcaagccgtcgacaacagcgggactgttattgggatcaagtgcaaagatggggctgtgttgggcgttgagaagcttattccgtcgaaaatgatgcttccgggttccaatagaagaatacactccgttcatcgtcactctgggatggctagagcaggattagcagctgatggcagacaaattgttgccagagctaagtctgaagctactaactatgacagcgcatatggcgaaccaattcctgttaatgaactagctgaccgtgtggctagttatgtgcacctctgtacgctatataggtggctcaaaacttttggatggagtagcattcctgggaggtattaacaggattggacacaggcc

SEQ ID NO: 248344 - DNA, 455 bp, Glycine max
gaattcccgggtcgacccacgcgtccggtcacaacttcattatgtttcatgtaataatctggaaatgcaagaagcttatcttgtcaatggcgtagatgtgttacgagaatggtatttgcacagtccagaggaagctcgccaattgagaaggaaagctctctctcgtattgaatggctgcaaaaagctgatgtgcctaccatatcacagatcgaagagttccattcgatgcatacgatgatgaatgctcctgattcaaatgataatatccatctactgttgagcattgatttgttgggcttacaatgaacaggtaaagcttttccaaacaagattgtttttgatgataaactttgtgttggctaactcacaagaattctttgatgggaatttttcactggaatcttgggttccaatttttgtgaattgtcttttttctgtaaataattacctttaa

SEQ ID NO: 248345 - DNA, 465 bp, Glycine max
gtcctgaattcccgggtcgaccgacgcgtccggtctctcccatcctttcgcattctcaatacccttttgatttgtgaaaggaaagcaaacatgggggagcaggtccaacaccctacaatcatggacaaggttgctggtcagctccatctccgttctggtctttcatctggtattagaagttatgatggagcctaccgccacccagctatgtaccaaagaccctcttttgggaattactcgaatgctgcattgcagtttcctgtgatgcccacatgcaaagctaccatggatttgtctgctactgcaacatctgcctcacccgtctttgttgctgctccagcagagaaaggccattttcttttagactttctcatgggaggtgtttcagcagctgtctccaaaactgctgctgcttccattgaacgtgttaagcttttgatccagaaccaggatgagatgatccaa

SEQ ID NO: 248346 - DNA, 408 bp, Glycine max
tcctgaattcccgggtcgaccgacgcgtccggaaattctgggactttgaaactgcaagcaggctagatagctggatagtgcattccggcaacggctgctaacatagccacttgtgcacctgctaaaagggggaacgccaaaggcactgctcaagtgatcgctcaatgactgacggactgtgatccggtcctcacatagtacacaactctgaagaacgaggcggatatgcaccacacacagcttgacttgcagacaacacatctgcataacacactggaaaatcatgctgcgacgccttggtacataggacatcccttttatacccatcagacatatgctatgcccagtcatctaaccttacaaggcacggaccatgtcaccgaaggagacattggctcacatactatt

SEQ ID NO: 248347 - DNA, 369 bp, Glycine max
ctgaattcccgggtcgaccgacgcgtccgttctgatctggacgtaacctttctctttccttgggcaatatctctcaacaagactgatctgtgtggattttggcctatgatggcctcattatcgattgtgacgatcggattcatctatgaacggaacaggcatgctttgtattgagagtaatcactaccgatcggcgcccaactgtgacgaaggaccctgaaagagcgatgcctacattgcatcaatggattcgccatggatgaccacatacacagctcacagaccgtactctagctctgcatcaatgtcctcagaagcatggagtactcctgcatcttataacgagcacaccgtataagcctaattcat

SEQ ID NO: 248348 - DNA, 544 bp, Glycine max
  unsure (1)..(544): unsure at all n locations
ngacgcgnnntncncctggtacggtcactcacgtactgacgtaccggtccggaattcccgggtcgacccacgcgtccggtgcatcaccccaaaagggatgtgggacattatagtgaagcataagagtacgagttgggtcaactaaatgaagatttttcctttcagcaacacgattttgttgtggtgtttgggcacataaggtctcatgaagaattccttgcgaggttagaaaagaacgaaattgggaggacaaatattcatgggcattattagtgcgcaaagtcttaatggaaacaacaaattgattttgaaattcatgtgcaaaatcttgaaaaatgaaaaacacaccagaacgtcttttcattaagaaaacccaatacatttgaaaaaatcatcaataaaggtaacaaaatagaaataacccaaggttgaatagacacgactaggaccccaaatataggagtgaactaaagcaaaaggtgacacaacacatttattgacatgatgactatcagtatgacggacatgtttgcctaattgacac

SEQ ID NO: 248349 - DNA, 455 bp, Glycine max
gaattcccgggtcgaccgacgcgtccgggcttctgcggatgttgaataccgatgcttttttggtgggctcgcttgggccactgacaagtacgatctggagaaagccttctctcagtacggtgacgtcgttgaatcgaaggtccgcatcgcatatgatctgacacaattcggatccggaatttctccatcccgttctgatctgtgatctctgatctatttgcgttacttgttctatgatatgatacttgtgttactatatgattcttttattactcacgccaataggtacgttcatcttcatctttttgccaaagaagaagatcgatcggtttctattcggttctggattttgttttcgagctgttttgcttttcatttcaatttgatgaatccgttgtggttttatgtgtagattatcaacgatcgtgagactggaagatccaggggatttggat

SEQ ID NO: 248350 - DNA, 475 bp, Glycine max
ccggaattcccgggtcgaccgacgcgtccgcaagattggtgagaaacttgacccggctgacaagaataagattgaggatgcaattgagcaaggaatgcagtggttagacagcaaccagcttgcagaagcagatgagtttgaggacaaaatgaaggaattggaaagcatctgcaatccaatcattgccaagatgtaccaaggtggtgctggtccagacgtgggtggtgctggtgcagcagaggatgagtatgctgctcctccttctggtggaagtggtgctggccccaagattgaggaagtggactaaatgtagttgctttcctccagatacctgttttaaaaacttattttactttatgcttttttaattggattttaatcgcatgatttttgttggatgggattcaaactatttttcccttctgatatgaacgttgctttaagcattatggtatttggcgtattttcattatta

SEQ ID NO: 248351 - DNA, 404 bp, Glycine max
gtccggaattcccgggtcgaccgacgcgtccgcacttgacccctaaattcgtgcccattcccacaactgcacattcttctttctatatattccggatgccttttccgatttccaccaaaatctaaaccgaaattcccaattacccttcccaattttcaccaaaacctaatactcccacaccaatcttcgatcatggacgccgattcacaacctcaacaactcgaagagagaacagaggagcaagaactgaagtacctggaattcgtgcaattcgcgaccatacaggctctgatgcgctgcgccatcctctactcatacgccaaggagcgcgcgggtcctctgaagcccggtgtcgacaccgtggaggaggccgtgaagaccgtcgtggctccggtctacgatag

SEQ ID NO: 248352 - DNA, 446 bp, Glycine max
gtccggaattcccgggtcgaccgacgcgtccgccaaaatcaatctgcggagtcagaaagccatggatccctacaagaatcggccatcaagcgccgtcaattctcccttctggactacaaattccggtgctcccatctggaacaataactcatcgctgactgttggatctagaggtccaattctgctggaggattaccatctggtggagaagcttgcaaactttgacagggaacggatccccgaacgtgttgtccacgctcgtggagctagcgcaaagggtttctttgaagtcacgcatgacatttctcacctcacatgtgccgatttccttcgagcccctggagttcagacccccctcatcgtccgtttctccactgttatccacgagcgtggcagccccgaaaccctcagggatcccagaggttttgctgtcaaattctacacca

SEQ ID NO: 248353 - DNA, 541 bp, Glycine max
  unsure (1)..(541): unsure at all n locations
gatgcgctcgctaactgacgatantcangnactgacgcaccggtcttgaattcccgggtcgacccacgcgtccgttggcatcccagttgagtttcatggggtgccagtttttgctccagatgtgacaagggagatgcttgatatcaggccaggagaggccttggctgtgaacttccccttgcaactccatcacacagctgatgagagtgttcatgtgagcaacccaagggatggacttttgagattggtaaggtcactttctcccaaggtgaccacattggtggagcaggaatcaaacacaaacacaacccctttcttcaacaggttcattgaaaccttggattactacttggcaatctttgagtccattgatgtcaccctcccaagagacagcaaggagaggattaatgtggagcaacattgtctggccagggatattgtcaatatcattgcttgtgaaggcaaggaaagggttgagagacatgaactgttcggcaagtggaagtcaaggttaaagatggcccgctttcagcaatgtccn

SEQ ID NO: 248354 - DNA, 540 bp, Glycine max
agcgtctggctgctgcacgacagtcaagtattgacgtaccggtccggaattcccgggtcgacccacgcgtccggaagtatcagatctggagcaggagaatagcgttggcagcgtttgcgtttgctctgctgttcgaatcggcctcagcagacgacgtcgttgtgctctctgaagataacttcgagaaggaagttggtcaggacagaggagctctcgttgagttctatgctccttggtgtggacactgcaaaaagcttgctccagaatatgaaaagcttggtagcagcttcaagaaagccaaatctgttttaattggcaaggttgactgtgatgagcataagagtttgtgcagcaagtatggagtctctgggtacccaacaattcagtggtttccaaaaggatctcttgaagccaaaaagtatgaagggccacgcactgctgaatcacttgttgagtttgtgaatacggaaggaggaacgaatgtaaagattgctacagtttcctttcatgtagtggtgcttacacctgaaaattttaatg

SEQ ID NO: 248355 - DNA, 547 bp, Glycine max
  unsure (1)..(547): unsure at all n locations
gtatggnntnctgatgatagactattattgaactgctctaccggtcctgaattcccgggtcgacccacgcgtccgcccacgcgtccgccaagttaataggtctttatatttagttgttgacatcaacaaagtgatggaggaagttaatgtggttcaaaccaagaatggaactgttgcagtagcttctgcgtttgctggacataaggaagctatacagcaaagggaccacaaatttttaagaattgctgttgaagaagcctataaaggggtagactgtgaagatgggggtccctttggtgctattatagtatgtaatgatgaaatagttgctcgatgtcacaacatggttctgaggaacacagaccctactgctcatgcagaagtcactgttataagaaaggcttgtgaaaagttaaaccagatagaactttcagactgtgaaatatatgcttcttgtgaaccttgccctatgtgctttggagcaattcacctttaacgagttaaaaggttggttattgagcaaangcagangcaacaattgctatgg

SEQ ID NO: 248356 - DNA, 419 bp, Glycine max
acttctcctgaattcccgggtcgacccacgcgtccgctgaaacttcagaagcggctcgccgctagctttctcaagtgcggtagaggcaaacttcggcgtgaccgtaacgaggccaatgaaacctccatggataattctccactaaacatagagcaattggctaaagatggcttcattatcaggaagccaactaagattcattccccttcccaaactcgcaaaatgaaggaagccaacaggaagggacgtcactctggttatggtaagcgtaacggtacaagatatgctacgctccccaccaaaatcctttggatgaggatgatgcgtgtcctcatacaattgctacacaagtacagggaatcatagaagattgacaaacatatgtaccatgatatgtacatcaaggtaaagggtaatgt

SEQ ID NO: 248357 - DNA, 547 bp, Glycine max
  unsure (1)..(547): unsure at all n locations
cgtanctgtgccgacagacactgcatcgacgtaccggtccggaattcccgggtcgaccgacgcgtccgctcgaagaacaatttaattctagtttccactctccttatgttgcttcaactccacttcaccggatgaaaagccgccatcaaaggaggctactggtactccgaaagtggccttgcagtttccaacattaacccctctcatttcacccacctcttctgtgcatttgcccacctcgaccccaacaccaacaaagtcaccatttcctcgtcagactcatctcagttctcaaccttcactcaaaccctccaagcaaagaacccttcagtgaagacccttttgtccataggcggcggtttcggtccttctttggctgcaaatttctccagaatggcaagacaagccaacaccagaaaatcattcatagactcttcgatcccacaaggcagatcgaacaactttctcggacttgacctaaattgggaatacccttncttggacacagacaagaccactttggatcaatcaataaggaatggaaagc

SEQ ID NO: 248358 - DNA, 539 bp, Glycine max
acgctgctgattacgcactatactgatcgattaccggtccggaattcccgggtcgaccgacgcgtccggccacacctccgggtaggcgcacgatacgccttggtttgcgtgcgtggcacagaataattaggagcgtctataacaagcatggcacacacactatacgaccttatgtctgcctataggttggagaaacttgatgagtacattatctcacgcatgtacatcaacgggtaccaagctgcaaaggatgatcttactgcatatgcaaccttgccaactgctacatcagatgaatatggaaatgtgtgcacgtggtacaagcacatcgatgctctgctgagacatctctagtgatcatggctagggatctggtggtatagttgagggatccctgggtgcagaacctgacacaactccgacagctgctgacactaaggctggtatagctgaagatgacgatgatgacgatgtcgatttgattagtgaatagacttatgaagacatgaacgcaacttgctgacgatcacatgaaggag

SEQ ID NO: 248359 - DNA, 546 bp, Glycine max
  unsure (1)..(546): unsure at all n locations
tgggnnttnaactgactacatccatcgactttcgtaccggtccggaattcccgggtcgacccacgcgtccggcttgaaagagtacccaaagcttgatgatagggttccttcctcttcttctctgtcagtgcagatggattggattatggaactgttggagagcaatttggaagcaaagtccaaaatttacaaggaccctgctttgtgttatattttcttgatgaacaatgggaggtacattgttcagaagaccaaagatagtgaattgggaaccctcttgggagaagattggatcagaaaacacgctgcaaaagttaggcaattccatgtgcactatcaaagaagctcgtggaataagctattagggattctgaagttggatagtaatgggtcaatgccccatattaacttggcaaagtcaatgaaggagaaactcaagtcgtttaacacagtttttgaggagatatggcaggaacagtcttcatggtttggctttgattaacaacttatggaagaaattagaatttcgcttgagaaaatctttgn

SEQ ID NO: 248360 - DNA, 545 bp, Glycine max
  unsure (1)..(545): unsure at all n locations
aggctnctnnctaacttcagctnatagatagtactgcccgtaccggtccggaattcccgggtcgacccacgcgtccggtctgttcctcttcacttcttataccgttgcccccaaacgacgccgttttctgttctggtatgtaaacgccgttcgagaacaaaccaaaaaaagaaaagaaaatcagttattgccgttgttgttttgtttccggttcggtttatttcaatggatcgggcggcgttgactgttggaccgggcatggacatgccgatcatgcacgacagcgaccgttacgatctggtacgcgacatctggtccggaaatttcggcgtgtctaggctgatgcaggatatacaaaccaaggaactggtcgccgtcaagtacatctaaaggggtgataagattgatgaaaatgtaaagagggaaatcattaatcacaggtctctgaagcatcctaacattgttagatttaaagaggtaattttaacacctactcatcttgctattgtaatggaatatgcatctgggggagagctctttgaaaa

SEQ ID NO: 248361 - DNA, 354 bp, Glycine max
tgaattcccgggtcgacccacgcgtccgctagcaccatttccaaacaatacccatcaatgtctttatccctcatcgatcatatattcattgatctgtatacaaaatcctcagaaactactactctctgccatgaccatggaatacataaccttataactcatcatcatatacgcaaaggacatcaacaatggtaatcttttatccaaaatggacgtatactccgacgttttgctctgcatgaaccctcttcacactcatgactccaccactcacatccacaaagactccagctgcaaccctacgtagcactaccccgtgaaactatccttcaacgaatcgctatctatggaaaa

SEQ ID NO: 248362 - DNA, 541 bp, Glycine max
agcttctctcacgatagagctggatcgacgtaccggtccggaattcccgggtcgaccgacgcgtccgaactccctaccctattccgctttctctcatccatcatgaaaggaggaaagtccaagaccgaagctaagagagccgatgccaaacttgctgtgaataagaagggcgccgccaccaagactaggaaacccgccggaaaggggaaggcagcgaaagatcctaacaagccaaagaggcctccaagtgctttcttcgttttcatggaggaattcaggaaggtgttcaacaaggaacatcccgacaacaaagcagtgtctgctgtgggcaaagctgctggagcaaaatggaagacgatgtctgatgctgaaaaagcaccttatgtggcaaagtctgagaaaaggaaagtggagtacgagaagaacatgagagcttataacatgaaacaagcggaaagtcctactggtggggattaagaaaaatctgagaaagtctgatctgaggtgaatgatgaagatgatgacgaggaatgcaattgcc

SEQ ID NO: 248363 - DNA, 547 bp, Glycine max
  unsure (1)..(547): unsure at all n locations
atggccgnctngatgccagctcgtacatcgcatnngacgtaccggtccggaattcccgggtcgaccgacgcgtccgatcaaagaaaggggtggtggctgcttcgaaagcttaataatttgtttatttccagaacatcagagggttcgcagcagcaaactaacaaattactcatatcatataataagatggcccgttctctctcgcaagccaaacgtattggtgtccttgttgctcaatctatctccctaattcccgttcatcggcgaggttacgcagtggcatccgatgtatcggtaagagttggattgggtaatattgggcgaaggaatggaatcgtgggaggtgtagaagagaagcctgatacaagagatggttcaaaagcctactcaactgattgggccccagacccagtaacaggttactataggcccattaaccacacccctgaaattgaacccgtggagcttcngcatangttgctccgatcacctncactagagcctanaggaagtgcttgacaaccatgacatgcccaaattttactta

SEQ ID NO: 248364 - DNA, 548 bp, Glycine max
  unsure (1)..(548): unsure at all n locations
cgctactgatgtcagccgactacgcatngacgtaccggtccggaattcccgggtcgacccacgcgtccggtctcacaggacacgttgcattgcgcaggatggggagagacggtgagattgacggcggagtgcggcggagaggatgcacgttcaggcggaacgacttcttcccggaggagtcgttcaagagttggggaaactacgctcgagcggtgctggagacgccgtggaggctgaaggatcgtgtggtgacgcgatcggaggaccagacggagttggtggagatgaaggctcgtagcaaccacgagatgaagaaaacgctgaactggtgggacctcatgtggttcggaatcggtgccgtcattggctccggcatattcgtcctcactggcctcgaggcaaggacggcggtcggacccgncgtcgtgctcttctacgtcgttttcggcgtcttcgncttggtctcggtgttctgctacaccgagttcgncgtcgaaattcccggtgcaggcggatcatttgcgtacttaaagagtcgaactgggaga

SEQ ID NO: 248365 - DNA, 549 bp, Glycine max
  unsure (1)..(549): unsure at all n locations
cgtctanctaataactgggcagtcagtcagatagtactgacgtaccggtccggaattcccgggtcgacccacgcgtccggttataacatttatagaaagaaaaaaaagaagaagaaagagttctgaccatggctgcagcatgatttatgccttcatccatagtggacgaagaagcgaggtttgaagccgaagtggcggaggtgcaagcatggtggaactctgagaggttcaggctaacaaaaagaccatacacagcaagagatgtggtgtccctccgaggcaacctcagacaaacctatgcctcgaacgagatggcgaaaaagctctggtgccttctgaagaaccaccaagccaacggcacagcctcaaggacttttggtgcacttgatcctgttcaggtcactcaaatggccaagcacttggacacaatctatgtctcagggtggcagtgctcagccacacacaccacgagcaacgagccgggccctgaccttgctgattacccttatgatactgtcccaaacaaggttgagcacctcttctttgctc

SEQ ID NO: 248366 - DNA, 355 bp, Glycine max
ccggaattcccgggtcgacccacgcgtccgcccactcttccgtccacgcgttcggcaagatctctattgactctaaggatgtcgatgtgacggaatggaaaggggacattctggcagtgggcgttacggagaaagatttgtctagagatactaactcgaacttcgagaatgcgattctgagaaagatcgactcactgttggatggtttattaactgaatcctcttatgaagaggatttctctggcaaagttggtcagtcaactgatcttagaattacatgacttggatcaaagaaggttgtattgattggtcttggtcaatcaccttgcactccttcaccctttaagggtcttgt

SEQ ID NO: 248367 - DNA, 545 bp, Glycine max
  unsure (1)..(545): unsure at all n locations
atgccttctcgttgcagtcngcggatcgatcgacgtaccggtccggaattcccgggtcgacccacgcgtccgtgcagaccgagctagctagctagcaagcaagctcagagatggaggcaaagcgaggccatgcggtcatgtgcttggcacgtgtttcactcttcctctgcgctctaaccctatccgctgctcacggaagcaccacggttcaagacatcgcgagaaagttgaaactcggggacaacgagcttctgcgcacggagaagaagttcaaggttttcatggagaattacgggaggagctactccacagaggaggagtatttgcgccgtttggggattttcgcccagaacatggtcagagcggcggagcatcaggcgctggaccccaccgccgtccacggcgtcacgcagttctccgaatctaccgaggacgagtttgagaagctctacactggcgtcaatggcggctttccgtcatcgaataatgccccccggcggattgcaccgcccttggaagtggaccggctgtccgagaattttaat

SEQ ID NO: 248368 - DNA, 545 bp, Glycine max
  unsure (1)..(545): unsure at all n locations
aggctgcttgcgaactttagtnatcgactgactgtcctaccggtcctgaattcccgggtcgacccacgcgtccgcccacgcgtccgcccacgcgtccgatgcaagcaaggttggtgctactgtgaccaagttggggggctcaaatgtcacccatgtaattgcagcaactgatgcacatggagcatgctccaagacgttgaaagttctgatggcaattctaaatggacgatgggttctaaaaatggattggataaaaacatgcatgccagagataaatcctgtagaagaagaaccctatgaaattaatcttgacaatcaaaggtgtcaaagtggcccaaaagcttgcagacttaaggcattggccaatgagcccaaactattcagtggcttaaaggtttatttttctggagaatacgtgtcaacttattaaggagatcttgaaaaattaattgaagtggggggaagtactcgtttgagaattcaaggaaaaattggaacacacagaccttaatgccaaggggattttttcaaagttgctaattttt

SEQ ID NO: 248369 - DNA, 544 bp, Glycine max
  unsure (1)..(544): unsure at all n locations
tgcctactgacgactgnaacgtatcgtagtactgtcgtaccggtcctgaattcccgggtcgacccacgcgtccgatgaaaacctctcacgacacaatgcagggcttttatggctgccaccctgaactaagtgacgggcctacgcttactgtccaagttcttacaacagggtcttggccaactcagtctagtgttacatgcaacttgccagcagaaatgtctgcgctgtacgagaagtttcggtcattttaccttggcacccatactggcaggagattgtcctggcaaactaatatgggcacggcagacttgaaagcaacctttgggaaggggcagaagcacgagttaaatgtctctacttaccaaatgtgtgttgtcatgctgtttaataatgctgatagactgagctacaaggagattgagcaagcaactgagattcctgcttcggatcttaaaagatgcttgcaatcattggctttagttaagggaagaaatgtccttagaaaggaacctatgggtaaagatattggtgacgatgatgcttn

SEQ ID NO: 248370 - DNA, 549 bp, Glycine max
  unsure (1)..(549): unsure at all n locations
ngtggctgttatctccgactgcaatcttatgtactgtcgtaccggtccggaattcccgggtcgacccacgcgtccggaggaattcaacggactcaacgttggattcgcgctcgacgaggggcaggcctcgccgggcgaggaatttagggttttctactccgatagggttccgtggaacgtgaagattagggctaaggggaggcccgggcatgggtcgaggatgtatgatgggagtgcggtggagaatttgatggagagcgtggaggtagtgagtaggttcagggtgagccagtttgatgtggtgaaggcctggatagctttgaatggtgaggttgtgtcggtgaatccgttttatgtcaaggctgtagttgatacagatgattaggttgcaatgaacgttttagccttctaggtcaaagcttggttctatctgaggctgataccaacatctgaccttgagtgtttgagaaggctaattgtatatgattggttaccatcttgttaggaatatttaaatctagtataattgatttaggtatctcttatttt

SEQ ID NO: 248371 - DNA, 552 bp, Glycine max
  unsure (1)..(552): unsure at all n locations
agtccgtgtgactgactgnaagtcagctgatagtactgcccgtaccggtcctgaattcccgggtcgacccacgcgtccgcccacgcgtccgcccacgcgtccggtggaaaattaatgaaggtcaagcacaagtacaggatggcaacaaatttaacaatatctgagaaaagaagatgctcttccttggtactcctggaagggaggcccaaagattctccaaaagcagagaagactggtgtccacatcctttcaaaatccgaaattgatgcagagctatcaaaaatgaagggtgtgacacctcaagaggcggcagcggcagctgcgaaagcagttgcagaggcagaagctgccattgccgaggctgaggcagcagctagggaggcagatgctgcagaagctgaggcagaggctgcacgagtgtttgcgaaagcagcaatgaaggcactaaaatgcaagacacttcgtgtttgatggtgttagcttctgcattgcttacatgaggagtatatttggcttgagatcataattctgctgctagactttctgcatgtn

SEQ ID NO: 248372 - DNA, 336 bp, Glycine max
aattcccgggtcgacccacgcgtccgggatcatgctagttaatatatgaaactgctttgaaagtatacagagcgaagcttttgggctggactaccctacatgtgttcaggtgcgtctgatatgctagagactatgctcatctgttatccatacaggcgacttacacattgtgacgcgttgagccaatcatacatggcacctgtccatgacaccaatgtgtaacctgtctgcaccagacctttgattaattactttcagcatccataattcactgattaagacattacggtactcatctcgagagaatatgaccagcccaatcctgtaccaccagtc

SEQ ID NO: 248373 - DNA, 542 bp, Glycine max
  unsure (1)..(542): unsure at all n locations
tgtggggttcttatactagttcattgatgcactgctctaccggtccggaattcccgggtcgacccacgcgtccgttctaaggcaaattccacaagtgccccacaatcttgtgcaattgtgcctaatgaaacttgcgtacagaatgagcgtgagctgaaacgggagaggagaaaacaatctaaccgtgaatctgctagaaggtccaggctgaggaagcaggccgagactgaagaattggcacgaaaagttgatatgttaactgctgagaatgtgtccctgaagtcagaaataattcaactgactgaaggttctgagcagatgaggatggaaaattctgcattgagggaaaaactgagaaatactcaactgggacaaagggaagagataattttgagtagcatcgagagtaagagggctgcacctgtaagtacagaaaacttggtatcaagaagtaataantctaggtctaatgacagaactacagagaatgagaaatgattctgtgaggaccaaccaaattctggtgcaaacttgcttaactt

SEQ ID NO: 248374 - DNA, 390 bp, Glycine max
taccgaactggcgggtcgacccacgcgtccggtttctttcacttcacaaaaatgaaaaacatgaaattgtgttcggtgatgctatgcttatcgctagcgttccttcttggggccacagcagaacaatgtggcacacaagctggtggagcgttatgcccaaatagattatgttgcagcaaatttgggtggtgtggtgacacagattcctactgtggagaaggttgccagagccaatgcaaatctgcaacaccctcaacaccaactgcaacaacacctagtagtggtggagatattagcagactcattagctcttctctctttgatcaaatgcttaaataccgaaacgatggccgctgttctggccatggattctacagatatgatgctttc

SEQ ID NO: 248375 - DNA, 309 bp, Glycine max
ttcccggtcgaccacgcgtccgcactttcactggaatcacaatcctgaaacataaacatcttatcatttaacatactactagacgacagtgaccaccacattggaaagaggtttctcggaagagcaagaagctctggtggtgaagtcatggaatgtcatgaagaagaattctggagagttgggtcttaagtttttcttgaaaatatttgagattgctccatcagcttagaaattgttctcattcttgagagattcaactgttcctttggagcttaatcccatgcttaatcttcattgctagtctgactt

SEQ ID NO: 248376 - DNA, 549 bp, Glycine max
  unsure (1)..(549): unsure at all n locations
ngtaaggccggctgacgaatgacaagtagaggtaaggactgcctctaccggtccggaattcccgggtcgacccacgcgtccgcatcaacaaaaaaagcacctgataattgatagtattatatattatggcttatcaagtgttggtgatttgtgtggtctccagcatagtgtttgcatacatagtatggagaaaagaaaggaagaaaaagcttccaccgagtccaaagggccttcccatcattgggcacctncaccttgtgtccccaataccccaccaagatttttacaagctctcactccgccatggacccatcatgcaacttttcctcggctcagtcccttgtgtggtggcttccaccgcggaagccgccaaagagttcctcaaaacccacgaaatcaacttctccaaccgncccggccaaaacgtcgccgttaaaggccttgcctacgattcccaggacttccttttcgcatttgcaccctttcgaccctactggaaagtcatgaagaaactctgcatgttcgagcttcttaagccgccgaatgatt

SEQ ID NO: 248377 - DNA, 413 bp, Glycine max
gacccacgcgtacgcccacgcgtccgccgagatccgctgccggtgcatcaagggaagcaagaggatagagtttgcgctctgtttttcaaatgcacaaagcgcagatctctgtgatataacggaatacaggaaaatcaaagaccaggatgaagttagagatgcgggcgttgaggacgtccgaaaatcattcttgctgtcagtcccagataacgatttgagtgctgaggcataaaccaaaattgacagccatacggagaaagtaaagtggaagctcatgtcagttgttacacttgcattgactgtccttactagttcgcaagccattctaatcgtttggtccaagagagctggcaagtatgagtatagtgtcactactgctaactttatggtggagactttaaaatgtgctatat

SEQ ID NO: 248378 - DNA, 543 bp, Glycine max
  unsure (1)..(543): unsure at all n locations
agttnatgggcggttgtccctcncctaactgcatggctctacccgtccggaattcccgggtcgacccacgcgtccgtctaaaccctatggccgacgaagccaaagccaaaggcaacgcagccttctcctccggggacgatcctgccgccatccaccacttctccgatgccatcgccctggctccctccaaccatgtcctctattccaaccgatccgccgcatacgccttcctcaaaaactacgcagatgcattagcggatgccaaaaagacagttgaactcaagcccgactggtccaagggttacagccgtctcggtgccgcgcatcttggcctttcccaatacgatgatgctattttggcttacaaaaggggtctcgaaatcgaccctcacaacgagccccttaagtctggtttggcagatgcgcaaaaggcctttgccgcggtcttcaggcctttngccctggccctttacccccttcgggatgctttctctgggccctgaaatgtggccccggttaaccggagacccatcaactagggtt

SEQ ID NO: 248379 - DNA, 331 bp, Glycine max
cctgaattcccgggtcgacccacgcgtacgcccacgcatccagagtgaccaaccacgctgttcataaagctgctgctacattgaatgactgggatgatctccgtgcaacaaatgtcagtgccaaactggattctcaacataagaagctcaacctttcaatcctgccaaccaccactattggatccttccctcatactgtataactgatgatggtactccgtgaattcaatgctaacatgatctcctaggaatagtatgtaaagtcaattaatgaggaaattctcaaagttgtttagctctaataatagcttgatatttatgttcttgttca

SEQ ID NO: 248380 - DNA, 545 bp, Glycine max
  unsure (1)..(545): unsure at all n locations
agttggntgactagtccccagcnccggtccgcactgacgtaccggtccggaattcccgggtcgacccacgcgtccgcccacgcgtccggagtgaccaacgaggctgttcagaaggctgctgctgcattgaagggttgagatcatcgccgtgcaacaaatgtcagtgccagactggattctcaacaaaagaagctcaaccttccaatcctgccaaccaccactattggatccttccctcagactgtagaactgaagagggtacgccgtgaattcaaggctaacaagatctccgaggaagagtatgtaaagtcaattaaggaggaaattcgcaaagttgttgagcttcaagaagagcttgatattgatgttcttgttcatggagaaccagagagaaatgatatggttgagtacttcggtgaacaatngtccaggcttgcctttcaccgtaatgggtgggtgcaatcctattggtccccgtgcgttgaagcaaccgatcatctattgtgatgtgagccggccaaggcaatgaccgtctttttgtcatt

SEQ ID NO: 248381 - DNA, 216 bp, Glycine max
actcccacgcttgctcagtgaccaacgaggctgttcacaatgctgctgctgcatttaaagattcgaatcgtctccattcaacaaatgtcagtgccatactggattctcaacaaaagaaactcaaccttccaatactgtcaaccaccactattgtatccttccctcagactctataactcatgaaggtactccccgaattcaaagctaacaagatct

SEQ ID NO: 248382 - DNA, 549 bp, Glycine max
  unsure (1)..(549): unsure at all n locations
ggtggtgtgcgactgtcgcacgtccagctngactancgtactgcacgtaccggtccggaattcccgggtcgacccacgcgtccgcccacgcgtccgataataccaaaaaacaccatgatgcttggggagacccaccgcccgaatcgagaccgtacacgtgccaccgtgggcgccggagatcttctcaccatacaccggcaatgccgattactctccgtactccatgcaagaagcacttagtgcacttcagcactacaaatccaccgatgctgagtcagactcggaggttccgtctcggaaccgtaagtcccggtggacgcttactcctgcgaccatttccgcatgttcgagttcaaggttcggagatgcgcacgttgcaagtcgcatgactggaccgactgtccgtacgcccaccccggcgagaaggcacgccgtcgtgatccccgggaggaccattacttcggcacggttttgccccatttccgaaggggagtttcatgaagggttactcgtgccaattctctcacggtgttttcttatgtttgtttt

SEQ ID NO: 248383 - DNA, 543 bp, Glycine max
  unsure (1)..(543): unsure at all n locations
tttagtgcgtatgtcgactgccagctngactacgcactgactaccggtccggaattcccgggtcgacccacgcgtccggtttacatcacgagaaacaacgccacgctgaaatcccttttttgtgtccatgggcagcagcaggctgaggctagtgttgggcttgtctgttttgagttgtgtgcttgtgacatcctcagctcaaacgtgcagaaaccaaacattctcaaacagggtgtttgccacatgtcgtgatcttccacagttgacggcttacctgcactggacatacgaccaggctagtgggaggttggagatagcattcaaacacgctggaatcacctngaccaacaggtgggttgcatgggccatcaatcccagaaacaccctcgacccaaccatgattggggcccaggccctggtggctattcctcaatcaaatggaaacccaaaggcctatgcctcgttcataaccagcaacagcacaactttggaagatggagctatcagntattccctggtcgggttgagtgctatcgttgagaa

SEQ ID NO: 248384 - DNA, 403 bp, Glycine max
cgggtcgacccacgcgtccgctggaatcataattaataatccaacttattttgtctcattactatagtttctctagatgggagctagaactaagtcatgcgtagttctaccttttcttctattggttgcaattttcatgcaacaatgtgtccatggagaatcgcaagtgccctgcctttttgtctttggggactctctgtctgataacggaaataataacaaccttccaagcactacaaagtccaattacaaaccatatggcatcgacttcccaaccggcccaacaggacgatttacgaatggacaaacatctattgacctaattgctcaactactgggatttgagaatttcatcccaccctttgcaaacactagtggctcagacacacttaagggtgtgaac

SEQ ID NO: 248385 - DNA, 342 bp, Glycine max
ctgaattcccgggtcgacccacgcgtccgctcagttactctctctctctctggagcgtcttcgtttcgttagggcacaaaacccctttggggatcggtggagcaaggcctcgccggcgagattcccgaggctgttcaatcagcgatcgagcaccggcgaaaagcggcgaagatgaaggttttcgtgaagactctcaagggcacgcacttcgaaattgaagtgaacccttcggacacgctttctgaagtgaagaaaaatatagaaactgttcatggtgcagatgtctatcctgctgcacagcaaatgcttattcatcaaggaaaaagtctaaaggatggtact

SEQ ID NO: 248386 - DNA, 548 bp, Glycine max
aagagggtgacgtgggcctgcactgccaagtcacgtactgcacgtaccggtccggaattcccgggtcgacccacgcgtccgctttatataacctaattgcaaagatgaataccaagcccgttttcttcttgtgcttcgtctgtgcactgcttctcatctctgttgtggcaactgagccatccaaagatgagacacaagaagaaccaaagacacagccagatgcctggggaagaggtggaagtggggggcatgatggaagctggggacacggtggagactgggggcatggcggaagaggacacggtggaggacatggcggaagaggacacggtggaggacatggcggaggatgcagatgctgcggtcgaaagggctgcaaatgttgctgaagtaaaaatcacaaatatatgaactgaacacactcatatacttgagtgtactccatgtaataactagtatatatgtaagaaataagaaattaaagcatggactctatccgtgcttgggctggcatatgttgaatgttttccggcaaccattcatgtaag

SEQ ID NO: 248387 - DNA, 542 bp, Glycine max
  unsure (1)..(542): unsure at all n locations
tagtgcggtgacgatgaaggggggagtattgcactgctgtaccggtccggaattcccgggtcgacccacgcgtccggcaagagcaagagcaagagcgaaagcggcagataagatggaaggagaagagggttctcagcggccacagttggtgctcgcggacaagctattccttctccggcaacccgatgtgcaagacattgacaaggttcgctacaaagaggatgtcttcactcatgtcaaggaaaacgatatggtccctctgtacgaaaccctagtcgctgattccgtgttggacttggatcgtgcccttttggactctatgcgcgctaaaattgacgacgagctcaccaagctcgacgaanagattgctgatgccgaggaaaacttangagagagtgaagttcgtgaggctcatttggcaaaatccttgtttttcatccggattatggacaaggagaaagccttggaacatctgaaggtaacagaaaccaagacaggtgcaattggccagaaaatggaccttgtgttttatacaaggcagn

SEQ ID NO: 248388 - DNA, 547 bp, Glycine max
  unsure (1)..(547): unsure at all n locations
cgtgcctaactattcccctccgacttgntgcnatggattaccggtccggaattcccgggtcgacccacgcgtccggggaagttctatcttttggatccacatgcttaacttaactggatcacattggctatgttaaagatgggctgcaatagctttataccttccacagagaacagacaatgacataaagaactattggaacacccatttgagaaagaagctgaagaagatgcaagtaggttgtgaaagtggtagctttggagaaaggttttcagcctcaaggcaaatccctagaggccagtgggaaagaaggctccaaactgatatcccaatggcaaacagagccctcagtgaagctctttcaccagagaagccatcttgtaatttatctggcataaactcaaacccttcagatatgttcagcttcatctttttcacaaaaccaacttctacacaaactgggtgccatggctcaagtgctggcaacataacttgaatgcttaaaggtttgattgaaaaaccaaccaaagtctttaagacaaactct

SEQ ID NO: 248389 - DNA, 557 bp, Glycine max
  unsure (1)..(557): unsure at all n locations
gttgagtgctgctgtttccgaatcgnnnagcantgcatactcgtccggaattcccgggtcgacccacgcgtccggggaagttctatcttttggatccacatgcttaacttaactggatcacattggctatgttaaggatgggctgcaatagcttcatgcgctgccacagagaacagacaatgacataaagaactattggaacacccatttgagaaagaagctgaagaagatgcaagtaggttgtgaaggtggtagctttggagaatggttttcagcctcaaggcaaatccctagaggccatgttgaaagaaggcttcaaactgatatccaaatggcaaagtttgccttattgaatctcttttaccataaaagccatcttgtaatttatctggcttatacttataccctttatatagtagcatcttctttatattttataaaaccaacatacatcactatactgtgtgcttatgccttaatgttcttactatcatatccttgaaatctctaatgtttttgtatgataaaatcctatataattccttaataatctaatt

SEQ ID NO: 248390 - DNA, 387 bp, Glycine max
gaatttccggctcgaccgcactcgtccacagaagcactctttctctctcttcatttcatcttcttcagcttcagcgaaatcctgttctgaccgtatatcgtgcctgttcttttgtgcctgaaaagccacttctctacttgcgttgagtgagggagaggatgtctggtcgcacacagaacagtctgagaaaagcacttggagcccttaaggacaccacaacagtctcgttggctaaagtcaacagtgattacaaggaattggacattgctatagttagagccacaaatcatgttgaacgtccggctaaggaaaaacatataagagctatattttcagctatctcagctacaaaacccaacgcttatgtttcctattgtatccacgcac

SEQ ID NO: 248391 - DNA, 544 bp, Glycine max
  unsure (1)..(544): unsure at all n locations
gagtggctgaccatgaggaggggaatgtagccctctcctgaattcccgggtcgacccacgcgtccgcgaagacgatcagataccgtcctagtctcaaccataaacgatgccgaagaacaagggaaagggaggtaagaacaggaagaggggaaagaacgaggcggacgacgagaagcgggagctggtgttcaaggaggacgggcaggagtacgcgcaggtgctccggatgctggggaacgggcggtgcgaggcgatgtgcatcgacgggacgaagaagctctgccacattcgcgggaagatgcacaagaaggtgtggatcgccgccggagacatcatcctggttggactcagggactaccaggacgacaaggctgacgtcatcctcaagtacatgcccgacgaggccaggcttctcaaggcctacggcgagctccccgataccactcggctcaacgagggcatcggcgccggcttggacgaggaggacgacgccaccgncaacgactacatcgagttcgaggatgangatattgataaaatctta

SEQ ID NO: 248392 - DNA, 541 bp, Glycine max
tgatagccaaagtgcttaccatcccaggggcgagatagtatcgctctaccggtccggaattcccgggtcgacccacgcgtccgtggaactgcaacaatggtgccgcaacccattttgcatctaacccttttgtcattaataatcgctctgaccactctttccttggtcgatgccgccgatcccacatttggcttcacccctcttggattatctagtagctcaaacttgcaaatccaaaagccttacgacgttgcagtcaacgagcgctacagcttttcaaatggagtgcacagattttgggtatactccacggacaagcctcatatgcaaggcagcaatacgaagccacgaactgagattcgtatcgctggatacgatatatacattccgggtgttggcatttccaagggttttttaacgtgcctaatggcaccaagcgggtgtgcattcagccaagtggttggtggaataacttcttgccacaacctgcagactagggtctatggggggtctctcacttattacccatatactactttgg

SEQ ID NO: 248393 - DNA, 442 bp, Glycine max
ttcccgggtcgacccacgcgtccgctggccactcccatgggcggtggagtgaactcgctgaacgtgcagctgaggaaggagctcgagctgtacgcctcgctcgtgaactgcttcaacctccctggcctccccacgcgccacgacaacgttgacatcgtcgtcatcagggagaacaccgagggcgagtactccggcctcgaacacgaggtcgtccccggcgtggtcgaaagcctcaaggtaataacaaagttctgctcagagcgcattgctaaatatgcttttgagtatgcttacctaaataacagaaagaaagtgactgctgtgcacaaagcaaacattatgaaacttgcagatggtttattcttggaatcttgtcgagaggttgccacaaggtatcctgggatcaagtacaatgaaattattgtagacaactgctgcatgc

SEQ ID NO: 248394 - DNA, 543 bp, Glycine max
  unsure (1)..(543): unsure at all n locations
tacgctgnctagtatgtgtgtgggagagtattgctgctaccggtccggaattcccgggtcgacccacgcgtccggtggatgggagagaagtatttgttgcatttctttgactatgatatcgggcataaaaaatacgtcatatggggtttaactgctgggatcttgattagggctgcatcagttgtgtaccaacggcagccagcttttgtggagcagaaccctaaattcaagcttccacaggatgtatccaaggacactacaataccttgagttcattgtttattgtattttgtccttgatacttgtccttaatcgtgcaaaaaaactcgtagcagccagagttctagaattcatagcaagtgtttatatttactgagaaaggaagagggtactatcccatcacttggaattcatattcctacctattgaatgccatcccaaaagttaaagagttgcagacattgaatcactcnaaatagaagtatttgctgacaggcaagtagtaactttgataccggttgagtgtaaagggcttactggaat

SEQ ID NO: 248395 - DNA, 543 bp, Glycine max
  unsure (1)..(543): unsure at all n locations
gtggtactagtggcccaacgctcnccgcancgncgtgacgtaccggaccggaattcccgggtcgacccacgcgtccgcagaaacggcactgctgaagaattggatggagctacttcagctgatgcgagatcctgggggggccgtagatcgggcctggtcttttgtgcctgagaagccacttatctacttgcgttgagtgagggagaggatgtctggtggcacacagaagagtctgagaaaagcacttggagcccttaaggacaccacaacagtctcgttggctaaggtcaacagtgattacaaggaattggacattgctatagttagagccacaaatcatgttgaacgtccggctaaggaaaaacatataagagctatattttcagctatctcagctacaagacccaaggctgatgttgcctattgtatccacgcacttgccatgcggttatcaaagacacataactgggcggttgcttttgaaaacttaattggtatttaccgagccttaaagtaaggggattccaccatttattgaagaaa

SEQ ID NO: 248396 - DNA, 399 bp, Glycine max
cacttacgtcctctcaaacgtcctctacttcttacattacaaactcctgatcttaataaaacagccacgtttaaaatcctggtatagcaaatcaccttcccaaagtcatcaaataattcaaacccaatataactcttaaaccatctaccccaaatcctgttcaatcaaaataaaatcaacctgtcaatatgaattatattaaaaataattcacttaacaatacttctactccttcaacacattatacttcttaatttactaaataaatgtcttttaaaattccttaaatttctactttaaacatacttttaaatttcttcttccatatataatacaataactcttttattaatataatttattttttttttcctttatcaatatttatttcttcatttt

SEQ ID NO: 248397 - DNA, 543 bp, Glycine max
  unsure (1)..(543): unsure at all n locations
aaatgctgctgttgccctcactgttgagtanagtactgcacgtaccggtccggaattcccgggtcgacccacgcgtccgcccacgcgtccgcccacgcgtccggctgagtttcccattttcgacaaggtggatgtgaatggtgacaatgctgctccactgtacaagtttctgaaatcaagcaaaggtggactctttggggatagtatcaaatggaacttctccaaattccttgttgataaggatgggaatgtcgttgaccgttatgcacccacaacttctcctctcagcattgagaaagacataaagaagctgctagatgcatgaataatgattagaataacatcatgaatgaataatgtactgcagatcagatattaattagtggaatttcctccgtatttgtactgaaacagttgctctgctcatgtacctctgaattactatttgcttggtcatctatataaaaatgtgtatcaatttatataaaatataatattattttttattttttattatatatttttttattaaaagtgcggtct

SEQ ID NO: 248398 - DNA, 497 bp, Glycine max
attcccgggtcgacccacgcgtccggtggagtaatacttgtgtatggcacataatattaatgccaggccactttaaactactccttgtgtgtgtgccaatgaatcatgtgggtatcttgcatggcttgttttgaagcctatccataaaggagcagtgcctaacttcaactttgattcttgttctttatatatggttgttattctattgcactttacctttatctttttattgtttccttgtttttcttttttaattgtcttttacttttttttcttttttttttttttttttatttttattctattttttttttttattttttttttattttattctatttttttttttttttttttttctttctttttcttttctattttttttaatttctttttttttttttatttttttcttttttatttttttctttctttactttttttctttttttttatcttttttttattctttcttattttttctatttttttttttt

SEQ ID NO: 248399 - DNA, 308 bp, Glycine max
ttgactcttcctctgttccgcttctctttcaatccagccctcattcctaatccttcaatccaaccacctcatccttacactcacatatacacatatcttaacccctatcgtccctcctattgcttcaaaactcatcctcaaagaactcaaagactttcataaagacccaccaacttttttcaacgcttgtccattttctgaagacattttccattttccatcaacaattaattatccttcttatattccttattcttgaagtttattcctaatcactatttactttccttccgattatccttttaaac

SEQ ID NO: 248400 - DNA, 541 bp, Glycine max
  unsure (1)..(541): unsure at all n locations
gtacgttcgctgtccatccagaagagtaccgactgctgtaccggtccggaattcccgggtcgacccacgcgtccgctggtactgtttttccaagacagaggcggatgagcaggccttggactttgccaaaagaactggccttgatgtggtaagcatttgcccttcccttgttctcgggccaattttacagtcaaccactgttaatgcaagtagcctggctctcctcaaacttttaaaaggtgtcaactcaatggagaataagatccgttggatagtcgatgtacgagatgtagctgatgcaatacttttggcttatgagaagcttgaggcagaagggagatacatatgccattcacataccatcaagacacgggatatgctggagaaactaaagagtatatatcccaactacaaataccctgcgaagtatactgaagtggatgattacataagtttcagctcagagaaactgcaaaggttgggttggaaatacaggtcactggaggaaacactcgntgattctggtgagagctatccggan

SEQ ID NO: 248401 - DNA, 544 bp, Glycine max
  unsure (1)..(544): unsure at all n locations
agggcctgtcgtgtatgtaggggggatggagtgctctaccggtccggaattcccgggtcgacccacgcgtccggagcgagcagtttcagacacagagagaggggtttgggattggagggattgacgctgcgtcggttcctcttctctttcgatccatccctaattcctaatcctccaatccaaccacctcagcctcacactcacatatacacatatctgaacgcgtatcgtccctcctatggcttcaaagcgcatcctcaaggagctcaaggacttgcagaaagacccaccaacttcttgcagcgctggtccagtagctgaggacatgttccattggcaagcaacaataatgggtcctgctgatagtccttatgctggaggtgtattcctagtcactattcacttccctccggattatcctttcaagcctnctaaggttgcctttaggactaaggtgtttcaccccgacatcaatagccatggtagcatttgtctggatatcctggaagagcagtggagccctgcactcaccatctctaaggac

SEQ ID NO: 248402 - DNA, 540 bp, Glycine max
  unsure (1)..(540): unsure at all n locations
agagggccgacatgacactgagaagcatcgtatgctctaccggtccggaattcccgggtcgacccacgcgtccgaacacaacaatgggagacgagaagaagggcaagccttgctgcttccggcgtgtggtccaccagcaagcctttcgtcaatggtggagcctccggcatgctcgccacctgcgtcattcaacccatcgatatgatcaaggtgaggattcaacttgggcaaggatcagctgcgcaagtcacttccaccatgcttaagaatgaaggttttgctgccttctataagggtctatctgctggattactcaggcaggctacatacaccactgcccgtcttgggtcatttaaaatcttgacggccaaagctattgaggctaatgatgggaagcccctgccactgtatcagaaagctctatgtgggctgactgctggtgctatcggagcaactgttggtagtccagcagatttggcactcattcggatgcangctgatgcaacattacctgctgctcagcggccgaattacactaat

SEQ ID NO: 248403 - DNA, 540 bp, Glycine max
  unsure (1)..(540): unsure at all n locations
agttggggnnnnnanaatgagctagtncgtaccgactgctcgtactcggtccggaattcccgggtcgacccacgcgtccgcccacgcgtccgcccacgcgtccgccgcggtagcggtggatatggtggtggtggtggcggcggcggatacggtggtcgtcgtgaaggtggatacaaccgtaatggtgggggtggaggtggaggatacggcggtggtagagaccgtggttacggtggtgatggtggttctcgctactctcgcggtggggaaggcggtggatccgatggaaactggagaaattaggcatatgaccctgtaaattagggtttatgattaagttcaattattttaaggtgttgtctgtgtgtggtttaagtttcggtatctgtgttggtttcgtttcgtgttcctgtggttttcgtttttgacctacaattctagttgtgtttatagtcgatcgaatgaaatgataataagaaattatcgcattaaatttctatggattttgctatctggttggtggactttggaaaaaaaaat

SEQ ID NO: 248404 - DNA, 477 bp, Glycine max
cctgaatttccgggtcgacccacgcgtccgctggaatcataattaataatccaacttattttgtctcattactatagtttctctagatggagtctagaactaagtcatgcgtagttctaccttttcttctattggttgcaattttcatgcaacaatgtgtccatggagaatcgcaagtgccctgcctttttgtctttggggactctctgtctgataacggaaataataacaaccttccaagcactacaaagtccaattacaaaccatatggcatcgacttcccaaccggcccaacaggacgatttacgaatggacaaacatctattgacctaattgctcaactactgggatttgagaatttcatcccaccctttgcaaacactagtggcttagacacacttaagggtgtgaactattcattcggagcagctgggattctaccagagagtggtacacatatgggtgccaacattaatt

SEQ ID NO: 248405 - DNA, 539 bp, Glycine max
  unsure (1)..(539): unsure at all n locations
gagcctgcgtgagtaagcgaatgnnagcactggcagtactcgtccggaattcccgggtcgacccatcgcgtccggcgcagattagtggcataattgcagccaatgtatgtgtgaatccttttgattatagtgacagtgttacttcaacaactcacaagagtcttcgaggtccaaggggaggcataattttttatcggaaaggtacaaagccttggaacagagggattcttctaagtcagggacatgaaagtgatcaatatgactttgaagaaaagataaattttgctgtttttccatcgatgcaaggggggccacactatatccacattgctgcgcttgctatagctttaaaacatgtggctactcctgagtataaggcatacatgcatcatgtgaagtagtatgcccaagctttatcatgtgctttactgagtagaaaatgccgtcttataactgggtggacatacaaccatttaatctttgggaattaagggccctgggattgacatgtaagttttattgaaaggtatttgtaacat

SEQ ID NO: 248406 - DNA, 541 bp, Glycine max
  unsure (1)..(541): unsure at all n locations
gcggttgcgtgagccctgangacatgtactgctcgtatccggtccggaattcccgggtcgacccacgcgtccgcgcaaactacaccactctatctctctcttcaattcaactccttcagctacagcgaaatcctggtctatccgtaaatcgtgccttgtctcttgtgcctgagaagccacttctctacttgcgttgagtgagggagaggatgtctggtggcacacagaagagtctgagaaaagcacttggagcccttaaggacaccacaacagtctcgttggctaaggtcaacagtgattacaaggaattggacattgctatagttagagccacaaatcatgttgaacgtccggctaaggaaaaacatataagagctatattttcagctatctcagctacaagacccatggctgatgttgcctatgggatccacgcacttgccaggcgggttatcaatgacacataactgggcggttgctttgaaaactttaattggtattcaccgggctttaaaggaaaggggtcctacatttcatgaaa

SEQ ID NO: 248407 - DNA, 189 bp, Glycine max
gggggggggggggggggggggggggggggggggggggggggggggggggggggggggggggggggggggggggggggggaggggggggggggggggggggggggggggggggggggggggggggggggggggggggggggggggggggggggggggggggggggggggggggggggggggagggggggg

SEQ ID NO: 248408 - DNA, 309 bp, Glycine max
attcccgggtcggccgacgcgtccgaaatcttaaaaatattcagtgaagatcaacttcaatggcatctcttggcgtgcgagcagttgttccccctccattaacgttccagtctccgacccacctcctcttttcgatggcaccaccaggttgtacatcagttattcttgcccctatgcacaacgtgtgtggatcgctaggaactacaaggggctacaagataagatcaatttggtccctattaaccttcaagacaggccagcttggtataaggagaaagtctaccctgaaaataaagtgccatccttgga

SEQ ID NO: 248409 - DNA, 355 bp, Glycine max
tctctttcaatccatgcctgattcctaatcctccaatccaaccacctcatcctcacactcacatatacacatatcttaactcatatcatccctcctatggcttcaaatctcatcctcaatgatctcaatgactttcacaaatacccaccaacttctttcatctcttgtccagtatcttattacatgttccattttcaatcaacaataattattcctgcttataatccttattctttatctgtattcctaatcactattcacttcccttcccattatcctttcaaaccttctaatgttacctttattactaatgtgtttcaccctaacatcaatatcaattgtaacatttttcttt

SEQ ID NO: 248410 - DNA, 372 bp, Glycine max
cttttcggcccacgcgtactgagcgagcagtttcatacacatagagaggtgtttgttattggagggattgactctgcatctggtccgcttctctttcgagccatccctcattcctaatcctccaatccaaccacctcatcctcacactcacatatacacatatctgaacgcgtatcgtccctcctatggcttcaaagcgcatcctcaatgagctcaatgacttgcagaaagacccaccaacttcttgcagcgctggtccagtagcttatgacatgttccattggcaagcaacaataatgggtcctgctgatagtccttatgcttgatgtgtattcctaatcactattcacttccctccggattatcctttca

SEQ ID NO: 248411 - DNA, 316 bp, Glycine max
gcccacgcgtccgagaagtttctgtttatcatttccatcgctacaaagaacatatagatctcgtggccagtttgaattgtgatgcctaccggttctcaatctcgtggtccagaatttttccaaatggaactggccaagtaaattgtaaaggtgtagcatactacaatatgctgatcaattacttgctagataaaggtattactccatatgcaaatctctaccattatgatcttcctttagcacttgaagagaggtacaacggattattgatccctcaagttgtgaatgattttgcaaattatgcataattttgttt

SEQ ID NO: 248412 - DNA, 294 bp, Glycine max
tccggaattcccgggtcgacccatcgcgtccgcccataactacgattatctagaaattagccgttgctactaggcaatatatgagattccatctgtcaaagaagacccttccaagtggattccaatcctaaggaaaatatgttggtacttggttctagcgccctatgatccaattcaatcaagctttctcaattccaccttggctgatttgaatctatctgagattccaaacttcaagctactcttgaaacagctggttaccatggaagttatccaatggacaactctatggga

SEQ ID NO: 248413 - DNA, 549 bp, Glycine max
  unsure (1)..(549): unsure at all n locations
gttaagaggctgactgtcgatgggaatggcatgcatagncntgcacgtactcggtccggaattcccgggtcgacccacgcgtccgtggtaaatcatttacaagcaaagtattgaaactaagaaaataggaaaactattaagatcatgggatattaggaaatattgaaactaagaaaataggaaatattaataactattaagatcataagattccatcattcactagcttaattatttatactaataactattaagatcataagatattaggaaatattgaaactaagaaaataggaaaactagttctacgagataatctctaacattccctaaaatattctatgacaaaatctaaacattattggatactgtaaataattntaagatactactataatataaaaatgtataaaatgcnaagcgatgtccacataggcagattcacatnattgcattaactttcaagaaattcgaatggatatggggtggtgtttaatctacatcatgtggcagccaggttggtaggctatgccctgttncttttttctn

SEQ ID NO: 248414 - DNA, 565 bp, Glycine max
  unsure (1)..(565): unsure at all n locations
aggntgcctgtgatgggggaggtaagagatgcatcaccggtccggaattcccgggtcgacccacgcgtccgcccacgcgtccgtgagtcttcaaaaagctcatatgatgaagaattccctggctgctgagatgcggatcagaaatagattttactgcagaatgcaacaagggtcactgatactgcacagttcatgaagatatatcggagtagagaagttggtcaatcatatataacctgcgtttggactacttttgttgcaatggtgcatgcgctatggctaatgattaaaattagacctgaagtgatactttgcaatggacctggaacttgcattcccctctgtgctattgcatttatatttaaggatcgtattcccttccttattcttctatcatttccataatttcatttatccacttcatttgataaattatggttctactgaaattgntcaagcttctgtgcaggtactgggaatcagatggtcattaattntctacgttgagagtatcgcangagtgagaaggctctncttgagaggnctgctcctgtacaggttgcgg

SEQ ID NO: 248415 - DNA, 562 bp, Glycine max
  unsure (1)..(562): unsure at all n locations
gtcgggntgaatggaggggatgtatggtatgctcaccggtccggaattcccgggtcgacccacgcgtccgcttgatggctactttggcaaacttggtgcaggaagcaatgcttatattttgggtggccaagacgaagcacagaactggcatgtctactctgcttctgcagattctgtaactcaatgtgacaatgtttacactcttgagatgtgcatgactggcctggatagagagaaagcacaggttttctacaaagaacaatctgcttcagctgccatgatgactgttaattccggcattagaaaaattcttccagattccgagatttgggactttgactttgaaccatgtggttattcaatgaactctgtttgaaagcactgttgttctacgattcatgttacccccagaagatgggttcagctattcaaactctggaaactgttggttatgacttcaaagctgtgaaattgaactaaaaaggtcataagggattgggcatggttcctgccaacttanttttccgtagcagttcatgtggatggtgcaagcaagcctttt

SEQ ID NO: 248416 - DNA, 554 bp, Glycine max
  unsure (1)..(554): unsure at all n locations
gtgcgatgctgctgcctttacaatgatactcttcgcatgcacgtaccggtccggaattcccgggtcgacccacgcgtccgcccacgcgtccgcccacgcgtccgctcatcctcctctgtctctctctctccaccatggccatggatccttacaagctccggccatccagcgccttcaattctcccttctggactacaaattctggtgctcctgtttggaacaacaactcctctttaaccgttggagctagaggtccaattctgcttgaggattatcatcttgtggagaagcttgcaaactttgacagggaacgtatcccagaacgtgttgtccatgccaggggagctagtgcaaagggtttctttgaggtcacacatgacatttctcacctgacatgtgcagatttccttcgagcccctggagttcagacgcctgtaattgttcgttctcaactgtcattcatgagcgtgggagcccttgaacccttgaggacccttcgggttttgcccgtgaagttttacaccagagagggtaactttgaaccttgttgaaan

SEQ ID NO: 248417 - DNA, 226 bp, Glycine max
ccggaattcccgggtcgacccacgcgtccgctttattggcctcaagctcgtcagacatactctccagagatcattgactatataaagtcactggatgctgatgaagatattgcccttttgaagttacatggatggaatctgccagttgaatgcgcgcgcactcttcaaaatctaaccatgcttctgaagaaaggagtgaagagagggatgaacccctttgccattg

SEQ ID NO: 248418 - DNA, 571 bp, Glycine max
  unsure (1)..(571): unsure at all n locations
ntgtatgtggtgtattgaagtgggagaggaaactgtattgcctgcaccggtccggaattcccgggtcgacccacgcgtccgctgctcgtgcctctagggttatcatatctccatttccatttcctctctctcagtttcgaagaaggttaagctatgggaaagtcttacccaaccgtgagcgctgattaccagaaggccgttgagaaggcgaagaagaagctcagaggcttcatcgctgagaagagatgcgctcctctaatgctccgtttggcatggcactctgctggaacttacgacgtgagctcgaagaccggtggtcccttcggaaccataaagcacccctccgaactcgctcacggtgctaacaacggtcttgacatcgctgttaggcttttggagccactcaaagcggagtttgctattttgagctacgccgatttctaccagttggctggcgttgntgccgttgaggtcaccggtggacctgaagttaccttccatcctgtaagagaggacatacctgagccaccaccagagggtcgcttgcccgatgccactaacggttctgacc

SEQ ID NO: 248419 - DNA, 183 bp, Glycine max
cggtcctaattcccgggtcgacccacgcgtccggccttggtcagcgttgagccaagctctacgaatctggcgcacgtattgccaaatggcgtgcagggctgaagaatgggcccaacgagccatttgaactgtctatccatgaaaacggctattgcttgggttgatacgctgtcatatgccatg

SEQ ID NO: 248420 - DNA, 557 bp, Glycine max
  unsure (1)..(557): unsure at all n locations
agtgctgctgctttcgcctgggangctgnctacgatcgcatgctcctaccggtccggaattgccgggtcgacccacgcgtccgagcagttgtggcttcgcaagactatcctgaaattacaaagtatgctggtttaggtggtgcccagagctcataggcaggaactcatccaggatcttttcaaacaatggcaagatccagtcagaggaacagtgactggtggaatgatcaaggaacttcttatatcttttaggagagctacaggacaaatgccacaacgcatcatattttatagggatggtgttagtgagggtcaattttatcaggttctactgtttgagcttgatgctattcgaaaggcatgtgcatccctggaacccaactatcagcctcctgtgacttttgtggtggttcaaaagcgtcaccacacaaggctctttgccagcaaccatcacgataagagttcttttgacaggagtggcaacatattgcctggtactgttgttgactccaaaaattgccatcccaccgaatttgacttttatctcttgagccatg

SEQ ID NO: 248421 - DNA, 563 bp, Glycine max
  unsure (1)..(563): unsure at all n locations
tacgatcctgagtccatttggngctacngtgcctgtacttcccctccggtccggaattgccgggtcgacccacgcgtccgggccttcacgccggaagaggacgtgaccataattagggcccatgctcggttcggtgacaagtgggccaccatagcccggctcctctcgggccgcaccgataacgccatcaagaatcactggaactcaacgcttaaacgcaagtgcgcgtccttcatgaccgccgatgaagccgccgccggcggcttcagcccgaggccgctcaagcgatcgttcagcgccggcacggcggtgcctcctccaggaagcccctcaggatccgacgtgagcgagtccagcgctgctcccggcgtggtctctgtctctgtctctccttcacaagtgtttcgccccgtgccggttcggccggttgtcgaaacggcgtcgttgcaagacgacgccgatgccgactccgaggatgctggacctactacctcgctgtcgctggctctttccggggtggagttattcggaaatctctaatttcaccttgacggatcccgttn

SEQ ID NO: 248422 - DNA, 456 bp, Glycine max
cggaattcccgggtcgacccacgcgtccgcccacgcgtccgcccacgcgtccgcagtttctgcagcctggatcaacaaatcggtacacacatgcaatgatgtggaaaggagggaaggattggatcttggaatttccggataggagtcagtgggctcttttcaaggagatgcatgaggaatgctacaaccgtaacatccgttctgcttcagttagaaacatacctattcctggtgttcatttgatagaagaaaatgatgataatggatctgaggaaacttttattcggagctgtatgtactttcaacaagttgaagcagatgctgagatggctttggatccatgccgtgttctgtatgacatggatagtgaggatgagcagtggatttcaaatgctcaaaattctcgtaaagacaacagtgaattttcttggatctctgaggagatgtttgagaaga

SEQ ID NO: 248423 - DNA, 571 bp, Glycine max
  unsure (1)..(571): unsure at all n locations
aggtgctagatcccacttccgacngtacgtacctaccgctccggaattcccgggtcgacccacgcgtccgatggaatatccacacaatgctgttcttcttctttgttcttctcatgacaagggttgccgtcccgatatgggtggaactagctttcgtcattctaactgtcttgatcagtacaagaaagcttatactaaagtaatttcacctaataagcaacctatgcaaggcactccaggtgtgctacaagattcaaacttgcctcttgagaagagtgaagccacagagcttgcatggtctctatgcaagggtcaggtgaaaggttggactgttgtggaacctgttcgggactatctgaatgcaaagaaaaaaggctgcatgcaggatgactgcttgaatgttggaagctataaggagttgaagaaccatgtgcgggcagagcattcgtcgggaccggccacggatggtggatcctgctgatgaacagaaatgganatggctcgagtgggaacgtaaagagaagatgtattagcccagttccataagcattgcctggggcagtagtttttg

SEQ ID NO: 248424 - DNA, 307 bp, Glycine max
ataaatatgtttaattgaaattcaattttatatactgcactgcaatgtcttccacatcgctaggagttgcaatgacatcggccatgacatctgcactatccataccaatatactatgcattactcgatcataatctaccatcaatgcactaacttgtggactacaatctaacaaattccatatcttcaatgcgtatatactatccagattaacaaacactttacgcccttatagattcactcttccattatattctcaacgtttctaacgaaacccattcatcaatgacagacccctttgctgctac

SEQ ID NO: 248425 - DNA, 569 bp, Glycine max
  unsure (1)..(569): unsure at all n locations
tagcagcgctgngccatccgaacacaggactgcactgattaccggtccggaattcccgggtcgacccacgcgtccggccacgcgttcgcacgccaaggcgtttaaggatgggagaaaaacacagcaacaacaacgtgatgagcagcaacaacaacaacagcaacatcaaccttcggtggacgagaaatacacgcagtggaagtcccttgttcctgtcctctacgactggctcgccaaccacaacctcgtctggccctctctctcttgccggtggggccctcagcttgaacaagccacttacaagaatcgtcaaagactctacctttctgagcagactgatggtagcgtgccgaatactctggtgattgcaaattgcgaggttgtgaagcctacggttgcagctgcagaacacatttcgcagtttaatgaagaggcacggtccccatttgagaagaagtacaagaccatcatacatcctggcgaggtgaacagaattagggaattgccacanaattcccagatagtggctacacatacagacagcccttgatgtcctgtttgggatgnta

SEQ ID NO: 248426 - DNA, 552 bp, Glycine max
agtgcatgtgctgtgcctgcacctctagctctcatcgcactgactaccggtccggaattcccgggtcgacccacgcgtccgccggagatgacgccggcgatcgcgagtgggatctcacacgccgccgccttaaacaggagtggcgtcagccggcgccggattccacgtgacacggaggagcaccggcgcgtgggtggactgtcactggcgtttgaagctccggctagtggctcgtcgccgaggatggtgcaccagtttcgggcgcgtgaggagatgacgtcgacgccgcgagggcgccacatggcgacgtcggcgccggtgaacgtgccggactggagcaagatactccgagtcgactcggtcgagtcgataaacgacgaggacggggacgaatcggaaatgatgccaccgcatgaatacttggcgcgtagccagaagatggtggctaactcggtgtttgaaggagtgggccgcacgttgaagggccgcgacttgagccgggttcgtgacgccgtgtggaaccagaccgggttcgacggttaacacctcggt

SEQ ID NO: 248427 - DNA, 575 bp, Glycine max
  unsure (1)..(575): unsure at all n locations
cgttgtggctgctagtcccctgccctgttngtacatactcaccgctccggaattcccgggtcgacccacgcgtccgatttccacgcgcctctcttcctcttcacgccgtcaccattatcgatctgatctgtacgcggaggagagtgaagggaacgatgatttcagggcggagtttctatgccctttctgcgccgaggattacgacgtcgtttccctctgttgccacattgacgaccaccaccctatccaagccaaatacggggtgtgtcccatttgtgggaagaaggttggagtggatcttggtggacattttactactcaacatgggaacttcttgagggtgcagcgcataaggagggtcaagtaaggaggctctgcttcaacaatttctatatcgagaacagggttacaagaaggagccttgcattcccttctttgaggttcttcatacttagctttctcaaattcctagctcgatcctctggtatcatcatttatgtctaacctcagtgtaactgattagtctgtgagtgctacaccttcttcactgtaaatgcctaattaaggaatgtcta

SEQ ID NO: 248428 - DNA, 578 bp, Glycine max
  unsure (1)..(578): unsure at all n locations
gaggagcggctgttgatgccttcaccgctcgcctangccactgacgtaccggtccggaattcccgggtcgacccacgcgtccgcggccttgctagtggtgtcacaggtattgctgttcttggcagaactaaagtttccctggcttcgcgatcactctcaacttgcaactgtcttagaaaattccccatttgcttgagttctttcactatgacaaatggtgtcatgttctttcgtgatgggccttataaatctggttatttggactctgatctcttcaaagttgtcactttcacgcctctcattacaaatactgttaacactgctccaagttattttcaaggggaaccctcagtagaatacttcattggggtgaaatccattagagtctctgaccaaaatgtaccattgaacacaacccttttggctataaatagcaatggcattggtgggactaacaatagtactgntaatccatacactgtcttggagaccacaatttacaaagctgtgtctgaggcctttgtaaaagcaatagagcccctacagttgcacctgttgcttctttttggacttgcttt

SEQ ID NO: 248429 - DNA, 573 bp, Glycine max
  unsure (1)..(573): unsure at all n locations
ngaacggctgagcacgagggaggaggatagtagtgctgcccggtccggaattcccgggtcgacccacgcgtacgcttaaacaataatcataatgggactgagtaagtatttgaatatcttcttctaaacaaaggtattctaaaaaaatatattagaaaattaattatttataataaatccatatttataaatatatcattataaatgaaagaaatcaacatattagattatactataaatcatgaaataaatatctgtataaatctcaccatggaataaatatcttgaaatatgtagtataattgataaactattatttttcctcttacggagcaagttgatccgtgagaggaacaataagcctgggcacttttgccatgtctgtagaaagctgggtgcacctagcgacagtctccaaacaaagcaatgatgactacaaggtgtagctgagtcgccagcttgggttgaatttgatctagagtatgattcaacgccaagtcaatgtaagaagcactgaatagggcagaatggtctacaagacgaatgaaatctaacccaaaatcaatcggtccc

SEQ ID NO: 248430 - DNA, 553 bp, Glycine max
  unsure (1)..(553): unsure at all n locations
agtgctagtgctgcgactanactctagctcagtaccgcatgcacttaccggtcctgaattcccgggtcgacccacgcgtccgcccacgcgtccgcccacgcgtccgatcctgcatggcttcctcttctctgtttcaggctctccggttctctctccaaacctctaaaccctacgcgcctcccaaacccgccgcccacttcgttgtccgcgcccaatcccccctcactcagaacaacaactcctcctgcaagcatcgccgccccgccgacgagaacatccgcgacgaggcccgccgcatcaatgcgccccacgaccaccacctcttctcggccaagtacgtccccttcaacgccgactcctcctcctcctcctccacggagtcctactcgctcgacgagatcgtctaccgctcccaatccggcggcctcctggacgtccagcacgacatggatgccctcaagcgtttcgacggcgagtactggcgcaacctcttcgactcgcgcgtgggcaaaaccacctggccttacggctccggcgtctggagcaaaaaaga

SEQ ID NO: 248431 - DNA, 547 bp, Glycine max
  unsure (1)..(547): unsure at all n locations
aggcgagtgccgaactagactcagctaccctccgcactgacgtaccggtccggaattcccgggtcgacccacgcgtccgcccacgcgtccgggtgggggcagtgttgggctgatgggcttaatatctcagagagtgtatgatggaggctgccatgtcctagggatcattccaaaagctctcatgcctctcgagatatctggtgaaacagtaggtgaagtgaggattgtttcagatatgcacgagcgtaaggctgcaatggcacaagaagctgatgcatttgttgctctccctggaggatatggaaccatggaagagctgttggagatgataacttgggcccaacttggaatccataaaaaaccggttggtctactgaatgttgacggttactataactgtntgctngcattatttgacaatggtgttaaagaaggtttcattaagccttgtgcacggaatatagttgtctctgctacgtcagccaaagaacttatgatgaaaatggagcactacactccttcgcacgaacatgttgcccctcataag

SEQ ID NO: 248432 - DNA, 573 bp, Glycine max
  unsure (1)..(573): unsure at all n locations
ngatatgggctgtatgttggggggatagtgaaatgtcacccctccggaattcccgggtcgacccacgcgtccgaatcaatcacatttcaaaggcatgttttttcaacaaagttcattctacccacgagtcgattcagcanacccagacgctaattctcccttctctatccncgcaccatcttcttcttcttcttccatttatccctcagtggagacaacagagaatctcatttgggaagagccaaacacgactacagaagaagccatggaaaacgttctggtcacggtcccgggtgcgattctgcatctgatagaaaaggattccagcgtgcaccttgcttcgggcgacctcaccatatcgaccctcggagaatgcgacaaagtggtggcggttctggcatgcgtcggcgatcaggttcagtggccgttggcgaaagacgtgtcggcggtgaagctggatgagtcgcactacttcttcacggtccaagtcccacaggagcacggggaggagaagggattcgaggtgttgaattacggtttaacggtggcggcgaaaggacaaganagggtgct

SEQ ID NO: 248433 - DNA, 566 bp, Glycine max
  unsure (1)..(566): unsure at all n locations
agattggctgagatggagtgagttgtattgtatgactcaccggtccggaattcccgggtcgacccacgcgtccgcatttctccatttccattttctctctcacttttcaagaatcgtaagctatgggaaaggcttacgcaactgtgagtgctgattaccagaaggccgttgagaaggcgaagaagaagctcagaggcttcatcgctgagaagagatgcgctcctctaatgctccgtttggcatggcactctgctggaacctttgacaagggcacgaagaccggtggacccttcggaaccatcaagcaccctgccgaactggctcacagcgctaacaacggtcttgacatcgctgttaggcttttggagccactcaaggcggagttccctattttgagctacgccgatttctaccaantggctggcgtttgtgcgcgtgaggtcacgggttgaccttgaagttcaattcaccctggaagagaggacaagcctgaagcaaccacagaaggtcgcttgcccgattgcacttaggggtcttgacatttgagagatgtgttgggcaaacta

SEQ ID NO: 248434 - DNA, 566 bp, Glycine max
agagtcagttgctatcgcttaggactcacgcacataccgcactgacttaccggtcctgaattcccgggtcgacccacgcgtccggttttattgtgccaatttctagagatgatataattatattatgatcgcgcgtgctggtaatgcgtgggttaaaaaaaaaaaaaaaaaaaaaaaaaaaaaaaaaaaaaaaaaaaaaaaaaaaaaaaaaaaaaaaaaaaaaaaaaaaaaaaaaaaaaaaaaaaaaaaaaaaaaaaaaaaaaaaaaaacaaaaaaaaaaaaaaaataaacggacaaaaattaatatgcatagcatcaataaaaaaaagactaactaagaatagcatcgatggatacgaatatatatacagtgggtggaaatattaaaaaagattttacgtacataaagacacaagcggaaagtgcatacatcaagcgatttttggagtaacatattgcacaacattttttaaaaggagtgtattatggaagtgtacctaataaataatgatttactatgtaagcaaaaattatttaaaatggagcagctcaataagatcaatatt

SEQ ID NO: 248435 - DNA, 490 bp, Glycine max
  unsure (1)..(490): unsure at all n locations
ccggaattcccgggtcgacccacgcgtccgggcgaaggagatagtgaaagagcttcttcctctaattcgagtgtacaaggatggcagcgtggagcgtcttctaagctctgaaaacgtggcagcctnccctgaagatccccaaactggagtctcatccaaagacatagtcatcgcagacaacccctacgtctccgctcgcattttccttcccaaaatcccaccacactaacaacaaactccccatcttcctctacttccacggtggcgccttttgcgtcgaatccgccttctcctttttcgtccaccgctatctcaacatcttggcctcagaagccaacataatagccatctncgtcgacttcagactnctcccacaacaccctatccctgctgnctacgaagaccgntggaccaccctcaaatggattgcttcccacgccaacaacaccaacaccaccaacccggagccatggctactcaaccacgccga

SEQ ID NO: 248436 - DNA, 569 bp, Glycine max
tgtatggctgccatggatggaggaagtatgtgatgcactcaccggtccggaattcccgggtcgacccacgcgtccggatagttcgttgcatgcaaccatagttttattaggattttttcttctttgttttcaatgaggttgttttgttgctctccttcaaactccatctttccaaatcctctctttgcgattgtgttttgatctgcttcctactgcgatagtttctctactgttacatggccatggcggtttccgcaattggttttgaaagtttcgagaaaaggttggaaatatcctttttccagccgggactttttgctgacccttgaagaaagggtctaaaggctcttacaaaatcccagttgggtgagattctaacaccagctggttgcaccattggttctttcgtcaaaaacgattatgtccacttccatggtctatctgagttccacctttttggttatggcttacagaatcttattcaaaccttgggtacttcctaactattggtttgcaatccaaccctatttgaagtcgcttgaattgctttcctttatgggtaagctgtg

SEQ ID NO: 248437 - DNA, 393 bp, Glycine max
tactcgtcctgaattccctggtcgacccacgcgtccgcggactcgtacgcccacgcgtactgttacgcttccgaaaaaaaaaaaaaaaaaaaaatggaaaggttaaaaaaactaatatgaaaatgaatatattaaaaaatcaaattatttttaaattaattaattttatacattataattgaatatcataataatctaaaattttatacatgtcaatattgatcaacaaatattaaacgtattgacacactgtattaattacaactactatttattccactatatcatattgttaaaatgtattaattattgacatttagctatattaaaaaccaaacttatcatagaacaaatggtttaatgtttttttcaatgttttaacactattgacac

SEQ ID NO: 248438 - DNA, 560 bp, Glycine max
aggccagtgtgctattaacgtggcacacgctatgtgatcattgactcaccggtcctgaattcccgggtcgacccacgcgtccgctccttctcaaactagtagtattattcttccattcataatgggtgttttcacattcgaggatgaaatcaactcccctgtggctcctgctactctttacaaggccctagttacagatgccgacaacgtcatcccaaaggctcttgattccttcaagagtgttgaaaacgttgagggaaatggtggcccaggaaccatcaagaagatcactttccttgaggatggagaaaccaagtttgtgctgcacaaaatagaaagcattgatgaggcgaacttgggatacagctacagcgtggttgggggtgctgcattgccagacacggcggagaagatcacattcgactccaaattggttgctggtcccaatggagggtctgctgggaagctcactgtcaaatacgaaacaaaaggagatgcttagcccaaccaagacgaactcaaaacttggaaaagccaaagttgatgctttcttcaggccg

SEQ ID NO: 248439 - DNA, 461 bp, Glycine max
  unsure (1)..(461): unsure at all n locations
cggaattcccgggtcgacccacgcgtccgcttcaatcagttgactcttcgttcctccctctattctttcggatggagcccatggacatcgtggggaaggccaaggaagacgcttctcttcctaaagcgacaatgacgaaaattattaaagagatgttgcccccggacgtgcgtgtcgccagagatgcacaggatttattgatcgagtgttgtgtcgagtntataaaccttgtctcgtcagagtccaatgaagtctgtaacanagaaganaggaagacgattgcaccggagcacgtgttaaagggcttaggggttcttggatttggcgagtacattgaggaagtttatgcagcatatgaacaacacaagttggaaacaatgcaaagatctttaaaaggtgcaaagtggagcaacagagctgagatgactgaggaagaagcattggctgaacagccaaagatg

SEQ ID NO: 248440 - DNA, 560 bp, Glycine max
  unsure (1)..(560): unsure at all n locations
agtgcagtggctgtccagtcgcatccgcctacctaccgcatgcacttaccggtccggaattcccgggtcgacccacgcgtccggattgagctagtgtccagggttagtttcaaacattaattatttcgatgttgactaggctagtgggcatattgtaatcaagagtgttgatgctgaattagctgatgaggccgggaaatcagtgccacttcatgaatattatcttgacaattgggctatagtaagaaaccatcaatcccaaaatgtgtcacagattaatgaaacagatcatattgttatagtgagaagcagtggcttttgccaagactgttagatcgaccaagagtttcagattggatctgatactggacttactgaaactgatgttgcatactctgttggaatggtagatgacaacaactcgggaagtatntatggatttaagtgaacatgattgccaaatgaccttcacattgaaccagggattcgtgagaaacatacttaggttagcaatgagagtattgaccgaccttattatggtacaattggattctggaaga

SEQ ID NO: 248441 - DNA, 385 bp, Glycine max
gaattcccgggtcgacccacgcgtccgcccacgcgtccgcccacgcgtccgcccacgcgttcgcacaaacatggacgcatcaaaactcaagcaattgaagcatttcatcgaacagtgcaagtccaacccttccctcctcgctgatccttcactctccttcttccgcgactatcttcaaagtctcggcgcgaaacttcctgagtctgcttattccgaatcgacgggcgtggagagggatgaggacatagaggatcttacggaggagcacgagaaggtagaagaagaagaagaagaagaggacgatgtaattattgaatccgatgttgagcttgagggtgaaacctgtgagcctgatgatgatcctccacagaagatgggagacccc

SEQ ID NO: 248442 - DNA, 573 bp, Glycine max
  unsure (1)..(573): unsure at all n locations
cggagacgtcntgtcatagattgtattgtactactcaccgctccggaattcccgggtcgacccacgcgtccgaattaatgccccagctgaggacaccattcttcctctaccccatgttgtgcatgtgaatacagctggggctgcacctcctccttctggtctttccggcatgtctgaacgtggatttcgtgtcacacacacttatggtctctcagaaacctatggcccctctgtctactgtgcctggaaaccagaatgggaatcacttccccctgaaaaccaagcccggctcaatgcaagacaaggtgttaggtacattggcttggaaggcctggctgttgtgaacacaaaaaccatggaacctgttcctgctgatggtaaaactgttggtgagattgtgatgcggggtaattctgtgatgaaaggctacttaaagaaccctaaggctaacgaggagacctttgcaaatggatggtttcattctggggatcttgctgtgaagcacccagatggatatatagaaattaaagacagatcaaaggacatcataatctctggtgctgaaaatatcan

SEQ ID NO: 248443 - DNA, 371 bp, Glycine max
ggtcctgagttccagccacgcgtccgaccacgcgtccggacgaattggaacccaagaatgttgcgccgtcgtcgttgtaagattacgaaggaggatgagcatgatgttgttgttgagaaggtcgtacgtaacaagcgaaagtgcatcaccactgcgaagggactggaactttttggtgtcaagctcagtgatgcttgcaagaaactcgggaaaaagtttgctactggagcctctgttgtcaagggacctactgagaaagaacaaattgatgttcaaggggatatagcttatgatgttgtggagttcattacagatacatggcctgatgttcctgaaacatcaatgttatatatagaagatgggagaaaggt

SEQ ID NO: 248444 - DNA, 430 bp, Glycine max
gtcctgaattcccgggtcgacccacgcgtccgctttgttgctcaagaagttgtggtgcaaactgaggcaaagacttgcgagaacctggctgatacgtacaggggtccatgcttcaccactggcagctgcgatgatcactgcaagaacaaagagcacttgctcagaggcagatgcagggacgattttcgctgttggtgcaccaaaaactgttaaatggatccattcactccaacgtgaagaagatgcatgcagcgctattttataaaaaataaaactactatatactatatataataagactggcgctgcatcaatgacctatgtattatagtatatattattaccgatgtcagaactatagatgcatgtactgtgcataacggctgagtaatgtacttatgttaagaataaaataaagtgctcgtgttgc

SEQ ID NO: 248445 - DNA, 557 bp, Glycine max
cgagcgattgctagagccacgatcatcacgtatgcactcaccggtccggaattcccgggtcgacccacgcgtccgcccacgcgtccgaaatgattgagaagagagcgaagaaaaaaaacagagccaaaccaaaccccaccgtccccgaaacggttcgttttgcccttcttcggaaccctcccttccgcgccgctgctgctgctccggtcgccgtcggcgattctccggtaaccgaacaccatcgatccgtcaggagcctcggatctcggatctgagcgaaacgaatcgaaacgaaacgaaacgatgccgtctcatgcggatctggaccggcagatcgagcatctgatggagtgcaagcctctgccggaagccgatgtgaaggcgctgtgcgatcaggcgagagcgattctcgtggaggagtggaacgttcagccggtgaagtgccccgtcaccatctgcggcgacattcaacggcaggtctacgatctcatcgagccctttcggataggaggaacgcttccgattctattacctctttattggccaatatgtaaaat

SEQ ID NO: 248446 - DNA, 560 bp, Glycine max
  unsure (1)..(560): unsure at all n locations
tgtatgccagggtgctgtgccagcnacctcaagtacgcctcaccggtccggaattcccgggtcgacccacgcgtccgcagaaagtggagaagaaaaagatggagaaaatagagcacaaaacggtgaggacgaatggaataaacatgcacgtggcatccattgggtcaggcccagttgtactgttcctccacggcttcccggagctttggtacacgtggcgccaccagcttctgtccctctccgccgtgggctaccgggccatcgcccccgacctccgcggctacggcgacaccgacgccccgcccgacgcttcctcgtactccgccctccacatcgtcgccgacctcgtcgggcttctcgacgctttgggaatcgagcgagtttttctggtgggccatgactggggagcctccatagcctggcatttctgcttgctgaggcccgatcgtgtgaaggccctcgtcaacatgagcgtcgtggttcgcccagaaacccctattgaaagccatttagaggcctagggcatcatggccacgatactatatttgcaggttcagaan

SEQ ID NO: 248447 - DNA, 568 bp, Glycine max
  unsure (1)..(568): unsure at all n locations
agatgcgattgctagatgnccaaaacccttcaactcgcatcgacggtcctgaattcccgggtcgacccacgcgtccgaaaaaaaaaaaaaaaaaaaaagaaaaaaaaaaatttaaaaaaaaacagagaaaacaaaaaaaaatgaagatacaggaaaaattaaataaggacaaaaaaaaaaaaaataaaaataaaaggggttgccgcaacaaaggtccaaattttacgtacccgattatgcaactctttatctattcataagggtccctaaatttcaataaactggcctacttttaacaacgtcacaactggaaaacccctgtatgctcccaactaaatatccttgcagaacatcacctttttccaaactgtcttaaaatccaataggcccgtaccgatcgccattcctaaagattccccatcctaaatgcctaatggtacgctcctgttaactggcattaaaaccccggggatcttgagcgtaacgctccagggaaccaatacattttccagagcccattcgcaatctttatttccattattttccttaatttattccacaatttgcc

SEQ ID NO: 248448 - DNA, 563 bp, Glycine max
aggagtcagatgcgtgtgcctttacctcactcatcagcaaccggtccggaattcccgggtcgacccacgcgtccgggaatctagtccaattcctttcacaaatgcaacgtactacagggttggattttatggtgttagagttgggaaacttgataaaaaggagtatgtatatcgtgagcctcgtgatgtacgtctaggtgacataatggaaaaacttagtcacacatacgagtctagaatggatggtaatcacactttgcatattattccagattctagacaagtgaaggcagaggagttgcagcctggtgtctgttaccttcagattactgccgttgatccagtaatggaagatgaggatttaggaagtaggagagaaagaattttctctctctctactggaagcgtccgagcccgcgtatttgaccgattcttgtttgacaccccatttaccaaaaatggcaagactcaaggttggatggaaggatcaatggaggagacgcactggtcttcggacttgaggttctttttcttgcttaagtaatagggtattggtaatcaaa

SEQ ID NO: 248449 - DNA, 561 bp, Glycine max
  unsure (1)..(561): unsure at all n locations
agagcgggtgctcgaggccaaaagnngcatgnagtactngtactttncntaccggtcctgaattcccgggtcgacccacgcgtccgagagaatagagtgagagaaagagattcatgaacaaaaccagagatgggaaggctatgggaactggaggaacaagcctgctctcagtggctgcaatggtggcatgcttgctgcctcctttgtattagtggttgagatattggagaatctggcatttctagccaatgcaagcaattcggtgctgtatctgaggcagtacatgcacatgtacgcttcaaaatctgccaacaatgtcacaaatttcatgggaacagtcttcctccttgcccttcttggacgtttcttatctgatgcttttttcaccacttatcacatctacctgataagtgcagtcattgaattcctggtatgcaccctatattaattttcatctctctctgtgtcactacttgcgaatataacacttaatttaaattctttcagcatattacataatatgtcattcttaatggccagatgttaaattttttaatagaa

SEQ ID NO: 248450 - DNA, 561 bp, Glycine max
agttgggaggtcttcctaccgatgacagttgattcctgtatgacctaccggtccggaattcccgggtcgactcacgcgtccgaccacgcgtactgtgggatgaaaagtccacccgtttgacaaactgtgatcctcatggggaacacgcagttgtcaattgtaacaatcctcaagaggtagaagataacagagaaattatcttcacatatgatgttgatttccaggagagtaatgtgaagtgggcttcaagatgggatgcctatttgctgatgagtgatgaccaaattcactggttctcaattgtgaactcattgatgattgttctctttctttcgggcatggtagcaatgataatgctgcgtacactttaccgtgatatttcaaagtacaatgagttagagacccaatacgaagcacatgaagagactgttttgaagcttgtccatggtgatgtttttaggccatcaaacaactcatatatgcatgtggtttatgtaggaacttgtgttcaattttatggatgatttttatgacaaaggtgattgctgtccttgggttacg

SEQ ID NO: 248451 - DNA, 559 bp, Glycine max
  unsure (1)..(559): unsure at all n locations
ggggcgggtgctgtcaactgagtactacganatcccatcgcactgacttaccggtccggaattcccgggtcgacccacgcgtccgccgactcaagcccccatgttgaacggataattagttgcaattgcaaaagattgtgattgttgggattgcagagagaagggtggttagtgttagaatagattgagtgtggatggggaaagaggaggaggagatgaggggtgagattgaggaacgactgataaatgaagagtacaagatatggaagaagaacagtcctttcttgtatgatctggtcattatgcatgccctcgagtggccttctctcactgtggagtggcttcctgaccgccacgaaccacctggcaaagactattccctccagaaggtcatcttgggcacccacacttctgagaatgagcccaattacctcatgctggcccaagtccaactccctcttgatgatgctgagaatgatgcccgccactatgacgatgatcgccccgacattggtggctttggctgcgccaatggcaggttcagatcattcagcagatn

SEQ ID NO: 248452 - DNA, 565 bp, Glycine max
tgtatgcagggtgctatgctaggagttcagttactcatcgtactgcacgtaccggtccggaattcccgggtcgacccacgcgtccgcgctctcaacctcaaagggcttaaatacgaatacaagcccgtcaatctgctcaagggagaacagtctcgccctgagtttctccagctcaatcctgttggttgtgtccccgttctagtggatgaccacgttgttctctatgactctttcgccattattatgtatttggaagataagtatcctcacaatcctttgctccctcatgatatttacaagagagcaatcaatttccaggctgctagtgttgtttcctcaacaatacaacctcttcataacttgagtttactgaactacattggggagaaagttggccctgatgaaaaacttccttgggcccaaagtataattagaagaggctttaaagcactggaaaagctattgaaagaccacacaggaagatatgcaactggagatgaagttttcctggcagatattattttagcacctcagttacatgcagcatttaggagattcaacattc

SEQ ID NO: 248453 - DNA, 556 bp, Glycine max
tgtgcgatgctgatccatgcccagtcgcatccactcactcggtccggaattcccgggtcgacccacgcgtccgcggccagccgacaatcacgggaggttatgtggtgtccctccacttttatatacacaacaacaacggcacacatactagtcatttgttgttgtgttctcctttcattaaggttgtgttgtgtttgttgggcttcgttactgtactttggtttcattattatggcgccgtcttcttcagcttctgcttctcgtgagggacactacagaggggttaggaagcgaccatggtgacgctacgccgcagaaataagagacccatggaagaagacacgtgtctggctgggcacattcgatactcccgaggagggccgccttggcctacgatgggcgcggcccgctccttccggggtgccaaatgtcaagaccaactttcctccggcgccgcccttttgctctgacttaaacgttctttcttccgattaccgttggccctaacaggtcccccccgggagcctcgtcctcagggactttttctacaccgccg

SEQ ID NO: 248454 - DNA, 550 bp, Glycine max
  unsure (1)..(550): unsure at all n locations
agtgcgatggtgacaatgcacatgaagcatccactcaccggtccggaattcccgggtcgacccacgcgtccggcttgaggccacgatcagtggcttgagggatgatgttgcaaagaacgcttcgattgttgaggatgtggagagggacttagctgttagggatcagaggctgaacgaggtttcggagaatttgagtaaggagcaaagcgaggctttgcagttgaaggagttcgttgctgagtgtgaggagaagttgagtaacttggaatctcggatggaatcgcaaaggcctttgttgattgatcagttgagttttgtttccaaaattcataaccagatatgcaatgttgttaagatacttgatgacggtggcacctcggagctgtctgaatcgttgtttgtcccgcaagaaacagacgttgaggagaatattcgtgcctctttggctgggatggagtccatatatgagttgaccaagaatggtgttcagaaagcttaggatgtgcttgangagaangatcgtgagatttagaagttagattagacggtg

SEQ ID NO: 248455 - DNA, 543 bp, Glycine max
  unsure (1)..(543): unsure at all n locations
aggccggggcgtgccatagatctataagaaactcatcgccggtccggaattcccgggtcgacccacgcgtccgtgagagcatacctgtcgggacccgaaagatggtgaactatgcctgagcggggcgaagccagaggaaactctggtggaggcccgcagcgatactgacgtgcaaatcgttcgtctgacttgggtataggggcgaaagactaatcgaaccgtctagtagctggttccctccgaagtttccctcaggatagctggagcccgcgggcgagttctatcgggtaaagccaatgattagaggcatcgggggcgcaacgccctcgacctattctcaaactttaaataggtaggacggtgcggctgctctgttgagccgcgccatggaatcgagagctccaagtgggccatttttggtagcagaactggcgatgncggatgaaccggaagctggttacggtgcccactgcgcgctacctagacccacaaagggtgtggtcgattaaacagcngacgtggtcatggaatgaaaatcgctaa

SEQ ID NO: 248456 - DNA, 561 bp, Glycine max
  unsure (1)..(561): unsure at all n locations
tggccagatggctaccgactgagactaaagaccacgtacgcactgacttaccggtccggaattcccgggtcgacccacgcgtccgataaatcttccctttttgtgtcacaaccatgggttgttgtatgagtaaaaaagggtcagagccagaagaacacattgtttacagacatgttgcgggtgctgggggtgctggtgtgtacaataatcacaagagccatgaacccccttctcatcaaccttacccattacctgagaagcatgccccttggaggcctccaccaagcccaaaacatgttcacaagcatgacacaatcactgggaagccatttgaggatgttaaacagcactacacacttgggaaggaattggggagaggccaattcggggtgacttatctctgcactgagaattcaactggttttcagtatgcctgcaagtccatttcaaagaggaagcttgtgagcagagacgacaaggaggacatgaagagggggattcanatcatgcaacatttgagtggacaatncaacaatggggagttcaaggtgctttttgagg

SEQ ID NO: 248457 - DNA, 553 bp, Glycine max
  unsure (1)..(553): unsure at all n locations
nagatgcgatgctantcctggactatccgacatgtactgcatgcacttaccggtccggaattcccgggtcgacccacgcgtccgcaattcttatatataaacccctttcgagatctgcttcaagctctgtccccttcttgcacttccgcgctcctctcaggtttttgtggataagagtgagctataatggctgccaggagaccgggtttaattgctttgtttgatgttgacgggactcttacagctcccaggaaggtggtcacaccggaaatgttgacattcatgcaagaactacgaaaggttgtaacggttggagttgttgggggttctgaccttataaagatatcagagcaacttggcagcacagttaccaatgagtatgattacgtattttctgagaatgggtctgtggctcacagggaaggaaggctcattggactcanagcttgaagtcattccntggtgaagaaaagctcagggagttattaactttacactcattatattgctgatttggacatccccataagaggggaacattatggagttccga

SEQ ID NO: 248458 - DNA, 552 bp, Glycine max
  unsure (1)..(552): unsure at all n locations
tgagcccagtgctgatctcgcatctaaagtattcgtgcccggtccggaattcccgggtcgacccacgcgtccggatcgatcaagcatcagggagctttgagggttgattctctggtgtagtagcaatcagcacaatggaaaatgttttttgacggatatggatatcatgggacatcatttgagcagatatatcgatgctacccagcttcctttattgaaaagccccaaatcgaaagtggtgacaaaattatcatgcctccatcagcccttgaccgtctagcatctctgcatattgattacccaatgttgtttgaactccgtaatgatgctgccgagcgggtttctcattgtggggttctggagttcattgctgangaaggcatgatatacatgccatactggatgatggagaacatgcttttacaaaaaggggacattgtcaaagggaaaatgtgacacttccaaaggggccatatgtaagtacaggcccacacaaaagacttttggatatttcaatccaaagctatctagaaccacattgaggaattttcc

SEQ ID NO: 248459 - DNA, 555 bp, Glycine max
tgtgagtgctgtcctcgatctgagagtatgcatcaccggtccggaattcccgggtcgacccacgcgtccgcgaagactaatagggtttgtaaggcttatacggttagtagggattgttatttgtttagctggggttttacttctgatgatgatggtgagggtgaggaagatggtggtgagggtttggaaccttcctcgccggggacgccagagagggatgtggaagagaattttgagcttagtgagaatgatggtgtgaagaaaatgaagaaaattagtgagaatgatggtgtgaagaaaagaaagaaaattgatattgaggatggtgatgagggttacttgagtagagggaagtgggagttattgaggaaggatgggtttatgcagggatgggcgaaggtgacggcgtgtgattatcatagagggctggatatggtggttgttgaattttctaatggtgtgttttggttgtatcagatgccggattttgcgtgctttcatttgtggcctatttcgaggggagaggatacccacttgccgtgtttaatgagtttg

SEQ ID NO: 248460 - DNA, 570 bp, Glycine max
  unsure (1)..(570): unsure at all n locations
agtatgctacgtgcgnctcgctgagagcctagtcncagtancgccactgacgtaccggtcctgaattcccgggtcgacccacgcgtccgagcttggctacttctgatgctgaaaatcacagttccgaagccggtgttcagcttgtggaaagcgtctcagcatgcagtgttgagtctgttcagccaactaaggtcgattccccccctagcagtgtgtcgacaaatggggtttcttccccttctgtgccagcaaactcagaatcatctgatgctgctgctgctgcttctaagtctcccattcaggagcaagtttcaggcaccaaagaggacaaaaatgtggatgccaaagatggtgagagtgattcctcatgtggggttcctattgattcattccctaagcctgttgtgagtgtgaacattgagcctgagccaaaggttgtgcagcaggatatagtagacatgtacatgaaaagcatgcagcaattcactgagtcgctagcaaaaatgaagcttccgatggacttggaaagtgaaccaaccagttcaggaaattcaaccactgagcagaaac

SEQ ID NO: 248461 - DNA, 434 bp, Glycine max
gtcctgaattcccgggtcgacccacgcgtccgtgaaaagccacacatttataagcccgcagtacatcagccatccgtgtacagacctgcagtgggggaacccgcgatttacaagccacacatttgaaaaaccaccagttgagaaacccccatttgagaagcctgcagtatacaagctctcaattgaaaaaccaccagtgtacaagccaccagttgagaaccctccaatttacaaaccctcagttgaaaaaccaccagtatacatgcccccaattgataaacctgcagtttataagccaccagtagagaagccaccggttgagaagcctgcagtctacaagccaccatatggaaagtcaccatactcaaagtaccctccaattgatgacacccatttctgaaggatgtcaatgagtgtattaagtatatgctaaa

SEQ ID NO: 248462 - DNA, 364 bp, Glycine max
attcccgggtcgacccacgcgtccgcaaggatatcgtcgtctaattgaatcttctctaataactattaggggccctgctgaggcagctgttgatgcggttcactcgctgttaaaggacttggttcacaaagctatcagtgagactttggacttgaagcagtatcctggtctccgggttgaggttggggctgctgctgttgattcactagaaagaatgagggatgaaagcaaaagagcaacactgcagctagttgatatggagtgtggctatctgactgttgatttctttcggaagcttcctcaagatgttgataagggtggcaatcccacacattcaaatttttgatagatataatgattcata

SEQ ID NO: 248463 - DNA, 555 bp, Glycine max
  unsure (1)..(555): unsure at all n locations
cgagcagtgctgtgctcgatctacagatactcatgcaccggtccggaattcccgggtcgacccacgcgtccgtggaaaaagaaaaaggaagaaggaatgagtgcaacagtgactctaactctaaacctatgccgttgttccatcgtcgcttcttgtccacattatagccacaaaccaaaccctaatttcaatgccttttttagcttctctttgtctctgtctctgtctcaccacagacgcatcgttatctacaagaaaccattcccctctagacggacgtggctttatggatatatgaatagagatcgagattatgaattggagaatgggttagccttattcggttctgatgaagaactagcaacacaaattccaactcaggcccagtcacttgttgaaggatcaggctccattcgcatagcggagttcaagcctgttcctgatgttgattatcttcaggagttattggccattcaacagcaaggacctanagctattggcttttttggaactcggaacatgggattcatgcaccaagaactaaatgagattctt

SEQ ID NO: 248464 - DNA, 577 bp, Glycine max
  unsure (1)..(577): unsure at all n locations
agttgcgagtgtanaaatagactctagcgactacgcattgactcactcggtccggaattcccgggtcgacccacgcgtccgcccacgcgtccgaaaaaaaaaaaaaaaaaaaataaaaaaaaaaaaaaaaaaaaaaaaaaaaaaaaggaaaaaaaaaaaaaaaaaaaaaaaaaaaaaaaaaaaaaaaaaaaaaaaaaaaaaaaaaaaaaaaaaaaaattaaactaaaataaaaaaaaataataaaaaaaaaaaaaaaaataaaaaatgtaagggtggatgataaaatgaattaactaatatttttataaaaagaatcttataaacattaaacttttgatgtacgaagaatcataatatactaaaaaatttgaaattagattaaaattgaaaaaaatacgtgaagaccaatattattgtcatttgaaatattttatatctgttatattaaagaaatgggactatattatagaactatgaattatcgagaacaataatttatataatagaaatttttgatactttgcttagcgtatgccgataacacctttcatttggctagatatagaaatatggtac

SEQ ID NO: 248465 - DNA, 302 bp, Glycine max
aattccctgttcgagccacgcctccgtccacgctttatctatctattattctatctattataatgactatccatctaacaactacaataggatatttctgaaaatttttactagaatctaacaccaaaactctacaatcttataataataacaaaaataacattaatgacttaaattttttatttcatttcatcaatcacattatatctattgaattcttaaacatttatactgactttactatatacacacatcaatttatactttatttttcaatttcttaaaatttttttcatattaaa

SEQ ID NO: 248466 - DNA, 378 bp, Glycine max
aattcccgggtcgacccacgcgtccgatcttttacgtgcccatcaaacaaataagctctccactctatttcagtcaccaatcaccaatgagtccttctgtcactaacgtcaaaatcttctcttctctcgtcctagacggattcttcaacgctctcaccagacgcgggtacgcggtggcatcacaaagcgcaacaaaggaaggagtgggctttatgagcggcaagatggcaccaaagtcaggggaagacaacaaaggggtgtctacgtacaaggtttcgtgggtgccagatcctgtcactggttactacaaacccgagaacatcaacgagattgaccctgcagaattgcgcgcgatgcttctcggcaaaaaaatcgaca

SEQ ID NO: 248467 - DNA, 552 bp, Glycine max
  unsure (1)..(552): unsure at all n locations
agtgcaatgtggtgatgcatcnacctcagtcactcactcgccggtccggaattcccgggtcgacccacgcgtccggaagtaatgacccggatctaaaggaggagatggagaagcagtttgtggaccttctcagcgaggagttgaagttgcaagagtctgttactgaagcaaacactcggcacatgaacataactttggctgaagcaaaaagagtggcgtctcagtaccagagagaggcagataaatgcataactgcaactgaaacatgcgagcaggcaagagaacgtgctcaggccatactcacaaaggagaaaaagatgacttacgtgtgcgagaaacgagctcgtcaaatgggttgggaaggagaataactgcataagtcatggtatttatatgctttatggctataatcatgatcggggctatatacaaacatacaagtgaaatgcttgagttgccaaaattaagttaaaggttatatacttactgtgtcagtaactggataccttataagctaggatcaaataattttacatcattaggatccaagga

SEQ ID NO: 248468 - DNA, 554 bp, Glycine max
  unsure (1)..(554): unsure at all n locations
agagcnagtcgtgtgtgggtagaggaaagttttctcggtccggaattcccgggtcgacccacgcgtccgcacacacacagctagcagatattacatacacgtgaatcactaattaagccatggagaagaaatcagatagctgggttgtgcttcctgttccttgatctctttgatggctaagaagttgtggtgcaaactgaagcaaagacttgcgagaacctggctgatacatacaggggttcatgctttaccactggcagctgcgatgatcactgcaagaacaaagagcacttgctcagaggcagatgcagggacgattttcgctgttggtgcaccaaaaactgttaaatggatccattcactccaacgtgaagaagatgcatgcagcgctattttataaaaaataaaactactatatactatatataataagactggcgctgcatcaatgacctatgtattatagtatatattaataccgatgtcagaactatagatgcatgtactgtgcataacggctgagttatgtacttatngtaagaataaataaaggg

SEQ ID NO: 248469 - DNA, 368 bp, Glycine max
ccggatacgacccacgcgtccgcaattttctagggtttatacaattctcgatggcttcttcagatgttgagtaccgatgctttgggggagggctcgcttgggccactgacgaccaagctctcgagagagccttctctcagtacggcgaaatcgttgaaacgaagattatcaacgatcgtgagactggaagatccaggggttttggatttgtgaccttcgcctcggagcagtccatgaaagacgccatcgaagggatgaacggccaaaaccttgacggccgtaacatcactgttaacgaagctcagtcccgtggtggcggtggcggcggatgcggtggaagtggtggatatggtggtggtcgcggtggt

SEQ ID NO: 248470 - DNA, 191 bp, Glycine max
ccgtccgaattcaccggtcgaccacgcgtacgaaaaaaaaaaaaaaaaaaaaaaaaataaaaaattaaaaaaaaaaaaaaaaaaaaaaaagaaaaaagaaaaaaaaaaaaaagggaaaaagaaaaaaaaaaaaaaaaaaaaaaaaaaaaaaaaaataaaaaaaatataaaatttataaaaaatattatgat

SEQ ID NO: 248471 - DNA, 557 bp, Glycine max
  unsure (1)..(557): unsure at all n locations
agcgccagagtgcgntgatgagaatcgtagtataagcatgcctcaccggtccggaattcccgggtcgacccacgcgtccgctacctctcaagtttttgaagtatagagatggcagagacattcctatttacctcagagtcagtgaacgagggacaccctgacaagctctgtgaccaaatctctgatgctgtcctcgacgcttgcctcgaacaggacccagacagcaaggttgcctgcgaaacatgcaccaaaaccaacttggtcatggtcttcggagaaatcacgaccaaggccaatgttgactacgagaagatagtgcgtgacacctgcaggaacatcggctttgtctcaaacgatgtgggactggatgccgacaactgcaaggtcctcgtcaacattgagcagcagagccctgatattgctcaaggtgtacacggncacctnaccaaaaaacctgaagaaattggtgctggtgaccagggtcacatgtttggctatgccactgatgaaacccctgaattgatgccatngagccatgttcttgaacaaaactcgtn

SEQ ID NO: 248472 - DNA, 316 bp, Glycine max
cccgggtcgagccaagccttcgggcggaacccattttggatttaacccttttggcattaataatttttttgaccactcttttcttgggccatggcggccattccacatttggcttgacccctcttggattatctaatagcttaaacttggaaattccaaagccttaccaccttgcaatcaacgagcggttcaactttttaaatggagtgcaccaaatttggggattcttcacggacaagccttatattccagggagcaattccaagccaccaactgagaatcgtatcgctggataccattattcattcggggtgtg

SEQ ID NO: 248473 - DNA, 454 bp, Glycine max
  unsure (1)..(454): unsure at all n locations
aattcccgggtcgacccacgcgtccgcctgaggaggttggtcttattttgcgtgcattgggttttgacaattctaccaggatatatctggcagctggtgaattgtttggtggggatcgatttatgatgccatttcgaagtttgttccctcgacttgaaaatcattcttctgatgaaaactctgaagagcttgtcgaaaacactaagggattggccggatctgctgtggattacatggtctgtcttctttctgacattttcatgccaacttatgatggcccaagcaactttgccaacaatctccttggacatcgcctgtattatggcttacggactactatcagacctgatagacaatctcttgcccctatcttcatcgatagtgataaatgggcgaacggctggtttttaggaagctattangaaagtcatgctcaaaacaaacttttgagaac

SEQ ID NO: 248474 - DNA, 559 bp, Glycine max
  unsure (1)..(559): unsure at all n locations
gtgcttgaggctatgccaccactacaggaangatanctcggtccggaattcccgggtcgacccacgcgtccgggaattcctcctgtctgtgaaagaggcagtacaagcagatatttcaatgctgcaagtgcagctgagcgtcctacatcttcagaattgtggccagagaagcccaatatggattctctatatatgccttgggatcatgttaatatgacacccacatttagaggtagaggcctttctatacggggcgagggtcctttaaggaatgtgaggagccgttctgcacttgatttggaatccaacctggctagggcccatttatcaaatactcatccacacaactcatactctactggtctaccagttgaccattcttctagcgtggtcgatctgtcaactcaaacttctggcactttgacacgggattggagcccaatgagttcatgtcctnctcatggaagggtgtcatcatcagatgcanatgctnntaatcacgaggcaagtcaatttccttaatgaaagtgggtctagtaatgctnctgtaaatgttgan

SEQ ID NO: 248475 - DNA, 568 bp, Glycine max
  unsure (1)..(568): unsure at all n locations
aggatggagtggtggccagcnctataaagaaatgatggcacggtccggaattcccgggtcgacccacgcgtccgaaaaaaaaaaaaaaaaaaaaaaaaaaaaaaaacttaaaaaaataaaaaaaaaaaaaaaaaaaaaaaggacaaaatggaaaaaaaaaaaaagaaaaaaaaaaaaagggcggccgttctaaaggatccaagcttacgaacccttgcatgcgacgccatagctcttcaatagggtcacctaatttaaattaactggccgcctttttacaacgtcgtaactggaaaaaccttgacgttccccaacttaatcgccttgcagaaaatcccctttttgccagttggcgtaattgctaaaaggcccgaaccgatcgcccttccaaacagttgcgcaacctgaatggcaaatgggacgccccttttaccggccaattaaacgcggcggatttgggggttacccccaacgtgaccgttacattagccagagccttaacgcccgttcctttcgctttcttcctttactttctggccaactttggccgcttttcccgaaaaactta

SEQ ID NO: 248476 - DNA, 410 bp, Glycine max
  unsure (1)..(410): unsure at all n locations
ggaattcccgggtcgacccacgcgtccgccttctcttattctgctgctcatgctcttcctttcttctttgctggaaccacctactcaaccgggaccaatcttaatccacctgtcttttgccaacttcaatccaggccaaaaaaaccgctgccaaaaaggtgttccccctttctagaaaggtcattactctctggtaatggtggtgtggcctcaaaccagtggaaagctgttcctgatatttggagatcttctgctgagaagtatggtgattaaatagcattagtagatccgtatcatgatcctncttcaactatgacatataaacagttggaggatgcaatattggactttgctgaaggattgagagttattggagtaagacccaatgagaagcttgcgctttttgctga

SEQ ID NO: 248477 - DNA, 560 bp, Glycine max
  unsure (1)..(560): unsure at all n locations
agcgcctntggcgatgatgatncattgtaaaatatagtatgactcaccggtccggaattcccgggtcgacccacgcgtccgcaaaatcagccatggtttcaaatggtaggatgctgtgttcaagcttgattacagcacgtccgtgatcctccctctccagaactactccatcctacttctgctcatttccttctcgtagaatcatcttcacgccaagaattggatcatctccggccccggcccaggcccaggcccagcccaaggaagccaagctctggggtggcaggttcgaggagggcgtaaccgacgttgtggagaggttcaccgagtcgatctccttcgacaagaagctctacaaacaagacatcacgggaagcagagcacacgcttcaatgctcgctcaccagggtttgataagcgagattgacagagactctattcttcaaggattggatgaaataganaggcgcaatgagaatgganagttcatntggagagcttacagggaggatgtgcacatgaacatcgangccgcgcttaccgacctgatcggtgagcct

SEQ ID NO: 248478 - DNA, 563 bp, Glycine max
  unsure (1)..(563): unsure at all n locations
aggatggtggcnatgatgaagttgagggagatatagtattgactgcaccggtccggaattcccgggtcgacccacgcgtccggtgaagccctagactacactacacactttgcaatggcggttgttgcgcaaacccctgacatcggcggcgagcgacagtccggccaagacgttcgcacccaaaacgttgtggcatgccaagccgttgccaacatcgtcaaaagctctttaggccccgttggcctcgacaagatgctcgtcgacgacattggcgacgtcactatcaccaacgacggtgccacgattctcaagatgcttgaagtggagcatcctgctgccaaggttttggtggaactcgccgagcttcaggaccgagaagtcggagacggcactacttcggtcgtcattgtcgctgctgagcttctcaaaagggcaaatgaccttgtcaggaacaagattcatcctacctcgattatcagtggatatagacttgctatgcgtgaggcttgtaaatatgtagaagaaaaactagctgtcaaggtttgaaagctgtgaaaagattn

SEQ ID NO: 248479 - DNA, 316 bp, Glycine max
attgccgggtcgacccacgcgtccgggcagttacaaatgagcatttccagactgcccttggaacaagcaacccatcagcttgacgtgaaactgttgttgaagtgcctaatgtcagctgggaagacattggaggccttgaaaatgtcaagcgtgaactgcaagagactgtacaatatccagttgagcacccagaaaagtttgagaagtttggtatgtctccatctaaaggagtacttttctatggtcctccaagatgtgggaaaactttgttagccaaagcaattgctaatgaatgtcaagctaacttcatcagtgt

SEQ ID NO: 248480 - DNA, 559 bp, Glycine max
agtgcggagtgcgtgtcccagctcccataagcatagctacctaggtccggaattcccgggtcgacccacgcgtccgcccacgcgttcgcccacgcgtgcgggaagatcagcttgagtaccttgaggagcgtcgcttgacggatctgatcaagaagcattctgagttcattagctacccaatttgtctttgcattgagaaaactactgagaacgagatctctgacgatgaggatgaggaagagaagaatgatgatgagggtaaggcggaagatgttgacgaagagaatgcgatgcgacgatattataataaagatgattactgtagtgtcacatgtatggtacctagtggaccaggctcaaagaccttttgattgataaagcctgtggtgaccccaaaggaggattttcatgcttttaccaagagtatcaccaatgactgggaaaagcattaggttgtcaagcactcttaagttgaggacaagttgaagtttaaggttttcctctttgttcctacaagggcaccttttgaactcctttgtaacaaggaagaagccttact

SEQ ID NO: 248481 - DNA, 559 bp, Glycine max
  unsure (1)..(559): unsure at all n locations
agggcgagtgcgtaatgaacgtgcccacgccatgcatcgaacggtccggaattcccgggtcgacccacgcgtccgcccacgcgtccggttttccatggctcgtaccaagcaaaccgctcgcaaatccaccggtggaaaggctcctaggaagcaactcgccaccaaggctgcaaggaaatctgcaccgacaaccggtggagtcaagaagcctcatcgctatcgccctggaactgttgctcttcgtgagatccgaaaataccaaaagagcacagagcttctgatccgcaagctccccttccagcgtcttgttcgtgaaattgcgcaagacttcaagaccgatttgaggttccagagtcacgctgttcttgcgcttcaggaagctgcggaggcttacttggtgggtttgtttgaggacaccaacttgtgtgcgattcacgccaagagggtgaccatcatgccaaaggacattcaactcgcacgccgcattcgtggagaacgtgcttaggctaataataagagtaataacgtaattgctgctgctttttttcgtnttgcaaan

SEQ ID NO: 248482 - DNA, 557 bp, Glycine max
  unsure (1)..(557): unsure at all n locations
aggatgccagtctgaatgtgagaagggagaaagtagtctcggtccggaattcccgggtcgacccacgcgtccgattctctctgtgtatttccctacctctcccttcaagatgcagatcttcgtcaagaccctcaccggcaagaccatcacccttgagggggaaagctctgacaccatcgacaacgtcaaggccaagatccaggacaaggaaggaatcctcccggaccagcaacgtctcattttcgccggaaagcaacttgaggacggccgtacccttgctgactacaacattcagaaggagagtactcttcacctcgtcctccgtctacgtggtggcatgcagatcttcgttaagacactcaccggcaagaccataaccctagaggttgaaagctccgacaccatcgataacgtcaaagccaagatccaagacaaggagggtattccccccgaccagcaacgtctcatcttcgccggaaagcagctcgaggaccgnncgacccttgcgactaaacattcagaaggaatcaaaccttcacctggtcttcgtcttcggg

SEQ ID NO: 248483 - DNA, 442 bp, Glycine max
gaattcccgggtcgacccacgcgtccggaattttcttcatccttctctgttctcctagaacttgattacttgaacattccctatgacagatgaggtggttcttctggatttctggccaagtccatttgggatgagggtcaggattgcacttgctgaaaagggtatcgaatatgagtacaaagaagaggacttgaggaacaagagtcctcttctcttacaaatgaacccggttcacaagaagattccggttctcatccacaatggcaaacccatttccgaatccctcattgctgttcagtacattgaggaggtttggaatgacagaaatcccttgttgccttcagacccttaccagagagctcaggctagattctgggctgattatgttgacattaagatacatgatcttggaagaagatttggacatcaaaaggagaagaaa

SEQ ID NO: 248484 - DNA, 566 bp, Glycine max
  unsure (1)..(566): unsure at all n locations
agcatgcgtgtgctatgnttggggctcacgctatngactgcangtacttaccggtccggaattcccgggtcgacccacgcgtccggtgaagcttcatggattttggtatattccctacactttgagggtggtatggaccttggagttagaggatataccatatgaaaacatagaagaagaccgctacaataagagtcttcaacttcttgaatacaacccagtatacaagaaaactccagtgcttgtccataatggaaaacccttatgtgagtccatgcttattgttgaatacattgatgagatttggtcacataaatcattacttnctgctgatccctacgagagagctcttgcaggttttgggttaaatatgctgatgataacatgttttcttcaagtattgcattctttcctagcaatattgataaaaagcgagaaatgagcatatagaagatattggagcatctcaaggttgttgagaattaaagttttggtgatccgaagaaattttttgttggagacatttattaacattttggccttaactttttgggtccttatttaag

SEQ ID NO: 248485 - DNA, 568 bp, Glycine max
  unsure (1)..(568): unsure at all n locations
cgtctggagtcctggtgccggggccttcgacgncctacngccactgacataccggtccggaattcccgggtcgacccacgcgtccggtgacacttcttctgtgtcagagtttgagaagtgaaccccatcaacatagtcccagagtaatgagtgaagaatggaaacttgggtcttgatctcaaactctcagttcctgtgtctgatcaatctaattatgccaagttcttgactgaaagtggtacttttaaggatggggatctgcttgtcaacagggatggagttcgaattgtctctcagaatgatgtcgaagctacacctccaatcaagcctacagacaaccagttagctttagcagacatagatgtaatcaaagttgttggaaagggaaatggaagggtagtccaattggtacaacacatatggactaatcagtcttgtgcgttgaaggtaattcagatgaatattgatgagtctatgcgcaagcagaatacacaagagcttgaaaattaatcacttgcccaatgcccttaattcgttgtctgttaccaaataatcttttgaaaccgtt

SEQ ID NO: 248486 - DNA, 384 bp, Glycine max
attcccgggtcgagccacgcgtccggccacgcgttcggttttccatggctcgtaccattcaaacctttcgcaaatccaccgttgcaaagtctccttggaagcaactcgccggcaaagctgcaaggaaatctgcaccgacaaccggcggagtcaagaagcctcatcgctatcgccctggaactgttgctcttcgtgagatccgaaaataccaaaagagcacagagcttctgatccgcaagcttcccttccagcgtcttgttcgtgaaattgctcaagacttcaagaccgacttgaggttccagagtcacgctgttcttgcgcttcatgaagctgctgaggcttactcggtgggtttgtttgaggacaccaacttgtgtgcgattt

SEQ ID NO: 248487 - DNA, 552 bp, Glycine max
agtgcgtgagcctgaggccttttacttcagtgctcatcgcactgacgtaccggtccggaattcccgggtcgacccacgcgtccgaacctcgtttccttaatccattctttgctccctcgaactgctgtttggtctcttgactcttagtgcatggcatcaacgtttctcaccctaccaactcccttcctacacaaaactaatgccatcactttctctgacaagagaccctcatttttgcagaggagctctctgaagatcaatgcaattaccaaaaaatgggaacccactaaggctgtacctcacgctgatagagttcttgatcgtttggaggagctatcagataaaacagttggtggagttttgctgcccaagtcagctgttaaatttgagcgatatcttgtgggagaaatgctaactgttggtgctgaagctggagaactaaaggctggaacaaaggtactattcactgacatgaatgcctatgatgtggattgggggactgatgcataacactgcttcggaaagccagtgacttattggccgggtttattt

SEQ ID NO: 248488 - DNA, 559 bp, Glycine max
  unsure (1)..(559): unsure at all n locations
aggtagcnagtgctgagctcgcatctgaagtatgcactcaccggtccggaattcccgggtcgacccacgcgtccggagtaattgtaaatggttttggcttgcccggattcattaaacggtgcgtgtaactcgtggctcgtgccacctgaccttatataaccactcagatcagtcgaacatttcttcacttcttcgttttcgacgatccccttctccttctctctctctttttcgcctcattccattttcatctatcaatggctccagtagcagcagcatcttcagattcaatcaagccaagagatgtttgcatcgttggtgttgcacgtacaccaatgggtggatttcttggtactctgtcatctctatctgccaccaagctaggctctatagctattgaagctgctcttaaaagggccaaatgtgatccatcccctggggaagaagtatttttggggaatgtcctagtgctaattggggcaagcctctgcaggacaagctgctcttggagcaggannatatccaatccagtatctgcactaccggttacaaagttggg

SEQ ID NO: 248489 - DNA, 564 bp, Glycine max
  unsure (1)..(564): unsure at all n locations
tggccggaggtgctgtaatgggactataaggataatcatgcaccggtccggaattcccgggtcgacccacgcgtccggaggagagagaaagtagcagatcctccatggccttcaccaaggaacgtgaaaacttcgtctacgtcgccaagctcgccgaacaagccgaacgctatgaagaaatggtggaagcaatgaagaatgtggcgaagctaaacgtggaattgacggtagaggagcggaaccttctgtcggttgggtacaagaacgtggtgggtgctcgtagggcttcgtggaggattctttcctcgattgaacagaaagaagaagctaaagggaacgatgtgagcgtgaagaggataaaggagtataggctgaaggtggagtctgagttgtccaatatctgcagtgatatcatgactgttattgatgaataccttattccctctagctcatctggtgaacctagtgtctttttctacaaaatgaanggggactattaccggtacctngcagagntcaagtccggtgattgagagaaagaggcttgtgatcatttcatgaagg

SEQ ID NO: 248490 - DNA, 385 bp, Glycine max
acccacgcgtccgaactgggacctctattagtcctcctcacggcttgtgccttgagagaattggtaatggatcttagctcaacatggtggctcatccggatggctctaaccgtgcattcttctctaaccaaatgggaaaggtttttctggcaacacttacggatgagggatcaggaggctcattgaagcttgatgaatcaagtccttttgttgatctgactgatcaagtttattttgatactcaatttggaatgatgggcatggcatttcatccagattttgctaaaaatggacgattctttgcttcatttacatgtgataagtccaagtggtctggatgtactgtaagatgttcatgtaattcatacgttaactgcgatccatc

SEQ ID NO: 248491 - DNA, 292 bp, Glycine max
cggtcctgaattcccgggtcgacccacgcgtacgcttaattgatcaagaagtcgtggatttaactgatgctaatacttacgtgaaccttggtgatacgtgcaggtgtacatgcggtaacactagtagaagctatgatcactgcttgaacatagagcattcgctaataggcagatgcaggtactatcatcgatgttattgcacatatatacattgattcaatacattcagtataattagaatcaaatacatgcagagatgtttgataaaaaatgtgtctactgtatactatat

SEQ ID NO: 248492 - DNA, 570 bp, Glycine max
  unsure (1)..(570): unsure at all n locations
agtatgagctnnnnnncnatgatncccactagnactcatcgtactgaccataccggtccggaattcccgggtcgacccacgcgtccggttttttacttgaattttcttcatccttctctgttctcctagaacttgattacttgaacattccctatgacagatgaggtggttcttctggatttctggccaagtccatttgggatgagggtcaggattgcacttgctgaaaagggtatcgaatatgagtacaaagaagaggacttgaggaacaagagtcctcttctcttacaaatgaacccggttcacaagaagattccggttctcatccacaatggcaaacccatttccgaatccctcattgctgttcagtacattgaggaggtttggaatgacagaaatcccttgttgccttcagacccttaccagagagctcaggctagattctgggctgattatgttgacattaagatacatgatcttgggaagaagatttggacatcaaagggagaagaaaaagaagctgccaagaaggagttcatagaggcccttnaatttgttggaggacaactg

SEQ ID NO: 248493 - DNA, 561 bp, Glycine max
  unsure (1)..(561): unsure at all n locations
tgagctggtnacgtgtgcctgggacctacgattactcatcgnactgcacgtaccggtccggaattcccgggtcgacccacgcgtccgcagtttcatattcaacccatgatgatgaagatggataatacgatgaggaagagggagagaagcggggccatggagaaagagaggcttcatgtgatggacttgagtggcatgtccttggagtttcttcccaaaccttcgcttgatttagccaccatttgcaagttggacctatctaataacaatctccaggaaattccggaatccttaacggcaagacttctaaacgtggaagtgttggacgtgcgttccaaccagctaaagtcccttcctaattccattggctgcctttctaagctcaaggttttgaatgtctcaagcaacttcatcgaatccctccccaaaaccattgagaattgcagagccttagaagaactgaatgcaaacttcaacaagctgagcaagcttccagacacaatagggtttgagctcgtaaacctaaagaagctctcagtgaactccaacaagcttgtgttn

SEQ ID NO: 248494 - DNA, 170 bp, Glycine max
tcccgttctacccactcgtcctaaaaaaaaaaaaaaaaaaaaaaaaaaaaaaatttaaaaaataaaaaaaaaaaaaaaaaaaaaaagaaaaaattaaaaaaaaaaaaaataaaaaaaatataaaaataaaaaaaaataatttaaaataaaaaaaattaaatttttaatat

SEQ ID NO: 248495 - DNA, 559 bp, Glycine max
  unsure (1)..(559): unsure at all n locations
agagcggtttantnnncctagatnccattagtaccnctagcatgntcctaccggtcctgaattcccgggtcgacccacgcgtccgaaactagaagtattattattcttccatttccattaaaaagaaaatatcataaatgggtattttcacattcgaggacgaaatcacctcccctgtggctcctgctactctttacaaagctctagttacagatgccgacaacatcatcccaaaggctcttgattccttcaagagtgttgaaaacgttgagggaaatggtggccctggaacaatcaagaagataactttcgttgaggatggagaaaccaagtttgtactgcacaagatagaagcagttgatgaggcaaacttgggatatagctacagcgtagtgngtggtgctgcgttgccagacacagcggagaagatcacattccactccaaattggctgctggtcccaatggaggctctgctggcaagctaactgtcgaataccaaaccaaaggagatgctcagccaaccatgaccaactcataactggaaaagccaaggctgtt

SEQ ID NO: 248496 - DNA, 418 bp, Glycine max
attcccgggtcgagccagcgcgtccgatcgactaataatacatcagagctgtcagcataggcagggactcttggtgaaactttggatggagatgcaaagtgggggaaaacattggatgagcgtcacaaacaaaaaataatgagagaagtagaacaactacggcatgccaaccttgttaaaaaattagaacagaagctttcctttgctgaaagaaagttaacgatagctgaaaaagccttaatgaaggtggagtcgtttttgaagccatcagaatacaaagcagatcctgaaagtataactgatgaagagagatttatgtttcgcacattatgattgacgatgaaagctttcttacttcttggtagacgtggggttttagatggtactattgagaacatgcacttgcattggaagtacc

SEQ ID NO: 248497 - DNA, 537 bp, Glycine max
agggtgttgctaacatggcagggggatagaaaagtagtgctgcaccggtccggaattcccgggtcgacccacgcgtccgctcatctttctctcttctctctccacccaaaccctaactcccgaccctgttcccctcgggtatgcgtcatgaaaggaggaaagtccaagaccgaatctaagagagccgatcccaaacttgctgtgaataagaagggagccgccaccaaggctaggaaacccgccggcaaggggaaggcagcgaaagaccctaacaagccaaagaggcctccaagtgctttcttcgttttcatggaggagttcaggaaggtattcaacaaagaacatcctgaaaacaaagcagtgtctgctgtgggcaaagctgctggagcaaaatggaagaccatgtctgatgctgaaaaagcaccttatgtggcaaagtctgagaaaaggaaagtggagtacgagaagaacatgagagcctataacaagaaacaggcggaaggtcctactggtggggatgaagaagaatctgagaag

SEQ ID NO: 248498 - DNA, 531 bp, Glycine max
  unsure (1)..(531): unsure at all n locations
tgtngagcactgtagtagaggggagagggaagggatgcatgcaccggtcctgaattcccgggtcgacccactcgtccgaccacaccaccccttcttccttttcatcaggtttattccttttcttttggttcaattgtgctggatggagagtgcaagaatcagcaaatggttaaatcttctagtttgtgtactgctattgcttaaggcagaaggatctcttgttccattgactttggtgaacaatgcagaatcaaaaggagctgtttgtttggatggaaaccccccagcataccactttgacaacggatttgaaaaagggattaaaaacttgattggtcacattgaaggaagaggattgtgccaccatttagaaaagtagctttaacgtaagggatgtcccttatggtcattttatcaaattgatgatccttaactttctggcaatttaaaccaccgaccagaattttattcaaaattcttacaatggaattaaatccagggtaaggtcctggaatggtcattcgttccggg

SEQ ID NO: 248499 - DNA, 369 bp, Glycine max
ccttaattcccgggtcgactcacgcgtccgcttttattacctgcgtgaacttaatgactcgttgacttatgcccttggagctggtcctctgtgggagggttcacaggattctgactatgtgcacactcttcttgctaaagccattgatgaatatgccagccttaagtctaaggcatcagagtcaagtgatgaatctatcacagtggacccactgttggaagcaattgtggagaggctgtcggataagtgaatcgtggatggaaaatcccaacaagctatggcaactgctaccgaatgcaggagcatagataaactagaggatgcaattacaaggagtgacactgttcaaggaactttatcatatcgcat

SEQ ID NO: 248500 - DNA, 425 bp, Glycine max
tctgtcctaattcccgggtcgacccactcgtccgattgtatactgttatttccatcatcaatcacatctgcttgcccaattctgtgtagttcgttgagggaatctcacctttggtacttgccgtgcatcatataccctcaagtactgaactgctgataagttacatatagactgctcaaagcactattactcgtcagatggctctcaaagatcattacctatacacttgtacatgtcctacctgttctaaagtgggtcactataatgatatccaacaaagtgcaattctaaatggatacaaatgcaaaactgaaaaatgctttggtttcttgcttagtaaaactgatgggaaaggattccaatgcacaggttgtggactaattacgcacacggaggatataactacaattacacctgaacttaaa

SEQ ID NO: 248501 - DNA, 459 bp, Glycine max
tcctgaattcccgggtcgacccactcgtccgccattttcaagctctcaacgccatctccagctgcttccttatcagaagcgcttcgcccgagaggttctcgcttcctctccttcaatccttcttccaacgctattaattacaaaattaacctctccgcttccctccgatccattcactccctccctcttaaaacctccttgcggatcaaatgctcccaaacagatgggaatggaagtcctgcaaagaggacagtgcttcatgatctttatgagaaagataggcagagtccatggtatgataatctctgcagacctgttacagaccttcttactcttatagcaagtggtgtcagaggcgtcactagcaaccctgcgatttttcagaaagctatctcatcatcgaatgcttacaatgatcagttcaaggaacttgtgcaagcatggaaagacattgaaagt

SEQ ID NO: 248502 - DNA, 533 bp, Glycine max
tgggaggcaggtggtagagaggcagacggaaggacagcttttaccggtccggaattcccgggtcgacccacgcgtccggcaacccattttgcatctaacccttttgtcattaataatctctctgaccactctttccttgggggatgccgccgatcccacatttggcttcacccctcttggattatctagtagctcaaacttgcaaatccaaaagccttacgacgttgcagtcaacgagcgctacagcttttcaaatggagtgcacagattttgggtatactccacggacaagcctcatatgcaaggcagcaatacgaagccacgaactgagattcgtatcgctggatacgattatacatccggtgtgtggcaatttcaagggtttttttacgtgcctagtggcacaagcggggtgtgcatccagcaagtgtttggtggagtaacttctgccacaacctcgcagactagggtctatggtggttctctcactcattaccaatcacctactctggaaccaaacatctataataggt

SEQ ID NO: 248503 - DNA, 304 bp, Glycine max
ttcccgggtcgagccactcgtccgaaaaaaaaaaaaaaaaaaaaaaaaaaaaaaaaaaaaaaaaaaaaaaaaaaaaaaaaaaaaaaaagaaaaaaaaaaaaaaaaaaaaaaaaaaaaaaaaaaaaaaaaaaaaaaaaaaaaaaaaaaaaaaaaaaaaaaaaaaaaaaaaaaaaaaaaaaaaaaaaaaaaaaaaaaaaaaaacaaattaaagaaccaaaaaaaatctaaaatgaaaaacataacaaaaataaaaaaaagagataataacataataaaccaagaaaaaaacacacttaccaaaaat

SEQ ID NO: 248504 - DNA, 462 bp, Glycine max
ccgggtcgagccacgcgtccgcgttatcgtctcttcctcaaactctgaaccttccgtgcagcgcagagctttgctggcatacccgccgtgacgaaattaaccgctctacgtaacagcacacagcgatttccccaaatcatcgaaaccctaactcgcgattcccaatcgaaaccctaactcgggatggcgattttgctgggcgaaattcttcaatcgctggagctgtggctgaagctgatcaagaacccgcagccgcagccctacgtaaaccctaatctggaccccgttttgctggtgcccggtgtcggtggctcgatgctgcacgccgttgacgaaaccgactgaagccatgaacgcgtctgggttcgcttcctcaacgccgagtacacgctgaagaccaagctttggtcgcgttacgatccttgcaccggtaggacctagctttcgttttacgaaattaaa

SEQ ID NO: 248505 - DNA, 505 bp, Glycine max
attcccgggtcgacccacgcgtccggtgagaaacaaagaaaggaaataattgatctttgaaaatgcagggaggaaagaaagctggagagtccagcaaggaaacagctgcaaacattggtgcttctgccaaggctggcatggagaaaaccaaggccactgtccaggagaaggcagaaagaatgacggcacgtgatccgatgcaaaaggagttggcaacccagaagaaagaggcaaagatgagccaggcagagctggacaagcaggcggcgcgtcagcataacacggcggcgaatcatgctgccacggcagggcacatgggacaacccatggggacccatcagacgtcagctatgcccggtcatggaaccggacagcccacgggccatgtcaccgaaggagtggtgggctcacaccctattggaaccaacagaggcccgggtgggactgctacggcccataatacccgtgcggggggaaacccaaatgattatgggtatggaactgg

SEQ ID NO: 248506 - DNA, 558 bp, Glycine max
  unsure (1)..(558): unsure at all n locations
gtttagagntaggggggagttgtattcagatggcatagtacgtaattctcaccggtcctgaattcccgggtcgacccacgcgtccgcccacgcgtccgcggtctcgtgggtgaaaattgcgaggatctttcttctctccaccatggtggggttgtgtttgcgtgtctctccgtaaattgccttcgactgtgacaacacgcaccgatcgccatgaacatcttcaccaagaaacccaccgtcaaagaggctcttcgtgagagtaaacgtgaaatgacaaacgccagtagaggtatagagaaggaaattggagctctacaatcggaagaaaaaaagcttgttgctgagataaagagaactgctaagacgggaaatgaggcagcaactaaaattctagctcgccagttgatcaggcttaggcaacaaattgctaatcttcaaggtagtcgagctcagatgagaggcatagcaactcacactcaggccatgcatgcacattcttctgttgctgttggcttgaaaggtgctactaaggcaatggcagctatgaataagaaaatg

SEQ ID NO: 248507 - DNA, 500 bp, Glycine max
ggtcctgaattcccgggtcgagccacgcgtccgcggacgcgtgggtgcaaaacgagaagtatccaacaatgactaccacccgtgttgctatctgtggttgctttgcattcctttactacgcggctgaaggagccaaggttagtttcaataacaagtgctcatacacggtatggccaggaaccctaaccggtgaccaaaagccccaattatcaacaactggtttcgagttgggtccaggagcatccaactctgtggaccttccatctccatggtccggtcggttctgggcccgaacaggatgctccaacaacaacggaaggttcagctgcgccaccgccgattgcgcctccggtcaagtcgcatgcaacggtgccggtgcaatcccgccagctactttggtagaaatcacagttgcagcaaacggagggcaagatttctacgacgtgagcaacgtggatggcttcaacgtgcccatgtccgtaaccccacaaggtgggagt

SEQ ID NO: 248508 - DNA, 508 bp, Glycine max
tctcggtccttaattcccgggtcgagccactcgtccgaaacaattcaagaagagttcgtaggaggactatagttgatgttgatctagaagatcaggctaggctcatcaaacgccgaagagaattgccaaatctgattattaattgtgataagtatataaatttggaaggcggtatcagttccatggatcaaagttttaaaaagccacctgaacctacaaaggagcttgtcttcaactgtccaatatgtatgggccctatggtacatgaaatgtcgacaagatgtggtcatattttttgcaaggattgcatcaaagctgctataagtgctcatggtaaatgccctacctgtagaaaaaaggttgttgcgaaagatcttataagggtgtatctcccatcgactagttagaggctctccgtggaagctgtaaagaggagaacaaggattggaagacacgtcattgtactttggacaatactgaatggctgtgttgtttctaatatgttccc

SEQ ID NO: 248509 - DNA, 532 bp, Glycine max
atgagaggccgctaattcagatggcgatggatgggattcttcaccggtcctgaattcccgggtcgacccacgcgtccgcaagagacgaggaatctggtctcaacaaggcagggaagttccctacacttgtgactcaccaaggatctctcgagtcaaaggttaatgagaccaaggccatggtcaagttccagcttaagaaggttctctgcatgggagtagctgtggggaatgttagcatggaggaaaagcaaatcttccaaaatgtacaactgagtgttaacttccttgtctctttgctgaaaaagaattggcagaacgttcgctgcctatatctgaagagtaccatggggaaatcgtaccgtgtcttttgagtagtggttcttaaaattcagtgaatttctgattgcacttaatatattgtcatgataggttggacagaatttttcatcgttctacagttttgttggatgagtattttttggctagtatttcttgttatggacatttatgtttcaagtgctttgcaacatcc

SEQ ID NO: 248510 - DNA, 510 bp, Glycine max
ctgaattcccgggtcgagccacgcgtccgaaaaggatgaagggaacgttgtggcagttcaagcacaagatgacacacatgagcatctgtcaagcgagacgtggcaatgcagataccacagtgacaccagaggtgaagaaaactgggaaggttgtccctaaaaaacaatcaaagacccccacgtctgaaaagcgagacaatacagctgattccagtaaaacagaaacaaagtctgacaaagatgacaaaaaggaagaaagagttactggtgaaaaaagtggggcaaagacagacaagctgaaagcctctgataaagatgttaccaatgtaaaggggaaagtgaaagatggggacaagtcaaaagatgagaaagtaacccaagatagggatggaaaggactagtccaaaagcaaatctagtaaggaagtgaaagacatgaggaagtctaatgaacctcctcgacaccctggatttattcttcaaacaaaatggaccaaagattctaaaatac

SEQ ID NO: 248511 - DNA, 549 bp, Glycine max
  unsure (1)..(549): unsure at all n locations
gatntataggtgtgttagagggaagggaggggagtagatgctccggaattcccgggtcgacccacgcgtccggcaaagatgaataccaagcccgttttcttcttgtgcttcctctgtgcactgcttctcatctcggttggggcaactgagccatccaaagatgagacacaagcagaagaaccaaagacacagccagatgcctggggaagaggtggaagtggggggcatgatggaagctggggacacggtggagactgggggcatggcggacgaggacacggtggaggacatggcggaggaggacacggtggaagacatggcggaggatgcagatgctgcggtcgaaagggctgcaaatgttgctgaagtaaaaatcacaaatatatgaactgaacacactcatatacttgagtgtactccatgtaataactagtatatatgtaagaaataagaaataaaagcatggactctatccgtgcttgggctggcataggttgaatggttttcgccaaccatgcatgtagttgacacatctttttactatacaat

SEQ ID NO: 248512 - DNA, 350 bp, Glycine max
attcccgggtcgacccactcttcctcttactcttaggaaaaaaaaaaataaaaactattactatataaaaaaataactataatatatacgtataagtcataaattaaactacagaaacataacataataaaaaaaatcaataatatcataaataatgcctcatacaaaacacaatcaaaccttccatataaaatatcaatatattaaacatattcaatccatacttaatattaatcatattctcttcatatactatgacaaacctattcaagaattgtaacataaatcatcatatcaatataaacacactcagattatacccattctaaataattcatcttaccttcccc

SEQ ID NO: 248513 - DNA, 326 bp, Glycine max
tcggtccttaattcccgggtcgagccactcgtccgaaaaaaaaaaaaaaaaaaaaaaaaaaaaaaaaaaaaaaaaaaaaaaaaaaaaaaaaaaaaggaaagaaaaaaaaaaaaaaaaaaaaaaaaaaaaaaaaaaaaaaaaaaaaaaaaaaaaaaaaaaaaaaaaaagaataaaaataaaaaaaaaataagcactaattacataaaattgaaaatcataaattattacaaaataaacatataattaaaattaattacagtaaattaaaaaactttaataaaaaaaaaaccctgaagtacaaaaataaattactttgagacaaatta

SEQ ID NO: 248514 - DNA, 496 bp, Glycine max
ctcggtcctgaattcccgggtcgagccactcgtccgcccacgcgtccgcaactataatcaacttcccattcagcggatgcttgattttgacttcgtttggggcatggaaacaccatgagttgctggaataattaaccctggttctgagggatttcaaaacttttttttggtcaggaggaaattgccatcccagttcatgccaccattgaagcagcttgtgctgcacatcctactgctgatgtcttcatcaactttgcttcatttagaagtgctgcagcatcatccatggcagctttgaagcatcctacaattagagttgttgctattattgctgaaggagtacccgagtcagacactaagcaattgattgcatatgcccgatcaaacaataaggttgttattggtccatccactgttggaagcattcaagcaggtgcttttaaaattggtgacacagcttgaacaattgacaatataattcagtgcaagctctaca

SEQ ID NO: 248515 - DNA, 535 bp, Glycine max
  unsure (1)..(535): unsure at all n locations
agagagcatggntatatagacgggggacggaaagtattcttcaccggtcctgaattcccgggtcgacccacgcgtccgaagaaaatggcggtgcctttactctcgaagaatatcgtgaagaagagggtcaagaaggtgaaggggccttagagtgacaggaaaatttctgtcaagacaaactggcgcagaccaaagggtatcgattcccgtgttacgagaaagtttaagggatgcactctgatgccaatcattggttatggctcagacaataagacccgacactatctccctaatggctttaagaaatttggtgttcacaatgtgaaggacttggaactgctcatgatgcacaacatgacttactgcgctgagattgcccacaatatatccacagaaaagaggaatgatataggcgagagagccgcgcatatagatgttgtagcgacaaacagaacagccatattactcaaacaggaggatgaatagtctaaatgactaaagaagtcacttatctacaatgactcaatagttcaat

SEQ ID NO: 248516 - DNA, 532 bp, Glycine max
tgtagcatgtattcgatggaggacggaaggatatgcatgcaccggtcctgaattcccgggtcgacccactcgtccgcccactcgtccggacttataattaaaagaaaattattattaataaattactgtattttataagtgtcaattattatttaataaaatttgtaaaatactatattgaaggtattttttttaccgttgtaggatattgtcaacaatttctgtctttagatataaataataaaaagagaaaaagaataaataaaagtggaggaggagggtgtaggtttggttgatttgattgttgtgcatccatcgttaagctagtggcgatcggatccagctacagcatagagatcaaggaaggaaggaaggaagatgttgggtgttataaggcacaagagtattcgccctgccttctccgcaatcagacacttgtcttctgcagctaaagagattactgtcaaggaagctctgaactccgcactcgatgaagaaatgtcagctgatcctaaagtgttcttgatgggtg

SEQ ID NO: 248517 - DNA, 498 bp, Glycine max
ccggaattcccgggtcgagccacgcgtccggaagaagaacgcagaagccacgatgagtggcagagccatgatctcctgtttctctcctccttgagcagctccatgctctgggcccattccactctggcgccgaaaccacctcctccatgcaactcctccaccttcgctacaccttctctcgcggcggagccacctcgttgccggcggaaggagggtgtgggtgaatgtgaagtccgagaagaacttatccgaatcccccaagtacgaggatgatgtcgtggttcagaagaagaagaagcgtggtttggataacgtggaagaggaagcgaggtggtggcaagtgtttcccaaaagatgggtcattgtggttctctgcttctcagcttttcttctatgtaacatgaataatattctgtcaaaatgggttcctgtgtcagagagaagtagatcactagcgctggtctacagtggcatgtatctgggatcagtcactggact

SEQ ID NO: 248518 - DNA, 356 bp, Glycine max
ccggaattcccgggtcgacccacgcgtccgtgcacctgtgaggtctagcaagcaagaacaaattcacaattccattgtgtctactttgcttgggttgatggatggccttgactctcgtgggcaagttgttttaattggagctactaacaggattgatgctattgatggagccttactgcgccctggtagatttgaccgtgagtttaactttcctctgcctggttgtgaggcacgtggtgagatattagacattcacactcgtaagtggaagcattctcctccaaatgagctgaaaaaggaacttgcagctagttgtgtaggttactgtggtgctgacctgaaggctctttgtactg

SEQ ID NO: 248519 - DNA, 483 bp, Glycine max
gtcgagccactcgtccgaagcaaattacctttctaactaatctttaatcaatcctctaataatctccgattcaacagcaagctcaatctcaaacagcaggcgaaagctgaatcaatccttccaagttccaccaccaccgtcccaaccctcttcttattattcttcttcttcttcttaatataaacaacctcatccatactaaggaaacaaacgacatatactgcaaccatatacgttgatcacacgtcttcgatatctgactaagatgtcattatgggaaccttgtacaccgtcaacatcaaacctcccatcacggacatcgccctcgccgttacccttctctttgctacatactcagcatcgtcataagctccctcatggtctacaaccatgtcatcggcgacactgttcacagcatcttctatgcaattctgggacttatcttgttcataccggtactctactacacgcaaattgcgtatt

SEQ ID NO: 248520 - DNA, 446 bp, Glycine max
tcggtcctgaattcccgggtcgagccactcgtccgctggaaagccacctgttgattaccaaggagcaagagatgtcaaaccaattgctgaatcggcacttcaacaggtaaaggctcttttgaaggatcggttaagtggaaaagcaacaggaggatctagtgacaagacagaaaccagttcttcagtagaattgaactctggcaactttgatgaattggtgatcaaaagcaaagaactctggattgtggaatttttcgcaccttggtgtggacattgtaagaaattagctcctgagtggaagaaagcatccaatagtttgaaagggaaggttaaactgggccatgttgactgtgatgctgaaaagtctctaatgagcatgttcaaagttcatggattcccaactatcttggtgtttggtgctgataaagatagtcctattccttatg

SEQ ID NO: 248521 - DNA, 382 bp, Glycine max
cggtcctgaattcccgggtcgagccacgcgtccgggaaaaactgttttctgaaggtgaagttagaaattggtgttttcaagttttccaaggccttgggtacatgcaccagcgtggatacttccatcgcgacctgaagcctgaaaacttgctggttaccaaggattttatcaaaatcgctgattttggcctagcccgagagatcagttcacaaccaccctacactgagtatcgtgctcctgaggtgctgcttcagtcttatctgtatacctctaaagtgacatgtgggcaatgggtgctataatggctgagcttttctctcttcgtgcttttttcccaggtgccaatgaaagctgatgagatttacaaaatatgtggtgtgat

SEQ ID NO: 248522 - DNA, 559 bp, Glycine max
  unsure (1)..(559): unsure at all n locations
gagttnntnttagtagtattacgagggaggatggacggagaagtctcaccggtcctgaattcccgggtcgacccacgcgtccgagttcaacgagtttgcaaccacacacaaaaaccatacccttcccgatgtcattgccgtcgccggtgtccacggtggtctccgcagccgcgccgtacgaccgcgccaaagcggtgaaagagttcgacgaaaccaaggtcggagtcaaaggtttgatcgattcgggaatcagaaccatcccccctttcttcgtccacccgcccgaaaccctagcggacctcaagcggggtgccgaacccggatctgtgcaggagatccccacggtggcgtggtggagaaggtccggctggcggcgagcaccgtggggttcttccaggtggtcaaccacggcatcccggaggaactcctncggcggacactggcggcggtgaaggcattccacgagcagcccgcggaggagagggctcgggtgtaccgtaaggatatagggaagggcgtgtcgtatatttctaacgtggacctcttccaatcaaaagcc

SEQ ID NO: 248523 - DNA, 527 bp, Glycine max
gtagcaggtagtagaggtggagggagggatgtgtcaccggtcctgaattcccgggtcgacccacgcgtccgcttctccaatgtccgattctctcaccgatcttgctccaaatacaaattcgttacatcctaacggagggttccgacgagcatggtggacggtccgacgagtccaggcaatggtagccatgagagtggcgagcatagccctcgctctaacgtgcgcgagtaggacaggtacctccccatcgctaacataagccccatcatgaagaaggcactacctacgaatggtaaaatcgccaaggacgccaaagagactgttcaggaatgcttatccgagtttttaagatcaacctttcagacacatgtattgagatggatggattacattcagcacaagcaagaatttgcaggtttatttgagaaaatattgttgcagaagcctggatttgagcccccggtaacacatcctgctggagttgtggaagctgatttaaaatcaaacaacactgagcaaagcgtaaa

SEQ ID NO: 248524 - DNA, 483 bp, Glycine max
ggtcctgaattcccgggtcgacccactcgtccggggaaatatcaggaggtgcgagtaccggagccaaacgcgggtgtgtgtgtgtgtgagggagagagagatgcagttccattcagaaactccaaactaaacatccctggcgacaaccttaggaatctcgatcgctgaaaaaacctatgcagccccgaacacactctctgcattccaacttgtttaagtcatgcctttcgattcacccttctctcaataaatttttaatcagattcttggccaccgtcacactcataataaagttttgtttttccaaataaagggaatggcgactcctgttgagcctgcaaatgggatcagaactgaagggaagcattattattccatgtggcaaaccctgtttgagatcgactcaaaatacgttcccatcaagccgattggtcgcggagcatatggaattgtgtgctcttctgtgaatagagagataaatga

SEQ ID NO: 248525 - DNA, 442 bp, Glycine max
cctgaattcccgggtcgacccgcgcgtcctcccacgcgtccgcccactcgtccgctaagattcaagacatggaagggatcccaccttaccatggtaggcttatctttgcgggtaaacaacttgaggatggtcgcacccttgccgattacaacatccaaaaggaatcaaccctccatctcgtgcttcgcctcatgggtggcatgcaaatctttgtcaagactttgaccgggaagaccatcacccttgaggtggaatcctcggacaccattgataatgttaaggccaagatccaagacaaagatggcatccccccatatcatcacaggctgatttttgccggtaaacaacttgaggatggaagaacccttgctgattacaacattcagaacgattccacccttcacttggtgcttcgtttgagaggtggtatacagattttcgt

SEQ ID NO: 248526 - DNA, 442 bp, Glycine max
tcctgaattcccgggtcgacccacgcgtccggcaaagctgaaagcaagggctaactctgagtccaaatccaaaaccagcgaaatctcttcgttggaatggttatcagcgcatgtttggagatccgtaacacgagcacggaagctgccaaatgatgagataacaagttgcaaattggccataagcaatcgatcaagattggaaccgtctcttccacacgagtactttggaaactcagttgatgtggtgagcactgcatggttcacggcaggggaattgcttgagaaggatctaggatgggcagcatggaacgtgcacgtggctgttgcgaaccataacgacaaagcggtgagacaaaagctcaaagagtggttgaagcttcctgtggtgtaccaacttggtgtgcactttgatcctcgtactgtgaccatgttgagttccccg

SEQ ID NO: 248527 - DNA, 544 bp, Glycine max
  unsure (1)..(544): unsure at all n locations
ggtnntttaggagtattagagggcgggagagggagtcttcaccggtccggaattcccgggtcgacccacgcgtccggctaagattaacacaccaacccactagaaacatgaaaacccctaacaaagcctcattactctgattccctctcttgtccctgtccttatttatcaaccattcccatgcagcaggaatcgctgtgtactggggccaacacggtggagaaggcaccttatcagaatcttgcatctcaggacactaccaatatgtgaacatagcctacttgtccactttcgganatggccacaccgcacgactcaatctagctggtcattgtgactctaacaccatggtggccagggtgaacatcgatatcaatacttgccaaaccctggcaactaagtgttgctatcacctggaaggggggcttgaaactacctcctcagctcatatgatgatgccacacgacttggcaactacccttgggagaaattacttggaggccaaactggatcanggccattacgtgatggtatcctggactgc

SEQ ID NO: 248528 - DNA, 560 bp, Glycine max
  unsure (1)..(560): unsure at all n locations
aggggnntttagtagtattaagagggagagcgatgagagtcttgcaccggtccggaattcccgggtcgacccacgcgtccgctttcctctccttttccttccaaaccctaatttttgctactgcttatttttattcatcgcggaggcgtgggtttacgggcagaaacatttggtatcccaatccctgactggggtaagaaccctaggaagatggctgaagctgttgatagggtgatagtacctgactttcagcctaagaaagatgtgaaaatagtgacagatgagaaggccaccagtctctctacagcttctatagatgatgcagcggttattaatgatctagtaatcaagttagagaggtgccgggcaaatctttcaccagtgttcaggatgaaaccaatccaatttgagaaggatgatgacacaaactaccatatggatgtgattgctgggcttgccaacatgaaggcaacggattacagcattcctgaggttgacangcttnaagcccaagtttattgcttgccggatcaanccttgcatttggacccnttactgcc

SEQ ID NO: 248529 - DNA, 566 bp, Glycine max
  unsure (1)..(566): unsure at all n locations
tganantntttagagatgtattaccgagaccagaaggatagagagcgcatgcaccggtccggaattcccgggtcgacccacgcgtccgtctcctccatggacccaacttcgatccctacccctccggccaccaccgtccccttcactgtgggacccatcaatcacgtgacccccgccgacaacaccaacaccaaccaccctccttacgatgagatgatatacacagcaatcggggctctgaaggagaaagatggttcgagcaagcgagccataggaaagtacatggaacaagtgtacaaggaccttccacccacccactctgctttgttgactcaccatctcaaccgattgaaatccgctggtcttctcatcctcgtcaaaaaatcctacaagctccccggatctgatcctcttcccgtgctccaggcccaaaagccccgcggtcgccccccaaagctcagatcccagcccaacactgagctcacatggcctgcgctagccctcaacgacaaccctgctcttcaatccgcaaaaagaggcccgggtcgtcccaaaaagatgcatgn

SEQ ID NO: 248530 - DNA, 532 bp, Glycine max
tgttagccggtactcagaggcggagggaagggatgcttcaccggtcctgaattcccgggtcgacccacgcgtccgaagaaaatggcggtgcctctactctcgaagaagatcgtgaagaagagggtgaagaagttgaagaggcctcagagtgactggaaaatttctgtcaagacaaactggcgcagaccaaagggtatcgattcccgtgttaggagaaagttcaagggatgcactttgatgccaaacattggttatggttcagacaagacgacccgccactatctccctaatggttttaagaaatctgttgttcacaatgtgaaggacttggaactgctcatgatgcacaacaggacttactgtgctgagattgcccacaatatatccacaagaaagatgaaagatatagttgagagagccgcgcagcttgatgttgttgtgacttacataacagtcagattacgcaaccaagaagatgaatagtctaaatgactaaaaaagtcacttatctgtagtgattcaatagctcaat

SEQ ID NO: 248531 - DNA, 496 bp, Glycine max
ccggaattcccgggtcgacccacgcgtccgcacacagctagcatatattacatacacgtgaatcactaattaagccatggagaagaaatcaatggctgggttgtgcttcctattccttgttctctttgttgctcaagaagttgtggtgcaaactgaggctaagacttgcgagaacctggctgatacatacaggggtccatgcttcaccactggcatctgcgatgatcactgcaagaacaaagagcacttgctcagaagcagatgcagggactattttcgctgttggtgcaccaaaaactgttaaatggatccattcactccaacgtgaagaagatgcatgcaacgctattttataaaaaatataactactatatactatatataataagactggcgctgcatcaatgacctatgtattatagtatatattattaccgatgtcagaactatagatgcatgtactgtgcataacggctgagttattacttatgttaag

SEQ ID NO: 248532 - DNA, 502 bp, Glycine max
tcctgaattcccgggtcgacccacgcgtccgctcgtcttccacctcgcaagtcatcgtcgtcttccacgctgattctgactctgttcctggtcgtcacggtcctcgttctaattctcctggctctcggcatcctctccattcctagctcctcgcgtggaaatttgcccaaacctaacgatctcgcatccattgctcgcaacacaatccacacttccgacgatgacgacgtgaggggagagcagtgggttgaagtagtgtcgtgggagccgagagcctttgtctatcacaattttctgacgaaggaggaatgcgagtatctaattgacatagcaaagccaaatatgcataagtcatcagttgttgatagcgaaaccggaaagagtaaagacagcagagtacgtacaagctctggaacttttctggccagaggtcgggataagattgtcagggatattgagaaaagaattgctcactatagttttattcctgttgagcatggtg

SEQ ID NO: 248533 - DNA, 557 bp, Glycine max
  unsure (1)..(557): unsure at all n locations
tggggnattagaagtggacgagaggggatagaaaggtattcttcaccggtccggaattcccgggtcgacccacgcgtccgcaagtttcagttccaaacaaaacccatcaaagtctttctccctcagtgatcatatatgcattgagttctatacaaaatcctcaaaaactcttcctctctgccatgaccatggaatacagaaccttagaactcaacatcatatccgcaaaggacatcaagaatgttaatctcttctccaagatggacgtatacgccgccgtttcgctctccggtgaccctctccaccctcagggcgccaccacccacgtccacaaagacgccggcagcaaccccacgtggaactaccccgtgaaattctctgtcaacgaatcgctggcgaaggaaaatcgtttatctcttgagatcaagctcatctccgaccgcaccctcggcgacaccgtcatcggcaccgtccatgttcctctcagggaactcctggataaccccggcgatgacagctccttccgccaagtcagttatcaggtgatgaagcaatca

SEQ ID NO: 248534 - DNA, 534 bp, Glycine max
  unsure (1)..(534): unsure at all n locations
ggagcggagtgctcgggggggggatggaaagtttatctctcaccggtcctgaattcccgggtcgacccacgcgtccgacaaaattgaatgttacgaaatggaagacgtgaagccggagtatacggcggcggattgcctgggcttcgaggcttccgactcggtgccgcggctgcacacgacggagtcgagctgttcggagcaggtggtgtcggcggagtttgcgagcgaggtgcagagcgagcggaagaggcagggcaacagcgagttttcgtataattacatggatgccactctcgggaataatcagatgtcgccgctccaggatatcttcatgtacctctccaggcccttctgaaatcaacacgcacgagacggcacgacgtcgttctttgctttgtgtgtgcatgatgcatttttgacgtgcctgctgcattgcatggaagcacgagactgagtgaatgtccgtgagtgtgtccgtgctggtgcgcgtagatgattattattataaaaaaacatatntacaaattagagaag

SEQ ID NO: 248535 - DNA, 493 bp, Glycine max
accgaattcccgggtcgacccacgcgtccgggcaagatgagtttgttaaaaagcaggattggaagaatcctttgagtgtgggaaaatgagtatgtacggtagggatccgtggggaggcccgctggagattcacgccaccgactccgccacggacgacgagcgcagccggaatctccaggagctggaccgaggcgctttagacgagacccaacagagctggctcttgggcgccggagaacagaaaaagaacaagaaaacctacgtagaccttggctgcatcatcgtcagccgcaagctcttcatctggaccctcggcaccctcgccgtcttcgccttcctctccgccttcatcactctcatcgtcaaaaccgtcccccgccaccaccacaagcccccccctcccgacaactacaccatcgccctccacaaggccctcctcttcttcaacgcccagaaatccggaaagctccctcggcacaacaatgtttcctgg

SEQ ID NO: 248536 - DNA, 539 bp, Glycine max
cgaggtcgtctgattaagaggggaggaggtaaagtaatgacttcaccggtcctgaattcccgggtcgacccacgcgtccgcccgactactgattcctagcaaaccaactagagagttttcccttgatatggaggatttggacggaccgtggactgatcttgatttaaaagggagaataggatcaggttcttttggaactgtacatcatgcagagtggaatggctcggaggttgctgttaaaattctgatggaacaagacttcaaaggtgaacgcttcaaggaattcctgagggaggttgcaataatgaaaggcttacggcatccaaacattgttttacttatgggtgcagtcactaagcctcctaatctatcaattgtcacagaatatttgtcaaggggtagcttgtataggctgttgcataaacctggtgccacagagatgttggatgagagacgtaggcttagtatggcttatgatgtggctaaggggatgaattatcttcataaacgcaatccttccattgttcatagagatctgt

SEQ ID NO: 248537 - DNA, 528 bp, Glycine max
  unsure (1)..(528): unsure at all n locations
ggttaggacgtacttctatgggaggaggaaggtatgcagtcaccggtcctgaattcccgggtcgacccactcgtccgctaaagtctcattttttatcgacaattacttatgcaggaaataagatatctgtatcacgagtagtcttgattgttgtccctgttgatgtatcgataattctcttgttatgtgtctgctatttcatattgaaaagatcaaggaagaaatacaacactcttctaagggaaaattacggggaagaaagtgccactttagagtcgttacaatttggtatggtcacaattgaagctgccacaaacatgttttcctatgaaaagagaataggtgaaggaggattcggagtggtctataaaggtgttctccctgatggacgagaaatagctggtatgagactctcataaagctcggaacatgtgcaaatgaattcanaaacgaaagctattgatagcccaacttcagctaaaaatctggtgacattttaagaatctgtttgaaatatcccaataaatt

SEQ ID NO: 248538 - DNA, 463 bp, Glycine max
tgaattcccgggtcgacccacgcgtccgggaaatgttttttagatcctaaattatcttactttcttctcctgaatttcaggctctgtatgagtggttgcgcacatacttgctggaacgacgtgatgttgccaataaatctgaacttggtagaatagcaatggctcaacaaagaactcaacaaagtgtttctggtactactagtgttggttctcttggtgggttgtctgatggaaattcaagagtacaaggtccaggtggcagtaacttgccatctgatattcaagttcaccaaggctcccagccaggtggaattggatctcatgatggtggaaactcacatgggcaagaacccgaaaggtctacaattgcagaaagcagcatacacaatggaaatgaccaacctttgcagcaagtttctggaaatgaaggtggtcaaaatactttaagacgtcctggtgcttt

SEQ ID NO: 248539 - DNA, 421 bp, Glycine max
ttcccggggggacgcacgcatccgtccacgcgtacgctttctcttgttaactaattaaaatgactctcacaaaggccttgttgtttgtgaccgatctatgctggacctctgccgcatatgctgcaaggtttgacatcacaaaccgatgctcataccctgtttgggccgctgctgtgcctggcggtggcatgaggctgaactcgggccagtcatgggctttagacgtgcctgcaggaacgaaaggggcccgcgtttgggcccgaaccggctgcaacttcgacagctcggacccccgtggatgccataacagtgactgcaggaatgtcctcgactgcaaagcttacgggacgcctcccaacaccctaacggaatacgcgcttaaccagtttagcaatttcgacttcttcgacatcttccttgt

SEQ ID NO: 248540 - DNA, 365 bp, Glycine max
accggtccggattctcgacgcacgcgtccgattaaagccaacattcaggttccatcaactgatacaggagttttatttggtaacataggctagtatacatcttctaatgttcttgagagaacagttattgttctaaatgatatccatattgacatcatggactacatttctcctgcatcttgtgccgatgtggcattcagaactatgtggtctgagtttgagtgtgaaaacaacgttgccgtatatacagtattacaagattagagggacttcctgaaccacattatcaagtctacacatatgaactgcctgactacaccatcggcattggaaagtgattgtggattcctttgctcaaaccttta

SEQ ID NO: 248541 - DNA, 518 bp, Glycine max
  unsure (1)..(518): unsure at all n locations
ngagggtntnttatgacgagattgatgtcacgctcgtaccggtctcggaattcccgggtcgacccacgcgtccggcacaagccactcatgcgtgacaagactgtgctggtaaccggcggagccggttagatgggcacccacaccgttcttcagctcttgctcggaggttgcagaaccgtcgtcgtcgacaatctcgacaattcctccgaggtttctatccaccgagtcagggagcttgccggcgaatttgggaacaacctctcctttcacaaggtggacctacgggacaaggatgcactagagcaaatttttgtttccacacaatttgatgctgtcatacactttgctggactgaaagcagtaggagaaagtgtgcaaaaacctttactatactattacaacaacttgactgggacaatcactctattggaagtcatggcttgccatggatgcaagaagcttgtgttctcttcttcagcaactgtatattggtgggccaaaggagttccatgcacaga

SEQ ID NO: 248542 - DNA, 506 bp, Glycine max
  unsure (1)..(506): unsure at all n locations
gtggtnctcattatgaaagcaatantgtacactcgtccggtccggaatcccgggtcgacccacgcgtccggccacgcgtacgggaatcgctatctactggggccaaaacggtggagaaggcaccttaggggaagcttgcaacactagaaactaccaatatgtgaacatagccttcttgtccacttttggcaacggccaaactccacaactcaaccttgcaggtcattgtgaccgcaacaacaatggctgcactgggttgagcagtgacatcaaaacttgccaagaccttggcatcaaagtgttgctctgccttggtggtggtgctggaagctactccctcagttcagctgatgatgccactcaacttgcaaactacctctggcagaatctacttggaggtcaaaccggatcacggccattaggtaatggtatattggatggcattgactntgacattgaatctggtgggagtgaccattatgatgacctaaccagggcattaaata

SEQ ID NO: 248543 - DNA, 450 bp, Glycine max
cggaattcccgggtcgacccacgcgtccgccgaaattcgtcgttccgaaacgctatgacattaggctcaagcccgacctcgtcgcgcagcgttttgcatgttccgtcgccgtcaacctcgacatcgtcgccgccacctctttcatcgttctcaatgccgccgaactcgacgttagcaacgacgccgtttcattcaccaaccaagattcctccaaggttattaaaccttctcgagttgagttgtttgaaaatgatgagattctggttttggagttcccagaggaattacctattggcttcggtgtcttgtccattcgctttgaaggaatcttgaatgatagaatgaaaggcttctaccgaagtacctatgagcacaatggtgaggaagaagactatggcagttacacagtttgaaccagctgatgccaggcgatgctttccttggtgggat

SEQ ID NO: 248544 - DNA, 422 bp, Glycine max
gaattcccgggtcgacgccactcgtcctatgcgcttaatgaaggaatgggttgtgtctgtggccatgatccatttgatataggttggtgtttctttggcggtgggagggcctctggatcatgtgtaagtagtctaggtaggtaggcattaagcactcgataagacgtggttcaccctctcaaggtctctttggaggacctttatcttggaactttcaagaagctctccctctccagaaatgttatatgctccaagtgcagtggcaaaggttctaagtctgactcttctatgaactgtgctgattgtcaacgaactgatatgaaagtttctataagacatcttgtcccattcatgattcagctaatgcagcatgcctgcattgaatgtaaaggtacttggataaactattaatgacagatatc

SEQ ID NO: 248545 - DNA, 315 bp, Glycine max
tcggtttcggaattcccgggtcgacccacgtctccgcccactcgtacggtttttacttaaatcttctatatccttctactattctacgtgacgggtatattcactatggaagatgacgtggctctgctagatttctggcctaatacatttgggatgaacgtcaggaatgctcttgctgaaaatggtatcaaatataagtccaaataagacgacttgcataacaagatccctttgctcctcaaaatataaccctgttcacaagataatccctgttctcatacacaatggcaaacccattagtgaatctctcgttgc

SEQ ID NO: 248546 - DNA, 329 bp, Glycine max
tcccggtcgacgcacgcgtccgtggactgaaccgaagacgaatagatgtttctcgccgtcggaatcgtcggtcttcatcgagaatggcttctacatgcaccgtgcattggactctaacaatgtcatgtacgctactaagtatttggcttatatgctctacgagctcaggacttgcaagcatttgcctcacaatcactactatctatacatgcgcccctgtgaacagttaaggaatccttagacgctcttagagtaacagactcgtatctgaaggtccattattgacctttatgaactcctacagaacaccggcaacattttgccccgat

SEQ ID NO: 248547 - DNA, 513 bp, Glycine max
  unsure (1)..(513): unsure at all n locations
gtagcgccnntgcttacgcaagcatatatagaatcgctctaccggtccggaattcccgggtcgacccacgcgtccgatcaaatctctctttatatataaccctcacaatgcggaaatatgctgcagacagattcaggcaccttttcaaccgttcactccttcttctgcgtcaccgtcaccatcataatcaccatccctttccttattcttcttctgtttcatccctctccccattttctcgctctcgtttcttgtcctctactcctttctccatggcttctgattcccctttccctgtcaccgctcaaaacatcaaccccaaggttctgaaatgtgagtatgctgttagaggagaggttgtcacacttgcccagaatttgcaaaaggatttacaggccaatccaggttctcacccatttgatgagatactttactgcaacattggaaatcctcagtctctgggccagcagccaataacttttttccgagaggttcttgcattatgtgaccatc

SEQ ID NO: 248548 - DNA, 519 bp, Glycine max
  unsure (1)..(519): unsure at all n locations
gtgggttgttgccccgcacantgatgccatcgcctgtaccggttcggaattcccgggtcgacccacgcgtccggcgagcgagcgagcagtttcaaagagaggatttgggattgggaaggcgagggattgcgctgcgtctcttcctctgctctttcgattcatccctcattcataatcttccaatccaacaacctcagcctcacactcacacatacacacatctgaacgcgtatcgtccctcccatggcttcaaagcgcatcctcaaggagctcaaggacttgcagaaagacccaccaacttcttgcagcgctggtccagtagctgaggacatgttccattggcaagcaacgattatgggtcctgctgatagtccttatgctggaggtgtattcctagtcactattcactttcctccggatgatcctttcaaacctcccaaggttgcctttaggactaaggtgtttcatccgaacatcaacagcaatggtagcatttgtcttgatatcctaaagagcagt

SEQ ID NO: 248549 - DNA, 513 bp, Glycine max
  unsure (1)..(513): unsure at all n locations
ggtgagtgccgttctactgtcacgcctacgctatgccgtaccggtccggaattcccgggtcgacccacgcgtccggcgagcgagcgagcagtttcaaagagaggatttgggattgtgaacgcgaggcagtgcgcggcgtctcttcctcttctctgtcgattcatccctcattcataatcttccaatccaacatccttagcctcacactcacacatacacacatctgaacgcgtatcgtccctcccatggcttgaaagcgcatcctcaaggagctcaaggacttgcagaaagacctaccaacttcttgcagagctggtccagtagctgaagacatgttccatcggcaagcaacgattatgggtcctgctgatagtacttatgctggaggtgtattgctagttactattcactttcctccggattatcctctcaaacgctccattgttgcctctaggactaaggtgcttcatccgtacatcaacagcattggtggcatttggcttgatatccatn

SEQ ID NO: 248550 - DNA, 221 bp, Glycine max
attccctgctctacccactcttcctaaaaaaaaaaataaaaaaaaaaaaaaattaaaatttaaaaaaaaaaaaaaaaaaaaacaagcaaaatgttaaataaaaaaaaacaaaaaacaaaacaaaaacaaaacaaaaacaactaatacaaaaacaaaaatcccttcatatccccacacttcaacacctcctaaacccataattcaaccttttcttcatccac

SEQ ID NO: 248551 - DNA, 189 bp, Glycine max
aattccggtcgacgacgcgttcgtttgctattctgcttgctaagcactttgtatcattttaccagaaggttactggtgctgggcgaaatattgtcgaaaaaccatgggagcgtgtcactggggatggtcaacctcatgaacatggtttcaaacttgggtctgagaagcatacaacagaggcgatagttc

SEQ ID NO: 248552 - DNA, 455 bp, Glycine max
ttcccgggtcgacgcacgcgttcggtttgttggtgagtgtgaggagaagttgagtaagttggaatctcggatggaatcacagggagctttgttgattgatcagttgagttttgtttccaaaattcacaaccagatttgcaatgttgttaggataattgaccacggtagcaccgaagagctatctgaatcgttgtttgtcccgcaagaaacggatgttgaggagaatattcgtgcctctttggctgggatggagtccatatatgagttgaccaagattgttgttcataaagctaacgatgtgcttgacgagaaggatcgtgagattaagagtttacatgagacattggctcggttagttatggagaatgatcaaaattgttcttttcttaagagtgctttgtctaagaaggtggcagttgatccgtcttttagaaagagtgaacctgtttaaactg

SEQ ID NO: 248553 - DNA, 385 bp, Glycine max
ggaattcccgggtcgacccacgcgtccgatattcagaaggagtctaccttacacttggttcttcgtttaagaggtggcatgcagatgttcgtcaagactttgacgggaaagaccatcaccttggaggtggagagttcagataccatagacaatgtgaaagccaagattcaagataaggagggtatccccccagaccagcagaggcttatctttgctggtaaacagcttgaagatggacgaacccttgcagattataacatccagaaggaatctaccctgcacttggttttgaggcttcgtggtggcatgcaaatctttgttaagactttgaccggaaaaacaataactttagaagttgaaagttctgataccatcgattacgtga

SEQ ID NO: 248554 - DNA, 516 bp, Glycine max
  unsure (1)..(516): unsure at all n locations
tggaagtgccnttggtgctgacagaactcatgtcatgccgtaccggtccggaattcccgggtcgacccacgcgtccggcacaatggactacctttttcttcttccactaatcaccatagtgtggataagcattcaggtactcatctctagcttcaaaccactcaaatcttctaaaaatcccccggggcctcacccttttccaatcataggaaacatattggagcttggcaaccagcctcaccaagcacttgccaaactttctcaaatttatggtcctataatgagtcttaagctcggtaacactaccaccatagtcatttcctctccacaagttgccaaagaagtactgcaaaaaaatgatcaaatcttagctaatagaatggtcccagattgtgttcgagcacttgaccatcacatactttcggttgcatggatgccacctttaccacaatggagggcccttaggagagcttgtgccaccaaagtgttctcttctcagcagctcaatttcacaca

SEQ ID NO: 248555 - DNA, 520 bp, Glycine max
  unsure (1)..(520): unsure at all n locations
agagtggccnntnangctgcacgcacgcgtgacgtcactgtctgtaccggtccggaattcccgggtcgacccactcgtccggcaagatttgccagaaggatgcattgcaaaaatactgtcatacaccactcctgtggatggatgcaggctctccttagtttgcaaagcctttcgttctgcagctgaatcagacactgtgtgggattgttttctcctttccgatttcacctctatcattcctatttcctctacctctaagaaggatctctatttcactctctcagaccatcccaccatcatccaccagggtagaaaaagtgttcaattggacaaaaggaccggaaagaagtgttgcatgctttccgctagaaatctgaccattatatggggtgatactgttcaacattgggagtggacaagcctgccagagtccatgttccaaagagttgctatgcttcangctgtgtgctggtttgacattagtgggagcataaatactcttacctngtnctcaaatact

SEQ ID NO: 248556 - DNA, 462 bp, Glycine max
gtccgtaccggtttcggaattcccgggtggacgcactcgtccggcaaacataacttgcaggaatggcttcaatgaataaccaaaaagaaattgatctggttgggggccaatctcttctgtacatgcagctatatgggcacctaagacctatgtgtcttaagtgggctgttcaactaggtattccagacataatacagaaccatgccaaacccatttctctttctgacttggtctctactcttcaaattccaccagctaacgctgattttgtgcagcggttcatgctcttcttggcacacaatggaatctttgagatccatgagagccaagaagatcatgaactaacatatgctctaacccctgcatcaaagcttcttgtcaatagtagtgatcattgtctatctgcaatggttctagcgtttaccgatccacttccgaacgttaaataccatcacttggggg

SEQ ID NO: 248557 - DNA, 415 bp, Glycine max
ctcggtttcgattcccgggtcgacccactcgtccgcaagttgtttgatcatacgtgttttctttatgttaagggatactgtcgcgaagagaggggccactaagggcttgtaatgggtggttctatcgtctaccaaaaatttgccaagacttgtgactgtggttcacctatatcaactctgaagtgctggatagaggaagatgaataatagtagttttcttaagtgtctttattatgtccttgctaaaataagtccagttttacagacagcgattgtttatctttggtgttttttaccttttatgttagaccattgttagggcagttggaccttttattgttctactattaccatttgaacatcgaatggattttaattaattatacacaatattatggaaatttatttcttatta

SEQ ID NO: 248558 - DNA, 519 bp, Glycine max
  unsure (1)..(519): unsure at all n locations
ggttagtggtnnttgtgtatcagaatatntgctacgacgtaccggttcggaattcccgggtcgacccacgcgtccgcgtgatcttagatgttctatgtatcatttgcgcaggtaagttggaaaaaaatggaccatgacaagactgggtgccaagctcctcctgaaggtcctatattgtgcatcaacaactgtggattttttggaagtgcagctaccatgaatatgtgttctaaatgccacaaagacatgttgctgaaacaggagcaggccaagcttgcagcatcatccattgggaatattatgaatgggtcttcaagcagcactgaaaaggaacctgttgttgccgctgctgctgctaatgttgatatcccagttattccagtagagcctaaaactgtctctgtgcaacctttatttggttcaagtccagaagggagtggtgaggcaaagctgaaggatggaccaaaacgctgcagcagctgcaacaagcgagttggtttgacagggtttaaatgtcga

SEQ ID NO: 248559 - DNA, 423 bp, Glycine max
ggaattcccgggtcgacccacgcgtccggtgtttttcatctgagatgtgtggaggagctatcatctctgatttcattccggcggcggcgagcgccgggtctcgacggctgaccggcgattacctgtggccggatttgaagaagcggaagtctgacttggacgttgacttcgaggctgatttcagggattttaaagacgattctgatatcgacgacgacgacgacgatcaccaagtcaagccctttgctttcgccgcctcttctcgtctgtctacggcagcgaaatctgtggcattccaaggtcgggctgagatatctgcaaatagaaagaggaagaatcagtatacgggaatccgtcaacgcccttggggaaaatgggcagctgagattcgggatccaagaaagggggttcgtgtctggcttg

SEQ ID NO: 248560 - DNA, 516 bp, Glycine max
  unsure (1)..(516): unsure at all n locations
ggtagatgcnttgtgccgcacgcaatgatgtactgctgtaccggtccggaattcccgggtcgacccacgcgtccgcttccttctcttctcacacaacaaacatatctcttcctcttctgtccctcaatggaaggatcaggatccggtgtggttacagtctacggcaacggcgccatcaccgagaccaagaagtcccccttctccgtcaaagtcggcctagcccagatgctccgcggcggcgtcatcatggacgtcgtcgacgccgagcaggcccgcatcgcggaggaggccggtgcctgcgcggtgatggccctggagcgtgtccccgccgacatccgggcccagggcggcgtggcccgcatgagcgatccgcagctcatcaaggatatcaagcgggccgtcaccatccccgtgatggccaaggcccgcatcggccacttcgtcgaagcccagatcctcgaagccatcggcatcgactacgtcgacgagagcgaggtcctcaccctcgccgacgac

SEQ ID NO: 248561 - DNA, 527 bp, Glycine max
  unsure (1)..(527): unsure at all n locations
gttagtgggttgttgttccagaacatgtgatagcatcatcgtaccggttcggaattcccgggtcgacccacgcgtccgtattacccccctcttcatagagtgaatgggtgatttgtagagtctttgagaagagtcggtgtgggaagaaaatgcatgttccaaagtgtgggaggttcaacaacccctttggagaggaaccatcatcaggtgcttctctattgcctcctttgatggattcttctccatacaacagtgaaacaagaaccaccactgctggggagttgtctcaggtgacatgcttctctgatccaaatcaaactgaggatcagaacaacacacatgatgacattgttgatagcatggaaactcctattttgaacttctcacccttttcaaggcctgatgatgcatccactttggccaaagcaacccttttctcagccctaaaccaatcagcacagattgcacaccaaattggggaatcacagntcccagattattggtatgcgcctcaagaaccgttcatg

SEQ ID NO: 248562 - DNA, 515 bp, Glycine max
agtgtctcagtgactcatgacaaagacaagtatcttcatagctgtaccggttcggaattcccgggtcgacccactcgtccggaatatctcacgccgaagaccgtgcgttgaaatcttgcaaggacgagatccaaggatcggtgttttccttcccagaattgacgctcttcttactatcatcaagatacaaaatggaatatcgactgaccagtggtaggcaggaaaccggtggccgtgacagaagacaatctaaaagggaacaggcatatcaggactctcttattgaggatttgtcacaggattttcgtttgccaatcaaccacaggccaacagaaaatgttgatctggacaacgtagagcaagcatctttggacacacagataacatcatctaatattggctttaagctcctccaaaagatgggatggaaaggaaagggtcttgggaaggatgaaccaagaatcattgagccaaataaatctggaattagagatccaaggcttgggattggtaac

SEQ ID NO: 248563 - DNA, 462 bp, Glycine max
ggaattcccgggtcgacccacgcgtccgatttcgtgtgaaaacaagttccaaaactagaggtttcttgagtcttttttttagttttgcttgctctactctagagccattctaagtttctctttgagtcctagcttgcttttatgtgcttttcatcgctttaattgttgaataatacttgaaaatttgtcttgttaaaactatattgttttagctttcatttcatttttttggtcattggttattgcttgtctctttgtttccttgtttgtgagttgccatatagggaatttgaaaaaaggattagtgccatcccttgaagaatttgagtcaagaagcaaggggaaaaccaccttaagagctattggactaagaagcactccaaattgagtaaatcaccaaagacagaacaaccacccaaattgaggacctttttgtaattttgtaattgacaatttacttac

SEQ ID NO: 248564 - DNA, 521 bp, Glycine max
  unsure (1)..(521): unsure at all n locations
cgtaagtgggttgttactacgccaaagaagtatgctctaccggttcggaattcccgggtcgacccacgcgtccgcccacgcgtccggccctcgctccgattcctaggaacagggttttcagttttcactgtggcattaagtttccgagctcaattcagcttccgattcgccgcgcgcaaaacgacttcgtttttggattttggcgtcgcgtcctattcagaagctatatactataagatgagacgaatgaagaaagatattgaagatgaggtgcttcccaatgatatgagtggggcacagttgaatgatgagagttatgaaggaagtgctggcattgttctgaagaaggggccatggacatcaactgaagatgatattttggtggattatgtcaagaagcatggggaggggaactggaatgctgttcagaagcacaccgggcttgttcggtgcggaaaaaggtgtcggctgcggtgggccaatcacctaaagccaaatttaaagaaaggggccgttgcccn

SEQ ID NO: 248565 - DNA, 366 bp, Glycine max
tgctcgtccggttcggaatttccaggtagacctacgcgtgctggggatgtttattggttaatatttgggtatgatatacttttgtcattttgtaagttcataactttagaagccttcaactgaaatcctatatgaagtttacttgcttgatttgaaatatagtggaaactcctactttttgtgttcatgtatccagtttgatgctgcaaagataaggaagcttagaccaagctttaaagaagttgggggttctgtgactgctggcaatgcttctagcataagtgatggtgctgctgcattagtgctagtgagtgaagagaaggcacgtgagcttggattgcatgtaattgcaaagattaaaggata

SEQ ID NO: 248566 - DNA, 511 bp, Glycine max
gtagtggggttaagctgcacgagctcatcgtcacgcgtaccggtccggaattcccgggtcgacccacgcgtccgctttctcagtcaaccatgaactctcgatcactctttgccttcctcttcgcaatgggcgggcactccgtcgccgttgccgacacctcctccgcgtatccttccatccccggcacggaaaccggtgagtgctccctccgcggcgtgggcgtggtcgacggtgttctggttcctccacggcgagaagtatacgaggaggggcgaatcttcgacatcactcacagatatgtccccgagatgccggtgtgggactcgacggaggcgctcgggcaacacttcctgcggctcgataagagcatgaagaatggctcgctcgctaacagctctaacatgaagctcggtgttcacaccggcacccatgtcgacgcgcccggtcacttttacgacaattactacgacgctggcttcgacgttgactcacttgacctacgctcctcaat

SEQ ID NO: 248567 - DNA, 396 bp, Glycine max
ggaattcccgggtcgacccacgcgtccgcccactcgtccggtttatggaggcgaataggatgaaagctaattgaagattagcgccagtgttctattggatgtcccacgggactctttgattatgaatgacgagatatttggtcctttacttcccatcctcacggttgataaaatagaagaaagctttgacgtaatcaattcaggatcaaagcctctcgctgcatatatatttacaaataccaagaagcttaatgagcaatttgttatgactatttcacctggcggtttggttgttaatgacactactttacatcttgcagttcatactttaccatttgggggagtcggtgagagtggaatgggtgcataccatgggaaattcacatttgaagcttt

SEQ ID NO: 248568 - DNA, 520 bp, Glycine max
  unsure (1)..(520): unsure at all n locations
gttagcggtnctatttattgataatcgtcaggtctntaccggttcggaattcccgggtcgacccacgcgtccgactacccctgttgttcaacgcatttcagaatgcttcgtcaaaccacatggtttaacccaggtggcaaaccaaatatgtcatttaacacaatgggatattgttatgttgtctatgcactatatccagaagggtctactcttcaagaaacccacacctcttgttgatcaacatgatttcatagagaatctcttggagaagctcaaacactctctttctctcactctctcccatttctatcctttggctggccgatttgtcacccacaaaacacaagaccctccttcttatgctgtttctgttgattccaaaaacagtgatggagccagattcatctatgcaactctggatatgaccatatctgacatcctctcttccgttgacgtcccactcgttgntcagtcattgtttgaccaccacaaagcagtcaaccatgatggtcactccatn

SEQ ID NO: 248569 - DNA, 459 bp, Glycine max
  unsure (1)..(459): unsure at all n locations
cggaattcccgggtcgacccacgcgtccgctccgacttcattccagcgggtcccgccggcggggcgcagcgcgtgaccgccgacatgctgtggccgaatttgaggaagcggttctcgaagtcgctgctggacgatgatttcgaggcagggttcagagaattcgaggatgactcggaaatcgaggatgtcgatgatgaggacgatgaagaggaggaggagttgaagaagaagaagccctttgggttctctcgctccaacaacaaggctgcttctaagcctctctctcgtggagcaacaactgtgaaatctgtggaatcaaaggggcaagctgagaagtgtgccaagagaaagaggaagaaccagtatcgcggaatccgncagcgttcatggggaaagtgggctgctgagattcgcgacccaagaaagggggttcgggtttggcttggaactttcagcact

SEQ ID NO: 248570 - DNA, 371 bp, Glycine max
gccactcatccgctccttcatacttttcctcccttaagattctactctatcactcgcatcacacacactcgtacactctcatactctctctctctctctctctactacctatcaacaccaagccatcctaccctaatctctcaatgctaaaactcgcaacctcctccatcctcaccatcacctccctccaccttctctcctccaacatgccacactacccattccatgacattcctccttctctaacacacttgactaaactcatctccaacatctaccccccgaatactccacttacacacattaatcctatatcacccactccctcaactctccctttcattctcacaacccactacattcacccctac

SEQ ID NO: 248571 - DNA, 515 bp, Glycine max
  unsure (1)..(515): unsure at all n locations
agtaagtnctgtattacgtacaagatagtatgctctaccggtctcggaattcccgggtcgacccacgcgtccgctgaaacggagagtgaagagtctgatgttagtggctctgatggggatgacacctgttggatctcgtggttctgtaatctcagagggaatgagttcttttgtgaggtggatgatgattacatacaggatgactttaacctatgtgggttgagcagtcaagtgccctactatgattatgcccttgatttgattctcgacgtcgagtcgttccatggtgacatgttcacggaggaacagaatgagttgattgaatcagcggcagaaatgctttatggtctgattcatgccagatatgtgtagaccaagcaaggaatggctgccatgcttgacaaatacaagaactatgaatttggcagatgcccaatgagttactgctcctgacaggcctggctttcagttggtcaatcagacattcctaggtcaagtactgtgaaaatatactt

SEQ ID NO: 248572 - DNA, 523 bp, Glycine max
agtagtgggctgataatgcacgaatcgtatgcatcgtcccggttcggaattcccgggtcgacccacgcgtccgaacattataatttctattacatacattttgtagctaggatgagcaagttactactcattcgggttgctgggttcgtggcaacctttgtcaccatggtgatgatgatggtgcccaaaaacgtgagtgcccaaaacataggtgatgacatcgtcacacaagacttcttcaacagcataatcagtcaggctgatgatggttgtgcagggaagaacttctactcacgagatgctttccttaatgctcacaattgctacaatgagtttggtaggcttggtaatcaggatgactccaagcgtgaggttgcaactgcttttcgccatttcacccatgaaacatgacatttttgctacatataagagattaacggtgcattcagggactactgtgaccagagcaacaccgagtacccatgtgccccttacaaagcgtactatgggcgtggaccaatcc

SEQ ID NO: 248573 - DNA, 514 bp, Glycine max
  unsure (1)..(514): unsure at all n locations
gtaggggtntgctgctgcagcgcctacgtactgccgtaccggtccggaattcccgggtcgacccacgcgtccgcccacgcgtccgatcgcgagcgccgccctttttttttttttttgattaatgaaaacatgcttggcaaatgctttcgcagttgttcgtctttcataaatccaagaatttcacctctgactatgaaatacgaatgcccccgactgtccctgttaatcattactccgatcccgaaggccaacacaataggatcagaatcctgtggtgttatcccatgctaatgtatacagagcgtaggcttgctttgagcactctaatttcttcaaagtaacagcaccggaggcacgacccggccagttaaggacaggagcgcatcgccggcagaagggacgagccgaccggtgcacaccggaggcggaccgatcgacccaacccaagtccaactacgagctttttaactgcaacaacttaaatatacgctattggactgggattaccgcggcg

SEQ ID NO: 248574 - DNA, 518 bp, Glycine max
  unsure (1)..(518): unsure at all n locations
gaagggtgtgcaagcattttgacagtagtacgatcgtacctgttcggaattcccgggtcgacccacgcgttcggccagtagtcatatgcttgtctcaaagattaagccatgcatgtgtaagtatgaacgaggcagactgtgaaactgcgaatggctcattaaatcagttatcgtttgtttgatggtatctactactcggataaccgtagtaattctagagctaatacgtgcaacaaaccccgacttctggaacggatgcatttattagataaaaggtcaacacaggctctgcctgttgctttgatgattcatgataactcgtcggatcgcactgcctttgtgccgacgactcatcattcaaatttctgccctatcaactttcgatggtaggatagtggcctaccatggtggtgacgggtgactcgaaattagggcctcattccgttaagggagccttggaaacggttccagattcaaggaaagctacatgctcgcaatttaccaaatctgacacggtn

SEQ ID NO: 248575 - DNA, 516 bp, Glycine max
  unsure (1)..(516): unsure at all n locations
nggagatgcctgtgatcatgaaggcggagaatagtatgctctaccggttcggaattcccgggtcgacccacgcgtccggttgatttcagaaggaggtagaaagcgatcttttctctttgggaatgaccaagggtaaggtggaagaagagtctactagtgacttggaggaggaactgaagcgggtgactgcagaaaacaagaagttggccgaaatgctctcagtggtgtgtgagaactacaacactttgagaaaccatttgatggaatgcatgaggaaaaatggtgaaaaggaggtcagcccaacatcaaagaaaagaaagtctgaaagcagcaacaacaatagtaatttgatgggaactaacaatggaaactcagagagcagttctactgatgaagaatcttgcaagataccaagggaagaaatcatcaaagcaaaaatttcaagagtttatgtcaggacttgagcatctgatactagccttattgttaaagatggataccaatgganngaatatg

SEQ ID NO: 248576 - DNA, 354 bp, Glycine max
accggttcggaattcccgggtcgacgccactcgtccgcaagattcaacaaggacgtagagaaagctcatacctatatactactaaacaaccggaaggaagcaaactagtctactgggaactggaagaaaaacctccagcaagcaacttgcaaccaacactacacttaactatacaccatcaactgtgtgtgagaacaaccctcatcggtatcaccatggaactgatgctactacgaaaattaggaaataccagatcagcactcatctactaatcaagaatcttacttcacagacgtcaattctaaaaatatcccaacataccatgactgctctgcgagcacatatacttactaa

SEQ ID NO: 248577 - DNA, 519 bp, Glycine max
agttatgtgccgttgaccatgcacagacggtgtattgcactgctgtaccggtctcggaattcccgggtcgacccacgcgtccgtgattcccagcgaaggaagaagcgttaccaccgtcacacagctaaccagattcagaggcgggaatcgatgttcaaggagtgtccgcacccagatgagaagcagagattgcagttgagtacggagttaggcttggcgcctagacagatcaaattttggttccagaacaggaggacccagatgaaggctcagcatgagagagctgataattgtgcactccgggcagagaatgataagatacgtcgtgagaacatagccataatggaagccttgaaaaatgttatctgcccctcttgtggtggtcctcctatgaatgatgattgctattatgatgaacagaagttgagattggagaatgcccaacttaaagaggagctagatagagtatcgtacattgcagctaagttcattggaaggccaatttctcaactccacctg

SEQ ID NO: 248578 - DNA, 520 bp, Glycine max
  unsure (1)..(520): unsure at all n locations
gtaggccnttntgatgacgtagccctacgtactgccgtaccggttcggaattcccgggtcgacccacgcgtccggaacaagacacacataattagcatagttattatggggagggttgagtactccccattgtgtgagacaagaaagtgcagaggaaggttcatctacaggtcctttgcaatctcattatttgtggccatatgctttatatggcattacagatttagccacataacaaagggtgaagatggaaactgggcatggcttggtatgcttgcttcagagctgtggtttggcttttactgggtccttactcaagcccttagatggaaccttgtgttcagacaacccttcaaaaacagactctctcaaagatatgagaaaaagttgccaagagtggacatatttgtgtgcacagcagatccagatattgagccagcaatgatggtgattaacacagtgctatctggtatggcttatgattatccaactgaaaaattgagtgtgtatctctctgatg

SEQ ID NO: 248579 - DNA, 517 bp, Glycine max
  unsure (1)..(517): unsure at all n locations
agttatgggcctctgagactgcccaccgncgctacgtcatgtctgtaccggtccggaattcccgggtcgacccactcgtccgatgcgcttaaggaaggaatgggtggtggcggtggccatgatccatttgatatctgttcgtctttctttggcggtgggagtgcctttggatcatgtggaagtagtcgaggtaggaggcataggcgcggagaagacgtggttcaccctctcaaggtctctttggaggacctttatcttggaacttccaagaagctctccctctccagaaatgttatatgctccaagtgcagtggcaagggttctaagtctggtgcttcgatgaagcgtgctggttgtcaaggaactggtatgaagggttctataagaacatctggcccatccatgattcagcagatgcagcatgcctgcaatgaatgtaagggtactggaaaaactatcaatgacagagatcggttnccacagtgcaagggagagaaggttgtgcatgagaagaaat

SEQ ID NO: 248580 - DNA, 391 bp, Glycine max
aattcccgggtcgacccactcgtcctatgcgctcaatcaactaatgggtcgtctcggtggccatcacacattctacttcgtttgatgtatatgtgtcgggggaaggccctcatcatcatttggaacattgaccatgtctactcttatacacccactaccactggttacacccttttacaatctctttggcatacccttaccttttaactataaataagctatccatgttcataaatgttacatgctgcatgtgcagtatccctggttccaagtctaactctacgatgaactttactgattaaccaccatctatattgaacgcttctatatgacatcttctcccattcatgattcagcaaatgcagcatgcctacattgaattttaatttac

SEQ ID NO: 248581 - DNA, 535 bp, Glycine max
  unsure (1)..(535): unsure at all n locations
ntgggtcnttnttgccggatcgcagtgctacgtcatgccgtaccggttcggaattcccgggtcggcccacgcgtccgcgaaggcgaggaaagcatgtacgctctttcttggagcctcaagaacataattttccaaggttccagcgatacccttatccttctttacgtcaagccccctcatgccgtttattcccccttagattccacagccaggatagatcatcctgaaactccaggatatttgttttcgtcggacgtaagtgcggccatcgagaagtatggccaagaagtggcagattgcgtgttagagaaagcaaaaaaattgtgtaaagatctccaaaacgtcaaggtggaaacccgggtagaaattggagacccaagggacgtgatctgtgacatgtctcanaagttgggtgctgacttgttaatcatgggtagccacggctatggagttgtaaagagggctttccttggaagtgtgagcaattactgctcacagaacgtgaagtgcccaattttgataggcaagaagccca

SEQ ID NO: 248582 - DNA, 505 bp, Glycine max
  unsure (1)..(505): unsure at all n locations
gtctgtaccggtttcggaattcccgggtgcgacccacgcgtctcgattttaattactcttttaattcttactatataaaaatattagtctacaaattagttatgaaggtatcaattacttcttttattacgaaattattttatngataaacttagtgtatgaattattctgttaatatatttcatagtctaattataatctgataatactgactcatatttntgatgccaaaagagcttaaattaacattacaaatataaagggatagaaacttaaaaatatcaatgttcaatactatanggagattaaaaaaaaatanaaatacattagactaaagaaaactgacttttacaaattataagaagattaaaaaacaattgaaaatataacattatgcgaaattaacaaaaggtaaaaatgggagaaacctattgtggaagtaatttatactttagacaagttaaattcttattttattacatgtaacggatatttgatgcttgtg

SEQ ID NO: 248583 - DNA, 463 bp, Glycine max
gaattcccgggtcgacccacgcgtccgctttatataacctaattgcaaagatgaataccaagcccgttttcttcttgtgcttcctgtgtgcactgcttctcatctctgttgtggcaactgagccatccaaagatgagacacaagcagaagaaccaaagacacagccagatgcctggggaagaggtggaagtggggggcatgatggaagctggggacacggtggagactgggggcatggcggaggaggacacggtggaggacatggcggaggaggacacggtggaggacatggcggaggatgcagatgctgcggtcgaaagggctgcaaatgttgctgaagtaaaaatcacaaatatatgaactgaacacactcatatacttgagtgtactccatgtaataactagtatatatgtaagaaataagaaataaaagcatggactctatccgtgcttgggctggcat

SEQ ID NO: 248584 - DNA, 376 bp, Glycine max
  unsure (1)..(376): unsure at all n locations
aattcccgggtcgacccacgcgttcgactaccacccgtgttgctatctgtctttgctttgcattcctttactacgcggctgaaggagccgaggttagtttcaataacaagtgctcatacacggtatggccaggaaccctaaccggtgaccaaaagccccaattatcaacaactggtttcgagttgggtccaggagcatccaactctgtggaccttccatctccatggtccggtcggttctgggcccgaacaggatgctccaacaacaacggaaggttcagctgcgccaccgtcgattgcgcctccggtcaagtcgcatgcaacggtgccggtgcaatcccgncagctactttggtagaaatcacagttgcagcaaa

SEQ ID NO: 248585 - DNA, 511 bp, Glycine max
agagcctttggtgagtaccgatagcttcgcatgtcgtaccggtccggaattcccgggtcgacccacgcgtccggttttgatgcaacgctgtcactgagaaaggatctctatctacgaaggagcggaataaagcccttctctctgtgattaagagaatggcttcagatcggaaacttcacacttttgaggaggtggcaaagcacaaccagaccaaggattgctggctcatcatttctggcaaggtgtatgatgtcacccctttcatggaggatcatcccggaggtgatgaggttttgttatctgcaacagggaaagatgcaaccaatgactttgaagatgtggggcacagtgattctgctagagatatgatggaaaaatactacattggtgagattgatgcatcaaccgttccactaaaacggacctacattccacctcagcaagctcaatacaatcctgataagacttcagaattgcgatccagattttgcaagtactgggtccctctctt

SEQ ID NO: 248586 - DNA, 498 bp, Glycine max
gaccgtaagtactaggtatgtcgtaccggtccggaattcccgggtcgaccgacgcgtccgccgaaactcgtcgttccgaaacgctatgacattaggctcaagcccgacctcgtcgcgcggggtggtgcaggttccgtcgccgtcaacctcgacatcgtcgccgccacctatttcatcgttctcaatgccgccgaactcgacgttagcaacgacgccgtttcattcaccaaccaagattcctccaaggttattaaaccttctcgagttgagttgtttgaaaatgatgagattctggttttggagttcccagaggaattacctattggcttcggtgtcttgtccattcgctttgaaggaatcttgaatgatagaatgaaaggcttctaccgaagtacctatgagcacaatggtgagaagaagactatggcagttacacaggttgaccagctgatgccaggccatgctttccttgttgggatgaacccggcttgcaggggg

SEQ ID NO: 248587 - DNA, 538 bp, Glycine max
  unsure (1)..(538): unsure at all n locations
agatgcctntgnaaactgaccagacgatgtattcgcatgactctaccggtccggaattcccgggtcgacccacgcgtccgcccactcgtccgctcaaacctcttcgttccttcgattcattccatttcttccaaaatggccaaagacccagttcgcgttctcgtcactggagccgcagggcaaattggatatgctcttgtccctatgattgctaggggagtgatgctgggtcctgaccagcccgtgatcctccacatgcttgacattcctccagcagcagagtcgttgaatggggttaaaatggaattggtggatgctgcattccctcttcttaaaggtgttgttgctacaaccgatgtggttgaggcatgcactggggtcaatattgcagtgatggttggtggattccctagaaaagaaggtatggagaggaaggatgtgatgactaagaacgtctncatttacaagtcccaggcttctgcccttngaaagcatgctgctgccaactgcaaggggtctnngtgtggctacccagcac

SEQ ID NO: 248588 - DNA, 546 bp, Glycine max
  unsure (1)..(546): unsure at all n locations
nggggtagatggccantgncgattgacagaagagtatattgtcactgctcgtaccggtctcggaattcccgggtcgacccacgcgtccggtcatcagctagacgactgggtcttgtgtaggatctacaagaagaagaacattggaaagtcaatggaggcaaaagaggaatacccaatagcccaaatcaatcttacaccagcaaacaatgacagtgaacaagaaatggtgaaatttccaaggactagttcccttactcatcttttggaaatggattacttgggtccaatatcacatatattatctgatgccacatacaattcaacctttgattttcaaattaacactgccaatggtggaatagacccgttcgtaaaaccacagccggttgaaatcccttatgcagcagattcagggaagtaccaagtgaaacaaaatagcaccatcaaccccaccatatttgtgaaccaagtgtattatcaaagaggataatgccaaaaaaaatattaaaaaaaatgaaattggattatttggacatgacgataagc

SEQ ID NO: 248589 - DNA, 354 bp, Glycine max
cggaattcccgggtcgacccacgcgttcgcccacgcgtccgcggacgcgtgggttcaatcaacggttatacccttttctatttgagcgtcatgatgtccaccgcagcgcagcccaaggccaagaaaacggcgtcgtccaagaagcccctctcccatcctaccttcgccgcgatgatagcggaggcgatagcgagtctgaaggagagaaccggttcgagccaatacgcgataaccaaattcatcgaaggcaagcacaaggagttgcctccaacctacaagaagcttgttctcgttcatctcaagaagtctgttgctgctggcaagctcgttaaggtcaaaaactctttcaagctc

SEQ ID NO: 248590 - DNA, 357 bp, Glycine max
aattcccgggtcgacccacgcgttcgcttcttcttcttctcttcttcttcaagattgctacgacgatccaagtgatagacactcggtgcgattgaacttgtagctgaatccgagcgaactctgtacccatacgtgactggatcctctgtagtcgctatcaaatacaaagatgggattctaatggccgctgacatgggaggttcgtatggatctaccctgcagtataagagtgttgagcgtatcaagcctattggaaagcattctcttattggtgctagcggggagataagtgactatcaggaaattttgcgctaccttgacgaagctatcctttatgacaacatgtgggaggatggg

SEQ ID NO: 248591 - DNA, 402 bp, Glycine max
ggaattcccggctcgacgcacgcgtccggctgcaactcatctgcttcccctagcaactcttcttcttacttctctccgcttcttatcggcagattgctggggcggaagcacaaccgttgactagtctcaaacttaactctcatattcttcaggagtctactgctaaagagattaatgaaaatcccgaggcaggatgggaggctgctataaatcctcgtttctccaattatacagttgaacaatttaagcgccttcttggagtcaaaccaatgcctaagaaggaacttagaagtacacctgctatatctcacccaaagacgttgaaattgccaaagaattttgatgcgaagacagcttggtcgcaatgtagcactattggaaaaattctagatcatggtcact

SEQ ID NO: 248592 - DNA, 377 bp, Glycine max
  unsure (1)..(377): unsure at all n locations
ccggaattcccggtcgacccacgcgtccgcccactcgttcgcccactcgtccggggaggagaaaagtggaaagaagacaaagatgacggcgagtgcttcgagccgggctgtttgtcangtggaagattgtagggctgatcttagtaatgcgaaggattaccatcgccgtcacaaagtttgtgatatgcattctaaggctacccaggcactagttggaaatgttatgcagagattctgtcaacagtgtagcaggtttcatgttcttcaagaatttgatgaatggaagagaagctgtcgtaggcgtctggcatgccacaataaaaggaggaggaaaacacttcctgatgcaactgtagttaatggatgctctctgaatg

SEQ ID NO: 248593 - DNA, 459 bp, Glycine max
gtccggaattcccgggtcgaccgcacgcgtccggtcgtttcggggcattcttgtgcactcagttactctctctctctctggagcgtcgtcggttcggtagggcacaaaacccctttgcggatcggtggagcaaggcctcgccggcgagattcccgaggctgttcaatcagcgatcgagcaccggcgaaaagcggcgaagatgaaggttttcgtgaagactctcaagggcacgcacttcgaaattgaagtgaacccttcggacacgctttctgaagtgaagaaaaatatagaaactgttcagggtgcagatgtctatcctgctgcacagcaaatgcttattcatcaaggaaaagttctaaaggatggtactactttggaagaaaataaagtagctgaaaatagttttattggaattatgttatcaaagactaagagttcatctggtgaaggatctactac

SEQ ID NO: 248594 - DNA, 547 bp, Glycine max
  unsure (1)..(547): unsure at all n locations
aggtatatatgtggcnntggngactgtatcgagactcatagtcatgtcgtactcggtctcggaattcccgggtcgacccacgcgtccgcaagaagtggagagaaggttttcatgtcacttcaatggctactgctggaagtcgctggggtgttgttatgtctcgaaatgctggattcagtaaacaggtggttgaacttgattttctctatccaagtgagggcatccataaacgttgggataaaggttataggattacagcaaccgcagctacattggatcaatctgctcttatattaagtattccgaggcgcaaactcagtgatgaaactcaggaaactctacgtacatcgcaatttcccggcacacatgttaaggaaaaatggtcaaaaaacctttaccttgcctgtttgtgctacggacgcacagtatgctgatttccatgacattttaaagcattttattgacaagcggattatgagttgtcatcttgcccaccacaaaagatctttttgtaaaaaggaactaaattgtgtgccaacctataact

SEQ ID NO: 248595 - DNA, 536 bp, Glycine max
  unsure (1)..(536): unsure at all n locations
aggggaggccttgcgtacgcgcaggagtatagcacgctctaccggtctcggaattcccgggtcgacccacgcgtccgcggacgcgtgggcggacgcgtgggcggacgcgtgggcggacgcgtgggcaccttcgaaaatcaattttctgtcttctctgcgtcttcttcctctatcaatcgttttccatggctcgtaccaagcaaaccgctcgcaaatccaccggtggaaaggctcctaggaagcaactcgccaccaaggctgcaaggaaatctgcaccgacaaccggtggagtcaagaagcctcatcgctatcgccctggaactgttgctcttcgtgagatccgaaaataccaaaagagcacagagcttctgatccgcaagctccccttccagcgtcttgttcgtgaaattgcgcaagacttcaagaccgatttgaagttccagagtcacgctgttcttgcgcttcangaagctgcngaggcttacttggtgggtttggttgaggacaccaacttgtgtgcgaatcacgccaagaag

SEQ ID NO: 248596 - DNA, 535 bp, Glycine max
  unsure (1)..(535): unsure at all n locations
tgggtaactggntgattaagggggaggagtacgagatgctctaccggttcggaattcccgggtcgacccactcgtccggtagactacaaatcaactagaaaggagtcattttatgaccttcagcttgatgttaaaggttgtcgtgatgtttatgcttgctttgataagtatgtcgaagttgaaagtcttgagggggataacaaatatcatgctgaacagtatggtttgcaggatgctaagaaaggtgtcctatttattgattttcctcctgtccttcaactccagctaaaaagatttgaatatgattttatgcgggatactatggttaagattaatgaccgttatgagtttcccttacaacttgatcttgatcgtgaagatgggaaatatctatcacctgatgctgataggagtgtccgcaatctttacacacttcacagtgttttggttcacaagtgangtgttcatggtggacattaatatgcttttaataagccaacccttttttgacaatggtatgtggtataatggtggg

SEQ ID NO: 248597 - DNA, 536 bp, Glycine max
  unsure (1)..(536): unsure at all n locations
ngtttagcgtgcttgaaaagagaggaaaggtacgctctaccggtctcggaattcccgggtcgacccacgcgtccgcccacgcgtccgagcaactcgaaacagatgctgcagaagaagaagataacgtacaagcagcaatcaagctctcactgctattccccaaaatatttcaaaaaacataacaagaagaagaaaaaactgcaatgtatggaaaagtggttctctcgttcatcttcgtgctcttgctcgtcttctcttactcaattttcattggcaccctcgacattcgatcttatttcttccctcgcctaaagttacccgcggctgcacctgctccctgtgcacccgagcctnctcttcgggttttcatgtacgatctccctcgccgattcaacgtcggcatgattgaccgccggagcgcgtcggagacgcccgtcaccgttgaagactggccggcgtggcccgtgaactgggggcttgaaaagcagcacagcgtggagtactggatgatngggtcgcttctcacgcccgcgagg

SEQ ID NO: 248598 - DNA, 444 bp, Glycine max
cggaattcccgggtcgacccacgcgtccggtttccttctctctttcaccgataaaacaaactaaattcttcttctttctactgaaaacgatagtaatggcgacgaatccaatcgaagcggggaacggcgacgccgctcctaaccctaacgcgactaccaaaccctccgtctacctccaagacacggaggagctgaagcgagtcttcagccgcttcgacgctaattgcgacggcaagatctccgtcaccgagttggacaacgtcctccgctccctcggatccggcgtcccgccggaggatatccagcgcgtcatggacgacctcgacaccgaccacgacggattcattaacctctcggagttcgccgtcttctgccgctccgacaccgcggatggcggcgacgccgagctccacgatgctttcaacctgtacgatcatgacaaga

SEQ ID NO: 248599 - DNA, 510 bp, Glycine max
  unsure (1)..(510): unsure at all n locations
agtggccnngtgaaattgatgcgagatgtaatgctctaccggtccggaattcccgggtcgacgcacgcgtccgcgataatgagcaaaaagagaaaggcatctcaaacaagaagaaaaagcttcaacggagggtgaaaattgctgaactgaaacaaatttgcttgaggccagatgttgttgaggtgtgggatgctactgcatcagacccaaagttgctggtgttcttgaagtcttatcggaatactgtacctgtacctaggcattggtgtcagaagagaaaatttttacagggtaaacgaggtatagagaaaccaccctttcagcttcctgatttcattgctgccactggaattgagaaaatcagacaggcttatattgagaaagaggatagtaagaagctgaaacaaaagcaaagggagcgcatgcaaccaaaaatggggaaaatggatatagattatcaggttcttcatgatgcattctttaaataccaaacaaacctaaactgacctt

SEQ ID NO: 248600 - DNA, 542 bp, Glycine max
  unsure (1)..(542): unsure at all n locations
agttttaagtgnntgcttacgagagacgcataatagcacgctcgtaccggtctcggaattcccgggtcgacccactcgtccgcccacgcgtccgattagctattatgtgggggcaaatgcaatagcatgtgcatatgcagtgactgtctctcttgctcactcttgcaaataggcgtaaaggcaaaggaacgatggagacattgatcactgtgctggacacagtaatggtagctttgctcttctccggcaacggagccgccatggcggttggtctccttggcttgcaaggaaactcacatgtgcattggaacaaagtgtgcaatgagtttgggaaattttgtgaccaagtggctgcttcccttttcatatcactgcttggatcaatagcattcctcttgctgctgatagttcctactgttttgagacttaaacagacaacttaaggtgcctaggagtctttaatcactgaatcaataaatttaatggggctaattattcacaactttattntataagttatgtgggaagattaataggtttat

SEQ ID NO: 248601 - DNA, 540 bp, Glycine max
  unsure (1)..(540): unsure at all n locations
ggttttgtgcgcantgagtaagagaggagatgtattgctatgctcgtaccggtctcggaattcccgggtcgacccacgcgtccgaacaccctatgccgagtgcattctatgcagtttttgatgggcatggagggcctgatgcggccgcctttgtgaagaacaatgctatgagattattatttgaggatgctgatatgctgcaatcttatgatgctgatgcactttttctgaagaagttggaagattctcatcggagggcatttttgggcgcagaccttgccttggctgatgagcaaagtgttagtagttcctgtggaacaacggcgttgaccgcccttgtacttggaaggcatttgatggttgctaatgctggtgactgtcgagctgttctttgtaggcgaggagttgccgttgatatgtcccaagatcacaggccaagttatttaccagaacgaaggatagtggaggaattaagtggtttcattgatgatgggtatctcaatggttatctttctgtgactcgtgccctttgaaaatggg

SEQ ID NO: 248602 - DNA, 436 bp, Glycine max
gaattcccgggtcgacccacgcgtccgtgtagttagaattttaaaacttagtagttatttactgtgtttcttttttgtacttttggtgagtgtcaggtacttgatagcctcacacacaacagactatcagaatccaatgttcttattcaacactgttgcagtgattgtgctggttgttgcaaagttcccccacatgcacaaggtcaggatatttggaatcaatgctgataagtgaaatgttgctgtggccatgacacttggttaccactccttacctgctcaagagcctcttgtacttttgttctggaaaaaaaggtcacacctttgtatagaaggcagaactggaaggatactcaagtaatgttttgttgccaactgctttttaagctgcttctaaaagtattattaaacaaagtaatatgttgagttaattctg

SEQ ID NO: 248603 - DNA, 540 bp, Glycine max
  unsure (1)..(540): unsure at all n locations
ngtntagcgggctgagtaacagaatatagttatgctctaccggtctcggaattcccgggtcgacccacgcgtccgcttttcatggcaacattatcccttgcccaatccaacaaccgctacgtctttgacacacgtggcgaccctgttgaaactgacgatgaatattacatcaggccggccataacagacaacggagggcgtttcacattgatcaacagaaacaggtcgtgccctttgtacgtcggtctcgaaaacaccgacacaccgtcaggctacccgatgaaattcaccccttttgccaacaaggacgacgacgataacgtgagggtgaacacggacttgaaagtgacactggtgcaagtttgcacaacgtgtgtgcaatacaccgaatggaaattgtgtgagaatgacacgaggagtggaaggaggctcattcgtactgggcgagataatgggatacaaaatgcaagttactattttaggatttgggaaaacagatatgttgggaattataacattccgttggtgaccttacggaac

SEQ ID NO: 248604 - DNA, 539 bp, Glycine max
  unsure (1)..(539): unsure at all n locations
agttatagtgtgcttgtttcagcctgtatctgcatggctgtaccggtctcggaattcccgggtcgacccacgcgtccgcagaccctttctcaccaccatcttctttctcacactcacagtgctcaaggtttcagcaggatcctcagtgattttctacaacaagtgccagcacccagtgtggcccgggatccagcccagcgcaggaaagcccgttctggcccgcggaggcttcaagctcgccccaaaccgggcctactcccttcagctccccgctctatggtccgggcgcttctggggccgtcacggctgttccttcgacgccggcggccgggggcgctgcgccaccggggactgcagcgggtccctgttctgcaacggcatcggcggaagcccaccggcgacccttgcggagttcacccttggcaacgagcatgacttctacgacgtgagcctgttggacggtacaaccctaccatcttcatcaccccttcaagggatccngaaaatgcagctacgcccggtgcgttagccgactaaca

SEQ ID NO: 248605 - DNA, 518 bp, Glycine max
  unsure (1)..(518): unsure at all n locations
cgtagtggtnnctgaaaactgacagacacatgantgtcctgtctgtaccggtccggaattcccgggtcgacccactcgtccgcaactgcatctcgtatatgtgggcctcttcttgattggattgaaacttgggagatggtgtcaagggtcaaatacttaggcacaatgctgtttctacataacttccagaaggctgttaggtggtttcttgcctttacacataccatgcgatcatttttttcctttcttgttcaacctcttgtagagtcattggtggagatttttggatttcttctcccaagcttcaagtttttgtttgaattagctgaaagcatcttttctgtcatttggctcgtagtggatacttcttttgatatagtgggaaatgtactggagctgctcttttcaccattttggtttgtcctcaatgttgcttggagcattgctactngtattcctatatccttattttgggttctctgggaattcctatatgctcctgttcgtcttgtcctggt

SEQ ID NO: 248606 - DNA, 532 bp, Glycine max
  unsure (1)..(532): unsure at all n locations
gttttagagccttgntctgacggcggagagagatgctctaccggtctcggaattcccgggtcgacccacgcgtccggcgtcgctccgcaccagtttcaccgcacgaatatcttgttgtttggagcgatccgagagaaactctgtaaacatgttggtttaccaggacctccttacaggtgatgagcttctctctgactccttccgttacaaggaaattgagaatggaatgctgtgggaagttgaggggaagtgggttgttaaaggagcagttgatgtagacattggtgcaaacccttctgctgagggtggaggagaagatgagggagttgatgatgcagctgttaaggttgttgacattgttgacacattcagacttcaggagcaacccgcattcgataagaagcagtttgttaccttcatgaagaggtttatcaagaatttgactcccaagctcgatgcaaagcaacaagaagttgttaaaaagcacaattgaggagcaacctaattcctggttttaagaattaaggattcc

SEQ ID NO: 248607 - DNA, 549 bp, Glycine max
  unsure (1)..(549): unsure at all n locations
gaggggntagagggntgntttactaagagaggaagtatcggcactgctcgtaccggtctcggaattcccgggtcgacccactcgtccgctagtttataaaatgattggcaatctgtgatataatgttgtatgaacagagaccaggcgtcttttttttgtgtgtcatatggtattggaaaggatactgtataatgggatatccaattaattattatctgttgcaatctttcttgtgttacttccacagtcccacaacacatagggtcctaactcataagtgcccccattttaaaattttgggtcagcatctggtggtcctataggaactagaaatgtcattgtagcaacattattctcttggaaagaacatttttcattacagctataatggcgcataaaaaaatataataaaaagaaatatgaatacaaggggggccggtctaatagatccaaggttacgtacgcttgcatgctacaatataaattttttataagggcacctaaattcaatttaatggtccccggttttcaaaaattaggatgggaaaa

SEQ ID NO: 248608 - DNA, 331 bp, Glycine max
tcccgggtcgacccacgcgttcgcttactagcaggacgtcaatttcaagtacatgtctgtcggaaatgaaatgcattccacgaccagtgaatcacagtataccctatgtgccatgaccaacattcagaatgcaattacatcaccatattcacaaatcaatgtgtcaacagctatagactctactttgattactaactcttacacttccaatgatagcattttcactatcgctgcggttccatacataaatcccatgaccaacttactagcgtgcattggagccacactacttgacaacgtgaacccttactatgcttatgcaaatgatcaa

SEQ ID NO: 248609 - DNA, 513 bp, Glycine max
  unsure (1)..(513): unsure at all n locations
ggagtgtggtgaatatgatgagtagtaatgctgtaccggtctcggaattcccgggtcgacccacgcgtccgctagaaatgaagcagcacggtgttgttcgacttcatttcgaagatccactcaagagaggaagagaaaaaaaaaaaaagagagataattaataattaacaaatatttagtgttggtgttagtgagagtggagatgaaggcggagacggtgacgctgttgctggtgaacctggcggggataatggagagggccgacgagtcgctgcttccgggagtgtacaaggaagttggcacggcgcttcacaccgaccccaccggtttgggttacctcactctcttccgatccatcgtacagtcctcctgctaccccgtcgccgnctacctcggcgtgcgccacacncgngtccacgtcatcggcggtcgggcctttcctctggggccgcggcaaccttcttggtngcgttcttctcaactttcttccagcatggattataggtagcttaa

SEQ ID NO: 248610 - DNA, 432 bp, Glycine max
ggaattcccggttcgacccacgcgtccgcttgttctcaatttccaaatcacgaaactcaataagatggagaaagcgatcaacagacggaaggttttgcttcatcatctcaacccttcatcatccacccaccccaacgaatcatcctccctccatgcttcatcatgtctggcacgggatagctctgcttatcaaaggacatcgacattcggggacgatcttgtgatcgtggctgcttatcggactgctcattgcaaagctaaacgaggtggtttcaaagacactcttcctgatgatctactggctcctgtttcgaaggctgtaattgagaaaaccaatgtgaacccaagtgaacttggggatattgttgtacgtagtgtattggctcctggagctcaaagagctagtgaatgccgaatggctgcattttatgc

SEQ ID NO: 248611 - DNA, 481 bp, Glycine max
  unsure (1)..(481): unsure at all n locations
tactcggtctcggaattctccgggtgcgactccacgtcgtctcgtcccacgtcgtctcgtcagtaaagtaaaagtaccattcaaagtgttcactttcagctcttatctcgtgtttgagggnntttcggttttgtgactccaacgtctttgatctgtatcgaaatctcttaanngtttcggatcccaggtctgagcnnaatctgnngttggtagaatctctttggnntcttagagtagtcaagttttactgtctgaattagtacgatcanaattcctatctgccttcgatcctttttgcntgatgcataatgtctgatgacttcgggtgtctgggtcaaaaggaagtatgtgcatattcgcgtaccagcagcgaaatggaaaggaaatagcctgacatactcgttcagggattgaaaaaagtaattcagctataacatagatacttaaaagatgttaagaaagagttctgttgcaatggaac

SEQ ID NO: 248612 - DNA, 544 bp, Glycine max
  unsure (1)..(544): unsure at all n locations
aggttttagcggnntntnttactacagacgcatgactgtcactgctcgtaccggtctcggaattcccgggtcgacccacgcgtccggtttggcgttcaatctaacaaacttctctatatcgtgtactttttcaacacacgttacacacttgtttatttgagcctttcatataaacatcatggcttctagggtggtttcggcattggtgatagcgatcatgtcgtatggcatgaactgtaactgcactagtgttggccacatgccttgaaccgaagaggaaggtcacgattttcaggaggctaaagccaagacaacacaaactgcgaacaacggcatggaaactggtaaagatgggaaagaagccgtatagtcatggacagaatgggcttaagagaaactcactgaaggtcttgggttcaaacatgatccagaatccaccacttagaaaagtcttgactatgccggcgatgctgctcagaaatcaaaggactattcccgtgacactgctcagataaccaagactattccggtgacccttgtagaa

SEQ ID NO: 248613 - DNA, 376 bp, Glycine max
gaattcccgggtcgacccacgcgttcgcctcatcttgcaaaattctctcagctaattcgctattttcttgtagtaaacaaagcaagcgagcatatccatttcaacatggccctcaaaactggttcagttgaaatgttcttcttccccttcgtaggaggaggacatcagattccaatgatagacacagcaagagtgttcgcatctcacggagccaaatcaaccattctagtcacaccctacaacgctctaaacttccaaaactcaatcaagcgcgaccaacaatccggtcttcccatcgccattcacaccttcttcgccgacatacccgacacagacatgtctgccggtcccttcatcgacacctcggcccttctcg

SEQ ID NO: 248614 - DNA, 408 bp, Glycine max
  unsure (1)..(408): unsure at all n locations
cggaattcccgggtcgacccacgcgtccggtaaaaagatagagcgatctggaaaatcaataagttctcctccagggttgttttttcagcatgcangtcatagggataaagttgttgacttccattggaatgcatatgatccatggacgattgttagtgtgtctgatgactgtgaaagtactggaggagggggaacgttgcagatatggcgcatgagtgatttgatctacagaccagaagatgaggttttggccgagctggagaaattcaaatctcatgttgtggcgtgtgcttcaaagactgaaaaatgacatacgtcgtaggcaaaaatgagttatattattattgcttgtgtatttaatttaacatttgcngtggatgtttcatggcattttaaaaccattcatgt

SEQ ID NO: 248615 - DNA, 510 bp, Glycine max
gaggtcagtgatcaacgacaagatagtaatgctcttccggtccggaattcccgggtcgacgcacgcgtccgctccttcaaacttttcgtcccttttgacactgctctctcactcgcatcacacacaaacgagcgggcccattctctctctctctctctctctccgacctagcgagaccgagcgatccgaccctaatctcgcgatgctccgccgcgcaacctcctccctcctcaccggcgcctcccgccgccgactctcctccgacgtgccggcgacccccgccgcggattccgccttcgcggacgcgtggaagaaagtgagccccaacatcgacccgccgaagacgccgctggcgtacatgaagccccgaccacccactccctcggctctcccttccaagctcacagtcaacttcgtcttgccctactcctctgaattggccgcaaaagaaggtgatatggtcattgtaccagcaacaactgggcatatgggtgttctcccaagacatgt

SEQ ID NO: 248616 - DNA, 386 bp, Glycine max
ttcccggctcgacgcactcgtccgctccttcaaactcttcctccctctcgactcttctctctgactcgcatcacacacacacagacacgttcattctctctctctctcgctctctccgacctatcgagacctagcgatccgaccctaatctcgcgatgctcctcctcgcaacctcctccctcctcaccggcgcctcccaccgccgcctctcctacgacgtgccggcgacccccgcctcggattccgccttcacggacgcatagaagaaagtgagccccaacatcgacccgacgaatactccgctggcgtacatgaaaccccgaccacccactccctacgctctcccttccaagctcacagtcaacttcgtcttgccctactcttct

SEQ ID NO: 248617 - DNA, 539 bp, Glycine max
  unsure (1)..(539): unsure at all n locations
ggattagagcctntgctactgccagcggactcagtcactgccgtaccggtctcggaattcccgggtcgacccacgcgtccgatttgcttcttggggagttgactacttgaagtatgataattgtgaaaataatggtgtagtagccacagaaaggtatccaccaatgagtgaagctttgttaaaaactggaaggccaatcttcttctctatgtgtgaatggggatggcaagacccagcaacttgggccaaaactgtgggaaatagttggagaacaacaggggatattgaagataactggaatagtatgacttccatagcagatgcaaatgacagatgggcatcttatgctggaccgggaggatggaatgatcctgatatgctggaagttggaaatggaaggatgaccacagaagaatatcgtgcccatttcagcatatgggctttagctaaggctcctttattgggtggttgtgatattcaagcaatggataataccacatatgaactgattagccaccgaatagttgttgccagtaata

SEQ ID NO: 248618 - DNA, 539 bp, Glycine max
  unsure (1)..(539): unsure at all n locations
ggtttagcgggctgnttactacagagatgatggactgctgtaccggtctcggaattcccgggtcgacccactcgtccgggaaaaatcaagtttactcctgtatatccatattaaccttctggaatcagcatgactacacctaatggacggttcatgacacataaaaagatctgtttgtctatgagtgactttcatccagaaagttggaatcccatgtggtctgcatcaagcatattaacagggcttctctcattcatgatggacaacagtccaaccactggcagtgtaaacaccaccactgctgacaagcatcgtctagcaaaatcttacatttctttcaactgcaagaatgctacattcaggaagatgctccctgagtatgttgagaagtacaaccagcaacagctttctgagcaggctgctacatagagggtctcatcggatacgtctcccgtacagagttcaaggccagtattcgaacagaagatagtatcccatggagactacatgggaagagtaaatgggttgcagggaagtaa

SEQ ID NO: 248619 - DNA, 543 bp, Glycine max
  unsure (1)..(543): unsure at all n locations
aggttagatggcttgaaaccgagagagatttatgtgcactgctgtaccggtccggaattcccgggtcgacccactcgtccgttcacgcgttcgaaagcactcagtagggtttgcggtttcagagtttgtgactcacgcagccatgttcaacaacatcaacgccgtctgagcctcttcgtgccagctctgacagaaagaagccgacatccagatgatgttagccgtcgacgtgcacctcggcaccaaaaactgcgacttccaaatggaacgttacatcttcaagcgccgcaactacgggatttacattattaaccttgggaagacatgggagaagcttcagttagcatctagggttattgttgcaattgagaaccctcaggatatcatngntcaatccgcaaggccttatggtcaaaagagcgttctgaaagttgctcagtacactggtgctcatgctattgctgggaagcacacntccggtaccttcaccaatcagcttcagacttncgtcaatgagcctngggttcttatcctgactgatcc

SEQ ID NO: 248620 - DNA, 540 bp, Glycine max
  unsure (1)..(540): unsure at all n locations
agttttagcgtgctgaaatagagggagacggtatgctctaccggtccggaattcccgggtcgacccacgcgtccgcccacgcgttcggtggcagaagtcctaggagtgtaaaacagagacgcataatgaagacgatcttgtcgtctgagaccatgaatattcccgacggcgtgagcatcaaggttcacgctaaggttatcgaggttgagggccctcgtggaaaactcgtgcgagacttccaccatctgaacttggacttccaacttattaccgacgatggcggtaaaaggaagctcaagattgattcttggtttggttctcgtaaaaccttcgacgtcatccgcaccgacctcagccacgtagagaatttgatcaccggcgtcaccaagggataccgatacaaaatgagattcgtgtacgcacattttccgatcaacgctagcattggcaacaacagcgaagtcatcgagatcaagaatttncttcggcagaagaacgggaggaaaagtgacatgccttgagggctgtcgggtgtaaaan

SEQ ID NO: 248621 - DNA, 361 bp, Glycine max
taccggtccggaattcccggggccgaacttaatcgagaccatcagggaaatatggttcccaaggcttcaacatttccttcaggaattaaggctctggctcattatgttcatgggaaaggtttgaagttggggatatattcagatgcaggaaatcaaacttgcagtaaacgtatgcctggatcactaggacacgaagaacaagatgcaaaaacatttgcttcttggggagttgactacttgaagtatgataattgtgaaaataatggtatattagccacagaaaggtatccaccaatgagtgaagctttgttaaaaactggaaggccaatcttcttctctatgtgtgaatggggatggcaag

SEQ ID NO: 248622 - DNA, 395 bp, Glycine max
  unsure (1)..(395): unsure at all n locations
gaaatgctccttgtacatctctcttttggttttgcgggttcagagcttgtgactcgcgcagccatgtccaccaacatgtacgccgtctcagccccttcgtgccagctcttccagaaagaagccgacatccagatgatgttagccgtcgacgtccacctcggcaccaaaaactgcgacttccaaatggaacgttacatcttcaagcgccgcaactactggatttacattattaaccttgggaagacatgggagaagcttcagttagcagctagggttattgttgcaattgagaaccctcangatatcattgttcaatccgcaaggccttatggtcaaagagcggttctgaagtttgctcagtacactggtgctcatgctattgctggaaagcacac

SEQ ID NO: 248623 - DNA, 432 bp, Glycine max
ggaattcccggctcgacccactcgtccgcccactcgtccggtggcagaagtcctactagtgtaaaacagagacgcataacgaagacgagctggtcgtatgagaccatgaatattcccgacggcgtgagcatcaaggttcacgctaaggttatcgaggttgagggccctcgtggaaaactcgtgcgagacttccaccatctgaacttggacttccaacttattaccgacgatggctgtaaaaggaagctcaagattgattcttggttaggttctcgtaaaacctccgacgtcatccgcaccgacctcagccacgttgagaatttgatcaccggcgtcaccaagggataccgatacaaaatgagattcgtgtacgcacatttttcgatcaacgctagcattggccacaacaacaaggtcatccagatcagaaat

SEQ ID NO: 248624 - DNA, 508 bp, Glycine max
  unsure (1)..(508): unsure at all n locations
agatgggtnngtgtaataagtcattattgtatgctctaccggtccggaattcccgggtcgacgcacgcgtccgcttcttgttaaggttgtcggtgatgcaattgttgttggttttgtgctaagagaagaaggtgttgggaaggtttctttcgtcttttgatgatgatgtcacacaacttaacggggcagcttgtgggtgcagagatacatggctttcacacgttggatgatttggatgttagtaatactatggaggaagcaaaaagcagatggcttcgtcccaatgagattcatgccatactctgtaatcacaaatatttcaagatcaatgccaagccagtaaatttgcccaaaagtggtactattgtactatttgaccgcaagatgcttatgaacttcagaaaagatgggcacaattggaaaaagattaccgatggaaaaactggtaaagaagcccatgaacactaaaaagtggcaatgaagaaaggatcacgtatttatgcacatg

SEQ ID NO: 248625 - DNA, 415 bp, Glycine max
  unsure (1)..(415): unsure at all n locations
ggaattcccgggtcgaccgactcgtccgcttattgttaaggttgtcggtgatgcaatagatgtcggttctgtgctaagagaagaaggtgtggggaatgtttctttcgtattttgatgatgatgtcacactacttaacggagcatcttgtggttgcatagatacatggctttcacacgttggatgatttggatgttagtaatactatggatgaagcataatgcagatggctttatgccaatgagattcatgccatactctcgaatcacatatatctcacgatcaatgccaagccagtaaatttgcccataagtggtactattgtactatttgaccagacgatgctaangaacttcagaatagatgggcacaattggaaaaagaaaaccgacggaaaaactgtttaagaatcccatg

SEQ ID NO: 248626 - DNA, 514 bp, Glycine max
  unsure (1)..(514): unsure at all n locations
agggcatcnctgaacaactgaccgccgatgtantgcatcgctcgtaccggtccggaattcccgggtcgacccacgcgtccgtatagctatcttctttaataagataagatctcatccttcactaccacaaaagatgaccggggtcactgccctatttgtcaccttattactctgctacatgctcgtacatgccatgtccatactccttgaaccagcttttcaccaagaatccttatccaaaccgcaccaacagagcgttgaggcggttgatgagagctgcgaaggcgttggagacgatgaatgcttgatgaggagaacacttgccgctcacgttgactatatttatactcaaaagcataataatccttgaaatatagtactcgcagctagtactatagcatgcacaaatgcacttatggaaagatatatgaacgagaatctatgtttgattgatcttataaattaagagttggtacgtaactggctcattaaaattgtctggagttgaaaacct

SEQ ID NO: 248627 - DNA, 537 bp, Glycine max
ggtttaagtgccttgatgctgcaggagaccctacctcacgccgtaccggtccggaattcccgggtcgacccacgcgtccggttcatttctacacatccctagctctgtcgttccgtcgttgacgatggcgtttcgggtgcgaagccctgacctccggtctctctttcttctctctctcttgtccatcgcttccgccaatgtcttcttcgaagagcgtttcgatgacgggtgggaaaatcgatgggttaaatcagattggaaaaaagatgagaacgtggctggggagtggaaccacacctctggtcaatggaatggagacgctaatgacaaaggtattcaaaccagtgaggattacagattctatgctatttcagctgagtaccctgaattcagcaacaagggtaagacactagtctttcaattttctgttaagcacgaacagaagcttgactgtggtggtggctacatgaagttgctcaatggggatggtgatcagaagaaaatttgccgggatacttcttaccgtttatgtttggc

SEQ ID NO: 248628 - DNA, 540 bp, Glycine max
gtttttagtggcgtctgatttacgagagtacctcatcgtcataccggtccggaattcccgggtcgacccacgcgtccgcccacgcgttcgcccacgcgttcgcacacagctagcagatattacatacacgtgaatcactaagtaagccatggagaagaaatcaatagctgggttgtgcttcctcttccttgttctctttgttgctcaagaagttgtggtgcaaactgaggcaaagacttgcgagaacctggctgatacatacaggggtccatgcttcaccactggcagctgcgatgatcactgcaagaacaaagagcacttgctcagaggcagatgcagggacgattttcgctgttggtgcaccaaaaattgttaaatggatccattcactccaacgtgaagaagatgcatgcagcgctattttataaaaaataaaactactatatactatatataataagactggcgctgcatcaatgacctatgtattataagatatattattaccgatgtcaggactattgatgcatgtactgggca

SEQ ID NO: 248629 - DNA, 331 bp, Glycine max
gaattcccgggtcgacccactcgtccgatgcacttaaggaaggaatgggtggtgtccgtggccatgatccatttgatataggtgggtctttctttggcggtgggagtccctttggatcatgtgtaaatattaccggtaggaagcataagcgctgagaatacgtggttcaccctctcaaagtctctttggaagacctttatctttggactttcaagaagctctccctctccagaaatgtcatatgctccaagtgcaatggcaaaggttctaagtctggagcttcaatgaaacgtgctggttgtcaaggcactgatatgaacgcttctataag

SEQ ID NO: 248630 - DNA, 312 bp, Glycine max
ccggttcggaattcccggctcgacgccactcgtccgacggaagcagaaaccaatcacatactgaatcactaaaatgtcaaatttgccccaatcactggtcagggggcacagactgtcgggccgtgtagcagctccaacgccttcttacactggcttcccacgagcaaactgctctatagcgtcacctaatctcaattaactggccgtcgatcaacaacgtgctcgacctgaaaaaccctgaacttacccaaatcaatctccttgaactatataccaatatggacatatttcaaaatatcgataaggccctat

SEQ ID NO: 248631 - DNA, 453 bp, Glycine max
ccggtctcggaattcccgggtcgacgcacgcgtccgcccactcgtccgcccactcgtccgcgcactcgtccgcgagcttctgcgcacggagaaggagttcaaggttttcatggagaattacgggaggagctactccacagaggaggagtatttgcgccgtttggggattttcgcccagaacatggtcagagcggcggagcatcaggcgctggaccccaccgccgtccacggcgtcacgcagttctccgatctcaccgaggacgagtttgagaagctctacactggcgtcaatggcggcttcccgtcatcgaataatgccgccggcggtattgcgccgccgttggaggtggacgggctgccggagaattttgattggagagagaaaggagctgtcaccgaagttaagttacagggtaaatgtggatcatgctgggctttcagcaccacaggatc

SEQ ID NO: 248632 - DNA, 306 bp, Glycine max
gaattcccggctcgacgcactcgtcctcccactcgtcctcccactcgttcgtgcactccttctctagcttctgcgcacggataatagctcgagtgctttcatggagaattacgggacgagctactccacacatgaagagtatttgcgccgtttggggattttcgcccataacatggtcagagcggcgtatcatcaggcgctggaccccaccgccttccacggcgtcacgcagttctccgatctcacctaggactagtttgagaagctctacactggcgtcaatggcggcttcccgtcatcgaataa

SEQ ID NO: 248633 - DNA, 411 bp, Glycine max
cggaattcccggctggacgcacgcgtccgcttgaatttacttggtgtgaagggtgctagcatggagtcaccaggatcaaactcaagagtctgggccaccattggtgctggatctgttttagcaggagagctgtctctgatgtctgccattgcagcagggcagctagtgaacagccacatgaaatacaacagatcaagcaaagatgtaaccaaaatatcatcatcttgaggtcagggacgtggttgcagtcattaattctggactctagaataaaaaaattgagggtaagcggatttagggaaggaaaatggagaaacattagattagattgttggcatccacgtttggctctgcattgctgtctgtttagatcttttattatttggagagaggaaagtagagtattactct

SEQ ID NO: 248634 - DNA, 569 bp, Glycine max
  unsure (1)..(569): unsure at all n locations
gcgacgtatcgactgtttactgatntctntcgatcacctaccggtcctgaattcccgggtcgacccacgcgtccggttgggttgagttgggtttggattggatttctaatctaatctatacctttctttttcctattgttttaaggcacaaatccttctgccttctctcttctttcttcttcttctcctgacccttattattattccttgcccttaccctttaggcaagggaaggaagaaagaataactatattattatctttattgtaatctatctttttattataattataattataattattgttgttattattccttaaatatggattcgccgtgtctctccaacgattcggtttctggattcaaagacaaggagtcaatggttgacccctttttggtcgaagctctccagaaccctcgtcaccggcttaccattttgaggatggagctggagatccaaaagttttgaataatgctgatcagctgcatttgagtttcatcaattcccttcttcctaatctcgactggcttgacaccttgttgctcaacactactacatgcaaacc

SEQ ID NO: 248635 - DNA, 396 bp, Glycine max
aattcccgggtcgacccacgcgtccgcttgttggtaaagaaagaaagagaagagaagaatcgaagactaagatggaggacgcatcagcgtcaaagttcattccacaccaaatcggaggggtccaaaacgacgcgcttcgattcggtctccatggagtcaagagcgacatcgttggttctcaccctcttgaatcttcactccaatctacaaggagaatggatgaagcgagtaagaggcaatgcaaagttaacctgtacggtactgcttttcccatgaaggacgagcttgacaggcaaatcctgtccaggttccagctgcctacttgaccaattccttcttcaatgctggttttggagactgttacaggaagtgttgatcactttggtatttaggatt

SEQ ID NO: 248636 - DNA, 567 bp, Glycine max
gtttgtttatcttgagaatcaggatagcgatcgactgtcctaccggtcctgaattcccgggtcgacccacgcgtccggagagtgagagaaaagagaagagaagatgacaacacgcttcaagaagaacaggaggaagaggggccacgtcagcgctggccacggtcgaatcgtaaagcacaggaagcaccctggaggacgcggtaacgccggaggcatgcaccaccacaggatccttttcgacaaataccaccctgggttcttcggcaaggtaggaatgcgctattttcacaagcttcgcaacaaattctactctccgatcctcaacatctacaagctgtggtccctggtcccgcaagaagtgaaggacaaggcctccaaggagaacaaggcgccgctcatcgacgtcacgcagttcgggtactttaaagttctcggaaagggcgttttgtcgcataaccagcccgttgtggtcaaggccaagcttattttcaagatcgcttgaaagaagatcaaagaggcttgcgtgcgccgtgttcttaccgtttggattttactgtatcacctttt

SEQ ID NO: 248637 - DNA, 562 bp, Glycine max
  unsure (1)..(562): unsure at all n locations
cgagtgccggtgcctgatnantcctgatancgatagtactgctcgtaccggtccggaattcccgggtcgacccacgcgtccgaaaacttctctctcacactcactttctctctctataactctttctcacccgctagggtttccggttcatcgcatcttgagtttgcaacctcgtcttgtgatttccatggagggtgctgggatggaagagaataatattattaatgatgatgataataataacaagtctgaggcgcatttgacttctgccgctgcttttgtggagggtggaattcaggacgcttgtgatgatgcttgcagtatatgccttgaagctttctgtgatagtgatccttccacggtgacgagctgcaagcatgagtttcatcttcagtgcattctcgaatggtgtcaaagaagctcccagtgccccatgtgttggcagcctatcagtctcaaagatccaacaagccaagaattacttgaagcagtggaaagagagcgaaactttaggttcaatccatctagaaatgccacaatatttcatcatccaacactgggg

SEQ ID NO: 248638 - DNA, 404 bp, Glycine max
cggtcctgaattcccgggtcgaccgcacgcgttcgctcacgcgtccgtccactcgtccgctgctcgtgcctctagggttatcatatctccatttccagggcctctctctcagtttccaagaatcttaatctatggtaaagtcttacccaaccgtgagcgctgattaccatgttgccgttgagaatgcgaataataagctcataggcttcatcgctgataagagattcgctcctctaatgctccgcttggcatgtcactctgctggaacttactacgtgagctctaagaccggtggtcccttctgaaccataaagcactcctcctaactcgctcacggctctaacaactgccttgacattcctgttaggcttttgtagccacttaaagctgattttactattttg

SEQ ID NO: 248639 - DNA, 571 bp, Glycine max
  unsure (1)..(571): unsure at all n locations
gtgaccgattgcttatttctgtatangcccgagtaccnactngacggtccggaattcccgggtcgacccacgcgtccgcttgtctcaaagattaagccatgcatgtgtaagtatgaactaattcagactgtgaaactgcggatggctgattaaatcagttatagtttgtttgatggtatctactactcggataaccgtagtaattctagagctaatacgtgcaacaaaccccgacttctggaagggatgcatttattagataaaaggtcaacacaggctctgcctgttgctttgatgattcatgataactcgtcggatcgcacggcctttgtgccggcgacgcatcattcaaatttctgccctatcaactttcgatggtaggatagtggcctaccatggtggtgacgggtgacggagaattagggttcgattccggagagggagcctgagaaacggctaccacattcaaggaaagcagcatgcgcgcaaattacccaatcctgacactgggaggtagtgacaattaataacaattaccggctcattgagtcttgttaattggaatggtaca

SEQ ID NO: 248640 - DNA, 569 bp, Glycine max
tgaatatggatgtgcctatctaccgaaattcctgatgtcttctcgactgtcgtaccggtcctgaattcccgggtcgaccgacgcgtccgcccacgcgtccgcccacgcgtccggacgccaatgcatccattcgggaaagtgaagggtgcagggtttgagtacatgacaccgcggaggtcaaacttggcgaacatggggcatgtggtgataacggagtctgagctggggccgtcgccatcggatgtggcggcggcgatcgcgaggaagccggtgatcgacgagggggagaattcaacggtgggagggtggagcttggacgcggagagcgtggaggggctgcagtcgaagctggagaggtggcggacggacttgccgccggtggtcgatcgctgctaggtctctagctacccaacgacgagcaccaccaagacgagccggcactcgcggaggcacaccgacggcgggagtactgggagtggcttgttctcatgctgtagtaacatatgtggtgttgaatgctacgttggttgctgcggtgaaccctaaagaaagaagaaccgtattcgtat

SEQ ID NO: 248641 - DNA, 566 bp, Glycine max
  unsure (1)..(566): unsure at all n locations
gtatgtcgtgtcctatgtccgatatacctacctttctntgcactgtcgtaccggtccggaattcccgggtcgaccgacgcgtccgtgagaggtcaacacaaggcctattgaacaatttcacatacacagctgcatagaagctgcatcgaacactttcatcagtggattcaattgtatcagtctcatctccattgcacattaatgctactattcaatcctctggtcatgttatcagccacaccgaggtctatgaaagtgagttcttaaacaacttcaggtaagctgcggtggttcacattctaggaaacacaattgtcagggcaaggagggattcaagattccacaagaaaatagctgatgattatatatatgcatttcttatgaagatatgcatggaaaatagtgtgatcttcaatgttcctcatgagagtctattaaatgttggtcatgttttctatgtatagcctctactcctcttctcttggtaatacttgcgtgaacattgactttatattgcacaattaatcaaaatcatgttaaaattacttataataataaaatttttt

SEQ ID NO: 248642 - DNA, 567 bp, Glycine max
gatgatagtattgtgtgttgatacttttgaatcacttgcaggtccgaattcccggtcgacccacgcgtcctgcgaaagtgaaataccactacttttaacgttattttacttattccgtgaatcggaagcggggcgctgcccgtctttttggacccaatgtcggcttctgccggtcgatccggacggaagacattgtcaggtgttgagtttggctggtgcggcacatctgttaaaagataacgcaggtgttctaagatgagctcaacgagaacagaaatctcgtgtggaacaaaagggtaaaagctcgtttgattctgatttccagtacgaatacgaaccgtgaaagcgtggcctatcgatcctttagtccttcggaatttgaagctagaggtgtcagaaaagttaccacatggataactggcttgtggcatccaaacgttcatagcgacgttgctttttgatcctttgatgttaggtcttactatcattgtgaaacagaatttaccatagtgtggatttgtcaattcactatatggaatcttatcttgggattaacaccgttcttag

SEQ ID NO: 248643 - DNA, 409 bp, Glycine max
aattccggtcgaccacgcggcggggatatcgtgtctgctggagtatatcgtgtctttgggtcagaaatagctgagcttccattgggtgctacgactgctgatcatcaaggacagggttattttcagtgcctgttatcttgtattgagacgctacttggatctttaaatgtgaaaaaccttgttctaccatctgccgatgaaactgattcaataggactggtgaatttgggtttacaaagctaccccaagatgagataaacaaatataagaaattatatcgcatgatgatatttcaagggacctcaattgtacagaatcctgtttctgaaacactctgagctactttctagctggagtttgtgtaaagtttttttgtatgccccttatgcaatatactattttcttggtt

SEQ ID NO: 248644 - DNA, 569 bp, Glycine max
  unsure (1)..(569): unsure at all n locations
gtgacacgagtggctatttgctactgttcangtatccagtngcaaggtccggaattcccgggtcgacccacgcgtccgcgccatctccggcggaagccgcaaccgcaatcggcatctcggcgagaaccgcttctacagtgggccgccggtgaggaaacacagagagaagcaggaacagcagcggtcgtcactgtcgagagcttcctcggagaataggcccggttcctcttccgattgttcaatttcttcgcgcgccacatcggacatgtccaatttggatcggttgttggagcacatcacgccccttgttcccgcccaatattttcccaagacgaactcgaggaggtggaaatcgagggaagcggaattgcatccttactttgagcttggggacttgtgggagtcttttaaggaatggagtgcttatggggcaagtgttcctatagtgttgcatgggaatgaatcctggactcaatattataacgtcttcttgtctgccattcagctatatatcgatccgtacaagcccttcacacgacttaggaaacccagtcaagaaatggactctt

SEQ ID NO: 248645 - DNA, 489 bp, Glycine max
gtccggaattcccgggtcgacccacgcgtacgctgaatactacgctcagagatcaacaccgggtggatgtctcatgactgaaggcaccttgatgtgtccaacgtcttctgggtttcctcatgttcctggaatatactcagatgaacaggtagaggcatggagaaatgtagtggacgccgtgcatgccaacggtagctttatcttctgtcaactctggcatgttggccttgcatcacatccagtgtatcagcctggaggggctctaccctcttcgttcaccagcatacccatatcatacaagtgggaaattctcatgcccgatggctcccatggcgtctatacatagccttgttcacttaccacttctgagatatctgaaatagtgcataattatcgccaagcagctattaatgcaattcgagcaggttttgatggaatcgagattcattgagcacatgggtatctcatttggtcaattctttaaaggat

SEQ ID NO: 248646 - DNA, 569 bp, Glycine max
  unsure (1)..(569): unsure at all n locations
gtgagagatgtgctaagtccgagangcttgatgccaactcgactgtcgtaccggtccggaattcccgggtcgaccgacgcgtccgccctaacaactctctccacctcaaccctctcttcacgcgcccttctctctccctgaggcgccgctcgcacactcgccgctccttcgtcgtcaaagcctcctccagcgagcttccgctagttggaaacaccgcaccggatttcgaagcagaggctgtgtttgaccaggagtttatcaacgtgaaactatctgattacattgggaagaaatatgttgtgctcttcttctacccgttggacttcacttttgtttgtcccacagaaatcactgctttcagtgaccggcatgcagagttcgaggcactaaatactgagatattgggtgtttcagttgacagtgtgttctcgcaccttgcatggatccaaacagatagaaagtcacgtggccttggtgacttgaattatcctttgatttctgatgtcaccaaatccatatcgaaatcttatggtgttctcattcctgaacagggaattgcattgagaggg

SEQ ID NO: 248647 - DNA, 564 bp, Glycine max
aggatttgtagtcctatgttggtgatgcatgataccggtcggactgctcgtaccggtccggaattcccgggtcgacccacgcgtccggaaaaaggggttagggtttgttcttgtgatcgaagctaagcgaagcaaaatgggtggatcagggagggacgtgaagtcgaagggcgaggtcgacgaggtggtggcgagtggctctccggttatcctccacttctgggcgtcctggtgcgaagcttccaagcacatggaccaactcttctctcacctttccactgatttccccaacgcccgcttcttaagggtcgaggccgaagagcaacccgagatttctgaggcttactccgtctccgctgttcctttctttgccttctgcaaggatgggaagacttttgatacattggaaggagctgatccgtcaagcttagccaataaggttgctaaagtagcaggctcaattaaccctggagaagctgcatctactgccagtcttgggatggctgcaagggcttctggtcttgaaacggtgaaagaattagcaaaagacaatgattctttaaa

SEQ ID NO: 248648 - DNA, 579 bp, Glycine max
  unsure (1)..(579): unsure at all n locations
aggatgcattagttgtctagttaatgagactcatcgacnntcgtngaaggtccggaattcccgggtcgacccacgcgtacggcgtggacctggaatgactatgcatagattacccctatttgtgtggtctgttctagtaacaggattcctacttttattatcacttccggtactggcaggggcaataacaatgttattaaccgatcgaaactttaatacaaccttttttgatcccgcaggagggggagaccccatcttataccagcatctcttttggttcttcggtcatccagaggtgtatattctcattctgcctggattcggtatcataagtcatatcgtttcgactttttcgggaaaaccggtcttcgggtatctaggcatggtttatgccatgatcagtataagtgttcttggatttcttgtttgggctcatcatatgtttactgtgggcttagacgtggatacccgtgcctacttcaccgcagctaccatgatcatagctgtccccactggaattaaaatctttagttggatcgctaccatgtggtgggggttcgaatccaatacaaaaacaaa

SEQ ID NO: 248649 - DNA, 577 bp, Glycine max
gggtagagtcgtatgagtgttgctacgagcgatagtactcactgtccggtccggaattcccgggtcgacccacgcgtccgcccacgcgttcgcccacgcgttcgcccacgcgtccgtataaatccaggttctgcaaccggtgcgctacagcagcatcacttatgatgtgaacccaagttttgtccttatggacatcgatggtctgcgagttgtggtttatgtatacgaacttattgatggagaggttaaggttgacaagattgattttaagaaatcatccacaagccactctgctcattaaacactgggattttggtctactctcttttctctttctcttatttggctgtttagttttctttttactccttcaaacttttcaagggtactgtttttagttgtattttgctttgtatgtacacttgtatttggccatatcataggattcttaggatttggttaatatgtgatctgcgccaaacgtaacgactgattgatcagcaatggctgtgtattactactccttttacaagttgcccagagatgatatgcaaccataaagaaaaaattttttttt

SEQ ID NO: 248650 - DNA, 508 bp, Glycine max
gaattcccgggtcgacccacgcgtccgcccacgcgtccgaacaatggcgtctctctctcacctcaacaaactcctctgcatgcccccgcgcgactctggaccctctatttcgccaccacgcagcagcgtcggaatttggaccaaacctgtcggaaggccgaggctactggtgcgtgtccgagcggtcacgagcgacgacgagtgggggccggagaaggaggaggcgtacggcggcggcgtagcggtggaggagaaaccgacgaagtcggagacggagacggagaagctgaagaaggccttggtggattcggtttatggcaccgatcgtggactgaaagcaacgagcgaaacgagagcggagatcgttgaactcatcacacagctcgaggccaagaaccctaaccctgttcccaacgacgccttgactcttcttaacggaaaatggattctcgcgtatacatactttgcaagtttattcccattggtgacaagtgggacactaccattg

SEQ ID NO: 248651 - DNA, 568 bp, Glycine max
  unsure (1)..(568): unsure at all n locations
cgatggacgantggcgtgtatgctacntgactttgtancgactgtccggtccggaattcccgggtcgacccacgcgtccgcgaaggctccctcgccggaagacgtctccgtcgagaaactccgggatgttctcgccgaactggatagggagcggcaagcgcgcatcgccgcggagaatacgaagtcggaattgcaggtttcgttcaacagattgaaggcgctagcacacgaggcaataaagaagcgcgatgagttcggtcgccagcgagacgacgccgttcgggagaaggaggagacggcgaagcaattagaagaaaccgcgaaggaacgcgacgcgctgcgatcggagattgggaattcgagccacatgctggtcacgggtatggagaaaatctcggcgaatgtcagcagcttcgccggcaacgcgctgccgctgccgcggtcacagaaatacatatagacttgtatataaaaaaaaaaaaatnttttattaaaaaaaaaaaggggggcccgtctataggatcccaagctacgtacccgttcatgcgaagtcatagcttttctataa

SEQ ID NO: 248652 - DNA, 572 bp, Glycine max
  unsure (1)..(572): unsure at all n locations
cgagagagattggccgaagctcttagatgctagctaccgatcgaactgacgtaccggtccggaattcccgggtcgacccacgcgtccgcccacgcgtccgaacagaatctcctctcaacacctttgccttgctgcagttcgcaactgcaagtgcactcaaatataaatatatatacatatatatatatatatatatatatgtattacttcatggtcacacatagttaagtttattaattactaggtagctggttttgaatagggtagttggtagttatagatggtgtcccagatatggaagaagcaggtttaggagattgttgctcctcgaattcgacgattacgaggaagagcgataagcgaaagcagcaacaccaacaacaagagaagccatacagaggaataaggatgaggaagtggggcaagtgggtggcggagattagagaacccaataagcgttcgaagatctggctgggttcttacgccacccccggcgccgacgcacgcgcctatgacaccgtcgacttccacctccgaggcccttacgctcgccttaaacttcccgaattggn

SEQ ID NO: 248653 - DNA, 577 bp, Glycine max
  unsure (1)..(577): unsure at all n locations
tgtatgctcatatgagtgttgctacgaccgatcgatnncactcgcaggtccggaattcccgggtcgacccacgcgtccggagagcccgtggctcttaaaattcttgacaaggagaaggtgctaaagcacaagatggctgaggagatcaggagagaagtagctacaatgaaactaatcaagcatccaaatgttgttcgattgtatgaggtcatgggaagcaagaccaaaatatatattgttttggagtttgtaactgggggggaactctttgacaaaattgtaaaccatggaaggatgagtgaaaatgaagcacgtagatatttccagcagcttataaatgctgttgattattgccatagcaggggtgtctaccacagagacctgaagccagaaaatttgctattagatacttatgggaaccttaaagtttctgattttggtttgagtgccctctcccagcaagttagggatgatggacttcttcatactacatgtggcactccaaattatgttgctcctgaggtccttaacgatagaggctatgatggggcaacttgcagacttgtgggtcattgtt

SEQ ID NO: 248654 - DNA, 570 bp, Glycine max
  unsure (1)..(570): unsure at all n locations
cgtgagagatgtgattgtcgctgatnacattgagancgacttgccggtccggaattcccgggtcgacccacgcgtccgatactataggtctcgcccaatacctactctccgctcccaagagcacgcaccaccactattgcgcttcttcgtcgttctccctctttttcttcttcttcgctaaacccttttttctatctcactaacacaacaatgggagacgagaagaagggcaagcctgctgcttccggcgtgtggtccaccatcaagcctttcgtcaatggtggagcctccggcatgctcgccacctgcgtcattcaacccatcgatatgatcaaggtgaggattcaacttgggcaaggatcagctgcgcaggtcacttccaccatgcttaagaatgagggttttgctgccttctataaaggtctatctgctggattactcaggcaggctacatacaccaactgccgtcttgggtcatttaaaatcttgacggcccaagctattgaagctaatgatgggaagcccctgccactgtatcagaaaagctctatgtgggctgactgcttgtgn

SEQ ID NO: 248655 - DNA, 565 bp, Glycine max
  unsure (1)..(565): unsure at all n locations
cggtggccgttgggtgtcgctgaganccttgatancgatgtgccggtccggaattcccgggtcgacccacgcgtccggtttgtctgtcacgagactcatacattgtgctgccaattatagtaactctctatttctcttggcatctctcaagttctgaagaagaaacatgtgtggaggtgctatcatctcagacttcattggtgtgaagcgtggccgcaacctcgccgcgcaggaactatggtctgagcttgaccctttctctgacttccttggcttcgataccaccaattccaaaaaccaaccacccctgcagaaaattccagacaaaaaagtggtgtcatcatgtgagaagaagaagaaaagcgtggtgggtgcagaaaagaagaagagtgatagtgggcgagctcgtaaaaacgtgtacagaggaatcaggcaaaggccatggggcaagtgggccgccgagataaaggacccacacaagggtgttcgtgtctggctcggcacctttcccaccggcgaagaagcccgcccaagcctacgacgacgccggcatacgcattcgggg

SEQ ID NO: 248656 - DNA, 568 bp, Glycine max
tggatatcgggtgcctatactaccgtgattcatgataccgatagtactgcccgtaccggtccggaattcccgggtcgacccacgcgtccgctctcccgtgtcgtgtcgtgtcttcttctctaaaataaaaaaccctaacttctggacctttggccgcatcgccaccgattccctatctccactaatcaaagaaaagaaaatgagtagacgctcgagcagaactgtctacgttgggaatctacccggtgatatccgtgaaagagaagttgaagatctgtttctgaagtacggacacataacacacatcgacctaaaggttcccccaagaccacctgagtatgcatttgtagagtttgaagatgctcaagatgctgaggatgcaattcgtggtcgtgatggctatgattttgatggccaccggttactggtggagcctgcccatggtgggcgtggtcattcatcctcaaaagatcggcacaatagtcacagcaatggccgaagtggacgtggggtatctaggcgctctgaatatcgtggtctagtcactggattgcccttttcggcatgc

SEQ ID NO: 248657 - DNA, 415 bp, Glycine max
cccacgcgtccgaccacgcgtgcgaccacgcgtccggatttgtgcacatagagacaccatctccacctgctgctggtggttatggcaatactgcatatagctacggaaaaaagccccattcctcctctgagaataccccgaaatatggttcaaagaaagcattgcttggagataatggagatagaggaaattcaacaagggatgctaaggctttcaagaaatcatcaccaaagatatgtaaatactggatcaacaacaattgtgcacatggtgaacaatgcctgtatctgcattcatggcttcatggtgatgggcttttcacagtaacgaaacttcatgaacataagaaagttatcactggcatcgcactttctgctggatccgacatactttattctggcagcactgatgggac

SEQ ID NO: 248658 - DNA, 373 bp, Glycine max
tcctgaattccctggtcgacccactcgtcctagaaaaaaaaaaaaaaaaaaaaaaaaaaaaaatataaaaaaaaaaaaaaaaaaaaaaaaaaaaaggaaaaataaaaaaattataaaaaataaaaaatttaaataaaaataattacataatttttatttttttttatattatattaaatttaattaacttttattatttttttttaactttatttattttttaaattttttttttttcctttttaatcgcctttatttttattctcttttctttacctttcttatattcttttattcccatacccttttcccttattaactttttctcatatttaatttttatttttaccttccctttatcttttcattaatt

SEQ ID NO: 248659 - DNA, 580 bp, Glycine max
  unsure (1)..(580): unsure at all n locations
agtatgccctggtagtgttgctgagacctgctcgactcacctaccggtccggaattcccgggtcgacccacgcgtccgcccacgcgtccgcccacgcgtccgaaaggattctacccgccgctcgatgggaattgcgcttagggcgtctcgtanggctaatccgcctcacgagggtcaccaacggcacgtgcctttggggggccgaggccccctactgctggtcggcaaacggacggcgggcgcacgcgtcgcttctagcccggattctgacttagaagcgttcagtcataatccaacgcacggtagcttcgcgccactggcttttcaaccaagcgcgatgaccaattgtgcgaatcaacgggtcctctcgtactaaggtgaattactattgcgacactgtcatcagtagggttaaactaacctgttgtacgacaggctaaacccagcttacgtttcctattggggggtgaacaattcaacactcggtgaattctgcgtcacaatggtatggagagcccccacttcaatggtctaaaagcgacgtcgcttttaaaactttgtgtggtctcaaaaacaactc

SEQ ID NO: 248660 - DNA, 580 bp, Glycine max
  unsure (1)..(580): unsure at all n locations
agttatggctcgagtgagtgttgctagttaccgatagaactcacgttccggtccggaattcccgggtcgacccacgcgtccgagagaaacaaatggcagcactgggtggctttaccgacatcaccggagcacagaacagcatcgagtatcgaaaatctcgctcgctttgctgttgatgaacacaacaaaaaagagaatgcagttctggagtttgtgagggtgattagtgcaaagaaacaagtggtttctggcaccttgtactatatcactttggaggcaaatgatggtgtgacgaaaaaggtttatgaaactaaggtgttggagaaaccatggttgaacatcaaggaggttcaggaattcaagcccatcactgttgctgttaatcctctntcggtgacggtctagcacatagctaggttatggaagtgactagcttggccgcaagagtaataatatgtatgaactgaataaatgtacctattaactctacaaacggtgtgggggtgtgcatgtttgccatcctatatatttcagtttaaaaaaaataaattttttgtttgaattggttattaataattag

SEQ ID NO: 248661 - DNA, 454 bp, Glycine max
aattaccgggtagacccacgcgtccggccacgcgtccgtccacgcgttcgcaagtactttcttacaatcaaaaccaacaacaactatggcgagttgggaaaagcactacgatgagcagggtcgcaaggttgacgagtatggcaacgttgagaagcaaaccgacgaatacggtaaccctgttcatgctgctagtgtcacctatgtagccaccagaactgctgctggtggttacagtgatgacattaataagcaacatgataccaccaatgcctacggcgtagacactggtagacagcattctagtggtggctacgatggtgacactaataaacatcatggaactactggtggctataatgatgacaccaatagacattatggaactaccggtgtctatggtatagacaccgataggcaacaacatgggactactggtggctatgccggtgacact

SEQ ID NO: 248662 - DNA, 568 bp, Glycine max
cgatgccgtgtgggtgttgctgagagcgctgagatcgcactgtccggtccggaattcccgggtcgacccacgcgttcgcccacgcgtccgcccacgcgtccggatttgtgcacatagagacaccatctccacctgctgctggtggttatggcaatactgcatatagctacggaaaaaagccccattcctcctctgagaataccccgaaatatggttcaaagaaagcattgcttggagataatggagatagaggagatgcaacaagggttgctaaggctttcaagaaatcatcaccaaggatatgtaaatactggatcaacaacaattgtgcacatggtgaacaatgcctgtatctgcattcatggtttcatggtgatgggttttccacagtaacgaaacttcatgaacataagaagggtatcactggcatcgcacttcctgttggatccgacaaactttattctggcagcactgatgggacaagtaagatatgggactgccatactggtcaatgtgctaaaagcatcaatcctggtgctgaggttacctctttgatcaatgagggggc

SEQ ID NO: 248663 - DNA, 564 bp, Glycine max
  unsure (1)..(564): unsure at all n locations
cgtgtgtcgtgtgagtgttgactgagagccttgagatcnacttgccggtccggaattcccgggtcgacccacgcgtccgccagattcaaccagttaaacttggaacccaaggctttgaggtttcaaaattgggattcggatggatgggccttactggagcgtacaatgaccctctccaagaacaggatggcatatctgttatcaagtatgcgttcagtaagggaatcacattttttgatactgcggatgtttatggagccaatgctaatgaacttttggttggaaaggctttgaagcagctgcccagagaaaagattcagatagccacaaaatttggtattgcttcacgaggttttcctgatatgaagatcaagggttcgcctgaatatgtgcgatcatgctgtgaagctagcttgaagcgtcttgatgttgaatacattgatctctattatcagcacagagtggacacatctgtacctatagaggagacagtgggtgaacttaagaaattggtccgaaaagggtaaggccaatatattggaatatcttgaagccggccaggat

SEQ ID NO: 248664 - DNA, 560 bp, Glycine max
  unsure (1)..(560): unsure at all n locations
tgatgtcgtgtgggtgttgctacgactcatacgactgcacgtaccggtccggaattcccgggtcgacccacgcgtccgcccacgcgtccgcccacgcgtccgtttctctcttctctgcttcttcttgttcaaatcttaggagctgaggagaatcaatcgagagaaatatgtctggtatcgctcgtggacgccttgctgaggaacgaaagtcatggcgcaaaaaccatccacacggtttcgttgccaagcccgagactctacctgatggcaccgtaaatttgatggtctggcattgcactattcctggcaagaccgggactgattgggagggtggatatttcccactgacaatgcacttcagtgaagattaccctagcaagcctnccaagtgcaaattccctcaaggtttctttcaccctaatgtgtatccatctggaactgtttgcttgtctatacttaatgaagatagtgggtggagaccagctataacagtgaagcaaattcttgtgggcattcaagacctgcttgatcaaccaaatctgctgaccttgccagacgga

SEQ ID NO: 248665 - DNA, 569 bp, Glycine max
  unsure (1)..(569): unsure at all n locations
ntctgagtgtttctaaatacgtctgattcacttacaggtccggaattcccgggtcgacccacgcgtccgagcagagtctcttgtgattgttgaatacattgatgagacatggaagaacaaccccatcttagcttctgatccttaccaaagagccttggctcgtttctggtccaaattcattgatgataagattgtgggtgctgtatcgaaatctgttttcacggttgatgagaaagagcgtgagaagaatgttgaagaaacatatgaggctcttcagtttcttgagaatgagctgaaggacaagaagttttttggaggagaggaatttgggttggtagatattgctgctgtcttcatagcattttggatcccaatttttcaggaaatagcagggttgcagttattcaccagtgagaaatttcctatactctacaaatggagccaaaaattccttaaccacccttttgtgcacaaagtccttcctactagagacccactttttgcctaacttaaaggcccgctattaaagtctttctgctttcaaatagaccttattttaatgggtattg

SEQ ID NO: 248666 - DNA, 577 bp, Glycine max
  unsure (1)..(577): unsure at all n locations
agagtatctgataactgtttctgatacctactgatntcgtngcaggtccggaattcccgggtcgaccgacgcgtccgatcatgcaccagaagatgtgccaaaagcattggataaaacattacaggaattgcaacttgacggtcttgacctctatctgatccactggccagtccgcatgaaaagtggaacatttggactcaataaagaatatcttgagcaaccagacattcccaatacatggagagcaatggaggcactctatgactcagacaaggctagagccataggagtgagcaatttctcttcaaagaagcttcaagatttgttagatatagcaagagtggttcctgctgttaaccaagtggaattgcacccaggatggcagcagccaaagttgcgcgcattttgtgaatctaaagaaattcatctatctggatattctccactaggttcaccagcagctctcaaaagtgatattcttaagaatcctgttgtcacagagattgcagagagatttgggaagacaccagcacaagttgcccttcgatggggctttgcaaagcaaggtcattattgt

SEQ ID NO: 248667 - DNA, 209 bp, Glycine max
cacgcgtccgtccacgcgtccgacatattcgtgatataccatttaccacaccaaaaccgggctgatcgggtgctctgcggagtcaggaatccgtggatccctacaagaagcggccatcaagcgccgtcaatgctcccttctggactactaattccggtgctgccatctggaacaacaacttatcgctgactgttggagctataggttca

SEQ ID NO: 248668 - DNA, 568 bp, Glycine max
tgcggacgtatgggtgttgctgagaccgtttagatcgactgtccggtccggaattcccgggtcgacccacgcgtccgcacacacacagctagcagatattacatacacgtgaatcactaattaagccatggagaagaaaggaatagctgggttgtgcttcctcttccttgttctctttgttgctcaagaagttgtggtgcaaactgaggcaaagacttgcgagaacctggctgatacatacaggggtccatgcttcaccactggcagctgcgatgatcactgcaagaacaaagagcacttgctcagaggcagatgcagggacgattttcgctgttggtgcaccaaaaactgttaaatggatccattcactccaacgtgaagaagatgcatgcagcgctattttataaaaaataaaactactatatactatatataataagactggcgctgcatcaatgacctatgtattatagtatatattattaccgatgtcagaactatagatgcatgtactgtgcataacggctgagttatgtacttatgttaagaattaaataaagtgctggtg

SEQ ID NO: 248669 - DNA, 564 bp, Glycine max
  unsure (1)..(564): unsure at all n locations
gatggtcgtgtgtcttgtctccgtatgccgattgtantcnactgtccggtccggaattcccgggtcgacccacgcgtccgcccacgcgtccgtccacgcgtccgctctgcgctctctctctctgtctcctacgattcgtttggcccctttggttgccctaatttcaaccatgcctcgccgtagctccggtggaagatctgcccgtcctgctcctcgggcatctcctcgtcctgctccagttcaccatgctccttctccagcccctgctcagagtggtggtggatctatgcttggtggcattggttcaaccatagctcaaggtatggcttttggcaccggaagtgcattggcacacagggctgtggatgcagtcatgggtccacgtaccattcaacatgaaacagttgttacagaggctgctgctgctgcccctgcacccactgcaaatacttttggtggcgatgcatgcagcatttatactaaggcatttcctgattgcctgaaccggtagggaattacttttgcaagtccccattttcattggtatgcttgcataaagcataa

SEQ ID NO: 248670 - DNA, 566 bp, Glycine max
  unsure (1)..(566): unsure at all n locations
gagtatgttttagtgtctacctatagcgctacgancgactgtaccggtccggaattcccgggtcgacccacgcgtccggaaagccagtgaatagggaccataaataaatagaggactgctgaatgaagttgcttgagtggagactcaagcttggttggataatattcttttaaagttcagacattgtttccatttttcttatatttaagtattttgaatttttgggaggatggttttgctctcatccttccacttgctgaaaactttgtaggtaggaatgatataattttgcatgttaggttctctacatgccaattgtcaaacgggaacacatttgttttcttgtctgtgcataagcaccgacacatatgcaatgcctaaaaaaaattaaaaaattatttaactaattttttgtttgaaataaattttcaattggtgaaactactctagtatgtattaaatctgattttcatttttgaattttccattgttgctttttaatggtttttatgtaattttgattatattatgtaaaattattagggcgtgcctttttataatataat

SEQ ID NO: 248671 - DNA, 164 bp, Glycine max
taccggtccggaatgcccgggtcgaccgcacacgtccgcccacgcgtccggtatggtcatatatgactgctataattctctaccataaccgggcgtgccgagagcattgaaagcacctgatgcaggtcacccaaatggaacaactggccacatgcaccacaact

SEQ ID NO: 248672 - DNA, 561 bp, Glycine max
  unsure (1)..(561): unsure at all n locations
ggtcgatctgaatctcatagactctatagtgttcgcactgcacgtaccggtccggaattcccgggtcgacccacgcgtccgggtgaacctgtgaacaagttaatgacctcatggacaaagcagaagggatatcctgttgtatgtgttaaagtcaatgatcagaaattggaatttaatcagtcgcaattcttgtcaagcggtgctcaaggagaaggccattggattgttccaataacattatgctttggctcttatgatgtccacaagagtttcctcttgcaatcaaaatctgaaacacatgatgtcaaagatttccttggttccacacacaaaggtttaaattgttggattaaacttaatgtggatcaggctggtttctacagggtgaagtatgatgagctgcttgctgctagacttagatatgcagtagagaaacaactcttatctgcatcagaccgatttggcattttggatgattcattngcactttgtatggctcgccaggaaatcattgaccttcttgattaactttgatgggatcttacagggagggaagttgat

SEQ ID NO: 248673 - DNA, 374 bp, Glycine max
acgcgtgcgctaaagttacacttgcggttaaacagttgaaagcccaacaccgcttgatggtgagtggggcacctatacagaatagcagtgtggatttgtgggccctttttgattttctgatgcctggatgtcttggaactgagagacagttgcaaggcgcatatggaaaaccacttttagctgcaagagatccaaaatgttctgctagggatgctgaagcatgagcacttgctatggatgcattgcatatgcaggtaatgcctttactccttcgtatgacaaaggatgaagtcttgtctgaactgggcgggaaaataattgaagacagatacttgtgatttgagccctgtacaatttaaactttatgaacaaat

SEQ ID NO: 248674 - DNA, 561 bp, Glycine max
cggtgtccagagcatgagttgcctggtaccgatcgtactgtcgtaccggtcctgaattcccgggtcgaccgacgcgtccgcttcaaatcacacactctcttcaatttctagggttttgctattgctttgcctccgttcccccgttctcacaaaaacaacgccttttctcttctccttcgtatctattctttgcgtttggtttttggttgattgaaggcattcacagcgtaattcgttgctgcattttaatcgatttatctaaccaggactgaatgacctaatggagtctaaaggtgggaaaaagaagtctagtagtagtagtagtaaatcaattttttacgaagctcccctcggatacagcattgaagacgttagaccaaacggtggaatcaagaaattcagatctgctgcttactctaactgttctcgcaaaccatcctgatacacatccggattgatagttcgttgcatgcaaccatagttttattaggattttttcttctttggtttcaattaggtttttttgttgctctccttcaaactccatctttccaaatcctg

SEQ ID NO: 248675 - DNA, 545 bp, Glycine max
catgactccattatctcgtagaactgtcgtaccggtccggaattcccgggtcgaccgcacgcgtccggagaaaaggaaagtggagtacgagaagaacatgagagcttataacaagaaacaggcggaagggcctactggtggggatgaagaagaatctgagaagtctgtatctgaggtgaatgatgaggatgatgactaggaatgcagtggcgaggaggaggatgacgattagagaatggactgatgataattgcagttatgtaggatctgatgattttgatcatccgtagtaggatgtctggtcatttgcttataaacatatttctctttccaaaaaatattgccctgctccttcttacgtaaatggctcgtatttccaagtcgtgtatagtttaaagaagggagttctctttatttgtatttctaaatccaactgattagttaaaggatgggtatctcttgtagagcttttaagttgatttatagtttttttgttgaaaattggttaagtttgttcaatttaattgactaataatacctttttt

SEQ ID NO: 248676 - DNA, 484 bp, Glycine max
attcccgggtcgacccacgcgtccgttcttgcgcaccttgcagaatcaattttctctctcaatcgtctttcatggctcgtaccaagcgaaccgctcgcatatccaccggtgggaaggctcctaggaagcaactcgccaccaaggctgcaagaaaatctgcacctaccaccggtggagtcaagaagcctcatcgctatcgtcctggaactgttgctcttcgtgagatccgaaaataccaaaagagcacagagcttctgatccgcaagctcccctttcagcgtcttgttcgtgaaatcgcgcaagacttcaagactgatttgaggttccagagtcacgcggttcttgcgcttcaggaagctgcggaggcttacttggtgggtttgtttgaagacaccaacctttgtgcgatccacgccaagagagtgaccatcatgcccaaggacattcaactcgcacgccgcatccgtggagaacgtgcttaggc

SEQ ID NO: 248677 - DNA, 396 bp, Glycine max
attcccgggtcgacccacgcgtccgttcaaacattattttgtaaaaaaaaaaaaaattttaaaaaaattaaaaaaaaaaataaaaaaagaaaatatggaaaaaaataaaaggaaaaaaaaaaaaaaaaaaaaaataaaaaaaaaagggctcccattttaaaggttccaaacttacgtacccttacattccactacaaaactcttttataaagccaccaaaattcatattactggcccaaattttaaaacatcttaactggaaaaaccctgacattccccaacttaaaccccttataaaaaatacccctttttccagttggcgtaatatcgaaaaagccccaacatatggccctttaaaaaatatacacatcctcaatggcaaaaggaaccccccct

SEQ ID NO: 248678 - DNA, 475 bp, Glycine max
attcccgggtcgacccacgcgtccggttcatgccaaaggtggtatattcttctgtcagattgttcatactggaagggcgttcgatcgagatcttaagcccgatggacaaaccttaatatcatcaaccaacaagccatttacacataatgccaccgaaccaacggcactaaggacggctgaaattcctgatatcgtcaatgaattcagacttgcagcaaggaatgctattgaagcagggtttgatggagttgagatccatggggcacatggttttctaattgatcaatttttgaaagaccaagttaacgacagaacagacaaatacggtggatcattggagaatcgttgtcgttttgcattagaagttgttgaagctgttgttgaggagataggggcagatagagttggaatgagactttcacccttttcagacttcaatgaatgtagtgactcaaatcctcaagcattaggtctc

SEQ ID NO: 248679 - DNA, 549 bp, Glycine max
  unsure (1)..(549): unsure at all n locations
tgtttgcgganttaaggtgggatcagatcttacaaggacatgatagaatctgctctaccggtccggaattcccgggtcgacccacgcgtccgaaaaaaagtcaaacagagaattaggcaataagctaaagatgtctgacgattgcaaaggtaagagctcatggcctgagcttgttggagtgcaagggacagtggcagaggctacaattgagagagagaatcctttggtgaatgctatcattgtgcctgaaggaaacagggtcatcactgattaccgctgtgatagggtttgggtttggatcaacaaagatggaattgtcaaggaagttccacacattggatagaaacttttccctctagctagggttcaaataattgtttccagttttatgttattttattcagaaagtttcagaaatgtcaaaagattaatataataaaccaactagagttggccttgtaaaaaaaaaaaannanaanaaaaataaaaaaaataaaaaaaanaaaaaaaaataaaaaaaaaaaataataaaaaaagggcggccgtttt

SEQ ID NO: 248680 - DNA, 548 bp, Glycine max
  unsure (1)..(548): unsure at all n locations
aggttgtcngtnttgagatgggtaagattctctaaagcaagtatatagtattgctgtaccggtccggaattcccgggtcgacccacgcgtccgcccacgcgtccggagattctcaaatttgaatctaacatacccataccagacatcaaggaagacgaagtgctcatcaaggttgtggctgcggcgcttaatcctgcagattatatgagggctcttgggtttttcaaggacactgatgcacccttacctattgttccagggtttgatgctgctggtgtggtggtgagagtgggaagtaaagtgagcaaattcaaggttggagatgaagtttatggtgatatcattgagtatgcttggaataatccaaagaccattgggactttggcagaatatactgctactgaggagaaagtgttggctcacaaaccctccaatttaagctttattgaagcagctagccttcctgcagccatcatcactgcttatcaaggatttgataaaattgagttttctgctggcaaatctatacttgttctaggaggtgctgg

SEQ ID NO: 248681 - DNA, 461 bp, Glycine max
ccgggtcgacccacgcgtccgatctgtattctcttctcatcgcgcgtaagatacacattttagttgctactaatgggaactgttgaagctgcgaacaaggatgcaaatggaagtctcctagagaaaaatccttcagttgtttttgtgttaggtggcccaggaagtggaaagggtacccaatgtgcaaatattgtccaaaattttgggtatactcatctcagcgctggtgatcttctgcgagcagaaatcaaatctggtcctgaaaatggtacaatgattcagaatatgattaaagaaggaaaaattgttccctctgaggtaacaattaagctcttacaaaaagcaatgcaggaaagtggcaatgacaaatttcttattgatggttttccccgcaatgaggaaaaccgggcagcatttgagaaagtgacaggaatagagccagcatttgtcttattttttga

SEQ ID NO: 248682 - DNA, 337 bp, Glycine max
attcccgggtcgacccacgcgtccggctttctgagcttgggtttgctgaaccctaactaccgttttggggttggttggaaagccacgtggcccttagtattcctctcataaatcctatggtcatggtttctaatgcgccactgtgggttcctcaaatttttagatagcttttgaatgtattttgctggacgtggtgatgatgattggagttgggttgtttttatttgtggtcgatccttttgttaaataacattgttcagcgattgcgatattattaccctttgtagtatgtgaccatttaccgtaataactagtaatttgtctattattactggac

SEQ ID NO: 248683 - DNA, 540 bp, Glycine max
ggatgccgattagagtgtttgatacttaagaatcatgacggattgctctaccggtccggaattcccgggtcgacccacgcgtccgcccacgcgtccgcaagaaggctgaaaagctagccggaacaattcagcctggaaattattggtgtgattttcgggctggattttggggtgtcatgggagggccttgtcttggaataattcctccatttatagaagagttcaatcatcccctcccagacaaatgttctggtgggagtactggtgttttagtaaatggtagggaacttcaccaaaaagacttagatttgctatctgggagaggactccccacagatatagatagatcttatatcattgaaatttctgggagagtcctggatgaagacacaggtgaagagctggacagcctaggcaaacttgcaccaacggtggagaaagtaaagcatggatttggcatgaaagcacctagagcagctacataagctaaatgtataaaaaaagattctgcgacaggttggagaaggtgaattttgctcc

SEQ ID NO: 248684 - DNA, 542 bp, Glycine max
  unsure (1)..(542): unsure at all n locations
aggtagcggatttnagtaggtaagaagctcacagaatcctcatgnactgctctaccggtccggaattcccgggtcgacccacgcgtccgattgcaaaagaatatggagttaaaaggtatggttggcttgtttacatggataagaaggctaaggaggaagaaaaaaggcaaaaagagttgatcaaaggtgatcctgcaattaggaagctgagtcgtaaggaaagaaggaaggcttctcagattgaaagggagagagagagagaagccacacggatatctggaactcgtgtgctgcatcatgatccctaccggtagaaaatattgatattttcatccttcagattgagcgaagaatatatgatattgtgctccttctaacgtatgggattgctgattattcttccttgccactcataatgttgcactcaatatatatatatgcagggaaacaaggcaaagtcctacatatgaagcctattctcgatctagaaggtcaaggtctccgttgcggtcatactctccgtcgcattcaaggcgttattc

SEQ ID NO: 248685 - DNA, 484 bp, Glycine max
attcccgggtcgacccacgcgtccgcccacgcgtccgctttctttgttgcgttgtgaattctgctctttgatcatcatcatcttctggttcttcaagggaagcaagcatgtctcagcaaggcgaatcatcggacccgaaatcggggaagaaggacttctcaaccgcgattctggaacgcaaaaagtcgccgaaccggcttgtcgtggatgaggctgtcaacgacgacaactccgtggtcaccatgcatccccaaaccatggaaaagcttcagcttttccgaggggacactatcctcatcaagggtaagaaacggaaggataccatttgcatagctcttgctgatgagaactgtgaagagccgaagatcaggatgaataaagttgtgaggtcaaatttgcgggttcggcttggaaatgttgtgtctgtgcaccagtgcccggatgttaaatatgggaaacgtgtgcacattctgcctattgatga

SEQ ID NO: 248686 - DNA, 464 bp, Glycine max
tctcgaattcccgggtcgacccacgcgtccgacatagcaaggttcagagactttgccgattcctggaagaagagaagagaaaacctaaatcacagatccatggccgaagaacaccgatgtgaacctgccgaaggtcactgactatgcttcaacaactgccacttcttcagtagcaccgtcacgatgaacctctgctccaaatgctacagcgcgatccgtttgaaggagcaagaagaagcgtcgacgaaatgcacaatcgaaaccgtgctctattctgcctcctcagcaaaaccgtcgtcagtacacgtcacctacgacgtctgcggtcgatgtgctcatggaatctccaccgacgtctgctgcggaggttgacgttgctgtcacggtcacagtcgcggcggcgtcaagttctatttccataaactcaggttcggttgcgcaaccgaaccgttataccacgtgtc

SEQ ID NO: 248687 - DNA, 480 bp, Glycine max
attcccgggtcgacccacgcgtccgctaattcaaagcttccaaattcttggagttcctttaatccagggagacctgattgatcatgaaggtctggtgaaagcaatcaagcaagttgatgtagtaatctgctcatttggtagactactaatagaagatcaggtcaagatcgttgcagcaataaaagaagctggaaacgttaagagattttttccatctgaatttgggctggatgtggaccgtcacgatgcaactgagccagtcagagaagttttcgaggaaaaagcgaaaatccgaagagtaattgaagctgaaggaattccatacacttacctatgttgccatgcctttactggttacttcttacgtaaccttgcacagattgacatcactgttcctcctagggacaaggttttcattcaaggagatggaaatgtcaaaggagcgtatatcactgaagccgatgtgggagtttttacaat

SEQ ID NO: 248688 - DNA, 479 bp, Glycine max
cggtcccgaattcccggtcgacccacgcgtccgcccacgcgtccgcataactagaaggtaggaaatcatggcaccggtgcccgaagcatcctcgtgcgtgattaaggtggctgcactttccggatctttaaggaaaggctcttacaacagagccctcattcgttctgctattgagctaagccaaggtagagttgaaggccttcaaatcgagtacgttgatatttcgcctttgccccttctcaacaccgatcttgaggtgaatgggacctaccccccacaagttgaagcctttcgccagaagattctcgcagctgatagtatcctctttgcttcccctgagtacaattactctgtcgcaagtcctttaaagaatgcacttgactgggcatcaagggcaccaaatgtttgggctggtaaacctgctgccatagtgagtgctggaagaggctttggtggtggaagatcacaatatcatctac

SEQ ID NO: 248689 - DNA, 540 bp, Glycine max
  unsure (1)..(540): unsure at all n locations
ggtcgggnnntagagcgtctatgactcaaagatcactacgcatgctctaccggtccggaattcccgggtcgacctacgcgtccgggggaagaggcagatttggagtttactcctcccagagaccactgaagtgtgtggtaggtggggctgaaaccgacttcaactatgactcagagaccgggttgacaaccttctccattccagtttctccagaggagatgtacagatggtcaatagagatccaagtttgagtcctttttaagacttggtgtttgatgcattgttgtatcaggagaagggttttgttgtaattaagcattgagggaattgttggagtcaggcagagagagaggggggaggtttgttgtaagacacctagtattagtatcatgtagtggagaaaaagggttgttgatcctaatagctagacaaggcatgttgtagtagtcatggngtggggaagtccttttgttgtaacatgtaatttggtttagacttgtagtatgtcatcaattagatggataaagagagaatattgtn

SEQ ID NO: 248690 - DNA, 538 bp, Glycine max
  unsure (1)..(538): unsure at all n locations
agattgcggtgtngagtgcgatgatactctaagagnctctatgnactgctctaccggtccggaattcccgggtcgacccacgcgtccgcccacgcgtccggcggcaacgagaggtgttcggttgaagctcagatcagcgagggcagcagggacccgcacttctctgcggttcctcctctcagtctccgtaaccctaactctcgctcacctcgccgcctcaaattccgaaggcgacgctctctacacgctgaaacggagcctctcggaccctgacaacgttctccagagctgggatcccactctcgttagcccctgtacttggttccacgtcacctgcaaccaggacaaccgagtcactcgcgtggatcttggtaactctaacctatctggacatttggtacctgaacttgggaagctggagcatctacagtatcttgagttgtacaaaaacaacattcaaggaactattcctccagaacttggaaacctgaagagtctcgttagcttggacttgtacaacaacaacatatcaggcacn

SEQ ID NO: 248691 - DNA, 490 bp, Glycine max
  unsure (1)..(490): unsure at all n locations
aattcccgggtcgacccacgcgtccggccgacaacgtcatcccaaaggctcttgattccttcaagagtgtgaaaaacgttgagggaaagggtggccgaggaaccatcaagaagatcactttccttgaggatggagaaaccaagtttgtgctgcacanaatagaaagcattgatgaggcgaacttgggatacagctacagcgtggttgggggtgctgcattgccagacacggcggagaagatcacattcgactccaaattggttgctggtcccaatggagggtctgctgggaagctcactgtcaaatacgaaacataaggagatgctgagcccaaccaagacgaactcaaaactggaaaagccaaggctgatgctctcttcaaggccattgaggcttaccttttggcccatcccgattacaactaatcctcttcaacttacttgttatcactttcttgctttttcttgcttggagacttatccaatcactc

SEQ ID NO: 248692 - DNA, 541 bp, Glycine max
  unsure (1)..(541): unsure at all n locations
ggttgcnnnnnnnnagaggaatgatactctaaagaactatatcgaattgctctaccggtccggaattcccgggtcgacccacgcgtccgaccagacgttcgagcacgcaccataatcagcattgcatatagactaccatcaggggtggacggacatacaatgatggaagcaaatgcactgcggctcatgctactcgatacaccgccctacttgctgaagcggccatctttatccgaaacgctattgcatgagtctgcagtccggaacacgggcctataaaagagggccatgcatccatctatatcatcaattcacacgatgacagagaacccaacttaggcctagccatattagaaagcattgatcatgcaagcgccacatgcaacgacaacggcattgtacttgctagaggggcagacaccatccagaatatcagatgctagtacaagtgaagagcgagcacacatggagaatcggctgtctaactacactgtggcttacgaagctctaggatacgctcaacctataccctacgatatga

SEQ ID NO: 248693 - DNA, 543 bp, Glycine max
  unsure (1)..(543): unsure at all n locations
tgggtgcnnnnnttntaggcggtaagattctcaaggggactataagcaaatgctgtaccggtccggaattcccgggtcgacccacgcgtccgccttttggaaggaaatatgtggaggttctcaatagttctaaagctgattctgctattagccgaggatgtacaaagtctgaaattcctcagaaggtgttggaatctttgtttaatattcccaaaagcactgaacatgacaaagataccatgaattggagaaatgtagtaaagaaaatccagtctttgggacctgngttcaatgtttctccgcatgttgcagaatctcagcaacatacgtgtgctaagggagatgaatatcatgtgtttagggaagattcaaagcagcaatgggattcagtgaaatcttattatacgaaagctgcaacagcatataccaaacgggaacgagcttatgctgcatatctttctgaccagggtaaagaacaaactagattagctcagaaagcagacactaaggccagccatgacatatttattgctagaaacaaaa

SEQ ID NO: 248694 - DNA, 415 bp, Glycine max
cggtcttgaattcccgggtcgacccacgcgtccgcttttatttgagaatatatataaagactatactttcgccataaaaacagttaagaaaaacattgtataagtaataatagcatggtattgtgaattccatatgcaaatttttgttttttaaatcattcgattatatatagaaagagtagtatgaaaaagagggtatttacaattttatctgatctatcaagaacctagtataattttagtgtcacagactttatgttattttcttcatactactaaacttttaacattttatatgttaattagaagtaaacataacatatgaaataaaaagaaactttcggatcgttgaatagcacaatgatataaaaaacaacggaaccatcatactatttataattaaagcgattcaaaa

SEQ ID NO: 248695 - DNA, 351 bp, Glycine max
attcccgggtcgacccacgcgtccgggttgccgaaattaacagagcaagcacgttttgaacaggtgaagagatgcgatgagggtaagctagtagcgggagtgagaagaataggaggatggagaattgggaaacggaggaggttgaaggtgaaagtccccttccggttctggaggctgttgactacagaggtggagcctcggtgagatcgaaatctgggtcatggagatccgctgggtttatcataggtgtggaagtggcggataggattgcatattatgggattcaggggaacctcataacctacctcacgggcccactccatcagactactgccaccgccgccgagaatg

SEQ ID NO: 248696 - DNA, 491 bp, Glycine max
  unsure (1)..(491): unsure at all n locations
attcccgggtcgacccacgcgtccggggaaagtcttacccaactgtgagtgctgattaccagaaggccgttgaaaaggcaaaaaaaaggctcanaggcttcatcgctgagaaaagatgcgctcctctaatgctccgtttggcatggcactctgctggaacctttgacaagggcacgaagaccggtggacccttcggaaccatcaagcaccctgccgaactggctcacagcgctaacaacggtcttgacatcgctgttaggcttttggagccactcaaggcggagttccctattttgagctacgccgatttctaccagttggctggcgttgttgccgttgaggtcacgggtggacctgaagttccattccaccctggaagagaggacaagcctgagccaccaccagagggtcgcttgcccgatgccactaanggttctgaccatttgagagatgtgtttggcaaagctatggggcttactgaccaagatatc

SEQ ID NO: 248697 - DNA, 537 bp, Glycine max
  unsure (1)..(537): unsure at all n locations
tgtttgcnnnnttntattggttgagtctcaaagcatatattgattgctctaccggtccggaattcccgggtcgacccacgcgtccgggttatttgattggtgtgcatccatgttaagctagtggcgatcggatccagctacagcctacggcctacagttttggtttggtttgcttgattgaagatcaaggaaggaagatgttgggtgttataaggcacaagagtattcgccccgccttctccgcaatcagacacttctcttctgcagctaaagagattactgtcagggatgctctcaactccgcactcgatgaggaaatgtcagctgatcctaaagtcttcttgatgggtgaagaggttggggaatatcagggtgcatacaagatatccaaggggctgctcgacaagtatggccccgagagggttctcgatactccaatcactgaggctgggtttgctgggattggagttggcgctgcttactatggtctaaggcctgttgtggagtttatgacttttaacttctccatgcaggcaa

SEQ ID NO: 248698 - DNA, 528 bp, Glycine max
ggcggtactgatctcaaggggggtatataggatctgctgtaccggtccggaattcccgggtcgacccacgcgtccgacaaaatcaccaccttcaaagtcttctctctcgagaatcatcgaataaaactagggtttccggtcgtcgtcgaggagaatgccgaagaacaagggaaagggaggaaagaaccggaagcgcgggaagaacgaggcggacgacgagaagcgggagcttgtgttcaaggaggacggccaggagtacgcgcaggtgctccggatgctggggaacggccgctgcgaggcgatgtgcatcgacggcaccaagcgcctctgccacatccgcggcaagatgcacaagaaggtctggatcgccgtcggcgacatcatcctcgtcggccttcgcgactaccaggacgacaaggccgacgtcatcctcaagtacatgcccgacgaggccaggctcctcaaagcctacggcgagctttctgacagcaccaggcttaacgagggcatcggcgctggccttgatga

SEQ ID NO: 248699 - DNA, 480 bp, Glycine max
  unsure (1)..(480): unsure at all n locations
attcccgggtcgacccacgcgtccgttcggtcttgccgattccgaagggtcctggtttcccggcttaagttcaactttcggctccaggaaccgtcgatggggcccttaggctgttccttctctgtttctgacaaactgtataactcctatcaaacatgagcggtcgcttttctcgcacaatttatgtcggcaacctgccctctgatataagagagtcagaaattgaagatctattctacaagtatggccgtataatggatattgaattgaaggttcctccccgccctccatgttattgctttgttgagtttgataatgctcgagatgccgaagatgcaattcggggtcgagatggatacaactttgatggttgtcggttaagagtggagcttgctcatggtggtagagggccatcatcaagtgatcgacgtggatatggaggaggaggtggtaatggtggagcaggcggnggtcgttttg

SEQ ID NO: 248700 - DNA, 438 bp, Glycine max
  unsure (1)..(438): unsure at all n locations
attcccgggtcgacccacgcgtccgatagattaaaggcctggttctttaaacattcccaatggcccgcccaaaaccttcggcttcgggaagcttgggaactaatgccgctattaatcctccctggatgtctgaaaagtggttcattgtgctgggaattgattattntgttttgtatttcatttaatttttataagttttgtatacaagtttttctcaccaattttttattttggcattttgtcacattgatccacgccaatgatgataaatccaaaggcttgtttctcaaaacattcgcagtggccgcctaagagctttcgccttcgccaggcttgagagcttgtgctgcttttatccttccttggatgtctgaggtcattatattatttctntgttgaccattttcgtctgtggttgattgatgctgtaagttagta

SEQ ID NO: 248701 - DNA, 547 bp, Glycine max
  unsure (1)..(547): unsure at all n locations
ggttgcnnnnntaggtgataagaactctaagacactgtatagtattgctctaccggtccggaattcccgggtcgacccacgcgtccgcccacgcgtccgcccacgcgtccgtttttccctttaataggcaaggagattcatatatcatggatgggacaaaatggtggacaagtggtgctatggatccaagatgtagaattctgatagtcatggggaaaactgacttcaatgcagtgaagcataaacagcaatctatgatcttagtggatgtccagactcctggcgttcacataaagagaccattgacagtgtttggctttgatgatgcaccgcatgggcatgcagaagtaacatttgaaaatgtttgtgtgcccgcaaaaaacatcatacttggcgaaggacgtggatttgagattgcccaaggtaggcttggtcctggaaggctccaccattgtatgagactgataggtgttgccgagcgaggcatgcatatgatgattcaaagaacttgtggcagaagaacatttgggaagttaatgctaacatg

SEQ ID NO: 248702 - DNA, 358 bp, Glycine max
cattcagtgaaacactagctagggtatgtgggagctctcgttgtttcggagttagggaccttacgcagccatggccactgctacgaatgccgccgccgccccaccacgccagctctcccagaaggaagctgacatccagatgatgttggccgccgacgtccacctcggcaccaagaactgcgacttccaaatggaacgttacatcttcaagcgccgcaacgacgggatttacattattaaccttgggaagacgtgggagaagcttcagctagcagctaggggtatagttgcaatggaaaacccccaggatatcattgttcaatctgcaaggcctaatggccaaagagcggttctgaag

SEQ ID NO: 248703 - DNA, 549 bp, Glycine max
  unsure (1)..(549): unsure at all n locations
agtagcnnntttagttgcatagaactctacggatctcattgaattgctctaccggtccggaattcccgggtcgacccacgcgtccgcacaaactagtaatattattcttcgaatccattttattattcataatgggtagtttcacatgggaggatgaaaccacctcccctgtggctcctgctaccctttacaaagctctagttacagatgccgacaacgtcatcccaaaggctgtcgaagccttcaggagtgttgaaaaccttgaggggaacggtggccctggaaccatcaagaagatcactttcgttgaggatggagaaagcaagtttgtgttgcacaaaatagaatcagttgatgaggcaaacttgggatacagctatagcgtagttggtggagttgggttgccagacacagtggagaagatcacattcgaatgcaaattggctgctggcgccaacggagggtctgctgggaagctaactgtcaaataccaaaccaaaggagatgctcagcccaacccagacgacctcaaaattggcaaagtcaagt

SEQ ID NO: 248704 - DNA, 480 bp, Glycine max
attcccgggtcgacccacgcgtccgcctcaccttagttgatcgtgttctcaggatgaagtccaactatgctgccagtggaatacgaacgctgcgtggaagctgtcttactgatactgatgggttgaagcgtaagctggcaaggaagctctctgtgaatgaagatggggacgggtcagaatgggaggtgggtgaatgccttggaatgtggtggaggcctgattttgaaacattaatgtatcccttcattccacctaatgtaaaaaagccaaaggagtgtaccaaagtcttccttgtgaagctgccagagagtagaaagttcattgtgcctaaaaacatgagggtgcttgcagttccgttgtgccaagttcatgaaaatcacaagacatatgggcaaattatatcaggggtcccacagctgctgtcaaaattctctttcaacatgatagaatcttgatacctgattgcaacctattttatca

SEQ ID NO: 248705 - DNA, 430 bp, Glycine max
aacttaactaataaggattggccaaatggcctgggtaattatggagtccctgggaaaaggatgaaacctttttctacctaactcaaccgaggcactaggagtggaaattttgaaatcccgtggattcttcactcagtcatactggtactggataggtgttggggctttgattggatatacattacttttcaactttggctacatccttgctctcacatacttaaatccacttgggaaacatcaagctgttatatcagaggaacctcaaatcaatgaccagagtggtgatagtaaaaagggaactaatgtgttgaagaacatacaacgtagcttctctcagcactcaaatagagtgagaaatggcaaaagtttaagtgggagcacctctcccgagacaaaccataacaggacaagaggaatgattcttcct

SEQ ID NO: 248706 - DNA, 560 bp, Glycine max
  unsure (1)..(560): unsure at all n locations
aggtatgccgttctgatgttggccctccgcttctccagctcatcattgnactgctctactcggtccggaattcccgggtcgacccacgcgtccgaaaaaaaaaaaaaaaaaaaaaaaaaaaaaaaaataaaaaaaaaaaaaaaaaaaaaaaaaaaaaggaaaaaaataaaaagaaatcctatataaaaaaatacaaagcttaattacacttacatacctcaacataaactcattctataatataacctaatttaaattatctaatcctcatttaaaaacattttaactatcaaaacatagacataacagagctaaatgccatcgcaataaattatcgttatgtcagttatcctaatactcaacaggcccatacgcaatattcttattaacaataacacatactaattgacgattggtattcacctttaattgccccatttcctcgcgcttttaaactataccgctacttaacgttataattcaaatcgcatattttattgtcttttattcactacctttcatttattgcaactttcccaattttttcttataaaatttaa

SEQ ID NO: 248707 - DNA, 485 bp, Glycine max
attcccgggtcgacccacgcgtccgctaattgcaaagatgaataccaagccctttttctccttgtgcttactctgcgcactgcttctgatctgtgttgtggcaactgagccatccaaagatgcgacacaagcagaagaaccaaagacacggccagatgcctggagaagtggtggaagtggaggacatggtggaagtgggggacatggtggaagcgggggacacggtggaggctggggacatggtggaggctggggacatggcggtggacatggcggaggatgcaaatgctgcggtcgaaagggctgcaaatgttgctgaagtaaaaaaaacacaaacatgaactgaagacacacatacgtgtgtactccatgtaataagtatagtatgtagaattaagaaataaaagcatggaatctatatccgtgctagggctgtcataggttgaccggttttccatcaaccatgcatgtagtttgacacatca

SEQ ID NO: 248708 - DNA, 551 bp, Glycine max
  unsure (1)..(551): unsure at all n locations
aggatgccggtntagggtgactacgagactttatgatactccttcgatgacataccggtccggaattcccgcgtcgacccacgcgttcggataaaacacttccagaaagaaccttcctattaaccaaaaccaccaccaccggtgccaggtgatcaaaaccactacgatgatcagggtcccaaggccgacgagtatggcaatgttgagaggcaaactgacgaatatggcaacccggttcatgccactagtgtcacttatgtagccaccaaaagtgttggtggctacaatgatgacgctaataagcaacatgatattactggtgtctatcccgagaaagacaccggtagacatcattttggtcgtggttacgacngtgacactaacaagcaacatgatgctactggtgtttatcccggaatagacattggtagagatcatgggactaccggtgttatggcctatacaccgacagacataatggaacttctgggggaaatccgggatagacacccttaacaacaacatgggactacccgtggtattctggtgaa

SEQ ID NO: 248709 - DNA, 537 bp, Glycine max
cgagacttgaatccctcagctccctacgtactgacgtaccggtccggaattcccgggtcgacccacgcgtccggtttagtgtgattgagttaaagttgctgaagacaatgagttggacaataatgcaattggaacaatctggaaatccttctatagatattcactgctatgttgatgatgccaataaaattccttaatttacaacaaaaaaaaaaaaaaaaaaaaaaaaaaaaaaaaaaaaaaaaaaaaaaaaaaaaaaaaaaaaaaaaaaaaagggggaacaatttaaaggaagccaaaatttaaaaaacaaagaatacaaaaaaataaaacttaaaataaaagagggcgggccctttttgagggcccccgttttttaaccattcctggcggggaaaaacctttttttacccgccccaaaaacccatttcacggagccgcctttaacaagctggggtttggaaaaaaaggggcgtacccaaattaatttcccagagagcggcaaccctttttgccaatggggccccccccaaaaac

SEQ ID NO: 248710 - DNA, 481 bp, Glycine max
cggtcctgaattcccgggtcgaccgacgcgtccgctctaatcactctagctgttgcatatttctactattattcaatggcttctgcagatgtttagggccgttgctttgttggtgggcttgcttgggtcaccggcatcgatgccctcgagaaagccttttcaatctacggcgacatcgttgaatcgaaggtccgtttgatgcacgcaccgtaactgatctcacacgattcggattcggattttttctcgatcctcttctgatctgagatctctgatctatttgcgttacttgatctatgatctgatacttgtgctactatatgattcttttattactcacgccaatatgtacgttcatcttcttcctttcaccaaaggcgatgatcgatcggtttctattcggttctgtcattagttctcgtgtctctacttctgctttggatctgatgcatcgtgtctttgtgtgcaggttatcaacgac

SEQ ID NO: 248711 - DNA, 398 bp, Glycine max
cgaccgacgcgtccggctgggttcgtggcaacctttgtcaccatggtgatgatgatggtgcccaaaaacgtgagtgcgcaaaacataggtgatgacatcgtcacacaagacttcttcaacagcataatcagtcaggctgatgatggttgtgcagggaagaacttctactcacgagatgctttccttaatgctcacaattcctacaatgagtttggtaggcttggtaatcaggatgactccaagcgtgaggttgcagctgctttcgcccatttcacccatgaaacaggacatttttgctacatagaagagattaacggtgcatcaggggactactgtgacgagagcaacaccgagtacccatgtgcccctaacaaagcgtactatgggcgtggaccaat

SEQ ID NO: 248712 - DNA, 457 bp, Glycine max
  unsure (1)..(457): unsure at all n locations
cggaattcccgggtcgacccacgcgtccggttttttttttttttgtgtcgatggcgggaaaaggagggaaggggcttgtggccggaagaaccacggcagcgaacaaggacaaagacaaggataagaagaggcccgtctctcgttcatcccgtgctgggatccagtttcctgtgggacgtatccacaggcagttgaagcaaagggtgcaagcaaatggacgtgtgggggcgactgctgctgtgtacttggcctccattctggaatatctgactgctgaagtgctggagctggcagggaatgctagcaaagatcttaaggtgaagaggatcacaccaaggcacttgcaacttgctatcangggagatgaagaacttgataccctcatcaaagggaccattgctggcggtggtgtcatcccttacattcacaagtttttgatcaacaaaagcgccaaaga

SEQ ID NO: 248713 - DNA, 486 bp, Glycine max
gaattcccgggtcgacgcacgcgtccgactaaacacaaaccccaaaaaccaaaatcacaactcccaaagcaaaaacccaaatcccagaggatggtagtaacatgagatgacagacgaccgcgtgcatccaatcccaaacctagctatgtctccggccaccgtccactggacctctgacgccatccacggcggacccctccgtcgtgtcgacctcgactccggcaccaacggctgggcctcccctcccggtgacctcttcctcctccgctcccccaattatttcaccaaacgccagaaatcacccgccggcgactacctcctctccccctccggtatggactggctcaaatcccaatccaaactcgacaacgtcctctcccggcccgacaaccgcatggcccaggcccttcgccaggcccaggcccaaagcaaatccctcaaaagcttcatcttcgcagtcaacctttaagtccctggaaaagaaca

SEQ ID NO: 248714 - DNA, 535 bp, Glycine max
  unsure (1)..(535): unsure at all n locations
tggagtaggcnntatctcctgaggtcagctctcatcgtacctgccgtaccggtctcggaattcccgggtcgacccacgcgtccgaaactagtaatattattcttcgaatccattttattattcataatgggtattttcacatgggaggatgaaaccacctcccctgtggctcctgctaccctttacaaagctctagttacagatgccgacaacgtcatcccaaaggctgtcgaagccttcaggagtgttgaaaaccttgaggggaacggtggccctggaaccatcaagaagatcactttcgttgaggatggagaaagcaagtttgtgttgcacaaaatagaatcagttgatgaggcaaacttgggatacagctatagcgtagttggtggagttgggttgccagacacagtggagaagatcacattcgaatgcaaattggctgctggcgccaacggagggtctgctgggaagctaactgtcaaataccaaaccaaaggagatgctcagcccaacccagacgacctcaaaattggca

SEQ ID NO: 248715 - DNA, 368 bp, Glycine max
cacgcgtccgttctagttcagaatctcaatctcagtctaaaccgctccaagaccgagttgcaatcgtgaccgggtcgtcccgcggaatcggccgagaaatcgcgcttcacctcgcctcactcggcgcgcgactcgtcgtcaactacacctccaactcggcccaagccgactcagtcgcggcgcagatcaacgccggttccgccaccacgacaccgcgcgccgtcgtggtccaagccgacgtgtccgatccggctcaggagaagtcgctcttagactcggccgagcgcgccttagactcgccgatccacatccttgtcaactcggcgggcgagatcgacggcacgtatccctgcgtcggcgacaccacc

SEQ ID NO: 248716 - DNA, 470 bp, Glycine max
ccggaattcccgggcttgacttgcagctttactcctggttcttgttctttaactgcatataagctcactccatctggttacgaatgggggcgtgtaaataaggatacgggaagcaatccacatggttaccttcccacccattatgagaaggttcagatgctccttagtgatcgcttccttggtttctacatggttcctgataatggtccatggaattacaacttcatgggggtgagacacgcatcagggatgaaatatggagtgaagctcgggactcctagggaatattaccacgaggaccatagaccaacccatttcttagagttcagcaatatggaggaagtggagacagctgctgagggagatcgagaggatacattctcttgagagataaaaatatttttgtttgagatatataagtggcaagtcctttaattttttaaacttgtcataatatgttgtatcatcta

SEQ ID NO: 248717 - DNA, 481 bp, Glycine max
tccggaattcccgggtcgacgcacgcgtccgcccacgcgtccgcccacgcgtccgcttgacaaatccacatcattgtgtctatttttcgaggttgtgaggaaggaaactcctgatgcaacaatgcagtccacaagcaatcaattttacttccaatttttgacgtattatcagaataacagtgggcaaatgagattacgggttacgaccctttcacgtagatgggttgctggaccagaaagtatacaggacttgattgctggatttgaccaagaagcagctgctatagtcatggcacgccaagtctcttttaaaatggaaacagaggctgaattcgatcctatcagatggttggacaaggcattgataaatttgtgttctcggtttggggaatttcaaaaagacactccatcttctttcagtttgtctcccaggttgtcaatattccctcaatttatgtttcatttacgacgctctcaaatt

SEQ ID NO: 248718 - DNA, 537 bp, Glycine max
tgatttgatgtgatagttgctgcgactcatagcactgccataccggtccggaattcccgggtcgacccacgcgtccgcgatcatcaagcctaatagagggctaatccttcacttgtttgttttgtggtgtattatgacattgtgcaccatgccttctctcttcgctagaaaccagaggttctcattggctactctcctgcttcttctggaactattgacaggaaaccttcgcatggcagatgctcaaattggtgtgtgttatggcatgctgggcaacaatctaccgtcagcaaacgatgttataggtctttatagatcaaataacataaagagaatgagactctatgatcctaatcaagctgctctagaagcacttagaaattctggcattgaactcattcttggggtgccaaactctgaccttcaaggccttgccaccaatcctgacacttctcgtcaatgggtgcaaaaaaacgtgttgaacttttggcctagtgtcaaaatcaagtacgtggcagttggaaatgaagtgagtcc

SEQ ID NO: 248719 - DNA, 344 bp, Glycine max
accggttctgaattcccgggtcgacgcacgcgtccgcccactcgtccgaaaaaaaaaaaataaaaaaaaaaaaaaaaaaaaaaaaaaaaaagagaaaagaaaaaaaaaaaaaaaaagaaaaaaaaaaaaaaaaaaaaaaaaataaaaaaaaaaaaatataaaaaaaaaaaaaaaaaaaaaaaaaaaaaaaaaaaaaggaatcttttaatatgaatcaaattttactataacctttaataaaaatttaaattttttaaaaattttaactaaaataaaataaattgatctttttttaaaaaatttaatatttgaaaaaactttaacttaacaaaataaaatttttt

SEQ ID NO: 248720 - DNA, 536 bp, Glycine max
ttgagtagccgtctgacgctgagccttcactcatcgactgccgtaccggttcggaattcccgggtcgacccacgcgtccgcaacttcgaagatgaccagctcgccaatatgaccaccgacgacgtcgtcagagcttctggtcttctcgacaacgagattcgcatcctcaaagaagagttgcagaggaccaatttggagttggaatcgtacaaggacaagatcaaggagaatcaggagaagattaagctcaataagcagttgccctacctcgttgggaacatcgttgagatattggaaatgaacccagaagacgaagctgaagaagatggtgccaatattgatcttgactcacaaaggaagggaaagtgtgttgtgctaaagacttctactcgacagacaatctttctacctgttgttgggcttgttgaccctgacaagttaaaacctggtgatctggttggtgttaacaaggatagttacttaatcttggataccttgccttctgagtatgattctagagttaaggccatggaagt

SEQ ID NO: 248721 - DNA, 533 bp, Glycine max
  unsure (1)..(533): unsure at all n locations
cgtagtagccgattgtngctgagtactgatctcatagccacgccgtaccggtccggaattcccgggtcgacccacgcgtccgggaggtgtctgcgagcgttaacgcaaaaaaacgacaccgtttctcttccgaagcgcatggtctctccgctcactcaccgtgcctccgtttcccaacgccaacgcttcttcccccgttttcaccgtacgcgcctctgtcttcgcgcaatggccccacctccgctatttctcttccgagaaaaaagacgaccacagcgacgaagacgatgatggcgatgaggattacgatgatgaagaagaggattatgttgatgacgacgacgatgatgacgtccctgtgtcgagagggaaaaaagtgtacactgcggaggagaaggaagcggaagccgcggcaattgggtacagagtagtgggtccccttcaaaaggacgaagatagcgtttttaagccttacgagcctgtttttgctgttgttcagattggttcgcaccagtttaaagtaagcaaccgag

SEQ ID NO: 248722 - DNA, 480 bp, Glycine max
accggttcggattcccggtggagccacgcgtccggccgtacatggcgtgcctggcccacacaatgactacactggtggcgaacaaggttgtggctgtgccagttgctgcgccgccggggcaatggatcggagccggagggtccatgatcgttgagtctgataagcaaaccggaaccgtacggaagcactacatagggatggtgactatgcttgacattgtggtccacattgctggtgataaccacttgagtggtgacgatgatgatatcaccaaagaccttgatcaaaggatgtctggccctgtctcctccatcattggccactcctttgaaggccttagcttgtggactctcaatcctaataccaggttatatatatatagtgttttgtcttttatattacttttcattgagagaatcaaacatgggaaatttattggtatgtgtgaaaataccagggattctttacatgacacaaata

SEQ ID NO: 248723 - DNA, 532 bp, Glycine max
  unsure (1)..(532): unsure at all n locations
ggttttggcttngtgttaatgagtgcatacgcatgccgtaccggtccggaattcccgggtggacgccacgcgttcgagcagggacaattacaacatctgaaccattgcaaccagtgcaactagtttacgaaacggataccgttgactacttgaactacttgtgttacattggacttaactcaaccacgataaaggtcatctctggaactgctcctgacaatttccattgccccaaggattcgagctctgatctcatatccagcatcaattacacttccatagcagtaaacttcactggcaaagcaaacgtggtcgtgagtagaaccatcacaaacgttggcgaagaagatgaaaccgtgtacttccctgttgttgaagctcctagtgaagtaattgtcacacgatttccatacaatcttgagtttacgagaagtattataaaataagctaccaaggtactttcacaccaaaggcctccttaaagaaacatacgtttggatctatcacttggaataacgggaaatatatggtg

SEQ ID NO: 248724 - DNA, 479 bp, Glycine max
gaattcccgggtcgacccacgcgtccgaatgttcaataattcacgactccttccgagatctctctctctcgcccacaatccaaccgtggcgagtacggggaatttagacgcggcgatagagcaattgctgaacgtggagaagcagatgaggctcgccggtgacgtggcgggtaccagaaaagcagccaccgatattttgcagctctgcttcgatgcacgagcctggaaaacactcaatgaccagattgtcgttttgtcaaaacgacgtggccagctcaagcaggctgtaacagctatggtgcaacaggctatgcaatatattgacgagacaccagatatcgaaactcgcatagaactcatcaaaacgttgaacagtgtgtctgcagggaagatatacgtggaaattgagagagctcgattgatcaaaaaacttgcaaaggataaggaagaacaaaggcttatagctgaaactgttgatt

SEQ ID NO: 248725 - DNA, 536 bp, Glycine max
aggttagcgctgagtgttcccacgatgactgcactgacgtaccggtccggaattcccgggtcgacccacgcgtccgataatttctattacatacattttgtagctaggatgagcaagttactactcattcgtgttgctgggttcgtggcaacctttgtcaccatggtgatgatgatggtgcccaaaaacgtgagtgcccaaaacataggtgatgacatcgtcacacaagacttcttcaacagcataatcagtcaggctgatgatggttgtgcagggaagaacttctactcacgagatgctttccttaatgctcacaattcctacaatgagtttggtaggcttggtaatcaggatgactccaagcgtgaggttgcagctgctttcgcccatttcacccatgaaacaggacatttttgctacatagaagagattaacggtgcatcaagggactactgtgacgagagcaacaccgagtacccatgtgcccctaacaaagcgtactatgggcgttgaccaatccaactatcatggaactt

SEQ ID NO: 248726 - DNA, 532 bp, Glycine max
gttagtatgccgtttcactagccaacactcatcgcactgctgtaccggttcggaattcccgggtcgacgcacgcgtccggcagaccgagctagctagctagcaagcaagcacagagatggaggcaaagcgaggcgcataccctcatgtgcttggcacgtgtttcactcttcctctgcgctctaaccctatccgctgctcacggaagcaccacggttcaagacatcgcgagaaagttgaaactcggggacaacgagcttctgcgcacggagaagaagttcaaggttttcatggagaattacgggaggagctactccacagaggaggagtatttgcgccgtttggggattttcgcccagaacatggtcagagcggcggagcatcaggcgctggaccccaccgtcgtccacggcgtcacgcagttctccgatctcaccgaggacgagtttgagaagctctacactggcgtcaatggcggcttcccgtcatcgaataatgccgccggcggtattgcgccgccgtttgaagtggacg

SEQ ID NO: 248727 - DNA, 538 bp, Glycine max
  unsure (1)..(538): unsure at all n locations
gctaggtgccgtatgtcgctggctagtctctcatagcactgctgtaccggtccggaattcccgggtcgacccacgcgtccgattttgtcgtagagggatccctctggtgtaggattgtgtgtatcttcggcgatggaagcgtgtttcggatcaagacactagtatatgcactcactgtgatcgggctattcctgctgcaaatattgacttgcattatgctcattgctctcggaagcttgaaaaatgcaaagtttgtggtgatatggttcccagaaaaaatgcggaggatcactatctaagcacccatgcaccggtttcttgttcattatgcagtgagacaatggagcgtgatattttagatatccataaaggtgaaaattgccctcaaaggattgtcacttgtcagttctgtgagtttccattgccagcaattgatctggccgagcatcaggaagtatgcgggaatcgaacagagctntgtcacctttgtaacaaatatgttagactgcgtgaaagattcagccatgaagctcgatgn

SEQ ID NO: 248728 - DNA, 533 bp, Glycine max
  unsure (1)..(533): unsure at all n locations
tgctattggtatgnctgttgctgcagctgacacgatngacataccggtccggaattcccgggtcgagccacgcgtccgagaagacgaacatggagatgtatcagatctggagcatgagaatagcgttgagagcgtgcgcggttgttctgctctggctatcggcctcagcagacgacgtcgttgtgctctctgaagataacttcgagaacgaagttggtcatgacagatgagctctcgttgagttctatgctccttggtgtggacactgcaaaaagcttgctccagaatatgaaaagcttggtagcagcttcaataaagccaaatctgttttaatcggcaaggttgactgtgatgagcacaagagtttgtgcagcaaatatggagtctctgggtacccaacaattcagtggtttccaaaaggatctcttgaacccaaaaagtatgaanggtcacgcactgctgattcactagctgagtttgtaaatacggaatgaggaacaaatgtgaagattgctacagcttcctccaatgag

SEQ ID NO: 248729 - DNA, 534 bp, Glycine max
  unsure (1)..(534): unsure at all n locations
agtatggttgagtgtaccacnctgcctgcatgacgtaccggttcggaattcccgggtcgacccacgcgtccgcccacgcgtacgttcttcttcttcttcttcttgttcttcttctctctggaattttccgtgactggtgtctgcatcgatggcggcgatcagtctccggaaggggaacacgctgctgccgtcggaggtgaaccgcgtgctgtacgttctgaaccttcccttcaacatcacgagcgaggagatgtacgacatcttccgcaagtactgcgccattcggcagatccgcatcggcaccaacaaggacactcgcggaacggccttcatcgtctacgaggacatctacgacgccaaaaccgacgtcgaccacctatacggcttcaacgtcgtcaaccgctacctcatcgatctctactaccagcatgcgaggatgagcatgaagttccatcagaagaagaacgtggacgagatcgcgcgcatgcangataagtacggcgtctncaccaaagataagtccatcaagtactt

SEQ ID NO: 248730 - DNA, 369 bp, Glycine max
gaattcccgggtcgacgcacgcgtccggttgcaagcaatcaaagtggagccacattgtgtttgagcaccctgccacttttgaaacagtcgctgtggatcggagaaagaaggaggatatacttaaagaccttgtgaagtttaagaagggaaaggattattatgcaaagataggtaaagcttggaagcgtggctatcttttgtacggtccttcggggactggtaagtctaccatgattgctgctattgctaatttcatgaactatgatgtgtatgatcttgagttaaccgcggttaatgacaacactgagcttaagaagctgttgattgaaactccgagtgagtctatcacggtgattgaagacattgatt

SEQ ID NO: 248731 - DNA, 541 bp, Glycine max
agtttgggtgcttattccatttcagctacgcactgacgtaccggtctcggaattcccgggtcgacccacgcgtccgaaaaaaaaaaaaaaaaaaaaaaaaaaaaattaaaaaaaaaaaaaaaaaaaaaaaaaaaaagaaaaggtaaaaaaaaaaaaaaaagaaaaaaataaaaaaaaaaaaaggggcggccgttttaaaggttccaagcttacgtacccttgcttgcaacgtcataccttttttatagtgtcacctaaattcaattaactggccgttgttttaaaacttcttaactggaaaaaccttggctttacccaacttaatctccttgcataaaatcccctttttcccagttggcgtaatatctaaaaggcccgtaccaatcgcctttccaaacaattgctcacccttaatggcaaatggaaccccccctttaacggcccattaatcccggcggttttgttggttactcccaattttaccttaaatttgccaggtccttaattccggtttttttgctttatttccttctttttcctg

SEQ ID NO: 248732 - DNA, 535 bp, Glycine max
agttagggtgccgtatgtcactggctagtctctcatcgtactgccgtaccggttcggaattcccgggtcgacccacgcgtccgcccacgcgtccgattccattagtaatgaaaaaaggggttgaggggatccgtatatgttggtcaggtcgattagaaggcgcagaaatagctagaactgaatgcggaaagtatggaaaaacatcttgtaatgtatttaaccagaaaatcgattatgcttctgcggaagtatctactcgttacggaatcttaggtgtcaaagtgtggatttcatatagtaaaaaaaaaaggggacgtgctatatccgaaacgtacgaaatttagtaaatatcgtaaaggcagatgtagtaagggttgcaaaccagacggaacaaaacttggttttggaagatatggcattcaaagttgtaaagctgggcgtctttcatatcgaagccattgaacagcgcgtcgggctataatcggacactttcatcgggctatgagcggacaatttccgaaaaatggtaggatat

SEQ ID NO: 248733 - DNA, 542 bp, Glycine max
  unsure (1)..(542): unsure at all n locations
gtagaatgaagaggcgtntgtcgctgaacctacactcgtagcactgccgtaccggtccggaattcccgggtcgacgcacgcgtccgcccacgcgtccgcccacgcgtccgcccacgcgtccgcaggctgcaaggtctttgggtccgtcnggaaattgtacttgcgatcataatgaagctgttgacagcattgtgtgtaccctacgttttggccaaaggtgtatttccagtgcttgggtatcccttggtaataaattctgccgtctatcggtttgcatggttgggatgcctctctttcagttttgtgtgcttctgtgccaagagattccatgtctggttcacaaatctccataattcaatacgcgatgaccggtatctgattggccggaggttgcataactttggagaacatgctgagaaagcaaatgtagcagaaacttctacaggggagcaggaagctattttactaggtacaggtttaaaccaacaagatcacgaagcagatgttggactacngttgaggcacgtaaatcaacaggtggg

SEQ ID NO: 248734 - DNA, 399 bp, Glycine max
ggaattcccgggtgcgcgcacgcgtccgtaaaaaggcttcatttacttcttactgtcaaggagtcggctatggatgttccatccaggttcgatgctatgaggcgtatctctttcttctctaattcattgcttatggatatgccacctgctcccaaagttctgaatatgatgtccttctctgtcttgacaccttactttaacgaacctgttcttttctccctaagtcatctgcgagagccaaatgaatatggagtctctatactcttttacttgcacaagatatttccaagataatggaaaaactttgttcaacggtttgataatataagtgaagagaaactcatagtatacaatgaagaagaacttcctttatgggcatcatacagaggccagacattt

SEQ ID NO: 248735 - DNA, 531 bp, Glycine max
  unsure (1)..(531): unsure at all n locations
gtatttgcgttgctgttaatgcactgacctcatggctataccggtccggaattcccgggtgcgagccacgcgtccgagaaccccccaacaaactgaagtttaacttccttggtaaagattctatcaagtatgagagatacagttgaggttgagcttcctgtttataatgcaattttgaagttccaaaaagataaaaagcctggtgatgatcttttcgatcagctggatacaagtaaattaaatgctcatctgaaggaactcatgcccggtctaacagcaaaagtcttccgtacattcaatgcatcgatcacattggatgttatgttgaataaggaaactaaagatggagaagttggggaaaagattgttgtttatcagcatgcaaataaacaggttgctatcatttgtaatcatcaacgcagtgtttcaaaatctcatactgcacaaatgtcaaagttaacttgaaaaaattgatgaacttcangctgttctgaaagaactgaaaacggacttatacagggcaaggaaagg
